United States Patent Application Publication US 2022/0162320 A1 - sequence listing, part 4

SEQ ID NO: 61089 - protein, 9 aa, Homo sapiens
  misc_feature: Table A; Target 61089; HLA-A*33:03; PAX7; ENSG00000009709; TAA
LPVETGQAY

SEQ ID NO: 61090 - protein, 9 aa, Homo sapiens
  misc_feature: Table A; Target 61090; HLA-A*68:01; PAX7; ENSG00000009709; TAA
LPVETGQAY

SEQ ID NO: 61091 - protein, 9 aa, Homo sapiens
  misc_feature: Table A; Target 61091; HLA-B*07:02; PAX7; ENSG00000009709; TAA
LPVETGQAY

SEQ ID NO: 61092 - protein, 9 aa, Homo sapiens
  misc_feature: Table A; Target 61092; HLA-B*08:01; PAX7; ENSG00000009709; TAA
LPVETGQAY

SEQ ID NO: 61093 - protein, 9 aa, Homo sapiens
  misc_feature: Table A; Target 61093; HLA-B*13:02; PAX7; ENSG00000009709; TAA
LPVETGQAY

SEQ ID NO: 61094 - protein, 9 aa, Homo sapiens
  misc_feature: Table A; Target 61094; HLA-B*15:01; PAX7; ENSG00000009709; TAA
LPVETGQAY

SEQ ID NO: 61095 - protein, 9 aa, Homo sapiens
  misc_feature: Table A; Target 61095; HLA-B*15:03; PAX7; ENSG00000009709; TAA
LPVETGQAY

SEQ ID NO: 61096 - protein, 9 aa, Homo sapiens
  misc_feature: Table A; Target 61096; HLA-B*18:01; PAX7; ENSG00000009709; TAA
LPVETGQAY

SEQ ID NO: 61097 - protein, 9 aa, Homo sapiens
  misc_feature: Table A; Target 61097; HLA-B*27:02; PAX7; ENSG00000009709; TAA
LPVETGQAY

SEQ ID NO: 61098 - protein, 9 aa, Homo sapiens
  misc_feature: Table A; Target 61098; HLA-B*27:05; PAX7; ENSG00000009709; TAA
LPVETGQAY

SEQ ID NO: 61099 - protein, 9 aa, Homo sapiens
  misc_feature: Table A; Target 61099; HLA-B*35:01; PAX7; ENSG00000009709; TAA
LPVETGQAY

SEQ ID NO: 61100 - protein, 9 aa, Homo sapiens
  misc_feature: Table A; Target 61100; HLA-B*35:03; PAX7; ENSG00000009709; TAA
LPVETGQAY

SEQ ID NO: 61101 - protein, 9 aa, Homo sapiens
  misc_feature: Table A; Target 61101; HLA-B*38:01; PAX7; ENSG00000009709; TAA
LPVETGQAY

SEQ ID NO: 61102 - protein, 9 aa, Homo sapiens
  misc_feature: Table A; Target 61102; HLA-B*39:01; PAX7; ENSG00000009709; TAA
LPVETGQAY

SEQ ID NO: 61103 - protein, 9 aa, Homo sapiens
  misc_feature: Table A; Target 61103; HLA-B*40:01; PAX7; ENSG00000009709; TAA
LPVETGQAY

SEQ ID NO: 61104 - protein, 9 aa, Homo sapiens
  misc_feature: Table A; Target 61104; HLA-B*40:02; PAX7; ENSG00000009709; TAA
LPVETGQAY

SEQ ID NO: 61105 - protein, 9 aa, Homo sapiens
  misc_feature: Table A; Target 61105; HLA-B*44:02; PAX7; ENSG00000009709; TAA
LPVETGQAY

SEQ ID NO: 61106 - protein, 9 aa, Homo sapiens
  misc_feature: Table A; Target 61106; HLA-B*44:03; PAX7; ENSG00000009709; TAA
LPVETGQAY

SEQ ID NO: 61107 - protein, 9 aa, Homo sapiens
  misc_feature: Table A; Target 61107; HLA-B*46:01; PAX7; ENSG00000009709; TAA
LPVETGQAY

SEQ ID NO: 61108 - protein, 9 aa, Homo sapiens
  misc_feature: Table A; Target 61108; HLA-B*51:01; PAX7; ENSG00000009709; TAA
LPVETGQAY

SEQ ID NO: 61109 - protein, 9 aa, Homo sapiens
  misc_feature: Table A; Target 61109; HLA-B*54:01; PAX7; ENSG00000009709; TAA
LPVETGQAY

SEQ ID NO: 61110 - protein, 9 aa, Homo sapiens
  misc_feature: Table A; Target 61110; HLA-B*55:01; PAX7; ENSG00000009709; TAA
LPVETGQAY

SEQ ID NO: 61111 - protein, 9 aa, Homo sapiens
  misc_feature: Table A; Target 61111; HLA-B*56:01; PAX7; ENSG00000009709; TAA
LPVETGQAY

SEQ ID NO: 61112 - protein, 9 aa, Homo sapiens
  misc_feature: Table A; Target 61112; HLA-B*57:01; PAX7; ENSG00000009709; TAA
LPVETGQAY

SEQ ID NO: 61113 - protein, 9 aa, Homo sapiens
  misc_feature: Table A; Target 61113; HLA-B*58:01; PAX7; ENSG00000009709; TAA
LPVETGQAY

SEQ ID NO: 61114 - protein, 9 aa, Homo sapiens
  misc_feature: Table A; Target 61114; HLA-C*01:02; PAX7; ENSG00000009709; TAA
LPVETGQAY

SEQ ID NO: 61115 - protein, 9 aa, Homo sapiens
  misc_feature: Table A; Target 61115; HLA-C*02:02; PAX7; ENSG00000009709; TAA
LPVETGQAY

SEQ ID NO: 61116 - protein, 9 aa, Homo sapiens
  misc_feature: Table A; Target 61116; HLA-C*03:03; PAX7; ENSG00000009709; TAA
LPVETGQAY

SEQ ID NO: 61117 - protein, 9 aa, Homo sapiens
  misc_feature: Table A; Target 61117; HLA-C*03:04; PAX7; ENSG00000009709; TAA
LPVETGQAY

SEQ ID NO: 61118 - protein, 9 aa, Homo sapiens
  misc_feature: Table A; Target 61118; HLA-C*04:01; PAX7; ENSG00000009709; TAA
LPVETGQAY

SEQ ID NO: 61119 - protein, 9 aa, Homo sapiens
  misc_feature: Table A; Target 61119; HLA-C*05:01; PAX7; ENSG00000009709; TAA
LPVETGQAY

SEQ ID NO: 61120 - protein, 9 aa, Homo sapiens
  misc_feature: Table A; Target 61120; HLA-C*06:02; PAX7; ENSG00000009709; TAA
LPVETGQAY

SEQ ID NO: 61121 - protein, 9 aa, Homo sapiens
  misc_feature: Table A; Target 61121; HLA-C*07:01; PAX7; ENSG00000009709; TAA
LPVETGQAY

SEQ ID NO: 61122 - protein, 9 aa, Homo sapiens
  misc_feature: Table A; Target 61122; HLA-C*07:02; PAX7; ENSG00000009709; TAA
LPVETGQAY

SEQ ID NO: 61123 - protein, 9 aa, Homo sapiens
  misc_feature: Table A; Target 61123; HLA-C*07:04; PAX7; ENSG00000009709; TAA
LPVETGQAY

SEQ ID NO: 61124 - protein, 9 aa, Homo sapiens
  misc_feature: Table A; Target 61124; HLA-C*07:06; PAX7; ENSG00000009709; TAA
LPVETGQAY

SEQ ID NO: 61125 - protein, 9 aa, Homo sapiens
  misc_feature: Table A; Target 61125; HLA-C*12:03; PAX7; ENSG00000009709; TAA
LPVETGQAY

SEQ ID NO: 61126 - protein, 9 aa, Homo sapiens
  misc_feature: Table A; Target 61126; HLA-C*14:02; PAX7; ENSG00000009709; TAA
LPVETGQAY

SEQ ID NO: 61127 - protein, 9 aa, Homo sapiens
  misc_feature: Table A; Target 61127; HLA-C*16:01; PAX7; ENSG00000009709; TAA
LPVETGQAY

SEQ ID NO: 61128 - protein, 9 aa, Homo sapiens
  misc_feature: Table A; Target 61128; HLA-C*16:02; PAX7; ENSG00000009709; TAA
LPVETGQAY

SEQ ID NO: 61129 - protein, 9 aa, Homo sapiens
  misc_feature: Table A; Target 61129; HLA-C*16:04; PAX7; ENSG00000009709; TAA
LPVETGQAY

SEQ ID NO: 61130 - protein, 8 aa, Homo sapiens
  misc_feature: Table A; Target 61130; HLA-B*51:01; PAX7; ENSG00000009709; TAA
LSPQVMSI

SEQ ID NO: 61131 - protein, 9 aa, Homo sapiens
  misc_feature: Table A; Target 61131; HLA-C*01:02; PAX7; ENSG00000009709; TAA
LSPQVMSIL

SEQ ID NO: 61132 - protein, 9 aa, Homo sapiens
  misc_feature: Table A; Target 61132; HLA-A*32:01; PAX7; ENSG00000009709; TAA
LVSSISRVL

SEQ ID NO: 61133 - protein, 9 aa, Homo sapiens
  misc_feature: Table A; Target 61133; HLA-A*68:02; PAX7; ENSG00000009709; TAA
LVSSISRVL

SEQ ID NO: 61134 - protein, 9 aa, Homo sapiens
  misc_feature: Table A; Target 61134; HLA-B*07:02; PAX7; ENSG00000009709; TAA
LVSSISRVL

SEQ ID NO: 61135 - protein, 9 aa, Homo sapiens
  misc_feature: Table A; Target 61135; HLA-B*27:05; PAX7; ENSG00000009709; TAA
LVSSISRVL

SEQ ID NO: 61136 - protein, 9 aa, Homo sapiens
  misc_feature: Table A; Target 61136; HLA-B*35:03; PAX7; ENSG00000009709; TAA
LVSSISRVL

SEQ ID NO: 61137 - protein, 9 aa, Homo sapiens
  misc_feature: Table A; Target 61137; HLA-B*58:01; PAX7; ENSG00000009709; TAA
LVSSISRVL

SEQ ID NO: 61138 - protein, 9 aa, Homo sapiens
  misc_feature: Table A; Target 61138; HLA-C*02:02; PAX7; ENSG00000009709; TAA
LVSSISRVL

SEQ ID NO: 61139 - protein, 9 aa, Homo sapiens
  misc_feature: Table A; Target 61139; HLA-C*03:03; PAX7; ENSG00000009709; TAA
LVSSISRVL

SEQ ID NO: 61140 - protein, 9 aa, Homo sapiens
  misc_feature: Table A; Target 61140; HLA-C*03:04; PAX7; ENSG00000009709; TAA
LVSSISRVL

SEQ ID NO: 61141 - protein, 9 aa, Homo sapiens
  misc_feature: Table A; Target 61141; HLA-C*06:02; PAX7; ENSG00000009709; TAA
LVSSISRVL

SEQ ID NO: 61142 - protein, 9 aa, Homo sapiens
  misc_feature: Table A; Target 61142; HLA-C*07:04; PAX7; ENSG00000009709; TAA
LVSSISRVL

SEQ ID NO: 61143 - protein, 9 aa, Homo sapiens
  misc_feature: Table A; Target 61143; HLA-C*12:03; PAX7; ENSG00000009709; TAA
LVSSISRVL

SEQ ID NO: 61144 - protein, 9 aa, Homo sapiens
  misc_feature: Table A; Target 61144; HLA-C*16:01; PAX7; ENSG00000009709; TAA
LVSSISRVL

SEQ ID NO: 61145 - protein, 9 aa, Homo sapiens
  misc_feature: Table A; Target 61145; HLA-C*16:02; PAX7; ENSG00000009709; TAA
LVSSISRVL

SEQ ID NO: 61146 - protein, 8 aa, Homo sapiens
  misc_feature: Table A; Target 61146; HLA-B*51:01; PAX7; ENSG00000009709; TAA
MAALPGTV

SEQ ID NO: 61147 - protein, 9 aa, Homo sapiens
  misc_feature: Table A; Target 61147; HLA-B*54:01; PAX7; ENSG00000009709; TAA
MAALPGTVP

SEQ ID NO: 61148 - protein, 9 aa, Homo sapiens
  misc_feature: Table A; Target 61148; HLA-C*03:04; PAX7; ENSG00000009709; TAA
MAALPGTVP

SEQ ID NO: 61149 - protein, 10 aa, Homo sapiens
  misc_feature: Table A; Target 61149; HLA-A*33:01; PAX7; ENSG00000009709; TAA
MAALPGTVPR

SEQ ID NO: 61150 - protein, 10 aa, Homo sapiens
  misc_feature: Table A; Target 61150; HLA-A*33:03; PAX7; ENSG00000009709; TAA
MAALPGTVPR

SEQ ID NO: 61151 - protein, 10 aa, Homo sapiens
  misc_feature: Table A; Target 61151; HLA-A*68:01; PAX7; ENSG00000009709; TAA
MAALPGTVPR

SEQ ID NO: 61152 - protein, 10 aa, Homo sapiens
  misc_feature: Table A; Target 61152; HLA-C*07:06; PAX7; ENSG00000009709; TAA
MAALPGTVPR

SEQ ID NO: 61153 - protein, 9 aa, Homo sapiens
  misc_feature: Table A; Target 61153; HLA-B*27:05; PAX7; ENSG00000009709; TAA
MHQGGLAAA

SEQ ID NO: 61154 - protein, 9 aa, Homo sapiens
  misc_feature: Table A; Target 61154; HLA-B*39:01; PAX7; ENSG00000009709; TAA
MHQGGLAAA

SEQ ID NO: 61155 - protein, 10 aa, Homo sapiens
  misc_feature: Table A; Target 61155; HLA-B*39:01; PAX7; ENSG00000009709; TAA
MHQGGLAAAA

SEQ ID NO: 61156 - protein, 10 aa, Homo sapiens
  misc_feature: Table A; Target 61156; HLA-B*15:03; PAX7; ENSG00000009709; TAA
MKLGEHSAVL

SEQ ID NO: 61157 - protein, 10 aa, Homo sapiens
  misc_feature: Table A; Target 61157; HLA-C*07:01; PAX7; ENSG00000009709; TAA
MKLGEHSAVL

SEQ ID NO: 61158 - protein, 10 aa, Homo sapiens
  misc_feature: Table A; Target 61158; HLA-A*29:02; PAX7; ENSG00000009709; TAA
MMRPAPGQNY

SEQ ID NO: 61159 - protein, 10 aa, Homo sapiens
  misc_feature: Table A; Target 61159; HLA-A*30:02; PAX7; ENSG00000009709; TAA
MMRPAPGQNY

SEQ ID NO: 61160 - protein, 10 aa, Homo sapiens
  misc_feature: Table A; Target 61160; HLA-A*31:01; PAX7; ENSG00000009709; TAA
MMRPAPGQNY

SEQ ID NO: 61161 - protein, 10 aa, Homo sapiens
  misc_feature: Table A; Target 61161; HLA-A*32:01; PAX7; ENSG00000009709; TAA
MMRPAPGQNY

SEQ ID NO: 61162 - protein, 10 aa, Homo sapiens
  misc_feature: Table A; Target 61162; HLA-B*15:01; PAX7; ENSG00000009709; TAA
MMRPAPGQNY

SEQ ID NO: 61163 - protein, 10 aa, Homo sapiens
  misc_feature: Table A; Target 61163; HLA-B*15:03; PAX7; ENSG00000009709; TAA
MMRPAPGQNY

SEQ ID NO: 61164 - protein, 10 aa, Homo sapiens
  misc_feature: Table A; Target 61164; HLA-B*46:01; PAX7; ENSG00000009709; TAA
MMRPAPGQNY

SEQ ID NO: 61165 - protein, 10 aa, Homo sapiens
  misc_feature: Table A; Target 61165; HLA-B*58:01; PAX7; ENSG00000009709; TAA
MMRPAPGQNY

SEQ ID NO: 61166 - protein, 10 aa, Homo sapiens
  misc_feature: Table A; Target 61166; HLA-C*14:02; PAX7; ENSG00000009709; TAA
MMRPAPGQNY

SEQ ID NO: 61167 - protein, 8 aa, Homo sapiens
  misc_feature: Table A; Target 61167; HLA-C*01:02; PAX7; ENSG00000009709; TAA
MNPVSNGL

SEQ ID NO: 61168 - protein, 9 aa, Homo sapiens
  misc_feature: Table A; Target 61168; HLA-B*07:02; PAX7; ENSG00000009709; TAA
MPTLPPYQL

SEQ ID NO: 61169 - protein, 9 aa, Homo sapiens
  misc_feature: Table A; Target 61169; HLA-B*35:01; PAX7; ENSG00000009709; TAA
MPTLPPYQL

SEQ ID NO: 61170 - protein, 9 aa, Homo sapiens
  misc_feature: Table A; Target 61170; HLA-B*35:03; PAX7; ENSG00000009709; TAA
MPTLPPYQL

SEQ ID NO: 61171 - protein, 9 aa, Homo sapiens
  misc_feature: Table A; Target 61171; HLA-B*54:01; PAX7; ENSG00000009709; TAA
MPTLPPYQL

SEQ ID NO: 61172 - protein, 9 aa, Homo sapiens
  misc_feature: Table A; Target 61172; HLA-B*55:01; PAX7; ENSG00000009709; TAA
MPTLPPYQL

SEQ ID NO: 61173 - protein, 9 aa, Homo sapiens
  misc_feature: Table A; Target 61173; HLA-B*56:01; PAX7; ENSG00000009709; TAA
MPTLPPYQL

SEQ ID NO: 61174 - protein, 9 aa, Homo sapiens
  misc_feature: Table A; Target 61174; HLA-B*07:02; PAX7; ENSG00000009709; TAA
MRPAPGQNY

SEQ ID NO: 61175 - protein, 9 aa, Homo sapiens
  misc_feature: Table A; Target 61175; HLA-B*15:03; PAX7; ENSG00000009709; TAA
MRPAPGQNY

SEQ ID NO: 61176 - protein, 9 aa, Homo sapiens
  misc_feature: Table A; Target 61176; HLA-B*27:05; PAX7; ENSG00000009709; TAA
MRPAPGQNY

SEQ ID NO: 61177 - protein, 9 aa, Homo sapiens
  misc_feature: Table A; Target 61177; HLA-B*39:01; PAX7; ENSG00000009709; TAA
MRPAPGQNY

SEQ ID NO: 61178 - protein, 9 aa, Homo sapiens
  misc_feature: Table A; Target 61178; HLA-C*01:02; PAX7; ENSG00000009709; TAA
MRPAPGQNY

SEQ ID NO: 61179 - protein, 9 aa, Homo sapiens
  misc_feature: Table A; Target 61179; HLA-C*06:02; PAX7; ENSG00000009709; TAA
MRPAPGQNY

SEQ ID NO: 61180 - protein, 9 aa, Homo sapiens
  misc_feature: Table A; Target 61180; HLA-C*07:01; PAX7; ENSG00000009709; TAA
MRPAPGQNY

SEQ ID NO: 61181 - protein, 9 aa, Homo sapiens
  misc_feature: Table A; Target 61181; HLA-C*07:04; PAX7; ENSG00000009709; TAA
MRPAPGQNY

SEQ ID NO: 61182 - protein, 9 aa, Homo sapiens
  misc_feature: Table A; Target 61182; HLA-C*14:02; PAX7; ENSG00000009709; TAA
MRPAPGQNY

SEQ ID NO: 61183 - protein, 9 aa, Homo sapiens
  misc_feature: Table A; Target 61183; HLA-C*16:01; PAX7; ENSG00000009709; TAA
MRPAPGQNY

SEQ ID NO: 61184 - protein, 9 aa, Homo sapiens
  misc_feature: Table A; Target 61184; HLA-C*16:04; PAX7; ENSG00000009709; TAA
MRPAPGQNY

SEQ ID NO: 61185 - protein, 9 aa, Homo sapiens
  misc_feature: Table A; Target 61185; HLA-B*54:01; PAX7; ENSG00000009709; TAA
MSILGNPSA

SEQ ID NO: 61186 - protein, 10 aa, Homo sapiens
  misc_feature: Table A; Target 61186; HLA-B*27:05; PAX7; ENSG00000009709; TAA
NHMNPVSNGL

SEQ ID NO: 61187 - protein, 10 aa, Homo sapiens
  misc_feature: Table A; Target 61187; HLA-B*38:01; PAX7; ENSG00000009709; TAA
NHMNPVSNGL

SEQ ID NO: 61188 - protein, 10 aa, Homo sapiens
  misc_feature: Table A; Target 61188; HLA-B*39:01; PAX7; ENSG00000009709; TAA
NHMNPVSNGL

SEQ ID NO: 61189 - protein, 9 aa, Homo sapiens
  misc_feature: Table A; Target 61189; HLA-B*07:02; PAX7; ENSG00000009709; TAA
NPAAPSNHM

SEQ ID NO: 61190 - protein, 9 aa, Homo sapiens
  misc_feature: Table A; Target 61190; HLA-B*35:01; PAX7; ENSG00000009709; TAA
NPAAPSNHM

SEQ ID NO: 61191 - protein, 9 aa, Homo sapiens
  misc_feature: Table A; Target 61191; HLA-B*35:03; PAX7; ENSG00000009709; TAA
NPAAPSNHM

SEQ ID NO: 61192 - protein, 9 aa, Homo sapiens
  misc_feature: Table A; Target 61192; HLA-B*51:01; PAX7; ENSG00000009709; TAA
NPAAPSNHM

SEQ ID NO: 61193 - protein, 9 aa, Homo sapiens
  misc_feature: Table A; Target 61193; HLA-B*55:01; PAX7; ENSG00000009709; TAA
NPAAPSNHM

SEQ ID NO: 61194 - protein, 9 aa, Homo sapiens
  misc_feature: Table A; Target 61194; HLA-B*56:01; PAX7; ENSG00000009709; TAA
NPAAPSNHM

SEQ ID NO: 61195 - protein, 9 aa, Homo sapiens
  misc_feature: Table A; Target 61195; HLA-C*03:03; PAX7; ENSG00000009709; TAA
NPAAPSNHM

SEQ ID NO: 61196 - protein, 9 aa, Homo sapiens
  misc_feature: Table A; Target 61196; HLA-C*07:02; PAX7; ENSG00000009709; TAA
NPAAPSNHM

SEQ ID NO: 61197 - protein, 9 aa, Homo sapiens
  misc_feature: Table A; Target 61197; HLA-C*07:06; PAX7; ENSG00000009709; TAA
NPAAPSNHM

SEQ ID NO: 61198 - protein, 11 aa, Homo sapiens
  misc_feature: Table A; Target 61198; HLA-B*54:01; PAX7; ENSG00000009709; TAA
NPSAVPPQPQA

SEQ ID NO: 61199 - protein, 11 aa, Homo sapiens
  misc_feature: Table A; Target 61199; HLA-B*56:01; PAX7; ENSG00000009709; TAA
NPSAVPPQPQA

SEQ ID NO: 61200 - protein, 9 aa, Homo sapiens
  misc_feature: Table A; Target 61200; HLA-B*54:01; PAX7; ENSG00000009709; TAA
NPVSNGLSP

SEQ ID NO: 61201 - protein, 9 aa, Homo sapiens
  misc_feature: Table A; Target 61201; HLA-B*56:01; PAX7; ENSG00000009709; TAA
NPVSNGLSP

SEQ ID NO: 61202 - protein, 11 aa, Homo sapiens
  misc_feature: Table A; Target 61202; HLA-B*56:01; PAX7; ENSG00000009709; TAA
NPVSNGLSPQV

SEQ ID NO: 61203 - protein, 9 aa, Homo sapiens
  misc_feature: Table A; Target 61203; HLA-A*24:02; PAX7; ENSG00000009709; TAA
NQLAAFNHL

SEQ ID NO: 61204 - protein, 9 aa, Homo sapiens
  misc_feature: Table A; Target 61204; HLA-B*38:01; PAX7; ENSG00000009709; TAA
NQLAAFNHL

SEQ ID NO: 61205 - protein, 8 aa, Homo sapiens
  misc_feature: Table A; Target 61205; HLA-B*38:01; PAX7; ENSG00000009709; TAA
NQLGGVFI

SEQ ID NO: 61206 - protein, 8 aa, Homo sapiens
  misc_feature: Table A; Target 61206; HLA-C*07:06; PAX7; ENSG00000009709; TAA
NVSLSTQR

SEQ ID NO: 61207 - protein, 9 aa, Homo sapiens
  misc_feature: Table A; Target 61207; HLA-A*33:01; PAX7; ENSG00000009709; TAA
NVSLSTQRR

SEQ ID NO: 61208 - protein, 9 aa, Homo sapiens
  misc_feature: Table A; Target 61208; HLA-A*33:03; PAX7; ENSG00000009709; TAA
NVSLSTQRR

SEQ ID NO: 61209 - protein, 9 aa, Homo sapiens
  misc_feature: Table A; Target 61209; HLA-A*68:01; PAX7; ENSG00000009709; TAA
NVSLSTQRR

SEQ ID NO: 61210 - protein, 9 aa, Homo sapiens
  misc_feature: Table A; Target 61210; HLA-A*24:02; PAX7; ENSG00000009709; TAA
NYPRTGFPL

SEQ ID NO: 61211 - protein, 9 aa, Homo sapiens
  misc_feature: Table A; Target 61211; HLA-C*01:02; PAX7; ENSG00000009709; TAA
NYPRTGFPL

SEQ ID NO: 61212 - protein, 8 aa, Homo sapiens
  misc_feature: Table A; Target 61212; HLA-C*16:02; PAX7; ENSG00000009709; TAA
PAAPSNHM

SEQ ID NO: 61213 - protein, 9 aa, Homo sapiens
  misc_feature: Table A; Target 61213; HLA-A*68:01; PAX7; ENSG00000009709; TAA
PAPGQNYPR

SEQ ID NO: 61214 - protein, 10 aa, Homo sapiens
  misc_feature: Table A; Target 61214; HLA-B*07:02; PAX7; ENSG00000009709; TAA
PDSTYPTTTI

SEQ ID NO: 61215 - protein, 9 aa, Homo sapiens
  misc_feature: Table A; Target 61215; HLA-B*15:01; PAX7; ENSG00000009709; TAA
PQPLPPSTM

SEQ ID NO: 61216 - protein, 9 aa, Homo sapiens
  misc_feature: Table A; Target 61216; HLA-B*15:03; PAX7; ENSG00000009709; TAA
PQPLPPSTM

SEQ ID NO: 61217 - protein, 9 aa, Homo sapiens
  misc_feature: Table A; Target 61217; HLA-C*07:02; PAX7; ENSG00000009709; TAA
PQPLPPSTM

SEQ ID NO: 61218 - protein, 8 aa, Homo sapiens
  misc_feature: Table A; Target 61218; HLA-A*23:01; PAX7; ENSG00000009709; TAA
PTLPPYQL

SEQ ID NO: 61219 - protein, 8 aa, Homo sapiens
  misc_feature: Table A; Target 61219; HLA-B*15:01; PAX7; ENSG00000009709; TAA
PTYSTTGY

SEQ ID NO: 61220 - protein, 10 aa, Homo sapiens
  misc_feature: Table A; Target 61220; HLA-A*26:01; PAX7; ENSG00000009709; TAA
PVAGYQYGQY

SEQ ID NO: 61221 - protein, 8 aa, Homo sapiens
  misc_feature: Table A; Target 61221; HLA-A*01:01; PAX7; ENSG00000009709; TAA
PVETGQAY

SEQ ID NO: 61222 - protein, 8 aa, Homo sapiens
  misc_feature: Table A; Target 61222; HLA-B*15:01; PAX7; ENSG00000009709; TAA
PVETGQAY

SEQ ID NO: 61223 - protein, 8 aa, Homo sapiens
  misc_feature: Table A; Target 61223; HLA-C*01:02; PAX7; ENSG00000009709; TAA
PVETGQAY

SEQ ID NO: 61224 - protein, 8 aa, Homo sapiens
  misc_feature: Table A; Target 61224; HLA-C*04:01; PAX7; ENSG00000009709; TAA
PVETGQAY

SEQ ID NO: 61225 - protein, 8 aa, Homo sapiens
  misc_feature: Table A; Target 61225; HLA-C*05:01; PAX7; ENSG00000009709; TAA
PVETGQAY

SEQ ID NO: 61226 - protein, 8 aa, Homo sapiens
  misc_feature: Table A; Target 61226; HLA-C*06:02; PAX7; ENSG00000009709; TAA
PVETGQAY

SEQ ID NO: 61227 - protein, 8 aa, Homo sapiens
  misc_feature: Table A; Target 61227; HLA-C*07:01; PAX7; ENSG00000009709; TAA
PVETGQAY

SEQ ID NO: 61228 - protein, 8 aa, Homo sapiens
  misc_feature: Table A; Target 61228; HLA-C*07:02; PAX7; ENSG00000009709; TAA
PVETGQAY

SEQ ID NO: 61229 - protein, 8 aa, Homo sapiens
  misc_feature: Table A; Target 61229; HLA-C*07:04; PAX7; ENSG00000009709; TAA
PVETGQAY

SEQ ID NO: 61230 - protein, 8 aa, Homo sapiens
  misc_feature: Table A; Target 61230; HLA-C*12:03; PAX7; ENSG00000009709; TAA
PVETGQAY

SEQ ID NO: 61231 - protein, 8 aa, Homo sapiens
  misc_feature: Table A; Target 61231; HLA-C*14:02; PAX7; ENSG00000009709; TAA
PVETGQAY

SEQ ID NO: 61232 - protein, 8 aa, Homo sapiens
  misc_feature: Table A; Target 61232; HLA-C*16:02; PAX7; ENSG00000009709; TAA
PVETGQAY

SEQ ID NO: 61233 - protein, 9 aa, Homo sapiens
  misc_feature: Table A; Target 61233; HLA-A*30:02; PAX7; ENSG00000009709; TAA
PYQLPDSTY

SEQ ID NO: 61234 - protein, 9 aa, Homo sapiens
  misc_feature: Table A; Target 61234; HLA-C*14:02; PAX7; ENSG00000009709; TAA
PYQLPDSTY

SEQ ID NO: 61235 - protein, 9 aa, Homo sapiens
  misc_feature: Table A; Target 61235; HLA-C*05:01; PAX7; ENSG00000009709; TAA
QADFSISPL

SEQ ID NO: 61236 - protein, 9 aa, Homo sapiens
  misc_feature: Table A; Target 61236; HLA-B*54:01; PAX7; ENSG00000009709; TAA
QAGANQLAA

SEQ ID NO: 61237 - protein, 9 aa, Homo sapiens
  misc_feature: Table A; Target 61237; HLA-B*56:01; PAX7; ENSG00000009709; TAA
QAGANQLAA

SEQ ID NO: 61238 - protein, 8 aa, Homo sapiens
  misc_feature: Table A; Target 61238; HLA-B*15:03; PAX7; ENSG00000009709; TAA
QAYCPPTY

SEQ ID NO: 61239 - protein, 8 aa, Homo sapiens
  misc_feature: Table A; Target 61239; HLA-B*39:01; PAX7; ENSG00000009709; TAA
QAYCPPTY

SEQ ID NO: 61240 - protein, 8 aa, Homo sapiens
  misc_feature: Table A; Target 61240; HLA-B*51:01; PAX7; ENSG00000009709; TAA
QAYCPPTY

SEQ ID NO: 61241 - protein, 8 aa, Homo sapiens
  misc_feature: Table A; Target 61241; HLA-B*58:01; PAX7; ENSG00000009709; TAA
QAYCPPTY

SEQ ID NO: 61242 - protein, 8 aa, Homo sapiens
  misc_feature: Table A; Target 61242; HLA-C*07:01; PAX7; ENSG00000009709; TAA
QAYCPPTY

SEQ ID NO: 61243 - protein, 8 aa, Homo sapiens
  misc_feature: Table A; Target 61243; HLA-C*12:03; PAX7; ENSG00000009709; TAA
QAYCPPTY

SEQ ID NO: 61244 - protein, 9 aa, Homo sapiens
  misc_feature: Table A; Target 61244; HLA-A*33:03; PAX7; ENSG00000009709; TAA
QDGGSTVHR

SEQ ID NO: 61245 - protein, 9 aa, Homo sapiens
  misc_feature: Table A; Target 61245; HLA-A*68:01; PAX7; ENSG00000009709; TAA
QDGGSTVHR

SEQ ID NO: 61246 - protein, 11 aa, Homo sapiens
  misc_feature: Table A; Target 61246; HLA-B*44:02; PAX7; ENSG00000009709; TAA
QETGSIRPGAI

SEQ ID NO: 61247 - protein, 9 aa, Homo sapiens
  misc_feature: Table A; Target 61247; HLA-A*02:01; PAX7; ENSG00000009709; TAA
QLAAFNHLL

SEQ ID NO: 61248 - protein, 9 aa, Homo sapiens
  misc_feature: Table A; Target 61248; HLA-A*02:03; PAX7; ENSG00000009709; TAA
QLAAFNHLL

SEQ ID NO: 61249 - protein, 9 aa, Homo sapiens
  misc_feature: Table A; Target 61249; HLA-A*02:04; PAX7; ENSG00000009709; TAA
QLAAFNHLL

SEQ ID NO: 61250 - protein, 9 aa, Homo sapiens
  misc_feature: Table A; Target 61250; HLA-A*02:07; PAX7; ENSG00000009709; TAA
QLAAFNHLL

SEQ ID NO: 61251 - protein, 9 aa, Homo sapiens
  misc_feature: Table A; Target 61251; HLA-A*24:02; PAX7; ENSG00000009709; TAA
QLAAFNHLL

SEQ ID NO: 61252 - protein, 9 aa, Homo sapiens
  misc_feature: Table A; Target 61252; HLA-A*68:02; PAX7; ENSG00000009709; TAA
QLAAFNHLL

SEQ ID NO: 61253 - protein, 9 aa, Homo sapiens
  misc_feature: Table A; Target 61253; HLA-B*13:02; PAX7; ENSG00000009709; TAA
QLAAFNHLL

SEQ ID NO: 61254 - protein, 9 aa, Homo sapiens
  misc_feature: Table A; Target 61254; HLA-B*38:01; PAX7; ENSG00000009709; TAA
QLAAFNHLL

SEQ ID NO: 61255 - protein, 9 aa, Homo sapiens
  misc_feature: Table A; Target 61255; HLA-B*55:01; PAX7; ENSG00000009709; TAA
QLAAFNHLL

SEQ ID NO: 61256 - protein, 9 aa, Homo sapiens
  misc_feature: Table A; Target 61256; HLA-B*44:02; PAX7; ENSG00000009709; TAA
QLEELEKAF

SEQ ID NO: 61257 - protein, 9 aa, Homo sapiens
  misc_feature: Table A; Target 61257; HLA-B*44:03; PAX7; ENSG00000009709; TAA
QLEELEKAF

SEQ ID NO: 61258 - protein, 8 aa, Homo sapiens
  misc_feature: Table A; Target 61258; HLA-B*08:01; PAX7; ENSG00000009709; TAA
QNYPRTGF

SEQ ID NO: 61259 - protein, 8 aa, Homo sapiens
  misc_feature: Table A; Target 61259; HLA-B*07:02; PAX7; ENSG00000009709; TAA
QPLPPSTM

SEQ ID NO: 61260 - protein, 8 aa, Homo sapiens
  misc_feature: Table A; Target 61260; HLA-B*35:01; PAX7; ENSG00000009709; TAA
QPLPPSTM

SEQ ID NO: 61261 - protein, 8 aa, Homo sapiens
  misc_feature: Table A; Target 61261; HLA-B*35:03; PAX7; ENSG00000009709; TAA
QPLPPSTM

SEQ ID NO: 61262 - protein, 11 aa, Homo sapiens
  misc_feature: Table A; Target 61262; HLA-B*56:01; PAX7; ENSG00000009709; TAA
QPLPPSTMHQG

SEQ ID NO: 61263 - protein, 9 aa, Homo sapiens
  misc_feature: Table A; Target 61263; HLA-B*27:05; PAX7; ENSG00000009709; TAA
QRTKLTEAR

SEQ ID NO: 61264 - protein, 9 aa, Homo sapiens
  misc_feature: Table A; Target 61264; HLA-A*01:01; PAX7; ENSG00000009709; TAA
QTAVDYLAK

SEQ ID NO: 61265 - protein, 9 aa, Homo sapiens
  misc_feature: Table A; Target 61265; HLA-A*03:01; PAX7; ENSG00000009709; TAA
QTAVDYLAK

SEQ ID NO: 61266 - protein, 9 aa, Homo sapiens
  misc_feature: Table A; Target 61266; HLA-A*03:02; PAX7; ENSG00000009709; TAA
QTAVDYLAK

SEQ ID NO: 61267 - protein, 9 aa, Homo sapiens
  misc_feature: Table A; Target 61267; HLA-A*11:01; PAX7; ENSG00000009709; TAA
QTAVDYLAK

SEQ ID NO: 61268 - protein, 9 aa, Homo sapiens
  misc_feature: Table A; Target 61268; HLA-A*68:01; PAX7; ENSG00000009709; TAA
QTAVDYLAK

SEQ ID NO: 61269 - protein, 9 aa, Homo sapiens
  misc_feature: Table A; Target 61269; HLA-C*07:06; PAX7; ENSG00000009709; TAA
QTAVDYLAK

SEQ ID NO: 61270 - protein, 9 aa, Homo sapiens
  misc_feature: Table A; Target 61270; HLA-A*03:01; PAX7; ENSG00000009709; TAA
QVATPDVEK

SEQ ID NO: 61271 - protein, 9 aa, Homo sapiens
  misc_feature: Table A; Target 61271; HLA-A*03:02; PAX7; ENSG00000009709; TAA
QVATPDVEK

SEQ ID NO: 61272 - protein, 9 aa, Homo sapiens
  misc_feature: Table A; Target 61272; HLA-A*11:01; PAX7; ENSG00000009709; TAA
QVATPDVEK

SEQ ID NO: 61273 - protein, 9 aa, Homo sapiens
  misc_feature: Table A; Target 61273; HLA-A*68:01; PAX7; ENSG00000009709; TAA
QVATPDVEK

SEQ ID NO: 61274 - protein, 9 aa, Homo sapiens
  misc_feature: Table A; Target 61274; HLA-C*07:06; PAX7; ENSG00000009709; TAA
QVATPDVEK

SEQ ID NO: 61275 - protein, 10 aa, Homo sapiens
  misc_feature: Table A; Target 61275; HLA-A*03:02; PAX7; ENSG00000009709; TAA
QVATPDVEKK

SEQ ID NO: 61276 - protein, 10 aa, Homo sapiens
  misc_feature: Table A; Target 61276; HLA-A*11:01; PAX7; ENSG00000009709; TAA
QVATPDVEKK

SEQ ID NO: 61277 - protein, 10 aa, Homo sapiens
  misc_feature: Table A; Target 61277; HLA-A*68:01; PAX7; ENSG00000009709; TAA
QVATPDVEKK

SEQ ID NO: 61278 - protein, 11 aa, Homo sapiens
  misc_feature: Table A; Target 61278; HLA-B*54:01; PAX7; ENSG00000009709; TAA
QVMSILGNPSA

SEQ ID NO: 61279 - protein, 11 aa, Homo sapiens
  misc_feature: Table A; Target 61279; HLA-B*56:01; PAX7; ENSG00000009709; TAA
QVMSILGNPSA

SEQ ID NO: 61280 - protein, 9 aa, Homo sapiens
  misc_feature: Table A; Target 61280; HLA-A*29:02; PAX7; ENSG00000009709; TAA
QYGQTAVDY

SEQ ID NO: 61281 - protein, 9 aa, Homo sapiens
  misc_feature: Table A; Target 61281; HLA-A*30:02; PAX7; ENSG00000009709; TAA
QYGQTAVDY

SEQ ID NO: 61282 - protein, 9 aa, Homo sapiens
  misc_feature: Table A; Target 61282; HLA-C*04:01; PAX7; ENSG00000009709; TAA
QYGQTAVDY

SEQ ID NO: 61283 - protein, 9 aa, Homo sapiens
  misc_feature: Table A; Target 61283; HLA-C*14:02; PAX7; ENSG00000009709; TAA
QYGQTAVDY

SEQ ID NO: 61284 - protein, 10 aa, Homo sapiens
  misc_feature: Table A; Target 61284; HLA-C*07:02; PAX7; ENSG00000009709; TAA
QYGQTAVDYL

SEQ ID NO: 61285 - protein, 9 aa, Homo sapiens
  misc_feature: Table A; Target 61285; HLA-C*14:02; PAX7; ENSG00000009709; TAA
QYGQYGQTA

SEQ ID NO: 61286 - protein, 10 aa, Homo sapiens
  misc_feature: Table A; Target 61286; HLA-B*40:01; PAX7; ENSG00000009709; TAA
REELAQRTKL

SEQ ID NO: 61287 - protein, 11 aa, Homo sapiens
  misc_feature: Table A; Target 61287; HLA-B*38:01; PAX7; ENSG00000009709; TAA
RHSFSSYSDSF

SEQ ID NO: 61288 - protein, 8 aa, Homo sapiens
  misc_feature: Table A; Target 61288; HLA-C*05:01; PAX7; ENSG00000009709; TAA
RLDEGSDV

SEQ ID NO: 61289 - protein, 11 aa, Homo sapiens
  misc_feature: Table A; Target 61289; HLA-A*30:02; PAX7; ENSG00000009709; TAA
RMMRPAPGQNY

SEQ ID NO: 61290 - protein, 11 aa, Homo sapiens
  misc_feature: Table A; Target 61290; HLA-B*15:01; PAX7; ENSG00000009709; TAA
RMMRPAPGQNY

SEQ ID NO: 61291 - protein, 8 aa, Homo sapiens
  misc_feature: Table A; Target 61291; HLA-A*30:02; PAX7; ENSG00000009709; TAA
RPAPGQNY

SEQ ID NO: 61292 - protein, 8 aa, Homo sapiens
  misc_feature: Table A; Target 61292; HLA-B*07:02; PAX7; ENSG00000009709; TAA
RPAPGQNY

SEQ ID NO: 61293 - protein, 9 aa, Homo sapiens
  misc_feature: Table A; Target 61293; HLA-B*55:01; PAX7; ENSG00000009709; TAA
RPAPGQNYP

SEQ ID NO: 61294 - protein, 9 aa, Homo sapiens
  misc_feature: Table A; Target 61294; HLA-B*56:01; PAX7; ENSG00000009709; TAA
RPAPGQNYP

SEQ ID NO: 61295 - protein, 10 aa, Homo sapiens
  misc_feature: Table A; Target 61295; HLA-A*31:01; PAX7; ENSG00000009709; TAA
RPAPGQNYPR

SEQ ID NO: 61296 - protein, 10 aa, Homo sapiens
  misc_feature: Table A; Target 61296; HLA-A*68:01; PAX7; ENSG00000009709; TAA
RPAPGQNYPR

SEQ ID NO: 61297 - protein, 10 aa, Homo sapiens
  misc_feature: Table A; Target 61297; HLA-B*07:02; PAX7; ENSG00000009709; TAA
RPAPGQNYPR

SEQ ID NO: 61298 - protein, 10 aa, Homo sapiens
  misc_feature: Table A; Target 61298; HLA-B*56:01; PAX7; ENSG00000009709; TAA
RPAPGQNYPR

SEQ ID NO: 61299 - protein, 10 aa, Homo sapiens
  misc_feature: Table A; Target 61299; HLA-C*07:06; PAX7; ENSG00000009709; TAA
RPAPGQNYPR

SEQ ID NO: 61300 - protein, 9 aa, Homo sapiens
  misc_feature: Table A; Target 61300; HLA-B*55:01; PAX7; ENSG00000009709; TAA
RPQPLPPST

SEQ ID NO: 61301 - protein, 10 aa, Homo sapiens
  misc_feature: Table A; Target 61301; HLA-B*07:02; PAX7; ENSG00000009709; TAA
RPQPLPPSTM

SEQ ID NO: 61302 - protein, 10 aa, Homo sapiens
  misc_feature: Table A; Target 61302; HLA-B*35:01; PAX7; ENSG00000009709; TAA
RPQPLPPSTM

SEQ ID NO: 61303 - protein, 10 aa, Homo sapiens
  misc_feature: Table A; Target 61303; HLA-B*35:03; PAX7; ENSG00000009709; TAA
RPQPLPPSTM

SEQ ID NO: 61304 - protein, 10 aa, Homo sapiens
  misc_feature: Table A; Target 61304; HLA-B*55:01; PAX7; ENSG00000009709; TAA
RPQPLPPSTM

SEQ ID NO: 61305 - protein, 10 aa, Homo sapiens
  misc_feature: Table A; Target 61305; HLA-B*56:01; PAX7; ENSG00000009709; TAA
RPQPLPPSTM

SEQ ID NO: 61306 - protein, 10 aa, Homo sapiens
  misc_feature: Table A; Target 61306; HLA-C*07:02; PAX7; ENSG00000009709; TAA
RPQPLPPSTM

SEQ ID NO: 61307 - protein, 8 aa, Homo sapiens
  misc_feature: Table A; Target 61307; HLA-B*13:02; PAX7; ENSG00000009709; TAA
RQVATPDV

SEQ ID NO: 61308 - protein, 10 aa, Homo sapiens
  misc_feature: Table A; Target 61308; HLA-A*03:02; PAX7; ENSG00000009709; TAA
RQVATPDVEK

SEQ ID NO: 61309 - protein, 10 aa, Homo sapiens
  misc_feature: Table A; Target 61309; HLA-A*11:01; PAX7; ENSG00000009709; TAA
RQVATPDVEK

SEQ ID NO: 61310 - protein, 9 aa, Homo sapiens
  misc_feature: Table A; Target 61310; HLA-A*33:01; PAX7; ENSG00000009709; TAA
RVQVWFSNR

SEQ ID NO: 61311 - protein, 9 aa, Homo sapiens
  misc_feature: Table A; Target 61311; HLA-B*35:03; PAX7; ENSG00000009709; TAA
SATSISASC

SEQ ID NO: 61312 - protein, 9 aa, Homo sapiens
  misc_feature: Table A; Target 61312; HLA-B*54:01; PAX7; ENSG00000009709; TAA
SATSISASC

SEQ ID NO: 61313 - protein, 9 aa, Homo sapiens
  misc_feature: Table A; Target 61313; HLA-B*56:01; PAX7; ENSG00000009709; TAA
SATSISASC

SEQ ID NO: 61314 - protein, 9 aa, Homo sapiens
  misc_feature: Table A; Target 61314; HLA-C*02:02; PAX7; ENSG00000009709; TAA
SATSISASC

SEQ ID NO: 61315 - protein, 9 aa, Homo sapiens
  misc_feature: Table A; Target 61315; HLA-C*03:03; PAX7; ENSG00000009709; TAA
SATSISASC

SEQ ID NO: 61316 - protein, 9 aa, Homo sapiens
  misc_feature: Table A; Target 61316; HLA-C*03:04; PAX7; ENSG00000009709; TAA
SATSISASC

SEQ ID NO: 61317 - protein, 9 aa, Homo sapiens
  misc_feature: Table A; Target 61317; HLA-C*12:03; PAX7; ENSG00000009709; TAA
SATSISASC

SEQ ID NO: 61318 - protein, 9 aa, Homo sapiens
  misc_feature: Table A; Target 61318; HLA-C*16:01; PAX7; ENSG00000009709; TAA
SATSISASC

SEQ ID NO: 61319 - protein, 9 aa, Homo sapiens
  misc_feature: Table A; Target 61319; HLA-C*16:02; PAX7; ENSG00000009709; TAA
SATSISASC

SEQ ID NO: 61320 - protein, 9 aa, Homo sapiens
  misc_feature: Table A; Target 61320; HLA-C*16:04; PAX7; ENSG00000009709; TAA
SATSISASC

SEQ ID NO: 61321 - protein, 9 aa, Homo sapiens
  misc_feature: Table A; Target 61321; HLA-B*54:01; PAX7; ENSG00000009709; TAA
SAVLGLLPV

SEQ ID NO: 61322 - protein, 9 aa, Homo sapiens
  misc_feature: Table A; Target 61322; HLA-B*56:01; PAX7; ENSG00000009709; TAA
SAVLGLLPV

SEQ ID NO: 61323 - protein, 9 aa, Homo sapiens
  misc_feature: Table A; Target 61323; HLA-B*46:01; PAX7; ENSG00000009709; TAA
SAVPPQPQA

SEQ ID NO: 61324 - protein, 9 aa, Homo sapiens
  misc_feature: Table A; Target 61324; HLA-B*54:01; PAX7; ENSG00000009709; TAA
SAVPPQPQA

SEQ ID NO: 61325 - protein, 9 aa, Homo sapiens
  misc_feature: Table A; Target 61325; HLA-B*56:01; PAX7; ENSG00000009709; TAA
SAVPPQPQA

SEQ ID NO: 61326 - protein, 9 aa, Homo sapiens
  misc_feature: Table A; Target 61326; HLA-B*58:01; PAX7; ENSG00000009709; TAA
SAVPPQPQA

SEQ ID NO: 61327 - protein, 9 aa, Homo sapiens
  misc_feature: Table A; Target 61327; HLA-C*03:03; PAX7; ENSG00000009709; TAA
SAVPPQPQA

SEQ ID NO: 61328 - protein, 9 aa, Homo sapiens
  misc_feature: Table A; Target 61328; HLA-C*03:04; PAX7; ENSG00000009709; TAA
SAVPPQPQA

SEQ ID NO: 61329 - protein, 9 aa, Homo sapiens
  misc_feature: Table A; Target 61329; HLA-C*16:01; PAX7; ENSG00000009709; TAA
SAVPPQPQA

SEQ ID NO: 61330 - protein, 11 aa, Homo sapiens
  misc_feature: Table A; Target 61330; HLA-B*39:01; PAX7; ENSG00000009709; TAA
SAVPPQPQADF

SEQ ID NO: 61331 - protein, 9 aa, Homo sapiens
  misc_feature: Table A; Target 61331; HLA-A*11:01; PAX7; ENSG00000009709; TAA
SAYGARHSF

SEQ ID NO: 61332 - protein, 9 aa, Homo sapiens
  misc_feature: Table A; Target 61332; HLA-A*23:01; PAX7; ENSG00000009709; TAA
SAYGARHSF

SEQ ID NO: 61333 - protein, 9 aa, Homo sapiens
  misc_feature: Table A; Target 61333; HLA-A*24:02; PAX7; ENSG00000009709; TAA
SAYGARHSF

SEQ ID NO: 61334 - protein, 9 aa, Homo sapiens
  misc_feature: Table A; Target 61334; HLA-A*25:01; PAX7; ENSG00000009709; TAA
SAYGARHSF

SEQ ID NO: 61335 - protein, 9 aa, Homo sapiens
  misc_feature: Table A; Target 61335; HLA-A*26:01; PAX7; ENSG00000009709; TAA
SAYGARHSF

SEQ ID NO: 61336 - protein, 9 aa, Homo sapiens
  misc_feature: Table A; Target 61336; HLA-A*29:02; PAX7; ENSG00000009709; TAA
SAYGARHSF

SEQ ID NO: 61337 - protein, 9 aa, Homo sapiens
  misc_feature: Table A; Target 61337; HLA-A*30:02; PAX7; ENSG00000009709; TAA
SAYGARHSF

SEQ ID NO: 61338 - protein, 9 aa, Homo sapiens
  misc_feature: Table A; Target 61338; HLA-A*31:01; PAX7; ENSG00000009709; TAA
SAYGARHSF

SEQ ID NO: 61339 - protein, 9 aa, Homo sapiens
  misc_feature: Table A; Target 61339; HLA-A*32:01; PAX7; ENSG00000009709; TAA
SAYGARHSF

SEQ ID NO: 61340 - protein, 9 aa, Homo sapiens
  misc_feature: Table A; Target 61340; HLA-A*33:01; PAX7; ENSG00000009709; TAA
SAYGARHSF

SEQ ID NO: 61341 - protein, 9 aa, Homo sapiens
  misc_feature: Table A; Target 61341; HLA-A*33:03; PAX7; ENSG00000009709; TAA
SAYGARHSF

SEQ ID NO: 61342 - protein, 9 aa, Homo sapiens
  misc_feature: Table A; Target 61342; HLA-B*07:02; PAX7; ENSG00000009709; TAA
SAYGARHSF

SEQ ID NO: 61343 - protein, 9 aa, Homo sapiens
  misc_feature: Table A; Target 61343; HLA-B*08:01; PAX7; ENSG00000009709; TAA
SAYGARHSF

SEQ ID NO: 61344 - protein, 9 aa, Homo sapiens
  misc_feature: Table A; Target 61344; HLA-B*15:01; PAX7; ENSG00000009709; TAA
SAYGARHSF

SEQ ID NO: 61345 - protein, 9 aa, Homo sapiens
  misc_feature: Table A; Target 61345; HLA-B*15:03; PAX7; ENSG00000009709; TAA
SAYGARHSF

SEQ ID NO: 61346 - protein, 9 aa, Homo sapiens
  misc_feature: Table A; Target 61346; HLA-B*35:01; PAX7; ENSG00000009709; TAA
SAYGARHSF

SEQ ID NO: 61347 - protein, 9 aa, Homo sapiens
  misc_feature: Table A; Target 61347; HLA-B*35:03; PAX7; ENSG00000009709; TAA
SAYGARHSF

SEQ ID NO: 61348 - protein, 9 aa, Homo sapiens
  misc_feature: Table A; Target 61348; HLA-B*37:01; PAX7; ENSG00000009709; TAA
SAYGARHSF

SEQ ID NO: 61349 - protein, 9 aa, Homo sapiens
  misc_feature: Table A; Target 61349; HLA-B*38:01; PAX7; ENSG00000009709; TAA
SAYGARHSF

SEQ ID NO: 61350 - protein, 9 aa, Homo sapiens
  misc_feature: Table A; Target 61350; HLA-B*44:02; PAX7; ENSG00000009709; TAA
SAYGARHSF

SEQ ID NO: 61351 - protein, 9 aa, Homo sapiens
  misc_feature: Table A; Target 61351; HLA-B*44:03; PAX7; ENSG00000009709; TAA
SAYGARHSF

SEQ ID NO: 61352 - protein, 9 aa, Homo sapiens
  misc_feature: Table A; Target 61352; HLA-B*46:01; PAX7; ENSG00000009709; TAA
SAYGARHSF

SEQ ID NO: 61353 - protein, 9 aa, Homo sapiens
  misc_feature: Table A; Target 61353; HLA-B*51:01; PAX7; ENSG00000009709; TAA
SAYGARHSF

SEQ ID NO: 61354 - protein, 9 aa, Homo sapiens
  misc_feature: Table A; Target 61354; HLA-B*54:01; PAX7; ENSG00000009709; TAA
SAYGARHSF

SEQ ID NO: 61355 - protein, 9 aa, Homo sapiens
  misc_feature: Table A; Target 61355; HLA-B*55:01; PAX7; ENSG00000009709; TAA
SAYGARHSF

SEQ ID NO: 61356 - protein, 9 aa, Homo sapiens
  misc_feature: Table A; Target 61356; HLA-B*57:01; PAX7; ENSG00000009709; TAA
SAYGARHSF

SEQ ID NO: 61357 - protein, 9 aa, Homo sapiens
  misc_feature: Table A; Target 61357; HLA-B*58:01; PAX7; ENSG00000009709; TAA
SAYGARHSF

SEQ ID NO: 61358 - protein, 9 aa, Homo sapiens
  misc_feature: Table A; Target 61358; HLA-C*01:02; PAX7; ENSG00000009709; TAA
SAYGARHSF

SEQ ID NO: 61359 - protein, 9 aa, Homo sapiens
  misc_feature: Table A; Target 61359; HLA-C*02:02; PAX7; ENSG00000009709; TAA
SAYGARHSF

SEQ ID NO: 61360 - protein, 9 aa, Homo sapiens
  misc_feature: Table A; Target 61360; HLA-C*03:03; PAX7; ENSG00000009709; TAA
SAYGARHSF

SEQ ID NO: 61361 - protein, 9 aa, Homo sapiens
  misc_feature: Table A; Target 61361; HLA-C*03:04; PAX7; ENSG00000009709; TAA
SAYGARHSF

SEQ ID NO: 61362 - protein, 9 aa, Homo sapiens
  misc_feature: Table A; Target 61362; HLA-C*07:02; PAX7; ENSG00000009709; TAA
SAYGARHSF

SEQ ID NO: 61363 - protein, 9 aa, Homo sapiens
  misc_feature: Table A; Target 61363; HLA-C*07:04; PAX7; ENSG00000009709; TAA
SAYGARHSF

SEQ ID NO: 61364 - protein, 9 aa, Homo sapiens
  misc_feature: Table A; Target 61364; HLA-C*07:06; PAX7; ENSG00000009709; TAA
SAYGARHSF

SEQ ID NO: 61365 - protein, 9 aa, Homo sapiens
  misc_feature: Table A; Target 61365; HLA-C*12:03; PAX7; ENSG00000009709; TAA
SAYGARHSF

SEQ ID NO: 61366 - protein, 9 aa, Homo sapiens
  misc_feature: Table A; Target 61366; HLA-C*14:02; PAX7; ENSG00000009709; TAA
SAYGARHSF

SEQ ID NO: 61367 - protein, 9 aa, Homo sapiens
  misc_feature: Table A; Target 61367; HLA-C*16:01; PAX7; ENSG00000009709; TAA
SAYGARHSF

SEQ ID NO: 61368 - protein, 9 aa, Homo sapiens
  misc_feature: Table A; Target 61368; HLA-C*16:02; PAX7; ENSG00000009709; TAA
SAYGARHSF

SEQ ID NO: 61369 - protein, 9 aa, Homo sapiens
  misc_feature: Table A; Target 61369; HLA-C*16:04; PAX7; ENSG00000009709; TAA
SAYGARHSF

SEQ ID NO: 61370 - protein, 9 aa, Homo sapiens
  misc_feature: Table A; Target 61370; HLA-A*30:01; PAX7; ENSG00000009709; TAA
SDVESEPDL

SEQ ID NO: 61371 - protein, 9 aa, Homo sapiens
  misc_feature: Table A; Target 61371; HLA-B*40:01; PAX7; ENSG00000009709; TAA
SDVESEPDL

SEQ ID NO: 61372 - protein, 8 aa, Homo sapiens
  misc_feature: Table A; Target 61372; HLA-C*14:02; PAX7; ENSG00000009709; TAA
SFMNPAAP

SEQ ID NO: 61373 - protein, 9 aa, Homo sapiens
  misc_feature: Table A; Target 61373; HLA-A*23:01; PAX7; ENSG00000009709; TAA
SFSSYSDSF

SEQ ID NO: 61374 - protein, 9 aa, Homo sapiens
  misc_feature: Table A; Target 61374; HLA-A*24:02; PAX7; ENSG00000009709; TAA
SFSSYSDSF

SEQ ID NO: 61375 - protein, 9 aa, Homo sapiens
  misc_feature: Table A; Target 61375; HLA-A*29:02; PAX7; ENSG00000009709; TAA
SFSSYSDSF

SEQ ID NO: 61376 - protein, 9 aa, Homo sapiens
  misc_feature: Table A; Target 61376; HLA-A*32:01; PAX7; ENSG00000009709; TAA
SFSSYSDSF

SEQ ID NO: 61377 - protein, 9 aa, Homo sapiens
  misc_feature: Table A; Target 61377; HLA-C*01:02; PAX7; ENSG00000009709; TAA
SFSSYSDSF

SEQ ID NO: 61378 - protein, 9 aa, Homo sapiens
  misc_feature: Table A; Target 61378; HLA-C*04:01; PAX7; ENSG00000009709; TAA
SFSSYSDSF

SEQ ID NO: 61379 - protein, 9 aa, Homo sapiens
  misc_feature: Table A; Target 61379; HLA-C*14:02; PAX7; ENSG00000009709; TAA
SFSSYSDSF

SEQ ID NO: 61380 - protein, 9 aa, Homo sapiens
  misc_feature: Table A; Target 61380; HLA-A*31:01; PAX7; ENSG00000009709; TAA
SGLVSSISR

SEQ ID NO: 61381 - protein, 9 aa, Homo sapiens
  misc_feature: Table A; Target 61381; HLA-C*07:06; PAX7; ENSG00000009709; TAA
SGLVSSISR

SEQ ID NO: 61382 - protein, 9 aa, Homo sapiens
  misc_feature: Table A; Target 61382; HLA-A*01:01; PAX7; ENSG00000009709; TAA
SIDGILGDK

SEQ ID NO: 61383 - protein, 9 aa, Homo sapiens
  misc_feature: Table A; Target 61383; HLA-A*03:01; PAX7; ENSG00000009709; TAA
SIDGILGDK

SEQ ID NO: 61384 - protein, 9 aa, Homo sapiens
  misc_feature: Table A; Target 61384; HLA-A*03:02; PAX7; ENSG00000009709; TAA
SIDGILGDK

SEQ ID NO: 61385 - protein, 9 aa, Homo sapiens
  misc_feature: Table A; Target 61385; HLA-A*11:01; PAX7; ENSG00000009709; TAA
SIDGILGDK

SEQ ID NO: 61386 - protein, 8 aa, Homo sapiens
  misc_feature: Table A; Target 61386; HLA-B*08:01; PAX7; ENSG00000009709; TAA
SIKPGDSL

SEQ ID NO: 61387 - protein, 8 aa, Homo sapiens
  misc_feature: Table A; Target 61387; HLA-C*01:02; PAX7; ENSG00000009709; TAA
SIKPGDSL

SEQ ID NO: 61388 - protein, 11 aa, Homo sapiens
  misc_feature: Table A; Target 61388; HLA-A*31:01; PAX7; ENSG00000009709; TAA
SIKPGDSLPTS

SEQ ID NO: 61389 - protein, 9 aa, Homo sapiens
  misc_feature: Table A; Target 61389; HLA-A*02:01; PAX7; ENSG00000009709; TAA
SILGNPSAV

SEQ ID NO: 61390 - protein, 9 aa, Homo sapiens
  misc_feature: Table A; Target 61390; HLA-A*02:03; PAX7; ENSG00000009709; TAA
SILGNPSAV

SEQ ID NO: 61391 - protein, 9 aa, Homo sapiens
  misc_feature: Table A; Target 61391; HLA-A*02:04; PAX7; ENSG00000009709; TAA
SILGNPSAV

SEQ ID NO: 61392 - protein, 9 aa, Homo sapiens
  misc_feature: Table A; Target 61392; HLA-A*02:07; PAX7; ENSG00000009709; TAA
SILGNPSAV

SEQ ID NO: 61393 - protein, 9 aa, Homo sapiens
  misc_feature: Table A; Target 61393; HLA-A*32:01; PAX7; ENSG00000009709; TAA
SILGNPSAV

SEQ ID NO: 61394 - protein, 9 aa, Homo sapiens
  misc_feature: Table A; Target 61394; HLA-B*13:02; PAX7; ENSG00000009709; TAA
SILGNPSAV

SEQ ID NO: 61395 - protein, 9 aa, Homo sapiens
  misc_feature: Table A; Target 61395; HLA-B*46:01; PAX7; ENSG00000009709; TAA
SILGNPSAV

SEQ ID NO: 61396 - protein, 9 aa, Homo sapiens
  misc_feature: Table A; Target 61396; HLA-B*55:01; PAX7; ENSG00000009709; TAA
SILGNPSAV

SEQ ID NO: 61397 - protein, 9 aa, Homo sapiens
  misc_feature: Table A; Target 61397; HLA-C*01:02; PAX7; ENSG00000009709; TAA
SILGNPSAV

SEQ ID NO: 61398 - protein, 9 aa, Homo sapiens
  misc_feature: Table A; Target 61398; HLA-C*12:03; PAX7; ENSG00000009709; TAA
SILGNPSAV

SEQ ID NO: 61399 - protein, 9 aa, Homo sapiens
  misc_feature: Table A; Target 61399; HLA-C*14:02; PAX7; ENSG00000009709; TAA
SILGNPSAV

SEQ ID NO: 61400 - protein, 9 aa, Homo sapiens
  misc_feature: Table A; Target 61400; HLA-C*16:02; PAX7; ENSG00000009709; TAA
SILGNPSAV

SEQ ID NO: 61401 - protein, 9 aa, Homo sapiens
  misc_feature: Table A; Target 61401; HLA-C*16:04; PAX7; ENSG00000009709; TAA
SILGNPSAV

SEQ ID NO: 61402 - protein, 9 aa, Homo sapiens
  misc_feature: Table A; Target 61402; HLA-A*68:01; PAX7; ENSG00000009709; TAA
SISASCSQR

SEQ ID NO: 61403 - protein, 9 aa, Homo sapiens
  misc_feature: Table A; Target 61403; HLA-B*27:05; PAX7; ENSG00000009709; TAA
SISPLHGGL

SEQ ID NO: 61404 - protein, 9 aa, Homo sapiens
  misc_feature: Table A; Target 61404; HLA-B*37:01; PAX7; ENSG00000009709; TAA
SISPLHGGL

SEQ ID NO: 61405 - protein, 9 aa, Homo sapiens
  misc_feature: Table A; Target 61405; HLA-A*03:01; PAX7; ENSG00000009709; TAA
SISRVLRIK

SEQ ID NO: 61406 - protein, 8 aa, Homo sapiens
  misc_feature: Table A; Target 61406; HLA-A*32:01; PAX7; ENSG00000009709; TAA
SLPTSQAY

SEQ ID NO: 61407 - protein, 8 aa, Homo sapiens
  misc_feature: Table A; Target 61407; HLA-B*15:01; PAX7; ENSG00000009709; TAA
SLPTSQAY

SEQ ID NO: 61408 - protein, 8 aa, Homo sapiens
  misc_feature: Table A; Target 61408; HLA-B*15:03; PAX7; ENSG00000009709; TAA
SLPTSQAY

SEQ ID NO: 61409 - protein, 8 aa, Homo sapiens
  misc_feature: Table A; Target 61409; HLA-B*46:01; PAX7; ENSG00000009709; TAA
SLPTSQAY

SEQ ID NO: 61410 - protein, 8 aa, Homo sapiens
  misc_feature: Table A; Target 61410; HLA-C*01:02; PAX7; ENSG00000009709; TAA
SLPTSQAY

SEQ ID NO: 61411 - protein, 8 aa, Homo sapiens
  misc_feature: Table A; Target 61411; HLA-C*14:02; PAX7; ENSG00000009709; TAA
SLPTSQAY

SEQ ID NO: 61412 - protein, 8 aa, Homo sapiens
  misc_feature: Table A; Target 61412; HLA-C*16:01; PAX7; ENSG00000009709; TAA
SLSTQRRM

SEQ ID NO: 61413 - protein, 10 aa, Homo sapiens
  misc_feature: Table A; Target 61413; HLA-B*54:01; PAX7; ENSG00000009709; TAA
SPLHGGLDSA

SEQ ID NO: 61414 - protein, 10 aa, Homo sapiens
  misc_feature: Table A; Target 61414; HLA-B*55:01; PAX7; ENSG00000009709; TAA
SPLHGGLDSA

SEQ ID NO: 61415 - protein, 10 aa, Homo sapiens
  misc_feature: Table A; Target 61415; HLA-B*56:01; PAX7; ENSG00000009709; TAA
SPLHGGLDSA

SEQ ID NO: 61416 - protein, 8 aa, Homo sapiens
  misc_feature: Table A; Target 61416; HLA-B*07:02; PAX7; ENSG00000009709; TAA
SPQVMSIL

SEQ ID NO: 61417 - protein, 8 aa, Homo sapiens
  misc_feature: Table A; Target 61417; HLA-C*07:02; PAX7; ENSG00000009709; TAA
SPQVMSIL

SEQ ID NO: 61418 - protein, 9 aa, Homo sapiens
  misc_feature: Table A; Target 61418; HLA-A*26:01; PAX7; ENSG00000009709; TAA
SQAYCPPTY

SEQ ID NO: 61419 - protein, 9 aa, Homo sapiens
  misc_feature: Table A; Target 61419; HLA-A*30:02; PAX7; ENSG00000009709; TAA
SQAYCPPTY

SEQ ID NO: 61420 - protein, 9 aa, Homo sapiens
  misc_feature: Table A; Target 61420; HLA-A*32:01; PAX7; ENSG00000009709; TAA
SQAYCPPTY

SEQ ID NO: 61421 - protein, 9 aa, Homo sapiens
  misc_feature: Table A; Target 61421; HLA-B*13:02; PAX7; ENSG00000009709; TAA
SQAYCPPTY

SEQ ID NO: 61422 - protein, 9 aa, Homo sapiens
  misc_feature: Table A; Target 61422; HLA-B*15:01; PAX7; ENSG00000009709; TAA
SQAYCPPTY

SEQ ID NO: 61423 - protein, 9 aa, Homo sapiens
  misc_feature: Table A; Target 61423; HLA-B*15:03; PAX7; ENSG00000009709; TAA
SQAYCPPTY

SEQ ID NO: 61424 - protein, 9 aa, Homo sapiens
  misc_feature: Table A; Target 61424; HLA-B*39:01; PAX7; ENSG00000009709; TAA
SQAYCPPTY

SEQ ID NO: 61425 - protein, 9 aa, Homo sapiens
  misc_feature: Table A; Target 61425; HLA-C*02:02; PAX7; ENSG00000009709; TAA
SQAYCPPTY

SEQ ID NO: 61426 - protein, 9 aa, Homo sapiens
  misc_feature: Table A; Target 61426; HLA-C*07:04; PAX7; ENSG00000009709; TAA
SQAYCPPTY

SEQ ID NO: 61427 - protein, 9 aa, Homo sapiens
  misc_feature: Table A; Target 61427; HLA-C*16:01; PAX7; ENSG00000009709; TAA
SQAYCPPTY

SEQ ID NO: 61428 - protein, 8 aa, Homo sapiens
  misc_feature: Table A; Target 61428; HLA-B*39:01; PAX7; ENSG00000009709; TAA
SQDGGSTV

SEQ ID NO: 61429 - protein, 8 aa, Homo sapiens
  misc_feature: Table A; Target 61429; HLA-C*05:01; PAX7; ENSG00000009709; TAA
SQDGGSTV

SEQ ID NO: 61430 - protein, 9 aa, Homo sapiens
  misc_feature: Table A; Target 61430; HLA-B*15:01; PAX7; ENSG00000009709; TAA
SQDGGSTVH

SEQ ID NO: 61431 - protein, 9 aa, Homo sapiens
  misc_feature: Table A; Target 61431; HLA-B*38:01; PAX7; ENSG00000009709; TAA
SQDGGSTVH

SEQ ID NO: 61432 - protein, 9 aa, Homo sapiens
  misc_feature: Table A; Target 61432; HLA-B*39:01; PAX7; ENSG00000009709; TAA
SQDGGSTVH

SEQ ID NO: 61433 - protein, 9 aa, Homo sapiens
  misc_feature: Table A; Target 61433; HLA-C*05:01; PAX7; ENSG00000009709; TAA
SQDGGSTVH

SEQ ID NO: 61434 - protein, 9 aa, Homo sapiens
  misc_feature: Table A; Target 61434; HLA-C*07:04; PAX7; ENSG00000009709; TAA
SQDGGSTVH

SEQ ID NO: 61435 - protein, 10 aa, Homo sapiens
  misc_feature: Table A; Target 61435; HLA-A*68:01; PAX7; ENSG00000009709; TAA
SQDGGSTVHR

SEQ ID NO: 61436 - protein, 10 aa, Homo sapiens
  misc_feature: Table A; Target 61436; HLA-C*07:06; PAX7; ENSG00000009709; TAA
SQDGGSTVHR

SEQ ID NO: 61437 - protein, 10 aa, Homo sapiens
  misc_feature: Table A; Target 61437; HLA-A*30:02; PAX7; ENSG00000009709; TAA
SSAYGARHSF

SEQ ID NO: 61438 - protein, 10 aa, Homo sapiens
  misc_feature: Table A; Target 61438; HLA-A*32:01; PAX7; ENSG00000009709; TAA
SSAYGARHSF

SEQ ID NO: 61439 - protein, 10 aa, Homo sapiens
  misc_feature: Table A; Target 61439; HLA-B*57:01; PAX7; ENSG00000009709; TAA
SSAYGARHSF

SEQ ID NO: 61440 - protein, 10 aa, Homo sapiens
  misc_feature: Table A; Target 61440; HLA-B*58:01; PAX7; ENSG00000009709; TAA
SSAYGARHSF

SEQ ID NO: 61441 - protein, 10 aa, Homo sapiens
  misc_feature: Table A; Target 61441; HLA-C*16:01; PAX7; ENSG00000009709; TAA
SSAYGARHSF

SEQ ID NO: 61442 - protein, 9 aa, Homo sapiens
  misc_feature: Table A; Target 61442; HLA-A*02:03; PAX7; ENSG00000009709; TAA
SSISRVLRI

SEQ ID NO: 61443 - protein, 9 aa, Homo sapiens
  misc_feature: Table A; Target 61443; HLA-C*03:03; PAX7; ENSG00000009709; TAA
STVPSGLVS

SEQ ID NO: 61444 - protein, 9 aa, Homo sapiens
  misc_feature: Table A; Target 61444; HLA-C*03:04; PAX7; ENSG00000009709; TAA
STVPSGLVS

SEQ ID NO: 61445 - protein, 11 aa, Homo sapiens
  misc_feature: Table A; Target 61445; HLA-A*25:01; PAX7; ENSG00000009709; TAA
STVPSGLVSSI

SEQ ID NO: 61446 - protein, 11 aa, Homo sapiens
  misc_feature: Table A; Target 61446; HLA-A*68:02; PAX7; ENSG00000009709; TAA
STVPSGLVSSI

SEQ ID NO: 61447 - protein, 8 aa, Homo sapiens
  misc_feature: Table A; Target 61447; HLA-A*23:01; PAX7; ENSG00000009709; TAA
STYPTTTI

SEQ ID NO: 61448 - protein, 8 aa, Homo sapiens
  misc_feature: Table A; Target 61448; HLA-A*30:01; PAX7; ENSG00000009709; TAA
STYPTTTI

SEQ ID NO: 61449 - protein, 8 aa, Homo sapiens
  misc_feature: Table A; Target 61449; HLA-B*13:02; PAX7; ENSG00000009709; TAA
STYPTTTI

SEQ ID NO: 61450 - protein, 8 aa, Homo sapiens
  misc_feature: Table A; Target 61450; HLA-B*49:01; PAX7; ENSG00000009709; TAA
STYPTTTI

SEQ ID NO: 61451 - protein, 8 aa, Homo sapiens
  misc_feature: Table A; Target 61451; HLA-B*51:01; PAX7; ENSG00000009709; TAA
STYPTTTI

SEQ ID NO: 61452 - protein, 10 aa, Homo sapiens
  misc_feature: Table A; Target 61452; HLA-A*03:01; PAX7; ENSG00000009709; TAA
STYPTTTISQ

SEQ ID NO: 61453 - protein, 10 aa, Homo sapiens
  misc_feature: Table A; Target 61453; HLA-A*11:01; PAX7; ENSG00000009709; TAA
STYPTTTISQ

SEQ ID NO: 61454 - protein, 8 aa, Homo sapiens
  misc_feature: Table A; Target 61454; HLA-A*01:01; PAX7; ENSG00000009709; TAA
SVDPVAGY

SEQ ID NO: 61455 - protein, 8 aa, Homo sapiens
  misc_feature: Table A; Target 61455; HLA-A*03:02; PAX7; ENSG00000009709; TAA
SVDPVAGY

SEQ ID NO: 61456 - protein, 8 aa, Homo sapiens
  misc_feature: Table A; Target 61456; HLA-A*26:01; PAX7; ENSG00000009709; TAA
SVDPVAGY

SEQ ID NO: 61457 - protein, 8 aa, Homo sapiens
  misc_feature: Table A; Target 61457; HLA-A*29:02; PAX7; ENSG00000009709; TAA
SVDPVAGY

SEQ ID NO: 61458 - protein, 8 aa, Homo sapiens
  misc_feature: Table A; Target 61458; HLA-A*30:02; PAX7; ENSG00000009709; TAA
SVDPVAGY

SEQ ID NO: 61459 - protein, 8 aa, Homo sapiens
  misc_feature: Table A; Target 61459; HLA-A*32:01; PAX7; ENSG00000009709; TAA
SVDPVAGY

SEQ ID NO: 61460 - protein, 8 aa, Homo sapiens
  misc_feature: Table A; Target 61460; HLA-B*15:01; PAX7; ENSG00000009709; TAA
SVDPVAGY

SEQ ID NO: 61461 - protein, 8 aa, Homo sapiens
  misc_feature: Table A; Target 61461; HLA-B*18:01; PAX7; ENSG00000009709; TAA
SVDPVAGY

SEQ ID NO: 61462 - protein, 8 aa, Homo sapiens
  misc_feature: Table A; Target 61462; HLA-B*35:01; PAX7; ENSG00000009709; TAA
SVDPVAGY

SEQ ID NO: 61463 - protein, 8 aa, Homo sapiens
  misc_feature: Table A; Target 61463; HLA-C*04:01; PAX7; ENSG00000009709; TAA
SVDPVAGY

SEQ ID NO: 61464 - protein, 8 aa, Homo sapiens
  misc_feature: Table A; Target 61464; HLA-C*05:01; PAX7; ENSG00000009709; TAA
SVDPVAGY

SEQ ID NO: 61465 - protein, 8 aa, Homo sapiens
  misc_feature: Table A; Target 61465; HLA-C*16:02; PAX7; ENSG00000009709; TAA
SVDPVAGY

SEQ ID NO: 61466 - protein, 10 aa, Homo sapiens
  misc_feature: Table A; Target 61466; HLA-A*01:01; PAX7; ENSG00000009709; TAA
SVDPVAGYQY

SEQ ID NO: 61467 - protein, 10 aa, Homo sapiens
  misc_feature: Table A; Target 61467; HLA-A*02:07; PAX7; ENSG00000009709; TAA
SVDPVAGYQY

SEQ ID NO: 61468 - protein, 10 aa, Homo sapiens
  misc_feature: Table A; Target 61468; HLA-A*03:01; PAX7; ENSG00000009709; TAA
SVDPVAGYQY

SEQ ID NO: 61469 - protein, 10 aa, Homo sapiens
  misc_feature: Table A; Target 61469; HLA-A*03:02; PAX7; ENSG00000009709; TAA
SVDPVAGYQY

SEQ ID NO: 61470 - protein, 10 aa, Homo sapiens
  misc_feature: Table A; Target 61470; HLA-A*11:01; PAX7; ENSG00000009709; TAA
SVDPVAGYQY

SEQ ID NO: 61471 - protein, 10 aa, Homo sapiens
  misc_feature: Table A; Target 61471; HLA-A*23:01; PAX7; ENSG00000009709; TAA
SVDPVAGYQY

SEQ ID NO: 61472 - protein, 10 aa, Homo sapiens
  misc_feature: Table A; Target 61472; HLA-A*25:01; PAX7; ENSG00000009709; TAA
SVDPVAGYQY

SEQ ID NO: 61473 - protein, 10 aa, Homo sapiens
  misc_feature: Table A; Target 61473; HLA-A*26:01; PAX7; ENSG00000009709; TAA
SVDPVAGYQY

SEQ ID NO: 61474 - protein, 10 aa, Homo sapiens
  misc_feature: Table A; Target 61474; HLA-A*29:02; PAX7; ENSG00000009709; TAA
SVDPVAGYQY

SEQ ID NO: 61475 - protein, 10 aa, Homo sapiens
  misc_feature: Table A; Target 61475; HLA-A*30:02; PAX7; ENSG00000009709; TAA
SVDPVAGYQY

SEQ ID NO: 61476 - protein, 10 aa, Homo sapiens
  misc_feature: Table A; Target 61476; HLA-A*31:01; PAX7; ENSG00000009709; TAA
SVDPVAGYQY

SEQ ID NO: 61477 - protein, 10 aa, Homo sapiens
  misc_feature: Table A; Target 61477; HLA-A*32:01; PAX7; ENSG00000009709; TAA
SVDPVAGYQY

SEQ ID NO: 61478 - protein, 10 aa, Homo sapiens
  misc_feature: Table A; Target 61478; HLA-A*33:01; PAX7; ENSG00000009709; TAA
SVDPVAGYQY

SEQ ID NO: 61479 - protein, 10 aa, Homo sapiens
  misc_feature: Table A; Target 61479; HLA-A*33:03; PAX7; ENSG00000009709; TAA
SVDPVAGYQY

SEQ ID NO: 61480 - protein, 10 aa, Homo sapiens
  misc_feature: Table A; Target 61480; HLA-A*68:01; PAX7; ENSG00000009709; TAA
SVDPVAGYQY

SEQ ID NO: 61481 - protein, 10 aa, Homo sapiens
  misc_feature: Table A; Target 61481; HLA-B*15:01; PAX7; ENSG00000009709; TAA
SVDPVAGYQY

SEQ ID NO: 61482 - protein, 10 aa, Homo sapiens
  misc_feature: Table A; Target 61482; HLA-B*15:03; PAX7; ENSG00000009709; TAA
SVDPVAGYQY

SEQ ID NO: 61483 - protein, 10 aa, Homo sapiens
  misc_feature: Table A; Target 61483; HLA-B*18:01; PAX7; ENSG00000009709; TAA
SVDPVAGYQY

SEQ ID NO: 61484 - protein, 10 aa, Homo sapiens
  misc_feature: Table A; Target 61484; HLA-B*27:02; PAX7; ENSG00000009709; TAA
SVDPVAGYQY

SEQ ID NO: 61485 - protein, 10 aa, Homo sapiens
  misc_feature: Table A; Target 61485; HLA-B*27:05; PAX7; ENSG00000009709; TAA
SVDPVAGYQY

SEQ ID NO: 61486 - protein, 10 aa, Homo sapiens
  misc_feature: Table A; Target 61486; HLA-B*35:01; PAX7; ENSG00000009709; TAA
SVDPVAGYQY

SEQ ID NO: 61487 - protein, 10 aa, Homo sapiens
  misc_feature: Table A; Target 61487; HLA-B*35:03; PAX7; ENSG00000009709; TAA
SVDPVAGYQY

SEQ ID NO: 61488 - protein, 10 aa, Homo sapiens
  misc_feature: Table A; Target 61488; HLA-B*38:01; PAX7; ENSG00000009709; TAA
SVDPVAGYQY

SEQ ID NO: 61489 - protein, 10 aa, Homo sapiens
  misc_feature: Table A; Target 61489; HLA-B*39:01; PAX7; ENSG00000009709; TAA
SVDPVAGYQY

SEQ ID NO: 61490 - protein, 10 aa, Homo sapiens
  misc_feature: Table A; Target 61490; HLA-B*44:03; PAX7; ENSG00000009709; TAA
SVDPVAGYQY

SEQ ID NO: 61491 - protein, 10 aa, Homo sapiens
  misc_feature: Table A; Target 61491; HLA-B*46:01; PAX7; ENSG00000009709; TAA
SVDPVAGYQY

SEQ ID NO: 61492 - protein, 10 aa, Homo sapiens
  misc_feature: Table A; Target 61492; HLA-B*55:01; PAX7; ENSG00000009709; TAA
SVDPVAGYQY

SEQ ID NO: 61493 - protein, 10 aa, Homo sapiens
  misc_feature: Table A; Target 61493; HLA-B*57:01; PAX7; ENSG00000009709; TAA
SVDPVAGYQY

SEQ ID NO: 61494 - protein, 10 aa, Homo sapiens
  misc_feature: Table A; Target 61494; HLA-B*58:01; PAX7; ENSG00000009709; TAA
SVDPVAGYQY

SEQ ID NO: 61495 - protein, 10 aa, Homo sapiens
  misc_feature: Table A; Target 61495; HLA-C*01:02; PAX7; ENSG00000009709; TAA
SVDPVAGYQY

SEQ ID NO: 61496 - protein, 10 aa, Homo sapiens
  misc_feature: Table A; Target 61496; HLA-C*02:02; PAX7; ENSG00000009709; TAA
SVDPVAGYQY

SEQ ID NO: 61497 - protein, 10 aa, Homo sapiens
  misc_feature: Table A; Target 61497; HLA-C*03:03; PAX7; ENSG00000009709; TAA
SVDPVAGYQY

SEQ ID NO: 61498 - protein, 10 aa, Homo sapiens
  misc_feature: Table A; Target 61498; HLA-C*03:04; PAX7; ENSG00000009709; TAA
SVDPVAGYQY

SEQ ID NO: 61499 - protein, 10 aa, Homo sapiens
  misc_feature: Table A; Target 61499; HLA-C*04:01; PAX7; ENSG00000009709; TAA
SVDPVAGYQY

SEQ ID NO: 61500 - protein, 10 aa, Homo sapiens
  misc_feature: Table A; Target 61500; HLA-C*05:01; PAX7; ENSG00000009709; TAA
SVDPVAGYQY

SEQ ID NO: 61501 - protein, 10 aa, Homo sapiens
  misc_feature: Table A; Target 61501; HLA-C*07:01; PAX7; ENSG00000009709; TAA
SVDPVAGYQY

SEQ ID NO: 61502 - protein, 10 aa, Homo sapiens
  misc_feature: Table A; Target 61502; HLA-C*07:04; PAX7; ENSG00000009709; TAA
SVDPVAGYQY

SEQ ID NO: 61503 - protein, 10 aa, Homo sapiens
  misc_feature: Table A; Target 61503; HLA-C*07:06; PAX7; ENSG00000009709; TAA
SVDPVAGYQY

SEQ ID NO: 61504 - protein, 10 aa, Homo sapiens
  misc_feature: Table A; Target 61504; HLA-C*12:03; PAX7; ENSG00000009709; TAA
SVDPVAGYQY

SEQ ID NO: 61505 - protein, 10 aa, Homo sapiens
  misc_feature: Table A; Target 61505; HLA-C*14:02; PAX7; ENSG00000009709; TAA
SVDPVAGYQY

SEQ ID NO: 61506 - protein, 10 aa, Homo sapiens
  misc_feature: Table A; Target 61506; HLA-C*16:01; PAX7; ENSG00000009709; TAA
SVDPVAGYQY

SEQ ID NO: 61507 - protein, 10 aa, Homo sapiens
  misc_feature: Table A; Target 61507; HLA-C*16:02; PAX7; ENSG00000009709; TAA
SVDPVAGYQY

SEQ ID NO: 61508 - protein, 10 aa, Homo sapiens
  misc_feature: Table A; Target 61508; HLA-C*16:04; PAX7; ENSG00000009709; TAA
SVDPVAGYQY

SEQ ID NO: 61509 - protein, 11 aa, Homo sapiens
  misc_feature: Table A; Target 61509; HLA-A*02:07; PAX7; ENSG00000009709; TAA
SVDPVAGYQYG

SEQ ID NO: 61510 - protein, 11 aa, Homo sapiens
  misc_feature: Table A; Target 61510; HLA-C*04:01; PAX7; ENSG00000009709; TAA
SVDPVAGYQYG

SEQ ID NO: 61511 - protein, 9 aa, Homo sapiens
  misc_feature: Table A; Target 61511; HLA-A*24:02; PAX7; ENSG00000009709; TAA
SYSDSFMNP

SEQ ID NO: 61512 - protein, 10 aa, Homo sapiens
  misc_feature: Table A; Target 61512; HLA-B*27:02; PAX7; ENSG00000009709; TAA
TAEQLEELEK

SEQ ID NO: 61513 - protein, 10 aa, Homo sapiens
  misc_feature: Table A; Target 61513; HLA-A*68:02; PAX7; ENSG00000009709; TAA
TAVDYLAKNV

SEQ ID NO: 61514 - protein, 10 aa, Homo sapiens
  misc_feature: Table A; Target 61514; HLA-B*51:01; PAX7; ENSG00000009709; TAA
TAVDYLAKNV

SEQ ID NO: 61515 - protein, 10 aa, Homo sapiens
  misc_feature: Table A; Target 61515; HLA-C*06:02; PAX7; ENSG00000009709; TAA
TAVDYLAKNV

SEQ ID NO: 61516 - protein, 10 aa, Homo sapiens
  misc_feature: Table A; Target 61516; HLA-C*12:03; PAX7; ENSG00000009709; TAA
TAVDYLAKNV

SEQ ID NO: 61517 - protein, 10 aa, Homo sapiens
  misc_feature: Table A; Target 61517; HLA-C*16:02; PAX7; ENSG00000009709; TAA
TAVDYLAKNV

SEQ ID NO: 61518 - protein, 11 aa, Homo sapiens
  misc_feature: Table A; Target 61518; HLA-A*31:01; PAX7; ENSG00000009709; TAA
TGFPLEVSTPL

SEQ ID NO: 61519 - protein, 9 aa, Homo sapiens
  misc_feature: Table A; Target 61519; HLA-A*30:02; PAX7; ENSG00000009709; TAA
TGMPTLPPY

SEQ ID NO: 61520 - protein, 9 aa, Homo sapiens
  misc_feature: Table A; Target 61520; HLA-B*35:01; PAX7; ENSG00000009709; TAA
TGMPTLPPY

SEQ ID NO: 61521 - protein, 9 aa, Homo sapiens
  misc_feature: Table A; Target 61521; HLA-B*46:01; PAX7; ENSG00000009709; TAA
TGMPTLPPY

SEQ ID NO: 61522 - protein, 9 aa, Homo sapiens
  misc_feature: Table A; Target 61522; HLA-B*35:03; PAX7; ENSG00000009709; TAA
TGYSVDPVA

SEQ ID NO: 61523 - protein, 9 aa, Homo sapiens
  misc_feature: Table A; Target 61523; HLA-B*54:01; PAX7; ENSG00000009709; TAA
TGYSVDPVA

SEQ ID NO: 61524 - protein, 10 aa, Homo sapiens
  misc_feature: Table A; Target 61524; HLA-A*68:02; PAX7; ENSG00000009709; TAA
TGYSVDPVAG

SEQ ID NO: 61525 - protein, 10 aa, Homo sapiens
  misc_feature: Table A; Target 61525; HLA-B*27:05; PAX7; ENSG00000009709; TAA
TGYSVDPVAG

SEQ ID NO: 61526 - protein, 11 aa, Homo sapiens
  misc_feature: Table A; Target 61526; HLA-A*26:01; PAX7; ENSG00000009709; TAA
TGYSVDPVAGY

SEQ ID NO: 61527 - protein, 11 aa, Homo sapiens
  misc_feature: Table A; Target 61527; HLA-A*30:02; PAX7; ENSG00000009709; TAA
TGYSVDPVAGY

SEQ ID NO: 61528 - protein, 11 aa, Homo sapiens
  misc_feature: Table A; Target 61528; HLA-B*35:01; PAX7; ENSG00000009709; TAA
TGYSVDPVAGY

SEQ ID NO: 61529 - protein, 11 aa, Homo sapiens
  misc_feature: Table A; Target 61529; HLA-C*16:04; PAX7; ENSG00000009709; TAA
TGYSVDPVAGY

SEQ ID NO: 61530 - protein, 9 aa, Homo sapiens
  misc_feature: Table A; Target 61530; HLA-B*57:01; PAX7; ENSG00000009709; TAA
THYPDIYTR

SEQ ID NO: 61531 - protein, 9 aa, Homo sapiens
  misc_feature: Table A; Target 61531; HLA-B*46:01; PAX7; ENSG00000009709; TAA
TMHQGGLAA

SEQ ID NO: 61532 - protein, 9 aa, Homo sapiens
  misc_feature: Table A; Target 61532; HLA-B*54:01; PAX7; ENSG00000009709; TAA
TMHQGGLAA

SEQ ID NO: 61533 - protein, 9 aa, Homo sapiens
  misc_feature: Table A; Target 61533; HLA-C*01:02; PAX7; ENSG00000009709; TAA
TMHQGGLAA

SEQ ID NO: 61534 - protein, 9 aa, Homo sapiens
  misc_feature: Table A; Target 61534; HLA-C*14:02; PAX7; ENSG00000009709; TAA
TMHQGGLAA

SEQ ID NO: 61535 - protein, 10 aa, Homo sapiens
  misc_feature: Table A; Target 61535; HLA-A*02:01; PAX7; ENSG00000009709; TAA
TMHQGGLAAA

SEQ ID NO: 61536 - protein, 10 aa, Homo sapiens
  misc_feature: Table A; Target 61536; HLA-A*02:03; PAX7; ENSG00000009709; TAA
TMHQGGLAAA

SEQ ID NO: 61537 - protein, 11 aa, Homo sapiens
  misc_feature: Table A; Target 61537; HLA-A*01:01; PAX7; ENSG00000009709; TAA
TPDVEKKIEEY

SEQ ID NO: 61538 - protein, 11 aa, Homo sapiens
  misc_feature: Table A; Target 61538; HLA-B*35:01; PAX7; ENSG00000009709; TAA
TPLGQGRVNQL

SEQ ID NO: 61539 - protein, 10 aa, Homo sapiens
  misc_feature: Table A; Target 61539; HLA-B*27:05; PAX7; ENSG00000009709; TAA
TREELAQRTK

SEQ ID NO: 61540 - protein, 10 aa, Homo sapiens
  misc_feature: Table A; Target 61540; HLA-A*33:01; PAX7; ENSG00000009709; TAA
TSISASCSQR

SEQ ID NO: 61541 - protein, 10 aa, Homo sapiens
  misc_feature: Table A; Target 61541; HLA-A*33:03; PAX7; ENSG00000009709; TAA
TSISASCSQR

SEQ ID NO: 61542 - protein, 10 aa, Homo sapiens
  misc_feature: Table A; Target 61542; HLA-A*68:01; PAX7; ENSG00000009709; TAA
TSISASCSQR

SEQ ID NO: 61543 - protein, 10 aa, Homo sapiens
  misc_feature: Table A; Target 61543; HLA-C*07:06; PAX7; ENSG00000009709; TAA
TSISASCSQR

SEQ ID NO: 61544 - protein, 10 aa, Homo sapiens
  misc_feature: Table A; Target 61544; HLA-A*30:02; PAX7; ENSG00000009709; TAA
TSQAYCPPTY

SEQ ID NO: 61545 - protein, 10 aa, Homo sapiens
  misc_feature: Table A; Target 61545; HLA-B*39:01; PAX7; ENSG00000009709; TAA
TSQAYCPPTY

SEQ ID NO: 61546 - protein, 11 aa, Homo sapiens
  misc_feature: Table A; Target 61546; HLA-A*32:01; PAX7; ENSG00000009709; TAA
TSSAYGARHSF

SEQ ID NO: 61547 - protein, 11 aa, Homo sapiens
  misc_feature: Table A; Target 61547; HLA-B*57:01; PAX7; ENSG00000009709; TAA
TSSAYGARHSF

SEQ ID NO: 61548 - protein, 11 aa, Homo sapiens
  misc_feature: Table A; Target 61548; HLA-C*16:01; PAX7; ENSG00000009709; TAA
TSSAYGARHSF

SEQ ID NO: 61549 - protein, 11 aa, Homo sapiens
  misc_feature: Table A; Target 61549; HLA-B*39:01; PAX7; ENSG00000009709; TAA
TTISQDGGSTV

SEQ ID NO: 61550 - protein, 9 aa, Homo sapiens
  misc_feature: Table A; Target 61550; HLA-C*01:02; PAX7; ENSG00000009709; TAA
TVPSGLVSS

SEQ ID NO: 61551 - protein, 10 aa, Homo sapiens
  misc_feature: Table A; Target 61551; HLA-A*02:03; PAX7; ENSG00000009709; TAA
TVPSGLVSSI

SEQ ID NO: 61552 - protein, 10 aa, Homo sapiens
  misc_feature: Table A; Target 61552; HLA-A*02:07; PAX7; ENSG00000009709; TAA
TVPSGLVSSI

SEQ ID NO: 61553 - protein, 10 aa, Homo sapiens
  misc_feature: Table A; Target 61553; HLA-A*25:01; PAX7; ENSG00000009709; TAA
TVPSGLVSSI

SEQ ID NO: 61554 - protein, 10 aa, Homo sapiens
  misc_feature: Table A; Target 61554; HLA-A*26:01; PAX7; ENSG00000009709; TAA
TVPSGLVSSI

SEQ ID NO: 61555 - protein, 10 aa, Homo sapiens
  misc_feature: Table A; Target 61555; HLA-A*68:02; PAX7; ENSG00000009709; TAA
TVPSGLVSSI

SEQ ID NO: 61556 - protein, 10 aa, Homo sapiens
  misc_feature: Table A; Target 61556; HLA-C*01:02; PAX7; ENSG00000009709; TAA
TVPSGLVSSI

SEQ ID NO: 61557 - protein, 9 aa, Homo sapiens
  misc_feature: Table A; Target 61557; HLA-C*01:02; PAX7; ENSG00000009709; TAA
TYPTTTISQ

SEQ ID NO: 61558 - protein, 9 aa, Homo sapiens
  misc_feature: Table A; Target 61558; HLA-C*14:02; PAX7; ENSG00000009709; TAA
TYPTTTISQ

SEQ ID NO: 61559 - protein, 9 aa, Homo sapiens
  misc_feature: Table A; Target 61559; HLA-A*23:01; PAX7; ENSG00000009709; TAA
TYSTTGYSV

SEQ ID NO: 61560 - protein, 9 aa, Homo sapiens
  misc_feature: Table A; Target 61560; HLA-A*24:02; PAX7; ENSG00000009709; TAA
TYSTTGYSV

SEQ ID NO: 61561 - protein, 9 aa, Homo sapiens
  misc_feature: Table A; Target 61561; HLA-C*14:02; PAX7; ENSG00000009709; TAA
TYSTTGYSV

SEQ ID NO: 61562 - protein, 9 aa, Homo sapiens
  misc_feature: Table A; Target 61562; HLA-A*01:01; PAX7; ENSG00000009709; TAA
VAGYQYGQY

SEQ ID NO: 61563 - protein, 9 aa, Homo sapiens
  misc_feature: Table A; Target 61563; HLA-A*30:02; PAX7; ENSG00000009709; TAA
VAGYQYGQY

SEQ ID NO: 61564 - protein, 9 aa, Homo sapiens
  misc_feature: Table A; Target 61564; HLA-C*02:02; PAX7; ENSG00000009709; TAA
VAGYQYGQY

SEQ ID NO: 61565 - protein, 10 aa, Homo sapiens
  misc_feature: Table A; Target 61565; HLA-C*16:02; PAX7; ENSG00000009709; TAA
VATPDVEKKI

SEQ ID NO: 61566 - protein, 8 aa, Homo sapiens
  misc_feature: Table A; Target 61566; HLA-C*04:01; PAX7; ENSG00000009709; TAA
VDPVAGYQ

SEQ ID NO: 61567 - protein, 9 aa, Homo sapiens
  misc_feature: Table A; Target 61567; HLA-A*29:02; PAX7; ENSG00000009709; TAA
VDPVAGYQY

SEQ ID NO: 61568 - protein, 9 aa, Homo sapiens
  misc_feature: Table A; Target 61568; HLA-B*15:03; PAX7; ENSG00000009709; TAA
VDPVAGYQY

SEQ ID NO: 61569 - protein, 9 aa, Homo sapiens
  misc_feature: Table A; Target 61569; HLA-B*37:01; PAX7; ENSG00000009709; TAA
VDPVAGYQY

SEQ ID NO: 61570 - protein, 9 aa, Homo sapiens
  misc_feature: Table A; Target 61570; HLA-C*01:02; PAX7; ENSG00000009709; TAA
VDPVAGYQY

SEQ ID NO: 61571 - protein, 9 aa, Homo sapiens
  misc_feature: Table A; Target 61571; HLA-C*04:01; PAX7; ENSG00000009709; TAA
VDPVAGYQY

SEQ ID NO: 61572 - protein, 9 aa, Homo sapiens
  misc_feature: Table A; Target 61572; HLA-C*07:04; PAX7; ENSG00000009709; TAA
VDPVAGYQY

SEQ ID NO: 61573 - protein, 9 aa, Homo sapiens
  misc_feature: Table A; Target 61573; HLA-C*14:02; PAX7; ENSG00000009709; TAA
VDPVAGYQY

SEQ ID NO: 61574 - protein, 8 aa, Homo sapiens
  misc_feature: Table A; Target 61574; HLA-A*30:01; PAX7; ENSG00000009709; TAA
VDYLAKNV

SEQ ID NO: 61575 - protein, 8 aa, Homo sapiens
  misc_feature: Table A; Target 61575; HLA-B*37:01; PAX7; ENSG00000009709; TAA
VDYLAKNV

SEQ ID NO: 61576 - protein, 8 aa, Homo sapiens
  misc_feature: Table A; Target 61576; HLA-B*40:02; PAX7; ENSG00000009709; TAA
VDYLAKNV

SEQ ID NO: 61577 - protein, 8 aa, Homo sapiens
  misc_feature: Table A; Target 61577; HLA-B*49:01; PAX7; ENSG00000009709; TAA
VDYLAKNV

SEQ ID NO: 61578 - protein, 8 aa, Homo sapiens
  misc_feature: Table A; Target 61578; HLA-B*51:01; PAX7; ENSG00000009709; TAA
VDYLAKNV

SEQ ID NO: 61579 - protein, 8 aa, Homo sapiens
  misc_feature: Table A; Target 61579; HLA-C*06:02; PAX7; ENSG00000009709; TAA
VDYLAKNV

SEQ ID NO: 61580 - protein, 8 aa, Homo sapiens
  misc_feature: Table A; Target 61580; HLA-C*16:02; PAX7; ENSG00000009709; TAA
VDYLAKNV

SEQ ID NO: 61581 - protein, 10 aa, Homo sapiens
  misc_feature: Table A; Target 61581; HLA-A*30:01; PAX7; ENSG00000009709; TAA
VDYLAKNVSL

SEQ ID NO: 61582 - protein, 10 aa, Homo sapiens
  misc_feature: Table A; Target 61582; HLA-B*08:01; PAX7; ENSG00000009709; TAA
VDYLAKNVSL

SEQ ID NO: 61583 - protein, 10 aa, Homo sapiens
  misc_feature: Table A; Target 61583; HLA-B*37:01; PAX7; ENSG00000009709; TAA
VDYLAKNVSL

SEQ ID NO: 61584 - protein, 10 aa, Homo sapiens
  misc_feature: Table A; Target 61584; HLA-B*40:01; PAX7; ENSG00000009709; TAA
VDYLAKNVSL

SEQ ID NO: 61585 - protein, 10 aa, Homo sapiens
  misc_feature: Table A; Target 61585; HLA-B*40:02; PAX7; ENSG00000009709; TAA
VDYLAKNVSL

SEQ ID NO: 61586 - protein, 10 aa, Homo sapiens
  misc_feature: Table A; Target 61586; HLA-C*06:02; PAX7; ENSG00000009709; TAA
VDYLAKNVSL

SEQ ID NO: 61587 - protein, 8 aa, Homo sapiens
  misc_feature: Table A; Target 61587; HLA-C*02:02; PAX7; ENSG00000009709; TAA
VEKKIEEY

SEQ ID NO: 61588 - protein, 8 aa, Homo sapiens
  misc_feature: Table A; Target 61588; HLA-B*18:01; PAX7; ENSG00000009709; TAA
VEMAHHGI

SEQ ID NO: 61589 - protein, 9 aa, Homo sapiens
  misc_feature: Table A; Target 61589; HLA-A*30:01; PAX7; ENSG00000009709; TAA
VESEPDLPL

SEQ ID NO: 61590 - protein, 9 aa, Homo sapiens
  misc_feature: Table A; Target 61590; HLA-B*18:01; PAX7; ENSG00000009709; TAA
VESEPDLPL

SEQ ID NO: 61591 - protein, 9 aa, Homo sapiens
  misc_feature: Table A; Target 61591; HLA-B*27:05; PAX7; ENSG00000009709; TAA
VESEPDLPL

SEQ ID NO: 61592 - protein, 9 aa, Homo sapiens
  misc_feature: Table A; Target 61592; HLA-B*35:03; PAX7; ENSG00000009709; TAA
VESEPDLPL

SEQ ID NO: 61593 - protein, 9 aa, Homo sapiens
  misc_feature: Table A; Target 61593; HLA-B*37:01; PAX7; ENSG00000009709; TAA
VESEPDLPL

SEQ ID NO: 61594 - protein, 9 aa, Homo sapiens
  misc_feature: Table A; Target 61594; HLA-B*40:01; PAX7; ENSG00000009709; TAA
VESEPDLPL

SEQ ID NO: 61595 - protein, 9 aa, Homo sapiens
  misc_feature: Table A; Target 61595; HLA-B*40:02; PAX7; ENSG00000009709; TAA
VESEPDLPL

SEQ ID NO: 61596 - protein, 9 aa, Homo sapiens
  misc_feature: Table A; Target 61596; HLA-B*49:01; PAX7; ENSG00000009709; TAA
VESEPDLPL

SEQ ID NO: 61597 - protein, 9 aa, Homo sapiens
  misc_feature: Table A; Target 61597; HLA-C*03:03; PAX7; ENSG00000009709; TAA
VESEPDLPL

SEQ ID NO: 61598 - protein, 9 aa, Homo sapiens
  misc_feature: Table A; Target 61598; HLA-C*03:04; PAX7; ENSG00000009709; TAA
VESEPDLPL

SEQ ID NO: 61599 - protein, 10 aa, Homo sapiens
  misc_feature: Table A; Target 61599; HLA-A*11:01; PAX7; ENSG00000009709; TAA
VESEPDLPLK

SEQ ID NO: 61600 - protein, 10 aa, Homo sapiens
  misc_feature: Table A; Target 61600; HLA-B*27:02; PAX7; ENSG00000009709; TAA
VESEPDLPLK

SEQ ID NO: 61601 - protein, 10 aa, Homo sapiens
  misc_feature: Table A; Target 61601; HLA-B*27:05; PAX7; ENSG00000009709; TAA
VESEPDLPLK

SEQ ID NO: 61602 - protein, 11 aa, Homo sapiens
  misc_feature: Table A; Target 61602; HLA-A*68:01; PAX7; ENSG00000009709; TAA
VESEPDLPLKR

SEQ ID NO: 61603 - protein, 11 aa, Homo sapiens
  misc_feature: Table A; Target 61603; HLA-B*27:02; PAX7; ENSG00000009709; TAA
VESEPDLPLKR

SEQ ID NO: 61604 - protein, 11 aa, Homo sapiens
  misc_feature: Table A; Target 61604; HLA-B*44:03; PAX7; ENSG00000009709; TAA
VESEPDLPLKR

SEQ ID NO: 61605 - protein, 11 aa, Homo sapiens
  misc_feature: Table A; Target 61605; HLA-C*07:06; PAX7; ENSG00000009709; TAA
VESEPDLPLKR

SEQ ID NO: 61606 - protein, 9 aa, Homo sapiens
  misc_feature: Table A; Target 61606; HLA-A*02:01; PAX7; ENSG00000009709; TAA
VLGLLPVET

SEQ ID NO: 61607 - protein, 8 aa, Homo sapiens
  misc_feature: Table A; Target 61607; HLA-C*04:01; PAX7; ENSG00000009709; TAA
VNQLGGVF

SEQ ID NO: 61608 - protein, 9 aa, Homo sapiens
  misc_feature: Table A; Target 61608; HLA-B*07:02; PAX7; ENSG00000009709; TAA
VPPQPQADF

SEQ ID NO: 61609 - protein, 9 aa, Homo sapiens
  misc_feature: Table A; Target 61609; HLA-B*35:01; PAX7; ENSG00000009709; TAA
VPPQPQADF

SEQ ID NO: 61610 - protein, 9 aa, Homo sapiens
  misc_feature: Table A; Target 61610; HLA-B*51:01; PAX7; ENSG00000009709; TAA
VPPQPQADF

SEQ ID NO: 61611 - protein, 9 aa, Homo sapiens
  misc_feature: Table A; Target 61611; HLA-C*07:02; PAX7; ENSG00000009709; TAA
VPPQPQADF

SEQ ID NO: 61612 - protein, 9 aa, Homo sapiens
  misc_feature: Table A; Target 61612; HLA-A*02:03; PAX7; ENSG00000009709; TAA
VPSGLVSSI

SEQ ID NO: 61613 - protein, 9 aa, Homo sapiens
  misc_feature: Table A; Target 61613; HLA-A*25:01; PAX7; ENSG00000009709; TAA
VPSGLVSSI

SEQ ID NO: 61614 - protein, 9 aa, Homo sapiens
  misc_feature: Table A; Target 61614; HLA-A*30:01; PAX7; ENSG00000009709; TAA
VPSGLVSSI

SEQ ID NO: 61615 - protein, 9 aa, Homo sapiens
  misc_feature: Table A; Target 61615; HLA-B*07:02; PAX7; ENSG00000009709; TAA
VPSGLVSSI

SEQ ID NO: 61616 - protein, 9 aa, Homo sapiens
  misc_feature: Table A; Target 61616; HLA-B*08:01; PAX7; ENSG00000009709; TAA
VPSGLVSSI

SEQ ID NO: 61617 - protein, 9 aa, Homo sapiens
  misc_feature: Table A; Target 61617; HLA-B*13:02; PAX7; ENSG00000009709; TAA
VPSGLVSSI

SEQ ID NO: 61618 - protein, 9 aa, Homo sapiens
  misc_feature: Table A; Target 61618; HLA-B*35:01; PAX7; ENSG00000009709; TAA
VPSGLVSSI

SEQ ID NO: 61619 - protein, 9 aa, Homo sapiens
  misc_feature: Table A; Target 61619; HLA-B*35:03; PAX7; ENSG00000009709; TAA
VPSGLVSSI

SEQ ID NO: 61620 - protein, 9 aa, Homo sapiens
  misc_feature: Table A; Target 61620; HLA-B*38:01; PAX7; ENSG00000009709; TAA
VPSGLVSSI

SEQ ID NO: 61621 - protein, 9 aa, Homo sapiens
  misc_feature: Table A; Target 61621; HLA-B*39:01; PAX7; ENSG00000009709; TAA
VPSGLVSSI

SEQ ID NO: 61622 - protein, 9 aa, Homo sapiens
  misc_feature: Table A; Target 61622; HLA-B*49:01; PAX7; ENSG00000009709; TAA
VPSGLVSSI

SEQ ID NO: 61623 - protein, 9 aa, Homo sapiens
  misc_feature: Table A; Target 61623; HLA-B*51:01; PAX7; ENSG00000009709; TAA
VPSGLVSSI

SEQ ID NO: 61624 - protein, 9 aa, Homo sapiens
  misc_feature: Table A; Target 61624; HLA-B*54:01; PAX7; ENSG00000009709; TAA
VPSGLVSSI

SEQ ID NO: 61625 - protein, 9 aa, Homo sapiens
  misc_feature: Table A; Target 61625; HLA-B*55:01; PAX7; ENSG00000009709; TAA
VPSGLVSSI

SEQ ID NO: 61626 - protein, 9 aa, Homo sapiens
  misc_feature: Table A; Target 61626; HLA-B*56:01; PAX7; ENSG00000009709; TAA
VPSGLVSSI

SEQ ID NO: 61627 - protein, 9 aa, Homo sapiens
  misc_feature: Table A; Target 61627; HLA-C*02:02; PAX7; ENSG00000009709; TAA
VPSGLVSSI

SEQ ID NO: 61628 - protein, 9 aa, Homo sapiens
  misc_feature: Table A; Target 61628; HLA-C*07:02; PAX7; ENSG00000009709; TAA
VPSGLVSSI

SEQ ID NO: 61629 - protein, 9 aa, Homo sapiens
  misc_feature: Table A; Target 61629; HLA-C*12:03; PAX7; ENSG00000009709; TAA
VPSGLVSSI

SEQ ID NO: 61630 - protein, 9 aa, Homo sapiens
  misc_feature: Table A; Target 61630; HLA-C*14:02; PAX7; ENSG00000009709; TAA
VPSGLVSSI

SEQ ID NO: 61631 - protein, 9 aa, Homo sapiens
  misc_feature: Table A; Target 61631; HLA-C*16:02; PAX7; ENSG00000009709; TAA
VPSGLVSSI

SEQ ID NO: 61632 - protein, 11 aa, Homo sapiens
  misc_feature: Table A; Target 61632; HLA-A*68:01; PAX7; ENSG00000009709; TAA
VPSGLVSSISR

SEQ ID NO: 61633 - protein, 11 aa, Homo sapiens
  misc_feature: Table A; Target 61633; HLA-B*27:02; PAX7; ENSG00000009709; TAA
VPSGLVSSISR

SEQ ID NO: 61634 - protein, 11 aa, Homo sapiens
  misc_feature: Table A; Target 61634; HLA-C*07:06; PAX7; ENSG00000009709; TAA
VPSGLVSSISR

SEQ ID NO: 61635 - protein, 9 aa, Homo sapiens
  misc_feature: Table A; Target 61635; HLA-C*16:01; PAX7; ENSG00000009709; TAA
VSLSTQRRM

SEQ ID NO: 61636 - protein, 9 aa, Homo sapiens
  misc_feature: Table A; Target 61636; HLA-B*13:02; PAX7; ENSG00000009709; TAA
VSNGLSPQV

SEQ ID NO: 61637 - protein, 9 aa, Homo sapiens
  misc_feature: Table A; Target 61637; HLA-C*06:02; PAX7; ENSG00000009709; TAA
VSNGLSPQV

SEQ ID NO: 61638 - protein, 9 aa, Homo sapiens
  misc_feature: Table A; Target 61638; HLA-C*16:02; PAX7; ENSG00000009709; TAA
VSNGLSPQV

SEQ ID NO: 61639 - protein, 9 aa, Homo sapiens
  misc_feature: Table A; Target 61639; HLA-C*16:04; PAX7; ENSG00000009709; TAA
VSNGLSPQV

SEQ ID NO: 61640 - protein, 10 aa, Homo sapiens
  misc_feature: Table A; Target 61640; HLA-B*39:01; PAX7; ENSG00000009709; TAA
VSNGLSPQVM

SEQ ID NO: 61641 - protein, 10 aa, Homo sapiens
  misc_feature: Table A; Target 61641; HLA-C*01:02; PAX7; ENSG00000009709; TAA
VSNGLSPQVM

SEQ ID NO: 61642 - protein, 10 aa, Homo sapiens
  misc_feature: Table A; Target 61642; HLA-C*07:04; PAX7; ENSG00000009709; TAA
VSNGLSPQVM

SEQ ID NO: 61643 - protein, 10 aa, Homo sapiens
  misc_feature: Table A; Target 61643; HLA-C*12:03; PAX7; ENSG00000009709; TAA
VSNGLSPQVM

SEQ ID NO: 61644 - protein, 10 aa, Homo sapiens
  misc_feature: Table A; Target 61644; HLA-C*16:02; PAX7; ENSG00000009709; TAA
VSNGLSPQVM

SEQ ID NO: 61645 - protein, 8 aa, Homo sapiens
  misc_feature: Table A; Target 61645; HLA-B*07:02; PAX7; ENSG00000009709; TAA
VSSISRVL

SEQ ID NO: 61646 - protein, 8 aa, Homo sapiens
  misc_feature: Table A; Target 61646; HLA-B*08:01; PAX7; ENSG00000009709; TAA
VSSISRVL

SEQ ID NO: 61647 - protein, 8 aa, Homo sapiens
  misc_feature: Table A; Target 61647; HLA-C*01:02; PAX7; ENSG00000009709; TAA
VSSISRVL

SEQ ID NO: 61648 - protein, 8 aa, Homo sapiens
  misc_feature: Table A; Target 61648; HLA-C*03:03; PAX7; ENSG00000009709; TAA
VSSISRVL

SEQ ID NO: 61649 - protein, 8 aa, Homo sapiens
  misc_feature: Table A; Target 61649; HLA-C*03:04; PAX7; ENSG00000009709; TAA
VSSISRVL

SEQ ID NO: 61650 - protein, 8 aa, Homo sapiens
  misc_feature: Table A; Target 61650; HLA-C*06:02; PAX7; ENSG00000009709; TAA
VSSISRVL

SEQ ID NO: 61651 - protein, 8 aa, Homo sapiens
  misc_feature: Table A; Target 61651; HLA-C*07:04; PAX7; ENSG00000009709; TAA
VSSISRVL

SEQ ID NO: 61652 - protein, 8 aa, Homo sapiens
  misc_feature: Table A; Target 61652; HLA-C*12:03; PAX7; ENSG00000009709; TAA
VSSISRVL

SEQ ID NO: 61653 - protein, 8 aa, Homo sapiens
  misc_feature: Table A; Target 61653; HLA-C*16:01; PAX7; ENSG00000009709; TAA
VSSISRVL

SEQ ID NO: 61654 - protein, 8 aa, Homo sapiens
  misc_feature: Table A; Target 61654; HLA-C*16:02; PAX7; ENSG00000009709; TAA
VSSISRVL

SEQ ID NO: 61655 - protein, 9 aa, Homo sapiens
  misc_feature: Table A; Target 61655; HLA-A*31:01; PAX7; ENSG00000009709; TAA
VSSISRVLR

SEQ ID NO: 61656 - protein, 10 aa, Homo sapiens
  misc_feature: Table A; Target 61656; HLA-A*01:01; PAX7; ENSG00000009709; TAA
YGARHSFSSY

SEQ ID NO: 61657 - protein, 10 aa, Homo sapiens
  misc_feature: Table A; Target 61657; HLA-A*25:01; PAX7; ENSG00000009709; TAA
YGARHSFSSY

SEQ ID NO: 61658 - protein, 10 aa, Homo sapiens
  misc_feature: Table A; Target 61658; HLA-B*46:01; PAX7; ENSG00000009709; TAA
YGARHSFSSY

SEQ ID NO: 61659 - protein, 8 aa, Homo sapiens
  misc_feature: Table A; Target 61659; HLA-A*30:02; PAX7; ENSG00000009709; TAA
YGQTAVDY

SEQ ID NO: 61660 - protein, 8 aa, Homo sapiens
  misc_feature: Table A; Target 61660; HLA-B*15:01; PAX7; ENSG00000009709; TAA
YGQTAVDY

SEQ ID NO: 61661 - protein, 8 aa, Homo sapiens
  misc_feature: Table A; Target 61661; HLA-B*18:01; PAX7; ENSG00000009709; TAA
YGQTAVDY

SEQ ID NO: 61662 - protein, 8 aa, Homo sapiens
  misc_feature: Table A; Target 61662; HLA-B*39:01; PAX7; ENSG00000009709; TAA
YGQTAVDY

SEQ ID NO: 61663 - protein, 8 aa, Homo sapiens
  misc_feature: Table A; Target 61663; HLA-B*46:01; PAX7; ENSG00000009709; TAA
YGQTAVDY

SEQ ID NO: 61664 - protein, 8 aa, Homo sapiens
  misc_feature: Table A; Target 61664; HLA-C*01:02; PAX7; ENSG00000009709; TAA
YGQTAVDY

SEQ ID NO: 61665 - protein, 8 aa, Homo sapiens
  misc_feature: Table A; Target 61665; HLA-C*03:03; PAX7; ENSG00000009709; TAA
YGQTAVDY

SEQ ID NO: 61666 - protein, 8 aa, Homo sapiens
  misc_feature: Table A; Target 61666; HLA-C*07:04; PAX7; ENSG00000009709; TAA
YGQTAVDY

SEQ ID NO: 61667 - protein, 8 aa, Homo sapiens
  misc_feature: Table A; Target 61667; HLA-C*12:03; PAX7; ENSG00000009709; TAA
YGQTAVDY

SEQ ID NO: 61668 - protein, 8 aa, Homo sapiens
  misc_feature: Table A; Target 61668; HLA-C*14:02; PAX7; ENSG00000009709; TAA
YGQTAVDY

SEQ ID NO: 61669 - protein, 8 aa, Homo sapiens
  misc_feature: Table A; Target 61669; HLA-C*16:02; PAX7; ENSG00000009709; TAA
YGQTAVDY

SEQ ID NO: 61670 - protein, 9 aa, Homo sapiens
  misc_feature: Table A; Target 61670; HLA-B*27:05; PAX7; ENSG00000009709; TAA
YGQTAVDYL

SEQ ID NO: 61671 - protein, 9 aa, Homo sapiens
  misc_feature: Table A; Target 61671; HLA-B*35:03; PAX7; ENSG00000009709; TAA
YGQTAVDYL

SEQ ID NO: 61672 - protein, 9 aa, Homo sapiens
  misc_feature: Table A; Target 61672; HLA-B*38:01; PAX7; ENSG00000009709; TAA
YGQTAVDYL

SEQ ID NO: 61673 - protein, 9 aa, Homo sapiens
  misc_feature: Table A; Target 61673; HLA-B*39:01; PAX7; ENSG00000009709; TAA
YGQTAVDYL

SEQ ID NO: 61674 - protein, 9 aa, Homo sapiens
  misc_feature: Table A; Target 61674; HLA-C*01:02; PAX7; ENSG00000009709; TAA
YGQTAVDYL

SEQ ID NO: 61675 - protein, 9 aa, Homo sapiens
  misc_feature: Table A; Target 61675; HLA-C*05:01; PAX7; ENSG00000009709; TAA
YGQTAVDYL

SEQ ID NO: 61676 - protein, 9 aa, Homo sapiens
  misc_feature: Table A; Target 61676; HLA-C*06:02; PAX7; ENSG00000009709; TAA
YGQTAVDYL

SEQ ID NO: 61677 - protein, 9 aa, Homo sapiens
  misc_feature: Table A; Target 61677; HLA-C*07:02; PAX7; ENSG00000009709; TAA
YGQTAVDYL

SEQ ID NO: 61678 - protein, 9 aa, Homo sapiens
  misc_feature: Table A; Target 61678; HLA-C*07:04; PAX7; ENSG00000009709; TAA
YGQTAVDYL

SEQ ID NO: 61679 - protein, 9 aa, Homo sapiens
  misc_feature: Table A; Target 61679; HLA-C*12:03; PAX7; ENSG00000009709; TAA
YGQTAVDYL

SEQ ID NO: 61680 - protein, 11 aa, Homo sapiens
  misc_feature: Table A; Target 61680; HLA-A*11:01; PAX7; ENSG00000009709; TAA
YGQTAVDYLAK

SEQ ID NO: 61681 - protein, 11 aa, Homo sapiens
  misc_feature: Table A; Target 61681; HLA-B*27:02; PAX7; ENSG00000009709; TAA
YGQTAVDYLAK

SEQ ID NO: 61682 - protein, 8 aa, Homo sapiens
  misc_feature: Table A; Target 61682; HLA-C*14:02; PAX7; ENSG00000009709; TAA
YGQYGQTA

SEQ ID NO: 61683 - protein, 9 aa, Homo sapiens
  misc_feature: Table A; Target 61683; HLA-B*13:02; PAX7; ENSG00000009709; TAA
YGQYGQTAV

SEQ ID NO: 61684 - protein, 9 aa, Homo sapiens
  misc_feature: Table A; Target 61684; HLA-B*39:01; PAX7; ENSG00000009709; TAA
YGQYGQTAV

SEQ ID NO: 61685 - protein, 9 aa, Homo sapiens
  misc_feature: Table A; Target 61685; HLA-B*56:01; PAX7; ENSG00000009709; TAA
YGQYGQTAV

SEQ ID NO: 61686 - protein, 9 aa, Homo sapiens
  misc_feature: Table A; Target 61686; HLA-C*01:02; PAX7; ENSG00000009709; TAA
YGQYGQTAV

SEQ ID NO: 61687 - protein, 9 aa, Homo sapiens
  misc_feature: Table A; Target 61687; HLA-C*03:03; PAX7; ENSG00000009709; TAA
YGQYGQTAV

SEQ ID NO: 61688 - protein, 9 aa, Homo sapiens
  misc_feature: Table A; Target 61688; HLA-C*03:04; PAX7; ENSG00000009709; TAA
YGQYGQTAV

SEQ ID NO: 61689 - protein, 9 aa, Homo sapiens
  misc_feature: Table A; Target 61689; HLA-C*07:04; PAX7; ENSG00000009709; TAA
YGQYGQTAV

SEQ ID NO: 61690 - protein, 9 aa, Homo sapiens
  misc_feature: Table A; Target 61690; HLA-C*14:02; PAX7; ENSG00000009709; TAA
YGQYGQTAV

SEQ ID NO: 61691 - protein, 9 aa, Homo sapiens
  misc_feature: Table A; Target 61691; HLA-C*16:02; PAX7; ENSG00000009709; TAA
YGQYGQTAV

SEQ ID NO: 61692 - protein, 11 aa, Homo sapiens
  misc_feature: Table A; Target 61692; HLA-B*39:01; PAX7; ENSG00000009709; TAA
YGQYGQTAVDY

SEQ ID NO: 61693 - protein, 11 aa, Homo sapiens
  misc_feature: Table A; Target 61693; HLA-C*04:01; PAX7; ENSG00000009709; TAA
YGQYGQTAVDY

SEQ ID NO: 61694 - protein, 11 aa, Homo sapiens
  misc_feature: Table A; Target 61694; HLA-C*07:01; PAX7; ENSG00000009709; TAA
YGQYGQTAVDY

SEQ ID NO: 61695 - protein, 11 aa, Homo sapiens
  misc_feature: Table A; Target 61695; HLA-C*12:03; PAX7; ENSG00000009709; TAA
YGQYGQTAVDY

SEQ ID NO: 61696 - protein, 9 aa, Homo sapiens
  misc_feature: Table A; Target 61696; HLA-B*15:03; PAX7; ENSG00000009709; TAA
YKRENPGMF

SEQ ID NO: 61697 - protein, 8 aa, Homo sapiens
  misc_feature: Table A; Target 61697; HLA-A*02:01; PAX7; ENSG00000009709; TAA
YLAKNVSL

SEQ ID NO: 61698 - protein, 8 aa, Homo sapiens
  misc_feature: Table A; Target 61698; HLA-A*02:03; PAX7; ENSG00000009709; TAA
YLAKNVSL

SEQ ID NO: 61699 - protein, 8 aa, Homo sapiens
  misc_feature: Table A; Target 61699; HLA-A*02:04; PAX7; ENSG00000009709; TAA
YLAKNVSL

SEQ ID NO: 61700 - protein, 8 aa, Homo sapiens
  misc_feature: Table A; Target 61700; HLA-B*08:01; PAX7; ENSG00000009709; TAA
YLAKNVSL

SEQ ID NO: 61701 - protein, 9 aa, Homo sapiens
  misc_feature: Table A; Target 61701; HLA-A*02:03; PAX7; ENSG00000009709; TAA
YLAKNVSLS

SEQ ID NO: 61702 - protein, 10 aa, Homo sapiens
  misc_feature: Table A; Target 61702; HLA-B*07:02; PAX7; ENSG00000009709; TAA
YPRTGFPLEV

SEQ ID NO: 61703 - protein, 10 aa, Homo sapiens
  misc_feature: Table A; Target 61703; HLA-B*51:01; PAX7; ENSG00000009709; TAA
YPRTGFPLEV

SEQ ID NO: 61704 - protein, 10 aa, Homo sapiens
  misc_feature: Table A; Target 61704; HLA-B*54:01; PAX7; ENSG00000009709; TAA
YPRTGFPLEV

SEQ ID NO: 61705 - protein, 10 aa, Homo sapiens
  misc_feature: Table A; Target 61705; HLA-B*56:01; PAX7; ENSG00000009709; TAA
YPRTGFPLEV

SEQ ID NO: 61706 - protein, 10 aa, Homo sapiens
  misc_feature: Table A; Target 61706; HLA-C*07:02; PAX7; ENSG00000009709; TAA
YPRTGFPLEV

SEQ ID NO: 61707 - protein, 8 aa, Homo sapiens
  misc_feature: Table A; Target 61707; HLA-B*54:01; PAX7; ENSG00000009709; TAA
YPTTTISQ

SEQ ID NO: 61708 - protein, 8 aa, Homo sapiens
  misc_feature: Table A; Target 61708; HLA-B*56:01; PAX7; ENSG00000009709; TAA
YPTTTISQ

SEQ ID NO: 61709 - protein, 10 aa, Homo sapiens
  misc_feature: Table A; Target 61709; HLA-B*27:02; PAX7; ENSG00000009709; TAA
YPTTTISQDG

SEQ ID NO: 61710 - protein, 10 aa, Homo sapiens
  misc_feature: Table A; Target 61710; HLA-B*56:01; PAX7; ENSG00000009709; TAA
YPTTTISQDG

SEQ ID NO: 61711 - protein, 10 aa, Homo sapiens
  misc_feature: Table A; Target 61711; HLA-C*07:02; PAX7; ENSG00000009709; TAA
YPTTTISQDG

SEQ ID NO: 61712 - protein, 8 aa, Homo sapiens
  misc_feature: Table A; Target 61712; HLA-B*39:01; PAX7; ENSG00000009709; TAA
YQETGSIR

SEQ ID NO: 61713 - protein, 8 aa, Homo sapiens
  misc_feature: Table A; Target 61713; HLA-B*15:01; PAX7; ENSG00000009709; TAA
YQLPDSTY

SEQ ID NO: 61714 - protein, 8 aa, Homo sapiens
  misc_feature: Table A; Target 61714; HLA-B*15:03; PAX7; ENSG00000009709; TAA
YQLPDSTY

SEQ ID NO: 61715 - protein, 8 aa, Homo sapiens
  misc_feature: Table A; Target 61715; HLA-B*39:01; PAX7; ENSG00000009709; TAA
YQLPDSTY

SEQ ID NO: 61716 - protein, 9 aa, Homo sapiens
  misc_feature: Table A; Target 61716; HLA-B*13:02; PAX7; ENSG00000009709; TAA
YQYGQYGQT

SEQ ID NO: 61717 - protein, 9 aa, Homo sapiens
  misc_feature: Table A; Target 61717; HLA-B*39:01; PAX7; ENSG00000009709; TAA
YQYGQYGQT

SEQ ID NO: 61718 - protein, 10 aa, Homo sapiens
  misc_feature: Table A; Target 61718; HLA-A*02:03; PAX7; ENSG00000009709; TAA
YQYGQYGQTA

SEQ ID NO: 61719 - protein, 10 aa, Homo sapiens
  misc_feature: Table A; Target 61719; HLA-A*30:01; PAX7; ENSG00000009709; TAA
YQYGQYGQTA

SEQ ID NO: 61720 - protein, 10 aa, Homo sapiens
  misc_feature: Table A; Target 61720; HLA-B*13:02; PAX7; ENSG00000009709; TAA
YQYGQYGQTA

SEQ ID NO: 61721 - protein, 10 aa, Homo sapiens
  misc_feature: Table A; Target 61721; HLA-B*15:01; PAX7; ENSG00000009709; TAA
YQYGQYGQTA

SEQ ID NO: 61722 - protein, 10 aa, Homo sapiens
  misc_feature: Table A; Target 61722; HLA-B*15:03; PAX7; ENSG00000009709; TAA
YQYGQYGQTA

SEQ ID NO: 61723 - protein, 10 aa, Homo sapiens
  misc_feature: Table A; Target 61723; HLA-B*27:05; PAX7; ENSG00000009709; TAA
YQYGQYGQTA

SEQ ID NO: 61724 - protein, 10 aa, Homo sapiens
  misc_feature: Table A; Target 61724; HLA-B*38:01; PAX7; ENSG00000009709; TAA
YQYGQYGQTA

SEQ ID NO: 61725 - protein, 10 aa, Homo sapiens
  misc_feature: Table A; Target 61725; HLA-B*39:01; PAX7; ENSG00000009709; TAA
YQYGQYGQTA

SEQ ID NO: 61726 - protein, 10 aa, Homo sapiens
  misc_feature: Table A; Target 61726; HLA-B*40:02; PAX7; ENSG00000009709; TAA
YQYGQYGQTA

SEQ ID NO: 61727 - protein, 10 aa, Homo sapiens
  misc_feature: Table A; Target 61727; HLA-C*02:02; PAX7; ENSG00000009709; TAA
YQYGQYGQTA

SEQ ID NO: 61728 - protein, 10 aa, Homo sapiens
  misc_feature: Table A; Target 61728; HLA-C*07:04; PAX7; ENSG00000009709; TAA
YQYGQYGQTA

SEQ ID NO: 61729 - protein, 10 aa, Homo sapiens
  misc_feature: Table A; Target 61729; HLA-C*12:03; PAX7; ENSG00000009709; TAA
YQYGQYGQTA

SEQ ID NO: 61730 - protein, 10 aa, Homo sapiens
  misc_feature: Table A; Target 61730; HLA-C*14:02; PAX7; ENSG00000009709; TAA
YQYGQYGQTA

SEQ ID NO: 61731 - protein, 10 aa, Homo sapiens
  misc_feature: Table A; Target 61731; HLA-C*16:04; PAX7; ENSG00000009709; TAA
YQYGQYGQTA

SEQ ID NO: 61732 - protein, 11 aa, Homo sapiens
  misc_feature: Table A; Target 61732; HLA-A*02:01; PAX7; ENSG00000009709; TAA
YQYGQYGQTAV

SEQ ID NO: 61733 - protein, 11 aa, Homo sapiens
  misc_feature: Table A; Target 61733; HLA-A*02:03; PAX7; ENSG00000009709; TAA
YQYGQYGQTAV

SEQ ID NO: 61734 - protein, 11 aa, Homo sapiens
  misc_feature: Table A; Target 61734; HLA-A*02:04; PAX7; ENSG00000009709; TAA
YQYGQYGQTAV

SEQ ID NO: 61735 - protein, 11 aa, Homo sapiens
  misc_feature: Table A; Target 61735; HLA-A*30:01; PAX7; ENSG00000009709; TAA
YQYGQYGQTAV

SEQ ID NO: 61736 - protein, 11 aa, Homo sapiens
  misc_feature: Table A; Target 61736; HLA-A*68:02; PAX7; ENSG00000009709; TAA
YQYGQYGQTAV

SEQ ID NO: 61737 - protein, 11 aa, Homo sapiens
  misc_feature: Table A; Target 61737; HLA-B*13:02; PAX7; ENSG00000009709; TAA
YQYGQYGQTAV

SEQ ID NO: 61738 - protein, 11 aa, Homo sapiens
  misc_feature: Table A; Target 61738; HLA-B*15:03; PAX7; ENSG00000009709; TAA
YQYGQYGQTAV

SEQ ID NO: 61739 - protein, 11 aa, Homo sapiens
  misc_feature: Table A; Target 61739; HLA-B*27:05; PAX7; ENSG00000009709; TAA
YQYGQYGQTAV

SEQ ID NO: 61740 - protein, 11 aa, Homo sapiens
  misc_feature: Table A; Target 61740; HLA-B*39:01; PAX7; ENSG00000009709; TAA
YQYGQYGQTAV

SEQ ID NO: 61741 - protein, 11 aa, Homo sapiens
  misc_feature: Table A; Target 61741; HLA-C*02:02; PAX7; ENSG00000009709; TAA
YQYGQYGQTAV

SEQ ID NO: 61742 - protein, 11 aa, Homo sapiens
  misc_feature: Table A; Target 61742; HLA-C*16:04; PAX7; ENSG00000009709; TAA
YQYGQYGQTAV

SEQ ID NO: 61743 - protein, 9 aa, Homo sapiens
  misc_feature: Table A; Target 61743; HLA-A*01:01; PAX7; ENSG00000009709; TAA
YSDSFMNPA

SEQ ID NO: 61744 - protein, 9 aa, Homo sapiens
  misc_feature: Table A; Target 61744; HLA-B*54:01; PAX7; ENSG00000009709; TAA
YSDSFMNPA

SEQ ID NO: 61745 - protein, 10 aa, Homo sapiens
  misc_feature: Table A; Target 61745; HLA-A*01:01; PAX7; ENSG00000009709; TAA
YSDSFMNPAA

SEQ ID NO: 61746 - protein, 8 aa, Homo sapiens
  misc_feature: Table A; Target 61746; HLA-C*03:04; PAX7; ENSG00000009709; TAA
YSTTGYSV

SEQ ID NO: 61747 - protein, 9 aa, Homo sapiens
  misc_feature: Table A; Target 61747; HLA-A*01:01; PAX7; ENSG00000009709; TAA
YSVDPVAGY

SEQ ID NO: 61748 - protein, 9 aa, Homo sapiens
  misc_feature: Table A; Target 61748; HLA-A*11:01; PAX7; ENSG00000009709; TAA
YSVDPVAGY

SEQ ID NO: 61749 - protein, 9 aa, Homo sapiens
  misc_feature: Table A; Target 61749; HLA-A*23:01; PAX7; ENSG00000009709; TAA
YSVDPVAGY

SEQ ID NO: 61750 - protein, 9 aa, Homo sapiens
  misc_feature: Table A; Target 61750; HLA-A*25:01; PAX7; ENSG00000009709; TAA
YSVDPVAGY

SEQ ID NO: 61751 - protein, 9 aa, Homo sapiens
  misc_feature: Table A; Target 61751; HLA-A*26:01; PAX7; ENSG00000009709; TAA
YSVDPVAGY

SEQ ID NO: 61752 - protein, 9 aa, Homo sapiens
  misc_feature: Table A; Target 61752; HLA-A*29:02; PAX7; ENSG00000009709; TAA
YSVDPVAGY

SEQ ID NO: 61753 - protein, 9 aa, Homo sapiens
  misc_feature: Table A; Target 61753; HLA-A*30:02; PAX7; ENSG00000009709; TAA
YSVDPVAGY

SEQ ID NO: 61754 - protein, 9 aa, Homo sapiens
  misc_feature: Table A; Target 61754; HLA-A*32:01; PAX7; ENSG00000009709; TAA
YSVDPVAGY

SEQ ID NO: 61755 - protein, 9 aa, Homo sapiens
  misc_feature: Table A; Target 61755; HLA-A*33:01; PAX7; ENSG00000009709; TAA
YSVDPVAGY

SEQ ID NO: 61756 - protein, 9 aa, Homo sapiens
  misc_feature: Table A; Target 61756; HLA-A*33:03; PAX7; ENSG00000009709; TAA
YSVDPVAGY

SEQ ID NO: 61757 - protein, 9 aa, Homo sapiens
  misc_feature: Table A; Target 61757; HLA-A*68:01; PAX7; ENSG00000009709; TAA
YSVDPVAGY

SEQ ID NO: 61758 - protein, 9 aa, Homo sapiens
  misc_feature: Table A; Target 61758; HLA-B*15:01; PAX7; ENSG00000009709; TAA
YSVDPVAGY

SEQ ID NO: 61759 - protein, 9 aa, Homo sapiens
  misc_feature: Table A; Target 61759; HLA-B*15:03; PAX7; ENSG00000009709; TAA
YSVDPVAGY

SEQ ID NO: 61760 - protein, 9 aa, Homo sapiens
  misc_feature: Table A; Target 61760; HLA-B*18:01; PAX7; ENSG00000009709; TAA
YSVDPVAGY

SEQ ID NO: 61761 - protein, 9 aa, Homo sapiens
  misc_feature: Table A; Target 61761; HLA-B*27:02; PAX7; ENSG00000009709; TAA
YSVDPVAGY

SEQ ID NO: 61762 - protein, 9 aa, Homo sapiens
  misc_feature: Table A; Target 61762; HLA-B*27:05; PAX7; ENSG00000009709; TAA
YSVDPVAGY

SEQ ID NO: 61763 - protein, 9 aa, Homo sapiens
  misc_feature: Table A; Target 61763; HLA-B*35:01; PAX7; ENSG00000009709; TAA
YSVDPVAGY

SEQ ID NO: 61764 - protein, 9 aa, Homo sapiens
  misc_feature: Table A; Target 61764; HLA-B*39:01; PAX7; ENSG00000009709; TAA
YSVDPVAGY

SEQ ID NO: 61765 - protein, 9 aa, Homo sapiens
  misc_feature: Table A; Target 61765; HLA-B*44:02; PAX7; ENSG00000009709; TAA
YSVDPVAGY

SEQ ID NO: 61766 - protein, 9 aa, Homo sapiens
  misc_feature: Table A; Target 61766; HLA-B*44:03; PAX7; ENSG00000009709; TAA
YSVDPVAGY

SEQ ID NO: 61767 - protein, 9 aa, Homo sapiens
  misc_feature: Table A; Target 61767; HLA-B*46:01; PAX7; ENSG00000009709; TAA
YSVDPVAGY

SEQ ID NO: 61768 - protein, 9 aa, Homo sapiens
  misc_feature: Table A; Target 61768; HLA-B*55:01; PAX7; ENSG00000009709; TAA
YSVDPVAGY

SEQ ID NO: 61769 - protein, 9 aa, Homo sapiens
  misc_feature: Table A; Target 61769; HLA-B*57:01; PAX7; ENSG00000009709; TAA
YSVDPVAGY

SEQ ID NO: 61770 - protein, 9 aa, Homo sapiens
  misc_feature: Table A; Target 61770; HLA-B*58:01; PAX7; ENSG00000009709; TAA
YSVDPVAGY

SEQ ID NO: 61771 - protein, 9 aa, Homo sapiens
  misc_feature: Table A; Target 61771; HLA-C*01:02; PAX7; ENSG00000009709; TAA
YSVDPVAGY

SEQ ID NO: 61772 - protein, 9 aa, Homo sapiens
  misc_feature: Table A; Target 61772; HLA-C*02:02; PAX7; ENSG00000009709; TAA
YSVDPVAGY

SEQ ID NO: 61773 - protein, 9 aa, Homo sapiens
  misc_feature: Table A; Target 61773; HLA-C*03:03; PAX7; ENSG00000009709; TAA
YSVDPVAGY

SEQ ID NO: 61774 - protein, 9 aa, Homo sapiens
  misc_feature: Table A; Target 61774; HLA-C*03:04; PAX7; ENSG00000009709; TAA
YSVDPVAGY

SEQ ID NO: 61775 - protein, 9 aa, Homo sapiens
  misc_feature: Table A; Target 61775; HLA-C*05:01; PAX7; ENSG00000009709; TAA
YSVDPVAGY

SEQ ID NO: 61776 - protein, 9 aa, Homo sapiens
  misc_feature: Table A; Target 61776; HLA-C*07:01; PAX7; ENSG00000009709; TAA
YSVDPVAGY

SEQ ID NO: 61777 - protein, 9 aa, Homo sapiens
  misc_feature: Table A; Target 61777; HLA-C*07:04; PAX7; ENSG00000009709; TAA
YSVDPVAGY

SEQ ID NO: 61778 - protein, 9 aa, Homo sapiens
  misc_feature: Table A; Target 61778; HLA-C*07:06; PAX7; ENSG00000009709; TAA
YSVDPVAGY

SEQ ID NO: 61779 - protein, 9 aa, Homo sapiens
  misc_feature: Table A; Target 61779; HLA-C*12:03; PAX7; ENSG00000009709; TAA
YSVDPVAGY

SEQ ID NO: 61780 - protein, 9 aa, Homo sapiens
  misc_feature: Table A; Target 61780; HLA-C*14:02; PAX7; ENSG00000009709; TAA
YSVDPVAGY

SEQ ID NO: 61781 - protein, 9 aa, Homo sapiens
  misc_feature: Table A; Target 61781; HLA-C*16:01; PAX7; ENSG00000009709; TAA
YSVDPVAGY

SEQ ID NO: 61782 - protein, 9 aa, Homo sapiens
  misc_feature: Table A; Target 61782; HLA-C*16:02; PAX7; ENSG00000009709; TAA
YSVDPVAGY

SEQ ID NO: 61783 - protein, 9 aa, Homo sapiens
  misc_feature: Table A; Target 61783; HLA-C*16:04; PAX7; ENSG00000009709; TAA
YSVDPVAGY

SEQ ID NO: 61784 - protein, 10 aa, Homo sapiens
  misc_feature: Table A; Target 61784; HLA-A*01:01; PAX7; ENSG00000009709; TAA
YSVDPVAGYQ

SEQ ID NO: 61785 - protein, 10 aa, Homo sapiens
  misc_feature: Table A; Target 61785; HLA-A*68:02; PAX7; ENSG00000009709; TAA
YSVDPVAGYQ

SEQ ID NO: 61786 - protein, 10 aa, Homo sapiens
  misc_feature: Table A; Target 61786; HLA-C*06:02; PAX7; ENSG00000009709; TAA
YSVDPVAGYQ

SEQ ID NO: 61787 - protein, 10 aa, Homo sapiens
  misc_feature: Table A; Target 61787; HLA-C*07:01; PAX7; ENSG00000009709; TAA
YSVDPVAGYQ

SEQ ID NO: 61788 - protein, 11 aa, Homo sapiens
  misc_feature: Table A; Target 61788; HLA-A*01:01; PAX7; ENSG00000009709; TAA
YSVDPVAGYQY

SEQ ID NO: 61789 - protein, 11 aa, Homo sapiens
  misc_feature: Table A; Target 61789; HLA-A*11:01; PAX7; ENSG00000009709; TAA
YSVDPVAGYQY

SEQ ID NO: 61790 - protein, 11 aa, Homo sapiens
  misc_feature: Table A; Target 61790; HLA-A*23:01; PAX7; ENSG00000009709; TAA
YSVDPVAGYQY

SEQ ID NO: 61791 - protein, 11 aa, Homo sapiens
  misc_feature: Table A; Target 61791; HLA-A*25:01; PAX7; ENSG00000009709; TAA
YSVDPVAGYQY

SEQ ID NO: 61792 - protein, 11 aa, Homo sapiens
  misc_feature: Table A; Target 61792; HLA-A*26:01; PAX7; ENSG00000009709; TAA
YSVDPVAGYQY

SEQ ID NO: 61793 - protein, 11 aa, Homo sapiens
  misc_feature: Table A; Target 61793; HLA-A*29:02; PAX7; ENSG00000009709; TAA
YSVDPVAGYQY

SEQ ID NO: 61794 - protein, 11 aa, Homo sapiens
  misc_feature: Table A; Target 61794; HLA-A*30:02; PAX7; ENSG00000009709; TAA
YSVDPVAGYQY

SEQ ID NO: 61795 - protein, 11 aa, Homo sapiens
  misc_feature: Table A; Target 61795; HLA-A*32:01; PAX7; ENSG00000009709; TAA
YSVDPVAGYQY

SEQ ID NO: 61796 - protein, 11 aa, Homo sapiens
  misc_feature: Table A; Target 61796; HLA-A*33:01; PAX7; ENSG00000009709; TAA
YSVDPVAGYQY

SEQ ID NO: 61797 - protein, 11 aa, Homo sapiens
  misc_feature: Table A; Target 61797; HLA-A*33:03; PAX7; ENSG00000009709; TAA
YSVDPVAGYQY

SEQ ID NO: 61798 - protein, 11 aa, Homo sapiens
  misc_feature: Table A; Target 61798; HLA-A*68:01; PAX7; ENSG00000009709; TAA
YSVDPVAGYQY

SEQ ID NO: 61799 - protein, 11 aa, Homo sapiens
  misc_feature: Table A; Target 61799; HLA-B*15:01; PAX7; ENSG00000009709; TAA
YSVDPVAGYQY

SEQ ID NO: 61800 - protein, 11 aa, Homo sapiens
  misc_feature: Table A; Target 61800; HLA-B*15:03; PAX7; ENSG00000009709; TAA
YSVDPVAGYQY

SEQ ID NO: 61801 - protein, 11 aa, Homo sapiens
  misc_feature: Table A; Target 61801; HLA-B*27:02; PAX7; ENSG00000009709; TAA
YSVDPVAGYQY

SEQ ID NO: 61802 - protein, 11 aa, Homo sapiens
  misc_feature: Table A; Target 61802; HLA-B*27:05; PAX7; ENSG00000009709; TAA
YSVDPVAGYQY

SEQ ID NO: 61803 - protein, 11 aa, Homo sapiens
  misc_feature: Table A; Target 61803; HLA-B*35:01; PAX7; ENSG00000009709; TAA
YSVDPVAGYQY

SEQ ID NO: 61804 - protein, 11 aa, Homo sapiens
  misc_feature: Table A; Target 61804; HLA-B*39:01; PAX7; ENSG00000009709; TAA
YSVDPVAGYQY

SEQ ID NO: 61805 - protein, 11 aa, Homo sapiens
  misc_feature: Table A; Target 61805; HLA-B*44:03; PAX7; ENSG00000009709; TAA
YSVDPVAGYQY

SEQ ID NO: 61806 - protein, 11 aa, Homo sapiens
  misc_feature: Table A; Target 61806; HLA-B*46:01; PAX7; ENSG00000009709; TAA
YSVDPVAGYQY

SEQ ID NO: 61807 - protein, 11 aa, Homo sapiens
  misc_feature: Table A; Target 61807; HLA-B*57:01; PAX7; ENSG00000009709; TAA
YSVDPVAGYQY

SEQ ID NO: 61808 - protein, 11 aa, Homo sapiens
  misc_feature: Table A; Target 61808; HLA-B*58:01; PAX7; ENSG00000009709; TAA
YSVDPVAGYQY

SEQ ID NO: 61809 - protein, 11 aa, Homo sapiens
  misc_feature: Table A; Target 61809; HLA-C*01:02; PAX7; ENSG00000009709; TAA
YSVDPVAGYQY

SEQ ID NO: 61810 - protein, 11 aa, Homo sapiens
  misc_feature: Table A; Target 61810; HLA-C*02:02; PAX7; ENSG00000009709; TAA
YSVDPVAGYQY

SEQ ID NO: 61811 - protein, 11 aa, Homo sapiens
  misc_feature: Table A; Target 61811; HLA-C*03:03; PAX7; ENSG00000009709; TAA
YSVDPVAGYQY

SEQ ID NO: 61812 - protein, 11 aa, Homo sapiens
  misc_feature: Table A; Target 61812; HLA-C*03:04; PAX7; ENSG00000009709; TAA
YSVDPVAGYQY

SEQ ID NO: 61813 - protein, 11 aa, Homo sapiens
  misc_feature: Table A; Target 61813; HLA-C*04:01; PAX7; ENSG00000009709; TAA
YSVDPVAGYQY

SEQ ID NO: 61814 - protein, 11 aa, Homo sapiens
  misc_feature: Table A; Target 61814; HLA-C*05:01; PAX7; ENSG00000009709; TAA
YSVDPVAGYQY

SEQ ID NO: 61815 - protein, 11 aa, Homo sapiens
  misc_feature: Table A; Target 61815; HLA-C*07:01; PAX7; ENSG00000009709; TAA
YSVDPVAGYQY

SEQ ID NO: 61816 - protein, 11 aa, Homo sapiens
  misc_feature: Table A; Target 61816; HLA-C*07:04; PAX7; ENSG00000009709; TAA
YSVDPVAGYQY

SEQ ID NO: 61817 - protein, 11 aa, Homo sapiens
  misc_feature: Table A; Target 61817; HLA-C*07:06; PAX7; ENSG00000009709; TAA
YSVDPVAGYQY

SEQ ID NO: 61818 - protein, 11 aa, Homo sapiens
  misc_feature: Table A; Target 61818; HLA-C*12:03; PAX7; ENSG00000009709; TAA
YSVDPVAGYQY

SEQ ID NO: 61819 - protein, 11 aa, Homo sapiens
  misc_feature: Table A; Target 61819; HLA-C*16:01; PAX7; ENSG00000009709; TAA
YSVDPVAGYQY

SEQ ID NO: 61820 - protein, 11 aa, Homo sapiens
  misc_feature: Table A; Target 61820; HLA-C*16:02; PAX7; ENSG00000009709; TAA
YSVDPVAGYQY

SEQ ID NO: 61821 - protein, 11 aa, Homo sapiens
  misc_feature: Table A; Target 61821; HLA-C*16:04; PAX7; ENSG00000009709; TAA
YSVDPVAGYQY

SEQ ID NO: 61822 - protein, 11 aa, Homo sapiens
  misc_feature: Table A; Target 61822; HLA-B*57:01; PDX1; ENSG00000139515; TAA
AAEPEENKRTR

SEQ ID NO: 61823 - protein, 9 aa, Homo sapiens
  misc_feature: Table A; Target 61823; HLA-C*01:02; PDX1; ENSG00000139515; TAA
AAPVAAREG

SEQ ID NO: 61824 - protein, 9 aa, Homo sapiens
  misc_feature: Table A; Target 61824; HLA-C*16:02; PDX1; ENSG00000139515; TAA
AATQLYKDP

SEQ ID NO: 61825 - protein, 8 aa, Homo sapiens
  misc_feature: Table A; Target 61825; HLA-B*37:01; PDX1; ENSG00000139515; TAA
ADDPAVAH

SEQ ID NO: 61826 - protein, 9 aa, Homo sapiens
  misc_feature: Table A; Target 61826; HLA-A*02:07; PDX1; ENSG00000139515; TAA
ADDPAVAHL

SEQ ID NO: 61827 - protein, 9 aa, Homo sapiens
  misc_feature: Table A; Target 61827; HLA-A*30:01; PDX1; ENSG00000139515; TAA
ADDPAVAHL

SEQ ID NO: 61828 - protein, 9 aa, Homo sapiens
  misc_feature: Table A; Target 61828; HLA-A*32:01; PDX1; ENSG00000139515; TAA
ADDPAVAHL

SEQ ID NO: 61829 - protein, 9 aa, Homo sapiens
  misc_feature: Table A; Target 61829; HLA-B*37:01; PDX1; ENSG00000139515; TAA
ADDPAVAHL

SEQ ID NO: 61830 - protein, 9 aa, Homo sapiens
  misc_feature: Table A; Target 61830; HLA-B*38:01; PDX1; ENSG00000139515; TAA
ADDPAVAHL

SEQ ID NO: 61831 - protein, 9 aa, Homo sapiens
  misc_feature: Table A; Target 61831; HLA-B*40:01; PDX1; ENSG00000139515; TAA
ADDPAVAHL

SEQ ID NO: 61832 - protein, 9 aa, Homo sapiens
  misc_feature: Table A; Target 61832; HLA-B*40:02; PDX1; ENSG00000139515; TAA
ADDPAVAHL

SEQ ID NO: 61833 - protein, 9 aa, Homo sapiens
  misc_feature: Table A; Target 61833; HLA-B*44:02; PDX1; ENSG00000139515; TAA
ADDPAVAHL

SEQ ID NO: 61834 - protein, 9 aa, Homo sapiens
  misc_feature: Table A; Target 61834; HLA-B*44:03; PDX1; ENSG00000139515; TAA
ADDPAVAHL

SEQ ID NO: 61835 - protein, 9 aa, Homo sapiens
  misc_feature: Table A; Target 61835; HLA-B*49:01; PDX1; ENSG00000139515; TAA
ADDPAVAHL

SEQ ID NO: 61836 - protein, 9 aa, Homo sapiens
  misc_feature: Table A; Target 61836; HLA-C*03:04; PDX1; ENSG00000139515; TAA
ADDPAVAHL

SEQ ID NO: 61837 - protein, 9 aa, Homo sapiens
  misc_feature: Table A; Target 61837; HLA-C*04:01; PDX1; ENSG00000139515; TAA
ADDPAVAHL

SEQ ID NO: 61838 - protein, 9 aa, Homo sapiens
  misc_feature: Table A; Target 61838; HLA-C*05:01; PDX1; ENSG00000139515; TAA
ADDPAVAHL

SEQ ID NO: 61839 - protein, 9 aa, Homo sapiens
  misc_feature: Table A; Target 61839; HLA-C*16:02; PDX1; ENSG00000139515; TAA
ADDPAVAHL

SEQ ID NO: 61840 - protein, 10 aa, Homo sapiens
  misc_feature: Table A; Target 61840; HLA-B*44:02; PDX1; ENSG00000139515; TAA
AEPEENKRTR

SEQ ID NO: 61841 - protein, 10 aa, Homo sapiens
  misc_feature: Table A; Target 61841; HLA-A*23:01; PDX1; ENSG00000139515; TAA
AFQRGPAPEF

SEQ ID NO: 61842 - protein, 10 aa, Homo sapiens
  misc_feature: Table A; Target 61842; HLA-A*24:02; PDX1; ENSG00000139515; TAA
AFQRGPAPEF

SEQ ID NO: 61843 - protein, 9 aa, Homo sapiens
  misc_feature: Table A; Target 61843; HLA-A*02:03; PDX1; ENSG00000139515; TAA
ALPHPPAGP

SEQ ID NO: 61844 - protein, 9 aa, Homo sapiens
  misc_feature: Table A; Target 61844; HLA-A*02:07; PDX1; ENSG00000139515; TAA
ALPHPPAGP

SEQ ID NO: 61845 - protein, 10 aa, Homo sapiens
  misc_feature: Table A; Target 61845; HLA-A*02:07; PDX1; ENSG00000139515; TAA
ALPHPPAGPF

SEQ ID NO: 61846 - protein, 9 aa, Homo sapiens
  misc_feature: Table A; Target 61846; HLA-A*02:01; PDX1; ENSG00000139515; TAA
ALPPPPPPG

SEQ ID NO: 61847 - protein, 9 aa, Homo sapiens
  misc_feature: Table A; Target 61847; HLA-A*02:07; PDX1; ENSG00000139515; TAA
ALPPPPPPG

SEQ ID NO: 61848 - protein, 9 aa, Homo sapiens
  misc_feature: Table A; Target 61848; HLA-B*55:01; PDX1; ENSG00000139515; TAA
ALPPPPPPG

SEQ ID NO: 61849 - protein, 9 aa, Homo sapiens
  misc_feature: Table A; Target 61849; HLA-C*06:02; PDX1; ENSG00000139515; TAA
ALPPPPPPG

SEQ ID NO: 61850 - protein, 10 aa, Homo sapiens
  misc_feature: Table A; Target 61850; HLA-A*02:01; PDX1; ENSG00000139515; TAA
ALPPPPPPGG

SEQ ID NO: 61851 - protein, 10 aa, Homo sapiens
  misc_feature: Table A; Target 61851; HLA-A*02:07; PDX1; ENSG00000139515; TAA
ALPPPPPPGG

SEQ ID NO: 61852 - protein, 11 aa, Homo sapiens
  misc_feature: Table A; Target 61852; HLA-A*02:01; PDX1; ENSG00000139515; TAA
ALPPPPPPGGA

SEQ ID NO: 61853 - protein, 11 aa, Homo sapiens
  misc_feature: Table A; Target 61853; HLA-A*02:03; PDX1; ENSG00000139515; TAA
ALPPPPPPGGA

SEQ ID NO: 61854 - protein, 10 aa, Homo sapiens
  misc_feature: Table A; Target 61854; HLA-B*56:01; PDX1; ENSG00000139515; TAA
APEFSASPPA

SEQ ID NO: 61855 - protein, 9 aa, Homo sapiens
  misc_feature: Table A; Target 61855; HLA-A*31:01; PDX1; ENSG00000139515; TAA
APRRPQEPR

SEQ ID NO: 61856 - protein, 9 aa, Homo sapiens
  misc_feature: Table A; Target 61856; HLA-B*07:02; PDX1; ENSG00000139515; TAA
APRRPQEPR

SEQ ID NO: 61857 - protein, 9 aa, Homo sapiens
  misc_feature: Table A; Target 61857; HLA-B*56:01; PDX1; ENSG00000139515; TAA
APRRPQEPR

SEQ ID NO: 61858 - protein, 9 aa, Homo sapiens
  misc_feature: Table A; Target 61858; HLA-C*07:02; PDX1; ENSG00000139515; TAA
APRRPQEPR

SEQ ID NO: 61859 - protein, 10 aa, Homo sapiens
  misc_feature: Table A; Target 61859; HLA-B*07:02; PDX1; ENSG00000139515; TAA
APVAAREGRL

SEQ ID NO: 61860 - protein, 11 aa, Homo sapiens
  misc_feature: Table A; Target 61860; HLA-A*31:01; PDX1; ENSG00000139515; TAA
ASPQPSSVAPR

SEQ ID NO: 61861 - protein, 11 aa, Homo sapiens
  misc_feature: Table A; Target 61861; HLA-A*68:01; PDX1; ENSG00000139515; TAA
ASPQPSSVAPR

SEQ ID NO: 61862 - protein, 11 aa, Homo sapiens
  misc_feature: Table A; Target 61862; HLA-C*07:06; PDX1; ENSG00000139515; TAA
ASPQPSSVAPR

SEQ ID NO: 61863 - protein, 9 aa, Homo sapiens
  misc_feature: Table A; Target 61863; HLA-A*03:01; PDX1; ENSG00000139515; TAA
AVMLNLTER

SEQ ID NO: 61864 - protein, 9 aa, Homo sapiens
  misc_feature: Table A; Target 61864; HLA-A*03:02; PDX1; ENSG00000139515; TAA
AVMLNLTER

SEQ ID NO: 61865 - protein, 9 aa, Homo sapiens
  misc_feature: Table A; Target 61865; HLA-A*11:01; PDX1; ENSG00000139515; TAA
AVMLNLTER

SEQ ID NO: 61866 - protein, 9 aa, Homo sapiens
  misc_feature: Table A; Target 61866; HLA-A*31:01; PDX1; ENSG00000139515; TAA
AVMLNLTER

SEQ ID NO: 61867 - protein, 9 aa, Homo sapiens
  misc_feature: Table A; Target 61867; HLA-A*33:01; PDX1; ENSG00000139515; TAA
AVMLNLTER

SEQ ID NO: 61868 - protein, 9 aa, Homo sapiens
  misc_feature: Table A; Target 61868; HLA-A*33:03; PDX1; ENSG00000139515; TAA
AVMLNLTER

SEQ ID NO: 61869 - protein, 9 aa, Homo sapiens
  misc_feature: Table A; Target 61869; HLA-A*68:01; PDX1; ENSG00000139515; TAA
AVMLNLTER

SEQ ID NO: 61870 - protein, 9 aa, Homo sapiens
  misc_feature: Table A; Target 61870; HLA-C*07:06; PDX1; ENSG00000139515; TAA
AVMLNLTER

SEQ ID NO: 61871 - protein, 9 aa, Homo sapiens
  misc_feature: Table A; Target 61871; HLA-A*02:07; PDX1; ENSG00000139515; TAA
AVPPAAPVA

SEQ ID NO: 61872 - protein, 9 aa, Homo sapiens
  misc_feature: Table A; Target 61872; HLA-B*56:01; PDX1; ENSG00000139515; TAA
AVPPAAPVA

SEQ ID NO: 61873 - protein, 10 aa, Homo sapiens
  misc_feature: Table A; Target 61873; HLA-A*02:03; PDX1; ENSG00000139515; TAA
AVPPAAPVAA

SEQ ID NO: 61874 - protein, 10 aa, Homo sapiens
  misc_feature: Table A; Target 61874; HLA-A*02:07; PDX1; ENSG00000139515; TAA
AVPPAAPVAA

SEQ ID NO: 61875 - protein, 10 aa, Homo sapiens
  misc_feature: Table A; Target 61875; HLA-B*56:01; PDX1; ENSG00000139515; TAA
AVPPAAPVAA

SEQ ID NO: 61876 - protein, 11 aa, Homo sapiens
  misc_feature: Table A; Target 61876; HLA-A*03:01; PDX1; ENSG00000139515; TAA
AVPPAAPVAAR

SEQ ID NO: 61877 - protein, 11 aa, Homo sapiens
  misc_feature: Table A; Target 61877; HLA-A*03:02; PDX1; ENSG00000139515; TAA
AVPPAAPVAAR

SEQ ID NO: 61878 - protein, 11 aa, Homo sapiens
  misc_feature: Table A; Target 61878; HLA-A*11:01; PDX1; ENSG00000139515; TAA
AVPPAAPVAAR

SEQ ID NO: 61879 - protein, 11 aa, Homo sapiens
  misc_feature: Table A; Target 61879; HLA-A*31:01; PDX1; ENSG00000139515; TAA
AVPPAAPVAAR

SEQ ID NO: 61880 - protein, 8 aa, Homo sapiens
  misc_feature: Table A; Target 61880; HLA-C*01:02; PDX1; ENSG00000139515; TAA
AVTSGEEL

SEQ ID NO: 61881 - protein, 9 aa, Homo sapiens
  misc_feature: Table A; Target 61881; HLA-B*38:01; PDX1; ENSG00000139515; TAA
AVTSGEELL

SEQ ID NO: 61882 - protein, 9 aa, Homo sapiens
  misc_feature: Table A; Target 61882; HLA-B*39:01; PDX1; ENSG00000139515; TAA
AVTSGEELL

SEQ ID NO: 61883 - protein, 8 aa, Homo sapiens
  misc_feature: Table A; Target 61883; HLA-A*23:01; PDX1; ENSG00000139515; TAA
AYTRAQLL

SEQ ID NO: 61884 - protein, 8 aa, Homo sapiens
  misc_feature: Table A; Target 61884; HLA-A*24:02; PDX1; ENSG00000139515; TAA
AYTRAQLL

SEQ ID NO: 61885 - protein, 8 aa, Homo sapiens
  misc_feature: Table A; Target 61885; HLA-C*16:02; PDX1; ENSG00000139515; TAA
AYTRAQLL

SEQ ID NO: 61886 - protein, 10 aa, Homo sapiens
  misc_feature: Table A; Target 61886; HLA-A*23:01; PDX1; ENSG00000139515; TAA
AYTRAQLLEL

SEQ ID NO: 61887 - protein, 10 aa, Homo sapiens
  misc_feature: Table A; Target 61887; HLA-A*24:02; PDX1; ENSG00000139515; TAA
AYTRAQLLEL

SEQ ID NO: 61888 - protein, 9 aa, Homo sapiens
  misc_feature: Table A; Target 61888; HLA-B*35:03; PDX1; ENSG00000139515; TAA
CAVTSGEEL

SEQ ID NO: 61889 - protein, 9 aa, Homo sapiens
  misc_feature: Table A; Target 61889; HLA-B*39:01; PDX1; ENSG00000139515; TAA
CAVTSGEEL

SEQ ID NO: 61890 - protein, 9 aa, Homo sapiens
  misc_feature: Table A; Target 61890; HLA-B*40:01; PDX1; ENSG00000139515; TAA
CAVTSGEEL

SEQ ID NO: 61891 - protein, 9 aa, Homo sapiens
  misc_feature: Table A; Target 61891; HLA-B*46:01; PDX1; ENSG00000139515; TAA
CAVTSGEEL

SEQ ID NO: 61892 - protein, 9 aa, Homo sapiens
  misc_feature: Table A; Target 61892; HLA-B*58:01; PDX1; ENSG00000139515; TAA
CAVTSGEEL

SEQ ID NO: 61893 - protein, 9 aa, Homo sapiens
  misc_feature: Table A; Target 61893; HLA-C*01:02; PDX1; ENSG00000139515; TAA
CAVTSGEEL

SEQ ID NO: 61894 - protein, 9 aa, Homo sapiens
  misc_feature: Table A; Target 61894; HLA-C*02:02; PDX1; ENSG00000139515; TAA
CAVTSGEEL

SEQ ID NO: 61895 - protein, 9 aa, Homo sapiens
  misc_feature: Table A; Target 61895; HLA-C*03:03; PDX1; ENSG00000139515; TAA
CAVTSGEEL

SEQ ID NO: 61896 - protein, 9 aa, Homo sapiens
  misc_feature: Table A; Target 61896; HLA-C*03:04; PDX1; ENSG00000139515; TAA
CAVTSGEEL

SEQ ID NO: 61897 - protein, 9 aa, Homo sapiens
  misc_feature: Table A; Target 61897; HLA-C*05:01; PDX1; ENSG00000139515; TAA
CAVTSGEEL

SEQ ID NO: 61898 - protein, 9 aa, Homo sapiens
  misc_feature: Table A; Target 61898; HLA-C*14:02; PDX1; ENSG00000139515; TAA
CAVTSGEEL

SEQ ID NO: 61899 - protein, 9 aa, Homo sapiens
  misc_feature: Table A; Target 61899; HLA-C*16:02; PDX1; ENSG00000139515; TAA
CAVTSGEEL

SEQ ID NO: 61900 - protein, 8 aa, Homo sapiens
  misc_feature: Table A; Target 61900; HLA-B*51:01; PDX1; ENSG00000139515; TAA
DDPAVAHL

SEQ ID NO: 61901 - protein, 9 aa, Homo sapiens
  misc_feature: Table A; Target 61901; HLA-A*33:01; PDX1; ENSG00000139515; TAA
DPAVAHLHH

SEQ ID NO: 61902 - protein, 10 aa, Homo sapiens
  misc_feature: Table A; Target 61902; HLA-A*25:01; PDX1; ENSG00000139515; TAA
EENKRTRTAY

SEQ ID NO: 61903 - protein, 10 aa, Homo sapiens
  misc_feature: Table A; Target 61903; HLA-B*44:02; PDX1; ENSG00000139515; TAA
EENKRTRTAY

SEQ ID NO: 61904 - protein, 10 aa, Homo sapiens
  misc_feature: Table A; Target 61904; HLA-B*44:03; PDX1; ENSG00000139515; TAA
EENKRTRTAY

SEQ ID NO: 61905 - protein, 10 aa, Homo sapiens
  misc_feature: Table A; Target 61905; HLA-B*44:02; PDX1; ENSG00000139515; TAA
EEPNRVQLPF

SEQ ID NO: 61906 - protein, 10 aa, Homo sapiens
  misc_feature: Table A; Target 61906; HLA-A*30:01; PDX1; ENSG00000139515; TAA
EEQYYAATQL

SEQ ID NO: 61907 - protein, 10 aa, Homo sapiens
  misc_feature: Table A; Target 61907; HLA-B*40:01; PDX1; ENSG00000139515; TAA
EEQYYAATQL

SEQ ID NO: 61908 - protein, 10 aa, Homo sapiens
  misc_feature: Table A; Target 61908; HLA-B*40:02; PDX1; ENSG00000139515; TAA
EEQYYAATQL

SEQ ID NO: 61909 - protein, 10 aa, Homo sapiens
  misc_feature: Table A; Target 61909; HLA-B*44:02; PDX1; ENSG00000139515; TAA
EEQYYAATQL

SEQ ID NO: 61910 - protein, 11 aa, Homo sapiens
  misc_feature: Table A; Target 61910; HLA-B*18:01; PDX1; ENSG00000139515; TAA
EEQYYAATQLY

SEQ ID NO: 61911 - protein, 11 aa, Homo sapiens
  misc_feature: Table A; Target 61911; HLA-B*44:02; PDX1; ENSG00000139515; TAA
EEQYYAATQLY

SEQ ID NO: 61912 - protein, 11 aa, Homo sapiens
  misc_feature: Table A; Target 61912; HLA-B*44:03; PDX1; ENSG00000139515; TAA
EEQYYAATQLY

SEQ ID NO: 61913 - protein, 11 aa, Homo sapiens
  misc_feature: Table A; Target 61913; HLA-A*29:02; PDX1; ENSG00000139515; TAA
EFSASPPACLY

SEQ ID NO: 61914 - protein, 10 aa, Homo sapiens
  misc_feature: Table A; Target 61914; HLA-B*54:01; PDX1; ENSG00000139515; TAA
EGRLPPGLSA

SEQ ID NO: 61915 - protein, 10 aa, Homo sapiens
  misc_feature: Table A; Target 61915; HLA-B*56:01; PDX1; ENSG00000139515; TAA
EGRLPPGLSA

SEQ ID NO: 61916 - protein, 11 aa, Homo sapiens
  misc_feature: Table A; Target 61916; HLA-A*01:01; PDX1; ENSG00000139515; TAA
ELEKEFLFNKY

SEQ ID NO: 61917 - protein, 9 aa, Homo sapiens
  misc_feature: Table A; Target 61917; HLA-A*33:03; PDX1; ENSG00000139515; TAA
EPEENKRTR

SEQ ID NO: 61918 - protein, 9 aa, Homo sapiens
  misc_feature: Table A; Target 61918; HLA-A*25:01; PDX1; ENSG00000139515; TAA
EQYYAATQL

SEQ ID NO: 61919 - protein, 9 aa, Homo sapiens
  misc_feature: Table A; Target 61919; HLA-A*26:01; PDX1; ENSG00000139515; TAA
EQYYAATQL

SEQ ID NO: 61920 - protein, 9 aa, Homo sapiens
  misc_feature: Table A; Target 61920; HLA-B*08:01; PDX1; ENSG00000139515; TAA
EQYYAATQL

SEQ ID NO: 61921 - protein, 9 aa, Homo sapiens
  misc_feature: Table A; Target 61921; HLA-B*13:02; PDX1; ENSG00000139515; TAA
EQYYAATQL

SEQ ID NO: 61922 - protein, 9 aa, Homo sapiens
  misc_feature: Table A; Target 61922; HLA-B*15:01; PDX1; ENSG00000139515; TAA
EQYYAATQL

SEQ ID NO: 61923 - protein, 9 aa, Homo sapiens
  misc_feature: Table A; Target 61923; HLA-B*15:03; PDX1; ENSG00000139515; TAA
EQYYAATQL

SEQ ID NO: 61924 - protein, 9 aa, Homo sapiens
  misc_feature: Table A; Target 61924; HLA-B*27:05; PDX1; ENSG00000139515; TAA
EQYYAATQL

SEQ ID NO: 61925 - protein, 9 aa, Homo sapiens
  misc_feature: Table A; Target 61925; HLA-B*38:01; PDX1; ENSG00000139515; TAA
EQYYAATQL

SEQ ID NO: 61926 - protein, 9 aa, Homo sapiens
  misc_feature: Table A; Target 61926; HLA-B*39:01; PDX1; ENSG00000139515; TAA
EQYYAATQL

SEQ ID NO: 61927 - protein, 9 aa, Homo sapiens
  misc_feature: Table A; Target 61927; HLA-B*40:02; PDX1; ENSG00000139515; TAA
EQYYAATQL

SEQ ID NO: 61928 - protein, 9 aa, Homo sapiens
  misc_feature: Table A; Target 61928; HLA-C*07:04; PDX1; ENSG00000139515; TAA
EQYYAATQL

SEQ ID NO: 61929 - protein, 10 aa, Homo sapiens
  misc_feature: Table A; Target 61929; HLA-A*25:01; PDX1; ENSG00000139515; TAA
EQYYAATQLY

SEQ ID NO: 61930 - protein, 10 aa, Homo sapiens
  misc_feature: Table A; Target 61930; HLA-A*26:01; PDX1; ENSG00000139515; TAA
EQYYAATQLY

SEQ ID NO: 61931 - protein, 10 aa, Homo sapiens
  misc_feature: Table A; Target 61931; HLA-B*15:01; PDX1; ENSG00000139515; TAA
EQYYAATQLY

SEQ ID NO: 61932 - protein, 10 aa, Homo sapiens
  misc_feature: Table A; Target 61932; HLA-B*15:03; PDX1; ENSG00000139515; TAA
EQYYAATQLY

SEQ ID NO: 61933 - protein, 10 aa, Homo sapiens
  misc_feature: Table A; Target 61933; HLA-B*44:02; PDX1; ENSG00000139515; TAA
EQYYAATQLY

SEQ ID NO: 61934 - protein, 10 aa, Homo sapiens
  misc_feature: Table A; Target 61934; HLA-B*44:03; PDX1; ENSG00000139515; TAA
EQYYAATQLY

SEQ ID NO: 61935 - protein, 10 aa, Homo sapiens
  misc_feature: Table A; Target 61935; HLA-C*07:04; PDX1; ENSG00000139515; TAA
EQYYAATQLY

SEQ ID NO: 61936 - protein, 11 aa, Homo sapiens
  misc_feature: Table A; Target 61936; HLA-A*68:01; PDX1; ENSG00000139515; TAA
EQYYAATQLYK

SEQ ID NO: 61937 - protein, 11 aa, Homo sapiens
  misc_feature: Table A; Target 61937; HLA-A*68:02; PDX1; ENSG00000139515; TAA
EVPPLADDPAV

SEQ ID NO: 61938 - protein, 9 aa, Homo sapiens
  misc_feature: Table A; Target 61938; HLA-A*31:01; PDX1; ENSG00000139515; TAA
FLFNKYISR

SEQ ID NO: 61939 - protein, 9 aa, Homo sapiens
  misc_feature: Table A; Target 61939; HLA-A*33:01; PDX1; ENSG00000139515; TAA
FLFNKYISR

SEQ ID NO: 61940 - protein, 10 aa, Homo sapiens
  misc_feature: Table A; Target 61940; HLA-A*02:03; PDX1; ENSG00000139515; TAA
FLFNKYISRP

SEQ ID NO: 61941 - protein, 9 aa, Homo sapiens
  misc_feature: Table A; Target 61941; HLA-B*35:03; PDX1; ENSG00000139515; TAA
FPEGAEPGV

SEQ ID NO: 61942 - protein, 9 aa, Homo sapiens
  misc_feature: Table A; Target 61942; HLA-B*55:01; PDX1; ENSG00000139515; TAA
FPEGAEPGV

SEQ ID NO: 61943 - protein, 10 aa, Homo sapiens
  misc_feature: Table A; Target 61943; HLA-B*35:03; PDX1; ENSG00000139515; TAA
FPEGAEPGVL

SEQ ID NO: 61944 - protein, 8 aa, Homo sapiens
  misc_feature: Table A; Target 61944; HLA-B*35:03; PDX1; ENSG00000139515; TAA
FPGALGAL

SEQ ID NO: 61945 - protein, 9 aa, Homo sapiens
  misc_feature: Table A; Target 61945; HLA-B*54:01; PDX1; ENSG00000139515; TAA
FPWMKSTKA

SEQ ID NO: 61946 - protein, 9 aa, Homo sapiens
  misc_feature: Table A; Target 61946; HLA-B*56:01; PDX1; ENSG00000139515; TAA
FPWMKSTKA

SEQ ID NO: 61947 - protein, 9 aa, Homo sapiens
  misc_feature: Table A; Target 61947; HLA-A*23:01; PDX1; ENSG00000139515; TAA
FQRGPAPEF

SEQ ID NO: 61948 - protein, 9 aa, Homo sapiens
  misc_feature: Table A; Target 61948; HLA-A*24:02; PDX1; ENSG00000139515; TAA
FQRGPAPEF

SEQ ID NO: 61949 - protein, 9 aa, Homo sapiens
  misc_feature: Table A; Target 61949; HLA-A*26:01; PDX1; ENSG00000139515; TAA
FQRGPAPEF

SEQ ID NO: 61950 - protein, 9 aa, Homo sapiens
  misc_feature: Table A; Target 61950; HLA-A*30:02; PDX1; ENSG00000139515; TAA
FQRGPAPEF

SEQ ID NO: 61951 - protein, 9 aa, Homo sapiens
  misc_feature: Table A; Target 61951; HLA-A*31:01; PDX1; ENSG00000139515; TAA
FQRGPAPEF

SEQ ID NO: 61952 - protein, 9 aa, Homo sapiens
  misc_feature: Table A; Target 61952; HLA-A*32:01; PDX1; ENSG00000139515; TAA
FQRGPAPEF

SEQ ID NO: 61953 - protein, 9 aa, Homo sapiens
  misc_feature: Table A; Target 61953; HLA-B*07:02; PDX1; ENSG00000139515; TAA
FQRGPAPEF

SEQ ID NO: 61954 - protein, 9 aa, Homo sapiens
  misc_feature: Table A; Target 61954; HLA-B*08:01; PDX1; ENSG00000139515; TAA
FQRGPAPEF

SEQ ID NO: 61955 - protein, 9 aa, Homo sapiens
  misc_feature: Table A; Target 61955; HLA-B*13:02; PDX1; ENSG00000139515; TAA
FQRGPAPEF

SEQ ID NO: 61956 - protein, 9 aa, Homo sapiens
  misc_feature: Table A; Target 61956; HLA-B*15:01; PDX1; ENSG00000139515; TAA
FQRGPAPEF

SEQ ID NO: 61957 - protein, 9 aa, Homo sapiens
  misc_feature: Table A; Target 61957; HLA-B*15:03; PDX1; ENSG00000139515; TAA
FQRGPAPEF

SEQ ID NO: 61958 - protein, 9 aa, Homo sapiens
  misc_feature: Table A; Target 61958; HLA-B*27:05; PDX1; ENSG00000139515; TAA
FQRGPAPEF

SEQ ID NO: 61959 - protein, 9 aa, Homo sapiens
  misc_feature: Table A; Target 61959; HLA-B*37:01; PDX1; ENSG00000139515; TAA
FQRGPAPEF

SEQ ID NO: 61960 - protein, 9 aa, Homo sapiens
  misc_feature: Table A; Target 61960; HLA-B*40:02; PDX1; ENSG00000139515; TAA
FQRGPAPEF

SEQ ID NO: 61961 - protein, 9 aa, Homo sapiens
  misc_feature: Table A; Target 61961; HLA-B*46:01; PDX1; ENSG00000139515; TAA
FQRGPAPEF

SEQ ID NO: 61962 - protein, 9 aa, Homo sapiens
  misc_feature: Table A; Target 61962; HLA-B*57:01; PDX1; ENSG00000139515; TAA
FQRGPAPEF

SEQ ID NO: 61963 - protein, 9 aa, Homo sapiens
  misc_feature: Table A; Target 61963; HLA-B*58:01; PDX1; ENSG00000139515; TAA
FQRGPAPEF

SEQ ID NO: 61964 - protein, 9 aa, Homo sapiens
  misc_feature: Table A; Target 61964; HLA-C*01:02; PDX1; ENSG00000139515; TAA
FQRGPAPEF

SEQ ID NO: 61965 - protein, 9 aa, Homo sapiens
  misc_feature: Table A; Target 61965; HLA-C*02:02; PDX1; ENSG00000139515; TAA
FQRGPAPEF

SEQ ID NO: 61966 - protein, 9 aa, Homo sapiens
  misc_feature: Table A; Target 61966; HLA-C*03:03; PDX1; ENSG00000139515; TAA
FQRGPAPEF

SEQ ID NO: 61967 - protein, 9 aa, Homo sapiens
  misc_feature: Table A; Target 61967; HLA-C*03:04; PDX1; ENSG00000139515; TAA
FQRGPAPEF

SEQ ID NO: 61968 - protein, 9 aa, Homo sapiens
  misc_feature: Table A; Target 61968; HLA-C*06:02; PDX1; ENSG00000139515; TAA
FQRGPAPEF

SEQ ID NO: 61969 - protein, 9 aa, Homo sapiens
  misc_feature: Table A; Target 61969; HLA-C*07:02; PDX1; ENSG00000139515; TAA
FQRGPAPEF

SEQ ID NO: 61970 - protein, 9 aa, Homo sapiens
  misc_feature: Table A; Target 61970; HLA-C*07:04; PDX1; ENSG00000139515; TAA
FQRGPAPEF

SEQ ID NO: 61971 - protein, 9 aa, Homo sapiens
  misc_feature: Table A; Target 61971; HLA-C*12:03; PDX1; ENSG00000139515; TAA
FQRGPAPEF

SEQ ID NO: 61972 - protein, 9 aa, Homo sapiens
  misc_feature: Table A; Target 61972; HLA-C*14:02; PDX1; ENSG00000139515; TAA
FQRGPAPEF

SEQ ID NO: 61973 - protein, 9 aa, Homo sapiens
  misc_feature: Table A; Target 61973; HLA-C*16:01; PDX1; ENSG00000139515; TAA
FQRGPAPEF

SEQ ID NO: 61974 - protein, 9 aa, Homo sapiens
  misc_feature: Table A; Target 61974; HLA-C*16:04; PDX1; ENSG00000139515; TAA
FQRGPAPEF

SEQ ID NO: 61975 - protein, 9 aa, Homo sapiens
  misc_feature: Table A; Target 61975; HLA-C*02:02; PDX1; ENSG00000139515; TAA
FSASPPACL

SEQ ID NO: 61976 - protein, 9 aa, Homo sapiens
  misc_feature: Table A; Target 61976; HLA-C*03:03; PDX1; ENSG00000139515; TAA
FSASPPACL

SEQ ID NO: 61977 - protein, 9 aa, Homo sapiens
  misc_feature: Table A; Target 61977; HLA-C*03:04; PDX1; ENSG00000139515; TAA
FSASPPACL

SEQ ID NO: 61978 - protein, 9 aa, Homo sapiens
  misc_feature: Table A; Target 61978; HLA-C*05:01; PDX1; ENSG00000139515; TAA
FSASPPACL

SEQ ID NO: 61979 - protein, 9 aa, Homo sapiens
  misc_feature: Table A; Target 61979; HLA-C*16:01; PDX1; ENSG00000139515; TAA
FSASPPACL

SEQ ID NO: 61980 - protein, 10 aa, Homo sapiens
  misc_feature: Table A; Target 61980; HLA-A*01:01; PDX1; ENSG00000139515; TAA
FSASPPACLY

SEQ ID NO: 61981 - protein, 10 aa, Homo sapiens
  misc_feature: Table A; Target 61981; HLA-A*26:01; PDX1; ENSG00000139515; TAA
FSASPPACLY

SEQ ID NO: 61982 - protein, 10 aa, Homo sapiens
  misc_feature: Table A; Target 61982; HLA-A*29:02; PDX1; ENSG00000139515; TAA
FSASPPACLY

SEQ ID NO: 61983 - protein, 10 aa, Homo sapiens
  misc_feature: Table A; Target 61983; HLA-A*30:02; PDX1; ENSG00000139515; TAA
FSASPPACLY

SEQ ID NO: 61984 - protein, 10 aa, Homo sapiens
  misc_feature: Table A; Target 61984; HLA-C*02:02; PDX1; ENSG00000139515; TAA
FSASPPACLY

SEQ ID NO: 61985 - protein, 9 aa, Homo sapiens
  misc_feature: Table A; Target 61985; HLA-B*46:01; PDX1; ENSG00000139515; TAA
GAVPPAAPV

SEQ ID NO: 61986 - protein, 9 aa, Homo sapiens
  misc_feature: Table A; Target 61986; HLA-C*02:02; PDX1; ENSG00000139515; TAA
GAVPPAAPV

SEQ ID NO: 61987 - protein, 9 aa, Homo sapiens
  misc_feature: Table A; Target 61987; HLA-C*03:03; PDX1; ENSG00000139515; TAA
GAVPPAAPV

SEQ ID NO: 61988 - protein, 9 aa, Homo sapiens
  misc_feature: Table A; Target 61988; HLA-C*03:04; PDX1; ENSG00000139515; TAA
GAVPPAAPV

SEQ ID NO: 61989 - protein, 11 aa, Homo sapiens
  misc_feature: Table A; Target 61989; HLA-B*56:01; PDX1; ENSG00000139515; TAA
GAVPPAAPVAA

SEQ ID NO: 61990 - protein, 11 aa, Homo sapiens
  misc_feature: Table A; Target 61990; HLA-A*03:02; PDX1; ENSG00000139515; TAA
GAYAAEPEENK

SEQ ID NO: 61991 - protein, 11 aa, Homo sapiens
  misc_feature: Table A; Target 61991; HLA-A*11:01; PDX1; ENSG00000139515; TAA
GAYAAEPEENK

SEQ ID NO: 61992 - protein, 11 aa, Homo sapiens
  misc_feature: Table A; Target 61992; HLA-B*27:02; PDX1; ENSG00000139515; TAA
GAYAAEPEENK

SEQ ID NO: 61993 - protein, 11 aa, Homo sapiens
  misc_feature: Table A; Target 61993; HLA-A*30:01; PDX1; ENSG00000139515; TAA
GEEQYYAATQL

SEQ ID NO: 61994 - protein, 11 aa, Homo sapiens
  misc_feature: Table A; Target 61994; HLA-B*40:01; PDX1; ENSG00000139515; TAA
GEEQYYAATQL

SEQ ID NO: 61995 - protein, 11 aa, Homo sapiens
  misc_feature: Table A; Target 61995; HLA-A*02:03; PDX1; ENSG00000139515; TAA
GLSASPQPSSV

SEQ ID NO: 61996 - protein, 8 aa, Homo sapiens
  misc_feature: Table A; Target 61996; HLA-B*56:01; PDX1; ENSG00000139515; TAA
GPAPEFSA

SEQ ID NO: 61997 - protein, 9 aa, Homo sapiens
  misc_feature: Table A; Target 61997; HLA-B*56:01; PDX1; ENSG00000139515; TAA
GPFPEGAEP

SEQ ID NO: 61998 - protein, 8 aa, Homo sapiens
  misc_feature: Table A; Target 61998; HLA-A*30:02; PDX1; ENSG00000139515; TAA
GQWAGGAY

SEQ ID NO: 61999 - protein, 8 aa, Homo sapiens
  misc_feature: Table A; Target 61999; HLA-B*15:01; PDX1; ENSG00000139515; TAA
GQWAGGAY

SEQ ID NO: 62000 - protein, 8 aa, Homo sapiens
  misc_feature: Table A; Target 62000; HLA-B*15:03; PDX1; ENSG00000139515; TAA
GQWAGGAY

SEQ ID NO: 62001 - protein, 8 aa, Homo sapiens
  misc_feature: Table A; Target 62001; HLA-B*39:01; PDX1; ENSG00000139515; TAA
GQWAGGAY

SEQ ID NO: 62002 - protein, 8 aa, Homo sapiens
  misc_feature: Table A; Target 62002; HLA-C*07:04; PDX1; ENSG00000139515; TAA
GQWAGGAY

SEQ ID NO: 62003 - protein, 8 aa, Homo sapiens
  misc_feature: Table A; Target 62003; HLA-C*14:02; PDX1; ENSG00000139515; TAA
GQWAGGAY

SEQ ID NO: 62004 - protein, 8 aa, Homo sapiens
  misc_feature: Table A; Target 62004; HLA-C*16:04; PDX1; ENSG00000139515; TAA
GQWAGGAY

SEQ ID NO: 62005 - protein, 9 aa, Homo sapiens
  misc_feature: Table A; Target 62005; HLA-B*13:02; PDX1; ENSG00000139515; TAA
GQWAGGAYA

SEQ ID NO: 62006 - protein, 9 aa, Homo sapiens
  misc_feature: Table A; Target 62006; HLA-B*15:01; PDX1; ENSG00000139515; TAA
GQWAGGAYA

SEQ ID NO: 62007 - protein, 9 aa, Homo sapiens
  misc_feature: Table A; Target 62007; HLA-B*15:03; PDX1; ENSG00000139515; TAA
GQWAGGAYA

SEQ ID NO: 62008 - protein, 10 aa, Homo sapiens
  misc_feature: Table A; Target 62008; HLA-A*30:01; PDX1; ENSG00000139515; TAA
GQWAGGAYAA

SEQ ID NO: 62009 - protein, 10 aa, Homo sapiens
  misc_feature: Table A; Target 62009; HLA-B*13:02; PDX1; ENSG00000139515; TAA
GQWAGGAYAA

SEQ ID NO: 62010 - protein, 10 aa, Homo sapiens
  misc_feature: Table A; Target 62010; HLA-B*27:05; PDX1; ENSG00000139515; TAA
GQWAGGAYAA

SEQ ID NO: 62011 - protein, 9 aa, Homo sapiens
  misc_feature: Table A; Target 62011; HLA-B*27:05; PDX1; ENSG00000139515; TAA
GRLPPGLSA

SEQ ID NO: 62012 - protein, 9 aa, Homo sapiens
  misc_feature: Table A; Target 62012; HLA-C*16:04; PDX1; ENSG00000139515; TAA
GRLPPGLSA

SEQ ID NO: 62013 - protein, 11 aa, Homo sapiens
  misc_feature: Table A; Target 62013; HLA-B*27:05; PDX1; ENSG00000139515; TAA
GRLPPGLSASP

SEQ ID NO: 62014 - protein, 9 aa, Homo sapiens
  misc_feature: Table A; Target 62014; HLA-B*27:05; PDX1; ENSG00000139515; TAA
GRQPPPPPP

SEQ ID NO: 62015 - protein, 9 aa, Homo sapiens
  misc_feature: Table A; Target 62015; HLA-C*06:02; PDX1; ENSG00000139515; TAA
GRQPPPPPP

SEQ ID NO: 62016 - protein, 9 aa, Homo sapiens
  misc_feature: Table A; Target 62016; HLA-A*01:01; PDX1; ENSG00000139515; TAA
GSPPDISPY

SEQ ID NO: 62017 - protein, 9 aa, Homo sapiens
  misc_feature: Table A; Target 62017; HLA-A*30:02; PDX1; ENSG00000139515; TAA
GSPPDISPY

SEQ ID NO: 62018 - protein, 9 aa, Homo sapiens
  misc_feature: Table A; Target 62018; HLA-A*02:03; PDX1; ENSG00000139515; TAA
GTAVGGGGV

SEQ ID NO: 62019 - protein, 10 aa, Homo sapiens
  misc_feature: Table A; Target 62019; HLA-B*39:01; PDX1; ENSG00000139515; TAA
GTAVGGGGVA

SEQ ID NO: 62020 - protein, 9 aa, Homo sapiens
  misc_feature: Table A; Target 62020; HLA-A*02:01; PDX1; ENSG00000139515; TAA
GVLEEPNRV

SEQ ID NO: 62021 - protein, 8 aa, Homo sapiens
  misc_feature: Table A; Target 62021; HLA-B*08:01; PDX1; ENSG00000139515; TAA
HHHLPAQL

SEQ ID NO: 62022 - protein, 8 aa, Homo sapiens
  misc_feature: Table A; Target 62022; HLA-B*38:01; PDX1; ENSG00000139515; TAA
HHHLPAQL

SEQ ID NO: 62023 - protein, 9 aa, Homo sapiens
  misc_feature: Table A; Target 62023; HLA-B*38:01; PDX1; ENSG00000139515; TAA
HHLPAQLAL

SEQ ID NO: 62024 - protein, 9 aa, Homo sapiens
  misc_feature: Table A; Target 62024; HLA-B*39:01; PDX1; ENSG00000139515; TAA
HHLPAQLAL

SEQ ID NO: 62025 - protein, 9 aa, Homo sapiens
  misc_feature: Table A; Target 62025; HLA-A*31:01; PDX1; ENSG00000139515; TAA
HIKIWFQNR

SEQ ID NO: 62026 - protein, 9 aa, Homo sapiens
  misc_feature: Table A; Target 62026; HLA-B*54:01; PDX1; ENSG00000139515; TAA
HPFPGALGA

SEQ ID NO: 62027 - protein, 9 aa, Homo sapiens
  misc_feature: Table A; Target 62027; HLA-B*55:01; PDX1; ENSG00000139515; TAA
HPFPGALGA

SEQ ID NO: 62028 - protein, 9 aa, Homo sapiens
  misc_feature: Table A; Target 62028; HLA-B*56:01; PDX1; ENSG00000139515; TAA
HPFPGALGA

SEQ ID NO: 62029 - protein, 10 aa, Homo sapiens
  misc_feature: Table A; Target 62029; HLA-B*07:02; PDX1; ENSG00000139515; TAA
HPFPGALGAL

SEQ ID NO: 62030 - protein, 10 aa, Homo sapiens
  misc_feature: Table A; Target 62030; HLA-B*35:01; PDX1; ENSG00000139515; TAA
HPFPGALGAL

SEQ ID NO: 62031 - protein, 10 aa, Homo sapiens
  misc_feature: Table A; Target 62031; HLA-B*35:03; PDX1; ENSG00000139515; TAA
HPFPGALGAL

SEQ ID NO: 62032 - protein, 10 aa, Homo sapiens
  misc_feature: Table A; Target 62032; HLA-B*56:01; PDX1; ENSG00000139515; TAA
HPFPGALGAL

SEQ ID NO: 62033 - protein, 10 aa, Homo sapiens
  misc_feature: Table A; Target 62033; HLA-C*07:02; PDX1; ENSG00000139515; TAA
HPFPGALGAL

SEQ ID NO: 62034 - protein, 9 aa, Homo sapiens
  misc_feature: Table A; Target 62034; HLA-B*57:01; PDX1; ENSG00000139515; TAA
KAHAWKGQW

SEQ ID NO: 62035 - protein, 8 aa, Homo sapiens
  misc_feature: Table A; Target 62035; HLA-B*18:01; PDX1; ENSG00000139515; TAA
KEFLFNKY

SEQ ID NO: 62036 - protein, 8 aa, Homo sapiens
  misc_feature: Table A; Target 62036; HLA-B*37:01; PDX1; ENSG00000139515; TAA
KEFLFNKY

SEQ ID NO: 62037 - protein, 8 aa, Homo sapiens
  misc_feature: Table A; Target 62037; HLA-B*44:02; PDX1; ENSG00000139515; TAA
KEFLFNKY

SEQ ID NO: 62038 - protein, 9 aa, Homo sapiens
  misc_feature: Table A; Target 62038; HLA-B*44:02; PDX1; ENSG00000139515; TAA
KEFLFNKYI

SEQ ID NO: 62039 - protein, 9 aa, Homo sapiens
  misc_feature: Table A; Target 62039; HLA-B*44:03; PDX1; ENSG00000139515; TAA
KEFLFNKYI

SEQ ID NO: 62040 - protein, 9 aa, Homo sapiens
  misc_feature: Table A; Target 62040; HLA-A*30:02; PDX1; ENSG00000139515; TAA
KGQWAGGAY

SEQ ID NO: 62041 - protein, 9 aa, Homo sapiens
  misc_feature: Table A; Target 62041; HLA-B*15:01; PDX1; ENSG00000139515; TAA
KGQWAGGAY

SEQ ID NO: 62042 - protein, 9 aa, Homo sapiens
  misc_feature: Table A; Target 62042; HLA-B*46:01; PDX1; ENSG00000139515; TAA
KGQWAGGAY

SEQ ID NO: 62043 - protein, 8 aa, Homo sapiens
  misc_feature: Table A; Target 62043; HLA-A*32:01; PDX1; ENSG00000139515; TAA
KSTKAHAW

SEQ ID NO: 62044 - protein, 8 aa, Homo sapiens
  misc_feature: Table A; Target 62044; HLA-B*57:01; PDX1; ENSG00000139515; TAA
KSTKAHAW

SEQ ID NO: 62045 - protein, 8 aa, Homo sapiens
  misc_feature: Table A; Target 62045; HLA-B*58:01; PDX1; ENSG00000139515; TAA
KSTKAHAW

SEQ ID NO: 62046 - protein, 8 aa, Homo sapiens
  misc_feature: Table A; Target 62046; HLA-C*05:01; PDX1; ENSG00000139515; TAA
LADDPAVA

SEQ ID NO: 62047 - protein, 9 aa, Homo sapiens
  misc_feature: Table A; Target 62047; HLA-C*03:03; PDX1; ENSG00000139515; TAA
LADDPAVAH

SEQ ID NO: 62048 - protein, 9 aa, Homo sapiens
  misc_feature: Table A; Target 62048; HLA-C*03:04; PDX1; ENSG00000139515; TAA
LADDPAVAH

SEQ ID NO: 62049 - protein, 9 aa, Homo sapiens
  misc_feature: Table A; Target 62049; HLA-C*05:01; PDX1; ENSG00000139515; TAA
LADDPAVAH

SEQ ID NO: 62050 - protein, 10 aa, Homo sapiens
  misc_feature: Table A; Target 62050; HLA-A*02:07; PDX1; ENSG00000139515; TAA
LADDPAVAHL

SEQ ID NO: 62051 - protein, 10 aa, Homo sapiens
  misc_feature: Table A; Target 62051; HLA-B*38:01; PDX1; ENSG00000139515; TAA
LADDPAVAHL

SEQ ID NO: 62052 - protein, 10 aa, Homo sapiens
  misc_feature: Table A; Target 62052; HLA-B*39:01; PDX1; ENSG00000139515; TAA
LADDPAVAHL

SEQ ID NO: 62053 - protein, 10 aa, Homo sapiens
  misc_feature: Table A; Target 62053; HLA-B*40:01; PDX1; ENSG00000139515; TAA
LADDPAVAHL

SEQ ID NO: 62054 - protein, 10 aa, Homo sapiens
  misc_feature: Table A; Target 62054; HLA-C*03:03; PDX1; ENSG00000139515; TAA
LADDPAVAHL

SEQ ID NO: 62055 - protein, 10 aa, Homo sapiens
  misc_feature: Table A; Target 62055; HLA-C*03:04; PDX1; ENSG00000139515; TAA
LADDPAVAHL

SEQ ID NO: 62056 - protein, 10 aa, Homo sapiens
  misc_feature: Table A; Target 62056; HLA-C*05:01; PDX1; ENSG00000139515; TAA
LADDPAVAHL

SEQ ID NO: 62057 - protein, 8 aa, Homo sapiens
  misc_feature: Table A; Target 62057; HLA-B*54:01; PDX1; ENSG00000139515; TAA
LALPHPPA

SEQ ID NO: 62058 - protein, 9 aa, Homo sapiens
  misc_feature: Table A; Target 62058; HLA-A*02:01; PDX1; ENSG00000139515; TAA
LALPPPPPP

SEQ ID NO: 62059 - protein, 9 aa, Homo sapiens
  misc_feature: Table A; Target 62059; HLA-B*27:05; PDX1; ENSG00000139515; TAA
LALPPPPPP

SEQ ID NO: 62060 - protein, 9 aa, Homo sapiens
  misc_feature: Table A; Target 62060; HLA-B*39:01; PDX1; ENSG00000139515; TAA
LALPPPPPP

SEQ ID NO: 62061 - protein, 9 aa, Homo sapiens
  misc_feature: Table A; Target 62061; HLA-B*40:02; PDX1; ENSG00000139515; TAA
LALPPPPPP

SEQ ID NO: 62062 - protein, 9 aa, Homo sapiens
  misc_feature: Table A; Target 62062; HLA-B*46:01; PDX1; ENSG00000139515; TAA
LALPPPPPP

SEQ ID NO: 62063 - protein, 9 aa, Homo sapiens
  misc_feature: Table A; Target 62063; HLA-B*54:01; PDX1; ENSG00000139515; TAA
LALPPPPPP

SEQ ID NO: 62064 - protein, 9 aa, Homo sapiens
  misc_feature: Table A; Target 62064; HLA-B*56:01; PDX1; ENSG00000139515; TAA
LALPPPPPP

SEQ ID NO: 62065 - protein, 9 aa, Homo sapiens
  misc_feature: Table A; Target 62065; HLA-C*03:03; PDX1; ENSG00000139515; TAA
LALPPPPPP

SEQ ID NO: 62066 - protein, 9 aa, Homo sapiens
  misc_feature: Table A; Target 62066; HLA-C*03:04; PDX1; ENSG00000139515; TAA
LALPPPPPP

SEQ ID NO: 62067 - protein, 9 aa, Homo sapiens
  misc_feature: Table A; Target 62067; HLA-C*04:01; PDX1; ENSG00000139515; TAA
LALPPPPPP

SEQ ID NO: 62068 - protein, 9 aa, Homo sapiens
  misc_feature: Table A; Target 62068; HLA-C*06:02; PDX1; ENSG00000139515; TAA
LALPPPPPP

SEQ ID NO: 62069 - protein, 9 aa, Homo sapiens
  misc_feature: Table A; Target 62069; HLA-C*07:02; PDX1; ENSG00000139515; TAA
LALPPPPPP

SEQ ID NO: 62070 - protein, 10 aa, Homo sapiens
  misc_feature: Table A; Target 62070; HLA-B*54:01; PDX1; ENSG00000139515; TAA
LALPPPPPPG

SEQ ID NO: 62071 - protein, 10 aa, Homo sapiens
  misc_feature: Table A; Target 62071; HLA-B*27:02; PDX1; ENSG00000139515; TAA
LAVMLNLTER

SEQ ID NO: 62072 - protein, 9 aa, Homo sapiens
  misc_feature: Table A; Target 62072; HLA-A*30:01; PDX1; ENSG00000139515; TAA
LEEPNRVQL

SEQ ID NO: 62073 - protein, 9 aa, Homo sapiens
  misc_feature: Table A; Target 62073; HLA-B*37:01; PDX1; ENSG00000139515; TAA
LEEPNRVQL

SEQ ID NO: 62074 - protein, 9 aa, Homo sapiens
  misc_feature: Table A; Target 62074; HLA-B*40:01; PDX1; ENSG00000139515; TAA
LEEPNRVQL

SEQ ID NO: 62075 - protein, 9 aa, Homo sapiens
  misc_feature: Table A; Target 62075; HLA-B*49:01; PDX1; ENSG00000139515; TAA
LEEPNRVQL

SEQ ID NO: 62076 - protein, 10 aa, Homo sapiens
  misc_feature: Table A; Target 62076; HLA-B*44:02; PDX1; ENSG00000139515; TAA
LEKEFLFNKY

SEQ ID NO: 62077 - protein, 8 aa, Homo sapiens
  misc_feature: Table A; Target 62077; HLA-B*37:01; PDX1; ENSG00000139515; TAA
LELEKEFL

SEQ ID NO: 62078 - protein, 9 aa, Homo sapiens
  misc_feature: Table A; Target 62078; HLA-A*24:02; PDX1; ENSG00000139515; TAA
LELEKEFLF

SEQ ID NO: 62079 - protein, 9 aa, Homo sapiens
  misc_feature: Table A; Target 62079; HLA-B*37:01; PDX1; ENSG00000139515; TAA
LELEKEFLF

SEQ ID NO: 62080 - protein, 9 aa, Homo sapiens
  misc_feature: Table A; Target 62080; HLA-B*44:02; PDX1; ENSG00000139515; TAA
LELEKEFLF

SEQ ID NO: 62081 - protein, 9 aa, Homo sapiens
  misc_feature: Table A; Target 62081; HLA-B*44:03; PDX1; ENSG00000139515; TAA
LELEKEFLF

SEQ ID NO: 62082 - protein, 9 aa, Homo sapiens
  misc_feature: Table A; Target 62082; HLA-B*57:01; PDX1; ENSG00000139515; TAA
LELEKEFLF

SEQ ID NO: 62083 - protein, 9 aa, Homo sapiens
  misc_feature: Table A; Target 62083; HLA-A*30:01; PDX1; ENSG00000139515; TAA
LEQGSPPDI

SEQ ID NO: 62084 - protein, 9 aa, Homo sapiens
  misc_feature: Table A; Target 62084; HLA-B*39:01; PDX1; ENSG00000139515; TAA
LEQGSPPDI

SEQ ID NO: 62085 - protein, 9 aa, Homo sapiens
  misc_feature: Table A; Target 62085; HLA-B*40:01; PDX1; ENSG00000139515; TAA
LEQGSPPDI

SEQ ID NO: 62086 - protein, 9 aa, Homo sapiens
  misc_feature: Table A; Target 62086; HLA-B*44:02; PDX1; ENSG00000139515; TAA
LEQGSPPDI

SEQ ID NO: 62087 - protein, 9 aa, Homo sapiens
  misc_feature: Table A; Target 62087; HLA-B*49:01; PDX1; ENSG00000139515; TAA
LEQGSPPDI

SEQ ID NO: 62088 - protein, 9 aa, Homo sapiens
  misc_feature: Table A; Target 62088; HLA-C*16:04; PDX1; ENSG00000139515; TAA
LEQGSPPDI

SEQ ID NO: 62089 - protein, 9 aa, Homo sapiens
  misc_feature: Table A; Target 62089; HLA-B*35:01; PDX1; ENSG00000139515; TAA
LPAQLALPH

SEQ ID NO: 62090 - protein, 11 aa, Homo sapiens
  misc_feature: Table A; Target 62090; HLA-B*54:01; PDX1; ENSG00000139515; TAA
LPAQLALPHPP

SEQ ID NO: 62091 - protein, 11 aa, Homo sapiens
  misc_feature: Table A; Target 62091; HLA-B*54:01; PDX1; ENSG00000139515; TAA
LPFPWMKSTKA

SEQ ID NO: 62092 - protein, 9 aa, Homo sapiens
  misc_feature: Table A; Target 62092; HLA-B*07:02; PDX1; ENSG00000139515; TAA
LPHPPAGPF

SEQ ID NO: 62093 - protein, 9 aa, Homo sapiens
  misc_feature: Table A; Target 62093; HLA-B*35:01; PDX1; ENSG00000139515; TAA
LPHPPAGPF

SEQ ID NO: 62094 - protein, 9 aa, Homo sapiens
  misc_feature: Table A; Target 62094; HLA-B*35:03; PDX1; ENSG00000139515; TAA
LPHPPAGPF

SEQ ID NO: 62095 - protein, 9 aa, Homo sapiens
  misc_feature: Table A; Target 62095; HLA-B*46:01; PDX1; ENSG00000139515; TAA
LPHPPAGPF

SEQ ID NO: 62096 - protein, 9 aa, Homo sapiens
  misc_feature: Table A; Target 62096; HLA-B*51:01; PDX1; ENSG00000139515; TAA
LPHPPAGPF

SEQ ID NO: 62097 - protein, 9 aa, Homo sapiens
  misc_feature: Table A; Target 62097; HLA-B*54:01; PDX1; ENSG00000139515; TAA
LPHPPAGPF

SEQ ID NO: 62098 - protein, 9 aa, Homo sapiens
  misc_feature: Table A; Target 62098; HLA-C*03:04; PDX1; ENSG00000139515; TAA
LPHPPAGPF

SEQ ID NO: 62099 - protein, 9 aa, Homo sapiens
  misc_feature: Table A; Target 62099; HLA-C*04:01; PDX1; ENSG00000139515; TAA
LPHPPAGPF

SEQ ID NO: 62100 - protein, 9 aa, Homo sapiens
  misc_feature: Table A; Target 62100; HLA-C*07:02; PDX1; ENSG00000139515; TAA
LPHPPAGPF

SEQ ID NO: 62101 - protein, 10 aa, Homo sapiens
  misc_feature: Table A; Target 62101; HLA-B*54:01; PDX1; ENSG00000139515; TAA
LPHPPAGPFP

SEQ ID NO: 62102 - protein, 9 aa, Homo sapiens
  misc_feature: Table A; Target 62102; HLA-B*51:01; PDX1; ENSG00000139515; TAA
LPPPPPPGG

SEQ ID NO: 62103 - protein, 9 aa, Homo sapiens
  misc_feature: Table A; Target 62103; HLA-B*54:01; PDX1; ENSG00000139515; TAA
LPPPPPPGG

SEQ ID NO: 62104 - protein, 9 aa, Homo sapiens
  misc_feature: Table A; Target 62104; HLA-B*56:01; PDX1; ENSG00000139515; TAA
LPPPPPPGG

SEQ ID NO: 62105 - protein, 11 aa, Homo sapiens
  misc_feature: Table A; Target 62105; HLA-A*02:07; PDX1; ENSG00000139515; TAA
LPPPPPPGGAV

SEQ ID NO: 62106 - protein, 11 aa, Homo sapiens
  misc_feature: Table A; Target 62106; HLA-B*51:01; PDX1; ENSG00000139515; TAA
LPPPPPPGGAV

SEQ ID NO: 62107 - protein, 11 aa, Homo sapiens
  misc_feature: Table A; Target 62107; HLA-B*54:01; PDX1; ENSG00000139515; TAA
LPPPPPPGGAV

SEQ ID NO: 62108 - protein, 11 aa, Homo sapiens
  misc_feature: Table A; Target 62108; HLA-B*56:01; PDX1; ENSG00000139515; TAA
LPPPPPPGGAV

SEQ ID NO: 62109 - protein, 9 aa, Homo sapiens
  misc_feature: Table A; Target 62109; HLA-B*57:01; PDX1; ENSG00000139515; TAA
LTERHIKIW

SEQ ID NO: 62110 - protein, 10 aa, Homo sapiens
  misc_feature: Table A; Target 62110; HLA-A*31:01; PDX1; ENSG00000139515; TAA
LYKDPCAFQR

SEQ ID NO: 62111 - protein, 10 aa, Homo sapiens
  misc_feature: Table A; Target 62111; HLA-A*33:01; PDX1; ENSG00000139515; TAA
LYKDPCAFQR

SEQ ID NO: 62112 - protein, 10 aa, Homo sapiens
  misc_feature: Table A; Target 62112; HLA-A*33:03; PDX1; ENSG00000139515; TAA
LYKDPCAFQR

SEQ ID NO: 62113 - protein, 9 aa, Homo sapiens
  misc_feature: Table A; Target 62113; HLA-B*54:01; PDX1; ENSG00000139515; TAA
MGRQPPPPP

SEQ ID NO: 62114 - protein, 10 aa, Homo sapiens
  misc_feature: Table A; Target 62114; HLA-B*54:01; PDX1; ENSG00000139515; TAA
MGRQPPPPPP

SEQ ID NO: 62115 - protein, 8 aa, Homo sapiens
  misc_feature: Table A; Target 62115; HLA-C*07:01; PDX1; ENSG00000139515; TAA
MNGEEQYY

SEQ ID NO: 62116 - protein, 8 aa, Homo sapiens
  misc_feature: Table A; Target 62116; HLA-B*56:01; PDX1; ENSG00000139515; TAA
PPAAPVAA

SEQ ID NO: 62117 - protein, 9 aa, Homo sapiens
  misc_feature: Table A; Target 62117; HLA-A*68:01; PDX1; ENSG00000139515; TAA
PPAAPVAAR

SEQ ID NO: 62118 - protein, 9 aa, Homo sapiens
  misc_feature: Table A; Target 62118; HLA-C*07:06; PDX1; ENSG00000139515; TAA
PPAAPVAAR

SEQ ID NO: 62119 - protein, 9 aa, Homo sapiens
  misc_feature: Table A; Target 62119; HLA-A*24:02; PDX1; ENSG00000139515; TAA
PPPPPPHPF

SEQ ID NO: 62120 - protein, 10 aa, Homo sapiens
  misc_feature: Table A; Target 62120; HLA-A*01:01; PDX1; ENSG00000139515; TAA
QGSPPDISPY

SEQ ID NO: 62121 - protein, 10 aa, Homo sapiens
  misc_feature: Table A; Target 62121; HLA-A*30:02; PDX1; ENSG00000139515; TAA
QGSPPDISPY

SEQ ID NO: 62122 - protein, 10 aa, Homo sapiens
  misc_feature: Table A; Target 62122; HLA-B*27:02; PDX1; ENSG00000139515; TAA
QGSPPDISPY

SEQ ID NO: 62123 - protein, 9 aa, Homo sapiens
  misc_feature: Table A; Target 62123; HLA-B*54:01; PDX1; ENSG00000139515; TAA
QLALPHPPA

SEQ ID NO: 62124 - protein, 9 aa, Homo sapiens
  misc_feature: Table A; Target 62124; HLA-B*56:01; PDX1; ENSG00000139515; TAA
QLALPHPPA

SEQ ID NO: 62125 - protein, 9 aa, Homo sapiens
  misc_feature: Table A; Target 62125; HLA-C*06:02; PDX1; ENSG00000139515; TAA
QLALPHPPA

SEQ ID NO: 62126 - protein, 10 aa, Homo sapiens
  misc_feature: Table A; Target 62126; HLA-A*02:01; PDX1; ENSG00000139515; TAA
QLLELEKEFL

SEQ ID NO: 62127 - protein, 10 aa, Homo sapiens
  misc_feature: Table A; Target 62127; HLA-A*02:04; PDX1; ENSG00000139515; TAA
QLLELEKEFL

SEQ ID NO: 62128 - protein, 10 aa, Homo sapiens
  misc_feature: Table A; Target 62128; HLA-A*02:07; PDX1; ENSG00000139515; TAA
QLLELEKEFL

SEQ ID NO: 62129 - protein, 11 aa, Homo sapiens
  misc_feature: Table A; Target 62129; HLA-A*02:01; PDX1; ENSG00000139515; TAA
QLLELEKEFLF

SEQ ID NO: 62130 - protein, 11 aa, Homo sapiens
  misc_feature: Table A; Target 62130; HLA-A*02:04; PDX1; ENSG00000139515; TAA
QLLELEKEFLF

SEQ ID NO: 62131 - protein, 11 aa, Homo sapiens
  misc_feature: Table A; Target 62131; HLA-A*02:07; PDX1; ENSG00000139515; TAA
QLLELEKEFLF

SEQ ID NO: 62132 - protein, 11 aa, Homo sapiens
  misc_feature: Table A; Target 62132; HLA-A*24:02; PDX1; ENSG00000139515; TAA
QLLELEKEFLF

SEQ ID NO: 62133 - protein, 11 aa, Homo sapiens
  misc_feature: Table A; Target 62133; HLA-A*29:02; PDX1; ENSG00000139515; TAA
QLLELEKEFLF

SEQ ID NO: 62134 - protein, 9 aa, Homo sapiens
  misc_feature: Table A; Target 62134; HLA-A*03:01; PDX1; ENSG00000139515; TAA
QLYKDPCAF

SEQ ID NO: 62135 - protein, 9 aa, Homo sapiens
  misc_feature: Table A; Target 62135; HLA-A*03:02; PDX1; ENSG00000139515; TAA
QLYKDPCAF

SEQ ID NO: 62136 - protein, 9 aa, Homo sapiens
  misc_feature: Table A; Target 62136; HLA-A*32:01; PDX1; ENSG00000139515; TAA
QLYKDPCAF

SEQ ID NO: 62137 - protein, 9 aa, Homo sapiens
  misc_feature: Table A; Target 62137; HLA-B*08:01; PDX1; ENSG00000139515; TAA
QLYKDPCAF

SEQ ID NO: 62138 - protein, 9 aa, Homo sapiens
  misc_feature: Table A; Target 62138; HLA-B*15:01; PDX1; ENSG00000139515; TAA
QLYKDPCAF

SEQ ID NO: 62139 - protein, 9 aa, Homo sapiens
  misc_feature: Table A; Target 62139; HLA-B*15:03; PDX1; ENSG00000139515; TAA
QLYKDPCAF

SEQ ID NO: 62140 - protein, 9 aa, Homo sapiens
  misc_feature: Table A; Target 62140; HLA-B*37:01; PDX1; ENSG00000139515; TAA
QLYKDPCAF

SEQ ID NO: 62141 - protein, 9 aa, Homo sapiens
  misc_feature: Table A; Target 62141; HLA-B*46:01; PDX1; ENSG00000139515; TAA
QLYKDPCAF

SEQ ID NO: 62142 - protein, 9 aa, Homo sapiens
  misc_feature: Table A; Target 62142; HLA-C*07:04; PDX1; ENSG00000139515; TAA
QLYKDPCAF

SEQ ID NO: 62143 - protein, 9 aa, Homo sapiens
  misc_feature: Table A; Target 62143; HLA-C*04:01; PDX1; ENSG00000139515; TAA
QPPPPPPHP

SEQ ID NO: 62144 - protein, 10 aa, Homo sapiens
  misc_feature: Table A; Target 62144; HLA-A*24:02; PDX1; ENSG00000139515; TAA
QPPPPPPHPF

SEQ ID NO: 62145 - protein, 10 aa, Homo sapiens
  misc_feature: Table A; Target 62145; HLA-A*29:02; PDX1; ENSG00000139515; TAA
QPPPPPPHPF

SEQ ID NO: 62146 - protein, 10 aa, Homo sapiens
  misc_feature: Table A; Target 62146; HLA-B*07:02; PDX1; ENSG00000139515; TAA
QPPPPPPHPF

SEQ ID NO: 62147 - protein, 10 aa, Homo sapiens
  misc_feature: Table A; Target 62147; HLA-B*35:01; PDX1; ENSG00000139515; TAA
QPPPPPPHPF

SEQ ID NO: 62148 - protein, 10 aa, Homo sapiens
  misc_feature: Table A; Target 62148; HLA-B*56:01; PDX1; ENSG00000139515; TAA
QPPPPPPHPF

SEQ ID NO: 62149 - protein, 10 aa, Homo sapiens
  misc_feature: Table A; Target 62149; HLA-C*04:01; PDX1; ENSG00000139515; TAA
QPPPPPPHPF

SEQ ID NO: 62150 - protein, 10 aa, Homo sapiens
  misc_feature: Table A; Target 62150; HLA-C*07:02; PDX1; ENSG00000139515; TAA
QPPPPPPHPF

SEQ ID NO: 62151 - protein, 8 aa, Homo sapiens
  misc_feature: Table A; Target 62151; HLA-B*27:02; PDX1; ENSG00000139515; TAA
QRGPAPEF

SEQ ID NO: 62152 - protein, 8 aa, Homo sapiens
  misc_feature: Table A; Target 62152; HLA-B*27:05; PDX1; ENSG00000139515; TAA
QRGPAPEF

SEQ ID NO: 62153 - protein, 8 aa, Homo sapiens
  misc_feature: Table A; Target 62153; HLA-B*38:01; PDX1; ENSG00000139515; TAA
QRGPAPEF

SEQ ID NO: 62154 - protein, 8 aa, Homo sapiens
  misc_feature: Table A; Target 62154; HLA-B*39:01; PDX1; ENSG00000139515; TAA
QRGPAPEF

SEQ ID NO: 62155 - protein, 8 aa, Homo sapiens
  misc_feature: Table A; Target 62155; HLA-C*06:02; PDX1; ENSG00000139515; TAA
QRGPAPEF

SEQ ID NO: 62156 - protein, 8 aa, Homo sapiens
  misc_feature: Table A; Target 62156; HLA-C*07:01; PDX1; ENSG00000139515; TAA
QRGPAPEF

SEQ ID NO: 62157 - protein, 8 aa, Homo sapiens
  misc_feature: Table A; Target 62157; HLA-C*07:02; PDX1; ENSG00000139515; TAA
QRGPAPEF

SEQ ID NO: 62158 - protein, 8 aa, Homo sapiens
  misc_feature: Table A; Target 62158; HLA-C*12:03; PDX1; ENSG00000139515; TAA
QRGPAPEF

SEQ ID NO: 62159 - protein, 8 aa, Homo sapiens
  misc_feature: Table A; Target 62159; HLA-C*16:04; PDX1; ENSG00000139515; TAA
QRGPAPEF

SEQ ID NO: 62160 - protein, 8 aa, Homo sapiens
  misc_feature: Table A; Target 62160; HLA-A*23:01; PDX1; ENSG00000139515; TAA
QYYAATQL

SEQ ID NO: 62161 - protein, 8 aa, Homo sapiens
  misc_feature: Table A; Target 62161; HLA-A*24:02; PDX1; ENSG00000139515; TAA
QYYAATQL

SEQ ID NO: 62162 - protein, 8 aa, Homo sapiens
  misc_feature: Table A; Target 62162; HLA-B*15:03; PDX1; ENSG00000139515; TAA
QYYAATQL

SEQ ID NO: 62163 - protein, 8 aa, Homo sapiens
  misc_feature: Table A; Target 62163; HLA-C*04:01; PDX1; ENSG00000139515; TAA
QYYAATQL

SEQ ID NO: 62164 - protein, 8 aa, Homo sapiens
  misc_feature: Table A; Target 62164; HLA-C*14:02; PDX1; ENSG00000139515; TAA
QYYAATQL

SEQ ID NO: 62165 - protein, 9 aa, Homo sapiens
  misc_feature: Table A; Target 62165; HLA-A*23:01; PDX1; ENSG00000139515; TAA
QYYAATQLY

SEQ ID NO: 62166 - protein, 9 aa, Homo sapiens
  misc_feature: Table A; Target 62166; HLA-A*24:02; PDX1; ENSG00000139515; TAA
QYYAATQLY

SEQ ID NO: 62167 - protein, 9 aa, Homo sapiens
  misc_feature: Table A; Target 62167; HLA-A*26:01; PDX1; ENSG00000139515; TAA
QYYAATQLY

SEQ ID NO: 62168 - protein, 9 aa, Homo sapiens
  misc_feature: Table A; Target 62168; HLA-A*29:02; PDX1; ENSG00000139515; TAA
QYYAATQLY

SEQ ID NO: 62169 - protein, 9 aa, Homo sapiens
  misc_feature: Table A; Target 62169; HLA-A*30:02; PDX1; ENSG00000139515; TAA
QYYAATQLY

SEQ ID NO: 62170 - protein, 9 aa, Homo sapiens
  misc_feature: Table A; Target 62170; HLA-A*33:03; PDX1; ENSG00000139515; TAA
QYYAATQLY

SEQ ID NO: 62171 - protein, 9 aa, Homo sapiens
  misc_feature: Table A; Target 62171; HLA-B*15:01; PDX1; ENSG00000139515; TAA
QYYAATQLY

SEQ ID NO: 62172 - protein, 9 aa, Homo sapiens
  misc_feature: Table A; Target 62172; HLA-B*15:03; PDX1; ENSG00000139515; TAA
QYYAATQLY

SEQ ID NO: 62173 - protein, 9 aa, Homo sapiens
  misc_feature: Table A; Target 62173; HLA-B*35:01; PDX1; ENSG00000139515; TAA
QYYAATQLY

SEQ ID NO: 62174 - protein, 9 aa, Homo sapiens
  misc_feature: Table A; Target 62174; HLA-B*46:01; PDX1; ENSG00000139515; TAA
QYYAATQLY

SEQ ID NO: 62175 - protein, 9 aa, Homo sapiens
  misc_feature: Table A; Target 62175; HLA-C*01:02; PDX1; ENSG00000139515; TAA
QYYAATQLY

SEQ ID NO: 62176 - protein, 9 aa, Homo sapiens
  misc_feature: Table A; Target 62176; HLA-C*02:02; PDX1; ENSG00000139515; TAA
QYYAATQLY

SEQ ID NO: 62177 - protein, 9 aa, Homo sapiens
  misc_feature: Table A; Target 62177; HLA-C*04:01; PDX1; ENSG00000139515; TAA
QYYAATQLY

SEQ ID NO: 62178 - protein, 9 aa, Homo sapiens
  misc_feature: Table A; Target 62178; HLA-C*07:01; PDX1; ENSG00000139515; TAA
QYYAATQLY

SEQ ID NO: 62179 - protein, 9 aa, Homo sapiens
  misc_feature: Table A; Target 62179; HLA-C*14:02; PDX1; ENSG00000139515; TAA
QYYAATQLY

SEQ ID NO: 62180 - protein, 9 aa, Homo sapiens
  misc_feature: Table A; Target 62180; HLA-B*40:01; PDX1; ENSG00000139515; TAA
REGRLPPGL

SEQ ID NO: 62181 - protein, 9 aa, Homo sapiens
  misc_feature: Table A; Target 62181; HLA-B*44:02; PDX1; ENSG00000139515; TAA
REGRLPPGL

SEQ ID NO: 62182 - protein, 9 aa, Homo sapiens
  misc_feature: Table A; Target 62182; HLA-B*44:03; PDX1; ENSG00000139515; TAA
REGRLPPGL

SEQ ID NO: 62183 - protein, 10 aa, Homo sapiens
  misc_feature: Table A; Target 62183; HLA-A*31:01; PDX1; ENSG00000139515; TAA
RHIKIWFQNR

SEQ ID NO: 62184 - protein, 9 aa, Homo sapiens
  misc_feature: Table A; Target 62184; HLA-A*03:01; PDX1; ENSG00000139515; TAA
RQPPPPPPH

SEQ ID NO: 62185 - protein, 9 aa, Homo sapiens
  misc_feature: Table A; Target 62185; HLA-A*03:02; PDX1; ENSG00000139515; TAA
RQPPPPPPH

SEQ ID NO: 62186 - protein, 9 aa, Homo sapiens
  misc_feature: Table A; Target 62186; HLA-A*11:01; PDX1; ENSG00000139515; TAA
RQPPPPPPH

SEQ ID NO: 62187 - protein, 11 aa, Homo sapiens
  misc_feature: Table A; Target 62187; HLA-A*02:01; PDX1; ENSG00000139515; TAA
RQPPPPPPHPF

SEQ ID NO: 62188 - protein, 11 aa, Homo sapiens
  misc_feature: Table A; Target 62188; HLA-A*02:07; PDX1; ENSG00000139515; TAA
RQPPPPPPHPF

SEQ ID NO: 62189 - protein, 11 aa, Homo sapiens
  misc_feature: Table A; Target 62189; HLA-A*24:02; PDX1; ENSG00000139515; TAA
RQPPPPPPHPF

SEQ ID NO: 62190 - protein, 11 aa, Homo sapiens
  misc_feature: Table A; Target 62190; HLA-A*30:02; PDX1; ENSG00000139515; TAA
RQPPPPPPHPF

SEQ ID NO: 62191 - protein, 11 aa, Homo sapiens
  misc_feature: Table A; Target 62191; HLA-A*31:01; PDX1; ENSG00000139515; TAA
RQPPPPPPHPF

SEQ ID NO: 62192 - protein, 11 aa, Homo sapiens
  misc_feature: Table A; Target 62192; HLA-B*15:01; PDX1; ENSG00000139515; TAA
RQPPPPPPHPF

SEQ ID NO: 62193 - protein, 11 aa, Homo sapiens
  misc_feature: Table A; Target 62193; HLA-B*57:01; PDX1; ENSG00000139515; TAA
RQPPPPPPHPF

SEQ ID NO: 62194 - protein, 8 aa, Homo sapiens
  misc_feature: Table A; Target 62194; HLA-C*03:04; PDX1; ENSG00000139515; TAA
SASPPACL

SEQ ID NO: 62195 - protein, 8 aa, Homo sapiens
  misc_feature: Table A; Target 62195; HLA-C*05:01; PDX1; ENSG00000139515; TAA
SASPPACL

SEQ ID NO: 62196 - protein, 9 aa, Homo sapiens
  misc_feature: Table A; Target 62196; HLA-A*01:01; PDX1; ENSG00000139515; TAA
SASPPACLY

SEQ ID NO: 62197 - protein, 9 aa, Homo sapiens
  misc_feature: Table A; Target 62197; HLA-A*03:02; PDX1; ENSG00000139515; TAA
SASPPACLY

SEQ ID NO: 62198 - protein, 9 aa, Homo sapiens
  misc_feature: Table A; Target 62198; HLA-A*11:01; PDX1; ENSG00000139515; TAA
SASPPACLY

SEQ ID NO: 62199 - protein, 9 aa, Homo sapiens
  misc_feature: Table A; Target 62199; HLA-A*25:01; PDX1; ENSG00000139515; TAA
SASPPACLY

SEQ ID NO: 62200 - protein, 9 aa, Homo sapiens
  misc_feature: Table A; Target 62200; HLA-A*26:01; PDX1; ENSG00000139515; TAA
SASPPACLY

SEQ ID NO: 62201 - protein, 9 aa, Homo sapiens
  misc_feature: Table A; Target 62201; HLA-A*29:02; PDX1; ENSG00000139515; TAA
SASPPACLY

SEQ ID NO: 62202 - protein, 9 aa, Homo sapiens
  misc_feature: Table A; Target 62202; HLA-A*30:02; PDX1; ENSG00000139515; TAA
SASPPACLY

SEQ ID NO: 62203 - protein, 9 aa, Homo sapiens
  misc_feature: Table A; Target 62203; HLA-A*32:01; PDX1; ENSG00000139515; TAA
SASPPACLY

SEQ ID NO: 62204 - protein, 9 aa, Homo sapiens
  misc_feature: Table A; Target 62204; HLA-B*15:01; PDX1; ENSG00000139515; TAA
SASPPACLY

SEQ ID NO: 62205 - protein, 9 aa, Homo sapiens
  misc_feature: Table A; Target 62205; HLA-B*15:03; PDX1; ENSG00000139515; TAA
SASPPACLY

SEQ ID NO: 62206 - protein, 9 aa, Homo sapiens
  misc_feature: Table A; Target 62206; HLA-B*35:01; PDX1; ENSG00000139515; TAA
SASPPACLY

SEQ ID NO: 62207 - protein, 9 aa, Homo sapiens
  misc_feature: Table A; Target 62207; HLA-B*37:01; PDX1; ENSG00000139515; TAA
SASPPACLY

SEQ ID NO: 62208 - protein, 9 aa, Homo sapiens
  misc_feature: Table A; Target 62208; HLA-B*39:01; PDX1; ENSG00000139515; TAA
SASPPACLY

SEQ ID NO: 62209 - protein, 9 aa, Homo sapiens
  misc_feature: Table A; Target 62209; HLA-B*44:03; PDX1; ENSG00000139515; TAA
SASPPACLY

SEQ ID NO: 62210 - protein, 9 aa, Homo sapiens
  misc_feature: Table A; Target 62210; HLA-B*46:01; PDX1; ENSG00000139515; TAA
SASPPACLY

SEQ ID NO: 62211 - protein, 9 aa, Homo sapiens
  misc_feature: Table A; Target 62211; HLA-B*58:01; PDX1; ENSG00000139515; TAA
SASPPACLY

SEQ ID NO: 62212 - protein, 9 aa, Homo sapiens
  misc_feature: Table A; Target 62212; HLA-C*02:02; PDX1; ENSG00000139515; TAA
SASPPACLY

SEQ ID NO: 62213 - protein, 9 aa, Homo sapiens
  misc_feature: Table A; Target 62213; HLA-C*03:03; PDX1; ENSG00000139515; TAA
SASPPACLY

SEQ ID NO: 62214 - protein, 9 aa, Homo sapiens
  misc_feature: Table A; Target 62214; HLA-C*03:04; PDX1; ENSG00000139515; TAA
SASPPACLY

SEQ ID NO: 62215 - protein, 9 aa, Homo sapiens
  misc_feature: Table A; Target 62215; HLA-C*07:04; PDX1; ENSG00000139515; TAA
SASPPACLY

SEQ ID NO: 62216 - protein, 9 aa, Homo sapiens
  misc_feature: Table A; Target 62216; HLA-C*07:06; PDX1; ENSG00000139515; TAA
SASPPACLY

SEQ ID NO: 62217 - protein, 9 aa, Homo sapiens
  misc_feature: Table A; Target 62217; HLA-C*12:03; PDX1; ENSG00000139515; TAA
SASPPACLY

SEQ ID NO: 62218 - protein, 9 aa, Homo sapiens
  misc_feature: Table A; Target 62218; HLA-C*14:02; PDX1; ENSG00000139515; TAA
SASPPACLY

SEQ ID NO: 62219 - protein, 9 aa, Homo sapiens
  misc_feature: Table A; Target 62219; HLA-C*16:01; PDX1; ENSG00000139515; TAA
SASPPACLY

SEQ ID NO: 62220 - protein, 9 aa, Homo sapiens
  misc_feature: Table A; Target 62220; HLA-C*16:02; PDX1; ENSG00000139515; TAA
SASPPACLY

SEQ ID NO: 62221 - protein, 9 aa, Homo sapiens
  misc_feature: Table A; Target 62221; HLA-C*16:04; PDX1; ENSG00000139515; TAA
SASPPACLY

SEQ ID NO: 62222 - protein, 9 aa, Homo sapiens
  misc_feature: Table A; Target 62222; HLA-A*02:01; PDX1; ENSG00000139515; TAA
SASPQPSSV

SEQ ID NO: 62223 - protein, 9 aa, Homo sapiens
  misc_feature: Table A; Target 62223; HLA-A*02:03; PDX1; ENSG00000139515; TAA
SASPQPSSV

SEQ ID NO: 62224 - protein, 9 aa, Homo sapiens
  misc_feature: Table A; Target 62224; HLA-A*32:01; PDX1; ENSG00000139515; TAA
SASPQPSSV

SEQ ID NO: 62225 - protein, 9 aa, Homo sapiens
  misc_feature: Table A; Target 62225; HLA-B*13:02; PDX1; ENSG00000139515; TAA
SASPQPSSV

SEQ ID NO: 62226 - protein, 9 aa, Homo sapiens
  misc_feature: Table A; Target 62226; HLA-B*39:01; PDX1; ENSG00000139515; TAA
SASPQPSSV

SEQ ID NO: 62227 - protein, 9 aa, Homo sapiens
  misc_feature: Table A; Target 62227; HLA-B*49:01; PDX1; ENSG00000139515; TAA
SASPQPSSV

SEQ ID NO: 62228 - protein, 9 aa, Homo sapiens
  misc_feature: Table A; Target 62228; HLA-B*51:01; PDX1; ENSG00000139515; TAA
SASPQPSSV

SEQ ID NO: 62229 - protein, 9 aa, Homo sapiens
  misc_feature: Table A; Target 62229; HLA-B*54:01; PDX1; ENSG00000139515; TAA
SASPQPSSV

SEQ ID NO: 62230 - protein, 9 aa, Homo sapiens
  misc_feature: Table A; Target 62230; HLA-B*56:01; PDX1; ENSG00000139515; TAA
SASPQPSSV

SEQ ID NO: 62231 - protein, 9 aa, Homo sapiens
  misc_feature: Table A; Target 62231; HLA-C*02:02; PDX1; ENSG00000139515; TAA
SASPQPSSV

SEQ ID NO: 62232 - protein, 9 aa, Homo sapiens
  misc_feature: Table A; Target 62232; HLA-C*03:03; PDX1; ENSG00000139515; TAA
SASPQPSSV

SEQ ID NO: 62233 - protein, 9 aa, Homo sapiens
  misc_feature: Table A; Target 62233; HLA-C*03:04; PDX1; ENSG00000139515; TAA
SASPQPSSV

SEQ ID NO: 62234 - protein, 9 aa, Homo sapiens
  misc_feature: Table A; Target 62234; HLA-C*05:01; PDX1; ENSG00000139515; TAA
SASPQPSSV

SEQ ID NO: 62235 - protein, 9 aa, Homo sapiens
  misc_feature: Table A; Target 62235; HLA-C*12:03; PDX1; ENSG00000139515; TAA
SASPQPSSV

SEQ ID NO: 62236 - protein, 9 aa, Homo sapiens
  misc_feature: Table A; Target 62236; HLA-C*16:01; PDX1; ENSG00000139515; TAA
SASPQPSSV

SEQ ID NO: 62237 - protein, 9 aa, Homo sapiens
  misc_feature: Table A; Target 62237; HLA-C*16:02; PDX1; ENSG00000139515; TAA
SASPQPSSV

SEQ ID NO: 62238 - protein, 9 aa, Homo sapiens
  misc_feature: Table A; Target 62238; HLA-C*16:04; PDX1; ENSG00000139515; TAA
SASPQPSSV

SEQ ID NO: 62239 - protein, 10 aa, Homo sapiens
  misc_feature: Table A; Target 62239; HLA-B*56:01; PDX1; ENSG00000139515; TAA
SPPDISPYEV

SEQ ID NO: 62240 - protein, 8 aa, Homo sapiens
  misc_feature: Table A; Target 62240; HLA-B*56:01; PDX1; ENSG00000139515; TAA
SPQPSSVA

SEQ ID NO: 62241 - protein, 9 aa, Homo sapiens
  misc_feature: Table A; Target 62241; HLA-B*07:02; PDX1; ENSG00000139515; TAA
SPQPSSVAP

SEQ ID NO: 62242 - protein, 9 aa, Homo sapiens
  misc_feature: Table A; Target 62242; HLA-B*56:01; PDX1; ENSG00000139515; TAA
SPQPSSVAP

SEQ ID NO: 62243 - protein, 9 aa, Homo sapiens
  misc_feature: Table A; Target 62243; HLA-C*07:02; PDX1; ENSG00000139515; TAA
SPQPSSVAP

SEQ ID NO: 62244 - protein, 10 aa, Homo sapiens
  misc_feature: Table A; Target 62244; HLA-A*03:02; PDX1; ENSG00000139515; TAA
SPQPSSVAPR

SEQ ID NO: 62245 - protein, 10 aa, Homo sapiens
  misc_feature: Table A; Target 62245; HLA-A*11:01; PDX1; ENSG00000139515; TAA
SPQPSSVAPR

SEQ ID NO: 62246 - protein, 10 aa, Homo sapiens
  misc_feature: Table A; Target 62246; HLA-A*33:01; PDX1; ENSG00000139515; TAA
SPQPSSVAPR

SEQ ID NO: 62247 - protein, 10 aa, Homo sapiens
  misc_feature: Table A; Target 62247; HLA-A*33:03; PDX1; ENSG00000139515; TAA
SPQPSSVAPR

SEQ ID NO: 62248 - protein, 10 aa, Homo sapiens
  misc_feature: Table A; Target 62248; HLA-A*68:01; PDX1; ENSG00000139515; TAA
SPQPSSVAPR

SEQ ID NO: 62249 - protein, 10 aa, Homo sapiens
  misc_feature: Table A; Target 62249; HLA-B*27:02; PDX1; ENSG00000139515; TAA
SPQPSSVAPR

SEQ ID NO: 62250 - protein, 10 aa, Homo sapiens
  misc_feature: Table A; Target 62250; HLA-C*07:06; PDX1; ENSG00000139515; TAA
SPQPSSVAPR

SEQ ID NO: 62251 - protein, 11 aa, Homo sapiens
  misc_feature: Table A; Target 62251; HLA-A*68:01; PDX1; ENSG00000139515; TAA
SPQPSSVAPRR

SEQ ID NO: 62252 - protein, 8 aa, Homo sapiens
  misc_feature: Table A; Target 62252; HLA-B*35:01; PDX1; ENSG00000139515; TAA
SPYEVPPL

SEQ ID NO: 62253 - protein, 8 aa, Homo sapiens
  misc_feature: Table A; Target 62253; HLA-B*51:01; PDX1; ENSG00000139515; TAA
SPYEVPPL

SEQ ID NO: 62254 - protein, 8 aa, Homo sapiens
  misc_feature: Table A; Target 62254; HLA-B*56:01; PDX1; ENSG00000139515; TAA
SPYEVPPL

SEQ ID NO: 62255 - protein, 8 aa, Homo sapiens
  misc_feature: Table A; Target 62255; HLA-C*07:02; PDX1; ENSG00000139515; TAA
SPYEVPPL

SEQ ID NO: 62256 - protein, 9 aa, Homo sapiens
  misc_feature: Table A; Target 62256; HLA-B*51:01; PDX1; ENSG00000139515; TAA
SPYEVPPLA

SEQ ID NO: 62257 - protein, 9 aa, Homo sapiens
  misc_feature: Table A; Target 62257; HLA-B*54:01; PDX1; ENSG00000139515; TAA
SPYEVPPLA

SEQ ID NO: 62258 - protein, 9 aa, Homo sapiens
  misc_feature: Table A; Target 62258; HLA-B*55:01; PDX1; ENSG00000139515; TAA
SPYEVPPLA

SEQ ID NO: 62259 - protein, 9 aa, Homo sapiens
  misc_feature: Table A; Target 62259; HLA-B*56:01; PDX1; ENSG00000139515; TAA
SPYEVPPLA

SEQ ID NO: 62260 - protein, 11 aa, Homo sapiens
  misc_feature: Table A; Target 62260; HLA-A*31:01; PDX1; ENSG00000139515; TAA
SVAPRRPQEPR

SEQ ID NO: 62261 - protein, 9 aa, Homo sapiens
  misc_feature: Table A; Target 62261; HLA-B*39:01; PDX1; ENSG00000139515; TAA
TAVGGGGVA

SEQ ID NO: 62262 - protein, 9 aa, Homo sapiens
  misc_feature: Table A; Target 62262; HLA-C*03:03; PDX1; ENSG00000139515; TAA
TAVGGGGVA

SEQ ID NO: 62263 - protein, 9 aa, Homo sapiens
  misc_feature: Table A; Target 62263; HLA-C*03:04; PDX1; ENSG00000139515; TAA
TAVGGGGVA

SEQ ID NO: 62264 - protein, 8 aa, Homo sapiens
  misc_feature: Table A; Target 62264; HLA-B*07:02; PDX1; ENSG00000139515; TAA
TAYTRAQL

SEQ ID NO: 62265 - protein, 8 aa, Homo sapiens
  misc_feature: Table A; Target 62265; HLA-B*08:01; PDX1; ENSG00000139515; TAA
TAYTRAQL

SEQ ID NO: 62266 - protein, 8 aa, Homo sapiens
  misc_feature: Table A; Target 62266; HLA-B*51:01; PDX1; ENSG00000139515; TAA
TAYTRAQL

SEQ ID NO: 62267 - protein, 8 aa, Homo sapiens
  misc_feature: Table A; Target 62267; HLA-C*01:02; PDX1; ENSG00000139515; TAA
TAYTRAQL

SEQ ID NO: 62268 - protein, 8 aa, Homo sapiens
  misc_feature: Table A; Target 62268; HLA-C*03:03; PDX1; ENSG00000139515; TAA
TAYTRAQL

SEQ ID NO: 62269 - protein, 8 aa, Homo sapiens
  misc_feature: Table A; Target 62269; HLA-C*03:04; PDX1; ENSG00000139515; TAA
TAYTRAQL

SEQ ID NO: 62270 - protein, 8 aa, Homo sapiens
  misc_feature: Table A; Target 62270; HLA-C*07:02; PDX1; ENSG00000139515; TAA
TAYTRAQL

SEQ ID NO: 62271 - protein, 8 aa, Homo sapiens
  misc_feature: Table A; Target 62271; HLA-C*16:01; PDX1; ENSG00000139515; TAA
TAYTRAQL

SEQ ID NO: 62272 - protein, 8 aa, Homo sapiens
  misc_feature: Table A; Target 62272; HLA-C*16:02; PDX1; ENSG00000139515; TAA
TAYTRAQL

SEQ ID NO: 62273 - protein, 9 aa, Homo sapiens
  misc_feature: Table A; Target 62273; HLA-A*02:03; PDX1; ENSG00000139515; TAA
TAYTRAQLL

SEQ ID NO: 62274 - protein, 9 aa, Homo sapiens
  misc_feature: Table A; Target 62274; HLA-A*23:01; PDX1; ENSG00000139515; TAA
TAYTRAQLL

SEQ ID NO: 62275 - protein, 9 aa, Homo sapiens
  misc_feature: Table A; Target 62275; HLA-A*24:02; PDX1; ENSG00000139515; TAA
TAYTRAQLL

SEQ ID NO: 62276 - protein, 9 aa, Homo sapiens
  misc_feature: Table A; Target 62276; HLA-A*30:01; PDX1; ENSG00000139515; TAA
TAYTRAQLL

SEQ ID NO: 62277 - protein, 9 aa, Homo sapiens
  misc_feature: Table A; Target 62277; HLA-A*32:01; PDX1; ENSG00000139515; TAA
TAYTRAQLL

SEQ ID NO: 62278 - protein, 9 aa, Homo sapiens
  misc_feature: Table A; Target 62278; HLA-A*33:01; PDX1; ENSG00000139515; TAA
TAYTRAQLL

SEQ ID NO: 62279 - protein, 9 aa, Homo sapiens
  misc_feature: Table A; Target 62279; HLA-B*07:02; PDX1; ENSG00000139515; TAA
TAYTRAQLL

SEQ ID NO: 62280 - protein, 9 aa, Homo sapiens
  misc_feature: Table A; Target 62280; HLA-B*08:01; PDX1; ENSG00000139515; TAA
TAYTRAQLL

SEQ ID NO: 62281 - protein, 9 aa, Homo sapiens
  misc_feature: Table A; Target 62281; HLA-B*13:02; PDX1; ENSG00000139515; TAA
TAYTRAQLL

SEQ ID NO: 62282 - protein, 9 aa, Homo sapiens
  misc_feature: Table A; Target 62282; HLA-B*15:03; PDX1; ENSG00000139515; TAA
TAYTRAQLL

SEQ ID NO: 62283 - protein, 9 aa, Homo sapiens
  misc_feature: Table A; Target 62283; HLA-B*35:01; PDX1; ENSG00000139515; TAA
TAYTRAQLL

SEQ ID NO: 62284 - protein, 9 aa, Homo sapiens
  misc_feature: Table A; Target 62284; HLA-B*35:03; PDX1; ENSG00000139515; TAA
TAYTRAQLL

SEQ ID NO: 62285 - protein, 9 aa, Homo sapiens
  misc_feature: Table A; Target 62285; HLA-B*37:01; PDX1; ENSG00000139515; TAA
TAYTRAQLL

SEQ ID NO: 62286 - protein, 9 aa, Homo sapiens
  misc_feature: Table A; Target 62286; HLA-B*38:01; PDX1; ENSG00000139515; TAA
TAYTRAQLL

SEQ ID NO: 62287 - protein, 9 aa, Homo sapiens
  misc_feature: Table A; Target 62287; HLA-B*39:01; PDX1; ENSG00000139515; TAA
TAYTRAQLL

SEQ ID NO: 62288 - protein, 9 aa, Homo sapiens
  misc_feature: Table A; Target 62288; HLA-B*40:01; PDX1; ENSG00000139515; TAA
TAYTRAQLL

SEQ ID NO: 62289 - protein, 9 aa, Homo sapiens
  misc_feature: Table A; Target 62289; HLA-B*40:02; PDX1; ENSG00000139515; TAA
TAYTRAQLL

SEQ ID NO: 62290 - protein, 9 aa, Homo sapiens
  misc_feature: Table A; Target 62290; HLA-B*46:01; PDX1; ENSG00000139515; TAA
TAYTRAQLL

SEQ ID NO: 62291 - protein, 9 aa, Homo sapiens
  misc_feature: Table A; Target 62291; HLA-B*51:01; PDX1; ENSG00000139515; TAA
TAYTRAQLL

SEQ ID NO: 62292 - protein, 9 aa, Homo sapiens
  misc_feature: Table A; Target 62292; HLA-B*54:01; PDX1; ENSG00000139515; TAA
TAYTRAQLL

SEQ ID NO: 62293 - protein, 9 aa, Homo sapiens
  misc_feature: Table A; Target 62293; HLA-B*58:01; PDX1; ENSG00000139515; TAA
TAYTRAQLL

SEQ ID NO: 62294 - protein, 9 aa, Homo sapiens
  misc_feature: Table A; Target 62294; HLA-C*01:02; PDX1; ENSG00000139515; TAA
TAYTRAQLL

SEQ ID NO: 62295 - protein, 9 aa, Homo sapiens
  misc_feature: Table A; Target 62295; HLA-C*02:02; PDX1; ENSG00000139515; TAA
TAYTRAQLL

SEQ ID NO: 62296 - protein, 9 aa, Homo sapiens
  misc_feature: Table A; Target 62296; HLA-C*03:03; PDX1; ENSG00000139515; TAA
TAYTRAQLL

SEQ ID NO: 62297 - protein, 9 aa, Homo sapiens
  misc_feature: Table A; Target 62297; HLA-C*03:04; PDX1; ENSG00000139515; TAA
TAYTRAQLL

SEQ ID NO: 62298 - protein, 9 aa, Homo sapiens
  misc_feature: Table A; Target 62298; HLA-C*05:01; PDX1; ENSG00000139515; TAA
TAYTRAQLL

SEQ ID NO: 62299 - protein, 9 aa, Homo sapiens
  misc_feature: Table A; Target 62299; HLA-C*06:02; PDX1; ENSG00000139515; TAA
TAYTRAQLL

SEQ ID NO: 62300 - protein, 9 aa, Homo sapiens
  misc_feature: Table A; Target 62300; HLA-C*07:01; PDX1; ENSG00000139515; TAA
TAYTRAQLL

SEQ ID NO: 62301 - protein, 9 aa, Homo sapiens
  misc_feature: Table A; Target 62301; HLA-C*07:02; PDX1; ENSG00000139515; TAA
TAYTRAQLL

SEQ ID NO: 62302 - protein, 9 aa, Homo sapiens
  misc_feature: Table A; Target 62302; HLA-C*07:04; PDX1; ENSG00000139515; TAA
TAYTRAQLL

SEQ ID NO: 62303 - protein, 9 aa, Homo sapiens
  misc_feature: Table A; Target 62303; HLA-C*12:03; PDX1; ENSG00000139515; TAA
TAYTRAQLL

SEQ ID NO: 62304 - protein, 9 aa, Homo sapiens
  misc_feature: Table A; Target 62304; HLA-C*14:02; PDX1; ENSG00000139515; TAA
TAYTRAQLL

SEQ ID NO: 62305 - protein, 9 aa, Homo sapiens
  misc_feature: Table A; Target 62305; HLA-C*16:01; PDX1; ENSG00000139515; TAA
TAYTRAQLL

SEQ ID NO: 62306 - protein, 9 aa, Homo sapiens
  misc_feature: Table A; Target 62306; HLA-C*16:02; PDX1; ENSG00000139515; TAA
TAYTRAQLL

SEQ ID NO: 62307 - protein, 9 aa, Homo sapiens
  misc_feature: Table A; Target 62307; HLA-C*16:04; PDX1; ENSG00000139515; TAA
TAYTRAQLL

SEQ ID NO: 62308 - protein, 10 aa, Homo sapiens
  misc_feature: Table A; Target 62308; HLA-C*06:02; PDX1; ENSG00000139515; TAA
TQLYKDPCAF

SEQ ID NO: 62309 - protein, 8 aa, Homo sapiens
  misc_feature: Table A; Target 62309; HLA-B*08:01; PDX1; ENSG00000139515; TAA
VAHLHHHL

SEQ ID NO: 62310 - protein, 10 aa, Homo sapiens
  misc_feature: Table A; Target 62310; HLA-A*31:01; PDX1; ENSG00000139515; TAA
VAPRRPQEPR

SEQ ID NO: 62311 - protein, 9 aa, Homo sapiens
  misc_feature: Table A; Target 62311; HLA-A*23:01; PDX1; ENSG00000139515; TAA
VELAVMLNL

SEQ ID NO: 62312 - protein, 9 aa, Homo sapiens
  misc_feature: Table A; Target 62312; HLA-A*30:01; PDX1; ENSG00000139515; TAA
VELAVMLNL

SEQ ID NO: 62313 - protein, 9 aa, Homo sapiens
  misc_feature: Table A; Target 62313; HLA-B*18:01; PDX1; ENSG00000139515; TAA
VELAVMLNL

SEQ ID NO: 62314 - protein, 9 aa, Homo sapiens
  misc_feature: Table A; Target 62314; HLA-B*40:01; PDX1; ENSG00000139515; TAA
VELAVMLNL

SEQ ID NO: 62315 - protein, 9 aa, Homo sapiens
  misc_feature: Table A; Target 62315; HLA-B*44:02; PDX1; ENSG00000139515; TAA
VELAVMLNL

SEQ ID NO: 62316 - protein, 9 aa, Homo sapiens
  misc_feature: Table A; Target 62316; HLA-B*44:03; PDX1; ENSG00000139515; TAA
VELAVMLNL

SEQ ID NO: 62317 - protein, 9 aa, Homo sapiens
  misc_feature: Table A; Target 62317; HLA-B*49:01; PDX1; ENSG00000139515; TAA
VELAVMLNL

SEQ ID NO: 62318 - protein, 8 aa, Homo sapiens
  misc_feature: Table A; Target 62318; HLA-C*05:01; PDX1; ENSG00000139515; TAA
VLEEPNRV

SEQ ID NO: 62319 - protein, 8 aa, Homo sapiens
  misc_feature: Table A; Target 62319; HLA-A*31:01; PDX1; ENSG00000139515; TAA
VMLNLTER

SEQ ID NO: 62320 - protein, 8 aa, Homo sapiens
  misc_feature: Table A; Target 62320; HLA-A*33:01; PDX1; ENSG00000139515; TAA
VMLNLTER

SEQ ID NO: 62321 - protein, 8 aa, Homo sapiens
  misc_feature: Table A; Target 62321; HLA-B*51:01; PDX1; ENSG00000139515; TAA
VPPAAPVA

SEQ ID NO: 62322 - protein, 8 aa, Homo sapiens
  misc_feature: Table A; Target 62322; HLA-B*54:01; PDX1; ENSG00000139515; TAA
VPPAAPVA

SEQ ID NO: 62323 - protein, 8 aa, Homo sapiens
  misc_feature: Table A; Target 62323; HLA-B*55:01; PDX1; ENSG00000139515; TAA
VPPAAPVA

SEQ ID NO: 62324 - protein, 8 aa, Homo sapiens
  misc_feature: Table A; Target 62324; HLA-B*56:01; PDX1; ENSG00000139515; TAA
VPPAAPVA

SEQ ID NO: 62325 - protein, 9 aa, Homo sapiens
  misc_feature: Table A; Target 62325; HLA-B*07:02; PDX1; ENSG00000139515; TAA
VPPAAPVAA

SEQ ID NO: 62326 - protein, 9 aa, Homo sapiens
  misc_feature: Table A; Target 62326; HLA-B*51:01; PDX1; ENSG00000139515; TAA
VPPAAPVAA

SEQ ID NO: 62327 - protein, 9 aa, Homo sapiens
  misc_feature: Table A; Target 62327; HLA-B*54:01; PDX1; ENSG00000139515; TAA
VPPAAPVAA

SEQ ID NO: 62328 - protein, 9 aa, Homo sapiens
  misc_feature: Table A; Target 62328; HLA-B*55:01; PDX1; ENSG00000139515; TAA
VPPAAPVAA

SEQ ID NO: 62329 - protein, 9 aa, Homo sapiens
  misc_feature: Table A; Target 62329; HLA-B*56:01; PDX1; ENSG00000139515; TAA
VPPAAPVAA

SEQ ID NO: 62330 - protein, 9 aa, Homo sapiens
  misc_feature: Table A; Target 62330; HLA-C*07:02; PDX1; ENSG00000139515; TAA
VPPAAPVAA

SEQ ID NO: 62331 - protein, 10 aa, Homo sapiens
  misc_feature: Table A; Target 62331; HLA-A*68:01; PDX1; ENSG00000139515; TAA
VPPAAPVAAR

SEQ ID NO: 62332 - protein, 10 aa, Homo sapiens
  misc_feature: Table A; Target 62332; HLA-C*07:06; PDX1; ENSG00000139515; TAA
VPPAAPVAAR

SEQ ID NO: 62333 - protein, 9 aa, Homo sapiens
  misc_feature: Table A; Target 62333; HLA-A*03:02; PDX1; ENSG00000139515; TAA
YAAEPEENK

SEQ ID NO: 62334 - protein, 9 aa, Homo sapiens
  misc_feature: Table A; Target 62334; HLA-A*11:01; PDX1; ENSG00000139515; TAA
YAAEPEENK

SEQ ID NO: 62335 - protein, 9 aa, Homo sapiens
  misc_feature: Table A; Target 62335; HLA-A*33:03; PDX1; ENSG00000139515; TAA
YAAEPEENK

SEQ ID NO: 62336 - protein, 9 aa, Homo sapiens
  misc_feature: Table A; Target 62336; HLA-A*68:01; PDX1; ENSG00000139515; TAA
YAAEPEENK

SEQ ID NO: 62337 - protein, 9 aa, Homo sapiens
  misc_feature: Table A; Target 62337; HLA-A*68:02; PDX1; ENSG00000139515; TAA
YAAEPEENK

SEQ ID NO: 62338 - protein, 9 aa, Homo sapiens
  misc_feature: Table A; Target 62338; HLA-B*27:02; PDX1; ENSG00000139515; TAA
YAAEPEENK

SEQ ID NO: 62339 - protein, 9 aa, Homo sapiens
  misc_feature: Table A; Target 62339; HLA-B*27:05; PDX1; ENSG00000139515; TAA
YAAEPEENK

SEQ ID NO: 62340 - protein, 9 aa, Homo sapiens
  misc_feature: Table A; Target 62340; HLA-B*35:01; PDX1; ENSG00000139515; TAA
YAAEPEENK

SEQ ID NO: 62341 - protein, 9 aa, Homo sapiens
  misc_feature: Table A; Target 62341; HLA-B*51:01; PDX1; ENSG00000139515; TAA
YAAEPEENK

SEQ ID NO: 62342 - protein, 9 aa, Homo sapiens
  misc_feature: Table A; Target 62342; HLA-C*01:02; PDX1; ENSG00000139515; TAA
YAAEPEENK

SEQ ID NO: 62343 - protein, 9 aa, Homo sapiens
  misc_feature: Table A; Target 62343; HLA-C*03:03; PDX1; ENSG00000139515; TAA
YAAEPEENK

SEQ ID NO: 62344 - protein, 9 aa, Homo sapiens
  misc_feature: Table A; Target 62344; HLA-C*05:01; PDX1; ENSG00000139515; TAA
YAAEPEENK

SEQ ID NO: 62345 - protein, 9 aa, Homo sapiens
  misc_feature: Table A; Target 62345; HLA-C*07:06; PDX1; ENSG00000139515; TAA
YAAEPEENK

SEQ ID NO: 62346 - protein, 10 aa, Homo sapiens
  misc_feature: Table A; Target 62346; HLA-A*68:01; PDX1; ENSG00000139515; TAA
YAAEPEENKR

SEQ ID NO: 62347 - protein, 10 aa, Homo sapiens
  misc_feature: Table A; Target 62347; HLA-C*07:06; PDX1; ENSG00000139515; TAA
YAAEPEENKR

SEQ ID NO: 62348 - protein, 10 aa, Homo sapiens
  misc_feature: Table A; Target 62348; HLA-C*16:02; PDX1; ENSG00000139515; TAA
YAAEPEENKR

SEQ ID NO: 62349 - protein, 8 aa, Homo sapiens
  misc_feature: Table A; Target 62349; HLA-B*27:02; PDX1; ENSG00000139515; TAA
YAATQLYK

SEQ ID NO: 62350 - protein, 8 aa, Homo sapiens
  misc_feature: Table A; Target 62350; HLA-B*51:01; PDX1; ENSG00000139515; TAA
YAATQLYK

SEQ ID NO: 62351 - protein, 9 aa, Homo sapiens
  misc_feature: Table A; Target 62351; HLA-A*02:03; PDX1; ENSG00000139515; TAA
YTRAQLLEL

SEQ ID NO: 62352 - protein, 9 aa, Homo sapiens
  misc_feature: Table A; Target 62352; HLA-A*02:04; PDX1; ENSG00000139515; TAA
YTRAQLLEL

SEQ ID NO: 62353 - protein, 9 aa, Homo sapiens
  misc_feature: Table A; Target 62353; HLA-B*07:02; PDX1; ENSG00000139515; TAA
YTRAQLLEL

SEQ ID NO: 62354 - protein, 9 aa, Homo sapiens
  misc_feature: Table A; Target 62354; HLA-B*40:02; PDX1; ENSG00000139515; TAA
YTRAQLLEL

SEQ ID NO: 62355 - protein, 9 aa, Homo sapiens
  misc_feature: Table A; Target 62355; HLA-B*46:01; PDX1; ENSG00000139515; TAA
YTRAQLLEL

SEQ ID NO: 62356 - protein, 9 aa, Homo sapiens
  misc_feature: Table A; Target 62356; HLA-C*07:02; PDX1; ENSG00000139515; TAA
YTRAQLLEL

SEQ ID NO: 62357 - protein, 8 aa, Homo sapiens
  misc_feature: Table A; Target 62357; HLA-A*23:01; PDX1; ENSG00000139515; TAA
YYAATQLY

SEQ ID NO: 62358 - protein, 8 aa, Homo sapiens
  misc_feature: Table A; Target 62358; HLA-A*24:02; PDX1; ENSG00000139515; TAA
YYAATQLY

SEQ ID NO: 62359 - protein, 8 aa, Homo sapiens
  misc_feature: Table A; Target 62359; HLA-A*29:02; PDX1; ENSG00000139515; TAA
YYAATQLY

SEQ ID NO: 62360 - protein, 8 aa, Homo sapiens
  misc_feature: Table A; Target 62360; HLA-C*04:01; PDX1; ENSG00000139515; TAA
YYAATQLY

SEQ ID NO: 62361 - protein, 8 aa, Homo sapiens
  misc_feature: Table A; Target 62361; HLA-C*07:01; PDX1; ENSG00000139515; TAA
YYAATQLY

SEQ ID NO: 62362 - protein, 8 aa, Homo sapiens
  misc_feature: Table A; Target 62362; HLA-C*14:02; PDX1; ENSG00000139515; TAA
YYAATQLY

SEQ ID NO: 62363 - protein, 9 aa, Homo sapiens
  misc_feature: Table A; Target 62363; HLA-A*29:02; PDX1; ENSG00000139515; TAA
YYAATQLYK

SEQ ID NO: 62364 - protein, 9 aa, Homo sapiens
  misc_feature: Table A; Target 62364; HLA-B*40:01; PF4V1; ENSG00000109272; TAA
AEAEEDGDL

SEQ ID NO: 62365 - protein, 9 aa, Homo sapiens
  misc_feature: Table A; Target 62365; HLA-B*49:01; PF4V1; ENSG00000109272; TAA
AEEDGDLQC

SEQ ID NO: 62366 - protein, 10 aa, Homo sapiens
  misc_feature: Table A; Target 62366; HLA-A*30:01; PF4V1; ENSG00000109272; TAA
AEEDGDLQCL

SEQ ID NO: 62367 - protein, 10 aa, Homo sapiens
  misc_feature: Table A; Target 62367; HLA-B*27:02; PF4V1; ENSG00000109272; TAA
AEEDGDLQCL

SEQ ID NO: 62368 - protein, 10 aa, Homo sapiens
  misc_feature: Table A; Target 62368; HLA-B*40:01; PF4V1; ENSG00000109272; TAA
AEEDGDLQCL

SEQ ID NO: 62369 - protein, 10 aa, Homo sapiens
  misc_feature: Table A; Target 62369; HLA-B*40:02; PF4V1; ENSG00000109272; TAA
AEEDGDLQCL

SEQ ID NO: 62370 - protein, 10 aa, Homo sapiens
  misc_feature: Table A; Target 62370; HLA-B*44:02; PF4V1; ENSG00000109272; TAA
AEEDGDLQCL

SEQ ID NO: 62371 - protein, 10 aa, Homo sapiens
  misc_feature: Table A; Target 62371; HLA-B*44:03; PF4V1; ENSG00000109272; TAA
AEEDGDLQCL

SEQ ID NO: 62372 - protein, 10 aa, Homo sapiens
  misc_feature: Table A; Target 62372; HLA-B*49:01; PF4V1; ENSG00000109272; TAA
AEEDGDLQCL

SEQ ID NO: 62373 - protein, 10 aa, Homo sapiens
  misc_feature: Table A; Target 62373; HLA-C*16:04; PF4V1; ENSG00000109272; TAA
AEEDGDLQCL

SEQ ID NO: 62374 - protein, 8 aa, Homo sapiens
  misc_feature: Table A; Target 62374; HLA-A*02:04; PF4V1; ENSG00000109272; TAA
ALLLLPVV

SEQ ID NO: 62375 - protein, 8 aa, Homo sapiens
  misc_feature: Table A; Target 62375; HLA-B*55:01; PF4V1; ENSG00000109272; TAA
ALLLLPVV

SEQ ID NO: 62376 - protein, 9 aa, Homo sapiens
  misc_feature: Table A; Target 62376; HLA-A*02:01; PF4V1; ENSG00000109272; TAA
ALLLLPVVV

SEQ ID NO: 62377 - protein, 9 aa, Homo sapiens
  misc_feature: Table A; Target 62377; HLA-A*02:03; PF4V1; ENSG00000109272; TAA
ALLLLPVVV

SEQ ID NO: 62378 - protein, 9 aa, Homo sapiens
  misc_feature: Table A; Target 62378; HLA-A*02:04; PF4V1; ENSG00000109272; TAA
ALLLLPVVV

SEQ ID NO: 62379 - protein, 9 aa, Homo sapiens
  misc_feature: Table A; Target 62379; HLA-A*02:07; PF4V1; ENSG00000109272; TAA
ALLLLPVVV

SEQ ID NO: 62380 - protein, 9 aa, Homo sapiens
  misc_feature: Table A; Target 62380; HLA-A*30:01; PF4V1; ENSG00000109272; TAA
ALLLLPVVV

SEQ ID NO: 62381 - protein, 9 aa, Homo sapiens
  misc_feature: Table A; Target 62381; HLA-B*13:02; PF4V1; ENSG00000109272; TAA
ALLLLPVVV

SEQ ID NO: 62382 - protein, 9 aa, Homo sapiens
  misc_feature: Table A; Target 62382; HLA-B*40:02; PF4V1; ENSG00000109272; TAA
ALLLLPVVV

SEQ ID NO: 62383 - protein, 9 aa, Homo sapiens
  misc_feature: Table A; Target 62383; HLA-B*55:01; PF4V1; ENSG00000109272; TAA
ALLLLPVVV

SEQ ID NO: 62384 - protein, 10 aa, Homo sapiens
  misc_feature: Table A; Target 62384; HLA-A*02:01; PF4V1; ENSG00000109272; TAA
ALLLLPVVVA

SEQ ID NO: 62385 - protein, 11 aa, Homo sapiens
  misc_feature: Table A; Target 62385; HLA-A*02:04; PF4V1; ENSG00000109272; TAA
ALLLLPVVVAF

SEQ ID NO: 62386 - protein, 9 aa, Homo sapiens
  misc_feature: Table A; Target 62386; HLA-A*03:01; PF4V1; ENSG00000109272; TAA
ATRQEMLFL

SEQ ID NO: 62387 - protein, 9 aa, Homo sapiens
  misc_feature: Table A; Target 62387; HLA-A*31:01; PF4V1; ENSG00000109272; TAA
ATRQEMLFL

SEQ ID NO: 62388 - protein, 9 aa, Homo sapiens
  misc_feature: Table A; Target 62388; HLA-B*57:01; PF4V1; ENSG00000109272; TAA
ATRQEMLFL

SEQ ID NO: 62389 - protein, 9 aa, Homo sapiens
  misc_feature: Table A; Target 62389; HLA-A*01:01; PF4V1; ENSG00000109272; TAA
CLDLQALLY

SEQ ID NO: 62390 - protein, 9 aa, Homo sapiens
  misc_feature: Table A; Target 62390; HLA-A*29:02; PF4V1; ENSG00000109272; TAA
CLDLQALLY

SEQ ID NO: 62391 - protein, 10 aa, Homo sapiens
  misc_feature: Table A; Target 62391; HLA-A*03:01; PF4V1; ENSG00000109272; TAA
CLDLQALLYK

SEQ ID NO: 62392 - protein, 9 aa, Homo sapiens
  misc_feature: Table A; Target 62392; HLA-B*56:01; PF4V1; ENSG00000109272; TAA
CPTAQLIAT

SEQ ID NO: 62393 - protein, 10 aa, Homo sapiens
  misc_feature: Table A; Target 62393; HLA-B*07:02; PF4V1; ENSG00000109272; TAA
CPTAQLIATL

SEQ ID NO: 62394 - protein, 10 aa, Homo sapiens
  misc_feature: Table A; Target 62394; HLA-B*56:01; PF4V1; ENSG00000109272; TAA
CPTAQLIATL

SEQ ID NO: 62395 - protein, 10 aa, Homo sapiens
  misc_feature: Table A; Target 62395; HLA-C*07:02; PF4V1; ENSG00000109272; TAA
CPTAQLIATL

SEQ ID NO: 62396 - protein, 8 aa, Homo sapiens
  misc_feature: Table A; Target 62396; HLA-C*12:03; PF4V1; ENSG00000109272; TAA
CVKTTSQV

SEQ ID NO: 62397 - protein, 9 aa, Homo sapiens
  misc_feature: Table A; Target 62397; HLA-A*31:01; PF4V1; ENSG00000109272; TAA
CVKTTSQVR

SEQ ID NO: 62398 - protein, 9 aa, Homo sapiens
  misc_feature: Table A; Target 62398; HLA-A*33:01; PF4V1; ENSG00000109272; TAA
CVKTTSQVR

SEQ ID NO: 62399 - protein, 9 aa, Homo sapiens
  misc_feature: Table A; Target 62399; HLA-A*33:03; PF4V1; ENSG00000109272; TAA
CVKTTSQVR

SEQ ID NO: 62400 - protein, 9 aa, Homo sapiens
  misc_feature: Table A; Target 62400; HLA-A*68:01; PF4V1; ENSG00000109272; TAA
CVKTTSQVR

SEQ ID NO: 62401 - protein, 9 aa, Homo sapiens
  misc_feature: Table A; Target 62401; HLA-C*07:06; PF4V1; ENSG00000109272; TAA
CVKTTSQVR

SEQ ID NO: 62402 - protein, 11 aa, Homo sapiens
  misc_feature: Table A; Target 62402; HLA-A*31:01; PF4V1; ENSG00000109272; TAA
CVKTTSQVRPR

SEQ ID NO: 62403 - protein, 9 aa, Homo sapiens
  misc_feature: Table A; Target 62403; HLA-B*51:01; PF4V1; ENSG00000109272; TAA
DGDLQCLCV

SEQ ID NO: 62404 - protein, 9 aa, Homo sapiens
  misc_feature: Table A; Target 62404; HLA-A*33:01; PF4V1; ENSG00000109272; TAA
DLQALLYKK

SEQ ID NO: 62405 - protein, 8 aa, Homo sapiens
  misc_feature: Table A; Target 62405; HLA-C*05:01; PF4V1; ENSG00000109272; TAA
EAEEDGDL

SEQ ID NO: 62406 - protein, 11 aa, Homo sapiens
  misc_feature: Table A; Target 62406; HLA-B*35:03; PF4V1; ENSG00000109272; TAA
EAEEDGDLQCL

SEQ ID NO: 62407 - protein, 9 aa, Homo sapiens
  misc_feature: Table A; Target 62407; HLA-A*30:01; PF4V1; ENSG00000109272; TAA
EEDGDLQCL

SEQ ID NO: 62408 - protein, 9 aa, Homo sapiens
  misc_feature: Table A; Target 62408; HLA-B*38:01; PF4V1; ENSG00000109272; TAA
EEDGDLQCL

SEQ ID NO: 62409 - protein, 9 aa, Homo sapiens
  misc_feature: Table A; Target 62409; HLA-B*39:01; PF4V1; ENSG00000109272; TAA
EEDGDLQCL

SEQ ID NO: 62410 - protein, 9 aa, Homo sapiens
  misc_feature: Table A; Target 62410; HLA-B*40:01; PF4V1; ENSG00000109272; TAA
EEDGDLQCL

SEQ ID NO: 62411 - protein, 9 aa, Homo sapiens
  misc_feature: Table A; Target 62411; HLA-B*40:02; PF4V1; ENSG00000109272; TAA
EEDGDLQCL

SEQ ID NO: 62412 - protein, 9 aa, Homo sapiens
  misc_feature: Table A; Target 62412; HLA-B*44:02; PF4V1; ENSG00000109272; TAA
EEDGDLQCL

SEQ ID NO: 62413 - protein, 9 aa, Homo sapiens
  misc_feature: Table A; Target 62413; HLA-B*44:03; PF4V1; ENSG00000109272; TAA
EEDGDLQCL

SEQ ID NO: 62414 - protein, 9 aa, Homo sapiens
  misc_feature: Table A; Target 62414; HLA-B*49:01; PF4V1; ENSG00000109272; TAA
EEDGDLQCL

SEQ ID NO: 62415 - protein, 8 aa, Homo sapiens
  misc_feature: Table A; Target 62415; HLA-C*04:01; PF4V1; ENSG00000109272; TAA
EVIKAGPH

SEQ ID NO: 62416 - protein, 9 aa, Homo sapiens
  misc_feature: Table A; Target 62416; HLA-A*26:01; PF4V1; ENSG00000109272; TAA
EVIKAGPHC

SEQ ID NO: 62417 - protein, 10 aa, Homo sapiens
  misc_feature: Table A; Target 62417; HLA-A*02:03; PF4V1; ENSG00000109272; TAA
FLALLLLPVV

SEQ ID NO: 62418 - protein, 10 aa, Homo sapiens
  misc_feature: Table A; Target 62418; HLA-A*02:04; PF4V1; ENSG00000109272; TAA
FLALLLLPVV

SEQ ID NO: 62419 - protein, 9 aa, Homo sapiens
  misc_feature: Table A; Target 62419; HLA-B*07:02; PF4V1; ENSG00000109272; TAA
GPHCPTAQL

SEQ ID NO: 62420 - protein, 9 aa, Homo sapiens
  misc_feature: Table A; Target 62420; HLA-C*07:02; PF4V1; ENSG00000109272; TAA
GPHCPTAQL

SEQ ID NO: 62421 - protein, 8 aa, Homo sapiens
  misc_feature: Table A; Target 62421; HLA-B*51:01; PF4V1; ENSG00000109272; TAA
HCPTAQLI

SEQ ID NO: 62422 - protein, 9 aa, Homo sapiens
  misc_feature: Table A; Target 62422; HLA-A*03:02; PF4V1; ENSG00000109272; TAA
HITSLEVIK

SEQ ID NO: 62423 - protein, 9 aa, Homo sapiens
  misc_feature: Table A; Target 62423; HLA-A*11:01; PF4V1; ENSG00000109272; TAA
HITSLEVIK

SEQ ID NO: 62424 - protein, 9 aa, Homo sapiens
  misc_feature: Table A; Target 62424; HLA-A*68:01; PF4V1; ENSG00000109272; TAA
HITSLEVIK

SEQ ID NO: 62425 - protein, 9 aa, Homo sapiens
  misc_feature: Table A; Target 62425; HLA-B*27:02; PF4V1; ENSG00000109272; TAA
HITSLEVIK

SEQ ID NO: 62426 - protein, 9 aa, Homo sapiens
  misc_feature: Table A; Target 62426; HLA-A*23:01; PF4V1; ENSG00000109272; TAA
ICLDLQALL

SEQ ID NO: 62427 - protein, 10 aa, Homo sapiens
  misc_feature: Table A; Target 62427; HLA-A*03:01; PF4V1; ENSG00000109272; TAA
ICLDLQALLY

SEQ ID NO: 62428 - protein, 10 aa, Homo sapiens
  misc_feature: Table A; Target 62428; HLA-A*29:02; PF4V1; ENSG00000109272; TAA
ICLDLQALLY

SEQ ID NO: 62429 - protein, 10 aa, Homo sapiens
  misc_feature: Table A; Target 62429; HLA-C*07:01; PF4V1; ENSG00000109272; TAA
ICLDLQALLY

SEQ ID NO: 62430 - protein, 9 aa, Homo sapiens
  misc_feature: Table A; Target 62430; HLA-A*03:01; PF4V1; ENSG00000109272; TAA
KTTSQVRPR

SEQ ID NO: 62431 - protein, 9 aa, Homo sapiens
  misc_feature: Table A; Target 62431; HLA-A*11:01; PF4V1; ENSG00000109272; TAA
KTTSQVRPR

SEQ ID NO: 62432 - protein, 9 aa, Homo sapiens
  misc_feature: Table A; Target 62432; HLA-A*31:01; PF4V1; ENSG00000109272; TAA
KTTSQVRPR

SEQ ID NO: 62433 - protein, 9 aa, Homo sapiens
  misc_feature: Table A; Target 62433; HLA-A*33:03; PF4V1; ENSG00000109272; TAA
KTTSQVRPR

SEQ ID NO: 62434 - protein, 9 aa, Homo sapiens
  misc_feature: Table A; Target 62434; HLA-C*06:02; PF4V1; ENSG00000109272; TAA
KTTSQVRPR

SEQ ID NO: 62435 - protein, 9 aa, Homo sapiens
  misc_feature: Table A; Target 62435; HLA-C*07:06; PF4V1; ENSG00000109272; TAA
KTTSQVRPR

SEQ ID NO: 62436 - protein, 9 aa, Homo sapiens
  misc_feature: Table A; Target 62436; HLA-C*16:01; PF4V1; ENSG00000109272; TAA
KTTSQVRPR

SEQ ID NO: 62437 - protein, 9 aa, Homo sapiens
  misc_feature: Table A; Target 62437; HLA-C*16:02; PF4V1; ENSG00000109272; TAA
KTTSQVRPR

SEQ ID NO: 62438 - protein, 9 aa, Homo sapiens
  misc_feature: Table A; Target 62438; HLA-B*51:01; PF4V1; ENSG00000109272; TAA
LALLLLPVV

SEQ ID NO: 62439 - protein, 9 aa, Homo sapiens
  misc_feature: Table A; Target 62439; HLA-B*54:01; PF4V1; ENSG00000109272; TAA
LALLLLPVV

SEQ ID NO: 62440 - protein, 8 aa, Homo sapiens
  misc_feature: Table A; Target 62440; HLA-B*18:01; PF4V1; ENSG00000109272; TAA
LDLQALLY

SEQ ID NO: 62441 - protein, 8 aa, Homo sapiens
  misc_feature: Table A; Target 62441; HLA-C*07:01; PF4V1; ENSG00000109272; TAA
LDLQALLY

SEQ ID NO: 62442 - protein, 9 aa, Homo sapiens
  misc_feature: Table A; Target 62442; HLA-A*02:01; PF4V1; ENSG00000109272; TAA
LLLLPVVVA

SEQ ID NO: 62443 - protein, 9 aa, Homo sapiens
  misc_feature: Table A; Target 62443; HLA-A*02:04; PF4V1; ENSG00000109272; TAA
LLLLPVVVA

SEQ ID NO: 62444 - protein, 9 aa, Homo sapiens
  misc_feature: Table A; Target 62444; HLA-B*54:01; PF4V1; ENSG00000109272; TAA
LLLLPVVVA

SEQ ID NO: 62445 - protein, 10 aa, Homo sapiens
  misc_feature: Table A; Target 62445; HLA-A*23:01; PF4V1; ENSG00000109272; TAA
LLLLPVVVAF

SEQ ID NO: 62446 - protein, 10 aa, Homo sapiens
  misc_feature: Table A; Target 62446; HLA-A*24:02; PF4V1; ENSG00000109272; TAA
LLLLPVVVAF

SEQ ID NO: 62447 - protein, 11 aa, Homo sapiens
  misc_feature: Table A; Target 62447; HLA-A*02:01; PF4V1; ENSG00000109272; TAA
LLLLPVVVAFA

SEQ ID NO: 62448 - protein, 8 aa, Homo sapiens
  misc_feature: Table A; Target 62448; HLA-A*02:01; PF4V1; ENSG00000109272; TAA
LLLPVVVA

SEQ ID NO: 62449 - protein, 8 aa, Homo sapiens
  misc_feature: Table A; Target 62449; HLA-A*02:04; PF4V1; ENSG00000109272; TAA
LLLPVVVA

SEQ ID NO: 62450 - protein, 9 aa, Homo sapiens
  misc_feature: Table A; Target 62450; HLA-A*02:01; PF4V1; ENSG00000109272; TAA
LLLPVVVAF

SEQ ID NO: 62451 - protein, 9 aa, Homo sapiens
  misc_feature: Table A; Target 62451; HLA-A*02:03; PF4V1; ENSG00000109272; TAA
LLLPVVVAF

SEQ ID NO: 62452 - protein, 9 aa, Homo sapiens
  misc_feature: Table A; Target 62452; HLA-A*02:04; PF4V1; ENSG00000109272; TAA
LLLPVVVAF

SEQ ID NO: 62453 - protein, 9 aa, Homo sapiens
  misc_feature: Table A; Target 62453; HLA-A*02:07; PF4V1; ENSG00000109272; TAA
LLLPVVVAF

SEQ ID NO: 62454 - protein, 9 aa, Homo sapiens
  misc_feature: Table A; Target 62454; HLA-A*03:01; PF4V1; ENSG00000109272; TAA
LLLPVVVAF

SEQ ID NO: 62455 - protein, 9 aa, Homo sapiens
  misc_feature: Table A; Target 62455; HLA-A*03:02; PF4V1; ENSG00000109272; TAA
LLLPVVVAF

SEQ ID NO: 62456 - protein, 9 aa, Homo sapiens
  misc_feature: Table A; Target 62456; HLA-A*23:01; PF4V1; ENSG00000109272; TAA
LLLPVVVAF

SEQ ID NO: 62457 - protein, 9 aa, Homo sapiens
  misc_feature: Table A; Target 62457; HLA-A*24:02; PF4V1; ENSG00000109272; TAA
LLLPVVVAF

SEQ ID NO: 62458 - protein, 9 aa, Homo sapiens
  misc_feature: Table A; Target 62458; HLA-A*25:01; PF4V1; ENSG00000109272; TAA
LLLPVVVAF

SEQ ID NO: 62459 - protein, 9 aa, Homo sapiens
  misc_feature: Table A; Target 62459; HLA-A*26:01; PF4V1; ENSG00000109272; TAA
LLLPVVVAF

SEQ ID NO: 62460 - protein, 9 aa, Homo sapiens
  misc_feature: Table A; Target 62460; HLA-A*29:02; PF4V1; ENSG00000109272; TAA
LLLPVVVAF

SEQ ID NO: 62461 - protein, 9 aa, Homo sapiens
  misc_feature: Table A; Target 62461; HLA-A*30:01; PF4V1; ENSG00000109272; TAA
LLLPVVVAF

SEQ ID NO: 62462 - protein, 9 aa, Homo sapiens
  misc_feature: Table A; Target 62462; HLA-A*30:02; PF4V1; ENSG00000109272; TAA
LLLPVVVAF

SEQ ID NO: 62463 - protein, 9 aa, Homo sapiens
  misc_feature: Table A; Target 62463; HLA-A*31:01; PF4V1; ENSG00000109272; TAA
LLLPVVVAF

SEQ ID NO: 62464 - protein, 9 aa, Homo sapiens
  misc_feature: Table A; Target 62464; HLA-A*32:01; PF4V1; ENSG00000109272; TAA
LLLPVVVAF

SEQ ID NO: 62465 - protein, 9 aa, Homo sapiens
  misc_feature: Table A; Target 62465; HLA-A*33:01; PF4V1; ENSG00000109272; TAA
LLLPVVVAF

SEQ ID NO: 62466 - protein, 9 aa, Homo sapiens
  misc_feature: Table A; Target 62466; HLA-A*33:03; PF4V1; ENSG00000109272; TAA
LLLPVVVAF

SEQ ID NO: 62467 - protein, 9 aa, Homo sapiens
  misc_feature: Table A; Target 62467; HLA-A*68:02; PF4V1; ENSG00000109272; TAA
LLLPVVVAF

SEQ ID NO: 62468 - protein, 9 aa, Homo sapiens
  misc_feature: Table A; Target 62468; HLA-B*08:01; PF4V1; ENSG00000109272; TAA
LLLPVVVAF

SEQ ID NO: 62469 - protein, 9 aa, Homo sapiens
  misc_feature: Table A; Target 62469; HLA-B*15:01; PF4V1; ENSG00000109272; TAA
LLLPVVVAF

SEQ ID NO: 62470 - protein, 9 aa, Homo sapiens
  misc_feature: Table A; Target 62470; HLA-B*15:03; PF4V1; ENSG00000109272; TAA
LLLPVVVAF

SEQ ID NO: 62471 - protein, 9 aa, Homo sapiens
  misc_feature: Table A; Target 62471; HLA-B*18:01; PF4V1; ENSG00000109272; TAA
LLLPVVVAF

SEQ ID NO: 62472 - protein, 9 aa, Homo sapiens
  misc_feature: Table A; Target 62472; HLA-B*27:02; PF4V1; ENSG00000109272; TAA
LLLPVVVAF

SEQ ID NO: 62473 - protein, 9 aa, Homo sapiens
  misc_feature: Table A; Target 62473; HLA-B*27:05; PF4V1; ENSG00000109272; TAA
LLLPVVVAF

SEQ ID NO: 62474 - protein, 9 aa, Homo sapiens
  misc_feature: Table A; Target 62474; HLA-B*35:01; PF4V1; ENSG00000109272; TAA
LLLPVVVAF

SEQ ID NO: 62475 - protein, 9 aa, Homo sapiens
  misc_feature: Table A; Target 62475; HLA-B*35:03; PF4V1; ENSG00000109272; TAA
LLLPVVVAF

SEQ ID NO: 62476 - protein, 9 aa, Homo sapiens
  misc_feature: Table A; Target 62476; HLA-B*37:01; PF4V1; ENSG00000109272; TAA
LLLPVVVAF

SEQ ID NO: 62477 - protein, 9 aa, Homo sapiens
  misc_feature: Table A; Target 62477; HLA-B*38:01; PF4V1; ENSG00000109272; TAA
LLLPVVVAF

SEQ ID NO: 62478 - protein, 9 aa, Homo sapiens
  misc_feature: Table A; Target 62478; HLA-B*40:02; PF4V1; ENSG00000109272; TAA
LLLPVVVAF

SEQ ID NO: 62479 - protein, 9 aa, Homo sapiens
  misc_feature: Table A; Target 62479; HLA-B*44:02; PF4V1; ENSG00000109272; TAA
LLLPVVVAF

SEQ ID NO: 62480 - protein, 9 aa, Homo sapiens
  misc_feature: Table A; Target 62480; HLA-B*44:03; PF4V1; ENSG00000109272; TAA
LLLPVVVAF

SEQ ID NO: 62481 - protein, 9 aa, Homo sapiens
  misc_feature: Table A; Target 62481; HLA-B*46:01; PF4V1; ENSG00000109272; TAA
LLLPVVVAF

SEQ ID NO: 62482 - protein, 9 aa, Homo sapiens
  misc_feature: Table A; Target 62482; HLA-B*51:01; PF4V1; ENSG00000109272; TAA
LLLPVVVAF

SEQ ID NO: 62483 - protein, 9 aa, Homo sapiens
  misc_feature: Table A; Target 62483; HLA-B*54:01; PF4V1; ENSG00000109272; TAA
LLLPVVVAF

SEQ ID NO: 62484 - protein, 9 aa, Homo sapiens
  misc_feature: Table A; Target 62484; HLA-B*55:01; PF4V1; ENSG00000109272; TAA
LLLPVVVAF

SEQ ID NO: 62485 - protein, 9 aa, Homo sapiens
  misc_feature: Table A; Target 62485; HLA-B*57:01; PF4V1; ENSG00000109272; TAA
LLLPVVVAF

SEQ ID NO: 62486 - protein, 9 aa, Homo sapiens
  misc_feature: Table A; Target 62486; HLA-B*58:01; PF4V1; ENSG00000109272; TAA
LLLPVVVAF

SEQ ID NO: 62487 - protein, 9 aa, Homo sapiens
  misc_feature: Table A; Target 62487; HLA-C*01:02; PF4V1; ENSG00000109272; TAA
LLLPVVVAF

SEQ ID NO: 62488 - protein, 9 aa, Homo sapiens
  misc_feature: Table A; Target 62488; HLA-C*02:02; PF4V1; ENSG00000109272; TAA
LLLPVVVAF

SEQ ID NO: 62489 - protein, 9 aa, Homo sapiens
  misc_feature: Table A; Target 62489; HLA-C*03:03; PF4V1; ENSG00000109272; TAA
LLLPVVVAF

SEQ ID NO: 62490 - protein, 9 aa, Homo sapiens
  misc_feature: Table A; Target 62490; HLA-C*03:04; PF4V1; ENSG00000109272; TAA
LLLPVVVAF

SEQ ID NO: 62491 - protein, 9 aa, Homo sapiens
  misc_feature: Table A; Target 62491; HLA-C*04:01; PF4V1; ENSG00000109272; TAA
LLLPVVVAF

SEQ ID NO: 62492 - protein, 9 aa, Homo sapiens
  misc_feature: Table A; Target 62492; HLA-C*06:02; PF4V1; ENSG00000109272; TAA
LLLPVVVAF

SEQ ID NO: 62493 - protein, 9 aa, Homo sapiens
  misc_feature: Table A; Target 62493; HLA-C*07:01; PF4V1; ENSG00000109272; TAA
LLLPVVVAF

SEQ ID NO: 62494 - protein, 9 aa, Homo sapiens
  misc_feature: Table A; Target 62494; HLA-C*07:04; PF4V1; ENSG00000109272; TAA
LLLPVVVAF

SEQ ID NO: 62495 - protein, 9 aa, Homo sapiens
  misc_feature: Table A; Target 62495; HLA-C*12:03; PF4V1; ENSG00000109272; TAA
LLLPVVVAF

SEQ ID NO: 62496 - protein, 9 aa, Homo sapiens
  misc_feature: Table A; Target 62496; HLA-C*14:02; PF4V1; ENSG00000109272; TAA
LLLPVVVAF

SEQ ID NO: 62497 - protein, 9 aa, Homo sapiens
  misc_feature: Table A; Target 62497; HLA-C*16:01; PF4V1; ENSG00000109272; TAA
LLLPVVVAF

SEQ ID NO: 62498 - protein, 9 aa, Homo sapiens
  misc_feature: Table A; Target 62498; HLA-C*16:04; PF4V1; ENSG00000109272; TAA
LLLPVVVAF

SEQ ID NO: 62499 - protein, 10 aa, Homo sapiens
  misc_feature: Table A; Target 62499; HLA-A*02:01; PF4V1; ENSG00000109272; TAA
LLLPVVVAFA

SEQ ID NO: 62500 - protein, 10 aa, Homo sapiens
  misc_feature: Table A; Target 62500; HLA-A*02:03; PF4V1; ENSG00000109272; TAA
LLLPVVVAFA

SEQ ID NO: 62501 - protein, 10 aa, Homo sapiens
  misc_feature: Table A; Target 62501; HLA-A*02:04; PF4V1; ENSG00000109272; TAA
LLLPVVVAFA

SEQ ID NO: 62502 - protein, 10 aa, Homo sapiens
  misc_feature: Table A; Target 62502; HLA-A*02:07; PF4V1; ENSG00000109272; TAA
LLLPVVVAFA

SEQ ID NO: 62503 - protein, 11 aa, Homo sapiens
  misc_feature: Table A; Target 62503; HLA-A*31:01; PF4V1; ENSG00000109272; TAA
LLLPVVVAFAR

SEQ ID NO: 62504 - protein, 11 aa, Homo sapiens
  misc_feature: Table A; Target 62504; HLA-B*27:02; PF4V1; ENSG00000109272; TAA
LLLPVVVAFAR

SEQ ID NO: 62505 - protein, 8 aa, Homo sapiens
  misc_feature: Table A; Target 62505; HLA-A*02:07; PF4V1; ENSG00000109272; TAA
LLPVVVAF

SEQ ID NO: 62506 - protein, 8 aa, Homo sapiens
  misc_feature: Table A; Target 62506; HLA-A*23:01; PF4V1; ENSG00000109272; TAA
LLPVVVAF

SEQ ID NO: 62507 - protein, 8 aa, Homo sapiens
  misc_feature: Table A; Target 62507; HLA-A*24:02; PF4V1; ENSG00000109272; TAA
LLPVVVAF

SEQ ID NO: 62508 - protein, 8 aa, Homo sapiens
  misc_feature: Table A; Target 62508; HLA-B*08:01; PF4V1; ENSG00000109272; TAA
LLPVVVAF

SEQ ID NO: 62509 - protein, 8 aa, Homo sapiens
  misc_feature: Table A; Target 62509; HLA-B*37:01; PF4V1; ENSG00000109272; TAA
LLPVVVAF

SEQ ID NO: 62510 - protein, 8 aa, Homo sapiens
  misc_feature: Table A; Target 62510; HLA-B*46:01; PF4V1; ENSG00000109272; TAA
LLPVVVAF

SEQ ID NO: 62511 - protein, 8 aa, Homo sapiens
  misc_feature: Table A; Target 62511; HLA-C*07:04; PF4V1; ENSG00000109272; TAA
LLPVVVAF

SEQ ID NO: 62512 - protein, 9 aa, Homo sapiens
  misc_feature: Table A; Target 62512; HLA-A*02:01; PF4V1; ENSG00000109272; TAA
LLPVVVAFA

SEQ ID NO: 62513 - protein, 9 aa, Homo sapiens
  misc_feature: Table A; Target 62513; HLA-A*02:03; PF4V1; ENSG00000109272; TAA
LLPVVVAFA

SEQ ID NO: 62514 - protein, 9 aa, Homo sapiens
  misc_feature: Table A; Target 62514; HLA-A*02:04; PF4V1; ENSG00000109272; TAA
LLPVVVAFA

SEQ ID NO: 62515 - protein, 9 aa, Homo sapiens
  misc_feature: Table A; Target 62515; HLA-A*02:07; PF4V1; ENSG00000109272; TAA
LLPVVVAFA

SEQ ID NO: 62516 - protein, 9 aa, Homo sapiens
  misc_feature: Table A; Target 62516; HLA-A*68:02; PF4V1; ENSG00000109272; TAA
LLPVVVAFA

SEQ ID NO: 62517 - protein, 11 aa, Homo sapiens
  misc_feature: Table A; Target 62517; HLA-A*02:07; PF4V1; ENSG00000109272; TAA
LLPVVVAFARA

SEQ ID NO: 62518 - protein, 8 aa, Homo sapiens
  misc_feature: Table A; Target 62518; HLA-B*51:01; PF4V1; ENSG00000109272; TAA
LPVVVAFA

SEQ ID NO: 62519 - protein, 8 aa, Homo sapiens
  misc_feature: Table A; Target 62519; HLA-B*54:01; PF4V1; ENSG00000109272; TAA
LPVVVAFA

SEQ ID NO: 62520 - protein, 8 aa, Homo sapiens
  misc_feature: Table A; Target 62520; HLA-B*55:01; PF4V1; ENSG00000109272; TAA
LPVVVAFA

SEQ ID NO: 62521 - protein, 8 aa, Homo sapiens
  misc_feature: Table A; Target 62521; HLA-B*56:01; PF4V1; ENSG00000109272; TAA
LPVVVAFA

SEQ ID NO: 62522 - protein, 9 aa, Homo sapiens
  misc_feature: Table A; Target 62522; HLA-B*35:01; PF4V1; ENSG00000109272; TAA
LPVVVAFAR

SEQ ID NO: 62523 - protein, 10 aa, Homo sapiens
  misc_feature: Table A; Target 62523; HLA-B*54:01; PF4V1; ENSG00000109272; TAA
LPVVVAFARA

SEQ ID NO: 62524 - protein, 10 aa, Homo sapiens
  misc_feature: Table A; Target 62524; HLA-B*56:01; PF4V1; ENSG00000109272; TAA
LPVVVAFARA

SEQ ID NO: 62525 - protein, 11 aa, Homo sapiens
  misc_feature: Table A; Target 62525; HLA-B*57:01; PF4V1; ENSG00000109272; TAA
LTRATRQEMLF

SEQ ID NO: 62526 - protein, 9 aa, Homo sapiens
  misc_feature: Table A; Target 62526; HLA-A*02:04; PF4V1; ENSG00000109272; TAA
MLFLALLLL

SEQ ID NO: 62527 - protein, 9 aa, Homo sapiens
  misc_feature: Table A; Target 62527; HLA-C*16:01; PF4V1; ENSG00000109272; TAA
MSSAARSRL

SEQ ID NO: 62528 - protein, 9 aa, Homo sapiens
  misc_feature: Table A; Target 62528; HLA-A*25:01; PF4V1; ENSG00000109272; TAA
PTAQLIATL

SEQ ID NO: 62529 - protein, 9 aa, Homo sapiens
  misc_feature: Table A; Target 62529; HLA-A*26:01; PF4V1; ENSG00000109272; TAA
PTAQLIATL

SEQ ID NO: 62530 - protein, 9 aa, Homo sapiens
  misc_feature: Table A; Target 62530; HLA-A*68:02; PF4V1; ENSG00000109272; TAA
PTAQLIATL

SEQ ID NO: 62531 - protein, 9 aa, Homo sapiens
  misc_feature: Table A; Target 62531; HLA-C*06:02; PF4V1; ENSG00000109272; TAA
PTAQLIATL

SEQ ID NO: 62532 - protein, 9 aa, Homo sapiens
  misc_feature: Table A; Target 62532; HLA-C*07:02; PF4V1; ENSG00000109272; TAA
PTAQLIATL

SEQ ID NO: 62533 - protein, 10 aa, Homo sapiens
  misc_feature: Table A; Target 62533; HLA-A*03:02; PF4V1; ENSG00000109272; TAA
PTAQLIATLK

SEQ ID NO: 62534 - protein, 10 aa, Homo sapiens
  misc_feature: Table A; Target 62534; HLA-A*11:01; PF4V1; ENSG00000109272; TAA
PTAQLIATLK

SEQ ID NO: 62535 - protein, 10 aa, Homo sapiens
  misc_feature: Table A; Target 62535; HLA-A*68:01; PF4V1; ENSG00000109272; TAA
PTAQLIATLK

SEQ ID NO: 62536 - protein, 10 aa, Homo sapiens
  misc_feature: Table A; Target 62536; HLA-B*27:02; PF4V1; ENSG00000109272; TAA
PTAQLIATLK

SEQ ID NO: 62537 - protein, 8 aa, Homo sapiens
  misc_feature: Table A; Target 62537; HLA-B*27:02; PF4V1; ENSG00000109272; TAA
PVVVAFAR

SEQ ID NO: 62538 - protein, 8 aa, Homo sapiens
  misc_feature: Table A; Target 62538; HLA-B*51:01; PF4V1; ENSG00000109272; TAA
QALLYKKI

SEQ ID NO: 62539 - protein, 8 aa, Homo sapiens
  misc_feature: Table A; Target 62539; HLA-A*30:01; PF4V1; ENSG00000109272; TAA
QEMLFLAL

SEQ ID NO: 62540 - protein, 8 aa, Homo sapiens
  misc_feature: Table A; Target 62540; HLA-B*18:01; PF4V1; ENSG00000109272; TAA
QEMLFLAL

SEQ ID NO: 62541 - protein, 8 aa, Homo sapiens
  misc_feature: Table A; Target 62541; HLA-B*37:01; PF4V1; ENSG00000109272; TAA
QEMLFLAL

SEQ ID NO: 62542 - protein, 8 aa, Homo sapiens
  misc_feature: Table A; Target 62542; HLA-B*44:02; PF4V1; ENSG00000109272; TAA
QEMLFLAL

SEQ ID NO: 62543 - protein, 8 aa, Homo sapiens
  misc_feature: Table A; Target 62543; HLA-B*49:01; PF4V1; ENSG00000109272; TAA
QEMLFLAL

SEQ ID NO: 62544 - protein, 9 aa, Homo sapiens
  misc_feature: Table A; Target 62544; HLA-B*44:02; PF4V1; ENSG00000109272; TAA
QEMLFLALL

SEQ ID NO: 62545 - protein, 9 aa, Homo sapiens
  misc_feature: Table A; Target 62545; HLA-B*44:03; PF4V1; ENSG00000109272; TAA
QEMLFLALL

SEQ ID NO: 62546 - protein, 9 aa, Homo sapiens
  misc_feature: Table A; Target 62546; HLA-B*49:01; PF4V1; ENSG00000109272; TAA
QEMLFLALL

SEQ ID NO: 62547 - protein, 10 aa, Homo sapiens
  misc_feature: Table A; Target 62547; HLA-B*44:02; PF4V1; ENSG00000109272; TAA
QEMLFLALLL

SEQ ID NO: 62548 - protein, 9 aa, Homo sapiens
  misc_feature: Table A; Target 62548; HLA-B*57:01; PF4V1; ENSG00000109272; TAA
RATRQEMLF

SEQ ID NO: 62549 - protein, 9 aa, Homo sapiens
  misc_feature: Table A; Target 62549; HLA-B*38:01; PF4V1; ENSG00000109272; TAA
RHITSLEVI

SEQ ID NO: 62550 - protein, 8 aa, Homo sapiens
  misc_feature: Table A; Target 62550; HLA-B*07:02; PF4V1; ENSG00000109272; TAA
RPRHITSL

SEQ ID NO: 62551 - protein, 8 aa, Homo sapiens
  misc_feature: Table A; Target 62551; HLA-B*08:01; PF4V1; ENSG00000109272; TAA
RPRHITSL

SEQ ID NO: 62552 - protein, 8 aa, Homo sapiens
  misc_feature: Table A; Target 62552; HLA-C*07:02; PF4V1; ENSG00000109272; TAA
RPRHITSL

SEQ ID NO: 62553 - protein, 10 aa, Homo sapiens
  misc_feature: Table A; Target 62553; HLA-B*07:02; PF4V1; ENSG00000109272; TAA
RPRHITSLEV

SEQ ID NO: 62554 - protein, 10 aa, Homo sapiens
  misc_feature: Table A; Target 62554; HLA-C*07:02; PF4V1; ENSG00000109272; TAA
RPRHITSLEV

SEQ ID NO: 62555 - protein, 8 aa, Homo sapiens
  misc_feature: Table A; Target 62555; HLA-C*16:01; PF4V1; ENSG00000109272; TAA
SSAARSRL

SEQ ID NO: 62556 - protein, 9 aa, Homo sapiens
  misc_feature: Table A; Target 62556; HLA-C*16:01; PF4V1; ENSG00000109272; TAA
SSAARSRLT

SEQ ID NO: 62557 - protein, 8 aa, Homo sapiens
  misc_feature: Table A; Target 62557; HLA-B*08:01; PF4V1; ENSG00000109272; TAA
TAQLIATL

SEQ ID NO: 62558 - protein, 8 aa, Homo sapiens
  misc_feature: Table A; Target 62558; HLA-B*35:03; PF4V1; ENSG00000109272; TAA
TAQLIATL

SEQ ID NO: 62559 - protein, 8 aa, Homo sapiens
  misc_feature: Table A; Target 62559; HLA-B*51:01; PF4V1; ENSG00000109272; TAA
TAQLIATL

SEQ ID NO: 62560 - protein, 8 aa, Homo sapiens
  misc_feature: Table A; Target 62560; HLA-C*01:02; PF4V1; ENSG00000109272; TAA
TAQLIATL

SEQ ID NO: 62561 - protein, 8 aa, Homo sapiens
  misc_feature: Table A; Target 62561; HLA-C*03:04; PF4V1; ENSG00000109272; TAA
TAQLIATL

SEQ ID NO: 62562 - protein, 9 aa, Homo sapiens
  misc_feature: Table A; Target 62562; HLA-A*03:02; PF4V1; ENSG00000109272; TAA
TAQLIATLK

SEQ ID NO: 62563 - protein, 9 aa, Homo sapiens
  misc_feature: Table A; Target 62563; HLA-A*11:01; PF4V1; ENSG00000109272; TAA
TAQLIATLK

SEQ ID NO: 62564 - protein, 9 aa, Homo sapiens
  misc_feature: Table A; Target 62564; HLA-A*33:01; PF4V1; ENSG00000109272; TAA
TAQLIATLK

SEQ ID NO: 62565 - protein, 9 aa, Homo sapiens
  misc_feature: Table A; Target 62565; HLA-A*33:03; PF4V1; ENSG00000109272; TAA
TAQLIATLK

SEQ ID NO: 62566 - protein, 9 aa, Homo sapiens
  misc_feature: Table A; Target 62566; HLA-A*68:01; PF4V1; ENSG00000109272; TAA
TAQLIATLK

SEQ ID NO: 62567 - protein, 9 aa, Homo sapiens
  misc_feature: Table A; Target 62567; HLA-B*27:02; PF4V1; ENSG00000109272; TAA
TAQLIATLK

SEQ ID NO: 62568 - protein, 9 aa, Homo sapiens
  misc_feature: Table A; Target 62568; HLA-C*07:06; PF4V1; ENSG00000109272; TAA
TAQLIATLK

SEQ ID NO: 62569 - protein, 8 aa, Homo sapiens
  misc_feature: Table A; Target 62569; HLA-C*16:01; PF4V1; ENSG00000109272; TAA
TRATRQEM

SEQ ID NO: 62570 - protein, 9 aa, Homo sapiens
  misc_feature: Table A; Target 62570; HLA-C*16:01; PF4V1; ENSG00000109272; TAA
TRATRQEML

SEQ ID NO: 62571 - protein, 8 aa, Homo sapiens
  misc_feature: Table A; Target 62571; HLA-B*54:01; PF4V1; ENSG00000109272; TAA
TSLEVIKA

SEQ ID NO: 62572 - protein, 8 aa, Homo sapiens
  misc_feature: Table A; Target 62572; HLA-A*33:03; PF4V1; ENSG00000109272; TAA
TTSQVRPR

SEQ ID NO: 62573 - protein, 8 aa, Homo sapiens
  misc_feature: Table A; Target 62573; HLA-A*68:01; PF4V1; ENSG00000109272; TAA
TTSQVRPR

SEQ ID NO: 62574 - protein, 8 aa, Homo sapiens
  misc_feature: Table A; Target 62574; HLA-B*54:01; PF4V1; ENSG00000109272; TAA
VAFARAEA

SEQ ID NO: 62575 - protein, 8 aa, Homo sapiens
  misc_feature: Table A; Target 62575; HLA-B*56:01; PF4V1; ENSG00000109272; TAA
VAFARAEA

SEQ ID NO: 62576 - protein, 9 aa, Homo sapiens
  misc_feature: Table A; Target 62576; HLA-C*06:02; PF4V1; ENSG00000109272; TAA
VRPRHITSL

SEQ ID NO: 62577 - protein, 9 aa, Homo sapiens
  misc_feature: Table A; Target 62577; HLA-C*07:02; PF4V1; ENSG00000109272; TAA
VRPRHITSL

SEQ ID NO: 62578 - protein, 8 aa, Homo sapiens
  misc_feature: Table A; Target 62578; HLA-C*16:01; PKHD1; ENSG00000170927; TAA
AAASHGVL

SEQ ID NO: 62579 - protein, 9 aa, Homo sapiens
  misc_feature: Table A; Target 62579; HLA-C*02:02; PKHD1; ENSG00000170927; TAA
AAASHGVLL

SEQ ID NO: 62580 - protein, 9 aa, Homo sapiens
  misc_feature: Table A; Target 62580; HLA-C*03:03; PKHD1; ENSG00000170927; TAA
AAASHGVLL

SEQ ID NO: 62581 - protein, 9 aa, Homo sapiens
  misc_feature: Table A; Target 62581; HLA-C*03:04; PKHD1; ENSG00000170927; TAA
AAASHGVLL

SEQ ID NO: 62582 - protein, 9 aa, Homo sapiens
  misc_feature: Table A; Target 62582; HLA-C*16:01; PKHD1; ENSG00000170927; TAA
AAASHGVLL

SEQ ID NO: 62583 - protein, 9 aa, Homo sapiens
  misc_feature: Table A; Target 62583; HLA-B*54:01; PKHD1; ENSG00000170927; TAA
AAATPVVTA

SEQ ID NO: 62584 - protein, 9 aa, Homo sapiens
  misc_feature: Table A; Target 62584; HLA-B*56:01; PKHD1; ENSG00000170927; TAA
AAATPVVTA

SEQ ID NO: 62585 - protein, 9 aa, Homo sapiens
  misc_feature: Table A; Target 62585; HLA-C*02:02; PKHD1; ENSG00000170927; TAA
AAATPVVTA

SEQ ID NO: 62586 - protein, 9 aa, Homo sapiens
  misc_feature: Table A; Target 62586; HLA-C*12:03; PKHD1; ENSG00000170927; TAA
AAATPVVTA

SEQ ID NO: 62587 - protein, 10 aa, Homo sapiens
  misc_feature: Table A; Target 62587; HLA-A*26:01; PKHD1; ENSG00000170927; TAA
AAATPVVTAM

SEQ ID NO: 62588 - protein, 10 aa, Homo sapiens
  misc_feature: Table A; Target 62588; HLA-B*39:01; PKHD1; ENSG00000170927; TAA
AAATPVVTAM

SEQ ID NO: 62589 - protein, 10 aa, Homo sapiens
  misc_feature: Table A; Target 62589; HLA-B*46:01; PKHD1; ENSG00000170927; TAA
AAATPVVTAM

SEQ ID NO: 62590 - protein, 10 aa, Homo sapiens
  misc_feature: Table A; Target 62590; HLA-C*01:02; PKHD1; ENSG00000170927; TAA
AAATPVVTAM

SEQ ID NO: 62591 - protein, 10 aa, Homo sapiens
  misc_feature: Table A; Target 62591; HLA-C*02:02; PKHD1; ENSG00000170927; TAA
AAATPVVTAM

SEQ ID NO: 62592 - protein, 10 aa, Homo sapiens
  misc_feature: Table A; Target 62592; HLA-C*03:03; PKHD1; ENSG00000170927; TAA
AAATPVVTAM

SEQ ID NO: 62593 - protein, 10 aa, Homo sapiens
  misc_feature: Table A; Target 62593; HLA-C*03:04; PKHD1; ENSG00000170927; TAA
AAATPVVTAM

SEQ ID NO: 62594 - protein, 10 aa, Homo sapiens
  misc_feature: Table A; Target 62594; HLA-C*07:06; PKHD1; ENSG00000170927; TAA
AAATPVVTAM

SEQ ID NO: 62595 - protein, 10 aa, Homo sapiens
  misc_feature: Table A; Target 62595; HLA-C*12:03; PKHD1; ENSG00000170927; TAA
AAATPVVTAM

SEQ ID NO: 62596 - protein, 10 aa, Homo sapiens
  misc_feature: Table A; Target 62596; HLA-C*16:04; PKHD1; ENSG00000170927; TAA
AAATPVVTAM

SEQ ID NO: 62597 - protein, 8 aa, Homo sapiens
  misc_feature: Table A; Target 62597; HLA-C*16:01; PKHD1; ENSG00000170927; TAA
AAATRVVY

SEQ ID NO: 62598 - protein, 8 aa, Homo sapiens
  misc_feature: Table A; Target 62598; HLA-C*05:01; PKHD1; ENSG00000170927; TAA
AADIGGLW

SEQ ID NO: 62599 - protein, 9 aa, Homo sapiens
  misc_feature: Table A; Target 62599; HLA-C*07:06; PKHD1; ENSG00000170927; TAA
AAEVGLLTR

SEQ ID NO: 62600 - protein, 8 aa, Homo sapiens
  misc_feature: Table A; Target 62600; HLA-C*16:01; PKHD1; ENSG00000170927; TAA
AASHGVLL

SEQ ID NO: 62601 - protein, 10 aa, Homo sapiens
  misc_feature: Table A; Target 62601; HLA-A*25:01; PKHD1; ENSG00000170927; TAA
AASLSSVASW

SEQ ID NO: 62602 - protein, 8 aa, Homo sapiens
  misc_feature: Table A; Target 62602; HLA-B*56:01; PKHD1; ENSG00000170927; TAA
AATPVVTA

SEQ ID NO: 62603 - protein, 9 aa, Homo sapiens
  misc_feature: Table A; Target 62603; HLA-A*23:01; PKHD1; ENSG00000170927; TAA
AATPVVTAM

SEQ ID NO: 62604 - protein, 9 aa, Homo sapiens
  misc_feature: Table A; Target 62604; HLA-A*24:02; PKHD1; ENSG00000170927; TAA
AATPVVTAM

SEQ ID NO: 62605 - protein, 9 aa, Homo sapiens
  misc_feature: Table A; Target 62605; HLA-A*25:01; PKHD1; ENSG00000170927; TAA
AATPVVTAM

SEQ ID NO: 62606 - protein, 9 aa, Homo sapiens
  misc_feature: Table A; Target 62606; HLA-A*26:01; PKHD1; ENSG00000170927; TAA
AATPVVTAM

SEQ ID NO: 62607 - protein, 9 aa, Homo sapiens
  misc_feature: Table A; Target 62607; HLA-A*30:01; PKHD1; ENSG00000170927; TAA
AATPVVTAM

SEQ ID NO: 62608 - protein, 9 aa, Homo sapiens
  misc_feature: Table A; Target 62608; HLA-A*30:02; PKHD1; ENSG00000170927; TAA
AATPVVTAM

SEQ ID NO: 62609 - protein, 9 aa, Homo sapiens
  misc_feature: Table A; Target 62609; HLA-A*32:01; PKHD1; ENSG00000170927; TAA
AATPVVTAM

SEQ ID NO: 62610 - protein, 9 aa, Homo sapiens
  misc_feature: Table A; Target 62610; HLA-A*68:01; PKHD1; ENSG00000170927; TAA
AATPVVTAM

SEQ ID NO: 62611 - protein, 9 aa, Homo sapiens
  misc_feature: Table A; Target 62611; HLA-B*07:02; PKHD1; ENSG00000170927; TAA
AATPVVTAM

SEQ ID NO: 62612 - protein, 9 aa, Homo sapiens
  misc_feature: Table A; Target 62612; HLA-B*13:02; PKHD1; ENSG00000170927; TAA
AATPVVTAM

SEQ ID NO: 62613 - protein, 9 aa, Homo sapiens
  misc_feature: Table A; Target 62613; HLA-B*15:01; PKHD1; ENSG00000170927; TAA
AATPVVTAM

SEQ ID NO: 62614 - protein, 9 aa, Homo sapiens
  misc_feature: Table A; Target 62614; HLA-B*15:03; PKHD1; ENSG00000170927; TAA
AATPVVTAM

SEQ ID NO: 62615 - protein, 9 aa, Homo sapiens
  misc_feature: Table A; Target 62615; HLA-B*18:01; PKHD1; ENSG00000170927; TAA
AATPVVTAM

SEQ ID NO: 62616 - protein, 9 aa, Homo sapiens
  misc_feature: Table A; Target 62616; HLA-B*27:05; PKHD1; ENSG00000170927; TAA
AATPVVTAM

SEQ ID NO: 62617 - protein, 9 aa, Homo sapiens
  misc_feature: Table A; Target 62617; HLA-B*35:01; PKHD1; ENSG00000170927; TAA
AATPVVTAM

SEQ ID NO: 62618 - protein, 9 aa, Homo sapiens
  misc_feature: Table A; Target 62618; HLA-B*35:03; PKHD1; ENSG00000170927; TAA
AATPVVTAM

SEQ ID NO: 62619 - protein, 9 aa, Homo sapiens
  misc_feature: Table A; Target 62619; HLA-B*37:01; PKHD1; ENSG00000170927; TAA
AATPVVTAM

SEQ ID NO: 62620 - protein, 9 aa, Homo sapiens
  misc_feature: Table A; Target 62620; HLA-B*39:01; PKHD1; ENSG00000170927; TAA
AATPVVTAM

SEQ ID NO: 62621 - protein, 9 aa, Homo sapiens
  misc_feature: Table A; Target 62621; HLA-B*40:01; PKHD1; ENSG00000170927; TAA
AATPVVTAM

SEQ ID NO: 62622 - protein, 9 aa, Homo sapiens
  misc_feature: Table A; Target 62622; HLA-B*44:03; PKHD1; ENSG00000170927; TAA
AATPVVTAM

SEQ ID NO: 62623 - protein, 9 aa, Homo sapiens
  misc_feature: Table A; Target 62623; HLA-B*46:01; PKHD1; ENSG00000170927; TAA
AATPVVTAM

SEQ ID NO: 62624 - protein, 9 aa, Homo sapiens
  misc_feature: Table A; Target 62624; HLA-B*51:01; PKHD1; ENSG00000170927; TAA
AATPVVTAM

SEQ ID NO: 62625 - protein, 9 aa, Homo sapiens
  misc_feature: Table A; Target 62625; HLA-B*55:01; PKHD1; ENSG00000170927; TAA
AATPVVTAM

SEQ ID NO: 62626 - protein, 9 aa, Homo sapiens
  misc_feature: Table A; Target 62626; HLA-B*56:01; PKHD1; ENSG00000170927; TAA
AATPVVTAM

SEQ ID NO: 62627 - protein, 9 aa, Homo sapiens
  misc_feature: Table A; Target 62627; HLA-B*58:01; PKHD1; ENSG00000170927; TAA
AATPVVTAM

SEQ ID NO: 62628 - protein, 9 aa, Homo sapiens
  misc_feature: Table A; Target 62628; HLA-C*01:02; PKHD1; ENSG00000170927; TAA
AATPVVTAM

SEQ ID NO: 62629 - protein, 9 aa, Homo sapiens
  misc_feature: Table A; Target 62629; HLA-C*02:02; PKHD1; ENSG00000170927; TAA
AATPVVTAM

SEQ ID NO: 62630 - protein, 9 aa, Homo sapiens
  misc_feature: Table A; Target 62630; HLA-C*03:03; PKHD1; ENSG00000170927; TAA
AATPVVTAM

SEQ ID NO: 62631 - protein, 9 aa, Homo sapiens
  misc_feature: Table A; Target 62631; HLA-C*03:04; PKHD1; ENSG00000170927; TAA
AATPVVTAM

SEQ ID NO: 62632 - protein, 9 aa, Homo sapiens
  misc_feature: Table A; Target 62632; HLA-C*04:01; PKHD1; ENSG00000170927; TAA
AATPVVTAM

SEQ ID NO: 62633 - protein, 9 aa, Homo sapiens
  misc_feature: Table A; Target 62633; HLA-C*05:01; PKHD1; ENSG00000170927; TAA
AATPVVTAM

SEQ ID NO: 62634 - protein, 9 aa, Homo sapiens
  misc_feature: Table A; Target 62634; HLA-C*07:02; PKHD1; ENSG00000170927; TAA
AATPVVTAM

SEQ ID NO: 62635 - protein, 9 aa, Homo sapiens
  misc_feature: Table A; Target 62635; HLA-C*07:04; PKHD1; ENSG00000170927; TAA
AATPVVTAM

SEQ ID NO: 62636 - protein, 9 aa, Homo sapiens
  misc_feature: Table A; Target 62636; HLA-C*07:06; PKHD1; ENSG00000170927; TAA
AATPVVTAM

SEQ ID NO: 62637 - protein, 9 aa, Homo sapiens
  misc_feature: Table A; Target 62637; HLA-C*12:03; PKHD1; ENSG00000170927; TAA
AATPVVTAM

SEQ ID NO: 62638 - protein, 9 aa, Homo sapiens
  misc_feature: Table A; Target 62638; HLA-C*14:02; PKHD1; ENSG00000170927; TAA
AATPVVTAM

SEQ ID NO: 62639 - protein, 9 aa, Homo sapiens
  misc_feature: Table A; Target 62639; HLA-C*16:01; PKHD1; ENSG00000170927; TAA
AATPVVTAM

SEQ ID NO: 62640 - protein, 9 aa, Homo sapiens
  misc_feature: Table A; Target 62640; HLA-C*16:02; PKHD1; ENSG00000170927; TAA
AATPVVTAM

SEQ ID NO: 62641 - protein, 9 aa, Homo sapiens
  misc_feature: Table A; Target 62641; HLA-C*16:04; PKHD1; ENSG00000170927; TAA
AATPVVTAM

SEQ ID NO: 62642 - protein, 9 aa, Homo sapiens
  misc_feature: Table A; Target 62642; HLA-B*37:01; PKHD1; ENSG00000170927; TAA
ADSQASLHF

SEQ ID NO: 62643 - protein, 9 aa, Homo sapiens
  misc_feature: Table A; Target 62643; HLA-A*30:01; PKHD1; ENSG00000170927; TAA
AEGLSNPEM

SEQ ID NO: 62644 - protein, 9 aa, Homo sapiens
  misc_feature: Table A; Target 62644; HLA-B*40:01; PKHD1; ENSG00000170927; TAA
AEGLSNPEM

SEQ ID NO: 62645 - protein, 9 aa, Homo sapiens
  misc_feature: Table A; Target 62645; HLA-B*44:02; PKHD1; ENSG00000170927; TAA
AEGLSNPEM

SEQ ID NO: 62646 - protein, 9 aa, Homo sapiens
  misc_feature: Table A; Target 62646; HLA-B*44:03; PKHD1; ENSG00000170927; TAA
AEGLSNPEM

SEQ ID NO: 62647 - protein, 9 aa, Homo sapiens
  misc_feature: Table A; Target 62647; HLA-B*49:01; PKHD1; ENSG00000170927; TAA
AEGLSNPEM

SEQ ID NO: 62648 - protein, 9 aa, Homo sapiens
  misc_feature: Table A; Target 62648; HLA-C*16:04; PKHD1; ENSG00000170927; TAA
AEGLSNPEM

SEQ ID NO: 62649 - protein, 10 aa, Homo sapiens
  misc_feature: Table A; Target 62649; HLA-B*40:01; PKHD1; ENSG00000170927; TAA
AEGLSNPEML

SEQ ID NO: 62650 - protein, 10 aa, Homo sapiens
  misc_feature: Table A; Target 62650; HLA-B*44:02; PKHD1; ENSG00000170927; TAA
AENSGIMHPI

SEQ ID NO: 62651 - protein, 10 aa, Homo sapiens
  misc_feature: Table A; Target 62651; HLA-B*44:03; PKHD1; ENSG00000170927; TAA
AENSGIMHPI

SEQ ID NO: 62652 - protein, 10 aa, Homo sapiens
  misc_feature: Table A; Target 62652; HLA-B*49:01; PKHD1; ENSG00000170927; TAA
AENSGIMHPI

SEQ ID NO: 62653 - protein, 8 aa, Homo sapiens
  misc_feature: Table A; Target 62653; HLA-B*18:01; PKHD1; ENSG00000170927; TAA
AESMFPSF

SEQ ID NO: 62654 - protein, 8 aa, Homo sapiens
  misc_feature: Table A; Target 62654; HLA-B*37:01; PKHD1; ENSG00000170927; TAA
AESMFPSF

SEQ ID NO: 62655 - protein, 8 aa, Homo sapiens
  misc_feature: Table A; Target 62655; HLA-B*44:02; PKHD1; ENSG00000170927; TAA
AESMFPSF

SEQ ID NO: 62656 - protein, 10 aa, Homo sapiens
  misc_feature: Table A; Target 62656; HLA-A*30:01; PKHD1; ENSG00000170927; TAA
AETQDGYVSF

SEQ ID NO: 62657 - protein, 10 aa, Homo sapiens
  misc_feature: Table A; Target 62657; HLA-B*40:01; PKHD1; ENSG00000170927; TAA
AETQDGYVSF

SEQ ID NO: 62658 - protein, 10 aa, Homo sapiens
  misc_feature: Table A; Target 62658; HLA-B*44:02; PKHD1; ENSG00000170927; TAA
AETQDGYVSF

SEQ ID NO: 62659 - protein, 10 aa, Homo sapiens
  misc_feature: Table A; Target 62659; HLA-B*44:03; PKHD1; ENSG00000170927; TAA
AETQDGYVSF

SEQ ID NO: 62660 - protein, 10 aa, Homo sapiens
  misc_feature: Table A; Target 62660; HLA-C*16:04; PKHD1; ENSG00000170927; TAA
AETQDGYVSF

SEQ ID NO: 62661 - protein, 11 aa, Homo sapiens
  misc_feature: Table A; Target 62661; HLA-B*44:02; PKHD1; ENSG00000170927; TAA
AETQDGYVSFY

SEQ ID NO: 62662 - protein, 11 aa, Homo sapiens
  misc_feature: Table A; Target 62662; HLA-B*44:03; PKHD1; ENSG00000170927; TAA
AETQDGYVSFY

SEQ ID NO: 62663 - protein, 10 aa, Homo sapiens
  misc_feature: Table A; Target 62663; HLA-B*44:02; PKHD1; ENSG00000170927; TAA
AEVGLLTRNI

SEQ ID NO: 62664 - protein, 10 aa, Homo sapiens
  misc_feature: Table A; Target 62664; HLA-B*44:03; PKHD1; ENSG00000170927; TAA
AEVGLLTRNI

SEQ ID NO: 62665 - protein, 10 aa, Homo sapiens
  misc_feature: Table A; Target 62665; HLA-B*49:01; PKHD1; ENSG00000170927; TAA
AEVGLLTRNI

SEQ ID NO: 62666 - protein, 9 aa, Homo sapiens
  misc_feature: Table A; Target 62666; HLA-A*30:01; PKHD1; ENSG00000170927; TAA
AEVLTVKEV

SEQ ID NO: 62667 - protein, 9 aa, Homo sapiens
  misc_feature: Table A; Target 62667; HLA-B*37:01; PKHD1; ENSG00000170927; TAA
AEVLTVKEV

SEQ ID NO: 62668 - protein, 9 aa, Homo sapiens
  misc_feature: Table A; Target 62668; HLA-B*40:01; PKHD1; ENSG00000170927; TAA
AEVLTVKEV

SEQ ID NO: 62669 - protein, 9 aa, Homo sapiens
  misc_feature: Table A; Target 62669; HLA-B*40:02; PKHD1; ENSG00000170927; TAA
AEVLTVKEV

SEQ ID NO: 62670 - protein, 9 aa, Homo sapiens
  misc_feature: Table A; Target 62670; HLA-B*44:02; PKHD1; ENSG00000170927; TAA
AEVLTVKEV

SEQ ID NO: 62671 - protein, 9 aa, Homo sapiens
  misc_feature: Table A; Target 62671; HLA-B*44:03; PKHD1; ENSG00000170927; TAA
AEVLTVKEV

SEQ ID NO: 62672 - protein, 9 aa, Homo sapiens
  misc_feature: Table A; Target 62672; HLA-B*49:01; PKHD1; ENSG00000170927; TAA
AEVLTVKEV

SEQ ID NO: 62673 - protein, 9 aa, Homo sapiens
  misc_feature: Table A; Target 62673; HLA-C*16:04; PKHD1; ENSG00000170927; TAA
AEVLTVKEV

SEQ ID NO: 62674 - protein, 8 aa, Homo sapiens
  misc_feature: Table A; Target 62674; HLA-B*37:01; PKHD1; ENSG00000170927; TAA
AEWTASFF

SEQ ID NO: 62675 - protein, 9 aa, Homo sapiens
  misc_feature: Table A; Target 62675; HLA-A*30:01; PKHD1; ENSG00000170927; TAA
AEYIDSPVI

SEQ ID NO: 62676 - protein, 9 aa, Homo sapiens
  misc_feature: Table A; Target 62676; HLA-B*37:01; PKHD1; ENSG00000170927; TAA
AEYIDSPVI

SEQ ID NO: 62677 - protein, 9 aa, Homo sapiens
  misc_feature: Table A; Target 62677; HLA-B*40:01; PKHD1; ENSG00000170927; TAA
AEYIDSPVI

SEQ ID NO: 62678 - protein, 9 aa, Homo sapiens
  misc_feature: Table A; Target 62678; HLA-B*40:02; PKHD1; ENSG00000170927; TAA
AEYIDSPVI

SEQ ID NO: 62679 - protein, 9 aa, Homo sapiens
  misc_feature: Table A; Target 62679; HLA-B*44:02; PKHD1; ENSG00000170927; TAA
AEYIDSPVI

SEQ ID NO: 62680 - protein, 9 aa, Homo sapiens
  misc_feature: Table A; Target 62680; HLA-B*44:03; PKHD1; ENSG00000170927; TAA
AEYIDSPVI

SEQ ID NO: 62681 - protein, 9 aa, Homo sapiens
  misc_feature: Table A; Target 62681; HLA-B*49:01; PKHD1; ENSG00000170927; TAA
AEYIDSPVI

SEQ ID NO: 62682 - protein, 9 aa, Homo sapiens
  misc_feature: Table A; Target 62682; HLA-C*16:04; PKHD1; ENSG00000170927; TAA
AEYIDSPVI

SEQ ID NO: 62683 - protein, 10 aa, Homo sapiens
  misc_feature: Table A; Target 62683; HLA-A*30:01; PKHD1; ENSG00000170927; TAA
AEYIDSPVIL

SEQ ID NO: 62684 - protein, 10 aa, Homo sapiens
  misc_feature: Table A; Target 62684; HLA-B*40:01; PKHD1; ENSG00000170927; TAA
AEYIDSPVIL

SEQ ID NO: 62685 - protein, 10 aa, Homo sapiens
  misc_feature: Table A; Target 62685; HLA-B*49:01; PKHD1; ENSG00000170927; TAA
AEYIDSPVIL

SEQ ID NO: 62686 - protein, 9 aa, Homo sapiens
  misc_feature: Table A; Target 62686; HLA-A*23:01; PKHD1; ENSG00000170927; TAA
AFTPELISI

SEQ ID NO: 62687 - protein, 10 aa, Homo sapiens
  misc_feature: Table A; Target 62687; HLA-B*56:01; PKHD1; ENSG00000170927; TAA
AGFSPGNVSA

SEQ ID NO: 62688 - protein, 9 aa, Homo sapiens
  misc_feature: Table A; Target 62688; HLA-A*31:01; PKHD1; ENSG00000170927; TAA
AGIYPLQVR

SEQ ID NO: 62689 - protein, 11 aa, Homo sapiens
  misc_feature: Table A; Target 62689; HLA-A*11:01; PKHD1; ENSG00000170927; TAA
AGIYPLQVRQK

SEQ ID NO: 62690 - protein, 8 aa, Homo sapiens
  misc_feature: Table A; Target 62690; HLA-C*16:01; PKHD1; ENSG00000170927; TAA
AGSERLGF

SEQ ID NO: 62691 - protein, 10 aa, Homo sapiens
  misc_feature: Table A; Target 62691; HLA-B*39:01; PKHD1; ENSG00000170927; TAA
AHALDTVLAL

SEQ ID NO: 62692 - protein, 9 aa, Homo sapiens
  misc_feature: Table A; Target 62692; HLA-A*29:02; PKHD1; ENSG00000170927; TAA
AIWAIQKLY

SEQ ID NO: 62693 - protein, 10 aa, Homo sapiens
  misc_feature: Table A; Target 62693; HLA-A*02:03; PKHD1; ENSG00000170927; TAA
ALAPVHTQSA

SEQ ID NO: 62694 - protein, 11 aa, Homo sapiens
  misc_feature: Table A; Target 62694; HLA-A*25:01; PKHD1; ENSG00000170927; TAA
ALAPVHTQSAW

SEQ ID NO: 62695 - protein, 11 aa, Homo sapiens
  misc_feature: Table A; Target 62695; HLA-A*32:01; PKHD1; ENSG00000170927; TAA
ALAPVHTQSAW

SEQ ID NO: 62696 - protein, 11 aa, Homo sapiens
  misc_feature: Table A; Target 62696; HLA-B*58:01; PKHD1; ENSG00000170927; TAA
ALAPVHTQSAW

SEQ ID NO: 62697 - protein, 9 aa, Homo sapiens
  misc_feature: Table A; Target 62697; HLA-A*30:02; PKHD1; ENSG00000170927; TAA
ALLLDQETY

SEQ ID NO: 62698 - protein, 9 aa, Homo sapiens
  misc_feature: Table A; Target 62698; HLA-B*15:01; PKHD1; ENSG00000170927; TAA
ALLLDQETY

SEQ ID NO: 62699 - protein, 9 aa, Homo sapiens
  misc_feature: Table A; Target 62699; HLA-B*15:03; PKHD1; ENSG00000170927; TAA
ALLLDQETY

SEQ ID NO: 62700 - protein, 9 aa, Homo sapiens
  misc_feature: Table A; Target 62700; HLA-A*02:01; PKHD1; ENSG00000170927; TAA
ALLSRSITI

SEQ ID NO: 62701 - protein, 9 aa, Homo sapiens
  misc_feature: Table A; Target 62701; HLA-A*02:04; PKHD1; ENSG00000170927; TAA
ALLSRSITI

SEQ ID NO: 62702 - protein, 9 aa, Homo sapiens
  misc_feature: Table A; Target 62702; HLA-A*02:01; PKHD1; ENSG00000170927; TAA
ALPPLPAGL

SEQ ID NO: 62703 - protein, 9 aa, Homo sapiens
  misc_feature: Table A; Target 62703; HLA-A*02:03; PKHD1; ENSG00000170927; TAA
ALPPLPAGL

SEQ ID NO: 62704 - protein, 9 aa, Homo sapiens
  misc_feature: Table A; Target 62704; HLA-A*02:07; PKHD1; ENSG00000170927; TAA
ALPPLPAGL

SEQ ID NO: 62705 - protein, 9 aa, Homo sapiens
  misc_feature: Table A; Target 62705; HLA-A*02:01; PKHD1; ENSG00000170927; TAA
AMLHVENSV

SEQ ID NO: 62706 - protein, 9 aa, Homo sapiens
  misc_feature: Table A; Target 62706; HLA-A*26:01; PKHD1; ENSG00000170927; TAA
ANIDIFIGM

SEQ ID NO: 62707 - protein, 10 aa, Homo sapiens
  misc_feature: Table A; Target 62707; HLA-A*23:01; PKHD1; ENSG00000170927; TAA
ANMSVVLQQF

SEQ ID NO: 62708 - protein, 9 aa, Homo sapiens
  misc_feature: Table A; Target 62708; HLA-B*56:01; PKHD1; ENSG00000170927; TAA
APCRVLANA

SEQ ID NO: 62709 - protein, 11 aa, Homo sapiens
  misc_feature: Table A; Target 62709; HLA-B*56:01; PKHD1; ENSG00000170927; TAA
APCRVLANATV

SEQ ID NO: 62710 - protein, 9 aa, Homo sapiens
  misc_feature: Table A; Target 62710; HLA-B*56:01; PKHD1; ENSG00000170927; TAA
APGAPAQQV

SEQ ID NO: 62711 - protein, 9 aa, Homo sapiens
  misc_feature: Table A; Target 62711; HLA-B*07:02; PKHD1; ENSG00000170927; TAA
APGPHYLSV

SEQ ID NO: 62712 - protein, 9 aa, Homo sapiens
  misc_feature: Table A; Target 62712; HLA-B*56:01; PKHD1; ENSG00000170927; TAA
APGPHYLSV

SEQ ID NO: 62713 - protein, 9 aa, Homo sapiens
  misc_feature: Table A; Target 62713; HLA-C*07:02; PKHD1; ENSG00000170927; TAA
APGPHYLSV

SEQ ID NO: 62714 - protein, 9 aa, Homo sapiens
  misc_feature: Table A; Target 62714; HLA-B*56:01; PKHD1; ENSG00000170927; TAA
APGPIELRA

SEQ ID NO: 62715 - protein, 11 aa, Homo sapiens
  misc_feature: Table A; Target 62715; HLA-B*56:01; PKHD1; ENSG00000170927; TAA
APGPIELRAHA

SEQ ID NO: 62716 - protein, 11 aa, Homo sapiens
  misc_feature: Table A; Target 62716; HLA-B*56:01; PKHD1; ENSG00000170927; TAA
APLLSFTQNIA

SEQ ID NO: 62717 - protein, 9 aa, Homo sapiens
  misc_feature: Table A; Target 62717; HLA-B*56:01; PKHD1; ENSG00000170927; TAA
APQNSVKKV

SEQ ID NO: 62718 - protein, 9 aa, Homo sapiens
  misc_feature: Table A; Target 62718; HLA-C*16:02; PKHD1; ENSG00000170927; TAA
APQNSVKKV

SEQ ID NO: 62719 - protein, 8 aa, Homo sapiens
  misc_feature: Table A; Target 62719; HLA-B*56:01; PKHD1; ENSG00000170927; TAA
APTVPAAV

SEQ ID NO: 62720 - protein, 8 aa, Homo sapiens
  misc_feature: Table A; Target 62720; HLA-B*56:01; PKHD1; ENSG00000170927; TAA
APVHTQSA

SEQ ID NO: 62721 - protein, 9 aa, Homo sapiens
  misc_feature: Table A; Target 62721; HLA-B*58:01; PKHD1; ENSG00000170927; TAA
APVHTQSAW

SEQ ID NO: 62722 - protein, 8 aa, Homo sapiens
  misc_feature: Table A; Target 62722; HLA-A*01:01; PKHD1; ENSG00000170927; TAA
AQETGLFY

SEQ ID NO: 62723 - protein, 9 aa, Homo sapiens
  misc_feature: Table A; Target 62723; HLA-B*15:01; PKHD1; ENSG00000170927; TAA
AQIFRSSNL

SEQ ID NO: 62724 - protein, 9 aa, Homo sapiens
  misc_feature: Table A; Target 62724; HLA-B*37:01; PKHD1; ENSG00000170927; TAA
AQIFRSSNL

SEQ ID NO: 62725 - protein, 9 aa, Homo sapiens
  misc_feature: Table A; Target 62725; HLA-B*13:02; PKHD1; ENSG00000170927; TAA
AQISGAANI

SEQ ID NO: 62726 - protein, 10 aa, Homo sapiens
  misc_feature: Table A; Target 62726; HLA-A*26:01; PKHD1; ENSG00000170927; TAA
AQITLYGSSY

SEQ ID NO: 62727 - protein, 10 aa, Homo sapiens
  misc_feature: Table A; Target 62727; HLA-A*30:02; PKHD1; ENSG00000170927; TAA
AQITLYGSSY

SEQ ID NO: 62728 - protein, 10 aa, Homo sapiens
  misc_feature: Table A; Target 62728; HLA-A*32:01; PKHD1; ENSG00000170927; TAA
AQITLYGSSY

SEQ ID NO: 62729 - protein, 10 aa, Homo sapiens
  misc_feature: Table A; Target 62729; HLA-B*15:01; PKHD1; ENSG00000170927; TAA
AQITLYGSSY

SEQ ID NO: 62730 - protein, 10 aa, Homo sapiens
  misc_feature: Table A; Target 62730; HLA-B*15:03; PKHD1; ENSG00000170927; TAA
AQITLYGSSY

SEQ ID NO: 62731 - protein, 10 aa, Homo sapiens
  misc_feature: Table A; Target 62731; HLA-B*27:02; PKHD1; ENSG00000170927; TAA
AQITLYGSSY

SEQ ID NO: 62732 - protein, 10 aa, Homo sapiens
  misc_feature: Table A; Target 62732; HLA-B*39:01; PKHD1; ENSG00000170927; TAA
AQITLYGSSY

SEQ ID NO: 62733 - protein, 10 aa, Homo sapiens
  misc_feature: Table A; Target 62733; HLA-B*44:03; PKHD1; ENSG00000170927; TAA
AQITLYGSSY

SEQ ID NO: 62734 - protein, 10 aa, Homo sapiens
  misc_feature: Table A; Target 62734; HLA-B*46:01; PKHD1; ENSG00000170927; TAA
AQITLYGSSY

SEQ ID NO: 62735 - protein, 10 aa, Homo sapiens
  misc_feature: Table A; Target 62735; HLA-C*02:02; PKHD1; ENSG00000170927; TAA
AQITLYGSSY

SEQ ID NO: 62736 - protein, 10 aa, Homo sapiens
  misc_feature: Table A; Target 62736; HLA-C*07:04; PKHD1; ENSG00000170927; TAA
AQITLYGSSY

SEQ ID NO: 62737 - protein, 10 aa, Homo sapiens
  misc_feature: Table A; Target 62737; HLA-C*14:02; PKHD1; ENSG00000170927; TAA
AQITLYGSSY

SEQ ID NO: 62738 - protein, 10 aa, Homo sapiens
  misc_feature: Table A; Target 62738; HLA-C*16:04; PKHD1; ENSG00000170927; TAA
AQITLYGSSY

SEQ ID NO: 62739 - protein, 10 aa, Homo sapiens
  misc_feature: Table A; Target 62739; HLA-A*30:02; PKHD1; ENSG00000170927; TAA
AQKGYRLDQY

SEQ ID NO: 62740 - protein, 9 aa, Homo sapiens
  misc_feature: Table A; Target 62740; HLA-B*13:02; PKHD1; ENSG00000170927; TAA
AQRLPEVQV

SEQ ID NO: 62741 - protein, 9 aa, Homo sapiens
  misc_feature: Table A; Target 62741; HLA-A*02:01; PKHD1; ENSG00000170927; TAA
AQTPIVHQV

SEQ ID NO: 62742 - protein, 9 aa, Homo sapiens
  misc_feature: Table A; Target 62742; HLA-A*02:03; PKHD1; ENSG00000170927; TAA
AQTPIVHQV

SEQ ID NO: 62743 - protein, 9 aa, Homo sapiens
  misc_feature: Table A; Target 62743; HLA-A*02:04; PKHD1; ENSG00000170927; TAA
AQTPIVHQV

SEQ ID NO: 62744 - protein, 9 aa, Homo sapiens
  misc_feature: Table A; Target 62744; HLA-A*30:01; PKHD1; ENSG00000170927; TAA
AQTPIVHQV

SEQ ID NO: 62745 - protein, 9 aa, Homo sapiens
  misc_feature: Table A; Target 62745; HLA-A*32:01; PKHD1; ENSG00000170927; TAA
AQTPIVHQV

SEQ ID NO: 62746 - protein, 9 aa, Homo sapiens
  misc_feature: Table A; Target 62746; HLA-B*13:02; PKHD1; ENSG00000170927; TAA
AQTPIVHQV

SEQ ID NO: 62747 - protein, 9 aa, Homo sapiens
  misc_feature: Table A; Target 62747; HLA-B*55:01; PKHD1; ENSG00000170927; TAA
AQTPIVHQV

SEQ ID NO: 62748 - protein, 9 aa, Homo sapiens
  misc_feature: Table A; Target 62748; HLA-C*02:02; PKHD1; ENSG00000170927; TAA
AQTPIVHQV

SEQ ID NO: 62749 - protein, 9 aa, Homo sapiens
  misc_feature: Table A; Target 62749; HLA-C*06:02; PKHD1; ENSG00000170927; TAA
AQTPIVHQV

SEQ ID NO: 62750 - protein, 9 aa, Homo sapiens
  misc_feature: Table A; Target 62750; HLA-C*16:02; PKHD1; ENSG00000170927; TAA
AQTPIVHQV

SEQ ID NO: 62751 - protein, 10 aa, Homo sapiens
  misc_feature: Table A; Target 62751; HLA-A*30:02; PKHD1; ENSG00000170927; TAA
AQTPIVHQVY

SEQ ID NO: 62752 - protein, 10 aa, Homo sapiens
  misc_feature: Table A; Target 62752; HLA-A*32:01; PKHD1; ENSG00000170927; TAA
AQTPIVHQVY

SEQ ID NO: 62753 - protein, 10 aa, Homo sapiens
  misc_feature: Table A; Target 62753; HLA-B*15:01; PKHD1; ENSG00000170927; TAA
AQTPIVHQVY

SEQ ID NO: 62754 - protein, 10 aa, Homo sapiens
  misc_feature: Table A; Target 62754; HLA-B*15:03; PKHD1; ENSG00000170927; TAA
AQTPIVHQVY

SEQ ID NO: 62755 - protein, 10 aa, Homo sapiens
  misc_feature: Table A; Target 62755; HLA-B*44:03; PKHD1; ENSG00000170927; TAA
AQTPIVHQVY

SEQ ID NO: 62756 - protein, 8 aa, Homo sapiens
  misc_feature: Table A; Target 62756; HLA-B*13:02; PKHD1; ENSG00000170927; TAA
AQVTIAGI

SEQ ID NO: 62757 - protein, 8 aa, Homo sapiens
  misc_feature: Table A; Target 62757; HLA-B*27:05; PKHD1; ENSG00000170927; TAA
ARGPSPSL

SEQ ID NO: 62758 - protein, 9 aa, Homo sapiens
  misc_feature: Table A; Target 62758; HLA-C*16:04; PKHD1; ENSG00000170927; TAA
ARGPSPSLV

SEQ ID NO: 62759 - protein, 11 aa, Homo sapiens
  misc_feature: Table A; Target 62759; HLA-B*27:05; PKHD1; ENSG00000170927; TAA
ARGPSPSLVGK

SEQ ID NO: 62760 - protein, 9 aa, Homo sapiens
  misc_feature: Table A; Target 62760; HLA-B*58:01; PKHD1; ENSG00000170927; TAA
ASCLVNSSF

SEQ ID NO: 62761 - protein, 11 aa, Homo sapiens
  misc_feature: Table A; Target 62761; HLA-A*01:01; PKHD1; ENSG00000170927; TAA
ASDFTVKEDLY

SEQ ID NO: 62762 - protein, 9 aa, Homo sapiens
  misc_feature: Table A; Target 62762; HLA-B*58:01; PKHD1; ENSG00000170927; TAA
ASFFNAGTF

SEQ ID NO: 62763 - protein, 9 aa, Homo sapiens
  misc_feature: Table A; Target 62763; HLA-C*02:02; PKHD1; ENSG00000170927; TAA
ASFFNAGTF

SEQ ID NO: 62764 - protein, 10 aa, Homo sapiens
  misc_feature: Table A; Target 62764; HLA-B*57:01; PKHD1; ENSG00000170927; TAA
ASISVGTADW

SEQ ID NO: 62765 - protein, 10 aa, Homo sapiens
  misc_feature: Table A; Target 62765; HLA-B*58:01; PKHD1; ENSG00000170927; TAA
ASISVGTADW

SEQ ID NO: 62766 - protein, 9 aa, Homo sapiens
  misc_feature: Table A; Target 62766; HLA-A*25:01; PKHD1; ENSG00000170927; TAA
ASLSSVASW

SEQ ID NO: 62767 - protein, 9 aa, Homo sapiens
  misc_feature: Table A; Target 62767; HLA-A*32:01; PKHD1; ENSG00000170927; TAA
ASLSSVASW

SEQ ID NO: 62768 - protein, 9 aa, Homo sapiens
  misc_feature: Table A; Target 62768; HLA-B*57:01; PKHD1; ENSG00000170927; TAA
ASLSSVASW

SEQ ID NO: 62769 - protein, 9 aa, Homo sapiens
  misc_feature: Table A; Target 62769; HLA-B*58:01; PKHD1; ENSG00000170927; TAA
ASLSSVASW

SEQ ID NO: 62770 - protein, 9 aa, Homo sapiens
  misc_feature: Table A; Target 62770; HLA-C*16:04; PKHD1; ENSG00000170927; TAA
ASLSSVASW

SEQ ID NO: 62771 - protein, 8 aa, Homo sapiens
  misc_feature: Table A; Target 62771; HLA-C*01:02; PKHD1; ENSG00000170927; TAA
ASPVMDAL

SEQ ID NO: 62772 - protein, 10 aa, Homo sapiens
  misc_feature: Table A; Target 62772; HLA-A*31:01; PKHD1; ENSG00000170927; TAA
ASSALVFTSR

SEQ ID NO: 62773 - protein, 10 aa, Homo sapiens
  misc_feature: Table A; Target 62773; HLA-C*07:06; PKHD1; ENSG00000170927; TAA
ASSALVFTSR

SEQ ID NO: 62774 - protein, 9 aa, Homo sapiens
  misc_feature: Table A; Target 62774; HLA-B*58:01; PKHD1; ENSG00000170927; TAA
ATEQLLESW

SEQ ID NO: 62775 - protein, 11 aa, Homo sapiens
  misc_feature: Table A; Target 62775; HLA-A*26:01; PKHD1; ENSG00000170927; TAA
ATFDNFAPGNY

SEQ ID NO: 62776 - protein, 11 aa, Homo sapiens
  misc_feature: Table A; Target 62776; HLA-A*29:02; PKHD1; ENSG00000170927; TAA
ATFDNFAPGNY

SEQ ID NO: 62777 - protein, 11 aa, Homo sapiens
  misc_feature: Table A; Target 62777; HLA-A*30:02; PKHD1; ENSG00000170927; TAA
ATFDNFAPGNY

SEQ ID NO: 62778 - protein, 11 aa, Homo sapiens
  misc_feature: Table A; Target 62778; HLA-A*11:01; PKHD1; ENSG00000170927; TAA
ATGEDLFLNVK

SEQ ID NO: 62779 - protein, 8 aa, Homo sapiens
  misc_feature: Table A; Target 62779; HLA-C*01:02; PKHD1; ENSG00000170927; TAA
ATIRGSSL

SEQ ID NO: 62780 - protein, 8 aa, Homo sapiens
  misc_feature: Table A; Target 62780; HLA-C*03:03; PKHD1; ENSG00000170927; TAA
ATIRGSSL

SEQ ID NO: 62781 - protein, 8 aa, Homo sapiens
  misc_feature: Table A; Target 62781; HLA-C*03:04; PKHD1; ENSG00000170927; TAA
ATIRGSSL

SEQ ID NO: 62782 - protein, 8 aa, Homo sapiens
  misc_feature: Table A; Target 62782; HLA-B*46:01; PKHD1; ENSG00000170927; TAA
ATPVVTAM

SEQ ID NO: 62783 - protein, 8 aa, Homo sapiens
  misc_feature: Table A; Target 62783; HLA-C*01:02; PKHD1; ENSG00000170927; TAA
ATPVVTAM

SEQ ID NO: 62784 - protein, 9 aa, Homo sapiens
  misc_feature: Table A; Target 62784; HLA-A*25:01; PKHD1; ENSG00000170927; TAA
AVLISGSNW

SEQ ID NO: 62785 - protein, 9 aa, Homo sapiens
  misc_feature: Table A; Target 62785; HLA-B*58:01; PKHD1; ENSG00000170927; TAA
AVLISGSNW

SEQ ID NO: 62786 - protein, 9 aa, Homo sapiens
  misc_feature: Table A; Target 62786; HLA-A*03:01; PKHD1; ENSG00000170927; TAA
AVLPRAFTY

SEQ ID NO: 62787 - protein, 9 aa, Homo sapiens
  misc_feature: Table A; Target 62787; HLA-A*29:02; PKHD1; ENSG00000170927; TAA
AVLPRAFTY

SEQ ID NO: 62788 - protein, 9 aa, Homo sapiens
  misc_feature: Table A; Target 62788; HLA-A*30:02; PKHD1; ENSG00000170927; TAA
AVLPRAFTY

SEQ ID NO: 62789 - protein, 9 aa, Homo sapiens
  misc_feature: Table A; Target 62789; HLA-A*32:01; PKHD1; ENSG00000170927; TAA
AVLPRAFTY

SEQ ID NO: 62790 - protein, 9 aa, Homo sapiens
  misc_feature: Table A; Target 62790; HLA-B*57:01; PKHD1; ENSG00000170927; TAA
AVLPRAFTY

SEQ ID NO: 62791 - protein, 9 aa, Homo sapiens
  misc_feature: Table A; Target 62791; HLA-C*02:02; PKHD1; ENSG00000170927; TAA
AVLPRAFTY

SEQ ID NO: 62792 - protein, 9 aa, Homo sapiens
  misc_feature: Table A; Target 62792; HLA-C*16:01; PKHD1; ENSG00000170927; TAA
AVLPRAFTY

SEQ ID NO: 62793 - protein, 9 aa, Homo sapiens
  misc_feature: Table A; Target 62793; HLA-A*02:03; PKHD1; ENSG00000170927; TAA
AVMPRIMAI

SEQ ID NO: 62794 - protein, 9 aa, Homo sapiens
  misc_feature: Table A; Target 62794; HLA-A*02:04; PKHD1; ENSG00000170927; TAA
AVMPRIMAI

SEQ ID NO: 62795 - protein, 9 aa, Homo sapiens
  misc_feature: Table A; Target 62795; HLA-A*25:01; PKHD1; ENSG00000170927; TAA
AVMPRIMAI

SEQ ID NO: 62796 - protein, 9 aa, Homo sapiens
  misc_feature: Table A; Target 62796; HLA-A*32:01; PKHD1; ENSG00000170927; TAA
AVMPRIMAI

SEQ ID NO: 62797 - protein, 9 aa, Homo sapiens
  misc_feature: Table A; Target 62797; HLA-B*08:01; PKHD1; ENSG00000170927; TAA
AVMPRIMAI

SEQ ID NO: 62798 - protein, 9 aa, Homo sapiens
  misc_feature: Table A; Target 62798; HLA-B*37:01; PKHD1; ENSG00000170927; TAA
AVMPRIMAI

SEQ ID NO: 62799 - protein, 9 aa, Homo sapiens
  misc_feature: Table A; Target 62799; HLA-A*25:01; PKHD1; ENSG00000170927; TAA
AVRNGTLSL

SEQ ID NO: 62800 - protein, 9 aa, Homo sapiens
  misc_feature: Table A; Target 62800; HLA-A*32:01; PKHD1; ENSG00000170927; TAA
AVRNGTLSL

SEQ ID NO: 62801 - protein, 9 aa, Homo sapiens
  misc_feature: Table A; Target 62801; HLA-B*07:02; PKHD1; ENSG00000170927; TAA
AVRNGTLSL

SEQ ID NO: 62802 - protein, 9 aa, Homo sapiens
  misc_feature: Table A; Target 62802; HLA-B*46:01; PKHD1; ENSG00000170927; TAA
AVRNGTLSL

SEQ ID NO: 62803 - protein, 9 aa, Homo sapiens
  misc_feature: Table A; Target 62803; HLA-C*01:02; PKHD1; ENSG00000170927; TAA
AVRNGTLSL

SEQ ID NO: 62804 - protein, 9 aa, Homo sapiens
  misc_feature: Table A; Target 62804; HLA-C*07:02; PKHD1; ENSG00000170927; TAA
AVRNGTLSL

SEQ ID NO: 62805 - protein, 9 aa, Homo sapiens
  misc_feature: Table A; Target 62805; HLA-A*25:01; PKHD1; ENSG00000170927; TAA
AVTENFGCL

SEQ ID NO: 62806 - protein, 9 aa, Homo sapiens
  misc_feature: Table A; Target 62806; HLA-A*24:02; PKHD1; ENSG00000170927; TAA
AYKGHMNKI

SEQ ID NO: 62807 - protein, 10 aa, Homo sapiens
  misc_feature: Table A; Target 62807; HLA-A*24:02; PKHD1; ENSG00000170927; TAA
AYPKNSWTHL

SEQ ID NO: 62808 - protein, 8 aa, Homo sapiens
  misc_feature: Table A; Target 62808; HLA-A*24:02; PKHD1; ENSG00000170927; TAA
AYTVTNNL

SEQ ID NO: 62809 - protein, 8 aa, Homo sapiens
  misc_feature: Table A; Target 62809; HLA-C*14:02; PKHD1; ENSG00000170927; TAA
AYTVTNNL

SEQ ID NO: 62810 - protein, 8 aa, Homo sapiens
  misc_feature: Table A; Target 62810; HLA-B*37:01; PKHD1; ENSG00000170927; TAA
CDVETQSF

SEQ ID NO: 62811 - protein, 8 aa, Homo sapiens
  misc_feature: Table A; Target 62811; HLA-C*16:01; PKHD1; ENSG00000170927; TAA
CEAARHTY

SEQ ID NO: 62812 - protein, 9 aa, Homo sapiens
  misc_feature: Table A; Target 62812; HLA-B*49:01; PKHD1; ENSG00000170927; TAA
CEAARHTYV

SEQ ID NO: 62813 - protein, 9 aa, Homo sapiens
  misc_feature: Table A; Target 62813; HLA-A*30:01; PKHD1; ENSG00000170927; TAA
CETLPAPQI

SEQ ID NO: 62814 - protein, 9 aa, Homo sapiens
  misc_feature: Table A; Target 62814; HLA-B*49:01; PKHD1; ENSG00000170927; TAA
CETLPAPQI

SEQ ID NO: 62815 - protein, 10 aa, Homo sapiens
  misc_feature: Table A; Target 62815; HLA-B*49:01; PKHD1; ENSG00000170927; TAA
CETPNQPITV

SEQ ID NO: 62816 - protein, 11 aa, Homo sapiens
  misc_feature: Table A; Target 62816; HLA-A*11:01; PKHD1; ENSG00000170927; TAA
CSQGQGGFTVK

SEQ ID NO: 62817 - protein, 10 aa, Homo sapiens
  misc_feature: Table A; Target 62817; HLA-A*30:02; PKHD1; ENSG00000170927; TAA
CTQAETQDGY

SEQ ID NO: 62818 - protein, 11 aa, Homo sapiens
  misc_feature: Table A; Target 62818; HLA-A*30:02; PKHD1; ENSG00000170927; TAA
CVVPSLPAGEY

SEQ ID NO: 62819 - protein, 9 aa, Homo sapiens
  misc_feature: Table A; Target 62819; HLA-A*25:01; PKHD1; ENSG00000170927; TAA
DAIWAIQKL

SEQ ID NO: 62820 - protein, 9 aa, Homo sapiens
  misc_feature: Table A; Target 62820; HLA-A*26:01; PKHD1; ENSG00000170927; TAA
DAIWAIQKL

SEQ ID NO: 62821 - protein, 9 aa, Homo sapiens
  misc_feature: Table A; Target 62821; HLA-B*51:01; PKHD1; ENSG00000170927; TAA
DAIWAIQKL

SEQ ID NO: 62822 - protein, 9 aa, Homo sapiens
  misc_feature: Table A; Target 62822; HLA-A*33:01; PKHD1; ENSG00000170927; TAA
DALAPVHTQ

SEQ ID NO: 62823 - protein, 9 aa, Homo sapiens
  misc_feature: Table A; Target 62823; HLA-B*51:01; PKHD1; ENSG00000170927; TAA
DALAPVHTQ

SEQ ID NO: 62824 - protein, 8 aa, Homo sapiens
  misc_feature: Table A; Target 62824; HLA-B*35:03; PKHD1; ENSG00000170927; TAA
DAVEGLEL

SEQ ID NO: 62825 - protein, 8 aa, Homo sapiens
  misc_feature: Table A; Target 62825; HLA-B*51:01; PKHD1; ENSG00000170927; TAA
DAVEGLEL

SEQ ID NO: 62826 - protein, 8 aa, Homo sapiens
  misc_feature: Table A; Target 62826; HLA-C*03:03; PKHD1; ENSG00000170927; TAA
DAVEGLEL

SEQ ID NO: 62827 - protein, 8 aa, Homo sapiens
  misc_feature: Table A; Target 62827; HLA-C*03:04; PKHD1; ENSG00000170927; TAA
DAVEGLEL

SEQ ID NO: 62828 - protein, 8 aa, Homo sapiens
  misc_feature: Table A; Target 62828; HLA-B*18:01; PKHD1; ENSG00000170927; TAA
DDILTFAV

SEQ ID NO: 62829 - protein, 9 aa, Homo sapiens
  misc_feature: Table A; Target 62829; HLA-B*18:01; PKHD1; ENSG00000170927; TAA
DDILTFAVA

SEQ ID NO: 62830 - protein, 8 aa, Homo sapiens
  misc_feature: Table A; Target 62830; HLA-B*18:01; PKHD1; ENSG00000170927; TAA
DEIIIADT

SEQ ID NO: 62831 - protein, 9 aa, Homo sapiens
  misc_feature: Table A; Target 62831; HLA-B*18:01; PKHD1; ENSG00000170927; TAA
DEIIIADTN

SEQ ID NO: 62832 - protein, 8 aa, Homo sapiens
  misc_feature: Table A; Target 62832; HLA-B*18:01; PKHD1; ENSG00000170927; TAA
DEVLIYNS

SEQ ID NO: 62833 - protein, 9 aa, Homo sapiens
  misc_feature: Table A; Target 62833; HLA-B*18:01; PKHD1; ENSG00000170927; TAA
DEVLIYNSS

SEQ ID NO: 62834 - protein, 10 aa, Homo sapiens
  misc_feature: Table A; Target 62834; HLA-B*18:01; PKHD1; ENSG00000170927; TAA
DEVLIYNSSC

SEQ ID NO: 62835 - protein, 8 aa, Homo sapiens
  misc_feature: Table A; Target 62835; HLA-B*18:01; PKHD1; ENSG00000170927; TAA
DEVVIISG

SEQ ID NO: 62836 - protein, 9 aa, Homo sapiens
  misc_feature: Table A; Target 62836; HLA-B*18:01; PKHD1; ENSG00000170927; TAA
DEVVIISGT

SEQ ID NO: 62837 - protein, 11 aa, Homo sapiens
  misc_feature: Table A; Target 62837; HLA-B*18:01; PKHD1; ENSG00000170927; TAA
DEVVIISGTGV

SEQ ID NO: 62838 - protein, 11 aa, Homo sapiens
  misc_feature: Table A; Target 62838; HLA-A*23:01; PKHD1; ENSG00000170927; TAA
DFFDNSAQVTI

SEQ ID NO: 62839 - protein, 9 aa, Homo sapiens
  misc_feature: Table A; Target 62839; HLA-B*18:01; PKHD1; ENSG00000170927; TAA
DGLELGVLY

SEQ ID NO: 62840 - protein, 9 aa, Homo sapiens
  misc_feature: Table A; Target 62840; HLA-B*35:01; PKHD1; ENSG00000170927; TAA
DGLELGVLY

SEQ ID NO: 62841 - protein, 9 aa, Homo sapiens
  misc_feature: Table A; Target 62841; HLA-B*51:01; PKHD1; ENSG00000170927; TAA
DGRIVNVTV

SEQ ID NO: 62842 - protein, 11 aa, Homo sapiens
  misc_feature: Table A; Target 62842; HLA-A*33:01; PKHD1; ENSG00000170927; TAA
DGRIVNVTVIR

SEQ ID NO: 62843 - protein, 9 aa, Homo sapiens
  misc_feature: Table A; Target 62843; HLA-B*51:01; PKHD1; ENSG00000170927; TAA
DGYVSFYNL

SEQ ID NO: 62844 - protein, 10 aa, Homo sapiens
  misc_feature: Table A; Target 62844; HLA-B*38:01; PKHD1; ENSG00000170927; TAA
DHSISGIMKL

SEQ ID NO: 62845 - protein, 9 aa, Homo sapiens
  misc_feature: Table A; Target 62845; HLA-B*08:01; PKHD1; ENSG00000170927; TAA
DINLHGNVV

SEQ ID NO: 62846 - protein, 9 aa, Homo sapiens
  misc_feature: Table A; Target 62846; HLA-B*51:01; PKHD1; ENSG00000170927; TAA
DINLHGNVV

SEQ ID NO: 62847 - protein, 11 aa, Homo sapiens
  misc_feature: Table A; Target 62847; HLA-A*25:01; PKHD1; ENSG00000170927; TAA
DIVNLTEASIW

SEQ ID NO: 62848 - protein, 9 aa, Homo sapiens
  misc_feature: Table A; Target 62848; HLA-A*68:02; PKHD1; ENSG00000170927; TAA
DLAPGPHYL

SEQ ID NO: 62849 - protein, 9 aa, Homo sapiens
  misc_feature: Table A; Target 62849; HLA-B*38:01; PKHD1; ENSG00000170927; TAA
DLAPGPHYL

SEQ ID NO: 62850 - protein, 9 aa, Homo sapiens
  misc_feature: Table A; Target 62850; HLA-B*08:01; PKHD1; ENSG00000170927; TAA
DLDGRALGL

SEQ ID NO: 62851 - protein, 9 aa, Homo sapiens
  misc_feature: Table A; Target 62851; HLA-A*33:01; PKHD1; ENSG00000170927; TAA
DLFLNVKPR

SEQ ID NO: 62852 - protein, 9 aa, Homo sapiens
  misc_feature: Table A; Target 62852; HLA-A*33:01; PKHD1; ENSG00000170927; TAA
DLLPVGMHR

SEQ ID NO: 62853 - protein, 9 aa, Homo sapiens
  misc_feature: Table A; Target 62853; HLA-A*33:03; PKHD1; ENSG00000170927; TAA
DLLPVGMHR

SEQ ID NO: 62854 - protein, 8 aa, Homo sapiens
  misc_feature: Table A; Target 62854; HLA-B*51:01; PKHD1; ENSG00000170927; TAA
DLPNFIRV

SEQ ID NO: 62855 - protein, 11 aa, Homo sapiens
  misc_feature: Table A; Target 62855; HLA-A*33:01; PKHD1; ENSG00000170927; TAA
DLPPYPDILLR

SEQ ID NO: 62856 - protein, 8 aa, Homo sapiens
  misc_feature: Table A; Target 62856; HLA-B*08:01; PKHD1; ENSG00000170927; TAA
DLYLKSPL

SEQ ID NO: 62857 - protein, 9 aa, Homo sapiens
  misc_feature: Table A; Target 62857; HLA-A*33:01; PKHD1; ENSG00000170927; TAA
DLYLKSPLR

SEQ ID NO: 62858 - protein, 8 aa, Homo sapiens
  misc_feature: Table A; Target 62858; HLA-B*08:01; PKHD1; ENSG00000170927; TAA
DMRMKVML

SEQ ID NO: 62859 - protein, 8 aa, Homo sapiens
  misc_feature: Table A; Target 62859; HLA-B*08:01; PKHD1; ENSG00000170927; TAA
DNVAHSSL

SEQ ID NO: 62860 - protein, 9 aa, Homo sapiens
  misc_feature: Table A; Target 62860; HLA-B*51:01; PKHD1; ENSG00000170927; TAA
DPALVWVLV

SEQ ID NO: 62861 - protein, 8 aa, Homo sapiens
  misc_feature: Table A; Target 62861; HLA-B*35:01; PKHD1; ENSG00000170927; TAA
DPGTIGVY

SEQ ID NO: 62862 - protein, 8 aa, Homo sapiens
  misc_feature: Table A; Target 62862; HLA-B*35:01; PKHD1; ENSG00000170927; TAA
DPLPGASF

SEQ ID NO: 62863 - protein, 10 aa, Homo sapiens
  misc_feature: Table A; Target 62863; HLA-B*35:03; PKHD1; ENSG00000170927; TAA
DPLPGASFSL

SEQ ID NO: 62864 - protein, 9 aa, Homo sapiens
  misc_feature: Table A; Target 62864; HLA-A*23:01; PKHD1; ENSG00000170927; TAA
DQLPCNVTF

SEQ ID NO: 62865 - protein, 9 aa, Homo sapiens
  misc_feature: Table A; Target 62865; HLA-A*25:01; PKHD1; ENSG00000170927; TAA
DQTPQVLRF

SEQ ID NO: 62866 - protein, 9 aa, Homo sapiens
  misc_feature: Table A; Target 62866; HLA-A*26:01; PKHD1; ENSG00000170927; TAA
DQTPQVLRF

SEQ ID NO: 62867 - protein, 9 aa, Homo sapiens
  misc_feature: Table A; Target 62867; HLA-B*18:01; PKHD1; ENSG00000170927; TAA
DQTPQVLRF

SEQ ID NO: 62868 - protein, 9 aa, Homo sapiens
  misc_feature: Table A; Target 62868; HLA-B*44:03; PKHD1; ENSG00000170927; TAA
DQTPQVLRF

SEQ ID NO: 62869 - protein, 8 aa, Homo sapiens
  misc_feature: Table A; Target 62869; HLA-B*08:01; PKHD1; ENSG00000170927; TAA
DQYTHLCL

SEQ ID NO: 62870 - protein, 10 aa, Homo sapiens
  misc_feature: Table A; Target 62870; HLA-A*25:01; PKHD1; ENSG00000170927; TAA
DSQASLHFSW

SEQ ID NO: 62871 - protein, 9 aa, Homo sapiens
  misc_feature: Table A; Target 62871; HLA-B*51:01; PKHD1; ENSG00000170927; TAA
DSQFLQVTV

SEQ ID NO: 62872 - protein, 9 aa, Homo sapiens
  misc_feature: Table A; Target 62872; HLA-B*08:01; PKHD1; ENSG00000170927; TAA
DSRNKTTTV

SEQ ID NO: 62873 - protein, 9 aa, Homo sapiens
  misc_feature: Table A; Target 62873; HLA-B*51:01; PKHD1; ENSG00000170927; TAA
DSRNKTTTV

SEQ ID NO: 62874 - protein, 11 aa, Homo sapiens
  misc_feature: Table A; Target 62874; HLA-A*33:01; PKHD1; ENSG00000170927; TAA
DSRNKTTTVNY

SEQ ID NO: 62875 - protein, 8 aa, Homo sapiens
  misc_feature: Table A; Target 62875; HLA-A*01:01; PKHD1; ENSG00000170927; TAA
DTDLPFFK

SEQ ID NO: 62876 - protein, 11 aa, Homo sapiens
  misc_feature: Table A; Target 62876; HLA-A*01:01; PKHD1; ENSG00000170927; TAA
DTDLPFFKGLY

SEQ ID NO: 62877 - protein, 9 aa, Homo sapiens
  misc_feature: Table A; Target 62877; HLA-A*25:01; PKHD1; ENSG00000170927; TAA
DTLSNPRGW

SEQ ID NO: 62878 - protein, 9 aa, Homo sapiens
  misc_feature: Table A; Target 62878; HLA-A*25:01; PKHD1; ENSG00000170927; TAA
DTNTSILNL

SEQ ID NO: 62879 - protein, 9 aa, Homo sapiens
  misc_feature: Table A; Target 62879; HLA-A*26:01; PKHD1; ENSG00000170927; TAA
DTNTSILNL

SEQ ID NO: 62880 - protein, 9 aa, Homo sapiens
  misc_feature: Table A; Target 62880; HLA-A*33:01; PKHD1; ENSG00000170927; TAA
DTNTSILNL

SEQ ID NO: 62881 - protein, 8 aa, Homo sapiens
  misc_feature: Table A; Target 62881; HLA-A*33:01; PKHD1; ENSG00000170927; TAA
DVLILPNR

SEQ ID NO: 62882 - protein, 9 aa, Homo sapiens
  misc_feature: Table A; Target 62882; HLA-A*25:01; PKHD1; ENSG00000170927; TAA
DVPVQISAH

SEQ ID NO: 62883 - protein, 9 aa, Homo sapiens
  misc_feature: Table A; Target 62883; HLA-A*26:01; PKHD1; ENSG00000170927; TAA
DVPVQISAH

SEQ ID NO: 62884 - protein, 10 aa, Homo sapiens
  misc_feature: Table A; Target 62884; HLA-A*23:01; PKHD1; ENSG00000170927; TAA
DYIGSQNVSF

SEQ ID NO: 62885 - protein, 10 aa, Homo sapiens
  misc_feature: Table A; Target 62885; HLA-A*24:02; PKHD1; ENSG00000170927; TAA
DYIGSQNVSF

SEQ ID NO: 62886 - protein, 10 aa, Homo sapiens
  misc_feature: Table A; Target 62886; HLA-A*25:01; PKHD1; ENSG00000170927; TAA
DYIGSQNVSF

SEQ ID NO: 62887 - protein, 10 aa, Homo sapiens
  misc_feature: Table A; Target 62887; HLA-A*33:03; PKHD1; ENSG00000170927; TAA
DYIGSQNVSF

SEQ ID NO: 62888 - protein, 10 aa, Homo sapiens
  misc_feature: Table A; Target 62888; HLA-C*14:02; PKHD1; ENSG00000170927; TAA
DYIGSQNVSF

SEQ ID NO: 62889 - protein, 10 aa, Homo sapiens
  misc_feature: Table A; Target 62889; HLA-A*24:02; PKHD1; ENSG00000170927; TAA
DYSAVLPRAF

SEQ ID NO: 62890 - protein, 8 aa, Homo sapiens
  misc_feature: Table A; Target 62890; HLA-B*51:01; PKHD1; ENSG00000170927; TAA
EAAATPVV

SEQ ID NO: 62891 - protein, 11 aa, Homo sapiens
  misc_feature: Table A; Target 62891; HLA-A*26:01; PKHD1; ENSG00000170927; TAA
EAAATPVVTAM

SEQ ID NO: 62892 - protein, 11 aa, Homo sapiens
  misc_feature: Table A; Target 62892; HLA-A*68:01; PKHD1; ENSG00000170927; TAA
EAAATPVVTAM

SEQ ID NO: 62893 - protein, 11 aa, Homo sapiens
  misc_feature: Table A; Target 62893; HLA-B*35:01; PKHD1; ENSG00000170927; TAA
EAAATPVVTAM

SEQ ID NO: 62894 - protein, 11 aa, Homo sapiens
  misc_feature: Table A; Target 62894; HLA-C*07:06; PKHD1; ENSG00000170927; TAA
EAAATPVVTAM

SEQ ID NO: 62895 - protein, 9 aa, Homo sapiens
  misc_feature: Table A; Target 62895; HLA-B*51:01; PKHD1; ENSG00000170927; TAA
EAGIYPLQV

SEQ ID NO: 62896 - protein, 10 aa, Homo sapiens
  misc_feature: Table A; Target 62896; HLA-A*33:03; PKHD1; ENSG00000170927; TAA
EAGIYPLQVR

SEQ ID NO: 62897 - protein, 10 aa, Homo sapiens
  misc_feature: Table A; Target 62897; HLA-A*68:01; PKHD1; ENSG00000170927; TAA
EAGIYPLQVR

SEQ ID NO: 62898 - protein, 9 aa, Homo sapiens
  misc_feature: Table A; Target 62898; HLA-A*25:01; PKHD1; ENSG00000170927; TAA
EASPVMDAL

SEQ ID NO: 62899 - protein, 9 aa, Homo sapiens
  misc_feature: Table A; Target 62899; HLA-A*26:01; PKHD1; ENSG00000170927; TAA
EASPVMDAL

SEQ ID NO: 62900 - protein, 9 aa, Homo sapiens
  misc_feature: Table A; Target 62900; HLA-A*68:01; PKHD1; ENSG00000170927; TAA
EASPVMDAL

SEQ ID NO: 62901 - protein, 9 aa, Homo sapiens
  misc_feature: Table A; Target 62901; HLA-A*68:02; PKHD1; ENSG00000170927; TAA
EASPVMDAL

SEQ ID NO: 62902 - protein, 9 aa, Homo sapiens
  misc_feature: Table A; Target 62902; HLA-B*35:01; PKHD1; ENSG00000170927; TAA
EASPVMDAL

SEQ ID NO: 62903 - protein, 9 aa, Homo sapiens
  misc_feature: Table A; Target 62903; HLA-B*35:03; PKHD1; ENSG00000170927; TAA
EASPVMDAL

SEQ ID NO: 62904 - protein, 9 aa, Homo sapiens
  misc_feature: Table A; Target 62904; HLA-B*38:01; PKHD1; ENSG00000170927; TAA
EASPVMDAL

SEQ ID NO: 62905 - protein, 9 aa, Homo sapiens
  misc_feature: Table A; Target 62905; HLA-B*39:01; PKHD1; ENSG00000170927; TAA
EASPVMDAL

SEQ ID NO: 62906 - protein, 9 aa, Homo sapiens
  misc_feature: Table A; Target 62906; HLA-C*03:03; PKHD1; ENSG00000170927; TAA
EASPVMDAL

SEQ ID NO: 62907 - protein, 9 aa, Homo sapiens
  misc_feature: Table A; Target 62907; HLA-C*03:04; PKHD1; ENSG00000170927; TAA
EASPVMDAL

SEQ ID NO: 62908 - protein, 9 aa, Homo sapiens
  misc_feature: Table A; Target 62908; HLA-C*07:06; PKHD1; ENSG00000170927; TAA
EASPVMDAL

SEQ ID NO: 62909 - protein, 8 aa, Homo sapiens
  misc_feature: Table A; Target 62909; HLA-C*03:03; PKHD1; ENSG00000170927; TAA
EAYFGGQL

SEQ ID NO: 62910 - protein, 8 aa, Homo sapiens
  misc_feature: Table A; Target 62910; HLA-C*03:04; PKHD1; ENSG00000170927; TAA
EAYFGGQL

SEQ ID NO: 62911 - protein, 8 aa, Homo sapiens
  misc_feature: Table A; Target 62911; HLA-C*05:01; PKHD1; ENSG00000170927; TAA
EAYFGGQL

SEQ ID NO: 62912 - protein, 9 aa, Homo sapiens
  misc_feature: Table A; Target 62912; HLA-A*26:01; PKHD1; ENSG00000170927; TAA
EAYFGGQLV

SEQ ID NO: 62913 - protein, 9 aa, Homo sapiens
  misc_feature: Table A; Target 62913; HLA-A*68:02; PKHD1; ENSG00000170927; TAA
EAYFGGQLV

SEQ ID NO: 62914 - protein, 9 aa, Homo sapiens
  misc_feature: Table A; Target 62914; HLA-B*51:01; PKHD1; ENSG00000170927; TAA
EAYFGGQLV

SEQ ID NO: 62915 - protein, 10 aa, Homo sapiens
  misc_feature: Table A; Target 62915; HLA-A*30:01; PKHD1; ENSG00000170927; TAA
EEASPVMDAL

SEQ ID NO: 62916 - protein, 10 aa, Homo sapiens
  misc_feature: Table A; Target 62916; HLA-B*39:01; PKHD1; ENSG00000170927; TAA
EEASPVMDAL

SEQ ID NO: 62917 - protein, 10 aa, Homo sapiens
  misc_feature: Table A; Target 62917; HLA-B*40:01; PKHD1; ENSG00000170927; TAA
EEASPVMDAL

SEQ ID NO: 62918 - protein, 10 aa, Homo sapiens
  misc_feature: Table A; Target 62918; HLA-B*44:03; PKHD1; ENSG00000170927; TAA
EEASPVMDAL

SEQ ID NO: 62919 - protein, 9 aa, Homo sapiens
  misc_feature: Table A; Target 62919; HLA-A*30:01; PKHD1; ENSG00000170927; TAA
EEFSGVLQL

SEQ ID NO: 62920 - protein, 9 aa, Homo sapiens
  misc_feature: Table A; Target 62920; HLA-B*18:01; PKHD1; ENSG00000170927; TAA
EEFSGVLQL

SEQ ID NO: 62921 - protein, 9 aa, Homo sapiens
  misc_feature: Table A; Target 62921; HLA-B*40:01; PKHD1; ENSG00000170927; TAA
EEFSGVLQL

SEQ ID NO: 62922 - protein, 9 aa, Homo sapiens
  misc_feature: Table A; Target 62922; HLA-B*44:02; PKHD1; ENSG00000170927; TAA
EEFSGVLQL

SEQ ID NO: 62923 - protein, 9 aa, Homo sapiens
  misc_feature: Table A; Target 62923; HLA-B*44:03; PKHD1; ENSG00000170927; TAA
EEFSGVLQL

SEQ ID NO: 62924 - protein, 9 aa, Homo sapiens
  misc_feature: Table A; Target 62924; HLA-B*49:01; PKHD1; ENSG00000170927; TAA
EEFSGVLQL

SEQ ID NO: 62925 - protein, 9 aa, Homo sapiens
  misc_feature: Table A; Target 62925; HLA-C*16:04; PKHD1; ENSG00000170927; TAA
EEFSGVLQL

SEQ ID NO: 62926 - protein, 10 aa, Homo sapiens
  misc_feature: Table A; Target 62926; HLA-B*40:01; PKHD1; ENSG00000170927; TAA
EEFSGVLQLL

SEQ ID NO: 62927 - protein, 10 aa, Homo sapiens
  misc_feature: Table A; Target 62927; HLA-B*44:02; PKHD1; ENSG00000170927; TAA
EEFSGVLQLL

SEQ ID NO: 62928 - protein, 10 aa, Homo sapiens
  misc_feature: Table A; Target 62928; HLA-B*44:03; PKHD1; ENSG00000170927; TAA
EEFSGVLQLL

SEQ ID NO: 62929 - protein, 10 aa, Homo sapiens
  misc_feature: Table A; Target 62929; HLA-B*44:02; PKHD1; ENSG00000170927; TAA
EEGSLAGGTW

SEQ ID NO: 62930 - protein, 10 aa, Homo sapiens
  misc_feature: Table A; Target 62930; HLA-B*44:03; PKHD1; ENSG00000170927; TAA
EEGSLAGGTW

SEQ ID NO: 62931 - protein, 9 aa, Homo sapiens
  misc_feature: Table A; Target 62931; HLA-A*30:01; PKHD1; ENSG00000170927; TAA
EEIVTVETV

SEQ ID NO: 62932 - protein, 9 aa, Homo sapiens
  misc_feature: Table A; Target 62932; HLA-B*18:01; PKHD1; ENSG00000170927; TAA
EEIVTVETV

SEQ ID NO: 62933 - protein, 9 aa, Homo sapiens
  misc_feature: Table A; Target 62933; HLA-B*40:01; PKHD1; ENSG00000170927; TAA
EEIVTVETV

SEQ ID NO: 62934 - protein, 9 aa, Homo sapiens
  misc_feature: Table A; Target 62934; HLA-B*44:03; PKHD1; ENSG00000170927; TAA
EEIVTVETV

SEQ ID NO: 62935 - protein, 9 aa, Homo sapiens
  misc_feature: Table A; Target 62935; HLA-B*49:01; PKHD1; ENSG00000170927; TAA
EEIVTVETV

SEQ ID NO: 62936 - protein, 8 aa, Homo sapiens
  misc_feature: Table A; Target 62936; HLA-B*18:01; PKHD1; ENSG00000170927; TAA
EELLAVKC

SEQ ID NO: 62937 - protein, 9 aa, Homo sapiens
  misc_feature: Table A; Target 62937; HLA-A*23:01; PKHD1; ENSG00000170927; TAA
EFSGVLQLL

SEQ ID NO: 62938 - protein, 10 aa, Homo sapiens
  misc_feature: Table A; Target 62938; HLA-A*25:01; PKHD1; ENSG00000170927; TAA
EFSNVSAGSW

SEQ ID NO: 62939 - protein, 9 aa, Homo sapiens
  misc_feature: Table A; Target 62939; HLA-C*07:06; PKHD1; ENSG00000170927; TAA
EGASDSVLK

SEQ ID NO: 62940 - protein, 10 aa, Homo sapiens
  misc_feature: Table A; Target 62940; HLA-A*25:01; PKHD1; ENSG00000170927; TAA
EGDPLPGASF

SEQ ID NO: 62941 - protein, 10 aa, Homo sapiens
  misc_feature: Table A; Target 62941; HLA-C*05:01; PKHD1; ENSG00000170927; TAA
EGDPLPGASF

SEQ ID NO: 62942 - protein, 9 aa, Homo sapiens
  misc_feature: Table A; Target 62942; HLA-B*54:01; PKHD1; ENSG00000170927; TAA
EGMPPTISA

SEQ ID NO: 62943 - protein, 9 aa, Homo sapiens
  misc_feature: Table A; Target 62943; HLA-B*56:01; PKHD1; ENSG00000170927; TAA
EGMPPTISA

SEQ ID NO: 62944 - protein, 9 aa, Homo sapiens
  misc_feature: Table A; Target 62944; HLA-A*33:01; PKHD1; ENSG00000170927; TAA
EGQVQVILR

SEQ ID NO: 62945 - protein, 9 aa, Homo sapiens
  misc_feature: Table A; Target 62945; HLA-A*33:03; PKHD1; ENSG00000170927; TAA
EGQVQVILR

SEQ ID NO: 62946 - protein, 9 aa, Homo sapiens
  misc_feature: Table A; Target 62946; HLA-A*68:01; PKHD1; ENSG00000170927; TAA
EGQVQVILR

SEQ ID NO: 62947 - protein, 9 aa, Homo sapiens
  misc_feature: Table A; Target 62947; HLA-C*07:06; PKHD1; ENSG00000170927; TAA
EGQVQVILR

SEQ ID NO: 62948 - protein, 9 aa, Homo sapiens
  misc_feature: Table A; Target 62948; HLA-A*33:03; PKHD1; ENSG00000170927; TAA
EHHGIAPSR

SEQ ID NO: 62949 - protein, 9 aa, Homo sapiens
  misc_feature: Table A; Target 62949; HLA-A*33:01; PKHD1; ENSG00000170927; TAA
EIGDSPTVR

SEQ ID NO: 62950 - protein, 9 aa, Homo sapiens
  misc_feature: Table A; Target 62950; HLA-A*33:03; PKHD1; ENSG00000170927; TAA
EIGDSPTVR

SEQ ID NO: 62951 - protein, 9 aa, Homo sapiens
  misc_feature: Table A; Target 62951; HLA-A*68:01; PKHD1; ENSG00000170927; TAA
EIGDSPTVR

SEQ ID NO: 62952 - protein, 9 aa, Homo sapiens
  misc_feature: Table A; Target 62952; HLA-C*07:06; PKHD1; ENSG00000170927; TAA
EIGDSPTVR

SEQ ID NO: 62953 - protein, 10 aa, Homo sapiens
  misc_feature: Table A; Target 62953; HLA-A*25:01; PKHD1; ENSG00000170927; TAA
EIQNFGSPLY

SEQ ID NO: 62954 - protein, 10 aa, Homo sapiens
  misc_feature: Table A; Target 62954; HLA-A*26:01; PKHD1; ENSG00000170927; TAA
EIQNFGSPLY

SEQ ID NO: 62955 - protein, 10 aa, Homo sapiens
  misc_feature: Table A; Target 62955; HLA-A*30:02; PKHD1; ENSG00000170927; TAA
EIQNFGSPLY

SEQ ID NO: 62956 - protein, 9 aa, Homo sapiens
  misc_feature: Table A; Target 62956; HLA-A*25:01; PKHD1; ENSG00000170927; TAA
EITNSSLSL

SEQ ID NO: 62957 - protein, 10 aa, Homo sapiens
  misc_feature: Table A; Target 62957; HLA-A*01:01; PKHD1; ENSG00000170927; TAA
ELDCASPRKY

SEQ ID NO: 62958 - protein, 9 aa, Homo sapiens
  misc_feature: Table A; Target 62958; HLA-A*26:01; PKHD1; ENSG00000170927; TAA
ELLGGAMYY

SEQ ID NO: 62959 - protein, 9 aa, Homo sapiens
  misc_feature: Table A; Target 62959; HLA-A*29:02; PKHD1; ENSG00000170927; TAA
ELLGGAMYY

SEQ ID NO: 62960 - protein, 9 aa, Homo sapiens
  misc_feature: Table A; Target 62960; HLA-A*23:01; PKHD1; ENSG00000170927; TAA
ELMVSNTTF

SEQ ID NO: 62961 - protein, 9 aa, Homo sapiens
  misc_feature: Table A; Target 62961; HLA-A*25:01; PKHD1; ENSG00000170927; TAA
ELMVSNTTF

SEQ ID NO: 62962 - protein, 9 aa, Homo sapiens
  misc_feature: Table A; Target 62962; HLA-A*26:01; PKHD1; ENSG00000170927; TAA
ELMVSNTTF

SEQ ID NO: 62963 - protein, 9 aa, Homo sapiens
  misc_feature: Table A; Target 62963; HLA-B*15:01; PKHD1; ENSG00000170927; TAA
ELMVSNTTF

SEQ ID NO: 62964 - protein, 9 aa, Homo sapiens
  misc_feature: Table A; Target 62964; HLA-A*01:01; PKHD1; ENSG00000170927; TAA
ELTEATPGY

SEQ ID NO: 62965 - protein, 9 aa, Homo sapiens
  misc_feature: Table A; Target 62965; HLA-A*25:01; PKHD1; ENSG00000170927; TAA
ELTEATPGY

SEQ ID NO: 62966 - protein, 9 aa, Homo sapiens
  misc_feature: Table A; Target 62966; HLA-A*26:01; PKHD1; ENSG00000170927; TAA
ELTEATPGY

SEQ ID NO: 62967 - protein, 9 aa, Homo sapiens
  misc_feature: Table A; Target 62967; HLA-A*30:02; PKHD1; ENSG00000170927; TAA
ELTEATPGY

SEQ ID NO: 62968 - protein, 9 aa, Homo sapiens
  misc_feature: Table A; Target 62968; HLA-A*68:02; PKHD1; ENSG00000170927; TAA
ENSGIMHPI

SEQ ID NO: 62969 - protein, 8 aa, Homo sapiens
  misc_feature: Table A; Target 62969; HLA-B*35:03; PKHD1; ENSG00000170927; TAA
EPHEAEVL

SEQ ID NO: 62970 - protein, 9 aa, Homo sapiens
  misc_feature: Table A; Target 62970; HLA-B*56:01; PKHD1; ENSG00000170927; TAA
EPIEIRSGV

SEQ ID NO: 62971 - protein, 11 aa, Homo sapiens
  misc_feature: Table A; Target 62971; HLA-A*25:01; PKHD1; ENSG00000170927; TAA
EPIEIRSGVSI

SEQ ID NO: 62972 - protein, 11 aa, Homo sapiens
  misc_feature: Table A; Target 62972; HLA-B*07:02; PKHD1; ENSG00000170927; TAA
EPIEIRSGVSI

SEQ ID NO: 62973 - protein, 11 aa, Homo sapiens
  misc_feature: Table A; Target 62973; HLA-B*35:03; PKHD1; ENSG00000170927; TAA
EPIEIRSGVSI

SEQ ID NO: 62974 - protein, 11 aa, Homo sapiens
  misc_feature: Table A; Target 62974; HLA-B*51:01; PKHD1; ENSG00000170927; TAA
EPIEIRSGVSI

SEQ ID NO: 62975 - protein, 8 aa, Homo sapiens
  misc_feature: Table A; Target 62975; HLA-B*08:01; PKHD1; ENSG00000170927; TAA
EPRTKVKV

SEQ ID NO: 62976 - protein, 9 aa, Homo sapiens
  misc_feature: Table A; Target 62976; HLA-B*35:03; PKHD1; ENSG00000170927; TAA
EPWTISASL

SEQ ID NO: 62977 - protein, 8 aa, Homo sapiens
  misc_feature: Table A; Target 62977; HLA-B*08:01; PKHD1; ENSG00000170927; TAA
EQLLRYQL

SEQ ID NO: 62978 - protein, 9 aa, Homo sapiens
  misc_feature: Table A; Target 62978; HLA-B*08:01; PKHD1; ENSG00000170927; TAA
EQNRRVESL

SEQ ID NO: 62979 - protein, 10 aa, Homo sapiens
  misc_feature: Table A; Target 62979; HLA-A*33:01; PKHD1; ENSG00000170927; TAA
ESAGGAQIFR

SEQ ID NO: 62980 - protein, 10 aa, Homo sapiens
  misc_feature: Table A; Target 62980; HLA-A*33:03; PKHD1; ENSG00000170927; TAA
ESAGGAQIFR

SEQ ID NO: 62981 - protein, 10 aa, Homo sapiens
  misc_feature: Table A; Target 62981; HLA-A*68:01; PKHD1; ENSG00000170927; TAA
ESAGGAQIFR

SEQ ID NO: 62982 - protein, 10 aa, Homo sapiens
  misc_feature: Table A; Target 62982; HLA-C*07:06; PKHD1; ENSG00000170927; TAA
ESAGGAQIFR

SEQ ID NO: 62983 - protein, 8 aa, Homo sapiens
  misc_feature: Table A; Target 62983; HLA-C*05:01; PKHD1; ENSG00000170927; TAA
ESDANTSV

SEQ ID NO: 62984 - protein, 9 aa, Homo sapiens
  misc_feature: Table A; Target 62984; HLA-B*51:01; PKHD1; ENSG00000170927; TAA
ESFIQGCTV

SEQ ID NO: 62985 - protein, 10 aa, Homo sapiens
  misc_feature: Table A; Target 62985; HLA-A*33:03; PKHD1; ENSG00000170927; TAA
ESFIQGCTVR

SEQ ID NO: 62986 - protein, 10 aa, Homo sapiens
  misc_feature: Table A; Target 62986; HLA-A*68:01; PKHD1; ENSG00000170927; TAA
ESFIQGCTVR

SEQ ID NO: 62987 - protein, 10 aa, Homo sapiens
  misc_feature: Table A; Target 62987; HLA-C*07:06; PKHD1; ENSG00000170927; TAA
ESFIQGCTVR

SEQ ID NO: 62988 - protein, 10 aa, Homo sapiens
  misc_feature: Table A; Target 62988; HLA-A*25:01; PKHD1; ENSG00000170927; TAA
ESMFPSFSGL

SEQ ID NO: 62989 - protein, 10 aa, Homo sapiens
  misc_feature: Table A; Target 62989; HLA-A*26:01; PKHD1; ENSG00000170927; TAA
ESMFPSFSGL

SEQ ID NO: 62990 - protein, 9 aa, Homo sapiens
  misc_feature: Table A; Target 62990; HLA-A*01:01; PKHD1; ENSG00000170927; TAA
ETFDFDAEY

SEQ ID NO: 62991 - protein, 9 aa, Homo sapiens
  misc_feature: Table A; Target 62991; HLA-A*25:01; PKHD1; ENSG00000170927; TAA
ETFDFDAEY

SEQ ID NO: 62992 - protein, 9 aa, Homo sapiens
  misc_feature: Table A; Target 62992; HLA-A*26:01; PKHD1; ENSG00000170927; TAA
ETFDFDAEY

SEQ ID NO: 62993 - protein, 10 aa, Homo sapiens
  misc_feature: Table A; Target 62993; HLA-A*68:02; PKHD1; ENSG00000170927; TAA
ETFDFDAEYI

SEQ ID NO: 62994 - protein, 9 aa, Homo sapiens
  misc_feature: Table A; Target 62994; HLA-A*25:01; PKHD1; ENSG00000170927; TAA
ETISKVIVI

SEQ ID NO: 62995 - protein, 9 aa, Homo sapiens
  misc_feature: Table A; Target 62995; HLA-A*26:01; PKHD1; ENSG00000170927; TAA
ETISKVIVI

SEQ ID NO: 62996 - protein, 9 aa, Homo sapiens
  misc_feature: Table A; Target 62996; HLA-A*33:03; PKHD1; ENSG00000170927; TAA
ETISKVIVI

SEQ ID NO: 62997 - protein, 9 aa, Homo sapiens
  misc_feature: Table A; Target 62997; HLA-A*68:02; PKHD1; ENSG00000170927; TAA
ETISKVIVI

SEQ ID NO: 62998 - protein, 11 aa, Homo sapiens
  misc_feature: Table A; Target 62998; HLA-A*68:02; PKHD1; ENSG00000170927; TAA
ETISKVIVIEI

SEQ ID NO: 62999 - protein, 10 aa, Homo sapiens
  misc_feature: Table A; Target 62999; HLA-A*33:03; PKHD1; ENSG00000170927; TAA
ETLKAIADSR

SEQ ID NO: 63000 - protein, 9 aa, Homo sapiens
  misc_feature: Table A; Target 63000; HLA-A*33:01; PKHD1; ENSG00000170927; TAA
ETLVIGVAR

SEQ ID NO: 63001 - protein, 9 aa, Homo sapiens
  misc_feature: Table A; Target 63001; HLA-A*33:03; PKHD1; ENSG00000170927; TAA
ETLVIGVAR

SEQ ID NO: 63002 - protein, 9 aa, Homo sapiens
  misc_feature: Table A; Target 63002; HLA-A*68:01; PKHD1; ENSG00000170927; TAA
ETLVIGVAR

SEQ ID NO: 63003 - protein, 9 aa, Homo sapiens
  misc_feature: Table A; Target 63003; HLA-C*07:06; PKHD1; ENSG00000170927; TAA
ETLVIGVAR

SEQ ID NO: 63004 - protein, 10 aa, Homo sapiens
  misc_feature: Table A; Target 63004; HLA-A*25:01; PKHD1; ENSG00000170927; TAA
ETLVIGVARL

SEQ ID NO: 63005 - protein, 9 aa, Homo sapiens
  misc_feature: Table A; Target 63005; HLA-A*26:01; PKHD1; ENSG00000170927; TAA
ETPNQPITV

SEQ ID NO: 63006 - protein, 9 aa, Homo sapiens
  misc_feature: Table A; Target 63006; HLA-A*68:02; PKHD1; ENSG00000170927; TAA
ETPNQPITV

SEQ ID NO: 63007 - protein, 10 aa, Homo sapiens
  misc_feature: Table A; Target 63007; HLA-A*33:03; PKHD1; ENSG00000170927; TAA
ETPNQPITVK

SEQ ID NO: 63008 - protein, 10 aa, Homo sapiens
  misc_feature: Table A; Target 63008; HLA-A*68:01; PKHD1; ENSG00000170927; TAA
ETPNQPITVK

SEQ ID NO: 63009 - protein, 10 aa, Homo sapiens
  misc_feature: Table A; Target 63009; HLA-C*07:06; PKHD1; ENSG00000170927; TAA
ETPNQPITVK

SEQ ID NO: 63010 - protein, 11 aa, Homo sapiens
  misc_feature: Table A; Target 63010; HLA-A*68:02; PKHD1; ENSG00000170927; TAA
ETPNQPITVKI

SEQ ID NO: 63011 - protein, 9 aa, Homo sapiens
  misc_feature: Table A; Target 63011; HLA-A*25:01; PKHD1; ENSG00000170927; TAA
ETQDGYVSF

SEQ ID NO: 63012 - protein, 9 aa, Homo sapiens
  misc_feature: Table A; Target 63012; HLA-A*26:01; PKHD1; ENSG00000170927; TAA
ETQDGYVSF

SEQ ID NO: 63013 - protein, 9 aa, Homo sapiens
  misc_feature: Table A; Target 63013; HLA-A*33:01; PKHD1; ENSG00000170927; TAA
ETQDGYVSF

SEQ ID NO: 63014 - protein, 9 aa, Homo sapiens
  misc_feature: Table A; Target 63014; HLA-A*33:03; PKHD1; ENSG00000170927; TAA
ETQDGYVSF

SEQ ID NO: 63015 - protein, 10 aa, Homo sapiens
  misc_feature: Table A; Target 63015; HLA-A*01:01; PKHD1; ENSG00000170927; TAA
ETQDGYVSFY

SEQ ID NO: 63016 - protein, 10 aa, Homo sapiens
  misc_feature: Table A; Target 63016; HLA-A*25:01; PKHD1; ENSG00000170927; TAA
ETQDGYVSFY

SEQ ID NO: 63017 - protein, 10 aa, Homo sapiens
  misc_feature: Table A; Target 63017; HLA-A*26:01; PKHD1; ENSG00000170927; TAA
ETQDGYVSFY

SEQ ID NO: 63018 - protein, 10 aa, Homo sapiens
  misc_feature: Table A; Target 63018; HLA-A*30:02; PKHD1; ENSG00000170927; TAA
ETQDGYVSFY

SEQ ID NO: 63019 - protein, 10 aa, Homo sapiens
  misc_feature: Table A; Target 63019; HLA-A*33:01; PKHD1; ENSG00000170927; TAA
ETQDGYVSFY

SEQ ID NO: 63020 - protein, 10 aa, Homo sapiens
  misc_feature: Table A; Target 63020; HLA-A*33:03; PKHD1; ENSG00000170927; TAA
ETQDGYVSFY

SEQ ID NO: 63021 - protein, 10 aa, Homo sapiens
  misc_feature: Table A; Target 63021; HLA-A*68:01; PKHD1; ENSG00000170927; TAA
ETQDGYVSFY

SEQ ID NO: 63022 - protein, 9 aa, Homo sapiens
  misc_feature: Table A; Target 63022; HLA-A*01:01; PKHD1; ENSG00000170927; TAA
ETVQDTDLY

SEQ ID NO: 63023 - protein, 9 aa, Homo sapiens
  misc_feature: Table A; Target 63023; HLA-A*26:01; PKHD1; ENSG00000170927; TAA
ETVQDTDLY

SEQ ID NO: 63024 - protein, 11 aa, Homo sapiens
  misc_feature: Table A; Target 63024; HLA-A*11:01; PKHD1; ENSG00000170927; TAA
ETVQDTDLYLK

SEQ ID NO: 63025 - protein, 11 aa, Homo sapiens
  misc_feature: Table A; Target 63025; HLA-A*68:01; PKHD1; ENSG00000170927; TAA
ETVQDTDLYLK

SEQ ID NO: 63026 - protein, 11 aa, Homo sapiens
  misc_feature: Table A; Target 63026; HLA-A*68:02; PKHD1; ENSG00000170927; TAA
ETVQDTDLYLK

SEQ ID NO: 63027 - protein, 11 aa, Homo sapiens
  misc_feature: Table A; Target 63027; HLA-B*27:02; PKHD1; ENSG00000170927; TAA
ETVQDTDLYLK

SEQ ID NO: 63028 - protein, 10 aa, Homo sapiens
  misc_feature: Table A; Target 63028; HLA-A*25:01; PKHD1; ENSG00000170927; TAA
ETWQGVEEGW

SEQ ID NO: 63029 - protein, 10 aa, Homo sapiens
  misc_feature: Table A; Target 63029; HLA-B*57:01; PKHD1; ENSG00000170927; TAA
ETWQGVEEGW

SEQ ID NO: 63030 - protein, 11 aa, Homo sapiens
  misc_feature: Table A; Target 63030; HLA-A*25:01; PKHD1; ENSG00000170927; TAA
ETYSLQSENLW

SEQ ID NO: 63031 - protein, 10 aa, Homo sapiens
  misc_feature: Table A; Target 63031; HLA-A*26:01; PKHD1; ENSG00000170927; TAA
EVFSIEPCCG

SEQ ID NO: 63032 - protein, 9 aa, Homo sapiens
  misc_feature: Table A; Target 63032; HLA-A*25:01; PKHD1; ENSG00000170927; TAA
EVGDAVEGL

SEQ ID NO: 63033 - protein, 9 aa, Homo sapiens
  misc_feature: Table A; Target 63033; HLA-A*33:01; PKHD1; ENSG00000170927; TAA
EVLTVKEVK

SEQ ID NO: 63034 - protein, 9 aa, Homo sapiens
  misc_feature: Table A; Target 63034; HLA-A*33:03; PKHD1; ENSG00000170927; TAA
EVLTVKEVK

SEQ ID NO: 63035 - protein, 10 aa, Homo sapiens
  misc_feature: Table A; Target 63035; HLA-A*33:01; PKHD1; ENSG00000170927; TAA
EVQVLNVSGR

SEQ ID NO: 63036 - protein, 10 aa, Homo sapiens
  misc_feature: Table A; Target 63036; HLA-A*33:03; PKHD1; ENSG00000170927; TAA
EVQVLNVSGR

SEQ ID NO: 63037 - protein, 10 aa, Homo sapiens
  misc_feature: Table A; Target 63037; HLA-A*68:01; PKHD1; ENSG00000170927; TAA
EVQVLNVSGR

SEQ ID NO: 63038 - protein, 10 aa, Homo sapiens
  misc_feature: Table A; Target 63038; HLA-C*07:06; PKHD1; ENSG00000170927; TAA
EVQVLNVSGR

SEQ ID NO: 63039 - protein, 10 aa, Homo sapiens
  misc_feature: Table A; Target 63039; HLA-A*25:01; PKHD1; ENSG00000170927; TAA
EVVIISGTGV

SEQ ID NO: 63040 - protein, 10 aa, Homo sapiens
  misc_feature: Table A; Target 63040; HLA-A*26:01; PKHD1; ENSG00000170927; TAA
EVVIISGTGV

SEQ ID NO: 63041 - protein, 10 aa, Homo sapiens
  misc_feature: Table A; Target 63041; HLA-A*68:02; PKHD1; ENSG00000170927; TAA
EVVIISGTGV

SEQ ID NO: 63042 - protein, 11 aa, Homo sapiens
  misc_feature: Table A; Target 63042; HLA-A*68:01; PKHD1; ENSG00000170927; TAA
EVVIISGTGVK

SEQ ID NO: 63043 - protein, 8 aa, Homo sapiens
  misc_feature: Table A; Target 63043; HLA-A*23:01; PKHD1; ENSG00000170927; TAA
EYIDSPVI

SEQ ID NO: 63044 - protein, 9 aa, Homo sapiens
  misc_feature: Table A; Target 63044; HLA-A*23:01; PKHD1; ENSG00000170927; TAA
EYIDSPVIL

SEQ ID NO: 63045 - protein, 9 aa, Homo sapiens
  misc_feature: Table A; Target 63045; HLA-A*24:02; PKHD1; ENSG00000170927; TAA
EYIDSPVIL

SEQ ID NO: 63046 - protein, 9 aa, Homo sapiens
  misc_feature: Table A; Target 63046; HLA-C*14:02; PKHD1; ENSG00000170927; TAA
EYIDSPVIL

SEQ ID NO: 63047 - protein, 9 aa, Homo sapiens
  misc_feature: Table A; Target 63047; HLA-C*03:04; PKHD1; ENSG00000170927; TAA
FAHKGSLCM

SEQ ID NO: 63048 - protein, 8 aa, Homo sapiens
  misc_feature: Table A; Target 63048; HLA-B*35:01; PKHD1; ENSG00000170927; TAA
FANMSVVL

SEQ ID NO: 63049 - protein, 8 aa, Homo sapiens
  misc_feature: Table A; Target 63049; HLA-B*35:03; PKHD1; ENSG00000170927; TAA
FANMSVVL

SEQ ID NO: 63050 - protein, 8 aa, Homo sapiens
  misc_feature: Table A; Target 63050; HLA-C*03:03; PKHD1; ENSG00000170927; TAA
FANMSVVL

SEQ ID NO: 63051 - protein, 8 aa, Homo sapiens
  misc_feature: Table A; Target 63051; HLA-C*03:04; PKHD1; ENSG00000170927; TAA
FANMSVVL

SEQ ID NO: 63052 - protein, 9 aa, Homo sapiens
  misc_feature: Table A; Target 63052; HLA-B*07:02; PKHD1; ENSG00000170927; TAA
FARGPSPSL

SEQ ID NO: 63053 - protein, 9 aa, Homo sapiens
  misc_feature: Table A; Target 63053; HLA-B*15:03; PKHD1; ENSG00000170927; TAA
FARGPSPSL

SEQ ID NO: 63054 - protein, 9 aa, Homo sapiens
  misc_feature: Table A; Target 63054; HLA-B*46:01; PKHD1; ENSG00000170927; TAA
FARGPSPSL

SEQ ID NO: 63055 - protein, 9 aa, Homo sapiens
  misc_feature: Table A; Target 63055; HLA-B*51:01; PKHD1; ENSG00000170927; TAA
FARGPSPSL

SEQ ID NO: 63056 - protein, 9 aa, Homo sapiens
  misc_feature: Table A; Target 63056; HLA-B*54:01; PKHD1; ENSG00000170927; TAA
FARGPSPSL

SEQ ID NO: 63057 - protein, 9 aa, Homo sapiens
  misc_feature: Table A; Target 63057; HLA-B*58:01; PKHD1; ENSG00000170927; TAA
FARGPSPSL

SEQ ID NO: 63058 - protein, 9 aa, Homo sapiens
  misc_feature: Table A; Target 63058; HLA-C*01:02; PKHD1; ENSG00000170927; TAA
FARGPSPSL

SEQ ID NO: 63059 - protein, 9 aa, Homo sapiens
  misc_feature: Table A; Target 63059; HLA-C*02:02; PKHD1; ENSG00000170927; TAA
FARGPSPSL

SEQ ID NO: 63060 - protein, 9 aa, Homo sapiens
  misc_feature: Table A; Target 63060; HLA-C*03:03; PKHD1; ENSG00000170927; TAA
FARGPSPSL

SEQ ID NO: 63061 - protein, 9 aa, Homo sapiens
  misc_feature: Table A; Target 63061; HLA-C*03:04; PKHD1; ENSG00000170927; TAA
FARGPSPSL

SEQ ID NO: 63062 - protein, 9 aa, Homo sapiens
  misc_feature: Table A; Target 63062; HLA-C*07:02; PKHD1; ENSG00000170927; TAA
FARGPSPSL

SEQ ID NO: 63063 - protein, 9 aa, Homo sapiens
  misc_feature: Table A; Target 63063; HLA-C*12:03; PKHD1; ENSG00000170927; TAA
FARGPSPSL

SEQ ID NO: 63064 - protein, 9 aa, Homo sapiens
  misc_feature: Table A; Target 63064; HLA-C*14:02; PKHD1; ENSG00000170927; TAA
FARGPSPSL

SEQ ID NO: 63065 - protein, 9 aa, Homo sapiens
  misc_feature: Table A; Target 63065; HLA-C*16:01; PKHD1; ENSG00000170927; TAA
FARGPSPSL

SEQ ID NO: 63066 - protein, 9 aa, Homo sapiens
  misc_feature: Table A; Target 63066; HLA-C*16:04; PKHD1; ENSG00000170927; TAA
FARGPSPSL

SEQ ID NO: 63067 - protein, 9 aa, Homo sapiens
  misc_feature: Table A; Target 63067; HLA-B*54:01; PKHD1; ENSG00000170927; TAA
FAVAQISGA

SEQ ID NO: 63068 - protein, 9 aa, Homo sapiens
  misc_feature: Table A; Target 63068; HLA-B*54:01; PKHD1; ENSG00000170927; TAA
FAVMPRIMA

SEQ ID NO: 63069 - protein, 9 aa, Homo sapiens
  misc_feature: Table A; Target 63069; HLA-A*30:02; PKHD1; ENSG00000170927; TAA
FDNFAPGNY

SEQ ID NO: 63070 - protein, 10 aa, Homo sapiens
  misc_feature: Table A; Target 63070; HLA-B*40:01; PKHD1; ENSG00000170927; TAA
FEVGDAVEGL

SEQ ID NO: 63071 - protein, 10 aa, Homo sapiens
  misc_feature: Table A; Target 63071; HLA-A*23:01; PKHD1; ENSG00000170927; TAA
FFARGPSPSL

SEQ ID NO: 63072 - protein, 8 aa, Homo sapiens
  misc_feature: Table A; Target 63072; HLA-B*35:03; PKHD1; ENSG00000170927; TAA
FFDNSAQV

SEQ ID NO: 63073 - protein, 8 aa, Homo sapiens
  misc_feature: Table A; Target 63073; HLA-C*04:01; PKHD1; ENSG00000170927; TAA
FFDNSAQV

SEQ ID NO: 63074 - protein, 10 aa, Homo sapiens
  misc_feature: Table A; Target 63074; HLA-A*23:01; PKHD1; ENSG00000170927; TAA
FFDNSAQVTI

SEQ ID NO: 63075 - protein, 10 aa, Homo sapiens
  misc_feature: Table A; Target 63075; HLA-B*35:03; PKHD1; ENSG00000170927; TAA
FFDNSAQVTI

SEQ ID NO: 63076 - protein, 10 aa, Homo sapiens
  misc_feature: Table A; Target 63076; HLA-B*38:01; PKHD1; ENSG00000170927; TAA
FFDNSAQVTI

SEQ ID NO: 63077 - protein, 10 aa, Homo sapiens
  misc_feature: Table A; Target 63077; HLA-C*04:01; PKHD1; ENSG00000170927; TAA
FFDNSAQVTI

SEQ ID NO: 63078 - protein, 10 aa, Homo sapiens
  misc_feature: Table A; Target 63078; HLA-C*05:01; PKHD1; ENSG00000170927; TAA
FFDNSAQVTI

SEQ ID NO: 63079 - protein, 10 aa, Homo sapiens
  misc_feature: Table A; Target 63079; HLA-C*07:04; PKHD1; ENSG00000170927; TAA
FFDNSAQVTI

SEQ ID NO: 63080 - protein, 11 aa, Homo sapiens
  misc_feature: Table A; Target 63080; HLA-A*29:02; PKHD1; ENSG00000170927; TAA
FFNSQLRQLTY

SEQ ID NO: 63081 - protein, 10 aa, Homo sapiens
  misc_feature: Table A; Target 63081; HLA-A*29:02; PKHD1; ENSG00000170927; TAA
FFVAPETNNY

SEQ ID NO: 63082 - protein, 10 aa, Homo sapiens
  misc_feature: Table A; Target 63082; HLA-C*14:02; PKHD1; ENSG00000170927; TAA
FFVAPETNNY

SEQ ID NO: 63083 - protein, 9 aa, Homo sapiens
  misc_feature: Table A; Target 63083; HLA-B*54:01; PKHD1; ENSG00000170927; TAA
FGDLQPPPA

SEQ ID NO: 63084 - protein, 9 aa, Homo sapiens
  misc_feature: Table A; Target 63084; HLA-C*02:02; PKHD1; ENSG00000170927; TAA
FGSPLYSSV

SEQ ID NO: 63085 - protein, 10 aa, Homo sapiens
  misc_feature: Table A; Target 63085; HLA-A*02:07; PKHD1; ENSG00000170927; TAA
FIPPTLVQSA

SEQ ID NO: 63086 - protein, 9 aa, Homo sapiens
  misc_feature: Table A; Target 63086; HLA-A*29:02; PKHD1; ENSG00000170927; TAA
FLAFKNFDY

SEQ ID NO: 63087 - protein, 9 aa, Homo sapiens
  misc_feature: Table A; Target 63087; HLA-B*08:01; PKHD1; ENSG00000170927; TAA
FLAVRNGTL

SEQ ID NO: 63088 - protein, 9 aa, Homo sapiens
  misc_feature: Table A; Target 63088; HLA-A*02:01; PKHD1; ENSG00000170927; TAA
FLDEQNRRV

SEQ ID NO: 63089 - protein, 9 aa, Homo sapiens
  misc_feature: Table A; Target 63089; HLA-A*02:07; PKHD1; ENSG00000170927; TAA
FLDEQNRRV

SEQ ID NO: 63090 - protein, 9 aa, Homo sapiens
  misc_feature: Table A; Target 63090; HLA-A*02:01; PKHD1; ENSG00000170927; TAA
FLDLPVVTC

SEQ ID NO: 63091 - protein, 10 aa, Homo sapiens
  misc_feature: Table A; Target 63091; HLA-A*02:04; PKHD1; ENSG00000170927; TAA
FLGPIFGDML

SEQ ID NO: 63092 - protein, 9 aa, Homo sapiens
  misc_feature: Table A; Target 63092; HLA-B*13:02; PKHD1; ENSG00000170927; TAA
FLQIGQNQI

SEQ ID NO: 63093 - protein, 9 aa, Homo sapiens
  misc_feature: Table A; Target 63093; HLA-A*01:01; PKHD1; ENSG00000170927; TAA
FMAPGPIEL

SEQ ID NO: 63094 - protein, 9 aa, Homo sapiens
  misc_feature: Table A; Target 63094; HLA-A*02:01; PKHD1; ENSG00000170927; TAA
FMAPGPIEL

SEQ ID NO: 63095 - protein, 9 aa, Homo sapiens
  misc_feature: Table A; Target 63095; HLA-A*02:03; PKHD1; ENSG00000170927; TAA
FMAPGPIEL

SEQ ID NO: 63096 - protein, 9 aa, Homo sapiens
  misc_feature: Table A; Target 63096; HLA-A*02:04; PKHD1; ENSG00000170927; TAA
FMAPGPIEL

SEQ ID NO: 63097 - protein, 9 aa, Homo sapiens
  misc_feature: Table A; Target 63097; HLA-A*02:07; PKHD1; ENSG00000170927; TAA
FMAPGPIEL

SEQ ID NO: 63098 - protein, 9 aa, Homo sapiens
  misc_feature: Table A; Target 63098; HLA-B*15:01; PKHD1; ENSG00000170927; TAA
FMAPGPIEL

SEQ ID NO: 63099 - protein, 9 aa, Homo sapiens
  misc_feature: Table A; Target 63099; HLA-B*15:03; PKHD1; ENSG00000170927; TAA
FMAPGPIEL

SEQ ID NO: 63100 - protein, 9 aa, Homo sapiens
  misc_feature: Table A; Target 63100; HLA-B*35:03; PKHD1; ENSG00000170927; TAA
FMAPGPIEL

SEQ ID NO: 63101 - protein, 9 aa, Homo sapiens
  misc_feature: Table A; Target 63101; HLA-B*39:01; PKHD1; ENSG00000170927; TAA
FMAPGPIEL

SEQ ID NO: 63102 - protein, 9 aa, Homo sapiens
  misc_feature: Table A; Target 63102; HLA-B*40:01; PKHD1; ENSG00000170927; TAA
FMAPGPIEL

SEQ ID NO: 63103 - protein, 9 aa, Homo sapiens
  misc_feature: Table A; Target 63103; HLA-B*46:01; PKHD1; ENSG00000170927; TAA
FMAPGPIEL

SEQ ID NO: 63104 - protein, 9 aa, Homo sapiens
  misc_feature: Table A; Target 63104; HLA-B*55:01; PKHD1; ENSG00000170927; TAA
FMAPGPIEL

SEQ ID NO: 63105 - protein, 9 aa, Homo sapiens
  misc_feature: Table A; Target 63105; HLA-B*58:01; PKHD1; ENSG00000170927; TAA
FMAPGPIEL

SEQ ID NO: 63106 - protein, 9 aa, Homo sapiens
  misc_feature: Table A; Target 63106; HLA-C*01:02; PKHD1; ENSG00000170927; TAA
FMAPGPIEL

SEQ ID NO: 63107 - protein, 9 aa, Homo sapiens
  misc_feature: Table A; Target 63107; HLA-C*02:02; PKHD1; ENSG00000170927; TAA
FMAPGPIEL

SEQ ID NO: 63108 - protein, 9 aa, Homo sapiens
  misc_feature: Table A; Target 63108; HLA-C*03:03; PKHD1; ENSG00000170927; TAA
FMAPGPIEL

SEQ ID NO: 63109 - protein, 9 aa, Homo sapiens
  misc_feature: Table A; Target 63109; HLA-C*03:04; PKHD1; ENSG00000170927; TAA
FMAPGPIEL

SEQ ID NO: 63110 - protein, 9 aa, Homo sapiens
  misc_feature: Table A; Target 63110; HLA-C*07:04; PKHD1; ENSG00000170927; TAA
FMAPGPIEL

SEQ ID NO: 63111 - protein, 9 aa, Homo sapiens
  misc_feature: Table A; Target 63111; HLA-C*14:02; PKHD1; ENSG00000170927; TAA
FMAPGPIEL

SEQ ID NO: 63112 - protein, 9 aa, Homo sapiens
  misc_feature: Table A; Target 63112; HLA-C*16:01; PKHD1; ENSG00000170927; TAA
FMAPGPIEL

SEQ ID NO: 63113 - protein, 8 aa, Homo sapiens
  misc_feature: Table A; Target 63113; HLA-C*05:01; PKHD1; ENSG00000170927; TAA
FMDQTPQV

SEQ ID NO: 63114 - protein, 9 aa, Homo sapiens
  misc_feature: Table A; Target 63114; HLA-A*01:01; PKHD1; ENSG00000170927; TAA
FMDQTPQVL

SEQ ID NO: 63115 - protein, 9 aa, Homo sapiens
  misc_feature: Table A; Target 63115; HLA-A*02:07; PKHD1; ENSG00000170927; TAA
FMDQTPQVL

SEQ ID NO: 63116 - protein, 9 aa, Homo sapiens
  misc_feature: Table A; Target 63116; HLA-A*32:01; PKHD1; ENSG00000170927; TAA
FMDQTPQVL

SEQ ID NO: 63117 - protein, 9 aa, Homo sapiens
  misc_feature: Table A; Target 63117; HLA-B*35:01; PKHD1; ENSG00000170927; TAA
FMDQTPQVL

SEQ ID NO: 63118 - protein, 9 aa, Homo sapiens
  misc_feature: Table A; Target 63118; HLA-B*35:03; PKHD1; ENSG00000170927; TAA
FMDQTPQVL

SEQ ID NO: 63119 - protein, 9 aa, Homo sapiens
  misc_feature: Table A; Target 63119; HLA-B*38:01; PKHD1; ENSG00000170927; TAA
FMDQTPQVL

SEQ ID NO: 63120 - protein, 9 aa, Homo sapiens
  misc_feature: Table A; Target 63120; HLA-B*55:01; PKHD1; ENSG00000170927; TAA
FMDQTPQVL

SEQ ID NO: 63121 - protein, 9 aa, Homo sapiens
  misc_feature: Table A; Target 63121; HLA-C*03:04; PKHD1; ENSG00000170927; TAA
FMDQTPQVL

SEQ ID NO: 63122 - protein, 9 aa, Homo sapiens
  misc_feature: Table A; Target 63122; HLA-C*04:01; PKHD1; ENSG00000170927; TAA
FMDQTPQVL

SEQ ID NO: 63123 - protein, 9 aa, Homo sapiens
  misc_feature: Table A; Target 63123; HLA-C*05:01; PKHD1; ENSG00000170927; TAA
FMDQTPQVL

SEQ ID NO: 63124 - protein, 9 aa, Homo sapiens
  misc_feature: Table A; Target 63124; HLA-C*07:04; PKHD1; ENSG00000170927; TAA
FMDQTPQVL

SEQ ID NO: 63125 - protein, 9 aa, Homo sapiens
  misc_feature: Table A; Target 63125; HLA-A*29:02; PKHD1; ENSG00000170927; TAA
FNIMDNLLY

SEQ ID NO: 63126 - protein, 10 aa, Homo sapiens
  misc_feature: Table A; Target 63126; HLA-A*29:02; PKHD1; ENSG00000170927; TAA
FNSQLRQLTY

SEQ ID NO: 63127 - protein, 8 aa, Homo sapiens
  misc_feature: Table A; Target 63127; HLA-C*05:01; PKHD1; ENSG00000170927; TAA
FPEEPSQV

SEQ ID NO: 63128 - protein, 10 aa, Homo sapiens
  misc_feature: Table A; Target 63128; HLA-B*35:01; PKHD1; ENSG00000170927; TAA
FPEEPSQVQL

SEQ ID NO: 63129 - protein, 10 aa, Homo sapiens
  misc_feature: Table A; Target 63129; HLA-B*35:03; PKHD1; ENSG00000170927; TAA
FPEEPSQVQL

SEQ ID NO: 63130 - protein, 10 aa, Homo sapiens
  misc_feature: Table A; Target 63130; HLA-B*38:01; PKHD1; ENSG00000170927; TAA
FPEEPSQVQL

SEQ ID NO: 63131 - protein, 10 aa, Homo sapiens
  misc_feature: Table A; Target 63131; HLA-B*55:01; PKHD1; ENSG00000170927; TAA
FPEEPSQVQL

SEQ ID NO: 63132 - protein, 10 aa, Homo sapiens
  misc_feature: Table A; Target 63132; HLA-C*05:01; PKHD1; ENSG00000170927; TAA
FPEEPSQVQL

SEQ ID NO: 63133 - protein, 11 aa, Homo sapiens
  misc_feature: Table A; Target 63133; HLA-A*01:01; PKHD1; ENSG00000170927; TAA
FPEEPSQVQLK

SEQ ID NO: 63134 - protein, 11 aa, Homo sapiens
  misc_feature: Table A; Target 63134; HLA-B*27:02; PKHD1; ENSG00000170927; TAA
FPEEPSQVQLK

SEQ ID NO: 63135 - protein, 9 aa, Homo sapiens
  misc_feature: Table A; Target 63135; HLA-B*54:01; PKHD1; ENSG00000170927; TAA
FPFLPSPGQ

SEQ ID NO: 63136 - protein, 8 aa, Homo sapiens
  misc_feature: Table A; Target 63136; HLA-B*51:01; PKHD1; ENSG00000170927; TAA
FPFPHAAI

SEQ ID NO: 63137 - protein, 9 aa, Homo sapiens
  misc_feature: Table A; Target 63137; HLA-B*35:01; PKHD1; ENSG00000170927; TAA
FPFPHAAIL

SEQ ID NO: 63138 - protein, 9 aa, Homo sapiens
  misc_feature: Table A; Target 63138; HLA-B*35:03; PKHD1; ENSG00000170927; TAA
FPFPHAAIL

SEQ ID NO: 63139 - protein, 9 aa, Homo sapiens
  misc_feature: Table A; Target 63139; HLA-B*51:01; PKHD1; ENSG00000170927; TAA
FPFPHAAIL

SEQ ID NO: 63140 - protein, 10 aa, Homo sapiens
  misc_feature: Table A; Target 63140; HLA-B*54:01; PKHD1; ENSG00000170927; TAA
FPKTEAEWTA

SEQ ID NO: 63141 - protein, 9 aa, Homo sapiens
  misc_feature: Table A; Target 63141; HLA-B*07:02; PKHD1; ENSG00000170927; TAA
FPVDRSNVL

SEQ ID NO: 63142 - protein, 9 aa, Homo sapiens
  misc_feature: Table A; Target 63142; HLA-B*08:01; PKHD1; ENSG00000170927; TAA
FPVDRSNVL

SEQ ID NO: 63143 - protein, 9 aa, Homo sapiens
  misc_feature: Table A; Target 63143; HLA-B*35:01; PKHD1; ENSG00000170927; TAA
FPVDRSNVL

SEQ ID NO: 63144 - protein, 9 aa, Homo sapiens
  misc_feature: Table A; Target 63144; HLA-B*35:03; PKHD1; ENSG00000170927; TAA
FPVDRSNVL

SEQ ID NO: 63145 - protein, 9 aa, Homo sapiens
  misc_feature: Table A; Target 63145; HLA-B*46:01; PKHD1; ENSG00000170927; TAA
FPVDRSNVL

SEQ ID NO: 63146 - protein, 9 aa, Homo sapiens
  misc_feature: Table A; Target 63146; HLA-B*51:01; PKHD1; ENSG00000170927; TAA
FPVDRSNVL

SEQ ID NO: 63147 - protein, 9 aa, Homo sapiens
  misc_feature: Table A; Target 63147; HLA-B*54:01; PKHD1; ENSG00000170927; TAA
FPVDRSNVL

SEQ ID NO: 63148 - protein, 9 aa, Homo sapiens
  misc_feature: Table A; Target 63148; HLA-B*55:01; PKHD1; ENSG00000170927; TAA
FPVDRSNVL

SEQ ID NO: 63149 - protein, 9 aa, Homo sapiens
  misc_feature: Table A; Target 63149; HLA-B*56:01; PKHD1; ENSG00000170927; TAA
FPVDRSNVL

SEQ ID NO: 63150 - protein, 9 aa, Homo sapiens
  misc_feature: Table A; Target 63150; HLA-C*02:02; PKHD1; ENSG00000170927; TAA
FPVDRSNVL

SEQ ID NO: 63151 - protein, 9 aa, Homo sapiens
  misc_feature: Table A; Target 63151; HLA-C*03:03; PKHD1; ENSG00000170927; TAA
FPVDRSNVL

SEQ ID NO: 63152 - protein, 9 aa, Homo sapiens
  misc_feature: Table A; Target 63152; HLA-C*03:04; PKHD1; ENSG00000170927; TAA
FPVDRSNVL

SEQ ID NO: 63153 - protein, 9 aa, Homo sapiens
  misc_feature: Table A; Target 63153; HLA-C*07:02; PKHD1; ENSG00000170927; TAA
FPVDRSNVL

SEQ ID NO: 63154 - protein, 9 aa, Homo sapiens
  misc_feature: Table A; Target 63154; HLA-C*12:03; PKHD1; ENSG00000170927; TAA
FPVDRSNVL

SEQ ID NO: 63155 - protein, 9 aa, Homo sapiens
  misc_feature: Table A; Target 63155; HLA-C*14:02; PKHD1; ENSG00000170927; TAA
FPVDRSNVL

SEQ ID NO: 63156 - protein, 9 aa, Homo sapiens
  misc_feature: Table A; Target 63156; HLA-C*16:01; PKHD1; ENSG00000170927; TAA
FPVDRSNVL

SEQ ID NO: 63157 - protein, 11 aa, Homo sapiens
  misc_feature: Table A; Target 63157; HLA-B*51:01; PKHD1; ENSG00000170927; TAA
FPVDRSNVLSV

SEQ ID NO: 63158 - protein, 11 aa, Homo sapiens
  misc_feature: Table A; Target 63158; HLA-B*54:01; PKHD1; ENSG00000170927; TAA
FPVDRSNVLSV

SEQ ID NO: 63159 - protein, 11 aa, Homo sapiens
  misc_feature: Table A; Target 63159; HLA-B*56:01; PKHD1; ENSG00000170927; TAA
FPVDRSNVLSV

SEQ ID NO: 63160 - protein, 9 aa, Homo sapiens
  misc_feature: Table A; Target 63160; HLA-B*54:01; PKHD1; ENSG00000170927; TAA
FPYGVKFLA

SEQ ID NO: 63161 - protein, 10 aa, Homo sapiens
  misc_feature: Table A; Target 63161; HLA-B*51:01; PKHD1; ENSG00000170927; TAA
FPYGVKFLAV

SEQ ID NO: 63162 - protein, 10 aa, Homo sapiens
  misc_feature: Table A; Target 63162; HLA-B*54:01; PKHD1; ENSG00000170927; TAA
FPYGVKFLAV

SEQ ID NO: 63163 - protein, 10 aa, Homo sapiens
  misc_feature: Table A; Target 63163; HLA-B*56:01; PKHD1; ENSG00000170927; TAA
FPYGVKFLAV

SEQ ID NO: 63164 - protein, 8 aa, Homo sapiens
  misc_feature: Table A; Target 63164; HLA-B*15:01; PKHD1; ENSG00000170927; TAA
FQVLGQAF

SEQ ID NO: 63165 - protein, 8 aa, Homo sapiens
  misc_feature: Table A; Target 63165; HLA-B*15:03; PKHD1; ENSG00000170927; TAA
FQVLGQAF

SEQ ID NO: 63166 - protein, 8 aa, Homo sapiens
  misc_feature: Table A; Target 63166; HLA-C*03:04; PKHD1; ENSG00000170927; TAA
FQVLGQAF

SEQ ID NO: 63167 - protein, 9 aa, Homo sapiens
  misc_feature: Table A; Target 63167; HLA-A*01:01; PKHD1; ENSG00000170927; TAA
FSAPQNSVK

SEQ ID NO: 63168 - protein, 9 aa, Homo sapiens
  misc_feature: Table A; Target 63168; HLA-C*12:03; PKHD1; ENSG00000170927; TAA
FSKAQTPIV

SEQ ID NO: 63169 - protein, 8 aa, Homo sapiens
  misc_feature: Table A; Target 63169; HLA-C*03:04; PKHD1; ENSG00000170927; TAA
FSLHGGSL

SEQ ID NO: 63170 - protein, 9 aa, Homo sapiens
  misc_feature: Table A; Target 63170; HLA-C*03:04; PKHD1; ENSG00000170927; TAA
FSLHGGSLL

SEQ ID NO: 63171 - protein, 9 aa, Homo sapiens
  misc_feature: Table A; Target 63171; HLA-A*25:01; PKHD1; ENSG00000170927; TAA
FSNVSAGSW

SEQ ID NO: 63172 - protein, 9 aa, Homo sapiens
  misc_feature: Table A; Target 63172; HLA-B*57:01; PKHD1; ENSG00000170927; TAA
FSRDPALVW

SEQ ID NO: 63173 - protein, 9 aa, Homo sapiens
  misc_feature: Table A; Target 63173; HLA-A*01:01; PKHD1; ENSG00000170927; TAA
FSSFVKSCY

SEQ ID NO: 63174 - protein, 9 aa, Homo sapiens
  misc_feature: Table A; Target 63174; HLA-A*29:02; PKHD1; ENSG00000170927; TAA
FSSFVKSCY

SEQ ID NO: 63175 - protein, 9 aa, Homo sapiens
  misc_feature: Table A; Target 63175; HLA-A*30:02; PKHD1; ENSG00000170927; TAA
FSSFVKSCY

SEQ ID NO: 63176 - protein, 9 aa, Homo sapiens
  misc_feature: Table A; Target 63176; HLA-A*68:02; PKHD1; ENSG00000170927; TAA
FTIGFQNMV

SEQ ID NO: 63177 - protein, 10 aa, Homo sapiens
  misc_feature: Table A; Target 63177; HLA-A*25:01; PKHD1; ENSG00000170927; TAA
FTNSSNLVAF

SEQ ID NO: 63178 - protein, 9 aa, Homo sapiens
  misc_feature: Table A; Target 63178; HLA-A*68:02; PKHD1; ENSG00000170927; TAA
FTSRVIITA

SEQ ID NO: 63179 - protein, 9 aa, Homo sapiens
  misc_feature: Table A; Target 63179; HLA-B*54:01; PKHD1; ENSG00000170927; TAA
FTSRVIITA

SEQ ID NO: 63180 - protein, 10 aa, Homo sapiens
  misc_feature: Table A; Target 63180; HLA-A*68:02; PKHD1; ENSG00000170927; TAA
FTSRVIITAV

SEQ ID NO: 63181 - protein, 8 aa, Homo sapiens
  misc_feature: Table A; Target 63181; HLA-C*03:03; PKHD1; ENSG00000170927; TAA
FTVKTSQL

SEQ ID NO: 63182 - protein, 8 aa, Homo sapiens
  misc_feature: Table A; Target 63182; HLA-C*03:04; PKHD1; ENSG00000170927; TAA
FTVKTSQL

SEQ ID NO: 63183 - protein, 9 aa, Homo sapiens
  misc_feature: Table A; Target 63183; HLA-A*02:01; PKHD1; ENSG00000170927; TAA
FTVTSPPGV

SEQ ID NO: 63184 - protein, 11 aa, Homo sapiens
  misc_feature: Table A; Target 63184; HLA-B*58:01; PKHD1; ENSG00000170927; TAA
FTVTSPPGVNF

SEQ ID NO: 63185 - protein, 11 aa, Homo sapiens
  misc_feature: Table A; Target 63185; HLA-C*02:02; PKHD1; ENSG00000170927; TAA
FTVTSPPGVNF

SEQ ID NO: 63186 - protein, 9 aa, Homo sapiens
  misc_feature: Table A; Target 63186; HLA-A*01:01; PKHD1; ENSG00000170927; TAA
FVAPETNNY

SEQ ID NO: 63187 - protein, 9 aa, Homo sapiens
  misc_feature: Table A; Target 63187; HLA-A*25:01; PKHD1; ENSG00000170927; TAA
FVAPETNNY

SEQ ID NO: 63188 - protein, 9 aa, Homo sapiens
  misc_feature: Table A; Target 63188; HLA-A*26:01; PKHD1; ENSG00000170927; TAA
FVAPETNNY

SEQ ID NO: 63189 - protein, 9 aa, Homo sapiens
  misc_feature: Table A; Target 63189; HLA-A*29:02; PKHD1; ENSG00000170927; TAA
FVAPETNNY

SEQ ID NO: 63190 - protein, 9 aa, Homo sapiens
  misc_feature: Table A; Target 63190; HLA-A*30:02; PKHD1; ENSG00000170927; TAA
FVAPETNNY

SEQ ID NO: 63191 - protein, 9 aa, Homo sapiens
  misc_feature: Table A; Target 63191; HLA-A*32:01; PKHD1; ENSG00000170927; TAA
FVAPETNNY

SEQ ID NO: 63192 - protein, 9 aa, Homo sapiens
  misc_feature: Table A; Target 63192; HLA-B*15:01; PKHD1; ENSG00000170927; TAA
FVAPETNNY

SEQ ID NO: 63193 - protein, 9 aa, Homo sapiens
  misc_feature: Table A; Target 63193; HLA-B*15:03; PKHD1; ENSG00000170927; TAA
FVAPETNNY

SEQ ID NO: 63194 - protein, 9 aa, Homo sapiens
  misc_feature: Table A; Target 63194; HLA-B*35:01; PKHD1; ENSG00000170927; TAA
FVAPETNNY

SEQ ID NO: 63195 - protein, 9 aa, Homo sapiens
  misc_feature: Table A; Target 63195; HLA-B*39:01; PKHD1; ENSG00000170927; TAA
FVAPETNNY

SEQ ID NO: 63196 - protein, 9 aa, Homo sapiens
  misc_feature: Table A; Target 63196; HLA-B*46:01; PKHD1; ENSG00000170927; TAA
FVAPETNNY

SEQ ID NO: 63197 - protein, 9 aa, Homo sapiens
  misc_feature: Table A; Target 63197; HLA-B*58:01; PKHD1; ENSG00000170927; TAA
FVAPETNNY

SEQ ID NO: 63198 - protein, 9 aa, Homo sapiens
  misc_feature: Table A; Target 63198; HLA-C*02:02; PKHD1; ENSG00000170927; TAA
FVAPETNNY

SEQ ID NO: 63199 - protein, 9 aa, Homo sapiens
  misc_feature: Table A; Target 63199; HLA-C*07:04; PKHD1; ENSG00000170927; TAA
FVAPETNNY

SEQ ID NO: 63200 - protein, 9 aa, Homo sapiens
  misc_feature: Table A; Target 63200; HLA-C*07:06; PKHD1; ENSG00000170927; TAA
FVAPETNNY

SEQ ID NO: 63201 - protein, 9 aa, Homo sapiens
  misc_feature: Table A; Target 63201; HLA-C*16:01; PKHD1; ENSG00000170927; TAA
FVAPETNNY

SEQ ID NO: 63202 - protein, 9 aa, Homo sapiens
  misc_feature: Table A; Target 63202; HLA-C*16:04; PKHD1; ENSG00000170927; TAA
FVAPETNNY

SEQ ID NO: 63203 - protein, 11 aa, Homo sapiens
  misc_feature: Table A; Target 63203; HLA-A*25:01; PKHD1; ENSG00000170927; TAA
FVAPETNNYTF

SEQ ID NO: 63204 - protein, 11 aa, Homo sapiens
  misc_feature: Table A; Target 63204; HLA-A*26:01; PKHD1; ENSG00000170927; TAA
FVAPETNNYTF

SEQ ID NO: 63205 - protein, 11 aa, Homo sapiens
  misc_feature: Table A; Target 63205; HLA-A*32:01; PKHD1; ENSG00000170927; TAA
FVAPETNNYTF

SEQ ID NO: 63206 - protein, 11 aa, Homo sapiens
  misc_feature: Table A; Target 63206; HLA-B*35:01; PKHD1; ENSG00000170927; TAA
FVAPETNNYTF

SEQ ID NO: 63207 - protein, 11 aa, Homo sapiens
  misc_feature: Table A; Target 63207; HLA-B*58:01; PKHD1; ENSG00000170927; TAA
FVAPETNNYTF

SEQ ID NO: 63208 - protein, 11 aa, Homo sapiens
  misc_feature: Table A; Target 63208; HLA-C*02:02; PKHD1; ENSG00000170927; TAA
FVAPETNNYTF

SEQ ID NO: 63209 - protein, 10 aa, Homo sapiens
  misc_feature: Table A; Target 63209; HLA-C*05:01; PKHD1; ENSG00000170927; TAA
FVDDQLPCNV

SEQ ID NO: 63210 - protein, 8 aa, Homo sapiens
  misc_feature: Table A; Target 63210; HLA-C*03:04; PKHD1; ENSG00000170927; TAA
FVDVFSSV

SEQ ID NO: 63211 - protein, 8 aa, Homo sapiens
  misc_feature: Table A; Target 63211; HLA-C*05:01; PKHD1; ENSG00000170927; TAA
FVDVFSSV

SEQ ID NO: 63212 - protein, 9 aa, Homo sapiens
  misc_feature: Table A; Target 63212; HLA-A*31:01; PKHD1; ENSG00000170927; TAA
FYFPSLQPR

SEQ ID NO: 63213 - protein, 9 aa, Homo sapiens
  misc_feature: Table A; Target 63213; HLA-A*33:01; PKHD1; ENSG00000170927; TAA
FYFPSLQPR

SEQ ID NO: 63214 - protein, 9 aa, Homo sapiens
  misc_feature: Table A; Target 63214; HLA-A*33:03; PKHD1; ENSG00000170927; TAA
FYFPSLQPR

SEQ ID NO: 63215 - protein, 10 aa, Homo sapiens
  misc_feature: Table A; Target 63215; HLA-A*29:02; PKHD1; ENSG00000170927; TAA
FYIMPQVFHY

SEQ ID NO: 63216 - protein, 9 aa, Homo sapiens
  misc_feature: Table A; Target 63216; HLA-A*23:01; PKHD1; ENSG00000170927; TAA
FYNILGHAL

SEQ ID NO: 63217 - protein, 9 aa, Homo sapiens
  misc_feature: Table A; Target 63217; HLA-A*24:02; PKHD1; ENSG00000170927; TAA
FYNILGHAL

SEQ ID NO: 63218 - protein, 9 aa, Homo sapiens
  misc_feature: Table A; Target 63218; HLA-C*14:02; PKHD1; ENSG00000170927; TAA
FYNILGHAL

SEQ ID NO: 63219 - protein, 8 aa, Homo sapiens
  misc_feature: Table A; Target 63219; HLA-A*23:01; PKHD1; ENSG00000170927; TAA
FYNLAVLI

SEQ ID NO: 63220 - protein, 9 aa, Homo sapiens
  misc_feature: Table A; Target 63220; HLA-B*13:02; PKHD1; ENSG00000170927; TAA
GAANIDIFI

SEQ ID NO: 63221 - protein, 9 aa, Homo sapiens
  misc_feature: Table A; Target 63221; HLA-B*15:03; PKHD1; ENSG00000170927; TAA
GARVIVQSF

SEQ ID NO: 63222 - protein, 9 aa, Homo sapiens
  misc_feature: Table A; Target 63222; HLA-B*46:01; PKHD1; ENSG00000170927; TAA
GARVIVQSF

SEQ ID NO: 63223 - protein, 9 aa, Homo sapiens
  misc_feature: Table A; Target 63223; HLA-B*37:01; PKHD1; ENSG00000170927; TAA
GCSIPLHSL

SEQ ID NO: 63224 - protein, 9 aa, Homo sapiens
  misc_feature: Table A; Target 63224; HLA-C*03:03; PKHD1; ENSG00000170927; TAA
GCSIPLHSL

SEQ ID NO: 63225 - protein, 9 aa, Homo sapiens
  misc_feature: Table A; Target 63225; HLA-C*03:04; PKHD1; ENSG00000170927; TAA
GCSIPLHSL

SEQ ID NO: 63226 - protein, 9 aa, Homo sapiens
  misc_feature: Table A; Target 63226; HLA-C*16:01; PKHD1; ENSG00000170927; TAA
GCSIPLHSL

SEQ ID NO: 63227 - protein, 8 aa, Homo sapiens
  misc_feature: Table A; Target 63227; HLA-C*16:01; PKHD1; ENSG00000170927; TAA
GCTVRNSF

SEQ ID NO: 63228 - protein, 9 aa, Homo sapiens
  misc_feature: Table A; Target 63228; HLA-B*40:01; PKHD1; ENSG00000170927; TAA
GDAVEGLEL

SEQ ID NO: 63229 - protein, 9 aa, Homo sapiens
  misc_feature: Table A; Target 63229; HLA-B*37:01; PKHD1; ENSG00000170927; TAA
GDLPNFIRV

SEQ ID NO: 63230 - protein, 9 aa, Homo sapiens
  misc_feature: Table A; Target 63230; HLA-B*15:03; PKHD1; ENSG00000170927; TAA
GDPLPGASF

SEQ ID NO: 63231 - protein, 9 aa, Homo sapiens
  misc_feature: Table A; Target 63231; HLA-B*37:01; PKHD1; ENSG00000170927; TAA
GDPLPGASF

SEQ ID NO: 63232 - protein, 11 aa, Homo sapiens
  misc_feature: Table A; Target 63232; HLA-B*37:01; PKHD1; ENSG00000170927; TAA
GDSPTVRSTGM

SEQ ID NO: 63233 - protein, 8 aa, Homo sapiens
  misc_feature: Table A; Target 63233; HLA-B*37:01; PKHD1; ENSG00000170927; TAA
GDSQFLQV

SEQ ID NO: 63234 - protein, 9 aa, Homo sapiens
  misc_feature: Table A; Target 63234; HLA-A*30:01; PKHD1; ENSG00000170927; TAA
GDYIGSQNV

SEQ ID NO: 63235 - protein, 9 aa, Homo sapiens
  misc_feature: Table A; Target 63235; HLA-B*13:02; PKHD1; ENSG00000170927; TAA
GDYIGSQNV

SEQ ID NO: 63236 - protein, 9 aa, Homo sapiens
  misc_feature: Table A; Target 63236; HLA-B*37:01; PKHD1; ENSG00000170927; TAA
GDYIGSQNV

SEQ ID NO: 63237 - protein, 9 aa, Homo sapiens
  misc_feature: Table A; Target 63237; HLA-B*49:01; PKHD1; ENSG00000170927; TAA
GDYIGSQNV

SEQ ID NO: 63238 - protein, 11 aa, Homo sapiens
  misc_feature: Table A; Target 63238; HLA-B*37:01; PKHD1; ENSG00000170927; TAA
GDYIGSQNVSF

SEQ ID NO: 63239 - protein, 8 aa, Homo sapiens
  misc_feature: Table A; Target 63239; HLA-B*49:01; PKHD1; ENSG00000170927; TAA
GEDLFLNV

SEQ ID NO: 63240 - protein, 9 aa, Homo sapiens
  misc_feature: Table A; Target 63240; HLA-B*37:01; PKHD1; ENSG00000170927; TAA
GEDMRMKVM

SEQ ID NO: 63241 - protein, 9 aa, Homo sapiens
  misc_feature: Table A; Target 63241; HLA-B*40:01; PKHD1; ENSG00000170927; TAA
GEDMRMKVM

SEQ ID NO: 63242 - protein, 8 aa, Homo sapiens
  misc_feature: Table A; Target 63242; HLA-B*49:01; PKHD1; ENSG00000170927; TAA
GEGQVQVI

SEQ ID NO: 63243 - protein, 9 aa, Homo sapiens
  misc_feature: Table A; Target 63243; HLA-A*30:01; PKHD1; ENSG00000170927; TAA
GEGQVQVIL

SEQ ID NO: 63244 - protein, 9 aa, Homo sapiens
  misc_feature: Table A; Target 63244; HLA-B*40:01; PKHD1; ENSG00000170927; TAA
GEGQVQVIL

SEQ ID NO: 63245 - protein, 9 aa, Homo sapiens
  misc_feature: Table A; Target 63245; HLA-B*44:02; PKHD1; ENSG00000170927; TAA
GEGQVQVIL

SEQ ID NO: 63246 - protein, 9 aa, Homo sapiens
  misc_feature: Table A; Target 63246; HLA-B*44:03; PKHD1; ENSG00000170927; TAA
GEGQVQVIL

SEQ ID NO: 63247 - protein, 9 aa, Homo sapiens
  misc_feature: Table A; Target 63247; HLA-B*49:01; PKHD1; ENSG00000170927; TAA
GEGQVQVIL

SEQ ID NO: 63248 - protein, 11 aa, Homo sapiens
  misc_feature: Table A; Target 63248; HLA-B*49:01; PKHD1; ENSG00000170927; TAA
GEGQVQVILRV

SEQ ID NO: 63249 - protein, 8 aa, Homo sapiens
  misc_feature: Table A; Target 63249; HLA-A*30:01; PKHD1; ENSG00000170927; TAA
GEITNSSL

SEQ ID NO: 63250 - protein, 8 aa, Homo sapiens
  misc_feature: Table A; Target 63250; HLA-B*40:01; PKHD1; ENSG00000170927; TAA
GEITNSSL

SEQ ID NO: 63251 - protein, 10 aa, Homo sapiens
  misc_feature: Table A; Target 63251; HLA-A*30:01; PKHD1; ENSG00000170927; TAA
GEITNSSLSL

SEQ ID NO: 63252 - protein, 10 aa, Homo sapiens
  misc_feature: Table A; Target 63252; HLA-B*40:01; PKHD1; ENSG00000170927; TAA
GEITNSSLSL

SEQ ID NO: 63253 - protein, 10 aa, Homo sapiens
  misc_feature: Table A; Target 63253; HLA-B*44:03; PKHD1; ENSG00000170927; TAA
GEITNSSLSL

SEQ ID NO: 63254 - protein, 10 aa, Homo sapiens
  misc_feature: Table A; Target 63254; HLA-B*49:01; PKHD1; ENSG00000170927; TAA
GEITNSSLSL

SEQ ID NO: 63255 - protein, 8 aa, Homo sapiens
  misc_feature: Table A; Target 63255; HLA-B*37:01; PKHD1; ENSG00000170927; TAA
GELKVGTL

SEQ ID NO: 63256 - protein, 8 aa, Homo sapiens
  misc_feature: Table A; Target 63256; HLA-B*40:01; PKHD1; ENSG00000170927; TAA
GELKVGTL

SEQ ID NO: 63257 - protein, 9 aa, Homo sapiens
  misc_feature: Table A; Target 63257; HLA-A*30:01; PKHD1; ENSG00000170927; TAA
GESFIPPTL

SEQ ID NO: 63258 - protein, 9 aa, Homo sapiens
  misc_feature: Table A; Target 63258; HLA-B*18:01; PKHD1; ENSG00000170927; TAA
GESFIPPTL

SEQ ID NO: 63259 - protein, 9 aa, Homo sapiens
  misc_feature: Table A; Target 63259; HLA-B*40:01; PKHD1; ENSG00000170927; TAA
GESFIPPTL

SEQ ID NO: 63260 - protein, 9 aa, Homo sapiens
  misc_feature: Table A; Target 63260; HLA-B*40:02; PKHD1; ENSG00000170927; TAA
GESFIPPTL

SEQ ID NO: 63261 - protein, 9 aa, Homo sapiens
  misc_feature: Table A; Target 63261; HLA-B*44:02; PKHD1; ENSG00000170927; TAA
GESFIPPTL

SEQ ID NO: 63262 - protein, 9 aa, Homo sapiens
  misc_feature: Table A; Target 63262; HLA-B*44:03; PKHD1; ENSG00000170927; TAA
GESFIPPTL

SEQ ID NO: 63263 - protein, 9 aa, Homo sapiens
  misc_feature: Table A; Target 63263; HLA-B*49:01; PKHD1; ENSG00000170927; TAA
GESFIPPTL

SEQ ID NO: 63264 - protein, 9 aa, Homo sapiens
  misc_feature: Table A; Target 63264; HLA-C*16:04; PKHD1; ENSG00000170927; TAA
GESFIPPTL

SEQ ID NO: 63265 - protein, 10 aa, Homo sapiens
  misc_feature: Table A; Target 63265; HLA-B*49:01; PKHD1; ENSG00000170927; TAA
GESFIPPTLV

SEQ ID NO: 63266 - protein, 8 aa, Homo sapiens
  misc_feature: Table A; Target 63266; HLA-A*30:01; PKHD1; ENSG00000170927; TAA
GETLVIGV

SEQ ID NO: 63267 - protein, 8 aa, Homo sapiens
  misc_feature: Table A; Target 63267; HLA-B*37:01; PKHD1; ENSG00000170927; TAA
GETLVIGV

SEQ ID NO: 63268 - protein, 8 aa, Homo sapiens
  misc_feature: Table A; Target 63268; HLA-B*49:01; PKHD1; ENSG00000170927; TAA
GETLVIGV

SEQ ID NO: 63269 - protein, 9 aa, Homo sapiens
  misc_feature: Table A; Target 63269; HLA-A*30:01; PKHD1; ENSG00000170927; TAA
GETLVIGVA

SEQ ID NO: 63270 - protein, 9 aa, Homo sapiens
  misc_feature: Table A; Target 63270; HLA-B*40:01; PKHD1; ENSG00000170927; TAA
GETLVIGVA

SEQ ID NO: 63271 - protein, 9 aa, Homo sapiens
  misc_feature: Table A; Target 63271; HLA-B*40:02; PKHD1; ENSG00000170927; TAA
GETLVIGVA

SEQ ID NO: 63272 - protein, 9 aa, Homo sapiens
  misc_feature: Table A; Target 63272; HLA-B*49:01; PKHD1; ENSG00000170927; TAA
GETLVIGVA

SEQ ID NO: 63273 - protein, 11 aa, Homo sapiens
  misc_feature: Table A; Target 63273; HLA-B*40:01; PKHD1; ENSG00000170927; TAA
GETLVIGVARL

SEQ ID NO: 63274 - protein, 9 aa, Homo sapiens
  misc_feature: Table A; Target 63274; HLA-B*49:01; PKHD1; ENSG00000170927; TAA
GEVGNELPV

SEQ ID NO: 63275 - protein, 11 aa, Homo sapiens
  misc_feature: Table A; Target 63275; HLA-A*29:02; PKHD1; ENSG00000170927; TAA
GFFVAPETNNY

SEQ ID NO: 63276 - protein, 10 aa, Homo sapiens
  misc_feature: Table A; Target 63276; HLA-A*29:02; PKHD1; ENSG00000170927; TAA
GFLAFKNFDY

SEQ ID NO: 63277 - protein, 9 aa, Homo sapiens
  misc_feature: Table A; Target 63277; HLA-A*23:01; PKHD1; ENSG00000170927; TAA
GFVDVFSSV

SEQ ID NO: 63278 - protein, 9 aa, Homo sapiens
  misc_feature: Table A; Target 63278; HLA-C*14:02; PKHD1; ENSG00000170927; TAA
GFVDVFSSV

SEQ ID NO: 63279 - protein, 9 aa, Homo sapiens
  misc_feature: Table A; Target 63279; HLA-A*01:01; PKHD1; ENSG00000170927; TAA
GIDLEGQAY

SEQ ID NO: 63280 - protein, 9 aa, Homo sapiens
  misc_feature: Table A; Target 63280; HLA-B*15:01; PKHD1; ENSG00000170927; TAA
GIDLEGQAY

SEQ ID NO: 63281 - protein, 10 aa, Homo sapiens
  misc_feature: Table A; Target 63281; HLA-A*03:01; PKHD1; ENSG00000170927; TAA
GIYPLQVRQK

SEQ ID NO: 63282 - protein, 10 aa, Homo sapiens
  misc_feature: Table A; Target 63282; HLA-A*03:02; PKHD1; ENSG00000170927; TAA
GIYPLQVRQK

SEQ ID NO: 63283 - protein, 10 aa, Homo sapiens
  misc_feature: Table A; Target 63283; HLA-A*11:01; PKHD1; ENSG00000170927; TAA
GIYPLQVRQK

SEQ ID NO: 63284 - protein, 9 aa, Homo sapiens
  misc_feature: Table A; Target 63284; HLA-B*15:03; PKHD1; ENSG00000170927; TAA
GKVHLYSAY

SEQ ID NO: 63285 - protein, 10 aa, Homo sapiens
  misc_feature: Table A; Target 63285; HLA-A*30:02; PKHD1; ENSG00000170927; TAA
GLANTPEVSY

SEQ ID NO: 63286 - protein, 10 aa, Homo sapiens
  misc_feature: Table A; Target 63286; HLA-B*15:01; PKHD1; ENSG00000170927; TAA
GLANTPEVSY

SEQ ID NO: 63287 - protein, 10 aa, Homo sapiens
  misc_feature: Table A; Target 63287; HLA-B*46:01; PKHD1; ENSG00000170927; TAA
GLANTPEVSY

SEQ ID NO: 63288 - protein, 11 aa, Homo sapiens
  misc_feature: Table A; Target 63288; HLA-A*01:01; PKHD1; ENSG00000170927; TAA
GLELTEATPGY

SEQ ID NO: 63289 - protein, 9 aa, Homo sapiens
  misc_feature: Table A; Target 63289; HLA-B*15:01; PKHD1; ENSG00000170927; TAA
GLKVDSNVF

SEQ ID NO: 63290 - protein, 9 aa, Homo sapiens
  misc_feature: Table A; Target 63290; HLA-B*15:03; PKHD1; ENSG00000170927; TAA
GLKVDSNVF

SEQ ID NO: 63291 - protein, 9 aa, Homo sapiens
  misc_feature: Table A; Target 63291; HLA-B*46:01; PKHD1; ENSG00000170927; TAA
GLKVDSNVF

SEQ ID NO: 63292 - protein, 10 aa, Homo sapiens
  misc_feature: Table A; Target 63292; HLA-B*15:01; PKHD1; ENSG00000170927; TAA
GLKVDSNVFY

SEQ ID NO: 63293 - protein, 9 aa, Homo sapiens
  misc_feature: Table A; Target 63293; HLA-B*15:01; PKHD1; ENSG00000170927; TAA
GLPPPVSVF

SEQ ID NO: 63294 - protein, 10 aa, Homo sapiens
  misc_feature: Table A; Target 63294; HLA-A*02:03; PKHD1; ENSG00000170927; TAA
GLRGQNTTSV

SEQ ID NO: 63295 - protein, 11 aa, Homo sapiens
  misc_feature: Table A; Target 63295; HLA-A*30:02; PKHD1; ENSG00000170927; TAA
GLRGQNTTSVY

SEQ ID NO: 63296 - protein, 11 aa, Homo sapiens
  misc_feature: Table A; Target 63296; HLA-B*15:01; PKHD1; ENSG00000170927; TAA
GLRGQNTTSVY

SEQ ID NO: 63297 - protein, 11 aa, Homo sapiens
  misc_feature: Table A; Target 63297; HLA-B*15:03; PKHD1; ENSG00000170927; TAA
GLRGQNTTSVY

SEQ ID NO: 63298 - protein, 11 aa, Homo sapiens
  misc_feature: Table A; Target 63298; HLA-B*46:01; PKHD1; ENSG00000170927; TAA
GLRGQNTTSVY

SEQ ID NO: 63299 - protein, 10 aa, Homo sapiens
  misc_feature: Table A; Target 63299; HLA-A*03:01; PKHD1; ENSG00000170927; TAA
GMISSLSSNK

SEQ ID NO: 63300 - protein, 10 aa, Homo sapiens
  misc_feature: Table A; Target 63300; HLA-A*03:02; PKHD1; ENSG00000170927; TAA
GMISSLSSNK

SEQ ID NO: 63301 - protein, 11 aa, Homo sapiens
  misc_feature: Table A; Target 63301; HLA-B*56:01; PKHD1; ENSG00000170927; TAA
GPIFGDMLATA

SEQ ID NO: 63302 - protein, 9 aa, Homo sapiens
  misc_feature: Table A; Target 63302; HLA-B*13:02; PKHD1; ENSG00000170927; TAA
GQGGFTVKT

SEQ ID NO: 63303 - protein, 8 aa, Homo sapiens
  misc_feature: Table A; Target 63303; HLA-B*13:02; PKHD1; ENSG00000170927; TAA
GQNQIRFI

SEQ ID NO: 63304 - protein, 10 aa, Homo sapiens
  misc_feature: Table A; Target 63304; HLA-B*13:02; PKHD1; ENSG00000170927; TAA
GQNTQGNFSL

SEQ ID NO: 63305 - protein, 8 aa, Homo sapiens
  misc_feature: Table A; Target 63305; HLA-A*30:02; PKHD1; ENSG00000170927; TAA
GQNTTSVY

SEQ ID NO: 63306 - protein, 8 aa, Homo sapiens
  misc_feature: Table A; Target 63306; HLA-B*15:01; PKHD1; ENSG00000170927; TAA
GQNTTSVY

SEQ ID NO: 63307 - protein, 8 aa, Homo sapiens
  misc_feature: Table A; Target 63307; HLA-B*15:03; PKHD1; ENSG00000170927; TAA
GQNTTSVY

SEQ ID NO: 63308 - protein, 9 aa, Homo sapiens
  misc_feature: Table A; Target 63308; HLA-B*13:02; PKHD1; ENSG00000170927; TAA
GQNTTSVYI

SEQ ID NO: 63309 - protein, 9 aa, Homo sapiens
  misc_feature: Table A; Target 63309; HLA-A*02:03; PKHD1; ENSG00000170927; TAA
GQVQVILRV

SEQ ID NO: 63310 - protein, 9 aa, Homo sapiens
  misc_feature: Table A; Target 63310; HLA-A*02:04; PKHD1; ENSG00000170927; TAA
GQVQVILRV

SEQ ID NO: 63311 - protein, 9 aa, Homo sapiens
  misc_feature: Table A; Target 63311; HLA-A*30:01; PKHD1; ENSG00000170927; TAA
GQVQVILRV

SEQ ID NO: 63312 - protein, 9 aa, Homo sapiens
  misc_feature: Table A; Target 63312; HLA-B*13:02; PKHD1; ENSG00000170927; TAA
GQVQVILRV

SEQ ID NO: 63313 - protein, 9 aa, Homo sapiens
  misc_feature: Table A; Target 63313; HLA-C*02:02; PKHD1; ENSG00000170927; TAA
GQVQVILRV

SEQ ID NO: 63314 - protein, 9 aa, Homo sapiens
  misc_feature: Table A; Target 63314; HLA-C*06:02; PKHD1; ENSG00000170927; TAA
GQVQVILRV

SEQ ID NO: 63315 - protein, 9 aa, Homo sapiens
  misc_feature: Table A; Target 63315; HLA-B*27:05; PKHD1; ENSG00000170927; TAA
GRIVNVTVI

SEQ ID NO: 63316 - protein, 9 aa, Homo sapiens
  misc_feature: Table A; Target 63316; HLA-C*16:04; PKHD1; ENSG00000170927; TAA
GRIVNVTVI

SEQ ID NO: 63317 - protein, 9 aa, Homo sapiens
  misc_feature: Table A; Target 63317; HLA-A*03:02; PKHD1; ENSG00000170927; TAA
GSLGLSQEK

SEQ ID NO: 63318 - protein, 9 aa, Homo sapiens
  misc_feature: Table A; Target 63318; HLA-A*11:01; PKHD1; ENSG00000170927; TAA
GSLGLSQEK

SEQ ID NO: 63319 - protein, 10 aa, Homo sapiens
  misc_feature: Table A; Target 63319; HLA-A*11:01; PKHD1; ENSG00000170927; TAA
GSLGLSQEKK

SEQ ID NO: 63320 - protein, 9 aa, Homo sapiens
  misc_feature: Table A; Target 63320; HLA-A*25:01; PKHD1; ENSG00000170927; TAA
GTADWFDSW

SEQ ID NO: 63321 - protein, 9 aa, Homo sapiens
  misc_feature: Table A; Target 63321; HLA-B*57:01; PKHD1; ENSG00000170927; TAA
GTADWFDSW

SEQ ID NO: 63322 - protein, 11 aa, Homo sapiens
  misc_feature: Table A; Target 63322; HLA-A*01:01; PKHD1; ENSG00000170927; TAA
GTEEGSGLVLV

SEQ ID NO: 63323 - protein, 10 aa, Homo sapiens
  misc_feature: Table A; Target 63323; HLA-C*07:06; PKHD1; ENSG00000170927; TAA
GTELPLITAR

SEQ ID NO: 63324 - protein, 9 aa, Homo sapiens
  misc_feature: Table A; Target 63324; HLA-A*11:01; PKHD1; ENSG00000170927; TAA
GTLDFPVDR

SEQ ID NO: 63325 - protein, 9 aa, Homo sapiens
  misc_feature: Table A; Target 63325; HLA-A*31:01; PKHD1; ENSG00000170927; TAA
GTLDFPVDR

SEQ ID NO: 63326 - protein, 9 aa, Homo sapiens
  misc_feature: Table A; Target 63326; HLA-C*07:06; PKHD1; ENSG00000170927; TAA
GTLDFPVDR

SEQ ID NO: 63327 - protein, 9 aa, Homo sapiens
  misc_feature: Table A; Target 63327; HLA-A*03:01; PKHD1; ENSG00000170927; TAA
GTLENPLEK

SEQ ID NO: 63328 - protein, 9 aa, Homo sapiens
  misc_feature: Table A; Target 63328; HLA-A*03:02; PKHD1; ENSG00000170927; TAA
GTLENPLEK

SEQ ID NO: 63329 - protein, 9 aa, Homo sapiens
  misc_feature: Table A; Target 63329; HLA-A*11:01; PKHD1; ENSG00000170927; TAA
GTLENPLEK

SEQ ID NO: 63330 - protein, 9 aa, Homo sapiens
  misc_feature: Table A; Target 63330; HLA-A*03:01; PKHD1; ENSG00000170927; TAA
GTWQQKTPK

SEQ ID NO: 63331 - protein, 9 aa, Homo sapiens
  misc_feature: Table A; Target 63331; HLA-A*11:01; PKHD1; ENSG00000170927; TAA
GTWQQKTPK

SEQ ID NO: 63332 - protein, 9 aa, Homo sapiens
  misc_feature: Table A; Target 63332; HLA-A*02:07; PKHD1; ENSG00000170927; TAA
GVDLHIQYL

SEQ ID NO: 63333 - protein, 11 aa, Homo sapiens
  misc_feature: Table A; Target 63333; HLA-A*25:01; PKHD1; ENSG00000170927; TAA
GVIGYGNTSSF

SEQ ID NO: 63334 - protein, 11 aa, Homo sapiens
  misc_feature: Table A; Target 63334; HLA-A*26:01; PKHD1; ENSG00000170927; TAA
GVIGYGNTSSF

SEQ ID NO: 63335 - protein, 11 aa, Homo sapiens
  misc_feature: Table A; Target 63335; HLA-A*32:01; PKHD1; ENSG00000170927; TAA
GVIGYGNTSSF

SEQ ID NO: 63336 - protein, 11 aa, Homo sapiens
  misc_feature: Table A; Target 63336; HLA-B*15:01; PKHD1; ENSG00000170927; TAA
GVIGYGNTSSF

SEQ ID NO: 63337 - protein, 11 aa, Homo sapiens
  misc_feature: Table A; Target 63337; HLA-B*15:03; PKHD1; ENSG00000170927; TAA
GVIGYGNTSSF

SEQ ID NO: 63338 - protein, 11 aa, Homo sapiens
  misc_feature: Table A; Target 63338; HLA-B*46:01; PKHD1; ENSG00000170927; TAA
GVIGYGNTSSF

SEQ ID NO: 63339 - protein, 11 aa, Homo sapiens
  misc_feature: Table A; Target 63339; HLA-C*07:04; PKHD1; ENSG00000170927; TAA
GVIGYGNTSSF

SEQ ID NO: 63340 - protein, 9 aa, Homo sapiens
  misc_feature: Table A; Target 63340; HLA-A*03:02; PKHD1; ENSG00000170927; TAA
GVNPAAATR

SEQ ID NO: 63341 - protein, 9 aa, Homo sapiens
  misc_feature: Table A; Target 63341; HLA-A*31:01; PKHD1; ENSG00000170927; TAA
GVNPAAATR

SEQ ID NO: 63342 - protein, 9 aa, Homo sapiens
  misc_feature: Table A; Target 63342; HLA-A*33:03; PKHD1; ENSG00000170927; TAA
GVNPAAATR

SEQ ID NO: 63343 - protein, 9 aa, Homo sapiens
  misc_feature: Table A; Target 63343; HLA-C*07:06; PKHD1; ENSG00000170927; TAA
GVNPAAATR

SEQ ID NO: 63344 - protein, 9 aa, Homo sapiens
  misc_feature: Table A; Target 63344; HLA-A*02:07; PKHD1; ENSG00000170927; TAA
GVPGKLIHV

SEQ ID NO: 63345 - protein, 10 aa, Homo sapiens
  misc_feature: Table A; Target 63345; HLA-A*29:02; PKHD1; ENSG00000170927; TAA
GVPGKLIHVY

SEQ ID NO: 63346 - protein, 10 aa, Homo sapiens
  misc_feature: Table A; Target 63346; HLA-A*30:02; PKHD1; ENSG00000170927; TAA
GVPGKLIHVY

SEQ ID NO: 63347 - protein, 9 aa, Homo sapiens
  misc_feature: Table A; Target 63347; HLA-B*13:02; PKHD1; ENSG00000170927; TAA
GVSIHSQGV

SEQ ID NO: 63348 - protein, 10 aa, Homo sapiens
  misc_feature: Table A; Target 63348; HLA-A*29:02; PKHD1; ENSG00000170927; TAA
GVSLILFGSY

SEQ ID NO: 63349 - protein, 10 aa, Homo sapiens
  misc_feature: Table A; Target 63349; HLA-A*30:02; PKHD1; ENSG00000170927; TAA
GVSLILFGSY

SEQ ID NO: 63350 - protein, 9 aa, Homo sapiens
  misc_feature: Table A; Target 63350; HLA-A*01:01; PKHD1; ENSG00000170927; TAA
GVYGKVHLY

SEQ ID NO: 63351 - protein, 9 aa, Homo sapiens
  misc_feature: Table A; Target 63351; HLA-A*03:01; PKHD1; ENSG00000170927; TAA
GVYGKVHLY

SEQ ID NO: 63352 - protein, 9 aa, Homo sapiens
  misc_feature: Table A; Target 63352; HLA-A*26:01; PKHD1; ENSG00000170927; TAA
GVYGKVHLY

SEQ ID NO: 63353 - protein, 9 aa, Homo sapiens
  misc_feature: Table A; Target 63353; HLA-A*29:02; PKHD1; ENSG00000170927; TAA
GVYGKVHLY

SEQ ID NO: 63354 - protein, 9 aa, Homo sapiens
  misc_feature: Table A; Target 63354; HLA-A*30:02; PKHD1; ENSG00000170927; TAA
GVYGKVHLY

SEQ ID NO: 63355 - protein, 9 aa, Homo sapiens
  misc_feature: Table A; Target 63355; HLA-A*32:01; PKHD1; ENSG00000170927; TAA
GVYGKVHLY

SEQ ID NO: 63356 - protein, 9 aa, Homo sapiens
  misc_feature: Table A; Target 63356; HLA-B*15:01; PKHD1; ENSG00000170927; TAA
GVYGKVHLY

SEQ ID NO: 63357 - protein, 9 aa, Homo sapiens
  misc_feature: Table A; Target 63357; HLA-C*02:02; PKHD1; ENSG00000170927; TAA
GVYGKVHLY

SEQ ID NO: 63358 - protein, 8 aa, Homo sapiens
  misc_feature: Table A; Target 63358; HLA-C*14:02; PKHD1; ENSG00000170927; TAA
GYGNTSSF

SEQ ID NO: 63359 - protein, 9 aa, Homo sapiens
  misc_feature: Table A; Target 63359; HLA-A*24:02; PKHD1; ENSG00000170927; TAA
GYGYFFHLM

SEQ ID NO: 63360 - protein, 9 aa, Homo sapiens
  misc_feature: Table A; Target 63360; HLA-B*35:03; PKHD1; ENSG00000170927; TAA
HAAASHGVL

SEQ ID NO: 63361 - protein, 9 aa, Homo sapiens
  misc_feature: Table A; Target 63361; HLA-B*40:01; PKHD1; ENSG00000170927; TAA
HAAASHGVL

SEQ ID NO: 63362 - protein, 9 aa, Homo sapiens
  misc_feature: Table A; Target 63362; HLA-C*03:03; PKHD1; ENSG00000170927; TAA
HAAASHGVL

SEQ ID NO: 63363 - protein, 9 aa, Homo sapiens
  misc_feature: Table A; Target 63363; HLA-C*03:04; PKHD1; ENSG00000170927; TAA
HAAASHGVL

SEQ ID NO: 63364 - protein, 9 aa, Homo sapiens
  misc_feature: Table A; Target 63364; HLA-C*12:03; PKHD1; ENSG00000170927; TAA
HAAASHGVL

SEQ ID NO: 63365 - protein, 9 aa, Homo sapiens
  misc_feature: Table A; Target 63365; HLA-C*16:01; PKHD1; ENSG00000170927; TAA
HAAASHGVL

SEQ ID NO: 63366 - protein, 9 aa, Homo sapiens
  misc_feature: Table A; Target 63366; HLA-C*16:02; PKHD1; ENSG00000170927; TAA
HAAASHGVL

SEQ ID NO: 63367 - protein, 11 aa, Homo sapiens
  misc_feature: Table A; Target 63367; HLA-B*35:01; PKHD1; ENSG00000170927; TAA
HAILVSDGGEL

SEQ ID NO: 63368 - protein, 11 aa, Homo sapiens
  misc_feature: Table A; Target 63368; HLA-B*35:03; PKHD1; ENSG00000170927; TAA
HAILVSDGGEL

SEQ ID NO: 63369 - protein, 11 aa, Homo sapiens
  misc_feature: Table A; Target 63369; HLA-C*03:03; PKHD1; ENSG00000170927; TAA
HAILVSDGGEL

SEQ ID NO: 63370 - protein, 11 aa, Homo sapiens
  misc_feature: Table A; Target 63370; HLA-C*03:04; PKHD1; ENSG00000170927; TAA
HAILVSDGGEL

SEQ ID NO: 63371 - protein, 9 aa, Homo sapiens
  misc_feature: Table A; Target 63371; HLA-A*23:01; PKHD1; ENSG00000170927; TAA
HALDTVLAL

SEQ ID NO: 63372 - protein, 9 aa, Homo sapiens
  misc_feature: Table A; Target 63372; HLA-A*25:01; PKHD1; ENSG00000170927; TAA
HALDTVLAL

SEQ ID NO: 63373 - protein, 9 aa, Homo sapiens
  misc_feature: Table A; Target 63373; HLA-B*13:02; PKHD1; ENSG00000170927; TAA
HALDTVLAL

SEQ ID NO: 63374 - protein, 9 aa, Homo sapiens
  misc_feature: Table A; Target 63374; HLA-B*15:03; PKHD1; ENSG00000170927; TAA
HALDTVLAL

SEQ ID NO: 63375 - protein, 9 aa, Homo sapiens
  misc_feature: Table A; Target 63375; HLA-B*35:01; PKHD1; ENSG00000170927; TAA
HALDTVLAL

SEQ ID NO: 63376 - protein, 9 aa, Homo sapiens
  misc_feature: Table A; Target 63376; HLA-B*35:03; PKHD1; ENSG00000170927; TAA
HALDTVLAL

SEQ ID NO: 63377 - protein, 9 aa, Homo sapiens
  misc_feature: Table A; Target 63377; HLA-B*39:01; PKHD1; ENSG00000170927; TAA
HALDTVLAL

SEQ ID NO: 63378 - protein, 9 aa, Homo sapiens
  misc_feature: Table A; Target 63378; HLA-B*46:01; PKHD1; ENSG00000170927; TAA
HALDTVLAL

SEQ ID NO: 63379 - protein, 9 aa, Homo sapiens
  misc_feature: Table A; Target 63379; HLA-B*51:01; PKHD1; ENSG00000170927; TAA
HALDTVLAL

SEQ ID NO: 63380 - protein, 9 aa, Homo sapiens
  misc_feature: Table A; Target 63380; HLA-B*58:01; PKHD1; ENSG00000170927; TAA
HALDTVLAL

SEQ ID NO: 63381 - protein, 9 aa, Homo sapiens
  misc_feature: Table A; Target 63381; HLA-C*01:02; PKHD1; ENSG00000170927; TAA
HALDTVLAL

SEQ ID NO: 63382 - protein, 9 aa, Homo sapiens
  misc_feature: Table A; Target 63382; HLA-C*02:02; PKHD1; ENSG00000170927; TAA
HALDTVLAL

SEQ ID NO: 63383 - protein, 9 aa, Homo sapiens
  misc_feature: Table A; Target 63383; HLA-C*03:03; PKHD1; ENSG00000170927; TAA
HALDTVLAL

SEQ ID NO: 63384 - protein, 9 aa, Homo sapiens
  misc_feature: Table A; Target 63384; HLA-C*03:04; PKHD1; ENSG00000170927; TAA
HALDTVLAL

SEQ ID NO: 63385 - protein, 9 aa, Homo sapiens
  misc_feature: Table A; Target 63385; HLA-C*05:01; PKHD1; ENSG00000170927; TAA
HALDTVLAL

SEQ ID NO: 63386 - protein, 9 aa, Homo sapiens
  misc_feature: Table A; Target 63386; HLA-C*07:04; PKHD1; ENSG00000170927; TAA
HALDTVLAL

SEQ ID NO: 63387 - protein, 9 aa, Homo sapiens
  misc_feature: Table A; Target 63387; HLA-C*07:06; PKHD1; ENSG00000170927; TAA
HALDTVLAL

SEQ ID NO: 63388 - protein, 9 aa, Homo sapiens
  misc_feature: Table A; Target 63388; HLA-C*12:03; PKHD1; ENSG00000170927; TAA
HALDTVLAL

SEQ ID NO: 63389 - protein, 9 aa, Homo sapiens
  misc_feature: Table A; Target 63389; HLA-C*16:02; PKHD1; ENSG00000170927; TAA
HALDTVLAL

SEQ ID NO: 63390 - protein, 9 aa, Homo sapiens
  misc_feature: Table A; Target 63390; HLA-C*16:04; PKHD1; ENSG00000170927; TAA
HALDTVLAL

SEQ ID NO: 63391 - protein, 8 aa, Homo sapiens
  misc_feature: Table A; Target 63391; HLA-A*30:01; PKHD1; ENSG00000170927; TAA
HEAEVLTV

SEQ ID NO: 63392 - protein, 8 aa, Homo sapiens
  misc_feature: Table A; Target 63392; HLA-B*18:01; PKHD1; ENSG00000170927; TAA
HEAEVLTV

SEQ ID NO: 63393 - protein, 8 aa, Homo sapiens
  misc_feature: Table A; Target 63393; HLA-B*49:01; PKHD1; ENSG00000170927; TAA
HEAEVLTV

SEQ ID NO: 63394 - protein, 8 aa, Homo sapiens
  misc_feature: Table A; Target 63394; HLA-B*49:01; PKHD1; ENSG00000170927; TAA
HELQSPHV

SEQ ID NO: 63395 - protein, 9 aa, Homo sapiens
  misc_feature: Table A; Target 63395; HLA-A*30:01; PKHD1; ENSG00000170927; TAA
HELQSPHVF

SEQ ID NO: 63396 - protein, 9 aa, Homo sapiens
  misc_feature: Table A; Target 63396; HLA-B*18:01; PKHD1; ENSG00000170927; TAA
HELQSPHVF

SEQ ID NO: 63397 - protein, 9 aa, Homo sapiens
  misc_feature: Table A; Target 63397; HLA-B*37:01; PKHD1; ENSG00000170927; TAA
HELQSPHVF

SEQ ID NO: 63398 - protein, 9 aa, Homo sapiens
  misc_feature: Table A; Target 63398; HLA-B*40:01; PKHD1; ENSG00000170927; TAA
HELQSPHVF

SEQ ID NO: 63399 - protein, 9 aa, Homo sapiens
  misc_feature: Table A; Target 63399; HLA-B*44:02; PKHD1; ENSG00000170927; TAA
HELQSPHVF

SEQ ID NO: 63400 - protein, 9 aa, Homo sapiens
  misc_feature: Table A; Target 63400; HLA-B*44:03; PKHD1; ENSG00000170927; TAA
HELQSPHVF

SEQ ID NO: 63401 - protein, 10 aa, Homo sapiens
  misc_feature: Table A; Target 63401; HLA-A*30:01; PKHD1; ENSG00000170927; TAA
HEMPGHEETL

SEQ ID NO: 63402 - protein, 10 aa, Homo sapiens
  misc_feature: Table A; Target 63402; HLA-B*18:01; PKHD1; ENSG00000170927; TAA
HEMPGHEETL

SEQ ID NO: 63403 - protein, 10 aa, Homo sapiens
  misc_feature: Table A; Target 63403; HLA-B*37:01; PKHD1; ENSG00000170927; TAA
HEMPGHEETL

SEQ ID NO: 63404 - protein, 10 aa, Homo sapiens
  misc_feature: Table A; Target 63404; HLA-B*38:01; PKHD1; ENSG00000170927; TAA
HEMPGHEETL

SEQ ID NO: 63405 - protein, 10 aa, Homo sapiens
  misc_feature: Table A; Target 63405; HLA-B*39:01; PKHD1; ENSG00000170927; TAA
HEMPGHEETL

SEQ ID NO: 63406 - protein, 10 aa, Homo sapiens
  misc_feature: Table A; Target 63406; HLA-B*40:01; PKHD1; ENSG00000170927; TAA
HEMPGHEETL

SEQ ID NO: 63407 - protein, 10 aa, Homo sapiens
  misc_feature: Table A; Target 63407; HLA-B*40:02; PKHD1; ENSG00000170927; TAA
HEMPGHEETL

SEQ ID NO: 63408 - protein, 10 aa, Homo sapiens
  misc_feature: Table A; Target 63408; HLA-B*44:02; PKHD1; ENSG00000170927; TAA
HEMPGHEETL

SEQ ID NO: 63409 - protein, 10 aa, Homo sapiens
  misc_feature: Table A; Target 63409; HLA-B*44:03; PKHD1; ENSG00000170927; TAA
HEMPGHEETL

SEQ ID NO: 63410 - protein, 10 aa, Homo sapiens
  misc_feature: Table A; Target 63410; HLA-B*49:01; PKHD1; ENSG00000170927; TAA
HEMPGHEETL

SEQ ID NO: 63411 - protein, 10 aa, Homo sapiens
  misc_feature: Table A; Target 63411; HLA-C*02:02; PKHD1; ENSG00000170927; TAA
HEMPGHEETL

SEQ ID NO: 63412 - protein, 10 aa, Homo sapiens
  misc_feature: Table A; Target 63412; HLA-C*16:04; PKHD1; ENSG00000170927; TAA
HEMPGHEETL

SEQ ID NO: 63413 - protein, 8 aa, Homo sapiens
  misc_feature: Table A; Target 63413; HLA-B*08:01; PKHD1; ENSG00000170927; TAA
HFAHKGSL

SEQ ID NO: 63414 - protein, 8 aa, Homo sapiens
  misc_feature: Table A; Target 63414; HLA-B*51:01; PKHD1; ENSG00000170927; TAA
HGGSLLTI

SEQ ID NO: 63415 - protein, 10 aa, Homo sapiens
  misc_feature: Table A; Target 63415; HLA-A*25:01; PKHD1; ENSG00000170927; TAA
HGIDLEGQAY

SEQ ID NO: 63416 - protein, 10 aa, Homo sapiens
  misc_feature: Table A; Target 63416; HLA-A*26:01; PKHD1; ENSG00000170927; TAA
HGIDLEGQAY

SEQ ID NO: 63417 - protein, 10 aa, Homo sapiens
  misc_feature: Table A; Target 63417; HLA-A*30:02; PKHD1; ENSG00000170927; TAA
HGIDLEGQAY

SEQ ID NO: 63418 - protein, 10 aa, Homo sapiens
  misc_feature: Table A; Target 63418; HLA-B*15:01; PKHD1; ENSG00000170927; TAA
HGIDLEGQAY

SEQ ID NO: 63419 - protein, 10 aa, Homo sapiens
  misc_feature: Table A; Target 63419; HLA-B*15:03; PKHD1; ENSG00000170927; TAA
HGIDLEGQAY

SEQ ID NO: 63420 - protein, 10 aa, Homo sapiens
  misc_feature: Table A; Target 63420; HLA-B*18:01; PKHD1; ENSG00000170927; TAA
HGIDLEGQAY

SEQ ID NO: 63421 - protein, 10 aa, Homo sapiens
  misc_feature: Table A; Target 63421; HLA-B*35:01; PKHD1; ENSG00000170927; TAA
HGIDLEGQAY

SEQ ID NO: 63422 - protein, 10 aa, Homo sapiens
  misc_feature: Table A; Target 63422; HLA-B*35:03; PKHD1; ENSG00000170927; TAA
HGIDLEGQAY

SEQ ID NO: 63423 - protein, 10 aa, Homo sapiens
  misc_feature: Table A; Target 63423; HLA-B*39:01; PKHD1; ENSG00000170927; TAA
HGIDLEGQAY

SEQ ID NO: 63424 - protein, 10 aa, Homo sapiens
  misc_feature: Table A; Target 63424; HLA-B*46:01; PKHD1; ENSG00000170927; TAA
HGIDLEGQAY

SEQ ID NO: 63425 - protein, 10 aa, Homo sapiens
  misc_feature: Table A; Target 63425; HLA-B*55:01; PKHD1; ENSG00000170927; TAA
HGIDLEGQAY

SEQ ID NO: 63426 - protein, 10 aa, Homo sapiens
  misc_feature: Table A; Target 63426; HLA-C*02:02; PKHD1; ENSG00000170927; TAA
HGIDLEGQAY

SEQ ID NO: 63427 - protein, 10 aa, Homo sapiens
  misc_feature: Table A; Target 63427; HLA-C*03:03; PKHD1; ENSG00000170927; TAA
HGIDLEGQAY

SEQ ID NO: 63428 - protein, 10 aa, Homo sapiens
  misc_feature: Table A; Target 63428; HLA-C*07:04; PKHD1; ENSG00000170927; TAA
HGIDLEGQAY

SEQ ID NO: 63429 - protein, 10 aa, Homo sapiens
  misc_feature: Table A; Target 63429; HLA-C*14:02; PKHD1; ENSG00000170927; TAA
HGIDLEGQAY

SEQ ID NO: 63430 - protein, 10 aa, Homo sapiens
  misc_feature: Table A; Target 63430; HLA-C*16:04; PKHD1; ENSG00000170927; TAA
HGIDLEGQAY

SEQ ID NO: 63431 - protein, 10 aa, Homo sapiens
  misc_feature: Table A; Target 63431; HLA-C*07:06; PKHD1; ENSG00000170927; TAA
HGNVVAGSER

SEQ ID NO: 63432 - protein, 9 aa, Homo sapiens
  misc_feature: Table A; Target 63432; HLA-A*01:01; PKHD1; ENSG00000170927; TAA
HIDPGTIGV

SEQ ID NO: 63433 - protein, 9 aa, Homo sapiens
  misc_feature: Table A; Target 63433; HLA-A*02:01; PKHD1; ENSG00000170927; TAA
HIDPGTIGV

SEQ ID NO: 63434 - protein, 9 aa, Homo sapiens
  misc_feature: Table A; Target 63434; HLA-A*02:07; PKHD1; ENSG00000170927; TAA
HIDPGTIGV

SEQ ID NO: 63435 - protein, 9 aa, Homo sapiens
  misc_feature: Table A; Target 63435; HLA-B*55:01; PKHD1; ENSG00000170927; TAA
HIDPGTIGV

SEQ ID NO: 63436 - protein, 9 aa, Homo sapiens
  misc_feature: Table A; Target 63436; HLA-C*05:01; PKHD1; ENSG00000170927; TAA
HIDPGTIGV

SEQ ID NO: 63437 - protein, 10 aa, Homo sapiens
  misc_feature: Table A; Target 63437; HLA-A*01:01; PKHD1; ENSG00000170927; TAA
HIDPGTIGVY

SEQ ID NO: 63438 - protein, 10 aa, Homo sapiens
  misc_feature: Table A; Target 63438; HLA-A*25:01; PKHD1; ENSG00000170927; TAA
HIDPGTIGVY

SEQ ID NO: 63439 - protein, 10 aa, Homo sapiens
  misc_feature: Table A; Target 63439; HLA-A*26:01; PKHD1; ENSG00000170927; TAA
HIDPGTIGVY

SEQ ID NO: 63440 - protein, 10 aa, Homo sapiens
  misc_feature: Table A; Target 63440; HLA-A*30:02; PKHD1; ENSG00000170927; TAA
HIDPGTIGVY

SEQ ID NO: 63441 - protein, 10 aa, Homo sapiens
  misc_feature: Table A; Target 63441; HLA-B*15:01; PKHD1; ENSG00000170927; TAA
HIDPGTIGVY

SEQ ID NO: 63442 - protein, 10 aa, Homo sapiens
  misc_feature: Table A; Target 63442; HLA-B*35:01; PKHD1; ENSG00000170927; TAA
HIDPGTIGVY

SEQ ID NO: 63443 - protein, 10 aa, Homo sapiens
  misc_feature: Table A; Target 63443; HLA-C*07:04; PKHD1; ENSG00000170927; TAA
HIDPGTIGVY

SEQ ID NO: 63444 - protein, 9 aa, Homo sapiens
  misc_feature: Table A; Target 63444; HLA-A*03:01; PKHD1; ENSG00000170927; TAA
HIGVIGYNK

SEQ ID NO: 63445 - protein, 9 aa, Homo sapiens
  misc_feature: Table A; Target 63445; HLA-A*03:02; PKHD1; ENSG00000170927; TAA
HIGVIGYNK

SEQ ID NO: 63446 - protein, 9 aa, Homo sapiens
  misc_feature: Table A; Target 63446; HLA-B*35:03; PKHD1; ENSG00000170927; TAA
HILASMETL

SEQ ID NO: 63447 - protein, 9 aa, Homo sapiens
  misc_feature: Table A; Target 63447; HLA-C*03:04; PKHD1; ENSG00000170927; TAA
HILASMETL

SEQ ID NO: 63448 - protein, 9 aa, Homo sapiens
  misc_feature: Table A; Target 63448; HLA-B*08:01; PKHD1; ENSG00000170927; TAA
HILKATVAL

SEQ ID NO: 63449 - protein, 9 aa, Homo sapiens
  misc_feature: Table A; Target 63449; HLA-B*13:02; PKHD1; ENSG00000170927; TAA
HLVNVNMVV

SEQ ID NO: 63450 - protein, 9 aa, Homo sapiens
  misc_feature: Table A; Target 63450; HLA-B*35:01; PKHD1; ENSG00000170927; TAA
HPETIQEQL

SEQ ID NO: 63451 - protein, 9 aa, Homo sapiens
  misc_feature: Table A; Target 63451; HLA-B*35:03; PKHD1; ENSG00000170927; TAA
HPETIQEQL

SEQ ID NO: 63452 - protein, 10 aa, Homo sapiens
  misc_feature: Table A; Target 63452; HLA-A*68:01; PKHD1; ENSG00000170927; TAA
HSANLTSTDR

SEQ ID NO: 63453 - protein, 10 aa, Homo sapiens
  misc_feature: Table A; Target 63453; HLA-C*07:06; PKHD1; ENSG00000170927; TAA
HSANLTSTDR

SEQ ID NO: 63454 - protein, 9 aa, Homo sapiens
  misc_feature: Table A; Target 63454; HLA-A*25:01; PKHD1; ENSG00000170927; TAA
HSISGIMKL

SEQ ID NO: 63455 - protein, 9 aa, Homo sapiens
  misc_feature: Table A; Target 63455; HLA-C*02:02; PKHD1; ENSG00000170927; TAA
HSISGIMKL

SEQ ID NO: 63456 - protein, 9 aa, Homo sapiens
  misc_feature: Table A; Target 63456; HLA-C*03:03; PKHD1; ENSG00000170927; TAA
HSISGIMKL

SEQ ID NO: 63457 - protein, 9 aa, Homo sapiens
  misc_feature: Table A; Target 63457; HLA-C*03:04; PKHD1; ENSG00000170927; TAA
HSISGIMKL

SEQ ID NO: 63458 - protein, 9 aa, Homo sapiens
  misc_feature: Table A; Target 63458; HLA-B*13:02; PKHD1; ENSG00000170927; TAA
HSQGVDLHI

SEQ ID NO: 63459 - protein, 11 aa, Homo sapiens
  misc_feature: Table A; Target 63459; HLA-A*30:02; PKHD1; ENSG00000170927; TAA
HSQGVDLHIQY

SEQ ID NO: 63460 - protein, 10 aa, Homo sapiens
  misc_feature: Table A; Target 63460; HLA-A*01:01; PKHD1; ENSG00000170927; TAA
HSSLHGLHLY

SEQ ID NO: 63461 - protein, 9 aa, Homo sapiens
  misc_feature: Table A; Target 63461; HLA-A*23:01; PKHD1; ENSG00000170927; TAA
HYFPKNFSL

SEQ ID NO: 63462 - protein, 9 aa, Homo sapiens
  misc_feature: Table A; Target 63462; HLA-A*24:02; PKHD1; ENSG00000170927; TAA
HYFPKNFSL

SEQ ID NO: 63463 - protein, 9 aa, Homo sapiens
  misc_feature: Table A; Target 63463; HLA-A*33:01; PKHD1; ENSG00000170927; TAA
HYLSVFYTR

SEQ ID NO: 63464 - protein, 9 aa, Homo sapiens
  misc_feature: Table A; Target 63464; HLA-A*33:03; PKHD1; ENSG00000170927; TAA
HYLSVFYTR

SEQ ID NO: 63465 - protein, 8 aa, Homo sapiens
  misc_feature: Table A; Target 63465; HLA-C*05:01; PKHD1; ENSG00000170927; TAA
IADTNVTV

SEQ ID NO: 63466 - protein, 9 aa, Homo sapiens
  misc_feature: Table A; Target 63466; HLA-C*16:01; PKHD1; ENSG00000170927; TAA
IASGNERII

SEQ ID NO: 63467 - protein, 9 aa, Homo sapiens
  misc_feature: Table A; Target 63467; HLA-C*16:02; PKHD1; ENSG00000170927; TAA
IASGNERII

SEQ ID NO: 63468 - protein, 8 aa, Homo sapiens
  misc_feature: Table A; Target 63468; HLA-B*18:01; PKHD1; ENSG00000170927; TAA
IDLEGQAY

SEQ ID NO: 63469 - protein, 8 aa, Homo sapiens
  misc_feature: Table A; Target 63469; HLA-C*14:02; PKHD1; ENSG00000170927; TAA
IDLEGQAY

SEQ ID NO: 63470 - protein, 9 aa, Homo sapiens
  misc_feature: Table A; Target 63470; HLA-A*30:01; PKHD1; ENSG00000170927; TAA
IEIGDSPTV

SEQ ID NO: 63471 - protein, 9 aa, Homo sapiens
  misc_feature: Table A; Target 63471; HLA-B*40:01; PKHD1; ENSG00000170927; TAA
IEIGDSPTV

SEQ ID NO: 63472 - protein, 9 aa, Homo sapiens
  misc_feature: Table A; Target 63472; HLA-B*40:02; PKHD1; ENSG00000170927; TAA
IEIGDSPTV

SEQ ID NO: 63473 - protein, 9 aa, Homo sapiens
  misc_feature: Table A; Target 63473; HLA-B*49:01; PKHD1; ENSG00000170927; TAA
IEIGDSPTV

SEQ ID NO: 63474 - protein, 9 aa, Homo sapiens
  misc_feature: Table A; Target 63474; HLA-C*03:04; PKHD1; ENSG00000170927; TAA
IEIGDSPTV

SEQ ID NO: 63475 - protein, 9 aa, Homo sapiens
  misc_feature: Table A; Target 63475; HLA-A*30:01; PKHD1; ENSG00000170927; TAA
IEIRSGVSI

SEQ ID NO: 63476 - protein, 9 aa, Homo sapiens
  misc_feature: Table A; Target 63476; HLA-B*40:01; PKHD1; ENSG00000170927; TAA
IEIRSGVSI

SEQ ID NO: 63477 - protein, 9 aa, Homo sapiens
  misc_feature: Table A; Target 63477; HLA-B*49:01; PKHD1; ENSG00000170927; TAA
IEIRSGVSI

SEQ ID NO: 63478 - protein, 8 aa, Homo sapiens
  misc_feature: Table A; Target 63478; HLA-B*18:01; PKHD1; ENSG00000170927; TAA
IEVLLLAV

SEQ ID NO: 63479 - protein, 8 aa, Homo sapiens
  misc_feature: Table A; Target 63479; HLA-B*49:01; PKHD1; ENSG00000170927; TAA
IEVLLLAV

SEQ ID NO: 63480 - protein, 11 aa, Homo sapiens
  misc_feature: Table A; Target 63480; HLA-A*29:02; PKHD1; ENSG00000170927; TAA
IFDGLELGVLY

SEQ ID NO: 63481 - protein, 10 aa, Homo sapiens
  misc_feature: Table A; Target 63481; HLA-A*23:01; PKHD1; ENSG00000170927; TAA
IFMAPGPIEL

SEQ ID NO: 63482 - protein, 10 aa, Homo sapiens
  misc_feature: Table A; Target 63482; HLA-C*14:02; PKHD1; ENSG00000170927; TAA
IFMAPGPIEL

SEQ ID NO: 63483 - protein, 9 aa, Homo sapiens
  misc_feature: Table A; Target 63483; HLA-C*14:02; PKHD1; ENSG00000170927; TAA
IFPSQGSAC

SEQ ID NO: 63484 - protein, 9 aa, Homo sapiens
  misc_feature: Table A; Target 63484; HLA-C*14:02; PKHD1; ENSG00000170927; TAA
IFSNQTNVV

SEQ ID NO: 63485 - protein, 9 aa, Homo sapiens
  misc_feature: Table A; Target 63485; HLA-C*02:02; PKHD1; ENSG00000170927; TAA
IGANYFNIM

SEQ ID NO: 63486 - protein, 8 aa, Homo sapiens
  misc_feature: Table A; Target 63486; HLA-C*05:01; PKHD1; ENSG00000170927; TAA
IGDLPNFI

SEQ ID NO: 63487 - protein, 9 aa, Homo sapiens
  misc_feature: Table A; Target 63487; HLA-C*03:04; PKHD1; ENSG00000170927; TAA
IGFSRDPAL

SEQ ID NO: 63488 - protein, 9 aa, Homo sapiens
  misc_feature: Table A; Target 63488; HLA-B*57:01; PKHD1; ENSG00000170927; TAA
IGVQIHNTW

SEQ ID NO: 63489 - protein, 9 aa, Homo sapiens
  misc_feature: Table A; Target 63489; HLA-B*58:01; PKHD1; ENSG00000170927; TAA
IGVQIHNTW

SEQ ID NO: 63490 - protein, 9 aa, Homo sapiens
  misc_feature: Table A; Target 63490; HLA-A*23:01; PKHD1; ENSG00000170927; TAA
IGYGNTSSF

SEQ ID NO: 63491 - protein, 9 aa, Homo sapiens
  misc_feature: Table A; Target 63491; HLA-A*25:01; PKHD1; ENSG00000170927; TAA
IGYGNTSSF

SEQ ID NO: 63492 - protein, 9 aa, Homo sapiens
  misc_feature: Table A; Target 63492; HLA-A*32:01; PKHD1; ENSG00000170927; TAA
IGYGNTSSF

SEQ ID NO: 63493 - protein, 9 aa, Homo sapiens
  misc_feature: Table A; Target 63493; HLA-B*15:01; PKHD1; ENSG00000170927; TAA
IGYGNTSSF

SEQ ID NO: 63494 - protein, 9 aa, Homo sapiens
  misc_feature: Table A; Target 63494; HLA-B*15:03; PKHD1; ENSG00000170927; TAA
IGYGNTSSF

SEQ ID NO: 63495 - protein, 9 aa, Homo sapiens
  misc_feature: Table A; Target 63495; HLA-B*46:01; PKHD1; ENSG00000170927; TAA
IGYGNTSSF

SEQ ID NO: 63496 - protein, 9 aa, Homo sapiens
  misc_feature: Table A; Target 63496; HLA-B*58:01; PKHD1; ENSG00000170927; TAA
IGYGNTSSF

SEQ ID NO: 63497 - protein, 9 aa, Homo sapiens
  misc_feature: Table A; Target 63497; HLA-C*01:02; PKHD1; ENSG00000170927; TAA
IGYGNTSSF

SEQ ID NO: 63498 - protein, 9 aa, Homo sapiens
  misc_feature: Table A; Target 63498; HLA-C*02:02; PKHD1; ENSG00000170927; TAA
IGYGNTSSF

SEQ ID NO: 63499 - protein, 9 aa, Homo sapiens
  misc_feature: Table A; Target 63499; HLA-C*03:03; PKHD1; ENSG00000170927; TAA
IGYGNTSSF

SEQ ID NO: 63500 - protein, 9 aa, Homo sapiens
  misc_feature: Table A; Target 63500; HLA-C*03:04; PKHD1; ENSG00000170927; TAA
IGYGNTSSF

SEQ ID NO: 63501 - protein, 9 aa, Homo sapiens
  misc_feature: Table A; Target 63501; HLA-C*05:01; PKHD1; ENSG00000170927; TAA
IGYGNTSSF

SEQ ID NO: 63502 - protein, 9 aa, Homo sapiens
  misc_feature: Table A; Target 63502; HLA-C*12:03; PKHD1; ENSG00000170927; TAA
IGYGNTSSF

SEQ ID NO: 63503 - protein, 9 aa, Homo sapiens
  misc_feature: Table A; Target 63503; HLA-C*14:02; PKHD1; ENSG00000170927; TAA
IGYGNTSSF

SEQ ID NO: 63504 - protein, 9 aa, Homo sapiens
  misc_feature: Table A; Target 63504; HLA-C*16:01; PKHD1; ENSG00000170927; TAA
IGYGNTSSF

SEQ ID NO: 63505 - protein, 9 aa, Homo sapiens
  misc_feature: Table A; Target 63505; HLA-C*16:04; PKHD1; ENSG00000170927; TAA
IGYGNTSSF

SEQ ID NO: 63506 - protein, 10 aa, Homo sapiens
  misc_feature: Table A; Target 63506; HLA-A*03:01; PKHD1; ENSG00000170927; TAA
IGYGNTSSFK

SEQ ID NO: 63507 - protein, 11 aa, Homo sapiens
  misc_feature: Table A; Target 63507; HLA-B*38:01; PKHD1; ENSG00000170927; TAA
IHAAASHGVLL

SEQ ID NO: 63508 - protein, 11 aa, Homo sapiens
  misc_feature: Table A; Target 63508; HLA-B*38:01; PKHD1; ENSG00000170927; TAA
IHEMPGHEETL

SEQ ID NO: 63509 - protein, 10 aa, Homo sapiens
  misc_feature: Table A; Target 63509; HLA-B*38:01; PKHD1; ENSG00000170927; TAA
IHIDPGTIGV

SEQ ID NO: 63510 - protein, 10 aa, Homo sapiens
  misc_feature: Table A; Target 63510; HLA-B*39:01; PKHD1; ENSG00000170927; TAA
IHIDPGTIGV

SEQ ID NO: 63511 - protein, 11 aa, Homo sapiens
  misc_feature: Table A; Target 63511; HLA-A*29:02; PKHD1; ENSG00000170927; TAA
IHIDPGTIGVY

SEQ ID NO: 63512 - protein, 11 aa, Homo sapiens
  misc_feature: Table A; Target 63512; HLA-A*30:02; PKHD1; ENSG00000170927; TAA
IHIDPGTIGVY

SEQ ID NO: 63513 - protein, 11 aa, Homo sapiens
  misc_feature: Table A; Target 63513; HLA-B*15:03; PKHD1; ENSG00000170927; TAA
IHIDPGTIGVY

SEQ ID NO: 63514 - protein, 11 aa, Homo sapiens
  misc_feature: Table A; Target 63514; HLA-B*39:01; PKHD1; ENSG00000170927; TAA
IHIDPGTIGVY

SEQ ID NO: 63515 - protein, 10 aa, Homo sapiens
  misc_feature: Table A; Target 63515; HLA-B*38:01; PKHD1; ENSG00000170927; TAA
IHSQGVDLHI

SEQ ID NO: 63516 - protein, 9 aa, Homo sapiens
  misc_feature: Table A; Target 63516; HLA-A*02:01; PKHD1; ENSG00000170927; TAA
IIADTNVTV

SEQ ID NO: 63517 - protein, 9 aa, Homo sapiens
  misc_feature: Table A; Target 63517; HLA-A*02:03; PKHD1; ENSG00000170927; TAA
IIADTNVTV

SEQ ID NO: 63518 - protein, 9 aa, Homo sapiens
  misc_feature: Table A; Target 63518; HLA-A*02:04; PKHD1; ENSG00000170927; TAA
IIADTNVTV

SEQ ID NO: 63519 - protein, 9 aa, Homo sapiens
  misc_feature: Table A; Target 63519; HLA-A*02:07; PKHD1; ENSG00000170927; TAA
IIADTNVTV

SEQ ID NO: 63520 - protein, 9 aa, Homo sapiens
  misc_feature: Table A; Target 63520; HLA-B*13:02; PKHD1; ENSG00000170927; TAA
IIADTNVTV

SEQ ID NO: 63521 - protein, 9 aa, Homo sapiens
  misc_feature: Table A; Target 63521; HLA-B*46:01; PKHD1; ENSG00000170927; TAA
IIADTNVTV

SEQ ID NO: 63522 - protein, 9 aa, Homo sapiens
  misc_feature: Table A; Target 63522; HLA-B*55:01; PKHD1; ENSG00000170927; TAA
IIADTNVTV

SEQ ID NO: 63523 - protein, 9 aa, Homo sapiens
  misc_feature: Table A; Target 63523; HLA-C*02:02; PKHD1; ENSG00000170927; TAA
IIADTNVTV

SEQ ID NO: 63524 - protein, 9 aa, Homo sapiens
  misc_feature: Table A; Target 63524; HLA-C*05:01; PKHD1; ENSG00000170927; TAA
IIADTNVTV

SEQ ID NO: 63525 - protein, 9 aa, Homo sapiens
  misc_feature: Table A; Target 63525; HLA-A*23:01; PKHD1; ENSG00000170927; TAA
IITAVTENF

SEQ ID NO: 63526 - protein, 9 aa, Homo sapiens
  misc_feature: Table A; Target 63526; HLA-A*24:02; PKHD1; ENSG00000170927; TAA
IITAVTENF

SEQ ID NO: 63527 - protein, 9 aa, Homo sapiens
  misc_feature: Table A; Target 63527; HLA-A*32:01; PKHD1; ENSG00000170927; TAA
IITAVTENF

SEQ ID NO: 63528 - protein, 9 aa, Homo sapiens
  misc_feature: Table A; Target 63528; HLA-B*15:01; PKHD1; ENSG00000170927; TAA
IITAVTENF

SEQ ID NO: 63529 - protein, 9 aa, Homo sapiens
  misc_feature: Table A; Target 63529; HLA-B*15:03; PKHD1; ENSG00000170927; TAA
IITAVTENF

SEQ ID NO: 63530 - protein, 9 aa, Homo sapiens
  misc_feature: Table A; Target 63530; HLA-B*46:01; PKHD1; ENSG00000170927; TAA
IITAVTENF

SEQ ID NO: 63531 - protein, 9 aa, Homo sapiens
  misc_feature: Table A; Target 63531; HLA-B*58:01; PKHD1; ENSG00000170927; TAA
IITAVTENF

SEQ ID NO: 63532 - protein, 9 aa, Homo sapiens
  misc_feature: Table A; Target 63532; HLA-C*05:01; PKHD1; ENSG00000170927; TAA
IITAVTENF

SEQ ID NO: 63533 - protein, 9 aa, Homo sapiens
  misc_feature: Table A; Target 63533; HLA-C*14:02; PKHD1; ENSG00000170927; TAA
IITAVTENF

SEQ ID NO: 63534 - protein, 9 aa, Homo sapiens
  misc_feature: Table A; Target 63534; HLA-A*32:01; PKHD1; ENSG00000170927; TAA
IITGRLETF

SEQ ID NO: 63535 - protein, 9 aa, Homo sapiens
  misc_feature: Table A; Target 63535; HLA-B*46:01; PKHD1; ENSG00000170927; TAA
IITGRLETF

SEQ ID NO: 63536 - protein, 9 aa, Homo sapiens
  misc_feature: Table A; Target 63536; HLA-C*16:01; PKHD1; ENSG00000170927; TAA
IITGRLETF

SEQ ID NO: 63537 - protein, 9 aa, Homo sapiens
  misc_feature: Table A; Target 63537; HLA-B*58:01; PKHD1; ENSG00000170927; TAA
IIVEDAVDW

SEQ ID NO: 63538 - protein, 9 aa, Homo sapiens
  misc_feature: Table A; Target 63538; HLA-A*02:01; PKHD1; ENSG00000170927; TAA
ILAASLSSV

SEQ ID NO: 63539 - protein, 9 aa, Homo sapiens
  misc_feature: Table A; Target 63539; HLA-A*02:03; PKHD1; ENSG00000170927; TAA
ILAASLSSV

SEQ ID NO: 63540 - protein, 9 aa, Homo sapiens
  misc_feature: Table A; Target 63540; HLA-B*13:02; PKHD1; ENSG00000170927; TAA
ILAASLSSV

SEQ ID NO: 63541 - protein, 9 aa, Homo sapiens
  misc_feature: Table A; Target 63541; HLA-B*46:01; PKHD1; ENSG00000170927; TAA
ILAASLSSV

SEQ ID NO: 63542 - protein, 9 aa, Homo sapiens
  misc_feature: Table A; Target 63542; HLA-B*55:01; PKHD1; ENSG00000170927; TAA
ILAASLSSV

SEQ ID NO: 63543 - protein, 9 aa, Homo sapiens
  misc_feature: Table A; Target 63543; HLA-C*14:02; PKHD1; ENSG00000170927; TAA
ILAASLSSV

SEQ ID NO: 63544 - protein, 11 aa, Homo sapiens
  misc_feature: Table A; Target 63544; HLA-A*02:07; PKHD1; ENSG00000170927; TAA
ILDSADAIWAI

SEQ ID NO: 63545 - protein, 9 aa, Homo sapiens
  misc_feature: Table A; Target 63545; HLA-C*05:01; PKHD1; ENSG00000170927; TAA
ILEDLDGSL

SEQ ID NO: 63546 - protein, 8 aa, Homo sapiens
  misc_feature: Table A; Target 63546; HLA-B*08:01; PKHD1; ENSG00000170927; TAA
ILKATVAL

SEQ ID NO: 63547 - protein, 9 aa, Homo sapiens
  misc_feature: Table A; Target 63547; HLA-A*02:03; PKHD1; ENSG00000170927; TAA
ILKATVALL

SEQ ID NO: 63548 - protein, 10 aa, Homo sapiens
  misc_feature: Table A; Target 63548; HLA-A*02:03; PKHD1; ENSG00000170927; TAA
ILMLVRPSGL

SEQ ID NO: 63549 - protein, 9 aa, Homo sapiens
  misc_feature: Table A; Target 63549; HLA-A*02:07; PKHD1; ENSG00000170927; TAA
ILPNRTVLV

SEQ ID NO: 63550 - protein, 9 aa, Homo sapiens
  misc_feature: Table A; Target 63550; HLA-B*15:01; PKHD1; ENSG00000170927; TAA
ILSISGIGF

SEQ ID NO: 63551 - protein, 9 aa, Homo sapiens
  misc_feature: Table A; Target 63551; HLA-B*15:03; PKHD1; ENSG00000170927; TAA
ILSISGIGF

SEQ ID NO: 63552 - protein, 9 aa, Homo sapiens
  misc_feature: Table A; Target 63552; HLA-B*37:01; PKHD1; ENSG00000170927; TAA
ILSISGIGF

SEQ ID NO: 63553 - protein, 9 aa, Homo sapiens
  misc_feature: Table A; Target 63553; HLA-A*02:01; PKHD1; ENSG00000170927; TAA
ILTFAVAQI

SEQ ID NO: 63554 - protein, 9 aa, Homo sapiens
  misc_feature: Table A; Target 63554; HLA-A*02:03; PKHD1; ENSG00000170927; TAA
ILTFAVAQI

SEQ ID NO: 63555 - protein, 9 aa, Homo sapiens
  misc_feature: Table A; Target 63555; HLA-A*02:04; PKHD1; ENSG00000170927; TAA
ILTFAVAQI

SEQ ID NO: 63556 - protein, 9 aa, Homo sapiens
  misc_feature: Table A; Target 63556; HLA-B*13:02; PKHD1; ENSG00000170927; TAA
ILTFAVAQI

SEQ ID NO: 63557 - protein, 9 aa, Homo sapiens
  misc_feature: Table A; Target 63557; HLA-B*15:01; PKHD1; ENSG00000170927; TAA
ILVSDGGEL

SEQ ID NO: 63558 - protein, 9 aa, Homo sapiens
  misc_feature: Table A; Target 63558; HLA-C*03:03; PKHD1; ENSG00000170927; TAA
ILVSDGGEL

SEQ ID NO: 63559 - protein, 9 aa, Homo sapiens
  misc_feature: Table A; Target 63559; HLA-C*03:04; PKHD1; ENSG00000170927; TAA
ILVSDGGEL

SEQ ID NO: 63560 - protein, 9 aa, Homo sapiens
  misc_feature: Table A; Target 63560; HLA-A*02:07; PKHD1; ENSG00000170927; TAA
IMDNLLYVV

SEQ ID NO: 63561 - protein, 10 aa, Homo sapiens
  misc_feature: Table A; Target 63561; HLA-A*02:07; PKHD1; ENSG00000170927; TAA
IMDNLLYVVL

SEQ ID NO: 63562 - protein, 9 aa, Homo sapiens
  misc_feature: Table A; Target 63562; HLA-A*31:01; PKHD1; ENSG00000170927; TAA
IMHPITAER

SEQ ID NO: 63563 - protein, 9 aa, Homo sapiens
  misc_feature: Table A; Target 63563; HLA-A*33:01; PKHD1; ENSG00000170927; TAA
IMHPITAER

SEQ ID NO: 63564 - protein, 9 aa, Homo sapiens
  misc_feature: Table A; Target 63564; HLA-A*33:03; PKHD1; ENSG00000170927; TAA
IMHPITAER

SEQ ID NO: 63565 - protein, 9 aa, Homo sapiens
  misc_feature: Table A; Target 63565; HLA-B*46:01; PKHD1; ENSG00000170927; TAA
IMHPITAER

SEQ ID NO: 63566 - protein, 9 aa, Homo sapiens
  misc_feature: Table A; Target 63566; HLA-A*23:01; PKHD1; ENSG00000170927; TAA
IMKLQDVTF

SEQ ID NO: 63567 - protein, 9 aa, Homo sapiens
  misc_feature: Table A; Target 63567; HLA-B*15:01; PKHD1; ENSG00000170927; TAA
IMKLQDVTF

SEQ ID NO: 63568 - protein, 9 aa, Homo sapiens
  misc_feature: Table A; Target 63568; HLA-B*46:01; PKHD1; ENSG00000170927; TAA
IMKLQDVTF

SEQ ID NO: 63569 - protein, 9 aa, Homo sapiens
  misc_feature: Table A; Target 63569; HLA-A*02:07; PKHD1; ENSG00000170927; TAA
IMPQVFHYF

SEQ ID NO: 63570 - protein, 9 aa, Homo sapiens
  misc_feature: Table A; Target 63570; HLA-A*24:02; PKHD1; ENSG00000170927; TAA
IMPQVFHYF

SEQ ID NO: 63571 - protein, 9 aa, Homo sapiens
  misc_feature: Table A; Target 63571; HLA-B*07:02; PKHD1; ENSG00000170927; TAA
IPANATAHL

SEQ ID NO: 63572 - protein, 9 aa, Homo sapiens
  misc_feature: Table A; Target 63572; HLA-B*35:03; PKHD1; ENSG00000170927; TAA
IPANATAHL

SEQ ID NO: 63573 - protein, 9 aa, Homo sapiens
  misc_feature: Table A; Target 63573; HLA-C*07:02; PKHD1; ENSG00000170927; TAA
IPANATAHL

SEQ ID NO: 63574 - protein, 9 aa, Homo sapiens
  misc_feature: Table A; Target 63574; HLA-B*35:03; PKHD1; ENSG00000170927; TAA
IPDAGAPTV

SEQ ID NO: 63575 - protein, 9 aa, Homo sapiens
  misc_feature: Table A; Target 63575; HLA-B*51:01; PKHD1; ENSG00000170927; TAA
IPDAGAPTV

SEQ ID NO: 63576 - protein, 9 aa, Homo sapiens
  misc_feature: Table A; Target 63576; HLA-B*56:01; PKHD1; ENSG00000170927; TAA
IPDAGAPTV

SEQ ID NO: 63577 - protein, 9 aa, Homo sapiens
  misc_feature: Table A; Target 63577; HLA-B*35:03; PKHD1; ENSG00000170927; TAA
IPGPGDDVL

SEQ ID NO: 63578 - protein, 8 aa, Homo sapiens
  misc_feature: Table A; Target 63578; HLA-B*54:01; PKHD1; ENSG00000170927; TAA
IPLHSLEA

SEQ ID NO: 63579 - protein, 8 aa, Homo sapiens
  misc_feature: Table A; Target 63579; HLA-B*56:01; PKHD1; ENSG00000170927; TAA
IPLHSLEA

SEQ ID NO: 63580 - protein, 9 aa, Homo sapiens
  misc_feature: Table A; Target 63580; HLA-B*56:01; PKHD1; ENSG00000170927; TAA
IPPTLVQSA

SEQ ID NO: 63581 - protein, 9 aa, Homo sapiens
  misc_feature: Table A; Target 63581; HLA-A*30:01; PKHD1; ENSG00000170927; TAA
IQADSQASL

SEQ ID NO: 63582 - protein, 9 aa, Homo sapiens
  misc_feature: Table A; Target 63582; HLA-A*32:01; PKHD1; ENSG00000170927; TAA
IQADSQASL

SEQ ID NO: 63583 - protein, 9 aa, Homo sapiens
  misc_feature: Table A; Target 63583; HLA-B*15:01; PKHD1; ENSG00000170927; TAA
IQADSQASL

SEQ ID NO: 63584 - protein, 9 aa, Homo sapiens
  misc_feature: Table A; Target 63584; HLA-B*15:03; PKHD1; ENSG00000170927; TAA
IQADSQASL

SEQ ID NO: 63585 - protein, 9 aa, Homo sapiens
  misc_feature: Table A; Target 63585; HLA-B*27:05; PKHD1; ENSG00000170927; TAA
IQADSQASL

SEQ ID NO: 63586 - protein, 9 aa, Homo sapiens
  misc_feature: Table A; Target 63586; HLA-B*38:01; PKHD1; ENSG00000170927; TAA
IQADSQASL

SEQ ID NO: 63587 - protein, 9 aa, Homo sapiens
  misc_feature: Table A; Target 63587; HLA-B*39:01; PKHD1; ENSG00000170927; TAA
IQADSQASL

SEQ ID NO: 63588 - protein, 9 aa, Homo sapiens
  misc_feature: Table A; Target 63588; HLA-B*40:01; PKHD1; ENSG00000170927; TAA
IQADSQASL

SEQ ID NO: 63589 - protein, 9 aa, Homo sapiens
  misc_feature: Table A; Target 63589; HLA-C*03:03; PKHD1; ENSG00000170927; TAA
IQADSQASL

SEQ ID NO: 63590 - protein, 9 aa, Homo sapiens
  misc_feature: Table A; Target 63590; HLA-C*03:04; PKHD1; ENSG00000170927; TAA
IQADSQASL

SEQ ID NO: 63591 - protein, 9 aa, Homo sapiens
  misc_feature: Table A; Target 63591; HLA-C*14:02; PKHD1; ENSG00000170927; TAA
IQADSQASL

SEQ ID NO: 63592 - protein, 11 aa, Homo sapiens
  misc_feature: Table A; Target 63592; HLA-B*38:01; PKHD1; ENSG00000170927; TAA
IQADSQASLHF

SEQ ID NO: 63593 - protein, 9 aa, Homo sapiens
  misc_feature: Table A; Target 63593; HLA-A*29:02; PKHD1; ENSG00000170927; TAA
IQNFGSPLY

SEQ ID NO: 63594 - protein, 9 aa, Homo sapiens
  misc_feature: Table A; Target 63594; HLA-A*30:02; PKHD1; ENSG00000170927; TAA
IQNFGSPLY

SEQ ID NO: 63595 - protein, 9 aa, Homo sapiens
  misc_feature: Table A; Target 63595; HLA-B*15:01; PKHD1; ENSG00000170927; TAA
IQNFGSPLY

SEQ ID NO: 63596 - protein, 9 aa, Homo sapiens
  misc_feature: Table A; Target 63596; HLA-B*15:03; PKHD1; ENSG00000170927; TAA
IQNFGSPLY

SEQ ID NO: 63597 - protein, 9 aa, Homo sapiens
  misc_feature: Table A; Target 63597; HLA-A*23:01; PKHD1; ENSG00000170927; TAA
IQTTIEELL

SEQ ID NO: 63598 - protein, 9 aa, Homo sapiens
  misc_feature: Table A; Target 63598; HLA-B*13:02; PKHD1; ENSG00000170927; TAA
IQTTIEELL

SEQ ID NO: 63599 - protein, 9 aa, Homo sapiens
  misc_feature: Table A; Target 63599; HLA-B*27:05; PKHD1; ENSG00000170927; TAA
IQTTIEELL

SEQ ID NO: 63600 - protein, 9 aa, Homo sapiens
  misc_feature: Table A; Target 63600; HLA-B*38:01; PKHD1; ENSG00000170927; TAA
IQTTIEELL

SEQ ID NO: 63601 - protein, 8 aa, Homo sapiens
  misc_feature: Table A; Target 63601; HLA-B*15:01; PKHD1; ENSG00000170927; TAA
IQYLTEVF

SEQ ID NO: 63602 - protein, 8 aa, Homo sapiens
  misc_feature: Table A; Target 63602; HLA-B*15:03; PKHD1; ENSG00000170927; TAA
IQYLTEVF

SEQ ID NO: 63603 - protein, 9 aa, Homo sapiens
  misc_feature: Table A; Target 63603; HLA-B*27:05; PKHD1; ENSG00000170927; TAA
IRSGVSIHL

SEQ ID NO: 63604 - protein, 10 aa, Homo sapiens
  misc_feature: Table A; Target 63604; HLA-A*01:01; PKHD1; ENSG00000170927; TAA
ISAKQDLFLY

SEQ ID NO: 63605 - protein, 8 aa, Homo sapiens
  misc_feature: Table A; Target 63605; HLA-C*03:04; PKHD1; ENSG00000170927; TAA
ISATGEDL

SEQ ID NO: 63606 - protein, 8 aa, Homo sapiens
  misc_feature: Table A; Target 63606; HLA-C*05:01; PKHD1; ENSG00000170927; TAA
ISDVPVQI

SEQ ID NO: 63607 - protein, 9 aa, Homo sapiens
  misc_feature: Table A; Target 63607; HLA-A*31:01; PKHD1; ENSG00000170927; TAA
ISWEAIHGR

SEQ ID NO: 63608 - protein, 9 aa, Homo sapiens
  misc_feature: Table A; Target 63608; HLA-C*16:01; PKHD1; ENSG00000170927; TAA
ITAERTRML

SEQ ID NO: 63609 - protein, 11 aa, Homo sapiens
  misc_feature: Table A; Target 63609; HLA-A*33:01; PKHD1; ENSG00000170927; TAA
ITIQGNLTNER

SEQ ID NO: 63610 - protein, 11 aa, Homo sapiens
  misc_feature: Table A; Target 63610; HLA-A*33:03; PKHD1; ENSG00000170927; TAA
ITIQGNLTNER

SEQ ID NO: 63611 - protein, 11 aa, Homo sapiens
  misc_feature: Table A; Target 63611; HLA-A*68:01; PKHD1; ENSG00000170927; TAA
ITIQGNLTNER

SEQ ID NO: 63612 - protein, 11 aa, Homo sapiens
  misc_feature: Table A; Target 63612; HLA-C*07:06; PKHD1; ENSG00000170927; TAA
ITIQGNLTNER

SEQ ID NO: 63613 - protein, 8 aa, Homo sapiens
  misc_feature: Table A; Target 63613; HLA-C*14:02; PKHD1; ENSG00000170927; TAA
ITLYGSSY

SEQ ID NO: 63614 - protein, 9 aa, Homo sapiens
  misc_feature: Table A; Target 63614; HLA-B*46:01; PKHD1; ENSG00000170927; TAA
ITMETEAEM

SEQ ID NO: 63615 - protein, 9 aa, Homo sapiens
  misc_feature: Table A; Target 63615; HLA-C*03:03; PKHD1; ENSG00000170927; TAA
ITMETEAEM

SEQ ID NO: 63616 - protein, 9 aa, Homo sapiens
  misc_feature: Table A; Target 63616; HLA-C*03:04; PKHD1; ENSG00000170927; TAA
ITMETEAEM

SEQ ID NO: 63617 - protein, 9 aa, Homo sapiens
  misc_feature: Table A; Target 63617; HLA-C*14:02; PKHD1; ENSG00000170927; TAA
ITMETEAEM

SEQ ID NO: 63618 - protein, 8 aa, Homo sapiens
  misc_feature: Table A; Target 63618; HLA-C*03:03; PKHD1; ENSG00000170927; TAA
ITNSSLSL

SEQ ID NO: 63619 - protein, 8 aa, Homo sapiens
  misc_feature: Table A; Target 63619; HLA-C*03:04; PKHD1; ENSG00000170927; TAA
ITNSSLSL

SEQ ID NO: 63620 - protein, 8 aa, Homo sapiens
  misc_feature: Table A; Target 63620; HLA-C*05:01; PKHD1; ENSG00000170927; TAA
IVATSSSF

SEQ ID NO: 63621 - protein, 8 aa, Homo sapiens
  misc_feature: Table A; Target 63621; HLA-C*14:02; PKHD1; ENSG00000170927; TAA
IVATSSSF

SEQ ID NO: 63622 - protein, 11 aa, Homo sapiens
  misc_feature: Table A; Target 63622; HLA-A*02:01; PKHD1; ENSG00000170927; TAA
IVIEIGDSPTV

SEQ ID NO: 63623 - protein, 8 aa, Homo sapiens
  misc_feature: Table A; Target 63623; HLA-A*30:02; PKHD1; ENSG00000170927; TAA
IVLSSSSY

SEQ ID NO: 63624 - protein, 9 aa, Homo sapiens
  misc_feature: Table A; Target 63624; HLA-B*46:01; PKHD1; ENSG00000170927; TAA
IVPNASSPF

SEQ ID NO: 63625 - protein, 9 aa, Homo sapiens
  misc_feature: Table A; Target 63625; HLA-C*01:02; PKHD1; ENSG00000170927; TAA
IVPNASSPF

SEQ ID NO: 63626 - protein, 9 aa, Homo sapiens
  misc_feature: Table A; Target 63626; HLA-C*14:02; PKHD1; ENSG00000170927; TAA
IVPNASSPF

SEQ ID NO: 63627 - protein, 9 aa, Homo sapiens
  misc_feature: Table A; Target 63627; HLA-C*01:02; PKHD1; ENSG00000170927; TAA
IVPTGNGSV

SEQ ID NO: 63628 - protein, 11 aa, Homo sapiens
  misc_feature: Table A; Target 63628; HLA-C*01:02; PKHD1; ENSG00000170927; TAA
IVPTGNGSVAL

SEQ ID NO: 63629 - protein, 9 aa, Homo sapiens
  misc_feature: Table A; Target 63629; HLA-A*23:01; PKHD1; ENSG00000170927; TAA
IYICSPTNV

SEQ ID NO: 63630 - protein, 9 aa, Homo sapiens
  misc_feature: Table A; Target 63630; HLA-A*24:02; PKHD1; ENSG00000170927; TAA
IYICSPTNV

SEQ ID NO: 63631 - protein, 10 aa, Homo sapiens
  misc_feature: Table A; Target 63631; HLA-A*24:02; PKHD1; ENSG00000170927; TAA
IYICSPTNVI

SEQ ID NO: 63632 - protein, 8 aa, Homo sapiens
  misc_feature: Table A; Target 63632; HLA-A*23:01; PKHD1; ENSG00000170927; TAA
IYIRPYAL

SEQ ID NO: 63633 - protein, 8 aa, Homo sapiens
  misc_feature: Table A; Target 63633; HLA-A*23:01; PKHD1; ENSG00000170927; TAA
IYITGTGF

SEQ ID NO: 63634 - protein, 8 aa, Homo sapiens
  misc_feature: Table A; Target 63634; HLA-A*24:02; PKHD1; ENSG00000170927; TAA
IYITGTGF

SEQ ID NO: 63635 - protein, 8 aa, Homo sapiens
  misc_feature: Table A; Target 63635; HLA-B*46:01; PKHD1; ENSG00000170927; TAA
IYITGTGF

SEQ ID NO: 63636 - protein, 8 aa, Homo sapiens
  misc_feature: Table A; Target 63636; HLA-C*01:02; PKHD1; ENSG00000170927; TAA
IYITGTGF

SEQ ID NO: 63637 - protein, 8 aa, Homo sapiens
  misc_feature: Table A; Target 63637; HLA-C*04:01; PKHD1; ENSG00000170927; TAA
IYITGTGF

SEQ ID NO: 63638 - protein, 8 aa, Homo sapiens
  misc_feature: Table A; Target 63638; HLA-C*14:02; PKHD1; ENSG00000170927; TAA
IYITGTGF

SEQ ID NO: 63639 - protein, 10 aa, Homo sapiens
  misc_feature: Table A; Target 63639; HLA-A*23:01; PKHD1; ENSG00000170927; TAA
IYITGTGFSG

SEQ ID NO: 63640 - protein, 10 aa, Homo sapiens
  misc_feature: Table A; Target 63640; HLA-C*14:02; PKHD1; ENSG00000170927; TAA
IYITGTGFSG

SEQ ID NO: 63641 - protein, 10 aa, Homo sapiens
  misc_feature: Table A; Target 63641; HLA-A*23:01; PKHD1; ENSG00000170927; TAA
IYNSSCNITM

SEQ ID NO: 63642 - protein, 10 aa, Homo sapiens
  misc_feature: Table A; Target 63642; HLA-C*14:02; PKHD1; ENSG00000170927; TAA
IYNSSCNITM

SEQ ID NO: 63643 - protein, 10 aa, Homo sapiens
  misc_feature: Table A; Target 63643; HLA-C*02:02; PKHD1; ENSG00000170927; TAA
KAFTPELISI

SEQ ID NO: 63644 - protein, 11 aa, Homo sapiens
  misc_feature: Table A; Target 63644; HLA-A*30:02; PKHD1; ENSG00000170927; TAA
KAQTPIVHQVY

SEQ ID NO: 63645 - protein, 11 aa, Homo sapiens
  misc_feature: Table A; Target 63645; HLA-B*57:01; PKHD1; ENSG00000170927; TAA
KAQTPIVHQVY

SEQ ID NO: 63646 - protein, 11 aa, Homo sapiens
  misc_feature: Table A; Target 63646; HLA-B*58:01; PKHD1; ENSG00000170927; TAA
KAQTPIVHQVY

SEQ ID NO: 63647 - protein, 11 aa, Homo sapiens
  misc_feature: Table A; Target 63647; HLA-C*16:02; PKHD1; ENSG00000170927; TAA
KAQTPIVHQVY

SEQ ID NO: 63648 - protein, 9 aa, Homo sapiens
  misc_feature: Table A; Target 63648; HLA-A*31:01; PKHD1; ENSG00000170927; TAA
KATVALLSR

SEQ ID NO: 63649 - protein, 8 aa, Homo sapiens
  misc_feature: Table A; Target 63649; HLA-B*37:01; PKHD1; ENSG00000170927; TAA
KDLDGRAL

SEQ ID NO: 63650 - protein, 10 aa, Homo sapiens
  misc_feature: Table A; Target 63650; HLA-B*37:01; PKHD1; ENSG00000170927; TAA
KDLDGRALGL

SEQ ID NO: 63651 - protein, 10 aa, Homo sapiens
  misc_feature: Table A; Target 63651; HLA-B*40:01; PKHD1; ENSG00000170927; TAA
KEDTVVGEDM

SEQ ID NO: 63652 - protein, 8 aa, Homo sapiens
  misc_feature: Table A; Target 63652; HLA-B*49:01; PKHD1; ENSG00000170927; TAA
KEGMPPTI

SEQ ID NO: 63653 - protein, 10 aa, Homo sapiens
  misc_feature: Table A; Target 63653; HLA-B*40:01; PKHD1; ENSG00000170927; TAA
KEGMPPTISA

SEQ ID NO: 63654 - protein, 10 aa, Homo sapiens
  misc_feature: Table A; Target 63654; HLA-B*44:02; PKHD1; ENSG00000170927; TAA
KEGQEQLLRY

SEQ ID NO: 63655 - protein, 10 aa, Homo sapiens
  misc_feature: Table A; Target 63655; HLA-B*44:03; PKHD1; ENSG00000170927; TAA
KEGQEQLLRY

SEQ ID NO: 63656 - protein, 11 aa, Homo sapiens
  misc_feature: Table A; Target 63656; HLA-A*23:01; PKHD1; ENSG00000170927; TAA
KFTNSSNLVAF

SEQ ID NO: 63657 - protein, 9 aa, Homo sapiens
  misc_feature: Table A; Target 63657; HLA-A*30:02; PKHD1; ENSG00000170927; TAA
KIVLSSSSY

SEQ ID NO: 63658 - protein, 9 aa, Homo sapiens
  misc_feature: Table A; Target 63658; HLA-A*32:01; PKHD1; ENSG00000170927; TAA
KIVLSSSSY

SEQ ID NO: 63659 - protein, 9 aa, Homo sapiens
  misc_feature: Table A; Target 63659; HLA-B*15:01; PKHD1; ENSG00000170927; TAA
KIVLSSSSY

SEQ ID NO: 63660 - protein, 9 aa, Homo sapiens
  misc_feature: Table A; Target 63660; HLA-B*15:03; PKHD1; ENSG00000170927; TAA
KIVLSSSSY

SEQ ID NO: 63661 - protein, 9 aa, Homo sapiens
  misc_feature: Table A; Target 63661; HLA-B*46:01; PKHD1; ENSG00000170927; TAA
KIVLSSSSY

SEQ ID NO: 63662 - protein, 11 aa, Homo sapiens
  misc_feature: Table A; Target 63662; HLA-A*01:01; PKHD1; ENSG00000170927; TAA
KLELLGGAMYY

SEQ ID NO: 63663 - protein, 8 aa, Homo sapiens
  misc_feature: Table A; Target 63663; HLA-B*37:01; PKHD1; ENSG00000170927; TAA
KLYPVVSV

SEQ ID NO: 63664 - protein, 9 aa, Homo sapiens
  misc_feature: Table A; Target 63664; HLA-B*56:01; PKHD1; ENSG00000170927; TAA
KPFAVLPVT

SEQ ID NO: 63665 - protein, 10 aa, Homo sapiens
  misc_feature: Table A; Target 63665; HLA-B*56:01; PKHD1; ENSG00000170927; TAA
KPFAVLPVTR

SEQ ID NO: 63666 - protein, 9 aa, Homo sapiens
  misc_feature: Table A; Target 63666; HLA-B*07:02; PKHD1; ENSG00000170927; TAA
KPFQGRAQI

SEQ ID NO: 63667 - protein, 9 aa, Homo sapiens
  misc_feature: Table A; Target 63667; HLA-C*07:02; PKHD1; ENSG00000170927; TAA
KPFQGRAQI

SEQ ID NO: 63668 - protein, 11 aa, Homo sapiens
  misc_feature: Table A; Target 63668; HLA-B*07:02; PKHD1; ENSG00000170927; TAA
KPFQGRAQITL

SEQ ID NO: 63669 - protein, 11 aa, Homo sapiens
  misc_feature: Table A; Target 63669; HLA-C*07:02; PKHD1; ENSG00000170927; TAA
KPFQGRAQITL

SEQ ID NO: 63670 - protein, 10 aa, Homo sapiens
  misc_feature: Table A; Target 63670; HLA-B*56:01; PKHD1; ENSG00000170927; TAA
KPHSANLTST

SEQ ID NO: 63671 - protein, 9 aa, Homo sapiens
  misc_feature: Table A; Target 63671; HLA-B*07:02; PKHD1; ENSG00000170927; TAA
KPMEEIVTV

SEQ ID NO: 63672 - protein, 9 aa, Homo sapiens
  misc_feature: Table A; Target 63672; HLA-B*35:03; PKHD1; ENSG00000170927; TAA
KPMEEIVTV

SEQ ID NO: 63673 - protein, 9 aa, Homo sapiens
  misc_feature: Table A; Target 63673; HLA-B*51:01; PKHD1; ENSG00000170927; TAA
KPMEEIVTV

SEQ ID NO: 63674 - protein, 9 aa, Homo sapiens
  misc_feature: Table A; Target 63674; HLA-B*54:01; PKHD1; ENSG00000170927; TAA
KPMEEIVTV

SEQ ID NO: 63675 - protein, 9 aa, Homo sapiens
  misc_feature: Table A; Target 63675; HLA-B*55:01; PKHD1; ENSG00000170927; TAA
KPMEEIVTV

SEQ ID NO: 63676 - protein, 9 aa, Homo sapiens
  misc_feature: Table A; Target 63676; HLA-B*56:01; PKHD1; ENSG00000170927; TAA
KPMEEIVTV

SEQ ID NO: 63677 - protein, 9 aa, Homo sapiens
  misc_feature: Table A; Target 63677; HLA-C*07:02; PKHD1; ENSG00000170927; TAA
KPMEEIVTV

SEQ ID NO: 63678 - protein, 10 aa, Homo sapiens
  misc_feature: Table A; Target 63678; HLA-B*13:02; PKHD1; ENSG00000170927; TAA
KQMGFANMSV

SEQ ID NO: 63679 - protein, 9 aa, Homo sapiens
  misc_feature: Table A; Target 63679; HLA-B*13:02; PKHD1; ENSG00000170927; TAA
KQTDQVVLI

SEQ ID NO: 63680 - protein, 9 aa, Homo sapiens
  misc_feature: Table A; Target 63680; HLA-A*31:01; PKHD1; ENSG00000170927; TAA
KTTTVNYVR

SEQ ID NO: 63681 - protein, 9 aa, Homo sapiens
  misc_feature: Table A; Target 63681; HLA-B*57:01; PKHD1; ENSG00000170927; TAA
KTTTVNYVR

SEQ ID NO: 63682 - protein, 10 aa, Homo sapiens
  misc_feature: Table A; Target 63682; HLA-A*02:07; PKHD1; ENSG00000170927; TAA
KVDSNVFYNI

SEQ ID NO: 63683 - protein, 10 aa, Homo sapiens
  misc_feature: Table A; Target 63683; HLA-A*68:01; PKHD1; ENSG00000170927; TAA
LAAEVGLLTR

SEQ ID NO: 63684 - protein, 10 aa, Homo sapiens
  misc_feature: Table A; Target 63684; HLA-C*07:06; PKHD1; ENSG00000170927; TAA
LAAEVGLLTR

SEQ ID NO: 63685 - protein, 10 aa, Homo sapiens
  misc_feature: Table A; Target 63685; HLA-C*03:03; PKHD1; ENSG00000170927; TAA
LAISATGEDL

SEQ ID NO: 63686 - protein, 10 aa, Homo sapiens
  misc_feature: Table A; Target 63686; HLA-C*03:04; PKHD1; ENSG00000170927; TAA
LAISATGEDL

SEQ ID NO: 63687 - protein, 9 aa, Homo sapiens
  misc_feature: Table A; Target 63687; HLA-B*51:01; PKHD1; ENSG00000170927; TAA
LALTVMVSV

SEQ ID NO: 63688 - protein, 9 aa, Homo sapiens
  misc_feature: Table A; Target 63688; HLA-A*32:01; PKHD1; ENSG00000170927; TAA
LANATVSAF

SEQ ID NO: 63689 - protein, 9 aa, Homo sapiens
  misc_feature: Table A; Target 63689; HLA-B*35:01; PKHD1; ENSG00000170927; TAA
LANATVSAF

SEQ ID NO: 63690 - protein, 9 aa, Homo sapiens
  misc_feature: Table A; Target 63690; HLA-B*46:01; PKHD1; ENSG00000170927; TAA
LANATVSAF

SEQ ID NO: 63691 - protein, 9 aa, Homo sapiens
  misc_feature: Table A; Target 63691; HLA-B*58:01; PKHD1; ENSG00000170927; TAA
LANATVSAF

SEQ ID NO: 63692 - protein, 9 aa, Homo sapiens
  misc_feature: Table A; Target 63692; HLA-C*02:02; PKHD1; ENSG00000170927; TAA
LANATVSAF

SEQ ID NO: 63693 - protein, 9 aa, Homo sapiens
  misc_feature: Table A; Target 63693; HLA-C*03:03; PKHD1; ENSG00000170927; TAA
LANATVSAF

SEQ ID NO: 63694 - protein, 9 aa, Homo sapiens
  misc_feature: Table A; Target 63694; HLA-C*03:04; PKHD1; ENSG00000170927; TAA
LANATVSAF

SEQ ID NO: 63695 - protein, 9 aa, Homo sapiens
  misc_feature: Table A; Target 63695; HLA-C*05:01; PKHD1; ENSG00000170927; TAA
LANATVSAF

SEQ ID NO: 63696 - protein, 9 aa, Homo sapiens
  misc_feature: Table A; Target 63696; HLA-C*14:02; PKHD1; ENSG00000170927; TAA
LANATVSAF

SEQ ID NO: 63697 - protein, 9 aa, Homo sapiens
  misc_feature: Table A; Target 63697; HLA-A*30:02; PKHD1; ENSG00000170927; TAA
LANTPEVSY

SEQ ID NO: 63698 - protein, 9 aa, Homo sapiens
  misc_feature: Table A; Target 63698; HLA-B*15:01; PKHD1; ENSG00000170927; TAA
LANTPEVSY

SEQ ID NO: 63699 - protein, 9 aa, Homo sapiens
  misc_feature: Table A; Target 63699; HLA-B*15:03; PKHD1; ENSG00000170927; TAA
LANTPEVSY

SEQ ID NO: 63700 - protein, 9 aa, Homo sapiens
  misc_feature: Table A; Target 63700; HLA-B*35:01; PKHD1; ENSG00000170927; TAA
LANTPEVSY

SEQ ID NO: 63701 - protein, 9 aa, Homo sapiens
  misc_feature: Table A; Target 63701; HLA-B*39:01; PKHD1; ENSG00000170927; TAA
LANTPEVSY

SEQ ID NO: 63702 - protein, 9 aa, Homo sapiens
  misc_feature: Table A; Target 63702; HLA-B*46:01; PKHD1; ENSG00000170927; TAA
LANTPEVSY

SEQ ID NO: 63703 - protein, 9 aa, Homo sapiens
  misc_feature: Table A; Target 63703; HLA-B*55:01; PKHD1; ENSG00000170927; TAA
LANTPEVSY

SEQ ID NO: 63704 - protein, 9 aa, Homo sapiens
  misc_feature: Table A; Target 63704; HLA-B*58:01; PKHD1; ENSG00000170927; TAA
LANTPEVSY

SEQ ID NO: 63705 - protein, 9 aa, Homo sapiens
  misc_feature: Table A; Target 63705; HLA-C*02:02; PKHD1; ENSG00000170927; TAA
LANTPEVSY

SEQ ID NO: 63706 - protein, 9 aa, Homo sapiens
  misc_feature: Table A; Target 63706; HLA-C*03:03; PKHD1; ENSG00000170927; TAA
LANTPEVSY

SEQ ID NO: 63707 - protein, 9 aa, Homo sapiens
  misc_feature: Table A; Target 63707; HLA-C*03:04; PKHD1; ENSG00000170927; TAA
LANTPEVSY

SEQ ID NO: 63708 - protein, 9 aa, Homo sapiens
  misc_feature: Table A; Target 63708; HLA-C*14:02; PKHD1; ENSG00000170927; TAA
LANTPEVSY

SEQ ID NO: 63709 - protein, 9 aa, Homo sapiens
  misc_feature: Table A; Target 63709; HLA-C*16:01; PKHD1; ENSG00000170927; TAA
LANTPEVSY

SEQ ID NO: 63710 - protein, 9 aa, Homo sapiens
  misc_feature: Table A; Target 63710; HLA-C*16:02; PKHD1; ENSG00000170927; TAA
LANTPEVSY

SEQ ID NO: 63711 - protein, 9 aa, Homo sapiens
  misc_feature: Table A; Target 63711; HLA-B*46:01; PKHD1; ENSG00000170927; TAA
LAPVHTQSA

SEQ ID NO: 63712 - protein, 9 aa, Homo sapiens
  misc_feature: Table A; Target 63712; HLA-C*01:02; PKHD1; ENSG00000170927; TAA
LAPVHTQSA

SEQ ID NO: 63713 - protein, 9 aa, Homo sapiens
  misc_feature: Table A; Target 63713; HLA-A*01:01; PKHD1; ENSG00000170927; TAA
LAQETGLFY

SEQ ID NO: 63714 - protein, 9 aa, Homo sapiens
  misc_feature: Table A; Target 63714; HLA-A*30:02; PKHD1; ENSG00000170927; TAA
LAQETGLFY

SEQ ID NO: 63715 - protein, 9 aa, Homo sapiens
  misc_feature: Table A; Target 63715; HLA-B*46:01; PKHD1; ENSG00000170927; TAA
LAQETGLFY

SEQ ID NO: 63716 - protein, 8 aa, Homo sapiens
  misc_feature: Table A; Target 63716; HLA-C*03:04; PKHD1; ENSG00000170927; TAA
LAVRNGTL

SEQ ID NO: 63717 - protein, 8 aa, Homo sapiens
  misc_feature: Table A; Target 63717; HLA-B*37:01; PKHD1; ENSG00000170927; TAA
LDQETYSL

SEQ ID NO: 63718 - protein, 8 aa, Homo sapiens
  misc_feature: Table A; Target 63718; HLA-B*37:01; PKHD1; ENSG00000170927; TAA
LEAEHHGI

SEQ ID NO: 63719 - protein, 8 aa, Homo sapiens
  misc_feature: Table A; Target 63719; HLA-B*49:01; PKHD1; ENSG00000170927; TAA
LEAEHHGI

SEQ ID NO: 63720 - protein, 10 aa, Homo sapiens
  misc_feature: Table A; Target 63720; HLA-B*49:01; PKHD1; ENSG00000170927; TAA
LEAGIYPLQV

SEQ ID NO: 63721 - protein, 9 aa, Homo sapiens
  misc_feature: Table A; Target 63721; HLA-A*30:01; PKHD1; ENSG00000170927; TAA
LEAYFGGQL

SEQ ID NO: 63722 - protein, 9 aa, Homo sapiens
  misc_feature: Table A; Target 63722; HLA-B*40:01; PKHD1; ENSG00000170927; TAA
LEAYFGGQL

SEQ ID NO: 63723 - protein, 9 aa, Homo sapiens
  misc_feature: Table A; Target 63723; HLA-B*49:01; PKHD1; ENSG00000170927; TAA
LEAYFGGQL

SEQ ID NO: 63724 - protein, 10 aa, Homo sapiens
  misc_feature: Table A; Target 63724; HLA-B*49:01; PKHD1; ENSG00000170927; TAA
LEAYFGGQLV

SEQ ID NO: 63725 - protein, 9 aa, Homo sapiens
  misc_feature: Table A; Target 63725; HLA-B*40:01; PKHD1; ENSG00000170927; TAA
LEGASDSVL

SEQ ID NO: 63726 - protein, 9 aa, Homo sapiens
  misc_feature: Table A; Target 63726; HLA-B*49:01; PKHD1; ENSG00000170927; TAA
LEGDPLPGA

SEQ ID NO: 63727 - protein, 11 aa, Homo sapiens
  misc_feature: Table A; Target 63727; HLA-A*30:01; PKHD1; ENSG00000170927; TAA
LEGDPLPGASF

SEQ ID NO: 63728 - protein, 11 aa, Homo sapiens
  misc_feature: Table A; Target 63728; HLA-B*18:01; PKHD1; ENSG00000170927; TAA
LEGDPLPGASF

SEQ ID NO: 63729 - protein, 11 aa, Homo sapiens
  misc_feature: Table A; Target 63729; HLA-B*44:02; PKHD1; ENSG00000170927; TAA
LEGDPLPGASF

SEQ ID NO: 63730 - protein, 11 aa, Homo sapiens
  misc_feature: Table A; Target 63730; HLA-B*44:03; PKHD1; ENSG00000170927; TAA
LEGDPLPGASF

SEQ ID NO: 63731 - protein, 11 aa, Homo sapiens
  misc_feature: Table A; Target 63731; HLA-C*16:04; PKHD1; ENSG00000170927; TAA
LEGDPLPGASF

SEQ ID NO: 63732 - protein, 8 aa, Homo sapiens
  misc_feature: Table A; Target 63732; HLA-B*18:01; PKHD1; ENSG00000170927; TAA
LEGQAYTV

SEQ ID NO: 63733 - protein, 8 aa, Homo sapiens
  misc_feature: Table A; Target 63733; HLA-B*49:01; PKHD1; ENSG00000170927; TAA
LEGQAYTV

SEQ ID NO: 63734 - protein, 8 aa, Homo sapiens
  misc_feature: Table A; Target 63734; HLA-B*49:01; PKHD1; ENSG00000170927; TAA
LEIEVDGL

SEQ ID NO: 63735 - protein, 8 aa, Homo sapiens
  misc_feature: Table A; Target 63735; HLA-B*49:01; PKHD1; ENSG00000170927; TAA
LEIHLVNV

SEQ ID NO: 63736 - protein, 10 aa, Homo sapiens
  misc_feature: Table A; Target 63736; HLA-B*44:03; PKHD1; ENSG00000170927; TAA
LELTEATPGY

SEQ ID NO: 63737 - protein, 9 aa, Homo sapiens
  misc_feature: Table A; Target 63737; HLA-B*49:01; PKHD1; ENSG00000170927; TAA
LENVLNMTI

SEQ ID NO: 63738 - protein, 9 aa, Homo sapiens
  misc_feature: Table A; Target 63738; HLA-B*18:01; PKHD1; ENSG00000170927; TAA
LERDEVLIY

SEQ ID NO: 63739 - protein, 9 aa, Homo sapiens
  misc_feature: Table A; Target 63739; HLA-B*49:01; PKHD1; ENSG00000170927; TAA
LESDANTSV

SEQ ID NO: 63740 - protein, 9 aa, Homo sapiens
  misc_feature: Table A; Target 63740; HLA-C*16:01; PKHD1; ENSG00000170927; TAA
LGFERGPEV

SEQ ID NO: 63741 - protein, 9 aa, Homo sapiens
  misc_feature: Table A; Target 63741; HLA-B*38:01; PKHD1; ENSG00000170927; TAA
LHGSLPEVI

SEQ ID NO: 63742 - protein, 10 aa, Homo sapiens
  misc_feature: Table A; Target 63742; HLA-B*38:01; PKHD1; ENSG00000170927; TAA
LHIEPEEGSL

SEQ ID NO: 63743 - protein, 10 aa, Homo sapiens
  misc_feature: Table A; Target 63743; HLA-B*39:01; PKHD1; ENSG00000170927; TAA
LHIEPEEGSL

SEQ ID NO: 63744 - protein, 9 aa, Homo sapiens
  misc_feature: Table A; Target 63744; HLA-B*38:01; PKHD1; ENSG00000170927; TAA
LHSVHPETI

SEQ ID NO: 63745 - protein, 9 aa, Homo sapiens
  misc_feature: Table A; Target 63745; HLA-B*38:01; PKHD1; ENSG00000170927; TAA
LHVENSVEI

SEQ ID NO: 63746 - protein, 9 aa, Homo sapiens
  misc_feature: Table A; Target 63746; HLA-B*39:01; PKHD1; ENSG00000170927; TAA
LHVENSVEI

SEQ ID NO: 63747 - protein, 8 aa, Homo sapiens
  misc_feature: Table A; Target 63747; HLA-B*39:01; PKHD1; ENSG00000170927; TAA
LHVGGSNL

SEQ ID NO: 63748 - protein, 9 aa, Homo sapiens
  misc_feature: Table A; Target 63748; HLA-A*02:04; PKHD1; ENSG00000170927; TAA
LIYIRPYAL

SEQ ID NO: 63749 - protein, 9 aa, Homo sapiens
  misc_feature: Table A; Target 63749; HLA-B*08:01; PKHD1; ENSG00000170927; TAA
LIYIRPYAL

SEQ ID NO: 63750 - protein, 9 aa, Homo sapiens
  misc_feature: Table A; Target 63750; HLA-B*15:03; PKHD1; ENSG00000170927; TAA
LKVDSNVFY

SEQ ID NO: 63751 - protein, 9 aa, Homo sapiens
  misc_feature: Table A; Target 63751; HLA-A*02:04; PKHD1; ENSG00000170927; TAA
LLAVFYHEL

SEQ ID NO: 63752 - protein, 9 aa, Homo sapiens
  misc_feature: Table A; Target 63752; HLA-A*02:07; PKHD1; ENSG00000170927; TAA
LLAVFYHEL

SEQ ID NO: 63753 - protein, 9 aa, Homo sapiens
  misc_feature: Table A; Target 63753; HLA-B*08:01; PKHD1; ENSG00000170927; TAA
LLAVRHLSL

SEQ ID NO: 63754 - protein, 9 aa, Homo sapiens
  misc_feature: Table A; Target 63754; HLA-A*02:01; PKHD1; ENSG00000170927; TAA
LLDQETYSL

SEQ ID NO: 63755 - protein, 9 aa, Homo sapiens
  misc_feature: Table A; Target 63755; HLA-A*02:04; PKHD1; ENSG00000170927; TAA
LLDQETYSL

SEQ ID NO: 63756 - protein, 9 aa, Homo sapiens
  misc_feature: Table A; Target 63756; HLA-A*02:07; PKHD1; ENSG00000170927; TAA
LLDQETYSL

SEQ ID NO: 63757 - protein, 9 aa, Homo sapiens
  misc_feature: Table A; Target 63757; HLA-B*38:01; PKHD1; ENSG00000170927; TAA
LLDQETYSL

SEQ ID NO: 63758 - protein, 9 aa, Homo sapiens
  misc_feature: Table A; Target 63758; HLA-B*55:01; PKHD1; ENSG00000170927; TAA
LLDQETYSL

SEQ ID NO: 63759 - protein, 9 aa, Homo sapiens
  misc_feature: Table A; Target 63759; HLA-C*05:01; PKHD1; ENSG00000170927; TAA
LLDQETYSL

SEQ ID NO: 63760 - protein, 8 aa, Homo sapiens
  misc_feature: Table A; Target 63760; HLA-C*05:01; PKHD1; ENSG00000170927; TAA
LLDTNTSI

SEQ ID NO: 63761 - protein, 9 aa, Homo sapiens
  misc_feature: Table A; Target 63761; HLA-A*01:01; PKHD1; ENSG00000170927; TAA
LLDTNTSIL

SEQ ID NO: 63762 - protein, 9 aa, Homo sapiens
  misc_feature: Table A; Target 63762; HLA-A*02:07; PKHD1; ENSG00000170927; TAA
LLDTNTSIL

SEQ ID NO: 63763 - protein, 9 aa, Homo sapiens
  misc_feature: Table A; Target 63763; HLA-C*05:01; PKHD1; ENSG00000170927; TAA
LLDTNTSIL

SEQ ID NO: 63764 - protein, 10 aa, Homo sapiens
  misc_feature: Table A; Target 63764; HLA-A*01:01; PKHD1; ENSG00000170927; TAA
LLDTNTSILN

SEQ ID NO: 63765 - protein, 9 aa, Homo sapiens
  misc_feature: Table A; Target 63765; HLA-A*01:01; PKHD1; ENSG00000170927; TAA
LLESWPYLY

SEQ ID NO: 63766 - protein, 9 aa, Homo sapiens
  misc_feature: Table A; Target 63766; HLA-A*02:01; PKHD1; ENSG00000170927; TAA
LLFEVGDAV

SEQ ID NO: 63767 - protein, 9 aa, Homo sapiens
  misc_feature: Table A; Target 63767; HLA-A*02:04; PKHD1; ENSG00000170927; TAA
LLFEVGDAV

SEQ ID NO: 63768 - protein, 9 aa, Homo sapiens
  misc_feature: Table A; Target 63768; HLA-A*02:07; PKHD1; ENSG00000170927; TAA
LLFEVGDAV

SEQ ID NO: 63769 - protein, 9 aa, Homo sapiens
  misc_feature: Table A; Target 63769; HLA-B*13:02; PKHD1; ENSG00000170927; TAA
LLGGTILSI

SEQ ID NO: 63770 - protein, 10 aa, Homo sapiens
  misc_feature: Table A; Target 63770; HLA-A*02:01; PKHD1; ENSG00000170927; TAA
LLLDQETYSL

SEQ ID NO: 63771 - protein, 10 aa, Homo sapiens
  misc_feature: Table A; Target 63771; HLA-A*02:04; PKHD1; ENSG00000170927; TAA
LLLDQETYSL

SEQ ID NO: 63772 - protein, 9 aa, Homo sapiens
  misc_feature: Table A; Target 63772; HLA-A*02:01; PKHD1; ENSG00000170927; TAA
LLLDTNTSI

SEQ ID NO: 63773 - protein, 9 aa, Homo sapiens
  misc_feature: Table A; Target 63773; HLA-A*02:01; PKHD1; ENSG00000170927; TAA
LLLNESIGA

SEQ ID NO: 63774 - protein, 11 aa, Homo sapiens
  misc_feature: Table A; Target 63774; HLA-A*29:02; PKHD1; ENSG00000170927; TAA
LLLNESIGANY

SEQ ID NO: 63775 - protein, 11 aa, Homo sapiens
  misc_feature: Table A; Target 63775; HLA-A*30:02; PKHD1; ENSG00000170927; TAA
LLLNESIGANY

SEQ ID NO: 63776 - protein, 10 aa, Homo sapiens
  misc_feature: Table A; Target 63776; HLA-A*01:01; PKHD1; ENSG00000170927; TAA
LLNESIGANY

SEQ ID NO: 63777 - protein, 10 aa, Homo sapiens
  misc_feature: Table A; Target 63777; HLA-A*29:02; PKHD1; ENSG00000170927; TAA
LLNESIGANY

SEQ ID NO: 63778 - protein, 10 aa, Homo sapiens
  misc_feature: Table A; Target 63778; HLA-A*30:02; PKHD1; ENSG00000170927; TAA
LLNESIGANY

SEQ ID NO: 63779 - protein, 10 aa, Homo sapiens
  misc_feature: Table A; Target 63779; HLA-A*32:01; PKHD1; ENSG00000170927; TAA
LLNESIGANY

SEQ ID NO: 63780 - protein, 10 aa, Homo sapiens
  misc_feature: Table A; Target 63780; HLA-B*15:01; PKHD1; ENSG00000170927; TAA
LLNESIGANY

SEQ ID NO: 63781 - protein, 10 aa, Homo sapiens
  misc_feature: Table A; Target 63781; HLA-B*46:01; PKHD1; ENSG00000170927; TAA
LLNESIGANY

SEQ ID NO: 63782 - protein, 10 aa, Homo sapiens
  misc_feature: Table A; Target 63782; HLA-C*14:02; PKHD1; ENSG00000170927; TAA
LLNESIGANY

SEQ ID NO: 63783 - protein, 9 aa, Homo sapiens
  misc_feature: Table A; Target 63783; HLA-A*01:01; PKHD1; ENSG00000170927; TAA
LNESIGANY

SEQ ID NO: 63784 - protein, 9 aa, Homo sapiens
  misc_feature: Table A; Target 63784; HLA-A*29:02; PKHD1; ENSG00000170927; TAA
LNESIGANY

SEQ ID NO: 63785 - protein, 9 aa, Homo sapiens
  misc_feature: Table A; Target 63785; HLA-A*26:01; PKHD1; ENSG00000170927; TAA
LNPDVVTTY

SEQ ID NO: 63786 - protein, 9 aa, Homo sapiens
  misc_feature: Table A; Target 63786; HLA-A*29:02; PKHD1; ENSG00000170927; TAA
LNPDVVTTY

SEQ ID NO: 63787 - protein, 9 aa, Homo sapiens
  misc_feature: Table A; Target 63787; HLA-B*35:03; PKHD1; ENSG00000170927; TAA
LPAPQIPDA

SEQ ID NO: 63788 - protein, 9 aa, Homo sapiens
  misc_feature: Table A; Target 63788; HLA-B*54:01; PKHD1; ENSG00000170927; TAA
LPAPQIPDA

SEQ ID NO: 63789 - protein, 9 aa, Homo sapiens
  misc_feature: Table A; Target 63789; HLA-B*55:01; PKHD1; ENSG00000170927; TAA
LPAPQIPDA

SEQ ID NO: 63790 - protein, 9 aa, Homo sapiens
  misc_feature: Table A; Target 63790; HLA-B*56:01; PKHD1; ENSG00000170927; TAA
LPAPQIPDA

SEQ ID NO: 63791 - protein, 11 aa, Homo sapiens
  misc_feature: Table A; Target 63791; HLA-B*56:01; PKHD1; ENSG00000170927; TAA
LPAPQIPDAGA

SEQ ID NO: 63792 - protein, 9 aa, Homo sapiens
  misc_feature: Table A; Target 63792; HLA-B*35:01; PKHD1; ENSG00000170927; TAA
LPEVIVTCL

SEQ ID NO: 63793 - protein, 9 aa, Homo sapiens
  misc_feature: Table A; Target 63793; HLA-B*35:03; PKHD1; ENSG00000170927; TAA
LPEVIVTCL

SEQ ID NO: 63794 - protein, 9 aa, Homo sapiens
  misc_feature: Table A; Target 63794; HLA-B*51:01; PKHD1; ENSG00000170927; TAA
LPEVQVLNV

SEQ ID NO: 63795 - protein, 9 aa, Homo sapiens
  misc_feature: Table A; Target 63795; HLA-B*51:01; PKHD1; ENSG00000170927; TAA
LPFFKGLYV

SEQ ID NO: 63796 - protein, 9 aa, Homo sapiens
  misc_feature: Table A; Target 63796; HLA-B*54:01; PKHD1; ENSG00000170927; TAA
LPFFKGLYV

SEQ ID NO: 63797 - protein, 8 aa, Homo sapiens
  misc_feature: Table A; Target 63797; HLA-B*35:03; PKHD1; ENSG00000170927; TAA
LPGASFSL

SEQ ID NO: 63798 - protein, 9 aa, Homo sapiens
  misc_feature: Table A; Target 63798; HLA-B*51:01; PKHD1; ENSG00000170927; TAA
LPIRQITKV

SEQ ID NO: 63799 - protein, 9 aa, Homo sapiens
  misc_feature: Table A; Target 63799; HLA-B*54:01; PKHD1; ENSG00000170927; TAA
LPIRQITKV

SEQ ID NO: 63800 - protein, 9 aa, Homo sapiens
  misc_feature: Table A; Target 63800; HLA-B*56:01; PKHD1; ENSG00000170927; TAA
LPIRQITKV

SEQ ID NO: 63801 - protein, 9 aa, Homo sapiens
  misc_feature: Table A; Target 63801; HLA-B*35:03; PKHD1; ENSG00000170927; TAA
LPLAQETGL

SEQ ID NO: 63802 - protein, 11 aa, Homo sapiens
  misc_feature: Table A; Target 63802; HLA-A*29:02; PKHD1; ENSG00000170927; TAA
LPLAQETGLFY

SEQ ID NO: 63803 - protein, 11 aa, Homo sapiens
  misc_feature: Table A; Target 63803; HLA-B*35:01; PKHD1; ENSG00000170927; TAA
LPLAQETGLFY

SEQ ID NO: 63804 - protein, 9 aa, Homo sapiens
  misc_feature: Table A; Target 63804; HLA-A*23:01; PKHD1; ENSG00000170927; TAA
LPLDVSLAF

SEQ ID NO: 63805 - protein, 9 aa, Homo sapiens
  misc_feature: Table A; Target 63805; HLA-B*35:01; PKHD1; ENSG00000170927; TAA
LPLDVSLAF

SEQ ID NO: 63806 - protein, 9 aa, Homo sapiens
  misc_feature: Table A; Target 63806; HLA-B*35:03; PKHD1; ENSG00000170927; TAA
LPLDVSLAF

SEQ ID NO: 63807 - protein, 9 aa, Homo sapiens
  misc_feature: Table A; Target 63807; HLA-B*51:01; PKHD1; ENSG00000170927; TAA
LPLITARSV

SEQ ID NO: 63808 - protein, 9 aa, Homo sapiens
  misc_feature: Table A; Target 63808; HLA-B*51:01; PKHD1; ENSG00000170927; TAA
LPNAENSGI

SEQ ID NO: 63809 - protein, 10 aa, Homo sapiens
  misc_feature: Table A; Target 63809; HLA-B*35:03; PKHD1; ENSG00000170927; TAA
LPNAENSGIM

SEQ ID NO: 63810 - protein, 8 aa, Homo sapiens
  misc_feature: Table A; Target 63810; HLA-B*51:01; PKHD1; ENSG00000170927; TAA
LPNRTVLV

SEQ ID NO: 63811 - protein, 8 aa, Homo sapiens
  misc_feature: Table A; Target 63811; HLA-B*51:01; PKHD1; ENSG00000170927; TAA
LPPPVSVF

SEQ ID NO: 63812 - protein, 9 aa, Homo sapiens
  misc_feature: Table A; Target 63812; HLA-B*51:01; PKHD1; ENSG00000170927; TAA
LPPYPDILL

SEQ ID NO: 63813 - protein, 10 aa, Homo sapiens
  misc_feature: Table A; Target 63813; HLA-B*35:03; PKHD1; ENSG00000170927; TAA
LPQDGDNVTV

SEQ ID NO: 63814 - protein, 10 aa, Homo sapiens
  misc_feature: Table A; Target 63814; HLA-B*56:01; PKHD1; ENSG00000170927; TAA
LPQDGDNVTV

SEQ ID NO: 63815 - protein, 8 aa, Homo sapiens
  misc_feature: Table A; Target 63815; HLA-B*51:01; PKHD1; ENSG00000170927; TAA
LPRAFTYV

SEQ ID NO: 63816 - protein, 8 aa, Homo sapiens
  misc_feature: Table A; Target 63816; HLA-B*51:01; PKHD1; ENSG00000170927; TAA
LPVGMHRI

SEQ ID NO: 63817 - protein, 8 aa, Homo sapiens
  misc_feature: Table A; Target 63817; HLA-B*51:01; PKHD1; ENSG00000170927; TAA
LPVQPQLV

SEQ ID NO: 63818 - protein, 9 aa, Homo sapiens
  misc_feature: Table A; Target 63818; HLA-B*35:01; PKHD1; ENSG00000170927; TAA
LPVQPQLVF

SEQ ID NO: 63819 - protein, 9 aa, Homo sapiens
  misc_feature: Table A; Target 63819; HLA-C*05:01; PKHD1; ENSG00000170927; TAA
LQDVTFSSF

SEQ ID NO: 63820 - protein, 9 aa, Homo sapiens
  misc_feature: Table A; Target 63820; HLA-A*01:01; PKHD1; ENSG00000170927; TAA
LSEAHEGLY

SEQ ID NO: 63821 - protein, 10 aa, Homo sapiens
  misc_feature: Table A; Target 63821; HLA-A*01:01; PKHD1; ENSG00000170927; TAA
LSEAHEGLYF

SEQ ID NO: 63822 - protein, 9 aa, Homo sapiens
  misc_feature: Table A; Target 63822; HLA-C*16:01; PKHD1; ENSG00000170927; TAA
LSSNKLQNL

SEQ ID NO: 63823 - protein, 9 aa, Homo sapiens
  misc_feature: Table A; Target 63823; HLA-C*03:03; PKHD1; ENSG00000170927; TAA
LSTNTSGSL

SEQ ID NO: 63824 - protein, 9 aa, Homo sapiens
  misc_feature: Table A; Target 63824; HLA-C*03:04; PKHD1; ENSG00000170927; TAA
LSTNTSGSL

SEQ ID NO: 63825 - protein, 8 aa, Homo sapiens
  misc_feature: Table A; Target 63825; HLA-A*01:01; PKHD1; ENSG00000170927; TAA
LTEATPGY

SEQ ID NO: 63826 - protein, 8 aa, Homo sapiens
  misc_feature: Table A; Target 63826; HLA-C*03:03; PKHD1; ENSG00000170927; TAA
LTIEGTGL

SEQ ID NO: 63827 - protein, 8 aa, Homo sapiens
  misc_feature: Table A; Target 63827; HLA-C*03:04; PKHD1; ENSG00000170927; TAA
LTIEGTGL

SEQ ID NO: 63828 - protein, 9 aa, Homo sapiens
  misc_feature: Table A; Target 63828; HLA-A*32:01; PKHD1; ENSG00000170927; TAA
LTRTSPESW

SEQ ID NO: 63829 - protein, 9 aa, Homo sapiens
  misc_feature: Table A; Target 63829; HLA-B*57:01; PKHD1; ENSG00000170927; TAA
LTRTSPESW

SEQ ID NO: 63830 - protein, 9 aa, Homo sapiens
  misc_feature: Table A; Target 63830; HLA-B*58:01; PKHD1; ENSG00000170927; TAA
LTRTSPESW

SEQ ID NO: 63831 - protein, 9 aa, Homo sapiens
  misc_feature: Table A; Target 63831; HLA-C*03:03; PKHD1; ENSG00000170927; TAA
LTVNIGAEL

SEQ ID NO: 63832 - protein, 9 aa, Homo sapiens
  misc_feature: Table A; Target 63832; HLA-C*03:04; PKHD1; ENSG00000170927; TAA
LTVNIGAEL

SEQ ID NO: 63833 - protein, 8 aa, Homo sapiens
  misc_feature: Table A; Target 63833; HLA-C*05:01; PKHD1; ENSG00000170927; TAA
LVDNTIGL

SEQ ID NO: 63834 - protein, 9 aa, Homo sapiens
  misc_feature: Table A; Target 63834; HLA-C*05:01; PKHD1; ENSG00000170927; TAA
LVDNTIGLL

SEQ ID NO: 63835 - protein, 9 aa, Homo sapiens
  misc_feature: Table A; Target 63835; HLA-A*01:01; PKHD1; ENSG00000170927; TAA
LVDTDLPFF

SEQ ID NO: 63836 - protein, 9 aa, Homo sapiens
  misc_feature: Table A; Target 63836; HLA-A*02:07; PKHD1; ENSG00000170927; TAA
LVDTDLPFF

SEQ ID NO: 63837 - protein, 9 aa, Homo sapiens
  misc_feature: Table A; Target 63837; HLA-C*05:01; PKHD1; ENSG00000170927; TAA
LVDTDLPFF

SEQ ID NO: 63838 - protein, 11 aa, Homo sapiens
  misc_feature: Table A; Target 63838; HLA-B*54:01; PKHD1; ENSG00000170927; TAA
LVFTSRVIITA

SEQ ID NO: 63839 - protein, 9 aa, Homo sapiens
  misc_feature: Table A; Target 63839; HLA-A*30:02; PKHD1; ENSG00000170927; TAA
LVHTDLPPY

SEQ ID NO: 63840 - protein, 9 aa, Homo sapiens
  misc_feature: Table A; Target 63840; HLA-A*02:01; PKHD1; ENSG00000170927; TAA
LVLPLDVSL

SEQ ID NO: 63841 - protein, 10 aa, Homo sapiens
  misc_feature: Table A; Target 63841; HLA-A*03:01; PKHD1; ENSG00000170927; TAA
LVLTPPAAQK

SEQ ID NO: 63842 - protein, 10 aa, Homo sapiens
  misc_feature: Table A; Target 63842; HLA-A*03:02; PKHD1; ENSG00000170927; TAA
LVLTPPAAQK

SEQ ID NO: 63843 - protein, 10 aa, Homo sapiens
  misc_feature: Table A; Target 63843; HLA-A*11:01; PKHD1; ENSG00000170927; TAA
LVLTPPAAQK

SEQ ID NO: 63844 - protein, 9 aa, Homo sapiens
  misc_feature: Table A; Target 63844; HLA-B*07:02; PKHD1; ENSG00000170927; TAA
LVRPSGLAI

SEQ ID NO: 63845 - protein, 8 aa, Homo sapiens
  misc_feature: Table A; Target 63845; HLA-C*03:03; PKHD1; ENSG00000170927; TAA
LVSDGGEL

SEQ ID NO: 63846 - protein, 8 aa, Homo sapiens
  misc_feature: Table A; Target 63846; HLA-C*03:04; PKHD1; ENSG00000170927; TAA
LVSDGGEL

SEQ ID NO: 63847 - protein, 8 aa, Homo sapiens
  misc_feature: Table A; Target 63847; HLA-C*05:01; PKHD1; ENSG00000170927; TAA
LVSDGGEL

SEQ ID NO: 63848 - protein, 9 aa, Homo sapiens
  misc_feature: Table A; Target 63848; HLA-A*29:02; PKHD1; ENSG00000170927; TAA
LWINRSLQY

SEQ ID NO: 63849 - protein, 9 aa, Homo sapiens
  misc_feature: Table A; Target 63849; HLA-A*29:02; PKHD1; ENSG00000170927; TAA
LYLKSPLRY

SEQ ID NO: 63850 - protein, 9 aa, Homo sapiens
  misc_feature: Table A; Target 63850; HLA-A*23:01; PKHD1; ENSG00000170927; TAA
LYPNNGSQL

SEQ ID NO: 63851 - protein, 9 aa, Homo sapiens
  misc_feature: Table A; Target 63851; HLA-A*24:02; PKHD1; ENSG00000170927; TAA
LYPNNGSQL

SEQ ID NO: 63852 - protein, 9 aa, Homo sapiens
  misc_feature: Table A; Target 63852; HLA-C*01:02; PKHD1; ENSG00000170927; TAA
LYPNNGSQL

SEQ ID NO: 63853 - protein, 9 aa, Homo sapiens
  misc_feature: Table A; Target 63853; HLA-C*14:02; PKHD1; ENSG00000170927; TAA
LYPNNGSQL

SEQ ID NO: 63854 - protein, 11 aa, Homo sapiens
  misc_feature: Table A; Target 63854; HLA-A*23:01; PKHD1; ENSG00000170927; TAA
LYPVVSVTSGF

SEQ ID NO: 63855 - protein, 11 aa, Homo sapiens
  misc_feature: Table A; Target 63855; HLA-A*24:02; PKHD1; ENSG00000170927; TAA
LYPVVSVTSGF

SEQ ID NO: 63856 - protein, 8 aa, Homo sapiens
  misc_feature: Table A; Target 63856; HLA-C*14:02; PKHD1; ENSG00000170927; TAA
LYQTHSEI

SEQ ID NO: 63857 - protein, 9 aa, Homo sapiens
  misc_feature: Table A; Target 63857; HLA-A*23:01; PKHD1; ENSG00000170927; TAA
LYQTHSEIL

SEQ ID NO: 63858 - protein, 9 aa, Homo sapiens
  misc_feature: Table A; Target 63858; HLA-A*24:02; PKHD1; ENSG00000170927; TAA
LYQTHSEIL

SEQ ID NO: 63859 - protein, 9 aa, Homo sapiens
  misc_feature: Table A; Target 63859; HLA-C*14:02; PKHD1; ENSG00000170927; TAA
LYQTHSEIL

SEQ ID NO: 63860 - protein, 9 aa, Homo sapiens
  misc_feature: Table A; Target 63860; HLA-A*23:01; PKHD1; ENSG00000170927; TAA
LYVMGTLDF

SEQ ID NO: 63861 - protein, 10 aa, Homo sapiens
  misc_feature: Table A; Target 63861; HLA-B*54:01; PKHD1; ENSG00000170927; TAA
MAIFPSQGSA

SEQ ID NO: 63862 - protein, 11 aa, Homo sapiens
  misc_feature: Table A; Target 63862; HLA-C*03:03; PKHD1; ENSG00000170927; TAA
MAIFPSQGSAC

SEQ ID NO: 63863 - protein, 11 aa, Homo sapiens
  misc_feature: Table A; Target 63863; HLA-C*03:04; PKHD1; ENSG00000170927; TAA
MAIFPSQGSAC

SEQ ID NO: 63864 - protein, 10 aa, Homo sapiens
  misc_feature: Table A; Target 63864; HLA-B*35:01; PKHD1; ENSG00000170927; TAA
MALLLDQETY

SEQ ID NO: 63865 - protein, 8 aa, Homo sapiens
  misc_feature: Table A; Target 63865; HLA-C*01:02; PKHD1; ENSG00000170927; TAA
MAPGPIEL

SEQ ID NO: 63866 - protein, 9 aa, Homo sapiens
  misc_feature: Table A; Target 63866; HLA-C*07:06; PKHD1; ENSG00000170927; TAA
MAPGPIELR

SEQ ID NO: 63867 - protein, 10 aa, Homo sapiens
  misc_feature: Table A; Target 63867; HLA-A*25:01; PKHD1; ENSG00000170927; TAA
MATEQLLESW

SEQ ID NO: 63868 - protein, 9 aa, Homo sapiens
  misc_feature: Table A; Target 63868; HLA-A*33:03; PKHD1; ENSG00000170927; TAA
MDQTPQVLR

SEQ ID NO: 63869 - protein, 9 aa, Homo sapiens
  misc_feature: Table A; Target 63869; HLA-C*07:06; PKHD1; ENSG00000170927; TAA
MDQTPQVLR

SEQ ID NO: 63870 - protein, 10 aa, Homo sapiens
  misc_feature: Table A; Target 63870; HLA-B*49:01; PKHD1; ENSG00000170927; TAA
MEEIVTVETV

SEQ ID NO: 63871 - protein, 9 aa, Homo sapiens
  misc_feature: Table A; Target 63871; HLA-A*30:01; PKHD1; ENSG00000170927; TAA
METLSASCL

SEQ ID NO: 63872 - protein, 9 aa, Homo sapiens
  misc_feature: Table A; Target 63872; HLA-B*40:01; PKHD1; ENSG00000170927; TAA
METLSASCL

SEQ ID NO: 63873 - protein, 9 aa, Homo sapiens
  misc_feature: Table A; Target 63873; HLA-A*03:02; PKHD1; ENSG00000170927; TAA
MISSLSSNK

SEQ ID NO: 63874 - protein, 9 aa, Homo sapiens
  misc_feature: Table A; Target 63874; HLA-B*15:01; PKHD1; ENSG00000170927; TAA
MIYITGTGF

SEQ ID NO: 63875 - protein, 9 aa, Homo sapiens
  misc_feature: Table A; Target 63875; HLA-B*15:03; PKHD1; ENSG00000170927; TAA
MIYITGTGF

SEQ ID NO: 63876 - protein, 9 aa, Homo sapiens
  misc_feature: Table A; Target 63876; HLA-B*46:01; PKHD1; ENSG00000170927; TAA
MIYITGTGF

SEQ ID NO: 63877 - protein, 9 aa, Homo sapiens
  misc_feature: Table A; Target 63877; HLA-C*02:02; PKHD1; ENSG00000170927; TAA
MIYITGTGF

SEQ ID NO: 63878 - protein, 9 aa, Homo sapiens
  misc_feature: Table A; Target 63878; HLA-C*07:04; PKHD1; ENSG00000170927; TAA
MIYITGTGF

SEQ ID NO: 63879 - protein, 8 aa, Homo sapiens
  misc_feature: Table A; Target 63879; HLA-B*35:03; PKHD1; ENSG00000170927; TAA
MPGHEETL

SEQ ID NO: 63880 - protein, 11 aa, Homo sapiens
  misc_feature: Table A; Target 63880; HLA-B*54:01; PKHD1; ENSG00000170927; TAA
MPPTISASTSA

SEQ ID NO: 63881 - protein, 11 aa, Homo sapiens
  misc_feature: Table A; Target 63881; HLA-B*56:01; PKHD1; ENSG00000170927; TAA
MPPTISASTSA

SEQ ID NO: 63882 - protein, 10 aa, Homo sapiens
  misc_feature: Table A; Target 63882; HLA-B*38:01; PKHD1; ENSG00000170927; TAA
MQGEITNSSL

SEQ ID NO: 63883 - protein, 9 aa, Homo sapiens
  misc_feature: Table A; Target 63883; HLA-A*03:01; PKHD1; ENSG00000170927; TAA
MSSGIKTPK

SEQ ID NO: 63884 - protein, 9 aa, Homo sapiens
  misc_feature: Table A; Target 63884; HLA-A*03:02; PKHD1; ENSG00000170927; TAA
MSSGIKTPK

SEQ ID NO: 63885 - protein, 9 aa, Homo sapiens
  misc_feature: Table A; Target 63885; HLA-A*11:01; PKHD1; ENSG00000170927; TAA
MSSGIKTPK

SEQ ID NO: 63886 - protein, 10 aa, Homo sapiens
  misc_feature: Table A; Target 63886; HLA-B*57:01; PKHD1; ENSG00000170927; TAA
MTQPAWSTIW

SEQ ID NO: 63887 - protein, 9 aa, Homo sapiens
  misc_feature: Table A; Target 63887; HLA-A*26:01; PKHD1; ENSG00000170927; TAA
MTVETISKV

SEQ ID NO: 63888 - protein, 8 aa, Homo sapiens
  misc_feature: Table A; Target 63888; HLA-C*01:02; PKHD1; ENSG00000170927; TAA
MVIAGGEL

SEQ ID NO: 63889 - protein, 8 aa, Homo sapiens
  misc_feature: Table A; Target 63889; HLA-C*03:03; PKHD1; ENSG00000170927; TAA
MVIAGGEL

SEQ ID NO: 63890 - protein, 8 aa, Homo sapiens
  misc_feature: Table A; Target 63890; HLA-C*03:04; PKHD1; ENSG00000170927; TAA
MVIAGGEL

SEQ ID NO: 63891 - protein, 8 aa, Homo sapiens
  misc_feature: Table A; Target 63891; HLA-C*05:01; PKHD1; ENSG00000170927; TAA
MVIAGGEL

SEQ ID NO: 63892 - protein, 8 aa, Homo sapiens
  misc_feature: Table A; Target 63892; HLA-C*14:02; PKHD1; ENSG00000170927; TAA
MVIAGGEL

SEQ ID NO: 63893 - protein, 9 aa, Homo sapiens
  misc_feature: Table A; Target 63893; HLA-A*03:02; PKHD1; ENSG00000170927; TAA
MVIAGGELK

SEQ ID NO: 63894 - protein, 9 aa, Homo sapiens
  misc_feature: Table A; Target 63894; HLA-A*11:01; PKHD1; ENSG00000170927; TAA
MVIAGGELK

SEQ ID NO: 63895 - protein, 9 aa, Homo sapiens
  misc_feature: Table A; Target 63895; HLA-A*25:01; PKHD1; ENSG00000170927; TAA
MVKNTTCDW

SEQ ID NO: 63896 - protein, 10 aa, Homo sapiens
  misc_feature: Table A; Target 63896; HLA-A*25:01; PKHD1; ENSG00000170927; TAA
MVSNTTFVNF

SEQ ID NO: 63897 - protein, 9 aa, Homo sapiens
  misc_feature: Table A; Target 63897; HLA-B*56:01; PKHD1; ENSG00000170927; TAA
MVVPALRSV

SEQ ID NO: 63898 - protein, 8 aa, Homo sapiens
  misc_feature: Table A; Target 63898; HLA-C*05:01; PKHD1; ENSG00000170927; TAA
NADDFTSR

SEQ ID NO: 63899 - protein, 9 aa, Homo sapiens
  misc_feature: Table A; Target 63899; HLA-A*01:01; PKHD1; ENSG00000170927; TAA
NADDFTSRY

SEQ ID NO: 63900 - protein, 9 aa, Homo sapiens
  misc_feature: Table A; Target 63900; HLA-C*05:01; PKHD1; ENSG00000170927; TAA
NADDFTSRY

SEQ ID NO: 63901 - protein, 10 aa, Homo sapiens
  misc_feature: Table A; Target 63901; HLA-C*03:04; PKHD1; ENSG00000170927; TAA
NADDFTSRYL

SEQ ID NO: 63902 - protein, 10 aa, Homo sapiens
  misc_feature: Table A; Target 63902; HLA-C*05:01; PKHD1; ENSG00000170927; TAA
NADDFTSRYL

SEQ ID NO: 63903 - protein, 8 aa, Homo sapiens
  misc_feature: Table A; Target 63903; HLA-C*05:01; PKHD1; ENSG00000170927; TAA
NAENSGIM

SEQ ID NO: 63904 - protein, 9 aa, Homo sapiens
  misc_feature: Table A; Target 63904; HLA-C*01:02; PKHD1; ENSG00000170927; TAA
NAPEGNLQH

SEQ ID NO: 63905 - protein, 10 aa, Homo sapiens
  misc_feature: Table A; Target 63905; HLA-A*68:01; PKHD1; ENSG00000170927; TAA
NASHVVCQTR

SEQ ID NO: 63906 - protein, 9 aa, Homo sapiens
  misc_feature: Table A; Target 63906; HLA-C*04:01; PKHD1; ENSG00000170927; TAA
NCDVETQSF

SEQ ID NO: 63907 - protein, 9 aa, Homo sapiens
  misc_feature: Table A; Target 63907; HLA-C*05:01; PKHD1; ENSG00000170927; TAA
NCDVETQSF

SEQ ID NO: 63908 - protein, 9 aa, Homo sapiens
  misc_feature: Table A; Target 63908; HLA-A*23:01; PKHD1; ENSG00000170927; TAA
NELPVQPQL

SEQ ID NO: 63909 - protein, 9 aa, Homo sapiens
  misc_feature: Table A; Target 63909; HLA-A*30:01; PKHD1; ENSG00000170927; TAA
NELPVQPQL

SEQ ID NO: 63910 - protein, 9 aa, Homo sapiens
  misc_feature: Table A; Target 63910; HLA-B*18:01; PKHD1; ENSG00000170927; TAA
NELPVQPQL

SEQ ID NO: 63911 - protein, 9 aa, Homo sapiens
  misc_feature: Table A; Target 63911; HLA-B*40:01; PKHD1; ENSG00000170927; TAA
NELPVQPQL

SEQ ID NO: 63912 - protein, 9 aa, Homo sapiens
  misc_feature: Table A; Target 63912; HLA-B*44:02; PKHD1; ENSG00000170927; TAA
NELPVQPQL

SEQ ID NO: 63913 - protein, 9 aa, Homo sapiens
  misc_feature: Table A; Target 63913; HLA-B*44:03; PKHD1; ENSG00000170927; TAA
NELPVQPQL

SEQ ID NO: 63914 - protein, 9 aa, Homo sapiens
  misc_feature: Table A; Target 63914; HLA-B*49:01; PKHD1; ENSG00000170927; TAA
NELPVQPQL

SEQ ID NO: 63915 - protein, 10 aa, Homo sapiens
  misc_feature: Table A; Target 63915; HLA-B*49:01; PKHD1; ENSG00000170927; TAA
NELPVQPQLV

SEQ ID NO: 63916 - protein, 8 aa, Homo sapiens
  misc_feature: Table A; Target 63916; HLA-B*18:01; PKHD1; ENSG00000170927; TAA
NESIGANY

SEQ ID NO: 63917 - protein, 9 aa, Homo sapiens
  misc_feature: Table A; Target 63917; HLA-B*18:01; PKHD1; ENSG00000170927; TAA
NESIGANYF

SEQ ID NO: 63918 - protein, 9 aa, Homo sapiens
  misc_feature: Table A; Target 63918; HLA-B*37:01; PKHD1; ENSG00000170927; TAA
NESIGANYF

SEQ ID NO: 63919 - protein, 9 aa, Homo sapiens
  misc_feature: Table A; Target 63919; HLA-B*44:02; PKHD1; ENSG00000170927; TAA
NESIGANYF

SEQ ID NO: 63920 - protein, 9 aa, Homo sapiens
  misc_feature: Table A; Target 63920; HLA-B*44:03; PKHD1; ENSG00000170927; TAA
NESIGANYF

SEQ ID NO: 63921 - protein, 8 aa, Homo sapiens
  misc_feature: Table A; Target 63921; HLA-C*14:02; PKHD1; ENSG00000170927; TAA
NFAPGNYL

SEQ ID NO: 63922 - protein, 9 aa, Homo sapiens
  misc_feature: Table A; Target 63922; HLA-A*23:01; PKHD1; ENSG00000170927; TAA
NFAPGNYLL

SEQ ID NO: 63923 - protein, 8 aa, Homo sapiens
  misc_feature: Table A; Target 63923; HLA-B*35:01; PKHD1; ENSG00000170927; TAA
NFDYGAML

SEQ ID NO: 63924 - protein, 8 aa, Homo sapiens
  misc_feature: Table A; Target 63924; HLA-B*35:03; PKHD1; ENSG00000170927; TAA
NFDYGAML

SEQ ID NO: 63925 - protein, 8 aa, Homo sapiens
  misc_feature: Table A; Target 63925; HLA-C*04:01; PKHD1; ENSG00000170927; TAA
NFDYGAML

SEQ ID NO: 63926 - protein, 8 aa, Homo sapiens
  misc_feature: Table A; Target 63926; HLA-A*01:01; PKHD1; ENSG00000170927; TAA
NIMDNLLY

SEQ ID NO: 63927 - protein, 9 aa, Homo sapiens
  misc_feature: Table A; Target 63927; HLA-A*02:01; PKHD1; ENSG00000170927; TAA
NIMDNLLYV

SEQ ID NO: 63928 - protein, 9 aa, Homo sapiens
  misc_feature: Table A; Target 63928; HLA-A*02:03; PKHD1; ENSG00000170927; TAA
NIMDNLLYV

SEQ ID NO: 63929 - protein, 9 aa, Homo sapiens
  misc_feature: Table A; Target 63929; HLA-A*02:04; PKHD1; ENSG00000170927; TAA
NIMDNLLYV

SEQ ID NO: 63930 - protein, 9 aa, Homo sapiens
  misc_feature: Table A; Target 63930; HLA-A*02:07; PKHD1; ENSG00000170927; TAA
NIMDNLLYV

SEQ ID NO: 63931 - protein, 8 aa, Homo sapiens
  misc_feature: Table A; Target 63931; HLA-B*15:03; PKHD1; ENSG00000170927; TAA
NKTTTVNY

SEQ ID NO: 63932 - protein, 9 aa, Homo sapiens
  misc_feature: Table A; Target 63932; HLA-A*02:03; PKHD1; ENSG00000170927; TAA
NLAHRVITA

SEQ ID NO: 63933 - protein, 9 aa, Homo sapiens
  misc_feature: Table A; Target 63933; HLA-A*02:04; PKHD1; ENSG00000170927; TAA
NLSNSVILL

SEQ ID NO: 63934 - protein, 9 aa, Homo sapiens
  misc_feature: Table A; Target 63934; HLA-A*02:01; PKHD1; ENSG00000170927; TAA
NLTGVNPAA

SEQ ID NO: 63935 - protein, 9 aa, Homo sapiens
  misc_feature: Table A; Target 63935; HLA-B*55:01; PKHD1; ENSG00000170927; TAA
NLTGVNPAA

SEQ ID NO: 63936 - protein, 9 aa, Homo sapiens
  misc_feature: Table A; Target 63936; HLA-A*02:01; PKHD1; ENSG00000170927; TAA
NLVESVSVV

SEQ ID NO: 63937 - protein, 9 aa, Homo sapiens
  misc_feature: Table A; Target 63937; HLA-A*02:03; PKHD1; ENSG00000170927; TAA
NLVESVSVV

SEQ ID NO: 63938 - protein, 10 aa, Homo sapiens
  misc_feature: Table A; Target 63938; HLA-A*29:02; PKHD1; ENSG00000170927; TAA
NLWINRSLQY

SEQ ID NO: 63939 - protein, 9 aa, Homo sapiens
  misc_feature: Table A; Target 63939; HLA-A*23:01; PKHD1; ENSG00000170927; TAA
NMSVVLQQF

SEQ ID NO: 63940 - protein, 9 aa, Homo sapiens
  misc_feature: Table A; Target 63940; HLA-A*24:02; PKHD1; ENSG00000170927; TAA
NMSVVLQQF

SEQ ID NO: 63941 - protein, 9 aa, Homo sapiens
  misc_feature: Table A; Target 63941; HLA-A*33:01; PKHD1; ENSG00000170927; TAA
NNADDFTSR

SEQ ID NO: 63942 - protein, 9 aa, Homo sapiens
  misc_feature: Table A; Target 63942; HLA-A*33:03; PKHD1; ENSG00000170927; TAA
NNADDFTSR

SEQ ID NO: 63943 - protein, 9 aa, Homo sapiens
  misc_feature: Table A; Target 63943; HLA-A*68:01; PKHD1; ENSG00000170927; TAA
NNADDFTSR

SEQ ID NO: 63944 - protein, 9 aa, Homo sapiens
  misc_feature: Table A; Target 63944; HLA-C*07:06; PKHD1; ENSG00000170927; TAA
NNADDFTSR

SEQ ID NO: 63945 - protein, 10 aa, Homo sapiens
  misc_feature: Table A; Target 63945; HLA-A*26:01; PKHD1; ENSG00000170927; TAA
NNADDFTSRY

SEQ ID NO: 63946 - protein, 10 aa, Homo sapiens
  misc_feature: Table A; Target 63946; HLA-A*30:02; PKHD1; ENSG00000170927; TAA
NNADDFTSRY

SEQ ID NO: 63947 - protein, 9 aa, Homo sapiens
  misc_feature: Table A; Target 63947; HLA-B*07:02; PKHD1; ENSG00000170927; TAA
NPAAATRVV

SEQ ID NO: 63948 - protein, 9 aa, Homo sapiens
  misc_feature: Table A; Target 63948; HLA-B*51:01; PKHD1; ENSG00000170927; TAA
NPAAATRVV

SEQ ID NO: 63949 - protein, 9 aa, Homo sapiens
  misc_feature: Table A; Target 63949; HLA-B*56:01; PKHD1; ENSG00000170927; TAA
NPAAATRVV

SEQ ID NO: 63950 - protein, 9 aa, Homo sapiens
  misc_feature: Table A; Target 63950; HLA-C*07:02; PKHD1; ENSG00000170927; TAA
NPAAATRVV

SEQ ID NO: 63951 - protein, 10 aa, Homo sapiens
  misc_feature: Table A; Target 63951; HLA-B*35:01; PKHD1; ENSG00000170927; TAA
NPAAATRVVY

SEQ ID NO: 63952 - protein, 10 aa, Homo sapiens
  misc_feature: Table A; Target 63952; HLA-B*55:01; PKHD1; ENSG00000170927; TAA
NPAAATRVVY

SEQ ID NO: 63953 - protein, 10 aa, Homo sapiens
  misc_feature: Table A; Target 63953; HLA-C*03:03; PKHD1; ENSG00000170927; TAA
NPAAATRVVY

SEQ ID NO: 63954 - protein, 8 aa, Homo sapiens
  misc_feature: Table A; Target 63954; HLA-B*18:01; PKHD1; ENSG00000170927; TAA
NPDVVTTY

SEQ ID NO: 63955 - protein, 8 aa, Homo sapiens
  misc_feature: Table A; Target 63955; HLA-B*35:01; PKHD1; ENSG00000170927; TAA
NPDVVTTY

SEQ ID NO: 63956 - protein, 8 aa, Homo sapiens
  misc_feature: Table A; Target 63956; HLA-B*55:01; PKHD1; ENSG00000170927; TAA
NPDVVTTY

SEQ ID NO: 63957 - protein, 8 aa, Homo sapiens
  misc_feature: Table A; Target 63957; HLA-C*03:03; PKHD1; ENSG00000170927; TAA
NPDVVTTY

SEQ ID NO: 63958 - protein, 9 aa, Homo sapiens
  misc_feature: Table A; Target 63958; HLA-B*07:02; PKHD1; ENSG00000170927; TAA
NPDVVTTYL

SEQ ID NO: 63959 - protein, 9 aa, Homo sapiens
  misc_feature: Table A; Target 63959; HLA-B*35:01; PKHD1; ENSG00000170927; TAA
NPDVVTTYL

SEQ ID NO: 63960 - protein, 9 aa, Homo sapiens
  misc_feature: Table A; Target 63960; HLA-B*35:03; PKHD1; ENSG00000170927; TAA
NPDVVTTYL

SEQ ID NO: 63961 - protein, 9 aa, Homo sapiens
  misc_feature: Table A; Target 63961; HLA-C*04:01; PKHD1; ENSG00000170927; TAA
NPDVVTTYL

SEQ ID NO: 63962 - protein, 9 aa, Homo sapiens
  misc_feature: Table A; Target 63962; HLA-C*05:01; PKHD1; ENSG00000170927; TAA
NPDVVTTYL

SEQ ID NO: 63963 - protein, 9 aa, Homo sapiens
  misc_feature: Table A; Target 63963; HLA-B*35:03; PKHD1; ENSG00000170927; TAA
NPLEKEQKL

SEQ ID NO: 63964 - protein, 9 aa, Homo sapiens
  misc_feature: Table A; Target 63964; HLA-B*07:02; PKHD1; ENSG00000170927; TAA
NPRGGRIGI

SEQ ID NO: 63965 - protein, 9 aa, Homo sapiens
  misc_feature: Table A; Target 63965; HLA-A*33:01; PKHD1; ENSG00000170927; TAA
NQHTQVVVR

SEQ ID NO: 63966 - protein, 9 aa, Homo sapiens
  misc_feature: Table A; Target 63966; HLA-A*33:03; PKHD1; ENSG00000170927; TAA
NQHTQVVVR

SEQ ID NO: 63967 - protein, 9 aa, Homo sapiens
  misc_feature: Table A; Target 63967; HLA-A*68:01; PKHD1; ENSG00000170927; TAA
NQHTQVVVR

SEQ ID NO: 63968 - protein, 9 aa, Homo sapiens
  misc_feature: Table A; Target 63968; HLA-C*07:06; PKHD1; ENSG00000170927; TAA
NQHTQVVVR

SEQ ID NO: 63969 - protein, 9 aa, Homo sapiens
  misc_feature: Table A; Target 63969; HLA-B*38:01; PKHD1; ENSG00000170927; TAA
NQTSQAPLL

SEQ ID NO: 63970 - protein, 9 aa, Homo sapiens
  misc_feature: Table A; Target 63970; HLA-B*39:01; PKHD1; ENSG00000170927; TAA
NQTSQAPLL

SEQ ID NO: 63971 - protein, 9 aa, Homo sapiens
  misc_feature: Table A; Target 63971; HLA-B*07:02; PKHD1; ENSG00000170927; TAA
NSFSRGLSM

SEQ ID NO: 63972 - protein, 9 aa, Homo sapiens
  misc_feature: Table A; Target 63972; HLA-B*08:01; PKHD1; ENSG00000170927; TAA
NSFSRGLSM

SEQ ID NO: 63973 - protein, 9 aa, Homo sapiens
  misc_feature: Table A; Target 63973; HLA-C*02:02; PKHD1; ENSG00000170927; TAA
NSFSRGLSM

SEQ ID NO: 63974 - protein, 9 aa, Homo sapiens
  misc_feature: Table A; Target 63974; HLA-C*03:03; PKHD1; ENSG00000170927; TAA
NSFSRGLSM

SEQ ID NO: 63975 - protein, 9 aa, Homo sapiens
  misc_feature: Table A; Target 63975; HLA-C*03:04; PKHD1; ENSG00000170927; TAA
NSFSRGLSM

SEQ ID NO: 63976 - protein, 9 aa, Homo sapiens
  misc_feature: Table A; Target 63976; HLA-C*16:01; PKHD1; ENSG00000170927; TAA
NSFSRGLSM

SEQ ID NO: 63977 - protein, 9 aa, Homo sapiens
  misc_feature: Table A; Target 63977; HLA-C*16:01; PKHD1; ENSG00000170927; TAA
NSHRASPPM

SEQ ID NO: 63978 - protein, 9 aa, Homo sapiens
  misc_feature: Table A; Target 63978; HLA-A*01:01; PKHD1; ENSG00000170927; TAA
NSQLRQLTY

SEQ ID NO: 63979 - protein, 9 aa, Homo sapiens
  misc_feature: Table A; Target 63979; HLA-B*58:01; PKHD1; ENSG00000170927; TAA
NSQLRQLTY

SEQ ID NO: 63980 - protein, 9 aa, Homo sapiens
  misc_feature: Table A; Target 63980; HLA-C*16:01; PKHD1; ENSG00000170927; TAA
NSQLRQLTY

SEQ ID NO: 63981 - protein, 9 aa, Homo sapiens
  misc_feature: Table A; Target 63981; HLA-C*16:02; PKHD1; ENSG00000170927; TAA
NSQLRQLTY

SEQ ID NO: 63982 - protein, 8 aa, Homo sapiens
  misc_feature: Table A; Target 63982; HLA-C*16:01; PKHD1; ENSG00000170927; TAA
NSSFGRVV

SEQ ID NO: 63983 - protein, 9 aa, Homo sapiens
  misc_feature: Table A; Target 63983; HLA-A*68:02; PKHD1; ENSG00000170927; TAA
NTIGLLAVV

SEQ ID NO: 63984 - protein, 10 aa, Homo sapiens
  misc_feature: Table A; Target 63984; HLA-A*26:01; PKHD1; ENSG00000170927; TAA
NTIGLLAVVY

SEQ ID NO: 63985 - protein, 10 aa, Homo sapiens
  misc_feature: Table A; Target 63985; HLA-A*29:02; PKHD1; ENSG00000170927; TAA
NTIGLLAVVY

SEQ ID NO: 63986 - protein, 10 aa, Homo sapiens
  misc_feature: Table A; Target 63986; HLA-B*35:01; PKHD1; ENSG00000170927; TAA
NTIGLLAVVY

SEQ ID NO: 63987 - protein, 9 aa, Homo sapiens
  misc_feature: Table A; Target 63987; HLA-C*01:02; PKHD1; ENSG00000170927; TAA
NTPEVSYDL

SEQ ID NO: 63988 - protein, 9 aa, Homo sapiens
  misc_feature: Table A; Target 63988; HLA-C*07:06; PKHD1; ENSG00000170927; TAA
NVATSNSSR

SEQ ID NO: 63989 - protein, 9 aa, Homo sapiens
  misc_feature: Table A; Target 63989; HLA-A*02:04; PKHD1; ENSG00000170927; TAA
NVNMVVPAL

SEQ ID NO: 63990 - protein, 9 aa, Homo sapiens
  misc_feature: Table A; Target 63990; HLA-A*25:01; PKHD1; ENSG00000170927; TAA
NVNMVVPAL

SEQ ID NO: 63991 - protein, 9 aa, Homo sapiens
  misc_feature: Table A; Target 63991; HLA-A*26:01; PKHD1; ENSG00000170927; TAA
NVNMVVPAL

SEQ ID NO: 63992 - protein, 9 aa, Homo sapiens
  misc_feature: Table A; Target 63992; HLA-A*68:02; PKHD1; ENSG00000170927; TAA
NVNMVVPAL

SEQ ID NO: 63993 - protein, 9 aa, Homo sapiens
  misc_feature: Table A; Target 63993; HLA-B*35:01; PKHD1; ENSG00000170927; TAA
NVNMVVPAL

SEQ ID NO: 63994 - protein, 9 aa, Homo sapiens
  misc_feature: Table A; Target 63994; HLA-B*35:03; PKHD1; ENSG00000170927; TAA
NVNMVVPAL

SEQ ID NO: 63995 - protein, 9 aa, Homo sapiens
  misc_feature: Table A; Target 63995; HLA-B*39:01; PKHD1; ENSG00000170927; TAA
NVNMVVPAL

SEQ ID NO: 63996 - protein, 9 aa, Homo sapiens
  misc_feature: Table A; Target 63996; HLA-B*40:01; PKHD1; ENSG00000170927; TAA
NVNMVVPAL

SEQ ID NO: 63997 - protein, 9 aa, Homo sapiens
  misc_feature: Table A; Target 63997; HLA-C*01:02; PKHD1; ENSG00000170927; TAA
NVNMVVPAL

SEQ ID NO: 63998 - protein, 9 aa, Homo sapiens
  misc_feature: Table A; Target 63998; HLA-C*07:06; PKHD1; ENSG00000170927; TAA
NVNMVVPAL

SEQ ID NO: 63999 - protein, 10 aa, Homo sapiens
  misc_feature: Table A; Target 63999; HLA-A*68:01; PKHD1; ENSG00000170927; TAA
NVNMVVPALR

SEQ ID NO: 64000 - protein, 10 aa, Homo sapiens
  misc_feature: Table A; Target 64000; HLA-C*07:06; PKHD1; ENSG00000170927; TAA
NVNMVVPALR

SEQ ID NO: 64001 - protein, 9 aa, Homo sapiens
  misc_feature: Table A; Target 64001; HLA-A*03:02; PKHD1; ENSG00000170927; TAA
NVSFSVFNK

SEQ ID NO: 64002 - protein, 9 aa, Homo sapiens
  misc_feature: Table A; Target 64002; HLA-A*11:01; PKHD1; ENSG00000170927; TAA
NVSFSVFNK

SEQ ID NO: 64003 - protein, 9 aa, Homo sapiens
  misc_feature: Table A; Target 64003; HLA-B*54:01; PKHD1; ENSG00000170927; TAA
NVSSQPIPA

SEQ ID NO: 64004 - protein, 9 aa, Homo sapiens
  misc_feature: Table A; Target 64004; HLA-B*56:01; PKHD1; ENSG00000170927; TAA
NVSSQPIPA

SEQ ID NO: 64005 - protein, 9 aa, Homo sapiens
  misc_feature: Table A; Target 64005; HLA-A*30:02; PKHD1; ENSG00000170927; TAA
NVTVIRGDY

SEQ ID NO: 64006 - protein, 11 aa, Homo sapiens
  misc_feature: Table A; Target 64006; HLA-A*25:01; PKHD1; ENSG00000170927; TAA
NVVAGSERLGF

SEQ ID NO: 64007 - protein, 9 aa, Homo sapiens
  misc_feature: Table A; Target 64007; HLA-A*23:01; PKHD1; ENSG00000170927; TAA
NYFNIMDNL

SEQ ID NO: 64008 - protein, 9 aa, Homo sapiens
  misc_feature: Table A; Target 64008; HLA-A*24:02; PKHD1; ENSG00000170927; TAA
NYFNIMDNL

SEQ ID NO: 64009 - protein, 11 aa, Homo sapiens
  misc_feature: Table A; Target 64009; HLA-A*29:02; PKHD1; ENSG00000170927; TAA
NYFNIMDNLLY

SEQ ID NO: 64010 - protein, 9 aa, Homo sapiens
  misc_feature: Table A; Target 64010; HLA-A*30:02; PKHD1; ENSG00000170927; TAA
PAAATRVVY

SEQ ID NO: 64011 - protein, 9 aa, Homo sapiens
  misc_feature: Table A; Target 64011; HLA-B*15:03; PKHD1; ENSG00000170927; TAA
PAAATRVVY

SEQ ID NO: 64012 - protein, 9 aa, Homo sapiens
  misc_feature: Table A; Target 64012; HLA-C*02:02; PKHD1; ENSG00000170927; TAA
PAAATRVVY

SEQ ID NO: 64013 - protein, 9 aa, Homo sapiens
  misc_feature: Table A; Target 64013; HLA-C*16:01; PKHD1; ENSG00000170927; TAA
PAAATRVVY

SEQ ID NO: 64014 - protein, 9 aa, Homo sapiens
  misc_feature: Table A; Target 64014; HLA-B*40:01; PKHD1; ENSG00000170927; TAA
PEEPSQVQL

SEQ ID NO: 64015 - protein, 8 aa, Homo sapiens
  misc_feature: Table A; Target 64015; HLA-B*49:01; PKHD1; ENSG00000170927; TAA
PEVQVLNV

SEQ ID NO: 64016 - protein, 9 aa, Homo sapiens
  misc_feature: Table A; Target 64016; HLA-A*33:03; PKHD1; ENSG00000170927; TAA
PFAVLPVTR

SEQ ID NO: 64017 - protein, 9 aa, Homo sapiens
  misc_feature: Table A; Target 64017; HLA-A*23:01; PKHD1; ENSG00000170927; TAA
PFFPYGVKF

SEQ ID NO: 64018 - protein, 9 aa, Homo sapiens
  misc_feature: Table A; Target 64018; HLA-A*24:02; PKHD1; ENSG00000170927; TAA
PFFPYGVKF

SEQ ID NO: 64019 - protein, 9 aa, Homo sapiens
  misc_feature: Table A; Target 64019; HLA-B*15:03; PKHD1; ENSG00000170927; TAA
PGAPAQQVY

SEQ ID NO: 64020 - protein, 10 aa, Homo sapiens
  misc_feature: Table A; Target 64020; HLA-A*01:01; PKHD1; ENSG00000170927; TAA
PLAQETGLFY

SEQ ID NO: 64021 - protein, 10 aa, Homo sapiens
  misc_feature: Table A; Target 64021; HLA-A*25:01; PKHD1; ENSG00000170927; TAA
PVFTSEPNQW

SEQ ID NO: 64022 - protein, 9 aa, Homo sapiens
  misc_feature: Table A; Target 64022; HLA-A*26:01; PKHD1; ENSG00000170927; TAA
PVVSVTSGF

SEQ ID NO: 64023 - protein, 8 aa, Homo sapiens
  misc_feature: Table A; Target 64023; HLA-C*05:01; PKHD1; ENSG00000170927; TAA
QADSQASL

SEQ ID NO: 64024 - protein, 10 aa, Homo sapiens
  misc_feature: Table A; Target 64024; HLA-B*38:01; PKHD1; ENSG00000170927; TAA
QADSQASLHF

SEQ ID NO: 64025 - protein, 10 aa, Homo sapiens
  misc_feature: Table A; Target 64025; HLA-C*05:01; PKHD1; ENSG00000170927; TAA
QADSQASLHF

SEQ ID NO: 64026 - protein, 9 aa, Homo sapiens
  misc_feature: Table A; Target 64026; HLA-B*35:03; PKHD1; ENSG00000170927; TAA
QAYTVTNNL

SEQ ID NO: 64027 - protein, 9 aa, Homo sapiens
  misc_feature: Table A; Target 64027; HLA-B*51:01; PKHD1; ENSG00000170927; TAA
QAYTVTNNL

SEQ ID NO: 64028 - protein, 9 aa, Homo sapiens
  misc_feature: Table A; Target 64028; HLA-C*02:02; PKHD1; ENSG00000170927; TAA
QAYTVTNNL

SEQ ID NO: 64029 - protein, 9 aa, Homo sapiens
  misc_feature: Table A; Target 64029; HLA-C*03:03; PKHD1; ENSG00000170927; TAA
QAYTVTNNL

SEQ ID NO: 64030 - protein, 9 aa, Homo sapiens
  misc_feature: Table A; Target 64030; HLA-C*03:04; PKHD1; ENSG00000170927; TAA
QAYTVTNNL

SEQ ID NO: 64031 - protein, 9 aa, Homo sapiens
  misc_feature: Table A; Target 64031; HLA-C*05:01; PKHD1; ENSG00000170927; TAA
QAYTVTNNL

SEQ ID NO: 64032 - protein, 9 aa, Homo sapiens
  misc_feature: Table A; Target 64032; HLA-C*16:02; PKHD1; ENSG00000170927; TAA
QAYTVTNNL

SEQ ID NO: 64033 - protein, 8 aa, Homo sapiens
  misc_feature: Table A; Target 64033; HLA-B*18:01; PKHD1; ENSG00000170927; TAA
QDVTFSSF

SEQ ID NO: 64034 - protein, 8 aa, Homo sapiens
  misc_feature: Table A; Target 64034; HLA-B*37:01; PKHD1; ENSG00000170927; TAA
QDVTFSSF

SEQ ID NO: 64035 - protein, 10 aa, Homo sapiens
  misc_feature: Table A; Target 64035; HLA-B*27:02; PKHD1; ENSG00000170927; TAA
QDVTFSSFVK

SEQ ID NO: 64036 - protein, 10 aa, Homo sapiens
  misc_feature: Table A; Target 64036; HLA-B*40:01; PKHD1; ENSG00000170927; TAA
QEANAPEGNL

SEQ ID NO: 64037 - protein, 9 aa, Homo sapiens
  misc_feature: Table A; Target 64037; HLA-B*40:01; PKHD1; ENSG00000170927; TAA
QEDHGLGTL

SEQ ID NO: 64038 - protein, 9 aa, Homo sapiens
  misc_feature: Table A; Target 64038; HLA-A*30:01; PKHD1; ENSG00000170927; TAA
QEQLLRYQL

SEQ ID NO: 64039 - protein, 9 aa, Homo sapiens
  misc_feature: Table A; Target 64039; HLA-B*37:01; PKHD1; ENSG00000170927; TAA
QEQLLRYQL

SEQ ID NO: 64040 - protein, 9 aa, Homo sapiens
  misc_feature: Table A; Target 64040; HLA-B*40:01; PKHD1; ENSG00000170927; TAA
QEQLLRYQL

SEQ ID NO: 64041 - protein, 9 aa, Homo sapiens
  misc_feature: Table A; Target 64041; HLA-B*44:02; PKHD1; ENSG00000170927; TAA
QEQLLRYQL

SEQ ID NO: 64042 - protein, 9 aa, Homo sapiens
  misc_feature: Table A; Target 64042; HLA-B*44:03; PKHD1; ENSG00000170927; TAA
QEQLLRYQL

SEQ ID NO: 64043 - protein, 8 aa, Homo sapiens
  misc_feature: Table A; Target 64043; HLA-B*49:01; PKHD1; ENSG00000170927; TAA
QETGLFYV

SEQ ID NO: 64044 - protein, 9 aa, Homo sapiens
  misc_feature: Table A; Target 64044; HLA-A*23:01; PKHD1; ENSG00000170927; TAA
QFQVLGQAF

SEQ ID NO: 64045 - protein, 9 aa, Homo sapiens
  misc_feature: Table A; Target 64045; HLA-C*14:02; PKHD1; ENSG00000170927; TAA
QFQVLGQAF

SEQ ID NO: 64046 - protein, 9 aa, Homo sapiens
  misc_feature: Table A; Target 64046; HLA-A*32:01; PKHD1; ENSG00000170927; TAA
QGCTVRNSF

SEQ ID NO: 64047 - protein, 9 aa, Homo sapiens
  misc_feature: Table A; Target 64047; HLA-A*03:02; PKHD1; ENSG00000170927; TAA
QGQGGFTVK

SEQ ID NO: 64048 - protein, 9 aa, Homo sapiens
  misc_feature: Table A; Target 64048; HLA-A*11:01; PKHD1; ENSG00000170927; TAA
QGQGGFTVK

SEQ ID NO: 64049 - protein, 9 aa, Homo sapiens
  misc_feature: Table A; Target 64049; HLA-A*30:02; PKHD1; ENSG00000170927; TAA
QGVDLHIQY

SEQ ID NO: 64050 - protein, 9 aa, Homo sapiens
  misc_feature: Table A; Target 64050; HLA-B*35:01; PKHD1; ENSG00000170927; TAA
QGVDLHIQY

SEQ ID NO: 64051 - protein, 9 aa, Homo sapiens
  misc_feature: Table A; Target 64051; HLA-B*38:01; PKHD1; ENSG00000170927; TAA
QHTQVVVRV

SEQ ID NO: 64052 - protein, 9 aa, Homo sapiens
  misc_feature: Table A; Target 64052; HLA-B*39:01; PKHD1; ENSG00000170927; TAA
QHTQVVVRV

SEQ ID NO: 64053 - protein, 9 aa, Homo sapiens
  misc_feature: Table A; Target 64053; HLA-C*16:02; PKHD1; ENSG00000170927; TAA
QHTQVVVRV

SEQ ID NO: 64054 - protein, 9 aa, Homo sapiens
  misc_feature: Table A; Target 64054; HLA-A*30:02; PKHD1; ENSG00000170927; TAA
QITLYGSSY

SEQ ID NO: 64055 - protein, 9 aa, Homo sapiens
  misc_feature: Table A; Target 64055; HLA-B*15:01; PKHD1; ENSG00000170927; TAA
QITLYGSSY

SEQ ID NO: 64056 - protein, 9 aa, Homo sapiens
  misc_feature: Table A; Target 64056; HLA-B*15:03; PKHD1; ENSG00000170927; TAA
QITLYGSSY

SEQ ID NO: 64057 - protein, 9 aa, Homo sapiens
  misc_feature: Table A; Target 64057; HLA-C*14:02; PKHD1; ENSG00000170927; TAA
QITLYGSSY

SEQ ID NO: 64058 - protein, 9 aa, Homo sapiens
  misc_feature: Table A; Target 64058; HLA-A*02:01; PKHD1; ENSG00000170927; TAA
QLLESWPYL

SEQ ID NO: 64059 - protein, 9 aa, Homo sapiens
  misc_feature: Table A; Target 64059; HLA-A*02:04; PKHD1; ENSG00000170927; TAA
QLLESWPYL

SEQ ID NO: 64060 - protein, 11 aa, Homo sapiens
  misc_feature: Table A; Target 64060; HLA-A*30:02; PKHD1; ENSG00000170927; TAA
QNNADDFTSRY

SEQ ID NO: 64061 - protein, 9 aa, Homo sapiens
  misc_feature: Table A; Target 64061; HLA-B*54:01; PKHD1; ENSG00000170927; TAA
QPIPANATA

SEQ ID NO: 64062 - protein, 9 aa, Homo sapiens
  misc_feature: Table A; Target 64062; HLA-B*56:01; PKHD1; ENSG00000170927; TAA
QPIPANATA

SEQ ID NO: 64063 - protein, 11 aa, Homo sapiens
  misc_feature: Table A; Target 64063; HLA-B*07:02; PKHD1; ENSG00000170927; TAA
QPSDGEVGNEL

SEQ ID NO: 64064 - protein, 9 aa, Homo sapiens
  misc_feature: Table A; Target 64064; HLA-B*13:02; PKHD1; ENSG00000170927; TAA
QQFAVMPRI

SEQ ID NO: 64065 - protein, 9 aa, Homo sapiens
  misc_feature: Table A; Target 64065; HLA-A*32:01; PKHD1; ENSG00000170927; TAA
QQLPGQSRL

SEQ ID NO: 64066 - protein, 9 aa, Homo sapiens
  misc_feature: Table A; Target 64066; HLA-B*15:01; PKHD1; ENSG00000170927; TAA
QQLPGQSRL

SEQ ID NO: 64067 - protein, 9 aa, Homo sapiens
  misc_feature: Table A; Target 64067; HLA-B*15:03; PKHD1; ENSG00000170927; TAA
QQLPGQSRL

SEQ ID NO: 64068 - protein, 9 aa, Homo sapiens
  misc_feature: Table A; Target 64068; HLA-B*38:01; PKHD1; ENSG00000170927; TAA
QQLPGQSRL

SEQ ID NO: 64069 - protein, 9 aa, Homo sapiens
  misc_feature: Table A; Target 64069; HLA-B*13:02; PKHD1; ENSG00000170927; TAA
QQTCLTVNI

SEQ ID NO: 64070 - protein, 9 aa, Homo sapiens
  misc_feature: Table A; Target 64070; HLA-A*02:01; PKHD1; ENSG00000170927; TAA
QQTGVLENV

SEQ ID NO: 64071 - protein, 9 aa, Homo sapiens
  misc_feature: Table A; Target 64071; HLA-A*30:01; PKHD1; ENSG00000170927; TAA
QQTGVLENV

SEQ ID NO: 64072 - protein, 9 aa, Homo sapiens
  misc_feature: Table A; Target 64072; HLA-B*13:02; PKHD1; ENSG00000170927; TAA
QQTGVLENV

SEQ ID NO: 64073 - protein, 9 aa, Homo sapiens
  misc_feature: Table A; Target 64073; HLA-C*06:02; PKHD1; ENSG00000170927; TAA
QQTGVLENV

SEQ ID NO: 64074 - protein, 10 aa, Homo sapiens
  misc_feature: Table A; Target 64074; HLA-B*38:01; PKHD1; ENSG00000170927; TAA
QQTGVLENVL

SEQ ID NO: 64075 - protein, 10 aa, Homo sapiens
  misc_feature: Table A; Target 64075; HLA-B*39:01; PKHD1; ENSG00000170927; TAA
QQTGVLENVL

SEQ ID NO: 64076 - protein, 9 aa, Homo sapiens
  misc_feature: Table A; Target 64076; HLA-B*27:05; PKHD1; ENSG00000170927; TAA
QRLPEVQVL

SEQ ID NO: 64077 - protein, 9 aa, Homo sapiens
  misc_feature: Table A; Target 64077; HLA-B*38:01; PKHD1; ENSG00000170927; TAA
QRLPEVQVL

SEQ ID NO: 64078 - protein, 9 aa, Homo sapiens
  misc_feature: Table A; Target 64078; HLA-B*39:01; PKHD1; ENSG00000170927; TAA
QRLPEVQVL

SEQ ID NO: 64079 - protein, 9 aa, Homo sapiens
  misc_feature: Table A; Target 64079; HLA-C*16:04; PKHD1; ENSG00000170927; TAA
QRLPEVQVL

SEQ ID NO: 64080 - protein, 8 aa, Homo sapiens
  misc_feature: Table A; Target 64080; HLA-C*05:01; PKHD1; ENSG00000170927; TAA
QSDDILTF

SEQ ID NO: 64081 - protein, 9 aa, Homo sapiens
  misc_feature: Table A; Target 64081; HLA-B*35:03; PKHD1; ENSG00000170927; TAA
QSFQGNVSL

SEQ ID NO: 64082 - protein, 9 aa, Homo sapiens
  misc_feature: Table A; Target 64082; HLA-B*39:01; PKHD1; ENSG00000170927; TAA
QSFQGNVSL

SEQ ID NO: 64083 - protein, 9 aa, Homo sapiens
  misc_feature: Table A; Target 64083; HLA-B*40:01; PKHD1; ENSG00000170927; TAA
QSFQGNVSL

SEQ ID NO: 64084 - protein, 9 aa, Homo sapiens
  misc_feature: Table A; Target 64084; HLA-B*58:01; PKHD1; ENSG00000170927; TAA
QSFQGNVSL

SEQ ID NO: 64085 - protein, 9 aa, Homo sapiens
  misc_feature: Table A; Target 64085; HLA-C*01:02; PKHD1; ENSG00000170927; TAA
QSFQGNVSL

SEQ ID NO: 64086 - protein, 9 aa, Homo sapiens
  misc_feature: Table A; Target 64086; HLA-C*03:03; PKHD1; ENSG00000170927; TAA
QSFQGNVSL

SEQ ID NO: 64087 - protein, 9 aa, Homo sapiens
  misc_feature: Table A; Target 64087; HLA-C*03:04; PKHD1; ENSG00000170927; TAA
QSFQGNVSL

SEQ ID NO: 64088 - protein, 9 aa, Homo sapiens
  misc_feature: Table A; Target 64088; HLA-C*16:01; PKHD1; ENSG00000170927; TAA
QSFQGNVSL

SEQ ID NO: 64089 - protein, 9 aa, Homo sapiens
  misc_feature: Table A; Target 64089; HLA-A*01:01; PKHD1; ENSG00000170927; TAA
QTDLLPVGM

SEQ ID NO: 64090 - protein, 9 aa, Homo sapiens
  misc_feature: Table A; Target 64090; HLA-C*04:01; PKHD1; ENSG00000170927; TAA
QTDLLPVGM

SEQ ID NO: 64091 - protein, 9 aa, Homo sapiens
  misc_feature: Table A; Target 64091; HLA-C*05:01; PKHD1; ENSG00000170927; TAA
QTDLLPVGM

SEQ ID NO: 64092 - protein, 9 aa, Homo sapiens
  misc_feature: Table A; Target 64092; HLA-A*01:01; PKHD1; ENSG00000170927; TAA
QTDQVVLIL

SEQ ID NO: 64093 - protein, 9 aa, Homo sapiens
  misc_feature: Table A; Target 64093; HLA-A*01:01; PKHD1; ENSG00000170927; TAA
QTPIVHQVY

SEQ ID NO: 64094 - protein, 9 aa, Homo sapiens
  misc_feature: Table A; Target 64094; HLA-A*29:02; PKHD1; ENSG00000170927; TAA
QTPIVHQVY

SEQ ID NO: 64095 - protein, 10 aa, Homo sapiens
  misc_feature: Table A; Target 64095; HLA-A*25:01; PKHD1; ENSG00000170927; TAA
QTSQAPLLSF

SEQ ID NO: 64096 - protein, 9 aa, Homo sapiens
  misc_feature: Table A; Target 64096; HLA-A*03:01; PKHD1; ENSG00000170927; TAA
QVLGQAFHK

SEQ ID NO: 64097 - protein, 9 aa, Homo sapiens
  misc_feature: Table A; Target 64097; HLA-A*03:02; PKHD1; ENSG00000170927; TAA
QVLGQAFHK

SEQ ID NO: 64098 - protein, 9 aa, Homo sapiens
  misc_feature: Table A; Target 64098; HLA-A*11:01; PKHD1; ENSG00000170927; TAA
QVLGQAFHK

SEQ ID NO: 64099 - protein, 9 aa, Homo sapiens
  misc_feature: Table A; Target 64099; HLA-A*03:01; PKHD1; ENSG00000170927; TAA
QVQVILRVK

SEQ ID NO: 64100 - protein, 9 aa, Homo sapiens
  misc_feature: Table A; Target 64100; HLA-A*03:02; PKHD1; ENSG00000170927; TAA
QVQVILRVK

SEQ ID NO: 64101 - protein, 9 aa, Homo sapiens
  misc_feature: Table A; Target 64101; HLA-A*11:01; PKHD1; ENSG00000170927; TAA
QVQVILRVK

SEQ ID NO: 64102 - protein, 9 aa, Homo sapiens
  misc_feature: Table A; Target 64102; HLA-B*56:01; PKHD1; ENSG00000170927; TAA
QVVLILDSA

SEQ ID NO: 64103 - protein, 10 aa, Homo sapiens
  misc_feature: Table A; Target 64103; HLA-A*25:01; PKHD1; ENSG00000170927; TAA
QVYLQETGNW

SEQ ID NO: 64104 - protein, 11 aa, Homo sapiens
  misc_feature: Table A; Target 64104; HLA-A*03:01; PKHD1; ENSG00000170927; TAA
QVYPPSGVPGK

SEQ ID NO: 64105 - protein, 11 aa, Homo sapiens
  misc_feature: Table A; Target 64105; HLA-A*03:02; PKHD1; ENSG00000170927; TAA
QVYPPSGVPGK

SEQ ID NO: 64106 - protein, 11 aa, Homo sapiens
  misc_feature: Table A; Target 64106; HLA-A*11:01; PKHD1; ENSG00000170927; TAA
QVYPPSGVPGK

SEQ ID NO: 64107 - protein, 9 aa, Homo sapiens
  misc_feature: Table A; Target 64107; HLA-A*23:01; PKHD1; ENSG00000170927; TAA
QYLTEVFSI

SEQ ID NO: 64108 - protein, 9 aa, Homo sapiens
  misc_feature: Table A; Target 64108; HLA-A*24:02; PKHD1; ENSG00000170927; TAA
QYLTEVFSI

SEQ ID NO: 64109 - protein, 9 aa, Homo sapiens
  misc_feature: Table A; Target 64109; HLA-A*23:01; PKHD1; ENSG00000170927; TAA
QYSATFDNF

SEQ ID NO: 64110 - protein, 9 aa, Homo sapiens
  misc_feature: Table A; Target 64110; HLA-A*24:02; PKHD1; ENSG00000170927; TAA
QYSATFDNF

SEQ ID NO: 64111 - protein, 9 aa, Homo sapiens
  misc_feature: Table A; Target 64111; HLA-C*14:02; PKHD1; ENSG00000170927; TAA
QYSATFDNF

SEQ ID NO: 64112 - protein, 9 aa, Homo sapiens
  misc_feature: Table A; Target 64112; HLA-A*29:02; PKHD1; ENSG00000170927; TAA
QYTHLCLAY

SEQ ID NO: 64113 - protein, 9 aa, Homo sapiens
  misc_feature: Table A; Target 64113; HLA-B*57:01; PKHD1; ENSG00000170927; TAA
RAADIGGLW

SEQ ID NO: 64114 - protein, 9 aa, Homo sapiens
  misc_feature: Table A; Target 64114; HLA-B*58:01; PKHD1; ENSG00000170927; TAA
RAADIGGLW

SEQ ID NO: 64115 - protein, 9 aa, Homo sapiens
  misc_feature: Table A; Target 64115; HLA-C*03:04; PKHD1; ENSG00000170927; TAA
RAFTYVSSL

SEQ ID NO: 64116 - protein, 11 aa, Homo sapiens
  misc_feature: Table A; Target 64116; HLA-B*58:01; PKHD1; ENSG00000170927; TAA
RASPPMTVETI

SEQ ID NO: 64117 - protein, 8 aa, Homo sapiens
  misc_feature: Table A; Target 64117; HLA-B*37:01; PKHD1; ENSG00000170927; TAA
RDSCTFKF

SEQ ID NO: 64118 - protein, 11 aa, Homo sapiens
  misc_feature: Table A; Target 64118; HLA-B*40:01; PKHD1; ENSG00000170927; TAA
REEASPVMDAL

SEQ ID NO: 64119 - protein, 10 aa, Homo sapiens
  misc_feature: Table A; Target 64119; HLA-B*40:01; PKHD1; ENSG00000170927; TAA
REEFSGVLQL

SEQ ID NO: 64120 - protein, 10 aa, Homo sapiens
  misc_feature: Table A; Target 64120; HLA-B*49:01; PKHD1; ENSG00000170927; TAA
RESFIQGCTV

SEQ ID NO: 64121 - protein, 9 aa, Homo sapiens
  misc_feature: Table A; Target 64121; HLA-A*30:02; PKHD1; ENSG00000170927; TAA
RGQNTTSVY

SEQ ID NO: 64122 - protein, 9 aa, Homo sapiens
  misc_feature: Table A; Target 64122; HLA-B*15:01; PKHD1; ENSG00000170927; TAA
RGQNTTSVY

SEQ ID NO: 64123 - protein, 9 aa, Homo sapiens
  misc_feature: Table A; Target 64123; HLA-B*46:01; PKHD1; ENSG00000170927; TAA
RGQNTTSVY

SEQ ID NO: 64124 - protein, 9 aa, Homo sapiens
  misc_feature: Table A; Target 64124; HLA-A*03:01; PKHD1; ENSG00000170927; TAA
RISGFLAFK

SEQ ID NO: 64125 - protein, 9 aa, Homo sapiens
  misc_feature: Table A; Target 64125; HLA-A*02:03; PKHD1; ENSG00000170927; TAA
RISVSINGV

SEQ ID NO: 64126 - protein, 9 aa, Homo sapiens
  misc_feature: Table A; Target 64126; HLA-A*03:01; PKHD1; ENSG00000170927; TAA
RLFVGSFRK

SEQ ID NO: 64127 - protein, 10 aa, Homo sapiens
  misc_feature: Table A; Target 64127; HLA-A*02:01; PKHD1; ENSG00000170927; TAA
RLPEVQVLNV

SEQ ID NO: 64128 - protein, 10 aa, Homo sapiens
  misc_feature: Table A; Target 64128; HLA-A*02:03; PKHD1; ENSG00000170927; TAA
RLPEVQVLNV

SEQ ID NO: 64129 - protein, 10 aa, Homo sapiens
  misc_feature: Table A; Target 64129; HLA-A*02:04; PKHD1; ENSG00000170927; TAA
RLPEVQVLNV

SEQ ID NO: 64130 - protein, 10 aa, Homo sapiens
  misc_feature: Table A; Target 64130; HLA-A*02:07; PKHD1; ENSG00000170927; TAA
RLPEVQVLNV

SEQ ID NO: 64131 - protein, 11 aa, Homo sapiens
  misc_feature: Table A; Target 64131; HLA-A*02:07; PKHD1; ENSG00000170927; TAA
RLPQDGDNVTV

SEQ ID NO: 64132 - protein, 9 aa, Homo sapiens
  misc_feature: Table A; Target 64132; HLA-A*30:02; PKHD1; ENSG00000170927; TAA
RNKTTTVNY

SEQ ID NO: 64133 - protein, 8 aa, Homo sapiens
  misc_feature: Table A; Target 64133; HLA-B*07:02; PKHD1; ENSG00000170927; TAA
RPHDKIVL

SEQ ID NO: 64134 - protein, 8 aa, Homo sapiens
  misc_feature: Table A; Target 64134; HLA-B*08:01; PKHD1; ENSG00000170927; TAA
RPHDKIVL

SEQ ID NO: 64135 - protein, 9 aa, Homo sapiens
  misc_feature: Table A; Target 64135; HLA-B*56:01; PKHD1; ENSG00000170927; TAA
RPSGLAISA

SEQ ID NO: 64136 - protein, 9 aa, Homo sapiens
  misc_feature: Table A; Target 64136; HLA-B*56:01; PKHD1; ENSG00000170927; TAA
RPYALSILV

SEQ ID NO: 64137 - protein, 9 aa, Homo sapiens
  misc_feature: Table A; Target 64137; HLA-B*58:01; PKHD1; ENSG00000170927; TAA
RSITIQGNL

SEQ ID NO: 64138 - protein, 9 aa, Homo sapiens
  misc_feature: Table A; Target 64138; HLA-B*57:01; PKHD1; ENSG00000170927; TAA
RSLQYSATF

SEQ ID NO: 64139 - protein, 9 aa, Homo sapiens
  misc_feature: Table A; Target 64139; HLA-B*58:01; PKHD1; ENSG00000170927; TAA
RSLQYSATF

SEQ ID NO: 64140 - protein, 11 aa, Homo sapiens
  misc_feature: Table A; Target 64140; HLA-B*57:01; PKHD1; ENSG00000170927; TAA
RSVPCDVFPVF

SEQ ID NO: 64141 - protein, 9 aa, Homo sapiens
  misc_feature: Table A; Target 64141; HLA-A*30:02; PKHD1; ENSG00000170927; TAA
RTSPPLGGH

SEQ ID NO: 64142 - protein, 10 aa, Homo sapiens
  misc_feature: Table A; Target 64142; HLA-A*30:02; PKHD1; ENSG00000170927; TAA
RTSPPLGGHF

SEQ ID NO: 64143 - protein, 10 aa, Homo sapiens
  misc_feature: Table A; Target 64143; HLA-B*57:01; PKHD1; ENSG00000170927; TAA
RTSPPLGGHF

SEQ ID NO: 64144 - protein, 10 aa, Homo sapiens
  misc_feature: Table A; Target 64144; HLA-B*58:01; PKHD1; ENSG00000170927; TAA
RTSPPLGGHF

SEQ ID NO: 64145 - protein, 11 aa, Homo sapiens
  misc_feature: Table A; Target 64145; HLA-A*31:01; PKHD1; ENSG00000170927; TAA
RTSPPLGGHFR

SEQ ID NO: 64146 - protein, 9 aa, Homo sapiens
  misc_feature: Table A; Target 64146; HLA-A*30:02; PKHD1; ENSG00000170927; TAA
RVCGAGYGY

SEQ ID NO: 64147 - protein, 11 aa, Homo sapiens
  misc_feature: Table A; Target 64147; HLA-A*31:01; PKHD1; ENSG00000170927; TAA
RYISWEAIHGR

SEQ ID NO: 64148 - protein, 11 aa, Homo sapiens
  misc_feature: Table A; Target 64148; HLA-A*33:01; PKHD1; ENSG00000170927; TAA
RYISWEAIHGR

SEQ ID NO: 64149 - protein, 8 aa, Homo sapiens
  misc_feature: Table A; Target 64149; HLA-C*14:02; PKHD1; ENSG00000170927; TAA
RYLNASDF

SEQ ID NO: 64150 - protein, 10 aa, Homo sapiens
  misc_feature: Table A; Target 64150; HLA-A*24:02; PKHD1; ENSG00000170927; TAA
RYQLAGQNQL

SEQ ID NO: 64151 - protein, 11 aa, Homo sapiens
  misc_feature: Table A; Target 64151; HLA-A*23:01; PKHD1; ENSG00000170927; TAA
RYQLAGQNQLL

SEQ ID NO: 64152 - protein, 11 aa, Homo sapiens
  misc_feature: Table A; Target 64152; HLA-A*24:02; PKHD1; ENSG00000170927; TAA
RYQLAGQNQLL

SEQ ID NO: 64153 - protein, 9 aa, Homo sapiens
  misc_feature: Table A; Target 64153; HLA-A*11:01; PKHD1; ENSG00000170927; TAA
SAGGAQIFR

SEQ ID NO: 64154 - protein, 9 aa, Homo sapiens
  misc_feature: Table A; Target 64154; HLA-A*68:01; PKHD1; ENSG00000170927; TAA
SAGGAQIFR

SEQ ID NO: 64155 - protein, 9 aa, Homo sapiens
  misc_feature: Table A; Target 64155; HLA-C*07:06; PKHD1; ENSG00000170927; TAA
SAGGAQIFR

SEQ ID NO: 64156 - protein, 9 aa, Homo sapiens
  misc_feature: Table A; Target 64156; HLA-A*29:02; PKHD1; ENSG00000170927; TAA
SAKQDLFLY

SEQ ID NO: 64157 - protein, 9 aa, Homo sapiens
  misc_feature: Table A; Target 64157; HLA-A*30:02; PKHD1; ENSG00000170927; TAA
SAKQDLFLY

SEQ ID NO: 64158 - protein, 9 aa, Homo sapiens
  misc_feature: Table A; Target 64158; HLA-C*02:02; PKHD1; ENSG00000170927; TAA
SAKQDLFLY

SEQ ID NO: 64159 - protein, 9 aa, Homo sapiens
  misc_feature: Table A; Target 64159; HLA-C*07:06; PKHD1; ENSG00000170927; TAA
SANLTSTDR

SEQ ID NO: 64160 - protein, 9 aa, Homo sapiens
  misc_feature: Table A; Target 64160; HLA-A*25:01; PKHD1; ENSG00000170927; TAA
SAPESALKW

SEQ ID NO: 64161 - protein, 9 aa, Homo sapiens
  misc_feature: Table A; Target 64161; HLA-B*58:01; PKHD1; ENSG00000170927; TAA
SAPESALKW

SEQ ID NO: 64162 - protein, 8 aa, Homo sapiens
  misc_feature: Table A; Target 64162; HLA-C*16:01; PKHD1; ENSG00000170927; TAA
SAVLPRAF

SEQ ID NO: 64163 - protein, 10 aa, Homo sapiens
  misc_feature: Table A; Target 64163; HLA-C*02:02; PKHD1; ENSG00000170927; TAA
SAVLPRAFTY

SEQ ID NO: 64164 - protein, 10 aa, Homo sapiens
  misc_feature: Table A; Target 64164; HLA-C*16:01; PKHD1; ENSG00000170927; TAA
SAVLPRAFTY

SEQ ID NO: 64165 - protein, 8 aa, Homo sapiens
  misc_feature: Table A; Target 64165; HLA-A*32:01; PKHD1; ENSG00000170927; TAA
SAYPKNSW

SEQ ID NO: 64166 - protein, 8 aa, Homo sapiens
  misc_feature: Table A; Target 64166; HLA-B*08:01; PKHD1; ENSG00000170927; TAA
SAYPKNSW

SEQ ID NO: 64167 - protein, 8 aa, Homo sapiens
  misc_feature: Table A; Target 64167; HLA-B*58:01; PKHD1; ENSG00000170927; TAA
SAYPKNSW

SEQ ID NO: 64168 - protein, 9 aa, Homo sapiens
  misc_feature: Table A; Target 64168; HLA-A*30:02; PKHD1; ENSG00000170927; TAA
SCEAARHTY

SEQ ID NO: 64169 - protein, 9 aa, Homo sapiens
  misc_feature: Table A; Target 64169; HLA-B*37:01; PKHD1; ENSG00000170927; TAA
SDNVAHSSL

SEQ ID NO: 64170 - protein, 9 aa, Homo sapiens
  misc_feature: Table A; Target 64170; HLA-B*44:02; PKHD1; ENSG00000170927; TAA
SEAHEGLYF

SEQ ID NO: 64171 - protein, 9 aa, Homo sapiens
  misc_feature: Table A; Target 64171; HLA-B*44:03; PKHD1; ENSG00000170927; TAA
SEAHEGLYF

SEQ ID NO: 64172 - protein, 9 aa, Homo sapiens
  misc_feature: Table A; Target 64172; HLA-A*30:01; PKHD1; ENSG00000170927; TAA
SECQGNCTL

SEQ ID NO: 64173 - protein, 9 aa, Homo sapiens
  misc_feature: Table A; Target 64173; HLA-B*40:01; PKHD1; ENSG00000170927; TAA
SECQGNCTL

SEQ ID NO: 64174 - protein, 8 aa, Homo sapiens
  misc_feature: Table A; Target 64174; HLA-C*14:02; PKHD1; ENSG00000170927; TAA
SFFNAGTF

SEQ ID NO: 64175 - protein, 9 aa, Homo sapiens
  misc_feature: Table A; Target 64175; HLA-A*29:02; PKHD1; ENSG00000170927; TAA
SFKTGNLIY

SEQ ID NO: 64176 - protein, 8 aa, Homo sapiens
  misc_feature: Table A; Target 64176; HLA-C*14:02; PKHD1; ENSG00000170927; TAA
SFQGNVSL

SEQ ID NO: 64177 - protein, 9 aa, Homo sapiens
  misc_feature: Table A; Target 64177; HLA-C*05:01; PKHD1; ENSG00000170927; TAA
SGDSQFLQV

SEQ ID NO: 64178 - protein, 9 aa, Homo sapiens
  misc_feature: Table A; Target 64178; HLA-A*30:02; PKHD1; ENSG00000170927; TAA
SGNVSRHFY

SEQ ID NO: 64179 - protein, 11 aa, Homo sapiens
  misc_feature: Table A; Target 64179; HLA-A*30:02; PKHD1; ENSG00000170927; TAA
SGVPGKLIHVY

SEQ ID NO: 64180 - protein, 10 aa, Homo sapiens
  misc_feature: Table A; Target 64180; HLA-B*38:01; PKHD1; ENSG00000170927; TAA
SHILASMETL

SEQ ID NO: 64181 - protein, 10 aa, Homo sapiens
  misc_feature: Table A; Target 64181; HLA-B*39:01; PKHD1; ENSG00000170927; TAA
SHILASMETL

SEQ ID NO: 64182 - protein, 8 aa, Homo sapiens
  misc_feature: Table A; Target 64182; HLA-C*05:01; PKHD1; ENSG00000170927; TAA
SIDGDINL

SEQ ID NO: 64183 - protein, 9 aa, Homo sapiens
  misc_feature: Table A; Target 64183; HLA-C*05:01; PKHD1; ENSG00000170927; TAA
SIDGDINLM

SEQ ID NO: 64184 - protein, 10 aa, Homo sapiens
  misc_feature: Table A; Target 64184; HLA-A*03:01; PKHD1; ENSG00000170927; TAA
SILPIRQITK

SEQ ID NO: 64185 - protein, 11 aa, Homo sapiens
  misc_feature: Table A; Target 64185; HLA-A*02:04; PKHD1; ENSG00000170927; TAA
SILPIRQITKV

SEQ ID NO: 64186 - protein, 9 aa, Homo sapiens
  misc_feature: Table A; Target 64186; HLA-A*11:01; PKHD1; ENSG00000170927; TAA
SISGIGFSR

SEQ ID NO: 64187 - protein, 9 aa, Homo sapiens
  misc_feature: Table A; Target 64187; HLA-A*68:01; PKHD1; ENSG00000170927; TAA
SISGIGFSR

SEQ ID NO: 64188 - protein, 9 aa, Homo sapiens
  misc_feature: Table A; Target 64188; HLA-C*07:06; PKHD1; ENSG00000170927; TAA
SISGIGFSR

SEQ ID NO: 64189 - protein, 9 aa, Homo sapiens
  misc_feature: Table A; Target 64189; HLA-B*15:03; PKHD1; ENSG00000170927; TAA
SKAQTPIVH

SEQ ID NO: 64190 - protein, 11 aa, Homo sapiens
  misc_feature: Table A; Target 64190; HLA-A*03:02; PKHD1; ENSG00000170927; TAA
SLEGASDSVLK

SEQ ID NO: 64191 - protein, 11 aa, Homo sapiens
  misc_feature: Table A; Target 64191; HLA-A*11:01; PKHD1; ENSG00000170927; TAA
SLEGASDSVLK

SEQ ID NO: 64192 - protein, 9 aa, Homo sapiens
  misc_feature: Table A; Target 64192; HLA-A*02:01; PKHD1; ENSG00000170927; TAA
SLGDHTILC

SEQ ID NO: 64193 - protein, 11 aa, Homo sapiens
  misc_feature: Table A; Target 64193; HLA-A*02:01; PKHD1; ENSG00000170927; TAA
SLGDHTILCQV

SEQ ID NO: 64194 - protein, 10 aa, Homo sapiens
  misc_feature: Table A; Target 64194; HLA-A*02:03; PKHD1; ENSG00000170927; TAA
SLHGGSLLTI

SEQ ID NO: 64195 - protein, 9 aa, Homo sapiens
  misc_feature: Table A; Target 64195; HLA-A*02:01; PKHD1; ENSG00000170927; TAA
SLHGSLPEV

SEQ ID NO: 64196 - protein, 9 aa, Homo sapiens
  misc_feature: Table A; Target 64196; HLA-A*02:03; PKHD1; ENSG00000170927; TAA
SLHGSLPEV

SEQ ID NO: 64197 - protein, 9 aa, Homo sapiens
  misc_feature: Table A; Target 64197; HLA-A*02:04; PKHD1; ENSG00000170927; TAA
SLHGSLPEV

SEQ ID NO: 64198 - protein, 9 aa, Homo sapiens
  misc_feature: Table A; Target 64198; HLA-C*01:02; PKHD1; ENSG00000170927; TAA
SLHVGGSNL

SEQ ID NO: 64199 - protein, 10 aa, Homo sapiens
  misc_feature: Table A; Target 64199; HLA-A*02:01; PKHD1; ENSG00000170927; TAA
SLLGGTILSI

SEQ ID NO: 64200 - protein, 10 aa, Homo sapiens
  misc_feature: Table A; Target 64200; HLA-A*02:03; PKHD1; ENSG00000170927; TAA
SLLGGTILSI

SEQ ID NO: 64201 - protein, 10 aa, Homo sapiens
  misc_feature: Table A; Target 64201; HLA-A*02:04; PKHD1; ENSG00000170927; TAA
SLLGGTILSI

SEQ ID NO: 64202 - protein, 10 aa, Homo sapiens
  misc_feature: Table A; Target 64202; HLA-A*02:01; PKHD1; ENSG00000170927; TAA
SLLTIEGTGL

SEQ ID NO: 64203 - protein, 10 aa, Homo sapiens
  misc_feature: Table A; Target 64203; HLA-A*02:04; PKHD1; ENSG00000170927; TAA
SLLTIEGTGL

SEQ ID NO: 64204 - protein, 9 aa, Homo sapiens
  misc_feature: Table A; Target 64204; HLA-A*02:01; PKHD1; ENSG00000170927; TAA
SLMSIEVLL

SEQ ID NO: 64205 - protein, 9 aa, Homo sapiens
  misc_feature: Table A; Target 64205; HLA-A*02:04; PKHD1; ENSG00000170927; TAA
SLMSIEVLL

SEQ ID NO: 64206 - protein, 10 aa, Homo sapiens
  misc_feature: Table A; Target 64206; HLA-A*02:04; PKHD1; ENSG00000170927; TAA
SLMSIEVLLL

SEQ ID NO: 64207 - protein, 9 aa, Homo sapiens
  misc_feature: Table A; Target 64207; HLA-A*02:01; PKHD1; ENSG00000170927; TAA
SLNPVIVTL

SEQ ID NO: 64208 - protein, 9 aa, Homo sapiens
  misc_feature: Table A; Target 64208; HLA-A*02:03; PKHD1; ENSG00000170927; TAA
SLNPVIVTL

SEQ ID NO: 64209 - protein, 9 aa, Homo sapiens
  misc_feature: Table A; Target 64209; HLA-A*02:04; PKHD1; ENSG00000170927; TAA
SLNPVIVTL

SEQ ID NO: 64210 - protein, 9 aa, Homo sapiens
  misc_feature: Table A; Target 64210; HLA-A*02:07; PKHD1; ENSG00000170927; TAA
SLNPVIVTL

SEQ ID NO: 64211 - protein, 9 aa, Homo sapiens
  misc_feature: Table A; Target 64211; HLA-A*03:01; PKHD1; ENSG00000170927; TAA
SLNPVIVTL

SEQ ID NO: 64212 - protein, 9 aa, Homo sapiens
  misc_feature: Table A; Target 64212; HLA-A*03:02; PKHD1; ENSG00000170927; TAA
SLNPVIVTL

SEQ ID NO: 64213 - protein, 9 aa, Homo sapiens
  misc_feature: Table A; Target 64213; HLA-A*23:01; PKHD1; ENSG00000170927; TAA
SLNPVIVTL

SEQ ID NO: 64214 - protein, 9 aa, Homo sapiens
  misc_feature: Table A; Target 64214; HLA-A*24:02; PKHD1; ENSG00000170927; TAA
SLNPVIVTL

SEQ ID NO: 64215 - protein, 9 aa, Homo sapiens
  misc_feature: Table A; Target 64215; HLA-A*25:01; PKHD1; ENSG00000170927; TAA
SLNPVIVTL

SEQ ID NO: 64216 - protein, 9 aa, Homo sapiens
  misc_feature: Table A; Target 64216; HLA-A*30:01; PKHD1; ENSG00000170927; TAA
SLNPVIVTL

SEQ ID NO: 64217 - protein, 9 aa, Homo sapiens
  misc_feature: Table A; Target 64217; HLA-A*30:02; PKHD1; ENSG00000170927; TAA
SLNPVIVTL

SEQ ID NO: 64218 - protein, 9 aa, Homo sapiens
  misc_feature: Table A; Target 64218; HLA-A*31:01; PKHD1; ENSG00000170927; TAA
SLNPVIVTL

SEQ ID NO: 64219 - protein, 9 aa, Homo sapiens
  misc_feature: Table A; Target 64219; HLA-A*32:01; PKHD1; ENSG00000170927; TAA
SLNPVIVTL

SEQ ID NO: 64220 - protein, 9 aa, Homo sapiens
  misc_feature: Table A; Target 64220; HLA-A*68:02; PKHD1; ENSG00000170927; TAA
SLNPVIVTL

SEQ ID NO: 64221 - protein, 9 aa, Homo sapiens
  misc_feature: Table A; Target 64221; HLA-B*07:02; PKHD1; ENSG00000170927; TAA
SLNPVIVTL

SEQ ID NO: 64222 - protein, 9 aa, Homo sapiens
  misc_feature: Table A; Target 64222; HLA-B*08:01; PKHD1; ENSG00000170927; TAA
SLNPVIVTL

SEQ ID NO: 64223 - protein, 9 aa, Homo sapiens
  misc_feature: Table A; Target 64223; HLA-B*13:02; PKHD1; ENSG00000170927; TAA
SLNPVIVTL

SEQ ID NO: 64224 - protein, 9 aa, Homo sapiens
  misc_feature: Table A; Target 64224; HLA-B*15:01; PKHD1; ENSG00000170927; TAA
SLNPVIVTL

SEQ ID NO: 64225 - protein, 9 aa, Homo sapiens
  misc_feature: Table A; Target 64225; HLA-B*35:03; PKHD1; ENSG00000170927; TAA
SLNPVIVTL

SEQ ID NO: 64226 - protein, 9 aa, Homo sapiens
  misc_feature: Table A; Target 64226; HLA-B*37:01; PKHD1; ENSG00000170927; TAA
SLNPVIVTL

SEQ ID NO: 64227 - protein, 9 aa, Homo sapiens
  misc_feature: Table A; Target 64227; HLA-B*38:01; PKHD1; ENSG00000170927; TAA
SLNPVIVTL

SEQ ID NO: 64228 - protein, 9 aa, Homo sapiens
  misc_feature: Table A; Target 64228; HLA-B*39:01; PKHD1; ENSG00000170927; TAA
SLNPVIVTL

SEQ ID NO: 64229 - protein, 9 aa, Homo sapiens
  misc_feature: Table A; Target 64229; HLA-B*40:01; PKHD1; ENSG00000170927; TAA
SLNPVIVTL

SEQ ID NO: 64230 - protein, 9 aa, Homo sapiens
  misc_feature: Table A; Target 64230; HLA-B*44:02; PKHD1; ENSG00000170927; TAA
SLNPVIVTL

SEQ ID NO: 64231 - protein, 9 aa, Homo sapiens
  misc_feature: Table A; Target 64231; HLA-B*44:03; PKHD1; ENSG00000170927; TAA
SLNPVIVTL

SEQ ID NO: 64232 - protein, 9 aa, Homo sapiens
  misc_feature: Table A; Target 64232; HLA-B*46:01; PKHD1; ENSG00000170927; TAA
SLNPVIVTL

SEQ ID NO: 64233 - protein, 9 aa, Homo sapiens
  misc_feature: Table A; Target 64233; HLA-B*55:01; PKHD1; ENSG00000170927; TAA
SLNPVIVTL

SEQ ID NO: 64234 - protein, 9 aa, Homo sapiens
  misc_feature: Table A; Target 64234; HLA-B*58:01; PKHD1; ENSG00000170927; TAA
SLNPVIVTL

SEQ ID NO: 64235 - protein, 9 aa, Homo sapiens
  misc_feature: Table A; Target 64235; HLA-C*01:02; PKHD1; ENSG00000170927; TAA
SLNPVIVTL

SEQ ID NO: 64236 - protein, 9 aa, Homo sapiens
  misc_feature: Table A; Target 64236; HLA-C*02:02; PKHD1; ENSG00000170927; TAA
SLNPVIVTL

SEQ ID NO: 64237 - protein, 9 aa, Homo sapiens
  misc_feature: Table A; Target 64237; HLA-C*03:03; PKHD1; ENSG00000170927; TAA
SLNPVIVTL

SEQ ID NO: 64238 - protein, 9 aa, Homo sapiens
  misc_feature: Table A; Target 64238; HLA-C*03:04; PKHD1; ENSG00000170927; TAA
SLNPVIVTL

SEQ ID NO: 64239 - protein, 9 aa, Homo sapiens
  misc_feature: Table A; Target 64239; HLA-C*07:04; PKHD1; ENSG00000170927; TAA
SLNPVIVTL

SEQ ID NO: 64240 - protein, 9 aa, Homo sapiens
  misc_feature: Table A; Target 64240; HLA-C*16:01; PKHD1; ENSG00000170927; TAA
SLNPVIVTL

SEQ ID NO: 64241 - protein, 9 aa, Homo sapiens
  misc_feature: Table A; Target 64241; HLA-C*16:02; PKHD1; ENSG00000170927; TAA
SLNPVIVTL

SEQ ID NO: 64242 - protein, 9 aa, Homo sapiens
  misc_feature: Table A; Target 64242; HLA-C*16:04; PKHD1; ENSG00000170927; TAA
SLNPVIVTL

SEQ ID NO: 64243 - protein, 9 aa, Homo sapiens
  misc_feature: Table A; Target 64243; HLA-A*02:07; PKHD1; ENSG00000170927; TAA
SLPAGEYHV

SEQ ID NO: 64244 - protein, 9 aa, Homo sapiens
  misc_feature: Table A; Target 64244; HLA-A*02:07; PKHD1; ENSG00000170927; TAA
SLPETWQGV

SEQ ID NO: 64245 - protein, 9 aa, Homo sapiens
  misc_feature: Table A; Target 64245; HLA-A*02:01; PKHD1; ENSG00000170927; TAA
SLPEVIVTC

SEQ ID NO: 64246 - protein, 9 aa, Homo sapiens
  misc_feature: Table A; Target 64246; HLA-A*02:07; PKHD1; ENSG00000170927; TAA
SLPEVIVTC

SEQ ID NO: 64247 - protein, 10 aa, Homo sapiens
  misc_feature: Table A; Target 64247; HLA-A*02:07; PKHD1; ENSG00000170927; TAA
SLPEVIVTCL

SEQ ID NO: 64248 - protein, 11 aa, Homo sapiens
  misc_feature: Table A; Target 64248; HLA-A*31:01; PKHD1; ENSG00000170927; TAA
SLQSENLWINR

SEQ ID NO: 64249 - protein, 10 aa, Homo sapiens
  misc_feature: Table A; Target 64249; HLA-A*02:04; PKHD1; ENSG00000170927; TAA
SLSSNKLQNL

SEQ ID NO: 64250 - protein, 9 aa, Homo sapiens
  misc_feature: Table A; Target 64250; HLA-C*03:03; PKHD1; ENSG00000170927; TAA
SNIAGGETL

SEQ ID NO: 64251 - protein, 9 aa, Homo sapiens
  misc_feature: Table A; Target 64251; HLA-C*03:04; PKHD1; ENSG00000170927; TAA
SNIAGGETL

SEQ ID NO: 64252 - protein, 9 aa, Homo sapiens
  misc_feature: Table A; Target 64252; HLA-C*14:02; PKHD1; ENSG00000170927; TAA
SNIAGGETL

SEQ ID NO: 64253 - protein, 9 aa, Homo sapiens
  misc_feature: Table A; Target 64253; HLA-B*07:02; PKHD1; ENSG00000170927; TAA
SPGNVSAAV

SEQ ID NO: 64254 - protein, 9 aa, Homo sapiens
  misc_feature: Table A; Target 64254; HLA-B*56:01; PKHD1; ENSG00000170927; TAA
SPGNVSAAV

SEQ ID NO: 64255 - protein, 9 aa, Homo sapiens
  misc_feature: Table A; Target 64255; HLA-C*07:02; PKHD1; ENSG00000170927; TAA
SPGNVSAAV

SEQ ID NO: 64256 - protein, 9 aa, Homo sapiens
  misc_feature: Table A; Target 64256; HLA-B*07:02; PKHD1; ENSG00000170927; TAA
SPLYSSVEF

SEQ ID NO: 64257 - protein, 9 aa, Homo sapiens
  misc_feature: Table A; Target 64257; HLA-B*35:01; PKHD1; ENSG00000170927; TAA
SPLYSSVEF

SEQ ID NO: 64258 - protein, 9 aa, Homo sapiens
  misc_feature: Table A; Target 64258; HLA-B*35:03; PKHD1; ENSG00000170927; TAA
SPLYSSVEF

SEQ ID NO: 64259 - protein, 9 aa, Homo sapiens
  misc_feature: Table A; Target 64259; HLA-B*55:01; PKHD1; ENSG00000170927; TAA
SPLYSSVEF

SEQ ID NO: 64260 - protein, 9 aa, Homo sapiens
  misc_feature: Table A; Target 64260; HLA-B*56:01; PKHD1; ENSG00000170927; TAA
SPPGVNFTA

SEQ ID NO: 64261 - protein, 10 aa, Homo sapiens
  misc_feature: Table A; Target 64261; HLA-A*68:01; PKHD1; ENSG00000170927; TAA
SPPGVNFTAR

SEQ ID NO: 64262 - protein, 10 aa, Homo sapiens
  misc_feature: Table A; Target 64262; HLA-C*07:06; PKHD1; ENSG00000170927; TAA
SPPGVNFTAR

SEQ ID NO: 64263 - protein, 9 aa, Homo sapiens
  misc_feature: Table A; Target 64263; HLA-B*51:01; PKHD1; ENSG00000170927; TAA
SPPMTVETI

SEQ ID NO: 64264 - protein, 9 aa, Homo sapiens
  misc_feature: Table A; Target 64264; HLA-B*07:02; PKHD1; ENSG00000170927; TAA
SPSLVGKGF

SEQ ID NO: 64265 - protein, 11 aa, Homo sapiens
  misc_feature: Table A; Target 64265; HLA-B*07:02; PKHD1; ENSG00000170927; TAA
SPSLVGKGFTF

SEQ ID NO: 64266 - protein, 10 aa, Homo sapiens
  misc_feature: Table A; Target 64266; HLA-C*07:06; PKHD1; ENSG00000170927; TAA
SPTNVIEGNR

SEQ ID NO: 64267 - protein, 9 aa, Homo sapiens
  misc_feature: Table A; Target 64267; HLA-B*07:02; PKHD1; ENSG00000170927; TAA
SPTVRSTGM

SEQ ID NO: 64268 - protein, 9 aa, Homo sapiens
  misc_feature: Table A; Target 64268; HLA-C*07:02; PKHD1; ENSG00000170927; TAA
SPTVRSTGM

SEQ ID NO: 64269 - protein, 8 aa, Homo sapiens
  misc_feature: Table A; Target 64269; HLA-B*51:01; PKHD1; ENSG00000170927; TAA
SPVLVHQI

SEQ ID NO: 64270 - protein, 8 aa, Homo sapiens
  misc_feature: Table A; Target 64270; HLA-B*15:01; PKHD1; ENSG00000170927; TAA
SQAPLLSF

SEQ ID NO: 64271 - protein, 9 aa, Homo sapiens
  misc_feature: Table A; Target 64271; HLA-A*25:01; PKHD1; ENSG00000170927; TAA
SQASLHFSW

SEQ ID NO: 64272 - protein, 9 aa, Homo sapiens
  misc_feature: Table A; Target 64272; HLA-A*32:01; PKHD1; ENSG00000170927; TAA
SQASLHFSW

SEQ ID NO: 64273 - protein, 9 aa, Homo sapiens
  misc_feature: Table A; Target 64273; HLA-B*44:02; PKHD1; ENSG00000170927; TAA
SQASLHFSW

SEQ ID NO: 64274 - protein, 9 aa, Homo sapiens
  misc_feature: Table A; Target 64274; HLA-B*44:03; PKHD1; ENSG00000170927; TAA
SQASLHFSW

SEQ ID NO: 64275 - protein, 9 aa, Homo sapiens
  misc_feature: Table A; Target 64275; HLA-C*16:04; PKHD1; ENSG00000170927; TAA
SQASLHFSW

SEQ ID NO: 64276 - protein, 8 aa, Homo sapiens
  misc_feature: Table A; Target 64276; HLA-B*13:02; PKHD1; ENSG00000170927; TAA
SQFLQVTV

SEQ ID NO: 64277 - protein, 10 aa, Homo sapiens
  misc_feature: Table A; Target 64277; HLA-A*03:02; PKHD1; ENSG00000170927; TAA
SQFLQVTVNK

SEQ ID NO: 64278 - protein, 10 aa, Homo sapiens
  misc_feature: Table A; Target 64278; HLA-A*11:01; PKHD1; ENSG00000170927; TAA
SQFLQVTVNK

SEQ ID NO: 64279 - protein, 9 aa, Homo sapiens
  misc_feature: Table A; Target 64279; HLA-B*13:02; PKHD1; ENSG00000170927; TAA
SQGQGGFTV

SEQ ID NO: 64280 - protein, 9 aa, Homo sapiens
  misc_feature: Table A; Target 64280; HLA-B*39:01; PKHD1; ENSG00000170927; TAA
SQGQGGFTV

SEQ ID NO: 64281 - protein, 10 aa, Homo sapiens
  misc_feature: Table A; Target 64281; HLA-A*11:01; PKHD1; ENSG00000170927; TAA
SQGQGGFTVK

SEQ ID NO: 64282 - protein, 8 aa, Homo sapiens
  misc_feature: Table A; Target 64282; HLA-B*13:02; PKHD1; ENSG00000170927; TAA
SQGVDLHI

SEQ ID NO: 64283 - protein, 8 aa, Homo sapiens
  misc_feature: Table A; Target 64283; HLA-B*13:02; PKHD1; ENSG00000170927; TAA
SQLEIHLV

SEQ ID NO: 64284 - protein, 10 aa, Homo sapiens
  misc_feature: Table A; Target 64284; HLA-A*02:01; PKHD1; ENSG00000170927; TAA
SQLEIHLVNV

SEQ ID NO: 64285 - protein, 10 aa, Homo sapiens
  misc_feature: Table A; Target 64285; HLA-A*02:04; PKHD1; ENSG00000170927; TAA
SQLEIHLVNV

SEQ ID NO: 64286 - protein, 10 aa, Homo sapiens
  misc_feature: Table A; Target 64286; HLA-B*13:02; PKHD1; ENSG00000170927; TAA
SQLEIHLVNV

SEQ ID NO: 64287 - protein, 8 aa, Homo sapiens
  misc_feature: Table A; Target 64287; HLA-B*15:01; PKHD1; ENSG00000170927; TAA
SQLRQLTY

SEQ ID NO: 64288 - protein, 8 aa, Homo sapiens
  misc_feature: Table A; Target 64288; HLA-B*15:03; PKHD1; ENSG00000170927; TAA
SQLRQLTY

SEQ ID NO: 64289 - protein, 9 aa, Homo sapiens
  misc_feature: Table A; Target 64289; HLA-A*02:04; PKHD1; ENSG00000170927; TAA
SQLRQLTYL

SEQ ID NO: 64290 - protein, 8 aa, Homo sapiens
  misc_feature: Table A; Target 64290; HLA-B*13:02; PKHD1; ENSG00000170927; TAA
SQNVSFSV

SEQ ID NO: 64291 - protein, 9 aa, Homo sapiens
  misc_feature: Table A; Target 64291; HLA-A*32:01; PKHD1; ENSG00000170927; TAA
SQNVSFSVF

SEQ ID NO: 64292 - protein, 9 aa, Homo sapiens
  misc_feature: Table A; Target 64292; HLA-B*15:01; PKHD1; ENSG00000170927; TAA
SQNVSFSVF

SEQ ID NO: 64293 - protein, 9 aa, Homo sapiens
  misc_feature: Table A; Target 64293; HLA-B*15:03; PKHD1; ENSG00000170927; TAA
SQNVSFSVF

SEQ ID NO: 64294 - protein, 9 aa, Homo sapiens
  misc_feature: Table A; Target 64294; HLA-A*25:01; PKHD1; ENSG00000170927; TAA
SQSDDILTF

SEQ ID NO: 64295 - protein, 9 aa, Homo sapiens
  misc_feature: Table A; Target 64295; HLA-A*26:01; PKHD1; ENSG00000170927; TAA
SQSDDILTF

SEQ ID NO: 64296 - protein, 9 aa, Homo sapiens
  misc_feature: Table A; Target 64296; HLA-A*32:01; PKHD1; ENSG00000170927; TAA
SQSDDILTF

SEQ ID NO: 64297 - protein, 9 aa, Homo sapiens
  misc_feature: Table A; Target 64297; HLA-B*13:02; PKHD1; ENSG00000170927; TAA
SQSDDILTF

SEQ ID NO: 64298 - protein, 9 aa, Homo sapiens
  misc_feature: Table A; Target 64298; HLA-B*15:01; PKHD1; ENSG00000170927; TAA
SQSDDILTF

SEQ ID NO: 64299 - protein, 9 aa, Homo sapiens
  misc_feature: Table A; Target 64299; HLA-B*15:03; PKHD1; ENSG00000170927; TAA
SQSDDILTF

SEQ ID NO: 64300 - protein, 9 aa, Homo sapiens
  misc_feature: Table A; Target 64300; HLA-B*27:05; PKHD1; ENSG00000170927; TAA
SQSDDILTF

SEQ ID NO: 64301 - protein, 9 aa, Homo sapiens
  misc_feature: Table A; Target 64301; HLA-B*38:01; PKHD1; ENSG00000170927; TAA
SQSDDILTF

SEQ ID NO: 64302 - protein, 9 aa, Homo sapiens
  misc_feature: Table A; Target 64302; HLA-B*39:01; PKHD1; ENSG00000170927; TAA
SQSDDILTF

SEQ ID NO: 64303 - protein, 9 aa, Homo sapiens
  misc_feature: Table A; Target 64303; HLA-C*16:04; PKHD1; ENSG00000170927; TAA
SQSDDILTF

SEQ ID NO: 64304 - protein, 9 aa, Homo sapiens
  misc_feature: Table A; Target 64304; HLA-A*11:01; PKHD1; ENSG00000170927; TAA
SSALVFTSR

SEQ ID NO: 64305 - protein, 9 aa, Homo sapiens
  misc_feature: Table A; Target 64305; HLA-A*31:01; PKHD1; ENSG00000170927; TAA
SSALVFTSR

SEQ ID NO: 64306 - protein, 9 aa, Homo sapiens
  misc_feature: Table A; Target 64306; HLA-A*33:01; PKHD1; ENSG00000170927; TAA
SSALVFTSR

SEQ ID NO: 64307 - protein, 9 aa, Homo sapiens
  misc_feature: Table A; Target 64307; HLA-A*33:03; PKHD1; ENSG00000170927; TAA
SSALVFTSR

SEQ ID NO: 64308 - protein, 9 aa, Homo sapiens
  misc_feature: Table A; Target 64308; HLA-A*68:01; PKHD1; ENSG00000170927; TAA
SSALVFTSR

SEQ ID NO: 64309 - protein, 9 aa, Homo sapiens
  misc_feature: Table A; Target 64309; HLA-C*07:06; PKHD1; ENSG00000170927; TAA
SSALVFTSR

SEQ ID NO: 64310 - protein, 9 aa, Homo sapiens
  misc_feature: Table A; Target 64310; HLA-A*11:01; PKHD1; ENSG00000170927; TAA
SSFDCIQDK

SEQ ID NO: 64311 - protein, 8 aa, Homo sapiens
  misc_feature: Table A; Target 64311; HLA-C*03:04; PKHD1; ENSG00000170927; TAA
SSLEGVSL

SEQ ID NO: 64312 - protein, 9 aa, Homo sapiens
  misc_feature: Table A; Target 64312; HLA-A*29:02; PKHD1; ENSG00000170927; TAA
SSLHGLHLY

SEQ ID NO: 64313 - protein, 9 aa, Homo sapiens
  misc_feature: Table A; Target 64313; HLA-A*30:02; PKHD1; ENSG00000170927; TAA
SSLHGLHLY

SEQ ID NO: 64314 - protein, 10 aa, Homo sapiens
  misc_feature: Table A; Target 64314; HLA-A*03:01; PKHD1; ENSG00000170927; TAA
STDRAPSNPR

SEQ ID NO: 64315 - protein, 10 aa, Homo sapiens
  misc_feature: Table A; Target 64315; HLA-A*03:02; PKHD1; ENSG00000170927; TAA
STDRAPSNPR

SEQ ID NO: 64316 - protein, 10 aa, Homo sapiens
  misc_feature: Table A; Target 64316; HLA-A*11:01; PKHD1; ENSG00000170927; TAA
STDRAPSNPR

SEQ ID NO: 64317 - protein, 10 aa, Homo sapiens
  misc_feature: Table A; Target 64317; HLA-A*68:01; PKHD1; ENSG00000170927; TAA
STDRAPSNPR

SEQ ID NO: 64318 - protein, 10 aa, Homo sapiens
  misc_feature: Table A; Target 64318; HLA-C*07:06; PKHD1; ENSG00000170927; TAA
STDRAPSNPR

SEQ ID NO: 64319 - protein, 10 aa, Homo sapiens
  misc_feature: Table A; Target 64319; HLA-A*68:02; PKHD1; ENSG00000170927; TAA
STIWVAGIKV

SEQ ID NO: 64320 - protein, 9 aa, Homo sapiens
  misc_feature: Table A; Target 64320; HLA-A*68:02; PKHD1; ENSG00000170927; TAA
STPFFPYGV

SEQ ID NO: 64321 - protein, 9 aa, Homo sapiens
  misc_feature: Table A; Target 64321; HLA-C*03:03; PKHD1; ENSG00000170927; TAA
STSAPESAL

SEQ ID NO: 64322 - protein, 9 aa, Homo sapiens
  misc_feature: Table A; Target 64322; HLA-C*03:04; PKHD1; ENSG00000170927; TAA
STSAPESAL

SEQ ID NO: 64323 - protein, 9 aa, Homo sapiens
  misc_feature: Table A; Target 64323; HLA-C*05:01; PKHD1; ENSG00000170927; TAA
STSAPESAL

SEQ ID NO: 64324 - protein, 10 aa, Homo sapiens
  misc_feature: Table A; Target 64324; HLA-A*11:01; PKHD1; ENSG00000170927; TAA
STSAPESALK

SEQ ID NO: 64325 - protein, 11 aa, Homo sapiens
  misc_feature: Table A; Target 64325; HLA-A*25:01; PKHD1; ENSG00000170927; TAA
STSAPESALKW

SEQ ID NO: 64326 - protein, 11 aa, Homo sapiens
  misc_feature: Table A; Target 64326; HLA-B*57:01; PKHD1; ENSG00000170927; TAA
STSAPESALKW

SEQ ID NO: 64327 - protein, 11 aa, Homo sapiens
  misc_feature: Table A; Target 64327; HLA-B*58:01; PKHD1; ENSG00000170927; TAA
STSAPESALKW

SEQ ID NO: 64328 - protein, 9 aa, Homo sapiens
  misc_feature: Table A; Target 64328; HLA-A*25:01; PKHD1; ENSG00000170927; TAA
STSGSVSTF

SEQ ID NO: 64329 - protein, 9 aa, Homo sapiens
  misc_feature: Table A; Target 64329; HLA-A*26:01; PKHD1; ENSG00000170927; TAA
STSGSVSTF

SEQ ID NO: 64330 - protein, 9 aa, Homo sapiens
  misc_feature: Table A; Target 64330; HLA-A*32:01; PKHD1; ENSG00000170927; TAA
STSGSVSTF

SEQ ID NO: 64331 - protein, 10 aa, Homo sapiens
  misc_feature: Table A; Target 64331; HLA-A*01:01; PKHD1; ENSG00000170927; TAA
STSGSVSTFY

SEQ ID NO: 64332 - protein, 10 aa, Homo sapiens
  misc_feature: Table A; Target 64332; HLA-A*26:01; PKHD1; ENSG00000170927; TAA
STSGSVSTFY

SEQ ID NO: 64333 - protein, 10 aa, Homo sapiens
  misc_feature: Table A; Target 64333; HLA-A*29:02; PKHD1; ENSG00000170927; TAA
STSGSVSTFY

SEQ ID NO: 64334 - protein, 10 aa, Homo sapiens
  misc_feature: Table A; Target 64334; HLA-A*30:02; PKHD1; ENSG00000170927; TAA
STSGSVSTFY

SEQ ID NO: 64335 - protein, 9 aa, Homo sapiens
  misc_feature: Table A; Target 64335; HLA-C*05:01; PKHD1; ENSG00000170927; TAA
SVEIENITL

SEQ ID NO: 64336 - protein, 9 aa, Homo sapiens
  misc_feature: Table A; Target 64336; HLA-A*25:01; PKHD1; ENSG00000170927; TAA
SVFPETGSL

SEQ ID NO: 64337 - protein, 9 aa, Homo sapiens
  misc_feature: Table A; Target 64337; HLA-A*26:01; PKHD1; ENSG00000170927; TAA
SVFPETGSL

SEQ ID NO: 64338 - protein, 9 aa, Homo sapiens
  misc_feature: Table A; Target 64338; HLA-A*32:01; PKHD1; ENSG00000170927; TAA
SVFPETGSL

SEQ ID NO: 64339 - protein, 9 aa, Homo sapiens
  misc_feature: Table A; Target 64339; HLA-B*07:02; PKHD1; ENSG00000170927; TAA
SVFPETGSL

SEQ ID NO: 64340 - protein, 9 aa, Homo sapiens
  misc_feature: Table A; Target 64340; HLA-B*15:01; PKHD1; ENSG00000170927; TAA
SVFPETGSL

SEQ ID NO: 64341 - protein, 9 aa, Homo sapiens
  misc_feature: Table A; Target 64341; HLA-B*15:03; PKHD1; ENSG00000170927; TAA
SVFPETGSL

SEQ ID NO: 64342 - protein, 9 aa, Homo sapiens
  misc_feature: Table A; Target 64342; HLA-B*27:05; PKHD1; ENSG00000170927; TAA
SVFPETGSL

SEQ ID NO: 64343 - protein, 9 aa, Homo sapiens
  misc_feature: Table A; Target 64343; HLA-B*35:03; PKHD1; ENSG00000170927; TAA
SVFPETGSL

SEQ ID NO: 64344 - protein, 9 aa, Homo sapiens
  misc_feature: Table A; Target 64344; HLA-B*39:01; PKHD1; ENSG00000170927; TAA
SVFPETGSL

SEQ ID NO: 64345 - protein, 9 aa, Homo sapiens
  misc_feature: Table A; Target 64345; HLA-B*40:01; PKHD1; ENSG00000170927; TAA
SVFPETGSL

SEQ ID NO: 64346 - protein, 9 aa, Homo sapiens
  misc_feature: Table A; Target 64346; HLA-B*46:01; PKHD1; ENSG00000170927; TAA
SVFPETGSL

SEQ ID NO: 64347 - protein, 9 aa, Homo sapiens
  misc_feature: Table A; Target 64347; HLA-C*01:02; PKHD1; ENSG00000170927; TAA
SVFPETGSL

SEQ ID NO: 64348 - protein, 9 aa, Homo sapiens
  misc_feature: Table A; Target 64348; HLA-C*02:02; PKHD1; ENSG00000170927; TAA
SVFPETGSL

SEQ ID NO: 64349 - protein, 9 aa, Homo sapiens
  misc_feature: Table A; Target 64349; HLA-C*03:03; PKHD1; ENSG00000170927; TAA
SVFPETGSL

SEQ ID NO: 64350 - protein, 9 aa, Homo sapiens
  misc_feature: Table A; Target 64350; HLA-C*03:04; PKHD1; ENSG00000170927; TAA
SVFPETGSL

SEQ ID NO: 64351 - protein, 9 aa, Homo sapiens
  misc_feature: Table A; Target 64351; HLA-C*05:01; PKHD1; ENSG00000170927; TAA
SVFPETGSL

SEQ ID NO: 64352 - protein, 9 aa, Homo sapiens
  misc_feature: Table A; Target 64352; HLA-C*14:02; PKHD1; ENSG00000170927; TAA
SVFPETGSL

SEQ ID NO: 64353 - protein, 10 aa, Homo sapiens
  misc_feature: Table A; Target 64353; HLA-A*25:01; PKHD1; ENSG00000170927; TAA
SVFPKTEAEW

SEQ ID NO: 64354 - protein, 9 aa, Homo sapiens
  misc_feature: Table A; Target 64354; HLA-A*29:02; PKHD1; ENSG00000170927; TAA
SVFYTRNGY

SEQ ID NO: 64355 - protein, 9 aa, Homo sapiens
  misc_feature: Table A; Target 64355; HLA-A*30:02; PKHD1; ENSG00000170927; TAA
SVFYTRNGY

SEQ ID NO: 64356 - protein, 9 aa, Homo sapiens
  misc_feature: Table A; Target 64356; HLA-A*32:01; PKHD1; ENSG00000170927; TAA
SVFYTRNGY

SEQ ID NO: 64357 - protein, 10 aa, Homo sapiens
  misc_feature: Table A; Target 64357; HLA-A*25:01; PKHD1; ENSG00000170927; TAA
SVIVATSSSF

SEQ ID NO: 64358 - protein, 10 aa, Homo sapiens
  misc_feature: Table A; Target 64358; HLA-A*26:01; PKHD1; ENSG00000170927; TAA
SVIVATSSSF

SEQ ID NO: 64359 - protein, 10 aa, Homo sapiens
  misc_feature: Table A; Target 64359; HLA-B*15:01; PKHD1; ENSG00000170927; TAA
SVIVATSSSF

SEQ ID NO: 64360 - protein, 10 aa, Homo sapiens
  misc_feature: Table A; Target 64360; HLA-B*46:01; PKHD1; ENSG00000170927; TAA
SVIVATSSSF

SEQ ID NO: 64361 - protein, 9 aa, Homo sapiens
  misc_feature: Table A; Target 64361; HLA-B*08:01; PKHD1; ENSG00000170927; TAA
SVKKVQIVL

SEQ ID NO: 64362 - protein, 10 aa, Homo sapiens
  misc_feature: Table A; Target 64362; HLA-A*31:01; PKHD1; ENSG00000170927; TAA
SVKKVQIVLR

SEQ ID NO: 64363 - protein, 11 aa, Homo sapiens
  misc_feature: Table A; Target 64363; HLA-A*29:02; PKHD1; ENSG00000170927; TAA
SVLSEAHEGLY

SEQ ID NO: 64364 - protein, 11 aa, Homo sapiens
  misc_feature: Table A; Target 64364; HLA-A*30:02; PKHD1; ENSG00000170927; TAA
SVLSEAHEGLY

SEQ ID NO: 64365 - protein, 9 aa, Homo sapiens
  misc_feature: Table A; Target 64365; HLA-B*13:02; PKHD1; ENSG00000170927; TAA
SVSINGVSI

SEQ ID NO: 64366 - protein, 11 aa, Homo sapiens
  misc_feature: Table A; Target 64366; HLA-A*30:02; PKHD1; ENSG00000170927; TAA
SVSVVGSPPVY

SEQ ID NO: 64367 - protein, 9 aa, Homo sapiens
  misc_feature: Table A; Target 64367; HLA-A*25:01; PKHD1; ENSG00000170927; TAA
SVVGSPPVY

SEQ ID NO: 64368 - protein, 9 aa, Homo sapiens
  misc_feature: Table A; Target 64368; HLA-A*26:01; PKHD1; ENSG00000170927; TAA
SVVGSPPVY

SEQ ID NO: 64369 - protein, 9 aa, Homo sapiens
  misc_feature: Table A; Target 64369; HLA-A*29:02; PKHD1; ENSG00000170927; TAA
SVVGSPPVY

SEQ ID NO: 64370 - protein, 9 aa, Homo sapiens
  misc_feature: Table A; Target 64370; HLA-A*30:02; PKHD1; ENSG00000170927; TAA
SVVGSPPVY

SEQ ID NO: 64371 - protein, 9 aa, Homo sapiens
  misc_feature: Table A; Target 64371; HLA-A*32:01; PKHD1; ENSG00000170927; TAA
SVVGSPPVY

SEQ ID NO: 64372 - protein, 9 aa, Homo sapiens
  misc_feature: Table A; Target 64372; HLA-B*15:01; PKHD1; ENSG00000170927; TAA
SVVGSPPVY

SEQ ID NO: 64373 - protein, 9 aa, Homo sapiens
  misc_feature: Table A; Target 64373; HLA-B*15:03; PKHD1; ENSG00000170927; TAA
SVVGSPPVY

SEQ ID NO: 64374 - protein, 9 aa, Homo sapiens
  misc_feature: Table A; Target 64374; HLA-B*27:05; PKHD1; ENSG00000170927; TAA
SVVGSPPVY

SEQ ID NO: 64375 - protein, 9 aa, Homo sapiens
  misc_feature: Table A; Target 64375; HLA-B*35:01; PKHD1; ENSG00000170927; TAA
SVVGSPPVY

SEQ ID NO: 64376 - protein, 9 aa, Homo sapiens
  misc_feature: Table A; Target 64376; HLA-B*39:01; PKHD1; ENSG00000170927; TAA
SVVGSPPVY

SEQ ID NO: 64377 - protein, 9 aa, Homo sapiens
  misc_feature: Table A; Target 64377; HLA-B*58:01; PKHD1; ENSG00000170927; TAA
SVVGSPPVY

SEQ ID NO: 64378 - protein, 9 aa, Homo sapiens
  misc_feature: Table A; Target 64378; HLA-C*02:02; PKHD1; ENSG00000170927; TAA
SVVGSPPVY

SEQ ID NO: 64379 - protein, 9 aa, Homo sapiens
  misc_feature: Table A; Target 64379; HLA-C*07:04; PKHD1; ENSG00000170927; TAA
SVVGSPPVY

SEQ ID NO: 64380 - protein, 9 aa, Homo sapiens
  misc_feature: Table A; Target 64380; HLA-C*07:06; PKHD1; ENSG00000170927; TAA
SVVGSPPVY

SEQ ID NO: 64381 - protein, 9 aa, Homo sapiens
  misc_feature: Table A; Target 64381; HLA-C*12:03; PKHD1; ENSG00000170927; TAA
SVVGSPPVY

SEQ ID NO: 64382 - protein, 9 aa, Homo sapiens
  misc_feature: Table A; Target 64382; HLA-C*16:01; PKHD1; ENSG00000170927; TAA
SVVGSPPVY

SEQ ID NO: 64383 - protein, 9 aa, Homo sapiens
  misc_feature: Table A; Target 64383; HLA-C*16:04; PKHD1; ENSG00000170927; TAA
SVVGSPPVY

SEQ ID NO: 64384 - protein, 9 aa, Homo sapiens
  misc_feature: Table A; Target 64384; HLA-A*29:02; PKHD1; ENSG00000170927; TAA
SYSTPFFPY

SEQ ID NO: 64385 - protein, 8 aa, Homo sapiens
  misc_feature: Table A; Target 64385; HLA-C*05:01; PKHD1; ENSG00000170927; TAA
TADEPMVF

SEQ ID NO: 64386 - protein, 9 aa, Homo sapiens
  misc_feature: Table A; Target 64386; HLA-C*05:01; PKHD1; ENSG00000170927; TAA
TADEPMVFV

SEQ ID NO: 64387 - protein, 9 aa, Homo sapiens
  misc_feature: Table A; Target 64387; HLA-B*35:01; PKHD1; ENSG00000170927; TAA
TAHALDTVL

SEQ ID NO: 64388 - protein, 9 aa, Homo sapiens
  misc_feature: Table A; Target 64388; HLA-B*35:03; PKHD1; ENSG00000170927; TAA
TAHALDTVL

SEQ ID NO: 64389 - protein, 9 aa, Homo sapiens
  misc_feature: Table A; Target 64389; HLA-B*13:02; PKHD1; ENSG00000170927; TAA
TAHLIQTTI

SEQ ID NO: 64390 - protein, 9 aa, Homo sapiens
  misc_feature: Table A; Target 64390; HLA-B*51:01; PKHD1; ENSG00000170927; TAA
TAHLIQTTI

SEQ ID NO: 64391 - protein, 9 aa, Homo sapiens
  misc_feature: Table A; Target 64391; HLA-B*58:01; PKHD1; ENSG00000170927; TAA
TAHLIQTTI

SEQ ID NO: 64392 - protein, 9 aa, Homo sapiens
  misc_feature: Table A; Target 64392; HLA-A*32:01; PKHD1; ENSG00000170927; TAA
TANQHTQVV

SEQ ID NO: 64393 - protein, 9 aa, Homo sapiens
  misc_feature: Table A; Target 64393; HLA-B*08:01; PKHD1; ENSG00000170927; TAA
TANQHTQVV

SEQ ID NO: 64394 - protein, 9 aa, Homo sapiens
  misc_feature: Table A; Target 64394; HLA-B*51:01; PKHD1; ENSG00000170927; TAA
TANQHTQVV

SEQ ID NO: 64395 - protein, 9 aa, Homo sapiens
  misc_feature: Table A; Target 64395; HLA-C*02:02; PKHD1; ENSG00000170927; TAA
TANQHTQVV

SEQ ID NO: 64396 - protein, 9 aa, Homo sapiens
  misc_feature: Table A; Target 64396; HLA-C*03:04; PKHD1; ENSG00000170927; TAA
TANQHTQVV

SEQ ID NO: 64397 - protein, 9 aa, Homo sapiens
  misc_feature: Table A; Target 64397; HLA-C*05:01; PKHD1; ENSG00000170927; TAA
TANQHTQVV

SEQ ID NO: 64398 - protein, 9 aa, Homo sapiens
  misc_feature: Table A; Target 64398; HLA-C*12:03; PKHD1; ENSG00000170927; TAA
TANQHTQVV

SEQ ID NO: 64399 - protein, 9 aa, Homo sapiens
  misc_feature: Table A; Target 64399; HLA-C*16:01; PKHD1; ENSG00000170927; TAA
TANQHTQVV

SEQ ID NO: 64400 - protein, 9 aa, Homo sapiens
  misc_feature: Table A; Target 64400; HLA-C*16:02; PKHD1; ENSG00000170927; TAA
TANQHTQVV

SEQ ID NO: 64401 - protein, 9 aa, Homo sapiens
  misc_feature: Table A; Target 64401; HLA-C*16:04; PKHD1; ENSG00000170927; TAA
TANQHTQVV

SEQ ID NO: 64402 - protein, 11 aa, Homo sapiens
  misc_feature: Table A; Target 64402; HLA-A*33:01; PKHD1; ENSG00000170927; TAA
TANQHTQVVVR

SEQ ID NO: 64403 - protein, 11 aa, Homo sapiens
  misc_feature: Table A; Target 64403; HLA-A*33:03; PKHD1; ENSG00000170927; TAA
TANQHTQVVVR

SEQ ID NO: 64404 - protein, 11 aa, Homo sapiens
  misc_feature: Table A; Target 64404; HLA-A*68:01; PKHD1; ENSG00000170927; TAA
TANQHTQVVVR

SEQ ID NO: 64405 - protein, 11 aa, Homo sapiens
  misc_feature: Table A; Target 64405; HLA-C*07:06; PKHD1; ENSG00000170927; TAA
TANQHTQVVVR

SEQ ID NO: 64406 - protein, 9 aa, Homo sapiens
  misc_feature: Table A; Target 64406; HLA-B*51:01; PKHD1; ENSG00000170927; TAA
TARPGGNLV

SEQ ID NO: 64407 - protein, 8 aa, Homo sapiens
  misc_feature: Table A; Target 64407; HLA-B*37:01; PKHD1; ENSG00000170927; TAA
TDLLPVGM

SEQ ID NO: 64408 - protein, 9 aa, Homo sapiens
  misc_feature: Table A; Target 64408; HLA-A*33:01; PKHD1; ENSG00000170927; TAA
TDRAPSNPR

SEQ ID NO: 64409 - protein, 9 aa, Homo sapiens
  misc_feature: Table A; Target 64409; HLA-A*30:01; PKHD1; ENSG00000170927; TAA
TEAEWTASF

SEQ ID NO: 64410 - protein, 9 aa, Homo sapiens
  misc_feature: Table A; Target 64410; HLA-B*18:01; PKHD1; ENSG00000170927; TAA
TEAEWTASF

SEQ ID NO: 64411 - protein, 9 aa, Homo sapiens
  misc_feature: Table A; Target 64411; HLA-B*37:01; PKHD1; ENSG00000170927; TAA
TEAEWTASF

SEQ ID NO: 64412 - protein, 9 aa, Homo sapiens
  misc_feature: Table A; Target 64412; HLA-B*44:02; PKHD1; ENSG00000170927; TAA
TEAEWTASF

SEQ ID NO: 64413 - protein, 9 aa, Homo sapiens
  misc_feature: Table A; Target 64413; HLA-B*44:03; PKHD1; ENSG00000170927; TAA
TEAEWTASF

SEQ ID NO: 64414 - protein, 10 aa, Homo sapiens
  misc_feature: Table A; Target 64414; HLA-B*44:02; PKHD1; ENSG00000170927; TAA
TEAEWTASFF

SEQ ID NO: 64415 - protein, 10 aa, Homo sapiens
  misc_feature: Table A; Target 64415; HLA-B*44:03; PKHD1; ENSG00000170927; TAA
TEAEWTASFF

SEQ ID NO: 64416 - protein, 9 aa, Homo sapiens
  misc_feature: Table A; Target 64416; HLA-B*49:01; PKHD1; ENSG00000170927; TAA
TEAFCLHSV

SEQ ID NO: 64417 - protein, 9 aa, Homo sapiens
  misc_feature: Table A; Target 64417; HLA-B*44:02; PKHD1; ENSG00000170927; TAA
TEATPGYRW

SEQ ID NO: 64418 - protein, 9 aa, Homo sapiens
  misc_feature: Table A; Target 64418; HLA-B*44:03; PKHD1; ENSG00000170927; TAA
TEATPGYRW

SEQ ID NO: 64419 - protein, 9 aa, Homo sapiens
  misc_feature: Table A; Target 64419; HLA-C*16:04; PKHD1; ENSG00000170927; TAA
TEATPGYRW

SEQ ID NO: 64420 - protein, 9 aa, Homo sapiens
  misc_feature: Table A; Target 64420; HLA-A*30:01; PKHD1; ENSG00000170927; TAA
TEEGSGLVL

SEQ ID NO: 64421 - protein, 9 aa, Homo sapiens
  misc_feature: Table A; Target 64421; HLA-B*40:01; PKHD1; ENSG00000170927; TAA
TEEGSGLVL

SEQ ID NO: 64422 - protein, 10 aa, Homo sapiens
  misc_feature: Table A; Target 64422; HLA-B*49:01; PKHD1; ENSG00000170927; TAA
TEEGSGLVLV

SEQ ID NO: 64423 - protein, 8 aa, Homo sapiens
  misc_feature: Table A; Target 64423; HLA-B*18:01; PKHD1; ENSG00000170927; TAA
TELPLITA

SEQ ID NO: 64424 - protein, 8 aa, Homo sapiens
  misc_feature: Table A; Target 64424; HLA-B*49:01; PKHD1; ENSG00000170927; TAA
TELPLITA

SEQ ID NO: 64425 - protein, 9 aa, Homo sapiens
  misc_feature: Table A; Target 64425; HLA-B*18:01; PKHD1; ENSG00000170927; TAA
TELPLITAR

SEQ ID NO: 64426 - protein, 10 aa, Homo sapiens
  misc_feature: Table A; Target 64426; HLA-A*29:02; PKHD1; ENSG00000170927; TAA
TFDNFAPGNY

SEQ ID NO: 64427 - protein, 10 aa, Homo sapiens
  misc_feature: Table A; Target 64427; HLA-A*32:01; PKHD1; ENSG00000170927; TAA
TFDNFAPGNY

SEQ ID NO: 64428 - protein, 10 aa, Homo sapiens
  misc_feature: Table A; Target 64428; HLA-A*29:02; PKHD1; ENSG00000170927; TAA
TFSSFVKSCY

SEQ ID NO: 64429 - protein, 10 aa, Homo sapiens
  misc_feature: Table A; Target 64429; HLA-A*30:02; PKHD1; ENSG00000170927; TAA
TFSSFVKSCY

SEQ ID NO: 64430 - protein, 9 aa, Homo sapiens
  misc_feature: Table A; Target 64430; HLA-B*35:01; PKHD1; ENSG00000170927; TAA
TGFSGDSQF

SEQ ID NO: 64431 - protein, 10 aa, Homo sapiens
  misc_feature: Table A; Target 64431; HLA-A*68:01; PKHD1; ENSG00000170927; TAA
TGVNPAAATR

SEQ ID NO: 64432 - protein, 10 aa, Homo sapiens
  misc_feature: Table A; Target 64432; HLA-C*07:06; PKHD1; ENSG00000170927; TAA
TGVNPAAATR

SEQ ID NO: 64433 - protein, 9 aa, Homo sapiens
  misc_feature: Table A; Target 64433; HLA-B*38:01; PKHD1; ENSG00000170927; TAA
THSEILSVF

SEQ ID NO: 64434 - protein, 9 aa, Homo sapiens
  misc_feature: Table A; Target 64434; HLA-B*39:01; PKHD1; ENSG00000170927; TAA
THSEILSVF

SEQ ID NO: 64435 - protein, 9 aa, Homo sapiens
  misc_feature: Table A; Target 64435; HLA-B*18:01; PKHD1; ENSG00000170927; TAA
TIGLLAVVY

SEQ ID NO: 64436 - protein, 9 aa, Homo sapiens
  misc_feature: Table A; Target 64436; HLA-C*07:04; PKHD1; ENSG00000170927; TAA
TIGLLAVVY

SEQ ID NO: 64437 - protein, 10 aa, Homo sapiens
  misc_feature: Table A; Target 64437; HLA-A*68:01; PKHD1; ENSG00000170927; TAA
TIQGNLTNER

SEQ ID NO: 64438 - protein, 9 aa, Homo sapiens
  misc_feature: Table A; Target 64438; HLA-A*33:03; PKHD1; ENSG00000170927; TAA
TLKAIADSR

SEQ ID NO: 64439 - protein, 9 aa, Homo sapiens
  misc_feature: Table A; Target 64439; HLA-A*02:01; PKHD1; ENSG00000170927; TAA
TLVDNTIGL

SEQ ID NO: 64440 - protein, 9 aa, Homo sapiens
  misc_feature: Table A; Target 64440; HLA-A*02:03; PKHD1; ENSG00000170927; TAA
TLVDNTIGL

SEQ ID NO: 64441 - protein, 9 aa, Homo sapiens
  misc_feature: Table A; Target 64441; HLA-A*02:04; PKHD1; ENSG00000170927; TAA
TLVDNTIGL

SEQ ID NO: 64442 - protein, 8 aa, Homo sapiens
  misc_feature: Table A; Target 64442; HLA-B*37:01; PKHD1; ENSG00000170927; TAA
TNNLVVLM

SEQ ID NO: 64443 - protein, 10 aa, Homo sapiens
  misc_feature: Table A; Target 64443; HLA-B*35:03; PKHD1; ENSG00000170927; TAA
TPEVSYDLTM

SEQ ID NO: 64444 - protein, 8 aa, Homo sapiens
  misc_feature: Table A; Target 64444; HLA-B*56:01; PKHD1; ENSG00000170927; TAA
TPFFPYGV

SEQ ID NO: 64445 - protein, 8 aa, Homo sapiens
  misc_feature: Table A; Target 64445; HLA-B*08:01; PKHD1; ENSG00000170927; TAA
TPIVHQVY

SEQ ID NO: 64446 - protein, 8 aa, Homo sapiens
  misc_feature: Table A; Target 64446; HLA-B*35:01; PKHD1; ENSG00000170927; TAA
TPIVHQVY

SEQ ID NO: 64447 - protein, 8 aa, Homo sapiens
  misc_feature: Table A; Target 64447; HLA-B*56:01; PKHD1; ENSG00000170927; TAA
TPNQPITV

SEQ ID NO: 64448 - protein, 9 aa, Homo sapiens
  misc_feature: Table A; Target 64448; HLA-B*07:02; PKHD1; ENSG00000170927; TAA
TPQPGNRGL

SEQ ID NO: 64449 - protein, 9 aa, Homo sapiens
  misc_feature: Table A; Target 64449; HLA-C*07:02; PKHD1; ENSG00000170927; TAA
TPQPGNRGL

SEQ ID NO: 64450 - protein, 10 aa, Homo sapiens
  misc_feature: Table A; Target 64450; HLA-B*07:02; PKHD1; ENSG00000170927; TAA
TPQPGNRGLL

SEQ ID NO: 64451 - protein, 9 aa, Homo sapiens
  misc_feature: Table A; Target 64451; HLA-A*30:02; PKHD1; ENSG00000170927; TAA
TQAETQDGY

SEQ ID NO: 64452 - protein, 9 aa, Homo sapiens
  misc_feature: Table A; Target 64452; HLA-B*15:01; PKHD1; ENSG00000170927; TAA
TQAETQDGY

SEQ ID NO: 64453 - protein, 9 aa, Homo sapiens
  misc_feature: Table A; Target 64453; HLA-B*15:03; PKHD1; ENSG00000170927; TAA
TQAETQDGY

SEQ ID NO: 64454 - protein, 8 aa, Homo sapiens
  misc_feature: Table A; Target 64454; HLA-C*05:01; PKHD1; ENSG00000170927; TAA
TQDGYVSF

SEQ ID NO: 64455 - protein, 9 aa, Homo sapiens
  misc_feature: Table A; Target 64455; HLA-A*01:01; PKHD1; ENSG00000170927; TAA
TQDGYVSFY

SEQ ID NO: 64456 - protein, 9 aa, Homo sapiens
  misc_feature: Table A; Target 64456; HLA-A*30:02; PKHD1; ENSG00000170927; TAA
TQDGYVSFY

SEQ ID NO: 64457 - protein, 9 aa, Homo sapiens
  misc_feature: Table A; Target 64457; HLA-B*38:01; PKHD1; ENSG00000170927; TAA
TQDGYVSFY

SEQ ID NO: 64458 - protein, 9 aa, Homo sapiens
  misc_feature: Table A; Target 64458; HLA-B*39:01; PKHD1; ENSG00000170927; TAA
TQDGYVSFY

SEQ ID NO: 64459 - protein, 9 aa, Homo sapiens
  misc_feature: Table A; Target 64459; HLA-C*05:01; PKHD1; ENSG00000170927; TAA
TQDGYVSFY

SEQ ID NO: 64460 - protein, 9 aa, Homo sapiens
  misc_feature: Table A; Target 64460; HLA-C*07:04; PKHD1; ENSG00000170927; TAA
TQDGYVSFY

SEQ ID NO: 64461 - protein, 11 aa, Homo sapiens
  misc_feature: Table A; Target 64461; HLA-B*38:01; PKHD1; ENSG00000170927; TAA
TQDGYVSFYNL

SEQ ID NO: 64462 - protein, 11 aa, Homo sapiens
  misc_feature: Table A; Target 64462; HLA-B*39:01; PKHD1; ENSG00000170927; TAA
TQDGYVSFYNL

SEQ ID NO: 64463 - protein, 9 aa, Homo sapiens
  misc_feature: Table A; Target 64463; HLA-B*15:01; PKHD1; ENSG00000170927; TAA
TQGNFSLQF

SEQ ID NO: 64464 - protein, 9 aa, Homo sapiens
  misc_feature: Table A; Target 64464; HLA-B*15:03; PKHD1; ENSG00000170927; TAA
TQGNFSLQF

SEQ ID NO: 64465 - protein, 9 aa, Homo sapiens
  misc_feature: Table A; Target 64465; HLA-B*38:01; PKHD1; ENSG00000170927; TAA
TQGNFSLQF

SEQ ID NO: 64466 - protein, 9 aa, Homo sapiens
  misc_feature: Table A; Target 64466; HLA-C*07:04; PKHD1; ENSG00000170927; TAA
TQGNFSLQF

SEQ ID NO: 64467 - protein, 9 aa, Homo sapiens
  misc_feature: Table A; Target 64467; HLA-A*23:01; PKHD1; ENSG00000170927; TAA
TQIGDLPNF

SEQ ID NO: 64468 - protein, 9 aa, Homo sapiens
  misc_feature: Table A; Target 64468; HLA-A*26:01; PKHD1; ENSG00000170927; TAA
TQIGDLPNF

SEQ ID NO: 64469 - protein, 9 aa, Homo sapiens
  misc_feature: Table A; Target 64469; HLA-B*15:01; PKHD1; ENSG00000170927; TAA
TQIGDLPNF

SEQ ID NO: 64470 - protein, 9 aa, Homo sapiens
  misc_feature: Table A; Target 64470; HLA-B*15:03; PKHD1; ENSG00000170927; TAA
TQIGDLPNF

SEQ ID NO: 64471 - protein, 9 aa, Homo sapiens
  misc_feature: Table A; Target 64471; HLA-B*38:01; PKHD1; ENSG00000170927; TAA
TQIGDLPNF

SEQ ID NO: 64472 - protein, 9 aa, Homo sapiens
  misc_feature: Table A; Target 64472; HLA-B*39:01; PKHD1; ENSG00000170927; TAA
TQIGDLPNF

SEQ ID NO: 64473 - protein, 10 aa, Homo sapiens
  misc_feature: Table A; Target 64473; HLA-B*13:02; PKHD1; ENSG00000170927; TAA
TQIGDLPNFI

SEQ ID NO: 64474 - protein, 9 aa, Homo sapiens
  misc_feature: Table A; Target 64474; HLA-B*13:02; PKHD1; ENSG00000170927; TAA
TQSAWGLEV

SEQ ID NO: 64475 - protein, 10 aa, Homo sapiens
  misc_feature: Table A; Target 64475; HLA-B*38:01; PKHD1; ENSG00000170927; TAA
TQSFQGNVSL

SEQ ID NO: 64476 - protein, 10 aa, Homo sapiens
  misc_feature: Table A; Target 64476; HLA-B*39:01; PKHD1; ENSG00000170927; TAA
TQSFQGNVSL

SEQ ID NO: 64477 - protein, 9 aa, Homo sapiens
  misc_feature: Table A; Target 64477; HLA-A*30:02; PKHD1; ENSG00000170927; TAA
TQSKGVIGY

SEQ ID NO: 64478 - protein, 9 aa, Homo sapiens
  misc_feature: Table A; Target 64478; HLA-A*32:01; PKHD1; ENSG00000170927; TAA
TQSKGVIGY

SEQ ID NO: 64479 - protein, 9 aa, Homo sapiens
  misc_feature: Table A; Target 64479; HLA-B*15:01; PKHD1; ENSG00000170927; TAA
TQSKGVIGY

SEQ ID NO: 64480 - protein, 9 aa, Homo sapiens
  misc_feature: Table A; Target 64480; HLA-B*15:03; PKHD1; ENSG00000170927; TAA
TQSKGVIGY

SEQ ID NO: 64481 - protein, 9 aa, Homo sapiens
  misc_feature: Table A; Target 64481; HLA-B*39:01; PKHD1; ENSG00000170927; TAA
TQSKGVIGY

SEQ ID NO: 64482 - protein, 9 aa, Homo sapiens
  misc_feature: Table A; Target 64482; HLA-C*07:04; PKHD1; ENSG00000170927; TAA
TQSKGVIGY

SEQ ID NO: 64483 - protein, 9 aa, Homo sapiens
  misc_feature: Table A; Target 64483; HLA-C*16:04; PKHD1; ENSG00000170927; TAA
TQSKGVIGY

SEQ ID NO: 64484 - protein, 9 aa, Homo sapiens
  misc_feature: Table A; Target 64484; HLA-A*03:02; PKHD1; ENSG00000170927; TAA
TSAPESALK

SEQ ID NO: 64485 - protein, 9 aa, Homo sapiens
  misc_feature: Table A; Target 64485; HLA-A*11:01; PKHD1; ENSG00000170927; TAA
TSAPESALK

SEQ ID NO: 64486 - protein, 10 aa, Homo sapiens
  misc_feature: Table A; Target 64486; HLA-A*25:01; PKHD1; ENSG00000170927; TAA
TSAPESALKW

SEQ ID NO: 64487 - protein, 10 aa, Homo sapiens
  misc_feature: Table A; Target 64487; HLA-B*57:01; PKHD1; ENSG00000170927; TAA
TSAPESALKW

SEQ ID NO: 64488 - protein, 10 aa, Homo sapiens
  misc_feature: Table A; Target 64488; HLA-B*58:01; PKHD1; ENSG00000170927; TAA
TSAPESALKW

SEQ ID NO: 64489 - protein, 10 aa, Homo sapiens
  misc_feature: Table A; Target 64489; HLA-C*07:06; PKHD1; ENSG00000170927; TAA
TSAPESALKW

SEQ ID NO: 64490 - protein, 9 aa, Homo sapiens
  misc_feature: Table A; Target 64490; HLA-A*01:01; PKHD1; ENSG00000170927; TAA
TSGSVSTFY

SEQ ID NO: 64491 - protein, 9 aa, Homo sapiens
  misc_feature: Table A; Target 64491; HLA-A*29:02; PKHD1; ENSG00000170927; TAA
TSGSVSTFY

SEQ ID NO: 64492 - protein, 9 aa, Homo sapiens
  misc_feature: Table A; Target 64492; HLA-A*30:02; PKHD1; ENSG00000170927; TAA
TSGSVSTFY

SEQ ID NO: 64493 - protein, 10 aa, Homo sapiens
  misc_feature: Table A; Target 64493; HLA-A*68:01; PKHD1; ENSG00000170927; TAA
TSGTEPFCGR

SEQ ID NO: 64494 - protein, 8 aa, Homo sapiens
  misc_feature: Table A; Target 64494; HLA-C*01:02; PKHD1; ENSG00000170927; TAA
TSPPGVNF

SEQ ID NO: 64495 - protein, 9 aa, Homo sapiens
  misc_feature: Table A; Target 64495; HLA-B*46:01; PKHD1; ENSG00000170927; TAA
TSQAPLLSF

SEQ ID NO: 64496 - protein, 9 aa, Homo sapiens
  misc_feature: Table A; Target 64496; HLA-B*58:01; PKHD1; ENSG00000170927; TAA
TSQAPLLSF

SEQ ID NO: 64497 - protein, 9 aa, Homo sapiens
  misc_feature: Table A; Target 64497; HLA-C*03:04; PKHD1; ENSG00000170927; TAA
TSQAPLLSF

SEQ ID NO: 64498 - protein, 9 aa, Homo sapiens
  misc_feature: Table A; Target 64498; HLA-A*02:03; PKHD1; ENSG00000170927; TAA
TSRVIITAV

SEQ ID NO: 64499 - protein, 11 aa, Homo sapiens
  misc_feature: Table A; Target 64499; HLA-A*33:01; PKHD1; ENSG00000170927; TAA
TSTDRAPSNPR

SEQ ID NO: 64500 - protein, 9 aa, Homo sapiens
  misc_feature: Table A; Target 64500; HLA-A*25:01; PKHD1; ENSG00000170927; TAA
TTADEPMVF

SEQ ID NO: 64501 - protein, 9 aa, Homo sapiens
  misc_feature: Table A; Target 64501; HLA-A*26:01; PKHD1; ENSG00000170927; TAA
TTADEPMVF

SEQ ID NO: 64502 - protein, 9 aa, Homo sapiens
  misc_feature: Table A; Target 64502; HLA-A*32:01; PKHD1; ENSG00000170927; TAA
TTADEPMVF

SEQ ID NO: 64503 - protein, 9 aa, Homo sapiens
  misc_feature: Table A; Target 64503; HLA-B*35:01; PKHD1; ENSG00000170927; TAA
TTADEPMVF

SEQ ID NO: 64504 - protein, 9 aa, Homo sapiens
  misc_feature: Table A; Target 64504; HLA-B*57:01; PKHD1; ENSG00000170927; TAA
TTADEPMVF

SEQ ID NO: 64505 - protein, 9 aa, Homo sapiens
  misc_feature: Table A; Target 64505; HLA-B*58:01; PKHD1; ENSG00000170927; TAA
TTADEPMVF

SEQ ID NO: 64506 - protein, 9 aa, Homo sapiens
  misc_feature: Table A; Target 64506; HLA-C*02:02; PKHD1; ENSG00000170927; TAA
TTADEPMVF

SEQ ID NO: 64507 - protein, 9 aa, Homo sapiens
  misc_feature: Table A; Target 64507; HLA-C*03:04; PKHD1; ENSG00000170927; TAA
TTADEPMVF

SEQ ID NO: 64508 - protein, 9 aa, Homo sapiens
  misc_feature: Table A; Target 64508; HLA-C*05:01; PKHD1; ENSG00000170927; TAA
TTADEPMVF

SEQ ID NO: 64509 - protein, 9 aa, Homo sapiens
  misc_feature: Table A; Target 64509; HLA-C*07:04; PKHD1; ENSG00000170927; TAA
TTADEPMVF

SEQ ID NO: 64510 - protein, 9 aa, Homo sapiens
  misc_feature: Table A; Target 64510; HLA-C*07:06; PKHD1; ENSG00000170927; TAA
TTADEPMVF

SEQ ID NO: 64511 - protein, 9 aa, Homo sapiens
  misc_feature: Table A; Target 64511; HLA-C*12:03; PKHD1; ENSG00000170927; TAA
TTADEPMVF

SEQ ID NO: 64512 - protein, 10 aa, Homo sapiens
  misc_feature: Table A; Target 64512; HLA-A*68:02; PKHD1; ENSG00000170927; TAA
TTADEPMVFV

SEQ ID NO: 64513 - protein, 10 aa, Homo sapiens
  misc_feature: Table A; Target 64513; HLA-A*11:01; PKHD1; ENSG00000170927; TAA
TTIEELLAVK

SEQ ID NO: 64514 - protein, 10 aa, Homo sapiens
  misc_feature: Table A; Target 64514; HLA-A*68:01; PKHD1; ENSG00000170927; TAA
TTIEELLAVK

SEQ ID NO: 64515 - protein, 10 aa, Homo sapiens
  misc_feature: Table A; Target 64515; HLA-A*68:02; PKHD1; ENSG00000170927; TAA
TTVNYVRDTL

SEQ ID NO: 64516 - protein, 9 aa, Homo sapiens
  misc_feature: Table A; Target 64516; HLA-B*35:03; PKHD1; ENSG00000170927; TAA
TVAMATEQL

SEQ ID NO: 64517 - protein, 11 aa, Homo sapiens
  misc_feature: Table A; Target 64517; HLA-A*01:01; PKHD1; ENSG00000170927; TAA
TVETVQDTDLY

SEQ ID NO: 64518 - protein, 9 aa, Homo sapiens
  misc_feature: Table A; Target 64518; HLA-B*35:03; PKHD1; ENSG00000170927; TAA
TVIFDGLEL

SEQ ID NO: 64519 - protein, 10 aa, Homo sapiens
  misc_feature: Table A; Target 64519; HLA-A*25:01; PKHD1; ENSG00000170927; TAA
TVKEDLYTCY

SEQ ID NO: 64520 - protein, 10 aa, Homo sapiens
  misc_feature: Table A; Target 64520; HLA-A*26:01; PKHD1; ENSG00000170927; TAA
TVKEDLYTCY

SEQ ID NO: 64521 - protein, 10 aa, Homo sapiens
  misc_feature: Table A; Target 64521; HLA-A*29:02; PKHD1; ENSG00000170927; TAA
TVKEDLYTCY

SEQ ID NO: 64522 - protein, 10 aa, Homo sapiens
  misc_feature: Table A; Target 64522; HLA-A*30:02; PKHD1; ENSG00000170927; TAA
TVKEDLYTCY

SEQ ID NO: 64523 - protein, 9 aa, Homo sapiens
  misc_feature: Table A; Target 64523; HLA-A*03:01; PKHD1; ENSG00000170927; TAA
TVMVSVLEK

SEQ ID NO: 64524 - protein, 9 aa, Homo sapiens
  misc_feature: Table A; Target 64524; HLA-A*03:02; PKHD1; ENSG00000170927; TAA
TVMVSVLEK

SEQ ID NO: 64525 - protein, 9 aa, Homo sapiens
  misc_feature: Table A; Target 64525; HLA-A*11:01; PKHD1; ENSG00000170927; TAA
TVMVSVLEK

SEQ ID NO: 64526 - protein, 9 aa, Homo sapiens
  misc_feature: Table A; Target 64526; HLA-C*07:06; PKHD1; ENSG00000170927; TAA
TVMVSVLEK

SEQ ID NO: 64527 - protein, 8 aa, Homo sapiens
  misc_feature: Table A; Target 64527; HLA-C*01:02; PKHD1; ENSG00000170927; TAA
TVNIGAEL

SEQ ID NO: 64528 - protein, 9 aa, Homo sapiens
  misc_feature: Table A; Target 64528; HLA-A*32:01; PKHD1; ENSG00000170927; TAA
TVNYVRDTL

SEQ ID NO: 64529 - protein, 9 aa, Homo sapiens
  misc_feature: Table A; Target 64529; HLA-B*07:02; PKHD1; ENSG00000170927; TAA
TVNYVRDTL

SEQ ID NO: 64530 - protein, 9 aa, Homo sapiens
  misc_feature: Table A; Target 64530; HLA-A*25:01; PKHD1; ENSG00000170927; TAA
TVPAAVEVW

SEQ ID NO: 64531 - protein, 9 aa, Homo sapiens
  misc_feature: Table A; Target 64531; HLA-B*35:03; PKHD1; ENSG00000170927; TAA
TVQDTDLYL

SEQ ID NO: 64532 - protein, 10 aa, Homo sapiens
  misc_feature: Table A; Target 64532; HLA-A*03:02; PKHD1; ENSG00000170927; TAA
TVQDTDLYLK

SEQ ID NO: 64533 - protein, 10 aa, Homo sapiens
  misc_feature: Table A; Target 64533; HLA-A*11:01; PKHD1; ENSG00000170927; TAA
TVQDTDLYLK

SEQ ID NO: 64534 - protein, 10 aa, Homo sapiens
  misc_feature: Table A; Target 64534; HLA-B*27:02; PKHD1; ENSG00000170927; TAA
TVQDTDLYLK

SEQ ID NO: 64535 - protein, 10 aa, Homo sapiens
  misc_feature: Table A; Target 64535; HLA-A*31:01; PKHD1; ENSG00000170927; TAA
TVRGLLLNSR

SEQ ID NO: 64536 - protein, 11 aa, Homo sapiens
  misc_feature: Table A; Target 64536; HLA-B*07:02; PKHD1; ENSG00000170927; TAA
TVRSTGMISSL

SEQ ID NO: 64537 - protein, 11 aa, Homo sapiens
  misc_feature: Table A; Target 64537; HLA-A*68:01; PKHD1; ENSG00000170927; TAA
TVSQADSGTAR

SEQ ID NO: 64538 - protein, 11 aa, Homo sapiens
  misc_feature: Table A; Target 64538; HLA-C*07:06; PKHD1; ENSG00000170927; TAA
TVSQADSGTAR

SEQ ID NO: 64539 - protein, 9 aa, Homo sapiens
  misc_feature: Table A; Target 64539; HLA-B*35:03; PKHD1; ENSG00000170927; TAA
TVVGEDMRM

SEQ ID NO: 64540 - protein, 11 aa, Homo sapiens
  misc_feature: Table A; Target 64540; HLA-A*23:01; PKHD1; ENSG00000170927; TAA
TWLNPDVVTTY

SEQ ID NO: 64541 - protein, 11 aa, Homo sapiens
  misc_feature: Table A; Target 64541; HLA-A*29:02; PKHD1; ENSG00000170927; TAA
TWLNPDVVTTY

SEQ ID NO: 64542 - protein, 11 aa, Homo sapiens
  misc_feature: Table A; Target 64542; HLA-A*30:02; PKHD1; ENSG00000170927; TAA
TWLNPDVVTTY

SEQ ID NO: 64543 - protein, 9 aa, Homo sapiens
  misc_feature: Table A; Target 64543; HLA-A*24:02; PKHD1; ENSG00000170927; TAA
TYLREKHQI

SEQ ID NO: 64544 - protein, 9 aa, Homo sapiens
  misc_feature: Table A; Target 64544; HLA-C*14:02; PKHD1; ENSG00000170927; TAA
TYLVSGEGQ

SEQ ID NO: 64545 - protein, 9 aa, Homo sapiens
  misc_feature: Table A; Target 64545; HLA-A*24:02; PKHD1; ENSG00000170927; TAA
TYQFLMQGF

SEQ ID NO: 64546 - protein, 9 aa, Homo sapiens
  misc_feature: Table A; Target 64546; HLA-A*23:01; PKHD1; ENSG00000170927; TAA
TYVQCDLTV

SEQ ID NO: 64547 - protein, 9 aa, Homo sapiens
  misc_feature: Table A; Target 64547; HLA-C*14:02; PKHD1; ENSG00000170927; TAA
TYVSSLNPV

SEQ ID NO: 64548 - protein, 10 aa, Homo sapiens
  misc_feature: Table A; Target 64548; HLA-A*23:01; PKHD1; ENSG00000170927; TAA
TYVSSLNPVI

SEQ ID NO: 64549 - protein, 8 aa, Homo sapiens
  misc_feature: Table A; Target 64549; HLA-B*54:01; PKHD1; ENSG00000170927; TAA
VAFPFPHA

SEQ ID NO: 64550 - protein, 9 aa, Homo sapiens
  misc_feature: Table A; Target 64550; HLA-A*32:01; PKHD1; ENSG00000170927; TAA
VAFPFPHAA

SEQ ID NO: 64551 - protein, 9 aa, Homo sapiens
  misc_feature: Table A; Target 64551; HLA-B*54:01; PKHD1; ENSG00000170927; TAA
VAFPFPHAA

SEQ ID NO: 64552 - protein, 9 aa, Homo sapiens
  misc_feature: Table A; Target 64552; HLA-B*56:01; PKHD1; ENSG00000170927; TAA
VAFPFPHAA

SEQ ID NO: 64553 - protein, 9 aa, Homo sapiens
  misc_feature: Table A; Target 64553; HLA-C*02:02; PKHD1; ENSG00000170927; TAA
VAFPFPHAA

SEQ ID NO: 64554 - protein, 9 aa, Homo sapiens
  misc_feature: Table A; Target 64554; HLA-C*12:03; PKHD1; ENSG00000170927; TAA
VAFPFPHAA

SEQ ID NO: 64555 - protein, 8 aa, Homo sapiens
  misc_feature: Table A; Target 64555; HLA-B*08:01; PKHD1; ENSG00000170927; TAA
VAGEHHIL

SEQ ID NO: 64556 - protein, 8 aa, Homo sapiens
  misc_feature: Table A; Target 64556; HLA-C*03:03; PKHD1; ENSG00000170927; TAA
VAGEHHIL

SEQ ID NO: 64557 - protein, 8 aa, Homo sapiens
  misc_feature: Table A; Target 64557; HLA-C*16:01; PKHD1; ENSG00000170927; TAA
VAGEHHIL

SEQ ID NO: 64558 - protein, 9 aa, Homo sapiens
  misc_feature: Table A; Target 64558; HLA-A*11:01; PKHD1; ENSG00000170927; TAA
VAGEHHILK

SEQ ID NO: 64559 - protein, 9 aa, Homo sapiens
  misc_feature: Table A; Target 64559; HLA-B*46:01; PKHD1; ENSG00000170927; TAA
VAHSSLHGL

SEQ ID NO: 64560 - protein, 9 aa, Homo sapiens
  misc_feature: Table A; Target 64560; HLA-C*03:04; PKHD1; ENSG00000170927; TAA
VAHSSLHGL

SEQ ID NO: 64561 - protein, 9 aa, Homo sapiens
  misc_feature: Table A; Target 64561; HLA-C*16:02; PKHD1; ENSG00000170927; TAA
VAHSSLHGL

SEQ ID NO: 64562 - protein, 8 aa, Homo sapiens
  misc_feature: Table A; Target 64562; HLA-B*51:01; PKHD1; ENSG00000170927; TAA
VALLSRSI

SEQ ID NO: 64563 - protein, 9 aa, Homo sapiens
  misc_feature: Table A; Target 64563; HLA-B*35:03; PKHD1; ENSG00000170927; TAA
VAMATEQLL

SEQ ID NO: 64564 - protein, 9 aa, Homo sapiens
  misc_feature: Table A; Target 64564; HLA-C*03:03; PKHD1; ENSG00000170927; TAA
VAMATEQLL

SEQ ID NO: 64565 - protein, 9 aa, Homo sapiens
  misc_feature: Table A; Target 64565; HLA-C*03:04; PKHD1; ENSG00000170927; TAA
VAMATEQLL

SEQ ID NO: 64566 - protein, 9 aa, Homo sapiens
  misc_feature: Table A; Target 64566; HLA-C*05:01; PKHD1; ENSG00000170927; TAA
VAMATEQLL

SEQ ID NO: 64567 - protein, 8 aa, Homo sapiens
  misc_feature: Table A; Target 64567; HLA-C*01:02; PKHD1; ENSG00000170927; TAA
VAPETNNY

SEQ ID NO: 64568 - protein, 10 aa, Homo sapiens
  misc_feature: Table A; Target 64568; HLA-A*23:01; PKHD1; ENSG00000170927; TAA
VAPETNNYTF

SEQ ID NO: 64569 - protein, 9 aa, Homo sapiens
  misc_feature: Table A; Target 64569; HLA-B*51:01; PKHD1; ENSG00000170927; TAA
VATSNSSRI

SEQ ID NO: 64570 - protein, 9 aa, Homo sapiens
  misc_feature: Table A; Target 64570; HLA-C*16:02; PKHD1; ENSG00000170927; TAA
VATSNSSRI

SEQ ID NO: 64571 - protein, 8 aa, Homo sapiens
  misc_feature: Table A; Target 64571; HLA-B*18:01; PKHD1; ENSG00000170927; TAA
VEFSNVSA

SEQ ID NO: 64572 - protein, 9 aa, Homo sapiens
  misc_feature: Table A; Target 64572; HLA-B*49:01; PKHD1; ENSG00000170927; TAA
VEFSNVSAG

SEQ ID NO: 64573 - protein, 11 aa, Homo sapiens
  misc_feature: Table A; Target 64573; HLA-B*44:02; PKHD1; ENSG00000170927; TAA
VEFSNVSAGSW

SEQ ID NO: 64574 - protein, 11 aa, Homo sapiens
  misc_feature: Table A; Target 64574; HLA-B*44:03; PKHD1; ENSG00000170927; TAA
VEFSNVSAGSW

SEQ ID NO: 64575 - protein, 11 aa, Homo sapiens
  misc_feature: Table A; Target 64575; HLA-C*16:04; PKHD1; ENSG00000170927; TAA
VEFSNVSAGSW

SEQ ID NO: 64576 - protein, 11 aa, Homo sapiens
  misc_feature: Table A; Target 64576; HLA-B*49:01; PKHD1; ENSG00000170927; TAA
VEGDYIGSQNV

SEQ ID NO: 64577 - protein, 8 aa, Homo sapiens
  misc_feature: Table A; Target 64577; HLA-A*30:01; PKHD1; ENSG00000170927; TAA
VEIENITL

SEQ ID NO: 64578 - protein, 8 aa, Homo sapiens
  misc_feature: Table A; Target 64578; HLA-B*18:01; PKHD1; ENSG00000170927; TAA
VEIENITL

SEQ ID NO: 64579 - protein, 8 aa, Homo sapiens
  misc_feature: Table A; Target 64579; HLA-B*40:01; PKHD1; ENSG00000170927; TAA
VEIENITL

SEQ ID NO: 64580 - protein, 8 aa, Homo sapiens
  misc_feature: Table A; Target 64580; HLA-B*49:01; PKHD1; ENSG00000170927; TAA
VEIENITL

SEQ ID NO: 64581 - protein, 9 aa, Homo sapiens
  misc_feature: Table A; Target 64581; HLA-A*30:01; PKHD1; ENSG00000170927; TAA
VEIENITLV

SEQ ID NO: 64582 - protein, 9 aa, Homo sapiens
  misc_feature: Table A; Target 64582; HLA-B*40:01; PKHD1; ENSG00000170927; TAA
VEIENITLV

SEQ ID NO: 64583 - protein, 9 aa, Homo sapiens
  misc_feature: Table A; Target 64583; HLA-B*49:01; PKHD1; ENSG00000170927; TAA
VEIENITLV

SEQ ID NO: 64584 - protein, 9 aa, Homo sapiens
  misc_feature: Table A; Target 64584; HLA-B*49:01; PKHD1; ENSG00000170927; TAA
VEIQNFGSP

SEQ ID NO: 64585 - protein, 10 aa, Homo sapiens
  misc_feature: Table A; Target 64585; HLA-B*40:01; PKHD1; ENSG00000170927; TAA
VEIQNFGSPL

SEQ ID NO: 64586 - protein, 10 aa, Homo sapiens
  misc_feature: Table A; Target 64586; HLA-B*49:01; PKHD1; ENSG00000170927; TAA
VEIQNFGSPL

SEQ ID NO: 64587 - protein, 11 aa, Homo sapiens
  misc_feature: Table A; Target 64587; HLA-B*44:02; PKHD1; ENSG00000170927; TAA
VEIQNFGSPLY

SEQ ID NO: 64588 - protein, 11 aa, Homo sapiens
  misc_feature: Table A; Target 64588; HLA-B*44:03; PKHD1; ENSG00000170927; TAA
VEIQNFGSPLY

SEQ ID NO: 64589 - protein, 10 aa, Homo sapiens
  misc_feature: Table A; Target 64589; HLA-B*49:01; PKHD1; ENSG00000170927; TAA
VENSVEIENI

SEQ ID NO: 64590 - protein, 11 aa, Homo sapiens
  misc_feature: Table A; Target 64590; HLA-B*44:02; PKHD1; ENSG00000170927; TAA
VESLGPPSEPW

SEQ ID NO: 64591 - protein, 8 aa, Homo sapiens
  misc_feature: Table A; Target 64591; HLA-B*49:01; PKHD1; ENSG00000170927; TAA
VETISKVI

SEQ ID NO: 64592 - protein, 9 aa, Homo sapiens
  misc_feature: Table A; Target 64592; HLA-B*49:01; PKHD1; ENSG00000170927; TAA
VETISKVIV

SEQ ID NO: 64593 - protein, 10 aa, Homo sapiens
  misc_feature: Table A; Target 64593; HLA-B*49:01; PKHD1; ENSG00000170927; TAA
VETQSFQGNV

SEQ ID NO: 64594 - protein, 9 aa, Homo sapiens
  misc_feature: Table A; Target 64594; HLA-B*40:01; PKHD1; ENSG00000170927; TAA
VETVQDTDL

SEQ ID NO: 64595 - protein, 9 aa, Homo sapiens
  misc_feature: Table A; Target 64595; HLA-A*30:01; PKHD1; ENSG00000170927; TAA
VEVHVQDAL

SEQ ID NO: 64596 - protein, 9 aa, Homo sapiens
  misc_feature: Table A; Target 64596; HLA-B*18:01; PKHD1; ENSG00000170927; TAA
VEVHVQDAL

SEQ ID NO: 64597 - protein, 9 aa, Homo sapiens
  misc_feature: Table A; Target 64597; HLA-B*40:01; PKHD1; ENSG00000170927; TAA
VEVHVQDAL

SEQ ID NO: 64598 - protein, 9 aa, Homo sapiens
  misc_feature: Table A; Target 64598; HLA-B*44:03; PKHD1; ENSG00000170927; TAA
VEVWAGNRF

SEQ ID NO: 64599 - protein, 8 aa, Homo sapiens
  misc_feature: Table A; Target 64599; HLA-C*14:02; PKHD1; ENSG00000170927; TAA
VFNKGKSM

SEQ ID NO: 64600 - protein, 8 aa, Homo sapiens
  misc_feature: Table A; Target 64600; HLA-C*01:02; PKHD1; ENSG00000170927; TAA
VFPETGSL

SEQ ID NO: 64601 - protein, 8 aa, Homo sapiens
  misc_feature: Table A; Target 64601; HLA-C*14:02; PKHD1; ENSG00000170927; TAA
VFPETGSL

SEQ ID NO: 64602 - protein, 9 aa, Homo sapiens
  misc_feature: Table A; Target 64602; HLA-C*14:02; PKHD1; ENSG00000170927; TAA
VFSAPQNSV

SEQ ID NO: 64603 - protein, 9 aa, Homo sapiens
  misc_feature: Table A; Target 64603; HLA-A*23:01; PKHD1; ENSG00000170927; TAA
VFSSVNANI

SEQ ID NO: 64604 - protein, 9 aa, Homo sapiens
  misc_feature: Table A; Target 64604; HLA-A*23:01; PKHD1; ENSG00000170927; TAA
VFTSEPNQW

SEQ ID NO: 64605 - protein, 9 aa, Homo sapiens
  misc_feature: Table A; Target 64605; HLA-A*24:02; PKHD1; ENSG00000170927; TAA
VFTSEPNQW

SEQ ID NO: 64606 - protein, 8 aa, Homo sapiens
  misc_feature: Table A; Target 64606; HLA-C*16:01; PKHD1; ENSG00000170927; TAA
VGAMRESF

SEQ ID NO: 64607 - protein, 8 aa, Homo sapiens
  misc_feature: Table A; Target 64607; HLA-C*05:01; PKHD1; ENSG00000170927; TAA
VGDAVEGL

SEQ ID NO: 64608 - protein, 10 aa, Homo sapiens
  misc_feature: Table A; Target 64608; HLA-C*05:01; PKHD1; ENSG00000170927; TAA
VGDAVEGLEL

SEQ ID NO: 64609 - protein, 9 aa, Homo sapiens
  misc_feature: Table A; Target 64609; HLA-B*13:02; PKHD1; ENSG00000170927; TAA
VGSPPVYSV

SEQ ID NO: 64610 - protein, 9 aa, Homo sapiens
  misc_feature: Table A; Target 64610; HLA-B*37:01; PKHD1; ENSG00000170927; TAA
VGSPPVYSV

SEQ ID NO: 64611 - protein, 9 aa, Homo sapiens
  misc_feature: Table A; Target 64611; HLA-C*02:02; PKHD1; ENSG00000170927; TAA
VGSPPVYSV

SEQ ID NO: 64612 - protein, 10 aa, Homo sapiens
  misc_feature: Table A; Target 64612; HLA-B*38:01; PKHD1; ENSG00000170927; TAA
VHPETIQEQL

SEQ ID NO: 64613 - protein, 10 aa, Homo sapiens
  misc_feature: Table A; Target 64613; HLA-B*39:01; PKHD1; ENSG00000170927; TAA
VHPETIQEQL

SEQ ID NO: 64614 - protein, 9 aa, Homo sapiens
  misc_feature: Table A; Target 64614; HLA-B*13:02; PKHD1; ENSG00000170927; TAA
VIAGGELKV

SEQ ID NO: 64615 - protein, 8 aa, Homo sapiens
  misc_feature: Table A; Target 64615; HLA-C*03:04; PKHD1; ENSG00000170927; TAA
VIFDGLEL

SEQ ID NO: 64616 - protein, 9 aa, Homo sapiens
  misc_feature: Table A; Target 64616; HLA-A*02:03; PKHD1; ENSG00000170927; TAA
VIFSNQTNV

SEQ ID NO: 64617 - protein, 9 aa, Homo sapiens
  misc_feature: Table A; Target 64617; HLA-B*13:02; PKHD1; ENSG00000170927; TAA
VIFSNQTNV

SEQ ID NO: 64618 - protein, 9 aa, Homo sapiens
  misc_feature: Table A; Target 64618; HLA-A*03:01; PKHD1; ENSG00000170927; TAA
VIISGTGVK

SEQ ID NO: 64619 - protein, 9 aa, Homo sapiens
  misc_feature: Table A; Target 64619; HLA-A*03:02; PKHD1; ENSG00000170927; TAA
VIISGTGVK

SEQ ID NO: 64620 - protein, 9 aa, Homo sapiens
  misc_feature: Table A; Target 64620; HLA-B*46:01; PKHD1; ENSG00000170927; TAA
VIITAVTEN

SEQ ID NO: 64621 - protein, 10 aa, Homo sapiens
  misc_feature: Table A; Target 64621; HLA-A*23:01; PKHD1; ENSG00000170927; TAA
VIITAVTENF

SEQ ID NO: 64622 - protein, 10 aa, Homo sapiens
  misc_feature: Table A; Target 64622; HLA-A*24:02; PKHD1; ENSG00000170927; TAA
VIITAVTENF

SEQ ID NO: 64623 - protein, 9 aa, Homo sapiens
  misc_feature: Table A; Target 64623; HLA-A*02:01; PKHD1; ENSG00000170927; TAA
VISDVPVQI

SEQ ID NO: 64624 - protein, 9 aa, Homo sapiens
  misc_feature: Table A; Target 64624; HLA-A*02:03; PKHD1; ENSG00000170927; TAA
VISDVPVQI

SEQ ID NO: 64625 - protein, 9 aa, Homo sapiens
  misc_feature: Table A; Target 64625; HLA-A*02:07; PKHD1; ENSG00000170927; TAA
VISDVPVQI

SEQ ID NO: 64626 - protein, 9 aa, Homo sapiens
  misc_feature: Table A; Target 64626; HLA-A*23:01; PKHD1; ENSG00000170927; TAA
VISDVPVQI

SEQ ID NO: 64627 - protein, 9 aa, Homo sapiens
  misc_feature: Table A; Target 64627; HLA-A*30:01; PKHD1; ENSG00000170927; TAA
VISDVPVQI

SEQ ID NO: 64628 - protein, 9 aa, Homo sapiens
  misc_feature: Table A; Target 64628; HLA-A*32:01; PKHD1; ENSG00000170927; TAA
VISDVPVQI

SEQ ID NO: 64629 - protein, 9 aa, Homo sapiens
  misc_feature: Table A; Target 64629; HLA-A*68:02; PKHD1; ENSG00000170927; TAA
VISDVPVQI

SEQ ID NO: 64630 - protein, 9 aa, Homo sapiens
  misc_feature: Table A; Target 64630; HLA-B*13:02; PKHD1; ENSG00000170927; TAA
VISDVPVQI

SEQ ID NO: 64631 - protein, 9 aa, Homo sapiens
  misc_feature: Table A; Target 64631; HLA-B*38:01; PKHD1; ENSG00000170927; TAA
VISDVPVQI

SEQ ID NO: 64632 - protein, 9 aa, Homo sapiens
  misc_feature: Table A; Target 64632; HLA-C*02:02; PKHD1; ENSG00000170927; TAA
VISDVPVQI

SEQ ID NO: 64633 - protein, 9 aa, Homo sapiens
  misc_feature: Table A; Target 64633; HLA-C*07:04; PKHD1; ENSG00000170927; TAA
VISDVPVQI

SEQ ID NO: 64634 - protein, 9 aa, Homo sapiens
  misc_feature: Table A; Target 64634; HLA-B*13:02; PKHD1; ENSG00000170927; TAA
VITAQQTGV

SEQ ID NO: 64635 - protein, 9 aa, Homo sapiens
  misc_feature: Table A; Target 64635; HLA-A*23:01; PKHD1; ENSG00000170927; TAA
VIVATSSSF

SEQ ID NO: 64636 - protein, 9 aa, Homo sapiens
  misc_feature: Table A; Target 64636; HLA-A*25:01; PKHD1; ENSG00000170927; TAA
VIVATSSSF

SEQ ID NO: 64637 - protein, 9 aa, Homo sapiens
  misc_feature: Table A; Target 64637; HLA-A*26:01; PKHD1; ENSG00000170927; TAA
VIVATSSSF

SEQ ID NO: 64638 - protein, 9 aa, Homo sapiens
  misc_feature: Table A; Target 64638; HLA-A*32:01; PKHD1; ENSG00000170927; TAA
VIVATSSSF

SEQ ID NO: 64639 - protein, 9 aa, Homo sapiens
  misc_feature: Table A; Target 64639; HLA-B*15:01; PKHD1; ENSG00000170927; TAA
VIVATSSSF

SEQ ID NO: 64640 - protein, 9 aa, Homo sapiens
  misc_feature: Table A; Target 64640; HLA-B*15:03; PKHD1; ENSG00000170927; TAA
VIVATSSSF

SEQ ID NO: 64641 - protein, 9 aa, Homo sapiens
  misc_feature: Table A; Target 64641; HLA-B*46:01; PKHD1; ENSG00000170927; TAA
VIVATSSSF

SEQ ID NO: 64642 - protein, 9 aa, Homo sapiens
  misc_feature: Table A; Target 64642; HLA-B*58:01; PKHD1; ENSG00000170927; TAA
VIVATSSSF

SEQ ID NO: 64643 - protein, 9 aa, Homo sapiens
  misc_feature: Table A; Target 64643; HLA-C*01:02; PKHD1; ENSG00000170927; TAA
VIVATSSSF

SEQ ID NO: 64644 - protein, 9 aa, Homo sapiens
  misc_feature: Table A; Target 64644; HLA-C*02:02; PKHD1; ENSG00000170927; TAA
VIVATSSSF

SEQ ID NO: 64645 - protein, 9 aa, Homo sapiens
  misc_feature: Table A; Target 64645; HLA-C*03:04; PKHD1; ENSG00000170927; TAA
VIVATSSSF

SEQ ID NO: 64646 - protein, 9 aa, Homo sapiens
  misc_feature: Table A; Target 64646; HLA-C*14:02; PKHD1; ENSG00000170927; TAA
VIVATSSSF

SEQ ID NO: 64647 - protein, 9 aa, Homo sapiens
  misc_feature: Table A; Target 64647; HLA-B*15:03; PKHD1; ENSG00000170927; TAA
VKEDLYTCY

SEQ ID NO: 64648 - protein, 8 aa, Homo sapiens
  misc_feature: Table A; Target 64648; HLA-A*03:02; PKHD1; ENSG00000170927; TAA
VLGQAFHK

SEQ ID NO: 64649 - protein, 9 aa, Homo sapiens
  misc_feature: Table A; Target 64649; HLA-A*23:01; PKHD1; ENSG00000170927; TAA
VLLNDNIVF

SEQ ID NO: 64650 - protein, 9 aa, Homo sapiens
  misc_feature: Table A; Target 64650; HLA-A*02:07; PKHD1; ENSG00000170927; TAA
VLPRAFTYV

SEQ ID NO: 64651 - protein, 9 aa, Homo sapiens
  misc_feature: Table A; Target 64651; HLA-A*24:02; PKHD1; ENSG00000170927; TAA
VLPRAFTYV

SEQ ID NO: 64652 - protein, 9 aa, Homo sapiens
  misc_feature: Table A; Target 64652; HLA-A*02:04; PKHD1; ENSG00000170927; TAA
VLQCVVPSL

SEQ ID NO: 64653 - protein, 9 aa, Homo sapiens
  misc_feature: Table A; Target 64653; HLA-A*02:01; PKHD1; ENSG00000170927; TAA
VLSEAHEGL

SEQ ID NO: 64654 - protein, 9 aa, Homo sapiens
  misc_feature: Table A; Target 64654; HLA-A*02:04; PKHD1; ENSG00000170927; TAA
VLSEAHEGL

SEQ ID NO: 64655 - protein, 10 aa, Homo sapiens
  misc_feature: Table A; Target 64655; HLA-A*01:01; PKHD1; ENSG00000170927; TAA
VLSEAHEGLY

SEQ ID NO: 64656 - protein, 10 aa, Homo sapiens
  misc_feature: Table A; Target 64656; HLA-A*30:02; PKHD1; ENSG00000170927; TAA
VLSEAHEGLY

SEQ ID NO: 64657 - protein, 9 aa, Homo sapiens
  misc_feature: Table A; Target 64657; HLA-A*03:01; PKHD1; ENSG00000170927; TAA
VLTPPAAQK

SEQ ID NO: 64658 - protein, 9 aa, Homo sapiens
  misc_feature: Table A; Target 64658; HLA-A*03:02; PKHD1; ENSG00000170927; TAA
VLTPPAAQK

SEQ ID NO: 64659 - protein, 9 aa, Homo sapiens
  misc_feature: Table A; Target 64659; HLA-A*11:01; PKHD1; ENSG00000170927; TAA
VLTPPAAQK

SEQ ID NO: 64660 - protein, 11 aa, Homo sapiens
  misc_feature: Table A; Target 64660; HLA-A*30:02; PKHD1; ENSG00000170927; TAA
VLTPPAAQKGY

SEQ ID NO: 64661 - protein, 10 aa, Homo sapiens
  misc_feature: Table A; Target 64661; HLA-A*02:03; PKHD1; ENSG00000170927; TAA
VLYPNNGSQL

SEQ ID NO: 64662 - protein, 10 aa, Homo sapiens
  misc_feature: Table A; Target 64662; HLA-B*15:01; PKHD1; ENSG00000170927; TAA
VLYPNNGSQL

SEQ ID NO: 64663 - protein, 10 aa, Homo sapiens
  misc_feature: Table A; Target 64663; HLA-B*46:01; PKHD1; ENSG00000170927; TAA
VLYPNNGSQL

SEQ ID NO: 64664 - protein, 10 aa, Homo sapiens
  misc_feature: Table A; Target 64664; HLA-C*01:02; PKHD1; ENSG00000170927; TAA
VLYPNNGSQL

SEQ ID NO: 64665 - protein, 10 aa, Homo sapiens
  misc_feature: Table A; Target 64665; HLA-C*14:02; PKHD1; ENSG00000170927; TAA
VLYPNNGSQL

SEQ ID NO: 64666 - protein, 9 aa, Homo sapiens
  misc_feature: Table A; Target 64666; HLA-A*24:02; PKHD1; ENSG00000170927; TAA
VMPRIMAIF

SEQ ID NO: 64667 - protein, 9 aa, Homo sapiens
  misc_feature: Table A; Target 64667; HLA-A*33:01; PKHD1; ENSG00000170927; TAA
VNMVVPALR

SEQ ID NO: 64668 - protein, 9 aa, Homo sapiens
  misc_feature: Table A; Target 64668; HLA-A*33:03; PKHD1; ENSG00000170927; TAA
VNMVVPALR

SEQ ID NO: 64669 - protein, 9 aa, Homo sapiens
  misc_feature: Table A; Target 64669; HLA-C*16:01; PKHD1; ENSG00000170927; TAA
VNSSFGRVV

SEQ ID NO: 64670 - protein, 10 aa, Homo sapiens
  misc_feature: Table A; Target 64670; HLA-A*30:02; PKHD1; ENSG00000170927; TAA
VNVTVIRGDY

SEQ ID NO: 64671 - protein, 8 aa, Homo sapiens
  misc_feature: Table A; Target 64671; HLA-B*08:01; PKHD1; ENSG00000170927; TAA
VNYVRDTL

SEQ ID NO: 64672 - protein, 8 aa, Homo sapiens
  misc_feature: Table A; Target 64672; HLA-C*16:01; PKHD1; ENSG00000170927; TAA
VNYVRDTL

SEQ ID NO: 64673 - protein, 9 aa, Homo sapiens
  misc_feature: Table A; Target 64673; HLA-B*07:02; PKHD1; ENSG00000170927; TAA
VPAPGTTGI

SEQ ID NO: 64674 - protein, 9 aa, Homo sapiens
  misc_feature: Table A; Target 64674; HLA-B*51:01; PKHD1; ENSG00000170927; TAA
VPAPGTTGI

SEQ ID NO: 64675 - protein, 9 aa, Homo sapiens
  misc_feature: Table A; Target 64675; HLA-B*56:01; PKHD1; ENSG00000170927; TAA
VPAPGTTGI

SEQ ID NO: 64676 - protein, 9 aa, Homo sapiens
  misc_feature: Table A; Target 64676; HLA-C*07:02; PKHD1; ENSG00000170927; TAA
VPAPGTTGI

SEQ ID NO: 64677 - protein, 11 aa, Homo sapiens
  misc_feature: Table A; Target 64677; HLA-B*56:01; PKHD1; ENSG00000170927; TAA
VPAPGTTGITS

SEQ ID NO: 64678 - protein, 9 aa, Homo sapiens
  misc_feature: Table A; Target 64678; HLA-B*35:01; PKHD1; ENSG00000170927; TAA
VPCDVFPVF

SEQ ID NO: 64679 - protein, 9 aa, Homo sapiens
  misc_feature: Table A; Target 64679; HLA-B*35:01; PKHD1; ENSG00000170927; TAA
VPDHWAESM

SEQ ID NO: 64680 - protein, 9 aa, Homo sapiens
  misc_feature: Table A; Target 64680; HLA-B*35:01; PKHD1; ENSG00000170927; TAA
VPGKLIHVY

SEQ ID NO: 64681 - protein, 9 aa, Homo sapiens
  misc_feature: Table A; Target 64681; HLA-A*30:02; PKHD1; ENSG00000170927; TAA
VPSLPAGEY

SEQ ID NO: 64682 - protein, 9 aa, Homo sapiens
  misc_feature: Table A; Target 64682; HLA-B*35:01; PKHD1; ENSG00000170927; TAA
VPSLPAGEY

SEQ ID NO: 64683 - protein, 9 aa, Homo sapiens
  misc_feature: Table A; Target 64683; HLA-B*56:01; PKHD1; ENSG00000170927; TAA
VPTGNGSVA

SEQ ID NO: 64684 - protein, 10 aa, Homo sapiens
  misc_feature: Table A; Target 64684; HLA-B*07:02; PKHD1; ENSG00000170927; TAA
VPTGNGSVAL

SEQ ID NO: 64685 - protein, 10 aa, Homo sapiens
  misc_feature: Table A; Target 64685; HLA-B*35:03; PKHD1; ENSG00000170927; TAA
VPTGNGSVAL

SEQ ID NO: 64686 - protein, 10 aa, Homo sapiens
  misc_feature: Table A; Target 64686; HLA-C*07:02; PKHD1; ENSG00000170927; TAA
VPTGNGSVAL

SEQ ID NO: 64687 - protein, 9 aa, Homo sapiens
  misc_feature: Table A; Target 64687; HLA-B*15:01; PKHD1; ENSG00000170927; TAA
VQCDLTVAM

SEQ ID NO: 64688 - protein, 9 aa, Homo sapiens
  misc_feature: Table A; Target 64688; HLA-B*15:03; PKHD1; ENSG00000170927; TAA
VQCDLTVAM

SEQ ID NO: 64689 - protein, 9 aa, Homo sapiens
  misc_feature: Table A; Target 64689; HLA-B*18:01; PKHD1; ENSG00000170927; TAA
VQCDLTVAM

SEQ ID NO: 64690 - protein, 9 aa, Homo sapiens
  misc_feature: Table A; Target 64690; HLA-B*39:01; PKHD1; ENSG00000170927; TAA
VQCDLTVAM

SEQ ID NO: 64691 - protein, 8 aa, Homo sapiens
  misc_feature: Table A; Target 64691; HLA-C*05:01; PKHD1; ENSG00000170927; TAA
VQDTDLYL

SEQ ID NO: 64692 - protein, 9 aa, Homo sapiens
  misc_feature: Table A; Target 64692; HLA-A*03:02; PKHD1; ENSG00000170927; TAA
VQDTDLYLK

SEQ ID NO: 64693 - protein, 9 aa, Homo sapiens
  misc_feature: Table A; Target 64693; HLA-A*11:01; PKHD1; ENSG00000170927; TAA
VQDTDLYLK

SEQ ID NO: 64694 - protein, 10 aa, Homo sapiens
  misc_feature: Table A; Target 64694; HLA-B*15:01; PKHD1; ENSG00000170927; TAA
VQFQVLGQAF

SEQ ID NO: 64695 - protein, 10 aa, Homo sapiens
  misc_feature: Table A; Target 64695; HLA-B*15:03; PKHD1; ENSG00000170927; TAA
VQFQVLGQAF

SEQ ID NO: 64696 - protein, 10 aa, Homo sapiens
  misc_feature: Table A; Target 64696; HLA-C*16:04; PKHD1; ENSG00000170927; TAA
VQFQVLGQAF

SEQ ID NO: 64697 - protein, 9 aa, Homo sapiens
  misc_feature: Table A; Target 64697; HLA-A*01:01; PKHD1; ENSG00000170927; TAA
VSDENLTGV

SEQ ID NO: 64698 - protein, 9 aa, Homo sapiens
  misc_feature: Table A; Target 64698; HLA-A*02:01; PKHD1; ENSG00000170927; TAA
VSDENLTGV

SEQ ID NO: 64699 - protein, 9 aa, Homo sapiens
  misc_feature: Table A; Target 64699; HLA-C*05:01; PKHD1; ENSG00000170927; TAA
VSDENLTGV

SEQ ID NO: 64700 - protein, 9 aa, Homo sapiens
  misc_feature: Table A; Target 64700; HLA-A*01:01; PKHD1; ENSG00000170927; TAA
VSDGGELRI

SEQ ID NO: 64701 - protein, 9 aa, Homo sapiens
  misc_feature: Table A; Target 64701; HLA-C*05:01; PKHD1; ENSG00000170927; TAA
VSDGGELRI

SEQ ID NO: 64702 - protein, 8 aa, Homo sapiens
  misc_feature: Table A; Target 64702; HLA-A*03:02; PKHD1; ENSG00000170927; TAA
VSFSVFNK

SEQ ID NO: 64703 - protein, 8 aa, Homo sapiens
  misc_feature: Table A; Target 64703; HLA-A*11:01; PKHD1; ENSG00000170927; TAA
VSFSVFNK

SEQ ID NO: 64704 - protein, 8 aa, Homo sapiens
  misc_feature: Table A; Target 64704; HLA-C*16:01; PKHD1; ENSG00000170927; TAA
VSGNHTVL

SEQ ID NO: 64705 - protein, 9 aa, Homo sapiens
  misc_feature: Table A; Target 64705; HLA-A*01:01; PKHD1; ENSG00000170927; TAA
VSLILFGSY

SEQ ID NO: 64706 - protein, 9 aa, Homo sapiens
  misc_feature: Table A; Target 64706; HLA-A*30:02; PKHD1; ENSG00000170927; TAA
VSLILFGSY

SEQ ID NO: 64707 - protein, 9 aa, Homo sapiens
  misc_feature: Table A; Target 64707; HLA-A*23:01; PKHD1; ENSG00000170927; TAA
VSNTTFVNF

SEQ ID NO: 64708 - protein, 9 aa, Homo sapiens
  misc_feature: Table A; Target 64708; HLA-A*32:01; PKHD1; ENSG00000170927; TAA
VSNTTFVNF

SEQ ID NO: 64709 - protein, 9 aa, Homo sapiens
  misc_feature: Table A; Target 64709; HLA-B*57:01; PKHD1; ENSG00000170927; TAA
VSNTTFVNF

SEQ ID NO: 64710 - protein, 9 aa, Homo sapiens
  misc_feature: Table A; Target 64710; HLA-B*58:01; PKHD1; ENSG00000170927; TAA
VSNTTFVNF

SEQ ID NO: 64711 - protein, 9 aa, Homo sapiens
  misc_feature: Table A; Target 64711; HLA-C*02:02; PKHD1; ENSG00000170927; TAA
VSNTTFVNF

SEQ ID NO: 64712 - protein, 10 aa, Homo sapiens
  misc_feature: Table A; Target 64712; HLA-A*01:01; PKHD1; ENSG00000170927; TAA
VSVVGSPPVY

SEQ ID NO: 64713 - protein, 10 aa, Homo sapiens
  misc_feature: Table A; Target 64713; HLA-A*30:02; PKHD1; ENSG00000170927; TAA
VSVVGSPPVY

SEQ ID NO: 64714 - protein, 9 aa, Homo sapiens
  misc_feature: Table A; Target 64714; HLA-A*01:01; PKHD1; ENSG00000170927; TAA
VTDSLLLGH

SEQ ID NO: 64715 - protein, 9 aa, Homo sapiens
  misc_feature: Table A; Target 64715; HLA-A*03:01; PKHD1; ENSG00000170927; TAA
VTDSLLLGH

SEQ ID NO: 64716 - protein, 9 aa, Homo sapiens
  misc_feature: Table A; Target 64716; HLA-A*11:01; PKHD1; ENSG00000170927; TAA
VTDSLLLGH

SEQ ID NO: 64717 - protein, 10 aa, Homo sapiens
  misc_feature: Table A; Target 64717; HLA-A*01:01; PKHD1; ENSG00000170927; TAA
VTDSLLLGHF

SEQ ID NO: 64718 - protein, 9 aa, Homo sapiens
  misc_feature: Table A; Target 64718; HLA-A*33:03; PKHD1; ENSG00000170927; TAA
VTNNLVVLM

SEQ ID NO: 64719 - protein, 10 aa, Homo sapiens
  misc_feature: Table A; Target 64719; HLA-A*01:01; PKHD1; ENSG00000170927; TAA
VTQSKGVIGY

SEQ ID NO: 64720 - protein, 10 aa, Homo sapiens
  misc_feature: Table A; Target 64720; HLA-A*30:02; PKHD1; ENSG00000170927; TAA
VTQSKGVIGY

SEQ ID NO: 64721 - protein, 10 aa, Homo sapiens
  misc_feature: Table A; Target 64721; HLA-A*32:01; PKHD1; ENSG00000170927; TAA
VTQSKGVIGY

SEQ ID NO: 64722 - protein, 10 aa, Homo sapiens
  misc_feature: Table A; Target 64722; HLA-C*16:02; PKHD1; ENSG00000170927; TAA
VTQSKGVIGY

SEQ ID NO: 64723 - protein, 9 aa, Homo sapiens
  misc_feature: Table A; Target 64723; HLA-A*32:01; PKHD1; ENSG00000170927; TAA
VTSGFVDVF

SEQ ID NO: 64724 - protein, 9 aa, Homo sapiens
  misc_feature: Table A; Target 64724; HLA-A*23:01; PKHD1; ENSG00000170927; TAA
VTSPPGVNF

SEQ ID NO: 64725 - protein, 9 aa, Homo sapiens
  misc_feature: Table A; Target 64725; HLA-A*30:02; PKHD1; ENSG00000170927; TAA
VTSPPGVNF

SEQ ID NO: 64726 - protein, 9 aa, Homo sapiens
  misc_feature: Table A; Target 64726; HLA-A*32:01; PKHD1; ENSG00000170927; TAA
VTSPPGVNF

SEQ ID NO: 64727 - protein, 9 aa, Homo sapiens
  misc_feature: Table A; Target 64727; HLA-B*15:01; PKHD1; ENSG00000170927; TAA
VTSPPGVNF

SEQ ID NO: 64728 - protein, 9 aa, Homo sapiens
  misc_feature: Table A; Target 64728; HLA-B*15:03; PKHD1; ENSG00000170927; TAA
VTSPPGVNF

SEQ ID NO: 64729 - protein, 9 aa, Homo sapiens
  misc_feature: Table A; Target 64729; HLA-B*46:01; PKHD1; ENSG00000170927; TAA
VTSPPGVNF

SEQ ID NO: 64730 - protein, 9 aa, Homo sapiens
  misc_feature: Table A; Target 64730; HLA-B*57:01; PKHD1; ENSG00000170927; TAA
VTSPPGVNF

SEQ ID NO: 64731 - protein, 9 aa, Homo sapiens
  misc_feature: Table A; Target 64731; HLA-B*58:01; PKHD1; ENSG00000170927; TAA
VTSPPGVNF

SEQ ID NO: 64732 - protein, 9 aa, Homo sapiens
  misc_feature: Table A; Target 64732; HLA-C*02:02; PKHD1; ENSG00000170927; TAA
VTSPPGVNF

SEQ ID NO: 64733 - protein, 9 aa, Homo sapiens
  misc_feature: Table A; Target 64733; HLA-C*03:03; PKHD1; ENSG00000170927; TAA
VTSPPGVNF

SEQ ID NO: 64734 - protein, 9 aa, Homo sapiens
  misc_feature: Table A; Target 64734; HLA-C*03:04; PKHD1; ENSG00000170927; TAA
VTSPPGVNF

SEQ ID NO: 64735 - protein, 9 aa, Homo sapiens
  misc_feature: Table A; Target 64735; HLA-C*05:01; PKHD1; ENSG00000170927; TAA
VTSPPGVNF

SEQ ID NO: 64736 - protein, 9 aa, Homo sapiens
  misc_feature: Table A; Target 64736; HLA-C*16:01; PKHD1; ENSG00000170927; TAA
VTSPPGVNF

SEQ ID NO: 64737 - protein, 9 aa, Homo sapiens
  misc_feature: Table A; Target 64737; HLA-C*03:03; PKHD1; ENSG00000170927; TAA
VTVENGQLL

SEQ ID NO: 64738 - protein, 9 aa, Homo sapiens
  misc_feature: Table A; Target 64738; HLA-C*03:04; PKHD1; ENSG00000170927; TAA
VTVENGQLL

SEQ ID NO: 64739 - protein, 10 aa, Homo sapiens
  misc_feature: Table A; Target 64739; HLA-A*25:01; PKHD1; ENSG00000170927; TAA
VVAGSERLGF

SEQ ID NO: 64740 - protein, 9 aa, Homo sapiens
  misc_feature: Table A; Target 64740; HLA-A*03:01; PKHD1; ENSG00000170927; TAA
VVGEDMRMK

SEQ ID NO: 64741 - protein, 9 aa, Homo sapiens
  misc_feature: Table A; Target 64741; HLA-A*03:02; PKHD1; ENSG00000170927; TAA
VVGEDMRMK

SEQ ID NO: 64742 - protein, 9 aa, Homo sapiens
  misc_feature: Table A; Target 64742; HLA-A*11:01; PKHD1; ENSG00000170927; TAA
VVGEDMRMK

SEQ ID NO: 64743 - protein, 8 aa, Homo sapiens
  misc_feature: Table A; Target 64743; HLA-A*30:02; PKHD1; ENSG00000170927; TAA
VVGSPPVY

SEQ ID NO: 64744 - protein, 8 aa, Homo sapiens
  misc_feature: Table A; Target 64744; HLA-C*12:03; PKHD1; ENSG00000170927; TAA
VVGSPPVY

SEQ ID NO: 64745 - protein, 9 aa, Homo sapiens
  misc_feature: Table A; Target 64745; HLA-A*02:03; PKHD1; ENSG00000170927; TAA
VVIISGTGV

SEQ ID NO: 64746 - protein, 9 aa, Homo sapiens
  misc_feature: Table A; Target 64746; HLA-B*13:02; PKHD1; ENSG00000170927; TAA
VVIISGTGV

SEQ ID NO: 64747 - protein, 9 aa, Homo sapiens
  misc_feature: Table A; Target 64747; HLA-B*46:01; PKHD1; ENSG00000170927; TAA
VVIISGTGV

SEQ ID NO: 64748 - protein, 9 aa, Homo sapiens
  misc_feature: Table A; Target 64748; HLA-C*01:02; PKHD1; ENSG00000170927; TAA
VVIISGTGV

SEQ ID NO: 64749 - protein, 9 aa, Homo sapiens
  misc_feature: Table A; Target 64749; HLA-A*32:01; PKHD1; ENSG00000170927; TAA
VVLMTQPAW

SEQ ID NO: 64750 - protein, 9 aa, Homo sapiens
  misc_feature: Table A; Target 64750; HLA-B*57:01; PKHD1; ENSG00000170927; TAA
VVLMTQPAW

SEQ ID NO: 64751 - protein, 9 aa, Homo sapiens
  misc_feature: Table A; Target 64751; HLA-B*58:01; PKHD1; ENSG00000170927; TAA
VVLMTQPAW

SEQ ID NO: 64752 - protein, 10 aa, Homo sapiens
  misc_feature: Table A; Target 64752; HLA-A*26:01; PKHD1; ENSG00000170927; TAA
VVPSLPAGEY

SEQ ID NO: 64753 - protein, 10 aa, Homo sapiens
  misc_feature: Table A; Target 64753; HLA-A*29:02; PKHD1; ENSG00000170927; TAA
VVPSLPAGEY

SEQ ID NO: 64754 - protein, 10 aa, Homo sapiens
  misc_feature: Table A; Target 64754; HLA-A*30:02; PKHD1; ENSG00000170927; TAA
VVPSLPAGEY

SEQ ID NO: 64755 - protein, 9 aa, Homo sapiens
  misc_feature: Table A; Target 64755; HLA-A*03:01; PKHD1; ENSG00000170927; TAA
VVTTYLREK

SEQ ID NO: 64756 - protein, 9 aa, Homo sapiens
  misc_feature: Table A; Target 64756; HLA-A*03:02; PKHD1; ENSG00000170927; TAA
VVTTYLREK

SEQ ID NO: 64757 - protein, 9 aa, Homo sapiens
  misc_feature: Table A; Target 64757; HLA-A*11:01; PKHD1; ENSG00000170927; TAA
VVTTYLREK

SEQ ID NO: 64758 - protein, 9 aa, Homo sapiens
  misc_feature: Table A; Target 64758; HLA-A*02:01; PKHD1; ENSG00000170927; TAA
VVYDGGVFL

SEQ ID NO: 64759 - protein, 9 aa, Homo sapiens
  misc_feature: Table A; Target 64759; HLA-A*03:01; PKHD1; ENSG00000170927; TAA
VVYDGGVFL

SEQ ID NO: 64760 - protein, 9 aa, Homo sapiens
  misc_feature: Table A; Target 64760; HLA-C*02:02; PKHD1; ENSG00000170927; TAA
VVYDGGVFL

SEQ ID NO: 64761 - protein, 9 aa, Homo sapiens
  misc_feature: Table A; Target 64761; HLA-C*03:03; PKHD1; ENSG00000170927; TAA
VVYDGGVFL

SEQ ID NO: 64762 - protein, 9 aa, Homo sapiens
  misc_feature: Table A; Target 64762; HLA-C*03:04; PKHD1; ENSG00000170927; TAA
VVYDGGVFL

SEQ ID NO: 64763 - protein, 9 aa, Homo sapiens
  misc_feature: Table A; Target 64763; HLA-C*05:01; PKHD1; ENSG00000170927; TAA
VVYDGGVFL

SEQ ID NO: 64764 - protein, 11 aa, Homo sapiens
  misc_feature: Table A; Target 64764; HLA-A*24:02; PKHD1; ENSG00000170927; TAA
VWESAGGAQIF

SEQ ID NO: 64765 - protein, 8 aa, Homo sapiens
  misc_feature: Table A; Target 64765; HLA-C*04:01; PKHD1; ENSG00000170927; TAA
VYDGGVFL

SEQ ID NO: 64766 - protein, 8 aa, Homo sapiens
  misc_feature: Table A; Target 64766; HLA-C*05:01; PKHD1; ENSG00000170927; TAA
VYDGGVFL

SEQ ID NO: 64767 - protein, 8 aa, Homo sapiens
  misc_feature: Table A; Target 64767; HLA-A*24:02; PKHD1; ENSG00000170927; TAA
VYGKVHLY

SEQ ID NO: 64768 - protein, 8 aa, Homo sapiens
  misc_feature: Table A; Target 64768; HLA-A*29:02; PKHD1; ENSG00000170927; TAA
VYGKVHLY

SEQ ID NO: 64769 - protein, 9 aa, Homo sapiens
  misc_feature: Table A; Target 64769; HLA-A*23:01; PKHD1; ENSG00000170927; TAA
VYIDQQTCL

SEQ ID NO: 64770 - protein, 9 aa, Homo sapiens
  misc_feature: Table A; Target 64770; HLA-A*24:02; PKHD1; ENSG00000170927; TAA
VYIDQQTCL

SEQ ID NO: 64771 - protein, 9 aa, Homo sapiens
  misc_feature: Table A; Target 64771; HLA-B*15:03; PKHD1; ENSG00000170927; TAA
VYIDQQTCL

SEQ ID NO: 64772 - protein, 9 aa, Homo sapiens
  misc_feature: Table A; Target 64772; HLA-B*46:01; PKHD1; ENSG00000170927; TAA
VYIDQQTCL

SEQ ID NO: 64773 - protein, 9 aa, Homo sapiens
  misc_feature: Table A; Target 64773; HLA-B*58:01; PKHD1; ENSG00000170927; TAA
VYIDQQTCL

SEQ ID NO: 64774 - protein, 9 aa, Homo sapiens
  misc_feature: Table A; Target 64774; HLA-C*01:02; PKHD1; ENSG00000170927; TAA
VYIDQQTCL

SEQ ID NO: 64775 - protein, 9 aa, Homo sapiens
  misc_feature: Table A; Target 64775; HLA-C*03:03; PKHD1; ENSG00000170927; TAA
VYIDQQTCL

SEQ ID NO: 64776 - protein, 9 aa, Homo sapiens
  misc_feature: Table A; Target 64776; HLA-C*03:04; PKHD1; ENSG00000170927; TAA
VYIDQQTCL

SEQ ID NO: 64777 - protein, 9 aa, Homo sapiens
  misc_feature: Table A; Target 64777; HLA-C*14:02; PKHD1; ENSG00000170927; TAA
VYIDQQTCL

SEQ ID NO: 64778 - protein, 9 aa, Homo sapiens
  misc_feature: Table A; Target 64778; HLA-A*23:01; PKHD1; ENSG00000170927; TAA
VYLQETGNW

SEQ ID NO: 64779 - protein, 9 aa, Homo sapiens
  misc_feature: Table A; Target 64779; HLA-A*24:02; PKHD1; ENSG00000170927; TAA
VYLQETGNW

SEQ ID NO: 64780 - protein, 9 aa, Homo sapiens
  misc_feature: Table A; Target 64780; HLA-C*14:02; PKHD1; ENSG00000170927; TAA
VYLQETGNW

SEQ ID NO: 64781 - protein, 9 aa, Homo sapiens
  misc_feature: Table A; Target 64781; HLA-A*24:02; PKHD1; ENSG00000170927; TAA
VYPKFQPPW

SEQ ID NO: 64782 - protein, 11 aa, Homo sapiens
  misc_feature: Table A; Target 64782; HLA-A*23:01; PKHD1; ENSG00000170927; TAA
VYPPSGVPGKL

SEQ ID NO: 64783 - protein, 11 aa, Homo sapiens
  misc_feature: Table A; Target 64783; HLA-A*24:02; PKHD1; ENSG00000170927; TAA
VYPPSGVPGKL

SEQ ID NO: 64784 - protein, 9 aa, Homo sapiens
  misc_feature: Table A; Target 64784; HLA-B*49:01; PKHD1; ENSG00000170927; TAA
WESAGGAQI

SEQ ID NO: 64785 - protein, 10 aa, Homo sapiens
  misc_feature: Table A; Target 64785; HLA-A*25:01; PKHD1; ENSG00000170927; TAA
WLNPDVVTTY

SEQ ID NO: 64786 - protein, 10 aa, Homo sapiens
  misc_feature: Table A; Target 64786; HLA-A*29:02; PKHD1; ENSG00000170927; TAA
WLNPDVVTTY

SEQ ID NO: 64787 - protein, 10 aa, Homo sapiens
  misc_feature: Table A; Target 64787; HLA-A*30:02; PKHD1; ENSG00000170927; TAA
WLNPDVVTTY

SEQ ID NO: 64788 - protein, 10 aa, Homo sapiens
  misc_feature: Table A; Target 64788; HLA-B*15:01; PKHD1; ENSG00000170927; TAA
WLNPDVVTTY

SEQ ID NO: 64789 - protein, 9 aa, Homo sapiens
  misc_feature: Table A; Target 64789; HLA-C*07:06; PKHD1; ENSG00000170927; TAA
YACSGNVSR

SEQ ID NO: 64790 - protein, 8 aa, Homo sapiens
  misc_feature: Table A; Target 64790; HLA-B*18:01; PKHD1; ENSG00000170927; TAA
YEAAATPV

SEQ ID NO: 64791 - protein, 8 aa, Homo sapiens
  misc_feature: Table A; Target 64791; HLA-B*49:01; PKHD1; ENSG00000170927; TAA
YEAAATPV

SEQ ID NO: 64792 - protein, 9 aa, Homo sapiens
  misc_feature: Table A; Target 64792; HLA-A*30:01; PKHD1; ENSG00000170927; TAA
YEAAATPVV

SEQ ID NO: 64793 - protein, 9 aa, Homo sapiens
  misc_feature: Table A; Target 64793; HLA-B*13:02; PKHD1; ENSG00000170927; TAA
YEAAATPVV

SEQ ID NO: 64794 - protein, 9 aa, Homo sapiens
  misc_feature: Table A; Target 64794; HLA-B*18:01; PKHD1; ENSG00000170927; TAA
YEAAATPVV

SEQ ID NO: 64795 - protein, 9 aa, Homo sapiens
  misc_feature: Table A; Target 64795; HLA-B*40:01; PKHD1; ENSG00000170927; TAA
YEAAATPVV

SEQ ID NO: 64796 - protein, 9 aa, Homo sapiens
  misc_feature: Table A; Target 64796; HLA-B*40:02; PKHD1; ENSG00000170927; TAA
YEAAATPVV

SEQ ID NO: 64797 - protein, 9 aa, Homo sapiens
  misc_feature: Table A; Target 64797; HLA-B*49:01; PKHD1; ENSG00000170927; TAA
YEAAATPVV

SEQ ID NO: 64798 - protein, 9 aa, Homo sapiens
  misc_feature: Table A; Target 64798; HLA-C*02:02; PKHD1; ENSG00000170927; TAA
YEAAATPVV

SEQ ID NO: 64799 - protein, 9 aa, Homo sapiens
  misc_feature: Table A; Target 64799; HLA-C*16:02; PKHD1; ENSG00000170927; TAA
YEAAATPVV

SEQ ID NO: 64800 - protein, 10 aa, Homo sapiens
  misc_feature: Table A; Target 64800; HLA-A*30:01; PKHD1; ENSG00000170927; TAA
YEAAATPVVT

SEQ ID NO: 64801 - protein, 10 aa, Homo sapiens
  misc_feature: Table A; Target 64801; HLA-B*40:01; PKHD1; ENSG00000170927; TAA
YEAAATPVVT

SEQ ID NO: 64802 - protein, 10 aa, Homo sapiens
  misc_feature: Table A; Target 64802; HLA-B*49:01; PKHD1; ENSG00000170927; TAA
YEAAATPVVT

SEQ ID NO: 64803 - protein, 11 aa, Homo sapiens
  misc_feature: Table A; Target 64803; HLA-A*30:01; PKHD1; ENSG00000170927; TAA
YEAAATPVVTA

SEQ ID NO: 64804 - protein, 11 aa, Homo sapiens
  misc_feature: Table A; Target 64804; HLA-B*49:01; PKHD1; ENSG00000170927; TAA
YEAAATPVVTA

SEQ ID NO: 64805 - protein, 9 aa, Homo sapiens
  misc_feature: Table A; Target 64805; HLA-B*44:02; PKHD1; ENSG00000170927; TAA
YEHVWTLSW

SEQ ID NO: 64806 - protein, 9 aa, Homo sapiens
  misc_feature: Table A; Target 64806; HLA-A*30:01; PKHD1; ENSG00000170927; TAA
YEPHEAEVL

SEQ ID NO: 64807 - protein, 9 aa, Homo sapiens
  misc_feature: Table A; Target 64807; HLA-B*40:01; PKHD1; ENSG00000170927; TAA
YEPHEAEVL

SEQ ID NO: 64808 - protein, 10 aa, Homo sapiens
  misc_feature: Table A; Target 64808; HLA-A*29:02; PKHD1; ENSG00000170927; TAA
YFNIMDNLLY

SEQ ID NO: 64809 - protein, 9 aa, Homo sapiens
  misc_feature: Table A; Target 64809; HLA-C*02:02; PKHD1; ENSG00000170927; TAA
YGSSYSTPF

SEQ ID NO: 64810 - protein, 9 aa, Homo sapiens
  misc_feature: Table A; Target 64810; HLA-B*38:01; PKHD1; ENSG00000170927; TAA
YHELQSPHV

SEQ ID NO: 64811 - protein, 10 aa, Homo sapiens
  misc_feature: Table A; Target 64811; HLA-B*38:01; PKHD1; ENSG00000170927; TAA
YHELQSPHVF

SEQ ID NO: 64812 - protein, 8 aa, Homo sapiens
  misc_feature: Table A; Target 64812; HLA-C*05:01; PKHD1; ENSG00000170927; TAA
YIDQQTCL

SEQ ID NO: 64813 - protein, 8 aa, Homo sapiens
  misc_feature: Table A; Target 64813; HLA-C*05:01; PKHD1; ENSG00000170927; TAA
YIDSPVIL

SEQ ID NO: 64814 - protein, 8 aa, Homo sapiens
  misc_feature: Table A; Target 64814; HLA-C*07:04; PKHD1; ENSG00000170927; TAA
YIDSPVIL

SEQ ID NO: 64815 - protein, 10 aa, Homo sapiens
  misc_feature: Table A; Target 64815; HLA-A*02:07; PKHD1; ENSG00000170927; TAA
YIDSPVILEA

SEQ ID NO: 64816 - protein, 9 aa, Homo sapiens
  misc_feature: Table A; Target 64816; HLA-A*23:01; PKHD1; ENSG00000170927; TAA
YIGSQNVSF

SEQ ID NO: 64817 - protein, 9 aa, Homo sapiens
  misc_feature: Table A; Target 64817; HLA-A*32:01; PKHD1; ENSG00000170927; TAA
YIGSQNVSF

SEQ ID NO: 64818 - protein, 9 aa, Homo sapiens
  misc_feature: Table A; Target 64818; HLA-B*15:01; PKHD1; ENSG00000170927; TAA
YIGSQNVSF

SEQ ID NO: 64819 - protein, 9 aa, Homo sapiens
  misc_feature: Table A; Target 64819; HLA-B*15:03; PKHD1; ENSG00000170927; TAA
YIGSQNVSF

SEQ ID NO: 64820 - protein, 9 aa, Homo sapiens
  misc_feature: Table A; Target 64820; HLA-B*18:01; PKHD1; ENSG00000170927; TAA
YIGSQNVSF

SEQ ID NO: 64821 - protein, 9 aa, Homo sapiens
  misc_feature: Table A; Target 64821; HLA-B*46:01; PKHD1; ENSG00000170927; TAA
YIGSQNVSF

SEQ ID NO: 64822 - protein, 9 aa, Homo sapiens
  misc_feature: Table A; Target 64822; HLA-B*58:01; PKHD1; ENSG00000170927; TAA
YIGSQNVSF

SEQ ID NO: 64823 - protein, 9 aa, Homo sapiens
  misc_feature: Table A; Target 64823; HLA-C*02:02; PKHD1; ENSG00000170927; TAA
YIGSQNVSF

SEQ ID NO: 64824 - protein, 9 aa, Homo sapiens
  misc_feature: Table A; Target 64824; HLA-C*07:04; PKHD1; ENSG00000170927; TAA
YIGSQNVSF

SEQ ID NO: 64825 - protein, 9 aa, Homo sapiens
  misc_feature: Table A; Target 64825; HLA-C*14:02; PKHD1; ENSG00000170927; TAA
YIGSQNVSF

SEQ ID NO: 64826 - protein, 9 aa, Homo sapiens
  misc_feature: Table A; Target 64826; HLA-A*01:01; PKHD1; ENSG00000170927; TAA
YIMPQVFHY

SEQ ID NO: 64827 - protein, 9 aa, Homo sapiens
  misc_feature: Table A; Target 64827; HLA-A*29:02; PKHD1; ENSG00000170927; TAA
YIMPQVFHY

SEQ ID NO: 64828 - protein, 9 aa, Homo sapiens
  misc_feature: Table A; Target 64828; HLA-C*02:02; PKHD1; ENSG00000170927; TAA
YIMPQVFHY

SEQ ID NO: 64829 - protein, 9 aa, Homo sapiens
  misc_feature: Table A; Target 64829; HLA-A*02:01; PKHD1; ENSG00000170927; TAA
YLNASDFTV

SEQ ID NO: 64830 - protein, 9 aa, Homo sapiens
  misc_feature: Table A; Target 64830; HLA-A*02:04; PKHD1; ENSG00000170927; TAA
YLNASDFTV

SEQ ID NO: 64831 - protein, 9 aa, Homo sapiens
  misc_feature: Table A; Target 64831; HLA-A*02:07; PKHD1; ENSG00000170927; TAA
YLNASDFTV

SEQ ID NO: 64832 - protein, 9 aa, Homo sapiens
  misc_feature: Table A; Target 64832; HLA-B*13:02; PKHD1; ENSG00000170927; TAA
YLNASDFTV

SEQ ID NO: 64833 - protein, 9 aa, Homo sapiens
  misc_feature: Table A; Target 64833; HLA-B*55:01; PKHD1; ENSG00000170927; TAA
YLNASDFTV

SEQ ID NO: 64834 - protein, 9 aa, Homo sapiens
  misc_feature: Table A; Target 64834; HLA-B*13:02; PKHD1; ENSG00000170927; TAA
YLQGSTPCV

SEQ ID NO: 64835 - protein, 11 aa, Homo sapiens
  misc_feature: Table A; Target 64835; HLA-A*02:01; PKHD1; ENSG00000170927; TAA
YLVSGEGQVQV

SEQ ID NO: 64836 - protein, 8 aa, Homo sapiens
  misc_feature: Table A; Target 64836; HLA-B*08:01; PKHD1; ENSG00000170927; TAA
YNILGHAL

SEQ ID NO: 64837 - protein, 8 aa, Homo sapiens
  misc_feature: Table A; Target 64837; HLA-C*03:04; PKHD1; ENSG00000170927; TAA
YNILGHAL

SEQ ID NO: 64838 - protein, 9 aa, Homo sapiens
  misc_feature: Table A; Target 64838; HLA-B*35:01; PKHD1; ENSG00000170927; TAA
YPIQEDHGL

SEQ ID NO: 64839 - protein, 9 aa, Homo sapiens
  misc_feature: Table A; Target 64839; HLA-B*35:03; PKHD1; ENSG00000170927; TAA
YPIQEDHGL

SEQ ID NO: 64840 - protein, 9 aa, Homo sapiens
  misc_feature: Table A; Target 64840; HLA-B*38:01; PKHD1; ENSG00000170927; TAA
YPIQEDHGL

SEQ ID NO: 64841 - protein, 9 aa, Homo sapiens
  misc_feature: Table A; Target 64841; HLA-B*55:01; PKHD1; ENSG00000170927; TAA
YPIQEDHGL

SEQ ID NO: 64842 - protein, 8 aa, Homo sapiens
  misc_feature: Table A; Target 64842; HLA-B*07:02; PKHD1; ENSG00000170927; TAA
YPNNGSQL

SEQ ID NO: 64843 - protein, 8 aa, Homo sapiens
  misc_feature: Table A; Target 64843; HLA-C*03:04; PKHD1; ENSG00000170927; TAA
YPNNGSQL

SEQ ID NO: 64844 - protein, 10 aa, Homo sapiens
  misc_feature: Table A; Target 64844; HLA-B*07:02; PKHD1; ENSG00000170927; TAA
YPNNGSQLEI

SEQ ID NO: 64845 - protein, 10 aa, Homo sapiens
  misc_feature: Table A; Target 64845; HLA-B*35:03; PKHD1; ENSG00000170927; TAA
YPNNGSQLEI

SEQ ID NO: 64846 - protein, 10 aa, Homo sapiens
  misc_feature: Table A; Target 64846; HLA-B*51:01; PKHD1; ENSG00000170927; TAA
YPNNGSQLEI

SEQ ID NO: 64847 - protein, 10 aa, Homo sapiens
  misc_feature: Table A; Target 64847; HLA-B*56:01; PKHD1; ENSG00000170927; TAA
YPNNGSQLEI

SEQ ID NO: 64848 - protein, 11 aa, Homo sapiens
  misc_feature: Table A; Target 64848; HLA-B*51:01; PKHD1; ENSG00000170927; TAA
YPPSGVPGKLI

SEQ ID NO: 64849 - protein, 9 aa, Homo sapiens
  misc_feature: Table A; Target 64849; HLA-B*54:01; PKHD1; ENSG00000170927; TAA
YPVVSVTSG

SEQ ID NO: 64850 - protein, 9 aa, Homo sapiens
  misc_feature: Table A; Target 64850; HLA-B*56:01; PKHD1; ENSG00000170927; TAA
YPVVSVTSG

SEQ ID NO: 64851 - protein, 10 aa, Homo sapiens
  misc_feature: Table A; Target 64851; HLA-B*35:01; PKHD1; ENSG00000170927; TAA
YPVVSVTSGF

SEQ ID NO: 64852 - protein, 9 aa, Homo sapiens
  misc_feature: Table A; Target 64852; HLA-A*02:01; PKHD1; ENSG00000170927; TAA
YQLAGQNQL

SEQ ID NO: 64853 - protein, 9 aa, Homo sapiens
  misc_feature: Table A; Target 64853; HLA-A*30:01; PKHD1; ENSG00000170927; TAA
YQLAGQNQL

SEQ ID NO: 64854 - protein, 9 aa, Homo sapiens
  misc_feature: Table A; Target 64854; HLA-B*13:02; PKHD1; ENSG00000170927; TAA
YQLAGQNQL

SEQ ID NO: 64855 - protein, 9 aa, Homo sapiens
  misc_feature: Table A; Target 64855; HLA-B*27:05; PKHD1; ENSG00000170927; TAA
YQLAGQNQL

SEQ ID NO: 64856 - protein, 9 aa, Homo sapiens
  misc_feature: Table A; Target 64856; HLA-B*38:01; PKHD1; ENSG00000170927; TAA
YQLAGQNQL

SEQ ID NO: 64857 - protein, 9 aa, Homo sapiens
  misc_feature: Table A; Target 64857; HLA-B*39:01; PKHD1; ENSG00000170927; TAA
YQLAGQNQL

SEQ ID NO: 64858 - protein, 9 aa, Homo sapiens
  misc_feature: Table A; Target 64858; HLA-C*16:01; PKHD1; ENSG00000170927; TAA
YSAVLPRAF

SEQ ID NO: 64859 - protein, 11 aa, Homo sapiens
  misc_feature: Table A; Target 64859; HLA-A*01:01; PKHD1; ENSG00000170927; TAA
YSAVLPRAFTY

SEQ ID NO: 64860 - protein, 9 aa, Homo sapiens
  misc_feature: Table A; Target 64860; HLA-A*25:01; PKHD1; ENSG00000170927; TAA
YSAYPKNSW

SEQ ID NO: 64861 - protein, 9 aa, Homo sapiens
  misc_feature: Table A; Target 64861; HLA-A*32:01; PKHD1; ENSG00000170927; TAA
YSAYPKNSW

SEQ ID NO: 64862 - protein, 9 aa, Homo sapiens
  misc_feature: Table A; Target 64862; HLA-B*58:01; PKHD1; ENSG00000170927; TAA
YSAYPKNSW

SEQ ID NO: 64863 - protein, 9 aa, Homo sapiens
  misc_feature: Table A; Target 64863; HLA-C*05:01; PKHD1; ENSG00000170927; TAA
YSDDLDVCI

SEQ ID NO: 64864 - protein, 9 aa, Homo sapiens
  misc_feature: Table A; Target 64864; HLA-B*57:01; PKHD1; ENSG00000170927; TAA
YSHNFTENW

SEQ ID NO: 64865 - protein, 9 aa, Homo sapiens
  misc_feature: Table A; Target 64865; HLA-B*35:03; PKHD1; ENSG00000170927; TAA
YSIDGDINL

SEQ ID NO: 64866 - protein, 9 aa, Homo sapiens
  misc_feature: Table A; Target 64866; HLA-B*40:01; PKHD1; ENSG00000170927; TAA
YSIDGDINL

SEQ ID NO: 64867 - protein, 9 aa, Homo sapiens
  misc_feature: Table A; Target 64867; HLA-B*58:01; PKHD1; ENSG00000170927; TAA
YSIDGDINL

SEQ ID NO: 64868 - protein, 9 aa, Homo sapiens
  misc_feature: Table A; Target 64868; HLA-C*03:03; PKHD1; ENSG00000170927; TAA
YSIDGDINL

SEQ ID NO: 64869 - protein, 9 aa, Homo sapiens
  misc_feature: Table A; Target 64869; HLA-C*03:04; PKHD1; ENSG00000170927; TAA
YSIDGDINL

SEQ ID NO: 64870 - protein, 9 aa, Homo sapiens
  misc_feature: Table A; Target 64870; HLA-C*05:01; PKHD1; ENSG00000170927; TAA
YSIDGDINL

SEQ ID NO: 64871 - protein, 10 aa, Homo sapiens
  misc_feature: Table A; Target 64871; HLA-A*26:01; PKHD1; ENSG00000170927; TAA
YSIDGDINLM

SEQ ID NO: 64872 - protein, 8 aa, Homo sapiens
  misc_feature: Table A; Target 64872; HLA-C*05:01; PKHD1; ENSG00000170927; TAA
YTDLDVEV

SEQ ID NO: 64873 - protein, 9 aa, Homo sapiens
  misc_feature: Table A; Target 64873; HLA-A*01:01; PKHD1; ENSG00000170927; TAA
YTDLDVEVH

SEQ ID NO: 64874 - protein, 10 aa, Homo sapiens
  misc_feature: Table A; Target 64874; HLA-A*01:01; PKHD1; ENSG00000170927; TAA
YTDLDVEVHV

SEQ ID NO: 64875 - protein, 10 aa, Homo sapiens
  misc_feature: Table A; Target 64875; HLA-B*13:02; PKHD1; ENSG00000170927; TAA
YVFSAPQNSV

SEQ ID NO: 64876 - protein, 9 aa, Homo sapiens
  misc_feature: Table A; Target 64876; HLA-B*13:02; PKHD1; ENSG00000170927; TAA
YVSSLNPVI

SEQ ID NO: 64877 - protein, 10 aa, Homo sapiens
  misc_feature: Table A; Target 64877; HLA-A*24:02; PKHD1; ENSG00000170927; TAA
YYLEAEHHGI

SEQ ID NO: 64878 - protein, 8 aa, Homo sapiens
  misc_feature: Table A; Target 64878; HLA-A*32:01; PMEL; ENSG00000185664; TAA
AAIPLTSC

SEQ ID NO: 64879 - protein, 8 aa, Homo sapiens
  misc_feature: Table A; Target 64879; HLA-B*46:01; PMEL; ENSG00000185664; TAA
AAIPLTSC

SEQ ID NO: 64880 - protein, 8 aa, Homo sapiens
  misc_feature: Table A; Target 64880; HLA-B*54:01; PMEL; ENSG00000185664; TAA
AAIPLTSC

SEQ ID NO: 64881 - protein, 8 aa, Homo sapiens
  misc_feature: Table A; Target 64881; HLA-B*56:01; PMEL; ENSG00000185664; TAA
AAIPLTSC

SEQ ID NO: 64882 - protein, 8 aa, Homo sapiens
  misc_feature: Table A; Target 64882; HLA-B*58:01; PMEL; ENSG00000185664; TAA
AAIPLTSC

SEQ ID NO: 64883 - protein, 8 aa, Homo sapiens
  misc_feature: Table A; Target 64883; HLA-C*12:03; PMEL; ENSG00000185664; TAA
AAIPLTSC

SEQ ID NO: 64884 - protein, 9 aa, Homo sapiens
  misc_feature: Table A; Target 64884; HLA-A*31:01; PMEL; ENSG00000185664; TAA
AAIPLTSCG

SEQ ID NO: 64885 - protein, 9 aa, Homo sapiens
  misc_feature: Table A; Target 64885; HLA-B*13:02; PMEL; ENSG00000185664; TAA
AAIPLTSCG

SEQ ID NO: 64886 - protein, 9 aa, Homo sapiens
  misc_feature: Table A; Target 64886; HLA-B*27:05; PMEL; ENSG00000185664; TAA
AAIPLTSCG

SEQ ID NO: 64887 - protein, 9 aa, Homo sapiens
  misc_feature: Table A; Target 64887; HLA-B*40:02; PMEL; ENSG00000185664; TAA
AAIPLTSCG

SEQ ID NO: 64888 - protein, 9 aa, Homo sapiens
  misc_feature: Table A; Target 64888; HLA-B*46:01; PMEL; ENSG00000185664; TAA
AAIPLTSCG

SEQ ID NO: 64889 - protein, 9 aa, Homo sapiens
  misc_feature: Table A; Target 64889; HLA-B*58:01; PMEL; ENSG00000185664; TAA
AAIPLTSCG

SEQ ID NO: 64890 - protein, 9 aa, Homo sapiens
  misc_feature: Table A; Target 64890; HLA-C*01:02; PMEL; ENSG00000185664; TAA
AAIPLTSCG

SEQ ID NO: 64891 - protein, 9 aa, Homo sapiens
  misc_feature: Table A; Target 64891; HLA-C*02:02; PMEL; ENSG00000185664; TAA
AAIPLTSCG

SEQ ID NO: 64892 - protein, 9 aa, Homo sapiens
  misc_feature: Table A; Target 64892; HLA-C*03:03; PMEL; ENSG00000185664; TAA
AAIPLTSCG

SEQ ID NO: 64893 - protein, 9 aa, Homo sapiens
  misc_feature: Table A; Target 64893; HLA-C*03:04; PMEL; ENSG00000185664; TAA
AAIPLTSCG

SEQ ID NO: 64894 - protein, 9 aa, Homo sapiens
  misc_feature: Table A; Target 64894; HLA-C*04:01; PMEL; ENSG00000185664; TAA
AAIPLTSCG

SEQ ID NO: 64895 - protein, 9 aa, Homo sapiens
  misc_feature: Table A; Target 64895; HLA-C*06:02; PMEL; ENSG00000185664; TAA
AAIPLTSCG

SEQ ID NO: 64896 - protein, 9 aa, Homo sapiens
  misc_feature: Table A; Target 64896; HLA-C*07:01; PMEL; ENSG00000185664; TAA
AAIPLTSCG

SEQ ID NO: 64897 - protein, 9 aa, Homo sapiens
  misc_feature: Table A; Target 64897; HLA-C*07:02; PMEL; ENSG00000185664; TAA
AAIPLTSCG

SEQ ID NO: 64898 - protein, 9 aa, Homo sapiens
  misc_feature: Table A; Target 64898; HLA-C*12:03; PMEL; ENSG00000185664; TAA
AAIPLTSCG

SEQ ID NO: 64899 - protein, 9 aa, Homo sapiens
  misc_feature: Table A; Target 64899; HLA-C*16:02; PMEL; ENSG00000185664; TAA
AAIPLTSCG

SEQ ID NO: 64900 - protein, 9 aa, Homo sapiens
  misc_feature: Table A; Target 64900; HLA-C*16:04; PMEL; ENSG00000185664; TAA
AAIPLTSCG

SEQ ID NO: 64901 - protein, 9 aa, Homo sapiens
  misc_feature: Table A; Target 64901; HLA-A*23:01; PMEL; ENSG00000185664; TAA
AAQVTTTEW

SEQ ID NO: 64902 - protein, 9 aa, Homo sapiens
  misc_feature: Table A; Target 64902; HLA-A*24:02; PMEL; ENSG00000185664; TAA
AAQVTTTEW

SEQ ID NO: 64903 - protein, 9 aa, Homo sapiens
  misc_feature: Table A; Target 64903; HLA-A*25:01; PMEL; ENSG00000185664; TAA
AAQVTTTEW

SEQ ID NO: 64904 - protein, 9 aa, Homo sapiens
  misc_feature: Table A; Target 64904; HLA-A*31:01; PMEL; ENSG00000185664; TAA
AAQVTTTEW

SEQ ID NO: 64905 - protein, 9 aa, Homo sapiens
  misc_feature: Table A; Target 64905; HLA-A*32:01; PMEL; ENSG00000185664; TAA
AAQVTTTEW

SEQ ID NO: 64906 - protein, 9 aa, Homo sapiens
  misc_feature: Table A; Target 64906; HLA-A*33:01; PMEL; ENSG00000185664; TAA
AAQVTTTEW

SEQ ID NO: 64907 - protein, 9 aa, Homo sapiens
  misc_feature: Table A; Target 64907; HLA-B*15:01; PMEL; ENSG00000185664; TAA
AAQVTTTEW

SEQ ID NO: 64908 - protein, 9 aa, Homo sapiens
  misc_feature: Table A; Target 64908; HLA-B*15:03; PMEL; ENSG00000185664; TAA
AAQVTTTEW

SEQ ID NO: 64909 - protein, 9 aa, Homo sapiens
  misc_feature: Table A; Target 64909; HLA-B*27:02; PMEL; ENSG00000185664; TAA
AAQVTTTEW

SEQ ID NO: 64910 - protein, 9 aa, Homo sapiens
  misc_feature: Table A; Target 64910; HLA-B*27:05; PMEL; ENSG00000185664; TAA
AAQVTTTEW

SEQ ID NO: 64911 - protein, 9 aa, Homo sapiens
  misc_feature: Table A; Target 64911; HLA-B*35:01; PMEL; ENSG00000185664; TAA
AAQVTTTEW

SEQ ID NO: 64912 - protein, 9 aa, Homo sapiens
  misc_feature: Table A; Target 64912; HLA-B*44:02; PMEL; ENSG00000185664; TAA
AAQVTTTEW

SEQ ID NO: 64913 - protein, 9 aa, Homo sapiens
  misc_feature: Table A; Target 64913; HLA-B*44:03; PMEL; ENSG00000185664; TAA
AAQVTTTEW

SEQ ID NO: 64914 - protein, 9 aa, Homo sapiens
  misc_feature: Table A; Target 64914; HLA-B*46:01; PMEL; ENSG00000185664; TAA
AAQVTTTEW

SEQ ID NO: 64915 - protein, 9 aa, Homo sapiens
  misc_feature: Table A; Target 64915; HLA-B*57:01; PMEL; ENSG00000185664; TAA
AAQVTTTEW

SEQ ID NO: 64916 - protein, 9 aa, Homo sapiens
  misc_feature: Table A; Target 64916; HLA-B*58:01; PMEL; ENSG00000185664; TAA
AAQVTTTEW

SEQ ID NO: 64917 - protein, 9 aa, Homo sapiens
  misc_feature: Table A; Target 64917; HLA-C*01:02; PMEL; ENSG00000185664; TAA
AAQVTTTEW

SEQ ID NO: 64918 - protein, 9 aa, Homo sapiens
  misc_feature: Table A; Target 64918; HLA-C*02:02; PMEL; ENSG00000185664; TAA
AAQVTTTEW

SEQ ID NO: 64919 - protein, 9 aa, Homo sapiens
  misc_feature: Table A; Target 64919; HLA-C*03:03; PMEL; ENSG00000185664; TAA
AAQVTTTEW

SEQ ID NO: 64920 - protein, 9 aa, Homo sapiens
  misc_feature: Table A; Target 64920; HLA-C*03:04; PMEL; ENSG00000185664; TAA
AAQVTTTEW

SEQ ID NO: 64921 - protein, 9 aa, Homo sapiens
  misc_feature: Table A; Target 64921; HLA-C*04:01; PMEL; ENSG00000185664; TAA
AAQVTTTEW

SEQ ID NO: 64922 - protein, 9 aa, Homo sapiens
  misc_feature: Table A; Target 64922; HLA-C*05:01; PMEL; ENSG00000185664; TAA
AAQVTTTEW

SEQ ID NO: 64923 - protein, 9 aa, Homo sapiens
  misc_feature: Table A; Target 64923; HLA-C*07:04; PMEL; ENSG00000185664; TAA
AAQVTTTEW

SEQ ID NO: 64924 - protein, 9 aa, Homo sapiens
  misc_feature: Table A; Target 64924; HLA-C*07:06; PMEL; ENSG00000185664; TAA
AAQVTTTEW

SEQ ID NO: 64925 - protein, 9 aa, Homo sapiens
  misc_feature: Table A; Target 64925; HLA-C*12:03; PMEL; ENSG00000185664; TAA
AAQVTTTEW

SEQ ID NO: 64926 - protein, 9 aa, Homo sapiens
  misc_feature: Table A; Target 64926; HLA-C*14:02; PMEL; ENSG00000185664; TAA
AAQVTTTEW

SEQ ID NO: 64927 - protein, 9 aa, Homo sapiens
  misc_feature: Table A; Target 64927; HLA-C*16:01; PMEL; ENSG00000185664; TAA
AAQVTTTEW

SEQ ID NO: 64928 - protein, 9 aa, Homo sapiens
  misc_feature: Table A; Target 64928; HLA-C*16:02; PMEL; ENSG00000185664; TAA
AAQVTTTEW

SEQ ID NO: 64929 - protein, 9 aa, Homo sapiens
  misc_feature: Table A; Target 64929; HLA-C*16:04; PMEL; ENSG00000185664; TAA
AAQVTTTEW

SEQ ID NO: 64930 - protein, 9 aa, Homo sapiens
  misc_feature: Table A; Target 64930; HLA-B*13:02; PMEL; ENSG00000185664; TAA
ACQLVLHQI

SEQ ID NO: 64931 - protein, 8 aa, Homo sapiens
  misc_feature: Table A; Target 64931; HLA-A*30:01; PMEL; ENSG00000185664; TAA
ADTNSLAV

SEQ ID NO: 64932 - protein, 8 aa, Homo sapiens
  misc_feature: Table A; Target 64932; HLA-B*13:02; PMEL; ENSG00000185664; TAA
ADTNSLAV

SEQ ID NO: 64933 - protein, 8 aa, Homo sapiens
  misc_feature: Table A; Target 64933; HLA-B*37:01; PMEL; ENSG00000185664; TAA
ADTNSLAV

SEQ ID NO: 64934 - protein, 8 aa, Homo sapiens
  misc_feature: Table A; Target 64934; HLA-B*40:02; PMEL; ENSG00000185664; TAA
ADTNSLAV

SEQ ID NO: 64935 - protein, 9 aa, Homo sapiens
  misc_feature: Table A; Target 64935; HLA-A*30:01; PMEL; ENSG00000185664; TAA
ADTNSLAVV

SEQ ID NO: 64936 - protein, 9 aa, Homo sapiens
  misc_feature: Table A; Target 64936; HLA-A*32:01; PMEL; ENSG00000185664; TAA
ADTNSLAVV

SEQ ID NO: 64937 - protein, 9 aa, Homo sapiens
  misc_feature: Table A; Target 64937; HLA-B*13:02; PMEL; ENSG00000185664; TAA
ADTNSLAVV

SEQ ID NO: 64938 - protein, 9 aa, Homo sapiens
  misc_feature: Table A; Target 64938; HLA-B*37:01; PMEL; ENSG00000185664; TAA
ADTNSLAVV

SEQ ID NO: 64939 - protein, 9 aa, Homo sapiens
  misc_feature: Table A; Target 64939; HLA-B*39:01; PMEL; ENSG00000185664; TAA
ADTNSLAVV

SEQ ID NO: 64940 - protein, 9 aa, Homo sapiens
  misc_feature: Table A; Target 64940; HLA-B*40:02; PMEL; ENSG00000185664; TAA
ADTNSLAVV

SEQ ID NO: 64941 - protein, 9 aa, Homo sapiens
  misc_feature: Table A; Target 64941; HLA-B*49:01; PMEL; ENSG00000185664; TAA
ADTNSLAVV

SEQ ID NO: 64942 - protein, 9 aa, Homo sapiens
  misc_feature: Table A; Target 64942; HLA-C*04:01; PMEL; ENSG00000185664; TAA
ADTNSLAVV

SEQ ID NO: 64943 - protein, 9 aa, Homo sapiens
  misc_feature: Table A; Target 64943; HLA-C*06:02; PMEL; ENSG00000185664; TAA
ADTNSLAVV

SEQ ID NO: 64944 - protein, 9 aa, Homo sapiens
  misc_feature: Table A; Target 64944; HLA-C*07:02; PMEL; ENSG00000185664; TAA
ADTNSLAVV

SEQ ID NO: 64945 - protein, 9 aa, Homo sapiens
  misc_feature: Table A; Target 64945; HLA-C*16:02; PMEL; ENSG00000185664; TAA
ADTNSLAVV

SEQ ID NO: 64946 - protein, 9 aa, Homo sapiens
  misc_feature: Table A; Target 64946; HLA-A*23:01; PMEL; ENSG00000185664; TAA
AEADLSYTW

SEQ ID NO: 64947 - protein, 9 aa, Homo sapiens
  misc_feature: Table A; Target 64947; HLA-A*24:02; PMEL; ENSG00000185664; TAA
AEADLSYTW

SEQ ID NO: 64948 - protein, 9 aa, Homo sapiens
  misc_feature: Table A; Target 64948; HLA-A*25:01; PMEL; ENSG00000185664; TAA
AEADLSYTW

SEQ ID NO: 64949 - protein, 9 aa, Homo sapiens
  misc_feature: Table A; Target 64949; HLA-A*30:01; PMEL; ENSG00000185664; TAA
AEADLSYTW

SEQ ID NO: 64950 - protein, 9 aa, Homo sapiens
  misc_feature: Table A; Target 64950; HLA-A*32:01; PMEL; ENSG00000185664; TAA
AEADLSYTW

SEQ ID NO: 64951 - protein, 9 aa, Homo sapiens
  misc_feature: Table A; Target 64951; HLA-B*18:01; PMEL; ENSG00000185664; TAA
AEADLSYTW

SEQ ID NO: 64952 - protein, 9 aa, Homo sapiens
  misc_feature: Table A; Target 64952; HLA-B*27:02; PMEL; ENSG00000185664; TAA
AEADLSYTW

SEQ ID NO: 64953 - protein, 9 aa, Homo sapiens
  misc_feature: Table A; Target 64953; HLA-B*27:05; PMEL; ENSG00000185664; TAA
AEADLSYTW

SEQ ID NO: 64954 - protein, 9 aa, Homo sapiens
  misc_feature: Table A; Target 64954; HLA-B*37:01; PMEL; ENSG00000185664; TAA
AEADLSYTW

SEQ ID NO: 64955 - protein, 9 aa, Homo sapiens
  misc_feature: Table A; Target 64955; HLA-B*38:01; PMEL; ENSG00000185664; TAA
AEADLSYTW

SEQ ID NO: 64956 - protein, 9 aa, Homo sapiens
  misc_feature: Table A; Target 64956; HLA-B*40:01; PMEL; ENSG00000185664; TAA
AEADLSYTW

SEQ ID NO: 64957 - protein, 9 aa, Homo sapiens
  misc_feature: Table A; Target 64957; HLA-B*40:02; PMEL; ENSG00000185664; TAA
AEADLSYTW

SEQ ID NO: 64958 - protein, 9 aa, Homo sapiens
  misc_feature: Table A; Target 64958; HLA-B*44:02; PMEL; ENSG00000185664; TAA
AEADLSYTW

SEQ ID NO: 64959 - protein, 9 aa, Homo sapiens
  misc_feature: Table A; Target 64959; HLA-B*44:03; PMEL; ENSG00000185664; TAA
AEADLSYTW

SEQ ID NO: 64960 - protein, 9 aa, Homo sapiens
  misc_feature: Table A; Target 64960; HLA-B*49:01; PMEL; ENSG00000185664; TAA
AEADLSYTW

SEQ ID NO: 64961 - protein, 9 aa, Homo sapiens
  misc_feature: Table A; Target 64961; HLA-B*57:01; PMEL; ENSG00000185664; TAA
AEADLSYTW

SEQ ID NO: 64962 - protein, 9 aa, Homo sapiens
  misc_feature: Table A; Target 64962; HLA-B*58:01; PMEL; ENSG00000185664; TAA
AEADLSYTW

SEQ ID NO: 64963 - protein, 9 aa, Homo sapiens
  misc_feature: Table A; Target 64963; HLA-C*02:02; PMEL; ENSG00000185664; TAA
AEADLSYTW

SEQ ID NO: 64964 - protein, 9 aa, Homo sapiens
  misc_feature: Table A; Target 64964; HLA-C*16:04; PMEL; ENSG00000185664; TAA
AEADLSYTW

SEQ ID NO: 64965 - protein, 11 aa, Homo sapiens
  misc_feature: Table A; Target 64965; HLA-B*44:02; PMEL; ENSG00000185664; TAA
AEADLSYTWDF

SEQ ID NO: 64966 - protein, 11 aa, Homo sapiens
  misc_feature: Table A; Target 64966; HLA-B*44:03; PMEL; ENSG00000185664; TAA
AEADLSYTWDF

SEQ ID NO: 64967 - protein, 8 aa, Homo sapiens
  misc_feature: Table A; Target 64967; HLA-A*30:01; PMEL; ENSG00000185664; TAA
AEAPNTTA

SEQ ID NO: 64968 - protein, 8 aa, Homo sapiens
  misc_feature: Table A; Target 64968; HLA-B*49:01; PMEL; ENSG00000185664; TAA
AEAPNTTA

SEQ ID NO: 64969 - protein, 9 aa, Homo sapiens
  misc_feature: Table A; Target 64969; HLA-A*30:01; PMEL; ENSG00000185664; TAA
AEAPNTTAG

SEQ ID NO: 64970 - protein, 9 aa, Homo sapiens
  misc_feature: Table A; Target 64970; HLA-B*37:01; PMEL; ENSG00000185664; TAA
AEAPNTTAG

SEQ ID NO: 64971 - protein, 9 aa, Homo sapiens
  misc_feature: Table A; Target 64971; HLA-B*40:01; PMEL; ENSG00000185664; TAA
AEAPNTTAG

SEQ ID NO: 64972 - protein, 9 aa, Homo sapiens
  misc_feature: Table A; Target 64972; HLA-B*40:02; PMEL; ENSG00000185664; TAA
AEAPNTTAG

SEQ ID NO: 64973 - protein, 9 aa, Homo sapiens
  misc_feature: Table A; Target 64973; HLA-B*44:03; PMEL; ENSG00000185664; TAA
AEAPNTTAG

SEQ ID NO: 64974 - protein, 9 aa, Homo sapiens
  misc_feature: Table A; Target 64974; HLA-B*49:01; PMEL; ENSG00000185664; TAA
AEAPNTTAG

SEQ ID NO: 64975 - protein, 9 aa, Homo sapiens
  misc_feature: Table A; Target 64975; HLA-C*16:04; PMEL; ENSG00000185664; TAA
AEAPNTTAG

SEQ ID NO: 64976 - protein, 10 aa, Homo sapiens
  misc_feature: Table A; Target 64976; HLA-B*44:02; PMEL; ENSG00000185664; TAA
AEAPNTTAGQ

SEQ ID NO: 64977 - protein, 10 aa, Homo sapiens
  misc_feature: Table A; Target 64977; HLA-B*44:03; PMEL; ENSG00000185664; TAA
AEAPNTTAGQ

SEQ ID NO: 64978 - protein, 10 aa, Homo sapiens
  misc_feature: Table A; Target 64978; HLA-C*16:04; PMEL; ENSG00000185664; TAA
AEAPNTTAGQ

SEQ ID NO: 64979 - protein, 11 aa, Homo sapiens
  misc_feature: Table A; Target 64979; HLA-A*30:01; PMEL; ENSG00000185664; TAA
AEAPNTTAGQV

SEQ ID NO: 64980 - protein, 11 aa, Homo sapiens
  misc_feature: Table A; Target 64980; HLA-B*40:01; PMEL; ENSG00000185664; TAA
AEAPNTTAGQV

SEQ ID NO: 64981 - protein, 11 aa, Homo sapiens
  misc_feature: Table A; Target 64981; HLA-B*40:02; PMEL; ENSG00000185664; TAA
AEAPNTTAGQV

SEQ ID NO: 64982 - protein, 11 aa, Homo sapiens
  misc_feature: Table A; Target 64982; HLA-B*44:02; PMEL; ENSG00000185664; TAA
AEAPNTTAGQV

SEQ ID NO: 64983 - protein, 11 aa, Homo sapiens
  misc_feature: Table A; Target 64983; HLA-B*44:03; PMEL; ENSG00000185664; TAA
AEAPNTTAGQV

SEQ ID NO: 64984 - protein, 11 aa, Homo sapiens
  misc_feature: Table A; Target 64984; HLA-B*49:01; PMEL; ENSG00000185664; TAA
AEAPNTTAGQV

SEQ ID NO: 64985 - protein, 11 aa, Homo sapiens
  misc_feature: Table A; Target 64985; HLA-C*16:04; PMEL; ENSG00000185664; TAA
AEAPNTTAGQV

SEQ ID NO: 64986 - protein, 8 aa, Homo sapiens
  misc_feature: Table A; Target 64986; HLA-B*40:02; PMEL; ENSG00000185664; TAA
AEILQAVP

SEQ ID NO: 64987 - protein, 8 aa, Homo sapiens
  misc_feature: Table A; Target 64987; HLA-B*49:01; PMEL; ENSG00000185664; TAA
AEILQAVP

SEQ ID NO: 64988 - protein, 9 aa, Homo sapiens
  misc_feature: Table A; Target 64988; HLA-B*40:02; PMEL; ENSG00000185664; TAA
AEILQAVPS

SEQ ID NO: 64989 - protein, 9 aa, Homo sapiens
  misc_feature: Table A; Target 64989; HLA-B*49:01; PMEL; ENSG00000185664; TAA
AEILQAVPS

SEQ ID NO: 64990 - protein, 10 aa, Homo sapiens
  misc_feature: Table A; Target 64990; HLA-A*30:01; PMEL; ENSG00000185664; TAA
AEILQAVPSG

SEQ ID NO: 64991 - protein, 10 aa, Homo sapiens
  misc_feature: Table A; Target 64991; HLA-B*27:05; PMEL; ENSG00000185664; TAA
AEILQAVPSG

SEQ ID NO: 64992 - protein, 10 aa, Homo sapiens
  misc_feature: Table A; Target 64992; HLA-B*40:02; PMEL; ENSG00000185664; TAA
AEILQAVPSG

SEQ ID NO: 64993 - protein, 10 aa, Homo sapiens
  misc_feature: Table A; Target 64993; HLA-B*44:03; PMEL; ENSG00000185664; TAA
AEILQAVPSG

SEQ ID NO: 64994 - protein, 10 aa, Homo sapiens
  misc_feature: Table A; Target 64994; HLA-B*49:01; PMEL; ENSG00000185664; TAA
AEILQAVPSG

SEQ ID NO: 64995 - protein, 10 aa, Homo sapiens
  misc_feature: Table A; Target 64995; HLA-C*04:01; PMEL; ENSG00000185664; TAA
AEILQAVPSG

SEQ ID NO: 64996 - protein, 8 aa, Homo sapiens
  misc_feature: Table A; Target 64996; HLA-A*30:01; PMEL; ENSG00000185664; TAA
AEMSTPEA

SEQ ID NO: 64997 - protein, 8 aa, Homo sapiens
  misc_feature: Table A; Target 64997; HLA-B*13:02; PMEL; ENSG00000185664; TAA
AEMSTPEA

SEQ ID NO: 64998 - protein, 8 aa, Homo sapiens
  misc_feature: Table A; Target 64998; HLA-B*18:01; PMEL; ENSG00000185664; TAA
AEMSTPEA

SEQ ID NO: 64999 - protein, 8 aa, Homo sapiens
  misc_feature: Table A; Target 64999; HLA-B*27:05; PMEL; ENSG00000185664; TAA
AEMSTPEA

SEQ ID NO: 65000 - protein, 8 aa, Homo sapiens
  misc_feature: Table A; Target 65000; HLA-B*37:01; PMEL; ENSG00000185664; TAA
AEMSTPEA

SEQ ID NO: 65001 - protein, 8 aa, Homo sapiens
  misc_feature: Table A; Target 65001; HLA-B*40:02; PMEL; ENSG00000185664; TAA
AEMSTPEA

SEQ ID NO: 65002 - protein, 8 aa, Homo sapiens
  misc_feature: Table A; Target 65002; HLA-B*44:03; PMEL; ENSG00000185664; TAA
AEMSTPEA

SEQ ID NO: 65003 - protein, 8 aa, Homo sapiens
  misc_feature: Table A; Target 65003; HLA-B*49:01; PMEL; ENSG00000185664; TAA
AEMSTPEA

SEQ ID NO: 65004 - protein, 8 aa, Homo sapiens
  misc_feature: Table A; Target 65004; HLA-B*56:01; PMEL; ENSG00000185664; TAA
AEMSTPEA

SEQ ID NO: 65005 - protein, 8 aa, Homo sapiens
  misc_feature: Table A; Target 65005; HLA-C*16:04; PMEL; ENSG00000185664; TAA
AEMSTPEA

SEQ ID NO: 65006 - protein, 9 aa, Homo sapiens
  misc_feature: Table A; Target 65006; HLA-A*30:01; PMEL; ENSG00000185664; TAA
AEMSTPEAT

SEQ ID NO: 65007 - protein, 9 aa, Homo sapiens
  misc_feature: Table A; Target 65007; HLA-B*27:02; PMEL; ENSG00000185664; TAA
AEMSTPEAT

SEQ ID NO: 65008 - protein, 9 aa, Homo sapiens
  misc_feature: Table A; Target 65008; HLA-B*37:01; PMEL; ENSG00000185664; TAA
AEMSTPEAT

SEQ ID NO: 65009 - protein, 9 aa, Homo sapiens
  misc_feature: Table A; Target 65009; HLA-B*40:01; PMEL; ENSG00000185664; TAA
AEMSTPEAT

SEQ ID NO: 65010 - protein, 9 aa, Homo sapiens
  misc_feature: Table A; Target 65010; HLA-B*40:02; PMEL; ENSG00000185664; TAA
AEMSTPEAT

SEQ ID NO: 65011 - protein, 9 aa, Homo sapiens
  misc_feature: Table A; Target 65011; HLA-B*44:02; PMEL; ENSG00000185664; TAA
AEMSTPEAT

SEQ ID NO: 65012 - protein, 9 aa, Homo sapiens
  misc_feature: Table A; Target 65012; HLA-B*44:03; PMEL; ENSG00000185664; TAA
AEMSTPEAT

SEQ ID NO: 65013 - protein, 9 aa, Homo sapiens
  misc_feature: Table A; Target 65013; HLA-B*49:01; PMEL; ENSG00000185664; TAA
AEMSTPEAT

SEQ ID NO: 65014 - protein, 9 aa, Homo sapiens
  misc_feature: Table A; Target 65014; HLA-C*16:04; PMEL; ENSG00000185664; TAA
AEMSTPEAT

SEQ ID NO: 65015 - protein, 10 aa, Homo sapiens
  misc_feature: Table A; Target 65015; HLA-A*30:01; PMEL; ENSG00000185664; TAA
AEMSTPEATG

SEQ ID NO: 65016 - protein, 10 aa, Homo sapiens
  misc_feature: Table A; Target 65016; HLA-B*27:02; PMEL; ENSG00000185664; TAA
AEMSTPEATG

SEQ ID NO: 65017 - protein, 10 aa, Homo sapiens
  misc_feature: Table A; Target 65017; HLA-B*40:01; PMEL; ENSG00000185664; TAA
AEMSTPEATG

SEQ ID NO: 65018 - protein, 10 aa, Homo sapiens
  misc_feature: Table A; Target 65018; HLA-B*40:02; PMEL; ENSG00000185664; TAA
AEMSTPEATG

SEQ ID NO: 65019 - protein, 10 aa, Homo sapiens
  misc_feature: Table A; Target 65019; HLA-B*44:02; PMEL; ENSG00000185664; TAA
AEMSTPEATG

SEQ ID NO: 65020 - protein, 10 aa, Homo sapiens
  misc_feature: Table A; Target 65020; HLA-B*44:03; PMEL; ENSG00000185664; TAA
AEMSTPEATG

SEQ ID NO: 65021 - protein, 10 aa, Homo sapiens
  misc_feature: Table A; Target 65021; HLA-B*49:01; PMEL; ENSG00000185664; TAA
AEMSTPEATG

SEQ ID NO: 65022 - protein, 10 aa, Homo sapiens
  misc_feature: Table A; Target 65022; HLA-C*07:02; PMEL; ENSG00000185664; TAA
AEMSTPEATG

SEQ ID NO: 65023 - protein, 11 aa, Homo sapiens
  misc_feature: Table A; Target 65023; HLA-A*30:01; PMEL; ENSG00000185664; TAA
AEMSTPEATGM

SEQ ID NO: 65024 - protein, 11 aa, Homo sapiens
  misc_feature: Table A; Target 65024; HLA-B*27:02; PMEL; ENSG00000185664; TAA
AEMSTPEATGM

SEQ ID NO: 65025 - protein, 11 aa, Homo sapiens
  misc_feature: Table A; Target 65025; HLA-B*27:05; PMEL; ENSG00000185664; TAA
AEMSTPEATGM

SEQ ID NO: 65026 - protein, 11 aa, Homo sapiens
  misc_feature: Table A; Target 65026; HLA-B*37:01; PMEL; ENSG00000185664; TAA
AEMSTPEATGM

SEQ ID NO: 65027 - protein, 11 aa, Homo sapiens
  misc_feature: Table A; Target 65027; HLA-B*39:01; PMEL; ENSG00000185664; TAA
AEMSTPEATGM

SEQ ID NO: 65028 - protein, 11 aa, Homo sapiens
  misc_feature: Table A; Target 65028; HLA-B*40:01; PMEL; ENSG00000185664; TAA
AEMSTPEATGM

SEQ ID NO: 65029 - protein, 11 aa, Homo sapiens
  misc_feature: Table A; Target 65029; HLA-B*40:02; PMEL; ENSG00000185664; TAA
AEMSTPEATGM

SEQ ID NO: 65030 - protein, 11 aa, Homo sapiens
  misc_feature: Table A; Target 65030; HLA-B*44:02; PMEL; ENSG00000185664; TAA
AEMSTPEATGM

SEQ ID NO: 65031 - protein, 11 aa, Homo sapiens
  misc_feature: Table A; Target 65031; HLA-B*44:03; PMEL; ENSG00000185664; TAA
AEMSTPEATGM

SEQ ID NO: 65032 - protein, 11 aa, Homo sapiens
  misc_feature: Table A; Target 65032; HLA-B*49:01; PMEL; ENSG00000185664; TAA
AEMSTPEATGM

SEQ ID NO: 65033 - protein, 11 aa, Homo sapiens
  misc_feature: Table A; Target 65033; HLA-C*02:02; PMEL; ENSG00000185664; TAA
AEMSTPEATGM

SEQ ID NO: 65034 - protein, 11 aa, Homo sapiens
  misc_feature: Table A; Target 65034; HLA-C*04:01; PMEL; ENSG00000185664; TAA
AEMSTPEATGM

SEQ ID NO: 65035 - protein, 11 aa, Homo sapiens
  misc_feature: Table A; Target 65035; HLA-C*07:04; PMEL; ENSG00000185664; TAA
AEMSTPEATGM

SEQ ID NO: 65036 - protein, 11 aa, Homo sapiens
  misc_feature: Table A; Target 65036; HLA-C*16:04; PMEL; ENSG00000185664; TAA
AEMSTPEATGM

SEQ ID NO: 65037 - protein, 9 aa, Homo sapiens
  misc_feature: Table A; Target 65037; HLA-A*30:01; PMEL; ENSG00000185664; TAA
AEPSGTTSV

SEQ ID NO: 65038 - protein, 9 aa, Homo sapiens
  misc_feature: Table A; Target 65038; HLA-B*13:02; PMEL; ENSG00000185664; TAA
AEPSGTTSV

SEQ ID NO: 65039 - protein, 9 aa, Homo sapiens
  misc_feature: Table A; Target 65039; HLA-B*37:01; PMEL; ENSG00000185664; TAA
AEPSGTTSV

SEQ ID NO: 65040 - protein, 9 aa, Homo sapiens
  misc_feature: Table A; Target 65040; HLA-B*40:01; PMEL; ENSG00000185664; TAA
AEPSGTTSV

SEQ ID NO: 65041 - protein, 9 aa, Homo sapiens
  misc_feature: Table A; Target 65041; HLA-B*40:02; PMEL; ENSG00000185664; TAA
AEPSGTTSV

SEQ ID NO: 65042 - protein, 9 aa, Homo sapiens
  misc_feature: Table A; Target 65042; HLA-B*44:02; PMEL; ENSG00000185664; TAA
AEPSGTTSV

SEQ ID NO: 65043 - protein, 9 aa, Homo sapiens
  misc_feature: Table A; Target 65043; HLA-B*44:03; PMEL; ENSG00000185664; TAA
AEPSGTTSV

SEQ ID NO: 65044 - protein, 9 aa, Homo sapiens
  misc_feature: Table A; Target 65044; HLA-B*49:01; PMEL; ENSG00000185664; TAA
AEPSGTTSV

SEQ ID NO: 65045 - protein, 9 aa, Homo sapiens
  misc_feature: Table A; Target 65045; HLA-C*01:02; PMEL; ENSG00000185664; TAA
AEPSGTTSV

SEQ ID NO: 65046 - protein, 9 aa, Homo sapiens
  misc_feature: Table A; Target 65046; HLA-C*16:04; PMEL; ENSG00000185664; TAA
AEPSGTTSV

SEQ ID NO: 65047 - protein, 11 aa, Homo sapiens
  misc_feature: Table A; Target 65047; HLA-A*30:01; PMEL; ENSG00000185664; TAA
AEPSGTTSVQV

SEQ ID NO: 65048 - protein, 11 aa, Homo sapiens
  misc_feature: Table A; Target 65048; HLA-B*40:01; PMEL; ENSG00000185664; TAA
AEPSGTTSVQV

SEQ ID NO: 65049 - protein, 11 aa, Homo sapiens
  misc_feature: Table A; Target 65049; HLA-B*49:01; PMEL; ENSG00000185664; TAA
AEPSGTTSVQV

SEQ ID NO: 65050 - protein, 11 aa, Homo sapiens
  misc_feature: Table A; Target 65050; HLA-B*49:01; PMEL; ENSG00000185664; TAA
AESTGMTPEKV

SEQ ID NO: 65051 - protein, 8 aa, Homo sapiens
  misc_feature: Table A; Target 65051; HLA-A*30:01; PMEL; ENSG00000185664; TAA
AEVSIVVL

SEQ ID NO: 65052 - protein, 8 aa, Homo sapiens
  misc_feature: Table A; Target 65052; HLA-B*18:01; PMEL; ENSG00000185664; TAA
AEVSIVVL

SEQ ID NO: 65053 - protein, 8 aa, Homo sapiens
  misc_feature: Table A; Target 65053; HLA-B*37:01; PMEL; ENSG00000185664; TAA
AEVSIVVL

SEQ ID NO: 65054 - protein, 8 aa, Homo sapiens
  misc_feature: Table A; Target 65054; HLA-B*40:01; PMEL; ENSG00000185664; TAA
AEVSIVVL

SEQ ID NO: 65055 - protein, 8 aa, Homo sapiens
  misc_feature: Table A; Target 65055; HLA-B*40:02; PMEL; ENSG00000185664; TAA
AEVSIVVL

SEQ ID NO: 65056 - protein, 8 aa, Homo sapiens
  misc_feature: Table A; Target 65056; HLA-B*44:02; PMEL; ENSG00000185664; TAA
AEVSIVVL

SEQ ID NO: 65057 - protein, 8 aa, Homo sapiens
  misc_feature: Table A; Target 65057; HLA-B*44:03; PMEL; ENSG00000185664; TAA
AEVSIVVL

SEQ ID NO: 65058 - protein, 8 aa, Homo sapiens
  misc_feature: Table A; Target 65058; HLA-B*49:01; PMEL; ENSG00000185664; TAA
AEVSIVVL

SEQ ID NO: 65059 - protein, 9 aa, Homo sapiens
  misc_feature: Table A; Target 65059; HLA-B*49:01; PMEL; ENSG00000185664; TAA
AEVSIVVLS

SEQ ID NO: 65060 - protein, 10 aa, Homo sapiens
  misc_feature: Table A; Target 65060; HLA-A*30:01; PMEL; ENSG00000185664; TAA
AEVSIVVLSG

SEQ ID NO: 65061 - protein, 10 aa, Homo sapiens
  misc_feature: Table A; Target 65061; HLA-B*44:03; PMEL; ENSG00000185664; TAA
AEVSIVVLSG

SEQ ID NO: 65062 - protein, 10 aa, Homo sapiens
  misc_feature: Table A; Target 65062; HLA-B*49:01; PMEL; ENSG00000185664; TAA
AEVSIVVLSG

SEQ ID NO: 65063 - protein, 9 aa, Homo sapiens
  misc_feature: Table A; Target 65063; HLA-C*04:01; PMEL; ENSG00000185664; TAA
AFELTVSCQ

SEQ ID NO: 65064 - protein, 10 aa, Homo sapiens
  misc_feature: Table A; Target 65064; HLA-C*04:01; PMEL; ENSG00000185664; TAA
AFELTVSCQG

SEQ ID NO: 65065 - protein, 10 aa, Homo sapiens
  misc_feature: Table A; Target 65065; HLA-A*24:02; PMEL; ENSG00000185664; TAA
AFTITDQVPF

SEQ ID NO: 65066 - protein, 9 aa, Homo sapiens
  misc_feature: Table A; Target 65066; HLA-A*02:01; PMEL; ENSG00000185664; TAA
AGLGQVPLI

SEQ ID NO: 65067 - protein, 9 aa, Homo sapiens
  misc_feature: Table A; Target 65067; HLA-A*02:04; PMEL; ENSG00000185664; TAA
AGLGQVPLI

SEQ ID NO: 65068 - protein, 9 aa, Homo sapiens
  misc_feature: Table A; Target 65068; HLA-A*23:01; PMEL; ENSG00000185664; TAA
AGLGQVPLI

SEQ ID NO: 65069 - protein, 9 aa, Homo sapiens
  misc_feature: Table A; Target 65069; HLA-A*24:02; PMEL; ENSG00000185664; TAA
AGLGQVPLI

SEQ ID NO: 65070 - protein, 9 aa, Homo sapiens
  misc_feature: Table A; Target 65070; HLA-A*30:01; PMEL; ENSG00000185664; TAA
AGLGQVPLI

SEQ ID NO: 65071 - protein, 9 aa, Homo sapiens
  misc_feature: Table A; Target 65071; HLA-B*13:02; PMEL; ENSG00000185664; TAA
AGLGQVPLI

SEQ ID NO: 65072 - protein, 9 aa, Homo sapiens
  misc_feature: Table A; Target 65072; HLA-B*49:01; PMEL; ENSG00000185664; TAA
AGLGQVPLI

SEQ ID NO: 65073 - protein, 9 aa, Homo sapiens
  misc_feature: Table A; Target 65073; HLA-C*06:02; PMEL; ENSG00000185664; TAA
AGLGQVPLI

SEQ ID NO: 65074 - protein, 9 aa, Homo sapiens
  misc_feature: Table A; Target 65074; HLA-C*16:02; PMEL; ENSG00000185664; TAA
AGLGQVPLI

SEQ ID NO: 65075 - protein, 9 aa, Homo sapiens
  misc_feature: Table A; Target 65075; HLA-B*13:02; PMEL; ENSG00000185664; TAA
AGQVPTTEV

SEQ ID NO: 65076 - protein, 9 aa, Homo sapiens
  misc_feature: Table A; Target 65076; HLA-B*15:01; PMEL; ENSG00000185664; TAA
AGQVPTTEV

SEQ ID NO: 65077 - protein, 9 aa, Homo sapiens
  misc_feature: Table A; Target 65077; HLA-B*46:01; PMEL; ENSG00000185664; TAA
AGQVPTTEV

SEQ ID NO: 65078 - protein, 9 aa, Homo sapiens
  misc_feature: Table A; Target 65078; HLA-C*01:02; PMEL; ENSG00000185664; TAA
AGQVPTTEV

SEQ ID NO: 65079 - protein, 9 aa, Homo sapiens
  misc_feature: Table A; Target 65079; HLA-C*03:03; PMEL; ENSG00000185664; TAA
AGQVPTTEV

SEQ ID NO: 65080 - protein, 9 aa, Homo sapiens
  misc_feature: Table A; Target 65080; HLA-C*03:04; PMEL; ENSG00000185664; TAA
AGQVPTTEV

SEQ ID NO: 65081 - protein, 9 aa, Homo sapiens
  misc_feature: Table A; Target 65081; HLA-C*05:01; PMEL; ENSG00000185664; TAA
AGQVPTTEV

SEQ ID NO: 65082 - protein, 9 aa, Homo sapiens
  misc_feature: Table A; Target 65082; HLA-C*14:02; PMEL; ENSG00000185664; TAA
AGQVPTTEV

SEQ ID NO: 65083 - protein, 9 aa, Homo sapiens
  misc_feature: Table A; Target 65083; HLA-B*13:02; PMEL; ENSG00000185664; TAA
AHSSSAFTI

SEQ ID NO: 65084 - protein, 9 aa, Homo sapiens
  misc_feature: Table A; Target 65084; HLA-B*27:05; PMEL; ENSG00000185664; TAA
AHSSSAFTI

SEQ ID NO: 65085 - protein, 9 aa, Homo sapiens
  misc_feature: Table A; Target 65085; HLA-B*38:01; PMEL; ENSG00000185664; TAA
AHSSSAFTI

SEQ ID NO: 65086 - protein, 9 aa, Homo sapiens
  misc_feature: Table A; Target 65086; HLA-B*39:01; PMEL; ENSG00000185664; TAA
AHSSSAFTI

SEQ ID NO: 65087 - protein, 8 aa, Homo sapiens
  misc_feature: Table A; Target 65087; HLA-C*01:02; PMEL; ENSG00000185664; TAA
AIPLTSCG

SEQ ID NO: 65088 - protein, 9 aa, Homo sapiens
  misc_feature: Table A; Target 65088; HLA-A*02:07; PMEL; ENSG00000185664; TAA
ALDGGNKHF

SEQ ID NO: 65089 - protein, 9 aa, Homo sapiens
  misc_feature: Table A; Target 65089; HLA-A*32:01; PMEL; ENSG00000185664; TAA
ALDGGNKHF

SEQ ID NO: 65090 - protein, 9 aa, Homo sapiens
  misc_feature: Table A; Target 65090; HLA-B*55:01; PMEL; ENSG00000185664; TAA
ALDGGNKHF

SEQ ID NO: 65091 - protein, 9 aa, Homo sapiens
  misc_feature: Table A; Target 65091; HLA-C*04:01; PMEL; ENSG00000185664; TAA
ALDGGNKHF

SEQ ID NO: 65092 - protein, 9 aa, Homo sapiens
  misc_feature: Table A; Target 65092; HLA-C*05:01; PMEL; ENSG00000185664; TAA
ALDGGNKHF

SEQ ID NO: 65093 - protein, 9 aa, Homo sapiens
  misc_feature: Table A; Target 65093; HLA-C*16:02; PMEL; ENSG00000185664; TAA
ALDGGNKHF

SEQ ID NO: 65094 - protein, 10 aa, Homo sapiens
  misc_feature: Table A; Target 65094; HLA-A*01:01; PMEL; ENSG00000185664; TAA
ALDGGNKHFL

SEQ ID NO: 65095 - protein, 10 aa, Homo sapiens
  misc_feature: Table A; Target 65095; HLA-A*02:01; PMEL; ENSG00000185664; TAA
ALDGGNKHFL

SEQ ID NO: 65096 - protein, 10 aa, Homo sapiens
  misc_feature: Table A; Target 65096; HLA-A*02:03; PMEL; ENSG00000185664; TAA
ALDGGNKHFL

SEQ ID NO: 65097 - protein, 10 aa, Homo sapiens
  misc_feature: Table A; Target 65097; HLA-A*02:04; PMEL; ENSG00000185664; TAA
ALDGGNKHFL

SEQ ID NO: 65098 - protein, 10 aa, Homo sapiens
  misc_feature: Table A; Target 65098; HLA-A*02:07; PMEL; ENSG00000185664; TAA
ALDGGNKHFL

SEQ ID NO: 65099 - protein, 10 aa, Homo sapiens
  misc_feature: Table A; Target 65099; HLA-A*03:01; PMEL; ENSG00000185664; TAA
ALDGGNKHFL

SEQ ID NO: 65100 - protein, 10 aa, Homo sapiens
  misc_feature: Table A; Target 65100; HLA-A*03:02; PMEL; ENSG00000185664; TAA
ALDGGNKHFL

SEQ ID NO: 65101 - protein, 10 aa, Homo sapiens
  misc_feature: Table A; Target 65101; HLA-A*31:01; PMEL; ENSG00000185664; TAA
ALDGGNKHFL

SEQ ID NO: 65102 - protein, 10 aa, Homo sapiens
  misc_feature: Table A; Target 65102; HLA-B*38:01; PMEL; ENSG00000185664; TAA
ALDGGNKHFL

SEQ ID NO: 65103 - protein, 10 aa, Homo sapiens
  misc_feature: Table A; Target 65103; HLA-B*55:01; PMEL; ENSG00000185664; TAA
ALDGGNKHFL

SEQ ID NO: 65104 - protein, 10 aa, Homo sapiens
  misc_feature: Table A; Target 65104; HLA-C*16:02; PMEL; ENSG00000185664; TAA
ALDGGNKHFL

SEQ ID NO: 65105 - protein, 11 aa, Homo sapiens
  misc_feature: Table A; Target 65105; HLA-A*31:01; PMEL; ENSG00000185664; TAA
ALDGGNKHFLR

SEQ ID NO: 65106 - protein, 9 aa, Homo sapiens
  misc_feature: Table A; Target 65106; HLA-A*03:01; PMEL; ENSG00000185664; TAA
ALLAVGATK

SEQ ID NO: 65107 - protein, 9 aa, Homo sapiens
  misc_feature: Table A; Target 65107; HLA-A*03:02; PMEL; ENSG00000185664; TAA
ALLAVGATK

SEQ ID NO: 65108 - protein, 9 aa, Homo sapiens
  misc_feature: Table A; Target 65108; HLA-A*11:01; PMEL; ENSG00000185664; TAA
ALLAVGATK

SEQ ID NO: 65109 - protein, 9 aa, Homo sapiens
  misc_feature: Table A; Target 65109; HLA-A*30:02; PMEL; ENSG00000185664; TAA
ALLAVGATK

SEQ ID NO: 65110 - protein, 9 aa, Homo sapiens
  misc_feature: Table A; Target 65110; HLA-A*31:01; PMEL; ENSG00000185664; TAA
ALLAVGATK

SEQ ID NO: 65111 - protein, 9 aa, Homo sapiens
  misc_feature: Table A; Target 65111; HLA-A*32:01; PMEL; ENSG00000185664; TAA
ALLAVGATK

SEQ ID NO: 65112 - protein, 9 aa, Homo sapiens
  misc_feature: Table A; Target 65112; HLA-B*13:02; PMEL; ENSG00000185664; TAA
ALLAVGATK

SEQ ID NO: 65113 - protein, 9 aa, Homo sapiens
  misc_feature: Table A; Target 65113; HLA-B*27:02; PMEL; ENSG00000185664; TAA
ALLAVGATK

SEQ ID NO: 65114 - protein, 9 aa, Homo sapiens
  misc_feature: Table A; Target 65114; HLA-B*27:05; PMEL; ENSG00000185664; TAA
ALLAVGATK

SEQ ID NO: 65115 - protein, 9 aa, Homo sapiens
  misc_feature: Table A; Target 65115; HLA-C*07:06; PMEL; ENSG00000185664; TAA
ALLAVGATK

SEQ ID NO: 65116 - protein, 10 aa, Homo sapiens
  misc_feature: Table A; Target 65116; HLA-A*02:01; PMEL; ENSG00000185664; TAA
ALLAVGATKV

SEQ ID NO: 65117 - protein, 10 aa, Homo sapiens
  misc_feature: Table A; Target 65117; HLA-A*02:03; PMEL; ENSG00000185664; TAA
ALLAVGATKV

SEQ ID NO: 65118 - protein, 10 aa, Homo sapiens
  misc_feature: Table A; Target 65118; HLA-A*02:04; PMEL; ENSG00000185664; TAA
ALLAVGATKV

SEQ ID NO: 65119 - protein, 10 aa, Homo sapiens
  misc_feature: Table A; Target 65119; HLA-A*02:07; PMEL; ENSG00000185664; TAA
ALLAVGATKV

SEQ ID NO: 65120 - protein, 10 aa, Homo sapiens
  misc_feature: Table A; Target 65120; HLA-B*13:02; PMEL; ENSG00000185664; TAA
ALLAVGATKV

SEQ ID NO: 65121 - protein, 10 aa, Homo sapiens
  misc_feature: Table A; Target 65121; HLA-B*55:01; PMEL; ENSG00000185664; TAA
ALLAVGATKV

SEQ ID NO: 65122 - protein, 9 aa, Homo sapiens
  misc_feature: Table A; Target 65122; HLA-A*03:01; PMEL; ENSG00000185664; TAA
ALNFPGSQK

SEQ ID NO: 65123 - protein, 9 aa, Homo sapiens
  misc_feature: Table A; Target 65123; HLA-A*03:02; PMEL; ENSG00000185664; TAA
ALNFPGSQK

SEQ ID NO: 65124 - protein, 9 aa, Homo sapiens
  misc_feature: Table A; Target 65124; HLA-A*11:01; PMEL; ENSG00000185664; TAA
ALNFPGSQK

SEQ ID NO: 65125 - protein, 9 aa, Homo sapiens
  misc_feature: Table A; Target 65125; HLA-A*30:02; PMEL; ENSG00000185664; TAA
ALNFPGSQK

SEQ ID NO: 65126 - protein, 9 aa, Homo sapiens
  misc_feature: Table A; Target 65126; HLA-A*31:01; PMEL; ENSG00000185664; TAA
ALNFPGSQK

SEQ ID NO: 65127 - protein, 9 aa, Homo sapiens
  misc_feature: Table A; Target 65127; HLA-A*32:01; PMEL; ENSG00000185664; TAA
ALNFPGSQK

SEQ ID NO: 65128 - protein, 9 aa, Homo sapiens
  misc_feature: Table A; Target 65128; HLA-B*15:01; PMEL; ENSG00000185664; TAA
ALNFPGSQK

SEQ ID NO: 65129 - protein, 9 aa, Homo sapiens
  misc_feature: Table A; Target 65129; HLA-B*27:05; PMEL; ENSG00000185664; TAA
ALNFPGSQK

SEQ ID NO: 65130 - protein, 9 aa, Homo sapiens
  misc_feature: Table A; Target 65130; HLA-B*46:01; PMEL; ENSG00000185664; TAA
ALNFPGSQK

SEQ ID NO: 65131 - protein, 9 aa, Homo sapiens
  misc_feature: Table A; Target 65131; HLA-C*01:02; PMEL; ENSG00000185664; TAA
ALNFPGSQK

SEQ ID NO: 65132 - protein, 9 aa, Homo sapiens
  misc_feature: Table A; Target 65132; HLA-C*06:02; PMEL; ENSG00000185664; TAA
ALNFPGSQK

SEQ ID NO: 65133 - protein, 10 aa, Homo sapiens
  misc_feature: Table A; Target 65133; HLA-A*02:01; PMEL; ENSG00000185664; TAA
ALNFPGSQKV

SEQ ID NO: 65134 - protein, 10 aa, Homo sapiens
  misc_feature: Table A; Target 65134; HLA-A*02:03; PMEL; ENSG00000185664; TAA
ALNFPGSQKV

SEQ ID NO: 65135 - protein, 10 aa, Homo sapiens
  misc_feature: Table A; Target 65135; HLA-B*13:02; PMEL; ENSG00000185664; TAA
ALNFPGSQKV

SEQ ID NO: 65136 - protein, 10 aa, Homo sapiens
  misc_feature: Table A; Target 65136; HLA-A*01:01; PMEL; ENSG00000185664; TAA
ALQLHDPSGY

SEQ ID NO: 65137 - protein, 10 aa, Homo sapiens
  misc_feature: Table A; Target 65137; HLA-A*03:02; PMEL; ENSG00000185664; TAA
ALQLHDPSGY

SEQ ID NO: 65138 - protein, 10 aa, Homo sapiens
  misc_feature: Table A; Target 65138; HLA-A*30:02; PMEL; ENSG00000185664; TAA
ALQLHDPSGY

SEQ ID NO: 65139 - protein, 10 aa, Homo sapiens
  misc_feature: Table A; Target 65139; HLA-A*32:01; PMEL; ENSG00000185664; TAA
ALQLHDPSGY

SEQ ID NO: 65140 - protein, 10 aa, Homo sapiens
  misc_feature: Table A; Target 65140; HLA-B*15:01; PMEL; ENSG00000185664; TAA
ALQLHDPSGY

SEQ ID NO: 65141 - protein, 10 aa, Homo sapiens
  misc_feature: Table A; Target 65141; HLA-B*15:03; PMEL; ENSG00000185664; TAA
ALQLHDPSGY

SEQ ID NO: 65142 - protein, 10 aa, Homo sapiens
  misc_feature: Table A; Target 65142; HLA-C*07:01; PMEL; ENSG00000185664; TAA
ALQLHDPSGY

SEQ ID NO: 65143 - protein, 10 aa, Homo sapiens
  misc_feature: Table A; Target 65143; HLA-C*16:02; PMEL; ENSG00000185664; TAA
ALQLHDPSGY

SEQ ID NO: 65144 - protein, 8 aa, Homo sapiens
  misc_feature: Table A; Target 65144; HLA-A*23:01; PMEL; ENSG00000185664; TAA
ALVVTHTY

SEQ ID NO: 65145 - protein, 8 aa, Homo sapiens
  misc_feature: Table A; Target 65145; HLA-A*25:01; PMEL; ENSG00000185664; TAA
ALVVTHTY

SEQ ID NO: 65146 - protein, 8 aa, Homo sapiens
  misc_feature: Table A; Target 65146; HLA-A*29:02; PMEL; ENSG00000185664; TAA
ALVVTHTY

SEQ ID NO: 65147 - protein, 8 aa, Homo sapiens
  misc_feature: Table A; Target 65147; HLA-A*30:02; PMEL; ENSG00000185664; TAA
ALVVTHTY

SEQ ID NO: 65148 - protein, 8 aa, Homo sapiens
  misc_feature: Table A; Target 65148; HLA-A*32:01; PMEL; ENSG00000185664; TAA
ALVVTHTY

SEQ ID NO: 65149 - protein, 8 aa, Homo sapiens
  misc_feature: Table A; Target 65149; HLA-B*08:01; PMEL; ENSG00000185664; TAA
ALVVTHTY

SEQ ID NO: 65150 - protein, 8 aa, Homo sapiens
  misc_feature: Table A; Target 65150; HLA-B*15:01; PMEL; ENSG00000185664; TAA
ALVVTHTY

SEQ ID NO: 65151 - protein, 8 aa, Homo sapiens
  misc_feature: Table A; Target 65151; HLA-B*15:03; PMEL; ENSG00000185664; TAA
ALVVTHTY

SEQ ID NO: 65152 - protein, 8 aa, Homo sapiens
  misc_feature: Table A; Target 65152; HLA-B*18:01; PMEL; ENSG00000185664; TAA
ALVVTHTY

SEQ ID NO: 65153 - protein, 8 aa, Homo sapiens
  misc_feature: Table A; Target 65153; HLA-B*37:01; PMEL; ENSG00000185664; TAA
ALVVTHTY

SEQ ID NO: 65154 - protein, 8 aa, Homo sapiens
  misc_feature: Table A; Target 65154; HLA-B*39:01; PMEL; ENSG00000185664; TAA
ALVVTHTY

SEQ ID NO: 65155 - protein, 8 aa, Homo sapiens
  misc_feature: Table A; Target 65155; HLA-B*44:02; PMEL; ENSG00000185664; TAA
ALVVTHTY

SEQ ID NO: 65156 - protein, 8 aa, Homo sapiens
  misc_feature: Table A; Target 65156; HLA-B*44:03; PMEL; ENSG00000185664; TAA
ALVVTHTY

SEQ ID NO: 65157 - protein, 8 aa, Homo sapiens
  misc_feature: Table A; Target 65157; HLA-B*46:01; PMEL; ENSG00000185664; TAA
ALVVTHTY

SEQ ID NO: 65158 - protein, 8 aa, Homo sapiens
  misc_feature: Table A; Target 65158; HLA-B*58:01; PMEL; ENSG00000185664; TAA
ALVVTHTY

SEQ ID NO: 65159 - protein, 8 aa, Homo sapiens
  misc_feature: Table A; Target 65159; HLA-C*01:02; PMEL; ENSG00000185664; TAA
ALVVTHTY

SEQ ID NO: 65160 - protein, 8 aa, Homo sapiens
  misc_feature: Table A; Target 65160; HLA-C*02:02; PMEL; ENSG00000185664; TAA
ALVVTHTY

SEQ ID NO: 65161 - protein, 8 aa, Homo sapiens
  misc_feature: Table A; Target 65161; HLA-C*04:01; PMEL; ENSG00000185664; TAA
ALVVTHTY

SEQ ID NO: 65162 - protein, 8 aa, Homo sapiens
  misc_feature: Table A; Target 65162; HLA-C*07:01; PMEL; ENSG00000185664; TAA
ALVVTHTY

SEQ ID NO: 65163 - protein, 8 aa, Homo sapiens
  misc_feature: Table A; Target 65163; HLA-C*07:04; PMEL; ENSG00000185664; TAA
ALVVTHTY

SEQ ID NO: 65164 - protein, 8 aa, Homo sapiens
  misc_feature: Table A; Target 65164; HLA-C*14:02; PMEL; ENSG00000185664; TAA
ALVVTHTY

SEQ ID NO: 65165 - protein, 8 aa, Homo sapiens
  misc_feature: Table A; Target 65165; HLA-C*16:01; PMEL; ENSG00000185664; TAA
ALVVTHTY

SEQ ID NO: 65166 - protein, 8 aa, Homo sapiens
  misc_feature: Table A; Target 65166; HLA-C*16:02; PMEL; ENSG00000185664; TAA
ALVVTHTY

SEQ ID NO: 65167 - protein, 8 aa, Homo sapiens
  misc_feature: Table A; Target 65167; HLA-C*16:04; PMEL; ENSG00000185664; TAA
ALVVTHTY

SEQ ID NO: 65168 - protein, 9 aa, Homo sapiens
  misc_feature: Table A; Target 65168; HLA-A*02:01; PMEL; ENSG00000185664; TAA
ALVVTHTYL

SEQ ID NO: 65169 - protein, 9 aa, Homo sapiens
  misc_feature: Table A; Target 65169; HLA-A*02:03; PMEL; ENSG00000185664; TAA
ALVVTHTYL

SEQ ID NO: 65170 - protein, 9 aa, Homo sapiens
  misc_feature: Table A; Target 65170; HLA-A*02:04; PMEL; ENSG00000185664; TAA
ALVVTHTYL

SEQ ID NO: 65171 - protein, 9 aa, Homo sapiens
  misc_feature: Table A; Target 65171; HLA-A*02:07; PMEL; ENSG00000185664; TAA
ALVVTHTYL

SEQ ID NO: 65172 - protein, 9 aa, Homo sapiens
  misc_feature: Table A; Target 65172; HLA-A*23:01; PMEL; ENSG00000185664; TAA
ALVVTHTYL

SEQ ID NO: 65173 - protein, 9 aa, Homo sapiens
  misc_feature: Table A; Target 65173; HLA-A*24:02; PMEL; ENSG00000185664; TAA
ALVVTHTYL

SEQ ID NO: 65174 - protein, 9 aa, Homo sapiens
  misc_feature: Table A; Target 65174; HLA-B*13:02; PMEL; ENSG00000185664; TAA
ALVVTHTYL

SEQ ID NO: 65175 - protein, 9 aa, Homo sapiens
  misc_feature: Table A; Target 65175; HLA-B*15:03; PMEL; ENSG00000185664; TAA
ALVVTHTYL

SEQ ID NO: 65176 - protein, 9 aa, Homo sapiens
  misc_feature: Table A; Target 65176; HLA-B*37:01; PMEL; ENSG00000185664; TAA
ALVVTHTYL

SEQ ID NO: 65177 - protein, 9 aa, Homo sapiens
  misc_feature: Table A; Target 65177; HLA-B*55:01; PMEL; ENSG00000185664; TAA
ALVVTHTYL

SEQ ID NO: 65178 - protein, 9 aa, Homo sapiens
  misc_feature: Table A; Target 65178; HLA-C*01:02; PMEL; ENSG00000185664; TAA
ALVVTHTYL

SEQ ID NO: 65179 - protein, 9 aa, Homo sapiens
  misc_feature: Table A; Target 65179; HLA-C*02:02; PMEL; ENSG00000185664; TAA
ALVVTHTYL

SEQ ID NO: 65180 - protein, 9 aa, Homo sapiens
  misc_feature: Table A; Target 65180; HLA-C*04:01; PMEL; ENSG00000185664; TAA
ALVVTHTYL

SEQ ID NO: 65181 - protein, 8 aa, Homo sapiens
  misc_feature: Table A; Target 65181; HLA-A*23:01; PMEL; ENSG00000185664; TAA
AMLGTHTM

SEQ ID NO: 65182 - protein, 8 aa, Homo sapiens
  misc_feature: Table A; Target 65182; HLA-A*32:01; PMEL; ENSG00000185664; TAA
AMLGTHTM

SEQ ID NO: 65183 - protein, 8 aa, Homo sapiens
  misc_feature: Table A; Target 65183; HLA-B*08:01; PMEL; ENSG00000185664; TAA
AMLGTHTM

SEQ ID NO: 65184 - protein, 8 aa, Homo sapiens
  misc_feature: Table A; Target 65184; HLA-B*37:01; PMEL; ENSG00000185664; TAA
AMLGTHTM

SEQ ID NO: 65185 - protein, 8 aa, Homo sapiens
  misc_feature: Table A; Target 65185; HLA-C*04:01; PMEL; ENSG00000185664; TAA
AMLGTHTM

SEQ ID NO: 65186 - protein, 8 aa, Homo sapiens
  misc_feature: Table A; Target 65186; HLA-C*14:02; PMEL; ENSG00000185664; TAA
AMLGTHTM

SEQ ID NO: 65187 - protein, 10 aa, Homo sapiens
  misc_feature: Table A; Target 65187; HLA-A*02:01; PMEL; ENSG00000185664; TAA
AMLGTHTMEV

SEQ ID NO: 65188 - protein, 10 aa, Homo sapiens
  misc_feature: Table A; Target 65188; HLA-A*02:03; PMEL; ENSG00000185664; TAA
AMLGTHTMEV

SEQ ID NO: 65189 - protein, 10 aa, Homo sapiens
  misc_feature: Table A; Target 65189; HLA-A*02:04; PMEL; ENSG00000185664; TAA
AMLGTHTMEV

SEQ ID NO: 65190 - protein, 10 aa, Homo sapiens
  misc_feature: Table A; Target 65190; HLA-A*02:07; PMEL; ENSG00000185664; TAA
AMLGTHTMEV

SEQ ID NO: 65191 - protein, 10 aa, Homo sapiens
  misc_feature: Table A; Target 65191; HLA-A*03:01; PMEL; ENSG00000185664; TAA
AMLGTHTMEV

SEQ ID NO: 65192 - protein, 10 aa, Homo sapiens
  misc_feature: Table A; Target 65192; HLA-A*30:01; PMEL; ENSG00000185664; TAA
AMLGTHTMEV

SEQ ID NO: 65193 - protein, 10 aa, Homo sapiens
  misc_feature: Table A; Target 65193; HLA-B*13:02; PMEL; ENSG00000185664; TAA
AMLGTHTMEV

SEQ ID NO: 65194 - protein, 10 aa, Homo sapiens
  misc_feature: Table A; Target 65194; HLA-B*40:02; PMEL; ENSG00000185664; TAA
AMLGTHTMEV

SEQ ID NO: 65195 - protein, 10 aa, Homo sapiens
  misc_feature: Table A; Target 65195; HLA-B*46:01; PMEL; ENSG00000185664; TAA
AMLGTHTMEV

SEQ ID NO: 65196 - protein, 10 aa, Homo sapiens
  misc_feature: Table A; Target 65196; HLA-B*55:01; PMEL; ENSG00000185664; TAA
AMLGTHTMEV

SEQ ID NO: 65197 - protein, 10 aa, Homo sapiens
  misc_feature: Table A; Target 65197; HLA-B*56:01; PMEL; ENSG00000185664; TAA
AMLGTHTMEV

SEQ ID NO: 65198 - protein, 10 aa, Homo sapiens
  misc_feature: Table A; Target 65198; HLA-C*02:02; PMEL; ENSG00000185664; TAA
AMLGTHTMEV

SEQ ID NO: 65199 - protein, 10 aa, Homo sapiens
  misc_feature: Table A; Target 65199; HLA-C*04:01; PMEL; ENSG00000185664; TAA
AMLGTHTMEV

SEQ ID NO: 65200 - protein, 10 aa, Homo sapiens
  misc_feature: Table A; Target 65200; HLA-C*06:02; PMEL; ENSG00000185664; TAA
AMLGTHTMEV

SEQ ID NO: 65201 - protein, 10 aa, Homo sapiens
  misc_feature: Table A; Target 65201; HLA-C*07:02; PMEL; ENSG00000185664; TAA
AMLGTHTMEV

SEQ ID NO: 65202 - protein, 10 aa, Homo sapiens
  misc_feature: Table A; Target 65202; HLA-C*16:02; PMEL; ENSG00000185664; TAA
AMLGTHTMEV

SEQ ID NO: 65203 - protein, 9 aa, Homo sapiens
  misc_feature: Table A; Target 65203; HLA-A*03:02; PMEL; ENSG00000185664; TAA
ANASFSIAL

SEQ ID NO: 65204 - protein, 9 aa, Homo sapiens
  misc_feature: Table A; Target 65204; HLA-A*11:01; PMEL; ENSG00000185664; TAA
ANASFSIAL

SEQ ID NO: 65205 - protein, 9 aa, Homo sapiens
  misc_feature: Table A; Target 65205; HLA-A*23:01; PMEL; ENSG00000185664; TAA
ANASFSIAL

SEQ ID NO: 65206 - protein, 9 aa, Homo sapiens
  misc_feature: Table A; Target 65206; HLA-A*30:01; PMEL; ENSG00000185664; TAA
ANASFSIAL

SEQ ID NO: 65207 - protein, 9 aa, Homo sapiens
  misc_feature: Table A; Target 65207; HLA-A*68:02; PMEL; ENSG00000185664; TAA
ANASFSIAL

SEQ ID NO: 65208 - protein, 9 aa, Homo sapiens
  misc_feature: Table A; Target 65208; HLA-B*07:02; PMEL; ENSG00000185664; TAA
ANASFSIAL

SEQ ID NO: 65209 - protein, 9 aa, Homo sapiens
  misc_feature: Table A; Target 65209; HLA-B*27:05; PMEL; ENSG00000185664; TAA
ANASFSIAL

SEQ ID NO: 65210 - protein, 9 aa, Homo sapiens
  misc_feature: Table A; Target 65210; HLA-B*35:03; PMEL; ENSG00000185664; TAA
ANASFSIAL

SEQ ID NO: 65211 - protein, 9 aa, Homo sapiens
  misc_feature: Table A; Target 65211; HLA-B*39:01; PMEL; ENSG00000185664; TAA
ANASFSIAL

SEQ ID NO: 65212 - protein, 9 aa, Homo sapiens
  misc_feature: Table A; Target 65212; HLA-B*40:01; PMEL; ENSG00000185664; TAA
ANASFSIAL

SEQ ID NO: 65213 - protein, 9 aa, Homo sapiens
  misc_feature: Table A; Target 65213; HLA-B*55:01; PMEL; ENSG00000185664; TAA
ANASFSIAL

SEQ ID NO: 65214 - protein, 9 aa, Homo sapiens
  misc_feature: Table A; Target 65214; HLA-B*56:01; PMEL; ENSG00000185664; TAA
ANASFSIAL

SEQ ID NO: 65215 - protein, 9 aa, Homo sapiens
  misc_feature: Table A; Target 65215; HLA-C*01:02; PMEL; ENSG00000185664; TAA
ANASFSIAL

SEQ ID NO: 65216 - protein, 9 aa, Homo sapiens
  misc_feature: Table A; Target 65216; HLA-C*02:02; PMEL; ENSG00000185664; TAA
ANASFSIAL

SEQ ID NO: 65217 - protein, 9 aa, Homo sapiens
  misc_feature: Table A; Target 65217; HLA-C*03:03; PMEL; ENSG00000185664; TAA
ANASFSIAL

SEQ ID NO: 65218 - protein, 9 aa, Homo sapiens
  misc_feature: Table A; Target 65218; HLA-C*07:02; PMEL; ENSG00000185664; TAA
ANASFSIAL

SEQ ID NO: 65219 - protein, 9 aa, Homo sapiens
  misc_feature: Table A; Target 65219; HLA-C*12:03; PMEL; ENSG00000185664; TAA
ANASFSIAL

SEQ ID NO: 65220 - protein, 9 aa, Homo sapiens
  misc_feature: Table A; Target 65220; HLA-C*16:01; PMEL; ENSG00000185664; TAA
ANASFSIAL

SEQ ID NO: 65221 - protein, 9 aa, Homo sapiens
  misc_feature: Table A; Target 65221; HLA-C*16:02; PMEL; ENSG00000185664; TAA
ANASFSIAL

SEQ ID NO: 65222 - protein, 11 aa, Homo sapiens
  misc_feature: Table A; Target 65222; HLA-A*23:01; PMEL; ENSG00000185664; TAA
ANASFSIALNF

SEQ ID NO: 65223 - protein, 9 aa, Homo sapiens
  misc_feature: Table A; Target 65223; HLA-B*07:02; PMEL; ENSG00000185664; TAA
APNTTAGQV

SEQ ID NO: 65224 - protein, 9 aa, Homo sapiens
  misc_feature: Table A; Target 65224; HLA-B*56:01; PMEL; ENSG00000185664; TAA
APNTTAGQV

SEQ ID NO: 65225 - protein, 9 aa, Homo sapiens
  misc_feature: Table A; Target 65225; HLA-C*07:02; PMEL; ENSG00000185664; TAA
APNTTAGQV

SEQ ID NO: 65226 - protein, 10 aa, Homo sapiens
  misc_feature: Table A; Target 65226; HLA-B*07:02; PMEL; ENSG00000185664; TAA
APNTTAGQVP

SEQ ID NO: 65227 - protein, 10 aa, Homo sapiens
  misc_feature: Table A; Target 65227; HLA-B*56:01; PMEL; ENSG00000185664; TAA
APNTTAGQVP

SEQ ID NO: 65228 - protein, 10 aa, Homo sapiens
  misc_feature: Table A; Target 65228; HLA-C*04:01; PMEL; ENSG00000185664; TAA
APNTTAGQVP

SEQ ID NO: 65229 - protein, 11 aa, Homo sapiens
  misc_feature: Table A; Target 65229; HLA-B*56:01; PMEL; ENSG00000185664; TAA
APNTTAGQVPT

SEQ ID NO: 65230 - protein, 8 aa, Homo sapiens
  misc_feature: Table A; Target 65230; HLA-B*51:01; PMEL; ENSG00000185664; TAA
APVQMPTA

SEQ ID NO: 65231 - protein, 8 aa, Homo sapiens
  misc_feature: Table A; Target 65231; HLA-B*54:01; PMEL; ENSG00000185664; TAA
APVQMPTA

SEQ ID NO: 65232 - protein, 8 aa, Homo sapiens
  misc_feature: Table A; Target 65232; HLA-B*55:01; PMEL; ENSG00000185664; TAA
APVQMPTA

SEQ ID NO: 65233 - protein, 8 aa, Homo sapiens
  misc_feature: Table A; Target 65233; HLA-B*56:01; PMEL; ENSG00000185664; TAA
APVQMPTA

SEQ ID NO: 65234 - protein, 10 aa, Homo sapiens
  misc_feature: Table A; Target 65234; HLA-B*56:01; PMEL; ENSG00000185664; TAA
APVQMPTAES

SEQ ID NO: 65235 - protein, 8 aa, Homo sapiens
  misc_feature: Table A; Target 65235; HLA-A*23:01; PMEL; ENSG00000185664; TAA
AQVTTTEW

SEQ ID NO: 65236 - protein, 8 aa, Homo sapiens
  misc_feature: Table A; Target 65236; HLA-A*25:01; PMEL; ENSG00000185664; TAA
AQVTTTEW

SEQ ID NO: 65237 - protein, 8 aa, Homo sapiens
  misc_feature: Table A; Target 65237; HLA-A*32:01; PMEL; ENSG00000185664; TAA
AQVTTTEW

SEQ ID NO: 65238 - protein, 8 aa, Homo sapiens
  misc_feature: Table A; Target 65238; HLA-B*13:02; PMEL; ENSG00000185664; TAA
AQVTTTEW

SEQ ID NO: 65239 - protein, 8 aa, Homo sapiens
  misc_feature: Table A; Target 65239; HLA-B*15:01; PMEL; ENSG00000185664; TAA
AQVTTTEW

SEQ ID NO: 65240 - protein, 8 aa, Homo sapiens
  misc_feature: Table A; Target 65240; HLA-B*15:03; PMEL; ENSG00000185664; TAA
AQVTTTEW

SEQ ID NO: 65241 - protein, 8 aa, Homo sapiens
  misc_feature: Table A; Target 65241; HLA-B*27:02; PMEL; ENSG00000185664; TAA
AQVTTTEW

SEQ ID NO: 65242 - protein, 8 aa, Homo sapiens
  misc_feature: Table A; Target 65242; HLA-B*37:01; PMEL; ENSG00000185664; TAA
AQVTTTEW

SEQ ID NO: 65243 - protein, 8 aa, Homo sapiens
  misc_feature: Table A; Target 65243; HLA-B*44:02; PMEL; ENSG00000185664; TAA
AQVTTTEW

SEQ ID NO: 65244 - protein, 8 aa, Homo sapiens
  misc_feature: Table A; Target 65244; HLA-B*44:03; PMEL; ENSG00000185664; TAA
AQVTTTEW

SEQ ID NO: 65245 - protein, 8 aa, Homo sapiens
  misc_feature: Table A; Target 65245; HLA-B*46:01; PMEL; ENSG00000185664; TAA
AQVTTTEW

SEQ ID NO: 65246 - protein, 8 aa, Homo sapiens
  misc_feature: Table A; Target 65246; HLA-B*57:01; PMEL; ENSG00000185664; TAA
AQVTTTEW

SEQ ID NO: 65247 - protein, 8 aa, Homo sapiens
  misc_feature: Table A; Target 65247; HLA-B*58:01; PMEL; ENSG00000185664; TAA
AQVTTTEW

SEQ ID NO: 65248 - protein, 8 aa, Homo sapiens
  misc_feature: Table A; Target 65248; HLA-C*14:02; PMEL; ENSG00000185664; TAA
AQVTTTEW

SEQ ID NO: 65249 - protein, 8 aa, Homo sapiens
  misc_feature: Table A; Target 65249; HLA-C*16:01; PMEL; ENSG00000185664; TAA
AQVTTTEW

SEQ ID NO: 65250 - protein, 8 aa, Homo sapiens
  misc_feature: Table A; Target 65250; HLA-C*16:04; PMEL; ENSG00000185664; TAA
AQVTTTEW

SEQ ID NO: 65251 - protein, 9 aa, Homo sapiens
  misc_feature: Table A; Target 65251; HLA-B*13:02; PMEL; ENSG00000185664; TAA
AQVTTTEWV

SEQ ID NO: 65252 - protein, 9 aa, Homo sapiens
  misc_feature: Table A; Target 65252; HLA-A*30:01; PMEL; ENSG00000185664; TAA
AQVVLQAAI

SEQ ID NO: 65253 - protein, 9 aa, Homo sapiens
  misc_feature: Table A; Target 65253; HLA-B*13:02; PMEL; ENSG00000185664; TAA
AQVVLQAAI

SEQ ID NO: 65254 - protein, 9 aa, Homo sapiens
  misc_feature: Table A; Target 65254; HLA-B*15:01; PMEL; ENSG00000185664; TAA
AQVVLQAAI

SEQ ID NO: 65255 - protein, 9 aa, Homo sapiens
  misc_feature: Table A; Target 65255; HLA-B*15:03; PMEL; ENSG00000185664; TAA
AQVVLQAAI

SEQ ID NO: 65256 - protein, 9 aa, Homo sapiens
  misc_feature: Table A; Target 65256; HLA-B*27:02; PMEL; ENSG00000185664; TAA
AQVVLQAAI

SEQ ID NO: 65257 - protein, 9 aa, Homo sapiens
  misc_feature: Table A; Target 65257; HLA-B*27:05; PMEL; ENSG00000185664; TAA
AQVVLQAAI

SEQ ID NO: 65258 - protein, 9 aa, Homo sapiens
  misc_feature: Table A; Target 65258; HLA-B*39:01; PMEL; ENSG00000185664; TAA
AQVVLQAAI

SEQ ID NO: 65259 - protein, 9 aa, Homo sapiens
  misc_feature: Table A; Target 65259; HLA-B*44:02; PMEL; ENSG00000185664; TAA
AQVVLQAAI

SEQ ID NO: 65260 - protein, 9 aa, Homo sapiens
  misc_feature: Table A; Target 65260; HLA-B*58:01; PMEL; ENSG00000185664; TAA
AQVVLQAAI

SEQ ID NO: 65261 - protein, 9 aa, Homo sapiens
  misc_feature: Table A; Target 65261; HLA-C*02:02; PMEL; ENSG00000185664; TAA
AQVVLQAAI

SEQ ID NO: 65262 - protein, 9 aa, Homo sapiens
  misc_feature: Table A; Target 65262; HLA-C*06:02; PMEL; ENSG00000185664; TAA
AQVVLQAAI

SEQ ID NO: 65263 - protein, 9 aa, Homo sapiens
  misc_feature: Table A; Target 65263; HLA-C*16:04; PMEL; ENSG00000185664; TAA
AQVVLQAAI

SEQ ID NO: 65264 - protein, 9 aa, Homo sapiens
  misc_feature: Table A; Target 65264; HLA-A*01:01; PMEL; ENSG00000185664; TAA
ASFSIALNF

SEQ ID NO: 65265 - protein, 9 aa, Homo sapiens
  misc_feature: Table A; Target 65265; HLA-A*03:01; PMEL; ENSG00000185664; TAA
ASFSIALNF

SEQ ID NO: 65266 - protein, 9 aa, Homo sapiens
  misc_feature: Table A; Target 65266; HLA-A*03:02; PMEL; ENSG00000185664; TAA
ASFSIALNF

SEQ ID NO: 65267 - protein, 9 aa, Homo sapiens
  misc_feature: Table A; Target 65267; HLA-A*11:01; PMEL; ENSG00000185664; TAA
ASFSIALNF

SEQ ID NO: 65268 - protein, 9 aa, Homo sapiens
  misc_feature: Table A; Target 65268; HLA-A*23:01; PMEL; ENSG00000185664; TAA
ASFSIALNF

SEQ ID NO: 65269 - protein, 9 aa, Homo sapiens
  misc_feature: Table A; Target 65269; HLA-A*24:02; PMEL; ENSG00000185664; TAA
ASFSIALNF

SEQ ID NO: 65270 - protein, 9 aa, Homo sapiens
  misc_feature: Table A; Target 65270; HLA-A*26:01; PMEL; ENSG00000185664; TAA
ASFSIALNF

SEQ ID NO: 65271 - protein, 9 aa, Homo sapiens
  misc_feature: Table A; Target 65271; HLA-A*29:02; PMEL; ENSG00000185664; TAA
ASFSIALNF

SEQ ID NO: 65272 - protein, 9 aa, Homo sapiens
  misc_feature: Table A; Target 65272; HLA-A*30:02; PMEL; ENSG00000185664; TAA
ASFSIALNF

SEQ ID NO: 65273 - protein, 9 aa, Homo sapiens
  misc_feature: Table A; Target 65273; HLA-A*31:01; PMEL; ENSG00000185664; TAA
ASFSIALNF

SEQ ID NO: 65274 - protein, 9 aa, Homo sapiens
  misc_feature: Table A; Target 65274; HLA-A*32:01; PMEL; ENSG00000185664; TAA
ASFSIALNF

SEQ ID NO: 65275 - protein, 9 aa, Homo sapiens
  misc_feature: Table A; Target 65275; HLA-A*68:02; PMEL; ENSG00000185664; TAA
ASFSIALNF

SEQ ID NO: 65276 - protein, 9 aa, Homo sapiens
  misc_feature: Table A; Target 65276; HLA-B*13:02; PMEL; ENSG00000185664; TAA
ASFSIALNF

SEQ ID NO: 65277 - protein, 9 aa, Homo sapiens
  misc_feature: Table A; Target 65277; HLA-B*15:01; PMEL; ENSG00000185664; TAA
ASFSIALNF

SEQ ID NO: 65278 - protein, 9 aa, Homo sapiens
  misc_feature: Table A; Target 65278; HLA-B*15:03; PMEL; ENSG00000185664; TAA
ASFSIALNF

SEQ ID NO: 65279 - protein, 9 aa, Homo sapiens
  misc_feature: Table A; Target 65279; HLA-B*27:02; PMEL; ENSG00000185664; TAA
ASFSIALNF

SEQ ID NO: 65280 - protein, 9 aa, Homo sapiens
  misc_feature: Table A; Target 65280; HLA-B*40:02; PMEL; ENSG00000185664; TAA
ASFSIALNF

SEQ ID NO: 65281 - protein, 9 aa, Homo sapiens
  misc_feature: Table A; Target 65281; HLA-B*44:02; PMEL; ENSG00000185664; TAA
ASFSIALNF

SEQ ID NO: 65282 - protein, 9 aa, Homo sapiens
  misc_feature: Table A; Target 65282; HLA-B*44:03; PMEL; ENSG00000185664; TAA
ASFSIALNF

SEQ ID NO: 65283 - protein, 9 aa, Homo sapiens
  misc_feature: Table A; Target 65283; HLA-B*46:01; PMEL; ENSG00000185664; TAA
ASFSIALNF

SEQ ID NO: 65284 - protein, 9 aa, Homo sapiens
  misc_feature: Table A; Target 65284; HLA-B*57:01; PMEL; ENSG00000185664; TAA
ASFSIALNF

SEQ ID NO: 65285 - protein, 9 aa, Homo sapiens
  misc_feature: Table A; Target 65285; HLA-B*58:01; PMEL; ENSG00000185664; TAA
ASFSIALNF

SEQ ID NO: 65286 - protein, 9 aa, Homo sapiens
  misc_feature: Table A; Target 65286; HLA-C*02:02; PMEL; ENSG00000185664; TAA
ASFSIALNF

SEQ ID NO: 65287 - protein, 9 aa, Homo sapiens
  misc_feature: Table A; Target 65287; HLA-C*06:02; PMEL; ENSG00000185664; TAA
ASFSIALNF

SEQ ID NO: 65288 - protein, 9 aa, Homo sapiens
  misc_feature: Table A; Target 65288; HLA-C*12:03; PMEL; ENSG00000185664; TAA
ASFSIALNF

SEQ ID NO: 65289 - protein, 9 aa, Homo sapiens
  misc_feature: Table A; Target 65289; HLA-C*16:01; PMEL; ENSG00000185664; TAA
ASFSIALNF

SEQ ID NO: 65290 - protein, 9 aa, Homo sapiens
  misc_feature: Table A; Target 65290; HLA-C*16:04; PMEL; ENSG00000185664; TAA
ASFSIALNF

SEQ ID NO: 65291 - protein, 9 aa, Homo sapiens
  misc_feature: Table A; Target 65291; HLA-A*02:03; PMEL; ENSG00000185664; TAA
ATGMTPAEV

SEQ ID NO: 65292 - protein, 10 aa, Homo sapiens
  misc_feature: Table A; Target 65292; HLA-A*32:01; PMEL; ENSG00000185664; TAA
ATKVPRNQDW

SEQ ID NO: 65293 - protein, 10 aa, Homo sapiens
  misc_feature: Table A; Target 65293; HLA-B*44:02; PMEL; ENSG00000185664; TAA
ATKVPRNQDW

SEQ ID NO: 65294 - protein, 10 aa, Homo sapiens
  misc_feature: Table A; Target 65294; HLA-B*57:01; PMEL; ENSG00000185664; TAA
ATKVPRNQDW

SEQ ID NO: 65295 - protein, 10 aa, Homo sapiens
  misc_feature: Table A; Target 65295; HLA-B*58:01; PMEL; ENSG00000185664; TAA
ATKVPRNQDW

SEQ ID NO: 65296 - protein, 8 aa, Homo sapiens
  misc_feature: Table A; Target 65296; HLA-A*31:01; PMEL; ENSG00000185664; TAA
ATLRLVKR

SEQ ID NO: 65297 - protein, 8 aa, Homo sapiens
  misc_feature: Table A; Target 65297; HLA-A*33:01; PMEL; ENSG00000185664; TAA
ATLRLVKR

SEQ ID NO: 65298 - protein, 9 aa, Homo sapiens
  misc_feature: Table A; Target 65298; HLA-A*03:01; PMEL; ENSG00000185664; TAA
AVGATKVPR

SEQ ID NO: 65299 - protein, 9 aa, Homo sapiens
  misc_feature: Table A; Target 65299; HLA-A*03:02; PMEL; ENSG00000185664; TAA
AVGATKVPR

SEQ ID NO: 65300 - protein, 9 aa, Homo sapiens
  misc_feature: Table A; Target 65300; HLA-A*11:01; PMEL; ENSG00000185664; TAA
AVGATKVPR

SEQ ID NO: 65301 - protein, 9 aa, Homo sapiens
  misc_feature: Table A; Target 65301; HLA-A*31:01; PMEL; ENSG00000185664; TAA
AVGATKVPR

SEQ ID NO: 65302 - protein, 9 aa, Homo sapiens
  misc_feature: Table A; Target 65302; HLA-A*33:01; PMEL; ENSG00000185664; TAA
AVGATKVPR

SEQ ID NO: 65303 - protein, 9 aa, Homo sapiens
  misc_feature: Table A; Target 65303; HLA-A*33:03; PMEL; ENSG00000185664; TAA
AVGATKVPR

SEQ ID NO: 65304 - protein, 9 aa, Homo sapiens
  misc_feature: Table A; Target 65304; HLA-A*68:01; PMEL; ENSG00000185664; TAA
AVGATKVPR

SEQ ID NO: 65305 - protein, 9 aa, Homo sapiens
  misc_feature: Table A; Target 65305; HLA-C*07:06; PMEL; ENSG00000185664; TAA
AVGATKVPR

SEQ ID NO: 65306 - protein, 8 aa, Homo sapiens
  misc_feature: Table A; Target 65306; HLA-B*56:01; PMEL; ENSG00000185664; TAA
AVIGALLA

SEQ ID NO: 65307 - protein, 9 aa, Homo sapiens
  misc_feature: Table A; Target 65307; HLA-A*02:01; PMEL; ENSG00000185664; TAA
AVIGALLAV

SEQ ID NO: 65308 - protein, 9 aa, Homo sapiens
  misc_feature: Table A; Target 65308; HLA-A*02:03; PMEL; ENSG00000185664; TAA
AVIGALLAV

SEQ ID NO: 65309 - protein, 9 aa, Homo sapiens
  misc_feature: Table A; Target 65309; HLA-A*02:04; PMEL; ENSG00000185664; TAA
AVIGALLAV

SEQ ID NO: 65310 - protein, 9 aa, Homo sapiens
  misc_feature: Table A; Target 65310; HLA-A*02:07; PMEL; ENSG00000185664; TAA
AVIGALLAV

SEQ ID NO: 65311 - protein, 9 aa, Homo sapiens
  misc_feature: Table A; Target 65311; HLA-A*03:01; PMEL; ENSG00000185664; TAA
AVIGALLAV

SEQ ID NO: 65312 - protein, 9 aa, Homo sapiens
  misc_feature: Table A; Target 65312; HLA-A*11:01; PMEL; ENSG00000185664; TAA
AVIGALLAV

SEQ ID NO: 65313 - protein, 9 aa, Homo sapiens
  misc_feature: Table A; Target 65313; HLA-A*23:01; PMEL; ENSG00000185664; TAA
AVIGALLAV

SEQ ID NO: 65314 - protein, 9 aa, Homo sapiens
  misc_feature: Table A; Target 65314; HLA-A*25:01; PMEL; ENSG00000185664; TAA
AVIGALLAV

SEQ ID NO: 65315 - protein, 9 aa, Homo sapiens
  misc_feature: Table A; Target 65315; HLA-A*26:01; PMEL; ENSG00000185664; TAA
AVIGALLAV

SEQ ID NO: 65316 - protein, 9 aa, Homo sapiens
  misc_feature: Table A; Target 65316; HLA-A*29:02; PMEL; ENSG00000185664; TAA
AVIGALLAV

SEQ ID NO: 65317 - protein, 9 aa, Homo sapiens
  misc_feature: Table A; Target 65317; HLA-A*30:01; PMEL; ENSG00000185664; TAA
AVIGALLAV

SEQ ID NO: 65318 - protein, 9 aa, Homo sapiens
  misc_feature: Table A; Target 65318; HLA-A*31:01; PMEL; ENSG00000185664; TAA
AVIGALLAV

SEQ ID NO: 65319 - protein, 9 aa, Homo sapiens
  misc_feature: Table A; Target 65319; HLA-A*32:01; PMEL; ENSG00000185664; TAA
AVIGALLAV

SEQ ID NO: 65320 - protein, 9 aa, Homo sapiens
  misc_feature: Table A; Target 65320; HLA-A*68:02; PMEL; ENSG00000185664; TAA
AVIGALLAV

SEQ ID NO: 65321 - protein, 9 aa, Homo sapiens
  misc_feature: Table A; Target 65321; HLA-B*13:02; PMEL; ENSG00000185664; TAA
AVIGALLAV

SEQ ID NO: 65322 - protein, 9 aa, Homo sapiens
  misc_feature: Table A; Target 65322; HLA-B*15:01; PMEL; ENSG00000185664; TAA
AVIGALLAV

SEQ ID NO: 65323 - protein, 9 aa, Homo sapiens
  misc_feature: Table A; Target 65323; HLA-B*27:05; PMEL; ENSG00000185664; TAA
AVIGALLAV

SEQ ID NO: 65324 - protein, 9 aa, Homo sapiens
  misc_feature: Table A; Target 65324; HLA-B*40:02; PMEL; ENSG00000185664; TAA
AVIGALLAV

SEQ ID NO: 65325 - protein, 9 aa, Homo sapiens
  misc_feature: Table A; Target 65325; HLA-B*46:01; PMEL; ENSG00000185664; TAA
AVIGALLAV

SEQ ID NO: 65326 - protein, 9 aa, Homo sapiens
  misc_feature: Table A; Target 65326; HLA-B*49:01; PMEL; ENSG00000185664; TAA
AVIGALLAV

SEQ ID NO: 65327 - protein, 9 aa, Homo sapiens
  misc_feature: Table A; Target 65327; HLA-B*54:01; PMEL; ENSG00000185664; TAA
AVIGALLAV

SEQ ID NO: 65328 - protein, 9 aa, Homo sapiens
  misc_feature: Table A; Target 65328; HLA-B*55:01; PMEL; ENSG00000185664; TAA
AVIGALLAV

SEQ ID NO: 65329 - protein, 9 aa, Homo sapiens
  misc_feature: Table A; Target 65329; HLA-B*56:01; PMEL; ENSG00000185664; TAA
AVIGALLAV

SEQ ID NO: 65330 - protein, 9 aa, Homo sapiens
  misc_feature: Table A; Target 65330; HLA-B*58:01; PMEL; ENSG00000185664; TAA
AVIGALLAV

SEQ ID NO: 65331 - protein, 9 aa, Homo sapiens
  misc_feature: Table A; Target 65331; HLA-C*01:02; PMEL; ENSG00000185664; TAA
AVIGALLAV

SEQ ID NO: 65332 - protein, 9 aa, Homo sapiens
  misc_feature: Table A; Target 65332; HLA-C*02:02; PMEL; ENSG00000185664; TAA
AVIGALLAV

SEQ ID NO: 65333 - protein, 9 aa, Homo sapiens
  misc_feature: Table A; Target 65333; HLA-C*03:03; PMEL; ENSG00000185664; TAA
AVIGALLAV

SEQ ID NO: 65334 - protein, 9 aa, Homo sapiens
  misc_feature: Table A; Target 65334; HLA-C*03:04; PMEL; ENSG00000185664; TAA
AVIGALLAV

SEQ ID NO: 65335 - protein, 9 aa, Homo sapiens
  misc_feature: Table A; Target 65335; HLA-C*06:02; PMEL; ENSG00000185664; TAA
AVIGALLAV

SEQ ID NO: 65336 - protein, 9 aa, Homo sapiens
  misc_feature: Table A; Target 65336; HLA-C*14:02; PMEL; ENSG00000185664; TAA
AVIGALLAV

SEQ ID NO: 65337 - protein, 9 aa, Homo sapiens
  misc_feature: Table A; Target 65337; HLA-C*16:04; PMEL; ENSG00000185664; TAA
AVIGALLAV

SEQ ID NO: 65338 - protein, 10 aa, Homo sapiens
  misc_feature: Table A; Target 65338; HLA-B*56:01; PMEL; ENSG00000185664; TAA
AVIGALLAVG

SEQ ID NO: 65339 - protein, 10 aa, Homo sapiens
  misc_feature: Table A; Target 65339; HLA-C*04:01; PMEL; ENSG00000185664; TAA
AVIGALLAVG

SEQ ID NO: 65340 - protein, 10 aa, Homo sapiens
  misc_feature: Table A; Target 65340; HLA-C*06:02; PMEL; ENSG00000185664; TAA
AVIGALLAVG

SEQ ID NO: 65341 - protein, 11 aa, Homo sapiens
  misc_feature: Table A; Target 65341; HLA-B*56:01; PMEL; ENSG00000185664; TAA
AVIGALLAVGA

SEQ ID NO: 65342 - protein, 10 aa, Homo sapiens
  misc_feature: Table A; Target 65342; HLA-A*25:01; PMEL; ENSG00000185664; TAA
AVPSGEGDAF

SEQ ID NO: 65343 - protein, 10 aa, Homo sapiens
  misc_feature: Table A; Target 65343; HLA-A*26:01; PMEL; ENSG00000185664; TAA
AVPSGEGDAF

SEQ ID NO: 65344 - protein, 10 aa, Homo sapiens
  misc_feature: Table A; Target 65344; HLA-B*15:01; PMEL; ENSG00000185664; TAA
AVPSGEGDAF

SEQ ID NO: 65345 - protein, 10 aa, Homo sapiens
  misc_feature: Table A; Target 65345; HLA-B*27:05; PMEL; ENSG00000185664; TAA
AVPSGEGDAF

SEQ ID NO: 65346 - protein, 10 aa, Homo sapiens
  misc_feature: Table A; Target 65346; HLA-B*38:01; PMEL; ENSG00000185664; TAA
AVPSGEGDAF

SEQ ID NO: 65347 - protein, 10 aa, Homo sapiens
  misc_feature: Table A; Target 65347; HLA-B*39:01; PMEL; ENSG00000185664; TAA
AVPSGEGDAF

SEQ ID NO: 65348 - protein, 10 aa, Homo sapiens
  misc_feature: Table A; Target 65348; HLA-B*58:01; PMEL; ENSG00000185664; TAA
AVPSGEGDAF

SEQ ID NO: 65349 - protein, 10 aa, Homo sapiens
  misc_feature: Table A; Target 65349; HLA-C*01:02; PMEL; ENSG00000185664; TAA
AVPSGEGDAF

SEQ ID NO: 65350 - protein, 10 aa, Homo sapiens
  misc_feature: Table A; Target 65350; HLA-C*07:02; PMEL; ENSG00000185664; TAA
AVPSGEGDAF

SEQ ID NO: 65351 - protein, 10 aa, Homo sapiens
  misc_feature: Table A; Target 65351; HLA-C*14:02; PMEL; ENSG00000185664; TAA
AVPSGEGDAF

SEQ ID NO: 65352 - protein, 8 aa, Homo sapiens
  misc_feature: Table A; Target 65352; HLA-B*13:02; PMEL; ENSG00000185664; TAA
AVVLASLI

SEQ ID NO: 65353 - protein, 8 aa, Homo sapiens
  misc_feature: Table A; Target 65353; HLA-C*04:01; PMEL; ENSG00000185664; TAA
AVVLASLI

SEQ ID NO: 65354 - protein, 8 aa, Homo sapiens
  misc_feature: Table A; Target 65354; HLA-C*06:02; PMEL; ENSG00000185664; TAA
AVVLASLI

SEQ ID NO: 65355 - protein, 9 aa, Homo sapiens
  misc_feature: Table A; Target 65355; HLA-A*01:01; PMEL; ENSG00000185664; TAA
AVVLASLIY

SEQ ID NO: 65356 - protein, 9 aa, Homo sapiens
  misc_feature: Table A; Target 65356; HLA-A*26:01; PMEL; ENSG00000185664; TAA
AVVLASLIY

SEQ ID NO: 65357 - protein, 9 aa, Homo sapiens
  misc_feature: Table A; Target 65357; HLA-A*29:02; PMEL; ENSG00000185664; TAA
AVVLASLIY

SEQ ID NO: 65358 - protein, 9 aa, Homo sapiens
  misc_feature: Table A; Target 65358; HLA-A*30:02; PMEL; ENSG00000185664; TAA
AVVLASLIY

SEQ ID NO: 65359 - protein, 9 aa, Homo sapiens
  misc_feature: Table A; Target 65359; HLA-A*32:01; PMEL; ENSG00000185664; TAA
AVVLASLIY

SEQ ID NO: 65360 - protein, 9 aa, Homo sapiens
  misc_feature: Table A; Target 65360; HLA-B*15:01; PMEL; ENSG00000185664; TAA
AVVLASLIY

SEQ ID NO: 65361 - protein, 9 aa, Homo sapiens
  misc_feature: Table A; Target 65361; HLA-B*15:03; PMEL; ENSG00000185664; TAA
AVVLASLIY

SEQ ID NO: 65362 - protein, 9 aa, Homo sapiens
  misc_feature: Table A; Target 65362; HLA-B*35:01; PMEL; ENSG00000185664; TAA
AVVLASLIY

SEQ ID NO: 65363 - protein, 9 aa, Homo sapiens
  misc_feature: Table A; Target 65363; HLA-B*44:03; PMEL; ENSG00000185664; TAA
AVVLASLIY

SEQ ID NO: 65364 - protein, 9 aa, Homo sapiens
  misc_feature: Table A; Target 65364; HLA-B*46:01; PMEL; ENSG00000185664; TAA
AVVLASLIY

SEQ ID NO: 65365 - protein, 9 aa, Homo sapiens
  misc_feature: Table A; Target 65365; HLA-C*02:02; PMEL; ENSG00000185664; TAA
AVVLASLIY

SEQ ID NO: 65366 - protein, 9 aa, Homo sapiens
  misc_feature: Table A; Target 65366; HLA-C*07:01; PMEL; ENSG00000185664; TAA
AVVLASLIY

SEQ ID NO: 65367 - protein, 9 aa, Homo sapiens
  misc_feature: Table A; Target 65367; HLA-C*07:04; PMEL; ENSG00000185664; TAA
AVVLASLIY

SEQ ID NO: 65368 - protein, 9 aa, Homo sapiens
  misc_feature: Table A; Target 65368; HLA-C*16:01; PMEL; ENSG00000185664; TAA
AVVLASLIY

SEQ ID NO: 65369 - protein, 9 aa, Homo sapiens
  misc_feature: Table A; Target 65369; HLA-C*16:04; PMEL; ENSG00000185664; TAA
AVVLASLIY

SEQ ID NO: 65370 - protein, 10 aa, Homo sapiens
  misc_feature: Table A; Target 65370; HLA-A*03:01; PMEL; ENSG00000185664; TAA
AVVLASLIYR

SEQ ID NO: 65371 - protein, 10 aa, Homo sapiens
  misc_feature: Table A; Target 65371; HLA-A*11:01; PMEL; ENSG00000185664; TAA
AVVLASLIYR

SEQ ID NO: 65372 - protein, 10 aa, Homo sapiens
  misc_feature: Table A; Target 65372; HLA-A*31:01; PMEL; ENSG00000185664; TAA
AVVLASLIYR

SEQ ID NO: 65373 - protein, 10 aa, Homo sapiens
  misc_feature: Table A; Target 65373; HLA-A*33:03; PMEL; ENSG00000185664; TAA
AVVLASLIYR

SEQ ID NO: 65374 - protein, 10 aa, Homo sapiens
  misc_feature: Table A; Target 65374; HLA-A*68:01; PMEL; ENSG00000185664; TAA
AVVLASLIYR

SEQ ID NO: 65375 - protein, 10 aa, Homo sapiens
  misc_feature: Table A; Target 65375; HLA-B*57:01; PMEL; ENSG00000185664; TAA
AVVLASLIYR

SEQ ID NO: 65376 - protein, 10 aa, Homo sapiens
  misc_feature: Table A; Target 65376; HLA-C*07:06; PMEL; ENSG00000185664; TAA
AVVLASLIYR

SEQ ID NO: 65377 - protein, 11 aa, Homo sapiens
  misc_feature: Table A; Target 65377; HLA-A*31:01; PMEL; ENSG00000185664; TAA
AVVLASLIYRR

SEQ ID NO: 65378 - protein, 8 aa, Homo sapiens
  misc_feature: Table A; Target 65378; HLA-A*23:01; PMEL; ENSG00000185664; TAA
AVVSTQLI

SEQ ID NO: 65379 - protein, 8 aa, Homo sapiens
  misc_feature: Table A; Target 65379; HLA-B*13:02; PMEL; ENSG00000185664; TAA
AVVSTQLI

SEQ ID NO: 65380 - protein, 9 aa, Homo sapiens
  misc_feature: Table A; Target 65380; HLA-A*26:01; PMEL; ENSG00000185664; TAA
AVVSTQLIM

SEQ ID NO: 65381 - protein, 9 aa, Homo sapiens
  misc_feature: Table A; Target 65381; HLA-A*29:02; PMEL; ENSG00000185664; TAA
AVVSTQLIM

SEQ ID NO: 65382 - protein, 9 aa, Homo sapiens
  misc_feature: Table A; Target 65382; HLA-B*13:02; PMEL; ENSG00000185664; TAA
AVVSTQLIM

SEQ ID NO: 65383 - protein, 9 aa, Homo sapiens
  misc_feature: Table A; Target 65383; HLA-B*15:01; PMEL; ENSG00000185664; TAA
AVVSTQLIM

SEQ ID NO: 65384 - protein, 9 aa, Homo sapiens
  misc_feature: Table A; Target 65384; HLA-B*15:03; PMEL; ENSG00000185664; TAA
AVVSTQLIM

SEQ ID NO: 65385 - protein, 9 aa, Homo sapiens
  misc_feature: Table A; Target 65385; HLA-B*35:01; PMEL; ENSG00000185664; TAA
AVVSTQLIM

SEQ ID NO: 65386 - protein, 9 aa, Homo sapiens
  misc_feature: Table A; Target 65386; HLA-B*46:01; PMEL; ENSG00000185664; TAA
AVVSTQLIM

SEQ ID NO: 65387 - protein, 9 aa, Homo sapiens
  misc_feature: Table A; Target 65387; HLA-B*58:01; PMEL; ENSG00000185664; TAA
AVVSTQLIM

SEQ ID NO: 65388 - protein, 9 aa, Homo sapiens
  misc_feature: Table A; Target 65388; HLA-C*01:02; PMEL; ENSG00000185664; TAA
AVVSTQLIM

SEQ ID NO: 65389 - protein, 9 aa, Homo sapiens
  misc_feature: Table A; Target 65389; HLA-C*02:02; PMEL; ENSG00000185664; TAA
AVVSTQLIM

SEQ ID NO: 65390 - protein, 9 aa, Homo sapiens
  misc_feature: Table A; Target 65390; HLA-C*03:03; PMEL; ENSG00000185664; TAA
AVVSTQLIM

SEQ ID NO: 65391 - protein, 9 aa, Homo sapiens
  misc_feature: Table A; Target 65391; HLA-C*03:04; PMEL; ENSG00000185664; TAA
AVVSTQLIM

SEQ ID NO: 65392 - protein, 9 aa, Homo sapiens
  misc_feature: Table A; Target 65392; HLA-C*07:04; PMEL; ENSG00000185664; TAA
AVVSTQLIM

SEQ ID NO: 65393 - protein, 9 aa, Homo sapiens
  misc_feature: Table A; Target 65393; HLA-C*16:01; PMEL; ENSG00000185664; TAA
AVVSTQLIM

SEQ ID NO: 65394 - protein, 9 aa, Homo sapiens
  misc_feature: Table A; Target 65394; HLA-C*16:04; PMEL; ENSG00000185664; TAA
AVVSTQLIM

SEQ ID NO: 65395 - protein, 11 aa, Homo sapiens
  misc_feature: Table A; Target 65395; HLA-A*31:01; PMEL; ENSG00000185664; TAA
AVVSTQLIMPG

SEQ ID NO: 65396 - protein, 11 aa, Homo sapiens
  misc_feature: Table A; Target 65396; HLA-C*04:01; PMEL; ENSG00000185664; TAA
AVVSTQLIMPG

SEQ ID NO: 65397 - protein, 9 aa, Homo sapiens
  misc_feature: Table A; Target 65397; HLA-B*07:02; PMEL; ENSG00000185664; TAA
CPIGENSPL

SEQ ID NO: 65398 - protein, 9 aa, Homo sapiens
  misc_feature: Table A; Target 65398; HLA-B*35:01; PMEL; ENSG00000185664; TAA
CPIGENSPL

SEQ ID NO: 65399 - protein, 9 aa, Homo sapiens
  misc_feature: Table A; Target 65399; HLA-B*35:03; PMEL; ENSG00000185664; TAA
CPIGENSPL

SEQ ID NO: 65400 - protein, 9 aa, Homo sapiens
  misc_feature: Table A; Target 65400; HLA-B*55:01; PMEL; ENSG00000185664; TAA
CPIGENSPL

SEQ ID NO: 65401 - protein, 9 aa, Homo sapiens
  misc_feature: Table A; Target 65401; HLA-B*56:01; PMEL; ENSG00000185664; TAA
CPIGENSPL

SEQ ID NO: 65402 - protein, 9 aa, Homo sapiens
  misc_feature: Table A; Target 65402; HLA-C*03:03; PMEL; ENSG00000185664; TAA
CPIGENSPL

SEQ ID NO: 65403 - protein, 9 aa, Homo sapiens
  misc_feature: Table A; Target 65403; HLA-C*07:02; PMEL; ENSG00000185664; TAA
CPIGENSPL

SEQ ID NO: 65404 - protein, 10 aa, Homo sapiens
  misc_feature: Table A; Target 65404; HLA-B*07:02; PMEL; ENSG00000185664; TAA
CPIGENSPLL

SEQ ID NO: 65405 - protein, 10 aa, Homo sapiens
  misc_feature: Table A; Target 65405; HLA-B*35:01; PMEL; ENSG00000185664; TAA
CPIGENSPLL

SEQ ID NO: 65406 - protein, 10 aa, Homo sapiens
  misc_feature: Table A; Target 65406; HLA-B*35:03; PMEL; ENSG00000185664; TAA
CPIGENSPLL

SEQ ID NO: 65407 - protein, 10 aa, Homo sapiens
  misc_feature: Table A; Target 65407; HLA-B*38:01; PMEL; ENSG00000185664; TAA
CPIGENSPLL

SEQ ID NO: 65408 - protein, 10 aa, Homo sapiens
  misc_feature: Table A; Target 65408; HLA-B*55:01; PMEL; ENSG00000185664; TAA
CPIGENSPLL

SEQ ID NO: 65409 - protein, 10 aa, Homo sapiens
  misc_feature: Table A; Target 65409; HLA-B*56:01; PMEL; ENSG00000185664; TAA
CPIGENSPLL

SEQ ID NO: 65410 - protein, 10 aa, Homo sapiens
  misc_feature: Table A; Target 65410; HLA-C*07:02; PMEL; ENSG00000185664; TAA
CPIGENSPLL

SEQ ID NO: 65411 - protein, 8 aa, Homo sapiens
  misc_feature: Table A; Target 65411; HLA-B*13:02; PMEL; ENSG00000185664; TAA
CQLVLHQI

SEQ ID NO: 65412 - protein, 9 aa, Homo sapiens
  misc_feature: Table A; Target 65412; HLA-C*07:04; PMEL; ENSG00000185664; TAA
CQPVLPSPA

SEQ ID NO: 65413 - protein, 8 aa, Homo sapiens
  misc_feature: Table A; Target 65413; HLA-B*51:01; PMEL; ENSG00000185664; TAA
DAFELTVS

SEQ ID NO: 65414 - protein, 9 aa, Homo sapiens
  misc_feature: Table A; Target 65414; HLA-A*25:01; PMEL; ENSG00000185664; TAA
DAFELTVSC

SEQ ID NO: 65415 - protein, 9 aa, Homo sapiens
  misc_feature: Table A; Target 65415; HLA-A*26:01; PMEL; ENSG00000185664; TAA
DAFELTVSC

SEQ ID NO: 65416 - protein, 9 aa, Homo sapiens
  misc_feature: Table A; Target 65416; HLA-A*68:01; PMEL; ENSG00000185664; TAA
DAFELTVSC

SEQ ID NO: 65417 - protein, 9 aa, Homo sapiens
  misc_feature: Table A; Target 65417; HLA-A*68:02; PMEL; ENSG00000185664; TAA
DAFELTVSC

SEQ ID NO: 65418 - protein, 9 aa, Homo sapiens
  misc_feature: Table A; Target 65418; HLA-B*18:01; PMEL; ENSG00000185664; TAA
DAFELTVSC

SEQ ID NO: 65419 - protein, 9 aa, Homo sapiens
  misc_feature: Table A; Target 65419; HLA-B*35:01; PMEL; ENSG00000185664; TAA
DAFELTVSC

SEQ ID NO: 65420 - protein, 9 aa, Homo sapiens
  misc_feature: Table A; Target 65420; HLA-B*35:03; PMEL; ENSG00000185664; TAA
DAFELTVSC

SEQ ID NO: 65421 - protein, 9 aa, Homo sapiens
  misc_feature: Table A; Target 65421; HLA-B*39:01; PMEL; ENSG00000185664; TAA
DAFELTVSC

SEQ ID NO: 65422 - protein, 9 aa, Homo sapiens
  misc_feature: Table A; Target 65422; HLA-B*40:02; PMEL; ENSG00000185664; TAA
DAFELTVSC

SEQ ID NO: 65423 - protein, 9 aa, Homo sapiens
  misc_feature: Table A; Target 65423; HLA-B*51:01; PMEL; ENSG00000185664; TAA
DAFELTVSC

SEQ ID NO: 65424 - protein, 9 aa, Homo sapiens
  misc_feature: Table A; Target 65424; HLA-B*54:01; PMEL; ENSG00000185664; TAA
DAFELTVSC

SEQ ID NO: 65425 - protein, 9 aa, Homo sapiens
  misc_feature: Table A; Target 65425; HLA-B*55:01; PMEL; ENSG00000185664; TAA
DAFELTVSC

SEQ ID NO: 65426 - protein, 9 aa, Homo sapiens
  misc_feature: Table A; Target 65426; HLA-B*56:01; PMEL; ENSG00000185664; TAA
DAFELTVSC

SEQ ID NO: 65427 - protein, 9 aa, Homo sapiens
  misc_feature: Table A; Target 65427; HLA-C*02:02; PMEL; ENSG00000185664; TAA
DAFELTVSC

SEQ ID NO: 65428 - protein, 9 aa, Homo sapiens
  misc_feature: Table A; Target 65428; HLA-C*07:06; PMEL; ENSG00000185664; TAA
DAFELTVSC

SEQ ID NO: 65429 - protein, 9 aa, Homo sapiens
  misc_feature: Table A; Target 65429; HLA-C*12:03; PMEL; ENSG00000185664; TAA
DAFELTVSC

SEQ ID NO: 65430 - protein, 9 aa, Homo sapiens
  misc_feature: Table A; Target 65430; HLA-C*16:04; PMEL; ENSG00000185664; TAA
DAFELTVSC

SEQ ID NO: 65431 - protein, 10 aa, Homo sapiens
  misc_feature: Table A; Target 65431; HLA-A*26:01; PMEL; ENSG00000185664; TAA
DAFELTVSCQ

SEQ ID NO: 65432 - protein, 9 aa, Homo sapiens
  misc_feature: Table A; Target 65432; HLA-C*12:03; PMEL; ENSG00000185664; TAA
DASSIMSTE

SEQ ID NO: 65433 - protein, 10 aa, Homo sapiens
  misc_feature: Table A; Target 65433; HLA-C*07:01; PMEL; ENSG00000185664; TAA
DCWRGGQVSL

SEQ ID NO: 65434 - protein, 9 aa, Homo sapiens
  misc_feature: Table A; Target 65434; HLA-C*14:02; PMEL; ENSG00000185664; TAA
DFGDSSGTL

SEQ ID NO: 65435 - protein, 9 aa, Homo sapiens
  misc_feature: Table A; Target 65435; HLA-A*33:01; PMEL; ENSG00000185664; TAA
DFSVPQLPH

SEQ ID NO: 65436 - protein, 8 aa, Homo sapiens
  misc_feature: Table A; Target 65436; HLA-B*08:01; PMEL; ENSG00000185664; TAA
DGGNKHFL

SEQ ID NO: 65437 - protein, 8 aa, Homo sapiens
  misc_feature: Table A; Target 65437; HLA-C*07:01; PMEL; ENSG00000185664; TAA
DGGNKHFL

SEQ ID NO: 65438 - protein, 9 aa, Homo sapiens
  misc_feature: Table A; Target 65438; HLA-A*31:01; PMEL; ENSG00000185664; TAA
DGGNKHFLR

SEQ ID NO: 65439 - protein, 9 aa, Homo sapiens
  misc_feature: Table A; Target 65439; HLA-A*33:01; PMEL; ENSG00000185664; TAA
DGGNKHFLR

SEQ ID NO: 65440 - protein, 9 aa, Homo sapiens
  misc_feature: Table A; Target 65440; HLA-A*33:03; PMEL; ENSG00000185664; TAA
DGGNKHFLR

SEQ ID NO: 65441 - protein, 9 aa, Homo sapiens
  misc_feature: Table A; Target 65441; HLA-A*68:01; PMEL; ENSG00000185664; TAA
DGGNKHFLR

SEQ ID NO: 65442 - protein, 10 aa, Homo sapiens
  misc_feature: Table A; Target 65442; HLA-A*25:01; PMEL; ENSG00000185664; TAA
DGGPCPSGSW

SEQ ID NO: 65443 - protein, 8 aa, Homo sapiens
  misc_feature: Table A; Target 65443; HLA-B*51:01; PMEL; ENSG00000185664; TAA
DGPTLIGA

SEQ ID NO: 65444 - protein, 10 aa, Homo sapiens
  misc_feature: Table A; Target 65444; HLA-C*07:02; PMEL; ENSG00000185664; TAA
DGPTLIGANA

SEQ ID NO: 65445 - protein, 8 aa, Homo sapiens
  misc_feature: Table A; Target 65445; HLA-B*08:01; PMEL; ENSG00000185664; TAA
DGTATLRL

SEQ ID NO: 65446 - protein, 8 aa, Homo sapiens
  misc_feature: Table A; Target 65446; HLA-B*51:01; PMEL; ENSG00000185664; TAA
DGTATLRL

SEQ ID NO: 65447 - protein, 9 aa, Homo sapiens
  misc_feature: Table A; Target 65447; HLA-B*51:01; PMEL; ENSG00000185664; TAA
DGTATLRLV

SEQ ID NO: 65448 - protein, 9 aa, Homo sapiens
  misc_feature: Table A; Target 65448; HLA-C*06:02; PMEL; ENSG00000185664; TAA
DGTATLRLV

SEQ ID NO: 65449 - protein, 9 aa, Homo sapiens
  misc_feature: Table A; Target 65449; HLA-C*07:01; PMEL; ENSG00000185664; TAA
DGTATLRLV

SEQ ID NO: 65450 - protein, 9 aa, Homo sapiens
  misc_feature: Table A; Target 65450; HLA-C*07:02; PMEL; ENSG00000185664; TAA
DGTATLRLV

SEQ ID NO: 65451 - protein, 9 aa, Homo sapiens
  misc_feature: Table A; Target 65451; HLA-C*16:02; PMEL; ENSG00000185664; TAA
DGTATLRLV

SEQ ID NO: 65452 - protein, 11 aa, Homo sapiens
  misc_feature: Table A; Target 65452; HLA-A*33:01; PMEL; ENSG00000185664; TAA
DGTATLRLVKR

SEQ ID NO: 65453 - protein, 9 aa, Homo sapiens
  misc_feature: Table A; Target 65453; HLA-A*25:01; PMEL; ENSG00000185664; TAA
DIVQGIESA

SEQ ID NO: 65454 - protein, 9 aa, Homo sapiens
  misc_feature: Table A; Target 65454; HLA-A*26:01; PMEL; ENSG00000185664; TAA
DIVQGIESA

SEQ ID NO: 65455 - protein, 9 aa, Homo sapiens
  misc_feature: Table A; Target 65455; HLA-B*54:01; PMEL; ENSG00000185664; TAA
DIVQGIESA

SEQ ID NO: 65456 - protein, 11 aa, Homo sapiens
  misc_feature: Table A; Target 65456; HLA-A*25:01; PMEL; ENSG00000185664; TAA
DIVQGIESAEI

SEQ ID NO: 65457 - protein, 8 aa, Homo sapiens
  misc_feature: Table A; Target 65457; HLA-B*08:01; PMEL; ENSG00000185664; TAA
DLVLKRCL

SEQ ID NO: 65458 - protein, 9 aa, Homo sapiens
  misc_feature: Table A; Target 65458; HLA-B*08:01; PMEL; ENSG00000185664; TAA
DLVLKRCLL

SEQ ID NO: 65459 - protein, 9 aa, Homo sapiens
  misc_feature: Table A; Target 65459; HLA-B*35:01; PMEL; ENSG00000185664; TAA
DPSGYLAEA

SEQ ID NO: 65460 - protein, 9 aa, Homo sapiens
  misc_feature: Table A; Target 65460; HLA-B*35:03; PMEL; ENSG00000185664; TAA
DPSGYLAEA

SEQ ID NO: 65461 - protein, 9 aa, Homo sapiens
  misc_feature: Table A; Target 65461; HLA-B*54:01; PMEL; ENSG00000185664; TAA
DPSGYLAEA

SEQ ID NO: 65462 - protein, 9 aa, Homo sapiens
  misc_feature: Table A; Target 65462; HLA-B*55:01; PMEL; ENSG00000185664; TAA
DPSGYLAEA

SEQ ID NO: 65463 - protein, 9 aa, Homo sapiens
  misc_feature: Table A; Target 65463; HLA-B*56:01; PMEL; ENSG00000185664; TAA
DPSGYLAEA

SEQ ID NO: 65464 - protein, 9 aa, Homo sapiens
  misc_feature: Table A; Target 65464; HLA-A*02:03; PMEL; ENSG00000185664; TAA
DQVPFSVSV

SEQ ID NO: 65465 - protein, 9 aa, Homo sapiens
  misc_feature: Table A; Target 65465; HLA-A*25:01; PMEL; ENSG00000185664; TAA
DQVPFSVSV

SEQ ID NO: 65466 - protein, 9 aa, Homo sapiens
  misc_feature: Table A; Target 65466; HLA-A*26:01; PMEL; ENSG00000185664; TAA
DQVPFSVSV

SEQ ID NO: 65467 - protein, 9 aa, Homo sapiens
  misc_feature: Table A; Target 65467; HLA-A*30:01; PMEL; ENSG00000185664; TAA
DQVPFSVSV

SEQ ID NO: 65468 - protein, 9 aa, Homo sapiens
  misc_feature: Table A; Target 65468; HLA-A*68:02; PMEL; ENSG00000185664; TAA
DQVPFSVSV

SEQ ID NO: 65469 - protein, 9 aa, Homo sapiens
  misc_feature: Table A; Target 65469; HLA-B*08:01; PMEL; ENSG00000185664; TAA
DQVPFSVSV

SEQ ID NO: 65470 - protein, 9 aa, Homo sapiens
  misc_feature: Table A; Target 65470; HLA-B*13:02; PMEL; ENSG00000185664; TAA
DQVPFSVSV

SEQ ID NO: 65471 - protein, 9 aa, Homo sapiens
  misc_feature: Table A; Target 65471; HLA-B*15:01; PMEL; ENSG00000185664; TAA
DQVPFSVSV

SEQ ID NO: 65472 - protein, 9 aa, Homo sapiens
  misc_feature: Table A; Target 65472; HLA-B*15:03; PMEL; ENSG00000185664; TAA
DQVPFSVSV

SEQ ID NO: 65473 - protein, 9 aa, Homo sapiens
  misc_feature: Table A; Target 65473; HLA-B*18:01; PMEL; ENSG00000185664; TAA
DQVPFSVSV

SEQ ID NO: 65474 - protein, 9 aa, Homo sapiens
  misc_feature: Table A; Target 65474; HLA-B*27:05; PMEL; ENSG00000185664; TAA
DQVPFSVSV

SEQ ID NO: 65475 - protein, 9 aa, Homo sapiens
  misc_feature: Table A; Target 65475; HLA-B*35:01; PMEL; ENSG00000185664; TAA
DQVPFSVSV

SEQ ID NO: 65476 - protein, 9 aa, Homo sapiens
  misc_feature: Table A; Target 65476; HLA-B*35:03; PMEL; ENSG00000185664; TAA
DQVPFSVSV

SEQ ID NO: 65477 - protein, 9 aa, Homo sapiens
  misc_feature: Table A; Target 65477; HLA-B*38:01; PMEL; ENSG00000185664; TAA
DQVPFSVSV

SEQ ID NO: 65478 - protein, 9 aa, Homo sapiens
  misc_feature: Table A; Target 65478; HLA-B*39:01; PMEL; ENSG00000185664; TAA
DQVPFSVSV

SEQ ID NO: 65479 - protein, 9 aa, Homo sapiens
  misc_feature: Table A; Target 65479; HLA-B*40:01; PMEL; ENSG00000185664; TAA
DQVPFSVSV

SEQ ID NO: 65480 - protein, 9 aa, Homo sapiens
  misc_feature: Table A; Target 65480; HLA-B*40:02; PMEL; ENSG00000185664; TAA
DQVPFSVSV

SEQ ID NO: 65481 - protein, 9 aa, Homo sapiens
  misc_feature: Table A; Target 65481; HLA-B*49:01; PMEL; ENSG00000185664; TAA
DQVPFSVSV

SEQ ID NO: 65482 - protein, 9 aa, Homo sapiens
  misc_feature: Table A; Target 65482; HLA-B*51:01; PMEL; ENSG00000185664; TAA
DQVPFSVSV

SEQ ID NO: 65483 - protein, 9 aa, Homo sapiens
  misc_feature: Table A; Target 65483; HLA-B*54:01; PMEL; ENSG00000185664; TAA
DQVPFSVSV

SEQ ID NO: 65484 - protein, 9 aa, Homo sapiens
  misc_feature: Table A; Target 65484; HLA-B*55:01; PMEL; ENSG00000185664; TAA
DQVPFSVSV

SEQ ID NO: 65485 - protein, 9 aa, Homo sapiens
  misc_feature: Table A; Target 65485; HLA-C*02:02; PMEL; ENSG00000185664; TAA
DQVPFSVSV

SEQ ID NO: 65486 - protein, 9 aa, Homo sapiens
  misc_feature: Table A; Target 65486; HLA-C*03:03; PMEL; ENSG00000185664; TAA
DQVPFSVSV

SEQ ID NO: 65487 - protein, 9 aa, Homo sapiens
  misc_feature: Table A; Target 65487; HLA-C*06:02; PMEL; ENSG00000185664; TAA
DQVPFSVSV

SEQ ID NO: 65488 - protein, 9 aa, Homo sapiens
  misc_feature: Table A; Target 65488; HLA-C*12:03; PMEL; ENSG00000185664; TAA
DQVPFSVSV

SEQ ID NO: 65489 - protein, 9 aa, Homo sapiens
  misc_feature: Table A; Target 65489; HLA-C*16:04; PMEL; ENSG00000185664; TAA
DQVPFSVSV

SEQ ID NO: 65490 - protein, 9 aa, Homo sapiens
  misc_feature: Table A; Target 65490; HLA-A*11:01; PMEL; ENSG00000185664; TAA
DSSGTLISR

SEQ ID NO: 65491 - protein, 9 aa, Homo sapiens
  misc_feature: Table A; Target 65491; HLA-A*31:01; PMEL; ENSG00000185664; TAA
DSSGTLISR

SEQ ID NO: 65492 - protein, 9 aa, Homo sapiens
  misc_feature: Table A; Target 65492; HLA-A*33:01; PMEL; ENSG00000185664; TAA
DSSGTLISR

SEQ ID NO: 65493 - protein, 9 aa, Homo sapiens
  misc_feature: Table A; Target 65493; HLA-A*33:03; PMEL; ENSG00000185664; TAA
DSSGTLISR

SEQ ID NO: 65494 - protein, 9 aa, Homo sapiens
  misc_feature: Table A; Target 65494; HLA-A*68:01; PMEL; ENSG00000185664; TAA
DSSGTLISR

SEQ ID NO: 65495 - protein, 9 aa, Homo sapiens
  misc_feature: Table A; Target 65495; HLA-A*68:02; PMEL; ENSG00000185664; TAA
DSSGTLISR

SEQ ID NO: 65496 - protein, 9 aa, Homo sapiens
  misc_feature: Table A; Target 65496; HLA-B*27:02; PMEL; ENSG00000185664; TAA
DSSGTLISR

SEQ ID NO: 65497 - protein, 9 aa, Homo sapiens
  misc_feature: Table A; Target 65497; HLA-C*07:06; PMEL; ENSG00000185664; TAA
DSSGTLISR

SEQ ID NO: 65498 - protein, 8 aa, Homo sapiens
  misc_feature: Table A; Target 65498; HLA-A*33:01; PMEL; ENSG00000185664; TAA
DTNSLAVV

SEQ ID NO: 65499 - protein, 8 aa, Homo sapiens
  misc_feature: Table A; Target 65499; HLA-B*51:01; PMEL; ENSG00000185664; TAA
DTNSLAVV

SEQ ID NO: 65500 - protein, 9 aa, Homo sapiens
  misc_feature: Table A; Target 65500; HLA-A*33:01; PMEL; ENSG00000185664; TAA
DTNSLAVVS

SEQ ID NO: 65501 - protein, 9 aa, Homo sapiens
  misc_feature: Table A; Target 65501; HLA-A*33:03; PMEL; ENSG00000185664; TAA
DTNSLAVVS

SEQ ID NO: 65502 - protein, 9 aa, Homo sapiens
  misc_feature: Table A; Target 65502; HLA-C*07:06; PMEL; ENSG00000185664; TAA
DTNSLAVVS

SEQ ID NO: 65503 - protein, 10 aa, Homo sapiens
  misc_feature: Table A; Target 65503; HLA-A*33:01; PMEL; ENSG00000185664; TAA
DTNSLAVVST

SEQ ID NO: 65504 - protein, 10 aa, Homo sapiens
  misc_feature: Table A; Target 65504; HLA-A*68:01; PMEL; ENSG00000185664; TAA
DTNSLAVVST

SEQ ID NO: 65505 - protein, 8 aa, Homo sapiens
  misc_feature: Table A; Target 65505; HLA-A*33:03; PMEL; ENSG00000185664; TAA
EADLSYTW

SEQ ID NO: 65506 - protein, 8 aa, Homo sapiens
  misc_feature: Table A; Target 65506; HLA-B*35:01; PMEL; ENSG00000185664; TAA
EADLSYTW

SEQ ID NO: 65507 - protein, 8 aa, Homo sapiens
  misc_feature: Table A; Target 65507; HLA-B*57:01; PMEL; ENSG00000185664; TAA
EADLSYTW

SEQ ID NO: 65508 - protein, 9 aa, Homo sapiens
  misc_feature: Table A; Target 65508; HLA-B*35:03; PMEL; ENSG00000185664; TAA
EAGLGQVPL

SEQ ID NO: 65509 - protein, 9 aa, Homo sapiens
  misc_feature: Table A; Target 65509; HLA-C*07:06; PMEL; ENSG00000185664; TAA
EAGLGQVPL

SEQ ID NO: 65510 - protein, 10 aa, Homo sapiens
  misc_feature: Table A; Target 65510; HLA-A*68:01; PMEL; ENSG00000185664; TAA
EATGMTPAEV

SEQ ID NO: 65511 - protein, 9 aa, Homo sapiens
  misc_feature: Table A; Target 65511; HLA-B*38:01; PMEL; ENSG00000185664; TAA
EGDAFELTV

SEQ ID NO: 65512 - protein, 9 aa, Homo sapiens
  misc_feature: Table A; Target 65512; HLA-B*51:01; PMEL; ENSG00000185664; TAA
EGDAFELTV

SEQ ID NO: 65513 - protein, 9 aa, Homo sapiens
  misc_feature: Table A; Target 65513; HLA-C*05:01; PMEL; ENSG00000185664; TAA
EGDAFELTV

SEQ ID NO: 65514 - protein, 8 aa, Homo sapiens
  misc_feature: Table A; Target 65514; HLA-B*51:01; PMEL; ENSG00000185664; TAA
EGPDASSI

SEQ ID NO: 65515 - protein, 9 aa, Homo sapiens
  misc_feature: Table A; Target 65515; HLA-A*26:01; PMEL; ENSG00000185664; TAA
EGPDASSIM

SEQ ID NO: 65516 - protein, 9 aa, Homo sapiens
  misc_feature: Table A; Target 65516; HLA-C*01:02; PMEL; ENSG00000185664; TAA
EGPDASSIM

SEQ ID NO: 65517 - protein, 9 aa, Homo sapiens
  misc_feature: Table A; Target 65517; HLA-A*26:01; PMEL; ENSG00000185664; TAA
EILQAVPSG

SEQ ID NO: 65518 - protein, 9 aa, Homo sapiens
  misc_feature: Table A; Target 65518; HLA-B*15:03; PMEL; ENSG00000185664; TAA
EKVPVSEVM

SEQ ID NO: 65519 - protein, 9 aa, Homo sapiens
  misc_feature: Table A; Target 65519; HLA-B*38:01; PMEL; ENSG00000185664; TAA
EKVPVSEVM

SEQ ID NO: 65520 - protein, 9 aa, Homo sapiens
  misc_feature: Table A; Target 65520; HLA-B*39:01; PMEL; ENSG00000185664; TAA
EKVPVSEVM

SEQ ID NO: 65521 - protein, 9 aa, Homo sapiens
  misc_feature: Table A; Target 65521; HLA-B*40:02; PMEL; ENSG00000185664; TAA
EKVPVSEVM

SEQ ID NO: 65522 - protein, 10 aa, Homo sapiens
  misc_feature: Table A; Target 65522; HLA-A*26:01; PMEL; ENSG00000185664; TAA
EMSTPEATGM

SEQ ID NO: 65523 - protein, 10 aa, Homo sapiens
  misc_feature: Table A; Target 65523; HLA-B*39:01; PMEL; ENSG00000185664; TAA
EMSTPEATGM

SEQ ID NO: 65524 - protein, 10 aa, Homo sapiens
  misc_feature: Table A; Target 65524; HLA-C*04:01; PMEL; ENSG00000185664; TAA
EMSTPEATGM

SEQ ID NO: 65525 - protein, 10 aa, Homo sapiens
  misc_feature: Table A; Target 65525; HLA-C*07:01; PMEL; ENSG00000185664; TAA
EMSTPEATGM

SEQ ID NO: 65526 - protein, 10 aa, Homo sapiens
  misc_feature: Table A; Target 65526; HLA-C*07:06; PMEL; ENSG00000185664; TAA
EMSTPEATGM

SEQ ID NO: 65527 - protein, 11 aa, Homo sapiens
  misc_feature: Table A; Target 65527; HLA-A*26:01; PMEL; ENSG00000185664; TAA
ENSPLLSGQQV

SEQ ID NO: 65528 - protein, 11 aa, Homo sapiens
  misc_feature: Table A; Target 65528; HLA-A*33:03; PMEL; ENSG00000185664; TAA
ENSPLLSGQQV

SEQ ID NO: 65529 - protein, 11 aa, Homo sapiens
  misc_feature: Table A; Target 65529; HLA-A*68:01; PMEL; ENSG00000185664; TAA
ENSPLLSGQQV

SEQ ID NO: 65530 - protein, 11 aa, Homo sapiens
  misc_feature: Table A; Target 65530; HLA-A*68:02; PMEL; ENSG00000185664; TAA
ENSPLLSGQQV

SEQ ID NO: 65531 - protein, 11 aa, Homo sapiens
  misc_feature: Table A; Target 65531; HLA-B*27:02; PMEL; ENSG00000185664; TAA
ENSPLLSGQQV

SEQ ID NO: 65532 - protein, 11 aa, Homo sapiens
  misc_feature: Table A; Target 65532; HLA-C*04:01; PMEL; ENSG00000185664; TAA
ENSPLLSGQQV

SEQ ID NO: 65533 - protein, 11 aa, Homo sapiens
  misc_feature: Table A; Target 65533; HLA-C*06:02; PMEL; ENSG00000185664; TAA
ENSPLLSGQQV

SEQ ID NO: 65534 - protein, 11 aa, Homo sapiens
  misc_feature: Table A; Target 65534; HLA-C*07:01; PMEL; ENSG00000185664; TAA
ENSPLLSGQQV

SEQ ID NO: 65535 - protein, 11 aa, Homo sapiens
  misc_feature: Table A; Target 65535; HLA-B*35:01; PMEL; ENSG00000185664; TAA
EPEGPDASSIM

SEQ ID NO: 65536 - protein, 11 aa, Homo sapiens
  misc_feature: Table A; Target 65536; HLA-B*35:03; PMEL; ENSG00000185664; TAA
EPEGPDASSIM

SEQ ID NO: 65537 - protein, 11 aa, Homo sapiens
  misc_feature: Table A; Target 65537; HLA-B*55:01; PMEL; ENSG00000185664; TAA
EPEGPDASSIM

SEQ ID NO: 65538 - protein, 9 aa, Homo sapiens
  misc_feature: Table A; Target 65538; HLA-A*25:01; PMEL; ENSG00000185664; TAA
EPGPVTAQV

SEQ ID NO: 65539 - protein, 9 aa, Homo sapiens
  misc_feature: Table A; Target 65539; HLA-A*26:01; PMEL; ENSG00000185664; TAA
EPGPVTAQV

SEQ ID NO: 65540 - protein, 9 aa, Homo sapiens
  misc_feature: Table A; Target 65540; HLA-A*33:03; PMEL; ENSG00000185664; TAA
EPGPVTAQV

SEQ ID NO: 65541 - protein, 9 aa, Homo sapiens
  misc_feature: Table A; Target 65541; HLA-A*68:01; PMEL; ENSG00000185664; TAA
EPGPVTAQV

SEQ ID NO: 65542 - protein, 9 aa, Homo sapiens
  misc_feature: Table A; Target 65542; HLA-A*68:02; PMEL; ENSG00000185664; TAA
EPGPVTAQV

SEQ ID NO: 65543 - protein, 9 aa, Homo sapiens
  misc_feature: Table A; Target 65543; HLA-B*07:02; PMEL; ENSG00000185664; TAA
EPGPVTAQV

SEQ ID NO: 65544 - protein, 9 aa, Homo sapiens
  misc_feature: Table A; Target 65544; HLA-B*35:01; PMEL; ENSG00000185664; TAA
EPGPVTAQV

SEQ ID NO: 65545 - protein, 9 aa, Homo sapiens
  misc_feature: Table A; Target 65545; HLA-B*35:03; PMEL; ENSG00000185664; TAA
EPGPVTAQV

SEQ ID NO: 65546 - protein, 9 aa, Homo sapiens
  misc_feature: Table A; Target 65546; HLA-B*51:01; PMEL; ENSG00000185664; TAA
EPGPVTAQV

SEQ ID NO: 65547 - protein, 9 aa, Homo sapiens
  misc_feature: Table A; Target 65547; HLA-B*54:01; PMEL; ENSG00000185664; TAA
EPGPVTAQV

SEQ ID NO: 65548 - protein, 9 aa, Homo sapiens
  misc_feature: Table A; Target 65548; HLA-B*56:01; PMEL; ENSG00000185664; TAA
EPGPVTAQV

SEQ ID NO: 65549 - protein, 9 aa, Homo sapiens
  misc_feature: Table A; Target 65549; HLA-C*06:02; PMEL; ENSG00000185664; TAA
EPGPVTAQV

SEQ ID NO: 65550 - protein, 9 aa, Homo sapiens
  misc_feature: Table A; Target 65550; HLA-C*07:02; PMEL; ENSG00000185664; TAA
EPGPVTAQV

SEQ ID NO: 65551 - protein, 9 aa, Homo sapiens
  misc_feature: Table A; Target 65551; HLA-C*07:06; PMEL; ENSG00000185664; TAA
EPGPVTAQV

SEQ ID NO: 65552 - protein, 10 aa, Homo sapiens
  misc_feature: Table A; Target 65552; HLA-A*68:01; PMEL; ENSG00000185664; TAA
EPGPVTAQVV

SEQ ID NO: 65553 - protein, 10 aa, Homo sapiens
  misc_feature: Table A; Target 65553; HLA-B*35:03; PMEL; ENSG00000185664; TAA
EPGPVTAQVV

SEQ ID NO: 65554 - protein, 10 aa, Homo sapiens
  misc_feature: Table A; Target 65554; HLA-B*51:01; PMEL; ENSG00000185664; TAA
EPGPVTAQVV

SEQ ID NO: 65555 - protein, 10 aa, Homo sapiens
  misc_feature: Table A; Target 65555; HLA-B*56:01; PMEL; ENSG00000185664; TAA
EPGPVTAQVV

SEQ ID NO: 65556 - protein, 10 aa, Homo sapiens
  misc_feature: Table A; Target 65556; HLA-C*07:06; PMEL; ENSG00000185664; TAA
EPGPVTAQVV

SEQ ID NO: 65557 - protein, 11 aa, Homo sapiens
  misc_feature: Table A; Target 65557; HLA-A*33:03; PMEL; ENSG00000185664; TAA
EPGPVTAQVVL

SEQ ID NO: 65558 - protein, 11 aa, Homo sapiens
  misc_feature: Table A; Target 65558; HLA-A*68:01; PMEL; ENSG00000185664; TAA
EPGPVTAQVVL

SEQ ID NO: 65559 - protein, 11 aa, Homo sapiens
  misc_feature: Table A; Target 65559; HLA-A*68:02; PMEL; ENSG00000185664; TAA
EPGPVTAQVVL

SEQ ID NO: 65560 - protein, 11 aa, Homo sapiens
  misc_feature: Table A; Target 65560; HLA-B*07:02; PMEL; ENSG00000185664; TAA
EPGPVTAQVVL

SEQ ID NO: 65561 - protein, 11 aa, Homo sapiens
  misc_feature: Table A; Target 65561; HLA-B*35:01; PMEL; ENSG00000185664; TAA
EPGPVTAQVVL

SEQ ID NO: 65562 - protein, 11 aa, Homo sapiens
  misc_feature: Table A; Target 65562; HLA-B*35:03; PMEL; ENSG00000185664; TAA
EPGPVTAQVVL

SEQ ID NO: 65563 - protein, 11 aa, Homo sapiens
  misc_feature: Table A; Target 65563; HLA-B*38:01; PMEL; ENSG00000185664; TAA
EPGPVTAQVVL

SEQ ID NO: 65564 - protein, 11 aa, Homo sapiens
  misc_feature: Table A; Target 65564; HLA-B*39:01; PMEL; ENSG00000185664; TAA
EPGPVTAQVVL

SEQ ID NO: 65565 - protein, 11 aa, Homo sapiens
  misc_feature: Table A; Target 65565; HLA-B*40:01; PMEL; ENSG00000185664; TAA
EPGPVTAQVVL

SEQ ID NO: 65566 - protein, 11 aa, Homo sapiens
  misc_feature: Table A; Target 65566; HLA-B*55:01; PMEL; ENSG00000185664; TAA
EPGPVTAQVVL

SEQ ID NO: 65567 - protein, 11 aa, Homo sapiens
  misc_feature: Table A; Target 65567; HLA-B*56:01; PMEL; ENSG00000185664; TAA
EPGPVTAQVVL

SEQ ID NO: 65568 - protein, 11 aa, Homo sapiens
  misc_feature: Table A; Target 65568; HLA-C*04:01; PMEL; ENSG00000185664; TAA
EPGPVTAQVVL

SEQ ID NO: 65569 - protein, 11 aa, Homo sapiens
  misc_feature: Table A; Target 65569; HLA-C*07:01; PMEL; ENSG00000185664; TAA
EPGPVTAQVVL

SEQ ID NO: 65570 - protein, 11 aa, Homo sapiens
  misc_feature: Table A; Target 65570; HLA-C*07:02; PMEL; ENSG00000185664; TAA
EPGPVTAQVVL

SEQ ID NO: 65571 - protein, 11 aa, Homo sapiens
  misc_feature: Table A; Target 65571; HLA-C*07:04; PMEL; ENSG00000185664; TAA
EPGPVTAQVVL

SEQ ID NO: 65572 - protein, 11 aa, Homo sapiens
  misc_feature: Table A; Target 65572; HLA-C*07:06; PMEL; ENSG00000185664; TAA
EPGPVTAQVVL

SEQ ID NO: 65573 - protein, 11 aa, Homo sapiens
  misc_feature: Table A; Target 65573; HLA-C*12:03; PMEL; ENSG00000185664; TAA
EPGPVTAQVVL

SEQ ID NO: 65574 - protein, 8 aa, Homo sapiens
  misc_feature: Table A; Target 65574; HLA-B*51:01; PMEL; ENSG00000185664; TAA
EPSGTTSV

SEQ ID NO: 65575 - protein, 8 aa, Homo sapiens
  misc_feature: Table A; Target 65575; HLA-B*56:01; PMEL; ENSG00000185664; TAA
EPSGTTSV

SEQ ID NO: 65576 - protein, 10 aa, Homo sapiens
  misc_feature: Table A; Target 65576; HLA-A*68:01; PMEL; ENSG00000185664; TAA
EPSGTTSVQV

SEQ ID NO: 65577 - protein, 10 aa, Homo sapiens
  misc_feature: Table A; Target 65577; HLA-C*07:06; PMEL; ENSG00000185664; TAA
EPSGTTSVQV

SEQ ID NO: 65578 - protein, 9 aa, Homo sapiens
  misc_feature: Table A; Target 65578; HLA-A*25:01; PMEL; ENSG00000185664; TAA
ESAEILQAV

SEQ ID NO: 65579 - protein, 9 aa, Homo sapiens
  misc_feature: Table A; Target 65579; HLA-A*26:01; PMEL; ENSG00000185664; TAA
ESAEILQAV

SEQ ID NO: 65580 - protein, 9 aa, Homo sapiens
  misc_feature: Table A; Target 65580; HLA-A*33:03; PMEL; ENSG00000185664; TAA
ESAEILQAV

SEQ ID NO: 65581 - protein, 9 aa, Homo sapiens
  misc_feature: Table A; Target 65581; HLA-A*68:01; PMEL; ENSG00000185664; TAA
ESAEILQAV

SEQ ID NO: 65582 - protein, 9 aa, Homo sapiens
  misc_feature: Table A; Target 65582; HLA-A*68:02; PMEL; ENSG00000185664; TAA
ESAEILQAV

SEQ ID NO: 65583 - protein, 9 aa, Homo sapiens
  misc_feature: Table A; Target 65583; HLA-B*13:02; PMEL; ENSG00000185664; TAA
ESAEILQAV

SEQ ID NO: 65584 - protein, 9 aa, Homo sapiens
  misc_feature: Table A; Target 65584; HLA-B*51:01; PMEL; ENSG00000185664; TAA
ESAEILQAV

SEQ ID NO: 65585 - protein, 9 aa, Homo sapiens
  misc_feature: Table A; Target 65585; HLA-C*07:06; PMEL; ENSG00000185664; TAA
ESAEILQAV

SEQ ID NO: 65586 - protein, 10 aa, Homo sapiens
  misc_feature: Table A; Target 65586; HLA-A*68:01; PMEL; ENSG00000185664; TAA
ESAEILQAVP

SEQ ID NO: 65587 - protein, 9 aa, Homo sapiens
  misc_feature: Table A; Target 65587; HLA-A*26:01; PMEL; ENSG00000185664; TAA
ESITGSLGP

SEQ ID NO: 65588 - protein, 10 aa, Homo sapiens
  misc_feature: Table A; Target 65588; HLA-A*25:01; PMEL; ENSG00000185664; TAA
ESITGSLGPL

SEQ ID NO: 65589 - protein, 10 aa, Homo sapiens
  misc_feature: Table A; Target 65589; HLA-A*26:01; PMEL; ENSG00000185664; TAA
ESITGSLGPL

SEQ ID NO: 65590 - protein, 10 aa, Homo sapiens
  misc_feature: Table A; Target 65590; HLA-A*68:01; PMEL; ENSG00000185664; TAA
ESITGSLGPL

SEQ ID NO: 65591 - protein, 10 aa, Homo sapiens
  misc_feature: Table A; Target 65591; HLA-B*40:02; PMEL; ENSG00000185664; TAA
ESITGSLGPL

SEQ ID NO: 65592 - protein, 10 aa, Homo sapiens
  misc_feature: Table A; Target 65592; HLA-C*07:02; PMEL; ENSG00000185664; TAA
ESITGSLGPL

SEQ ID NO: 65593 - protein, 11 aa, Homo sapiens
  misc_feature: Table A; Target 65593; HLA-A*23:01; PMEL; ENSG00000185664; TAA
ESITGSLGPLL

SEQ ID NO: 65594 - protein, 11 aa, Homo sapiens
  misc_feature: Table A; Target 65594; HLA-A*26:01; PMEL; ENSG00000185664; TAA
ESITGSLGPLL

SEQ ID NO: 65595 - protein, 11 aa, Homo sapiens
  misc_feature: Table A; Target 65595; HLA-A*33:03; PMEL; ENSG00000185664; TAA
ESITGSLGPLL

SEQ ID NO: 65596 - protein, 11 aa, Homo sapiens
  misc_feature: Table A; Target 65596; HLA-A*68:01; PMEL; ENSG00000185664; TAA
ESITGSLGPLL

SEQ ID NO: 65597 - protein, 11 aa, Homo sapiens
  misc_feature: Table A; Target 65597; HLA-A*68:02; PMEL; ENSG00000185664; TAA
ESITGSLGPLL

SEQ ID NO: 65598 - protein, 9 aa, Homo sapiens
  misc_feature: Table A; Target 65598; HLA-A*11:01; PMEL; ENSG00000185664; TAA
ESTGMTPEK

SEQ ID NO: 65599 - protein, 9 aa, Homo sapiens
  misc_feature: Table A; Target 65599; HLA-A*26:01; PMEL; ENSG00000185664; TAA
ESTGMTPEK

SEQ ID NO: 65600 - protein, 9 aa, Homo sapiens
  misc_feature: Table A; Target 65600; HLA-A*33:01; PMEL; ENSG00000185664; TAA
ESTGMTPEK

SEQ ID NO: 65601 - protein, 9 aa, Homo sapiens
  misc_feature: Table A; Target 65601; HLA-A*33:03; PMEL; ENSG00000185664; TAA
ESTGMTPEK

SEQ ID NO: 65602 - protein, 9 aa, Homo sapiens
  misc_feature: Table A; Target 65602; HLA-A*68:01; PMEL; ENSG00000185664; TAA
ESTGMTPEK

SEQ ID NO: 65603 - protein, 9 aa, Homo sapiens
  misc_feature: Table A; Target 65603; HLA-B*07:02; PMEL; ENSG00000185664; TAA
ESTGMTPEK

SEQ ID NO: 65604 - protein, 9 aa, Homo sapiens
  misc_feature: Table A; Target 65604; HLA-B*27:02; PMEL; ENSG00000185664; TAA
ESTGMTPEK

SEQ ID NO: 65605 - protein, 9 aa, Homo sapiens
  misc_feature: Table A; Target 65605; HLA-C*07:06; PMEL; ENSG00000185664; TAA
ESTGMTPEK

SEQ ID NO: 65606 - protein, 8 aa, Homo sapiens
  misc_feature: Table A; Target 65606; HLA-C*05:01; PMEL; ENSG00000185664; TAA
ETDDACIF

SEQ ID NO: 65607 - protein, 8 aa, Homo sapiens
  misc_feature: Table A; Target 65607; HLA-A*26:01; PMEL; ENSG00000185664; TAA
EVISTAPV

SEQ ID NO: 65608 - protein, 9 aa, Homo sapiens
  misc_feature: Table A; Target 65608; HLA-A*25:01; PMEL; ENSG00000185664; TAA
EVISTAPVQ

SEQ ID NO: 65609 - protein, 9 aa, Homo sapiens
  misc_feature: Table A; Target 65609; HLA-A*26:01; PMEL; ENSG00000185664; TAA
EVISTAPVQ

SEQ ID NO: 65610 - protein, 9 aa, Homo sapiens
  misc_feature: Table A; Target 65610; HLA-A*33:03; PMEL; ENSG00000185664; TAA
EVISTAPVQ

SEQ ID NO: 65611 - protein, 9 aa, Homo sapiens
  misc_feature: Table A; Target 65611; HLA-A*68:01; PMEL; ENSG00000185664; TAA
EVISTAPVQ

SEQ ID NO: 65612 - protein, 9 aa, Homo sapiens
  misc_feature: Table A; Target 65612; HLA-C*03:03; PMEL; ENSG00000185664; TAA
EVISTAPVQ

SEQ ID NO: 65613 - protein, 10 aa, Homo sapiens
  misc_feature: Table A; Target 65613; HLA-A*25:01; PMEL; ENSG00000185664; TAA
EVISTAPVQM

SEQ ID NO: 65614 - protein, 10 aa, Homo sapiens
  misc_feature: Table A; Target 65614; HLA-A*26:01; PMEL; ENSG00000185664; TAA
EVISTAPVQM

SEQ ID NO: 65615 - protein, 10 aa, Homo sapiens
  misc_feature: Table A; Target 65615; HLA-A*33:01; PMEL; ENSG00000185664; TAA
EVISTAPVQM

SEQ ID NO: 65616 - protein, 10 aa, Homo sapiens
  misc_feature: Table A; Target 65616; HLA-A*33:03; PMEL; ENSG00000185664; TAA
EVISTAPVQM

SEQ ID NO: 65617 - protein, 10 aa, Homo sapiens
  misc_feature: Table A; Target 65617; HLA-A*68:01; PMEL; ENSG00000185664; TAA
EVISTAPVQM

SEQ ID NO: 65618 - protein, 10 aa, Homo sapiens
  misc_feature: Table A; Target 65618; HLA-A*68:02; PMEL; ENSG00000185664; TAA
EVISTAPVQM

SEQ ID NO: 65619 - protein, 10 aa, Homo sapiens
  misc_feature: Table A; Target 65619; HLA-B*35:01; PMEL; ENSG00000185664; TAA
EVISTAPVQM

SEQ ID NO: 65620 - protein, 10 aa, Homo sapiens
  misc_feature: Table A; Target 65620; HLA-C*07:06; PMEL; ENSG00000185664; TAA
EVISTAPVQM

SEQ ID NO: 65621 - protein, 9 aa, Homo sapiens
  misc_feature: Table A; Target 65621; HLA-A*25:01; PMEL; ENSG00000185664; TAA
EVMGTTLAE

SEQ ID NO: 65622 - protein, 9 aa, Homo sapiens
  misc_feature: Table A; Target 65622; HLA-A*26:01; PMEL; ENSG00000185664; TAA
EVMGTTLAE

SEQ ID NO: 65623 - protein, 10 aa, Homo sapiens
  misc_feature: Table A; Target 65623; HLA-A*25:01; PMEL; ENSG00000185664; TAA
EVMGTTLAEM

SEQ ID NO: 65624 - protein, 10 aa, Homo sapiens
  misc_feature: Table A; Target 65624; HLA-A*26:01; PMEL; ENSG00000185664; TAA
EVMGTTLAEM

SEQ ID NO: 65625 - protein, 10 aa, Homo sapiens
  misc_feature: Table A; Target 65625; HLA-A*33:01; PMEL; ENSG00000185664; TAA
EVMGTTLAEM

SEQ ID NO: 65626 - protein, 10 aa, Homo sapiens
  misc_feature: Table A; Target 65626; HLA-A*33:03; PMEL; ENSG00000185664; TAA
EVMGTTLAEM

SEQ ID NO: 65627 - protein, 10 aa, Homo sapiens
  misc_feature: Table A; Target 65627; HLA-A*68:01; PMEL; ENSG00000185664; TAA
EVMGTTLAEM

SEQ ID NO: 65628 - protein, 10 aa, Homo sapiens
  misc_feature: Table A; Target 65628; HLA-A*68:02; PMEL; ENSG00000185664; TAA
EVMGTTLAEM

SEQ ID NO: 65629 - protein, 10 aa, Homo sapiens
  misc_feature: Table A; Target 65629; HLA-B*35:01; PMEL; ENSG00000185664; TAA
EVMGTTLAEM

SEQ ID NO: 65630 - protein, 10 aa, Homo sapiens
  misc_feature: Table A; Target 65630; HLA-B*35:03; PMEL; ENSG00000185664; TAA
EVMGTTLAEM

SEQ ID NO: 65631 - protein, 10 aa, Homo sapiens
  misc_feature: Table A; Target 65631; HLA-B*46:01; PMEL; ENSG00000185664; TAA
EVMGTTLAEM

SEQ ID NO: 65632 - protein, 10 aa, Homo sapiens
  misc_feature: Table A; Target 65632; HLA-C*07:06; PMEL; ENSG00000185664; TAA
EVMGTTLAEM

SEQ ID NO: 65633 - protein, 9 aa, Homo sapiens
  misc_feature: Table A; Target 65633; HLA-A*26:01; PMEL; ENSG00000185664; TAA
EVSIVVLSG

SEQ ID NO: 65634 - protein, 9 aa, Homo sapiens
  misc_feature: Table A; Target 65634; HLA-A*33:03; PMEL; ENSG00000185664; TAA
EVSIVVLSG

SEQ ID NO: 65635 - protein, 9 aa, Homo sapiens
  misc_feature: Table A; Target 65635; HLA-A*68:01; PMEL; ENSG00000185664; TAA
EVSIVVLSG

SEQ ID NO: 65636 - protein, 9 aa, Homo sapiens
  misc_feature: Table A; Target 65636; HLA-A*68:02; PMEL; ENSG00000185664; TAA
EVSIVVLSG

SEQ ID NO: 65637 - protein, 10 aa, Homo sapiens
  misc_feature: Table A; Target 65637; HLA-A*68:01; PMEL; ENSG00000185664; TAA
EVSIVVLSGT

SEQ ID NO: 65638 - protein, 10 aa, Homo sapiens
  misc_feature: Table A; Target 65638; HLA-A*68:02; PMEL; ENSG00000185664; TAA
EVSIVVLSGT

SEQ ID NO: 65639 - protein, 10 aa, Homo sapiens
  misc_feature: Table A; Target 65639; HLA-C*06:02; PMEL; ENSG00000185664; TAA
EVSIVVLSGT

SEQ ID NO: 65640 - protein, 10 aa, Homo sapiens
  misc_feature: Table A; Target 65640; HLA-C*07:01; PMEL; ENSG00000185664; TAA
EVSIVVLSGT

SEQ ID NO: 65641 - protein, 8 aa, Homo sapiens
  misc_feature: Table A; Target 65641; HLA-A*33:01; PMEL; ENSG00000185664; TAA
EVTVYHRR

SEQ ID NO: 65642 - protein, 8 aa, Homo sapiens
  misc_feature: Table A; Target 65642; HLA-A*33:03; PMEL; ENSG00000185664; TAA
EVTVYHRR

SEQ ID NO: 65643 - protein, 9 aa, Homo sapiens
  misc_feature: Table A; Target 65643; HLA-A*25:01; PMEL; ENSG00000185664; TAA
EVVGTTPGQ

SEQ ID NO: 65644 - protein, 9 aa, Homo sapiens
  misc_feature: Table A; Target 65644; HLA-A*26:01; PMEL; ENSG00000185664; TAA
EVVGTTPGQ

SEQ ID NO: 65645 - protein, 9 aa, Homo sapiens
  misc_feature: Table A; Target 65645; HLA-A*68:01; PMEL; ENSG00000185664; TAA
EVVGTTPGQ

SEQ ID NO: 65646 - protein, 10 aa, Homo sapiens
  misc_feature: Table A; Target 65646; HLA-A*26:01; PMEL; ENSG00000185664; TAA
EVVGTTPGQA

SEQ ID NO: 65647 - protein, 10 aa, Homo sapiens
  misc_feature: Table A; Target 65647; HLA-A*68:01; PMEL; ENSG00000185664; TAA
EVVGTTPGQA

SEQ ID NO: 65648 - protein, 11 aa, Homo sapiens
  misc_feature: Table A; Target 65648; HLA-A*26:01; PMEL; ENSG00000185664; TAA
EVVGTTPGQAP

SEQ ID NO: 65649 - protein, 11 aa, Homo sapiens
  misc_feature: Table A; Target 65649; HLA-A*68:01; PMEL; ENSG00000185664; TAA
EVVGTTPGQAP

SEQ ID NO: 65650 - protein, 11 aa, Homo sapiens
  misc_feature: Table A; Target 65650; HLA-C*07:01; PMEL; ENSG00000185664; TAA
EVVGTTPGQAP

SEQ ID NO: 65651 - protein, 11 aa, Homo sapiens
  misc_feature: Table A; Target 65651; HLA-A*30:02; PMEL; ENSG00000185664; TAA
FALQLHDPSGY

SEQ ID NO: 65652 - protein, 8 aa, Homo sapiens
  misc_feature: Table A; Target 65652; HLA-B*18:01; PMEL; ENSG00000185664; TAA
FELTVSCQ

SEQ ID NO: 65653 - protein, 8 aa, Homo sapiens
  misc_feature: Table A; Target 65653; HLA-B*40:02; PMEL; ENSG00000185664; TAA
FELTVSCQ

SEQ ID NO: 65654 - protein, 8 aa, Homo sapiens
  misc_feature: Table A; Target 65654; HLA-C*04:01; PMEL; ENSG00000185664; TAA
FELTVSCQ

SEQ ID NO: 65655 - protein, 8 aa, Homo sapiens
  misc_feature: Table A; Target 65655; HLA-C*07:01; PMEL; ENSG00000185664; TAA
FELTVSCQ

SEQ ID NO: 65656 - protein, 8 aa, Homo sapiens
  misc_feature: Table A; Target 65656; HLA-C*07:04; PMEL; ENSG00000185664; TAA
FELTVSCQ

SEQ ID NO: 65657 - protein, 8 aa, Homo sapiens
  misc_feature: Table A; Target 65657; HLA-C*12:03; PMEL; ENSG00000185664; TAA
FELTVSCQ

SEQ ID NO: 65658 - protein, 9 aa, Homo sapiens
  misc_feature: Table A; Target 65658; HLA-B*40:02; PMEL; ENSG00000185664; TAA
FELTVSCQG

SEQ ID NO: 65659 - protein, 8 aa, Homo sapiens
  misc_feature: Table A; Target 65659; HLA-B*35:03; PMEL; ENSG00000185664; TAA
FGDSSGTL

SEQ ID NO: 65660 - protein, 8 aa, Homo sapiens
  misc_feature: Table A; Target 65660; HLA-B*39:01; PMEL; ENSG00000185664; TAA
FGDSSGTL

SEQ ID NO: 65661 - protein, 8 aa, Homo sapiens
  misc_feature: Table A; Target 65661; HLA-C*03:03; PMEL; ENSG00000185664; TAA
FGDSSGTL

SEQ ID NO: 65662 - protein, 8 aa, Homo sapiens
  misc_feature: Table A; Target 65662; HLA-C*03:04; PMEL; ENSG00000185664; TAA
FGDSSGTL

SEQ ID NO: 65663 - protein, 8 aa, Homo sapiens
  misc_feature: Table A; Target 65663; HLA-C*04:01; PMEL; ENSG00000185664; TAA
FGDSSGTL

SEQ ID NO: 65664 - protein, 8 aa, Homo sapiens
  misc_feature: Table A; Target 65664; HLA-C*05:01; PMEL; ENSG00000185664; TAA
FGDSSGTL

SEQ ID NO: 65665 - protein, 8 aa, Homo sapiens
  misc_feature: Table A; Target 65665; HLA-C*07:04; PMEL; ENSG00000185664; TAA
FGDSSGTL

SEQ ID NO: 65666 - protein, 9 aa, Homo sapiens
  misc_feature: Table A; Target 65666; HLA-A*01:01; PMEL; ENSG00000185664; TAA
FGDSSGTLI

SEQ ID NO: 65667 - protein, 9 aa, Homo sapiens
  misc_feature: Table A; Target 65667; HLA-A*02:01; PMEL; ENSG00000185664; TAA
FGDSSGTLI

SEQ ID NO: 65668 - protein, 9 aa, Homo sapiens
  misc_feature: Table A; Target 65668; HLA-A*02:07; PMEL; ENSG00000185664; TAA
FGDSSGTLI

SEQ ID NO: 65669 - protein, 9 aa, Homo sapiens
  misc_feature: Table A; Target 65669; HLA-A*23:01; PMEL; ENSG00000185664; TAA
FGDSSGTLI

SEQ ID NO: 65670 - protein, 9 aa, Homo sapiens
  misc_feature: Table A; Target 65670; HLA-B*13:02; PMEL; ENSG00000185664; TAA
FGDSSGTLI

SEQ ID NO: 65671 - protein, 9 aa, Homo sapiens
  misc_feature: Table A; Target 65671; HLA-B*27:05; PMEL; ENSG00000185664; TAA
FGDSSGTLI

SEQ ID NO: 65672 - protein, 9 aa, Homo sapiens
  misc_feature: Table A; Target 65672; HLA-B*35:01; PMEL; ENSG00000185664; TAA
FGDSSGTLI

SEQ ID NO: 65673 - protein, 9 aa, Homo sapiens
  misc_feature: Table A; Target 65673; HLA-B*35:03; PMEL; ENSG00000185664; TAA
FGDSSGTLI

SEQ ID NO: 65674 - protein, 9 aa, Homo sapiens
  misc_feature: Table A; Target 65674; HLA-B*38:01; PMEL; ENSG00000185664; TAA
FGDSSGTLI

SEQ ID NO: 65675 - protein, 9 aa, Homo sapiens
  misc_feature: Table A; Target 65675; HLA-B*39:01; PMEL; ENSG00000185664; TAA
FGDSSGTLI

SEQ ID NO: 65676 - protein, 9 aa, Homo sapiens
  misc_feature: Table A; Target 65676; HLA-B*40:01; PMEL; ENSG00000185664; TAA
FGDSSGTLI

SEQ ID NO: 65677 - protein, 9 aa, Homo sapiens
  misc_feature: Table A; Target 65677; HLA-B*49:01; PMEL; ENSG00000185664; TAA
FGDSSGTLI

SEQ ID NO: 65678 - protein, 9 aa, Homo sapiens
  misc_feature: Table A; Target 65678; HLA-B*51:01; PMEL; ENSG00000185664; TAA
FGDSSGTLI

SEQ ID NO: 65679 - protein, 9 aa, Homo sapiens
  misc_feature: Table A; Target 65679; HLA-B*55:01; PMEL; ENSG00000185664; TAA
FGDSSGTLI

SEQ ID NO: 65680 - protein, 9 aa, Homo sapiens
  misc_feature: Table A; Target 65680; HLA-C*02:02; PMEL; ENSG00000185664; TAA
FGDSSGTLI

SEQ ID NO: 65681 - protein, 9 aa, Homo sapiens
  misc_feature: Table A; Target 65681; HLA-C*03:03; PMEL; ENSG00000185664; TAA
FGDSSGTLI

SEQ ID NO: 65682 - protein, 9 aa, Homo sapiens
  misc_feature: Table A; Target 65682; HLA-C*03:04; PMEL; ENSG00000185664; TAA
FGDSSGTLI

SEQ ID NO: 65683 - protein, 9 aa, Homo sapiens
  misc_feature: Table A; Target 65683; HLA-C*04:01; PMEL; ENSG00000185664; TAA
FGDSSGTLI

SEQ ID NO: 65684 - protein, 9 aa, Homo sapiens
  misc_feature: Table A; Target 65684; HLA-C*05:01; PMEL; ENSG00000185664; TAA
FGDSSGTLI

SEQ ID NO: 65685 - protein, 9 aa, Homo sapiens
  misc_feature: Table A; Target 65685; HLA-C*07:01; PMEL; ENSG00000185664; TAA
FGDSSGTLI

SEQ ID NO: 65686 - protein, 9 aa, Homo sapiens
  misc_feature: Table A; Target 65686; HLA-C*07:04; PMEL; ENSG00000185664; TAA
FGDSSGTLI

SEQ ID NO: 65687 - protein, 11 aa, Homo sapiens
  misc_feature: Table A; Target 65687; HLA-A*11:01; PMEL; ENSG00000185664; TAA
FGDSSGTLISR

SEQ ID NO: 65688 - protein, 11 aa, Homo sapiens
  misc_feature: Table A; Target 65688; HLA-A*31:01; PMEL; ENSG00000185664; TAA
FGDSSGTLISR

SEQ ID NO: 65689 - protein, 11 aa, Homo sapiens
  misc_feature: Table A; Target 65689; HLA-A*33:01; PMEL; ENSG00000185664; TAA
FGDSSGTLISR

SEQ ID NO: 65690 - protein, 11 aa, Homo sapiens
  misc_feature: Table A; Target 65690; HLA-A*33:03; PMEL; ENSG00000185664; TAA
FGDSSGTLISR

SEQ ID NO: 65691 - protein, 11 aa, Homo sapiens
  misc_feature: Table A; Target 65691; HLA-A*68:01; PMEL; ENSG00000185664; TAA
FGDSSGTLISR

SEQ ID NO: 65692 - protein, 11 aa, Homo sapiens
  misc_feature: Table A; Target 65692; HLA-A*68:02; PMEL; ENSG00000185664; TAA
FGDSSGTLISR

SEQ ID NO: 65693 - protein, 11 aa, Homo sapiens
  misc_feature: Table A; Target 65693; HLA-B*27:02; PMEL; ENSG00000185664; TAA
FGDSSGTLISR

SEQ ID NO: 65694 - protein, 11 aa, Homo sapiens
  misc_feature: Table A; Target 65694; HLA-B*27:05; PMEL; ENSG00000185664; TAA
FGDSSGTLISR

SEQ ID NO: 65695 - protein, 11 aa, Homo sapiens
  misc_feature: Table A; Target 65695; HLA-B*35:01; PMEL; ENSG00000185664; TAA
FGDSSGTLISR

SEQ ID NO: 65696 - protein, 11 aa, Homo sapiens
  misc_feature: Table A; Target 65696; HLA-B*35:03; PMEL; ENSG00000185664; TAA
FGDSSGTLISR

SEQ ID NO: 65697 - protein, 11 aa, Homo sapiens
  misc_feature: Table A; Target 65697; HLA-B*54:01; PMEL; ENSG00000185664; TAA
FGDSSGTLISR

SEQ ID NO: 65698 - protein, 11 aa, Homo sapiens
  misc_feature: Table A; Target 65698; HLA-C*03:03; PMEL; ENSG00000185664; TAA
FGDSSGTLISR

SEQ ID NO: 65699 - protein, 11 aa, Homo sapiens
  misc_feature: Table A; Target 65699; HLA-C*03:04; PMEL; ENSG00000185664; TAA
FGDSSGTLISR

SEQ ID NO: 65700 - protein, 11 aa, Homo sapiens
  misc_feature: Table A; Target 65700; HLA-C*04:01; PMEL; ENSG00000185664; TAA
FGDSSGTLISR

SEQ ID NO: 65701 - protein, 11 aa, Homo sapiens
  misc_feature: Table A; Target 65701; HLA-C*05:01; PMEL; ENSG00000185664; TAA
FGDSSGTLISR

SEQ ID NO: 65702 - protein, 11 aa, Homo sapiens
  misc_feature: Table A; Target 65702; HLA-C*07:06; PMEL; ENSG00000185664; TAA
FGDSSGTLISR

SEQ ID NO: 65703 - protein, 9 aa, Homo sapiens
  misc_feature: Table A; Target 65703; HLA-A*02:01; PMEL; ENSG00000185664; TAA
FLRNQPLTF

SEQ ID NO: 65704 - protein, 9 aa, Homo sapiens
  misc_feature: Table A; Target 65704; HLA-A*02:03; PMEL; ENSG00000185664; TAA
FLRNQPLTF

SEQ ID NO: 65705 - protein, 9 aa, Homo sapiens
  misc_feature: Table A; Target 65705; HLA-A*02:04; PMEL; ENSG00000185664; TAA
FLRNQPLTF

SEQ ID NO: 65706 - protein, 9 aa, Homo sapiens
  misc_feature: Table A; Target 65706; HLA-A*02:07; PMEL; ENSG00000185664; TAA
FLRNQPLTF

SEQ ID NO: 65707 - protein, 9 aa, Homo sapiens
  misc_feature: Table A; Target 65707; HLA-A*03:01; PMEL; ENSG00000185664; TAA
FLRNQPLTF

SEQ ID NO: 65708 - protein, 9 aa, Homo sapiens
  misc_feature: Table A; Target 65708; HLA-A*23:01; PMEL; ENSG00000185664; TAA
FLRNQPLTF

SEQ ID NO: 65709 - protein, 9 aa, Homo sapiens
  misc_feature: Table A; Target 65709; HLA-A*24:02; PMEL; ENSG00000185664; TAA
FLRNQPLTF

SEQ ID NO: 65710 - protein, 9 aa, Homo sapiens
  misc_feature: Table A; Target 65710; HLA-A*25:01; PMEL; ENSG00000185664; TAA
FLRNQPLTF

SEQ ID NO: 65711 - protein, 9 aa, Homo sapiens
  misc_feature: Table A; Target 65711; HLA-A*29:02; PMEL; ENSG00000185664; TAA
FLRNQPLTF

SEQ ID NO: 65712 - protein, 9 aa, Homo sapiens
  misc_feature: Table A; Target 65712; HLA-A*30:01; PMEL; ENSG00000185664; TAA
FLRNQPLTF

SEQ ID NO: 65713 - protein, 9 aa, Homo sapiens
  misc_feature: Table A; Target 65713; HLA-A*31:01; PMEL; ENSG00000185664; TAA
FLRNQPLTF

SEQ ID NO: 65714 - protein, 9 aa, Homo sapiens
  misc_feature: Table A; Target 65714; HLA-A*32:01; PMEL; ENSG00000185664; TAA
FLRNQPLTF

SEQ ID NO: 65715 - protein, 9 aa, Homo sapiens
  misc_feature: Table A; Target 65715; HLA-A*33:01; PMEL; ENSG00000185664; TAA
FLRNQPLTF

SEQ ID NO: 65716 - protein, 9 aa, Homo sapiens
  misc_feature: Table A; Target 65716; HLA-B*07:02; PMEL; ENSG00000185664; TAA
FLRNQPLTF

SEQ ID NO: 65717 - protein, 9 aa, Homo sapiens
  misc_feature: Table A; Target 65717; HLA-B*08:01; PMEL; ENSG00000185664; TAA
FLRNQPLTF

SEQ ID NO: 65718 - protein, 9 aa, Homo sapiens
  misc_feature: Table A; Target 65718; HLA-B*13:02; PMEL; ENSG00000185664; TAA
FLRNQPLTF

SEQ ID NO: 65719 - protein, 9 aa, Homo sapiens
  misc_feature: Table A; Target 65719; HLA-B*15:01; PMEL; ENSG00000185664; TAA
FLRNQPLTF

SEQ ID NO: 65720 - protein, 9 aa, Homo sapiens
  misc_feature: Table A; Target 65720; HLA-B*15:03; PMEL; ENSG00000185664; TAA
FLRNQPLTF

SEQ ID NO: 65721 - protein, 9 aa, Homo sapiens
  misc_feature: Table A; Target 65721; HLA-B*40:02; PMEL; ENSG00000185664; TAA
FLRNQPLTF

SEQ ID NO: 65722 - protein, 9 aa, Homo sapiens
  misc_feature: Table A; Target 65722; HLA-B*46:01; PMEL; ENSG00000185664; TAA
FLRNQPLTF

SEQ ID NO: 65723 - protein, 9 aa, Homo sapiens
  misc_feature: Table A; Target 65723; HLA-B*54:01; PMEL; ENSG00000185664; TAA
FLRNQPLTF

SEQ ID NO: 65724 - protein, 9 aa, Homo sapiens
  misc_feature: Table A; Target 65724; HLA-B*57:01; PMEL; ENSG00000185664; TAA
FLRNQPLTF

SEQ ID NO: 65725 - protein, 9 aa, Homo sapiens
  misc_feature: Table A; Target 65725; HLA-B*58:01; PMEL; ENSG00000185664; TAA
FLRNQPLTF

SEQ ID NO: 65726 - protein, 9 aa, Homo sapiens
  misc_feature: Table A; Target 65726; HLA-C*01:02; PMEL; ENSG00000185664; TAA
FLRNQPLTF

SEQ ID NO: 65727 - protein, 9 aa, Homo sapiens
  misc_feature: Table A; Target 65727; HLA-C*02:02; PMEL; ENSG00000185664; TAA
FLRNQPLTF

SEQ ID NO: 65728 - protein, 9 aa, Homo sapiens
  misc_feature: Table A; Target 65728; HLA-C*06:02; PMEL; ENSG00000185664; TAA
FLRNQPLTF

SEQ ID NO: 65729 - protein, 9 aa, Homo sapiens
  misc_feature: Table A; Target 65729; HLA-C*07:02; PMEL; ENSG00000185664; TAA
FLRNQPLTF

SEQ ID NO: 65730 - protein, 9 aa, Homo sapiens
  misc_feature: Table A; Target 65730; HLA-C*07:04; PMEL; ENSG00000185664; TAA
FLRNQPLTF

SEQ ID NO: 65731 - protein, 9 aa, Homo sapiens
  misc_feature: Table A; Target 65731; HLA-C*12:03; PMEL; ENSG00000185664; TAA
FLRNQPLTF

SEQ ID NO: 65732 - protein, 9 aa, Homo sapiens
  misc_feature: Table A; Target 65732; HLA-C*14:02; PMEL; ENSG00000185664; TAA
FLRNQPLTF

SEQ ID NO: 65733 - protein, 9 aa, Homo sapiens
  misc_feature: Table A; Target 65733; HLA-C*16:01; PMEL; ENSG00000185664; TAA
FLRNQPLTF

SEQ ID NO: 65734 - protein, 9 aa, Homo sapiens
  misc_feature: Table A; Target 65734; HLA-C*16:02; PMEL; ENSG00000185664; TAA
FLRNQPLTF

SEQ ID NO: 65735 - protein, 9 aa, Homo sapiens
  misc_feature: Table A; Target 65735; HLA-C*16:04; PMEL; ENSG00000185664; TAA
FLRNQPLTF

SEQ ID NO: 65736 - protein, 10 aa, Homo sapiens
  misc_feature: Table A; Target 65736; HLA-A*02:03; PMEL; ENSG00000185664; TAA
FLRNQPLTFA

SEQ ID NO: 65737 - protein, 11 aa, Homo sapiens
  misc_feature: Table A; Target 65737; HLA-A*02:01; PMEL; ENSG00000185664; TAA
FLRNQPLTFAL

SEQ ID NO: 65738 - protein, 11 aa, Homo sapiens
  misc_feature: Table A; Target 65738; HLA-A*02:03; PMEL; ENSG00000185664; TAA
FLRNQPLTFAL

SEQ ID NO: 65739 - protein, 11 aa, Homo sapiens
  misc_feature: Table A; Target 65739; HLA-A*02:04; PMEL; ENSG00000185664; TAA
FLRNQPLTFAL

SEQ ID NO: 65740 - protein, 8 aa, Homo sapiens
  misc_feature: Table A; Target 65740; HLA-B*54:01; PMEL; ENSG00000185664; TAA
FPDGGPCP

SEQ ID NO: 65741 - protein, 8 aa, Homo sapiens
  misc_feature: Table A; Target 65741; HLA-B*55:01; PMEL; ENSG00000185664; TAA
FPDGGPCP

SEQ ID NO: 65742 - protein, 9 aa, Homo sapiens
  misc_feature: Table A; Target 65742; HLA-B*55:01; PMEL; ENSG00000185664; TAA
FPDGGPCPS

SEQ ID NO: 65743 - protein, 9 aa, Homo sapiens
  misc_feature: Table A; Target 65743; HLA-C*04:01; PMEL; ENSG00000185664; TAA
FPDGGPCPS

SEQ ID NO: 65744 - protein, 10 aa, Homo sapiens
  misc_feature: Table A; Target 65744; HLA-B*27:05; PMEL; ENSG00000185664; TAA
FPDGGPCPSG

SEQ ID NO: 65745 - protein, 10 aa, Homo sapiens
  misc_feature: Table A; Target 65745; HLA-B*54:01; PMEL; ENSG00000185664; TAA
FPDGGPCPSG

SEQ ID NO: 65746 - protein, 10 aa, Homo sapiens
  misc_feature: Table A; Target 65746; HLA-B*55:01; PMEL; ENSG00000185664; TAA
FPDGGPCPSG

SEQ ID NO: 65747 - protein, 8 aa, Homo sapiens
  misc_feature: Table A; Target 65747; HLA-B*07:02; PMEL; ENSG00000185664; TAA
FPGSQKVL

SEQ ID NO: 65748 - protein, 8 aa, Homo sapiens
  misc_feature: Table A; Target 65748; HLA-B*08:01; PMEL; ENSG00000185664; TAA
FPGSQKVL

SEQ ID NO: 65749 - protein, 8 aa, Homo sapiens
  misc_feature: Table A; Target 65749; HLA-B*35:01; PMEL; ENSG00000185664; TAA
FPGSQKVL

SEQ ID NO: 65750 - protein, 8 aa, Homo sapiens
  misc_feature: Table A; Target 65750; HLA-B*35:03; PMEL; ENSG00000185664; TAA
FPGSQKVL

SEQ ID NO: 65751 - protein, 8 aa, Homo sapiens
  misc_feature: Table A; Target 65751; HLA-B*51:01; PMEL; ENSG00000185664; TAA
FPGSQKVL

SEQ ID NO: 65752 - protein, 8 aa, Homo sapiens
  misc_feature: Table A; Target 65752; HLA-B*55:01; PMEL; ENSG00000185664; TAA
FPGSQKVL

SEQ ID NO: 65753 - protein, 8 aa, Homo sapiens
  misc_feature: Table A; Target 65753; HLA-C*07:01; PMEL; ENSG00000185664; TAA
FPGSQKVL

SEQ ID NO: 65754 - protein, 8 aa, Homo sapiens
  misc_feature: Table A; Target 65754; HLA-C*07:02; PMEL; ENSG00000185664; TAA
FPGSQKVL

SEQ ID NO: 65755 - protein, 9 aa, Homo sapiens
  misc_feature: Table A; Target 65755; HLA-B*54:01; PMEL; ENSG00000185664; TAA
FPGSQKVLP

SEQ ID NO: 65756 - protein, 8 aa, Homo sapiens
  misc_feature: Table A; Target 65756; HLA-A*30:01; PMEL; ENSG00000185664; TAA
FSVSVSQL

SEQ ID NO: 65757 - protein, 8 aa, Homo sapiens
  misc_feature: Table A; Target 65757; HLA-B*40:02; PMEL; ENSG00000185664; TAA
FSVSVSQL

SEQ ID NO: 65758 - protein, 8 aa, Homo sapiens
  misc_feature: Table A; Target 65758; HLA-B*46:01; PMEL; ENSG00000185664; TAA
FSVSVSQL

SEQ ID NO: 65759 - protein, 8 aa, Homo sapiens
  misc_feature: Table A; Target 65759; HLA-C*01:02; PMEL; ENSG00000185664; TAA
FSVSVSQL

SEQ ID NO: 65760 - protein, 8 aa, Homo sapiens
  misc_feature: Table A; Target 65760; HLA-C*02:02; PMEL; ENSG00000185664; TAA
FSVSVSQL

SEQ ID NO: 65761 - protein, 8 aa, Homo sapiens
  misc_feature: Table A; Target 65761; HLA-C*03:03; PMEL; ENSG00000185664; TAA
FSVSVSQL

SEQ ID NO: 65762 - protein, 8 aa, Homo sapiens
  misc_feature: Table A; Target 65762; HLA-C*03:04; PMEL; ENSG00000185664; TAA
FSVSVSQL

SEQ ID NO: 65763 - protein, 8 aa, Homo sapiens
  misc_feature: Table A; Target 65763; HLA-C*05:01; PMEL; ENSG00000185664; TAA
FSVSVSQL

SEQ ID NO: 65764 - protein, 8 aa, Homo sapiens
  misc_feature: Table A; Target 65764; HLA-C*07:04; PMEL; ENSG00000185664; TAA
FSVSVSQL

SEQ ID NO: 65765 - protein, 8 aa, Homo sapiens
  misc_feature: Table A; Target 65765; HLA-C*12:03; PMEL; ENSG00000185664; TAA
FSVSVSQL

SEQ ID NO: 65766 - protein, 8 aa, Homo sapiens
  misc_feature: Table A; Target 65766; HLA-C*14:02; PMEL; ENSG00000185664; TAA
FSVSVSQL

SEQ ID NO: 65767 - protein, 8 aa, Homo sapiens
  misc_feature: Table A; Target 65767; HLA-C*16:02; PMEL; ENSG00000185664; TAA
FSVSVSQL

SEQ ID NO: 65768 - protein, 9 aa, Homo sapiens
  misc_feature: Table A; Target 65768; HLA-A*31:01; PMEL; ENSG00000185664; TAA
FSVSVSQLR

SEQ ID NO: 65769 - protein, 9 aa, Homo sapiens
  misc_feature: Table A; Target 65769; HLA-A*33:01; PMEL; ENSG00000185664; TAA
FSVSVSQLR

SEQ ID NO: 65770 - protein, 9 aa, Homo sapiens
  misc_feature: Table A; Target 65770; HLA-A*33:03; PMEL; ENSG00000185664; TAA
FSVSVSQLR

SEQ ID NO: 65771 - protein, 9 aa, Homo sapiens
  misc_feature: Table A; Target 65771; HLA-A*68:01; PMEL; ENSG00000185664; TAA
FSVSVSQLR

SEQ ID NO: 65772 - protein, 9 aa, Homo sapiens
  misc_feature: Table A; Target 65772; HLA-A*68:02; PMEL; ENSG00000185664; TAA
FSVSVSQLR

SEQ ID NO: 65773 - protein, 9 aa, Homo sapiens
  misc_feature: Table A; Target 65773; HLA-B*57:01; PMEL; ENSG00000185664; TAA
FSVSVSQLR

SEQ ID NO: 65774 - protein, 9 aa, Homo sapiens
  misc_feature: Table A; Target 65774; HLA-C*07:06; PMEL; ENSG00000185664; TAA
FSVSVSQLR

SEQ ID NO: 65775 - protein, 11 aa, Homo sapiens
  misc_feature: Table A; Target 65775; HLA-C*03:03; PMEL; ENSG00000185664; TAA
FSVSVSQLRAL

SEQ ID NO: 65776 - protein, 11 aa, Homo sapiens
  misc_feature: Table A; Target 65776; HLA-C*03:04; PMEL; ENSG00000185664; TAA
FSVSVSQLRAL

SEQ ID NO: 65777 - protein, 11 aa, Homo sapiens
  misc_feature: Table A; Target 65777; HLA-C*06:02; PMEL; ENSG00000185664; TAA
FSVSVSQLRAL

SEQ ID NO: 65778 - protein, 11 aa, Homo sapiens
  misc_feature: Table A; Target 65778; HLA-A*68:02; PMEL; ENSG00000185664; TAA
FSVTLDIVQGI

SEQ ID NO: 65779 - protein, 9 aa, Homo sapiens
  misc_feature: Table A; Target 65779; HLA-A*23:01; PMEL; ENSG00000185664; TAA
FTITDQVPF

SEQ ID NO: 65780 - protein, 9 aa, Homo sapiens
  misc_feature: Table A; Target 65780; HLA-A*24:02; PMEL; ENSG00000185664; TAA
FTITDQVPF

SEQ ID NO: 65781 - protein, 9 aa, Homo sapiens
  misc_feature: Table A; Target 65781; HLA-A*25:01; PMEL; ENSG00000185664; TAA
FTITDQVPF

SEQ ID NO: 65782 - protein, 9 aa, Homo sapiens
  misc_feature: Table A; Target 65782; HLA-A*26:01; PMEL; ENSG00000185664; TAA
FTITDQVPF

SEQ ID NO: 65783 - protein, 9 aa, Homo sapiens
  misc_feature: Table A; Target 65783; HLA-A*29:02; PMEL; ENSG00000185664; TAA
FTITDQVPF

SEQ ID NO: 65784 - protein, 9 aa, Homo sapiens
  misc_feature: Table A; Target 65784; HLA-A*31:01; PMEL; ENSG00000185664; TAA
FTITDQVPF

SEQ ID NO: 65785 - protein, 9 aa, Homo sapiens
  misc_feature: Table A; Target 65785; HLA-A*33:01; PMEL; ENSG00000185664; TAA
FTITDQVPF

SEQ ID NO: 65786 - protein, 9 aa, Homo sapiens
  misc_feature: Table A; Target 65786; HLA-A*33:03; PMEL; ENSG00000185664; TAA
FTITDQVPF

SEQ ID NO: 65787 - protein, 9 aa, Homo sapiens
  misc_feature: Table A; Target 65787; HLA-A*68:01; PMEL; ENSG00000185664; TAA
FTITDQVPF

SEQ ID NO: 65788 - protein, 9 aa, Homo sapiens
  misc_feature: Table A; Target 65788; HLA-A*68:02; PMEL; ENSG00000185664; TAA
FTITDQVPF

SEQ ID NO: 65789 - protein, 9 aa, Homo sapiens
  misc_feature: Table A; Target 65789; HLA-B*15:01; PMEL; ENSG00000185664; TAA
FTITDQVPF

SEQ ID NO: 65790 - protein, 9 aa, Homo sapiens
  misc_feature: Table A; Target 65790; HLA-B*15:03; PMEL; ENSG00000185664; TAA
FTITDQVPF

SEQ ID NO: 65791 - protein, 9 aa, Homo sapiens
  misc_feature: Table A; Target 65791; HLA-B*27:02; PMEL; ENSG00000185664; TAA
FTITDQVPF

SEQ ID NO: 65792 - protein, 9 aa, Homo sapiens
  misc_feature: Table A; Target 65792; HLA-B*35:01; PMEL; ENSG00000185664; TAA
FTITDQVPF

SEQ ID NO: 65793 - protein, 9 aa, Homo sapiens
  misc_feature: Table A; Target 65793; HLA-B*35:03; PMEL; ENSG00000185664; TAA
FTITDQVPF

SEQ ID NO: 65794 - protein, 9 aa, Homo sapiens
  misc_feature: Table A; Target 65794; HLA-B*46:01; PMEL; ENSG00000185664; TAA
FTITDQVPF

SEQ ID NO: 65795 - protein, 9 aa, Homo sapiens
  misc_feature: Table A; Target 65795; HLA-B*54:01; PMEL; ENSG00000185664; TAA
FTITDQVPF

SEQ ID NO: 65796 - protein, 9 aa, Homo sapiens
  misc_feature: Table A; Target 65796; HLA-B*57:01; PMEL; ENSG00000185664; TAA
FTITDQVPF

SEQ ID NO: 65797 - protein, 9 aa, Homo sapiens
  misc_feature: Table A; Target 65797; HLA-B*58:01; PMEL; ENSG00000185664; TAA
FTITDQVPF

SEQ ID NO: 65798 - protein, 9 aa, Homo sapiens
  misc_feature: Table A; Target 65798; HLA-C*01:02; PMEL; ENSG00000185664; TAA
FTITDQVPF

SEQ ID NO: 65799 - protein, 9 aa, Homo sapiens
  misc_feature: Table A; Target 65799; HLA-C*02:02; PMEL; ENSG00000185664; TAA
FTITDQVPF

SEQ ID NO: 65800 - protein, 9 aa, Homo sapiens
  misc_feature: Table A; Target 65800; HLA-C*03:03; PMEL; ENSG00000185664; TAA
FTITDQVPF

SEQ ID NO: 65801 - protein, 9 aa, Homo sapiens
  misc_feature: Table A; Target 65801; HLA-C*03:04; PMEL; ENSG00000185664; TAA
FTITDQVPF

SEQ ID NO: 65802 - protein, 9 aa, Homo sapiens
  misc_feature: Table A; Target 65802; HLA-C*04:01; PMEL; ENSG00000185664; TAA
FTITDQVPF

SEQ ID NO: 65803 - protein, 9 aa, Homo sapiens
  misc_feature: Table A; Target 65803; HLA-C*05:01; PMEL; ENSG00000185664; TAA
FTITDQVPF

SEQ ID NO: 65804 - protein, 9 aa, Homo sapiens
  misc_feature: Table A; Target 65804; HLA-C*07:01; PMEL; ENSG00000185664; TAA
FTITDQVPF

SEQ ID NO: 65805 - protein, 9 aa, Homo sapiens
  misc_feature: Table A; Target 65805; HLA-C*07:04; PMEL; ENSG00000185664; TAA
FTITDQVPF

SEQ ID NO: 65806 - protein, 9 aa, Homo sapiens
  misc_feature: Table A; Target 65806; HLA-C*07:06; PMEL; ENSG00000185664; TAA
FTITDQVPF

SEQ ID NO: 65807 - protein, 9 aa, Homo sapiens
  misc_feature: Table A; Target 65807; HLA-C*12:03; PMEL; ENSG00000185664; TAA
FTITDQVPF

SEQ ID NO: 65808 - protein, 9 aa, Homo sapiens
  misc_feature: Table A; Target 65808; HLA-C*16:01; PMEL; ENSG00000185664; TAA
FTITDQVPF

SEQ ID NO: 65809 - protein, 9 aa, Homo sapiens
  misc_feature: Table A; Target 65809; HLA-C*16:04; PMEL; ENSG00000185664; TAA
FTITDQVPF

SEQ ID NO: 65810 - protein, 11 aa, Homo sapiens
  misc_feature: Table A; Target 65810; HLA-A*68:02; PMEL; ENSG00000185664; TAA
FTITDQVPFSV

SEQ ID NO: 65811 - protein, 8 aa, Homo sapiens
  misc_feature: Table A; Target 65811; HLA-B*57:01; PMEL; ENSG00000185664; TAA
FVYVWKTW

SEQ ID NO: 65812 - protein, 10 aa, Homo sapiens
  misc_feature: Table A; Target 65812; HLA-A*03:01; PMEL; ENSG00000185664; TAA
GALLAVGATK

SEQ ID NO: 65813 - protein, 10 aa, Homo sapiens
  misc_feature: Table A; Target 65813; HLA-A*03:02; PMEL; ENSG00000185664; TAA
GALLAVGATK

SEQ ID NO: 65814 - protein, 10 aa, Homo sapiens
  misc_feature: Table A; Target 65814; HLA-A*11:01; PMEL; ENSG00000185664; TAA
GALLAVGATK

SEQ ID NO: 65815 - protein, 10 aa, Homo sapiens
  misc_feature: Table A; Target 65815; HLA-B*27:02; PMEL; ENSG00000185664; TAA
GALLAVGATK

SEQ ID NO: 65816 - protein, 10 aa, Homo sapiens
  misc_feature: Table A; Target 65816; HLA-C*07:06; PMEL; ENSG00000185664; TAA
GALLAVGATK

SEQ ID NO: 65817 - protein, 8 aa, Homo sapiens
  misc_feature: Table A; Target 65817; HLA-B*13:02; PMEL; ENSG00000185664; TAA
GANASFSI

SEQ ID NO: 65818 - protein, 8 aa, Homo sapiens
  misc_feature: Table A; Target 65818; HLA-C*16:04; PMEL; ENSG00000185664; TAA
GANASFSI

SEQ ID NO: 65819 - protein, 9 aa, Homo sapiens
  misc_feature: Table A; Target 65819; HLA-B*54:01; PMEL; ENSG00000185664; TAA
GANASFSIA

SEQ ID NO: 65820 - protein, 9 aa, Homo sapiens
  misc_feature: Table A; Target 65820; HLA-B*56:01; PMEL; ENSG00000185664; TAA
GANASFSIA

SEQ ID NO: 65821 - protein, 9 aa, Homo sapiens
  misc_feature: Table A; Target 65821; HLA-C*03:03; PMEL; ENSG00000185664; TAA
GANASFSIA

SEQ ID NO: 65822 - protein, 9 aa, Homo sapiens
  misc_feature: Table A; Target 65822; HLA-C*12:03; PMEL; ENSG00000185664; TAA
GANASFSIA

SEQ ID NO: 65823 - protein, 10 aa, Homo sapiens
  misc_feature: Table A; Target 65823; HLA-B*07:02; PMEL; ENSG00000185664; TAA
GANASFSIAL

SEQ ID NO: 65824 - protein, 10 aa, Homo sapiens
  misc_feature: Table A; Target 65824; HLA-B*40:01; PMEL; ENSG00000185664; TAA
GANASFSIAL

SEQ ID NO: 65825 - protein, 10 aa, Homo sapiens
  misc_feature: Table A; Target 65825; HLA-B*40:02; PMEL; ENSG00000185664; TAA
GANASFSIAL

SEQ ID NO: 65826 - protein, 10 aa, Homo sapiens
  misc_feature: Table A; Target 65826; HLA-B*46:01; PMEL; ENSG00000185664; TAA
GANASFSIAL

SEQ ID NO: 65827 - protein, 10 aa, Homo sapiens
  misc_feature: Table A; Target 65827; HLA-C*02:02; PMEL; ENSG00000185664; TAA
GANASFSIAL

SEQ ID NO: 65828 - protein, 10 aa, Homo sapiens
  misc_feature: Table A; Target 65828; HLA-C*03:03; PMEL; ENSG00000185664; TAA
GANASFSIAL

SEQ ID NO: 65829 - protein, 10 aa, Homo sapiens
  misc_feature: Table A; Target 65829; HLA-C*03:04; PMEL; ENSG00000185664; TAA
GANASFSIAL

SEQ ID NO: 65830 - protein, 9 aa, Homo sapiens
  misc_feature: Table A; Target 65830; HLA-A*03:02; PMEL; ENSG00000185664; TAA
GCQPPAQRL

SEQ ID NO: 65831 - protein, 9 aa, Homo sapiens
  misc_feature: Table A; Target 65831; HLA-B*07:02; PMEL; ENSG00000185664; TAA
GCQPPAQRL

SEQ ID NO: 65832 - protein, 9 aa, Homo sapiens
  misc_feature: Table A; Target 65832; HLA-B*15:01; PMEL; ENSG00000185664; TAA
GCQPPAQRL

SEQ ID NO: 65833 - protein, 9 aa, Homo sapiens
  misc_feature: Table A; Target 65833; HLA-C*01:02; PMEL; ENSG00000185664; TAA
GCQPPAQRL

SEQ ID NO: 65834 - protein, 9 aa, Homo sapiens
  misc_feature: Table A; Target 65834; HLA-C*03:03; PMEL; ENSG00000185664; TAA
GCQPPAQRL

SEQ ID NO: 65835 - protein, 9 aa, Homo sapiens
  misc_feature: Table A; Target 65835; HLA-C*03:04; PMEL; ENSG00000185664; TAA
GCQPPAQRL

SEQ ID NO: 65836 - protein, 9 aa, Homo sapiens
  misc_feature: Table A; Target 65836; HLA-C*16:02; PMEL; ENSG00000185664; TAA
GCQPPAQRL

SEQ ID NO: 65837 - protein, 8 aa, Homo sapiens
  misc_feature: Table A; Target 65837; HLA-B*37:01; PMEL; ENSG00000185664; TAA
GDSSGTLI

SEQ ID NO: 65838 - protein, 8 aa, Homo sapiens
  misc_feature: Table A; Target 65838; HLA-B*49:01; PMEL; ENSG00000185664; TAA
GDSSGTLI

SEQ ID NO: 65839 - protein, 8 aa, Homo sapiens
  misc_feature: Table A; Target 65839; HLA-C*04:01; PMEL; ENSG00000185664; TAA
GDSSGTLI

SEQ ID NO: 65840 - protein, 10 aa, Homo sapiens
  misc_feature: Table A; Target 65840; HLA-A*03:01; PMEL; ENSG00000185664; TAA
GDSSGTLISR

SEQ ID NO: 65841 - protein, 10 aa, Homo sapiens
  misc_feature: Table A; Target 65841; HLA-A*03:02; PMEL; ENSG00000185664; TAA
GDSSGTLISR

SEQ ID NO: 65842 - protein, 10 aa, Homo sapiens
  misc_feature: Table A; Target 65842; HLA-A*11:01; PMEL; ENSG00000185664; TAA
GDSSGTLISR

SEQ ID NO: 65843 - protein, 10 aa, Homo sapiens
  misc_feature: Table A; Target 65843; HLA-A*31:01; PMEL; ENSG00000185664; TAA
GDSSGTLISR

SEQ ID NO: 65844 - protein, 10 aa, Homo sapiens
  misc_feature: Table A; Target 65844; HLA-A*33:01; PMEL; ENSG00000185664; TAA
GDSSGTLISR

SEQ ID NO: 65845 - protein, 10 aa, Homo sapiens
  misc_feature: Table A; Target 65845; HLA-A*33:03; PMEL; ENSG00000185664; TAA
GDSSGTLISR

SEQ ID NO: 65846 - protein, 10 aa, Homo sapiens
  misc_feature: Table A; Target 65846; HLA-A*68:01; PMEL; ENSG00000185664; TAA
GDSSGTLISR

SEQ ID NO: 65847 - protein, 10 aa, Homo sapiens
  misc_feature: Table A; Target 65847; HLA-A*68:02; PMEL; ENSG00000185664; TAA
GDSSGTLISR

SEQ ID NO: 65848 - protein, 10 aa, Homo sapiens
  misc_feature: Table A; Target 65848; HLA-B*27:02; PMEL; ENSG00000185664; TAA
GDSSGTLISR

SEQ ID NO: 65849 - protein, 10 aa, Homo sapiens
  misc_feature: Table A; Target 65849; HLA-B*27:05; PMEL; ENSG00000185664; TAA
GDSSGTLISR

SEQ ID NO: 65850 - protein, 10 aa, Homo sapiens
  misc_feature: Table A; Target 65850; HLA-C*04:01; PMEL; ENSG00000185664; TAA
GDSSGTLISR

SEQ ID NO: 65851 - protein, 10 aa, Homo sapiens
  misc_feature: Table A; Target 65851; HLA-C*07:02; PMEL; ENSG00000185664; TAA
GDSSGTLISR

SEQ ID NO: 65852 - protein, 10 aa, Homo sapiens
  misc_feature: Table A; Target 65852; HLA-C*07:06; PMEL; ENSG00000185664; TAA
GDSSGTLISR

SEQ ID NO: 65853 - protein, 11 aa, Homo sapiens
  misc_feature: Table A; Target 65853; HLA-C*12:03; PMEL; ENSG00000185664; TAA
GDSSGTLISRA

SEQ ID NO: 65854 - protein, 8 aa, Homo sapiens
  misc_feature: Table A; Target 65854; HLA-A*30:01; PMEL; ENSG00000185664; TAA
GEGDAFEL

SEQ ID NO: 65855 - protein, 8 aa, Homo sapiens
  misc_feature: Table A; Target 65855; HLA-B*18:01; PMEL; ENSG00000185664; TAA
GEGDAFEL

SEQ ID NO: 65856 - protein, 8 aa, Homo sapiens
  misc_feature: Table A; Target 65856; HLA-B*27:05; PMEL; ENSG00000185664; TAA
GEGDAFEL

SEQ ID NO: 65857 - protein, 8 aa, Homo sapiens
  misc_feature: Table A; Target 65857; HLA-B*37:01; PMEL; ENSG00000185664; TAA
GEGDAFEL

SEQ ID NO: 65858 - protein, 8 aa, Homo sapiens
  misc_feature: Table A; Target 65858; HLA-B*40:01; PMEL; ENSG00000185664; TAA
GEGDAFEL

SEQ ID NO: 65859 - protein, 8 aa, Homo sapiens
  misc_feature: Table A; Target 65859; HLA-B*40:02; PMEL; ENSG00000185664; TAA
GEGDAFEL

SEQ ID NO: 65860 - protein, 8 aa, Homo sapiens
  misc_feature: Table A; Target 65860; HLA-B*44:02; PMEL; ENSG00000185664; TAA
GEGDAFEL

SEQ ID NO: 65861 - protein, 8 aa, Homo sapiens
  misc_feature: Table A; Target 65861; HLA-B*44:03; PMEL; ENSG00000185664; TAA
GEGDAFEL

SEQ ID NO: 65862 - protein, 8 aa, Homo sapiens
  misc_feature: Table A; Target 65862; HLA-B*49:01; PMEL; ENSG00000185664; TAA
GEGDAFEL

SEQ ID NO: 65863 - protein, 8 aa, Homo sapiens
  misc_feature: Table A; Target 65863; HLA-C*16:04; PMEL; ENSG00000185664; TAA
GEGDAFEL

SEQ ID NO: 65864 - protein, 9 aa, Homo sapiens
  misc_feature: Table A; Target 65864; HLA-B*49:01; PMEL; ENSG00000185664; TAA
GEGDAFELT

SEQ ID NO: 65865 - protein, 10 aa, Homo sapiens
  misc_feature: Table A; Target 65865; HLA-A*30:01; PMEL; ENSG00000185664; TAA
GEGDAFELTV

SEQ ID NO: 65866 - protein, 10 aa, Homo sapiens
  misc_feature: Table A; Target 65866; HLA-B*13:02; PMEL; ENSG00000185664; TAA
GEGDAFELTV

SEQ ID NO: 65867 - protein, 10 aa, Homo sapiens
  misc_feature: Table A; Target 65867; HLA-B*27:02; PMEL; ENSG00000185664; TAA
GEGDAFELTV

SEQ ID NO: 65868 - protein, 10 aa, Homo sapiens
  misc_feature: Table A; Target 65868; HLA-B*40:01; PMEL; ENSG00000185664; TAA
GEGDAFELTV

SEQ ID NO: 65869 - protein, 10 aa, Homo sapiens
  misc_feature: Table A; Target 65869; HLA-B*40:02; PMEL; ENSG00000185664; TAA
GEGDAFELTV

SEQ ID NO: 65870 - protein, 10 aa, Homo sapiens
  misc_feature: Table A; Target 65870; HLA-B*44:02; PMEL; ENSG00000185664; TAA
GEGDAFELTV

SEQ ID NO: 65871 - protein, 10 aa, Homo sapiens
  misc_feature: Table A; Target 65871; HLA-B*44:03; PMEL; ENSG00000185664; TAA
GEGDAFELTV

SEQ ID NO: 65872 - protein, 10 aa, Homo sapiens
  misc_feature: Table A; Target 65872; HLA-B*49:01; PMEL; ENSG00000185664; TAA
GEGDAFELTV

SEQ ID NO: 65873 - protein, 10 aa, Homo sapiens
  misc_feature: Table A; Target 65873; HLA-C*16:04; PMEL; ENSG00000185664; TAA
GEGDAFELTV

SEQ ID NO: 65874 - protein, 9 aa, Homo sapiens
  misc_feature: Table A; Target 65874; HLA-A*30:01; PMEL; ENSG00000185664; TAA
GENSPLLSG

SEQ ID NO: 65875 - protein, 9 aa, Homo sapiens
  misc_feature: Table A; Target 65875; HLA-B*49:01; PMEL; ENSG00000185664; TAA
GENSPLLSG

SEQ ID NO: 65876 - protein, 9 aa, Homo sapiens
  misc_feature: Table A; Target 65876; HLA-C*16:04; PMEL; ENSG00000185664; TAA
GENSPLLSG

SEQ ID NO: 65877 - protein, 8 aa, Homo sapiens
  misc_feature: Table A; Target 65877; HLA-A*31:01; PMEL; ENSG00000185664; TAA
GGNKHFLR

SEQ ID NO: 65878 - protein, 9 aa, Homo sapiens
  misc_feature: Table A; Target 65878; HLA-B*13:02; PMEL; ENSG00000185664; TAA
GGPVSGLSI

SEQ ID NO: 65879 - protein, 9 aa, Homo sapiens
  misc_feature: Table A; Target 65879; HLA-B*15:03; PMEL; ENSG00000185664; TAA
GGPVSGLSI

SEQ ID NO: 65880 - protein, 9 aa, Homo sapiens
  misc_feature: Table A; Target 65880; HLA-B*46:01; PMEL; ENSG00000185664; TAA
GGPVSGLSI

SEQ ID NO: 65881 - protein, 9 aa, Homo sapiens
  misc_feature: Table A; Target 65881; HLA-B*51:01; PMEL; ENSG00000185664; TAA
GGPVSGLSI

SEQ ID NO: 65882 - protein, 9 aa, Homo sapiens
  misc_feature: Table A; Target 65882; HLA-C*01:02; PMEL; ENSG00000185664; TAA
GGPVSGLSI

SEQ ID NO: 65883 - protein, 9 aa, Homo sapiens
  misc_feature: Table A; Target 65883; HLA-C*03:03; PMEL; ENSG00000185664; TAA
GGPVSGLSI

SEQ ID NO: 65884 - protein, 9 aa, Homo sapiens
  misc_feature: Table A; Target 65884; HLA-C*03:04; PMEL; ENSG00000185664; TAA
GGPVSGLSI

SEQ ID NO: 65885 - protein, 9 aa, Homo sapiens
  misc_feature: Table A; Target 65885; HLA-C*04:01; PMEL; ENSG00000185664; TAA
GGPVSGLSI

SEQ ID NO: 65886 - protein, 9 aa, Homo sapiens
  misc_feature: Table A; Target 65886; HLA-C*06:02; PMEL; ENSG00000185664; TAA
GGPVSGLSI

SEQ ID NO: 65887 - protein, 9 aa, Homo sapiens
  misc_feature: Table A; Target 65887; HLA-C*07:02; PMEL; ENSG00000185664; TAA
GGPVSGLSI

SEQ ID NO: 65888 - protein, 9 aa, Homo sapiens
  misc_feature: Table A; Target 65888; HLA-C*14:02; PMEL; ENSG00000185664; TAA
GGPVSGLSI

SEQ ID NO: 65889 - protein, 8 aa, Homo sapiens
  misc_feature: Table A; Target 65889; HLA-B*13:02; PMEL; ENSG00000185664; TAA
GGQVSLKV

SEQ ID NO: 65890 - protein, 8 aa, Homo sapiens
  misc_feature: Table A; Target 65890; HLA-C*06:02; PMEL; ENSG00000185664; TAA
GGQVSLKV

SEQ ID NO: 65891 - protein, 8 aa, Homo sapiens
  misc_feature: Table A; Target 65891; HLA-C*06:02; PMEL; ENSG00000185664; TAA
GGSGTYCL

SEQ ID NO: 65892 - protein, 11 aa, Homo sapiens
  misc_feature: Table A; Target 65892; HLA-A*02:07; PMEL; ENSG00000185664; TAA
GIESAEILQAV

SEQ ID NO: 65893 - protein, 9 aa, Homo sapiens
  misc_feature: Table A; Target 65893; HLA-A*02:04; PMEL; ENSG00000185664; TAA
GILLVLMAV

SEQ ID NO: 65894 - protein, 8 aa, Homo sapiens
  misc_feature: Table A; Target 65894; HLA-A*02:01; PMEL; ENSG00000185664; TAA
GLGQVPLI

SEQ ID NO: 65895 - protein, 8 aa, Homo sapiens
  misc_feature: Table A; Target 65895; HLA-A*02:03; PMEL; ENSG00000185664; TAA
GLGQVPLI

SEQ ID NO: 65896 - protein, 8 aa, Homo sapiens
  misc_feature: Table A; Target 65896; HLA-A*02:04; PMEL; ENSG00000185664; TAA
GLGQVPLI

SEQ ID NO: 65897 - protein, 8 aa, Homo sapiens
  misc_feature: Table A; Target 65897; HLA-B*13:02; PMEL; ENSG00000185664; TAA
GLGQVPLI

SEQ ID NO: 65898 - protein, 8 aa, Homo sapiens
  misc_feature: Table A; Target 65898; HLA-B*55:01; PMEL; ENSG00000185664; TAA
GLGQVPLI

SEQ ID NO: 65899 - protein, 9 aa, Homo sapiens
  misc_feature: Table A; Target 65899; HLA-A*02:01; PMEL; ENSG00000185664; TAA
GLGQVPLIV

SEQ ID NO: 65900 - protein, 9 aa, Homo sapiens
  misc_feature: Table A; Target 65900; HLA-A*02:03; PMEL; ENSG00000185664; TAA
GLGQVPLIV

SEQ ID NO: 65901 - protein, 9 aa, Homo sapiens
  misc_feature: Table A; Target 65901; HLA-A*02:04; PMEL; ENSG00000185664; TAA
GLGQVPLIV

SEQ ID NO: 65902 - protein, 9 aa, Homo sapiens
  misc_feature: Table A; Target 65902; HLA-A*02:07; PMEL; ENSG00000185664; TAA
GLGQVPLIV

SEQ ID NO: 65903 - protein, 9 aa, Homo sapiens
  misc_feature: Table A; Target 65903; HLA-A*03:01; PMEL; ENSG00000185664; TAA
GLGQVPLIV

SEQ ID NO: 65904 - protein, 9 aa, Homo sapiens
  misc_feature: Table A; Target 65904; HLA-A*30:01; PMEL; ENSG00000185664; TAA
GLGQVPLIV

SEQ ID NO: 65905 - protein, 9 aa, Homo sapiens
  misc_feature: Table A; Target 65905; HLA-B*13:02; PMEL; ENSG00000185664; TAA
GLGQVPLIV

SEQ ID NO: 65906 - protein, 9 aa, Homo sapiens
  misc_feature: Table A; Target 65906; HLA-B*55:01; PMEL; ENSG00000185664; TAA
GLGQVPLIV

SEQ ID NO: 65907 - protein, 9 aa, Homo sapiens
  misc_feature: Table A; Target 65907; HLA-C*06:02; PMEL; ENSG00000185664; TAA
GLGQVPLIV

SEQ ID NO: 65908 - protein, 9 aa, Homo sapiens
  misc_feature: Table A; Target 65908; HLA-C*12:03; PMEL; ENSG00000185664; TAA
GLGQVPLIV

SEQ ID NO: 65909 - protein, 11 aa, Homo sapiens
  misc_feature: Table A; Target 65909; HLA-A*02:01; PMEL; ENSG00000185664; TAA
GLGQVPLIVGI

SEQ ID NO: 65910 - protein, 11 aa, Homo sapiens
  misc_feature: Table A; Target 65910; HLA-A*02:04; PMEL; ENSG00000185664; TAA
GLGQVPLIVGI

SEQ ID NO: 65911 - protein, 11 aa, Homo sapiens
  misc_feature: Table A; Target 65911; HLA-A*02:07; PMEL; ENSG00000185664; TAA
GLGQVPLIVGI

SEQ ID NO: 65912 - protein, 9 aa, Homo sapiens
  misc_feature: Table A; Target 65912; HLA-A*02:03; PMEL; ENSG00000185664; TAA
GLSIGTGRA

SEQ ID NO: 65913 - protein, 10 aa, Homo sapiens
  misc_feature: Table A; Target 65913; HLA-C*01:02; PMEL; ENSG00000185664; TAA
GLSIGTGRAM

SEQ ID NO: 65914 - protein, 10 aa, Homo sapiens
  misc_feature: Table A; Target 65914; HLA-C*07:02; PMEL; ENSG00000185664; TAA
GLSIGTGRAM

SEQ ID NO: 65915 - protein, 9 aa, Homo sapiens
  misc_feature: Table A; Target 65915; HLA-A*02:01; PMEL; ENSG00000185664; TAA
GMTPAEVSI

SEQ ID NO: 65916 - protein, 9 aa, Homo sapiens
  misc_feature: Table A; Target 65916; HLA-A*02:03; PMEL; ENSG00000185664; TAA
GMTPAEVSI

SEQ ID NO: 65917 - protein, 9 aa, Homo sapiens
  misc_feature: Table A; Target 65917; HLA-A*23:01; PMEL; ENSG00000185664; TAA
GMTPAEVSI

SEQ ID NO: 65918 - protein, 9 aa, Homo sapiens
  misc_feature: Table A; Target 65918; HLA-A*30:01; PMEL; ENSG00000185664; TAA
GMTPAEVSI

SEQ ID NO: 65919 - protein, 9 aa, Homo sapiens
  misc_feature: Table A; Target 65919; HLA-B*13:02; PMEL; ENSG00000185664; TAA
GMTPAEVSI

SEQ ID NO: 65920 - protein, 9 aa, Homo sapiens
  misc_feature: Table A; Target 65920; HLA-B*15:01; PMEL; ENSG00000185664; TAA
GMTPAEVSI

SEQ ID NO: 65921 - protein, 9 aa, Homo sapiens
  misc_feature: Table A; Target 65921; HLA-B*55:01; PMEL; ENSG00000185664; TAA
GMTPAEVSI

SEQ ID NO: 65922 - protein, 9 aa, Homo sapiens
  misc_feature: Table A; Target 65922; HLA-C*06:02; PMEL; ENSG00000185664; TAA
GMTPAEVSI

SEQ ID NO: 65923 - protein, 10 aa, Homo sapiens
  misc_feature: Table A; Target 65923; HLA-A*02:03; PMEL; ENSG00000185664; TAA
GMTPAEVSIV

SEQ ID NO: 65924 - protein, 11 aa, Homo sapiens
  misc_feature: Table A; Target 65924; HLA-A*02:01; PMEL; ENSG00000185664; TAA
GMTPAEVSIVV

SEQ ID NO: 65925 - protein, 9 aa, Homo sapiens
  misc_feature: Table A; Target 65925; HLA-A*02:01; PMEL; ENSG00000185664; TAA
GMTPEKVPV

SEQ ID NO: 65926 - protein, 9 aa, Homo sapiens
  misc_feature: Table A; Target 65926; HLA-A*02:03; PMEL; ENSG00000185664; TAA
GMTPEKVPV

SEQ ID NO: 65927 - protein, 9 aa, Homo sapiens
  misc_feature: Table A; Target 65927; HLA-B*13:02; PMEL; ENSG00000185664; TAA
GMTPEKVPV

SEQ ID NO: 65928 - protein, 9 aa, Homo sapiens
  misc_feature: Table A; Target 65928; HLA-B*55:01; PMEL; ENSG00000185664; TAA
GMTPEKVPV

SEQ ID NO: 65929 - protein, 9 aa, Homo sapiens
  misc_feature: Table A; Target 65929; HLA-C*16:02; PMEL; ENSG00000185664; TAA
GMTPEKVPV

SEQ ID NO: 65930 - protein, 8 aa, Homo sapiens
  misc_feature: Table A; Target 65930; HLA-B*35:03; PMEL; ENSG00000185664; TAA
GPDASSIM

SEQ ID NO: 65931 - protein, 8 aa, Homo sapiens
  misc_feature: Table A; Target 65931; HLA-B*55:01; PMEL; ENSG00000185664; TAA
GPDASSIM

SEQ ID NO: 65932 - protein, 8 aa, Homo sapiens
  misc_feature: Table A; Target 65932; HLA-C*05:01; PMEL; ENSG00000185664; TAA
GPDASSIM

SEQ ID NO: 65933 - protein, 9 aa, Homo sapiens
  misc_feature: Table A; Target 65933; HLA-B*56:01; PMEL; ENSG00000185664; TAA
GPLLDGTAT

SEQ ID NO: 65934 - protein, 10 aa, Homo sapiens
  misc_feature: Table A; Target 65934; HLA-B*07:02; PMEL; ENSG00000185664; TAA
GPLLDGTATL

SEQ ID NO: 65935 - protein, 10 aa, Homo sapiens
  misc_feature: Table A; Target 65935; HLA-B*35:01; PMEL; ENSG00000185664; TAA
GPLLDGTATL

SEQ ID NO: 65936 - protein, 10 aa, Homo sapiens
  misc_feature: Table A; Target 65936; HLA-B*35:03; PMEL; ENSG00000185664; TAA
GPLLDGTATL

SEQ ID NO: 65937 - protein, 10 aa, Homo sapiens
  misc_feature: Table A; Target 65937; HLA-B*40:01; PMEL; ENSG00000185664; TAA
GPLLDGTATL

SEQ ID NO: 65938 - protein, 10 aa, Homo sapiens
  misc_feature: Table A; Target 65938; HLA-B*56:01; PMEL; ENSG00000185664; TAA
GPLLDGTATL

SEQ ID NO: 65939 - protein, 10 aa, Homo sapiens
  misc_feature: Table A; Target 65939; HLA-C*07:02; PMEL; ENSG00000185664; TAA
GPLLDGTATL

SEQ ID NO: 65940 - protein, 9 aa, Homo sapiens
  misc_feature: Table A; Target 65940; HLA-B*07:02; PMEL; ENSG00000185664; TAA
GPTLIGANA

SEQ ID NO: 65941 - protein, 9 aa, Homo sapiens
  misc_feature: Table A; Target 65941; HLA-B*54:01; PMEL; ENSG00000185664; TAA
GPTLIGANA

SEQ ID NO: 65942 - protein, 9 aa, Homo sapiens
  misc_feature: Table A; Target 65942; HLA-B*55:01; PMEL; ENSG00000185664; TAA
GPTLIGANA

SEQ ID NO: 65943 - protein, 9 aa, Homo sapiens
  misc_feature: Table A; Target 65943; HLA-B*56:01; PMEL; ENSG00000185664; TAA
GPTLIGANA

SEQ ID NO: 65944 - protein, 9 aa, Homo sapiens
  misc_feature: Table A; Target 65944; HLA-C*07:02; PMEL; ENSG00000185664; TAA
GPTLIGANA

SEQ ID NO: 65945 - protein, 11 aa, Homo sapiens
  misc_feature: Table A; Target 65945; HLA-A*23:01; PMEL; ENSG00000185664; TAA
GPTLIGANASF

SEQ ID NO: 65946 - protein, 11 aa, Homo sapiens
  misc_feature: Table A; Target 65946; HLA-B*07:02; PMEL; ENSG00000185664; TAA
GPTLIGANASF

SEQ ID NO: 65947 - protein, 11 aa, Homo sapiens
  misc_feature: Table A; Target 65947; HLA-B*18:01; PMEL; ENSG00000185664; TAA
GPTLIGANASF

SEQ ID NO: 65948 - protein, 11 aa, Homo sapiens
  misc_feature: Table A; Target 65948; HLA-B*35:01; PMEL; ENSG00000185664; TAA
GPTLIGANASF

SEQ ID NO: 65949 - protein, 11 aa, Homo sapiens
  misc_feature: Table A; Target 65949; HLA-B*35:03; PMEL; ENSG00000185664; TAA
GPTLIGANASF

SEQ ID NO: 65950 - protein, 11 aa, Homo sapiens
  misc_feature: Table A; Target 65950; HLA-B*38:01; PMEL; ENSG00000185664; TAA
GPTLIGANASF

SEQ ID NO: 65951 - protein, 11 aa, Homo sapiens
  misc_feature: Table A; Target 65951; HLA-B*44:03; PMEL; ENSG00000185664; TAA
GPTLIGANASF

SEQ ID NO: 65952 - protein, 11 aa, Homo sapiens
  misc_feature: Table A; Target 65952; HLA-B*55:01; PMEL; ENSG00000185664; TAA
GPTLIGANASF

SEQ ID NO: 65953 - protein, 11 aa, Homo sapiens
  misc_feature: Table A; Target 65953; HLA-B*56:01; PMEL; ENSG00000185664; TAA
GPTLIGANASF

SEQ ID NO: 65954 - protein, 11 aa, Homo sapiens
  misc_feature: Table A; Target 65954; HLA-C*04:01; PMEL; ENSG00000185664; TAA
GPTLIGANASF

SEQ ID NO: 65955 - protein, 11 aa, Homo sapiens
  misc_feature: Table A; Target 65955; HLA-C*07:01; PMEL; ENSG00000185664; TAA
GPTLIGANASF

SEQ ID NO: 65956 - protein, 11 aa, Homo sapiens
  misc_feature: Table A; Target 65956; HLA-C*07:02; PMEL; ENSG00000185664; TAA
GPTLIGANASF

SEQ ID NO: 65957 - protein, 8 aa, Homo sapiens
  misc_feature: Table A; Target 65957; HLA-B*07:02; PMEL; ENSG00000185664; TAA
GPVSGLSI

SEQ ID NO: 65958 - protein, 8 aa, Homo sapiens
  misc_feature: Table A; Target 65958; HLA-B*51:01; PMEL; ENSG00000185664; TAA
GPVSGLSI

SEQ ID NO: 65959 - protein, 8 aa, Homo sapiens
  misc_feature: Table A; Target 65959; HLA-B*56:01; PMEL; ENSG00000185664; TAA
GPVSGLSI

SEQ ID NO: 65960 - protein, 8 aa, Homo sapiens
  misc_feature: Table A; Target 65960; HLA-C*07:02; PMEL; ENSG00000185664; TAA
GPVSGLSI

SEQ ID NO: 65961 - protein, 10 aa, Homo sapiens
  misc_feature: Table A; Target 65961; HLA-B*56:01; PMEL; ENSG00000185664; TAA
GPVSGLSIGT

SEQ ID NO: 65962 - protein, 11 aa, Homo sapiens
  misc_feature: Table A; Target 65962; HLA-B*56:01; PMEL; ENSG00000185664; TAA
GPVSGLSIGTG

SEQ ID NO: 65963 - protein, 11 aa, Homo sapiens
  misc_feature: Table A; Target 65963; HLA-C*04:01; PMEL; ENSG00000185664; TAA
GPVSGLSIGTG

SEQ ID NO: 65964 - protein, 11 aa, Homo sapiens
  misc_feature: Table A; Target 65964; HLA-C*07:01; PMEL; ENSG00000185664; TAA
GPVSGLSIGTG

SEQ ID NO: 65965 - protein, 11 aa, Homo sapiens
  misc_feature: Table A; Target 65965; HLA-C*07:02; PMEL; ENSG00000185664; TAA
GPVSGLSIGTG

SEQ ID NO: 65966 - protein, 11 aa, Homo sapiens
  misc_feature: Table A; Target 65966; HLA-C*12:03; PMEL; ENSG00000185664; TAA
GPVSGLSIGTG

SEQ ID NO: 65967 - protein, 8 aa, Homo sapiens
  misc_feature: Table A; Target 65967; HLA-B*51:01; PMEL; ENSG00000185664; TAA
GPVTAQVV

SEQ ID NO: 65968 - protein, 8 aa, Homo sapiens
  misc_feature: Table A; Target 65968; HLA-B*56:01; PMEL; ENSG00000185664; TAA
GPVTAQVV

SEQ ID NO: 65969 - protein, 9 aa, Homo sapiens
  misc_feature: Table A; Target 65969; HLA-B*07:02; PMEL; ENSG00000185664; TAA
GPVTAQVVL

SEQ ID NO: 65970 - protein, 9 aa, Homo sapiens
  misc_feature: Table A; Target 65970; HLA-B*35:01; PMEL; ENSG00000185664; TAA
GPVTAQVVL

SEQ ID NO: 65971 - protein, 9 aa, Homo sapiens
  misc_feature: Table A; Target 65971; HLA-B*35:03; PMEL; ENSG00000185664; TAA
GPVTAQVVL

SEQ ID NO: 65972 - protein, 9 aa, Homo sapiens
  misc_feature: Table A; Target 65972; HLA-B*40:01; PMEL; ENSG00000185664; TAA
GPVTAQVVL

SEQ ID NO: 65973 - protein, 9 aa, Homo sapiens
  misc_feature: Table A; Target 65973; HLA-B*55:01; PMEL; ENSG00000185664; TAA
GPVTAQVVL

SEQ ID NO: 65974 - protein, 9 aa, Homo sapiens
  misc_feature: Table A; Target 65974; HLA-B*56:01; PMEL; ENSG00000185664; TAA
GPVTAQVVL

SEQ ID NO: 65975 - protein, 9 aa, Homo sapiens
  misc_feature: Table A; Target 65975; HLA-C*03:03; PMEL; ENSG00000185664; TAA
GPVTAQVVL

SEQ ID NO: 65976 - protein, 9 aa, Homo sapiens
  misc_feature: Table A; Target 65976; HLA-C*07:02; PMEL; ENSG00000185664; TAA
GPVTAQVVL

SEQ ID NO: 65977 - protein, 11 aa, Homo sapiens
  misc_feature: Table A; Target 65977; HLA-B*54:01; PMEL; ENSG00000185664; TAA
GPVTAQVVLQA

SEQ ID NO: 65978 - protein, 11 aa, Homo sapiens
  misc_feature: Table A; Target 65978; HLA-B*56:01; PMEL; ENSG00000185664; TAA
GPVTAQVVLQA

SEQ ID NO: 65979 - protein, 10 aa, Homo sapiens
  misc_feature: Table A; Target 65979; HLA-B*13:02; PMEL; ENSG00000185664; TAA
GQAPTAEPSG

SEQ ID NO: 65980 - protein, 10 aa, Homo sapiens
  misc_feature: Table A; Target 65980; HLA-B*27:05; PMEL; ENSG00000185664; TAA
GQAPTAEPSG

SEQ ID NO: 65981 - protein, 10 aa, Homo sapiens
  misc_feature: Table A; Target 65981; HLA-C*07:04; PMEL; ENSG00000185664; TAA
GQAPTAEPSG

SEQ ID NO: 65982 - protein, 9 aa, Homo sapiens
  misc_feature: Table A; Target 65982; HLA-B*13:02; PMEL; ENSG00000185664; TAA
GQEAGLGQV

SEQ ID NO: 65983 - protein, 9 aa, Homo sapiens
  misc_feature: Table A; Target 65983; HLA-B*39:01; PMEL; ENSG00000185664; TAA
GQEAGLGQV

SEQ ID NO: 65984 - protein, 10 aa, Homo sapiens
  misc_feature: Table A; Target 65984; HLA-B*27:05; PMEL; ENSG00000185664; TAA
GQEAGLGQVP

SEQ ID NO: 65985 - protein, 10 aa, Homo sapiens
  misc_feature: Table A; Target 65985; HLA-C*07:04; PMEL; ENSG00000185664; TAA
GQEAGLGQVP

SEQ ID NO: 65986 - protein, 11 aa, Homo sapiens
  misc_feature: Table A; Target 65986; HLA-B*27:05; PMEL; ENSG00000185664; TAA
GQEAGLGQVPL

SEQ ID NO: 65987 - protein, 11 aa, Homo sapiens
  misc_feature: Table A; Target 65987; HLA-B*38:01; PMEL; ENSG00000185664; TAA
GQEAGLGQVPL

SEQ ID NO: 65988 - protein, 11 aa, Homo sapiens
  misc_feature: Table A; Target 65988; HLA-B*39:01; PMEL; ENSG00000185664; TAA
GQEAGLGQVPL

SEQ ID NO: 65989 - protein, 9 aa, Homo sapiens
  misc_feature: Table A; Target 65989; HLA-B*13:02; PMEL; ENSG00000185664; TAA
GQPVYPQET

SEQ ID NO: 65990 - protein, 10 aa, Homo sapiens
  misc_feature: Table A; Target 65990; HLA-A*30:01; PMEL; ENSG00000185664; TAA
GQVIWVNNTI

SEQ ID NO: 65991 - protein, 10 aa, Homo sapiens
  misc_feature: Table A; Target 65991; HLA-B*13:02; PMEL; ENSG00000185664; TAA
GQVIWVNNTI

SEQ ID NO: 65992 - protein, 9 aa, Homo sapiens
  misc_feature: Table A; Target 65992; HLA-A*02:01; PMEL; ENSG00000185664; TAA
GQVPLIVGI

SEQ ID NO: 65993 - protein, 9 aa, Homo sapiens
  misc_feature: Table A; Target 65993; HLA-A*02:03; PMEL; ENSG00000185664; TAA
GQVPLIVGI

SEQ ID NO: 65994 - protein, 9 aa, Homo sapiens
  misc_feature: Table A; Target 65994; HLA-A*02:04; PMEL; ENSG00000185664; TAA
GQVPLIVGI

SEQ ID NO: 65995 - protein, 9 aa, Homo sapiens
  misc_feature: Table A; Target 65995; HLA-A*30:01; PMEL; ENSG00000185664; TAA
GQVPLIVGI

SEQ ID NO: 65996 - protein, 9 aa, Homo sapiens
  misc_feature: Table A; Target 65996; HLA-A*32:01; PMEL; ENSG00000185664; TAA
GQVPLIVGI

SEQ ID NO: 65997 - protein, 9 aa, Homo sapiens
  misc_feature: Table A; Target 65997; HLA-B*13:02; PMEL; ENSG00000185664; TAA
GQVPLIVGI

SEQ ID NO: 65998 - protein, 9 aa, Homo sapiens
  misc_feature: Table A; Target 65998; HLA-B*15:01; PMEL; ENSG00000185664; TAA
GQVPLIVGI

SEQ ID NO: 65999 - protein, 9 aa, Homo sapiens
  misc_feature: Table A; Target 65999; HLA-B*15:03; PMEL; ENSG00000185664; TAA
GQVPLIVGI

SEQ ID NO: 66000 - protein, 9 aa, Homo sapiens
  misc_feature: Table A; Target 66000; HLA-B*27:02; PMEL; ENSG00000185664; TAA
GQVPLIVGI

SEQ ID NO: 66001 - protein, 9 aa, Homo sapiens
  misc_feature: Table A; Target 66001; HLA-B*27:05; PMEL; ENSG00000185664; TAA
GQVPLIVGI

SEQ ID NO: 66002 - protein, 9 aa, Homo sapiens
  misc_feature: Table A; Target 66002; HLA-B*38:01; PMEL; ENSG00000185664; TAA
GQVPLIVGI

SEQ ID NO: 66003 - protein, 9 aa, Homo sapiens
  misc_feature: Table A; Target 66003; HLA-B*39:01; PMEL; ENSG00000185664; TAA
GQVPLIVGI

SEQ ID NO: 66004 - protein, 9 aa, Homo sapiens
  misc_feature: Table A; Target 66004; HLA-B*40:01; PMEL; ENSG00000185664; TAA
GQVPLIVGI

SEQ ID NO: 66005 - protein, 9 aa, Homo sapiens
  misc_feature: Table A; Target 66005; HLA-B*40:02; PMEL; ENSG00000185664; TAA
GQVPLIVGI

SEQ ID NO: 66006 - protein, 9 aa, Homo sapiens
  misc_feature: Table A; Target 66006; HLA-B*49:01; PMEL; ENSG00000185664; TAA
GQVPLIVGI

SEQ ID NO: 66007 - protein, 9 aa, Homo sapiens
  misc_feature: Table A; Target 66007; HLA-B*58:01; PMEL; ENSG00000185664; TAA
GQVPLIVGI

SEQ ID NO: 66008 - protein, 9 aa, Homo sapiens
  misc_feature: Table A; Target 66008; HLA-C*02:02; PMEL; ENSG00000185664; TAA
GQVPLIVGI

SEQ ID NO: 66009 - protein, 9 aa, Homo sapiens
  misc_feature: Table A; Target 66009; HLA-C*06:02; PMEL; ENSG00000185664; TAA
GQVPLIVGI

SEQ ID NO: 66010 - protein, 9 aa, Homo sapiens
  misc_feature: Table A; Target 66010; HLA-C*16:04; PMEL; ENSG00000185664; TAA
GQVPLIVGI

SEQ ID NO: 66011 - protein, 11 aa, Homo sapiens
  misc_feature: Table A; Target 66011; HLA-A*02:04; PMEL; ENSG00000185664; TAA
GQVPLIVGILL

SEQ ID NO: 66012 - protein, 11 aa, Homo sapiens
  misc_feature: Table A; Target 66012; HLA-A*30:01; PMEL; ENSG00000185664; TAA
GQVPLIVGILL

SEQ ID NO: 66013 - protein, 11 aa, Homo sapiens
  misc_feature: Table A; Target 66013; HLA-B*39:01; PMEL; ENSG00000185664; TAA
GQVPLIVGILL

SEQ ID NO: 66014 - protein, 8 aa, Homo sapiens
  misc_feature: Table A; Target 66014; HLA-A*02:01; PMEL; ENSG00000185664; TAA
GQVPTTEV

SEQ ID NO: 66015 - protein, 8 aa, Homo sapiens
  misc_feature: Table A; Target 66015; HLA-A*02:03; PMEL; ENSG00000185664; TAA
GQVPTTEV

SEQ ID NO: 66016 - protein, 8 aa, Homo sapiens
  misc_feature: Table A; Target 66016; HLA-A*30:01; PMEL; ENSG00000185664; TAA
GQVPTTEV

SEQ ID NO: 66017 - protein, 8 aa, Homo sapiens
  misc_feature: Table A; Target 66017; HLA-B*13:02; PMEL; ENSG00000185664; TAA
GQVPTTEV

SEQ ID NO: 66018 - protein, 8 aa, Homo sapiens
  misc_feature: Table A; Target 66018; HLA-B*15:01; PMEL; ENSG00000185664; TAA
GQVPTTEV

SEQ ID NO: 66019 - protein, 8 aa, Homo sapiens
  misc_feature: Table A; Target 66019; HLA-B*15:03; PMEL; ENSG00000185664; TAA
GQVPTTEV

SEQ ID NO: 66020 - protein, 8 aa, Homo sapiens
  misc_feature: Table A; Target 66020; HLA-B*27:05; PMEL; ENSG00000185664; TAA
GQVPTTEV

SEQ ID NO: 66021 - protein, 8 aa, Homo sapiens
  misc_feature: Table A; Target 66021; HLA-B*37:01; PMEL; ENSG00000185664; TAA
GQVPTTEV

SEQ ID NO: 66022 - protein, 8 aa, Homo sapiens
  misc_feature: Table A; Target 66022; HLA-B*39:01; PMEL; ENSG00000185664; TAA
GQVPTTEV

SEQ ID NO: 66023 - protein, 8 aa, Homo sapiens
  misc_feature: Table A; Target 66023; HLA-B*40:02; PMEL; ENSG00000185664; TAA
GQVPTTEV

SEQ ID NO: 66024 - protein, 8 aa, Homo sapiens
  misc_feature: Table A; Target 66024; HLA-B*49:01; PMEL; ENSG00000185664; TAA
GQVPTTEV

SEQ ID NO: 66025 - protein, 8 aa, Homo sapiens
  misc_feature: Table A; Target 66025; HLA-C*02:02; PMEL; ENSG00000185664; TAA
GQVPTTEV

SEQ ID NO: 66026 - protein, 8 aa, Homo sapiens
  misc_feature: Table A; Target 66026; HLA-C*06:02; PMEL; ENSG00000185664; TAA
GQVPTTEV

SEQ ID NO: 66027 - protein, 9 aa, Homo sapiens
  misc_feature: Table A; Target 66027; HLA-A*02:01; PMEL; ENSG00000185664; TAA
GQVPTTEVV

SEQ ID NO: 66028 - protein, 9 aa, Homo sapiens
  misc_feature: Table A; Target 66028; HLA-A*02:03; PMEL; ENSG00000185664; TAA
GQVPTTEVV

SEQ ID NO: 66029 - protein, 9 aa, Homo sapiens
  misc_feature: Table A; Target 66029; HLA-A*30:01; PMEL; ENSG00000185664; TAA
GQVPTTEVV

SEQ ID NO: 66030 - protein, 9 aa, Homo sapiens
  misc_feature: Table A; Target 66030; HLA-A*32:01; PMEL; ENSG00000185664; TAA
GQVPTTEVV

SEQ ID NO: 66031 - protein, 9 aa, Homo sapiens
  misc_feature: Table A; Target 66031; HLA-B*13:02; PMEL; ENSG00000185664; TAA
GQVPTTEVV

SEQ ID NO: 66032 - protein, 9 aa, Homo sapiens
  misc_feature: Table A; Target 66032; HLA-B*15:01; PMEL; ENSG00000185664; TAA
GQVPTTEVV

SEQ ID NO: 66033 - protein, 9 aa, Homo sapiens
  misc_feature: Table A; Target 66033; HLA-B*15:03; PMEL; ENSG00000185664; TAA
GQVPTTEVV

SEQ ID NO: 66034 - protein, 9 aa, Homo sapiens
  misc_feature: Table A; Target 66034; HLA-B*27:05; PMEL; ENSG00000185664; TAA
GQVPTTEVV

SEQ ID NO: 66035 - protein, 9 aa, Homo sapiens
  misc_feature: Table A; Target 66035; HLA-B*37:01; PMEL; ENSG00000185664; TAA
GQVPTTEVV

SEQ ID NO: 66036 - protein, 9 aa, Homo sapiens
  misc_feature: Table A; Target 66036; HLA-B*38:01; PMEL; ENSG00000185664; TAA
GQVPTTEVV

SEQ ID NO: 66037 - protein, 9 aa, Homo sapiens
  misc_feature: Table A; Target 66037; HLA-B*39:01; PMEL; ENSG00000185664; TAA
GQVPTTEVV

SEQ ID NO: 66038 - protein, 9 aa, Homo sapiens
  misc_feature: Table A; Target 66038; HLA-B*40:01; PMEL; ENSG00000185664; TAA
GQVPTTEVV

SEQ ID NO: 66039 - protein, 9 aa, Homo sapiens
  misc_feature: Table A; Target 66039; HLA-B*40:02; PMEL; ENSG00000185664; TAA
GQVPTTEVV

SEQ ID NO: 66040 - protein, 9 aa, Homo sapiens
  misc_feature: Table A; Target 66040; HLA-B*49:01; PMEL; ENSG00000185664; TAA
GQVPTTEVV

SEQ ID NO: 66041 - protein, 9 aa, Homo sapiens
  misc_feature: Table A; Target 66041; HLA-B*55:01; PMEL; ENSG00000185664; TAA
GQVPTTEVV

SEQ ID NO: 66042 - protein, 9 aa, Homo sapiens
  misc_feature: Table A; Target 66042; HLA-B*58:01; PMEL; ENSG00000185664; TAA
GQVPTTEVV

SEQ ID NO: 66043 - protein, 9 aa, Homo sapiens
  misc_feature: Table A; Target 66043; HLA-C*02:02; PMEL; ENSG00000185664; TAA
GQVPTTEVV

SEQ ID NO: 66044 - protein, 9 aa, Homo sapiens
  misc_feature: Table A; Target 66044; HLA-C*06:02; PMEL; ENSG00000185664; TAA
GQVPTTEVV

SEQ ID NO: 66045 - protein, 9 aa, Homo sapiens
  misc_feature: Table A; Target 66045; HLA-C*07:04; PMEL; ENSG00000185664; TAA
GQVPTTEVV

SEQ ID NO: 66046 - protein, 9 aa, Homo sapiens
  misc_feature: Table A; Target 66046; HLA-C*16:04; PMEL; ENSG00000185664; TAA
GQVPTTEVV

SEQ ID NO: 66047 - protein, 11 aa, Homo sapiens
  misc_feature: Table A; Target 66047; HLA-B*27:05; PMEL; ENSG00000185664; TAA
GQVPTTEVVGT

SEQ ID NO: 66048 - protein, 9 aa, Homo sapiens
  misc_feature: Table A; Target 66048; HLA-B*13:02; PMEL; ENSG00000185664; TAA
GQYWQVLGG

SEQ ID NO: 66049 - protein, 10 aa, Homo sapiens
  misc_feature: Table A; Target 66049; HLA-B*27:02; PMEL; ENSG00000185664; TAA
GRAMLGTHTM

SEQ ID NO: 66050 - protein, 10 aa, Homo sapiens
  misc_feature: Table A; Target 66050; HLA-B*27:05; PMEL; ENSG00000185664; TAA
GRAMLGTHTM

SEQ ID NO: 66051 - protein, 10 aa, Homo sapiens
  misc_feature: Table A; Target 66051; HLA-C*16:04; PMEL; ENSG00000185664; TAA
GRAMLGTHTM

SEQ ID NO: 66052 - protein, 9 aa, Homo sapiens
  misc_feature: Table A; Target 66052; HLA-B*13:02; PMEL; ENSG00000185664; TAA
GSFSVTLDI

SEQ ID NO: 66053 - protein, 9 aa, Homo sapiens
  misc_feature: Table A; Target 66053; HLA-C*16:04; PMEL; ENSG00000185664; TAA
GSFSVTLDI

SEQ ID NO: 66054 - protein, 9 aa, Homo sapiens
  misc_feature: Table A; Target 66054; HLA-B*13:02; PMEL; ENSG00000185664; TAA
GSGTYCLNV

SEQ ID NO: 66055 - protein, 10 aa, Homo sapiens
  misc_feature: Table A; Target 66055; HLA-C*04:01; PMEL; ENSG00000185664; TAA
GSQVWGGQPV

SEQ ID NO: 66056 - protein, 11 aa, Homo sapiens
  misc_feature: Table A; Target 66056; HLA-A*01:01; PMEL; ENSG00000185664; TAA
GSQVWGGQPVY

SEQ ID NO: 66057 - protein, 11 aa, Homo sapiens
  misc_feature: Table A; Target 66057; HLA-A*30:02; PMEL; ENSG00000185664; TAA
GSQVWGGQPVY

SEQ ID NO: 66058 - protein, 11 aa, Homo sapiens
  misc_feature: Table A; Target 66058; HLA-B*39:01; PMEL; ENSG00000185664; TAA
GSQVWGGQPVY

SEQ ID NO: 66059 - protein, 11 aa, Homo sapiens
  misc_feature: Table A; Target 66059; HLA-C*07:01; PMEL; ENSG00000185664; TAA
GSQVWGGQPVY

SEQ ID NO: 66060 - protein, 10 aa, Homo sapiens
  misc_feature: Table A; Target 66060; HLA-A*03:01; PMEL; ENSG00000185664; TAA
GSRSYVPLAH

SEQ ID NO: 66061 - protein, 9 aa, Homo sapiens
  misc_feature: Table A; Target 66061; HLA-C*16:02; PMEL; ENSG00000185664; TAA
GSSPVPGTT

SEQ ID NO: 66062 - protein, 9 aa, Homo sapiens
  misc_feature: Table A; Target 66062; HLA-B*57:01; PMEL; ENSG00000185664; TAA
GSWSQKRSF

SEQ ID NO: 66063 - protein, 9 aa, Homo sapiens
  misc_feature: Table A; Target 66063; HLA-C*16:01; PMEL; ENSG00000185664; TAA
GSWSQKRSF

SEQ ID NO: 66064 - protein, 8 aa, Homo sapiens
  misc_feature: Table A; Target 66064; HLA-A*02:03; PMEL; ENSG00000185664; TAA
GTATLRLV

SEQ ID NO: 66065 - protein, 8 aa, Homo sapiens
  misc_feature: Table A; Target 66065; HLA-C*06:02; PMEL; ENSG00000185664; TAA
GTATLRLV

SEQ ID NO: 66066 - protein, 8 aa, Homo sapiens
  misc_feature: Table A; Target 66066; HLA-C*16:02; PMEL; ENSG00000185664; TAA
GTATLRLV

SEQ ID NO: 66067 - protein, 9 aa, Homo sapiens
  misc_feature: Table A; Target 66067; HLA-A*01:01; PMEL; ENSG00000185664; TAA
GTATLRLVK

SEQ ID NO: 66068 - protein, 9 aa, Homo sapiens
  misc_feature: Table A; Target 66068; HLA-A*03:01; PMEL; ENSG00000185664; TAA
GTATLRLVK

SEQ ID NO: 66069 - protein, 9 aa, Homo sapiens
  misc_feature: Table A; Target 66069; HLA-A*03:02; PMEL; ENSG00000185664; TAA
GTATLRLVK

SEQ ID NO: 66070 - protein, 9 aa, Homo sapiens
  misc_feature: Table A; Target 66070; HLA-A*11:01; PMEL; ENSG00000185664; TAA
GTATLRLVK

SEQ ID NO: 66071 - protein, 9 aa, Homo sapiens
  misc_feature: Table A; Target 66071; HLA-A*29:02; PMEL; ENSG00000185664; TAA
GTATLRLVK

SEQ ID NO: 66072 - protein, 9 aa, Homo sapiens
  misc_feature: Table A; Target 66072; HLA-A*31:01; PMEL; ENSG00000185664; TAA
GTATLRLVK

SEQ ID NO: 66073 - protein, 9 aa, Homo sapiens
  misc_feature: Table A; Target 66073; HLA-A*68:01; PMEL; ENSG00000185664; TAA
GTATLRLVK

SEQ ID NO: 66074 - protein, 9 aa, Homo sapiens
  misc_feature: Table A; Target 66074; HLA-B*27:05; PMEL; ENSG00000185664; TAA
GTATLRLVK

SEQ ID NO: 66075 - protein, 9 aa, Homo sapiens
  misc_feature: Table A; Target 66075; HLA-B*57:01; PMEL; ENSG00000185664; TAA
GTATLRLVK

SEQ ID NO: 66076 - protein, 9 aa, Homo sapiens
  misc_feature: Table A; Target 66076; HLA-C*06:02; PMEL; ENSG00000185664; TAA
GTATLRLVK

SEQ ID NO: 66077 - protein, 9 aa, Homo sapiens
  misc_feature: Table A; Target 66077; HLA-C*07:01; PMEL; ENSG00000185664; TAA
GTATLRLVK

SEQ ID NO: 66078 - protein, 9 aa, Homo sapiens
  misc_feature: Table A; Target 66078; HLA-C*07:06; PMEL; ENSG00000185664; TAA
GTATLRLVK

SEQ ID NO: 66079 - protein, 9 aa, Homo sapiens
  misc_feature: Table A; Target 66079; HLA-C*12:03; PMEL; ENSG00000185664; TAA
GTATLRLVK

SEQ ID NO: 66080 - protein, 9 aa, Homo sapiens
  misc_feature: Table A; Target 66080; HLA-C*16:01; PMEL; ENSG00000185664; TAA
GTATLRLVK

SEQ ID NO: 66081 - protein, 10 aa, Homo sapiens
  misc_feature: Table A; Target 66081; HLA-A*03:01; PMEL; ENSG00000185664; TAA
GTATLRLVKR

SEQ ID NO: 66082 - protein, 10 aa, Homo sapiens
  misc_feature: Table A; Target 66082; HLA-A*11:01; PMEL; ENSG00000185664; TAA
GTATLRLVKR

SEQ ID NO: 66083 - protein, 10 aa, Homo sapiens
  misc_feature: Table A; Target 66083; HLA-A*31:01; PMEL; ENSG00000185664; TAA
GTATLRLVKR

SEQ ID NO: 66084 - protein, 9 aa, Homo sapiens
  misc_feature: Table A; Target 66084; HLA-A*02:01; PMEL; ENSG00000185664; TAA
GTHTMEVTV

SEQ ID NO: 66085 - protein, 9 aa, Homo sapiens
  misc_feature: Table A; Target 66085; HLA-A*02:03; PMEL; ENSG00000185664; TAA
GTHTMEVTV

SEQ ID NO: 66086 - protein, 9 aa, Homo sapiens
  misc_feature: Table A; Target 66086; HLA-A*32:01; PMEL; ENSG00000185664; TAA
GTHTMEVTV

SEQ ID NO: 66087 - protein, 9 aa, Homo sapiens
  misc_feature: Table A; Target 66087; HLA-A*68:02; PMEL; ENSG00000185664; TAA
GTHTMEVTV

SEQ ID NO: 66088 - protein, 9 aa, Homo sapiens
  misc_feature: Table A; Target 66088; HLA-B*13:02; PMEL; ENSG00000185664; TAA
GTHTMEVTV

SEQ ID NO: 66089 - protein, 9 aa, Homo sapiens
  misc_feature: Table A; Target 66089; HLA-B*27:05; PMEL; ENSG00000185664; TAA
GTHTMEVTV

SEQ ID NO: 66090 - protein, 9 aa, Homo sapiens
  misc_feature: Table A; Target 66090; HLA-B*40:02; PMEL; ENSG00000185664; TAA
GTHTMEVTV

SEQ ID NO: 66091 - protein, 9 aa, Homo sapiens
  misc_feature: Table A; Target 66091; HLA-B*58:01; PMEL; ENSG00000185664; TAA
GTHTMEVTV

SEQ ID NO: 66092 - protein, 9 aa, Homo sapiens
  misc_feature: Table A; Target 66092; HLA-C*04:01; PMEL; ENSG00000185664; TAA
GTHTMEVTV

SEQ ID NO: 66093 - protein, 9 aa, Homo sapiens
  misc_feature: Table A; Target 66093; HLA-C*06:02; PMEL; ENSG00000185664; TAA
GTHTMEVTV

SEQ ID NO: 66094 - protein, 9 aa, Homo sapiens
  misc_feature: Table A; Target 66094; HLA-C*07:04; PMEL; ENSG00000185664; TAA
GTHTMEVTV

SEQ ID NO: 66095 - protein, 9 aa, Homo sapiens
  misc_feature: Table A; Target 66095; HLA-C*12:03; PMEL; ENSG00000185664; TAA
GTHTMEVTV

SEQ ID NO: 66096 - protein, 9 aa, Homo sapiens
  misc_feature: Table A; Target 66096; HLA-C*16:02; PMEL; ENSG00000185664; TAA
GTHTMEVTV

SEQ ID NO: 66097 - protein, 9 aa, Homo sapiens
  misc_feature: Table A; Target 66097; HLA-C*16:04; PMEL; ENSG00000185664; TAA
GTHTMEVTV

SEQ ID NO: 66098 - protein, 10 aa, Homo sapiens
  misc_feature: Table A; Target 66098; HLA-A*01:01; PMEL; ENSG00000185664; TAA
GTHTMEVTVY

SEQ ID NO: 66099 - protein, 10 aa, Homo sapiens
  misc_feature: Table A; Target 66099; HLA-A*11:01; PMEL; ENSG00000185664; TAA
GTHTMEVTVY

SEQ ID NO: 66100 - protein, 10 aa, Homo sapiens
  misc_feature: Table A; Target 66100; HLA-A*25:01; PMEL; ENSG00000185664; TAA
GTHTMEVTVY

SEQ ID NO: 66101 - protein, 10 aa, Homo sapiens
  misc_feature: Table A; Target 66101; HLA-A*26:01; PMEL; ENSG00000185664; TAA
GTHTMEVTVY

SEQ ID NO: 66102 - protein, 10 aa, Homo sapiens
  misc_feature: Table A; Target 66102; HLA-A*29:02; PMEL; ENSG00000185664; TAA
GTHTMEVTVY

SEQ ID NO: 66103 - protein, 10 aa, Homo sapiens
  misc_feature: Table A; Target 66103; HLA-A*30:02; PMEL; ENSG00000185664; TAA
GTHTMEVTVY

SEQ ID NO: 66104 - protein, 10 aa, Homo sapiens
  misc_feature: Table A; Target 66104; HLA-A*32:01; PMEL; ENSG00000185664; TAA
GTHTMEVTVY

SEQ ID NO: 66105 - protein, 10 aa, Homo sapiens
  misc_feature: Table A; Target 66105; HLA-B*15:01; PMEL; ENSG00000185664; TAA
GTHTMEVTVY

SEQ ID NO: 66106 - protein, 10 aa, Homo sapiens
  misc_feature: Table A; Target 66106; HLA-B*15:03; PMEL; ENSG00000185664; TAA
GTHTMEVTVY

SEQ ID NO: 66107 - protein, 10 aa, Homo sapiens
  misc_feature: Table A; Target 66107; HLA-B*27:05; PMEL; ENSG00000185664; TAA
GTHTMEVTVY

SEQ ID NO: 66108 - protein, 10 aa, Homo sapiens
  misc_feature: Table A; Target 66108; HLA-B*46:01; PMEL; ENSG00000185664; TAA
GTHTMEVTVY

SEQ ID NO: 66109 - protein, 10 aa, Homo sapiens
  misc_feature: Table A; Target 66109; HLA-B*57:01; PMEL; ENSG00000185664; TAA
GTHTMEVTVY

SEQ ID NO: 66110 - protein, 10 aa, Homo sapiens
  misc_feature: Table A; Target 66110; HLA-B*58:01; PMEL; ENSG00000185664; TAA
GTHTMEVTVY

SEQ ID NO: 66111 - protein, 10 aa, Homo sapiens
  misc_feature: Table A; Target 66111; HLA-C*07:01; PMEL; ENSG00000185664; TAA
GTHTMEVTVY

SEQ ID NO: 66112 - protein, 10 aa, Homo sapiens
  misc_feature: Table A; Target 66112; HLA-C*07:04; PMEL; ENSG00000185664; TAA
GTHTMEVTVY

SEQ ID NO: 66113 - protein, 10 aa, Homo sapiens
  misc_feature: Table A; Target 66113; HLA-C*12:03; PMEL; ENSG00000185664; TAA
GTHTMEVTVY

SEQ ID NO: 66114 - protein, 10 aa, Homo sapiens
  misc_feature: Table A; Target 66114; HLA-C*16:02; PMEL; ENSG00000185664; TAA
GTHTMEVTVY

SEQ ID NO: 66115 - protein, 10 aa, Homo sapiens
  misc_feature: Table A; Target 66115; HLA-C*16:04; PMEL; ENSG00000185664; TAA
GTHTMEVTVY

SEQ ID NO: 66116 - protein, 8 aa, Homo sapiens
  misc_feature: Table A; Target 66116; HLA-B*15:03; PMEL; ENSG00000185664; TAA
GTLISRAL

SEQ ID NO: 66117 - protein, 8 aa, Homo sapiens
  misc_feature: Table A; Target 66117; HLA-C*03:04; PMEL; ENSG00000185664; TAA
GTLISRAL

SEQ ID NO: 66118 - protein, 8 aa, Homo sapiens
  misc_feature: Table A; Target 66118; HLA-C*06:02; PMEL; ENSG00000185664; TAA
GTLISRAL

SEQ ID NO: 66119 - protein, 8 aa, Homo sapiens
  misc_feature: Table A; Target 66119; HLA-C*16:01; PMEL; ENSG00000185664; TAA
GTLISRAL

SEQ ID NO: 66120 - protein, 11 aa, Homo sapiens
  misc_feature: Table A; Target 66120; HLA-C*06:02; PMEL; ENSG00000185664; TAA
GTLISRALVVT

SEQ ID NO: 66121 - protein, 9 aa, Homo sapiens
  misc_feature: Table A; Target 66121; HLA-C*07:04; PMEL; ENSG00000185664; TAA
GTTAAQVTT

SEQ ID NO: 66122 - protein, 9 aa, Homo sapiens
  misc_feature: Table A; Target 66122; HLA-C*16:02; PMEL; ENSG00000185664; TAA
GTTAAQVTT

SEQ ID NO: 66123 - protein, 9 aa, Homo sapiens
  misc_feature: Table A; Target 66123; HLA-C*16:01; PMEL; ENSG00000185664; TAA
GTTDGHRPT

SEQ ID NO: 66124 - protein, 9 aa, Homo sapiens
  misc_feature: Table A; Target 66124; HLA-C*16:02; PMEL; ENSG00000185664; TAA
GTTDGHRPT

SEQ ID NO: 66125 - protein, 9 aa, Homo sapiens
  misc_feature: Table A; Target 66125; HLA-A*11:01; PMEL; ENSG00000185664; TAA
GTTSVQVPT

SEQ ID NO: 66126 - protein, 9 aa, Homo sapiens
  misc_feature: Table A; Target 66126; HLA-A*03:01; PMEL; ENSG00000185664; TAA
GTYCLNVSL

SEQ ID NO: 66127 - protein, 9 aa, Homo sapiens
  misc_feature: Table A; Target 66127; HLA-B*13:02; PMEL; ENSG00000185664; TAA
GTYCLNVSL

SEQ ID NO: 66128 - protein, 9 aa, Homo sapiens
  misc_feature: Table A; Target 66128; HLA-B*15:01; PMEL; ENSG00000185664; TAA
GTYCLNVSL

SEQ ID NO: 66129 - protein, 9 aa, Homo sapiens
  misc_feature: Table A; Target 66129; HLA-B*27:05; PMEL; ENSG00000185664; TAA
GTYCLNVSL

SEQ ID NO: 66130 - protein, 9 aa, Homo sapiens
  misc_feature: Table A; Target 66130; HLA-B*58:01; PMEL; ENSG00000185664; TAA
GTYCLNVSL

SEQ ID NO: 66131 - protein, 9 aa, Homo sapiens
  misc_feature: Table A; Target 66131; HLA-A*03:01; PMEL; ENSG00000185664; TAA
GVSRQLRTK

SEQ ID NO: 66132 - protein, 9 aa, Homo sapiens
  misc_feature: Table A; Target 66132; HLA-A*03:02; PMEL; ENSG00000185664; TAA
GVSRQLRTK

SEQ ID NO: 66133 - protein, 9 aa, Homo sapiens
  misc_feature: Table A; Target 66133; HLA-A*11:01; PMEL; ENSG00000185664; TAA
GVSRQLRTK

SEQ ID NO: 66134 - protein, 10 aa, Homo sapiens
  misc_feature: Table A; Target 66134; HLA-A*23:01; PMEL; ENSG00000185664; TAA
GYLAEADLSY

SEQ ID NO: 66135 - protein, 10 aa, Homo sapiens
  misc_feature: Table A; Target 66135; HLA-A*29:02; PMEL; ENSG00000185664; TAA
GYLAEADLSY

SEQ ID NO: 66136 - protein, 10 aa, Homo sapiens
  misc_feature: Table A; Target 66136; HLA-A*30:02; PMEL; ENSG00000185664; TAA
GYLAEADLSY

SEQ ID NO: 66137 - protein, 10 aa, Homo sapiens
  misc_feature: Table A; Target 66137; HLA-C*14:02; PMEL; ENSG00000185664; TAA
GYLAEADLSY

SEQ ID NO: 66138 - protein, 8 aa, Homo sapiens
  misc_feature: Table A; Target 66138; HLA-B*37:01; PMEL; ENSG00000185664; TAA
HDPSGYLA

SEQ ID NO: 66139 - protein, 8 aa, Homo sapiens
  misc_feature: Table A; Target 66139; HLA-C*07:01; PMEL; ENSG00000185664; TAA
HDPSGYLA

SEQ ID NO: 66140 - protein, 10 aa, Homo sapiens
  misc_feature: Table A; Target 66140; HLA-A*68:02; PMEL; ENSG00000185664; TAA
HDPSGYLAEA

SEQ ID NO: 66141 - protein, 10 aa, Homo sapiens
  misc_feature: Table A; Target 66141; HLA-A*23:01; PMEL; ENSG00000185664; TAA
HFLRNQPLTF

SEQ ID NO: 66142 - protein, 10 aa, Homo sapiens
  misc_feature: Table A; Target 66142; HLA-A*24:02; PMEL; ENSG00000185664; TAA
HFLRNQPLTF

SEQ ID NO: 66143 - protein, 10 aa, Homo sapiens
  misc_feature: Table A; Target 66143; HLA-A*29:02; PMEL; ENSG00000185664; TAA
HFLRNQPLTF

SEQ ID NO: 66144 - protein, 10 aa, Homo sapiens
  misc_feature: Table A; Target 66144; HLA-B*57:01; PMEL; ENSG00000185664; TAA
HFLRNQPLTF

SEQ ID NO: 66145 - protein, 8 aa, Homo sapiens
  misc_feature: Table A; Target 66145; HLA-A*02:03; PMEL; ENSG00000185664; TAA
HLAVIGAL

SEQ ID NO: 66146 - protein, 8 aa, Homo sapiens
  misc_feature: Table A; Target 66146; HLA-A*26:01; PMEL; ENSG00000185664; TAA
HLAVIGAL

SEQ ID NO: 66147 - protein, 8 aa, Homo sapiens
  misc_feature: Table A; Target 66147; HLA-B*08:01; PMEL; ENSG00000185664; TAA
HLAVIGAL

SEQ ID NO: 66148 - protein, 8 aa, Homo sapiens
  misc_feature: Table A; Target 66148; HLA-B*40:02; PMEL; ENSG00000185664; TAA
HLAVIGAL

SEQ ID NO: 66149 - protein, 8 aa, Homo sapiens
  misc_feature: Table A; Target 66149; HLA-C*03:04; PMEL; ENSG00000185664; TAA
HLAVIGAL

SEQ ID NO: 66150 - protein, 9 aa, Homo sapiens
  misc_feature: Table A; Target 66150; HLA-A*02:01; PMEL; ENSG00000185664; TAA
HLAVIGALL

SEQ ID NO: 66151 - protein, 9 aa, Homo sapiens
  misc_feature: Table A; Target 66151; HLA-A*02:03; PMEL; ENSG00000185664; TAA
HLAVIGALL

SEQ ID NO: 66152 - protein, 9 aa, Homo sapiens
  misc_feature: Table A; Target 66152; HLA-A*02:04; PMEL; ENSG00000185664; TAA
HLAVIGALL

SEQ ID NO: 66153 - protein, 9 aa, Homo sapiens
  misc_feature: Table A; Target 66153; HLA-A*02:07; PMEL; ENSG00000185664; TAA
HLAVIGALL

SEQ ID NO: 66154 - protein, 9 aa, Homo sapiens
  misc_feature: Table A; Target 66154; HLA-A*23:01; PMEL; ENSG00000185664; TAA
HLAVIGALL

SEQ ID NO: 66155 - protein, 9 aa, Homo sapiens
  misc_feature: Table A; Target 66155; HLA-A*24:02; PMEL; ENSG00000185664; TAA
HLAVIGALL

SEQ ID NO: 66156 - protein, 9 aa, Homo sapiens
  misc_feature: Table A; Target 66156; HLA-A*26:01; PMEL; ENSG00000185664; TAA
HLAVIGALL

SEQ ID NO: 66157 - protein, 9 aa, Homo sapiens
  misc_feature: Table A; Target 66157; HLA-A*30:01; PMEL; ENSG00000185664; TAA
HLAVIGALL

SEQ ID NO: 66158 - protein, 9 aa, Homo sapiens
  misc_feature: Table A; Target 66158; HLA-A*68:02; PMEL; ENSG00000185664; TAA
HLAVIGALL

SEQ ID NO: 66159 - protein, 9 aa, Homo sapiens
  misc_feature: Table A; Target 66159; HLA-B*08:01; PMEL; ENSG00000185664; TAA
HLAVIGALL

SEQ ID NO: 66160 - protein, 9 aa, Homo sapiens
  misc_feature: Table A; Target 66160; HLA-B*13:02; PMEL; ENSG00000185664; TAA
HLAVIGALL

SEQ ID NO: 66161 - protein, 9 aa, Homo sapiens
  misc_feature: Table A; Target 66161; HLA-B*35:03; PMEL; ENSG00000185664; TAA
HLAVIGALL

SEQ ID NO: 66162 - protein, 9 aa, Homo sapiens
  misc_feature: Table A; Target 66162; HLA-B*38:01; PMEL; ENSG00000185664; TAA
HLAVIGALL

SEQ ID NO: 66163 - protein, 9 aa, Homo sapiens
  misc_feature: Table A; Target 66163; HLA-B*40:01; PMEL; ENSG00000185664; TAA
HLAVIGALL

SEQ ID NO: 66164 - protein, 9 aa, Homo sapiens
  misc_feature: Table A; Target 66164; HLA-B*55:01; PMEL; ENSG00000185664; TAA
HLAVIGALL

SEQ ID NO: 66165 - protein, 9 aa, Homo sapiens
  misc_feature: Table A; Target 66165; HLA-C*02:02; PMEL; ENSG00000185664; TAA
HLAVIGALL

SEQ ID NO: 66166 - protein, 9 aa, Homo sapiens
  misc_feature: Table A; Target 66166; HLA-C*04:01; PMEL; ENSG00000185664; TAA
HLAVIGALL

SEQ ID NO: 66167 - protein, 9 aa, Homo sapiens
  misc_feature: Table A; Target 66167; HLA-C*07:04; PMEL; ENSG00000185664; TAA
HLAVIGALL

SEQ ID NO: 66168 - protein, 10 aa, Homo sapiens
  misc_feature: Table A; Target 66168; HLA-A*02:03; PMEL; ENSG00000185664; TAA
HLAVIGALLA

SEQ ID NO: 66169 - protein, 11 aa, Homo sapiens
  misc_feature: Table A; Target 66169; HLA-A*02:01; PMEL; ENSG00000185664; TAA
HLAVIGALLAV

SEQ ID NO: 66170 - protein, 11 aa, Homo sapiens
  misc_feature: Table A; Target 66170; HLA-A*02:03; PMEL; ENSG00000185664; TAA
HLAVIGALLAV

SEQ ID NO: 66171 - protein, 11 aa, Homo sapiens
  misc_feature: Table A; Target 66171; HLA-A*02:04; PMEL; ENSG00000185664; TAA
HLAVIGALLAV

SEQ ID NO: 66172 - protein, 11 aa, Homo sapiens
  misc_feature: Table A; Target 66172; HLA-A*02:07; PMEL; ENSG00000185664; TAA
HLAVIGALLAV

SEQ ID NO: 66173 - protein, 11 aa, Homo sapiens
  misc_feature: Table A; Target 66173; HLA-A*68:02; PMEL; ENSG00000185664; TAA
HLAVIGALLAV

SEQ ID NO: 66174 - protein, 11 aa, Homo sapiens
  misc_feature: Table A; Target 66174; HLA-B*13:02; PMEL; ENSG00000185664; TAA
HLAVIGALLAV

SEQ ID NO: 66175 - protein, 11 aa, Homo sapiens
  misc_feature: Table A; Target 66175; HLA-A*25:01; PMEL; ENSG00000185664; TAA
HQILKGGSGTY

SEQ ID NO: 66176 - protein, 11 aa, Homo sapiens
  misc_feature: Table A; Target 66176; HLA-A*26:01; PMEL; ENSG00000185664; TAA
HQILKGGSGTY

SEQ ID NO: 66177 - protein, 11 aa, Homo sapiens
  misc_feature: Table A; Target 66177; HLA-A*30:02; PMEL; ENSG00000185664; TAA
HQILKGGSGTY

SEQ ID NO: 66178 - protein, 11 aa, Homo sapiens
  misc_feature: Table A; Target 66178; HLA-A*32:01; PMEL; ENSG00000185664; TAA
HQILKGGSGTY

SEQ ID NO: 66179 - protein, 11 aa, Homo sapiens
  misc_feature: Table A; Target 66179; HLA-B*15:01; PMEL; ENSG00000185664; TAA
HQILKGGSGTY

SEQ ID NO: 66180 - protein, 11 aa, Homo sapiens
  misc_feature: Table A; Target 66180; HLA-B*15:03; PMEL; ENSG00000185664; TAA
HQILKGGSGTY

SEQ ID NO: 66181 - protein, 11 aa, Homo sapiens
  misc_feature: Table A; Target 66181; HLA-B*18:01; PMEL; ENSG00000185664; TAA
HQILKGGSGTY

SEQ ID NO: 66182 - protein, 11 aa, Homo sapiens
  misc_feature: Table A; Target 66182; HLA-B*27:05; PMEL; ENSG00000185664; TAA
HQILKGGSGTY

SEQ ID NO: 66183 - protein, 11 aa, Homo sapiens
  misc_feature: Table A; Target 66183; HLA-B*39:01; PMEL; ENSG00000185664; TAA
HQILKGGSGTY

SEQ ID NO: 66184 - protein, 11 aa, Homo sapiens
  misc_feature: Table A; Target 66184; HLA-B*44:02; PMEL; ENSG00000185664; TAA
HQILKGGSGTY

SEQ ID NO: 66185 - protein, 11 aa, Homo sapiens
  misc_feature: Table A; Target 66185; HLA-B*44:03; PMEL; ENSG00000185664; TAA
HQILKGGSGTY

SEQ ID NO: 66186 - protein, 11 aa, Homo sapiens
  misc_feature: Table A; Target 66186; HLA-C*04:01; PMEL; ENSG00000185664; TAA
HQILKGGSGTY

SEQ ID NO: 66187 - protein, 11 aa, Homo sapiens
  misc_feature: Table A; Target 66187; HLA-C*07:01; PMEL; ENSG00000185664; TAA
HQILKGGSGTY

SEQ ID NO: 66188 - protein, 11 aa, Homo sapiens
  misc_feature: Table A; Target 66188; HLA-C*07:04; PMEL; ENSG00000185664; TAA
HQILKGGSGTY

SEQ ID NO: 66189 - protein, 11 aa, Homo sapiens
  misc_feature: Table A; Target 66189; HLA-C*16:04; PMEL; ENSG00000185664; TAA
HQILKGGSGTY

SEQ ID NO: 66190 - protein, 8 aa, Homo sapiens
  misc_feature: Table A; Target 66190; HLA-B*07:02; PMEL; ENSG00000185664; TAA
HSSSAFTI

SEQ ID NO: 66191 - protein, 8 aa, Homo sapiens
  misc_feature: Table A; Target 66191; HLA-B*13:02; PMEL; ENSG00000185664; TAA
HSSSAFTI

SEQ ID NO: 66192 - protein, 8 aa, Homo sapiens
  misc_feature: Table A; Target 66192; HLA-B*38:01; PMEL; ENSG00000185664; TAA
HSSSAFTI

SEQ ID NO: 66193 - protein, 8 aa, Homo sapiens
  misc_feature: Table A; Target 66193; HLA-B*51:01; PMEL; ENSG00000185664; TAA
HSSSAFTI

SEQ ID NO: 66194 - protein, 8 aa, Homo sapiens
  misc_feature: Table A; Target 66194; HLA-B*57:01; PMEL; ENSG00000185664; TAA
HSSSAFTI

SEQ ID NO: 66195 - protein, 8 aa, Homo sapiens
  misc_feature: Table A; Target 66195; HLA-B*58:01; PMEL; ENSG00000185664; TAA
HSSSAFTI

SEQ ID NO: 66196 - protein, 8 aa, Homo sapiens
  misc_feature: Table A; Target 66196; HLA-C*04:01; PMEL; ENSG00000185664; TAA
HSSSAFTI

SEQ ID NO: 66197 - protein, 8 aa, Homo sapiens
  misc_feature: Table A; Target 66197; HLA-C*06:02; PMEL; ENSG00000185664; TAA
HSSSAFTI

SEQ ID NO: 66198 - protein, 8 aa, Homo sapiens
  misc_feature: Table A; Target 66198; HLA-C*07:01; PMEL; ENSG00000185664; TAA
HSSSAFTI

SEQ ID NO: 66199 - protein, 8 aa, Homo sapiens
  misc_feature: Table A; Target 66199; HLA-C*07:04; PMEL; ENSG00000185664; TAA
HSSSAFTI

SEQ ID NO: 66200 - protein, 8 aa, Homo sapiens
  misc_feature: Table A; Target 66200; HLA-C*12:03; PMEL; ENSG00000185664; TAA
HSSSAFTI

SEQ ID NO: 66201 - protein, 8 aa, Homo sapiens
  misc_feature: Table A; Target 66201; HLA-C*16:02; PMEL; ENSG00000185664; TAA
HSSSAFTI

SEQ ID NO: 66202 - protein, 8 aa, Homo sapiens
  misc_feature: Table A; Target 66202; HLA-A*01:01; PMEL; ENSG00000185664; TAA
HTMEVTVY

SEQ ID NO: 66203 - protein, 8 aa, Homo sapiens
  misc_feature: Table A; Target 66203; HLA-A*03:01; PMEL; ENSG00000185664; TAA
HTMEVTVY

SEQ ID NO: 66204 - protein, 8 aa, Homo sapiens
  misc_feature: Table A; Target 66204; HLA-A*03:02; PMEL; ENSG00000185664; TAA
HTMEVTVY

SEQ ID NO: 66205 - protein, 8 aa, Homo sapiens
  misc_feature: Table A; Target 66205; HLA-A*11:01; PMEL; ENSG00000185664; TAA
HTMEVTVY

SEQ ID NO: 66206 - protein, 8 aa, Homo sapiens
  misc_feature: Table A; Target 66206; HLA-A*23:01; PMEL; ENSG00000185664; TAA
HTMEVTVY

SEQ ID NO: 66207 - protein, 8 aa, Homo sapiens
  misc_feature: Table A; Target 66207; HLA-A*25:01; PMEL; ENSG00000185664; TAA
HTMEVTVY

SEQ ID NO: 66208 - protein, 8 aa, Homo sapiens
  misc_feature: Table A; Target 66208; HLA-A*26:01; PMEL; ENSG00000185664; TAA
HTMEVTVY

SEQ ID NO: 66209 - protein, 8 aa, Homo sapiens
  misc_feature: Table A; Target 66209; HLA-A*29:02; PMEL; ENSG00000185664; TAA
HTMEVTVY

SEQ ID NO: 66210 - protein, 8 aa, Homo sapiens
  misc_feature: Table A; Target 66210; HLA-A*30:02; PMEL; ENSG00000185664; TAA
HTMEVTVY

SEQ ID NO: 66211 - protein, 8 aa, Homo sapiens
  misc_feature: Table A; Target 66211; HLA-A*32:01; PMEL; ENSG00000185664; TAA
HTMEVTVY

SEQ ID NO: 66212 - protein, 8 aa, Homo sapiens
  misc_feature: Table A; Target 66212; HLA-A*33:01; PMEL; ENSG00000185664; TAA
HTMEVTVY

SEQ ID NO: 66213 - protein, 8 aa, Homo sapiens
  misc_feature: Table A; Target 66213; HLA-A*33:03; PMEL; ENSG00000185664; TAA
HTMEVTVY

SEQ ID NO: 66214 - protein, 8 aa, Homo sapiens
  misc_feature: Table A; Target 66214; HLA-B*08:01; PMEL; ENSG00000185664; TAA
HTMEVTVY

SEQ ID NO: 66215 - protein, 8 aa, Homo sapiens
  misc_feature: Table A; Target 66215; HLA-B*15:01; PMEL; ENSG00000185664; TAA
HTMEVTVY

SEQ ID NO: 66216 - protein, 8 aa, Homo sapiens
  misc_feature: Table A; Target 66216; HLA-B*15:03; PMEL; ENSG00000185664; TAA
HTMEVTVY

SEQ ID NO: 66217 - protein, 8 aa, Homo sapiens
  misc_feature: Table A; Target 66217; HLA-B*18:01; PMEL; ENSG00000185664; TAA
HTMEVTVY

SEQ ID NO: 66218 - protein, 8 aa, Homo sapiens
  misc_feature: Table A; Target 66218; HLA-B*35:01; PMEL; ENSG00000185664; TAA
HTMEVTVY

SEQ ID NO: 66219 - protein, 8 aa, Homo sapiens
  misc_feature: Table A; Target 66219; HLA-B*35:03; PMEL; ENSG00000185664; TAA
HTMEVTVY

SEQ ID NO: 66220 - protein, 8 aa, Homo sapiens
  misc_feature: Table A; Target 66220; HLA-B*37:01; PMEL; ENSG00000185664; TAA
HTMEVTVY

SEQ ID NO: 66221 - protein, 8 aa, Homo sapiens
  misc_feature: Table A; Target 66221; HLA-B*39:01; PMEL; ENSG00000185664; TAA
HTMEVTVY

SEQ ID NO: 66222 - protein, 8 aa, Homo sapiens
  misc_feature: Table A; Target 66222; HLA-B*40:02; PMEL; ENSG00000185664; TAA
HTMEVTVY

SEQ ID NO: 66223 - protein, 8 aa, Homo sapiens
  misc_feature: Table A; Target 66223; HLA-B*46:01; PMEL; ENSG00000185664; TAA
HTMEVTVY

SEQ ID NO: 66224 - protein, 8 aa, Homo sapiens
  misc_feature: Table A; Target 66224; HLA-B*51:01; PMEL; ENSG00000185664; TAA
HTMEVTVY

SEQ ID NO: 66225 - protein, 8 aa, Homo sapiens
  misc_feature: Table A; Target 66225; HLA-B*54:01; PMEL; ENSG00000185664; TAA
HTMEVTVY

SEQ ID NO: 66226 - protein, 8 aa, Homo sapiens
  misc_feature: Table A; Target 66226; HLA-B*55:01; PMEL; ENSG00000185664; TAA
HTMEVTVY

SEQ ID NO: 66227 - protein, 8 aa, Homo sapiens
  misc_feature: Table A; Target 66227; HLA-B*57:01; PMEL; ENSG00000185664; TAA
HTMEVTVY

SEQ ID NO: 66228 - protein, 8 aa, Homo sapiens
  misc_feature: Table A; Target 66228; HLA-B*58:01; PMEL; ENSG00000185664; TAA
HTMEVTVY

SEQ ID NO: 66229 - protein, 8 aa, Homo sapiens
  misc_feature: Table A; Target 66229; HLA-C*01:02; PMEL; ENSG00000185664; TAA
HTMEVTVY

SEQ ID NO: 66230 - protein, 8 aa, Homo sapiens
  misc_feature: Table A; Target 66230; HLA-C*02:02; PMEL; ENSG00000185664; TAA
HTMEVTVY

SEQ ID NO: 66231 - protein, 8 aa, Homo sapiens
  misc_feature: Table A; Target 66231; HLA-C*03:03; PMEL; ENSG00000185664; TAA
HTMEVTVY

SEQ ID NO: 66232 - protein, 8 aa, Homo sapiens
  misc_feature: Table A; Target 66232; HLA-C*03:04; PMEL; ENSG00000185664; TAA
HTMEVTVY

SEQ ID NO: 66233 - protein, 8 aa, Homo sapiens
  misc_feature: Table A; Target 66233; HLA-C*04:01; PMEL; ENSG00000185664; TAA
HTMEVTVY

SEQ ID NO: 66234 - protein, 8 aa, Homo sapiens
  misc_feature: Table A; Target 66234; HLA-C*05:01; PMEL; ENSG00000185664; TAA
HTMEVTVY

SEQ ID NO: 66235 - protein, 8 aa, Homo sapiens
  misc_feature: Table A; Target 66235; HLA-C*07:01; PMEL; ENSG00000185664; TAA
HTMEVTVY

SEQ ID NO: 66236 - protein, 8 aa, Homo sapiens
  misc_feature: Table A; Target 66236; HLA-C*07:04; PMEL; ENSG00000185664; TAA
HTMEVTVY

SEQ ID NO: 66237 - protein, 8 aa, Homo sapiens
  misc_feature: Table A; Target 66237; HLA-C*07:06; PMEL; ENSG00000185664; TAA
HTMEVTVY

SEQ ID NO: 66238 - protein, 8 aa, Homo sapiens
  misc_feature: Table A; Target 66238; HLA-C*12:03; PMEL; ENSG00000185664; TAA
HTMEVTVY

SEQ ID NO: 66239 - protein, 8 aa, Homo sapiens
  misc_feature: Table A; Target 66239; HLA-C*14:02; PMEL; ENSG00000185664; TAA
HTMEVTVY

SEQ ID NO: 66240 - protein, 8 aa, Homo sapiens
  misc_feature: Table A; Target 66240; HLA-C*16:01; PMEL; ENSG00000185664; TAA
HTMEVTVY

SEQ ID NO: 66241 - protein, 8 aa, Homo sapiens
  misc_feature: Table A; Target 66241; HLA-C*16:02; PMEL; ENSG00000185664; TAA
HTMEVTVY

SEQ ID NO: 66242 - protein, 8 aa, Homo sapiens
  misc_feature: Table A; Target 66242; HLA-C*16:04; PMEL; ENSG00000185664; TAA
HTMEVTVY

SEQ ID NO: 66243 - protein, 9 aa, Homo sapiens
  misc_feature: Table A; Target 66243; HLA-A*03:01; PMEL; ENSG00000185664; TAA
HTMEVTVYH

SEQ ID NO: 66244 - protein, 9 aa, Homo sapiens
  misc_feature: Table A; Target 66244; HLA-A*03:02; PMEL; ENSG00000185664; TAA
HTMEVTVYH

SEQ ID NO: 66245 - protein, 9 aa, Homo sapiens
  misc_feature: Table A; Target 66245; HLA-A*11:01; PMEL; ENSG00000185664; TAA
HTMEVTVYH

SEQ ID NO: 66246 - protein, 9 aa, Homo sapiens
  misc_feature: Table A; Target 66246; HLA-A*26:01; PMEL; ENSG00000185664; TAA
HTMEVTVYH

SEQ ID NO: 66247 - protein, 9 aa, Homo sapiens
  misc_feature: Table A; Target 66247; HLA-A*29:02; PMEL; ENSG00000185664; TAA
HTMEVTVYH

SEQ ID NO: 66248 - protein, 9 aa, Homo sapiens
  misc_feature: Table A; Target 66248; HLA-A*31:01; PMEL; ENSG00000185664; TAA
HTMEVTVYH

SEQ ID NO: 66249 - protein, 9 aa, Homo sapiens
  misc_feature: Table A; Target 66249; HLA-A*33:01; PMEL; ENSG00000185664; TAA
HTMEVTVYH

SEQ ID NO: 66250 - protein, 9 aa, Homo sapiens
  misc_feature: Table A; Target 66250; HLA-A*33:03; PMEL; ENSG00000185664; TAA
HTMEVTVYH

SEQ ID NO: 66251 - protein, 9 aa, Homo sapiens
  misc_feature: Table A; Target 66251; HLA-A*68:01; PMEL; ENSG00000185664; TAA
HTMEVTVYH

SEQ ID NO: 66252 - protein, 9 aa, Homo sapiens
  misc_feature: Table A; Target 66252; HLA-A*68:02; PMEL; ENSG00000185664; TAA
HTMEVTVYH

SEQ ID NO: 66253 - protein, 9 aa, Homo sapiens
  misc_feature: Table A; Target 66253; HLA-B*13:02; PMEL; ENSG00000185664; TAA
HTMEVTVYH

SEQ ID NO: 66254 - protein, 9 aa, Homo sapiens
  misc_feature: Table A; Target 66254; HLA-B*35:01; PMEL; ENSG00000185664; TAA
HTMEVTVYH

SEQ ID NO: 66255 - protein, 9 aa, Homo sapiens
  misc_feature: Table A; Target 66255; HLA-B*57:01; PMEL; ENSG00000185664; TAA
HTMEVTVYH

SEQ ID NO: 66256 - protein, 9 aa, Homo sapiens
  misc_feature: Table A; Target 66256; HLA-C*02:02; PMEL; ENSG00000185664; TAA
HTMEVTVYH

SEQ ID NO: 66257 - protein, 9 aa, Homo sapiens
  misc_feature: Table A; Target 66257; HLA-C*04:01; PMEL; ENSG00000185664; TAA
HTMEVTVYH

SEQ ID NO: 66258 - protein, 9 aa, Homo sapiens
  misc_feature: Table A; Target 66258; HLA-C*07:06; PMEL; ENSG00000185664; TAA
HTMEVTVYH

SEQ ID NO: 66259 - protein, 10 aa, Homo sapiens
  misc_feature: Table A; Target 66259; HLA-A*03:02; PMEL; ENSG00000185664; TAA
HTMEVTVYHR

SEQ ID NO: 66260 - protein, 10 aa, Homo sapiens
  misc_feature: Table A; Target 66260; HLA-A*11:01; PMEL; ENSG00000185664; TAA
HTMEVTVYHR

SEQ ID NO: 66261 - protein, 10 aa, Homo sapiens
  misc_feature: Table A; Target 66261; HLA-A*31:01; PMEL; ENSG00000185664; TAA
HTMEVTVYHR

SEQ ID NO: 66262 - protein, 10 aa, Homo sapiens
  misc_feature: Table A; Target 66262; HLA-A*33:01; PMEL; ENSG00000185664; TAA
HTMEVTVYHR

SEQ ID NO: 66263 - protein, 10 aa, Homo sapiens
  misc_feature: Table A; Target 66263; HLA-A*33:03; PMEL; ENSG00000185664; TAA
HTMEVTVYHR

SEQ ID NO: 66264 - protein, 10 aa, Homo sapiens
  misc_feature: Table A; Target 66264; HLA-A*68:01; PMEL; ENSG00000185664; TAA
HTMEVTVYHR

SEQ ID NO: 66265 - protein, 10 aa, Homo sapiens
  misc_feature: Table A; Target 66265; HLA-A*68:02; PMEL; ENSG00000185664; TAA
HTMEVTVYHR

SEQ ID NO: 66266 - protein, 10 aa, Homo sapiens
  misc_feature: Table A; Target 66266; HLA-B*57:01; PMEL; ENSG00000185664; TAA
HTMEVTVYHR

SEQ ID NO: 66267 - protein, 10 aa, Homo sapiens
  misc_feature: Table A; Target 66267; HLA-C*07:06; PMEL; ENSG00000185664; TAA
HTMEVTVYHR

SEQ ID NO: 66268 - protein, 11 aa, Homo sapiens
  misc_feature: Table A; Target 66268; HLA-A*31:01; PMEL; ENSG00000185664; TAA
HTMEVTVYHRR

SEQ ID NO: 66269 - protein, 11 aa, Homo sapiens
  misc_feature: Table A; Target 66269; HLA-A*33:01; PMEL; ENSG00000185664; TAA
HTMEVTVYHRR

SEQ ID NO: 66270 - protein, 9 aa, Homo sapiens
  misc_feature: Table A; Target 66270; HLA-A*68:02; PMEL; ENSG00000185664; TAA
HTYLEPGPV

SEQ ID NO: 66271 - protein, 9 aa, Homo sapiens
  misc_feature: Table A; Target 66271; HLA-B*40:02; PMEL; ENSG00000185664; TAA
HTYLEPGPV

SEQ ID NO: 66272 - protein, 9 aa, Homo sapiens
  misc_feature: Table A; Target 66272; HLA-C*03:03; PMEL; ENSG00000185664; TAA
HTYLEPGPV

SEQ ID NO: 66273 - protein, 9 aa, Homo sapiens
  misc_feature: Table A; Target 66273; HLA-C*03:04; PMEL; ENSG00000185664; TAA
HTYLEPGPV

SEQ ID NO: 66274 - protein, 9 aa, Homo sapiens
  misc_feature: Table A; Target 66274; HLA-C*06:02; PMEL; ENSG00000185664; TAA
HTYLEPGPV

SEQ ID NO: 66275 - protein, 9 aa, Homo sapiens
  misc_feature: Table A; Target 66275; HLA-C*07:04; PMEL; ENSG00000185664; TAA
HTYLEPGPV

SEQ ID NO: 66276 - protein, 10 aa, Homo sapiens
  misc_feature: Table A; Target 66276; HLA-B*54:01; PMEL; ENSG00000185664; TAA
HTYLEPGPVT

SEQ ID NO: 66277 - protein, 10 aa, Homo sapiens
  misc_feature: Table A; Target 66277; HLA-C*06:02; PMEL; ENSG00000185664; TAA
HTYLEPGPVT

SEQ ID NO: 66278 - protein, 11 aa, Homo sapiens
  misc_feature: Table A; Target 66278; HLA-A*68:02; PMEL; ENSG00000185664; TAA
HTYLEPGPVTA

SEQ ID NO: 66279 - protein, 11 aa, Homo sapiens
  misc_feature: Table A; Target 66279; HLA-B*54:01; PMEL; ENSG00000185664; TAA
HTYLEPGPVTA

SEQ ID NO: 66280 - protein, 11 aa, Homo sapiens
  misc_feature: Table A; Target 66280; HLA-B*56:01; PMEL; ENSG00000185664; TAA
HTYLEPGPVTA

SEQ ID NO: 66281 - protein, 9 aa, Homo sapiens
  misc_feature: Table A; Target 66281; HLA-C*12:03; PMEL; ENSG00000185664; TAA
IALNFPGSQ

SEQ ID NO: 66282 - protein, 9 aa, Homo sapiens
  misc_feature: Table A; Target 66282; HLA-C*16:01; PMEL; ENSG00000185664; TAA
IALNFPGSQ

SEQ ID NO: 66283 - protein, 9 aa, Homo sapiens
  misc_feature: Table A; Target 66283; HLA-C*16:02; PMEL; ENSG00000185664; TAA
IALNFPGSQ

SEQ ID NO: 66284 - protein, 10 aa, Homo sapiens
  misc_feature: Table A; Target 66284; HLA-A*03:01; PMEL; ENSG00000185664; TAA
IALNFPGSQK

SEQ ID NO: 66285 - protein, 10 aa, Homo sapiens
  misc_feature: Table A; Target 66285; HLA-A*03:02; PMEL; ENSG00000185664; TAA
IALNFPGSQK

SEQ ID NO: 66286 - protein, 10 aa, Homo sapiens
  misc_feature: Table A; Target 66286; HLA-A*11:01; PMEL; ENSG00000185664; TAA
IALNFPGSQK

SEQ ID NO: 66287 - protein, 10 aa, Homo sapiens
  misc_feature: Table A; Target 66287; HLA-A*31:01; PMEL; ENSG00000185664; TAA
IALNFPGSQK

SEQ ID NO: 66288 - protein, 10 aa, Homo sapiens
  misc_feature: Table A; Target 66288; HLA-A*33:01; PMEL; ENSG00000185664; TAA
IALNFPGSQK

SEQ ID NO: 66289 - protein, 10 aa, Homo sapiens
  misc_feature: Table A; Target 66289; HLA-A*33:03; PMEL; ENSG00000185664; TAA
IALNFPGSQK

SEQ ID NO: 66290 - protein, 10 aa, Homo sapiens
  misc_feature: Table A; Target 66290; HLA-A*68:01; PMEL; ENSG00000185664; TAA
IALNFPGSQK

SEQ ID NO: 66291 - protein, 10 aa, Homo sapiens
  misc_feature: Table A; Target 66291; HLA-B*27:02; PMEL; ENSG00000185664; TAA
IALNFPGSQK

SEQ ID NO: 66292 - protein, 10 aa, Homo sapiens
  misc_feature: Table A; Target 66292; HLA-B*57:01; PMEL; ENSG00000185664; TAA
IALNFPGSQK

SEQ ID NO: 66293 - protein, 10 aa, Homo sapiens
  misc_feature: Table A; Target 66293; HLA-C*03:03; PMEL; ENSG00000185664; TAA
IALNFPGSQK

SEQ ID NO: 66294 - protein, 10 aa, Homo sapiens
  misc_feature: Table A; Target 66294; HLA-C*07:06; PMEL; ENSG00000185664; TAA
IALNFPGSQK

SEQ ID NO: 66295 - protein, 9 aa, Homo sapiens
  misc_feature: Table A; Target 66295; HLA-A*30:01; PMEL; ENSG00000185664; TAA
IESAEILQA

SEQ ID NO: 66296 - protein, 9 aa, Homo sapiens
  misc_feature: Table A; Target 66296; HLA-B*13:02; PMEL; ENSG00000185664; TAA
IESAEILQA

SEQ ID NO: 66297 - protein, 9 aa, Homo sapiens
  misc_feature: Table A; Target 66297; HLA-B*18:01; PMEL; ENSG00000185664; TAA
IESAEILQA

SEQ ID NO: 66298 - protein, 9 aa, Homo sapiens
  misc_feature: Table A; Target 66298; HLA-B*40:01; PMEL; ENSG00000185664; TAA
IESAEILQA

SEQ ID NO: 66299 - protein, 9 aa, Homo sapiens
  misc_feature: Table A; Target 66299; HLA-B*40:02; PMEL; ENSG00000185664; TAA
IESAEILQA

SEQ ID NO: 66300 - protein, 9 aa, Homo sapiens
  misc_feature: Table A; Target 66300; HLA-B*49:01; PMEL; ENSG00000185664; TAA
IESAEILQA

SEQ ID NO: 66301 - protein, 9 aa, Homo sapiens
  misc_feature: Table A; Target 66301; HLA-B*54:01; PMEL; ENSG00000185664; TAA
IESAEILQA

SEQ ID NO: 66302 - protein, 9 aa, Homo sapiens
  misc_feature: Table A; Target 66302; HLA-B*56:01; PMEL; ENSG00000185664; TAA
IESAEILQA

SEQ ID NO: 66303 - protein, 10 aa, Homo sapiens
  misc_feature: Table A; Target 66303; HLA-A*30:01; PMEL; ENSG00000185664; TAA
IESAEILQAV

SEQ ID NO: 66304 - protein, 10 aa, Homo sapiens
  misc_feature: Table A; Target 66304; HLA-B*40:01; PMEL; ENSG00000185664; TAA
IESAEILQAV

SEQ ID NO: 66305 - protein, 10 aa, Homo sapiens
  misc_feature: Table A; Target 66305; HLA-B*40:02; PMEL; ENSG00000185664; TAA
IESAEILQAV

SEQ ID NO: 66306 - protein, 10 aa, Homo sapiens
  misc_feature: Table A; Target 66306; HLA-B*44:02; PMEL; ENSG00000185664; TAA
IESAEILQAV

SEQ ID NO: 66307 - protein, 10 aa, Homo sapiens
  misc_feature: Table A; Target 66307; HLA-B*49:01; PMEL; ENSG00000185664; TAA
IESAEILQAV

SEQ ID NO: 66308 - protein, 9 aa, Homo sapiens
  misc_feature: Table A; Target 66308; HLA-B*54:01; PMEL; ENSG00000185664; TAA
IGALLAVGA

SEQ ID NO: 66309 - protein, 9 aa, Homo sapiens
  misc_feature: Table A; Target 66309; HLA-B*56:01; PMEL; ENSG00000185664; TAA
IGALLAVGA

SEQ ID NO: 66310 - protein, 9 aa, Homo sapiens
  misc_feature: Table A; Target 66310; HLA-C*06:02; PMEL; ENSG00000185664; TAA
IGALLAVGA

SEQ ID NO: 66311 - protein, 11 aa, Homo sapiens
  misc_feature: Table A; Target 66311; HLA-A*03:01; PMEL; ENSG00000185664; TAA
IGALLAVGATK

SEQ ID NO: 66312 - protein, 11 aa, Homo sapiens
  misc_feature: Table A; Target 66312; HLA-A*03:02; PMEL; ENSG00000185664; TAA
IGALLAVGATK

SEQ ID NO: 66313 - protein, 11 aa, Homo sapiens
  misc_feature: Table A; Target 66313; HLA-A*11:01; PMEL; ENSG00000185664; TAA
IGALLAVGATK

SEQ ID NO: 66314 - protein, 11 aa, Homo sapiens
  misc_feature: Table A; Target 66314; HLA-B*27:02; PMEL; ENSG00000185664; TAA
IGALLAVGATK

SEQ ID NO: 66315 - protein, 11 aa, Homo sapiens
  misc_feature: Table A; Target 66315; HLA-C*04:01; PMEL; ENSG00000185664; TAA
IGALLAVGATK

SEQ ID NO: 66316 - protein, 11 aa, Homo sapiens
  misc_feature: Table A; Target 66316; HLA-C*06:02; PMEL; ENSG00000185664; TAA
IGALLAVGATK

SEQ ID NO: 66317 - protein, 11 aa, Homo sapiens
  misc_feature: Table A; Target 66317; HLA-C*07:06; PMEL; ENSG00000185664; TAA
IGALLAVGATK

SEQ ID NO: 66318 - protein, 9 aa, Homo sapiens
  misc_feature: Table A; Target 66318; HLA-B*13:02; PMEL; ENSG00000185664; TAA
IGANASFSI

SEQ ID NO: 66319 - protein, 9 aa, Homo sapiens
  misc_feature: Table A; Target 66319; HLA-B*51:01; PMEL; ENSG00000185664; TAA
IGANASFSI

SEQ ID NO: 66320 - protein, 9 aa, Homo sapiens
  misc_feature: Table A; Target 66320; HLA-C*03:03; PMEL; ENSG00000185664; TAA
IGANASFSI

SEQ ID NO: 66321 - protein, 9 aa, Homo sapiens
  misc_feature: Table A; Target 66321; HLA-C*06:02; PMEL; ENSG00000185664; TAA
IGANASFSI

SEQ ID NO: 66322 - protein, 9 aa, Homo sapiens
  misc_feature: Table A; Target 66322; HLA-C*16:02; PMEL; ENSG00000185664; TAA
IGANASFSI

SEQ ID NO: 66323 - protein, 11 aa, Homo sapiens
  misc_feature: Table A; Target 66323; HLA-C*03:03; PMEL; ENSG00000185664; TAA
IGANASFSIAL

SEQ ID NO: 66324 - protein, 8 aa, Homo sapiens
  misc_feature: Table A; Target 66324; HLA-C*03:03; PMEL; ENSG00000185664; TAA
IGENSPLL

SEQ ID NO: 66325 - protein, 8 aa, Homo sapiens
  misc_feature: Table A; Target 66325; HLA-C*03:04; PMEL; ENSG00000185664; TAA
IGENSPLL

SEQ ID NO: 66326 - protein, 8 aa, Homo sapiens
  misc_feature: Table A; Target 66326; HLA-C*04:01; PMEL; ENSG00000185664; TAA
IGENSPLL

SEQ ID NO: 66327 - protein, 8 aa, Homo sapiens
  misc_feature: Table A; Target 66327; HLA-C*05:01; PMEL; ENSG00000185664; TAA
IGENSPLL

SEQ ID NO: 66328 - protein, 8 aa, Homo sapiens
  misc_feature: Table A; Target 66328; HLA-C*07:04; PMEL; ENSG00000185664; TAA
IGENSPLL

SEQ ID NO: 66329 - protein, 8 aa, Homo sapiens
  misc_feature: Table A; Target 66329; HLA-B*07:02; PMEL; ENSG00000185664; TAA
IGTGRAML

SEQ ID NO: 66330 - protein, 8 aa, Homo sapiens
  misc_feature: Table A; Target 66330; HLA-B*08:01; PMEL; ENSG00000185664; TAA
IGTGRAML

SEQ ID NO: 66331 - protein, 8 aa, Homo sapiens
  misc_feature: Table A; Target 66331; HLA-C*16:01; PMEL; ENSG00000185664; TAA
IGTGRAML

SEQ ID NO: 66332 - protein, 8 aa, Homo sapiens
  misc_feature: Table A; Target 66332; HLA-A*25:01; PMEL; ENSG00000185664; TAA
IINGSQVW

SEQ ID NO: 66333 - protein, 8 aa, Homo sapiens
  misc_feature: Table A; Target 66333; HLA-A*32:01; PMEL; ENSG00000185664; TAA
IINGSQVW

SEQ ID NO: 66334 - protein, 8 aa, Homo sapiens
  misc_feature: Table A; Target 66334; HLA-B*57:01; PMEL; ENSG00000185664; TAA
IINGSQVW

SEQ ID NO: 66335 - protein, 8 aa, Homo sapiens
  misc_feature: Table A; Target 66335; HLA-B*58:01; PMEL; ENSG00000185664; TAA
IINGSQVW

SEQ ID NO: 66336 - protein, 8 aa, Homo sapiens
  misc_feature: Table A; Target 66336; HLA-C*04:01; PMEL; ENSG00000185664; TAA
IINGSQVW

SEQ ID NO: 66337 - protein, 8 aa, Homo sapiens
  misc_feature: Table A; Target 66337; HLA-C*07:04; PMEL; ENSG00000185664; TAA
IINGSQVW

SEQ ID NO: 66338 - protein, 8 aa, Homo sapiens
  misc_feature: Table A; Target 66338; HLA-C*12:03; PMEL; ENSG00000185664; TAA
IINGSQVW

SEQ ID NO: 66339 - protein, 9 aa, Homo sapiens
  misc_feature: Table A; Target 66339; HLA-A*02:03; PMEL; ENSG00000185664; TAA
ILKGGSGTY

SEQ ID NO: 66340 - protein, 9 aa, Homo sapiens
  misc_feature: Table A; Target 66340; HLA-A*03:01; PMEL; ENSG00000185664; TAA
ILKGGSGTY

SEQ ID NO: 66341 - protein, 9 aa, Homo sapiens
  misc_feature: Table A; Target 66341; HLA-A*03:02; PMEL; ENSG00000185664; TAA
ILKGGSGTY

SEQ ID NO: 66342 - protein, 9 aa, Homo sapiens
  misc_feature: Table A; Target 66342; HLA-A*23:01; PMEL; ENSG00000185664; TAA
ILKGGSGTY

SEQ ID NO: 66343 - protein, 9 aa, Homo sapiens
  misc_feature: Table A; Target 66343; HLA-A*25:01; PMEL; ENSG00000185664; TAA
ILKGGSGTY

SEQ ID NO: 66344 - protein, 9 aa, Homo sapiens
  misc_feature: Table A; Target 66344; HLA-A*26:01; PMEL; ENSG00000185664; TAA
ILKGGSGTY

SEQ ID NO: 66345 - protein, 9 aa, Homo sapiens
  misc_feature: Table A; Target 66345; HLA-A*29:02; PMEL; ENSG00000185664; TAA
ILKGGSGTY

SEQ ID NO: 66346 - protein, 9 aa, Homo sapiens
  misc_feature: Table A; Target 66346; HLA-A*30:02; PMEL; ENSG00000185664; TAA
ILKGGSGTY

SEQ ID NO: 66347 - protein, 9 aa, Homo sapiens
  misc_feature: Table A; Target 66347; HLA-A*31:01; PMEL; ENSG00000185664; TAA
ILKGGSGTY

SEQ ID NO: 66348 - protein, 9 aa, Homo sapiens
  misc_feature: Table A; Target 66348; HLA-A*32:01; PMEL; ENSG00000185664; TAA
ILKGGSGTY

SEQ ID NO: 66349 - protein, 9 aa, Homo sapiens
  misc_feature: Table A; Target 66349; HLA-B*07:02; PMEL; ENSG00000185664; TAA
ILKGGSGTY

SEQ ID NO: 66350 - protein, 9 aa, Homo sapiens
  misc_feature: Table A; Target 66350; HLA-B*15:01; PMEL; ENSG00000185664; TAA
ILKGGSGTY

SEQ ID NO: 66351 - protein, 9 aa, Homo sapiens
  misc_feature: Table A; Target 66351; HLA-B*15:03; PMEL; ENSG00000185664; TAA
ILKGGSGTY

SEQ ID NO: 66352 - protein, 9 aa, Homo sapiens
  misc_feature: Table A; Target 66352; HLA-B*39:01; PMEL; ENSG00000185664; TAA
ILKGGSGTY

SEQ ID NO: 66353 - protein, 9 aa, Homo sapiens
  misc_feature: Table A; Target 66353; HLA-B*46:01; PMEL; ENSG00000185664; TAA
ILKGGSGTY

SEQ ID NO: 66354 - protein, 9 aa, Homo sapiens
  misc_feature: Table A; Target 66354; HLA-B*57:01; PMEL; ENSG00000185664; TAA
ILKGGSGTY

SEQ ID NO: 66355 - protein, 9 aa, Homo sapiens
  misc_feature: Table A; Target 66355; HLA-B*58:01; PMEL; ENSG00000185664; TAA
ILKGGSGTY

SEQ ID NO: 66356 - protein, 9 aa, Homo sapiens
  misc_feature: Table A; Target 66356; HLA-C*01:02; PMEL; ENSG00000185664; TAA
ILKGGSGTY

SEQ ID NO: 66357 - protein, 9 aa, Homo sapiens
  misc_feature: Table A; Target 66357; HLA-C*02:02; PMEL; ENSG00000185664; TAA
ILKGGSGTY

SEQ ID NO: 66358 - protein, 9 aa, Homo sapiens
  misc_feature: Table A; Target 66358; HLA-C*04:01; PMEL; ENSG00000185664; TAA
ILKGGSGTY

SEQ ID NO: 66359 - protein, 9 aa, Homo sapiens
  misc_feature: Table A; Target 66359; HLA-C*06:02; PMEL; ENSG00000185664; TAA
ILKGGSGTY

SEQ ID NO: 66360 - protein, 9 aa, Homo sapiens
  misc_feature: Table A; Target 66360; HLA-C*07:01; PMEL; ENSG00000185664; TAA
ILKGGSGTY

SEQ ID NO: 66361 - protein, 9 aa, Homo sapiens
  misc_feature: Table A; Target 66361; HLA-C*07:02; PMEL; ENSG00000185664; TAA
ILKGGSGTY

SEQ ID NO: 66362 - protein, 9 aa, Homo sapiens
  misc_feature: Table A; Target 66362; HLA-C*07:04; PMEL; ENSG00000185664; TAA
ILKGGSGTY

SEQ ID NO: 66363 - protein, 9 aa, Homo sapiens
  misc_feature: Table A; Target 66363; HLA-C*12:03; PMEL; ENSG00000185664; TAA
ILKGGSGTY

SEQ ID NO: 66364 - protein, 9 aa, Homo sapiens
  misc_feature: Table A; Target 66364; HLA-C*14:02; PMEL; ENSG00000185664; TAA
ILKGGSGTY

SEQ ID NO: 66365 - protein, 9 aa, Homo sapiens
  misc_feature: Table A; Target 66365; HLA-C*16:01; PMEL; ENSG00000185664; TAA
ILKGGSGTY

SEQ ID NO: 66366 - protein, 9 aa, Homo sapiens
  misc_feature: Table A; Target 66366; HLA-C*16:02; PMEL; ENSG00000185664; TAA
ILKGGSGTY

SEQ ID NO: 66367 - protein, 9 aa, Homo sapiens
  misc_feature: Table A; Target 66367; HLA-C*16:04; PMEL; ENSG00000185664; TAA
ILKGGSGTY

SEQ ID NO: 66368 - protein, 10 aa, Homo sapiens
  misc_feature: Table A; Target 66368; HLA-A*02:03; PMEL; ENSG00000185664; TAA
ILKGGSGTYC

SEQ ID NO: 66369 - protein, 10 aa, Homo sapiens
  misc_feature: Table A; Target 66369; HLA-C*04:01; PMEL; ENSG00000185664; TAA
ILQAVPSGEG

SEQ ID NO: 66370 - protein, 10 aa, Homo sapiens
  misc_feature: Table A; Target 66370; HLA-C*06:02; PMEL; ENSG00000185664; TAA
ILQAVPSGEG

SEQ ID NO: 66371 - protein, 9 aa, Homo sapiens
  misc_feature: Table A; Target 66371; HLA-A*02:01; PMEL; ENSG00000185664; TAA
IMPGQEAGL

SEQ ID NO: 66372 - protein, 9 aa, Homo sapiens
  misc_feature: Table A; Target 66372; HLA-A*02:07; PMEL; ENSG00000185664; TAA
IMPGQEAGL

SEQ ID NO: 66373 - protein, 9 aa, Homo sapiens
  misc_feature: Table A; Target 66373; HLA-B*55:01; PMEL; ENSG00000185664; TAA
IMPGQEAGL

SEQ ID NO: 66374 - protein, 9 aa, Homo sapiens
  misc_feature: Table A; Target 66374; HLA-C*01:02; PMEL; ENSG00000185664; TAA
IMPGQEAGL

SEQ ID NO: 66375 - protein, 9 aa, Homo sapiens
  misc_feature: Table A; Target 66375; HLA-C*07:04; PMEL; ENSG00000185664; TAA
IMPGQEAGL

SEQ ID NO: 66376 - protein, 9 aa, Homo sapiens
  misc_feature: Table A; Target 66376; HLA-C*14:02; PMEL; ENSG00000185664; TAA
IMPGQEAGL

SEQ ID NO: 66377 - protein, 9 aa, Homo sapiens
  misc_feature: Table A; Target 66377; HLA-B*55:01; PMEL; ENSG00000185664; TAA
IMSTESITG

SEQ ID NO: 66378 - protein, 9 aa, Homo sapiens
  misc_feature: Table A; Target 66378; HLA-C*04:01; PMEL; ENSG00000185664; TAA
IMSTESITG

SEQ ID NO: 66379 - protein, 9 aa, Homo sapiens
  misc_feature: Table A; Target 66379; HLA-B*35:03; PMEL; ENSG00000185664; TAA
IPEPEGPDA

SEQ ID NO: 66380 - protein, 9 aa, Homo sapiens
  misc_feature: Table A; Target 66380; HLA-B*55:01; PMEL; ENSG00000185664; TAA
IPEPEGPDA

SEQ ID NO: 66381 - protein, 9 aa, Homo sapiens
  misc_feature: Table A; Target 66381; HLA-B*57:01; PMEL; ENSG00000185664; TAA
ISRALVVTH

SEQ ID NO: 66382 - protein, 9 aa, Homo sapiens
  misc_feature: Table A; Target 66382; HLA-C*12:03; PMEL; ENSG00000185664; TAA
ISRALVVTH

SEQ ID NO: 66383 - protein, 11 aa, Homo sapiens
  misc_feature: Table A; Target 66383; HLA-A*30:02; PMEL; ENSG00000185664; TAA
ISRALVVTHTY

SEQ ID NO: 66384 - protein, 11 aa, Homo sapiens
  misc_feature: Table A; Target 66384; HLA-B*57:01; PMEL; ENSG00000185664; TAA
ISRALVVTHTY

SEQ ID NO: 66385 - protein, 9 aa, Homo sapiens
  misc_feature: Table A; Target 66385; HLA-C*07:04; PMEL; ENSG00000185664; TAA
ISSPGCQPP

SEQ ID NO: 66386 - protein, 10 aa, Homo sapiens
  misc_feature: Table A; Target 66386; HLA-C*06:02; PMEL; ENSG00000185664; TAA
ISSPGCQPPA

SEQ ID NO: 66387 - protein, 8 aa, Homo sapiens
  misc_feature: Table A; Target 66387; HLA-C*16:01; PMEL; ENSG00000185664; TAA
ISTAPVQM

SEQ ID NO: 66388 - protein, 8 aa, Homo sapiens
  misc_feature: Table A; Target 66388; HLA-C*16:02; PMEL; ENSG00000185664; TAA
ISTAPVQM

SEQ ID NO: 66389 - protein, 10 aa, Homo sapiens
  misc_feature: Table A; Target 66389; HLA-B*07:02; PMEL; ENSG00000185664; TAA
ISTAPVQMPT

SEQ ID NO: 66390 - protein, 10 aa, Homo sapiens
  misc_feature: Table A; Target 66390; HLA-C*06:02; PMEL; ENSG00000185664; TAA
ISTAPVQMPT

SEQ ID NO: 66391 - protein, 9 aa, Homo sapiens
  misc_feature: Table A; Target 66391; HLA-A*01:01; PMEL; ENSG00000185664; TAA
ITDQVPFSV

SEQ ID NO: 66392 - protein, 9 aa, Homo sapiens
  misc_feature: Table A; Target 66392; HLA-A*02:01; PMEL; ENSG00000185664; TAA
ITDQVPFSV

SEQ ID NO: 66393 - protein, 9 aa, Homo sapiens
  misc_feature: Table A; Target 66393; HLA-A*02:04; PMEL; ENSG00000185664; TAA
ITDQVPFSV

SEQ ID NO: 66394 - protein, 9 aa, Homo sapiens
  misc_feature: Table A; Target 66394; HLA-A*02:07; PMEL; ENSG00000185664; TAA
ITDQVPFSV

SEQ ID NO: 66395 - protein, 9 aa, Homo sapiens
  misc_feature: Table A; Target 66395; HLA-A*32:01; PMEL; ENSG00000185664; TAA
ITDQVPFSV

SEQ ID NO: 66396 - protein, 9 aa, Homo sapiens
  misc_feature: Table A; Target 66396; HLA-A*68:02; PMEL; ENSG00000185664; TAA
ITDQVPFSV

SEQ ID NO: 66397 - protein, 9 aa, Homo sapiens
  misc_feature: Table A; Target 66397; HLA-B*13:02; PMEL; ENSG00000185664; TAA
ITDQVPFSV

SEQ ID NO: 66398 - protein, 9 aa, Homo sapiens
  misc_feature: Table A; Target 66398; HLA-B*35:03; PMEL; ENSG00000185664; TAA
ITDQVPFSV

SEQ ID NO: 66399 - protein, 9 aa, Homo sapiens
  misc_feature: Table A; Target 66399; HLA-B*38:01; PMEL; ENSG00000185664; TAA
ITDQVPFSV

SEQ ID NO: 66400 - protein, 9 aa, Homo sapiens
  misc_feature: Table A; Target 66400; HLA-B*55:01; PMEL; ENSG00000185664; TAA
ITDQVPFSV

SEQ ID NO: 66401 - protein, 9 aa, Homo sapiens
  misc_feature: Table A; Target 66401; HLA-C*03:03; PMEL; ENSG00000185664; TAA
ITDQVPFSV

SEQ ID NO: 66402 - protein, 9 aa, Homo sapiens
  misc_feature: Table A; Target 66402; HLA-C*03:04; PMEL; ENSG00000185664; TAA
ITDQVPFSV

SEQ ID NO: 66403 - protein, 9 aa, Homo sapiens
  misc_feature: Table A; Target 66403; HLA-C*04:01; PMEL; ENSG00000185664; TAA
ITDQVPFSV

SEQ ID NO: 66404 - protein, 9 aa, Homo sapiens
  misc_feature: Table A; Target 66404; HLA-C*05:01; PMEL; ENSG00000185664; TAA
ITDQVPFSV

SEQ ID NO: 66405 - protein, 9 aa, Homo sapiens
  misc_feature: Table A; Target 66405; HLA-C*07:04; PMEL; ENSG00000185664; TAA
ITDQVPFSV

SEQ ID NO: 66406 - protein, 9 aa, Homo sapiens
  misc_feature: Table A; Target 66406; HLA-C*16:02; PMEL; ENSG00000185664; TAA
ITDQVPFSV

SEQ ID NO: 66407 - protein, 11 aa, Homo sapiens
  misc_feature: Table A; Target 66407; HLA-A*02:07; PMEL; ENSG00000185664; TAA
ITDQVPFSVSV

SEQ ID NO: 66408 - protein, 11 aa, Homo sapiens
  misc_feature: Table A; Target 66408; HLA-C*05:01; PMEL; ENSG00000185664; TAA
ITDQVPFSVSV

SEQ ID NO: 66409 - protein, 9 aa, Homo sapiens
  misc_feature: Table A; Target 66409; HLA-A*01:01; PMEL; ENSG00000185664; TAA
ITGSLGPLL

SEQ ID NO: 66410 - protein, 9 aa, Homo sapiens
  misc_feature: Table A; Target 66410; HLA-A*03:01; PMEL; ENSG00000185664; TAA
ITGSLGPLL

SEQ ID NO: 66411 - protein, 9 aa, Homo sapiens
  misc_feature: Table A; Target 66411; HLA-A*03:02; PMEL; ENSG00000185664; TAA
ITGSLGPLL

SEQ ID NO: 66412 - protein, 9 aa, Homo sapiens
  misc_feature: Table A; Target 66412; HLA-A*11:01; PMEL; ENSG00000185664; TAA
ITGSLGPLL

SEQ ID NO: 66413 - protein, 9 aa, Homo sapiens
  misc_feature: Table A; Target 66413; HLA-A*23:01; PMEL; ENSG00000185664; TAA
ITGSLGPLL

SEQ ID NO: 66414 - protein, 9 aa, Homo sapiens
  misc_feature: Table A; Target 66414; HLA-A*24:02; PMEL; ENSG00000185664; TAA
ITGSLGPLL

SEQ ID NO: 66415 - protein, 9 aa, Homo sapiens
  misc_feature: Table A; Target 66415; HLA-A*26:01; PMEL; ENSG00000185664; TAA
ITGSLGPLL

SEQ ID NO: 66416 - protein, 9 aa, Homo sapiens
  misc_feature: Table A; Target 66416; HLA-A*29:02; PMEL; ENSG00000185664; TAA
ITGSLGPLL

SEQ ID NO: 66417 - protein, 9 aa, Homo sapiens
  misc_feature: Table A; Target 66417; HLA-A*31:01; PMEL; ENSG00000185664; TAA
ITGSLGPLL

SEQ ID NO: 66418 - protein, 9 aa, Homo sapiens
  misc_feature: Table A; Target 66418; HLA-A*68:01; PMEL; ENSG00000185664; TAA
ITGSLGPLL

SEQ ID NO: 66419 - protein, 9 aa, Homo sapiens
  misc_feature: Table A; Target 66419; HLA-A*68:02; PMEL; ENSG00000185664; TAA
ITGSLGPLL

SEQ ID NO: 66420 - protein, 9 aa, Homo sapiens
  misc_feature: Table A; Target 66420; HLA-B*07:02; PMEL; ENSG00000185664; TAA
ITGSLGPLL

SEQ ID NO: 66421 - protein, 9 aa, Homo sapiens
  misc_feature: Table A; Target 66421; HLA-B*27:05; PMEL; ENSG00000185664; TAA
ITGSLGPLL

SEQ ID NO: 66422 - protein, 9 aa, Homo sapiens
  misc_feature: Table A; Target 66422; HLA-B*35:03; PMEL; ENSG00000185664; TAA
ITGSLGPLL

SEQ ID NO: 66423 - protein, 9 aa, Homo sapiens
  misc_feature: Table A; Target 66423; HLA-B*38:01; PMEL; ENSG00000185664; TAA
ITGSLGPLL

SEQ ID NO: 66424 - protein, 9 aa, Homo sapiens
  misc_feature: Table A; Target 66424; HLA-B*57:01; PMEL; ENSG00000185664; TAA
ITGSLGPLL

SEQ ID NO: 66425 - protein, 9 aa, Homo sapiens
  misc_feature: Table A; Target 66425; HLA-B*58:01; PMEL; ENSG00000185664; TAA
ITGSLGPLL

SEQ ID NO: 66426 - protein, 9 aa, Homo sapiens
  misc_feature: Table A; Target 66426; HLA-C*02:02; PMEL; ENSG00000185664; TAA
ITGSLGPLL

SEQ ID NO: 66427 - protein, 9 aa, Homo sapiens
  misc_feature: Table A; Target 66427; HLA-C*03:03; PMEL; ENSG00000185664; TAA
ITGSLGPLL

SEQ ID NO: 66428 - protein, 9 aa, Homo sapiens
  misc_feature: Table A; Target 66428; HLA-C*03:04; PMEL; ENSG00000185664; TAA
ITGSLGPLL

SEQ ID NO: 66429 - protein, 9 aa, Homo sapiens
  misc_feature: Table A; Target 66429; HLA-C*04:01; PMEL; ENSG00000185664; TAA
ITGSLGPLL

SEQ ID NO: 66430 - protein, 9 aa, Homo sapiens
  misc_feature: Table A; Target 66430; HLA-C*05:01; PMEL; ENSG00000185664; TAA
ITGSLGPLL

SEQ ID NO: 66431 - protein, 9 aa, Homo sapiens
  misc_feature: Table A; Target 66431; HLA-C*06:02; PMEL; ENSG00000185664; TAA
ITGSLGPLL

SEQ ID NO: 66432 - protein, 9 aa, Homo sapiens
  misc_feature: Table A; Target 66432; HLA-C*07:01; PMEL; ENSG00000185664; TAA
ITGSLGPLL

SEQ ID NO: 66433 - protein, 9 aa, Homo sapiens
  misc_feature: Table A; Target 66433; HLA-C*07:02; PMEL; ENSG00000185664; TAA
ITGSLGPLL

SEQ ID NO: 66434 - protein, 9 aa, Homo sapiens
  misc_feature: Table A; Target 66434; HLA-C*07:04; PMEL; ENSG00000185664; TAA
ITGSLGPLL

SEQ ID NO: 66435 - protein, 9 aa, Homo sapiens
  misc_feature: Table A; Target 66435; HLA-C*12:03; PMEL; ENSG00000185664; TAA
ITGSLGPLL

SEQ ID NO: 66436 - protein, 9 aa, Homo sapiens
  misc_feature: Table A; Target 66436; HLA-B*27:05; PMEL; ENSG00000185664; TAA
IVQGIESAE

SEQ ID NO: 66437 - protein, 10 aa, Homo sapiens
  misc_feature: Table A; Target 66437; HLA-A*23:01; PMEL; ENSG00000185664; TAA
IVQGIESAEI

SEQ ID NO: 66438 - protein, 10 aa, Homo sapiens
  misc_feature: Table A; Target 66438; HLA-A*25:01; PMEL; ENSG00000185664; TAA
IVQGIESAEI

SEQ ID NO: 66439 - protein, 10 aa, Homo sapiens
  misc_feature: Table A; Target 66439; HLA-B*13:02; PMEL; ENSG00000185664; TAA
IVQGIESAEI

SEQ ID NO: 66440 - protein, 10 aa, Homo sapiens
  misc_feature: Table A; Target 66440; HLA-B*38:01; PMEL; ENSG00000185664; TAA
IVQGIESAEI

SEQ ID NO: 66441 - protein, 10 aa, Homo sapiens
  misc_feature: Table A; Target 66441; HLA-C*04:01; PMEL; ENSG00000185664; TAA
IVQGIESAEI

SEQ ID NO: 66442 - protein, 10 aa, Homo sapiens
  misc_feature: Table A; Target 66442; HLA-C*07:04; PMEL; ENSG00000185664; TAA
IVQGIESAEI

SEQ ID NO: 66443 - protein, 8 aa, Homo sapiens
  misc_feature: Table A; Target 66443; HLA-C*06:02; PMEL; ENSG00000185664; TAA
IVVLSGTT

SEQ ID NO: 66444 - protein, 9 aa, Homo sapiens
  misc_feature: Table A; Target 66444; HLA-B*15:01; PMEL; ENSG00000185664; TAA
IVVLSGTTA

SEQ ID NO: 66445 - protein, 9 aa, Homo sapiens
  misc_feature: Table A; Target 66445; HLA-B*15:03; PMEL; ENSG00000185664; TAA
IVVLSGTTA

SEQ ID NO: 66446 - protein, 9 aa, Homo sapiens
  misc_feature: Table A; Target 66446; HLA-B*46:01; PMEL; ENSG00000185664; TAA
IVVLSGTTA

SEQ ID NO: 66447 - protein, 9 aa, Homo sapiens
  misc_feature: Table A; Target 66447; HLA-B*54:01; PMEL; ENSG00000185664; TAA
IVVLSGTTA

SEQ ID NO: 66448 - protein, 9 aa, Homo sapiens
  misc_feature: Table A; Target 66448; HLA-B*55:01; PMEL; ENSG00000185664; TAA
IVVLSGTTA

SEQ ID NO: 66449 - protein, 9 aa, Homo sapiens
  misc_feature: Table A; Target 66449; HLA-B*56:01; PMEL; ENSG00000185664; TAA
IVVLSGTTA

SEQ ID NO: 66450 - protein, 9 aa, Homo sapiens
  misc_feature: Table A; Target 66450; HLA-C*01:02; PMEL; ENSG00000185664; TAA
IVVLSGTTA

SEQ ID NO: 66451 - protein, 9 aa, Homo sapiens
  misc_feature: Table A; Target 66451; HLA-C*02:02; PMEL; ENSG00000185664; TAA
IVVLSGTTA

SEQ ID NO: 66452 - protein, 9 aa, Homo sapiens
  misc_feature: Table A; Target 66452; HLA-C*03:03; PMEL; ENSG00000185664; TAA
IVVLSGTTA

SEQ ID NO: 66453 - protein, 9 aa, Homo sapiens
  misc_feature: Table A; Target 66453; HLA-C*03:04; PMEL; ENSG00000185664; TAA
IVVLSGTTA

SEQ ID NO: 66454 - protein, 9 aa, Homo sapiens
  misc_feature: Table A; Target 66454; HLA-C*04:01; PMEL; ENSG00000185664; TAA
IVVLSGTTA

SEQ ID NO: 66455 - protein, 9 aa, Homo sapiens
  misc_feature: Table A; Target 66455; HLA-C*07:04; PMEL; ENSG00000185664; TAA
IVVLSGTTA

SEQ ID NO: 66456 - protein, 9 aa, Homo sapiens
  misc_feature: Table A; Target 66456; HLA-C*14:02; PMEL; ENSG00000185664; TAA
IVVLSGTTA

SEQ ID NO: 66457 - protein, 10 aa, Homo sapiens
  misc_feature: Table A; Target 66457; HLA-B*54:01; PMEL; ENSG00000185664; TAA
IVVLSGTTAA

SEQ ID NO: 66458 - protein, 10 aa, Homo sapiens
  misc_feature: Table A; Target 66458; HLA-B*56:01; PMEL; ENSG00000185664; TAA
IVVLSGTTAA

SEQ ID NO: 66459 - protein, 11 aa, Homo sapiens
  misc_feature: Table A; Target 66459; HLA-B*07:02; PMEL; ENSG00000185664; TAA
IVVLSGTTAAQ

SEQ ID NO: 66460 - protein, 11 aa, Homo sapiens
  misc_feature: Table A; Target 66460; HLA-C*01:02; PMEL; ENSG00000185664; TAA
IVVLSGTTAAQ

SEQ ID NO: 66461 - protein, 11 aa, Homo sapiens
  misc_feature: Table A; Target 66461; HLA-C*06:02; PMEL; ENSG00000185664; TAA
IVVLSGTTAAQ

SEQ ID NO: 66462 - protein, 11 aa, Homo sapiens
  misc_feature: Table A; Target 66462; HLA-C*07:01; PMEL; ENSG00000185664; TAA
IVVLSGTTAAQ

SEQ ID NO: 66463 - protein, 11 aa, Homo sapiens
  misc_feature: Table A; Target 66463; HLA-C*07:02; PMEL; ENSG00000185664; TAA
IVVLSGTTAAQ

SEQ ID NO: 66464 - protein, 11 aa, Homo sapiens
  misc_feature: Table A; Target 66464; HLA-B*57:01; PMEL; ENSG00000185664; TAA
KAWNRQLYPEW

SEQ ID NO: 66465 - protein, 9 aa, Homo sapiens
  misc_feature: Table A; Target 66465; HLA-B*07:02; PMEL; ENSG00000185664; TAA
KGGSGTYCL

SEQ ID NO: 66466 - protein, 9 aa, Homo sapiens
  misc_feature: Table A; Target 66466; HLA-C*07:01; PMEL; ENSG00000185664; TAA
KGGSGTYCL

SEQ ID NO: 66467 - protein, 9 aa, Homo sapiens
  misc_feature: Table A; Target 66467; HLA-C*07:02; PMEL; ENSG00000185664; TAA
KGGSGTYCL

SEQ ID NO: 66468 - protein, 11 aa, Homo sapiens
  misc_feature: Table A; Target 66468; HLA-A*24:02; PMEL; ENSG00000185664; TAA
KHFLRNQPLTF

SEQ ID NO: 66469 - protein, 11 aa, Homo sapiens
  misc_feature: Table A; Target 66469; HLA-B*57:01; PMEL; ENSG00000185664; TAA
KHFLRNQPLTF

SEQ ID NO: 66470 - protein, 9 aa, Homo sapiens
  misc_feature: Table A; Target 66470; HLA-A*02:01; PMEL; ENSG00000185664; TAA
KQDFSVPQL

SEQ ID NO: 66471 - protein, 9 aa, Homo sapiens
  misc_feature: Table A; Target 66471; HLA-A*02:04; PMEL; ENSG00000185664; TAA
KQDFSVPQL

SEQ ID NO: 66472 - protein, 9 aa, Homo sapiens
  misc_feature: Table A; Target 66472; HLA-A*02:07; PMEL; ENSG00000185664; TAA
KQDFSVPQL

SEQ ID NO: 66473 - protein, 9 aa, Homo sapiens
  misc_feature: Table A; Target 66473; HLA-A*30:01; PMEL; ENSG00000185664; TAA
KQDFSVPQL

SEQ ID NO: 66474 - protein, 9 aa, Homo sapiens
  misc_feature: Table A; Target 66474; HLA-B*13:02; PMEL; ENSG00000185664; TAA
KQDFSVPQL

SEQ ID NO: 66475 - protein, 9 aa, Homo sapiens
  misc_feature: Table A; Target 66475; HLA-B*15:01; PMEL; ENSG00000185664; TAA
KQDFSVPQL

SEQ ID NO: 66476 - protein, 9 aa, Homo sapiens
  misc_feature: Table A; Target 66476; HLA-B*15:03; PMEL; ENSG00000185664; TAA
KQDFSVPQL

SEQ ID NO: 66477 - protein, 9 aa, Homo sapiens
  misc_feature: Table A; Target 66477; HLA-B*27:05; PMEL; ENSG00000185664; TAA
KQDFSVPQL

SEQ ID NO: 66478 - protein, 9 aa, Homo sapiens
  misc_feature: Table A; Target 66478; HLA-B*37:01; PMEL; ENSG00000185664; TAA
KQDFSVPQL

SEQ ID NO: 66479 - protein, 9 aa, Homo sapiens
  misc_feature: Table A; Target 66479; HLA-B*38:01; PMEL; ENSG00000185664; TAA
KQDFSVPQL

SEQ ID NO: 66480 - protein, 9 aa, Homo sapiens
  misc_feature: Table A; Target 66480; HLA-B*39:01; PMEL; ENSG00000185664; TAA
KQDFSVPQL

SEQ ID NO: 66481 - protein, 9 aa, Homo sapiens
  misc_feature: Table A; Target 66481; HLA-B*40:01; PMEL; ENSG00000185664; TAA
KQDFSVPQL

SEQ ID NO: 66482 - protein, 9 aa, Homo sapiens
  misc_feature: Table A; Target 66482; HLA-B*40:02; PMEL; ENSG00000185664; TAA
KQDFSVPQL

SEQ ID NO: 66483 - protein, 9 aa, Homo sapiens
  misc_feature: Table A; Target 66483; HLA-B*55:01; PMEL; ENSG00000185664; TAA
KQDFSVPQL

SEQ ID NO: 66484 - protein, 9 aa, Homo sapiens
  misc_feature: Table A; Target 66484; HLA-C*04:01; PMEL; ENSG00000185664; TAA
KQDFSVPQL

SEQ ID NO: 66485 - protein, 9 aa, Homo sapiens
  misc_feature: Table A; Target 66485; HLA-C*05:01; PMEL; ENSG00000185664; TAA
KQDFSVPQL

SEQ ID NO: 66486 - protein, 9 aa, Homo sapiens
  misc_feature: Table A; Target 66486; HLA-C*07:04; PMEL; ENSG00000185664; TAA
KQDFSVPQL

SEQ ID NO: 66487 - protein, 11 aa, Homo sapiens
  misc_feature: Table A; Target 66487; HLA-A*03:01; PMEL; ENSG00000185664; TAA
KQDFSVPQLPH

SEQ ID NO: 66488 - protein, 9 aa, Homo sapiens
  misc_feature: Table A; Target 66488; HLA-A*02:01; PMEL; ENSG00000185664; TAA
KTWGQYWQV

SEQ ID NO: 66489 - protein, 9 aa, Homo sapiens
  misc_feature: Table A; Target 66489; HLA-A*02:04; PMEL; ENSG00000185664; TAA
KTWGQYWQV

SEQ ID NO: 66490 - protein, 9 aa, Homo sapiens
  misc_feature: Table A; Target 66490; HLA-A*02:07; PMEL; ENSG00000185664; TAA
KTWGQYWQV

SEQ ID NO: 66491 - protein, 10 aa, Homo sapiens
  misc_feature: Table A; Target 66491; HLA-A*31:01; PMEL; ENSG00000185664; TAA
KTWGQYWQVL

SEQ ID NO: 66492 - protein, 9 aa, Homo sapiens
  misc_feature: Table A; Target 66492; HLA-A*23:01; PMEL; ENSG00000185664; TAA
KVLPDGQVI

SEQ ID NO: 66493 - protein, 9 aa, Homo sapiens
  misc_feature: Table A; Target 66493; HLA-A*24:02; PMEL; ENSG00000185664; TAA
KVLPDGQVI

SEQ ID NO: 66494 - protein, 9 aa, Homo sapiens
  misc_feature: Table A; Target 66494; HLA-A*32:01; PMEL; ENSG00000185664; TAA
KVLPDGQVI

SEQ ID NO: 66495 - protein, 9 aa, Homo sapiens
  misc_feature: Table A; Target 66495; HLA-B*13:02; PMEL; ENSG00000185664; TAA
KVLPDGQVI

SEQ ID NO: 66496 - protein, 9 aa, Homo sapiens
  misc_feature: Table A; Target 66496; HLA-B*15:01; PMEL; ENSG00000185664; TAA
KVLPDGQVI

SEQ ID NO: 66497 - protein, 9 aa, Homo sapiens
  misc_feature: Table A; Target 66497; HLA-B*37:01; PMEL; ENSG00000185664; TAA
KVLPDGQVI

SEQ ID NO: 66498 - protein, 9 aa, Homo sapiens
  misc_feature: Table A; Target 66498; HLA-B*40:02; PMEL; ENSG00000185664; TAA
KVLPDGQVI

SEQ ID NO: 66499 - protein, 9 aa, Homo sapiens
  misc_feature: Table A; Target 66499; HLA-B*57:01; PMEL; ENSG00000185664; TAA
KVLPDGQVI

SEQ ID NO: 66500 - protein, 9 aa, Homo sapiens
  misc_feature: Table A; Target 66500; HLA-B*58:01; PMEL; ENSG00000185664; TAA
KVLPDGQVI

SEQ ID NO: 66501 - protein, 10 aa, Homo sapiens
  misc_feature: Table A; Target 66501; HLA-A*24:02; PMEL; ENSG00000185664; TAA
KVLPDGQVIW

SEQ ID NO: 66502 - protein, 10 aa, Homo sapiens
  misc_feature: Table A; Target 66502; HLA-A*25:01; PMEL; ENSG00000185664; TAA
KVLPDGQVIW

SEQ ID NO: 66503 - protein, 10 aa, Homo sapiens
  misc_feature: Table A; Target 66503; HLA-A*32:01; PMEL; ENSG00000185664; TAA
KVLPDGQVIW

SEQ ID NO: 66504 - protein, 10 aa, Homo sapiens
  misc_feature: Table A; Target 66504; HLA-B*44:02; PMEL; ENSG00000185664; TAA
KVLPDGQVIW

SEQ ID NO: 66505 - protein, 10 aa, Homo sapiens
  misc_feature: Table A; Target 66505; HLA-B*57:01; PMEL; ENSG00000185664; TAA
KVLPDGQVIW

SEQ ID NO: 66506 - protein, 10 aa, Homo sapiens
  misc_feature: Table A; Target 66506; HLA-B*58:01; PMEL; ENSG00000185664; TAA
KVLPDGQVIW

SEQ ID NO: 66507 - protein, 11 aa, Homo sapiens
  misc_feature: Table A; Target 66507; HLA-A*02:01; PMEL; ENSG00000185664; TAA
KVLPDGQVIWV

SEQ ID NO: 66508 - protein, 11 aa, Homo sapiens
  misc_feature: Table A; Target 66508; HLA-A*02:04; PMEL; ENSG00000185664; TAA
KVLPDGQVIWV

SEQ ID NO: 66509 - protein, 11 aa, Homo sapiens
  misc_feature: Table A; Target 66509; HLA-A*02:07; PMEL; ENSG00000185664; TAA
KVLPDGQVIWV

SEQ ID NO: 66510 - protein, 8 aa, Homo sapiens
  misc_feature: Table A; Target 66510; HLA-B*08:01; PMEL; ENSG00000185664; TAA
KVPVSEVM

SEQ ID NO: 66511 - protein, 8 aa, Homo sapiens
  misc_feature: Table A; Target 66511; HLA-C*01:02; PMEL; ENSG00000185664; TAA
KVPVSEVM

SEQ ID NO: 66512 - protein, 9 aa, Homo sapiens
  misc_feature: Table A; Target 66512; HLA-A*02:01; PMEL; ENSG00000185664; TAA
KVSNDGPTL

SEQ ID NO: 66513 - protein, 9 aa, Homo sapiens
  misc_feature: Table A; Target 66513; HLA-A*02:03; PMEL; ENSG00000185664; TAA
KVSNDGPTL

SEQ ID NO: 66514 - protein, 9 aa, Homo sapiens
  misc_feature: Table A; Target 66514; HLA-A*02:04; PMEL; ENSG00000185664; TAA
KVSNDGPTL

SEQ ID NO: 66515 - protein, 9 aa, Homo sapiens
  misc_feature: Table A; Target 66515; HLA-A*02:07; PMEL; ENSG00000185664; TAA
KVSNDGPTL

SEQ ID NO: 66516 - protein, 9 aa, Homo sapiens
  misc_feature: Table A; Target 66516; HLA-A*23:01; PMEL; ENSG00000185664; TAA
KVSNDGPTL

SEQ ID NO: 66517 - protein, 9 aa, Homo sapiens
  misc_feature: Table A; Target 66517; HLA-A*24:02; PMEL; ENSG00000185664; TAA
KVSNDGPTL

SEQ ID NO: 66518 - protein, 9 aa, Homo sapiens
  misc_feature: Table A; Target 66518; HLA-A*25:01; PMEL; ENSG00000185664; TAA
KVSNDGPTL

SEQ ID NO: 66519 - protein, 9 aa, Homo sapiens
  misc_feature: Table A; Target 66519; HLA-A*30:01; PMEL; ENSG00000185664; TAA
KVSNDGPTL

SEQ ID NO: 66520 - protein, 9 aa, Homo sapiens
  misc_feature: Table A; Target 66520; HLA-A*32:01; PMEL; ENSG00000185664; TAA
KVSNDGPTL

SEQ ID NO: 66521 - protein, 9 aa, Homo sapiens
  misc_feature: Table A; Target 66521; HLA-B*07:02; PMEL; ENSG00000185664; TAA
KVSNDGPTL

SEQ ID NO: 66522 - protein, 9 aa, Homo sapiens
  misc_feature: Table A; Target 66522; HLA-B*13:02; PMEL; ENSG00000185664; TAA
KVSNDGPTL

SEQ ID NO: 66523 - protein, 9 aa, Homo sapiens
  misc_feature: Table A; Target 66523; HLA-B*15:01; PMEL; ENSG00000185664; TAA
KVSNDGPTL

SEQ ID NO: 66524 - protein, 9 aa, Homo sapiens
  misc_feature: Table A; Target 66524; HLA-B*15:03; PMEL; ENSG00000185664; TAA
KVSNDGPTL

SEQ ID NO: 66525 - protein, 9 aa, Homo sapiens
  misc_feature: Table A; Target 66525; HLA-B*27:05; PMEL; ENSG00000185664; TAA
KVSNDGPTL

SEQ ID NO: 66526 - protein, 9 aa, Homo sapiens
  misc_feature: Table A; Target 66526; HLA-B*35:03; PMEL; ENSG00000185664; TAA
KVSNDGPTL

SEQ ID NO: 66527 - protein, 9 aa, Homo sapiens
  misc_feature: Table A; Target 66527; HLA-B*37:01; PMEL; ENSG00000185664; TAA
KVSNDGPTL

SEQ ID NO: 66528 - protein, 9 aa, Homo sapiens
  misc_feature: Table A; Target 66528; HLA-B*38:01; PMEL; ENSG00000185664; TAA
KVSNDGPTL

SEQ ID NO: 66529 - protein, 9 aa, Homo sapiens
  misc_feature: Table A; Target 66529; HLA-B*39:01; PMEL; ENSG00000185664; TAA
KVSNDGPTL

SEQ ID NO: 66530 - protein, 9 aa, Homo sapiens
  misc_feature: Table A; Target 66530; HLA-B*40:01; PMEL; ENSG00000185664; TAA
KVSNDGPTL

SEQ ID NO: 66531 - protein, 9 aa, Homo sapiens
  misc_feature: Table A; Target 66531; HLA-B*40:02; PMEL; ENSG00000185664; TAA
KVSNDGPTL

SEQ ID NO: 66532 - protein, 9 aa, Homo sapiens
  misc_feature: Table A; Target 66532; HLA-B*55:01; PMEL; ENSG00000185664; TAA
KVSNDGPTL

SEQ ID NO: 66533 - protein, 9 aa, Homo sapiens
  misc_feature: Table A; Target 66533; HLA-B*58:01; PMEL; ENSG00000185664; TAA
KVSNDGPTL

SEQ ID NO: 66534 - protein, 9 aa, Homo sapiens
  misc_feature: Table A; Target 66534; HLA-C*01:02; PMEL; ENSG00000185664; TAA
KVSNDGPTL

SEQ ID NO: 66535 - protein, 9 aa, Homo sapiens
  misc_feature: Table A; Target 66535; HLA-C*02:02; PMEL; ENSG00000185664; TAA
KVSNDGPTL

SEQ ID NO: 66536 - protein, 9 aa, Homo sapiens
  misc_feature: Table A; Target 66536; HLA-C*03:03; PMEL; ENSG00000185664; TAA
KVSNDGPTL

SEQ ID NO: 66537 - protein, 9 aa, Homo sapiens
  misc_feature: Table A; Target 66537; HLA-C*03:04; PMEL; ENSG00000185664; TAA
KVSNDGPTL

SEQ ID NO: 66538 - protein, 9 aa, Homo sapiens
  misc_feature: Table A; Target 66538; HLA-C*05:01; PMEL; ENSG00000185664; TAA
KVSNDGPTL

SEQ ID NO: 66539 - protein, 9 aa, Homo sapiens
  misc_feature: Table A; Target 66539; HLA-C*06:02; PMEL; ENSG00000185664; TAA
KVSNDGPTL

SEQ ID NO: 66540 - protein, 9 aa, Homo sapiens
  misc_feature: Table A; Target 66540; HLA-C*07:02; PMEL; ENSG00000185664; TAA
KVSNDGPTL

SEQ ID NO: 66541 - protein, 9 aa, Homo sapiens
  misc_feature: Table A; Target 66541; HLA-C*07:04; PMEL; ENSG00000185664; TAA
KVSNDGPTL

SEQ ID NO: 66542 - protein, 9 aa, Homo sapiens
  misc_feature: Table A; Target 66542; HLA-C*12:03; PMEL; ENSG00000185664; TAA
KVSNDGPTL

SEQ ID NO: 66543 - protein, 9 aa, Homo sapiens
  misc_feature: Table A; Target 66543; HLA-C*14:02; PMEL; ENSG00000185664; TAA
KVSNDGPTL

SEQ ID NO: 66544 - protein, 9 aa, Homo sapiens
  misc_feature: Table A; Target 66544; HLA-C*16:01; PMEL; ENSG00000185664; TAA
KVSNDGPTL

SEQ ID NO: 66545 - protein, 9 aa, Homo sapiens
  misc_feature: Table A; Target 66545; HLA-C*16:02; PMEL; ENSG00000185664; TAA
KVSNDGPTL

SEQ ID NO: 66546 - protein, 9 aa, Homo sapiens
  misc_feature: Table A; Target 66546; HLA-C*16:04; PMEL; ENSG00000185664; TAA
KVSNDGPTL

SEQ ID NO: 66547 - protein, 10 aa, Homo sapiens
  misc_feature: Table A; Target 66547; HLA-B*58:01; PMEL; ENSG00000185664; TAA
KVSNDGPTLI

SEQ ID NO: 66548 - protein, 8 aa, Homo sapiens
  misc_feature: Table A; Target 66548; HLA-C*05:01; PMEL; ENSG00000185664; TAA
LADTNSLA

SEQ ID NO: 66549 - protein, 9 aa, Homo sapiens
  misc_feature: Table A; Target 66549; HLA-A*01:01; PMEL; ENSG00000185664; TAA
LADTNSLAV

SEQ ID NO: 66550 - protein, 9 aa, Homo sapiens
  misc_feature: Table A; Target 66550; HLA-A*02:01; PMEL; ENSG00000185664; TAA
LADTNSLAV

SEQ ID NO: 66551 - protein, 9 aa, Homo sapiens
  misc_feature: Table A; Target 66551; HLA-A*02:07; PMEL; ENSG00000185664; TAA
LADTNSLAV

SEQ ID NO: 66552 - protein, 9 aa, Homo sapiens
  misc_feature: Table A; Target 66552; HLA-B*13:02; PMEL; ENSG00000185664; TAA
LADTNSLAV

SEQ ID NO: 66553 - protein, 9 aa, Homo sapiens
  misc_feature: Table A; Target 66553; HLA-B*27:05; PMEL; ENSG00000185664; TAA
LADTNSLAV

SEQ ID NO: 66554 - protein, 9 aa, Homo sapiens
  misc_feature: Table A; Target 66554; HLA-B*35:03; PMEL; ENSG00000185664; TAA
LADTNSLAV

SEQ ID NO: 66555 - protein, 9 aa, Homo sapiens
  misc_feature: Table A; Target 66555; HLA-B*38:01; PMEL; ENSG00000185664; TAA
LADTNSLAV

SEQ ID NO: 66556 - protein, 9 aa, Homo sapiens
  misc_feature: Table A; Target 66556; HLA-B*39:01; PMEL; ENSG00000185664; TAA
LADTNSLAV

SEQ ID NO: 66557 - protein, 9 aa, Homo sapiens
  misc_feature: Table A; Target 66557; HLA-B*51:01; PMEL; ENSG00000185664; TAA
LADTNSLAV

SEQ ID NO: 66558 - protein, 9 aa, Homo sapiens
  misc_feature: Table A; Target 66558; HLA-B*54:01; PMEL; ENSG00000185664; TAA
LADTNSLAV

SEQ ID NO: 66559 - protein, 9 aa, Homo sapiens
  misc_feature: Table A; Target 66559; HLA-B*55:01; PMEL; ENSG00000185664; TAA
LADTNSLAV

SEQ ID NO: 66560 - protein, 9 aa, Homo sapiens
  misc_feature: Table A; Target 66560; HLA-C*02:02; PMEL; ENSG00000185664; TAA
LADTNSLAV

SEQ ID NO: 66561 - protein, 9 aa, Homo sapiens
  misc_feature: Table A; Target 66561; HLA-C*03:03; PMEL; ENSG00000185664; TAA
LADTNSLAV

SEQ ID NO: 66562 - protein, 9 aa, Homo sapiens
  misc_feature: Table A; Target 66562; HLA-C*03:04; PMEL; ENSG00000185664; TAA
LADTNSLAV

SEQ ID NO: 66563 - protein, 9 aa, Homo sapiens
  misc_feature: Table A; Target 66563; HLA-C*05:01; PMEL; ENSG00000185664; TAA
LADTNSLAV

SEQ ID NO: 66564 - protein, 9 aa, Homo sapiens
  misc_feature: Table A; Target 66564; HLA-C*12:03; PMEL; ENSG00000185664; TAA
LADTNSLAV

SEQ ID NO: 66565 - protein, 9 aa, Homo sapiens
  misc_feature: Table A; Target 66565; HLA-C*16:02; PMEL; ENSG00000185664; TAA
LADTNSLAV

SEQ ID NO: 66566 - protein, 9 aa, Homo sapiens
  misc_feature: Table A; Target 66566; HLA-C*16:04; PMEL; ENSG00000185664; TAA
LADTNSLAV

SEQ ID NO: 66567 - protein, 10 aa, Homo sapiens
  misc_feature: Table A; Target 66567; HLA-A*01:01; PMEL; ENSG00000185664; TAA
LADTNSLAVV

SEQ ID NO: 66568 - protein, 10 aa, Homo sapiens
  misc_feature: Table A; Target 66568; HLA-C*05:01; PMEL; ENSG00000185664; TAA
LADTNSLAVV

SEQ ID NO: 66569 - protein, 8 aa, Homo sapiens
  misc_feature: Table A; Target 66569; HLA-A*01:01; PMEL; ENSG00000185664; TAA
LAEADLSY

SEQ ID NO: 66570 - protein, 10 aa, Homo sapiens
  misc_feature: Table A; Target 66570; HLA-B*27:02; PMEL; ENSG00000185664; TAA
LAEADLSYTW

SEQ ID NO: 66571 - protein, 10 aa, Homo sapiens
  misc_feature: Table A; Target 66571; HLA-B*57:01; PMEL; ENSG00000185664; TAA
LAEADLSYTW

SEQ ID NO: 66572 - protein, 9 aa, Homo sapiens
  misc_feature: Table A; Target 66572; HLA-B*54:01; PMEL; ENSG00000185664; TAA
LAEMSTPEA

SEQ ID NO: 66573 - protein, 9 aa, Homo sapiens
  misc_feature: Table A; Target 66573; HLA-C*03:03; PMEL; ENSG00000185664; TAA
LAEMSTPEA

SEQ ID NO: 66574 - protein, 9 aa, Homo sapiens
  misc_feature: Table A; Target 66574; HLA-C*03:04; PMEL; ENSG00000185664; TAA
LAEMSTPEA

SEQ ID NO: 66575 - protein, 8 aa, Homo sapiens
  misc_feature: Table A; Target 66575; HLA-A*32:01; PMEL; ENSG00000185664; TAA
LAHSSSAF

SEQ ID NO: 66576 - protein, 8 aa, Homo sapiens
  misc_feature: Table A; Target 66576; HLA-B*08:01; PMEL; ENSG00000185664; TAA
LAHSSSAF

SEQ ID NO: 66577 - protein, 8 aa, Homo sapiens
  misc_feature: Table A; Target 66577; HLA-B*15:01; PMEL; ENSG00000185664; TAA
LAHSSSAF

SEQ ID NO: 66578 - protein, 8 aa, Homo sapiens
  misc_feature: Table A; Target 66578; HLA-B*15:03; PMEL; ENSG00000185664; TAA
LAHSSSAF

SEQ ID NO: 66579 - protein, 8 aa, Homo sapiens
  misc_feature: Table A; Target 66579; HLA-B*35:01; PMEL; ENSG00000185664; TAA
LAHSSSAF

SEQ ID NO: 66580 - protein, 8 aa, Homo sapiens
  misc_feature: Table A; Target 66580; HLA-B*37:01; PMEL; ENSG00000185664; TAA
LAHSSSAF

SEQ ID NO: 66581 - protein, 8 aa, Homo sapiens
  misc_feature: Table A; Target 66581; HLA-B*39:01; PMEL; ENSG00000185664; TAA
LAHSSSAF

SEQ ID NO: 66582 - protein, 8 aa, Homo sapiens
  misc_feature: Table A; Target 66582; HLA-B*46:01; PMEL; ENSG00000185664; TAA
LAHSSSAF

SEQ ID NO: 66583 - protein, 8 aa, Homo sapiens
  misc_feature: Table A; Target 66583; HLA-B*58:01; PMEL; ENSG00000185664; TAA
LAHSSSAF

SEQ ID NO: 66584 - protein, 8 aa, Homo sapiens
  misc_feature: Table A; Target 66584; HLA-C*01:02; PMEL; ENSG00000185664; TAA
LAHSSSAF

SEQ ID NO: 66585 - protein, 8 aa, Homo sapiens
  misc_feature: Table A; Target 66585; HLA-C*02:02; PMEL; ENSG00000185664; TAA
LAHSSSAF

SEQ ID NO: 66586 - protein, 8 aa, Homo sapiens
  misc_feature: Table A; Target 66586; HLA-C*03:03; PMEL; ENSG00000185664; TAA
LAHSSSAF

SEQ ID NO: 66587 - protein, 8 aa, Homo sapiens
  misc_feature: Table A; Target 66587; HLA-C*03:04; PMEL; ENSG00000185664; TAA
LAHSSSAF

SEQ ID NO: 66588 - protein, 8 aa, Homo sapiens
  misc_feature: Table A; Target 66588; HLA-C*04:01; PMEL; ENSG00000185664; TAA
LAHSSSAF

SEQ ID NO: 66589 - protein, 8 aa, Homo sapiens
  misc_feature: Table A; Target 66589; HLA-C*05:01; PMEL; ENSG00000185664; TAA
LAHSSSAF

SEQ ID NO: 66590 - protein, 8 aa, Homo sapiens
  misc_feature: Table A; Target 66590; HLA-C*07:01; PMEL; ENSG00000185664; TAA
LAHSSSAF

SEQ ID NO: 66591 - protein, 8 aa, Homo sapiens
  misc_feature: Table A; Target 66591; HLA-C*07:02; PMEL; ENSG00000185664; TAA
LAHSSSAF

SEQ ID NO: 66592 - protein, 8 aa, Homo sapiens
  misc_feature: Table A; Target 66592; HLA-C*12:03; PMEL; ENSG00000185664; TAA
LAHSSSAF

SEQ ID NO: 66593 - protein, 8 aa, Homo sapiens
  misc_feature: Table A; Target 66593; HLA-C*14:02; PMEL; ENSG00000185664; TAA
LAHSSSAF

SEQ ID NO: 66594 - protein, 8 aa, Homo sapiens
  misc_feature: Table A; Target 66594; HLA-C*16:01; PMEL; ENSG00000185664; TAA
LAHSSSAF

SEQ ID NO: 66595 - protein, 8 aa, Homo sapiens
  misc_feature: Table A; Target 66595; HLA-C*16:02; PMEL; ENSG00000185664; TAA
LAHSSSAF

SEQ ID NO: 66596 - protein, 8 aa, Homo sapiens
  misc_feature: Table A; Target 66596; HLA-C*16:04; PMEL; ENSG00000185664; TAA
LAHSSSAF

SEQ ID NO: 66597 - protein, 8 aa, Homo sapiens
  misc_feature: Table A; Target 66597; HLA-B*51:01; PMEL; ENSG00000185664; TAA
LAVGATKV

SEQ ID NO: 66598 - protein, 8 aa, Homo sapiens
  misc_feature: Table A; Target 66598; HLA-C*02:02; PMEL; ENSG00000185664; TAA
LAVGATKV

SEQ ID NO: 66599 - protein, 8 aa, Homo sapiens
  misc_feature: Table A; Target 66599; HLA-C*12:03; PMEL; ENSG00000185664; TAA
LAVGATKV

SEQ ID NO: 66600 - protein, 8 aa, Homo sapiens
  misc_feature: Table A; Target 66600; HLA-C*16:02; PMEL; ENSG00000185664; TAA
LAVGATKV

SEQ ID NO: 66601 - protein, 9 aa, Homo sapiens
  misc_feature: Table A; Target 66601; HLA-C*06:02; PMEL; ENSG00000185664; TAA
LAVGATKVP

SEQ ID NO: 66602 - protein, 9 aa, Homo sapiens
  misc_feature: Table A; Target 66602; HLA-C*07:01; PMEL; ENSG00000185664; TAA
LAVGATKVP

SEQ ID NO: 66603 - protein, 9 aa, Homo sapiens
  misc_feature: Table A; Target 66603; HLA-C*12:03; PMEL; ENSG00000185664; TAA
LAVGATKVP

SEQ ID NO: 66604 - protein, 9 aa, Homo sapiens
  misc_feature: Table A; Target 66604; HLA-C*16:02; PMEL; ENSG00000185664; TAA
LAVGATKVP

SEQ ID NO: 66605 - protein, 10 aa, Homo sapiens
  misc_feature: Table A; Target 66605; HLA-A*31:01; PMEL; ENSG00000185664; TAA
LAVGATKVPR

SEQ ID NO: 66606 - protein, 10 aa, Homo sapiens
  misc_feature: Table A; Target 66606; HLA-A*33:01; PMEL; ENSG00000185664; TAA
LAVGATKVPR

SEQ ID NO: 66607 - protein, 10 aa, Homo sapiens
  misc_feature: Table A; Target 66607; HLA-A*33:03; PMEL; ENSG00000185664; TAA
LAVGATKVPR

SEQ ID NO: 66608 - protein, 10 aa, Homo sapiens
  misc_feature: Table A; Target 66608; HLA-A*68:01; PMEL; ENSG00000185664; TAA
LAVGATKVPR

SEQ ID NO: 66609 - protein, 10 aa, Homo sapiens
  misc_feature: Table A; Target 66609; HLA-C*07:06; PMEL; ENSG00000185664; TAA
LAVGATKVPR

SEQ ID NO: 66610 - protein, 8 aa, Homo sapiens
  misc_feature: Table A; Target 66610; HLA-B*08:01; PMEL; ENSG00000185664; TAA
LAVIGALL

SEQ ID NO: 66611 - protein, 8 aa, Homo sapiens
  misc_feature: Table A; Target 66611; HLA-B*35:03; PMEL; ENSG00000185664; TAA
LAVIGALL

SEQ ID NO: 66612 - protein, 8 aa, Homo sapiens
  misc_feature: Table A; Target 66612; HLA-B*38:01; PMEL; ENSG00000185664; TAA
LAVIGALL

SEQ ID NO: 66613 - protein, 8 aa, Homo sapiens
  misc_feature: Table A; Target 66613; HLA-B*40:01; PMEL; ENSG00000185664; TAA
LAVIGALL

SEQ ID NO: 66614 - protein, 8 aa, Homo sapiens
  misc_feature: Table A; Target 66614; HLA-B*46:01; PMEL; ENSG00000185664; TAA
LAVIGALL

SEQ ID NO: 66615 - protein, 8 aa, Homo sapiens
  misc_feature: Table A; Target 66615; HLA-B*51:01; PMEL; ENSG00000185664; TAA
LAVIGALL

SEQ ID NO: 66616 - protein, 8 aa, Homo sapiens
  misc_feature: Table A; Target 66616; HLA-B*58:01; PMEL; ENSG00000185664; TAA
LAVIGALL

SEQ ID NO: 66617 - protein, 8 aa, Homo sapiens
  misc_feature: Table A; Target 66617; HLA-C*01:02; PMEL; ENSG00000185664; TAA
LAVIGALL

SEQ ID NO: 66618 - protein, 8 aa, Homo sapiens
  misc_feature: Table A; Target 66618; HLA-C*02:02; PMEL; ENSG00000185664; TAA
LAVIGALL

SEQ ID NO: 66619 - protein, 8 aa, Homo sapiens
  misc_feature: Table A; Target 66619; HLA-C*03:03; PMEL; ENSG00000185664; TAA
LAVIGALL

SEQ ID NO: 66620 - protein, 8 aa, Homo sapiens
  misc_feature: Table A; Target 66620; HLA-C*03:04; PMEL; ENSG00000185664; TAA
LAVIGALL

SEQ ID NO: 66621 - protein, 8 aa, Homo sapiens
  misc_feature: Table A; Target 66621; HLA-C*04:01; PMEL; ENSG00000185664; TAA
LAVIGALL

SEQ ID NO: 66622 - protein, 8 aa, Homo sapiens
  misc_feature: Table A; Target 66622; HLA-C*05:01; PMEL; ENSG00000185664; TAA
LAVIGALL

SEQ ID NO: 66623 - protein, 8 aa, Homo sapiens
  misc_feature: Table A; Target 66623; HLA-C*07:01; PMEL; ENSG00000185664; TAA
LAVIGALL

SEQ ID NO: 66624 - protein, 8 aa, Homo sapiens
  misc_feature: Table A; Target 66624; HLA-C*12:03; PMEL; ENSG00000185664; TAA
LAVIGALL

SEQ ID NO: 66625 - protein, 9 aa, Homo sapiens
  misc_feature: Table A; Target 66625; HLA-B*54:01; PMEL; ENSG00000185664; TAA
LAVIGALLA

SEQ ID NO: 66626 - protein, 9 aa, Homo sapiens
  misc_feature: Table A; Target 66626; HLA-B*56:01; PMEL; ENSG00000185664; TAA
LAVIGALLA

SEQ ID NO: 66627 - protein, 10 aa, Homo sapiens
  misc_feature: Table A; Target 66627; HLA-B*54:01; PMEL; ENSG00000185664; TAA
LAVIGALLAV

SEQ ID NO: 66628 - protein, 8 aa, Homo sapiens
  misc_feature: Table A; Target 66628; HLA-A*30:01; PMEL; ENSG00000185664; TAA
LAVVSTQL

SEQ ID NO: 66629 - protein, 8 aa, Homo sapiens
  misc_feature: Table A; Target 66629; HLA-B*08:01; PMEL; ENSG00000185664; TAA
LAVVSTQL

SEQ ID NO: 66630 - protein, 8 aa, Homo sapiens
  misc_feature: Table A; Target 66630; HLA-B*15:01; PMEL; ENSG00000185664; TAA
LAVVSTQL

SEQ ID NO: 66631 - protein, 8 aa, Homo sapiens
  misc_feature: Table A; Target 66631; HLA-B*15:03; PMEL; ENSG00000185664; TAA
LAVVSTQL

SEQ ID NO: 66632 - protein, 8 aa, Homo sapiens
  misc_feature: Table A; Target 66632; HLA-B*35:01; PMEL; ENSG00000185664; TAA
LAVVSTQL

SEQ ID NO: 66633 - protein, 8 aa, Homo sapiens
  misc_feature: Table A; Target 66633; HLA-B*35:03; PMEL; ENSG00000185664; TAA
LAVVSTQL

SEQ ID NO: 66634 - protein, 8 aa, Homo sapiens
  misc_feature: Table A; Target 66634; HLA-B*46:01; PMEL; ENSG00000185664; TAA
LAVVSTQL

SEQ ID NO: 66635 - protein, 8 aa, Homo sapiens
  misc_feature: Table A; Target 66635; HLA-B*51:01; PMEL; ENSG00000185664; TAA
LAVVSTQL

SEQ ID NO: 66636 - protein, 8 aa, Homo sapiens
  misc_feature: Table A; Target 66636; HLA-B*58:01; PMEL; ENSG00000185664; TAA
LAVVSTQL

SEQ ID NO: 66637 - protein, 8 aa, Homo sapiens
  misc_feature: Table A; Target 66637; HLA-C*01:02; PMEL; ENSG00000185664; TAA
LAVVSTQL

SEQ ID NO: 66638 - protein, 8 aa, Homo sapiens
  misc_feature: Table A; Target 66638; HLA-C*02:02; PMEL; ENSG00000185664; TAA
LAVVSTQL

SEQ ID NO: 66639 - protein, 8 aa, Homo sapiens
  misc_feature: Table A; Target 66639; HLA-C*03:03; PMEL; ENSG00000185664; TAA
LAVVSTQL

SEQ ID NO: 66640 - protein, 8 aa, Homo sapiens
  misc_feature: Table A; Target 66640; HLA-C*03:04; PMEL; ENSG00000185664; TAA
LAVVSTQL

SEQ ID NO: 66641 - protein, 8 aa, Homo sapiens
  misc_feature: Table A; Target 66641; HLA-C*05:01; PMEL; ENSG00000185664; TAA
LAVVSTQL

SEQ ID NO: 66642 - protein, 8 aa, Homo sapiens
  misc_feature: Table A; Target 66642; HLA-C*14:02; PMEL; ENSG00000185664; TAA
LAVVSTQL

SEQ ID NO: 66643 - protein, 8 aa, Homo sapiens
  misc_feature: Table A; Target 66643; HLA-C*16:01; PMEL; ENSG00000185664; TAA
LAVVSTQL

SEQ ID NO: 66644 - protein, 8 aa, Homo sapiens
  misc_feature: Table A; Target 66644; HLA-C*16:04; PMEL; ENSG00000185664; TAA
LAVVSTQL

SEQ ID NO: 66645 - protein, 9 aa, Homo sapiens
  misc_feature: Table A; Target 66645; HLA-A*23:01; PMEL; ENSG00000185664; TAA
LAVVSTQLI

SEQ ID NO: 66646 - protein, 9 aa, Homo sapiens
  misc_feature: Table A; Target 66646; HLA-A*24:02; PMEL; ENSG00000185664; TAA
LAVVSTQLI

SEQ ID NO: 66647 - protein, 9 aa, Homo sapiens
  misc_feature: Table A; Target 66647; HLA-B*49:01; PMEL; ENSG00000185664; TAA
LAVVSTQLI

SEQ ID NO: 66648 - protein, 9 aa, Homo sapiens
  misc_feature: Table A; Target 66648; HLA-B*51:01; PMEL; ENSG00000185664; TAA
LAVVSTQLI

SEQ ID NO: 66649 - protein, 9 aa, Homo sapiens
  misc_feature: Table A; Target 66649; HLA-B*58:01; PMEL; ENSG00000185664; TAA
LAVVSTQLI

SEQ ID NO: 66650 - protein, 9 aa, Homo sapiens
  misc_feature: Table A; Target 66650; HLA-C*02:02; PMEL; ENSG00000185664; TAA
LAVVSTQLI

SEQ ID NO: 66651 - protein, 9 aa, Homo sapiens
  misc_feature: Table A; Target 66651; HLA-C*03:04; PMEL; ENSG00000185664; TAA
LAVVSTQLI

SEQ ID NO: 66652 - protein, 9 aa, Homo sapiens
  misc_feature: Table A; Target 66652; HLA-C*12:03; PMEL; ENSG00000185664; TAA
LAVVSTQLI

SEQ ID NO: 66653 - protein, 8 aa, Homo sapiens
  misc_feature: Table A; Target 66653; HLA-C*07:01; PMEL; ENSG00000185664; TAA
LDGGNKHF

SEQ ID NO: 66654 - protein, 8 aa, Homo sapiens
  misc_feature: Table A; Target 66654; HLA-C*12:03; PMEL; ENSG00000185664; TAA
LDGGNKHF

SEQ ID NO: 66655 - protein, 9 aa, Homo sapiens
  misc_feature: Table A; Target 66655; HLA-C*07:01; PMEL; ENSG00000185664; TAA
LDGGNKHFL

SEQ ID NO: 66656 - protein, 8 aa, Homo sapiens
  misc_feature: Table A; Target 66656; HLA-B*27:02; PMEL; ENSG00000185664; TAA
LDGTATLR

SEQ ID NO: 66657 - protein, 8 aa, Homo sapiens
  misc_feature: Table A; Target 66657; HLA-B*39:01; PMEL; ENSG00000185664; TAA
LEPGPVTA

SEQ ID NO: 66658 - protein, 9 aa, Homo sapiens
  misc_feature: Table A; Target 66658; HLA-B*07:02; PMEL; ENSG00000185664; TAA
LEPGPVTAQ

SEQ ID NO: 66659 - protein, 9 aa, Homo sapiens
  misc_feature: Table A; Target 66659; HLA-B*27:05; PMEL; ENSG00000185664; TAA
LEPGPVTAQ

SEQ ID NO: 66660 - protein, 9 aa, Homo sapiens
  misc_feature: Table A; Target 66660; HLA-B*37:01; PMEL; ENSG00000185664; TAA
LEPGPVTAQ

SEQ ID NO: 66661 - protein, 9 aa, Homo sapiens
  misc_feature: Table A; Target 66661; HLA-B*40:02; PMEL; ENSG00000185664; TAA
LEPGPVTAQ

SEQ ID NO: 66662 - protein, 9 aa, Homo sapiens
  misc_feature: Table A; Target 66662; HLA-C*04:01; PMEL; ENSG00000185664; TAA
LEPGPVTAQ

SEQ ID NO: 66663 - protein, 9 aa, Homo sapiens
  misc_feature: Table A; Target 66663; HLA-C*06:02; PMEL; ENSG00000185664; TAA
LEPGPVTAQ

SEQ ID NO: 66664 - protein, 9 aa, Homo sapiens
  misc_feature: Table A; Target 66664; HLA-C*07:01; PMEL; ENSG00000185664; TAA
LEPGPVTAQ

SEQ ID NO: 66665 - protein, 9 aa, Homo sapiens
  misc_feature: Table A; Target 66665; HLA-C*07:02; PMEL; ENSG00000185664; TAA
LEPGPVTAQ

SEQ ID NO: 66666 - protein, 9 aa, Homo sapiens
  misc_feature: Table A; Target 66666; HLA-C*12:03; PMEL; ENSG00000185664; TAA
LEPGPVTAQ

SEQ ID NO: 66667 - protein, 10 aa, Homo sapiens
  misc_feature: Table A; Target 66667; HLA-A*02:07; PMEL; ENSG00000185664; TAA
LEPGPVTAQV

SEQ ID NO: 66668 - protein, 10 aa, Homo sapiens
  misc_feature: Table A; Target 66668; HLA-A*30:01; PMEL; ENSG00000185664; TAA
LEPGPVTAQV

SEQ ID NO: 66669 - protein, 10 aa, Homo sapiens
  misc_feature: Table A; Target 66669; HLA-A*68:02; PMEL; ENSG00000185664; TAA
LEPGPVTAQV

SEQ ID NO: 66670 - protein, 10 aa, Homo sapiens
  misc_feature: Table A; Target 66670; HLA-B*40:01; PMEL; ENSG00000185664; TAA
LEPGPVTAQV

SEQ ID NO: 66671 - protein, 10 aa, Homo sapiens
  misc_feature: Table A; Target 66671; HLA-B*40:02; PMEL; ENSG00000185664; TAA
LEPGPVTAQV

SEQ ID NO: 66672 - protein, 10 aa, Homo sapiens
  misc_feature: Table A; Target 66672; HLA-B*49:01; PMEL; ENSG00000185664; TAA
LEPGPVTAQV

SEQ ID NO: 66673 - protein, 10 aa, Homo sapiens
  misc_feature: Table A; Target 66673; HLA-C*04:01; PMEL; ENSG00000185664; TAA
LEPGPVTAQV

SEQ ID NO: 66674 - protein, 10 aa, Homo sapiens
  misc_feature: Table A; Target 66674; HLA-C*07:02; PMEL; ENSG00000185664; TAA
LEPGPVTAQV

SEQ ID NO: 66675 - protein, 11 aa, Homo sapiens
  misc_feature: Table A; Target 66675; HLA-A*30:01; PMEL; ENSG00000185664; TAA
LEPGPVTAQVV

SEQ ID NO: 66676 - protein, 11 aa, Homo sapiens
  misc_feature: Table A; Target 66676; HLA-B*49:01; PMEL; ENSG00000185664; TAA
LEPGPVTAQVV

SEQ ID NO: 66677 - protein, 11 aa, Homo sapiens
  misc_feature: Table A; Target 66677; HLA-C*04:01; PMEL; ENSG00000185664; TAA
LEPGPVTAQVV

SEQ ID NO: 66678 - protein, 11 aa, Homo sapiens
  misc_feature: Table A; Target 66678; HLA-C*07:02; PMEL; ENSG00000185664; TAA
LEPGPVTAQVV

SEQ ID NO: 66679 - protein, 8 aa, Homo sapiens
  misc_feature: Table A; Target 66679; HLA-A*02:03; PMEL; ENSG00000185664; TAA
LGGPVSGL

SEQ ID NO: 66680 - protein, 8 aa, Homo sapiens
  misc_feature: Table A; Target 66680; HLA-A*32:01; PMEL; ENSG00000185664; TAA
LGGPVSGL

SEQ ID NO: 66681 - protein, 8 aa, Homo sapiens
  misc_feature: Table A; Target 66681; HLA-B*07:02; PMEL; ENSG00000185664; TAA
LGGPVSGL

SEQ ID NO: 66682 - protein, 8 aa, Homo sapiens
  misc_feature: Table A; Target 66682; HLA-B*08:01; PMEL; ENSG00000185664; TAA
LGGPVSGL

SEQ ID NO: 66683 - protein, 8 aa, Homo sapiens
  misc_feature: Table A; Target 66683; HLA-B*15:01; PMEL; ENSG00000185664; TAA
LGGPVSGL

SEQ ID NO: 66684 - protein, 8 aa, Homo sapiens
  misc_feature: Table A; Target 66684; HLA-B*27:05; PMEL; ENSG00000185664; TAA
LGGPVSGL

SEQ ID NO: 66685 - protein, 8 aa, Homo sapiens
  misc_feature: Table A; Target 66685; HLA-B*40:02; PMEL; ENSG00000185664; TAA
LGGPVSGL

SEQ ID NO: 66686 - protein, 8 aa, Homo sapiens
  misc_feature: Table A; Target 66686; HLA-B*46:01; PMEL; ENSG00000185664; TAA
LGGPVSGL

SEQ ID NO: 66687 - protein, 8 aa, Homo sapiens
  misc_feature: Table A; Target 66687; HLA-B*51:01; PMEL; ENSG00000185664; TAA
LGGPVSGL

SEQ ID NO: 66688 - protein, 8 aa, Homo sapiens
  misc_feature: Table A; Target 66688; HLA-B*58:01; PMEL; ENSG00000185664; TAA
LGGPVSGL

SEQ ID NO: 66689 - protein, 8 aa, Homo sapiens
  misc_feature: Table A; Target 66689; HLA-C*01:02; PMEL; ENSG00000185664; TAA
LGGPVSGL

SEQ ID NO: 66690 - protein, 8 aa, Homo sapiens
  misc_feature: Table A; Target 66690; HLA-C*03:03; PMEL; ENSG00000185664; TAA
LGGPVSGL

SEQ ID NO: 66691 - protein, 8 aa, Homo sapiens
  misc_feature: Table A; Target 66691; HLA-C*03:04; PMEL; ENSG00000185664; TAA
LGGPVSGL

SEQ ID NO: 66692 - protein, 8 aa, Homo sapiens
  misc_feature: Table A; Target 66692; HLA-C*04:01; PMEL; ENSG00000185664; TAA
LGGPVSGL

SEQ ID NO: 66693 - protein, 8 aa, Homo sapiens
  misc_feature: Table A; Target 66693; HLA-C*05:01; PMEL; ENSG00000185664; TAA
LGGPVSGL

SEQ ID NO: 66694 - protein, 8 aa, Homo sapiens
  misc_feature: Table A; Target 66694; HLA-C*06:02; PMEL; ENSG00000185664; TAA
LGGPVSGL

SEQ ID NO: 66695 - protein, 8 aa, Homo sapiens
  misc_feature: Table A; Target 66695; HLA-C*07:01; PMEL; ENSG00000185664; TAA
LGGPVSGL

SEQ ID NO: 66696 - protein, 8 aa, Homo sapiens
  misc_feature: Table A; Target 66696; HLA-C*07:02; PMEL; ENSG00000185664; TAA
LGGPVSGL

SEQ ID NO: 66697 - protein, 8 aa, Homo sapiens
  misc_feature: Table A; Target 66697; HLA-C*07:04; PMEL; ENSG00000185664; TAA
LGGPVSGL

SEQ ID NO: 66698 - protein, 8 aa, Homo sapiens
  misc_feature: Table A; Target 66698; HLA-C*12:03; PMEL; ENSG00000185664; TAA
LGGPVSGL

SEQ ID NO: 66699 - protein, 8 aa, Homo sapiens
  misc_feature: Table A; Target 66699; HLA-C*14:02; PMEL; ENSG00000185664; TAA
LGGPVSGL

SEQ ID NO: 66700 - protein, 8 aa, Homo sapiens
  misc_feature: Table A; Target 66700; HLA-C*16:02; PMEL; ENSG00000185664; TAA
LGGPVSGL

SEQ ID NO: 66701 - protein, 10 aa, Homo sapiens
  misc_feature: Table A; Target 66701; HLA-B*13:02; PMEL; ENSG00000185664; TAA
LGGPVSGLSI

SEQ ID NO: 66702 - protein, 10 aa, Homo sapiens
  misc_feature: Table A; Target 66702; HLA-B*40:02; PMEL; ENSG00000185664; TAA
LGGPVSGLSI

SEQ ID NO: 66703 - protein, 10 aa, Homo sapiens
  misc_feature: Table A; Target 66703; HLA-B*51:01; PMEL; ENSG00000185664; TAA
LGGPVSGLSI

SEQ ID NO: 66704 - protein, 10 aa, Homo sapiens
  misc_feature: Table A; Target 66704; HLA-C*03:03; PMEL; ENSG00000185664; TAA
LGGPVSGLSI

SEQ ID NO: 66705 - protein, 10 aa, Homo sapiens
  misc_feature: Table A; Target 66705; HLA-C*03:04; PMEL; ENSG00000185664; TAA
LGGPVSGLSI

SEQ ID NO: 66706 - protein, 10 aa, Homo sapiens
  misc_feature: Table A; Target 66706; HLA-C*04:01; PMEL; ENSG00000185664; TAA
LGGPVSGLSI

SEQ ID NO: 66707 - protein, 10 aa, Homo sapiens
  misc_feature: Table A; Target 66707; HLA-C*06:02; PMEL; ENSG00000185664; TAA
LGGPVSGLSI

SEQ ID NO: 66708 - protein, 10 aa, Homo sapiens
  misc_feature: Table A; Target 66708; HLA-C*07:01; PMEL; ENSG00000185664; TAA
LGGPVSGLSI

SEQ ID NO: 66709 - protein, 10 aa, Homo sapiens
  misc_feature: Table A; Target 66709; HLA-C*07:02; PMEL; ENSG00000185664; TAA
LGGPVSGLSI

SEQ ID NO: 66710 - protein, 11 aa, Homo sapiens
  misc_feature: Table A; Target 66710; HLA-C*01:02; PMEL; ENSG00000185664; TAA
LGPLLDGTATL

SEQ ID NO: 66711 - protein, 11 aa, Homo sapiens
  misc_feature: Table A; Target 66711; HLA-C*04:01; PMEL; ENSG00000185664; TAA
LGPLLDGTATL

SEQ ID NO: 66712 - protein, 11 aa, Homo sapiens
  misc_feature: Table A; Target 66712; HLA-C*07:01; PMEL; ENSG00000185664; TAA
LGPLLDGTATL

SEQ ID NO: 66713 - protein, 11 aa, Homo sapiens
  misc_feature: Table A; Target 66713; HLA-C*07:02; PMEL; ENSG00000185664; TAA
LGPLLDGTATL

SEQ ID NO: 66714 - protein, 8 aa, Homo sapiens
  misc_feature: Table A; Target 66714; HLA-C*12:03; PMEL; ENSG00000185664; TAA
LGQVPLIV

SEQ ID NO: 66715 - protein, 8 aa, Homo sapiens
  misc_feature: Table A; Target 66715; HLA-B*51:01; PMEL; ENSG00000185664; TAA
LGTHTMEV

SEQ ID NO: 66716 - protein, 8 aa, Homo sapiens
  misc_feature: Table A; Target 66716; HLA-C*03:04; PMEL; ENSG00000185664; TAA
LGTHTMEV

SEQ ID NO: 66717 - protein, 8 aa, Homo sapiens
  misc_feature: Table A; Target 66717; HLA-C*06:02; PMEL; ENSG00000185664; TAA
LGTHTMEV

SEQ ID NO: 66718 - protein, 8 aa, Homo sapiens
  misc_feature: Table A; Target 66718; HLA-C*12:03; PMEL; ENSG00000185664; TAA
LGTHTMEV

SEQ ID NO: 66719 - protein, 8 aa, Homo sapiens
  misc_feature: Table A; Target 66719; HLA-C*16:01; PMEL; ENSG00000185664; TAA
LGTHTMEV

SEQ ID NO: 66720 - protein, 8 aa, Homo sapiens
  misc_feature: Table A; Target 66720; HLA-C*16:02; PMEL; ENSG00000185664; TAA
LGTHTMEV

SEQ ID NO: 66721 - protein, 8 aa, Homo sapiens
  misc_feature: Table A; Target 66721; HLA-B*38:01; PMEL; ENSG00000185664; TAA
LHDPSGYL

SEQ ID NO: 66722 - protein, 8 aa, Homo sapiens
  misc_feature: Table A; Target 66722; HLA-B*39:01; PMEL; ENSG00000185664; TAA
LHDPSGYL

SEQ ID NO: 66723 - protein, 8 aa, Homo sapiens
  misc_feature: Table A; Target 66723; HLA-C*04:01; PMEL; ENSG00000185664; TAA
LHDPSGYL

SEQ ID NO: 66724 - protein, 8 aa, Homo sapiens
  misc_feature: Table A; Target 66724; HLA-C*05:01; PMEL; ENSG00000185664; TAA
LHDPSGYL

SEQ ID NO: 66725 - protein, 9 aa, Homo sapiens
  misc_feature: Table A; Target 66725; HLA-B*27:05; PMEL; ENSG00000185664; TAA
LHDPSGYLA

SEQ ID NO: 66726 - protein, 9 aa, Homo sapiens
  misc_feature: Table A; Target 66726; HLA-B*38:01; PMEL; ENSG00000185664; TAA
LHDPSGYLA

SEQ ID NO: 66727 - protein, 9 aa, Homo sapiens
  misc_feature: Table A; Target 66727; HLA-B*39:01; PMEL; ENSG00000185664; TAA
LHDPSGYLA

SEQ ID NO: 66728 - protein, 9 aa, Homo sapiens
  misc_feature: Table A; Target 66728; HLA-B*38:01; PMEL; ENSG00000185664; TAA
LHLAVIGAL

SEQ ID NO: 66729 - protein, 9 aa, Homo sapiens
  misc_feature: Table A; Target 66729; HLA-B*39:01; PMEL; ENSG00000185664; TAA
LHLAVIGAL

SEQ ID NO: 66730 - protein, 10 aa, Homo sapiens
  misc_feature: Table A; Target 66730; HLA-B*38:01; PMEL; ENSG00000185664; TAA
LHLAVIGALL

SEQ ID NO: 66731 - protein, 8 aa, Homo sapiens
  misc_feature: Table A; Target 66731; HLA-B*39:01; PMEL; ENSG00000185664; TAA
LIMPGQEA

SEQ ID NO: 66732 - protein, 8 aa, Homo sapiens
  misc_feature: Table A; Target 66732; HLA-B*46:01; PMEL; ENSG00000185664; TAA
LIMPGQEA

SEQ ID NO: 66733 - protein, 8 aa, Homo sapiens
  misc_feature: Table A; Target 66733; HLA-B*54:01; PMEL; ENSG00000185664; TAA
LIMPGQEA

SEQ ID NO: 66734 - protein, 8 aa, Homo sapiens
  misc_feature: Table A; Target 66734; HLA-C*03:03; PMEL; ENSG00000185664; TAA
LIMPGQEA

SEQ ID NO: 66735 - protein, 8 aa, Homo sapiens
  misc_feature: Table A; Target 66735; HLA-C*03:04; PMEL; ENSG00000185664; TAA
LIMPGQEA

SEQ ID NO: 66736 - protein, 8 aa, Homo sapiens
  misc_feature: Table A; Target 66736; HLA-C*14:02; PMEL; ENSG00000185664; TAA
LIMPGQEA

SEQ ID NO: 66737 - protein, 10 aa, Homo sapiens
  misc_feature: Table A; Target 66737; HLA-A*02:01; PMEL; ENSG00000185664; TAA
LIMPGQEAGL

SEQ ID NO: 66738 - protein, 10 aa, Homo sapiens
  misc_feature: Table A; Target 66738; HLA-A*02:03; PMEL; ENSG00000185664; TAA
LIMPGQEAGL

SEQ ID NO: 66739 - protein, 10 aa, Homo sapiens
  misc_feature: Table A; Target 66739; HLA-A*02:04; PMEL; ENSG00000185664; TAA
LIMPGQEAGL

SEQ ID NO: 66740 - protein, 10 aa, Homo sapiens
  misc_feature: Table A; Target 66740; HLA-A*02:07; PMEL; ENSG00000185664; TAA
LIMPGQEAGL

SEQ ID NO: 66741 - protein, 10 aa, Homo sapiens
  misc_feature: Table A; Target 66741; HLA-A*32:01; PMEL; ENSG00000185664; TAA
LIMPGQEAGL

SEQ ID NO: 66742 - protein, 10 aa, Homo sapiens
  misc_feature: Table A; Target 66742; HLA-B*15:01; PMEL; ENSG00000185664; TAA
LIMPGQEAGL

SEQ ID NO: 66743 - protein, 10 aa, Homo sapiens
  misc_feature: Table A; Target 66743; HLA-B*27:05; PMEL; ENSG00000185664; TAA
LIMPGQEAGL

SEQ ID NO: 66744 - protein, 10 aa, Homo sapiens
  misc_feature: Table A; Target 66744; HLA-B*58:01; PMEL; ENSG00000185664; TAA
LIMPGQEAGL

SEQ ID NO: 66745 - protein, 10 aa, Homo sapiens
  misc_feature: Table A; Target 66745; HLA-C*01:02; PMEL; ENSG00000185664; TAA
LIMPGQEAGL

SEQ ID NO: 66746 - protein, 10 aa, Homo sapiens
  misc_feature: Table A; Target 66746; HLA-C*03:03; PMEL; ENSG00000185664; TAA
LIMPGQEAGL

SEQ ID NO: 66747 - protein, 10 aa, Homo sapiens
  misc_feature: Table A; Target 66747; HLA-C*03:04; PMEL; ENSG00000185664; TAA
LIMPGQEAGL

SEQ ID NO: 66748 - protein, 10 aa, Homo sapiens
  misc_feature: Table A; Target 66748; HLA-C*07:04; PMEL; ENSG00000185664; TAA
LIMPGQEAGL

SEQ ID NO: 66749 - protein, 9 aa, Homo sapiens
  misc_feature: Table A; Target 66749; HLA-A*02:04; PMEL; ENSG00000185664; TAA
LIVGILLVL

SEQ ID NO: 66750 - protein, 9 aa, Homo sapiens
  misc_feature: Table A; Target 66750; HLA-A*02:07; PMEL; ENSG00000185664; TAA
LIVGILLVL

SEQ ID NO: 66751 - protein, 8 aa, Homo sapiens
  misc_feature: Table A; Target 66751; HLA-B*15:03; PMEL; ENSG00000185664; TAA
LKGGSGTY

SEQ ID NO: 66752 - protein, 8 aa, Homo sapiens
  misc_feature: Table A; Target 66752; HLA-B*39:01; PMEL; ENSG00000185664; TAA
LKGGSGTY

SEQ ID NO: 66753 - protein, 8 aa, Homo sapiens
  misc_feature: Table A; Target 66753; HLA-C*04:01; PMEL; ENSG00000185664; TAA
LKGGSGTY

SEQ ID NO: 66754 - protein, 8 aa, Homo sapiens
  misc_feature: Table A; Target 66754; HLA-C*07:01; PMEL; ENSG00000185664; TAA
LKGGSGTY

SEQ ID NO: 66755 - protein, 8 aa, Homo sapiens
  misc_feature: Table A; Target 66755; HLA-C*12:03; PMEL; ENSG00000185664; TAA
LKGGSGTY

SEQ ID NO: 66756 - protein, 10 aa, Homo sapiens
  misc_feature: Table A; Target 66756; HLA-B*15:03; PMEL; ENSG00000185664; TAA
LKVSNDGPTL

SEQ ID NO: 66757 - protein, 10 aa, Homo sapiens
  misc_feature: Table A; Target 66757; HLA-B*38:01; PMEL; ENSG00000185664; TAA
LKVSNDGPTL

SEQ ID NO: 66758 - protein, 8 aa, Homo sapiens
  misc_feature: Table A; Target 66758; HLA-A*03:01; PMEL; ENSG00000185664; TAA
LLAVGATK

SEQ ID NO: 66759 - protein, 8 aa, Homo sapiens
  misc_feature: Table A; Target 66759; HLA-A*03:02; PMEL; ENSG00000185664; TAA
LLAVGATK

SEQ ID NO: 66760 - protein, 9 aa, Homo sapiens
  misc_feature: Table A; Target 66760; HLA-A*02:01; PMEL; ENSG00000185664; TAA
LLAVGATKV

SEQ ID NO: 66761 - protein, 9 aa, Homo sapiens
  misc_feature: Table A; Target 66761; HLA-A*02:03; PMEL; ENSG00000185664; TAA
LLAVGATKV

SEQ ID NO: 66762 - protein, 9 aa, Homo sapiens
  misc_feature: Table A; Target 66762; HLA-A*02:04; PMEL; ENSG00000185664; TAA
LLAVGATKV

SEQ ID NO: 66763 - protein, 9 aa, Homo sapiens
  misc_feature: Table A; Target 66763; HLA-A*02:07; PMEL; ENSG00000185664; TAA
LLAVGATKV

SEQ ID NO: 66764 - protein, 9 aa, Homo sapiens
  misc_feature: Table A; Target 66764; HLA-B*13:02; PMEL; ENSG00000185664; TAA
LLAVGATKV

SEQ ID NO: 66765 - protein, 9 aa, Homo sapiens
  misc_feature: Table A; Target 66765; HLA-B*55:01; PMEL; ENSG00000185664; TAA
LLAVGATKV

SEQ ID NO: 66766 - protein, 11 aa, Homo sapiens
  misc_feature: Table A; Target 66766; HLA-A*31:01; PMEL; ENSG00000185664; TAA
LLAVGATKVPR

SEQ ID NO: 66767 - protein, 8 aa, Homo sapiens
  misc_feature: Table A; Target 66767; HLA-A*02:01; PMEL; ENSG00000185664; TAA
LLDGTATL

SEQ ID NO: 66768 - protein, 8 aa, Homo sapiens
  misc_feature: Table A; Target 66768; HLA-A*02:07; PMEL; ENSG00000185664; TAA
LLDGTATL

SEQ ID NO: 66769 - protein, 8 aa, Homo sapiens
  misc_feature: Table A; Target 66769; HLA-B*35:03; PMEL; ENSG00000185664; TAA
LLDGTATL

SEQ ID NO: 66770 - protein, 8 aa, Homo sapiens
  misc_feature: Table A; Target 66770; HLA-C*05:01; PMEL; ENSG00000185664; TAA
LLDGTATL

SEQ ID NO: 66771 - protein, 8 aa, Homo sapiens
  misc_feature: Table A; Target 66771; HLA-C*07:04; PMEL; ENSG00000185664; TAA
LLDGTATL

SEQ ID NO: 66772 - protein, 9 aa, Homo sapiens
  misc_feature: Table A; Target 66772; HLA-A*01:01; PMEL; ENSG00000185664; TAA
LLDGTATLR

SEQ ID NO: 66773 - protein, 9 aa, Homo sapiens
  misc_feature: Table A; Target 66773; HLA-A*03:02; PMEL; ENSG00000185664; TAA
LLDGTATLR

SEQ ID NO: 66774 - protein, 10 aa, Homo sapiens
  misc_feature: Table A; Target 66774; HLA-A*01:01; PMEL; ENSG00000185664; TAA
LLDGTATLRL

SEQ ID NO: 66775 - protein, 10 aa, Homo sapiens
  misc_feature: Table A; Target 66775; HLA-A*02:01; PMEL; ENSG00000185664; TAA
LLDGTATLRL

SEQ ID NO: 66776 - protein, 10 aa, Homo sapiens
  misc_feature: Table A; Target 66776; HLA-A*02:04; PMEL; ENSG00000185664; TAA
LLDGTATLRL

SEQ ID NO: 66777 - protein, 10 aa, Homo sapiens
  misc_feature: Table A; Target 66777; HLA-A*02:07; PMEL; ENSG00000185664; TAA
LLDGTATLRL

SEQ ID NO: 66778 - protein, 10 aa, Homo sapiens
  misc_feature: Table A; Target 66778; HLA-B*38:01; PMEL; ENSG00000185664; TAA
LLDGTATLRL

SEQ ID NO: 66779 - protein, 11 aa, Homo sapiens
  misc_feature: Table A; Target 66779; HLA-A*01:01; PMEL; ENSG00000185664; TAA
LLDGTATLRLV

SEQ ID NO: 66780 - protein, 11 aa, Homo sapiens
  misc_feature: Table A; Target 66780; HLA-A*02:01; PMEL; ENSG00000185664; TAA
LLDGTATLRLV

SEQ ID NO: 66781 - protein, 11 aa, Homo sapiens
  misc_feature: Table A; Target 66781; HLA-A*02:03; PMEL; ENSG00000185664; TAA
LLDGTATLRLV

SEQ ID NO: 66782 - protein, 11 aa, Homo sapiens
  misc_feature: Table A; Target 66782; HLA-A*02:04; PMEL; ENSG00000185664; TAA
LLDGTATLRLV

SEQ ID NO: 66783 - protein, 11 aa, Homo sapiens
  misc_feature: Table A; Target 66783; HLA-A*02:07; PMEL; ENSG00000185664; TAA
LLDGTATLRLV

SEQ ID NO: 66784 - protein, 11 aa, Homo sapiens
  misc_feature: Table A; Target 66784; HLA-B*55:01; PMEL; ENSG00000185664; TAA
LLDGTATLRLV

SEQ ID NO: 66785 - protein, 9 aa, Homo sapiens
  misc_feature: Table A; Target 66785; HLA-A*02:01; PMEL; ENSG00000185664; TAA
LLHLAVIGA

SEQ ID NO: 66786 - protein, 9 aa, Homo sapiens
  misc_feature: Table A; Target 66786; HLA-A*02:03; PMEL; ENSG00000185664; TAA
LLHLAVIGA

SEQ ID NO: 66787 - protein, 9 aa, Homo sapiens
  misc_feature: Table A; Target 66787; HLA-A*02:04; PMEL; ENSG00000185664; TAA
LLHLAVIGA

SEQ ID NO: 66788 - protein, 9 aa, Homo sapiens
  misc_feature: Table A; Target 66788; HLA-A*02:07; PMEL; ENSG00000185664; TAA
LLHLAVIGA

SEQ ID NO: 66789 - protein, 11 aa, Homo sapiens
  misc_feature: Table A; Target 66789; HLA-A*02:04; PMEL; ENSG00000185664; TAA
LLHLAVIGALL

SEQ ID NO: 66790 - protein, 9 aa, Homo sapiens
  misc_feature: Table A; Target 66790; HLA-A*02:03; PMEL; ENSG00000185664; TAA
LMAVVLASL

SEQ ID NO: 66791 - protein, 9 aa, Homo sapiens
  misc_feature: Table A; Target 66791; HLA-B*46:01; PMEL; ENSG00000185664; TAA
LMAVVLASL

SEQ ID NO: 66792 - protein, 8 aa, Homo sapiens
  misc_feature: Table A; Target 66792; HLA-B*08:01; PMEL; ENSG00000185664; TAA
LMKQDFSV

SEQ ID NO: 66793 - protein, 8 aa, Homo sapiens
  misc_feature: Table A; Target 66793; HLA-A*03:01; PMEL; ENSG00000185664; TAA
LNFPGSQK

SEQ ID NO: 66794 - protein, 8 aa, Homo sapiens
  misc_feature: Table A; Target 66794; HLA-A*03:02; PMEL; ENSG00000185664; TAA
LNFPGSQK

SEQ ID NO: 66795 - protein, 8 aa, Homo sapiens
  misc_feature: Table A; Target 66795; HLA-A*11:01; PMEL; ENSG00000185664; TAA
LNFPGSQK

SEQ ID NO: 66796 - protein, 8 aa, Homo sapiens
  misc_feature: Table A; Target 66796; HLA-B*27:02; PMEL; ENSG00000185664; TAA
LNFPGSQK

SEQ ID NO: 66797 - protein, 8 aa, Homo sapiens
  misc_feature: Table A; Target 66797; HLA-B*27:05; PMEL; ENSG00000185664; TAA
LNFPGSQK

SEQ ID NO: 66798 - protein, 8 aa, Homo sapiens
  misc_feature: Table A; Target 66798; HLA-C*04:01; PMEL; ENSG00000185664; TAA
LNFPGSQK

SEQ ID NO: 66799 - protein, 9 aa, Homo sapiens
  misc_feature: Table A; Target 66799; HLA-A*02:03; PMEL; ENSG00000185664; TAA
LNFPGSQKV

SEQ ID NO: 66800 - protein, 9 aa, Homo sapiens
  misc_feature: Table A; Target 66800; HLA-A*68:02; PMEL; ENSG00000185664; TAA
LNFPGSQKV

SEQ ID NO: 66801 - protein, 9 aa, Homo sapiens
  misc_feature: Table A; Target 66801; HLA-B*13:02; PMEL; ENSG00000185664; TAA
LNFPGSQKV

SEQ ID NO: 66802 - protein, 9 aa, Homo sapiens
  misc_feature: Table A; Target 66802; HLA-B*49:01; PMEL; ENSG00000185664; TAA
LNFPGSQKV

SEQ ID NO: 66803 - protein, 9 aa, Homo sapiens
  misc_feature: Table A; Target 66803; HLA-B*51:01; PMEL; ENSG00000185664; TAA
LNFPGSQKV

SEQ ID NO: 66804 - protein, 9 aa, Homo sapiens
  misc_feature: Table A; Target 66804; HLA-C*02:02; PMEL; ENSG00000185664; TAA
LNFPGSQKV

SEQ ID NO: 66805 - protein, 9 aa, Homo sapiens
  misc_feature: Table A; Target 66805; HLA-C*06:02; PMEL; ENSG00000185664; TAA
LNFPGSQKV

SEQ ID NO: 66806 - protein, 9 aa, Homo sapiens
  misc_feature: Table A; Target 66806; HLA-C*12:03; PMEL; ENSG00000185664; TAA
LNFPGSQKV

SEQ ID NO: 66807 - protein, 9 aa, Homo sapiens
  misc_feature: Table A; Target 66807; HLA-C*16:02; PMEL; ENSG00000185664; TAA
LNFPGSQKV

SEQ ID NO: 66808 - protein, 10 aa, Homo sapiens
  misc_feature: Table A; Target 66808; HLA-C*12:03; PMEL; ENSG00000185664; TAA
LNFPGSQKVL

SEQ ID NO: 66809 - protein, 9 aa, Homo sapiens
  misc_feature: Table A; Target 66809; HLA-B*51:01; PMEL; ENSG00000185664; TAA
LPDGQVIWV

SEQ ID NO: 66810 - protein, 9 aa, Homo sapiens
  misc_feature: Table A; Target 66810; HLA-B*35:03; PMEL; ENSG00000185664; TAA
LPIPEPEGP

SEQ ID NO: 66811 - protein, 9 aa, Homo sapiens
  misc_feature: Table A; Target 66811; HLA-B*54:01; PMEL; ENSG00000185664; TAA
LPIPEPEGP

SEQ ID NO: 66812 - protein, 9 aa, Homo sapiens
  misc_feature: Table A; Target 66812; HLA-B*55:01; PMEL; ENSG00000185664; TAA
LPIPEPEGP

SEQ ID NO: 66813 - protein, 9 aa, Homo sapiens
  misc_feature: Table A; Target 66813; HLA-B*56:01; PMEL; ENSG00000185664; TAA
LPIPEPEGP

SEQ ID NO: 66814 - protein, 11 aa, Homo sapiens
  misc_feature: Table A; Target 66814; HLA-B*35:01; PMEL; ENSG00000185664; TAA
LPIPEPEGPDA

SEQ ID NO: 66815 - protein, 11 aa, Homo sapiens
  misc_feature: Table A; Target 66815; HLA-B*35:03; PMEL; ENSG00000185664; TAA
LPIPEPEGPDA

SEQ ID NO: 66816 - protein, 11 aa, Homo sapiens
  misc_feature: Table A; Target 66816; HLA-B*54:01; PMEL; ENSG00000185664; TAA
LPIPEPEGPDA

SEQ ID NO: 66817 - protein, 11 aa, Homo sapiens
  misc_feature: Table A; Target 66817; HLA-B*55:01; PMEL; ENSG00000185664; TAA
LPIPEPEGPDA

SEQ ID NO: 66818 - protein, 11 aa, Homo sapiens
  misc_feature: Table A; Target 66818; HLA-B*56:01; PMEL; ENSG00000185664; TAA
LPIPEPEGPDA

SEQ ID NO: 66819 - protein, 9 aa, Homo sapiens
  misc_feature: Table A; Target 66819; HLA-B*07:02; PMEL; ENSG00000185664; TAA
LPKEACMEI

SEQ ID NO: 66820 - protein, 9 aa, Homo sapiens
  misc_feature: Table A; Target 66820; HLA-B*08:01; PMEL; ENSG00000185664; TAA
LPKEACMEI

SEQ ID NO: 66821 - protein, 9 aa, Homo sapiens
  misc_feature: Table A; Target 66821; HLA-B*40:02; PMEL; ENSG00000185664; TAA
LPKEACMEI

SEQ ID NO: 66822 - protein, 9 aa, Homo sapiens
  misc_feature: Table A; Target 66822; HLA-B*51:01; PMEL; ENSG00000185664; TAA
LPKEACMEI

SEQ ID NO: 66823 - protein, 9 aa, Homo sapiens
  misc_feature: Table A; Target 66823; HLA-B*54:01; PMEL; ENSG00000185664; TAA
LPKEACMEI

SEQ ID NO: 66824 - protein, 9 aa, Homo sapiens
  misc_feature: Table A; Target 66824; HLA-B*55:01; PMEL; ENSG00000185664; TAA
LPKEACMEI

SEQ ID NO: 66825 - protein, 9 aa, Homo sapiens
  misc_feature: Table A; Target 66825; HLA-B*56:01; PMEL; ENSG00000185664; TAA
LPKEACMEI

SEQ ID NO: 66826 - protein, 9 aa, Homo sapiens
  misc_feature: Table A; Target 66826; HLA-C*07:02; PMEL; ENSG00000185664; TAA
LPKEACMEI

SEQ ID NO: 66827 - protein, 8 aa, Homo sapiens
  misc_feature: Table A; Target 66827; HLA-B*07:02; PMEL; ENSG00000185664; TAA
LPSPACQL

SEQ ID NO: 66828 - protein, 8 aa, Homo sapiens
  misc_feature: Table A; Target 66828; HLA-B*08:01; PMEL; ENSG00000185664; TAA
LPSPACQL

SEQ ID NO: 66829 - protein, 8 aa, Homo sapiens
  misc_feature: Table A; Target 66829; HLA-B*35:01; PMEL; ENSG00000185664; TAA
LPSPACQL

SEQ ID NO: 66830 - protein, 8 aa, Homo sapiens
  misc_feature: Table A; Target 66830; HLA-B*35:03; PMEL; ENSG00000185664; TAA
LPSPACQL

SEQ ID NO: 66831 - protein, 8 aa, Homo sapiens
  misc_feature: Table A; Target 66831; HLA-B*51:01; PMEL; ENSG00000185664; TAA
LPSPACQL

SEQ ID NO: 66832 - protein, 8 aa, Homo sapiens
  misc_feature: Table A; Target 66832; HLA-C*07:02; PMEL; ENSG00000185664; TAA
LPSPACQL

SEQ ID NO: 66833 - protein, 9 aa, Homo sapiens
  misc_feature: Table A; Target 66833; HLA-B*35:03; PMEL; ENSG00000185664; TAA
LPSPACQLV

SEQ ID NO: 66834 - protein, 9 aa, Homo sapiens
  misc_feature: Table A; Target 66834; HLA-B*51:01; PMEL; ENSG00000185664; TAA
LPSPACQLV

SEQ ID NO: 66835 - protein, 9 aa, Homo sapiens
  misc_feature: Table A; Target 66835; HLA-B*54:01; PMEL; ENSG00000185664; TAA
LPSPACQLV

SEQ ID NO: 66836 - protein, 9 aa, Homo sapiens
  misc_feature: Table A; Target 66836; HLA-B*55:01; PMEL; ENSG00000185664; TAA
LPSPACQLV

SEQ ID NO: 66837 - protein, 9 aa, Homo sapiens
  misc_feature: Table A; Target 66837; HLA-B*56:01; PMEL; ENSG00000185664; TAA
LPSPACQLV

SEQ ID NO: 66838 - protein, 10 aa, Homo sapiens
  misc_feature: Table A; Target 66838; HLA-B*07:02; PMEL; ENSG00000185664; TAA
LPSPACQLVL

SEQ ID NO: 66839 - protein, 10 aa, Homo sapiens
  misc_feature: Table A; Target 66839; HLA-B*35:01; PMEL; ENSG00000185664; TAA
LPSPACQLVL

SEQ ID NO: 66840 - protein, 10 aa, Homo sapiens
  misc_feature: Table A; Target 66840; HLA-B*35:03; PMEL; ENSG00000185664; TAA
LPSPACQLVL

SEQ ID NO: 66841 - protein, 10 aa, Homo sapiens
  misc_feature: Table A; Target 66841; HLA-B*51:01; PMEL; ENSG00000185664; TAA
LPSPACQLVL

SEQ ID NO: 66842 - protein, 9 aa, Homo sapiens
  misc_feature: Table A; Target 66842; HLA-B*13:02; PMEL; ENSG00000185664; TAA
LQAAIPLTS

SEQ ID NO: 66843 - protein, 9 aa, Homo sapiens
  misc_feature: Table A; Target 66843; HLA-B*27:05; PMEL; ENSG00000185664; TAA
LQAAIPLTS

SEQ ID NO: 66844 - protein, 10 aa, Homo sapiens
  misc_feature: Table A; Target 66844; HLA-A*02:03; PMEL; ENSG00000185664; TAA
LQAAIPLTSC

SEQ ID NO: 66845 - protein, 9 aa, Homo sapiens
  misc_feature: Table A; Target 66845; HLA-A*01:01; PMEL; ENSG00000185664; TAA
LQLHDPSGY

SEQ ID NO: 66846 - protein, 9 aa, Homo sapiens
  misc_feature: Table A; Target 66846; HLA-A*29:02; PMEL; ENSG00000185664; TAA
LQLHDPSGY

SEQ ID NO: 66847 - protein, 9 aa, Homo sapiens
  misc_feature: Table A; Target 66847; HLA-A*30:02; PMEL; ENSG00000185664; TAA
LQLHDPSGY

SEQ ID NO: 66848 - protein, 9 aa, Homo sapiens
  misc_feature: Table A; Target 66848; HLA-A*32:01; PMEL; ENSG00000185664; TAA
LQLHDPSGY

SEQ ID NO: 66849 - protein, 9 aa, Homo sapiens
  misc_feature: Table A; Target 66849; HLA-B*15:01; PMEL; ENSG00000185664; TAA
LQLHDPSGY

SEQ ID NO: 66850 - protein, 9 aa, Homo sapiens
  misc_feature: Table A; Target 66850; HLA-B*15:03; PMEL; ENSG00000185664; TAA
LQLHDPSGY

SEQ ID NO: 66851 - protein, 9 aa, Homo sapiens
  misc_feature: Table A; Target 66851; HLA-B*27:05; PMEL; ENSG00000185664; TAA
LQLHDPSGY

SEQ ID NO: 66852 - protein, 9 aa, Homo sapiens
  misc_feature: Table A; Target 66852; HLA-B*39:01; PMEL; ENSG00000185664; TAA
LQLHDPSGY

SEQ ID NO: 66853 - protein, 9 aa, Homo sapiens
  misc_feature: Table A; Target 66853; HLA-C*07:01; PMEL; ENSG00000185664; TAA
LQLHDPSGY

SEQ ID NO: 66854 - protein, 9 aa, Homo sapiens
  misc_feature: Table A; Target 66854; HLA-C*07:04; PMEL; ENSG00000185664; TAA
LQLHDPSGY

SEQ ID NO: 66855 - protein, 9 aa, Homo sapiens
  misc_feature: Table A; Target 66855; HLA-C*14:02; PMEL; ENSG00000185664; TAA
LQLHDPSGY

SEQ ID NO: 66856 - protein, 9 aa, Homo sapiens
  misc_feature: Table A; Target 66856; HLA-C*16:04; PMEL; ENSG00000185664; TAA
LQLHDPSGY

SEQ ID NO: 66857 - protein, 8 aa, Homo sapiens
  misc_feature: Table A; Target 66857; HLA-C*16:04; PMEL; ENSG00000185664; TAA
LRNQPLTF

SEQ ID NO: 66858 - protein, 9 aa, Homo sapiens
  misc_feature: Table A; Target 66858; HLA-A*32:01; PMEL; ENSG00000185664; TAA
LSIGTGRAM

SEQ ID NO: 66859 - protein, 9 aa, Homo sapiens
  misc_feature: Table A; Target 66859; HLA-B*15:01; PMEL; ENSG00000185664; TAA
LSIGTGRAM

SEQ ID NO: 66860 - protein, 9 aa, Homo sapiens
  misc_feature: Table A; Target 66860; HLA-B*15:03; PMEL; ENSG00000185664; TAA
LSIGTGRAM

SEQ ID NO: 66861 - protein, 9 aa, Homo sapiens
  misc_feature: Table A; Target 66861; HLA-B*27:05; PMEL; ENSG00000185664; TAA
LSIGTGRAM

SEQ ID NO: 66862 - protein, 9 aa, Homo sapiens
  misc_feature: Table A; Target 66862; HLA-B*40:02; PMEL; ENSG00000185664; TAA
LSIGTGRAM

SEQ ID NO: 66863 - protein, 9 aa, Homo sapiens
  misc_feature: Table A; Target 66863; HLA-B*46:01; PMEL; ENSG00000185664; TAA
LSIGTGRAM

SEQ ID NO: 66864 - protein, 9 aa, Homo sapiens
  misc_feature: Table A; Target 66864; HLA-B*57:01; PMEL; ENSG00000185664; TAA
LSIGTGRAM

SEQ ID NO: 66865 - protein, 9 aa, Homo sapiens
  misc_feature: Table A; Target 66865; HLA-B*58:01; PMEL; ENSG00000185664; TAA
LSIGTGRAM

SEQ ID NO: 66866 - protein, 9 aa, Homo sapiens
  misc_feature: Table A; Target 66866; HLA-C*01:02; PMEL; ENSG00000185664; TAA
LSIGTGRAM

SEQ ID NO: 66867 - protein, 9 aa, Homo sapiens
  misc_feature: Table A; Target 66867; HLA-C*02:02; PMEL; ENSG00000185664; TAA
LSIGTGRAM

SEQ ID NO: 66868 - protein, 9 aa, Homo sapiens
  misc_feature: Table A; Target 66868; HLA-C*03:03; PMEL; ENSG00000185664; TAA
LSIGTGRAM

SEQ ID NO: 66869 - protein, 9 aa, Homo sapiens
  misc_feature: Table A; Target 66869; HLA-C*03:04; PMEL; ENSG00000185664; TAA
LSIGTGRAM

SEQ ID NO: 66870 - protein, 9 aa, Homo sapiens
  misc_feature: Table A; Target 66870; HLA-C*06:02; PMEL; ENSG00000185664; TAA
LSIGTGRAM

SEQ ID NO: 66871 - protein, 9 aa, Homo sapiens
  misc_feature: Table A; Target 66871; HLA-C*07:04; PMEL; ENSG00000185664; TAA
LSIGTGRAM

SEQ ID NO: 66872 - protein, 9 aa, Homo sapiens
  misc_feature: Table A; Target 66872; HLA-C*12:03; PMEL; ENSG00000185664; TAA
LSIGTGRAM

SEQ ID NO: 66873 - protein, 9 aa, Homo sapiens
  misc_feature: Table A; Target 66873; HLA-C*14:02; PMEL; ENSG00000185664; TAA
LSIGTGRAM

SEQ ID NO: 66874 - protein, 9 aa, Homo sapiens
  misc_feature: Table A; Target 66874; HLA-C*16:01; PMEL; ENSG00000185664; TAA
LSIGTGRAM

SEQ ID NO: 66875 - protein, 9 aa, Homo sapiens
  misc_feature: Table A; Target 66875; HLA-C*16:02; PMEL; ENSG00000185664; TAA
LSIGTGRAM

SEQ ID NO: 66876 - protein, 10 aa, Homo sapiens
  misc_feature: Table A; Target 66876; HLA-B*07:02; PMEL; ENSG00000185664; TAA
LSIGTGRAML

SEQ ID NO: 66877 - protein, 8 aa, Homo sapiens
  misc_feature: Table A; Target 66877; HLA-B*08:01; PMEL; ENSG00000185664; TAA
LVKRQVPL

SEQ ID NO: 66878 - protein, 8 aa, Homo sapiens
  misc_feature: Table A; Target 66878; HLA-C*07:04; PMEL; ENSG00000185664; TAA
LVLMAVVL

SEQ ID NO: 66879 - protein, 8 aa, Homo sapiens
  misc_feature: Table A; Target 66879; HLA-C*12:03; PMEL; ENSG00000185664; TAA
LVLMAVVL

SEQ ID NO: 66880 - protein, 8 aa, Homo sapiens
  misc_feature: Table A; Target 66880; HLA-B*08:01; PMEL; ENSG00000185664; TAA
LVVTHTYL

SEQ ID NO: 66881 - protein, 8 aa, Homo sapiens
  misc_feature: Table A; Target 66881; HLA-B*27:05; PMEL; ENSG00000185664; TAA
LVVTHTYL

SEQ ID NO: 66882 - protein, 8 aa, Homo sapiens
  misc_feature: Table A; Target 66882; HLA-C*03:04; PMEL; ENSG00000185664; TAA
LVVTHTYL

SEQ ID NO: 66883 - protein, 8 aa, Homo sapiens
  misc_feature: Table A; Target 66883; HLA-C*07:01; PMEL; ENSG00000185664; TAA
LVVTHTYL

SEQ ID NO: 66884 - protein, 8 aa, Homo sapiens
  misc_feature: Table A; Target 66884; HLA-C*07:04; PMEL; ENSG00000185664; TAA
LVVTHTYL

SEQ ID NO: 66885 - protein, 8 aa, Homo sapiens
  misc_feature: Table A; Target 66885; HLA-C*12:03; PMEL; ENSG00000185664; TAA
LVVTHTYL

SEQ ID NO: 66886 - protein, 8 aa, Homo sapiens
  misc_feature: Table A; Target 66886; HLA-C*16:01; PMEL; ENSG00000185664; TAA
LVVTHTYL

SEQ ID NO: 66887 - protein, 11 aa, Homo sapiens
  misc_feature: Table A; Target 66887; HLA-A*24:02; PMEL; ENSG00000185664; TAA
LYPEWTEAQRL

SEQ ID NO: 66888 - protein, 8 aa, Homo sapiens
  misc_feature: Table A; Target 66888; HLA-A*25:01; PMEL; ENSG00000185664; TAA
MAVVLASL

SEQ ID NO: 66889 - protein, 8 aa, Homo sapiens
  misc_feature: Table A; Target 66889; HLA-B*08:01; PMEL; ENSG00000185664; TAA
MAVVLASL

SEQ ID NO: 66890 - protein, 8 aa, Homo sapiens
  misc_feature: Table A; Target 66890; HLA-B*35:01; PMEL; ENSG00000185664; TAA
MAVVLASL

SEQ ID NO: 66891 - protein, 8 aa, Homo sapiens
  misc_feature: Table A; Target 66891; HLA-B*35:03; PMEL; ENSG00000185664; TAA
MAVVLASL

SEQ ID NO: 66892 - protein, 8 aa, Homo sapiens
  misc_feature: Table A; Target 66892; HLA-B*46:01; PMEL; ENSG00000185664; TAA
MAVVLASL

SEQ ID NO: 66893 - protein, 8 aa, Homo sapiens
  misc_feature: Table A; Target 66893; HLA-B*51:01; PMEL; ENSG00000185664; TAA
MAVVLASL

SEQ ID NO: 66894 - protein, 8 aa, Homo sapiens
  misc_feature: Table A; Target 66894; HLA-B*54:01; PMEL; ENSG00000185664; TAA
MAVVLASL

SEQ ID NO: 66895 - protein, 8 aa, Homo sapiens
  misc_feature: Table A; Target 66895; HLA-C*03:03; PMEL; ENSG00000185664; TAA
MAVVLASL

SEQ ID NO: 66896 - protein, 8 aa, Homo sapiens
  misc_feature: Table A; Target 66896; HLA-C*03:04; PMEL; ENSG00000185664; TAA
MAVVLASL

SEQ ID NO: 66897 - protein, 8 aa, Homo sapiens
  misc_feature: Table A; Target 66897; HLA-C*14:02; PMEL; ENSG00000185664; TAA
MAVVLASL

SEQ ID NO: 66898 - protein, 9 aa, Homo sapiens
  misc_feature: Table A; Target 66898; HLA-A*68:02; PMEL; ENSG00000185664; TAA
MAVVLASLI

SEQ ID NO: 66899 - protein, 9 aa, Homo sapiens
  misc_feature: Table A; Target 66899; HLA-B*13:02; PMEL; ENSG00000185664; TAA
MAVVLASLI

SEQ ID NO: 66900 - protein, 9 aa, Homo sapiens
  misc_feature: Table A; Target 66900; HLA-B*49:01; PMEL; ENSG00000185664; TAA
MAVVLASLI

SEQ ID NO: 66901 - protein, 9 aa, Homo sapiens
  misc_feature: Table A; Target 66901; HLA-B*51:01; PMEL; ENSG00000185664; TAA
MAVVLASLI

SEQ ID NO: 66902 - protein, 9 aa, Homo sapiens
  misc_feature: Table A; Target 66902; HLA-B*54:01; PMEL; ENSG00000185664; TAA
MAVVLASLI

SEQ ID NO: 66903 - protein, 9 aa, Homo sapiens
  misc_feature: Table A; Target 66903; HLA-C*02:02; PMEL; ENSG00000185664; TAA
MAVVLASLI

SEQ ID NO: 66904 - protein, 9 aa, Homo sapiens
  misc_feature: Table A; Target 66904; HLA-C*04:01; PMEL; ENSG00000185664; TAA
MAVVLASLI

SEQ ID NO: 66905 - protein, 9 aa, Homo sapiens
  misc_feature: Table A; Target 66905; HLA-C*07:01; PMEL; ENSG00000185664; TAA
MAVVLASLI

SEQ ID NO: 66906 - protein, 9 aa, Homo sapiens
  misc_feature: Table A; Target 66906; HLA-C*07:04; PMEL; ENSG00000185664; TAA
MAVVLASLI

SEQ ID NO: 66907 - protein, 9 aa, Homo sapiens
  misc_feature: Table A; Target 66907; HLA-C*12:03; PMEL; ENSG00000185664; TAA
MAVVLASLI

SEQ ID NO: 66908 - protein, 10 aa, Homo sapiens
  misc_feature: Table A; Target 66908; HLA-A*29:02; PMEL; ENSG00000185664; TAA
MAVVLASLIY

SEQ ID NO: 66909 - protein, 10 aa, Homo sapiens
  misc_feature: Table A; Target 66909; HLA-B*35:01; PMEL; ENSG00000185664; TAA
MAVVLASLIY

SEQ ID NO: 66910 - protein, 10 aa, Homo sapiens
  misc_feature: Table A; Target 66910; HLA-C*07:01; PMEL; ENSG00000185664; TAA
MAVVLASLIY

SEQ ID NO: 66911 - protein, 11 aa, Homo sapiens
  misc_feature: Table A; Target 66911; HLA-A*31:01; PMEL; ENSG00000185664; TAA
MAVVLASLIYR

SEQ ID NO: 66912 - protein, 11 aa, Homo sapiens
  misc_feature: Table A; Target 66912; HLA-A*33:01; PMEL; ENSG00000185664; TAA
MAVVLASLIYR

SEQ ID NO: 66913 - protein, 11 aa, Homo sapiens
  misc_feature: Table A; Target 66913; HLA-A*33:03; PMEL; ENSG00000185664; TAA
MAVVLASLIYR

SEQ ID NO: 66914 - protein, 11 aa, Homo sapiens
  misc_feature: Table A; Target 66914; HLA-A*68:01; PMEL; ENSG00000185664; TAA
MAVVLASLIYR

SEQ ID NO: 66915 - protein, 11 aa, Homo sapiens
  misc_feature: Table A; Target 66915; HLA-A*68:02; PMEL; ENSG00000185664; TAA
MAVVLASLIYR

SEQ ID NO: 66916 - protein, 11 aa, Homo sapiens
  misc_feature: Table A; Target 66916; HLA-B*27:02; PMEL; ENSG00000185664; TAA
MAVVLASLIYR

SEQ ID NO: 66917 - protein, 11 aa, Homo sapiens
  misc_feature: Table A; Target 66917; HLA-C*07:06; PMEL; ENSG00000185664; TAA
MAVVLASLIYR

SEQ ID NO: 66918 - protein, 8 aa, Homo sapiens
  misc_feature: Table A; Target 66918; HLA-B*18:01; PMEL; ENSG00000185664; TAA
MEISSPGC

SEQ ID NO: 66919 - protein, 8 aa, Homo sapiens
  misc_feature: Table A; Target 66919; HLA-B*49:01; PMEL; ENSG00000185664; TAA
MEISSPGC

SEQ ID NO: 66920 - protein, 10 aa, Homo sapiens
  misc_feature: Table A; Target 66920; HLA-A*30:01; PMEL; ENSG00000185664; TAA
MEISSPGCQP

SEQ ID NO: 66921 - protein, 10 aa, Homo sapiens
  misc_feature: Table A; Target 66921; HLA-B*40:02; PMEL; ENSG00000185664; TAA
MEISSPGCQP

SEQ ID NO: 66922 - protein, 10 aa, Homo sapiens
  misc_feature: Table A; Target 66922; HLA-B*49:01; PMEL; ENSG00000185664; TAA
MEISSPGCQP

SEQ ID NO: 66923 - protein, 11 aa, Homo sapiens
  misc_feature: Table A; Target 66923; HLA-C*04:01; PMEL; ENSG00000185664; TAA
MEISSPGCQPP

SEQ ID NO: 66924 - protein, 11 aa, Homo sapiens
  misc_feature: Table A; Target 66924; HLA-C*07:01; PMEL; ENSG00000185664; TAA
MEISSPGCQPP

SEQ ID NO: 66925 - protein, 8 aa, Homo sapiens
  misc_feature: Table A; Target 66925; HLA-A*33:03; PMEL; ENSG00000185664; TAA
MEVTVYHR

SEQ ID NO: 66926 - protein, 8 aa, Homo sapiens
  misc_feature: Table A; Target 66926; HLA-B*18:01; PMEL; ENSG00000185664; TAA
MEVTVYHR

SEQ ID NO: 66927 - protein, 8 aa, Homo sapiens
  misc_feature: Table A; Target 66927; HLA-B*27:02; PMEL; ENSG00000185664; TAA
MEVTVYHR

SEQ ID NO: 66928 - protein, 8 aa, Homo sapiens
  misc_feature: Table A; Target 66928; HLA-B*57:01; PMEL; ENSG00000185664; TAA
MEVTVYHR

SEQ ID NO: 66929 - protein, 8 aa, Homo sapiens
  misc_feature: Table A; Target 66929; HLA-C*07:01; PMEL; ENSG00000185664; TAA
MEVTVYHR

SEQ ID NO: 66930 - protein, 9 aa, Homo sapiens
  misc_feature: Table A; Target 66930; HLA-B*44:02; PMEL; ENSG00000185664; TAA
MEVTVYHRR

SEQ ID NO: 66931 - protein, 9 aa, Homo sapiens
  misc_feature: Table A; Target 66931; HLA-B*44:03; PMEL; ENSG00000185664; TAA
MEVTVYHRR

SEQ ID NO: 66932 - protein, 8 aa, Homo sapiens
  misc_feature: Table A; Target 66932; HLA-B*18:01; PMEL; ENSG00000185664; TAA
MGTTLAEM

SEQ ID NO: 66933 - protein, 8 aa, Homo sapiens
  misc_feature: Table A; Target 66933; HLA-B*35:01; PMEL; ENSG00000185664; TAA
MGTTLAEM

SEQ ID NO: 66934 - protein, 8 aa, Homo sapiens
  misc_feature: Table A; Target 66934; HLA-B*35:03; PMEL; ENSG00000185664; TAA
MGTTLAEM

SEQ ID NO: 66935 - protein, 8 aa, Homo sapiens
  misc_feature: Table A; Target 66935; HLA-B*46:01; PMEL; ENSG00000185664; TAA
MGTTLAEM

SEQ ID NO: 66936 - protein, 8 aa, Homo sapiens
  misc_feature: Table A; Target 66936; HLA-B*51:01; PMEL; ENSG00000185664; TAA
MGTTLAEM

SEQ ID NO: 66937 - protein, 8 aa, Homo sapiens
  misc_feature: Table A; Target 66937; HLA-B*54:01; PMEL; ENSG00000185664; TAA
MGTTLAEM

SEQ ID NO: 66938 - protein, 8 aa, Homo sapiens
  misc_feature: Table A; Target 66938; HLA-B*55:01; PMEL; ENSG00000185664; TAA
MGTTLAEM

SEQ ID NO: 66939 - protein, 8 aa, Homo sapiens
  misc_feature: Table A; Target 66939; HLA-C*03:03; PMEL; ENSG00000185664; TAA
MGTTLAEM

SEQ ID NO: 66940 - protein, 8 aa, Homo sapiens
  misc_feature: Table A; Target 66940; HLA-C*03:04; PMEL; ENSG00000185664; TAA
MGTTLAEM

SEQ ID NO: 66941 - protein, 8 aa, Homo sapiens
  misc_feature: Table A; Target 66941; HLA-C*04:01; PMEL; ENSG00000185664; TAA
MGTTLAEM

SEQ ID NO: 66942 - protein, 8 aa, Homo sapiens
  misc_feature: Table A; Target 66942; HLA-C*05:01; PMEL; ENSG00000185664; TAA
MGTTLAEM

SEQ ID NO: 66943 - protein, 8 aa, Homo sapiens
  misc_feature: Table A; Target 66943; HLA-C*07:02; PMEL; ENSG00000185664; TAA
MGTTLAEM

SEQ ID NO: 66944 - protein, 8 aa, Homo sapiens
  misc_feature: Table A; Target 66944; HLA-C*07:04; PMEL; ENSG00000185664; TAA
MGTTLAEM

SEQ ID NO: 66945 - protein, 8 aa, Homo sapiens
  misc_feature: Table A; Target 66945; HLA-C*14:02; PMEL; ENSG00000185664; TAA
MGTTLAEM

SEQ ID NO: 66946 - protein, 8 aa, Homo sapiens
  misc_feature: Table A; Target 66946; HLA-C*16:01; PMEL; ENSG00000185664; TAA
MGTTLAEM

SEQ ID NO: 66947 - protein, 8 aa, Homo sapiens
  misc_feature: Table A; Target 66947; HLA-C*16:02; PMEL; ENSG00000185664; TAA
MGTTLAEM

SEQ ID NO: 66948 - protein, 9 aa, Homo sapiens
  misc_feature: Table A; Target 66948; HLA-A*01:01; PMEL; ENSG00000185664; TAA
MLGTHTMEV

SEQ ID NO: 66949 - protein, 9 aa, Homo sapiens
  misc_feature: Table A; Target 66949; HLA-A*02:01; PMEL; ENSG00000185664; TAA
MLGTHTMEV

SEQ ID NO: 66950 - protein, 9 aa, Homo sapiens
  misc_feature: Table A; Target 66950; HLA-A*02:03; PMEL; ENSG00000185664; TAA
MLGTHTMEV

SEQ ID NO: 66951 - protein, 9 aa, Homo sapiens
  misc_feature: Table A; Target 66951; HLA-A*02:04; PMEL; ENSG00000185664; TAA
MLGTHTMEV

SEQ ID NO: 66952 - protein, 9 aa, Homo sapiens
  misc_feature: Table A; Target 66952; HLA-A*02:07; PMEL; ENSG00000185664; TAA
MLGTHTMEV

SEQ ID NO: 66953 - protein, 9 aa, Homo sapiens
  misc_feature: Table A; Target 66953; HLA-B*08:01; PMEL; ENSG00000185664; TAA
MLGTHTMEV

SEQ ID NO: 66954 - protein, 9 aa, Homo sapiens
  misc_feature: Table A; Target 66954; HLA-B*13:02; PMEL; ENSG00000185664; TAA
MLGTHTMEV

SEQ ID NO: 66955 - protein, 9 aa, Homo sapiens
  misc_feature: Table A; Target 66955; HLA-B*46:01; PMEL; ENSG00000185664; TAA
MLGTHTMEV

SEQ ID NO: 66956 - protein, 9 aa, Homo sapiens
  misc_feature: Table A; Target 66956; HLA-B*51:01; PMEL; ENSG00000185664; TAA
MLGTHTMEV

SEQ ID NO: 66957 - protein, 9 aa, Homo sapiens
  misc_feature: Table A; Target 66957; HLA-B*54:01; PMEL; ENSG00000185664; TAA
MLGTHTMEV

SEQ ID NO: 66958 - protein, 9 aa, Homo sapiens
  misc_feature: Table A; Target 66958; HLA-B*55:01; PMEL; ENSG00000185664; TAA
MLGTHTMEV

SEQ ID NO: 66959 - protein, 9 aa, Homo sapiens
  misc_feature: Table A; Target 66959; HLA-C*02:02; PMEL; ENSG00000185664; TAA
MLGTHTMEV

SEQ ID NO: 66960 - protein, 9 aa, Homo sapiens
  misc_feature: Table A; Target 66960; HLA-C*04:01; PMEL; ENSG00000185664; TAA
MLGTHTMEV

SEQ ID NO: 66961 - protein, 9 aa, Homo sapiens
  misc_feature: Table A; Target 66961; HLA-C*06:02; PMEL; ENSG00000185664; TAA
MLGTHTMEV

SEQ ID NO: 66962 - protein, 9 aa, Homo sapiens
  misc_feature: Table A; Target 66962; HLA-C*07:04; PMEL; ENSG00000185664; TAA
MLGTHTMEV

SEQ ID NO: 66963 - protein, 9 aa, Homo sapiens
  misc_feature: Table A; Target 66963; HLA-C*12:03; PMEL; ENSG00000185664; TAA
MLGTHTMEV

SEQ ID NO: 66964 - protein, 9 aa, Homo sapiens
  misc_feature: Table A; Target 66964; HLA-C*16:02; PMEL; ENSG00000185664; TAA
MLGTHTMEV

SEQ ID NO: 66965 - protein, 10 aa, Homo sapiens
  misc_feature: Table A; Target 66965; HLA-C*07:01; PMEL; ENSG00000185664; TAA
MLGTHTMEVT

SEQ ID NO: 66966 - protein, 11 aa, Homo sapiens
  misc_feature: Table A; Target 66966; HLA-A*02:01; PMEL; ENSG00000185664; TAA
MLGTHTMEVTV

SEQ ID NO: 66967 - protein, 8 aa, Homo sapiens
  misc_feature: Table A; Target 66967; HLA-B*07:02; PMEL; ENSG00000185664; TAA
MPGQEAGL

SEQ ID NO: 66968 - protein, 8 aa, Homo sapiens
  misc_feature: Table A; Target 66968; HLA-B*08:01; PMEL; ENSG00000185664; TAA
MPGQEAGL

SEQ ID NO: 66969 - protein, 8 aa, Homo sapiens
  misc_feature: Table A; Target 66969; HLA-B*35:01; PMEL; ENSG00000185664; TAA
MPGQEAGL

SEQ ID NO: 66970 - protein, 8 aa, Homo sapiens
  misc_feature: Table A; Target 66970; HLA-B*35:03; PMEL; ENSG00000185664; TAA
MPGQEAGL

SEQ ID NO: 66971 - protein, 8 aa, Homo sapiens
  misc_feature: Table A; Target 66971; HLA-B*55:01; PMEL; ENSG00000185664; TAA
MPGQEAGL

SEQ ID NO: 66972 - protein, 9 aa, Homo sapiens
  misc_feature: Table A; Target 66972; HLA-B*07:02; PMEL; ENSG00000185664; TAA
MPTAESTGM

SEQ ID NO: 66973 - protein, 9 aa, Homo sapiens
  misc_feature: Table A; Target 66973; HLA-B*35:01; PMEL; ENSG00000185664; TAA
MPTAESTGM

SEQ ID NO: 66974 - protein, 9 aa, Homo sapiens
  misc_feature: Table A; Target 66974; HLA-B*35:03; PMEL; ENSG00000185664; TAA
MPTAESTGM

SEQ ID NO: 66975 - protein, 9 aa, Homo sapiens
  misc_feature: Table A; Target 66975; HLA-B*51:01; PMEL; ENSG00000185664; TAA
MPTAESTGM

SEQ ID NO: 66976 - protein, 9 aa, Homo sapiens
  misc_feature: Table A; Target 66976; HLA-B*54:01; PMEL; ENSG00000185664; TAA
MPTAESTGM

SEQ ID NO: 66977 - protein, 9 aa, Homo sapiens
  misc_feature: Table A; Target 66977; HLA-B*55:01; PMEL; ENSG00000185664; TAA
MPTAESTGM

SEQ ID NO: 66978 - protein, 9 aa, Homo sapiens
  misc_feature: Table A; Target 66978; HLA-B*56:01; PMEL; ENSG00000185664; TAA
MPTAESTGM

SEQ ID NO: 66979 - protein, 9 aa, Homo sapiens
  misc_feature: Table A; Target 66979; HLA-C*03:03; PMEL; ENSG00000185664; TAA
MPTAESTGM

SEQ ID NO: 66980 - protein, 9 aa, Homo sapiens
  misc_feature: Table A; Target 66980; HLA-C*07:02; PMEL; ENSG00000185664; TAA
MPTAESTGM

SEQ ID NO: 66981 - protein, 11 aa, Homo sapiens
  misc_feature: Table A; Target 66981; HLA-B*35:01; PMEL; ENSG00000185664; TAA
MPTAESTGMTP

SEQ ID NO: 66982 - protein, 11 aa, Homo sapiens
  misc_feature: Table A; Target 66982; HLA-B*35:03; PMEL; ENSG00000185664; TAA
MPTAESTGMTP

SEQ ID NO: 66983 - protein, 11 aa, Homo sapiens
  misc_feature: Table A; Target 66983; HLA-B*54:01; PMEL; ENSG00000185664; TAA
MPTAESTGMTP

SEQ ID NO: 66984 - protein, 11 aa, Homo sapiens
  misc_feature: Table A; Target 66984; HLA-B*55:01; PMEL; ENSG00000185664; TAA
MPTAESTGMTP

SEQ ID NO: 66985 - protein, 11 aa, Homo sapiens
  misc_feature: Table A; Target 66985; HLA-B*56:01; PMEL; ENSG00000185664; TAA
MPTAESTGMTP

SEQ ID NO: 66986 - protein, 10 aa, Homo sapiens
  misc_feature: Table A; Target 66986; HLA-B*07:02; PMEL; ENSG00000185664; TAA
MSTESITGSL

SEQ ID NO: 66987 - protein, 10 aa, Homo sapiens
  misc_feature: Table A; Target 66987; HLA-B*40:01; PMEL; ENSG00000185664; TAA
MSTESITGSL

SEQ ID NO: 66988 - protein, 10 aa, Homo sapiens
  misc_feature: Table A; Target 66988; HLA-C*03:03; PMEL; ENSG00000185664; TAA
MSTESITGSL

SEQ ID NO: 66989 - protein, 10 aa, Homo sapiens
  misc_feature: Table A; Target 66989; HLA-C*03:04; PMEL; ENSG00000185664; TAA
MSTESITGSL

SEQ ID NO: 66990 - protein, 10 aa, Homo sapiens
  misc_feature: Table A; Target 66990; HLA-C*07:02; PMEL; ENSG00000185664; TAA
MSTESITGSL

SEQ ID NO: 66991 - protein, 10 aa, Homo sapiens
  misc_feature: Table A; Target 66991; HLA-C*07:06; PMEL; ENSG00000185664; TAA
MSTESITGSL

SEQ ID NO: 66992 - protein, 9 aa, Homo sapiens
  misc_feature: Table A; Target 66992; HLA-B*27:05; PMEL; ENSG00000185664; TAA
MSTPEATGM

SEQ ID NO: 66993 - protein, 9 aa, Homo sapiens
  misc_feature: Table A; Target 66993; HLA-B*35:01; PMEL; ENSG00000185664; TAA
MSTPEATGM

SEQ ID NO: 66994 - protein, 9 aa, Homo sapiens
  misc_feature: Table A; Target 66994; HLA-B*35:03; PMEL; ENSG00000185664; TAA
MSTPEATGM

SEQ ID NO: 66995 - protein, 9 aa, Homo sapiens
  misc_feature: Table A; Target 66995; HLA-B*39:01; PMEL; ENSG00000185664; TAA
MSTPEATGM

SEQ ID NO: 66996 - protein, 9 aa, Homo sapiens
  misc_feature: Table A; Target 66996; HLA-B*55:01; PMEL; ENSG00000185664; TAA
MSTPEATGM

SEQ ID NO: 66997 - protein, 9 aa, Homo sapiens
  misc_feature: Table A; Target 66997; HLA-B*58:01; PMEL; ENSG00000185664; TAA
MSTPEATGM

SEQ ID NO: 66998 - protein, 9 aa, Homo sapiens
  misc_feature: Table A; Target 66998; HLA-C*03:03; PMEL; ENSG00000185664; TAA
MSTPEATGM

SEQ ID NO: 66999 - protein, 9 aa, Homo sapiens
  misc_feature: Table A; Target 66999; HLA-C*03:04; PMEL; ENSG00000185664; TAA
MSTPEATGM

SEQ ID NO: 67000 - protein, 9 aa, Homo sapiens
  misc_feature: Table A; Target 67000; HLA-C*04:01; PMEL; ENSG00000185664; TAA
MSTPEATGM

SEQ ID NO: 67001 - protein, 9 aa, Homo sapiens
  misc_feature: Table A; Target 67001; HLA-C*05:01; PMEL; ENSG00000185664; TAA
MSTPEATGM

SEQ ID NO: 67002 - protein, 9 aa, Homo sapiens
  misc_feature: Table A; Target 67002; HLA-C*07:01; PMEL; ENSG00000185664; TAA
MSTPEATGM

SEQ ID NO: 67003 - protein, 9 aa, Homo sapiens
  misc_feature: Table A; Target 67003; HLA-C*07:04; PMEL; ENSG00000185664; TAA
MSTPEATGM

SEQ ID NO: 67004 - protein, 9 aa, Homo sapiens
  misc_feature: Table A; Target 67004; HLA-C*16:01; PMEL; ENSG00000185664; TAA
MSTPEATGM

SEQ ID NO: 67005 - protein, 9 aa, Homo sapiens
  misc_feature: Table A; Target 67005; HLA-C*16:02; PMEL; ENSG00000185664; TAA
MSTPEATGM

SEQ ID NO: 67006 - protein, 11 aa, Homo sapiens
  misc_feature: Table A; Target 67006; HLA-C*04:01; PMEL; ENSG00000185664; TAA
MSTPEATGMTP

SEQ ID NO: 67007 - protein, 8 aa, Homo sapiens
  misc_feature: Table A; Target 67007; HLA-B*51:01; PMEL; ENSG00000185664; TAA
MTPAEVSI

SEQ ID NO: 67008 - protein, 9 aa, Homo sapiens
  misc_feature: Table A; Target 67008; HLA-A*02:07; PMEL; ENSG00000185664; TAA
MTPAEVSIV

SEQ ID NO: 67009 - protein, 9 aa, Homo sapiens
  misc_feature: Table A; Target 67009; HLA-A*68:02; PMEL; ENSG00000185664; TAA
MTPAEVSIV

SEQ ID NO: 67010 - protein, 9 aa, Homo sapiens
  misc_feature: Table A; Target 67010; HLA-C*01:02; PMEL; ENSG00000185664; TAA
MTPAEVSIV

SEQ ID NO: 67011 - protein, 9 aa, Homo sapiens
  misc_feature: Table A; Target 67011; HLA-C*07:01; PMEL; ENSG00000185664; TAA
MTPAEVSIV

SEQ ID NO: 67012 - protein, 9 aa, Homo sapiens
  misc_feature: Table A; Target 67012; HLA-C*12:03; PMEL; ENSG00000185664; TAA
MTPAEVSIV

SEQ ID NO: 67013 - protein, 10 aa, Homo sapiens
  misc_feature: Table A; Target 67013; HLA-A*68:02; PMEL; ENSG00000185664; TAA
MTPAEVSIVV

SEQ ID NO: 67014 - protein, 10 aa, Homo sapiens
  misc_feature: Table A; Target 67014; HLA-C*07:02; PMEL; ENSG00000185664; TAA
MTPAEVSIVV

SEQ ID NO: 67015 - protein, 11 aa, Homo sapiens
  misc_feature: Table A; Target 67015; HLA-A*02:07; PMEL; ENSG00000185664; TAA
MTPAEVSIVVL

SEQ ID NO: 67016 - protein, 11 aa, Homo sapiens
  misc_feature: Table A; Target 67016; HLA-A*31:01; PMEL; ENSG00000185664; TAA
MTPAEVSIVVL

SEQ ID NO: 67017 - protein, 11 aa, Homo sapiens
  misc_feature: Table A; Target 67017; HLA-A*33:03; PMEL; ENSG00000185664; TAA
MTPAEVSIVVL

SEQ ID NO: 67018 - protein, 11 aa, Homo sapiens
  misc_feature: Table A; Target 67018; HLA-A*68:01; PMEL; ENSG00000185664; TAA
MTPAEVSIVVL

SEQ ID NO: 67019 - protein, 11 aa, Homo sapiens
  misc_feature: Table A; Target 67019; HLA-A*68:02; PMEL; ENSG00000185664; TAA
MTPAEVSIVVL

SEQ ID NO: 67020 - protein, 11 aa, Homo sapiens
  misc_feature: Table A; Target 67020; HLA-B*35:03; PMEL; ENSG00000185664; TAA
MTPAEVSIVVL

SEQ ID NO: 67021 - protein, 11 aa, Homo sapiens
  misc_feature: Table A; Target 67021; HLA-C*04:01; PMEL; ENSG00000185664; TAA
MTPAEVSIVVL

SEQ ID NO: 67022 - protein, 11 aa, Homo sapiens
  misc_feature: Table A; Target 67022; HLA-C*07:01; PMEL; ENSG00000185664; TAA
MTPAEVSIVVL

SEQ ID NO: 67023 - protein, 11 aa, Homo sapiens
  misc_feature: Table A; Target 67023; HLA-C*07:02; PMEL; ENSG00000185664; TAA
MTPAEVSIVVL

SEQ ID NO: 67024 - protein, 11 aa, Homo sapiens
  misc_feature: Table A; Target 67024; HLA-C*07:04; PMEL; ENSG00000185664; TAA
MTPAEVSIVVL

SEQ ID NO: 67025 - protein, 11 aa, Homo sapiens
  misc_feature: Table A; Target 67025; HLA-C*12:03; PMEL; ENSG00000185664; TAA
MTPAEVSIVVL

SEQ ID NO: 67026 - protein, 8 aa, Homo sapiens
  misc_feature: Table A; Target 67026; HLA-B*08:01; PMEL; ENSG00000185664; TAA
MTPEKVPV

SEQ ID NO: 67027 - protein, 10 aa, Homo sapiens
  misc_feature: Table A; Target 67027; HLA-C*07:02; PMEL; ENSG00000185664; TAA
MTPEKVPVSE

SEQ ID NO: 67028 - protein, 11 aa, Homo sapiens
  misc_feature: Table A; Target 67028; HLA-A*02:07; PMEL; ENSG00000185664; TAA
MTPEKVPVSEV

SEQ ID NO: 67029 - protein, 11 aa, Homo sapiens
  misc_feature: Table A; Target 67029; HLA-A*68:02; PMEL; ENSG00000185664; TAA
MTPEKVPVSEV

SEQ ID NO: 67030 - protein, 8 aa, Homo sapiens
  misc_feature: Table A; Target 67030; HLA-B*07:02; PMEL; ENSG00000185664; TAA
NASFSIAL

SEQ ID NO: 67031 - protein, 8 aa, Homo sapiens
  misc_feature: Table A; Target 67031; HLA-B*08:01; PMEL; ENSG00000185664; TAA
NASFSIAL

SEQ ID NO: 67032 - protein, 8 aa, Homo sapiens
  misc_feature: Table A; Target 67032; HLA-B*27:05; PMEL; ENSG00000185664; TAA
NASFSIAL

SEQ ID NO: 67033 - protein, 8 aa, Homo sapiens
  misc_feature: Table A; Target 67033; HLA-B*35:01; PMEL; ENSG00000185664; TAA
NASFSIAL

SEQ ID NO: 67034 - protein, 8 aa, Homo sapiens
  misc_feature: Table A; Target 67034; HLA-B*35:03; PMEL; ENSG00000185664; TAA
NASFSIAL

SEQ ID NO: 67035 - protein, 8 aa, Homo sapiens
  misc_feature: Table A; Target 67035; HLA-B*39:01; PMEL; ENSG00000185664; TAA
NASFSIAL

SEQ ID NO: 67036 - protein, 8 aa, Homo sapiens
  misc_feature: Table A; Target 67036; HLA-C*01:02; PMEL; ENSG00000185664; TAA
NASFSIAL

SEQ ID NO: 67037 - protein, 8 aa, Homo sapiens
  misc_feature: Table A; Target 67037; HLA-C*03:03; PMEL; ENSG00000185664; TAA
NASFSIAL

SEQ ID NO: 67038 - protein, 8 aa, Homo sapiens
  misc_feature: Table A; Target 67038; HLA-C*03:04; PMEL; ENSG00000185664; TAA
NASFSIAL

SEQ ID NO: 67039 - protein, 8 aa, Homo sapiens
  misc_feature: Table A; Target 67039; HLA-C*05:01; PMEL; ENSG00000185664; TAA
NASFSIAL

SEQ ID NO: 67040 - protein, 8 aa, Homo sapiens
  misc_feature: Table A; Target 67040; HLA-C*07:02; PMEL; ENSG00000185664; TAA
NASFSIAL

SEQ ID NO: 67041 - protein, 8 aa, Homo sapiens
  misc_feature: Table A; Target 67041; HLA-C*07:04; PMEL; ENSG00000185664; TAA
NASFSIAL

SEQ ID NO: 67042 - protein, 8 aa, Homo sapiens
  misc_feature: Table A; Target 67042; HLA-C*14:02; PMEL; ENSG00000185664; TAA
NASFSIAL

SEQ ID NO: 67043 - protein, 8 aa, Homo sapiens
  misc_feature: Table A; Target 67043; HLA-C*16:01; PMEL; ENSG00000185664; TAA
NASFSIAL

SEQ ID NO: 67044 - protein, 10 aa, Homo sapiens
  misc_feature: Table A; Target 67044; HLA-A*23:01; PMEL; ENSG00000185664; TAA
NASFSIALNF

SEQ ID NO: 67045 - protein, 10 aa, Homo sapiens
  misc_feature: Table A; Target 67045; HLA-A*24:02; PMEL; ENSG00000185664; TAA
NASFSIALNF

SEQ ID NO: 67046 - protein, 10 aa, Homo sapiens
  misc_feature: Table A; Target 67046; HLA-A*29:02; PMEL; ENSG00000185664; TAA
NASFSIALNF

SEQ ID NO: 67047 - protein, 10 aa, Homo sapiens
  misc_feature: Table A; Target 67047; HLA-A*68:02; PMEL; ENSG00000185664; TAA
NASFSIALNF

SEQ ID NO: 67048 - protein, 10 aa, Homo sapiens
  misc_feature: Table A; Target 67048; HLA-B*27:02; PMEL; ENSG00000185664; TAA
NASFSIALNF

SEQ ID NO: 67049 - protein, 10 aa, Homo sapiens
  misc_feature: Table A; Target 67049; HLA-B*35:01; PMEL; ENSG00000185664; TAA
NASFSIALNF

SEQ ID NO: 67050 - protein, 8 aa, Homo sapiens
  misc_feature: Table A; Target 67050; HLA-C*07:01; PMEL; ENSG00000185664; TAA
NDGPTLIG

SEQ ID NO: 67051 - protein, 8 aa, Homo sapiens
  misc_feature: Table A; Target 67051; HLA-C*12:03; PMEL; ENSG00000185664; TAA
NDGPTLIG

SEQ ID NO: 67052 - protein, 10 aa, Homo sapiens
  misc_feature: Table A; Target 67052; HLA-C*07:01; PMEL; ENSG00000185664; TAA
NDGPTLIGAN

SEQ ID NO: 67053 - protein, 9 aa, Homo sapiens
  misc_feature: Table A; Target 67053; HLA-C*01:02; PMEL; ENSG00000185664; TAA
NFPGSQKVL

SEQ ID NO: 67054 - protein, 9 aa, Homo sapiens
  misc_feature: Table A; Target 67054; HLA-A*31:01; PMEL; ENSG00000185664; TAA
NQDWLGVSR

SEQ ID NO: 67055 - protein, 8 aa, Homo sapiens
  misc_feature: Table A; Target 67055; HLA-A*02:07; PMEL; ENSG00000185664; TAA
NQPLTFAL

SEQ ID NO: 67056 - protein, 8 aa, Homo sapiens
  misc_feature: Table A; Target 67056; HLA-B*07:02; PMEL; ENSG00000185664; TAA
NQPLTFAL

SEQ ID NO: 67057 - protein, 8 aa, Homo sapiens
  misc_feature: Table A; Target 67057; HLA-B*08:01; PMEL; ENSG00000185664; TAA
NQPLTFAL

SEQ ID NO: 67058 - protein, 8 aa, Homo sapiens
  misc_feature: Table A; Target 67058; HLA-B*13:02; PMEL; ENSG00000185664; TAA
NQPLTFAL

SEQ ID NO: 67059 - protein, 8 aa, Homo sapiens
  misc_feature: Table A; Target 67059; HLA-B*37:01; PMEL; ENSG00000185664; TAA
NQPLTFAL

SEQ ID NO: 67060 - protein, 8 aa, Homo sapiens
  misc_feature: Table A; Target 67060; HLA-C*01:02; PMEL; ENSG00000185664; TAA
NQPLTFAL

SEQ ID NO: 67061 - protein, 8 aa, Homo sapiens
  misc_feature: Table A; Target 67061; HLA-C*14:02; PMEL; ENSG00000185664; TAA
NQPLTFAL

SEQ ID NO: 67062 - protein, 9 aa, Homo sapiens
  misc_feature: Table A; Target 67062; HLA-A*24:02; PMEL; ENSG00000185664; TAA
NQPLTFALQ

SEQ ID NO: 67063 - protein, 9 aa, Homo sapiens
  misc_feature: Table A; Target 67063; HLA-A*33:01; PMEL; ENSG00000185664; TAA
NSLAVVSTQ

SEQ ID NO: 67064 - protein, 9 aa, Homo sapiens
  misc_feature: Table A; Target 67064; HLA-C*07:01; PMEL; ENSG00000185664; TAA
NSLAVVSTQ

SEQ ID NO: 67065 - protein, 10 aa, Homo sapiens
  misc_feature: Table A; Target 67065; HLA-C*01:02; PMEL; ENSG00000185664; TAA
NSPLLSGQQV

SEQ ID NO: 67066 - protein, 10 aa, Homo sapiens
  misc_feature: Table A; Target 67066; HLA-C*07:01; PMEL; ENSG00000185664; TAA
NSPLLSGQQV

SEQ ID NO: 67067 - protein, 10 aa, Homo sapiens
  misc_feature: Table A; Target 67067; HLA-C*07:02; PMEL; ENSG00000185664; TAA
NSPLLSGQQV

SEQ ID NO: 67068 - protein, 9 aa, Homo sapiens
  misc_feature: Table A; Target 67068; HLA-A*02:03; PMEL; ENSG00000185664; TAA
NTIINGSQV

SEQ ID NO: 67069 - protein, 9 aa, Homo sapiens
  misc_feature: Table A; Target 67069; HLA-A*26:01; PMEL; ENSG00000185664; TAA
NTIINGSQV

SEQ ID NO: 67070 - protein, 9 aa, Homo sapiens
  misc_feature: Table A; Target 67070; HLA-A*68:02; PMEL; ENSG00000185664; TAA
NTIINGSQV

SEQ ID NO: 67071 - protein, 9 aa, Homo sapiens
  misc_feature: Table A; Target 67071; HLA-C*01:02; PMEL; ENSG00000185664; TAA
NTIINGSQV

SEQ ID NO: 67072 - protein, 9 aa, Homo sapiens
  misc_feature: Table A; Target 67072; HLA-C*03:03; PMEL; ENSG00000185664; TAA
NTIINGSQV

SEQ ID NO: 67073 - protein, 9 aa, Homo sapiens
  misc_feature: Table A; Target 67073; HLA-C*03:04; PMEL; ENSG00000185664; TAA
NTIINGSQV

SEQ ID NO: 67074 - protein, 9 aa, Homo sapiens
  misc_feature: Table A; Target 67074; HLA-C*16:02; PMEL; ENSG00000185664; TAA
NTIINGSQV

SEQ ID NO: 67075 - protein, 10 aa, Homo sapiens
  misc_feature: Table A; Target 67075; HLA-A*01:01; PMEL; ENSG00000185664; TAA
NTIINGSQVW

SEQ ID NO: 67076 - protein, 10 aa, Homo sapiens
  misc_feature: Table A; Target 67076; HLA-A*24:02; PMEL; ENSG00000185664; TAA
NTIINGSQVW

SEQ ID NO: 67077 - protein, 10 aa, Homo sapiens
  misc_feature: Table A; Target 67077; HLA-A*25:01; PMEL; ENSG00000185664; TAA
NTIINGSQVW

SEQ ID NO: 67078 - protein, 10 aa, Homo sapiens
  misc_feature: Table A; Target 67078; HLA-A*26:01; PMEL; ENSG00000185664; TAA
NTIINGSQVW

SEQ ID NO: 67079 - protein, 10 aa, Homo sapiens
  misc_feature: Table A; Target 67079; HLA-A*32:01; PMEL; ENSG00000185664; TAA
NTIINGSQVW

SEQ ID NO: 67080 - protein, 10 aa, Homo sapiens
  misc_feature: Table A; Target 67080; HLA-B*44:02; PMEL; ENSG00000185664; TAA
NTIINGSQVW

SEQ ID NO: 67081 - protein, 10 aa, Homo sapiens
  misc_feature: Table A; Target 67081; HLA-B*44:03; PMEL; ENSG00000185664; TAA
NTIINGSQVW

SEQ ID NO: 67082 - protein, 10 aa, Homo sapiens
  misc_feature: Table A; Target 67082; HLA-B*57:01; PMEL; ENSG00000185664; TAA
NTIINGSQVW

SEQ ID NO: 67083 - protein, 10 aa, Homo sapiens
  misc_feature: Table A; Target 67083; HLA-B*58:01; PMEL; ENSG00000185664; TAA
NTIINGSQVW

SEQ ID NO: 67084 - protein, 10 aa, Homo sapiens
  misc_feature: Table A; Target 67084; HLA-C*16:04; PMEL; ENSG00000185664; TAA
NTIINGSQVW

SEQ ID NO: 67085 - protein, 10 aa, Homo sapiens
  misc_feature: Table A; Target 67085; HLA-B*07:02; PMEL; ENSG00000185664; TAA
NVSLADTNSL

SEQ ID NO: 67086 - protein, 10 aa, Homo sapiens
  misc_feature: Table A; Target 67086; HLA-B*35:03; PMEL; ENSG00000185664; TAA
NVSLADTNSL

SEQ ID NO: 67087 - protein, 10 aa, Homo sapiens
  misc_feature: Table A; Target 67087; HLA-B*38:01; PMEL; ENSG00000185664; TAA
NVSLADTNSL

SEQ ID NO: 67088 - protein, 10 aa, Homo sapiens
  misc_feature: Table A; Target 67088; HLA-B*39:01; PMEL; ENSG00000185664; TAA
NVSLADTNSL

SEQ ID NO: 67089 - protein, 10 aa, Homo sapiens
  misc_feature: Table A; Target 67089; HLA-C*01:02; PMEL; ENSG00000185664; TAA
NVSLADTNSL

SEQ ID NO: 67090 - protein, 9 aa, Homo sapiens
  misc_feature: Table A; Target 67090; HLA-B*35:03; PMEL; ENSG00000185664; TAA
PAEVSIVVL

SEQ ID NO: 67091 - protein, 9 aa, Homo sapiens
  misc_feature: Table A; Target 67091; HLA-C*04:01; PMEL; ENSG00000185664; TAA
PAEVSIVVL

SEQ ID NO: 67092 - protein, 9 aa, Homo sapiens
  misc_feature: Table A; Target 67092; HLA-C*05:01; PMEL; ENSG00000185664; TAA
PAEVSIVVL

SEQ ID NO: 67093 - protein, 9 aa, Homo sapiens
  misc_feature: Table A; Target 67093; HLA-C*07:04; PMEL; ENSG00000185664; TAA
PAEVSIVVL

SEQ ID NO: 67094 - protein, 8 aa, Homo sapiens
  misc_feature: Table A; Target 67094; HLA-C*07:04; PMEL; ENSG00000185664; TAA
PEATGMTP

SEQ ID NO: 67095 - protein, 9 aa, Homo sapiens
  misc_feature: Table A; Target 67095; HLA-B*49:01; PMEL; ENSG00000185664; TAA
PEGPDASSI

SEQ ID NO: 67096 - protein, 9 aa, Homo sapiens
  misc_feature: Table A; Target 67096; HLA-B*40:02; PMEL; ENSG00000185664; TAA
PEKVPVSEV

SEQ ID NO: 67097 - protein, 9 aa, Homo sapiens
  misc_feature: Table A; Target 67097; HLA-B*49:01; PMEL; ENSG00000185664; TAA
PEKVPVSEV

SEQ ID NO: 67098 - protein, 10 aa, Homo sapiens
  misc_feature: Table A; Target 67098; HLA-C*07:02; PMEL; ENSG00000185664; TAA
PEKVPVSEVM

SEQ ID NO: 67099 - protein, 11 aa, Homo sapiens
  misc_feature: Table A; Target 67099; HLA-C*07:02; PMEL; ENSG00000185664; TAA
PEKVPVSEVMG

SEQ ID NO: 67100 - protein, 9 aa, Homo sapiens
  misc_feature: Table A; Target 67100; HLA-A*30:01; PMEL; ENSG00000185664; TAA
PEWTEAQRL

SEQ ID NO: 67101 - protein, 9 aa, Homo sapiens
  misc_feature: Table A; Target 67101; HLA-B*40:01; PMEL; ENSG00000185664; TAA
PEWTEAQRL

SEQ ID NO: 67102 - protein, 9 aa, Homo sapiens
  misc_feature: Table A; Target 67102; HLA-B*44:02; PMEL; ENSG00000185664; TAA
PEWTEAQRL

SEQ ID NO: 67103 - protein, 9 aa, Homo sapiens
  misc_feature: Table A; Target 67103; HLA-B*44:03; PMEL; ENSG00000185664; TAA
PEWTEAQRL

SEQ ID NO: 67104 - protein, 9 aa, Homo sapiens
  misc_feature: Table A; Target 67104; HLA-C*04:01; PMEL; ENSG00000185664; TAA
PFSVSVSQL

SEQ ID NO: 67105 - protein, 9 aa, Homo sapiens
  misc_feature: Table A; Target 67105; HLA-C*14:02; PMEL; ENSG00000185664; TAA
PFSVSVSQL

SEQ ID NO: 67106 - protein, 8 aa, Homo sapiens
  misc_feature: Table A; Target 67106; HLA-C*04:01; PMEL; ENSG00000185664; TAA
PGPVTAQV

SEQ ID NO: 67107 - protein, 10 aa, Homo sapiens
  misc_feature: Table A; Target 67107; HLA-C*07:02; PMEL; ENSG00000185664; TAA
PGPVTAQVVL

SEQ ID NO: 67108 - protein, 9 aa, Homo sapiens
  misc_feature: Table A; Target 67108; HLA-A*24:02; PMEL; ENSG00000185664; TAA
PIGENSPLL

SEQ ID NO: 67109 - protein, 9 aa, Homo sapiens
  misc_feature: Table A; Target 67109; HLA-C*06:02; PMEL; ENSG00000185664; TAA
PIGENSPLL

SEQ ID NO: 67110 - protein, 10 aa, Homo sapiens
  misc_feature: Table A; Target 67110; HLA-C*07:02; PMEL; ENSG00000185664; TAA
PIGENSPLLS

SEQ ID NO: 67111 - protein, 9 aa, Homo sapiens
  misc_feature: Table A; Target 67111; HLA-B*15:01; PMEL; ENSG00000185664; TAA
PLAHSSSAF

SEQ ID NO: 67112 - protein, 9 aa, Homo sapiens
  misc_feature: Table A; Target 67112; HLA-C*07:04; PMEL; ENSG00000185664; TAA
PLAHSSSAF

SEQ ID NO: 67113 - protein, 9 aa, Homo sapiens
  misc_feature: Table A; Target 67113; HLA-A*01:01; PMEL; ENSG00000185664; TAA
PLDCVLYRY

SEQ ID NO: 67114 - protein, 9 aa, Homo sapiens
  misc_feature: Table A; Target 67114; HLA-A*02:03; PMEL; ENSG00000185664; TAA
PLIVGILLV

SEQ ID NO: 67115 - protein, 9 aa, Homo sapiens
  misc_feature: Table A; Target 67115; HLA-A*02:01; PMEL; ENSG00000185664; TAA
PLLDGTATL

SEQ ID NO: 67116 - protein, 9 aa, Homo sapiens
  misc_feature: Table A; Target 67116; HLA-A*02:03; PMEL; ENSG00000185664; TAA
PLLDGTATL

SEQ ID NO: 67117 - protein, 9 aa, Homo sapiens
  misc_feature: Table A; Target 67117; HLA-A*02:04; PMEL; ENSG00000185664; TAA
PLLDGTATL

SEQ ID NO: 67118 - protein, 9 aa, Homo sapiens
  misc_feature: Table A; Target 67118; HLA-A*02:07; PMEL; ENSG00000185664; TAA
PLLDGTATL

SEQ ID NO: 67119 - protein, 9 aa, Homo sapiens
  misc_feature: Table A; Target 67119; HLA-A*23:01; PMEL; ENSG00000185664; TAA
PLLDGTATL

SEQ ID NO: 67120 - protein, 9 aa, Homo sapiens
  misc_feature: Table A; Target 67120; HLA-A*24:02; PMEL; ENSG00000185664; TAA
PLLDGTATL

SEQ ID NO: 67121 - protein, 9 aa, Homo sapiens
  misc_feature: Table A; Target 67121; HLA-B*15:01; PMEL; ENSG00000185664; TAA
PLLDGTATL

SEQ ID NO: 67122 - protein, 9 aa, Homo sapiens
  misc_feature: Table A; Target 67122; HLA-B*55:01; PMEL; ENSG00000185664; TAA
PLLDGTATL

SEQ ID NO: 67123 - protein, 9 aa, Homo sapiens
  misc_feature: Table A; Target 67123; HLA-C*01:02; PMEL; ENSG00000185664; TAA
PLLDGTATL

SEQ ID NO: 67124 - protein, 9 aa, Homo sapiens
  misc_feature: Table A; Target 67124; HLA-C*14:02; PMEL; ENSG00000185664; TAA
PLLDGTATL

SEQ ID NO: 67125 - protein, 11 aa, Homo sapiens
  misc_feature: Table A; Target 67125; HLA-A*02:01; PMEL; ENSG00000185664; TAA
PLLDGTATLRL

SEQ ID NO: 67126 - protein, 11 aa, Homo sapiens
  misc_feature: Table A; Target 67126; HLA-A*02:04; PMEL; ENSG00000185664; TAA
PLLDGTATLRL

SEQ ID NO: 67127 - protein, 11 aa, Homo sapiens
  misc_feature: Table A; Target 67127; HLA-A*24:02; PMEL; ENSG00000185664; TAA
PLLDGTATLRL

SEQ ID NO: 67128 - protein, 8 aa, Homo sapiens
  misc_feature: Table A; Target 67128; HLA-C*04:01; PMEL; ENSG00000185664; TAA
PLLSGQQV

SEQ ID NO: 67129 - protein, 8 aa, Homo sapiens
  misc_feature: Table A; Target 67129; HLA-C*06:02; PMEL; ENSG00000185664; TAA
PLLSGQQV

SEQ ID NO: 67130 - protein, 8 aa, Homo sapiens
  misc_feature: Table A; Target 67130; HLA-C*07:04; PMEL; ENSG00000185664; TAA
PNTTAGQV

SEQ ID NO: 67131 - protein, 8 aa, Homo sapiens
  misc_feature: Table A; Target 67131; HLA-C*12:03; PMEL; ENSG00000185664; TAA
PSGTTSVQ

SEQ ID NO: 67132 - protein, 9 aa, Homo sapiens
  misc_feature: Table A; Target 67132; HLA-C*07:02; PMEL; ENSG00000185664; TAA
PSPACQLVL

SEQ ID NO: 67133 - protein, 8 aa, Homo sapiens
  misc_feature: Table A; Target 67133; HLA-C*05:01; PMEL; ENSG00000185664; TAA
PTAESTGM

SEQ ID NO: 67134 - protein, 10 aa, Homo sapiens
  misc_feature: Table A; Target 67134; HLA-A*23:01; PMEL; ENSG00000185664; TAA
PTLIGANASF

SEQ ID NO: 67135 - protein, 10 aa, Homo sapiens
  misc_feature: Table A; Target 67135; HLA-A*24:02; PMEL; ENSG00000185664; TAA
PTLIGANASF

SEQ ID NO: 67136 - protein, 10 aa, Homo sapiens
  misc_feature: Table A; Target 67136; HLA-C*04:01; PMEL; ENSG00000185664; TAA
PTLIGANASF

SEQ ID NO: 67137 - protein, 10 aa, Homo sapiens
  misc_feature: Table A; Target 67137; HLA-C*06:02; PMEL; ENSG00000185664; TAA
PTLIGANASF

SEQ ID NO: 67138 - protein, 10 aa, Homo sapiens
  misc_feature: Table A; Target 67138; HLA-C*07:01; PMEL; ENSG00000185664; TAA
PTLIGANASF

SEQ ID NO: 67139 - protein, 10 aa, Homo sapiens
  misc_feature: Table A; Target 67139; HLA-C*07:02; PMEL; ENSG00000185664; TAA
PTLIGANASF

SEQ ID NO: 67140 - protein, 10 aa, Homo sapiens
  misc_feature: Table A; Target 67140; HLA-C*07:02; PMEL; ENSG00000185664; TAA
PVLPSPACQL

SEQ ID NO: 67141 - protein, 10 aa, Homo sapiens
  misc_feature: Table A; Target 67141; HLA-A*68:02; PMEL; ENSG00000185664; TAA
PVSEVMGTTL

SEQ ID NO: 67142 - protein, 10 aa, Homo sapiens
  misc_feature: Table A; Target 67142; HLA-B*07:02; PMEL; ENSG00000185664; TAA
PVSEVMGTTL

SEQ ID NO: 67143 - protein, 10 aa, Homo sapiens
  misc_feature: Table A; Target 67143; HLA-B*27:05; PMEL; ENSG00000185664; TAA
PVSEVMGTTL

SEQ ID NO: 67144 - protein, 10 aa, Homo sapiens
  misc_feature: Table A; Target 67144; HLA-B*39:01; PMEL; ENSG00000185664; TAA
PVSEVMGTTL

SEQ ID NO: 67145 - protein, 10 aa, Homo sapiens
  misc_feature: Table A; Target 67145; HLA-C*04:01; PMEL; ENSG00000185664; TAA
PVSEVMGTTL

SEQ ID NO: 67146 - protein, 10 aa, Homo sapiens
  misc_feature: Table A; Target 67146; HLA-C*06:02; PMEL; ENSG00000185664; TAA
PVSEVMGTTL

SEQ ID NO: 67147 - protein, 10 aa, Homo sapiens
  misc_feature: Table A; Target 67147; HLA-C*07:02; PMEL; ENSG00000185664; TAA
PVSEVMGTTL

SEQ ID NO: 67148 - protein, 10 aa, Homo sapiens
  misc_feature: Table A; Target 67148; HLA-B*07:02; PMEL; ENSG00000185664; TAA
PVSGLSIGTG

SEQ ID NO: 67149 - protein, 10 aa, Homo sapiens
  misc_feature: Table A; Target 67149; HLA-C*04:01; PMEL; ENSG00000185664; TAA
PVSGLSIGTG

SEQ ID NO: 67150 - protein, 10 aa, Homo sapiens
  misc_feature: Table A; Target 67150; HLA-C*07:02; PMEL; ENSG00000185664; TAA
PVSGLSIGTG

SEQ ID NO: 67151 - protein, 10 aa, Homo sapiens
  misc_feature: Table A; Target 67151; HLA-C*12:03; PMEL; ENSG00000185664; TAA
PVSGLSIGTG

SEQ ID NO: 67152 - protein, 11 aa, Homo sapiens
  misc_feature: Table A; Target 67152; HLA-A*31:01; PMEL; ENSG00000185664; TAA
PVSGLSIGTGR

SEQ ID NO: 67153 - protein, 11 aa, Homo sapiens
  misc_feature: Table A; Target 67153; HLA-A*68:01; PMEL; ENSG00000185664; TAA
PVSGLSIGTGR

SEQ ID NO: 67154 - protein, 8 aa, Homo sapiens
  misc_feature: Table A; Target 67154; HLA-C*07:02; PMEL; ENSG00000185664; TAA
PVTAQVVL

SEQ ID NO: 67155 - protein, 8 aa, Homo sapiens
  misc_feature: Table A; Target 67155; HLA-C*07:04; PMEL; ENSG00000185664; TAA
PVTAQVVL

SEQ ID NO: 67156 - protein, 9 aa, Homo sapiens
  misc_feature: Table A; Target 67156; HLA-A*32:01; PMEL; ENSG00000185664; TAA
QAAIPLTSC

SEQ ID NO: 67157 - protein, 9 aa, Homo sapiens
  misc_feature: Table A; Target 67157; HLA-B*07:02; PMEL; ENSG00000185664; TAA
QAAIPLTSC

SEQ ID NO: 67158 - protein, 9 aa, Homo sapiens
  misc_feature: Table A; Target 67158; HLA-B*15:01; PMEL; ENSG00000185664; TAA
QAAIPLTSC

SEQ ID NO: 67159 - protein, 9 aa, Homo sapiens
  misc_feature: Table A; Target 67159; HLA-B*15:03; PMEL; ENSG00000185664; TAA
QAAIPLTSC

SEQ ID NO: 67160 - protein, 9 aa, Homo sapiens
  misc_feature: Table A; Target 67160; HLA-B*27:05; PMEL; ENSG00000185664; TAA
QAAIPLTSC

SEQ ID NO: 67161 - protein, 9 aa, Homo sapiens
  misc_feature: Table A; Target 67161; HLA-B*35:01; PMEL; ENSG00000185664; TAA
QAAIPLTSC

SEQ ID NO: 67162 - protein, 9 aa, Homo sapiens
  misc_feature: Table A; Target 67162; HLA-B*35:03; PMEL; ENSG00000185664; TAA
QAAIPLTSC

SEQ ID NO: 67163 - protein, 9 aa, Homo sapiens
  misc_feature: Table A; Target 67163; HLA-B*40:02; PMEL; ENSG00000185664; TAA
QAAIPLTSC

SEQ ID NO: 67164 - protein, 9 aa, Homo sapiens
  misc_feature: Table A; Target 67164; HLA-B*46:01; PMEL; ENSG00000185664; TAA
QAAIPLTSC

SEQ ID NO: 67165 - protein, 9 aa, Homo sapiens
  misc_feature: Table A; Target 67165; HLA-B*51:01; PMEL; ENSG00000185664; TAA
QAAIPLTSC

SEQ ID NO: 67166 - protein, 9 aa, Homo sapiens
  misc_feature: Table A; Target 67166; HLA-B*54:01; PMEL; ENSG00000185664; TAA
QAAIPLTSC

SEQ ID NO: 67167 - protein, 9 aa, Homo sapiens
  misc_feature: Table A; Target 67167; HLA-B*55:01; PMEL; ENSG00000185664; TAA
QAAIPLTSC

SEQ ID NO: 67168 - protein, 9 aa, Homo sapiens
  misc_feature: Table A; Target 67168; HLA-B*56:01; PMEL; ENSG00000185664; TAA
QAAIPLTSC

SEQ ID NO: 67169 - protein, 9 aa, Homo sapiens
  misc_feature: Table A; Target 67169; HLA-B*58:01; PMEL; ENSG00000185664; TAA
QAAIPLTSC

SEQ ID NO: 67170 - protein, 9 aa, Homo sapiens
  misc_feature: Table A; Target 67170; HLA-C*01:02; PMEL; ENSG00000185664; TAA
QAAIPLTSC

SEQ ID NO: 67171 - protein, 9 aa, Homo sapiens
  misc_feature: Table A; Target 67171; HLA-C*02:02; PMEL; ENSG00000185664; TAA
QAAIPLTSC

SEQ ID NO: 67172 - protein, 9 aa, Homo sapiens
  misc_feature: Table A; Target 67172; HLA-C*03:03; PMEL; ENSG00000185664; TAA
QAAIPLTSC

SEQ ID NO: 67173 - protein, 9 aa, Homo sapiens
  misc_feature: Table A; Target 67173; HLA-C*03:04; PMEL; ENSG00000185664; TAA
QAAIPLTSC

SEQ ID NO: 67174 - protein, 9 aa, Homo sapiens
  misc_feature: Table A; Target 67174; HLA-C*06:02; PMEL; ENSG00000185664; TAA
QAAIPLTSC

SEQ ID NO: 67175 - protein, 9 aa, Homo sapiens
  misc_feature: Table A; Target 67175; HLA-C*07:01; PMEL; ENSG00000185664; TAA
QAAIPLTSC

SEQ ID NO: 67176 - protein, 9 aa, Homo sapiens
  misc_feature: Table A; Target 67176; HLA-C*07:02; PMEL; ENSG00000185664; TAA
QAAIPLTSC

SEQ ID NO: 67177 - protein, 9 aa, Homo sapiens
  misc_feature: Table A; Target 67177; HLA-C*07:04; PMEL; ENSG00000185664; TAA
QAAIPLTSC

SEQ ID NO: 67178 - protein, 9 aa, Homo sapiens
  misc_feature: Table A; Target 67178; HLA-C*12:03; PMEL; ENSG00000185664; TAA
QAAIPLTSC

SEQ ID NO: 67179 - protein, 9 aa, Homo sapiens
  misc_feature: Table A; Target 67179; HLA-C*16:01; PMEL; ENSG00000185664; TAA
QAAIPLTSC

SEQ ID NO: 67180 - protein, 9 aa, Homo sapiens
  misc_feature: Table A; Target 67180; HLA-C*16:02; PMEL; ENSG00000185664; TAA
QAAIPLTSC

SEQ ID NO: 67181 - protein, 10 aa, Homo sapiens
  misc_feature: Table A; Target 67181; HLA-B*07:02; PMEL; ENSG00000185664; TAA
QAAIPLTSCG

SEQ ID NO: 67182 - protein, 10 aa, Homo sapiens
  misc_feature: Table A; Target 67182; HLA-B*27:05; PMEL; ENSG00000185664; TAA
QAAIPLTSCG

SEQ ID NO: 67183 - protein, 10 aa, Homo sapiens
  misc_feature: Table A; Target 67183; HLA-C*04:01; PMEL; ENSG00000185664; TAA
QAAIPLTSCG

SEQ ID NO: 67184 - protein, 10 aa, Homo sapiens
  misc_feature: Table A; Target 67184; HLA-C*06:02; PMEL; ENSG00000185664; TAA
QAAIPLTSCG

SEQ ID NO: 67185 - protein, 10 aa, Homo sapiens
  misc_feature: Table A; Target 67185; HLA-C*07:01; PMEL; ENSG00000185664; TAA
QAAIPLTSCG

SEQ ID NO: 67186 - protein, 10 aa, Homo sapiens
  misc_feature: Table A; Target 67186; HLA-C*07:02; PMEL; ENSG00000185664; TAA
QAAIPLTSCG

SEQ ID NO: 67187 - protein, 10 aa, Homo sapiens
  misc_feature: Table A; Target 67187; HLA-C*12:03; PMEL; ENSG00000185664; TAA
QAAIPLTSCG

SEQ ID NO: 67188 - protein, 11 aa, Homo sapiens
  misc_feature: Table A; Target 67188; HLA-C*06:02; PMEL; ENSG00000185664; TAA
QAAIPLTSCGS

SEQ ID NO: 67189 - protein, 11 aa, Homo sapiens
  misc_feature: Table A; Target 67189; HLA-C*07:01; PMEL; ENSG00000185664; TAA
QAAIPLTSCGS

SEQ ID NO: 67190 - protein, 9 aa, Homo sapiens
  misc_feature: Table A; Target 67190; HLA-C*01:02; PMEL; ENSG00000185664; TAA
QAPTAEPSG

SEQ ID NO: 67191 - protein, 11 aa, Homo sapiens
  misc_feature: Table A; Target 67191; HLA-C*07:01; PMEL; ENSG00000185664; TAA
QAPTAEPSGTT

SEQ ID NO: 67192 - protein, 11 aa, Homo sapiens
  misc_feature: Table A; Target 67192; HLA-A*23:01; PMEL; ENSG00000185664; TAA
QAVPSGEGDAF

SEQ ID NO: 67193 - protein, 11 aa, Homo sapiens
  misc_feature: Table A; Target 67193; HLA-A*25:01; PMEL; ENSG00000185664; TAA
QAVPSGEGDAF

SEQ ID NO: 67194 - protein, 11 aa, Homo sapiens
  misc_feature: Table A; Target 67194; HLA-B*15:01; PMEL; ENSG00000185664; TAA
QAVPSGEGDAF

SEQ ID NO: 67195 - protein, 11 aa, Homo sapiens
  misc_feature: Table A; Target 67195; HLA-B*15:03; PMEL; ENSG00000185664; TAA
QAVPSGEGDAF

SEQ ID NO: 67196 - protein, 11 aa, Homo sapiens
  misc_feature: Table A; Target 67196; HLA-B*27:02; PMEL; ENSG00000185664; TAA
QAVPSGEGDAF

SEQ ID NO: 67197 - protein, 11 aa, Homo sapiens
  misc_feature: Table A; Target 67197; HLA-B*27:05; PMEL; ENSG00000185664; TAA
QAVPSGEGDAF

SEQ ID NO: 67198 - protein, 11 aa, Homo sapiens
  misc_feature: Table A; Target 67198; HLA-B*35:01; PMEL; ENSG00000185664; TAA
QAVPSGEGDAF

SEQ ID NO: 67199 - protein, 11 aa, Homo sapiens
  misc_feature: Table A; Target 67199; HLA-B*35:03; PMEL; ENSG00000185664; TAA
QAVPSGEGDAF

SEQ ID NO: 67200 - protein, 11 aa, Homo sapiens
  misc_feature: Table A; Target 67200; HLA-B*38:01; PMEL; ENSG00000185664; TAA
QAVPSGEGDAF

SEQ ID NO: 67201 - protein, 11 aa, Homo sapiens
  misc_feature: Table A; Target 67201; HLA-B*39:01; PMEL; ENSG00000185664; TAA
QAVPSGEGDAF

SEQ ID NO: 67202 - protein, 11 aa, Homo sapiens
  misc_feature: Table A; Target 67202; HLA-B*46:01; PMEL; ENSG00000185664; TAA
QAVPSGEGDAF

SEQ ID NO: 67203 - protein, 11 aa, Homo sapiens
  misc_feature: Table A; Target 67203; HLA-B*55:01; PMEL; ENSG00000185664; TAA
QAVPSGEGDAF

SEQ ID NO: 67204 - protein, 11 aa, Homo sapiens
  misc_feature: Table A; Target 67204; HLA-B*57:01; PMEL; ENSG00000185664; TAA
QAVPSGEGDAF

SEQ ID NO: 67205 - protein, 11 aa, Homo sapiens
  misc_feature: Table A; Target 67205; HLA-B*58:01; PMEL; ENSG00000185664; TAA
QAVPSGEGDAF

SEQ ID NO: 67206 - protein, 11 aa, Homo sapiens
  misc_feature: Table A; Target 67206; HLA-C*02:02; PMEL; ENSG00000185664; TAA
QAVPSGEGDAF

SEQ ID NO: 67207 - protein, 11 aa, Homo sapiens
  misc_feature: Table A; Target 67207; HLA-C*03:03; PMEL; ENSG00000185664; TAA
QAVPSGEGDAF

SEQ ID NO: 67208 - protein, 11 aa, Homo sapiens
  misc_feature: Table A; Target 67208; HLA-C*03:04; PMEL; ENSG00000185664; TAA
QAVPSGEGDAF

SEQ ID NO: 67209 - protein, 11 aa, Homo sapiens
  misc_feature: Table A; Target 67209; HLA-C*04:01; PMEL; ENSG00000185664; TAA
QAVPSGEGDAF

SEQ ID NO: 67210 - protein, 11 aa, Homo sapiens
  misc_feature: Table A; Target 67210; HLA-C*05:01; PMEL; ENSG00000185664; TAA
QAVPSGEGDAF

SEQ ID NO: 67211 - protein, 11 aa, Homo sapiens
  misc_feature: Table A; Target 67211; HLA-C*07:04; PMEL; ENSG00000185664; TAA
QAVPSGEGDAF

SEQ ID NO: 67212 - protein, 11 aa, Homo sapiens
  misc_feature: Table A; Target 67212; HLA-C*07:06; PMEL; ENSG00000185664; TAA
QAVPSGEGDAF

SEQ ID NO: 67213 - protein, 11 aa, Homo sapiens
  misc_feature: Table A; Target 67213; HLA-C*14:02; PMEL; ENSG00000185664; TAA
QAVPSGEGDAF

SEQ ID NO: 67214 - protein, 11 aa, Homo sapiens
  misc_feature: Table A; Target 67214; HLA-C*16:01; PMEL; ENSG00000185664; TAA
QAVPSGEGDAF

SEQ ID NO: 67215 - protein, 11 aa, Homo sapiens
  misc_feature: Table A; Target 67215; HLA-C*16:02; PMEL; ENSG00000185664; TAA
QAVPSGEGDAF

SEQ ID NO: 67216 - protein, 11 aa, Homo sapiens
  misc_feature: Table A; Target 67216; HLA-C*16:04; PMEL; ENSG00000185664; TAA
QAVPSGEGDAF

SEQ ID NO: 67217 - protein, 8 aa, Homo sapiens
  misc_feature: Table A; Target 67217; HLA-A*30:01; PMEL; ENSG00000185664; TAA
QDFSVPQL

SEQ ID NO: 67218 - protein, 8 aa, Homo sapiens
  misc_feature: Table A; Target 67218; HLA-B*18:01; PMEL; ENSG00000185664; TAA
QDFSVPQL

SEQ ID NO: 67219 - protein, 8 aa, Homo sapiens
  misc_feature: Table A; Target 67219; HLA-B*37:01; PMEL; ENSG00000185664; TAA
QDFSVPQL

SEQ ID NO: 67220 - protein, 8 aa, Homo sapiens
  misc_feature: Table A; Target 67220; HLA-B*40:01; PMEL; ENSG00000185664; TAA
QDFSVPQL

SEQ ID NO: 67221 - protein, 8 aa, Homo sapiens
  misc_feature: Table A; Target 67221; HLA-B*40:02; PMEL; ENSG00000185664; TAA
QDFSVPQL

SEQ ID NO: 67222 - protein, 8 aa, Homo sapiens
  misc_feature: Table A; Target 67222; HLA-B*44:03; PMEL; ENSG00000185664; TAA
QDFSVPQL

SEQ ID NO: 67223 - protein, 8 aa, Homo sapiens
  misc_feature: Table A; Target 67223; HLA-B*51:01; PMEL; ENSG00000185664; TAA
QDFSVPQL

SEQ ID NO: 67224 - protein, 8 aa, Homo sapiens
  misc_feature: Table A; Target 67224; HLA-C*06:02; PMEL; ENSG00000185664; TAA
QDFSVPQL

SEQ ID NO: 67225 - protein, 8 aa, Homo sapiens
  misc_feature: Table A; Target 67225; HLA-C*07:01; PMEL; ENSG00000185664; TAA
QDFSVPQL

SEQ ID NO: 67226 - protein, 8 aa, Homo sapiens
  misc_feature: Table A; Target 67226; HLA-C*12:03; PMEL; ENSG00000185664; TAA
QDFSVPQL

SEQ ID NO: 67227 - protein, 8 aa, Homo sapiens
  misc_feature: Table A; Target 67227; HLA-C*16:02; PMEL; ENSG00000185664; TAA
QDFSVPQL

SEQ ID NO: 67228 - protein, 10 aa, Homo sapiens
  misc_feature: Table A; Target 67228; HLA-A*30:01; PMEL; ENSG00000185664; TAA
QDWLGVSRQL

SEQ ID NO: 67229 - protein, 8 aa, Homo sapiens
  misc_feature: Table A; Target 67229; HLA-B*49:01; PMEL; ENSG00000185664; TAA
QEAGLGQV

SEQ ID NO: 67230 - protein, 10 aa, Homo sapiens
  misc_feature: Table A; Target 67230; HLA-A*30:01; PMEL; ENSG00000185664; TAA
QEAGLGQVPL

SEQ ID NO: 67231 - protein, 10 aa, Homo sapiens
  misc_feature: Table A; Target 67231; HLA-B*40:01; PMEL; ENSG00000185664; TAA
QEAGLGQVPL

SEQ ID NO: 67232 - protein, 10 aa, Homo sapiens
  misc_feature: Table A; Target 67232; HLA-B*40:02; PMEL; ENSG00000185664; TAA
QEAGLGQVPL

SEQ ID NO: 67233 - protein, 10 aa, Homo sapiens
  misc_feature: Table A; Target 67233; HLA-B*44:02; PMEL; ENSG00000185664; TAA
QEAGLGQVPL

SEQ ID NO: 67234 - protein, 10 aa, Homo sapiens
  misc_feature: Table A; Target 67234; HLA-B*44:03; PMEL; ENSG00000185664; TAA
QEAGLGQVPL

SEQ ID NO: 67235 - protein, 11 aa, Homo sapiens
  misc_feature: Table A; Target 67235; HLA-B*44:02; PMEL; ENSG00000185664; TAA
QEAGLGQVPLI

SEQ ID NO: 67236 - protein, 11 aa, Homo sapiens
  misc_feature: Table A; Target 67236; HLA-B*44:03; PMEL; ENSG00000185664; TAA
QEAGLGQVPLI

SEQ ID NO: 67237 - protein, 11 aa, Homo sapiens
  misc_feature: Table A; Target 67237; HLA-B*49:01; PMEL; ENSG00000185664; TAA
QEAGLGQVPLI

SEQ ID NO: 67238 - protein, 9 aa, Homo sapiens
  misc_feature: Table A; Target 67238; HLA-A*30:01; PMEL; ENSG00000185664; TAA
QETDDACIF

SEQ ID NO: 67239 - protein, 9 aa, Homo sapiens
  misc_feature: Table A; Target 67239; HLA-B*18:01; PMEL; ENSG00000185664; TAA
QETDDACIF

SEQ ID NO: 67240 - protein, 9 aa, Homo sapiens
  misc_feature: Table A; Target 67240; HLA-B*27:02; PMEL; ENSG00000185664; TAA
QETDDACIF

SEQ ID NO: 67241 - protein, 9 aa, Homo sapiens
  misc_feature: Table A; Target 67241; HLA-B*37:01; PMEL; ENSG00000185664; TAA
QETDDACIF

SEQ ID NO: 67242 - protein, 9 aa, Homo sapiens
  misc_feature: Table A; Target 67242; HLA-B*38:01; PMEL; ENSG00000185664; TAA
QETDDACIF

SEQ ID NO: 67243 - protein, 9 aa, Homo sapiens
  misc_feature: Table A; Target 67243; HLA-B*40:01; PMEL; ENSG00000185664; TAA
QETDDACIF

SEQ ID NO: 67244 - protein, 9 aa, Homo sapiens
  misc_feature: Table A; Target 67244; HLA-B*44:02; PMEL; ENSG00000185664; TAA
QETDDACIF

SEQ ID NO: 67245 - protein, 9 aa, Homo sapiens
  misc_feature: Table A; Target 67245; HLA-B*44:03; PMEL; ENSG00000185664; TAA
QETDDACIF

SEQ ID NO: 67246 - protein, 10 aa, Homo sapiens
  misc_feature: Table A; Target 67246; HLA-C*07:02; PMEL; ENSG00000185664; TAA
QGGLPKEACM

SEQ ID NO: 67247 - protein, 8 aa, Homo sapiens
  misc_feature: Table A; Target 67247; HLA-B*51:01; PMEL; ENSG00000185664; TAA
QGIESAEI

SEQ ID NO: 67248 - protein, 9 aa, Homo sapiens
  misc_feature: Table A; Target 67248; HLA-A*30:01; PMEL; ENSG00000185664; TAA
QGIESAEIL

SEQ ID NO: 67249 - protein, 9 aa, Homo sapiens
  misc_feature: Table A; Target 67249; HLA-B*35:03; PMEL; ENSG00000185664; TAA
QGIESAEIL

SEQ ID NO: 67250 - protein, 9 aa, Homo sapiens
  misc_feature: Table A; Target 67250; HLA-B*40:01; PMEL; ENSG00000185664; TAA
QGIESAEIL

SEQ ID NO: 67251 - protein, 10 aa, Homo sapiens
  misc_feature: Table A; Target 67251; HLA-A*01:01; PMEL; ENSG00000185664; TAA
QILKGGSGTY

SEQ ID NO: 67252 - protein, 10 aa, Homo sapiens
  misc_feature: Table A; Target 67252; HLA-A*25:01; PMEL; ENSG00000185664; TAA
QILKGGSGTY

SEQ ID NO: 67253 - protein, 10 aa, Homo sapiens
  misc_feature: Table A; Target 67253; HLA-A*26:01; PMEL; ENSG00000185664; TAA
QILKGGSGTY

SEQ ID NO: 67254 - protein, 10 aa, Homo sapiens
  misc_feature: Table A; Target 67254; HLA-A*29:02; PMEL; ENSG00000185664; TAA
QILKGGSGTY

SEQ ID NO: 67255 - protein, 10 aa, Homo sapiens
  misc_feature: Table A; Target 67255; HLA-A*30:02; PMEL; ENSG00000185664; TAA
QILKGGSGTY

SEQ ID NO: 67256 - protein, 10 aa, Homo sapiens
  misc_feature: Table A; Target 67256; HLA-A*32:01; PMEL; ENSG00000185664; TAA
QILKGGSGTY

SEQ ID NO: 67257 - protein, 10 aa, Homo sapiens
  misc_feature: Table A; Target 67257; HLA-B*15:01; PMEL; ENSG00000185664; TAA
QILKGGSGTY

SEQ ID NO: 67258 - protein, 10 aa, Homo sapiens
  misc_feature: Table A; Target 67258; HLA-B*15:03; PMEL; ENSG00000185664; TAA
QILKGGSGTY

SEQ ID NO: 67259 - protein, 10 aa, Homo sapiens
  misc_feature: Table A; Target 67259; HLA-B*39:01; PMEL; ENSG00000185664; TAA
QILKGGSGTY

SEQ ID NO: 67260 - protein, 10 aa, Homo sapiens
  misc_feature: Table A; Target 67260; HLA-B*44:03; PMEL; ENSG00000185664; TAA
QILKGGSGTY

SEQ ID NO: 67261 - protein, 10 aa, Homo sapiens
  misc_feature: Table A; Target 67261; HLA-B*46:01; PMEL; ENSG00000185664; TAA
QILKGGSGTY

SEQ ID NO: 67262 - protein, 10 aa, Homo sapiens
  misc_feature: Table A; Target 67262; HLA-B*58:01; PMEL; ENSG00000185664; TAA
QILKGGSGTY

SEQ ID NO: 67263 - protein, 10 aa, Homo sapiens
  misc_feature: Table A; Target 67263; HLA-C*04:01; PMEL; ENSG00000185664; TAA
QILKGGSGTY

SEQ ID NO: 67264 - protein, 10 aa, Homo sapiens
  misc_feature: Table A; Target 67264; HLA-C*07:01; PMEL; ENSG00000185664; TAA
QILKGGSGTY

SEQ ID NO: 67265 - protein, 10 aa, Homo sapiens
  misc_feature: Table A; Target 67265; HLA-C*07:04; PMEL; ENSG00000185664; TAA
QILKGGSGTY

SEQ ID NO: 67266 - protein, 8 aa, Homo sapiens
  misc_feature: Table A; Target 67266; HLA-A*01:01; PMEL; ENSG00000185664; TAA
QLHDPSGY

SEQ ID NO: 67267 - protein, 8 aa, Homo sapiens
  misc_feature: Table A; Target 67267; HLA-A*30:02; PMEL; ENSG00000185664; TAA
QLHDPSGY

SEQ ID NO: 67268 - protein, 8 aa, Homo sapiens
  misc_feature: Table A; Target 67268; HLA-B*15:03; PMEL; ENSG00000185664; TAA
QLHDPSGY

SEQ ID NO: 67269 - protein, 8 aa, Homo sapiens
  misc_feature: Table A; Target 67269; HLA-B*46:01; PMEL; ENSG00000185664; TAA
QLHDPSGY

SEQ ID NO: 67270 - protein, 9 aa, Homo sapiens
  misc_feature: Table A; Target 67270; HLA-A*02:01; PMEL; ENSG00000185664; TAA
QLHDPSGYL

SEQ ID NO: 67271 - protein, 9 aa, Homo sapiens
  misc_feature: Table A; Target 67271; HLA-A*02:03; PMEL; ENSG00000185664; TAA
QLHDPSGYL

SEQ ID NO: 67272 - protein, 9 aa, Homo sapiens
  misc_feature: Table A; Target 67272; HLA-A*02:04; PMEL; ENSG00000185664; TAA
QLHDPSGYL

SEQ ID NO: 67273 - protein, 9 aa, Homo sapiens
  misc_feature: Table A; Target 67273; HLA-A*02:07; PMEL; ENSG00000185664; TAA
QLHDPSGYL

SEQ ID NO: 67274 - protein, 9 aa, Homo sapiens
  misc_feature: Table A; Target 67274; HLA-A*03:01; PMEL; ENSG00000185664; TAA
QLHDPSGYL

SEQ ID NO: 67275 - protein, 9 aa, Homo sapiens
  misc_feature: Table A; Target 67275; HLA-B*13:02; PMEL; ENSG00000185664; TAA
QLHDPSGYL

SEQ ID NO: 67276 - protein, 9 aa, Homo sapiens
  misc_feature: Table A; Target 67276; HLA-B*27:05; PMEL; ENSG00000185664; TAA
QLHDPSGYL

SEQ ID NO: 67277 - protein, 9 aa, Homo sapiens
  misc_feature: Table A; Target 67277; HLA-B*55:01; PMEL; ENSG00000185664; TAA
QLHDPSGYL

SEQ ID NO: 67278 - protein, 9 aa, Homo sapiens
  misc_feature: Table A; Target 67278; HLA-C*06:02; PMEL; ENSG00000185664; TAA
QLHDPSGYL

SEQ ID NO: 67279 - protein, 10 aa, Homo sapiens
  misc_feature: Table A; Target 67279; HLA-A*01:01; PMEL; ENSG00000185664; TAA
QLHDPSGYLA

SEQ ID NO: 67280 - protein, 10 aa, Homo sapiens
  misc_feature: Table A; Target 67280; HLA-A*02:01; PMEL; ENSG00000185664; TAA
QLHDPSGYLA

SEQ ID NO: 67281 - protein, 10 aa, Homo sapiens
  misc_feature: Table A; Target 67281; HLA-A*02:03; PMEL; ENSG00000185664; TAA
QLHDPSGYLA

SEQ ID NO: 67282 - protein, 10 aa, Homo sapiens
  misc_feature: Table A; Target 67282; HLA-A*02:04; PMEL; ENSG00000185664; TAA
QLHDPSGYLA

SEQ ID NO: 67283 - protein, 10 aa, Homo sapiens
  misc_feature: Table A; Target 67283; HLA-B*13:02; PMEL; ENSG00000185664; TAA
QLHDPSGYLA

SEQ ID NO: 67284 - protein, 10 aa, Homo sapiens
  misc_feature: Table A; Target 67284; HLA-B*27:05; PMEL; ENSG00000185664; TAA
QLHDPSGYLA

SEQ ID NO: 67285 - protein, 10 aa, Homo sapiens
  misc_feature: Table A; Target 67285; HLA-B*54:01; PMEL; ENSG00000185664; TAA
QLHDPSGYLA

SEQ ID NO: 67286 - protein, 10 aa, Homo sapiens
  misc_feature: Table A; Target 67286; HLA-C*06:02; PMEL; ENSG00000185664; TAA
QLHDPSGYLA

SEQ ID NO: 67287 - protein, 9 aa, Homo sapiens
  misc_feature: Table A; Target 67287; HLA-A*02:01; PMEL; ENSG00000185664; TAA
QLIMPGQEA

SEQ ID NO: 67288 - protein, 9 aa, Homo sapiens
  misc_feature: Table A; Target 67288; HLA-A*02:03; PMEL; ENSG00000185664; TAA
QLIMPGQEA

SEQ ID NO: 67289 - protein, 9 aa, Homo sapiens
  misc_feature: Table A; Target 67289; HLA-B*13:02; PMEL; ENSG00000185664; TAA
QLIMPGQEA

SEQ ID NO: 67290 - protein, 9 aa, Homo sapiens
  misc_feature: Table A; Target 67290; HLA-B*15:01; PMEL; ENSG00000185664; TAA
QLIMPGQEA

SEQ ID NO: 67291 - protein, 9 aa, Homo sapiens
  misc_feature: Table A; Target 67291; HLA-B*27:05; PMEL; ENSG00000185664; TAA
QLIMPGQEA

SEQ ID NO: 67292 - protein, 9 aa, Homo sapiens
  misc_feature: Table A; Target 67292; HLA-B*35:03; PMEL; ENSG00000185664; TAA
QLIMPGQEA

SEQ ID NO: 67293 - protein, 9 aa, Homo sapiens
  misc_feature: Table A; Target 67293; HLA-B*40:02; PMEL; ENSG00000185664; TAA
QLIMPGQEA

SEQ ID NO: 67294 - protein, 9 aa, Homo sapiens
  misc_feature: Table A; Target 67294; HLA-B*46:01; PMEL; ENSG00000185664; TAA
QLIMPGQEA

SEQ ID NO: 67295 - protein, 9 aa, Homo sapiens
  misc_feature: Table A; Target 67295; HLA-B*54:01; PMEL; ENSG00000185664; TAA
QLIMPGQEA

SEQ ID NO: 67296 - protein, 9 aa, Homo sapiens
  misc_feature: Table A; Target 67296; HLA-B*55:01; PMEL; ENSG00000185664; TAA
QLIMPGQEA

SEQ ID NO: 67297 - protein, 9 aa, Homo sapiens
  misc_feature: Table A; Target 67297; HLA-B*56:01; PMEL; ENSG00000185664; TAA
QLIMPGQEA

SEQ ID NO: 67298 - protein, 9 aa, Homo sapiens
  misc_feature: Table A; Target 67298; HLA-C*01:02; PMEL; ENSG00000185664; TAA
QLIMPGQEA

SEQ ID NO: 67299 - protein, 9 aa, Homo sapiens
  misc_feature: Table A; Target 67299; HLA-C*03:03; PMEL; ENSG00000185664; TAA
QLIMPGQEA

SEQ ID NO: 67300 - protein, 9 aa, Homo sapiens
  misc_feature: Table A; Target 67300; HLA-C*03:04; PMEL; ENSG00000185664; TAA
QLIMPGQEA

SEQ ID NO: 67301 - protein, 9 aa, Homo sapiens
  misc_feature: Table A; Target 67301; HLA-C*06:02; PMEL; ENSG00000185664; TAA
QLIMPGQEA

SEQ ID NO: 67302 - protein, 9 aa, Homo sapiens
  misc_feature: Table A; Target 67302; HLA-C*14:02; PMEL; ENSG00000185664; TAA
QLIMPGQEA

SEQ ID NO: 67303 - protein, 11 aa, Homo sapiens
  misc_feature: Table A; Target 67303; HLA-A*02:01; PMEL; ENSG00000185664; TAA
QLIMPGQEAGL

SEQ ID NO: 67304 - protein, 11 aa, Homo sapiens
  misc_feature: Table A; Target 67304; HLA-A*02:04; PMEL; ENSG00000185664; TAA
QLIMPGQEAGL

SEQ ID NO: 67305 - protein, 11 aa, Homo sapiens
  misc_feature: Table A; Target 67305; HLA-A*02:07; PMEL; ENSG00000185664; TAA
QLIMPGQEAGL

SEQ ID NO: 67306 - protein, 11 aa, Homo sapiens
  misc_feature: Table A; Target 67306; HLA-C*04:01; PMEL; ENSG00000185664; TAA
QLIMPGQEAGL

SEQ ID NO: 67307 - protein, 9 aa, Homo sapiens
  misc_feature: Table A; Target 67307; HLA-A*25:01; PMEL; ENSG00000185664; TAA
QLPHSSSHW

SEQ ID NO: 67308 - protein, 10 aa, Homo sapiens
  misc_feature: Table A; Target 67308; HLA-A*03:01; PMEL; ENSG00000185664; TAA
QLRALDGGNK

SEQ ID NO: 67309 - protein, 9 aa, Homo sapiens
  misc_feature: Table A; Target 67309; HLA-A*31:01; PMEL; ENSG00000185664; TAA
QLRTKAWNR

SEQ ID NO: 67310 - protein, 8 aa, Homo sapiens
  misc_feature: Table A; Target 67310; HLA-B*08:01; PMEL; ENSG00000185664; TAA
QLVLHQIL

SEQ ID NO: 67311 - protein, 8 aa, Homo sapiens
  misc_feature: Table A; Target 67311; HLA-C*07:01; PMEL; ENSG00000185664; TAA
QLVLHQIL

SEQ ID NO: 67312 - protein, 9 aa, Homo sapiens
  misc_feature: Table A; Target 67312; HLA-A*03:01; PMEL; ENSG00000185664; TAA
QLVLHQILK

SEQ ID NO: 67313 - protein, 9 aa, Homo sapiens
  misc_feature: Table A; Target 67313; HLA-A*02:01; PMEL; ENSG00000185664; TAA
QLYPEWTEA

SEQ ID NO: 67314 - protein, 9 aa, Homo sapiens
  misc_feature: Table A; Target 67314; HLA-A*02:03; PMEL; ENSG00000185664; TAA
QLYPEWTEA

SEQ ID NO: 67315 - protein, 9 aa, Homo sapiens
  misc_feature: Table A; Target 67315; HLA-A*02:04; PMEL; ENSG00000185664; TAA
QLYPEWTEA

SEQ ID NO: 67316 - protein, 9 aa, Homo sapiens
  misc_feature: Table A; Target 67316; HLA-A*02:07; PMEL; ENSG00000185664; TAA
QLYPEWTEA

SEQ ID NO: 67317 - protein, 9 aa, Homo sapiens
  misc_feature: Table A; Target 67317; HLA-B*55:01; PMEL; ENSG00000185664; TAA
QLYPEWTEA

SEQ ID NO: 67318 - protein, 10 aa, Homo sapiens
  misc_feature: Table A; Target 67318; HLA-C*01:02; PMEL; ENSG00000185664; TAA
QMPTAESTGM

SEQ ID NO: 67319 - protein, 11 aa, Homo sapiens
  misc_feature: Table A; Target 67319; HLA-C*07:01; PMEL; ENSG00000185664; TAA
QMPTAESTGMT

SEQ ID NO: 67320 - protein, 9 aa, Homo sapiens
  misc_feature: Table A; Target 67320; HLA-A*23:01; PMEL; ENSG00000185664; TAA
QPLTFALQL

SEQ ID NO: 67321 - protein, 9 aa, Homo sapiens
  misc_feature: Table A; Target 67321; HLA-B*07:02; PMEL; ENSG00000185664; TAA
QPLTFALQL

SEQ ID NO: 67322 - protein, 9 aa, Homo sapiens
  misc_feature: Table A; Target 67322; HLA-B*08:01; PMEL; ENSG00000185664; TAA
QPLTFALQL

SEQ ID NO: 67323 - protein, 9 aa, Homo sapiens
  misc_feature: Table A; Target 67323; HLA-B*35:01; PMEL; ENSG00000185664; TAA
QPLTFALQL

SEQ ID NO: 67324 - protein, 9 aa, Homo sapiens
  misc_feature: Table A; Target 67324; HLA-B*35:03; PMEL; ENSG00000185664; TAA
QPLTFALQL

SEQ ID NO: 67325 - protein, 9 aa, Homo sapiens
  misc_feature: Table A; Target 67325; HLA-B*51:01; PMEL; ENSG00000185664; TAA
QPLTFALQL

SEQ ID NO: 67326 - protein, 9 aa, Homo sapiens
  misc_feature: Table A; Target 67326; HLA-B*54:01; PMEL; ENSG00000185664; TAA
QPLTFALQL

SEQ ID NO: 67327 - protein, 9 aa, Homo sapiens
  misc_feature: Table A; Target 67327; HLA-B*56:01; PMEL; ENSG00000185664; TAA
QPLTFALQL

SEQ ID NO: 67328 - protein, 9 aa, Homo sapiens
  misc_feature: Table A; Target 67328; HLA-C*07:02; PMEL; ENSG00000185664; TAA
QPLTFALQL

SEQ ID NO: 67329 - protein, 8 aa, Homo sapiens
  misc_feature: Table A; Target 67329; HLA-B*54:01; PMEL; ENSG00000185664; TAA
QPVLPSPA

SEQ ID NO: 67330 - protein, 8 aa, Homo sapiens
  misc_feature: Table A; Target 67330; HLA-B*55:01; PMEL; ENSG00000185664; TAA
QPVLPSPA

SEQ ID NO: 67331 - protein, 8 aa, Homo sapiens
  misc_feature: Table A; Target 67331; HLA-B*56:01; PMEL; ENSG00000185664; TAA
QPVLPSPA

SEQ ID NO: 67332 - protein, 9 aa, Homo sapiens
  misc_feature: Table A; Target 67332; HLA-B*07:02; PMEL; ENSG00000185664; TAA
QPVLPSPAC

SEQ ID NO: 67333 - protein, 9 aa, Homo sapiens
  misc_feature: Table A; Target 67333; HLA-B*35:01; PMEL; ENSG00000185664; TAA
QPVLPSPAC

SEQ ID NO: 67334 - protein, 9 aa, Homo sapiens
  misc_feature: Table A; Target 67334; HLA-B*35:03; PMEL; ENSG00000185664; TAA
QPVLPSPAC

SEQ ID NO: 67335 - protein, 9 aa, Homo sapiens
  misc_feature: Table A; Target 67335; HLA-B*51:01; PMEL; ENSG00000185664; TAA
QPVLPSPAC

SEQ ID NO: 67336 - protein, 9 aa, Homo sapiens
  misc_feature: Table A; Target 67336; HLA-B*54:01; PMEL; ENSG00000185664; TAA
QPVLPSPAC

SEQ ID NO: 67337 - protein, 9 aa, Homo sapiens
  misc_feature: Table A; Target 67337; HLA-B*55:01; PMEL; ENSG00000185664; TAA
QPVLPSPAC

SEQ ID NO: 67338 - protein, 9 aa, Homo sapiens
  misc_feature: Table A; Target 67338; HLA-B*56:01; PMEL; ENSG00000185664; TAA
QPVLPSPAC

SEQ ID NO: 67339 - protein, 9 aa, Homo sapiens
  misc_feature: Table A; Target 67339; HLA-C*03:03; PMEL; ENSG00000185664; TAA
QPVLPSPAC

SEQ ID NO: 67340 - protein, 9 aa, Homo sapiens
  misc_feature: Table A; Target 67340; HLA-C*07:02; PMEL; ENSG00000185664; TAA
QPVLPSPAC

SEQ ID NO: 67341 - protein, 11 aa, Homo sapiens
  misc_feature: Table A; Target 67341; HLA-B*07:02; PMEL; ENSG00000185664; TAA
QPVLPSPACQL

SEQ ID NO: 67342 - protein, 11 aa, Homo sapiens
  misc_feature: Table A; Target 67342; HLA-B*35:03; PMEL; ENSG00000185664; TAA
QPVLPSPACQL

SEQ ID NO: 67343 - protein, 11 aa, Homo sapiens
  misc_feature: Table A; Target 67343; HLA-B*56:01; PMEL; ENSG00000185664; TAA
QPVYPQETDDA

SEQ ID NO: 67344 - protein, 9 aa, Homo sapiens
  misc_feature: Table A; Target 67344; HLA-A*68:02; PMEL; ENSG00000185664; TAA
QVIWVNNTI

SEQ ID NO: 67345 - protein, 9 aa, Homo sapiens
  misc_feature: Table A; Target 67345; HLA-B*13:02; PMEL; ENSG00000185664; TAA
QVIWVNNTI

SEQ ID NO: 67346 - protein, 9 aa, Homo sapiens
  misc_feature: Table A; Target 67346; HLA-B*58:01; PMEL; ENSG00000185664; TAA
QVIWVNNTI

SEQ ID NO: 67347 - protein, 10 aa, Homo sapiens
  misc_feature: Table A; Target 67347; HLA-A*68:02; PMEL; ENSG00000185664; TAA
QVIWVNNTII

SEQ ID NO: 67348 - protein, 10 aa, Homo sapiens
  misc_feature: Table A; Target 67348; HLA-A*02:01; PMEL; ENSG00000185664; TAA
QVLGGPVSGL

SEQ ID NO: 67349 - protein, 10 aa, Homo sapiens
  misc_feature: Table A; Target 67349; HLA-A*02:03; PMEL; ENSG00000185664; TAA
QVLGGPVSGL

SEQ ID NO: 67350 - protein, 10 aa, Homo sapiens
  misc_feature: Table A; Target 67350; HLA-A*02:04; PMEL; ENSG00000185664; TAA
QVLGGPVSGL

SEQ ID NO: 67351 - protein, 10 aa, Homo sapiens
  misc_feature: Table A; Target 67351; HLA-A*02:07; PMEL; ENSG00000185664; TAA
QVLGGPVSGL

SEQ ID NO: 67352 - protein, 10 aa, Homo sapiens
  misc_feature: Table A; Target 67352; HLA-A*03:01; PMEL; ENSG00000185664; TAA
QVLGGPVSGL

SEQ ID NO: 67353 - protein, 10 aa, Homo sapiens
  misc_feature: Table A; Target 67353; HLA-A*03:02; PMEL; ENSG00000185664; TAA
QVLGGPVSGL

SEQ ID NO: 67354 - protein, 10 aa, Homo sapiens
  misc_feature: Table A; Target 67354; HLA-A*11:01; PMEL; ENSG00000185664; TAA
QVLGGPVSGL

SEQ ID NO: 67355 - protein, 10 aa, Homo sapiens
  misc_feature: Table A; Target 67355; HLA-A*25:01; PMEL; ENSG00000185664; TAA
QVLGGPVSGL

SEQ ID NO: 67356 - protein, 10 aa, Homo sapiens
  misc_feature: Table A; Target 67356; HLA-A*26:01; PMEL; ENSG00000185664; TAA
QVLGGPVSGL

SEQ ID NO: 67357 - protein, 10 aa, Homo sapiens
  misc_feature: Table A; Target 67357; HLA-A*31:01; PMEL; ENSG00000185664; TAA
QVLGGPVSGL

SEQ ID NO: 67358 - protein, 10 aa, Homo sapiens
  misc_feature: Table A; Target 67358; HLA-A*32:01; PMEL; ENSG00000185664; TAA
QVLGGPVSGL

SEQ ID NO: 67359 - protein, 10 aa, Homo sapiens
  misc_feature: Table A; Target 67359; HLA-A*33:03; PMEL; ENSG00000185664; TAA
QVLGGPVSGL

SEQ ID NO: 67360 - protein, 10 aa, Homo sapiens
  misc_feature: Table A; Target 67360; HLA-A*68:01; PMEL; ENSG00000185664; TAA
QVLGGPVSGL

SEQ ID NO: 67361 - protein, 10 aa, Homo sapiens
  misc_feature: Table A; Target 67361; HLA-A*68:02; PMEL; ENSG00000185664; TAA
QVLGGPVSGL

SEQ ID NO: 67362 - protein, 10 aa, Homo sapiens
  misc_feature: Table A; Target 67362; HLA-B*27:05; PMEL; ENSG00000185664; TAA
QVLGGPVSGL

SEQ ID NO: 67363 - protein, 10 aa, Homo sapiens
  misc_feature: Table A; Target 67363; HLA-B*39:01; PMEL; ENSG00000185664; TAA
QVLGGPVSGL

SEQ ID NO: 67364 - protein, 10 aa, Homo sapiens
  misc_feature: Table A; Target 67364; HLA-B*55:01; PMEL; ENSG00000185664; TAA
QVLGGPVSGL

SEQ ID NO: 67365 - protein, 10 aa, Homo sapiens
  misc_feature: Table A; Target 67365; HLA-C*01:02; PMEL; ENSG00000185664; TAA
QVLGGPVSGL

SEQ ID NO: 67366 - protein, 10 aa, Homo sapiens
  misc_feature: Table A; Target 67366; HLA-C*04:01; PMEL; ENSG00000185664; TAA
QVLGGPVSGL

SEQ ID NO: 67367 - protein, 10 aa, Homo sapiens
  misc_feature: Table A; Target 67367; HLA-C*06:02; PMEL; ENSG00000185664; TAA
QVLGGPVSGL

SEQ ID NO: 67368 - protein, 10 aa, Homo sapiens
  misc_feature: Table A; Target 67368; HLA-C*07:02; PMEL; ENSG00000185664; TAA
QVLGGPVSGL

SEQ ID NO: 67369 - protein, 8 aa, Homo sapiens
  misc_feature: Table A; Target 67369; HLA-B*51:01; PMEL; ENSG00000185664; TAA
QVPFSVSV

SEQ ID NO: 67370 - protein, 8 aa, Homo sapiens
  misc_feature: Table A; Target 67370; HLA-C*01:02; PMEL; ENSG00000185664; TAA
QVPFSVSV

SEQ ID NO: 67371 - protein, 11 aa, Homo sapiens
  misc_feature: Table A; Target 67371; HLA-C*01:02; PMEL; ENSG00000185664; TAA
QVPFSVSVSQL

SEQ ID NO: 67372 - protein, 11 aa, Homo sapiens
  misc_feature: Table A; Target 67372; HLA-C*07:02; PMEL; ENSG00000185664; TAA
QVPFSVSVSQL

SEQ ID NO: 67373 - protein, 9 aa, Homo sapiens
  misc_feature: Table A; Target 67373; HLA-A*01:01; PMEL; ENSG00000185664; TAA
QVPLDCVLY

SEQ ID NO: 67374 - protein, 9 aa, Homo sapiens
  misc_feature: Table A; Target 67374; HLA-A*26:01; PMEL; ENSG00000185664; TAA
QVPLDCVLY

SEQ ID NO: 67375 - protein, 9 aa, Homo sapiens
  misc_feature: Table A; Target 67375; HLA-A*29:02; PMEL; ENSG00000185664; TAA
QVPLDCVLY

SEQ ID NO: 67376 - protein, 9 aa, Homo sapiens
  misc_feature: Table A; Target 67376; HLA-B*15:03; PMEL; ENSG00000185664; TAA
QVPLDCVLY

SEQ ID NO: 67377 - protein, 9 aa, Homo sapiens
  misc_feature: Table A; Target 67377; HLA-C*07:01; PMEL; ENSG00000185664; TAA
QVPLDCVLY

SEQ ID NO: 67378 - protein, 9 aa, Homo sapiens
  misc_feature: Table A; Target 67378; HLA-C*07:04; PMEL; ENSG00000185664; TAA
QVPLDCVLY

SEQ ID NO: 67379 - protein, 9 aa, Homo sapiens
  misc_feature: Table A; Target 67379; HLA-C*01:02; PMEL; ENSG00000185664; TAA
QVPLIVGIL

SEQ ID NO: 67380 - protein, 10 aa, Homo sapiens
  misc_feature: Table A; Target 67380; HLA-A*02:07; PMEL; ENSG00000185664; TAA
QVPLIVGILL

SEQ ID NO: 67381 - protein, 10 aa, Homo sapiens
  misc_feature: Table A; Target 67381; HLA-A*68:02; PMEL; ENSG00000185664; TAA
QVPLIVGILL

SEQ ID NO: 67382 - protein, 11 aa, Homo sapiens
  misc_feature: Table A; Target 67382; HLA-A*02:07; PMEL; ENSG00000185664; TAA
QVPLIVGILLV

SEQ ID NO: 67383 - protein, 11 aa, Homo sapiens
  misc_feature: Table A; Target 67383; HLA-A*68:02; PMEL; ENSG00000185664; TAA
QVPLIVGILLV

SEQ ID NO: 67384 - protein, 8 aa, Homo sapiens
  misc_feature: Table A; Target 67384; HLA-B*51:01; PMEL; ENSG00000185664; TAA
QVPTTEVI

SEQ ID NO: 67385 - protein, 11 aa, Homo sapiens
  misc_feature: Table A; Target 67385; HLA-A*02:07; PMEL; ENSG00000185664; TAA
QVPTTEVISTA

SEQ ID NO: 67386 - protein, 11 aa, Homo sapiens
  misc_feature: Table A; Target 67386; HLA-A*26:01; PMEL; ENSG00000185664; TAA
QVPTTEVISTA

SEQ ID NO: 67387 - protein, 11 aa, Homo sapiens
  misc_feature: Table A; Target 67387; HLA-A*68:02; PMEL; ENSG00000185664; TAA
QVPTTEVISTA

SEQ ID NO: 67388 - protein, 8 aa, Homo sapiens
  misc_feature: Table A; Target 67388; HLA-B*51:01; PMEL; ENSG00000185664; TAA
QVPTTEVV

SEQ ID NO: 67389 - protein, 11 aa, Homo sapiens
  misc_feature: Table A; Target 67389; HLA-C*06:02; PMEL; ENSG00000185664; TAA
QVPTTEVVGTT

SEQ ID NO: 67390 - protein, 11 aa, Homo sapiens
  misc_feature: Table A; Target 67390; HLA-C*07:01; PMEL; ENSG00000185664; TAA
QVPTTEVVGTT

SEQ ID NO: 67391 - protein, 11 aa, Homo sapiens
  misc_feature: Table A; Target 67391; HLA-C*07:02; PMEL; ENSG00000185664; TAA
QVPTTEVVGTT

SEQ ID NO: 67392 - protein, 8 aa, Homo sapiens
  misc_feature: Table A; Target 67392; HLA-B*13:02; PMEL; ENSG00000185664; TAA
QVVLQAAI

SEQ ID NO: 67393 - protein, 10 aa, Homo sapiens
  misc_feature: Table A; Target 67393; HLA-C*06:02; PMEL; ENSG00000185664; TAA
QVVLQAAIPL

SEQ ID NO: 67394 - protein, 10 aa, Homo sapiens
  misc_feature: Table A; Target 67394; HLA-C*07:01; PMEL; ENSG00000185664; TAA
QVVLQAAIPL

SEQ ID NO: 67395 - protein, 9 aa, Homo sapiens
  misc_feature: Table A; Target 67395; HLA-A*01:01; PMEL; ENSG00000185664; TAA
QVWGGQPVY

SEQ ID NO: 67396 - protein, 9 aa, Homo sapiens
  misc_feature: Table A; Target 67396; HLA-A*03:01; PMEL; ENSG00000185664; TAA
QVWGGQPVY

SEQ ID NO: 67397 - protein, 9 aa, Homo sapiens
  misc_feature: Table A; Target 67397; HLA-A*11:01; PMEL; ENSG00000185664; TAA
QVWGGQPVY

SEQ ID NO: 67398 - protein, 9 aa, Homo sapiens
  misc_feature: Table A; Target 67398; HLA-A*23:01; PMEL; ENSG00000185664; TAA
QVWGGQPVY

SEQ ID NO: 67399 - protein, 9 aa, Homo sapiens
  misc_feature: Table A; Target 67399; HLA-A*25:01; PMEL; ENSG00000185664; TAA
QVWGGQPVY

SEQ ID NO: 67400 - protein, 9 aa, Homo sapiens
  misc_feature: Table A; Target 67400; HLA-A*26:01; PMEL; ENSG00000185664; TAA
QVWGGQPVY

SEQ ID NO: 67401 - protein, 9 aa, Homo sapiens
  misc_feature: Table A; Target 67401; HLA-A*29:02; PMEL; ENSG00000185664; TAA
QVWGGQPVY

SEQ ID NO: 67402 - protein, 9 aa, Homo sapiens
  misc_feature: Table A; Target 67402; HLA-A*30:02; PMEL; ENSG00000185664; TAA
QVWGGQPVY

SEQ ID NO: 67403 - protein, 9 aa, Homo sapiens
  misc_feature: Table A; Target 67403; HLA-A*32:01; PMEL; ENSG00000185664; TAA
QVWGGQPVY

SEQ ID NO: 67404 - protein, 9 aa, Homo sapiens
  misc_feature: Table A; Target 67404; HLA-B*13:02; PMEL; ENSG00000185664; TAA
QVWGGQPVY

SEQ ID NO: 67405 - protein, 9 aa, Homo sapiens
  misc_feature: Table A; Target 67405; HLA-B*15:01; PMEL; ENSG00000185664; TAA
QVWGGQPVY

SEQ ID NO: 67406 - protein, 9 aa, Homo sapiens
  misc_feature: Table A; Target 67406; HLA-B*15:03; PMEL; ENSG00000185664; TAA
QVWGGQPVY

SEQ ID NO: 67407 - protein, 9 aa, Homo sapiens
  misc_feature: Table A; Target 67407; HLA-B*18:01; PMEL; ENSG00000185664; TAA
QVWGGQPVY

SEQ ID NO: 67408 - protein, 9 aa, Homo sapiens
  misc_feature: Table A; Target 67408; HLA-B*27:05; PMEL; ENSG00000185664; TAA
QVWGGQPVY

SEQ ID NO: 67409 - protein, 9 aa, Homo sapiens
  misc_feature: Table A; Target 67409; HLA-B*35:01; PMEL; ENSG00000185664; TAA
QVWGGQPVY

SEQ ID NO: 67410 - protein, 9 aa, Homo sapiens
  misc_feature: Table A; Target 67410; HLA-B*39:01; PMEL; ENSG00000185664; TAA
QVWGGQPVY

SEQ ID NO: 67411 - protein, 9 aa, Homo sapiens
  misc_feature: Table A; Target 67411; HLA-B*44:03; PMEL; ENSG00000185664; TAA
QVWGGQPVY

SEQ ID NO: 67412 - protein, 9 aa, Homo sapiens
  misc_feature: Table A; Target 67412; HLA-B*46:01; PMEL; ENSG00000185664; TAA
QVWGGQPVY

SEQ ID NO: 67413 - protein, 9 aa, Homo sapiens
  misc_feature: Table A; Target 67413; HLA-B*55:01; PMEL; ENSG00000185664; TAA
QVWGGQPVY

SEQ ID NO: 67414 - protein, 9 aa, Homo sapiens
  misc_feature: Table A; Target 67414; HLA-B*57:01; PMEL; ENSG00000185664; TAA
QVWGGQPVY

SEQ ID NO: 67415 - protein, 9 aa, Homo sapiens
  misc_feature: Table A; Target 67415; HLA-B*58:01; PMEL; ENSG00000185664; TAA
QVWGGQPVY

SEQ ID NO: 67416 - protein, 9 aa, Homo sapiens
  misc_feature: Table A; Target 67416; HLA-C*02:02; PMEL; ENSG00000185664; TAA
QVWGGQPVY

SEQ ID NO: 67417 - protein, 9 aa, Homo sapiens
  misc_feature: Table A; Target 67417; HLA-C*07:04; PMEL; ENSG00000185664; TAA
QVWGGQPVY

SEQ ID NO: 67418 - protein, 9 aa, Homo sapiens
  misc_feature: Table A; Target 67418; HLA-C*07:06; PMEL; ENSG00000185664; TAA
QVWGGQPVY

SEQ ID NO: 67419 - protein, 9 aa, Homo sapiens
  misc_feature: Table A; Target 67419; HLA-C*12:03; PMEL; ENSG00000185664; TAA
QVWGGQPVY

SEQ ID NO: 67420 - protein, 9 aa, Homo sapiens
  misc_feature: Table A; Target 67420; HLA-C*16:01; PMEL; ENSG00000185664; TAA
QVWGGQPVY

SEQ ID NO: 67421 - protein, 9 aa, Homo sapiens
  misc_feature: Table A; Target 67421; HLA-C*16:04; PMEL; ENSG00000185664; TAA
QVWGGQPVY

SEQ ID NO: 67422 - protein, 10 aa, Homo sapiens
  misc_feature: Table A; Target 67422; HLA-B*27:05; PMEL; ENSG00000185664; TAA
QVWGGQPVYP

SEQ ID NO: 67423 - protein, 10 aa, Homo sapiens
  misc_feature: Table A; Target 67423; HLA-C*04:01; PMEL; ENSG00000185664; TAA
QVWGGQPVYP

SEQ ID NO: 67424 - protein, 10 aa, Homo sapiens
  misc_feature: Table A; Target 67424; HLA-C*07:02; PMEL; ENSG00000185664; TAA
QVWGGQPVYP

SEQ ID NO: 67425 - protein, 10 aa, Homo sapiens
  misc_feature: Table A; Target 67425; HLA-B*57:01; PMEL; ENSG00000185664; TAA
RALDGGNKHF

SEQ ID NO: 67426 - protein, 10 aa, Homo sapiens
  misc_feature: Table A; Target 67426; HLA-B*58:01; PMEL; ENSG00000185664; TAA
RALDGGNKHF

SEQ ID NO: 67427 - protein, 11 aa, Homo sapiens
  misc_feature: Table A; Target 67427; HLA-A*02:01; PMEL; ENSG00000185664; TAA
RALDGGNKHFL

SEQ ID NO: 67428 - protein, 11 aa, Homo sapiens
  misc_feature: Table A; Target 67428; HLA-A*02:04; PMEL; ENSG00000185664; TAA
RALDGGNKHFL

SEQ ID NO: 67429 - protein, 11 aa, Homo sapiens
  misc_feature: Table A; Target 67429; HLA-A*24:02; PMEL; ENSG00000185664; TAA
RALDGGNKHFL

SEQ ID NO: 67430 - protein, 11 aa, Homo sapiens
  misc_feature: Table A; Target 67430; HLA-A*31:01; PMEL; ENSG00000185664; TAA
RALDGGNKHFL

SEQ ID NO: 67431 - protein, 11 aa, Homo sapiens
  misc_feature: Table A; Target 67431; HLA-B*57:01; PMEL; ENSG00000185664; TAA
RALDGGNKHFL

SEQ ID NO: 67432 - protein, 9 aa, Homo sapiens
  misc_feature: Table A; Target 67432; HLA-A*01:01; PMEL; ENSG00000185664; TAA
RALVVTHTY

SEQ ID NO: 67433 - protein, 9 aa, Homo sapiens
  misc_feature: Table A; Target 67433; HLA-A*03:01; PMEL; ENSG00000185664; TAA
RALVVTHTY

SEQ ID NO: 67434 - protein, 9 aa, Homo sapiens
  misc_feature: Table A; Target 67434; HLA-A*23:01; PMEL; ENSG00000185664; TAA
RALVVTHTY

SEQ ID NO: 67435 - protein, 9 aa, Homo sapiens
  misc_feature: Table A; Target 67435; HLA-A*24:02; PMEL; ENSG00000185664; TAA
RALVVTHTY

SEQ ID NO: 67436 - protein, 9 aa, Homo sapiens
  misc_feature: Table A; Target 67436; HLA-A*25:01; PMEL; ENSG00000185664; TAA
RALVVTHTY

SEQ ID NO: 67437 - protein, 9 aa, Homo sapiens
  misc_feature: Table A; Target 67437; HLA-A*26:01; PMEL; ENSG00000185664; TAA
RALVVTHTY

SEQ ID NO: 67438 - protein, 9 aa, Homo sapiens
  misc_feature: Table A; Target 67438; HLA-A*29:02; PMEL; ENSG00000185664; TAA
RALVVTHTY

SEQ ID NO: 67439 - protein, 9 aa, Homo sapiens
  misc_feature: Table A; Target 67439; HLA-A*30:02; PMEL; ENSG00000185664; TAA
RALVVTHTY

SEQ ID NO: 67440 - protein, 9 aa, Homo sapiens
  misc_feature: Table A; Target 67440; HLA-A*31:01; PMEL; ENSG00000185664; TAA
RALVVTHTY

SEQ ID NO: 67441 - protein, 9 aa, Homo sapiens
  misc_feature: Table A; Target 67441; HLA-A*32:01; PMEL; ENSG00000185664; TAA
RALVVTHTY

SEQ ID NO: 67442 - protein, 9 aa, Homo sapiens
  misc_feature: Table A; Target 67442; HLA-B*15:01; PMEL; ENSG00000185664; TAA
RALVVTHTY

SEQ ID NO: 67443 - protein, 9 aa, Homo sapiens
  misc_feature: Table A; Target 67443; HLA-B*15:03; PMEL; ENSG00000185664; TAA
RALVVTHTY

SEQ ID NO: 67444 - protein, 9 aa, Homo sapiens
  misc_feature: Table A; Target 67444; HLA-B*18:01; PMEL; ENSG00000185664; TAA
RALVVTHTY

SEQ ID NO: 67445 - protein, 9 aa, Homo sapiens
  misc_feature: Table A; Target 67445; HLA-B*27:02; PMEL; ENSG00000185664; TAA
RALVVTHTY

SEQ ID NO: 67446 - protein, 9 aa, Homo sapiens
  misc_feature: Table A; Target 67446; HLA-B*35:01; PMEL; ENSG00000185664; TAA
RALVVTHTY

SEQ ID NO: 67447 - protein, 9 aa, Homo sapiens
  misc_feature: Table A; Target 67447; HLA-B*37:01; PMEL; ENSG00000185664; TAA
RALVVTHTY

SEQ ID NO: 67448 - protein, 9 aa, Homo sapiens
  misc_feature: Table A; Target 67448; HLA-B*44:02; PMEL; ENSG00000185664; TAA
RALVVTHTY

SEQ ID NO: 67449 - protein, 9 aa, Homo sapiens
  misc_feature: Table A; Target 67449; HLA-B*44:03; PMEL; ENSG00000185664; TAA
RALVVTHTY

SEQ ID NO: 67450 - protein, 9 aa, Homo sapiens
  misc_feature: Table A; Target 67450; HLA-B*46:01; PMEL; ENSG00000185664; TAA
RALVVTHTY

SEQ ID NO: 67451 - protein, 9 aa, Homo sapiens
  misc_feature: Table A; Target 67451; HLA-B*57:01; PMEL; ENSG00000185664; TAA
RALVVTHTY

SEQ ID NO: 67452 - protein, 9 aa, Homo sapiens
  misc_feature: Table A; Target 67452; HLA-B*58:01; PMEL; ENSG00000185664; TAA
RALVVTHTY

SEQ ID NO: 67453 - protein, 9 aa, Homo sapiens
  misc_feature: Table A; Target 67453; HLA-C*01:02; PMEL; ENSG00000185664; TAA
RALVVTHTY

SEQ ID NO: 67454 - protein, 9 aa, Homo sapiens
  misc_feature: Table A; Target 67454; HLA-C*02:02; PMEL; ENSG00000185664; TAA
RALVVTHTY

SEQ ID NO: 67455 - protein, 9 aa, Homo sapiens
  misc_feature: Table A; Target 67455; HLA-C*03:03; PMEL; ENSG00000185664; TAA
RALVVTHTY

SEQ ID NO: 67456 - protein, 9 aa, Homo sapiens
  misc_feature: Table A; Target 67456; HLA-C*03:04; PMEL; ENSG00000185664; TAA
RALVVTHTY

SEQ ID NO: 67457 - protein, 9 aa, Homo sapiens
  misc_feature: Table A; Target 67457; HLA-C*07:06; PMEL; ENSG00000185664; TAA
RALVVTHTY

SEQ ID NO: 67458 - protein, 9 aa, Homo sapiens
  misc_feature: Table A; Target 67458; HLA-C*12:03; PMEL; ENSG00000185664; TAA
RALVVTHTY

SEQ ID NO: 67459 - protein, 9 aa, Homo sapiens
  misc_feature: Table A; Target 67459; HLA-C*16:01; PMEL; ENSG00000185664; TAA
RALVVTHTY

SEQ ID NO: 67460 - protein, 9 aa, Homo sapiens
  misc_feature: Table A; Target 67460; HLA-C*16:02; PMEL; ENSG00000185664; TAA
RALVVTHTY

SEQ ID NO: 67461 - protein, 9 aa, Homo sapiens
  misc_feature: Table A; Target 67461; HLA-C*16:04; PMEL; ENSG00000185664; TAA
RALVVTHTY

SEQ ID NO: 67462 - protein, 10 aa, Homo sapiens
  misc_feature: Table A; Target 67462; HLA-B*57:01; PMEL; ENSG00000185664; TAA
RALVVTHTYL

SEQ ID NO: 67463 - protein, 9 aa, Homo sapiens
  misc_feature: Table A; Target 67463; HLA-A*24:02; PMEL; ENSG00000185664; TAA
RAMLGTHTM

SEQ ID NO: 67464 - protein, 9 aa, Homo sapiens
  misc_feature: Table A; Target 67464; HLA-A*30:01; PMEL; ENSG00000185664; TAA
RAMLGTHTM

SEQ ID NO: 67465 - protein, 9 aa, Homo sapiens
  misc_feature: Table A; Target 67465; HLA-A*32:01; PMEL; ENSG00000185664; TAA
RAMLGTHTM

SEQ ID NO: 67466 - protein, 9 aa, Homo sapiens
  misc_feature: Table A; Target 67466; HLA-B*07:02; PMEL; ENSG00000185664; TAA
RAMLGTHTM

SEQ ID NO: 67467 - protein, 9 aa, Homo sapiens
  misc_feature: Table A; Target 67467; HLA-B*08:01; PMEL; ENSG00000185664; TAA
RAMLGTHTM

SEQ ID NO: 67468 - protein, 9 aa, Homo sapiens
  misc_feature: Table A; Target 67468; HLA-B*15:01; PMEL; ENSG00000185664; TAA
RAMLGTHTM

SEQ ID NO: 67469 - protein, 9 aa, Homo sapiens
  misc_feature: Table A; Target 67469; HLA-B*15:03; PMEL; ENSG00000185664; TAA
RAMLGTHTM

SEQ ID NO: 67470 - protein, 9 aa, Homo sapiens
  misc_feature: Table A; Target 67470; HLA-B*35:01; PMEL; ENSG00000185664; TAA
RAMLGTHTM

SEQ ID NO: 67471 - protein, 9 aa, Homo sapiens
  misc_feature: Table A; Target 67471; HLA-B*35:03; PMEL; ENSG00000185664; TAA
RAMLGTHTM

SEQ ID NO: 67472 - protein, 9 aa, Homo sapiens
  misc_feature: Table A; Target 67472; HLA-B*37:01; PMEL; ENSG00000185664; TAA
RAMLGTHTM

SEQ ID NO: 67473 - protein, 9 aa, Homo sapiens
  misc_feature: Table A; Target 67473; HLA-B*38:01; PMEL; ENSG00000185664; TAA
RAMLGTHTM

SEQ ID NO: 67474 - protein, 9 aa, Homo sapiens
  misc_feature: Table A; Target 67474; HLA-B*40:01; PMEL; ENSG00000185664; TAA
RAMLGTHTM

SEQ ID NO: 67475 - protein, 9 aa, Homo sapiens
  misc_feature: Table A; Target 67475; HLA-B*46:01; PMEL; ENSG00000185664; TAA
RAMLGTHTM

SEQ ID NO: 67476 - protein, 9 aa, Homo sapiens
  misc_feature: Table A; Target 67476; HLA-B*51:01; PMEL; ENSG00000185664; TAA
RAMLGTHTM

SEQ ID NO: 67477 - protein, 9 aa, Homo sapiens
  misc_feature: Table A; Target 67477; HLA-B*55:01; PMEL; ENSG00000185664; TAA
RAMLGTHTM

SEQ ID NO: 67478 - protein, 9 aa, Homo sapiens
  misc_feature: Table A; Target 67478; HLA-B*57:01; PMEL; ENSG00000185664; TAA
RAMLGTHTM

SEQ ID NO: 67479 - protein, 9 aa, Homo sapiens
  misc_feature: Table A; Target 67479; HLA-B*58:01; PMEL; ENSG00000185664; TAA
RAMLGTHTM

SEQ ID NO: 67480 - protein, 9 aa, Homo sapiens
  misc_feature: Table A; Target 67480; HLA-C*01:02; PMEL; ENSG00000185664; TAA
RAMLGTHTM

SEQ ID NO: 67481 - protein, 9 aa, Homo sapiens
  misc_feature: Table A; Target 67481; HLA-C*02:02; PMEL; ENSG00000185664; TAA
RAMLGTHTM

SEQ ID NO: 67482 - protein, 9 aa, Homo sapiens
  misc_feature: Table A; Target 67482; HLA-C*03:03; PMEL; ENSG00000185664; TAA
RAMLGTHTM

SEQ ID NO: 67483 - protein, 9 aa, Homo sapiens
  misc_feature: Table A; Target 67483; HLA-C*03:04; PMEL; ENSG00000185664; TAA
RAMLGTHTM

SEQ ID NO: 67484 - protein, 9 aa, Homo sapiens
  misc_feature: Table A; Target 67484; HLA-C*05:01; PMEL; ENSG00000185664; TAA
RAMLGTHTM

SEQ ID NO: 67485 - protein, 9 aa, Homo sapiens
  misc_feature: Table A; Target 67485; HLA-C*07:02; PMEL; ENSG00000185664; TAA
RAMLGTHTM

SEQ ID NO: 67486 - protein, 9 aa, Homo sapiens
  misc_feature: Table A; Target 67486; HLA-C*14:02; PMEL; ENSG00000185664; TAA
RAMLGTHTM

SEQ ID NO: 67487 - protein, 9 aa, Homo sapiens
  misc_feature: Table A; Target 67487; HLA-C*16:01; PMEL; ENSG00000185664; TAA
RAMLGTHTM

SEQ ID NO: 67488 - protein, 9 aa, Homo sapiens
  misc_feature: Table A; Target 67488; HLA-C*16:02; PMEL; ENSG00000185664; TAA
RAMLGTHTM

SEQ ID NO: 67489 - protein, 9 aa, Homo sapiens
  misc_feature: Table A; Target 67489; HLA-C*16:04; PMEL; ENSG00000185664; TAA
RAMLGTHTM

SEQ ID NO: 67490 - protein, 8 aa, Homo sapiens
  misc_feature: Table A; Target 67490; HLA-A*03:02; PMEL; ENSG00000185664; TAA
RGGQVSLK

SEQ ID NO: 67491 - protein, 9 aa, Homo sapiens
  misc_feature: Table A; Target 67491; HLA-B*13:02; PMEL; ENSG00000185664; TAA
RGGQVSLKV

SEQ ID NO: 67492 - protein, 9 aa, Homo sapiens
  misc_feature: Table A; Target 67492; HLA-C*06:02; PMEL; ENSG00000185664; TAA
RGGQVSLKV

SEQ ID NO: 67493 - protein, 9 aa, Homo sapiens
  misc_feature: Table A; Target 67493; HLA-A*02:01; PMEL; ENSG00000185664; TAA
RLMKQDFSV

SEQ ID NO: 67494 - protein, 9 aa, Homo sapiens
  misc_feature: Table A; Target 67494; HLA-A*02:03; PMEL; ENSG00000185664; TAA
RLMKQDFSV

SEQ ID NO: 67495 - protein, 9 aa, Homo sapiens
  misc_feature: Table A; Target 67495; HLA-A*02:04; PMEL; ENSG00000185664; TAA
RLMKQDFSV

SEQ ID NO: 67496 - protein, 9 aa, Homo sapiens
  misc_feature: Table A; Target 67496; HLA-A*02:07; PMEL; ENSG00000185664; TAA
RLMKQDFSV

SEQ ID NO: 67497 - protein, 9 aa, Homo sapiens
  misc_feature: Table A; Target 67497; HLA-B*13:02; PMEL; ENSG00000185664; TAA
RLMKQDFSV

SEQ ID NO: 67498 - protein, 9 aa, Homo sapiens
  misc_feature: Table A; Target 67498; HLA-B*55:01; PMEL; ENSG00000185664; TAA
RLMKQDFSV

SEQ ID NO: 67499 - protein, 10 aa, Homo sapiens
  misc_feature: Table A; Target 67499; HLA-A*31:01; PMEL; ENSG00000185664; TAA
RNQDWLGVSR

SEQ ID NO: 67500 - protein, 10 aa, Homo sapiens
  misc_feature: Table A; Target 67500; HLA-A*33:01; PMEL; ENSG00000185664; TAA
RNQDWLGVSR

SEQ ID NO: 67501 - protein, 10 aa, Homo sapiens
  misc_feature: Table A; Target 67501; HLA-A*33:03; PMEL; ENSG00000185664; TAA
RNQDWLGVSR

SEQ ID NO: 67502 - protein, 9 aa, Homo sapiens
  misc_feature: Table A; Target 67502; HLA-A*02:04; PMEL; ENSG00000185664; TAA
RNQPLTFAL

SEQ ID NO: 67503 - protein, 9 aa, Homo sapiens
  misc_feature: Table A; Target 67503; HLA-A*23:01; PMEL; ENSG00000185664; TAA
RNQPLTFAL

SEQ ID NO: 67504 - protein, 9 aa, Homo sapiens
  misc_feature: Table A; Target 67504; HLA-A*31:01; PMEL; ENSG00000185664; TAA
RNQPLTFAL

SEQ ID NO: 67505 - protein, 10 aa, Homo sapiens
  misc_feature: Table A; Target 67505; HLA-B*56:01; PMEL; ENSG00000185664; TAA
RPTAEAPNTT

SEQ ID NO: 67506 - protein, 11 aa, Homo sapiens
  misc_feature: Table A; Target 67506; HLA-B*07:02; PMEL; ENSG00000185664; TAA
RPTAEAPNTTA

SEQ ID NO: 67507 - protein, 11 aa, Homo sapiens
  misc_feature: Table A; Target 67507; HLA-B*54:01; PMEL; ENSG00000185664; TAA
RPTAEAPNTTA

SEQ ID NO: 67508 - protein, 11 aa, Homo sapiens
  misc_feature: Table A; Target 67508; HLA-B*55:01; PMEL; ENSG00000185664; TAA
RPTAEAPNTTA

SEQ ID NO: 67509 - protein, 11 aa, Homo sapiens
  misc_feature: Table A; Target 67509; HLA-B*56:01; PMEL; ENSG00000185664; TAA
RPTAEAPNTTA

SEQ ID NO: 67510 - protein, 10 aa, Homo sapiens
  misc_feature: Table A; Target 67510; HLA-A*31:01; PMEL; ENSG00000185664; TAA
RQLRTKAWNR

SEQ ID NO: 67511 - protein, 8 aa, Homo sapiens
  misc_feature: Table A; Target 67511; HLA-B*13:02; PMEL; ENSG00000185664; TAA
RQVPLDCV

SEQ ID NO: 67512 - protein, 9 aa, Homo sapiens
  misc_feature: Table A; Target 67512; HLA-B*13:02; PMEL; ENSG00000185664; TAA
RQVPLDCVL

SEQ ID NO: 67513 - protein, 9 aa, Homo sapiens
  misc_feature: Table A; Target 67513; HLA-B*15:01; PMEL; ENSG00000185664; TAA
RQVPLDCVL

SEQ ID NO: 67514 - protein, 9 aa, Homo sapiens
  misc_feature: Table A; Target 67514; HLA-B*15:03; PMEL; ENSG00000185664; TAA
RQVPLDCVL

SEQ ID NO: 67515 - protein, 9 aa, Homo sapiens
  misc_feature: Table A; Target 67515; HLA-B*27:05; PMEL; ENSG00000185664; TAA
RQVPLDCVL

SEQ ID NO: 67516 - protein, 9 aa, Homo sapiens
  misc_feature: Table A; Target 67516; HLA-B*38:01; PMEL; ENSG00000185664; TAA
RQVPLDCVL

SEQ ID NO: 67517 - protein, 9 aa, Homo sapiens
  misc_feature: Table A; Target 67517; HLA-B*39:01; PMEL; ENSG00000185664; TAA
RQVPLDCVL

SEQ ID NO: 67518 - protein, 10 aa, Homo sapiens
  misc_feature: Table A; Target 67518; HLA-A*30:02; PMEL; ENSG00000185664; TAA
RQVPLDCVLY

SEQ ID NO: 67519 - protein, 10 aa, Homo sapiens
  misc_feature: Table A; Target 67519; HLA-B*15:01; PMEL; ENSG00000185664; TAA
RQVPLDCVLY

SEQ ID NO: 67520 - protein, 10 aa, Homo sapiens
  misc_feature: Table A; Target 67520; HLA-B*15:03; PMEL; ENSG00000185664; TAA
RQVPLDCVLY

SEQ ID NO: 67521 - protein, 10 aa, Homo sapiens
  misc_feature: Table A; Target 67521; HLA-B*57:01; PMEL; ENSG00000185664; TAA
RQVPLDCVLY

SEQ ID NO: 67522 - protein, 10 aa, Homo sapiens
  misc_feature: Table A; Target 67522; HLA-C*07:01; PMEL; ENSG00000185664; TAA
RQVPLDCVLY

SEQ ID NO: 67523 - protein, 11 aa, Homo sapiens
  misc_feature: Table A; Target 67523; HLA-A*31:01; PMEL; ENSG00000185664; TAA
RQVPLDCVLYR

SEQ ID NO: 67524 - protein, 10 aa, Homo sapiens
  misc_feature: Table A; Target 67524; HLA-B*57:01; PMEL; ENSG00000185664; TAA
RSFVYVWKTW

SEQ ID NO: 67525 - protein, 8 aa, Homo sapiens
  misc_feature: Table A; Target 67525; HLA-A*03:01; PMEL; ENSG00000185664; TAA
RSYVPLAH

SEQ ID NO: 67526 - protein, 8 aa, Homo sapiens
  misc_feature: Table A; Target 67526; HLA-B*57:01; PMEL; ENSG00000185664; TAA
RSYVPLAH

SEQ ID NO: 67527 - protein, 9 aa, Homo sapiens
  misc_feature: Table A; Target 67527; HLA-A*31:01; PMEL; ENSG00000185664; TAA
RSYVPLAHS

SEQ ID NO: 67528 - protein, 10 aa, Homo sapiens
  misc_feature: Table A; Target 67528; HLA-B*57:01; PMEL; ENSG00000185664; TAA
RTKAWNRQLY

SEQ ID NO: 67529 - protein, 9 aa, Homo sapiens
  misc_feature: Table A; Target 67529; HLA-A*23:01; PMEL; ENSG00000185664; TAA
RYGSFSVTL

SEQ ID NO: 67530 - protein, 9 aa, Homo sapiens
  misc_feature: Table A; Target 67530; HLA-A*24:02; PMEL; ENSG00000185664; TAA
RYGSFSVTL

SEQ ID NO: 67531 - protein, 9 aa, Homo sapiens
  misc_feature: Table A; Target 67531; HLA-A*31:01; PMEL; ENSG00000185664; TAA
RYGSFSVTL

SEQ ID NO: 67532 - protein, 9 aa, Homo sapiens
  misc_feature: Table A; Target 67532; HLA-A*33:03; PMEL; ENSG00000185664; TAA
RYGSFSVTL

SEQ ID NO: 67533 - protein, 9 aa, Homo sapiens
  misc_feature: Table A; Target 67533; HLA-B*07:02; PMEL; ENSG00000185664; TAA
RYGSFSVTL

SEQ ID NO: 67534 - protein, 9 aa, Homo sapiens
  misc_feature: Table A; Target 67534; HLA-C*07:01; PMEL; ENSG00000185664; TAA
RYGSFSVTL

SEQ ID NO: 67535 - protein, 9 aa, Homo sapiens
  misc_feature: Table A; Target 67535; HLA-C*14:02; PMEL; ENSG00000185664; TAA
RYGSFSVTL

SEQ ID NO: 67536 - protein, 8 aa, Homo sapiens
  misc_feature: Table A; Target 67536; HLA-C*12:03; PMEL; ENSG00000185664; TAA
SAFTITDQ

SEQ ID NO: 67537 - protein, 9 aa, Homo sapiens
  misc_feature: Table A; Target 67537; HLA-A*02:01; PMEL; ENSG00000185664; TAA
SAFTITDQV

SEQ ID NO: 67538 - protein, 9 aa, Homo sapiens
  misc_feature: Table A; Target 67538; HLA-A*02:03; PMEL; ENSG00000185664; TAA
SAFTITDQV

SEQ ID NO: 67539 - protein, 9 aa, Homo sapiens
  misc_feature: Table A; Target 67539; HLA-A*02:04; PMEL; ENSG00000185664; TAA
SAFTITDQV

SEQ ID NO: 67540 - protein, 9 aa, Homo sapiens
  misc_feature: Table A; Target 67540; HLA-A*02:07; PMEL; ENSG00000185664; TAA
SAFTITDQV

SEQ ID NO: 67541 - protein, 9 aa, Homo sapiens
  misc_feature: Table A; Target 67541; HLA-A*26:01; PMEL; ENSG00000185664; TAA
SAFTITDQV

SEQ ID NO: 67542 - protein, 9 aa, Homo sapiens
  misc_feature: Table A; Target 67542; HLA-A*30:01; PMEL; ENSG00000185664; TAA
SAFTITDQV

SEQ ID NO: 67543 - protein, 9 aa, Homo sapiens
  misc_feature: Table A; Target 67543; HLA-A*32:01; PMEL; ENSG00000185664; TAA
SAFTITDQV

SEQ ID NO: 67544 - protein, 9 aa, Homo sapiens
  misc_feature: Table A; Target 67544; HLA-A*68:02; PMEL; ENSG00000185664; TAA
SAFTITDQV

SEQ ID NO: 67545 - protein, 9 aa, Homo sapiens
  misc_feature: Table A; Target 67545; HLA-B*13:02; PMEL; ENSG00000185664; TAA
SAFTITDQV

SEQ ID NO: 67546 - protein, 9 aa, Homo sapiens
  misc_feature: Table A; Target 67546; HLA-B*27:05; PMEL; ENSG00000185664; TAA
SAFTITDQV

SEQ ID NO: 67547 - protein, 9 aa, Homo sapiens
  misc_feature: Table A; Target 67547; HLA-B*35:03; PMEL; ENSG00000185664; TAA
SAFTITDQV

SEQ ID NO: 67548 - protein, 9 aa, Homo sapiens
  misc_feature: Table A; Target 67548; HLA-B*38:01; PMEL; ENSG00000185664; TAA
SAFTITDQV

SEQ ID NO: 67549 - protein, 9 aa, Homo sapiens
  misc_feature: Table A; Target 67549; HLA-B*39:01; PMEL; ENSG00000185664; TAA
SAFTITDQV

SEQ ID NO: 67550 - protein, 9 aa, Homo sapiens
  misc_feature: Table A; Target 67550; HLA-B*40:02; PMEL; ENSG00000185664; TAA
SAFTITDQV

SEQ ID NO: 67551 - protein, 9 aa, Homo sapiens
  misc_feature: Table A; Target 67551; HLA-B*46:01; PMEL; ENSG00000185664; TAA
SAFTITDQV

SEQ ID NO: 67552 - protein, 9 aa, Homo sapiens
  misc_feature: Table A; Target 67552; HLA-B*49:01; PMEL; ENSG00000185664; TAA
SAFTITDQV

SEQ ID NO: 67553 - protein, 9 aa, Homo sapiens
  misc_feature: Table A; Target 67553; HLA-B*51:01; PMEL; ENSG00000185664; TAA
SAFTITDQV

SEQ ID NO: 67554 - protein, 9 aa, Homo sapiens
  misc_feature: Table A; Target 67554; HLA-B*54:01; PMEL; ENSG00000185664; TAA
SAFTITDQV

SEQ ID NO: 67555 - protein, 9 aa, Homo sapiens
  misc_feature: Table A; Target 67555; HLA-B*55:01; PMEL; ENSG00000185664; TAA
SAFTITDQV

SEQ ID NO: 67556 - protein, 9 aa, Homo sapiens
  misc_feature: Table A; Target 67556; HLA-B*58:01; PMEL; ENSG00000185664; TAA
SAFTITDQV

SEQ ID NO: 67557 - protein, 9 aa, Homo sapiens
  misc_feature: Table A; Target 67557; HLA-C*01:02; PMEL; ENSG00000185664; TAA
SAFTITDQV

SEQ ID NO: 67558 - protein, 9 aa, Homo sapiens
  misc_feature: Table A; Target 67558; HLA-C*02:02; PMEL; ENSG00000185664; TAA
SAFTITDQV

SEQ ID NO: 67559 - protein, 9 aa, Homo sapiens
  misc_feature: Table A; Target 67559; HLA-C*03:03; PMEL; ENSG00000185664; TAA
SAFTITDQV

SEQ ID NO: 67560 - protein, 9 aa, Homo sapiens
  misc_feature: Table A; Target 67560; HLA-C*05:01; PMEL; ENSG00000185664; TAA
SAFTITDQV

SEQ ID NO: 67561 - protein, 9 aa, Homo sapiens
  misc_feature: Table A; Target 67561; HLA-C*06:02; PMEL; ENSG00000185664; TAA
SAFTITDQV

SEQ ID NO: 67562 - protein, 9 aa, Homo sapiens
  misc_feature: Table A; Target 67562; HLA-C*07:06; PMEL; ENSG00000185664; TAA
SAFTITDQV

SEQ ID NO: 67563 - protein, 9 aa, Homo sapiens
  misc_feature: Table A; Target 67563; HLA-C*12:03; PMEL; ENSG00000185664; TAA
SAFTITDQV

SEQ ID NO: 67564 - protein, 9 aa, Homo sapiens
  misc_feature: Table A; Target 67564; HLA-C*16:02; PMEL; ENSG00000185664; TAA
SAFTITDQV

SEQ ID NO: 67565 - protein, 9 aa, Homo sapiens
  misc_feature: Table A; Target 67565; HLA-C*16:04; PMEL; ENSG00000185664; TAA
SAFTITDQV

SEQ ID NO: 67566 - protein, 11 aa, Homo sapiens
  misc_feature: Table A; Target 67566; HLA-A*23:01; PMEL; ENSG00000185664; TAA
SAFTITDQVPF

SEQ ID NO: 67567 - protein, 11 aa, Homo sapiens
  misc_feature: Table A; Target 67567; HLA-A*31:01; PMEL; ENSG00000185664; TAA
SAFTITDQVPF

SEQ ID NO: 67568 - protein, 11 aa, Homo sapiens
  misc_feature: Table A; Target 67568; HLA-A*68:02; PMEL; ENSG00000185664; TAA
SAFTITDQVPF

SEQ ID NO: 67569 - protein, 11 aa, Homo sapiens
  misc_feature: Table A; Target 67569; HLA-B*35:01; PMEL; ENSG00000185664; TAA
SAFTITDQVPF

SEQ ID NO: 67570 - protein, 11 aa, Homo sapiens
  misc_feature: Table A; Target 67570; HLA-B*54:01; PMEL; ENSG00000185664; TAA
SAFTITDQVPF

SEQ ID NO: 67571 - protein, 11 aa, Homo sapiens
  misc_feature: Table A; Target 67571; HLA-B*57:01; PMEL; ENSG00000185664; TAA
SAFTITDQVPF

SEQ ID NO: 67572 - protein, 11 aa, Homo sapiens
  misc_feature: Table A; Target 67572; HLA-C*02:02; PMEL; ENSG00000185664; TAA
SAFTITDQVPF

SEQ ID NO: 67573 - protein, 11 aa, Homo sapiens
  misc_feature: Table A; Target 67573; HLA-C*07:01; PMEL; ENSG00000185664; TAA
SAFTITDQVPF

SEQ ID NO: 67574 - protein, 11 aa, Homo sapiens
  misc_feature: Table A; Target 67574; HLA-C*16:04; PMEL; ENSG00000185664; TAA
SAFTITDQVPF

SEQ ID NO: 67575 - protein, 10 aa, Homo sapiens
  misc_feature: Table A; Target 67575; HLA-C*01:02; PMEL; ENSG00000185664; TAA
SCPIGENSPL

SEQ ID NO: 67576 - protein, 8 aa, Homo sapiens
  misc_feature: Table A; Target 67576; HLA-A*30:01; PMEL; ENSG00000185664; TAA
SEVMGTTL

SEQ ID NO: 67577 - protein, 8 aa, Homo sapiens
  misc_feature: Table A; Target 67577; HLA-B*15:03; PMEL; ENSG00000185664; TAA
SEVMGTTL

SEQ ID NO: 67578 - protein, 8 aa, Homo sapiens
  misc_feature: Table A; Target 67578; HLA-B*18:01; PMEL; ENSG00000185664; TAA
SEVMGTTL

SEQ ID NO: 67579 - protein, 8 aa, Homo sapiens
  misc_feature: Table A; Target 67579; HLA-B*27:02; PMEL; ENSG00000185664; TAA
SEVMGTTL

SEQ ID NO: 67580 - protein, 8 aa, Homo sapiens
  misc_feature: Table A; Target 67580; HLA-B*37:01; PMEL; ENSG00000185664; TAA
SEVMGTTL

SEQ ID NO: 67581 - protein, 8 aa, Homo sapiens
  misc_feature: Table A; Target 67581; HLA-B*39:01; PMEL; ENSG00000185664; TAA
SEVMGTTL

SEQ ID NO: 67582 - protein, 8 aa, Homo sapiens
  misc_feature: Table A; Target 67582; HLA-B*40:01; PMEL; ENSG00000185664; TAA
SEVMGTTL

SEQ ID NO: 67583 - protein, 8 aa, Homo sapiens
  misc_feature: Table A; Target 67583; HLA-B*40:02; PMEL; ENSG00000185664; TAA
SEVMGTTL

SEQ ID NO: 67584 - protein, 8 aa, Homo sapiens
  misc_feature: Table A; Target 67584; HLA-B*44:02; PMEL; ENSG00000185664; TAA
SEVMGTTL

SEQ ID NO: 67585 - protein, 8 aa, Homo sapiens
  misc_feature: Table A; Target 67585; HLA-B*44:03; PMEL; ENSG00000185664; TAA
SEVMGTTL

SEQ ID NO: 67586 - protein, 8 aa, Homo sapiens
  misc_feature: Table A; Target 67586; HLA-B*49:01; PMEL; ENSG00000185664; TAA
SEVMGTTL

SEQ ID NO: 67587 - protein, 8 aa, Homo sapiens
  misc_feature: Table A; Target 67587; HLA-C*07:04; PMEL; ENSG00000185664; TAA
SEVMGTTL

SEQ ID NO: 67588 - protein, 8 aa, Homo sapiens
  misc_feature: Table A; Target 67588; HLA-C*16:04; PMEL; ENSG00000185664; TAA
SEVMGTTL

SEQ ID NO: 67589 - protein, 9 aa, Homo sapiens
  misc_feature: Table A; Target 67589; HLA-A*30:01; PMEL; ENSG00000185664; TAA
SEVMGTTLA

SEQ ID NO: 67590 - protein, 9 aa, Homo sapiens
  misc_feature: Table A; Target 67590; HLA-B*40:01; PMEL; ENSG00000185664; TAA
SEVMGTTLA

SEQ ID NO: 67591 - protein, 9 aa, Homo sapiens
  misc_feature: Table A; Target 67591; HLA-B*40:02; PMEL; ENSG00000185664; TAA
SEVMGTTLA

SEQ ID NO: 67592 - protein, 9 aa, Homo sapiens
  misc_feature: Table A; Target 67592; HLA-B*49:01; PMEL; ENSG00000185664; TAA
SEVMGTTLA

SEQ ID NO: 67593 - protein, 11 aa, Homo sapiens
  misc_feature: Table A; Target 67593; HLA-A*30:01; PMEL; ENSG00000185664; TAA
SEVMGTTLAEM

SEQ ID NO: 67594 - protein, 11 aa, Homo sapiens
  misc_feature: Table A; Target 67594; HLA-B*40:01; PMEL; ENSG00000185664; TAA
SEVMGTTLAEM

SEQ ID NO: 67595 - protein, 11 aa, Homo sapiens
  misc_feature: Table A; Target 67595; HLA-B*40:02; PMEL; ENSG00000185664; TAA
SEVMGTTLAEM

SEQ ID NO: 67596 - protein, 11 aa, Homo sapiens
  misc_feature: Table A; Target 67596; HLA-B*44:03; PMEL; ENSG00000185664; TAA
SEVMGTTLAEM

SEQ ID NO: 67597 - protein, 8 aa, Homo sapiens
  misc_feature: Table A; Target 67597; HLA-A*23:01; PMEL; ENSG00000185664; TAA
SFSIALNF

SEQ ID NO: 67598 - protein, 8 aa, Homo sapiens
  misc_feature: Table A; Target 67598; HLA-C*14:02; PMEL; ENSG00000185664; TAA
SFSIALNF

SEQ ID NO: 67599 - protein, 9 aa, Homo sapiens
  misc_feature: Table A; Target 67599; HLA-A*24:02; PMEL; ENSG00000185664; TAA
SFVYVWKTW

SEQ ID NO: 67600 - protein, 9 aa, Homo sapiens
  misc_feature: Table A; Target 67600; HLA-B*57:01; PMEL; ENSG00000185664; TAA
SFVYVWKTW

SEQ ID NO: 67601 - protein, 9 aa, Homo sapiens
  misc_feature: Table A; Target 67601; HLA-B*35:03; PMEL; ENSG00000185664; TAA
SGEGDAFEL

SEQ ID NO: 67602 - protein, 9 aa, Homo sapiens
  misc_feature: Table A; Target 67602; HLA-A*31:01; PMEL; ENSG00000185664; TAA
SGLSIGTGR

SEQ ID NO: 67603 - protein, 9 aa, Homo sapiens
  misc_feature: Table A; Target 67603; HLA-A*33:01; PMEL; ENSG00000185664; TAA
SGLSIGTGR

SEQ ID NO: 67604 - protein, 9 aa, Homo sapiens
  misc_feature: Table A; Target 67604; HLA-A*33:03; PMEL; ENSG00000185664; TAA
SGLSIGTGR

SEQ ID NO: 67605 - protein, 9 aa, Homo sapiens
  misc_feature: Table A; Target 67605; HLA-A*68:01; PMEL; ENSG00000185664; TAA
SGLSIGTGR

SEQ ID NO: 67606 - protein, 9 aa, Homo sapiens
  misc_feature: Table A; Target 67606; HLA-C*07:06; PMEL; ENSG00000185664; TAA
SGLSIGTGR

SEQ ID NO: 67607 - protein, 9 aa, Homo sapiens
  misc_feature: Table A; Target 67607; HLA-A*30:01; PMEL; ENSG00000185664; TAA
SGTLISRAL

SEQ ID NO: 67608 - protein, 9 aa, Homo sapiens
  misc_feature: Table A; Target 67608; HLA-B*07:02; PMEL; ENSG00000185664; TAA
SGTLISRAL

SEQ ID NO: 67609 - protein, 9 aa, Homo sapiens
  misc_feature: Table A; Target 67609; HLA-B*08:01; PMEL; ENSG00000185664; TAA
SGTLISRAL

SEQ ID NO: 67610 - protein, 9 aa, Homo sapiens
  misc_feature: Table A; Target 67610; HLA-B*15:03; PMEL; ENSG00000185664; TAA
SGTLISRAL

SEQ ID NO: 67611 - protein, 9 aa, Homo sapiens
  misc_feature: Table A; Target 67611; HLA-C*01:02; PMEL; ENSG00000185664; TAA
SGTLISRAL

SEQ ID NO: 67612 - protein, 9 aa, Homo sapiens
  misc_feature: Table A; Target 67612; HLA-C*03:03; PMEL; ENSG00000185664; TAA
SGTLISRAL

SEQ ID NO: 67613 - protein, 9 aa, Homo sapiens
  misc_feature: Table A; Target 67613; HLA-C*03:04; PMEL; ENSG00000185664; TAA
SGTLISRAL

SEQ ID NO: 67614 - protein, 9 aa, Homo sapiens
  misc_feature: Table A; Target 67614; HLA-C*06:02; PMEL; ENSG00000185664; TAA
SGTLISRAL

SEQ ID NO: 67615 - protein, 9 aa, Homo sapiens
  misc_feature: Table A; Target 67615; HLA-C*07:02; PMEL; ENSG00000185664; TAA
SGTLISRAL

SEQ ID NO: 67616 - protein, 9 aa, Homo sapiens
  misc_feature: Table A; Target 67616; HLA-C*14:02; PMEL; ENSG00000185664; TAA
SGTLISRAL

SEQ ID NO: 67617 - protein, 9 aa, Homo sapiens
  misc_feature: Table A; Target 67617; HLA-C*16:01; PMEL; ENSG00000185664; TAA
SGTLISRAL

SEQ ID NO: 67618 - protein, 9 aa, Homo sapiens
  misc_feature: Table A; Target 67618; HLA-C*16:02; PMEL; ENSG00000185664; TAA
SGTLISRAL

SEQ ID NO: 67619 - protein, 11 aa, Homo sapiens
  misc_feature: Table A; Target 67619; HLA-A*03:01; PMEL; ENSG00000185664; TAA
SIALNFPGSQK

SEQ ID NO: 67620 - protein, 11 aa, Homo sapiens
  misc_feature: Table A; Target 67620; HLA-A*03:02; PMEL; ENSG00000185664; TAA
SIALNFPGSQK

SEQ ID NO: 67621 - protein, 11 aa, Homo sapiens
  misc_feature: Table A; Target 67621; HLA-A*11:01; PMEL; ENSG00000185664; TAA
SIALNFPGSQK

SEQ ID NO: 67622 - protein, 11 aa, Homo sapiens
  misc_feature: Table A; Target 67622; HLA-A*68:01; PMEL; ENSG00000185664; TAA
SIALNFPGSQK

SEQ ID NO: 67623 - protein, 11 aa, Homo sapiens
  misc_feature: Table A; Target 67623; HLA-C*07:06; PMEL; ENSG00000185664; TAA
SIALNFPGSQK

SEQ ID NO: 67624 - protein, 8 aa, Homo sapiens
  misc_feature: Table A; Target 67624; HLA-B*07:02; PMEL; ENSG00000185664; TAA
SIGTGRAM

SEQ ID NO: 67625 - protein, 8 aa, Homo sapiens
  misc_feature: Table A; Target 67625; HLA-B*08:01; PMEL; ENSG00000185664; TAA
SIGTGRAM

SEQ ID NO: 67626 - protein, 8 aa, Homo sapiens
  misc_feature: Table A; Target 67626; HLA-C*01:02; PMEL; ENSG00000185664; TAA
SIGTGRAM

SEQ ID NO: 67627 - protein, 8 aa, Homo sapiens
  misc_feature: Table A; Target 67627; HLA-C*03:03; PMEL; ENSG00000185664; TAA
SIGTGRAM

SEQ ID NO: 67628 - protein, 8 aa, Homo sapiens
  misc_feature: Table A; Target 67628; HLA-C*14:02; PMEL; ENSG00000185664; TAA
SIGTGRAM

SEQ ID NO: 67629 - protein, 8 aa, Homo sapiens
  misc_feature: Table A; Target 67629; HLA-C*16:01; PMEL; ENSG00000185664; TAA
SIGTGRAM

SEQ ID NO: 67630 - protein, 9 aa, Homo sapiens
  misc_feature: Table A; Target 67630; HLA-B*07:02; PMEL; ENSG00000185664; TAA
SIGTGRAML

SEQ ID NO: 67631 - protein, 9 aa, Homo sapiens
  misc_feature: Table A; Target 67631; HLA-C*01:02; PMEL; ENSG00000185664; TAA
SIGTGRAML

SEQ ID NO: 67632 - protein, 9 aa, Homo sapiens
  misc_feature: Table A; Target 67632; HLA-C*07:02; PMEL; ENSG00000185664; TAA
SIGTGRAML

SEQ ID NO: 67633 - protein, 8 aa, Homo sapiens
  misc_feature: Table A; Target 67633; HLA-B*13:02; PMEL; ENSG00000185664; TAA
SIMSTESI

SEQ ID NO: 67634 - protein, 9 aa, Homo sapiens
  misc_feature: Table A; Target 67634; HLA-C*01:02; PMEL; ENSG00000185664; TAA
SITGSLGPL

SEQ ID NO: 67635 - protein, 8 aa, Homo sapiens
  misc_feature: Table A; Target 67635; HLA-A*02:01; PMEL; ENSG00000185664; TAA
SLADTNSL

SEQ ID NO: 67636 - protein, 8 aa, Homo sapiens
  misc_feature: Table A; Target 67636; HLA-A*02:03; PMEL; ENSG00000185664; TAA
SLADTNSL

SEQ ID NO: 67637 - protein, 8 aa, Homo sapiens
  misc_feature: Table A; Target 67637; HLA-B*37:01; PMEL; ENSG00000185664; TAA
SLADTNSL

SEQ ID NO: 67638 - protein, 8 aa, Homo sapiens
  misc_feature: Table A; Target 67638; HLA-C*01:02; PMEL; ENSG00000185664; TAA
SLADTNSL

SEQ ID NO: 67639 - protein, 8 aa, Homo sapiens
  misc_feature: Table A; Target 67639; HLA-C*14:02; PMEL; ENSG00000185664; TAA
SLADTNSL

SEQ ID NO: 67640 - protein, 9 aa, Homo sapiens
  misc_feature: Table A; Target 67640; HLA-A*02:01; PMEL; ENSG00000185664; TAA
SLADTNSLA

SEQ ID NO: 67641 - protein, 9 aa, Homo sapiens
  misc_feature: Table A; Target 67641; HLA-A*02:03; PMEL; ENSG00000185664; TAA
SLADTNSLA

SEQ ID NO: 67642 - protein, 9 aa, Homo sapiens
  misc_feature: Table A; Target 67642; HLA-B*13:02; PMEL; ENSG00000185664; TAA
SLADTNSLA

SEQ ID NO: 67643 - protein, 9 aa, Homo sapiens
  misc_feature: Table A; Target 67643; HLA-B*55:01; PMEL; ENSG00000185664; TAA
SLADTNSLA

SEQ ID NO: 67644 - protein, 10 aa, Homo sapiens
  misc_feature: Table A; Target 67644; HLA-A*02:01; PMEL; ENSG00000185664; TAA
SLADTNSLAV

SEQ ID NO: 67645 - protein, 10 aa, Homo sapiens
  misc_feature: Table A; Target 67645; HLA-A*02:03; PMEL; ENSG00000185664; TAA
SLADTNSLAV

SEQ ID NO: 67646 - protein, 10 aa, Homo sapiens
  misc_feature: Table A; Target 67646; HLA-B*13:02; PMEL; ENSG00000185664; TAA
SLADTNSLAV

SEQ ID NO: 67647 - protein, 10 aa, Homo sapiens
  misc_feature: Table A; Target 67647; HLA-B*55:01; PMEL; ENSG00000185664; TAA
SLADTNSLAV

SEQ ID NO: 67648 - protein, 10 aa, Homo sapiens
  misc_feature: Table A; Target 67648; HLA-C*01:02; PMEL; ENSG00000185664; TAA
SLADTNSLAV

SEQ ID NO: 67649 - protein, 11 aa, Homo sapiens
  misc_feature: Table A; Target 67649; HLA-A*02:01; PMEL; ENSG00000185664; TAA
SLADTNSLAVV

SEQ ID NO: 67650 - protein, 11 aa, Homo sapiens
  misc_feature: Table A; Target 67650; HLA-A*02:03; PMEL; ENSG00000185664; TAA
SLADTNSLAVV

SEQ ID NO: 67651 - protein, 11 aa, Homo sapiens
  misc_feature: Table A; Target 67651; HLA-A*02:04; PMEL; ENSG00000185664; TAA
SLADTNSLAVV

SEQ ID NO: 67652 - protein, 11 aa, Homo sapiens
  misc_feature: Table A; Target 67652; HLA-A*02:07; PMEL; ENSG00000185664; TAA
SLADTNSLAVV

SEQ ID NO: 67653 - protein, 11 aa, Homo sapiens
  misc_feature: Table A; Target 67653; HLA-A*68:02; PMEL; ENSG00000185664; TAA
SLADTNSLAVV

SEQ ID NO: 67654 - protein, 11 aa, Homo sapiens
  misc_feature: Table A; Target 67654; HLA-B*55:01; PMEL; ENSG00000185664; TAA
SLADTNSLAVV

SEQ ID NO: 67655 - protein, 11 aa, Homo sapiens
  misc_feature: Table A; Target 67655; HLA-C*01:02; PMEL; ENSG00000185664; TAA
SLADTNSLAVV

SEQ ID NO: 67656 - protein, 9 aa, Homo sapiens
  misc_feature: Table A; Target 67656; HLA-A*02:01; PMEL; ENSG00000185664; TAA
SLAVVSTQL

SEQ ID NO: 67657 - protein, 9 aa, Homo sapiens
  misc_feature: Table A; Target 67657; HLA-A*02:03; PMEL; ENSG00000185664; TAA
SLAVVSTQL

SEQ ID NO: 67658 - protein, 9 aa, Homo sapiens
  misc_feature: Table A; Target 67658; HLA-A*02:04; PMEL; ENSG00000185664; TAA
SLAVVSTQL

SEQ ID NO: 67659 - protein, 9 aa, Homo sapiens
  misc_feature: Table A; Target 67659; HLA-A*02:07; PMEL; ENSG00000185664; TAA
SLAVVSTQL

SEQ ID NO: 67660 - protein, 9 aa, Homo sapiens
  misc_feature: Table A; Target 67660; HLA-A*03:01; PMEL; ENSG00000185664; TAA
SLAVVSTQL

SEQ ID NO: 67661 - protein, 9 aa, Homo sapiens
  misc_feature: Table A; Target 67661; HLA-A*03:02; PMEL; ENSG00000185664; TAA
SLAVVSTQL

SEQ ID NO: 67662 - protein, 9 aa, Homo sapiens
  misc_feature: Table A; Target 67662; HLA-A*23:01; PMEL; ENSG00000185664; TAA
SLAVVSTQL

SEQ ID NO: 67663 - protein, 9 aa, Homo sapiens
  misc_feature: Table A; Target 67663; HLA-A*24:02; PMEL; ENSG00000185664; TAA
SLAVVSTQL

SEQ ID NO: 67664 - protein, 9 aa, Homo sapiens
  misc_feature: Table A; Target 67664; HLA-A*30:01; PMEL; ENSG00000185664; TAA
SLAVVSTQL

SEQ ID NO: 67665 - protein, 9 aa, Homo sapiens
  misc_feature: Table A; Target 67665; HLA-A*32:01; PMEL; ENSG00000185664; TAA
SLAVVSTQL

SEQ ID NO: 67666 - protein, 9 aa, Homo sapiens
  misc_feature: Table A; Target 67666; HLA-A*68:02; PMEL; ENSG00000185664; TAA
SLAVVSTQL

SEQ ID NO: 67667 - protein, 9 aa, Homo sapiens
  misc_feature: Table A; Target 67667; HLA-B*07:02; PMEL; ENSG00000185664; TAA
SLAVVSTQL

SEQ ID NO: 67668 - protein, 9 aa, Homo sapiens
  misc_feature: Table A; Target 67668; HLA-B*08:01; PMEL; ENSG00000185664; TAA
SLAVVSTQL

SEQ ID NO: 67669 - protein, 9 aa, Homo sapiens
  misc_feature: Table A; Target 67669; HLA-B*13:02; PMEL; ENSG00000185664; TAA
SLAVVSTQL

SEQ ID NO: 67670 - protein, 9 aa, Homo sapiens
  misc_feature: Table A; Target 67670; HLA-B*15:01; PMEL; ENSG00000185664; TAA
SLAVVSTQL

SEQ ID NO: 67671 - protein, 9 aa, Homo sapiens
  misc_feature: Table A; Target 67671; HLA-B*15:03; PMEL; ENSG00000185664; TAA
SLAVVSTQL

SEQ ID NO: 67672 - protein, 9 aa, Homo sapiens
  misc_feature: Table A; Target 67672; HLA-B*27:05; PMEL; ENSG00000185664; TAA
SLAVVSTQL

SEQ ID NO: 67673 - protein, 9 aa, Homo sapiens
  misc_feature: Table A; Target 67673; HLA-B*35:03; PMEL; ENSG00000185664; TAA
SLAVVSTQL

SEQ ID NO: 67674 - protein, 9 aa, Homo sapiens
  misc_feature: Table A; Target 67674; HLA-B*37:01; PMEL; ENSG00000185664; TAA
SLAVVSTQL

SEQ ID NO: 67675 - protein, 9 aa, Homo sapiens
  misc_feature: Table A; Target 67675; HLA-B*38:01; PMEL; ENSG00000185664; TAA
SLAVVSTQL

SEQ ID NO: 67676 - protein, 9 aa, Homo sapiens
  misc_feature: Table A; Target 67676; HLA-B*39:01; PMEL; ENSG00000185664; TAA
SLAVVSTQL

SEQ ID NO: 67677 - protein, 9 aa, Homo sapiens
  misc_feature: Table A; Target 67677; HLA-B*40:01; PMEL; ENSG00000185664; TAA
SLAVVSTQL

SEQ ID NO: 67678 - protein, 9 aa, Homo sapiens
  misc_feature: Table A; Target 67678; HLA-B*40:02; PMEL; ENSG00000185664; TAA
SLAVVSTQL

SEQ ID NO: 67679 - protein, 9 aa, Homo sapiens
  misc_feature: Table A; Target 67679; HLA-B*46:01; PMEL; ENSG00000185664; TAA
SLAVVSTQL

SEQ ID NO: 67680 - protein, 9 aa, Homo sapiens
  misc_feature: Table A; Target 67680; HLA-B*55:01; PMEL; ENSG00000185664; TAA
SLAVVSTQL

SEQ ID NO: 67681 - protein, 9 aa, Homo sapiens
  misc_feature: Table A; Target 67681; HLA-C*01:02; PMEL; ENSG00000185664; TAA
SLAVVSTQL

SEQ ID NO: 67682 - protein, 9 aa, Homo sapiens
  misc_feature: Table A; Target 67682; HLA-C*02:02; PMEL; ENSG00000185664; TAA
SLAVVSTQL

SEQ ID NO: 67683 - protein, 9 aa, Homo sapiens
  misc_feature: Table A; Target 67683; HLA-C*03:03; PMEL; ENSG00000185664; TAA
SLAVVSTQL

SEQ ID NO: 67684 - protein, 9 aa, Homo sapiens
  misc_feature: Table A; Target 67684; HLA-C*04:01; PMEL; ENSG00000185664; TAA
SLAVVSTQL

SEQ ID NO: 67685 - protein, 9 aa, Homo sapiens
  misc_feature: Table A; Target 67685; HLA-C*06:02; PMEL; ENSG00000185664; TAA
SLAVVSTQL

SEQ ID NO: 67686 - protein, 9 aa, Homo sapiens
  misc_feature: Table A; Target 67686; HLA-C*07:02; PMEL; ENSG00000185664; TAA
SLAVVSTQL

SEQ ID NO: 67687 - protein, 9 aa, Homo sapiens
  misc_feature: Table A; Target 67687; HLA-C*07:04; PMEL; ENSG00000185664; TAA
SLAVVSTQL

SEQ ID NO: 67688 - protein, 9 aa, Homo sapiens
  misc_feature: Table A; Target 67688; HLA-C*07:06; PMEL; ENSG00000185664; TAA
SLAVVSTQL

SEQ ID NO: 67689 - protein, 9 aa, Homo sapiens
  misc_feature: Table A; Target 67689; HLA-C*14:02; PMEL; ENSG00000185664; TAA
SLAVVSTQL

SEQ ID NO: 67690 - protein, 9 aa, Homo sapiens
  misc_feature: Table A; Target 67690; HLA-C*16:01; PMEL; ENSG00000185664; TAA
SLAVVSTQL

SEQ ID NO: 67691 - protein, 10 aa, Homo sapiens
  misc_feature: Table A; Target 67691; HLA-A*02:03; PMEL; ENSG00000185664; TAA
SLAVVSTQLI

SEQ ID NO: 67692 - protein, 8 aa, Homo sapiens
  misc_feature: Table A; Target 67692; HLA-C*04:01; PMEL; ENSG00000185664; TAA
SNDGPTLI

SEQ ID NO: 67693 - protein, 8 aa, Homo sapiens
  misc_feature: Table A; Target 67693; HLA-C*05:01; PMEL; ENSG00000185664; TAA
SNDGPTLI

SEQ ID NO: 67694 - protein, 9 aa, Homo sapiens
  misc_feature: Table A; Target 67694; HLA-B*27:05; PMEL; ENSG00000185664; TAA
SNDGPTLIG

SEQ ID NO: 67695 - protein, 8 aa, Homo sapiens
  misc_feature: Table A; Target 67695; HLA-B*07:02; PMEL; ENSG00000185664; TAA
SPACQLVL

SEQ ID NO: 67696 - protein, 10 aa, Homo sapiens
  misc_feature: Table A; Target 67696; HLA-A*68:01; PMEL; ENSG00000185664; TAA
SPGCQPPAQR

SEQ ID NO: 67697 - protein, 10 aa, Homo sapiens
  misc_feature: Table A; Target 67697; HLA-C*07:06; PMEL; ENSG00000185664; TAA
SPGCQPPAQR

SEQ ID NO: 67698 - protein, 9 aa, Homo sapiens
  misc_feature: Table A; Target 67698; HLA-A*02:01; PMEL; ENSG00000185664; TAA
SPLLSGQQV

SEQ ID NO: 67699 - protein, 9 aa, Homo sapiens
  misc_feature: Table A; Target 67699; HLA-B*07:02; PMEL; ENSG00000185664; TAA
SPLLSGQQV

SEQ ID NO: 67700 - protein, 9 aa, Homo sapiens
  misc_feature: Table A; Target 67700; HLA-B*08:01; PMEL; ENSG00000185664; TAA
SPLLSGQQV

SEQ ID NO: 67701 - protein, 9 aa, Homo sapiens
  misc_feature: Table A; Target 67701; HLA-B*13:02; PMEL; ENSG00000185664; TAA
SPLLSGQQV

SEQ ID NO: 67702 - protein, 9 aa, Homo sapiens
  misc_feature: Table A; Target 67702; HLA-B*35:01; PMEL; ENSG00000185664; TAA
SPLLSGQQV

SEQ ID NO: 67703 - protein, 9 aa, Homo sapiens
  misc_feature: Table A; Target 67703; HLA-B*35:03; PMEL; ENSG00000185664; TAA
SPLLSGQQV

SEQ ID NO: 67704 - protein, 9 aa, Homo sapiens
  misc_feature: Table A; Target 67704; HLA-B*38:01; PMEL; ENSG00000185664; TAA
SPLLSGQQV

SEQ ID NO: 67705 - protein, 9 aa, Homo sapiens
  misc_feature: Table A; Target 67705; HLA-B*40:02; PMEL; ENSG00000185664; TAA
SPLLSGQQV

SEQ ID NO: 67706 - protein, 9 aa, Homo sapiens
  misc_feature: Table A; Target 67706; HLA-B*51:01; PMEL; ENSG00000185664; TAA
SPLLSGQQV

SEQ ID NO: 67707 - protein, 9 aa, Homo sapiens
  misc_feature: Table A; Target 67707; HLA-B*54:01; PMEL; ENSG00000185664; TAA
SPLLSGQQV

SEQ ID NO: 67708 - protein, 9 aa, Homo sapiens
  misc_feature: Table A; Target 67708; HLA-B*55:01; PMEL; ENSG00000185664; TAA
SPLLSGQQV

SEQ ID NO: 67709 - protein, 9 aa, Homo sapiens
  misc_feature: Table A; Target 67709; HLA-B*56:01; PMEL; ENSG00000185664; TAA
SPLLSGQQV

SEQ ID NO: 67710 - protein, 9 aa, Homo sapiens
  misc_feature: Table A; Target 67710; HLA-C*01:02; PMEL; ENSG00000185664; TAA
SPLLSGQQV

SEQ ID NO: 67711 - protein, 9 aa, Homo sapiens
  misc_feature: Table A; Target 67711; HLA-C*03:03; PMEL; ENSG00000185664; TAA
SPLLSGQQV

SEQ ID NO: 67712 - protein, 9 aa, Homo sapiens
  misc_feature: Table A; Target 67712; HLA-C*03:04; PMEL; ENSG00000185664; TAA
SPLLSGQQV

SEQ ID NO: 67713 - protein, 9 aa, Homo sapiens
  misc_feature: Table A; Target 67713; HLA-C*04:01; PMEL; ENSG00000185664; TAA
SPLLSGQQV

SEQ ID NO: 67714 - protein, 9 aa, Homo sapiens
  misc_feature: Table A; Target 67714; HLA-C*06:02; PMEL; ENSG00000185664; TAA
SPLLSGQQV

SEQ ID NO: 67715 - protein, 9 aa, Homo sapiens
  misc_feature: Table A; Target 67715; HLA-C*07:01; PMEL; ENSG00000185664; TAA
SPLLSGQQV

SEQ ID NO: 67716 - protein, 9 aa, Homo sapiens
  misc_feature: Table A; Target 67716; HLA-C*07:02; PMEL; ENSG00000185664; TAA
SPLLSGQQV

SEQ ID NO: 67717 - protein, 9 aa, Homo sapiens
  misc_feature: Table A; Target 67717; HLA-C*14:02; PMEL; ENSG00000185664; TAA
SPLLSGQQV

SEQ ID NO: 67718 - protein, 9 aa, Homo sapiens
  misc_feature: Table A; Target 67718; HLA-B*56:01; PMEL; ENSG00000185664; TAA
SPVPGTTDG

SEQ ID NO: 67719 - protein, 11 aa, Homo sapiens
  misc_feature: Table A; Target 67719; HLA-A*68:01; PMEL; ENSG00000185664; TAA
SPVPGTTDGHR

SEQ ID NO: 67720 - protein, 8 aa, Homo sapiens
  misc_feature: Table A; Target 67720; HLA-A*30:02; PMEL; ENSG00000185664; TAA
SQKRSFVY

SEQ ID NO: 67721 - protein, 8 aa, Homo sapiens
  misc_feature: Table A; Target 67721; HLA-B*08:01; PMEL; ENSG00000185664; TAA
SQKRSFVY

SEQ ID NO: 67722 - protein, 8 aa, Homo sapiens
  misc_feature: Table A; Target 67722; HLA-B*15:01; PMEL; ENSG00000185664; TAA
SQKRSFVY

SEQ ID NO: 67723 - protein, 8 aa, Homo sapiens
  misc_feature: Table A; Target 67723; HLA-B*15:03; PMEL; ENSG00000185664; TAA
SQKRSFVY

SEQ ID NO: 67724 - protein, 8 aa, Homo sapiens
  misc_feature: Table A; Target 67724; HLA-C*07:01; PMEL; ENSG00000185664; TAA
SQKRSFVY

SEQ ID NO: 67725 - protein, 8 aa, Homo sapiens
  misc_feature: Table A; Target 67725; HLA-C*07:04; PMEL; ENSG00000185664; TAA
SQKRSFVY

SEQ ID NO: 67726 - protein, 9 aa, Homo sapiens
  misc_feature: Table A; Target 67726; HLA-A*02:03; PMEL; ENSG00000185664; TAA
SQKRSFVYV

SEQ ID NO: 67727 - protein, 11 aa, Homo sapiens
  misc_feature: Table A; Target 67727; HLA-A*30:01; PMEL; ENSG00000185664; TAA
SQKVLPDGQVI

SEQ ID NO: 67728 - protein, 9 aa, Homo sapiens
  misc_feature: Table A; Target 67728; HLA-B*13:02; PMEL; ENSG00000185664; TAA
SQVWGGQPV

SEQ ID NO: 67729 - protein, 10 aa, Homo sapiens
  misc_feature: Table A; Target 67729; HLA-A*30:02; PMEL; ENSG00000185664; TAA
SQVWGGQPVY

SEQ ID NO: 67730 - protein, 10 aa, Homo sapiens
  misc_feature: Table A; Target 67730; HLA-A*32:01; PMEL; ENSG00000185664; TAA
SQVWGGQPVY

SEQ ID NO: 67731 - protein, 10 aa, Homo sapiens
  misc_feature: Table A; Target 67731; HLA-B*15:01; PMEL; ENSG00000185664; TAA
SQVWGGQPVY

SEQ ID NO: 67732 - protein, 10 aa, Homo sapiens
  misc_feature: Table A; Target 67732; HLA-B*15:03; PMEL; ENSG00000185664; TAA
SQVWGGQPVY

SEQ ID NO: 67733 - protein, 10 aa, Homo sapiens
  misc_feature: Table A; Target 67733; HLA-B*27:05; PMEL; ENSG00000185664; TAA
SQVWGGQPVY

SEQ ID NO: 67734 - protein, 10 aa, Homo sapiens
  misc_feature: Table A; Target 67734; HLA-B*39:01; PMEL; ENSG00000185664; TAA
SQVWGGQPVY

SEQ ID NO: 67735 - protein, 10 aa, Homo sapiens
  misc_feature: Table A; Target 67735; HLA-C*07:04; PMEL; ENSG00000185664; TAA
SQVWGGQPVY

SEQ ID NO: 67736 - protein, 10 aa, Homo sapiens
  misc_feature: Table A; Target 67736; HLA-C*16:04; PMEL; ENSG00000185664; TAA
SQVWGGQPVY

SEQ ID NO: 67737 - protein, 8 aa, Homo sapiens
  misc_feature: Table A; Target 67737; HLA-B*27:05; PMEL; ENSG00000185664; TAA
SRALVVTH

SEQ ID NO: 67738 - protein, 9 aa, Homo sapiens
  misc_feature: Table A; Target 67738; HLA-B*27:05; PMEL; ENSG00000185664; TAA
SRALVVTHT

SEQ ID NO: 67739 - protein, 9 aa, Homo sapiens
  misc_feature: Table A; Target 67739; HLA-C*06:02; PMEL; ENSG00000185664; TAA
SRALVVTHT

SEQ ID NO: 67740 - protein, 10 aa, Homo sapiens
  misc_feature: Table A; Target 67740; HLA-A*30:02; PMEL; ENSG00000185664; TAA
SRALVVTHTY

SEQ ID NO: 67741 - protein, 10 aa, Homo sapiens
  misc_feature: Table A; Target 67741; HLA-B*27:02; PMEL; ENSG00000185664; TAA
SRALVVTHTY

SEQ ID NO: 67742 - protein, 10 aa, Homo sapiens
  misc_feature: Table A; Target 67742; HLA-B*27:05; PMEL; ENSG00000185664; TAA
SRALVVTHTY

SEQ ID NO: 67743 - protein, 10 aa, Homo sapiens
  misc_feature: Table A; Target 67743; HLA-B*44:02; PMEL; ENSG00000185664; TAA
SRALVVTHTY

SEQ ID NO: 67744 - protein, 10 aa, Homo sapiens
  misc_feature: Table A; Target 67744; HLA-B*44:03; PMEL; ENSG00000185664; TAA
SRALVVTHTY

SEQ ID NO: 67745 - protein, 10 aa, Homo sapiens
  misc_feature: Table A; Target 67745; HLA-C*16:04; PMEL; ENSG00000185664; TAA
SRALVVTHTY

SEQ ID NO: 67746 - protein, 9 aa, Homo sapiens
  misc_feature: Table A; Target 67746; HLA-B*27:05; PMEL; ENSG00000185664; TAA
SRSYVPLAH

SEQ ID NO: 67747 - protein, 9 aa, Homo sapiens
  misc_feature: Table A; Target 67747; HLA-C*06:02; PMEL; ENSG00000185664; TAA
SRSYVPLAH

SEQ ID NO: 67748 - protein, 10 aa, Homo sapiens
  misc_feature: Table A; Target 67748; HLA-A*68:02; PMEL; ENSG00000185664; TAA
SSAFTITDQV

SEQ ID NO: 67749 - protein, 8 aa, Homo sapiens
  misc_feature: Table A; Target 67749; HLA-A*11:01; PMEL; ENSG00000185664; TAA
SSGTLISR

SEQ ID NO: 67750 - protein, 8 aa, Homo sapiens
  misc_feature: Table A; Target 67750; HLA-A*31:01; PMEL; ENSG00000185664; TAA
SSGTLISR

SEQ ID NO: 67751 - protein, 8 aa, Homo sapiens
  misc_feature: Table A; Target 67751; HLA-A*33:01; PMEL; ENSG00000185664; TAA
SSGTLISR

SEQ ID NO: 67752 - protein, 8 aa, Homo sapiens
  misc_feature: Table A; Target 67752; HLA-A*33:03; PMEL; ENSG00000185664; TAA
SSGTLISR

SEQ ID NO: 67753 - protein, 8 aa, Homo sapiens
  misc_feature: Table A; Target 67753; HLA-A*68:01; PMEL; ENSG00000185664; TAA
SSGTLISR

SEQ ID NO: 67754 - protein, 8 aa, Homo sapiens
  misc_feature: Table A; Target 67754; HLA-C*07:06; PMEL; ENSG00000185664; TAA
SSGTLISR

SEQ ID NO: 67755 - protein, 9 aa, Homo sapiens
  misc_feature: Table A; Target 67755; HLA-A*25:01; PMEL; ENSG00000185664; TAA
SSIMSTESI

SEQ ID NO: 67756 - protein, 9 aa, Homo sapiens
  misc_feature: Table A; Target 67756; HLA-A*30:01; PMEL; ENSG00000185664; TAA
SSIMSTESI

SEQ ID NO: 67757 - protein, 9 aa, Homo sapiens
  misc_feature: Table A; Target 67757; HLA-B*13:02; PMEL; ENSG00000185664; TAA
SSIMSTESI

SEQ ID NO: 67758 - protein, 9 aa, Homo sapiens
  misc_feature: Table A; Target 67758; HLA-B*40:01; PMEL; ENSG00000185664; TAA
SSIMSTESI

SEQ ID NO: 67759 - protein, 9 aa, Homo sapiens
  misc_feature: Table A; Target 67759; HLA-B*40:02; PMEL; ENSG00000185664; TAA
SSIMSTESI

SEQ ID NO: 67760 - protein, 9 aa, Homo sapiens
  misc_feature: Table A; Target 67760; HLA-B*46:01; PMEL; ENSG00000185664; TAA
SSIMSTESI

SEQ ID NO: 67761 - protein, 9 aa, Homo sapiens
  misc_feature: Table A; Target 67761; HLA-B*49:01; PMEL; ENSG00000185664; TAA
SSIMSTESI

SEQ ID NO: 67762 - protein, 9 aa, Homo sapiens
  misc_feature: Table A; Target 67762; HLA-B*58:01; PMEL; ENSG00000185664; TAA
SSIMSTESI

SEQ ID NO: 67763 - protein, 9 aa, Homo sapiens
  misc_feature: Table A; Target 67763; HLA-C*01:02; PMEL; ENSG00000185664; TAA
SSIMSTESI

SEQ ID NO: 67764 - protein, 9 aa, Homo sapiens
  misc_feature: Table A; Target 67764; HLA-C*03:03; PMEL; ENSG00000185664; TAA
SSIMSTESI

SEQ ID NO: 67765 - protein, 9 aa, Homo sapiens
  misc_feature: Table A; Target 67765; HLA-C*03:04; PMEL; ENSG00000185664; TAA
SSIMSTESI

SEQ ID NO: 67766 - protein, 9 aa, Homo sapiens
  misc_feature: Table A; Target 67766; HLA-C*06:02; PMEL; ENSG00000185664; TAA
SSIMSTESI

SEQ ID NO: 67767 - protein, 9 aa, Homo sapiens
  misc_feature: Table A; Target 67767; HLA-C*14:02; PMEL; ENSG00000185664; TAA
SSIMSTESI

SEQ ID NO: 67768 - protein, 9 aa, Homo sapiens
  misc_feature: Table A; Target 67768; HLA-C*16:04; PMEL; ENSG00000185664; TAA
SSIMSTESI

SEQ ID NO: 67769 - protein, 11 aa, Homo sapiens
  misc_feature: Table A; Target 67769; HLA-A*68:02; PMEL; ENSG00000185664; TAA
SSSAFTITDQV

SEQ ID NO: 67770 - protein, 9 aa, Homo sapiens
  misc_feature: Table A; Target 67770; HLA-A*03:01; PMEL; ENSG00000185664; TAA
STAPVQMPT

SEQ ID NO: 67771 - protein, 9 aa, Homo sapiens
  misc_feature: Table A; Target 67771; HLA-A*03:02; PMEL; ENSG00000185664; TAA
STAPVQMPT

SEQ ID NO: 67772 - protein, 9 aa, Homo sapiens
  misc_feature: Table A; Target 67772; HLA-A*11:01; PMEL; ENSG00000185664; TAA
STAPVQMPT

SEQ ID NO: 67773 - protein, 9 aa, Homo sapiens
  misc_feature: Table A; Target 67773; HLA-A*31:01; PMEL; ENSG00000185664; TAA
STAPVQMPT

SEQ ID NO: 67774 - protein, 9 aa, Homo sapiens
  misc_feature: Table A; Target 67774; HLA-A*68:01; PMEL; ENSG00000185664; TAA
STAPVQMPT

SEQ ID NO: 67775 - protein, 9 aa, Homo sapiens
  misc_feature: Table A; Target 67775; HLA-A*68:02; PMEL; ENSG00000185664; TAA
STAPVQMPT

SEQ ID NO: 67776 - protein, 9 aa, Homo sapiens
  misc_feature: Table A; Target 67776; HLA-B*27:05; PMEL; ENSG00000185664; TAA
STAPVQMPT

SEQ ID NO: 67777 - protein, 9 aa, Homo sapiens
  misc_feature: Table A; Target 67777; HLA-B*40:02; PMEL; ENSG00000185664; TAA
STAPVQMPT

SEQ ID NO: 67778 - protein, 9 aa, Homo sapiens
  misc_feature: Table A; Target 67778; HLA-B*56:01; PMEL; ENSG00000185664; TAA
STAPVQMPT

SEQ ID NO: 67779 - protein, 9 aa, Homo sapiens
  misc_feature: Table A; Target 67779; HLA-B*58:01; PMEL; ENSG00000185664; TAA
STAPVQMPT

SEQ ID NO: 67780 - protein, 9 aa, Homo sapiens
  misc_feature: Table A; Target 67780; HLA-C*03:03; PMEL; ENSG00000185664; TAA
STAPVQMPT

SEQ ID NO: 67781 - protein, 9 aa, Homo sapiens
  misc_feature: Table A; Target 67781; HLA-C*03:04; PMEL; ENSG00000185664; TAA
STAPVQMPT

SEQ ID NO: 67782 - protein, 9 aa, Homo sapiens
  misc_feature: Table A; Target 67782; HLA-C*04:01; PMEL; ENSG00000185664; TAA
STAPVQMPT

SEQ ID NO: 67783 - protein, 9 aa, Homo sapiens
  misc_feature: Table A; Target 67783; HLA-C*06:02; PMEL; ENSG00000185664; TAA
STAPVQMPT

SEQ ID NO: 67784 - protein, 9 aa, Homo sapiens
  misc_feature: Table A; Target 67784; HLA-C*07:01; PMEL; ENSG00000185664; TAA
STAPVQMPT

SEQ ID NO: 67785 - protein, 9 aa, Homo sapiens
  misc_feature: Table A; Target 67785; HLA-C*07:02; PMEL; ENSG00000185664; TAA
STAPVQMPT

SEQ ID NO: 67786 - protein, 9 aa, Homo sapiens
  misc_feature: Table A; Target 67786; HLA-C*07:04; PMEL; ENSG00000185664; TAA
STAPVQMPT

SEQ ID NO: 67787 - protein, 9 aa, Homo sapiens
  misc_feature: Table A; Target 67787; HLA-C*07:06; PMEL; ENSG00000185664; TAA
STAPVQMPT

SEQ ID NO: 67788 - protein, 9 aa, Homo sapiens
  misc_feature: Table A; Target 67788; HLA-C*16:01; PMEL; ENSG00000185664; TAA
STAPVQMPT

SEQ ID NO: 67789 - protein, 9 aa, Homo sapiens
  misc_feature: Table A; Target 67789; HLA-C*16:02; PMEL; ENSG00000185664; TAA
STAPVQMPT

SEQ ID NO: 67790 - protein, 10 aa, Homo sapiens
  misc_feature: Table A; Target 67790; HLA-A*25:01; PMEL; ENSG00000185664; TAA
STAPVQMPTA

SEQ ID NO: 67791 - protein, 10 aa, Homo sapiens
  misc_feature: Table A; Target 67791; HLA-A*68:02; PMEL; ENSG00000185664; TAA
STAPVQMPTA

SEQ ID NO: 67792 - protein, 10 aa, Homo sapiens
  misc_feature: Table A; Target 67792; HLA-B*27:05; PMEL; ENSG00000185664; TAA
STAPVQMPTA

SEQ ID NO: 67793 - protein, 10 aa, Homo sapiens
  misc_feature: Table A; Target 67793; HLA-B*54:01; PMEL; ENSG00000185664; TAA
STAPVQMPTA

SEQ ID NO: 67794 - protein, 10 aa, Homo sapiens
  misc_feature: Table A; Target 67794; HLA-B*56:01; PMEL; ENSG00000185664; TAA
STAPVQMPTA

SEQ ID NO: 67795 - protein, 10 aa, Homo sapiens
  misc_feature: Table A; Target 67795; HLA-C*06:02; PMEL; ENSG00000185664; TAA
STAPVQMPTA

SEQ ID NO: 67796 - protein, 9 aa, Homo sapiens
  misc_feature: Table A; Target 67796; HLA-B*07:02; PMEL; ENSG00000185664; TAA
STESITGSL

SEQ ID NO: 67797 - protein, 9 aa, Homo sapiens
  misc_feature: Table A; Target 67797; HLA-C*01:02; PMEL; ENSG00000185664; TAA
STESITGSL

SEQ ID NO: 67798 - protein, 9 aa, Homo sapiens
  misc_feature: Table A; Target 67798; HLA-C*05:01; PMEL; ENSG00000185664; TAA
STESITGSL

SEQ ID NO: 67799 - protein, 11 aa, Homo sapiens
  misc_feature: Table A; Target 67799; HLA-A*01:01; PMEL; ENSG00000185664; TAA
STESITGSLGP

SEQ ID NO: 67800 - protein, 8 aa, Homo sapiens
  misc_feature: Table A; Target 67800; HLA-A*03:02; PMEL; ENSG00000185664; TAA
STGMTPEK

SEQ ID NO: 67801 - protein, 8 aa, Homo sapiens
  misc_feature: Table A; Target 67801; HLA-A*11:01; PMEL; ENSG00000185664; TAA
STGMTPEK

SEQ ID NO: 67802 - protein, 8 aa, Homo sapiens
  misc_feature: Table A; Target 67802; HLA-B*51:01; PMEL; ENSG00000185664; TAA
STPEATGM

SEQ ID NO: 67803 - protein, 8 aa, Homo sapiens
  misc_feature: Table A; Target 67803; HLA-C*01:02; PMEL; ENSG00000185664; TAA
STPEATGM

SEQ ID NO: 67804 - protein, 8 aa, Homo sapiens
  misc_feature: Table A; Target 67804; HLA-C*04:01; PMEL; ENSG00000185664; TAA
STPEATGM

SEQ ID NO: 67805 - protein, 8 aa, Homo sapiens
  misc_feature: Table A; Target 67805; HLA-C*05:01; PMEL; ENSG00000185664; TAA
STPEATGM

SEQ ID NO: 67806 - protein, 10 aa, Homo sapiens
  misc_feature: Table A; Target 67806; HLA-C*01:02; PMEL; ENSG00000185664; TAA
STPEATGMTP

SEQ ID NO: 67807 - protein, 11 aa, Homo sapiens
  misc_feature: Table A; Target 67807; HLA-B*56:01; PMEL; ENSG00000185664; TAA
STPEATGMTPA

SEQ ID NO: 67808 - protein, 9 aa, Homo sapiens
  misc_feature: Table A; Target 67808; HLA-C*06:02; PMEL; ENSG00000185664; TAA
STQLIMPGQ

SEQ ID NO: 67809 - protein, 9 aa, Homo sapiens
  misc_feature: Table A; Target 67809; HLA-A*02:01; PMEL; ENSG00000185664; TAA
SVQVPTTEV

SEQ ID NO: 67810 - protein, 9 aa, Homo sapiens
  misc_feature: Table A; Target 67810; HLA-A*02:03; PMEL; ENSG00000185664; TAA
SVQVPTTEV

SEQ ID NO: 67811 - protein, 9 aa, Homo sapiens
  misc_feature: Table A; Target 67811; HLA-A*26:01; PMEL; ENSG00000185664; TAA
SVQVPTTEV

SEQ ID NO: 67812 - protein, 9 aa, Homo sapiens
  misc_feature: Table A; Target 67812; HLA-A*32:01; PMEL; ENSG00000185664; TAA
SVQVPTTEV

SEQ ID NO: 67813 - protein, 9 aa, Homo sapiens
  misc_feature: Table A; Target 67813; HLA-B*13:02; PMEL; ENSG00000185664; TAA
SVQVPTTEV

SEQ ID NO: 67814 - protein, 9 aa, Homo sapiens
  misc_feature: Table A; Target 67814; HLA-B*15:01; PMEL; ENSG00000185664; TAA
SVQVPTTEV

SEQ ID NO: 67815 - protein, 9 aa, Homo sapiens
  misc_feature: Table A; Target 67815; HLA-B*46:01; PMEL; ENSG00000185664; TAA
SVQVPTTEV

SEQ ID NO: 67816 - protein, 9 aa, Homo sapiens
  misc_feature: Table A; Target 67816; HLA-B*55:01; PMEL; ENSG00000185664; TAA
SVQVPTTEV

SEQ ID NO: 67817 - protein, 9 aa, Homo sapiens
  misc_feature: Table A; Target 67817; HLA-C*01:02; PMEL; ENSG00000185664; TAA
SVQVPTTEV

SEQ ID NO: 67818 - protein, 9 aa, Homo sapiens
  misc_feature: Table A; Target 67818; HLA-C*03:03; PMEL; ENSG00000185664; TAA
SVQVPTTEV

SEQ ID NO: 67819 - protein, 9 aa, Homo sapiens
  misc_feature: Table A; Target 67819; HLA-C*03:04; PMEL; ENSG00000185664; TAA
SVQVPTTEV

SEQ ID NO: 67820 - protein, 9 aa, Homo sapiens
  misc_feature: Table A; Target 67820; HLA-C*05:01; PMEL; ENSG00000185664; TAA
SVQVPTTEV

SEQ ID NO: 67821 - protein, 9 aa, Homo sapiens
  misc_feature: Table A; Target 67821; HLA-C*14:02; PMEL; ENSG00000185664; TAA
SVQVPTTEV

SEQ ID NO: 67822 - protein, 8 aa, Homo sapiens
  misc_feature: Table A; Target 67822; HLA-B*07:02; PMEL; ENSG00000185664; TAA
SVSQLRAL

SEQ ID NO: 67823 - protein, 8 aa, Homo sapiens
  misc_feature: Table A; Target 67823; HLA-C*01:02; PMEL; ENSG00000185664; TAA
SVSQLRAL

SEQ ID NO: 67824 - protein, 8 aa, Homo sapiens
  misc_feature: Table A; Target 67824; HLA-C*16:01; PMEL; ENSG00000185664; TAA
SVSQLRAL

SEQ ID NO: 67825 - protein, 8 aa, Homo sapiens
  misc_feature: Table A; Target 67825; HLA-A*31:01; PMEL; ENSG00000185664; TAA
SVSVSQLR

SEQ ID NO: 67826 - protein, 8 aa, Homo sapiens
  misc_feature: Table A; Target 67826; HLA-C*07:06; PMEL; ENSG00000185664; TAA
SVSVSQLR

SEQ ID NO: 67827 - protein, 9 aa, Homo sapiens
  misc_feature: Table A; Target 67827; HLA-B*13:02; PMEL; ENSG00000185664; TAA
SVSVSQLRA

SEQ ID NO: 67828 - protein, 10 aa, Homo sapiens
  misc_feature: Table A; Target 67828; HLA-A*68:02; PMEL; ENSG00000185664; TAA
SVTLDIVQGI

SEQ ID NO: 67829 - protein, 10 aa, Homo sapiens
  misc_feature: Table A; Target 67829; HLA-B*13:02; PMEL; ENSG00000185664; TAA
SVTLDIVQGI

SEQ ID NO: 67830 - protein, 9 aa, Homo sapiens
  misc_feature: Table A; Target 67830; HLA-A*24:02; PMEL; ENSG00000185664; TAA
SYVPLAHSS

SEQ ID NO: 67831 - protein, 9 aa, Homo sapiens
  misc_feature: Table A; Target 67831; HLA-C*06:02; PMEL; ENSG00000185664; TAA
SYVPLAHSS

SEQ ID NO: 67832 - protein, 9 aa, Homo sapiens
  misc_feature: Table A; Target 67832; HLA-C*14:02; PMEL; ENSG00000185664; TAA
SYVPLAHSS

SEQ ID NO: 67833 - protein, 10 aa, Homo sapiens
  misc_feature: Table A; Target 67833; HLA-A*23:01; PMEL; ENSG00000185664; TAA
TAAQVTTTEW

SEQ ID NO: 67834 - protein, 10 aa, Homo sapiens
  misc_feature: Table A; Target 67834; HLA-A*25:01; PMEL; ENSG00000185664; TAA
TAAQVTTTEW

SEQ ID NO: 67835 - protein, 10 aa, Homo sapiens
  misc_feature: Table A; Target 67835; HLA-A*26:01; PMEL; ENSG00000185664; TAA
TAAQVTTTEW

SEQ ID NO: 67836 - protein, 10 aa, Homo sapiens
  misc_feature: Table A; Target 67836; HLA-A*32:01; PMEL; ENSG00000185664; TAA
TAAQVTTTEW

SEQ ID NO: 67837 - protein, 10 aa, Homo sapiens
  misc_feature: Table A; Target 67837; HLA-A*33:01; PMEL; ENSG00000185664; TAA
TAAQVTTTEW

SEQ ID NO: 67838 - protein, 10 aa, Homo sapiens
  misc_feature: Table A; Target 67838; HLA-A*33:03; PMEL; ENSG00000185664; TAA
TAAQVTTTEW

SEQ ID NO: 67839 - protein, 10 aa, Homo sapiens
  misc_feature: Table A; Target 67839; HLA-A*68:01; PMEL; ENSG00000185664; TAA
TAAQVTTTEW

SEQ ID NO: 67840 - protein, 10 aa, Homo sapiens
  misc_feature: Table A; Target 67840; HLA-A*68:02; PMEL; ENSG00000185664; TAA
TAAQVTTTEW

SEQ ID NO: 67841 - protein, 10 aa, Homo sapiens
  misc_feature: Table A; Target 67841; HLA-B*15:01; PMEL; ENSG00000185664; TAA
TAAQVTTTEW

SEQ ID NO: 67842 - protein, 10 aa, Homo sapiens
  misc_feature: Table A; Target 67842; HLA-B*27:02; PMEL; ENSG00000185664; TAA
TAAQVTTTEW

SEQ ID NO: 67843 - protein, 10 aa, Homo sapiens
  misc_feature: Table A; Target 67843; HLA-B*27:05; PMEL; ENSG00000185664; TAA
TAAQVTTTEW

SEQ ID NO: 67844 - protein, 10 aa, Homo sapiens
  misc_feature: Table A; Target 67844; HLA-B*35:01; PMEL; ENSG00000185664; TAA
TAAQVTTTEW

SEQ ID NO: 67845 - protein, 10 aa, Homo sapiens
  misc_feature: Table A; Target 67845; HLA-B*38:01; PMEL; ENSG00000185664; TAA
TAAQVTTTEW

SEQ ID NO: 67846 - protein, 10 aa, Homo sapiens
  misc_feature: Table A; Target 67846; HLA-B*39:01; PMEL; ENSG00000185664; TAA
TAAQVTTTEW

SEQ ID NO: 67847 - protein, 10 aa, Homo sapiens
  misc_feature: Table A; Target 67847; HLA-B*44:02; PMEL; ENSG00000185664; TAA
TAAQVTTTEW

SEQ ID NO: 67848 - protein, 10 aa, Homo sapiens
  misc_feature: Table A; Target 67848; HLA-B*44:03; PMEL; ENSG00000185664; TAA
TAAQVTTTEW

SEQ ID NO: 67849 - protein, 10 aa, Homo sapiens
  misc_feature: Table A; Target 67849; HLA-B*46:01; PMEL; ENSG00000185664; TAA
TAAQVTTTEW

SEQ ID NO: 67850 - protein, 10 aa, Homo sapiens
  misc_feature: Table A; Target 67850; HLA-B*57:01; PMEL; ENSG00000185664; TAA
TAAQVTTTEW

SEQ ID NO: 67851 - protein, 10 aa, Homo sapiens
  misc_feature: Table A; Target 67851; HLA-B*58:01; PMEL; ENSG00000185664; TAA
TAAQVTTTEW

SEQ ID NO: 67852 - protein, 10 aa, Homo sapiens
  misc_feature: Table A; Target 67852; HLA-C*01:02; PMEL; ENSG00000185664; TAA
TAAQVTTTEW

SEQ ID NO: 67853 - protein, 10 aa, Homo sapiens
  misc_feature: Table A; Target 67853; HLA-C*02:02; PMEL; ENSG00000185664; TAA
TAAQVTTTEW

SEQ ID NO: 67854 - protein, 10 aa, Homo sapiens
  misc_feature: Table A; Target 67854; HLA-C*03:03; PMEL; ENSG00000185664; TAA
TAAQVTTTEW

SEQ ID NO: 67855 - protein, 10 aa, Homo sapiens
  misc_feature: Table A; Target 67855; HLA-C*04:01; PMEL; ENSG00000185664; TAA
TAAQVTTTEW

SEQ ID NO: 67856 - protein, 10 aa, Homo sapiens
  misc_feature: Table A; Target 67856; HLA-C*07:06; PMEL; ENSG00000185664; TAA
TAAQVTTTEW

SEQ ID NO: 67857 - protein, 10 aa, Homo sapiens
  misc_feature: Table A; Target 67857; HLA-C*12:03; PMEL; ENSG00000185664; TAA
TAAQVTTTEW

SEQ ID NO: 67858 - protein, 10 aa, Homo sapiens
  misc_feature: Table A; Target 67858; HLA-C*16:04; PMEL; ENSG00000185664; TAA
TAAQVTTTEW

SEQ ID NO: 67859 - protein, 9 aa, Homo sapiens
  misc_feature: Table A; Target 67859; HLA-C*05:01; PMEL; ENSG00000185664; TAA
TAEAPNTTA

SEQ ID NO: 67860 - protein, 10 aa, Homo sapiens
  misc_feature: Table A; Target 67860; HLA-B*35:03; PMEL; ENSG00000185664; TAA
TAEPSGTTSV

SEQ ID NO: 67861 - protein, 10 aa, Homo sapiens
  misc_feature: Table A; Target 67861; HLA-B*38:01; PMEL; ENSG00000185664; TAA
TAEPSGTTSV

SEQ ID NO: 67862 - protein, 10 aa, Homo sapiens
  misc_feature: Table A; Target 67862; HLA-B*39:01; PMEL; ENSG00000185664; TAA
TAEPSGTTSV

SEQ ID NO: 67863 - protein, 10 aa, Homo sapiens
  misc_feature: Table A; Target 67863; HLA-B*49:01; PMEL; ENSG00000185664; TAA
TAEPSGTTSV

SEQ ID NO: 67864 - protein, 10 aa, Homo sapiens
  misc_feature: Table A; Target 67864; HLA-B*51:01; PMEL; ENSG00000185664; TAA
TAEPSGTTSV

SEQ ID NO: 67865 - protein, 10 aa, Homo sapiens
  misc_feature: Table A; Target 67865; HLA-C*03:03; PMEL; ENSG00000185664; TAA
TAEPSGTTSV

SEQ ID NO: 67866 - protein, 10 aa, Homo sapiens
  misc_feature: Table A; Target 67866; HLA-C*03:04; PMEL; ENSG00000185664; TAA
TAEPSGTTSV

SEQ ID NO: 67867 - protein, 10 aa, Homo sapiens
  misc_feature: Table A; Target 67867; HLA-C*05:01; PMEL; ENSG00000185664; TAA
TAEPSGTTSV

SEQ ID NO: 67868 - protein, 11 aa, Homo sapiens
  misc_feature: Table A; Target 67868; HLA-B*27:02; PMEL; ENSG00000185664; TAA
TAESTGMTPEK

SEQ ID NO: 67869 - protein, 8 aa, Homo sapiens
  misc_feature: Table A; Target 67869; HLA-B*51:01; PMEL; ENSG00000185664; TAA
TAGQVPTT

SEQ ID NO: 67870 - protein, 10 aa, Homo sapiens
  misc_feature: Table A; Target 67870; HLA-C*05:01; PMEL; ENSG00000185664; TAA
TAGQVPTTEV

SEQ ID NO: 67871 - protein, 9 aa, Homo sapiens
  misc_feature: Table A; Target 67871; HLA-A*02:07; PMEL; ENSG00000185664; TAA
TAPVQMPTA

SEQ ID NO: 67872 - protein, 9 aa, Homo sapiens
  misc_feature: Table A; Target 67872; HLA-B*46:01; PMEL; ENSG00000185664; TAA
TAPVQMPTA

SEQ ID NO: 67873 - protein, 9 aa, Homo sapiens
  misc_feature: Table A; Target 67873; HLA-B*51:01; PMEL; ENSG00000185664; TAA
TAPVQMPTA

SEQ ID NO: 67874 - protein, 9 aa, Homo sapiens
  misc_feature: Table A; Target 67874; HLA-B*54:01; PMEL; ENSG00000185664; TAA
TAPVQMPTA

SEQ ID NO: 67875 - protein, 9 aa, Homo sapiens
  misc_feature: Table A; Target 67875; HLA-B*56:01; PMEL; ENSG00000185664; TAA
TAPVQMPTA

SEQ ID NO: 67876 - protein, 9 aa, Homo sapiens
  misc_feature: Table A; Target 67876; HLA-C*01:02; PMEL; ENSG00000185664; TAA
TAPVQMPTA

SEQ ID NO: 67877 - protein, 9 aa, Homo sapiens
  misc_feature: Table A; Target 67877; HLA-C*03:03; PMEL; ENSG00000185664; TAA
TAPVQMPTA

SEQ ID NO: 67878 - protein, 9 aa, Homo sapiens
  misc_feature: Table A; Target 67878; HLA-B*54:01; PMEL; ENSG00000185664; TAA
TAQVVLQAA

SEQ ID NO: 67879 - protein, 9 aa, Homo sapiens
  misc_feature: Table A; Target 67879; HLA-B*56:01; PMEL; ENSG00000185664; TAA
TAQVVLQAA

SEQ ID NO: 67880 - protein, 8 aa, Homo sapiens
  misc_feature: Table A; Target 67880; HLA-B*08:01; PMEL; ENSG00000185664; TAA
TATLRLVK

SEQ ID NO: 67881 - protein, 8 aa, Homo sapiens
  misc_feature: Table A; Target 67881; HLA-C*06:02; PMEL; ENSG00000185664; TAA
TATLRLVK

SEQ ID NO: 67882 - protein, 8 aa, Homo sapiens
  misc_feature: Table A; Target 67882; HLA-C*07:01; PMEL; ENSG00000185664; TAA
TATLRLVK

SEQ ID NO: 67883 - protein, 8 aa, Homo sapiens
  misc_feature: Table A; Target 67883; HLA-C*16:01; PMEL; ENSG00000185664; TAA
TATLRLVK

SEQ ID NO: 67884 - protein, 9 aa, Homo sapiens
  misc_feature: Table A; Target 67884; HLA-A*31:01; PMEL; ENSG00000185664; TAA
TATLRLVKR

SEQ ID NO: 67885 - protein, 9 aa, Homo sapiens
  misc_feature: Table A; Target 67885; HLA-A*33:01; PMEL; ENSG00000185664; TAA
TATLRLVKR

SEQ ID NO: 67886 - protein, 9 aa, Homo sapiens
  misc_feature: Table A; Target 67886; HLA-A*33:03; PMEL; ENSG00000185664; TAA
TATLRLVKR

SEQ ID NO: 67887 - protein, 9 aa, Homo sapiens
  misc_feature: Table A; Target 67887; HLA-A*68:01; PMEL; ENSG00000185664; TAA
TATLRLVKR

SEQ ID NO: 67888 - protein, 9 aa, Homo sapiens
  misc_feature: Table A; Target 67888; HLA-C*16:01; PMEL; ENSG00000185664; TAA
TATLRLVKR

SEQ ID NO: 67889 - protein, 8 aa, Homo sapiens
  misc_feature: Table A; Target 67889; HLA-B*13:02; PMEL; ENSG00000185664; TAA
TDQVPFSV

SEQ ID NO: 67890 - protein, 8 aa, Homo sapiens
  misc_feature: Table A; Target 67890; HLA-B*18:01; PMEL; ENSG00000185664; TAA
TDQVPFSV

SEQ ID NO: 67891 - protein, 8 aa, Homo sapiens
  misc_feature: Table A; Target 67891; HLA-B*37:01; PMEL; ENSG00000185664; TAA
TDQVPFSV

SEQ ID NO: 67892 - protein, 8 aa, Homo sapiens
  misc_feature: Table A; Target 67892; HLA-B*40:02; PMEL; ENSG00000185664; TAA
TDQVPFSV

SEQ ID NO: 67893 - protein, 8 aa, Homo sapiens
  misc_feature: Table A; Target 67893; HLA-C*06:02; PMEL; ENSG00000185664; TAA
TDQVPFSV

SEQ ID NO: 67894 - protein, 8 aa, Homo sapiens
  misc_feature: Table A; Target 67894; HLA-C*07:01; PMEL; ENSG00000185664; TAA
TDQVPFSV

SEQ ID NO: 67895 - protein, 8 aa, Homo sapiens
  misc_feature: Table A; Target 67895; HLA-C*12:03; PMEL; ENSG00000185664; TAA
TDQVPFSV

SEQ ID NO: 67896 - protein, 8 aa, Homo sapiens
  misc_feature: Table A; Target 67896; HLA-C*16:02; PMEL; ENSG00000185664; TAA
TDQVPFSV

SEQ ID NO: 67897 - protein, 10 aa, Homo sapiens
  misc_feature: Table A; Target 67897; HLA-B*40:02; PMEL; ENSG00000185664; TAA
TDQVPFSVSV

SEQ ID NO: 67898 - protein, 9 aa, Homo sapiens
  misc_feature: Table A; Target 67898; HLA-B*18:01; PMEL; ENSG00000185664; TAA
TEAQRLDCW

SEQ ID NO: 67899 - protein, 9 aa, Homo sapiens
  misc_feature: Table A; Target 67899; HLA-B*27:02; PMEL; ENSG00000185664; TAA
TEAQRLDCW

SEQ ID NO: 67900 - protein, 9 aa, Homo sapiens
  misc_feature: Table A; Target 67900; HLA-B*37:01; PMEL; ENSG00000185664; TAA
TEAQRLDCW

SEQ ID NO: 67901 - protein, 9 aa, Homo sapiens
  misc_feature: Table A; Target 67901; HLA-B*40:02; PMEL; ENSG00000185664; TAA
TEAQRLDCW

SEQ ID NO: 67902 - protein, 9 aa, Homo sapiens
  misc_feature: Table A; Target 67902; HLA-B*44:02; PMEL; ENSG00000185664; TAA
TEAQRLDCW

SEQ ID NO: 67903 - protein, 9 aa, Homo sapiens
  misc_feature: Table A; Target 67903; HLA-B*44:03; PMEL; ENSG00000185664; TAA
TEAQRLDCW

SEQ ID NO: 67904 - protein, 9 aa, Homo sapiens
  misc_feature: Table A; Target 67904; HLA-B*57:01; PMEL; ENSG00000185664; TAA
TEAQRLDCW

SEQ ID NO: 67905 - protein, 9 aa, Homo sapiens
  misc_feature: Table A; Target 67905; HLA-C*16:04; PMEL; ENSG00000185664; TAA
TEAQRLDCW

SEQ ID NO: 67906 - protein, 8 aa, Homo sapiens
  misc_feature: Table A; Target 67906; HLA-A*30:01; PMEL; ENSG00000185664; TAA
TESITGSL

SEQ ID NO: 67907 - protein, 8 aa, Homo sapiens
  misc_feature: Table A; Target 67907; HLA-B*18:01; PMEL; ENSG00000185664; TAA
TESITGSL

SEQ ID NO: 67908 - protein, 8 aa, Homo sapiens
  misc_feature: Table A; Target 67908; HLA-B*37:01; PMEL; ENSG00000185664; TAA
TESITGSL

SEQ ID NO: 67909 - protein, 8 aa, Homo sapiens
  misc_feature: Table A; Target 67909; HLA-B*40:01; PMEL; ENSG00000185664; TAA
TESITGSL

SEQ ID NO: 67910 - protein, 8 aa, Homo sapiens
  misc_feature: Table A; Target 67910; HLA-B*40:02; PMEL; ENSG00000185664; TAA
TESITGSL

SEQ ID NO: 67911 - protein, 8 aa, Homo sapiens
  misc_feature: Table A; Target 67911; HLA-B*49:01; PMEL; ENSG00000185664; TAA
TESITGSL

SEQ ID NO: 67912 - protein, 9 aa, Homo sapiens
  misc_feature: Table A; Target 67912; HLA-B*49:01; PMEL; ENSG00000185664; TAA
TESITGSLG

SEQ ID NO: 67913 - protein, 11 aa, Homo sapiens
  misc_feature: Table A; Target 67913; HLA-B*40:01; PMEL; ENSG00000185664; TAA
TESITGSLGPL

SEQ ID NO: 67914 - protein, 11 aa, Homo sapiens
  misc_feature: Table A; Target 67914; HLA-B*40:02; PMEL; ENSG00000185664; TAA
TESITGSLGPL

SEQ ID NO: 67915 - protein, 11 aa, Homo sapiens
  misc_feature: Table A; Target 67915; HLA-C*06:02; PMEL; ENSG00000185664; TAA
TESITGSLGPL

SEQ ID NO: 67916 - protein, 11 aa, Homo sapiens
  misc_feature: Table A; Target 67916; HLA-C*07:01; PMEL; ENSG00000185664; TAA
TESITGSLGPL

SEQ ID NO: 67917 - protein, 8 aa, Homo sapiens
  misc_feature: Table A; Target 67917; HLA-B*18:01; PMEL; ENSG00000185664; TAA
TEVISTAP

SEQ ID NO: 67918 - protein, 9 aa, Homo sapiens
  misc_feature: Table A; Target 67918; HLA-A*30:01; PMEL; ENSG00000185664; TAA
TEVISTAPV

SEQ ID NO: 67919 - protein, 9 aa, Homo sapiens
  misc_feature: Table A; Target 67919; HLA-B*18:01; PMEL; ENSG00000185664; TAA
TEVISTAPV

SEQ ID NO: 67920 - protein, 9 aa, Homo sapiens
  misc_feature: Table A; Target 67920; HLA-B*40:01; PMEL; ENSG00000185664; TAA
TEVISTAPV

SEQ ID NO: 67921 - protein, 9 aa, Homo sapiens
  misc_feature: Table A; Target 67921; HLA-B*40:02; PMEL; ENSG00000185664; TAA
TEVISTAPV

SEQ ID NO: 67922 - protein, 9 aa, Homo sapiens
  misc_feature: Table A; Target 67922; HLA-B*49:01; PMEL; ENSG00000185664; TAA
TEVISTAPV

SEQ ID NO: 67923 - protein, 9 aa, Homo sapiens
  misc_feature: Table A; Target 67923; HLA-C*04:01; PMEL; ENSG00000185664; TAA
TEVISTAPV

SEQ ID NO: 67924 - protein, 11 aa, Homo sapiens
  misc_feature: Table A; Target 67924; HLA-A*30:01; PMEL; ENSG00000185664; TAA
TEVISTAPVQM

SEQ ID NO: 67925 - protein, 11 aa, Homo sapiens
  misc_feature: Table A; Target 67925; HLA-B*18:01; PMEL; ENSG00000185664; TAA
TEVISTAPVQM

SEQ ID NO: 67926 - protein, 11 aa, Homo sapiens
  misc_feature: Table A; Target 67926; HLA-B*40:01; PMEL; ENSG00000185664; TAA
TEVISTAPVQM

SEQ ID NO: 67927 - protein, 11 aa, Homo sapiens
  misc_feature: Table A; Target 67927; HLA-B*40:02; PMEL; ENSG00000185664; TAA
TEVISTAPVQM

SEQ ID NO: 67928 - protein, 11 aa, Homo sapiens
  misc_feature: Table A; Target 67928; HLA-B*44:03; PMEL; ENSG00000185664; TAA
TEVISTAPVQM

SEQ ID NO: 67929 - protein, 8 aa, Homo sapiens
  misc_feature: Table A; Target 67929; HLA-B*18:01; PMEL; ENSG00000185664; TAA
TEVVGTTP

SEQ ID NO: 67930 - protein, 8 aa, Homo sapiens
  misc_feature: Table A; Target 67930; HLA-B*40:02; PMEL; ENSG00000185664; TAA
TEVVGTTP

SEQ ID NO: 67931 - protein, 8 aa, Homo sapiens
  misc_feature: Table A; Target 67931; HLA-B*49:01; PMEL; ENSG00000185664; TAA
TEVVGTTP

SEQ ID NO: 67932 - protein, 9 aa, Homo sapiens
  misc_feature: Table A; Target 67932; HLA-B*40:02; PMEL; ENSG00000185664; TAA
TEVVGTTPG

SEQ ID NO: 67933 - protein, 9 aa, Homo sapiens
  misc_feature: Table A; Target 67933; HLA-B*49:01; PMEL; ENSG00000185664; TAA
TEVVGTTPG

SEQ ID NO: 67934 - protein, 10 aa, Homo sapiens
  misc_feature: Table A; Target 67934; HLA-B*44:03; PMEL; ENSG00000185664; TAA
TEVVGTTPGQ

SEQ ID NO: 67935 - protein, 10 aa, Homo sapiens
  misc_feature: Table A; Target 67935; HLA-C*06:02; PMEL; ENSG00000185664; TAA
TEVVGTTPGQ

SEQ ID NO: 67936 - protein, 10 aa, Homo sapiens
  misc_feature: Table A; Target 67936; HLA-C*07:01; PMEL; ENSG00000185664; TAA
TEVVGTTPGQ

SEQ ID NO: 67937 - protein, 8 aa, Homo sapiens
  misc_feature: Table A; Target 67937; HLA-A*30:01; PMEL; ENSG00000185664; TAA
TEWVETTA

SEQ ID NO: 67938 - protein, 8 aa, Homo sapiens
  misc_feature: Table A; Target 67938; HLA-B*18:01; PMEL; ENSG00000185664; TAA
TEWVETTA

SEQ ID NO: 67939 - protein, 8 aa, Homo sapiens
  misc_feature: Table A; Target 67939; HLA-B*40:02; PMEL; ENSG00000185664; TAA
TEWVETTA

SEQ ID NO: 67940 - protein, 8 aa, Homo sapiens
  misc_feature: Table A; Target 67940; HLA-B*49:01; PMEL; ENSG00000185664; TAA
TEWVETTA

SEQ ID NO: 67941 - protein, 9 aa, Homo sapiens
  misc_feature: Table A; Target 67941; HLA-A*30:01; PMEL; ENSG00000185664; TAA
TEWVETTAR

SEQ ID NO: 67942 - protein, 9 aa, Homo sapiens
  misc_feature: Table A; Target 67942; HLA-B*18:01; PMEL; ENSG00000185664; TAA
TEWVETTAR

SEQ ID NO: 67943 - protein, 9 aa, Homo sapiens
  misc_feature: Table A; Target 67943; HLA-B*27:05; PMEL; ENSG00000185664; TAA
TEWVETTAR

SEQ ID NO: 67944 - protein, 9 aa, Homo sapiens
  misc_feature: Table A; Target 67944; HLA-B*40:01; PMEL; ENSG00000185664; TAA
TEWVETTAR

SEQ ID NO: 67945 - protein, 9 aa, Homo sapiens
  misc_feature: Table A; Target 67945; HLA-B*49:01; PMEL; ENSG00000185664; TAA
TEWVETTAR

SEQ ID NO: 67946 - protein, 11 aa, Homo sapiens
  misc_feature: Table A; Target 67946; HLA-A*30:01; PMEL; ENSG00000185664; TAA
TEWVETTAREL

SEQ ID NO: 67947 - protein, 11 aa, Homo sapiens
  misc_feature: Table A; Target 67947; HLA-B*40:01; PMEL; ENSG00000185664; TAA
TEWVETTAREL

SEQ ID NO: 67948 - protein, 11 aa, Homo sapiens
  misc_feature: Table A; Target 67948; HLA-B*40:02; PMEL; ENSG00000185664; TAA
TEWVETTAREL

SEQ ID NO: 67949 - protein, 11 aa, Homo sapiens
  misc_feature: Table A; Target 67949; HLA-B*44:02; PMEL; ENSG00000185664; TAA
TEWVETTAREL

SEQ ID NO: 67950 - protein, 10 aa, Homo sapiens
  misc_feature: Table A; Target 67950; HLA-B*07:02; PMEL; ENSG00000185664; TAA
TGMTPEKVPV

SEQ ID NO: 67951 - protein, 10 aa, Homo sapiens
  misc_feature: Table A; Target 67951; HLA-B*40:02; PMEL; ENSG00000185664; TAA
TGMTPEKVPV

SEQ ID NO: 67952 - protein, 10 aa, Homo sapiens
  misc_feature: Table A; Target 67952; HLA-B*54:01; PMEL; ENSG00000185664; TAA
TGMTPEKVPV

SEQ ID NO: 67953 - protein, 10 aa, Homo sapiens
  misc_feature: Table A; Target 67953; HLA-B*55:01; PMEL; ENSG00000185664; TAA
TGMTPEKVPV

SEQ ID NO: 67954 - protein, 10 aa, Homo sapiens
  misc_feature: Table A; Target 67954; HLA-C*04:01; PMEL; ENSG00000185664; TAA
TGMTPEKVPV

SEQ ID NO: 67955 - protein, 10 aa, Homo sapiens
  misc_feature: Table A; Target 67955; HLA-C*06:02; PMEL; ENSG00000185664; TAA
TGMTPEKVPV

SEQ ID NO: 67956 - protein, 10 aa, Homo sapiens
  misc_feature: Table A; Target 67956; HLA-C*16:01; PMEL; ENSG00000185664; TAA
TGMTPEKVPV

SEQ ID NO: 67957 - protein, 10 aa, Homo sapiens
  misc_feature: Table A; Target 67957; HLA-C*16:02; PMEL; ENSG00000185664; TAA
TGMTPEKVPV

SEQ ID NO: 67958 - protein, 9 aa, Homo sapiens
  misc_feature: Table A; Target 67958; HLA-C*06:02; PMEL; ENSG00000185664; TAA
TGRAMLGTH

SEQ ID NO: 67959 - protein, 8 aa, Homo sapiens
  misc_feature: Table A; Target 67959; HLA-B*37:01; PMEL; ENSG00000185664; TAA
TGSLGPLL

SEQ ID NO: 67960 - protein, 8 aa, Homo sapiens
  misc_feature: Table A; Target 67960; HLA-C*01:02; PMEL; ENSG00000185664; TAA
TGSLGPLL

SEQ ID NO: 67961 - protein, 8 aa, Homo sapiens
  misc_feature: Table A; Target 67961; HLA-C*03:03; PMEL; ENSG00000185664; TAA
TGSLGPLL

SEQ ID NO: 67962 - protein, 8 aa, Homo sapiens
  misc_feature: Table A; Target 67962; HLA-C*03:04; PMEL; ENSG00000185664; TAA
TGSLGPLL

SEQ ID NO: 67963 - protein, 8 aa, Homo sapiens
  misc_feature: Table A; Target 67963; HLA-C*06:02; PMEL; ENSG00000185664; TAA
TGSLGPLL

SEQ ID NO: 67964 - protein, 8 aa, Homo sapiens
  misc_feature: Table A; Target 67964; HLA-C*07:04; PMEL; ENSG00000185664; TAA
TGSLGPLL

SEQ ID NO: 67965 - protein, 8 aa, Homo sapiens
  misc_feature: Table A; Target 67965; HLA-C*16:01; PMEL; ENSG00000185664; TAA
TGSLGPLL

SEQ ID NO: 67966 - protein, 8 aa, Homo sapiens
  misc_feature: Table A; Target 67966; HLA-B*38:01; PMEL; ENSG00000185664; TAA
THTMEVTV

SEQ ID NO: 67967 - protein, 8 aa, Homo sapiens
  misc_feature: Table A; Target 67967; HLA-B*39:01; PMEL; ENSG00000185664; TAA
THTMEVTV

SEQ ID NO: 67968 - protein, 8 aa, Homo sapiens
  misc_feature: Table A; Target 67968; HLA-C*07:04; PMEL; ENSG00000185664; TAA
THTMEVTV

SEQ ID NO: 67969 - protein, 9 aa, Homo sapiens
  misc_feature: Table A; Target 67969; HLA-B*15:01; PMEL; ENSG00000185664; TAA
THTMEVTVY

SEQ ID NO: 67970 - protein, 9 aa, Homo sapiens
  misc_feature: Table A; Target 67970; HLA-B*15:03; PMEL; ENSG00000185664; TAA
THTMEVTVY

SEQ ID NO: 67971 - protein, 9 aa, Homo sapiens
  misc_feature: Table A; Target 67971; HLA-B*27:05; PMEL; ENSG00000185664; TAA
THTMEVTVY

SEQ ID NO: 67972 - protein, 9 aa, Homo sapiens
  misc_feature: Table A; Target 67972; HLA-B*35:01; PMEL; ENSG00000185664; TAA
THTMEVTVY

SEQ ID NO: 67973 - protein, 9 aa, Homo sapiens
  misc_feature: Table A; Target 67973; HLA-B*38:01; PMEL; ENSG00000185664; TAA
THTMEVTVY

SEQ ID NO: 67974 - protein, 9 aa, Homo sapiens
  misc_feature: Table A; Target 67974; HLA-B*39:01; PMEL; ENSG00000185664; TAA
THTMEVTVY

SEQ ID NO: 67975 - protein, 9 aa, Homo sapiens
  misc_feature: Table A; Target 67975; HLA-C*04:01; PMEL; ENSG00000185664; TAA
THTMEVTVY

SEQ ID NO: 67976 - protein, 9 aa, Homo sapiens
  misc_feature: Table A; Target 67976; HLA-C*07:01; PMEL; ENSG00000185664; TAA
THTMEVTVY

SEQ ID NO: 67977 - protein, 9 aa, Homo sapiens
  misc_feature: Table A; Target 67977; HLA-C*07:04; PMEL; ENSG00000185664; TAA
THTMEVTVY

SEQ ID NO: 67978 - protein, 9 aa, Homo sapiens
  misc_feature: Table A; Target 67978; HLA-C*12:03; PMEL; ENSG00000185664; TAA
THTMEVTVY

SEQ ID NO: 67979 - protein, 9 aa, Homo sapiens
  misc_feature: Table A; Target 67979; HLA-C*16:02; PMEL; ENSG00000185664; TAA
THTMEVTVY

SEQ ID NO: 67980 - protein, 9 aa, Homo sapiens
  misc_feature: Table A; Target 67980; HLA-C*16:04; PMEL; ENSG00000185664; TAA
THTMEVTVY

SEQ ID NO: 67981 - protein, 10 aa, Homo sapiens
  misc_feature: Table A; Target 67981; HLA-C*07:01; PMEL; ENSG00000185664; TAA
THTMEVTVYH

SEQ ID NO: 67982 - protein, 8 aa, Homo sapiens
  misc_feature: Table A; Target 67982; HLA-B*39:01; PMEL; ENSG00000185664; TAA
TIINGSQV

SEQ ID NO: 67983 - protein, 8 aa, Homo sapiens
  misc_feature: Table A; Target 67983; HLA-C*01:02; PMEL; ENSG00000185664; TAA
TIINGSQV

SEQ ID NO: 67984 - protein, 8 aa, Homo sapiens
  misc_feature: Table A; Target 67984; HLA-C*03:03; PMEL; ENSG00000185664; TAA
TIINGSQV

SEQ ID NO: 67985 - protein, 8 aa, Homo sapiens
  misc_feature: Table A; Target 67985; HLA-C*03:04; PMEL; ENSG00000185664; TAA
TIINGSQV

SEQ ID NO: 67986 - protein, 8 aa, Homo sapiens
  misc_feature: Table A; Target 67986; HLA-C*04:01; PMEL; ENSG00000185664; TAA
TIINGSQV

SEQ ID NO: 67987 - protein, 8 aa, Homo sapiens
  misc_feature: Table A; Target 67987; HLA-C*05:01; PMEL; ENSG00000185664; TAA
TIINGSQV

SEQ ID NO: 67988 - protein, 8 aa, Homo sapiens
  misc_feature: Table A; Target 67988; HLA-C*06:02; PMEL; ENSG00000185664; TAA
TIINGSQV

SEQ ID NO: 67989 - protein, 8 aa, Homo sapiens
  misc_feature: Table A; Target 67989; HLA-C*14:02; PMEL; ENSG00000185664; TAA
TIINGSQV

SEQ ID NO: 67990 - protein, 8 aa, Homo sapiens
  misc_feature: Table A; Target 67990; HLA-C*16:02; PMEL; ENSG00000185664; TAA
TIINGSQV

SEQ ID NO: 67991 - protein, 9 aa, Homo sapiens
  misc_feature: Table A; Target 67991; HLA-A*23:01; PMEL; ENSG00000185664; TAA
TIINGSQVW

SEQ ID NO: 67992 - protein, 9 aa, Homo sapiens
  misc_feature: Table A; Target 67992; HLA-A*24:02; PMEL; ENSG00000185664; TAA
TIINGSQVW

SEQ ID NO: 67993 - protein, 9 aa, Homo sapiens
  misc_feature: Table A; Target 67993; HLA-A*25:01; PMEL; ENSG00000185664; TAA
TIINGSQVW

SEQ ID NO: 67994 - protein, 9 aa, Homo sapiens
  misc_feature: Table A; Target 67994; HLA-A*26:01; PMEL; ENSG00000185664; TAA
TIINGSQVW

SEQ ID NO: 67995 - protein, 9 aa, Homo sapiens
  misc_feature: Table A; Target 67995; HLA-A*32:01; PMEL; ENSG00000185664; TAA
TIINGSQVW

SEQ ID NO: 67996 - protein, 9 aa, Homo sapiens
  misc_feature: Table A; Target 67996; HLA-A*68:01; PMEL; ENSG00000185664; TAA
TIINGSQVW

SEQ ID NO: 67997 - protein, 9 aa, Homo sapiens
  misc_feature: Table A; Target 67997; HLA-B*15:01; PMEL; ENSG00000185664; TAA
TIINGSQVW

SEQ ID NO: 67998 - protein, 9 aa, Homo sapiens
  misc_feature: Table A; Target 67998; HLA-B*15:03; PMEL; ENSG00000185664; TAA
TIINGSQVW

SEQ ID NO: 67999 - protein, 9 aa, Homo sapiens
  misc_feature: Table A; Target 67999; HLA-B*27:02; PMEL; ENSG00000185664; TAA
TIINGSQVW

SEQ ID NO: 68000 - protein, 9 aa, Homo sapiens
  misc_feature: Table A; Target 68000; HLA-B*35:01; PMEL; ENSG00000185664; TAA
TIINGSQVW

SEQ ID NO: 68001 - protein, 9 aa, Homo sapiens
  misc_feature: Table A; Target 68001; HLA-B*38:01; PMEL; ENSG00000185664; TAA
TIINGSQVW

SEQ ID NO: 68002 - protein, 9 aa, Homo sapiens
  misc_feature: Table A; Target 68002; HLA-B*39:01; PMEL; ENSG00000185664; TAA
TIINGSQVW

SEQ ID NO: 68003 - protein, 9 aa, Homo sapiens
  misc_feature: Table A; Target 68003; HLA-B*44:02; PMEL; ENSG00000185664; TAA
TIINGSQVW

SEQ ID NO: 68004 - protein, 9 aa, Homo sapiens
  misc_feature: Table A; Target 68004; HLA-B*44:03; PMEL; ENSG00000185664; TAA
TIINGSQVW

SEQ ID NO: 68005 - protein, 9 aa, Homo sapiens
  misc_feature: Table A; Target 68005; HLA-B*46:01; PMEL; ENSG00000185664; TAA
TIINGSQVW

SEQ ID NO: 68006 - protein, 9 aa, Homo sapiens
  misc_feature: Table A; Target 68006; HLA-B*57:01; PMEL; ENSG00000185664; TAA
TIINGSQVW

SEQ ID NO: 68007 - protein, 9 aa, Homo sapiens
  misc_feature: Table A; Target 68007; HLA-B*58:01; PMEL; ENSG00000185664; TAA
TIINGSQVW

SEQ ID NO: 68008 - protein, 9 aa, Homo sapiens
  misc_feature: Table A; Target 68008; HLA-C*01:02; PMEL; ENSG00000185664; TAA
TIINGSQVW

SEQ ID NO: 68009 - protein, 9 aa, Homo sapiens
  misc_feature: Table A; Target 68009; HLA-C*02:02; PMEL; ENSG00000185664; TAA
TIINGSQVW

SEQ ID NO: 68010 - protein, 9 aa, Homo sapiens
  misc_feature: Table A; Target 68010; HLA-C*03:03; PMEL; ENSG00000185664; TAA
TIINGSQVW

SEQ ID NO: 68011 - protein, 9 aa, Homo sapiens
  misc_feature: Table A; Target 68011; HLA-C*03:04; PMEL; ENSG00000185664; TAA
TIINGSQVW

SEQ ID NO: 68012 - protein, 9 aa, Homo sapiens
  misc_feature: Table A; Target 68012; HLA-C*07:04; PMEL; ENSG00000185664; TAA
TIINGSQVW

SEQ ID NO: 68013 - protein, 9 aa, Homo sapiens
  misc_feature: Table A; Target 68013; HLA-C*07:06; PMEL; ENSG00000185664; TAA
TIINGSQVW

SEQ ID NO: 68014 - protein, 9 aa, Homo sapiens
  misc_feature: Table A; Target 68014; HLA-C*12:03; PMEL; ENSG00000185664; TAA
TIINGSQVW

SEQ ID NO: 68015 - protein, 9 aa, Homo sapiens
  misc_feature: Table A; Target 68015; HLA-C*16:01; PMEL; ENSG00000185664; TAA
TIINGSQVW

SEQ ID NO: 68016 - protein, 9 aa, Homo sapiens
  misc_feature: Table A; Target 68016; HLA-C*16:04; PMEL; ENSG00000185664; TAA
TIINGSQVW

SEQ ID NO: 68017 - protein, 8 aa, Homo sapiens
  misc_feature: Table A; Target 68017; HLA-B*37:01; PMEL; ENSG00000185664; TAA
TITDQVPF

SEQ ID NO: 68018 - protein, 8 aa, Homo sapiens
  misc_feature: Table A; Target 68018; HLA-B*39:01; PMEL; ENSG00000185664; TAA
TITDQVPF

SEQ ID NO: 68019 - protein, 8 aa, Homo sapiens
  misc_feature: Table A; Target 68019; HLA-C*04:01; PMEL; ENSG00000185664; TAA
TITDQVPF

SEQ ID NO: 68020 - protein, 8 aa, Homo sapiens
  misc_feature: Table A; Target 68020; HLA-C*07:04; PMEL; ENSG00000185664; TAA
TITDQVPF

SEQ ID NO: 68021 - protein, 10 aa, Homo sapiens
  misc_feature: Table A; Target 68021; HLA-A*02:01; PMEL; ENSG00000185664; TAA
TITDQVPFSV

SEQ ID NO: 68022 - protein, 10 aa, Homo sapiens
  misc_feature: Table A; Target 68022; HLA-A*02:03; PMEL; ENSG00000185664; TAA
TITDQVPFSV

SEQ ID NO: 68023 - protein, 10 aa, Homo sapiens
  misc_feature: Table A; Target 68023; HLA-A*02:04; PMEL; ENSG00000185664; TAA
TITDQVPFSV

SEQ ID NO: 68024 - protein, 10 aa, Homo sapiens
  misc_feature: Table A; Target 68024; HLA-A*02:07; PMEL; ENSG00000185664; TAA
TITDQVPFSV

SEQ ID NO: 68025 - protein, 10 aa, Homo sapiens
  misc_feature: Table A; Target 68025; HLA-A*30:01; PMEL; ENSG00000185664; TAA
TITDQVPFSV

SEQ ID NO: 68026 - protein, 10 aa, Homo sapiens
  misc_feature: Table A; Target 68026; HLA-A*68:02; PMEL; ENSG00000185664; TAA
TITDQVPFSV

SEQ ID NO: 68027 - protein, 10 aa, Homo sapiens
  misc_feature: Table A; Target 68027; HLA-B*13:02; PMEL; ENSG00000185664; TAA
TITDQVPFSV

SEQ ID NO: 68028 - protein, 10 aa, Homo sapiens
  misc_feature: Table A; Target 68028; HLA-B*55:01; PMEL; ENSG00000185664; TAA
TITDQVPFSV

SEQ ID NO: 68029 - protein, 10 aa, Homo sapiens
  misc_feature: Table A; Target 68029; HLA-C*06:02; PMEL; ENSG00000185664; TAA
TITDQVPFSV

SEQ ID NO: 68030 - protein, 10 aa, Homo sapiens
  misc_feature: Table A; Target 68030; HLA-C*12:03; PMEL; ENSG00000185664; TAA
TITDQVPFSV

SEQ ID NO: 68031 - protein, 10 aa, Homo sapiens
  misc_feature: Table A; Target 68031; HLA-A*02:01; PMEL; ENSG00000185664; TAA
TLAEMSTPEA

SEQ ID NO: 68032 - protein, 10 aa, Homo sapiens
  misc_feature: Table A; Target 68032; HLA-A*02:03; PMEL; ENSG00000185664; TAA
TLAEMSTPEA

SEQ ID NO: 68033 - protein, 10 aa, Homo sapiens
  misc_feature: Table A; Target 68033; HLA-B*55:01; PMEL; ENSG00000185664; TAA
TLAEMSTPEA

SEQ ID NO: 68034 - protein, 8 aa, Homo sapiens
  misc_feature: Table A; Target 68034; HLA-B*13:02; PMEL; ENSG00000185664; TAA
TLDIVQGI

SEQ ID NO: 68035 - protein, 8 aa, Homo sapiens
  misc_feature: Table A; Target 68035; HLA-B*38:01; PMEL; ENSG00000185664; TAA
TLDIVQGI

SEQ ID NO: 68036 - protein, 8 aa, Homo sapiens
  misc_feature: Table A; Target 68036; HLA-C*05:01; PMEL; ENSG00000185664; TAA
TLDIVQGI

SEQ ID NO: 68037 - protein, 9 aa, Homo sapiens
  misc_feature: Table A; Target 68037; HLA-A*23:01; PMEL; ENSG00000185664; TAA
TLIGANASF

SEQ ID NO: 68038 - protein, 9 aa, Homo sapiens
  misc_feature: Table A; Target 68038; HLA-A*24:02; PMEL; ENSG00000185664; TAA
TLIGANASF

SEQ ID NO: 68039 - protein, 9 aa, Homo sapiens
  misc_feature: Table A; Target 68039; HLA-A*25:01; PMEL; ENSG00000185664; TAA
TLIGANASF

SEQ ID NO: 68040 - protein, 9 aa, Homo sapiens
  misc_feature: Table A; Target 68040; HLA-A*26:01; PMEL; ENSG00000185664; TAA
TLIGANASF

SEQ ID NO: 68041 - protein, 9 aa, Homo sapiens
  misc_feature: Table A; Target 68041; HLA-A*30:02; PMEL; ENSG00000185664; TAA
TLIGANASF

SEQ ID NO: 68042 - protein, 9 aa, Homo sapiens
  misc_feature: Table A; Target 68042; HLA-A*32:01; PMEL; ENSG00000185664; TAA
TLIGANASF

SEQ ID NO: 68043 - protein, 9 aa, Homo sapiens
  misc_feature: Table A; Target 68043; HLA-B*07:02; PMEL; ENSG00000185664; TAA
TLIGANASF

SEQ ID NO: 68044 - protein, 9 aa, Homo sapiens
  misc_feature: Table A; Target 68044; HLA-B*15:01; PMEL; ENSG00000185664; TAA
TLIGANASF

SEQ ID NO: 68045 - protein, 9 aa, Homo sapiens
  misc_feature: Table A; Target 68045; HLA-B*15:03; PMEL; ENSG00000185664; TAA
TLIGANASF

SEQ ID NO: 68046 - protein, 9 aa, Homo sapiens
  misc_feature: Table A; Target 68046; HLA-B*35:01; PMEL; ENSG00000185664; TAA
TLIGANASF

SEQ ID NO: 68047 - protein, 9 aa, Homo sapiens
  misc_feature: Table A; Target 68047; HLA-B*35:03; PMEL; ENSG00000185664; TAA
TLIGANASF

SEQ ID NO: 68048 - protein, 9 aa, Homo sapiens
  misc_feature: Table A; Target 68048; HLA-B*38:01; PMEL; ENSG00000185664; TAA
TLIGANASF

SEQ ID NO: 68049 - protein, 9 aa, Homo sapiens
  misc_feature: Table A; Target 68049; HLA-B*39:01; PMEL; ENSG00000185664; TAA
TLIGANASF

SEQ ID NO: 68050 - protein, 9 aa, Homo sapiens
  misc_feature: Table A; Target 68050; HLA-B*44:02; PMEL; ENSG00000185664; TAA
TLIGANASF

SEQ ID NO: 68051 - protein, 9 aa, Homo sapiens
  misc_feature: Table A; Target 68051; HLA-B*44:03; PMEL; ENSG00000185664; TAA
TLIGANASF

SEQ ID NO: 68052 - protein, 9 aa, Homo sapiens
  misc_feature: Table A; Target 68052; HLA-B*46:01; PMEL; ENSG00000185664; TAA
TLIGANASF

SEQ ID NO: 68053 - protein, 9 aa, Homo sapiens
  misc_feature: Table A; Target 68053; HLA-B*55:01; PMEL; ENSG00000185664; TAA
TLIGANASF

SEQ ID NO: 68054 - protein, 9 aa, Homo sapiens
  misc_feature: Table A; Target 68054; HLA-B*58:01; PMEL; ENSG00000185664; TAA
TLIGANASF

SEQ ID NO: 68055 - protein, 9 aa, Homo sapiens
  misc_feature: Table A; Target 68055; HLA-C*01:02; PMEL; ENSG00000185664; TAA
TLIGANASF

SEQ ID NO: 68056 - protein, 9 aa, Homo sapiens
  misc_feature: Table A; Target 68056; HLA-C*02:02; PMEL; ENSG00000185664; TAA
TLIGANASF

SEQ ID NO: 68057 - protein, 9 aa, Homo sapiens
  misc_feature: Table A; Target 68057; HLA-C*03:03; PMEL; ENSG00000185664; TAA
TLIGANASF

SEQ ID NO: 68058 - protein, 9 aa, Homo sapiens
  misc_feature: Table A; Target 68058; HLA-C*03:04; PMEL; ENSG00000185664; TAA
TLIGANASF

SEQ ID NO: 68059 - protein, 9 aa, Homo sapiens
  misc_feature: Table A; Target 68059; HLA-C*07:04; PMEL; ENSG00000185664; TAA
TLIGANASF

SEQ ID NO: 68060 - protein, 9 aa, Homo sapiens
  misc_feature: Table A; Target 68060; HLA-C*14:02; PMEL; ENSG00000185664; TAA
TLIGANASF

SEQ ID NO: 68061 - protein, 9 aa, Homo sapiens
  misc_feature: Table A; Target 68061; HLA-C*16:04; PMEL; ENSG00000185664; TAA
TLIGANASF

SEQ ID NO: 68062 - protein, 9 aa, Homo sapiens
  misc_feature: Table A; Target 68062; HLA-A*02:01; PMEL; ENSG00000185664; TAA
TLISRALVV

SEQ ID NO: 68063 - protein, 9 aa, Homo sapiens
  misc_feature: Table A; Target 68063; HLA-A*02:03; PMEL; ENSG00000185664; TAA
TLISRALVV

SEQ ID NO: 68064 - protein, 9 aa, Homo sapiens
  misc_feature: Table A; Target 68064; HLA-A*02:04; PMEL; ENSG00000185664; TAA
TLISRALVV

SEQ ID NO: 68065 - protein, 9 aa, Homo sapiens
  misc_feature: Table A; Target 68065; HLA-A*02:07; PMEL; ENSG00000185664; TAA
TLISRALVV

SEQ ID NO: 68066 - protein, 9 aa, Homo sapiens
  misc_feature: Table A; Target 68066; HLA-A*30:01; PMEL; ENSG00000185664; TAA
TLISRALVV

SEQ ID NO: 68067 - protein, 9 aa, Homo sapiens
  misc_feature: Table A; Target 68067; HLA-A*68:02; PMEL; ENSG00000185664; TAA
TLISRALVV

SEQ ID NO: 68068 - protein, 9 aa, Homo sapiens
  misc_feature: Table A; Target 68068; HLA-B*07:02; PMEL; ENSG00000185664; TAA
TLISRALVV

SEQ ID NO: 68069 - protein, 9 aa, Homo sapiens
  misc_feature: Table A; Target 68069; HLA-B*08:01; PMEL; ENSG00000185664; TAA
TLISRALVV

SEQ ID NO: 68070 - protein, 9 aa, Homo sapiens
  misc_feature: Table A; Target 68070; HLA-B*13:02; PMEL; ENSG00000185664; TAA
TLISRALVV

SEQ ID NO: 68071 - protein, 9 aa, Homo sapiens
  misc_feature: Table A; Target 68071; HLA-B*37:01; PMEL; ENSG00000185664; TAA
TLISRALVV

SEQ ID NO: 68072 - protein, 9 aa, Homo sapiens
  misc_feature: Table A; Target 68072; HLA-B*51:01; PMEL; ENSG00000185664; TAA
TLISRALVV

SEQ ID NO: 68073 - protein, 9 aa, Homo sapiens
  misc_feature: Table A; Target 68073; HLA-B*54:01; PMEL; ENSG00000185664; TAA
TLISRALVV

SEQ ID NO: 68074 - protein, 9 aa, Homo sapiens
  misc_feature: Table A; Target 68074; HLA-B*55:01; PMEL; ENSG00000185664; TAA
TLISRALVV

SEQ ID NO: 68075 - protein, 9 aa, Homo sapiens
  misc_feature: Table A; Target 68075; HLA-C*01:02; PMEL; ENSG00000185664; TAA
TLISRALVV

SEQ ID NO: 68076 - protein, 9 aa, Homo sapiens
  misc_feature: Table A; Target 68076; HLA-C*02:02; PMEL; ENSG00000185664; TAA
TLISRALVV

SEQ ID NO: 68077 - protein, 9 aa, Homo sapiens
  misc_feature: Table A; Target 68077; HLA-C*03:04; PMEL; ENSG00000185664; TAA
TLISRALVV

SEQ ID NO: 68078 - protein, 9 aa, Homo sapiens
  misc_feature: Table A; Target 68078; HLA-C*07:02; PMEL; ENSG00000185664; TAA
TLISRALVV

SEQ ID NO: 68079 - protein, 9 aa, Homo sapiens
  misc_feature: Table A; Target 68079; HLA-C*12:03; PMEL; ENSG00000185664; TAA
TLISRALVV

SEQ ID NO: 68080 - protein, 9 aa, Homo sapiens
  misc_feature: Table A; Target 68080; HLA-C*16:01; PMEL; ENSG00000185664; TAA
TLISRALVV

SEQ ID NO: 68081 - protein, 9 aa, Homo sapiens
  misc_feature: Table A; Target 68081; HLA-C*16:02; PMEL; ENSG00000185664; TAA
TLISRALVV

SEQ ID NO: 68082 - protein, 10 aa, Homo sapiens
  misc_feature: Table A; Target 68082; HLA-C*04:01; PMEL; ENSG00000185664; TAA
TLISRALVVT

SEQ ID NO: 68083 - protein, 8 aa, Homo sapiens
  misc_feature: Table A; Target 68083; HLA-C*04:01; PMEL; ENSG00000185664; TAA
TMEVTVYH

SEQ ID NO: 68084 - protein, 8 aa, Homo sapiens
  misc_feature: Table A; Target 68084; HLA-C*07:01; PMEL; ENSG00000185664; TAA
TMEVTVYH

SEQ ID NO: 68085 - protein, 9 aa, Homo sapiens
  misc_feature: Table A; Target 68085; HLA-A*01:01; PMEL; ENSG00000185664; TAA
TMEVTVYHR

SEQ ID NO: 68086 - protein, 9 aa, Homo sapiens
  misc_feature: Table A; Target 68086; HLA-A*03:02; PMEL; ENSG00000185664; TAA
TMEVTVYHR

SEQ ID NO: 68087 - protein, 9 aa, Homo sapiens
  misc_feature: Table A; Target 68087; HLA-A*31:01; PMEL; ENSG00000185664; TAA
TMEVTVYHR

SEQ ID NO: 68088 - protein, 9 aa, Homo sapiens
  misc_feature: Table A; Target 68088; HLA-A*33:01; PMEL; ENSG00000185664; TAA
TMEVTVYHR

SEQ ID NO: 68089 - protein, 9 aa, Homo sapiens
  misc_feature: Table A; Target 68089; HLA-A*33:03; PMEL; ENSG00000185664; TAA
TMEVTVYHR

SEQ ID NO: 68090 - protein, 9 aa, Homo sapiens
  misc_feature: Table A; Target 68090; HLA-A*68:01; PMEL; ENSG00000185664; TAA
TMEVTVYHR

SEQ ID NO: 68091 - protein, 9 aa, Homo sapiens
  misc_feature: Table A; Target 68091; HLA-C*04:01; PMEL; ENSG00000185664; TAA
TMEVTVYHR

SEQ ID NO: 68092 - protein, 9 aa, Homo sapiens
  misc_feature: Table A; Target 68092; HLA-C*07:06; PMEL; ENSG00000185664; TAA
TMEVTVYHR

SEQ ID NO: 68093 - protein, 9 aa, Homo sapiens
  misc_feature: Table A; Target 68093; HLA-C*04:01; PMEL; ENSG00000185664; TAA
TNSLAVVST

SEQ ID NO: 68094 - protein, 8 aa, Homo sapiens
  misc_feature: Table A; Target 68094; HLA-B*35:03; PMEL; ENSG00000185664; TAA
TPAEVSIV

SEQ ID NO: 68095 - protein, 8 aa, Homo sapiens
  misc_feature: Table A; Target 68095; HLA-B*51:01; PMEL; ENSG00000185664; TAA
TPAEVSIV

SEQ ID NO: 68096 - protein, 8 aa, Homo sapiens
  misc_feature: Table A; Target 68096; HLA-B*55:01; PMEL; ENSG00000185664; TAA
TPAEVSIV

SEQ ID NO: 68097 - protein, 8 aa, Homo sapiens
  misc_feature: Table A; Target 68097; HLA-B*56:01; PMEL; ENSG00000185664; TAA
TPAEVSIV

SEQ ID NO: 68098 - protein, 8 aa, Homo sapiens
  misc_feature: Table A; Target 68098; HLA-C*12:03; PMEL; ENSG00000185664; TAA
TPAEVSIV

SEQ ID NO: 68099 - protein, 9 aa, Homo sapiens
  misc_feature: Table A; Target 68099; HLA-A*30:01; PMEL; ENSG00000185664; TAA
TPAEVSIVV

SEQ ID NO: 68100 - protein, 9 aa, Homo sapiens
  misc_feature: Table A; Target 68100; HLA-A*33:03; PMEL; ENSG00000185664; TAA
TPAEVSIVV

SEQ ID NO: 68101 - protein, 9 aa, Homo sapiens
  misc_feature: Table A; Target 68101; HLA-A*68:01; PMEL; ENSG00000185664; TAA
TPAEVSIVV

SEQ ID NO: 68102 - protein, 9 aa, Homo sapiens
  misc_feature: Table A; Target 68102; HLA-A*68:02; PMEL; ENSG00000185664; TAA
TPAEVSIVV

SEQ ID NO: 68103 - protein, 9 aa, Homo sapiens
  misc_feature: Table A; Target 68103; HLA-B*07:02; PMEL; ENSG00000185664; TAA
TPAEVSIVV

SEQ ID NO: 68104 - protein, 9 aa, Homo sapiens
  misc_feature: Table A; Target 68104; HLA-B*13:02; PMEL; ENSG00000185664; TAA
TPAEVSIVV

SEQ ID NO: 68105 - protein, 9 aa, Homo sapiens
  misc_feature: Table A; Target 68105; HLA-B*18:01; PMEL; ENSG00000185664; TAA
TPAEVSIVV

SEQ ID NO: 68106 - protein, 9 aa, Homo sapiens
  misc_feature: Table A; Target 68106; HLA-B*27:05; PMEL; ENSG00000185664; TAA
TPAEVSIVV

SEQ ID NO: 68107 - protein, 9 aa, Homo sapiens
  misc_feature: Table A; Target 68107; HLA-B*35:01; PMEL; ENSG00000185664; TAA
TPAEVSIVV

SEQ ID NO: 68108 - protein, 9 aa, Homo sapiens
  misc_feature: Table A; Target 68108; HLA-B*35:03; PMEL; ENSG00000185664; TAA
TPAEVSIVV

SEQ ID NO: 68109 - protein, 9 aa, Homo sapiens
  misc_feature: Table A; Target 68109; HLA-B*38:01; PMEL; ENSG00000185664; TAA
TPAEVSIVV

SEQ ID NO: 68110 - protein, 9 aa, Homo sapiens
  misc_feature: Table A; Target 68110; HLA-B*39:01; PMEL; ENSG00000185664; TAA
TPAEVSIVV

SEQ ID NO: 68111 - protein, 9 aa, Homo sapiens
  misc_feature: Table A; Target 68111; HLA-B*49:01; PMEL; ENSG00000185664; TAA
TPAEVSIVV

SEQ ID NO: 68112 - protein, 9 aa, Homo sapiens
  misc_feature: Table A; Target 68112; HLA-B*51:01; PMEL; ENSG00000185664; TAA
TPAEVSIVV

SEQ ID NO: 68113 - protein, 9 aa, Homo sapiens
  misc_feature: Table A; Target 68113; HLA-B*54:01; PMEL; ENSG00000185664; TAA
TPAEVSIVV

SEQ ID NO: 68114 - protein, 9 aa, Homo sapiens
  misc_feature: Table A; Target 68114; HLA-B*55:01; PMEL; ENSG00000185664; TAA
TPAEVSIVV

SEQ ID NO: 68115 - protein, 9 aa, Homo sapiens
  misc_feature: Table A; Target 68115; HLA-B*56:01; PMEL; ENSG00000185664; TAA
TPAEVSIVV

SEQ ID NO: 68116 - protein, 9 aa, Homo sapiens
  misc_feature: Table A; Target 68116; HLA-C*01:02; PMEL; ENSG00000185664; TAA
TPAEVSIVV

SEQ ID NO: 68117 - protein, 9 aa, Homo sapiens
  misc_feature: Table A; Target 68117; HLA-C*02:02; PMEL; ENSG00000185664; TAA
TPAEVSIVV

SEQ ID NO: 68118 - protein, 9 aa, Homo sapiens
  misc_feature: Table A; Target 68118; HLA-C*03:03; PMEL; ENSG00000185664; TAA
TPAEVSIVV

SEQ ID NO: 68119 - protein, 9 aa, Homo sapiens
  misc_feature: Table A; Target 68119; HLA-C*03:04; PMEL; ENSG00000185664; TAA
TPAEVSIVV

SEQ ID NO: 68120 - protein, 9 aa, Homo sapiens
  misc_feature: Table A; Target 68120; HLA-C*04:01; PMEL; ENSG00000185664; TAA
TPAEVSIVV

SEQ ID NO: 68121 - protein, 9 aa, Homo sapiens
  misc_feature: Table A; Target 68121; HLA-C*05:01; PMEL; ENSG00000185664; TAA
TPAEVSIVV

SEQ ID NO: 68122 - protein, 9 aa, Homo sapiens
  misc_feature: Table A; Target 68122; HLA-C*06:02; PMEL; ENSG00000185664; TAA
TPAEVSIVV

SEQ ID NO: 68123 - protein, 9 aa, Homo sapiens
  misc_feature: Table A; Target 68123; HLA-C*07:02; PMEL; ENSG00000185664; TAA
TPAEVSIVV

SEQ ID NO: 68124 - protein, 9 aa, Homo sapiens
  misc_feature: Table A; Target 68124; HLA-C*07:06; PMEL; ENSG00000185664; TAA
TPAEVSIVV

SEQ ID NO: 68125 - protein, 9 aa, Homo sapiens
  misc_feature: Table A; Target 68125; HLA-C*12:03; PMEL; ENSG00000185664; TAA
TPAEVSIVV

SEQ ID NO: 68126 - protein, 9 aa, Homo sapiens
  misc_feature: Table A; Target 68126; HLA-C*16:02; PMEL; ENSG00000185664; TAA
TPAEVSIVV

SEQ ID NO: 68127 - protein, 10 aa, Homo sapiens
  misc_feature: Table A; Target 68127; HLA-A*25:01; PMEL; ENSG00000185664; TAA
TPAEVSIVVL

SEQ ID NO: 68128 - protein, 10 aa, Homo sapiens
  misc_feature: Table A; Target 68128; HLA-A*30:01; PMEL; ENSG00000185664; TAA
TPAEVSIVVL

SEQ ID NO: 68129 - protein, 10 aa, Homo sapiens
  misc_feature: Table A; Target 68129; HLA-A*33:03; PMEL; ENSG00000185664; TAA
TPAEVSIVVL

SEQ ID NO: 68130 - protein, 10 aa, Homo sapiens
  misc_feature: Table A; Target 68130; HLA-A*68:01; PMEL; ENSG00000185664; TAA
TPAEVSIVVL

SEQ ID NO: 68131 - protein, 10 aa, Homo sapiens
  misc_feature: Table A; Target 68131; HLA-A*68:02; PMEL; ENSG00000185664; TAA
TPAEVSIVVL

SEQ ID NO: 68132 - protein, 10 aa, Homo sapiens
  misc_feature: Table A; Target 68132; HLA-B*07:02; PMEL; ENSG00000185664; TAA
TPAEVSIVVL

SEQ ID NO: 68133 - protein, 10 aa, Homo sapiens
  misc_feature: Table A; Target 68133; HLA-B*35:01; PMEL; ENSG00000185664; TAA
TPAEVSIVVL

SEQ ID NO: 68134 - protein, 10 aa, Homo sapiens
  misc_feature: Table A; Target 68134; HLA-B*35:03; PMEL; ENSG00000185664; TAA
TPAEVSIVVL

SEQ ID NO: 68135 - protein, 10 aa, Homo sapiens
  misc_feature: Table A; Target 68135; HLA-B*38:01; PMEL; ENSG00000185664; TAA
TPAEVSIVVL

SEQ ID NO: 68136 - protein, 10 aa, Homo sapiens
  misc_feature: Table A; Target 68136; HLA-B*39:01; PMEL; ENSG00000185664; TAA
TPAEVSIVVL

SEQ ID NO: 68137 - protein, 10 aa, Homo sapiens
  misc_feature: Table A; Target 68137; HLA-B*40:01; PMEL; ENSG00000185664; TAA
TPAEVSIVVL

SEQ ID NO: 68138 - protein, 10 aa, Homo sapiens
  misc_feature: Table A; Target 68138; HLA-B*51:01; PMEL; ENSG00000185664; TAA
TPAEVSIVVL

SEQ ID NO: 68139 - protein, 10 aa, Homo sapiens
  misc_feature: Table A; Target 68139; HLA-B*54:01; PMEL; ENSG00000185664; TAA
TPAEVSIVVL

SEQ ID NO: 68140 - protein, 10 aa, Homo sapiens
  misc_feature: Table A; Target 68140; HLA-B*55:01; PMEL; ENSG00000185664; TAA
TPAEVSIVVL

SEQ ID NO: 68141 - protein, 10 aa, Homo sapiens
  misc_feature: Table A; Target 68141; HLA-B*56:01; PMEL; ENSG00000185664; TAA
TPAEVSIVVL

SEQ ID NO: 68142 - protein, 10 aa, Homo sapiens
  misc_feature: Table A; Target 68142; HLA-C*03:03; PMEL; ENSG00000185664; TAA
TPAEVSIVVL

SEQ ID NO: 68143 - protein, 10 aa, Homo sapiens
  misc_feature: Table A; Target 68143; HLA-C*04:01; PMEL; ENSG00000185664; TAA
TPAEVSIVVL

SEQ ID NO: 68144 - protein, 10 aa, Homo sapiens
  misc_feature: Table A; Target 68144; HLA-C*07:02; PMEL; ENSG00000185664; TAA
TPAEVSIVVL

SEQ ID NO: 68145 - protein, 10 aa, Homo sapiens
  misc_feature: Table A; Target 68145; HLA-C*07:04; PMEL; ENSG00000185664; TAA
TPAEVSIVVL

SEQ ID NO: 68146 - protein, 10 aa, Homo sapiens
  misc_feature: Table A; Target 68146; HLA-C*07:06; PMEL; ENSG00000185664; TAA
TPAEVSIVVL

SEQ ID NO: 68147 - protein, 11 aa, Homo sapiens
  misc_feature: Table A; Target 68147; HLA-A*33:03; PMEL; ENSG00000185664; TAA
TPAEVSIVVLS

SEQ ID NO: 68148 - protein, 11 aa, Homo sapiens
  misc_feature: Table A; Target 68148; HLA-A*68:01; PMEL; ENSG00000185664; TAA
TPAEVSIVVLS

SEQ ID NO: 68149 - protein, 11 aa, Homo sapiens
  misc_feature: Table A; Target 68149; HLA-A*68:02; PMEL; ENSG00000185664; TAA
TPAEVSIVVLS

SEQ ID NO: 68150 - protein, 9 aa, Homo sapiens
  misc_feature: Table A; Target 68150; HLA-B*55:01; PMEL; ENSG00000185664; TAA
TPEATGMTP

SEQ ID NO: 68151 - protein, 10 aa, Homo sapiens
  misc_feature: Table A; Target 68151; HLA-B*35:01; PMEL; ENSG00000185664; TAA
TPEATGMTPA

SEQ ID NO: 68152 - protein, 10 aa, Homo sapiens
  misc_feature: Table A; Target 68152; HLA-B*35:03; PMEL; ENSG00000185664; TAA
TPEATGMTPA

SEQ ID NO: 68153 - protein, 10 aa, Homo sapiens
  misc_feature: Table A; Target 68153; HLA-B*54:01; PMEL; ENSG00000185664; TAA
TPEATGMTPA

SEQ ID NO: 68154 - protein, 10 aa, Homo sapiens
  misc_feature: Table A; Target 68154; HLA-B*55:01; PMEL; ENSG00000185664; TAA
TPEATGMTPA

SEQ ID NO: 68155 - protein, 10 aa, Homo sapiens
  misc_feature: Table A; Target 68155; HLA-B*56:01; PMEL; ENSG00000185664; TAA
TPEATGMTPA

SEQ ID NO: 68156 - protein, 10 aa, Homo sapiens
  misc_feature: Table A; Target 68156; HLA-C*04:01; PMEL; ENSG00000185664; TAA
TPEATGMTPA

SEQ ID NO: 68157 - protein, 11 aa, Homo sapiens
  misc_feature: Table A; Target 68157; HLA-B*35:01; PMEL; ENSG00000185664; TAA
TPEKVPVSEVM

SEQ ID NO: 68158 - protein, 11 aa, Homo sapiens
  misc_feature: Table A; Target 68158; HLA-B*35:03; PMEL; ENSG00000185664; TAA
TPEKVPVSEVM

SEQ ID NO: 68159 - protein, 11 aa, Homo sapiens
  misc_feature: Table A; Target 68159; HLA-B*55:01; PMEL; ENSG00000185664; TAA
TPEKVPVSEVM

SEQ ID NO: 68160 - protein, 11 aa, Homo sapiens
  misc_feature: Table A; Target 68160; HLA-C*03:03; PMEL; ENSG00000185664; TAA
TPEKVPVSEVM

SEQ ID NO: 68161 - protein, 8 aa, Homo sapiens
  misc_feature: Table A; Target 68161; HLA-B*51:01; PMEL; ENSG00000185664; TAA
TPGQAPTA

SEQ ID NO: 68162 - protein, 8 aa, Homo sapiens
  misc_feature: Table A; Target 68162; HLA-B*54:01; PMEL; ENSG00000185664; TAA
TPGQAPTA

SEQ ID NO: 68163 - protein, 8 aa, Homo sapiens
  misc_feature: Table A; Target 68163; HLA-B*55:01; PMEL; ENSG00000185664; TAA
TPGQAPTA

SEQ ID NO: 68164 - protein, 8 aa, Homo sapiens
  misc_feature: Table A; Target 68164; HLA-B*56:01; PMEL; ENSG00000185664; TAA
TPGQAPTA

SEQ ID NO: 68165 - protein, 8 aa, Homo sapiens
  misc_feature: Table A; Target 68165; HLA-C*06:02; PMEL; ENSG00000185664; TAA
TQLIMPGQ

SEQ ID NO: 68166 - protein, 9 aa, Homo sapiens
  misc_feature: Table A; Target 68166; HLA-C*04:01; PMEL; ENSG00000185664; TAA
TQLIMPGQE

SEQ ID NO: 68167 - protein, 10 aa, Homo sapiens
  misc_feature: Table A; Target 68167; HLA-B*13:02; PMEL; ENSG00000185664; TAA
TQLIMPGQEA

SEQ ID NO: 68168 - protein, 10 aa, Homo sapiens
  misc_feature: Table A; Target 68168; HLA-B*39:01; PMEL; ENSG00000185664; TAA
TQLIMPGQEA

SEQ ID NO: 68169 - protein, 10 aa, Homo sapiens
  misc_feature: Table A; Target 68169; HLA-A*68:02; PMEL; ENSG00000185664; TAA
TSVQVPTTEV

SEQ ID NO: 68170 - protein, 11 aa, Homo sapiens
  misc_feature: Table A; Target 68170; HLA-A*01:01; PMEL; ENSG00000185664; TAA
TTAAQVTTTEW

SEQ ID NO: 68171 - protein, 11 aa, Homo sapiens
  misc_feature: Table A; Target 68171; HLA-A*25:01; PMEL; ENSG00000185664; TAA
TTAAQVTTTEW

SEQ ID NO: 68172 - protein, 11 aa, Homo sapiens
  misc_feature: Table A; Target 68172; HLA-A*26:01; PMEL; ENSG00000185664; TAA
TTAAQVTTTEW

SEQ ID NO: 68173 - protein, 11 aa, Homo sapiens
  misc_feature: Table A; Target 68173; HLA-A*32:01; PMEL; ENSG00000185664; TAA
TTAAQVTTTEW

SEQ ID NO: 68174 - protein, 11 aa, Homo sapiens
  misc_feature: Table A; Target 68174; HLA-A*33:01; PMEL; ENSG00000185664; TAA
TTAAQVTTTEW

SEQ ID NO: 68175 - protein, 11 aa, Homo sapiens
  misc_feature: Table A; Target 68175; HLA-A*33:03; PMEL; ENSG00000185664; TAA
TTAAQVTTTEW

SEQ ID NO: 68176 - protein, 11 aa, Homo sapiens
  misc_feature: Table A; Target 68176; HLA-A*68:01; PMEL; ENSG00000185664; TAA
TTAAQVTTTEW

SEQ ID NO: 68177 - protein, 11 aa, Homo sapiens
  misc_feature: Table A; Target 68177; HLA-B*44:02; PMEL; ENSG00000185664; TAA
TTAAQVTTTEW

SEQ ID NO: 68178 - protein, 11 aa, Homo sapiens
  misc_feature: Table A; Target 68178; HLA-B*44:03; PMEL; ENSG00000185664; TAA
TTAAQVTTTEW

SEQ ID NO: 68179 - protein, 11 aa, Homo sapiens
  misc_feature: Table A; Target 68179; HLA-B*57:01; PMEL; ENSG00000185664; TAA
TTAAQVTTTEW

SEQ ID NO: 68180 - protein, 11 aa, Homo sapiens
  misc_feature: Table A; Target 68180; HLA-B*58:01; PMEL; ENSG00000185664; TAA
TTAAQVTTTEW

SEQ ID NO: 68181 - protein, 11 aa, Homo sapiens
  misc_feature: Table A; Target 68181; HLA-C*04:01; PMEL; ENSG00000185664; TAA
TTAAQVTTTEW

SEQ ID NO: 68182 - protein, 11 aa, Homo sapiens
  misc_feature: Table A; Target 68182; HLA-C*06:02; PMEL; ENSG00000185664; TAA
TTAAQVTTTEW

SEQ ID NO: 68183 - protein, 11 aa, Homo sapiens
  misc_feature: Table A; Target 68183; HLA-C*07:01; PMEL; ENSG00000185664; TAA
TTAAQVTTTEW

SEQ ID NO: 68184 - protein, 11 aa, Homo sapiens
  misc_feature: Table A; Target 68184; HLA-C*07:06; PMEL; ENSG00000185664; TAA
TTAAQVTTTEW

SEQ ID NO: 68185 - protein, 11 aa, Homo sapiens
  misc_feature: Table A; Target 68185; HLA-C*12:03; PMEL; ENSG00000185664; TAA
TTAAQVTTTEW

SEQ ID NO: 68186 - protein, 11 aa, Homo sapiens
  misc_feature: Table A; Target 68186; HLA-C*16:04; PMEL; ENSG00000185664; TAA
TTAAQVTTTEW

SEQ ID NO: 68187 - protein, 9 aa, Homo sapiens
  misc_feature: Table A; Target 68187; HLA-C*16:02; PMEL; ENSG00000185664; TAA
TTAGQVPTT

SEQ ID NO: 68188 - protein, 10 aa, Homo sapiens
  misc_feature: Table A; Target 68188; HLA-A*68:01; PMEL; ENSG00000185664; TAA
TTAGQVPTTE

SEQ ID NO: 68189 - protein, 10 aa, Homo sapiens
  misc_feature: Table A; Target 68189; HLA-C*06:02; PMEL; ENSG00000185664; TAA
TTAGQVPTTE

SEQ ID NO: 68190 - protein, 10 aa, Homo sapiens
  misc_feature: Table A; Target 68190; HLA-C*07:06; PMEL; ENSG00000185664; TAA
TTAGQVPTTE

SEQ ID NO: 68191 - protein, 11 aa, Homo sapiens
  misc_feature: Table A; Target 68191; HLA-A*02:03; PMEL; ENSG00000185664; TAA
TTAGQVPTTEV

SEQ ID NO: 68192 - protein, 11 aa, Homo sapiens
  misc_feature: Table A; Target 68192; HLA-A*68:02; PMEL; ENSG00000185664; TAA
TTAGQVPTTEV

SEQ ID NO: 68193 - protein, 11 aa, Homo sapiens
  misc_feature: Table A; Target 68193; HLA-C*06:02; PMEL; ENSG00000185664; TAA
TTAGQVPTTEV

SEQ ID NO: 68194 - protein, 10 aa, Homo sapiens
  misc_feature: Table A; Target 68194; HLA-A*68:01; PMEL; ENSG00000185664; TAA
TTEWVETTAR

SEQ ID NO: 68195 - protein, 10 aa, Homo sapiens
  misc_feature: Table A; Target 68195; HLA-C*07:06; PMEL; ENSG00000185664; TAA
TTEWVETTAR

SEQ ID NO: 68196 - protein, 10 aa, Homo sapiens
  misc_feature: Table A; Target 68196; HLA-C*06:02; PMEL; ENSG00000185664; TAA
TTLAEMSTPE

SEQ ID NO: 68197 - protein, 11 aa, Homo sapiens
  misc_feature: Table A; Target 68197; HLA-C*06:02; PMEL; ENSG00000185664; TAA
TTPGQAPTAEP

SEQ ID NO: 68198 - protein, 10 aa, Homo sapiens
  misc_feature: Table A; Target 68198; HLA-A*68:02; PMEL; ENSG00000185664; TAA
TTTEWVETTA

SEQ ID NO: 68199 - protein, 11 aa, Homo sapiens
  misc_feature: Table A; Target 68199; HLA-A*31:01; PMEL; ENSG00000185664; TAA
TTTEWVETTAR

SEQ ID NO: 68200 - protein, 11 aa, Homo sapiens
  misc_feature: Table A; Target 68200; HLA-A*33:01; PMEL; ENSG00000185664; TAA
TTTEWVETTAR

SEQ ID NO: 68201 - protein, 11 aa, Homo sapiens
  misc_feature: Table A; Target 68201; HLA-A*33:03; PMEL; ENSG00000185664; TAA
TTTEWVETTAR

SEQ ID NO: 68202 - protein, 11 aa, Homo sapiens
  misc_feature: Table A; Target 68202; HLA-A*68:01; PMEL; ENSG00000185664; TAA
TTTEWVETTAR

SEQ ID NO: 68203 - protein, 11 aa, Homo sapiens
  misc_feature: Table A; Target 68203; HLA-C*07:06; PMEL; ENSG00000185664; TAA
TTTEWVETTAR

SEQ ID NO: 68204 - protein, 10 aa, Homo sapiens
  misc_feature: Table A; Target 68204; HLA-A*03:01; PMEL; ENSG00000185664; TAA
TVSCQGGLPK

SEQ ID NO: 68205 - protein, 10 aa, Homo sapiens
  misc_feature: Table A; Target 68205; HLA-A*03:02; PMEL; ENSG00000185664; TAA
TVSCQGGLPK

SEQ ID NO: 68206 - protein, 10 aa, Homo sapiens
  misc_feature: Table A; Target 68206; HLA-A*11:01; PMEL; ENSG00000185664; TAA
TVSCQGGLPK

SEQ ID NO: 68207 - protein, 10 aa, Homo sapiens
  misc_feature: Table A; Target 68207; HLA-A*68:01; PMEL; ENSG00000185664; TAA
TVSCQGGLPK

SEQ ID NO: 68208 - protein, 10 aa, Homo sapiens
  misc_feature: Table A; Target 68208; HLA-C*04:01; PMEL; ENSG00000185664; TAA
TVSCQGGLPK

SEQ ID NO: 68209 - protein, 11 aa, Homo sapiens
  misc_feature: Table A; Target 68209; HLA-C*04:01; PMEL; ENSG00000185664; TAA
TWDFGDSSGTL

SEQ ID NO: 68210 - protein, 8 aa, Homo sapiens
  misc_feature: Table A; Target 68210; HLA-C*07:01; PMEL; ENSG00000185664; TAA
TYCLNVSL

SEQ ID NO: 68211 - protein, 8 aa, Homo sapiens
  misc_feature: Table A; Target 68211; HLA-C*14:02; PMEL; ENSG00000185664; TAA
TYCLNVSL

SEQ ID NO: 68212 - protein, 8 aa, Homo sapiens
  misc_feature: Table A; Target 68212; HLA-C*04:01; PMEL; ENSG00000185664; TAA
TYLEPGPV

SEQ ID NO: 68213 - protein, 8 aa, Homo sapiens
  misc_feature: Table A; Target 68213; HLA-C*14:02; PMEL; ENSG00000185664; TAA
TYLEPGPV

SEQ ID NO: 68214 - protein, 9 aa, Homo sapiens
  misc_feature: Table A; Target 68214; HLA-A*23:01; PMEL; ENSG00000185664; TAA
TYLEPGPVT

SEQ ID NO: 68215 - protein, 9 aa, Homo sapiens
  misc_feature: Table A; Target 68215; HLA-A*24:02; PMEL; ENSG00000185664; TAA
TYLEPGPVT

SEQ ID NO: 68216 - protein, 9 aa, Homo sapiens
  misc_feature: Table A; Target 68216; HLA-B*27:05; PMEL; ENSG00000185664; TAA
TYLEPGPVT

SEQ ID NO: 68217 - protein, 9 aa, Homo sapiens
  misc_feature: Table A; Target 68217; HLA-B*35:03; PMEL; ENSG00000185664; TAA
TYLEPGPVT

SEQ ID NO: 68218 - protein, 9 aa, Homo sapiens
  misc_feature: Table A; Target 68218; HLA-C*01:02; PMEL; ENSG00000185664; TAA
TYLEPGPVT

SEQ ID NO: 68219 - protein, 9 aa, Homo sapiens
  misc_feature: Table A; Target 68219; HLA-C*04:01; PMEL; ENSG00000185664; TAA
TYLEPGPVT

SEQ ID NO: 68220 - protein, 9 aa, Homo sapiens
  misc_feature: Table A; Target 68220; HLA-C*06:02; PMEL; ENSG00000185664; TAA
TYLEPGPVT

SEQ ID NO: 68221 - protein, 9 aa, Homo sapiens
  misc_feature: Table A; Target 68221; HLA-C*14:02; PMEL; ENSG00000185664; TAA
TYLEPGPVT

SEQ ID NO: 68222 - protein, 9 aa, Homo sapiens
  misc_feature: Table A; Target 68222; HLA-C*16:01; PMEL; ENSG00000185664; TAA
TYLEPGPVT

SEQ ID NO: 68223 - protein, 10 aa, Homo sapiens
  misc_feature: Table A; Target 68223; HLA-A*02:01; PMEL; ENSG00000185664; TAA
TYLEPGPVTA

SEQ ID NO: 68224 - protein, 10 aa, Homo sapiens
  misc_feature: Table A; Target 68224; HLA-A*23:01; PMEL; ENSG00000185664; TAA
TYLEPGPVTA

SEQ ID NO: 68225 - protein, 10 aa, Homo sapiens
  misc_feature: Table A; Target 68225; HLA-A*24:02; PMEL; ENSG00000185664; TAA
TYLEPGPVTA

SEQ ID NO: 68226 - protein, 10 aa, Homo sapiens
  misc_feature: Table A; Target 68226; HLA-A*31:01; PMEL; ENSG00000185664; TAA
TYLEPGPVTA

SEQ ID NO: 68227 - protein, 10 aa, Homo sapiens
  misc_feature: Table A; Target 68227; HLA-A*33:03; PMEL; ENSG00000185664; TAA
TYLEPGPVTA

SEQ ID NO: 68228 - protein, 10 aa, Homo sapiens
  misc_feature: Table A; Target 68228; HLA-B*27:05; PMEL; ENSG00000185664; TAA
TYLEPGPVTA

SEQ ID NO: 68229 - protein, 10 aa, Homo sapiens
  misc_feature: Table A; Target 68229; HLA-B*54:01; PMEL; ENSG00000185664; TAA
TYLEPGPVTA

SEQ ID NO: 68230 - protein, 10 aa, Homo sapiens
  misc_feature: Table A; Target 68230; HLA-C*01:02; PMEL; ENSG00000185664; TAA
TYLEPGPVTA

SEQ ID NO: 68231 - protein, 10 aa, Homo sapiens
  misc_feature: Table A; Target 68231; HLA-C*04:01; PMEL; ENSG00000185664; TAA
TYLEPGPVTA

SEQ ID NO: 68232 - protein, 10 aa, Homo sapiens
  misc_feature: Table A; Target 68232; HLA-C*06:02; PMEL; ENSG00000185664; TAA
TYLEPGPVTA

SEQ ID NO: 68233 - protein, 10 aa, Homo sapiens
  misc_feature: Table A; Target 68233; HLA-C*14:02; PMEL; ENSG00000185664; TAA
TYLEPGPVTA

SEQ ID NO: 68234 - protein, 8 aa, Homo sapiens
  misc_feature: Table A; Target 68234; HLA-A*30:01; PMEL; ENSG00000185664; TAA
VETTAREL

SEQ ID NO: 68235 - protein, 8 aa, Homo sapiens
  misc_feature: Table A; Target 68235; HLA-B*18:01; PMEL; ENSG00000185664; TAA
VETTAREL

SEQ ID NO: 68236 - protein, 8 aa, Homo sapiens
  misc_feature: Table A; Target 68236; HLA-B*37:01; PMEL; ENSG00000185664; TAA
VETTAREL

SEQ ID NO: 68237 - protein, 8 aa, Homo sapiens
  misc_feature: Table A; Target 68237; HLA-B*40:01; PMEL; ENSG00000185664; TAA
VETTAREL

SEQ ID NO: 68238 - protein, 8 aa, Homo sapiens
  misc_feature: Table A; Target 68238; HLA-B*40:02; PMEL; ENSG00000185664; TAA
VETTAREL

SEQ ID NO: 68239 - protein, 8 aa, Homo sapiens
  misc_feature: Table A; Target 68239; HLA-B*44:03; PMEL; ENSG00000185664; TAA
VETTAREL

SEQ ID NO: 68240 - protein, 8 aa, Homo sapiens
  misc_feature: Table A; Target 68240; HLA-B*49:01; PMEL; ENSG00000185664; TAA
VETTAREL

SEQ ID NO: 68241 - protein, 8 aa, Homo sapiens
  misc_feature: Table A; Target 68241; HLA-C*03:03; PMEL; ENSG00000185664; TAA
VETTAREL

SEQ ID NO: 68242 - protein, 8 aa, Homo sapiens
  misc_feature: Table A; Target 68242; HLA-C*03:04; PMEL; ENSG00000185664; TAA
VETTAREL

SEQ ID NO: 68243 - protein, 8 aa, Homo sapiens
  misc_feature: Table A; Target 68243; HLA-C*06:02; PMEL; ENSG00000185664; TAA
VETTAREL

SEQ ID NO: 68244 - protein, 8 aa, Homo sapiens
  misc_feature: Table A; Target 68244; HLA-C*12:03; PMEL; ENSG00000185664; TAA
VETTAREL

SEQ ID NO: 68245 - protein, 8 aa, Homo sapiens
  misc_feature: Table A; Target 68245; HLA-C*16:01; PMEL; ENSG00000185664; TAA
VETTAREL

SEQ ID NO: 68246 - protein, 8 aa, Homo sapiens
  misc_feature: Table A; Target 68246; HLA-C*16:02; PMEL; ENSG00000185664; TAA
VETTAREL

SEQ ID NO: 68247 - protein, 8 aa, Homo sapiens
  misc_feature: Table A; Target 68247; HLA-C*16:04; PMEL; ENSG00000185664; TAA
VETTAREL

SEQ ID NO: 68248 - protein, 9 aa, Homo sapiens
  misc_feature: Table A; Target 68248; HLA-B*40:02; PMEL; ENSG00000185664; TAA
VETTARELP

SEQ ID NO: 68249 - protein, 9 aa, Homo sapiens
  misc_feature: Table A; Target 68249; HLA-B*49:01; PMEL; ENSG00000185664; TAA
VETTARELP

SEQ ID NO: 68250 - protein, 10 aa, Homo sapiens
  misc_feature: Table A; Target 68250; HLA-B*37:01; PMEL; ENSG00000185664; TAA
VETTARELPI

SEQ ID NO: 68251 - protein, 10 aa, Homo sapiens
  misc_feature: Table A; Target 68251; HLA-B*49:01; PMEL; ENSG00000185664; TAA
VETTARELPI

SEQ ID NO: 68252 - protein, 8 aa, Homo sapiens
  misc_feature: Table A; Target 68252; HLA-C*16:01; PMEL; ENSG00000185664; TAA
VGATKVPR

SEQ ID NO: 68253 - protein, 9 aa, Homo sapiens
  misc_feature: Table A; Target 68253; HLA-C*03:03; PMEL; ENSG00000185664; TAA
VGTTPGQAP

SEQ ID NO: 68254 - protein, 9 aa, Homo sapiens
  misc_feature: Table A; Target 68254; HLA-C*03:04; PMEL; ENSG00000185664; TAA
VGTTPGQAP

SEQ ID NO: 68255 - protein, 8 aa, Homo sapiens
  misc_feature: Table A; Target 68255; HLA-A*02:01; PMEL; ENSG00000185664; TAA
VIGALLAV

SEQ ID NO: 68256 - protein, 8 aa, Homo sapiens
  misc_feature: Table A; Target 68256; HLA-A*02:03; PMEL; ENSG00000185664; TAA
VIGALLAV

SEQ ID NO: 68257 - protein, 8 aa, Homo sapiens
  misc_feature: Table A; Target 68257; HLA-B*13:02; PMEL; ENSG00000185664; TAA
VIGALLAV

SEQ ID NO: 68258 - protein, 8 aa, Homo sapiens
  misc_feature: Table A; Target 68258; HLA-B*51:01; PMEL; ENSG00000185664; TAA
VIGALLAV

SEQ ID NO: 68259 - protein, 8 aa, Homo sapiens
  misc_feature: Table A; Target 68259; HLA-C*06:02; PMEL; ENSG00000185664; TAA
VIGALLAV

SEQ ID NO: 68260 - protein, 8 aa, Homo sapiens
  misc_feature: Table A; Target 68260; HLA-C*12:03; PMEL; ENSG00000185664; TAA
VIGALLAV

SEQ ID NO: 68261 - protein, 8 aa, Homo sapiens
  misc_feature: Table A; Target 68261; HLA-C*16:01; PMEL; ENSG00000185664; TAA
VISTAPVQ

SEQ ID NO: 68262 - protein, 9 aa, Homo sapiens
  misc_feature: Table A; Target 68262; HLA-A*03:01; PMEL; ENSG00000185664; TAA
VISTAPVQM

SEQ ID NO: 68263 - protein, 9 aa, Homo sapiens
  misc_feature: Table A; Target 68263; HLA-A*03:02; PMEL; ENSG00000185664; TAA
VISTAPVQM

SEQ ID NO: 68264 - protein, 9 aa, Homo sapiens
  misc_feature: Table A; Target 68264; HLA-A*23:01; PMEL; ENSG00000185664; TAA
VISTAPVQM

SEQ ID NO: 68265 - protein, 9 aa, Homo sapiens
  misc_feature: Table A; Target 68265; HLA-A*32:01; PMEL; ENSG00000185664; TAA
VISTAPVQM

SEQ ID NO: 68266 - protein, 9 aa, Homo sapiens
  misc_feature: Table A; Target 68266; HLA-B*15:03; PMEL; ENSG00000185664; TAA
VISTAPVQM

SEQ ID NO: 68267 - protein, 9 aa, Homo sapiens
  misc_feature: Table A; Target 68267; HLA-B*27:05; PMEL; ENSG00000185664; TAA
VISTAPVQM

SEQ ID NO: 68268 - protein, 9 aa, Homo sapiens
  misc_feature: Table A; Target 68268; HLA-B*37:01; PMEL; ENSG00000185664; TAA
VISTAPVQM

SEQ ID NO: 68269 - protein, 9 aa, Homo sapiens
  misc_feature: Table A; Target 68269; HLA-B*46:01; PMEL; ENSG00000185664; TAA
VISTAPVQM

SEQ ID NO: 68270 - protein, 9 aa, Homo sapiens
  misc_feature: Table A; Target 68270; HLA-C*01:02; PMEL; ENSG00000185664; TAA
VISTAPVQM

SEQ ID NO: 68271 - protein, 9 aa, Homo sapiens
  misc_feature: Table A; Target 68271; HLA-C*02:02; PMEL; ENSG00000185664; TAA
VISTAPVQM

SEQ ID NO: 68272 - protein, 9 aa, Homo sapiens
  misc_feature: Table A; Target 68272; HLA-C*04:01; PMEL; ENSG00000185664; TAA
VISTAPVQM

SEQ ID NO: 68273 - protein, 9 aa, Homo sapiens
  misc_feature: Table A; Target 68273; HLA-C*05:01; PMEL; ENSG00000185664; TAA
VISTAPVQM

SEQ ID NO: 68274 - protein, 9 aa, Homo sapiens
  misc_feature: Table A; Target 68274; HLA-C*07:04; PMEL; ENSG00000185664; TAA
VISTAPVQM

SEQ ID NO: 68275 - protein, 9 aa, Homo sapiens
  misc_feature: Table A; Target 68275; HLA-C*07:06; PMEL; ENSG00000185664; TAA
VISTAPVQM

SEQ ID NO: 68276 - protein, 9 aa, Homo sapiens
  misc_feature: Table A; Target 68276; HLA-C*12:03; PMEL; ENSG00000185664; TAA
VISTAPVQM

SEQ ID NO: 68277 - protein, 9 aa, Homo sapiens
  misc_feature: Table A; Target 68277; HLA-C*14:02; PMEL; ENSG00000185664; TAA
VISTAPVQM

SEQ ID NO: 68278 - protein, 9 aa, Homo sapiens
  misc_feature: Table A; Target 68278; HLA-C*16:01; PMEL; ENSG00000185664; TAA
VISTAPVQM

SEQ ID NO: 68279 - protein, 11 aa, Homo sapiens
  misc_feature: Table A; Target 68279; HLA-C*06:02; PMEL; ENSG00000185664; TAA
VISTAPVQMPT

SEQ ID NO: 68280 - protein, 11 aa, Homo sapiens
  misc_feature: Table A; Target 68280; HLA-C*07:02; PMEL; ENSG00000185664; TAA
VISTAPVQMPT

SEQ ID NO: 68281 - protein, 8 aa, Homo sapiens
  misc_feature: Table A; Target 68281; HLA-A*03:01; PMEL; ENSG00000185664; TAA
VLASLIYR

SEQ ID NO: 68282 - protein, 8 aa, Homo sapiens
  misc_feature: Table A; Target 68282; HLA-A*31:01; PMEL; ENSG00000185664; TAA
VLASLIYR

SEQ ID NO: 68283 - protein, 9 aa, Homo sapiens
  misc_feature: Table A; Target 68283; HLA-A*02:03; PMEL; ENSG00000185664; TAA
VLASLIYRR

SEQ ID NO: 68284 - protein, 9 aa, Homo sapiens
  misc_feature: Table A; Target 68284; HLA-A*02:04; PMEL; ENSG00000185664; TAA
VLASLIYRR

SEQ ID NO: 68285 - protein, 9 aa, Homo sapiens
  misc_feature: Table A; Target 68285; HLA-A*02:07; PMEL; ENSG00000185664; TAA
VLASLIYRR

SEQ ID NO: 68286 - protein, 9 aa, Homo sapiens
  misc_feature: Table A; Target 68286; HLA-A*03:01; PMEL; ENSG00000185664; TAA
VLASLIYRR

SEQ ID NO: 68287 - protein, 9 aa, Homo sapiens
  misc_feature: Table A; Target 68287; HLA-A*29:02; PMEL; ENSG00000185664; TAA
VLASLIYRR

SEQ ID NO: 68288 - protein, 9 aa, Homo sapiens
  misc_feature: Table A; Target 68288; HLA-A*31:01; PMEL; ENSG00000185664; TAA
VLASLIYRR

SEQ ID NO: 68289 - protein, 9 aa, Homo sapiens
  misc_feature: Table A; Target 68289; HLA-A*33:01; PMEL; ENSG00000185664; TAA
VLASLIYRR

SEQ ID NO: 68290 - protein, 9 aa, Homo sapiens
  misc_feature: Table A; Target 68290; HLA-A*33:03; PMEL; ENSG00000185664; TAA
VLASLIYRR

SEQ ID NO: 68291 - protein, 9 aa, Homo sapiens
  misc_feature: Table A; Target 68291; HLA-A*68:02; PMEL; ENSG00000185664; TAA
VLASLIYRR

SEQ ID NO: 68292 - protein, 9 aa, Homo sapiens
  misc_feature: Table A; Target 68292; HLA-A*02:01; PMEL; ENSG00000185664; TAA
VLGGPVSGL

SEQ ID NO: 68293 - protein, 9 aa, Homo sapiens
  misc_feature: Table A; Target 68293; HLA-A*02:03; PMEL; ENSG00000185664; TAA
VLGGPVSGL

SEQ ID NO: 68294 - protein, 9 aa, Homo sapiens
  misc_feature: Table A; Target 68294; HLA-A*02:04; PMEL; ENSG00000185664; TAA
VLGGPVSGL

SEQ ID NO: 68295 - protein, 9 aa, Homo sapiens
  misc_feature: Table A; Target 68295; HLA-A*02:07; PMEL; ENSG00000185664; TAA
VLGGPVSGL

SEQ ID NO: 68296 - protein, 9 aa, Homo sapiens
  misc_feature: Table A; Target 68296; HLA-A*03:01; PMEL; ENSG00000185664; TAA
VLGGPVSGL

SEQ ID NO: 68297 - protein, 9 aa, Homo sapiens
  misc_feature: Table A; Target 68297; HLA-A*03:02; PMEL; ENSG00000185664; TAA
VLGGPVSGL

SEQ ID NO: 68298 - protein, 9 aa, Homo sapiens
  misc_feature: Table A; Target 68298; HLA-A*23:01; PMEL; ENSG00000185664; TAA
VLGGPVSGL

SEQ ID NO: 68299 - protein, 9 aa, Homo sapiens
  misc_feature: Table A; Target 68299; HLA-A*24:02; PMEL; ENSG00000185664; TAA
VLGGPVSGL

SEQ ID NO: 68300 - protein, 9 aa, Homo sapiens
  misc_feature: Table A; Target 68300; HLA-A*25:01; PMEL; ENSG00000185664; TAA
VLGGPVSGL

SEQ ID NO: 68301 - protein, 9 aa, Homo sapiens
  misc_feature: Table A; Target 68301; HLA-A*30:01; PMEL; ENSG00000185664; TAA
VLGGPVSGL

SEQ ID NO: 68302 - protein, 9 aa, Homo sapiens
  misc_feature: Table A; Target 68302; HLA-A*31:01; PMEL; ENSG00000185664; TAA
VLGGPVSGL

SEQ ID NO: 68303 - protein, 9 aa, Homo sapiens
  misc_feature: Table A; Target 68303; HLA-A*32:01; PMEL; ENSG00000185664; TAA
VLGGPVSGL

SEQ ID NO: 68304 - protein, 9 aa, Homo sapiens
  misc_feature: Table A; Target 68304; HLA-B*07:02; PMEL; ENSG00000185664; TAA
VLGGPVSGL

SEQ ID NO: 68305 - protein, 9 aa, Homo sapiens
  misc_feature: Table A; Target 68305; HLA-B*13:02; PMEL; ENSG00000185664; TAA
VLGGPVSGL

SEQ ID NO: 68306 - protein, 9 aa, Homo sapiens
  misc_feature: Table A; Target 68306; HLA-B*15:01; PMEL; ENSG00000185664; TAA
VLGGPVSGL

SEQ ID NO: 68307 - protein, 9 aa, Homo sapiens
  misc_feature: Table A; Target 68307; HLA-B*27:05; PMEL; ENSG00000185664; TAA
VLGGPVSGL

SEQ ID NO: 68308 - protein, 9 aa, Homo sapiens
  misc_feature: Table A; Target 68308; HLA-B*37:01; PMEL; ENSG00000185664; TAA
VLGGPVSGL

SEQ ID NO: 68309 - protein, 9 aa, Homo sapiens
  misc_feature: Table A; Target 68309; HLA-B*39:01; PMEL; ENSG00000185664; TAA
VLGGPVSGL

SEQ ID NO: 68310 - protein, 9 aa, Homo sapiens
  misc_feature: Table A; Target 68310; HLA-B*40:02; PMEL; ENSG00000185664; TAA
VLGGPVSGL

SEQ ID NO: 68311 - protein, 9 aa, Homo sapiens
  misc_feature: Table A; Target 68311; HLA-B*46:01; PMEL; ENSG00000185664; TAA
VLGGPVSGL

SEQ ID NO: 68312 - protein, 9 aa, Homo sapiens
  misc_feature: Table A; Target 68312; HLA-B*55:01; PMEL; ENSG00000185664; TAA
VLGGPVSGL

SEQ ID NO: 68313 - protein, 9 aa, Homo sapiens
  misc_feature: Table A; Target 68313; HLA-C*01:02; PMEL; ENSG00000185664; TAA
VLGGPVSGL

SEQ ID NO: 68314 - protein, 9 aa, Homo sapiens
  misc_feature: Table A; Target 68314; HLA-C*02:02; PMEL; ENSG00000185664; TAA
VLGGPVSGL

SEQ ID NO: 68315 - protein, 9 aa, Homo sapiens
  misc_feature: Table A; Target 68315; HLA-C*04:01; PMEL; ENSG00000185664; TAA
VLGGPVSGL

SEQ ID NO: 68316 - protein, 9 aa, Homo sapiens
  misc_feature: Table A; Target 68316; HLA-C*05:01; PMEL; ENSG00000185664; TAA
VLGGPVSGL

SEQ ID NO: 68317 - protein, 9 aa, Homo sapiens
  misc_feature: Table A; Target 68317; HLA-C*06:02; PMEL; ENSG00000185664; TAA
VLGGPVSGL

SEQ ID NO: 68318 - protein, 9 aa, Homo sapiens
  misc_feature: Table A; Target 68318; HLA-C*07:01; PMEL; ENSG00000185664; TAA
VLGGPVSGL

SEQ ID NO: 68319 - protein, 9 aa, Homo sapiens
  misc_feature: Table A; Target 68319; HLA-C*07:02; PMEL; ENSG00000185664; TAA
VLGGPVSGL

SEQ ID NO: 68320 - protein, 9 aa, Homo sapiens
  misc_feature: Table A; Target 68320; HLA-C*07:04; PMEL; ENSG00000185664; TAA
VLGGPVSGL

SEQ ID NO: 68321 - protein, 9 aa, Homo sapiens
  misc_feature: Table A; Target 68321; HLA-C*12:03; PMEL; ENSG00000185664; TAA
VLGGPVSGL

SEQ ID NO: 68322 - protein, 9 aa, Homo sapiens
  misc_feature: Table A; Target 68322; HLA-C*14:02; PMEL; ENSG00000185664; TAA
VLGGPVSGL

SEQ ID NO: 68323 - protein, 9 aa, Homo sapiens
  misc_feature: Table A; Target 68323; HLA-C*16:02; PMEL; ENSG00000185664; TAA
VLGGPVSGL

SEQ ID NO: 68324 - protein, 10 aa, Homo sapiens
  misc_feature: Table A; Target 68324; HLA-C*06:02; PMEL; ENSG00000185664; TAA
VLGGPVSGLS

SEQ ID NO: 68325 - protein, 10 aa, Homo sapiens
  misc_feature: Table A; Target 68325; HLA-C*07:01; PMEL; ENSG00000185664; TAA
VLGGPVSGLS

SEQ ID NO: 68326 - protein, 10 aa, Homo sapiens
  misc_feature: Table A; Target 68326; HLA-C*07:02; PMEL; ENSG00000185664; TAA
VLGGPVSGLS

SEQ ID NO: 68327 - protein, 11 aa, Homo sapiens
  misc_feature: Table A; Target 68327; HLA-A*02:03; PMEL; ENSG00000185664; TAA
VLGGPVSGLSI

SEQ ID NO: 68328 - protein, 11 aa, Homo sapiens
  misc_feature: Table A; Target 68328; HLA-B*13:02; PMEL; ENSG00000185664; TAA
VLGGPVSGLSI

SEQ ID NO: 68329 - protein, 11 aa, Homo sapiens
  misc_feature: Table A; Target 68329; HLA-C*01:02; PMEL; ENSG00000185664; TAA
VLGGPVSGLSI

SEQ ID NO: 68330 - protein, 8 aa, Homo sapiens
  misc_feature: Table A; Target 68330; HLA-C*06:02; PMEL; ENSG00000185664; TAA
VLHQILKG

SEQ ID NO: 68331 - protein, 8 aa, Homo sapiens
  misc_feature: Table A; Target 68331; HLA-A*02:01; PMEL; ENSG00000185664; TAA
VLMAVVLA

SEQ ID NO: 68332 - protein, 10 aa, Homo sapiens
  misc_feature: Table A; Target 68332; HLA-A*02:01; PMEL; ENSG00000185664; TAA
VLMAVVLASL

SEQ ID NO: 68333 - protein, 10 aa, Homo sapiens
  misc_feature: Table A; Target 68333; HLA-A*02:03; PMEL; ENSG00000185664; TAA
VLMAVVLASL

SEQ ID NO: 68334 - protein, 10 aa, Homo sapiens
  misc_feature: Table A; Target 68334; HLA-A*02:04; PMEL; ENSG00000185664; TAA
VLMAVVLASL

SEQ ID NO: 68335 - protein, 10 aa, Homo sapiens
  misc_feature: Table A; Target 68335; HLA-A*02:07; PMEL; ENSG00000185664; TAA
VLMAVVLASL

SEQ ID NO: 68336 - protein, 8 aa, Homo sapiens
  misc_feature: Table A; Target 68336; HLA-B*51:01; PMEL; ENSG00000185664; TAA
VLPDGQVI

SEQ ID NO: 68337 - protein, 8 aa, Homo sapiens
  misc_feature: Table A; Target 68337; HLA-C*01:02; PMEL; ENSG00000185664; TAA
VLPDGQVI

SEQ ID NO: 68338 - protein, 9 aa, Homo sapiens
  misc_feature: Table A; Target 68338; HLA-A*02:07; PMEL; ENSG00000185664; TAA
VLPDGQVIW

SEQ ID NO: 68339 - protein, 9 aa, Homo sapiens
  misc_feature: Table A; Target 68339; HLA-A*23:01; PMEL; ENSG00000185664; TAA
VLPDGQVIW

SEQ ID NO: 68340 - protein, 9 aa, Homo sapiens
  misc_feature: Table A; Target 68340; HLA-A*24:02; PMEL; ENSG00000185664; TAA
VLPDGQVIW

SEQ ID NO: 68341 - protein, 9 aa, Homo sapiens
  misc_feature: Table A; Target 68341; HLA-B*57:01; PMEL; ENSG00000185664; TAA
VLPDGQVIW

SEQ ID NO: 68342 - protein, 9 aa, Homo sapiens
  misc_feature: Table A; Target 68342; HLA-B*58:01; PMEL; ENSG00000185664; TAA
VLPDGQVIW

SEQ ID NO: 68343 - protein, 10 aa, Homo sapiens
  misc_feature: Table A; Target 68343; HLA-A*02:01; PMEL; ENSG00000185664; TAA
VLPDGQVIWV

SEQ ID NO: 68344 - protein, 10 aa, Homo sapiens
  misc_feature: Table A; Target 68344; HLA-A*02:03; PMEL; ENSG00000185664; TAA
VLPDGQVIWV

SEQ ID NO: 68345 - protein, 10 aa, Homo sapiens
  misc_feature: Table A; Target 68345; HLA-A*02:07; PMEL; ENSG00000185664; TAA
VLPDGQVIWV

SEQ ID NO: 68346 - protein, 9 aa, Homo sapiens
  misc_feature: Table A; Target 68346; HLA-A*02:07; PMEL; ENSG00000185664; TAA
VLPSPACQL

SEQ ID NO: 68347 - protein, 9 aa, Homo sapiens
  misc_feature: Table A; Target 68347; HLA-A*03:01; PMEL; ENSG00000185664; TAA
VLPSPACQL

SEQ ID NO: 68348 - protein, 9 aa, Homo sapiens
  misc_feature: Table A; Target 68348; HLA-A*23:01; PMEL; ENSG00000185664; TAA
VLPSPACQL

SEQ ID NO: 68349 - protein, 9 aa, Homo sapiens
  misc_feature: Table A; Target 68349; HLA-A*24:02; PMEL; ENSG00000185664; TAA
VLPSPACQL

SEQ ID NO: 68350 - protein, 9 aa, Homo sapiens
  misc_feature: Table A; Target 68350; HLA-B*46:01; PMEL; ENSG00000185664; TAA
VLPSPACQL

SEQ ID NO: 68351 - protein, 9 aa, Homo sapiens
  misc_feature: Table A; Target 68351; HLA-C*01:02; PMEL; ENSG00000185664; TAA
VLPSPACQL

SEQ ID NO: 68352 - protein, 9 aa, Homo sapiens
  misc_feature: Table A; Target 68352; HLA-C*14:02; PMEL; ENSG00000185664; TAA
VLPSPACQL

SEQ ID NO: 68353 - protein, 9 aa, Homo sapiens
  misc_feature: Table A; Target 68353; HLA-A*02:01; PMEL; ENSG00000185664; TAA
VLQAAIPLT

SEQ ID NO: 68354 - protein, 9 aa, Homo sapiens
  misc_feature: Table A; Target 68354; HLA-A*02:03; PMEL; ENSG00000185664; TAA
VLQAAIPLT

SEQ ID NO: 68355 - protein, 9 aa, Homo sapiens
  misc_feature: Table A; Target 68355; HLA-A*02:04; PMEL; ENSG00000185664; TAA
VLQAAIPLT

SEQ ID NO: 68356 - protein, 9 aa, Homo sapiens
  misc_feature: Table A; Target 68356; HLA-B*55:01; PMEL; ENSG00000185664; TAA
VLQAAIPLT

SEQ ID NO: 68357 - protein, 9 aa, Homo sapiens
  misc_feature: Table A; Target 68357; HLA-C*06:02; PMEL; ENSG00000185664; TAA
VLQAAIPLT

SEQ ID NO: 68358 - protein, 10 aa, Homo sapiens
  misc_feature: Table A; Target 68358; HLA-A*02:03; PMEL; ENSG00000185664; TAA
VLQAAIPLTS

SEQ ID NO: 68359 - protein, 10 aa, Homo sapiens
  misc_feature: Table A; Target 68359; HLA-C*06:02; PMEL; ENSG00000185664; TAA
VLQAAIPLTS

SEQ ID NO: 68360 - protein, 9 aa, Homo sapiens
  misc_feature: Table A; Target 68360; HLA-A*32:01; PMEL; ENSG00000185664; TAA
VLSGTTAAQ

SEQ ID NO: 68361 - protein, 9 aa, Homo sapiens
  misc_feature: Table A; Target 68361; HLA-C*01:02; PMEL; ENSG00000185664; TAA
VLSGTTAAQ

SEQ ID NO: 68362 - protein, 9 aa, Homo sapiens
  misc_feature: Table A; Target 68362; HLA-C*07:04; PMEL; ENSG00000185664; TAA
VLSGTTAAQ

SEQ ID NO: 68363 - protein, 9 aa, Homo sapiens
  misc_feature: Table A; Target 68363; HLA-C*14:02; PMEL; ENSG00000185664; TAA
VLSGTTAAQ

SEQ ID NO: 68364 - protein, 10 aa, Homo sapiens
  misc_feature: Table A; Target 68364; HLA-A*02:01; PMEL; ENSG00000185664; TAA
VLSGTTAAQV

SEQ ID NO: 68365 - protein, 10 aa, Homo sapiens
  misc_feature: Table A; Target 68365; HLA-A*02:03; PMEL; ENSG00000185664; TAA
VLSGTTAAQV

SEQ ID NO: 68366 - protein, 10 aa, Homo sapiens
  misc_feature: Table A; Target 68366; HLA-A*03:02; PMEL; ENSG00000185664; TAA
VLSGTTAAQV

SEQ ID NO: 68367 - protein, 10 aa, Homo sapiens
  misc_feature: Table A; Target 68367; HLA-B*13:02; PMEL; ENSG00000185664; TAA
VLSGTTAAQV

SEQ ID NO: 68368 - protein, 11 aa, Homo sapiens
  misc_feature: Table A; Target 68368; HLA-C*06:02; PMEL; ENSG00000185664; TAA
VLSGTTAAQVT

SEQ ID NO: 68369 - protein, 11 aa, Homo sapiens
  misc_feature: Table A; Target 68369; HLA-C*07:04; PMEL; ENSG00000185664; TAA
VLSGTTAAQVT

SEQ ID NO: 68370 - protein, 10 aa, Homo sapiens
  misc_feature: Table A; Target 68370; HLA-A*02:01; PMEL; ENSG00000185664; TAA
VLYRYGSFSV

SEQ ID NO: 68371 - protein, 10 aa, Homo sapiens
  misc_feature: Table A; Target 68371; HLA-A*02:03; PMEL; ENSG00000185664; TAA
VLYRYGSFSV

SEQ ID NO: 68372 - protein, 10 aa, Homo sapiens
  misc_feature: Table A; Target 68372; HLA-A*02:04; PMEL; ENSG00000185664; TAA
VLYRYGSFSV

SEQ ID NO: 68373 - protein, 9 aa, Homo sapiens
  misc_feature: Table A; Target 68373; HLA-A*02:01; PMEL; ENSG00000185664; TAA
VMGTTLAEM

SEQ ID NO: 68374 - protein, 9 aa, Homo sapiens
  misc_feature: Table A; Target 68374; HLA-B*46:01; PMEL; ENSG00000185664; TAA
VMGTTLAEM

SEQ ID NO: 68375 - protein, 9 aa, Homo sapiens
  misc_feature: Table A; Target 68375; HLA-B*55:01; PMEL; ENSG00000185664; TAA
VMGTTLAEM

SEQ ID NO: 68376 - protein, 9 aa, Homo sapiens
  misc_feature: Table A; Target 68376; HLA-C*01:02; PMEL; ENSG00000185664; TAA
VMGTTLAEM

SEQ ID NO: 68377 - protein, 9 aa, Homo sapiens
  misc_feature: Table A; Target 68377; HLA-C*04:01; PMEL; ENSG00000185664; TAA
VMGTTLAEM

SEQ ID NO: 68378 - protein, 9 aa, Homo sapiens
  misc_feature: Table A; Target 68378; HLA-C*07:04; PMEL; ENSG00000185664; TAA
VMGTTLAEM

SEQ ID NO: 68379 - protein, 9 aa, Homo sapiens
  misc_feature: Table A; Target 68379; HLA-C*14:02; PMEL; ENSG00000185664; TAA
VMGTTLAEM

SEQ ID NO: 68380 - protein, 9 aa, Homo sapiens
  misc_feature: Table A; Target 68380; HLA-B*07:02; PMEL; ENSG00000185664; TAA
VPFSVSVSQ

SEQ ID NO: 68381 - protein, 9 aa, Homo sapiens
  misc_feature: Table A; Target 68381; HLA-B*35:01; PMEL; ENSG00000185664; TAA
VPFSVSVSQ

SEQ ID NO: 68382 - protein, 9 aa, Homo sapiens
  misc_feature: Table A; Target 68382; HLA-B*35:03; PMEL; ENSG00000185664; TAA
VPFSVSVSQ

SEQ ID NO: 68383 - protein, 9 aa, Homo sapiens
  misc_feature: Table A; Target 68383; HLA-B*51:01; PMEL; ENSG00000185664; TAA
VPFSVSVSQ

SEQ ID NO: 68384 - protein, 9 aa, Homo sapiens
  misc_feature: Table A; Target 68384; HLA-B*54:01; PMEL; ENSG00000185664; TAA
VPFSVSVSQ

SEQ ID NO: 68385 - protein, 9 aa, Homo sapiens
  misc_feature: Table A; Target 68385; HLA-B*55:01; PMEL; ENSG00000185664; TAA
VPFSVSVSQ

SEQ ID NO: 68386 - protein, 9 aa, Homo sapiens
  misc_feature: Table A; Target 68386; HLA-B*56:01; PMEL; ENSG00000185664; TAA
VPFSVSVSQ

SEQ ID NO: 68387 - protein, 9 aa, Homo sapiens
  misc_feature: Table A; Target 68387; HLA-C*07:02; PMEL; ENSG00000185664; TAA
VPFSVSVSQ

SEQ ID NO: 68388 - protein, 10 aa, Homo sapiens
  misc_feature: Table A; Target 68388; HLA-A*25:01; PMEL; ENSG00000185664; TAA
VPFSVSVSQL

SEQ ID NO: 68389 - protein, 10 aa, Homo sapiens
  misc_feature: Table A; Target 68389; HLA-A*30:01; PMEL; ENSG00000185664; TAA
VPFSVSVSQL

SEQ ID NO: 68390 - protein, 10 aa, Homo sapiens
  misc_feature: Table A; Target 68390; HLA-A*68:01; PMEL; ENSG00000185664; TAA
VPFSVSVSQL

SEQ ID NO: 68391 - protein, 10 aa, Homo sapiens
  misc_feature: Table A; Target 68391; HLA-A*68:02; PMEL; ENSG00000185664; TAA
VPFSVSVSQL

SEQ ID NO: 68392 - protein, 10 aa, Homo sapiens
  misc_feature: Table A; Target 68392; HLA-B*07:02; PMEL; ENSG00000185664; TAA
VPFSVSVSQL

SEQ ID NO: 68393 - protein, 10 aa, Homo sapiens
  misc_feature: Table A; Target 68393; HLA-B*35:01; PMEL; ENSG00000185664; TAA
VPFSVSVSQL

SEQ ID NO: 68394 - protein, 10 aa, Homo sapiens
  misc_feature: Table A; Target 68394; HLA-B*35:03; PMEL; ENSG00000185664; TAA
VPFSVSVSQL

SEQ ID NO: 68395 - protein, 10 aa, Homo sapiens
  misc_feature: Table A; Target 68395; HLA-B*38:01; PMEL; ENSG00000185664; TAA
VPFSVSVSQL

SEQ ID NO: 68396 - protein, 10 aa, Homo sapiens
  misc_feature: Table A; Target 68396; HLA-B*40:01; PMEL; ENSG00000185664; TAA
VPFSVSVSQL

SEQ ID NO: 68397 - protein, 10 aa, Homo sapiens
  misc_feature: Table A; Target 68397; HLA-B*51:01; PMEL; ENSG00000185664; TAA
VPFSVSVSQL

SEQ ID NO: 68398 - protein, 10 aa, Homo sapiens
  misc_feature: Table A; Target 68398; HLA-B*56:01; PMEL; ENSG00000185664; TAA
VPFSVSVSQL

SEQ ID NO: 68399 - protein, 10 aa, Homo sapiens
  misc_feature: Table A; Target 68399; HLA-C*04:01; PMEL; ENSG00000185664; TAA
VPFSVSVSQL

SEQ ID NO: 68400 - protein, 10 aa, Homo sapiens
  misc_feature: Table A; Target 68400; HLA-C*05:01; PMEL; ENSG00000185664; TAA
VPFSVSVSQL

SEQ ID NO: 68401 - protein, 10 aa, Homo sapiens
  misc_feature: Table A; Target 68401; HLA-C*07:01; PMEL; ENSG00000185664; TAA
VPFSVSVSQL

SEQ ID NO: 68402 - protein, 10 aa, Homo sapiens
  misc_feature: Table A; Target 68402; HLA-C*07:02; PMEL; ENSG00000185664; TAA
VPFSVSVSQL

SEQ ID NO: 68403 - protein, 10 aa, Homo sapiens
  misc_feature: Table A; Target 68403; HLA-C*07:06; PMEL; ENSG00000185664; TAA
VPFSVSVSQL

SEQ ID NO: 68404 - protein, 10 aa, Homo sapiens
  misc_feature: Table A; Target 68404; HLA-C*14:02; PMEL; ENSG00000185664; TAA
VPFSVSVSQL

SEQ ID NO: 68405 - protein, 11 aa, Homo sapiens
  misc_feature: Table A; Target 68405; HLA-A*31:01; PMEL; ENSG00000185664; TAA
VPFSVSVSQLR

SEQ ID NO: 68406 - protein, 11 aa, Homo sapiens
  misc_feature: Table A; Target 68406; HLA-A*33:01; PMEL; ENSG00000185664; TAA
VPFSVSVSQLR

SEQ ID NO: 68407 - protein, 11 aa, Homo sapiens
  misc_feature: Table A; Target 68407; HLA-A*33:03; PMEL; ENSG00000185664; TAA
VPFSVSVSQLR

SEQ ID NO: 68408 - protein, 11 aa, Homo sapiens
  misc_feature: Table A; Target 68408; HLA-A*68:01; PMEL; ENSG00000185664; TAA
VPFSVSVSQLR

SEQ ID NO: 68409 - protein, 11 aa, Homo sapiens
  misc_feature: Table A; Target 68409; HLA-A*68:02; PMEL; ENSG00000185664; TAA
VPFSVSVSQLR

SEQ ID NO: 68410 - protein, 11 aa, Homo sapiens
  misc_feature: Table A; Target 68410; HLA-C*07:06; PMEL; ENSG00000185664; TAA
VPFSVSVSQLR

SEQ ID NO: 68411 - protein, 9 aa, Homo sapiens
  misc_feature: Table A; Target 68411; HLA-B*07:02; PMEL; ENSG00000185664; TAA
VPLAHSSSA

SEQ ID NO: 68412 - protein, 9 aa, Homo sapiens
  misc_feature: Table A; Target 68412; HLA-B*08:01; PMEL; ENSG00000185664; TAA
VPLAHSSSA

SEQ ID NO: 68413 - protein, 9 aa, Homo sapiens
  misc_feature: Table A; Target 68413; HLA-B*35:01; PMEL; ENSG00000185664; TAA
VPLAHSSSA

SEQ ID NO: 68414 - protein, 9 aa, Homo sapiens
  misc_feature: Table A; Target 68414; HLA-B*35:03; PMEL; ENSG00000185664; TAA
VPLAHSSSA

SEQ ID NO: 68415 - protein, 9 aa, Homo sapiens
  misc_feature: Table A; Target 68415; HLA-B*40:02; PMEL; ENSG00000185664; TAA
VPLAHSSSA

SEQ ID NO: 68416 - protein, 9 aa, Homo sapiens
  misc_feature: Table A; Target 68416; HLA-B*51:01; PMEL; ENSG00000185664; TAA
VPLAHSSSA

SEQ ID NO: 68417 - protein, 9 aa, Homo sapiens
  misc_feature: Table A; Target 68417; HLA-B*54:01; PMEL; ENSG00000185664; TAA
VPLAHSSSA

SEQ ID NO: 68418 - protein, 9 aa, Homo sapiens
  misc_feature: Table A; Target 68418; HLA-B*55:01; PMEL; ENSG00000185664; TAA
VPLAHSSSA

SEQ ID NO: 68419 - protein, 9 aa, Homo sapiens
  misc_feature: Table A; Target 68419; HLA-B*56:01; PMEL; ENSG00000185664; TAA
VPLAHSSSA

SEQ ID NO: 68420 - protein, 9 aa, Homo sapiens
  misc_feature: Table A; Target 68420; HLA-C*07:02; PMEL; ENSG00000185664; TAA
VPLAHSSSA

SEQ ID NO: 68421 - protein, 9 aa, Homo sapiens
  misc_feature: Table A; Target 68421; HLA-C*14:02; PMEL; ENSG00000185664; TAA
VPLAHSSSA

SEQ ID NO: 68422 - protein, 10 aa, Homo sapiens
  misc_feature: Table A; Target 68422; HLA-A*23:01; PMEL; ENSG00000185664; TAA
VPLAHSSSAF

SEQ ID NO: 68423 - protein, 10 aa, Homo sapiens
  misc_feature: Table A; Target 68423; HLA-A*24:02; PMEL; ENSG00000185664; TAA
VPLAHSSSAF

SEQ ID NO: 68424 - protein, 10 aa, Homo sapiens
  misc_feature: Table A; Target 68424; HLA-B*07:02; PMEL; ENSG00000185664; TAA
VPLAHSSSAF

SEQ ID NO: 68425 - protein, 10 aa, Homo sapiens
  misc_feature: Table A; Target 68425; HLA-B*15:01; PMEL; ENSG00000185664; TAA
VPLAHSSSAF

SEQ ID NO: 68426 - protein, 10 aa, Homo sapiens
  misc_feature: Table A; Target 68426; HLA-B*15:03; PMEL; ENSG00000185664; TAA
VPLAHSSSAF

SEQ ID NO: 68427 - protein, 10 aa, Homo sapiens
  misc_feature: Table A; Target 68427; HLA-B*35:01; PMEL; ENSG00000185664; TAA
VPLAHSSSAF

SEQ ID NO: 68428 - protein, 10 aa, Homo sapiens
  misc_feature: Table A; Target 68428; HLA-B*35:03; PMEL; ENSG00000185664; TAA
VPLAHSSSAF

SEQ ID NO: 68429 - protein, 10 aa, Homo sapiens
  misc_feature: Table A; Target 68429; HLA-B*46:01; PMEL; ENSG00000185664; TAA
VPLAHSSSAF

SEQ ID NO: 68430 - protein, 10 aa, Homo sapiens
  misc_feature: Table A; Target 68430; HLA-B*55:01; PMEL; ENSG00000185664; TAA
VPLAHSSSAF

SEQ ID NO: 68431 - protein, 10 aa, Homo sapiens
  misc_feature: Table A; Target 68431; HLA-B*56:01; PMEL; ENSG00000185664; TAA
VPLAHSSSAF

SEQ ID NO: 68432 - protein, 10 aa, Homo sapiens
  misc_feature: Table A; Target 68432; HLA-C*04:01; PMEL; ENSG00000185664; TAA
VPLAHSSSAF

SEQ ID NO: 68433 - protein, 10 aa, Homo sapiens
  misc_feature: Table A; Target 68433; HLA-C*07:01; PMEL; ENSG00000185664; TAA
VPLAHSSSAF

SEQ ID NO: 68434 - protein, 10 aa, Homo sapiens
  misc_feature: Table A; Target 68434; HLA-C*07:02; PMEL; ENSG00000185664; TAA
VPLAHSSSAF

SEQ ID NO: 68435 - protein, 10 aa, Homo sapiens
  misc_feature: Table A; Target 68435; HLA-C*14:02; PMEL; ENSG00000185664; TAA
VPLAHSSSAF

SEQ ID NO: 68436 - protein, 8 aa, Homo sapiens
  misc_feature: Table A; Target 68436; HLA-B*35:01; PMEL; ENSG00000185664; TAA
VPLDCVLY

SEQ ID NO: 68437 - protein, 8 aa, Homo sapiens
  misc_feature: Table A; Target 68437; HLA-B*55:01; PMEL; ENSG00000185664; TAA
VPLDCVLY

SEQ ID NO: 68438 - protein, 8 aa, Homo sapiens
  misc_feature: Table A; Target 68438; HLA-C*07:01; PMEL; ENSG00000185664; TAA
VPLDCVLY

SEQ ID NO: 68439 - protein, 9 aa, Homo sapiens
  misc_feature: Table A; Target 68439; HLA-A*33:01; PMEL; ENSG00000185664; TAA
VPLDCVLYR

SEQ ID NO: 68440 - protein, 9 aa, Homo sapiens
  misc_feature: Table A; Target 68440; HLA-A*33:03; PMEL; ENSG00000185664; TAA
VPLDCVLYR

SEQ ID NO: 68441 - protein, 10 aa, Homo sapiens
  misc_feature: Table A; Target 68441; HLA-A*29:02; PMEL; ENSG00000185664; TAA
VPLDCVLYRY

SEQ ID NO: 68442 - protein, 8 aa, Homo sapiens
  misc_feature: Table A; Target 68442; HLA-B*51:01; PMEL; ENSG00000185664; TAA
VPLIVGIL

SEQ ID NO: 68443 - protein, 9 aa, Homo sapiens
  misc_feature: Table A; Target 68443; HLA-A*23:01; PMEL; ENSG00000185664; TAA
VPLIVGILL

SEQ ID NO: 68444 - protein, 9 aa, Homo sapiens
  misc_feature: Table A; Target 68444; HLA-B*07:02; PMEL; ENSG00000185664; TAA
VPLIVGILL

SEQ ID NO: 68445 - protein, 9 aa, Homo sapiens
  misc_feature: Table A; Target 68445; HLA-B*35:01; PMEL; ENSG00000185664; TAA
VPLIVGILL

SEQ ID NO: 68446 - protein, 9 aa, Homo sapiens
  misc_feature: Table A; Target 68446; HLA-B*35:03; PMEL; ENSG00000185664; TAA
VPLIVGILL

SEQ ID NO: 68447 - protein, 9 aa, Homo sapiens
  misc_feature: Table A; Target 68447; HLA-B*51:01; PMEL; ENSG00000185664; TAA
VPLIVGILL

SEQ ID NO: 68448 - protein, 9 aa, Homo sapiens
  misc_feature: Table A; Target 68448; HLA-B*54:01; PMEL; ENSG00000185664; TAA
VPLIVGILL

SEQ ID NO: 68449 - protein, 10 aa, Homo sapiens
  misc_feature: Table A; Target 68449; HLA-B*51:01; PMEL; ENSG00000185664; TAA
VPLIVGILLV

SEQ ID NO: 68450 - protein, 9 aa, Homo sapiens
  misc_feature: Table A; Target 68450; HLA-B*07:02; PMEL; ENSG00000185664; TAA
VPQLPHSSS

SEQ ID NO: 68451 - protein, 9 aa, Homo sapiens
  misc_feature: Table A; Target 68451; HLA-B*54:01; PMEL; ENSG00000185664; TAA
VPQLPHSSS

SEQ ID NO: 68452 - protein, 9 aa, Homo sapiens
  misc_feature: Table A; Target 68452; HLA-B*55:01; PMEL; ENSG00000185664; TAA
VPQLPHSSS

SEQ ID NO: 68453 - protein, 9 aa, Homo sapiens
  misc_feature: Table A; Target 68453; HLA-B*56:01; PMEL; ENSG00000185664; TAA
VPQLPHSSS

SEQ ID NO: 68454 - protein, 9 aa, Homo sapiens
  misc_feature: Table A; Target 68454; HLA-C*07:02; PMEL; ENSG00000185664; TAA
VPQLPHSSS

SEQ ID NO: 68455 - protein, 10 aa, Homo sapiens
  misc_feature: Table A; Target 68455; HLA-B*07:02; PMEL; ENSG00000185664; TAA
VPQLPHSSSH

SEQ ID NO: 68456 - protein, 9 aa, Homo sapiens
  misc_feature: Table A; Target 68456; HLA-B*07:02; PMEL; ENSG00000185664; TAA
VPSGEGDAF

SEQ ID NO: 68457 - protein, 9 aa, Homo sapiens
  misc_feature: Table A; Target 68457; HLA-B*15:01; PMEL; ENSG00000185664; TAA
VPSGEGDAF

SEQ ID NO: 68458 - protein, 9 aa, Homo sapiens
  misc_feature: Table A; Target 68458; HLA-B*15:03; PMEL; ENSG00000185664; TAA
VPSGEGDAF

SEQ ID NO: 68459 - protein, 9 aa, Homo sapiens
  misc_feature: Table A; Target 68459; HLA-B*27:05; PMEL; ENSG00000185664; TAA
VPSGEGDAF

SEQ ID NO: 68460 - protein, 9 aa, Homo sapiens
  misc_feature: Table A; Target 68460; HLA-B*35:01; PMEL; ENSG00000185664; TAA
VPSGEGDAF

SEQ ID NO: 68461 - protein, 9 aa, Homo sapiens
  misc_feature: Table A; Target 68461; HLA-B*35:03; PMEL; ENSG00000185664; TAA
VPSGEGDAF

SEQ ID NO: 68462 - protein, 9 aa, Homo sapiens
  misc_feature: Table A; Target 68462; HLA-B*38:01; PMEL; ENSG00000185664; TAA
VPSGEGDAF

SEQ ID NO: 68463 - protein, 9 aa, Homo sapiens
  misc_feature: Table A; Target 68463; HLA-B*39:01; PMEL; ENSG00000185664; TAA
VPSGEGDAF

SEQ ID NO: 68464 - protein, 9 aa, Homo sapiens
  misc_feature: Table A; Target 68464; HLA-B*55:01; PMEL; ENSG00000185664; TAA
VPSGEGDAF

SEQ ID NO: 68465 - protein, 9 aa, Homo sapiens
  misc_feature: Table A; Target 68465; HLA-C*03:03; PMEL; ENSG00000185664; TAA
VPSGEGDAF

SEQ ID NO: 68466 - protein, 9 aa, Homo sapiens
  misc_feature: Table A; Target 68466; HLA-C*04:01; PMEL; ENSG00000185664; TAA
VPSGEGDAF

SEQ ID NO: 68467 - protein, 9 aa, Homo sapiens
  misc_feature: Table A; Target 68467; HLA-C*05:01; PMEL; ENSG00000185664; TAA
VPSGEGDAF

SEQ ID NO: 68468 - protein, 9 aa, Homo sapiens
  misc_feature: Table A; Target 68468; HLA-C*07:02; PMEL; ENSG00000185664; TAA
VPSGEGDAF

SEQ ID NO: 68469 - protein, 9 aa, Homo sapiens
  misc_feature: Table A; Target 68469; HLA-C*14:02; PMEL; ENSG00000185664; TAA
VPSGEGDAF

SEQ ID NO: 68470 - protein, 11 aa, Homo sapiens
  misc_feature: Table A; Target 68470; HLA-B*27:02; PMEL; ENSG00000185664; TAA
VPSGEGDAFEL

SEQ ID NO: 68471 - protein, 11 aa, Homo sapiens
  misc_feature: Table A; Target 68471; HLA-B*35:01; PMEL; ENSG00000185664; TAA
VPSGEGDAFEL

SEQ ID NO: 68472 - protein, 11 aa, Homo sapiens
  misc_feature: Table A; Target 68472; HLA-B*35:03; PMEL; ENSG00000185664; TAA
VPSGEGDAFEL

SEQ ID NO: 68473 - protein, 11 aa, Homo sapiens
  misc_feature: Table A; Target 68473; HLA-B*38:01; PMEL; ENSG00000185664; TAA
VPSGEGDAFEL

SEQ ID NO: 68474 - protein, 11 aa, Homo sapiens
  misc_feature: Table A; Target 68474; HLA-B*39:01; PMEL; ENSG00000185664; TAA
VPSGEGDAFEL

SEQ ID NO: 68475 - protein, 11 aa, Homo sapiens
  misc_feature: Table A; Target 68475; HLA-B*55:01; PMEL; ENSG00000185664; TAA
VPSGEGDAFEL

SEQ ID NO: 68476 - protein, 11 aa, Homo sapiens
  misc_feature: Table A; Target 68476; HLA-C*03:03; PMEL; ENSG00000185664; TAA
VPSGEGDAFEL

SEQ ID NO: 68477 - protein, 9 aa, Homo sapiens
  misc_feature: Table A; Target 68477; HLA-B*35:01; PMEL; ENSG00000185664; TAA
VPTTEVIST

SEQ ID NO: 68478 - protein, 9 aa, Homo sapiens
  misc_feature: Table A; Target 68478; HLA-B*35:03; PMEL; ENSG00000185664; TAA
VPTTEVIST

SEQ ID NO: 68479 - protein, 9 aa, Homo sapiens
  misc_feature: Table A; Target 68479; HLA-B*54:01; PMEL; ENSG00000185664; TAA
VPTTEVIST

SEQ ID NO: 68480 - protein, 9 aa, Homo sapiens
  misc_feature: Table A; Target 68480; HLA-B*55:01; PMEL; ENSG00000185664; TAA
VPTTEVIST

SEQ ID NO: 68481 - protein, 9 aa, Homo sapiens
  misc_feature: Table A; Target 68481; HLA-B*56:01; PMEL; ENSG00000185664; TAA
VPTTEVIST

SEQ ID NO: 68482 - protein, 10 aa, Homo sapiens
  misc_feature: Table A; Target 68482; HLA-B*07:02; PMEL; ENSG00000185664; TAA
VPTTEVISTA

SEQ ID NO: 68483 - protein, 10 aa, Homo sapiens
  misc_feature: Table A; Target 68483; HLA-B*35:03; PMEL; ENSG00000185664; TAA
VPTTEVISTA

SEQ ID NO: 68484 - protein, 10 aa, Homo sapiens
  misc_feature: Table A; Target 68484; HLA-B*54:01; PMEL; ENSG00000185664; TAA
VPTTEVISTA

SEQ ID NO: 68485 - protein, 10 aa, Homo sapiens
  misc_feature: Table A; Target 68485; HLA-B*55:01; PMEL; ENSG00000185664; TAA
VPTTEVISTA

SEQ ID NO: 68486 - protein, 10 aa, Homo sapiens
  misc_feature: Table A; Target 68486; HLA-B*56:01; PMEL; ENSG00000185664; TAA
VPTTEVISTA

SEQ ID NO: 68487 - protein, 9 aa, Homo sapiens
  misc_feature: Table A; Target 68487; HLA-B*55:01; PMEL; ENSG00000185664; TAA
VPTTEVVGT

SEQ ID NO: 68488 - protein, 9 aa, Homo sapiens
  misc_feature: Table A; Target 68488; HLA-B*56:01; PMEL; ENSG00000185664; TAA
VPTTEVVGT

SEQ ID NO: 68489 - protein, 9 aa, Homo sapiens
  misc_feature: Table A; Target 68489; HLA-B*35:03; PMEL; ENSG00000185664; TAA
VPVSEVMGT

SEQ ID NO: 68490 - protein, 9 aa, Homo sapiens
  misc_feature: Table A; Target 68490; HLA-B*55:01; PMEL; ENSG00000185664; TAA
VPVSEVMGT

SEQ ID NO: 68491 - protein, 9 aa, Homo sapiens
  misc_feature: Table A; Target 68491; HLA-B*56:01; PMEL; ENSG00000185664; TAA
VPVSEVMGT

SEQ ID NO: 68492 - protein, 10 aa, Homo sapiens
  misc_feature: Table A; Target 68492; HLA-B*56:01; PMEL; ENSG00000185664; TAA
VPVSEVMGTT

SEQ ID NO: 68493 - protein, 11 aa, Homo sapiens
  misc_feature: Table A; Target 68493; HLA-A*23:01; PMEL; ENSG00000185664; TAA
VPVSEVMGTTL

SEQ ID NO: 68494 - protein, 11 aa, Homo sapiens
  misc_feature: Table A; Target 68494; HLA-A*30:01; PMEL; ENSG00000185664; TAA
VPVSEVMGTTL

SEQ ID NO: 68495 - protein, 11 aa, Homo sapiens
  misc_feature: Table A; Target 68495; HLA-B*07:02; PMEL; ENSG00000185664; TAA
VPVSEVMGTTL

SEQ ID NO: 68496 - protein, 11 aa, Homo sapiens
  misc_feature: Table A; Target 68496; HLA-B*27:02; PMEL; ENSG00000185664; TAA
VPVSEVMGTTL

SEQ ID NO: 68497 - protein, 11 aa, Homo sapiens
  misc_feature: Table A; Target 68497; HLA-B*35:01; PMEL; ENSG00000185664; TAA
VPVSEVMGTTL

SEQ ID NO: 68498 - protein, 11 aa, Homo sapiens
  misc_feature: Table A; Target 68498; HLA-B*35:03; PMEL; ENSG00000185664; TAA
VPVSEVMGTTL

SEQ ID NO: 68499 - protein, 11 aa, Homo sapiens
  misc_feature: Table A; Target 68499; HLA-B*38:01; PMEL; ENSG00000185664; TAA
VPVSEVMGTTL

SEQ ID NO: 68500 - protein, 11 aa, Homo sapiens
  misc_feature: Table A; Target 68500; HLA-B*39:01; PMEL; ENSG00000185664; TAA
VPVSEVMGTTL

SEQ ID NO: 68501 - protein, 11 aa, Homo sapiens
  misc_feature: Table A; Target 68501; HLA-B*40:01; PMEL; ENSG00000185664; TAA
VPVSEVMGTTL

SEQ ID NO: 68502 - protein, 11 aa, Homo sapiens
  misc_feature: Table A; Target 68502; HLA-B*51:01; PMEL; ENSG00000185664; TAA
VPVSEVMGTTL

SEQ ID NO: 68503 - protein, 11 aa, Homo sapiens
  misc_feature: Table A; Target 68503; HLA-B*54:01; PMEL; ENSG00000185664; TAA
VPVSEVMGTTL

SEQ ID NO: 68504 - protein, 11 aa, Homo sapiens
  misc_feature: Table A; Target 68504; HLA-B*55:01; PMEL; ENSG00000185664; TAA
VPVSEVMGTTL

SEQ ID NO: 68505 - protein, 11 aa, Homo sapiens
  misc_feature: Table A; Target 68505; HLA-B*56:01; PMEL; ENSG00000185664; TAA
VPVSEVMGTTL

SEQ ID NO: 68506 - protein, 11 aa, Homo sapiens
  misc_feature: Table A; Target 68506; HLA-B*58:01; PMEL; ENSG00000185664; TAA
VPVSEVMGTTL

SEQ ID NO: 68507 - protein, 11 aa, Homo sapiens
  misc_feature: Table A; Target 68507; HLA-C*01:02; PMEL; ENSG00000185664; TAA
VPVSEVMGTTL

SEQ ID NO: 68508 - protein, 11 aa, Homo sapiens
  misc_feature: Table A; Target 68508; HLA-C*03:03; PMEL; ENSG00000185664; TAA
VPVSEVMGTTL

SEQ ID NO: 68509 - protein, 11 aa, Homo sapiens
  misc_feature: Table A; Target 68509; HLA-C*03:04; PMEL; ENSG00000185664; TAA
VPVSEVMGTTL

SEQ ID NO: 68510 - protein, 11 aa, Homo sapiens
  misc_feature: Table A; Target 68510; HLA-C*05:01; PMEL; ENSG00000185664; TAA
VPVSEVMGTTL

SEQ ID NO: 68511 - protein, 11 aa, Homo sapiens
  misc_feature: Table A; Target 68511; HLA-C*07:01; PMEL; ENSG00000185664; TAA
VPVSEVMGTTL

SEQ ID NO: 68512 - protein, 11 aa, Homo sapiens
  misc_feature: Table A; Target 68512; HLA-C*07:02; PMEL; ENSG00000185664; TAA
VPVSEVMGTTL

SEQ ID NO: 68513 - protein, 11 aa, Homo sapiens
  misc_feature: Table A; Target 68513; HLA-C*07:06; PMEL; ENSG00000185664; TAA
VPVSEVMGTTL

SEQ ID NO: 68514 - protein, 11 aa, Homo sapiens
  misc_feature: Table A; Target 68514; HLA-C*12:03; PMEL; ENSG00000185664; TAA
VPVSEVMGTTL

SEQ ID NO: 68515 - protein, 11 aa, Homo sapiens
  misc_feature: Table A; Target 68515; HLA-C*16:02; PMEL; ENSG00000185664; TAA
VPVSEVMGTTL

SEQ ID NO: 68516 - protein, 9 aa, Homo sapiens
  misc_feature: Table A; Target 68516; HLA-B*13:02; PMEL; ENSG00000185664; TAA
VQGIESAEI

SEQ ID NO: 68517 - protein, 9 aa, Homo sapiens
  misc_feature: Table A; Target 68517; HLA-B*38:01; PMEL; ENSG00000185664; TAA
VQGIESAEI

SEQ ID NO: 68518 - protein, 9 aa, Homo sapiens
  misc_feature: Table A; Target 68518; HLA-A*32:01; PMEL; ENSG00000185664; TAA
VQMPTAEST

SEQ ID NO: 68519 - protein, 9 aa, Homo sapiens
  misc_feature: Table A; Target 68519; HLA-B*13:02; PMEL; ENSG00000185664; TAA
VQMPTAEST

SEQ ID NO: 68520 - protein, 9 aa, Homo sapiens
  misc_feature: Table A; Target 68520; HLA-B*15:01; PMEL; ENSG00000185664; TAA
VQMPTAEST

SEQ ID NO: 68521 - protein, 9 aa, Homo sapiens
  misc_feature: Table A; Target 68521; HLA-B*15:03; PMEL; ENSG00000185664; TAA
VQMPTAEST

SEQ ID NO: 68522 - protein, 9 aa, Homo sapiens
  misc_feature: Table A; Target 68522; HLA-B*39:01; PMEL; ENSG00000185664; TAA
VQMPTAEST

SEQ ID NO: 68523 - protein, 9 aa, Homo sapiens
  misc_feature: Table A; Target 68523; HLA-C*07:04; PMEL; ENSG00000185664; TAA
VQMPTAEST

SEQ ID NO: 68524 - protein, 9 aa, Homo sapiens
  misc_feature: Table A; Target 68524; HLA-C*14:02; PMEL; ENSG00000185664; TAA
VQMPTAEST

SEQ ID NO: 68525 - protein, 9 aa, Homo sapiens
  misc_feature: Table A; Target 68525; HLA-C*16:04; PMEL; ENSG00000185664; TAA
VQMPTAEST

SEQ ID NO: 68526 - protein, 11 aa, Homo sapiens
  misc_feature: Table A; Target 68526; HLA-A*23:01; PMEL; ENSG00000185664; TAA
VQMPTAESTGM

SEQ ID NO: 68527 - protein, 11 aa, Homo sapiens
  misc_feature: Table A; Target 68527; HLA-A*32:01; PMEL; ENSG00000185664; TAA
VQMPTAESTGM

SEQ ID NO: 68528 - protein, 11 aa, Homo sapiens
  misc_feature: Table A; Target 68528; HLA-B*13:02; PMEL; ENSG00000185664; TAA
VQMPTAESTGM

SEQ ID NO: 68529 - protein, 11 aa, Homo sapiens
  misc_feature: Table A; Target 68529; HLA-B*15:01; PMEL; ENSG00000185664; TAA
VQMPTAESTGM

SEQ ID NO: 68530 - protein, 11 aa, Homo sapiens
  misc_feature: Table A; Target 68530; HLA-B*15:03; PMEL; ENSG00000185664; TAA
VQMPTAESTGM

SEQ ID NO: 68531 - protein, 11 aa, Homo sapiens
  misc_feature: Table A; Target 68531; HLA-B*27:02; PMEL; ENSG00000185664; TAA
VQMPTAESTGM

SEQ ID NO: 68532 - protein, 11 aa, Homo sapiens
  misc_feature: Table A; Target 68532; HLA-B*27:05; PMEL; ENSG00000185664; TAA
VQMPTAESTGM

SEQ ID NO: 68533 - protein, 11 aa, Homo sapiens
  misc_feature: Table A; Target 68533; HLA-B*38:01; PMEL; ENSG00000185664; TAA
VQMPTAESTGM

SEQ ID NO: 68534 - protein, 11 aa, Homo sapiens
  misc_feature: Table A; Target 68534; HLA-B*39:01; PMEL; ENSG00000185664; TAA
VQMPTAESTGM

SEQ ID NO: 68535 - protein, 11 aa, Homo sapiens
  misc_feature: Table A; Target 68535; HLA-B*46:01; PMEL; ENSG00000185664; TAA
VQMPTAESTGM

SEQ ID NO: 68536 - protein, 11 aa, Homo sapiens
  misc_feature: Table A; Target 68536; HLA-C*07:01; PMEL; ENSG00000185664; TAA
VQMPTAESTGM

SEQ ID NO: 68537 - protein, 11 aa, Homo sapiens
  misc_feature: Table A; Target 68537; HLA-C*07:04; PMEL; ENSG00000185664; TAA
VQMPTAESTGM

SEQ ID NO: 68538 - protein, 11 aa, Homo sapiens
  misc_feature: Table A; Target 68538; HLA-C*14:02; PMEL; ENSG00000185664; TAA
VQMPTAESTGM

SEQ ID NO: 68539 - protein, 11 aa, Homo sapiens
  misc_feature: Table A; Target 68539; HLA-C*16:04; PMEL; ENSG00000185664; TAA
VQMPTAESTGM

SEQ ID NO: 68540 - protein, 8 aa, Homo sapiens
  misc_feature: Table A; Target 68540; HLA-A*02:03; PMEL; ENSG00000185664; TAA
VQVPTTEV

SEQ ID NO: 68541 - protein, 8 aa, Homo sapiens
  misc_feature: Table A; Target 68541; HLA-A*30:01; PMEL; ENSG00000185664; TAA
VQVPTTEV

SEQ ID NO: 68542 - protein, 8 aa, Homo sapiens
  misc_feature: Table A; Target 68542; HLA-B*13:02; PMEL; ENSG00000185664; TAA
VQVPTTEV

SEQ ID NO: 68543 - protein, 8 aa, Homo sapiens
  misc_feature: Table A; Target 68543; HLA-B*15:01; PMEL; ENSG00000185664; TAA
VQVPTTEV

SEQ ID NO: 68544 - protein, 8 aa, Homo sapiens
  misc_feature: Table A; Target 68544; HLA-B*15:03; PMEL; ENSG00000185664; TAA
VQVPTTEV

SEQ ID NO: 68545 - protein, 8 aa, Homo sapiens
  misc_feature: Table A; Target 68545; HLA-B*27:05; PMEL; ENSG00000185664; TAA
VQVPTTEV

SEQ ID NO: 68546 - protein, 8 aa, Homo sapiens
  misc_feature: Table A; Target 68546; HLA-B*37:01; PMEL; ENSG00000185664; TAA
VQVPTTEV

SEQ ID NO: 68547 - protein, 8 aa, Homo sapiens
  misc_feature: Table A; Target 68547; HLA-B*39:01; PMEL; ENSG00000185664; TAA
VQVPTTEV

SEQ ID NO: 68548 - protein, 8 aa, Homo sapiens
  misc_feature: Table A; Target 68548; HLA-B*40:02; PMEL; ENSG00000185664; TAA
VQVPTTEV

SEQ ID NO: 68549 - protein, 8 aa, Homo sapiens
  misc_feature: Table A; Target 68549; HLA-B*46:01; PMEL; ENSG00000185664; TAA
VQVPTTEV

SEQ ID NO: 68550 - protein, 8 aa, Homo sapiens
  misc_feature: Table A; Target 68550; HLA-B*49:01; PMEL; ENSG00000185664; TAA
VQVPTTEV

SEQ ID NO: 68551 - protein, 8 aa, Homo sapiens
  misc_feature: Table A; Target 68551; HLA-C*02:02; PMEL; ENSG00000185664; TAA
VQVPTTEV

SEQ ID NO: 68552 - protein, 8 aa, Homo sapiens
  misc_feature: Table A; Target 68552; HLA-C*05:01; PMEL; ENSG00000185664; TAA
VQVPTTEV

SEQ ID NO: 68553 - protein, 8 aa, Homo sapiens
  misc_feature: Table A; Target 68553; HLA-C*06:02; PMEL; ENSG00000185664; TAA
VQVPTTEV

SEQ ID NO: 68554 - protein, 9 aa, Homo sapiens
  misc_feature: Table A; Target 68554; HLA-A*02:01; PMEL; ENSG00000185664; TAA
VQVPTTEVI

SEQ ID NO: 68555 - protein, 9 aa, Homo sapiens
  misc_feature: Table A; Target 68555; HLA-A*02:03; PMEL; ENSG00000185664; TAA
VQVPTTEVI

SEQ ID NO: 68556 - protein, 9 aa, Homo sapiens
  misc_feature: Table A; Target 68556; HLA-A*23:01; PMEL; ENSG00000185664; TAA
VQVPTTEVI

SEQ ID NO: 68557 - protein, 9 aa, Homo sapiens
  misc_feature: Table A; Target 68557; HLA-A*24:02; PMEL; ENSG00000185664; TAA
VQVPTTEVI

SEQ ID NO: 68558 - protein, 9 aa, Homo sapiens
  misc_feature: Table A; Target 68558; HLA-A*25:01; PMEL; ENSG00000185664; TAA
VQVPTTEVI

SEQ ID NO: 68559 - protein, 9 aa, Homo sapiens
  misc_feature: Table A; Target 68559; HLA-A*30:01; PMEL; ENSG00000185664; TAA
VQVPTTEVI

SEQ ID NO: 68560 - protein, 9 aa, Homo sapiens
  misc_feature: Table A; Target 68560; HLA-A*32:01; PMEL; ENSG00000185664; TAA
VQVPTTEVI

SEQ ID NO: 68561 - protein, 9 aa, Homo sapiens
  misc_feature: Table A; Target 68561; HLA-B*13:02; PMEL; ENSG00000185664; TAA
VQVPTTEVI

SEQ ID NO: 68562 - protein, 9 aa, Homo sapiens
  misc_feature: Table A; Target 68562; HLA-B*15:01; PMEL; ENSG00000185664; TAA
VQVPTTEVI

SEQ ID NO: 68563 - protein, 9 aa, Homo sapiens
  misc_feature: Table A; Target 68563; HLA-B*15:03; PMEL; ENSG00000185664; TAA
VQVPTTEVI

SEQ ID NO: 68564 - protein, 9 aa, Homo sapiens
  misc_feature: Table A; Target 68564; HLA-B*18:01; PMEL; ENSG00000185664; TAA
VQVPTTEVI

SEQ ID NO: 68565 - protein, 9 aa, Homo sapiens
  misc_feature: Table A; Target 68565; HLA-B*27:05; PMEL; ENSG00000185664; TAA
VQVPTTEVI

SEQ ID NO: 68566 - protein, 9 aa, Homo sapiens
  misc_feature: Table A; Target 68566; HLA-B*38:01; PMEL; ENSG00000185664; TAA
VQVPTTEVI

SEQ ID NO: 68567 - protein, 9 aa, Homo sapiens
  misc_feature: Table A; Target 68567; HLA-B*39:01; PMEL; ENSG00000185664; TAA
VQVPTTEVI

SEQ ID NO: 68568 - protein, 9 aa, Homo sapiens
  misc_feature: Table A; Target 68568; HLA-B*40:01; PMEL; ENSG00000185664; TAA
VQVPTTEVI

SEQ ID NO: 68569 - protein, 9 aa, Homo sapiens
  misc_feature: Table A; Target 68569; HLA-B*40:02; PMEL; ENSG00000185664; TAA
VQVPTTEVI

SEQ ID NO: 68570 - protein, 9 aa, Homo sapiens
  misc_feature: Table A; Target 68570; HLA-B*46:01; PMEL; ENSG00000185664; TAA
VQVPTTEVI

SEQ ID NO: 68571 - protein, 9 aa, Homo sapiens
  misc_feature: Table A; Target 68571; HLA-B*49:01; PMEL; ENSG00000185664; TAA
VQVPTTEVI

SEQ ID NO: 68572 - protein, 9 aa, Homo sapiens
  misc_feature: Table A; Target 68572; HLA-B*58:01; PMEL; ENSG00000185664; TAA
VQVPTTEVI

SEQ ID NO: 68573 - protein, 9 aa, Homo sapiens
  misc_feature: Table A; Target 68573; HLA-C*02:02; PMEL; ENSG00000185664; TAA
VQVPTTEVI

SEQ ID NO: 68574 - protein, 9 aa, Homo sapiens
  misc_feature: Table A; Target 68574; HLA-C*03:03; PMEL; ENSG00000185664; TAA
VQVPTTEVI

SEQ ID NO: 68575 - protein, 9 aa, Homo sapiens
  misc_feature: Table A; Target 68575; HLA-C*03:04; PMEL; ENSG00000185664; TAA
VQVPTTEVI

SEQ ID NO: 68576 - protein, 9 aa, Homo sapiens
  misc_feature: Table A; Target 68576; HLA-C*04:01; PMEL; ENSG00000185664; TAA
VQVPTTEVI

SEQ ID NO: 68577 - protein, 9 aa, Homo sapiens
  misc_feature: Table A; Target 68577; HLA-C*05:01; PMEL; ENSG00000185664; TAA
VQVPTTEVI

SEQ ID NO: 68578 - protein, 9 aa, Homo sapiens
  misc_feature: Table A; Target 68578; HLA-C*06:02; PMEL; ENSG00000185664; TAA
VQVPTTEVI

SEQ ID NO: 68579 - protein, 9 aa, Homo sapiens
  misc_feature: Table A; Target 68579; HLA-C*07:01; PMEL; ENSG00000185664; TAA
VQVPTTEVI

SEQ ID NO: 68580 - protein, 9 aa, Homo sapiens
  misc_feature: Table A; Target 68580; HLA-C*07:04; PMEL; ENSG00000185664; TAA
VQVPTTEVI

SEQ ID NO: 68581 - protein, 9 aa, Homo sapiens
  misc_feature: Table A; Target 68581; HLA-C*12:03; PMEL; ENSG00000185664; TAA
VQVPTTEVI

SEQ ID NO: 68582 - protein, 9 aa, Homo sapiens
  misc_feature: Table A; Target 68582; HLA-C*16:02; PMEL; ENSG00000185664; TAA
VQVPTTEVI

SEQ ID NO: 68583 - protein, 9 aa, Homo sapiens
  misc_feature: Table A; Target 68583; HLA-C*16:04; PMEL; ENSG00000185664; TAA
VQVPTTEVI

SEQ ID NO: 68584 - protein, 11 aa, Homo sapiens
  misc_feature: Table A; Target 68584; HLA-C*07:04; PMEL; ENSG00000185664; TAA
VQVPTTEVIST

SEQ ID NO: 68585 - protein, 9 aa, Homo sapiens
  misc_feature: Table A; Target 68585; HLA-A*03:01; PMEL; ENSG00000185664; TAA
VSCQGGLPK

SEQ ID NO: 68586 - protein, 9 aa, Homo sapiens
  misc_feature: Table A; Target 68586; HLA-A*03:02; PMEL; ENSG00000185664; TAA
VSCQGGLPK

SEQ ID NO: 68587 - protein, 9 aa, Homo sapiens
  misc_feature: Table A; Target 68587; HLA-A*11:01; PMEL; ENSG00000185664; TAA
VSCQGGLPK

SEQ ID NO: 68588 - protein, 9 aa, Homo sapiens
  misc_feature: Table A; Target 68588; HLA-B*39:01; PMEL; ENSG00000185664; TAA
VSEVMGTTL

SEQ ID NO: 68589 - protein, 9 aa, Homo sapiens
  misc_feature: Table A; Target 68589; HLA-B*40:01; PMEL; ENSG00000185664; TAA
VSEVMGTTL

SEQ ID NO: 68590 - protein, 9 aa, Homo sapiens
  misc_feature: Table A; Target 68590; HLA-B*58:01; PMEL; ENSG00000185664; TAA
VSEVMGTTL

SEQ ID NO: 68591 - protein, 9 aa, Homo sapiens
  misc_feature: Table A; Target 68591; HLA-C*01:02; PMEL; ENSG00000185664; TAA
VSEVMGTTL

SEQ ID NO: 68592 - protein, 9 aa, Homo sapiens
  misc_feature: Table A; Target 68592; HLA-C*03:03; PMEL; ENSG00000185664; TAA
VSEVMGTTL

SEQ ID NO: 68593 - protein, 9 aa, Homo sapiens
  misc_feature: Table A; Target 68593; HLA-C*03:04; PMEL; ENSG00000185664; TAA
VSEVMGTTL

SEQ ID NO: 68594 - protein, 9 aa, Homo sapiens
  misc_feature: Table A; Target 68594; HLA-C*04:01; PMEL; ENSG00000185664; TAA
VSEVMGTTL

SEQ ID NO: 68595 - protein, 9 aa, Homo sapiens
  misc_feature: Table A; Target 68595; HLA-C*05:01; PMEL; ENSG00000185664; TAA
VSEVMGTTL

SEQ ID NO: 68596 - protein, 9 aa, Homo sapiens
  misc_feature: Table A; Target 68596; HLA-C*07:04; PMEL; ENSG00000185664; TAA
VSEVMGTTL

SEQ ID NO: 68597 - protein, 10 aa, Homo sapiens
  misc_feature: Table A; Target 68597; HLA-A*01:01; PMEL; ENSG00000185664; TAA
VSEVMGTTLA

SEQ ID NO: 68598 - protein, 10 aa, Homo sapiens
  misc_feature: Table A; Target 68598; HLA-A*31:01; PMEL; ENSG00000185664; TAA
VSGLSIGTGR

SEQ ID NO: 68599 - protein, 10 aa, Homo sapiens
  misc_feature: Table A; Target 68599; HLA-A*33:03; PMEL; ENSG00000185664; TAA
VSGLSIGTGR

SEQ ID NO: 68600 - protein, 10 aa, Homo sapiens
  misc_feature: Table A; Target 68600; HLA-A*68:01; PMEL; ENSG00000185664; TAA
VSGLSIGTGR

SEQ ID NO: 68601 - protein, 10 aa, Homo sapiens
  misc_feature: Table A; Target 68601; HLA-C*07:06; PMEL; ENSG00000185664; TAA
VSGLSIGTGR

SEQ ID NO: 68602 - protein, 9 aa, Homo sapiens
  misc_feature: Table A; Target 68602; HLA-A*02:01; PMEL; ENSG00000185664; TAA
VSLADTNSL

SEQ ID NO: 68603 - protein, 9 aa, Homo sapiens
  misc_feature: Table A; Target 68603; HLA-A*23:01; PMEL; ENSG00000185664; TAA
VSLADTNSL

SEQ ID NO: 68604 - protein, 9 aa, Homo sapiens
  misc_feature: Table A; Target 68604; HLA-A*24:02; PMEL; ENSG00000185664; TAA
VSLADTNSL

SEQ ID NO: 68605 - protein, 9 aa, Homo sapiens
  misc_feature: Table A; Target 68605; HLA-A*30:01; PMEL; ENSG00000185664; TAA
VSLADTNSL

SEQ ID NO: 68606 - protein, 9 aa, Homo sapiens
  misc_feature: Table A; Target 68606; HLA-A*32:01; PMEL; ENSG00000185664; TAA
VSLADTNSL

SEQ ID NO: 68607 - protein, 9 aa, Homo sapiens
  misc_feature: Table A; Target 68607; HLA-B*15:01; PMEL; ENSG00000185664; TAA
VSLADTNSL

SEQ ID NO: 68608 - protein, 9 aa, Homo sapiens
  misc_feature: Table A; Target 68608; HLA-B*15:03; PMEL; ENSG00000185664; TAA
VSLADTNSL

SEQ ID NO: 68609 - protein, 9 aa, Homo sapiens
  misc_feature: Table A; Target 68609; HLA-B*27:05; PMEL; ENSG00000185664; TAA
VSLADTNSL

SEQ ID NO: 68610 - protein, 9 aa, Homo sapiens
  misc_feature: Table A; Target 68610; HLA-B*35:03; PMEL; ENSG00000185664; TAA
VSLADTNSL

SEQ ID NO: 68611 - protein, 9 aa, Homo sapiens
  misc_feature: Table A; Target 68611; HLA-B*38:01; PMEL; ENSG00000185664; TAA
VSLADTNSL

SEQ ID NO: 68612 - protein, 9 aa, Homo sapiens
  misc_feature: Table A; Target 68612; HLA-B*39:01; PMEL; ENSG00000185664; TAA
VSLADTNSL

SEQ ID NO: 68613 - protein, 9 aa, Homo sapiens
  misc_feature: Table A; Target 68613; HLA-B*40:01; PMEL; ENSG00000185664; TAA
VSLADTNSL

SEQ ID NO: 68614 - protein, 9 aa, Homo sapiens
  misc_feature: Table A; Target 68614; HLA-B*40:02; PMEL; ENSG00000185664; TAA
VSLADTNSL

SEQ ID NO: 68615 - protein, 9 aa, Homo sapiens
  misc_feature: Table A; Target 68615; HLA-B*46:01; PMEL; ENSG00000185664; TAA
VSLADTNSL

SEQ ID NO: 68616 - protein, 9 aa, Homo sapiens
  misc_feature: Table A; Target 68616; HLA-B*57:01; PMEL; ENSG00000185664; TAA
VSLADTNSL

SEQ ID NO: 68617 - protein, 9 aa, Homo sapiens
  misc_feature: Table A; Target 68617; HLA-B*58:01; PMEL; ENSG00000185664; TAA
VSLADTNSL

SEQ ID NO: 68618 - protein, 9 aa, Homo sapiens
  misc_feature: Table A; Target 68618; HLA-C*01:02; PMEL; ENSG00000185664; TAA
VSLADTNSL

SEQ ID NO: 68619 - protein, 9 aa, Homo sapiens
  misc_feature: Table A; Target 68619; HLA-C*03:03; PMEL; ENSG00000185664; TAA
VSLADTNSL

SEQ ID NO: 68620 - protein, 9 aa, Homo sapiens
  misc_feature: Table A; Target 68620; HLA-C*03:04; PMEL; ENSG00000185664; TAA
VSLADTNSL

SEQ ID NO: 68621 - protein, 9 aa, Homo sapiens
  misc_feature: Table A; Target 68621; HLA-C*05:01; PMEL; ENSG00000185664; TAA
VSLADTNSL

SEQ ID NO: 68622 - protein, 9 aa, Homo sapiens
  misc_feature: Table A; Target 68622; HLA-C*07:04; PMEL; ENSG00000185664; TAA
VSLADTNSL

SEQ ID NO: 68623 - protein, 9 aa, Homo sapiens
  misc_feature: Table A; Target 68623; HLA-C*14:02; PMEL; ENSG00000185664; TAA
VSLADTNSL

SEQ ID NO: 68624 - protein, 9 aa, Homo sapiens
  misc_feature: Table A; Target 68624; HLA-C*16:01; PMEL; ENSG00000185664; TAA
VSLADTNSL

SEQ ID NO: 68625 - protein, 9 aa, Homo sapiens
  misc_feature: Table A; Target 68625; HLA-C*16:02; PMEL; ENSG00000185664; TAA
VSLADTNSL

SEQ ID NO: 68626 - protein, 9 aa, Homo sapiens
  misc_feature: Table A; Target 68626; HLA-C*16:04; PMEL; ENSG00000185664; TAA
VSLADTNSL

SEQ ID NO: 68627 - protein, 8 aa, Homo sapiens
  misc_feature: Table A; Target 68627; HLA-A*23:01; PMEL; ENSG00000185664; TAA
VSNDGPTL

SEQ ID NO: 68628 - protein, 8 aa, Homo sapiens
  misc_feature: Table A; Target 68628; HLA-A*32:01; PMEL; ENSG00000185664; TAA
VSNDGPTL

SEQ ID NO: 68629 - protein, 8 aa, Homo sapiens
  misc_feature: Table A; Target 68629; HLA-B*07:02; PMEL; ENSG00000185664; TAA
VSNDGPTL

SEQ ID NO: 68630 - protein, 8 aa, Homo sapiens
  misc_feature: Table A; Target 68630; HLA-B*15:03; PMEL; ENSG00000185664; TAA
VSNDGPTL

SEQ ID NO: 68631 - protein, 8 aa, Homo sapiens
  misc_feature: Table A; Target 68631; HLA-B*39:01; PMEL; ENSG00000185664; TAA
VSNDGPTL

SEQ ID NO: 68632 - protein, 8 aa, Homo sapiens
  misc_feature: Table A; Target 68632; HLA-B*40:02; PMEL; ENSG00000185664; TAA
VSNDGPTL

SEQ ID NO: 68633 - protein, 8 aa, Homo sapiens
  misc_feature: Table A; Target 68633; HLA-B*46:01; PMEL; ENSG00000185664; TAA
VSNDGPTL

SEQ ID NO: 68634 - protein, 8 aa, Homo sapiens
  misc_feature: Table A; Target 68634; HLA-B*51:01; PMEL; ENSG00000185664; TAA
VSNDGPTL

SEQ ID NO: 68635 - protein, 8 aa, Homo sapiens
  misc_feature: Table A; Target 68635; HLA-B*58:01; PMEL; ENSG00000185664; TAA
VSNDGPTL

SEQ ID NO: 68636 - protein, 8 aa, Homo sapiens
  misc_feature: Table A; Target 68636; HLA-C*01:02; PMEL; ENSG00000185664; TAA
VSNDGPTL

SEQ ID NO: 68637 - protein, 8 aa, Homo sapiens
  misc_feature: Table A; Target 68637; HLA-C*02:02; PMEL; ENSG00000185664; TAA
VSNDGPTL

SEQ ID NO: 68638 - protein, 8 aa, Homo sapiens
  misc_feature: Table A; Target 68638; HLA-C*03:03; PMEL; ENSG00000185664; TAA
VSNDGPTL

SEQ ID NO: 68639 - protein, 8 aa, Homo sapiens
  misc_feature: Table A; Target 68639; HLA-C*03:04; PMEL; ENSG00000185664; TAA
VSNDGPTL

SEQ ID NO: 68640 - protein, 8 aa, Homo sapiens
  misc_feature: Table A; Target 68640; HLA-C*04:01; PMEL; ENSG00000185664; TAA
VSNDGPTL

SEQ ID NO: 68641 - protein, 8 aa, Homo sapiens
  misc_feature: Table A; Target 68641; HLA-C*05:01; PMEL; ENSG00000185664; TAA
VSNDGPTL

SEQ ID NO: 68642 - protein, 8 aa, Homo sapiens
  misc_feature: Table A; Target 68642; HLA-C*07:02; PMEL; ENSG00000185664; TAA
VSNDGPTL

SEQ ID NO: 68643 - protein, 8 aa, Homo sapiens
  misc_feature: Table A; Target 68643; HLA-C*07:04; PMEL; ENSG00000185664; TAA
VSNDGPTL

SEQ ID NO: 68644 - protein, 8 aa, Homo sapiens
  misc_feature: Table A; Target 68644; HLA-C*12:03; PMEL; ENSG00000185664; TAA
VSNDGPTL

SEQ ID NO: 68645 - protein, 8 aa, Homo sapiens
  misc_feature: Table A; Target 68645; HLA-C*14:02; PMEL; ENSG00000185664; TAA
VSNDGPTL

SEQ ID NO: 68646 - protein, 8 aa, Homo sapiens
  misc_feature: Table A; Target 68646; HLA-C*16:01; PMEL; ENSG00000185664; TAA
VSNDGPTL

SEQ ID NO: 68647 - protein, 8 aa, Homo sapiens
  misc_feature: Table A; Target 68647; HLA-C*16:02; PMEL; ENSG00000185664; TAA
VSNDGPTL

SEQ ID NO: 68648 - protein, 8 aa, Homo sapiens
  misc_feature: Table A; Target 68648; HLA-C*16:04; PMEL; ENSG00000185664; TAA
VSNDGPTL

SEQ ID NO: 68649 - protein, 9 aa, Homo sapiens
  misc_feature: Table A; Target 68649; HLA-A*01:01; PMEL; ENSG00000185664; TAA
VSNDGPTLI

SEQ ID NO: 68650 - protein, 9 aa, Homo sapiens
  misc_feature: Table A; Target 68650; HLA-A*02:03; PMEL; ENSG00000185664; TAA
VSNDGPTLI

SEQ ID NO: 68651 - protein, 9 aa, Homo sapiens
  misc_feature: Table A; Target 68651; HLA-A*23:01; PMEL; ENSG00000185664; TAA
VSNDGPTLI

SEQ ID NO: 68652 - protein, 9 aa, Homo sapiens
  misc_feature: Table A; Target 68652; HLA-A*24:02; PMEL; ENSG00000185664; TAA
VSNDGPTLI

SEQ ID NO: 68653 - protein, 9 aa, Homo sapiens
  misc_feature: Table A; Target 68653; HLA-A*32:01; PMEL; ENSG00000185664; TAA
VSNDGPTLI

SEQ ID NO: 68654 - protein, 9 aa, Homo sapiens
  misc_feature: Table A; Target 68654; HLA-B*13:02; PMEL; ENSG00000185664; TAA
VSNDGPTLI

SEQ ID NO: 68655 - protein, 9 aa, Homo sapiens
  misc_feature: Table A; Target 68655; HLA-B*38:01; PMEL; ENSG00000185664; TAA
VSNDGPTLI

SEQ ID NO: 68656 - protein, 9 aa, Homo sapiens
  misc_feature: Table A; Target 68656; HLA-B*49:01; PMEL; ENSG00000185664; TAA
VSNDGPTLI

SEQ ID NO: 68657 - protein, 9 aa, Homo sapiens
  misc_feature: Table A; Target 68657; HLA-B*51:01; PMEL; ENSG00000185664; TAA
VSNDGPTLI

SEQ ID NO: 68658 - protein, 9 aa, Homo sapiens
  misc_feature: Table A; Target 68658; HLA-B*58:01; PMEL; ENSG00000185664; TAA
VSNDGPTLI

SEQ ID NO: 68659 - protein, 9 aa, Homo sapiens
  misc_feature: Table A; Target 68659; HLA-C*01:02; PMEL; ENSG00000185664; TAA
VSNDGPTLI

SEQ ID NO: 68660 - protein, 9 aa, Homo sapiens
  misc_feature: Table A; Target 68660; HLA-C*02:02; PMEL; ENSG00000185664; TAA
VSNDGPTLI

SEQ ID NO: 68661 - protein, 9 aa, Homo sapiens
  misc_feature: Table A; Target 68661; HLA-C*05:01; PMEL; ENSG00000185664; TAA
VSNDGPTLI

SEQ ID NO: 68662 - protein, 9 aa, Homo sapiens
  misc_feature: Table A; Target 68662; HLA-C*06:02; PMEL; ENSG00000185664; TAA
VSNDGPTLI

SEQ ID NO: 68663 - protein, 9 aa, Homo sapiens
  misc_feature: Table A; Target 68663; HLA-C*12:03; PMEL; ENSG00000185664; TAA
VSNDGPTLI

SEQ ID NO: 68664 - protein, 9 aa, Homo sapiens
  misc_feature: Table A; Target 68664; HLA-C*16:02; PMEL; ENSG00000185664; TAA
VSNDGPTLI

SEQ ID NO: 68665 - protein, 9 aa, Homo sapiens
  misc_feature: Table A; Target 68665; HLA-C*16:04; PMEL; ENSG00000185664; TAA
VSNDGPTLI

SEQ ID NO: 68666 - protein, 10 aa, Homo sapiens
  misc_feature: Table A; Target 68666; HLA-A*01:01; PMEL; ENSG00000185664; TAA
VSNDGPTLIG

SEQ ID NO: 68667 - protein, 11 aa, Homo sapiens
  misc_feature: Table A; Target 68667; HLA-A*31:01; PMEL; ENSG00000185664; TAA
VSNDGPTLIGA

SEQ ID NO: 68668 - protein, 11 aa, Homo sapiens
  misc_feature: Table A; Target 68668; HLA-B*56:01; PMEL; ENSG00000185664; TAA
VSNDGPTLIGA

SEQ ID NO: 68669 - protein, 10 aa, Homo sapiens
  misc_feature: Table A; Target 68669; HLA-B*57:01; PMEL; ENSG00000185664; TAA
VSRQLRTKAW

SEQ ID NO: 68670 - protein, 9 aa, Homo sapiens
  misc_feature: Table A; Target 68670; HLA-A*32:01; PMEL; ENSG00000185664; TAA
VSVSQLRAL

SEQ ID NO: 68671 - protein, 9 aa, Homo sapiens
  misc_feature: Table A; Target 68671; HLA-B*07:02; PMEL; ENSG00000185664; TAA
VSVSQLRAL

SEQ ID NO: 68672 - protein, 9 aa, Homo sapiens
  misc_feature: Table A; Target 68672; HLA-B*40:02; PMEL; ENSG00000185664; TAA
VSVSQLRAL

SEQ ID NO: 68673 - protein, 9 aa, Homo sapiens
  misc_feature: Table A; Target 68673; HLA-B*46:01; PMEL; ENSG00000185664; TAA
VSVSQLRAL

SEQ ID NO: 68674 - protein, 9 aa, Homo sapiens
  misc_feature: Table A; Target 68674; HLA-B*57:01; PMEL; ENSG00000185664; TAA
VSVSQLRAL

SEQ ID NO: 68675 - protein, 9 aa, Homo sapiens
  misc_feature: Table A; Target 68675; HLA-B*58:01; PMEL; ENSG00000185664; TAA
VSVSQLRAL

SEQ ID NO: 68676 - protein, 9 aa, Homo sapiens
  misc_feature: Table A; Target 68676; HLA-C*01:02; PMEL; ENSG00000185664; TAA
VSVSQLRAL

SEQ ID NO: 68677 - protein, 9 aa, Homo sapiens
  misc_feature: Table A; Target 68677; HLA-C*02:02; PMEL; ENSG00000185664; TAA
VSVSQLRAL

SEQ ID NO: 68678 - protein, 9 aa, Homo sapiens
  misc_feature: Table A; Target 68678; HLA-C*03:03; PMEL; ENSG00000185664; TAA
VSVSQLRAL

SEQ ID NO: 68679 - protein, 9 aa, Homo sapiens
  misc_feature: Table A; Target 68679; HLA-C*03:04; PMEL; ENSG00000185664; TAA
VSVSQLRAL

SEQ ID NO: 68680 - protein, 9 aa, Homo sapiens
  misc_feature: Table A; Target 68680; HLA-C*06:02; PMEL; ENSG00000185664; TAA
VSVSQLRAL

SEQ ID NO: 68681 - protein, 9 aa, Homo sapiens
  misc_feature: Table A; Target 68681; HLA-C*07:01; PMEL; ENSG00000185664; TAA
VSVSQLRAL

SEQ ID NO: 68682 - protein, 9 aa, Homo sapiens
  misc_feature: Table A; Target 68682; HLA-C*07:02; PMEL; ENSG00000185664; TAA
VSVSQLRAL

SEQ ID NO: 68683 - protein, 9 aa, Homo sapiens
  misc_feature: Table A; Target 68683; HLA-C*12:03; PMEL; ENSG00000185664; TAA
VSVSQLRAL

SEQ ID NO: 68684 - protein, 9 aa, Homo sapiens
  misc_feature: Table A; Target 68684; HLA-C*14:02; PMEL; ENSG00000185664; TAA
VSVSQLRAL

SEQ ID NO: 68685 - protein, 9 aa, Homo sapiens
  misc_feature: Table A; Target 68685; HLA-C*16:01; PMEL; ENSG00000185664; TAA
VSVSQLRAL

SEQ ID NO: 68686 - protein, 9 aa, Homo sapiens
  misc_feature: Table A; Target 68686; HLA-C*16:02; PMEL; ENSG00000185664; TAA
VSVSQLRAL

SEQ ID NO: 68687 - protein, 9 aa, Homo sapiens
  misc_feature: Table A; Target 68687; HLA-A*01:01; PMEL; ENSG00000185664; TAA
VTAQVVLQA

SEQ ID NO: 68688 - protein, 9 aa, Homo sapiens
  misc_feature: Table A; Target 68688; HLA-A*02:03; PMEL; ENSG00000185664; TAA
VTAQVVLQA

SEQ ID NO: 68689 - protein, 9 aa, Homo sapiens
  misc_feature: Table A; Target 68689; HLA-A*11:01; PMEL; ENSG00000185664; TAA
VTAQVVLQA

SEQ ID NO: 68690 - protein, 9 aa, Homo sapiens
  misc_feature: Table A; Target 68690; HLA-A*68:02; PMEL; ENSG00000185664; TAA
VTAQVVLQA

SEQ ID NO: 68691 - protein, 9 aa, Homo sapiens
  misc_feature: Table A; Target 68691; HLA-B*13:02; PMEL; ENSG00000185664; TAA
VTAQVVLQA

SEQ ID NO: 68692 - protein, 11 aa, Homo sapiens
  misc_feature: Table A; Target 68692; HLA-A*01:01; PMEL; ENSG00000185664; TAA
VTHTYLEPGPV

SEQ ID NO: 68693 - protein, 9 aa, Homo sapiens
  misc_feature: Table A; Target 68693; HLA-A*02:01; PMEL; ENSG00000185664; TAA
VTLDIVQGI

SEQ ID NO: 68694 - protein, 9 aa, Homo sapiens
  misc_feature: Table A; Target 68694; HLA-A*02:03; PMEL; ENSG00000185664; TAA
VTLDIVQGI

SEQ ID NO: 68695 - protein, 9 aa, Homo sapiens
  misc_feature: Table A; Target 68695; HLA-A*02:04; PMEL; ENSG00000185664; TAA
VTLDIVQGI

SEQ ID NO: 68696 - protein, 9 aa, Homo sapiens
  misc_feature: Table A; Target 68696; HLA-A*02:07; PMEL; ENSG00000185664; TAA
VTLDIVQGI

SEQ ID NO: 68697 - protein, 9 aa, Homo sapiens
  misc_feature: Table A; Target 68697; HLA-A*11:01; PMEL; ENSG00000185664; TAA
VTLDIVQGI

SEQ ID NO: 68698 - protein, 9 aa, Homo sapiens
  misc_feature: Table A; Target 68698; HLA-A*23:01; PMEL; ENSG00000185664; TAA
VTLDIVQGI

SEQ ID NO: 68699 - protein, 9 aa, Homo sapiens
  misc_feature: Table A; Target 68699; HLA-A*24:02; PMEL; ENSG00000185664; TAA
VTLDIVQGI

SEQ ID NO: 68700 - protein, 9 aa, Homo sapiens
  misc_feature: Table A; Target 68700; HLA-A*25:01; PMEL; ENSG00000185664; TAA
VTLDIVQGI

SEQ ID NO: 68701 - protein, 9 aa, Homo sapiens
  misc_feature: Table A; Target 68701; HLA-A*26:01; PMEL; ENSG00000185664; TAA
VTLDIVQGI

SEQ ID NO: 68702 - protein, 9 aa, Homo sapiens
  misc_feature: Table A; Target 68702; HLA-A*30:01; PMEL; ENSG00000185664; TAA
VTLDIVQGI

SEQ ID NO: 68703 - protein, 9 aa, Homo sapiens
  misc_feature: Table A; Target 68703; HLA-A*31:01; PMEL; ENSG00000185664; TAA
VTLDIVQGI

SEQ ID NO: 68704 - protein, 9 aa, Homo sapiens
  misc_feature: Table A; Target 68704; HLA-A*32:01; PMEL; ENSG00000185664; TAA
VTLDIVQGI

SEQ ID NO: 68705 - protein, 9 aa, Homo sapiens
  misc_feature: Table A; Target 68705; HLA-A*33:01; PMEL; ENSG00000185664; TAA
VTLDIVQGI

SEQ ID NO: 68706 - protein, 9 aa, Homo sapiens
  misc_feature: Table A; Target 68706; HLA-A*33:03; PMEL; ENSG00000185664; TAA
VTLDIVQGI

SEQ ID NO: 68707 - protein, 9 aa, Homo sapiens
  misc_feature: Table A; Target 68707; HLA-A*68:02; PMEL; ENSG00000185664; TAA
VTLDIVQGI

SEQ ID NO: 68708 - protein, 9 aa, Homo sapiens
  misc_feature: Table A; Target 68708; HLA-B*13:02; PMEL; ENSG00000185664; TAA
VTLDIVQGI

SEQ ID NO: 68709 - protein, 9 aa, Homo sapiens
  misc_feature: Table A; Target 68709; HLA-B*27:05; PMEL; ENSG00000185664; TAA
VTLDIVQGI

SEQ ID NO: 68710 - protein, 9 aa, Homo sapiens
  misc_feature: Table A; Target 68710; HLA-B*40:02; PMEL; ENSG00000185664; TAA
VTLDIVQGI

SEQ ID NO: 68711 - protein, 9 aa, Homo sapiens
  misc_feature: Table A; Target 68711; HLA-B*51:01; PMEL; ENSG00000185664; TAA
VTLDIVQGI

SEQ ID NO: 68712 - protein, 9 aa, Homo sapiens
  misc_feature: Table A; Target 68712; HLA-B*55:01; PMEL; ENSG00000185664; TAA
VTLDIVQGI

SEQ ID NO: 68713 - protein, 9 aa, Homo sapiens
  misc_feature: Table A; Target 68713; HLA-B*57:01; PMEL; ENSG00000185664; TAA
VTLDIVQGI

SEQ ID NO: 68714 - protein, 9 aa, Homo sapiens
  misc_feature: Table A; Target 68714; HLA-B*58:01; PMEL; ENSG00000185664; TAA
VTLDIVQGI

SEQ ID NO: 68715 - protein, 9 aa, Homo sapiens
  misc_feature: Table A; Target 68715; HLA-C*01:02; PMEL; ENSG00000185664; TAA
VTLDIVQGI

SEQ ID NO: 68716 - protein, 9 aa, Homo sapiens
  misc_feature: Table A; Target 68716; HLA-C*04:01; PMEL; ENSG00000185664; TAA
VTLDIVQGI

SEQ ID NO: 68717 - protein, 9 aa, Homo sapiens
  misc_feature: Table A; Target 68717; HLA-C*06:02; PMEL; ENSG00000185664; TAA
VTLDIVQGI

SEQ ID NO: 68718 - protein, 9 aa, Homo sapiens
  misc_feature: Table A; Target 68718; HLA-C*07:04; PMEL; ENSG00000185664; TAA
VTLDIVQGI

SEQ ID NO: 68719 - protein, 9 aa, Homo sapiens
  misc_feature: Table A; Target 68719; HLA-C*12:03; PMEL; ENSG00000185664; TAA
VTLDIVQGI

SEQ ID NO: 68720 - protein, 9 aa, Homo sapiens
  misc_feature: Table A; Target 68720; HLA-C*16:02; PMEL; ENSG00000185664; TAA
VTLDIVQGI

SEQ ID NO: 68721 - protein, 9 aa, Homo sapiens
  misc_feature: Table A; Target 68721; HLA-C*16:04; PMEL; ENSG00000185664; TAA
VTLDIVQGI

SEQ ID NO: 68722 - protein, 8 aa, Homo sapiens
  misc_feature: Table A; Target 68722; HLA-B*07:02; PMEL; ENSG00000185664; TAA
VVGTTPGQ

SEQ ID NO: 68723 - protein, 8 aa, Homo sapiens
  misc_feature: Table A; Target 68723; HLA-C*07:01; PMEL; ENSG00000185664; TAA
VVGTTPGQ

SEQ ID NO: 68724 - protein, 8 aa, Homo sapiens
  misc_feature: Table A; Target 68724; HLA-A*29:02; PMEL; ENSG00000185664; TAA
VVLASLIY

SEQ ID NO: 68725 - protein, 8 aa, Homo sapiens
  misc_feature: Table A; Target 68725; HLA-B*35:01; PMEL; ENSG00000185664; TAA
VVLASLIY

SEQ ID NO: 68726 - protein, 8 aa, Homo sapiens
  misc_feature: Table A; Target 68726; HLA-C*07:01; PMEL; ENSG00000185664; TAA
VVLASLIY

SEQ ID NO: 68727 - protein, 9 aa, Homo sapiens
  misc_feature: Table A; Target 68727; HLA-A*03:01; PMEL; ENSG00000185664; TAA
VVLASLIYR

SEQ ID NO: 68728 - protein, 9 aa, Homo sapiens
  misc_feature: Table A; Target 68728; HLA-A*03:02; PMEL; ENSG00000185664; TAA
VVLASLIYR

SEQ ID NO: 68729 - protein, 9 aa, Homo sapiens
  misc_feature: Table A; Target 68729; HLA-A*11:01; PMEL; ENSG00000185664; TAA
VVLASLIYR

SEQ ID NO: 68730 - protein, 9 aa, Homo sapiens
  misc_feature: Table A; Target 68730; HLA-A*31:01; PMEL; ENSG00000185664; TAA
VVLASLIYR

SEQ ID NO: 68731 - protein, 9 aa, Homo sapiens
  misc_feature: Table A; Target 68731; HLA-A*33:01; PMEL; ENSG00000185664; TAA
VVLASLIYR

SEQ ID NO: 68732 - protein, 9 aa, Homo sapiens
  misc_feature: Table A; Target 68732; HLA-A*33:03; PMEL; ENSG00000185664; TAA
VVLASLIYR

SEQ ID NO: 68733 - protein, 9 aa, Homo sapiens
  misc_feature: Table A; Target 68733; HLA-A*68:01; PMEL; ENSG00000185664; TAA
VVLASLIYR

SEQ ID NO: 68734 - protein, 9 aa, Homo sapiens
  misc_feature: Table A; Target 68734; HLA-B*57:01; PMEL; ENSG00000185664; TAA
VVLASLIYR

SEQ ID NO: 68735 - protein, 9 aa, Homo sapiens
  misc_feature: Table A; Target 68735; HLA-C*07:06; PMEL; ENSG00000185664; TAA
VVLASLIYR

SEQ ID NO: 68736 - protein, 10 aa, Homo sapiens
  misc_feature: Table A; Target 68736; HLA-A*31:01; PMEL; ENSG00000185664; TAA
VVLASLIYRR

SEQ ID NO: 68737 - protein, 9 aa, Homo sapiens
  misc_feature: Table A; Target 68737; HLA-A*03:01; PMEL; ENSG00000185664; TAA
VVLQAAIPL

SEQ ID NO: 68738 - protein, 9 aa, Homo sapiens
  misc_feature: Table A; Target 68738; HLA-C*01:02; PMEL; ENSG00000185664; TAA
VVLQAAIPL

SEQ ID NO: 68739 - protein, 9 aa, Homo sapiens
  misc_feature: Table A; Target 68739; HLA-C*03:03; PMEL; ENSG00000185664; TAA
VVLQAAIPL

SEQ ID NO: 68740 - protein, 9 aa, Homo sapiens
  misc_feature: Table A; Target 68740; HLA-C*03:04; PMEL; ENSG00000185664; TAA
VVLQAAIPL

SEQ ID NO: 68741 - protein, 9 aa, Homo sapiens
  misc_feature: Table A; Target 68741; HLA-C*07:04; PMEL; ENSG00000185664; TAA
VVLQAAIPL

SEQ ID NO: 68742 - protein, 10 aa, Homo sapiens
  misc_feature: Table A; Target 68742; HLA-C*06:02; PMEL; ENSG00000185664; TAA
VVLQAAIPLT

SEQ ID NO: 68743 - protein, 8 aa, Homo sapiens
  misc_feature: Table A; Target 68743; HLA-A*32:01; PMEL; ENSG00000185664; TAA
VVLSGTTA

SEQ ID NO: 68744 - protein, 8 aa, Homo sapiens
  misc_feature: Table A; Target 68744; HLA-B*39:01; PMEL; ENSG00000185664; TAA
VVLSGTTA

SEQ ID NO: 68745 - protein, 8 aa, Homo sapiens
  misc_feature: Table A; Target 68745; HLA-B*56:01; PMEL; ENSG00000185664; TAA
VVLSGTTA

SEQ ID NO: 68746 - protein, 8 aa, Homo sapiens
  misc_feature: Table A; Target 68746; HLA-C*01:02; PMEL; ENSG00000185664; TAA
VVLSGTTA

SEQ ID NO: 68747 - protein, 8 aa, Homo sapiens
  misc_feature: Table A; Target 68747; HLA-C*14:02; PMEL; ENSG00000185664; TAA
VVLSGTTA

SEQ ID NO: 68748 - protein, 9 aa, Homo sapiens
  misc_feature: Table A; Target 68748; HLA-A*02:01; PMEL; ENSG00000185664; TAA
VVLSGTTAA

SEQ ID NO: 68749 - protein, 9 aa, Homo sapiens
  misc_feature: Table A; Target 68749; HLA-A*02:03; PMEL; ENSG00000185664; TAA
VVLSGTTAA

SEQ ID NO: 68750 - protein, 9 aa, Homo sapiens
  misc_feature: Table A; Target 68750; HLA-A*32:01; PMEL; ENSG00000185664; TAA
VVLSGTTAA

SEQ ID NO: 68751 - protein, 9 aa, Homo sapiens
  misc_feature: Table A; Target 68751; HLA-B*13:02; PMEL; ENSG00000185664; TAA
VVLSGTTAA

SEQ ID NO: 68752 - protein, 9 aa, Homo sapiens
  misc_feature: Table A; Target 68752; HLA-B*15:01; PMEL; ENSG00000185664; TAA
VVLSGTTAA

SEQ ID NO: 68753 - protein, 9 aa, Homo sapiens
  misc_feature: Table A; Target 68753; HLA-B*27:05; PMEL; ENSG00000185664; TAA
VVLSGTTAA

SEQ ID NO: 68754 - protein, 9 aa, Homo sapiens
  misc_feature: Table A; Target 68754; HLA-B*40:02; PMEL; ENSG00000185664; TAA
VVLSGTTAA

SEQ ID NO: 68755 - protein, 9 aa, Homo sapiens
  misc_feature: Table A; Target 68755; HLA-B*46:01; PMEL; ENSG00000185664; TAA
VVLSGTTAA

SEQ ID NO: 68756 - protein, 9 aa, Homo sapiens
  misc_feature: Table A; Target 68756; HLA-B*54:01; PMEL; ENSG00000185664; TAA
VVLSGTTAA

SEQ ID NO: 68757 - protein, 9 aa, Homo sapiens
  misc_feature: Table A; Target 68757; HLA-B*55:01; PMEL; ENSG00000185664; TAA
VVLSGTTAA

SEQ ID NO: 68758 - protein, 9 aa, Homo sapiens
  misc_feature: Table A; Target 68758; HLA-B*56:01; PMEL; ENSG00000185664; TAA
VVLSGTTAA

SEQ ID NO: 68759 - protein, 9 aa, Homo sapiens
  misc_feature: Table A; Target 68759; HLA-C*01:02; PMEL; ENSG00000185664; TAA
VVLSGTTAA

SEQ ID NO: 68760 - protein, 9 aa, Homo sapiens
  misc_feature: Table A; Target 68760; HLA-C*03:03; PMEL; ENSG00000185664; TAA
VVLSGTTAA

SEQ ID NO: 68761 - protein, 9 aa, Homo sapiens
  misc_feature: Table A; Target 68761; HLA-C*03:04; PMEL; ENSG00000185664; TAA
VVLSGTTAA

SEQ ID NO: 68762 - protein, 9 aa, Homo sapiens
  misc_feature: Table A; Target 68762; HLA-C*14:02; PMEL; ENSG00000185664; TAA
VVLSGTTAA

SEQ ID NO: 68763 - protein, 10 aa, Homo sapiens
  misc_feature: Table A; Target 68763; HLA-A*03:01; PMEL; ENSG00000185664; TAA
VVLSGTTAAQ

SEQ ID NO: 68764 - protein, 10 aa, Homo sapiens
  misc_feature: Table A; Target 68764; HLA-A*03:02; PMEL; ENSG00000185664; TAA
VVLSGTTAAQ

SEQ ID NO: 68765 - protein, 10 aa, Homo sapiens
  misc_feature: Table A; Target 68765; HLA-B*07:02; PMEL; ENSG00000185664; TAA
VVLSGTTAAQ

SEQ ID NO: 68766 - protein, 10 aa, Homo sapiens
  misc_feature: Table A; Target 68766; HLA-B*27:05; PMEL; ENSG00000185664; TAA
VVLSGTTAAQ

SEQ ID NO: 68767 - protein, 10 aa, Homo sapiens
  misc_feature: Table A; Target 68767; HLA-C*01:02; PMEL; ENSG00000185664; TAA
VVLSGTTAAQ

SEQ ID NO: 68768 - protein, 10 aa, Homo sapiens
  misc_feature: Table A; Target 68768; HLA-C*04:01; PMEL; ENSG00000185664; TAA
VVLSGTTAAQ

SEQ ID NO: 68769 - protein, 10 aa, Homo sapiens
  misc_feature: Table A; Target 68769; HLA-C*06:02; PMEL; ENSG00000185664; TAA
VVLSGTTAAQ

SEQ ID NO: 68770 - protein, 10 aa, Homo sapiens
  misc_feature: Table A; Target 68770; HLA-C*07:01; PMEL; ENSG00000185664; TAA
VVLSGTTAAQ

SEQ ID NO: 68771 - protein, 10 aa, Homo sapiens
  misc_feature: Table A; Target 68771; HLA-C*07:02; PMEL; ENSG00000185664; TAA
VVLSGTTAAQ

SEQ ID NO: 68772 - protein, 10 aa, Homo sapiens
  misc_feature: Table A; Target 68772; HLA-C*07:04; PMEL; ENSG00000185664; TAA
VVLSGTTAAQ

SEQ ID NO: 68773 - protein, 11 aa, Homo sapiens
  misc_feature: Table A; Target 68773; HLA-A*02:01; PMEL; ENSG00000185664; TAA
VVLSGTTAAQV

SEQ ID NO: 68774 - protein, 11 aa, Homo sapiens
  misc_feature: Table A; Target 68774; HLA-A*02:03; PMEL; ENSG00000185664; TAA
VVLSGTTAAQV

SEQ ID NO: 68775 - protein, 11 aa, Homo sapiens
  misc_feature: Table A; Target 68775; HLA-A*03:02; PMEL; ENSG00000185664; TAA
VVLSGTTAAQV

SEQ ID NO: 68776 - protein, 8 aa, Homo sapiens
  misc_feature: Table A; Target 68776; HLA-C*16:01; PMEL; ENSG00000185664; TAA
VVSTQLIM

SEQ ID NO: 68777 - protein, 10 aa, Homo sapiens
  misc_feature: Table A; Target 68777; HLA-C*04:01; PMEL; ENSG00000185664; TAA
VVSTQLIMPG

SEQ ID NO: 68778 - protein, 10 aa, Homo sapiens
  misc_feature: Table A; Target 68778; HLA-C*06:02; PMEL; ENSG00000185664; TAA
VVSTQLIMPG

SEQ ID NO: 68779 - protein, 10 aa, Homo sapiens
  misc_feature: Table A; Target 68779; HLA-C*07:01; PMEL; ENSG00000185664; TAA
VVSTQLIMPG

SEQ ID NO: 68780 - protein, 10 aa, Homo sapiens
  misc_feature: Table A; Target 68780; HLA-C*12:03; PMEL; ENSG00000185664; TAA
VVSTQLIMPG

SEQ ID NO: 68781 - protein, 8 aa, Homo sapiens
  misc_feature: Table A; Target 68781; HLA-C*07:01; PMEL; ENSG00000185664; TAA
VWGGQPVY

SEQ ID NO: 68782 - protein, 9 aa, Homo sapiens
  misc_feature: Table A; Target 68782; HLA-A*24:02; PMEL; ENSG00000185664; TAA
VWKTWGQYW

SEQ ID NO: 68783 - protein, 11 aa, Homo sapiens
  misc_feature: Table A; Target 68783; HLA-A*24:02; PMEL; ENSG00000185664; TAA
VYVWKTWGQYW

SEQ ID NO: 68784 - protein, 10 aa, Homo sapiens
  misc_feature: Table A; Target 68784; HLA-B*40:02; PMEL; ENSG00000185664; TAA
WDFGDSSGTL

SEQ ID NO: 68785 - protein, 11 aa, Homo sapiens
  misc_feature: Table A; Target 68785; HLA-B*38:01; PMEL; ENSG00000185664; TAA
WDFGDSSGTLI

SEQ ID NO: 68786 - protein, 8 aa, Homo sapiens
  misc_feature: Table A; Target 68786; HLA-C*07:01; PMEL; ENSG00000185664; TAA
WLGVSRQL

SEQ ID NO: 68787 - protein, 9 aa, Homo sapiens
  misc_feature: Table A; Target 68787; HLA-C*01:02; PMEL; ENSG00000185664; TAA
WVETTAREL

SEQ ID NO: 68788 - protein, 9 aa, Homo sapiens
  misc_feature: Table A; Target 68788; HLA-C*03:03; PMEL; ENSG00000185664; TAA
WVETTAREL

SEQ ID NO: 68789 - protein, 9 aa, Homo sapiens
  misc_feature: Table A; Target 68789; HLA-C*03:04; PMEL; ENSG00000185664; TAA
WVETTAREL

SEQ ID NO: 68790 - protein, 9 aa, Homo sapiens
  misc_feature: Table A; Target 68790; HLA-C*16:02; PMEL; ENSG00000185664; TAA
WVETTAREL

SEQ ID NO: 68791 - protein, 8 aa, Homo sapiens
  misc_feature: Table A; Target 68791; HLA-A*30:01; PMEL; ENSG00000185664; TAA
YGSFSVTL

SEQ ID NO: 68792 - protein, 8 aa, Homo sapiens
  misc_feature: Table A; Target 68792; HLA-B*08:01; PMEL; ENSG00000185664; TAA
YGSFSVTL

SEQ ID NO: 68793 - protein, 8 aa, Homo sapiens
  misc_feature: Table A; Target 68793; HLA-B*27:05; PMEL; ENSG00000185664; TAA
YGSFSVTL

SEQ ID NO: 68794 - protein, 8 aa, Homo sapiens
  misc_feature: Table A; Target 68794; HLA-B*35:03; PMEL; ENSG00000185664; TAA
YGSFSVTL

SEQ ID NO: 68795 - protein, 8 aa, Homo sapiens
  misc_feature: Table A; Target 68795; HLA-B*37:01; PMEL; ENSG00000185664; TAA
YGSFSVTL

SEQ ID NO: 68796 - protein, 8 aa, Homo sapiens
  misc_feature: Table A; Target 68796; HLA-B*39:01; PMEL; ENSG00000185664; TAA
YGSFSVTL

SEQ ID NO: 68797 - protein, 8 aa, Homo sapiens
  misc_feature: Table A; Target 68797; HLA-B*40:01; PMEL; ENSG00000185664; TAA
YGSFSVTL

SEQ ID NO: 68798 - protein, 8 aa, Homo sapiens
  misc_feature: Table A; Target 68798; HLA-C*02:02; PMEL; ENSG00000185664; TAA
YGSFSVTL

SEQ ID NO: 68799 - protein, 8 aa, Homo sapiens
  misc_feature: Table A; Target 68799; HLA-C*03:03; PMEL; ENSG00000185664; TAA
YGSFSVTL

SEQ ID NO: 68800 - protein, 8 aa, Homo sapiens
  misc_feature: Table A; Target 68800; HLA-C*03:04; PMEL; ENSG00000185664; TAA
YGSFSVTL

SEQ ID NO: 68801 - protein, 8 aa, Homo sapiens
  misc_feature: Table A; Target 68801; HLA-C*04:01; PMEL; ENSG00000185664; TAA
YGSFSVTL

SEQ ID NO: 68802 - protein, 8 aa, Homo sapiens
  misc_feature: Table A; Target 68802; HLA-C*05:01; PMEL; ENSG00000185664; TAA
YGSFSVTL

SEQ ID NO: 68803 - protein, 8 aa, Homo sapiens
  misc_feature: Table A; Target 68803; HLA-C*07:04; PMEL; ENSG00000185664; TAA
YGSFSVTL

SEQ ID NO: 68804 - protein, 8 aa, Homo sapiens
  misc_feature: Table A; Target 68804; HLA-C*12:03; PMEL; ENSG00000185664; TAA
YGSFSVTL

SEQ ID NO: 68805 - protein, 10 aa, Homo sapiens
  misc_feature: Table A; Target 68805; HLA-B*07:02; PMEL; ENSG00000185664; TAA
YGSFSVTLDI

SEQ ID NO: 68806 - protein, 9 aa, Homo sapiens
  misc_feature: Table A; Target 68806; HLA-A*01:01; PMEL; ENSG00000185664; TAA
YLAEADLSY

SEQ ID NO: 68807 - protein, 9 aa, Homo sapiens
  misc_feature: Table A; Target 68807; HLA-A*02:01; PMEL; ENSG00000185664; TAA
YLAEADLSY

SEQ ID NO: 68808 - protein, 9 aa, Homo sapiens
  misc_feature: Table A; Target 68808; HLA-A*02:03; PMEL; ENSG00000185664; TAA
YLAEADLSY

SEQ ID NO: 68809 - protein, 9 aa, Homo sapiens
  misc_feature: Table A; Target 68809; HLA-A*03:01; PMEL; ENSG00000185664; TAA
YLAEADLSY

SEQ ID NO: 68810 - protein, 9 aa, Homo sapiens
  misc_feature: Table A; Target 68810; HLA-A*25:01; PMEL; ENSG00000185664; TAA
YLAEADLSY

SEQ ID NO: 68811 - protein, 9 aa, Homo sapiens
  misc_feature: Table A; Target 68811; HLA-A*26:01; PMEL; ENSG00000185664; TAA
YLAEADLSY

SEQ ID NO: 68812 - protein, 9 aa, Homo sapiens
  misc_feature: Table A; Target 68812; HLA-A*29:02; PMEL; ENSG00000185664; TAA
YLAEADLSY

SEQ ID NO: 68813 - protein, 9 aa, Homo sapiens
  misc_feature: Table A; Target 68813; HLA-A*30:02; PMEL; ENSG00000185664; TAA
YLAEADLSY

SEQ ID NO: 68814 - protein, 9 aa, Homo sapiens
  misc_feature: Table A; Target 68814; HLA-A*32:01; PMEL; ENSG00000185664; TAA
YLAEADLSY

SEQ ID NO: 68815 - protein, 9 aa, Homo sapiens
  misc_feature: Table A; Target 68815; HLA-B*13:02; PMEL; ENSG00000185664; TAA
YLAEADLSY

SEQ ID NO: 68816 - protein, 9 aa, Homo sapiens
  misc_feature: Table A; Target 68816; HLA-B*15:01; PMEL; ENSG00000185664; TAA
YLAEADLSY

SEQ ID NO: 68817 - protein, 9 aa, Homo sapiens
  misc_feature: Table A; Target 68817; HLA-B*15:03; PMEL; ENSG00000185664; TAA
YLAEADLSY

SEQ ID NO: 68818 - protein, 9 aa, Homo sapiens
  misc_feature: Table A; Target 68818; HLA-B*18:01; PMEL; ENSG00000185664; TAA
YLAEADLSY

SEQ ID NO: 68819 - protein, 9 aa, Homo sapiens
  misc_feature: Table A; Target 68819; HLA-B*35:01; PMEL; ENSG00000185664; TAA
YLAEADLSY

SEQ ID NO: 68820 - protein, 9 aa, Homo sapiens
  misc_feature: Table A; Target 68820; HLA-B*35:03; PMEL; ENSG00000185664; TAA
YLAEADLSY

SEQ ID NO: 68821 - protein, 9 aa, Homo sapiens
  misc_feature: Table A; Target 68821; HLA-B*39:01; PMEL; ENSG00000185664; TAA
YLAEADLSY

SEQ ID NO: 68822 - protein, 9 aa, Homo sapiens
  misc_feature: Table A; Target 68822; HLA-B*44:03; PMEL; ENSG00000185664; TAA
YLAEADLSY

SEQ ID NO: 68823 - protein, 9 aa, Homo sapiens
  misc_feature: Table A; Target 68823; HLA-B*46:01; PMEL; ENSG00000185664; TAA
YLAEADLSY

SEQ ID NO: 68824 - protein, 9 aa, Homo sapiens
  misc_feature: Table A; Target 68824; HLA-B*55:01; PMEL; ENSG00000185664; TAA
YLAEADLSY

SEQ ID NO: 68825 - protein, 9 aa, Homo sapiens
  misc_feature: Table A; Target 68825; HLA-B*58:01; PMEL; ENSG00000185664; TAA
YLAEADLSY

SEQ ID NO: 68826 - protein, 9 aa, Homo sapiens
  misc_feature: Table A; Target 68826; HLA-C*01:02; PMEL; ENSG00000185664; TAA
YLAEADLSY

SEQ ID NO: 68827 - protein, 9 aa, Homo sapiens
  misc_feature: Table A; Target 68827; HLA-C*02:02; PMEL; ENSG00000185664; TAA
YLAEADLSY

SEQ ID NO: 68828 - protein, 9 aa, Homo sapiens
  misc_feature: Table A; Target 68828; HLA-C*03:03; PMEL; ENSG00000185664; TAA
YLAEADLSY

SEQ ID NO: 68829 - protein, 9 aa, Homo sapiens
  misc_feature: Table A; Target 68829; HLA-C*03:04; PMEL; ENSG00000185664; TAA
YLAEADLSY

SEQ ID NO: 68830 - protein, 9 aa, Homo sapiens
  misc_feature: Table A; Target 68830; HLA-C*05:01; PMEL; ENSG00000185664; TAA
YLAEADLSY

SEQ ID NO: 68831 - protein, 9 aa, Homo sapiens
  misc_feature: Table A; Target 68831; HLA-C*07:04; PMEL; ENSG00000185664; TAA
YLAEADLSY

SEQ ID NO: 68832 - protein, 9 aa, Homo sapiens
  misc_feature: Table A; Target 68832; HLA-C*07:06; PMEL; ENSG00000185664; TAA
YLAEADLSY

SEQ ID NO: 68833 - protein, 9 aa, Homo sapiens
  misc_feature: Table A; Target 68833; HLA-C*14:02; PMEL; ENSG00000185664; TAA
YLAEADLSY

SEQ ID NO: 68834 - protein, 9 aa, Homo sapiens
  misc_feature: Table A; Target 68834; HLA-C*16:01; PMEL; ENSG00000185664; TAA
YLAEADLSY

SEQ ID NO: 68835 - protein, 9 aa, Homo sapiens
  misc_feature: Table A; Target 68835; HLA-C*16:02; PMEL; ENSG00000185664; TAA
YLAEADLSY

SEQ ID NO: 68836 - protein, 9 aa, Homo sapiens
  misc_feature: Table A; Target 68836; HLA-C*16:04; PMEL; ENSG00000185664; TAA
YLAEADLSY

SEQ ID NO: 68837 - protein, 10 aa, Homo sapiens
  misc_feature: Table A; Target 68837; HLA-A*02:01; PMEL; ENSG00000185664; TAA
YLAEADLSYT

SEQ ID NO: 68838 - protein, 10 aa, Homo sapiens
  misc_feature: Table A; Target 68838; HLA-A*02:03; PMEL; ENSG00000185664; TAA
YLAEADLSYT

SEQ ID NO: 68839 - protein, 11 aa, Homo sapiens
  misc_feature: Table A; Target 68839; HLA-A*24:02; PMEL; ENSG00000185664; TAA
YLAEADLSYTW

SEQ ID NO: 68840 - protein, 11 aa, Homo sapiens
  misc_feature: Table A; Target 68840; HLA-A*25:01; PMEL; ENSG00000185664; TAA
YLAEADLSYTW

SEQ ID NO: 68841 - protein, 11 aa, Homo sapiens
  misc_feature: Table A; Target 68841; HLA-B*44:02; PMEL; ENSG00000185664; TAA
YLAEADLSYTW

SEQ ID NO: 68842 - protein, 8 aa, Homo sapiens
  misc_feature: Table A; Target 68842; HLA-B*39:01; PMEL; ENSG00000185664; TAA
YLEPGPVT

SEQ ID NO: 68843 - protein, 8 aa, Homo sapiens
  misc_feature: Table A; Target 68843; HLA-C*07:04; PMEL; ENSG00000185664; TAA
YLEPGPVT

SEQ ID NO: 68844 - protein, 9 aa, Homo sapiens
  misc_feature: Table A; Target 68844; HLA-A*01:01; PMEL; ENSG00000185664; TAA
YLEPGPVTA

SEQ ID NO: 68845 - protein, 9 aa, Homo sapiens
  misc_feature: Table A; Target 68845; HLA-A*02:01; PMEL; ENSG00000185664; TAA
YLEPGPVTA

SEQ ID NO: 68846 - protein, 9 aa, Homo sapiens
  misc_feature: Table A; Target 68846; HLA-A*02:03; PMEL; ENSG00000185664; TAA
YLEPGPVTA

SEQ ID NO: 68847 - protein, 9 aa, Homo sapiens
  misc_feature: Table A; Target 68847; HLA-A*02:04; PMEL; ENSG00000185664; TAA
YLEPGPVTA

SEQ ID NO: 68848 - protein, 9 aa, Homo sapiens
  misc_feature: Table A; Target 68848; HLA-A*02:07; PMEL; ENSG00000185664; TAA
YLEPGPVTA

SEQ ID NO: 68849 - protein, 9 aa, Homo sapiens
  misc_feature: Table A; Target 68849; HLA-B*13:02; PMEL; ENSG00000185664; TAA
YLEPGPVTA

SEQ ID NO: 68850 - protein, 9 aa, Homo sapiens
  misc_feature: Table A; Target 68850; HLA-B*27:05; PMEL; ENSG00000185664; TAA
YLEPGPVTA

SEQ ID NO: 68851 - protein, 9 aa, Homo sapiens
  misc_feature: Table A; Target 68851; HLA-B*35:03; PMEL; ENSG00000185664; TAA
YLEPGPVTA

SEQ ID NO: 68852 - protein, 9 aa, Homo sapiens
  misc_feature: Table A; Target 68852; HLA-B*38:01; PMEL; ENSG00000185664; TAA
YLEPGPVTA

SEQ ID NO: 68853 - protein, 9 aa, Homo sapiens
  misc_feature: Table A; Target 68853; HLA-B*39:01; PMEL; ENSG00000185664; TAA
YLEPGPVTA

SEQ ID NO: 68854 - protein, 9 aa, Homo sapiens
  misc_feature: Table A; Target 68854; HLA-B*54:01; PMEL; ENSG00000185664; TAA
YLEPGPVTA

SEQ ID NO: 68855 - protein, 9 aa, Homo sapiens
  misc_feature: Table A; Target 68855; HLA-B*55:01; PMEL; ENSG00000185664; TAA
YLEPGPVTA

SEQ ID NO: 68856 - protein, 9 aa, Homo sapiens
  misc_feature: Table A; Target 68856; HLA-C*02:02; PMEL; ENSG00000185664; TAA
YLEPGPVTA

SEQ ID NO: 68857 - protein, 9 aa, Homo sapiens
  misc_feature: Table A; Target 68857; HLA-C*03:03; PMEL; ENSG00000185664; TAA
YLEPGPVTA

SEQ ID NO: 68858 - protein, 9 aa, Homo sapiens
  misc_feature: Table A; Target 68858; HLA-C*03:04; PMEL; ENSG00000185664; TAA
YLEPGPVTA

SEQ ID NO: 68859 - protein, 9 aa, Homo sapiens
  misc_feature: Table A; Target 68859; HLA-C*05:01; PMEL; ENSG00000185664; TAA
YLEPGPVTA

SEQ ID NO: 68860 - protein, 9 aa, Homo sapiens
  misc_feature: Table A; Target 68860; HLA-C*07:04; PMEL; ENSG00000185664; TAA
YLEPGPVTA

SEQ ID NO: 68861 - protein, 9 aa, Homo sapiens
  misc_feature: Table A; Target 68861; HLA-C*12:03; PMEL; ENSG00000185664; TAA
YLEPGPVTA

SEQ ID NO: 68862 - protein, 10 aa, Homo sapiens
  misc_feature: Table A; Target 68862; HLA-A*01:01; PMEL; ENSG00000185664; TAA
YLEPGPVTAQ

SEQ ID NO: 68863 - protein, 10 aa, Homo sapiens
  misc_feature: Table A; Target 68863; HLA-A*02:03; PMEL; ENSG00000185664; TAA
YLEPGPVTAQ

SEQ ID NO: 68864 - protein, 10 aa, Homo sapiens
  misc_feature: Table A; Target 68864; HLA-C*01:02; PMEL; ENSG00000185664; TAA
YLEPGPVTAQ

SEQ ID NO: 68865 - protein, 10 aa, Homo sapiens
  misc_feature: Table A; Target 68865; HLA-C*07:01; PMEL; ENSG00000185664; TAA
YLEPGPVTAQ

SEQ ID NO: 68866 - protein, 10 aa, Homo sapiens
  misc_feature: Table A; Target 68866; HLA-C*07:02; PMEL; ENSG00000185664; TAA
YLEPGPVTAQ

SEQ ID NO: 68867 - protein, 10 aa, Homo sapiens
  misc_feature: Table A; Target 68867; HLA-C*07:04; PMEL; ENSG00000185664; TAA
YLEPGPVTAQ

SEQ ID NO: 68868 - protein, 11 aa, Homo sapiens
  misc_feature: Table A; Target 68868; HLA-A*01:01; PMEL; ENSG00000185664; TAA
YLEPGPVTAQV

SEQ ID NO: 68869 - protein, 11 aa, Homo sapiens
  misc_feature: Table A; Target 68869; HLA-A*02:01; PMEL; ENSG00000185664; TAA
YLEPGPVTAQV

SEQ ID NO: 68870 - protein, 11 aa, Homo sapiens
  misc_feature: Table A; Target 68870; HLA-A*02:03; PMEL; ENSG00000185664; TAA
YLEPGPVTAQV

SEQ ID NO: 68871 - protein, 11 aa, Homo sapiens
  misc_feature: Table A; Target 68871; HLA-A*02:04; PMEL; ENSG00000185664; TAA
YLEPGPVTAQV

SEQ ID NO: 68872 - protein, 11 aa, Homo sapiens
  misc_feature: Table A; Target 68872; HLA-A*02:07; PMEL; ENSG00000185664; TAA
YLEPGPVTAQV

SEQ ID NO: 68873 - protein, 11 aa, Homo sapiens
  misc_feature: Table A; Target 68873; HLA-A*68:02; PMEL; ENSG00000185664; TAA
YLEPGPVTAQV

SEQ ID NO: 68874 - protein, 11 aa, Homo sapiens
  misc_feature: Table A; Target 68874; HLA-B*38:01; PMEL; ENSG00000185664; TAA
YLEPGPVTAQV

SEQ ID NO: 68875 - protein, 10 aa, Homo sapiens
  misc_feature: Table A; Target 68875; HLA-B*35:03; PMEL; ENSG00000185664; TAA
YPEWTEAQRL

SEQ ID NO: 68876 - protein, 9 aa, Homo sapiens
  misc_feature: Table A; Target 68876; HLA-B*35:03; PMEL; ENSG00000185664; TAA
YPQETDDAC

SEQ ID NO: 68877 - protein, 9 aa, Homo sapiens
  misc_feature: Table A; Target 68877; HLA-B*55:01; PMEL; ENSG00000185664; TAA
YPQETDDAC

SEQ ID NO: 68878 - protein, 10 aa, Homo sapiens
  misc_feature: Table A; Target 68878; HLA-B*35:03; PMEL; ENSG00000185664; TAA
YPQETDDACI

SEQ ID NO: 68879 - protein, 11 aa, Homo sapiens
  misc_feature: Table A; Target 68879; HLA-B*35:01; PMEL; ENSG00000185664; TAA
YPQETDDACIF

SEQ ID NO: 68880 - protein, 11 aa, Homo sapiens
  misc_feature: Table A; Target 68880; HLA-B*35:03; PMEL; ENSG00000185664; TAA
YPQETDDACIF

SEQ ID NO: 68881 - protein, 11 aa, Homo sapiens
  misc_feature: Table A; Target 68881; HLA-B*55:01; PMEL; ENSG00000185664; TAA
YPQETDDACIF

SEQ ID NO: 68882 - protein, 11 aa, Homo sapiens
  misc_feature: Table A; Target 68882; HLA-C*03:03; PMEL; ENSG00000185664; TAA
YPQETDDACIF

SEQ ID NO: 68883 - protein, 8 aa, Homo sapiens
  misc_feature: Table A; Target 68883; HLA-C*16:04; PMEL; ENSG00000185664; TAA
YRYGSFSV

SEQ ID NO: 68884 - protein, 10 aa, Homo sapiens
  misc_feature: Table A; Target 68884; HLA-C*02:02; PMEL; ENSG00000185664; TAA
YRYGSFSVTL

SEQ ID NO: 68885 - protein, 10 aa, Homo sapiens
  misc_feature: Table A; Target 68885; HLA-C*07:01; PMEL; ENSG00000185664; TAA
YRYGSFSVTL

SEQ ID NO: 68886 - protein, 9 aa, Homo sapiens
  misc_feature: Table A; Target 68886; HLA-C*01:02; PMEL; ENSG00000185664; TAA
YVPLAHSSS

SEQ ID NO: 68887 - protein, 10 aa, Homo sapiens
  misc_feature: Table A; Target 68887; HLA-A*02:07; PMEL; ENSG00000185664; TAA
YVPLAHSSSA

SEQ ID NO: 68888 - protein, 10 aa, Homo sapiens
  misc_feature: Table A; Target 68888; HLA-B*46:01; PMEL; ENSG00000185664; TAA
YVPLAHSSSA

SEQ ID NO: 68889 - protein, 10 aa, Homo sapiens
  misc_feature: Table A; Target 68889; HLA-B*54:01; PMEL; ENSG00000185664; TAA
YVPLAHSSSA

SEQ ID NO: 68890 - protein, 10 aa, Homo sapiens
  misc_feature: Table A; Target 68890; HLA-B*56:01; PMEL; ENSG00000185664; TAA
YVPLAHSSSA

SEQ ID NO: 68891 - protein, 10 aa, Homo sapiens
  misc_feature: Table A; Target 68891; HLA-C*01:02; PMEL; ENSG00000185664; TAA
YVPLAHSSSA

SEQ ID NO: 68892 - protein, 11 aa, Homo sapiens
  misc_feature: Table A; Target 68892; HLA-A*02:07; PMEL; ENSG00000185664; TAA
YVPLAHSSSAF

SEQ ID NO: 68893 - protein, 11 aa, Homo sapiens
  misc_feature: Table A; Target 68893; HLA-A*24:02; PMEL; ENSG00000185664; TAA
YVPLAHSSSAF

SEQ ID NO: 68894 - protein, 11 aa, Homo sapiens
  misc_feature: Table A; Target 68894; HLA-A*25:01; PMEL; ENSG00000185664; TAA
YVPLAHSSSAF

SEQ ID NO: 68895 - protein, 11 aa, Homo sapiens
  misc_feature: Table A; Target 68895; HLA-A*26:01; PMEL; ENSG00000185664; TAA
YVPLAHSSSAF

SEQ ID NO: 68896 - protein, 11 aa, Homo sapiens
  misc_feature: Table A; Target 68896; HLA-B*15:01; PMEL; ENSG00000185664; TAA
YVPLAHSSSAF

SEQ ID NO: 68897 - protein, 11 aa, Homo sapiens
  misc_feature: Table A; Target 68897; HLA-B*46:01; PMEL; ENSG00000185664; TAA
YVPLAHSSSAF

SEQ ID NO: 68898 - protein, 11 aa, Homo sapiens
  misc_feature: Table A; Target 68898; HLA-C*01:02; PMEL; ENSG00000185664; TAA
YVPLAHSSSAF

SEQ ID NO: 68899 - protein, 11 aa, Homo sapiens
  misc_feature: Table A; Target 68899; HLA-C*07:04; PMEL; ENSG00000185664; TAA
YVPLAHSSSAF

SEQ ID NO: 68900 - protein, 9 aa, Homo sapiens
  misc_feature: Table A; Target 68900; HLA-A*29:02; PMEL; ENSG00000185664; TAA
YVWKTWGQY

SEQ ID NO: 68901 - protein, 10 aa, Homo sapiens
  misc_feature: Table A; Target 68901; HLA-A*24:02; PMEL; ENSG00000185664; TAA
YVWKTWGQYW

SEQ ID NO: 68902 - protein, 10 aa, Homo sapiens
  misc_feature: Table A; Target 68902; HLA-B*57:01; PMEL; ENSG00000185664; TAA
YVWKTWGQYW

SEQ ID NO: 68903 - protein, 9 aa, Homo sapiens
  misc_feature: Table A; Target 68903; HLA-C*12:03; PNLDC1; ENSG00000146453; TAA
AAYDAFLCG

SEQ ID NO: 68904 - protein, 10 aa, Homo sapiens
  misc_feature: Table A; Target 68904; HLA-A*23:01; PNLDC1; ENSG00000146453; TAA
AFLAGLDIEF

SEQ ID NO: 68905 - protein, 10 aa, Homo sapiens
  misc_feature: Table A; Target 68905; HLA-A*24:02; PNLDC1; ENSG00000146453; TAA
AFLAGLDIEF

SEQ ID NO: 68906 - protein, 10 aa, Homo sapiens
  misc_feature: Table A; Target 68906; HLA-A*29:02; PNLDC1; ENSG00000146453; TAA
AFLAGLDIEF

SEQ ID NO: 68907 - protein, 8 aa, Homo sapiens
  misc_feature: Table A; Target 68907; HLA-C*14:02; PNLDC1; ENSG00000146453; TAA
AFLCGSVL

SEQ ID NO: 68908 - protein, 9 aa, Homo sapiens
  misc_feature: Table A; Target 68908; HLA-A*23:01; PNLDC1; ENSG00000146453; TAA
AFLCGSVLL

SEQ ID NO: 68909 - protein, 9 aa, Homo sapiens
  misc_feature: Table A; Target 68909; HLA-A*24:02; PNLDC1; ENSG00000146453; TAA
AFLCGSVLL

SEQ ID NO: 68910 - protein, 10 aa, Homo sapiens
  misc_feature: Table A; Target 68910; HLA-A*02:04; PNLDC1; ENSG00000146453; TAA
AGLDIEFTGL

SEQ ID NO: 68911 - protein, 11 aa, Homo sapiens
  misc_feature: Table A; Target 68911; HLA-A*31:01; PNLDC1; ENSG00000146453; TAA
AGLDIEFTGLR

SEQ ID NO: 68912 - protein, 8 aa, Homo sapiens
  misc_feature: Table A; Target 68912; HLA-C*16:01; PNLDC1; ENSG00000146453; TAA
AGVPKINF

SEQ ID NO: 68913 - protein, 9 aa, Homo sapiens
  misc_feature: Table A; Target 68913; HLA-A*01:01; PNLDC1; ENSG00000146453; TAA
AIEGEANKY

SEQ ID NO: 68914 - protein, 9 aa, Homo sapiens
  misc_feature: Table A; Target 68914; HLA-A*26:01; PNLDC1; ENSG00000146453; TAA
AIEGEANKY

SEQ ID NO: 68915 - protein, 9 aa, Homo sapiens
  misc_feature: Table A; Target 68915; HLA-A*29:02; PNLDC1; ENSG00000146453; TAA
AIEGEANKY

SEQ ID NO: 68916 - protein, 9 aa, Homo sapiens
  misc_feature: Table A; Target 68916; HLA-A*30:02; PNLDC1; ENSG00000146453; TAA
AIEGEANKY

SEQ ID NO: 68917 - protein, 9 aa, Homo sapiens
  misc_feature: Table A; Target 68917; HLA-A*32:01; PNLDC1; ENSG00000146453; TAA
AIEGEANKY

SEQ ID NO: 68918 - protein, 9 aa, Homo sapiens
  misc_feature: Table A; Target 68918; HLA-B*15:01; PNLDC1; ENSG00000146453; TAA
AIEGEANKY

SEQ ID NO: 68919 - protein, 9 aa, Homo sapiens
  misc_feature: Table A; Target 68919; HLA-B*15:03; PNLDC1; ENSG00000146453; TAA
AIEGEANKY

SEQ ID NO: 68920 - protein, 9 aa, Homo sapiens
  misc_feature: Table A; Target 68920; HLA-B*58:01; PNLDC1; ENSG00000146453; TAA
AIEGEANKY

SEQ ID NO: 68921 - protein, 9 aa, Homo sapiens
  misc_feature: Table A; Target 68921; HLA-C*07:04; PNLDC1; ENSG00000146453; TAA
AIEGEANKY

SEQ ID NO: 68922 - protein, 9 aa, Homo sapiens
  misc_feature: Table A; Target 68922; HLA-C*16:02; PNLDC1; ENSG00000146453; TAA
AIEGEANKY

SEQ ID NO: 68923 - protein, 9 aa, Homo sapiens
  misc_feature: Table A; Target 68923; HLA-A*02:04; PNLDC1; ENSG00000146453; TAA
ALLAFILGR

SEQ ID NO: 68924 - protein, 9 aa, Homo sapiens
  misc_feature: Table A; Target 68924; HLA-A*03:01; PNLDC1; ENSG00000146453; TAA
ALLAFILGR

SEQ ID NO: 68925 - protein, 9 aa, Homo sapiens
  misc_feature: Table A; Target 68925; HLA-A*11:01; PNLDC1; ENSG00000146453; TAA
ALLAFILGR

SEQ ID NO: 68926 - protein, 9 aa, Homo sapiens
  misc_feature: Table A; Target 68926; HLA-A*29:02; PNLDC1; ENSG00000146453; TAA
ALLAFILGR

SEQ ID NO: 68927 - protein, 9 aa, Homo sapiens
  misc_feature: Table A; Target 68927; HLA-A*31:01; PNLDC1; ENSG00000146453; TAA
ALLAFILGR

SEQ ID NO: 68928 - protein, 8 aa, Homo sapiens
  misc_feature: Table A; Target 68928; HLA-A*02:01; PNLDC1; ENSG00000146453; TAA
ALPNIWTV

SEQ ID NO: 68929 - protein, 8 aa, Homo sapiens
  misc_feature: Table A; Target 68929; HLA-A*02:04; PNLDC1; ENSG00000146453; TAA
ALPNIWTV

SEQ ID NO: 68930 - protein, 8 aa, Homo sapiens
  misc_feature: Table A; Target 68930; HLA-A*02:07; PNLDC1; ENSG00000146453; TAA
ALPNIWTV

SEQ ID NO: 68931 - protein, 9 aa, Homo sapiens
  misc_feature: Table A; Target 68931; HLA-A*02:01; PNLDC1; ENSG00000146453; TAA
ALPNIWTVL

SEQ ID NO: 68932 - protein, 9 aa, Homo sapiens
  misc_feature: Table A; Target 68932; HLA-A*02:03; PNLDC1; ENSG00000146453; TAA
ALPNIWTVL

SEQ ID NO: 68933 - protein, 9 aa, Homo sapiens
  misc_feature: Table A; Target 68933; HLA-A*02:04; PNLDC1; ENSG00000146453; TAA
ALPNIWTVL

SEQ ID NO: 68934 - protein, 9 aa, Homo sapiens
  misc_feature: Table A; Target 68934; HLA-A*02:07; PNLDC1; ENSG00000146453; TAA
ALPNIWTVL

SEQ ID NO: 68935 - protein, 9 aa, Homo sapiens
  misc_feature: Table A; Target 68935; HLA-A*24:02; PNLDC1; ENSG00000146453; TAA
ALPNIWTVL

SEQ ID NO: 68936 - protein, 9 aa, Homo sapiens
  misc_feature: Table A; Target 68936; HLA-A*68:02; PNLDC1; ENSG00000146453; TAA
ALPNIWTVL

SEQ ID NO: 68937 - protein, 10 aa, Homo sapiens
  misc_feature: Table A; Target 68937; HLA-A*02:07; PNLDC1; ENSG00000146453; TAA
ALPNIWTVLK

SEQ ID NO: 68938 - protein, 10 aa, Homo sapiens
  misc_feature: Table A; Target 68938; HLA-A*03:01; PNLDC1; ENSG00000146453; TAA
ALPNIWTVLK

SEQ ID NO: 68939 - protein, 9 aa, Homo sapiens
  misc_feature: Table A; Target 68939; HLA-A*30:01; PNLDC1; ENSG00000146453; TAA
APYVNQVNL

SEQ ID NO: 68940 - protein, 9 aa, Homo sapiens
  misc_feature: Table A; Target 68940; HLA-B*07:02; PNLDC1; ENSG00000146453; TAA
APYVNQVNL

SEQ ID NO: 68941 - protein, 9 aa, Homo sapiens
  misc_feature: Table A; Target 68941; HLA-B*08:01; PNLDC1; ENSG00000146453; TAA
APYVNQVNL

SEQ ID NO: 68942 - protein, 9 aa, Homo sapiens
  misc_feature: Table A; Target 68942; HLA-B*35:01; PNLDC1; ENSG00000146453; TAA
APYVNQVNL

SEQ ID NO: 68943 - protein, 9 aa, Homo sapiens
  misc_feature: Table A; Target 68943; HLA-B*35:03; PNLDC1; ENSG00000146453; TAA
APYVNQVNL

SEQ ID NO: 68944 - protein, 9 aa, Homo sapiens
  misc_feature: Table A; Target 68944; HLA-B*39:01; PNLDC1; ENSG00000146453; TAA
APYVNQVNL

SEQ ID NO: 68945 - protein, 9 aa, Homo sapiens
  misc_feature: Table A; Target 68945; HLA-B*51:01; PNLDC1; ENSG00000146453; TAA
APYVNQVNL

SEQ ID NO: 68946 - protein, 9 aa, Homo sapiens
  misc_feature: Table A; Target 68946; HLA-B*54:01; PNLDC1; ENSG00000146453; TAA
APYVNQVNL

SEQ ID NO: 68947 - protein, 9 aa, Homo sapiens
  misc_feature: Table A; Target 68947; HLA-B*55:01; PNLDC1; ENSG00000146453; TAA
APYVNQVNL

SEQ ID NO: 68948 - protein, 9 aa, Homo sapiens
  misc_feature: Table A; Target 68948; HLA-B*56:01; PNLDC1; ENSG00000146453; TAA
APYVNQVNL

SEQ ID NO: 68949 - protein, 9 aa, Homo sapiens
  misc_feature: Table A; Target 68949; HLA-B*58:01; PNLDC1; ENSG00000146453; TAA
APYVNQVNL

SEQ ID NO: 68950 - protein, 9 aa, Homo sapiens
  misc_feature: Table A; Target 68950; HLA-C*01:02; PNLDC1; ENSG00000146453; TAA
APYVNQVNL

SEQ ID NO: 68951 - protein, 9 aa, Homo sapiens
  misc_feature: Table A; Target 68951; HLA-C*02:02; PNLDC1; ENSG00000146453; TAA
APYVNQVNL

SEQ ID NO: 68952 - protein, 9 aa, Homo sapiens
  misc_feature: Table A; Target 68952; HLA-C*07:02; PNLDC1; ENSG00000146453; TAA
APYVNQVNL

SEQ ID NO: 68953 - protein, 9 aa, Homo sapiens
  misc_feature: Table A; Target 68953; HLA-C*14:02; PNLDC1; ENSG00000146453; TAA
APYVNQVNL

SEQ ID NO: 68954 - protein, 9 aa, Homo sapiens
  misc_feature: Table A; Target 68954; HLA-C*16:02; PNLDC1; ENSG00000146453; TAA
APYVNQVNL

SEQ ID NO: 68955 - protein, 9 aa, Homo sapiens
  misc_feature: Table A; Target 68955; HLA-C*16:04; PNLDC1; ENSG00000146453; TAA
APYVNQVNL

SEQ ID NO: 68956 - protein, 10 aa, Homo sapiens
  misc_feature: Table A; Target 68956; HLA-B*07:02; PNLDC1; ENSG00000146453; TAA
APYVNQVNLI

SEQ ID NO: 68957 - protein, 10 aa, Homo sapiens
  misc_feature: Table A; Target 68957; HLA-B*49:01; PNLDC1; ENSG00000146453; TAA
APYVNQVNLI

SEQ ID NO: 68958 - protein, 10 aa, Homo sapiens
  misc_feature: Table A; Target 68958; HLA-B*51:01; PNLDC1; ENSG00000146453; TAA
APYVNQVNLI

SEQ ID NO: 68959 - protein, 10 aa, Homo sapiens
  misc_feature: Table A; Target 68959; HLA-B*56:01; PNLDC1; ENSG00000146453; TAA
APYVNQVNLI

SEQ ID NO: 68960 - protein, 8 aa, Homo sapiens
  misc_feature: Table A; Target 68960; HLA-A*32:01; PNLDC1; ENSG00000146453; TAA
AQKPLVGH

SEQ ID NO: 68961 - protein, 8 aa, Homo sapiens
  misc_feature: Table A; Target 68961; HLA-B*15:01; PNLDC1; ENSG00000146453; TAA
AQKPLVGH

SEQ ID NO: 68962 - protein, 10 aa, Homo sapiens
  misc_feature: Table A; Target 68962; HLA-A*30:02; PNLDC1; ENSG00000146453; TAA
AQKPLVGHNM

SEQ ID NO: 68963 - protein, 10 aa, Homo sapiens
  misc_feature: Table A; Target 68963; HLA-A*31:01; PNLDC1; ENSG00000146453; TAA
AQKPLVGHNM

SEQ ID NO: 68964 - protein, 10 aa, Homo sapiens
  misc_feature: Table A; Target 68964; HLA-A*32:01; PNLDC1; ENSG00000146453; TAA
AQKPLVGHNM

SEQ ID NO: 68965 - protein, 10 aa, Homo sapiens
  misc_feature: Table A; Target 68965; HLA-B*15:01; PNLDC1; ENSG00000146453; TAA
AQKPLVGHNM

SEQ ID NO: 68966 - protein, 8 aa, Homo sapiens
  misc_feature: Table A; Target 68966; HLA-C*16:04; PNLDC1; ENSG00000146453; TAA
ARNILKEY

SEQ ID NO: 68967 - protein, 9 aa, Homo sapiens
  misc_feature: Table A; Target 68967; HLA-B*27:05; PNLDC1; ENSG00000146453; TAA
ARNILKEYR

SEQ ID NO: 68968 - protein, 10 aa, Homo sapiens
  misc_feature: Table A; Target 68968; HLA-A*01:01; PNLDC1; ENSG00000146453; TAA
ASSVQFLNQY

SEQ ID NO: 68969 - protein, 10 aa, Homo sapiens
  misc_feature: Table A; Target 68969; HLA-A*30:02; PNLDC1; ENSG00000146453; TAA
ASSVQFLNQY

SEQ ID NO: 68970 - protein, 10 aa, Homo sapiens
  misc_feature: Table A; Target 68970; HLA-C*16:02; PNLDC1; ENSG00000146453; TAA
ASSVQFLNQY

SEQ ID NO: 68971 - protein, 10 aa, Homo sapiens
  misc_feature: Table A; Target 68971; HLA-B*35:01; PNLDC1; ENSG00000146453; TAA
CPHEAAYDAF

SEQ ID NO: 68972 - protein, 8 aa, Homo sapiens
  misc_feature: Table A; Target 68972; HLA-B*15:01; PNLDC1; ENSG00000146453; TAA
CQIGLSVF

SEQ ID NO: 68973 - protein, 8 aa, Homo sapiens
  misc_feature: Table A; Target 68973; HLA-B*15:03; PNLDC1; ENSG00000146453; TAA
CQIGLSVF

SEQ ID NO: 68974 - protein, 8 aa, Homo sapiens
  misc_feature: Table A; Target 68974; HLA-C*07:04; PNLDC1; ENSG00000146453; TAA
CQIGLSVF

SEQ ID NO: 68975 - protein, 8 aa, Homo sapiens
  misc_feature: Table A; Target 68975; HLA-C*12:03; PNLDC1; ENSG00000146453; TAA
CQIGLSVF

SEQ ID NO: 68976 - protein, 8 aa, Homo sapiens
  misc_feature: Table A; Target 68976; HLA-B*51:01; PNLDC1; ENSG00000146453; TAA
DAFLCGSV

SEQ ID NO: 68977 - protein, 8 aa, Homo sapiens
  misc_feature: Table A; Target 68977; HLA-C*12:03; PNLDC1; ENSG00000146453; TAA
DAFLCGSV

SEQ ID NO: 68978 - protein, 9 aa, Homo sapiens
  misc_feature: Table A; Target 68978; HLA-B*35:01; PNLDC1; ENSG00000146453; TAA
DAFLCGSVL

SEQ ID NO: 68979 - protein, 9 aa, Homo sapiens
  misc_feature: Table A; Target 68979; HLA-B*35:03; PNLDC1; ENSG00000146453; TAA
DAFLCGSVL

SEQ ID NO: 68980 - protein, 9 aa, Homo sapiens
  misc_feature: Table A; Target 68980; HLA-B*39:01; PNLDC1; ENSG00000146453; TAA
DAFLCGSVL

SEQ ID NO: 68981 - protein, 9 aa, Homo sapiens
  misc_feature: Table A; Target 68981; HLA-B*51:01; PNLDC1; ENSG00000146453; TAA
DAFLCGSVL

SEQ ID NO: 68982 - protein, 9 aa, Homo sapiens
  misc_feature: Table A; Target 68982; HLA-C*03:03; PNLDC1; ENSG00000146453; TAA
DAFLCGSVL

SEQ ID NO: 68983 - protein, 9 aa, Homo sapiens
  misc_feature: Table A; Target 68983; HLA-C*12:03; PNLDC1; ENSG00000146453; TAA
DAFLCGSVL

SEQ ID NO: 68984 - protein, 9 aa, Homo sapiens
  misc_feature: Table A; Target 68984; HLA-A*25:01; PNLDC1; ENSG00000146453; TAA
DARNILKEY

SEQ ID NO: 68985 - protein, 9 aa, Homo sapiens
  misc_feature: Table A; Target 68985; HLA-A*26:01; PNLDC1; ENSG00000146453; TAA
DARNILKEY

SEQ ID NO: 68986 - protein, 9 aa, Homo sapiens
  misc_feature: Table A; Target 68986; HLA-A*33:01; PNLDC1; ENSG00000146453; TAA
DARNILKEY

SEQ ID NO: 68987 - protein, 9 aa, Homo sapiens
  misc_feature: Table A; Target 68987; HLA-A*33:03; PNLDC1; ENSG00000146453; TAA
DARNILKEY

SEQ ID NO: 68988 - protein, 9 aa, Homo sapiens
  misc_feature: Table A; Target 68988; HLA-B*35:01; PNLDC1; ENSG00000146453; TAA
DARNILKEY

SEQ ID NO: 68989 - protein, 9 aa, Homo sapiens
  misc_feature: Table A; Target 68989; HLA-B*46:01; PNLDC1; ENSG00000146453; TAA
DARNILKEY

SEQ ID NO: 68990 - protein, 9 aa, Homo sapiens
  misc_feature: Table A; Target 68990; HLA-B*51:01; PNLDC1; ENSG00000146453; TAA
DARNILKEY

SEQ ID NO: 68991 - protein, 9 aa, Homo sapiens
  misc_feature: Table A; Target 68991; HLA-C*12:03; PNLDC1; ENSG00000146453; TAA
DARNILKEY

SEQ ID NO: 68992 - protein, 9 aa, Homo sapiens
  misc_feature: Table A; Target 68992; HLA-C*16:01; PNLDC1; ENSG00000146453; TAA
DARNILKEY

SEQ ID NO: 68993 - protein, 9 aa, Homo sapiens
  misc_feature: Table A; Target 68993; HLA-C*16:02; PNLDC1; ENSG00000146453; TAA
DARNILKEY

SEQ ID NO: 68994 - protein, 10 aa, Homo sapiens
  misc_feature: Table A; Target 68994; HLA-A*33:01; PNLDC1; ENSG00000146453; TAA
DARNILKEYR

SEQ ID NO: 68995 - protein, 10 aa, Homo sapiens
  misc_feature: Table A; Target 68995; HLA-A*33:03; PNLDC1; ENSG00000146453; TAA
DARNILKEYR

SEQ ID NO: 68996 - protein, 8 aa, Homo sapiens
  misc_feature: Table A; Target 68996; HLA-B*18:01; PNLDC1; ENSG00000146453; TAA
DEGVVVKK

SEQ ID NO: 68997 - protein, 9 aa, Homo sapiens
  misc_feature: Table A; Target 68997; HLA-B*18:01; PNLDC1; ENSG00000146453; TAA
DEGVVVKKV

SEQ ID NO: 68998 - protein, 9 aa, Homo sapiens
  misc_feature: Table A; Target 68998; HLA-B*40:02; PNLDC1; ENSG00000146453; TAA
DEGVVVKKV

SEQ ID NO: 68999 - protein, 9 aa, Homo sapiens
  misc_feature: Table A; Target 68999; HLA-B*44:02; PNLDC1; ENSG00000146453; TAA
DEGVVVKKV

SEQ ID NO: 69000 - protein, 9 aa, Homo sapiens
  misc_feature: Table A; Target 69000; HLA-B*44:03; PNLDC1; ENSG00000146453; TAA
DEGVVVKKV

SEQ ID NO: 69001 - protein, 9 aa, Homo sapiens
  misc_feature: Table A; Target 69001; HLA-B*49:01; PNLDC1; ENSG00000146453; TAA
DEGVVVKKV

SEQ ID NO: 69002 - protein, 9 aa, Homo sapiens
  misc_feature: Table A; Target 69002; HLA-C*16:04; PNLDC1; ENSG00000146453; TAA
DEGVVVKKV

SEQ ID NO: 69003 - protein, 9 aa, Homo sapiens
  misc_feature: Table A; Target 69003; HLA-B*18:01; PNLDC1; ENSG00000146453; TAA
DEVTRWLEL

SEQ ID NO: 69004 - protein, 9 aa, Homo sapiens
  misc_feature: Table A; Target 69004; HLA-B*39:01; PNLDC1; ENSG00000146453; TAA
DHPTLCISL

SEQ ID NO: 69005 - protein, 10 aa, Homo sapiens
  misc_feature: Table A; Target 69005; HLA-A*33:01; PNLDC1; ENSG00000146453; TAA
DILTGNWRVR

SEQ ID NO: 69006 - protein, 9 aa, Homo sapiens
  misc_feature: Table A; Target 69006; HLA-B*38:01; PNLDC1; ENSG00000146453; TAA
DKDQIKVVI

SEQ ID NO: 69007 - protein, 8 aa, Homo sapiens
  misc_feature: Table A; Target 69007; HLA-A*33:01; PNLDC1; ENSG00000146453; TAA
DLLHLHEK

SEQ ID NO: 69008 - protein, 9 aa, Homo sapiens
  misc_feature: Table A; Target 69008; HLA-A*33:01; PNLDC1; ENSG00000146453; TAA
DLLHLHEKF

SEQ ID NO: 69009 - protein, 8 aa, Homo sapiens
  misc_feature: Table A; Target 69009; HLA-B*35:01; PNLDC1; ENSG00000146453; TAA
DPVPESSF

SEQ ID NO: 69010 - protein, 8 aa, Homo sapiens
  misc_feature: Table A; Target 69010; HLA-B*35:03; PNLDC1; ENSG00000146453; TAA
DPVPESSF

SEQ ID NO: 69011 - protein, 11 aa, Homo sapiens
  misc_feature: Table A; Target 69011; HLA-A*25:01; PNLDC1; ENSG00000146453; TAA
DPVPESSFPQY

SEQ ID NO: 69012 - protein, 11 aa, Homo sapiens
  misc_feature: Table A; Target 69012; HLA-A*26:01; PNLDC1; ENSG00000146453; TAA
DPVPESSFPQY

SEQ ID NO: 69013 - protein, 11 aa, Homo sapiens
  misc_feature: Table A; Target 69013; HLA-A*68:01; PNLDC1; ENSG00000146453; TAA
DPVPESSFPQY

SEQ ID NO: 69014 - protein, 11 aa, Homo sapiens
  misc_feature: Table A; Target 69014; HLA-B*35:01; PNLDC1; ENSG00000146453; TAA
DPVPESSFPQY

SEQ ID NO: 69015 - protein, 11 aa, Homo sapiens
  misc_feature: Table A; Target 69015; HLA-B*55:01; PNLDC1; ENSG00000146453; TAA
DPVPESSFPQY

SEQ ID NO: 69016 - protein, 11 aa, Homo sapiens
  misc_feature: Table A; Target 69016; HLA-C*07:06; PNLDC1; ENSG00000146453; TAA
DPVPESSFPQY

SEQ ID NO: 69017 - protein, 10 aa, Homo sapiens
  misc_feature: Table A; Target 69017; HLA-A*25:01; PNLDC1; ENSG00000146453; TAA
DQFKQNIHSL

SEQ ID NO: 69018 - protein, 10 aa, Homo sapiens
  misc_feature: Table A; Target 69018; HLA-A*25:01; PNLDC1; ENSG00000146453; TAA
DTKSVTKDIW

SEQ ID NO: 69019 - protein, 11 aa, Homo sapiens
  misc_feature: Table A; Target 69019; HLA-A*33:01; PNLDC1; ENSG00000146453; TAA
DTKSVTKDIWK

SEQ ID NO: 69020 - protein, 9 aa, Homo sapiens
  misc_feature: Table A; Target 69020; HLA-A*33:01; PNLDC1; ENSG00000146453; TAA
DVLAPYVNQ

SEQ ID NO: 69021 - protein, 10 aa, Homo sapiens
  misc_feature: Table A; Target 69021; HLA-A*68:02; PNLDC1; ENSG00000146453; TAA
DVLAPYVNQV

SEQ ID NO: 69022 - protein, 8 aa, Homo sapiens
  misc_feature: Table A; Target 69022; HLA-B*51:01; PNLDC1; ENSG00000146453; TAA
DWMTLPGI

SEQ ID NO: 69023 - protein, 9 aa, Homo sapiens
  misc_feature: Table A; Target 69023; HLA-A*23:01; PNLDC1; ENSG00000146453; TAA
DYPSIRPPI

SEQ ID NO: 69024 - protein, 9 aa, Homo sapiens
  misc_feature: Table A; Target 69024; HLA-A*24:02; PNLDC1; ENSG00000146453; TAA
DYPSIRPPI

SEQ ID NO: 69025 - protein, 10 aa, Homo sapiens
  misc_feature: Table A; Target 69025; HLA-A*24:02; PNLDC1; ENSG00000146453; TAA
DYPSIRPPIL

SEQ ID NO: 69026 - protein, 11 aa, Homo sapiens
  misc_feature: Table A; Target 69026; HLA-A*24:02; PNLDC1; ENSG00000146453; TAA
DYPSIRPPILI

SEQ ID NO: 69027 - protein, 9 aa, Homo sapiens
  misc_feature: Table A; Target 69027; HLA-A*33:01; PNLDC1; ENSG00000146453; TAA
EANKYIAHS

SEQ ID NO: 69028 - protein, 9 aa, Homo sapiens
  misc_feature: Table A; Target 69028; HLA-A*33:03; PNLDC1; ENSG00000146453; TAA
EANKYIAHS

SEQ ID NO: 69029 - protein, 9 aa, Homo sapiens
  misc_feature: Table A; Target 69029; HLA-C*14:02; PNLDC1; ENSG00000146453; TAA
EFSFQASSV

SEQ ID NO: 69030 - protein, 11 aa, Homo sapiens
  misc_feature: Table A; Target 69030; HLA-A*23:01; PNLDC1; ENSG00000146453; TAA
EFSFQASSVQF

SEQ ID NO: 69031 - protein, 8 aa, Homo sapiens
  misc_feature: Table A; Target 69031; HLA-B*08:01; PNLDC1; ENSG00000146453; TAA
EGVVVKKV

SEQ ID NO: 69032 - protein, 8 aa, Homo sapiens
  misc_feature: Table A; Target 69032; HLA-B*40:02; PNLDC1; ENSG00000146453; TAA
EGVVVKKV

SEQ ID NO: 69033 - protein, 8 aa, Homo sapiens
  misc_feature: Table A; Target 69033; HLA-B*51:01; PNLDC1; ENSG00000146453; TAA
EGVVVKKV

SEQ ID NO: 69034 - protein, 8 aa, Homo sapiens
  misc_feature: Table A; Target 69034; HLA-C*04:01; PNLDC1; ENSG00000146453; TAA
EGVVVKKV

SEQ ID NO: 69035 - protein, 8 aa, Homo sapiens
  misc_feature: Table A; Target 69035; HLA-C*06:02; PNLDC1; ENSG00000146453; TAA
EGVVVKKV

SEQ ID NO: 69036 - protein, 8 aa, Homo sapiens
  misc_feature: Table A; Target 69036; HLA-C*12:03; PNLDC1; ENSG00000146453; TAA
EGVVVKKV

SEQ ID NO: 69037 - protein, 8 aa, Homo sapiens
  misc_feature: Table A; Target 69037; HLA-A*33:01; PNLDC1; ENSG00000146453; TAA
ENILLSAR

SEQ ID NO: 69038 - protein, 8 aa, Homo sapiens
  misc_feature: Table A; Target 69038; HLA-A*33:03; PNLDC1; ENSG00000146453; TAA
ENILLSAR

SEQ ID NO: 69039 - protein, 10 aa, Homo sapiens
  misc_feature: Table A; Target 69039; HLA-A*25:01; PNLDC1; ENSG00000146453; TAA
ESYDQFKQNI

SEQ ID NO: 69040 - protein, 10 aa, Homo sapiens
  misc_feature: Table A; Target 69040; HLA-A*01:01; PNLDC1; ENSG00000146453; TAA
ETKCPHEAAY

SEQ ID NO: 69041 - protein, 10 aa, Homo sapiens
  misc_feature: Table A; Target 69041; HLA-A*25:01; PNLDC1; ENSG00000146453; TAA
ETKCPHEAAY

SEQ ID NO: 69042 - protein, 10 aa, Homo sapiens
  misc_feature: Table A; Target 69042; HLA-A*26:01; PNLDC1; ENSG00000146453; TAA
ETKCPHEAAY

SEQ ID NO: 69043 - protein, 10 aa, Homo sapiens
  misc_feature: Table A; Target 69043; HLA-A*30:02; PNLDC1; ENSG00000146453; TAA
ETKCPHEAAY

SEQ ID NO: 69044 - protein, 11 aa, Homo sapiens
  misc_feature: Table A; Target 69044; HLA-A*03:02; PNLDC1; ENSG00000146453; TAA
EVLNSDLNPTK

SEQ ID NO: 69045 - protein, 11 aa, Homo sapiens
  misc_feature: Table A; Target 69045; HLA-A*11:01; PNLDC1; ENSG00000146453; TAA
EVLNSDLNPTK

SEQ ID NO: 69046 - protein, 11 aa, Homo sapiens
  misc_feature: Table A; Target 69046; HLA-A*26:01; PNLDC1; ENSG00000146453; TAA
EVLNSDLNPTK

SEQ ID NO: 69047 - protein, 11 aa, Homo sapiens
  misc_feature: Table A; Target 69047; HLA-A*33:01; PNLDC1; ENSG00000146453; TAA
EVLNSDLNPTK

SEQ ID NO: 69048 - protein, 11 aa, Homo sapiens
  misc_feature: Table A; Target 69048; HLA-A*33:03; PNLDC1; ENSG00000146453; TAA
EVLNSDLNPTK

SEQ ID NO: 69049 - protein, 11 aa, Homo sapiens
  misc_feature: Table A; Target 69049; HLA-A*68:01; PNLDC1; ENSG00000146453; TAA
EVLNSDLNPTK

SEQ ID NO: 69050 - protein, 11 aa, Homo sapiens
  misc_feature: Table A; Target 69050; HLA-B*27:02; PNLDC1; ENSG00000146453; TAA
EVLNSDLNPTK

SEQ ID NO: 69051 - protein, 11 aa, Homo sapiens
  misc_feature: Table A; Target 69051; HLA-B*27:05; PNLDC1; ENSG00000146453; TAA
EVLNSDLNPTK

SEQ ID NO: 69052 - protein, 11 aa, Homo sapiens
  misc_feature: Table A; Target 69052; HLA-C*07:06; PNLDC1; ENSG00000146453; TAA
EVLNSDLNPTK

SEQ ID NO: 69053 - protein, 10 aa, Homo sapiens
  misc_feature: Table A; Target 69053; HLA-A*25:01; PNLDC1; ENSG00000146453; TAA
EVQLVLRQAL

SEQ ID NO: 69054 - protein, 10 aa, Homo sapiens
  misc_feature: Table A; Target 69054; HLA-C*07:02; PNLDC1; ENSG00000146453; TAA
EVQLVLRQAL

SEQ ID NO: 69055 - protein, 9 aa, Homo sapiens
  misc_feature: Table A; Target 69055; HLA-A*68:02; PNLDC1; ENSG00000146453; TAA
EVTRWLELA

SEQ ID NO: 69056 - protein, 10 aa, Homo sapiens
  misc_feature: Table A; Target 69056; HLA-A*25:01; PNLDC1; ENSG00000146453; TAA
EVYEVLNSDL

SEQ ID NO: 69057 - protein, 10 aa, Homo sapiens
  misc_feature: Table A; Target 69057; HLA-A*26:01; PNLDC1; ENSG00000146453; TAA
EVYEVLNSDL

SEQ ID NO: 69058 - protein, 10 aa, Homo sapiens
  misc_feature: Table A; Target 69058; HLA-A*68:01; PNLDC1; ENSG00000146453; TAA
EVYEVLNSDL

SEQ ID NO: 69059 - protein, 10 aa, Homo sapiens
  misc_feature: Table A; Target 69059; HLA-A*68:02; PNLDC1; ENSG00000146453; TAA
EVYEVLNSDL

SEQ ID NO: 69060 - protein, 10 aa, Homo sapiens
  misc_feature: Table A; Target 69060; HLA-C*07:06; PNLDC1; ENSG00000146453; TAA
EVYEVLNSDL

SEQ ID NO: 69061 - protein, 9 aa, Homo sapiens
  misc_feature: Table A; Target 69061; HLA-B*51:01; PNLDC1; ENSG00000146453; TAA
FAFLAGLDI

SEQ ID NO: 69062 - protein, 9 aa, Homo sapiens
  misc_feature: Table A; Target 69062; HLA-B*54:01; PNLDC1; ENSG00000146453; TAA
FAFLAGLDI

SEQ ID NO: 69063 - protein, 9 aa, Homo sapiens
  misc_feature: Table A; Target 69063; HLA-C*03:03; PNLDC1; ENSG00000146453; TAA
FAFLAGLDI

SEQ ID NO: 69064 - protein, 9 aa, Homo sapiens
  misc_feature: Table A; Target 69064; HLA-C*03:04; PNLDC1; ENSG00000146453; TAA
FAFLAGLDI

SEQ ID NO: 69065 - protein, 11 aa, Homo sapiens
  misc_feature: Table A; Target 69065; HLA-B*27:02; PNLDC1; ENSG00000146453; TAA
FAFLAGLDIEF

SEQ ID NO: 69066 - protein, 11 aa, Homo sapiens
  misc_feature: Table A; Target 69066; HLA-B*35:01; PNLDC1; ENSG00000146453; TAA
FAFLAGLDIEF

SEQ ID NO: 69067 - protein, 11 aa, Homo sapiens
  misc_feature: Table A; Target 69067; HLA-B*35:03; PNLDC1; ENSG00000146453; TAA
FAFLAGLDIEF

SEQ ID NO: 69068 - protein, 11 aa, Homo sapiens
  misc_feature: Table A; Target 69068; HLA-B*54:01; PNLDC1; ENSG00000146453; TAA
FAFLAGLDIEF

SEQ ID NO: 69069 - protein, 11 aa, Homo sapiens
  misc_feature: Table A; Target 69069; HLA-B*57:01; PNLDC1; ENSG00000146453; TAA
FAFLAGLDIEF

SEQ ID NO: 69070 - protein, 11 aa, Homo sapiens
  misc_feature: Table A; Target 69070; HLA-C*02:02; PNLDC1; ENSG00000146453; TAA
FAFLAGLDIEF

SEQ ID NO: 69071 - protein, 8 aa, Homo sapiens
  misc_feature: Table A; Target 69071; HLA-C*07:01; PNLDC1; ENSG00000146453; TAA
FDLPSEWY

SEQ ID NO: 69072 - protein, 9 aa, Homo sapiens
  misc_feature: Table A; Target 69072; HLA-A*02:01; PNLDC1; ENSG00000146453; TAA
FDLPSEWYL

SEQ ID NO: 69073 - protein, 9 aa, Homo sapiens
  misc_feature: Table A; Target 69073; HLA-A*02:04; PNLDC1; ENSG00000146453; TAA
FDLPSEWYL

SEQ ID NO: 69074 - protein, 9 aa, Homo sapiens
  misc_feature: Table A; Target 69074; HLA-A*23:01; PNLDC1; ENSG00000146453; TAA
FFRPLPESY

SEQ ID NO: 69075 - protein, 9 aa, Homo sapiens
  misc_feature: Table A; Target 69075; HLA-A*24:02; PNLDC1; ENSG00000146453; TAA
FFRPLPESY

SEQ ID NO: 69076 - protein, 9 aa, Homo sapiens
  misc_feature: Table A; Target 69076; HLA-A*29:02; PNLDC1; ENSG00000146453; TAA
FFRPLPESY

SEQ ID NO: 69077 - protein, 9 aa, Homo sapiens
  misc_feature: Table A; Target 69077; HLA-A*30:02; PNLDC1; ENSG00000146453; TAA
FFRPLPESY

SEQ ID NO: 69078 - protein, 9 aa, Homo sapiens
  misc_feature: Table A; Target 69078; HLA-B*15:03; PNLDC1; ENSG00000146453; TAA
FFRPLPESY

SEQ ID NO: 69079 - protein, 9 aa, Homo sapiens
  misc_feature: Table A; Target 69079; HLA-B*46:01; PNLDC1; ENSG00000146453; TAA
FFRPLPESY

SEQ ID NO: 69080 - protein, 9 aa, Homo sapiens
  misc_feature: Table A; Target 69080; HLA-C*01:02; PNLDC1; ENSG00000146453; TAA
FFRPLPESY

SEQ ID NO: 69081 - protein, 9 aa, Homo sapiens
  misc_feature: Table A; Target 69081; HLA-C*14:02; PNLDC1; ENSG00000146453; TAA
FFRPLPESY

SEQ ID NO: 69082 - protein, 8 aa, Homo sapiens
  misc_feature: Table A; Target 69082; HLA-B*46:01; PNLDC1; ENSG00000146453; TAA
FGILDSEF

SEQ ID NO: 69083 - protein, 9 aa, Homo sapiens
  misc_feature: Table A; Target 69083; HLA-A*02:01; PNLDC1; ENSG00000146453; TAA
FLAGLDIEF

SEQ ID NO: 69084 - protein, 9 aa, Homo sapiens
  misc_feature: Table A; Target 69084; HLA-A*02:03; PNLDC1; ENSG00000146453; TAA
FLAGLDIEF

SEQ ID NO: 69085 - protein, 9 aa, Homo sapiens
  misc_feature: Table A; Target 69085; HLA-A*02:04; PNLDC1; ENSG00000146453; TAA
FLAGLDIEF

SEQ ID NO: 69086 - protein, 9 aa, Homo sapiens
  misc_feature: Table A; Target 69086; HLA-A*02:07; PNLDC1; ENSG00000146453; TAA
FLAGLDIEF

SEQ ID NO: 69087 - protein, 9 aa, Homo sapiens
  misc_feature: Table A; Target 69087; HLA-A*23:01; PNLDC1; ENSG00000146453; TAA
FLAGLDIEF

SEQ ID NO: 69088 - protein, 9 aa, Homo sapiens
  misc_feature: Table A; Target 69088; HLA-A*26:01; PNLDC1; ENSG00000146453; TAA
FLAGLDIEF

SEQ ID NO: 69089 - protein, 9 aa, Homo sapiens
  misc_feature: Table A; Target 69089; HLA-A*29:02; PNLDC1; ENSG00000146453; TAA
FLAGLDIEF

SEQ ID NO: 69090 - protein, 9 aa, Homo sapiens
  misc_feature: Table A; Target 69090; HLA-B*15:01; PNLDC1; ENSG00000146453; TAA
FLAGLDIEF

SEQ ID NO: 69091 - protein, 9 aa, Homo sapiens
  misc_feature: Table A; Target 69091; HLA-B*15:03; PNLDC1; ENSG00000146453; TAA
FLAGLDIEF

SEQ ID NO: 69092 - protein, 9 aa, Homo sapiens
  misc_feature: Table A; Target 69092; HLA-B*35:01; PNLDC1; ENSG00000146453; TAA
FLAGLDIEF

SEQ ID NO: 69093 - protein, 9 aa, Homo sapiens
  misc_feature: Table A; Target 69093; HLA-B*35:03; PNLDC1; ENSG00000146453; TAA
FLAGLDIEF

SEQ ID NO: 69094 - protein, 9 aa, Homo sapiens
  misc_feature: Table A; Target 69094; HLA-B*38:01; PNLDC1; ENSG00000146453; TAA
FLAGLDIEF

SEQ ID NO: 69095 - protein, 9 aa, Homo sapiens
  misc_feature: Table A; Target 69095; HLA-B*46:01; PNLDC1; ENSG00000146453; TAA
FLAGLDIEF

SEQ ID NO: 69096 - protein, 9 aa, Homo sapiens
  misc_feature: Table A; Target 69096; HLA-B*55:01; PNLDC1; ENSG00000146453; TAA
FLAGLDIEF

SEQ ID NO: 69097 - protein, 9 aa, Homo sapiens
  misc_feature: Table A; Target 69097; HLA-C*02:02; PNLDC1; ENSG00000146453; TAA
FLAGLDIEF

SEQ ID NO: 69098 - protein, 9 aa, Homo sapiens
  misc_feature: Table A; Target 69098; HLA-C*07:04; PNLDC1; ENSG00000146453; TAA
FLAGLDIEF

SEQ ID NO: 69099 - protein, 9 aa, Homo sapiens
  misc_feature: Table A; Target 69099; HLA-A*03:01; PNLDC1; ENSG00000146453; TAA
FLCGSVLLK

SEQ ID NO: 69100 - protein, 10 aa, Homo sapiens
  misc_feature: Table A; Target 69100; HLA-A*02:03; PNLDC1; ENSG00000146453; TAA
FLCGSVLLKV

SEQ ID NO: 69101 - protein, 10 aa, Homo sapiens
  misc_feature: Table A; Target 69101; HLA-A*02:04; PNLDC1; ENSG00000146453; TAA
FLCGSVLLKV

SEQ ID NO: 69102 - protein, 8 aa, Homo sapiens
  misc_feature: Table A; Target 69102; HLA-B*46:01; PNLDC1; ENSG00000146453; TAA
FLKNGIPY

SEQ ID NO: 69103 - protein, 9 aa, Homo sapiens
  misc_feature: Table A; Target 69103; HLA-A*02:01; PNLDC1; ENSG00000146453; TAA
FLKNGIPYM

SEQ ID NO: 69104 - protein, 9 aa, Homo sapiens
  misc_feature: Table A; Target 69104; HLA-A*02:03; PNLDC1; ENSG00000146453; TAA
FLKNGIPYM

SEQ ID NO: 69105 - protein, 9 aa, Homo sapiens
  misc_feature: Table A; Target 69105; HLA-A*02:04; PNLDC1; ENSG00000146453; TAA
FLKNGIPYM

SEQ ID NO: 69106 - protein, 9 aa, Homo sapiens
  misc_feature: Table A; Target 69106; HLA-A*02:07; PNLDC1; ENSG00000146453; TAA
FLKNGIPYM

SEQ ID NO: 69107 - protein, 9 aa, Homo sapiens
  misc_feature: Table A; Target 69107; HLA-A*23:01; PNLDC1; ENSG00000146453; TAA
FLKNGIPYM

SEQ ID NO: 69108 - protein, 9 aa, Homo sapiens
  misc_feature: Table A; Target 69108; HLA-A*26:01; PNLDC1; ENSG00000146453; TAA
FLKNGIPYM

SEQ ID NO: 69109 - protein, 9 aa, Homo sapiens
  misc_feature: Table A; Target 69109; HLA-B*08:01; PNLDC1; ENSG00000146453; TAA
FLKNGIPYM

SEQ ID NO: 69110 - protein, 9 aa, Homo sapiens
  misc_feature: Table A; Target 69110; HLA-B*46:01; PNLDC1; ENSG00000146453; TAA
FLKNGIPYM

SEQ ID NO: 69111 - protein, 9 aa, Homo sapiens
  misc_feature: Table A; Target 69111; HLA-C*02:02; PNLDC1; ENSG00000146453; TAA
FLKNGIPYM

SEQ ID NO: 69112 - protein, 9 aa, Homo sapiens
  misc_feature: Table A; Target 69112; HLA-C*16:01; PNLDC1; ENSG00000146453; TAA
FLKNGIPYM

SEQ ID NO: 69113 - protein, 9 aa, Homo sapiens
  misc_feature: Table A; Target 69113; HLA-A*01:01; PNLDC1; ENSG00000146453; TAA
FLNQYGFNY

SEQ ID NO: 69114 - protein, 9 aa, Homo sapiens
  misc_feature: Table A; Target 69114; HLA-A*03:01; PNLDC1; ENSG00000146453; TAA
FLNQYGFNY

SEQ ID NO: 69115 - protein, 9 aa, Homo sapiens
  misc_feature: Table A; Target 69115; HLA-A*29:02; PNLDC1; ENSG00000146453; TAA
FLNQYGFNY

SEQ ID NO: 69116 - protein, 9 aa, Homo sapiens
  misc_feature: Table A; Target 69116; HLA-A*30:02; PNLDC1; ENSG00000146453; TAA
FLNQYGFNY

SEQ ID NO: 69117 - protein, 9 aa, Homo sapiens
  misc_feature: Table A; Target 69117; HLA-B*46:01; PNLDC1; ENSG00000146453; TAA
FLNQYGFNY

SEQ ID NO: 69118 - protein, 9 aa, Homo sapiens
  misc_feature: Table A; Target 69118; HLA-C*02:02; PNLDC1; ENSG00000146453; TAA
FLNQYGFNY

SEQ ID NO: 69119 - protein, 9 aa, Homo sapiens
  misc_feature: Table A; Target 69119; HLA-C*07:04; PNLDC1; ENSG00000146453; TAA
FLNQYGFNY

SEQ ID NO: 69120 - protein, 9 aa, Homo sapiens
  misc_feature: Table A; Target 69120; HLA-C*14:02; PNLDC1; ENSG00000146453; TAA
FLNQYGFNY

SEQ ID NO: 69121 - protein, 8 aa, Homo sapiens
  misc_feature: Table A; Target 69121; HLA-B*35:01; PNLDC1; ENSG00000146453; TAA
FPQYLDVL

SEQ ID NO: 69122 - protein, 8 aa, Homo sapiens
  misc_feature: Table A; Target 69122; HLA-B*35:03; PNLDC1; ENSG00000146453; TAA
FPQYLDVL

SEQ ID NO: 69123 - protein, 8 aa, Homo sapiens
  misc_feature: Table A; Target 69123; HLA-B*54:01; PNLDC1; ENSG00000146453; TAA
FPQYLDVL

SEQ ID NO: 69124 - protein, 8 aa, Homo sapiens
  misc_feature: Table A; Target 69124; HLA-B*55:01; PNLDC1; ENSG00000146453; TAA
FPQYLDVL

SEQ ID NO: 69125 - protein, 8 aa, Homo sapiens
  misc_feature: Table A; Target 69125; HLA-B*56:01; PNLDC1; ENSG00000146453; TAA
FPQYLDVL

SEQ ID NO: 69126 - protein, 9 aa, Homo sapiens
  misc_feature: Table A; Target 69126; HLA-B*54:01; PNLDC1; ENSG00000146453; TAA
FPQYLDVLA

SEQ ID NO: 69127 - protein, 9 aa, Homo sapiens
  misc_feature: Table A; Target 69127; HLA-B*56:01; PNLDC1; ENSG00000146453; TAA
FPQYLDVLA

SEQ ID NO: 69128 - protein, 10 aa, Homo sapiens
  misc_feature: Table A; Target 69128; HLA-B*07:02; PNLDC1; ENSG00000146453; TAA
FPRVSNLSEV

SEQ ID NO: 69129 - protein, 10 aa, Homo sapiens
  misc_feature: Table A; Target 69129; HLA-B*54:01; PNLDC1; ENSG00000146453; TAA
FPRVSNLSEV

SEQ ID NO: 69130 - protein, 10 aa, Homo sapiens
  misc_feature: Table A; Target 69130; HLA-B*56:01; PNLDC1; ENSG00000146453; TAA
FPRVSNLSEV

SEQ ID NO: 69131 - protein, 11 aa, Homo sapiens
  misc_feature: Table A; Target 69131; HLA-B*35:01; PNLDC1; ENSG00000146453; TAA
FPRVSNLSEVY

SEQ ID NO: 69132 - protein, 11 aa, Homo sapiens
  misc_feature: Table A; Target 69132; HLA-B*55:01; PNLDC1; ENSG00000146453; TAA
FPRVSNLSEVY

SEQ ID NO: 69133 - protein, 8 aa, Homo sapiens
  misc_feature: Table A; Target 69133; HLA-B*07:02; PNLDC1; ENSG00000146453; TAA
FPTTFGIL

SEQ ID NO: 69134 - protein, 8 aa, Homo sapiens
  misc_feature: Table A; Target 69134; HLA-B*35:01; PNLDC1; ENSG00000146453; TAA
FPTTFGIL

SEQ ID NO: 69135 - protein, 8 aa, Homo sapiens
  misc_feature: Table A; Target 69135; HLA-B*35:03; PNLDC1; ENSG00000146453; TAA
FPTTFGIL

SEQ ID NO: 69136 - protein, 8 aa, Homo sapiens
  misc_feature: Table A; Target 69136; HLA-B*51:01; PNLDC1; ENSG00000146453; TAA
FPTTFGIL

SEQ ID NO: 69137 - protein, 8 aa, Homo sapiens
  misc_feature: Table A; Target 69137; HLA-C*03:03; PNLDC1; ENSG00000146453; TAA
FPTTFGIL

SEQ ID NO: 69138 - protein, 8 aa, Homo sapiens
  misc_feature: Table A; Target 69138; HLA-C*03:04; PNLDC1; ENSG00000146453; TAA
FPTTFGIL

SEQ ID NO: 69139 - protein, 8 aa, Homo sapiens
  misc_feature: Table A; Target 69139; HLA-B*27:02; PNLDC1; ENSG00000146453; TAA
FPVLIDTK

SEQ ID NO: 69140 - protein, 8 aa, Homo sapiens
  misc_feature: Table A; Target 69140; HLA-B*35:01; PNLDC1; ENSG00000146453; TAA
FPVLIDTK

SEQ ID NO: 69141 - protein, 8 aa, Homo sapiens
  misc_feature: Table A; Target 69141; HLA-B*35:03; PNLDC1; ENSG00000146453; TAA
FPVLIDTK

SEQ ID NO: 69142 - protein, 8 aa, Homo sapiens
  misc_feature: Table A; Target 69142; HLA-B*51:01; PNLDC1; ENSG00000146453; TAA
FPVLIDTK

SEQ ID NO: 69143 - protein, 8 aa, Homo sapiens
  misc_feature: Table A; Target 69143; HLA-B*54:01; PNLDC1; ENSG00000146453; TAA
FPVLIDTK

SEQ ID NO: 69144 - protein, 8 aa, Homo sapiens
  misc_feature: Table A; Target 69144; HLA-B*55:01; PNLDC1; ENSG00000146453; TAA
FPVLIDTK

SEQ ID NO: 69145 - protein, 8 aa, Homo sapiens
  misc_feature: Table A; Target 69145; HLA-B*56:01; PNLDC1; ENSG00000146453; TAA
FPVLIDTK

SEQ ID NO: 69146 - protein, 8 aa, Homo sapiens
  misc_feature: Table A; Target 69146; HLA-C*07:01; PNLDC1; ENSG00000146453; TAA
FPVLIDTK

SEQ ID NO: 69147 - protein, 9 aa, Homo sapiens
  misc_feature: Table A; Target 69147; HLA-B*54:01; PNLDC1; ENSG00000146453; TAA
FPVLIDTKS

SEQ ID NO: 69148 - protein, 9 aa, Homo sapiens
  misc_feature: Table A; Target 69148; HLA-B*56:01; PNLDC1; ENSG00000146453; TAA
FPVLIDTKS

SEQ ID NO: 69149 - protein, 10 aa, Homo sapiens
  misc_feature: Table A; Target 69149; HLA-A*68:02; PNLDC1; ENSG00000146453; TAA
FPVLIDTKSV

SEQ ID NO: 69150 - protein, 10 aa, Homo sapiens
  misc_feature: Table A; Target 69150; HLA-B*35:01; PNLDC1; ENSG00000146453; TAA
FPVLIDTKSV

SEQ ID NO: 69151 - protein, 10 aa, Homo sapiens
  misc_feature: Table A; Target 69151; HLA-B*35:03; PNLDC1; ENSG00000146453; TAA
FPVLIDTKSV

SEQ ID NO: 69152 - protein, 10 aa, Homo sapiens
  misc_feature: Table A; Target 69152; HLA-B*51:01; PNLDC1; ENSG00000146453; TAA
FPVLIDTKSV

SEQ ID NO: 69153 - protein, 10 aa, Homo sapiens
  misc_feature: Table A; Target 69153; HLA-B*54:01; PNLDC1; ENSG00000146453; TAA
FPVLIDTKSV

SEQ ID NO: 69154 - protein, 10 aa, Homo sapiens
  misc_feature: Table A; Target 69154; HLA-B*55:01; PNLDC1; ENSG00000146453; TAA
FPVLIDTKSV

SEQ ID NO: 69155 - protein, 10 aa, Homo sapiens
  misc_feature: Table A; Target 69155; HLA-B*56:01; PNLDC1; ENSG00000146453; TAA
FPVLIDTKSV

SEQ ID NO: 69156 - protein, 11 aa, Homo sapiens
  misc_feature: Table A; Target 69156; HLA-B*54:01; PNLDC1; ENSG00000146453; TAA
FPVLIDTKSVT

SEQ ID NO: 69157 - protein, 9 aa, Homo sapiens
  misc_feature: Table A; Target 69157; HLA-A*02:03; PNLDC1; ENSG00000146453; TAA
FQAFEVQLV

SEQ ID NO: 69158 - protein, 9 aa, Homo sapiens
  misc_feature: Table A; Target 69158; HLA-A*68:02; PNLDC1; ENSG00000146453; TAA
FQAFEVQLV

SEQ ID NO: 69159 - protein, 9 aa, Homo sapiens
  misc_feature: Table A; Target 69159; HLA-B*13:02; PNLDC1; ENSG00000146453; TAA
FQAFEVQLV

SEQ ID NO: 69160 - protein, 9 aa, Homo sapiens
  misc_feature: Table A; Target 69160; HLA-B*27:05; PNLDC1; ENSG00000146453; TAA
FQAFEVQLV

SEQ ID NO: 69161 - protein, 8 aa, Homo sapiens
  misc_feature: Table A; Target 69161; HLA-B*15:01; PNLDC1; ENSG00000146453; TAA
FQASSVQF

SEQ ID NO: 69162 - protein, 8 aa, Homo sapiens
  misc_feature: Table A; Target 69162; HLA-B*15:03; PNLDC1; ENSG00000146453; TAA
FQASSVQF

SEQ ID NO: 69163 - protein, 8 aa, Homo sapiens
  misc_feature: Table A; Target 69163; HLA-B*38:01; PNLDC1; ENSG00000146453; TAA
FQASSVQF

SEQ ID NO: 69164 - protein, 8 aa, Homo sapiens
  misc_feature: Table A; Target 69164; HLA-B*39:01; PNLDC1; ENSG00000146453; TAA
FQASSVQF

SEQ ID NO: 69165 - protein, 8 aa, Homo sapiens
  misc_feature: Table A; Target 69165; HLA-C*07:04; PNLDC1; ENSG00000146453; TAA
FQASSVQF

SEQ ID NO: 69166 - protein, 9 aa, Homo sapiens
  misc_feature: Table A; Target 69166; HLA-A*02:01; PNLDC1; ENSG00000146453; TAA
FQASSVQFL

SEQ ID NO: 69167 - protein, 9 aa, Homo sapiens
  misc_feature: Table A; Target 69167; HLA-A*02:03; PNLDC1; ENSG00000146453; TAA
FQASSVQFL

SEQ ID NO: 69168 - protein, 9 aa, Homo sapiens
  misc_feature: Table A; Target 69168; HLA-A*02:04; PNLDC1; ENSG00000146453; TAA
FQASSVQFL

SEQ ID NO: 69169 - protein, 9 aa, Homo sapiens
  misc_feature: Table A; Target 69169; HLA-A*02:07; PNLDC1; ENSG00000146453; TAA
FQASSVQFL

SEQ ID NO: 69170 - protein, 9 aa, Homo sapiens
  misc_feature: Table A; Target 69170; HLA-A*32:01; PNLDC1; ENSG00000146453; TAA
FQASSVQFL

SEQ ID NO: 69171 - protein, 9 aa, Homo sapiens
  misc_feature: Table A; Target 69171; HLA-A*68:02; PNLDC1; ENSG00000146453; TAA
FQASSVQFL

SEQ ID NO: 69172 - protein, 9 aa, Homo sapiens
  misc_feature: Table A; Target 69172; HLA-B*13:02; PNLDC1; ENSG00000146453; TAA
FQASSVQFL

SEQ ID NO: 69173 - protein, 9 aa, Homo sapiens
  misc_feature: Table A; Target 69173; HLA-B*15:01; PNLDC1; ENSG00000146453; TAA
FQASSVQFL

SEQ ID NO: 69174 - protein, 9 aa, Homo sapiens
  misc_feature: Table A; Target 69174; HLA-B*27:05; PNLDC1; ENSG00000146453; TAA
FQASSVQFL

SEQ ID NO: 69175 - protein, 9 aa, Homo sapiens
  misc_feature: Table A; Target 69175; HLA-B*38:01; PNLDC1; ENSG00000146453; TAA
FQASSVQFL

SEQ ID NO: 69176 - protein, 9 aa, Homo sapiens
  misc_feature: Table A; Target 69176; HLA-B*39:01; PNLDC1; ENSG00000146453; TAA
FQASSVQFL

SEQ ID NO: 69177 - protein, 9 aa, Homo sapiens
  misc_feature: Table A; Target 69177; HLA-B*58:01; PNLDC1; ENSG00000146453; TAA
FQASSVQFL

SEQ ID NO: 69178 - protein, 9 aa, Homo sapiens
  misc_feature: Table A; Target 69178; HLA-C*02:02; PNLDC1; ENSG00000146453; TAA
FQASSVQFL

SEQ ID NO: 69179 - protein, 9 aa, Homo sapiens
  misc_feature: Table A; Target 69179; HLA-C*07:04; PNLDC1; ENSG00000146453; TAA
FQASSVQFL

SEQ ID NO: 69180 - protein, 9 aa, Homo sapiens
  misc_feature: Table A; Target 69180; HLA-C*12:03; PNLDC1; ENSG00000146453; TAA
FQASSVQFL

SEQ ID NO: 69181 - protein, 11 aa, Homo sapiens
  misc_feature: Table A; Target 69181; HLA-A*01:01; PNLDC1; ENSG00000146453; TAA
FSAIEGEANKY

SEQ ID NO: 69182 - protein, 11 aa, Homo sapiens
  misc_feature: Table A; Target 69182; HLA-A*26:01; PNLDC1; ENSG00000146453; TAA
FSAIEGEANKY

SEQ ID NO: 69183 - protein, 11 aa, Homo sapiens
  misc_feature: Table A; Target 69183; HLA-A*29:02; PNLDC1; ENSG00000146453; TAA
FSAIEGEANKY

SEQ ID NO: 69184 - protein, 11 aa, Homo sapiens
  misc_feature: Table A; Target 69184; HLA-A*30:02; PNLDC1; ENSG00000146453; TAA
FSAIEGEANKY

SEQ ID NO: 69185 - protein, 11 aa, Homo sapiens
  misc_feature: Table A; Target 69185; HLA-B*15:01; PNLDC1; ENSG00000146453; TAA
FSAIEGEANKY

SEQ ID NO: 69186 - protein, 11 aa, Homo sapiens
  misc_feature: Table A; Target 69186; HLA-B*58:01; PNLDC1; ENSG00000146453; TAA
FSAIEGEANKY

SEQ ID NO: 69187 - protein, 11 aa, Homo sapiens
  misc_feature: Table A; Target 69187; HLA-C*07:01; PNLDC1; ENSG00000146453; TAA
FSAIEGEANKY

SEQ ID NO: 69188 - protein, 11 aa, Homo sapiens
  misc_feature: Table A; Target 69188; HLA-C*07:04; PNLDC1; ENSG00000146453; TAA
FSAIEGEANKY

SEQ ID NO: 69189 - protein, 11 aa, Homo sapiens
  misc_feature: Table A; Target 69189; HLA-C*12:03; PNLDC1; ENSG00000146453; TAA
FSAIEGEANKY

SEQ ID NO: 69190 - protein, 11 aa, Homo sapiens
  misc_feature: Table A; Target 69190; HLA-C*16:02; PNLDC1; ENSG00000146453; TAA
FSAIEGEANKY

SEQ ID NO: 69191 - protein, 8 aa, Homo sapiens
  misc_feature: Table A; Target 69191; HLA-B*13:02; PNLDC1; ENSG00000146453; TAA
FSFQASSV

SEQ ID NO: 69192 - protein, 8 aa, Homo sapiens
  misc_feature: Table A; Target 69192; HLA-B*40:02; PNLDC1; ENSG00000146453; TAA
FSFQASSV

SEQ ID NO: 69193 - protein, 8 aa, Homo sapiens
  misc_feature: Table A; Target 69193; HLA-B*46:01; PNLDC1; ENSG00000146453; TAA
FSFQASSV

SEQ ID NO: 69194 - protein, 8 aa, Homo sapiens
  misc_feature: Table A; Target 69194; HLA-B*51:01; PNLDC1; ENSG00000146453; TAA
FSFQASSV

SEQ ID NO: 69195 - protein, 8 aa, Homo sapiens
  misc_feature: Table A; Target 69195; HLA-B*54:01; PNLDC1; ENSG00000146453; TAA
FSFQASSV

SEQ ID NO: 69196 - protein, 8 aa, Homo sapiens
  misc_feature: Table A; Target 69196; HLA-C*02:02; PNLDC1; ENSG00000146453; TAA
FSFQASSV

SEQ ID NO: 69197 - protein, 8 aa, Homo sapiens
  misc_feature: Table A; Target 69197; HLA-C*03:03; PNLDC1; ENSG00000146453; TAA
FSFQASSV

SEQ ID NO: 69198 - protein, 8 aa, Homo sapiens
  misc_feature: Table A; Target 69198; HLA-C*03:04; PNLDC1; ENSG00000146453; TAA
FSFQASSV

SEQ ID NO: 69199 - protein, 8 aa, Homo sapiens
  misc_feature: Table A; Target 69199; HLA-C*12:03; PNLDC1; ENSG00000146453; TAA
FSFQASSV

SEQ ID NO: 69200 - protein, 8 aa, Homo sapiens
  misc_feature: Table A; Target 69200; HLA-C*14:02; PNLDC1; ENSG00000146453; TAA
FSFQASSV

SEQ ID NO: 69201 - protein, 8 aa, Homo sapiens
  misc_feature: Table A; Target 69201; HLA-C*16:04; PNLDC1; ENSG00000146453; TAA
FSFQASSV

SEQ ID NO: 69202 - protein, 10 aa, Homo sapiens
  misc_feature: Table A; Target 69202; HLA-A*23:01; PNLDC1; ENSG00000146453; TAA
FSFQASSVQF

SEQ ID NO: 69203 - protein, 10 aa, Homo sapiens
  misc_feature: Table A; Target 69203; HLA-A*25:01; PNLDC1; ENSG00000146453; TAA
FSFQASSVQF

SEQ ID NO: 69204 - protein, 10 aa, Homo sapiens
  misc_feature: Table A; Target 69204; HLA-A*26:01; PNLDC1; ENSG00000146453; TAA
FSFQASSVQF

SEQ ID NO: 69205 - protein, 10 aa, Homo sapiens
  misc_feature: Table A; Target 69205; HLA-A*33:01; PNLDC1; ENSG00000146453; TAA
FSFQASSVQF

SEQ ID NO: 69206 - protein, 10 aa, Homo sapiens
  misc_feature: Table A; Target 69206; HLA-B*46:01; PNLDC1; ENSG00000146453; TAA
FSFQASSVQF

SEQ ID NO: 69207 - protein, 10 aa, Homo sapiens
  misc_feature: Table A; Target 69207; HLA-B*57:01; PNLDC1; ENSG00000146453; TAA
FSFQASSVQF

SEQ ID NO: 69208 - protein, 10 aa, Homo sapiens
  misc_feature: Table A; Target 69208; HLA-B*58:01; PNLDC1; ENSG00000146453; TAA
FSFQASSVQF

SEQ ID NO: 69209 - protein, 10 aa, Homo sapiens
  misc_feature: Table A; Target 69209; HLA-C*02:02; PNLDC1; ENSG00000146453; TAA
FSFQASSVQF

SEQ ID NO: 69210 - protein, 10 aa, Homo sapiens
  misc_feature: Table A; Target 69210; HLA-C*16:04; PNLDC1; ENSG00000146453; TAA
FSFQASSVQF

SEQ ID NO: 69211 - protein, 11 aa, Homo sapiens
  misc_feature: Table A; Target 69211; HLA-A*68:02; PNLDC1; ENSG00000146453; TAA
FSFQASSVQFL

SEQ ID NO: 69212 - protein, 9 aa, Homo sapiens
  misc_feature: Table A; Target 69212; HLA-A*02:01; PNLDC1; ENSG00000146453; TAA
FSGPDYPSI

SEQ ID NO: 69213 - protein, 9 aa, Homo sapiens
  misc_feature: Table A; Target 69213; HLA-A*23:01; PNLDC1; ENSG00000146453; TAA
FSGPDYPSI

SEQ ID NO: 69214 - protein, 9 aa, Homo sapiens
  misc_feature: Table A; Target 69214; HLA-A*24:02; PNLDC1; ENSG00000146453; TAA
FSGPDYPSI

SEQ ID NO: 69215 - protein, 9 aa, Homo sapiens
  misc_feature: Table A; Target 69215; HLA-A*25:01; PNLDC1; ENSG00000146453; TAA
FSGPDYPSI

SEQ ID NO: 69216 - protein, 9 aa, Homo sapiens
  misc_feature: Table A; Target 69216; HLA-A*30:01; PNLDC1; ENSG00000146453; TAA
FSGPDYPSI

SEQ ID NO: 69217 - protein, 9 aa, Homo sapiens
  misc_feature: Table A; Target 69217; HLA-B*07:02; PNLDC1; ENSG00000146453; TAA
FSGPDYPSI

SEQ ID NO: 69218 - protein, 9 aa, Homo sapiens
  misc_feature: Table A; Target 69218; HLA-B*35:03; PNLDC1; ENSG00000146453; TAA
FSGPDYPSI

SEQ ID NO: 69219 - protein, 9 aa, Homo sapiens
  misc_feature: Table A; Target 69219; HLA-B*38:01; PNLDC1; ENSG00000146453; TAA
FSGPDYPSI

SEQ ID NO: 69220 - protein, 9 aa, Homo sapiens
  misc_feature: Table A; Target 69220; HLA-B*51:01; PNLDC1; ENSG00000146453; TAA
FSGPDYPSI

SEQ ID NO: 69221 - protein, 9 aa, Homo sapiens
  misc_feature: Table A; Target 69221; HLA-B*58:01; PNLDC1; ENSG00000146453; TAA
FSGPDYPSI

SEQ ID NO: 69222 - protein, 9 aa, Homo sapiens
  misc_feature: Table A; Target 69222; HLA-C*02:02; PNLDC1; ENSG00000146453; TAA
FSGPDYPSI

SEQ ID NO: 69223 - protein, 9 aa, Homo sapiens
  misc_feature: Table A; Target 69223; HLA-C*03:03; PNLDC1; ENSG00000146453; TAA
FSGPDYPSI

SEQ ID NO: 69224 - protein, 9 aa, Homo sapiens
  misc_feature: Table A; Target 69224; HLA-C*03:04; PNLDC1; ENSG00000146453; TAA
FSGPDYPSI

SEQ ID NO: 69225 - protein, 9 aa, Homo sapiens
  misc_feature: Table A; Target 69225; HLA-C*16:02; PNLDC1; ENSG00000146453; TAA
FSGPDYPSI

SEQ ID NO: 69226 - protein, 9 aa, Homo sapiens
  misc_feature: Table A; Target 69226; HLA-A*68:02; PNLDC1; ENSG00000146453; TAA
FSVFFQMLV

SEQ ID NO: 69227 - protein, 8 aa, Homo sapiens
  misc_feature: Table A; Target 69227; HLA-A*32:01; PNLDC1; ENSG00000146453; TAA
FTGLRSNL

SEQ ID NO: 69228 - protein, 8 aa, Homo sapiens
  misc_feature: Table A; Target 69228; HLA-B*08:01; PNLDC1; ENSG00000146453; TAA
FTGLRSNL

SEQ ID NO: 69229 - protein, 8 aa, Homo sapiens
  misc_feature: Table A; Target 69229; HLA-C*01:02; PNLDC1; ENSG00000146453; TAA
FTGLRSNL

SEQ ID NO: 69230 - protein, 8 aa, Homo sapiens
  misc_feature: Table A; Target 69230; HLA-C*07:02; PNLDC1; ENSG00000146453; TAA
FTGLRSNL

SEQ ID NO: 69231 - protein, 8 aa, Homo sapiens
  misc_feature: Table A; Target 69231; HLA-C*12:03; PNLDC1; ENSG00000146453; TAA
FTGLRSNL

SEQ ID NO: 69232 - protein, 8 aa, Homo sapiens
  misc_feature: Table A; Target 69232; HLA-C*16:01; PNLDC1; ENSG00000146453; TAA
FTGLRSNL

SEQ ID NO: 69233 - protein, 10 aa, Homo sapiens
  misc_feature: Table A; Target 69233; HLA-A*68:02; PNLDC1; ENSG00000146453; TAA
FTVCQIGLSV

SEQ ID NO: 69234 - protein, 8 aa, Homo sapiens
  misc_feature: Table A; Target 69234; HLA-A*23:01; PNLDC1; ENSG00000146453; TAA
FYLFPTTF

SEQ ID NO: 69235 - protein, 8 aa, Homo sapiens
  misc_feature: Table A; Target 69235; HLA-A*24:02; PNLDC1; ENSG00000146453; TAA
FYLFPTTF

SEQ ID NO: 69236 - protein, 8 aa, Homo sapiens
  misc_feature: Table A; Target 69236; HLA-A*29:02; PNLDC1; ENSG00000146453; TAA
FYLFPTTF

SEQ ID NO: 69237 - protein, 8 aa, Homo sapiens
  misc_feature: Table A; Target 69237; HLA-C*14:02; PNLDC1; ENSG00000146453; TAA
FYLFPTTF

SEQ ID NO: 69238 - protein, 9 aa, Homo sapiens
  misc_feature: Table A; Target 69238; HLA-B*18:01; PNLDC1; ENSG00000146453; TAA
GEANKYIAH

SEQ ID NO: 69239 - protein, 9 aa, Homo sapiens
  misc_feature: Table A; Target 69239; HLA-B*40:01; PNLDC1; ENSG00000146453; TAA
GEANKYIAH

SEQ ID NO: 69240 - protein, 9 aa, Homo sapiens
  misc_feature: Table A; Target 69240; HLA-B*44:03; PNLDC1; ENSG00000146453; TAA
GEANKYIAH

SEQ ID NO: 69241 - protein, 9 aa, Homo sapiens
  misc_feature: Table A; Target 69241; HLA-B*49:01; PNLDC1; ENSG00000146453; TAA
GEANKYIAH

SEQ ID NO: 69242 - protein, 9 aa, Homo sapiens
  misc_feature: Table A; Target 69242; HLA-B*38:01; PNLDC1; ENSG00000146453; TAA
GHNMMMDLL

SEQ ID NO: 69243 - protein, 9 aa, Homo sapiens
  misc_feature: Table A; Target 69243; HLA-A*02:01; PNLDC1; ENSG00000146453; TAA
GILDSEFSF

SEQ ID NO: 69244 - protein, 9 aa, Homo sapiens
  misc_feature: Table A; Target 69244; HLA-A*02:04; PNLDC1; ENSG00000146453; TAA
GILDSEFSF

SEQ ID NO: 69245 - protein, 9 aa, Homo sapiens
  misc_feature: Table A; Target 69245; HLA-A*23:01; PNLDC1; ENSG00000146453; TAA
GILDSEFSF

SEQ ID NO: 69246 - protein, 9 aa, Homo sapiens
  misc_feature: Table A; Target 69246; HLA-A*29:02; PNLDC1; ENSG00000146453; TAA
GILDSEFSF

SEQ ID NO: 69247 - protein, 9 aa, Homo sapiens
  misc_feature: Table A; Target 69247; HLA-A*32:01; PNLDC1; ENSG00000146453; TAA
GILDSEFSF

SEQ ID NO: 69248 - protein, 9 aa, Homo sapiens
  misc_feature: Table A; Target 69248; HLA-B*15:01; PNLDC1; ENSG00000146453; TAA
GILDSEFSF

SEQ ID NO: 69249 - protein, 9 aa, Homo sapiens
  misc_feature: Table A; Target 69249; HLA-B*57:01; PNLDC1; ENSG00000146453; TAA
GILDSEFSF

SEQ ID NO: 69250 - protein, 9 aa, Homo sapiens
  misc_feature: Table A; Target 69250; HLA-C*16:04; PNLDC1; ENSG00000146453; TAA
GILDSEFSF

SEQ ID NO: 69251 - protein, 11 aa, Homo sapiens
  misc_feature: Table A; Target 69251; HLA-A*02:01; PNLDC1; ENSG00000146453; TAA
GILDSEFSFQA

SEQ ID NO: 69252 - protein, 9 aa, Homo sapiens
  misc_feature: Table A; Target 69252; HLA-A*02:01; PNLDC1; ENSG00000146453; TAA
GLDIEFTGL

SEQ ID NO: 69253 - protein, 9 aa, Homo sapiens
  misc_feature: Table A; Target 69253; HLA-A*02:04; PNLDC1; ENSG00000146453; TAA
GLDIEFTGL

SEQ ID NO: 69254 - protein, 9 aa, Homo sapiens
  misc_feature: Table A; Target 69254; HLA-A*02:07; PNLDC1; ENSG00000146453; TAA
GLDIEFTGL

SEQ ID NO: 69255 - protein, 9 aa, Homo sapiens
  misc_feature: Table A; Target 69255; HLA-B*38:01; PNLDC1; ENSG00000146453; TAA
GLDIEFTGL

SEQ ID NO: 69256 - protein, 9 aa, Homo sapiens
  misc_feature: Table A; Target 69256; HLA-B*39:01; PNLDC1; ENSG00000146453; TAA
GLDIEFTGL

SEQ ID NO: 69257 - protein, 9 aa, Homo sapiens
  misc_feature: Table A; Target 69257; HLA-B*55:01; PNLDC1; ENSG00000146453; TAA
GLDIEFTGL

SEQ ID NO: 69258 - protein, 9 aa, Homo sapiens
  misc_feature: Table A; Target 69258; HLA-C*05:01; PNLDC1; ENSG00000146453; TAA
GLDIEFTGL

SEQ ID NO: 69259 - protein, 8 aa, Homo sapiens
  misc_feature: Table A; Target 69259; HLA-A*02:04; PNLDC1; ENSG00000146453; TAA
GLLFFAFL

SEQ ID NO: 69260 - protein, 9 aa, Homo sapiens
  misc_feature: Table A; Target 69260; HLA-A*02:04; PNLDC1; ENSG00000146453; TAA
GLLFFAFLA

SEQ ID NO: 69261 - protein, 11 aa, Homo sapiens
  misc_feature: Table A; Target 69261; HLA-A*02:04; PNLDC1; ENSG00000146453; TAA
GLLFFAFLAGL

SEQ ID NO: 69262 - protein, 8 aa, Homo sapiens
  misc_feature: Table A; Target 69262; HLA-B*13:02; PNLDC1; ENSG00000146453; TAA
GLSVFSAI

SEQ ID NO: 69263 - protein, 10 aa, Homo sapiens
  misc_feature: Table A; Target 69263; HLA-B*56:01; PNLDC1; ENSG00000146453; TAA
GPDYPSIRPP

SEQ ID NO: 69264 - protein, 11 aa, Homo sapiens
  misc_feature: Table A; Target 69264; HLA-B*07:02; PNLDC1; ENSG00000146453; TAA
GPDYPSIRPPI

SEQ ID NO: 69265 - protein, 9 aa, Homo sapiens
  misc_feature: Table A; Target 69265; HLA-A*33:03; PNLDC1; ENSG00000146453; TAA
GPEIVHASR

SEQ ID NO: 69266 - protein, 9 aa, Homo sapiens
  misc_feature: Table A; Target 69266; HLA-A*68:01; PNLDC1; ENSG00000146453; TAA
GPEIVHASR

SEQ ID NO: 69267 - protein, 9 aa, Homo sapiens
  misc_feature: Table A; Target 69267; HLA-C*07:06; PNLDC1; ENSG00000146453; TAA
GPEIVHASR

SEQ ID NO: 69268 - protein, 8 aa, Homo sapiens
  misc_feature: Table A; Target 69268; HLA-A*30:02; PNLDC1; ENSG00000146453; TAA
GVSEQQVY

SEQ ID NO: 69269 - protein, 8 aa, Homo sapiens
  misc_feature: Table A; Target 69269; HLA-B*15:01; PNLDC1; ENSG00000146453; TAA
GVSEQQVY

SEQ ID NO: 69270 - protein, 8 aa, Homo sapiens
  misc_feature: Table A; Target 69270; HLA-C*16:01; PNLDC1; ENSG00000146453; TAA
GVSEQQVY

SEQ ID NO: 69271 - protein, 9 aa, Homo sapiens
  misc_feature: Table A; Target 69271; HLA-A*03:01; PNLDC1; ENSG00000146453; TAA
GVSEQQVYH

SEQ ID NO: 69272 - protein, 9 aa, Homo sapiens
  misc_feature: Table A; Target 69272; HLA-A*03:02; PNLDC1; ENSG00000146453; TAA
GVSEQQVYH

SEQ ID NO: 69273 - protein, 9 aa, Homo sapiens
  misc_feature: Table A; Target 69273; HLA-A*11:01; PNLDC1; ENSG00000146453; TAA
GVSEQQVYH

SEQ ID NO: 69274 - protein, 10 aa, Homo sapiens
  misc_feature: Table A; Target 69274; HLA-A*03:01; PNLDC1; ENSG00000146453; TAA
GVSEQQVYHK

SEQ ID NO: 69275 - protein, 10 aa, Homo sapiens
  misc_feature: Table A; Target 69275; HLA-A*03:02; PNLDC1; ENSG00000146453; TAA
GVSEQQVYHK

SEQ ID NO: 69276 - protein, 10 aa, Homo sapiens
  misc_feature: Table A; Target 69276; HLA-A*11:01; PNLDC1; ENSG00000146453; TAA
GVSEQQVYHK

SEQ ID NO: 69277 - protein, 10 aa, Homo sapiens
  misc_feature: Table A; Target 69277; HLA-A*68:01; PNLDC1; ENSG00000146453; TAA
GVSEQQVYHK

SEQ ID NO: 69278 - protein, 10 aa, Homo sapiens
  misc_feature: Table A; Target 69278; HLA-B*27:05; PNLDC1; ENSG00000146453; TAA
GVSEQQVYHK

SEQ ID NO: 69279 - protein, 10 aa, Homo sapiens
  misc_feature: Table A; Target 69279; HLA-C*07:06; PNLDC1; ENSG00000146453; TAA
GVSEQQVYHK

SEQ ID NO: 69280 - protein, 11 aa, Homo sapiens
  misc_feature: Table A; Target 69280; HLA-A*26:01; PNLDC1; ENSG00000146453; TAA
GVSEQQVYHKF

SEQ ID NO: 69281 - protein, 11 aa, Homo sapiens
  misc_feature: Table A; Target 69281; HLA-A*29:02; PNLDC1; ENSG00000146453; TAA
GVSEQQVYHKF

SEQ ID NO: 69282 - protein, 11 aa, Homo sapiens
  misc_feature: Table A; Target 69282; HLA-A*30:02; PNLDC1; ENSG00000146453; TAA
GVSEQQVYHKF

SEQ ID NO: 69283 - protein, 9 aa, Homo sapiens
  misc_feature: Table A; Target 69283; HLA-A*03:01; PNLDC1; ENSG00000146453; TAA
GVVVKKVSK

SEQ ID NO: 69284 - protein, 9 aa, Homo sapiens
  misc_feature: Table A; Target 69284; HLA-A*03:02; PNLDC1; ENSG00000146453; TAA
GVVVKKVSK

SEQ ID NO: 69285 - protein, 9 aa, Homo sapiens
  misc_feature: Table A; Target 69285; HLA-A*11:01; PNLDC1; ENSG00000146453; TAA
GVVVKKVSK

SEQ ID NO: 69286 - protein, 8 aa, Homo sapiens
  misc_feature: Table A; Target 69286; HLA-B*18:01; PNLDC1; ENSG00000146453; TAA
HDILTGNW

SEQ ID NO: 69287 - protein, 8 aa, Homo sapiens
  misc_feature: Table A; Target 69287; HLA-B*37:01; PNLDC1; ENSG00000146453; TAA
HDILTGNW

SEQ ID NO: 69288 - protein, 8 aa, Homo sapiens
  misc_feature: Table A; Target 69288; HLA-B*40:02; PNLDC1; ENSG00000146453; TAA
HDILTGNW

SEQ ID NO: 69289 - protein, 8 aa, Homo sapiens
  misc_feature: Table A; Target 69289; HLA-B*44:02; PNLDC1; ENSG00000146453; TAA
HDILTGNW

SEQ ID NO: 69290 - protein, 8 aa, Homo sapiens
  misc_feature: Table A; Target 69290; HLA-B*44:03; PNLDC1; ENSG00000146453; TAA
HDILTGNW

SEQ ID NO: 69291 - protein, 8 aa, Homo sapiens
  misc_feature: Table A; Target 69291; HLA-B*18:01; PNLDC1; ENSG00000146453; TAA
HEAAYDAF

SEQ ID NO: 69292 - protein, 8 aa, Homo sapiens
  misc_feature: Table A; Target 69292; HLA-B*37:01; PNLDC1; ENSG00000146453; TAA
HEAAYDAF

SEQ ID NO: 69293 - protein, 9 aa, Homo sapiens
  misc_feature: Table A; Target 69293; HLA-A*30:01; PNLDC1; ENSG00000146453; TAA
HEAAYDAFL

SEQ ID NO: 69294 - protein, 9 aa, Homo sapiens
  misc_feature: Table A; Target 69294; HLA-B*38:01; PNLDC1; ENSG00000146453; TAA
HEAAYDAFL

SEQ ID NO: 69295 - protein, 9 aa, Homo sapiens
  misc_feature: Table A; Target 69295; HLA-B*40:01; PNLDC1; ENSG00000146453; TAA
HEAAYDAFL

SEQ ID NO: 69296 - protein, 9 aa, Homo sapiens
  misc_feature: Table A; Target 69296; HLA-B*40:02; PNLDC1; ENSG00000146453; TAA
HEAAYDAFL

SEQ ID NO: 69297 - protein, 9 aa, Homo sapiens
  misc_feature: Table A; Target 69297; HLA-B*44:03; PNLDC1; ENSG00000146453; TAA
HEAAYDAFL

SEQ ID NO: 69298 - protein, 9 aa, Homo sapiens
  misc_feature: Table A; Target 69298; HLA-B*49:01; PNLDC1; ENSG00000146453; TAA
HEAAYDAFL

SEQ ID NO: 69299 - protein, 10 aa, Homo sapiens
  misc_feature: Table A; Target 69299; HLA-A*01:01; PNLDC1; ENSG00000146453; TAA
HIDPVPESSF

SEQ ID NO: 69300 - protein, 10 aa, Homo sapiens
  misc_feature: Table A; Target 69300; HLA-A*02:07; PNLDC1; ENSG00000146453; TAA
HIDPVPESSF

SEQ ID NO: 69301 - protein, 10 aa, Homo sapiens
  misc_feature: Table A; Target 69301; HLA-A*25:01; PNLDC1; ENSG00000146453; TAA
HIDPVPESSF

SEQ ID NO: 69302 - protein, 10 aa, Homo sapiens
  misc_feature: Table A; Target 69302; HLA-A*26:01; PNLDC1; ENSG00000146453; TAA
HIDPVPESSF

SEQ ID NO: 69303 - protein, 10 aa, Homo sapiens
  misc_feature: Table A; Target 69303; HLA-B*15:01; PNLDC1; ENSG00000146453; TAA
HIDPVPESSF

SEQ ID NO: 69304 - protein, 10 aa, Homo sapiens
  misc_feature: Table A; Target 69304; HLA-B*35:01; PNLDC1; ENSG00000146453; TAA
HIDPVPESSF

SEQ ID NO: 69305 - protein, 10 aa, Homo sapiens
  misc_feature: Table A; Target 69305; HLA-B*35:03; PNLDC1; ENSG00000146453; TAA
HIDPVPESSF

SEQ ID NO: 69306 - protein, 10 aa, Homo sapiens
  misc_feature: Table A; Target 69306; HLA-B*38:01; PNLDC1; ENSG00000146453; TAA
HIDPVPESSF

SEQ ID NO: 69307 - protein, 10 aa, Homo sapiens
  misc_feature: Table A; Target 69307; HLA-B*55:01; PNLDC1; ENSG00000146453; TAA
HIDPVPESSF

SEQ ID NO: 69308 - protein, 10 aa, Homo sapiens
  misc_feature: Table A; Target 69308; HLA-B*58:01; PNLDC1; ENSG00000146453; TAA
HIDPVPESSF

SEQ ID NO: 69309 - protein, 10 aa, Homo sapiens
  misc_feature: Table A; Target 69309; HLA-C*03:03; PNLDC1; ENSG00000146453; TAA
HIDPVPESSF

SEQ ID NO: 69310 - protein, 10 aa, Homo sapiens
  misc_feature: Table A; Target 69310; HLA-C*03:04; PNLDC1; ENSG00000146453; TAA
HIDPVPESSF

SEQ ID NO: 69311 - protein, 10 aa, Homo sapiens
  misc_feature: Table A; Target 69311; HLA-C*04:01; PNLDC1; ENSG00000146453; TAA
HIDPVPESSF

SEQ ID NO: 69312 - protein, 10 aa, Homo sapiens
  misc_feature: Table A; Target 69312; HLA-C*05:01; PNLDC1; ENSG00000146453; TAA
HIDPVPESSF

SEQ ID NO: 69313 - protein, 8 aa, Homo sapiens
  misc_feature: Table A; Target 69313; HLA-B*08:01; PNLDC1; ENSG00000146453; TAA
HPTLCISL

SEQ ID NO: 69314 - protein, 9 aa, Homo sapiens
  misc_feature: Table A; Target 69314; HLA-B*35:01; PNLDC1; ENSG00000146453; TAA
HPTLCISLY

SEQ ID NO: 69315 - protein, 9 aa, Homo sapiens
  misc_feature: Table A; Target 69315; HLA-B*55:01; PNLDC1; ENSG00000146453; TAA
HPTLCISLY

SEQ ID NO: 69316 - protein, 11 aa, Homo sapiens
  misc_feature: Table A; Target 69316; HLA-B*27:02; PNLDC1; ENSG00000146453; TAA
HSLFPVLIDTK

SEQ ID NO: 69317 - protein, 8 aa, Homo sapiens
  misc_feature: Table A; Target 69317; HLA-B*07:02; PNLDC1; ENSG00000146453; TAA
HSPNVNCL

SEQ ID NO: 69318 - protein, 8 aa, Homo sapiens
  misc_feature: Table A; Target 69318; HLA-B*51:01; PNLDC1; ENSG00000146453; TAA
HSPNVNCL

SEQ ID NO: 69319 - protein, 8 aa, Homo sapiens
  misc_feature: Table A; Target 69319; HLA-C*01:02; PNLDC1; ENSG00000146453; TAA
HSPNVNCL

SEQ ID NO: 69320 - protein, 9 aa, Homo sapiens
  misc_feature: Table A; Target 69320; HLA-C*01:02; PNLDC1; ENSG00000146453; TAA
HSPNVNCLL

SEQ ID NO: 69321 - protein, 9 aa, Homo sapiens
  misc_feature: Table A; Target 69321; HLA-B*37:01; PNLDC1; ENSG00000146453; TAA
IDPVPESSF

SEQ ID NO: 69322 - protein, 9 aa, Homo sapiens
  misc_feature: Table A; Target 69322; HLA-B*46:01; PNLDC1; ENSG00000146453; TAA
IDPVPESSF

SEQ ID NO: 69323 - protein, 9 aa, Homo sapiens
  misc_feature: Table A; Target 69323; HLA-C*01:02; PNLDC1; ENSG00000146453; TAA
IDPVPESSF

SEQ ID NO: 69324 - protein, 9 aa, Homo sapiens
  misc_feature: Table A; Target 69324; HLA-C*14:02; PNLDC1; ENSG00000146453; TAA
IDPVPESSF

SEQ ID NO: 69325 - protein, 8 aa, Homo sapiens
  misc_feature: Table A; Target 69325; HLA-A*03:02; PNLDC1; ENSG00000146453; TAA
IDTKSVTK

SEQ ID NO: 69326 - protein, 8 aa, Homo sapiens
  misc_feature: Table A; Target 69326; HLA-A*11:01; PNLDC1; ENSG00000146453; TAA
IDTKSVTK

SEQ ID NO: 69327 - protein, 8 aa, Homo sapiens
  misc_feature: Table A; Target 69327; HLA-B*27:02; PNLDC1; ENSG00000146453; TAA
IDTKSVTK

SEQ ID NO: 69328 - protein, 8 aa, Homo sapiens
  misc_feature: Table A; Target 69328; HLA-B*37:01; PNLDC1; ENSG00000146453; TAA
IDTKSVTK

SEQ ID NO: 69329 - protein, 8 aa, Homo sapiens
  misc_feature: Table A; Target 69329; HLA-B*40:02; PNLDC1; ENSG00000146453; TAA
IDTKSVTK

SEQ ID NO: 69330 - protein, 8 aa, Homo sapiens
  misc_feature: Table A; Target 69330; HLA-C*04:01; PNLDC1; ENSG00000146453; TAA
IDTKSVTK

SEQ ID NO: 69331 - protein, 8 aa, Homo sapiens
  misc_feature: Table A; Target 69331; HLA-C*06:02; PNLDC1; ENSG00000146453; TAA
IDTKSVTK

SEQ ID NO: 69332 - protein, 8 aa, Homo sapiens
  misc_feature: Table A; Target 69332; HLA-C*07:01; PNLDC1; ENSG00000146453; TAA
IDTKSVTK

SEQ ID NO: 69333 - protein, 8 aa, Homo sapiens
  misc_feature: Table A; Target 69333; HLA-C*07:02; PNLDC1; ENSG00000146453; TAA
IDTKSVTK

SEQ ID NO: 69334 - protein, 8 aa, Homo sapiens
  misc_feature: Table A; Target 69334; HLA-C*16:02; PNLDC1; ENSG00000146453; TAA
IDTKSVTK

SEQ ID NO: 69335 - protein, 10 aa, Homo sapiens
  misc_feature: Table A; Target 69335; HLA-A*30:01; PNLDC1; ENSG00000146453; TAA
IEFTGLRSNL

SEQ ID NO: 69336 - protein, 10 aa, Homo sapiens
  misc_feature: Table A; Target 69336; HLA-B*18:01; PNLDC1; ENSG00000146453; TAA
IEFTGLRSNL

SEQ ID NO: 69337 - protein, 10 aa, Homo sapiens
  misc_feature: Table A; Target 69337; HLA-B*40:01; PNLDC1; ENSG00000146453; TAA
IEFTGLRSNL

SEQ ID NO: 69338 - protein, 10 aa, Homo sapiens
  misc_feature: Table A; Target 69338; HLA-B*40:02; PNLDC1; ENSG00000146453; TAA
IEFTGLRSNL

SEQ ID NO: 69339 - protein, 10 aa, Homo sapiens
  misc_feature: Table A; Target 69339; HLA-B*44:03; PNLDC1; ENSG00000146453; TAA
IEFTGLRSNL

SEQ ID NO: 69340 - protein, 10 aa, Homo sapiens
  misc_feature: Table A; Target 69340; HLA-B*49:01; PNLDC1; ENSG00000146453; TAA
IEFTGLRSNL

SEQ ID NO: 69341 - protein, 8 aa, Homo sapiens
  misc_feature: Table A; Target 69341; HLA-B*18:01; PNLDC1; ENSG00000146453; TAA
IEGEANKY

SEQ ID NO: 69342 - protein, 8 aa, Homo sapiens
  misc_feature: Table A; Target 69342; HLA-B*37:01; PNLDC1; ENSG00000146453; TAA
IEGEANKY

SEQ ID NO: 69343 - protein, 8 aa, Homo sapiens
  misc_feature: Table A; Target 69343; HLA-B*44:02; PNLDC1; ENSG00000146453; TAA
IEGEANKY

SEQ ID NO: 69344 - protein, 8 aa, Homo sapiens
  misc_feature: Table A; Target 69344; HLA-B*44:03; PNLDC1; ENSG00000146453; TAA
IEGEANKY

SEQ ID NO: 69345 - protein, 8 aa, Homo sapiens
  misc_feature: Table A; Target 69345; HLA-C*07:01; PNLDC1; ENSG00000146453; TAA
IEGEANKY

SEQ ID NO: 69346 - protein, 8 aa, Homo sapiens
  misc_feature: Table A; Target 69346; HLA-C*07:04; PNLDC1; ENSG00000146453; TAA
IEGEANKY

SEQ ID NO: 69347 - protein, 8 aa, Homo sapiens
  misc_feature: Table A; Target 69347; HLA-C*12:03; PNLDC1; ENSG00000146453; TAA
IEGEANKY

SEQ ID NO: 69348 - protein, 8 aa, Homo sapiens
  misc_feature: Table A; Target 69348; HLA-C*14:02; PNLDC1; ENSG00000146453; TAA
IEGEANKY

SEQ ID NO: 69349 - protein, 8 aa, Homo sapiens
  misc_feature: Table A; Target 69349; HLA-C*16:02; PNLDC1; ENSG00000146453; TAA
IEGEANKY

SEQ ID NO: 69350 - protein, 8 aa, Homo sapiens
  misc_feature: Table A; Target 69350; HLA-C*16:04; PNLDC1; ENSG00000146453; TAA
IEGEANKY

SEQ ID NO: 69351 - protein, 9 aa, Homo sapiens
  misc_feature: Table A; Target 69351; HLA-B*44:02; PNLDC1; ENSG00000146453; TAA
IEGEANKYI

SEQ ID NO: 69352 - protein, 9 aa, Homo sapiens
  misc_feature: Table A; Target 69352; HLA-B*44:03; PNLDC1; ENSG00000146453; TAA
IEGEANKYI

SEQ ID NO: 69353 - protein, 9 aa, Homo sapiens
  misc_feature: Table A; Target 69353; HLA-B*49:01; PNLDC1; ENSG00000146453; TAA
IEGEANKYI

SEQ ID NO: 69354 - protein, 9 aa, Homo sapiens
  misc_feature: Table A; Target 69354; HLA-A*23:01; PNLDC1; ENSG00000146453; TAA
IGLSVFSAI

SEQ ID NO: 69355 - protein, 9 aa, Homo sapiens
  misc_feature: Table A; Target 69355; HLA-B*51:01; PNLDC1; ENSG00000146453; TAA
IGLSVFSAI

SEQ ID NO: 69356 - protein, 9 aa, Homo sapiens
  misc_feature: Table A; Target 69356; HLA-C*03:04; PNLDC1; ENSG00000146453; TAA
IGLSVFSAI

SEQ ID NO: 69357 - protein, 8 aa, Homo sapiens
  misc_feature: Table A; Target 69357; HLA-B*38:01; PNLDC1; ENSG00000146453; TAA
IHSLFPVL

SEQ ID NO: 69358 - protein, 9 aa, Homo sapiens
  misc_feature: Table A; Target 69358; HLA-B*38:01; PNLDC1; ENSG00000146453; TAA
IHSLFPVLI

SEQ ID NO: 69359 - protein, 8 aa, Homo sapiens
  misc_feature: Table A; Target 69359; HLA-A*02:07; PNLDC1; ENSG00000146453; TAA
ILDSEFSF

SEQ ID NO: 69360 - protein, 8 aa, Homo sapiens
  misc_feature: Table A; Target 69360; HLA-C*05:01; PNLDC1; ENSG00000146453; TAA
ILDSEFSF

SEQ ID NO: 69361 - protein, 9 aa, Homo sapiens
  misc_feature: Table A; Target 69361; HLA-A*01:01; PNLDC1; ENSG00000146453; TAA
ILDSEFSFQ

SEQ ID NO: 69362 - protein, 10 aa, Homo sapiens
  misc_feature: Table A; Target 69362; HLA-A*02:07; PNLDC1; ENSG00000146453; TAA
ILDSEFSFQA

SEQ ID NO: 69363 - protein, 10 aa, Homo sapiens
  misc_feature: Table A; Target 69363; HLA-A*02:01; PNLDC1; ENSG00000146453; TAA
ILLSARGFSV

SEQ ID NO: 69364 - protein, 10 aa, Homo sapiens
  misc_feature: Table A; Target 69364; HLA-A*02:04; PNLDC1; ENSG00000146453; TAA
ILLSARGFSV

SEQ ID NO: 69365 - protein, 10 aa, Homo sapiens
  misc_feature: Table A; Target 69365; HLA-A*02:07; PNLDC1; ENSG00000146453; TAA
ILLSARGFSV

SEQ ID NO: 69366 - protein, 11 aa, Homo sapiens
  misc_feature: Table A; Target 69366; HLA-A*24:02; PNLDC1; ENSG00000146453; TAA
ILLSARGFSVF

SEQ ID NO: 69367 - protein, 10 aa, Homo sapiens
  misc_feature: Table A; Target 69367; HLA-B*27:02; PNLDC1; ENSG00000146453; TAA
IPYMNEEQEK

SEQ ID NO: 69368 - protein, 11 aa, Homo sapiens
  misc_feature: Table A; Target 69368; HLA-B*27:02; PNLDC1; ENSG00000146453; TAA
IPYMNEEQEKK

SEQ ID NO: 69369 - protein, 8 aa, Homo sapiens
  misc_feature: Table A; Target 69369; HLA-B*13:02; PNLDC1; ENSG00000146453; TAA
IRAGVPKI

SEQ ID NO: 69370 - protein, 8 aa, Homo sapiens
  misc_feature: Table A; Target 69370; HLA-C*06:02; PNLDC1; ENSG00000146453; TAA
IRAGVPKI

SEQ ID NO: 69371 - protein, 10 aa, Homo sapiens
  misc_feature: Table A; Target 69371; HLA-B*27:05; PNLDC1; ENSG00000146453; TAA
IRAGVPKINF

SEQ ID NO: 69372 - protein, 10 aa, Homo sapiens
  misc_feature: Table A; Target 69372; HLA-B*57:01; PNLDC1; ENSG00000146453; TAA
ISLFDLPSEW

SEQ ID NO: 69373 - protein, 10 aa, Homo sapiens
  misc_feature: Table A; Target 69373; HLA-B*58:01; PNLDC1; ENSG00000146453; TAA
ISLFDLPSEW

SEQ ID NO: 69374 - protein, 9 aa, Homo sapiens
  misc_feature: Table A; Target 69374; HLA-C*07:04; PNLDC1; ENSG00000146453; TAA
IYHIDPVPE

SEQ ID NO: 69375 - protein, 9 aa, Homo sapiens
  misc_feature: Table A; Target 69375; HLA-A*03:02; PNLDC1; ENSG00000146453; TAA
KAQKPLVGH

SEQ ID NO: 69376 - protein, 9 aa, Homo sapiens
  misc_feature: Table A; Target 69376; HLA-A*31:01; PNLDC1; ENSG00000146453; TAA
KAQKPLVGH

SEQ ID NO: 69377 - protein, 8 aa, Homo sapiens
  misc_feature: Table A; Target 69377; HLA-A*03:02; PNLDC1; ENSG00000146453; TAA
KDEGVVVK

SEQ ID NO: 69378 - protein, 8 aa, Homo sapiens
  misc_feature: Table A; Target 69378; HLA-B*27:02; PNLDC1; ENSG00000146453; TAA
KDEGVVVK

SEQ ID NO: 69379 - protein, 8 aa, Homo sapiens
  misc_feature: Table A; Target 69379; HLA-B*37:01; PNLDC1; ENSG00000146453; TAA
KDEGVVVK

SEQ ID NO: 69380 - protein, 8 aa, Homo sapiens
  misc_feature: Table A; Target 69380; HLA-C*07:01; PNLDC1; ENSG00000146453; TAA
KDEGVVVK

SEQ ID NO: 69381 - protein, 9 aa, Homo sapiens
  misc_feature: Table A; Target 69381; HLA-A*03:01; PNLDC1; ENSG00000146453; TAA
KDEGVVVKK

SEQ ID NO: 69382 - protein, 9 aa, Homo sapiens
  misc_feature: Table A; Target 69382; HLA-A*03:02; PNLDC1; ENSG00000146453; TAA
KDEGVVVKK

SEQ ID NO: 69383 - protein, 9 aa, Homo sapiens
  misc_feature: Table A; Target 69383; HLA-A*11:01; PNLDC1; ENSG00000146453; TAA
KDEGVVVKK

SEQ ID NO: 69384 - protein, 10 aa, Homo sapiens
  misc_feature: Table A; Target 69384; HLA-B*40:02; PNLDC1; ENSG00000146453; TAA
KDEGVVVKKV

SEQ ID NO: 69385 - protein, 10 aa, Homo sapiens
  misc_feature: Table A; Target 69385; HLA-C*04:01; PNLDC1; ENSG00000146453; TAA
KDEGVVVKKV

SEQ ID NO: 69386 - protein, 8 aa, Homo sapiens
  misc_feature: Table A; Target 69386; HLA-B*37:01; PNLDC1; ENSG00000146453; TAA
KDQIKVVI

SEQ ID NO: 69387 - protein, 8 aa, Homo sapiens
  misc_feature: Table A; Target 69387; HLA-B*49:01; PNLDC1; ENSG00000146453; TAA
KEMNFPRV

SEQ ID NO: 69388 - protein, 11 aa, Homo sapiens
  misc_feature: Table A; Target 69388; HLA-B*37:01; PNLDC1; ENSG00000146453; TAA
KEMNFPRVSNL

SEQ ID NO: 69389 - protein, 11 aa, Homo sapiens
  misc_feature: Table A; Target 69389; HLA-B*44:02; PNLDC1; ENSG00000146453; TAA
KENILLSARGF

SEQ ID NO: 69390 - protein, 11 aa, Homo sapiens
  misc_feature: Table A; Target 69390; HLA-B*44:03; PNLDC1; ENSG00000146453; TAA
KENILLSARGF

SEQ ID NO: 69391 - protein, 9 aa, Homo sapiens
  misc_feature: Table A; Target 69391; HLA-A*30:01; PNLDC1; ENSG00000146453; TAA
KEYRDHPTL

SEQ ID NO: 69392 - protein, 9 aa, Homo sapiens
  misc_feature: Table A; Target 69392; HLA-B*37:01; PNLDC1; ENSG00000146453; TAA
KEYRDHPTL

SEQ ID NO: 69393 - protein, 9 aa, Homo sapiens
  misc_feature: Table A; Target 69393; HLA-B*40:01; PNLDC1; ENSG00000146453; TAA
KEYRDHPTL

SEQ ID NO: 69394 - protein, 9 aa, Homo sapiens
  misc_feature: Table A; Target 69394; HLA-B*40:02; PNLDC1; ENSG00000146453; TAA
KEYRDHPTL

SEQ ID NO: 69395 - protein, 9 aa, Homo sapiens
  misc_feature: Table A; Target 69395; HLA-B*49:01; PNLDC1; ENSG00000146453; TAA
KEYRDHPTL

SEQ ID NO: 69396 - protein, 10 aa, Homo sapiens
  misc_feature: Table A; Target 69396; HLA-A*24:02; PNLDC1; ENSG00000146453; TAA
KFFRPLPESY

SEQ ID NO: 69397 - protein, 10 aa, Homo sapiens
  misc_feature: Table A; Target 69397; HLA-A*29:02; PNLDC1; ENSG00000146453; TAA
KFFRPLPESY

SEQ ID NO: 69398 - protein, 10 aa, Homo sapiens
  misc_feature: Table A; Target 69398; HLA-A*30:02; PNLDC1; ENSG00000146453; TAA
KFFRPLPESY

SEQ ID NO: 69399 - protein, 9 aa, Homo sapiens
  misc_feature: Table A; Target 69399; HLA-A*29:02; PNLDC1; ENSG00000146453; TAA
KFLKNGIPY

SEQ ID NO: 69400 - protein, 9 aa, Homo sapiens
  misc_feature: Table A; Target 69400; HLA-A*30:02; PNLDC1; ENSG00000146453; TAA
KINFSGPDY

SEQ ID NO: 69401 - protein, 9 aa, Homo sapiens
  misc_feature: Table A; Target 69401; HLA-B*15:01; PNLDC1; ENSG00000146453; TAA
KINFSGPDY

SEQ ID NO: 69402 - protein, 11 aa, Homo sapiens
  misc_feature: Table A; Target 69402; HLA-B*57:01; PNLDC1; ENSG00000146453; TAA
KIRHDILTGNW

SEQ ID NO: 69403 - protein, 8 aa, Homo sapiens
  misc_feature: Table A; Target 69403; HLA-B*07:02; PNLDC1; ENSG00000146453; TAA
KPLVGHNM

SEQ ID NO: 69404 - protein, 8 aa, Homo sapiens
  misc_feature: Table A; Target 69404; HLA-B*08:01; PNLDC1; ENSG00000146453; TAA
KPLVGHNM

SEQ ID NO: 69405 - protein, 8 aa, Homo sapiens
  misc_feature: Table A; Target 69405; HLA-B*37:01; PNLDC1; ENSG00000146453; TAA
KPLVGHNM

SEQ ID NO: 69406 - protein, 9 aa, Homo sapiens
  misc_feature: Table A; Target 69406; HLA-B*07:02; PNLDC1; ENSG00000146453; TAA
KPLVGHNMM

SEQ ID NO: 69407 - protein, 9 aa, Homo sapiens
  misc_feature: Table A; Target 69407; HLA-C*07:02; PNLDC1; ENSG00000146453; TAA
KPLVGHNMM

SEQ ID NO: 69408 - protein, 8 aa, Homo sapiens
  misc_feature: Table A; Target 69408; HLA-A*32:01; PNLDC1; ENSG00000146453; TAA
KQNIHSLF

SEQ ID NO: 69409 - protein, 8 aa, Homo sapiens
  misc_feature: Table A; Target 69409; HLA-B*37:01; PNLDC1; ENSG00000146453; TAA
KQNIHSLF

SEQ ID NO: 69410 - protein, 8 aa, Homo sapiens
  misc_feature: Table A; Target 69410; HLA-B*57:01; PNLDC1; ENSG00000146453; TAA
KSVTKDIW

SEQ ID NO: 69411 - protein, 8 aa, Homo sapiens
  misc_feature: Table A; Target 69411; HLA-B*58:01; PNLDC1; ENSG00000146453; TAA
KSVTKDIW

SEQ ID NO: 69412 - protein, 9 aa, Homo sapiens
  misc_feature: Table A; Target 69412; HLA-A*23:01; PNLDC1; ENSG00000146453; TAA
KTRQSVQQF

SEQ ID NO: 69413 - protein, 9 aa, Homo sapiens
  misc_feature: Table A; Target 69413; HLA-A*30:02; PNLDC1; ENSG00000146453; TAA
KTRQSVQQF

SEQ ID NO: 69414 - protein, 9 aa, Homo sapiens
  misc_feature: Table A; Target 69414; HLA-A*31:01; PNLDC1; ENSG00000146453; TAA
KTRQSVQQF

SEQ ID NO: 69415 - protein, 9 aa, Homo sapiens
  misc_feature: Table A; Target 69415; HLA-A*32:01; PNLDC1; ENSG00000146453; TAA
KTRQSVQQF

SEQ ID NO: 69416 - protein, 9 aa, Homo sapiens
  misc_feature: Table A; Target 69416; HLA-B*15:01; PNLDC1; ENSG00000146453; TAA
KTRQSVQQF

SEQ ID NO: 69417 - protein, 9 aa, Homo sapiens
  misc_feature: Table A; Target 69417; HLA-B*40:02; PNLDC1; ENSG00000146453; TAA
KTRQSVQQF

SEQ ID NO: 69418 - protein, 9 aa, Homo sapiens
  misc_feature: Table A; Target 69418; HLA-B*46:01; PNLDC1; ENSG00000146453; TAA
KTRQSVQQF

SEQ ID NO: 69419 - protein, 9 aa, Homo sapiens
  misc_feature: Table A; Target 69419; HLA-B*57:01; PNLDC1; ENSG00000146453; TAA
KTRQSVQQF

SEQ ID NO: 69420 - protein, 9 aa, Homo sapiens
  misc_feature: Table A; Target 69420; HLA-B*58:01; PNLDC1; ENSG00000146453; TAA
KTRQSVQQF

SEQ ID NO: 69421 - protein, 11 aa, Homo sapiens
  misc_feature: Table A; Target 69421; HLA-C*06:02; PNLDC1; ENSG00000146453; TAA
KTRQSVQQFTV

SEQ ID NO: 69422 - protein, 9 aa, Homo sapiens
  misc_feature: Table A; Target 69422; HLA-A*03:01; PNLDC1; ENSG00000146453; TAA
KVAHLLLQK

SEQ ID NO: 69423 - protein, 9 aa, Homo sapiens
  misc_feature: Table A; Target 69423; HLA-A*03:02; PNLDC1; ENSG00000146453; TAA
KVAHLLLQK

SEQ ID NO: 69424 - protein, 9 aa, Homo sapiens
  misc_feature: Table A; Target 69424; HLA-A*11:01; PNLDC1; ENSG00000146453; TAA
KVAHLLLQK

SEQ ID NO: 69425 - protein, 10 aa, Homo sapiens
  misc_feature: Table A; Target 69425; HLA-A*25:01; PNLDC1; ENSG00000146453; TAA
KVVIDEVTRW

SEQ ID NO: 69426 - protein, 10 aa, Homo sapiens
  misc_feature: Table A; Target 69426; HLA-B*44:03; PNLDC1; ENSG00000146453; TAA
KVVIDEVTRW

SEQ ID NO: 69427 - protein, 10 aa, Homo sapiens
  misc_feature: Table A; Target 69427; HLA-B*57:01; PNLDC1; ENSG00000146453; TAA
KVVIDEVTRW

SEQ ID NO: 69428 - protein, 10 aa, Homo sapiens
  misc_feature: Table A; Target 69428; HLA-B*58:01; PNLDC1; ENSG00000146453; TAA
KVVIDEVTRW

SEQ ID NO: 69429 - protein, 9 aa, Homo sapiens
  misc_feature: Table A; Target 69429; HLA-A*23:01; PNLDC1; ENSG00000146453; TAA
KYIAHSCNF

SEQ ID NO: 69430 - protein, 9 aa, Homo sapiens
  misc_feature: Table A; Target 69430; HLA-A*24:02; PNLDC1; ENSG00000146453; TAA
KYIAHSCNF

SEQ ID NO: 69431 - protein, 10 aa, Homo sapiens
  misc_feature: Table A; Target 69431; HLA-C*07:01; PNLDC1; ENSG00000146453; TAA
LAFILGRSGT

SEQ ID NO: 69432 - protein, 8 aa, Homo sapiens
  misc_feature: Table A; Target 69432; HLA-B*35:01; PNLDC1; ENSG00000146453; TAA
LAGLDIEF

SEQ ID NO: 69433 - protein, 8 aa, Homo sapiens
  misc_feature: Table A; Target 69433; HLA-B*35:03; PNLDC1; ENSG00000146453; TAA
LAGLDIEF

SEQ ID NO: 69434 - protein, 8 aa, Homo sapiens
  misc_feature: Table A; Target 69434; HLA-B*55:01; PNLDC1; ENSG00000146453; TAA
LAGLDIEF

SEQ ID NO: 69435 - protein, 8 aa, Homo sapiens
  misc_feature: Table A; Target 69435; HLA-C*03:03; PNLDC1; ENSG00000146453; TAA
LAGLDIEF

SEQ ID NO: 69436 - protein, 8 aa, Homo sapiens
  misc_feature: Table A; Target 69436; HLA-C*05:01; PNLDC1; ENSG00000146453; TAA
LAGLDIEF

SEQ ID NO: 69437 - protein, 8 aa, Homo sapiens
  misc_feature: Table A; Target 69437; HLA-B*51:01; PNLDC1; ENSG00000146453; TAA
LAPYVNQV

SEQ ID NO: 69438 - protein, 8 aa, Homo sapiens
  misc_feature: Table A; Target 69438; HLA-A*30:01; PNLDC1; ENSG00000146453; TAA
LDIEFTGL

SEQ ID NO: 69439 - protein, 8 aa, Homo sapiens
  misc_feature: Table A; Target 69439; HLA-B*18:01; PNLDC1; ENSG00000146453; TAA
LDIEFTGL

SEQ ID NO: 69440 - protein, 8 aa, Homo sapiens
  misc_feature: Table A; Target 69440; HLA-B*37:01; PNLDC1; ENSG00000146453; TAA
LDIEFTGL

SEQ ID NO: 69441 - protein, 8 aa, Homo sapiens
  misc_feature: Table A; Target 69441; HLA-B*40:02; PNLDC1; ENSG00000146453; TAA
LDIEFTGL

SEQ ID NO: 69442 - protein, 8 aa, Homo sapiens
  misc_feature: Table A; Target 69442; HLA-B*49:01; PNLDC1; ENSG00000146453; TAA
LDIEFTGL

SEQ ID NO: 69443 - protein, 8 aa, Homo sapiens
  misc_feature: Table A; Target 69443; HLA-B*40:02; PNLDC1; ENSG00000146453; TAA
LDVLAPYV

SEQ ID NO: 69444 - protein, 9 aa, Homo sapiens
  misc_feature: Table A; Target 69444; HLA-B*44:03; PNLDC1; ENSG00000146453; TAA
LELAKEGDW

SEQ ID NO: 69445 - protein, 8 aa, Homo sapiens
  misc_feature: Table A; Target 69445; HLA-C*04:01; PNLDC1; ENSG00000146453; TAA
LFDLPSEW

SEQ ID NO: 69446 - protein, 9 aa, Homo sapiens
  misc_feature: Table A; Target 69446; HLA-A*29:02; PNLDC1; ENSG00000146453; TAA
LFDLPSEWY

SEQ ID NO: 69447 - protein, 9 aa, Homo sapiens
  misc_feature: Table A; Target 69447; HLA-A*24:02; PNLDC1; ENSG00000146453; TAA
LFPTTFGIL

SEQ ID NO: 69448 - protein, 9 aa, Homo sapiens
  misc_feature: Table A; Target 69448; HLA-A*01:01; PNLDC1; ENSG00000146453; TAA
LIDTKSVTK

SEQ ID NO: 69449 - protein, 9 aa, Homo sapiens
  misc_feature: Table A; Target 69449; HLA-A*03:01; PNLDC1; ENSG00000146453; TAA
LIDTKSVTK

SEQ ID NO: 69450 - protein, 9 aa, Homo sapiens
  misc_feature: Table A; Target 69450; HLA-A*03:02; PNLDC1; ENSG00000146453; TAA
LIDTKSVTK

SEQ ID NO: 69451 - protein, 9 aa, Homo sapiens
  misc_feature: Table A; Target 69451; HLA-A*11:01; PNLDC1; ENSG00000146453; TAA
LIDTKSVTK

SEQ ID NO: 69452 - protein, 9 aa, Homo sapiens
  misc_feature: Table A; Target 69452; HLA-C*05:01; PNLDC1; ENSG00000146453; TAA
LIDTKSVTK

SEQ ID NO: 69453 - protein, 9 aa, Homo sapiens
  misc_feature: Table A; Target 69453; HLA-A*02:03; PNLDC1; ENSG00000146453; TAA
LIRAGVPKI

SEQ ID NO: 69454 - protein, 9 aa, Homo sapiens
  misc_feature: Table A; Target 69454; HLA-B*51:01; PNLDC1; ENSG00000146453; TAA
LIRAGVPKI

SEQ ID NO: 69455 - protein, 10 aa, Homo sapiens
  misc_feature: Table A; Target 69455; HLA-A*02:03; PNLDC1; ENSG00000146453; TAA
LLFFAFLAGL

SEQ ID NO: 69456 - protein, 10 aa, Homo sapiens
  misc_feature: Table A; Target 69456; HLA-A*02:04; PNLDC1; ENSG00000146453; TAA
LLFFAFLAGL

SEQ ID NO: 69457 - protein, 8 aa, Homo sapiens
  misc_feature: Table A; Target 69457; HLA-B*08:01; PNLDC1; ENSG00000146453; TAA
LLKVAHLL

SEQ ID NO: 69458 - protein, 9 aa, Homo sapiens
  misc_feature: Table A; Target 69458; HLA-A*02:03; PNLDC1; ENSG00000146453; TAA
LLKVAHLLL

SEQ ID NO: 69459 - protein, 9 aa, Homo sapiens
  misc_feature: Table A; Target 69459; HLA-A*02:01; PNLDC1; ENSG00000146453; TAA
LLLQKIYHI

SEQ ID NO: 69460 - protein, 9 aa, Homo sapiens
  misc_feature: Table A; Target 69460; HLA-A*02:04; PNLDC1; ENSG00000146453; TAA
LLLQKIYHI

SEQ ID NO: 69461 - protein, 9 aa, Homo sapiens
  misc_feature: Table A; Target 69461; HLA-A*02:07; PNLDC1; ENSG00000146453; TAA
LLLQKIYHI

SEQ ID NO: 69462 - protein, 8 aa, Homo sapiens
  misc_feature: Table A; Target 69462; HLA-A*02:04; PNLDC1; ENSG00000146453; TAA
LLQKIYHI

SEQ ID NO: 69463 - protein, 9 aa, Homo sapiens
  misc_feature: Table A; Target 69463; HLA-A*02:01; PNLDC1; ENSG00000146453; TAA
LLSARGFSV

SEQ ID NO: 69464 - protein, 9 aa, Homo sapiens
  misc_feature: Table A; Target 69464; HLA-A*02:03; PNLDC1; ENSG00000146453; TAA
LLSARGFSV

SEQ ID NO: 69465 - protein, 9 aa, Homo sapiens
  misc_feature: Table A; Target 69465; HLA-A*02:04; PNLDC1; ENSG00000146453; TAA
LLSARGFSV

SEQ ID NO: 69466 - protein, 9 aa, Homo sapiens
  misc_feature: Table A; Target 69466; HLA-B*08:01; PNLDC1; ENSG00000146453; TAA
LLSARGFSV

SEQ ID NO: 69467 - protein, 9 aa, Homo sapiens
  misc_feature: Table A; Target 69467; HLA-B*37:01; PNLDC1; ENSG00000146453; TAA
LLSARGFSV

SEQ ID NO: 69468 - protein, 9 aa, Homo sapiens
  misc_feature: Table A; Target 69468; HLA-B*54:01; PNLDC1; ENSG00000146453; TAA
LPGITGFQA

SEQ ID NO: 69469 - protein, 9 aa, Homo sapiens
  misc_feature: Table A; Target 69469; HLA-B*56:01; PNLDC1; ENSG00000146453; TAA
LPGITGFQA

SEQ ID NO: 69470 - protein, 10 aa, Homo sapiens
  misc_feature: Table A; Target 69470; HLA-B*35:01; PNLDC1; ENSG00000146453; TAA
LPGITGFQAF

SEQ ID NO: 69471 - protein, 8 aa, Homo sapiens
  misc_feature: Table A; Target 69471; HLA-B*07:02; PNLDC1; ENSG00000146453; TAA
LPNIWTVL

SEQ ID NO: 69472 - protein, 8 aa, Homo sapiens
  misc_feature: Table A; Target 69472; HLA-B*08:01; PNLDC1; ENSG00000146453; TAA
LPNIWTVL

SEQ ID NO: 69473 - protein, 8 aa, Homo sapiens
  misc_feature: Table A; Target 69473; HLA-B*35:01; PNLDC1; ENSG00000146453; TAA
LPNIWTVL

SEQ ID NO: 69474 - protein, 8 aa, Homo sapiens
  misc_feature: Table A; Target 69474; HLA-B*35:03; PNLDC1; ENSG00000146453; TAA
LPNIWTVL

SEQ ID NO: 69475 - protein, 8 aa, Homo sapiens
  misc_feature: Table A; Target 69475; HLA-B*51:01; PNLDC1; ENSG00000146453; TAA
LPNIWTVL

SEQ ID NO: 69476 - protein, 10 aa, Homo sapiens
  misc_feature: Table A; Target 69476; HLA-A*25:01; PNLDC1; ENSG00000146453; TAA
LQVCGIVTAW

SEQ ID NO: 69477 - protein, 9 aa, Homo sapiens
  misc_feature: Table A; Target 69477; HLA-B*57:01; PNLDC1; ENSG00000146453; TAA
LSARGFSVF

SEQ ID NO: 69478 - protein, 10 aa, Homo sapiens
  misc_feature: Table A; Target 69478; HLA-B*57:01; PNLDC1; ENSG00000146453; TAA
LSARGFSVFF

SEQ ID NO: 69479 - protein, 9 aa, Homo sapiens
  misc_feature: Table A; Target 69479; HLA-B*40:01; PNLDC1; ENSG00000146453; TAA
LSGPQQISL

SEQ ID NO: 69480 - protein, 9 aa, Homo sapiens
  misc_feature: Table A; Target 69480; HLA-B*58:01; PNLDC1; ENSG00000146453; TAA
LSGPQQISL

SEQ ID NO: 69481 - protein, 9 aa, Homo sapiens
  misc_feature: Table A; Target 69481; HLA-C*01:02; PNLDC1; ENSG00000146453; TAA
LSGPQQISL

SEQ ID NO: 69482 - protein, 9 aa, Homo sapiens
  misc_feature: Table A; Target 69482; HLA-C*03:03; PNLDC1; ENSG00000146453; TAA
LSGPQQISL

SEQ ID NO: 69483 - protein, 9 aa, Homo sapiens
  misc_feature: Table A; Target 69483; HLA-C*03:04; PNLDC1; ENSG00000146453; TAA
LSGPQQISL

SEQ ID NO: 69484 - protein, 9 aa, Homo sapiens
  misc_feature: Table A; Target 69484; HLA-C*07:04; PNLDC1; ENSG00000146453; TAA
LSGPQQISL

SEQ ID NO: 69485 - protein, 9 aa, Homo sapiens
  misc_feature: Table A; Target 69485; HLA-C*16:01; PNLDC1; ENSG00000146453; TAA
LSGPQQISL

SEQ ID NO: 69486 - protein, 10 aa, Homo sapiens
  misc_feature: Table A; Target 69486; HLA-B*57:01; PNLDC1; ENSG00000146453; TAA
LSGPQQISLF

SEQ ID NO: 69487 - protein, 10 aa, Homo sapiens
  misc_feature: Table A; Target 69487; HLA-B*58:01; PNLDC1; ENSG00000146453; TAA
LSGPQQISLF

SEQ ID NO: 69488 - protein, 9 aa, Homo sapiens
  misc_feature: Table A; Target 69488; HLA-A*24:02; PNLDC1; ENSG00000146453; TAA
LTRSQFLLL

SEQ ID NO: 69489 - protein, 9 aa, Homo sapiens
  misc_feature: Table A; Target 69489; HLA-B*57:01; PNLDC1; ENSG00000146453; TAA
LTRSQFLLL

SEQ ID NO: 69490 - protein, 9 aa, Homo sapiens
  misc_feature: Table A; Target 69490; HLA-B*51:01; PNLDC1; ENSG00000146453; TAA
LVKAQKPLV

SEQ ID NO: 69491 - protein, 9 aa, Homo sapiens
  misc_feature: Table A; Target 69491; HLA-B*37:01; PNLDC1; ENSG00000146453; TAA
MDLLHLHEK

SEQ ID NO: 69492 - protein, 8 aa, Homo sapiens
  misc_feature: Table A; Target 69492; HLA-A*02:04; PNLDC1; ENSG00000146453; TAA
MMMDLLHL

SEQ ID NO: 69493 - protein, 9 aa, Homo sapiens
  misc_feature: Table A; Target 69493; HLA-A*02:04; PNLDC1; ENSG00000146453; TAA
MNFPRVSNL

SEQ ID NO: 69494 - protein, 9 aa, Homo sapiens
  misc_feature: Table A; Target 69494; HLA-A*25:01; PNLDC1; ENSG00000146453; TAA
MNFPRVSNL

SEQ ID NO: 69495 - protein, 9 aa, Homo sapiens
  misc_feature: Table A; Target 69495; HLA-A*26:01; PNLDC1; ENSG00000146453; TAA
MNFPRVSNL

SEQ ID NO: 69496 - protein, 9 aa, Homo sapiens
  misc_feature: Table A; Target 69496; HLA-A*68:02; PNLDC1; ENSG00000146453; TAA
MNFPRVSNL

SEQ ID NO: 69497 - protein, 9 aa, Homo sapiens
  misc_feature: Table A; Target 69497; HLA-B*08:01; PNLDC1; ENSG00000146453; TAA
MNFPRVSNL

SEQ ID NO: 69498 - protein, 9 aa, Homo sapiens
  misc_feature: Table A; Target 69498; HLA-B*37:01; PNLDC1; ENSG00000146453; TAA
MNFPRVSNL

SEQ ID NO: 69499 - protein, 9 aa, Homo sapiens
  misc_feature: Table A; Target 69499; HLA-C*12:03; PNLDC1; ENSG00000146453; TAA
MNFPRVSNL

SEQ ID NO: 69500 - protein, 9 aa, Homo sapiens
  misc_feature: Table A; Target 69500; HLA-A*01:01; PNLDC1; ENSG00000146453; TAA
MTLPGITGF

SEQ ID NO: 69501 - protein, 9 aa, Homo sapiens
  misc_feature: Table A; Target 69501; HLA-A*02:04; PNLDC1; ENSG00000146453; TAA
MTLPGITGF

SEQ ID NO: 69502 - protein, 9 aa, Homo sapiens
  misc_feature: Table A; Target 69502; HLA-A*23:01; PNLDC1; ENSG00000146453; TAA
MTLPGITGF

SEQ ID NO: 69503 - protein, 9 aa, Homo sapiens
  misc_feature: Table A; Target 69503; HLA-A*24:02; PNLDC1; ENSG00000146453; TAA
MTLPGITGF

SEQ ID NO: 69504 - protein, 9 aa, Homo sapiens
  misc_feature: Table A; Target 69504; HLA-A*25:01; PNLDC1; ENSG00000146453; TAA
MTLPGITGF

SEQ ID NO: 69505 - protein, 9 aa, Homo sapiens
  misc_feature: Table A; Target 69505; HLA-A*26:01; PNLDC1; ENSG00000146453; TAA
MTLPGITGF

SEQ ID NO: 69506 - protein, 9 aa, Homo sapiens
  misc_feature: Table A; Target 69506; HLA-A*29:02; PNLDC1; ENSG00000146453; TAA
MTLPGITGF

SEQ ID NO: 69507 - protein, 9 aa, Homo sapiens
  misc_feature: Table A; Target 69507; HLA-A*30:02; PNLDC1; ENSG00000146453; TAA
MTLPGITGF

SEQ ID NO: 69508 - protein, 9 aa, Homo sapiens
  misc_feature: Table A; Target 69508; HLA-A*31:01; PNLDC1; ENSG00000146453; TAA
MTLPGITGF

SEQ ID NO: 69509 - protein, 9 aa, Homo sapiens
  misc_feature: Table A; Target 69509; HLA-A*32:01; PNLDC1; ENSG00000146453; TAA
MTLPGITGF

SEQ ID NO: 69510 - protein, 9 aa, Homo sapiens
  misc_feature: Table A; Target 69510; HLA-A*33:01; PNLDC1; ENSG00000146453; TAA
MTLPGITGF

SEQ ID NO: 69511 - protein, 9 aa, Homo sapiens
  misc_feature: Table A; Target 69511; HLA-A*33:03; PNLDC1; ENSG00000146453; TAA
MTLPGITGF

SEQ ID NO: 69512 - protein, 9 aa, Homo sapiens
  misc_feature: Table A; Target 69512; HLA-B*15:01; PNLDC1; ENSG00000146453; TAA
MTLPGITGF

SEQ ID NO: 69513 - protein, 9 aa, Homo sapiens
  misc_feature: Table A; Target 69513; HLA-B*15:03; PNLDC1; ENSG00000146453; TAA
MTLPGITGF

SEQ ID NO: 69514 - protein, 9 aa, Homo sapiens
  misc_feature: Table A; Target 69514; HLA-B*35:01; PNLDC1; ENSG00000146453; TAA
MTLPGITGF

SEQ ID NO: 69515 - protein, 9 aa, Homo sapiens
  misc_feature: Table A; Target 69515; HLA-B*46:01; PNLDC1; ENSG00000146453; TAA
MTLPGITGF

SEQ ID NO: 69516 - protein, 9 aa, Homo sapiens
  misc_feature: Table A; Target 69516; HLA-B*57:01; PNLDC1; ENSG00000146453; TAA
MTLPGITGF

SEQ ID NO: 69517 - protein, 9 aa, Homo sapiens
  misc_feature: Table A; Target 69517; HLA-B*58:01; PNLDC1; ENSG00000146453; TAA
MTLPGITGF

SEQ ID NO: 69518 - protein, 9 aa, Homo sapiens
  misc_feature: Table A; Target 69518; HLA-C*02:02; PNLDC1; ENSG00000146453; TAA
MTLPGITGF

SEQ ID NO: 69519 - protein, 9 aa, Homo sapiens
  misc_feature: Table A; Target 69519; HLA-C*07:04; PNLDC1; ENSG00000146453; TAA
MTLPGITGF

SEQ ID NO: 69520 - protein, 9 aa, Homo sapiens
  misc_feature: Table A; Target 69520; HLA-C*16:04; PNLDC1; ENSG00000146453; TAA
MTLPGITGF

SEQ ID NO: 69521 - protein, 10 aa, Homo sapiens
  misc_feature: Table A; Target 69521; HLA-A*68:02; PNLDC1; ENSG00000146453; TAA
MTLPGITGFQ

SEQ ID NO: 69522 - protein, 11 aa, Homo sapiens
  misc_feature: Table A; Target 69522; HLA-B*54:01; PNLDC1; ENSG00000146453; TAA
MTLPGITGFQA

SEQ ID NO: 69523 - protein, 8 aa, Homo sapiens
  misc_feature: Table A; Target 69523; HLA-C*01:02; PNLDC1; ENSG00000146453; TAA
NFPRVSNL

SEQ ID NO: 69524 - protein, 9 aa, Homo sapiens
  misc_feature: Table A; Target 69524; HLA-A*23:01; PNLDC1; ENSG00000146453; TAA
NFYLFPTTF

SEQ ID NO: 69525 - protein, 9 aa, Homo sapiens
  misc_feature: Table A; Target 69525; HLA-A*24:02; PNLDC1; ENSG00000146453; TAA
NFYLFPTTF

SEQ ID NO: 69526 - protein, 9 aa, Homo sapiens
  misc_feature: Table A; Target 69526; HLA-A*29:02; PNLDC1; ENSG00000146453; TAA
NFYLFPTTF

SEQ ID NO: 69527 - protein, 9 aa, Homo sapiens
  misc_feature: Table A; Target 69527; HLA-B*15:03; PNLDC1; ENSG00000146453; TAA
NFYLFPTTF

SEQ ID NO: 69528 - protein, 9 aa, Homo sapiens
  misc_feature: Table A; Target 69528; HLA-B*18:01; PNLDC1; ENSG00000146453; TAA
NFYLFPTTF

SEQ ID NO: 69529 - protein, 9 aa, Homo sapiens
  misc_feature: Table A; Target 69529; HLA-B*35:01; PNLDC1; ENSG00000146453; TAA
NFYLFPTTF

SEQ ID NO: 69530 - protein, 9 aa, Homo sapiens
  misc_feature: Table A; Target 69530; HLA-C*04:01; PNLDC1; ENSG00000146453; TAA
NFYLFPTTF

SEQ ID NO: 69531 - protein, 9 aa, Homo sapiens
  misc_feature: Table A; Target 69531; HLA-C*14:02; PNLDC1; ENSG00000146453; TAA
NFYLFPTTF

SEQ ID NO: 69532 - protein, 9 aa, Homo sapiens
  misc_feature: Table A; Target 69532; HLA-A*02:04; PNLDC1; ENSG00000146453; TAA
NIHSLFPVL

SEQ ID NO: 69533 - protein, 9 aa, Homo sapiens
  misc_feature: Table A; Target 69533; HLA-A*02:07; PNLDC1; ENSG00000146453; TAA
NIHSLFPVL

SEQ ID NO: 69534 - protein, 9 aa, Homo sapiens
  misc_feature: Table A; Target 69534; HLA-A*68:02; PNLDC1; ENSG00000146453; TAA
NIHSLFPVL

SEQ ID NO: 69535 - protein, 9 aa, Homo sapiens
  misc_feature: Table A; Target 69535; HLA-A*03:01; PNLDC1; ENSG00000146453; TAA
NLIRAGVPK

SEQ ID NO: 69536 - protein, 8 aa, Homo sapiens
  misc_feature: Table A; Target 69536; HLA-A*02:01; PNLDC1; ENSG00000146453; TAA
NLSEVYEV

SEQ ID NO: 69537 - protein, 8 aa, Homo sapiens
  misc_feature: Table A; Target 69537; HLA-A*02:03; PNLDC1; ENSG00000146453; TAA
NLSEVYEV

SEQ ID NO: 69538 - protein, 8 aa, Homo sapiens
  misc_feature: Table A; Target 69538; HLA-A*02:04; PNLDC1; ENSG00000146453; TAA
NLSEVYEV

SEQ ID NO: 69539 - protein, 8 aa, Homo sapiens
  misc_feature: Table A; Target 69539; HLA-B*13:02; PNLDC1; ENSG00000146453; TAA
NLSEVYEV

SEQ ID NO: 69540 - protein, 8 aa, Homo sapiens
  misc_feature: Table A; Target 69540; HLA-B*55:01; PNLDC1; ENSG00000146453; TAA
NLSEVYEV

SEQ ID NO: 69541 - protein, 9 aa, Homo sapiens
  misc_feature: Table A; Target 69541; HLA-A*02:01; PNLDC1; ENSG00000146453; TAA
NLSEVYEVL

SEQ ID NO: 69542 - protein, 9 aa, Homo sapiens
  misc_feature: Table A; Target 69542; HLA-A*02:03; PNLDC1; ENSG00000146453; TAA
NLSEVYEVL

SEQ ID NO: 69543 - protein, 9 aa, Homo sapiens
  misc_feature: Table A; Target 69543; HLA-A*02:04; PNLDC1; ENSG00000146453; TAA
NLSEVYEVL

SEQ ID NO: 69544 - protein, 9 aa, Homo sapiens
  misc_feature: Table A; Target 69544; HLA-A*02:07; PNLDC1; ENSG00000146453; TAA
NLSEVYEVL

SEQ ID NO: 69545 - protein, 9 aa, Homo sapiens
  misc_feature: Table A; Target 69545; HLA-A*25:01; PNLDC1; ENSG00000146453; TAA
NLSEVYEVL

SEQ ID NO: 69546 - protein, 9 aa, Homo sapiens
  misc_feature: Table A; Target 69546; HLA-A*30:01; PNLDC1; ENSG00000146453; TAA
NLSEVYEVL

SEQ ID NO: 69547 - protein, 9 aa, Homo sapiens
  misc_feature: Table A; Target 69547; HLA-A*32:01; PNLDC1; ENSG00000146453; TAA
NLSEVYEVL

SEQ ID NO: 69548 - protein, 9 aa, Homo sapiens
  misc_feature: Table A; Target 69548; HLA-A*68:02; PNLDC1; ENSG00000146453; TAA
NLSEVYEVL

SEQ ID NO: 69549 - protein, 9 aa, Homo sapiens
  misc_feature: Table A; Target 69549; HLA-B*13:02; PNLDC1; ENSG00000146453; TAA
NLSEVYEVL

SEQ ID NO: 69550 - protein, 9 aa, Homo sapiens
  misc_feature: Table A; Target 69550; HLA-B*18:01; PNLDC1; ENSG00000146453; TAA
NLSEVYEVL

SEQ ID NO: 69551 - protein, 9 aa, Homo sapiens
  misc_feature: Table A; Target 69551; HLA-B*27:05; PNLDC1; ENSG00000146453; TAA
NLSEVYEVL

SEQ ID NO: 69552 - protein, 9 aa, Homo sapiens
  misc_feature: Table A; Target 69552; HLA-B*35:01; PNLDC1; ENSG00000146453; TAA
NLSEVYEVL

SEQ ID NO: 69553 - protein, 9 aa, Homo sapiens
  misc_feature: Table A; Target 69553; HLA-B*35:03; PNLDC1; ENSG00000146453; TAA
NLSEVYEVL

SEQ ID NO: 69554 - protein, 9 aa, Homo sapiens
  misc_feature: Table A; Target 69554; HLA-B*38:01; PNLDC1; ENSG00000146453; TAA
NLSEVYEVL

SEQ ID NO: 69555 - protein, 9 aa, Homo sapiens
  misc_feature: Table A; Target 69555; HLA-B*39:01; PNLDC1; ENSG00000146453; TAA
NLSEVYEVL

SEQ ID NO: 69556 - protein, 9 aa, Homo sapiens
  misc_feature: Table A; Target 69556; HLA-B*40:01; PNLDC1; ENSG00000146453; TAA
NLSEVYEVL

SEQ ID NO: 69557 - protein, 9 aa, Homo sapiens
  misc_feature: Table A; Target 69557; HLA-B*55:01; PNLDC1; ENSG00000146453; TAA
NLSEVYEVL

SEQ ID NO: 69558 - protein, 9 aa, Homo sapiens
  misc_feature: Table A; Target 69558; HLA-C*01:02; PNLDC1; ENSG00000146453; TAA
NLSEVYEVL

SEQ ID NO: 69559 - protein, 9 aa, Homo sapiens
  misc_feature: Table A; Target 69559; HLA-C*02:02; PNLDC1; ENSG00000146453; TAA
NLSEVYEVL

SEQ ID NO: 69560 - protein, 9 aa, Homo sapiens
  misc_feature: Table A; Target 69560; HLA-C*03:03; PNLDC1; ENSG00000146453; TAA
NLSEVYEVL

SEQ ID NO: 69561 - protein, 9 aa, Homo sapiens
  misc_feature: Table A; Target 69561; HLA-C*03:04; PNLDC1; ENSG00000146453; TAA
NLSEVYEVL

SEQ ID NO: 69562 - protein, 9 aa, Homo sapiens
  misc_feature: Table A; Target 69562; HLA-C*05:01; PNLDC1; ENSG00000146453; TAA
NLSEVYEVL

SEQ ID NO: 69563 - protein, 9 aa, Homo sapiens
  misc_feature: Table A; Target 69563; HLA-C*07:04; PNLDC1; ENSG00000146453; TAA
NLSEVYEVL

SEQ ID NO: 69564 - protein, 9 aa, Homo sapiens
  misc_feature: Table A; Target 69564; HLA-C*12:03; PNLDC1; ENSG00000146453; TAA
NLSEVYEVL

SEQ ID NO: 69565 - protein, 9 aa, Homo sapiens
  misc_feature: Table A; Target 69565; HLA-C*14:02; PNLDC1; ENSG00000146453; TAA
NLSEVYEVL

SEQ ID NO: 69566 - protein, 9 aa, Homo sapiens
  misc_feature: Table A; Target 69566; HLA-C*16:01; PNLDC1; ENSG00000146453; TAA
NLSEVYEVL

SEQ ID NO: 69567 - protein, 9 aa, Homo sapiens
  misc_feature: Table A; Target 69567; HLA-C*16:02; PNLDC1; ENSG00000146453; TAA
NLSEVYEVL

SEQ ID NO: 69568 - protein, 9 aa, Homo sapiens
  misc_feature: Table A; Target 69568; HLA-A*02:01; PNLDC1; ENSG00000146453; TAA
NMMMDLLHL

SEQ ID NO: 69569 - protein, 9 aa, Homo sapiens
  misc_feature: Table A; Target 69569; HLA-A*02:04; PNLDC1; ENSG00000146453; TAA
NMMMDLLHL

SEQ ID NO: 69570 - protein, 10 aa, Homo sapiens
  misc_feature: Table A; Target 69570; HLA-B*07:02; PNLDC1; ENSG00000146453; TAA
NPTKNSGPEI

SEQ ID NO: 69571 - protein, 10 aa, Homo sapiens
  misc_feature: Table A; Target 69571; HLA-B*35:03; PNLDC1; ENSG00000146453; TAA
NPTKNSGPEI

SEQ ID NO: 69572 - protein, 9 aa, Homo sapiens
  misc_feature: Table A; Target 69572; HLA-A*03:01; PNLDC1; ENSG00000146453; TAA
NQYGFNYNK

SEQ ID NO: 69573 - protein, 9 aa, Homo sapiens
  misc_feature: Table A; Target 69573; HLA-A*03:02; PNLDC1; ENSG00000146453; TAA
NQYGFNYNK

SEQ ID NO: 69574 - protein, 9 aa, Homo sapiens
  misc_feature: Table A; Target 69574; HLA-A*11:01; PNLDC1; ENSG00000146453; TAA
NQYGFNYNK

SEQ ID NO: 69575 - protein, 9 aa, Homo sapiens
  misc_feature: Table A; Target 69575; HLA-A*31:01; PNLDC1; ENSG00000146453; TAA
NQYGFNYNK

SEQ ID NO: 69576 - protein, 9 aa, Homo sapiens
  misc_feature: Table A; Target 69576; HLA-B*13:02; PNLDC1; ENSG00000146453; TAA
NQYGFNYNK

SEQ ID NO: 69577 - protein, 9 aa, Homo sapiens
  misc_feature: Table A; Target 69577; HLA-B*27:05; PNLDC1; ENSG00000146453; TAA
NQYGFNYNK

SEQ ID NO: 69578 - protein, 10 aa, Homo sapiens
  misc_feature: Table A; Target 69578; HLA-A*25:01; PNLDC1; ENSG00000146453; TAA
NQYGFNYNKF

SEQ ID NO: 69579 - protein, 10 aa, Homo sapiens
  misc_feature: Table A; Target 69579; HLA-A*26:01; PNLDC1; ENSG00000146453; TAA
NQYGFNYNKF

SEQ ID NO: 69580 - protein, 10 aa, Homo sapiens
  misc_feature: Table A; Target 69580; HLA-B*15:03; PNLDC1; ENSG00000146453; TAA
NQYGFNYNKF

SEQ ID NO: 69581 - protein, 10 aa, Homo sapiens
  misc_feature: Table A; Target 69581; HLA-B*18:01; PNLDC1; ENSG00000146453; TAA
NQYGFNYNKF

SEQ ID NO: 69582 - protein, 10 aa, Homo sapiens
  misc_feature: Table A; Target 69582; HLA-C*02:02; PNLDC1; ENSG00000146453; TAA
NQYGFNYNKF

SEQ ID NO: 69583 - protein, 8 aa, Homo sapiens
  misc_feature: Table A; Target 69583; HLA-C*05:01; PNLDC1; ENSG00000146453; TAA
NSDLNPTK

SEQ ID NO: 69584 - protein, 9 aa, Homo sapiens
  misc_feature: Table A; Target 69584; HLA-A*01:01; PNLDC1; ENSG00000146453; TAA
NSDLNPTKN

SEQ ID NO: 69585 - protein, 11 aa, Homo sapiens
  misc_feature: Table A; Target 69585; HLA-A*31:01; PNLDC1; ENSG00000146453; TAA
NSGPEIVHASR

SEQ ID NO: 69586 - protein, 11 aa, Homo sapiens
  misc_feature: Table A; Target 69586; HLA-A*33:01; PNLDC1; ENSG00000146453; TAA
NSGPEIVHASR

SEQ ID NO: 69587 - protein, 11 aa, Homo sapiens
  misc_feature: Table A; Target 69587; HLA-A*33:03; PNLDC1; ENSG00000146453; TAA
NSGPEIVHASR

SEQ ID NO: 69588 - protein, 11 aa, Homo sapiens
  misc_feature: Table A; Target 69588; HLA-A*68:01; PNLDC1; ENSG00000146453; TAA
NSGPEIVHASR

SEQ ID NO: 69589 - protein, 11 aa, Homo sapiens
  misc_feature: Table A; Target 69589; HLA-C*07:06; PNLDC1; ENSG00000146453; TAA
NSGPEIVHASR

SEQ ID NO: 69590 - protein, 8 aa, Homo sapiens
  misc_feature: Table A; Target 69590; HLA-C*06:02; PNLDC1; ENSG00000146453; TAA
PDKDQIKV

SEQ ID NO: 69591 - protein, 8 aa, Homo sapiens
  misc_feature: Table A; Target 69591; HLA-C*16:02; PNLDC1; ENSG00000146453; TAA
PDKDQIKV

SEQ ID NO: 69592 - protein, 8 aa, Homo sapiens
  misc_feature: Table A; Target 69592; HLA-B*18:01; PNLDC1; ENSG00000146453; TAA
PESSFPQY

SEQ ID NO: 69593 - protein, 9 aa, Homo sapiens
  misc_feature: Table A; Target 69593; HLA-B*15:01; PNLDC1; ENSG00000146453; TAA
PGVSEQQVY

SEQ ID NO: 69594 - protein, 9 aa, Homo sapiens
  misc_feature: Table A; Target 69594; HLA-B*15:03; PNLDC1; ENSG00000146453; TAA
PGVSEQQVY

SEQ ID NO: 69595 - protein, 9 aa, Homo sapiens
  misc_feature: Table A; Target 69595; HLA-A*24:02; PNLDC1; ENSG00000146453; TAA
PLPESYDQF

SEQ ID NO: 69596 - protein, 8 aa, Homo sapiens
  misc_feature: Table A; Target 69596; HLA-B*51:01; PNLDC1; ENSG00000146453; TAA
PPILILSV

SEQ ID NO: 69597 - protein, 8 aa, Homo sapiens
  misc_feature: Table A; Target 69597; HLA-B*56:01; PNLDC1; ENSG00000146453; TAA
PPILILSV

SEQ ID NO: 69598 - protein, 11 aa, Homo sapiens
  misc_feature: Table A; Target 69598; HLA-C*07:01; PNLDC1; ENSG00000146453; TAA
PTTFGILDSEF

SEQ ID NO: 69599 - protein, 11 aa, Homo sapiens
  misc_feature: Table A; Target 69599; HLA-A*03:02; PNLDC1; ENSG00000146453; TAA
PVLIDTKSVTK

SEQ ID NO: 69600 - protein, 11 aa, Homo sapiens
  misc_feature: Table A; Target 69600; HLA-B*27:02; PNLDC1; ENSG00000146453; TAA
PVLIDTKSVTK

SEQ ID NO: 69601 - protein, 10 aa, Homo sapiens
  misc_feature: Table A; Target 69601; HLA-A*26:01; PNLDC1; ENSG00000146453; TAA
PVPESSFPQY

SEQ ID NO: 69602 - protein, 11 aa, Homo sapiens
  misc_feature: Table A; Target 69602; HLA-A*24:02; PNLDC1; ENSG00000146453; TAA
PYMNEEQEKKI

SEQ ID NO: 69603 - protein, 8 aa, Homo sapiens
  misc_feature: Table A; Target 69603; HLA-A*23:01; PNLDC1; ENSG00000146453; TAA
PYVNQVNL

SEQ ID NO: 69604 - protein, 9 aa, Homo sapiens
  misc_feature: Table A; Target 69604; HLA-A*23:01; PNLDC1; ENSG00000146453; TAA
PYVNQVNLI

SEQ ID NO: 69605 - protein, 9 aa, Homo sapiens
  misc_feature: Table A; Target 69605; HLA-A*24:02; PNLDC1; ENSG00000146453; TAA
PYVNQVNLI

SEQ ID NO: 69606 - protein, 8 aa, Homo sapiens
  misc_feature: Table A; Target 69606; HLA-B*13:02; PNLDC1; ENSG00000146453; TAA
QAFEVQLV

SEQ ID NO: 69607 - protein, 8 aa, Homo sapiens
  misc_feature: Table A; Target 69607; HLA-B*51:01; PNLDC1; ENSG00000146453; TAA
QAFEVQLV

SEQ ID NO: 69608 - protein, 8 aa, Homo sapiens
  misc_feature: Table A; Target 69608; HLA-C*12:03; PNLDC1; ENSG00000146453; TAA
QAFEVQLV

SEQ ID NO: 69609 - protein, 9 aa, Homo sapiens
  misc_feature: Table A; Target 69609; HLA-A*02:01; PNLDC1; ENSG00000146453; TAA
QAFEVQLVL

SEQ ID NO: 69610 - protein, 9 aa, Homo sapiens
  misc_feature: Table A; Target 69610; HLA-A*02:07; PNLDC1; ENSG00000146453; TAA
QAFEVQLVL

SEQ ID NO: 69611 - protein, 9 aa, Homo sapiens
  misc_feature: Table A; Target 69611; HLA-A*11:01; PNLDC1; ENSG00000146453; TAA
QAFEVQLVL

SEQ ID NO: 69612 - protein, 9 aa, Homo sapiens
  misc_feature: Table A; Target 69612; HLA-A*23:01; PNLDC1; ENSG00000146453; TAA
QAFEVQLVL

SEQ ID NO: 69613 - protein, 9 aa, Homo sapiens
  misc_feature: Table A; Target 69613; HLA-A*29:02; PNLDC1; ENSG00000146453; TAA
QAFEVQLVL

SEQ ID NO: 69614 - protein, 9 aa, Homo sapiens
  misc_feature: Table A; Target 69614; HLA-A*30:01; PNLDC1; ENSG00000146453; TAA
QAFEVQLVL

SEQ ID NO: 69615 - protein, 9 aa, Homo sapiens
  misc_feature: Table A; Target 69615; HLA-A*68:01; PNLDC1; ENSG00000146453; TAA
QAFEVQLVL

SEQ ID NO: 69616 - protein, 9 aa, Homo sapiens
  misc_feature: Table A; Target 69616; HLA-A*68:02; PNLDC1; ENSG00000146453; TAA
QAFEVQLVL

SEQ ID NO: 69617 - protein, 9 aa, Homo sapiens
  misc_feature: Table A; Target 69617; HLA-B*07:02; PNLDC1; ENSG00000146453; TAA
QAFEVQLVL

SEQ ID NO: 69618 - protein, 9 aa, Homo sapiens
  misc_feature: Table A; Target 69618; HLA-B*13:02; PNLDC1; ENSG00000146453; TAA
QAFEVQLVL

SEQ ID NO: 69619 - protein, 9 aa, Homo sapiens
  misc_feature: Table A; Target 69619; HLA-B*15:03; PNLDC1; ENSG00000146453; TAA
QAFEVQLVL

SEQ ID NO: 69620 - protein, 9 aa, Homo sapiens
  misc_feature: Table A; Target 69620; HLA-B*18:01; PNLDC1; ENSG00000146453; TAA
QAFEVQLVL

SEQ ID NO: 69621 - protein, 9 aa, Homo sapiens
  misc_feature: Table A; Target 69621; HLA-B*27:02; PNLDC1; ENSG00000146453; TAA
QAFEVQLVL

SEQ ID NO: 69622 - protein, 9 aa, Homo sapiens
  misc_feature: Table A; Target 69622; HLA-B*35:01; PNLDC1; ENSG00000146453; TAA
QAFEVQLVL

SEQ ID NO: 69623 - protein, 9 aa, Homo sapiens
  misc_feature: Table A; Target 69623; HLA-B*35:03; PNLDC1; ENSG00000146453; TAA
QAFEVQLVL

SEQ ID NO: 69624 - protein, 9 aa, Homo sapiens
  misc_feature: Table A; Target 69624; HLA-B*38:01; PNLDC1; ENSG00000146453; TAA
QAFEVQLVL

SEQ ID NO: 69625 - protein, 9 aa, Homo sapiens
  misc_feature: Table A; Target 69625; HLA-B*39:01; PNLDC1; ENSG00000146453; TAA
QAFEVQLVL

SEQ ID NO: 69626 - protein, 9 aa, Homo sapiens
  misc_feature: Table A; Target 69626; HLA-B*40:01; PNLDC1; ENSG00000146453; TAA
QAFEVQLVL

SEQ ID NO: 69627 - protein, 9 aa, Homo sapiens
  misc_feature: Table A; Target 69627; HLA-B*44:03; PNLDC1; ENSG00000146453; TAA
QAFEVQLVL

SEQ ID NO: 69628 - protein, 9 aa, Homo sapiens
  misc_feature: Table A; Target 69628; HLA-B*46:01; PNLDC1; ENSG00000146453; TAA
QAFEVQLVL

SEQ ID NO: 69629 - protein, 9 aa, Homo sapiens
  misc_feature: Table A; Target 69629; HLA-B*51:01; PNLDC1; ENSG00000146453; TAA
QAFEVQLVL

SEQ ID NO: 69630 - protein, 9 aa, Homo sapiens
  misc_feature: Table A; Target 69630; HLA-B*54:01; PNLDC1; ENSG00000146453; TAA
QAFEVQLVL

SEQ ID NO: 69631 - protein, 9 aa, Homo sapiens
  misc_feature: Table A; Target 69631; HLA-B*56:01; PNLDC1; ENSG00000146453; TAA
QAFEVQLVL

SEQ ID NO: 69632 - protein, 9 aa, Homo sapiens
  misc_feature: Table A; Target 69632; HLA-B*57:01; PNLDC1; ENSG00000146453; TAA
QAFEVQLVL

SEQ ID NO: 69633 - protein, 9 aa, Homo sapiens
  misc_feature: Table A; Target 69633; HLA-B*58:01; PNLDC1; ENSG00000146453; TAA
QAFEVQLVL

SEQ ID NO: 69634 - protein, 9 aa, Homo sapiens
  misc_feature: Table A; Target 69634; HLA-C*02:02; PNLDC1; ENSG00000146453; TAA
QAFEVQLVL

SEQ ID NO: 69635 - protein, 9 aa, Homo sapiens
  misc_feature: Table A; Target 69635; HLA-C*03:03; PNLDC1; ENSG00000146453; TAA
QAFEVQLVL

SEQ ID NO: 69636 - protein, 9 aa, Homo sapiens
  misc_feature: Table A; Target 69636; HLA-C*03:04; PNLDC1; ENSG00000146453; TAA
QAFEVQLVL

SEQ ID NO: 69637 - protein, 9 aa, Homo sapiens
  misc_feature: Table A; Target 69637; HLA-C*05:01; PNLDC1; ENSG00000146453; TAA
QAFEVQLVL

SEQ ID NO: 69638 - protein, 9 aa, Homo sapiens
  misc_feature: Table A; Target 69638; HLA-C*07:04; PNLDC1; ENSG00000146453; TAA
QAFEVQLVL

SEQ ID NO: 69639 - protein, 9 aa, Homo sapiens
  misc_feature: Table A; Target 69639; HLA-C*07:06; PNLDC1; ENSG00000146453; TAA
QAFEVQLVL

SEQ ID NO: 69640 - protein, 9 aa, Homo sapiens
  misc_feature: Table A; Target 69640; HLA-C*12:03; PNLDC1; ENSG00000146453; TAA
QAFEVQLVL

SEQ ID NO: 69641 - protein, 9 aa, Homo sapiens
  misc_feature: Table A; Target 69641; HLA-C*16:01; PNLDC1; ENSG00000146453; TAA
QAFEVQLVL

SEQ ID NO: 69642 - protein, 9 aa, Homo sapiens
  misc_feature: Table A; Target 69642; HLA-C*16:02; PNLDC1; ENSG00000146453; TAA
QAFEVQLVL

SEQ ID NO: 69643 - protein, 9 aa, Homo sapiens
  misc_feature: Table A; Target 69643; HLA-C*16:04; PNLDC1; ENSG00000146453; TAA
QAFEVQLVL

SEQ ID NO: 69644 - protein, 10 aa, Homo sapiens
  misc_feature: Table A; Target 69644; HLA-A*31:01; PNLDC1; ENSG00000146453; TAA
QAFEVQLVLR

SEQ ID NO: 69645 - protein, 10 aa, Homo sapiens
  misc_feature: Table A; Target 69645; HLA-A*33:01; PNLDC1; ENSG00000146453; TAA
QAFEVQLVLR

SEQ ID NO: 69646 - protein, 10 aa, Homo sapiens
  misc_feature: Table A; Target 69646; HLA-A*33:03; PNLDC1; ENSG00000146453; TAA
QAFEVQLVLR

SEQ ID NO: 69647 - protein, 10 aa, Homo sapiens
  misc_feature: Table A; Target 69647; HLA-A*68:01; PNLDC1; ENSG00000146453; TAA
QAFEVQLVLR

SEQ ID NO: 69648 - protein, 10 aa, Homo sapiens
  misc_feature: Table A; Target 69648; HLA-A*68:02; PNLDC1; ENSG00000146453; TAA
QAFEVQLVLR

SEQ ID NO: 69649 - protein, 10 aa, Homo sapiens
  misc_feature: Table A; Target 69649; HLA-B*27:02; PNLDC1; ENSG00000146453; TAA
QAFEVQLVLR

SEQ ID NO: 69650 - protein, 10 aa, Homo sapiens
  misc_feature: Table A; Target 69650; HLA-C*07:06; PNLDC1; ENSG00000146453; TAA
QAFEVQLVLR

SEQ ID NO: 69651 - protein, 9 aa, Homo sapiens
  misc_feature: Table A; Target 69651; HLA-A*02:01; PNLDC1; ENSG00000146453; TAA
QALPNIWTV

SEQ ID NO: 69652 - protein, 9 aa, Homo sapiens
  misc_feature: Table A; Target 69652; HLA-A*02:03; PNLDC1; ENSG00000146453; TAA
QALPNIWTV

SEQ ID NO: 69653 - protein, 9 aa, Homo sapiens
  misc_feature: Table A; Target 69653; HLA-A*02:04; PNLDC1; ENSG00000146453; TAA
QALPNIWTV

SEQ ID NO: 69654 - protein, 9 aa, Homo sapiens
  misc_feature: Table A; Target 69654; HLA-A*02:07; PNLDC1; ENSG00000146453; TAA
QALPNIWTV

SEQ ID NO: 69655 - protein, 9 aa, Homo sapiens
  misc_feature: Table A; Target 69655; HLA-A*68:02; PNLDC1; ENSG00000146453; TAA
QALPNIWTV

SEQ ID NO: 69656 - protein, 9 aa, Homo sapiens
  misc_feature: Table A; Target 69656; HLA-B*13:02; PNLDC1; ENSG00000146453; TAA
QALPNIWTV

SEQ ID NO: 69657 - protein, 9 aa, Homo sapiens
  misc_feature: Table A; Target 69657; HLA-B*51:01; PNLDC1; ENSG00000146453; TAA
QALPNIWTV

SEQ ID NO: 69658 - protein, 9 aa, Homo sapiens
  misc_feature: Table A; Target 69658; HLA-B*54:01; PNLDC1; ENSG00000146453; TAA
QALPNIWTV

SEQ ID NO: 69659 - protein, 9 aa, Homo sapiens
  misc_feature: Table A; Target 69659; HLA-B*55:01; PNLDC1; ENSG00000146453; TAA
QALPNIWTV

SEQ ID NO: 69660 - protein, 9 aa, Homo sapiens
  misc_feature: Table A; Target 69660; HLA-B*56:01; PNLDC1; ENSG00000146453; TAA
QALPNIWTV

SEQ ID NO: 69661 - protein, 9 aa, Homo sapiens
  misc_feature: Table A; Target 69661; HLA-B*57:01; PNLDC1; ENSG00000146453; TAA
QALPNIWTV

SEQ ID NO: 69662 - protein, 9 aa, Homo sapiens
  misc_feature: Table A; Target 69662; HLA-C*02:02; PNLDC1; ENSG00000146453; TAA
QALPNIWTV

SEQ ID NO: 69663 - protein, 9 aa, Homo sapiens
  misc_feature: Table A; Target 69663; HLA-C*12:03; PNLDC1; ENSG00000146453; TAA
QALPNIWTV

SEQ ID NO: 69664 - protein, 9 aa, Homo sapiens
  misc_feature: Table A; Target 69664; HLA-C*16:02; PNLDC1; ENSG00000146453; TAA
QALPNIWTV

SEQ ID NO: 69665 - protein, 9 aa, Homo sapiens
  misc_feature: Table A; Target 69665; HLA-C*16:04; PNLDC1; ENSG00000146453; TAA
QALPNIWTV

SEQ ID NO: 69666 - protein, 8 aa, Homo sapiens
  misc_feature: Table A; Target 69666; HLA-B*37:01; PNLDC1; ENSG00000146453; TAA
QASSVQFL

SEQ ID NO: 69667 - protein, 11 aa, Homo sapiens
  misc_feature: Table A; Target 69667; HLA-A*01:01; PNLDC1; ENSG00000146453; TAA
QASSVQFLNQY

SEQ ID NO: 69668 - protein, 11 aa, Homo sapiens
  misc_feature: Table A; Target 69668; HLA-A*30:02; PNLDC1; ENSG00000146453; TAA
QASSVQFLNQY

SEQ ID NO: 69669 - protein, 11 aa, Homo sapiens
  misc_feature: Table A; Target 69669; HLA-B*35:01; PNLDC1; ENSG00000146453; TAA
QASSVQFLNQY

SEQ ID NO: 69670 - protein, 11 aa, Homo sapiens
  misc_feature: Table A; Target 69670; HLA-C*16:04; PNLDC1; ENSG00000146453; TAA
QASSVQFLNQY

SEQ ID NO: 69671 - protein, 9 aa, Homo sapiens
  misc_feature: Table A; Target 69671; HLA-A*23:01; PNLDC1; ENSG00000146453; TAA
QFKQNIHSL

SEQ ID NO: 69672 - protein, 9 aa, Homo sapiens
  misc_feature: Table A; Target 69672; HLA-B*08:01; PNLDC1; ENSG00000146453; TAA
QFKQNIHSL

SEQ ID NO: 69673 - protein, 10 aa, Homo sapiens
  misc_feature: Table A; Target 69673; HLA-A*24:02; PNLDC1; ENSG00000146453; TAA
QFKQNIHSLF

SEQ ID NO: 69674 - protein, 9 aa, Homo sapiens
  misc_feature: Table A; Target 69674; HLA-A*23:01; PNLDC1; ENSG00000146453; TAA
QFLLLTNKF

SEQ ID NO: 69675 - protein, 9 aa, Homo sapiens
  misc_feature: Table A; Target 69675; HLA-A*24:02; PNLDC1; ENSG00000146453; TAA
QFLLLTNKF

SEQ ID NO: 69676 - protein, 9 aa, Homo sapiens
  misc_feature: Table A; Target 69676; HLA-A*29:02; PNLDC1; ENSG00000146453; TAA
QFLLLTNKF

SEQ ID NO: 69677 - protein, 8 aa, Homo sapiens
  misc_feature: Table A; Target 69677; HLA-A*23:01; PNLDC1; ENSG00000146453; TAA
QFLNQYGF

SEQ ID NO: 69678 - protein, 10 aa, Homo sapiens
  misc_feature: Table A; Target 69678; HLA-A*29:02; PNLDC1; ENSG00000146453; TAA
QFLNQYGFNY

SEQ ID NO: 69679 - protein, 10 aa, Homo sapiens
  misc_feature: Table A; Target 69679; HLA-A*30:02; PNLDC1; ENSG00000146453; TAA
QFLNQYGFNY

SEQ ID NO: 69680 - protein, 9 aa, Homo sapiens
  misc_feature: Table A; Target 69680; HLA-A*02:01; PNLDC1; ENSG00000146453; TAA
QIKVVIDEV

SEQ ID NO: 69681 - protein, 9 aa, Homo sapiens
  misc_feature: Table A; Target 69681; HLA-A*02:03; PNLDC1; ENSG00000146453; TAA
QIKVVIDEV

SEQ ID NO: 69682 - protein, 9 aa, Homo sapiens
  misc_feature: Table A; Target 69682; HLA-A*02:04; PNLDC1; ENSG00000146453; TAA
QIKVVIDEV

SEQ ID NO: 69683 - protein, 9 aa, Homo sapiens
  misc_feature: Table A; Target 69683; HLA-A*02:07; PNLDC1; ENSG00000146453; TAA
QIKVVIDEV

SEQ ID NO: 69684 - protein, 9 aa, Homo sapiens
  misc_feature: Table A; Target 69684; HLA-A*68:02; PNLDC1; ENSG00000146453; TAA
QIKVVIDEV

SEQ ID NO: 69685 - protein, 9 aa, Homo sapiens
  misc_feature: Table A; Target 69685; HLA-B*08:01; PNLDC1; ENSG00000146453; TAA
QIKVVIDEV

SEQ ID NO: 69686 - protein, 9 aa, Homo sapiens
  misc_feature: Table A; Target 69686; HLA-B*13:02; PNLDC1; ENSG00000146453; TAA
QIKVVIDEV

SEQ ID NO: 69687 - protein, 9 aa, Homo sapiens
  misc_feature: Table A; Target 69687; HLA-B*40:02; PNLDC1; ENSG00000146453; TAA
QIKVVIDEV

SEQ ID NO: 69688 - protein, 9 aa, Homo sapiens
  misc_feature: Table A; Target 69688; HLA-B*46:01; PNLDC1; ENSG00000146453; TAA
QIKVVIDEV

SEQ ID NO: 69689 - protein, 9 aa, Homo sapiens
  misc_feature: Table A; Target 69689; HLA-C*12:03; PNLDC1; ENSG00000146453; TAA
QIKVVIDEV

SEQ ID NO: 69690 - protein, 9 aa, Homo sapiens
  misc_feature: Table A; Target 69690; HLA-B*15:03; PNLDC1; ENSG00000146453; TAA
QKPLVGHNM

SEQ ID NO: 69691 - protein, 8 aa, Homo sapiens
  misc_feature: Table A; Target 69691; HLA-B*08:01; PNLDC1; ENSG00000146453; TAA
QLVLRQAL

SEQ ID NO: 69692 - protein, 8 aa, Homo sapiens
  misc_feature: Table A; Target 69692; HLA-A*30:01; PNLDC1; ENSG00000146453; TAA
QQFTVCQI

SEQ ID NO: 69693 - protein, 8 aa, Homo sapiens
  misc_feature: Table A; Target 69693; HLA-B*13:02; PNLDC1; ENSG00000146453; TAA
QQFTVCQI

SEQ ID NO: 69694 - protein, 8 aa, Homo sapiens
  misc_feature: Table A; Target 69694; HLA-B*37:01; PNLDC1; ENSG00000146453; TAA
QQFTVCQI

SEQ ID NO: 69695 - protein, 8 aa, Homo sapiens
  misc_feature: Table A; Target 69695; HLA-B*58:01; PNLDC1; ENSG00000146453; TAA
QSVQQFTV

SEQ ID NO: 69696 - protein, 9 aa, Homo sapiens
  misc_feature: Table A; Target 69696; HLA-C*12:03; PNLDC1; ENSG00000146453; TAA
QSVQQFTVC

SEQ ID NO: 69697 - protein, 9 aa, Homo sapiens
  misc_feature: Table A; Target 69697; HLA-A*03:02; PNLDC1; ENSG00000146453; TAA
QVCGIVTAW

SEQ ID NO: 69698 - protein, 9 aa, Homo sapiens
  misc_feature: Table A; Target 69698; HLA-A*25:01; PNLDC1; ENSG00000146453; TAA
QVCGIVTAW

SEQ ID NO: 69699 - protein, 9 aa, Homo sapiens
  misc_feature: Table A; Target 69699; HLA-A*26:01; PNLDC1; ENSG00000146453; TAA
QVCGIVTAW

SEQ ID NO: 69700 - protein, 9 aa, Homo sapiens
  misc_feature: Table A; Target 69700; HLA-A*29:02; PNLDC1; ENSG00000146453; TAA
QVCGIVTAW

SEQ ID NO: 69701 - protein, 9 aa, Homo sapiens
  misc_feature: Table A; Target 69701; HLA-A*31:01; PNLDC1; ENSG00000146453; TAA
QVCGIVTAW

SEQ ID NO: 69702 - protein, 9 aa, Homo sapiens
  misc_feature: Table A; Target 69702; HLA-A*32:01; PNLDC1; ENSG00000146453; TAA
QVCGIVTAW

SEQ ID NO: 69703 - protein, 9 aa, Homo sapiens
  misc_feature: Table A; Target 69703; HLA-A*33:03; PNLDC1; ENSG00000146453; TAA
QVCGIVTAW

SEQ ID NO: 69704 - protein, 9 aa, Homo sapiens
  misc_feature: Table A; Target 69704; HLA-A*68:01; PNLDC1; ENSG00000146453; TAA
QVCGIVTAW

SEQ ID NO: 69705 - protein, 9 aa, Homo sapiens
  misc_feature: Table A; Target 69705; HLA-A*68:02; PNLDC1; ENSG00000146453; TAA
QVCGIVTAW

SEQ ID NO: 69706 - protein, 9 aa, Homo sapiens
  misc_feature: Table A; Target 69706; HLA-B*15:01; PNLDC1; ENSG00000146453; TAA
QVCGIVTAW

SEQ ID NO: 69707 - protein, 9 aa, Homo sapiens
  misc_feature: Table A; Target 69707; HLA-B*35:01; PNLDC1; ENSG00000146453; TAA
QVCGIVTAW

SEQ ID NO: 69708 - protein, 9 aa, Homo sapiens
  misc_feature: Table A; Target 69708; HLA-B*44:02; PNLDC1; ENSG00000146453; TAA
QVCGIVTAW

SEQ ID NO: 69709 - protein, 9 aa, Homo sapiens
  misc_feature: Table A; Target 69709; HLA-B*44:03; PNLDC1; ENSG00000146453; TAA
QVCGIVTAW

SEQ ID NO: 69710 - protein, 9 aa, Homo sapiens
  misc_feature: Table A; Target 69710; HLA-B*57:01; PNLDC1; ENSG00000146453; TAA
QVCGIVTAW

SEQ ID NO: 69711 - protein, 9 aa, Homo sapiens
  misc_feature: Table A; Target 69711; HLA-B*58:01; PNLDC1; ENSG00000146453; TAA
QVCGIVTAW

SEQ ID NO: 69712 - protein, 9 aa, Homo sapiens
  misc_feature: Table A; Target 69712; HLA-C*07:04; PNLDC1; ENSG00000146453; TAA
QVCGIVTAW

SEQ ID NO: 69713 - protein, 9 aa, Homo sapiens
  misc_feature: Table A; Target 69713; HLA-C*07:06; PNLDC1; ENSG00000146453; TAA
QVCGIVTAW

SEQ ID NO: 69714 - protein, 9 aa, Homo sapiens
  misc_feature: Table A; Target 69714; HLA-C*12:03; PNLDC1; ENSG00000146453; TAA
QVCGIVTAW

SEQ ID NO: 69715 - protein, 9 aa, Homo sapiens
  misc_feature: Table A; Target 69715; HLA-C*16:04; PNLDC1; ENSG00000146453; TAA
QVCGIVTAW

SEQ ID NO: 69716 - protein, 9 aa, Homo sapiens
  misc_feature: Table A; Target 69716; HLA-A*32:01; PNLDC1; ENSG00000146453; TAA
QVNLIRAGV

SEQ ID NO: 69717 - protein, 11 aa, Homo sapiens
  misc_feature: Table A; Target 69717; HLA-A*03:02; PNLDC1; ENSG00000146453; TAA
QVNLIRAGVPK

SEQ ID NO: 69718 - protein, 9 aa, Homo sapiens
  misc_feature: Table A; Target 69718; HLA-A*02:07; PNLDC1; ENSG00000146453; TAA
QVYHKFQNL

SEQ ID NO: 69719 - protein, 9 aa, Homo sapiens
  misc_feature: Table A; Target 69719; HLA-A*03:01; PNLDC1; ENSG00000146453; TAA
QVYHKFQNL

SEQ ID NO: 69720 - protein, 9 aa, Homo sapiens
  misc_feature: Table A; Target 69720; HLA-A*25:01; PNLDC1; ENSG00000146453; TAA
QVYHKFQNL

SEQ ID NO: 69721 - protein, 9 aa, Homo sapiens
  misc_feature: Table A; Target 69721; HLA-A*31:01; PNLDC1; ENSG00000146453; TAA
QVYHKFQNL

SEQ ID NO: 69722 - protein, 9 aa, Homo sapiens
  misc_feature: Table A; Target 69722; HLA-A*68:02; PNLDC1; ENSG00000146453; TAA
QVYHKFQNL

SEQ ID NO: 69723 - protein, 9 aa, Homo sapiens
  misc_feature: Table A; Target 69723; HLA-B*08:01; PNLDC1; ENSG00000146453; TAA
QVYHKFQNL

SEQ ID NO: 69724 - protein, 9 aa, Homo sapiens
  misc_feature: Table A; Target 69724; HLA-A*23:01; PNLDC1; ENSG00000146453; TAA
QYGFNYNKF

SEQ ID NO: 69725 - protein, 9 aa, Homo sapiens
  misc_feature: Table A; Target 69725; HLA-A*24:02; PNLDC1; ENSG00000146453; TAA
QYGFNYNKF

SEQ ID NO: 69726 - protein, 9 aa, Homo sapiens
  misc_feature: Table A; Target 69726; HLA-A*23:01; PNLDC1; ENSG00000146453; TAA
QYLDVLAPY

SEQ ID NO: 69727 - protein, 9 aa, Homo sapiens
  misc_feature: Table A; Target 69727; HLA-A*29:02; PNLDC1; ENSG00000146453; TAA
QYLDVLAPY

SEQ ID NO: 69728 - protein, 9 aa, Homo sapiens
  misc_feature: Table A; Target 69728; HLA-A*30:02; PNLDC1; ENSG00000146453; TAA
QYLDVLAPY

SEQ ID NO: 69729 - protein, 9 aa, Homo sapiens
  misc_feature: Table A; Target 69729; HLA-A*31:01; PNLDC1; ENSG00000146453; TAA
QYLDVLAPY

SEQ ID NO: 69730 - protein, 9 aa, Homo sapiens
  misc_feature: Table A; Target 69730; HLA-A*33:03; PNLDC1; ENSG00000146453; TAA
QYLDVLAPY

SEQ ID NO: 69731 - protein, 9 aa, Homo sapiens
  misc_feature: Table A; Target 69731; HLA-C*14:02; PNLDC1; ENSG00000146453; TAA
QYLDVLAPY

SEQ ID NO: 69732 - protein, 9 aa, Homo sapiens
  misc_feature: Table A; Target 69732; HLA-A*31:01; PNLDC1; ENSG00000146453; TAA
RAGVPKINF

SEQ ID NO: 69733 - protein, 9 aa, Homo sapiens
  misc_feature: Table A; Target 69733; HLA-A*32:01; PNLDC1; ENSG00000146453; TAA
RAGVPKINF

SEQ ID NO: 69734 - protein, 9 aa, Homo sapiens
  misc_feature: Table A; Target 69734; HLA-B*57:01; PNLDC1; ENSG00000146453; TAA
RAGVPKINF

SEQ ID NO: 69735 - protein, 9 aa, Homo sapiens
  misc_feature: Table A; Target 69735; HLA-B*58:01; PNLDC1; ENSG00000146453; TAA
RAGVPKINF

SEQ ID NO: 69736 - protein, 9 aa, Homo sapiens
  misc_feature: Table A; Target 69736; HLA-C*16:01; PNLDC1; ENSG00000146453; TAA
RAGVPKINF

SEQ ID NO: 69737 - protein, 8 aa, Homo sapiens
  misc_feature: Table A; Target 69737; HLA-B*37:01; PNLDC1; ENSG00000146453; TAA
RDHPTLCI

SEQ ID NO: 69738 - protein, 9 aa, Homo sapiens
  misc_feature: Table A; Target 69738; HLA-A*31:01; PNLDC1; ENSG00000146453; TAA
RGFSVFFQM

SEQ ID NO: 69739 - protein, 9 aa, Homo sapiens
  misc_feature: Table A; Target 69739; HLA-B*38:01; PNLDC1; ENSG00000146453; TAA
RHDILTGNW

SEQ ID NO: 69740 - protein, 9 aa, Homo sapiens
  misc_feature: Table A; Target 69740; HLA-B*57:01; PNLDC1; ENSG00000146453; TAA
RHDILTGNW

SEQ ID NO: 69741 - protein, 9 aa, Homo sapiens
  misc_feature: Table A; Target 69741; HLA-B*27:05; PNLDC1; ENSG00000146453; TAA
RHSPNVNCL

SEQ ID NO: 69742 - protein, 9 aa, Homo sapiens
  misc_feature: Table A; Target 69742; HLA-B*38:01; PNLDC1; ENSG00000146453; TAA
RHSPNVNCL

SEQ ID NO: 69743 - protein, 9 aa, Homo sapiens
  misc_feature: Table A; Target 69743; HLA-B*39:01; PNLDC1; ENSG00000146453; TAA
RHSPNVNCL

SEQ ID NO: 69744 - protein, 10 aa, Homo sapiens
  misc_feature: Table A; Target 69744; HLA-B*38:01; PNLDC1; ENSG00000146453; TAA
RHSPNVNCLL

SEQ ID NO: 69745 - protein, 10 aa, Homo sapiens
  misc_feature: Table A; Target 69745; HLA-A*23:01; PNLDC1; ENSG00000146453; TAA
RPLPESYDQF

SEQ ID NO: 69746 - protein, 10 aa, Homo sapiens
  misc_feature: Table A; Target 69746; HLA-A*24:02; PNLDC1; ENSG00000146453; TAA
RPLPESYDQF

SEQ ID NO: 69747 - protein, 10 aa, Homo sapiens
  misc_feature: Table A; Target 69747; HLA-B*07:02; PNLDC1; ENSG00000146453; TAA
RPLPESYDQF

SEQ ID NO: 69748 - protein, 10 aa, Homo sapiens
  misc_feature: Table A; Target 69748; HLA-B*27:02; PNLDC1; ENSG00000146453; TAA
RPLPESYDQF

SEQ ID NO: 69749 - protein, 10 aa, Homo sapiens
  misc_feature: Table A; Target 69749; HLA-B*35:01; PNLDC1; ENSG00000146453; TAA
RPLPESYDQF

SEQ ID NO: 69750 - protein, 10 aa, Homo sapiens
  misc_feature: Table A; Target 69750; HLA-B*35:03; PNLDC1; ENSG00000146453; TAA
RPLPESYDQF

SEQ ID NO: 69751 - protein, 10 aa, Homo sapiens
  misc_feature: Table A; Target 69751; HLA-B*55:01; PNLDC1; ENSG00000146453; TAA
RPLPESYDQF

SEQ ID NO: 69752 - protein, 10 aa, Homo sapiens
  misc_feature: Table A; Target 69752; HLA-B*57:01; PNLDC1; ENSG00000146453; TAA
RPLPESYDQF

SEQ ID NO: 69753 - protein, 9 aa, Homo sapiens
  misc_feature: Table A; Target 69753; HLA-B*07:02; PNLDC1; ENSG00000146453; TAA
RPPILILSV

SEQ ID NO: 69754 - protein, 9 aa, Homo sapiens
  misc_feature: Table A; Target 69754; HLA-B*08:01; PNLDC1; ENSG00000146453; TAA
RPPILILSV

SEQ ID NO: 69755 - protein, 9 aa, Homo sapiens
  misc_feature: Table A; Target 69755; HLA-B*51:01; PNLDC1; ENSG00000146453; TAA
RPPILILSV

SEQ ID NO: 69756 - protein, 9 aa, Homo sapiens
  misc_feature: Table A; Target 69756; HLA-B*54:01; PNLDC1; ENSG00000146453; TAA
RPPILILSV

SEQ ID NO: 69757 - protein, 9 aa, Homo sapiens
  misc_feature: Table A; Target 69757; HLA-B*56:01; PNLDC1; ENSG00000146453; TAA
RPPILILSV

SEQ ID NO: 69758 - protein, 10 aa, Homo sapiens
  misc_feature: Table A; Target 69758; HLA-A*02:04; PNLDC1; ENSG00000146453; TAA
RQALPNIWTV

SEQ ID NO: 69759 - protein, 9 aa, Homo sapiens
  misc_feature: Table A; Target 69759; HLA-A*02:01; PNLDC1; ENSG00000146453; TAA
RQSVQQFTV

SEQ ID NO: 69760 - protein, 9 aa, Homo sapiens
  misc_feature: Table A; Target 69760; HLA-A*02:04; PNLDC1; ENSG00000146453; TAA
RQSVQQFTV

SEQ ID NO: 69761 - protein, 9 aa, Homo sapiens
  misc_feature: Table A; Target 69761; HLA-A*30:01; PNLDC1; ENSG00000146453; TAA
RQSVQQFTV

SEQ ID NO: 69762 - protein, 9 aa, Homo sapiens
  misc_feature: Table A; Target 69762; HLA-A*32:01; PNLDC1; ENSG00000146453; TAA
RQSVQQFTV

SEQ ID NO: 69763 - protein, 9 aa, Homo sapiens
  misc_feature: Table A; Target 69763; HLA-B*13:02; PNLDC1; ENSG00000146453; TAA
RQSVQQFTV

SEQ ID NO: 69764 - protein, 9 aa, Homo sapiens
  misc_feature: Table A; Target 69764; HLA-B*37:01; PNLDC1; ENSG00000146453; TAA
RQSVQQFTV

SEQ ID NO: 69765 - protein, 9 aa, Homo sapiens
  misc_feature: Table A; Target 69765; HLA-C*06:02; PNLDC1; ENSG00000146453; TAA
RQSVQQFTV

SEQ ID NO: 69766 - protein, 9 aa, Homo sapiens
  misc_feature: Table A; Target 69766; HLA-C*16:04; PNLDC1; ENSG00000146453; TAA
RQSVQQFTV

SEQ ID NO: 69767 - protein, 10 aa, Homo sapiens
  misc_feature: Table A; Target 69767; HLA-A*03:02; PNLDC1; ENSG00000146453; TAA
RSQFLLLTNK

SEQ ID NO: 69768 - protein, 10 aa, Homo sapiens
  misc_feature: Table A; Target 69768; HLA-A*11:01; PNLDC1; ENSG00000146453; TAA
RSQFLLLTNK

SEQ ID NO: 69769 - protein, 10 aa, Homo sapiens
  misc_feature: Table A; Target 69769; HLA-A*31:01; PNLDC1; ENSG00000146453; TAA
RSQFLLLTNK

SEQ ID NO: 69770 - protein, 10 aa, Homo sapiens
  misc_feature: Table A; Target 69770; HLA-B*27:02; PNLDC1; ENSG00000146453; TAA
RSQFLLLTNK

SEQ ID NO: 69771 - protein, 9 aa, Homo sapiens
  misc_feature: Table A; Target 69771; HLA-A*29:02; PNLDC1; ENSG00000146453; TAA
RVSNLSEVY

SEQ ID NO: 69772 - protein, 9 aa, Homo sapiens
  misc_feature: Table A; Target 69772; HLA-A*30:02; PNLDC1; ENSG00000146453; TAA
RVSNLSEVY

SEQ ID NO: 69773 - protein, 9 aa, Homo sapiens
  misc_feature: Table A; Target 69773; HLA-A*32:01; PNLDC1; ENSG00000146453; TAA
RVSNLSEVY

SEQ ID NO: 69774 - protein, 9 aa, Homo sapiens
  misc_feature: Table A; Target 69774; HLA-B*15:01; PNLDC1; ENSG00000146453; TAA
RVSNLSEVY

SEQ ID NO: 69775 - protein, 9 aa, Homo sapiens
  misc_feature: Table A; Target 69775; HLA-B*15:03; PNLDC1; ENSG00000146453; TAA
RVSNLSEVY

SEQ ID NO: 69776 - protein, 9 aa, Homo sapiens
  misc_feature: Table A; Target 69776; HLA-B*35:01; PNLDC1; ENSG00000146453; TAA
RVSNLSEVY

SEQ ID NO: 69777 - protein, 9 aa, Homo sapiens
  misc_feature: Table A; Target 69777; HLA-B*58:01; PNLDC1; ENSG00000146453; TAA
RVSNLSEVY

SEQ ID NO: 69778 - protein, 11 aa, Homo sapiens
  misc_feature: Table A; Target 69778; HLA-A*24:02; PNLDC1; ENSG00000146453; TAA
RWPGVSEQQVY

SEQ ID NO: 69779 - protein, 9 aa, Homo sapiens
  misc_feature: Table A; Target 69779; HLA-A*03:02; PNLDC1; ENSG00000146453; TAA
SAIEGEANK

SEQ ID NO: 69780 - protein, 9 aa, Homo sapiens
  misc_feature: Table A; Target 69780; HLA-A*11:01; PNLDC1; ENSG00000146453; TAA
SAIEGEANK

SEQ ID NO: 69781 - protein, 9 aa, Homo sapiens
  misc_feature: Table A; Target 69781; HLA-A*33:03; PNLDC1; ENSG00000146453; TAA
SAIEGEANK

SEQ ID NO: 69782 - protein, 9 aa, Homo sapiens
  misc_feature: Table A; Target 69782; HLA-A*68:01; PNLDC1; ENSG00000146453; TAA
SAIEGEANK

SEQ ID NO: 69783 - protein, 9 aa, Homo sapiens
  misc_feature: Table A; Target 69783; HLA-B*27:02; PNLDC1; ENSG00000146453; TAA
SAIEGEANK

SEQ ID NO: 69784 - protein, 9 aa, Homo sapiens
  misc_feature: Table A; Target 69784; HLA-B*27:05; PNLDC1; ENSG00000146453; TAA
SAIEGEANK

SEQ ID NO: 69785 - protein, 9 aa, Homo sapiens
  misc_feature: Table A; Target 69785; HLA-C*01:02; PNLDC1; ENSG00000146453; TAA
SAIEGEANK

SEQ ID NO: 69786 - protein, 9 aa, Homo sapiens
  misc_feature: Table A; Target 69786; HLA-C*03:03; PNLDC1; ENSG00000146453; TAA
SAIEGEANK

SEQ ID NO: 69787 - protein, 9 aa, Homo sapiens
  misc_feature: Table A; Target 69787; HLA-C*07:06; PNLDC1; ENSG00000146453; TAA
SAIEGEANK

SEQ ID NO: 69788 - protein, 9 aa, Homo sapiens
  misc_feature: Table A; Target 69788; HLA-C*16:01; PNLDC1; ENSG00000146453; TAA
SAIEGEANK

SEQ ID NO: 69789 - protein, 10 aa, Homo sapiens
  misc_feature: Table A; Target 69789; HLA-A*01:01; PNLDC1; ENSG00000146453; TAA
SAIEGEANKY

SEQ ID NO: 69790 - protein, 10 aa, Homo sapiens
  misc_feature: Table A; Target 69790; HLA-A*11:01; PNLDC1; ENSG00000146453; TAA
SAIEGEANKY

SEQ ID NO: 69791 - protein, 10 aa, Homo sapiens
  misc_feature: Table A; Target 69791; HLA-A*25:01; PNLDC1; ENSG00000146453; TAA
SAIEGEANKY

SEQ ID NO: 69792 - protein, 10 aa, Homo sapiens
  misc_feature: Table A; Target 69792; HLA-A*26:01; PNLDC1; ENSG00000146453; TAA
SAIEGEANKY

SEQ ID NO: 69793 - protein, 10 aa, Homo sapiens
  misc_feature: Table A; Target 69793; HLA-A*29:02; PNLDC1; ENSG00000146453; TAA
SAIEGEANKY

SEQ ID NO: 69794 - protein, 10 aa, Homo sapiens
  misc_feature: Table A; Target 69794; HLA-A*30:02; PNLDC1; ENSG00000146453; TAA
SAIEGEANKY

SEQ ID NO: 69795 - protein, 10 aa, Homo sapiens
  misc_feature: Table A; Target 69795; HLA-A*32:01; PNLDC1; ENSG00000146453; TAA
SAIEGEANKY

SEQ ID NO: 69796 - protein, 10 aa, Homo sapiens
  misc_feature: Table A; Target 69796; HLA-B*15:01; PNLDC1; ENSG00000146453; TAA
SAIEGEANKY

SEQ ID NO: 69797 - protein, 10 aa, Homo sapiens
  misc_feature: Table A; Target 69797; HLA-B*15:03; PNLDC1; ENSG00000146453; TAA
SAIEGEANKY

SEQ ID NO: 69798 - protein, 10 aa, Homo sapiens
  misc_feature: Table A; Target 69798; HLA-B*27:02; PNLDC1; ENSG00000146453; TAA
SAIEGEANKY

SEQ ID NO: 69799 - protein, 10 aa, Homo sapiens
  misc_feature: Table A; Target 69799; HLA-B*27:05; PNLDC1; ENSG00000146453; TAA
SAIEGEANKY

SEQ ID NO: 69800 - protein, 10 aa, Homo sapiens
  misc_feature: Table A; Target 69800; HLA-B*35:01; PNLDC1; ENSG00000146453; TAA
SAIEGEANKY

SEQ ID NO: 69801 - protein, 10 aa, Homo sapiens
  misc_feature: Table A; Target 69801; HLA-B*38:01; PNLDC1; ENSG00000146453; TAA
SAIEGEANKY

SEQ ID NO: 69802 - protein, 10 aa, Homo sapiens
  misc_feature: Table A; Target 69802; HLA-B*39:01; PNLDC1; ENSG00000146453; TAA
SAIEGEANKY

SEQ ID NO: 69803 - protein, 10 aa, Homo sapiens
  misc_feature: Table A; Target 69803; HLA-B*44:03; PNLDC1; ENSG00000146453; TAA
SAIEGEANKY

SEQ ID NO: 69804 - protein, 10 aa, Homo sapiens
  misc_feature: Table A; Target 69804; HLA-B*46:01; PNLDC1; ENSG00000146453; TAA
SAIEGEANKY

SEQ ID NO: 69805 - protein, 10 aa, Homo sapiens
  misc_feature: Table A; Target 69805; HLA-B*55:01; PNLDC1; ENSG00000146453; TAA
SAIEGEANKY

SEQ ID NO: 69806 - protein, 10 aa, Homo sapiens
  misc_feature: Table A; Target 69806; HLA-B*58:01; PNLDC1; ENSG00000146453; TAA
SAIEGEANKY

SEQ ID NO: 69807 - protein, 10 aa, Homo sapiens
  misc_feature: Table A; Target 69807; HLA-C*01:02; PNLDC1; ENSG00000146453; TAA
SAIEGEANKY

SEQ ID NO: 69808 - protein, 10 aa, Homo sapiens
  misc_feature: Table A; Target 69808; HLA-C*02:02; PNLDC1; ENSG00000146453; TAA
SAIEGEANKY

SEQ ID NO: 69809 - protein, 10 aa, Homo sapiens
  misc_feature: Table A; Target 69809; HLA-C*03:03; PNLDC1; ENSG00000146453; TAA
SAIEGEANKY

SEQ ID NO: 69810 - protein, 10 aa, Homo sapiens
  misc_feature: Table A; Target 69810; HLA-C*03:04; PNLDC1; ENSG00000146453; TAA
SAIEGEANKY

SEQ ID NO: 69811 - protein, 10 aa, Homo sapiens
  misc_feature: Table A; Target 69811; HLA-C*07:06; PNLDC1; ENSG00000146453; TAA
SAIEGEANKY

SEQ ID NO: 69812 - protein, 10 aa, Homo sapiens
  misc_feature: Table A; Target 69812; HLA-C*12:03; PNLDC1; ENSG00000146453; TAA
SAIEGEANKY

SEQ ID NO: 69813 - protein, 10 aa, Homo sapiens
  misc_feature: Table A; Target 69813; HLA-C*14:02; PNLDC1; ENSG00000146453; TAA
SAIEGEANKY

SEQ ID NO: 69814 - protein, 10 aa, Homo sapiens
  misc_feature: Table A; Target 69814; HLA-C*16:01; PNLDC1; ENSG00000146453; TAA
SAIEGEANKY

SEQ ID NO: 69815 - protein, 10 aa, Homo sapiens
  misc_feature: Table A; Target 69815; HLA-C*16:02; PNLDC1; ENSG00000146453; TAA
SAIEGEANKY

SEQ ID NO: 69816 - protein, 10 aa, Homo sapiens
  misc_feature: Table A; Target 69816; HLA-C*16:04; PNLDC1; ENSG00000146453; TAA
SAIEGEANKY

SEQ ID NO: 69817 - protein, 11 aa, Homo sapiens
  misc_feature: Table A; Target 69817; HLA-C*12:03; PNLDC1; ENSG00000146453; TAA
SAIEGEANKYI

SEQ ID NO: 69818 - protein, 11 aa, Homo sapiens
  misc_feature: Table A; Target 69818; HLA-C*16:02; PNLDC1; ENSG00000146453; TAA
SAIEGEANKYI

SEQ ID NO: 69819 - protein, 8 aa, Homo sapiens
  misc_feature: Table A; Target 69819; HLA-B*08:01; PNLDC1; ENSG00000146453; TAA
SARGFSVF

SEQ ID NO: 69820 - protein, 8 aa, Homo sapiens
  misc_feature: Table A; Target 69820; HLA-B*46:01; PNLDC1; ENSG00000146453; TAA
SARGFSVF

SEQ ID NO: 69821 - protein, 9 aa, Homo sapiens
  misc_feature: Table A; Target 69821; HLA-A*31:01; PNLDC1; ENSG00000146453; TAA
SARGFSVFF

SEQ ID NO: 69822 - protein, 9 aa, Homo sapiens
  misc_feature: Table A; Target 69822; HLA-B*57:01; PNLDC1; ENSG00000146453; TAA
SARGFSVFF

SEQ ID NO: 69823 - protein, 9 aa, Homo sapiens
  misc_feature: Table A; Target 69823; HLA-C*02:02; PNLDC1; ENSG00000146453; TAA
SARGFSVFF

SEQ ID NO: 69824 - protein, 8 aa, Homo sapiens
  misc_feature: Table A; Target 69824; HLA-B*18:01; PNLDC1; ENSG00000146453; TAA
SEFSFQAS

SEQ ID NO: 69825 - protein, 8 aa, Homo sapiens
  misc_feature: Table A; Target 69825; HLA-B*49:01; PNLDC1; ENSG00000146453; TAA
SEFSFQAS

SEQ ID NO: 69826 - protein, 9 aa, Homo sapiens
  misc_feature: Table A; Target 69826; HLA-B*49:01; PNLDC1; ENSG00000146453; TAA
SEFSFQASS

SEQ ID NO: 69827 - protein, 10 aa, Homo sapiens
  misc_feature: Table A; Target 69827; HLA-A*30:01; PNLDC1; ENSG00000146453; TAA
SEFSFQASSV

SEQ ID NO: 69828 - protein, 10 aa, Homo sapiens
  misc_feature: Table A; Target 69828; HLA-B*13:02; PNLDC1; ENSG00000146453; TAA
SEFSFQASSV

SEQ ID NO: 69829 - protein, 10 aa, Homo sapiens
  misc_feature: Table A; Target 69829; HLA-B*18:01; PNLDC1; ENSG00000146453; TAA
SEFSFQASSV

SEQ ID NO: 69830 - protein, 10 aa, Homo sapiens
  misc_feature: Table A; Target 69830; HLA-B*40:01; PNLDC1; ENSG00000146453; TAA
SEFSFQASSV

SEQ ID NO: 69831 - protein, 10 aa, Homo sapiens
  misc_feature: Table A; Target 69831; HLA-B*40:02; PNLDC1; ENSG00000146453; TAA
SEFSFQASSV

SEQ ID NO: 69832 - protein, 10 aa, Homo sapiens
  misc_feature: Table A; Target 69832; HLA-B*44:03; PNLDC1; ENSG00000146453; TAA
SEFSFQASSV

SEQ ID NO: 69833 - protein, 10 aa, Homo sapiens
  misc_feature: Table A; Target 69833; HLA-B*49:01; PNLDC1; ENSG00000146453; TAA
SEFSFQASSV

SEQ ID NO: 69834 - protein, 10 aa, Homo sapiens
  misc_feature: Table A; Target 69834; HLA-C*02:02; PNLDC1; ENSG00000146453; TAA
SEFSFQASSV

SEQ ID NO: 69835 - protein, 10 aa, Homo sapiens
  misc_feature: Table A; Target 69835; HLA-C*12:03; PNLDC1; ENSG00000146453; TAA
SEFSFQASSV

SEQ ID NO: 69836 - protein, 10 aa, Homo sapiens
  misc_feature: Table A; Target 69836; HLA-C*16:04; PNLDC1; ENSG00000146453; TAA
SEFSFQASSV

SEQ ID NO: 69837 - protein, 9 aa, Homo sapiens
  misc_feature: Table A; Target 69837; HLA-A*30:01; PNLDC1; ENSG00000146453; TAA
SEQQVYHKF

SEQ ID NO: 69838 - protein, 9 aa, Homo sapiens
  misc_feature: Table A; Target 69838; HLA-A*30:02; PNLDC1; ENSG00000146453; TAA
SEQQVYHKF

SEQ ID NO: 69839 - protein, 9 aa, Homo sapiens
  misc_feature: Table A; Target 69839; HLA-B*18:01; PNLDC1; ENSG00000146453; TAA
SEQQVYHKF

SEQ ID NO: 69840 - protein, 9 aa, Homo sapiens
  misc_feature: Table A; Target 69840; HLA-B*27:02; PNLDC1; ENSG00000146453; TAA
SEQQVYHKF

SEQ ID NO: 69841 - protein, 9 aa, Homo sapiens
  misc_feature: Table A; Target 69841; HLA-B*37:01; PNLDC1; ENSG00000146453; TAA
SEQQVYHKF

SEQ ID NO: 69842 - protein, 9 aa, Homo sapiens
  misc_feature: Table A; Target 69842; HLA-B*40:01; PNLDC1; ENSG00000146453; TAA
SEQQVYHKF

SEQ ID NO: 69843 - protein, 9 aa, Homo sapiens
  misc_feature: Table A; Target 69843; HLA-B*44:02; PNLDC1; ENSG00000146453; TAA
SEQQVYHKF

SEQ ID NO: 69844 - protein, 9 aa, Homo sapiens
  misc_feature: Table A; Target 69844; HLA-B*44:03; PNLDC1; ENSG00000146453; TAA
SEQQVYHKF

SEQ ID NO: 69845 - protein, 9 aa, Homo sapiens
  misc_feature: Table A; Target 69845; HLA-C*16:04; PNLDC1; ENSG00000146453; TAA
SEQQVYHKF

SEQ ID NO: 69846 - protein, 11 aa, Homo sapiens
  misc_feature: Table A; Target 69846; HLA-A*30:01; PNLDC1; ENSG00000146453; TAA
SEVYEVLNSDL

SEQ ID NO: 69847 - protein, 11 aa, Homo sapiens
  misc_feature: Table A; Target 69847; HLA-B*40:01; PNLDC1; ENSG00000146453; TAA
SEVYEVLNSDL

SEQ ID NO: 69848 - protein, 9 aa, Homo sapiens
  misc_feature: Table A; Target 69848; HLA-A*23:01; PNLDC1; ENSG00000146453; TAA
SFQASSVQF

SEQ ID NO: 69849 - protein, 9 aa, Homo sapiens
  misc_feature: Table A; Target 69849; HLA-A*24:02; PNLDC1; ENSG00000146453; TAA
SFQASSVQF

SEQ ID NO: 69850 - protein, 9 aa, Homo sapiens
  misc_feature: Table A; Target 69850; HLA-A*29:02; PNLDC1; ENSG00000146453; TAA
SFQASSVQF

SEQ ID NO: 69851 - protein, 9 aa, Homo sapiens
  misc_feature: Table A; Target 69851; HLA-B*15:01; PNLDC1; ENSG00000146453; TAA
SFQASSVQF

SEQ ID NO: 69852 - protein, 9 aa, Homo sapiens
  misc_feature: Table A; Target 69852; HLA-B*15:03; PNLDC1; ENSG00000146453; TAA
SFQASSVQF

SEQ ID NO: 69853 - protein, 9 aa, Homo sapiens
  misc_feature: Table A; Target 69853; HLA-C*01:02; PNLDC1; ENSG00000146453; TAA
SFQASSVQF

SEQ ID NO: 69854 - protein, 9 aa, Homo sapiens
  misc_feature: Table A; Target 69854; HLA-C*04:01; PNLDC1; ENSG00000146453; TAA
SFQASSVQF

SEQ ID NO: 69855 - protein, 9 aa, Homo sapiens
  misc_feature: Table A; Target 69855; HLA-C*07:04; PNLDC1; ENSG00000146453; TAA
SFQASSVQF

SEQ ID NO: 69856 - protein, 9 aa, Homo sapiens
  misc_feature: Table A; Target 69856; HLA-C*14:02; PNLDC1; ENSG00000146453; TAA
SFQASSVQF

SEQ ID NO: 69857 - protein, 8 aa, Homo sapiens
  misc_feature: Table A; Target 69857; HLA-B*51:01; PNLDC1; ENSG00000146453; TAA
SGPDYPSI

SEQ ID NO: 69858 - protein, 10 aa, Homo sapiens
  misc_feature: Table A; Target 69858; HLA-A*31:01; PNLDC1; ENSG00000146453; TAA
SGPEIVHASR

SEQ ID NO: 69859 - protein, 10 aa, Homo sapiens
  misc_feature: Table A; Target 69859; HLA-A*33:01; PNLDC1; ENSG00000146453; TAA
SGPEIVHASR

SEQ ID NO: 69860 - protein, 10 aa, Homo sapiens
  misc_feature: Table A; Target 69860; HLA-A*33:03; PNLDC1; ENSG00000146453; TAA
SGPEIVHASR

SEQ ID NO: 69861 - protein, 10 aa, Homo sapiens
  misc_feature: Table A; Target 69861; HLA-A*68:01; PNLDC1; ENSG00000146453; TAA
SGPEIVHASR

SEQ ID NO: 69862 - protein, 10 aa, Homo sapiens
  misc_feature: Table A; Target 69862; HLA-C*07:06; PNLDC1; ENSG00000146453; TAA
SGPEIVHASR

SEQ ID NO: 69863 - protein, 8 aa, Homo sapiens
  misc_feature: Table A; Target 69863; HLA-C*01:02; PNLDC1; ENSG00000146453; TAA
SGPQQISL

SEQ ID NO: 69864 - protein, 9 aa, Homo sapiens
  misc_feature: Table A; Target 69864; HLA-A*02:03; PNLDC1; ENSG00000146453; TAA
SIRPPILIL

SEQ ID NO: 69865 - protein, 9 aa, Homo sapiens
  misc_feature: Table A; Target 69865; HLA-A*02:04; PNLDC1; ENSG00000146453; TAA
SIRPPILIL

SEQ ID NO: 69866 - protein, 11 aa, Homo sapiens
  misc_feature: Table A; Target 69866; HLA-A*02:03; PNLDC1; ENSG00000146453; TAA
SIRPPILILSV

SEQ ID NO: 69867 - protein, 9 aa, Homo sapiens
  misc_feature: Table A; Target 69867; HLA-A*02:03; PNLDC1; ENSG00000146453; TAA
SLFDLPSEW

SEQ ID NO: 69868 - protein, 9 aa, Homo sapiens
  misc_feature: Table A; Target 69868; HLA-A*02:04; PNLDC1; ENSG00000146453; TAA
SLFDLPSEW

SEQ ID NO: 69869 - protein, 9 aa, Homo sapiens
  misc_feature: Table A; Target 69869; HLA-A*25:01; PNLDC1; ENSG00000146453; TAA
SLFDLPSEW

SEQ ID NO: 69870 - protein, 9 aa, Homo sapiens
  misc_feature: Table A; Target 69870; HLA-A*26:01; PNLDC1; ENSG00000146453; TAA
SLFDLPSEW

SEQ ID NO: 69871 - protein, 9 aa, Homo sapiens
  misc_feature: Table A; Target 69871; HLA-A*29:02; PNLDC1; ENSG00000146453; TAA
SLFDLPSEW

SEQ ID NO: 69872 - protein, 9 aa, Homo sapiens
  misc_feature: Table A; Target 69872; HLA-A*32:01; PNLDC1; ENSG00000146453; TAA
SLFDLPSEW

SEQ ID NO: 69873 - protein, 9 aa, Homo sapiens
  misc_feature: Table A; Target 69873; HLA-B*13:02; PNLDC1; ENSG00000146453; TAA
SLFDLPSEW

SEQ ID NO: 69874 - protein, 9 aa, Homo sapiens
  misc_feature: Table A; Target 69874; HLA-B*44:02; PNLDC1; ENSG00000146453; TAA
SLFDLPSEW

SEQ ID NO: 69875 - protein, 9 aa, Homo sapiens
  misc_feature: Table A; Target 69875; HLA-B*44:03; PNLDC1; ENSG00000146453; TAA
SLFDLPSEW

SEQ ID NO: 69876 - protein, 9 aa, Homo sapiens
  misc_feature: Table A; Target 69876; HLA-B*57:01; PNLDC1; ENSG00000146453; TAA
SLFDLPSEW

SEQ ID NO: 69877 - protein, 9 aa, Homo sapiens
  misc_feature: Table A; Target 69877; HLA-B*58:01; PNLDC1; ENSG00000146453; TAA
SLFDLPSEW

SEQ ID NO: 69878 - protein, 9 aa, Homo sapiens
  misc_feature: Table A; Target 69878; HLA-C*02:02; PNLDC1; ENSG00000146453; TAA
SLFDLPSEW

SEQ ID NO: 69879 - protein, 9 aa, Homo sapiens
  misc_feature: Table A; Target 69879; HLA-C*16:04; PNLDC1; ENSG00000146453; TAA
SLFDLPSEW

SEQ ID NO: 69880 - protein, 10 aa, Homo sapiens
  misc_feature: Table A; Target 69880; HLA-A*29:02; PNLDC1; ENSG00000146453; TAA
SLFDLPSEWY

SEQ ID NO: 69881 - protein, 11 aa, Homo sapiens
  misc_feature: Table A; Target 69881; HLA-A*02:01; PNLDC1; ENSG00000146453; TAA
SLFDLPSEWYL

SEQ ID NO: 69882 - protein, 11 aa, Homo sapiens
  misc_feature: Table A; Target 69882; HLA-A*02:03; PNLDC1; ENSG00000146453; TAA
SLFDLPSEWYL

SEQ ID NO: 69883 - protein, 11 aa, Homo sapiens
  misc_feature: Table A; Target 69883; HLA-A*02:04; PNLDC1; ENSG00000146453; TAA
SLFDLPSEWYL

SEQ ID NO: 69884 - protein, 11 aa, Homo sapiens
  misc_feature: Table A; Target 69884; HLA-A*02:07; PNLDC1; ENSG00000146453; TAA
SLFDLPSEWYL

SEQ ID NO: 69885 - protein, 9 aa, Homo sapiens
  misc_feature: Table A; Target 69885; HLA-A*02:01; PNLDC1; ENSG00000146453; TAA
SLFPVLIDT

SEQ ID NO: 69886 - protein, 9 aa, Homo sapiens
  misc_feature: Table A; Target 69886; HLA-A*02:03; PNLDC1; ENSG00000146453; TAA
SLFPVLIDT

SEQ ID NO: 69887 - protein, 9 aa, Homo sapiens
  misc_feature: Table A; Target 69887; HLA-A*02:04; PNLDC1; ENSG00000146453; TAA
SLFPVLIDT

SEQ ID NO: 69888 - protein, 10 aa, Homo sapiens
  misc_feature: Table A; Target 69888; HLA-A*03:01; PNLDC1; ENSG00000146453; TAA
SLFPVLIDTK

SEQ ID NO: 69889 - protein, 10 aa, Homo sapiens
  misc_feature: Table A; Target 69889; HLA-A*03:02; PNLDC1; ENSG00000146453; TAA
SLFPVLIDTK

SEQ ID NO: 69890 - protein, 10 aa, Homo sapiens
  misc_feature: Table A; Target 69890; HLA-A*11:01; PNLDC1; ENSG00000146453; TAA
SLFPVLIDTK

SEQ ID NO: 69891 - protein, 10 aa, Homo sapiens
  misc_feature: Table A; Target 69891; HLA-B*27:02; PNLDC1; ENSG00000146453; TAA
SLFPVLIDTK

SEQ ID NO: 69892 - protein, 9 aa, Homo sapiens
  misc_feature: Table A; Target 69892; HLA-A*02:01; PNLDC1; ENSG00000146453; TAA
SNLSEVYEV

SEQ ID NO: 69893 - protein, 9 aa, Homo sapiens
  misc_feature: Table A; Target 69893; HLA-B*13:02; PNLDC1; ENSG00000146453; TAA
SNLSGPQQI

SEQ ID NO: 69894 - protein, 9 aa, Homo sapiens
  misc_feature: Table A; Target 69894; HLA-B*35:03; PNLDC1; ENSG00000146453; TAA
SPDKDQIKV

SEQ ID NO: 69895 - protein, 9 aa, Homo sapiens
  misc_feature: Table A; Target 69895; HLA-B*55:01; PNLDC1; ENSG00000146453; TAA
SPDKDQIKV

SEQ ID NO: 69896 - protein, 9 aa, Homo sapiens
  misc_feature: Table A; Target 69896; HLA-C*05:01; PNLDC1; ENSG00000146453; TAA
SPDKDQIKV

SEQ ID NO: 69897 - protein, 9 aa, Homo sapiens
  misc_feature: Table A; Target 69897; HLA-C*07:02; PNLDC1; ENSG00000146453; TAA
SPDKDQIKV

SEQ ID NO: 69898 - protein, 10 aa, Homo sapiens
  misc_feature: Table A; Target 69898; HLA-B*07:02; PNLDC1; ENSG00000146453; TAA
SPDKDQIKVV

SEQ ID NO: 69899 - protein, 10 aa, Homo sapiens
  misc_feature: Table A; Target 69899; HLA-C*07:02; PNLDC1; ENSG00000146453; TAA
SPDKDQIKVV

SEQ ID NO: 69900 - protein, 8 aa, Homo sapiens
  misc_feature: Table A; Target 69900; HLA-B*07:02; PNLDC1; ENSG00000146453; TAA
SPNVNCLL

SEQ ID NO: 69901 - protein, 9 aa, Homo sapiens
  misc_feature: Table A; Target 69901; HLA-A*03:01; PNLDC1; ENSG00000146453; TAA
SQFLLLTNK

SEQ ID NO: 69902 - protein, 9 aa, Homo sapiens
  misc_feature: Table A; Target 69902; HLA-A*03:02; PNLDC1; ENSG00000146453; TAA
SQFLLLTNK

SEQ ID NO: 69903 - protein, 9 aa, Homo sapiens
  misc_feature: Table A; Target 69903; HLA-A*11:01; PNLDC1; ENSG00000146453; TAA
SQFLLLTNK

SEQ ID NO: 69904 - protein, 9 aa, Homo sapiens
  misc_feature: Table A; Target 69904; HLA-A*31:01; PNLDC1; ENSG00000146453; TAA
SQFLLLTNK

SEQ ID NO: 69905 - protein, 9 aa, Homo sapiens
  misc_feature: Table A; Target 69905; HLA-B*13:02; PNLDC1; ENSG00000146453; TAA
SQFLLLTNK

SEQ ID NO: 69906 - protein, 9 aa, Homo sapiens
  misc_feature: Table A; Target 69906; HLA-B*27:02; PNLDC1; ENSG00000146453; TAA
SQFLLLTNK

SEQ ID NO: 69907 - protein, 9 aa, Homo sapiens
  misc_feature: Table A; Target 69907; HLA-B*27:05; PNLDC1; ENSG00000146453; TAA
SQFLLLTNK

SEQ ID NO: 69908 - protein, 9 aa, Homo sapiens
  misc_feature: Table A; Target 69908; HLA-C*07:06; PNLDC1; ENSG00000146453; TAA
SQFLLLTNK

SEQ ID NO: 69909 - protein, 10 aa, Homo sapiens
  misc_feature: Table A; Target 69909; HLA-B*15:01; PNLDC1; ENSG00000146453; TAA
SQFLLLTNKF

SEQ ID NO: 69910 - protein, 10 aa, Homo sapiens
  misc_feature: Table A; Target 69910; HLA-B*44:02; PNLDC1; ENSG00000146453; TAA
SQFLLLTNKF

SEQ ID NO: 69911 - protein, 10 aa, Homo sapiens
  misc_feature: Table A; Target 69911; HLA-B*44:03; PNLDC1; ENSG00000146453; TAA
SQFLLLTNKF

SEQ ID NO: 69912 - protein, 10 aa, Homo sapiens
  misc_feature: Table A; Target 69912; HLA-C*02:02; PNLDC1; ENSG00000146453; TAA
SQFLLLTNKF

SEQ ID NO: 69913 - protein, 10 aa, Homo sapiens
  misc_feature: Table A; Target 69913; HLA-C*16:04; PNLDC1; ENSG00000146453; TAA
SQFLLLTNKF

SEQ ID NO: 69914 - protein, 9 aa, Homo sapiens
  misc_feature: Table A; Target 69914; HLA-C*16:04; PNLDC1; ENSG00000146453; TAA
SSFPQYLDV

SEQ ID NO: 69915 - protein, 9 aa, Homo sapiens
  misc_feature: Table A; Target 69915; HLA-A*01:01; PNLDC1; ENSG00000146453; TAA
SSVQFLNQY

SEQ ID NO: 69916 - protein, 9 aa, Homo sapiens
  misc_feature: Table A; Target 69916; HLA-A*25:01; PNLDC1; ENSG00000146453; TAA
SSVQFLNQY

SEQ ID NO: 69917 - protein, 9 aa, Homo sapiens
  misc_feature: Table A; Target 69917; HLA-A*26:01; PNLDC1; ENSG00000146453; TAA
SSVQFLNQY

SEQ ID NO: 69918 - protein, 9 aa, Homo sapiens
  misc_feature: Table A; Target 69918; HLA-A*29:02; PNLDC1; ENSG00000146453; TAA
SSVQFLNQY

SEQ ID NO: 69919 - protein, 9 aa, Homo sapiens
  misc_feature: Table A; Target 69919; HLA-A*30:02; PNLDC1; ENSG00000146453; TAA
SSVQFLNQY

SEQ ID NO: 69920 - protein, 9 aa, Homo sapiens
  misc_feature: Table A; Target 69920; HLA-A*32:01; PNLDC1; ENSG00000146453; TAA
SSVQFLNQY

SEQ ID NO: 69921 - protein, 9 aa, Homo sapiens
  misc_feature: Table A; Target 69921; HLA-B*15:01; PNLDC1; ENSG00000146453; TAA
SSVQFLNQY

SEQ ID NO: 69922 - protein, 9 aa, Homo sapiens
  misc_feature: Table A; Target 69922; HLA-B*15:03; PNLDC1; ENSG00000146453; TAA
SSVQFLNQY

SEQ ID NO: 69923 - protein, 9 aa, Homo sapiens
  misc_feature: Table A; Target 69923; HLA-B*18:01; PNLDC1; ENSG00000146453; TAA
SSVQFLNQY

SEQ ID NO: 69924 - protein, 9 aa, Homo sapiens
  misc_feature: Table A; Target 69924; HLA-B*44:03; PNLDC1; ENSG00000146453; TAA
SSVQFLNQY

SEQ ID NO: 69925 - protein, 9 aa, Homo sapiens
  misc_feature: Table A; Target 69925; HLA-B*46:01; PNLDC1; ENSG00000146453; TAA
SSVQFLNQY

SEQ ID NO: 69926 - protein, 9 aa, Homo sapiens
  misc_feature: Table A; Target 69926; HLA-B*58:01; PNLDC1; ENSG00000146453; TAA
SSVQFLNQY

SEQ ID NO: 69927 - protein, 9 aa, Homo sapiens
  misc_feature: Table A; Target 69927; HLA-C*02:02; PNLDC1; ENSG00000146453; TAA
SSVQFLNQY

SEQ ID NO: 69928 - protein, 9 aa, Homo sapiens
  misc_feature: Table A; Target 69928; HLA-C*16:01; PNLDC1; ENSG00000146453; TAA
SSVQFLNQY

SEQ ID NO: 69929 - protein, 9 aa, Homo sapiens
  misc_feature: Table A; Target 69929; HLA-C*16:04; PNLDC1; ENSG00000146453; TAA
SSVQFLNQY

SEQ ID NO: 69930 - protein, 8 aa, Homo sapiens
  misc_feature: Table A; Target 69930; HLA-A*68:02; PNLDC1; ENSG00000146453; TAA
SVFFQMLV

SEQ ID NO: 69931 - protein, 9 aa, Homo sapiens
  misc_feature: Table A; Target 69931; HLA-A*03:01; PNLDC1; ENSG00000146453; TAA
SVFFQMLVK

SEQ ID NO: 69932 - protein, 9 aa, Homo sapiens
  misc_feature: Table A; Target 69932; HLA-A*03:02; PNLDC1; ENSG00000146453; TAA
SVFFQMLVK

SEQ ID NO: 69933 - protein, 9 aa, Homo sapiens
  misc_feature: Table A; Target 69933; HLA-A*11:01; PNLDC1; ENSG00000146453; TAA
SVFFQMLVK

SEQ ID NO: 69934 - protein, 10 aa, Homo sapiens
  misc_feature: Table A; Target 69934; HLA-A*68:02; PNLDC1; ENSG00000146453; TAA
SVFFQMLVKA

SEQ ID NO: 69935 - protein, 10 aa, Homo sapiens
  misc_feature: Table A; Target 69935; HLA-B*56:01; PNLDC1; ENSG00000146453; TAA
SVFSAIEGEA

SEQ ID NO: 69936 - protein, 9 aa, Homo sapiens
  misc_feature: Table A; Target 69936; HLA-A*02:04; PNLDC1; ENSG00000146453; TAA
SVLLKVAHL

SEQ ID NO: 69937 - protein, 9 aa, Homo sapiens
  misc_feature: Table A; Target 69937; HLA-B*08:01; PNLDC1; ENSG00000146453; TAA
SVLLKVAHL

SEQ ID NO: 69938 - protein, 8 aa, Homo sapiens
  misc_feature: Table A; Target 69938; HLA-A*30:02; PNLDC1; ENSG00000146453; TAA
SVQFLNQY

SEQ ID NO: 69939 - protein, 8 aa, Homo sapiens
  misc_feature: Table A; Target 69939; HLA-B*15:01; PNLDC1; ENSG00000146453; TAA
SVQFLNQY

SEQ ID NO: 69940 - protein, 8 aa, Homo sapiens
  misc_feature: Table A; Target 69940; HLA-C*16:02; PNLDC1; ENSG00000146453; TAA
SVQFLNQY

SEQ ID NO: 69941 - protein, 9 aa, Homo sapiens
  misc_feature: Table A; Target 69941; HLA-A*23:01; PNLDC1; ENSG00000146453; TAA
SYDQFKQNI

SEQ ID NO: 69942 - protein, 9 aa, Homo sapiens
  misc_feature: Table A; Target 69942; HLA-A*24:02; PNLDC1; ENSG00000146453; TAA
SYDQFKQNI

SEQ ID NO: 69943 - protein, 9 aa, Homo sapiens
  misc_feature: Table A; Target 69943; HLA-B*35:03; PNLDC1; ENSG00000146453; TAA
SYDQFKQNI

SEQ ID NO: 69944 - protein, 9 aa, Homo sapiens
  misc_feature: Table A; Target 69944; HLA-B*38:01; PNLDC1; ENSG00000146453; TAA
SYDQFKQNI

SEQ ID NO: 69945 - protein, 9 aa, Homo sapiens
  misc_feature: Table A; Target 69945; HLA-C*04:01; PNLDC1; ENSG00000146453; TAA
SYDQFKQNI

SEQ ID NO: 69946 - protein, 9 aa, Homo sapiens
  misc_feature: Table A; Target 69946; HLA-B*51:01; PNLDC1; ENSG00000146453; TAA
TAWALLAFI

SEQ ID NO: 69947 - protein, 8 aa, Homo sapiens
  misc_feature: Table A; Target 69947; HLA-B*13:02; PNLDC1; ENSG00000146453; TAA
TGFQAFEV

SEQ ID NO: 69948 - protein, 8 aa, Homo sapiens
  misc_feature: Table A; Target 69948; HLA-B*51:01; PNLDC1; ENSG00000146453; TAA
TGFQAFEV

SEQ ID NO: 69949 - protein, 9 aa, Homo sapiens
  misc_feature: Table A; Target 69949; HLA-B*15:03; PNLDC1; ENSG00000146453; TAA
TKCPHEAAY

SEQ ID NO: 69950 - protein, 10 aa, Homo sapiens
  misc_feature: Table A; Target 69950; HLA-A*02:07; PNLDC1; ENSG00000146453; TAA
TLPGITGFQA

SEQ ID NO: 69951 - protein, 11 aa, Homo sapiens
  misc_feature: Table A; Target 69951; HLA-A*02:07; PNLDC1; ENSG00000146453; TAA
TLPGITGFQAF

SEQ ID NO: 69952 - protein, 11 aa, Homo sapiens
  misc_feature: Table A; Target 69952; HLA-A*24:02; PNLDC1; ENSG00000146453; TAA
TLPGITGFQAF

SEQ ID NO: 69953 - protein, 8 aa, Homo sapiens
  misc_feature: Table A; Target 69953; HLA-B*27:05; PNLDC1; ENSG00000146453; TAA
TRQSVQQF

SEQ ID NO: 69954 - protein, 8 aa, Homo sapiens
  misc_feature: Table A; Target 69954; HLA-B*37:01; PNLDC1; ENSG00000146453; TAA
TRQSVQQF

SEQ ID NO: 69955 - protein, 8 aa, Homo sapiens
  misc_feature: Table A; Target 69955; HLA-B*39:01; PNLDC1; ENSG00000146453; TAA
TRQSVQQF

SEQ ID NO: 69956 - protein, 9 aa, Homo sapiens
  misc_feature: Table A; Target 69956; HLA-C*06:02; PNLDC1; ENSG00000146453; TAA
TRQSVQQFT

SEQ ID NO: 69957 - protein, 10 aa, Homo sapiens
  misc_feature: Table A; Target 69957; HLA-B*27:05; PNLDC1; ENSG00000146453; TAA
TRQSVQQFTV

SEQ ID NO: 69958 - protein, 10 aa, Homo sapiens
  misc_feature: Table A; Target 69958; HLA-A*25:01; PNLDC1; ENSG00000146453; TAA
TTFGILDSEF

SEQ ID NO: 69959 - protein, 10 aa, Homo sapiens
  misc_feature: Table A; Target 69959; HLA-A*26:01; PNLDC1; ENSG00000146453; TAA
TTFGILDSEF

SEQ ID NO: 69960 - protein, 10 aa, Homo sapiens
  misc_feature: Table A; Target 69960; HLA-A*68:02; PNLDC1; ENSG00000146453; TAA
TTFGILDSEF

SEQ ID NO: 69961 - protein, 9 aa, Homo sapiens
  misc_feature: Table A; Target 69961; HLA-A*26:01; PNLDC1; ENSG00000146453; TAA
TVCQIGLSV

SEQ ID NO: 69962 - protein, 9 aa, Homo sapiens
  misc_feature: Table A; Target 69962; HLA-A*68:02; PNLDC1; ENSG00000146453; TAA
TVCQIGLSV

SEQ ID NO: 69963 - protein, 9 aa, Homo sapiens
  misc_feature: Table A; Target 69963; HLA-B*13:02; PNLDC1; ENSG00000146453; TAA
TVCQIGLSV

SEQ ID NO: 69964 - protein, 10 aa, Homo sapiens
  misc_feature: Table A; Target 69964; HLA-A*25:01; PNLDC1; ENSG00000146453; TAA
TVCQIGLSVF

SEQ ID NO: 69965 - protein, 10 aa, Homo sapiens
  misc_feature: Table A; Target 69965; HLA-A*26:01; PNLDC1; ENSG00000146453; TAA
TVCQIGLSVF

SEQ ID NO: 69966 - protein, 10 aa, Homo sapiens
  misc_feature: Table A; Target 69966; HLA-C*07:04; PNLDC1; ENSG00000146453; TAA
TVCQIGLSVF

SEQ ID NO: 69967 - protein, 11 aa, Homo sapiens
  misc_feature: Table A; Target 69967; HLA-A*03:01; PNLDC1; ENSG00000146453; TAA
TVLKDEGVVVK

SEQ ID NO: 69968 - protein, 11 aa, Homo sapiens
  misc_feature: Table A; Target 69968; HLA-A*03:02; PNLDC1; ENSG00000146453; TAA
TVLKDEGVVVK

SEQ ID NO: 69969 - protein, 11 aa, Homo sapiens
  misc_feature: Table A; Target 69969; HLA-A*11:01; PNLDC1; ENSG00000146453; TAA
TVLKDEGVVVK

SEQ ID NO: 69970 - protein, 11 aa, Homo sapiens
  misc_feature: Table A; Target 69970; HLA-A*31:01; PNLDC1; ENSG00000146453; TAA
TVLKDEGVVVK

SEQ ID NO: 69971 - protein, 11 aa, Homo sapiens
  misc_feature: Table A; Target 69971; HLA-A*68:01; PNLDC1; ENSG00000146453; TAA
TVLKDEGVVVK

SEQ ID NO: 69972 - protein, 11 aa, Homo sapiens
  misc_feature: Table A; Target 69972; HLA-C*07:06; PNLDC1; ENSG00000146453; TAA
TVLKDEGVVVK

SEQ ID NO: 69973 - protein, 9 aa, Homo sapiens
  misc_feature: Table A; Target 69973; HLA-B*13:02; PNLDC1; ENSG00000146453; TAA
VAHLLLQKI

SEQ ID NO: 69974 - protein, 9 aa, Homo sapiens
  misc_feature: Table A; Target 69974; HLA-B*51:01; PNLDC1; ENSG00000146453; TAA
VAHLLLQKI

SEQ ID NO: 69975 - protein, 9 aa, Homo sapiens
  misc_feature: Table A; Target 69975; HLA-B*15:01; PNLDC1; ENSG00000146453; TAA
VCQIGLSVF

SEQ ID NO: 69976 - protein, 9 aa, Homo sapiens
  misc_feature: Table A; Target 69976; HLA-B*46:01; PNLDC1; ENSG00000146453; TAA
VCQIGLSVF

SEQ ID NO: 69977 - protein, 9 aa, Homo sapiens
  misc_feature: Table A; Target 69977; HLA-C*04:01; PNLDC1; ENSG00000146453; TAA
VCQIGLSVF

SEQ ID NO: 69978 - protein, 10 aa, Homo sapiens
  misc_feature: Table A; Target 69978; HLA-C*07:01; PNLDC1; ENSG00000146453; TAA
VCQIGLSVFS

SEQ ID NO: 69979 - protein, 9 aa, Homo sapiens
  misc_feature: Table A; Target 69979; HLA-C*14:02; PNLDC1; ENSG00000146453; TAA
VFSAIEGEA

SEQ ID NO: 69980 - protein, 11 aa, Homo sapiens
  misc_feature: Table A; Target 69980; HLA-B*27:02; PNLDC1; ENSG00000146453; TAA
VFSAIEGEANK

SEQ ID NO: 69981 - protein, 8 aa, Homo sapiens
  misc_feature: Table A; Target 69981; HLA-C*05:01; PNLDC1; ENSG00000146453; TAA
VIDEVTRW

SEQ ID NO: 69982 - protein, 9 aa, Homo sapiens
  misc_feature: Table A; Target 69982; HLA-A*02:07; PNLDC1; ENSG00000146453; TAA
VIDEVTRWL

SEQ ID NO: 69983 - protein, 11 aa, Homo sapiens
  misc_feature: Table A; Target 69983; HLA-A*02:07; PNLDC1; ENSG00000146453; TAA
VIDEVTRWLEL

SEQ ID NO: 69984 - protein, 9 aa, Homo sapiens
  misc_feature: Table A; Target 69984; HLA-A*02:01; PNLDC1; ENSG00000146453; TAA
VLAPYVNQV

SEQ ID NO: 69985 - protein, 9 aa, Homo sapiens
  misc_feature: Table A; Target 69985; HLA-A*02:03; PNLDC1; ENSG00000146453; TAA
VLAPYVNQV

SEQ ID NO: 69986 - protein, 9 aa, Homo sapiens
  misc_feature: Table A; Target 69986; HLA-A*02:04; PNLDC1; ENSG00000146453; TAA
VLAPYVNQV

SEQ ID NO: 69987 - protein, 9 aa, Homo sapiens
  misc_feature: Table A; Target 69987; HLA-A*02:07; PNLDC1; ENSG00000146453; TAA
VLAPYVNQV

SEQ ID NO: 69988 - protein, 9 aa, Homo sapiens
  misc_feature: Table A; Target 69988; HLA-A*03:01; PNLDC1; ENSG00000146453; TAA
VLAPYVNQV

SEQ ID NO: 69989 - protein, 9 aa, Homo sapiens
  misc_feature: Table A; Target 69989; HLA-A*03:02; PNLDC1; ENSG00000146453; TAA
VLAPYVNQV

SEQ ID NO: 69990 - protein, 9 aa, Homo sapiens
  misc_feature: Table A; Target 69990; HLA-A*23:01; PNLDC1; ENSG00000146453; TAA
VLAPYVNQV

SEQ ID NO: 69991 - protein, 9 aa, Homo sapiens
  misc_feature: Table A; Target 69991; HLA-A*24:02; PNLDC1; ENSG00000146453; TAA
VLAPYVNQV

SEQ ID NO: 69992 - protein, 9 aa, Homo sapiens
  misc_feature: Table A; Target 69992; HLA-A*30:01; PNLDC1; ENSG00000146453; TAA
VLAPYVNQV

SEQ ID NO: 69993 - protein, 9 aa, Homo sapiens
  misc_feature: Table A; Target 69993; HLA-A*32:01; PNLDC1; ENSG00000146453; TAA
VLAPYVNQV

SEQ ID NO: 69994 - protein, 9 aa, Homo sapiens
  misc_feature: Table A; Target 69994; HLA-A*68:02; PNLDC1; ENSG00000146453; TAA
VLAPYVNQV

SEQ ID NO: 69995 - protein, 9 aa, Homo sapiens
  misc_feature: Table A; Target 69995; HLA-B*13:02; PNLDC1; ENSG00000146453; TAA
VLAPYVNQV

SEQ ID NO: 69996 - protein, 9 aa, Homo sapiens
  misc_feature: Table A; Target 69996; HLA-B*15:01; PNLDC1; ENSG00000146453; TAA
VLAPYVNQV

SEQ ID NO: 69997 - protein, 9 aa, Homo sapiens
  misc_feature: Table A; Target 69997; HLA-B*27:05; PNLDC1; ENSG00000146453; TAA
VLAPYVNQV

SEQ ID NO: 69998 - protein, 9 aa, Homo sapiens
  misc_feature: Table A; Target 69998; HLA-B*40:02; PNLDC1; ENSG00000146453; TAA
VLAPYVNQV

SEQ ID NO: 69999 - protein, 9 aa, Homo sapiens
  misc_feature: Table A; Target 69999; HLA-B*46:01; PNLDC1; ENSG00000146453; TAA
VLAPYVNQV

SEQ ID NO: 70000 - protein, 9 aa, Homo sapiens
  misc_feature: Table A; Target 70000; HLA-B*49:01; PNLDC1; ENSG00000146453; TAA
VLAPYVNQV

SEQ ID NO: 70001 - protein, 9 aa, Homo sapiens
  misc_feature: Table A; Target 70001; HLA-B*55:01; PNLDC1; ENSG00000146453; TAA
VLAPYVNQV

SEQ ID NO: 70002 - protein, 9 aa, Homo sapiens
  misc_feature: Table A; Target 70002; HLA-C*01:02; PNLDC1; ENSG00000146453; TAA
VLAPYVNQV

SEQ ID NO: 70003 - protein, 9 aa, Homo sapiens
  misc_feature: Table A; Target 70003; HLA-C*02:02; PNLDC1; ENSG00000146453; TAA
VLAPYVNQV

SEQ ID NO: 70004 - protein, 9 aa, Homo sapiens
  misc_feature: Table A; Target 70004; HLA-C*06:02; PNLDC1; ENSG00000146453; TAA
VLAPYVNQV

SEQ ID NO: 70005 - protein, 9 aa, Homo sapiens
  misc_feature: Table A; Target 70005; HLA-C*07:04; PNLDC1; ENSG00000146453; TAA
VLAPYVNQV

SEQ ID NO: 70006 - protein, 9 aa, Homo sapiens
  misc_feature: Table A; Target 70006; HLA-C*12:03; PNLDC1; ENSG00000146453; TAA
VLAPYVNQV

SEQ ID NO: 70007 - protein, 9 aa, Homo sapiens
  misc_feature: Table A; Target 70007; HLA-C*16:02; PNLDC1; ENSG00000146453; TAA
VLAPYVNQV

SEQ ID NO: 70008 - protein, 9 aa, Homo sapiens
  misc_feature: Table A; Target 70008; HLA-C*16:04; PNLDC1; ENSG00000146453; TAA
VLAPYVNQV

SEQ ID NO: 70009 - protein, 10 aa, Homo sapiens
  misc_feature: Table A; Target 70009; HLA-C*06:02; PNLDC1; ENSG00000146453; TAA
VLAPYVNQVN

SEQ ID NO: 70010 - protein, 10 aa, Homo sapiens
  misc_feature: Table A; Target 70010; HLA-C*07:01; PNLDC1; ENSG00000146453; TAA
VLAPYVNQVN

SEQ ID NO: 70011 - protein, 11 aa, Homo sapiens
  misc_feature: Table A; Target 70011; HLA-A*02:01; PNLDC1; ENSG00000146453; TAA
VLAPYVNQVNL

SEQ ID NO: 70012 - protein, 11 aa, Homo sapiens
  misc_feature: Table A; Target 70012; HLA-A*02:04; PNLDC1; ENSG00000146453; TAA
VLAPYVNQVNL

SEQ ID NO: 70013 - protein, 8 aa, Homo sapiens
  misc_feature: Table A; Target 70013; HLA-A*02:03; PNLDC1; ENSG00000146453; TAA
VLIDTKSV

SEQ ID NO: 70014 - protein, 9 aa, Homo sapiens
  misc_feature: Table A; Target 70014; HLA-B*46:01; PNLDC1; ENSG00000146453; TAA
VLIDTKSVT

SEQ ID NO: 70015 - protein, 10 aa, Homo sapiens
  misc_feature: Table A; Target 70015; HLA-A*03:01; PNLDC1; ENSG00000146453; TAA
VLIDTKSVTK

SEQ ID NO: 70016 - protein, 10 aa, Homo sapiens
  misc_feature: Table A; Target 70016; HLA-A*03:02; PNLDC1; ENSG00000146453; TAA
VLIDTKSVTK

SEQ ID NO: 70017 - protein, 10 aa, Homo sapiens
  misc_feature: Table A; Target 70017; HLA-A*11:01; PNLDC1; ENSG00000146453; TAA
VLIDTKSVTK

SEQ ID NO: 70018 - protein, 10 aa, Homo sapiens
  misc_feature: Table A; Target 70018; HLA-B*46:01; PNLDC1; ENSG00000146453; TAA
VLIDTKSVTK

SEQ ID NO: 70019 - protein, 9 aa, Homo sapiens
  misc_feature: Table A; Target 70019; HLA-A*02:01; PNLDC1; ENSG00000146453; TAA
VLKDEGVVV

SEQ ID NO: 70020 - protein, 9 aa, Homo sapiens
  misc_feature: Table A; Target 70020; HLA-A*02:03; PNLDC1; ENSG00000146453; TAA
VLKDEGVVV

SEQ ID NO: 70021 - protein, 9 aa, Homo sapiens
  misc_feature: Table A; Target 70021; HLA-A*02:04; PNLDC1; ENSG00000146453; TAA
VLKDEGVVV

SEQ ID NO: 70022 - protein, 9 aa, Homo sapiens
  misc_feature: Table A; Target 70022; HLA-A*02:07; PNLDC1; ENSG00000146453; TAA
VLKDEGVVV

SEQ ID NO: 70023 - protein, 9 aa, Homo sapiens
  misc_feature: Table A; Target 70023; HLA-A*23:01; PNLDC1; ENSG00000146453; TAA
VLKDEGVVV

SEQ ID NO: 70024 - protein, 9 aa, Homo sapiens
  misc_feature: Table A; Target 70024; HLA-A*30:01; PNLDC1; ENSG00000146453; TAA
VLKDEGVVV

SEQ ID NO: 70025 - protein, 9 aa, Homo sapiens
  misc_feature: Table A; Target 70025; HLA-A*32:01; PNLDC1; ENSG00000146453; TAA
VLKDEGVVV

SEQ ID NO: 70026 - protein, 9 aa, Homo sapiens
  misc_feature: Table A; Target 70026; HLA-B*08:01; PNLDC1; ENSG00000146453; TAA
VLKDEGVVV

SEQ ID NO: 70027 - protein, 9 aa, Homo sapiens
  misc_feature: Table A; Target 70027; HLA-B*13:02; PNLDC1; ENSG00000146453; TAA
VLKDEGVVV

SEQ ID NO: 70028 - protein, 9 aa, Homo sapiens
  misc_feature: Table A; Target 70028; HLA-B*15:01; PNLDC1; ENSG00000146453; TAA
VLKDEGVVV

SEQ ID NO: 70029 - protein, 9 aa, Homo sapiens
  misc_feature: Table A; Target 70029; HLA-B*15:03; PNLDC1; ENSG00000146453; TAA
VLKDEGVVV

SEQ ID NO: 70030 - protein, 9 aa, Homo sapiens
  misc_feature: Table A; Target 70030; HLA-B*40:02; PNLDC1; ENSG00000146453; TAA
VLKDEGVVV

SEQ ID NO: 70031 - protein, 9 aa, Homo sapiens
  misc_feature: Table A; Target 70031; HLA-B*46:01; PNLDC1; ENSG00000146453; TAA
VLKDEGVVV

SEQ ID NO: 70032 - protein, 9 aa, Homo sapiens
  misc_feature: Table A; Target 70032; HLA-B*55:01; PNLDC1; ENSG00000146453; TAA
VLKDEGVVV

SEQ ID NO: 70033 - protein, 9 aa, Homo sapiens
  misc_feature: Table A; Target 70033; HLA-C*01:02; PNLDC1; ENSG00000146453; TAA
VLKDEGVVV

SEQ ID NO: 70034 - protein, 9 aa, Homo sapiens
  misc_feature: Table A; Target 70034; HLA-C*02:02; PNLDC1; ENSG00000146453; TAA
VLKDEGVVV

SEQ ID NO: 70035 - protein, 9 aa, Homo sapiens
  misc_feature: Table A; Target 70035; HLA-C*03:04; PNLDC1; ENSG00000146453; TAA
VLKDEGVVV

SEQ ID NO: 70036 - protein, 9 aa, Homo sapiens
  misc_feature: Table A; Target 70036; HLA-C*05:01; PNLDC1; ENSG00000146453; TAA
VLKDEGVVV

SEQ ID NO: 70037 - protein, 9 aa, Homo sapiens
  misc_feature: Table A; Target 70037; HLA-C*07:04; PNLDC1; ENSG00000146453; TAA
VLKDEGVVV

SEQ ID NO: 70038 - protein, 9 aa, Homo sapiens
  misc_feature: Table A; Target 70038; HLA-C*12:03; PNLDC1; ENSG00000146453; TAA
VLKDEGVVV

SEQ ID NO: 70039 - protein, 9 aa, Homo sapiens
  misc_feature: Table A; Target 70039; HLA-C*14:02; PNLDC1; ENSG00000146453; TAA
VLKDEGVVV

SEQ ID NO: 70040 - protein, 9 aa, Homo sapiens
  misc_feature: Table A; Target 70040; HLA-C*16:02; PNLDC1; ENSG00000146453; TAA
VLKDEGVVV

SEQ ID NO: 70041 - protein, 10 aa, Homo sapiens
  misc_feature: Table A; Target 70041; HLA-A*03:01; PNLDC1; ENSG00000146453; TAA
VLKDEGVVVK

SEQ ID NO: 70042 - protein, 10 aa, Homo sapiens
  misc_feature: Table A; Target 70042; HLA-A*03:02; PNLDC1; ENSG00000146453; TAA
VLKDEGVVVK

SEQ ID NO: 70043 - protein, 10 aa, Homo sapiens
  misc_feature: Table A; Target 70043; HLA-A*11:01; PNLDC1; ENSG00000146453; TAA
VLKDEGVVVK

SEQ ID NO: 70044 - protein, 11 aa, Homo sapiens
  misc_feature: Table A; Target 70044; HLA-A*03:01; PNLDC1; ENSG00000146453; TAA
VLKDEGVVVKK

SEQ ID NO: 70045 - protein, 11 aa, Homo sapiens
  misc_feature: Table A; Target 70045; HLA-A*03:02; PNLDC1; ENSG00000146453; TAA
VLKDEGVVVKK

SEQ ID NO: 70046 - protein, 11 aa, Homo sapiens
  misc_feature: Table A; Target 70046; HLA-A*11:01; PNLDC1; ENSG00000146453; TAA
VLKDEGVVVKK

SEQ ID NO: 70047 - protein, 11 aa, Homo sapiens
  misc_feature: Table A; Target 70047; HLA-A*31:01; PNLDC1; ENSG00000146453; TAA
VLKDEGVVVKK

SEQ ID NO: 70048 - protein, 11 aa, Homo sapiens
  misc_feature: Table A; Target 70048; HLA-A*33:01; PNLDC1; ENSG00000146453; TAA
VLKDEGVVVKK

SEQ ID NO: 70049 - protein, 8 aa, Homo sapiens
  misc_feature: Table A; Target 70049; HLA-A*02:04; PNLDC1; ENSG00000146453; TAA
VLLKVAHL

SEQ ID NO: 70050 - protein, 9 aa, Homo sapiens
  misc_feature: Table A; Target 70050; HLA-A*02:01; PNLDC1; ENSG00000146453; TAA
VLLKVAHLL

SEQ ID NO: 70051 - protein, 9 aa, Homo sapiens
  misc_feature: Table A; Target 70051; HLA-A*02:04; PNLDC1; ENSG00000146453; TAA
VLLKVAHLL

SEQ ID NO: 70052 - protein, 9 aa, Homo sapiens
  misc_feature: Table A; Target 70052; HLA-A*02:07; PNLDC1; ENSG00000146453; TAA
VLLKVAHLL

SEQ ID NO: 70053 - protein, 9 aa, Homo sapiens
  misc_feature: Table A; Target 70053; HLA-A*23:01; PNLDC1; ENSG00000146453; TAA
VLLKVAHLL

SEQ ID NO: 70054 - protein, 9 aa, Homo sapiens
  misc_feature: Table A; Target 70054; HLA-A*24:02; PNLDC1; ENSG00000146453; TAA
VLLKVAHLL

SEQ ID NO: 70055 - protein, 9 aa, Homo sapiens
  misc_feature: Table A; Target 70055; HLA-A*02:01; PNLDC1; ENSG00000146453; TAA
VLNSDLNPT

SEQ ID NO: 70056 - protein, 10 aa, Homo sapiens
  misc_feature: Table A; Target 70056; HLA-A*01:01; PNLDC1; ENSG00000146453; TAA
VLNSDLNPTK

SEQ ID NO: 70057 - protein, 10 aa, Homo sapiens
  misc_feature: Table A; Target 70057; HLA-A*03:01; PNLDC1; ENSG00000146453; TAA
VLNSDLNPTK

SEQ ID NO: 70058 - protein, 10 aa, Homo sapiens
  misc_feature: Table A; Target 70058; HLA-A*03:02; PNLDC1; ENSG00000146453; TAA
VLNSDLNPTK

SEQ ID NO: 70059 - protein, 10 aa, Homo sapiens
  misc_feature: Table A; Target 70059; HLA-A*11:01; PNLDC1; ENSG00000146453; TAA
VLNSDLNPTK

SEQ ID NO: 70060 - protein, 10 aa, Homo sapiens
  misc_feature: Table A; Target 70060; HLA-A*30:02; PNLDC1; ENSG00000146453; TAA
VLNSDLNPTK

SEQ ID NO: 70061 - protein, 10 aa, Homo sapiens
  misc_feature: Table A; Target 70061; HLA-A*32:01; PNLDC1; ENSG00000146453; TAA
VLNSDLNPTK

SEQ ID NO: 70062 - protein, 10 aa, Homo sapiens
  misc_feature: Table A; Target 70062; HLA-B*27:02; PNLDC1; ENSG00000146453; TAA
VLNSDLNPTK

SEQ ID NO: 70063 - protein, 10 aa, Homo sapiens
  misc_feature: Table A; Target 70063; HLA-B*27:05; PNLDC1; ENSG00000146453; TAA
VLNSDLNPTK

SEQ ID NO: 70064 - protein, 10 aa, Homo sapiens
  misc_feature: Table A; Target 70064; HLA-C*06:02; PNLDC1; ENSG00000146453; TAA
VLNSDLNPTK

SEQ ID NO: 70065 - protein, 9 aa, Homo sapiens
  misc_feature: Table A; Target 70065; HLA-A*02:03; PNLDC1; ENSG00000146453; TAA
VLRQALPNI

SEQ ID NO: 70066 - protein, 9 aa, Homo sapiens
  misc_feature: Table A; Target 70066; HLA-A*02:04; PNLDC1; ENSG00000146453; TAA
VLRQALPNI

SEQ ID NO: 70067 - protein, 9 aa, Homo sapiens
  misc_feature: Table A; Target 70067; HLA-A*01:01; PNLDC1; ENSG00000146453; TAA
VPESSFPQY

SEQ ID NO: 70068 - protein, 9 aa, Homo sapiens
  misc_feature: Table A; Target 70068; HLA-A*30:02; PNLDC1; ENSG00000146453; TAA
VPESSFPQY

SEQ ID NO: 70069 - protein, 9 aa, Homo sapiens
  misc_feature: Table A; Target 70069; HLA-B*35:01; PNLDC1; ENSG00000146453; TAA
VPESSFPQY

SEQ ID NO: 70070 - protein, 9 aa, Homo sapiens
  misc_feature: Table A; Target 70070; HLA-B*55:01; PNLDC1; ENSG00000146453; TAA
VPESSFPQY

SEQ ID NO: 70071 - protein, 9 aa, Homo sapiens
  misc_feature: Table A; Target 70071; HLA-C*03:03; PNLDC1; ENSG00000146453; TAA
VPESSFPQY

SEQ ID NO: 70072 - protein, 9 aa, Homo sapiens
  misc_feature: Table A; Target 70072; HLA-B*07:02; PNLDC1; ENSG00000146453; TAA
VPKINFSGP

SEQ ID NO: 70073 - protein, 9 aa, Homo sapiens
  misc_feature: Table A; Target 70073; HLA-A*24:02; PNLDC1; ENSG00000146453; TAA
VQFLNQYGF

SEQ ID NO: 70074 - protein, 9 aa, Homo sapiens
  misc_feature: Table A; Target 70074; HLA-A*30:01; PNLDC1; ENSG00000146453; TAA
VQFLNQYGF

SEQ ID NO: 70075 - protein, 9 aa, Homo sapiens
  misc_feature: Table A; Target 70075; HLA-B*15:01; PNLDC1; ENSG00000146453; TAA
VQFLNQYGF

SEQ ID NO: 70076 - protein, 9 aa, Homo sapiens
  misc_feature: Table A; Target 70076; HLA-B*15:03; PNLDC1; ENSG00000146453; TAA
VQFLNQYGF

SEQ ID NO: 70077 - protein, 9 aa, Homo sapiens
  misc_feature: Table A; Target 70077; HLA-B*27:02; PNLDC1; ENSG00000146453; TAA
VQFLNQYGF

SEQ ID NO: 70078 - protein, 9 aa, Homo sapiens
  misc_feature: Table A; Target 70078; HLA-B*37:01; PNLDC1; ENSG00000146453; TAA
VQFLNQYGF

SEQ ID NO: 70079 - protein, 9 aa, Homo sapiens
  misc_feature: Table A; Target 70079; HLA-C*16:04; PNLDC1; ENSG00000146453; TAA
VQFLNQYGF

SEQ ID NO: 70080 - protein, 11 aa, Homo sapiens
  misc_feature: Table A; Target 70080; HLA-A*29:02; PNLDC1; ENSG00000146453; TAA
VQFLNQYGFNY

SEQ ID NO: 70081 - protein, 11 aa, Homo sapiens
  misc_feature: Table A; Target 70081; HLA-A*30:02; PNLDC1; ENSG00000146453; TAA
VQFLNQYGFNY

SEQ ID NO: 70082 - protein, 9 aa, Homo sapiens
  misc_feature: Table A; Target 70082; HLA-B*15:01; PNLDC1; ENSG00000146453; TAA
VQLVLRQAL

SEQ ID NO: 70083 - protein, 9 aa, Homo sapiens
  misc_feature: Table A; Target 70083; HLA-B*15:03; PNLDC1; ENSG00000146453; TAA
VQLVLRQAL

SEQ ID NO: 70084 - protein, 9 aa, Homo sapiens
  misc_feature: Table A; Target 70084; HLA-A*02:03; PNLDC1; ENSG00000146453; TAA
VQQFTVCQI

SEQ ID NO: 70085 - protein, 9 aa, Homo sapiens
  misc_feature: Table A; Target 70085; HLA-B*13:02; PNLDC1; ENSG00000146453; TAA
VQQFTVCQI

SEQ ID NO: 70086 - protein, 9 aa, Homo sapiens
  misc_feature: Table A; Target 70086; HLA-B*15:01; PNLDC1; ENSG00000146453; TAA
VQQFTVCQI

SEQ ID NO: 70087 - protein, 9 aa, Homo sapiens
  misc_feature: Table A; Target 70087; HLA-B*39:01; PNLDC1; ENSG00000146453; TAA
VQQFTVCQI

SEQ ID NO: 70088 - protein, 9 aa, Homo sapiens
  misc_feature: Table A; Target 70088; HLA-C*06:02; PNLDC1; ENSG00000146453; TAA
VQQFTVCQI

SEQ ID NO: 70089 - protein, 9 aa, Homo sapiens
  misc_feature: Table A; Target 70089; HLA-C*07:04; PNLDC1; ENSG00000146453; TAA
VQQFTVCQI

SEQ ID NO: 70090 - protein, 9 aa, Homo sapiens
  misc_feature: Table A; Target 70090; HLA-A*01:01; PNLDC1; ENSG00000146453; TAA
VSEQQVYHK

SEQ ID NO: 70091 - protein, 9 aa, Homo sapiens
  misc_feature: Table A; Target 70091; HLA-A*03:02; PNLDC1; ENSG00000146453; TAA
VSEQQVYHK

SEQ ID NO: 70092 - protein, 9 aa, Homo sapiens
  misc_feature: Table A; Target 70092; HLA-A*11:01; PNLDC1; ENSG00000146453; TAA
VSEQQVYHK

SEQ ID NO: 70093 - protein, 10 aa, Homo sapiens
  misc_feature: Table A; Target 70093; HLA-A*01:01; PNLDC1; ENSG00000146453; TAA
VSEQQVYHKF

SEQ ID NO: 70094 - protein, 10 aa, Homo sapiens
  misc_feature: Table A; Target 70094; HLA-B*57:01; PNLDC1; ENSG00000146453; TAA
VSEQQVYHKF

SEQ ID NO: 70095 - protein, 10 aa, Homo sapiens
  misc_feature: Table A; Target 70095; HLA-B*58:01; PNLDC1; ENSG00000146453; TAA
VSEQQVYHKF

SEQ ID NO: 70096 - protein, 8 aa, Homo sapiens
  misc_feature: Table A; Target 70096; HLA-B*15:01; PNLDC1; ENSG00000146453; TAA
VSNLSEVY

SEQ ID NO: 70097 - protein, 8 aa, Homo sapiens
  misc_feature: Table A; Target 70097; HLA-B*15:03; PNLDC1; ENSG00000146453; TAA
VSNLSEVY

SEQ ID NO: 70098 - protein, 8 aa, Homo sapiens
  misc_feature: Table A; Target 70098; HLA-B*46:01; PNLDC1; ENSG00000146453; TAA
VSNLSEVY

SEQ ID NO: 70099 - protein, 9 aa, Homo sapiens
  misc_feature: Table A; Target 70099; HLA-B*57:01; PNLDC1; ENSG00000146453; TAA
VTKDIWKEM

SEQ ID NO: 70100 - protein, 9 aa, Homo sapiens
  misc_feature: Table A; Target 70100; HLA-A*23:01; PNLDC1; ENSG00000146453; TAA
VVIDEVTRW

SEQ ID NO: 70101 - protein, 9 aa, Homo sapiens
  misc_feature: Table A; Target 70101; HLA-A*24:02; PNLDC1; ENSG00000146453; TAA
VVIDEVTRW

SEQ ID NO: 70102 - protein, 9 aa, Homo sapiens
  misc_feature: Table A; Target 70102; HLA-A*25:01; PNLDC1; ENSG00000146453; TAA
VVIDEVTRW

SEQ ID NO: 70103 - protein, 9 aa, Homo sapiens
  misc_feature: Table A; Target 70103; HLA-A*26:01; PNLDC1; ENSG00000146453; TAA
VVIDEVTRW

SEQ ID NO: 70104 - protein, 9 aa, Homo sapiens
  misc_feature: Table A; Target 70104; HLA-A*29:02; PNLDC1; ENSG00000146453; TAA
VVIDEVTRW

SEQ ID NO: 70105 - protein, 9 aa, Homo sapiens
  misc_feature: Table A; Target 70105; HLA-A*32:01; PNLDC1; ENSG00000146453; TAA
VVIDEVTRW

SEQ ID NO: 70106 - protein, 9 aa, Homo sapiens
  misc_feature: Table A; Target 70106; HLA-A*33:03; PNLDC1; ENSG00000146453; TAA
VVIDEVTRW

SEQ ID NO: 70107 - protein, 9 aa, Homo sapiens
  misc_feature: Table A; Target 70107; HLA-B*44:02; PNLDC1; ENSG00000146453; TAA
VVIDEVTRW

SEQ ID NO: 70108 - protein, 9 aa, Homo sapiens
  misc_feature: Table A; Target 70108; HLA-B*44:03; PNLDC1; ENSG00000146453; TAA
VVIDEVTRW

SEQ ID NO: 70109 - protein, 9 aa, Homo sapiens
  misc_feature: Table A; Target 70109; HLA-B*57:01; PNLDC1; ENSG00000146453; TAA
VVIDEVTRW

SEQ ID NO: 70110 - protein, 9 aa, Homo sapiens
  misc_feature: Table A; Target 70110; HLA-B*58:01; PNLDC1; ENSG00000146453; TAA
VVIDEVTRW

SEQ ID NO: 70111 - protein, 9 aa, Homo sapiens
  misc_feature: Table A; Target 70111; HLA-C*02:02; PNLDC1; ENSG00000146453; TAA
VVIDEVTRW

SEQ ID NO: 70112 - protein, 9 aa, Homo sapiens
  misc_feature: Table A; Target 70112; HLA-C*07:06; PNLDC1; ENSG00000146453; TAA
VVIDEVTRW

SEQ ID NO: 70113 - protein, 9 aa, Homo sapiens
  misc_feature: Table A; Target 70113; HLA-C*01:02; PNLDC1; ENSG00000146453; TAA
VYEVLNSDL

SEQ ID NO: 70114 - protein, 9 aa, Homo sapiens
  misc_feature: Table A; Target 70114; HLA-C*04:01; PNLDC1; ENSG00000146453; TAA
VYEVLNSDL

SEQ ID NO: 70115 - protein, 9 aa, Homo sapiens
  misc_feature: Table A; Target 70115; HLA-C*14:02; PNLDC1; ENSG00000146453; TAA
VYEVLNSDL

SEQ ID NO: 70116 - protein, 8 aa, Homo sapiens
  misc_feature: Table A; Target 70116; HLA-A*23:01; PNLDC1; ENSG00000146453; TAA
VYHKFQNL

SEQ ID NO: 70117 - protein, 8 aa, Homo sapiens
  misc_feature: Table A; Target 70117; HLA-A*24:02; PNLDC1; ENSG00000146453; TAA
VYHKFQNL

SEQ ID NO: 70118 - protein, 10 aa, Homo sapiens
  misc_feature: Table A; Target 70118; HLA-B*35:01; PNLDC1; ENSG00000146453; TAA
WPGVSEQQVY

SEQ ID NO: 70119 - protein, 10 aa, Homo sapiens
  misc_feature: Table A; Target 70119; HLA-B*55:01; PNLDC1; ENSG00000146453; TAA
WPGVSEQQVY

SEQ ID NO: 70120 - protein, 8 aa, Homo sapiens
  misc_feature: Table A; Target 70120; HLA-B*37:01; PNLDC1; ENSG00000146453; TAA
YDQFKQNI

SEQ ID NO: 70121 - protein, 8 aa, Homo sapiens
  misc_feature: Table A; Target 70121; HLA-A*30:01; PNLDC1; ENSG00000146453; TAA
YEVLNSDL

SEQ ID NO: 70122 - protein, 8 aa, Homo sapiens
  misc_feature: Table A; Target 70122; HLA-B*18:01; PNLDC1; ENSG00000146453; TAA
YEVLNSDL

SEQ ID NO: 70123 - protein, 8 aa, Homo sapiens
  misc_feature: Table A; Target 70123; HLA-B*37:01; PNLDC1; ENSG00000146453; TAA
YEVLNSDL

SEQ ID NO: 70124 - protein, 8 aa, Homo sapiens
  misc_feature: Table A; Target 70124; HLA-B*40:01; PNLDC1; ENSG00000146453; TAA
YEVLNSDL

SEQ ID NO: 70125 - protein, 8 aa, Homo sapiens
  misc_feature: Table A; Target 70125; HLA-B*40:02; PNLDC1; ENSG00000146453; TAA
YEVLNSDL

SEQ ID NO: 70126 - protein, 8 aa, Homo sapiens
  misc_feature: Table A; Target 70126; HLA-B*49:01; PNLDC1; ENSG00000146453; TAA
YEVLNSDL

SEQ ID NO: 70127 - protein, 8 aa, Homo sapiens
  misc_feature: Table A; Target 70127; HLA-C*16:04; PNLDC1; ENSG00000146453; TAA
YEVLNSDL

SEQ ID NO: 70128 - protein, 10 aa, Homo sapiens
  misc_feature: Table A; Target 70128; HLA-B*49:01; PNLDC1; ENSG00000146453; TAA
YEVLNSDLNP

SEQ ID NO: 70129 - protein, 11 aa, Homo sapiens
  misc_feature: Table A; Target 70129; HLA-B*40:02; PNLDC1; ENSG00000146453; TAA
YEVLNSDLNPT

SEQ ID NO: 70130 - protein, 11 aa, Homo sapiens
  misc_feature: Table A; Target 70130; HLA-C*07:01; PNLDC1; ENSG00000146453; TAA
YEVLNSDLNPT

SEQ ID NO: 70131 - protein, 9 aa, Homo sapiens
  misc_feature: Table A; Target 70131; HLA-A*02:04; PNLDC1; ENSG00000146453; TAA
YGFNYNKFL

SEQ ID NO: 70132 - protein, 9 aa, Homo sapiens
  misc_feature: Table A; Target 70132; HLA-B*39:01; PNLDC1; ENSG00000146453; TAA
YHIDPVPES

SEQ ID NO: 70133 - protein, 11 aa, Homo sapiens
  misc_feature: Table A; Target 70133; HLA-B*27:05; PNLDC1; ENSG00000146453; TAA
YHIDPVPESSF

SEQ ID NO: 70134 - protein, 11 aa, Homo sapiens
  misc_feature: Table A; Target 70134; HLA-B*38:01; PNLDC1; ENSG00000146453; TAA
YHIDPVPESSF

SEQ ID NO: 70135 - protein, 11 aa, Homo sapiens
  misc_feature: Table A; Target 70135; HLA-B*39:01; PNLDC1; ENSG00000146453; TAA
YHIDPVPESSF

SEQ ID NO: 70136 - protein, 9 aa, Homo sapiens
  misc_feature: Table A; Target 70136; HLA-A*01:01; PNLDC1; ENSG00000146453; TAA
YIAHSCNFY

SEQ ID NO: 70137 - protein, 9 aa, Homo sapiens
  misc_feature: Table A; Target 70137; HLA-A*29:02; PNLDC1; ENSG00000146453; TAA
YIAHSCNFY

SEQ ID NO: 70138 - protein, 9 aa, Homo sapiens
  misc_feature: Table A; Target 70138; HLA-C*07:04; PNLDC1; ENSG00000146453; TAA
YIAHSCNFY

SEQ ID NO: 70139 - protein, 8 aa, Homo sapiens
  misc_feature: Table A; Target 70139; HLA-A*01:01; PNLDC1; ENSG00000146453; TAA
YLDVLAPY

SEQ ID NO: 70140 - protein, 9 aa, Homo sapiens
  misc_feature: Table A; Target 70140; HLA-A*01:01; PNLDC1; ENSG00000146453; TAA
YLDVLAPYV

SEQ ID NO: 70141 - protein, 9 aa, Homo sapiens
  misc_feature: Table A; Target 70141; HLA-A*02:01; PNLDC1; ENSG00000146453; TAA
YLDVLAPYV

SEQ ID NO: 70142 - protein, 9 aa, Homo sapiens
  misc_feature: Table A; Target 70142; HLA-A*02:07; PNLDC1; ENSG00000146453; TAA
YLDVLAPYV

SEQ ID NO: 70143 - protein, 9 aa, Homo sapiens
  misc_feature: Table A; Target 70143; HLA-A*02:01; PNLDC1; ENSG00000146453; TAA
YLFPTTFGI

SEQ ID NO: 70144 - protein, 9 aa, Homo sapiens
  misc_feature: Table A; Target 70144; HLA-A*02:03; PNLDC1; ENSG00000146453; TAA
YLFPTTFGI

SEQ ID NO: 70145 - protein, 9 aa, Homo sapiens
  misc_feature: Table A; Target 70145; HLA-A*02:04; PNLDC1; ENSG00000146453; TAA
YLFPTTFGI

SEQ ID NO: 70146 - protein, 9 aa, Homo sapiens
  misc_feature: Table A; Target 70146; HLA-A*02:07; PNLDC1; ENSG00000146453; TAA
YLFPTTFGI

SEQ ID NO: 70147 - protein, 9 aa, Homo sapiens
  misc_feature: Table A; Target 70147; HLA-A*68:02; PNLDC1; ENSG00000146453; TAA
YLFPTTFGI

SEQ ID NO: 70148 - protein, 9 aa, Homo sapiens
  misc_feature: Table A; Target 70148; HLA-B*13:02; PNLDC1; ENSG00000146453; TAA
YLFPTTFGI

SEQ ID NO: 70149 - protein, 10 aa, Homo sapiens
  misc_feature: Table A; Target 70149; HLA-A*02:03; PNLDC1; ENSG00000146453; TAA
YLFPTTFGIL

SEQ ID NO: 70150 - protein, 10 aa, Homo sapiens
  misc_feature: Table A; Target 70150; HLA-A*02:04; PNLDC1; ENSG00000146453; TAA
YLFPTTFGIL

SEQ ID NO: 70151 - protein, 10 aa, Homo sapiens
  misc_feature: Table A; Target 70151; HLA-A*02:07; PNLDC1; ENSG00000146453; TAA
YLFPTTFGIL

SEQ ID NO: 70152 - protein, 8 aa, Homo sapiens
  misc_feature: Table A; Target 70152; HLA-B*08:01; PNLDC1; ENSG00000146453; TAA
YLKTRQSV

SEQ ID NO: 70153 - protein, 8 aa, Homo sapiens
  misc_feature: Table A; Target 70153; HLA-B*08:01; PNLDC1; ENSG00000146453; TAA
YPSIRPPI

SEQ ID NO: 70154 - protein, 8 aa, Homo sapiens
  misc_feature: Table A; Target 70154; HLA-B*51:01; PNLDC1; ENSG00000146453; TAA
YPSIRPPI

SEQ ID NO: 70155 - protein, 9 aa, Homo sapiens
  misc_feature: Table A; Target 70155; HLA-B*07:02; PNLDC1; ENSG00000146453; TAA
YPSIRPPIL

SEQ ID NO: 70156 - protein, 9 aa, Homo sapiens
  misc_feature: Table A; Target 70156; HLA-B*08:01; PNLDC1; ENSG00000146453; TAA
YPSIRPPIL

SEQ ID NO: 70157 - protein, 9 aa, Homo sapiens
  misc_feature: Table A; Target 70157; HLA-B*35:01; PNLDC1; ENSG00000146453; TAA
YPSIRPPIL

SEQ ID NO: 70158 - protein, 9 aa, Homo sapiens
  misc_feature: Table A; Target 70158; HLA-B*35:03; PNLDC1; ENSG00000146453; TAA
YPSIRPPIL

SEQ ID NO: 70159 - protein, 9 aa, Homo sapiens
  misc_feature: Table A; Target 70159; HLA-B*51:01; PNLDC1; ENSG00000146453; TAA
YPSIRPPIL

SEQ ID NO: 70160 - protein, 9 aa, Homo sapiens
  misc_feature: Table A; Target 70160; HLA-B*54:01; PNLDC1; ENSG00000146453; TAA
YPSIRPPIL

SEQ ID NO: 70161 - protein, 9 aa, Homo sapiens
  misc_feature: Table A; Target 70161; HLA-C*07:02; PNLDC1; ENSG00000146453; TAA
YPSIRPPIL

SEQ ID NO: 70162 - protein, 9 aa, Homo sapiens
  misc_feature: Table A; Target 70162; HLA-C*16:01; PNLDC1; ENSG00000146453; TAA
YPSIRPPIL

SEQ ID NO: 70163 - protein, 8 aa, Homo sapiens
  misc_feature: Table A; Target 70163; HLA-B*13:02; PNLDC1; ENSG00000146453; TAA
YVNQVNLI

SEQ ID NO: 70164 - protein, 8 aa, Homo sapiens
  misc_feature: Table A; Target 70164; HLA-B*51:01; PNLDC1; ENSG00000146453; TAA
YVNQVNLI

SEQ ID NO: 70165 - protein, 9 aa, Homo sapiens
  misc_feature: Table A; Target 70165; HLA-A*29:02; PNLDC1; ENSG00000146453; TAA
YVNQVNLIR

SEQ ID NO: 70166 - protein, 9 aa, Homo sapiens
  misc_feature: Table A; Target 70166; HLA-A*31:01; PNLDC1; ENSG00000146453; TAA
YVNQVNLIR

SEQ ID NO: 70167 - protein, 9 aa, Homo sapiens
  misc_feature: Table A; Target 70167; HLA-A*33:01; PNLDC1; ENSG00000146453; TAA
YVNQVNLIR

SEQ ID NO: 70168 - protein, 9 aa, Homo sapiens
  misc_feature: Table A; Target 70168; HLA-A*33:03; PNLDC1; ENSG00000146453; TAA
YVNQVNLIR

SEQ ID NO: 70169 - protein, 9 aa, Homo sapiens
  misc_feature: Table A; Target 70169; HLA-A*68:01; PNLDC1; ENSG00000146453; TAA
YVNQVNLIR

SEQ ID NO: 70170 - protein, 9 aa, Homo sapiens
  misc_feature: Table A; Target 70170; HLA-C*07:06; PNLDC1; ENSG00000146453; TAA
YVNQVNLIR

SEQ ID NO: 70171 - protein, 10 aa, Homo sapiens
  misc_feature: Table A; Target 70171; HLA-B*54:01; PNLDC1; ENSG00000146453; TAA
YVNQVNLIRA

SEQ ID NO: 70172 - protein, 10 aa, Homo sapiens
  misc_feature: Table A; Target 70172; HLA-B*56:01; PNLDC1; ENSG00000146453; TAA
YVNQVNLIRA

SEQ ID NO: 70173 - protein, 9 aa, Homo sapiens
  misc_feature: Table A; Target 70173; HLA-A*32:01; PRAME; ENSG00000185686; TAA
AAFDGRHSQ

SEQ ID NO: 70174 - protein, 9 aa, Homo sapiens
  misc_feature: Table A; Target 70174; HLA-B*46:01; PRAME; ENSG00000185686; TAA
AAFDGRHSQ

SEQ ID NO: 70175 - protein, 9 aa, Homo sapiens
  misc_feature: Table A; Target 70175; HLA-B*58:01; PRAME; ENSG00000185686; TAA
AAFDGRHSQ

SEQ ID NO: 70176 - protein, 9 aa, Homo sapiens
  misc_feature: Table A; Target 70176; HLA-C*02:02; PRAME; ENSG00000185686; TAA
AAFDGRHSQ

SEQ ID NO: 70177 - protein, 9 aa, Homo sapiens
  misc_feature: Table A; Target 70177; HLA-C*16:01; PRAME; ENSG00000185686; TAA
AAFDGRHSQ

SEQ ID NO: 70178 - protein, 9 aa, Homo sapiens
  misc_feature: Table A; Target 70178; HLA-C*16:02; PRAME; ENSG00000185686; TAA
AAFDGRHSQ

SEQ ID NO: 70179 - protein, 10 aa, Homo sapiens
  misc_feature: Table A; Target 70179; HLA-A*32:01; PRAME; ENSG00000185686; TAA
AAFDGRHSQT

SEQ ID NO: 70180 - protein, 10 aa, Homo sapiens
  misc_feature: Table A; Target 70180; HLA-C*12:03; PRAME; ENSG00000185686; TAA
AAFDGRHSQT

SEQ ID NO: 70181 - protein, 10 aa, Homo sapiens
  misc_feature: Table A; Target 70181; HLA-C*16:01; PRAME; ENSG00000185686; TAA
AAFDGRHSQT

SEQ ID NO: 70182 - protein, 10 aa, Homo sapiens
  misc_feature: Table A; Target 70182; HLA-C*16:02; PRAME; ENSG00000185686; TAA
AAFDGRHSQT

SEQ ID NO: 70183 - protein, 11 aa, Homo sapiens
  misc_feature: Table A; Target 70183; HLA-A*02:01; PRAME; ENSG00000185686; TAA
AAFDGRHSQTL

SEQ ID NO: 70184 - protein, 11 aa, Homo sapiens
  misc_feature: Table A; Target 70184; HLA-A*02:03; PRAME; ENSG00000185686; TAA
AAFDGRHSQTL

SEQ ID NO: 70185 - protein, 11 aa, Homo sapiens
  misc_feature: Table A; Target 70185; HLA-A*02:04; PRAME; ENSG00000185686; TAA
AAFDGRHSQTL

SEQ ID NO: 70186 - protein, 11 aa, Homo sapiens
  misc_feature: Table A; Target 70186; HLA-A*02:07; PRAME; ENSG00000185686; TAA
AAFDGRHSQTL

SEQ ID NO: 70187 - protein, 11 aa, Homo sapiens
  misc_feature: Table A; Target 70187; HLA-A*23:01; PRAME; ENSG00000185686; TAA
AAFDGRHSQTL

SEQ ID NO: 70188 - protein, 11 aa, Homo sapiens
  misc_feature: Table A; Target 70188; HLA-A*25:01; PRAME; ENSG00000185686; TAA
AAFDGRHSQTL

SEQ ID NO: 70189 - protein, 11 aa, Homo sapiens
  misc_feature: Table A; Target 70189; HLA-A*30:01; PRAME; ENSG00000185686; TAA
AAFDGRHSQTL

SEQ ID NO: 70190 - protein, 11 aa, Homo sapiens
  misc_feature: Table A; Target 70190; HLA-A*32:01; PRAME; ENSG00000185686; TAA
AAFDGRHSQTL

SEQ ID NO: 70191 - protein, 11 aa, Homo sapiens
  misc_feature: Table A; Target 70191; HLA-A*68:02; PRAME; ENSG00000185686; TAA
AAFDGRHSQTL

SEQ ID NO: 70192 - protein, 11 aa, Homo sapiens
  misc_feature: Table A; Target 70192; HLA-B*07:02; PRAME; ENSG00000185686; TAA
AAFDGRHSQTL

SEQ ID NO: 70193 - protein, 11 aa, Homo sapiens
  misc_feature: Table A; Target 70193; HLA-B*13:02; PRAME; ENSG00000185686; TAA
AAFDGRHSQTL

SEQ ID NO: 70194 - protein, 11 aa, Homo sapiens
  misc_feature: Table A; Target 70194; HLA-B*15:01; PRAME; ENSG00000185686; TAA
AAFDGRHSQTL

SEQ ID NO: 70195 - protein, 11 aa, Homo sapiens
  misc_feature: Table A; Target 70195; HLA-B*15:03; PRAME; ENSG00000185686; TAA
AAFDGRHSQTL

SEQ ID NO: 70196 - protein, 11 aa, Homo sapiens
  misc_feature: Table A; Target 70196; HLA-B*27:05; PRAME; ENSG00000185686; TAA
AAFDGRHSQTL

SEQ ID NO: 70197 - protein, 11 aa, Homo sapiens
  misc_feature: Table A; Target 70197; HLA-B*35:01; PRAME; ENSG00000185686; TAA
AAFDGRHSQTL

SEQ ID NO: 70198 - protein, 11 aa, Homo sapiens
  misc_feature: Table A; Target 70198; HLA-B*35:03; PRAME; ENSG00000185686; TAA
AAFDGRHSQTL

SEQ ID NO: 70199 - protein, 11 aa, Homo sapiens
  misc_feature: Table A; Target 70199; HLA-B*37:01; PRAME; ENSG00000185686; TAA
AAFDGRHSQTL

SEQ ID NO: 70200 - protein, 11 aa, Homo sapiens
  misc_feature: Table A; Target 70200; HLA-B*38:01; PRAME; ENSG00000185686; TAA
AAFDGRHSQTL

SEQ ID NO: 70201 - protein, 11 aa, Homo sapiens
  misc_feature: Table A; Target 70201; HLA-B*39:01; PRAME; ENSG00000185686; TAA
AAFDGRHSQTL

SEQ ID NO: 70202 - protein, 11 aa, Homo sapiens
  misc_feature: Table A; Target 70202; HLA-B*40:01; PRAME; ENSG00000185686; TAA
AAFDGRHSQTL

SEQ ID NO: 70203 - protein, 11 aa, Homo sapiens
  misc_feature: Table A; Target 70203; HLA-B*40:02; PRAME; ENSG00000185686; TAA
AAFDGRHSQTL

SEQ ID NO: 70204 - protein, 11 aa, Homo sapiens
  misc_feature: Table A; Target 70204; HLA-B*44:02; PRAME; ENSG00000185686; TAA
AAFDGRHSQTL

SEQ ID NO: 70205 - protein, 11 aa, Homo sapiens
  misc_feature: Table A; Target 70205; HLA-B*44:03; PRAME; ENSG00000185686; TAA
AAFDGRHSQTL

SEQ ID NO: 70206 - protein, 11 aa, Homo sapiens
  misc_feature: Table A; Target 70206; HLA-B*46:01; PRAME; ENSG00000185686; TAA
AAFDGRHSQTL

SEQ ID NO: 70207 - protein, 11 aa, Homo sapiens
  misc_feature: Table A; Target 70207; HLA-B*51:01; PRAME; ENSG00000185686; TAA
AAFDGRHSQTL

SEQ ID NO: 70208 - protein, 11 aa, Homo sapiens
  misc_feature: Table A; Target 70208; HLA-B*55:01; PRAME; ENSG00000185686; TAA
AAFDGRHSQTL

SEQ ID NO: 70209 - protein, 11 aa, Homo sapiens
  misc_feature: Table A; Target 70209; HLA-B*56:01; PRAME; ENSG00000185686; TAA
AAFDGRHSQTL

SEQ ID NO: 70210 - protein, 11 aa, Homo sapiens
  misc_feature: Table A; Target 70210; HLA-B*58:01; PRAME; ENSG00000185686; TAA
AAFDGRHSQTL

SEQ ID NO: 70211 - protein, 11 aa, Homo sapiens
  misc_feature: Table A; Target 70211; HLA-C*01:02; PRAME; ENSG00000185686; TAA
AAFDGRHSQTL

SEQ ID NO: 70212 - protein, 11 aa, Homo sapiens
  misc_feature: Table A; Target 70212; HLA-C*02:02; PRAME; ENSG00000185686; TAA
AAFDGRHSQTL

SEQ ID NO: 70213 - protein, 11 aa, Homo sapiens
  misc_feature: Table A; Target 70213; HLA-C*03:03; PRAME; ENSG00000185686; TAA
AAFDGRHSQTL

SEQ ID NO: 70214 - protein, 11 aa, Homo sapiens
  misc_feature: Table A; Target 70214; HLA-C*03:04; PRAME; ENSG00000185686; TAA
AAFDGRHSQTL

SEQ ID NO: 70215 - protein, 11 aa, Homo sapiens
  misc_feature: Table A; Target 70215; HLA-C*05:01; PRAME; ENSG00000185686; TAA
AAFDGRHSQTL

SEQ ID NO: 70216 - protein, 11 aa, Homo sapiens
  misc_feature: Table A; Target 70216; HLA-C*06:02; PRAME; ENSG00000185686; TAA
AAFDGRHSQTL

SEQ ID NO: 70217 - protein, 11 aa, Homo sapiens
  misc_feature: Table A; Target 70217; HLA-C*07:02; PRAME; ENSG00000185686; TAA
AAFDGRHSQTL

SEQ ID NO: 70218 - protein, 11 aa, Homo sapiens
  misc_feature: Table A; Target 70218; HLA-C*07:04; PRAME; ENSG00000185686; TAA
AAFDGRHSQTL

SEQ ID NO: 70219 - protein, 11 aa, Homo sapiens
  misc_feature: Table A; Target 70219; HLA-C*07:06; PRAME; ENSG00000185686; TAA
AAFDGRHSQTL

SEQ ID NO: 70220 - protein, 11 aa, Homo sapiens
  misc_feature: Table A; Target 70220; HLA-C*12:03; PRAME; ENSG00000185686; TAA
AAFDGRHSQTL

SEQ ID NO: 70221 - protein, 11 aa, Homo sapiens
  misc_feature: Table A; Target 70221; HLA-C*14:02; PRAME; ENSG00000185686; TAA
AAFDGRHSQTL

SEQ ID NO: 70222 - protein, 11 aa, Homo sapiens
  misc_feature: Table A; Target 70222; HLA-C*16:01; PRAME; ENSG00000185686; TAA
AAFDGRHSQTL

SEQ ID NO: 70223 - protein, 11 aa, Homo sapiens
  misc_feature: Table A; Target 70223; HLA-C*16:02; PRAME; ENSG00000185686; TAA
AAFDGRHSQTL

SEQ ID NO: 70224 - protein, 11 aa, Homo sapiens
  misc_feature: Table A; Target 70224; HLA-C*16:04; PRAME; ENSG00000185686; TAA
AAFDGRHSQTL

SEQ ID NO: 70225 - protein, 8 aa, Homo sapiens
  misc_feature: Table A; Target 70225; HLA-A*33:03; PRAME; ENSG00000185686; TAA
AALELLPR

SEQ ID NO: 70226 - protein, 10 aa, Homo sapiens
  misc_feature: Table A; Target 70226; HLA-C*16:01; PRAME; ENSG00000185686; TAA
AALELLPREL

SEQ ID NO: 70227 - protein, 8 aa, Homo sapiens
  misc_feature: Table A; Target 70227; HLA-A*11:01; PRAME; ENSG00000185686; TAA
AAQPMTKK

SEQ ID NO: 70228 - protein, 9 aa, Homo sapiens
  misc_feature: Table A; Target 70228; HLA-A*31:01; PRAME; ENSG00000185686; TAA
AAQPMTKKR

SEQ ID NO: 70229 - protein, 9 aa, Homo sapiens
  misc_feature: Table A; Target 70229; HLA-A*33:01; PRAME; ENSG00000185686; TAA
AAQPMTKKR

SEQ ID NO: 70230 - protein, 9 aa, Homo sapiens
  misc_feature: Table A; Target 70230; HLA-A*02:07; PRAME; ENSG00000185686; TAA
ACDELFSYL

SEQ ID NO: 70231 - protein, 9 aa, Homo sapiens
  misc_feature: Table A; Target 70231; HLA-C*05:01; PRAME; ENSG00000185686; TAA
ACDELFSYL

SEQ ID NO: 70232 - protein, 8 aa, Homo sapiens
  misc_feature: Table A; Target 70232; HLA-B*37:01; PRAME; ENSG00000185686; TAA
AEQPFIPV

SEQ ID NO: 70233 - protein, 8 aa, Homo sapiens
  misc_feature: Table A; Target 70233; HLA-B*49:01; PRAME; ENSG00000185686; TAA
AEQPFIPV

SEQ ID NO: 70234 - protein, 10 aa, Homo sapiens
  misc_feature: Table A; Target 70234; HLA-A*30:01; PRAME; ENSG00000185686; TAA
AEQPFIPVEV

SEQ ID NO: 70235 - protein, 10 aa, Homo sapiens
  misc_feature: Table A; Target 70235; HLA-B*40:01; PRAME; ENSG00000185686; TAA
AEQPFIPVEV

SEQ ID NO: 70236 - protein, 10 aa, Homo sapiens
  misc_feature: Table A; Target 70236; HLA-B*40:02; PRAME; ENSG00000185686; TAA
AEQPFIPVEV

SEQ ID NO: 70237 - protein, 10 aa, Homo sapiens
  misc_feature: Table A; Target 70237; HLA-B*44:02; PRAME; ENSG00000185686; TAA
AEQPFIPVEV

SEQ ID NO: 70238 - protein, 10 aa, Homo sapiens
  misc_feature: Table A; Target 70238; HLA-B*44:03; PRAME; ENSG00000185686; TAA
AEQPFIPVEV

SEQ ID NO: 70239 - protein, 10 aa, Homo sapiens
  misc_feature: Table A; Target 70239; HLA-B*49:01; PRAME; ENSG00000185686; TAA
AEQPFIPVEV

SEQ ID NO: 70240 - protein, 11 aa, Homo sapiens
  misc_feature: Table A; Target 70240; HLA-A*30:01; PRAME; ENSG00000185686; TAA
AEQPFIPVEVL

SEQ ID NO: 70241 - protein, 11 aa, Homo sapiens
  misc_feature: Table A; Target 70241; HLA-B*44:02; PRAME; ENSG00000185686; TAA
AEQPFIPVEVL

SEQ ID NO: 70242 - protein, 11 aa, Homo sapiens
  misc_feature: Table A; Target 70242; HLA-B*44:03; PRAME; ENSG00000185686; TAA
AEQPFIPVEVL

SEQ ID NO: 70243 - protein, 10 aa, Homo sapiens
  misc_feature: Table A; Target 70243; HLA-B*55:01; PRAME; ENSG00000185686; TAA
AFDGRHSQTL

SEQ ID NO: 70244 - protein, 10 aa, Homo sapiens
  misc_feature: Table A; Target 70244; HLA-C*04:01; PRAME; ENSG00000185686; TAA
AFDGRHSQTL

SEQ ID NO: 70245 - protein, 10 aa, Homo sapiens
  misc_feature: Table A; Target 70245; HLA-C*07:02; PRAME; ENSG00000185686; TAA
AFDGRHSQTL

SEQ ID NO: 70246 - protein, 10 aa, Homo sapiens
  misc_feature: Table A; Target 70246; HLA-A*31:01; PRAME; ENSG00000185686; TAA
AIAALELLPR

SEQ ID NO: 70247 - protein, 10 aa, Homo sapiens
  misc_feature: Table A; Target 70247; HLA-A*33:01; PRAME; ENSG00000185686; TAA
AIAALELLPR

SEQ ID NO: 70248 - protein, 10 aa, Homo sapiens
  misc_feature: Table A; Target 70248; HLA-B*27:02; PRAME; ENSG00000185686; TAA
AIAALELLPR

SEQ ID NO: 70249 - protein, 10 aa, Homo sapiens
  misc_feature: Table A; Target 70249; HLA-B*15:03; PRAME; ENSG00000185686; TAA
AKFSPYLGQM

SEQ ID NO: 70250 - protein, 9 aa, Homo sapiens
  misc_feature: Table A; Target 70250; HLA-A*02:01; PRAME; ENSG00000185686; TAA
ALAIAALEL

SEQ ID NO: 70251 - protein, 9 aa, Homo sapiens
  misc_feature: Table A; Target 70251; HLA-A*02:03; PRAME; ENSG00000185686; TAA
ALAIAALEL

SEQ ID NO: 70252 - protein, 9 aa, Homo sapiens
  misc_feature: Table A; Target 70252; HLA-A*02:04; PRAME; ENSG00000185686; TAA
ALAIAALEL

SEQ ID NO: 70253 - protein, 9 aa, Homo sapiens
  misc_feature: Table A; Target 70253; HLA-B*13:02; PRAME; ENSG00000185686; TAA
ALAIAALEL

SEQ ID NO: 70254 - protein, 9 aa, Homo sapiens
  misc_feature: Table A; Target 70254; HLA-B*15:01; PRAME; ENSG00000185686; TAA
ALAIAALEL

SEQ ID NO: 70255 - protein, 9 aa, Homo sapiens
  misc_feature: Table A; Target 70255; HLA-C*01:02; PRAME; ENSG00000185686; TAA
ALAIAALEL

SEQ ID NO: 70256 - protein, 10 aa, Homo sapiens
  misc_feature: Table A; Target 70256; HLA-A*02:03; PRAME; ENSG00000185686; TAA
ALAIAALELL

SEQ ID NO: 70257 - protein, 10 aa, Homo sapiens
  misc_feature: Table A; Target 70257; HLA-A*02:04; PRAME; ENSG00000185686; TAA
ALAIAALELL

SEQ ID NO: 70258 - protein, 9 aa, Homo sapiens
  misc_feature: Table A; Target 70258; HLA-A*02:04; PRAME; ENSG00000185686; TAA
ALELLPREL

SEQ ID NO: 70259 - protein, 9 aa, Homo sapiens
  misc_feature: Table A; Target 70259; HLA-A*32:01; PRAME; ENSG00000185686; TAA
ALLERASAT

SEQ ID NO: 70260 - protein, 9 aa, Homo sapiens
  misc_feature: Table A; Target 70260; HLA-B*08:01; PRAME; ENSG00000185686; TAA
ALLERASAT

SEQ ID NO: 70261 - protein, 10 aa, Homo sapiens
  misc_feature: Table A; Target 70261; HLA-A*02:01; PRAME; ENSG00000185686; TAA
ALLERASATL

SEQ ID NO: 70262 - protein, 10 aa, Homo sapiens
  misc_feature: Table A; Target 70262; HLA-A*02:03; PRAME; ENSG00000185686; TAA
ALLERASATL

SEQ ID NO: 70263 - protein, 10 aa, Homo sapiens
  misc_feature: Table A; Target 70263; HLA-A*02:04; PRAME; ENSG00000185686; TAA
ALLERASATL

SEQ ID NO: 70264 - protein, 10 aa, Homo sapiens
  misc_feature: Table A; Target 70264; HLA-B*15:01; PRAME; ENSG00000185686; TAA
ALLERASATL

SEQ ID NO: 70265 - protein, 9 aa, Homo sapiens
  misc_feature: Table A; Target 70265; HLA-A*02:01; PRAME; ENSG00000185686; TAA
ALLPSLSHC

SEQ ID NO: 70266 - protein, 9 aa, Homo sapiens
  misc_feature: Table A; Target 70266; HLA-A*02:03; PRAME; ENSG00000185686; TAA
ALLPSLSHC

SEQ ID NO: 70267 - protein, 9 aa, Homo sapiens
  misc_feature: Table A; Target 70267; HLA-A*02:04; PRAME; ENSG00000185686; TAA
ALLPSLSHC

SEQ ID NO: 70268 - protein, 9 aa, Homo sapiens
  misc_feature: Table A; Target 70268; HLA-B*55:01; PRAME; ENSG00000185686; TAA
ALLPSLSHC

SEQ ID NO: 70269 - protein, 9 aa, Homo sapiens
  misc_feature: Table A; Target 70269; HLA-A*02:01; PRAME; ENSG00000185686; TAA
ALQSLLQHL

SEQ ID NO: 70270 - protein, 9 aa, Homo sapiens
  misc_feature: Table A; Target 70270; HLA-A*02:03; PRAME; ENSG00000185686; TAA
ALQSLLQHL

SEQ ID NO: 70271 - protein, 9 aa, Homo sapiens
  misc_feature: Table A; Target 70271; HLA-A*02:04; PRAME; ENSG00000185686; TAA
ALQSLLQHL

SEQ ID NO: 70272 - protein, 9 aa, Homo sapiens
  misc_feature: Table A; Target 70272; HLA-A*02:07; PRAME; ENSG00000185686; TAA
ALQSLLQHL

SEQ ID NO: 70273 - protein, 9 aa, Homo sapiens
  misc_feature: Table A; Target 70273; HLA-A*31:01; PRAME; ENSG00000185686; TAA
ALQSLLQHL

SEQ ID NO: 70274 - protein, 9 aa, Homo sapiens
  misc_feature: Table A; Target 70274; HLA-B*13:02; PRAME; ENSG00000185686; TAA
ALQSLLQHL

SEQ ID NO: 70275 - protein, 9 aa, Homo sapiens
  misc_feature: Table A; Target 70275; HLA-B*55:01; PRAME; ENSG00000185686; TAA
ALQSLLQHL

SEQ ID NO: 70276 - protein, 10 aa, Homo sapiens
  misc_feature: Table A; Target 70276; HLA-A*02:04; PRAME; ENSG00000185686; TAA
ALQSLLQHLI

SEQ ID NO: 70277 - protein, 9 aa, Homo sapiens
  misc_feature: Table A; Target 70277; HLA-A*29:02; PRAME; ENSG00000185686; TAA
ALYVDSLFF

SEQ ID NO: 70278 - protein, 10 aa, Homo sapiens
  misc_feature: Table A; Target 70278; HLA-A*02:01; PRAME; ENSG00000185686; TAA
ALYVDSLFFL

SEQ ID NO: 70279 - protein, 10 aa, Homo sapiens
  misc_feature: Table A; Target 70279; HLA-A*02:03; PRAME; ENSG00000185686; TAA
ALYVDSLFFL

SEQ ID NO: 70280 - protein, 10 aa, Homo sapiens
  misc_feature: Table A; Target 70280; HLA-A*02:04; PRAME; ENSG00000185686; TAA
ALYVDSLFFL

SEQ ID NO: 70281 - protein, 10 aa, Homo sapiens
  misc_feature: Table A; Target 70281; HLA-A*02:07; PRAME; ENSG00000185686; TAA
ALYVDSLFFL

SEQ ID NO: 70282 - protein, 11 aa, Homo sapiens
  misc_feature: Table A; Target 70282; HLA-A*03:01; PRAME; ENSG00000185686; TAA
ALYVDSLFFLR

SEQ ID NO: 70283 - protein, 11 aa, Homo sapiens
  misc_feature: Table A; Target 70283; HLA-A*31:01; PRAME; ENSG00000185686; TAA
ALYVDSLFFLR

SEQ ID NO: 70284 - protein, 8 aa, Homo sapiens
  misc_feature: Table A; Target 70284; HLA-B*13:02; PRAME; ENSG00000185686; TAA
AQFTSQFL

SEQ ID NO: 70285 - protein, 8 aa, Homo sapiens
  misc_feature: Table A; Target 70285; HLA-B*15:01; PRAME; ENSG00000185686; TAA
AQFTSQFL

SEQ ID NO: 70286 - protein, 8 aa, Homo sapiens
  misc_feature: Table A; Target 70286; HLA-B*15:03; PRAME; ENSG00000185686; TAA
AQFTSQFL

SEQ ID NO: 70287 - protein, 8 aa, Homo sapiens
  misc_feature: Table A; Target 70287; HLA-B*27:05; PRAME; ENSG00000185686; TAA
AQFTSQFL

SEQ ID NO: 70288 - protein, 8 aa, Homo sapiens
  misc_feature: Table A; Target 70288; HLA-B*37:01; PRAME; ENSG00000185686; TAA
AQFTSQFL

SEQ ID NO: 70289 - protein, 8 aa, Homo sapiens
  misc_feature: Table A; Target 70289; HLA-B*39:01; PRAME; ENSG00000185686; TAA
AQFTSQFL

SEQ ID NO: 70290 - protein, 10 aa, Homo sapiens
  misc_feature: Table A; Target 70290; HLA-A*02:04; PRAME; ENSG00000185686; TAA
AQFTSQFLSL

SEQ ID NO: 70291 - protein, 10 aa, Homo sapiens
  misc_feature: Table A; Target 70291; HLA-A*03:01; PRAME; ENSG00000185686; TAA
AQFTSQFLSL

SEQ ID NO: 70292 - protein, 10 aa, Homo sapiens
  misc_feature: Table A; Target 70292; HLA-A*25:01; PRAME; ENSG00000185686; TAA
AQFTSQFLSL

SEQ ID NO: 70293 - protein, 10 aa, Homo sapiens
  misc_feature: Table A; Target 70293; HLA-A*30:01; PRAME; ENSG00000185686; TAA
AQFTSQFLSL

SEQ ID NO: 70294 - protein, 10 aa, Homo sapiens
  misc_feature: Table A; Target 70294; HLA-B*13:02; PRAME; ENSG00000185686; TAA
AQFTSQFLSL

SEQ ID NO: 70295 - protein, 10 aa, Homo sapiens
  misc_feature: Table A; Target 70295; HLA-B*15:01; PRAME; ENSG00000185686; TAA
AQFTSQFLSL

SEQ ID NO: 70296 - protein, 10 aa, Homo sapiens
  misc_feature: Table A; Target 70296; HLA-B*15:03; PRAME; ENSG00000185686; TAA
AQFTSQFLSL

SEQ ID NO: 70297 - protein, 10 aa, Homo sapiens
  misc_feature: Table A; Target 70297; HLA-B*27:05; PRAME; ENSG00000185686; TAA
AQFTSQFLSL

SEQ ID NO: 70298 - protein, 10 aa, Homo sapiens
  misc_feature: Table A; Target 70298; HLA-B*39:01; PRAME; ENSG00000185686; TAA
AQFTSQFLSL

SEQ ID NO: 70299 - protein, 10 aa, Homo sapiens
  misc_feature: Table A; Target 70299; HLA-C*02:02; PRAME; ENSG00000185686; TAA
AQFTSQFLSL

SEQ ID NO: 70300 - protein, 10 aa, Homo sapiens
  misc_feature: Table A; Target 70300; HLA-C*16:04; PRAME; ENSG00000185686; TAA
AQFTSQFLSL

SEQ ID NO: 70301 - protein, 8 aa, Homo sapiens
  misc_feature: Table A; Target 70301; HLA-C*16:01; PRAME; ENSG00000185686; TAA
ASATLQDL

SEQ ID NO: 70302 - protein, 9 aa, Homo sapiens
  misc_feature: Table A; Target 70302; HLA-A*01:01; PRAME; ENSG00000185686; TAA
ASATLQDLV

SEQ ID NO: 70303 - protein, 10 aa, Homo sapiens
  misc_feature: Table A; Target 70303; HLA-A*23:01; PRAME; ENSG00000185686; TAA
ASATLQDLVF

SEQ ID NO: 70304 - protein, 10 aa, Homo sapiens
  misc_feature: Table A; Target 70304; HLA-B*57:01; PRAME; ENSG00000185686; TAA
ASATLQDLVF

SEQ ID NO: 70305 - protein, 10 aa, Homo sapiens
  misc_feature: Table A; Target 70305; HLA-B*58:01; PRAME; ENSG00000185686; TAA
ASATLQDLVF

SEQ ID NO: 70306 - protein, 9 aa, Homo sapiens
  misc_feature: Table A; Target 70306; HLA-A*01:01; PRAME; ENSG00000185686; TAA
ASSYISPEK

SEQ ID NO: 70307 - protein, 9 aa, Homo sapiens
  misc_feature: Table A; Target 70307; HLA-A*03:01; PRAME; ENSG00000185686; TAA
ASSYISPEK

SEQ ID NO: 70308 - protein, 9 aa, Homo sapiens
  misc_feature: Table A; Target 70308; HLA-A*03:02; PRAME; ENSG00000185686; TAA
ASSYISPEK

SEQ ID NO: 70309 - protein, 9 aa, Homo sapiens
  misc_feature: Table A; Target 70309; HLA-A*11:01; PRAME; ENSG00000185686; TAA
ASSYISPEK

SEQ ID NO: 70310 - protein, 9 aa, Homo sapiens
  misc_feature: Table A; Target 70310; HLA-A*68:01; PRAME; ENSG00000185686; TAA
ASSYISPEK

SEQ ID NO: 70311 - protein, 9 aa, Homo sapiens
  misc_feature: Table A; Target 70311; HLA-B*27:02; PRAME; ENSG00000185686; TAA
ASSYISPEK

SEQ ID NO: 70312 - protein, 9 aa, Homo sapiens
  misc_feature: Table A; Target 70312; HLA-B*27:05; PRAME; ENSG00000185686; TAA
ASSYISPEK

SEQ ID NO: 70313 - protein, 9 aa, Homo sapiens
  misc_feature: Table A; Target 70313; HLA-C*07:06; PRAME; ENSG00000185686; TAA
ASSYISPEK

SEQ ID NO: 70314 - protein, 9 aa, Homo sapiens
  misc_feature: Table A; Target 70314; HLA-A*02:01; PRAME; ENSG00000185686; TAA
AVLDGLDVL

SEQ ID NO: 70315 - protein, 9 aa, Homo sapiens
  misc_feature: Table A; Target 70315; HLA-A*02:04; PRAME; ENSG00000185686; TAA
AVLDGLDVL

SEQ ID NO: 70316 - protein, 9 aa, Homo sapiens
  misc_feature: Table A; Target 70316; HLA-A*02:07; PRAME; ENSG00000185686; TAA
AVLDGLDVL

SEQ ID NO: 70317 - protein, 9 aa, Homo sapiens
  misc_feature: Table A; Target 70317; HLA-A*23:01; PRAME; ENSG00000185686; TAA
AVLDGLDVL

SEQ ID NO: 70318 - protein, 9 aa, Homo sapiens
  misc_feature: Table A; Target 70318; HLA-A*25:01; PRAME; ENSG00000185686; TAA
AVLDGLDVL

SEQ ID NO: 70319 - protein, 9 aa, Homo sapiens
  misc_feature: Table A; Target 70319; HLA-B*15:01; PRAME; ENSG00000185686; TAA
AVLDGLDVL

SEQ ID NO: 70320 - protein, 9 aa, Homo sapiens
  misc_feature: Table A; Target 70320; HLA-B*27:05; PRAME; ENSG00000185686; TAA
AVLDGLDVL

SEQ ID NO: 70321 - protein, 9 aa, Homo sapiens
  misc_feature: Table A; Target 70321; HLA-B*39:01; PRAME; ENSG00000185686; TAA
AVLDGLDVL

SEQ ID NO: 70322 - protein, 9 aa, Homo sapiens
  misc_feature: Table A; Target 70322; HLA-B*40:01; PRAME; ENSG00000185686; TAA
AVLDGLDVL

SEQ ID NO: 70323 - protein, 9 aa, Homo sapiens
  misc_feature: Table A; Target 70323; HLA-B*46:01; PRAME; ENSG00000185686; TAA
AVLDGLDVL

SEQ ID NO: 70324 - protein, 9 aa, Homo sapiens
  misc_feature: Table A; Target 70324; HLA-B*55:01; PRAME; ENSG00000185686; TAA
AVLDGLDVL

SEQ ID NO: 70325 - protein, 9 aa, Homo sapiens
  misc_feature: Table A; Target 70325; HLA-C*01:02; PRAME; ENSG00000185686; TAA
AVLDGLDVL

SEQ ID NO: 70326 - protein, 9 aa, Homo sapiens
  misc_feature: Table A; Target 70326; HLA-C*03:03; PRAME; ENSG00000185686; TAA
AVLDGLDVL

SEQ ID NO: 70327 - protein, 9 aa, Homo sapiens
  misc_feature: Table A; Target 70327; HLA-C*03:04; PRAME; ENSG00000185686; TAA
AVLDGLDVL

SEQ ID NO: 70328 - protein, 9 aa, Homo sapiens
  misc_feature: Table A; Target 70328; HLA-C*05:01; PRAME; ENSG00000185686; TAA
AVLDGLDVL

SEQ ID NO: 70329 - protein, 10 aa, Homo sapiens
  misc_feature: Table A; Target 70329; HLA-A*02:01; PRAME; ENSG00000185686; TAA
AVLDGLDVLL

SEQ ID NO: 70330 - protein, 10 aa, Homo sapiens
  misc_feature: Table A; Target 70330; HLA-A*02:04; PRAME; ENSG00000185686; TAA
AVLDGLDVLL

SEQ ID NO: 70331 - protein, 10 aa, Homo sapiens
  misc_feature: Table A; Target 70331; HLA-A*02:07; PRAME; ENSG00000185686; TAA
AVLDGLDVLL

SEQ ID NO: 70332 - protein, 10 aa, Homo sapiens
  misc_feature: Table A; Target 70332; HLA-A*03:01; PRAME; ENSG00000185686; TAA
AVLDGLDVLL

SEQ ID NO: 70333 - protein, 10 aa, Homo sapiens
  misc_feature: Table A; Target 70333; HLA-A*03:02; PRAME; ENSG00000185686; TAA
AVLDGLDVLL

SEQ ID NO: 70334 - protein, 10 aa, Homo sapiens
  misc_feature: Table A; Target 70334; HLA-A*11:01; PRAME; ENSG00000185686; TAA
AVLDGLDVLL

SEQ ID NO: 70335 - protein, 10 aa, Homo sapiens
  misc_feature: Table A; Target 70335; HLA-A*68:02; PRAME; ENSG00000185686; TAA
AVLDGLDVLL

SEQ ID NO: 70336 - protein, 11 aa, Homo sapiens
  misc_feature: Table A; Target 70336; HLA-A*02:01; PRAME; ENSG00000185686; TAA
AVLDGLDVLLA

SEQ ID NO: 70337 - protein, 8 aa, Homo sapiens
  misc_feature: Table A; Target 70337; HLA-B*18:01; PRAME; ENSG00000185686; TAA
CELGRPSM

SEQ ID NO: 70338 - protein, 8 aa, Homo sapiens
  misc_feature: Table A; Target 70338; HLA-B*37:01; PRAME; ENSG00000185686; TAA
CELGRPSM

SEQ ID NO: 70339 - protein, 9 aa, Homo sapiens
  misc_feature: Table A; Target 70339; HLA-B*37:01; PRAME; ENSG00000185686; TAA
CELGRPSMV

SEQ ID NO: 70340 - protein, 9 aa, Homo sapiens
  misc_feature: Table A; Target 70340; HLA-B*49:01; PRAME; ENSG00000185686; TAA
CELGRPSMV

SEQ ID NO: 70341 - protein, 10 aa, Homo sapiens
  misc_feature: Table A; Target 70341; HLA-B*44:02; PRAME; ENSG00000185686; TAA
CELGRPSMVW

SEQ ID NO: 70342 - protein, 10 aa, Homo sapiens
  misc_feature: Table A; Target 70342; HLA-B*44:03; PRAME; ENSG00000185686; TAA
CELGRPSMVW

SEQ ID NO: 70343 - protein, 9 aa, Homo sapiens
  misc_feature: Table A; Target 70343; HLA-B*27:05; PRAME; ENSG00000185686; TAA
CRLSEGDVM

SEQ ID NO: 70344 - protein, 9 aa, Homo sapiens
  misc_feature: Table A; Target 70344; HLA-B*38:01; PRAME; ENSG00000185686; TAA
CRLSEGDVM

SEQ ID NO: 70345 - protein, 9 aa, Homo sapiens
  misc_feature: Table A; Target 70345; HLA-B*39:01; PRAME; ENSG00000185686; TAA
CRLSEGDVM

SEQ ID NO: 70346 - protein, 9 aa, Homo sapiens
  misc_feature: Table A; Target 70346; HLA-C*07:01; PRAME; ENSG00000185686; TAA
CRLSEGDVM

SEQ ID NO: 70347 - protein, 9 aa, Homo sapiens
  misc_feature: Table A; Target 70347; HLA-B*46:01; PRAME; ENSG00000185686; TAA
CSQLTTLSF

SEQ ID NO: 70348 - protein, 9 aa, Homo sapiens
  misc_feature: Table A; Target 70348; HLA-B*57:01; PRAME; ENSG00000185686; TAA
CSQLTTLSF

SEQ ID NO: 70349 - protein, 9 aa, Homo sapiens
  misc_feature: Table A; Target 70349; HLA-B*58:01; PRAME; ENSG00000185686; TAA
CSQLTTLSF

SEQ ID NO: 70350 - protein, 9 aa, Homo sapiens
  misc_feature: Table A; Target 70350; HLA-C*01:02; PRAME; ENSG00000185686; TAA
CSQLTTLSF

SEQ ID NO: 70351 - protein, 10 aa, Homo sapiens
  misc_feature: Table A; Target 70351; HLA-A*01:01; PRAME; ENSG00000185686; TAA
CSQLTTLSFY

SEQ ID NO: 70352 - protein, 10 aa, Homo sapiens
  misc_feature: Table A; Target 70352; HLA-C*07:01; PRAME; ENSG00000185686; TAA
CSQLTTLSFY

SEQ ID NO: 70353 - protein, 8 aa, Homo sapiens
  misc_feature: Table A; Target 70353; HLA-B*18:01; PRAME; ENSG00000185686; TAA
DEALAIAA

SEQ ID NO: 70354 - protein, 9 aa, Homo sapiens
  misc_feature: Table A; Target 70354; HLA-A*25:01; PRAME; ENSG00000185686; TAA
DEALAIAAL

SEQ ID NO: 70355 - protein, 9 aa, Homo sapiens
  misc_feature: Table A; Target 70355; HLA-A*30:01; PRAME; ENSG00000185686; TAA
DEALAIAAL

SEQ ID NO: 70356 - protein, 9 aa, Homo sapiens
  misc_feature: Table A; Target 70356; HLA-B*18:01; PRAME; ENSG00000185686; TAA
DEALAIAAL

SEQ ID NO: 70357 - protein, 9 aa, Homo sapiens
  misc_feature: Table A; Target 70357; HLA-B*27:05; PRAME; ENSG00000185686; TAA
DEALAIAAL

SEQ ID NO: 70358 - protein, 9 aa, Homo sapiens
  misc_feature: Table A; Target 70358; HLA-B*37:01; PRAME; ENSG00000185686; TAA
DEALAIAAL

SEQ ID NO: 70359 - protein, 9 aa, Homo sapiens
  misc_feature: Table A; Target 70359; HLA-B*38:01; PRAME; ENSG00000185686; TAA
DEALAIAAL

SEQ ID NO: 70360 - protein, 9 aa, Homo sapiens
  misc_feature: Table A; Target 70360; HLA-B*39:01; PRAME; ENSG00000185686; TAA
DEALAIAAL

SEQ ID NO: 70361 - protein, 9 aa, Homo sapiens
  misc_feature: Table A; Target 70361; HLA-B*40:01; PRAME; ENSG00000185686; TAA
DEALAIAAL

SEQ ID NO: 70362 - protein, 9 aa, Homo sapiens
  misc_feature: Table A; Target 70362; HLA-B*40:02; PRAME; ENSG00000185686; TAA
DEALAIAAL

SEQ ID NO: 70363 - protein, 9 aa, Homo sapiens
  misc_feature: Table A; Target 70363; HLA-B*44:02; PRAME; ENSG00000185686; TAA
DEALAIAAL

SEQ ID NO: 70364 - protein, 9 aa, Homo sapiens
  misc_feature: Table A; Target 70364; HLA-B*44:03; PRAME; ENSG00000185686; TAA
DEALAIAAL

SEQ ID NO: 70365 - protein, 9 aa, Homo sapiens
  misc_feature: Table A; Target 70365; HLA-B*49:01; PRAME; ENSG00000185686; TAA
DEALAIAAL

SEQ ID NO: 70366 - protein, 11 aa, Homo sapiens
  misc_feature: Table A; Target 70366; HLA-B*18:01; PRAME; ENSG00000185686; TAA
DEALAIAALEL

SEQ ID NO: 70367 - protein, 11 aa, Homo sapiens
  misc_feature: Table A; Target 70367; HLA-B*38:01; PRAME; ENSG00000185686; TAA
DECGITDDQLL

SEQ ID NO: 70368 - protein, 8 aa, Homo sapiens
  misc_feature: Table A; Target 70368; HLA-B*18:01; PRAME; ENSG00000185686; TAA
DELFSYLI

SEQ ID NO: 70369 - protein, 8 aa, Homo sapiens
  misc_feature: Table A; Target 70369; HLA-B*49:01; PRAME; ENSG00000185686; TAA
DELFSYLI

SEQ ID NO: 70370 - protein, 10 aa, Homo sapiens
  misc_feature: Table A; Target 70370; HLA-B*27:02; PRAME; ENSG00000185686; TAA
DELFSYLIEK

SEQ ID NO: 70371 - protein, 8 aa, Homo sapiens
  misc_feature: Table A; Target 70371; HLA-B*51:01; PRAME; ENSG00000185686; TAA
DGLDVLLA

SEQ ID NO: 70372 - protein, 9 aa, Homo sapiens
  misc_feature: Table A; Target 70372; HLA-A*33:01; PRAME; ENSG00000185686; TAA
DGLDVLLAQ

SEQ ID NO: 70373 - protein, 8 aa, Homo sapiens
  misc_feature: Table A; Target 70373; HLA-B*08:01; PRAME; ENSG00000185686; TAA
DGRHSQTL

SEQ ID NO: 70374 - protein, 8 aa, Homo sapiens
  misc_feature: Table A; Target 70374; HLA-B*51:01; PRAME; ENSG00000185686; TAA
DGRHSQTL

SEQ ID NO: 70375 - protein, 9 aa, Homo sapiens
  misc_feature: Table A; Target 70375; HLA-A*33:01; PRAME; ENSG00000185686; TAA
DGRHSQTLK

SEQ ID NO: 70376 - protein, 8 aa, Homo sapiens
  misc_feature: Table A; Target 70376; HLA-B*08:01; PRAME; ENSG00000185686; TAA
DIHGTLHL

SEQ ID NO: 70377 - protein, 10 aa, Homo sapiens
  misc_feature: Table A; Target 70377; HLA-A*33:01; PRAME; ENSG00000185686; TAA
DIHGTLHLER

SEQ ID NO: 70378 - protein, 10 aa, Homo sapiens
  misc_feature: Table A; Target 70378; HLA-A*33:03; PRAME; ENSG00000185686; TAA
DIHGTLHLER

SEQ ID NO: 70379 - protein, 10 aa, Homo sapiens
  misc_feature: Table A; Target 70379; HLA-A*68:01; PRAME; ENSG00000185686; TAA
DIHGTLHLER

SEQ ID NO: 70380 - protein, 8 aa, Homo sapiens
  misc_feature: Table A; Target 70380; HLA-B*08:01; PRAME; ENSG00000185686; TAA
DIKMILKM

SEQ ID NO: 70381 - protein, 8 aa, Homo sapiens
  misc_feature: Table A; Target 70381; HLA-B*08:01; PRAME; ENSG00000185686; TAA
DLFLKEGA

SEQ ID NO: 70382 - protein, 8 aa, Homo sapiens
  misc_feature: Table A; Target 70382; HLA-B*08:01; PRAME; ENSG00000185686; TAA
DQLLRHVM

SEQ ID NO: 70383 - protein, 8 aa, Homo sapiens
  misc_feature: Table A; Target 70383; HLA-B*51:01; PRAME; ENSG00000185686; TAA
DSIEDLEV

SEQ ID NO: 70384 - protein, 9 aa, Homo sapiens
  misc_feature: Table A; Target 70384; HLA-A*33:01; PRAME; ENSG00000185686; TAA
DSLFFLRGR

SEQ ID NO: 70385 - protein, 8 aa, Homo sapiens
  misc_feature: Table A; Target 70385; HLA-B*08:01; PRAME; ENSG00000185686; TAA
DVLLAQEV

SEQ ID NO: 70386 - protein, 8 aa, Homo sapiens
  misc_feature: Table A; Target 70386; HLA-B*18:01; PRAME; ENSG00000185686; TAA
DVLLAQEV

SEQ ID NO: 70387 - protein, 8 aa, Homo sapiens
  misc_feature: Table A; Target 70387; HLA-B*51:01; PRAME; ENSG00000185686; TAA
DVLLAQEV

SEQ ID NO: 70388 - protein, 8 aa, Homo sapiens
  misc_feature: Table A; Target 70388; HLA-C*07:01; PRAME; ENSG00000185686; TAA
DVLLAQEV

SEQ ID NO: 70389 - protein, 9 aa, Homo sapiens
  misc_feature: Table A; Target 70389; HLA-A*33:01; PRAME; ENSG00000185686; TAA
DVLLAQEVR

SEQ ID NO: 70390 - protein, 9 aa, Homo sapiens
  misc_feature: Table A; Target 70390; HLA-A*33:03; PRAME; ENSG00000185686; TAA
DVLLAQEVR

SEQ ID NO: 70391 - protein, 9 aa, Homo sapiens
  misc_feature: Table A; Target 70391; HLA-A*68:01; PRAME; ENSG00000185686; TAA
DVLLAQEVR

SEQ ID NO: 70392 - protein, 9 aa, Homo sapiens
  misc_feature: Table A; Target 70392; HLA-C*07:06; PRAME; ENSG00000185686; TAA
DVLLAQEVR

SEQ ID NO: 70393 - protein, 11 aa, Homo sapiens
  misc_feature: Table A; Target 70393; HLA-A*33:01; PRAME; ENSG00000185686; TAA
DVLLAQEVRPR

SEQ ID NO: 70394 - protein, 11 aa, Homo sapiens
  misc_feature: Table A; Target 70394; HLA-A*33:03; PRAME; ENSG00000185686; TAA
DVLLAQEVRPR

SEQ ID NO: 70395 - protein, 11 aa, Homo sapiens
  misc_feature: Table A; Target 70395; HLA-A*68:01; PRAME; ENSG00000185686; TAA
DVLLAQEVRPR

SEQ ID NO: 70396 - protein, 11 aa, Homo sapiens
  misc_feature: Table A; Target 70396; HLA-C*07:06; PRAME; ENSG00000185686; TAA
DVLLAQEVRPR

SEQ ID NO: 70397 - protein, 11 aa, Homo sapiens
  misc_feature: Table A; Target 70397; HLA-B*51:01; PRAME; ENSG00000185686; TAA
DVMHLSQSPSV

SEQ ID NO: 70398 - protein, 9 aa, Homo sapiens
  misc_feature: Table A; Target 70398; HLA-A*25:01; PRAME; ENSG00000185686; TAA
DVSPEPLQA

SEQ ID NO: 70399 - protein, 9 aa, Homo sapiens
  misc_feature: Table A; Target 70399; HLA-A*26:01; PRAME; ENSG00000185686; TAA
DVSPEPLQA

SEQ ID NO: 70400 - protein, 9 aa, Homo sapiens
  misc_feature: Table A; Target 70400; HLA-A*68:01; PRAME; ENSG00000185686; TAA
DVSPEPLQA

SEQ ID NO: 70401 - protein, 10 aa, Homo sapiens
  misc_feature: Table A; Target 70401; HLA-A*25:01; PRAME; ENSG00000185686; TAA
DVSPEPLQAL

SEQ ID NO: 70402 - protein, 10 aa, Homo sapiens
  misc_feature: Table A; Target 70402; HLA-A*26:01; PRAME; ENSG00000185686; TAA
DVSPEPLQAL

SEQ ID NO: 70403 - protein, 10 aa, Homo sapiens
  misc_feature: Table A; Target 70403; HLA-A*68:01; PRAME; ENSG00000185686; TAA
DVSPEPLQAL

SEQ ID NO: 70404 - protein, 10 aa, Homo sapiens
  misc_feature: Table A; Target 70404; HLA-A*68:02; PRAME; ENSG00000185686; TAA
DVSPEPLQAL

SEQ ID NO: 70405 - protein, 10 aa, Homo sapiens
  misc_feature: Table A; Target 70405; HLA-B*27:05; PRAME; ENSG00000185686; TAA
DVSPEPLQAL

SEQ ID NO: 70406 - protein, 10 aa, Homo sapiens
  misc_feature: Table A; Target 70406; HLA-B*35:03; PRAME; ENSG00000185686; TAA
DVSPEPLQAL

SEQ ID NO: 70407 - protein, 10 aa, Homo sapiens
  misc_feature: Table A; Target 70407; HLA-B*38:01; PRAME; ENSG00000185686; TAA
DVSPEPLQAL

SEQ ID NO: 70408 - protein, 10 aa, Homo sapiens
  misc_feature: Table A; Target 70408; HLA-B*39:01; PRAME; ENSG00000185686; TAA
DVSPEPLQAL

SEQ ID NO: 70409 - protein, 10 aa, Homo sapiens
  misc_feature: Table A; Target 70409; HLA-C*07:06; PRAME; ENSG00000185686; TAA
DVSPEPLQAL

SEQ ID NO: 70410 - protein, 11 aa, Homo sapiens
  misc_feature: Table A; Target 70410; HLA-A*25:01; PRAME; ENSG00000185686; TAA
DVSPEPLQALL

SEQ ID NO: 70411 - protein, 11 aa, Homo sapiens
  misc_feature: Table A; Target 70411; HLA-A*26:01; PRAME; ENSG00000185686; TAA
DVSPEPLQALL

SEQ ID NO: 70412 - protein, 11 aa, Homo sapiens
  misc_feature: Table A; Target 70412; HLA-A*33:01; PRAME; ENSG00000185686; TAA
DVSPEPLQALL

SEQ ID NO: 70413 - protein, 11 aa, Homo sapiens
  misc_feature: Table A; Target 70413; HLA-A*33:03; PRAME; ENSG00000185686; TAA
DVSPEPLQALL

SEQ ID NO: 70414 - protein, 11 aa, Homo sapiens
  misc_feature: Table A; Target 70414; HLA-A*68:01; PRAME; ENSG00000185686; TAA
DVSPEPLQALL

SEQ ID NO: 70415 - protein, 11 aa, Homo sapiens
  misc_feature: Table A; Target 70415; HLA-A*68:02; PRAME; ENSG00000185686; TAA
DVSPEPLQALL

SEQ ID NO: 70416 - protein, 11 aa, Homo sapiens
  misc_feature: Table A; Target 70416; HLA-C*07:06; PRAME; ENSG00000185686; TAA
DVSPEPLQALL

SEQ ID NO: 70417 - protein, 8 aa, Homo sapiens
  misc_feature: Table A; Target 70417; HLA-A*33:03; PRAME; ENSG00000185686; TAA
EAAQPMTK

SEQ ID NO: 70418 - protein, 8 aa, Homo sapiens
  misc_feature: Table A; Target 70418; HLA-A*68:01; PRAME; ENSG00000185686; TAA
EAAQPMTK

SEQ ID NO: 70419 - protein, 8 aa, Homo sapiens
  misc_feature: Table A; Target 70419; HLA-B*27:02; PRAME; ENSG00000185686; TAA
EAAQPMTK

SEQ ID NO: 70420 - protein, 8 aa, Homo sapiens
  misc_feature: Table A; Target 70420; HLA-B*51:01; PRAME; ENSG00000185686; TAA
EAAQPMTK

SEQ ID NO: 70421 - protein, 8 aa, Homo sapiens
  misc_feature: Table A; Target 70421; HLA-C*07:01; PRAME; ENSG00000185686; TAA
EAAQPMTK

SEQ ID NO: 70422 - protein, 9 aa, Homo sapiens
  misc_feature: Table A; Target 70422; HLA-A*03:01; PRAME; ENSG00000185686; TAA
EAAQPMTKK

SEQ ID NO: 70423 - protein, 9 aa, Homo sapiens
  misc_feature: Table A; Target 70423; HLA-A*11:01; PRAME; ENSG00000185686; TAA
EAAQPMTKK

SEQ ID NO: 70424 - protein, 9 aa, Homo sapiens
  misc_feature: Table A; Target 70424; HLA-A*25:01; PRAME; ENSG00000185686; TAA
EAAQPMTKK

SEQ ID NO: 70425 - protein, 9 aa, Homo sapiens
  misc_feature: Table A; Target 70425; HLA-A*26:01; PRAME; ENSG00000185686; TAA
EAAQPMTKK

SEQ ID NO: 70426 - protein, 9 aa, Homo sapiens
  misc_feature: Table A; Target 70426; HLA-A*33:01; PRAME; ENSG00000185686; TAA
EAAQPMTKK

SEQ ID NO: 70427 - protein, 9 aa, Homo sapiens
  misc_feature: Table A; Target 70427; HLA-A*33:03; PRAME; ENSG00000185686; TAA
EAAQPMTKK

SEQ ID NO: 70428 - protein, 9 aa, Homo sapiens
  misc_feature: Table A; Target 70428; HLA-A*68:01; PRAME; ENSG00000185686; TAA
EAAQPMTKK

SEQ ID NO: 70429 - protein, 9 aa, Homo sapiens
  misc_feature: Table A; Target 70429; HLA-B*51:01; PRAME; ENSG00000185686; TAA
EAAQPMTKK

SEQ ID NO: 70430 - protein, 9 aa, Homo sapiens
  misc_feature: Table A; Target 70430; HLA-C*07:06; PRAME; ENSG00000185686; TAA
EAAQPMTKK

SEQ ID NO: 70431 - protein, 10 aa, Homo sapiens
  misc_feature: Table A; Target 70431; HLA-A*33:01; PRAME; ENSG00000185686; TAA
EAAQPMTKKR

SEQ ID NO: 70432 - protein, 10 aa, Homo sapiens
  misc_feature: Table A; Target 70432; HLA-A*33:03; PRAME; ENSG00000185686; TAA
EAAQPMTKKR

SEQ ID NO: 70433 - protein, 10 aa, Homo sapiens
  misc_feature: Table A; Target 70433; HLA-A*68:01; PRAME; ENSG00000185686; TAA
EAAQPMTKKR

SEQ ID NO: 70434 - protein, 10 aa, Homo sapiens
  misc_feature: Table A; Target 70434; HLA-C*07:06; PRAME; ENSG00000185686; TAA
EAAQPMTKKR

SEQ ID NO: 70435 - protein, 9 aa, Homo sapiens
  misc_feature: Table A; Target 70435; HLA-A*68:02; PRAME; ENSG00000185686; TAA
EAEQPFIPV

SEQ ID NO: 70436 - protein, 11 aa, Homo sapiens
  misc_feature: Table A; Target 70436; HLA-A*68:02; PRAME; ENSG00000185686; TAA
EAEQPFIPVEV

SEQ ID NO: 70437 - protein, 8 aa, Homo sapiens
  misc_feature: Table A; Target 70437; HLA-A*25:01; PRAME; ENSG00000185686; TAA
EALAIAAL

SEQ ID NO: 70438 - protein, 8 aa, Homo sapiens
  misc_feature: Table A; Target 70438; HLA-B*08:01; PRAME; ENSG00000185686; TAA
EALAIAAL

SEQ ID NO: 70439 - protein, 8 aa, Homo sapiens
  misc_feature: Table A; Target 70439; HLA-B*18:01; PRAME; ENSG00000185686; TAA
EALAIAAL

SEQ ID NO: 70440 - protein, 8 aa, Homo sapiens
  misc_feature: Table A; Target 70440; HLA-B*35:01; PRAME; ENSG00000185686; TAA
EALAIAAL

SEQ ID NO: 70441 - protein, 8 aa, Homo sapiens
  misc_feature: Table A; Target 70441; HLA-B*35:03; PRAME; ENSG00000185686; TAA
EALAIAAL

SEQ ID NO: 70442 - protein, 8 aa, Homo sapiens
  misc_feature: Table A; Target 70442; HLA-B*51:01; PRAME; ENSG00000185686; TAA
EALAIAAL

SEQ ID NO: 70443 - protein, 10 aa, Homo sapiens
  misc_feature: Table A; Target 70443; HLA-A*25:01; PRAME; ENSG00000185686; TAA
EALAIAALEL

SEQ ID NO: 70444 - protein, 10 aa, Homo sapiens
  misc_feature: Table A; Target 70444; HLA-B*35:03; PRAME; ENSG00000185686; TAA
EALAIAALEL

SEQ ID NO: 70445 - protein, 8 aa, Homo sapiens
  misc_feature: Table A; Target 70445; HLA-C*07:01; PRAME; ENSG00000185686; TAA
EDIHGTLH

SEQ ID NO: 70446 - protein, 9 aa, Homo sapiens
  misc_feature: Table A; Target 70446; HLA-A*68:02; PRAME; ENSG00000185686; TAA
EDIHGTLHL

SEQ ID NO: 70447 - protein, 9 aa, Homo sapiens
  misc_feature: Table A; Target 70447; HLA-B*40:02; PRAME; ENSG00000185686; TAA
EDIHGTLHL

SEQ ID NO: 70448 - protein, 9 aa, Homo sapiens
  misc_feature: Table A; Target 70448; HLA-B*44:03; PRAME; ENSG00000185686; TAA
EDIHGTLHL

SEQ ID NO: 70449 - protein, 11 aa, Homo sapiens
  misc_feature: Table A; Target 70449; HLA-A*33:01; PRAME; ENSG00000185686; TAA
EDIHGTLHLER

SEQ ID NO: 70450 - protein, 9 aa, Homo sapiens
  misc_feature: Table A; Target 70450; HLA-A*25:01; PRAME; ENSG00000185686; TAA
EDLEVTCTW

SEQ ID NO: 70451 - protein, 9 aa, Homo sapiens
  misc_feature: Table A; Target 70451; HLA-B*18:01; PRAME; ENSG00000185686; TAA
EDLEVTCTW

SEQ ID NO: 70452 - protein, 9 aa, Homo sapiens
  misc_feature: Table A; Target 70452; HLA-B*27:02; PRAME; ENSG00000185686; TAA
EDLEVTCTW

SEQ ID NO: 70453 - protein, 9 aa, Homo sapiens
  misc_feature: Table A; Target 70453; HLA-B*44:02; PRAME; ENSG00000185686; TAA
EDLEVTCTW

SEQ ID NO: 70454 - protein, 9 aa, Homo sapiens
  misc_feature: Table A; Target 70454; HLA-B*44:03; PRAME; ENSG00000185686; TAA
EDLEVTCTW

SEQ ID NO: 70455 - protein, 9 aa, Homo sapiens
  misc_feature: Table A; Target 70455; HLA-C*16:04; PRAME; ENSG00000185686; TAA
EDLEVTCTW

SEQ ID NO: 70456 - protein, 8 aa, Homo sapiens
  misc_feature: Table A; Target 70456; HLA-B*18:01; PRAME; ENSG00000185686; TAA
EEQYIAQF

SEQ ID NO: 70457 - protein, 8 aa, Homo sapiens
  misc_feature: Table A; Target 70457; HLA-B*37:01; PRAME; ENSG00000185686; TAA
EEQYIAQF

SEQ ID NO: 70458 - protein, 8 aa, Homo sapiens
  misc_feature: Table A; Target 70458; HLA-B*44:02; PRAME; ENSG00000185686; TAA
EEQYIAQF

SEQ ID NO: 70459 - protein, 8 aa, Homo sapiens
  misc_feature: Table A; Target 70459; HLA-B*44:03; PRAME; ENSG00000185686; TAA
EEQYIAQF

SEQ ID NO: 70460 - protein, 9 aa, Homo sapiens
  misc_feature: Table A; Target 70460; HLA-A*01:01; PRAME; ENSG00000185686; TAA
ELAGQSLLK

SEQ ID NO: 70461 - protein, 9 aa, Homo sapiens
  misc_feature: Table A; Target 70461; HLA-A*03:01; PRAME; ENSG00000185686; TAA
ELAGQSLLK

SEQ ID NO: 70462 - protein, 9 aa, Homo sapiens
  misc_feature: Table A; Target 70462; HLA-A*03:02; PRAME; ENSG00000185686; TAA
ELAGQSLLK

SEQ ID NO: 70463 - protein, 9 aa, Homo sapiens
  misc_feature: Table A; Target 70463; HLA-A*33:03; PRAME; ENSG00000185686; TAA
ELAGQSLLK

SEQ ID NO: 70464 - protein, 9 aa, Homo sapiens
  misc_feature: Table A; Target 70464; HLA-A*68:01; PRAME; ENSG00000185686; TAA
ELAGQSLLK

SEQ ID NO: 70465 - protein, 9 aa, Homo sapiens
  misc_feature: Table A; Target 70465; HLA-C*07:06; PRAME; ENSG00000185686; TAA
ELAGQSLLK

SEQ ID NO: 70466 - protein, 8 aa, Homo sapiens
  misc_feature: Table A; Target 70466; HLA-A*01:01; PRAME; ENSG00000185686; TAA
ELFPPLFM

SEQ ID NO: 70467 - protein, 9 aa, Homo sapiens
  misc_feature: Table A; Target 70467; HLA-A*02:01; PRAME; ENSG00000185686; TAA
ELFPPLFMA

SEQ ID NO: 70468 - protein, 9 aa, Homo sapiens
  misc_feature: Table A; Target 70468; HLA-A*02:03; PRAME; ENSG00000185686; TAA
ELFPPLFMA

SEQ ID NO: 70469 - protein, 9 aa, Homo sapiens
  misc_feature: Table A; Target 70469; HLA-A*02:04; PRAME; ENSG00000185686; TAA
ELFPPLFMA

SEQ ID NO: 70470 - protein, 9 aa, Homo sapiens
  misc_feature: Table A; Target 70470; HLA-A*02:07; PRAME; ENSG00000185686; TAA
ELFPPLFMA

SEQ ID NO: 70471 - protein, 9 aa, Homo sapiens
  misc_feature: Table A; Target 70471; HLA-A*68:02; PRAME; ENSG00000185686; TAA
ELFPPLFMA

SEQ ID NO: 70472 - protein, 9 aa, Homo sapiens
  misc_feature: Table A; Target 70472; HLA-B*54:01; PRAME; ENSG00000185686; TAA
ELFPPLFMA

SEQ ID NO: 70473 - protein, 10 aa, Homo sapiens
  misc_feature: Table A; Target 70473; HLA-A*02:03; PRAME; ENSG00000185686; TAA
ELFPPLFMAA

SEQ ID NO: 70474 - protein, 10 aa, Homo sapiens
  misc_feature: Table A; Target 70474; HLA-A*02:07; PRAME; ENSG00000185686; TAA
ELFPPLFMAA

SEQ ID NO: 70475 - protein, 10 aa, Homo sapiens
  misc_feature: Table A; Target 70475; HLA-A*68:02; PRAME; ENSG00000185686; TAA
ELFPPLFMAA

SEQ ID NO: 70476 - protein, 10 aa, Homo sapiens
  misc_feature: Table A; Target 70476; HLA-B*54:01; PRAME; ENSG00000185686; TAA
ELFPPLFMAA

SEQ ID NO: 70477 - protein, 11 aa, Homo sapiens
  misc_feature: Table A; Target 70477; HLA-A*68:02; PRAME; ENSG00000185686; TAA
ELFPPLFMAAF

SEQ ID NO: 70478 - protein, 9 aa, Homo sapiens
  misc_feature: Table A; Target 70478; HLA-A*03:01; PRAME; ENSG00000185686; TAA
ELFSYLIEK

SEQ ID NO: 70479 - protein, 9 aa, Homo sapiens
  misc_feature: Table A; Target 70479; HLA-A*03:02; PRAME; ENSG00000185686; TAA
ELFSYLIEK

SEQ ID NO: 70480 - protein, 9 aa, Homo sapiens
  misc_feature: Table A; Target 70480; HLA-A*11:01; PRAME; ENSG00000185686; TAA
ELFSYLIEK

SEQ ID NO: 70481 - protein, 9 aa, Homo sapiens
  misc_feature: Table A; Target 70481; HLA-A*33:01; PRAME; ENSG00000185686; TAA
ELFSYLIEK

SEQ ID NO: 70482 - protein, 9 aa, Homo sapiens
  misc_feature: Table A; Target 70482; HLA-A*33:03; PRAME; ENSG00000185686; TAA
ELFSYLIEK

SEQ ID NO: 70483 - protein, 9 aa, Homo sapiens
  misc_feature: Table A; Target 70483; HLA-A*68:01; PRAME; ENSG00000185686; TAA
ELFSYLIEK

SEQ ID NO: 70484 - protein, 9 aa, Homo sapiens
  misc_feature: Table A; Target 70484; HLA-A*68:02; PRAME; ENSG00000185686; TAA
ELFSYLIEK

SEQ ID NO: 70485 - protein, 9 aa, Homo sapiens
  misc_feature: Table A; Target 70485; HLA-B*27:02; PRAME; ENSG00000185686; TAA
ELFSYLIEK

SEQ ID NO: 70486 - protein, 9 aa, Homo sapiens
  misc_feature: Table A; Target 70486; HLA-C*07:06; PRAME; ENSG00000185686; TAA
ELFSYLIEK

SEQ ID NO: 70487 - protein, 10 aa, Homo sapiens
  misc_feature: Table A; Target 70487; HLA-A*02:03; PRAME; ENSG00000185686; TAA
ELFSYLIEKV

SEQ ID NO: 70488 - protein, 10 aa, Homo sapiens
  misc_feature: Table A; Target 70488; HLA-A*02:04; PRAME; ENSG00000185686; TAA
ELFSYLIEKV

SEQ ID NO: 70489 - protein, 10 aa, Homo sapiens
  misc_feature: Table A; Target 70489; HLA-A*02:07; PRAME; ENSG00000185686; TAA
ELFSYLIEKV

SEQ ID NO: 70490 - protein, 10 aa, Homo sapiens
  misc_feature: Table A; Target 70490; HLA-A*26:01; PRAME; ENSG00000185686; TAA
ELFSYLIEKV

SEQ ID NO: 70491 - protein, 10 aa, Homo sapiens
  misc_feature: Table A; Target 70491; HLA-A*68:02; PRAME; ENSG00000185686; TAA
ELFSYLIEKV

SEQ ID NO: 70492 - protein, 9 aa, Homo sapiens
  misc_feature: Table A; Target 70492; HLA-A*25:01; PRAME; ENSG00000185686; TAA
ELGRPSMVW

SEQ ID NO: 70493 - protein, 8 aa, Homo sapiens
  misc_feature: Table A; Target 70493; HLA-B*35:03; PRAME; ENSG00000185686; TAA
EPEAAQPM

SEQ ID NO: 70494 - protein, 10 aa, Homo sapiens
  misc_feature: Table A; Target 70494; HLA-A*68:01; PRAME; ENSG00000185686; TAA
EPEAAQPMTK

SEQ ID NO: 70495 - protein, 10 aa, Homo sapiens
  misc_feature: Table A; Target 70495; HLA-B*27:02; PRAME; ENSG00000185686; TAA
EPEAAQPMTK

SEQ ID NO: 70496 - protein, 10 aa, Homo sapiens
  misc_feature: Table A; Target 70496; HLA-C*07:06; PRAME; ENSG00000185686; TAA
EPEAAQPMTK

SEQ ID NO: 70497 - protein, 9 aa, Homo sapiens
  misc_feature: Table A; Target 70497; HLA-A*33:01; PRAME; ENSG00000185686; TAA
EPLQALLER

SEQ ID NO: 70498 - protein, 9 aa, Homo sapiens
  misc_feature: Table A; Target 70498; HLA-A*33:03; PRAME; ENSG00000185686; TAA
EPLQALLER

SEQ ID NO: 70499 - protein, 9 aa, Homo sapiens
  misc_feature: Table A; Target 70499; HLA-A*68:01; PRAME; ENSG00000185686; TAA
EPLQALLER

SEQ ID NO: 70500 - protein, 9 aa, Homo sapiens
  misc_feature: Table A; Target 70500; HLA-C*07:06; PRAME; ENSG00000185686; TAA
EPLQALLER

SEQ ID NO: 70501 - protein, 10 aa, Homo sapiens
  misc_feature: Table A; Target 70501; HLA-B*54:01; PRAME; ENSG00000185686; TAA
EPLQALLERA

SEQ ID NO: 70502 - protein, 10 aa, Homo sapiens
  misc_feature: Table A; Target 70502; HLA-B*56:01; PRAME; ENSG00000185686; TAA
EPLQALLERA

SEQ ID NO: 70503 - protein, 9 aa, Homo sapiens
  misc_feature: Table A; Target 70503; HLA-A*02:07; PRAME; ENSG00000185686; TAA
EQPFIPVEV

SEQ ID NO: 70504 - protein, 9 aa, Homo sapiens
  misc_feature: Table A; Target 70504; HLA-A*26:01; PRAME; ENSG00000185686; TAA
EQPFIPVEV

SEQ ID NO: 70505 - protein, 9 aa, Homo sapiens
  misc_feature: Table A; Target 70505; HLA-A*68:02; PRAME; ENSG00000185686; TAA
EQPFIPVEV

SEQ ID NO: 70506 - protein, 9 aa, Homo sapiens
  misc_feature: Table A; Target 70506; HLA-B*13:02; PRAME; ENSG00000185686; TAA
EQPFIPVEV

SEQ ID NO: 70507 - protein, 11 aa, Homo sapiens
  misc_feature: Table A; Target 70507; HLA-A*26:01; PRAME; ENSG00000185686; TAA
EQYIAQFTSQF

SEQ ID NO: 70508 - protein, 11 aa, Homo sapiens
  misc_feature: Table A; Target 70508; HLA-B*38:01; PRAME; ENSG00000185686; TAA
EQYIAQFTSQF

SEQ ID NO: 70509 - protein, 9 aa, Homo sapiens
  misc_feature: Table A; Target 70509; HLA-A*33:01; PRAME; ENSG00000185686; TAA
ERLAYLHAR

SEQ ID NO: 70510 - protein, 9 aa, Homo sapiens
  misc_feature: Table A; Target 70510; HLA-A*33:03; PRAME; ENSG00000185686; TAA
ERLAYLHAR

SEQ ID NO: 70511 - protein, 10 aa, Homo sapiens
  misc_feature: Table A; Target 70511; HLA-A*25:01; PRAME; ENSG00000185686; TAA
ESYEDIHGTL

SEQ ID NO: 70512 - protein, 10 aa, Homo sapiens
  misc_feature: Table A; Target 70512; HLA-A*26:01; PRAME; ENSG00000185686; TAA
ESYEDIHGTL

SEQ ID NO: 70513 - protein, 10 aa, Homo sapiens
  misc_feature: Table A; Target 70513; HLA-A*33:03; PRAME; ENSG00000185686; TAA
ESYEDIHGTL

SEQ ID NO: 70514 - protein, 10 aa, Homo sapiens
  misc_feature: Table A; Target 70514; HLA-A*68:01; PRAME; ENSG00000185686; TAA
ESYEDIHGTL

SEQ ID NO: 70515 - protein, 10 aa, Homo sapiens
  misc_feature: Table A; Target 70515; HLA-A*68:02; PRAME; ENSG00000185686; TAA
ESYEDIHGTL

SEQ ID NO: 70516 - protein, 10 aa, Homo sapiens
  misc_feature: Table A; Target 70516; HLA-A*25:01; PRAME; ENSG00000185686; TAA
ETFKAVLDGL

SEQ ID NO: 70517 - protein, 10 aa, Homo sapiens
  misc_feature: Table A; Target 70517; HLA-A*26:01; PRAME; ENSG00000185686; TAA
ETFKAVLDGL

SEQ ID NO: 70518 - protein, 10 aa, Homo sapiens
  misc_feature: Table A; Target 70518; HLA-A*68:01; PRAME; ENSG00000185686; TAA
ETFKAVLDGL

SEQ ID NO: 70519 - protein, 10 aa, Homo sapiens
  misc_feature: Table A; Target 70519; HLA-A*68:02; PRAME; ENSG00000185686; TAA
ETFKAVLDGL

SEQ ID NO: 70520 - protein, 9 aa, Homo sapiens
  misc_feature: Table A; Target 70520; HLA-A*26:01; PRAME; ENSG00000185686; TAA
ETLSITNCR

SEQ ID NO: 70521 - protein, 9 aa, Homo sapiens
  misc_feature: Table A; Target 70521; HLA-A*33:01; PRAME; ENSG00000185686; TAA
ETLSITNCR

SEQ ID NO: 70522 - protein, 9 aa, Homo sapiens
  misc_feature: Table A; Target 70522; HLA-A*33:03; PRAME; ENSG00000185686; TAA
ETLSITNCR

SEQ ID NO: 70523 - protein, 9 aa, Homo sapiens
  misc_feature: Table A; Target 70523; HLA-A*68:01; PRAME; ENSG00000185686; TAA
ETLSITNCR

SEQ ID NO: 70524 - protein, 9 aa, Homo sapiens
  misc_feature: Table A; Target 70524; HLA-C*07:06; PRAME; ENSG00000185686; TAA
ETLSITNCR

SEQ ID NO: 70525 - protein, 10 aa, Homo sapiens
  misc_feature: Table A; Target 70525; HLA-A*33:03; PRAME; ENSG00000185686; TAA
ETLSITNCRL

SEQ ID NO: 70526 - protein, 10 aa, Homo sapiens
  misc_feature: Table A; Target 70526; HLA-A*68:02; PRAME; ENSG00000185686; TAA
ETLSITNCRL

SEQ ID NO: 70527 - protein, 8 aa, Homo sapiens
  misc_feature: Table A; Target 70527; HLA-B*08:01; PRAME; ENSG00000185686; TAA
FAMPMQDI

SEQ ID NO: 70528 - protein, 8 aa, Homo sapiens
  misc_feature: Table A; Target 70528; HLA-B*13:02; PRAME; ENSG00000185686; TAA
FAMPMQDI

SEQ ID NO: 70529 - protein, 8 aa, Homo sapiens
  misc_feature: Table A; Target 70529; HLA-B*46:01; PRAME; ENSG00000185686; TAA
FAMPMQDI

SEQ ID NO: 70530 - protein, 8 aa, Homo sapiens
  misc_feature: Table A; Target 70530; HLA-B*51:01; PRAME; ENSG00000185686; TAA
FAMPMQDI

SEQ ID NO: 70531 - protein, 8 aa, Homo sapiens
  misc_feature: Table A; Target 70531; HLA-B*54:01; PRAME; ENSG00000185686; TAA
FAMPMQDI

SEQ ID NO: 70532 - protein, 8 aa, Homo sapiens
  misc_feature: Table A; Target 70532; HLA-C*03:03; PRAME; ENSG00000185686; TAA
FAMPMQDI

SEQ ID NO: 70533 - protein, 8 aa, Homo sapiens
  misc_feature: Table A; Target 70533; HLA-C*03:04; PRAME; ENSG00000185686; TAA
FAMPMQDI

SEQ ID NO: 70534 - protein, 8 aa, Homo sapiens
  misc_feature: Table A; Target 70534; HLA-C*05:01; PRAME; ENSG00000185686; TAA
FAMPMQDI

SEQ ID NO: 70535 - protein, 8 aa, Homo sapiens
  misc_feature: Table A; Target 70535; HLA-C*16:02; PRAME; ENSG00000185686; TAA
FAMPMQDI

SEQ ID NO: 70536 - protein, 8 aa, Homo sapiens
  misc_feature: Table A; Target 70536; HLA-C*16:04; PRAME; ENSG00000185686; TAA
FAMPMQDI

SEQ ID NO: 70537 - protein, 9 aa, Homo sapiens
  misc_feature: Table A; Target 70537; HLA-B*27:02; PRAME; ENSG00000185686; TAA
FAMPMQDIK

SEQ ID NO: 70538 - protein, 10 aa, Homo sapiens
  misc_feature: Table A; Target 70538; HLA-B*35:01; PRAME; ENSG00000185686; TAA
FAMPMQDIKM

SEQ ID NO: 70539 - protein, 10 aa, Homo sapiens
  misc_feature: Table A; Target 70539; HLA-B*35:03; PRAME; ENSG00000185686; TAA
FAMPMQDIKM

SEQ ID NO: 70540 - protein, 10 aa, Homo sapiens
  misc_feature: Table A; Target 70540; HLA-B*54:01; PRAME; ENSG00000185686; TAA
FAMPMQDIKM

SEQ ID NO: 70541 - protein, 10 aa, Homo sapiens
  misc_feature: Table A; Target 70541; HLA-B*55:01; PRAME; ENSG00000185686; TAA
FAMPMQDIKM

SEQ ID NO: 70542 - protein, 10 aa, Homo sapiens
  misc_feature: Table A; Target 70542; HLA-C*02:02; PRAME; ENSG00000185686; TAA
FAMPMQDIKM

SEQ ID NO: 70543 - protein, 9 aa, Homo sapiens
  misc_feature: Table A; Target 70543; HLA-A*30:01; PRAME; ENSG00000185686; TAA
FDGRHSQTL

SEQ ID NO: 70544 - protein, 9 aa, Homo sapiens
  misc_feature: Table A; Target 70544; HLA-B*37:01; PRAME; ENSG00000185686; TAA
FDGRHSQTL

SEQ ID NO: 70545 - protein, 9 aa, Homo sapiens
  misc_feature: Table A; Target 70545; HLA-B*38:01; PRAME; ENSG00000185686; TAA
FDGRHSQTL

SEQ ID NO: 70546 - protein, 9 aa, Homo sapiens
  misc_feature: Table A; Target 70546; HLA-B*40:02; PRAME; ENSG00000185686; TAA
FDGRHSQTL

SEQ ID NO: 70547 - protein, 9 aa, Homo sapiens
  misc_feature: Table A; Target 70547; HLA-C*04:01; PRAME; ENSG00000185686; TAA
FDGRHSQTL

SEQ ID NO: 70548 - protein, 9 aa, Homo sapiens
  misc_feature: Table A; Target 70548; HLA-C*07:01; PRAME; ENSG00000185686; TAA
FDGRHSQTL

SEQ ID NO: 70549 - protein, 9 aa, Homo sapiens
  misc_feature: Table A; Target 70549; HLA-C*07:02; PRAME; ENSG00000185686; TAA
FDGRHSQTL

SEQ ID NO: 70550 - protein, 10 aa, Homo sapiens
  misc_feature: Table A; Target 70550; HLA-A*02:07; PRAME; ENSG00000185686; TAA
FIPVEVLVDL

SEQ ID NO: 70551 - protein, 10 aa, Homo sapiens
  misc_feature: Table A; Target 70551; HLA-A*02:03; PRAME; ENSG00000185686; TAA
FLKEGACDEL

SEQ ID NO: 70552 - protein, 10 aa, Homo sapiens
  misc_feature: Table A; Target 70552; HLA-B*46:01; PRAME; ENSG00000185686; TAA
FLKEGACDEL

SEQ ID NO: 70553 - protein, 9 aa, Homo sapiens
  misc_feature: Table A; Target 70553; HLA-A*02:03; PRAME; ENSG00000185686; TAA
FLRGRLDQL

SEQ ID NO: 70554 - protein, 9 aa, Homo sapiens
  misc_feature: Table A; Target 70554; HLA-A*02:04; PRAME; ENSG00000185686; TAA
FLRGRLDQL

SEQ ID NO: 70555 - protein, 9 aa, Homo sapiens
  misc_feature: Table A; Target 70555; HLA-B*35:01; PRAME; ENSG00000185686; TAA
FPEPEAAQP

SEQ ID NO: 70556 - protein, 9 aa, Homo sapiens
  misc_feature: Table A; Target 70556; HLA-B*35:03; PRAME; ENSG00000185686; TAA
FPEPEAAQP

SEQ ID NO: 70557 - protein, 9 aa, Homo sapiens
  misc_feature: Table A; Target 70557; HLA-B*55:01; PRAME; ENSG00000185686; TAA
FPEPEAAQP

SEQ ID NO: 70558 - protein, 10 aa, Homo sapiens
  misc_feature: Table A; Target 70558; HLA-A*01:01; PRAME; ENSG00000185686; TAA
FPEPEAAQPM

SEQ ID NO: 70559 - protein, 10 aa, Homo sapiens
  misc_feature: Table A; Target 70559; HLA-B*07:02; PRAME; ENSG00000185686; TAA
FPEPEAAQPM

SEQ ID NO: 70560 - protein, 10 aa, Homo sapiens
  misc_feature: Table A; Target 70560; HLA-B*27:02; PRAME; ENSG00000185686; TAA
FPEPEAAQPM

SEQ ID NO: 70561 - protein, 10 aa, Homo sapiens
  misc_feature: Table A; Target 70561; HLA-B*35:01; PRAME; ENSG00000185686; TAA
FPEPEAAQPM

SEQ ID NO: 70562 - protein, 10 aa, Homo sapiens
  misc_feature: Table A; Target 70562; HLA-B*35:03; PRAME; ENSG00000185686; TAA
FPEPEAAQPM

SEQ ID NO: 70563 - protein, 10 aa, Homo sapiens
  misc_feature: Table A; Target 70563; HLA-B*54:01; PRAME; ENSG00000185686; TAA
FPEPEAAQPM

SEQ ID NO: 70564 - protein, 10 aa, Homo sapiens
  misc_feature: Table A; Target 70564; HLA-B*55:01; PRAME; ENSG00000185686; TAA
FPEPEAAQPM

SEQ ID NO: 70565 - protein, 10 aa, Homo sapiens
  misc_feature: Table A; Target 70565; HLA-C*01:02; PRAME; ENSG00000185686; TAA
FPEPEAAQPM

SEQ ID NO: 70566 - protein, 10 aa, Homo sapiens
  misc_feature: Table A; Target 70566; HLA-C*03:03; PRAME; ENSG00000185686; TAA
FPEPEAAQPM

SEQ ID NO: 70567 - protein, 10 aa, Homo sapiens
  misc_feature: Table A; Target 70567; HLA-C*04:01; PRAME; ENSG00000185686; TAA
FPEPEAAQPM

SEQ ID NO: 70568 - protein, 10 aa, Homo sapiens
  misc_feature: Table A; Target 70568; HLA-C*05:01; PRAME; ENSG00000185686; TAA
FPEPEAAQPM

SEQ ID NO: 70569 - protein, 10 aa, Homo sapiens
  misc_feature: Table A; Target 70569; HLA-C*07:02; PRAME; ENSG00000185686; TAA
FPEPEAAQPM

SEQ ID NO: 70570 - protein, 10 aa, Homo sapiens
  misc_feature: Table A; Target 70570; HLA-C*07:04; PRAME; ENSG00000185686; TAA
FPEPEAAQPM

SEQ ID NO: 70571 - protein, 11 aa, Homo sapiens
  misc_feature: Table A; Target 70571; HLA-B*35:01; PRAME; ENSG00000185686; TAA
FPEPEAAQPMT

SEQ ID NO: 70572 - protein, 11 aa, Homo sapiens
  misc_feature: Table A; Target 70572; HLA-B*35:03; PRAME; ENSG00000185686; TAA
FPEPEAAQPMT

SEQ ID NO: 70573 - protein, 11 aa, Homo sapiens
  misc_feature: Table A; Target 70573; HLA-B*54:01; PRAME; ENSG00000185686; TAA
FPEPEAAQPMT

SEQ ID NO: 70574 - protein, 11 aa, Homo sapiens
  misc_feature: Table A; Target 70574; HLA-B*55:01; PRAME; ENSG00000185686; TAA
FPEPEAAQPMT

SEQ ID NO: 70575 - protein, 11 aa, Homo sapiens
  misc_feature: Table A; Target 70575; HLA-C*04:01; PRAME; ENSG00000185686; TAA
FPEPEAAQPMT

SEQ ID NO: 70576 - protein, 8 aa, Homo sapiens
  misc_feature: Table A; Target 70576; HLA-B*54:01; PRAME; ENSG00000185686; TAA
FPPLFMAA

SEQ ID NO: 70577 - protein, 8 aa, Homo sapiens
  misc_feature: Table A; Target 70577; HLA-B*56:01; PRAME; ENSG00000185686; TAA
FPPLFMAA

SEQ ID NO: 70578 - protein, 9 aa, Homo sapiens
  misc_feature: Table A; Target 70578; HLA-B*35:01; PRAME; ENSG00000185686; TAA
FPPLFMAAF

SEQ ID NO: 70579 - protein, 9 aa, Homo sapiens
  misc_feature: Table A; Target 70579; HLA-B*54:01; PRAME; ENSG00000185686; TAA
FPPLFMAAF

SEQ ID NO: 70580 - protein, 9 aa, Homo sapiens
  misc_feature: Table A; Target 70580; HLA-B*56:01; PRAME; ENSG00000185686; TAA
FPPLFMAAF

SEQ ID NO: 70581 - protein, 9 aa, Homo sapiens
  misc_feature: Table A; Target 70581; HLA-A*68:02; PRAME; ENSG00000185686; TAA
FSPYLGQMI

SEQ ID NO: 70582 - protein, 8 aa, Homo sapiens
  misc_feature: Table A; Target 70582; HLA-A*02:03; PRAME; ENSG00000185686; TAA
FSYLIEKV

SEQ ID NO: 70583 - protein, 8 aa, Homo sapiens
  misc_feature: Table A; Target 70583; HLA-A*68:02; PRAME; ENSG00000185686; TAA
FSYLIEKV

SEQ ID NO: 70584 - protein, 8 aa, Homo sapiens
  misc_feature: Table A; Target 70584; HLA-B*08:01; PRAME; ENSG00000185686; TAA
FSYLIEKV

SEQ ID NO: 70585 - protein, 8 aa, Homo sapiens
  misc_feature: Table A; Target 70585; HLA-B*13:02; PRAME; ENSG00000185686; TAA
FSYLIEKV

SEQ ID NO: 70586 - protein, 8 aa, Homo sapiens
  misc_feature: Table A; Target 70586; HLA-B*40:02; PRAME; ENSG00000185686; TAA
FSYLIEKV

SEQ ID NO: 70587 - protein, 8 aa, Homo sapiens
  misc_feature: Table A; Target 70587; HLA-B*49:01; PRAME; ENSG00000185686; TAA
FSYLIEKV

SEQ ID NO: 70588 - protein, 8 aa, Homo sapiens
  misc_feature: Table A; Target 70588; HLA-B*51:01; PRAME; ENSG00000185686; TAA
FSYLIEKV

SEQ ID NO: 70589 - protein, 8 aa, Homo sapiens
  misc_feature: Table A; Target 70589; HLA-B*54:01; PRAME; ENSG00000185686; TAA
FSYLIEKV

SEQ ID NO: 70590 - protein, 8 aa, Homo sapiens
  misc_feature: Table A; Target 70590; HLA-C*02:02; PRAME; ENSG00000185686; TAA
FSYLIEKV

SEQ ID NO: 70591 - protein, 8 aa, Homo sapiens
  misc_feature: Table A; Target 70591; HLA-C*06:02; PRAME; ENSG00000185686; TAA
FSYLIEKV

SEQ ID NO: 70592 - protein, 8 aa, Homo sapiens
  misc_feature: Table A; Target 70592; HLA-C*12:03; PRAME; ENSG00000185686; TAA
FSYLIEKV

SEQ ID NO: 70593 - protein, 9 aa, Homo sapiens
  misc_feature: Table A; Target 70593; HLA-A*03:01; PRAME; ENSG00000185686; TAA
FSYLIEKVK

SEQ ID NO: 70594 - protein, 9 aa, Homo sapiens
  misc_feature: Table A; Target 70594; HLA-B*57:01; PRAME; ENSG00000185686; TAA
FSYLIEKVK

SEQ ID NO: 70595 - protein, 10 aa, Homo sapiens
  misc_feature: Table A; Target 70595; HLA-A*31:01; PRAME; ENSG00000185686; TAA
FSYLIEKVKR

SEQ ID NO: 70596 - protein, 10 aa, Homo sapiens
  misc_feature: Table A; Target 70596; HLA-A*33:01; PRAME; ENSG00000185686; TAA
FSYLIEKVKR

SEQ ID NO: 70597 - protein, 10 aa, Homo sapiens
  misc_feature: Table A; Target 70597; HLA-A*33:03; PRAME; ENSG00000185686; TAA
FSYLIEKVKR

SEQ ID NO: 70598 - protein, 9 aa, Homo sapiens
  misc_feature: Table A; Target 70598; HLA-C*03:04; PRAME; ENSG00000185686; TAA
FTCLPLGVL

SEQ ID NO: 70599 - protein, 10 aa, Homo sapiens
  misc_feature: Table A; Target 70599; HLA-A*01:01; PRAME; ENSG00000185686; TAA
FTCLPLGVLM

SEQ ID NO: 70600 - protein, 8 aa, Homo sapiens
  misc_feature: Table A; Target 70600; HLA-C*03:03; PRAME; ENSG00000185686; TAA
FTSQFLSL

SEQ ID NO: 70601 - protein, 8 aa, Homo sapiens
  misc_feature: Table A; Target 70601; HLA-C*03:04; PRAME; ENSG00000185686; TAA
FTSQFLSL

SEQ ID NO: 70602 - protein, 8 aa, Homo sapiens
  misc_feature: Table A; Target 70602; HLA-B*35:01; PRAME; ENSG00000185686; TAA
FYDPEPIL

SEQ ID NO: 70603 - protein, 8 aa, Homo sapiens
  misc_feature: Table A; Target 70603; HLA-B*35:03; PRAME; ENSG00000185686; TAA
FYDPEPIL

SEQ ID NO: 70604 - protein, 8 aa, Homo sapiens
  misc_feature: Table A; Target 70604; HLA-C*04:01; PRAME; ENSG00000185686; TAA
FYDPEPIL

SEQ ID NO: 70605 - protein, 9 aa, Homo sapiens
  misc_feature: Table A; Target 70605; HLA-A*02:01; PRAME; ENSG00000185686; TAA
FYDPEPILC

SEQ ID NO: 70606 - protein, 9 aa, Homo sapiens
  misc_feature: Table A; Target 70606; HLA-B*35:03; PRAME; ENSG00000185686; TAA
FYDPEPILC

SEQ ID NO: 70607 - protein, 9 aa, Homo sapiens
  misc_feature: Table A; Target 70607; HLA-C*04:01; PRAME; ENSG00000185686; TAA
FYDPEPILC

SEQ ID NO: 70608 - protein, 8 aa, Homo sapiens
  misc_feature: Table A; Target 70608; HLA-A*23:01; PRAME; ENSG00000185686; TAA
FYGNSISI

SEQ ID NO: 70609 - protein, 8 aa, Homo sapiens
  misc_feature: Table A; Target 70609; HLA-A*24:02; PRAME; ENSG00000185686; TAA
FYGNSISI

SEQ ID NO: 70610 - protein, 8 aa, Homo sapiens
  misc_feature: Table A; Target 70610; HLA-B*07:02; PRAME; ENSG00000185686; TAA
FYGNSISI

SEQ ID NO: 70611 - protein, 8 aa, Homo sapiens
  misc_feature: Table A; Target 70611; HLA-B*35:03; PRAME; ENSG00000185686; TAA
FYGNSISI

SEQ ID NO: 70612 - protein, 8 aa, Homo sapiens
  misc_feature: Table A; Target 70612; HLA-C*01:02; PRAME; ENSG00000185686; TAA
FYGNSISI

SEQ ID NO: 70613 - protein, 8 aa, Homo sapiens
  misc_feature: Table A; Target 70613; HLA-C*04:01; PRAME; ENSG00000185686; TAA
FYGNSISI

SEQ ID NO: 70614 - protein, 8 aa, Homo sapiens
  misc_feature: Table A; Target 70614; HLA-C*06:02; PRAME; ENSG00000185686; TAA
FYGNSISI

SEQ ID NO: 70615 - protein, 8 aa, Homo sapiens
  misc_feature: Table A; Target 70615; HLA-C*07:01; PRAME; ENSG00000185686; TAA
FYGNSISI

SEQ ID NO: 70616 - protein, 8 aa, Homo sapiens
  misc_feature: Table A; Target 70616; HLA-C*07:02; PRAME; ENSG00000185686; TAA
FYGNSISI

SEQ ID NO: 70617 - protein, 8 aa, Homo sapiens
  misc_feature: Table A; Target 70617; HLA-C*07:04; PRAME; ENSG00000185686; TAA
FYGNSISI

SEQ ID NO: 70618 - protein, 8 aa, Homo sapiens
  misc_feature: Table A; Target 70618; HLA-C*12:03; PRAME; ENSG00000185686; TAA
FYGNSISI

SEQ ID NO: 70619 - protein, 8 aa, Homo sapiens
  misc_feature: Table A; Target 70619; HLA-C*14:02; PRAME; ENSG00000185686; TAA
FYGNSISI

SEQ ID NO: 70620 - protein, 10 aa, Homo sapiens
  misc_feature: Table A; Target 70620; HLA-B*54:01; PRAME; ENSG00000185686; TAA
FYGNSISISA

SEQ ID NO: 70621 - protein, 10 aa, Homo sapiens
  misc_feature: Table A; Target 70621; HLA-B*56:01; PRAME; ENSG00000185686; TAA
FYGNSISISA

SEQ ID NO: 70622 - protein, 10 aa, Homo sapiens
  misc_feature: Table A; Target 70622; HLA-C*14:02; PRAME; ENSG00000185686; TAA
FYGNSISISA

SEQ ID NO: 70623 - protein, 11 aa, Homo sapiens
  misc_feature: Table A; Target 70623; HLA-A*24:02; PRAME; ENSG00000185686; TAA
FYGNSISISAL

SEQ ID NO: 70624 - protein, 11 aa, Homo sapiens
  misc_feature: Table A; Target 70624; HLA-C*14:02; PRAME; ENSG00000185686; TAA
FYGNSISISAL

SEQ ID NO: 70625 - protein, 9 aa, Homo sapiens
  misc_feature: Table A; Target 70625; HLA-A*03:02; PRAME; ENSG00000185686; TAA
GACDELFSY

SEQ ID NO: 70626 - protein, 9 aa, Homo sapiens
  misc_feature: Table A; Target 70626; HLA-A*11:01; PRAME; ENSG00000185686; TAA
GACDELFSY

SEQ ID NO: 70627 - protein, 9 aa, Homo sapiens
  misc_feature: Table A; Target 70627; HLA-A*26:01; PRAME; ENSG00000185686; TAA
GACDELFSY

SEQ ID NO: 70628 - protein, 9 aa, Homo sapiens
  misc_feature: Table A; Target 70628; HLA-A*29:02; PRAME; ENSG00000185686; TAA
GACDELFSY

SEQ ID NO: 70629 - protein, 9 aa, Homo sapiens
  misc_feature: Table A; Target 70629; HLA-A*30:02; PRAME; ENSG00000185686; TAA
GACDELFSY

SEQ ID NO: 70630 - protein, 9 aa, Homo sapiens
  misc_feature: Table A; Target 70630; HLA-B*15:01; PRAME; ENSG00000185686; TAA
GACDELFSY

SEQ ID NO: 70631 - protein, 9 aa, Homo sapiens
  misc_feature: Table A; Target 70631; HLA-B*35:01; PRAME; ENSG00000185686; TAA
GACDELFSY

SEQ ID NO: 70632 - protein, 9 aa, Homo sapiens
  misc_feature: Table A; Target 70632; HLA-B*46:01; PRAME; ENSG00000185686; TAA
GACDELFSY

SEQ ID NO: 70633 - protein, 9 aa, Homo sapiens
  misc_feature: Table A; Target 70633; HLA-C*02:02; PRAME; ENSG00000185686; TAA
GACDELFSY

SEQ ID NO: 70634 - protein, 9 aa, Homo sapiens
  misc_feature: Table A; Target 70634; HLA-C*07:01; PRAME; ENSG00000185686; TAA
GACDELFSY

SEQ ID NO: 70635 - protein, 9 aa, Homo sapiens
  misc_feature: Table A; Target 70635; HLA-B*13:02; PRAME; ENSG00000185686; TAA
GITDDQLLA

SEQ ID NO: 70636 - protein, 10 aa, Homo sapiens
  misc_feature: Table A; Target 70636; HLA-A*02:01; PRAME; ENSG00000185686; TAA
GLDVLLAQEV

SEQ ID NO: 70637 - protein, 10 aa, Homo sapiens
  misc_feature: Table A; Target 70637; HLA-A*02:07; PRAME; ENSG00000185686; TAA
GLDVLLAQEV

SEQ ID NO: 70638 - protein, 10 aa, Homo sapiens
  misc_feature: Table A; Target 70638; HLA-B*13:02; PRAME; ENSG00000185686; TAA
GLDVLLAQEV

SEQ ID NO: 70639 - protein, 10 aa, Homo sapiens
  misc_feature: Table A; Target 70639; HLA-B*55:01; PRAME; ENSG00000185686; TAA
GLDVLLAQEV

SEQ ID NO: 70640 - protein, 9 aa, Homo sapiens
  misc_feature: Table A; Target 70640; HLA-A*02:01; PRAME; ENSG00000185686; TAA
GLSNLTHVL

SEQ ID NO: 70641 - protein, 9 aa, Homo sapiens
  misc_feature: Table A; Target 70641; HLA-A*02:03; PRAME; ENSG00000185686; TAA
GLSNLTHVL

SEQ ID NO: 70642 - protein, 9 aa, Homo sapiens
  misc_feature: Table A; Target 70642; HLA-A*02:04; PRAME; ENSG00000185686; TAA
GLSNLTHVL

SEQ ID NO: 70643 - protein, 9 aa, Homo sapiens
  misc_feature: Table A; Target 70643; HLA-A*02:07; PRAME; ENSG00000185686; TAA
GLSNLTHVL

SEQ ID NO: 70644 - protein, 9 aa, Homo sapiens
  misc_feature: Table A; Target 70644; HLA-A*03:01; PRAME; ENSG00000185686; TAA
GLSNLTHVL

SEQ ID NO: 70645 - protein, 9 aa, Homo sapiens
  misc_feature: Table A; Target 70645; HLA-A*03:02; PRAME; ENSG00000185686; TAA
GLSNLTHVL

SEQ ID NO: 70646 - protein, 9 aa, Homo sapiens
  misc_feature: Table A; Target 70646; HLA-A*30:01; PRAME; ENSG00000185686; TAA
GLSNLTHVL

SEQ ID NO: 70647 - protein, 9 aa, Homo sapiens
  misc_feature: Table A; Target 70647; HLA-A*32:01; PRAME; ENSG00000185686; TAA
GLSNLTHVL

SEQ ID NO: 70648 - protein, 9 aa, Homo sapiens
  misc_feature: Table A; Target 70648; HLA-B*13:02; PRAME; ENSG00000185686; TAA
GLSNLTHVL

SEQ ID NO: 70649 - protein, 9 aa, Homo sapiens
  misc_feature: Table A; Target 70649; HLA-B*15:01; PRAME; ENSG00000185686; TAA
GLSNLTHVL

SEQ ID NO: 70650 - protein, 9 aa, Homo sapiens
  misc_feature: Table A; Target 70650; HLA-B*15:03; PRAME; ENSG00000185686; TAA
GLSNLTHVL

SEQ ID NO: 70651 - protein, 9 aa, Homo sapiens
  misc_feature: Table A; Target 70651; HLA-B*27:05; PRAME; ENSG00000185686; TAA
GLSNLTHVL

SEQ ID NO: 70652 - protein, 9 aa, Homo sapiens
  misc_feature: Table A; Target 70652; HLA-B*37:01; PRAME; ENSG00000185686; TAA
GLSNLTHVL

SEQ ID NO: 70653 - protein, 9 aa, Homo sapiens
  misc_feature: Table A; Target 70653; HLA-B*38:01; PRAME; ENSG00000185686; TAA
GLSNLTHVL

SEQ ID NO: 70654 - protein, 9 aa, Homo sapiens
  misc_feature: Table A; Target 70654; HLA-B*40:01; PRAME; ENSG00000185686; TAA
GLSNLTHVL

SEQ ID NO: 70655 - protein, 9 aa, Homo sapiens
  misc_feature: Table A; Target 70655; HLA-B*55:01; PRAME; ENSG00000185686; TAA
GLSNLTHVL

SEQ ID NO: 70656 - protein, 9 aa, Homo sapiens
  misc_feature: Table A; Target 70656; HLA-C*02:02; PRAME; ENSG00000185686; TAA
GLSNLTHVL

SEQ ID NO: 70657 - protein, 9 aa, Homo sapiens
  misc_feature: Table A; Target 70657; HLA-C*06:02; PRAME; ENSG00000185686; TAA
GLSNLTHVL

SEQ ID NO: 70658 - protein, 9 aa, Homo sapiens
  misc_feature: Table A; Target 70658; HLA-C*07:04; PRAME; ENSG00000185686; TAA
GLSNLTHVL

SEQ ID NO: 70659 - protein, 9 aa, Homo sapiens
  misc_feature: Table A; Target 70659; HLA-C*16:01; PRAME; ENSG00000185686; TAA
GLSNLTHVL

SEQ ID NO: 70660 - protein, 9 aa, Homo sapiens
  misc_feature: Table A; Target 70660; HLA-C*16:02; PRAME; ENSG00000185686; TAA
GLSNLTHVL

SEQ ID NO: 70661 - protein, 10 aa, Homo sapiens
  misc_feature: Table A; Target 70661; HLA-A*01:01; PRAME; ENSG00000185686; TAA
GLSNLTHVLY

SEQ ID NO: 70662 - protein, 10 aa, Homo sapiens
  misc_feature: Table A; Target 70662; HLA-A*29:02; PRAME; ENSG00000185686; TAA
GLSNLTHVLY

SEQ ID NO: 70663 - protein, 10 aa, Homo sapiens
  misc_feature: Table A; Target 70663; HLA-A*30:02; PRAME; ENSG00000185686; TAA
GLSNLTHVLY

SEQ ID NO: 70664 - protein, 10 aa, Homo sapiens
  misc_feature: Table A; Target 70664; HLA-B*15:01; PRAME; ENSG00000185686; TAA
GLSNLTHVLY

SEQ ID NO: 70665 - protein, 11 aa, Homo sapiens
  misc_feature: Table A; Target 70665; HLA-A*02:01; PRAME; ENSG00000185686; TAA
GLSTEAEQPFI

SEQ ID NO: 70666 - protein, 11 aa, Homo sapiens
  misc_feature: Table A; Target 70666; HLA-B*13:02; PRAME; ENSG00000185686; TAA
GLSTEAEQPFI

SEQ ID NO: 70667 - protein, 9 aa, Homo sapiens
  misc_feature: Table A; Target 70667; HLA-B*27:05; PRAME; ENSG00000185686; TAA
GNSISISAL

SEQ ID NO: 70668 - protein, 9 aa, Homo sapiens
  misc_feature: Table A; Target 70668; HLA-B*37:01; PRAME; ENSG00000185686; TAA
GNSISISAL

SEQ ID NO: 70669 - protein, 9 aa, Homo sapiens
  misc_feature: Table A; Target 70669; HLA-B*39:01; PRAME; ENSG00000185686; TAA
GNSISISAL

SEQ ID NO: 70670 - protein, 9 aa, Homo sapiens
  misc_feature: Table A; Target 70670; HLA-B*40:01; PRAME; ENSG00000185686; TAA
GNSISISAL

SEQ ID NO: 70671 - protein, 9 aa, Homo sapiens
  misc_feature: Table A; Target 70671; HLA-C*06:02; PRAME; ENSG00000185686; TAA
GNSISISAL

SEQ ID NO: 70672 - protein, 9 aa, Homo sapiens
  misc_feature: Table A; Target 70672; HLA-C*07:02; PRAME; ENSG00000185686; TAA
GNSISISAL

SEQ ID NO: 70673 - protein, 9 aa, Homo sapiens
  misc_feature: Table A; Target 70673; HLA-C*07:04; PRAME; ENSG00000185686; TAA
GNSISISAL

SEQ ID NO: 70674 - protein, 9 aa, Homo sapiens
  misc_feature: Table A; Target 70674; HLA-A*30:01; PRAME; ENSG00000185686; TAA
GQHLHLETF

SEQ ID NO: 70675 - protein, 9 aa, Homo sapiens
  misc_feature: Table A; Target 70675; HLA-A*30:02; PRAME; ENSG00000185686; TAA
GQHLHLETF

SEQ ID NO: 70676 - protein, 9 aa, Homo sapiens
  misc_feature: Table A; Target 70676; HLA-A*32:01; PRAME; ENSG00000185686; TAA
GQHLHLETF

SEQ ID NO: 70677 - protein, 9 aa, Homo sapiens
  misc_feature: Table A; Target 70677; HLA-B*13:02; PRAME; ENSG00000185686; TAA
GQHLHLETF

SEQ ID NO: 70678 - protein, 9 aa, Homo sapiens
  misc_feature: Table A; Target 70678; HLA-B*15:01; PRAME; ENSG00000185686; TAA
GQHLHLETF

SEQ ID NO: 70679 - protein, 9 aa, Homo sapiens
  misc_feature: Table A; Target 70679; HLA-B*15:03; PRAME; ENSG00000185686; TAA
GQHLHLETF

SEQ ID NO: 70680 - protein, 9 aa, Homo sapiens
  misc_feature: Table A; Target 70680; HLA-B*18:01; PRAME; ENSG00000185686; TAA
GQHLHLETF

SEQ ID NO: 70681 - protein, 9 aa, Homo sapiens
  misc_feature: Table A; Target 70681; HLA-B*27:02; PRAME; ENSG00000185686; TAA
GQHLHLETF

SEQ ID NO: 70682 - protein, 9 aa, Homo sapiens
  misc_feature: Table A; Target 70682; HLA-B*27:05; PRAME; ENSG00000185686; TAA
GQHLHLETF

SEQ ID NO: 70683 - protein, 9 aa, Homo sapiens
  misc_feature: Table A; Target 70683; HLA-B*37:01; PRAME; ENSG00000185686; TAA
GQHLHLETF

SEQ ID NO: 70684 - protein, 9 aa, Homo sapiens
  misc_feature: Table A; Target 70684; HLA-B*38:01; PRAME; ENSG00000185686; TAA
GQHLHLETF

SEQ ID NO: 70685 - protein, 9 aa, Homo sapiens
  misc_feature: Table A; Target 70685; HLA-B*39:01; PRAME; ENSG00000185686; TAA
GQHLHLETF

SEQ ID NO: 70686 - protein, 9 aa, Homo sapiens
  misc_feature: Table A; Target 70686; HLA-B*40:02; PRAME; ENSG00000185686; TAA
GQHLHLETF

SEQ ID NO: 70687 - protein, 9 aa, Homo sapiens
  misc_feature: Table A; Target 70687; HLA-B*44:02; PRAME; ENSG00000185686; TAA
GQHLHLETF

SEQ ID NO: 70688 - protein, 9 aa, Homo sapiens
  misc_feature: Table A; Target 70688; HLA-B*44:03; PRAME; ENSG00000185686; TAA
GQHLHLETF

SEQ ID NO: 70689 - protein, 9 aa, Homo sapiens
  misc_feature: Table A; Target 70689; HLA-B*46:01; PRAME; ENSG00000185686; TAA
GQHLHLETF

SEQ ID NO: 70690 - protein, 9 aa, Homo sapiens
  misc_feature: Table A; Target 70690; HLA-C*02:02; PRAME; ENSG00000185686; TAA
GQHLHLETF

SEQ ID NO: 70691 - protein, 9 aa, Homo sapiens
  misc_feature: Table A; Target 70691; HLA-C*04:01; PRAME; ENSG00000185686; TAA
GQHLHLETF

SEQ ID NO: 70692 - protein, 9 aa, Homo sapiens
  misc_feature: Table A; Target 70692; HLA-C*07:01; PRAME; ENSG00000185686; TAA
GQHLHLETF

SEQ ID NO: 70693 - protein, 9 aa, Homo sapiens
  misc_feature: Table A; Target 70693; HLA-C*07:04; PRAME; ENSG00000185686; TAA
GQHLHLETF

SEQ ID NO: 70694 - protein, 9 aa, Homo sapiens
  misc_feature: Table A; Target 70694; HLA-C*16:04; PRAME; ENSG00000185686; TAA
GQHLHLETF

SEQ ID NO: 70695 - protein, 9 aa, Homo sapiens
  misc_feature: Table A; Target 70695; HLA-A*02:04; PRAME; ENSG00000185686; TAA
GQMINLRRL

SEQ ID NO: 70696 - protein, 10 aa, Homo sapiens
  misc_feature: Table A; Target 70696; HLA-A*30:01; PRAME; ENSG00000185686; TAA
GQSLLKDEAL

SEQ ID NO: 70697 - protein, 10 aa, Homo sapiens
  misc_feature: Table A; Target 70697; HLA-B*27:05; PRAME; ENSG00000185686; TAA
GQSLLKDEAL

SEQ ID NO: 70698 - protein, 10 aa, Homo sapiens
  misc_feature: Table A; Target 70698; HLA-B*38:01; PRAME; ENSG00000185686; TAA
GQSLLKDEAL

SEQ ID NO: 70699 - protein, 8 aa, Homo sapiens
  misc_feature: Table A; Target 70699; HLA-B*27:05; PRAME; ENSG00000185686; TAA
GRHSQTLK

SEQ ID NO: 70700 - protein, 9 aa, Homo sapiens
  misc_feature: Table A; Target 70700; HLA-B*27:05; PRAME; ENSG00000185686; TAA
GRHSQTLKA

SEQ ID NO: 70701 - protein, 9 aa, Homo sapiens
  misc_feature: Table A; Target 70701; HLA-C*06:02; PRAME; ENSG00000185686; TAA
GRHSQTLKA

SEQ ID NO: 70702 - protein, 10 aa, Homo sapiens
  misc_feature: Table A; Target 70702; HLA-B*27:05; PRAME; ENSG00000185686; TAA
GRHSQTLKAM

SEQ ID NO: 70703 - protein, 10 aa, Homo sapiens
  misc_feature: Table A; Target 70703; HLA-C*06:02; PRAME; ENSG00000185686; TAA
GRHSQTLKAM

SEQ ID NO: 70704 - protein, 10 aa, Homo sapiens
  misc_feature: Table A; Target 70704; HLA-C*07:01; PRAME; ENSG00000185686; TAA
GRHSQTLKAM

SEQ ID NO: 70705 - protein, 10 aa, Homo sapiens
  misc_feature: Table A; Target 70705; HLA-C*07:02; PRAME; ENSG00000185686; TAA
GRHSQTLKAM

SEQ ID NO: 70706 - protein, 9 aa, Homo sapiens
  misc_feature: Table A; Target 70706; HLA-B*27:05; PRAME; ENSG00000185686; TAA
GRLDQLLRH

SEQ ID NO: 70707 - protein, 8 aa, Homo sapiens
  misc_feature: Table A; Target 70707; HLA-C*06:02; PRAME; ENSG00000185686; TAA
GSIQSRYI

SEQ ID NO: 70708 - protein, 10 aa, Homo sapiens
  misc_feature: Table A; Target 70708; HLA-B*40:02; PRAME; ENSG00000185686; TAA
GSIQSRYISM

SEQ ID NO: 70709 - protein, 10 aa, Homo sapiens
  misc_feature: Table A; Target 70709; HLA-C*02:02; PRAME; ENSG00000185686; TAA
GSIQSRYISM

SEQ ID NO: 70710 - protein, 10 aa, Homo sapiens
  misc_feature: Table A; Target 70710; HLA-C*12:03; PRAME; ENSG00000185686; TAA
GSIQSRYISM

SEQ ID NO: 70711 - protein, 10 aa, Homo sapiens
  misc_feature: Table A; Target 70711; HLA-C*16:02; PRAME; ENSG00000185686; TAA
GSIQSRYISM

SEQ ID NO: 70712 - protein, 10 aa, Homo sapiens
  misc_feature: Table A; Target 70712; HLA-A*01:01; PRAME; ENSG00000185686; TAA
GTLHLERLAY

SEQ ID NO: 70713 - protein, 10 aa, Homo sapiens
  misc_feature: Table A; Target 70713; HLA-A*03:01; PRAME; ENSG00000185686; TAA
GTLHLERLAY

SEQ ID NO: 70714 - protein, 10 aa, Homo sapiens
  misc_feature: Table A; Target 70714; HLA-A*29:02; PRAME; ENSG00000185686; TAA
GTLHLERLAY

SEQ ID NO: 70715 - protein, 10 aa, Homo sapiens
  misc_feature: Table A; Target 70715; HLA-A*30:02; PRAME; ENSG00000185686; TAA
GTLHLERLAY

SEQ ID NO: 70716 - protein, 10 aa, Homo sapiens
  misc_feature: Table A; Target 70716; HLA-A*32:01; PRAME; ENSG00000185686; TAA
GTLHLERLAY

SEQ ID NO: 70717 - protein, 10 aa, Homo sapiens
  misc_feature: Table A; Target 70717; HLA-B*57:01; PRAME; ENSG00000185686; TAA
GTLHLERLAY

SEQ ID NO: 70718 - protein, 11 aa, Homo sapiens
  misc_feature: Table A; Target 70718; HLA-A*02:04; PRAME; ENSG00000185686; TAA
GTLHLERLAYL

SEQ ID NO: 70719 - protein, 8 aa, Homo sapiens
  misc_feature: Table A; Target 70719; HLA-B*08:01; PRAME; ENSG00000185686; TAA
HARLRELL

SEQ ID NO: 70720 - protein, 10 aa, Homo sapiens
  misc_feature: Table A; Target 70720; HLA-A*03:01; PRAME; ENSG00000185686; TAA
HASSYISPEK

SEQ ID NO: 70721 - protein, 10 aa, Homo sapiens
  misc_feature: Table A; Target 70721; HLA-A*03:02; PRAME; ENSG00000185686; TAA
HASSYISPEK

SEQ ID NO: 70722 - protein, 10 aa, Homo sapiens
  misc_feature: Table A; Target 70722; HLA-A*11:01; PRAME; ENSG00000185686; TAA
HASSYISPEK

SEQ ID NO: 70723 - protein, 10 aa, Homo sapiens
  misc_feature: Table A; Target 70723; HLA-A*68:01; PRAME; ENSG00000185686; TAA
HASSYISPEK

SEQ ID NO: 70724 - protein, 10 aa, Homo sapiens
  misc_feature: Table A; Target 70724; HLA-A*68:02; PRAME; ENSG00000185686; TAA
HASSYISPEK

SEQ ID NO: 70725 - protein, 10 aa, Homo sapiens
  misc_feature: Table A; Target 70725; HLA-B*27:02; PRAME; ENSG00000185686; TAA
HASSYISPEK

SEQ ID NO: 70726 - protein, 10 aa, Homo sapiens
  misc_feature: Table A; Target 70726; HLA-B*27:05; PRAME; ENSG00000185686; TAA
HASSYISPEK

SEQ ID NO: 70727 - protein, 10 aa, Homo sapiens
  misc_feature: Table A; Target 70727; HLA-C*07:06; PRAME; ENSG00000185686; TAA
HASSYISPEK

SEQ ID NO: 70728 - protein, 8 aa, Homo sapiens
  misc_feature: Table A; Target 70728; HLA-C*04:01; PRAME; ENSG00000185686; TAA
HIHASSYI

SEQ ID NO: 70729 - protein, 8 aa, Homo sapiens
  misc_feature: Table A; Target 70729; HLA-C*07:01; PRAME; ENSG00000185686; TAA
HIHASSYI

SEQ ID NO: 70730 - protein, 9 aa, Homo sapiens
  misc_feature: Table A; Target 70730; HLA-B*08:01; PRAME; ENSG00000185686; TAA
HLETFKAVL

SEQ ID NO: 70731 - protein, 9 aa, Homo sapiens
  misc_feature: Table A; Target 70731; HLA-B*54:01; PRAME; ENSG00000185686; TAA
HLHLETFKA

SEQ ID NO: 70732 - protein, 11 aa, Homo sapiens
  misc_feature: Table A; Target 70732; HLA-A*02:01; PRAME; ENSG00000185686; TAA
HLIGLSNLTHV

SEQ ID NO: 70733 - protein, 11 aa, Homo sapiens
  misc_feature: Table A; Target 70733; HLA-A*02:03; PRAME; ENSG00000185686; TAA
HLIGLSNLTHV

SEQ ID NO: 70734 - protein, 11 aa, Homo sapiens
  misc_feature: Table A; Target 70734; HLA-A*02:04; PRAME; ENSG00000185686; TAA
HLIGLSNLTHV

SEQ ID NO: 70735 - protein, 11 aa, Homo sapiens
  misc_feature: Table A; Target 70735; HLA-A*02:07; PRAME; ENSG00000185686; TAA
HLIGLSNLTHV

SEQ ID NO: 70736 - protein, 11 aa, Homo sapiens
  misc_feature: Table A; Target 70736; HLA-A*68:02; PRAME; ENSG00000185686; TAA
HLIGLSNLTHV

SEQ ID NO: 70737 - protein, 8 aa, Homo sapiens
  misc_feature: Table A; Target 70737; HLA-B*13:02; PRAME; ENSG00000185686; TAA
HLSQSPSV

SEQ ID NO: 70738 - protein, 8 aa, Homo sapiens
  misc_feature: Table A; Target 70738; HLA-B*37:01; PRAME; ENSG00000185686; TAA
HLSQSPSV

SEQ ID NO: 70739 - protein, 8 aa, Homo sapiens
  misc_feature: Table A; Target 70739; HLA-B*55:01; PRAME; ENSG00000185686; TAA
HLSQSPSV

SEQ ID NO: 70740 - protein, 11 aa, Homo sapiens
  misc_feature: Table A; Target 70740; HLA-A*02:04; PRAME; ENSG00000185686; TAA
HLSQSPSVSQL

SEQ ID NO: 70741 - protein, 8 aa, Homo sapiens
  misc_feature: Table A; Target 70741; HLA-B*08:01; PRAME; ENSG00000185686; TAA
HSQTLKAM

SEQ ID NO: 70742 - protein, 8 aa, Homo sapiens
  misc_feature: Table A; Target 70742; HLA-C*03:04; PRAME; ENSG00000185686; TAA
HSQTLKAM

SEQ ID NO: 70743 - protein, 8 aa, Homo sapiens
  misc_feature: Table A; Target 70743; HLA-C*16:01; PRAME; ENSG00000185686; TAA
HSQTLKAM

SEQ ID NO: 70744 - protein, 8 aa, Homo sapiens
  misc_feature: Table A; Target 70744; HLA-C*16:02; PRAME; ENSG00000185686; TAA
HSQTLKAM

SEQ ID NO: 70745 - protein, 9 aa, Homo sapiens
  misc_feature: Table A; Target 70745; HLA-C*06:02; PRAME; ENSG00000185686; TAA
HSQTLKAMV

SEQ ID NO: 70746 - protein, 11 aa, Homo sapiens
  misc_feature: Table A; Target 70746; HLA-A*29:02; PRAME; ENSG00000185686; TAA
HVLYPVPLESY

SEQ ID NO: 70747 - protein, 9 aa, Homo sapiens
  misc_feature: Table A; Target 70747; HLA-A*02:01; PRAME; ENSG00000185686; TAA
HVMNPLETL

SEQ ID NO: 70748 - protein, 9 aa, Homo sapiens
  misc_feature: Table A; Target 70748; HLA-A*02:03; PRAME; ENSG00000185686; TAA
HVMNPLETL

SEQ ID NO: 70749 - protein, 9 aa, Homo sapiens
  misc_feature: Table A; Target 70749; HLA-A*02:04; PRAME; ENSG00000185686; TAA
HVMNPLETL

SEQ ID NO: 70750 - protein, 9 aa, Homo sapiens
  misc_feature: Table A; Target 70750; HLA-A*02:07; PRAME; ENSG00000185686; TAA
HVMNPLETL

SEQ ID NO: 70751 - protein, 9 aa, Homo sapiens
  misc_feature: Table A; Target 70751; HLA-A*03:01; PRAME; ENSG00000185686; TAA
HVMNPLETL

SEQ ID NO: 70752 - protein, 9 aa, Homo sapiens
  misc_feature: Table A; Target 70752; HLA-A*03:02; PRAME; ENSG00000185686; TAA
HVMNPLETL

SEQ ID NO: 70753 - protein, 9 aa, Homo sapiens
  misc_feature: Table A; Target 70753; HLA-A*11:01; PRAME; ENSG00000185686; TAA
HVMNPLETL

SEQ ID NO: 70754 - protein, 9 aa, Homo sapiens
  misc_feature: Table A; Target 70754; HLA-A*23:01; PRAME; ENSG00000185686; TAA
HVMNPLETL

SEQ ID NO: 70755 - protein, 9 aa, Homo sapiens
  misc_feature: Table A; Target 70755; HLA-A*24:02; PRAME; ENSG00000185686; TAA
HVMNPLETL

SEQ ID NO: 70756 - protein, 9 aa, Homo sapiens
  misc_feature: Table A; Target 70756; HLA-A*25:01; PRAME; ENSG00000185686; TAA
HVMNPLETL

SEQ ID NO: 70757 - protein, 9 aa, Homo sapiens
  misc_feature: Table A; Target 70757; HLA-A*26:01; PRAME; ENSG00000185686; TAA
HVMNPLETL

SEQ ID NO: 70758 - protein, 9 aa, Homo sapiens
  misc_feature: Table A; Target 70758; HLA-A*30:01; PRAME; ENSG00000185686; TAA
HVMNPLETL

SEQ ID NO: 70759 - protein, 9 aa, Homo sapiens
  misc_feature: Table A; Target 70759; HLA-A*31:01; PRAME; ENSG00000185686; TAA
HVMNPLETL

SEQ ID NO: 70760 - protein, 9 aa, Homo sapiens
  misc_feature: Table A; Target 70760; HLA-A*32:01; PRAME; ENSG00000185686; TAA
HVMNPLETL

SEQ ID NO: 70761 - protein, 9 aa, Homo sapiens
  misc_feature: Table A; Target 70761; HLA-A*33:01; PRAME; ENSG00000185686; TAA
HVMNPLETL

SEQ ID NO: 70762 - protein, 9 aa, Homo sapiens
  misc_feature: Table A; Target 70762; HLA-A*33:03; PRAME; ENSG00000185686; TAA
HVMNPLETL

SEQ ID NO: 70763 - protein, 9 aa, Homo sapiens
  misc_feature: Table A; Target 70763; HLA-A*68:01; PRAME; ENSG00000185686; TAA
HVMNPLETL

SEQ ID NO: 70764 - protein, 9 aa, Homo sapiens
  misc_feature: Table A; Target 70764; HLA-A*68:02; PRAME; ENSG00000185686; TAA
HVMNPLETL

SEQ ID NO: 70765 - protein, 9 aa, Homo sapiens
  misc_feature: Table A; Target 70765; HLA-B*07:02; PRAME; ENSG00000185686; TAA
HVMNPLETL

SEQ ID NO: 70766 - protein, 9 aa, Homo sapiens
  misc_feature: Table A; Target 70766; HLA-B*08:01; PRAME; ENSG00000185686; TAA
HVMNPLETL

SEQ ID NO: 70767 - protein, 9 aa, Homo sapiens
  misc_feature: Table A; Target 70767; HLA-B*13:02; PRAME; ENSG00000185686; TAA
HVMNPLETL

SEQ ID NO: 70768 - protein, 9 aa, Homo sapiens
  misc_feature: Table A; Target 70768; HLA-B*15:01; PRAME; ENSG00000185686; TAA
HVMNPLETL

SEQ ID NO: 70769 - protein, 9 aa, Homo sapiens
  misc_feature: Table A; Target 70769; HLA-B*15:03; PRAME; ENSG00000185686; TAA
HVMNPLETL

SEQ ID NO: 70770 - protein, 9 aa, Homo sapiens
  misc_feature: Table A; Target 70770; HLA-B*27:05; PRAME; ENSG00000185686; TAA
HVMNPLETL

SEQ ID NO: 70771 - protein, 9 aa, Homo sapiens
  misc_feature: Table A; Target 70771; HLA-B*35:01; PRAME; ENSG00000185686; TAA
HVMNPLETL

SEQ ID NO: 70772 - protein, 9 aa, Homo sapiens
  misc_feature: Table A; Target 70772; HLA-B*35:03; PRAME; ENSG00000185686; TAA
HVMNPLETL

SEQ ID NO: 70773 - protein, 9 aa, Homo sapiens
  misc_feature: Table A; Target 70773; HLA-B*38:01; PRAME; ENSG00000185686; TAA
HVMNPLETL

SEQ ID NO: 70774 - protein, 9 aa, Homo sapiens
  misc_feature: Table A; Target 70774; HLA-B*39:01; PRAME; ENSG00000185686; TAA
HVMNPLETL

SEQ ID NO: 70775 - protein, 9 aa, Homo sapiens
  misc_feature: Table A; Target 70775; HLA-B*40:01; PRAME; ENSG00000185686; TAA
HVMNPLETL

SEQ ID NO: 70776 - protein, 9 aa, Homo sapiens
  misc_feature: Table A; Target 70776; HLA-B*40:02; PRAME; ENSG00000185686; TAA
HVMNPLETL

SEQ ID NO: 70777 - protein, 9 aa, Homo sapiens
  misc_feature: Table A; Target 70777; HLA-B*46:01; PRAME; ENSG00000185686; TAA
HVMNPLETL

SEQ ID NO: 70778 - protein, 9 aa, Homo sapiens
  misc_feature: Table A; Target 70778; HLA-B*51:01; PRAME; ENSG00000185686; TAA
HVMNPLETL

SEQ ID NO: 70779 - protein, 9 aa, Homo sapiens
  misc_feature: Table A; Target 70779; HLA-B*54:01; PRAME; ENSG00000185686; TAA
HVMNPLETL

SEQ ID NO: 70780 - protein, 9 aa, Homo sapiens
  misc_feature: Table A; Target 70780; HLA-B*55:01; PRAME; ENSG00000185686; TAA
HVMNPLETL

SEQ ID NO: 70781 - protein, 9 aa, Homo sapiens
  misc_feature: Table A; Target 70781; HLA-B*56:01; PRAME; ENSG00000185686; TAA
HVMNPLETL

SEQ ID NO: 70782 - protein, 9 aa, Homo sapiens
  misc_feature: Table A; Target 70782; HLA-B*57:01; PRAME; ENSG00000185686; TAA
HVMNPLETL

SEQ ID NO: 70783 - protein, 9 aa, Homo sapiens
  misc_feature: Table A; Target 70783; HLA-B*58:01; PRAME; ENSG00000185686; TAA
HVMNPLETL

SEQ ID NO: 70784 - protein, 9 aa, Homo sapiens
  misc_feature: Table A; Target 70784; HLA-C*01:02; PRAME; ENSG00000185686; TAA
HVMNPLETL

SEQ ID NO: 70785 - protein, 9 aa, Homo sapiens
  misc_feature: Table A; Target 70785; HLA-C*02:02; PRAME; ENSG00000185686; TAA
HVMNPLETL

SEQ ID NO: 70786 - protein, 9 aa, Homo sapiens
  misc_feature: Table A; Target 70786; HLA-C*03:03; PRAME; ENSG00000185686; TAA
HVMNPLETL

SEQ ID NO: 70787 - protein, 9 aa, Homo sapiens
  misc_feature: Table A; Target 70787; HLA-C*03:04; PRAME; ENSG00000185686; TAA
HVMNPLETL

SEQ ID NO: 70788 - protein, 9 aa, Homo sapiens
  misc_feature: Table A; Target 70788; HLA-C*05:01; PRAME; ENSG00000185686; TAA
HVMNPLETL

SEQ ID NO: 70789 - protein, 9 aa, Homo sapiens
  misc_feature: Table A; Target 70789; HLA-C*06:02; PRAME; ENSG00000185686; TAA
HVMNPLETL

SEQ ID NO: 70790 - protein, 9 aa, Homo sapiens
  misc_feature: Table A; Target 70790; HLA-C*07:02; PRAME; ENSG00000185686; TAA
HVMNPLETL

SEQ ID NO: 70791 - protein, 9 aa, Homo sapiens
  misc_feature: Table A; Target 70791; HLA-C*07:04; PRAME; ENSG00000185686; TAA
HVMNPLETL

SEQ ID NO: 70792 - protein, 9 aa, Homo sapiens
  misc_feature: Table A; Target 70792; HLA-C*07:06; PRAME; ENSG00000185686; TAA
HVMNPLETL

SEQ ID NO: 70793 - protein, 9 aa, Homo sapiens
  misc_feature: Table A; Target 70793; HLA-C*12:03; PRAME; ENSG00000185686; TAA
HVMNPLETL

SEQ ID NO: 70794 - protein, 9 aa, Homo sapiens
  misc_feature: Table A; Target 70794; HLA-C*14:02; PRAME; ENSG00000185686; TAA
HVMNPLETL

SEQ ID NO: 70795 - protein, 9 aa, Homo sapiens
  misc_feature: Table A; Target 70795; HLA-C*16:01; PRAME; ENSG00000185686; TAA
HVMNPLETL

SEQ ID NO: 70796 - protein, 9 aa, Homo sapiens
  misc_feature: Table A; Target 70796; HLA-C*16:02; PRAME; ENSG00000185686; TAA
HVMNPLETL

SEQ ID NO: 70797 - protein, 9 aa, Homo sapiens
  misc_feature: Table A; Target 70797; HLA-C*16:04; PRAME; ENSG00000185686; TAA
HVMNPLETL

SEQ ID NO: 70798 - protein, 11 aa, Homo sapiens
  misc_feature: Table A; Target 70798; HLA-A*25:01; PRAME; ENSG00000185686; TAA
HVMNPLETLSI

SEQ ID NO: 70799 - protein, 11 aa, Homo sapiens
  misc_feature: Table A; Target 70799; HLA-A*68:02; PRAME; ENSG00000185686; TAA
HVMNPLETLSI

SEQ ID NO: 70800 - protein, 11 aa, Homo sapiens
  misc_feature: Table A; Target 70800; HLA-B*13:02; PRAME; ENSG00000185686; TAA
HVMNPLETLSI

SEQ ID NO: 70801 - protein, 9 aa, Homo sapiens
  misc_feature: Table A; Target 70801; HLA-A*33:03; PRAME; ENSG00000185686; TAA
IAALELLPR

SEQ ID NO: 70802 - protein, 9 aa, Homo sapiens
  misc_feature: Table A; Target 70802; HLA-A*68:01; PRAME; ENSG00000185686; TAA
IAALELLPR

SEQ ID NO: 70803 - protein, 9 aa, Homo sapiens
  misc_feature: Table A; Target 70803; HLA-B*27:02; PRAME; ENSG00000185686; TAA
IAALELLPR

SEQ ID NO: 70804 - protein, 9 aa, Homo sapiens
  misc_feature: Table A; Target 70804; HLA-C*07:06; PRAME; ENSG00000185686; TAA
IAALELLPR

SEQ ID NO: 70805 - protein, 8 aa, Homo sapiens
  misc_feature: Table A; Target 70805; HLA-B*15:01; PRAME; ENSG00000185686; TAA
IAQFTSQF

SEQ ID NO: 70806 - protein, 8 aa, Homo sapiens
  misc_feature: Table A; Target 70806; HLA-B*46:01; PRAME; ENSG00000185686; TAA
IAQFTSQF

SEQ ID NO: 70807 - protein, 8 aa, Homo sapiens
  misc_feature: Table A; Target 70807; HLA-C*05:01; PRAME; ENSG00000185686; TAA
IAQFTSQF

SEQ ID NO: 70808 - protein, 8 aa, Homo sapiens
  misc_feature: Table A; Target 70808; HLA-C*14:02; PRAME; ENSG00000185686; TAA
IAQFTSQF

SEQ ID NO: 70809 - protein, 9 aa, Homo sapiens
  misc_feature: Table A; Target 70809; HLA-B*13:02; PRAME; ENSG00000185686; TAA
IAQFTSQFL

SEQ ID NO: 70810 - protein, 9 aa, Homo sapiens
  misc_feature: Table A; Target 70810; HLA-B*35:03; PRAME; ENSG00000185686; TAA
IAQFTSQFL

SEQ ID NO: 70811 - protein, 9 aa, Homo sapiens
  misc_feature: Table A; Target 70811; HLA-B*38:01; PRAME; ENSG00000185686; TAA
IAQFTSQFL

SEQ ID NO: 70812 - protein, 9 aa, Homo sapiens
  misc_feature: Table A; Target 70812; HLA-B*46:01; PRAME; ENSG00000185686; TAA
IAQFTSQFL

SEQ ID NO: 70813 - protein, 9 aa, Homo sapiens
  misc_feature: Table A; Target 70813; HLA-B*58:01; PRAME; ENSG00000185686; TAA
IAQFTSQFL

SEQ ID NO: 70814 - protein, 9 aa, Homo sapiens
  misc_feature: Table A; Target 70814; HLA-C*01:02; PRAME; ENSG00000185686; TAA
IAQFTSQFL

SEQ ID NO: 70815 - protein, 9 aa, Homo sapiens
  misc_feature: Table A; Target 70815; HLA-C*02:02; PRAME; ENSG00000185686; TAA
IAQFTSQFL

SEQ ID NO: 70816 - protein, 9 aa, Homo sapiens
  misc_feature: Table A; Target 70816; HLA-C*03:03; PRAME; ENSG00000185686; TAA
IAQFTSQFL

SEQ ID NO: 70817 - protein, 9 aa, Homo sapiens
  misc_feature: Table A; Target 70817; HLA-C*03:04; PRAME; ENSG00000185686; TAA
IAQFTSQFL

SEQ ID NO: 70818 - protein, 9 aa, Homo sapiens
  misc_feature: Table A; Target 70818; HLA-C*06:02; PRAME; ENSG00000185686; TAA
IAQFTSQFL

SEQ ID NO: 70819 - protein, 9 aa, Homo sapiens
  misc_feature: Table A; Target 70819; HLA-C*07:04; PRAME; ENSG00000185686; TAA
IAQFTSQFL

SEQ ID NO: 70820 - protein, 9 aa, Homo sapiens
  misc_feature: Table A; Target 70820; HLA-C*12:03; PRAME; ENSG00000185686; TAA
IAQFTSQFL

SEQ ID NO: 70821 - protein, 9 aa, Homo sapiens
  misc_feature: Table A; Target 70821; HLA-C*16:02; PRAME; ENSG00000185686; TAA
IAQFTSQFL

SEQ ID NO: 70822 - protein, 8 aa, Homo sapiens
  misc_feature: Table A; Target 70822; HLA-B*49:01; PRAME; ENSG00000185686; TAA
IEDLEVTC

SEQ ID NO: 70823 - protein, 9 aa, Homo sapiens
  misc_feature: Table A; Target 70823; HLA-B*40:01; PRAME; ENSG00000185686; TAA
IEDLEVTCT

SEQ ID NO: 70824 - protein, 9 aa, Homo sapiens
  misc_feature: Table A; Target 70824; HLA-B*49:01; PRAME; ENSG00000185686; TAA
IEDLEVTCT

SEQ ID NO: 70825 - protein, 10 aa, Homo sapiens
  misc_feature: Table A; Target 70825; HLA-B*18:01; PRAME; ENSG00000185686; TAA
IEDLEVTCTW

SEQ ID NO: 70826 - protein, 10 aa, Homo sapiens
  misc_feature: Table A; Target 70826; HLA-B*27:02; PRAME; ENSG00000185686; TAA
IEDLEVTCTW

SEQ ID NO: 70827 - protein, 10 aa, Homo sapiens
  misc_feature: Table A; Target 70827; HLA-B*40:01; PRAME; ENSG00000185686; TAA
IEDLEVTCTW

SEQ ID NO: 70828 - protein, 10 aa, Homo sapiens
  misc_feature: Table A; Target 70828; HLA-B*44:02; PRAME; ENSG00000185686; TAA
IEDLEVTCTW

SEQ ID NO: 70829 - protein, 10 aa, Homo sapiens
  misc_feature: Table A; Target 70829; HLA-B*44:03; PRAME; ENSG00000185686; TAA
IEDLEVTCTW

SEQ ID NO: 70830 - protein, 10 aa, Homo sapiens
  misc_feature: Table A; Target 70830; HLA-B*49:01; PRAME; ENSG00000185686; TAA
IEDLEVTCTW

SEQ ID NO: 70831 - protein, 10 aa, Homo sapiens
  misc_feature: Table A; Target 70831; HLA-B*57:01; PRAME; ENSG00000185686; TAA
IEDLEVTCTW

SEQ ID NO: 70832 - protein, 10 aa, Homo sapiens
  misc_feature: Table A; Target 70832; HLA-C*16:04; PRAME; ENSG00000185686; TAA
IEDLEVTCTW

SEQ ID NO: 70833 - protein, 9 aa, Homo sapiens
  misc_feature: Table A; Target 70833; HLA-A*02:01; PRAME; ENSG00000185686; TAA
IGLSNLTHV

SEQ ID NO: 70834 - protein, 9 aa, Homo sapiens
  misc_feature: Table A; Target 70834; HLA-A*02:04; PRAME; ENSG00000185686; TAA
IGLSNLTHV

SEQ ID NO: 70835 - protein, 9 aa, Homo sapiens
  misc_feature: Table A; Target 70835; HLA-B*13:02; PRAME; ENSG00000185686; TAA
IGLSNLTHV

SEQ ID NO: 70836 - protein, 9 aa, Homo sapiens
  misc_feature: Table A; Target 70836; HLA-B*49:01; PRAME; ENSG00000185686; TAA
IGLSNLTHV

SEQ ID NO: 70837 - protein, 9 aa, Homo sapiens
  misc_feature: Table A; Target 70837; HLA-C*16:02; PRAME; ENSG00000185686; TAA
IGLSNLTHV

SEQ ID NO: 70838 - protein, 9 aa, Homo sapiens
  misc_feature: Table A; Target 70838; HLA-C*16:04; PRAME; ENSG00000185686; TAA
IGLSNLTHV

SEQ ID NO: 70839 - protein, 11 aa, Homo sapiens
  misc_feature: Table A; Target 70839; HLA-A*29:02; PRAME; ENSG00000185686; TAA
IGLSNLTHVLY

SEQ ID NO: 70840 - protein, 9 aa, Homo sapiens
  misc_feature: Table A; Target 70840; HLA-A*23:01; PRAME; ENSG00000185686; TAA
IPVEVLVDL

SEQ ID NO: 70841 - protein, 9 aa, Homo sapiens
  misc_feature: Table A; Target 70841; HLA-B*07:02; PRAME; ENSG00000185686; TAA
IPVEVLVDL

SEQ ID NO: 70842 - protein, 9 aa, Homo sapiens
  misc_feature: Table A; Target 70842; HLA-B*35:01; PRAME; ENSG00000185686; TAA
IPVEVLVDL

SEQ ID NO: 70843 - protein, 9 aa, Homo sapiens
  misc_feature: Table A; Target 70843; HLA-B*35:03; PRAME; ENSG00000185686; TAA
IPVEVLVDL

SEQ ID NO: 70844 - protein, 9 aa, Homo sapiens
  misc_feature: Table A; Target 70844; HLA-B*51:01; PRAME; ENSG00000185686; TAA
IPVEVLVDL

SEQ ID NO: 70845 - protein, 9 aa, Homo sapiens
  misc_feature: Table A; Target 70845; HLA-B*54:01; PRAME; ENSG00000185686; TAA
IPVEVLVDL

SEQ ID NO: 70846 - protein, 9 aa, Homo sapiens
  misc_feature: Table A; Target 70846; HLA-B*55:01; PRAME; ENSG00000185686; TAA
IPVEVLVDL

SEQ ID NO: 70847 - protein, 9 aa, Homo sapiens
  misc_feature: Table A; Target 70847; HLA-B*56:01; PRAME; ENSG00000185686; TAA
IPVEVLVDL

SEQ ID NO: 70848 - protein, 9 aa, Homo sapiens
  misc_feature: Table A; Target 70848; HLA-C*03:03; PRAME; ENSG00000185686; TAA
IPVEVLVDL

SEQ ID NO: 70849 - protein, 10 aa, Homo sapiens
  misc_feature: Table A; Target 70849; HLA-B*35:01; PRAME; ENSG00000185686; TAA
IPVEVLVDLF

SEQ ID NO: 70850 - protein, 8 aa, Homo sapiens
  misc_feature: Table A; Target 70850; HLA-B*15:01; PRAME; ENSG00000185686; TAA
IQSRYISM

SEQ ID NO: 70851 - protein, 8 aa, Homo sapiens
  misc_feature: Table A; Target 70851; HLA-B*37:01; PRAME; ENSG00000185686; TAA
IQSRYISM

SEQ ID NO: 70852 - protein, 9 aa, Homo sapiens
  misc_feature: Table A; Target 70852; HLA-A*23:01; PRAME; ENSG00000185686; TAA
ISISALQSL

SEQ ID NO: 70853 - protein, 9 aa, Homo sapiens
  misc_feature: Table A; Target 70853; HLA-A*24:02; PRAME; ENSG00000185686; TAA
ISISALQSL

SEQ ID NO: 70854 - protein, 9 aa, Homo sapiens
  misc_feature: Table A; Target 70854; HLA-A*25:01; PRAME; ENSG00000185686; TAA
ISISALQSL

SEQ ID NO: 70855 - protein, 9 aa, Homo sapiens
  misc_feature: Table A; Target 70855; HLA-A*30:01; PRAME; ENSG00000185686; TAA
ISISALQSL

SEQ ID NO: 70856 - protein, 9 aa, Homo sapiens
  misc_feature: Table A; Target 70856; HLA-A*32:01; PRAME; ENSG00000185686; TAA
ISISALQSL

SEQ ID NO: 70857 - protein, 9 aa, Homo sapiens
  misc_feature: Table A; Target 70857; HLA-B*15:01; PRAME; ENSG00000185686; TAA
ISISALQSL

SEQ ID NO: 70858 - protein, 9 aa, Homo sapiens
  misc_feature: Table A; Target 70858; HLA-B*15:03; PRAME; ENSG00000185686; TAA
ISISALQSL

SEQ ID NO: 70859 - protein, 9 aa, Homo sapiens
  misc_feature: Table A; Target 70859; HLA-B*35:03; PRAME; ENSG00000185686; TAA
ISISALQSL

SEQ ID NO: 70860 - protein, 9 aa, Homo sapiens
  misc_feature: Table A; Target 70860; HLA-B*40:01; PRAME; ENSG00000185686; TAA
ISISALQSL

SEQ ID NO: 70861 - protein, 9 aa, Homo sapiens
  misc_feature: Table A; Target 70861; HLA-B*40:02; PRAME; ENSG00000185686; TAA
ISISALQSL

SEQ ID NO: 70862 - protein, 9 aa, Homo sapiens
  misc_feature: Table A; Target 70862; HLA-B*46:01; PRAME; ENSG00000185686; TAA
ISISALQSL

SEQ ID NO: 70863 - protein, 9 aa, Homo sapiens
  misc_feature: Table A; Target 70863; HLA-B*57:01; PRAME; ENSG00000185686; TAA
ISISALQSL

SEQ ID NO: 70864 - protein, 9 aa, Homo sapiens
  misc_feature: Table A; Target 70864; HLA-B*58:01; PRAME; ENSG00000185686; TAA
ISISALQSL

SEQ ID NO: 70865 - protein, 9 aa, Homo sapiens
  misc_feature: Table A; Target 70865; HLA-C*01:02; PRAME; ENSG00000185686; TAA
ISISALQSL

SEQ ID NO: 70866 - protein, 9 aa, Homo sapiens
  misc_feature: Table A; Target 70866; HLA-C*02:02; PRAME; ENSG00000185686; TAA
ISISALQSL

SEQ ID NO: 70867 - protein, 9 aa, Homo sapiens
  misc_feature: Table A; Target 70867; HLA-C*03:03; PRAME; ENSG00000185686; TAA
ISISALQSL

SEQ ID NO: 70868 - protein, 9 aa, Homo sapiens
  misc_feature: Table A; Target 70868; HLA-C*03:04; PRAME; ENSG00000185686; TAA
ISISALQSL

SEQ ID NO: 70869 - protein, 9 aa, Homo sapiens
  misc_feature: Table A; Target 70869; HLA-C*05:01; PRAME; ENSG00000185686; TAA
ISISALQSL

SEQ ID NO: 70870 - protein, 9 aa, Homo sapiens
  misc_feature: Table A; Target 70870; HLA-C*07:02; PRAME; ENSG00000185686; TAA
ISISALQSL

SEQ ID NO: 70871 - protein, 9 aa, Homo sapiens
  misc_feature: Table A; Target 70871; HLA-C*12:03; PRAME; ENSG00000185686; TAA
ISISALQSL

SEQ ID NO: 70872 - protein, 9 aa, Homo sapiens
  misc_feature: Table A; Target 70872; HLA-C*14:02; PRAME; ENSG00000185686; TAA
ISISALQSL

SEQ ID NO: 70873 - protein, 9 aa, Homo sapiens
  misc_feature: Table A; Target 70873; HLA-C*16:01; PRAME; ENSG00000185686; TAA
ISISALQSL

SEQ ID NO: 70874 - protein, 9 aa, Homo sapiens
  misc_feature: Table A; Target 70874; HLA-C*16:02; PRAME; ENSG00000185686; TAA
ISISALQSL

SEQ ID NO: 70875 - protein, 9 aa, Homo sapiens
  misc_feature: Table A; Target 70875; HLA-C*16:04; PRAME; ENSG00000185686; TAA
ISISALQSL

SEQ ID NO: 70876 - protein, 10 aa, Homo sapiens
  misc_feature: Table A; Target 70876; HLA-B*57:01; PRAME; ENSG00000185686; TAA
ISISALQSLL

SEQ ID NO: 70877 - protein, 10 aa, Homo sapiens
  misc_feature: Table A; Target 70877; HLA-B*58:01; PRAME; ENSG00000185686; TAA
ISISALQSLL

SEQ ID NO: 70878 - protein, 10 aa, Homo sapiens
  misc_feature: Table A; Target 70878; HLA-A*31:01; PRAME; ENSG00000185686; TAA
ISMSVWTSPR

SEQ ID NO: 70879 - protein, 10 aa, Homo sapiens
  misc_feature: Table A; Target 70879; HLA-B*27:02; PRAME; ENSG00000185686; TAA
ISMSVWTSPR

SEQ ID NO: 70880 - protein, 9 aa, Homo sapiens
  misc_feature: Table A; Target 70880; HLA-A*01:01; PRAME; ENSG00000185686; TAA
ISPEKEEQY

SEQ ID NO: 70881 - protein, 9 aa, Homo sapiens
  misc_feature: Table A; Target 70881; HLA-B*15:01; PRAME; ENSG00000185686; TAA
ISPEKEEQY

SEQ ID NO: 70882 - protein, 9 aa, Homo sapiens
  misc_feature: Table A; Target 70882; HLA-B*46:01; PRAME; ENSG00000185686; TAA
ISPEKEEQY

SEQ ID NO: 70883 - protein, 9 aa, Homo sapiens
  misc_feature: Table A; Target 70883; HLA-B*58:01; PRAME; ENSG00000185686; TAA
ISPEKEEQY

SEQ ID NO: 70884 - protein, 9 aa, Homo sapiens
  misc_feature: Table A; Target 70884; HLA-C*01:02; PRAME; ENSG00000185686; TAA
ISPEKEEQY

SEQ ID NO: 70885 - protein, 9 aa, Homo sapiens
  misc_feature: Table A; Target 70885; HLA-C*16:01; PRAME; ENSG00000185686; TAA
ISPEKEEQY

SEQ ID NO: 70886 - protein, 9 aa, Homo sapiens
  misc_feature: Table A; Target 70886; HLA-A*01:01; PRAME; ENSG00000185686; TAA
ITDDQLLAL

SEQ ID NO: 70887 - protein, 9 aa, Homo sapiens
  misc_feature: Table A; Target 70887; HLA-A*02:07; PRAME; ENSG00000185686; TAA
ITDDQLLAL

SEQ ID NO: 70888 - protein, 9 aa, Homo sapiens
  misc_feature: Table A; Target 70888; HLA-A*03:01; PRAME; ENSG00000185686; TAA
ITDDQLLAL

SEQ ID NO: 70889 - protein, 9 aa, Homo sapiens
  misc_feature: Table A; Target 70889; HLA-A*11:01; PRAME; ENSG00000185686; TAA
ITDDQLLAL

SEQ ID NO: 70890 - protein, 9 aa, Homo sapiens
  misc_feature: Table A; Target 70890; HLA-B*35:03; PRAME; ENSG00000185686; TAA
ITDDQLLAL

SEQ ID NO: 70891 - protein, 9 aa, Homo sapiens
  misc_feature: Table A; Target 70891; HLA-B*38:01; PRAME; ENSG00000185686; TAA
ITDDQLLAL

SEQ ID NO: 70892 - protein, 9 aa, Homo sapiens
  misc_feature: Table A; Target 70892; HLA-C*03:03; PRAME; ENSG00000185686; TAA
ITDDQLLAL

SEQ ID NO: 70893 - protein, 9 aa, Homo sapiens
  misc_feature: Table A; Target 70893; HLA-C*03:04; PRAME; ENSG00000185686; TAA
ITDDQLLAL

SEQ ID NO: 70894 - protein, 9 aa, Homo sapiens
  misc_feature: Table A; Target 70894; HLA-C*04:01; PRAME; ENSG00000185686; TAA
ITDDQLLAL

SEQ ID NO: 70895 - protein, 9 aa, Homo sapiens
  misc_feature: Table A; Target 70895; HLA-C*05:01; PRAME; ENSG00000185686; TAA
ITDDQLLAL

SEQ ID NO: 70896 - protein, 9 aa, Homo sapiens
  misc_feature: Table A; Target 70896; HLA-C*07:04; PRAME; ENSG00000185686; TAA
ITDDQLLAL

SEQ ID NO: 70897 - protein, 10 aa, Homo sapiens
  misc_feature: Table A; Target 70897; HLA-A*01:01; PRAME; ENSG00000185686; TAA
ITDDQLLALL

SEQ ID NO: 70898 - protein, 9 aa, Homo sapiens
  misc_feature: Table A; Target 70898; HLA-B*57:01; PRAME; ENSG00000185686; TAA
KAMVQAWPF

SEQ ID NO: 70899 - protein, 9 aa, Homo sapiens
  misc_feature: Table A; Target 70899; HLA-C*03:03; PRAME; ENSG00000185686; TAA
KAVLDGLDV

SEQ ID NO: 70900 - protein, 9 aa, Homo sapiens
  misc_feature: Table A; Target 70900; HLA-C*03:04; PRAME; ENSG00000185686; TAA
KAVLDGLDV

SEQ ID NO: 70901 - protein, 10 aa, Homo sapiens
  misc_feature: Table A; Target 70901; HLA-B*40:01; PRAME; ENSG00000185686; TAA
KAVLDGLDVL

SEQ ID NO: 70902 - protein, 10 aa, Homo sapiens
  misc_feature: Table A; Target 70902; HLA-B*40:01; PRAME; ENSG00000185686; TAA
KDEALAIAAL

SEQ ID NO: 70903 - protein, 10 aa, Homo sapiens
  misc_feature: Table A; Target 70903; HLA-B*40:02; PRAME; ENSG00000185686; TAA
KDEALAIAAL

SEQ ID NO: 70904 - protein, 9 aa, Homo sapiens
  misc_feature: Table A; Target 70904; HLA-A*30:01; PRAME; ENSG00000185686; TAA
KEEQYIAQF

SEQ ID NO: 70905 - protein, 9 aa, Homo sapiens
  misc_feature: Table A; Target 70905; HLA-B*18:01; PRAME; ENSG00000185686; TAA
KEEQYIAQF

SEQ ID NO: 70906 - protein, 9 aa, Homo sapiens
  misc_feature: Table A; Target 70906; HLA-B*27:02; PRAME; ENSG00000185686; TAA
KEEQYIAQF

SEQ ID NO: 70907 - protein, 9 aa, Homo sapiens
  misc_feature: Table A; Target 70907; HLA-B*37:01; PRAME; ENSG00000185686; TAA
KEEQYIAQF

SEQ ID NO: 70908 - protein, 9 aa, Homo sapiens
  misc_feature: Table A; Target 70908; HLA-B*40:01; PRAME; ENSG00000185686; TAA
KEEQYIAQF

SEQ ID NO: 70909 - protein, 9 aa, Homo sapiens
  misc_feature: Table A; Target 70909; HLA-B*40:02; PRAME; ENSG00000185686; TAA
KEEQYIAQF

SEQ ID NO: 70910 - protein, 9 aa, Homo sapiens
  misc_feature: Table A; Target 70910; HLA-B*44:02; PRAME; ENSG00000185686; TAA
KEEQYIAQF

SEQ ID NO: 70911 - protein, 9 aa, Homo sapiens
  misc_feature: Table A; Target 70911; HLA-B*44:03; PRAME; ENSG00000185686; TAA
KEEQYIAQF

SEQ ID NO: 70912 - protein, 9 aa, Homo sapiens
  misc_feature: Table A; Target 70912; HLA-B*49:01; PRAME; ENSG00000185686; TAA
KEEQYIAQF

SEQ ID NO: 70913 - protein, 9 aa, Homo sapiens
  misc_feature: Table A; Target 70913; HLA-C*16:04; PRAME; ENSG00000185686; TAA
KEEQYIAQF

SEQ ID NO: 70914 - protein, 9 aa, Homo sapiens
  misc_feature: Table A; Target 70914; HLA-B*40:01; PRAME; ENSG00000185686; TAA
KEGACDELF

SEQ ID NO: 70915 - protein, 8 aa, Homo sapiens
  misc_feature: Table A; Target 70915; HLA-A*02:07; PRAME; ENSG00000185686; TAA
KLPTLAKF

SEQ ID NO: 70916 - protein, 8 aa, Homo sapiens
  misc_feature: Table A; Target 70916; HLA-A*24:02; PRAME; ENSG00000185686; TAA
KLPTLAKF

SEQ ID NO: 70917 - protein, 11 aa, Homo sapiens
  misc_feature: Table A; Target 70917; HLA-A*03:01; PRAME; ENSG00000185686; TAA
KLPTLAKFSPY

SEQ ID NO: 70918 - protein, 9 aa, Homo sapiens
  misc_feature: Table A; Target 70918; HLA-A*03:02; PRAME; ENSG00000185686; TAA
KLQVLDLRK

SEQ ID NO: 70919 - protein, 9 aa, Homo sapiens
  misc_feature: Table A; Target 70919; HLA-A*02:03; PRAME; ENSG00000185686; TAA
KMILKMVQL

SEQ ID NO: 70920 - protein, 9 aa, Homo sapiens
  misc_feature: Table A; Target 70920; HLA-C*05:01; PRAME; ENSG00000185686; TAA
KVDGLSTEA

SEQ ID NO: 70921 - protein, 8 aa, Homo sapiens
  misc_feature: Table A; Target 70921; HLA-B*27:02; PRAME; ENSG00000185686; TAA
LAGQSLLK

SEQ ID NO: 70922 - protein, 8 aa, Homo sapiens
  misc_feature: Table A; Target 70922; HLA-A*23:01; PRAME; ENSG00000185686; TAA
LAIAALEL

SEQ ID NO: 70923 - protein, 8 aa, Homo sapiens
  misc_feature: Table A; Target 70923; HLA-B*35:03; PRAME; ENSG00000185686; TAA
LAIAALEL

SEQ ID NO: 70924 - protein, 8 aa, Homo sapiens
  misc_feature: Table A; Target 70924; HLA-B*46:01; PRAME; ENSG00000185686; TAA
LAIAALEL

SEQ ID NO: 70925 - protein, 8 aa, Homo sapiens
  misc_feature: Table A; Target 70925; HLA-B*51:01; PRAME; ENSG00000185686; TAA
LAIAALEL

SEQ ID NO: 70926 - protein, 8 aa, Homo sapiens
  misc_feature: Table A; Target 70926; HLA-B*58:01; PRAME; ENSG00000185686; TAA
LAIAALEL

SEQ ID NO: 70927 - protein, 8 aa, Homo sapiens
  misc_feature: Table A; Target 70927; HLA-C*03:03; PRAME; ENSG00000185686; TAA
LAIAALEL

SEQ ID NO: 70928 - protein, 8 aa, Homo sapiens
  misc_feature: Table A; Target 70928; HLA-C*03:04; PRAME; ENSG00000185686; TAA
LAIAALEL

SEQ ID NO: 70929 - protein, 8 aa, Homo sapiens
  misc_feature: Table A; Target 70929; HLA-C*14:02; PRAME; ENSG00000185686; TAA
LAIAALEL

SEQ ID NO: 70930 - protein, 9 aa, Homo sapiens
  misc_feature: Table A; Target 70930; HLA-A*02:04; PRAME; ENSG00000185686; TAA
LAIAALELL

SEQ ID NO: 70931 - protein, 9 aa, Homo sapiens
  misc_feature: Table A; Target 70931; HLA-A*02:07; PRAME; ENSG00000185686; TAA
LAIAALELL

SEQ ID NO: 70932 - protein, 9 aa, Homo sapiens
  misc_feature: Table A; Target 70932; HLA-A*23:01; PRAME; ENSG00000185686; TAA
LAIAALELL

SEQ ID NO: 70933 - protein, 9 aa, Homo sapiens
  misc_feature: Table A; Target 70933; HLA-A*24:02; PRAME; ENSG00000185686; TAA
LAIAALELL

SEQ ID NO: 70934 - protein, 9 aa, Homo sapiens
  misc_feature: Table A; Target 70934; HLA-B*35:03; PRAME; ENSG00000185686; TAA
LAIAALELL

SEQ ID NO: 70935 - protein, 9 aa, Homo sapiens
  misc_feature: Table A; Target 70935; HLA-B*46:01; PRAME; ENSG00000185686; TAA
LAIAALELL

SEQ ID NO: 70936 - protein, 9 aa, Homo sapiens
  misc_feature: Table A; Target 70936; HLA-B*58:01; PRAME; ENSG00000185686; TAA
LAIAALELL

SEQ ID NO: 70937 - protein, 9 aa, Homo sapiens
  misc_feature: Table A; Target 70937; HLA-C*01:02; PRAME; ENSG00000185686; TAA
LAIAALELL

SEQ ID NO: 70938 - protein, 9 aa, Homo sapiens
  misc_feature: Table A; Target 70938; HLA-C*02:02; PRAME; ENSG00000185686; TAA
LAIAALELL

SEQ ID NO: 70939 - protein, 9 aa, Homo sapiens
  misc_feature: Table A; Target 70939; HLA-C*03:03; PRAME; ENSG00000185686; TAA
LAIAALELL

SEQ ID NO: 70940 - protein, 9 aa, Homo sapiens
  misc_feature: Table A; Target 70940; HLA-C*03:04; PRAME; ENSG00000185686; TAA
LAIAALELL

SEQ ID NO: 70941 - protein, 11 aa, Homo sapiens
  misc_feature: Table A; Target 70941; HLA-B*27:02; PRAME; ENSG00000185686; TAA
LAIAALELLPR

SEQ ID NO: 70942 - protein, 9 aa, Homo sapiens
  misc_feature: Table A; Target 70942; HLA-B*46:01; PRAME; ENSG00000185686; TAA
LALLPSLSH

SEQ ID NO: 70943 - protein, 9 aa, Homo sapiens
  misc_feature: Table A; Target 70943; HLA-C*03:04; PRAME; ENSG00000185686; TAA
LALLPSLSH

SEQ ID NO: 70944 - protein, 8 aa, Homo sapiens
  misc_feature: Table A; Target 70944; HLA-A*33:03; PRAME; ENSG00000185686; TAA
LAQEVRPR

SEQ ID NO: 70945 - protein, 10 aa, Homo sapiens
  misc_feature: Table A; Target 70945; HLA-B*57:01; PRAME; ENSG00000185686; TAA
LAQEVRPRRW

SEQ ID NO: 70946 - protein, 8 aa, Homo sapiens
  misc_feature: Table A; Target 70946; HLA-B*08:01; PRAME; ENSG00000185686; TAA
LAYLHARL

SEQ ID NO: 70947 - protein, 9 aa, Homo sapiens
  misc_feature: Table A; Target 70947; HLA-A*30:01; PRAME; ENSG00000185686; TAA
LDVLLAQEV

SEQ ID NO: 70948 - protein, 9 aa, Homo sapiens
  misc_feature: Table A; Target 70948; HLA-B*18:01; PRAME; ENSG00000185686; TAA
LDVLLAQEV

SEQ ID NO: 70949 - protein, 9 aa, Homo sapiens
  misc_feature: Table A; Target 70949; HLA-B*40:02; PRAME; ENSG00000185686; TAA
LDVLLAQEV

SEQ ID NO: 70950 - protein, 9 aa, Homo sapiens
  misc_feature: Table A; Target 70950; HLA-B*49:01; PRAME; ENSG00000185686; TAA
LDVLLAQEV

SEQ ID NO: 70951 - protein, 8 aa, Homo sapiens
  misc_feature: Table A; Target 70951; HLA-B*18:01; PRAME; ENSG00000185686; TAA
LELLPREL

SEQ ID NO: 70952 - protein, 9 aa, Homo sapiens
  misc_feature: Table A; Target 70952; HLA-B*44:02; PRAME; ENSG00000185686; TAA
LELLPRELF

SEQ ID NO: 70953 - protein, 9 aa, Homo sapiens
  misc_feature: Table A; Target 70953; HLA-B*44:03; PRAME; ENSG00000185686; TAA
LELLPRELF

SEQ ID NO: 70954 - protein, 8 aa, Homo sapiens
  misc_feature: Table A; Target 70954; HLA-A*30:01; PRAME; ENSG00000185686; TAA
LERASATL

SEQ ID NO: 70955 - protein, 8 aa, Homo sapiens
  misc_feature: Table A; Target 70955; HLA-B*18:01; PRAME; ENSG00000185686; TAA
LERASATL

SEQ ID NO: 70956 - protein, 8 aa, Homo sapiens
  misc_feature: Table A; Target 70956; HLA-B*40:01; PRAME; ENSG00000185686; TAA
LERASATL

SEQ ID NO: 70957 - protein, 8 aa, Homo sapiens
  misc_feature: Table A; Target 70957; HLA-B*40:02; PRAME; ENSG00000185686; TAA
LERASATL

SEQ ID NO: 70958 - protein, 8 aa, Homo sapiens
  misc_feature: Table A; Target 70958; HLA-B*49:01; PRAME; ENSG00000185686; TAA
LERASATL

SEQ ID NO: 70959 - protein, 11 aa, Homo sapiens
  misc_feature: Table A; Target 70959; HLA-A*30:01; PRAME; ENSG00000185686; TAA
LERASATLQDL

SEQ ID NO: 70960 - protein, 11 aa, Homo sapiens
  misc_feature: Table A; Target 70960; HLA-B*40:02; PRAME; ENSG00000185686; TAA
LERASATLQDL

SEQ ID NO: 70961 - protein, 11 aa, Homo sapiens
  misc_feature: Table A; Target 70961; HLA-B*40:01; PRAME; ENSG00000185686; TAA
LESYEDIHGTL

SEQ ID NO: 70962 - protein, 8 aa, Homo sapiens
  misc_feature: Table A; Target 70962; HLA-B*18:01; PRAME; ENSG00000185686; TAA
LETFKAVL

SEQ ID NO: 70963 - protein, 8 aa, Homo sapiens
  misc_feature: Table A; Target 70963; HLA-B*37:01; PRAME; ENSG00000185686; TAA
LETFKAVL

SEQ ID NO: 70964 - protein, 9 aa, Homo sapiens
  misc_feature: Table A; Target 70964; HLA-A*30:01; PRAME; ENSG00000185686; TAA
LETLSITNC

SEQ ID NO: 70965 - protein, 9 aa, Homo sapiens
  misc_feature: Table A; Target 70965; HLA-B*40:02; PRAME; ENSG00000185686; TAA
LETLSITNC

SEQ ID NO: 70966 - protein, 9 aa, Homo sapiens
  misc_feature: Table A; Target 70966; HLA-B*49:01; PRAME; ENSG00000185686; TAA
LETLSITNC

SEQ ID NO: 70967 - protein, 9 aa, Homo sapiens
  misc_feature: Table A; Target 70967; HLA-A*02:07; PRAME; ENSG00000185686; TAA
LFPPLFMAA

SEQ ID NO: 70968 - protein, 10 aa, Homo sapiens
  misc_feature: Table A; Target 70968; HLA-A*24:02; PRAME; ENSG00000185686; TAA
LFPPLFMAAF

SEQ ID NO: 70969 - protein, 10 aa, Homo sapiens
  misc_feature: Table A; Target 70969; HLA-A*29:02; PRAME; ENSG00000185686; TAA
LFPPLFMAAF

SEQ ID NO: 70970 - protein, 9 aa, Homo sapiens
  misc_feature: Table A; Target 70970; HLA-A*68:02; PRAME; ENSG00000185686; TAA
LFSYLIEKV

SEQ ID NO: 70971 - protein, 8 aa, Homo sapiens
  misc_feature: Table A; Target 70971; HLA-B*57:01; PRAME; ENSG00000185686; TAA
LGRPSMVW

SEQ ID NO: 70972 - protein, 9 aa, Homo sapiens
  misc_feature: Table A; Target 70972; HLA-A*02:01; PRAME; ENSG00000185686; TAA
LHLERLAYL

SEQ ID NO: 70973 - protein, 9 aa, Homo sapiens
  misc_feature: Table A; Target 70973; HLA-A*02:04; PRAME; ENSG00000185686; TAA
LHLERLAYL

SEQ ID NO: 70974 - protein, 8 aa, Homo sapiens
  misc_feature: Table A; Target 70974; HLA-A*02:04; PRAME; ENSG00000185686; TAA
LLALLPSL

SEQ ID NO: 70975 - protein, 9 aa, Homo sapiens
  misc_feature: Table A; Target 70975; HLA-A*02:03; PRAME; ENSG00000185686; TAA
LLAQEVRPR

SEQ ID NO: 70976 - protein, 9 aa, Homo sapiens
  misc_feature: Table A; Target 70976; HLA-A*03:01; PRAME; ENSG00000185686; TAA
LLAQEVRPR

SEQ ID NO: 70977 - protein, 9 aa, Homo sapiens
  misc_feature: Table A; Target 70977; HLA-A*31:01; PRAME; ENSG00000185686; TAA
LLAQEVRPR

SEQ ID NO: 70978 - protein, 9 aa, Homo sapiens
  misc_feature: Table A; Target 70978; HLA-B*08:01; PRAME; ENSG00000185686; TAA
LLERASATL

SEQ ID NO: 70979 - protein, 9 aa, Homo sapiens
  misc_feature: Table A; Target 70979; HLA-C*01:02; PRAME; ENSG00000185686; TAA
LLERASATL

SEQ ID NO: 70980 - protein, 9 aa, Homo sapiens
  misc_feature: Table A; Target 70980; HLA-C*03:03; PRAME; ENSG00000185686; TAA
LLERASATL

SEQ ID NO: 70981 - protein, 9 aa, Homo sapiens
  misc_feature: Table A; Target 70981; HLA-C*03:04; PRAME; ENSG00000185686; TAA
LLERASATL

SEQ ID NO: 70982 - protein, 9 aa, Homo sapiens
  misc_feature: Table A; Target 70982; HLA-C*05:01; PRAME; ENSG00000185686; TAA
LLERASATL

SEQ ID NO: 70983 - protein, 9 aa, Homo sapiens
  misc_feature: Table A; Target 70983; HLA-C*07:04; PRAME; ENSG00000185686; TAA
LLERASATL

SEQ ID NO: 70984 - protein, 9 aa, Homo sapiens
  misc_feature: Table A; Target 70984; HLA-C*14:02; PRAME; ENSG00000185686; TAA
LLERASATL

SEQ ID NO: 70985 - protein, 9 aa, Homo sapiens
  misc_feature: Table A; Target 70985; HLA-A*02:01; PRAME; ENSG00000185686; TAA
LLKDEALAI

SEQ ID NO: 70986 - protein, 9 aa, Homo sapiens
  misc_feature: Table A; Target 70986; HLA-A*02:03; PRAME; ENSG00000185686; TAA
LLKDEALAI

SEQ ID NO: 70987 - protein, 9 aa, Homo sapiens
  misc_feature: Table A; Target 70987; HLA-A*02:04; PRAME; ENSG00000185686; TAA
LLKDEALAI

SEQ ID NO: 70988 - protein, 9 aa, Homo sapiens
  misc_feature: Table A; Target 70988; HLA-A*23:01; PRAME; ENSG00000185686; TAA
LLKDEALAI

SEQ ID NO: 70989 - protein, 9 aa, Homo sapiens
  misc_feature: Table A; Target 70989; HLA-A*24:02; PRAME; ENSG00000185686; TAA
LLKDEALAI

SEQ ID NO: 70990 - protein, 9 aa, Homo sapiens
  misc_feature: Table A; Target 70990; HLA-A*25:01; PRAME; ENSG00000185686; TAA
LLKDEALAI

SEQ ID NO: 70991 - protein, 9 aa, Homo sapiens
  misc_feature: Table A; Target 70991; HLA-B*08:01; PRAME; ENSG00000185686; TAA
LLKDEALAI

SEQ ID NO: 70992 - protein, 9 aa, Homo sapiens
  misc_feature: Table A; Target 70992; HLA-B*13:02; PRAME; ENSG00000185686; TAA
LLKDEALAI

SEQ ID NO: 70993 - protein, 9 aa, Homo sapiens
  misc_feature: Table A; Target 70993; HLA-B*40:02; PRAME; ENSG00000185686; TAA
LLKDEALAI

SEQ ID NO: 70994 - protein, 9 aa, Homo sapiens
  misc_feature: Table A; Target 70994; HLA-B*46:01; PRAME; ENSG00000185686; TAA
LLKDEALAI

SEQ ID NO: 70995 - protein, 9 aa, Homo sapiens
  misc_feature: Table A; Target 70995; HLA-B*55:01; PRAME; ENSG00000185686; TAA
LLKDEALAI

SEQ ID NO: 70996 - protein, 9 aa, Homo sapiens
  misc_feature: Table A; Target 70996; HLA-C*06:02; PRAME; ENSG00000185686; TAA
LLKDEALAI

SEQ ID NO: 70997 - protein, 9 aa, Homo sapiens
  misc_feature: Table A; Target 70997; HLA-C*07:02; PRAME; ENSG00000185686; TAA
LLKDEALAI

SEQ ID NO: 70998 - protein, 9 aa, Homo sapiens
  misc_feature: Table A; Target 70998; HLA-C*07:04; PRAME; ENSG00000185686; TAA
LLKDEALAI

SEQ ID NO: 70999 - protein, 10 aa, Homo sapiens
  misc_feature: Table A; Target 70999; HLA-A*02:03; PRAME; ENSG00000185686; TAA
LLKDEALAIA

SEQ ID NO: 71000 - protein, 9 aa, Homo sapiens
  misc_feature: Table A; Target 71000; HLA-A*02:04; PRAME; ENSG00000185686; TAA
LLLSHIHAS

SEQ ID NO: 71001 - protein, 10 aa, Homo sapiens
  misc_feature: Table A; Target 71001; HLA-A*02:04; PRAME; ENSG00000185686; TAA
LLPRELFPPL

SEQ ID NO: 71002 - protein, 10 aa, Homo sapiens
  misc_feature: Table A; Target 71002; HLA-A*02:07; PRAME; ENSG00000185686; TAA
LLPRELFPPL

SEQ ID NO: 71003 - protein, 10 aa, Homo sapiens
  misc_feature: Table A; Target 71003; HLA-A*03:01; PRAME; ENSG00000185686; TAA
LLPRELFPPL

SEQ ID NO: 71004 - protein, 10 aa, Homo sapiens
  misc_feature: Table A; Target 71004; HLA-A*24:02; PRAME; ENSG00000185686; TAA
LLPRELFPPL

SEQ ID NO: 71005 - protein, 11 aa, Homo sapiens
  misc_feature: Table A; Target 71005; HLA-A*02:07; PRAME; ENSG00000185686; TAA
LLPRELFPPLF

SEQ ID NO: 71006 - protein, 11 aa, Homo sapiens
  misc_feature: Table A; Target 71006; HLA-A*24:02; PRAME; ENSG00000185686; TAA
LLPRELFPPLF

SEQ ID NO: 71007 - protein, 8 aa, Homo sapiens
  misc_feature: Table A; Target 71007; HLA-A*02:04; PRAME; ENSG00000185686; TAA
LLQHLIGL

SEQ ID NO: 71008 - protein, 8 aa, Homo sapiens
  misc_feature: Table A; Target 71008; HLA-C*07:04; PRAME; ENSG00000185686; TAA
LLQHLIGL

SEQ ID NO: 71009 - protein, 11 aa, Homo sapiens
  misc_feature: Table A; Target 71009; HLA-A*02:04; PRAME; ENSG00000185686; TAA
LLQHLIGLSNL

SEQ ID NO: 71010 - protein, 10 aa, Homo sapiens
  misc_feature: Table A; Target 71010; HLA-A*01:01; PRAME; ENSG00000185686; TAA
LLSHIHASSY

SEQ ID NO: 71011 - protein, 10 aa, Homo sapiens
  misc_feature: Table A; Target 71011; HLA-A*29:02; PRAME; ENSG00000185686; TAA
LLSHIHASSY

SEQ ID NO: 71012 - protein, 10 aa, Homo sapiens
  misc_feature: Table A; Target 71012; HLA-A*30:02; PRAME; ENSG00000185686; TAA
LLSHIHASSY

SEQ ID NO: 71013 - protein, 8 aa, Homo sapiens
  misc_feature: Table A; Target 71013; HLA-B*51:01; PRAME; ENSG00000185686; TAA
LPLGVLMK

SEQ ID NO: 71014 - protein, 9 aa, Homo sapiens
  misc_feature: Table A; Target 71014; HLA-B*54:01; PRAME; ENSG00000185686; TAA
LPLGVLMKG

SEQ ID NO: 71015 - protein, 8 aa, Homo sapiens
  misc_feature: Table A; Target 71015; HLA-B*54:01; PRAME; ENSG00000185686; TAA
LPRELFPP

SEQ ID NO: 71016 - protein, 9 aa, Homo sapiens
  misc_feature: Table A; Target 71016; HLA-B*07:02; PRAME; ENSG00000185686; TAA
LPRELFPPL

SEQ ID NO: 71017 - protein, 9 aa, Homo sapiens
  misc_feature: Table A; Target 71017; HLA-B*35:01; PRAME; ENSG00000185686; TAA
LPRELFPPL

SEQ ID NO: 71018 - protein, 9 aa, Homo sapiens
  misc_feature: Table A; Target 71018; HLA-B*51:01; PRAME; ENSG00000185686; TAA
LPRELFPPL

SEQ ID NO: 71019 - protein, 9 aa, Homo sapiens
  misc_feature: Table A; Target 71019; HLA-B*54:01; PRAME; ENSG00000185686; TAA
LPRELFPPL

SEQ ID NO: 71020 - protein, 10 aa, Homo sapiens
  misc_feature: Table A; Target 71020; HLA-B*51:01; PRAME; ENSG00000185686; TAA
LPRELFPPLF

SEQ ID NO: 71021 - protein, 10 aa, Homo sapiens
  misc_feature: Table A; Target 71021; HLA-B*54:01; PRAME; ENSG00000185686; TAA
LPRELFPPLF

SEQ ID NO: 71022 - protein, 10 aa, Homo sapiens
  misc_feature: Table A; Target 71022; HLA-B*07:02; PRAME; ENSG00000185686; TAA
LPSLSHCSQL

SEQ ID NO: 71023 - protein, 10 aa, Homo sapiens
  misc_feature: Table A; Target 71023; HLA-C*07:02; PRAME; ENSG00000185686; TAA
LPSLSHCSQL

SEQ ID NO: 71024 - protein, 9 aa, Homo sapiens
  misc_feature: Table A; Target 71024; HLA-B*54:01; PRAME; ENSG00000185686; TAA
LPTLAKFSP

SEQ ID NO: 71025 - protein, 10 aa, Homo sapiens
  misc_feature: Table A; Target 71025; HLA-B*35:01; PRAME; ENSG00000185686; TAA
LPTLAKFSPY

SEQ ID NO: 71026 - protein, 9 aa, Homo sapiens
  misc_feature: Table A; Target 71026; HLA-A*02:04; PRAME; ENSG00000185686; TAA
LQALYVDSL

SEQ ID NO: 71027 - protein, 9 aa, Homo sapiens
  misc_feature: Table A; Target 71027; HLA-B*27:05; PRAME; ENSG00000185686; TAA
LQALYVDSL

SEQ ID NO: 71028 - protein, 9 aa, Homo sapiens
  misc_feature: Table A; Target 71028; HLA-B*38:01; PRAME; ENSG00000185686; TAA
LQALYVDSL

SEQ ID NO: 71029 - protein, 9 aa, Homo sapiens
  misc_feature: Table A; Target 71029; HLA-B*39:01; PRAME; ENSG00000185686; TAA
LQALYVDSL

SEQ ID NO: 71030 - protein, 9 aa, Homo sapiens
  misc_feature: Table A; Target 71030; HLA-C*07:04; PRAME; ENSG00000185686; TAA
LQALYVDSL

SEQ ID NO: 71031 - protein, 9 aa, Homo sapiens
  misc_feature: Table A; Target 71031; HLA-B*13:02; PRAME; ENSG00000185686; TAA
LQCLQALYV

SEQ ID NO: 71032 - protein, 8 aa, Homo sapiens
  misc_feature: Table A; Target 71032; HLA-B*37:01; PRAME; ENSG00000185686; TAA
LQSLLQHL

SEQ ID NO: 71033 - protein, 9 aa, Homo sapiens
  misc_feature: Table A; Target 71033; HLA-B*13:02; PRAME; ENSG00000185686; TAA
LQSLLQHLI

SEQ ID NO: 71034 - protein, 9 aa, Homo sapiens
  misc_feature: Table A; Target 71034; HLA-B*38:01; PRAME; ENSG00000185686; TAA
LQSLLQHLI

SEQ ID NO: 71035 - protein, 9 aa, Homo sapiens
  misc_feature: Table A; Target 71035; HLA-A*01:01; PRAME; ENSG00000185686; TAA
LSEGDVMHL

SEQ ID NO: 71036 - protein, 9 aa, Homo sapiens
  misc_feature: Table A; Target 71036; HLA-B*27:05; PRAME; ENSG00000185686; TAA
LSEGDVMHL

SEQ ID NO: 71037 - protein, 9 aa, Homo sapiens
  misc_feature: Table A; Target 71037; HLA-B*58:01; PRAME; ENSG00000185686; TAA
LSEGDVMHL

SEQ ID NO: 71038 - protein, 9 aa, Homo sapiens
  misc_feature: Table A; Target 71038; HLA-C*03:03; PRAME; ENSG00000185686; TAA
LSEGDVMHL

SEQ ID NO: 71039 - protein, 9 aa, Homo sapiens
  misc_feature: Table A; Target 71039; HLA-C*03:04; PRAME; ENSG00000185686; TAA
LSEGDVMHL

SEQ ID NO: 71040 - protein, 9 aa, Homo sapiens
  misc_feature: Table A; Target 71040; HLA-C*04:01; PRAME; ENSG00000185686; TAA
LSEGDVMHL

SEQ ID NO: 71041 - protein, 9 aa, Homo sapiens
  misc_feature: Table A; Target 71041; HLA-C*05:01; PRAME; ENSG00000185686; TAA
LSEGDVMHL

SEQ ID NO: 71042 - protein, 9 aa, Homo sapiens
  misc_feature: Table A; Target 71042; HLA-C*06:02; PRAME; ENSG00000185686; TAA
LSEGDVMHL

SEQ ID NO: 71043 - protein, 9 aa, Homo sapiens
  misc_feature: Table A; Target 71043; HLA-C*07:01; PRAME; ENSG00000185686; TAA
LSEGDVMHL

SEQ ID NO: 71044 - protein, 9 aa, Homo sapiens
  misc_feature: Table A; Target 71044; HLA-C*07:04; PRAME; ENSG00000185686; TAA
LSEGDVMHL

SEQ ID NO: 71045 - protein, 8 aa, Homo sapiens
  misc_feature: Table A; Target 71045; HLA-B*40:02; PRAME; ENSG00000185686; TAA
LSFYGNSI

SEQ ID NO: 71046 - protein, 8 aa, Homo sapiens
  misc_feature: Table A; Target 71046; HLA-B*46:01; PRAME; ENSG00000185686; TAA
LSFYGNSI

SEQ ID NO: 71047 - protein, 8 aa, Homo sapiens
  misc_feature: Table A; Target 71047; HLA-B*51:01; PRAME; ENSG00000185686; TAA
LSFYGNSI

SEQ ID NO: 71048 - protein, 8 aa, Homo sapiens
  misc_feature: Table A; Target 71048; HLA-C*03:03; PRAME; ENSG00000185686; TAA
LSFYGNSI

SEQ ID NO: 71049 - protein, 8 aa, Homo sapiens
  misc_feature: Table A; Target 71049; HLA-C*03:04; PRAME; ENSG00000185686; TAA
LSFYGNSI

SEQ ID NO: 71050 - protein, 10 aa, Homo sapiens
  misc_feature: Table A; Target 71050; HLA-A*68:02; PRAME; ENSG00000185686; TAA
LSFYGNSISI

SEQ ID NO: 71051 - protein, 10 aa, Homo sapiens
  misc_feature: Table A; Target 71051; HLA-C*07:02; PRAME; ENSG00000185686; TAA
LSFYGNSISI

SEQ ID NO: 71052 - protein, 9 aa, Homo sapiens
  misc_feature: Table A; Target 71052; HLA-A*01:01; PRAME; ENSG00000185686; TAA
LSHIHASSY

SEQ ID NO: 71053 - protein, 9 aa, Homo sapiens
  misc_feature: Table A; Target 71053; HLA-A*30:02; PRAME; ENSG00000185686; TAA
LSHIHASSY

SEQ ID NO: 71054 - protein, 9 aa, Homo sapiens
  misc_feature: Table A; Target 71054; HLA-A*32:01; PRAME; ENSG00000185686; TAA
LSHIHASSY

SEQ ID NO: 71055 - protein, 9 aa, Homo sapiens
  misc_feature: Table A; Target 71055; HLA-B*15:01; PRAME; ENSG00000185686; TAA
LSHIHASSY

SEQ ID NO: 71056 - protein, 9 aa, Homo sapiens
  misc_feature: Table A; Target 71056; HLA-B*15:03; PRAME; ENSG00000185686; TAA
LSHIHASSY

SEQ ID NO: 71057 - protein, 9 aa, Homo sapiens
  misc_feature: Table A; Target 71057; HLA-B*46:01; PRAME; ENSG00000185686; TAA
LSHIHASSY

SEQ ID NO: 71058 - protein, 9 aa, Homo sapiens
  misc_feature: Table A; Target 71058; HLA-B*58:01; PRAME; ENSG00000185686; TAA
LSHIHASSY

SEQ ID NO: 71059 - protein, 9 aa, Homo sapiens
  misc_feature: Table A; Target 71059; HLA-C*02:02; PRAME; ENSG00000185686; TAA
LSHIHASSY

SEQ ID NO: 71060 - protein, 9 aa, Homo sapiens
  misc_feature: Table A; Target 71060; HLA-C*07:01; PRAME; ENSG00000185686; TAA
LSHIHASSY

SEQ ID NO: 71061 - protein, 9 aa, Homo sapiens
  misc_feature: Table A; Target 71061; HLA-C*07:04; PRAME; ENSG00000185686; TAA
LSHIHASSY

SEQ ID NO: 71062 - protein, 9 aa, Homo sapiens
  misc_feature: Table A; Target 71062; HLA-C*14:02; PRAME; ENSG00000185686; TAA
LSHIHASSY

SEQ ID NO: 71063 - protein, 9 aa, Homo sapiens
  misc_feature: Table A; Target 71063; HLA-C*16:01; PRAME; ENSG00000185686; TAA
LSHIHASSY

SEQ ID NO: 71064 - protein, 9 aa, Homo sapiens
  misc_feature: Table A; Target 71064; HLA-C*16:02; PRAME; ENSG00000185686; TAA
LSHIHASSY

SEQ ID NO: 71065 - protein, 8 aa, Homo sapiens
  misc_feature: Table A; Target 71065; HLA-C*03:03; PRAME; ENSG00000185686; TAA
LSLSGVML

SEQ ID NO: 71066 - protein, 8 aa, Homo sapiens
  misc_feature: Table A; Target 71066; HLA-C*03:04; PRAME; ENSG00000185686; TAA
LSLSGVML

SEQ ID NO: 71067 - protein, 8 aa, Homo sapiens
  misc_feature: Table A; Target 71067; HLA-B*08:01; PRAME; ENSG00000185686; TAA
LSNLTHVL

SEQ ID NO: 71068 - protein, 8 aa, Homo sapiens
  misc_feature: Table A; Target 71068; HLA-C*03:03; PRAME; ENSG00000185686; TAA
LSNLTHVL

SEQ ID NO: 71069 - protein, 8 aa, Homo sapiens
  misc_feature: Table A; Target 71069; HLA-C*03:04; PRAME; ENSG00000185686; TAA
LSNLTHVL

SEQ ID NO: 71070 - protein, 8 aa, Homo sapiens
  misc_feature: Table A; Target 71070; HLA-C*07:04; PRAME; ENSG00000185686; TAA
LSNLTHVL

SEQ ID NO: 71071 - protein, 8 aa, Homo sapiens
  misc_feature: Table A; Target 71071; HLA-C*16:01; PRAME; ENSG00000185686; TAA
LSNLTHVL

SEQ ID NO: 71072 - protein, 9 aa, Homo sapiens
  misc_feature: Table A; Target 71072; HLA-A*01:01; PRAME; ENSG00000185686; TAA
LSNLTHVLY

SEQ ID NO: 71073 - protein, 9 aa, Homo sapiens
  misc_feature: Table A; Target 71073; HLA-A*29:02; PRAME; ENSG00000185686; TAA
LSNLTHVLY

SEQ ID NO: 71074 - protein, 9 aa, Homo sapiens
  misc_feature: Table A; Target 71074; HLA-A*30:02; PRAME; ENSG00000185686; TAA
LSNLTHVLY

SEQ ID NO: 71075 - protein, 9 aa, Homo sapiens
  misc_feature: Table A; Target 71075; HLA-A*32:01; PRAME; ENSG00000185686; TAA
LSNLTHVLY

SEQ ID NO: 71076 - protein, 9 aa, Homo sapiens
  misc_feature: Table A; Target 71076; HLA-B*15:01; PRAME; ENSG00000185686; TAA
LSNLTHVLY

SEQ ID NO: 71077 - protein, 9 aa, Homo sapiens
  misc_feature: Table A; Target 71077; HLA-B*46:01; PRAME; ENSG00000185686; TAA
LSNLTHVLY

SEQ ID NO: 71078 - protein, 9 aa, Homo sapiens
  misc_feature: Table A; Target 71078; HLA-B*57:01; PRAME; ENSG00000185686; TAA
LSNLTHVLY

SEQ ID NO: 71079 - protein, 9 aa, Homo sapiens
  misc_feature: Table A; Target 71079; HLA-B*58:01; PRAME; ENSG00000185686; TAA
LSNLTHVLY

SEQ ID NO: 71080 - protein, 9 aa, Homo sapiens
  misc_feature: Table A; Target 71080; HLA-C*02:02; PRAME; ENSG00000185686; TAA
LSNLTHVLY

SEQ ID NO: 71081 - protein, 9 aa, Homo sapiens
  misc_feature: Table A; Target 71081; HLA-C*16:01; PRAME; ENSG00000185686; TAA
LSNLTHVLY

SEQ ID NO: 71082 - protein, 9 aa, Homo sapiens
  misc_feature: Table A; Target 71082; HLA-C*03:03; PRAME; ENSG00000185686; TAA
LSQSPSVSQ

SEQ ID NO: 71083 - protein, 10 aa, Homo sapiens
  misc_feature: Table A; Target 71083; HLA-B*39:01; PRAME; ENSG00000185686; TAA
LSQSPSVSQL

SEQ ID NO: 71084 - protein, 9 aa, Homo sapiens
  misc_feature: Table A; Target 71084; HLA-A*01:01; PRAME; ENSG00000185686; TAA
LTDVSPEPL

SEQ ID NO: 71085 - protein, 9 aa, Homo sapiens
  misc_feature: Table A; Target 71085; HLA-B*35:03; PRAME; ENSG00000185686; TAA
LTDVSPEPL

SEQ ID NO: 71086 - protein, 9 aa, Homo sapiens
  misc_feature: Table A; Target 71086; HLA-B*39:01; PRAME; ENSG00000185686; TAA
LTDVSPEPL

SEQ ID NO: 71087 - protein, 9 aa, Homo sapiens
  misc_feature: Table A; Target 71087; HLA-C*03:03; PRAME; ENSG00000185686; TAA
LTDVSPEPL

SEQ ID NO: 71088 - protein, 9 aa, Homo sapiens
  misc_feature: Table A; Target 71088; HLA-C*03:04; PRAME; ENSG00000185686; TAA
LTDVSPEPL

SEQ ID NO: 71089 - protein, 9 aa, Homo sapiens
  misc_feature: Table A; Target 71089; HLA-C*04:01; PRAME; ENSG00000185686; TAA
LTDVSPEPL

SEQ ID NO: 71090 - protein, 9 aa, Homo sapiens
  misc_feature: Table A; Target 71090; HLA-C*05:01; PRAME; ENSG00000185686; TAA
LTDVSPEPL

SEQ ID NO: 71091 - protein, 9 aa, Homo sapiens
  misc_feature: Table A; Target 71091; HLA-C*07:04; PRAME; ENSG00000185686; TAA
LTDVSPEPL

SEQ ID NO: 71092 - protein, 10 aa, Homo sapiens
  misc_feature: Table A; Target 71092; HLA-A*01:01; PRAME; ENSG00000185686; TAA
LTDVSPEPLQ

SEQ ID NO: 71093 - protein, 11 aa, Homo sapiens
  misc_feature: Table A; Target 71093; HLA-B*27:05; PRAME; ENSG00000185686; TAA
LTDVSPEPLQA

SEQ ID NO: 71094 - protein, 9 aa, Homo sapiens
  misc_feature: Table A; Target 71094; HLA-B*07:02; PRAME; ENSG00000185686; TAA
LVELAGQSL

SEQ ID NO: 71095 - protein, 9 aa, Homo sapiens
  misc_feature: Table A; Target 71095; HLA-B*35:03; PRAME; ENSG00000185686; TAA
LVELAGQSL

SEQ ID NO: 71096 - protein, 9 aa, Homo sapiens
  misc_feature: Table A; Target 71096; HLA-B*39:01; PRAME; ENSG00000185686; TAA
LVELAGQSL

SEQ ID NO: 71097 - protein, 9 aa, Homo sapiens
  misc_feature: Table A; Target 71097; HLA-C*01:02; PRAME; ENSG00000185686; TAA
LVELAGQSL

SEQ ID NO: 71098 - protein, 9 aa, Homo sapiens
  misc_feature: Table A; Target 71098; HLA-C*03:03; PRAME; ENSG00000185686; TAA
LVELAGQSL

SEQ ID NO: 71099 - protein, 9 aa, Homo sapiens
  misc_feature: Table A; Target 71099; HLA-C*03:04; PRAME; ENSG00000185686; TAA
LVELAGQSL

SEQ ID NO: 71100 - protein, 9 aa, Homo sapiens
  misc_feature: Table A; Target 71100; HLA-C*05:01; PRAME; ENSG00000185686; TAA
LVELAGQSL

SEQ ID NO: 71101 - protein, 9 aa, Homo sapiens
  misc_feature: Table A; Target 71101; HLA-C*07:04; PRAME; ENSG00000185686; TAA
LVELAGQSL

SEQ ID NO: 71102 - protein, 9 aa, Homo sapiens
  misc_feature: Table A; Target 71102; HLA-C*14:02; PRAME; ENSG00000185686; TAA
LVELAGQSL

SEQ ID NO: 71103 - protein, 10 aa, Homo sapiens
  misc_feature: Table A; Target 71103; HLA-A*01:01; PRAME; ENSG00000185686; TAA
LVELAGQSLL

SEQ ID NO: 71104 - protein, 10 aa, Homo sapiens
  misc_feature: Table A; Target 71104; HLA-C*05:01; PRAME; ENSG00000185686; TAA
LVELAGQSLL

SEQ ID NO: 71105 - protein, 11 aa, Homo sapiens
  misc_feature: Table A; Target 71105; HLA-A*01:01; PRAME; ENSG00000185686; TAA
LVELAGQSLLK

SEQ ID NO: 71106 - protein, 11 aa, Homo sapiens
  misc_feature: Table A; Target 71106; HLA-B*27:02; PRAME; ENSG00000185686; TAA
LVELAGQSLLK

SEQ ID NO: 71107 - protein, 9 aa, Homo sapiens
  misc_feature: Table A; Target 71107; HLA-A*29:02; PRAME; ENSG00000185686; TAA
LWGSIQSRY

SEQ ID NO: 71108 - protein, 9 aa, Homo sapiens
  misc_feature: Table A; Target 71108; HLA-A*23:01; PRAME; ENSG00000185686; TAA
LYPVPLESY

SEQ ID NO: 71109 - protein, 9 aa, Homo sapiens
  misc_feature: Table A; Target 71109; HLA-A*24:02; PRAME; ENSG00000185686; TAA
LYPVPLESY

SEQ ID NO: 71110 - protein, 9 aa, Homo sapiens
  misc_feature: Table A; Target 71110; HLA-A*29:02; PRAME; ENSG00000185686; TAA
LYPVPLESY

SEQ ID NO: 71111 - protein, 9 aa, Homo sapiens
  misc_feature: Table A; Target 71111; HLA-A*30:02; PRAME; ENSG00000185686; TAA
LYPVPLESY

SEQ ID NO: 71112 - protein, 9 aa, Homo sapiens
  misc_feature: Table A; Target 71112; HLA-B*15:01; PRAME; ENSG00000185686; TAA
LYPVPLESY

SEQ ID NO: 71113 - protein, 9 aa, Homo sapiens
  misc_feature: Table A; Target 71113; HLA-B*15:03; PRAME; ENSG00000185686; TAA
LYPVPLESY

SEQ ID NO: 71114 - protein, 9 aa, Homo sapiens
  misc_feature: Table A; Target 71114; HLA-B*46:01; PRAME; ENSG00000185686; TAA
LYPVPLESY

SEQ ID NO: 71115 - protein, 9 aa, Homo sapiens
  misc_feature: Table A; Target 71115; HLA-C*01:02; PRAME; ENSG00000185686; TAA
LYPVPLESY

SEQ ID NO: 71116 - protein, 9 aa, Homo sapiens
  misc_feature: Table A; Target 71116; HLA-C*04:01; PRAME; ENSG00000185686; TAA
LYPVPLESY

SEQ ID NO: 71117 - protein, 9 aa, Homo sapiens
  misc_feature: Table A; Target 71117; HLA-C*14:02; PRAME; ENSG00000185686; TAA
LYPVPLESY

SEQ ID NO: 71118 - protein, 9 aa, Homo sapiens
  misc_feature: Table A; Target 71118; HLA-B*54:01; PRAME; ENSG00000185686; TAA
LYSFPEPEA

SEQ ID NO: 71119 - protein, 8 aa, Homo sapiens
  misc_feature: Table A; Target 71119; HLA-A*23:01; PRAME; ENSG00000185686; TAA
LYVDSLFF

SEQ ID NO: 71120 - protein, 8 aa, Homo sapiens
  misc_feature: Table A; Target 71120; HLA-A*24:02; PRAME; ENSG00000185686; TAA
LYVDSLFF

SEQ ID NO: 71121 - protein, 8 aa, Homo sapiens
  misc_feature: Table A; Target 71121; HLA-C*07:01; PRAME; ENSG00000185686; TAA
LYVDSLFF

SEQ ID NO: 71122 - protein, 9 aa, Homo sapiens
  misc_feature: Table A; Target 71122; HLA-A*02:04; PRAME; ENSG00000185686; TAA
LYVDSLFFL

SEQ ID NO: 71123 - protein, 9 aa, Homo sapiens
  misc_feature: Table A; Target 71123; HLA-A*23:01; PRAME; ENSG00000185686; TAA
LYVDSLFFL

SEQ ID NO: 71124 - protein, 9 aa, Homo sapiens
  misc_feature: Table A; Target 71124; HLA-A*24:02; PRAME; ENSG00000185686; TAA
LYVDSLFFL

SEQ ID NO: 71125 - protein, 9 aa, Homo sapiens
  misc_feature: Table A; Target 71125; HLA-A*29:02; PRAME; ENSG00000185686; TAA
LYVDSLFFL

SEQ ID NO: 71126 - protein, 10 aa, Homo sapiens
  misc_feature: Table A; Target 71126; HLA-A*29:02; PRAME; ENSG00000185686; TAA
LYVDSLFFLR

SEQ ID NO: 71127 - protein, 10 aa, Homo sapiens
  misc_feature: Table A; Target 71127; HLA-A*31:01; PRAME; ENSG00000185686; TAA
LYVDSLFFLR

SEQ ID NO: 71128 - protein, 9 aa, Homo sapiens
  misc_feature: Table A; Target 71128; HLA-B*38:01; PRAME; ENSG00000185686; TAA
MHLSQSPSV

SEQ ID NO: 71129 - protein, 9 aa, Homo sapiens
  misc_feature: Table A; Target 71129; HLA-B*39:01; PRAME; ENSG00000185686; TAA
MHLSQSPSV

SEQ ID NO: 71130 - protein, 9 aa, Homo sapiens
  misc_feature: Table A; Target 71130; HLA-B*51:01; PRAME; ENSG00000185686; TAA
MHLSQSPSV

SEQ ID NO: 71131 - protein, 9 aa, Homo sapiens
  misc_feature: Table A; Target 71131; HLA-B*54:01; PRAME; ENSG00000185686; TAA
MHLSQSPSV

SEQ ID NO: 71132 - protein, 10 aa, Homo sapiens
  misc_feature: Table A; Target 71132; HLA-C*07:01; PRAME; ENSG00000185686; TAA
MHLSQSPSVS

SEQ ID NO: 71133 - protein, 9 aa, Homo sapiens
  misc_feature: Table A; Target 71133; HLA-B*08:01; PRAME; ENSG00000185686; TAA
MINLRRLLL

SEQ ID NO: 71134 - protein, 9 aa, Homo sapiens
  misc_feature: Table A; Target 71134; HLA-A*02:01; PRAME; ENSG00000185686; TAA
MLTDVSPEP

SEQ ID NO: 71135 - protein, 9 aa, Homo sapiens
  misc_feature: Table A; Target 71135; HLA-B*27:05; PRAME; ENSG00000185686; TAA
MLTDVSPEP

SEQ ID NO: 71136 - protein, 10 aa, Homo sapiens
  misc_feature: Table A; Target 71136; HLA-A*68:02; PRAME; ENSG00000185686; TAA
MLTDVSPEPL

SEQ ID NO: 71137 - protein, 10 aa, Homo sapiens
  misc_feature: Table A; Target 71137; HLA-B*35:03; PRAME; ENSG00000185686; TAA
MLTDVSPEPL

SEQ ID NO: 71138 - protein, 10 aa, Homo sapiens
  misc_feature: Table A; Target 71138; HLA-C*07:02; PRAME; ENSG00000185686; TAA
MLTDVSPEPL

SEQ ID NO: 71139 - protein, 10 aa, Homo sapiens
  misc_feature: Table A; Target 71139; HLA-C*07:04; PRAME; ENSG00000185686; TAA
MLTDVSPEPL

SEQ ID NO: 71140 - protein, 11 aa, Homo sapiens
  misc_feature: Table A; Target 71140; HLA-C*07:01; PRAME; ENSG00000185686; TAA
MNPLETLSITN

SEQ ID NO: 71141 - protein, 8 aa, Homo sapiens
  misc_feature: Table A; Target 71141; HLA-B*08:01; PRAME; ENSG00000185686; TAA
MPMQDIKM

SEQ ID NO: 71142 - protein, 8 aa, Homo sapiens
  misc_feature: Table A; Target 71142; HLA-B*35:01; PRAME; ENSG00000185686; TAA
MPMQDIKM

SEQ ID NO: 71143 - protein, 8 aa, Homo sapiens
  misc_feature: Table A; Target 71143; HLA-B*35:03; PRAME; ENSG00000185686; TAA
MPMQDIKM

SEQ ID NO: 71144 - protein, 8 aa, Homo sapiens
  misc_feature: Table A; Target 71144; HLA-B*51:01; PRAME; ENSG00000185686; TAA
MPMQDIKM

SEQ ID NO: 71145 - protein, 8 aa, Homo sapiens
  misc_feature: Table A; Target 71145; HLA-B*54:01; PRAME; ENSG00000185686; TAA
MPMQDIKM

SEQ ID NO: 71146 - protein, 8 aa, Homo sapiens
  misc_feature: Table A; Target 71146; HLA-B*55:01; PRAME; ENSG00000185686; TAA
MPMQDIKM

SEQ ID NO: 71147 - protein, 8 aa, Homo sapiens
  misc_feature: Table A; Target 71147; HLA-B*56:01; PRAME; ENSG00000185686; TAA
MPMQDIKM

SEQ ID NO: 71148 - protein, 8 aa, Homo sapiens
  misc_feature: Table A; Target 71148; HLA-C*03:03; PRAME; ENSG00000185686; TAA
MPMQDIKM

SEQ ID NO: 71149 - protein, 9 aa, Homo sapiens
  misc_feature: Table A; Target 71149; HLA-B*07:02; PRAME; ENSG00000185686; TAA
MPMQDIKMI

SEQ ID NO: 71150 - protein, 9 aa, Homo sapiens
  misc_feature: Table A; Target 71150; HLA-B*08:01; PRAME; ENSG00000185686; TAA
MPMQDIKMI

SEQ ID NO: 71151 - protein, 9 aa, Homo sapiens
  misc_feature: Table A; Target 71151; HLA-B*35:01; PRAME; ENSG00000185686; TAA
MPMQDIKMI

SEQ ID NO: 71152 - protein, 9 aa, Homo sapiens
  misc_feature: Table A; Target 71152; HLA-B*35:03; PRAME; ENSG00000185686; TAA
MPMQDIKMI

SEQ ID NO: 71153 - protein, 9 aa, Homo sapiens
  misc_feature: Table A; Target 71153; HLA-B*51:01; PRAME; ENSG00000185686; TAA
MPMQDIKMI

SEQ ID NO: 71154 - protein, 9 aa, Homo sapiens
  misc_feature: Table A; Target 71154; HLA-B*54:01; PRAME; ENSG00000185686; TAA
MPMQDIKMI

SEQ ID NO: 71155 - protein, 9 aa, Homo sapiens
  misc_feature: Table A; Target 71155; HLA-B*55:01; PRAME; ENSG00000185686; TAA
MPMQDIKMI

SEQ ID NO: 71156 - protein, 9 aa, Homo sapiens
  misc_feature: Table A; Target 71156; HLA-B*56:01; PRAME; ENSG00000185686; TAA
MPMQDIKMI

SEQ ID NO: 71157 - protein, 9 aa, Homo sapiens
  misc_feature: Table A; Target 71157; HLA-C*07:02; PRAME; ENSG00000185686; TAA
MPMQDIKMI

SEQ ID NO: 71158 - protein, 10 aa, Homo sapiens
  misc_feature: Table A; Target 71158; HLA-B*07:02; PRAME; ENSG00000185686; TAA
MPMQDIKMIL

SEQ ID NO: 71159 - protein, 10 aa, Homo sapiens
  misc_feature: Table A; Target 71159; HLA-B*08:01; PRAME; ENSG00000185686; TAA
MPMQDIKMIL

SEQ ID NO: 71160 - protein, 10 aa, Homo sapiens
  misc_feature: Table A; Target 71160; HLA-B*35:01; PRAME; ENSG00000185686; TAA
MPMQDIKMIL

SEQ ID NO: 71161 - protein, 10 aa, Homo sapiens
  misc_feature: Table A; Target 71161; HLA-B*35:03; PRAME; ENSG00000185686; TAA
MPMQDIKMIL

SEQ ID NO: 71162 - protein, 10 aa, Homo sapiens
  misc_feature: Table A; Target 71162; HLA-B*51:01; PRAME; ENSG00000185686; TAA
MPMQDIKMIL

SEQ ID NO: 71163 - protein, 10 aa, Homo sapiens
  misc_feature: Table A; Target 71163; HLA-B*54:01; PRAME; ENSG00000185686; TAA
MPMQDIKMIL

SEQ ID NO: 71164 - protein, 10 aa, Homo sapiens
  misc_feature: Table A; Target 71164; HLA-B*55:01; PRAME; ENSG00000185686; TAA
MPMQDIKMIL

SEQ ID NO: 71165 - protein, 10 aa, Homo sapiens
  misc_feature: Table A; Target 71165; HLA-B*56:01; PRAME; ENSG00000185686; TAA
MPMQDIKMIL

SEQ ID NO: 71166 - protein, 10 aa, Homo sapiens
  misc_feature: Table A; Target 71166; HLA-C*07:02; PRAME; ENSG00000185686; TAA
MPMQDIKMIL

SEQ ID NO: 71167 - protein, 11 aa, Homo sapiens
  misc_feature: Table A; Target 71167; HLA-B*54:01; PRAME; ENSG00000185686; TAA
MPMQDIKMILK

SEQ ID NO: 71168 - protein, 8 aa, Homo sapiens
  misc_feature: Table A; Target 71168; HLA-B*08:01; PRAME; ENSG00000185686; TAA
MQDIKMIL

SEQ ID NO: 71169 - protein, 8 aa, Homo sapiens
  misc_feature: Table A; Target 71169; HLA-C*04:01; PRAME; ENSG00000185686; TAA
MQDIKMIL

SEQ ID NO: 71170 - protein, 9 aa, Homo sapiens
  misc_feature: Table A; Target 71170; HLA-A*03:01; PRAME; ENSG00000185686; TAA
MQDIKMILK

SEQ ID NO: 71171 - protein, 9 aa, Homo sapiens
  misc_feature: Table A; Target 71171; HLA-A*02:01; PRAME; ENSG00000185686; TAA
NLTHVLYPV

SEQ ID NO: 71172 - protein, 9 aa, Homo sapiens
  misc_feature: Table A; Target 71172; HLA-A*02:04; PRAME; ENSG00000185686; TAA
NLTHVLYPV

SEQ ID NO: 71173 - protein, 9 aa, Homo sapiens
  misc_feature: Table A; Target 71173; HLA-A*02:07; PRAME; ENSG00000185686; TAA
NLTHVLYPV

SEQ ID NO: 71174 - protein, 9 aa, Homo sapiens
  misc_feature: Table A; Target 71174; HLA-A*68:02; PRAME; ENSG00000185686; TAA
NLTHVLYPV

SEQ ID NO: 71175 - protein, 8 aa, Homo sapiens
  misc_feature: Table A; Target 71175; HLA-B*35:01; PRAME; ENSG00000185686; TAA
NPLETLSI

SEQ ID NO: 71176 - protein, 8 aa, Homo sapiens
  misc_feature: Table A; Target 71176; HLA-B*35:03; PRAME; ENSG00000185686; TAA
NPLETLSI

SEQ ID NO: 71177 - protein, 8 aa, Homo sapiens
  misc_feature: Table A; Target 71177; HLA-B*51:01; PRAME; ENSG00000185686; TAA
NPLETLSI

SEQ ID NO: 71178 - protein, 9 aa, Homo sapiens
  misc_feature: Table A; Target 71178; HLA-B*35:03; PRAME; ENSG00000185686; TAA
NPLETLSIT

SEQ ID NO: 71179 - protein, 10 aa, Homo sapiens
  misc_feature: Table A; Target 71179; HLA-B*57:01; PRAME; ENSG00000185686; TAA
NSHQDFWTVW

SEQ ID NO: 71180 - protein, 8 aa, Homo sapiens
  misc_feature: Table A; Target 71180; HLA-B*08:01; PRAME; ENSG00000185686; TAA
NSISISAL

SEQ ID NO: 71181 - protein, 8 aa, Homo sapiens
  misc_feature: Table A; Target 71181; HLA-B*18:01; PRAME; ENSG00000185686; TAA
NSISISAL

SEQ ID NO: 71182 - protein, 8 aa, Homo sapiens
  misc_feature: Table A; Target 71182; HLA-B*40:02; PRAME; ENSG00000185686; TAA
NSISISAL

SEQ ID NO: 71183 - protein, 8 aa, Homo sapiens
  misc_feature: Table A; Target 71183; HLA-B*46:01; PRAME; ENSG00000185686; TAA
NSISISAL

SEQ ID NO: 71184 - protein, 8 aa, Homo sapiens
  misc_feature: Table A; Target 71184; HLA-C*01:02; PRAME; ENSG00000185686; TAA
NSISISAL

SEQ ID NO: 71185 - protein, 8 aa, Homo sapiens
  misc_feature: Table A; Target 71185; HLA-C*03:03; PRAME; ENSG00000185686; TAA
NSISISAL

SEQ ID NO: 71186 - protein, 8 aa, Homo sapiens
  misc_feature: Table A; Target 71186; HLA-C*03:04; PRAME; ENSG00000185686; TAA
NSISISAL

SEQ ID NO: 71187 - protein, 8 aa, Homo sapiens
  misc_feature: Table A; Target 71187; HLA-C*05:01; PRAME; ENSG00000185686; TAA
NSISISAL

SEQ ID NO: 71188 - protein, 8 aa, Homo sapiens
  misc_feature: Table A; Target 71188; HLA-C*12:03; PRAME; ENSG00000185686; TAA
NSISISAL

SEQ ID NO: 71189 - protein, 8 aa, Homo sapiens
  misc_feature: Table A; Target 71189; HLA-C*14:02; PRAME; ENSG00000185686; TAA
NSISISAL

SEQ ID NO: 71190 - protein, 11 aa, Homo sapiens
  misc_feature: Table A; Target 71190; HLA-A*23:01; PRAME; ENSG00000185686; TAA
NSISISALQSL

SEQ ID NO: 71191 - protein, 11 aa, Homo sapiens
  misc_feature: Table A; Target 71191; HLA-A*68:02; PRAME; ENSG00000185686; TAA
NSISISALQSL

SEQ ID NO: 71192 - protein, 11 aa, Homo sapiens
  misc_feature: Table A; Target 71192; HLA-C*01:02; PRAME; ENSG00000185686; TAA
NSISISALQSL

SEQ ID NO: 71193 - protein, 9 aa, Homo sapiens
  misc_feature: Table A; Target 71193; HLA-A*11:01; PRAME; ENSG00000185686; TAA
PEAAQPMTK

SEQ ID NO: 71194 - protein, 9 aa, Homo sapiens
  misc_feature: Table A; Target 71194; HLA-B*07:02; PRAME; ENSG00000185686; TAA
PEAAQPMTK

SEQ ID NO: 71195 - protein, 9 aa, Homo sapiens
  misc_feature: Table A; Target 71195; HLA-B*27:02; PRAME; ENSG00000185686; TAA
PEAAQPMTK

SEQ ID NO: 71196 - protein, 9 aa, Homo sapiens
  misc_feature: Table A; Target 71196; HLA-C*01:02; PRAME; ENSG00000185686; TAA
PEPEAAQPM

SEQ ID NO: 71197 - protein, 11 aa, Homo sapiens
  misc_feature: Table A; Target 71197; HLA-B*27:02; PRAME; ENSG00000185686; TAA
PEPEAAQPMTK

SEQ ID NO: 71198 - protein, 11 aa, Homo sapiens
  misc_feature: Table A; Target 71198; HLA-C*07:02; PRAME; ENSG00000185686; TAA
PEPEAAQPMTK

SEQ ID NO: 71199 - protein, 9 aa, Homo sapiens
  misc_feature: Table A; Target 71199; HLA-A*23:01; PRAME; ENSG00000185686; TAA
PFIPVEVLV

SEQ ID NO: 71200 - protein, 9 aa, Homo sapiens
  misc_feature: Table A; Target 71200; HLA-A*24:02; PRAME; ENSG00000185686; TAA
PFIPVEVLV

SEQ ID NO: 71201 - protein, 9 aa, Homo sapiens
  misc_feature: Table A; Target 71201; HLA-A*24:02; PRAME; ENSG00000185686; TAA
PMQDIKMIL

SEQ ID NO: 71202 - protein, 10 aa, Homo sapiens
  misc_feature: Table A; Target 71202; HLA-A*03:02; PRAME; ENSG00000185686; TAA
PMQDIKMILK

SEQ ID NO: 71203 - protein, 9 aa, Homo sapiens
  misc_feature: Table A; Target 71203; HLA-C*07:01; PRAME; ENSG00000185686; TAA
PSVSQLSVL

SEQ ID NO: 71204 - protein, 9 aa, Homo sapiens
  misc_feature: Table A; Target 71204; HLA-C*07:02; PRAME; ENSG00000185686; TAA
PSVSQLSVL

SEQ ID NO: 71205 - protein, 11 aa, Homo sapiens
  misc_feature: Table A; Target 71205; HLA-B*07:02; PRAME; ENSG00000185686; TAA
PSVSQLSVLSL

SEQ ID NO: 71206 - protein, 9 aa, Homo sapiens
  misc_feature: Table A; Target 71206; HLA-A*01:01; PRAME; ENSG00000185686; TAA
PTLAKFSPY

SEQ ID NO: 71207 - protein, 9 aa, Homo sapiens
  misc_feature: Table A; Target 71207; HLA-A*29:02; PRAME; ENSG00000185686; TAA
PTLAKFSPY

SEQ ID NO: 71208 - protein, 9 aa, Homo sapiens
  misc_feature: Table A; Target 71208; HLA-A*23:01; PRAME; ENSG00000185686; TAA
PYLGQMINL

SEQ ID NO: 71209 - protein, 9 aa, Homo sapiens
  misc_feature: Table A; Target 71209; HLA-A*24:02; PRAME; ENSG00000185686; TAA
PYLGQMINL

SEQ ID NO: 71210 - protein, 9 aa, Homo sapiens
  misc_feature: Table A; Target 71210; HLA-C*07:02; PRAME; ENSG00000185686; TAA
PYLGQMINL

SEQ ID NO: 71211 - protein, 9 aa, Homo sapiens
  misc_feature: Table A; Target 71211; HLA-B*08:01; PRAME; ENSG00000185686; TAA
QALLERASA

SEQ ID NO: 71212 - protein, 9 aa, Homo sapiens
  misc_feature: Table A; Target 71212; HLA-B*54:01; PRAME; ENSG00000185686; TAA
QALLERASA

SEQ ID NO: 71213 - protein, 9 aa, Homo sapiens
  misc_feature: Table A; Target 71213; HLA-B*56:01; PRAME; ENSG00000185686; TAA
QALLERASA

SEQ ID NO: 71214 - protein, 11 aa, Homo sapiens
  misc_feature: Table A; Target 71214; HLA-B*07:02; PRAME; ENSG00000185686; TAA
QALLERASATL

SEQ ID NO: 71215 - protein, 11 aa, Homo sapiens
  misc_feature: Table A; Target 71215; HLA-B*35:03; PRAME; ENSG00000185686; TAA
QALLERASATL

SEQ ID NO: 71216 - protein, 9 aa, Homo sapiens
  misc_feature: Table A; Target 71216; HLA-A*23:01; PRAME; ENSG00000185686; TAA
QALYVDSLF

SEQ ID NO: 71217 - protein, 9 aa, Homo sapiens
  misc_feature: Table A; Target 71217; HLA-B*35:01; PRAME; ENSG00000185686; TAA
QALYVDSLF

SEQ ID NO: 71218 - protein, 9 aa, Homo sapiens
  misc_feature: Table A; Target 71218; HLA-B*35:03; PRAME; ENSG00000185686; TAA
QALYVDSLF

SEQ ID NO: 71219 - protein, 9 aa, Homo sapiens
  misc_feature: Table A; Target 71219; HLA-B*57:01; PRAME; ENSG00000185686; TAA
QALYVDSLF

SEQ ID NO: 71220 - protein, 9 aa, Homo sapiens
  misc_feature: Table A; Target 71220; HLA-C*04:01; PRAME; ENSG00000185686; TAA
QALYVDSLF

SEQ ID NO: 71221 - protein, 9 aa, Homo sapiens
  misc_feature: Table A; Target 71221; HLA-B*37:01; PRAME; ENSG00000185686; TAA
QDIKMILKM

SEQ ID NO: 71222 - protein, 9 aa, Homo sapiens
  misc_feature: Table A; Target 71222; HLA-A*23:01; PRAME; ENSG00000185686; TAA
QFTSQFLSL

SEQ ID NO: 71223 - protein, 9 aa, Homo sapiens
  misc_feature: Table A; Target 71223; HLA-A*24:02; PRAME; ENSG00000185686; TAA
QFTSQFLSL

SEQ ID NO: 71224 - protein, 9 aa, Homo sapiens
  misc_feature: Table A; Target 71224; HLA-C*01:02; PRAME; ENSG00000185686; TAA
QFTSQFLSL

SEQ ID NO: 71225 - protein, 9 aa, Homo sapiens
  misc_feature: Table A; Target 71225; HLA-C*14:02; PRAME; ENSG00000185686; TAA
QFTSQFLSL

SEQ ID NO: 71226 - protein, 9 aa, Homo sapiens
  misc_feature: Table A; Target 71226; HLA-B*38:01; PRAME; ENSG00000185686; TAA
QHLIGLSNL

SEQ ID NO: 71227 - protein, 9 aa, Homo sapiens
  misc_feature: Table A; Target 71227; HLA-B*39:01; PRAME; ENSG00000185686; TAA
QHLIGLSNL

SEQ ID NO: 71228 - protein, 10 aa, Homo sapiens
  misc_feature: Table A; Target 71228; HLA-C*07:01; PRAME; ENSG00000185686; TAA
QHLIGLSNLT

SEQ ID NO: 71229 - protein, 8 aa, Homo sapiens
  misc_feature: Table A; Target 71229; HLA-C*05:01; PRAME; ENSG00000185686; TAA
QLDSIEDL

SEQ ID NO: 71230 - protein, 10 aa, Homo sapiens
  misc_feature: Table A; Target 71230; HLA-A*01:01; PRAME; ENSG00000185686; TAA
QLDSIEDLEV

SEQ ID NO: 71231 - protein, 10 aa, Homo sapiens
  misc_feature: Table A; Target 71231; HLA-A*02:01; PRAME; ENSG00000185686; TAA
QLDSIEDLEV

SEQ ID NO: 71232 - protein, 10 aa, Homo sapiens
  misc_feature: Table A; Target 71232; HLA-A*02:07; PRAME; ENSG00000185686; TAA
QLDSIEDLEV

SEQ ID NO: 71233 - protein, 9 aa, Homo sapiens
  misc_feature: Table A; Target 71233; HLA-A*02:01; PRAME; ENSG00000185686; TAA
QLLALLPSL

SEQ ID NO: 71234 - protein, 9 aa, Homo sapiens
  misc_feature: Table A; Target 71234; HLA-A*02:03; PRAME; ENSG00000185686; TAA
QLLALLPSL

SEQ ID NO: 71235 - protein, 9 aa, Homo sapiens
  misc_feature: Table A; Target 71235; HLA-A*02:04; PRAME; ENSG00000185686; TAA
QLLALLPSL

SEQ ID NO: 71236 - protein, 9 aa, Homo sapiens
  misc_feature: Table A; Target 71236; HLA-A*02:07; PRAME; ENSG00000185686; TAA
QLLALLPSL

SEQ ID NO: 71237 - protein, 9 aa, Homo sapiens
  misc_feature: Table A; Target 71237; HLA-A*23:01; PRAME; ENSG00000185686; TAA
QLLALLPSL

SEQ ID NO: 71238 - protein, 9 aa, Homo sapiens
  misc_feature: Table A; Target 71238; HLA-A*24:02; PRAME; ENSG00000185686; TAA
QLLALLPSL

SEQ ID NO: 71239 - protein, 9 aa, Homo sapiens
  misc_feature: Table A; Target 71239; HLA-B*40:02; PRAME; ENSG00000185686; TAA
QLLALLPSL

SEQ ID NO: 71240 - protein, 9 aa, Homo sapiens
  misc_feature: Table A; Target 71240; HLA-B*55:01; PRAME; ENSG00000185686; TAA
QLLALLPSL

SEQ ID NO: 71241 - protein, 10 aa, Homo sapiens
  misc_feature: Table A; Target 71241; HLA-A*02:03; PRAME; ENSG00000185686; TAA
QLSVLSLSGV

SEQ ID NO: 71242 - protein, 8 aa, Homo sapiens
  misc_feature: Table A; Target 71242; HLA-A*01:01; PRAME; ENSG00000185686; TAA
QLTTLSFY

SEQ ID NO: 71243 - protein, 8 aa, Homo sapiens
  misc_feature: Table A; Target 71243; HLA-C*07:01; PRAME; ENSG00000185686; TAA
QLTTLSFY

SEQ ID NO: 71244 - protein, 8 aa, Homo sapiens
  misc_feature: Table A; Target 71244; HLA-B*08:01; PRAME; ENSG00000185686; TAA
QPFIPVEV

SEQ ID NO: 71245 - protein, 8 aa, Homo sapiens
  misc_feature: Table A; Target 71245; HLA-B*51:01; PRAME; ENSG00000185686; TAA
QPFIPVEV

SEQ ID NO: 71246 - protein, 8 aa, Homo sapiens
  misc_feature: Table A; Target 71246; HLA-B*54:01; PRAME; ENSG00000185686; TAA
QPFIPVEV

SEQ ID NO: 71247 - protein, 8 aa, Homo sapiens
  misc_feature: Table A; Target 71247; HLA-B*56:01; PRAME; ENSG00000185686; TAA
QPFIPVEV

SEQ ID NO: 71248 - protein, 9 aa, Homo sapiens
  misc_feature: Table A; Target 71248; HLA-B*07:02; PRAME; ENSG00000185686; TAA
QPFIPVEVL

SEQ ID NO: 71249 - protein, 9 aa, Homo sapiens
  misc_feature: Table A; Target 71249; HLA-B*35:01; PRAME; ENSG00000185686; TAA
QPFIPVEVL

SEQ ID NO: 71250 - protein, 9 aa, Homo sapiens
  misc_feature: Table A; Target 71250; HLA-B*35:03; PRAME; ENSG00000185686; TAA
QPFIPVEVL

SEQ ID NO: 71251 - protein, 9 aa, Homo sapiens
  misc_feature: Table A; Target 71251; HLA-B*51:01; PRAME; ENSG00000185686; TAA
QPFIPVEVL

SEQ ID NO: 71252 - protein, 9 aa, Homo sapiens
  misc_feature: Table A; Target 71252; HLA-B*54:01; PRAME; ENSG00000185686; TAA
QPFIPVEVL

SEQ ID NO: 71253 - protein, 9 aa, Homo sapiens
  misc_feature: Table A; Target 71253; HLA-B*56:01; PRAME; ENSG00000185686; TAA
QPFIPVEVL

SEQ ID NO: 71254 - protein, 9 aa, Homo sapiens
  misc_feature: Table A; Target 71254; HLA-C*07:02; PRAME; ENSG00000185686; TAA
QPFIPVEVL

SEQ ID NO: 71255 - protein, 10 aa, Homo sapiens
  misc_feature: Table A; Target 71255; HLA-B*54:01; PRAME; ENSG00000185686; TAA
QPFIPVEVLV

SEQ ID NO: 71256 - protein, 9 aa, Homo sapiens
  misc_feature: Table A; Target 71256; HLA-B*08:01; PRAME; ENSG00000185686; TAA
QPMTKKRKV

SEQ ID NO: 71257 - protein, 9 aa, Homo sapiens
  misc_feature: Table A; Target 71257; HLA-B*08:01; PRAME; ENSG00000185686; TAA
QSLLKDEAL

SEQ ID NO: 71258 - protein, 9 aa, Homo sapiens
  misc_feature: Table A; Target 71258; HLA-B*35:03; PRAME; ENSG00000185686; TAA
QSLLKDEAL

SEQ ID NO: 71259 - protein, 9 aa, Homo sapiens
  misc_feature: Table A; Target 71259; HLA-B*40:02; PRAME; ENSG00000185686; TAA
QSLLKDEAL

SEQ ID NO: 71260 - protein, 9 aa, Homo sapiens
  misc_feature: Table A; Target 71260; HLA-C*01:02; PRAME; ENSG00000185686; TAA
QSLLKDEAL

SEQ ID NO: 71261 - protein, 9 aa, Homo sapiens
  misc_feature: Table A; Target 71261; HLA-C*07:01; PRAME; ENSG00000185686; TAA
QSLLKDEAL

SEQ ID NO: 71262 - protein, 8 aa, Homo sapiens
  misc_feature: Table A; Target 71262; HLA-B*51:01; PRAME; ENSG00000185686; TAA
QSPSVSQL

SEQ ID NO: 71263 - protein, 8 aa, Homo sapiens
  misc_feature: Table A; Target 71263; HLA-C*01:02; PRAME; ENSG00000185686; TAA
QSPSVSQL

SEQ ID NO: 71264 - protein, 11 aa, Homo sapiens
  misc_feature: Table A; Target 71264; HLA-C*07:02; PRAME; ENSG00000185686; TAA
QSPSVSQLSVL

SEQ ID NO: 71265 - protein, 10 aa, Homo sapiens
  misc_feature: Table A; Target 71265; HLA-B*57:01; PRAME; ENSG00000185686; TAA
QSRYISMSVW

SEQ ID NO: 71266 - protein, 8 aa, Homo sapiens
  misc_feature: Table A; Target 71266; HLA-C*06:02; PRAME; ENSG00000185686; TAA
QTLKAMVQ

SEQ ID NO: 71267 - protein, 8 aa, Homo sapiens
  misc_feature: Table A; Target 71267; HLA-C*07:01; PRAME; ENSG00000185686; TAA
QTLKAMVQ

SEQ ID NO: 71268 - protein, 10 aa, Homo sapiens
  misc_feature: Table A; Target 71268; HLA-A*25:01; PRAME; ENSG00000185686; TAA
QTLKAMVQAW

SEQ ID NO: 71269 - protein, 10 aa, Homo sapiens
  misc_feature: Table A; Target 71269; HLA-B*44:02; PRAME; ENSG00000185686; TAA
QTLKAMVQAW

SEQ ID NO: 71270 - protein, 10 aa, Homo sapiens
  misc_feature: Table A; Target 71270; HLA-B*44:03; PRAME; ENSG00000185686; TAA
QTLKAMVQAW

SEQ ID NO: 71271 - protein, 10 aa, Homo sapiens
  misc_feature: Table A; Target 71271; HLA-B*57:01; PRAME; ENSG00000185686; TAA
QTLKAMVQAW

SEQ ID NO: 71272 - protein, 10 aa, Homo sapiens
  misc_feature: Table A; Target 71272; HLA-B*58:01; PRAME; ENSG00000185686; TAA
QTLKAMVQAW

SEQ ID NO: 71273 - protein, 9 aa, Homo sapiens
  misc_feature: Table A; Target 71273; HLA-A*23:01; PRAME; ENSG00000185686; TAA
QYIAQFTSQ

SEQ ID NO: 71274 - protein, 9 aa, Homo sapiens
  misc_feature: Table A; Target 71274; HLA-A*24:02; PRAME; ENSG00000185686; TAA
QYIAQFTSQ

SEQ ID NO: 71275 - protein, 9 aa, Homo sapiens
  misc_feature: Table A; Target 71275; HLA-A*31:01; PRAME; ENSG00000185686; TAA
QYIAQFTSQ

SEQ ID NO: 71276 - protein, 9 aa, Homo sapiens
  misc_feature: Table A; Target 71276; HLA-C*14:02; PRAME; ENSG00000185686; TAA
QYIAQFTSQ

SEQ ID NO: 71277 - protein, 10 aa, Homo sapiens
  misc_feature: Table A; Target 71277; HLA-A*23:01; PRAME; ENSG00000185686; TAA
QYIAQFTSQF

SEQ ID NO: 71278 - protein, 10 aa, Homo sapiens
  misc_feature: Table A; Target 71278; HLA-A*24:02; PRAME; ENSG00000185686; TAA
QYIAQFTSQF

SEQ ID NO: 71279 - protein, 10 aa, Homo sapiens
  misc_feature: Table A; Target 71279; HLA-C*14:02; PRAME; ENSG00000185686; TAA
QYIAQFTSQF

SEQ ID NO: 71280 - protein, 11 aa, Homo sapiens
  misc_feature: Table A; Target 71280; HLA-A*24:02; PRAME; ENSG00000185686; TAA
QYIAQFTSQFL

SEQ ID NO: 71281 - protein, 9 aa, Homo sapiens
  misc_feature: Table A; Target 71281; HLA-B*44:02; PRAME; ENSG00000185686; TAA
RELFPPLFM

SEQ ID NO: 71282 - protein, 9 aa, Homo sapiens
  misc_feature: Table A; Target 71282; HLA-B*44:03; PRAME; ENSG00000185686; TAA
RELFPPLFM

SEQ ID NO: 71283 - protein, 10 aa, Homo sapiens
  misc_feature: Table A; Target 71283; HLA-B*38:01; PRAME; ENSG00000185686; TAA
RHVMNPLETL

SEQ ID NO: 71284 - protein, 10 aa, Homo sapiens
  misc_feature: Table A; Target 71284; HLA-B*39:01; PRAME; ENSG00000185686; TAA
RHVMNPLETL

SEQ ID NO: 71285 - protein, 9 aa, Homo sapiens
  misc_feature: Table A; Target 71285; HLA-A*02:04; PRAME; ENSG00000185686; TAA
RLAYLHARL

SEQ ID NO: 71286 - protein, 9 aa, Homo sapiens
  misc_feature: Table A; Target 71286; HLA-A*02:01; PRAME; ENSG00000185686; TAA
RLDQLLRHV

SEQ ID NO: 71287 - protein, 9 aa, Homo sapiens
  misc_feature: Table A; Target 71287; HLA-A*02:03; PRAME; ENSG00000185686; TAA
RLDQLLRHV

SEQ ID NO: 71288 - protein, 9 aa, Homo sapiens
  misc_feature: Table A; Target 71288; HLA-A*02:04; PRAME; ENSG00000185686; TAA
RLDQLLRHV

SEQ ID NO: 71289 - protein, 9 aa, Homo sapiens
  misc_feature: Table A; Target 71289; HLA-A*02:07; PRAME; ENSG00000185686; TAA
RLDQLLRHV

SEQ ID NO: 71290 - protein, 9 aa, Homo sapiens
  misc_feature: Table A; Target 71290; HLA-A*03:01; PRAME; ENSG00000185686; TAA
RLDQLLRHV

SEQ ID NO: 71291 - protein, 10 aa, Homo sapiens
  misc_feature: Table A; Target 71291; HLA-A*02:07; PRAME; ENSG00000185686; TAA
RLDQLLRHVM

SEQ ID NO: 71292 - protein, 9 aa, Homo sapiens
  misc_feature: Table A; Target 71292; HLA-A*02:04; PRAME; ENSG00000185686; TAA
RLLLSHIHA

SEQ ID NO: 71293 - protein, 9 aa, Homo sapiens
  misc_feature: Table A; Target 71293; HLA-A*02:03; PRAME; ENSG00000185686; TAA
RLRELLCEL

SEQ ID NO: 71294 - protein, 9 aa, Homo sapiens
  misc_feature: Table A; Target 71294; HLA-A*02:04; PRAME; ENSG00000185686; TAA
RLRELLCEL

SEQ ID NO: 71295 - protein, 8 aa, Homo sapiens
  misc_feature: Table A; Target 71295; HLA-C*05:01; PRAME; ENSG00000185686; TAA
RLSEGDVM

SEQ ID NO: 71296 - protein, 10 aa, Homo sapiens
  misc_feature: Table A; Target 71296; HLA-A*02:01; PRAME; ENSG00000185686; TAA
RLSEGDVMHL

SEQ ID NO: 71297 - protein, 10 aa, Homo sapiens
  misc_feature: Table A; Target 71297; HLA-A*02:03; PRAME; ENSG00000185686; TAA
RLSEGDVMHL

SEQ ID NO: 71298 - protein, 10 aa, Homo sapiens
  misc_feature: Table A; Target 71298; HLA-A*02:04; PRAME; ENSG00000185686; TAA
RLSEGDVMHL

SEQ ID NO: 71299 - protein, 10 aa, Homo sapiens
  misc_feature: Table A; Target 71299; HLA-A*02:07; PRAME; ENSG00000185686; TAA
RLSEGDVMHL

SEQ ID NO: 71300 - protein, 10 aa, Homo sapiens
  misc_feature: Table A; Target 71300; HLA-A*03:01; PRAME; ENSG00000185686; TAA
RLSEGDVMHL

SEQ ID NO: 71301 - protein, 10 aa, Homo sapiens
  misc_feature: Table A; Target 71301; HLA-B*55:01; PRAME; ENSG00000185686; TAA
RLSEGDVMHL

SEQ ID NO: 71302 - protein, 10 aa, Homo sapiens
  misc_feature: Table A; Target 71302; HLA-A*02:01; PRAME; ENSG00000185686; TAA
RLVELAGQSL

SEQ ID NO: 71303 - protein, 10 aa, Homo sapiens
  misc_feature: Table A; Target 71303; HLA-A*02:03; PRAME; ENSG00000185686; TAA
RLVELAGQSL

SEQ ID NO: 71304 - protein, 10 aa, Homo sapiens
  misc_feature: Table A; Target 71304; HLA-A*02:04; PRAME; ENSG00000185686; TAA
RLVELAGQSL

SEQ ID NO: 71305 - protein, 10 aa, Homo sapiens
  misc_feature: Table A; Target 71305; HLA-A*02:07; PRAME; ENSG00000185686; TAA
RLVELAGQSL

SEQ ID NO: 71306 - protein, 10 aa, Homo sapiens
  misc_feature: Table A; Target 71306; HLA-A*23:01; PRAME; ENSG00000185686; TAA
RLVELAGQSL

SEQ ID NO: 71307 - protein, 10 aa, Homo sapiens
  misc_feature: Table A; Target 71307; HLA-A*30:01; PRAME; ENSG00000185686; TAA
RLVELAGQSL

SEQ ID NO: 71308 - protein, 10 aa, Homo sapiens
  misc_feature: Table A; Target 71308; HLA-A*32:01; PRAME; ENSG00000185686; TAA
RLVELAGQSL

SEQ ID NO: 71309 - protein, 10 aa, Homo sapiens
  misc_feature: Table A; Target 71309; HLA-B*07:02; PRAME; ENSG00000185686; TAA
RLVELAGQSL

SEQ ID NO: 71310 - protein, 10 aa, Homo sapiens
  misc_feature: Table A; Target 71310; HLA-B*15:01; PRAME; ENSG00000185686; TAA
RLVELAGQSL

SEQ ID NO: 71311 - protein, 10 aa, Homo sapiens
  misc_feature: Table A; Target 71311; HLA-B*15:03; PRAME; ENSG00000185686; TAA
RLVELAGQSL

SEQ ID NO: 71312 - protein, 10 aa, Homo sapiens
  misc_feature: Table A; Target 71312; HLA-B*40:01; PRAME; ENSG00000185686; TAA
RLVELAGQSL

SEQ ID NO: 71313 - protein, 10 aa, Homo sapiens
  misc_feature: Table A; Target 71313; HLA-B*40:02; PRAME; ENSG00000185686; TAA
RLVELAGQSL

SEQ ID NO: 71314 - protein, 10 aa, Homo sapiens
  misc_feature: Table A; Target 71314; HLA-B*55:01; PRAME; ENSG00000185686; TAA
RLVELAGQSL

SEQ ID NO: 71315 - protein, 10 aa, Homo sapiens
  misc_feature: Table A; Target 71315; HLA-B*58:01; PRAME; ENSG00000185686; TAA
RLVELAGQSL

SEQ ID NO: 71316 - protein, 10 aa, Homo sapiens
  misc_feature: Table A; Target 71316; HLA-C*01:02; PRAME; ENSG00000185686; TAA
RLVELAGQSL

SEQ ID NO: 71317 - protein, 10 aa, Homo sapiens
  misc_feature: Table A; Target 71317; HLA-C*14:02; PRAME; ENSG00000185686; TAA
RLVELAGQSL

SEQ ID NO: 71318 - protein, 11 aa, Homo sapiens
  misc_feature: Table A; Target 71318; HLA-A*02:01; PRAME; ENSG00000185686; TAA
RLVELAGQSLL

SEQ ID NO: 71319 - protein, 11 aa, Homo sapiens
  misc_feature: Table A; Target 71319; HLA-A*02:03; PRAME; ENSG00000185686; TAA
RLVELAGQSLL

SEQ ID NO: 71320 - protein, 11 aa, Homo sapiens
  misc_feature: Table A; Target 71320; HLA-A*02:04; PRAME; ENSG00000185686; TAA
RLVELAGQSLL

SEQ ID NO: 71321 - protein, 11 aa, Homo sapiens
  misc_feature: Table A; Target 71321; HLA-A*02:07; PRAME; ENSG00000185686; TAA
RLVELAGQSLL

SEQ ID NO: 71322 - protein, 9 aa, Homo sapiens
  misc_feature: Table A; Target 71322; HLA-A*02:04; PRAME; ENSG00000185686; TAA
RLWGSIQSR

SEQ ID NO: 71323 - protein, 9 aa, Homo sapiens
  misc_feature: Table A; Target 71323; HLA-A*03:01; PRAME; ENSG00000185686; TAA
RLWGSIQSR

SEQ ID NO: 71324 - protein, 9 aa, Homo sapiens
  misc_feature: Table A; Target 71324; HLA-A*03:02; PRAME; ENSG00000185686; TAA
RLWGSIQSR

SEQ ID NO: 71325 - protein, 9 aa, Homo sapiens
  misc_feature: Table A; Target 71325; HLA-A*31:01; PRAME; ENSG00000185686; TAA
RLWGSIQSR

SEQ ID NO: 71326 - protein, 9 aa, Homo sapiens
  misc_feature: Table A; Target 71326; HLA-A*33:01; PRAME; ENSG00000185686; TAA
RLWGSIQSR

SEQ ID NO: 71327 - protein, 10 aa, Homo sapiens
  misc_feature: Table A; Target 71327; HLA-A*03:01; PRAME; ENSG00000185686; TAA
RLWGSIQSRY

SEQ ID NO: 71328 - protein, 10 aa, Homo sapiens
  misc_feature: Table A; Target 71328; HLA-A*29:02; PRAME; ENSG00000185686; TAA
RLWGSIQSRY

SEQ ID NO: 71329 - protein, 10 aa, Homo sapiens
  misc_feature: Table A; Target 71329; HLA-A*30:02; PRAME; ENSG00000185686; TAA
RLWGSIQSRY

SEQ ID NO: 71330 - protein, 10 aa, Homo sapiens
  misc_feature: Table A; Target 71330; HLA-B*57:01; PRAME; ENSG00000185686; TAA
RLWGSIQSRY

SEQ ID NO: 71331 - protein, 11 aa, Homo sapiens
  misc_feature: Table A; Target 71331; HLA-A*02:01; PRAME; ENSG00000185686; TAA
RLWGSIQSRYI

SEQ ID NO: 71332 - protein, 11 aa, Homo sapiens
  misc_feature: Table A; Target 71332; HLA-A*02:04; PRAME; ENSG00000185686; TAA
RLWGSIQSRYI

SEQ ID NO: 71333 - protein, 9 aa, Homo sapiens
  misc_feature: Table A; Target 71333; HLA-B*54:01; PRAME; ENSG00000185686; TAA
RPSMVWLSA

SEQ ID NO: 71334 - protein, 9 aa, Homo sapiens
  misc_feature: Table A; Target 71334; HLA-B*56:01; PRAME; ENSG00000185686; TAA
RPSMVWLSA

SEQ ID NO: 71335 - protein, 10 aa, Homo sapiens
  misc_feature: Table A; Target 71335; HLA-B*57:01; PRAME; ENSG00000185686; TAA
RTFYDPEPIL

SEQ ID NO: 71336 - protein, 9 aa, Homo sapiens
  misc_feature: Table A; Target 71336; HLA-A*03:01; PRAME; ENSG00000185686; TAA
SALQSLLQH

SEQ ID NO: 71337 - protein, 9 aa, Homo sapiens
  misc_feature: Table A; Target 71337; HLA-A*11:01; PRAME; ENSG00000185686; TAA
SALQSLLQH

SEQ ID NO: 71338 - protein, 9 aa, Homo sapiens
  misc_feature: Table A; Target 71338; HLA-B*15:03; PRAME; ENSG00000185686; TAA
SATLQDLVF

SEQ ID NO: 71339 - protein, 9 aa, Homo sapiens
  misc_feature: Table A; Target 71339; HLA-B*35:01; PRAME; ENSG00000185686; TAA
SATLQDLVF

SEQ ID NO: 71340 - protein, 9 aa, Homo sapiens
  misc_feature: Table A; Target 71340; HLA-B*35:03; PRAME; ENSG00000185686; TAA
SATLQDLVF

SEQ ID NO: 71341 - protein, 9 aa, Homo sapiens
  misc_feature: Table A; Target 71341; HLA-B*38:01; PRAME; ENSG00000185686; TAA
SATLQDLVF

SEQ ID NO: 71342 - protein, 9 aa, Homo sapiens
  misc_feature: Table A; Target 71342; HLA-B*39:01; PRAME; ENSG00000185686; TAA
SATLQDLVF

SEQ ID NO: 71343 - protein, 9 aa, Homo sapiens
  misc_feature: Table A; Target 71343; HLA-B*55:01; PRAME; ENSG00000185686; TAA
SATLQDLVF

SEQ ID NO: 71344 - protein, 9 aa, Homo sapiens
  misc_feature: Table A; Target 71344; HLA-B*58:01; PRAME; ENSG00000185686; TAA
SATLQDLVF

SEQ ID NO: 71345 - protein, 9 aa, Homo sapiens
  misc_feature: Table A; Target 71345; HLA-C*02:02; PRAME; ENSG00000185686; TAA
SATLQDLVF

SEQ ID NO: 71346 - protein, 9 aa, Homo sapiens
  misc_feature: Table A; Target 71346; HLA-C*03:03; PRAME; ENSG00000185686; TAA
SATLQDLVF

SEQ ID NO: 71347 - protein, 9 aa, Homo sapiens
  misc_feature: Table A; Target 71347; HLA-C*03:04; PRAME; ENSG00000185686; TAA
SATLQDLVF

SEQ ID NO: 71348 - protein, 9 aa, Homo sapiens
  misc_feature: Table A; Target 71348; HLA-C*07:04; PRAME; ENSG00000185686; TAA
SATLQDLVF

SEQ ID NO: 71349 - protein, 9 aa, Homo sapiens
  misc_feature: Table A; Target 71349; HLA-C*16:01; PRAME; ENSG00000185686; TAA
SATLQDLVF

SEQ ID NO: 71350 - protein, 9 aa, Homo sapiens
  misc_feature: Table A; Target 71350; HLA-C*16:02; PRAME; ENSG00000185686; TAA
SATLQDLVF

SEQ ID NO: 71351 - protein, 9 aa, Homo sapiens
  misc_feature: Table A; Target 71351; HLA-C*16:04; PRAME; ENSG00000185686; TAA
SATLQDLVF

SEQ ID NO: 71352 - protein, 8 aa, Homo sapiens
  misc_feature: Table A; Target 71352; HLA-A*30:01; PRAME; ENSG00000185686; TAA
SEGDVMHL

SEQ ID NO: 71353 - protein, 8 aa, Homo sapiens
  misc_feature: Table A; Target 71353; HLA-B*18:01; PRAME; ENSG00000185686; TAA
SEGDVMHL

SEQ ID NO: 71354 - protein, 8 aa, Homo sapiens
  misc_feature: Table A; Target 71354; HLA-B*27:05; PRAME; ENSG00000185686; TAA
SEGDVMHL

SEQ ID NO: 71355 - protein, 8 aa, Homo sapiens
  misc_feature: Table A; Target 71355; HLA-B*37:01; PRAME; ENSG00000185686; TAA
SEGDVMHL

SEQ ID NO: 71356 - protein, 8 aa, Homo sapiens
  misc_feature: Table A; Target 71356; HLA-B*38:01; PRAME; ENSG00000185686; TAA
SEGDVMHL

SEQ ID NO: 71357 - protein, 8 aa, Homo sapiens
  misc_feature: Table A; Target 71357; HLA-B*40:01; PRAME; ENSG00000185686; TAA
SEGDVMHL

SEQ ID NO: 71358 - protein, 8 aa, Homo sapiens
  misc_feature: Table A; Target 71358; HLA-B*40:02; PRAME; ENSG00000185686; TAA
SEGDVMHL

SEQ ID NO: 71359 - protein, 8 aa, Homo sapiens
  misc_feature: Table A; Target 71359; HLA-B*44:02; PRAME; ENSG00000185686; TAA
SEGDVMHL

SEQ ID NO: 71360 - protein, 8 aa, Homo sapiens
  misc_feature: Table A; Target 71360; HLA-B*44:03; PRAME; ENSG00000185686; TAA
SEGDVMHL

SEQ ID NO: 71361 - protein, 8 aa, Homo sapiens
  misc_feature: Table A; Target 71361; HLA-B*49:01; PRAME; ENSG00000185686; TAA
SEGDVMHL

SEQ ID NO: 71362 - protein, 8 aa, Homo sapiens
  misc_feature: Table A; Target 71362; HLA-C*06:02; PRAME; ENSG00000185686; TAA
SEGDVMHL

SEQ ID NO: 71363 - protein, 8 aa, Homo sapiens
  misc_feature: Table A; Target 71363; HLA-C*07:04; PRAME; ENSG00000185686; TAA
SEGDVMHL

SEQ ID NO: 71364 - protein, 8 aa, Homo sapiens
  misc_feature: Table A; Target 71364; HLA-C*12:03; PRAME; ENSG00000185686; TAA
SEGDVMHL

SEQ ID NO: 71365 - protein, 8 aa, Homo sapiens
  misc_feature: Table A; Target 71365; HLA-C*16:04; PRAME; ENSG00000185686; TAA
SEGDVMHL

SEQ ID NO: 71366 - protein, 9 aa, Homo sapiens
  misc_feature: Table A; Target 71366; HLA-B*44:02; PRAME; ENSG00000185686; TAA
SEGDVMHLS

SEQ ID NO: 71367 - protein, 9 aa, Homo sapiens
  misc_feature: Table A; Target 71367; HLA-B*44:03; PRAME; ENSG00000185686; TAA
SEGDVMHLS

SEQ ID NO: 71368 - protein, 11 aa, Homo sapiens
  misc_feature: Table A; Target 71368; HLA-C*01:02; PRAME; ENSG00000185686; TAA
SFPEPEAAQPM

SEQ ID NO: 71369 - protein, 11 aa, Homo sapiens
  misc_feature: Table A; Target 71369; HLA-C*14:02; PRAME; ENSG00000185686; TAA
SFPEPEAAQPM

SEQ ID NO: 71370 - protein, 9 aa, Homo sapiens
  misc_feature: Table A; Target 71370; HLA-A*23:01; PRAME; ENSG00000185686; TAA
SFYGNSISI

SEQ ID NO: 71371 - protein, 9 aa, Homo sapiens
  misc_feature: Table A; Target 71371; HLA-A*24:02; PRAME; ENSG00000185686; TAA
SFYGNSISI

SEQ ID NO: 71372 - protein, 9 aa, Homo sapiens
  misc_feature: Table A; Target 71372; HLA-A*30:01; PRAME; ENSG00000185686; TAA
SFYGNSISI

SEQ ID NO: 71373 - protein, 9 aa, Homo sapiens
  misc_feature: Table A; Target 71373; HLA-B*13:02; PRAME; ENSG00000185686; TAA
SFYGNSISI

SEQ ID NO: 71374 - protein, 9 aa, Homo sapiens
  misc_feature: Table A; Target 71374; HLA-B*15:03; PRAME; ENSG00000185686; TAA
SFYGNSISI

SEQ ID NO: 71375 - protein, 9 aa, Homo sapiens
  misc_feature: Table A; Target 71375; HLA-B*35:03; PRAME; ENSG00000185686; TAA
SFYGNSISI

SEQ ID NO: 71376 - protein, 9 aa, Homo sapiens
  misc_feature: Table A; Target 71376; HLA-B*40:02; PRAME; ENSG00000185686; TAA
SFYGNSISI

SEQ ID NO: 71377 - protein, 9 aa, Homo sapiens
  misc_feature: Table A; Target 71377; HLA-B*46:01; PRAME; ENSG00000185686; TAA
SFYGNSISI

SEQ ID NO: 71378 - protein, 9 aa, Homo sapiens
  misc_feature: Table A; Target 71378; HLA-B*49:01; PRAME; ENSG00000185686; TAA
SFYGNSISI

SEQ ID NO: 71379 - protein, 9 aa, Homo sapiens
  misc_feature: Table A; Target 71379; HLA-B*51:01; PRAME; ENSG00000185686; TAA
SFYGNSISI

SEQ ID NO: 71380 - protein, 9 aa, Homo sapiens
  misc_feature: Table A; Target 71380; HLA-B*55:01; PRAME; ENSG00000185686; TAA
SFYGNSISI

SEQ ID NO: 71381 - protein, 9 aa, Homo sapiens
  misc_feature: Table A; Target 71381; HLA-C*01:02; PRAME; ENSG00000185686; TAA
SFYGNSISI

SEQ ID NO: 71382 - protein, 9 aa, Homo sapiens
  misc_feature: Table A; Target 71382; HLA-C*04:01; PRAME; ENSG00000185686; TAA
SFYGNSISI

SEQ ID NO: 71383 - protein, 9 aa, Homo sapiens
  misc_feature: Table A; Target 71383; HLA-C*06:02; PRAME; ENSG00000185686; TAA
SFYGNSISI

SEQ ID NO: 71384 - protein, 9 aa, Homo sapiens
  misc_feature: Table A; Target 71384; HLA-C*07:01; PRAME; ENSG00000185686; TAA
SFYGNSISI

SEQ ID NO: 71385 - protein, 9 aa, Homo sapiens
  misc_feature: Table A; Target 71385; HLA-C*07:04; PRAME; ENSG00000185686; TAA
SFYGNSISI

SEQ ID NO: 71386 - protein, 9 aa, Homo sapiens
  misc_feature: Table A; Target 71386; HLA-C*12:03; PRAME; ENSG00000185686; TAA
SFYGNSISI

SEQ ID NO: 71387 - protein, 9 aa, Homo sapiens
  misc_feature: Table A; Target 71387; HLA-C*14:02; PRAME; ENSG00000185686; TAA
SFYGNSISI

SEQ ID NO: 71388 - protein, 9 aa, Homo sapiens
  misc_feature: Table A; Target 71388; HLA-C*16:04; PRAME; ENSG00000185686; TAA
SFYGNSISI

SEQ ID NO: 71389 - protein, 8 aa, Homo sapiens
  misc_feature: Table A; Target 71389; HLA-A*30:02; PRAME; ENSG00000185686; TAA
SGNRASLY

SEQ ID NO: 71390 - protein, 8 aa, Homo sapiens
  misc_feature: Table A; Target 71390; HLA-B*15:01; PRAME; ENSG00000185686; TAA
SGNRASLY

SEQ ID NO: 71391 - protein, 8 aa, Homo sapiens
  misc_feature: Table A; Target 71391; HLA-B*15:03; PRAME; ENSG00000185686; TAA
SGNRASLY

SEQ ID NO: 71392 - protein, 8 aa, Homo sapiens
  misc_feature: Table A; Target 71392; HLA-B*46:01; PRAME; ENSG00000185686; TAA
SGNRASLY

SEQ ID NO: 71393 - protein, 8 aa, Homo sapiens
  misc_feature: Table A; Target 71393; HLA-C*04:01; PRAME; ENSG00000185686; TAA
SGNRASLY

SEQ ID NO: 71394 - protein, 8 aa, Homo sapiens
  misc_feature: Table A; Target 71394; HLA-C*07:04; PRAME; ENSG00000185686; TAA
SGNRASLY

SEQ ID NO: 71395 - protein, 8 aa, Homo sapiens
  misc_feature: Table A; Target 71395; HLA-C*12:03; PRAME; ENSG00000185686; TAA
SGNRASLY

SEQ ID NO: 71396 - protein, 8 aa, Homo sapiens
  misc_feature: Table A; Target 71396; HLA-C*16:01; PRAME; ENSG00000185686; TAA
SGNRASLY

SEQ ID NO: 71397 - protein, 8 aa, Homo sapiens
  misc_feature: Table A; Target 71397; HLA-C*16:02; PRAME; ENSG00000185686; TAA
SGNRASLY

SEQ ID NO: 71398 - protein, 9 aa, Homo sapiens
  misc_feature: Table A; Target 71398; HLA-B*27:05; PRAME; ENSG00000185686; TAA
SHCSQLTTL

SEQ ID NO: 71399 - protein, 9 aa, Homo sapiens
  misc_feature: Table A; Target 71399; HLA-B*38:01; PRAME; ENSG00000185686; TAA
SHCSQLTTL

SEQ ID NO: 71400 - protein, 9 aa, Homo sapiens
  misc_feature: Table A; Target 71400; HLA-B*39:01; PRAME; ENSG00000185686; TAA
SHCSQLTTL

SEQ ID NO: 71401 - protein, 8 aa, Homo sapiens
  misc_feature: Table A; Target 71401; HLA-B*15:03; PRAME; ENSG00000185686; TAA
SHIHASSY

SEQ ID NO: 71402 - protein, 9 aa, Homo sapiens
  misc_feature: Table A; Target 71402; HLA-B*38:01; PRAME; ENSG00000185686; TAA
SHIHASSYI

SEQ ID NO: 71403 - protein, 9 aa, Homo sapiens
  misc_feature: Table A; Target 71403; HLA-B*38:01; PRAME; ENSG00000185686; TAA
SHQDFWTVW

SEQ ID NO: 71404 - protein, 11 aa, Homo sapiens
  misc_feature: Table A; Target 71404; HLA-A*25:01; PRAME; ENSG00000185686; TAA
SIEDLEVTCTW

SEQ ID NO: 71405 - protein, 11 aa, Homo sapiens
  misc_feature: Table A; Target 71405; HLA-B*57:01; PRAME; ENSG00000185686; TAA
SIEDLEVTCTW

SEQ ID NO: 71406 - protein, 11 aa, Homo sapiens
  misc_feature: Table A; Target 71406; HLA-B*58:01; PRAME; ENSG00000185686; TAA
SIEDLEVTCTW

SEQ ID NO: 71407 - protein, 9 aa, Homo sapiens
  misc_feature: Table A; Target 71407; HLA-A*31:01; PRAME; ENSG00000185686; TAA
SIQSRYISM

SEQ ID NO: 71408 - protein, 9 aa, Homo sapiens
  misc_feature: Table A; Target 71408; HLA-A*32:01; PRAME; ENSG00000185686; TAA
SIQSRYISM

SEQ ID NO: 71409 - protein, 9 aa, Homo sapiens
  misc_feature: Table A; Target 71409; HLA-B*07:02; PRAME; ENSG00000185686; TAA
SIQSRYISM

SEQ ID NO: 71410 - protein, 9 aa, Homo sapiens
  misc_feature: Table A; Target 71410; HLA-B*08:01; PRAME; ENSG00000185686; TAA
SIQSRYISM

SEQ ID NO: 71411 - protein, 9 aa, Homo sapiens
  misc_feature: Table A; Target 71411; HLA-B*37:01; PRAME; ENSG00000185686; TAA
SIQSRYISM

SEQ ID NO: 71412 - protein, 9 aa, Homo sapiens
  misc_feature: Table A; Target 71412; HLA-B*46:01; PRAME; ENSG00000185686; TAA
SIQSRYISM

SEQ ID NO: 71413 - protein, 9 aa, Homo sapiens
  misc_feature: Table A; Target 71413; HLA-C*01:02; PRAME; ENSG00000185686; TAA
SIQSRYISM

SEQ ID NO: 71414 - protein, 9 aa, Homo sapiens
  misc_feature: Table A; Target 71414; HLA-C*03:03; PRAME; ENSG00000185686; TAA
SIQSRYISM

SEQ ID NO: 71415 - protein, 9 aa, Homo sapiens
  misc_feature: Table A; Target 71415; HLA-C*07:02; PRAME; ENSG00000185686; TAA
SIQSRYISM

SEQ ID NO: 71416 - protein, 9 aa, Homo sapiens
  misc_feature: Table A; Target 71416; HLA-C*14:02; PRAME; ENSG00000185686; TAA
SIQSRYISM

SEQ ID NO: 71417 - protein, 9 aa, Homo sapiens
  misc_feature: Table A; Target 71417; HLA-C*16:01; PRAME; ENSG00000185686; TAA
SIQSRYISM

SEQ ID NO: 71418 - protein, 9 aa, Homo sapiens
  misc_feature: Table A; Target 71418; HLA-C*16:02; PRAME; ENSG00000185686; TAA
SIQSRYISM

SEQ ID NO: 71419 - protein, 8 aa, Homo sapiens
  misc_feature: Table A; Target 71419; HLA-B*37:01; PRAME; ENSG00000185686; TAA
SISALQSL

SEQ ID NO: 71420 - protein, 8 aa, Homo sapiens
  misc_feature: Table A; Target 71420; HLA-C*01:02; PRAME; ENSG00000185686; TAA
SISALQSL

SEQ ID NO: 71421 - protein, 9 aa, Homo sapiens
  misc_feature: Table A; Target 71421; HLA-B*13:02; PRAME; ENSG00000185686; TAA
SISALQSLL

SEQ ID NO: 71422 - protein, 9 aa, Homo sapiens
  misc_feature: Table A; Target 71422; HLA-C*07:04; PRAME; ENSG00000185686; TAA
SISALQSLL

SEQ ID NO: 71423 - protein, 10 aa, Homo sapiens
  misc_feature: Table A; Target 71423; HLA-C*01:02; PRAME; ENSG00000185686; TAA
SISISALQSL

SEQ ID NO: 71424 - protein, 9 aa, Homo sapiens
  misc_feature: Table A; Target 71424; HLA-A*02:01; PRAME; ENSG00000185686; TAA
SLLKDEALA

SEQ ID NO: 71425 - protein, 10 aa, Homo sapiens
  misc_feature: Table A; Target 71425; HLA-B*13:02; PRAME; ENSG00000185686; TAA
SLLKDEALAI

SEQ ID NO: 71426 - protein, 11 aa, Homo sapiens
  misc_feature: Table A; Target 71426; HLA-A*02:01; PRAME; ENSG00000185686; TAA
SLLKDEALAIA

SEQ ID NO: 71427 - protein, 11 aa, Homo sapiens
  misc_feature: Table A; Target 71427; HLA-A*02:04; PRAME; ENSG00000185686; TAA
SLLKDEALAIA

SEQ ID NO: 71428 - protein, 9 aa, Homo sapiens
  misc_feature: Table A; Target 71428; HLA-A*02:01; PRAME; ENSG00000185686; TAA
SLLQHLIGL

SEQ ID NO: 71429 - protein, 9 aa, Homo sapiens
  misc_feature: Table A; Target 71429; HLA-A*02:03; PRAME; ENSG00000185686; TAA
SLLQHLIGL

SEQ ID NO: 71430 - protein, 9 aa, Homo sapiens
  misc_feature: Table A; Target 71430; HLA-A*02:04; PRAME; ENSG00000185686; TAA
SLLQHLIGL

SEQ ID NO: 71431 - protein, 9 aa, Homo sapiens
  misc_feature: Table A; Target 71431; HLA-A*02:07; PRAME; ENSG00000185686; TAA
SLLQHLIGL

SEQ ID NO: 71432 - protein, 9 aa, Homo sapiens
  misc_feature: Table A; Target 71432; HLA-A*03:01; PRAME; ENSG00000185686; TAA
SLLQHLIGL

SEQ ID NO: 71433 - protein, 9 aa, Homo sapiens
  misc_feature: Table A; Target 71433; HLA-A*31:01; PRAME; ENSG00000185686; TAA
SLLQHLIGL

SEQ ID NO: 71434 - protein, 9 aa, Homo sapiens
  misc_feature: Table A; Target 71434; HLA-B*08:01; PRAME; ENSG00000185686; TAA
SLLQHLIGL

SEQ ID NO: 71435 - protein, 9 aa, Homo sapiens
  misc_feature: Table A; Target 71435; HLA-B*37:01; PRAME; ENSG00000185686; TAA
SLLQHLIGL

SEQ ID NO: 71436 - protein, 9 aa, Homo sapiens
  misc_feature: Table A; Target 71436; HLA-B*55:01; PRAME; ENSG00000185686; TAA
SLLQHLIGL

SEQ ID NO: 71437 - protein, 9 aa, Homo sapiens
  misc_feature: Table A; Target 71437; HLA-A*01:01; PRAME; ENSG00000185686; TAA
SLQCLQALY

SEQ ID NO: 71438 - protein, 9 aa, Homo sapiens
  misc_feature: Table A; Target 71438; HLA-A*29:02; PRAME; ENSG00000185686; TAA
SLQCLQALY

SEQ ID NO: 71439 - protein, 9 aa, Homo sapiens
  misc_feature: Table A; Target 71439; HLA-A*30:02; PRAME; ENSG00000185686; TAA
SLQCLQALY

SEQ ID NO: 71440 - protein, 9 aa, Homo sapiens
  misc_feature: Table A; Target 71440; HLA-B*15:01; PRAME; ENSG00000185686; TAA
SLQCLQALY

SEQ ID NO: 71441 - protein, 9 aa, Homo sapiens
  misc_feature: Table A; Target 71441; HLA-C*07:04; PRAME; ENSG00000185686; TAA
SLQCLQALY

SEQ ID NO: 71442 - protein, 10 aa, Homo sapiens
  misc_feature: Table A; Target 71442; HLA-A*02:01; PRAME; ENSG00000185686; TAA
SLSGVMLTDV

SEQ ID NO: 71443 - protein, 10 aa, Homo sapiens
  misc_feature: Table A; Target 71443; HLA-A*02:03; PRAME; ENSG00000185686; TAA
SLSGVMLTDV

SEQ ID NO: 71444 - protein, 10 aa, Homo sapiens
  misc_feature: Table A; Target 71444; HLA-A*02:04; PRAME; ENSG00000185686; TAA
SLSGVMLTDV

SEQ ID NO: 71445 - protein, 10 aa, Homo sapiens
  misc_feature: Table A; Target 71445; HLA-A*02:01; PRAME; ENSG00000185686; TAA
SLYSFPEPEA

SEQ ID NO: 71446 - protein, 10 aa, Homo sapiens
  misc_feature: Table A; Target 71446; HLA-A*02:03; PRAME; ENSG00000185686; TAA
SLYSFPEPEA

SEQ ID NO: 71447 - protein, 11 aa, Homo sapiens
  misc_feature: Table A; Target 71447; HLA-A*02:01; PRAME; ENSG00000185686; TAA
SLYSFPEPEAA

SEQ ID NO: 71448 - protein, 11 aa, Homo sapiens
  misc_feature: Table A; Target 71448; HLA-A*02:03; PRAME; ENSG00000185686; TAA
SLYSFPEPEAA

SEQ ID NO: 71449 - protein, 11 aa, Homo sapiens
  misc_feature: Table A; Target 71449; HLA-A*02:04; PRAME; ENSG00000185686; TAA
SLYSFPEPEAA

SEQ ID NO: 71450 - protein, 9 aa, Homo sapiens
  misc_feature: Table A; Target 71450; HLA-A*03:01; PRAME; ENSG00000185686; TAA
SMSVWTSPR

SEQ ID NO: 71451 - protein, 9 aa, Homo sapiens
  misc_feature: Table A; Target 71451; HLA-A*31:01; PRAME; ENSG00000185686; TAA
SMSVWTSPR

SEQ ID NO: 71452 - protein, 8 aa, Homo sapiens
  misc_feature: Table A; Target 71452; HLA-A*29:02; PRAME; ENSG00000185686; TAA
SNLTHVLY

SEQ ID NO: 71453 - protein, 8 aa, Homo sapiens
  misc_feature: Table A; Target 71453; HLA-C*07:01; PRAME; ENSG00000185686; TAA
SNLTHVLY

SEQ ID NO: 71454 - protein, 9 aa, Homo sapiens
  misc_feature: Table A; Target 71454; HLA-B*35:03; PRAME; ENSG00000185686; TAA
SPEKEEQYI

SEQ ID NO: 71455 - protein, 8 aa, Homo sapiens
  misc_feature: Table A; Target 71455; HLA-B*07:02; PRAME; ENSG00000185686; TAA
SPEPLQAL

SEQ ID NO: 71456 - protein, 8 aa, Homo sapiens
  misc_feature: Table A; Target 71456; HLA-B*35:03; PRAME; ENSG00000185686; TAA
SPEPLQAL

SEQ ID NO: 71457 - protein, 9 aa, Homo sapiens
  misc_feature: Table A; Target 71457; HLA-B*07:02; PRAME; ENSG00000185686; TAA
SPEPLQALL

SEQ ID NO: 71458 - protein, 9 aa, Homo sapiens
  misc_feature: Table A; Target 71458; HLA-B*35:01; PRAME; ENSG00000185686; TAA
SPEPLQALL

SEQ ID NO: 71459 - protein, 9 aa, Homo sapiens
  misc_feature: Table A; Target 71459; HLA-B*35:03; PRAME; ENSG00000185686; TAA
SPEPLQALL

SEQ ID NO: 71460 - protein, 9 aa, Homo sapiens
  misc_feature: Table A; Target 71460; HLA-B*38:01; PRAME; ENSG00000185686; TAA
SPEPLQALL

SEQ ID NO: 71461 - protein, 9 aa, Homo sapiens
  misc_feature: Table A; Target 71461; HLA-C*07:02; PRAME; ENSG00000185686; TAA
SPEPLQALL

SEQ ID NO: 71462 - protein, 8 aa, Homo sapiens
  misc_feature: Table A; Target 71462; HLA-B*07:02; PRAME; ENSG00000185686; TAA
SPRRLVEL

SEQ ID NO: 71463 - protein, 8 aa, Homo sapiens
  misc_feature: Table A; Target 71463; HLA-B*08:01; PRAME; ENSG00000185686; TAA
SPRRLVEL

SEQ ID NO: 71464 - protein, 8 aa, Homo sapiens
  misc_feature: Table A; Target 71464; HLA-C*07:02; PRAME; ENSG00000185686; TAA
SPRRLVEL

SEQ ID NO: 71465 - protein, 9 aa, Homo sapiens
  misc_feature: Table A; Target 71465; HLA-B*07:02; PRAME; ENSG00000185686; TAA
SPSVSQLSV

SEQ ID NO: 71466 - protein, 9 aa, Homo sapiens
  misc_feature: Table A; Target 71466; HLA-B*13:02; PRAME; ENSG00000185686; TAA
SPSVSQLSV

SEQ ID NO: 71467 - protein, 9 aa, Homo sapiens
  misc_feature: Table A; Target 71467; HLA-B*35:03; PRAME; ENSG00000185686; TAA
SPSVSQLSV

SEQ ID NO: 71468 - protein, 9 aa, Homo sapiens
  misc_feature: Table A; Target 71468; HLA-B*51:01; PRAME; ENSG00000185686; TAA
SPSVSQLSV

SEQ ID NO: 71469 - protein, 9 aa, Homo sapiens
  misc_feature: Table A; Target 71469; HLA-B*54:01; PRAME; ENSG00000185686; TAA
SPSVSQLSV

SEQ ID NO: 71470 - protein, 9 aa, Homo sapiens
  misc_feature: Table A; Target 71470; HLA-B*55:01; PRAME; ENSG00000185686; TAA
SPSVSQLSV

SEQ ID NO: 71471 - protein, 9 aa, Homo sapiens
  misc_feature: Table A; Target 71471; HLA-B*56:01; PRAME; ENSG00000185686; TAA
SPSVSQLSV

SEQ ID NO: 71472 - protein, 9 aa, Homo sapiens
  misc_feature: Table A; Target 71472; HLA-C*07:02; PRAME; ENSG00000185686; TAA
SPSVSQLSV

SEQ ID NO: 71473 - protein, 10 aa, Homo sapiens
  misc_feature: Table A; Target 71473; HLA-B*07:02; PRAME; ENSG00000185686; TAA
SPSVSQLSVL

SEQ ID NO: 71474 - protein, 10 aa, Homo sapiens
  misc_feature: Table A; Target 71474; HLA-B*35:03; PRAME; ENSG00000185686; TAA
SPSVSQLSVL

SEQ ID NO: 71475 - protein, 10 aa, Homo sapiens
  misc_feature: Table A; Target 71475; HLA-B*56:01; PRAME; ENSG00000185686; TAA
SPSVSQLSVL

SEQ ID NO: 71476 - protein, 10 aa, Homo sapiens
  misc_feature: Table A; Target 71476; HLA-C*07:02; PRAME; ENSG00000185686; TAA
SPSVSQLSVL

SEQ ID NO: 71477 - protein, 8 aa, Homo sapiens
  misc_feature: Table A; Target 71477; HLA-B*07:02; PRAME; ENSG00000185686; TAA
SPYLGQMI

SEQ ID NO: 71478 - protein, 8 aa, Homo sapiens
  misc_feature: Table A; Target 71478; HLA-B*08:01; PRAME; ENSG00000185686; TAA
SPYLGQMI

SEQ ID NO: 71479 - protein, 8 aa, Homo sapiens
  misc_feature: Table A; Target 71479; HLA-B*13:02; PRAME; ENSG00000185686; TAA
SPYLGQMI

SEQ ID NO: 71480 - protein, 8 aa, Homo sapiens
  misc_feature: Table A; Target 71480; HLA-B*51:01; PRAME; ENSG00000185686; TAA
SPYLGQMI

SEQ ID NO: 71481 - protein, 8 aa, Homo sapiens
  misc_feature: Table A; Target 71481; HLA-B*54:01; PRAME; ENSG00000185686; TAA
SPYLGQMI

SEQ ID NO: 71482 - protein, 8 aa, Homo sapiens
  misc_feature: Table A; Target 71482; HLA-B*55:01; PRAME; ENSG00000185686; TAA
SPYLGQMI

SEQ ID NO: 71483 - protein, 8 aa, Homo sapiens
  misc_feature: Table A; Target 71483; HLA-B*56:01; PRAME; ENSG00000185686; TAA
SPYLGQMI

SEQ ID NO: 71484 - protein, 8 aa, Homo sapiens
  misc_feature: Table A; Target 71484; HLA-C*07:02; PRAME; ENSG00000185686; TAA
SPYLGQMI

SEQ ID NO: 71485 - protein, 8 aa, Homo sapiens
  misc_feature: Table A; Target 71485; HLA-C*07:04; PRAME; ENSG00000185686; TAA
SPYLGQMI

SEQ ID NO: 71486 - protein, 10 aa, Homo sapiens
  misc_feature: Table A; Target 71486; HLA-B*07:02; PRAME; ENSG00000185686; TAA
SPYLGQMINL

SEQ ID NO: 71487 - protein, 10 aa, Homo sapiens
  misc_feature: Table A; Target 71487; HLA-B*35:03; PRAME; ENSG00000185686; TAA
SPYLGQMINL

SEQ ID NO: 71488 - protein, 10 aa, Homo sapiens
  misc_feature: Table A; Target 71488; HLA-B*51:01; PRAME; ENSG00000185686; TAA
SPYLGQMINL

SEQ ID NO: 71489 - protein, 10 aa, Homo sapiens
  misc_feature: Table A; Target 71489; HLA-B*56:01; PRAME; ENSG00000185686; TAA
SPYLGQMINL

SEQ ID NO: 71490 - protein, 10 aa, Homo sapiens
  misc_feature: Table A; Target 71490; HLA-C*07:02; PRAME; ENSG00000185686; TAA
SPYLGQMINL

SEQ ID NO: 71491 - protein, 11 aa, Homo sapiens
  misc_feature: Table A; Target 71491; HLA-A*31:01; PRAME; ENSG00000185686; TAA
SPYLGQMINLR

SEQ ID NO: 71492 - protein, 11 aa, Homo sapiens
  misc_feature: Table A; Target 71492; HLA-A*33:01; PRAME; ENSG00000185686; TAA
SPYLGQMINLR

SEQ ID NO: 71493 - protein, 11 aa, Homo sapiens
  misc_feature: Table A; Target 71493; HLA-A*68:01; PRAME; ENSG00000185686; TAA
SPYLGQMINLR

SEQ ID NO: 71494 - protein, 11 aa, Homo sapiens
  misc_feature: Table A; Target 71494; HLA-C*07:06; PRAME; ENSG00000185686; TAA
SPYLGQMINLR

SEQ ID NO: 71495 - protein, 9 aa, Homo sapiens
  misc_feature: Table A; Target 71495; HLA-A*30:01; PRAME; ENSG00000185686; TAA
SQFLSLQCL

SEQ ID NO: 71496 - protein, 9 aa, Homo sapiens
  misc_feature: Table A; Target 71496; HLA-B*13:02; PRAME; ENSG00000185686; TAA
SQFLSLQCL

SEQ ID NO: 71497 - protein, 9 aa, Homo sapiens
  misc_feature: Table A; Target 71497; HLA-B*15:01; PRAME; ENSG00000185686; TAA
SQFLSLQCL

SEQ ID NO: 71498 - protein, 9 aa, Homo sapiens
  misc_feature: Table A; Target 71498; HLA-B*15:03; PRAME; ENSG00000185686; TAA
SQFLSLQCL

SEQ ID NO: 71499 - protein, 9 aa, Homo sapiens
  misc_feature: Table A; Target 71499; HLA-B*39:01; PRAME; ENSG00000185686; TAA
SQFLSLQCL

SEQ ID NO: 71500 - protein, 9 aa, Homo sapiens
  misc_feature: Table A; Target 71500; HLA-B*40:02; PRAME; ENSG00000185686; TAA
SQFLSLQCL

SEQ ID NO: 71501 - protein, 9 aa, Homo sapiens
  misc_feature: Table A; Target 71501; HLA-C*16:04; PRAME; ENSG00000185686; TAA
SQFLSLQCL

SEQ ID NO: 71502 - protein, 8 aa, Homo sapiens
  misc_feature: Table A; Target 71502; HLA-B*13:02; PRAME; ENSG00000185686; TAA
SQLSVLSL

SEQ ID NO: 71503 - protein, 8 aa, Homo sapiens
  misc_feature: Table A; Target 71503; HLA-B*15:01; PRAME; ENSG00000185686; TAA
SQLSVLSL

SEQ ID NO: 71504 - protein, 11 aa, Homo sapiens
  misc_feature: Table A; Target 71504; HLA-A*02:01; PRAME; ENSG00000185686; TAA
SQLSVLSLSGV

SEQ ID NO: 71505 - protein, 8 aa, Homo sapiens
  misc_feature: Table A; Target 71505; HLA-A*23:01; PRAME; ENSG00000185686; TAA
SQLTTLSF

SEQ ID NO: 71506 - protein, 8 aa, Homo sapiens
  misc_feature: Table A; Target 71506; HLA-A*32:01; PRAME; ENSG00000185686; TAA
SQLTTLSF

SEQ ID NO: 71507 - protein, 8 aa, Homo sapiens
  misc_feature: Table A; Target 71507; HLA-B*13:02; PRAME; ENSG00000185686; TAA
SQLTTLSF

SEQ ID NO: 71508 - protein, 8 aa, Homo sapiens
  misc_feature: Table A; Target 71508; HLA-B*15:01; PRAME; ENSG00000185686; TAA
SQLTTLSF

SEQ ID NO: 71509 - protein, 8 aa, Homo sapiens
  misc_feature: Table A; Target 71509; HLA-B*15:03; PRAME; ENSG00000185686; TAA
SQLTTLSF

SEQ ID NO: 71510 - protein, 8 aa, Homo sapiens
  misc_feature: Table A; Target 71510; HLA-B*37:01; PRAME; ENSG00000185686; TAA
SQLTTLSF

SEQ ID NO: 71511 - protein, 8 aa, Homo sapiens
  misc_feature: Table A; Target 71511; HLA-C*14:02; PRAME; ENSG00000185686; TAA
SQLTTLSF

SEQ ID NO: 71512 - protein, 9 aa, Homo sapiens
  misc_feature: Table A; Target 71512; HLA-A*29:02; PRAME; ENSG00000185686; TAA
SQLTTLSFY

SEQ ID NO: 71513 - protein, 9 aa, Homo sapiens
  misc_feature: Table A; Target 71513; HLA-A*30:02; PRAME; ENSG00000185686; TAA
SQLTTLSFY

SEQ ID NO: 71514 - protein, 9 aa, Homo sapiens
  misc_feature: Table A; Target 71514; HLA-A*32:01; PRAME; ENSG00000185686; TAA
SQLTTLSFY

SEQ ID NO: 71515 - protein, 9 aa, Homo sapiens
  misc_feature: Table A; Target 71515; HLA-B*13:02; PRAME; ENSG00000185686; TAA
SQLTTLSFY

SEQ ID NO: 71516 - protein, 9 aa, Homo sapiens
  misc_feature: Table A; Target 71516; HLA-B*15:01; PRAME; ENSG00000185686; TAA
SQLTTLSFY

SEQ ID NO: 71517 - protein, 9 aa, Homo sapiens
  misc_feature: Table A; Target 71517; HLA-B*15:03; PRAME; ENSG00000185686; TAA
SQLTTLSFY

SEQ ID NO: 71518 - protein, 9 aa, Homo sapiens
  misc_feature: Table A; Target 71518; HLA-B*46:01; PRAME; ENSG00000185686; TAA
SQLTTLSFY

SEQ ID NO: 71519 - protein, 9 aa, Homo sapiens
  misc_feature: Table A; Target 71519; HLA-C*04:01; PRAME; ENSG00000185686; TAA
SQLTTLSFY

SEQ ID NO: 71520 - protein, 9 aa, Homo sapiens
  misc_feature: Table A; Target 71520; HLA-C*07:01; PRAME; ENSG00000185686; TAA
SQLTTLSFY

SEQ ID NO: 71521 - protein, 9 aa, Homo sapiens
  misc_feature: Table A; Target 71521; HLA-C*07:04; PRAME; ENSG00000185686; TAA
SQLTTLSFY

SEQ ID NO: 71522 - protein, 9 aa, Homo sapiens
  misc_feature: Table A; Target 71522; HLA-C*14:02; PRAME; ENSG00000185686; TAA
SQLTTLSFY

SEQ ID NO: 71523 - protein, 9 aa, Homo sapiens
  misc_feature: Table A; Target 71523; HLA-C*16:04; PRAME; ENSG00000185686; TAA
SQLTTLSFY

SEQ ID NO: 71524 - protein, 9 aa, Homo sapiens
  misc_feature: Table A; Target 71524; HLA-A*02:01; PRAME; ENSG00000185686; TAA
SQSPSVSQL

SEQ ID NO: 71525 - protein, 9 aa, Homo sapiens
  misc_feature: Table A; Target 71525; HLA-A*02:03; PRAME; ENSG00000185686; TAA
SQSPSVSQL

SEQ ID NO: 71526 - protein, 9 aa, Homo sapiens
  misc_feature: Table A; Target 71526; HLA-A*02:04; PRAME; ENSG00000185686; TAA
SQSPSVSQL

SEQ ID NO: 71527 - protein, 9 aa, Homo sapiens
  misc_feature: Table A; Target 71527; HLA-A*25:01; PRAME; ENSG00000185686; TAA
SQSPSVSQL

SEQ ID NO: 71528 - protein, 9 aa, Homo sapiens
  misc_feature: Table A; Target 71528; HLA-A*26:01; PRAME; ENSG00000185686; TAA
SQSPSVSQL

SEQ ID NO: 71529 - protein, 9 aa, Homo sapiens
  misc_feature: Table A; Target 71529; HLA-A*30:01; PRAME; ENSG00000185686; TAA
SQSPSVSQL

SEQ ID NO: 71530 - protein, 9 aa, Homo sapiens
  misc_feature: Table A; Target 71530; HLA-A*30:02; PRAME; ENSG00000185686; TAA
SQSPSVSQL

SEQ ID NO: 71531 - protein, 9 aa, Homo sapiens
  misc_feature: Table A; Target 71531; HLA-A*32:01; PRAME; ENSG00000185686; TAA
SQSPSVSQL

SEQ ID NO: 71532 - protein, 9 aa, Homo sapiens
  misc_feature: Table A; Target 71532; HLA-B*07:02; PRAME; ENSG00000185686; TAA
SQSPSVSQL

SEQ ID NO: 71533 - protein, 9 aa, Homo sapiens
  misc_feature: Table A; Target 71533; HLA-B*13:02; PRAME; ENSG00000185686; TAA
SQSPSVSQL

SEQ ID NO: 71534 - protein, 9 aa, Homo sapiens
  misc_feature: Table A; Target 71534; HLA-B*15:01; PRAME; ENSG00000185686; TAA
SQSPSVSQL

SEQ ID NO: 71535 - protein, 9 aa, Homo sapiens
  misc_feature: Table A; Target 71535; HLA-B*15:03; PRAME; ENSG00000185686; TAA
SQSPSVSQL

SEQ ID NO: 71536 - protein, 9 aa, Homo sapiens
  misc_feature: Table A; Target 71536; HLA-B*27:05; PRAME; ENSG00000185686; TAA
SQSPSVSQL

SEQ ID NO: 71537 - protein, 9 aa, Homo sapiens
  misc_feature: Table A; Target 71537; HLA-B*37:01; PRAME; ENSG00000185686; TAA
SQSPSVSQL

SEQ ID NO: 71538 - protein, 9 aa, Homo sapiens
  misc_feature: Table A; Target 71538; HLA-B*38:01; PRAME; ENSG00000185686; TAA
SQSPSVSQL

SEQ ID NO: 71539 - protein, 9 aa, Homo sapiens
  misc_feature: Table A; Target 71539; HLA-B*39:01; PRAME; ENSG00000185686; TAA
SQSPSVSQL

SEQ ID NO: 71540 - protein, 9 aa, Homo sapiens
  misc_feature: Table A; Target 71540; HLA-B*40:01; PRAME; ENSG00000185686; TAA
SQSPSVSQL

SEQ ID NO: 71541 - protein, 9 aa, Homo sapiens
  misc_feature: Table A; Target 71541; HLA-B*40:02; PRAME; ENSG00000185686; TAA
SQSPSVSQL

SEQ ID NO: 71542 - protein, 9 aa, Homo sapiens
  misc_feature: Table A; Target 71542; HLA-B*55:01; PRAME; ENSG00000185686; TAA
SQSPSVSQL

SEQ ID NO: 71543 - protein, 9 aa, Homo sapiens
  misc_feature: Table A; Target 71543; HLA-B*58:01; PRAME; ENSG00000185686; TAA
SQSPSVSQL

SEQ ID NO: 71544 - protein, 9 aa, Homo sapiens
  misc_feature: Table A; Target 71544; HLA-C*01:02; PRAME; ENSG00000185686; TAA
SQSPSVSQL

SEQ ID NO: 71545 - protein, 9 aa, Homo sapiens
  misc_feature: Table A; Target 71545; HLA-C*02:02; PRAME; ENSG00000185686; TAA
SQSPSVSQL

SEQ ID NO: 71546 - protein, 9 aa, Homo sapiens
  misc_feature: Table A; Target 71546; HLA-C*03:03; PRAME; ENSG00000185686; TAA
SQSPSVSQL

SEQ ID NO: 71547 - protein, 9 aa, Homo sapiens
  misc_feature: Table A; Target 71547; HLA-C*03:04; PRAME; ENSG00000185686; TAA
SQSPSVSQL

SEQ ID NO: 71548 - protein, 9 aa, Homo sapiens
  misc_feature: Table A; Target 71548; HLA-C*05:01; PRAME; ENSG00000185686; TAA
SQSPSVSQL

SEQ ID NO: 71549 - protein, 9 aa, Homo sapiens
  misc_feature: Table A; Target 71549; HLA-C*06:02; PRAME; ENSG00000185686; TAA
SQSPSVSQL

SEQ ID NO: 71550 - protein, 9 aa, Homo sapiens
  misc_feature: Table A; Target 71550; HLA-C*07:04; PRAME; ENSG00000185686; TAA
SQSPSVSQL

SEQ ID NO: 71551 - protein, 9 aa, Homo sapiens
  misc_feature: Table A; Target 71551; HLA-C*12:03; PRAME; ENSG00000185686; TAA
SQSPSVSQL

SEQ ID NO: 71552 - protein, 9 aa, Homo sapiens
  misc_feature: Table A; Target 71552; HLA-C*14:02; PRAME; ENSG00000185686; TAA
SQSPSVSQL

SEQ ID NO: 71553 - protein, 9 aa, Homo sapiens
  misc_feature: Table A; Target 71553; HLA-C*16:02; PRAME; ENSG00000185686; TAA
SQSPSVSQL

SEQ ID NO: 71554 - protein, 9 aa, Homo sapiens
  misc_feature: Table A; Target 71554; HLA-C*16:04; PRAME; ENSG00000185686; TAA
SQSPSVSQL

SEQ ID NO: 71555 - protein, 11 aa, Homo sapiens
  misc_feature: Table A; Target 71555; HLA-B*13:02; PRAME; ENSG00000185686; TAA
SQSPSVSQLSV

SEQ ID NO: 71556 - protein, 11 aa, Homo sapiens
  misc_feature: Table A; Target 71556; HLA-B*39:01; PRAME; ENSG00000185686; TAA
SQSPSVSQLSV

SEQ ID NO: 71557 - protein, 8 aa, Homo sapiens
  misc_feature: Table A; Target 71557; HLA-B*13:02; PRAME; ENSG00000185686; TAA
SQTLKAMV

SEQ ID NO: 71558 - protein, 9 aa, Homo sapiens
  misc_feature: Table A; Target 71558; HLA-C*16:04; PRAME; ENSG00000185686; TAA
SRYISMSVW

SEQ ID NO: 71559 - protein, 8 aa, Homo sapiens
  misc_feature: Table A; Target 71559; HLA-A*03:01; PRAME; ENSG00000185686; TAA
SSYISPEK

SEQ ID NO: 71560 - protein, 8 aa, Homo sapiens
  misc_feature: Table A; Target 71560; HLA-A*03:02; PRAME; ENSG00000185686; TAA
SSYISPEK

SEQ ID NO: 71561 - protein, 8 aa, Homo sapiens
  misc_feature: Table A; Target 71561; HLA-A*11:01; PRAME; ENSG00000185686; TAA
SSYISPEK

SEQ ID NO: 71562 - protein, 8 aa, Homo sapiens
  misc_feature: Table A; Target 71562; HLA-B*27:05; PRAME; ENSG00000185686; TAA
SSYISPEK

SEQ ID NO: 71563 - protein, 8 aa, Homo sapiens
  misc_feature: Table A; Target 71563; HLA-C*06:02; PRAME; ENSG00000185686; TAA
SSYISPEK

SEQ ID NO: 71564 - protein, 9 aa, Homo sapiens
  misc_feature: Table A; Target 71564; HLA-B*13:02; PRAME; ENSG00000185686; TAA
STEAEQPFI

SEQ ID NO: 71565 - protein, 9 aa, Homo sapiens
  misc_feature: Table A; Target 71565; HLA-A*26:01; PRAME; ENSG00000185686; TAA
SVLSLSGVM

SEQ ID NO: 71566 - protein, 9 aa, Homo sapiens
  misc_feature: Table A; Target 71566; HLA-A*30:02; PRAME; ENSG00000185686; TAA
SVLSLSGVM

SEQ ID NO: 71567 - protein, 9 aa, Homo sapiens
  misc_feature: Table A; Target 71567; HLA-B*35:01; PRAME; ENSG00000185686; TAA
SVLSLSGVM

SEQ ID NO: 71568 - protein, 9 aa, Homo sapiens
  misc_feature: Table A; Target 71568; HLA-B*39:01; PRAME; ENSG00000185686; TAA
SVLSLSGVM

SEQ ID NO: 71569 - protein, 9 aa, Homo sapiens
  misc_feature: Table A; Target 71569; HLA-C*07:06; PRAME; ENSG00000185686; TAA
SVLSLSGVM

SEQ ID NO: 71570 - protein, 8 aa, Homo sapiens
  misc_feature: Table A; Target 71570; HLA-C*05:01; PRAME; ENSG00000185686; TAA
SVSQLSVL

SEQ ID NO: 71571 - protein, 10 aa, Homo sapiens
  misc_feature: Table A; Target 71571; HLA-A*25:01; PRAME; ENSG00000185686; TAA
SVSQLSVLSL

SEQ ID NO: 71572 - protein, 9 aa, Homo sapiens
  misc_feature: Table A; Target 71572; HLA-A*23:01; PRAME; ENSG00000185686; TAA
SYEDIHGTL

SEQ ID NO: 71573 - protein, 9 aa, Homo sapiens
  misc_feature: Table A; Target 71573; HLA-A*24:02; PRAME; ENSG00000185686; TAA
SYEDIHGTL

SEQ ID NO: 71574 - protein, 9 aa, Homo sapiens
  misc_feature: Table A; Target 71574; HLA-B*27:05; PRAME; ENSG00000185686; TAA
SYEDIHGTL

SEQ ID NO: 71575 - protein, 9 aa, Homo sapiens
  misc_feature: Table A; Target 71575; HLA-B*35:03; PRAME; ENSG00000185686; TAA
SYEDIHGTL

SEQ ID NO: 71576 - protein, 9 aa, Homo sapiens
  misc_feature: Table A; Target 71576; HLA-B*38:01; PRAME; ENSG00000185686; TAA
SYEDIHGTL

SEQ ID NO: 71577 - protein, 9 aa, Homo sapiens
  misc_feature: Table A; Target 71577; HLA-C*01:02; PRAME; ENSG00000185686; TAA
SYEDIHGTL

SEQ ID NO: 71578 - protein, 9 aa, Homo sapiens
  misc_feature: Table A; Target 71578; HLA-C*04:01; PRAME; ENSG00000185686; TAA
SYEDIHGTL

SEQ ID NO: 71579 - protein, 9 aa, Homo sapiens
  misc_feature: Table A; Target 71579; HLA-C*05:01; PRAME; ENSG00000185686; TAA
SYEDIHGTL

SEQ ID NO: 71580 - protein, 9 aa, Homo sapiens
  misc_feature: Table A; Target 71580; HLA-C*12:03; PRAME; ENSG00000185686; TAA
SYEDIHGTL

SEQ ID NO: 71581 - protein, 9 aa, Homo sapiens
  misc_feature: Table A; Target 71581; HLA-C*14:02; PRAME; ENSG00000185686; TAA
SYEDIHGTL

SEQ ID NO: 71582 - protein, 9 aa, Homo sapiens
  misc_feature: Table A; Target 71582; HLA-C*16:02; PRAME; ENSG00000185686; TAA
SYEDIHGTL

SEQ ID NO: 71583 - protein, 11 aa, Homo sapiens
  misc_feature: Table A; Target 71583; HLA-A*24:02; PRAME; ENSG00000185686; TAA
SYEDIHGTLHL

SEQ ID NO: 71584 - protein, 11 aa, Homo sapiens
  misc_feature: Table A; Target 71584; HLA-A*23:01; PRAME; ENSG00000185686; TAA
SYISPEKEEQY

SEQ ID NO: 71585 - protein, 11 aa, Homo sapiens
  misc_feature: Table A; Target 71585; HLA-A*24:02; PRAME; ENSG00000185686; TAA
SYISPEKEEQY

SEQ ID NO: 71586 - protein, 11 aa, Homo sapiens
  misc_feature: Table A; Target 71586; HLA-A*29:02; PRAME; ENSG00000185686; TAA
SYISPEKEEQY

SEQ ID NO: 71587 - protein, 11 aa, Homo sapiens
  misc_feature: Table A; Target 71587; HLA-A*30:02; PRAME; ENSG00000185686; TAA
SYISPEKEEQY

SEQ ID NO: 71588 - protein, 11 aa, Homo sapiens
  misc_feature: Table A; Target 71588; HLA-A*31:01; PRAME; ENSG00000185686; TAA
SYISPEKEEQY

SEQ ID NO: 71589 - protein, 11 aa, Homo sapiens
  misc_feature: Table A; Target 71589; HLA-A*32:01; PRAME; ENSG00000185686; TAA
SYISPEKEEQY

SEQ ID NO: 71590 - protein, 11 aa, Homo sapiens
  misc_feature: Table A; Target 71590; HLA-A*33:01; PRAME; ENSG00000185686; TAA
SYISPEKEEQY

SEQ ID NO: 71591 - protein, 11 aa, Homo sapiens
  misc_feature: Table A; Target 71591; HLA-B*15:01; PRAME; ENSG00000185686; TAA
SYISPEKEEQY

SEQ ID NO: 71592 - protein, 11 aa, Homo sapiens
  misc_feature: Table A; Target 71592; HLA-B*15:03; PRAME; ENSG00000185686; TAA
SYISPEKEEQY

SEQ ID NO: 71593 - protein, 11 aa, Homo sapiens
  misc_feature: Table A; Target 71593; HLA-C*01:02; PRAME; ENSG00000185686; TAA
SYISPEKEEQY

SEQ ID NO: 71594 - protein, 11 aa, Homo sapiens
  misc_feature: Table A; Target 71594; HLA-C*14:02; PRAME; ENSG00000185686; TAA
SYISPEKEEQY

SEQ ID NO: 71595 - protein, 11 aa, Homo sapiens
  misc_feature: Table A; Target 71595; HLA-C*16:01; PRAME; ENSG00000185686; TAA
SYISPEKEEQY

SEQ ID NO: 71596 - protein, 11 aa, Homo sapiens
  misc_feature: Table A; Target 71596; HLA-C*16:02; PRAME; ENSG00000185686; TAA
SYISPEKEEQY

SEQ ID NO: 71597 - protein, 11 aa, Homo sapiens
  misc_feature: Table A; Target 71597; HLA-C*16:04; PRAME; ENSG00000185686; TAA
SYISPEKEEQY

SEQ ID NO: 71598 - protein, 8 aa, Homo sapiens
  misc_feature: Table A; Target 71598; HLA-C*07:01; PRAME; ENSG00000185686; TAA
SYLIEKVK

SEQ ID NO: 71599 - protein, 9 aa, Homo sapiens
  misc_feature: Table A; Target 71599; HLA-A*31:01; PRAME; ENSG00000185686; TAA
SYLIEKVKR

SEQ ID NO: 71600 - protein, 9 aa, Homo sapiens
  misc_feature: Table A; Target 71600; HLA-A*33:01; PRAME; ENSG00000185686; TAA
SYLIEKVKR

SEQ ID NO: 71601 - protein, 9 aa, Homo sapiens
  misc_feature: Table A; Target 71601; HLA-A*33:03; PRAME; ENSG00000185686; TAA
SYLIEKVKR

SEQ ID NO: 71602 - protein, 9 aa, Homo sapiens
  misc_feature: Table A; Target 71602; HLA-A*23:01; PRAME; ENSG00000185686; TAA
TCLPLGVLM

SEQ ID NO: 71603 - protein, 9 aa, Homo sapiens
  misc_feature: Table A; Target 71603; HLA-B*15:03; PRAME; ENSG00000185686; TAA
TCLPLGVLM

SEQ ID NO: 71604 - protein, 9 aa, Homo sapiens
  misc_feature: Table A; Target 71604; HLA-C*04:01; PRAME; ENSG00000185686; TAA
TCLPLGVLM

SEQ ID NO: 71605 - protein, 9 aa, Homo sapiens
  misc_feature: Table A; Target 71605; HLA-C*07:01; PRAME; ENSG00000185686; TAA
TCLPLGVLM

SEQ ID NO: 71606 - protein, 10 aa, Homo sapiens
  misc_feature: Table A; Target 71606; HLA-B*27:02; PRAME; ENSG00000185686; TAA
TCLPLGVLMK

SEQ ID NO: 71607 - protein, 8 aa, Homo sapiens
  misc_feature: Table A; Target 71607; HLA-A*30:01; PRAME; ENSG00000185686; TAA
TDVSPEPL

SEQ ID NO: 71608 - protein, 8 aa, Homo sapiens
  misc_feature: Table A; Target 71608; HLA-B*37:01; PRAME; ENSG00000185686; TAA
TDVSPEPL

SEQ ID NO: 71609 - protein, 8 aa, Homo sapiens
  misc_feature: Table A; Target 71609; HLA-C*04:01; PRAME; ENSG00000185686; TAA
TDVSPEPL

SEQ ID NO: 71610 - protein, 9 aa, Homo sapiens
  misc_feature: Table A; Target 71610; HLA-C*06:02; PRAME; ENSG00000185686; TAA
TDVSPEPLQ

SEQ ID NO: 71611 - protein, 9 aa, Homo sapiens
  misc_feature: Table A; Target 71611; HLA-C*07:01; PRAME; ENSG00000185686; TAA
TDVSPEPLQ

SEQ ID NO: 71612 - protein, 9 aa, Homo sapiens
  misc_feature: Table A; Target 71612; HLA-C*07:02; PRAME; ENSG00000185686; TAA
TDVSPEPLQ

SEQ ID NO: 71613 - protein, 9 aa, Homo sapiens
  misc_feature: Table A; Target 71613; HLA-C*12:03; PRAME; ENSG00000185686; TAA
TDVSPEPLQ

SEQ ID NO: 71614 - protein, 11 aa, Homo sapiens
  misc_feature: Table A; Target 71614; HLA-A*30:01; PRAME; ENSG00000185686; TAA
TDVSPEPLQAL

SEQ ID NO: 71615 - protein, 11 aa, Homo sapiens
  misc_feature: Table A; Target 71615; HLA-A*68:02; PRAME; ENSG00000185686; TAA
TDVSPEPLQAL

SEQ ID NO: 71616 - protein, 11 aa, Homo sapiens
  misc_feature: Table A; Target 71616; HLA-B*38:01; PRAME; ENSG00000185686; TAA
TDVSPEPLQAL

SEQ ID NO: 71617 - protein, 8 aa, Homo sapiens
  misc_feature: Table A; Target 71617; HLA-A*30:01; PRAME; ENSG00000185686; TAA
TEAEQPFI

SEQ ID NO: 71618 - protein, 8 aa, Homo sapiens
  misc_feature: Table A; Target 71618; HLA-B*13:02; PRAME; ENSG00000185686; TAA
TEAEQPFI

SEQ ID NO: 71619 - protein, 8 aa, Homo sapiens
  misc_feature: Table A; Target 71619; HLA-B*44:02; PRAME; ENSG00000185686; TAA
TEAEQPFI

SEQ ID NO: 71620 - protein, 8 aa, Homo sapiens
  misc_feature: Table A; Target 71620; HLA-B*49:01; PRAME; ENSG00000185686; TAA
TEAEQPFI

SEQ ID NO: 71621 - protein, 8 aa, Homo sapiens
  misc_feature: Table A; Target 71621; HLA-B*51:01; PRAME; ENSG00000185686; TAA
TEAEQPFI

SEQ ID NO: 71622 - protein, 10 aa, Homo sapiens
  misc_feature: Table A; Target 71622; HLA-A*30:01; PRAME; ENSG00000185686; TAA
TEAEQPFIPV

SEQ ID NO: 71623 - protein, 10 aa, Homo sapiens
  misc_feature: Table A; Target 71623; HLA-A*68:02; PRAME; ENSG00000185686; TAA
TEAEQPFIPV

SEQ ID NO: 71624 - protein, 10 aa, Homo sapiens
  misc_feature: Table A; Target 71624; HLA-B*40:02; PRAME; ENSG00000185686; TAA
TEAEQPFIPV

SEQ ID NO: 71625 - protein, 10 aa, Homo sapiens
  misc_feature: Table A; Target 71625; HLA-B*49:01; PRAME; ENSG00000185686; TAA
TEAEQPFIPV

SEQ ID NO: 71626 - protein, 9 aa, Homo sapiens
  misc_feature: Table A; Target 71626; HLA-A*23:01; PRAME; ENSG00000185686; TAA
TFKAVLDGL

SEQ ID NO: 71627 - protein, 9 aa, Homo sapiens
  misc_feature: Table A; Target 71627; HLA-A*23:01; PRAME; ENSG00000185686; TAA
TFYDPEPIL

SEQ ID NO: 71628 - protein, 9 aa, Homo sapiens
  misc_feature: Table A; Target 71628; HLA-A*24:02; PRAME; ENSG00000185686; TAA
TFYDPEPIL

SEQ ID NO: 71629 - protein, 9 aa, Homo sapiens
  misc_feature: Table A; Target 71629; HLA-B*35:03; PRAME; ENSG00000185686; TAA
TFYDPEPIL

SEQ ID NO: 71630 - protein, 9 aa, Homo sapiens
  misc_feature: Table A; Target 71630; HLA-B*38:01; PRAME; ENSG00000185686; TAA
TFYDPEPIL

SEQ ID NO: 71631 - protein, 9 aa, Homo sapiens
  misc_feature: Table A; Target 71631; HLA-C*14:02; PRAME; ENSG00000185686; TAA
TFYDPEPIL

SEQ ID NO: 71632 - protein, 9 aa, Homo sapiens
  misc_feature: Table A; Target 71632; HLA-B*38:01; PRAME; ENSG00000185686; TAA
THVLYPVPL

SEQ ID NO: 71633 - protein, 9 aa, Homo sapiens
  misc_feature: Table A; Target 71633; HLA-B*39:01; PRAME; ENSG00000185686; TAA
THVLYPVPL

SEQ ID NO: 71634 - protein, 9 aa, Homo sapiens
  misc_feature: Table A; Target 71634; HLA-C*04:01; PRAME; ENSG00000185686; TAA
THVLYPVPL

SEQ ID NO: 71635 - protein, 9 aa, Homo sapiens
  misc_feature: Table A; Target 71635; HLA-C*06:02; PRAME; ENSG00000185686; TAA
THVLYPVPL

SEQ ID NO: 71636 - protein, 9 aa, Homo sapiens
  misc_feature: Table A; Target 71636; HLA-C*07:01; PRAME; ENSG00000185686; TAA
THVLYPVPL

SEQ ID NO: 71637 - protein, 9 aa, Homo sapiens
  misc_feature: Table A; Target 71637; HLA-A*02:01; PRAME; ENSG00000185686; TAA
TLAKFSPYL

SEQ ID NO: 71638 - protein, 9 aa, Homo sapiens
  misc_feature: Table A; Target 71638; HLA-A*02:03; PRAME; ENSG00000185686; TAA
TLAKFSPYL

SEQ ID NO: 71639 - protein, 9 aa, Homo sapiens
  misc_feature: Table A; Target 71639; HLA-A*02:04; PRAME; ENSG00000185686; TAA
TLAKFSPYL

SEQ ID NO: 71640 - protein, 9 aa, Homo sapiens
  misc_feature: Table A; Target 71640; HLA-A*02:07; PRAME; ENSG00000185686; TAA
TLAKFSPYL

SEQ ID NO: 71641 - protein, 9 aa, Homo sapiens
  misc_feature: Table A; Target 71641; HLA-A*01:01; PRAME; ENSG00000185686; TAA
TLHLERLAY

SEQ ID NO: 71642 - protein, 9 aa, Homo sapiens
  misc_feature: Table A; Target 71642; HLA-A*29:02; PRAME; ENSG00000185686; TAA
TLHLERLAY

SEQ ID NO: 71643 - protein, 9 aa, Homo sapiens
  misc_feature: Table A; Target 71643; HLA-A*30:02; PRAME; ENSG00000185686; TAA
TLHLERLAY

SEQ ID NO: 71644 - protein, 9 aa, Homo sapiens
  misc_feature: Table A; Target 71644; HLA-A*32:01; PRAME; ENSG00000185686; TAA
TLHLERLAY

SEQ ID NO: 71645 - protein, 9 aa, Homo sapiens
  misc_feature: Table A; Target 71645; HLA-B*15:01; PRAME; ENSG00000185686; TAA
TLHLERLAY

SEQ ID NO: 71646 - protein, 9 aa, Homo sapiens
  misc_feature: Table A; Target 71646; HLA-B*46:01; PRAME; ENSG00000185686; TAA
TLHLERLAY

SEQ ID NO: 71647 - protein, 10 aa, Homo sapiens
  misc_feature: Table A; Target 71647; HLA-A*02:03; PRAME; ENSG00000185686; TAA
TLHLERLAYL

SEQ ID NO: 71648 - protein, 10 aa, Homo sapiens
  misc_feature: Table A; Target 71648; HLA-A*02:04; PRAME; ENSG00000185686; TAA
TLHLERLAYL

SEQ ID NO: 71649 - protein, 9 aa, Homo sapiens
  misc_feature: Table A; Target 71649; HLA-A*25:01; PRAME; ENSG00000185686; TAA
TLKAMVQAW

SEQ ID NO: 71650 - protein, 9 aa, Homo sapiens
  misc_feature: Table A; Target 71650; HLA-A*32:01; PRAME; ENSG00000185686; TAA
TLKAMVQAW

SEQ ID NO: 71651 - protein, 9 aa, Homo sapiens
  misc_feature: Table A; Target 71651; HLA-B*08:01; PRAME; ENSG00000185686; TAA
TLKAMVQAW

SEQ ID NO: 71652 - protein, 9 aa, Homo sapiens
  misc_feature: Table A; Target 71652; HLA-B*57:01; PRAME; ENSG00000185686; TAA
TLKAMVQAW

SEQ ID NO: 71653 - protein, 9 aa, Homo sapiens
  misc_feature: Table A; Target 71653; HLA-B*13:02; PRAME; ENSG00000185686; TAA
TLSFYGNSI

SEQ ID NO: 71654 - protein, 9 aa, Homo sapiens
  misc_feature: Table A; Target 71654; HLA-B*38:01; PRAME; ENSG00000185686; TAA
TLSFYGNSI

SEQ ID NO: 71655 - protein, 9 aa, Homo sapiens
  misc_feature: Table A; Target 71655; HLA-B*39:01; PRAME; ENSG00000185686; TAA
TLSFYGNSI

SEQ ID NO: 71656 - protein, 9 aa, Homo sapiens
  misc_feature: Table A; Target 71656; HLA-C*01:02; PRAME; ENSG00000185686; TAA
TLSFYGNSI

SEQ ID NO: 71657 - protein, 9 aa, Homo sapiens
  misc_feature: Table A; Target 71657; HLA-C*07:04; PRAME; ENSG00000185686; TAA
TLSFYGNSI

SEQ ID NO: 71658 - protein, 9 aa, Homo sapiens
  misc_feature: Table A; Target 71658; HLA-A*02:07; PRAME; ENSG00000185686; TAA
TSPRRLVEL

SEQ ID NO: 71659 - protein, 9 aa, Homo sapiens
  misc_feature: Table A; Target 71659; HLA-C*01:02; PRAME; ENSG00000185686; TAA
TSPRRLVEL

SEQ ID NO: 71660 - protein, 10 aa, Homo sapiens
  misc_feature: Table A; Target 71660; HLA-A*25:01; PRAME; ENSG00000185686; TAA
TTLSFYGNSI

SEQ ID NO: 71661 - protein, 10 aa, Homo sapiens
  misc_feature: Table A; Target 71661; HLA-A*25:01; PRAME; ENSG00000185686; TAA
TVWSGNRASL

SEQ ID NO: 71662 - protein, 10 aa, Homo sapiens
  misc_feature: Table A; Target 71662; HLA-A*32:01; PRAME; ENSG00000185686; TAA
TVWSGNRASL

SEQ ID NO: 71663 - protein, 10 aa, Homo sapiens
  misc_feature: Table A; Target 71663; HLA-B*07:02; PRAME; ENSG00000185686; TAA
TVWSGNRASL

SEQ ID NO: 71664 - protein, 10 aa, Homo sapiens
  misc_feature: Table A; Target 71664; HLA-C*07:02; PRAME; ENSG00000185686; TAA
TVWSGNRASL

SEQ ID NO: 71665 - protein, 11 aa, Homo sapiens
  misc_feature: Table A; Target 71665; HLA-A*01:01; PRAME; ENSG00000185686; TAA
TVWSGNRASLY

SEQ ID NO: 71666 - protein, 11 aa, Homo sapiens
  misc_feature: Table A; Target 71666; HLA-A*03:01; PRAME; ENSG00000185686; TAA
TVWSGNRASLY

SEQ ID NO: 71667 - protein, 11 aa, Homo sapiens
  misc_feature: Table A; Target 71667; HLA-A*26:01; PRAME; ENSG00000185686; TAA
TVWSGNRASLY

SEQ ID NO: 71668 - protein, 11 aa, Homo sapiens
  misc_feature: Table A; Target 71668; HLA-A*29:02; PRAME; ENSG00000185686; TAA
TVWSGNRASLY

SEQ ID NO: 71669 - protein, 11 aa, Homo sapiens
  misc_feature: Table A; Target 71669; HLA-A*30:02; PRAME; ENSG00000185686; TAA
TVWSGNRASLY

SEQ ID NO: 71670 - protein, 10 aa, Homo sapiens
  misc_feature: Table A; Target 71670; HLA-A*24:02; PRAME; ENSG00000185686; TAA
TWKLPTLAKF

SEQ ID NO: 71671 - protein, 8 aa, Homo sapiens
  misc_feature: Table A; Target 71671; HLA-A*30:01; PRAME; ENSG00000185686; TAA
VELAGQSL

SEQ ID NO: 71672 - protein, 8 aa, Homo sapiens
  misc_feature: Table A; Target 71672; HLA-B*15:03; PRAME; ENSG00000185686; TAA
VELAGQSL

SEQ ID NO: 71673 - protein, 8 aa, Homo sapiens
  misc_feature: Table A; Target 71673; HLA-B*18:01; PRAME; ENSG00000185686; TAA
VELAGQSL

SEQ ID NO: 71674 - protein, 8 aa, Homo sapiens
  misc_feature: Table A; Target 71674; HLA-B*37:01; PRAME; ENSG00000185686; TAA
VELAGQSL

SEQ ID NO: 71675 - protein, 8 aa, Homo sapiens
  misc_feature: Table A; Target 71675; HLA-B*40:01; PRAME; ENSG00000185686; TAA
VELAGQSL

SEQ ID NO: 71676 - protein, 8 aa, Homo sapiens
  misc_feature: Table A; Target 71676; HLA-B*40:02; PRAME; ENSG00000185686; TAA
VELAGQSL

SEQ ID NO: 71677 - protein, 8 aa, Homo sapiens
  misc_feature: Table A; Target 71677; HLA-B*44:02; PRAME; ENSG00000185686; TAA
VELAGQSL

SEQ ID NO: 71678 - protein, 8 aa, Homo sapiens
  misc_feature: Table A; Target 71678; HLA-B*44:03; PRAME; ENSG00000185686; TAA
VELAGQSL

SEQ ID NO: 71679 - protein, 8 aa, Homo sapiens
  misc_feature: Table A; Target 71679; HLA-B*49:01; PRAME; ENSG00000185686; TAA
VELAGQSL

SEQ ID NO: 71680 - protein, 8 aa, Homo sapiens
  misc_feature: Table A; Target 71680; HLA-C*01:02; PRAME; ENSG00000185686; TAA
VELAGQSL

SEQ ID NO: 71681 - protein, 8 aa, Homo sapiens
  misc_feature: Table A; Target 71681; HLA-C*03:04; PRAME; ENSG00000185686; TAA
VELAGQSL

SEQ ID NO: 71682 - protein, 8 aa, Homo sapiens
  misc_feature: Table A; Target 71682; HLA-C*14:02; PRAME; ENSG00000185686; TAA
VELAGQSL

SEQ ID NO: 71683 - protein, 8 aa, Homo sapiens
  misc_feature: Table A; Target 71683; HLA-C*16:04; PRAME; ENSG00000185686; TAA
VELAGQSL

SEQ ID NO: 71684 - protein, 9 aa, Homo sapiens
  misc_feature: Table A; Target 71684; HLA-A*23:01; PRAME; ENSG00000185686; TAA
VELAGQSLL

SEQ ID NO: 71685 - protein, 9 aa, Homo sapiens
  misc_feature: Table A; Target 71685; HLA-A*24:02; PRAME; ENSG00000185686; TAA
VELAGQSLL

SEQ ID NO: 71686 - protein, 9 aa, Homo sapiens
  misc_feature: Table A; Target 71686; HLA-A*30:01; PRAME; ENSG00000185686; TAA
VELAGQSLL

SEQ ID NO: 71687 - protein, 9 aa, Homo sapiens
  misc_feature: Table A; Target 71687; HLA-B*13:02; PRAME; ENSG00000185686; TAA
VELAGQSLL

SEQ ID NO: 71688 - protein, 9 aa, Homo sapiens
  misc_feature: Table A; Target 71688; HLA-B*15:03; PRAME; ENSG00000185686; TAA
VELAGQSLL

SEQ ID NO: 71689 - protein, 9 aa, Homo sapiens
  misc_feature: Table A; Target 71689; HLA-B*18:01; PRAME; ENSG00000185686; TAA
VELAGQSLL

SEQ ID NO: 71690 - protein, 9 aa, Homo sapiens
  misc_feature: Table A; Target 71690; HLA-B*37:01; PRAME; ENSG00000185686; TAA
VELAGQSLL

SEQ ID NO: 71691 - protein, 9 aa, Homo sapiens
  misc_feature: Table A; Target 71691; HLA-B*40:01; PRAME; ENSG00000185686; TAA
VELAGQSLL

SEQ ID NO: 71692 - protein, 9 aa, Homo sapiens
  misc_feature: Table A; Target 71692; HLA-B*40:02; PRAME; ENSG00000185686; TAA
VELAGQSLL

SEQ ID NO: 71693 - protein, 9 aa, Homo sapiens
  misc_feature: Table A; Target 71693; HLA-B*44:02; PRAME; ENSG00000185686; TAA
VELAGQSLL

SEQ ID NO: 71694 - protein, 9 aa, Homo sapiens
  misc_feature: Table A; Target 71694; HLA-B*44:03; PRAME; ENSG00000185686; TAA
VELAGQSLL

SEQ ID NO: 71695 - protein, 9 aa, Homo sapiens
  misc_feature: Table A; Target 71695; HLA-B*49:01; PRAME; ENSG00000185686; TAA
VELAGQSLL

SEQ ID NO: 71696 - protein, 9 aa, Homo sapiens
  misc_feature: Table A; Target 71696; HLA-C*02:02; PRAME; ENSG00000185686; TAA
VELAGQSLL

SEQ ID NO: 71697 - protein, 9 aa, Homo sapiens
  misc_feature: Table A; Target 71697; HLA-C*03:04; PRAME; ENSG00000185686; TAA
VELAGQSLL

SEQ ID NO: 71698 - protein, 9 aa, Homo sapiens
  misc_feature: Table A; Target 71698; HLA-C*07:04; PRAME; ENSG00000185686; TAA
VELAGQSLL

SEQ ID NO: 71699 - protein, 9 aa, Homo sapiens
  misc_feature: Table A; Target 71699; HLA-C*16:04; PRAME; ENSG00000185686; TAA
VELAGQSLL

SEQ ID NO: 71700 - protein, 10 aa, Homo sapiens
  misc_feature: Table A; Target 71700; HLA-B*27:02; PRAME; ENSG00000185686; TAA
VELAGQSLLK

SEQ ID NO: 71701 - protein, 8 aa, Homo sapiens
  misc_feature: Table A; Target 71701; HLA-B*18:01; PRAME; ENSG00000185686; TAA
VEVLVDLF

SEQ ID NO: 71702 - protein, 8 aa, Homo sapiens
  misc_feature: Table A; Target 71702; HLA-B*37:01; PRAME; ENSG00000185686; TAA
VEVLVDLF

SEQ ID NO: 71703 - protein, 8 aa, Homo sapiens
  misc_feature: Table A; Target 71703; HLA-B*49:01; PRAME; ENSG00000185686; TAA
VEVLVDLF

SEQ ID NO: 71704 - protein, 8 aa, Homo sapiens
  misc_feature: Table A; Target 71704; HLA-C*05:01; PRAME; ENSG00000185686; TAA
VLDGLDVL

SEQ ID NO: 71705 - protein, 9 aa, Homo sapiens
  misc_feature: Table A; Target 71705; HLA-A*02:01; PRAME; ENSG00000185686; TAA
VLDGLDVLL

SEQ ID NO: 71706 - protein, 9 aa, Homo sapiens
  misc_feature: Table A; Target 71706; HLA-A*02:04; PRAME; ENSG00000185686; TAA
VLDGLDVLL

SEQ ID NO: 71707 - protein, 9 aa, Homo sapiens
  misc_feature: Table A; Target 71707; HLA-A*02:07; PRAME; ENSG00000185686; TAA
VLDGLDVLL

SEQ ID NO: 71708 - protein, 9 aa, Homo sapiens
  misc_feature: Table A; Target 71708; HLA-B*35:03; PRAME; ENSG00000185686; TAA
VLDGLDVLL

SEQ ID NO: 71709 - protein, 9 aa, Homo sapiens
  misc_feature: Table A; Target 71709; HLA-B*38:01; PRAME; ENSG00000185686; TAA
VLDGLDVLL

SEQ ID NO: 71710 - protein, 9 aa, Homo sapiens
  misc_feature: Table A; Target 71710; HLA-B*55:01; PRAME; ENSG00000185686; TAA
VLDGLDVLL

SEQ ID NO: 71711 - protein, 9 aa, Homo sapiens
  misc_feature: Table A; Target 71711; HLA-C*04:01; PRAME; ENSG00000185686; TAA
VLDGLDVLL

SEQ ID NO: 71712 - protein, 9 aa, Homo sapiens
  misc_feature: Table A; Target 71712; HLA-C*05:01; PRAME; ENSG00000185686; TAA
VLDGLDVLL

SEQ ID NO: 71713 - protein, 9 aa, Homo sapiens
  misc_feature: Table A; Target 71713; HLA-C*07:04; PRAME; ENSG00000185686; TAA
VLDGLDVLL

SEQ ID NO: 71714 - protein, 10 aa, Homo sapiens
  misc_feature: Table A; Target 71714; HLA-A*02:07; PRAME; ENSG00000185686; TAA
VLDGLDVLLA

SEQ ID NO: 71715 - protein, 10 aa, Homo sapiens
  misc_feature: Table A; Target 71715; HLA-A*03:01; PRAME; ENSG00000185686; TAA
VLLAQEVRPR

SEQ ID NO: 71716 - protein, 10 aa, Homo sapiens
  misc_feature: Table A; Target 71716; HLA-A*31:01; PRAME; ENSG00000185686; TAA
VLLAQEVRPR

SEQ ID NO: 71717 - protein, 8 aa, Homo sapiens
  misc_feature: Table A; Target 71717; HLA-B*08:01; PRAME; ENSG00000185686; TAA
VLMKGQHL

SEQ ID NO: 71718 - protein, 9 aa, Homo sapiens
  misc_feature: Table A; Target 71718; HLA-A*02:01; PRAME; ENSG00000185686; TAA
VLSLSGVML

SEQ ID NO: 71719 - protein, 9 aa, Homo sapiens
  misc_feature: Table A; Target 71719; HLA-A*02:01; PRAME; ENSG00000185686; TAA
VLYPVPLES

SEQ ID NO: 71720 - protein, 9 aa, Homo sapiens
  misc_feature: Table A; Target 71720; HLA-A*02:03; PRAME; ENSG00000185686; TAA
VLYPVPLES

SEQ ID NO: 71721 - protein, 9 aa, Homo sapiens
  misc_feature: Table A; Target 71721; HLA-A*02:07; PRAME; ENSG00000185686; TAA
VLYPVPLES

SEQ ID NO: 71722 - protein, 9 aa, Homo sapiens
  misc_feature: Table A; Target 71722; HLA-A*03:01; PRAME; ENSG00000185686; TAA
VLYPVPLES

SEQ ID NO: 71723 - protein, 9 aa, Homo sapiens
  misc_feature: Table A; Target 71723; HLA-A*29:02; PRAME; ENSG00000185686; TAA
VLYPVPLES

SEQ ID NO: 71724 - protein, 9 aa, Homo sapiens
  misc_feature: Table A; Target 71724; HLA-B*13:02; PRAME; ENSG00000185686; TAA
VLYPVPLES

SEQ ID NO: 71725 - protein, 9 aa, Homo sapiens
  misc_feature: Table A; Target 71725; HLA-B*46:01; PRAME; ENSG00000185686; TAA
VLYPVPLES

SEQ ID NO: 71726 - protein, 9 aa, Homo sapiens
  misc_feature: Table A; Target 71726; HLA-B*55:01; PRAME; ENSG00000185686; TAA
VLYPVPLES

SEQ ID NO: 71727 - protein, 9 aa, Homo sapiens
  misc_feature: Table A; Target 71727; HLA-C*06:02; PRAME; ENSG00000185686; TAA
VLYPVPLES

SEQ ID NO: 71728 - protein, 9 aa, Homo sapiens
  misc_feature: Table A; Target 71728; HLA-C*12:03; PRAME; ENSG00000185686; TAA
VLYPVPLES

SEQ ID NO: 71729 - protein, 10 aa, Homo sapiens
  misc_feature: Table A; Target 71729; HLA-A*01:01; PRAME; ENSG00000185686; TAA
VLYPVPLESY

SEQ ID NO: 71730 - protein, 10 aa, Homo sapiens
  misc_feature: Table A; Target 71730; HLA-A*02:01; PRAME; ENSG00000185686; TAA
VLYPVPLESY

SEQ ID NO: 71731 - protein, 10 aa, Homo sapiens
  misc_feature: Table A; Target 71731; HLA-A*02:03; PRAME; ENSG00000185686; TAA
VLYPVPLESY

SEQ ID NO: 71732 - protein, 10 aa, Homo sapiens
  misc_feature: Table A; Target 71732; HLA-A*02:07; PRAME; ENSG00000185686; TAA
VLYPVPLESY

SEQ ID NO: 71733 - protein, 10 aa, Homo sapiens
  misc_feature: Table A; Target 71733; HLA-A*03:01; PRAME; ENSG00000185686; TAA
VLYPVPLESY

SEQ ID NO: 71734 - protein, 10 aa, Homo sapiens
  misc_feature: Table A; Target 71734; HLA-A*03:02; PRAME; ENSG00000185686; TAA
VLYPVPLESY

SEQ ID NO: 71735 - protein, 10 aa, Homo sapiens
  misc_feature: Table A; Target 71735; HLA-A*23:01; PRAME; ENSG00000185686; TAA
VLYPVPLESY

SEQ ID NO: 71736 - protein, 10 aa, Homo sapiens
  misc_feature: Table A; Target 71736; HLA-A*25:01; PRAME; ENSG00000185686; TAA
VLYPVPLESY

SEQ ID NO: 71737 - protein, 10 aa, Homo sapiens
  misc_feature: Table A; Target 71737; HLA-A*26:01; PRAME; ENSG00000185686; TAA
VLYPVPLESY

SEQ ID NO: 71738 - protein, 10 aa, Homo sapiens
  misc_feature: Table A; Target 71738; HLA-A*29:02; PRAME; ENSG00000185686; TAA
VLYPVPLESY

SEQ ID NO: 71739 - protein, 10 aa, Homo sapiens
  misc_feature: Table A; Target 71739; HLA-A*30:02; PRAME; ENSG00000185686; TAA
VLYPVPLESY

SEQ ID NO: 71740 - protein, 10 aa, Homo sapiens
  misc_feature: Table A; Target 71740; HLA-A*31:01; PRAME; ENSG00000185686; TAA
VLYPVPLESY

SEQ ID NO: 71741 - protein, 10 aa, Homo sapiens
  misc_feature: Table A; Target 71741; HLA-A*32:01; PRAME; ENSG00000185686; TAA
VLYPVPLESY

SEQ ID NO: 71742 - protein, 10 aa, Homo sapiens
  misc_feature: Table A; Target 71742; HLA-B*15:01; PRAME; ENSG00000185686; TAA
VLYPVPLESY

SEQ ID NO: 71743 - protein, 10 aa, Homo sapiens
  misc_feature: Table A; Target 71743; HLA-B*15:03; PRAME; ENSG00000185686; TAA
VLYPVPLESY

SEQ ID NO: 71744 - protein, 10 aa, Homo sapiens
  misc_feature: Table A; Target 71744; HLA-B*18:01; PRAME; ENSG00000185686; TAA
VLYPVPLESY

SEQ ID NO: 71745 - protein, 10 aa, Homo sapiens
  misc_feature: Table A; Target 71745; HLA-B*35:01; PRAME; ENSG00000185686; TAA
VLYPVPLESY

SEQ ID NO: 71746 - protein, 10 aa, Homo sapiens
  misc_feature: Table A; Target 71746; HLA-B*39:01; PRAME; ENSG00000185686; TAA
VLYPVPLESY

SEQ ID NO: 71747 - protein, 10 aa, Homo sapiens
  misc_feature: Table A; Target 71747; HLA-B*46:01; PRAME; ENSG00000185686; TAA
VLYPVPLESY

SEQ ID NO: 71748 - protein, 10 aa, Homo sapiens
  misc_feature: Table A; Target 71748; HLA-B*55:01; PRAME; ENSG00000185686; TAA
VLYPVPLESY

SEQ ID NO: 71749 - protein, 10 aa, Homo sapiens
  misc_feature: Table A; Target 71749; HLA-B*56:01; PRAME; ENSG00000185686; TAA
VLYPVPLESY

SEQ ID NO: 71750 - protein, 10 aa, Homo sapiens
  misc_feature: Table A; Target 71750; HLA-B*57:01; PRAME; ENSG00000185686; TAA
VLYPVPLESY

SEQ ID NO: 71751 - protein, 10 aa, Homo sapiens
  misc_feature: Table A; Target 71751; HLA-B*58:01; PRAME; ENSG00000185686; TAA
VLYPVPLESY

SEQ ID NO: 71752 - protein, 10 aa, Homo sapiens
  misc_feature: Table A; Target 71752; HLA-C*01:02; PRAME; ENSG00000185686; TAA
VLYPVPLESY

SEQ ID NO: 71753 - protein, 10 aa, Homo sapiens
  misc_feature: Table A; Target 71753; HLA-C*02:02; PRAME; ENSG00000185686; TAA
VLYPVPLESY

SEQ ID NO: 71754 - protein, 10 aa, Homo sapiens
  misc_feature: Table A; Target 71754; HLA-C*07:01; PRAME; ENSG00000185686; TAA
VLYPVPLESY

SEQ ID NO: 71755 - protein, 10 aa, Homo sapiens
  misc_feature: Table A; Target 71755; HLA-C*07:04; PRAME; ENSG00000185686; TAA
VLYPVPLESY

SEQ ID NO: 71756 - protein, 10 aa, Homo sapiens
  misc_feature: Table A; Target 71756; HLA-C*12:03; PRAME; ENSG00000185686; TAA
VLYPVPLESY

SEQ ID NO: 71757 - protein, 10 aa, Homo sapiens
  misc_feature: Table A; Target 71757; HLA-C*14:02; PRAME; ENSG00000185686; TAA
VLYPVPLESY

SEQ ID NO: 71758 - protein, 10 aa, Homo sapiens
  misc_feature: Table A; Target 71758; HLA-C*16:04; PRAME; ENSG00000185686; TAA
VLYPVPLESY

SEQ ID NO: 71759 - protein, 11 aa, Homo sapiens
  misc_feature: Table A; Target 71759; HLA-A*02:01; PRAME; ENSG00000185686; TAA
VMLTDVSPEPL

SEQ ID NO: 71760 - protein, 8 aa, Homo sapiens
  misc_feature: Table A; Target 71760; HLA-A*02:01; PRAME; ENSG00000185686; TAA
VMNPLETL

SEQ ID NO: 71761 - protein, 8 aa, Homo sapiens
  misc_feature: Table A; Target 71761; HLA-A*02:04; PRAME; ENSG00000185686; TAA
VMNPLETL

SEQ ID NO: 71762 - protein, 8 aa, Homo sapiens
  misc_feature: Table A; Target 71762; HLA-A*23:01; PRAME; ENSG00000185686; TAA
VMNPLETL

SEQ ID NO: 71763 - protein, 8 aa, Homo sapiens
  misc_feature: Table A; Target 71763; HLA-A*24:02; PRAME; ENSG00000185686; TAA
VMNPLETL

SEQ ID NO: 71764 - protein, 8 aa, Homo sapiens
  misc_feature: Table A; Target 71764; HLA-A*32:01; PRAME; ENSG00000185686; TAA
VMNPLETL

SEQ ID NO: 71765 - protein, 8 aa, Homo sapiens
  misc_feature: Table A; Target 71765; HLA-B*08:01; PRAME; ENSG00000185686; TAA
VMNPLETL

SEQ ID NO: 71766 - protein, 8 aa, Homo sapiens
  misc_feature: Table A; Target 71766; HLA-B*15:01; PRAME; ENSG00000185686; TAA
VMNPLETL

SEQ ID NO: 71767 - protein, 8 aa, Homo sapiens
  misc_feature: Table A; Target 71767; HLA-B*37:01; PRAME; ENSG00000185686; TAA
VMNPLETL

SEQ ID NO: 71768 - protein, 8 aa, Homo sapiens
  misc_feature: Table A; Target 71768; HLA-B*39:01; PRAME; ENSG00000185686; TAA
VMNPLETL

SEQ ID NO: 71769 - protein, 8 aa, Homo sapiens
  misc_feature: Table A; Target 71769; HLA-B*40:02; PRAME; ENSG00000185686; TAA
VMNPLETL

SEQ ID NO: 71770 - protein, 8 aa, Homo sapiens
  misc_feature: Table A; Target 71770; HLA-B*46:01; PRAME; ENSG00000185686; TAA
VMNPLETL

SEQ ID NO: 71771 - protein, 8 aa, Homo sapiens
  misc_feature: Table A; Target 71771; HLA-B*55:01; PRAME; ENSG00000185686; TAA
VMNPLETL

SEQ ID NO: 71772 - protein, 8 aa, Homo sapiens
  misc_feature: Table A; Target 71772; HLA-B*58:01; PRAME; ENSG00000185686; TAA
VMNPLETL

SEQ ID NO: 71773 - protein, 8 aa, Homo sapiens
  misc_feature: Table A; Target 71773; HLA-C*14:02; PRAME; ENSG00000185686; TAA
VMNPLETL

SEQ ID NO: 71774 - protein, 8 aa, Homo sapiens
  misc_feature: Table A; Target 71774; HLA-C*16:02; PRAME; ENSG00000185686; TAA
VMNPLETL

SEQ ID NO: 71775 - protein, 10 aa, Homo sapiens
  misc_feature: Table A; Target 71775; HLA-A*02:01; PRAME; ENSG00000185686; TAA
VMNPLETLSI

SEQ ID NO: 71776 - protein, 10 aa, Homo sapiens
  misc_feature: Table A; Target 71776; HLA-A*02:03; PRAME; ENSG00000185686; TAA
VMNPLETLSI

SEQ ID NO: 71777 - protein, 10 aa, Homo sapiens
  misc_feature: Table A; Target 71777; HLA-A*02:07; PRAME; ENSG00000185686; TAA
VMNPLETLSI

SEQ ID NO: 71778 - protein, 10 aa, Homo sapiens
  misc_feature: Table A; Target 71778; HLA-A*23:01; PRAME; ENSG00000185686; TAA
VMNPLETLSI

SEQ ID NO: 71779 - protein, 10 aa, Homo sapiens
  misc_feature: Table A; Target 71779; HLA-A*24:02; PRAME; ENSG00000185686; TAA
VMNPLETLSI

SEQ ID NO: 71780 - protein, 10 aa, Homo sapiens
  misc_feature: Table A; Target 71780; HLA-B*13:02; PRAME; ENSG00000185686; TAA
VMNPLETLSI

SEQ ID NO: 71781 - protein, 9 aa, Homo sapiens
  misc_feature: Table A; Target 71781; HLA-B*35:01; PRAME; ENSG00000185686; TAA
VPLESYEDI

SEQ ID NO: 71782 - protein, 9 aa, Homo sapiens
  misc_feature: Table A; Target 71782; HLA-B*35:03; PRAME; ENSG00000185686; TAA
VPLESYEDI

SEQ ID NO: 71783 - protein, 9 aa, Homo sapiens
  misc_feature: Table A; Target 71783; HLA-B*51:01; PRAME; ENSG00000185686; TAA
VPLESYEDI

SEQ ID NO: 71784 - protein, 9 aa, Homo sapiens
  misc_feature: Table A; Target 71784; HLA-B*56:01; PRAME; ENSG00000185686; TAA
VPLESYEDI

SEQ ID NO: 71785 - protein, 9 aa, Homo sapiens
  misc_feature: Table A; Target 71785; HLA-A*24:02; PRAME; ENSG00000185686; TAA
VQAWPFTCL

SEQ ID NO: 71786 - protein, 9 aa, Homo sapiens
  misc_feature: Table A; Target 71786; HLA-B*13:02; PRAME; ENSG00000185686; TAA
VQAWPFTCL

SEQ ID NO: 71787 - protein, 9 aa, Homo sapiens
  misc_feature: Table A; Target 71787; HLA-B*15:01; PRAME; ENSG00000185686; TAA
VQAWPFTCL

SEQ ID NO: 71788 - protein, 9 aa, Homo sapiens
  misc_feature: Table A; Target 71788; HLA-A*02:04; PRAME; ENSG00000185686; TAA
VQLDSIEDL

SEQ ID NO: 71789 - protein, 9 aa, Homo sapiens
  misc_feature: Table A; Target 71789; HLA-B*15:01; PRAME; ENSG00000185686; TAA
VQLDSIEDL

SEQ ID NO: 71790 - protein, 9 aa, Homo sapiens
  misc_feature: Table A; Target 71790; HLA-B*27:05; PRAME; ENSG00000185686; TAA
VQLDSIEDL

SEQ ID NO: 71791 - protein, 9 aa, Homo sapiens
  misc_feature: Table A; Target 71791; HLA-B*38:01; PRAME; ENSG00000185686; TAA
VQLDSIEDL

SEQ ID NO: 71792 - protein, 9 aa, Homo sapiens
  misc_feature: Table A; Target 71792; HLA-B*39:01; PRAME; ENSG00000185686; TAA
VQLDSIEDL

SEQ ID NO: 71793 - protein, 11 aa, Homo sapiens
  misc_feature: Table A; Target 71793; HLA-A*02:01; PRAME; ENSG00000185686; TAA
VQLDSIEDLEV

SEQ ID NO: 71794 - protein, 11 aa, Homo sapiens
  misc_feature: Table A; Target 71794; HLA-B*13:02; PRAME; ENSG00000185686; TAA
VQLDSIEDLEV

SEQ ID NO: 71795 - protein, 9 aa, Homo sapiens
  misc_feature: Table A; Target 71795; HLA-A*02:07; PRAME; ENSG00000185686; TAA
VSPEPLQAL

SEQ ID NO: 71796 - protein, 9 aa, Homo sapiens
  misc_feature: Table A; Target 71796; HLA-A*23:01; PRAME; ENSG00000185686; TAA
VSPEPLQAL

SEQ ID NO: 71797 - protein, 9 aa, Homo sapiens
  misc_feature: Table A; Target 71797; HLA-A*24:02; PRAME; ENSG00000185686; TAA
VSPEPLQAL

SEQ ID NO: 71798 - protein, 9 aa, Homo sapiens
  misc_feature: Table A; Target 71798; HLA-A*25:01; PRAME; ENSG00000185686; TAA
VSPEPLQAL

SEQ ID NO: 71799 - protein, 9 aa, Homo sapiens
  misc_feature: Table A; Target 71799; HLA-B*15:01; PRAME; ENSG00000185686; TAA
VSPEPLQAL

SEQ ID NO: 71800 - protein, 9 aa, Homo sapiens
  misc_feature: Table A; Target 71800; HLA-B*46:01; PRAME; ENSG00000185686; TAA
VSPEPLQAL

SEQ ID NO: 71801 - protein, 9 aa, Homo sapiens
  misc_feature: Table A; Target 71801; HLA-B*51:01; PRAME; ENSG00000185686; TAA
VSPEPLQAL

SEQ ID NO: 71802 - protein, 9 aa, Homo sapiens
  misc_feature: Table A; Target 71802; HLA-B*58:01; PRAME; ENSG00000185686; TAA
VSPEPLQAL

SEQ ID NO: 71803 - protein, 9 aa, Homo sapiens
  misc_feature: Table A; Target 71803; HLA-C*01:02; PRAME; ENSG00000185686; TAA
VSPEPLQAL

SEQ ID NO: 71804 - protein, 9 aa, Homo sapiens
  misc_feature: Table A; Target 71804; HLA-C*03:03; PRAME; ENSG00000185686; TAA
VSPEPLQAL

SEQ ID NO: 71805 - protein, 9 aa, Homo sapiens
  misc_feature: Table A; Target 71805; HLA-C*03:04; PRAME; ENSG00000185686; TAA
VSPEPLQAL

SEQ ID NO: 71806 - protein, 9 aa, Homo sapiens
  misc_feature: Table A; Target 71806; HLA-C*05:01; PRAME; ENSG00000185686; TAA
VSPEPLQAL

SEQ ID NO: 71807 - protein, 9 aa, Homo sapiens
  misc_feature: Table A; Target 71807; HLA-C*07:02; PRAME; ENSG00000185686; TAA
VSPEPLQAL

SEQ ID NO: 71808 - protein, 9 aa, Homo sapiens
  misc_feature: Table A; Target 71808; HLA-C*14:02; PRAME; ENSG00000185686; TAA
VSPEPLQAL

SEQ ID NO: 71809 - protein, 9 aa, Homo sapiens
  misc_feature: Table A; Target 71809; HLA-C*16:01; PRAME; ENSG00000185686; TAA
VSPEPLQAL

SEQ ID NO: 71810 - protein, 10 aa, Homo sapiens
  misc_feature: Table A; Target 71810; HLA-C*07:02; PRAME; ENSG00000185686; TAA
VSPEPLQALL

SEQ ID NO: 71811 - protein, 9 aa, Homo sapiens
  misc_feature: Table A; Target 71811; HLA-C*01:02; PRAME; ENSG00000185686; TAA
VSQLSVLSL

SEQ ID NO: 71812 - protein, 9 aa, Homo sapiens
  misc_feature: Table A; Target 71812; HLA-C*03:03; PRAME; ENSG00000185686; TAA
VSQLSVLSL

SEQ ID NO: 71813 - protein, 9 aa, Homo sapiens
  misc_feature: Table A; Target 71813; HLA-C*03:04; PRAME; ENSG00000185686; TAA
VSQLSVLSL

SEQ ID NO: 71814 - protein, 9 aa, Homo sapiens
  misc_feature: Table A; Target 71814; HLA-C*14:02; PRAME; ENSG00000185686; TAA
VSQLSVLSL

SEQ ID NO: 71815 - protein, 11 aa, Homo sapiens
  misc_feature: Table A; Target 71815; HLA-A*24:02; PRAME; ENSG00000185686; TAA
VWTSPRRLVEL

SEQ ID NO: 71816 - protein, 8 aa, Homo sapiens
  misc_feature: Table A; Target 71816; HLA-C*16:01; PRAME; ENSG00000185686; TAA
WSGNRASL

SEQ ID NO: 71817 - protein, 9 aa, Homo sapiens
  misc_feature: Table A; Target 71817; HLA-A*01:01; PRAME; ENSG00000185686; TAA
WSGNRASLY

SEQ ID NO: 71818 - protein, 8 aa, Homo sapiens
  misc_feature: Table A; Target 71818; HLA-A*30:01; PRAME; ENSG00000185686; TAA
YEDIHGTL

SEQ ID NO: 71819 - protein, 8 aa, Homo sapiens
  misc_feature: Table A; Target 71819; HLA-B*08:01; PRAME; ENSG00000185686; TAA
YEDIHGTL

SEQ ID NO: 71820 - protein, 8 aa, Homo sapiens
  misc_feature: Table A; Target 71820; HLA-B*18:01; PRAME; ENSG00000185686; TAA
YEDIHGTL

SEQ ID NO: 71821 - protein, 8 aa, Homo sapiens
  misc_feature: Table A; Target 71821; HLA-B*37:01; PRAME; ENSG00000185686; TAA
YEDIHGTL

SEQ ID NO: 71822 - protein, 8 aa, Homo sapiens
  misc_feature: Table A; Target 71822; HLA-B*38:01; PRAME; ENSG00000185686; TAA
YEDIHGTL

SEQ ID NO: 71823 - protein, 8 aa, Homo sapiens
  misc_feature: Table A; Target 71823; HLA-B*39:01; PRAME; ENSG00000185686; TAA
YEDIHGTL

SEQ ID NO: 71824 - protein, 8 aa, Homo sapiens
  misc_feature: Table A; Target 71824; HLA-B*40:01; PRAME; ENSG00000185686; TAA
YEDIHGTL

SEQ ID NO: 71825 - protein, 8 aa, Homo sapiens
  misc_feature: Table A; Target 71825; HLA-B*40:02; PRAME; ENSG00000185686; TAA
YEDIHGTL

SEQ ID NO: 71826 - protein, 8 aa, Homo sapiens
  misc_feature: Table A; Target 71826; HLA-B*49:01; PRAME; ENSG00000185686; TAA
YEDIHGTL

SEQ ID NO: 71827 - protein, 8 aa, Homo sapiens
  misc_feature: Table A; Target 71827; HLA-C*03:03; PRAME; ENSG00000185686; TAA
YEDIHGTL

SEQ ID NO: 71828 - protein, 8 aa, Homo sapiens
  misc_feature: Table A; Target 71828; HLA-C*03:04; PRAME; ENSG00000185686; TAA
YEDIHGTL

SEQ ID NO: 71829 - protein, 8 aa, Homo sapiens
  misc_feature: Table A; Target 71829; HLA-C*04:01; PRAME; ENSG00000185686; TAA
YEDIHGTL

SEQ ID NO: 71830 - protein, 8 aa, Homo sapiens
  misc_feature: Table A; Target 71830; HLA-C*05:01; PRAME; ENSG00000185686; TAA
YEDIHGTL

SEQ ID NO: 71831 - protein, 8 aa, Homo sapiens
  misc_feature: Table A; Target 71831; HLA-C*07:01; PRAME; ENSG00000185686; TAA
YEDIHGTL

SEQ ID NO: 71832 - protein, 8 aa, Homo sapiens
  misc_feature: Table A; Target 71832; HLA-C*07:04; PRAME; ENSG00000185686; TAA
YEDIHGTL

SEQ ID NO: 71833 - protein, 8 aa, Homo sapiens
  misc_feature: Table A; Target 71833; HLA-C*12:03; PRAME; ENSG00000185686; TAA
YEDIHGTL

SEQ ID NO: 71834 - protein, 8 aa, Homo sapiens
  misc_feature: Table A; Target 71834; HLA-C*16:02; PRAME; ENSG00000185686; TAA
YEDIHGTL

SEQ ID NO: 71835 - protein, 8 aa, Homo sapiens
  misc_feature: Table A; Target 71835; HLA-C*16:04; PRAME; ENSG00000185686; TAA
YEDIHGTL

SEQ ID NO: 71836 - protein, 9 aa, Homo sapiens
  misc_feature: Table A; Target 71836; HLA-A*01:01; PRAME; ENSG00000185686; TAA
YEDIHGTLH

SEQ ID NO: 71837 - protein, 9 aa, Homo sapiens
  misc_feature: Table A; Target 71837; HLA-B*18:01; PRAME; ENSG00000185686; TAA
YEDIHGTLH

SEQ ID NO: 71838 - protein, 9 aa, Homo sapiens
  misc_feature: Table A; Target 71838; HLA-B*37:01; PRAME; ENSG00000185686; TAA
YEDIHGTLH

SEQ ID NO: 71839 - protein, 9 aa, Homo sapiens
  misc_feature: Table A; Target 71839; HLA-B*40:01; PRAME; ENSG00000185686; TAA
YEDIHGTLH

SEQ ID NO: 71840 - protein, 9 aa, Homo sapiens
  misc_feature: Table A; Target 71840; HLA-B*49:01; PRAME; ENSG00000185686; TAA
YEDIHGTLH

SEQ ID NO: 71841 - protein, 10 aa, Homo sapiens
  misc_feature: Table A; Target 71841; HLA-A*30:01; PRAME; ENSG00000185686; TAA
YEDIHGTLHL

SEQ ID NO: 71842 - protein, 10 aa, Homo sapiens
  misc_feature: Table A; Target 71842; HLA-B*40:01; PRAME; ENSG00000185686; TAA
YEDIHGTLHL

SEQ ID NO: 71843 - protein, 10 aa, Homo sapiens
  misc_feature: Table A; Target 71843; HLA-B*40:02; PRAME; ENSG00000185686; TAA
YEDIHGTLHL

SEQ ID NO: 71844 - protein, 10 aa, Homo sapiens
  misc_feature: Table A; Target 71844; HLA-B*49:01; PRAME; ENSG00000185686; TAA
YEDIHGTLHL

SEQ ID NO: 71845 - protein, 9 aa, Homo sapiens
  misc_feature: Table A; Target 71845; HLA-A*32:01; PRAME; ENSG00000185686; TAA
YGNSISISA

SEQ ID NO: 71846 - protein, 9 aa, Homo sapiens
  misc_feature: Table A; Target 71846; HLA-B*35:03; PRAME; ENSG00000185686; TAA
YGNSISISA

SEQ ID NO: 71847 - protein, 9 aa, Homo sapiens
  misc_feature: Table A; Target 71847; HLA-B*46:01; PRAME; ENSG00000185686; TAA
YGNSISISA

SEQ ID NO: 71848 - protein, 9 aa, Homo sapiens
  misc_feature: Table A; Target 71848; HLA-B*54:01; PRAME; ENSG00000185686; TAA
YGNSISISA

SEQ ID NO: 71849 - protein, 9 aa, Homo sapiens
  misc_feature: Table A; Target 71849; HLA-B*56:01; PRAME; ENSG00000185686; TAA
YGNSISISA

SEQ ID NO: 71850 - protein, 9 aa, Homo sapiens
  misc_feature: Table A; Target 71850; HLA-C*02:02; PRAME; ENSG00000185686; TAA
YGNSISISA

SEQ ID NO: 71851 - protein, 9 aa, Homo sapiens
  misc_feature: Table A; Target 71851; HLA-C*03:04; PRAME; ENSG00000185686; TAA
YGNSISISA

SEQ ID NO: 71852 - protein, 9 aa, Homo sapiens
  misc_feature: Table A; Target 71852; HLA-C*12:03; PRAME; ENSG00000185686; TAA
YGNSISISA

SEQ ID NO: 71853 - protein, 9 aa, Homo sapiens
  misc_feature: Table A; Target 71853; HLA-C*14:02; PRAME; ENSG00000185686; TAA
YGNSISISA

SEQ ID NO: 71854 - protein, 9 aa, Homo sapiens
  misc_feature: Table A; Target 71854; HLA-C*16:04; PRAME; ENSG00000185686; TAA
YGNSISISA

SEQ ID NO: 71855 - protein, 10 aa, Homo sapiens
  misc_feature: Table A; Target 71855; HLA-A*25:01; PRAME; ENSG00000185686; TAA
YGNSISISAL

SEQ ID NO: 71856 - protein, 10 aa, Homo sapiens
  misc_feature: Table A; Target 71856; HLA-A*30:01; PRAME; ENSG00000185686; TAA
YGNSISISAL

SEQ ID NO: 71857 - protein, 10 aa, Homo sapiens
  misc_feature: Table A; Target 71857; HLA-B*27:05; PRAME; ENSG00000185686; TAA
YGNSISISAL

SEQ ID NO: 71858 - protein, 10 aa, Homo sapiens
  misc_feature: Table A; Target 71858; HLA-B*35:03; PRAME; ENSG00000185686; TAA
YGNSISISAL

SEQ ID NO: 71859 - protein, 10 aa, Homo sapiens
  misc_feature: Table A; Target 71859; HLA-B*40:01; PRAME; ENSG00000185686; TAA
YGNSISISAL

SEQ ID NO: 71860 - protein, 10 aa, Homo sapiens
  misc_feature: Table A; Target 71860; HLA-B*46:01; PRAME; ENSG00000185686; TAA
YGNSISISAL

SEQ ID NO: 71861 - protein, 10 aa, Homo sapiens
  misc_feature: Table A; Target 71861; HLA-C*01:02; PRAME; ENSG00000185686; TAA
YGNSISISAL

SEQ ID NO: 71862 - protein, 10 aa, Homo sapiens
  misc_feature: Table A; Target 71862; HLA-C*03:03; PRAME; ENSG00000185686; TAA
YGNSISISAL

SEQ ID NO: 71863 - protein, 10 aa, Homo sapiens
  misc_feature: Table A; Target 71863; HLA-C*03:04; PRAME; ENSG00000185686; TAA
YGNSISISAL

SEQ ID NO: 71864 - protein, 10 aa, Homo sapiens
  misc_feature: Table A; Target 71864; HLA-C*07:02; PRAME; ENSG00000185686; TAA
YGNSISISAL

SEQ ID NO: 71865 - protein, 10 aa, Homo sapiens
  misc_feature: Table A; Target 71865; HLA-C*07:04; PRAME; ENSG00000185686; TAA
YGNSISISAL

SEQ ID NO: 71866 - protein, 10 aa, Homo sapiens
  misc_feature: Table A; Target 71866; HLA-C*14:02; PRAME; ENSG00000185686; TAA
YGNSISISAL

SEQ ID NO: 71867 - protein, 9 aa, Homo sapiens
  misc_feature: Table A; Target 71867; HLA-A*02:03; PRAME; ENSG00000185686; TAA
YIAQFTSQF

SEQ ID NO: 71868 - protein, 9 aa, Homo sapiens
  misc_feature: Table A; Target 71868; HLA-A*02:07; PRAME; ENSG00000185686; TAA
YIAQFTSQF

SEQ ID NO: 71869 - protein, 9 aa, Homo sapiens
  misc_feature: Table A; Target 71869; HLA-A*23:01; PRAME; ENSG00000185686; TAA
YIAQFTSQF

SEQ ID NO: 71870 - protein, 9 aa, Homo sapiens
  misc_feature: Table A; Target 71870; HLA-A*24:02; PRAME; ENSG00000185686; TAA
YIAQFTSQF

SEQ ID NO: 71871 - protein, 9 aa, Homo sapiens
  misc_feature: Table A; Target 71871; HLA-A*25:01; PRAME; ENSG00000185686; TAA
YIAQFTSQF

SEQ ID NO: 71872 - protein, 9 aa, Homo sapiens
  misc_feature: Table A; Target 71872; HLA-A*26:01; PRAME; ENSG00000185686; TAA
YIAQFTSQF

SEQ ID NO: 71873 - protein, 9 aa, Homo sapiens
  misc_feature: Table A; Target 71873; HLA-A*29:02; PRAME; ENSG00000185686; TAA
YIAQFTSQF

SEQ ID NO: 71874 - protein, 9 aa, Homo sapiens
  misc_feature: Table A; Target 71874; HLA-A*32:01; PRAME; ENSG00000185686; TAA
YIAQFTSQF

SEQ ID NO: 71875 - protein, 9 aa, Homo sapiens
  misc_feature: Table A; Target 71875; HLA-A*68:02; PRAME; ENSG00000185686; TAA
YIAQFTSQF

SEQ ID NO: 71876 - protein, 9 aa, Homo sapiens
  misc_feature: Table A; Target 71876; HLA-B*15:01; PRAME; ENSG00000185686; TAA
YIAQFTSQF

SEQ ID NO: 71877 - protein, 9 aa, Homo sapiens
  misc_feature: Table A; Target 71877; HLA-B*15:03; PRAME; ENSG00000185686; TAA
YIAQFTSQF

SEQ ID NO: 71878 - protein, 9 aa, Homo sapiens
  misc_feature: Table A; Target 71878; HLA-B*35:01; PRAME; ENSG00000185686; TAA
YIAQFTSQF

SEQ ID NO: 71879 - protein, 9 aa, Homo sapiens
  misc_feature: Table A; Target 71879; HLA-B*46:01; PRAME; ENSG00000185686; TAA
YIAQFTSQF

SEQ ID NO: 71880 - protein, 9 aa, Homo sapiens
  misc_feature: Table A; Target 71880; HLA-C*01:02; PRAME; ENSG00000185686; TAA
YIAQFTSQF

SEQ ID NO: 71881 - protein, 9 aa, Homo sapiens
  misc_feature: Table A; Target 71881; HLA-C*02:02; PRAME; ENSG00000185686; TAA
YIAQFTSQF

SEQ ID NO: 71882 - protein, 9 aa, Homo sapiens
  misc_feature: Table A; Target 71882; HLA-C*07:04; PRAME; ENSG00000185686; TAA
YIAQFTSQF

SEQ ID NO: 71883 - protein, 9 aa, Homo sapiens
  misc_feature: Table A; Target 71883; HLA-C*12:03; PRAME; ENSG00000185686; TAA
YIAQFTSQF

SEQ ID NO: 71884 - protein, 9 aa, Homo sapiens
  misc_feature: Table A; Target 71884; HLA-C*14:02; PRAME; ENSG00000185686; TAA
YIAQFTSQF

SEQ ID NO: 71885 - protein, 9 aa, Homo sapiens
  misc_feature: Table A; Target 71885; HLA-C*16:04; PRAME; ENSG00000185686; TAA
YIAQFTSQF

SEQ ID NO: 71886 - protein, 10 aa, Homo sapiens
  misc_feature: Table A; Target 71886; HLA-A*02:03; PRAME; ENSG00000185686; TAA
YIAQFTSQFL

SEQ ID NO: 71887 - protein, 10 aa, Homo sapiens
  misc_feature: Table A; Target 71887; HLA-A*68:02; PRAME; ENSG00000185686; TAA
YIAQFTSQFL

SEQ ID NO: 71888 - protein, 10 aa, Homo sapiens
  misc_feature: Table A; Target 71888; HLA-C*02:02; PRAME; ENSG00000185686; TAA
YIAQFTSQFL

SEQ ID NO: 71889 - protein, 10 aa, Homo sapiens
  misc_feature: Table A; Target 71889; HLA-A*01:01; PRAME; ENSG00000185686; TAA
YISPEKEEQY

SEQ ID NO: 71890 - protein, 10 aa, Homo sapiens
  misc_feature: Table A; Target 71890; HLA-A*25:01; PRAME; ENSG00000185686; TAA
YISPEKEEQY

SEQ ID NO: 71891 - protein, 10 aa, Homo sapiens
  misc_feature: Table A; Target 71891; HLA-A*26:01; PRAME; ENSG00000185686; TAA
YISPEKEEQY

SEQ ID NO: 71892 - protein, 10 aa, Homo sapiens
  misc_feature: Table A; Target 71892; HLA-A*29:02; PRAME; ENSG00000185686; TAA
YISPEKEEQY

SEQ ID NO: 71893 - protein, 10 aa, Homo sapiens
  misc_feature: Table A; Target 71893; HLA-A*30:02; PRAME; ENSG00000185686; TAA
YISPEKEEQY

SEQ ID NO: 71894 - protein, 10 aa, Homo sapiens
  misc_feature: Table A; Target 71894; HLA-A*32:01; PRAME; ENSG00000185686; TAA
YISPEKEEQY

SEQ ID NO: 71895 - protein, 10 aa, Homo sapiens
  misc_feature: Table A; Target 71895; HLA-B*15:01; PRAME; ENSG00000185686; TAA
YISPEKEEQY

SEQ ID NO: 71896 - protein, 10 aa, Homo sapiens
  misc_feature: Table A; Target 71896; HLA-B*15:03; PRAME; ENSG00000185686; TAA
YISPEKEEQY

SEQ ID NO: 71897 - protein, 10 aa, Homo sapiens
  misc_feature: Table A; Target 71897; HLA-B*35:01; PRAME; ENSG00000185686; TAA
YISPEKEEQY

SEQ ID NO: 71898 - protein, 10 aa, Homo sapiens
  misc_feature: Table A; Target 71898; HLA-B*46:01; PRAME; ENSG00000185686; TAA
YISPEKEEQY

SEQ ID NO: 71899 - protein, 10 aa, Homo sapiens
  misc_feature: Table A; Target 71899; HLA-B*58:01; PRAME; ENSG00000185686; TAA
YISPEKEEQY

SEQ ID NO: 71900 - protein, 10 aa, Homo sapiens
  misc_feature: Table A; Target 71900; HLA-C*03:03; PRAME; ENSG00000185686; TAA
YISPEKEEQY

SEQ ID NO: 71901 - protein, 10 aa, Homo sapiens
  misc_feature: Table A; Target 71901; HLA-C*07:04; PRAME; ENSG00000185686; TAA
YISPEKEEQY

SEQ ID NO: 71902 - protein, 11 aa, Homo sapiens
  misc_feature: Table A; Target 71902; HLA-A*68:02; PRAME; ENSG00000185686; TAA
YISPEKEEQYI

SEQ ID NO: 71903 - protein, 8 aa, Homo sapiens
  misc_feature: Table A; Target 71903; HLA-A*02:01; PRAME; ENSG00000185686; TAA
YLGQMINL

SEQ ID NO: 71904 - protein, 8 aa, Homo sapiens
  misc_feature: Table A; Target 71904; HLA-A*02:03; PRAME; ENSG00000185686; TAA
YLGQMINL

SEQ ID NO: 71905 - protein, 8 aa, Homo sapiens
  misc_feature: Table A; Target 71905; HLA-A*02:04; PRAME; ENSG00000185686; TAA
YLGQMINL

SEQ ID NO: 71906 - protein, 8 aa, Homo sapiens
  misc_feature: Table A; Target 71906; HLA-C*07:04; PRAME; ENSG00000185686; TAA
YLGQMINL

SEQ ID NO: 71907 - protein, 9 aa, Homo sapiens
  misc_feature: Table A; Target 71907; HLA-A*02:01; PRAME; ENSG00000185686; TAA
YLHARLREL

SEQ ID NO: 71908 - protein, 9 aa, Homo sapiens
  misc_feature: Table A; Target 71908; HLA-A*02:03; PRAME; ENSG00000185686; TAA
YLHARLREL

SEQ ID NO: 71909 - protein, 9 aa, Homo sapiens
  misc_feature: Table A; Target 71909; HLA-A*02:04; PRAME; ENSG00000185686; TAA
YLHARLREL

SEQ ID NO: 71910 - protein, 9 aa, Homo sapiens
  misc_feature: Table A; Target 71910; HLA-A*02:07; PRAME; ENSG00000185686; TAA
YLHARLREL

SEQ ID NO: 71911 - protein, 9 aa, Homo sapiens
  misc_feature: Table A; Target 71911; HLA-B*08:01; PRAME; ENSG00000185686; TAA
YLHARLREL

SEQ ID NO: 71912 - protein, 8 aa, Homo sapiens
  misc_feature: Table A; Target 71912; HLA-B*08:01; PRAME; ENSG00000185686; TAA
YLIEKVKR

SEQ ID NO: 71913 - protein, 9 aa, Homo sapiens
  misc_feature: Table A; Target 71913; HLA-A*02:03; PRAME; ENSG00000185686; TAA
YLIEKVKRK

SEQ ID NO: 71914 - protein, 9 aa, Homo sapiens
  misc_feature: Table A; Target 71914; HLA-A*02:04; PRAME; ENSG00000185686; TAA
YLIEKVKRK

SEQ ID NO: 71915 - protein, 9 aa, Homo sapiens
  misc_feature: Table A; Target 71915; HLA-A*02:07; PRAME; ENSG00000185686; TAA
YLIEKVKRK

SEQ ID NO: 71916 - protein, 9 aa, Homo sapiens
  misc_feature: Table A; Target 71916; HLA-A*03:01; PRAME; ENSG00000185686; TAA
YLIEKVKRK

SEQ ID NO: 71917 - protein, 8 aa, Homo sapiens
  misc_feature: Table A; Target 71917; HLA-B*15:01; PRAME; ENSG00000185686; TAA
YPVPLESY

SEQ ID NO: 71918 - protein, 8 aa, Homo sapiens
  misc_feature: Table A; Target 71918; HLA-B*15:03; PRAME; ENSG00000185686; TAA
YPVPLESY

SEQ ID NO: 71919 - protein, 8 aa, Homo sapiens
  misc_feature: Table A; Target 71919; HLA-B*18:01; PRAME; ENSG00000185686; TAA
YPVPLESY

SEQ ID NO: 71920 - protein, 8 aa, Homo sapiens
  misc_feature: Table A; Target 71920; HLA-B*35:01; PRAME; ENSG00000185686; TAA
YPVPLESY

SEQ ID NO: 71921 - protein, 8 aa, Homo sapiens
  misc_feature: Table A; Target 71921; HLA-B*35:03; PRAME; ENSG00000185686; TAA
YPVPLESY

SEQ ID NO: 71922 - protein, 8 aa, Homo sapiens
  misc_feature: Table A; Target 71922; HLA-B*46:01; PRAME; ENSG00000185686; TAA
YPVPLESY

SEQ ID NO: 71923 - protein, 8 aa, Homo sapiens
  misc_feature: Table A; Target 71923; HLA-B*51:01; PRAME; ENSG00000185686; TAA
YPVPLESY

SEQ ID NO: 71924 - protein, 8 aa, Homo sapiens
  misc_feature: Table A; Target 71924; HLA-B*54:01; PRAME; ENSG00000185686; TAA
YPVPLESY

SEQ ID NO: 71925 - protein, 8 aa, Homo sapiens
  misc_feature: Table A; Target 71925; HLA-B*55:01; PRAME; ENSG00000185686; TAA
YPVPLESY

SEQ ID NO: 71926 - protein, 8 aa, Homo sapiens
  misc_feature: Table A; Target 71926; HLA-B*56:01; PRAME; ENSG00000185686; TAA
YPVPLESY

SEQ ID NO: 71927 - protein, 8 aa, Homo sapiens
  misc_feature: Table A; Target 71927; HLA-C*03:03; PRAME; ENSG00000185686; TAA
YPVPLESY

SEQ ID NO: 71928 - protein, 11 aa, Homo sapiens
  misc_feature: Table A; Target 71928; HLA-B*27:02; PRAME; ENSG00000185686; TAA
YPVPLESYEDI

SEQ ID NO: 71929 - protein, 11 aa, Homo sapiens
  misc_feature: Table A; Target 71929; HLA-B*54:01; PRAME; ENSG00000185686; TAA
YPVPLESYEDI

SEQ ID NO: 71930 - protein, 8 aa, Homo sapiens
  misc_feature: Table A; Target 71930; HLA-B*13:02; PRAME; ENSG00000185686; TAA
YSFPEPEA

SEQ ID NO: 71931 - protein, 8 aa, Homo sapiens
  misc_feature: Table A; Target 71931; HLA-B*54:01; PRAME; ENSG00000185686; TAA
YSFPEPEA

SEQ ID NO: 71932 - protein, 8 aa, Homo sapiens
  misc_feature: Table A; Target 71932; HLA-B*56:01; PRAME; ENSG00000185686; TAA
YSFPEPEA

SEQ ID NO: 71933 - protein, 8 aa, Homo sapiens
  misc_feature: Table A; Target 71933; HLA-C*03:03; PRAME; ENSG00000185686; TAA
YSFPEPEA

SEQ ID NO: 71934 - protein, 8 aa, Homo sapiens
  misc_feature: Table A; Target 71934; HLA-C*03:04; PRAME; ENSG00000185686; TAA
YSFPEPEA

SEQ ID NO: 71935 - protein, 8 aa, Homo sapiens
  misc_feature: Table A; Target 71935; HLA-C*12:03; PRAME; ENSG00000185686; TAA
YSFPEPEA

SEQ ID NO: 71936 - protein, 8 aa, Homo sapiens
  misc_feature: Table A; Target 71936; HLA-C*16:02; PRAME; ENSG00000185686; TAA
YSFPEPEA

SEQ ID NO: 71937 - protein, 9 aa, Homo sapiens
  misc_feature: Table A; Target 71937; HLA-A*02:01; PRAME; ENSG00000185686; TAA
YSFPEPEAA

SEQ ID NO: 71938 - protein, 9 aa, Homo sapiens
  misc_feature: Table A; Target 71938; HLA-A*02:03; PRAME; ENSG00000185686; TAA
YSFPEPEAA

SEQ ID NO: 71939 - protein, 9 aa, Homo sapiens
  misc_feature: Table A; Target 71939; HLA-A*30:01; PRAME; ENSG00000185686; TAA
YSFPEPEAA

SEQ ID NO: 71940 - protein, 9 aa, Homo sapiens
  misc_feature: Table A; Target 71940; HLA-A*68:02; PRAME; ENSG00000185686; TAA
YSFPEPEAA

SEQ ID NO: 71941 - protein, 9 aa, Homo sapiens
  misc_feature: Table A; Target 71941; HLA-B*18:01; PRAME; ENSG00000185686; TAA
YSFPEPEAA

SEQ ID NO: 71942 - protein, 9 aa, Homo sapiens
  misc_feature: Table A; Target 71942; HLA-B*27:05; PRAME; ENSG00000185686; TAA
YSFPEPEAA

SEQ ID NO: 71943 - protein, 9 aa, Homo sapiens
  misc_feature: Table A; Target 71943; HLA-B*35:03; PRAME; ENSG00000185686; TAA
YSFPEPEAA

SEQ ID NO: 71944 - protein, 9 aa, Homo sapiens
  misc_feature: Table A; Target 71944; HLA-B*54:01; PRAME; ENSG00000185686; TAA
YSFPEPEAA

SEQ ID NO: 71945 - protein, 9 aa, Homo sapiens
  misc_feature: Table A; Target 71945; HLA-B*55:01; PRAME; ENSG00000185686; TAA
YSFPEPEAA

SEQ ID NO: 71946 - protein, 9 aa, Homo sapiens
  misc_feature: Table A; Target 71946; HLA-B*56:01; PRAME; ENSG00000185686; TAA
YSFPEPEAA

SEQ ID NO: 71947 - protein, 9 aa, Homo sapiens
  misc_feature: Table A; Target 71947; HLA-C*02:02; PRAME; ENSG00000185686; TAA
YSFPEPEAA

SEQ ID NO: 71948 - protein, 9 aa, Homo sapiens
  misc_feature: Table A; Target 71948; HLA-C*03:03; PRAME; ENSG00000185686; TAA
YSFPEPEAA

SEQ ID NO: 71949 - protein, 9 aa, Homo sapiens
  misc_feature: Table A; Target 71949; HLA-C*03:04; PRAME; ENSG00000185686; TAA
YSFPEPEAA

SEQ ID NO: 71950 - protein, 9 aa, Homo sapiens
  misc_feature: Table A; Target 71950; HLA-C*12:03; PRAME; ENSG00000185686; TAA
YSFPEPEAA

SEQ ID NO: 71951 - protein, 10 aa, Homo sapiens
  misc_feature: Table A; Target 71951; HLA-A*68:02; PRAME; ENSG00000185686; TAA
YSFPEPEAAQ

SEQ ID NO: 71952 - protein, 10 aa, Homo sapiens
  misc_feature: Table A; Target 71952; HLA-C*04:01; PRAME; ENSG00000185686; TAA
YSFPEPEAAQ

SEQ ID NO: 71953 - protein, 11 aa, Homo sapiens
  misc_feature: Table A; Target 71953; HLA-A*68:02; PRAME; ENSG00000185686; TAA
YSFPEPEAAQP

SEQ ID NO: 71954 - protein, 8 aa, Homo sapiens
  misc_feature: Table A; Target 71954; HLA-A*01:01; PRAME; ENSG00000185686; TAA
YVDSLFFL

SEQ ID NO: 71955 - protein, 8 aa, Homo sapiens
  misc_feature: Table A; Target 71955; HLA-A*02:01; PRAME; ENSG00000185686; TAA
YVDSLFFL

SEQ ID NO: 71956 - protein, 8 aa, Homo sapiens
  misc_feature: Table A; Target 71956; HLA-A*02:04; PRAME; ENSG00000185686; TAA
YVDSLFFL

SEQ ID NO: 71957 - protein, 8 aa, Homo sapiens
  misc_feature: Table A; Target 71957; HLA-A*02:07; PRAME; ENSG00000185686; TAA
YVDSLFFL

SEQ ID NO: 71958 - protein, 8 aa, Homo sapiens
  misc_feature: Table A; Target 71958; HLA-A*68:02; PRAME; ENSG00000185686; TAA
YVDSLFFL

SEQ ID NO: 71959 - protein, 8 aa, Homo sapiens
  misc_feature: Table A; Target 71959; HLA-C*05:01; PRAME; ENSG00000185686; TAA
YVDSLFFL

SEQ ID NO: 71960 - protein, 9 aa, Homo sapiens
  misc_feature: Table A; Target 71960; HLA-A*01:01; PRAME; ENSG00000185686; TAA
YVDSLFFLR

SEQ ID NO: 71961 - protein, 9 aa, Homo sapiens
  misc_feature: Table A; Target 71961; HLA-A*02:07; PRAME; ENSG00000185686; TAA
YVDSLFFLR

SEQ ID NO: 71962 - protein, 9 aa, Homo sapiens
  misc_feature: Table A; Target 71962; HLA-A*29:02; PRAME; ENSG00000185686; TAA
YVDSLFFLR

SEQ ID NO: 71963 - protein, 9 aa, Homo sapiens
  misc_feature: Table A; Target 71963; HLA-A*31:01; PRAME; ENSG00000185686; TAA
YVDSLFFLR

SEQ ID NO: 71964 - protein, 9 aa, Homo sapiens
  misc_feature: Table A; Target 71964; HLA-A*33:01; PRAME; ENSG00000185686; TAA
YVDSLFFLR

SEQ ID NO: 71965 - protein, 9 aa, Homo sapiens
  misc_feature: Table A; Target 71965; HLA-A*68:02; PRAME; ENSG00000185686; TAA
YVDSLFFLR

SEQ ID NO: 71966 - protein, 9 aa, Homo sapiens
  misc_feature: Table A; Target 71966; HLA-B*57:01; PRAME; ENSG00000185686; TAA
YVDSLFFLR

SEQ ID NO: 71967 - protein, 10 aa, Homo sapiens
  misc_feature: Table A; Target 71967; HLA-A*02:07; PRAME; ENSG00000185686; TAA
YVDSLFFLRG

SEQ ID NO: 71968 - protein, 8 aa, Homo sapiens
  misc_feature: Table A; Target 71968; HLA-A*32:01; PRDM7; ENSG00000126856; CTA
AAHGPPTF

SEQ ID NO: 71969 - protein, 8 aa, Homo sapiens
  misc_feature: Table A; Target 71969; HLA-B*39:01; PRDM7; ENSG00000126856; CTA
AAHGPPTF

SEQ ID NO: 71970 - protein, 8 aa, Homo sapiens
  misc_feature: Table A; Target 71970; HLA-B*46:01; PRDM7; ENSG00000126856; CTA
AAHGPPTF

SEQ ID NO: 71971 - protein, 8 aa, Homo sapiens
  misc_feature: Table A; Target 71971; HLA-B*57:01; PRDM7; ENSG00000126856; CTA
AAHGPPTF

SEQ ID NO: 71972 - protein, 8 aa, Homo sapiens
  misc_feature: Table A; Target 71972; HLA-B*58:01; PRDM7; ENSG00000126856; CTA
AAHGPPTF

SEQ ID NO: 71973 - protein, 8 aa, Homo sapiens
  misc_feature: Table A; Target 71973; HLA-C*02:02; PRDM7; ENSG00000126856; CTA
AAHGPPTF

SEQ ID NO: 71974 - protein, 8 aa, Homo sapiens
  misc_feature: Table A; Target 71974; HLA-C*03:04; PRDM7; ENSG00000126856; CTA
AAHGPPTF

SEQ ID NO: 71975 - protein, 8 aa, Homo sapiens
  misc_feature: Table A; Target 71975; HLA-C*05:01; PRDM7; ENSG00000126856; CTA
AAHGPPTF

SEQ ID NO: 71976 - protein, 8 aa, Homo sapiens
  misc_feature: Table A; Target 71976; HLA-C*12:03; PRDM7; ENSG00000126856; CTA
AAHGPPTF

SEQ ID NO: 71977 - protein, 8 aa, Homo sapiens
  misc_feature: Table A; Target 71977; HLA-C*16:01; PRDM7; ENSG00000126856; CTA
AAHGPPTF

SEQ ID NO: 71978 - protein, 8 aa, Homo sapiens
  misc_feature: Table A; Target 71978; HLA-C*16:02; PRDM7; ENSG00000126856; CTA
AAHGPPTF

SEQ ID NO: 71979 - protein, 8 aa, Homo sapiens
  misc_feature: Table A; Target 71979; HLA-C*16:04; PRDM7; ENSG00000126856; CTA
AAHGPPTF

SEQ ID NO: 71980 - protein, 9 aa, Homo sapiens
  misc_feature: Table A; Target 71980; HLA-A*02:03; PRDM7; ENSG00000126856; CTA
AAHGPPTFV

SEQ ID NO: 71981 - protein, 9 aa, Homo sapiens
  misc_feature: Table A; Target 71981; HLA-A*32:01; PRDM7; ENSG00000126856; CTA
AAHGPPTFV

SEQ ID NO: 71982 - protein, 9 aa, Homo sapiens
  misc_feature: Table A; Target 71982; HLA-B*13:02; PRDM7; ENSG00000126856; CTA
AAHGPPTFV

SEQ ID NO: 71983 - protein, 9 aa, Homo sapiens
  misc_feature: Table A; Target 71983; HLA-B*49:01; PRDM7; ENSG00000126856; CTA
AAHGPPTFV

SEQ ID NO: 71984 - protein, 9 aa, Homo sapiens
  misc_feature: Table A; Target 71984; HLA-B*51:01; PRDM7; ENSG00000126856; CTA
AAHGPPTFV

SEQ ID NO: 71985 - protein, 9 aa, Homo sapiens
  misc_feature: Table A; Target 71985; HLA-C*02:02; PRDM7; ENSG00000126856; CTA
AAHGPPTFV

SEQ ID NO: 71986 - protein, 9 aa, Homo sapiens
  misc_feature: Table A; Target 71986; HLA-C*12:03; PRDM7; ENSG00000126856; CTA
AAHGPPTFV

SEQ ID NO: 71987 - protein, 9 aa, Homo sapiens
  misc_feature: Table A; Target 71987; HLA-C*16:04; PRDM7; ENSG00000126856; CTA
AAHGPPTFV

SEQ ID NO: 71988 - protein, 10 aa, Homo sapiens
  misc_feature: Table A; Target 71988; HLA-A*03:01; PRDM7; ENSG00000126856; CTA
AAHGPPTFVK

SEQ ID NO: 71989 - protein, 10 aa, Homo sapiens
  misc_feature: Table A; Target 71989; HLA-A*03:02; PRDM7; ENSG00000126856; CTA
AAHGPPTFVK

SEQ ID NO: 71990 - protein, 10 aa, Homo sapiens
  misc_feature: Table A; Target 71990; HLA-A*11:01; PRDM7; ENSG00000126856; CTA
AAHGPPTFVK

SEQ ID NO: 71991 - protein, 10 aa, Homo sapiens
  misc_feature: Table A; Target 71991; HLA-C*07:06; PRDM7; ENSG00000126856; CTA
AAHGPPTFVK

SEQ ID NO: 71992 - protein, 8 aa, Homo sapiens
  misc_feature: Table A; Target 71992; HLA-A*32:01; PRDM7; ENSG00000126856; CTA
AANSGYSW

SEQ ID NO: 71993 - protein, 8 aa, Homo sapiens
  misc_feature: Table A; Target 71993; HLA-B*57:01; PRDM7; ENSG00000126856; CTA
AANSGYSW

SEQ ID NO: 71994 - protein, 8 aa, Homo sapiens
  misc_feature: Table A; Target 71994; HLA-B*58:01; PRDM7; ENSG00000126856; CTA
AANSGYSW

SEQ ID NO: 71995 - protein, 8 aa, Homo sapiens
  misc_feature: Table A; Target 71995; HLA-C*16:01; PRDM7; ENSG00000126856; CTA
AANSGYSW

SEQ ID NO: 71996 - protein, 8 aa, Homo sapiens
  misc_feature: Table A; Target 71996; HLA-C*16:04; PRDM7; ENSG00000126856; CTA
AANSGYSW

SEQ ID NO: 71997 - protein, 9 aa, Homo sapiens
  misc_feature: Table A; Target 71997; HLA-A*25:01; PRDM7; ENSG00000126856; CTA
AASGRKSSW

SEQ ID NO: 71998 - protein, 9 aa, Homo sapiens
  misc_feature: Table A; Target 71998; HLA-A*32:01; PRDM7; ENSG00000126856; CTA
AASGRKSSW

SEQ ID NO: 71999 - protein, 9 aa, Homo sapiens
  misc_feature: Table A; Target 71999; HLA-B*58:01; PRDM7; ENSG00000126856; CTA
AASGRKSSW

SEQ ID NO: 72000 - protein, 9 aa, Homo sapiens
  misc_feature: Table A; Target 72000; HLA-C*16:01; PRDM7; ENSG00000126856; CTA
AASGRKSSW

SEQ ID NO: 72001 - protein, 9 aa, Homo sapiens
  misc_feature: Table A; Target 72001; HLA-C*16:02; PRDM7; ENSG00000126856; CTA
AASGRKSSW

SEQ ID NO: 72002 - protein, 9 aa, Homo sapiens
  misc_feature: Table A; Target 72002; HLA-C*16:04; PRDM7; ENSG00000126856; CTA
AASGRKSSW

SEQ ID NO: 72003 - protein, 9 aa, Homo sapiens
  misc_feature: Table A; Target 72003; HLA-C*12:03; PRDM7; ENSG00000126856; CTA
AAVMTKPKV

SEQ ID NO: 72004 - protein, 9 aa, Homo sapiens
  misc_feature: Table A; Target 72004; HLA-C*16:02; PRDM7; ENSG00000126856; CTA
AAVMTKPKV

SEQ ID NO: 72005 - protein, 10 aa, Homo sapiens
  misc_feature: Table A; Target 72005; HLA-B*44:02; PRDM7; ENSG00000126856; CTA
AEMGDWEKTR

SEQ ID NO: 72006 - protein, 11 aa, Homo sapiens
  misc_feature: Table A; Target 72006; HLA-B*44:02; PRDM7; ENSG00000126856; CTA
AEMGDWEKTRY

SEQ ID NO: 72007 - protein, 11 aa, Homo sapiens
  misc_feature: Table A; Target 72007; HLA-B*44:03; PRDM7; ENSG00000126856; CTA
AEMGDWEKTRY

SEQ ID NO: 72008 - protein, 8 aa, Homo sapiens
  misc_feature: Table A; Target 72008; HLA-B*37:01; PRDM7; ENSG00000126856; CTA
AESLGQAV

SEQ ID NO: 72009 - protein, 8 aa, Homo sapiens
  misc_feature: Table A; Target 72009; HLA-B*49:01; PRDM7; ENSG00000126856; CTA
AESLGQAV

SEQ ID NO: 72010 - protein, 11 aa, Homo sapiens
  misc_feature: Table A; Target 72010; HLA-B*27:02; PRDM7; ENSG00000126856; CTA
AESLGQAVNCW

SEQ ID NO: 72011 - protein, 11 aa, Homo sapiens
  misc_feature: Table A; Target 72011; HLA-B*37:01; PRDM7; ENSG00000126856; CTA
AESLGQAVNCW

SEQ ID NO: 72012 - protein, 11 aa, Homo sapiens
  misc_feature: Table A; Target 72012; HLA-B*44:02; PRDM7; ENSG00000126856; CTA
AESLGQAVNCW

SEQ ID NO: 72013 - protein, 11 aa, Homo sapiens
  misc_feature: Table A; Target 72013; HLA-B*44:03; PRDM7; ENSG00000126856; CTA
AESLGQAVNCW

SEQ ID NO: 72014 - protein, 11 aa, Homo sapiens
  misc_feature: Table A; Target 72014; HLA-B*49:01; PRDM7; ENSG00000126856; CTA
AESLGQAVNCW

SEQ ID NO: 72015 - protein, 11 aa, Homo sapiens
  misc_feature: Table A; Target 72015; HLA-C*16:04; PRDM7; ENSG00000126856; CTA
AESLGQAVNCW

SEQ ID NO: 72016 - protein, 8 aa, Homo sapiens
  misc_feature: Table A; Target 72016; HLA-A*30:02; PRDM7; ENSG00000126856; CTA
AFKDISIY

SEQ ID NO: 72017 - protein, 8 aa, Homo sapiens
  misc_feature: Table A; Target 72017; HLA-B*15:03; PRDM7; ENSG00000126856; CTA
AFKDISIY

SEQ ID NO: 72018 - protein, 8 aa, Homo sapiens
  misc_feature: Table A; Target 72018; HLA-B*46:01; PRDM7; ENSG00000126856; CTA
AFKDISIY

SEQ ID NO: 72019 - protein, 9 aa, Homo sapiens
  misc_feature: Table A; Target 72019; HLA-A*23:01; PRDM7; ENSG00000126856; CTA
AFKDISIYF

SEQ ID NO: 72020 - protein, 9 aa, Homo sapiens
  misc_feature: Table A; Target 72020; HLA-A*24:02; PRDM7; ENSG00000126856; CTA
AFKDISIYF

SEQ ID NO: 72021 - protein, 9 aa, Homo sapiens
  misc_feature: Table A; Target 72021; HLA-A*29:02; PRDM7; ENSG00000126856; CTA
AFKDISIYF

SEQ ID NO: 72022 - protein, 9 aa, Homo sapiens
  misc_feature: Table A; Target 72022; HLA-A*31:01; PRDM7; ENSG00000126856; CTA
AFKDISIYF

SEQ ID NO: 72023 - protein, 9 aa, Homo sapiens
  misc_feature: Table A; Target 72023; HLA-B*57:01; PRDM7; ENSG00000126856; CTA
AFKDISIYF

SEQ ID NO: 72024 - protein, 11 aa, Homo sapiens
  misc_feature: Table A; Target 72024; HLA-A*31:01; PRDM7; ENSG00000126856; CTA
AFKDISIYFTK

SEQ ID NO: 72025 - protein, 8 aa, Homo sapiens
  misc_feature: Table A; Target 72025; HLA-B*27:05; PRDM7; ENSG00000126856; CTA
AHGPPTFV

SEQ ID NO: 72026 - protein, 8 aa, Homo sapiens
  misc_feature: Table A; Target 72026; HLA-B*39:01; PRDM7; ENSG00000126856; CTA
AHGPPTFV

SEQ ID NO: 72027 - protein, 9 aa, Homo sapiens
  misc_feature: Table A; Target 72027; HLA-A*03:01; PRDM7; ENSG00000126856; CTA
AHGPPTFVK

SEQ ID NO: 72028 - protein, 9 aa, Homo sapiens
  misc_feature: Table A; Target 72028; HLA-A*03:02; PRDM7; ENSG00000126856; CTA
AHGPPTFVK

SEQ ID NO: 72029 - protein, 9 aa, Homo sapiens
  misc_feature: Table A; Target 72029; HLA-A*11:01; PRDM7; ENSG00000126856; CTA
AHGPPTFVK

SEQ ID NO: 72030 - protein, 9 aa, Homo sapiens
  misc_feature: Table A; Target 72030; HLA-A*31:01; PRDM7; ENSG00000126856; CTA
AHGPPTFVK

SEQ ID NO: 72031 - protein, 9 aa, Homo sapiens
  misc_feature: Table A; Target 72031; HLA-B*27:05; PRDM7; ENSG00000126856; CTA
AHGPPTFVK

SEQ ID NO: 72032 - protein, 9 aa, Homo sapiens
  misc_feature: Table A; Target 72032; HLA-A*02:01; PRDM7; ENSG00000126856; CTA
ALITVGLRA

SEQ ID NO: 72033 - protein, 9 aa, Homo sapiens
  misc_feature: Table A; Target 72033; HLA-A*02:03; PRDM7; ENSG00000126856; CTA
ALITVGLRA

SEQ ID NO: 72034 - protein, 9 aa, Homo sapiens
  misc_feature: Table A; Target 72034; HLA-A*02:04; PRDM7; ENSG00000126856; CTA
ALITVGLRA

SEQ ID NO: 72035 - protein, 9 aa, Homo sapiens
  misc_feature: Table A; Target 72035; HLA-A*02:07; PRDM7; ENSG00000126856; CTA
ALITVGLRA

SEQ ID NO: 72036 - protein, 9 aa, Homo sapiens
  misc_feature: Table A; Target 72036; HLA-A*29:02; PRDM7; ENSG00000126856; CTA
ALITVGLRA

SEQ ID NO: 72037 - protein, 9 aa, Homo sapiens
  misc_feature: Table A; Target 72037; HLA-B*13:02; PRDM7; ENSG00000126856; CTA
ALITVGLRA

SEQ ID NO: 72038 - protein, 10 aa, Homo sapiens
  misc_feature: Table A; Target 72038; HLA-A*02:03; PRDM7; ENSG00000126856; CTA
ALITVGLRAT

SEQ ID NO: 72039 - protein, 11 aa, Homo sapiens
  misc_feature: Table A; Target 72039; HLA-A*31:01; PRDM7; ENSG00000126856; CTA
ALITVGLRATR

SEQ ID NO: 72040 - protein, 8 aa, Homo sapiens
  misc_feature: Table A; Target 72040; HLA-B*37:01; PRDM7; ENSG00000126856; CTA
ALSLPPGL

SEQ ID NO: 72041 - protein, 9 aa, Homo sapiens
  misc_feature: Table A; Target 72041; HLA-A*30:02; PRDM7; ENSG00000126856; CTA
AQKPVSPPG

SEQ ID NO: 72042 - protein, 9 aa, Homo sapiens
  misc_feature: Table A; Target 72042; HLA-A*31:01; PRDM7; ENSG00000126856; CTA
AQKPVSPPG

SEQ ID NO: 72043 - protein, 9 aa, Homo sapiens
  misc_feature: Table A; Target 72043; HLA-A*32:01; PRDM7; ENSG00000126856; CTA
AQKPVSPPG

SEQ ID NO: 72044 - protein, 9 aa, Homo sapiens
  misc_feature: Table A; Target 72044; HLA-B*15:03; PRDM7; ENSG00000126856; CTA
AQKPVSPPG

SEQ ID NO: 72045 - protein, 9 aa, Homo sapiens
  misc_feature: Table A; Target 72045; HLA-B*40:02; PRDM7; ENSG00000126856; CTA
AQKPVSPPG

SEQ ID NO: 72046 - protein, 9 aa, Homo sapiens
  misc_feature: Table A; Target 72046; HLA-C*06:02; PRDM7; ENSG00000126856; CTA
AQKPVSPPG

SEQ ID NO: 72047 - protein, 9 aa, Homo sapiens
  misc_feature: Table A; Target 72047; HLA-C*16:02; PRDM7; ENSG00000126856; CTA
AQKPVSPPG

SEQ ID NO: 72048 - protein, 9 aa, Homo sapiens
  misc_feature: Table A; Target 72048; HLA-B*38:01; PRDM7; ENSG00000126856; CTA
ARDDEEQNL

SEQ ID NO: 72049 - protein, 9 aa, Homo sapiens
  misc_feature: Table A; Target 72049; HLA-B*39:01; PRDM7; ENSG00000126856; CTA
ARDDEEQNL

SEQ ID NO: 72050 - protein, 8 aa, Homo sapiens
  misc_feature: Table A; Target 72050; HLA-A*01:01; PRDM7; ENSG00000126856; CTA
ASDLPLGL

SEQ ID NO: 72051 - protein, 8 aa, Homo sapiens
  misc_feature: Table A; Target 72051; HLA-C*05:01; PRDM7; ENSG00000126856; CTA
ASDLPLGL

SEQ ID NO: 72052 - protein, 9 aa, Homo sapiens
  misc_feature: Table A; Target 72052; HLA-A*01:01; PRDM7; ENSG00000126856; CTA
ASDLPLGLH

SEQ ID NO: 72053 - protein, 10 aa, Homo sapiens
  misc_feature: Table A; Target 72053; HLA-A*01:01; PRDM7; ENSG00000126856; CTA
ASDLPLGLHF

SEQ ID NO: 72054 - protein, 9 aa, Homo sapiens
  misc_feature: Table A; Target 72054; HLA-A*32:01; PRDM7; ENSG00000126856; CTA
ASFNNESSL

SEQ ID NO: 72055 - protein, 9 aa, Homo sapiens
  misc_feature: Table A; Target 72055; HLA-B*15:01; PRDM7; ENSG00000126856; CTA
ASFNNESSL

SEQ ID NO: 72056 - protein, 9 aa, Homo sapiens
  misc_feature: Table A; Target 72056; HLA-B*40:01; PRDM7; ENSG00000126856; CTA
ASFNNESSL

SEQ ID NO: 72057 - protein, 9 aa, Homo sapiens
  misc_feature: Table A; Target 72057; HLA-B*46:01; PRDM7; ENSG00000126856; CTA
ASFNNESSL

SEQ ID NO: 72058 - protein, 9 aa, Homo sapiens
  misc_feature: Table A; Target 72058; HLA-B*58:01; PRDM7; ENSG00000126856; CTA
ASFNNESSL

SEQ ID NO: 72059 - protein, 9 aa, Homo sapiens
  misc_feature: Table A; Target 72059; HLA-C*01:02; PRDM7; ENSG00000126856; CTA
ASFNNESSL

SEQ ID NO: 72060 - protein, 9 aa, Homo sapiens
  misc_feature: Table A; Target 72060; HLA-C*03:03; PRDM7; ENSG00000126856; CTA
ASFNNESSL

SEQ ID NO: 72061 - protein, 9 aa, Homo sapiens
  misc_feature: Table A; Target 72061; HLA-C*03:04; PRDM7; ENSG00000126856; CTA
ASFNNESSL

SEQ ID NO: 72062 - protein, 9 aa, Homo sapiens
  misc_feature: Table A; Target 72062; HLA-C*05:01; PRDM7; ENSG00000126856; CTA
ASFNNESSL

SEQ ID NO: 72063 - protein, 9 aa, Homo sapiens
  misc_feature: Table A; Target 72063; HLA-C*14:02; PRDM7; ENSG00000126856; CTA
ASFNNESSL

SEQ ID NO: 72064 - protein, 9 aa, Homo sapiens
  misc_feature: Table A; Target 72064; HLA-C*16:02; PRDM7; ENSG00000126856; CTA
ASFNNESSL

SEQ ID NO: 72065 - protein, 9 aa, Homo sapiens
  misc_feature: Table A; Target 72065; HLA-C*16:04; PRDM7; ENSG00000126856; CTA
ASFNNESSL

SEQ ID NO: 72066 - protein, 10 aa, Homo sapiens
  misc_feature: Table A; Target 72066; HLA-A*68:01; PRDM7; ENSG00000126856; CTA
ASFNNESSLR

SEQ ID NO: 72067 - protein, 10 aa, Homo sapiens
  misc_feature: Table A; Target 72067; HLA-C*07:06; PRDM7; ENSG00000126856; CTA
ASFNNESSLR

SEQ ID NO: 72068 - protein, 8 aa, Homo sapiens
  misc_feature: Table A; Target 72068; HLA-A*32:01; PRDM7; ENSG00000126856; CTA
ASGRKSSW

SEQ ID NO: 72069 - protein, 8 aa, Homo sapiens
  misc_feature: Table A; Target 72069; HLA-B*58:01; PRDM7; ENSG00000126856; CTA
ASGRKSSW

SEQ ID NO: 72070 - protein, 8 aa, Homo sapiens
  misc_feature: Table A; Target 72070; HLA-C*16:01; PRDM7; ENSG00000126856; CTA
ASGRKSSW

SEQ ID NO: 72071 - protein, 9 aa, Homo sapiens
  misc_feature: Table A; Target 72071; HLA-A*31:01; PRDM7; ENSG00000126856; CTA
ASSGAASGR

SEQ ID NO: 72072 - protein, 9 aa, Homo sapiens
  misc_feature: Table A; Target 72072; HLA-A*68:01; PRDM7; ENSG00000126856; CTA
ASSGAASGR

SEQ ID NO: 72073 - protein, 9 aa, Homo sapiens
  misc_feature: Table A; Target 72073; HLA-C*07:06; PRDM7; ENSG00000126856; CTA
ASSGAASGR

SEQ ID NO: 72074 - protein, 9 aa, Homo sapiens
  misc_feature: Table A; Target 72074; HLA-A*03:01; PRDM7; ENSG00000126856; CTA
ATRPAFMCH

SEQ ID NO: 72075 - protein, 9 aa, Homo sapiens
  misc_feature: Table A; Target 72075; HLA-A*31:01; PRDM7; ENSG00000126856; CTA
ATRPAFMCH

SEQ ID NO: 72076 - protein, 10 aa, Homo sapiens
  misc_feature: Table A; Target 72076; HLA-A*31:01; PRDM7; ENSG00000126856; CTA
ATRPAFMCHR

SEQ ID NO: 72077 - protein, 9 aa, Homo sapiens
  misc_feature: Table A; Target 72077; HLA-A*03:01; PRDM7; ENSG00000126856; CTA
AVDKGHPNR

SEQ ID NO: 72078 - protein, 9 aa, Homo sapiens
  misc_feature: Table A; Target 72078; HLA-A*03:02; PRDM7; ENSG00000126856; CTA
AVDKGHPNR

SEQ ID NO: 72079 - protein, 9 aa, Homo sapiens
  misc_feature: Table A; Target 72079; HLA-A*11:01; PRDM7; ENSG00000126856; CTA
AVDKGHPNR

SEQ ID NO: 72080 - protein, 9 aa, Homo sapiens
  misc_feature: Table A; Target 72080; HLA-A*31:01; PRDM7; ENSG00000126856; CTA
AVDKGHPNR

SEQ ID NO: 72081 - protein, 8 aa, Homo sapiens
  misc_feature: Table A; Target 72081; HLA-B*08:01; PRDM7; ENSG00000126856; CTA
AVMTKPKV

SEQ ID NO: 72082 - protein, 9 aa, Homo sapiens
  misc_feature: Table A; Target 72082; HLA-A*03:02; PRDM7; ENSG00000126856; CTA
AVMTKPKVK

SEQ ID NO: 72083 - protein, 9 aa, Homo sapiens
  misc_feature: Table A; Target 72083; HLA-A*31:01; PRDM7; ENSG00000126856; CTA
AVMTKPKVK

SEQ ID NO: 72084 - protein, 9 aa, Homo sapiens
  misc_feature: Table A; Target 72084; HLA-A*32:01; PRDM7; ENSG00000126856; CTA
AVMTKPKVK

SEQ ID NO: 72085 - protein, 10 aa, Homo sapiens
  misc_feature: Table A; Target 72085; HLA-A*03:01; PRDM7; ENSG00000126856; CTA
AVMTKPKVKR

SEQ ID NO: 72086 - protein, 10 aa, Homo sapiens
  misc_feature: Table A; Target 72086; HLA-A*11:01; PRDM7; ENSG00000126856; CTA
AVMTKPKVKR

SEQ ID NO: 72087 - protein, 10 aa, Homo sapiens
  misc_feature: Table A; Target 72087; HLA-A*31:01; PRDM7; ENSG00000126856; CTA
AVMTKPKVKR

SEQ ID NO: 72088 - protein, 10 aa, Homo sapiens
  misc_feature: Table A; Target 72088; HLA-A*33:01; PRDM7; ENSG00000126856; CTA
AVMTKPKVKR

SEQ ID NO: 72089 - protein, 10 aa, Homo sapiens
  misc_feature: Table A; Target 72089; HLA-A*33:03; PRDM7; ENSG00000126856; CTA
AVMTKPKVKR

SEQ ID NO: 72090 - protein, 9 aa, Homo sapiens
  misc_feature: Table A; Target 72090; HLA-B*58:01; PRDM7; ENSG00000126856; CTA
CAAHGPPTF

SEQ ID NO: 72091 - protein, 9 aa, Homo sapiens
  misc_feature: Table A; Target 72091; HLA-C*02:02; PRDM7; ENSG00000126856; CTA
CAAHGPPTF

SEQ ID NO: 72092 - protein, 9 aa, Homo sapiens
  misc_feature: Table A; Target 72092; HLA-C*03:04; PRDM7; ENSG00000126856; CTA
CAAHGPPTF

SEQ ID NO: 72093 - protein, 9 aa, Homo sapiens
  misc_feature: Table A; Target 72093; HLA-C*16:01; PRDM7; ENSG00000126856; CTA
CAAHGPPTF

SEQ ID NO: 72094 - protein, 9 aa, Homo sapiens
  misc_feature: Table A; Target 72094; HLA-C*16:04; PRDM7; ENSG00000126856; CTA
CAAHGPPTF

SEQ ID NO: 72095 - protein, 8 aa, Homo sapiens
  misc_feature: Table A; Target 72095; HLA-B*35:03; PRDM7; ENSG00000126856; CTA
DAFKDISI

SEQ ID NO: 72096 - protein, 9 aa, Homo sapiens
  misc_feature: Table A; Target 72096; HLA-A*25:01; PRDM7; ENSG00000126856; CTA
DAFKDISIY

SEQ ID NO: 72097 - protein, 9 aa, Homo sapiens
  misc_feature: Table A; Target 72097; HLA-A*26:01; PRDM7; ENSG00000126856; CTA
DAFKDISIY

SEQ ID NO: 72098 - protein, 9 aa, Homo sapiens
  misc_feature: Table A; Target 72098; HLA-A*33:01; PRDM7; ENSG00000126856; CTA
DAFKDISIY

SEQ ID NO: 72099 - protein, 9 aa, Homo sapiens
  misc_feature: Table A; Target 72099; HLA-B*18:01; PRDM7; ENSG00000126856; CTA
DAFKDISIY

SEQ ID NO: 72100 - protein, 9 aa, Homo sapiens
  misc_feature: Table A; Target 72100; HLA-B*35:03; PRDM7; ENSG00000126856; CTA
DAFKDISIY

SEQ ID NO: 72101 - protein, 9 aa, Homo sapiens
  misc_feature: Table A; Target 72101; HLA-B*51:01; PRDM7; ENSG00000126856; CTA
DAFKDISIY

SEQ ID NO: 72102 - protein, 9 aa, Homo sapiens
  misc_feature: Table A; Target 72102; HLA-C*03:03; PRDM7; ENSG00000126856; CTA
DAFKDISIY

SEQ ID NO: 72103 - protein, 9 aa, Homo sapiens
  misc_feature: Table A; Target 72103; HLA-C*07:06; PRDM7; ENSG00000126856; CTA
DAFKDISIY

SEQ ID NO: 72104 - protein, 9 aa, Homo sapiens
  misc_feature: Table A; Target 72104; HLA-C*12:03; PRDM7; ENSG00000126856; CTA
DAFKDISIY

SEQ ID NO: 72105 - protein, 10 aa, Homo sapiens
  misc_feature: Table A; Target 72105; HLA-A*25:01; PRDM7; ENSG00000126856; CTA
DAFKDISIYF

SEQ ID NO: 72106 - protein, 10 aa, Homo sapiens
  misc_feature: Table A; Target 72106; HLA-A*26:01; PRDM7; ENSG00000126856; CTA
DAFKDISIYF

SEQ ID NO: 72107 - protein, 10 aa, Homo sapiens
  misc_feature: Table A; Target 72107; HLA-A*33:01; PRDM7; ENSG00000126856; CTA
DAFKDISIYF

SEQ ID NO: 72108 - protein, 10 aa, Homo sapiens
  misc_feature: Table A; Target 72108; HLA-B*35:01; PRDM7; ENSG00000126856; CTA
DAFKDISIYF

SEQ ID NO: 72109 - protein, 10 aa, Homo sapiens
  misc_feature: Table A; Target 72109; HLA-A*33:01; PRDM7; ENSG00000126856; CTA
DDEEQNLVAF

SEQ ID NO: 72110 - protein, 10 aa, Homo sapiens
  misc_feature: Table A; Target 72110; HLA-B*18:01; PRDM7; ENSG00000126856; CTA
DDEEQNLVAF

SEQ ID NO: 72111 - protein, 8 aa, Homo sapiens
  misc_feature: Table A; Target 72111; HLA-B*18:01; PRDM7; ENSG00000126856; CTA
DDYLYCEM

SEQ ID NO: 72112 - protein, 9 aa, Homo sapiens
  misc_feature: Table A; Target 72112; HLA-B*18:01; PRDM7; ENSG00000126856; CTA
DEEAANSGY

SEQ ID NO: 72113 - protein, 9 aa, Homo sapiens
  misc_feature: Table A; Target 72113; HLA-B*44:03; PRDM7; ENSG00000126856; CTA
DEEAANSGY

SEQ ID NO: 72114 - protein, 11 aa, Homo sapiens
  misc_feature: Table A; Target 72114; HLA-B*18:01; PRDM7; ENSG00000126856; CTA
DEEAANSGYSW

SEQ ID NO: 72115 - protein, 11 aa, Homo sapiens
  misc_feature: Table A; Target 72115; HLA-B*27:02; PRDM7; ENSG00000126856; CTA
DEEAANSGYSW

SEQ ID NO: 72116 - protein, 11 aa, Homo sapiens
  misc_feature: Table A; Target 72116; HLA-B*38:01; PRDM7; ENSG00000126856; CTA
DEEAANSGYSW

SEQ ID NO: 72117 - protein, 11 aa, Homo sapiens
  misc_feature: Table A; Target 72117; HLA-B*44:02; PRDM7; ENSG00000126856; CTA
DEEAANSGYSW

SEQ ID NO: 72118 - protein, 11 aa, Homo sapiens
  misc_feature: Table A; Target 72118; HLA-B*44:03; PRDM7; ENSG00000126856; CTA
DEEAANSGYSW

SEQ ID NO: 72119 - protein, 9 aa, Homo sapiens
  misc_feature: Table A; Target 72119; HLA-A*30:01; PRDM7; ENSG00000126856; CTA
DEEQNLVAF

SEQ ID NO: 72120 - protein, 9 aa, Homo sapiens
  misc_feature: Table A; Target 72120; HLA-B*38:01; PRDM7; ENSG00000126856; CTA
DEEQNLVAF

SEQ ID NO: 72121 - protein, 9 aa, Homo sapiens
  misc_feature: Table A; Target 72121; HLA-B*40:01; PRDM7; ENSG00000126856; CTA
DEEQNLVAF

SEQ ID NO: 72122 - protein, 9 aa, Homo sapiens
  misc_feature: Table A; Target 72122; HLA-B*44:02; PRDM7; ENSG00000126856; CTA
DEEQNLVAF

SEQ ID NO: 72123 - protein, 9 aa, Homo sapiens
  misc_feature: Table A; Target 72123; HLA-B*44:03; PRDM7; ENSG00000126856; CTA
DEEQNLVAF

SEQ ID NO: 72124 - protein, 11 aa, Homo sapiens
  misc_feature: Table A; Target 72124; HLA-B*18:01; PRDM7; ENSG00000126856; CTA
DEEQNLVAFQY

SEQ ID NO: 72125 - protein, 11 aa, Homo sapiens
  misc_feature: Table A; Target 72125; HLA-B*44:02; PRDM7; ENSG00000126856; CTA
DEEQNLVAFQY

SEQ ID NO: 72126 - protein, 11 aa, Homo sapiens
  misc_feature: Table A; Target 72126; HLA-B*44:03; PRDM7; ENSG00000126856; CTA
DEEQNLVAFQY

SEQ ID NO: 72127 - protein, 9 aa, Homo sapiens
  misc_feature: Table A; Target 72127; HLA-A*30:01; PRDM7; ENSG00000126856; CTA
DEYGQELGI

SEQ ID NO: 72128 - protein, 9 aa, Homo sapiens
  misc_feature: Table A; Target 72128; HLA-B*18:01; PRDM7; ENSG00000126856; CTA
DEYGQELGI

SEQ ID NO: 72129 - protein, 9 aa, Homo sapiens
  misc_feature: Table A; Target 72129; HLA-B*38:01; PRDM7; ENSG00000126856; CTA
DEYGQELGI

SEQ ID NO: 72130 - protein, 9 aa, Homo sapiens
  misc_feature: Table A; Target 72130; HLA-B*39:01; PRDM7; ENSG00000126856; CTA
DEYGQELGI

SEQ ID NO: 72131 - protein, 9 aa, Homo sapiens
  misc_feature: Table A; Target 72131; HLA-B*44:02; PRDM7; ENSG00000126856; CTA
DEYGQELGI

SEQ ID NO: 72132 - protein, 9 aa, Homo sapiens
  misc_feature: Table A; Target 72132; HLA-B*44:03; PRDM7; ENSG00000126856; CTA
DEYGQELGI

SEQ ID NO: 72133 - protein, 9 aa, Homo sapiens
  misc_feature: Table A; Target 72133; HLA-B*49:01; PRDM7; ENSG00000126856; CTA
DEYGQELGI

SEQ ID NO: 72134 - protein, 9 aa, Homo sapiens
  misc_feature: Table A; Target 72134; HLA-B*51:01; PRDM7; ENSG00000126856; CTA
DEYGQELGI

SEQ ID NO: 72135 - protein, 10 aa, Homo sapiens
  misc_feature: Table A; Target 72135; HLA-A*25:01; PRDM7; ENSG00000126856; CTA
DGKDKSSANW

SEQ ID NO: 72136 - protein, 8 aa, Homo sapiens
  misc_feature: Table A; Target 72136; HLA-B*08:01; PRDM7; ENSG00000126856; CTA
DLPLGLHF

SEQ ID NO: 72137 - protein, 9 aa, Homo sapiens
  misc_feature: Table A; Target 72137; HLA-A*25:01; PRDM7; ENSG00000126856; CTA
EAANSGYSW

SEQ ID NO: 72138 - protein, 9 aa, Homo sapiens
  misc_feature: Table A; Target 72138; HLA-A*26:01; PRDM7; ENSG00000126856; CTA
EAANSGYSW

SEQ ID NO: 72139 - protein, 9 aa, Homo sapiens
  misc_feature: Table A; Target 72139; HLA-A*33:01; PRDM7; ENSG00000126856; CTA
EAANSGYSW

SEQ ID NO: 72140 - protein, 9 aa, Homo sapiens
  misc_feature: Table A; Target 72140; HLA-A*33:03; PRDM7; ENSG00000126856; CTA
EAANSGYSW

SEQ ID NO: 72141 - protein, 9 aa, Homo sapiens
  misc_feature: Table A; Target 72141; HLA-A*68:01; PRDM7; ENSG00000126856; CTA
EAANSGYSW

SEQ ID NO: 72142 - protein, 9 aa, Homo sapiens
  misc_feature: Table A; Target 72142; HLA-B*35:01; PRDM7; ENSG00000126856; CTA
EAANSGYSW

SEQ ID NO: 72143 - protein, 9 aa, Homo sapiens
  misc_feature: Table A; Target 72143; HLA-B*39:01; PRDM7; ENSG00000126856; CTA
EAANSGYSW

SEQ ID NO: 72144 - protein, 9 aa, Homo sapiens
  misc_feature: Table A; Target 72144; HLA-B*44:02; PRDM7; ENSG00000126856; CTA
EAANSGYSW

SEQ ID NO: 72145 - protein, 9 aa, Homo sapiens
  misc_feature: Table A; Target 72145; HLA-B*57:01; PRDM7; ENSG00000126856; CTA
EAANSGYSW

SEQ ID NO: 72146 - protein, 9 aa, Homo sapiens
  misc_feature: Table A; Target 72146; HLA-B*58:01; PRDM7; ENSG00000126856; CTA
EAANSGYSW

SEQ ID NO: 72147 - protein, 9 aa, Homo sapiens
  misc_feature: Table A; Target 72147; HLA-C*07:06; PRDM7; ENSG00000126856; CTA
EAANSGYSW

SEQ ID NO: 72148 - protein, 9 aa, Homo sapiens
  misc_feature: Table A; Target 72148; HLA-C*16:04; PRDM7; ENSG00000126856; CTA
EAANSGYSW

SEQ ID NO: 72149 - protein, 9 aa, Homo sapiens
  misc_feature: Table A; Target 72149; HLA-A*25:01; PRDM7; ENSG00000126856; CTA
EASDLPLGL

SEQ ID NO: 72150 - protein, 9 aa, Homo sapiens
  misc_feature: Table A; Target 72150; HLA-A*26:01; PRDM7; ENSG00000126856; CTA
EASDLPLGL

SEQ ID NO: 72151 - protein, 9 aa, Homo sapiens
  misc_feature: Table A; Target 72151; HLA-A*33:03; PRDM7; ENSG00000126856; CTA
EASDLPLGL

SEQ ID NO: 72152 - protein, 9 aa, Homo sapiens
  misc_feature: Table A; Target 72152; HLA-A*68:01; PRDM7; ENSG00000126856; CTA
EASDLPLGL

SEQ ID NO: 72153 - protein, 9 aa, Homo sapiens
  misc_feature: Table A; Target 72153; HLA-A*68:02; PRDM7; ENSG00000126856; CTA
EASDLPLGL

SEQ ID NO: 72154 - protein, 9 aa, Homo sapiens
  misc_feature: Table A; Target 72154; HLA-B*27:05; PRDM7; ENSG00000126856; CTA
EASDLPLGL

SEQ ID NO: 72155 - protein, 9 aa, Homo sapiens
  misc_feature: Table A; Target 72155; HLA-B*35:01; PRDM7; ENSG00000126856; CTA
EASDLPLGL

SEQ ID NO: 72156 - protein, 9 aa, Homo sapiens
  misc_feature: Table A; Target 72156; HLA-B*35:03; PRDM7; ENSG00000126856; CTA
EASDLPLGL

SEQ ID NO: 72157 - protein, 9 aa, Homo sapiens
  misc_feature: Table A; Target 72157; HLA-B*38:01; PRDM7; ENSG00000126856; CTA
EASDLPLGL

SEQ ID NO: 72158 - protein, 9 aa, Homo sapiens
  misc_feature: Table A; Target 72158; HLA-B*39:01; PRDM7; ENSG00000126856; CTA
EASDLPLGL

SEQ ID NO: 72159 - protein, 9 aa, Homo sapiens
  misc_feature: Table A; Target 72159; HLA-B*44:03; PRDM7; ENSG00000126856; CTA
EASDLPLGL

SEQ ID NO: 72160 - protein, 9 aa, Homo sapiens
  misc_feature: Table A; Target 72160; HLA-C*02:02; PRDM7; ENSG00000126856; CTA
EASDLPLGL

SEQ ID NO: 72161 - protein, 9 aa, Homo sapiens
  misc_feature: Table A; Target 72161; HLA-C*05:01; PRDM7; ENSG00000126856; CTA
EASDLPLGL

SEQ ID NO: 72162 - protein, 9 aa, Homo sapiens
  misc_feature: Table A; Target 72162; HLA-C*07:06; PRDM7; ENSG00000126856; CTA
EASDLPLGL

SEQ ID NO: 72163 - protein, 9 aa, Homo sapiens
  misc_feature: Table A; Target 72163; HLA-C*12:03; PRDM7; ENSG00000126856; CTA
EASDLPLGL

SEQ ID NO: 72164 - protein, 9 aa, Homo sapiens
  misc_feature: Table A; Target 72164; HLA-C*16:04; PRDM7; ENSG00000126856; CTA
EASDLPLGL

SEQ ID NO: 72165 - protein, 11 aa, Homo sapiens
  misc_feature: Table A; Target 72165; HLA-A*25:01; PRDM7; ENSG00000126856; CTA
EASDLPLGLHF

SEQ ID NO: 72166 - protein, 11 aa, Homo sapiens
  misc_feature: Table A; Target 72166; HLA-A*26:01; PRDM7; ENSG00000126856; CTA
EASDLPLGLHF

SEQ ID NO: 72167 - protein, 11 aa, Homo sapiens
  misc_feature: Table A; Target 72167; HLA-A*33:03; PRDM7; ENSG00000126856; CTA
EASDLPLGLHF

SEQ ID NO: 72168 - protein, 11 aa, Homo sapiens
  misc_feature: Table A; Target 72168; HLA-A*68:01; PRDM7; ENSG00000126856; CTA
EASDLPLGLHF

SEQ ID NO: 72169 - protein, 11 aa, Homo sapiens
  misc_feature: Table A; Target 72169; HLA-A*68:02; PRDM7; ENSG00000126856; CTA
EASDLPLGLHF

SEQ ID NO: 72170 - protein, 11 aa, Homo sapiens
  misc_feature: Table A; Target 72170; HLA-B*44:03; PRDM7; ENSG00000126856; CTA
EASDLPLGLHF

SEQ ID NO: 72171 - protein, 10 aa, Homo sapiens
  misc_feature: Table A; Target 72171; HLA-A*33:03; PRDM7; ENSG00000126856; CTA
EASTSGQHSR

SEQ ID NO: 72172 - protein, 10 aa, Homo sapiens
  misc_feature: Table A; Target 72172; HLA-A*68:01; PRDM7; ENSG00000126856; CTA
EASTSGQHSR

SEQ ID NO: 72173 - protein, 10 aa, Homo sapiens
  misc_feature: Table A; Target 72173; HLA-C*07:06; PRDM7; ENSG00000126856; CTA
EASTSGQHSR

SEQ ID NO: 72174 - protein, 11 aa, Homo sapiens
  misc_feature: Table A; Target 72174; HLA-A*68:01; PRDM7; ENSG00000126856; CTA
EASTSGQHSRL

SEQ ID NO: 72175 - protein, 8 aa, Homo sapiens
  misc_feature: Table A; Target 72175; HLA-B*18:01; PRDM7; ENSG00000126856; CTA
EEAANSGY

SEQ ID NO: 72176 - protein, 8 aa, Homo sapiens
  misc_feature: Table A; Target 72176; HLA-B*44:02; PRDM7; ENSG00000126856; CTA
EEAANSGY

SEQ ID NO: 72177 - protein, 8 aa, Homo sapiens
  misc_feature: Table A; Target 72177; HLA-B*44:03; PRDM7; ENSG00000126856; CTA
EEAANSGY

SEQ ID NO: 72178 - protein, 10 aa, Homo sapiens
  misc_feature: Table A; Target 72178; HLA-A*25:01; PRDM7; ENSG00000126856; CTA
EEAANSGYSW

SEQ ID NO: 72179 - protein, 10 aa, Homo sapiens
  misc_feature: Table A; Target 72179; HLA-B*18:01; PRDM7; ENSG00000126856; CTA
EEAANSGYSW

SEQ ID NO: 72180 - protein, 10 aa, Homo sapiens
  misc_feature: Table A; Target 72180; HLA-B*27:02; PRDM7; ENSG00000126856; CTA
EEAANSGYSW

SEQ ID NO: 72181 - protein, 10 aa, Homo sapiens
  misc_feature: Table A; Target 72181; HLA-C*16:04; PRDM7; ENSG00000126856; CTA
EEAANSGYSW

SEQ ID NO: 72182 - protein, 8 aa, Homo sapiens
  misc_feature: Table A; Target 72182; HLA-B*18:01; PRDM7; ENSG00000126856; CTA
EEQNLVAF

SEQ ID NO: 72183 - protein, 8 aa, Homo sapiens
  misc_feature: Table A; Target 72183; HLA-B*37:01; PRDM7; ENSG00000126856; CTA
EEQNLVAF

SEQ ID NO: 72184 - protein, 8 aa, Homo sapiens
  misc_feature: Table A; Target 72184; HLA-B*44:02; PRDM7; ENSG00000126856; CTA
EEQNLVAF

SEQ ID NO: 72185 - protein, 10 aa, Homo sapiens
  misc_feature: Table A; Target 72185; HLA-A*30:02; PRDM7; ENSG00000126856; CTA
EEQNLVAFQY

SEQ ID NO: 72186 - protein, 10 aa, Homo sapiens
  misc_feature: Table A; Target 72186; HLA-B*18:01; PRDM7; ENSG00000126856; CTA
EEQNLVAFQY

SEQ ID NO: 72187 - protein, 10 aa, Homo sapiens
  misc_feature: Table A; Target 72187; HLA-B*27:02; PRDM7; ENSG00000126856; CTA
EEQNLVAFQY

SEQ ID NO: 72188 - protein, 10 aa, Homo sapiens
  misc_feature: Table A; Target 72188; HLA-B*27:05; PRDM7; ENSG00000126856; CTA
EEQNLVAFQY

SEQ ID NO: 72189 - protein, 10 aa, Homo sapiens
  misc_feature: Table A; Target 72189; HLA-B*44:02; PRDM7; ENSG00000126856; CTA
EEQNLVAFQY

SEQ ID NO: 72190 - protein, 9 aa, Homo sapiens
  misc_feature: Table A; Target 72190; HLA-B*44:02; PRDM7; ENSG00000126856; CTA
EEWAEMGDW

SEQ ID NO: 72191 - protein, 9 aa, Homo sapiens
  misc_feature: Table A; Target 72191; HLA-B*44:03; PRDM7; ENSG00000126856; CTA
EEWAEMGDW

SEQ ID NO: 72192 - protein, 9 aa, Homo sapiens
  misc_feature: Table A; Target 72192; HLA-B*18:01; PRDM7; ENSG00000126856; CTA
EEWTPRQQV

SEQ ID NO: 72193 - protein, 9 aa, Homo sapiens
  misc_feature: Table A; Target 72193; HLA-B*44:02; PRDM7; ENSG00000126856; CTA
EEWTPRQQV

SEQ ID NO: 72194 - protein, 9 aa, Homo sapiens
  misc_feature: Table A; Target 72194; HLA-B*44:03; PRDM7; ENSG00000126856; CTA
EEWTPRQQV

SEQ ID NO: 72195 - protein, 9 aa, Homo sapiens
  misc_feature: Table A; Target 72195; HLA-B*49:01; PRDM7; ENSG00000126856; CTA
EEWTPRQQV

SEQ ID NO: 72196 - protein, 10 aa, Homo sapiens
  misc_feature: Table A; Target 72196; HLA-B*44:02; PRDM7; ENSG00000126856; CTA
EEWTPRQQVK

SEQ ID NO: 72197 - protein, 8 aa, Homo sapiens
  misc_feature: Table A; Target 72197; HLA-B*08:01; PRDM7; ENSG00000126856; CTA
ELGIRSSI

SEQ ID NO: 72198 - protein, 9 aa, Homo sapiens
  misc_feature: Table A; Target 72198; HLA-A*68:02; PRDM7; ENSG00000126856; CTA
ELSGTPNLL

SEQ ID NO: 72199 - protein, 9 aa, Homo sapiens
  misc_feature: Table A; Target 72199; HLA-B*38:01; PRDM7; ENSG00000126856; CTA
ELSGTPNLL

SEQ ID NO: 72200 - protein, 9 aa, Homo sapiens
  misc_feature: Table A; Target 72200; HLA-A*33:01; PRDM7; ENSG00000126856; CTA
EMGDWEKTR

SEQ ID NO: 72201 - protein, 9 aa, Homo sapiens
  misc_feature: Table A; Target 72201; HLA-A*33:03; PRDM7; ENSG00000126856; CTA
EMGDWEKTR

SEQ ID NO: 72202 - protein, 10 aa, Homo sapiens
  misc_feature: Table A; Target 72202; HLA-B*54:01; PRDM7; ENSG00000126856; CTA
ENFSNQRIPA

SEQ ID NO: 72203 - protein, 10 aa, Homo sapiens
  misc_feature: Table A; Target 72203; HLA-B*56:01; PRDM7; ENSG00000126856; CTA
EPAESLGQAV

SEQ ID NO: 72204 - protein, 9 aa, Homo sapiens
  misc_feature: Table A; Target 72204; HLA-B*35:01; PRDM7; ENSG00000126856; CTA
EPQDDDYLY

SEQ ID NO: 72205 - protein, 9 aa, Homo sapiens
  misc_feature: Table A; Target 72205; HLA-B*55:01; PRDM7; ENSG00000126856; CTA
EPQDDDYLY

SEQ ID NO: 72206 - protein, 9 aa, Homo sapiens
  misc_feature: Table A; Target 72206; HLA-C*03:03; PRDM7; ENSG00000126856; CTA
EPQDDDYLY

SEQ ID NO: 72207 - protein, 9 aa, Homo sapiens
  misc_feature: Table A; Target 72207; HLA-B*39:01; PRDM7; ENSG00000126856; CTA
EQAQKPVSP

SEQ ID NO: 72208 - protein, 9 aa, Homo sapiens
  misc_feature: Table A; Target 72208; HLA-A*26:01; PRDM7; ENSG00000126856; CTA
EQNLVAFQY

SEQ ID NO: 72209 - protein, 9 aa, Homo sapiens
  misc_feature: Table A; Target 72209; HLA-A*29:02; PRDM7; ENSG00000126856; CTA
EQNLVAFQY

SEQ ID NO: 72210 - protein, 9 aa, Homo sapiens
  misc_feature: Table A; Target 72210; HLA-A*30:02; PRDM7; ENSG00000126856; CTA
EQNLVAFQY

SEQ ID NO: 72211 - protein, 9 aa, Homo sapiens
  misc_feature: Table A; Target 72211; HLA-A*32:01; PRDM7; ENSG00000126856; CTA
EQNLVAFQY

SEQ ID NO: 72212 - protein, 9 aa, Homo sapiens
  misc_feature: Table A; Target 72212; HLA-B*15:01; PRDM7; ENSG00000126856; CTA
EQNLVAFQY

SEQ ID NO: 72213 - protein, 9 aa, Homo sapiens
  misc_feature: Table A; Target 72213; HLA-B*15:03; PRDM7; ENSG00000126856; CTA
EQNLVAFQY

SEQ ID NO: 72214 - protein, 9 aa, Homo sapiens
  misc_feature: Table A; Target 72214; HLA-B*18:01; PRDM7; ENSG00000126856; CTA
EQNLVAFQY

SEQ ID NO: 72215 - protein, 9 aa, Homo sapiens
  misc_feature: Table A; Target 72215; HLA-B*27:02; PRDM7; ENSG00000126856; CTA
EQNLVAFQY

SEQ ID NO: 72216 - protein, 9 aa, Homo sapiens
  misc_feature: Table A; Target 72216; HLA-B*27:05; PRDM7; ENSG00000126856; CTA
EQNLVAFQY

SEQ ID NO: 72217 - protein, 9 aa, Homo sapiens
  misc_feature: Table A; Target 72217; HLA-B*35:01; PRDM7; ENSG00000126856; CTA
EQNLVAFQY

SEQ ID NO: 72218 - protein, 9 aa, Homo sapiens
  misc_feature: Table A; Target 72218; HLA-B*44:02; PRDM7; ENSG00000126856; CTA
EQNLVAFQY

SEQ ID NO: 72219 - protein, 9 aa, Homo sapiens
  misc_feature: Table A; Target 72219; HLA-B*44:03; PRDM7; ENSG00000126856; CTA
EQNLVAFQY

SEQ ID NO: 72220 - protein, 9 aa, Homo sapiens
  misc_feature: Table A; Target 72220; HLA-C*07:04; PRDM7; ENSG00000126856; CTA
EQNLVAFQY

SEQ ID NO: 72221 - protein, 9 aa, Homo sapiens
  misc_feature: Table A; Target 72221; HLA-C*07:06; PRDM7; ENSG00000126856; CTA
EQNLVAFQY

SEQ ID NO: 72222 - protein, 9 aa, Homo sapiens
  misc_feature: Table A; Target 72222; HLA-C*16:04; PRDM7; ENSG00000126856; CTA
EQNLVAFQY

SEQ ID NO: 72223 - protein, 10 aa, Homo sapiens
  misc_feature: Table A; Target 72223; HLA-A*25:01; PRDM7; ENSG00000126856; CTA
ESLGQAVNCW

SEQ ID NO: 72224 - protein, 10 aa, Homo sapiens
  misc_feature: Table A; Target 72224; HLA-A*26:01; PRDM7; ENSG00000126856; CTA
ESLGQAVNCW

SEQ ID NO: 72225 - protein, 10 aa, Homo sapiens
  misc_feature: Table A; Target 72225; HLA-A*33:01; PRDM7; ENSG00000126856; CTA
ESLGQAVNCW

SEQ ID NO: 72226 - protein, 10 aa, Homo sapiens
  misc_feature: Table A; Target 72226; HLA-A*33:03; PRDM7; ENSG00000126856; CTA
ESLGQAVNCW

SEQ ID NO: 72227 - protein, 10 aa, Homo sapiens
  misc_feature: Table A; Target 72227; HLA-A*68:01; PRDM7; ENSG00000126856; CTA
ESLGQAVNCW

SEQ ID NO: 72228 - protein, 10 aa, Homo sapiens
  misc_feature: Table A; Target 72228; HLA-B*44:02; PRDM7; ENSG00000126856; CTA
ESLGQAVNCW

SEQ ID NO: 72229 - protein, 10 aa, Homo sapiens
  misc_feature: Table A; Target 72229; HLA-B*57:01; PRDM7; ENSG00000126856; CTA
ESLGQAVNCW

SEQ ID NO: 72230 - protein, 10 aa, Homo sapiens
  misc_feature: Table A; Target 72230; HLA-B*58:01; PRDM7; ENSG00000126856; CTA
ESLGQAVNCW

SEQ ID NO: 72231 - protein, 10 aa, Homo sapiens
  misc_feature: Table A; Target 72231; HLA-C*16:04; PRDM7; ENSG00000126856; CTA
ESLGQAVNCW

SEQ ID NO: 72232 - protein, 9 aa, Homo sapiens
  misc_feature: Table A; Target 72232; HLA-A*25:01; PRDM7; ENSG00000126856; CTA
ETEGKMYSL

SEQ ID NO: 72233 - protein, 9 aa, Homo sapiens
  misc_feature: Table A; Target 72233; HLA-A*26:01; PRDM7; ENSG00000126856; CTA
ETEGKMYSL

SEQ ID NO: 72234 - protein, 9 aa, Homo sapiens
  misc_feature: Table A; Target 72234; HLA-A*33:01; PRDM7; ENSG00000126856; CTA
ETEGKMYSL

SEQ ID NO: 72235 - protein, 9 aa, Homo sapiens
  misc_feature: Table A; Target 72235; HLA-A*33:03; PRDM7; ENSG00000126856; CTA
ETEGKMYSL

SEQ ID NO: 72236 - protein, 9 aa, Homo sapiens
  misc_feature: Table A; Target 72236; HLA-A*68:01; PRDM7; ENSG00000126856; CTA
ETEGKMYSL

SEQ ID NO: 72237 - protein, 9 aa, Homo sapiens
  misc_feature: Table A; Target 72237; HLA-A*68:02; PRDM7; ENSG00000126856; CTA
ETEGKMYSL

SEQ ID NO: 72238 - protein, 9 aa, Homo sapiens
  misc_feature: Table A; Target 72238; HLA-B*08:01; PRDM7; ENSG00000126856; CTA
ETEGKMYSL

SEQ ID NO: 72239 - protein, 10 aa, Homo sapiens
  misc_feature: Table A; Target 72239; HLA-A*33:01; PRDM7; ENSG00000126856; CTA
ETEGKMYSLR

SEQ ID NO: 72240 - protein, 10 aa, Homo sapiens
  misc_feature: Table A; Target 72240; HLA-A*33:03; PRDM7; ENSG00000126856; CTA
ETEGKMYSLR

SEQ ID NO: 72241 - protein, 10 aa, Homo sapiens
  misc_feature: Table A; Target 72241; HLA-A*68:01; PRDM7; ENSG00000126856; CTA
ETEGKMYSLR

SEQ ID NO: 72242 - protein, 9 aa, Homo sapiens
  misc_feature: Table A; Target 72242; HLA-A*33:03; PRDM7; ENSG00000126856; CTA
EYGQELGIR

SEQ ID NO: 72243 - protein, 9 aa, Homo sapiens
  misc_feature: Table A; Target 72243; HLA-C*14:02; PRDM7; ENSG00000126856; CTA
FFIDSCAAH

SEQ ID NO: 72244 - protein, 10 aa, Homo sapiens
  misc_feature: Table A; Target 72244; HLA-C*07:02; PRDM7; ENSG00000126856; CTA
FGPYEGRITE

SEQ ID NO: 72245 - protein, 8 aa, Homo sapiens
  misc_feature: Table A; Target 72245; HLA-A*33:01; PRDM7; ENSG00000126856; CTA
FNNESSLR

SEQ ID NO: 72246 - protein, 8 aa, Homo sapiens
  misc_feature: Table A; Target 72246; HLA-A*33:03; PRDM7; ENSG00000126856; CTA
FNNESSLR

SEQ ID NO: 72247 - protein, 8 aa, Homo sapiens
  misc_feature: Table A; Target 72247; HLA-B*13:02; PRDM7; ENSG00000126856; CTA
FQVKNFSV

SEQ ID NO: 72248 - protein, 9 aa, Homo sapiens
  misc_feature: Table A; Target 72248; HLA-A*03:01; PRDM7; ENSG00000126856; CTA
FQYHRQIFY

SEQ ID NO: 72249 - protein, 9 aa, Homo sapiens
  misc_feature: Table A; Target 72249; HLA-A*29:02; PRDM7; ENSG00000126856; CTA
FQYHRQIFY

SEQ ID NO: 72250 - protein, 9 aa, Homo sapiens
  misc_feature: Table A; Target 72250; HLA-C*02:02; PRDM7; ENSG00000126856; CTA
FQYHRQIFY

SEQ ID NO: 72251 - protein, 8 aa, Homo sapiens
  misc_feature: Table A; Target 72251; HLA-C*16:01; PRDM7; ENSG00000126856; CTA
FSNQRIPA

SEQ ID NO: 72252 - protein, 9 aa, Homo sapiens
  misc_feature: Table A; Target 72252; HLA-C*16:01; PRDM7; ENSG00000126856; CTA
FSNQRIPAQ

SEQ ID NO: 72253 - protein, 9 aa, Homo sapiens
  misc_feature: Table A; Target 72253; HLA-A*26:01; PRDM7; ENSG00000126856; CTA
FTKEEWAEM

SEQ ID NO: 72254 - protein, 9 aa, Homo sapiens
  misc_feature: Table A; Target 72254; HLA-B*46:01; PRDM7; ENSG00000126856; CTA
FTKEEWAEM

SEQ ID NO: 72255 - protein, 10 aa, Homo sapiens
  misc_feature: Table A; Target 72255; HLA-A*25:01; PRDM7; ENSG00000126856; CTA
GAASGRKSSW

SEQ ID NO: 72256 - protein, 10 aa, Homo sapiens
  misc_feature: Table A; Target 72256; HLA-A*32:01; PRDM7; ENSG00000126856; CTA
GAASGRKSSW

SEQ ID NO: 72257 - protein, 10 aa, Homo sapiens
  misc_feature: Table A; Target 72257; HLA-B*58:01; PRDM7; ENSG00000126856; CTA
GAASGRKSSW

SEQ ID NO: 72258 - protein, 10 aa, Homo sapiens
  misc_feature: Table A; Target 72258; HLA-C*16:01; PRDM7; ENSG00000126856; CTA
GAASGRKSSW

SEQ ID NO: 72259 - protein, 10 aa, Homo sapiens
  misc_feature: Table A; Target 72259; HLA-C*16:02; PRDM7; ENSG00000126856; CTA
GAASGRKSSW

SEQ ID NO: 72260 - protein, 8 aa, Homo sapiens
  misc_feature: Table A; Target 72260; HLA-B*37:01; PRDM7; ENSG00000126856; CTA
GDWEKTRY

SEQ ID NO: 72261 - protein, 9 aa, Homo sapiens
  misc_feature: Table A; Target 72261; HLA-A*30:01; PRDM7; ENSG00000126856; CTA
GENQSQRSI

SEQ ID NO: 72262 - protein, 9 aa, Homo sapiens
  misc_feature: Table A; Target 72262; HLA-B*13:02; PRDM7; ENSG00000126856; CTA
GENQSQRSI

SEQ ID NO: 72263 - protein, 9 aa, Homo sapiens
  misc_feature: Table A; Target 72263; HLA-B*27:02; PRDM7; ENSG00000126856; CTA
GENQSQRSI

SEQ ID NO: 72264 - protein, 9 aa, Homo sapiens
  misc_feature: Table A; Target 72264; HLA-B*40:01; PRDM7; ENSG00000126856; CTA
GENQSQRSI

SEQ ID NO: 72265 - protein, 9 aa, Homo sapiens
  misc_feature: Table A; Target 72265; HLA-B*44:02; PRDM7; ENSG00000126856; CTA
GENQSQRSI

SEQ ID NO: 72266 - protein, 9 aa, Homo sapiens
  misc_feature: Table A; Target 72266; HLA-B*44:03; PRDM7; ENSG00000126856; CTA
GENQSQRSI

SEQ ID NO: 72267 - protein, 9 aa, Homo sapiens
  misc_feature: Table A; Target 72267; HLA-B*49:01; PRDM7; ENSG00000126856; CTA
GENQSQRSI

SEQ ID NO: 72268 - protein, 9 aa, Homo sapiens
  misc_feature: Table A; Target 72268; HLA-C*16:04; PRDM7; ENSG00000126856; CTA
GENQSQRSI

SEQ ID NO: 72269 - protein, 11 aa, Homo sapiens
  misc_feature: Table A; Target 72269; HLA-B*49:01; PRDM7; ENSG00000126856; CTA
GENQSQRSIHV

SEQ ID NO: 72270 - protein, 10 aa, Homo sapiens
  misc_feature: Table A; Target 72270; HLA-A*25:01; PRDM7; ENSG00000126856; CTA
GIPQAGLGVW

SEQ ID NO: 72271 - protein, 10 aa, Homo sapiens
  misc_feature: Table A; Target 72271; HLA-A*02:03; PRDM7; ENSG00000126856; CTA
GLRATRPAFM

SEQ ID NO: 72272 - protein, 9 aa, Homo sapiens
  misc_feature: Table A; Target 72272; HLA-A*02:03; PRDM7; ENSG00000126856; CTA
GLRIGPSGI

SEQ ID NO: 72273 - protein, 10 aa, Homo sapiens
  misc_feature: Table A; Target 72273; HLA-B*56:01; PRDM7; ENSG00000126856; CTA
GPPTFVKDSA

SEQ ID NO: 72274 - protein, 8 aa, Homo sapiens
  misc_feature: Table A; Target 72274; HLA-B*55:01; PRDM7; ENSG00000126856; CTA
GPSGIPQA

SEQ ID NO: 72275 - protein, 8 aa, Homo sapiens
  misc_feature: Table A; Target 72275; HLA-B*56:01; PRDM7; ENSG00000126856; CTA
GPSGIPQA

SEQ ID NO: 72276 - protein, 10 aa, Homo sapiens
  misc_feature: Table A; Target 72276; HLA-B*07:02; PRDM7; ENSG00000126856; CTA
GPSGIPQAGL

SEQ ID NO: 72277 - protein, 10 aa, Homo sapiens
  misc_feature: Table A; Target 72277; HLA-B*56:01; PRDM7; ENSG00000126856; CTA
GPSGIPQAGL

SEQ ID NO: 72278 - protein, 10 aa, Homo sapiens
  misc_feature: Table A; Target 72278; HLA-C*07:02; PRDM7; ENSG00000126856; CTA
GPSGIPQAGL

SEQ ID NO: 72279 - protein, 9 aa, Homo sapiens
  misc_feature: Table A; Target 72279; HLA-B*07:02; PRDM7; ENSG00000126856; CTA
GPYEGRITE

SEQ ID NO: 72280 - protein, 9 aa, Homo sapiens
  misc_feature: Table A; Target 72280; HLA-B*56:01; PRDM7; ENSG00000126856; CTA
GPYEGRITE

SEQ ID NO: 72281 - protein, 9 aa, Homo sapiens
  misc_feature: Table A; Target 72281; HLA-C*07:02; PRDM7; ENSG00000126856; CTA
GPYEGRITE

SEQ ID NO: 72282 - protein, 10 aa, Homo sapiens
  misc_feature: Table A; Target 72282; HLA-B*13:02; PRDM7; ENSG00000126856; CTA
GQELGIRSSI

SEQ ID NO: 72283 - protein, 9 aa, Homo sapiens
  misc_feature: Table A; Target 72283; HLA-A*03:01; PRDM7; ENSG00000126856; CTA
HAAVMTKPK

SEQ ID NO: 72284 - protein, 9 aa, Homo sapiens
  misc_feature: Table A; Target 72284; HLA-A*68:01; PRDM7; ENSG00000126856; CTA
HAAVMTKPK

SEQ ID NO: 72285 - protein, 9 aa, Homo sapiens
  misc_feature: Table A; Target 72285; HLA-C*07:06; PRDM7; ENSG00000126856; CTA
HAAVMTKPK

SEQ ID NO: 72286 - protein, 10 aa, Homo sapiens
  misc_feature: Table A; Target 72286; HLA-A*33:03; PRDM7; ENSG00000126856; CTA
HLQENFSNQR

SEQ ID NO: 72287 - protein, 10 aa, Homo sapiens
  misc_feature: Table A; Target 72287; HLA-A*68:01; PRDM7; ENSG00000126856; CTA
HLQENFSNQR

SEQ ID NO: 72288 - protein, 10 aa, Homo sapiens
  misc_feature: Table A; Target 72288; HLA-C*07:06; PRDM7; ENSG00000126856; CTA
HLQENFSNQR

SEQ ID NO: 72289 - protein, 9 aa, Homo sapiens
  misc_feature: Table A; Target 72289; HLA-B*07:02; PRDM7; ENSG00000126856; CTA
HPNRSALSL

SEQ ID NO: 72290 - protein, 9 aa, Homo sapiens
  misc_feature: Table A; Target 72290; HLA-B*08:01; PRDM7; ENSG00000126856; CTA
HPNRSALSL

SEQ ID NO: 72291 - protein, 9 aa, Homo sapiens
  misc_feature: Table A; Target 72291; HLA-B*35:01; PRDM7; ENSG00000126856; CTA
HPNRSALSL

SEQ ID NO: 72292 - protein, 9 aa, Homo sapiens
  misc_feature: Table A; Target 72292; HLA-B*35:03; PRDM7; ENSG00000126856; CTA
HPNRSALSL

SEQ ID NO: 72293 - protein, 9 aa, Homo sapiens
  misc_feature: Table A; Target 72293; HLA-B*56:01; PRDM7; ENSG00000126856; CTA
HPNRSALSL

SEQ ID NO: 72294 - protein, 9 aa, Homo sapiens
  misc_feature: Table A; Target 72294; HLA-C*07:02; PRDM7; ENSG00000126856; CTA
HPNRSALSL

SEQ ID NO: 72295 - protein, 10 aa, Homo sapiens
  misc_feature: Table A; Target 72295; HLA-B*15:01; PRDM7; ENSG00000126856; CTA
HQKGMPKASF

SEQ ID NO: 72296 - protein, 8 aa, Homo sapiens
  misc_feature: Table A; Target 72296; HLA-B*08:01; PRDM7; ENSG00000126856; CTA
HSRLKLEL

SEQ ID NO: 72297 - protein, 9 aa, Homo sapiens
  misc_feature: Table A; Target 72297; HLA-A*33:01; PRDM7; ENSG00000126856; CTA
HSRLKLELR

SEQ ID NO: 72298 - protein, 11 aa, Homo sapiens
  misc_feature: Table A; Target 72298; HLA-A*30:01; PRDM7; ENSG00000126856; CTA
IEPAESLGQAV

SEQ ID NO: 72299 - protein, 11 aa, Homo sapiens
  misc_feature: Table A; Target 72299; HLA-B*13:02; PRDM7; ENSG00000126856; CTA
IEPAESLGQAV

SEQ ID NO: 72300 - protein, 11 aa, Homo sapiens
  misc_feature: Table A; Target 72300; HLA-B*40:01; PRDM7; ENSG00000126856; CTA
IEPAESLGQAV

SEQ ID NO: 72301 - protein, 11 aa, Homo sapiens
  misc_feature: Table A; Target 72301; HLA-B*40:02; PRDM7; ENSG00000126856; CTA
IEPAESLGQAV

SEQ ID NO: 72302 - protein, 11 aa, Homo sapiens
  misc_feature: Table A; Target 72302; HLA-B*49:01; PRDM7; ENSG00000126856; CTA
IEPAESLGQAV

SEQ ID NO: 72303 - protein, 8 aa, Homo sapiens
  misc_feature: Table A; Target 72303; HLA-B*08:01; PRDM7; ENSG00000126856; CTA
ILIHAAVM

SEQ ID NO: 72304 - protein, 8 aa, Homo sapiens
  misc_feature: Table A; Target 72304; HLA-B*07:02; PRDM7; ENSG00000126856; CTA
IPAQGIRI

SEQ ID NO: 72305 - protein, 8 aa, Homo sapiens
  misc_feature: Table A; Target 72305; HLA-B*08:01; PRDM7; ENSG00000126856; CTA
IPAQGIRI

SEQ ID NO: 72306 - protein, 8 aa, Homo sapiens
  misc_feature: Table A; Target 72306; HLA-B*51:01; PRDM7; ENSG00000126856; CTA
IPAQGIRI

SEQ ID NO: 72307 - protein, 8 aa, Homo sapiens
  misc_feature: Table A; Target 72307; HLA-B*54:01; PRDM7; ENSG00000126856; CTA
IPAQGIRI

SEQ ID NO: 72308 - protein, 8 aa, Homo sapiens
  misc_feature: Table A; Target 72308; HLA-B*56:01; PRDM7; ENSG00000126856; CTA
IPAQGIRI

SEQ ID NO: 72309 - protein, 8 aa, Homo sapiens
  misc_feature: Table A; Target 72309; HLA-C*07:02; PRDM7; ENSG00000126856; CTA
IPAQGIRI

SEQ ID NO: 72310 - protein, 8 aa, Homo sapiens
  misc_feature: Table A; Target 72310; HLA-B*51:01; PRDM7; ENSG00000126856; CTA
IPQAGLGV

SEQ ID NO: 72311 - protein, 9 aa, Homo sapiens
  misc_feature: Table A; Target 72311; HLA-A*01:01; PRDM7; ENSG00000126856; CTA
ISEPQDDDY

SEQ ID NO: 72312 - protein, 11 aa, Homo sapiens
  misc_feature: Table A; Target 72312; HLA-A*01:01; PRDM7; ENSG00000126856; CTA
ISEPQDDDYLY

SEQ ID NO: 72313 - protein, 11 aa, Homo sapiens
  misc_feature: Table A; Target 72313; HLA-B*57:01; PRDM7; ENSG00000126856; CTA
ISEPQDDDYLY

SEQ ID NO: 72314 - protein, 11 aa, Homo sapiens
  misc_feature: Table A; Target 72314; HLA-B*58:01; PRDM7; ENSG00000126856; CTA
ISEPQDDDYLY

SEQ ID NO: 72315 - protein, 10 aa, Homo sapiens
  misc_feature: Table A; Target 72315; HLA-B*57:01; PRDM7; ENSG00000126856; CTA
ISIYFTKEEW

SEQ ID NO: 72316 - protein, 9 aa, Homo sapiens
  misc_feature: Table A; Target 72316; HLA-A*31:01; PRDM7; ENSG00000126856; CTA
ITVGLRATR

SEQ ID NO: 72317 - protein, 9 aa, Homo sapiens
  misc_feature: Table A; Target 72317; HLA-A*33:03; PRDM7; ENSG00000126856; CTA
ITVGLRATR

SEQ ID NO: 72318 - protein, 9 aa, Homo sapiens
  misc_feature: Table A; Target 72318; HLA-A*68:01; PRDM7; ENSG00000126856; CTA
ITVGLRATR

SEQ ID NO: 72319 - protein, 9 aa, Homo sapiens
  misc_feature: Table A; Target 72319; HLA-B*57:01; PRDM7; ENSG00000126856; CTA
ITVGLRATR

SEQ ID NO: 72320 - protein, 8 aa, Homo sapiens
  misc_feature: Table A; Target 72320; HLA-A*24:02; PRDM7; ENSG00000126856; CTA
IYFTKEEW

SEQ ID NO: 72321 - protein, 8 aa, Homo sapiens
  misc_feature: Table A; Target 72321; HLA-B*57:01; PRDM7; ENSG00000126856; CTA
IYFTKEEW

SEQ ID NO: 72322 - protein, 11 aa, Homo sapiens
  misc_feature: Table A; Target 72322; HLA-A*30:02; PRDM7; ENSG00000126856; CTA
KEISEPQDDDY

SEQ ID NO: 72323 - protein, 8 aa, Homo sapiens
  misc_feature: Table A; Target 72323; HLA-B*18:01; PRDM7; ENSG00000126856; CTA
KETEGKMY

SEQ ID NO: 72324 - protein, 8 aa, Homo sapiens
  misc_feature: Table A; Target 72324; HLA-B*37:01; PRDM7; ENSG00000126856; CTA
KETEGKMY

SEQ ID NO: 72325 - protein, 8 aa, Homo sapiens
  misc_feature: Table A; Target 72325; HLA-B*44:02; PRDM7; ENSG00000126856; CTA
KETEGKMY

SEQ ID NO: 72326 - protein, 8 aa, Homo sapiens
  misc_feature: Table A; Target 72326; HLA-B*44:03; PRDM7; ENSG00000126856; CTA
KETEGKMY

SEQ ID NO: 72327 - protein, 8 aa, Homo sapiens
  misc_feature: Table A; Target 72327; HLA-C*16:02; PRDM7; ENSG00000126856; CTA
KETEGKMY

SEQ ID NO: 72328 - protein, 10 aa, Homo sapiens
  misc_feature: Table A; Target 72328; HLA-A*30:01; PRDM7; ENSG00000126856; CTA
KETEGKMYSL

SEQ ID NO: 72329 - protein, 10 aa, Homo sapiens
  misc_feature: Table A; Target 72329; HLA-B*40:01; PRDM7; ENSG00000126856; CTA
KETEGKMYSL

SEQ ID NO: 72330 - protein, 10 aa, Homo sapiens
  misc_feature: Table A; Target 72330; HLA-B*40:02; PRDM7; ENSG00000126856; CTA
KETEGKMYSL

SEQ ID NO: 72331 - protein, 10 aa, Homo sapiens
  misc_feature: Table A; Target 72331; HLA-B*44:02; PRDM7; ENSG00000126856; CTA
KETEGKMYSL

SEQ ID NO: 72332 - protein, 10 aa, Homo sapiens
  misc_feature: Table A; Target 72332; HLA-B*44:03; PRDM7; ENSG00000126856; CTA
KETEGKMYSL

SEQ ID NO: 72333 - protein, 10 aa, Homo sapiens
  misc_feature: Table A; Target 72333; HLA-B*49:01; PRDM7; ENSG00000126856; CTA
KETEGKMYSL

SEQ ID NO: 72334 - protein, 9 aa, Homo sapiens
  misc_feature: Table A; Target 72334; HLA-A*32:01; PRDM7; ENSG00000126856; CTA
KGHPNRSAL

SEQ ID NO: 72335 - protein, 9 aa, Homo sapiens
  misc_feature: Table A; Target 72335; HLA-B*07:02; PRDM7; ENSG00000126856; CTA
KGHPNRSAL

SEQ ID NO: 72336 - protein, 8 aa, Homo sapiens
  misc_feature: Table A; Target 72336; HLA-A*32:01; PRDM7; ENSG00000126856; CTA
KGMPKASF

SEQ ID NO: 72337 - protein, 8 aa, Homo sapiens
  misc_feature: Table A; Target 72337; HLA-B*08:01; PRDM7; ENSG00000126856; CTA
KGMPKASF

SEQ ID NO: 72338 - protein, 8 aa, Homo sapiens
  misc_feature: Table A; Target 72338; HLA-B*37:01; PRDM7; ENSG00000126856; CTA
KGMPKASF

SEQ ID NO: 72339 - protein, 8 aa, Homo sapiens
  misc_feature: Table A; Target 72339; HLA-C*16:01; PRDM7; ENSG00000126856; CTA
KGMPKASF

SEQ ID NO: 72340 - protein, 10 aa, Homo sapiens
  misc_feature: Table A; Target 72340; HLA-A*02:01; PRDM7; ENSG00000126856; CTA
KMNYNALITV

SEQ ID NO: 72341 - protein, 10 aa, Homo sapiens
  misc_feature: Table A; Target 72341; HLA-A*02:03; PRDM7; ENSG00000126856; CTA
KMNYNALITV

SEQ ID NO: 72342 - protein, 10 aa, Homo sapiens
  misc_feature: Table A; Target 72342; HLA-A*02:04; PRDM7; ENSG00000126856; CTA
KMNYNALITV

SEQ ID NO: 72343 - protein, 10 aa, Homo sapiens
  misc_feature: Table A; Target 72343; HLA-A*02:07; PRDM7; ENSG00000126856; CTA
KMNYNALITV

SEQ ID NO: 72344 - protein, 8 aa, Homo sapiens
  misc_feature: Table A; Target 72344; HLA-B*07:02; PRDM7; ENSG00000126856; CTA
KPMVKDAF

SEQ ID NO: 72345 - protein, 8 aa, Homo sapiens
  misc_feature: Table A; Target 72345; HLA-B*08:01; PRDM7; ENSG00000126856; CTA
KPMVKDAF

SEQ ID NO: 72346 - protein, 8 aa, Homo sapiens
  misc_feature: Table A; Target 72346; HLA-C*07:02; PRDM7; ENSG00000126856; CTA
KPMVKDAF

SEQ ID NO: 72347 - protein, 8 aa, Homo sapiens
  misc_feature: Table A; Target 72347; HLA-C*16:01; PRDM7; ENSG00000126856; CTA
KPMVKDAF

SEQ ID NO: 72348 - protein, 9 aa, Homo sapiens
  misc_feature: Table A; Target 72348; HLA-B*07:02; PRDM7; ENSG00000126856; CTA
KPVSPPGEA

SEQ ID NO: 72349 - protein, 9 aa, Homo sapiens
  misc_feature: Table A; Target 72349; HLA-B*54:01; PRDM7; ENSG00000126856; CTA
KPVSPPGEA

SEQ ID NO: 72350 - protein, 9 aa, Homo sapiens
  misc_feature: Table A; Target 72350; HLA-B*55:01; PRDM7; ENSG00000126856; CTA
KPVSPPGEA

SEQ ID NO: 72351 - protein, 9 aa, Homo sapiens
  misc_feature: Table A; Target 72351; HLA-B*56:01; PRDM7; ENSG00000126856; CTA
KPVSPPGEA

SEQ ID NO: 72352 - protein, 9 aa, Homo sapiens
  misc_feature: Table A; Target 72352; HLA-C*07:02; PRDM7; ENSG00000126856; CTA
KPVSPPGEA

SEQ ID NO: 72353 - protein, 10 aa, Homo sapiens
  misc_feature: Table A; Target 72353; HLA-B*07:02; PRDM7; ENSG00000126856; CTA
KPVSPPGEAS

SEQ ID NO: 72354 - protein, 10 aa, Homo sapiens
  misc_feature: Table A; Target 72354; HLA-B*56:01; PRDM7; ENSG00000126856; CTA
KPVSPPGEAS

SEQ ID NO: 72355 - protein, 11 aa, Homo sapiens
  misc_feature: Table A; Target 72355; HLA-B*56:01; PRDM7; ENSG00000126856; CTA
KPVSPPGEAST

SEQ ID NO: 72356 - protein, 9 aa, Homo sapiens
  misc_feature: Table A; Target 72356; HLA-A*01:01; PRDM7; ENSG00000126856; CTA
KSSANWMRY

SEQ ID NO: 72357 - protein, 9 aa, Homo sapiens
  misc_feature: Table A; Target 72357; HLA-A*03:01; PRDM7; ENSG00000126856; CTA
LIHAAVMTK

SEQ ID NO: 72358 - protein, 9 aa, Homo sapiens
  misc_feature: Table A; Target 72358; HLA-A*03:02; PRDM7; ENSG00000126856; CTA
LIHAAVMTK

SEQ ID NO: 72359 - protein, 9 aa, Homo sapiens
  misc_feature: Table A; Target 72359; HLA-A*01:01; PRDM7; ENSG00000126856; CTA
LLVWSGDEY

SEQ ID NO: 72360 - protein, 9 aa, Homo sapiens
  misc_feature: Table A; Target 72360; HLA-A*29:02; PRDM7; ENSG00000126856; CTA
LLVWSGDEY

SEQ ID NO: 72361 - protein, 9 aa, Homo sapiens
  misc_feature: Table A; Target 72361; HLA-B*15:01; PRDM7; ENSG00000126856; CTA
LLVWSGDEY

SEQ ID NO: 72362 - protein, 9 aa, Homo sapiens
  misc_feature: Table A; Target 72362; HLA-B*15:03; PRDM7; ENSG00000126856; CTA
LLVWSGDEY

SEQ ID NO: 72363 - protein, 9 aa, Homo sapiens
  misc_feature: Table A; Target 72363; HLA-B*46:01; PRDM7; ENSG00000126856; CTA
LLVWSGDEY

SEQ ID NO: 72364 - protein, 9 aa, Homo sapiens
  misc_feature: Table A; Target 72364; HLA-B*54:01; PRDM7; ENSG00000126856; CTA
LPLGLHFGP

SEQ ID NO: 72365 - protein, 9 aa, Homo sapiens
  misc_feature: Table A; Target 72365; HLA-B*51:01; PRDM7; ENSG00000126856; CTA
LSLPPGLRI

SEQ ID NO: 72366 - protein, 9 aa, Homo sapiens
  misc_feature: Table A; Target 72366; HLA-B*57:01; PRDM7; ENSG00000126856; CTA
LSLPPGLRI

SEQ ID NO: 72367 - protein, 9 aa, Homo sapiens
  misc_feature: Table A; Target 72367; HLA-A*01:01; PRDM7; ENSG00000126856; CTA
MGDWEKTRY

SEQ ID NO: 72368 - protein, 9 aa, Homo sapiens
  misc_feature: Table A; Target 72368; HLA-B*57:01; PRDM7; ENSG00000126856; CTA
MGMSMARNW

SEQ ID NO: 72369 - protein, 9 aa, Homo sapiens
  misc_feature: Table A; Target 72369; HLA-A*68:02; PRDM7; ENSG00000126856; CTA
MNYNALITV

SEQ ID NO: 72370 - protein, 9 aa, Homo sapiens
  misc_feature: Table A; Target 72370; HLA-B*49:01; PRDM7; ENSG00000126856; CTA
MNYNALITV

SEQ ID NO: 72371 - protein, 9 aa, Homo sapiens
  misc_feature: Table A; Target 72371; HLA-B*51:01; PRDM7; ENSG00000126856; CTA
MNYNALITV

SEQ ID NO: 72372 - protein, 9 aa, Homo sapiens
  misc_feature: Table A; Target 72372; HLA-B*54:01; PRDM7; ENSG00000126856; CTA
MNYNALITV

SEQ ID NO: 72373 - protein, 9 aa, Homo sapiens
  misc_feature: Table A; Target 72373; HLA-B*56:01; PRDM7; ENSG00000126856; CTA
MNYNALITV

SEQ ID NO: 72374 - protein, 10 aa, Homo sapiens
  misc_feature: Table A; Target 72374; HLA-B*54:01; PRDM7; ENSG00000126856; CTA
MPKASFNNES

SEQ ID NO: 72375 - protein, 8 aa, Homo sapiens
  misc_feature: Table A; Target 72375; HLA-A*33:03; PRDM7; ENSG00000126856; CTA
MTKPKVKR

SEQ ID NO: 72376 - protein, 8 aa, Homo sapiens
  misc_feature: Table A; Target 72376; HLA-B*08:01; PRDM7; ENSG00000126856; CTA
NALITVGL

SEQ ID NO: 72377 - protein, 8 aa, Homo sapiens
  misc_feature: Table A; Target 72377; HLA-B*51:01; PRDM7; ENSG00000126856; CTA
NALITVGL

SEQ ID NO: 72378 - protein, 8 aa, Homo sapiens
  misc_feature: Table A; Target 72378; HLA-C*07:04; PRDM7; ENSG00000126856; CTA
NALITVGL

SEQ ID NO: 72379 - protein, 9 aa, Homo sapiens
  misc_feature: Table A; Target 72379; HLA-A*33:01; PRDM7; ENSG00000126856; CTA
NALITVGLR

SEQ ID NO: 72380 - protein, 9 aa, Homo sapiens
  misc_feature: Table A; Target 72380; HLA-A*33:03; PRDM7; ENSG00000126856; CTA
NALITVGLR

SEQ ID NO: 72381 - protein, 9 aa, Homo sapiens
  misc_feature: Table A; Target 72381; HLA-A*68:01; PRDM7; ENSG00000126856; CTA
NALITVGLR

SEQ ID NO: 72382 - protein, 9 aa, Homo sapiens
  misc_feature: Table A; Target 72382; HLA-C*07:06; PRDM7; ENSG00000126856; CTA
NALITVGLR

SEQ ID NO: 72383 - protein, 10 aa, Homo sapiens
  misc_feature: Table A; Target 72383; HLA-B*54:01; PRDM7; ENSG00000126856; CTA
NALITVGLRA

SEQ ID NO: 72384 - protein, 10 aa, Homo sapiens
  misc_feature: Table A; Target 72384; HLA-A*30:01; PRDM7; ENSG00000126856; CTA
NEASDLPLGL

SEQ ID NO: 72385 - protein, 10 aa, Homo sapiens
  misc_feature: Table A; Target 72385; HLA-B*18:01; PRDM7; ENSG00000126856; CTA
NEASDLPLGL

SEQ ID NO: 72386 - protein, 10 aa, Homo sapiens
  misc_feature: Table A; Target 72386; HLA-B*40:01; PRDM7; ENSG00000126856; CTA
NEASDLPLGL

SEQ ID NO: 72387 - protein, 10 aa, Homo sapiens
  misc_feature: Table A; Target 72387; HLA-B*44:02; PRDM7; ENSG00000126856; CTA
NEASDLPLGL

SEQ ID NO: 72388 - protein, 10 aa, Homo sapiens
  misc_feature: Table A; Target 72388; HLA-B*44:03; PRDM7; ENSG00000126856; CTA
NEASDLPLGL

SEQ ID NO: 72389 - protein, 8 aa, Homo sapiens
  misc_feature: Table A; Target 72389; HLA-B*18:01; PRDM7; ENSG00000126856; CTA
NESSLREL

SEQ ID NO: 72390 - protein, 8 aa, Homo sapiens
  misc_feature: Table A; Target 72390; HLA-B*37:01; PRDM7; ENSG00000126856; CTA
NESSLREL

SEQ ID NO: 72391 - protein, 8 aa, Homo sapiens
  misc_feature: Table A; Target 72391; HLA-B*44:02; PRDM7; ENSG00000126856; CTA
NESSLREL

SEQ ID NO: 72392 - protein, 8 aa, Homo sapiens
  misc_feature: Table A; Target 72392; HLA-B*44:03; PRDM7; ENSG00000126856; CTA
NESSLREL

SEQ ID NO: 72393 - protein, 9 aa, Homo sapiens
  misc_feature: Table A; Target 72393; HLA-C*16:01; PRDM7; ENSG00000126856; CTA
NFSNQRIPA

SEQ ID NO: 72394 - protein, 8 aa, Homo sapiens
  misc_feature: Table A; Target 72394; HLA-B*08:01; PRDM7; ENSG00000126856; CTA
NILIHAAV

SEQ ID NO: 72395 - protein, 9 aa, Homo sapiens
  misc_feature: Table A; Target 72395; HLA-A*02:01; PRDM7; ENSG00000126856; CTA
NMWNAITPL

SEQ ID NO: 72396 - protein, 9 aa, Homo sapiens
  misc_feature: Table A; Target 72396; HLA-A*02:04; PRDM7; ENSG00000126856; CTA
NMWNAITPL

SEQ ID NO: 72397 - protein, 9 aa, Homo sapiens
  misc_feature: Table A; Target 72397; HLA-A*02:07; PRDM7; ENSG00000126856; CTA
NMWNAITPL

SEQ ID NO: 72398 - protein, 9 aa, Homo sapiens
  misc_feature: Table A; Target 72398; HLA-B*13:02; PRDM7; ENSG00000126856; CTA
NQRIPAQGI

SEQ ID NO: 72399 - protein, 9 aa, Homo sapiens
  misc_feature: Table A; Target 72399; HLA-B*15:03; PRDM7; ENSG00000126856; CTA
NQRIPAQGI

SEQ ID NO: 72400 - protein, 9 aa, Homo sapiens
  misc_feature: Table A; Target 72400; HLA-C*06:02; PRDM7; ENSG00000126856; CTA
NQRIPAQGI

SEQ ID NO: 72401 - protein, 9 aa, Homo sapiens
  misc_feature: Table A; Target 72401; HLA-B*37:01; PRDM7; ENSG00000126856; CTA
NQSQRSIHV

SEQ ID NO: 72402 - protein, 10 aa, Homo sapiens
  misc_feature: Table A; Target 72402; HLA-A*68:01; PRDM7; ENSG00000126856; CTA
NTSDSEQAQK

SEQ ID NO: 72403 - protein, 10 aa, Homo sapiens
  misc_feature: Table A; Target 72403; HLA-C*07:06; PRDM7; ENSG00000126856; CTA
NTSDSEQAQK

SEQ ID NO: 72404 - protein, 9 aa, Homo sapiens
  misc_feature: Table A; Target 72404; HLA-A*25:01; PRDM7; ENSG00000126856; CTA
NVKMNYNAL

SEQ ID NO: 72405 - protein, 9 aa, Homo sapiens
  misc_feature: Table A; Target 72405; HLA-B*07:02; PRDM7; ENSG00000126856; CTA
NVKMNYNAL

SEQ ID NO: 72406 - protein, 9 aa, Homo sapiens
  misc_feature: Table A; Target 72406; HLA-B*08:01; PRDM7; ENSG00000126856; CTA
NVKMNYNAL

SEQ ID NO: 72407 - protein, 9 aa, Homo sapiens
  misc_feature: Table A; Target 72407; HLA-C*01:02; PRDM7; ENSG00000126856; CTA
NVKMNYNAL

SEQ ID NO: 72408 - protein, 9 aa, Homo sapiens
  misc_feature: Table A; Target 72408; HLA-C*14:02; PRDM7; ENSG00000126856; CTA
NVKMNYNAL

SEQ ID NO: 72409 - protein, 8 aa, Homo sapiens
  misc_feature: Table A; Target 72409; HLA-C*14:02; PRDM7; ENSG00000126856; CTA
NYNALITV

SEQ ID NO: 72410 - protein, 9 aa, Homo sapiens
  misc_feature: Table A; Target 72410; HLA-A*33:03; PRDM7; ENSG00000126856; CTA
NYNALITVG

SEQ ID NO: 72411 - protein, 9 aa, Homo sapiens
  misc_feature: Table A; Target 72411; HLA-C*14:02; PRDM7; ENSG00000126856; CTA
NYNALITVG

SEQ ID NO: 72412 - protein, 10 aa, Homo sapiens
  misc_feature: Table A; Target 72412; HLA-A*23:01; PRDM7; ENSG00000126856; CTA
NYNALITVGL

SEQ ID NO: 72413 - protein, 10 aa, Homo sapiens
  misc_feature: Table A; Target 72413; HLA-A*24:02; PRDM7; ENSG00000126856; CTA
NYNALITVGL

SEQ ID NO: 72414 - protein, 10 aa, Homo sapiens
  misc_feature: Table A; Target 72414; HLA-C*14:02; PRDM7; ENSG00000126856; CTA
NYNALITVGL

SEQ ID NO: 72415 - protein, 9 aa, Homo sapiens
  misc_feature: Table A; Target 72415; HLA-B*56:01; PRDM7; ENSG00000126856; CTA
PPTFVKDSA

SEQ ID NO: 72416 - protein, 9 aa, Homo sapiens
  misc_feature: Table A; Target 72416; HLA-C*07:04; PRDM7; ENSG00000126856; CTA
QAQKPVSPP

SEQ ID NO: 72417 - protein, 8 aa, Homo sapiens
  misc_feature: Table A; Target 72417; HLA-B*37:01; PRDM7; ENSG00000126856; CTA
QDHLQENF

SEQ ID NO: 72418 - protein, 8 aa, Homo sapiens
  misc_feature: Table A; Target 72418; HLA-C*07:01; PRDM7; ENSG00000126856; CTA
QDHLQENF

SEQ ID NO: 72419 - protein, 9 aa, Homo sapiens
  misc_feature: Table A; Target 72419; HLA-A*30:01; PRDM7; ENSG00000126856; CTA
QELGIRSSI

SEQ ID NO: 72420 - protein, 9 aa, Homo sapiens
  misc_feature: Table A; Target 72420; HLA-B*40:01; PRDM7; ENSG00000126856; CTA
QELGIRSSI

SEQ ID NO: 72421 - protein, 9 aa, Homo sapiens
  misc_feature: Table A; Target 72421; HLA-B*44:02; PRDM7; ENSG00000126856; CTA
QELGIRSSI

SEQ ID NO: 72422 - protein, 9 aa, Homo sapiens
  misc_feature: Table A; Target 72422; HLA-B*44:03; PRDM7; ENSG00000126856; CTA
QELGIRSSI

SEQ ID NO: 72423 - protein, 9 aa, Homo sapiens
  misc_feature: Table A; Target 72423; HLA-B*49:01; PRDM7; ENSG00000126856; CTA
QELGIRSSI

SEQ ID NO: 72424 - protein, 9 aa, Homo sapiens
  misc_feature: Table A; Target 72424; HLA-A*30:01; PRDM7; ENSG00000126856; CTA
QENFSNQRI

SEQ ID NO: 72425 - protein, 9 aa, Homo sapiens
  misc_feature: Table A; Target 72425; HLA-B*13:02; PRDM7; ENSG00000126856; CTA
QENFSNQRI

SEQ ID NO: 72426 - protein, 9 aa, Homo sapiens
  misc_feature: Table A; Target 72426; HLA-B*40:01; PRDM7; ENSG00000126856; CTA
QENFSNQRI

SEQ ID NO: 72427 - protein, 9 aa, Homo sapiens
  misc_feature: Table A; Target 72427; HLA-B*44:02; PRDM7; ENSG00000126856; CTA
QENFSNQRI

SEQ ID NO: 72428 - protein, 9 aa, Homo sapiens
  misc_feature: Table A; Target 72428; HLA-B*44:03; PRDM7; ENSG00000126856; CTA
QENFSNQRI

SEQ ID NO: 72429 - protein, 9 aa, Homo sapiens
  misc_feature: Table A; Target 72429; HLA-B*49:01; PRDM7; ENSG00000126856; CTA
QENFSNQRI

SEQ ID NO: 72430 - protein, 9 aa, Homo sapiens
  misc_feature: Table A; Target 72430; HLA-C*16:04; PRDM7; ENSG00000126856; CTA
QENFSNQRI

SEQ ID NO: 72431 - protein, 10 aa, Homo sapiens
  misc_feature: Table A; Target 72431; HLA-C*16:02; PRDM7; ENSG00000126856; CTA
QGENQSQRSI

SEQ ID NO: 72432 - protein, 9 aa, Homo sapiens
  misc_feature: Table A; Target 72432; HLA-B*15:03; PRDM7; ENSG00000126856; CTA
QKGMPKASF

SEQ ID NO: 72433 - protein, 8 aa, Homo sapiens
  misc_feature: Table A; Target 72433; HLA-A*29:02; PRDM7; ENSG00000126856; CTA
QNLVAFQY

SEQ ID NO: 72434 - protein, 8 aa, Homo sapiens
  misc_feature: Table A; Target 72434; HLA-B*18:01; PRDM7; ENSG00000126856; CTA
QNLVAFQY

SEQ ID NO: 72435 - protein, 9 aa, Homo sapiens
  misc_feature: Table A; Target 72435; HLA-B*27:05; PRDM7; ENSG00000126856; CTA
QRIPAQGIR

SEQ ID NO: 72436 - protein, 9 aa, Homo sapiens
  misc_feature: Table A; Target 72436; HLA-A*33:03; PRDM7; ENSG00000126856; CTA
QVKNFSVNM

SEQ ID NO: 72437 - protein, 10 aa, Homo sapiens
  misc_feature: Table A; Target 72437; HLA-A*25:01; PRDM7; ENSG00000126856; CTA
QVKNFSVNMW

SEQ ID NO: 72438 - protein, 10 aa, Homo sapiens
  misc_feature: Table A; Target 72438; HLA-B*57:01; PRDM7; ENSG00000126856; CTA
QVKNFSVNMW

SEQ ID NO: 72439 - protein, 9 aa, Homo sapiens
  misc_feature: Table A; Target 72439; HLA-A*25:01; PRDM7; ENSG00000126856; CTA
QVKPPWMAF

SEQ ID NO: 72440 - protein, 9 aa, Homo sapiens
  misc_feature: Table A; Target 72440; HLA-A*31:01; PRDM7; ENSG00000126856; CTA
QVKPPWMAF

SEQ ID NO: 72441 - protein, 9 aa, Homo sapiens
  misc_feature: Table A; Target 72441; HLA-B*57:01; PRDM7; ENSG00000126856; CTA
QVKPPWMAF

SEQ ID NO: 72442 - protein, 10 aa, Homo sapiens
  misc_feature: Table A; Target 72442; HLA-A*31:01; PRDM7; ENSG00000126856; CTA
QVKPPWMAFR

SEQ ID NO: 72443 - protein, 9 aa, Homo sapiens
  misc_feature: Table A; Target 72443; HLA-A*31:01; PRDM7; ENSG00000126856; CTA
QYHRQIFYR

SEQ ID NO: 72444 - protein, 9 aa, Homo sapiens
  misc_feature: Table A; Target 72444; HLA-A*33:01; PRDM7; ENSG00000126856; CTA
QYHRQIFYR

SEQ ID NO: 72445 - protein, 9 aa, Homo sapiens
  misc_feature: Table A; Target 72445; HLA-A*30:01; PRDM7; ENSG00000126856; CTA
RELSGTPNL

SEQ ID NO: 72446 - protein, 9 aa, Homo sapiens
  misc_feature: Table A; Target 72446; HLA-B*37:01; PRDM7; ENSG00000126856; CTA
RELSGTPNL

SEQ ID NO: 72447 - protein, 9 aa, Homo sapiens
  misc_feature: Table A; Target 72447; HLA-B*40:01; PRDM7; ENSG00000126856; CTA
RELSGTPNL

SEQ ID NO: 72448 - protein, 9 aa, Homo sapiens
  misc_feature: Table A; Target 72448; HLA-B*40:02; PRDM7; ENSG00000126856; CTA
RELSGTPNL

SEQ ID NO: 72449 - protein, 9 aa, Homo sapiens
  misc_feature: Table A; Target 72449; HLA-B*44:02; PRDM7; ENSG00000126856; CTA
RELSGTPNL

SEQ ID NO: 72450 - protein, 9 aa, Homo sapiens
  misc_feature: Table A; Target 72450; HLA-B*44:03; PRDM7; ENSG00000126856; CTA
RELSGTPNL

SEQ ID NO: 72451 - protein, 9 aa, Homo sapiens
  misc_feature: Table A; Target 72451; HLA-B*49:01; PRDM7; ENSG00000126856; CTA
RELSGTPNL

SEQ ID NO: 72452 - protein, 10 aa, Homo sapiens
  misc_feature: Table A; Target 72452; HLA-A*30:01; PRDM7; ENSG00000126856; CTA
RELSGTPNLL

SEQ ID NO: 72453 - protein, 10 aa, Homo sapiens
  misc_feature: Table A; Target 72453; HLA-B*40:01; PRDM7; ENSG00000126856; CTA
RELSGTPNLL

SEQ ID NO: 72454 - protein, 10 aa, Homo sapiens
  misc_feature: Table A; Target 72454; HLA-A*02:01; PRDM7; ENSG00000126856; CTA
RIGPSGIPQA

SEQ ID NO: 72455 - protein, 9 aa, Homo sapiens
  misc_feature: Table A; Target 72455; HLA-A*02:07; PRDM7; ENSG00000126856; CTA
RIPAQGIRI

SEQ ID NO: 72456 - protein, 10 aa, Homo sapiens
  misc_feature: Table A; Target 72456; HLA-A*03:01; PRDM7; ENSG00000126856; CTA
RIRSGNILIH

SEQ ID NO: 72457 - protein, 10 aa, Homo sapiens
  misc_feature: Table A; Target 72457; HLA-B*57:01; PRDM7; ENSG00000126856; CTA
RSIHVPHAVW

SEQ ID NO: 72458 - protein, 9 aa, Homo sapiens
  misc_feature: Table A; Target 72458; HLA-A*03:01; PRDM7; ENSG00000126856; CTA
RTERKPMVK

SEQ ID NO: 72459 - protein, 11 aa, Homo sapiens
  misc_feature: Table A; Target 72459; HLA-B*57:01; PRDM7; ENSG00000126856; CTA
RTSQDHLQENF

SEQ ID NO: 72460 - protein, 9 aa, Homo sapiens
  misc_feature: Table A; Target 72460; HLA-C*03:03; PRDM7; ENSG00000126856; CTA
RVIRPGCEL

SEQ ID NO: 72461 - protein, 9 aa, Homo sapiens
  misc_feature: Table A; Target 72461; HLA-C*03:04; PRDM7; ENSG00000126856; CTA
RVIRPGCEL

SEQ ID NO: 72462 - protein, 9 aa, Homo sapiens
  misc_feature: Table A; Target 72462; HLA-A*02:01; PRDM7; ENSG00000126856; CTA
SALSLPPGL

SEQ ID NO: 72463 - protein, 9 aa, Homo sapiens
  misc_feature: Table A; Target 72463; HLA-A*02:04; PRDM7; ENSG00000126856; CTA
SALSLPPGL

SEQ ID NO: 72464 - protein, 10 aa, Homo sapiens
  misc_feature: Table A; Target 72464; HLA-A*33:01; PRDM7; ENSG00000126856; CTA
SAVDKGHPNR

SEQ ID NO: 72465 - protein, 10 aa, Homo sapiens
  misc_feature: Table A; Target 72465; HLA-A*68:01; PRDM7; ENSG00000126856; CTA
SAVDKGHPNR

SEQ ID NO: 72466 - protein, 10 aa, Homo sapiens
  misc_feature: Table A; Target 72466; HLA-C*07:06; PRDM7; ENSG00000126856; CTA
SAVDKGHPNR

SEQ ID NO: 72467 - protein, 9 aa, Homo sapiens
  misc_feature: Table A; Target 72467; HLA-B*37:01; PRDM7; ENSG00000126856; CTA
SDLPLGLHF

SEQ ID NO: 72468 - protein, 9 aa, Homo sapiens
  misc_feature: Table A; Target 72468; HLA-B*44:02; PRDM7; ENSG00000126856; CTA
SDLPLGLHF

SEQ ID NO: 72469 - protein, 9 aa, Homo sapiens
  misc_feature: Table A; Target 72469; HLA-B*44:03; PRDM7; ENSG00000126856; CTA
SDLPLGLHF

SEQ ID NO: 72470 - protein, 9 aa, Homo sapiens
  misc_feature: Table A; Target 72470; HLA-B*40:01; PRDM7; ENSG00000126856; CTA
SEPQDDDYL

SEQ ID NO: 72471 - protein, 8 aa, Homo sapiens
  misc_feature: Table A; Target 72471; HLA-C*01:02; PRDM7; ENSG00000126856; CTA
SFNNESSL

SEQ ID NO: 72472 - protein, 8 aa, Homo sapiens
  misc_feature: Table A; Target 72472; HLA-C*14:02; PRDM7; ENSG00000126856; CTA
SFNNESSL

SEQ ID NO: 72473 - protein, 9 aa, Homo sapiens
  misc_feature: Table A; Target 72473; HLA-A*31:01; PRDM7; ENSG00000126856; CTA
SFNNESSLR

SEQ ID NO: 72474 - protein, 9 aa, Homo sapiens
  misc_feature: Table A; Target 72474; HLA-A*33:01; PRDM7; ENSG00000126856; CTA
SFNNESSLR

SEQ ID NO: 72475 - protein, 9 aa, Homo sapiens
  misc_feature: Table A; Target 72475; HLA-A*33:03; PRDM7; ENSG00000126856; CTA
SFNNESSLR

SEQ ID NO: 72476 - protein, 9 aa, Homo sapiens
  misc_feature: Table A; Target 72476; HLA-C*07:06; PRDM7; ENSG00000126856; CTA
SFNNESSLR

SEQ ID NO: 72477 - protein, 11 aa, Homo sapiens
  misc_feature: Table A; Target 72477; HLA-A*32:01; PRDM7; ENSG00000126856; CTA
SGAASGRKSSW

SEQ ID NO: 72478 - protein, 11 aa, Homo sapiens
  misc_feature: Table A; Target 72478; HLA-C*16:01; PRDM7; ENSG00000126856; CTA
SGAASGRKSSW

SEQ ID NO: 72479 - protein, 9 aa, Homo sapiens
  misc_feature: Table A; Target 72479; HLA-B*35:03; PRDM7; ENSG00000126856; CTA
SGDEYGQEL

SEQ ID NO: 72480 - protein, 9 aa, Homo sapiens
  misc_feature: Table A; Target 72480; HLA-B*38:01; PRDM7; ENSG00000126856; CTA
SGDEYGQEL

SEQ ID NO: 72481 - protein, 9 aa, Homo sapiens
  misc_feature: Table A; Target 72481; HLA-B*39:01; PRDM7; ENSG00000126856; CTA
SGDEYGQEL

SEQ ID NO: 72482 - protein, 9 aa, Homo sapiens
  misc_feature: Table A; Target 72482; HLA-C*03:04; PRDM7; ENSG00000126856; CTA
SGDEYGQEL

SEQ ID NO: 72483 - protein, 9 aa, Homo sapiens
  misc_feature: Table A; Target 72483; HLA-C*05:01; PRDM7; ENSG00000126856; CTA
SGDEYGQEL

SEQ ID NO: 72484 - protein, 11 aa, Homo sapiens
  misc_feature: Table A; Target 72484; HLA-B*57:01; PRDM7; ENSG00000126856; CTA
SGIPQAGLGVW

SEQ ID NO: 72485 - protein, 9 aa, Homo sapiens
  misc_feature: Table A; Target 72485; HLA-A*11:01; PRDM7; ENSG00000126856; CTA
SGMGMSMAR

SEQ ID NO: 72486 - protein, 9 aa, Homo sapiens
  misc_feature: Table A; Target 72486; HLA-A*31:01; PRDM7; ENSG00000126856; CTA
SGMGMSMAR

SEQ ID NO: 72487 - protein, 9 aa, Homo sapiens
  misc_feature: Table A; Target 72487; HLA-A*33:03; PRDM7; ENSG00000126856; CTA
SGMGMSMAR

SEQ ID NO: 72488 - protein, 9 aa, Homo sapiens
  misc_feature: Table A; Target 72488; HLA-A*68:01; PRDM7; ENSG00000126856; CTA
SGMGMSMAR

SEQ ID NO: 72489 - protein, 9 aa, Homo sapiens
  misc_feature: Table A; Target 72489; HLA-C*07:06; PRDM7; ENSG00000126856; CTA
SGMGMSMAR

SEQ ID NO: 72490 - protein, 9 aa, Homo sapiens
  misc_feature: Table A; Target 72490; HLA-B*54:01; PRDM7; ENSG00000126856; CTA
SGNILIHAA

SEQ ID NO: 72491 - protein, 9 aa, Homo sapiens
  misc_feature: Table A; Target 72491; HLA-A*03:01; PRDM7; ENSG00000126856; CTA
SGYSWLITK

SEQ ID NO: 72492 - protein, 9 aa, Homo sapiens
  misc_feature: Table A; Target 72492; HLA-A*03:02; PRDM7; ENSG00000126856; CTA
SGYSWLITK

SEQ ID NO: 72493 - protein, 9 aa, Homo sapiens
  misc_feature: Table A; Target 72493; HLA-A*11:01; PRDM7; ENSG00000126856; CTA
SGYSWLITK

SEQ ID NO: 72494 - protein, 9 aa, Homo sapiens
  misc_feature: Table A; Target 72494; HLA-A*31:01; PRDM7; ENSG00000126856; CTA
SGYSWLITK

SEQ ID NO: 72495 - protein, 11 aa, Homo sapiens
  misc_feature: Table A; Target 72495; HLA-A*31:01; PRDM7; ENSG00000126856; CTA
SGYSWLITKGR

SEQ ID NO: 72496 - protein, 8 aa, Homo sapiens
  misc_feature: Table A; Target 72496; HLA-C*05:01; PRDM7; ENSG00000126856; CTA
SIEPAESL

SEQ ID NO: 72497 - protein, 9 aa, Homo sapiens
  misc_feature: Table A; Target 72497; HLA-B*57:01; PRDM7; ENSG00000126856; CTA
SIHVPHAVW

SEQ ID NO: 72498 - protein, 9 aa, Homo sapiens
  misc_feature: Table A; Target 72498; HLA-B*57:01; PRDM7; ENSG00000126856; CTA
SIYFTKEEW

SEQ ID NO: 72499 - protein, 9 aa, Homo sapiens
  misc_feature: Table A; Target 72499; HLA-B*58:01; PRDM7; ENSG00000126856; CTA
SIYFTKEEW

SEQ ID NO: 72500 - protein, 9 aa, Homo sapiens
  misc_feature: Table A; Target 72500; HLA-A*25:01; PRDM7; ENSG00000126856; CTA
SLGQAVNCW

SEQ ID NO: 72501 - protein, 11 aa, Homo sapiens
  misc_feature: Table A; Target 72501; HLA-A*02:04; PRDM7; ENSG00000126856; CTA
SLRELSGTPNL

SEQ ID NO: 72502 - protein, 9 aa, Homo sapiens
  misc_feature: Table A; Target 72502; HLA-B*15:01; PRDM7; ENSG00000126856; CTA
SQDHLQENF

SEQ ID NO: 72503 - protein, 9 aa, Homo sapiens
  misc_feature: Table A; Target 72503; HLA-B*15:03; PRDM7; ENSG00000126856; CTA
SQDHLQENF

SEQ ID NO: 72504 - protein, 9 aa, Homo sapiens
  misc_feature: Table A; Target 72504; HLA-B*38:01; PRDM7; ENSG00000126856; CTA
SQDHLQENF

SEQ ID NO: 72505 - protein, 9 aa, Homo sapiens
  misc_feature: Table A; Target 72505; HLA-C*05:01; PRDM7; ENSG00000126856; CTA
SQDHLQENF

SEQ ID NO: 72506 - protein, 9 aa, Homo sapiens
  misc_feature: Table A; Target 72506; HLA-C*16:04; PRDM7; ENSG00000126856; CTA
SQDHLQENF

SEQ ID NO: 72507 - protein, 9 aa, Homo sapiens
  misc_feature: Table A; Target 72507; HLA-A*02:03; PRDM7; ENSG00000126856; CTA
SSANWMRYV

SEQ ID NO: 72508 - protein, 9 aa, Homo sapiens
  misc_feature: Table A; Target 72508; HLA-A*25:01; PRDM7; ENSG00000126856; CTA
SSIEPAESL

SEQ ID NO: 72509 - protein, 9 aa, Homo sapiens
  misc_feature: Table A; Target 72509; HLA-A*30:01; PRDM7; ENSG00000126856; CTA
SSIEPAESL

SEQ ID NO: 72510 - protein, 9 aa, Homo sapiens
  misc_feature: Table A; Target 72510; HLA-B*07:02; PRDM7; ENSG00000126856; CTA
SSIEPAESL

SEQ ID NO: 72511 - protein, 9 aa, Homo sapiens
  misc_feature: Table A; Target 72511; HLA-B*15:01; PRDM7; ENSG00000126856; CTA
SSIEPAESL

SEQ ID NO: 72512 - protein, 9 aa, Homo sapiens
  misc_feature: Table A; Target 72512; HLA-B*27:05; PRDM7; ENSG00000126856; CTA
SSIEPAESL

SEQ ID NO: 72513 - protein, 9 aa, Homo sapiens
  misc_feature: Table A; Target 72513; HLA-B*35:03; PRDM7; ENSG00000126856; CTA
SSIEPAESL

SEQ ID NO: 72514 - protein, 9 aa, Homo sapiens
  misc_feature: Table A; Target 72514; HLA-B*39:01; PRDM7; ENSG00000126856; CTA
SSIEPAESL

SEQ ID NO: 72515 - protein, 9 aa, Homo sapiens
  misc_feature: Table A; Target 72515; HLA-B*40:01; PRDM7; ENSG00000126856; CTA
SSIEPAESL

SEQ ID NO: 72516 - protein, 9 aa, Homo sapiens
  misc_feature: Table A; Target 72516; HLA-B*46:01; PRDM7; ENSG00000126856; CTA
SSIEPAESL

SEQ ID NO: 72517 - protein, 9 aa, Homo sapiens
  misc_feature: Table A; Target 72517; HLA-B*58:01; PRDM7; ENSG00000126856; CTA
SSIEPAESL

SEQ ID NO: 72518 - protein, 9 aa, Homo sapiens
  misc_feature: Table A; Target 72518; HLA-C*01:02; PRDM7; ENSG00000126856; CTA
SSIEPAESL

SEQ ID NO: 72519 - protein, 9 aa, Homo sapiens
  misc_feature: Table A; Target 72519; HLA-C*03:03; PRDM7; ENSG00000126856; CTA
SSIEPAESL

SEQ ID NO: 72520 - protein, 9 aa, Homo sapiens
  misc_feature: Table A; Target 72520; HLA-C*03:04; PRDM7; ENSG00000126856; CTA
SSIEPAESL

SEQ ID NO: 72521 - protein, 9 aa, Homo sapiens
  misc_feature: Table A; Target 72521; HLA-C*05:01; PRDM7; ENSG00000126856; CTA
SSIEPAESL

SEQ ID NO: 72522 - protein, 9 aa, Homo sapiens
  misc_feature: Table A; Target 72522; HLA-C*07:02; PRDM7; ENSG00000126856; CTA
SSIEPAESL

SEQ ID NO: 72523 - protein, 9 aa, Homo sapiens
  misc_feature: Table A; Target 72523; HLA-C*07:06; PRDM7; ENSG00000126856; CTA
SSIEPAESL

SEQ ID NO: 72524 - protein, 9 aa, Homo sapiens
  misc_feature: Table A; Target 72524; HLA-C*14:02; PRDM7; ENSG00000126856; CTA
SSIEPAESL

SEQ ID NO: 72525 - protein, 9 aa, Homo sapiens
  misc_feature: Table A; Target 72525; HLA-C*16:01; PRDM7; ENSG00000126856; CTA
SSIEPAESL

SEQ ID NO: 72526 - protein, 9 aa, Homo sapiens
  misc_feature: Table A; Target 72526; HLA-C*16:04; PRDM7; ENSG00000126856; CTA
SSIEPAESL

SEQ ID NO: 72527 - protein, 11 aa, Homo sapiens
  misc_feature: Table A; Target 72527; HLA-A*11:01; PRDM7; ENSG00000126856; CTA
SSWQGENQSQR

SEQ ID NO: 72528 - protein, 11 aa, Homo sapiens
  misc_feature: Table A; Target 72528; HLA-A*31:01; PRDM7; ENSG00000126856; CTA
SSWQGENQSQR

SEQ ID NO: 72529 - protein, 11 aa, Homo sapiens
  misc_feature: Table A; Target 72529; HLA-A*68:01; PRDM7; ENSG00000126856; CTA
SSWQGENQSQR

SEQ ID NO: 72530 - protein, 11 aa, Homo sapiens
  misc_feature: Table A; Target 72530; HLA-C*07:06; PRDM7; ENSG00000126856; CTA
SSWQGENQSQR

SEQ ID NO: 72531 - protein, 9 aa, Homo sapiens
  misc_feature: Table A; Target 72531; HLA-C*16:02; PRDM7; ENSG00000126856; CTA
STSGQHSRL

SEQ ID NO: 72532 - protein, 10 aa, Homo sapiens
  misc_feature: Table A; Target 72532; HLA-A*11:01; PRDM7; ENSG00000126856; CTA
STSGQHSRLK

SEQ ID NO: 72533 - protein, 11 aa, Homo sapiens
  misc_feature: Table A; Target 72533; HLA-A*01:01; PRDM7; ENSG00000126856; CTA
TEDEEAANSGY

SEQ ID NO: 72534 - protein, 11 aa, Homo sapiens
  misc_feature: Table A; Target 72534; HLA-B*18:01; PRDM7; ENSG00000126856; CTA
TEDEEAANSGY

SEQ ID NO: 72535 - protein, 11 aa, Homo sapiens
  misc_feature: Table A; Target 72535; HLA-B*44:02; PRDM7; ENSG00000126856; CTA
TEDEEAANSGY

SEQ ID NO: 72536 - protein, 11 aa, Homo sapiens
  misc_feature: Table A; Target 72536; HLA-B*44:03; PRDM7; ENSG00000126856; CTA
TEDEEAANSGY

SEQ ID NO: 72537 - protein, 8 aa, Homo sapiens
  misc_feature: Table A; Target 72537; HLA-A*30:01; PRDM7; ENSG00000126856; CTA
TEGKMYSL

SEQ ID NO: 72538 - protein, 8 aa, Homo sapiens
  misc_feature: Table A; Target 72538; HLA-B*08:01; PRDM7; ENSG00000126856; CTA
TEGKMYSL

SEQ ID NO: 72539 - protein, 8 aa, Homo sapiens
  misc_feature: Table A; Target 72539; HLA-B*18:01; PRDM7; ENSG00000126856; CTA
TEGKMYSL

SEQ ID NO: 72540 - protein, 8 aa, Homo sapiens
  misc_feature: Table A; Target 72540; HLA-B*37:01; PRDM7; ENSG00000126856; CTA
TEGKMYSL

SEQ ID NO: 72541 - protein, 8 aa, Homo sapiens
  misc_feature: Table A; Target 72541; HLA-B*40:01; PRDM7; ENSG00000126856; CTA
TEGKMYSL

SEQ ID NO: 72542 - protein, 8 aa, Homo sapiens
  misc_feature: Table A; Target 72542; HLA-B*40:02; PRDM7; ENSG00000126856; CTA
TEGKMYSL

SEQ ID NO: 72543 - protein, 8 aa, Homo sapiens
  misc_feature: Table A; Target 72543; HLA-B*44:02; PRDM7; ENSG00000126856; CTA
TEGKMYSL

SEQ ID NO: 72544 - protein, 8 aa, Homo sapiens
  misc_feature: Table A; Target 72544; HLA-B*44:03; PRDM7; ENSG00000126856; CTA
TEGKMYSL

SEQ ID NO: 72545 - protein, 8 aa, Homo sapiens
  misc_feature: Table A; Target 72545; HLA-B*49:01; PRDM7; ENSG00000126856; CTA
TEGKMYSL

SEQ ID NO: 72546 - protein, 9 aa, Homo sapiens
  misc_feature: Table A; Target 72546; HLA-A*01:01; PRDM7; ENSG00000126856; CTA
TSDSEQAQK

SEQ ID NO: 72547 - protein, 9 aa, Homo sapiens
  misc_feature: Table A; Target 72547; HLA-C*07:06; PRDM7; ENSG00000126856; CTA
TSDSEQAQK

SEQ ID NO: 72548 - protein, 10 aa, Homo sapiens
  misc_feature: Table A; Target 72548; HLA-B*57:01; PRDM7; ENSG00000126856; CTA
TSQDHLQENF

SEQ ID NO: 72549 - protein, 10 aa, Homo sapiens
  misc_feature: Table A; Target 72549; HLA-B*58:01; PRDM7; ENSG00000126856; CTA
TSQDHLQENF

SEQ ID NO: 72550 - protein, 9 aa, Homo sapiens
  misc_feature: Table A; Target 72550; HLA-B*51:01; PRDM7; ENSG00000126856; CTA
VAFQYHRQI

SEQ ID NO: 72551 - protein, 9 aa, Homo sapiens
  misc_feature: Table A; Target 72551; HLA-C*16:02; PRDM7; ENSG00000126856; CTA
VAFQYHRQI

SEQ ID NO: 72552 - protein, 8 aa, Homo sapiens
  misc_feature: Table A; Target 72552; HLA-A*33:01; PRDM7; ENSG00000126856; CTA
VDKGHPNR

SEQ ID NO: 72553 - protein, 8 aa, Homo sapiens
  misc_feature: Table A; Target 72553; HLA-B*07:02; PRDM7; ENSG00000126856; CTA
VIRPGCEL

SEQ ID NO: 72554 - protein, 8 aa, Homo sapiens
  misc_feature: Table A; Target 72554; HLA-C*07:02; PRDM7; ENSG00000126856; CTA
VIRPGCEL

SEQ ID NO: 72555 - protein, 8 aa, Homo sapiens
  misc_feature: Table A; Target 72555; HLA-A*03:01; PRDM7; ENSG00000126856; CTA
VMTKPKVK

SEQ ID NO: 72556 - protein, 8 aa, Homo sapiens
  misc_feature: Table A; Target 72556; HLA-A*03:02; PRDM7; ENSG00000126856; CTA
VMTKPKVK

SEQ ID NO: 72557 - protein, 9 aa, Homo sapiens
  misc_feature: Table A; Target 72557; HLA-A*31:01; PRDM7; ENSG00000126856; CTA
VMTKPKVKR

SEQ ID NO: 72558 - protein, 9 aa, Homo sapiens
  misc_feature: Table A; Target 72558; HLA-A*33:01; PRDM7; ENSG00000126856; CTA
VMTKPKVKR

SEQ ID NO: 72559 - protein, 9 aa, Homo sapiens
  misc_feature: Table A; Target 72559; HLA-C*01:02; PRDM7; ENSG00000126856; CTA
VSPPGEAST

SEQ ID NO: 72560 - protein, 8 aa, Homo sapiens
  misc_feature: Table A; Target 72560; HLA-C*14:02; PRDM7; ENSG00000126856; CTA
VWNEASDL

SEQ ID NO: 72561 - protein, 9 aa, Homo sapiens
  misc_feature: Table A; Target 72561; HLA-A*24:02; PRDM7; ENSG00000126856; CTA
VWPFQVKNF

SEQ ID NO: 72562 - protein, 10 aa, Homo sapiens
  misc_feature: Table A; Target 72562; HLA-B*54:01; PRDM7; ENSG00000126856; CTA
WPFQVKNFSV

SEQ ID NO: 72563 - protein, 9 aa, Homo sapiens
  misc_feature: Table A; Target 72563; HLA-B*40:02; PRDM7; ENSG00000126856; CTA
YEYVDGKDK

SEQ ID NO: 72564 - protein, 9 aa, Homo sapiens
  misc_feature: Table A; Target 72564; HLA-B*49:01; PRDM7; ENSG00000126856; CTA
YEYVDGKDK

SEQ ID NO: 72565 - protein, 9 aa, Homo sapiens
  misc_feature: Table A; Target 72565; HLA-A*23:01; PRDM7; ENSG00000126856; CTA
YNALITVGL

SEQ ID NO: 72566 - protein, 9 aa, Homo sapiens
  misc_feature: Table A; Target 72566; HLA-A*68:02; PRDM7; ENSG00000126856; CTA
YNALITVGL

SEQ ID NO: 72567 - protein, 9 aa, Homo sapiens
  misc_feature: Table A; Target 72567; HLA-B*35:03; PRDM7; ENSG00000126856; CTA
YNALITVGL

SEQ ID NO: 72568 - protein, 9 aa, Homo sapiens
  misc_feature: Table A; Target 72568; HLA-C*07:02; PRDM7; ENSG00000126856; CTA
YNALITVGL

SEQ ID NO: 72569 - protein, 9 aa, Homo sapiens
  misc_feature: Table A; Target 72569; HLA-C*12:03; PRDM7; ENSG00000126856; CTA
YNALITVGL

SEQ ID NO: 72570 - protein, 10 aa, Homo sapiens
  misc_feature: Table A; Target 72570; HLA-A*33:03; PRDM7; ENSG00000126856; CTA
YNALITVGLR

SEQ ID NO: 72571 - protein, 9 aa, Homo sapiens
  misc_feature: Table A; Target 72571; HLA-A*31:01; PRDM7; ENSG00000126856; CTA
YSWLITKGR

SEQ ID NO: 72572 - protein, 8 aa, Homo sapiens
  misc_feature: Table A; Target 72572; HLA-B*08:01; PROKR1; ENSG00000169618; CTA
AAKIVIGM

SEQ ID NO: 72573 - protein, 8 aa, Homo sapiens
  misc_feature: Table A; Target 72573; HLA-B*37:01; PROKR1; ENSG00000169618; CTA
AAKIVIGM

SEQ ID NO: 72574 - protein, 10 aa, Homo sapiens
  misc_feature: Table A; Target 72574; HLA-A*30:01; PROKR1; ENSG00000169618; CTA
ADLDLKTIGM

SEQ ID NO: 72575 - protein, 10 aa, Homo sapiens
  misc_feature: Table A; Target 72575; HLA-B*37:01; PROKR1; ENSG00000169618; CTA
ADLDLKTIGM

SEQ ID NO: 72576 - protein, 9 aa, Homo sapiens
  misc_feature: Table A; Target 72576; HLA-A*02:07; PROKR1; ENSG00000169618; CTA
AIDRYLAIV

SEQ ID NO: 72577 - protein, 9 aa, Homo sapiens
  misc_feature: Table A; Target 72577; HLA-A*02:01; PROKR1; ENSG00000169618; CTA
AISDFLVAI

SEQ ID NO: 72578 - protein, 9 aa, Homo sapiens
  misc_feature: Table A; Target 72578; HLA-A*02:03; PROKR1; ENSG00000169618; CTA
AISDFLVAI

SEQ ID NO: 72579 - protein, 9 aa, Homo sapiens
  misc_feature: Table A; Target 72579; HLA-A*02:04; PROKR1; ENSG00000169618; CTA
AISDFLVAI

SEQ ID NO: 72580 - protein, 9 aa, Homo sapiens
  misc_feature: Table A; Target 72580; HLA-A*02:07; PROKR1; ENSG00000169618; CTA
AISDFLVAI

SEQ ID NO: 72581 - protein, 9 aa, Homo sapiens
  misc_feature: Table A; Target 72581; HLA-A*68:02; PROKR1; ENSG00000169618; CTA
AISDFLVAI

SEQ ID NO: 72582 - protein, 9 aa, Homo sapiens
  misc_feature: Table A; Target 72582; HLA-B*13:02; PROKR1; ENSG00000169618; CTA
AISDFLVAI

SEQ ID NO: 72583 - protein, 10 aa, Homo sapiens
  misc_feature: Table A; Target 72583; HLA-A*02:03; PROKR1; ENSG00000169618; CTA
AISDFLVAIV

SEQ ID NO: 72584 - protein, 9 aa, Homo sapiens
  misc_feature: Table A; Target 72584; HLA-A*31:01; PROKR1; ENSG00000169618; CTA
AIVHPLRPR

SEQ ID NO: 72585 - protein, 9 aa, Homo sapiens
  misc_feature: Table A; Target 72585; HLA-B*15:03; PROKR1; ENSG00000169618; CTA
AKIVIGMAL

SEQ ID NO: 72586 - protein, 9 aa, Homo sapiens
  misc_feature: Table A; Target 72586; HLA-A*03:01; PROKR1; ENSG00000169618; CTA
ALLAIAIDR

SEQ ID NO: 72587 - protein, 9 aa, Homo sapiens
  misc_feature: Table A; Target 72587; HLA-A*03:02; PROKR1; ENSG00000169618; CTA
ALLAIAIDR

SEQ ID NO: 72588 - protein, 10 aa, Homo sapiens
  misc_feature: Table A; Target 72588; HLA-A*29:02; PROKR1; ENSG00000169618; CTA
ALLAIAIDRY

SEQ ID NO: 72589 - protein, 10 aa, Homo sapiens
  misc_feature: Table A; Target 72589; HLA-A*30:02; PROKR1; ENSG00000169618; CTA
ALLAIAIDRY

SEQ ID NO: 72590 - protein, 11 aa, Homo sapiens
  misc_feature: Table A; Target 72590; HLA-A*02:01; PROKR1; ENSG00000169618; CTA
ALLAIAIDRYL

SEQ ID NO: 72591 - protein, 11 aa, Homo sapiens
  misc_feature: Table A; Target 72591; HLA-A*02:04; PROKR1; ENSG00000169618; CTA
ALLAIAIDRYL

SEQ ID NO: 72592 - protein, 10 aa, Homo sapiens
  misc_feature: Table A; Target 72592; HLA-A*02:03; PROKR1; ENSG00000169618; CTA
AMSNSMINTL

SEQ ID NO: 72593 - protein, 8 aa, Homo sapiens
  misc_feature: Table A; Target 72593; HLA-B*51:01; PROKR1; ENSG00000169618; CTA
APFYGFTI

SEQ ID NO: 72594 - protein, 8 aa, Homo sapiens
  misc_feature: Table A; Target 72594; HLA-B*54:01; PROKR1; ENSG00000169618; CTA
APFYGFTI

SEQ ID NO: 72595 - protein, 8 aa, Homo sapiens
  misc_feature: Table A; Target 72595; HLA-B*56:01; PROKR1; ENSG00000169618; CTA
APFYGFTI

SEQ ID NO: 72596 - protein, 9 aa, Homo sapiens
  misc_feature: Table A; Target 72596; HLA-B*07:02; PROKR1; ENSG00000169618; CTA
APFYGFTIV

SEQ ID NO: 72597 - protein, 9 aa, Homo sapiens
  misc_feature: Table A; Target 72597; HLA-B*51:01; PROKR1; ENSG00000169618; CTA
APFYGFTIV

SEQ ID NO: 72598 - protein, 9 aa, Homo sapiens
  misc_feature: Table A; Target 72598; HLA-B*54:01; PROKR1; ENSG00000169618; CTA
APFYGFTIV

SEQ ID NO: 72599 - protein, 9 aa, Homo sapiens
  misc_feature: Table A; Target 72599; HLA-B*56:01; PROKR1; ENSG00000169618; CTA
APFYGFTIV

SEQ ID NO: 72600 - protein, 10 aa, Homo sapiens
  misc_feature: Table A; Target 72600; HLA-A*32:01; PROKR1; ENSG00000169618; CTA
ASYNGGKSSA

SEQ ID NO: 72601 - protein, 10 aa, Homo sapiens
  misc_feature: Table A; Target 72601; HLA-B*56:01; PROKR1; ENSG00000169618; CTA
ASYNGGKSSA

SEQ ID NO: 72602 - protein, 11 aa, Homo sapiens
  misc_feature: Table A; Target 72602; HLA-A*03:01; PROKR1; ENSG00000169618; CTA
ATEEVDCIRLK

SEQ ID NO: 72603 - protein, 11 aa, Homo sapiens
  misc_feature: Table A; Target 72603; HLA-A*03:02; PROKR1; ENSG00000169618; CTA
ATEEVDCIRLK

SEQ ID NO: 72604 - protein, 11 aa, Homo sapiens
  misc_feature: Table A; Target 72604; HLA-A*11:01; PROKR1; ENSG00000169618; CTA
ATEEVDCIRLK

SEQ ID NO: 72605 - protein, 9 aa, Homo sapiens
  misc_feature: Table A; Target 72605; HLA-B*44:02; PROKR1; ENSG00000169618; CTA
ATGLIALVW

SEQ ID NO: 72606 - protein, 9 aa, Homo sapiens
  misc_feature: Table A; Target 72606; HLA-B*44:03; PROKR1; ENSG00000169618; CTA
ATGLIALVW

SEQ ID NO: 72607 - protein, 9 aa, Homo sapiens
  misc_feature: Table A; Target 72607; HLA-B*57:01; PROKR1; ENSG00000169618; CTA
ATGLIALVW

SEQ ID NO: 72608 - protein, 8 aa, Homo sapiens
  misc_feature: Table A; Target 72608; HLA-A*32:01; PROKR1; ENSG00000169618; CTA
ATNTSTSF

SEQ ID NO: 72609 - protein, 8 aa, Homo sapiens
  misc_feature: Table A; Target 72609; HLA-B*46:01; PROKR1; ENSG00000169618; CTA
ATNTSTSF

SEQ ID NO: 72610 - protein, 8 aa, Homo sapiens
  misc_feature: Table A; Target 72610; HLA-C*14:02; PROKR1; ENSG00000169618; CTA
ATNTSTSF

SEQ ID NO: 72611 - protein, 9 aa, Homo sapiens
  misc_feature: Table A; Target 72611; HLA-A*31:01; PROKR1; ENSG00000169618; CTA
ATNTSTSFL

SEQ ID NO: 72612 - protein, 9 aa, Homo sapiens
  misc_feature: Table A; Target 72612; HLA-C*01:02; PROKR1; ENSG00000169618; CTA
ATNTSTSFL

SEQ ID NO: 72613 - protein, 10 aa, Homo sapiens
  misc_feature: Table A; Target 72613; HLA-A*01:01; PROKR1; ENSG00000169618; CTA
ATSFPFNFSY

SEQ ID NO: 72614 - protein, 10 aa, Homo sapiens
  misc_feature: Table A; Target 72614; HLA-A*11:01; PROKR1; ENSG00000169618; CTA
ATSFPFNFSY

SEQ ID NO: 72615 - protein, 10 aa, Homo sapiens
  misc_feature: Table A; Target 72615; HLA-A*29:02; PROKR1; ENSG00000169618; CTA
ATSFPFNFSY

SEQ ID NO: 72616 - protein, 10 aa, Homo sapiens
  misc_feature: Table A; Target 72616; HLA-A*30:02; PROKR1; ENSG00000169618; CTA
ATSFPFNFSY

SEQ ID NO: 72617 - protein, 8 aa, Homo sapiens
  misc_feature: Table A; Target 72617; HLA-C*14:02; PROKR1; ENSG00000169618; CTA
AYFTTETV

SEQ ID NO: 72618 - protein, 9 aa, Homo sapiens
  misc_feature: Table A; Target 72618; HLA-A*23:01; PROKR1; ENSG00000169618; CTA
AYFTTETVL

SEQ ID NO: 72619 - protein, 9 aa, Homo sapiens
  misc_feature: Table A; Target 72619; HLA-A*24:02; PROKR1; ENSG00000169618; CTA
AYFTTETVL

SEQ ID NO: 72620 - protein, 9 aa, Homo sapiens
  misc_feature: Table A; Target 72620; HLA-C*14:02; PROKR1; ENSG00000169618; CTA
AYFTTETVL

SEQ ID NO: 72621 - protein, 10 aa, Homo sapiens
  misc_feature: Table A; Target 72621; HLA-A*25:01; PROKR1; ENSG00000169618; CTA
DEDVTNSRTF

SEQ ID NO: 72622 - protein, 10 aa, Homo sapiens
  misc_feature: Table A; Target 72622; HLA-B*18:01; PROKR1; ENSG00000169618; CTA
DEDVTNSRTF

SEQ ID NO: 72623 - protein, 10 aa, Homo sapiens
  misc_feature: Table A; Target 72623; HLA-B*38:01; PROKR1; ENSG00000169618; CTA
DEDVTNSRTF

SEQ ID NO: 72624 - protein, 10 aa, Homo sapiens
  misc_feature: Table A; Target 72624; HLA-B*44:02; PROKR1; ENSG00000169618; CTA
DEDVTNSRTF

SEQ ID NO: 72625 - protein, 10 aa, Homo sapiens
  misc_feature: Table A; Target 72625; HLA-B*44:03; PROKR1; ENSG00000169618; CTA
DEDVTNSRTF

SEQ ID NO: 72626 - protein, 10 aa, Homo sapiens
  misc_feature: Table A; Target 72626; HLA-C*16:04; PROKR1; ENSG00000169618; CTA
DEDVTNSRTF

SEQ ID NO: 72627 - protein, 11 aa, Homo sapiens
  misc_feature: Table A; Target 72627; HLA-B*44:02; PROKR1; ENSG00000169618; CTA
DEDVTNSRTFF

SEQ ID NO: 72628 - protein, 11 aa, Homo sapiens
  misc_feature: Table A; Target 72628; HLA-B*44:03; PROKR1; ENSG00000169618; CTA
DEDVTNSRTFF

SEQ ID NO: 72629 - protein, 9 aa, Homo sapiens
  misc_feature: Table A; Target 72629; HLA-A*33:01; PROKR1; ENSG00000169618; CTA
DFFPTVFVK

SEQ ID NO: 72630 - protein, 9 aa, Homo sapiens
  misc_feature: Table A; Target 72630; HLA-B*08:01; PROKR1; ENSG00000169618; CTA
DLDLKTIGM

SEQ ID NO: 72631 - protein, 10 aa, Homo sapiens
  misc_feature: Table A; Target 72631; HLA-A*25:01; PROKR1; ENSG00000169618; CTA
DNATNTSTSF

SEQ ID NO: 72632 - protein, 10 aa, Homo sapiens
  misc_feature: Table A; Target 72632; HLA-A*26:01; PROKR1; ENSG00000169618; CTA
DNATNTSTSF

SEQ ID NO: 72633 - protein, 9 aa, Homo sapiens
  misc_feature: Table A; Target 72633; HLA-A*25:01; PROKR1; ENSG00000169618; CTA
DQQLYYKSY

SEQ ID NO: 72634 - protein, 9 aa, Homo sapiens
  misc_feature: Table A; Target 72634; HLA-B*18:01; PROKR1; ENSG00000169618; CTA
DQQLYYKSY

SEQ ID NO: 72635 - protein, 9 aa, Homo sapiens
  misc_feature: Table A; Target 72635; HLA-A*68:02; PROKR1; ENSG00000169618; CTA
DTVKYFKKI

SEQ ID NO: 72636 - protein, 8 aa, Homo sapiens
  misc_feature: Table A; Target 72636; HLA-A*25:01; PROKR1; ENSG00000169618; CTA
DVTNSRTF

SEQ ID NO: 72637 - protein, 9 aa, Homo sapiens
  misc_feature: Table A; Target 72637; HLA-A*25:01; PROKR1; ENSG00000169618; CTA
DVTNSRTFF

SEQ ID NO: 72638 - protein, 9 aa, Homo sapiens
  misc_feature: Table A; Target 72638; HLA-A*26:01; PROKR1; ENSG00000169618; CTA
DVTNSRTFF

SEQ ID NO: 72639 - protein, 8 aa, Homo sapiens
  misc_feature: Table A; Target 72639; HLA-B*08:01; PROKR1; ENSG00000169618; CTA
DYYVVRQL

SEQ ID NO: 72640 - protein, 8 aa, Homo sapiens
  misc_feature: Table A; Target 72640; HLA-B*18:01; PROKR1; ENSG00000169618; CTA
DYYVVRQL

SEQ ID NO: 72641 - protein, 8 aa, Homo sapiens
  misc_feature: Table A; Target 72641; HLA-B*51:01; PROKR1; ENSG00000169618; CTA
DYYVVRQL

SEQ ID NO: 72642 - protein, 8 aa, Homo sapiens
  misc_feature: Table A; Target 72642; HLA-C*14:02; PROKR1; ENSG00000169618; CTA
DYYVVRQL

SEQ ID NO: 72643 - protein, 10 aa, Homo sapiens
  misc_feature: Table A; Target 72643; HLA-A*24:02; PROKR1; ENSG00000169618; CTA
DYYVVRQLSW

SEQ ID NO: 72644 - protein, 9 aa, Homo sapiens
  misc_feature: Table A; Target 72644; HLA-A*26:01; PROKR1; ENSG00000169618; CTA
ECIAMSNSM

SEQ ID NO: 72645 - protein, 9 aa, Homo sapiens
  misc_feature: Table A; Target 72645; HLA-A*33:03; PROKR1; ENSG00000169618; CTA
EDEDVTNSR

SEQ ID NO: 72646 - protein, 9 aa, Homo sapiens
  misc_feature: Table A; Target 72646; HLA-A*68:01; PROKR1; ENSG00000169618; CTA
EDEDVTNSR

SEQ ID NO: 72647 - protein, 9 aa, Homo sapiens
  misc_feature: Table A; Target 72647; HLA-C*07:06; PROKR1; ENSG00000169618; CTA
EDEDVTNSR

SEQ ID NO: 72648 - protein, 11 aa, Homo sapiens
  misc_feature: Table A; Target 72648; HLA-B*38:01; PROKR1; ENSG00000169618; CTA
EDEDVTNSRTF

SEQ ID NO: 72649 - protein, 11 aa, Homo sapiens
  misc_feature: Table A; Target 72649; HLA-B*44:02; PROKR1; ENSG00000169618; CTA
EDEDVTNSRTF

SEQ ID NO: 72650 - protein, 11 aa, Homo sapiens
  misc_feature: Table A; Target 72650; HLA-B*44:03; PROKR1; ENSG00000169618; CTA
EDEDVTNSRTF

SEQ ID NO: 72651 - protein, 9 aa, Homo sapiens
  misc_feature: Table A; Target 72651; HLA-A*25:01; PROKR1; ENSG00000169618; CTA
EDVTNSRTF

SEQ ID NO: 72652 - protein, 9 aa, Homo sapiens
  misc_feature: Table A; Target 72652; HLA-A*26:01; PROKR1; ENSG00000169618; CTA
EDVTNSRTF

SEQ ID NO: 72653 - protein, 9 aa, Homo sapiens
  misc_feature: Table A; Target 72653; HLA-B*18:01; PROKR1; ENSG00000169618; CTA
EDVTNSRTF

SEQ ID NO: 72654 - protein, 9 aa, Homo sapiens
  misc_feature: Table A; Target 72654; HLA-B*44:02; PROKR1; ENSG00000169618; CTA
EDVTNSRTF

SEQ ID NO: 72655 - protein, 9 aa, Homo sapiens
  misc_feature: Table A; Target 72655; HLA-B*44:03; PROKR1; ENSG00000169618; CTA
EDVTNSRTF

SEQ ID NO: 72656 - protein, 9 aa, Homo sapiens
  misc_feature: Table A; Target 72656; HLA-C*16:04; PROKR1; ENSG00000169618; CTA
EDVTNSRTF

SEQ ID NO: 72657 - protein, 10 aa, Homo sapiens
  misc_feature: Table A; Target 72657; HLA-B*44:02; PROKR1; ENSG00000169618; CTA
EDVTNSRTFF

SEQ ID NO: 72658 - protein, 9 aa, Homo sapiens
  misc_feature: Table A; Target 72658; HLA-A*23:01; PROKR1; ENSG00000169618; CTA
EFVGPVVTM

SEQ ID NO: 72659 - protein, 9 aa, Homo sapiens
  misc_feature: Table A; Target 72659; HLA-A*26:01; PROKR1; ENSG00000169618; CTA
EFVGPVVTM

SEQ ID NO: 72660 - protein, 9 aa, Homo sapiens
  misc_feature: Table A; Target 72660; HLA-A*33:03; PROKR1; ENSG00000169618; CTA
EFVGPVVTM

SEQ ID NO: 72661 - protein, 9 aa, Homo sapiens
  misc_feature: Table A; Target 72661; HLA-B*35:01; PROKR1; ENSG00000169618; CTA
EFVGPVVTM

SEQ ID NO: 72662 - protein, 9 aa, Homo sapiens
  misc_feature: Table A; Target 72662; HLA-C*14:02; PROKR1; ENSG00000169618; CTA
EFVGPVVTM

SEQ ID NO: 72663 - protein, 11 aa, Homo sapiens
  misc_feature: Table A; Target 72663; HLA-A*23:01; PROKR1; ENSG00000169618; CTA
EFVGPVVTMTL

SEQ ID NO: 72664 - protein, 8 aa, Homo sapiens
  misc_feature: Table A; Target 72664; HLA-A*33:03; PROKR1; ENSG00000169618; CTA
ETVLVIVK

SEQ ID NO: 72665 - protein, 9 aa, Homo sapiens
  misc_feature: Table A; Target 72665; HLA-A*26:01; PROKR1; ENSG00000169618; CTA
FAAKIVIGM

SEQ ID NO: 72666 - protein, 9 aa, Homo sapiens
  misc_feature: Table A; Target 72666; HLA-A*68:01; PROKR1; ENSG00000169618; CTA
FAAKIVIGM

SEQ ID NO: 72667 - protein, 9 aa, Homo sapiens
  misc_feature: Table A; Target 72667; HLA-A*68:02; PROKR1; ENSG00000169618; CTA
FAAKIVIGM

SEQ ID NO: 72668 - protein, 9 aa, Homo sapiens
  misc_feature: Table A; Target 72668; HLA-B*27:05; PROKR1; ENSG00000169618; CTA
FAAKIVIGM

SEQ ID NO: 72669 - protein, 9 aa, Homo sapiens
  misc_feature: Table A; Target 72669; HLA-B*35:01; PROKR1; ENSG00000169618; CTA
FAAKIVIGM

SEQ ID NO: 72670 - protein, 9 aa, Homo sapiens
  misc_feature: Table A; Target 72670; HLA-B*35:03; PROKR1; ENSG00000169618; CTA
FAAKIVIGM

SEQ ID NO: 72671 - protein, 9 aa, Homo sapiens
  misc_feature: Table A; Target 72671; HLA-B*46:01; PROKR1; ENSG00000169618; CTA
FAAKIVIGM

SEQ ID NO: 72672 - protein, 9 aa, Homo sapiens
  misc_feature: Table A; Target 72672; HLA-B*51:01; PROKR1; ENSG00000169618; CTA
FAAKIVIGM

SEQ ID NO: 72673 - protein, 9 aa, Homo sapiens
  misc_feature: Table A; Target 72673; HLA-B*54:01; PROKR1; ENSG00000169618; CTA
FAAKIVIGM

SEQ ID NO: 72674 - protein, 9 aa, Homo sapiens
  misc_feature: Table A; Target 72674; HLA-B*55:01; PROKR1; ENSG00000169618; CTA
FAAKIVIGM

SEQ ID NO: 72675 - protein, 9 aa, Homo sapiens
  misc_feature: Table A; Target 72675; HLA-C*02:02; PROKR1; ENSG00000169618; CTA
FAAKIVIGM

SEQ ID NO: 72676 - protein, 9 aa, Homo sapiens
  misc_feature: Table A; Target 72676; HLA-C*03:03; PROKR1; ENSG00000169618; CTA
FAAKIVIGM

SEQ ID NO: 72677 - protein, 9 aa, Homo sapiens
  misc_feature: Table A; Target 72677; HLA-C*03:04; PROKR1; ENSG00000169618; CTA
FAAKIVIGM

SEQ ID NO: 72678 - protein, 9 aa, Homo sapiens
  misc_feature: Table A; Target 72678; HLA-C*07:04; PROKR1; ENSG00000169618; CTA
FAAKIVIGM

SEQ ID NO: 72679 - protein, 9 aa, Homo sapiens
  misc_feature: Table A; Target 72679; HLA-C*07:06; PROKR1; ENSG00000169618; CTA
FAAKIVIGM

SEQ ID NO: 72680 - protein, 9 aa, Homo sapiens
  misc_feature: Table A; Target 72680; HLA-C*12:03; PROKR1; ENSG00000169618; CTA
FAAKIVIGM

SEQ ID NO: 72681 - protein, 9 aa, Homo sapiens
  misc_feature: Table A; Target 72681; HLA-C*16:01; PROKR1; ENSG00000169618; CTA
FAAKIVIGM

SEQ ID NO: 72682 - protein, 9 aa, Homo sapiens
  misc_feature: Table A; Target 72682; HLA-C*16:02; PROKR1; ENSG00000169618; CTA
FAAKIVIGM

SEQ ID NO: 72683 - protein, 9 aa, Homo sapiens
  misc_feature: Table A; Target 72683; HLA-C*16:04; PROKR1; ENSG00000169618; CTA
FAAKIVIGM

SEQ ID NO: 72684 - protein, 11 aa, Homo sapiens
  misc_feature: Table A; Target 72684; HLA-C*02:02; PROKR1; ENSG00000169618; CTA
FAAKIVIGMAL

SEQ ID NO: 72685 - protein, 8 aa, Homo sapiens
  misc_feature: Table A; Target 72685; HLA-B*49:01; PROKR1; ENSG00000169618; CTA
FEMDYYVV

SEQ ID NO: 72686 - protein, 9 aa, Homo sapiens
  misc_feature: Table A; Target 72686; HLA-A*03:01; PROKR1; ENSG00000169618; CTA
FIAALVRYK

SEQ ID NO: 72687 - protein, 10 aa, Homo sapiens
  misc_feature: Table A; Target 72687; HLA-A*29:02; PROKR1; ENSG00000169618; CTA
FIFIAALVRY

SEQ ID NO: 72688 - protein, 10 aa, Homo sapiens
  misc_feature: Table A; Target 72688; HLA-A*02:01; PROKR1; ENSG00000169618; CTA
FLFIFGIEFV

SEQ ID NO: 72689 - protein, 10 aa, Homo sapiens
  misc_feature: Table A; Target 72689; HLA-A*02:03; PROKR1; ENSG00000169618; CTA
FLFIFGIEFV

SEQ ID NO: 72690 - protein, 10 aa, Homo sapiens
  misc_feature: Table A; Target 72690; HLA-A*02:04; PROKR1; ENSG00000169618; CTA
FLFIFGIEFV

SEQ ID NO: 72691 - protein, 10 aa, Homo sapiens
  misc_feature: Table A; Target 72691; HLA-B*35:01; PROKR1; ENSG00000169618; CTA
FPFNFSYSDY

SEQ ID NO: 72692 - protein, 9 aa, Homo sapiens
  misc_feature: Table A; Target 72692; HLA-A*68:02; PROKR1; ENSG00000169618; CTA
FTTETVLVI

SEQ ID NO: 72693 - protein, 9 aa, Homo sapiens
  misc_feature: Table A; Target 72693; HLA-B*13:02; PROKR1; ENSG00000169618; CTA
FTTETVLVI

SEQ ID NO: 72694 - protein, 9 aa, Homo sapiens
  misc_feature: Table A; Target 72694; HLA-C*12:03; PROKR1; ENSG00000169618; CTA
FTTETVLVI

SEQ ID NO: 72695 - protein, 9 aa, Homo sapiens
  misc_feature: Table A; Target 72695; HLA-C*16:02; PROKR1; ENSG00000169618; CTA
FTTETVLVI

SEQ ID NO: 72696 - protein, 10 aa, Homo sapiens
  misc_feature: Table A; Target 72696; HLA-A*68:02; PROKR1; ENSG00000169618; CTA
FTTETVLVIV

SEQ ID NO: 72697 - protein, 11 aa, Homo sapiens
  misc_feature: Table A; Target 72697; HLA-B*27:02; PROKR1; ENSG00000169618; CTA
FTTETVLVIVK

SEQ ID NO: 72698 - protein, 8 aa, Homo sapiens
  misc_feature: Table A; Target 72698; HLA-A*32:01; PROKR1; ENSG00000169618; CTA
FVGPVVTM

SEQ ID NO: 72699 - protein, 8 aa, Homo sapiens
  misc_feature: Table A; Target 72699; HLA-B*18:01; PROKR1; ENSG00000169618; CTA
FVGPVVTM

SEQ ID NO: 72700 - protein, 8 aa, Homo sapiens
  misc_feature: Table A; Target 72700; HLA-B*35:01; PROKR1; ENSG00000169618; CTA
FVGPVVTM

SEQ ID NO: 72701 - protein, 8 aa, Homo sapiens
  misc_feature: Table A; Target 72701; HLA-B*35:03; PROKR1; ENSG00000169618; CTA
FVGPVVTM

SEQ ID NO: 72702 - protein, 8 aa, Homo sapiens
  misc_feature: Table A; Target 72702; HLA-B*37:01; PROKR1; ENSG00000169618; CTA
FVGPVVTM

SEQ ID NO: 72703 - protein, 8 aa, Homo sapiens
  misc_feature: Table A; Target 72703; HLA-B*46:01; PROKR1; ENSG00000169618; CTA
FVGPVVTM

SEQ ID NO: 72704 - protein, 8 aa, Homo sapiens
  misc_feature: Table A; Target 72704; HLA-C*02:02; PROKR1; ENSG00000169618; CTA
FVGPVVTM

SEQ ID NO: 72705 - protein, 8 aa, Homo sapiens
  misc_feature: Table A; Target 72705; HLA-C*03:03; PROKR1; ENSG00000169618; CTA
FVGPVVTM

SEQ ID NO: 72706 - protein, 8 aa, Homo sapiens
  misc_feature: Table A; Target 72706; HLA-C*03:04; PROKR1; ENSG00000169618; CTA
FVGPVVTM

SEQ ID NO: 72707 - protein, 8 aa, Homo sapiens
  misc_feature: Table A; Target 72707; HLA-C*05:01; PROKR1; ENSG00000169618; CTA
FVGPVVTM

SEQ ID NO: 72708 - protein, 8 aa, Homo sapiens
  misc_feature: Table A; Target 72708; HLA-C*07:04; PROKR1; ENSG00000169618; CTA
FVGPVVTM

SEQ ID NO: 72709 - protein, 10 aa, Homo sapiens
  misc_feature: Table A; Target 72709; HLA-A*02:07; PROKR1; ENSG00000169618; CTA
FVGPVVTMTL

SEQ ID NO: 72710 - protein, 10 aa, Homo sapiens
  misc_feature: Table A; Target 72710; HLA-A*25:01; PROKR1; ENSG00000169618; CTA
FVGPVVTMTL

SEQ ID NO: 72711 - protein, 10 aa, Homo sapiens
  misc_feature: Table A; Target 72711; HLA-A*26:01; PROKR1; ENSG00000169618; CTA
FVGPVVTMTL

SEQ ID NO: 72712 - protein, 10 aa, Homo sapiens
  misc_feature: Table A; Target 72712; HLA-A*30:01; PROKR1; ENSG00000169618; CTA
FVGPVVTMTL

SEQ ID NO: 72713 - protein, 10 aa, Homo sapiens
  misc_feature: Table A; Target 72713; HLA-A*68:02; PROKR1; ENSG00000169618; CTA
FVGPVVTMTL

SEQ ID NO: 72714 - protein, 10 aa, Homo sapiens
  misc_feature: Table A; Target 72714; HLA-B*35:01; PROKR1; ENSG00000169618; CTA
FVGPVVTMTL

SEQ ID NO: 72715 - protein, 10 aa, Homo sapiens
  misc_feature: Table A; Target 72715; HLA-B*35:03; PROKR1; ENSG00000169618; CTA
FVGPVVTMTL

SEQ ID NO: 72716 - protein, 10 aa, Homo sapiens
  misc_feature: Table A; Target 72716; HLA-B*38:01; PROKR1; ENSG00000169618; CTA
FVGPVVTMTL

SEQ ID NO: 72717 - protein, 10 aa, Homo sapiens
  misc_feature: Table A; Target 72717; HLA-C*02:02; PROKR1; ENSG00000169618; CTA
FVGPVVTMTL

SEQ ID NO: 72718 - protein, 10 aa, Homo sapiens
  misc_feature: Table A; Target 72718; HLA-C*03:03; PROKR1; ENSG00000169618; CTA
FVGPVVTMTL

SEQ ID NO: 72719 - protein, 10 aa, Homo sapiens
  misc_feature: Table A; Target 72719; HLA-C*03:04; PROKR1; ENSG00000169618; CTA
FVGPVVTMTL

SEQ ID NO: 72720 - protein, 10 aa, Homo sapiens
  misc_feature: Table A; Target 72720; HLA-C*07:06; PROKR1; ENSG00000169618; CTA
FVGPVVTMTL

SEQ ID NO: 72721 - protein, 8 aa, Homo sapiens
  misc_feature: Table A; Target 72721; HLA-B*08:01; PROKR1; ENSG00000169618; CTA
FVKEKHYL

SEQ ID NO: 72722 - protein, 11 aa, Homo sapiens
  misc_feature: Table A; Target 72722; HLA-A*01:01; PROKR1; ENSG00000169618; CTA
FVTVKNDTVKY

SEQ ID NO: 72723 - protein, 9 aa, Homo sapiens
  misc_feature: Table A; Target 72723; HLA-C*14:02; PROKR1; ENSG00000169618; CTA
FYIVECIAM

SEQ ID NO: 72724 - protein, 9 aa, Homo sapiens
  misc_feature: Table A; Target 72724; HLA-A*02:01; PROKR1; ENSG00000169618; CTA
GLIALVWTV

SEQ ID NO: 72725 - protein, 9 aa, Homo sapiens
  misc_feature: Table A; Target 72725; HLA-A*02:03; PROKR1; ENSG00000169618; CTA
GLIALVWTV

SEQ ID NO: 72726 - protein, 9 aa, Homo sapiens
  misc_feature: Table A; Target 72726; HLA-A*02:04; PROKR1; ENSG00000169618; CTA
GLIALVWTV

SEQ ID NO: 72727 - protein, 9 aa, Homo sapiens
  misc_feature: Table A; Target 72727; HLA-A*02:07; PROKR1; ENSG00000169618; CTA
GLIALVWTV

SEQ ID NO: 72728 - protein, 9 aa, Homo sapiens
  misc_feature: Table A; Target 72728; HLA-B*13:02; PROKR1; ENSG00000169618; CTA
GLIALVWTV

SEQ ID NO: 72729 - protein, 9 aa, Homo sapiens
  misc_feature: Table A; Target 72729; HLA-B*55:01; PROKR1; ENSG00000169618; CTA
GLIALVWTV

SEQ ID NO: 72730 - protein, 8 aa, Homo sapiens
  misc_feature: Table A; Target 72730; HLA-B*07:02; PROKR1; ENSG00000169618; CTA
GPVVTMTL

SEQ ID NO: 72731 - protein, 8 aa, Homo sapiens
  misc_feature: Table A; Target 72731; HLA-B*56:01; PROKR1; ENSG00000169618; CTA
GPVVTMTL

SEQ ID NO: 72732 - protein, 10 aa, Homo sapiens
  misc_feature: Table A; Target 72732; HLA-B*13:02; PROKR1; ENSG00000169618; CTA
GQIWPVDQQL

SEQ ID NO: 72733 - protein, 11 aa, Homo sapiens
  misc_feature: Table A; Target 72733; HLA-A*30:02; PROKR1; ENSG00000169618; CTA
GQIWPVDQQLY

SEQ ID NO: 72734 - protein, 11 aa, Homo sapiens
  misc_feature: Table A; Target 72734; HLA-B*15:01; PROKR1; ENSG00000169618; CTA
GQIWPVDQQLY

SEQ ID NO: 72735 - protein, 11 aa, Homo sapiens
  misc_feature: Table A; Target 72735; HLA-B*15:03; PROKR1; ENSG00000169618; CTA
GQIWPVDQQLY

SEQ ID NO: 72736 - protein, 9 aa, Homo sapiens
  misc_feature: Table A; Target 72736; HLA-C*02:02; PROKR1; ENSG00000169618; CTA
HATSFPFNF

SEQ ID NO: 72737 - protein, 9 aa, Homo sapiens
  misc_feature: Table A; Target 72737; HLA-A*26:01; PROKR1; ENSG00000169618; CTA
HVLCTSVNY

SEQ ID NO: 72738 - protein, 9 aa, Homo sapiens
  misc_feature: Table A; Target 72738; HLA-A*29:02; PROKR1; ENSG00000169618; CTA
HVLCTSVNY

SEQ ID NO: 72739 - protein, 9 aa, Homo sapiens
  misc_feature: Table A; Target 72739; HLA-A*30:02; PROKR1; ENSG00000169618; CTA
HVLCTSVNY

SEQ ID NO: 72740 - protein, 9 aa, Homo sapiens
  misc_feature: Table A; Target 72740; HLA-B*15:03; PROKR1; ENSG00000169618; CTA
HVLCTSVNY

SEQ ID NO: 72741 - protein, 9 aa, Homo sapiens
  misc_feature: Table A; Target 72741; HLA-B*35:01; PROKR1; ENSG00000169618; CTA
HVLCTSVNY

SEQ ID NO: 72742 - protein, 9 aa, Homo sapiens
  misc_feature: Table A; Target 72742; HLA-C*07:04; PROKR1; ENSG00000169618; CTA
HVLCTSVNY

SEQ ID NO: 72743 - protein, 9 aa, Homo sapiens
  misc_feature: Table A; Target 72743; HLA-A*23:01; PROKR1; ENSG00000169618; CTA
IAIDRYLAI

SEQ ID NO: 72744 - protein, 9 aa, Homo sapiens
  misc_feature: Table A; Target 72744; HLA-A*24:02; PROKR1; ENSG00000169618; CTA
IAIDRYLAI

SEQ ID NO: 72745 - protein, 9 aa, Homo sapiens
  misc_feature: Table A; Target 72745; HLA-A*25:01; PROKR1; ENSG00000169618; CTA
IAIDRYLAI

SEQ ID NO: 72746 - protein, 9 aa, Homo sapiens
  misc_feature: Table A; Target 72746; HLA-B*08:01; PROKR1; ENSG00000169618; CTA
IAIDRYLAI

SEQ ID NO: 72747 - protein, 9 aa, Homo sapiens
  misc_feature: Table A; Target 72747; HLA-B*13:02; PROKR1; ENSG00000169618; CTA
IAIDRYLAI

SEQ ID NO: 72748 - protein, 9 aa, Homo sapiens
  misc_feature: Table A; Target 72748; HLA-B*46:01; PROKR1; ENSG00000169618; CTA
IAIDRYLAI

SEQ ID NO: 72749 - protein, 9 aa, Homo sapiens
  misc_feature: Table A; Target 72749; HLA-B*51:01; PROKR1; ENSG00000169618; CTA
IAIDRYLAI

SEQ ID NO: 72750 - protein, 9 aa, Homo sapiens
  misc_feature: Table A; Target 72750; HLA-B*58:01; PROKR1; ENSG00000169618; CTA
IAIDRYLAI

SEQ ID NO: 72751 - protein, 9 aa, Homo sapiens
  misc_feature: Table A; Target 72751; HLA-C*02:02; PROKR1; ENSG00000169618; CTA
IAIDRYLAI

SEQ ID NO: 72752 - protein, 9 aa, Homo sapiens
  misc_feature: Table A; Target 72752; HLA-C*03:03; PROKR1; ENSG00000169618; CTA
IAIDRYLAI

SEQ ID NO: 72753 - protein, 9 aa, Homo sapiens
  misc_feature: Table A; Target 72753; HLA-C*03:04; PROKR1; ENSG00000169618; CTA
IAIDRYLAI

SEQ ID NO: 72754 - protein, 9 aa, Homo sapiens
  misc_feature: Table A; Target 72754; HLA-C*16:01; PROKR1; ENSG00000169618; CTA
IAIDRYLAI

SEQ ID NO: 72755 - protein, 9 aa, Homo sapiens
  misc_feature: Table A; Target 72755; HLA-C*16:02; PROKR1; ENSG00000169618; CTA
IAIDRYLAI

SEQ ID NO: 72756 - protein, 9 aa, Homo sapiens
  misc_feature: Table A; Target 72756; HLA-C*16:04; PROKR1; ENSG00000169618; CTA
IAIDRYLAI

SEQ ID NO: 72757 - protein, 8 aa, Homo sapiens
  misc_feature: Table A; Target 72757; HLA-A*23:01; PROKR1; ENSG00000169618; CTA
IAIPSAYF

SEQ ID NO: 72758 - protein, 8 aa, Homo sapiens
  misc_feature: Table A; Target 72758; HLA-B*57:01; PROKR1; ENSG00000169618; CTA
IAIPSAYF

SEQ ID NO: 72759 - protein, 8 aa, Homo sapiens
  misc_feature: Table A; Target 72759; HLA-B*58:01; PROKR1; ENSG00000169618; CTA
IAIPSAYF

SEQ ID NO: 72760 - protein, 9 aa, Homo sapiens
  misc_feature: Table A; Target 72760; HLA-B*51:01; PROKR1; ENSG00000169618; CTA
IALVWTVSI

SEQ ID NO: 72761 - protein, 8 aa, Homo sapiens
  misc_feature: Table A; Target 72761; HLA-B*51:01; PROKR1; ENSG00000169618; CTA
IAMSNSMI

SEQ ID NO: 72762 - protein, 11 aa, Homo sapiens
  misc_feature: Table A; Target 72762; HLA-A*23:01; PROKR1; ENSG00000169618; CTA
IAMSNSMINTL

SEQ ID NO: 72763 - protein, 11 aa, Homo sapiens
  misc_feature: Table A; Target 72763; HLA-B*35:03; PROKR1; ENSG00000169618; CTA
IAMSNSMINTL

SEQ ID NO: 72764 - protein, 11 aa, Homo sapiens
  misc_feature: Table A; Target 72764; HLA-C*03:03; PROKR1; ENSG00000169618; CTA
IAMSNSMINTL

SEQ ID NO: 72765 - protein, 11 aa, Homo sapiens
  misc_feature: Table A; Target 72765; HLA-C*03:04; PROKR1; ENSG00000169618; CTA
IAMSNSMINTL

SEQ ID NO: 72766 - protein, 9 aa, Homo sapiens
  misc_feature: Table A; Target 72766; HLA-B*35:01; PROKR1; ENSG00000169618; CTA
IANLAISDF

SEQ ID NO: 72767 - protein, 9 aa, Homo sapiens
  misc_feature: Table A; Target 72767; HLA-B*46:01; PROKR1; ENSG00000169618; CTA
IANLAISDF

SEQ ID NO: 72768 - protein, 9 aa, Homo sapiens
  misc_feature: Table A; Target 72768; HLA-C*02:02; PROKR1; ENSG00000169618; CTA
IANLAISDF

SEQ ID NO: 72769 - protein, 9 aa, Homo sapiens
  misc_feature: Table A; Target 72769; HLA-C*05:01; PROKR1; ENSG00000169618; CTA
IANLAISDF

SEQ ID NO: 72770 - protein, 8 aa, Homo sapiens
  misc_feature: Table A; Target 72770; HLA-A*30:01; PROKR1; ENSG00000169618; CTA
IEFVGPVV

SEQ ID NO: 72771 - protein, 8 aa, Homo sapiens
  misc_feature: Table A; Target 72771; HLA-B*13:02; PROKR1; ENSG00000169618; CTA
IEFVGPVV

SEQ ID NO: 72772 - protein, 8 aa, Homo sapiens
  misc_feature: Table A; Target 72772; HLA-B*18:01; PROKR1; ENSG00000169618; CTA
IEFVGPVV

SEQ ID NO: 72773 - protein, 8 aa, Homo sapiens
  misc_feature: Table A; Target 72773; HLA-B*37:01; PROKR1; ENSG00000169618; CTA
IEFVGPVV

SEQ ID NO: 72774 - protein, 8 aa, Homo sapiens
  misc_feature: Table A; Target 72774; HLA-B*40:01; PROKR1; ENSG00000169618; CTA
IEFVGPVV

SEQ ID NO: 72775 - protein, 8 aa, Homo sapiens
  misc_feature: Table A; Target 72775; HLA-B*40:02; PROKR1; ENSG00000169618; CTA
IEFVGPVV

SEQ ID NO: 72776 - protein, 8 aa, Homo sapiens
  misc_feature: Table A; Target 72776; HLA-B*49:01; PROKR1; ENSG00000169618; CTA
IEFVGPVV

SEQ ID NO: 72777 - protein, 8 aa, Homo sapiens
  misc_feature: Table A; Target 72777; HLA-B*51:01; PROKR1; ENSG00000169618; CTA
IEFVGPVV

SEQ ID NO: 72778 - protein, 8 aa, Homo sapiens
  misc_feature: Table A; Target 72778; HLA-C*12:03; PROKR1; ENSG00000169618; CTA
IEFVGPVV

SEQ ID NO: 72779 - protein, 9 aa, Homo sapiens
  misc_feature: Table A; Target 72779; HLA-A*30:01; PROKR1; ENSG00000169618; CTA
IEFVGPVVT

SEQ ID NO: 72780 - protein, 9 aa, Homo sapiens
  misc_feature: Table A; Target 72780; HLA-B*18:01; PROKR1; ENSG00000169618; CTA
IEFVGPVVT

SEQ ID NO: 72781 - protein, 9 aa, Homo sapiens
  misc_feature: Table A; Target 72781; HLA-B*40:01; PROKR1; ENSG00000169618; CTA
IEFVGPVVT

SEQ ID NO: 72782 - protein, 9 aa, Homo sapiens
  misc_feature: Table A; Target 72782; HLA-B*40:02; PROKR1; ENSG00000169618; CTA
IEFVGPVVT

SEQ ID NO: 72783 - protein, 9 aa, Homo sapiens
  misc_feature: Table A; Target 72783; HLA-B*49:01; PROKR1; ENSG00000169618; CTA
IEFVGPVVT

SEQ ID NO: 72784 - protein, 10 aa, Homo sapiens
  misc_feature: Table A; Target 72784; HLA-A*30:01; PROKR1; ENSG00000169618; CTA
IEFVGPVVTM

SEQ ID NO: 72785 - protein, 10 aa, Homo sapiens
  misc_feature: Table A; Target 72785; HLA-B*18:01; PROKR1; ENSG00000169618; CTA
IEFVGPVVTM

SEQ ID NO: 72786 - protein, 10 aa, Homo sapiens
  misc_feature: Table A; Target 72786; HLA-B*37:01; PROKR1; ENSG00000169618; CTA
IEFVGPVVTM

SEQ ID NO: 72787 - protein, 10 aa, Homo sapiens
  misc_feature: Table A; Target 72787; HLA-B*40:01; PROKR1; ENSG00000169618; CTA
IEFVGPVVTM

SEQ ID NO: 72788 - protein, 10 aa, Homo sapiens
  misc_feature: Table A; Target 72788; HLA-B*40:02; PROKR1; ENSG00000169618; CTA
IEFVGPVVTM

SEQ ID NO: 72789 - protein, 10 aa, Homo sapiens
  misc_feature: Table A; Target 72789; HLA-B*44:02; PROKR1; ENSG00000169618; CTA
IEFVGPVVTM

SEQ ID NO: 72790 - protein, 10 aa, Homo sapiens
  misc_feature: Table A; Target 72790; HLA-B*44:03; PROKR1; ENSG00000169618; CTA
IEFVGPVVTM

SEQ ID NO: 72791 - protein, 10 aa, Homo sapiens
  misc_feature: Table A; Target 72791; HLA-B*49:01; PROKR1; ENSG00000169618; CTA
IEFVGPVVTM

SEQ ID NO: 72792 - protein, 10 aa, Homo sapiens
  misc_feature: Table A; Target 72792; HLA-C*16:04; PROKR1; ENSG00000169618; CTA
IEFVGPVVTM

SEQ ID NO: 72793 - protein, 9 aa, Homo sapiens
  misc_feature: Table A; Target 72793; HLA-A*23:01; PROKR1; ENSG00000169618; CTA
IFIAALVRY

SEQ ID NO: 72794 - protein, 9 aa, Homo sapiens
  misc_feature: Table A; Target 72794; HLA-A*24:02; PROKR1; ENSG00000169618; CTA
IFIAALVRY

SEQ ID NO: 72795 - protein, 9 aa, Homo sapiens
  misc_feature: Table A; Target 72795; HLA-A*29:02; PROKR1; ENSG00000169618; CTA
IFIAALVRY

SEQ ID NO: 72796 - protein, 9 aa, Homo sapiens
  misc_feature: Table A; Target 72796; HLA-C*14:02; PROKR1; ENSG00000169618; CTA
IFIAALVRY

SEQ ID NO: 72797 - protein, 9 aa, Homo sapiens
  misc_feature: Table A; Target 72797; HLA-B*46:01; PROKR1; ENSG00000169618; CTA
IGMPATEEV

SEQ ID NO: 72798 - protein, 9 aa, Homo sapiens
  misc_feature: Table A; Target 72798; HLA-B*54:01; PROKR1; ENSG00000169618; CTA
IGNFIFIAA

SEQ ID NO: 72799 - protein, 9 aa, Homo sapiens
  misc_feature: Table A; Target 72799; HLA-B*56:01; PROKR1; ENSG00000169618; CTA
IGNFIFIAA

SEQ ID NO: 72800 - protein, 9 aa, Homo sapiens
  misc_feature: Table A; Target 72800; HLA-A*01:01; PROKR1; ENSG00000169618; CTA
ILIAIPSAY

SEQ ID NO: 72801 - protein, 9 aa, Homo sapiens
  misc_feature: Table A; Target 72801; HLA-A*03:01; PROKR1; ENSG00000169618; CTA
ILIAIPSAY

SEQ ID NO: 72802 - protein, 9 aa, Homo sapiens
  misc_feature: Table A; Target 72802; HLA-A*23:01; PROKR1; ENSG00000169618; CTA
ILIAIPSAY

SEQ ID NO: 72803 - protein, 9 aa, Homo sapiens
  misc_feature: Table A; Target 72803; HLA-A*25:01; PROKR1; ENSG00000169618; CTA
ILIAIPSAY

SEQ ID NO: 72804 - protein, 9 aa, Homo sapiens
  misc_feature: Table A; Target 72804; HLA-A*26:01; PROKR1; ENSG00000169618; CTA
ILIAIPSAY

SEQ ID NO: 72805 - protein, 9 aa, Homo sapiens
  misc_feature: Table A; Target 72805; HLA-A*29:02; PROKR1; ENSG00000169618; CTA
ILIAIPSAY

SEQ ID NO: 72806 - protein, 9 aa, Homo sapiens
  misc_feature: Table A; Target 72806; HLA-A*30:02; PROKR1; ENSG00000169618; CTA
ILIAIPSAY

SEQ ID NO: 72807 - protein, 9 aa, Homo sapiens
  misc_feature: Table A; Target 72807; HLA-A*32:01; PROKR1; ENSG00000169618; CTA
ILIAIPSAY

SEQ ID NO: 72808 - protein, 9 aa, Homo sapiens
  misc_feature: Table A; Target 72808; HLA-B*15:01; PROKR1; ENSG00000169618; CTA
ILIAIPSAY

SEQ ID NO: 72809 - protein, 9 aa, Homo sapiens
  misc_feature: Table A; Target 72809; HLA-B*15:03; PROKR1; ENSG00000169618; CTA
ILIAIPSAY

SEQ ID NO: 72810 - protein, 9 aa, Homo sapiens
  misc_feature: Table A; Target 72810; HLA-B*18:01; PROKR1; ENSG00000169618; CTA
ILIAIPSAY

SEQ ID NO: 72811 - protein, 9 aa, Homo sapiens
  misc_feature: Table A; Target 72811; HLA-B*46:01; PROKR1; ENSG00000169618; CTA
ILIAIPSAY

SEQ ID NO: 72812 - protein, 9 aa, Homo sapiens
  misc_feature: Table A; Target 72812; HLA-B*58:01; PROKR1; ENSG00000169618; CTA
ILIAIPSAY

SEQ ID NO: 72813 - protein, 9 aa, Homo sapiens
  misc_feature: Table A; Target 72813; HLA-C*01:02; PROKR1; ENSG00000169618; CTA
ILIAIPSAY

SEQ ID NO: 72814 - protein, 9 aa, Homo sapiens
  misc_feature: Table A; Target 72814; HLA-C*02:02; PROKR1; ENSG00000169618; CTA
ILIAIPSAY

SEQ ID NO: 72815 - protein, 9 aa, Homo sapiens
  misc_feature: Table A; Target 72815; HLA-C*07:04; PROKR1; ENSG00000169618; CTA
ILIAIPSAY

SEQ ID NO: 72816 - protein, 9 aa, Homo sapiens
  misc_feature: Table A; Target 72816; HLA-C*14:02; PROKR1; ENSG00000169618; CTA
ILIAIPSAY

SEQ ID NO: 72817 - protein, 9 aa, Homo sapiens
  misc_feature: Table A; Target 72817; HLA-C*16:04; PROKR1; ENSG00000169618; CTA
ILIAIPSAY

SEQ ID NO: 72818 - protein, 10 aa, Homo sapiens
  misc_feature: Table A; Target 72818; HLA-A*23:01; PROKR1; ENSG00000169618; CTA
ILIAIPSAYF

SEQ ID NO: 72819 - protein, 10 aa, Homo sapiens
  misc_feature: Table A; Target 72819; HLA-A*24:02; PROKR1; ENSG00000169618; CTA
ILIAIPSAYF

SEQ ID NO: 72820 - protein, 9 aa, Homo sapiens
  misc_feature: Table A; Target 72820; HLA-A*01:01; PROKR1; ENSG00000169618; CTA
ISDFLVAIV

SEQ ID NO: 72821 - protein, 9 aa, Homo sapiens
  misc_feature: Table A; Target 72821; HLA-A*02:03; PROKR1; ENSG00000169618; CTA
IVRDFFPTV

SEQ ID NO: 72822 - protein, 9 aa, Homo sapiens
  misc_feature: Table A; Target 72822; HLA-A*02:07; PROKR1; ENSG00000169618; CTA
IVRDFFPTV

SEQ ID NO: 72823 - protein, 9 aa, Homo sapiens
  misc_feature: Table A; Target 72823; HLA-B*51:01; PROKR1; ENSG00000169618; CTA
IVRDFFPTV

SEQ ID NO: 72824 - protein, 9 aa, Homo sapiens
  misc_feature: Table A; Target 72824; HLA-B*54:01; PROKR1; ENSG00000169618; CTA
IVRDFFPTV

SEQ ID NO: 72825 - protein, 10 aa, Homo sapiens
  misc_feature: Table A; Target 72825; HLA-B*57:01; PROKR1; ENSG00000169618; CTA
IVRDFFPTVF

SEQ ID NO: 72826 - protein, 8 aa, Homo sapiens
  misc_feature: Table A; Target 72826; HLA-C*03:04; PROKR1; ENSG00000169618; CTA
KIVIGMAL

SEQ ID NO: 72827 - protein, 9 aa, Homo sapiens
  misc_feature: Table A; Target 72827; HLA-A*24:02; PROKR1; ENSG00000169618; CTA
KYFKKIMLL

SEQ ID NO: 72828 - protein, 8 aa, Homo sapiens
  misc_feature: Table A; Target 72828; HLA-B*58:01; PROKR1; ENSG00000169618; CTA
LAIAIDRY

SEQ ID NO: 72829 - protein, 9 aa, Homo sapiens
  misc_feature: Table A; Target 72829; HLA-B*57:01; PROKR1; ENSG00000169618; CTA
LAIAIDRYL

SEQ ID NO: 72830 - protein, 9 aa, Homo sapiens
  misc_feature: Table A; Target 72830; HLA-C*02:02; PROKR1; ENSG00000169618; CTA
LAIAIDRYL

SEQ ID NO: 72831 - protein, 9 aa, Homo sapiens
  misc_feature: Table A; Target 72831; HLA-B*54:01; PROKR1; ENSG00000169618; CTA
LAISDFLVA

SEQ ID NO: 72832 - protein, 9 aa, Homo sapiens
  misc_feature: Table A; Target 72832; HLA-B*54:01; PROKR1; ENSG00000169618; CTA
LAIVHPLRP

SEQ ID NO: 72833 - protein, 8 aa, Homo sapiens
  misc_feature: Table A; Target 72833; HLA-B*37:01; PROKR1; ENSG00000169618; CTA
LDLKTIGM

SEQ ID NO: 72834 - protein, 8 aa, Homo sapiens
  misc_feature: Table A; Target 72834; HLA-A*01:01; PROKR1; ENSG00000169618; CTA
LIAIPSAY

SEQ ID NO: 72835 - protein, 8 aa, Homo sapiens
  misc_feature: Table A; Target 72835; HLA-B*46:01; PROKR1; ENSG00000169618; CTA
LIAIPSAY

SEQ ID NO: 72836 - protein, 9 aa, Homo sapiens
  misc_feature: Table A; Target 72836; HLA-A*01:01; PROKR1; ENSG00000169618; CTA
LLAIAIDRY

SEQ ID NO: 72837 - protein, 9 aa, Homo sapiens
  misc_feature: Table A; Target 72837; HLA-A*29:02; PROKR1; ENSG00000169618; CTA
LLAIAIDRY

SEQ ID NO: 72838 - protein, 9 aa, Homo sapiens
  misc_feature: Table A; Target 72838; HLA-B*15:01; PROKR1; ENSG00000169618; CTA
LLAIAIDRY

SEQ ID NO: 72839 - protein, 9 aa, Homo sapiens
  misc_feature: Table A; Target 72839; HLA-A*02:04; PROKR1; ENSG00000169618; CTA
LSWEHGHVL

SEQ ID NO: 72840 - protein, 9 aa, Homo sapiens
  misc_feature: Table A; Target 72840; HLA-A*02:07; PROKR1; ENSG00000169618; CTA
LSWEHGHVL

SEQ ID NO: 72841 - protein, 9 aa, Homo sapiens
  misc_feature: Table A; Target 72841; HLA-C*03:03; PROKR1; ENSG00000169618; CTA
LSWEHGHVL

SEQ ID NO: 72842 - protein, 9 aa, Homo sapiens
  misc_feature: Table A; Target 72842; HLA-C*03:04; PROKR1; ENSG00000169618; CTA
LSWEHGHVL

SEQ ID NO: 72843 - protein, 9 aa, Homo sapiens
  misc_feature: Table A; Target 72843; HLA-A*02:04; PROKR1; ENSG00000169618; CTA
LTNLLIANL

SEQ ID NO: 72844 - protein, 9 aa, Homo sapiens
  misc_feature: Table A; Target 72844; HLA-A*24:02; PROKR1; ENSG00000169618; CTA
LWFKAVPGF

SEQ ID NO: 72845 - protein, 8 aa, Homo sapiens
  misc_feature: Table A; Target 72845; HLA-A*23:01; PROKR1; ENSG00000169618; CTA
LYVSTNAL

SEQ ID NO: 72846 - protein, 8 aa, Homo sapiens
  misc_feature: Table A; Target 72846; HLA-C*01:02; PROKR1; ENSG00000169618; CTA
LYVSTNAL

SEQ ID NO: 72847 - protein, 8 aa, Homo sapiens
  misc_feature: Table A; Target 72847; HLA-C*14:02; PROKR1; ENSG00000169618; CTA
LYVSTNAL

SEQ ID NO: 72848 - protein, 9 aa, Homo sapiens
  misc_feature: Table A; Target 72848; HLA-A*23:01; PROKR1; ENSG00000169618; CTA
LYVSTNALL

SEQ ID NO: 72849 - protein, 9 aa, Homo sapiens
  misc_feature: Table A; Target 72849; HLA-A*24:02; PROKR1; ENSG00000169618; CTA
LYVSTNALL

SEQ ID NO: 72850 - protein, 9 aa, Homo sapiens
  misc_feature: Table A; Target 72850; HLA-C*14:02; PROKR1; ENSG00000169618; CTA
LYVSTNALL

SEQ ID NO: 72851 - protein, 11 aa, Homo sapiens
  misc_feature: Table A; Target 72851; HLA-A*23:01; PROKR1; ENSG00000169618; CTA
LYVSTNALLAI

SEQ ID NO: 72852 - protein, 9 aa, Homo sapiens
  misc_feature: Table A; Target 72852; HLA-A*24:02; PROKR1; ENSG00000169618; CTA
LYYKSYFLF

SEQ ID NO: 72853 - protein, 8 aa, Homo sapiens
  misc_feature: Table A; Target 72853; HLA-C*03:03; PROKR1; ENSG00000169618; CTA
MALVGIML

SEQ ID NO: 72854 - protein, 8 aa, Homo sapiens
  misc_feature: Table A; Target 72854; HLA-C*03:04; PROKR1; ENSG00000169618; CTA
MALVGIML

SEQ ID NO: 72855 - protein, 9 aa, Homo sapiens
  misc_feature: Table A; Target 72855; HLA-B*51:01; PROKR1; ENSG00000169618; CTA
MALVGIMLV

SEQ ID NO: 72856 - protein, 9 aa, Homo sapiens
  misc_feature: Table A; Target 72856; HLA-B*54:01; PROKR1; ENSG00000169618; CTA
MALVGIMLV

SEQ ID NO: 72857 - protein, 9 aa, Homo sapiens
  misc_feature: Table A; Target 72857; HLA-C*02:02; PROKR1; ENSG00000169618; CTA
MALVGIMLV

SEQ ID NO: 72858 - protein, 9 aa, Homo sapiens
  misc_feature: Table A; Target 72858; HLA-C*06:02; PROKR1; ENSG00000169618; CTA
MDYYVVRQL

SEQ ID NO: 72859 - protein, 9 aa, Homo sapiens
  misc_feature: Table A; Target 72859; HLA-A*29:02; PROKR1; ENSG00000169618; CTA
MLLHWKASY

SEQ ID NO: 72860 - protein, 9 aa, Homo sapiens
  misc_feature: Table A; Target 72860; HLA-B*35:03; PROKR1; ENSG00000169618; CTA
MPATEEVDC

SEQ ID NO: 72861 - protein, 9 aa, Homo sapiens
  misc_feature: Table A; Target 72861; HLA-B*55:01; PROKR1; ENSG00000169618; CTA
MPATEEVDC

SEQ ID NO: 72862 - protein, 10 aa, Homo sapiens
  misc_feature: Table A; Target 72862; HLA-B*35:03; PROKR1; ENSG00000169618; CTA
MPATEEVDCI

SEQ ID NO: 72863 - protein, 10 aa, Homo sapiens
  misc_feature: Table A; Target 72863; HLA-B*55:01; PROKR1; ENSG00000169618; CTA
MPATEEVDCI

SEQ ID NO: 72864 - protein, 9 aa, Homo sapiens
  misc_feature: Table A; Target 72864; HLA-B*35:03; PROKR1; ENSG00000169618; CTA
MPLDEDEDV

SEQ ID NO: 72865 - protein, 10 aa, Homo sapiens
  misc_feature: Table A; Target 72865; HLA-B*35:03; PROKR1; ENSG00000169618; CTA
MPLDEDEDVT

SEQ ID NO: 72866 - protein, 9 aa, Homo sapiens
  misc_feature: Table A; Target 72866; HLA-B*35:01; PROKR1; ENSG00000169618; CTA
MSNSMINTL

SEQ ID NO: 72867 - protein, 9 aa, Homo sapiens
  misc_feature: Table A; Target 72867; HLA-B*35:03; PROKR1; ENSG00000169618; CTA
MSNSMINTL

SEQ ID NO: 72868 - protein, 9 aa, Homo sapiens
  misc_feature: Table A; Target 72868; HLA-B*58:01; PROKR1; ENSG00000169618; CTA
MSNSMINTL

SEQ ID NO: 72869 - protein, 9 aa, Homo sapiens
  misc_feature: Table A; Target 72869; HLA-C*02:02; PROKR1; ENSG00000169618; CTA
MSNSMINTL

SEQ ID NO: 72870 - protein, 9 aa, Homo sapiens
  misc_feature: Table A; Target 72870; HLA-C*03:03; PROKR1; ENSG00000169618; CTA
MSNSMINTL

SEQ ID NO: 72871 - protein, 9 aa, Homo sapiens
  misc_feature: Table A; Target 72871; HLA-C*03:04; PROKR1; ENSG00000169618; CTA
MSNSMINTL

SEQ ID NO: 72872 - protein, 9 aa, Homo sapiens
  misc_feature: Table A; Target 72872; HLA-C*07:04; PROKR1; ENSG00000169618; CTA
MSNSMINTL

SEQ ID NO: 72873 - protein, 9 aa, Homo sapiens
  misc_feature: Table A; Target 72873; HLA-C*12:03; PROKR1; ENSG00000169618; CTA
MSNSMINTL

SEQ ID NO: 72874 - protein, 9 aa, Homo sapiens
  misc_feature: Table A; Target 72874; HLA-C*16:01; PROKR1; ENSG00000169618; CTA
MSNSMINTL

SEQ ID NO: 72875 - protein, 9 aa, Homo sapiens
  misc_feature: Table A; Target 72875; HLA-C*16:02; PROKR1; ENSG00000169618; CTA
MSNSMINTL

SEQ ID NO: 72876 - protein, 8 aa, Homo sapiens
  misc_feature: Table A; Target 72876; HLA-B*51:01; PROKR1; ENSG00000169618; CTA
NALLAIAI

SEQ ID NO: 72877 - protein, 9 aa, Homo sapiens
  misc_feature: Table A; Target 72877; HLA-A*23:01; PROKR1; ENSG00000169618; CTA
NATNTSTSF

SEQ ID NO: 72878 - protein, 9 aa, Homo sapiens
  misc_feature: Table A; Target 72878; HLA-A*25:01; PROKR1; ENSG00000169618; CTA
NATNTSTSF

SEQ ID NO: 72879 - protein, 9 aa, Homo sapiens
  misc_feature: Table A; Target 72879; HLA-A*32:01; PROKR1; ENSG00000169618; CTA
NATNTSTSF

SEQ ID NO: 72880 - protein, 9 aa, Homo sapiens
  misc_feature: Table A; Target 72880; HLA-B*15:03; PROKR1; ENSG00000169618; CTA
NATNTSTSF

SEQ ID NO: 72881 - protein, 9 aa, Homo sapiens
  misc_feature: Table A; Target 72881; HLA-B*35:01; PROKR1; ENSG00000169618; CTA
NATNTSTSF

SEQ ID NO: 72882 - protein, 9 aa, Homo sapiens
  misc_feature: Table A; Target 72882; HLA-B*35:03; PROKR1; ENSG00000169618; CTA
NATNTSTSF

SEQ ID NO: 72883 - protein, 9 aa, Homo sapiens
  misc_feature: Table A; Target 72883; HLA-B*39:01; PROKR1; ENSG00000169618; CTA
NATNTSTSF

SEQ ID NO: 72884 - protein, 9 aa, Homo sapiens
  misc_feature: Table A; Target 72884; HLA-B*46:01; PROKR1; ENSG00000169618; CTA
NATNTSTSF

SEQ ID NO: 72885 - protein, 9 aa, Homo sapiens
  misc_feature: Table A; Target 72885; HLA-B*55:01; PROKR1; ENSG00000169618; CTA
NATNTSTSF

SEQ ID NO: 72886 - protein, 9 aa, Homo sapiens
  misc_feature: Table A; Target 72886; HLA-B*58:01; PROKR1; ENSG00000169618; CTA
NATNTSTSF

SEQ ID NO: 72887 - protein, 9 aa, Homo sapiens
  misc_feature: Table A; Target 72887; HLA-C*02:02; PROKR1; ENSG00000169618; CTA
NATNTSTSF

SEQ ID NO: 72888 - protein, 9 aa, Homo sapiens
  misc_feature: Table A; Target 72888; HLA-C*03:03; PROKR1; ENSG00000169618; CTA
NATNTSTSF

SEQ ID NO: 72889 - protein, 9 aa, Homo sapiens
  misc_feature: Table A; Target 72889; HLA-C*03:04; PROKR1; ENSG00000169618; CTA
NATNTSTSF

SEQ ID NO: 72890 - protein, 9 aa, Homo sapiens
  misc_feature: Table A; Target 72890; HLA-C*05:01; PROKR1; ENSG00000169618; CTA
NATNTSTSF

SEQ ID NO: 72891 - protein, 9 aa, Homo sapiens
  misc_feature: Table A; Target 72891; HLA-C*07:06; PROKR1; ENSG00000169618; CTA
NATNTSTSF

SEQ ID NO: 72892 - protein, 9 aa, Homo sapiens
  misc_feature: Table A; Target 72892; HLA-C*14:02; PROKR1; ENSG00000169618; CTA
NATNTSTSF

SEQ ID NO: 72893 - protein, 9 aa, Homo sapiens
  misc_feature: Table A; Target 72893; HLA-C*16:01; PROKR1; ENSG00000169618; CTA
NATNTSTSF

SEQ ID NO: 72894 - protein, 9 aa, Homo sapiens
  misc_feature: Table A; Target 72894; HLA-C*16:02; PROKR1; ENSG00000169618; CTA
NATNTSTSF

SEQ ID NO: 72895 - protein, 11 aa, Homo sapiens
  misc_feature: Table A; Target 72895; HLA-A*29:02; PROKR1; ENSG00000169618; CTA
NFIFIAALVRY

SEQ ID NO: 72896 - protein, 10 aa, Homo sapiens
  misc_feature: Table A; Target 72896; HLA-A*02:04; PROKR1; ENSG00000169618; CTA
NLTNLLIANL

SEQ ID NO: 72897 - protein, 10 aa, Homo sapiens
  misc_feature: Table A; Target 72897; HLA-B*07:02; PROKR1; ENSG00000169618; CTA
NPHGAHATSF

SEQ ID NO: 72898 - protein, 10 aa, Homo sapiens
  misc_feature: Table A; Target 72898; HLA-B*35:01; PROKR1; ENSG00000169618; CTA
NPHGAHATSF

SEQ ID NO: 72899 - protein, 10 aa, Homo sapiens
  misc_feature: Table A; Target 72899; HLA-B*35:03; PROKR1; ENSG00000169618; CTA
NPHGAHATSF

SEQ ID NO: 72900 - protein, 10 aa, Homo sapiens
  misc_feature: Table A; Target 72900; HLA-C*07:02; PROKR1; ENSG00000169618; CTA
NPHGAHATSF

SEQ ID NO: 72901 - protein, 9 aa, Homo sapiens
  misc_feature: Table A; Target 72901; HLA-A*11:01; PROKR1; ENSG00000169618; CTA
NTLCFVTVK

SEQ ID NO: 72902 - protein, 9 aa, Homo sapiens
  misc_feature: Table A; Target 72902; HLA-A*68:02; PROKR1; ENSG00000169618; CTA
NTSTSFLSV

SEQ ID NO: 72903 - protein, 8 aa, Homo sapiens
  misc_feature: Table A; Target 72903; HLA-A*23:01; PROKR1; ENSG00000169618; CTA
NYLRTVSL

SEQ ID NO: 72904 - protein, 8 aa, Homo sapiens
  misc_feature: Table A; Target 72904; HLA-C*14:02; PROKR1; ENSG00000169618; CTA
NYLRTVSL

SEQ ID NO: 72905 - protein, 9 aa, Homo sapiens
  misc_feature: Table A; Target 72905; HLA-A*23:01; PROKR1; ENSG00000169618; CTA
NYLRTVSLY

SEQ ID NO: 72906 - protein, 9 aa, Homo sapiens
  misc_feature: Table A; Target 72906; HLA-A*24:02; PROKR1; ENSG00000169618; CTA
NYLRTVSLY

SEQ ID NO: 72907 - protein, 9 aa, Homo sapiens
  misc_feature: Table A; Target 72907; HLA-A*29:02; PROKR1; ENSG00000169618; CTA
NYLRTVSLY

SEQ ID NO: 72908 - protein, 9 aa, Homo sapiens
  misc_feature: Table A; Target 72908; HLA-C*14:02; PROKR1; ENSG00000169618; CTA
NYLRTVSLY

SEQ ID NO: 72909 - protein, 8 aa, Homo sapiens
  misc_feature: Table A; Target 72909; HLA-A*01:01; PROKR1; ENSG00000169618; CTA
PVDQQLYY

SEQ ID NO: 72910 - protein, 9 aa, Homo sapiens
  misc_feature: Table A; Target 72910; HLA-A*03:02; PROKR1; ENSG00000169618; CTA
PVDQQLYYK

SEQ ID NO: 72911 - protein, 9 aa, Homo sapiens
  misc_feature: Table A; Target 72911; HLA-A*29:02; PROKR1; ENSG00000169618; CTA
PVVTMTLCY

SEQ ID NO: 72912 - protein, 9 aa, Homo sapiens
  misc_feature: Table A; Target 72912; HLA-A*02:04; PROKR1; ENSG00000169618; CTA
QIWPVDQQL

SEQ ID NO: 72913 - protein, 9 aa, Homo sapiens
  misc_feature: Table A; Target 72913; HLA-A*02:07; PROKR1; ENSG00000169618; CTA
QIWPVDQQL

SEQ ID NO: 72914 - protein, 9 aa, Homo sapiens
  misc_feature: Table A; Target 72914; HLA-B*35:03; PROKR1; ENSG00000169618; CTA
QIWPVDQQL

SEQ ID NO: 72915 - protein, 10 aa, Homo sapiens
  misc_feature: Table A; Target 72915; HLA-A*29:02; PROKR1; ENSG00000169618; CTA
QIWPVDQQLY

SEQ ID NO: 72916 - protein, 11 aa, Homo sapiens
  misc_feature: Table A; Target 72916; HLA-A*29:02; PROKR1; ENSG00000169618; CTA
QIWPVDQQLYY

SEQ ID NO: 72917 - protein, 9 aa, Homo sapiens
  misc_feature: Table A; Target 72917; HLA-C*01:02; PROKR1; ENSG00000169618; CTA
QTATGLIAL

SEQ ID NO: 72918 - protein, 11 aa, Homo sapiens
  misc_feature: Table A; Target 72918; HLA-B*57:01; PROKR1; ENSG00000169618; CTA
QTATGLIALVW

SEQ ID NO: 72919 - protein, 8 aa, Homo sapiens
  misc_feature: Table A; Target 72919; HLA-B*37:01; PROKR1; ENSG00000169618; CTA
RDFFPTVF

SEQ ID NO: 72920 - protein, 9 aa, Homo sapiens
  misc_feature: Table A; Target 72920; HLA-A*23:01; PROKR1; ENSG00000169618; CTA
RYLAIVHPL

SEQ ID NO: 72921 - protein, 9 aa, Homo sapiens
  misc_feature: Table A; Target 72921; HLA-A*24:02; PROKR1; ENSG00000169618; CTA
RYLAIVHPL

SEQ ID NO: 72922 - protein, 9 aa, Homo sapiens
  misc_feature: Table A; Target 72922; HLA-A*31:01; PROKR1; ENSG00000169618; CTA
RYLAIVHPL

SEQ ID NO: 72923 - protein, 9 aa, Homo sapiens
  misc_feature: Table A; Target 72923; HLA-B*38:01; PROKR1; ENSG00000169618; CTA
SADLDLKTI

SEQ ID NO: 72924 - protein, 9 aa, Homo sapiens
  misc_feature: Table A; Target 72924; HLA-B*51:01; PROKR1; ENSG00000169618; CTA
SADLDLKTI

SEQ ID NO: 72925 - protein, 9 aa, Homo sapiens
  misc_feature: Table A; Target 72925; HLA-C*05:01; PROKR1; ENSG00000169618; CTA
SADLDLKTI

SEQ ID NO: 72926 - protein, 9 aa, Homo sapiens
  misc_feature: Table A; Target 72926; HLA-C*16:02; PROKR1; ENSG00000169618; CTA
SADLDLKTI

SEQ ID NO: 72927 - protein, 9 aa, Homo sapiens
  misc_feature: Table A; Target 72927; HLA-B*13:02; PROKR1; ENSG00000169618; CTA
SAYFTTETV

SEQ ID NO: 72928 - protein, 9 aa, Homo sapiens
  misc_feature: Table A; Target 72928; HLA-B*46:01; PROKR1; ENSG00000169618; CTA
SAYFTTETV

SEQ ID NO: 72929 - protein, 9 aa, Homo sapiens
  misc_feature: Table A; Target 72929; HLA-B*49:01; PROKR1; ENSG00000169618; CTA
SAYFTTETV

SEQ ID NO: 72930 - protein, 9 aa, Homo sapiens
  misc_feature: Table A; Target 72930; HLA-B*51:01; PROKR1; ENSG00000169618; CTA
SAYFTTETV

SEQ ID NO: 72931 - protein, 9 aa, Homo sapiens
  misc_feature: Table A; Target 72931; HLA-C*02:02; PROKR1; ENSG00000169618; CTA
SAYFTTETV

SEQ ID NO: 72932 - protein, 9 aa, Homo sapiens
  misc_feature: Table A; Target 72932; HLA-C*03:04; PROKR1; ENSG00000169618; CTA
SAYFTTETV

SEQ ID NO: 72933 - protein, 9 aa, Homo sapiens
  misc_feature: Table A; Target 72933; HLA-C*05:01; PROKR1; ENSG00000169618; CTA
SAYFTTETV

SEQ ID NO: 72934 - protein, 9 aa, Homo sapiens
  misc_feature: Table A; Target 72934; HLA-C*12:03; PROKR1; ENSG00000169618; CTA
SAYFTTETV

SEQ ID NO: 72935 - protein, 9 aa, Homo sapiens
  misc_feature: Table A; Target 72935; HLA-C*16:04; PROKR1; ENSG00000169618; CTA
SAYFTTETV

SEQ ID NO: 72936 - protein, 10 aa, Homo sapiens
  misc_feature: Table A; Target 72936; HLA-B*35:03; PROKR1; ENSG00000169618; CTA
SAYFTTETVL

SEQ ID NO: 72937 - protein, 8 aa, Homo sapiens
  misc_feature: Table A; Target 72937; HLA-B*37:01; PROKR1; ENSG00000169618; CTA
SDFLVAIV

SEQ ID NO: 72938 - protein, 8 aa, Homo sapiens
  misc_feature: Table A; Target 72938; HLA-A*29:02; PROKR1; ENSG00000169618; CTA
SFPFNFSY

SEQ ID NO: 72939 - protein, 9 aa, Homo sapiens
  misc_feature: Table A; Target 72939; HLA-A*02:01; PROKR1; ENSG00000169618; CTA
SILIAIPSA

SEQ ID NO: 72940 - protein, 9 aa, Homo sapiens
  misc_feature: Table A; Target 72940; HLA-B*56:01; PROKR1; ENSG00000169618; CTA
SILIAIPSA

SEQ ID NO: 72941 - protein, 10 aa, Homo sapiens
  misc_feature: Table A; Target 72941; HLA-A*30:02; PROKR1; ENSG00000169618; CTA
SILIAIPSAY

SEQ ID NO: 72942 - protein, 9 aa, Homo sapiens
  misc_feature: Table A; Target 72942; HLA-A*02:01; PROKR1; ENSG00000169618; CTA
SLYVSTNAL

SEQ ID NO: 72943 - protein, 9 aa, Homo sapiens
  misc_feature: Table A; Target 72943; HLA-A*02:03; PROKR1; ENSG00000169618; CTA
SLYVSTNAL

SEQ ID NO: 72944 - protein, 9 aa, Homo sapiens
  misc_feature: Table A; Target 72944; HLA-A*02:04; PROKR1; ENSG00000169618; CTA
SLYVSTNAL

SEQ ID NO: 72945 - protein, 9 aa, Homo sapiens
  misc_feature: Table A; Target 72945; HLA-A*30:01; PROKR1; ENSG00000169618; CTA
SLYVSTNAL

SEQ ID NO: 72946 - protein, 9 aa, Homo sapiens
  misc_feature: Table A; Target 72946; HLA-B*07:02; PROKR1; ENSG00000169618; CTA
SLYVSTNAL

SEQ ID NO: 72947 - protein, 9 aa, Homo sapiens
  misc_feature: Table A; Target 72947; HLA-B*08:01; PROKR1; ENSG00000169618; CTA
SLYVSTNAL

SEQ ID NO: 72948 - protein, 9 aa, Homo sapiens
  misc_feature: Table A; Target 72948; HLA-B*13:02; PROKR1; ENSG00000169618; CTA
SLYVSTNAL

SEQ ID NO: 72949 - protein, 9 aa, Homo sapiens
  misc_feature: Table A; Target 72949; HLA-B*15:01; PROKR1; ENSG00000169618; CTA
SLYVSTNAL

SEQ ID NO: 72950 - protein, 9 aa, Homo sapiens
  misc_feature: Table A; Target 72950; HLA-B*15:03; PROKR1; ENSG00000169618; CTA
SLYVSTNAL

SEQ ID NO: 72951 - protein, 9 aa, Homo sapiens
  misc_feature: Table A; Target 72951; HLA-B*37:01; PROKR1; ENSG00000169618; CTA
SLYVSTNAL

SEQ ID NO: 72952 - protein, 9 aa, Homo sapiens
  misc_feature: Table A; Target 72952; HLA-B*40:01; PROKR1; ENSG00000169618; CTA
SLYVSTNAL

SEQ ID NO: 72953 - protein, 9 aa, Homo sapiens
  misc_feature: Table A; Target 72953; HLA-B*46:01; PROKR1; ENSG00000169618; CTA
SLYVSTNAL

SEQ ID NO: 72954 - protein, 9 aa, Homo sapiens
  misc_feature: Table A; Target 72954; HLA-C*01:02; PROKR1; ENSG00000169618; CTA
SLYVSTNAL

SEQ ID NO: 72955 - protein, 9 aa, Homo sapiens
  misc_feature: Table A; Target 72955; HLA-C*02:02; PROKR1; ENSG00000169618; CTA
SLYVSTNAL

SEQ ID NO: 72956 - protein, 9 aa, Homo sapiens
  misc_feature: Table A; Target 72956; HLA-C*03:03; PROKR1; ENSG00000169618; CTA
SLYVSTNAL

SEQ ID NO: 72957 - protein, 9 aa, Homo sapiens
  misc_feature: Table A; Target 72957; HLA-C*03:04; PROKR1; ENSG00000169618; CTA
SLYVSTNAL

SEQ ID NO: 72958 - protein, 9 aa, Homo sapiens
  misc_feature: Table A; Target 72958; HLA-C*14:02; PROKR1; ENSG00000169618; CTA
SLYVSTNAL

SEQ ID NO: 72959 - protein, 9 aa, Homo sapiens
  misc_feature: Table A; Target 72959; HLA-A*02:01; PROKR1; ENSG00000169618; CTA
SMINTLCFV

SEQ ID NO: 72960 - protein, 9 aa, Homo sapiens
  misc_feature: Table A; Target 72960; HLA-A*02:03; PROKR1; ENSG00000169618; CTA
SMINTLCFV

SEQ ID NO: 72961 - protein, 8 aa, Homo sapiens
  misc_feature: Table A; Target 72961; HLA-B*37:01; PROKR1; ENSG00000169618; CTA
SNSMINTL

SEQ ID NO: 72962 - protein, 10 aa, Homo sapiens
  misc_feature: Table A; Target 72962; HLA-B*07:02; PROKR1; ENSG00000169618; CTA
SVNYLRTVSL

SEQ ID NO: 72963 - protein, 11 aa, Homo sapiens
  misc_feature: Table A; Target 72963; HLA-A*30:02; PROKR1; ENSG00000169618; CTA
SVNYLRTVSLY

SEQ ID NO: 72964 - protein, 9 aa, Homo sapiens
  misc_feature: Table A; Target 72964; HLA-C*14:02; PROKR1; ENSG00000169618; CTA
SYNGGKSSA

SEQ ID NO: 72965 - protein, 8 aa, Homo sapiens
  misc_feature: Table A; Target 72965; HLA-B*54:01; PROKR1; ENSG00000169618; CTA
TAFYIVEC

SEQ ID NO: 72966 - protein, 8 aa, Homo sapiens
  misc_feature: Table A; Target 72966; HLA-B*56:01; PROKR1; ENSG00000169618; CTA
TAFYIVEC

SEQ ID NO: 72967 - protein, 8 aa, Homo sapiens
  misc_feature: Table A; Target 72967; HLA-C*12:03; PROKR1; ENSG00000169618; CTA
TAFYIVEC

SEQ ID NO: 72968 - protein, 9 aa, Homo sapiens
  misc_feature: Table A; Target 72968; HLA-A*68:02; PROKR1; ENSG00000169618; CTA
TAFYIVECI

SEQ ID NO: 72969 - protein, 9 aa, Homo sapiens
  misc_feature: Table A; Target 72969; HLA-B*13:02; PROKR1; ENSG00000169618; CTA
TAFYIVECI

SEQ ID NO: 72970 - protein, 9 aa, Homo sapiens
  misc_feature: Table A; Target 72970; HLA-B*51:01; PROKR1; ENSG00000169618; CTA
TAFYIVECI

SEQ ID NO: 72971 - protein, 9 aa, Homo sapiens
  misc_feature: Table A; Target 72971; HLA-B*54:01; PROKR1; ENSG00000169618; CTA
TAFYIVECI

SEQ ID NO: 72972 - protein, 8 aa, Homo sapiens
  misc_feature: Table A; Target 72972; HLA-C*03:04; PROKR1; ENSG00000169618; CTA
TATGLIAL

SEQ ID NO: 72973 - protein, 9 aa, Homo sapiens
  misc_feature: Table A; Target 72973; HLA-A*68:02; PROKR1; ENSG00000169618; CTA
TATGLIALV

SEQ ID NO: 72974 - protein, 9 aa, Homo sapiens
  misc_feature: Table A; Target 72974; HLA-B*13:02; PROKR1; ENSG00000169618; CTA
TATGLIALV

SEQ ID NO: 72975 - protein, 9 aa, Homo sapiens
  misc_feature: Table A; Target 72975; HLA-C*02:02; PROKR1; ENSG00000169618; CTA
TATGLIALV

SEQ ID NO: 72976 - protein, 9 aa, Homo sapiens
  misc_feature: Table A; Target 72976; HLA-C*12:03; PROKR1; ENSG00000169618; CTA
TATGLIALV

SEQ ID NO: 72977 - protein, 9 aa, Homo sapiens
  misc_feature: Table A; Target 72977; HLA-C*16:02; PROKR1; ENSG00000169618; CTA
TATGLIALV

SEQ ID NO: 72978 - protein, 10 aa, Homo sapiens
  misc_feature: Table A; Target 72978; HLA-B*44:02; PROKR1; ENSG00000169618; CTA
TATGLIALVW

SEQ ID NO: 72979 - protein, 9 aa, Homo sapiens
  misc_feature: Table A; Target 72979; HLA-B*40:01; PROKR1; ENSG00000169618; CTA
TEEVDCIRL

SEQ ID NO: 72980 - protein, 8 aa, Homo sapiens
  misc_feature: Table A; Target 72980; HLA-A*30:01; PROKR1; ENSG00000169618; CTA
TETVLVIV

SEQ ID NO: 72981 - protein, 8 aa, Homo sapiens
  misc_feature: Table A; Target 72981; HLA-B*18:01; PROKR1; ENSG00000169618; CTA
TETVLVIV

SEQ ID NO: 72982 - protein, 8 aa, Homo sapiens
  misc_feature: Table A; Target 72982; HLA-B*49:01; PROKR1; ENSG00000169618; CTA
TETVLVIV

SEQ ID NO: 72983 - protein, 9 aa, Homo sapiens
  misc_feature: Table A; Target 72983; HLA-B*18:01; PROKR1; ENSG00000169618; CTA
TETVLVIVK

SEQ ID NO: 72984 - protein, 9 aa, Homo sapiens
  misc_feature: Table A; Target 72984; HLA-B*27:02; PROKR1; ENSG00000169618; CTA
TETVLVIVK

SEQ ID NO: 72985 - protein, 9 aa, Homo sapiens
  misc_feature: Table A; Target 72985; HLA-B*49:01; PROKR1; ENSG00000169618; CTA
TETVLVIVK

SEQ ID NO: 72986 - protein, 9 aa, Homo sapiens
  misc_feature: Table A; Target 72986; HLA-A*01:01; PROKR1; ENSG00000169618; CTA
TSFPFNFSY

SEQ ID NO: 72987 - protein, 9 aa, Homo sapiens
  misc_feature: Table A; Target 72987; HLA-A*29:02; PROKR1; ENSG00000169618; CTA
TSFPFNFSY

SEQ ID NO: 72988 - protein, 9 aa, Homo sapiens
  misc_feature: Table A; Target 72988; HLA-A*30:02; PROKR1; ENSG00000169618; CTA
TSFPFNFSY

SEQ ID NO: 72989 - protein, 9 aa, Homo sapiens
  misc_feature: Table A; Target 72989; HLA-A*32:01; PROKR1; ENSG00000169618; CTA
TSFPFNFSY

SEQ ID NO: 72990 - protein, 9 aa, Homo sapiens
  misc_feature: Table A; Target 72990; HLA-B*35:01; PROKR1; ENSG00000169618; CTA
TSFPFNFSY

SEQ ID NO: 72991 - protein, 9 aa, Homo sapiens
  misc_feature: Table A; Target 72991; HLA-B*57:01; PROKR1; ENSG00000169618; CTA
TSFPFNFSY

SEQ ID NO: 72992 - protein, 9 aa, Homo sapiens
  misc_feature: Table A; Target 72992; HLA-B*58:01; PROKR1; ENSG00000169618; CTA
TSFPFNFSY

SEQ ID NO: 72993 - protein, 9 aa, Homo sapiens
  misc_feature: Table A; Target 72993; HLA-C*02:02; PROKR1; ENSG00000169618; CTA
TSFPFNFSY

SEQ ID NO: 72994 - protein, 9 aa, Homo sapiens
  misc_feature: Table A; Target 72994; HLA-C*16:04; PROKR1; ENSG00000169618; CTA
TSFPFNFSY

SEQ ID NO: 72995 - protein, 9 aa, Homo sapiens
  misc_feature: Table A; Target 72995; HLA-C*03:04; PROKR1; ENSG00000169618; CTA
TSTSFLSVL

SEQ ID NO: 72996 - protein, 9 aa, Homo sapiens
  misc_feature: Table A; Target 72996; HLA-C*16:02; PROKR1; ENSG00000169618; CTA
TSTSFLSVL

SEQ ID NO: 72997 - protein, 9 aa, Homo sapiens
  misc_feature: Table A; Target 72997; HLA-A*02:03; PROKR1; ENSG00000169618; CTA
TSVNYLRTV

SEQ ID NO: 72998 - protein, 9 aa, Homo sapiens
  misc_feature: Table A; Target 72998; HLA-C*02:02; PROKR1; ENSG00000169618; CTA
TSVNYLRTV

SEQ ID NO: 72999 - protein, 9 aa, Homo sapiens
  misc_feature: Table A; Target 72999; HLA-C*06:02; PROKR1; ENSG00000169618; CTA
TSVNYLRTV

SEQ ID NO: 73000 - protein, 9 aa, Homo sapiens
  misc_feature: Table A; Target 73000; HLA-C*16:01; PROKR1; ENSG00000169618; CTA
TSVNYLRTV

SEQ ID NO: 73001 - protein, 9 aa, Homo sapiens
  misc_feature: Table A; Target 73001; HLA-C*16:02; PROKR1; ENSG00000169618; CTA
TSVNYLRTV

SEQ ID NO: 73002 - protein, 9 aa, Homo sapiens
  misc_feature: Table A; Target 73002; HLA-A*01:01; PROKR1; ENSG00000169618; CTA
TTETVLVIV

SEQ ID NO: 73003 - protein, 9 aa, Homo sapiens
  misc_feature: Table A; Target 73003; HLA-A*68:02; PROKR1; ENSG00000169618; CTA
TTETVLVIV

SEQ ID NO: 73004 - protein, 9 aa, Homo sapiens
  misc_feature: Table A; Target 73004; HLA-C*05:01; PROKR1; ENSG00000169618; CTA
TTETVLVIV

SEQ ID NO: 73005 - protein, 10 aa, Homo sapiens
  misc_feature: Table A; Target 73005; HLA-A*01:01; PROKR1; ENSG00000169618; CTA
TTETVLVIVK

SEQ ID NO: 73006 - protein, 10 aa, Homo sapiens
  misc_feature: Table A; Target 73006; HLA-A*11:01; PROKR1; ENSG00000169618; CTA
TTETVLVIVK

SEQ ID NO: 73007 - protein, 10 aa, Homo sapiens
  misc_feature: Table A; Target 73007; HLA-A*68:01; PROKR1; ENSG00000169618; CTA
TTETVLVIVK

SEQ ID NO: 73008 - protein, 10 aa, Homo sapiens
  misc_feature: Table A; Target 73008; HLA-B*27:02; PROKR1; ENSG00000169618; CTA
TTETVLVIVK

SEQ ID NO: 73009 - protein, 9 aa, Homo sapiens
  misc_feature: Table A; Target 73009; HLA-A*25:01; PROKR1; ENSG00000169618; CTA
TVKNDTVKY

SEQ ID NO: 73010 - protein, 9 aa, Homo sapiens
  misc_feature: Table A; Target 73010; HLA-A*26:01; PROKR1; ENSG00000169618; CTA
TVKNDTVKY

SEQ ID NO: 73011 - protein, 9 aa, Homo sapiens
  misc_feature: Table A; Target 73011; HLA-A*29:02; PROKR1; ENSG00000169618; CTA
TVKNDTVKY

SEQ ID NO: 73012 - protein, 9 aa, Homo sapiens
  misc_feature: Table A; Target 73012; HLA-A*30:02; PROKR1; ENSG00000169618; CTA
TVKNDTVKY

SEQ ID NO: 73013 - protein, 9 aa, Homo sapiens
  misc_feature: Table A; Target 73013; HLA-A*32:01; PROKR1; ENSG00000169618; CTA
TVKNDTVKY

SEQ ID NO: 73014 - protein, 9 aa, Homo sapiens
  misc_feature: Table A; Target 73014; HLA-A*33:01; PROKR1; ENSG00000169618; CTA
TVKNDTVKY

SEQ ID NO: 73015 - protein, 9 aa, Homo sapiens
  misc_feature: Table A; Target 73015; HLA-A*33:03; PROKR1; ENSG00000169618; CTA
TVKNDTVKY

SEQ ID NO: 73016 - protein, 9 aa, Homo sapiens
  misc_feature: Table A; Target 73016; HLA-B*15:01; PROKR1; ENSG00000169618; CTA
TVKNDTVKY

SEQ ID NO: 73017 - protein, 9 aa, Homo sapiens
  misc_feature: Table A; Target 73017; HLA-B*15:03; PROKR1; ENSG00000169618; CTA
TVKNDTVKY

SEQ ID NO: 73018 - protein, 9 aa, Homo sapiens
  misc_feature: Table A; Target 73018; HLA-B*35:01; PROKR1; ENSG00000169618; CTA
TVKNDTVKY

SEQ ID NO: 73019 - protein, 9 aa, Homo sapiens
  misc_feature: Table A; Target 73019; HLA-B*46:01; PROKR1; ENSG00000169618; CTA
TVKNDTVKY

SEQ ID NO: 73020 - protein, 9 aa, Homo sapiens
  misc_feature: Table A; Target 73020; HLA-B*58:01; PROKR1; ENSG00000169618; CTA
TVKNDTVKY

SEQ ID NO: 73021 - protein, 9 aa, Homo sapiens
  misc_feature: Table A; Target 73021; HLA-C*02:02; PROKR1; ENSG00000169618; CTA
TVKNDTVKY

SEQ ID NO: 73022 - protein, 9 aa, Homo sapiens
  misc_feature: Table A; Target 73022; HLA-C*03:03; PROKR1; ENSG00000169618; CTA
TVKNDTVKY

SEQ ID NO: 73023 - protein, 9 aa, Homo sapiens
  misc_feature: Table A; Target 73023; HLA-C*07:04; PROKR1; ENSG00000169618; CTA
TVKNDTVKY

SEQ ID NO: 73024 - protein, 9 aa, Homo sapiens
  misc_feature: Table A; Target 73024; HLA-C*07:06; PROKR1; ENSG00000169618; CTA
TVKNDTVKY

SEQ ID NO: 73025 - protein, 9 aa, Homo sapiens
  misc_feature: Table A; Target 73025; HLA-C*12:03; PROKR1; ENSG00000169618; CTA
TVKNDTVKY

SEQ ID NO: 73026 - protein, 9 aa, Homo sapiens
  misc_feature: Table A; Target 73026; HLA-C*16:01; PROKR1; ENSG00000169618; CTA
TVKNDTVKY

SEQ ID NO: 73027 - protein, 9 aa, Homo sapiens
  misc_feature: Table A; Target 73027; HLA-C*16:04; PROKR1; ENSG00000169618; CTA
TVKNDTVKY

SEQ ID NO: 73028 - protein, 10 aa, Homo sapiens
  misc_feature: Table A; Target 73028; HLA-A*25:01; PROKR1; ENSG00000169618; CTA
TVKNDTVKYF

SEQ ID NO: 73029 - protein, 9 aa, Homo sapiens
  misc_feature: Table A; Target 73029; HLA-A*02:07; PROKR1; ENSG00000169618; CTA
VGPVVTMTL

SEQ ID NO: 73030 - protein, 9 aa, Homo sapiens
  misc_feature: Table A; Target 73030; HLA-A*23:01; PROKR1; ENSG00000169618; CTA
VGPVVTMTL

SEQ ID NO: 73031 - protein, 9 aa, Homo sapiens
  misc_feature: Table A; Target 73031; HLA-A*24:02; PROKR1; ENSG00000169618; CTA
VGPVVTMTL

SEQ ID NO: 73032 - protein, 9 aa, Homo sapiens
  misc_feature: Table A; Target 73032; HLA-B*08:01; PROKR1; ENSG00000169618; CTA
VGPVVTMTL

SEQ ID NO: 73033 - protein, 9 aa, Homo sapiens
  misc_feature: Table A; Target 73033; HLA-B*46:01; PROKR1; ENSG00000169618; CTA
VGPVVTMTL

SEQ ID NO: 73034 - protein, 9 aa, Homo sapiens
  misc_feature: Table A; Target 73034; HLA-B*51:01; PROKR1; ENSG00000169618; CTA
VGPVVTMTL

SEQ ID NO: 73035 - protein, 9 aa, Homo sapiens
  misc_feature: Table A; Target 73035; HLA-C*01:02; PROKR1; ENSG00000169618; CTA
VGPVVTMTL

SEQ ID NO: 73036 - protein, 9 aa, Homo sapiens
  misc_feature: Table A; Target 73036; HLA-C*03:03; PROKR1; ENSG00000169618; CTA
VGPVVTMTL

SEQ ID NO: 73037 - protein, 9 aa, Homo sapiens
  misc_feature: Table A; Target 73037; HLA-C*03:04; PROKR1; ENSG00000169618; CTA
VGPVVTMTL

SEQ ID NO: 73038 - protein, 9 aa, Homo sapiens
  misc_feature: Table A; Target 73038; HLA-C*05:01; PROKR1; ENSG00000169618; CTA
VGPVVTMTL

SEQ ID NO: 73039 - protein, 9 aa, Homo sapiens
  misc_feature: Table A; Target 73039; HLA-C*14:02; PROKR1; ENSG00000169618; CTA
VGPVVTMTL

SEQ ID NO: 73040 - protein, 8 aa, Homo sapiens
  misc_feature: Table A; Target 73040; HLA-B*15:03; PROKR1; ENSG00000169618; CTA
VKNDTVKY

SEQ ID NO: 73041 - protein, 9 aa, Homo sapiens
  misc_feature: Table A; Target 73041; HLA-A*03:01; PROKR1; ENSG00000169618; CTA
VLMCILTAY

SEQ ID NO: 73042 - protein, 9 aa, Homo sapiens
  misc_feature: Table A; Target 73042; HLA-A*29:02; PROKR1; ENSG00000169618; CTA
VLMCILTAY

SEQ ID NO: 73043 - protein, 9 aa, Homo sapiens
  misc_feature: Table A; Target 73043; HLA-A*30:02; PROKR1; ENSG00000169618; CTA
VLMCILTAY

SEQ ID NO: 73044 - protein, 9 aa, Homo sapiens
  misc_feature: Table A; Target 73044; HLA-B*15:01; PROKR1; ENSG00000169618; CTA
VLMCILTAY

SEQ ID NO: 73045 - protein, 9 aa, Homo sapiens
  misc_feature: Table A; Target 73045; HLA-B*15:03; PROKR1; ENSG00000169618; CTA
VLMCILTAY

SEQ ID NO: 73046 - protein, 9 aa, Homo sapiens
  misc_feature: Table A; Target 73046; HLA-B*46:01; PROKR1; ENSG00000169618; CTA
VLMCILTAY

SEQ ID NO: 73047 - protein, 9 aa, Homo sapiens
  misc_feature: Table A; Target 73047; HLA-A*02:03; PROKR1; ENSG00000169618; CTA
VLNPHGAHA

SEQ ID NO: 73048 - protein, 9 aa, Homo sapiens
  misc_feature: Table A; Target 73048; HLA-A*32:01; PROKR1; ENSG00000169618; CTA
VLNPHGAHA

SEQ ID NO: 73049 - protein, 9 aa, Homo sapiens
  misc_feature: Table A; Target 73049; HLA-B*08:01; PROKR1; ENSG00000169618; CTA
VNYLRTVSL

SEQ ID NO: 73050 - protein, 9 aa, Homo sapiens
  misc_feature: Table A; Target 73050; HLA-B*37:01; PROKR1; ENSG00000169618; CTA
VNYLRTVSL

SEQ ID NO: 73051 - protein, 9 aa, Homo sapiens
  misc_feature: Table A; Target 73051; HLA-B*40:02; PROKR1; ENSG00000169618; CTA
VNYLRTVSL

SEQ ID NO: 73052 - protein, 9 aa, Homo sapiens
  misc_feature: Table A; Target 73052; HLA-B*51:01; PROKR1; ENSG00000169618; CTA
VNYLRTVSL

SEQ ID NO: 73053 - protein, 9 aa, Homo sapiens
  misc_feature: Table A; Target 73053; HLA-C*01:02; PROKR1; ENSG00000169618; CTA
VNYLRTVSL

SEQ ID NO: 73054 - protein, 9 aa, Homo sapiens
  misc_feature: Table A; Target 73054; HLA-C*03:04; PROKR1; ENSG00000169618; CTA
VNYLRTVSL

SEQ ID NO: 73055 - protein, 9 aa, Homo sapiens
  misc_feature: Table A; Target 73055; HLA-C*12:03; PROKR1; ENSG00000169618; CTA
VNYLRTVSL

SEQ ID NO: 73056 - protein, 9 aa, Homo sapiens
  misc_feature: Table A; Target 73056; HLA-C*14:02; PROKR1; ENSG00000169618; CTA
VNYLRTVSL

SEQ ID NO: 73057 - protein, 9 aa, Homo sapiens
  misc_feature: Table A; Target 73057; HLA-C*16:01; PROKR1; ENSG00000169618; CTA
VNYLRTVSL

SEQ ID NO: 73058 - protein, 9 aa, Homo sapiens
  misc_feature: Table A; Target 73058; HLA-B*51:01; PROKR1; ENSG00000169618; CTA
VPGFQTEQI

SEQ ID NO: 73059 - protein, 11 aa, Homo sapiens
  misc_feature: Table A; Target 73059; HLA-A*30:02; PROKR1; ENSG00000169618; CTA
VSILIAIPSAY

SEQ ID NO: 73060 - protein, 9 aa, Homo sapiens
  misc_feature: Table A; Target 73060; HLA-B*13:02; PROKR1; ENSG00000169618; CTA
VSTNALLAI

SEQ ID NO: 73061 - protein, 8 aa, Homo sapiens
  misc_feature: Table A; Target 73061; HLA-A*32:01; PROKR1; ENSG00000169618; CTA
VTNSRTFF

SEQ ID NO: 73062 - protein, 9 aa, Homo sapiens
  misc_feature: Table A; Target 73062; HLA-A*11:01; PROKR1; ENSG00000169618; CTA
VTVKNDTVK

SEQ ID NO: 73063 - protein, 10 aa, Homo sapiens
  misc_feature: Table A; Target 73063; HLA-A*01:01; PROKR1; ENSG00000169618; CTA
VTVKNDTVKY

SEQ ID NO: 73064 - protein, 10 aa, Homo sapiens
  misc_feature: Table A; Target 73064; HLA-A*26:01; PROKR1; ENSG00000169618; CTA
VTVKNDTVKY

SEQ ID NO: 73065 - protein, 10 aa, Homo sapiens
  misc_feature: Table A; Target 73065; HLA-A*30:02; PROKR1; ENSG00000169618; CTA
VTVKNDTVKY

SEQ ID NO: 73066 - protein, 10 aa, Homo sapiens
  misc_feature: Table A; Target 73066; HLA-B*57:01; PROKR1; ENSG00000169618; CTA
VTVKNDTVKY

SEQ ID NO: 73067 - protein, 10 aa, Homo sapiens
  misc_feature: Table A; Target 73067; HLA-B*58:01; PROKR1; ENSG00000169618; CTA
VTVKNDTVKY

SEQ ID NO: 73068 - protein, 11 aa, Homo sapiens
  misc_feature: Table A; Target 73068; HLA-B*57:01; PROKR1; ENSG00000169618; CTA
VTVKNDTVKYF

SEQ ID NO: 73069 - protein, 9 aa, Homo sapiens
  misc_feature: Table A; Target 73069; HLA-A*29:02; PROKR1; ENSG00000169618; CTA
WPVDQQLYY

SEQ ID NO: 73070 - protein, 9 aa, Homo sapiens
  misc_feature: Table A; Target 73070; HLA-B*35:01; PROKR1; ENSG00000169618; CTA
WPVDQQLYY

SEQ ID NO: 73071 - protein, 9 aa, Homo sapiens
  misc_feature: Table A; Target 73071; HLA-A*68:02; PROKR1; ENSG00000169618; CTA
WTVSILIAI

SEQ ID NO: 73072 - protein, 8 aa, Homo sapiens
  misc_feature: Table A; Target 73072; HLA-B*08:01; PROKR1; ENSG00000169618; CTA
YARISREL

SEQ ID NO: 73073 - protein, 8 aa, Homo sapiens
  misc_feature: Table A; Target 73073; HLA-C*03:04; PROKR1; ENSG00000169618; CTA
YARISREL

SEQ ID NO: 73074 - protein, 9 aa, Homo sapiens
  misc_feature: Table A; Target 73074; HLA-B*57:01; PROKR1; ENSG00000169618; CTA
YARISRELW

SEQ ID NO: 73075 - protein, 10 aa, Homo sapiens
  misc_feature: Table A; Target 73075; HLA-A*29:02; PROKR1; ENSG00000169618; CTA
YFLFIFGIEF

SEQ ID NO: 73076 - protein, 8 aa, Homo sapiens
  misc_feature: Table A; Target 73076; HLA-C*14:02; PROKR1; ENSG00000169618; CTA
YFTTETVL

SEQ ID NO: 73077 - protein, 9 aa, Homo sapiens
  misc_feature: Table A; Target 73077; HLA-C*02:02; PROKR1; ENSG00000169618; CTA
YGFTIVRDF

SEQ ID NO: 73078 - protein, 8 aa, Homo sapiens
  misc_feature: Table A; Target 73078; HLA-C*03:03; PROKR1; ENSG00000169618; CTA
YIVECIAM

SEQ ID NO: 73079 - protein, 8 aa, Homo sapiens
  misc_feature: Table A; Target 73079; HLA-C*03:04; PROKR1; ENSG00000169618; CTA
YIVECIAM

SEQ ID NO: 73080 - protein, 8 aa, Homo sapiens
  misc_feature: Table A; Target 73080; HLA-A*02:03; PROKR1; ENSG00000169618; CTA
YLAIVHPL

SEQ ID NO: 73081 - protein, 8 aa, Homo sapiens
  misc_feature: Table A; Target 73081; HLA-A*02:04; PROKR1; ENSG00000169618; CTA
YLAIVHPL

SEQ ID NO: 73082 - protein, 8 aa, Homo sapiens
  misc_feature: Table A; Target 73082; HLA-B*08:01; PROKR1; ENSG00000169618; CTA
YLAIVHPL

SEQ ID NO: 73083 - protein, 8 aa, Homo sapiens
  misc_feature: Table A; Target 73083; HLA-B*37:01; PROKR1; ENSG00000169618; CTA
YLAIVHPL

SEQ ID NO: 73084 - protein, 8 aa, Homo sapiens
  misc_feature: Table A; Target 73084; HLA-B*46:01; PROKR1; ENSG00000169618; CTA
YLRTVSLY

SEQ ID NO: 73085 - protein, 9 aa, Homo sapiens
  misc_feature: Table A; Target 73085; HLA-A*02:03; PROKR1; ENSG00000169618; CTA
YLRTVSLYV

SEQ ID NO: 73086 - protein, 9 aa, Homo sapiens
  misc_feature: Table A; Target 73086; HLA-A*02:07; PROKR1; ENSG00000169618; CTA
YLRTVSLYV

SEQ ID NO: 73087 - protein, 9 aa, Homo sapiens
  misc_feature: Table A; Target 73087; HLA-A*29:02; PROKR1; ENSG00000169618; CTA
YVLCWAPFY

SEQ ID NO: 73088 - protein, 8 aa, Homo sapiens
  misc_feature: Table A; Target 73088; HLA-C*03:03; PROKR1; ENSG00000169618; CTA
YVSTNALL

SEQ ID NO: 73089 - protein, 8 aa, Homo sapiens
  misc_feature: Table A; Target 73089; HLA-C*05:01; PROKR1; ENSG00000169618; CTA
YVSTNALL

SEQ ID NO: 73090 - protein, 9 aa, Homo sapiens
  misc_feature: Table A; Target 73090; HLA-A*24:02; PROKR1; ENSG00000169618; CTA
YYKSYFLFI

SEQ ID NO: 73091 - protein, 9 aa, Homo sapiens
  misc_feature: Table A; Target 73091; HLA-A*23:01; PROKR1; ENSG00000169618; CTA
YYVVRQLSW

SEQ ID NO: 73092 - protein, 9 aa, Homo sapiens
  misc_feature: Table A; Target 73092; HLA-A*24:02; PROKR1; ENSG00000169618; CTA
YYVVRQLSW

SEQ ID NO: 73093 - protein, 9 aa, Homo sapiens
  misc_feature: Table A; Target 73093; HLA-B*57:01; R3HDML; ENSG00000101074; CTA
AANMEYMVW

SEQ ID NO: 73094 - protein, 8 aa, Homo sapiens
  misc_feature: Table A; Target 73094; HLA-B*15:01; R3HDML; ENSG00000101074; CTA
AAYLVCNY

SEQ ID NO: 73095 - protein, 8 aa, Homo sapiens
  misc_feature: Table A; Target 73095; HLA-B*15:03; R3HDML; ENSG00000101074; CTA
AAYLVCNY

SEQ ID NO: 73096 - protein, 8 aa, Homo sapiens
  misc_feature: Table A; Target 73096; HLA-B*18:01; R3HDML; ENSG00000101074; CTA
AAYLVCNY

SEQ ID NO: 73097 - protein, 8 aa, Homo sapiens
  misc_feature: Table A; Target 73097; HLA-B*37:01; R3HDML; ENSG00000101074; CTA
AAYLVCNY

SEQ ID NO: 73098 - protein, 8 aa, Homo sapiens
  misc_feature: Table A; Target 73098; HLA-B*46:01; R3HDML; ENSG00000101074; CTA
AAYLVCNY

SEQ ID NO: 73099 - protein, 8 aa, Homo sapiens
  misc_feature: Table A; Target 73099; HLA-C*02:02; R3HDML; ENSG00000101074; CTA
AAYLVCNY

SEQ ID NO: 73100 - protein, 8 aa, Homo sapiens
  misc_feature: Table A; Target 73100; HLA-C*07:01; R3HDML; ENSG00000101074; CTA
AAYLVCNY

SEQ ID NO: 73101 - protein, 8 aa, Homo sapiens
  misc_feature: Table A; Target 73101; HLA-C*12:03; R3HDML; ENSG00000101074; CTA
AAYLVCNY

SEQ ID NO: 73102 - protein, 8 aa, Homo sapiens
  misc_feature: Table A; Target 73102; HLA-C*16:01; R3HDML; ENSG00000101074; CTA
AAYLVCNY

SEQ ID NO: 73103 - protein, 8 aa, Homo sapiens
  misc_feature: Table A; Target 73103; HLA-C*16:02; R3HDML; ENSG00000101074; CTA
AAYLVCNY

SEQ ID NO: 73104 - protein, 8 aa, Homo sapiens
  misc_feature: Table A; Target 73104; HLA-C*16:04; R3HDML; ENSG00000101074; CTA
AAYLVCNY

SEQ ID NO: 73105 - protein, 9 aa, Homo sapiens
  misc_feature: Table A; Target 73105; HLA-B*54:01; R3HDML; ENSG00000101074; CTA
AAYLVCNYA

SEQ ID NO: 73106 - protein, 9 aa, Homo sapiens
  misc_feature: Table A; Target 73106; HLA-A*30:01; R3HDML; ENSG00000101074; CTA
AEAWATQCI

SEQ ID NO: 73107 - protein, 9 aa, Homo sapiens
  misc_feature: Table A; Target 73107; HLA-B*13:02; R3HDML; ENSG00000101074; CTA
AEAWATQCI

SEQ ID NO: 73108 - protein, 9 aa, Homo sapiens
  misc_feature: Table A; Target 73108; HLA-B*27:02; R3HDML; ENSG00000101074; CTA
AEAWATQCI

SEQ ID NO: 73109 - protein, 9 aa, Homo sapiens
  misc_feature: Table A; Target 73109; HLA-B*37:01; R3HDML; ENSG00000101074; CTA
AEAWATQCI

SEQ ID NO: 73110 - protein, 9 aa, Homo sapiens
  misc_feature: Table A; Target 73110; HLA-B*40:01; R3HDML; ENSG00000101074; CTA
AEAWATQCI

SEQ ID NO: 73111 - protein, 9 aa, Homo sapiens
  misc_feature: Table A; Target 73111; HLA-B*40:02; R3HDML; ENSG00000101074; CTA
AEAWATQCI

SEQ ID NO: 73112 - protein, 9 aa, Homo sapiens
  misc_feature: Table A; Target 73112; HLA-B*44:02; R3HDML; ENSG00000101074; CTA
AEAWATQCI

SEQ ID NO: 73113 - protein, 9 aa, Homo sapiens
  misc_feature: Table A; Target 73113; HLA-B*44:03; R3HDML; ENSG00000101074; CTA
AEAWATQCI

SEQ ID NO: 73114 - protein, 9 aa, Homo sapiens
  misc_feature: Table A; Target 73114; HLA-B*49:01; R3HDML; ENSG00000101074; CTA
AEAWATQCI

SEQ ID NO: 73115 - protein, 9 aa, Homo sapiens
  misc_feature: Table A; Target 73115; HLA-C*16:04; R3HDML; ENSG00000101074; CTA
AEAWATQCI

SEQ ID NO: 73116 - protein, 10 aa, Homo sapiens
  misc_feature: Table A; Target 73116; HLA-B*44:02; R3HDML; ENSG00000101074; CTA
AEAWATQCIW

SEQ ID NO: 73117 - protein, 10 aa, Homo sapiens
  misc_feature: Table A; Target 73117; HLA-B*44:03; R3HDML; ENSG00000101074; CTA
AEAWATQCIW

SEQ ID NO: 73118 - protein, 8 aa, Homo sapiens
  misc_feature: Table A; Target 73118; HLA-B*27:05; R3HDML; ENSG00000101074; CTA
AHGPSQLM

SEQ ID NO: 73119 - protein, 8 aa, Homo sapiens
  misc_feature: Table A; Target 73119; HLA-B*38:01; R3HDML; ENSG00000101074; CTA
AHGPSQLM

SEQ ID NO: 73120 - protein, 8 aa, Homo sapiens
  misc_feature: Table A; Target 73120; HLA-B*39:01; R3HDML; ENSG00000101074; CTA
AHGPSQLM

SEQ ID NO: 73121 - protein, 10 aa, Homo sapiens
  misc_feature: Table A; Target 73121; HLA-A*30:02; R3HDML; ENSG00000101074; CTA
AHGPSQLMRY

SEQ ID NO: 73122 - protein, 9 aa, Homo sapiens
  misc_feature: Table A; Target 73122; HLA-A*02:01; R3HDML; ENSG00000101074; CTA
ALLDYHNHI

SEQ ID NO: 73123 - protein, 9 aa, Homo sapiens
  misc_feature: Table A; Target 73123; HLA-A*02:04; R3HDML; ENSG00000101074; CTA
ALLDYHNHI

SEQ ID NO: 73124 - protein, 9 aa, Homo sapiens
  misc_feature: Table A; Target 73124; HLA-A*02:07; R3HDML; ENSG00000101074; CTA
ALLDYHNHI

SEQ ID NO: 73125 - protein, 9 aa, Homo sapiens
  misc_feature: Table A; Target 73125; HLA-B*13:02; R3HDML; ENSG00000101074; CTA
ALLDYHNHI

SEQ ID NO: 73126 - protein, 9 aa, Homo sapiens
  misc_feature: Table A; Target 73126; HLA-B*07:02; R3HDML; ENSG00000101074; CTA
APAQPESTA

SEQ ID NO: 73127 - protein, 9 aa, Homo sapiens
  misc_feature: Table A; Target 73127; HLA-B*54:01; R3HDML; ENSG00000101074; CTA
APAQPESTA

SEQ ID NO: 73128 - protein, 9 aa, Homo sapiens
  misc_feature: Table A; Target 73128; HLA-B*55:01; R3HDML; ENSG00000101074; CTA
APAQPESTA

SEQ ID NO: 73129 - protein, 9 aa, Homo sapiens
  misc_feature: Table A; Target 73129; HLA-B*56:01; R3HDML; ENSG00000101074; CTA
APAQPESTA

SEQ ID NO: 73130 - protein, 10 aa, Homo sapiens
  misc_feature: Table A; Target 73130; HLA-B*07:02; R3HDML; ENSG00000101074; CTA
APAQPESTAM

SEQ ID NO: 73131 - protein, 10 aa, Homo sapiens
  misc_feature: Table A; Target 73131; HLA-B*35:01; R3HDML; ENSG00000101074; CTA
APAQPESTAM

SEQ ID NO: 73132 - protein, 10 aa, Homo sapiens
  misc_feature: Table A; Target 73132; HLA-B*35:03; R3HDML; ENSG00000101074; CTA
APAQPESTAM

SEQ ID NO: 73133 - protein, 10 aa, Homo sapiens
  misc_feature: Table A; Target 73133; HLA-B*55:01; R3HDML; ENSG00000101074; CTA
APAQPESTAM

SEQ ID NO: 73134 - protein, 10 aa, Homo sapiens
  misc_feature: Table A; Target 73134; HLA-B*56:01; R3HDML; ENSG00000101074; CTA
APAQPESTAM

SEQ ID NO: 73135 - protein, 10 aa, Homo sapiens
  misc_feature: Table A; Target 73135; HLA-C*03:03; R3HDML; ENSG00000101074; CTA
APAQPESTAM

SEQ ID NO: 73136 - protein, 10 aa, Homo sapiens
  misc_feature: Table A; Target 73136; HLA-C*07:02; R3HDML; ENSG00000101074; CTA
APAQPESTAM

SEQ ID NO: 73137 - protein, 11 aa, Homo sapiens
  misc_feature: Table A; Target 73137; HLA-A*68:01; R3HDML; ENSG00000101074; CTA
APAQPESTAMR

SEQ ID NO: 73138 - protein, 11 aa, Homo sapiens
  misc_feature: Table A; Target 73138; HLA-C*07:06; R3HDML; ENSG00000101074; CTA
APAQPESTAMR

SEQ ID NO: 73139 - protein, 8 aa, Homo sapiens
  misc_feature: Table A; Target 73139; HLA-C*01:02; R3HDML; ENSG00000101074; CTA
AQPESTAM

SEQ ID NO: 73140 - protein, 8 aa, Homo sapiens
  misc_feature: Table A; Target 73140; HLA-C*05:01; R3HDML; ENSG00000101074; CTA
AQPESTAM

SEQ ID NO: 73141 - protein, 9 aa, Homo sapiens
  misc_feature: Table A; Target 73141; HLA-A*23:01; R3HDML; ENSG00000101074; CTA
AYLVCNYAI

SEQ ID NO: 73142 - protein, 9 aa, Homo sapiens
  misc_feature: Table A; Target 73142; HLA-A*24:02; R3HDML; ENSG00000101074; CTA
AYLVCNYAI

SEQ ID NO: 73143 - protein, 9 aa, Homo sapiens
  misc_feature: Table A; Target 73143; HLA-C*07:01; R3HDML; ENSG00000101074; CTA
CDGPTCSHY

SEQ ID NO: 73144 - protein, 9 aa, Homo sapiens
  misc_feature: Table A; Target 73144; HLA-B*57:01; R3HDML; ENSG00000101074; CTA
CSHYTQMVW

SEQ ID NO: 73145 - protein, 8 aa, Homo sapiens
  misc_feature: Table A; Target 73145; HLA-B*51:01; R3HDML; ENSG00000101074; CTA
EAWATQCI

SEQ ID NO: 73146 - protein, 9 aa, Homo sapiens
  misc_feature: Table A; Target 73146; HLA-B*57:01; R3HDML; ENSG00000101074; CTA
EAWATQCIW

SEQ ID NO: 73147 - protein, 9 aa, Homo sapiens
  misc_feature: Table A; Target 73147; HLA-A*24:02; R3HDML; ENSG00000101074; CTA
EYMVWDKRL

SEQ ID NO: 73148 - protein, 9 aa, Homo sapiens
  misc_feature: Table A; Target 73148; HLA-B*55:01; R3HDML; ENSG00000101074; CTA
FPAPRDCNP

SEQ ID NO: 73149 - protein, 9 aa, Homo sapiens
  misc_feature: Table A; Target 73149; HLA-A*02:04; R3HDML; ENSG00000101074; CTA
GLLFWAGQA

SEQ ID NO: 73150 - protein, 10 aa, Homo sapiens
  misc_feature: Table A; Target 73150; HLA-A*02:04; R3HDML; ENSG00000101074; CTA
GLLFWAGQAV

SEQ ID NO: 73151 - protein, 9 aa, Homo sapiens
  misc_feature: Table A; Target 73151; HLA-A*29:02; R3HDML; ENSG00000101074; CTA
GNWIGESPY

SEQ ID NO: 73152 - protein, 9 aa, Homo sapiens
  misc_feature: Table A; Target 73152; HLA-B*56:01; R3HDML; ENSG00000101074; CTA
GPSQLMRYV

SEQ ID NO: 73153 - protein, 8 aa, Homo sapiens
  misc_feature: Table A; Target 73153; HLA-B*13:02; R3HDML; ENSG00000101074; CTA
GQAVNALI

SEQ ID NO: 73154 - protein, 9 aa, Homo sapiens
  misc_feature: Table A; Target 73154; HLA-B*13:02; R3HDML; ENSG00000101074; CTA
GQAVNALIM

SEQ ID NO: 73155 - protein, 9 aa, Homo sapiens
  misc_feature: Table A; Target 73155; HLA-B*15:01; R3HDML; ENSG00000101074; CTA
GQAVNALIM

SEQ ID NO: 73156 - protein, 9 aa, Homo sapiens
  misc_feature: Table A; Target 73156; HLA-B*15:03; R3HDML; ENSG00000101074; CTA
GQAVNALIM

SEQ ID NO: 73157 - protein, 9 aa, Homo sapiens
  misc_feature: Table A; Target 73157; HLA-B*27:05; R3HDML; ENSG00000101074; CTA
GQAVNALIM

SEQ ID NO: 73158 - protein, 9 aa, Homo sapiens
  misc_feature: Table A; Target 73158; HLA-C*07:04; R3HDML; ENSG00000101074; CTA
GQAVNALIM

SEQ ID NO: 73159 - protein, 9 aa, Homo sapiens
  misc_feature: Table A; Target 73159; HLA-C*12:03; R3HDML; ENSG00000101074; CTA
GQAVNALIM

SEQ ID NO: 73160 - protein, 9 aa, Homo sapiens
  misc_feature: Table A; Target 73160; HLA-C*16:04; R3HDML; ENSG00000101074; CTA
GQAVNALIM

SEQ ID NO: 73161 - protein, 9 aa, Homo sapiens
  misc_feature: Table A; Target 73161; HLA-A*32:01; R3HDML; ENSG00000101074; CTA
GQNLSIHSG

SEQ ID NO: 73162 - protein, 9 aa, Homo sapiens
  misc_feature: Table A; Target 73162; HLA-B*13:02; R3HDML; ENSG00000101074; CTA
GQNLSIHSG

SEQ ID NO: 73163 - protein, 9 aa, Homo sapiens
  misc_feature: Table A; Target 73163; HLA-B*15:01; R3HDML; ENSG00000101074; CTA
GQNLSIHSG

SEQ ID NO: 73164 - protein, 11 aa, Homo sapiens
  misc_feature: Table A; Target 73164; HLA-A*29:02; R3HDML; ENSG00000101074; CTA
GQNLSIHSGQY

SEQ ID NO: 73165 - protein, 11 aa, Homo sapiens
  misc_feature: Table A; Target 73165; HLA-A*30:02; R3HDML; ENSG00000101074; CTA
GQNLSIHSGQY

SEQ ID NO: 73166 - protein, 11 aa, Homo sapiens
  misc_feature: Table A; Target 73166; HLA-A*32:01; R3HDML; ENSG00000101074; CTA
GQNLSIHSGQY

SEQ ID NO: 73167 - protein, 11 aa, Homo sapiens
  misc_feature: Table A; Target 73167; HLA-B*15:03; R3HDML; ENSG00000101074; CTA
GQNLSIHSGQY

SEQ ID NO: 73168 - protein, 11 aa, Homo sapiens
  misc_feature: Table A; Target 73168; HLA-B*27:02; R3HDML; ENSG00000101074; CTA
GQNLSIHSGQY

SEQ ID NO: 73169 - protein, 11 aa, Homo sapiens
  misc_feature: Table A; Target 73169; HLA-B*27:05; R3HDML; ENSG00000101074; CTA
GQNLSIHSGQY

SEQ ID NO: 73170 - protein, 11 aa, Homo sapiens
  misc_feature: Table A; Target 73170; HLA-B*44:03; R3HDML; ENSG00000101074; CTA
GQNLSIHSGQY

SEQ ID NO: 73171 - protein, 11 aa, Homo sapiens
  misc_feature: Table A; Target 73171; HLA-C*04:01; R3HDML; ENSG00000101074; CTA
GQNLSIHSGQY

SEQ ID NO: 73172 - protein, 11 aa, Homo sapiens
  misc_feature: Table A; Target 73172; HLA-C*07:04; R3HDML; ENSG00000101074; CTA
GQNLSIHSGQY

SEQ ID NO: 73173 - protein, 11 aa, Homo sapiens
  misc_feature: Table A; Target 73173; HLA-C*16:04; R3HDML; ENSG00000101074; CTA
GQNLSIHSGQY

SEQ ID NO: 73174 - protein, 9 aa, Homo sapiens
  misc_feature: Table A; Target 73174; HLA-A*30:01; R3HDML; ENSG00000101074; CTA
GQYRSVVDL

SEQ ID NO: 73175 - protein, 9 aa, Homo sapiens
  misc_feature: Table A; Target 73175; HLA-B*13:02; R3HDML; ENSG00000101074; CTA
GQYRSVVDL

SEQ ID NO: 73176 - protein, 9 aa, Homo sapiens
  misc_feature: Table A; Target 73176; HLA-B*15:03; R3HDML; ENSG00000101074; CTA
GQYRSVVDL

SEQ ID NO: 73177 - protein, 9 aa, Homo sapiens
  misc_feature: Table A; Target 73177; HLA-B*27:05; R3HDML; ENSG00000101074; CTA
GQYRSVVDL

SEQ ID NO: 73178 - protein, 9 aa, Homo sapiens
  misc_feature: Table A; Target 73178; HLA-B*39:01; R3HDML; ENSG00000101074; CTA
GQYRSVVDL

SEQ ID NO: 73179 - protein, 9 aa, Homo sapiens
  misc_feature: Table A; Target 73179; HLA-B*40:01; R3HDML; ENSG00000101074; CTA
GQYRSVVDL

SEQ ID NO: 73180 - protein, 9 aa, Homo sapiens
  misc_feature: Table A; Target 73180; HLA-B*40:02; R3HDML; ENSG00000101074; CTA
GQYRSVVDL

SEQ ID NO: 73181 - protein, 9 aa, Homo sapiens
  misc_feature: Table A; Target 73181; HLA-C*07:04; R3HDML; ENSG00000101074; CTA
GQYRSVVDL

SEQ ID NO: 73182 - protein, 9 aa, Homo sapiens
  misc_feature: Table A; Target 73182; HLA-C*12:03; R3HDML; ENSG00000101074; CTA
GQYRSVVDL

SEQ ID NO: 73183 - protein, 10 aa, Homo sapiens
  misc_feature: Table A; Target 73183; HLA-B*15:03; R3HDML; ENSG00000101074; CTA
GQYRSVVDLM

SEQ ID NO: 73184 - protein, 10 aa, Homo sapiens
  misc_feature: Table A; Target 73184; HLA-B*54:01; R3HDML; ENSG00000101074; CTA
HIRASVYPPA

SEQ ID NO: 73185 - protein, 9 aa, Homo sapiens
  misc_feature: Table A; Target 73185; HLA-A*25:01; R3HDML; ENSG00000101074; CTA
HTCSSISVW

SEQ ID NO: 73186 - protein, 9 aa, Homo sapiens
  misc_feature: Table A; Target 73186; HLA-A*26:01; R3HDML; ENSG00000101074; CTA
HTCSSISVW

SEQ ID NO: 73187 - protein, 9 aa, Homo sapiens
  misc_feature: Table A; Target 73187; HLA-B*57:01; R3HDML; ENSG00000101074; CTA
HTCSSISVW

SEQ ID NO: 73188 - protein, 8 aa, Homo sapiens
  misc_feature: Table A; Target 73188; HLA-C*05:01; R3HDML; ENSG00000101074; CTA
IGESPYKM

SEQ ID NO: 73189 - protein, 10 aa, Homo sapiens
  misc_feature: Table A; Target 73189; HLA-A*02:01; R3HDML; ENSG00000101074; CTA
IMPNATPAPA

SEQ ID NO: 73190 - protein, 10 aa, Homo sapiens
  misc_feature: Table A; Target 73190; HLA-A*02:03; R3HDML; ENSG00000101074; CTA
IMPNATPAPA

SEQ ID NO: 73191 - protein, 9 aa, Homo sapiens
  misc_feature: Table A; Target 73191; HLA-B*40:01; R3HDML; ENSG00000101074; CTA
ISVRDMNAL

SEQ ID NO: 73192 - protein, 9 aa, Homo sapiens
  misc_feature: Table A; Target 73192; HLA-B*58:01; R3HDML; ENSG00000101074; CTA
ISVRDMNAL

SEQ ID NO: 73193 - protein, 9 aa, Homo sapiens
  misc_feature: Table A; Target 73193; HLA-C*03:03; R3HDML; ENSG00000101074; CTA
ISVRDMNAL

SEQ ID NO: 73194 - protein, 9 aa, Homo sapiens
  misc_feature: Table A; Target 73194; HLA-C*03:04; R3HDML; ENSG00000101074; CTA
ISVRDMNAL

SEQ ID NO: 73195 - protein, 10 aa, Homo sapiens
  misc_feature: Table A; Target 73195; HLA-B*58:01; R3HDML; ENSG00000101074; CTA
ISVRDMNALL

SEQ ID NO: 73196 - protein, 8 aa, Homo sapiens
  misc_feature: Table A; Target 73196; HLA-B*57:01; R3HDML; ENSG00000101074; CTA
ISVWGNTW

SEQ ID NO: 73197 - protein, 8 aa, Homo sapiens
  misc_feature: Table A; Target 73197; HLA-B*58:01; R3HDML; ENSG00000101074; CTA
ISVWGNTW

SEQ ID NO: 73198 - protein, 10 aa, Homo sapiens
  misc_feature: Table A; Target 73198; HLA-A*30:02; R3HDML; ENSG00000101074; CTA
KGNWIGESPY

SEQ ID NO: 73199 - protein, 8 aa, Homo sapiens
  misc_feature: Table A; Target 73199; HLA-B*57:01; R3HDML; ENSG00000101074; CTA
KSWSEEKW

SEQ ID NO: 73200 - protein, 8 aa, Homo sapiens
  misc_feature: Table A; Target 73200; HLA-B*57:01; R3HDML; ENSG00000101074; CTA
LARAAEAW

SEQ ID NO: 73201 - protein, 9 aa, Homo sapiens
  misc_feature: Table A; Target 73201; HLA-A*02:01; R3HDML; ENSG00000101074; CTA
LIMPNATPA

SEQ ID NO: 73202 - protein, 9 aa, Homo sapiens
  misc_feature: Table A; Target 73202; HLA-A*02:03; R3HDML; ENSG00000101074; CTA
LIMPNATPA

SEQ ID NO: 73203 - protein, 9 aa, Homo sapiens
  misc_feature: Table A; Target 73203; HLA-B*46:01; R3HDML; ENSG00000101074; CTA
LIMPNATPA

SEQ ID NO: 73204 - protein, 9 aa, Homo sapiens
  misc_feature: Table A; Target 73204; HLA-B*54:01; R3HDML; ENSG00000101074; CTA
LIMPNATPA

SEQ ID NO: 73205 - protein, 9 aa, Homo sapiens
  misc_feature: Table A; Target 73205; HLA-C*03:03; R3HDML; ENSG00000101074; CTA
LIMPNATPA

SEQ ID NO: 73206 - protein, 11 aa, Homo sapiens
  misc_feature: Table A; Target 73206; HLA-A*02:01; R3HDML; ENSG00000101074; CTA
LIMPNATPAPA

SEQ ID NO: 73207 - protein, 9 aa, Homo sapiens
  misc_feature: Table A; Target 73207; HLA-A*02:01; R3HDML; ENSG00000101074; CTA
LLFWAGQAV

SEQ ID NO: 73208 - protein, 9 aa, Homo sapiens
  misc_feature: Table A; Target 73208; HLA-A*02:03; R3HDML; ENSG00000101074; CTA
LLFWAGQAV

SEQ ID NO: 73209 - protein, 9 aa, Homo sapiens
  misc_feature: Table A; Target 73209; HLA-A*02:04; R3HDML; ENSG00000101074; CTA
LLFWAGQAV

SEQ ID NO: 73210 - protein, 9 aa, Homo sapiens
  misc_feature: Table A; Target 73210; HLA-A*02:07; R3HDML; ENSG00000101074; CTA
LLFWAGQAV

SEQ ID NO: 73211 - protein, 9 aa, Homo sapiens
  misc_feature: Table A; Target 73211; HLA-B*13:02; R3HDML; ENSG00000101074; CTA
LLFWAGQAV

SEQ ID NO: 73212 - protein, 8 aa, Homo sapiens
  misc_feature: Table A; Target 73212; HLA-A*02:07; R3HDML; ENSG00000101074; CTA
LLPSTVGL

SEQ ID NO: 73213 - protein, 9 aa, Homo sapiens
  misc_feature: Table A; Target 73213; HLA-A*02:03; R3HDML; ENSG00000101074; CTA
LLPSTVGLA

SEQ ID NO: 73214 - protein, 9 aa, Homo sapiens
  misc_feature: Table A; Target 73214; HLA-A*02:07; R3HDML; ENSG00000101074; CTA
LLPSTVGLA

SEQ ID NO: 73215 - protein, 11 aa, Homo sapiens
  misc_feature: Table A; Target 73215; HLA-A*02:07; R3HDML; ENSG00000101074; CTA
LLPSTVGLAGL

SEQ ID NO: 73216 - protein, 10 aa, Homo sapiens
  misc_feature: Table A; Target 73216; HLA-A*01:01; R3HDML; ENSG00000101074; CTA
LLSGLEVPRY

SEQ ID NO: 73217 - protein, 10 aa, Homo sapiens
  misc_feature: Table A; Target 73217; HLA-A*29:02; R3HDML; ENSG00000101074; CTA
LLSGLEVPRY

SEQ ID NO: 73218 - protein, 10 aa, Homo sapiens
  misc_feature: Table A; Target 73218; HLA-A*30:02; R3HDML; ENSG00000101074; CTA
LLSGLEVPRY

SEQ ID NO: 73219 - protein, 9 aa, Homo sapiens
  misc_feature: Table A; Target 73219; HLA-B*56:01; R3HDML; ENSG00000101074; CTA
LPSTVGLAG

SEQ ID NO: 73220 - protein, 10 aa, Homo sapiens
  misc_feature: Table A; Target 73220; HLA-B*35:03; R3HDML; ENSG00000101074; CTA
LPSTVGLAGL

SEQ ID NO: 73221 - protein, 9 aa, Homo sapiens
  misc_feature: Table A; Target 73221; HLA-A*01:01; R3HDML; ENSG00000101074; CTA
LSGLEVPRY

SEQ ID NO: 73222 - protein, 9 aa, Homo sapiens
  misc_feature: Table A; Target 73222; HLA-A*30:02; R3HDML; ENSG00000101074; CTA
LSGLEVPRY

SEQ ID NO: 73223 - protein, 9 aa, Homo sapiens
  misc_feature: Table A; Target 73223; HLA-B*57:01; R3HDML; ENSG00000101074; CTA
LSGLEVPRY

SEQ ID NO: 73224 - protein, 9 aa, Homo sapiens
  misc_feature: Table A; Target 73224; HLA-B*58:01; R3HDML; ENSG00000101074; CTA
LSGLEVPRY

SEQ ID NO: 73225 - protein, 9 aa, Homo sapiens
  misc_feature: Table A; Target 73225; HLA-C*07:01; R3HDML; ENSG00000101074; CTA
LSGLEVPRY

SEQ ID NO: 73226 - protein, 9 aa, Homo sapiens
  misc_feature: Table A; Target 73226; HLA-C*12:03; R3HDML; ENSG00000101074; CTA
LSGLEVPRY

SEQ ID NO: 73227 - protein, 9 aa, Homo sapiens
  misc_feature: Table A; Target 73227; HLA-C*16:01; R3HDML; ENSG00000101074; CTA
LSGLEVPRY

SEQ ID NO: 73228 - protein, 8 aa, Homo sapiens
  misc_feature: Table A; Target 73228; HLA-A*30:02; R3HDML; ENSG00000101074; CTA
LSIHSGQY

SEQ ID NO: 73229 - protein, 8 aa, Homo sapiens
  misc_feature: Table A; Target 73229; HLA-B*15:01; R3HDML; ENSG00000101074; CTA
LSIHSGQY

SEQ ID NO: 73230 - protein, 8 aa, Homo sapiens
  misc_feature: Table A; Target 73230; HLA-B*39:01; R3HDML; ENSG00000101074; CTA
LSIHSGQY

SEQ ID NO: 73231 - protein, 8 aa, Homo sapiens
  misc_feature: Table A; Target 73231; HLA-B*46:01; R3HDML; ENSG00000101074; CTA
LSIHSGQY

SEQ ID NO: 73232 - protein, 8 aa, Homo sapiens
  misc_feature: Table A; Target 73232; HLA-B*58:01; R3HDML; ENSG00000101074; CTA
LSIHSGQY

SEQ ID NO: 73233 - protein, 9 aa, Homo sapiens
  misc_feature: Table A; Target 73233; HLA-A*31:01; R3HDML; ENSG00000101074; CTA
LSIHSGQYR

SEQ ID NO: 73234 - protein, 9 aa, Homo sapiens
  misc_feature: Table A; Target 73234; HLA-A*33:01; R3HDML; ENSG00000101074; CTA
LSIHSGQYR

SEQ ID NO: 73235 - protein, 9 aa, Homo sapiens
  misc_feature: Table A; Target 73235; HLA-A*33:03; R3HDML; ENSG00000101074; CTA
LSIHSGQYR

SEQ ID NO: 73236 - protein, 9 aa, Homo sapiens
  misc_feature: Table A; Target 73236; HLA-B*57:01; R3HDML; ENSG00000101074; CTA
LSIHSGQYR

SEQ ID NO: 73237 - protein, 8 aa, Homo sapiens
  misc_feature: Table A; Target 73237; HLA-B*08:01; R3HDML; ENSG00000101074; CTA
MPLLPSTV

SEQ ID NO: 73238 - protein, 8 aa, Homo sapiens
  misc_feature: Table A; Target 73238; HLA-B*51:01; R3HDML; ENSG00000101074; CTA
MPLLPSTV

SEQ ID NO: 73239 - protein, 8 aa, Homo sapiens
  misc_feature: Table A; Target 73239; HLA-B*54:01; R3HDML; ENSG00000101074; CTA
MPLLPSTV

SEQ ID NO: 73240 - protein, 8 aa, Homo sapiens
  misc_feature: Table A; Target 73240; HLA-B*56:01; R3HDML; ENSG00000101074; CTA
MPLLPSTV

SEQ ID NO: 73241 - protein, 9 aa, Homo sapiens
  misc_feature: Table A; Target 73241; HLA-B*54:01; R3HDML; ENSG00000101074; CTA
MPLLPSTVG

SEQ ID NO: 73242 - protein, 9 aa, Homo sapiens
  misc_feature: Table A; Target 73242; HLA-B*56:01; R3HDML; ENSG00000101074; CTA
MPLLPSTVG

SEQ ID NO: 73243 - protein, 10 aa, Homo sapiens
  misc_feature: Table A; Target 73243; HLA-B*07:02; R3HDML; ENSG00000101074; CTA
MPLLPSTVGL

SEQ ID NO: 73244 - protein, 10 aa, Homo sapiens
  misc_feature: Table A; Target 73244; HLA-B*35:01; R3HDML; ENSG00000101074; CTA
MPLLPSTVGL

SEQ ID NO: 73245 - protein, 10 aa, Homo sapiens
  misc_feature: Table A; Target 73245; HLA-B*35:03; R3HDML; ENSG00000101074; CTA
MPLLPSTVGL

SEQ ID NO: 73246 - protein, 10 aa, Homo sapiens
  misc_feature: Table A; Target 73246; HLA-B*54:01; R3HDML; ENSG00000101074; CTA
MPLLPSTVGL

SEQ ID NO: 73247 - protein, 10 aa, Homo sapiens
  misc_feature: Table A; Target 73247; HLA-B*55:01; R3HDML; ENSG00000101074; CTA
MPLLPSTVGL

SEQ ID NO: 73248 - protein, 10 aa, Homo sapiens
  misc_feature: Table A; Target 73248; HLA-B*56:01; R3HDML; ENSG00000101074; CTA
MPLLPSTVGL

SEQ ID NO: 73249 - protein, 10 aa, Homo sapiens
  misc_feature: Table A; Target 73249; HLA-C*04:01; R3HDML; ENSG00000101074; CTA
MPLLPSTVGL

SEQ ID NO: 73250 - protein, 10 aa, Homo sapiens
  misc_feature: Table A; Target 73250; HLA-C*07:02; R3HDML; ENSG00000101074; CTA
MPLLPSTVGL

SEQ ID NO: 73251 - protein, 11 aa, Homo sapiens
  misc_feature: Table A; Target 73251; HLA-B*54:01; R3HDML; ENSG00000101074; CTA
MPLLPSTVGLA

SEQ ID NO: 73252 - protein, 11 aa, Homo sapiens
  misc_feature: Table A; Target 73252; HLA-B*56:01; R3HDML; ENSG00000101074; CTA
MPLLPSTVGLA

SEQ ID NO: 73253 - protein, 8 aa, Homo sapiens
  misc_feature: Table A; Target 73253; HLA-B*54:01; R3HDML; ENSG00000101074; CTA
MPNATPAP

SEQ ID NO: 73254 - protein, 8 aa, Homo sapiens
  misc_feature: Table A; Target 73254; HLA-B*55:01; R3HDML; ENSG00000101074; CTA
MPNATPAP

SEQ ID NO: 73255 - protein, 8 aa, Homo sapiens
  misc_feature: Table A; Target 73255; HLA-B*56:01; R3HDML; ENSG00000101074; CTA
MPNATPAP

SEQ ID NO: 73256 - protein, 9 aa, Homo sapiens
  misc_feature: Table A; Target 73256; HLA-B*35:01; R3HDML; ENSG00000101074; CTA
MPNATPAPA

SEQ ID NO: 73257 - protein, 9 aa, Homo sapiens
  misc_feature: Table A; Target 73257; HLA-B*35:03; R3HDML; ENSG00000101074; CTA
MPNATPAPA

SEQ ID NO: 73258 - protein, 9 aa, Homo sapiens
  misc_feature: Table A; Target 73258; HLA-B*54:01; R3HDML; ENSG00000101074; CTA
MPNATPAPA

SEQ ID NO: 73259 - protein, 9 aa, Homo sapiens
  misc_feature: Table A; Target 73259; HLA-B*55:01; R3HDML; ENSG00000101074; CTA
MPNATPAPA

SEQ ID NO: 73260 - protein, 9 aa, Homo sapiens
  misc_feature: Table A; Target 73260; HLA-B*56:01; R3HDML; ENSG00000101074; CTA
MPNATPAPA

SEQ ID NO: 73261 - protein, 10 aa, Homo sapiens
  misc_feature: Table A; Target 73261; HLA-B*35:01; R3HDML; ENSG00000101074; CTA
MPNATPAPAQ

SEQ ID NO: 73262 - protein, 10 aa, Homo sapiens
  misc_feature: Table A; Target 73262; HLA-B*35:03; R3HDML; ENSG00000101074; CTA
MPNATPAPAQ

SEQ ID NO: 73263 - protein, 10 aa, Homo sapiens
  misc_feature: Table A; Target 73263; HLA-B*54:01; R3HDML; ENSG00000101074; CTA
MPNATPAPAQ

SEQ ID NO: 73264 - protein, 10 aa, Homo sapiens
  misc_feature: Table A; Target 73264; HLA-B*55:01; R3HDML; ENSG00000101074; CTA
MPNATPAPAQ

SEQ ID NO: 73265 - protein, 10 aa, Homo sapiens
  misc_feature: Table A; Target 73265; HLA-B*56:01; R3HDML; ENSG00000101074; CTA
MPNATPAPAQ

SEQ ID NO: 73266 - protein, 11 aa, Homo sapiens
  misc_feature: Table A; Target 73266; HLA-B*56:01; R3HDML; ENSG00000101074; CTA
MPNATPAPAQP

SEQ ID NO: 73267 - protein, 8 aa, Homo sapiens
  misc_feature: Table A; Target 73267; HLA-B*08:01; R3HDML; ENSG00000101074; CTA
MRYVGQNL

SEQ ID NO: 73268 - protein, 8 aa, Homo sapiens
  misc_feature: Table A; Target 73268; HLA-B*27:05; R3HDML; ENSG00000101074; CTA
MRYVGQNL

SEQ ID NO: 73269 - protein, 8 aa, Homo sapiens
  misc_feature: Table A; Target 73269; HLA-C*06:02; R3HDML; ENSG00000101074; CTA
MRYVGQNL

SEQ ID NO: 73270 - protein, 8 aa, Homo sapiens
  misc_feature: Table A; Target 73270; HLA-C*16:04; R3HDML; ENSG00000101074; CTA
MRYVGQNL

SEQ ID NO: 73271 - protein, 9 aa, Homo sapiens
  misc_feature: Table A; Target 73271; HLA-A*03:01; R3HDML; ENSG00000101074; CTA
MVWDKRLAR

SEQ ID NO: 73272 - protein, 9 aa, Homo sapiens
  misc_feature: Table A; Target 73272; HLA-A*31:01; R3HDML; ENSG00000101074; CTA
MVWDKRLAR

SEQ ID NO: 73273 - protein, 8 aa, Homo sapiens
  misc_feature: Table A; Target 73273; HLA-B*51:01; R3HDML; ENSG00000101074; CTA
NALIMPNA

SEQ ID NO: 73274 - protein, 8 aa, Homo sapiens
  misc_feature: Table A; Target 73274; HLA-B*54:01; R3HDML; ENSG00000101074; CTA
NALIMPNA

SEQ ID NO: 73275 - protein, 8 aa, Homo sapiens
  misc_feature: Table A; Target 73275; HLA-B*15:03; R3HDML; ENSG00000101074; CTA
NHIRASVY

SEQ ID NO: 73276 - protein, 8 aa, Homo sapiens
  misc_feature: Table A; Target 73276; HLA-B*18:01; R3HDML; ENSG00000101074; CTA
NHIRASVY

SEQ ID NO: 73277 - protein, 9 aa, Homo sapiens
  misc_feature: Table A; Target 73277; HLA-A*01:01; R3HDML; ENSG00000101074; CTA
NLSIHSGQY

SEQ ID NO: 73278 - protein, 9 aa, Homo sapiens
  misc_feature: Table A; Target 73278; HLA-A*26:01; R3HDML; ENSG00000101074; CTA
NLSIHSGQY

SEQ ID NO: 73279 - protein, 9 aa, Homo sapiens
  misc_feature: Table A; Target 73279; HLA-A*29:02; R3HDML; ENSG00000101074; CTA
NLSIHSGQY

SEQ ID NO: 73280 - protein, 9 aa, Homo sapiens
  misc_feature: Table A; Target 73280; HLA-A*30:02; R3HDML; ENSG00000101074; CTA
NLSIHSGQY

SEQ ID NO: 73281 - protein, 9 aa, Homo sapiens
  misc_feature: Table A; Target 73281; HLA-A*32:01; R3HDML; ENSG00000101074; CTA
NLSIHSGQY

SEQ ID NO: 73282 - protein, 9 aa, Homo sapiens
  misc_feature: Table A; Target 73282; HLA-B*15:01; R3HDML; ENSG00000101074; CTA
NLSIHSGQY

SEQ ID NO: 73283 - protein, 9 aa, Homo sapiens
  misc_feature: Table A; Target 73283; HLA-C*07:04; R3HDML; ENSG00000101074; CTA
NLSIHSGQY

SEQ ID NO: 73284 - protein, 9 aa, Homo sapiens
  misc_feature: Table A; Target 73284; HLA-C*16:01; R3HDML; ENSG00000101074; CTA
NLSIHSGQY

SEQ ID NO: 73285 - protein, 9 aa, Homo sapiens
  misc_feature: Table A; Target 73285; HLA-C*03:03; R3HDML; ENSG00000101074; CTA
PAQPESTAM

SEQ ID NO: 73286 - protein, 9 aa, Homo sapiens
  misc_feature: Table A; Target 73286; HLA-C*14:02; R3HDML; ENSG00000101074; CTA
PAQPESTAM

SEQ ID NO: 73287 - protein, 10 aa, Homo sapiens
  misc_feature: Table A; Target 73287; HLA-B*27:02; R3HDML; ENSG00000101074; CTA
PAQPESTAMR

SEQ ID NO: 73288 - protein, 8 aa, Homo sapiens
  misc_feature: Table A; Target 73288; HLA-B*37:01; R3HDML; ENSG00000101074; CTA
PESTAMRL

SEQ ID NO: 73289 - protein, 9 aa, Homo sapiens
  misc_feature: Table A; Target 73289; HLA-A*02:01; R3HDML; ENSG00000101074; CTA
PLLPSTVGL

SEQ ID NO: 73290 - protein, 9 aa, Homo sapiens
  misc_feature: Table A; Target 73290; HLA-A*02:03; R3HDML; ENSG00000101074; CTA
PLLPSTVGL

SEQ ID NO: 73291 - protein, 9 aa, Homo sapiens
  misc_feature: Table A; Target 73291; HLA-A*02:04; R3HDML; ENSG00000101074; CTA
PLLPSTVGL

SEQ ID NO: 73292 - protein, 9 aa, Homo sapiens
  misc_feature: Table A; Target 73292; HLA-A*23:01; R3HDML; ENSG00000101074; CTA
PLLPSTVGL

SEQ ID NO: 73293 - protein, 9 aa, Homo sapiens
  misc_feature: Table A; Target 73293; HLA-A*24:02; R3HDML; ENSG00000101074; CTA
PLLPSTVGL

SEQ ID NO: 73294 - protein, 8 aa, Homo sapiens
  misc_feature: Table A; Target 73294; HLA-B*35:01; R3HDML; ENSG00000101074; CTA
QAVNALIM

SEQ ID NO: 73295 - protein, 8 aa, Homo sapiens
  misc_feature: Table A; Target 73295; HLA-B*35:03; R3HDML; ENSG00000101074; CTA
QAVNALIM

SEQ ID NO: 73296 - protein, 10 aa, Homo sapiens
  misc_feature: Table A; Target 73296; HLA-A*26:01; R3HDML; ENSG00000101074; CTA
QNLSIHSGQY

SEQ ID NO: 73297 - protein, 10 aa, Homo sapiens
  misc_feature: Table A; Target 73297; HLA-A*29:02; R3HDML; ENSG00000101074; CTA
QNLSIHSGQY

SEQ ID NO: 73298 - protein, 10 aa, Homo sapiens
  misc_feature: Table A; Target 73298; HLA-A*30:02; R3HDML; ENSG00000101074; CTA
QNLSIHSGQY

SEQ ID NO: 73299 - protein, 10 aa, Homo sapiens
  misc_feature: Table A; Target 73299; HLA-C*07:01; R3HDML; ENSG00000101074; CTA
QNLSIHSGQY

SEQ ID NO: 73300 - protein, 11 aa, Homo sapiens
  misc_feature: Table A; Target 73300; HLA-A*33:01; R3HDML; ENSG00000101074; CTA
QNLSIHSGQYR

SEQ ID NO: 73301 - protein, 11 aa, Homo sapiens
  misc_feature: Table A; Target 73301; HLA-A*33:03; R3HDML; ENSG00000101074; CTA
QNLSIHSGQYR

SEQ ID NO: 73302 - protein, 9 aa, Homo sapiens
  misc_feature: Table A; Target 73302; HLA-B*07:02; R3HDML; ENSG00000101074; CTA
QPESTAMRL

SEQ ID NO: 73303 - protein, 9 aa, Homo sapiens
  misc_feature: Table A; Target 73303; HLA-B*35:01; R3HDML; ENSG00000101074; CTA
QPESTAMRL

SEQ ID NO: 73304 - protein, 9 aa, Homo sapiens
  misc_feature: Table A; Target 73304; HLA-B*35:03; R3HDML; ENSG00000101074; CTA
QPESTAMRL

SEQ ID NO: 73305 - protein, 9 aa, Homo sapiens
  misc_feature: Table A; Target 73305; HLA-C*07:02; R3HDML; ENSG00000101074; CTA
QPESTAMRL

SEQ ID NO: 73306 - protein, 10 aa, Homo sapiens
  misc_feature: Table A; Target 73306; HLA-B*07:02; R3HDML; ENSG00000101074; CTA
QPESTAMRLL

SEQ ID NO: 73307 - protein, 9 aa, Homo sapiens
  misc_feature: Table A; Target 73307; HLA-A*23:01; R3HDML; ENSG00000101074; CTA
QYRSVVDLM

SEQ ID NO: 73308 - protein, 9 aa, Homo sapiens
  misc_feature: Table A; Target 73308; HLA-A*24:02; R3HDML; ENSG00000101074; CTA
QYRSVVDLM

SEQ ID NO: 73309 - protein, 9 aa, Homo sapiens
  misc_feature: Table A; Target 73309; HLA-A*30:02; R3HDML; ENSG00000101074; CTA
RAAYLVCNY

SEQ ID NO: 73310 - protein, 9 aa, Homo sapiens
  misc_feature: Table A; Target 73310; HLA-C*02:02; R3HDML; ENSG00000101074; CTA
RAAYLVCNY

SEQ ID NO: 73311 - protein, 9 aa, Homo sapiens
  misc_feature: Table A; Target 73311; HLA-B*54:01; R3HDML; ENSG00000101074; CTA
RASVYPPAA

SEQ ID NO: 73312 - protein, 9 aa, Homo sapiens
  misc_feature: Table A; Target 73312; HLA-B*56:01; R3HDML; ENSG00000101074; CTA
RASVYPPAA

SEQ ID NO: 73313 - protein, 9 aa, Homo sapiens
  misc_feature: Table A; Target 73313; HLA-B*57:01; R3HDML; ENSG00000101074; CTA
RLARAAEAW

SEQ ID NO: 73314 - protein, 10 aa, Homo sapiens
  misc_feature: Table A; Target 73314; HLA-A*31:01; R3HDML; ENSG00000101074; CTA
RLLSGLEVPR

SEQ ID NO: 73315 - protein, 11 aa, Homo sapiens
  misc_feature: Table A; Target 73315; HLA-A*02:04; R3HDML; ENSG00000101074; CTA
RLLSGLEVPRY

SEQ ID NO: 73316 - protein, 11 aa, Homo sapiens
  misc_feature: Table A; Target 73316; HLA-A*03:01; R3HDML; ENSG00000101074; CTA
RLLSGLEVPRY

SEQ ID NO: 73317 - protein, 11 aa, Homo sapiens
  misc_feature: Table A; Target 73317; HLA-A*29:02; R3HDML; ENSG00000101074; CTA
RLLSGLEVPRY

SEQ ID NO: 73318 - protein, 11 aa, Homo sapiens
  misc_feature: Table A; Target 73318; HLA-A*30:02; R3HDML; ENSG00000101074; CTA
RLLSGLEVPRY

SEQ ID NO: 73319 - protein, 9 aa, Homo sapiens
  misc_feature: Table A; Target 73319; HLA-A*23:01; R3HDML; ENSG00000101074; CTA
RYVGQNLSI

SEQ ID NO: 73320 - protein, 9 aa, Homo sapiens
  misc_feature: Table A; Target 73320; HLA-A*24:02; R3HDML; ENSG00000101074; CTA
RYVGQNLSI

SEQ ID NO: 73321 - protein, 9 aa, Homo sapiens
  misc_feature: Table A; Target 73321; HLA-C*14:02; R3HDML; ENSG00000101074; CTA
RYVGQNLSI

SEQ ID NO: 73322 - protein, 9 aa, Homo sapiens
  misc_feature: Table A; Target 73322; HLA-B*44:02; R3HDML; ENSG00000101074; CTA
SEEKWHYLF

SEQ ID NO: 73323 - protein, 8 aa, Homo sapiens
  misc_feature: Table A; Target 73323; HLA-A*30:02; R3HDML; ENSG00000101074; CTA
SGLEVPRY

SEQ ID NO: 73324 - protein, 8 aa, Homo sapiens
  misc_feature: Table A; Target 73324; HLA-A*32:01; R3HDML; ENSG00000101074; CTA
SGLEVPRY

SEQ ID NO: 73325 - protein, 8 aa, Homo sapiens
  misc_feature: Table A; Target 73325; HLA-B*15:03; R3HDML; ENSG00000101074; CTA
SGLEVPRY

SEQ ID NO: 73326 - protein, 8 aa, Homo sapiens
  misc_feature: Table A; Target 73326; HLA-B*18:01; R3HDML; ENSG00000101074; CTA
SGLEVPRY

SEQ ID NO: 73327 - protein, 8 aa, Homo sapiens
  misc_feature: Table A; Target 73327; HLA-C*12:03; R3HDML; ENSG00000101074; CTA
SGLEVPRY

SEQ ID NO: 73328 - protein, 8 aa, Homo sapiens
  misc_feature: Table A; Target 73328; HLA-C*16:01; R3HDML; ENSG00000101074; CTA
SGLEVPRY

SEQ ID NO: 73329 - protein, 8 aa, Homo sapiens
  misc_feature: Table A; Target 73329; HLA-C*16:02; R3HDML; ENSG00000101074; CTA
SGLEVPRY

SEQ ID NO: 73330 - protein, 9 aa, Homo sapiens
  misc_feature: Table A; Target 73330; HLA-A*31:01; R3HDML; ENSG00000101074; CTA
SGLEVPRYR

SEQ ID NO: 73331 - protein, 9 aa, Homo sapiens
  misc_feature: Table A; Target 73331; HLA-A*33:01; R3HDML; ENSG00000101074; CTA
SGLEVPRYR

SEQ ID NO: 73332 - protein, 9 aa, Homo sapiens
  misc_feature: Table A; Target 73332; HLA-B*57:01; R3HDML; ENSG00000101074; CTA
SGLEVPRYR

SEQ ID NO: 73333 - protein, 8 aa, Homo sapiens
  misc_feature: Table A; Target 73333; HLA-B*08:01; R3HDML; ENSG00000101074; CTA
SGQYRSVV

SEQ ID NO: 73334 - protein, 10 aa, Homo sapiens
  misc_feature: Table A; Target 73334; HLA-A*02:03; R3HDML; ENSG00000101074; CTA
SIHSGQYRSV

SEQ ID NO: 73335 - protein, 9 aa, Homo sapiens
  misc_feature: Table A; Target 73335; HLA-A*25:01; R3HDML; ENSG00000101074; CTA
SISVWGNTW

SEQ ID NO: 73336 - protein, 9 aa, Homo sapiens
  misc_feature: Table A; Target 73336; HLA-A*32:01; R3HDML; ENSG00000101074; CTA
SISVWGNTW

SEQ ID NO: 73337 - protein, 9 aa, Homo sapiens
  misc_feature: Table A; Target 73337; HLA-B*56:01; R3HDML; ENSG00000101074; CTA
SPYKMGKPC

SEQ ID NO: 73338 - protein, 10 aa, Homo sapiens
  misc_feature: Table A; Target 73338; HLA-A*25:01; R3HDML; ENSG00000101074; CTA
SSISVWGNTW

SEQ ID NO: 73339 - protein, 10 aa, Homo sapiens
  misc_feature: Table A; Target 73339; HLA-B*44:02; R3HDML; ENSG00000101074; CTA
SSISVWGNTW

SEQ ID NO: 73340 - protein, 10 aa, Homo sapiens
  misc_feature: Table A; Target 73340; HLA-B*44:03; R3HDML; ENSG00000101074; CTA
SSISVWGNTW

SEQ ID NO: 73341 - protein, 10 aa, Homo sapiens
  misc_feature: Table A; Target 73341; HLA-B*57:01; R3HDML; ENSG00000101074; CTA
SSISVWGNTW

SEQ ID NO: 73342 - protein, 10 aa, Homo sapiens
  misc_feature: Table A; Target 73342; HLA-B*58:01; R3HDML; ENSG00000101074; CTA
SSISVWGNTW

SEQ ID NO: 73343 - protein, 10 aa, Homo sapiens
  misc_feature: Table A; Target 73343; HLA-C*16:04; R3HDML; ENSG00000101074; CTA
SSISVWGNTW

SEQ ID NO: 73344 - protein, 11 aa, Homo sapiens
  misc_feature: Table A; Target 73344; HLA-B*57:01; R3HDML; ENSG00000101074; CTA
STVGLAGLLFW

SEQ ID NO: 73345 - protein, 8 aa, Homo sapiens
  misc_feature: Table A; Target 73345; HLA-B*07:02; R3HDML; ENSG00000101074; CTA
SVRDMNAL

SEQ ID NO: 73346 - protein, 8 aa, Homo sapiens
  misc_feature: Table A; Target 73346; HLA-C*07:02; R3HDML; ENSG00000101074; CTA
SVRDMNAL

SEQ ID NO: 73347 - protein, 9 aa, Homo sapiens
  misc_feature: Table A; Target 73347; HLA-B*07:02; R3HDML; ENSG00000101074; CTA
SVRDMNALL

SEQ ID NO: 73348 - protein, 11 aa, Homo sapiens
  misc_feature: Table A; Target 73348; HLA-A*29:02; R3HDML; ENSG00000101074; CTA
SVRDMNALLDY

SEQ ID NO: 73349 - protein, 11 aa, Homo sapiens
  misc_feature: Table A; Target 73349; HLA-A*30:02; R3HDML; ENSG00000101074; CTA
SVRDMNALLDY

SEQ ID NO: 73350 - protein, 9 aa, Homo sapiens
  misc_feature: Table A; Target 73350; HLA-A*25:01; R3HDML; ENSG00000101074; CTA
SVVDLMKSW

SEQ ID NO: 73351 - protein, 9 aa, Homo sapiens
  misc_feature: Table A; Target 73351; HLA-A*26:01; R3HDML; ENSG00000101074; CTA
SVVDLMKSW

SEQ ID NO: 73352 - protein, 9 aa, Homo sapiens
  misc_feature: Table A; Target 73352; HLA-A*32:01; R3HDML; ENSG00000101074; CTA
SVVDLMKSW

SEQ ID NO: 73353 - protein, 9 aa, Homo sapiens
  misc_feature: Table A; Target 73353; HLA-B*44:02; R3HDML; ENSG00000101074; CTA
SVVDLMKSW

SEQ ID NO: 73354 - protein, 9 aa, Homo sapiens
  misc_feature: Table A; Target 73354; HLA-B*44:03; R3HDML; ENSG00000101074; CTA
SVVDLMKSW

SEQ ID NO: 73355 - protein, 9 aa, Homo sapiens
  misc_feature: Table A; Target 73355; HLA-B*57:01; R3HDML; ENSG00000101074; CTA
SVVDLMKSW

SEQ ID NO: 73356 - protein, 9 aa, Homo sapiens
  misc_feature: Table A; Target 73356; HLA-B*58:01; R3HDML; ENSG00000101074; CTA
SVVDLMKSW

SEQ ID NO: 73357 - protein, 9 aa, Homo sapiens
  misc_feature: Table A; Target 73357; HLA-C*16:04; R3HDML; ENSG00000101074; CTA
SVVDLMKSW

SEQ ID NO: 73358 - protein, 9 aa, Homo sapiens
  misc_feature: Table A; Target 73358; HLA-A*31:01; R3HDML; ENSG00000101074; CTA
SVWGNTWHR

SEQ ID NO: 73359 - protein, 9 aa, Homo sapiens
  misc_feature: Table A; Target 73359; HLA-A*03:01; R3HDML; ENSG00000101074; CTA
SVYPPAANM

SEQ ID NO: 73360 - protein, 9 aa, Homo sapiens
  misc_feature: Table A; Target 73360; HLA-A*03:02; R3HDML; ENSG00000101074; CTA
SVYPPAANM

SEQ ID NO: 73361 - protein, 9 aa, Homo sapiens
  misc_feature: Table A; Target 73361; HLA-A*11:01; R3HDML; ENSG00000101074; CTA
SVYPPAANM

SEQ ID NO: 73362 - protein, 9 aa, Homo sapiens
  misc_feature: Table A; Target 73362; HLA-A*25:01; R3HDML; ENSG00000101074; CTA
SVYPPAANM

SEQ ID NO: 73363 - protein, 9 aa, Homo sapiens
  misc_feature: Table A; Target 73363; HLA-A*26:01; R3HDML; ENSG00000101074; CTA
SVYPPAANM

SEQ ID NO: 73364 - protein, 9 aa, Homo sapiens
  misc_feature: Table A; Target 73364; HLA-A*30:02; R3HDML; ENSG00000101074; CTA
SVYPPAANM

SEQ ID NO: 73365 - protein, 9 aa, Homo sapiens
  misc_feature: Table A; Target 73365; HLA-A*32:01; R3HDML; ENSG00000101074; CTA
SVYPPAANM

SEQ ID NO: 73366 - protein, 9 aa, Homo sapiens
  misc_feature: Table A; Target 73366; HLA-A*33:01; R3HDML; ENSG00000101074; CTA
SVYPPAANM

SEQ ID NO: 73367 - protein, 9 aa, Homo sapiens
  misc_feature: Table A; Target 73367; HLA-A*33:03; R3HDML; ENSG00000101074; CTA
SVYPPAANM

SEQ ID NO: 73368 - protein, 9 aa, Homo sapiens
  misc_feature: Table A; Target 73368; HLA-B*07:02; R3HDML; ENSG00000101074; CTA
SVYPPAANM

SEQ ID NO: 73369 - protein, 9 aa, Homo sapiens
  misc_feature: Table A; Target 73369; HLA-B*15:01; R3HDML; ENSG00000101074; CTA
SVYPPAANM

SEQ ID NO: 73370 - protein, 9 aa, Homo sapiens
  misc_feature: Table A; Target 73370; HLA-B*15:03; R3HDML; ENSG00000101074; CTA
SVYPPAANM

SEQ ID NO: 73371 - protein, 9 aa, Homo sapiens
  misc_feature: Table A; Target 73371; HLA-B*27:05; R3HDML; ENSG00000101074; CTA
SVYPPAANM

SEQ ID NO: 73372 - protein, 9 aa, Homo sapiens
  misc_feature: Table A; Target 73372; HLA-B*35:01; R3HDML; ENSG00000101074; CTA
SVYPPAANM

SEQ ID NO: 73373 - protein, 9 aa, Homo sapiens
  misc_feature: Table A; Target 73373; HLA-B*37:01; R3HDML; ENSG00000101074; CTA
SVYPPAANM

SEQ ID NO: 73374 - protein, 9 aa, Homo sapiens
  misc_feature: Table A; Target 73374; HLA-B*46:01; R3HDML; ENSG00000101074; CTA
SVYPPAANM

SEQ ID NO: 73375 - protein, 9 aa, Homo sapiens
  misc_feature: Table A; Target 73375; HLA-B*56:01; R3HDML; ENSG00000101074; CTA
SVYPPAANM

SEQ ID NO: 73376 - protein, 9 aa, Homo sapiens
  misc_feature: Table A; Target 73376; HLA-C*01:02; R3HDML; ENSG00000101074; CTA
SVYPPAANM

SEQ ID NO: 73377 - protein, 9 aa, Homo sapiens
  misc_feature: Table A; Target 73377; HLA-C*02:02; R3HDML; ENSG00000101074; CTA
SVYPPAANM

SEQ ID NO: 73378 - protein, 9 aa, Homo sapiens
  misc_feature: Table A; Target 73378; HLA-C*03:03; R3HDML; ENSG00000101074; CTA
SVYPPAANM

SEQ ID NO: 73379 - protein, 9 aa, Homo sapiens
  misc_feature: Table A; Target 73379; HLA-C*03:04; R3HDML; ENSG00000101074; CTA
SVYPPAANM

SEQ ID NO: 73380 - protein, 9 aa, Homo sapiens
  misc_feature: Table A; Target 73380; HLA-C*07:04; R3HDML; ENSG00000101074; CTA
SVYPPAANM

SEQ ID NO: 73381 - protein, 9 aa, Homo sapiens
  misc_feature: Table A; Target 73381; HLA-C*07:06; R3HDML; ENSG00000101074; CTA
SVYPPAANM

SEQ ID NO: 73382 - protein, 9 aa, Homo sapiens
  misc_feature: Table A; Target 73382; HLA-C*14:02; R3HDML; ENSG00000101074; CTA
SVYPPAANM

SEQ ID NO: 73383 - protein, 9 aa, Homo sapiens
  misc_feature: Table A; Target 73383; HLA-C*16:04; R3HDML; ENSG00000101074; CTA
SVYPPAANM

SEQ ID NO: 73384 - protein, 11 aa, Homo sapiens
  misc_feature: Table A; Target 73384; HLA-A*01:01; R3HDML; ENSG00000101074; CTA
SVYPPAANMEY

SEQ ID NO: 73385 - protein, 11 aa, Homo sapiens
  misc_feature: Table A; Target 73385; HLA-A*03:01; R3HDML; ENSG00000101074; CTA
SVYPPAANMEY

SEQ ID NO: 73386 - protein, 11 aa, Homo sapiens
  misc_feature: Table A; Target 73386; HLA-A*03:02; R3HDML; ENSG00000101074; CTA
SVYPPAANMEY

SEQ ID NO: 73387 - protein, 11 aa, Homo sapiens
  misc_feature: Table A; Target 73387; HLA-A*11:01; R3HDML; ENSG00000101074; CTA
SVYPPAANMEY

SEQ ID NO: 73388 - protein, 11 aa, Homo sapiens
  misc_feature: Table A; Target 73388; HLA-A*25:01; R3HDML; ENSG00000101074; CTA
SVYPPAANMEY

SEQ ID NO: 73389 - protein, 11 aa, Homo sapiens
  misc_feature: Table A; Target 73389; HLA-A*26:01; R3HDML; ENSG00000101074; CTA
SVYPPAANMEY

SEQ ID NO: 73390 - protein, 11 aa, Homo sapiens
  misc_feature: Table A; Target 73390; HLA-A*29:02; R3HDML; ENSG00000101074; CTA
SVYPPAANMEY

SEQ ID NO: 73391 - protein, 11 aa, Homo sapiens
  misc_feature: Table A; Target 73391; HLA-A*30:02; R3HDML; ENSG00000101074; CTA
SVYPPAANMEY

SEQ ID NO: 73392 - protein, 11 aa, Homo sapiens
  misc_feature: Table A; Target 73392; HLA-A*31:01; R3HDML; ENSG00000101074; CTA
SVYPPAANMEY

SEQ ID NO: 73393 - protein, 11 aa, Homo sapiens
  misc_feature: Table A; Target 73393; HLA-A*32:01; R3HDML; ENSG00000101074; CTA
SVYPPAANMEY

SEQ ID NO: 73394 - protein, 11 aa, Homo sapiens
  misc_feature: Table A; Target 73394; HLA-B*15:01; R3HDML; ENSG00000101074; CTA
SVYPPAANMEY

SEQ ID NO: 73395 - protein, 11 aa, Homo sapiens
  misc_feature: Table A; Target 73395; HLA-B*15:03; R3HDML; ENSG00000101074; CTA
SVYPPAANMEY

SEQ ID NO: 73396 - protein, 11 aa, Homo sapiens
  misc_feature: Table A; Target 73396; HLA-B*35:01; R3HDML; ENSG00000101074; CTA
SVYPPAANMEY

SEQ ID NO: 73397 - protein, 11 aa, Homo sapiens
  misc_feature: Table A; Target 73397; HLA-B*46:01; R3HDML; ENSG00000101074; CTA
SVYPPAANMEY

SEQ ID NO: 73398 - protein, 11 aa, Homo sapiens
  misc_feature: Table A; Target 73398; HLA-B*57:01; R3HDML; ENSG00000101074; CTA
SVYPPAANMEY

SEQ ID NO: 73399 - protein, 11 aa, Homo sapiens
  misc_feature: Table A; Target 73399; HLA-B*58:01; R3HDML; ENSG00000101074; CTA
SVYPPAANMEY

SEQ ID NO: 73400 - protein, 11 aa, Homo sapiens
  misc_feature: Table A; Target 73400; HLA-C*01:02; R3HDML; ENSG00000101074; CTA
SVYPPAANMEY

SEQ ID NO: 73401 - protein, 11 aa, Homo sapiens
  misc_feature: Table A; Target 73401; HLA-C*02:02; R3HDML; ENSG00000101074; CTA
SVYPPAANMEY

SEQ ID NO: 73402 - protein, 11 aa, Homo sapiens
  misc_feature: Table A; Target 73402; HLA-C*07:04; R3HDML; ENSG00000101074; CTA
SVYPPAANMEY

SEQ ID NO: 73403 - protein, 11 aa, Homo sapiens
  misc_feature: Table A; Target 73403; HLA-C*07:06; R3HDML; ENSG00000101074; CTA
SVYPPAANMEY

SEQ ID NO: 73404 - protein, 11 aa, Homo sapiens
  misc_feature: Table A; Target 73404; HLA-C*12:03; R3HDML; ENSG00000101074; CTA
SVYPPAANMEY

SEQ ID NO: 73405 - protein, 11 aa, Homo sapiens
  misc_feature: Table A; Target 73405; HLA-C*14:02; R3HDML; ENSG00000101074; CTA
SVYPPAANMEY

SEQ ID NO: 73406 - protein, 11 aa, Homo sapiens
  misc_feature: Table A; Target 73406; HLA-C*16:01; R3HDML; ENSG00000101074; CTA
SVYPPAANMEY

SEQ ID NO: 73407 - protein, 11 aa, Homo sapiens
  misc_feature: Table A; Target 73407; HLA-C*16:04; R3HDML; ENSG00000101074; CTA
SVYPPAANMEY

SEQ ID NO: 73408 - protein, 10 aa, Homo sapiens
  misc_feature: Table A; Target 73408; HLA-C*14:02; R3HDML; ENSG00000101074; CTA
SYQGSCNSNM

SEQ ID NO: 73409 - protein, 9 aa, Homo sapiens
  misc_feature: Table A; Target 73409; HLA-B*08:01; R3HDML; ENSG00000101074; CTA
TAMRLLSGL

SEQ ID NO: 73410 - protein, 9 aa, Homo sapiens
  misc_feature: Table A; Target 73410; HLA-B*55:01; R3HDML; ENSG00000101074; CTA
TPAPAQPES

SEQ ID NO: 73411 - protein, 9 aa, Homo sapiens
  misc_feature: Table A; Target 73411; HLA-B*56:01; R3HDML; ENSG00000101074; CTA
TPAPAQPES

SEQ ID NO: 73412 - protein, 11 aa, Homo sapiens
  misc_feature: Table A; Target 73412; HLA-B*54:01; R3HDML; ENSG00000101074; CTA
TPAPAQPESTA

SEQ ID NO: 73413 - protein, 11 aa, Homo sapiens
  misc_feature: Table A; Target 73413; HLA-B*55:01; R3HDML; ENSG00000101074; CTA
TPAPAQPESTA

SEQ ID NO: 73414 - protein, 11 aa, Homo sapiens
  misc_feature: Table A; Target 73414; HLA-B*56:01; R3HDML; ENSG00000101074; CTA
TPAPAQPESTA

SEQ ID NO: 73415 - protein, 10 aa, Homo sapiens
  misc_feature: Table A; Target 73415; HLA-A*31:01; R3HDML; ENSG00000101074; CTA
TQMVWASSNR

SEQ ID NO: 73416 - protein, 11 aa, Homo sapiens
  misc_feature: Table A; Target 73416; HLA-B*38:01; R3HDML; ENSG00000101074; CTA
TQMVWASSNRL

SEQ ID NO: 73417 - protein, 9 aa, Homo sapiens
  misc_feature: Table A; Target 73417; HLA-B*57:01; R3HDML; ENSG00000101074; CTA
VGLAGLLFW

SEQ ID NO: 73418 - protein, 8 aa, Homo sapiens
  misc_feature: Table A; Target 73418; HLA-A*23:01; R3HDML; ENSG00000101074; CTA
VYPPAANM

SEQ ID NO: 73419 - protein, 8 aa, Homo sapiens
  misc_feature: Table A; Target 73419; HLA-A*24:02; R3HDML; ENSG00000101074; CTA
VYPPAANM

SEQ ID NO: 73420 - protein, 8 aa, Homo sapiens
  misc_feature: Table A; Target 73420; HLA-C*01:02; R3HDML; ENSG00000101074; CTA
VYPPAANM

SEQ ID NO: 73421 - protein, 8 aa, Homo sapiens
  misc_feature: Table A; Target 73421; HLA-C*04:01; R3HDML; ENSG00000101074; CTA
VYPPAANM

SEQ ID NO: 73422 - protein, 8 aa, Homo sapiens
  misc_feature: Table A; Target 73422; HLA-C*14:02; R3HDML; ENSG00000101074; CTA
VYPPAANM

SEQ ID NO: 73423 - protein, 10 aa, Homo sapiens
  misc_feature: Table A; Target 73423; HLA-A*23:01; R3HDML; ENSG00000101074; CTA
VYPPAANMEY

SEQ ID NO: 73424 - protein, 10 aa, Homo sapiens
  misc_feature: Table A; Target 73424; HLA-A*24:02; R3HDML; ENSG00000101074; CTA
VYPPAANMEY

SEQ ID NO: 73425 - protein, 10 aa, Homo sapiens
  misc_feature: Table A; Target 73425; HLA-A*29:02; R3HDML; ENSG00000101074; CTA
VYPPAANMEY

SEQ ID NO: 73426 - protein, 10 aa, Homo sapiens
  misc_feature: Table A; Target 73426; HLA-A*30:02; R3HDML; ENSG00000101074; CTA
VYPPAANMEY

SEQ ID NO: 73427 - protein, 10 aa, Homo sapiens
  misc_feature: Table A; Target 73427; HLA-B*15:01; R3HDML; ENSG00000101074; CTA
VYPPAANMEY

SEQ ID NO: 73428 - protein, 10 aa, Homo sapiens
  misc_feature: Table A; Target 73428; HLA-B*15:03; R3HDML; ENSG00000101074; CTA
VYPPAANMEY

SEQ ID NO: 73429 - protein, 10 aa, Homo sapiens
  misc_feature: Table A; Target 73429; HLA-B*46:01; R3HDML; ENSG00000101074; CTA
VYPPAANMEY

SEQ ID NO: 73430 - protein, 10 aa, Homo sapiens
  misc_feature: Table A; Target 73430; HLA-C*01:02; R3HDML; ENSG00000101074; CTA
VYPPAANMEY

SEQ ID NO: 73431 - protein, 10 aa, Homo sapiens
  misc_feature: Table A; Target 73431; HLA-C*04:01; R3HDML; ENSG00000101074; CTA
VYPPAANMEY

SEQ ID NO: 73432 - protein, 10 aa, Homo sapiens
  misc_feature: Table A; Target 73432; HLA-C*14:02; R3HDML; ENSG00000101074; CTA
VYPPAANMEY

SEQ ID NO: 73433 - protein, 11 aa, Homo sapiens
  misc_feature: Table A; Target 73433; HLA-A*23:01; R3HDML; ENSG00000101074; CTA
VYPPAANMEYM

SEQ ID NO: 73434 - protein, 11 aa, Homo sapiens
  misc_feature: Table A; Target 73434; HLA-A*24:02; R3HDML; ENSG00000101074; CTA
VYPPAANMEYM

SEQ ID NO: 73435 - protein, 9 aa, Homo sapiens
  misc_feature: Table A; Target 73435; HLA-B*35:03; R3HDML; ENSG00000101074; CTA
WAGQAVNAL

SEQ ID NO: 73436 - protein, 9 aa, Homo sapiens
  misc_feature: Table A; Target 73436; HLA-C*01:02; R3HDML; ENSG00000101074; CTA
WAGQAVNAL

SEQ ID NO: 73437 - protein, 9 aa, Homo sapiens
  misc_feature: Table A; Target 73437; HLA-C*03:03; R3HDML; ENSG00000101074; CTA
WAGQAVNAL

SEQ ID NO: 73438 - protein, 9 aa, Homo sapiens
  misc_feature: Table A; Target 73438; HLA-C*03:04; R3HDML; ENSG00000101074; CTA
WAGQAVNAL

SEQ ID NO: 73439 - protein, 9 aa, Homo sapiens
  misc_feature: Table A; Target 73439; HLA-A*02:01; R3HDML; ENSG00000101074; CTA
YLFPAPRDC

SEQ ID NO: 73440 - protein, 9 aa, Homo sapiens
  misc_feature: Table A; Target 73440; HLA-A*02:03; R3HDML; ENSG00000101074; CTA
YLFPAPRDC

SEQ ID NO: 73441 - protein, 9 aa, Homo sapiens
  misc_feature: Table A; Target 73441; HLA-A*01:01; R3HDML; ENSG00000101074; CTA
YPPAANMEY

SEQ ID NO: 73442 - protein, 9 aa, Homo sapiens
  misc_feature: Table A; Target 73442; HLA-A*26:01; R3HDML; ENSG00000101074; CTA
YPPAANMEY

SEQ ID NO: 73443 - protein, 9 aa, Homo sapiens
  misc_feature: Table A; Target 73443; HLA-A*29:02; R3HDML; ENSG00000101074; CTA
YPPAANMEY

SEQ ID NO: 73444 - protein, 9 aa, Homo sapiens
  misc_feature: Table A; Target 73444; HLA-B*35:01; R3HDML; ENSG00000101074; CTA
YPPAANMEY

SEQ ID NO: 73445 - protein, 9 aa, Homo sapiens
  misc_feature: Table A; Target 73445; HLA-B*35:03; R3HDML; ENSG00000101074; CTA
YPPAANMEY

SEQ ID NO: 73446 - protein, 9 aa, Homo sapiens
  misc_feature: Table A; Target 73446; HLA-B*46:01; R3HDML; ENSG00000101074; CTA
YPPAANMEY

SEQ ID NO: 73447 - protein, 9 aa, Homo sapiens
  misc_feature: Table A; Target 73447; HLA-B*51:01; R3HDML; ENSG00000101074; CTA
YPPAANMEY

SEQ ID NO: 73448 - protein, 9 aa, Homo sapiens
  misc_feature: Table A; Target 73448; HLA-B*55:01; R3HDML; ENSG00000101074; CTA
YPPAANMEY

SEQ ID NO: 73449 - protein, 9 aa, Homo sapiens
  misc_feature: Table A; Target 73449; HLA-C*01:02; R3HDML; ENSG00000101074; CTA
YPPAANMEY

SEQ ID NO: 73450 - protein, 9 aa, Homo sapiens
  misc_feature: Table A; Target 73450; HLA-C*03:03; R3HDML; ENSG00000101074; CTA
YPPAANMEY

SEQ ID NO: 73451 - protein, 9 aa, Homo sapiens
  misc_feature: Table A; Target 73451; HLA-C*14:02; R3HDML; ENSG00000101074; CTA
YPPAANMEY

SEQ ID NO: 73452 - protein, 10 aa, Homo sapiens
  misc_feature: Table A; Target 73452; HLA-B*35:03; R3HDML; ENSG00000101074; CTA
YPPAANMEYM

SEQ ID NO: 73453 - protein, 9 aa, Homo sapiens
  misc_feature: Table A; Target 73453; HLA-B*27:05; R3HDML; ENSG00000101074; CTA
YRSVVDLMK

SEQ ID NO: 73454 - protein, 8 aa, Homo sapiens
  misc_feature: Table A; Target 73454; HLA-B*13:02; R3HDML; ENSG00000101074; CTA
YVGQNLSI

SEQ ID NO: 73455 - protein, 8 aa, Homo sapiens
  misc_feature: Table A; Target 73455; HLA-B*51:01; R3HDML; ENSG00000101074; CTA
YVGQNLSI

SEQ ID NO: 73456 - protein, 8 aa, Homo sapiens
  misc_feature: Table A; Target 73456; HLA-C*07:01; R3HDML; ENSG00000101074; CTA
YVGQNLSI

SEQ ID NO: 73457 - protein, 9 aa, Homo sapiens
  misc_feature: Table A; Target 73457; HLA-A*01:01; RLN1; ENSG00000107018; TAA
AADSNPSEL

SEQ ID NO: 73458 - protein, 9 aa, Homo sapiens
  misc_feature: Table A; Target 73458; HLA-A*02:07; RLN1; ENSG00000107018; TAA
AADSNPSEL

SEQ ID NO: 73459 - protein, 9 aa, Homo sapiens
  misc_feature: Table A; Target 73459; HLA-A*32:01; RLN1; ENSG00000107018; TAA
AADSNPSEL

SEQ ID NO: 73460 - protein, 9 aa, Homo sapiens
  misc_feature: Table A; Target 73460; HLA-B*07:02; RLN1; ENSG00000107018; TAA
AADSNPSEL

SEQ ID NO: 73461 - protein, 9 aa, Homo sapiens
  misc_feature: Table A; Target 73461; HLA-B*35:01; RLN1; ENSG00000107018; TAA
AADSNPSEL

SEQ ID NO: 73462 - protein, 9 aa, Homo sapiens
  misc_feature: Table A; Target 73462; HLA-B*35:03; RLN1; ENSG00000107018; TAA
AADSNPSEL

SEQ ID NO: 73463 - protein, 9 aa, Homo sapiens
  misc_feature: Table A; Target 73463; HLA-B*38:01; RLN1; ENSG00000107018; TAA
AADSNPSEL

SEQ ID NO: 73464 - protein, 9 aa, Homo sapiens
  misc_feature: Table A; Target 73464; HLA-B*39:01; RLN1; ENSG00000107018; TAA
AADSNPSEL

SEQ ID NO: 73465 - protein, 9 aa, Homo sapiens
  misc_feature: Table A; Target 73465; HLA-B*40:01; RLN1; ENSG00000107018; TAA
AADSNPSEL

SEQ ID NO: 73466 - protein, 9 aa, Homo sapiens
  misc_feature: Table A; Target 73466; HLA-B*55:01; RLN1; ENSG00000107018; TAA
AADSNPSEL

SEQ ID NO: 73467 - protein, 9 aa, Homo sapiens
  misc_feature: Table A; Target 73467; HLA-B*58:01; RLN1; ENSG00000107018; TAA
AADSNPSEL

SEQ ID NO: 73468 - protein, 9 aa, Homo sapiens
  misc_feature: Table A; Target 73468; HLA-C*01:02; RLN1; ENSG00000107018; TAA
AADSNPSEL

SEQ ID NO: 73469 - protein, 9 aa, Homo sapiens
  misc_feature: Table A; Target 73469; HLA-C*02:02; RLN1; ENSG00000107018; TAA
AADSNPSEL

SEQ ID NO: 73470 - protein, 9 aa, Homo sapiens
  misc_feature: Table A; Target 73470; HLA-C*03:03; RLN1; ENSG00000107018; TAA
AADSNPSEL

SEQ ID NO: 73471 - protein, 9 aa, Homo sapiens
  misc_feature: Table A; Target 73471; HLA-C*03:04; RLN1; ENSG00000107018; TAA
AADSNPSEL

SEQ ID NO: 73472 - protein, 9 aa, Homo sapiens
  misc_feature: Table A; Target 73472; HLA-C*04:01; RLN1; ENSG00000107018; TAA
AADSNPSEL

SEQ ID NO: 73473 - protein, 9 aa, Homo sapiens
  misc_feature: Table A; Target 73473; HLA-C*05:01; RLN1; ENSG00000107018; TAA
AADSNPSEL

SEQ ID NO: 73474 - protein, 9 aa, Homo sapiens
  misc_feature: Table A; Target 73474; HLA-C*07:02; RLN1; ENSG00000107018; TAA
AADSNPSEL

SEQ ID NO: 73475 - protein, 9 aa, Homo sapiens
  misc_feature: Table A; Target 73475; HLA-C*07:04; RLN1; ENSG00000107018; TAA
AADSNPSEL

SEQ ID NO: 73476 - protein, 9 aa, Homo sapiens
  misc_feature: Table A; Target 73476; HLA-C*12:03; RLN1; ENSG00000107018; TAA
AADSNPSEL

SEQ ID NO: 73477 - protein, 9 aa, Homo sapiens
  misc_feature: Table A; Target 73477; HLA-C*14:02; RLN1; ENSG00000107018; TAA
AADSNPSEL

SEQ ID NO: 73478 - protein, 9 aa, Homo sapiens
  misc_feature: Table A; Target 73478; HLA-C*16:02; RLN1; ENSG00000107018; TAA
AADSNPSEL

SEQ ID NO: 73479 - protein, 9 aa, Homo sapiens
  misc_feature: Table A; Target 73479; HLA-C*16:04; RLN1; ENSG00000107018; TAA
AADSNPSEL

SEQ ID NO: 73480 - protein, 10 aa, Homo sapiens
  misc_feature: Table A; Target 73480; HLA-A*01:01; RLN1; ENSG00000107018; TAA
AADSNPSELK

SEQ ID NO: 73481 - protein, 10 aa, Homo sapiens
  misc_feature: Table A; Target 73481; HLA-A*03:01; RLN1; ENSG00000107018; TAA
AADSNPSELK

SEQ ID NO: 73482 - protein, 10 aa, Homo sapiens
  misc_feature: Table A; Target 73482; HLA-A*03:02; RLN1; ENSG00000107018; TAA
AADSNPSELK

SEQ ID NO: 73483 - protein, 10 aa, Homo sapiens
  misc_feature: Table A; Target 73483; HLA-A*11:01; RLN1; ENSG00000107018; TAA
AADSNPSELK

SEQ ID NO: 73484 - protein, 10 aa, Homo sapiens
  misc_feature: Table A; Target 73484; HLA-B*27:02; RLN1; ENSG00000107018; TAA
AADSNPSELK

SEQ ID NO: 73485 - protein, 10 aa, Homo sapiens
  misc_feature: Table A; Target 73485; HLA-C*05:01; RLN1; ENSG00000107018; TAA
AADSNPSELK

SEQ ID NO: 73486 - protein, 10 aa, Homo sapiens
  misc_feature: Table A; Target 73486; HLA-C*07:06; RLN1; ENSG00000107018; TAA
AADSNPSELK

SEQ ID NO: 73487 - protein, 11 aa, Homo sapiens
  misc_feature: Table A; Target 73487; HLA-A*01:01; RLN1; ENSG00000107018; TAA
AADSNPSELKY

SEQ ID NO: 73488 - protein, 11 aa, Homo sapiens
  misc_feature: Table A; Target 73488; HLA-A*29:02; RLN1; ENSG00000107018; TAA
AADSNPSELKY

SEQ ID NO: 73489 - protein, 11 aa, Homo sapiens
  misc_feature: Table A; Target 73489; HLA-A*30:02; RLN1; ENSG00000107018; TAA
AADSNPSELKY

SEQ ID NO: 73490 - protein, 11 aa, Homo sapiens
  misc_feature: Table A; Target 73490; HLA-B*15:01; RLN1; ENSG00000107018; TAA
AADSNPSELKY

SEQ ID NO: 73491 - protein, 11 aa, Homo sapiens
  misc_feature: Table A; Target 73491; HLA-B*27:05; RLN1; ENSG00000107018; TAA
AADSNPSELKY

SEQ ID NO: 73492 - protein, 11 aa, Homo sapiens
  misc_feature: Table A; Target 73492; HLA-B*35:01; RLN1; ENSG00000107018; TAA
AADSNPSELKY

SEQ ID NO: 73493 - protein, 11 aa, Homo sapiens
  misc_feature: Table A; Target 73493; HLA-B*44:03; RLN1; ENSG00000107018; TAA
AADSNPSELKY

SEQ ID NO: 73494 - protein, 11 aa, Homo sapiens
  misc_feature: Table A; Target 73494; HLA-B*55:01; RLN1; ENSG00000107018; TAA
AADSNPSELKY

SEQ ID NO: 73495 - protein, 11 aa, Homo sapiens
  misc_feature: Table A; Target 73495; HLA-B*58:01; RLN1; ENSG00000107018; TAA
AADSNPSELKY

SEQ ID NO: 73496 - protein, 11 aa, Homo sapiens
  misc_feature: Table A; Target 73496; HLA-C*03:03; RLN1; ENSG00000107018; TAA
AADSNPSELKY

SEQ ID NO: 73497 - protein, 11 aa, Homo sapiens
  misc_feature: Table A; Target 73497; HLA-C*05:01; RLN1; ENSG00000107018; TAA
AADSNPSELKY

SEQ ID NO: 73498 - protein, 11 aa, Homo sapiens
  misc_feature: Table A; Target 73498; HLA-C*12:03; RLN1; ENSG00000107018; TAA
AADSNPSELKY

SEQ ID NO: 73499 - protein, 11 aa, Homo sapiens
  misc_feature: Table A; Target 73499; HLA-C*16:02; RLN1; ENSG00000107018; TAA
AADSNPSELKY

SEQ ID NO: 73500 - protein, 11 aa, Homo sapiens
  misc_feature: Table A; Target 73500; HLA-C*16:04; RLN1; ENSG00000107018; TAA
AADSNPSELKY

SEQ ID NO: 73501 - protein, 10 aa, Homo sapiens
  misc_feature: Table A; Target 73501; HLA-A*30:01; RLN1; ENSG00000107018; TAA
AALSERQPSL

SEQ ID NO: 73502 - protein, 10 aa, Homo sapiens
  misc_feature: Table A; Target 73502; HLA-B*07:02; RLN1; ENSG00000107018; TAA
AALSERQPSL

SEQ ID NO: 73503 - protein, 10 aa, Homo sapiens
  misc_feature: Table A; Target 73503; HLA-B*58:01; RLN1; ENSG00000107018; TAA
AALSERQPSL

SEQ ID NO: 73504 - protein, 10 aa, Homo sapiens
  misc_feature: Table A; Target 73504; HLA-C*03:03; RLN1; ENSG00000107018; TAA
AALSERQPSL

SEQ ID NO: 73505 - protein, 10 aa, Homo sapiens
  misc_feature: Table A; Target 73505; HLA-C*03:04; RLN1; ENSG00000107018; TAA
AALSERQPSL

SEQ ID NO: 73506 - protein, 10 aa, Homo sapiens
  misc_feature: Table A; Target 73506; HLA-C*07:02; RLN1; ENSG00000107018; TAA
AALSERQPSL

SEQ ID NO: 73507 - protein, 10 aa, Homo sapiens
  misc_feature: Table A; Target 73507; HLA-C*16:01; RLN1; ENSG00000107018; TAA
AALSERQPSL

SEQ ID NO: 73508 - protein, 8 aa, Homo sapiens
  misc_feature: Table A; Target 73508; HLA-B*37:01; RLN1; ENSG00000107018; TAA
ADSNPSEL

SEQ ID NO: 73509 - protein, 9 aa, Homo sapiens
  misc_feature: Table A; Target 73509; HLA-A*03:02; RLN1; ENSG00000107018; TAA
ADSNPSELK

SEQ ID NO: 73510 - protein, 9 aa, Homo sapiens
  misc_feature: Table A; Target 73510; HLA-A*11:01; RLN1; ENSG00000107018; TAA
ADSNPSELK

SEQ ID NO: 73511 - protein, 10 aa, Homo sapiens
  misc_feature: Table A; Target 73511; HLA-A*11:01; RLN1; ENSG00000107018; TAA
ADSNPSELKY

SEQ ID NO: 73512 - protein, 10 aa, Homo sapiens
  misc_feature: Table A; Target 73512; HLA-A*29:02; RLN1; ENSG00000107018; TAA
ADSNPSELKY

SEQ ID NO: 73513 - protein, 10 aa, Homo sapiens
  misc_feature: Table A; Target 73513; HLA-A*30:02; RLN1; ENSG00000107018; TAA
ADSNPSELKY

SEQ ID NO: 73514 - protein, 10 aa, Homo sapiens
  misc_feature: Table A; Target 73514; HLA-A*32:01; RLN1; ENSG00000107018; TAA
ADSNPSELKY

SEQ ID NO: 73515 - protein, 10 aa, Homo sapiens
  misc_feature: Table A; Target 73515; HLA-B*15:03; RLN1; ENSG00000107018; TAA
ADSNPSELKY

SEQ ID NO: 73516 - protein, 10 aa, Homo sapiens
  misc_feature: Table A; Target 73516; HLA-B*27:02; RLN1; ENSG00000107018; TAA
ADSNPSELKY

SEQ ID NO: 73517 - protein, 10 aa, Homo sapiens
  misc_feature: Table A; Target 73517; HLA-B*27:05; RLN1; ENSG00000107018; TAA
ADSNPSELKY

SEQ ID NO: 73518 - protein, 10 aa, Homo sapiens
  misc_feature: Table A; Target 73518; HLA-B*37:01; RLN1; ENSG00000107018; TAA
ADSNPSELKY

SEQ ID NO: 73519 - protein, 10 aa, Homo sapiens
  misc_feature: Table A; Target 73519; HLA-B*39:01; RLN1; ENSG00000107018; TAA
ADSNPSELKY

SEQ ID NO: 73520 - protein, 10 aa, Homo sapiens
  misc_feature: Table A; Target 73520; HLA-B*44:02; RLN1; ENSG00000107018; TAA
ADSNPSELKY

SEQ ID NO: 73521 - protein, 10 aa, Homo sapiens
  misc_feature: Table A; Target 73521; HLA-B*44:03; RLN1; ENSG00000107018; TAA
ADSNPSELKY

SEQ ID NO: 73522 - protein, 10 aa, Homo sapiens
  misc_feature: Table A; Target 73522; HLA-C*04:01; RLN1; ENSG00000107018; TAA
ADSNPSELKY

SEQ ID NO: 73523 - protein, 10 aa, Homo sapiens
  misc_feature: Table A; Target 73523; HLA-C*07:01; RLN1; ENSG00000107018; TAA
ADSNPSELKY

SEQ ID NO: 73524 - protein, 10 aa, Homo sapiens
  misc_feature: Table A; Target 73524; HLA-C*07:02; RLN1; ENSG00000107018; TAA
ADSNPSELKY

SEQ ID NO: 73525 - protein, 10 aa, Homo sapiens
  misc_feature: Table A; Target 73525; HLA-C*07:04; RLN1; ENSG00000107018; TAA
ADSNPSELKY

SEQ ID NO: 73526 - protein, 10 aa, Homo sapiens
  misc_feature: Table A; Target 73526; HLA-C*12:03; RLN1; ENSG00000107018; TAA
ADSNPSELKY

SEQ ID NO: 73527 - protein, 10 aa, Homo sapiens
  misc_feature: Table A; Target 73527; HLA-C*16:01; RLN1; ENSG00000107018; TAA
ADSNPSELKY

SEQ ID NO: 73528 - protein, 10 aa, Homo sapiens
  misc_feature: Table A; Target 73528; HLA-C*16:02; RLN1; ENSG00000107018; TAA
ADSNPSELKY

SEQ ID NO: 73529 - protein, 10 aa, Homo sapiens
  misc_feature: Table A; Target 73529; HLA-C*16:04; RLN1; ENSG00000107018; TAA
ADSNPSELKY

SEQ ID NO: 73530 - protein, 11 aa, Homo sapiens
  misc_feature: Table A; Target 73530; HLA-B*44:02; RLN1; ENSG00000107018; TAA
ADSNPSELKYL

SEQ ID NO: 73531 - protein, 11 aa, Homo sapiens
  misc_feature: Table A; Target 73531; HLA-B*44:03; RLN1; ENSG00000107018; TAA
ADSNPSELKYL

SEQ ID NO: 73532 - protein, 11 aa, Homo sapiens
  misc_feature: Table A; Target 73532; HLA-C*16:02; RLN1; ENSG00000107018; TAA
ADSNPSELKYL

SEQ ID NO: 73533 - protein, 9 aa, Homo sapiens
  misc_feature: Table A; Target 73533; HLA-A*02:03; RLN1; ENSG00000107018; TAA
ALKDSNLSF

SEQ ID NO: 73534 - protein, 9 aa, Homo sapiens
  misc_feature: Table A; Target 73534; HLA-A*23:01; RLN1; ENSG00000107018; TAA
ALKDSNLSF

SEQ ID NO: 73535 - protein, 9 aa, Homo sapiens
  misc_feature: Table A; Target 73535; HLA-A*25:01; RLN1; ENSG00000107018; TAA
ALKDSNLSF

SEQ ID NO: 73536 - protein, 9 aa, Homo sapiens
  misc_feature: Table A; Target 73536; HLA-A*26:01; RLN1; ENSG00000107018; TAA
ALKDSNLSF

SEQ ID NO: 73537 - protein, 9 aa, Homo sapiens
  misc_feature: Table A; Target 73537; HLA-A*29:02; RLN1; ENSG00000107018; TAA
ALKDSNLSF

SEQ ID NO: 73538 - protein, 9 aa, Homo sapiens
  misc_feature: Table A; Target 73538; HLA-A*30:02; RLN1; ENSG00000107018; TAA
ALKDSNLSF

SEQ ID NO: 73539 - protein, 9 aa, Homo sapiens
  misc_feature: Table A; Target 73539; HLA-A*32:01; RLN1; ENSG00000107018; TAA
ALKDSNLSF

SEQ ID NO: 73540 - protein, 9 aa, Homo sapiens
  misc_feature: Table A; Target 73540; HLA-B*07:02; RLN1; ENSG00000107018; TAA
ALKDSNLSF

SEQ ID NO: 73541 - protein, 9 aa, Homo sapiens
  misc_feature: Table A; Target 73541; HLA-B*08:01; RLN1; ENSG00000107018; TAA
ALKDSNLSF

SEQ ID NO: 73542 - protein, 9 aa, Homo sapiens
  misc_feature: Table A; Target 73542; HLA-B*15:01; RLN1; ENSG00000107018; TAA
ALKDSNLSF

SEQ ID NO: 73543 - protein, 9 aa, Homo sapiens
  misc_feature: Table A; Target 73543; HLA-B*15:03; RLN1; ENSG00000107018; TAA
ALKDSNLSF

SEQ ID NO: 73544 - protein, 9 aa, Homo sapiens
  misc_feature: Table A; Target 73544; HLA-B*46:01; RLN1; ENSG00000107018; TAA
ALKDSNLSF

SEQ ID NO: 73545 - protein, 9 aa, Homo sapiens
  misc_feature: Table A; Target 73545; HLA-C*01:02; RLN1; ENSG00000107018; TAA
ALKDSNLSF

SEQ ID NO: 73546 - protein, 9 aa, Homo sapiens
  misc_feature: Table A; Target 73546; HLA-C*02:02; RLN1; ENSG00000107018; TAA
ALKDSNLSF

SEQ ID NO: 73547 - protein, 9 aa, Homo sapiens
  misc_feature: Table A; Target 73547; HLA-C*14:02; RLN1; ENSG00000107018; TAA
ALKDSNLSF

SEQ ID NO: 73548 - protein, 9 aa, Homo sapiens
  misc_feature: Table A; Target 73548; HLA-C*16:01; RLN1; ENSG00000107018; TAA
ALKDSNLSF

SEQ ID NO: 73549 - protein, 9 aa, Homo sapiens
  misc_feature: Table A; Target 73549; HLA-A*02:01; RLN1; ENSG00000107018; TAA
ALSERQPSL

SEQ ID NO: 73550 - protein, 9 aa, Homo sapiens
  misc_feature: Table A; Target 73550; HLA-A*02:03; RLN1; ENSG00000107018; TAA
ALSERQPSL

SEQ ID NO: 73551 - protein, 9 aa, Homo sapiens
  misc_feature: Table A; Target 73551; HLA-A*02:04; RLN1; ENSG00000107018; TAA
ALSERQPSL

SEQ ID NO: 73552 - protein, 9 aa, Homo sapiens
  misc_feature: Table A; Target 73552; HLA-A*02:07; RLN1; ENSG00000107018; TAA
ALSERQPSL

SEQ ID NO: 73553 - protein, 9 aa, Homo sapiens
  misc_feature: Table A; Target 73553; HLA-A*30:01; RLN1; ENSG00000107018; TAA
ALSERQPSL

SEQ ID NO: 73554 - protein, 9 aa, Homo sapiens
  misc_feature: Table A; Target 73554; HLA-A*32:01; RLN1; ENSG00000107018; TAA
ALSERQPSL

SEQ ID NO: 73555 - protein, 9 aa, Homo sapiens
  misc_feature: Table A; Target 73555; HLA-B*07:02; RLN1; ENSG00000107018; TAA
ALSERQPSL

SEQ ID NO: 73556 - protein, 9 aa, Homo sapiens
  misc_feature: Table A; Target 73556; HLA-B*08:01; RLN1; ENSG00000107018; TAA
ALSERQPSL

SEQ ID NO: 73557 - protein, 9 aa, Homo sapiens
  misc_feature: Table A; Target 73557; HLA-B*13:02; RLN1; ENSG00000107018; TAA
ALSERQPSL

SEQ ID NO: 73558 - protein, 9 aa, Homo sapiens
  misc_feature: Table A; Target 73558; HLA-B*15:01; RLN1; ENSG00000107018; TAA
ALSERQPSL

SEQ ID NO: 73559 - protein, 9 aa, Homo sapiens
  misc_feature: Table A; Target 73559; HLA-B*37:01; RLN1; ENSG00000107018; TAA
ALSERQPSL

SEQ ID NO: 73560 - protein, 9 aa, Homo sapiens
  misc_feature: Table A; Target 73560; HLA-B*46:01; RLN1; ENSG00000107018; TAA
ALSERQPSL

SEQ ID NO: 73561 - protein, 9 aa, Homo sapiens
  misc_feature: Table A; Target 73561; HLA-B*55:01; RLN1; ENSG00000107018; TAA
ALSERQPSL

SEQ ID NO: 73562 - protein, 9 aa, Homo sapiens
  misc_feature: Table A; Target 73562; HLA-C*01:02; RLN1; ENSG00000107018; TAA
ALSERQPSL

SEQ ID NO: 73563 - protein, 9 aa, Homo sapiens
  misc_feature: Table A; Target 73563; HLA-C*02:02; RLN1; ENSG00000107018; TAA
ALSERQPSL

SEQ ID NO: 73564 - protein, 9 aa, Homo sapiens
  misc_feature: Table A; Target 73564; HLA-C*03:03; RLN1; ENSG00000107018; TAA
ALSERQPSL

SEQ ID NO: 73565 - protein, 9 aa, Homo sapiens
  misc_feature: Table A; Target 73565; HLA-C*03:04; RLN1; ENSG00000107018; TAA
ALSERQPSL

SEQ ID NO: 73566 - protein, 9 aa, Homo sapiens
  misc_feature: Table A; Target 73566; HLA-C*07:02; RLN1; ENSG00000107018; TAA
ALSERQPSL

SEQ ID NO: 73567 - protein, 9 aa, Homo sapiens
  misc_feature: Table A; Target 73567; HLA-C*14:02; RLN1; ENSG00000107018; TAA
ALSERQPSL

SEQ ID NO: 73568 - protein, 9 aa, Homo sapiens
  misc_feature: Table A; Target 73568; HLA-C*16:01; RLN1; ENSG00000107018; TAA
ALSERQPSL

SEQ ID NO: 73569 - protein, 9 aa, Homo sapiens
  misc_feature: Table A; Target 73569; HLA-C*16:02; RLN1; ENSG00000107018; TAA
ALSERQPSL

SEQ ID NO: 73570 - protein, 8 aa, Homo sapiens
  misc_feature: Table A; Target 73570; HLA-A*03:02; RLN1; ENSG00000107018; TAA
ANLPPELK

SEQ ID NO: 73571 - protein, 11 aa, Homo sapiens
  misc_feature: Table A; Target 73571; HLA-A*31:01; RLN1; ENSG00000107018; TAA
ANLPPELKAAL

SEQ ID NO: 73572 - protein, 10 aa, Homo sapiens
  misc_feature: Table A; Target 73572; HLA-B*07:02; RLN1; ENSG00000107018; TAA
APQTPRPVAE

SEQ ID NO: 73573 - protein, 9 aa, Homo sapiens
  misc_feature: Table A; Target 73573; HLA-A*68:01; RLN1; ENSG00000107018; TAA
DAPQTPRPV

SEQ ID NO: 73574 - protein, 9 aa, Homo sapiens
  misc_feature: Table A; Target 73574; HLA-C*06:02; RLN1; ENSG00000107018; TAA
DAPQTPRPV

SEQ ID NO: 73575 - protein, 9 aa, Homo sapiens
  misc_feature: Table A; Target 73575; HLA-A*33:01; RLN1; ENSG00000107018; TAA
DDVIKLCGR

SEQ ID NO: 73576 - protein, 9 aa, Homo sapiens
  misc_feature: Table A; Target 73576; HLA-A*01:01; RLN1; ENSG00000107018; TAA
DSNLSFEEF

SEQ ID NO: 73577 - protein, 9 aa, Homo sapiens
  misc_feature: Table A; Target 73577; HLA-A*25:01; RLN1; ENSG00000107018; TAA
DSNLSFEEF

SEQ ID NO: 73578 - protein, 9 aa, Homo sapiens
  misc_feature: Table A; Target 73578; HLA-A*33:01; RLN1; ENSG00000107018; TAA
DSNLSFEEF

SEQ ID NO: 73579 - protein, 9 aa, Homo sapiens
  misc_feature: Table A; Target 73579; HLA-A*33:03; RLN1; ENSG00000107018; TAA
DSNLSFEEF

SEQ ID NO: 73580 - protein, 9 aa, Homo sapiens
  misc_feature: Table A; Target 73580; HLA-B*18:01; RLN1; ENSG00000107018; TAA
DSNLSFEEF

SEQ ID NO: 73581 - protein, 9 aa, Homo sapiens
  misc_feature: Table A; Target 73581; HLA-B*27:02; RLN1; ENSG00000107018; TAA
DSNLSFEEF

SEQ ID NO: 73582 - protein, 9 aa, Homo sapiens
  misc_feature: Table A; Target 73582; HLA-B*35:01; RLN1; ENSG00000107018; TAA
DSNLSFEEF

SEQ ID NO: 73583 - protein, 9 aa, Homo sapiens
  misc_feature: Table A; Target 73583; HLA-B*57:01; RLN1; ENSG00000107018; TAA
DSNLSFEEF

SEQ ID NO: 73584 - protein, 9 aa, Homo sapiens
  misc_feature: Table A; Target 73584; HLA-C*07:06; RLN1; ENSG00000107018; TAA
DSNLSFEEF

SEQ ID NO: 73585 - protein, 10 aa, Homo sapiens
  misc_feature: Table A; Target 73585; HLA-B*27:02; RLN1; ENSG00000107018; TAA
DSNLSFEEFK

SEQ ID NO: 73586 - protein, 9 aa, Homo sapiens
  misc_feature: Table A; Target 73586; HLA-A*01:01; RLN1; ENSG00000107018; TAA
DSNPSELKY

SEQ ID NO: 73587 - protein, 9 aa, Homo sapiens
  misc_feature: Table A; Target 73587; HLA-A*25:01; RLN1; ENSG00000107018; TAA
DSNPSELKY

SEQ ID NO: 73588 - protein, 9 aa, Homo sapiens
  misc_feature: Table A; Target 73588; HLA-A*26:01; RLN1; ENSG00000107018; TAA
DSNPSELKY

SEQ ID NO: 73589 - protein, 9 aa, Homo sapiens
  misc_feature: Table A; Target 73589; HLA-A*29:02; RLN1; ENSG00000107018; TAA
DSNPSELKY

SEQ ID NO: 73590 - protein, 9 aa, Homo sapiens
  misc_feature: Table A; Target 73590; HLA-A*30:02; RLN1; ENSG00000107018; TAA
DSNPSELKY

SEQ ID NO: 73591 - protein, 9 aa, Homo sapiens
  misc_feature: Table A; Target 73591; HLA-A*32:01; RLN1; ENSG00000107018; TAA
DSNPSELKY

SEQ ID NO: 73592 - protein, 9 aa, Homo sapiens
  misc_feature: Table A; Target 73592; HLA-A*33:01; RLN1; ENSG00000107018; TAA
DSNPSELKY

SEQ ID NO: 73593 - protein, 9 aa, Homo sapiens
  misc_feature: Table A; Target 73593; HLA-A*33:03; RLN1; ENSG00000107018; TAA
DSNPSELKY

SEQ ID NO: 73594 - protein, 9 aa, Homo sapiens
  misc_feature: Table A; Target 73594; HLA-B*15:01; RLN1; ENSG00000107018; TAA
DSNPSELKY

SEQ ID NO: 73595 - protein, 9 aa, Homo sapiens
  misc_feature: Table A; Target 73595; HLA-B*18:01; RLN1; ENSG00000107018; TAA
DSNPSELKY

SEQ ID NO: 73596 - protein, 9 aa, Homo sapiens
  misc_feature: Table A; Target 73596; HLA-B*35:01; RLN1; ENSG00000107018; TAA
DSNPSELKY

SEQ ID NO: 73597 - protein, 9 aa, Homo sapiens
  misc_feature: Table A; Target 73597; HLA-B*39:01; RLN1; ENSG00000107018; TAA
DSNPSELKY

SEQ ID NO: 73598 - protein, 9 aa, Homo sapiens
  misc_feature: Table A; Target 73598; HLA-B*44:02; RLN1; ENSG00000107018; TAA
DSNPSELKY

SEQ ID NO: 73599 - protein, 9 aa, Homo sapiens
  misc_feature: Table A; Target 73599; HLA-B*44:03; RLN1; ENSG00000107018; TAA
DSNPSELKY

SEQ ID NO: 73600 - protein, 9 aa, Homo sapiens
  misc_feature: Table A; Target 73600; HLA-B*58:01; RLN1; ENSG00000107018; TAA
DSNPSELKY

SEQ ID NO: 73601 - protein, 9 aa, Homo sapiens
  misc_feature: Table A; Target 73601; HLA-C*03:03; RLN1; ENSG00000107018; TAA
DSNPSELKY

SEQ ID NO: 73602 - protein, 9 aa, Homo sapiens
  misc_feature: Table A; Target 73602; HLA-C*07:01; RLN1; ENSG00000107018; TAA
DSNPSELKY

SEQ ID NO: 73603 - protein, 9 aa, Homo sapiens
  misc_feature: Table A; Target 73603; HLA-C*07:04; RLN1; ENSG00000107018; TAA
DSNPSELKY

SEQ ID NO: 73604 - protein, 9 aa, Homo sapiens
  misc_feature: Table A; Target 73604; HLA-C*07:06; RLN1; ENSG00000107018; TAA
DSNPSELKY

SEQ ID NO: 73605 - protein, 9 aa, Homo sapiens
  misc_feature: Table A; Target 73605; HLA-C*12:03; RLN1; ENSG00000107018; TAA
DSNPSELKY

SEQ ID NO: 73606 - protein, 9 aa, Homo sapiens
  misc_feature: Table A; Target 73606; HLA-C*16:01; RLN1; ENSG00000107018; TAA
DSNPSELKY

SEQ ID NO: 73607 - protein, 9 aa, Homo sapiens
  misc_feature: Table A; Target 73607; HLA-C*16:02; RLN1; ENSG00000107018; TAA
DSNPSELKY

SEQ ID NO: 73608 - protein, 10 aa, Homo sapiens
  misc_feature: Table A; Target 73608; HLA-A*25:01; RLN1; ENSG00000107018; TAA
DSNPSELKYL

SEQ ID NO: 73609 - protein, 10 aa, Homo sapiens
  misc_feature: Table A; Target 73609; HLA-A*33:01; RLN1; ENSG00000107018; TAA
DSNPSELKYL

SEQ ID NO: 73610 - protein, 10 aa, Homo sapiens
  misc_feature: Table A; Target 73610; HLA-B*40:02; RLN1; ENSG00000107018; TAA
DSNPSELKYL

SEQ ID NO: 73611 - protein, 10 aa, Homo sapiens
  misc_feature: Table A; Target 73611; HLA-C*07:02; RLN1; ENSG00000107018; TAA
DSNPSELKYL

SEQ ID NO: 73612 - protein, 11 aa, Homo sapiens
  misc_feature: Table A; Target 73612; HLA-A*33:01; RLN1; ENSG00000107018; TAA
DSNPSELKYLG

SEQ ID NO: 73613 - protein, 9 aa, Homo sapiens
  misc_feature: Table A; Target 73613; HLA-A*01:01; RLN1; ENSG00000107018; TAA
DTETIIIML

SEQ ID NO: 73614 - protein, 9 aa, Homo sapiens
  misc_feature: Table A; Target 73614; HLA-A*68:02; RLN1; ENSG00000107018; TAA
DTETIIIML

SEQ ID NO: 73615 - protein, 8 aa, Homo sapiens
  misc_feature: Table A; Target 73615; HLA-A*33:01; RLN1; ENSG00000107018; TAA
DTHSQKKR

SEQ ID NO: 73616 - protein, 8 aa, Homo sapiens
  misc_feature: Table A; Target 73616; HLA-A*33:03; RLN1; ENSG00000107018; TAA
DTHSQKKR

SEQ ID NO: 73617 - protein, 9 aa, Homo sapiens
  misc_feature: Table A; Target 73617; HLA-A*33:01; RLN1; ENSG00000107018; TAA
DTHSQKKRR

SEQ ID NO: 73618 - protein, 8 aa, Homo sapiens
  misc_feature: Table A; Target 73618; HLA-A*33:01; RLN1; ENSG00000107018; TAA
DVIKLCGR

SEQ ID NO: 73619 - protein, 8 aa, Homo sapiens
  misc_feature: Table A; Target 73619; HLA-A*33:03; RLN1; ENSG00000107018; TAA
DVIKLCGR

SEQ ID NO: 73620 - protein, 10 aa, Homo sapiens
  misc_feature: Table A; Target 73620; HLA-A*25:01; RLN1; ENSG00000107018; TAA
EAADSNPSEL

SEQ ID NO: 73621 - protein, 10 aa, Homo sapiens
  misc_feature: Table A; Target 73621; HLA-A*26:01; RLN1; ENSG00000107018; TAA
EAADSNPSEL

SEQ ID NO: 73622 - protein, 10 aa, Homo sapiens
  misc_feature: Table A; Target 73622; HLA-A*33:03; RLN1; ENSG00000107018; TAA
EAADSNPSEL

SEQ ID NO: 73623 - protein, 10 aa, Homo sapiens
  misc_feature: Table A; Target 73623; HLA-A*68:01; RLN1; ENSG00000107018; TAA
EAADSNPSEL

SEQ ID NO: 73624 - protein, 10 aa, Homo sapiens
  misc_feature: Table A; Target 73624; HLA-B*35:03; RLN1; ENSG00000107018; TAA
EAADSNPSEL

SEQ ID NO: 73625 - protein, 10 aa, Homo sapiens
  misc_feature: Table A; Target 73625; HLA-B*39:01; RLN1; ENSG00000107018; TAA
EAADSNPSEL

SEQ ID NO: 73626 - protein, 10 aa, Homo sapiens
  misc_feature: Table A; Target 73626; HLA-C*07:06; RLN1; ENSG00000107018; TAA
EAADSNPSEL

SEQ ID NO: 73627 - protein, 11 aa, Homo sapiens
  misc_feature: Table A; Target 73627; HLA-A*33:01; RLN1; ENSG00000107018; TAA
EAADSNPSELK

SEQ ID NO: 73628 - protein, 11 aa, Homo sapiens
  misc_feature: Table A; Target 73628; HLA-A*33:03; RLN1; ENSG00000107018; TAA
EAADSNPSELK

SEQ ID NO: 73629 - protein, 11 aa, Homo sapiens
  misc_feature: Table A; Target 73629; HLA-A*68:01; RLN1; ENSG00000107018; TAA
EAADSNPSELK

SEQ ID NO: 73630 - protein, 11 aa, Homo sapiens
  misc_feature: Table A; Target 73630; HLA-A*68:02; RLN1; ENSG00000107018; TAA
EAADSNPSELK

SEQ ID NO: 73631 - protein, 11 aa, Homo sapiens
  misc_feature: Table A; Target 73631; HLA-B*27:02; RLN1; ENSG00000107018; TAA
EAADSNPSELK

SEQ ID NO: 73632 - protein, 11 aa, Homo sapiens
  misc_feature: Table A; Target 73632; HLA-C*07:06; RLN1; ENSG00000107018; TAA
EAADSNPSELK

SEQ ID NO: 73633 - protein, 10 aa, Homo sapiens
  misc_feature: Table A; Target 73633; HLA-A*68:02; RLN1; ENSG00000107018; TAA
EDAPQTPRPV

SEQ ID NO: 73634 - protein, 9 aa, Homo sapiens
  misc_feature: Table A; Target 73634; HLA-C*07:01; RLN1; ENSG00000107018; TAA
EFCLLLNQF

SEQ ID NO: 73635 - protein, 10 aa, Homo sapiens
  misc_feature: Table A; Target 73635; HLA-A*23:01; RLN1; ENSG00000107018; TAA
EFIANLPPEL

SEQ ID NO: 73636 - protein, 9 aa, Homo sapiens
  misc_feature: Table A; Target 73636; HLA-A*31:01; RLN1; ENSG00000107018; TAA
EFKKLIRNR

SEQ ID NO: 73637 - protein, 9 aa, Homo sapiens
  misc_feature: Table A; Target 73637; HLA-A*26:01; RLN1; ENSG00000107018; TAA
EIVPSFINK

SEQ ID NO: 73638 - protein, 9 aa, Homo sapiens
  misc_feature: Table A; Target 73638; HLA-A*33:01; RLN1; ENSG00000107018; TAA
ELKAALSER

SEQ ID NO: 73639 - protein, 9 aa, Homo sapiens
  misc_feature: Table A; Target 73639; HLA-A*33:03; RLN1; ENSG00000107018; TAA
ELKAALSER

SEQ ID NO: 73640 - protein, 9 aa, Homo sapiens
  misc_feature: Table A; Target 73640; HLA-A*02:01; RLN1; ENSG00000107018; TAA
ELQQYVPAL

SEQ ID NO: 73641 - protein, 9 aa, Homo sapiens
  misc_feature: Table A; Target 73641; HLA-A*02:04; RLN1; ENSG00000107018; TAA
ELQQYVPAL

SEQ ID NO: 73642 - protein, 9 aa, Homo sapiens
  misc_feature: Table A; Target 73642; HLA-A*02:07; RLN1; ENSG00000107018; TAA
ELQQYVPAL

SEQ ID NO: 73643 - protein, 9 aa, Homo sapiens
  misc_feature: Table A; Target 73643; HLA-A*24:02; RLN1; ENSG00000107018; TAA
ELQQYVPAL

SEQ ID NO: 73644 - protein, 9 aa, Homo sapiens
  misc_feature: Table A; Target 73644; HLA-A*25:01; RLN1; ENSG00000107018; TAA
ELQQYVPAL

SEQ ID NO: 73645 - protein, 9 aa, Homo sapiens
  misc_feature: Table A; Target 73645; HLA-A*26:01; RLN1; ENSG00000107018; TAA
ELQQYVPAL

SEQ ID NO: 73646 - protein, 9 aa, Homo sapiens
  misc_feature: Table A; Target 73646; HLA-A*33:03; RLN1; ENSG00000107018; TAA
ELQQYVPAL

SEQ ID NO: 73647 - protein, 9 aa, Homo sapiens
  misc_feature: Table A; Target 73647; HLA-A*68:02; RLN1; ENSG00000107018; TAA
ELQQYVPAL

SEQ ID NO: 73648 - protein, 9 aa, Homo sapiens
  misc_feature: Table A; Target 73648; HLA-B*08:01; RLN1; ENSG00000107018; TAA
ELQQYVPAL

SEQ ID NO: 73649 - protein, 9 aa, Homo sapiens
  misc_feature: Table A; Target 73649; HLA-B*35:03; RLN1; ENSG00000107018; TAA
ELQQYVPAL

SEQ ID NO: 73650 - protein, 9 aa, Homo sapiens
  misc_feature: Table A; Target 73650; HLA-B*39:01; RLN1; ENSG00000107018; TAA
ELQQYVPAL

SEQ ID NO: 73651 - protein, 9 aa, Homo sapiens
  misc_feature: Table A; Target 73651; HLA-C*07:02; RLN1; ENSG00000107018; TAA
ELQQYVPAL

SEQ ID NO: 73652 - protein, 10 aa, Homo sapiens
  misc_feature: Table A; Target 73652; HLA-A*03:02; RLN1; ENSG00000107018; TAA
ELQQYVPALK

SEQ ID NO: 73653 - protein, 10 aa, Homo sapiens
  misc_feature: Table A; Target 73653; HLA-A*33:03; RLN1; ENSG00000107018; TAA
ELQQYVPALK

SEQ ID NO: 73654 - protein, 9 aa, Homo sapiens
  misc_feature: Table A; Target 73654; HLA-A*25:01; RLN1; ENSG00000107018; TAA
ELVRAQIAI

SEQ ID NO: 73655 - protein, 9 aa, Homo sapiens
  misc_feature: Table A; Target 73655; HLA-B*08:01; RLN1; ENSG00000107018; TAA
ELVRAQIAI

SEQ ID NO: 73656 - protein, 9 aa, Homo sapiens
  misc_feature: Table A; Target 73656; HLA-B*27:02; RLN1; ENSG00000107018; TAA
ERQPSLPEL

SEQ ID NO: 73657 - protein, 9 aa, Homo sapiens
  misc_feature: Table A; Target 73657; HLA-B*27:05; RLN1; ENSG00000107018; TAA
ERQPSLPEL

SEQ ID NO: 73658 - protein, 9 aa, Homo sapiens
  misc_feature: Table A; Target 73658; HLA-B*38:01; RLN1; ENSG00000107018; TAA
ERQPSLPEL

SEQ ID NO: 73659 - protein, 9 aa, Homo sapiens
  misc_feature: Table A; Target 73659; HLA-B*39:01; RLN1; ENSG00000107018; TAA
ERQPSLPEL

SEQ ID NO: 73660 - protein, 9 aa, Homo sapiens
  misc_feature: Table A; Target 73660; HLA-C*06:02; RLN1; ENSG00000107018; TAA
ERQPSLPEL

SEQ ID NO: 73661 - protein, 9 aa, Homo sapiens
  misc_feature: Table A; Target 73661; HLA-C*07:01; RLN1; ENSG00000107018; TAA
ERQPSLPEL

SEQ ID NO: 73662 - protein, 9 aa, Homo sapiens
  misc_feature: Table A; Target 73662; HLA-C*07:02; RLN1; ENSG00000107018; TAA
ERQPSLPEL

SEQ ID NO: 73663 - protein, 9 aa, Homo sapiens
  misc_feature: Table A; Target 73663; HLA-C*16:04; RLN1; ENSG00000107018; TAA
ERQPSLPEL

SEQ ID NO: 73664 - protein, 9 aa, Homo sapiens
  misc_feature: Table A; Target 73664; HLA-A*25:01; RLN1; ENSG00000107018; TAA
ETIIIMLEF

SEQ ID NO: 73665 - protein, 9 aa, Homo sapiens
  misc_feature: Table A; Target 73665; HLA-A*26:01; RLN1; ENSG00000107018; TAA
ETIIIMLEF

SEQ ID NO: 73666 - protein, 9 aa, Homo sapiens
  misc_feature: Table A; Target 73666; HLA-A*33:03; RLN1; ENSG00000107018; TAA
ETIIIMLEF

SEQ ID NO: 73667 - protein, 9 aa, Homo sapiens
  misc_feature: Table A; Target 73667; HLA-A*68:02; RLN1; ENSG00000107018; TAA
ETIIIMLEF

SEQ ID NO: 73668 - protein, 9 aa, Homo sapiens
  misc_feature: Table A; Target 73668; HLA-B*44:02; RLN1; ENSG00000107018; TAA
ETIIIMLEF

SEQ ID NO: 73669 - protein, 9 aa, Homo sapiens
  misc_feature: Table A; Target 73669; HLA-B*57:01; RLN1; ENSG00000107018; TAA
ETIIIMLEF

SEQ ID NO: 73670 - protein, 10 aa, Homo sapiens
  misc_feature: Table A; Target 73670; HLA-A*68:02; RLN1; ENSG00000107018; TAA
ETIIIMLEFI

SEQ ID NO: 73671 - protein, 9 aa, Homo sapiens
  misc_feature: Table A; Target 73671; HLA-A*01:01; RLN1; ENSG00000107018; TAA
FIANLPPEL

SEQ ID NO: 73672 - protein, 9 aa, Homo sapiens
  misc_feature: Table A; Target 73672; HLA-A*02:01; RLN1; ENSG00000107018; TAA
FIANLPPEL

SEQ ID NO: 73673 - protein, 9 aa, Homo sapiens
  misc_feature: Table A; Target 73673; HLA-A*02:03; RLN1; ENSG00000107018; TAA
FIANLPPEL

SEQ ID NO: 73674 - protein, 9 aa, Homo sapiens
  misc_feature: Table A; Target 73674; HLA-A*02:04; RLN1; ENSG00000107018; TAA
FIANLPPEL

SEQ ID NO: 73675 - protein, 9 aa, Homo sapiens
  misc_feature: Table A; Target 73675; HLA-A*02:07; RLN1; ENSG00000107018; TAA
FIANLPPEL

SEQ ID NO: 73676 - protein, 9 aa, Homo sapiens
  misc_feature: Table A; Target 73676; HLA-A*23:01; RLN1; ENSG00000107018; TAA
FIANLPPEL

SEQ ID NO: 73677 - protein, 9 aa, Homo sapiens
  misc_feature: Table A; Target 73677; HLA-A*24:02; RLN1; ENSG00000107018; TAA
FIANLPPEL

SEQ ID NO: 73678 - protein, 9 aa, Homo sapiens
  misc_feature: Table A; Target 73678; HLA-A*25:01; RLN1; ENSG00000107018; TAA
FIANLPPEL

SEQ ID NO: 73679 - protein, 9 aa, Homo sapiens
  misc_feature: Table A; Target 73679; HLA-A*26:01; RLN1; ENSG00000107018; TAA
FIANLPPEL

SEQ ID NO: 73680 - protein, 9 aa, Homo sapiens
  misc_feature: Table A; Target 73680; HLA-A*30:01; RLN1; ENSG00000107018; TAA
FIANLPPEL

SEQ ID NO: 73681 - protein, 9 aa, Homo sapiens
  misc_feature: Table A; Target 73681; HLA-A*32:01; RLN1; ENSG00000107018; TAA
FIANLPPEL

SEQ ID NO: 73682 - protein, 9 aa, Homo sapiens
  misc_feature: Table A; Target 73682; HLA-A*68:02; RLN1; ENSG00000107018; TAA
FIANLPPEL

SEQ ID NO: 73683 - protein, 9 aa, Homo sapiens
  misc_feature: Table A; Target 73683; HLA-B*13:02; RLN1; ENSG00000107018; TAA
FIANLPPEL

SEQ ID NO: 73684 - protein, 9 aa, Homo sapiens
  misc_feature: Table A; Target 73684; HLA-B*15:03; RLN1; ENSG00000107018; TAA
FIANLPPEL

SEQ ID NO: 73685 - protein, 9 aa, Homo sapiens
  misc_feature: Table A; Target 73685; HLA-B*27:05; RLN1; ENSG00000107018; TAA
FIANLPPEL

SEQ ID NO: 73686 - protein, 9 aa, Homo sapiens
  misc_feature: Table A; Target 73686; HLA-B*35:01; RLN1; ENSG00000107018; TAA
FIANLPPEL

SEQ ID NO: 73687 - protein, 9 aa, Homo sapiens
  misc_feature: Table A; Target 73687; HLA-B*35:03; RLN1; ENSG00000107018; TAA
FIANLPPEL

SEQ ID NO: 73688 - protein, 9 aa, Homo sapiens
  misc_feature: Table A; Target 73688; HLA-B*38:01; RLN1; ENSG00000107018; TAA
FIANLPPEL

SEQ ID NO: 73689 - protein, 9 aa, Homo sapiens
  misc_feature: Table A; Target 73689; HLA-B*39:01; RLN1; ENSG00000107018; TAA
FIANLPPEL

SEQ ID NO: 73690 - protein, 9 aa, Homo sapiens
  misc_feature: Table A; Target 73690; HLA-B*40:01; RLN1; ENSG00000107018; TAA
FIANLPPEL

SEQ ID NO: 73691 - protein, 9 aa, Homo sapiens
  misc_feature: Table A; Target 73691; HLA-B*46:01; RLN1; ENSG00000107018; TAA
FIANLPPEL

SEQ ID NO: 73692 - protein, 9 aa, Homo sapiens
  misc_feature: Table A; Target 73692; HLA-B*54:01; RLN1; ENSG00000107018; TAA
FIANLPPEL

SEQ ID NO: 73693 - protein, 9 aa, Homo sapiens
  misc_feature: Table A; Target 73693; HLA-B*55:01; RLN1; ENSG00000107018; TAA
FIANLPPEL

SEQ ID NO: 73694 - protein, 9 aa, Homo sapiens
  misc_feature: Table A; Target 73694; HLA-B*58:01; RLN1; ENSG00000107018; TAA
FIANLPPEL

SEQ ID NO: 73695 - protein, 9 aa, Homo sapiens
  misc_feature: Table A; Target 73695; HLA-C*01:02; RLN1; ENSG00000107018; TAA
FIANLPPEL

SEQ ID NO: 73696 - protein, 9 aa, Homo sapiens
  misc_feature: Table A; Target 73696; HLA-C*02:02; RLN1; ENSG00000107018; TAA
FIANLPPEL

SEQ ID NO: 73697 - protein, 9 aa, Homo sapiens
  misc_feature: Table A; Target 73697; HLA-C*03:03; RLN1; ENSG00000107018; TAA
FIANLPPEL

SEQ ID NO: 73698 - protein, 9 aa, Homo sapiens
  misc_feature: Table A; Target 73698; HLA-C*03:04; RLN1; ENSG00000107018; TAA
FIANLPPEL

SEQ ID NO: 73699 - protein, 9 aa, Homo sapiens
  misc_feature: Table A; Target 73699; HLA-C*05:01; RLN1; ENSG00000107018; TAA
FIANLPPEL

SEQ ID NO: 73700 - protein, 9 aa, Homo sapiens
  misc_feature: Table A; Target 73700; HLA-C*06:02; RLN1; ENSG00000107018; TAA
FIANLPPEL

SEQ ID NO: 73701 - protein, 9 aa, Homo sapiens
  misc_feature: Table A; Target 73701; HLA-C*07:04; RLN1; ENSG00000107018; TAA
FIANLPPEL

SEQ ID NO: 73702 - protein, 9 aa, Homo sapiens
  misc_feature: Table A; Target 73702; HLA-C*12:03; RLN1; ENSG00000107018; TAA
FIANLPPEL

SEQ ID NO: 73703 - protein, 9 aa, Homo sapiens
  misc_feature: Table A; Target 73703; HLA-C*14:02; RLN1; ENSG00000107018; TAA
FIANLPPEL

SEQ ID NO: 73704 - protein, 9 aa, Homo sapiens
  misc_feature: Table A; Target 73704; HLA-C*16:01; RLN1; ENSG00000107018; TAA
FIANLPPEL

SEQ ID NO: 73705 - protein, 9 aa, Homo sapiens
  misc_feature: Table A; Target 73705; HLA-C*16:02; RLN1; ENSG00000107018; TAA
FIANLPPEL

SEQ ID NO: 73706 - protein, 9 aa, Homo sapiens
  misc_feature: Table A; Target 73706; HLA-C*16:04; RLN1; ENSG00000107018; TAA
FIANLPPEL

SEQ ID NO: 73707 - protein, 10 aa, Homo sapiens
  misc_feature: Table A; Target 73707; HLA-A*01:01; RLN1; ENSG00000107018; TAA
FIANLPPELK

SEQ ID NO: 73708 - protein, 10 aa, Homo sapiens
  misc_feature: Table A; Target 73708; HLA-A*03:02; RLN1; ENSG00000107018; TAA
FIANLPPELK

SEQ ID NO: 73709 - protein, 10 aa, Homo sapiens
  misc_feature: Table A; Target 73709; HLA-A*11:01; RLN1; ENSG00000107018; TAA
FIANLPPELK

SEQ ID NO: 73710 - protein, 10 aa, Homo sapiens
  misc_feature: Table A; Target 73710; HLA-A*68:01; RLN1; ENSG00000107018; TAA
FIANLPPELK

SEQ ID NO: 73711 - protein, 10 aa, Homo sapiens
  misc_feature: Table A; Target 73711; HLA-A*68:02; RLN1; ENSG00000107018; TAA
FIANLPPELK

SEQ ID NO: 73712 - protein, 11 aa, Homo sapiens
  misc_feature: Table A; Target 73712; HLA-A*02:01; RLN1; ENSG00000107018; TAA
FIANLPPELKA

SEQ ID NO: 73713 - protein, 11 aa, Homo sapiens
  misc_feature: Table A; Target 73713; HLA-A*02:04; RLN1; ENSG00000107018; TAA
FIANLPPELKA

SEQ ID NO: 73714 - protein, 11 aa, Homo sapiens
  misc_feature: Table A; Target 73714; HLA-A*68:02; RLN1; ENSG00000107018; TAA
FIANLPPELKA

SEQ ID NO: 73715 - protein, 11 aa, Homo sapiens
  misc_feature: Table A; Target 73715; HLA-B*54:01; RLN1; ENSG00000107018; TAA
FIANLPPELKA

SEQ ID NO: 73716 - protein, 8 aa, Homo sapiens
  misc_feature: Table A; Target 73716; HLA-A*02:04; RLN1; ENSG00000107018; TAA
FLFHLLEF

SEQ ID NO: 73717 - protein, 8 aa, Homo sapiens
  misc_feature: Table A; Target 73717; HLA-A*29:02; RLN1; ENSG00000107018; TAA
FLFHLLEF

SEQ ID NO: 73718 - protein, 10 aa, Homo sapiens
  misc_feature: Table A; Target 73718; HLA-A*02:01; RLN1; ENSG00000107018; TAA
FLFHLLEFCL

SEQ ID NO: 73719 - protein, 10 aa, Homo sapiens
  misc_feature: Table A; Target 73719; HLA-A*02:04; RLN1; ENSG00000107018; TAA
FLFHLLEFCL

SEQ ID NO: 73720 - protein, 9 aa, Homo sapiens
  misc_feature: Table A; Target 73720; HLA-B*57:01; RLN1; ENSG00000107018; TAA
FSRAVAAKW

SEQ ID NO: 73721 - protein, 9 aa, Homo sapiens
  misc_feature: Table A; Target 73721; HLA-A*03:01; RLN1; ENSG00000107018; TAA
GCTKRSLAK

SEQ ID NO: 73722 - protein, 8 aa, Homo sapiens
  misc_feature: Table A; Target 73722; HLA-A*01:01; RLN1; ENSG00000107018; TAA
GLDTHSQK

SEQ ID NO: 73723 - protein, 8 aa, Homo sapiens
  misc_feature: Table A; Target 73723; HLA-A*03:01; RLN1; ENSG00000107018; TAA
GLDTHSQK

SEQ ID NO: 73724 - protein, 8 aa, Homo sapiens
  misc_feature: Table A; Target 73724; HLA-A*03:02; RLN1; ENSG00000107018; TAA
GLDTHSQK

SEQ ID NO: 73725 - protein, 8 aa, Homo sapiens
  misc_feature: Table A; Target 73725; HLA-C*05:01; RLN1; ENSG00000107018; TAA
GLDTHSQK

SEQ ID NO: 73726 - protein, 9 aa, Homo sapiens
  misc_feature: Table A; Target 73726; HLA-A*01:01; RLN1; ENSG00000107018; TAA
GLDTHSQKK

SEQ ID NO: 73727 - protein, 9 aa, Homo sapiens
  misc_feature: Table A; Target 73727; HLA-A*03:01; RLN1; ENSG00000107018; TAA
GLDTHSQKK

SEQ ID NO: 73728 - protein, 9 aa, Homo sapiens
  misc_feature: Table A; Target 73728; HLA-A*03:02; RLN1; ENSG00000107018; TAA
GLDTHSQKK

SEQ ID NO: 73729 - protein, 9 aa, Homo sapiens
  misc_feature: Table A; Target 73729; HLA-A*11:01; RLN1; ENSG00000107018; TAA
GLDTHSQKK

SEQ ID NO: 73730 - protein, 9 aa, Homo sapiens
  misc_feature: Table A; Target 73730; HLA-C*16:02; RLN1; ENSG00000107018; TAA
GLDTHSQKK

SEQ ID NO: 73731 - protein, 9 aa, Homo sapiens
  misc_feature: Table A; Target 73731; HLA-A*02:01; RLN1; ENSG00000107018; TAA
HLLEFCLLL

SEQ ID NO: 73732 - protein, 9 aa, Homo sapiens
  misc_feature: Table A; Target 73732; HLA-A*02:04; RLN1; ENSG00000107018; TAA
HLLEFCLLL

SEQ ID NO: 73733 - protein, 9 aa, Homo sapiens
  misc_feature: Table A; Target 73733; HLA-A*02:07; RLN1; ENSG00000107018; TAA
HLLEFCLLL

SEQ ID NO: 73734 - protein, 9 aa, Homo sapiens
  misc_feature: Table A; Target 73734; HLA-C*03:04; RLN1; ENSG00000107018; TAA
IAICGMSTW

SEQ ID NO: 73735 - protein, 9 aa, Homo sapiens
  misc_feature: Table A; Target 73735; HLA-C*16:04; RLN1; ENSG00000107018; TAA
IAICGMSTW

SEQ ID NO: 73736 - protein, 8 aa, Homo sapiens
  misc_feature: Table A; Target 73736; HLA-A*23:01; RLN1; ENSG00000107018; TAA
IANLPPEL

SEQ ID NO: 73737 - protein, 8 aa, Homo sapiens
  misc_feature: Table A; Target 73737; HLA-A*32:01; RLN1; ENSG00000107018; TAA
IANLPPEL

SEQ ID NO: 73738 - protein, 8 aa, Homo sapiens
  misc_feature: Table A; Target 73738; HLA-B*07:02; RLN1; ENSG00000107018; TAA
IANLPPEL

SEQ ID NO: 73739 - protein, 8 aa, Homo sapiens
  misc_feature: Table A; Target 73739; HLA-B*08:01; RLN1; ENSG00000107018; TAA
IANLPPEL

SEQ ID NO: 73740 - protein, 8 aa, Homo sapiens
  misc_feature: Table A; Target 73740; HLA-B*15:03; RLN1; ENSG00000107018; TAA
IANLPPEL

SEQ ID NO: 73741 - protein, 8 aa, Homo sapiens
  misc_feature: Table A; Target 73741; HLA-B*27:02; RLN1; ENSG00000107018; TAA
IANLPPEL

SEQ ID NO: 73742 - protein, 8 aa, Homo sapiens
  misc_feature: Table A; Target 73742; HLA-B*35:01; RLN1; ENSG00000107018; TAA
IANLPPEL

SEQ ID NO: 73743 - protein, 8 aa, Homo sapiens
  misc_feature: Table A; Target 73743; HLA-B*35:03; RLN1; ENSG00000107018; TAA
IANLPPEL

SEQ ID NO: 73744 - protein, 8 aa, Homo sapiens
  misc_feature: Table A; Target 73744; HLA-B*38:01; RLN1; ENSG00000107018; TAA
IANLPPEL

SEQ ID NO: 73745 - protein, 8 aa, Homo sapiens
  misc_feature: Table A; Target 73745; HLA-B*39:01; RLN1; ENSG00000107018; TAA
IANLPPEL

SEQ ID NO: 73746 - protein, 8 aa, Homo sapiens
  misc_feature: Table A; Target 73746; HLA-B*40:02; RLN1; ENSG00000107018; TAA
IANLPPEL

SEQ ID NO: 73747 - protein, 8 aa, Homo sapiens
  misc_feature: Table A; Target 73747; HLA-B*46:01; RLN1; ENSG00000107018; TAA
IANLPPEL

SEQ ID NO: 73748 - protein, 8 aa, Homo sapiens
  misc_feature: Table A; Target 73748; HLA-B*51:01; RLN1; ENSG00000107018; TAA
IANLPPEL

SEQ ID NO: 73749 - protein, 8 aa, Homo sapiens
  misc_feature: Table A; Target 73749; HLA-B*54:01; RLN1; ENSG00000107018; TAA
IANLPPEL

SEQ ID NO: 73750 - protein, 8 aa, Homo sapiens
  misc_feature: Table A; Target 73750; HLA-B*55:01; RLN1; ENSG00000107018; TAA
IANLPPEL

SEQ ID NO: 73751 - protein, 8 aa, Homo sapiens
  misc_feature: Table A; Target 73751; HLA-B*56:01; RLN1; ENSG00000107018; TAA
IANLPPEL

SEQ ID NO: 73752 - protein, 8 aa, Homo sapiens
  misc_feature: Table A; Target 73752; HLA-B*57:01; RLN1; ENSG00000107018; TAA
IANLPPEL

SEQ ID NO: 73753 - protein, 8 aa, Homo sapiens
  misc_feature: Table A; Target 73753; HLA-B*58:01; RLN1; ENSG00000107018; TAA
IANLPPEL

SEQ ID NO: 73754 - protein, 8 aa, Homo sapiens
  misc_feature: Table A; Target 73754; HLA-C*01:02; RLN1; ENSG00000107018; TAA
IANLPPEL

SEQ ID NO: 73755 - protein, 8 aa, Homo sapiens
  misc_feature: Table A; Target 73755; HLA-C*02:02; RLN1; ENSG00000107018; TAA
IANLPPEL

SEQ ID NO: 73756 - protein, 8 aa, Homo sapiens
  misc_feature: Table A; Target 73756; HLA-C*03:03; RLN1; ENSG00000107018; TAA
IANLPPEL

SEQ ID NO: 73757 - protein, 8 aa, Homo sapiens
  misc_feature: Table A; Target 73757; HLA-C*03:04; RLN1; ENSG00000107018; TAA
IANLPPEL

SEQ ID NO: 73758 - protein, 8 aa, Homo sapiens
  misc_feature: Table A; Target 73758; HLA-C*05:01; RLN1; ENSG00000107018; TAA
IANLPPEL

SEQ ID NO: 73759 - protein, 8 aa, Homo sapiens
  misc_feature: Table A; Target 73759; HLA-C*06:02; RLN1; ENSG00000107018; TAA
IANLPPEL

SEQ ID NO: 73760 - protein, 8 aa, Homo sapiens
  misc_feature: Table A; Target 73760; HLA-C*07:01; RLN1; ENSG00000107018; TAA
IANLPPEL

SEQ ID NO: 73761 - protein, 8 aa, Homo sapiens
  misc_feature: Table A; Target 73761; HLA-C*07:02; RLN1; ENSG00000107018; TAA
IANLPPEL

SEQ ID NO: 73762 - protein, 8 aa, Homo sapiens
  misc_feature: Table A; Target 73762; HLA-C*07:04; RLN1; ENSG00000107018; TAA
IANLPPEL

SEQ ID NO: 73763 - protein, 8 aa, Homo sapiens
  misc_feature: Table A; Target 73763; HLA-C*12:03; RLN1; ENSG00000107018; TAA
IANLPPEL

SEQ ID NO: 73764 - protein, 8 aa, Homo sapiens
  misc_feature: Table A; Target 73764; HLA-C*14:02; RLN1; ENSG00000107018; TAA
IANLPPEL

SEQ ID NO: 73765 - protein, 8 aa, Homo sapiens
  misc_feature: Table A; Target 73765; HLA-C*16:01; RLN1; ENSG00000107018; TAA
IANLPPEL

SEQ ID NO: 73766 - protein, 8 aa, Homo sapiens
  misc_feature: Table A; Target 73766; HLA-C*16:02; RLN1; ENSG00000107018; TAA
IANLPPEL

SEQ ID NO: 73767 - protein, 8 aa, Homo sapiens
  misc_feature: Table A; Target 73767; HLA-C*16:04; RLN1; ENSG00000107018; TAA
IANLPPEL

SEQ ID NO: 73768 - protein, 9 aa, Homo sapiens
  misc_feature: Table A; Target 73768; HLA-A*01:01; RLN1; ENSG00000107018; TAA
IANLPPELK

SEQ ID NO: 73769 - protein, 9 aa, Homo sapiens
  misc_feature: Table A; Target 73769; HLA-A*03:01; RLN1; ENSG00000107018; TAA
IANLPPELK

SEQ ID NO: 73770 - protein, 9 aa, Homo sapiens
  misc_feature: Table A; Target 73770; HLA-A*03:02; RLN1; ENSG00000107018; TAA
IANLPPELK

SEQ ID NO: 73771 - protein, 9 aa, Homo sapiens
  misc_feature: Table A; Target 73771; HLA-A*11:01; RLN1; ENSG00000107018; TAA
IANLPPELK

SEQ ID NO: 73772 - protein, 9 aa, Homo sapiens
  misc_feature: Table A; Target 73772; HLA-A*31:01; RLN1; ENSG00000107018; TAA
IANLPPELK

SEQ ID NO: 73773 - protein, 9 aa, Homo sapiens
  misc_feature: Table A; Target 73773; HLA-A*33:01; RLN1; ENSG00000107018; TAA
IANLPPELK

SEQ ID NO: 73774 - protein, 9 aa, Homo sapiens
  misc_feature: Table A; Target 73774; HLA-A*33:03; RLN1; ENSG00000107018; TAA
IANLPPELK

SEQ ID NO: 73775 - protein, 9 aa, Homo sapiens
  misc_feature: Table A; Target 73775; HLA-A*68:01; RLN1; ENSG00000107018; TAA
IANLPPELK

SEQ ID NO: 73776 - protein, 9 aa, Homo sapiens
  misc_feature: Table A; Target 73776; HLA-B*51:01; RLN1; ENSG00000107018; TAA
IANLPPELK

SEQ ID NO: 73777 - protein, 9 aa, Homo sapiens
  misc_feature: Table A; Target 73777; HLA-B*57:01; RLN1; ENSG00000107018; TAA
IANLPPELK

SEQ ID NO: 73778 - protein, 9 aa, Homo sapiens
  misc_feature: Table A; Target 73778; HLA-C*05:01; RLN1; ENSG00000107018; TAA
IANLPPELK

SEQ ID NO: 73779 - protein, 9 aa, Homo sapiens
  misc_feature: Table A; Target 73779; HLA-C*07:06; RLN1; ENSG00000107018; TAA
IANLPPELK

SEQ ID NO: 73780 - protein, 10 aa, Homo sapiens
  misc_feature: Table A; Target 73780; HLA-B*54:01; RLN1; ENSG00000107018; TAA
IANLPPELKA

SEQ ID NO: 73781 - protein, 10 aa, Homo sapiens
  misc_feature: Table A; Target 73781; HLA-B*56:01; RLN1; ENSG00000107018; TAA
IANLPPELKA

SEQ ID NO: 73782 - protein, 11 aa, Homo sapiens
  misc_feature: Table A; Target 73782; HLA-B*54:01; RLN1; ENSG00000107018; TAA
IANLPPELKAA

SEQ ID NO: 73783 - protein, 11 aa, Homo sapiens
  misc_feature: Table A; Target 73783; HLA-B*56:01; RLN1; ENSG00000107018; TAA
IANLPPELKAA

SEQ ID NO: 73784 - protein, 8 aa, Homo sapiens
  misc_feature: Table A; Target 73784; HLA-B*08:01; RLN1; ENSG00000107018; TAA
IGCTKRSL

SEQ ID NO: 73785 - protein, 8 aa, Homo sapiens
  misc_feature: Table A; Target 73785; HLA-C*16:01; RLN1; ENSG00000107018; TAA
IGCTKRSL

SEQ ID NO: 73786 - protein, 9 aa, Homo sapiens
  misc_feature: Table A; Target 73786; HLA-A*02:01; RLN1; ENSG00000107018; TAA
IMLEFIANL

SEQ ID NO: 73787 - protein, 9 aa, Homo sapiens
  misc_feature: Table A; Target 73787; HLA-A*02:03; RLN1; ENSG00000107018; TAA
IMLEFIANL

SEQ ID NO: 73788 - protein, 9 aa, Homo sapiens
  misc_feature: Table A; Target 73788; HLA-A*02:04; RLN1; ENSG00000107018; TAA
IMLEFIANL

SEQ ID NO: 73789 - protein, 9 aa, Homo sapiens
  misc_feature: Table A; Target 73789; HLA-A*02:07; RLN1; ENSG00000107018; TAA
IMLEFIANL

SEQ ID NO: 73790 - protein, 9 aa, Homo sapiens
  misc_feature: Table A; Target 73790; HLA-A*23:01; RLN1; ENSG00000107018; TAA
IMLEFIANL

SEQ ID NO: 73791 - protein, 9 aa, Homo sapiens
  misc_feature: Table A; Target 73791; HLA-A*24:02; RLN1; ENSG00000107018; TAA
IMLEFIANL

SEQ ID NO: 73792 - protein, 9 aa, Homo sapiens
  misc_feature: Table A; Target 73792; HLA-B*55:01; RLN1; ENSG00000107018; TAA
IMLEFIANL

SEQ ID NO: 73793 - protein, 8 aa, Homo sapiens
  misc_feature: Table A; Target 73793; HLA-A*03:02; RLN1; ENSG00000107018; TAA
IVPSFINK

SEQ ID NO: 73794 - protein, 8 aa, Homo sapiens
  misc_feature: Table A; Target 73794; HLA-B*27:02; RLN1; ENSG00000107018; TAA
IVPSFINK

SEQ ID NO: 73795 - protein, 9 aa, Homo sapiens
  misc_feature: Table A; Target 73795; HLA-C*16:01; RLN1; ENSG00000107018; TAA
KAALSERQP

SEQ ID NO: 73796 - protein, 9 aa, Homo sapiens
  misc_feature: Table A; Target 73796; HLA-C*16:02; RLN1; ENSG00000107018; TAA
KAALSERQP

SEQ ID NO: 73797 - protein, 11 aa, Homo sapiens
  misc_feature: Table A; Target 73797; HLA-C*16:01; RLN1; ENSG00000107018; TAA
KAALSERQPSL

SEQ ID NO: 73798 - protein, 10 aa, Homo sapiens
  misc_feature: Table A; Target 73798; HLA-B*27:02; RLN1; ENSG00000107018; TAA
KDSNLSFEEF

SEQ ID NO: 73799 - protein, 8 aa, Homo sapiens
  misc_feature: Table A; Target 73799; HLA-B*37:01; RLN1; ENSG00000107018; TAA
KDTETIII

SEQ ID NO: 73800 - protein, 9 aa, Homo sapiens
  misc_feature: Table A; Target 73800; HLA-A*24:02; RLN1; ENSG00000107018; TAA
KWKDDVIKL

SEQ ID NO: 73801 - protein, 10 aa, Homo sapiens
  misc_feature: Table A; Target 73801; HLA-C*07:01; RLN1; ENSG00000107018; TAA
KYLGLDTHSQ

SEQ ID NO: 73802 - protein, 10 aa, Homo sapiens
  misc_feature: Table A; Target 73802; HLA-C*07:02; RLN1; ENSG00000107018; TAA
KYLGLDTHSQ

SEQ ID NO: 73803 - protein, 11 aa, Homo sapiens
  misc_feature: Table A; Target 73803; HLA-A*31:01; RLN1; ENSG00000107018; TAA
KYLGLDTHSQK

SEQ ID NO: 73804 - protein, 8 aa, Homo sapiens
  misc_feature: Table A; Target 73804; HLA-C*04:01; RLN1; ENSG00000107018; TAA
LDTHSQKK

SEQ ID NO: 73805 - protein, 8 aa, Homo sapiens
  misc_feature: Table A; Target 73805; HLA-C*06:02; RLN1; ENSG00000107018; TAA
LDTHSQKK

SEQ ID NO: 73806 - protein, 8 aa, Homo sapiens
  misc_feature: Table A; Target 73806; HLA-C*07:01; RLN1; ENSG00000107018; TAA
LDTHSQKK

SEQ ID NO: 73807 - protein, 8 aa, Homo sapiens
  misc_feature: Table A; Target 73807; HLA-C*07:02; RLN1; ENSG00000107018; TAA
LDTHSQKK

SEQ ID NO: 73808 - protein, 10 aa, Homo sapiens
  misc_feature: Table A; Target 73808; HLA-B*18:01; RLN1; ENSG00000107018; TAA
LEFCLLLNQF

SEQ ID NO: 73809 - protein, 11 aa, Homo sapiens
  misc_feature: Table A; Target 73809; HLA-B*40:02; RLN1; ENSG00000107018; TAA
LEFIANLPPEL

SEQ ID NO: 73810 - protein, 9 aa, Homo sapiens
  misc_feature: Table A; Target 73810; HLA-A*24:02; RLN1; ENSG00000107018; TAA
LFLFHLLEF

SEQ ID NO: 73811 - protein, 9 aa, Homo sapiens
  misc_feature: Table A; Target 73811; HLA-A*29:02; RLN1; ENSG00000107018; TAA
LFLFHLLEF

SEQ ID NO: 73812 - protein, 8 aa, Homo sapiens
  misc_feature: Table A; Target 73812; HLA-C*06:02; RLN1; ENSG00000107018; TAA
LGLDTHSQ

SEQ ID NO: 73813 - protein, 9 aa, Homo sapiens
  misc_feature: Table A; Target 73813; HLA-A*03:01; RLN1; ENSG00000107018; TAA
LGLDTHSQK

SEQ ID NO: 73814 - protein, 9 aa, Homo sapiens
  misc_feature: Table A; Target 73814; HLA-A*03:02; RLN1; ENSG00000107018; TAA
LGLDTHSQK

SEQ ID NO: 73815 - protein, 9 aa, Homo sapiens
  misc_feature: Table A; Target 73815; HLA-A*11:01; RLN1; ENSG00000107018; TAA
LGLDTHSQK

SEQ ID NO: 73816 - protein, 9 aa, Homo sapiens
  misc_feature: Table A; Target 73816; HLA-B*27:02; RLN1; ENSG00000107018; TAA
LGLDTHSQK

SEQ ID NO: 73817 - protein, 9 aa, Homo sapiens
  misc_feature: Table A; Target 73817; HLA-B*27:05; RLN1; ENSG00000107018; TAA
LGLDTHSQK

SEQ ID NO: 73818 - protein, 9 aa, Homo sapiens
  misc_feature: Table A; Target 73818; HLA-C*07:06; RLN1; ENSG00000107018; TAA
LGLDTHSQK

SEQ ID NO: 73819 - protein, 10 aa, Homo sapiens
  misc_feature: Table A; Target 73819; HLA-A*11:01; RLN1; ENSG00000107018; TAA
LGLDTHSQKK

SEQ ID NO: 73820 - protein, 9 aa, Homo sapiens
  misc_feature: Table A; Target 73820; HLA-A*02:03; RLN1; ENSG00000107018; TAA
LLLNQFSRA

SEQ ID NO: 73821 - protein, 9 aa, Homo sapiens
  misc_feature: Table A; Target 73821; HLA-C*06:02; RLN1; ENSG00000107018; TAA
LLNQFSRAV

SEQ ID NO: 73822 - protein, 10 aa, Homo sapiens
  misc_feature: Table A; Target 73822; HLA-A*02:03; RLN1; ENSG00000107018; TAA
LLNQFSRAVA

SEQ ID NO: 73823 - protein, 11 aa, Homo sapiens
  misc_feature: Table A; Target 73823; HLA-A*02:01; RLN1; ENSG00000107018; TAA
LLNQFSRAVAA

SEQ ID NO: 73824 - protein, 11 aa, Homo sapiens
  misc_feature: Table A; Target 73824; HLA-A*02:03; RLN1; ENSG00000107018; TAA
LLNQFSRAVAA

SEQ ID NO: 73825 - protein, 11 aa, Homo sapiens
  misc_feature: Table A; Target 73825; HLA-B*54:01; RLN1; ENSG00000107018; TAA
LLNQFSRAVAA

SEQ ID NO: 73826 - protein, 8 aa, Homo sapiens
  misc_feature: Table A; Target 73826; HLA-B*51:01; RLN1; ENSG00000107018; TAA
LPELQQYV

SEQ ID NO: 73827 - protein, 9 aa, Homo sapiens
  misc_feature: Table A; Target 73827; HLA-B*54:01; RLN1; ENSG00000107018; TAA
LPELQQYVP

SEQ ID NO: 73828 - protein, 10 aa, Homo sapiens
  misc_feature: Table A; Target 73828; HLA-B*54:01; RLN1; ENSG00000107018; TAA
LPELQQYVPA

SEQ ID NO: 73829 - protein, 10 aa, Homo sapiens
  misc_feature: Table A; Target 73829; HLA-B*56:01; RLN1; ENSG00000107018; TAA
LPELQQYVPA

SEQ ID NO: 73830 - protein, 11 aa, Homo sapiens
  misc_feature: Table A; Target 73830; HLA-B*35:03; RLN1; ENSG00000107018; TAA
LPELQQYVPAL

SEQ ID NO: 73831 - protein, 11 aa, Homo sapiens
  misc_feature: Table A; Target 73831; HLA-C*07:02; RLN1; ENSG00000107018; TAA
LPELQQYVPAL

SEQ ID NO: 73832 - protein, 8 aa, Homo sapiens
  misc_feature: Table A; Target 73832; HLA-B*51:01; RLN1; ENSG00000107018; TAA
LPPELKAA

SEQ ID NO: 73833 - protein, 8 aa, Homo sapiens
  misc_feature: Table A; Target 73833; HLA-B*54:01; RLN1; ENSG00000107018; TAA
LPPELKAA

SEQ ID NO: 73834 - protein, 8 aa, Homo sapiens
  misc_feature: Table A; Target 73834; HLA-B*56:01; RLN1; ENSG00000107018; TAA
LPPELKAA

SEQ ID NO: 73835 - protein, 9 aa, Homo sapiens
  misc_feature: Table A; Target 73835; HLA-A*24:02; RLN1; ENSG00000107018; TAA
LPPELKAAL

SEQ ID NO: 73836 - protein, 9 aa, Homo sapiens
  misc_feature: Table A; Target 73836; HLA-B*07:02; RLN1; ENSG00000107018; TAA
LPPELKAAL

SEQ ID NO: 73837 - protein, 9 aa, Homo sapiens
  misc_feature: Table A; Target 73837; HLA-B*08:01; RLN1; ENSG00000107018; TAA
LPPELKAAL

SEQ ID NO: 73838 - protein, 9 aa, Homo sapiens
  misc_feature: Table A; Target 73838; HLA-B*35:01; RLN1; ENSG00000107018; TAA
LPPELKAAL

SEQ ID NO: 73839 - protein, 9 aa, Homo sapiens
  misc_feature: Table A; Target 73839; HLA-B*35:03; RLN1; ENSG00000107018; TAA
LPPELKAAL

SEQ ID NO: 73840 - protein, 9 aa, Homo sapiens
  misc_feature: Table A; Target 73840; HLA-B*51:01; RLN1; ENSG00000107018; TAA
LPPELKAAL

SEQ ID NO: 73841 - protein, 9 aa, Homo sapiens
  misc_feature: Table A; Target 73841; HLA-B*54:01; RLN1; ENSG00000107018; TAA
LPPELKAAL

SEQ ID NO: 73842 - protein, 9 aa, Homo sapiens
  misc_feature: Table A; Target 73842; HLA-B*56:01; RLN1; ENSG00000107018; TAA
LPPELKAAL

SEQ ID NO: 73843 - protein, 9 aa, Homo sapiens
  misc_feature: Table A; Target 73843; HLA-C*01:02; RLN1; ENSG00000107018; TAA
LPPELKAAL

SEQ ID NO: 73844 - protein, 9 aa, Homo sapiens
  misc_feature: Table A; Target 73844; HLA-C*03:03; RLN1; ENSG00000107018; TAA
LPPELKAAL

SEQ ID NO: 73845 - protein, 9 aa, Homo sapiens
  misc_feature: Table A; Target 73845; HLA-C*07:02; RLN1; ENSG00000107018; TAA
LPPELKAAL

SEQ ID NO: 73846 - protein, 9 aa, Homo sapiens
  misc_feature: Table A; Target 73846; HLA-C*14:02; RLN1; ENSG00000107018; TAA
LPPELKAAL

SEQ ID NO: 73847 - protein, 8 aa, Homo sapiens
  misc_feature: Table A; Target 73847; HLA-A*02:04; RLN1; ENSG00000107018; TAA
LQQYVPAL

SEQ ID NO: 73848 - protein, 8 aa, Homo sapiens
  misc_feature: Table A; Target 73848; HLA-B*13:02; RLN1; ENSG00000107018; TAA
LQQYVPAL

SEQ ID NO: 73849 - protein, 8 aa, Homo sapiens
  misc_feature: Table A; Target 73849; HLA-B*15:01; RLN1; ENSG00000107018; TAA
LQQYVPAL

SEQ ID NO: 73850 - protein, 8 aa, Homo sapiens
  misc_feature: Table A; Target 73850; HLA-B*37:01; RLN1; ENSG00000107018; TAA
LQQYVPAL

SEQ ID NO: 73851 - protein, 8 aa, Homo sapiens
  misc_feature: Table A; Target 73851; HLA-C*03:03; RLN1; ENSG00000107018; TAA
LQQYVPAL

SEQ ID NO: 73852 - protein, 8 aa, Homo sapiens
  misc_feature: Table A; Target 73852; HLA-C*03:04; RLN1; ENSG00000107018; TAA
LQQYVPAL

SEQ ID NO: 73853 - protein, 8 aa, Homo sapiens
  misc_feature: Table A; Target 73853; HLA-C*07:04; RLN1; ENSG00000107018; TAA
LQQYVPAL

SEQ ID NO: 73854 - protein, 9 aa, Homo sapiens
  misc_feature: Table A; Target 73854; HLA-A*03:02; RLN1; ENSG00000107018; TAA
LQQYVPALK

SEQ ID NO: 73855 - protein, 8 aa, Homo sapiens
  misc_feature: Table A; Target 73855; HLA-B*58:01; RLN1; ENSG00000107018; TAA
LSERQPSL

SEQ ID NO: 73856 - protein, 8 aa, Homo sapiens
  misc_feature: Table A; Target 73856; HLA-C*03:04; RLN1; ENSG00000107018; TAA
LSERQPSL

SEQ ID NO: 73857 - protein, 9 aa, Homo sapiens
  misc_feature: Table A; Target 73857; HLA-A*01:01; RLN1; ENSG00000107018; TAA
LSERQPSLP

SEQ ID NO: 73858 - protein, 9 aa, Homo sapiens
  misc_feature: Table A; Target 73858; HLA-B*57:01; RLN1; ENSG00000107018; TAA
LSFEEFKKL

SEQ ID NO: 73859 - protein, 9 aa, Homo sapiens
  misc_feature: Table A; Target 73859; HLA-C*02:02; RLN1; ENSG00000107018; TAA
LSFEEFKKL

SEQ ID NO: 73860 - protein, 10 aa, Homo sapiens
  misc_feature: Table A; Target 73860; HLA-B*57:01; RLN1; ENSG00000107018; TAA
LSFEEFKKLI

SEQ ID NO: 73861 - protein, 11 aa, Homo sapiens
  misc_feature: Table A; Target 73861; HLA-B*27:02; RLN1; ENSG00000107018; TAA
LSQEDAPQTPR

SEQ ID NO: 73862 - protein, 9 aa, Homo sapiens
  misc_feature: Table A; Target 73862; HLA-B*38:01; RLN1; ENSG00000107018; TAA
NKDTETIII

SEQ ID NO: 73863 - protein, 9 aa, Homo sapiens
  misc_feature: Table A; Target 73863; HLA-A*02:03; RLN1; ENSG00000107018; TAA
NLPPELKAA

SEQ ID NO: 73864 - protein, 9 aa, Homo sapiens
  misc_feature: Table A; Target 73864; HLA-A*02:07; RLN1; ENSG00000107018; TAA
NLPPELKAA

SEQ ID NO: 73865 - protein, 10 aa, Homo sapiens
  misc_feature: Table A; Target 73865; HLA-A*02:07; RLN1; ENSG00000107018; TAA
NLPPELKAAL

SEQ ID NO: 73866 - protein, 10 aa, Homo sapiens
  misc_feature: Table A; Target 73866; HLA-C*01:02; RLN1; ENSG00000107018; TAA
NLPPELKAAL

SEQ ID NO: 73867 - protein, 8 aa, Homo sapiens
  misc_feature: Table A; Target 73867; HLA-B*07:02; RLN1; ENSG00000107018; TAA
NPSELKYL

SEQ ID NO: 73868 - protein, 10 aa, Homo sapiens
  misc_feature: Table A; Target 73868; HLA-B*07:02; RLN1; ENSG00000107018; TAA
NPSELKYLGL

SEQ ID NO: 73869 - protein, 10 aa, Homo sapiens
  misc_feature: Table A; Target 73869; HLA-B*35:03; RLN1; ENSG00000107018; TAA
NPSELKYLGL

SEQ ID NO: 73870 - protein, 9 aa, Homo sapiens
  misc_feature: Table A; Target 73870; HLA-A*02:03; RLN1; ENSG00000107018; TAA
NQFSRAVAA

SEQ ID NO: 73871 - protein, 9 aa, Homo sapiens
  misc_feature: Table A; Target 73871; HLA-A*32:01; RLN1; ENSG00000107018; TAA
NQFSRAVAA

SEQ ID NO: 73872 - protein, 9 aa, Homo sapiens
  misc_feature: Table A; Target 73872; HLA-B*08:01; RLN1; ENSG00000107018; TAA
NQFSRAVAA

SEQ ID NO: 73873 - protein, 9 aa, Homo sapiens
  misc_feature: Table A; Target 73873; HLA-B*13:02; RLN1; ENSG00000107018; TAA
NQFSRAVAA

SEQ ID NO: 73874 - protein, 9 aa, Homo sapiens
  misc_feature: Table A; Target 73874; HLA-B*15:01; RLN1; ENSG00000107018; TAA
NQFSRAVAA

SEQ ID NO: 73875 - protein, 9 aa, Homo sapiens
  misc_feature: Table A; Target 73875; HLA-B*18:01; RLN1; ENSG00000107018; TAA
NQFSRAVAA

SEQ ID NO: 73876 - protein, 9 aa, Homo sapiens
  misc_feature: Table A; Target 73876; HLA-B*27:05; RLN1; ENSG00000107018; TAA
NQFSRAVAA

SEQ ID NO: 73877 - protein, 9 aa, Homo sapiens
  misc_feature: Table A; Target 73877; HLA-B*37:01; RLN1; ENSG00000107018; TAA
NQFSRAVAA

SEQ ID NO: 73878 - protein, 9 aa, Homo sapiens
  misc_feature: Table A; Target 73878; HLA-B*39:01; RLN1; ENSG00000107018; TAA
NQFSRAVAA

SEQ ID NO: 73879 - protein, 9 aa, Homo sapiens
  misc_feature: Table A; Target 73879; HLA-B*54:01; RLN1; ENSG00000107018; TAA
NQFSRAVAA

SEQ ID NO: 73880 - protein, 9 aa, Homo sapiens
  misc_feature: Table A; Target 73880; HLA-B*55:01; RLN1; ENSG00000107018; TAA
NQFSRAVAA

SEQ ID NO: 73881 - protein, 9 aa, Homo sapiens
  misc_feature: Table A; Target 73881; HLA-B*56:01; RLN1; ENSG00000107018; TAA
NQFSRAVAA

SEQ ID NO: 73882 - protein, 9 aa, Homo sapiens
  misc_feature: Table A; Target 73882; HLA-C*07:04; RLN1; ENSG00000107018; TAA
NQFSRAVAA

SEQ ID NO: 73883 - protein, 9 aa, Homo sapiens
  misc_feature: Table A; Target 73883; HLA-C*12:03; RLN1; ENSG00000107018; TAA
NQFSRAVAA

SEQ ID NO: 73884 - protein, 9 aa, Homo sapiens
  misc_feature: Table A; Target 73884; HLA-C*14:02; RLN1; ENSG00000107018; TAA
NQFSRAVAA

SEQ ID NO: 73885 - protein, 9 aa, Homo sapiens
  misc_feature: Table A; Target 73885; HLA-C*16:01; RLN1; ENSG00000107018; TAA
NQFSRAVAA

SEQ ID NO: 73886 - protein, 11 aa, Homo sapiens
  misc_feature: Table A; Target 73886; HLA-B*44:02; RLN1; ENSG00000107018; TAA
NQFSRAVAAKW

SEQ ID NO: 73887 - protein, 11 aa, Homo sapiens
  misc_feature: Table A; Target 73887; HLA-B*44:03; RLN1; ENSG00000107018; TAA
NQFSRAVAAKW

SEQ ID NO: 73888 - protein, 10 aa, Homo sapiens
  misc_feature: Table A; Target 73888; HLA-A*24:02; RLN1; ENSG00000107018; TAA
PALKDSNLSF

SEQ ID NO: 73889 - protein, 10 aa, Homo sapiens
  misc_feature: Table A; Target 73889; HLA-B*58:01; RLN1; ENSG00000107018; TAA
PALKDSNLSF

SEQ ID NO: 73890 - protein, 8 aa, Homo sapiens
  misc_feature: Table A; Target 73890; HLA-B*07:02; RLN1; ENSG00000107018; TAA
PPELKAAL

SEQ ID NO: 73891 - protein, 8 aa, Homo sapiens
  misc_feature: Table A; Target 73891; HLA-B*08:01; RLN1; ENSG00000107018; TAA
PPELKAAL

SEQ ID NO: 73892 - protein, 9 aa, Homo sapiens
  misc_feature: Table A; Target 73892; HLA-A*01:01; RLN1; ENSG00000107018; TAA
PSLPELQQY

SEQ ID NO: 73893 - protein, 9 aa, Homo sapiens
  misc_feature: Table A; Target 73893; HLA-A*29:02; RLN1; ENSG00000107018; TAA
PSLPELQQY

SEQ ID NO: 73894 - protein, 9 aa, Homo sapiens
  misc_feature: Table A; Target 73894; HLA-A*30:02; RLN1; ENSG00000107018; TAA
PSLPELQQY

SEQ ID NO: 73895 - protein, 9 aa, Homo sapiens
  misc_feature: Table A; Target 73895; HLA-C*07:01; RLN1; ENSG00000107018; TAA
PSLPELQQY

SEQ ID NO: 73896 - protein, 10 aa, Homo sapiens
  misc_feature: Table A; Target 73896; HLA-A*68:02; RLN1; ENSG00000107018; TAA
PVAEIVPSFI

SEQ ID NO: 73897 - protein, 11 aa, Homo sapiens
  misc_feature: Table A; Target 73897; HLA-B*39:01; RLN1; ENSG00000107018; TAA
QEDAPQTPRPV

SEQ ID NO: 73898 - protein, 11 aa, Homo sapiens
  misc_feature: Table A; Target 73898; HLA-C*04:01; RLN1; ENSG00000107018; TAA
QEDAPQTPRPV

SEQ ID NO: 73899 - protein, 10 aa, Homo sapiens
  misc_feature: Table A; Target 73899; HLA-A*24:02; RLN1; ENSG00000107018; TAA
QFSRAVAAKW

SEQ ID NO: 73900 - protein, 10 aa, Homo sapiens
  misc_feature: Table A; Target 73900; HLA-B*57:01; RLN1; ENSG00000107018; TAA
QFSRAVAAKW

SEQ ID NO: 73901 - protein, 10 aa, Homo sapiens
  misc_feature: Table A; Target 73901; HLA-A*01:01; RLN1; ENSG00000107018; TAA
QPSLPELQQY

SEQ ID NO: 73902 - protein, 10 aa, Homo sapiens
  misc_feature: Table A; Target 73902; HLA-B*27:02; RLN1; ENSG00000107018; TAA
QPSLPELQQY

SEQ ID NO: 73903 - protein, 10 aa, Homo sapiens
  misc_feature: Table A; Target 73903; HLA-B*35:01; RLN1; ENSG00000107018; TAA
QPSLPELQQY

SEQ ID NO: 73904 - protein, 10 aa, Homo sapiens
  misc_feature: Table A; Target 73904; HLA-B*55:01; RLN1; ENSG00000107018; TAA
QPSLPELQQY

SEQ ID NO: 73905 - protein, 10 aa, Homo sapiens
  misc_feature: Table A; Target 73905; HLA-C*03:03; RLN1; ENSG00000107018; TAA
QPSLPELQQY

SEQ ID NO: 73906 - protein, 11 aa, Homo sapiens
  misc_feature: Table A; Target 73906; HLA-B*56:01; RLN1; ENSG00000107018; TAA
QPSLPELQQYV

SEQ ID NO: 73907 - protein, 8 aa, Homo sapiens
  misc_feature: Table A; Target 73907; HLA-A*03:01; RLN1; ENSG00000107018; TAA
QQYVPALK

SEQ ID NO: 73908 - protein, 8 aa, Homo sapiens
  misc_feature: Table A; Target 73908; HLA-A*03:02; RLN1; ENSG00000107018; TAA
QQYVPALK

SEQ ID NO: 73909 - protein, 8 aa, Homo sapiens
  misc_feature: Table A; Target 73909; HLA-A*11:01; RLN1; ENSG00000107018; TAA
QQYVPALK

SEQ ID NO: 73910 - protein, 8 aa, Homo sapiens
  misc_feature: Table A; Target 73910; HLA-B*27:02; RLN1; ENSG00000107018; TAA
QQYVPALK

SEQ ID NO: 73911 - protein, 9 aa, Homo sapiens
  misc_feature: Table A; Target 73911; HLA-C*01:02; RLN1; ENSG00000107018; TAA
QTPRPVAEI

SEQ ID NO: 73912 - protein, 11 aa, Homo sapiens
  misc_feature: Table A; Target 73912; HLA-A*24:02; RLN1; ENSG00000107018; TAA
QYVPALKDSNL

SEQ ID NO: 73913 - protein, 10 aa, Homo sapiens
  misc_feature: Table A; Target 73913; HLA-B*40:02; RLN1; ENSG00000107018; TAA
RELVRAQIAI

SEQ ID NO: 73914 - protein, 8 aa, Homo sapiens
  misc_feature: Table A; Target 73914; HLA-A*02:04; RLN1; ENSG00000107018; TAA
RLFLFHLL

SEQ ID NO: 73915 - protein, 10 aa, Homo sapiens
  misc_feature: Table A; Target 73915; HLA-A*02:04; RLN1; ENSG00000107018; TAA
RLFLFHLLEF

SEQ ID NO: 73916 - protein, 10 aa, Homo sapiens
  misc_feature: Table A; Target 73916; HLA-B*57:01; RLN1; ENSG00000107018; TAA
RLFLFHLLEF

SEQ ID NO: 73917 - protein, 9 aa, Homo sapiens
  misc_feature: Table A; Target 73917; HLA-A*03:01; RLN1; ENSG00000107018; TAA
RPYVALFEK

SEQ ID NO: 73918 - protein, 8 aa, Homo sapiens
  misc_feature: Table A; Target 73918; HLA-B*13:02; RLN1; ENSG00000107018; TAA
RQPSLPEL

SEQ ID NO: 73919 - protein, 8 aa, Homo sapiens
  misc_feature: Table A; Target 73919; HLA-B*15:03; RLN1; ENSG00000107018; TAA
RQPSLPEL

SEQ ID NO: 73920 - protein, 11 aa, Homo sapiens
  misc_feature: Table A; Target 73920; HLA-A*29:02; RLN1; ENSG00000107018; TAA
RQPSLPELQQY

SEQ ID NO: 73921 - protein, 11 aa, Homo sapiens
  misc_feature: Table A; Target 73921; HLA-A*30:02; RLN1; ENSG00000107018; TAA
RQPSLPELQQY

SEQ ID NO: 73922 - protein, 11 aa, Homo sapiens
  misc_feature: Table A; Target 73922; HLA-B*15:01; RLN1; ENSG00000107018; TAA
RQPSLPELQQY

SEQ ID NO: 73923 - protein, 11 aa, Homo sapiens
  misc_feature: Table A; Target 73923; HLA-B*15:03; RLN1; ENSG00000107018; TAA
RQPSLPELQQY

SEQ ID NO: 73924 - protein, 11 aa, Homo sapiens
  misc_feature: Table A; Target 73924; HLA-C*07:04; RLN1; ENSG00000107018; TAA
RQPSLPELQQY

SEQ ID NO: 73925 - protein, 11 aa, Homo sapiens
  misc_feature: Table A; Target 73925; HLA-A*30:01; RLN1; ENSG00000107018; TAA
SEAADSNPSEL

SEQ ID NO: 73926 - protein, 11 aa, Homo sapiens
  misc_feature: Table A; Target 73926; HLA-B*40:01; RLN1; ENSG00000107018; TAA
SEAADSNPSEL

SEQ ID NO: 73927 - protein, 11 aa, Homo sapiens
  misc_feature: Table A; Target 73927; HLA-B*44:03; RLN1; ENSG00000107018; TAA
SEAADSNPSEL

SEQ ID NO: 73928 - protein, 11 aa, Homo sapiens
  misc_feature: Table A; Target 73928; HLA-C*16:04; RLN1; ENSG00000107018; TAA
SEAADSNPSEL

SEQ ID NO: 73929 - protein, 10 aa, Homo sapiens
  misc_feature: Table A; Target 73929; HLA-A*30:01; RLN1; ENSG00000107018; TAA
SERQPSLPEL

SEQ ID NO: 73930 - protein, 10 aa, Homo sapiens
  misc_feature: Table A; Target 73930; HLA-B*40:01; RLN1; ENSG00000107018; TAA
SERQPSLPEL

SEQ ID NO: 73931 - protein, 10 aa, Homo sapiens
  misc_feature: Table A; Target 73931; HLA-B*40:02; RLN1; ENSG00000107018; TAA
SERQPSLPEL

SEQ ID NO: 73932 - protein, 10 aa, Homo sapiens
  misc_feature: Table A; Target 73932; HLA-B*44:02; RLN1; ENSG00000107018; TAA
SERQPSLPEL

SEQ ID NO: 73933 - protein, 10 aa, Homo sapiens
  misc_feature: Table A; Target 73933; HLA-B*44:03; RLN1; ENSG00000107018; TAA
SERQPSLPEL

SEQ ID NO: 73934 - protein, 9 aa, Homo sapiens
  misc_feature: Table A; Target 73934; HLA-A*02:01; RLN1; ENSG00000107018; TAA
SLPELQQYV

SEQ ID NO: 73935 - protein, 9 aa, Homo sapiens
  misc_feature: Table A; Target 73935; HLA-A*02:03; RLN1; ENSG00000107018; TAA
SLPELQQYV

SEQ ID NO: 73936 - protein, 9 aa, Homo sapiens
  misc_feature: Table A; Target 73936; HLA-A*02:04; RLN1; ENSG00000107018; TAA
SLPELQQYV

SEQ ID NO: 73937 - protein, 9 aa, Homo sapiens
  misc_feature: Table A; Target 73937; HLA-A*02:07; RLN1; ENSG00000107018; TAA
SLPELQQYV

SEQ ID NO: 73938 - protein, 9 aa, Homo sapiens
  misc_feature: Table A; Target 73938; HLA-A*68:02; RLN1; ENSG00000107018; TAA
SLPELQQYV

SEQ ID NO: 73939 - protein, 9 aa, Homo sapiens
  misc_feature: Table A; Target 73939; HLA-B*13:02; RLN1; ENSG00000107018; TAA
SLPELQQYV

SEQ ID NO: 73940 - protein, 11 aa, Homo sapiens
  misc_feature: Table A; Target 73940; HLA-A*02:07; RLN1; ENSG00000107018; TAA
SLPELQQYVPA

SEQ ID NO: 73941 - protein, 10 aa, Homo sapiens
  misc_feature: Table A; Target 73941; HLA-A*03:02; RLN1; ENSG00000107018; TAA
SQEDAPQTPR

SEQ ID NO: 73942 - protein, 8 aa, Homo sapiens
  misc_feature: Table A; Target 73942; HLA-C*16:04; RLN1; ENSG00000107018; TAA
SRAVAAKW

SEQ ID NO: 73943 - protein, 8 aa, Homo sapiens
  misc_feature: Table A; Target 73943; HLA-A*30:01; RLN1; ENSG00000107018; TAA
TETIIIML

SEQ ID NO: 73944 - protein, 8 aa, Homo sapiens
  misc_feature: Table A; Target 73944; HLA-B*18:01; RLN1; ENSG00000107018; TAA
TETIIIML

SEQ ID NO: 73945 - protein, 8 aa, Homo sapiens
  misc_feature: Table A; Target 73945; HLA-B*37:01; RLN1; ENSG00000107018; TAA
TETIIIML

SEQ ID NO: 73946 - protein, 8 aa, Homo sapiens
  misc_feature: Table A; Target 73946; HLA-B*40:01; RLN1; ENSG00000107018; TAA
TETIIIML

SEQ ID NO: 73947 - protein, 8 aa, Homo sapiens
  misc_feature: Table A; Target 73947; HLA-B*40:02; RLN1; ENSG00000107018; TAA
TETIIIML

SEQ ID NO: 73948 - protein, 8 aa, Homo sapiens
  misc_feature: Table A; Target 73948; HLA-B*44:02; RLN1; ENSG00000107018; TAA
TETIIIML

SEQ ID NO: 73949 - protein, 8 aa, Homo sapiens
  misc_feature: Table A; Target 73949; HLA-B*49:01; RLN1; ENSG00000107018; TAA
TETIIIML

SEQ ID NO: 73950 - protein, 10 aa, Homo sapiens
  misc_feature: Table A; Target 73950; HLA-B*18:01; RLN1; ENSG00000107018; TAA
TETIIIMLEF

SEQ ID NO: 73951 - protein, 10 aa, Homo sapiens
  misc_feature: Table A; Target 73951; HLA-B*44:02; RLN1; ENSG00000107018; TAA
TETIIIMLEF

SEQ ID NO: 73952 - protein, 10 aa, Homo sapiens
  misc_feature: Table A; Target 73952; HLA-B*44:03; RLN1; ENSG00000107018; TAA
TETIIIMLEF

SEQ ID NO: 73953 - protein, 9 aa, Homo sapiens
  misc_feature: Table A; Target 73953; HLA-A*68:02; RLN1; ENSG00000107018; TAA
TIIIMLEFI

SEQ ID NO: 73954 - protein, 9 aa, Homo sapiens
  misc_feature: Table A; Target 73954; HLA-B*54:01; RLN1; ENSG00000107018; TAA
TPRPVAEIV

SEQ ID NO: 73955 - protein, 9 aa, Homo sapiens
  misc_feature: Table A; Target 73955; HLA-B*07:02; RLN1; ENSG00000107018; TAA
VPALKDSNL

SEQ ID NO: 73956 - protein, 9 aa, Homo sapiens
  misc_feature: Table A; Target 73956; HLA-B*08:01; RLN1; ENSG00000107018; TAA
VPALKDSNL

SEQ ID NO: 73957 - protein, 9 aa, Homo sapiens
  misc_feature: Table A; Target 73957; HLA-B*35:03; RLN1; ENSG00000107018; TAA
VPALKDSNL

SEQ ID NO: 73958 - protein, 9 aa, Homo sapiens
  misc_feature: Table A; Target 73958; HLA-B*55:01; RLN1; ENSG00000107018; TAA
VPALKDSNL

SEQ ID NO: 73959 - protein, 9 aa, Homo sapiens
  misc_feature: Table A; Target 73959; HLA-C*07:02; RLN1; ENSG00000107018; TAA
VPALKDSNL

SEQ ID NO: 73960 - protein, 11 aa, Homo sapiens
  misc_feature: Table A; Target 73960; HLA-B*07:02; RLN1; ENSG00000107018; TAA
VPALKDSNLSF

SEQ ID NO: 73961 - protein, 11 aa, Homo sapiens
  misc_feature: Table A; Target 73961; HLA-B*35:01; RLN1; ENSG00000107018; TAA
VPALKDSNLSF

SEQ ID NO: 73962 - protein, 11 aa, Homo sapiens
  misc_feature: Table A; Target 73962; HLA-C*07:02; RLN1; ENSG00000107018; TAA
VPALKDSNLSF

SEQ ID NO: 73963 - protein, 10 aa, Homo sapiens
  misc_feature: Table A; Target 73963; HLA-B*27:05; RLN1; ENSG00000107018; TAA
VRAQIAICGM

SEQ ID NO: 73964 - protein, 9 aa, Homo sapiens
  misc_feature: Table A; Target 73964; HLA-C*07:01; RLN1; ENSG00000107018; TAA
YLGLDTHSQ

SEQ ID NO: 73965 - protein, 10 aa, Homo sapiens
  misc_feature: Table A; Target 73965; HLA-A*01:01; RLN1; ENSG00000107018; TAA
YLGLDTHSQK

SEQ ID NO: 73966 - protein, 10 aa, Homo sapiens
  misc_feature: Table A; Target 73966; HLA-A*03:01; RLN1; ENSG00000107018; TAA
YLGLDTHSQK

SEQ ID NO: 73967 - protein, 10 aa, Homo sapiens
  misc_feature: Table A; Target 73967; HLA-A*03:02; RLN1; ENSG00000107018; TAA
YLGLDTHSQK

SEQ ID NO: 73968 - protein, 10 aa, Homo sapiens
  misc_feature: Table A; Target 73968; HLA-B*27:02; RLN1; ENSG00000107018; TAA
YLGLDTHSQK

SEQ ID NO: 73969 - protein, 10 aa, Homo sapiens
  misc_feature: Table A; Target 73969; HLA-C*07:01; RLN1; ENSG00000107018; TAA
YLGLDTHSQK

SEQ ID NO: 73970 - protein, 10 aa, Homo sapiens
  misc_feature: Table A; Target 73970; HLA-C*07:02; RLN1; ENSG00000107018; TAA
YLGLDTHSQK

SEQ ID NO: 73971 - protein, 10 aa, Homo sapiens
  misc_feature: Table A; Target 73971; HLA-C*07:04; RLN1; ENSG00000107018; TAA
YLGLDTHSQK

SEQ ID NO: 73972 - protein, 11 aa, Homo sapiens
  misc_feature: Table A; Target 73972; HLA-A*01:01; RLN1; ENSG00000107018; TAA
YLGLDTHSQKK

SEQ ID NO: 73973 - protein, 11 aa, Homo sapiens
  misc_feature: Table A; Target 73973; HLA-A*03:02; RLN1; ENSG00000107018; TAA
YLGLDTHSQKK

SEQ ID NO: 73974 - protein, 11 aa, Homo sapiens
  misc_feature: Table A; Target 73974; HLA-C*07:01; RLN1; ENSG00000107018; TAA
YLGLDTHSQKK

SEQ ID NO: 73975 - protein, 10 aa, Homo sapiens
  misc_feature: Table A; Target 73975; HLA-A*02:07; RLN1; ENSG00000107018; TAA
YVPALKDSNL

SEQ ID NO: 73976 - protein, 10 aa, Homo sapiens
  misc_feature: Table A; Target 73976; HLA-A*26:01; RLN1; ENSG00000107018; TAA
YVPALKDSNL

SEQ ID NO: 73977 - protein, 10 aa, Homo sapiens
  misc_feature: Table A; Target 73977; HLA-C*01:02; RLN1; ENSG00000107018; TAA
YVPALKDSNL

SEQ ID NO: 73978 - protein, 8 aa, Homo sapiens
  misc_feature: Table A; Target 73978; HLA-B*13:02; RLN1,RLN2; ENSG00000107018,ENSG00000107014; TAA,TAA
AEIVPSFI

SEQ ID NO: 73979 - protein, 8 aa, Homo sapiens
  misc_feature: Table A; Target 73979; HLA-B*44:02; RLN1,RLN2; ENSG00000107018,ENSG00000107014; TAA,TAA
AEIVPSFI

SEQ ID NO: 73980 - protein, 8 aa, Homo sapiens
  misc_feature: Table A; Target 73980; HLA-B*44:03; RLN1,RLN2; ENSG00000107018,ENSG00000107014; TAA,TAA
AEIVPSFI

SEQ ID NO: 73981 - protein, 8 aa, Homo sapiens
  misc_feature: Table A; Target 73981; HLA-B*49:01; RLN1,RLN2; ENSG00000107018,ENSG00000107014; TAA,TAA
AEIVPSFI

SEQ ID NO: 73982 - protein, 10 aa, Homo sapiens
  misc_feature: Table A; Target 73982; HLA-A*11:01; RLN1,RLN2; ENSG00000107018,ENSG00000107014; TAA,TAA
AEIVPSFINK

SEQ ID NO: 73983 - protein, 10 aa, Homo sapiens
  misc_feature: Table A; Target 73983; HLA-B*49:01; RLN1,RLN2; ENSG00000107018,ENSG00000107014; TAA,TAA
AEIVPSFINK

SEQ ID NO: 73984 - protein, 8 aa, Homo sapiens
  misc_feature: Table A; Target 73984; HLA-B*07:02; RLN1,RLN2; ENSG00000107018,ENSG00000107014; TAA,TAA
APQTPRPV

SEQ ID NO: 73985 - protein, 8 aa, Homo sapiens
  misc_feature: Table A; Target 73985; HLA-B*56:01; RLN1,RLN2; ENSG00000107018,ENSG00000107014; TAA,TAA
APQTPRPV

SEQ ID NO: 73986 - protein, 8 aa, Homo sapiens
  misc_feature: Table A; Target 73986; HLA-C*07:02; RLN1,RLN2; ENSG00000107018,ENSG00000107014; TAA,TAA
APQTPRPV

SEQ ID NO: 73987 - protein, 9 aa, Homo sapiens
  misc_feature: Table A; Target 73987; HLA-B*07:02; RLN1,RLN2; ENSG00000107018,ENSG00000107014; TAA,TAA
APQTPRPVA

SEQ ID NO: 73988 - protein, 9 aa, Homo sapiens
  misc_feature: Table A; Target 73988; HLA-B*54:01; RLN1,RLN2; ENSG00000107018,ENSG00000107014; TAA,TAA
APQTPRPVA

SEQ ID NO: 73989 - protein, 9 aa, Homo sapiens
  misc_feature: Table A; Target 73989; HLA-B*55:01; RLN1,RLN2; ENSG00000107018,ENSG00000107014; TAA,TAA
APQTPRPVA

SEQ ID NO: 73990 - protein, 9 aa, Homo sapiens
  misc_feature: Table A; Target 73990; HLA-B*56:01; RLN1,RLN2; ENSG00000107018,ENSG00000107014; TAA,TAA
APQTPRPVA

SEQ ID NO: 73991 - protein, 9 aa, Homo sapiens
  misc_feature: Table A; Target 73991; HLA-C*07:02; RLN1,RLN2; ENSG00000107018,ENSG00000107014; TAA,TAA
APQTPRPVA

SEQ ID NO: 73992 - protein, 9 aa, Homo sapiens
  misc_feature: Table A; Target 73992; HLA-C*16:01; RLN1,RLN2; ENSG00000107018,ENSG00000107014; TAA,TAA
APQTPRPVA

SEQ ID NO: 73993 - protein, 11 aa, Homo sapiens
  misc_feature: Table A; Target 73993; HLA-B*07:02; RLN1,RLN2; ENSG00000107018,ENSG00000107014; TAA,TAA
APQTPRPVAEI

SEQ ID NO: 73994 - protein, 11 aa, Homo sapiens
  misc_feature: Table A; Target 73994; HLA-C*07:02; RLN1,RLN2; ENSG00000107018,ENSG00000107014; TAA,TAA
APQTPRPVAEI

SEQ ID NO: 73995 - protein, 8 aa, Homo sapiens
  misc_feature: Table A; Target 73995; HLA-B*13:02; RLN1,RLN2; ENSG00000107018,ENSG00000107014; TAA,TAA
AQIAICGM

SEQ ID NO: 73996 - protein, 8 aa, Homo sapiens
  misc_feature: Table A; Target 73996; HLA-B*15:01; RLN1,RLN2; ENSG00000107018,ENSG00000107014; TAA,TAA
AQIAICGM

SEQ ID NO: 73997 - protein, 8 aa, Homo sapiens
  misc_feature: Table A; Target 73997; HLA-B*15:03; RLN1,RLN2; ENSG00000107018,ENSG00000107014; TAA,TAA
AQIAICGM

SEQ ID NO: 73998 - protein, 8 aa, Homo sapiens
  misc_feature: Table A; Target 73998; HLA-B*37:01; RLN1,RLN2; ENSG00000107018,ENSG00000107014; TAA,TAA
AQIAICGM

SEQ ID NO: 73999 - protein, 8 aa, Homo sapiens
  misc_feature: Table A; Target 73999; HLA-B*51:01; RLN1,RLN2; ENSG00000107018,ENSG00000107014; TAA,TAA
DAPQTPRP

SEQ ID NO: 74000 - protein, 9 aa, Homo sapiens
  misc_feature: Table A; Target 74000; HLA-B*51:01; RLN1,RLN2; ENSG00000107018,ENSG00000107014; TAA,TAA
DAPQTPRPV

SEQ ID NO: 74001 - protein, 9 aa, Homo sapiens
  misc_feature: Table A; Target 74001; HLA-C*01:02; RLN1,RLN2; ENSG00000107018,ENSG00000107014; TAA,TAA
DAPQTPRPV

SEQ ID NO: 74002 - protein, 10 aa, Homo sapiens
  misc_feature: Table A; Target 74002; HLA-B*51:01; RLN1,RLN2; ENSG00000107018,ENSG00000107014; TAA,TAA
DAPQTPRPVA

SEQ ID NO: 74003 - protein, 10 aa, Homo sapiens
  misc_feature: Table A; Target 74003; HLA-B*54:01; RLN1,RLN2; ENSG00000107018,ENSG00000107014; TAA,TAA
DAPQTPRPVA

SEQ ID NO: 74004 - protein, 8 aa, Homo sapiens
  misc_feature: Table A; Target 74004; HLA-A*33:03; RLN1,RLN2; ENSG00000107018,ENSG00000107014; TAA,TAA
EDAPQTPR

SEQ ID NO: 74005 - protein, 8 aa, Homo sapiens
  misc_feature: Table A; Target 74005; HLA-A*68:01; RLN1,RLN2; ENSG00000107018,ENSG00000107014; TAA,TAA
EDAPQTPR

SEQ ID NO: 74006 - protein, 10 aa, Homo sapiens
  misc_feature: Table A; Target 74006; HLA-C*04:01; RLN1,RLN2; ENSG00000107018,ENSG00000107014; TAA,TAA
EDAPQTPRPV

SEQ ID NO: 74007 - protein, 10 aa, Homo sapiens
  misc_feature: Table A; Target 74007; HLA-C*06:02; RLN1,RLN2; ENSG00000107018,ENSG00000107014; TAA,TAA
EDAPQTPRPV

SEQ ID NO: 74008 - protein, 10 aa, Homo sapiens
  misc_feature: Table A; Target 74008; HLA-C*07:01; RLN1,RLN2; ENSG00000107018,ENSG00000107014; TAA,TAA
EDAPQTPRPV

SEQ ID NO: 74009 - protein, 10 aa, Homo sapiens
  misc_feature: Table A; Target 74009; HLA-C*07:02; RLN1,RLN2; ENSG00000107018,ENSG00000107014; TAA,TAA
EDAPQTPRPV

SEQ ID NO: 74010 - protein, 9 aa, Homo sapiens
  misc_feature: Table A; Target 74010; HLA-A*33:01; RLN1,RLN2; ENSG00000107018,ENSG00000107014; TAA,TAA
EFKKLIRNR

SEQ ID NO: 74011 - protein, 9 aa, Homo sapiens
  misc_feature: Table A; Target 74011; HLA-A*33:03; RLN1,RLN2; ENSG00000107018,ENSG00000107014; TAA,TAA
EFKKLIRNR

SEQ ID NO: 74012 - protein, 9 aa, Homo sapiens
  misc_feature: Table A; Target 74012; HLA-A*03:01; RLN1,RLN2; ENSG00000107018,ENSG00000107014; TAA,TAA
EIVPSFINK

SEQ ID NO: 74013 - protein, 9 aa, Homo sapiens
  misc_feature: Table A; Target 74013; HLA-A*03:02; RLN1,RLN2; ENSG00000107018,ENSG00000107014; TAA,TAA
EIVPSFINK

SEQ ID NO: 74014 - protein, 9 aa, Homo sapiens
  misc_feature: Table A; Target 74014; HLA-A*11:01; RLN1,RLN2; ENSG00000107018,ENSG00000107014; TAA,TAA
EIVPSFINK

SEQ ID NO: 74015 - protein, 9 aa, Homo sapiens
  misc_feature: Table A; Target 74015; HLA-A*25:01; RLN1,RLN2; ENSG00000107018,ENSG00000107014; TAA,TAA
EIVPSFINK

SEQ ID NO: 74016 - protein, 9 aa, Homo sapiens
  misc_feature: Table A; Target 74016; HLA-A*33:01; RLN1,RLN2; ENSG00000107018,ENSG00000107014; TAA,TAA
EIVPSFINK

SEQ ID NO: 74017 - protein, 9 aa, Homo sapiens
  misc_feature: Table A; Target 74017; HLA-A*33:03; RLN1,RLN2; ENSG00000107018,ENSG00000107014; TAA,TAA
EIVPSFINK

SEQ ID NO: 74018 - protein, 9 aa, Homo sapiens
  misc_feature: Table A; Target 74018; HLA-A*68:01; RLN1,RLN2; ENSG00000107018,ENSG00000107014; TAA,TAA
EIVPSFINK

SEQ ID NO: 74019 - protein, 9 aa, Homo sapiens
  misc_feature: Table A; Target 74019; HLA-A*68:02; RLN1,RLN2; ENSG00000107018,ENSG00000107014; TAA,TAA
EIVPSFINK

SEQ ID NO: 74020 - protein, 9 aa, Homo sapiens
  misc_feature: Table A; Target 74020; HLA-C*07:06; RLN1,RLN2; ENSG00000107018,ENSG00000107014; TAA,TAA
EIVPSFINK

SEQ ID NO: 74021 - protein, 9 aa, Homo sapiens
  misc_feature: Table A; Target 74021; HLA-A*68:02; RLN1,RLN2; ENSG00000107018,ENSG00000107014; TAA,TAA
ELVRAQIAI

SEQ ID NO: 74022 - protein, 9 aa, Homo sapiens
  misc_feature: Table A; Target 74022; HLA-B*13:02; RLN1,RLN2; ENSG00000107018,ENSG00000107014; TAA,TAA
ELVRAQIAI

SEQ ID NO: 74023 - protein, 9 aa, Homo sapiens
  misc_feature: Table A; Target 74023; HLA-B*13:02; RLN1,RLN2; ENSG00000107018,ENSG00000107014; TAA,TAA
FINKDTETI

SEQ ID NO: 74024 - protein, 9 aa, Homo sapiens
  misc_feature: Table A; Target 74024; HLA-B*38:01; RLN1,RLN2; ENSG00000107018,ENSG00000107014; TAA,TAA
FINKDTETI

SEQ ID NO: 74025 - protein, 9 aa, Homo sapiens
  misc_feature: Table A; Target 74025; HLA-B*46:01; RLN1,RLN2; ENSG00000107018,ENSG00000107014; TAA,TAA
FINKDTETI

SEQ ID NO: 74026 - protein, 9 aa, Homo sapiens
  misc_feature: Table A; Target 74026; HLA-C*05:01; RLN1,RLN2; ENSG00000107018,ENSG00000107014; TAA,TAA
FINKDTETI

SEQ ID NO: 74027 - protein, 9 aa, Homo sapiens
  misc_feature: Table A; Target 74027; HLA-A*23:01; RLN1,RLN2; ENSG00000107018,ENSG00000107014; TAA,TAA
IAICGMSTW

SEQ ID NO: 74028 - protein, 9 aa, Homo sapiens
  misc_feature: Table A; Target 74028; HLA-A*24:02; RLN1,RLN2; ENSG00000107018,ENSG00000107014; TAA,TAA
IAICGMSTW

SEQ ID NO: 74029 - protein, 9 aa, Homo sapiens
  misc_feature: Table A; Target 74029; HLA-A*25:01; RLN1,RLN2; ENSG00000107018,ENSG00000107014; TAA,TAA
IAICGMSTW

SEQ ID NO: 74030 - protein, 9 aa, Homo sapiens
  misc_feature: Table A; Target 74030; HLA-A*26:01; RLN1,RLN2; ENSG00000107018,ENSG00000107014; TAA,TAA
IAICGMSTW

SEQ ID NO: 74031 - protein, 9 aa, Homo sapiens
  misc_feature: Table A; Target 74031; HLA-B*46:01; RLN1,RLN2; ENSG00000107018,ENSG00000107014; TAA,TAA
IAICGMSTW

SEQ ID NO: 74032 - protein, 9 aa, Homo sapiens
  misc_feature: Table A; Target 74032; HLA-B*51:01; RLN1,RLN2; ENSG00000107018,ENSG00000107014; TAA,TAA
IAICGMSTW

SEQ ID NO: 74033 - protein, 9 aa, Homo sapiens
  misc_feature: Table A; Target 74033; HLA-B*57:01; RLN1,RLN2; ENSG00000107018,ENSG00000107014; TAA,TAA
IAICGMSTW

SEQ ID NO: 74034 - protein, 9 aa, Homo sapiens
  misc_feature: Table A; Target 74034; HLA-B*58:01; RLN1,RLN2; ENSG00000107018,ENSG00000107014; TAA,TAA
IAICGMSTW

SEQ ID NO: 74035 - protein, 8 aa, Homo sapiens
  misc_feature: Table A; Target 74035; HLA-A*03:01; RLN1,RLN2; ENSG00000107018,ENSG00000107014; TAA,TAA
IVPSFINK

SEQ ID NO: 74036 - protein, 8 aa, Homo sapiens
  misc_feature: Table A; Target 74036; HLA-A*11:01; RLN1,RLN2; ENSG00000107018,ENSG00000107014; TAA,TAA
IVPSFINK

SEQ ID NO: 74037 - protein, 9 aa, Homo sapiens
  misc_feature: Table A; Target 74037; HLA-A*02:01; RLN1,RLN2; ENSG00000107018,ENSG00000107014; TAA,TAA
LLLNQFSRA

SEQ ID NO: 74038 - protein, 9 aa, Homo sapiens
  misc_feature: Table A; Target 74038; HLA-A*02:04; RLN1,RLN2; ENSG00000107018,ENSG00000107014; TAA,TAA
LLLNQFSRA

SEQ ID NO: 74039 - protein, 9 aa, Homo sapiens
  misc_feature: Table A; Target 74039; HLA-A*02:07; RLN1,RLN2; ENSG00000107018,ENSG00000107014; TAA,TAA
LLLNQFSRA

SEQ ID NO: 74040 - protein, 9 aa, Homo sapiens
  misc_feature: Table A; Target 74040; HLA-A*02:01; RLN1,RLN2; ENSG00000107018,ENSG00000107014; TAA,TAA
LLNQFSRAV

SEQ ID NO: 74041 - protein, 9 aa, Homo sapiens
  misc_feature: Table A; Target 74041; HLA-A*02:03; RLN1,RLN2; ENSG00000107018,ENSG00000107014; TAA,TAA
LLNQFSRAV

SEQ ID NO: 74042 - protein, 9 aa, Homo sapiens
  misc_feature: Table A; Target 74042; HLA-A*02:04; RLN1,RLN2; ENSG00000107018,ENSG00000107014; TAA,TAA
LLNQFSRAV

SEQ ID NO: 74043 - protein, 9 aa, Homo sapiens
  misc_feature: Table A; Target 74043; HLA-A*02:07; RLN1,RLN2; ENSG00000107018,ENSG00000107014; TAA,TAA
LLNQFSRAV

SEQ ID NO: 74044 - protein, 11 aa, Homo sapiens
  misc_feature: Table A; Target 74044; HLA-A*68:01; RLN1,RLN2; ENSG00000107018,ENSG00000107014; TAA,TAA
LSQEDAPQTPR

SEQ ID NO: 74045 - protein, 11 aa, Homo sapiens
  misc_feature: Table A; Target 74045; HLA-C*07:06; RLN1,RLN2; ENSG00000107018,ENSG00000107014; TAA,TAA
LSQEDAPQTPR

SEQ ID NO: 74046 - protein, 9 aa, Homo sapiens
  misc_feature: Table A; Target 74046; HLA-C*16:01; RLN1,RLN2; ENSG00000107018,ENSG00000107014; TAA,TAA
MSTWSKRSL

SEQ ID NO: 74047 - protein, 9 aa, Homo sapiens
  misc_feature: Table A; Target 74047; HLA-A*23:01; RLN1,RLN2; ENSG00000107018,ENSG00000107014; TAA,TAA
PVAEIVPSF

SEQ ID NO: 74048 - protein, 9 aa, Homo sapiens
  misc_feature: Table A; Target 74048; HLA-A*24:02; RLN1,RLN2; ENSG00000107018,ENSG00000107014; TAA,TAA
PVAEIVPSF

SEQ ID NO: 74049 - protein, 9 aa, Homo sapiens
  misc_feature: Table A; Target 74049; HLA-A*25:01; RLN1,RLN2; ENSG00000107018,ENSG00000107014; TAA,TAA
PVAEIVPSF

SEQ ID NO: 74050 - protein, 9 aa, Homo sapiens
  misc_feature: Table A; Target 74050; HLA-A*26:01; RLN1,RLN2; ENSG00000107018,ENSG00000107014; TAA,TAA
PVAEIVPSF

SEQ ID NO: 74051 - protein, 9 aa, Homo sapiens
  misc_feature: Table A; Target 74051; HLA-A*32:01; RLN1,RLN2; ENSG00000107018,ENSG00000107014; TAA,TAA
PVAEIVPSF

SEQ ID NO: 74052 - protein, 9 aa, Homo sapiens
  misc_feature: Table A; Target 74052; HLA-B*35:01; RLN1,RLN2; ENSG00000107018,ENSG00000107014; TAA,TAA
PVAEIVPSF

SEQ ID NO: 74053 - protein, 9 aa, Homo sapiens
  misc_feature: Table A; Target 74053; HLA-B*58:01; RLN1,RLN2; ENSG00000107018,ENSG00000107014; TAA,TAA
PVAEIVPSF

SEQ ID NO: 74054 - protein, 9 aa, Homo sapiens
  misc_feature: Table A; Target 74054; HLA-A*11:01; RLN1,RLN2; ENSG00000107018,ENSG00000107014; TAA,TAA
QEDAPQTPR

SEQ ID NO: 74055 - protein, 9 aa, Homo sapiens
  misc_feature: Table A; Target 74055; HLA-A*33:03; RLN1,RLN2; ENSG00000107018,ENSG00000107014; TAA,TAA
QEDAPQTPR

SEQ ID NO: 74056 - protein, 9 aa, Homo sapiens
  misc_feature: Table A; Target 74056; HLA-A*68:01; RLN1,RLN2; ENSG00000107018,ENSG00000107014; TAA,TAA
QEDAPQTPR

SEQ ID NO: 74057 - protein, 9 aa, Homo sapiens
  misc_feature: Table A; Target 74057; HLA-B*27:02; RLN1,RLN2; ENSG00000107018,ENSG00000107014; TAA,TAA
QEDAPQTPR

SEQ ID NO: 74058 - protein, 9 aa, Homo sapiens
  misc_feature: Table A; Target 74058; HLA-B*27:05; RLN1,RLN2; ENSG00000107018,ENSG00000107014; TAA,TAA
QEDAPQTPR

SEQ ID NO: 74059 - protein, 9 aa, Homo sapiens
  misc_feature: Table A; Target 74059; HLA-C*07:06; RLN1,RLN2; ENSG00000107018,ENSG00000107014; TAA,TAA
QEDAPQTPR

SEQ ID NO: 74060 - protein, 11 aa, Homo sapiens
  misc_feature: Table A; Target 74060; HLA-A*30:01; RLN1,RLN2; ENSG00000107018,ENSG00000107014; TAA,TAA
QEDAPQTPRPV

SEQ ID NO: 74061 - protein, 11 aa, Homo sapiens
  misc_feature: Table A; Target 74061; HLA-B*40:01; RLN1,RLN2; ENSG00000107018,ENSG00000107014; TAA,TAA
QEDAPQTPRPV

SEQ ID NO: 74062 - protein, 11 aa, Homo sapiens
  misc_feature: Table A; Target 74062; HLA-B*49:01; RLN1,RLN2; ENSG00000107018,ENSG00000107014; TAA,TAA
QEDAPQTPRPV

SEQ ID NO: 74063 - protein, 10 aa, Homo sapiens
  misc_feature: Table A; Target 74063; HLA-A*25:01; RLN1,RLN2; ENSG00000107018,ENSG00000107014; TAA,TAA
QIAICGMSTW

SEQ ID NO: 74064 - protein, 9 aa, Homo sapiens
  misc_feature: Table A; Target 74064; HLA-A*25:01; RLN1,RLN2; ENSG00000107018,ENSG00000107014; TAA,TAA
QTPRPVAEI

SEQ ID NO: 74065 - protein, 8 aa, Homo sapiens
  misc_feature: Table A; Target 74065; HLA-B*37:01; RLN1,RLN2; ENSG00000107018,ENSG00000107014; TAA,TAA
RELVRAQI

SEQ ID NO: 74066 - protein, 9 aa, Homo sapiens
  misc_feature: Table A; Target 74066; HLA-B*37:01; RLN1,RLN2; ENSG00000107018,ENSG00000107014; TAA,TAA
RELVRAQIA

SEQ ID NO: 74067 - protein, 10 aa, Homo sapiens
  misc_feature: Table A; Target 74067; HLA-B*07:02; RLN1,RLN2; ENSG00000107018,ENSG00000107014; TAA,TAA
RPVAEIVPSF

SEQ ID NO: 74068 - protein, 10 aa, Homo sapiens
  misc_feature: Table A; Target 74068; HLA-B*35:01; RLN1,RLN2; ENSG00000107018,ENSG00000107014; TAA,TAA
RPVAEIVPSF

SEQ ID NO: 74069 - protein, 10 aa, Homo sapiens
  misc_feature: Table A; Target 74069; HLA-C*07:02; RLN1,RLN2; ENSG00000107018,ENSG00000107014; TAA,TAA
RPVAEIVPSF

SEQ ID NO: 74070 - protein, 8 aa, Homo sapiens
  misc_feature: Table A; Target 74070; HLA-B*37:01; RLN1,RLN2; ENSG00000107018,ENSG00000107014; TAA,TAA
SELKYLGL

SEQ ID NO: 74071 - protein, 9 aa, Homo sapiens
  misc_feature: Table A; Target 74071; HLA-B*39:01; RLN1,RLN2; ENSG00000107018,ENSG00000107014; TAA,TAA
SQEDAPQTP

SEQ ID NO: 74072 - protein, 10 aa, Homo sapiens
  misc_feature: Table A; Target 74072; HLA-A*11:01; RLN1,RLN2; ENSG00000107018,ENSG00000107014; TAA,TAA
SQEDAPQTPR

SEQ ID NO: 74073 - protein, 10 aa, Homo sapiens
  misc_feature: Table A; Target 74073; HLA-A*68:01; RLN1,RLN2; ENSG00000107018,ENSG00000107014; TAA,TAA
SQEDAPQTPR

SEQ ID NO: 74074 - protein, 10 aa, Homo sapiens
  misc_feature: Table A; Target 74074; HLA-B*27:02; RLN1,RLN2; ENSG00000107018,ENSG00000107014; TAA,TAA
SQEDAPQTPR

SEQ ID NO: 74075 - protein, 10 aa, Homo sapiens
  misc_feature: Table A; Target 74075; HLA-B*27:05; RLN1,RLN2; ENSG00000107018,ENSG00000107014; TAA,TAA
SQEDAPQTPR

SEQ ID NO: 74076 - protein, 10 aa, Homo sapiens
  misc_feature: Table A; Target 74076; HLA-C*07:06; RLN1,RLN2; ENSG00000107018,ENSG00000107014; TAA,TAA
SQEDAPQTPR

SEQ ID NO: 74077 - protein, 8 aa, Homo sapiens
  misc_feature: Table A; Target 74077; HLA-B*08:01; RLN1,RLN2; ENSG00000107018,ENSG00000107014; TAA,TAA
STWSKRSL

SEQ ID NO: 74078 - protein, 8 aa, Homo sapiens
  misc_feature: Table A; Target 74078; HLA-B*07:02; RLN1,RLN2; ENSG00000107018,ENSG00000107014; TAA,TAA
TPRPVAEI

SEQ ID NO: 74079 - protein, 8 aa, Homo sapiens
  misc_feature: Table A; Target 74079; HLA-B*51:01; RLN1,RLN2; ENSG00000107018,ENSG00000107014; TAA,TAA
TPRPVAEI

SEQ ID NO: 74080 - protein, 8 aa, Homo sapiens
  misc_feature: Table A; Target 74080; HLA-B*56:01; RLN1,RLN2; ENSG00000107018,ENSG00000107014; TAA,TAA
TPRPVAEI

SEQ ID NO: 74081 - protein, 8 aa, Homo sapiens
  misc_feature: Table A; Target 74081; HLA-C*07:02; RLN1,RLN2; ENSG00000107018,ENSG00000107014; TAA,TAA
TPRPVAEI

SEQ ID NO: 74082 - protein, 9 aa, Homo sapiens
  misc_feature: Table A; Target 74082; HLA-B*07:02; RLN1,RLN2; ENSG00000107018,ENSG00000107014; TAA,TAA
TPRPVAEIV

SEQ ID NO: 74083 - protein, 9 aa, Homo sapiens
  misc_feature: Table A; Target 74083; HLA-B*51:01; RLN1,RLN2; ENSG00000107018,ENSG00000107014; TAA,TAA
TPRPVAEIV

SEQ ID NO: 74084 - protein, 9 aa, Homo sapiens
  misc_feature: Table A; Target 74084; HLA-B*56:01; RLN1,RLN2; ENSG00000107018,ENSG00000107014; TAA,TAA
TPRPVAEIV

SEQ ID NO: 74085 - protein, 9 aa, Homo sapiens
  misc_feature: Table A; Target 74085; HLA-C*07:02; RLN1,RLN2; ENSG00000107018,ENSG00000107014; TAA,TAA
TPRPVAEIV

SEQ ID NO: 74086 - protein, 8 aa, Homo sapiens
  misc_feature: Table A; Target 74086; HLA-C*05:01; RLN1,RLN2; ENSG00000107018,ENSG00000107014; TAA,TAA
VAEIVPSF

SEQ ID NO: 74087 - protein, 9 aa, Homo sapiens
  misc_feature: Table A; Target 74087; HLA-B*51:01; RLN1,RLN2; ENSG00000107018,ENSG00000107014; TAA,TAA
VAEIVPSFI

SEQ ID NO: 74088 - protein, 9 aa, Homo sapiens
  misc_feature: Table A; Target 74088; HLA-C*05:01; RLN1,RLN2; ENSG00000107018,ENSG00000107014; TAA,TAA
VAEIVPSFI

SEQ ID NO: 74089 - protein, 11 aa, Homo sapiens
  misc_feature: Table A; Target 74089; HLA-B*27:02; RLN1,RLN2; ENSG00000107018,ENSG00000107014; TAA,TAA
VAEIVPSFINK

SEQ ID NO: 74090 - protein, 9 aa, Homo sapiens
  misc_feature: Table A; Target 74090; HLA-B*27:05; RLN1,RLN2; ENSG00000107018,ENSG00000107014; TAA,TAA
VRAQIAICG

SEQ ID NO: 74091 - protein, 9 aa, Homo sapiens
  misc_feature: Table A; Target 74091; HLA-C*06:02; RLN1,RLN2; ENSG00000107018,ENSG00000107014; TAA,TAA
VRAQIAICG

SEQ ID NO: 74092 - protein, 9 aa, Homo sapiens
  misc_feature: Table A; Target 74092; HLA-C*07:02; RLN1,RLN2; ENSG00000107018,ENSG00000107014; TAA,TAA
VRAQIAICG

SEQ ID NO: 74093 - protein, 9 aa, Homo sapiens
  misc_feature: Table A; Target 74093; HLA-A*02:07; RLN2; ENSG00000107014; TAA
AADSSPSEL

SEQ ID NO: 74094 - protein, 9 aa, Homo sapiens
  misc_feature: Table A; Target 74094; HLA-A*32:01; RLN2; ENSG00000107014; TAA
AADSSPSEL

SEQ ID NO: 74095 - protein, 9 aa, Homo sapiens
  misc_feature: Table A; Target 74095; HLA-B*07:02; RLN2; ENSG00000107014; TAA
AADSSPSEL

SEQ ID NO: 74096 - protein, 9 aa, Homo sapiens
  misc_feature: Table A; Target 74096; HLA-B*35:01; RLN2; ENSG00000107014; TAA
AADSSPSEL

SEQ ID NO: 74097 - protein, 9 aa, Homo sapiens
  misc_feature: Table A; Target 74097; HLA-B*35:03; RLN2; ENSG00000107014; TAA
AADSSPSEL

SEQ ID NO: 74098 - protein, 9 aa, Homo sapiens
  misc_feature: Table A; Target 74098; HLA-B*38:01; RLN2; ENSG00000107014; TAA
AADSSPSEL

SEQ ID NO: 74099 - protein, 9 aa, Homo sapiens
  misc_feature: Table A; Target 74099; HLA-B*39:01; RLN2; ENSG00000107014; TAA
AADSSPSEL

SEQ ID NO: 74100 - protein, 9 aa, Homo sapiens
  misc_feature: Table A; Target 74100; HLA-B*40:01; RLN2; ENSG00000107014; TAA
AADSSPSEL

SEQ ID NO: 74101 - protein, 9 aa, Homo sapiens
  misc_feature: Table A; Target 74101; HLA-B*55:01; RLN2; ENSG00000107014; TAA
AADSSPSEL

SEQ ID NO: 74102 - protein, 9 aa, Homo sapiens
  misc_feature: Table A; Target 74102; HLA-C*01:02; RLN2; ENSG00000107014; TAA
AADSSPSEL

SEQ ID NO: 74103 - protein, 9 aa, Homo sapiens
  misc_feature: Table A; Target 74103; HLA-C*02:02; RLN2; ENSG00000107014; TAA
AADSSPSEL

SEQ ID NO: 74104 - protein, 9 aa, Homo sapiens
  misc_feature: Table A; Target 74104; HLA-C*03:03; RLN2; ENSG00000107014; TAA
AADSSPSEL

SEQ ID NO: 74105 - protein, 9 aa, Homo sapiens
  misc_feature: Table A; Target 74105; HLA-C*03:04; RLN2; ENSG00000107014; TAA
AADSSPSEL

SEQ ID NO: 74106 - protein, 9 aa, Homo sapiens
  misc_feature: Table A; Target 74106; HLA-C*04:01; RLN2; ENSG00000107014; TAA
AADSSPSEL

SEQ ID NO: 74107 - protein, 9 aa, Homo sapiens
  misc_feature: Table A; Target 74107; HLA-C*05:01; RLN2; ENSG00000107014; TAA
AADSSPSEL

SEQ ID NO: 74108 - protein, 9 aa, Homo sapiens
  misc_feature: Table A; Target 74108; HLA-C*07:02; RLN2; ENSG00000107014; TAA
AADSSPSEL

SEQ ID NO: 74109 - protein, 9 aa, Homo sapiens
  misc_feature: Table A; Target 74109; HLA-C*07:04; RLN2; ENSG00000107014; TAA
AADSSPSEL

SEQ ID NO: 74110 - protein, 9 aa, Homo sapiens
  misc_feature: Table A; Target 74110; HLA-C*12:03; RLN2; ENSG00000107014; TAA
AADSSPSEL

SEQ ID NO: 74111 - protein, 9 aa, Homo sapiens
  misc_feature: Table A; Target 74111; HLA-C*14:02; RLN2; ENSG00000107014; TAA
AADSSPSEL

SEQ ID NO: 74112 - protein, 9 aa, Homo sapiens
  misc_feature: Table A; Target 74112; HLA-C*16:02; RLN2; ENSG00000107014; TAA
AADSSPSEL

SEQ ID NO: 74113 - protein, 9 aa, Homo sapiens
  misc_feature: Table A; Target 74113; HLA-C*16:04; RLN2; ENSG00000107014; TAA
AADSSPSEL

SEQ ID NO: 74114 - protein, 10 aa, Homo sapiens
  misc_feature: Table A; Target 74114; HLA-A*01:01; RLN2; ENSG00000107014; TAA
AADSSPSELK

SEQ ID NO: 74115 - protein, 10 aa, Homo sapiens
  misc_feature: Table A; Target 74115; HLA-A*03:01; RLN2; ENSG00000107014; TAA
AADSSPSELK

SEQ ID NO: 74116 - protein, 10 aa, Homo sapiens
  misc_feature: Table A; Target 74116; HLA-A*03:02; RLN2; ENSG00000107014; TAA
AADSSPSELK

SEQ ID NO: 74117 - protein, 10 aa, Homo sapiens
  misc_feature: Table A; Target 74117; HLA-A*11:01; RLN2; ENSG00000107014; TAA
AADSSPSELK

SEQ ID NO: 74118 - protein, 10 aa, Homo sapiens
  misc_feature: Table A; Target 74118; HLA-C*05:01; RLN2; ENSG00000107014; TAA
AADSSPSELK

SEQ ID NO: 74119 - protein, 10 aa, Homo sapiens
  misc_feature: Table A; Target 74119; HLA-C*07:06; RLN2; ENSG00000107014; TAA
AADSSPSELK

SEQ ID NO: 74120 - protein, 11 aa, Homo sapiens
  misc_feature: Table A; Target 74120; HLA-A*01:01; RLN2; ENSG00000107014; TAA
AADSSPSELKY

SEQ ID NO: 74121 - protein, 11 aa, Homo sapiens
  misc_feature: Table A; Target 74121; HLA-A*29:02; RLN2; ENSG00000107014; TAA
AADSSPSELKY

SEQ ID NO: 74122 - protein, 11 aa, Homo sapiens
  misc_feature: Table A; Target 74122; HLA-A*30:02; RLN2; ENSG00000107014; TAA
AADSSPSELKY

SEQ ID NO: 74123 - protein, 11 aa, Homo sapiens
  misc_feature: Table A; Target 74123; HLA-B*27:05; RLN2; ENSG00000107014; TAA
AADSSPSELKY

SEQ ID NO: 74124 - protein, 11 aa, Homo sapiens
  misc_feature: Table A; Target 74124; HLA-B*35:01; RLN2; ENSG00000107014; TAA
AADSSPSELKY

SEQ ID NO: 74125 - protein, 11 aa, Homo sapiens
  misc_feature: Table A; Target 74125; HLA-B*55:01; RLN2; ENSG00000107014; TAA
AADSSPSELKY

SEQ ID NO: 74126 - protein, 11 aa, Homo sapiens
  misc_feature: Table A; Target 74126; HLA-C*03:03; RLN2; ENSG00000107014; TAA
AADSSPSELKY

SEQ ID NO: 74127 - protein, 11 aa, Homo sapiens
  misc_feature: Table A; Target 74127; HLA-C*05:01; RLN2; ENSG00000107014; TAA
AADSSPSELKY

SEQ ID NO: 74128 - protein, 11 aa, Homo sapiens
  misc_feature: Table A; Target 74128; HLA-C*16:04; RLN2; ENSG00000107014; TAA
AADSSPSELKY

SEQ ID NO: 74129 - protein, 8 aa, Homo sapiens
  misc_feature: Table A; Target 74129; HLA-B*37:01; RLN2; ENSG00000107014; TAA
ADSSPSEL

SEQ ID NO: 74130 - protein, 9 aa, Homo sapiens
  misc_feature: Table A; Target 74130; HLA-A*03:02; RLN2; ENSG00000107014; TAA
ADSSPSELK

SEQ ID NO: 74131 - protein, 9 aa, Homo sapiens
  misc_feature: Table A; Target 74131; HLA-A*11:01; RLN2; ENSG00000107014; TAA
ADSSPSELK

SEQ ID NO: 74132 - protein, 9 aa, Homo sapiens
  misc_feature: Table A; Target 74132; HLA-B*27:02; RLN2; ENSG00000107014; TAA
ADSSPSELK

SEQ ID NO: 74133 - protein, 10 aa, Homo sapiens
  misc_feature: Table A; Target 74133; HLA-A*11:01; RLN2; ENSG00000107014; TAA
ADSSPSELKY

SEQ ID NO: 74134 - protein, 10 aa, Homo sapiens
  misc_feature: Table A; Target 74134; HLA-A*29:02; RLN2; ENSG00000107014; TAA
ADSSPSELKY

SEQ ID NO: 74135 - protein, 10 aa, Homo sapiens
  misc_feature: Table A; Target 74135; HLA-A*30:02; RLN2; ENSG00000107014; TAA
ADSSPSELKY

SEQ ID NO: 74136 - protein, 10 aa, Homo sapiens
  misc_feature: Table A; Target 74136; HLA-B*27:02; RLN2; ENSG00000107014; TAA
ADSSPSELKY

SEQ ID NO: 74137 - protein, 10 aa, Homo sapiens
  misc_feature: Table A; Target 74137; HLA-B*37:01; RLN2; ENSG00000107014; TAA
ADSSPSELKY

SEQ ID NO: 74138 - protein, 10 aa, Homo sapiens
  misc_feature: Table A; Target 74138; HLA-B*44:02; RLN2; ENSG00000107014; TAA
ADSSPSELKY

SEQ ID NO: 74139 - protein, 10 aa, Homo sapiens
  misc_feature: Table A; Target 74139; HLA-B*44:03; RLN2; ENSG00000107014; TAA
ADSSPSELKY

SEQ ID NO: 74140 - protein, 10 aa, Homo sapiens
  misc_feature: Table A; Target 74140; HLA-C*07:01; RLN2; ENSG00000107014; TAA
ADSSPSELKY

SEQ ID NO: 74141 - protein, 10 aa, Homo sapiens
  misc_feature: Table A; Target 74141; HLA-C*07:02; RLN2; ENSG00000107014; TAA
ADSSPSELKY

SEQ ID NO: 74142 - protein, 10 aa, Homo sapiens
  misc_feature: Table A; Target 74142; HLA-C*12:03; RLN2; ENSG00000107014; TAA
ADSSPSELKY

SEQ ID NO: 74143 - protein, 10 aa, Homo sapiens
  misc_feature: Table A; Target 74143; HLA-C*16:01; RLN2; ENSG00000107014; TAA
ADSSPSELKY

SEQ ID NO: 74144 - protein, 10 aa, Homo sapiens
  misc_feature: Table A; Target 74144; HLA-C*16:02; RLN2; ENSG00000107014; TAA
ADSSPSELKY

SEQ ID NO: 74145 - protein, 10 aa, Homo sapiens
  misc_feature: Table A; Target 74145; HLA-C*16:04; RLN2; ENSG00000107014; TAA
ADSSPSELKY

SEQ ID NO: 74146 - protein, 11 aa, Homo sapiens
  misc_feature: Table A; Target 74146; HLA-B*44:02; RLN2; ENSG00000107014; TAA
ADSSPSELKYL

SEQ ID NO: 74147 - protein, 11 aa, Homo sapiens
  misc_feature: Table A; Target 74147; HLA-B*44:03; RLN2; ENSG00000107014; TAA
ADSSPSELKYL

SEQ ID NO: 74148 - protein, 11 aa, Homo sapiens
  misc_feature: Table A; Target 74148; HLA-C*16:02; RLN2; ENSG00000107014; TAA
ADSSPSELKYL

SEQ ID NO: 74149 - protein, 8 aa, Homo sapiens
  misc_feature: Table A; Target 74149; HLA-B*37:01; RLN2; ENSG00000107014; TAA
ADSWMEEV

SEQ ID NO: 74150 - protein, 9 aa, Homo sapiens
  misc_feature: Table A; Target 74150; HLA-A*02:07; RLN2; ENSG00000107014; TAA
ALPQLQQHV

SEQ ID NO: 74151 - protein, 9 aa, Homo sapiens
  misc_feature: Table A; Target 74151; HLA-B*13:02; RLN2; ENSG00000107014; TAA
ALPQLQQHV

SEQ ID NO: 74152 - protein, 11 aa, Homo sapiens
  misc_feature: Table A; Target 74152; HLA-A*02:07; RLN2; ENSG00000107014; TAA
ALPQLQQHVPV

SEQ ID NO: 74153 - protein, 9 aa, Homo sapiens
  misc_feature: Table A; Target 74153; HLA-A*23:01; RLN2; ENSG00000107014; TAA
ANLPQELKL

SEQ ID NO: 74154 - protein, 10 aa, Homo sapiens
  misc_feature: Table A; Target 74154; HLA-A*02:03; RLN2; ENSG00000107014; TAA
AVADSWMEEV

SEQ ID NO: 74155 - protein, 9 aa, Homo sapiens
  misc_feature: Table A; Target 74155; HLA-A*01:01; RLN2; ENSG00000107014; TAA
DSSLLFEEF

SEQ ID NO: 74156 - protein, 9 aa, Homo sapiens
  misc_feature: Table A; Target 74156; HLA-A*25:01; RLN2; ENSG00000107014; TAA
DSSLLFEEF

SEQ ID NO: 74157 - protein, 9 aa, Homo sapiens
  misc_feature: Table A; Target 74157; HLA-A*33:01; RLN2; ENSG00000107014; TAA
DSSLLFEEF

SEQ ID NO: 74158 - protein, 9 aa, Homo sapiens
  misc_feature: Table A; Target 74158; HLA-B*18:01; RLN2; ENSG00000107014; TAA
DSSLLFEEF

SEQ ID NO: 74159 - protein, 9 aa, Homo sapiens
  misc_feature: Table A; Target 74159; HLA-B*27:02; RLN2; ENSG00000107014; TAA
DSSLLFEEF

SEQ ID NO: 74160 - protein, 9 aa, Homo sapiens
  misc_feature: Table A; Target 74160; HLA-B*35:01; RLN2; ENSG00000107014; TAA
DSSLLFEEF

SEQ ID NO: 74161 - protein, 10 aa, Homo sapiens
  misc_feature: Table A; Target 74161; HLA-B*27:02; RLN2; ENSG00000107014; TAA
DSSLLFEEFK

SEQ ID NO: 74162 - protein, 9 aa, Homo sapiens
  misc_feature: Table A; Target 74162; HLA-A*01:01; RLN2; ENSG00000107014; TAA
DSSPSELKY

SEQ ID NO: 74163 - protein, 9 aa, Homo sapiens
  misc_feature: Table A; Target 74163; HLA-A*25:01; RLN2; ENSG00000107014; TAA
DSSPSELKY

SEQ ID NO: 74164 - protein, 9 aa, Homo sapiens
  misc_feature: Table A; Target 74164; HLA-A*26:01; RLN2; ENSG00000107014; TAA
DSSPSELKY

SEQ ID NO: 74165 - protein, 9 aa, Homo sapiens
  misc_feature: Table A; Target 74165; HLA-A*29:02; RLN2; ENSG00000107014; TAA
DSSPSELKY

SEQ ID NO: 74166 - protein, 9 aa, Homo sapiens
  misc_feature: Table A; Target 74166; HLA-A*30:02; RLN2; ENSG00000107014; TAA
DSSPSELKY

SEQ ID NO: 74167 - protein, 9 aa, Homo sapiens
  misc_feature: Table A; Target 74167; HLA-A*68:01; RLN2; ENSG00000107014; TAA
DSSPSELKY

SEQ ID NO: 74168 - protein, 9 aa, Homo sapiens
  misc_feature: Table A; Target 74168; HLA-B*18:01; RLN2; ENSG00000107014; TAA
DSSPSELKY

SEQ ID NO: 74169 - protein, 9 aa, Homo sapiens
  misc_feature: Table A; Target 74169; HLA-B*35:01; RLN2; ENSG00000107014; TAA
DSSPSELKY

SEQ ID NO: 74170 - protein, 9 aa, Homo sapiens
  misc_feature: Table A; Target 74170; HLA-B*39:01; RLN2; ENSG00000107014; TAA
DSSPSELKY

SEQ ID NO: 74171 - protein, 9 aa, Homo sapiens
  misc_feature: Table A; Target 74171; HLA-B*44:03; RLN2; ENSG00000107014; TAA
DSSPSELKY

SEQ ID NO: 74172 - protein, 9 aa, Homo sapiens
  misc_feature: Table A; Target 74172; HLA-B*58:01; RLN2; ENSG00000107014; TAA
DSSPSELKY

SEQ ID NO: 74173 - protein, 9 aa, Homo sapiens
  misc_feature: Table A; Target 74173; HLA-C*03:03; RLN2; ENSG00000107014; TAA
DSSPSELKY

SEQ ID NO: 74174 - protein, 9 aa, Homo sapiens
  misc_feature: Table A; Target 74174; HLA-C*07:06; RLN2; ENSG00000107014; TAA
DSSPSELKY

SEQ ID NO: 74175 - protein, 9 aa, Homo sapiens
  misc_feature: Table A; Target 74175; HLA-C*16:01; RLN2; ENSG00000107014; TAA
DSSPSELKY

SEQ ID NO: 74176 - protein, 9 aa, Homo sapiens
  misc_feature: Table A; Target 74176; HLA-C*16:02; RLN2; ENSG00000107014; TAA
DSSPSELKY

SEQ ID NO: 74177 - protein, 10 aa, Homo sapiens
  misc_feature: Table A; Target 74177; HLA-C*07:02; RLN2; ENSG00000107014; TAA
DSSPSELKYL

SEQ ID NO: 74178 - protein, 8 aa, Homo sapiens
  misc_feature: Table A; Target 74178; HLA-B*51:01; RLN2; ENSG00000107014; TAA
DSWMEEVI

SEQ ID NO: 74179 - protein, 8 aa, Homo sapiens
  misc_feature: Table A; Target 74179; HLA-C*07:01; RLN2; ENSG00000107014; TAA
DTETINMM

SEQ ID NO: 74180 - protein, 11 aa, Homo sapiens
  misc_feature: Table A; Target 74180; HLA-A*25:01; RLN2; ENSG00000107014; TAA
DTETINMMSEF

SEQ ID NO: 74181 - protein, 11 aa, Homo sapiens
  misc_feature: Table A; Target 74181; HLA-A*26:01; RLN2; ENSG00000107014; TAA
DTETINMMSEF

SEQ ID NO: 74182 - protein, 10 aa, Homo sapiens
  misc_feature: Table A; Target 74182; HLA-A*25:01; RLN2; ENSG00000107014; TAA
EAADSSPSEL

SEQ ID NO: 74183 - protein, 10 aa, Homo sapiens
  misc_feature: Table A; Target 74183; HLA-A*26:01; RLN2; ENSG00000107014; TAA
EAADSSPSEL

SEQ ID NO: 74184 - protein, 10 aa, Homo sapiens
  misc_feature: Table A; Target 74184; HLA-A*68:01; RLN2; ENSG00000107014; TAA
EAADSSPSEL

SEQ ID NO: 74185 - protein, 10 aa, Homo sapiens
  misc_feature: Table A; Target 74185; HLA-B*39:01; RLN2; ENSG00000107014; TAA
EAADSSPSEL

SEQ ID NO: 74186 - protein, 11 aa, Homo sapiens
  misc_feature: Table A; Target 74186; HLA-A*11:01; RLN2; ENSG00000107014; TAA
EAADSSPSELK

SEQ ID NO: 74187 - protein, 11 aa, Homo sapiens
  misc_feature: Table A; Target 74187; HLA-A*33:01; RLN2; ENSG00000107014; TAA
EAADSSPSELK

SEQ ID NO: 74188 - protein, 11 aa, Homo sapiens
  misc_feature: Table A; Target 74188; HLA-A*33:03; RLN2; ENSG00000107014; TAA
EAADSSPSELK

SEQ ID NO: 74189 - protein, 11 aa, Homo sapiens
  misc_feature: Table A; Target 74189; HLA-A*68:01; RLN2; ENSG00000107014; TAA
EAADSSPSELK

SEQ ID NO: 74190 - protein, 11 aa, Homo sapiens
  misc_feature: Table A; Target 74190; HLA-A*68:02; RLN2; ENSG00000107014; TAA
EAADSSPSELK

SEQ ID NO: 74191 - protein, 11 aa, Homo sapiens
  misc_feature: Table A; Target 74191; HLA-C*07:06; RLN2; ENSG00000107014; TAA
EAADSSPSELK

SEQ ID NO: 74192 - protein, 9 aa, Homo sapiens
  misc_feature: Table A; Target 74192; HLA-A*26:01; RLN2; ENSG00000107014; TAA
ELKLTLSEM

SEQ ID NO: 74193 - protein, 9 aa, Homo sapiens
  misc_feature: Table A; Target 74193; HLA-B*08:01; RLN2; ENSG00000107014; TAA
ELKLTLSEM

SEQ ID NO: 74194 - protein, 9 aa, Homo sapiens
  misc_feature: Table A; Target 74194; HLA-A*02:01; RLN2; ENSG00000107014; TAA
EMQPALPQL

SEQ ID NO: 74195 - protein, 9 aa, Homo sapiens
  misc_feature: Table A; Target 74195; HLA-A*02:03; RLN2; ENSG00000107014; TAA
EMQPALPQL

SEQ ID NO: 74196 - protein, 9 aa, Homo sapiens
  misc_feature: Table A; Target 74196; HLA-A*02:04; RLN2; ENSG00000107014; TAA
EMQPALPQL

SEQ ID NO: 74197 - protein, 9 aa, Homo sapiens
  misc_feature: Table A; Target 74197; HLA-A*02:07; RLN2; ENSG00000107014; TAA
EMQPALPQL

SEQ ID NO: 74198 - protein, 9 aa, Homo sapiens
  misc_feature: Table A; Target 74198; HLA-A*03:02; RLN2; ENSG00000107014; TAA
EMQPALPQL

SEQ ID NO: 74199 - protein, 9 aa, Homo sapiens
  misc_feature: Table A; Target 74199; HLA-A*23:01; RLN2; ENSG00000107014; TAA
EMQPALPQL

SEQ ID NO: 74200 - protein, 9 aa, Homo sapiens
  misc_feature: Table A; Target 74200; HLA-A*24:02; RLN2; ENSG00000107014; TAA
EMQPALPQL

SEQ ID NO: 74201 - protein, 9 aa, Homo sapiens
  misc_feature: Table A; Target 74201; HLA-A*25:01; RLN2; ENSG00000107014; TAA
EMQPALPQL

SEQ ID NO: 74202 - protein, 9 aa, Homo sapiens
  misc_feature: Table A; Target 74202; HLA-A*26:01; RLN2; ENSG00000107014; TAA
EMQPALPQL

SEQ ID NO: 74203 - protein, 9 aa, Homo sapiens
  misc_feature: Table A; Target 74203; HLA-A*31:01; RLN2; ENSG00000107014; TAA
EMQPALPQL

SEQ ID NO: 74204 - protein, 9 aa, Homo sapiens
  misc_feature: Table A; Target 74204; HLA-A*32:01; RLN2; ENSG00000107014; TAA
EMQPALPQL

SEQ ID NO: 74205 - protein, 9 aa, Homo sapiens
  misc_feature: Table A; Target 74205; HLA-A*33:01; RLN2; ENSG00000107014; TAA
EMQPALPQL

SEQ ID NO: 74206 - protein, 9 aa, Homo sapiens
  misc_feature: Table A; Target 74206; HLA-A*33:03; RLN2; ENSG00000107014; TAA
EMQPALPQL

SEQ ID NO: 74207 - protein, 9 aa, Homo sapiens
  misc_feature: Table A; Target 74207; HLA-A*68:02; RLN2; ENSG00000107014; TAA
EMQPALPQL

SEQ ID NO: 74208 - protein, 9 aa, Homo sapiens
  misc_feature: Table A; Target 74208; HLA-B*08:01; RLN2; ENSG00000107014; TAA
EMQPALPQL

SEQ ID NO: 74209 - protein, 9 aa, Homo sapiens
  misc_feature: Table A; Target 74209; HLA-B*38:01; RLN2; ENSG00000107014; TAA
EMQPALPQL

SEQ ID NO: 74210 - protein, 9 aa, Homo sapiens
  misc_feature: Table A; Target 74210; HLA-B*39:01; RLN2; ENSG00000107014; TAA
EMQPALPQL

SEQ ID NO: 74211 - protein, 9 aa, Homo sapiens
  misc_feature: Table A; Target 74211; HLA-B*40:02; RLN2; ENSG00000107014; TAA
EMQPALPQL

SEQ ID NO: 74212 - protein, 9 aa, Homo sapiens
  misc_feature: Table A; Target 74212; HLA-B*51:01; RLN2; ENSG00000107014; TAA
EMQPALPQL

SEQ ID NO: 74213 - protein, 9 aa, Homo sapiens
  misc_feature: Table A; Target 74213; HLA-B*55:01; RLN2; ENSG00000107014; TAA
EMQPALPQL

SEQ ID NO: 74214 - protein, 9 aa, Homo sapiens
  misc_feature: Table A; Target 74214; HLA-C*04:01; RLN2; ENSG00000107014; TAA
EMQPALPQL

SEQ ID NO: 74215 - protein, 9 aa, Homo sapiens
  misc_feature: Table A; Target 74215; HLA-C*06:02; RLN2; ENSG00000107014; TAA
EMQPALPQL

SEQ ID NO: 74216 - protein, 9 aa, Homo sapiens
  misc_feature: Table A; Target 74216; HLA-C*07:04; RLN2; ENSG00000107014; TAA
EMQPALPQL

SEQ ID NO: 74217 - protein, 9 aa, Homo sapiens
  misc_feature: Table A; Target 74217; HLA-C*14:02; RLN2; ENSG00000107014; TAA
EMQPALPQL

SEQ ID NO: 74218 - protein, 9 aa, Homo sapiens
  misc_feature: Table A; Target 74218; HLA-A*25:01; RLN2; ENSG00000107014; TAA
ETINMMSEF

SEQ ID NO: 74219 - protein, 9 aa, Homo sapiens
  misc_feature: Table A; Target 74219; HLA-A*26:01; RLN2; ENSG00000107014; TAA
ETINMMSEF

SEQ ID NO: 74220 - protein, 9 aa, Homo sapiens
  misc_feature: Table A; Target 74220; HLA-A*33:01; RLN2; ENSG00000107014; TAA
ETINMMSEF

SEQ ID NO: 74221 - protein, 9 aa, Homo sapiens
  misc_feature: Table A; Target 74221; HLA-A*33:03; RLN2; ENSG00000107014; TAA
ETINMMSEF

SEQ ID NO: 74222 - protein, 9 aa, Homo sapiens
  misc_feature: Table A; Target 74222; HLA-A*68:01; RLN2; ENSG00000107014; TAA
ETINMMSEF

SEQ ID NO: 74223 - protein, 9 aa, Homo sapiens
  misc_feature: Table A; Target 74223; HLA-A*68:02; RLN2; ENSG00000107014; TAA
ETINMMSEF

SEQ ID NO: 74224 - protein, 9 aa, Homo sapiens
  misc_feature: Table A; Target 74224; HLA-B*18:01; RLN2; ENSG00000107014; TAA
ETINMMSEF

SEQ ID NO: 74225 - protein, 9 aa, Homo sapiens
  misc_feature: Table A; Target 74225; HLA-B*44:03; RLN2; ENSG00000107014; TAA
ETINMMSEF

SEQ ID NO: 74226 - protein, 9 aa, Homo sapiens
  misc_feature: Table A; Target 74226; HLA-B*46:01; RLN2; ENSG00000107014; TAA
ETINMMSEF

SEQ ID NO: 74227 - protein, 9 aa, Homo sapiens
  misc_feature: Table A; Target 74227; HLA-B*58:01; RLN2; ENSG00000107014; TAA
ETINMMSEF

SEQ ID NO: 74228 - protein, 9 aa, Homo sapiens
  misc_feature: Table A; Target 74228; HLA-C*07:06; RLN2; ENSG00000107014; TAA
ETINMMSEF

SEQ ID NO: 74229 - protein, 10 aa, Homo sapiens
  misc_feature: Table A; Target 74229; HLA-A*26:01; RLN2; ENSG00000107014; TAA
ETINMMSEFV

SEQ ID NO: 74230 - protein, 10 aa, Homo sapiens
  misc_feature: Table A; Target 74230; HLA-A*68:02; RLN2; ENSG00000107014; TAA
ETINMMSEFV

SEQ ID NO: 74231 - protein, 8 aa, Homo sapiens
  misc_feature: Table A; Target 74231; HLA-A*33:03; RLN2; ENSG00000107014; TAA
EVIKLCGR

SEQ ID NO: 74232 - protein, 9 aa, Homo sapiens
  misc_feature: Table A; Target 74232; HLA-A*02:03; RLN2; ENSG00000107014; TAA
FINKDTETI

SEQ ID NO: 74233 - protein, 9 aa, Homo sapiens
  misc_feature: Table A; Target 74233; HLA-A*02:07; RLN2; ENSG00000107014; TAA
FINKDTETI

SEQ ID NO: 74234 - protein, 9 aa, Homo sapiens
  misc_feature: Table A; Target 74234; HLA-A*25:01; RLN2; ENSG00000107014; TAA
FINKDTETI

SEQ ID NO: 74235 - protein, 9 aa, Homo sapiens
  misc_feature: Table A; Target 74235; HLA-B*35:03; RLN2; ENSG00000107014; TAA
FINKDTETI

SEQ ID NO: 74236 - protein, 9 aa, Homo sapiens
  misc_feature: Table A; Target 74236; HLA-B*51:01; RLN2; ENSG00000107014; TAA
FINKDTETI

SEQ ID NO: 74237 - protein, 9 aa, Homo sapiens
  misc_feature: Table A; Target 74237; HLA-B*58:01; RLN2; ENSG00000107014; TAA
FINKDTETI

SEQ ID NO: 74238 - protein, 9 aa, Homo sapiens
  misc_feature: Table A; Target 74238; HLA-A*25:01; RLN2; ENSG00000107014; TAA
FSRAVADSW

SEQ ID NO: 74239 - protein, 9 aa, Homo sapiens
  misc_feature: Table A; Target 74239; HLA-A*32:01; RLN2; ENSG00000107014; TAA
FSRAVADSW

SEQ ID NO: 74240 - protein, 9 aa, Homo sapiens
  misc_feature: Table A; Target 74240; HLA-B*57:01; RLN2; ENSG00000107014; TAA
FSRAVADSW

SEQ ID NO: 74241 - protein, 9 aa, Homo sapiens
  misc_feature: Table A; Target 74241; HLA-B*58:01; RLN2; ENSG00000107014; TAA
FSRAVADSW

SEQ ID NO: 74242 - protein, 9 aa, Homo sapiens
  misc_feature: Table A; Target 74242; HLA-A*01:01; RLN2; ENSG00000107014; TAA
FVANLPQEL

SEQ ID NO: 74243 - protein, 9 aa, Homo sapiens
  misc_feature: Table A; Target 74243; HLA-A*02:01; RLN2; ENSG00000107014; TAA
FVANLPQEL

SEQ ID NO: 74244 - protein, 9 aa, Homo sapiens
  misc_feature: Table A; Target 74244; HLA-A*02:03; RLN2; ENSG00000107014; TAA
FVANLPQEL

SEQ ID NO: 74245 - protein, 9 aa, Homo sapiens
  misc_feature: Table A; Target 74245; HLA-A*02:04; RLN2; ENSG00000107014; TAA
FVANLPQEL

SEQ ID NO: 74246 - protein, 9 aa, Homo sapiens
  misc_feature: Table A; Target 74246; HLA-A*02:07; RLN2; ENSG00000107014; TAA
FVANLPQEL

SEQ ID NO: 74247 - protein, 9 aa, Homo sapiens
  misc_feature: Table A; Target 74247; HLA-A*23:01; RLN2; ENSG00000107014; TAA
FVANLPQEL

SEQ ID NO: 74248 - protein, 9 aa, Homo sapiens
  misc_feature: Table A; Target 74248; HLA-A*24:02; RLN2; ENSG00000107014; TAA
FVANLPQEL

SEQ ID NO: 74249 - protein, 9 aa, Homo sapiens
  misc_feature: Table A; Target 74249; HLA-A*25:01; RLN2; ENSG00000107014; TAA
FVANLPQEL

SEQ ID NO: 74250 - protein, 9 aa, Homo sapiens
  misc_feature: Table A; Target 74250; HLA-A*26:01; RLN2; ENSG00000107014; TAA
FVANLPQEL

SEQ ID NO: 74251 - protein, 9 aa, Homo sapiens
  misc_feature: Table A; Target 74251; HLA-A*29:02; RLN2; ENSG00000107014; TAA
FVANLPQEL

SEQ ID NO: 74252 - protein, 9 aa, Homo sapiens
  misc_feature: Table A; Target 74252; HLA-A*30:01; RLN2; ENSG00000107014; TAA
FVANLPQEL

SEQ ID NO: 74253 - protein, 9 aa, Homo sapiens
  misc_feature: Table A; Target 74253; HLA-A*32:01; RLN2; ENSG00000107014; TAA
FVANLPQEL

SEQ ID NO: 74254 - protein, 9 aa, Homo sapiens
  misc_feature: Table A; Target 74254; HLA-A*33:03; RLN2; ENSG00000107014; TAA
FVANLPQEL

SEQ ID NO: 74255 - protein, 9 aa, Homo sapiens
  misc_feature: Table A; Target 74255; HLA-A*68:01; RLN2; ENSG00000107014; TAA
FVANLPQEL

SEQ ID NO: 74256 - protein, 9 aa, Homo sapiens
  misc_feature: Table A; Target 74256; HLA-A*68:02; RLN2; ENSG00000107014; TAA
FVANLPQEL

SEQ ID NO: 74257 - protein, 9 aa, Homo sapiens
  misc_feature: Table A; Target 74257; HLA-B*13:02; RLN2; ENSG00000107014; TAA
FVANLPQEL

SEQ ID NO: 74258 - protein, 9 aa, Homo sapiens
  misc_feature: Table A; Target 74258; HLA-B*15:01; RLN2; ENSG00000107014; TAA
FVANLPQEL

SEQ ID NO: 74259 - protein, 9 aa, Homo sapiens
  misc_feature: Table A; Target 74259; HLA-B*15:03; RLN2; ENSG00000107014; TAA
FVANLPQEL

SEQ ID NO: 74260 - protein, 9 aa, Homo sapiens
  misc_feature: Table A; Target 74260; HLA-B*27:05; RLN2; ENSG00000107014; TAA
FVANLPQEL

SEQ ID NO: 74261 - protein, 9 aa, Homo sapiens
  misc_feature: Table A; Target 74261; HLA-B*35:01; RLN2; ENSG00000107014; TAA
FVANLPQEL

SEQ ID NO: 74262 - protein, 9 aa, Homo sapiens
  misc_feature: Table A; Target 74262; HLA-B*35:03; RLN2; ENSG00000107014; TAA
FVANLPQEL

SEQ ID NO: 74263 - protein, 9 aa, Homo sapiens
  misc_feature: Table A; Target 74263; HLA-B*38:01; RLN2; ENSG00000107014; TAA
FVANLPQEL

SEQ ID NO: 74264 - protein, 9 aa, Homo sapiens
  misc_feature: Table A; Target 74264; HLA-B*39:01; RLN2; ENSG00000107014; TAA
FVANLPQEL

SEQ ID NO: 74265 - protein, 9 aa, Homo sapiens
  misc_feature: Table A; Target 74265; HLA-B*40:01; RLN2; ENSG00000107014; TAA
FVANLPQEL

SEQ ID NO: 74266 - protein, 9 aa, Homo sapiens
  misc_feature: Table A; Target 74266; HLA-B*40:02; RLN2; ENSG00000107014; TAA
FVANLPQEL

SEQ ID NO: 74267 - protein, 9 aa, Homo sapiens
  misc_feature: Table A; Target 74267; HLA-B*46:01; RLN2; ENSG00000107014; TAA
FVANLPQEL

SEQ ID NO: 74268 - protein, 9 aa, Homo sapiens
  misc_feature: Table A; Target 74268; HLA-B*54:01; RLN2; ENSG00000107014; TAA
FVANLPQEL

SEQ ID NO: 74269 - protein, 9 aa, Homo sapiens
  misc_feature: Table A; Target 74269; HLA-B*55:01; RLN2; ENSG00000107014; TAA
FVANLPQEL

SEQ ID NO: 74270 - protein, 9 aa, Homo sapiens
  misc_feature: Table A; Target 74270; HLA-B*58:01; RLN2; ENSG00000107014; TAA
FVANLPQEL

SEQ ID NO: 74271 - protein, 9 aa, Homo sapiens
  misc_feature: Table A; Target 74271; HLA-C*01:02; RLN2; ENSG00000107014; TAA
FVANLPQEL

SEQ ID NO: 74272 - protein, 9 aa, Homo sapiens
  misc_feature: Table A; Target 74272; HLA-C*02:02; RLN2; ENSG00000107014; TAA
FVANLPQEL

SEQ ID NO: 74273 - protein, 9 aa, Homo sapiens
  misc_feature: Table A; Target 74273; HLA-C*03:03; RLN2; ENSG00000107014; TAA
FVANLPQEL

SEQ ID NO: 74274 - protein, 9 aa, Homo sapiens
  misc_feature: Table A; Target 74274; HLA-C*03:04; RLN2; ENSG00000107014; TAA
FVANLPQEL

SEQ ID NO: 74275 - protein, 9 aa, Homo sapiens
  misc_feature: Table A; Target 74275; HLA-C*05:01; RLN2; ENSG00000107014; TAA
FVANLPQEL

SEQ ID NO: 74276 - protein, 9 aa, Homo sapiens
  misc_feature: Table A; Target 74276; HLA-C*06:02; RLN2; ENSG00000107014; TAA
FVANLPQEL

SEQ ID NO: 74277 - protein, 9 aa, Homo sapiens
  misc_feature: Table A; Target 74277; HLA-C*07:02; RLN2; ENSG00000107014; TAA
FVANLPQEL

SEQ ID NO: 74278 - protein, 9 aa, Homo sapiens
  misc_feature: Table A; Target 74278; HLA-C*07:04; RLN2; ENSG00000107014; TAA
FVANLPQEL

SEQ ID NO: 74279 - protein, 9 aa, Homo sapiens
  misc_feature: Table A; Target 74279; HLA-C*07:06; RLN2; ENSG00000107014; TAA
FVANLPQEL

SEQ ID NO: 74280 - protein, 9 aa, Homo sapiens
  misc_feature: Table A; Target 74280; HLA-C*12:03; RLN2; ENSG00000107014; TAA
FVANLPQEL

SEQ ID NO: 74281 - protein, 9 aa, Homo sapiens
  misc_feature: Table A; Target 74281; HLA-C*14:02; RLN2; ENSG00000107014; TAA
FVANLPQEL

SEQ ID NO: 74282 - protein, 9 aa, Homo sapiens
  misc_feature: Table A; Target 74282; HLA-C*16:01; RLN2; ENSG00000107014; TAA
FVANLPQEL

SEQ ID NO: 74283 - protein, 9 aa, Homo sapiens
  misc_feature: Table A; Target 74283; HLA-C*16:02; RLN2; ENSG00000107014; TAA
FVANLPQEL

SEQ ID NO: 74284 - protein, 9 aa, Homo sapiens
  misc_feature: Table A; Target 74284; HLA-C*16:04; RLN2; ENSG00000107014; TAA
FVANLPQEL

SEQ ID NO: 74285 - protein, 10 aa, Homo sapiens
  misc_feature: Table A; Target 74285; HLA-A*03:02; RLN2; ENSG00000107014; TAA
FVANLPQELK

SEQ ID NO: 74286 - protein, 10 aa, Homo sapiens
  misc_feature: Table A; Target 74286; HLA-A*11:01; RLN2; ENSG00000107014; TAA
FVANLPQELK

SEQ ID NO: 74287 - protein, 10 aa, Homo sapiens
  misc_feature: Table A; Target 74287; HLA-A*68:01; RLN2; ENSG00000107014; TAA
FVANLPQELK

SEQ ID NO: 74288 - protein, 10 aa, Homo sapiens
  misc_feature: Table A; Target 74288; HLA-A*68:02; RLN2; ENSG00000107014; TAA
FVANLPQELK

SEQ ID NO: 74289 - protein, 11 aa, Homo sapiens
  misc_feature: Table A; Target 74289; HLA-A*02:01; RLN2; ENSG00000107014; TAA
FVANLPQELKL

SEQ ID NO: 74290 - protein, 11 aa, Homo sapiens
  misc_feature: Table A; Target 74290; HLA-A*02:04; RLN2; ENSG00000107014; TAA
FVANLPQELKL

SEQ ID NO: 74291 - protein, 11 aa, Homo sapiens
  misc_feature: Table A; Target 74291; HLA-A*02:07; RLN2; ENSG00000107014; TAA
FVANLPQELKL

SEQ ID NO: 74292 - protein, 11 aa, Homo sapiens
  misc_feature: Table A; Target 74292; HLA-A*29:02; RLN2; ENSG00000107014; TAA
FVANLPQELKL

SEQ ID NO: 74293 - protein, 11 aa, Homo sapiens
  misc_feature: Table A; Target 74293; HLA-A*68:02; RLN2; ENSG00000107014; TAA
FVANLPQELKL

SEQ ID NO: 74294 - protein, 8 aa, Homo sapiens
  misc_feature: Table A; Target 74294; HLA-A*03:01; RLN2; ENSG00000107014; TAA
GLDTHSRK

SEQ ID NO: 74295 - protein, 9 aa, Homo sapiens
  misc_feature: Table A; Target 74295; HLA-A*03:01; RLN2; ENSG00000107014; TAA
GLDTHSRKK

SEQ ID NO: 74296 - protein, 9 aa, Homo sapiens
  misc_feature: Table A; Target 74296; HLA-A*03:02; RLN2; ENSG00000107014; TAA
GLDTHSRKK

SEQ ID NO: 74297 - protein, 9 aa, Homo sapiens
  misc_feature: Table A; Target 74297; HLA-A*02:04; RLN2; ENSG00000107014; TAA
HLLGVCLLL

SEQ ID NO: 74298 - protein, 10 aa, Homo sapiens
  misc_feature: Table A; Target 74298; HLA-C*01:02; RLN2; ENSG00000107014; TAA
HVPVLKDSSL

SEQ ID NO: 74299 - protein, 8 aa, Homo sapiens
  misc_feature: Table A; Target 74299; HLA-B*37:01; RLN2; ENSG00000107014; TAA
KDTETINM

SEQ ID NO: 74300 - protein, 9 aa, Homo sapiens
  misc_feature: Table A; Target 74300; HLA-A*30:01; RLN2; ENSG00000107014; TAA
KDTETINMM

SEQ ID NO: 74301 - protein, 9 aa, Homo sapiens
  misc_feature: Table A; Target 74301; HLA-B*37:01; RLN2; ENSG00000107014; TAA
KDTETINMM

SEQ ID NO: 74302 - protein, 9 aa, Homo sapiens
  misc_feature: Table A; Target 74302; HLA-C*16:02; RLN2; ENSG00000107014; TAA
KDTETINMM

SEQ ID NO: 74303 - protein, 10 aa, Homo sapiens
  misc_feature: Table A; Target 74303; HLA-A*31:01; RLN2; ENSG00000107014; TAA
KYLGLDTHSR

SEQ ID NO: 74304 - protein, 10 aa, Homo sapiens
  misc_feature: Table A; Target 74304; HLA-A*33:01; RLN2; ENSG00000107014; TAA
KYLGLDTHSR

SEQ ID NO: 74305 - protein, 10 aa, Homo sapiens
  misc_feature: Table A; Target 74305; HLA-A*33:03; RLN2; ENSG00000107014; TAA
KYLGLDTHSR

SEQ ID NO: 74306 - protein, 11 aa, Homo sapiens
  misc_feature: Table A; Target 74306; HLA-A*31:01; RLN2; ENSG00000107014; TAA
KYLGLDTHSRK

SEQ ID NO: 74307 - protein, 9 aa, Homo sapiens
  misc_feature: Table A; Target 74307; HLA-B*27:05; RLN2; ENSG00000107014; TAA
LGLDTHSRK

SEQ ID NO: 74308 - protein, 9 aa, Homo sapiens
  misc_feature: Table A; Target 74308; HLA-A*02:01; RLN2; ENSG00000107014; TAA
LLFEEFKKL

SEQ ID NO: 74309 - protein, 9 aa, Homo sapiens
  misc_feature: Table A; Target 74309; HLA-A*02:03; RLN2; ENSG00000107014; TAA
LLFEEFKKL

SEQ ID NO: 74310 - protein, 9 aa, Homo sapiens
  misc_feature: Table A; Target 74310; HLA-A*02:04; RLN2; ENSG00000107014; TAA
LLFEEFKKL

SEQ ID NO: 74311 - protein, 9 aa, Homo sapiens
  misc_feature: Table A; Target 74311; HLA-A*02:07; RLN2; ENSG00000107014; TAA
LLFEEFKKL

SEQ ID NO: 74312 - protein, 10 aa, Homo sapiens
  misc_feature: Table A; Target 74312; HLA-A*02:01; RLN2; ENSG00000107014; TAA
LLFEEFKKLI

SEQ ID NO: 74313 - protein, 10 aa, Homo sapiens
  misc_feature: Table A; Target 74313; HLA-A*02:03; RLN2; ENSG00000107014; TAA
LLFEEFKKLI

SEQ ID NO: 74314 - protein, 10 aa, Homo sapiens
  misc_feature: Table A; Target 74314; HLA-A*02:04; RLN2; ENSG00000107014; TAA
LLFEEFKKLI

SEQ ID NO: 74315 - protein, 9 aa, Homo sapiens
  misc_feature: Table A; Target 74315; HLA-A*02:01; RLN2; ENSG00000107014; TAA
LPQELKLTL

SEQ ID NO: 74316 - protein, 9 aa, Homo sapiens
  misc_feature: Table A; Target 74316; HLA-A*23:01; RLN2; ENSG00000107014; TAA
LPQELKLTL

SEQ ID NO: 74317 - protein, 9 aa, Homo sapiens
  misc_feature: Table A; Target 74317; HLA-B*07:02; RLN2; ENSG00000107014; TAA
LPQELKLTL

SEQ ID NO: 74318 - protein, 9 aa, Homo sapiens
  misc_feature: Table A; Target 74318; HLA-B*08:01; RLN2; ENSG00000107014; TAA
LPQELKLTL

SEQ ID NO: 74319 - protein, 9 aa, Homo sapiens
  misc_feature: Table A; Target 74319; HLA-B*18:01; RLN2; ENSG00000107014; TAA
LPQELKLTL

SEQ ID NO: 74320 - protein, 9 aa, Homo sapiens
  misc_feature: Table A; Target 74320; HLA-B*35:01; RLN2; ENSG00000107014; TAA
LPQELKLTL

SEQ ID NO: 74321 - protein, 9 aa, Homo sapiens
  misc_feature: Table A; Target 74321; HLA-B*35:03; RLN2; ENSG00000107014; TAA
LPQELKLTL

SEQ ID NO: 74322 - protein, 9 aa, Homo sapiens
  misc_feature: Table A; Target 74322; HLA-B*51:01; RLN2; ENSG00000107014; TAA
LPQELKLTL

SEQ ID NO: 74323 - protein, 9 aa, Homo sapiens
  misc_feature: Table A; Target 74323; HLA-B*54:01; RLN2; ENSG00000107014; TAA
LPQELKLTL

SEQ ID NO: 74324 - protein, 9 aa, Homo sapiens
  misc_feature: Table A; Target 74324; HLA-B*55:01; RLN2; ENSG00000107014; TAA
LPQELKLTL

SEQ ID NO: 74325 - protein, 9 aa, Homo sapiens
  misc_feature: Table A; Target 74325; HLA-B*56:01; RLN2; ENSG00000107014; TAA
LPQELKLTL

SEQ ID NO: 74326 - protein, 9 aa, Homo sapiens
  misc_feature: Table A; Target 74326; HLA-C*03:03; RLN2; ENSG00000107014; TAA
LPQELKLTL

SEQ ID NO: 74327 - protein, 9 aa, Homo sapiens
  misc_feature: Table A; Target 74327; HLA-C*03:04; RLN2; ENSG00000107014; TAA
LPQELKLTL

SEQ ID NO: 74328 - protein, 9 aa, Homo sapiens
  misc_feature: Table A; Target 74328; HLA-C*04:01; RLN2; ENSG00000107014; TAA
LPQELKLTL

SEQ ID NO: 74329 - protein, 9 aa, Homo sapiens
  misc_feature: Table A; Target 74329; HLA-C*07:02; RLN2; ENSG00000107014; TAA
LPQELKLTL

SEQ ID NO: 74330 - protein, 9 aa, Homo sapiens
  misc_feature: Table A; Target 74330; HLA-C*14:02; RLN2; ENSG00000107014; TAA
LPQELKLTL

SEQ ID NO: 74331 - protein, 9 aa, Homo sapiens
  misc_feature: Table A; Target 74331; HLA-C*16:01; RLN2; ENSG00000107014; TAA
LPQELKLTL

SEQ ID NO: 74332 - protein, 9 aa, Homo sapiens
  misc_feature: Table A; Target 74332; HLA-C*16:02; RLN2; ENSG00000107014; TAA
LPQELKLTL

SEQ ID NO: 74333 - protein, 8 aa, Homo sapiens
  misc_feature: Table A; Target 74333; HLA-B*51:01; RLN2; ENSG00000107014; TAA
LPQLQQHV

SEQ ID NO: 74334 - protein, 8 aa, Homo sapiens
  misc_feature: Table A; Target 74334; HLA-B*56:01; RLN2; ENSG00000107014; TAA
LPQLQQHV

SEQ ID NO: 74335 - protein, 9 aa, Homo sapiens
  misc_feature: Table A; Target 74335; HLA-B*54:01; RLN2; ENSG00000107014; TAA
LPQLQQHVP

SEQ ID NO: 74336 - protein, 9 aa, Homo sapiens
  misc_feature: Table A; Target 74336; HLA-B*56:01; RLN2; ENSG00000107014; TAA
LPQLQQHVP

SEQ ID NO: 74337 - protein, 10 aa, Homo sapiens
  misc_feature: Table A; Target 74337; HLA-B*54:01; RLN2; ENSG00000107014; TAA
LPQLQQHVPV

SEQ ID NO: 74338 - protein, 10 aa, Homo sapiens
  misc_feature: Table A; Target 74338; HLA-B*56:01; RLN2; ENSG00000107014; TAA
LPQLQQHVPV

SEQ ID NO: 74339 - protein, 11 aa, Homo sapiens
  misc_feature: Table A; Target 74339; HLA-B*07:02; RLN2; ENSG00000107014; TAA
LPQLQQHVPVL

SEQ ID NO: 74340 - protein, 11 aa, Homo sapiens
  misc_feature: Table A; Target 74340; HLA-C*07:02; RLN2; ENSG00000107014; TAA
LPQLQQHVPVL

SEQ ID NO: 74341 - protein, 8 aa, Homo sapiens
  misc_feature: Table A; Target 74341; HLA-B*15:01; RLN2; ENSG00000107014; TAA
LQQHVPVL

SEQ ID NO: 74342 - protein, 8 aa, Homo sapiens
  misc_feature: Table A; Target 74342; HLA-C*07:04; RLN2; ENSG00000107014; TAA
LQQHVPVL

SEQ ID NO: 74343 - protein, 9 aa, Homo sapiens
  misc_feature: Table A; Target 74343; HLA-A*03:02; RLN2; ENSG00000107014; TAA
LQQHVPVLK

SEQ ID NO: 74344 - protein, 9 aa, Homo sapiens
  misc_feature: Table A; Target 74344; HLA-A*11:01; RLN2; ENSG00000107014; TAA
LQQHVPVLK

SEQ ID NO: 74345 - protein, 8 aa, Homo sapiens
  misc_feature: Table A; Target 74345; HLA-C*03:04; RLN2; ENSG00000107014; TAA
LSEMQPAL

SEQ ID NO: 74346 - protein, 9 aa, Homo sapiens
  misc_feature: Table A; Target 74346; HLA-A*01:01; RLN2; ENSG00000107014; TAA
LSEMQPALP

SEQ ID NO: 74347 - protein, 9 aa, Homo sapiens
  misc_feature: Table A; Target 74347; HLA-B*49:01; RLN2; ENSG00000107014; TAA
MEEVIKLCG

SEQ ID NO: 74348 - protein, 9 aa, Homo sapiens
  misc_feature: Table A; Target 74348; HLA-A*02:01; RLN2; ENSG00000107014; TAA
MMSEFVANL

SEQ ID NO: 74349 - protein, 9 aa, Homo sapiens
  misc_feature: Table A; Target 74349; HLA-A*02:03; RLN2; ENSG00000107014; TAA
MMSEFVANL

SEQ ID NO: 74350 - protein, 9 aa, Homo sapiens
  misc_feature: Table A; Target 74350; HLA-A*02:04; RLN2; ENSG00000107014; TAA
MMSEFVANL

SEQ ID NO: 74351 - protein, 9 aa, Homo sapiens
  misc_feature: Table A; Target 74351; HLA-A*02:07; RLN2; ENSG00000107014; TAA
MMSEFVANL

SEQ ID NO: 74352 - protein, 9 aa, Homo sapiens
  misc_feature: Table A; Target 74352; HLA-A*23:01; RLN2; ENSG00000107014; TAA
MMSEFVANL

SEQ ID NO: 74353 - protein, 9 aa, Homo sapiens
  misc_feature: Table A; Target 74353; HLA-A*26:01; RLN2; ENSG00000107014; TAA
MMSEFVANL

SEQ ID NO: 74354 - protein, 9 aa, Homo sapiens
  misc_feature: Table A; Target 74354; HLA-A*32:01; RLN2; ENSG00000107014; TAA
MMSEFVANL

SEQ ID NO: 74355 - protein, 9 aa, Homo sapiens
  misc_feature: Table A; Target 74355; HLA-A*68:02; RLN2; ENSG00000107014; TAA
MMSEFVANL

SEQ ID NO: 74356 - protein, 9 aa, Homo sapiens
  misc_feature: Table A; Target 74356; HLA-B*13:02; RLN2; ENSG00000107014; TAA
MMSEFVANL

SEQ ID NO: 74357 - protein, 9 aa, Homo sapiens
  misc_feature: Table A; Target 74357; HLA-B*27:05; RLN2; ENSG00000107014; TAA
MMSEFVANL

SEQ ID NO: 74358 - protein, 9 aa, Homo sapiens
  misc_feature: Table A; Target 74358; HLA-B*35:03; RLN2; ENSG00000107014; TAA
MMSEFVANL

SEQ ID NO: 74359 - protein, 9 aa, Homo sapiens
  misc_feature: Table A; Target 74359; HLA-B*37:01; RLN2; ENSG00000107014; TAA
MMSEFVANL

SEQ ID NO: 74360 - protein, 9 aa, Homo sapiens
  misc_feature: Table A; Target 74360; HLA-B*38:01; RLN2; ENSG00000107014; TAA
MMSEFVANL

SEQ ID NO: 74361 - protein, 9 aa, Homo sapiens
  misc_feature: Table A; Target 74361; HLA-B*55:01; RLN2; ENSG00000107014; TAA
MMSEFVANL

SEQ ID NO: 74362 - protein, 9 aa, Homo sapiens
  misc_feature: Table A; Target 74362; HLA-C*01:02; RLN2; ENSG00000107014; TAA
MMSEFVANL

SEQ ID NO: 74363 - protein, 9 aa, Homo sapiens
  misc_feature: Table A; Target 74363; HLA-C*02:02; RLN2; ENSG00000107014; TAA
MMSEFVANL

SEQ ID NO: 74364 - protein, 9 aa, Homo sapiens
  misc_feature: Table A; Target 74364; HLA-C*06:02; RLN2; ENSG00000107014; TAA
MMSEFVANL

SEQ ID NO: 74365 - protein, 9 aa, Homo sapiens
  misc_feature: Table A; Target 74365; HLA-C*07:04; RLN2; ENSG00000107014; TAA
MMSEFVANL

SEQ ID NO: 74366 - protein, 9 aa, Homo sapiens
  misc_feature: Table A; Target 74366; HLA-C*12:03; RLN2; ENSG00000107014; TAA
MMSEFVANL

SEQ ID NO: 74367 - protein, 9 aa, Homo sapiens
  misc_feature: Table A; Target 74367; HLA-C*14:02; RLN2; ENSG00000107014; TAA
MMSEFVANL

SEQ ID NO: 74368 - protein, 9 aa, Homo sapiens
  misc_feature: Table A; Target 74368; HLA-C*16:02; RLN2; ENSG00000107014; TAA
MMSEFVANL

SEQ ID NO: 74369 - protein, 8 aa, Homo sapiens
  misc_feature: Table A; Target 74369; HLA-A*02:07; RLN2; ENSG00000107014; TAA
MQPALPQL

SEQ ID NO: 74370 - protein, 8 aa, Homo sapiens
  misc_feature: Table A; Target 74370; HLA-B*13:02; RLN2; ENSG00000107014; TAA
MQPALPQL

SEQ ID NO: 74371 - protein, 8 aa, Homo sapiens
  misc_feature: Table A; Target 74371; HLA-B*40:02; RLN2; ENSG00000107014; TAA
MQPALPQL

SEQ ID NO: 74372 - protein, 8 aa, Homo sapiens
  misc_feature: Table A; Target 74372; HLA-B*51:01; RLN2; ENSG00000107014; TAA
MQPALPQL

SEQ ID NO: 74373 - protein, 8 aa, Homo sapiens
  misc_feature: Table A; Target 74373; HLA-C*06:02; RLN2; ENSG00000107014; TAA
MQPALPQL

SEQ ID NO: 74374 - protein, 8 aa, Homo sapiens
  misc_feature: Table A; Target 74374; HLA-C*07:01; RLN2; ENSG00000107014; TAA
MQPALPQL

SEQ ID NO: 74375 - protein, 8 aa, Homo sapiens
  misc_feature: Table A; Target 74375; HLA-C*07:04; RLN2; ENSG00000107014; TAA
MQPALPQL

SEQ ID NO: 74376 - protein, 8 aa, Homo sapiens
  misc_feature: Table A; Target 74376; HLA-C*16:02; RLN2; ENSG00000107014; TAA
MQPALPQL

SEQ ID NO: 74377 - protein, 9 aa, Homo sapiens
  misc_feature: Table A; Target 74377; HLA-B*38:01; RLN2; ENSG00000107014; TAA
NKDTETINM

SEQ ID NO: 74378 - protein, 10 aa, Homo sapiens
  misc_feature: Table A; Target 74378; HLA-A*02:07; RLN2; ENSG00000107014; TAA
NLPQELKLTL

SEQ ID NO: 74379 - protein, 10 aa, Homo sapiens
  misc_feature: Table A; Target 74379; HLA-A*02:04; RLN2; ENSG00000107014; TAA
NMMSEFVANL

SEQ ID NO: 74380 - protein, 11 aa, Homo sapiens
  misc_feature: Table A; Target 74380; HLA-A*25:01; RLN2; ENSG00000107014; TAA
NQFSRAVADSW

SEQ ID NO: 74381 - protein, 11 aa, Homo sapiens
  misc_feature: Table A; Target 74381; HLA-B*44:02; RLN2; ENSG00000107014; TAA
NQFSRAVADSW

SEQ ID NO: 74382 - protein, 11 aa, Homo sapiens
  misc_feature: Table A; Target 74382; HLA-C*16:04; RLN2; ENSG00000107014; TAA
NQFSRAVADSW

SEQ ID NO: 74383 - protein, 10 aa, Homo sapiens
  misc_feature: Table A; Target 74383; HLA-A*30:01; RLN2; ENSG00000107014; TAA
QELKLTLSEM

SEQ ID NO: 74384 - protein, 10 aa, Homo sapiens
  misc_feature: Table A; Target 74384; HLA-B*40:01; RLN2; ENSG00000107014; TAA
QELKLTLSEM

SEQ ID NO: 74385 - protein, 10 aa, Homo sapiens
  misc_feature: Table A; Target 74385; HLA-B*44:03; RLN2; ENSG00000107014; TAA
QELKLTLSEM

SEQ ID NO: 74386 - protein, 11 aa, Homo sapiens
  misc_feature: Table A; Target 74386; HLA-B*38:01; RLN2; ENSG00000107014; TAA
QHVPVLKDSSL

SEQ ID NO: 74387 - protein, 9 aa, Homo sapiens
  misc_feature: Table A; Target 74387; HLA-A*02:01; RLN2; ENSG00000107014; TAA
QLQQHVPVL

SEQ ID NO: 74388 - protein, 9 aa, Homo sapiens
  misc_feature: Table A; Target 74388; HLA-A*02:03; RLN2; ENSG00000107014; TAA
QLQQHVPVL

SEQ ID NO: 74389 - protein, 9 aa, Homo sapiens
  misc_feature: Table A; Target 74389; HLA-A*02:04; RLN2; ENSG00000107014; TAA
QLQQHVPVL

SEQ ID NO: 74390 - protein, 9 aa, Homo sapiens
  misc_feature: Table A; Target 74390; HLA-A*02:07; RLN2; ENSG00000107014; TAA
QLQQHVPVL

SEQ ID NO: 74391 - protein, 9 aa, Homo sapiens
  misc_feature: Table A; Target 74391; HLA-A*23:01; RLN2; ENSG00000107014; TAA
QLQQHVPVL

SEQ ID NO: 74392 - protein, 9 aa, Homo sapiens
  misc_feature: Table A; Target 74392; HLA-A*24:02; RLN2; ENSG00000107014; TAA
QLQQHVPVL

SEQ ID NO: 74393 - protein, 9 aa, Homo sapiens
  misc_feature: Table A; Target 74393; HLA-A*32:01; RLN2; ENSG00000107014; TAA
QLQQHVPVL

SEQ ID NO: 74394 - protein, 9 aa, Homo sapiens
  misc_feature: Table A; Target 74394; HLA-B*08:01; RLN2; ENSG00000107014; TAA
QLQQHVPVL

SEQ ID NO: 74395 - protein, 9 aa, Homo sapiens
  misc_feature: Table A; Target 74395; HLA-B*37:01; RLN2; ENSG00000107014; TAA
QLQQHVPVL

SEQ ID NO: 74396 - protein, 9 aa, Homo sapiens
  misc_feature: Table A; Target 74396; HLA-B*38:01; RLN2; ENSG00000107014; TAA
QLQQHVPVL

SEQ ID NO: 74397 - protein, 9 aa, Homo sapiens
  misc_feature: Table A; Target 74397; HLA-B*55:01; RLN2; ENSG00000107014; TAA
QLQQHVPVL

SEQ ID NO: 74398 - protein, 9 aa, Homo sapiens
  misc_feature: Table A; Target 74398; HLA-C*16:02; RLN2; ENSG00000107014; TAA
QLQQHVPVL

SEQ ID NO: 74399 - protein, 10 aa, Homo sapiens
  misc_feature: Table A; Target 74399; HLA-A*03:01; RLN2; ENSG00000107014; TAA
QLQQHVPVLK

SEQ ID NO: 74400 - protein, 10 aa, Homo sapiens
  misc_feature: Table A; Target 74400; HLA-A*03:02; RLN2; ENSG00000107014; TAA
QLQQHVPVLK

SEQ ID NO: 74401 - protein, 9 aa, Homo sapiens
  misc_feature: Table A; Target 74401; HLA-A*03:01; RLN2; ENSG00000107014; TAA
QLYSALANK

SEQ ID NO: 74402 - protein, 9 aa, Homo sapiens
  misc_feature: Table A; Target 74402; HLA-A*03:02; RLN2; ENSG00000107014; TAA
QLYSALANK

SEQ ID NO: 74403 - protein, 9 aa, Homo sapiens
  misc_feature: Table A; Target 74403; HLA-A*11:01; RLN2; ENSG00000107014; TAA
QLYSALANK

SEQ ID NO: 74404 - protein, 9 aa, Homo sapiens
  misc_feature: Table A; Target 74404; HLA-A*31:01; RLN2; ENSG00000107014; TAA
QLYSALANK

SEQ ID NO: 74405 - protein, 9 aa, Homo sapiens
  misc_feature: Table A; Target 74405; HLA-A*33:03; RLN2; ENSG00000107014; TAA
QLYSALANK

SEQ ID NO: 74406 - protein, 9 aa, Homo sapiens
  misc_feature: Table A; Target 74406; HLA-A*68:01; RLN2; ENSG00000107014; TAA
QLYSALANK

SEQ ID NO: 74407 - protein, 9 aa, Homo sapiens
  misc_feature: Table A; Target 74407; HLA-B*27:02; RLN2; ENSG00000107014; TAA
QLYSALANK

SEQ ID NO: 74408 - protein, 9 aa, Homo sapiens
  misc_feature: Table A; Target 74408; HLA-B*27:05; RLN2; ENSG00000107014; TAA
QLYSALANK

SEQ ID NO: 74409 - protein, 11 aa, Homo sapiens
  misc_feature: Table A; Target 74409; HLA-B*56:01; RLN2; ENSG00000107014; TAA
QPALPQLQQHV

SEQ ID NO: 74410 - protein, 8 aa, Homo sapiens
  misc_feature: Table A; Target 74410; HLA-A*03:02; RLN2; ENSG00000107014; TAA
QQHVPVLK

SEQ ID NO: 74411 - protein, 8 aa, Homo sapiens
  misc_feature: Table A; Target 74411; HLA-A*02:04; RLN2; ENSG00000107014; TAA
RLFFFHLL

SEQ ID NO: 74412 - protein, 10 aa, Homo sapiens
  misc_feature: Table A; Target 74412; HLA-A*02:03; RLN2; ENSG00000107014; TAA
RLFFFHLLGV

SEQ ID NO: 74413 - protein, 10 aa, Homo sapiens
  misc_feature: Table A; Target 74413; HLA-A*02:04; RLN2; ENSG00000107014; TAA
RLFFFHLLGV

SEQ ID NO: 74414 - protein, 10 aa, Homo sapiens
  misc_feature: Table A; Target 74414; HLA-A*03:01; RLN2; ENSG00000107014; TAA
RQLYSALANK

SEQ ID NO: 74415 - protein, 10 aa, Homo sapiens
  misc_feature: Table A; Target 74415; HLA-A*03:02; RLN2; ENSG00000107014; TAA
RQLYSALANK

SEQ ID NO: 74416 - protein, 10 aa, Homo sapiens
  misc_feature: Table A; Target 74416; HLA-A*11:01; RLN2; ENSG00000107014; TAA
RQLYSALANK

SEQ ID NO: 74417 - protein, 11 aa, Homo sapiens
  misc_feature: Table A; Target 74417; HLA-A*30:01; RLN2; ENSG00000107014; TAA
SEAADSSPSEL

SEQ ID NO: 74418 - protein, 11 aa, Homo sapiens
  misc_feature: Table A; Target 74418; HLA-B*40:01; RLN2; ENSG00000107014; TAA
SEAADSSPSEL

SEQ ID NO: 74419 - protein, 8 aa, Homo sapiens
  misc_feature: Table A; Target 74419; HLA-B*18:01; RLN2; ENSG00000107014; TAA
SEFVANLP

SEQ ID NO: 74420 - protein, 8 aa, Homo sapiens
  misc_feature: Table A; Target 74420; HLA-B*49:01; RLN2; ENSG00000107014; TAA
SEFVANLP

SEQ ID NO: 74421 - protein, 11 aa, Homo sapiens
  misc_feature: Table A; Target 74421; HLA-A*30:01; RLN2; ENSG00000107014; TAA
SEFVANLPQEL

SEQ ID NO: 74422 - protein, 11 aa, Homo sapiens
  misc_feature: Table A; Target 74422; HLA-B*18:01; RLN2; ENSG00000107014; TAA
SEFVANLPQEL

SEQ ID NO: 74423 - protein, 11 aa, Homo sapiens
  misc_feature: Table A; Target 74423; HLA-B*40:01; RLN2; ENSG00000107014; TAA
SEFVANLPQEL

SEQ ID NO: 74424 - protein, 11 aa, Homo sapiens
  misc_feature: Table A; Target 74424; HLA-B*40:02; RLN2; ENSG00000107014; TAA
SEFVANLPQEL

SEQ ID NO: 74425 - protein, 11 aa, Homo sapiens
  misc_feature: Table A; Target 74425; HLA-B*44:02; RLN2; ENSG00000107014; TAA
SEFVANLPQEL

SEQ ID NO: 74426 - protein, 11 aa, Homo sapiens
  misc_feature: Table A; Target 74426; HLA-B*44:03; RLN2; ENSG00000107014; TAA
SEFVANLPQEL

SEQ ID NO: 74427 - protein, 11 aa, Homo sapiens
  misc_feature: Table A; Target 74427; HLA-B*49:01; RLN2; ENSG00000107014; TAA
SEFVANLPQEL

SEQ ID NO: 74428 - protein, 11 aa, Homo sapiens
  misc_feature: Table A; Target 74428; HLA-C*16:04; RLN2; ENSG00000107014; TAA
SEFVANLPQEL

SEQ ID NO: 74429 - protein, 10 aa, Homo sapiens
  misc_feature: Table A; Target 74429; HLA-A*30:01; RLN2; ENSG00000107014; TAA
SEMQPALPQL

SEQ ID NO: 74430 - protein, 10 aa, Homo sapiens
  misc_feature: Table A; Target 74430; HLA-B*18:01; RLN2; ENSG00000107014; TAA
SEMQPALPQL

SEQ ID NO: 74431 - protein, 10 aa, Homo sapiens
  misc_feature: Table A; Target 74431; HLA-B*27:02; RLN2; ENSG00000107014; TAA
SEMQPALPQL

SEQ ID NO: 74432 - protein, 10 aa, Homo sapiens
  misc_feature: Table A; Target 74432; HLA-B*27:05; RLN2; ENSG00000107014; TAA
SEMQPALPQL

SEQ ID NO: 74433 - protein, 10 aa, Homo sapiens
  misc_feature: Table A; Target 74433; HLA-B*40:01; RLN2; ENSG00000107014; TAA
SEMQPALPQL

SEQ ID NO: 74434 - protein, 10 aa, Homo sapiens
  misc_feature: Table A; Target 74434; HLA-B*40:02; RLN2; ENSG00000107014; TAA
SEMQPALPQL

SEQ ID NO: 74435 - protein, 10 aa, Homo sapiens
  misc_feature: Table A; Target 74435; HLA-B*44:02; RLN2; ENSG00000107014; TAA
SEMQPALPQL

SEQ ID NO: 74436 - protein, 10 aa, Homo sapiens
  misc_feature: Table A; Target 74436; HLA-B*44:03; RLN2; ENSG00000107014; TAA
SEMQPALPQL

SEQ ID NO: 74437 - protein, 10 aa, Homo sapiens
  misc_feature: Table A; Target 74437; HLA-B*49:01; RLN2; ENSG00000107014; TAA
SEMQPALPQL

SEQ ID NO: 74438 - protein, 10 aa, Homo sapiens
  misc_feature: Table A; Target 74438; HLA-C*16:04; RLN2; ENSG00000107014; TAA
SEMQPALPQL

SEQ ID NO: 74439 - protein, 9 aa, Homo sapiens
  misc_feature: Table A; Target 74439; HLA-A*02:04; RLN2; ENSG00000107014; TAA
SLLFEEFKK

SEQ ID NO: 74440 - protein, 10 aa, Homo sapiens
  misc_feature: Table A; Target 74440; HLA-A*02:04; RLN2; ENSG00000107014; TAA
SLLFEEFKKL

SEQ ID NO: 74441 - protein, 8 aa, Homo sapiens
  misc_feature: Table A; Target 74441; HLA-B*07:02; RLN2; ENSG00000107014; TAA
SPSELKYL

SEQ ID NO: 74442 - protein, 10 aa, Homo sapiens
  misc_feature: Table A; Target 74442; HLA-B*07:02; RLN2; ENSG00000107014; TAA
SPSELKYLGL

SEQ ID NO: 74443 - protein, 10 aa, Homo sapiens
  misc_feature: Table A; Target 74443; HLA-B*56:01; RLN2; ENSG00000107014; TAA
SPSELKYLGL

SEQ ID NO: 74444 - protein, 10 aa, Homo sapiens
  misc_feature: Table A; Target 74444; HLA-C*07:02; RLN2; ENSG00000107014; TAA
SPSELKYLGL

SEQ ID NO: 74445 - protein, 8 aa, Homo sapiens
  misc_feature: Table A; Target 74445; HLA-C*16:04; RLN2; ENSG00000107014; TAA
SRAVADSW

SEQ ID NO: 74446 - protein, 8 aa, Homo sapiens
  misc_feature: Table A; Target 74446; HLA-B*57:01; RLN2; ENSG00000107014; TAA
SSLLFEEF

SEQ ID NO: 74447 - protein, 9 aa, Homo sapiens
  misc_feature: Table A; Target 74447; HLA-A*11:01; RLN2; ENSG00000107014; TAA
SSLLFEEFK

SEQ ID NO: 74448 - protein, 8 aa, Homo sapiens
  misc_feature: Table A; Target 74448; HLA-C*01:02; RLN2; ENSG00000107014; TAA
SSPSELKY

SEQ ID NO: 74449 - protein, 9 aa, Homo sapiens
  misc_feature: Table A; Target 74449; HLA-A*02:07; RLN2; ENSG00000107014; TAA
SSPSELKYL

SEQ ID NO: 74450 - protein, 9 aa, Homo sapiens
  misc_feature: Table A; Target 74450; HLA-A*23:01; RLN2; ENSG00000107014; TAA
SWMEEVIKL

SEQ ID NO: 74451 - protein, 9 aa, Homo sapiens
  misc_feature: Table A; Target 74451; HLA-A*24:02; RLN2; ENSG00000107014; TAA
SWMEEVIKL

SEQ ID NO: 74452 - protein, 10 aa, Homo sapiens
  misc_feature: Table A; Target 74452; HLA-A*30:01; RLN2; ENSG00000107014; TAA
TETINMMSEF

SEQ ID NO: 74453 - protein, 10 aa, Homo sapiens
  misc_feature: Table A; Target 74453; HLA-B*18:01; RLN2; ENSG00000107014; TAA
TETINMMSEF

SEQ ID NO: 74454 - protein, 10 aa, Homo sapiens
  misc_feature: Table A; Target 74454; HLA-B*27:02; RLN2; ENSG00000107014; TAA
TETINMMSEF

SEQ ID NO: 74455 - protein, 10 aa, Homo sapiens
  misc_feature: Table A; Target 74455; HLA-B*40:01; RLN2; ENSG00000107014; TAA
TETINMMSEF

SEQ ID NO: 74456 - protein, 10 aa, Homo sapiens
  misc_feature: Table A; Target 74456; HLA-B*44:02; RLN2; ENSG00000107014; TAA
TETINMMSEF

SEQ ID NO: 74457 - protein, 10 aa, Homo sapiens
  misc_feature: Table A; Target 74457; HLA-B*44:03; RLN2; ENSG00000107014; TAA
TETINMMSEF

SEQ ID NO: 74458 - protein, 10 aa, Homo sapiens
  misc_feature: Table A; Target 74458; HLA-B*49:01; RLN2; ENSG00000107014; TAA
TETINMMSEF

SEQ ID NO: 74459 - protein, 8 aa, Homo sapiens
  misc_feature: Table A; Target 74459; HLA-C*05:01; RLN2; ENSG00000107014; TAA
TINMMSEF

SEQ ID NO: 74460 - protein, 9 aa, Homo sapiens
  misc_feature: Table A; Target 74460; HLA-A*02:01; RLN2; ENSG00000107014; TAA
TLSEMQPAL

SEQ ID NO: 74461 - protein, 9 aa, Homo sapiens
  misc_feature: Table A; Target 74461; HLA-A*02:03; RLN2; ENSG00000107014; TAA
TLSEMQPAL

SEQ ID NO: 74462 - protein, 9 aa, Homo sapiens
  misc_feature: Table A; Target 74462; HLA-A*02:04; RLN2; ENSG00000107014; TAA
TLSEMQPAL

SEQ ID NO: 74463 - protein, 9 aa, Homo sapiens
  misc_feature: Table A; Target 74463; HLA-A*02:07; RLN2; ENSG00000107014; TAA
TLSEMQPAL

SEQ ID NO: 74464 - protein, 9 aa, Homo sapiens
  misc_feature: Table A; Target 74464; HLA-A*23:01; RLN2; ENSG00000107014; TAA
TLSEMQPAL

SEQ ID NO: 74465 - protein, 9 aa, Homo sapiens
  misc_feature: Table A; Target 74465; HLA-A*30:01; RLN2; ENSG00000107014; TAA
TLSEMQPAL

SEQ ID NO: 74466 - protein, 9 aa, Homo sapiens
  misc_feature: Table A; Target 74466; HLA-A*32:01; RLN2; ENSG00000107014; TAA
TLSEMQPAL

SEQ ID NO: 74467 - protein, 9 aa, Homo sapiens
  misc_feature: Table A; Target 74467; HLA-A*68:02; RLN2; ENSG00000107014; TAA
TLSEMQPAL

SEQ ID NO: 74468 - protein, 9 aa, Homo sapiens
  misc_feature: Table A; Target 74468; HLA-B*13:02; RLN2; ENSG00000107014; TAA
TLSEMQPAL

SEQ ID NO: 74469 - protein, 9 aa, Homo sapiens
  misc_feature: Table A; Target 74469; HLA-B*15:01; RLN2; ENSG00000107014; TAA
TLSEMQPAL

SEQ ID NO: 74470 - protein, 9 aa, Homo sapiens
  misc_feature: Table A; Target 74470; HLA-B*18:01; RLN2; ENSG00000107014; TAA
TLSEMQPAL

SEQ ID NO: 74471 - protein, 9 aa, Homo sapiens
  misc_feature: Table A; Target 74471; HLA-B*27:05; RLN2; ENSG00000107014; TAA
TLSEMQPAL

SEQ ID NO: 74472 - protein, 9 aa, Homo sapiens
  misc_feature: Table A; Target 74472; HLA-B*35:01; RLN2; ENSG00000107014; TAA
TLSEMQPAL

SEQ ID NO: 74473 - protein, 9 aa, Homo sapiens
  misc_feature: Table A; Target 74473; HLA-B*35:03; RLN2; ENSG00000107014; TAA
TLSEMQPAL

SEQ ID NO: 74474 - protein, 9 aa, Homo sapiens
  misc_feature: Table A; Target 74474; HLA-B*37:01; RLN2; ENSG00000107014; TAA
TLSEMQPAL

SEQ ID NO: 74475 - protein, 9 aa, Homo sapiens
  misc_feature: Table A; Target 74475; HLA-B*38:01; RLN2; ENSG00000107014; TAA
TLSEMQPAL

SEQ ID NO: 74476 - protein, 9 aa, Homo sapiens
  misc_feature: Table A; Target 74476; HLA-B*39:01; RLN2; ENSG00000107014; TAA
TLSEMQPAL

SEQ ID NO: 74477 - protein, 9 aa, Homo sapiens
  misc_feature: Table A; Target 74477; HLA-B*40:01; RLN2; ENSG00000107014; TAA
TLSEMQPAL

SEQ ID NO: 74478 - protein, 9 aa, Homo sapiens
  misc_feature: Table A; Target 74478; HLA-B*40:02; RLN2; ENSG00000107014; TAA
TLSEMQPAL

SEQ ID NO: 74479 - protein, 9 aa, Homo sapiens
  misc_feature: Table A; Target 74479; HLA-B*55:01; RLN2; ENSG00000107014; TAA
TLSEMQPAL

SEQ ID NO: 74480 - protein, 9 aa, Homo sapiens
  misc_feature: Table A; Target 74480; HLA-C*01:02; RLN2; ENSG00000107014; TAA
TLSEMQPAL

SEQ ID NO: 74481 - protein, 9 aa, Homo sapiens
  misc_feature: Table A; Target 74481; HLA-C*02:02; RLN2; ENSG00000107014; TAA
TLSEMQPAL

SEQ ID NO: 74482 - protein, 9 aa, Homo sapiens
  misc_feature: Table A; Target 74482; HLA-C*03:03; RLN2; ENSG00000107014; TAA
TLSEMQPAL

SEQ ID NO: 74483 - protein, 9 aa, Homo sapiens
  misc_feature: Table A; Target 74483; HLA-C*03:04; RLN2; ENSG00000107014; TAA
TLSEMQPAL

SEQ ID NO: 74484 - protein, 9 aa, Homo sapiens
  misc_feature: Table A; Target 74484; HLA-C*05:01; RLN2; ENSG00000107014; TAA
TLSEMQPAL

SEQ ID NO: 74485 - protein, 9 aa, Homo sapiens
  misc_feature: Table A; Target 74485; HLA-C*06:02; RLN2; ENSG00000107014; TAA
TLSEMQPAL

SEQ ID NO: 74486 - protein, 9 aa, Homo sapiens
  misc_feature: Table A; Target 74486; HLA-C*07:02; RLN2; ENSG00000107014; TAA
TLSEMQPAL

SEQ ID NO: 74487 - protein, 9 aa, Homo sapiens
  misc_feature: Table A; Target 74487; HLA-C*07:04; RLN2; ENSG00000107014; TAA
TLSEMQPAL

SEQ ID NO: 74488 - protein, 9 aa, Homo sapiens
  misc_feature: Table A; Target 74488; HLA-C*12:03; RLN2; ENSG00000107014; TAA
TLSEMQPAL

SEQ ID NO: 74489 - protein, 9 aa, Homo sapiens
  misc_feature: Table A; Target 74489; HLA-C*14:02; RLN2; ENSG00000107014; TAA
TLSEMQPAL

SEQ ID NO: 74490 - protein, 9 aa, Homo sapiens
  misc_feature: Table A; Target 74490; HLA-C*16:01; RLN2; ENSG00000107014; TAA
TLSEMQPAL

SEQ ID NO: 74491 - protein, 9 aa, Homo sapiens
  misc_feature: Table A; Target 74491; HLA-C*16:02; RLN2; ENSG00000107014; TAA
TLSEMQPAL

SEQ ID NO: 74492 - protein, 9 aa, Homo sapiens
  misc_feature: Table A; Target 74492; HLA-C*16:04; RLN2; ENSG00000107014; TAA
TLSEMQPAL

SEQ ID NO: 74493 - protein, 9 aa, Homo sapiens
  misc_feature: Table A; Target 74493; HLA-A*02:07; RLN2; ENSG00000107014; TAA
VADSWMEEV

SEQ ID NO: 74494 - protein, 9 aa, Homo sapiens
  misc_feature: Table A; Target 74494; HLA-C*05:01; RLN2; ENSG00000107014; TAA
VADSWMEEV

SEQ ID NO: 74495 - protein, 8 aa, Homo sapiens
  misc_feature: Table A; Target 74495; HLA-B*07:02; RLN2; ENSG00000107014; TAA
VANLPQEL

SEQ ID NO: 74496 - protein, 8 aa, Homo sapiens
  misc_feature: Table A; Target 74496; HLA-B*08:01; RLN2; ENSG00000107014; TAA
VANLPQEL

SEQ ID NO: 74497 - protein, 8 aa, Homo sapiens
  misc_feature: Table A; Target 74497; HLA-B*35:03; RLN2; ENSG00000107014; TAA
VANLPQEL

SEQ ID NO: 74498 - protein, 8 aa, Homo sapiens
  misc_feature: Table A; Target 74498; HLA-B*39:01; RLN2; ENSG00000107014; TAA
VANLPQEL

SEQ ID NO: 74499 - protein, 8 aa, Homo sapiens
  misc_feature: Table A; Target 74499; HLA-B*46:01; RLN2; ENSG00000107014; TAA
VANLPQEL

SEQ ID NO: 74500 - protein, 8 aa, Homo sapiens
  misc_feature: Table A; Target 74500; HLA-B*51:01; RLN2; ENSG00000107014; TAA
VANLPQEL

SEQ ID NO: 74501 - protein, 8 aa, Homo sapiens
  misc_feature: Table A; Target 74501; HLA-B*56:01; RLN2; ENSG00000107014; TAA
VANLPQEL

SEQ ID NO: 74502 - protein, 8 aa, Homo sapiens
  misc_feature: Table A; Target 74502; HLA-B*58:01; RLN2; ENSG00000107014; TAA
VANLPQEL

SEQ ID NO: 74503 - protein, 8 aa, Homo sapiens
  misc_feature: Table A; Target 74503; HLA-C*01:02; RLN2; ENSG00000107014; TAA
VANLPQEL

SEQ ID NO: 74504 - protein, 8 aa, Homo sapiens
  misc_feature: Table A; Target 74504; HLA-C*02:02; RLN2; ENSG00000107014; TAA
VANLPQEL

SEQ ID NO: 74505 - protein, 8 aa, Homo sapiens
  misc_feature: Table A; Target 74505; HLA-C*03:03; RLN2; ENSG00000107014; TAA
VANLPQEL

SEQ ID NO: 74506 - protein, 8 aa, Homo sapiens
  misc_feature: Table A; Target 74506; HLA-C*03:04; RLN2; ENSG00000107014; TAA
VANLPQEL

SEQ ID NO: 74507 - protein, 8 aa, Homo sapiens
  misc_feature: Table A; Target 74507; HLA-C*05:01; RLN2; ENSG00000107014; TAA
VANLPQEL

SEQ ID NO: 74508 - protein, 8 aa, Homo sapiens
  misc_feature: Table A; Target 74508; HLA-C*07:01; RLN2; ENSG00000107014; TAA
VANLPQEL

SEQ ID NO: 74509 - protein, 8 aa, Homo sapiens
  misc_feature: Table A; Target 74509; HLA-C*07:04; RLN2; ENSG00000107014; TAA
VANLPQEL

SEQ ID NO: 74510 - protein, 8 aa, Homo sapiens
  misc_feature: Table A; Target 74510; HLA-C*12:03; RLN2; ENSG00000107014; TAA
VANLPQEL

SEQ ID NO: 74511 - protein, 8 aa, Homo sapiens
  misc_feature: Table A; Target 74511; HLA-C*14:02; RLN2; ENSG00000107014; TAA
VANLPQEL

SEQ ID NO: 74512 - protein, 8 aa, Homo sapiens
  misc_feature: Table A; Target 74512; HLA-C*16:01; RLN2; ENSG00000107014; TAA
VANLPQEL

SEQ ID NO: 74513 - protein, 8 aa, Homo sapiens
  misc_feature: Table A; Target 74513; HLA-C*16:02; RLN2; ENSG00000107014; TAA
VANLPQEL

SEQ ID NO: 74514 - protein, 8 aa, Homo sapiens
  misc_feature: Table A; Target 74514; HLA-C*16:04; RLN2; ENSG00000107014; TAA
VANLPQEL

SEQ ID NO: 74515 - protein, 9 aa, Homo sapiens
  misc_feature: Table A; Target 74515; HLA-A*01:01; RLN2; ENSG00000107014; TAA
VANLPQELK

SEQ ID NO: 74516 - protein, 9 aa, Homo sapiens
  misc_feature: Table A; Target 74516; HLA-A*03:01; RLN2; ENSG00000107014; TAA
VANLPQELK

SEQ ID NO: 74517 - protein, 9 aa, Homo sapiens
  misc_feature: Table A; Target 74517; HLA-A*03:02; RLN2; ENSG00000107014; TAA
VANLPQELK

SEQ ID NO: 74518 - protein, 9 aa, Homo sapiens
  misc_feature: Table A; Target 74518; HLA-A*11:01; RLN2; ENSG00000107014; TAA
VANLPQELK

SEQ ID NO: 74519 - protein, 9 aa, Homo sapiens
  misc_feature: Table A; Target 74519; HLA-A*68:01; RLN2; ENSG00000107014; TAA
VANLPQELK

SEQ ID NO: 74520 - protein, 9 aa, Homo sapiens
  misc_feature: Table A; Target 74520; HLA-C*07:06; RLN2; ENSG00000107014; TAA
VANLPQELK

SEQ ID NO: 74521 - protein, 10 aa, Homo sapiens
  misc_feature: Table A; Target 74521; HLA-C*03:03; RLN2; ENSG00000107014; TAA
VANLPQELKL

SEQ ID NO: 74522 - protein, 10 aa, Homo sapiens
  misc_feature: Table A; Target 74522; HLA-C*03:04; RLN2; ENSG00000107014; TAA
VANLPQELKL

SEQ ID NO: 74523 - protein, 10 aa, Homo sapiens
  misc_feature: Table A; Target 74523; HLA-C*16:01; RLN2; ENSG00000107014; TAA
VANLPQELKL

SEQ ID NO: 74524 - protein, 10 aa, Homo sapiens
  misc_feature: Table A; Target 74524; HLA-C*16:02; RLN2; ENSG00000107014; TAA
VANLPQELKL

SEQ ID NO: 74525 - protein, 8 aa, Homo sapiens
  misc_feature: Table A; Target 74525; HLA-B*08:01; RLN2; ENSG00000107014; TAA
VGCTKRSL

SEQ ID NO: 74526 - protein, 8 aa, Homo sapiens
  misc_feature: Table A; Target 74526; HLA-C*16:01; RLN2; ENSG00000107014; TAA
VGCTKRSL

SEQ ID NO: 74527 - protein, 9 aa, Homo sapiens
  misc_feature: Table A; Target 74527; HLA-A*23:01; RLN2; ENSG00000107014; TAA
VLKDSSLLF

SEQ ID NO: 74528 - protein, 9 aa, Homo sapiens
  misc_feature: Table A; Target 74528; HLA-A*24:02; RLN2; ENSG00000107014; TAA
VLKDSSLLF

SEQ ID NO: 74529 - protein, 9 aa, Homo sapiens
  misc_feature: Table A; Target 74529; HLA-A*29:02; RLN2; ENSG00000107014; TAA
VLKDSSLLF

SEQ ID NO: 74530 - protein, 9 aa, Homo sapiens
  misc_feature: Table A; Target 74530; HLA-B*46:01; RLN2; ENSG00000107014; TAA
VLKDSSLLF

SEQ ID NO: 74531 - protein, 9 aa, Homo sapiens
  misc_feature: Table A; Target 74531; HLA-B*07:02; RLN2; ENSG00000107014; TAA
VPVLKDSSL

SEQ ID NO: 74532 - protein, 9 aa, Homo sapiens
  misc_feature: Table A; Target 74532; HLA-B*08:01; RLN2; ENSG00000107014; TAA
VPVLKDSSL

SEQ ID NO: 74533 - protein, 9 aa, Homo sapiens
  misc_feature: Table A; Target 74533; HLA-B*35:01; RLN2; ENSG00000107014; TAA
VPVLKDSSL

SEQ ID NO: 74534 - protein, 9 aa, Homo sapiens
  misc_feature: Table A; Target 74534; HLA-B*35:03; RLN2; ENSG00000107014; TAA
VPVLKDSSL

SEQ ID NO: 74535 - protein, 9 aa, Homo sapiens
  misc_feature: Table A; Target 74535; HLA-B*55:01; RLN2; ENSG00000107014; TAA
VPVLKDSSL

SEQ ID NO: 74536 - protein, 9 aa, Homo sapiens
  misc_feature: Table A; Target 74536; HLA-B*56:01; RLN2; ENSG00000107014; TAA
VPVLKDSSL

SEQ ID NO: 74537 - protein, 9 aa, Homo sapiens
  misc_feature: Table A; Target 74537; HLA-C*07:02; RLN2; ENSG00000107014; TAA
VPVLKDSSL

SEQ ID NO: 74538 - protein, 9 aa, Homo sapiens
  misc_feature: Table A; Target 74538; HLA-C*14:02; RLN2; ENSG00000107014; TAA
VPVLKDSSL

SEQ ID NO: 74539 - protein, 9 aa, Homo sapiens
  misc_feature: Table A; Target 74539; HLA-A*01:01; RLN2; ENSG00000107014; TAA
YLGLDTHSR

SEQ ID NO: 74540 - protein, 9 aa, Homo sapiens
  misc_feature: Table A; Target 74540; HLA-A*31:01; RLN2; ENSG00000107014; TAA
YLGLDTHSR

SEQ ID NO: 74541 - protein, 9 aa, Homo sapiens
  misc_feature: Table A; Target 74541; HLA-A*33:01; RLN2; ENSG00000107014; TAA
YLGLDTHSR

SEQ ID NO: 74542 - protein, 9 aa, Homo sapiens
  misc_feature: Table A; Target 74542; HLA-A*33:03; RLN2; ENSG00000107014; TAA
YLGLDTHSR

SEQ ID NO: 74543 - protein, 10 aa, Homo sapiens
  misc_feature: Table A; Target 74543; HLA-A*01:01; RLN2; ENSG00000107014; TAA
YLGLDTHSRK

SEQ ID NO: 74544 - protein, 11 aa, Homo sapiens
  misc_feature: Table A; Target 74544; HLA-A*29:02; RNASE10; ENSG00000182545; TAA
AFIHEDLNTVK

SEQ ID NO: 74545 - protein, 11 aa, Homo sapiens
  misc_feature: Table A; Target 74545; HLA-A*31:01; RNASE10; ENSG00000182545; TAA
AFIHEDLNTVK

SEQ ID NO: 74546 - protein, 9 aa, Homo sapiens
  misc_feature: Table A; Target 74546; HLA-A*29:02; RNASE10; ENSG00000182545; TAA
ALFQSNKDY

SEQ ID NO: 74547 - protein, 9 aa, Homo sapiens
  misc_feature: Table A; Target 74547; HLA-A*30:02; RNASE10; ENSG00000182545; TAA
ALFQSNKDY

SEQ ID NO: 74548 - protein, 9 aa, Homo sapiens
  misc_feature: Table A; Target 74548; HLA-B*15:01; RNASE10; ENSG00000182545; TAA
ALFQSNKDY

SEQ ID NO: 74549 - protein, 9 aa, Homo sapiens
  misc_feature: Table A; Target 74549; HLA-B*15:03; RNASE10; ENSG00000182545; TAA
ALFQSNKDY

SEQ ID NO: 74550 - protein, 9 aa, Homo sapiens
  misc_feature: Table A; Target 74550; HLA-B*46:01; RNASE10; ENSG00000182545; TAA
ALFQSNKDY

SEQ ID NO: 74551 - protein, 9 aa, Homo sapiens
  misc_feature: Table A; Target 74551; HLA-C*16:04; RNASE10; ENSG00000182545; TAA
ALFQSNKDY

SEQ ID NO: 74552 - protein, 10 aa, Homo sapiens
  misc_feature: Table A; Target 74552; HLA-A*02:01; RNASE10; ENSG00000182545; TAA
ALFQSNKDYL

SEQ ID NO: 74553 - protein, 10 aa, Homo sapiens
  misc_feature: Table A; Target 74553; HLA-A*02:03; RNASE10; ENSG00000182545; TAA
ALFQSNKDYL

SEQ ID NO: 74554 - protein, 10 aa, Homo sapiens
  misc_feature: Table A; Target 74554; HLA-A*02:04; RNASE10; ENSG00000182545; TAA
ALFQSNKDYL

SEQ ID NO: 74555 - protein, 10 aa, Homo sapiens
  misc_feature: Table A; Target 74555; HLA-A*02:07; RNASE10; ENSG00000182545; TAA
ALFQSNKDYL

SEQ ID NO: 74556 - protein, 10 aa, Homo sapiens
  misc_feature: Table A; Target 74556; HLA-B*27:05; RNASE10; ENSG00000182545; TAA
ALFQSNKDYL

SEQ ID NO: 74557 - protein, 9 aa, Homo sapiens
  misc_feature: Table A; Target 74557; HLA-A*03:01; RNASE10; ENSG00000182545; TAA
ASALFQSNK

SEQ ID NO: 74558 - protein, 9 aa, Homo sapiens
  misc_feature: Table A; Target 74558; HLA-A*03:02; RNASE10; ENSG00000182545; TAA
ASALFQSNK

SEQ ID NO: 74559 - protein, 9 aa, Homo sapiens
  misc_feature: Table A; Target 74559; HLA-B*27:02; RNASE10; ENSG00000182545; TAA
ASALFQSNK

SEQ ID NO: 74560 - protein, 9 aa, Homo sapiens
  misc_feature: Table A; Target 74560; HLA-C*07:06; RNASE10; ENSG00000182545; TAA
ASALFQSNK

SEQ ID NO: 74561 - protein, 11 aa, Homo sapiens
  misc_feature: Table A; Target 74561; HLA-A*30:02; RNASE10; ENSG00000182545; TAA
ASALFQSNKDY

SEQ ID NO: 74562 - protein, 11 aa, Homo sapiens
  misc_feature: Table A; Target 74562; HLA-C*12:03; RNASE10; ENSG00000182545; TAA
ASALFQSNKDY

SEQ ID NO: 74563 - protein, 10 aa, Homo sapiens
  misc_feature: Table A; Target 74563; HLA-B*27:05; RNASE10; ENSG00000182545; TAA
AVLEESDQPL

SEQ ID NO: 74564 - protein, 10 aa, Homo sapiens
  misc_feature: Table A; Target 74564; HLA-B*35:03; RNASE10; ENSG00000182545; TAA
AVLEESDQPL

SEQ ID NO: 74565 - protein, 9 aa, Homo sapiens
  misc_feature: Table A; Target 74565; HLA-B*49:01; RNASE10; ENSG00000182545; TAA
CELSQPDQV

SEQ ID NO: 74566 - protein, 9 aa, Homo sapiens
  misc_feature: Table A; Target 74566; HLA-C*04:01; RNASE10; ENSG00000182545; TAA
CNDMMAHKM

SEQ ID NO: 74567 - protein, 8 aa, Homo sapiens
  misc_feature: Table A; Target 74567; HLA-B*18:01; RNASE10; ENSG00000182545; TAA
DEVGGNKM

SEQ ID NO: 74568 - protein, 9 aa, Homo sapiens
  misc_feature: Table A; Target 74568; HLA-A*30:01; RNASE10; ENSG00000182545; TAA
DEVGGNKML

SEQ ID NO: 74569 - protein, 9 aa, Homo sapiens
  misc_feature: Table A; Target 74569; HLA-B*18:01; RNASE10; ENSG00000182545; TAA
DEVGGNKML

SEQ ID NO: 74570 - protein, 9 aa, Homo sapiens
  misc_feature: Table A; Target 74570; HLA-B*40:01; RNASE10; ENSG00000182545; TAA
DEVGGNKML

SEQ ID NO: 74571 - protein, 9 aa, Homo sapiens
  misc_feature: Table A; Target 74571; HLA-B*44:02; RNASE10; ENSG00000182545; TAA
DEVGGNKML

SEQ ID NO: 74572 - protein, 9 aa, Homo sapiens
  misc_feature: Table A; Target 74572; HLA-B*44:03; RNASE10; ENSG00000182545; TAA
DEVGGNKML

SEQ ID NO: 74573 - protein, 9 aa, Homo sapiens
  misc_feature: Table A; Target 74573; HLA-B*35:03; RNASE10; ENSG00000182545; TAA
DGTQTTETL

SEQ ID NO: 74574 - protein, 9 aa, Homo sapiens
  misc_feature: Table A; Target 74574; HLA-B*51:01; RNASE10; ENSG00000182545; TAA
DGTQTTETL

SEQ ID NO: 74575 - protein, 8 aa, Homo sapiens
  misc_feature: Table A; Target 74575; HLA-B*08:01; RNASE10; ENSG00000182545; TAA
DLNTVKAV

SEQ ID NO: 74576 - protein, 8 aa, Homo sapiens
  misc_feature: Table A; Target 74576; HLA-B*51:01; RNASE10; ENSG00000182545; TAA
DLNTVKAV

SEQ ID NO: 74577 - protein, 9 aa, Homo sapiens
  misc_feature: Table A; Target 74577; HLA-B*08:01; RNASE10; ENSG00000182545; TAA
DLNTVKAVC

SEQ ID NO: 74578 - protein, 10 aa, Homo sapiens
  misc_feature: Table A; Target 74578; HLA-A*33:01; RNASE10; ENSG00000182545; TAA
DLNTVKAVCN

SEQ ID NO: 74579 - protein, 8 aa, Homo sapiens
  misc_feature: Table A; Target 74579; HLA-B*08:01; RNASE10; ENSG00000182545; TAA
DMMAHKMK

SEQ ID NO: 74580 - protein, 9 aa, Homo sapiens
  misc_feature: Table A; Target 74580; HLA-B*35:03; RNASE10; ENSG00000182545; TAA
DPILGEDEV

SEQ ID NO: 74581 - protein, 9 aa, Homo sapiens
  misc_feature: Table A; Target 74581; HLA-B*51:01; RNASE10; ENSG00000182545; TAA
DPILGEDEV

SEQ ID NO: 74582 - protein, 9 aa, Homo sapiens
  misc_feature: Table A; Target 74582; HLA-A*26:01; RNASE10; ENSG00000182545; TAA
DQVTPNCNY

SEQ ID NO: 74583 - protein, 9 aa, Homo sapiens
  misc_feature: Table A; Target 74583; HLA-B*15:03; RNASE10; ENSG00000182545; TAA
DQVTPNCNY

SEQ ID NO: 74584 - protein, 9 aa, Homo sapiens
  misc_feature: Table A; Target 74584; HLA-B*18:01; RNASE10; ENSG00000182545; TAA
DQVTPNCNY

SEQ ID NO: 74585 - protein, 9 aa, Homo sapiens
  misc_feature: Table A; Target 74585; HLA-B*39:01; RNASE10; ENSG00000182545; TAA
DQVTPNCNY

SEQ ID NO: 74586 - protein, 10 aa, Homo sapiens
  misc_feature: Table A; Target 74586; HLA-A*33:01; RNASE10; ENSG00000182545; TAA
DYLRLDQTDR

SEQ ID NO: 74587 - protein, 9 aa, Homo sapiens
  misc_feature: Table A; Target 74587; HLA-A*33:01; RNASE10; ENSG00000182545; TAA
ECNDMMAHK

SEQ ID NO: 74588 - protein, 9 aa, Homo sapiens
  misc_feature: Table A; Target 74588; HLA-A*33:03; RNASE10; ENSG00000182545; TAA
ECNDMMAHK

SEQ ID NO: 74589 - protein, 10 aa, Homo sapiens
  misc_feature: Table A; Target 74589; HLA-A*26:01; RNASE10; ENSG00000182545; TAA
ECNDMMAHKM

SEQ ID NO: 74590 - protein, 10 aa, Homo sapiens
  misc_feature: Table A; Target 74590; HLA-A*25:01; RNASE10; ENSG00000182545; TAA
EESDQPLNEF

SEQ ID NO: 74591 - protein, 10 aa, Homo sapiens
  misc_feature: Table A; Target 74591; HLA-B*18:01; RNASE10; ENSG00000182545; TAA
EESDQPLNEF

SEQ ID NO: 74592 - protein, 10 aa, Homo sapiens
  misc_feature: Table A; Target 74592; HLA-B*44:02; RNASE10; ENSG00000182545; TAA
EESDQPLNEF

SEQ ID NO: 74593 - protein, 10 aa, Homo sapiens
  misc_feature: Table A; Target 74593; HLA-B*44:03; RNASE10; ENSG00000182545; TAA
EESDQPLNEF

SEQ ID NO: 74594 - protein, 10 aa, Homo sapiens
  misc_feature: Table A; Target 74594; HLA-C*16:04; RNASE10; ENSG00000182545; TAA
EESDQPLNEF

SEQ ID NO: 74595 - protein, 11 aa, Homo sapiens
  misc_feature: Table A; Target 74595; HLA-B*27:02; RNASE10; ENSG00000182545; TAA
EESDQPLNEFW

SEQ ID NO: 74596 - protein, 11 aa, Homo sapiens
  misc_feature: Table A; Target 74596; HLA-B*44:02; RNASE10; ENSG00000182545; TAA
EESDQPLNEFW

SEQ ID NO: 74597 - protein, 11 aa, Homo sapiens
  misc_feature: Table A; Target 74597; HLA-B*44:03; RNASE10; ENSG00000182545; TAA
EESDQPLNEFW

SEQ ID NO: 74598 - protein, 11 aa, Homo sapiens
  misc_feature: Table A; Target 74598; HLA-C*16:04; RNASE10; ENSG00000182545; TAA
EESDQPLNEFW

SEQ ID NO: 74599 - protein, 11 aa, Homo sapiens
  misc_feature: Table A; Target 74599; HLA-B*38:01; RNASE10; ENSG00000182545; TAA
EGDGTQTTETL

SEQ ID NO: 74600 - protein, 11 aa, Homo sapiens
  misc_feature: Table A; Target 74600; HLA-B*39:01; RNASE10; ENSG00000182545; TAA
EGDGTQTTETL

SEQ ID NO: 74601 - protein, 11 aa, Homo sapiens
  misc_feature: Table A; Target 74601; HLA-C*05:01; RNASE10; ENSG00000182545; TAA
EGDGTQTTETL

SEQ ID NO: 74602 - protein, 10 aa, Homo sapiens
  misc_feature: Table A; Target 74602; HLA-A*25:01; RNASE10; ENSG00000182545; TAA
EPSQSCIAQY

SEQ ID NO: 74603 - protein, 10 aa, Homo sapiens
  misc_feature: Table A; Target 74603; HLA-A*26:01; RNASE10; ENSG00000182545; TAA
EPSQSCIAQY

SEQ ID NO: 74604 - protein, 10 aa, Homo sapiens
  misc_feature: Table A; Target 74604; HLA-A*33:03; RNASE10; ENSG00000182545; TAA
EPSQSCIAQY

SEQ ID NO: 74605 - protein, 10 aa, Homo sapiens
  misc_feature: Table A; Target 74605; HLA-A*68:01; RNASE10; ENSG00000182545; TAA
EPSQSCIAQY

SEQ ID NO: 74606 - protein, 10 aa, Homo sapiens
  misc_feature: Table A; Target 74606; HLA-B*35:01; RNASE10; ENSG00000182545; TAA
EPSQSCIAQY

SEQ ID NO: 74607 - protein, 9 aa, Homo sapiens
  misc_feature: Table A; Target 74607; HLA-A*01:01; RNASE10; ENSG00000182545; TAA
ESDQPLNEF

SEQ ID NO: 74608 - protein, 9 aa, Homo sapiens
  misc_feature: Table A; Target 74608; HLA-C*05:01; RNASE10; ENSG00000182545; TAA
ESDQPLNEF

SEQ ID NO: 74609 - protein, 8 aa, Homo sapiens
  misc_feature: Table A; Target 74609; HLA-A*33:01; RNASE10; ENSG00000182545; TAA
ETLVLSNK

SEQ ID NO: 74610 - protein, 8 aa, Homo sapiens
  misc_feature: Table A; Target 74610; HLA-A*33:03; RNASE10; ENSG00000182545; TAA
ETLVLSNK

SEQ ID NO: 74611 - protein, 9 aa, Homo sapiens
  misc_feature: Table A; Target 74611; HLA-A*26:01; RNASE10; ENSG00000182545; TAA
EVGGNKMLR

SEQ ID NO: 74612 - protein, 9 aa, Homo sapiens
  misc_feature: Table A; Target 74612; HLA-A*33:01; RNASE10; ENSG00000182545; TAA
EVGGNKMLR

SEQ ID NO: 74613 - protein, 9 aa, Homo sapiens
  misc_feature: Table A; Target 74613; HLA-A*33:03; RNASE10; ENSG00000182545; TAA
EVGGNKMLR

SEQ ID NO: 74614 - protein, 9 aa, Homo sapiens
  misc_feature: Table A; Target 74614; HLA-A*68:01; RNASE10; ENSG00000182545; TAA
EVGGNKMLR

SEQ ID NO: 74615 - protein, 9 aa, Homo sapiens
  misc_feature: Table A; Target 74615; HLA-C*07:06; RNASE10; ENSG00000182545; TAA
EVGGNKMLR

SEQ ID NO: 74616 - protein, 9 aa, Homo sapiens
  misc_feature: Table A; Target 74616; HLA-A*24:02; RNASE10; ENSG00000182545; TAA
FFMLLMLLL

SEQ ID NO: 74617 - protein, 9 aa, Homo sapiens
  misc_feature: Table A; Target 74617; HLA-A*02:03; RNASE10; ENSG00000182545; TAA
FIHEDLNTV

SEQ ID NO: 74618 - protein, 9 aa, Homo sapiens
  misc_feature: Table A; Target 74618; HLA-A*02:04; RNASE10; ENSG00000182545; TAA
FIHEDLNTV

SEQ ID NO: 74619 - protein, 9 aa, Homo sapiens
  misc_feature: Table A; Target 74619; HLA-A*02:07; RNASE10; ENSG00000182545; TAA
FIHEDLNTV

SEQ ID NO: 74620 - protein, 9 aa, Homo sapiens
  misc_feature: Table A; Target 74620; HLA-A*25:01; RNASE10; ENSG00000182545; TAA
FIHEDLNTV

SEQ ID NO: 74621 - protein, 9 aa, Homo sapiens
  misc_feature: Table A; Target 74621; HLA-A*26:01; RNASE10; ENSG00000182545; TAA
FIHEDLNTV

SEQ ID NO: 74622 - protein, 9 aa, Homo sapiens
  misc_feature: Table A; Target 74622; HLA-A*30:01; RNASE10; ENSG00000182545; TAA
FIHEDLNTV

SEQ ID NO: 74623 - protein, 9 aa, Homo sapiens
  misc_feature: Table A; Target 74623; HLA-B*08:01; RNASE10; ENSG00000182545; TAA
FIHEDLNTV

SEQ ID NO: 74624 - protein, 9 aa, Homo sapiens
  misc_feature: Table A; Target 74624; HLA-B*13:02; RNASE10; ENSG00000182545; TAA
FIHEDLNTV

SEQ ID NO: 74625 - protein, 9 aa, Homo sapiens
  misc_feature: Table A; Target 74625; HLA-B*27:05; RNASE10; ENSG00000182545; TAA
FIHEDLNTV

SEQ ID NO: 74626 - protein, 9 aa, Homo sapiens
  misc_feature: Table A; Target 74626; HLA-B*35:03; RNASE10; ENSG00000182545; TAA
FIHEDLNTV

SEQ ID NO: 74627 - protein, 9 aa, Homo sapiens
  misc_feature: Table A; Target 74627; HLA-B*38:01; RNASE10; ENSG00000182545; TAA
FIHEDLNTV

SEQ ID NO: 74628 - protein, 9 aa, Homo sapiens
  misc_feature: Table A; Target 74628; HLA-B*39:01; RNASE10; ENSG00000182545; TAA
FIHEDLNTV

SEQ ID NO: 74629 - protein, 9 aa, Homo sapiens
  misc_feature: Table A; Target 74629; HLA-B*40:02; RNASE10; ENSG00000182545; TAA
FIHEDLNTV

SEQ ID NO: 74630 - protein, 9 aa, Homo sapiens
  misc_feature: Table A; Target 74630; HLA-B*46:01; RNASE10; ENSG00000182545; TAA
FIHEDLNTV

SEQ ID NO: 74631 - protein, 9 aa, Homo sapiens
  misc_feature: Table A; Target 74631; HLA-B*49:01; RNASE10; ENSG00000182545; TAA
FIHEDLNTV

SEQ ID NO: 74632 - protein, 9 aa, Homo sapiens
  misc_feature: Table A; Target 74632; HLA-B*51:01; RNASE10; ENSG00000182545; TAA
FIHEDLNTV

SEQ ID NO: 74633 - protein, 9 aa, Homo sapiens
  misc_feature: Table A; Target 74633; HLA-B*54:01; RNASE10; ENSG00000182545; TAA
FIHEDLNTV

SEQ ID NO: 74634 - protein, 9 aa, Homo sapiens
  misc_feature: Table A; Target 74634; HLA-B*55:01; RNASE10; ENSG00000182545; TAA
FIHEDLNTV

SEQ ID NO: 74635 - protein, 9 aa, Homo sapiens
  misc_feature: Table A; Target 74635; HLA-B*56:01; RNASE10; ENSG00000182545; TAA
FIHEDLNTV

SEQ ID NO: 74636 - protein, 9 aa, Homo sapiens
  misc_feature: Table A; Target 74636; HLA-C*01:02; RNASE10; ENSG00000182545; TAA
FIHEDLNTV

SEQ ID NO: 74637 - protein, 9 aa, Homo sapiens
  misc_feature: Table A; Target 74637; HLA-C*02:02; RNASE10; ENSG00000182545; TAA
FIHEDLNTV

SEQ ID NO: 74638 - protein, 9 aa, Homo sapiens
  misc_feature: Table A; Target 74638; HLA-C*03:03; RNASE10; ENSG00000182545; TAA
FIHEDLNTV

SEQ ID NO: 74639 - protein, 9 aa, Homo sapiens
  misc_feature: Table A; Target 74639; HLA-C*03:04; RNASE10; ENSG00000182545; TAA
FIHEDLNTV

SEQ ID NO: 74640 - protein, 9 aa, Homo sapiens
  misc_feature: Table A; Target 74640; HLA-C*05:01; RNASE10; ENSG00000182545; TAA
FIHEDLNTV

SEQ ID NO: 74641 - protein, 9 aa, Homo sapiens
  misc_feature: Table A; Target 74641; HLA-C*12:03; RNASE10; ENSG00000182545; TAA
FIHEDLNTV

SEQ ID NO: 74642 - protein, 9 aa, Homo sapiens
  misc_feature: Table A; Target 74642; HLA-C*14:02; RNASE10; ENSG00000182545; TAA
FIHEDLNTV

SEQ ID NO: 74643 - protein, 9 aa, Homo sapiens
  misc_feature: Table A; Target 74643; HLA-C*16:02; RNASE10; ENSG00000182545; TAA
FIHEDLNTV

SEQ ID NO: 74644 - protein, 9 aa, Homo sapiens
  misc_feature: Table A; Target 74644; HLA-C*16:04; RNASE10; ENSG00000182545; TAA
FIHEDLNTV

SEQ ID NO: 74645 - protein, 10 aa, Homo sapiens
  misc_feature: Table A; Target 74645; HLA-A*01:01; RNASE10; ENSG00000182545; TAA
FIHEDLNTVK

SEQ ID NO: 74646 - protein, 10 aa, Homo sapiens
  misc_feature: Table A; Target 74646; HLA-A*03:01; RNASE10; ENSG00000182545; TAA
FIHEDLNTVK

SEQ ID NO: 74647 - protein, 10 aa, Homo sapiens
  misc_feature: Table A; Target 74647; HLA-A*68:01; RNASE10; ENSG00000182545; TAA
FIHEDLNTVK

SEQ ID NO: 74648 - protein, 10 aa, Homo sapiens
  misc_feature: Table A; Target 74648; HLA-A*68:02; RNASE10; ENSG00000182545; TAA
FIHEDLNTVK

SEQ ID NO: 74649 - protein, 11 aa, Homo sapiens
  misc_feature: Table A; Target 74649; HLA-B*54:01; RNASE10; ENSG00000182545; TAA
FIHEDLNTVKA

SEQ ID NO: 74650 - protein, 8 aa, Homo sapiens
  misc_feature: Table A; Target 74650; HLA-B*38:01; RNASE10; ENSG00000182545; TAA
FQSNKDYL

SEQ ID NO: 74651 - protein, 8 aa, Homo sapiens
  misc_feature: Table A; Target 74651; HLA-B*39:01; RNASE10; ENSG00000182545; TAA
FQSNKDYL

SEQ ID NO: 74652 - protein, 10 aa, Homo sapiens
  misc_feature: Table A; Target 74652; HLA-A*30:01; RNASE10; ENSG00000182545; TAA
GEDEVGGNKM

SEQ ID NO: 74653 - protein, 10 aa, Homo sapiens
  misc_feature: Table A; Target 74653; HLA-B*27:05; RNASE10; ENSG00000182545; TAA
GEDEVGGNKM

SEQ ID NO: 74654 - protein, 10 aa, Homo sapiens
  misc_feature: Table A; Target 74654; HLA-B*38:01; RNASE10; ENSG00000182545; TAA
GEDEVGGNKM

SEQ ID NO: 74655 - protein, 10 aa, Homo sapiens
  misc_feature: Table A; Target 74655; HLA-B*40:02; RNASE10; ENSG00000182545; TAA
GEDEVGGNKM

SEQ ID NO: 74656 - protein, 10 aa, Homo sapiens
  misc_feature: Table A; Target 74656; HLA-B*44:02; RNASE10; ENSG00000182545; TAA
GEDEVGGNKM

SEQ ID NO: 74657 - protein, 10 aa, Homo sapiens
  misc_feature: Table A; Target 74657; HLA-B*44:03; RNASE10; ENSG00000182545; TAA
GEDEVGGNKM

SEQ ID NO: 74658 - protein, 10 aa, Homo sapiens
  misc_feature: Table A; Target 74658; HLA-B*49:01; RNASE10; ENSG00000182545; TAA
GEDEVGGNKM

SEQ ID NO: 74659 - protein, 10 aa, Homo sapiens
  misc_feature: Table A; Target 74659; HLA-C*16:04; RNASE10; ENSG00000182545; TAA
GEDEVGGNKM

SEQ ID NO: 74660 - protein, 11 aa, Homo sapiens
  misc_feature: Table A; Target 74660; HLA-A*30:01; RNASE10; ENSG00000182545; TAA
GEDEVGGNKML

SEQ ID NO: 74661 - protein, 11 aa, Homo sapiens
  misc_feature: Table A; Target 74661; HLA-B*27:05; RNASE10; ENSG00000182545; TAA
GEDEVGGNKML

SEQ ID NO: 74662 - protein, 11 aa, Homo sapiens
  misc_feature: Table A; Target 74662; HLA-B*40:02; RNASE10; ENSG00000182545; TAA
GEDEVGGNKML

SEQ ID NO: 74663 - protein, 11 aa, Homo sapiens
  misc_feature: Table A; Target 74663; HLA-B*44:02; RNASE10; ENSG00000182545; TAA
GEDEVGGNKML

SEQ ID NO: 74664 - protein, 11 aa, Homo sapiens
  misc_feature: Table A; Target 74664; HLA-B*44:03; RNASE10; ENSG00000182545; TAA
GEDEVGGNKML

SEQ ID NO: 74665 - protein, 11 aa, Homo sapiens
  misc_feature: Table A; Target 74665; HLA-B*49:01; RNASE10; ENSG00000182545; TAA
GEDEVGGNKML

SEQ ID NO: 74666 - protein, 11 aa, Homo sapiens
  misc_feature: Table A; Target 74666; HLA-C*12:03; RNASE10; ENSG00000182545; TAA
GEDEVGGNKML

SEQ ID NO: 74667 - protein, 11 aa, Homo sapiens
  misc_feature: Table A; Target 74667; HLA-C*16:04; RNASE10; ENSG00000182545; TAA
GEDEVGGNKML

SEQ ID NO: 74668 - protein, 9 aa, Homo sapiens
  misc_feature: Table A; Target 74668; HLA-A*02:01; RNASE10; ENSG00000182545; TAA
GLGLGLHMA

SEQ ID NO: 74669 - protein, 9 aa, Homo sapiens
  misc_feature: Table A; Target 74669; HLA-A*02:03; RNASE10; ENSG00000182545; TAA
GLGLGLHMA

SEQ ID NO: 74670 - protein, 9 aa, Homo sapiens
  misc_feature: Table A; Target 74670; HLA-A*02:01; RNASE10; ENSG00000182545; TAA
GLGLHMATA

SEQ ID NO: 74671 - protein, 9 aa, Homo sapiens
  misc_feature: Table A; Target 74671; HLA-A*02:03; RNASE10; ENSG00000182545; TAA
GLGLHMATA

SEQ ID NO: 74672 - protein, 10 aa, Homo sapiens
  misc_feature: Table A; Target 74672; HLA-A*02:03; RNASE10; ENSG00000182545; TAA
GLGMGLGLGL

SEQ ID NO: 74673 - protein, 8 aa, Homo sapiens
  misc_feature: Table A; Target 74673; HLA-B*13:02; RNASE10; ENSG00000182545; TAA
GLHMATAV

SEQ ID NO: 74674 - protein, 9 aa, Homo sapiens
  misc_feature: Table A; Target 74674; HLA-A*30:01; RNASE10; ENSG00000182545; TAA
HEDLNTVKA

SEQ ID NO: 74675 - protein, 9 aa, Homo sapiens
  misc_feature: Table A; Target 74675; HLA-B*18:01; RNASE10; ENSG00000182545; TAA
HEDLNTVKA

SEQ ID NO: 74676 - protein, 9 aa, Homo sapiens
  misc_feature: Table A; Target 74676; HLA-B*40:01; RNASE10; ENSG00000182545; TAA
HEDLNTVKA

SEQ ID NO: 74677 - protein, 9 aa, Homo sapiens
  misc_feature: Table A; Target 74677; HLA-B*40:02; RNASE10; ENSG00000182545; TAA
HEDLNTVKA

SEQ ID NO: 74678 - protein, 9 aa, Homo sapiens
  misc_feature: Table A; Target 74678; HLA-B*49:01; RNASE10; ENSG00000182545; TAA
HEDLNTVKA

SEQ ID NO: 74679 - protein, 10 aa, Homo sapiens
  misc_feature: Table A; Target 74679; HLA-A*30:01; RNASE10; ENSG00000182545; TAA
HEDLNTVKAV

SEQ ID NO: 74680 - protein, 10 aa, Homo sapiens
  misc_feature: Table A; Target 74680; HLA-B*40:01; RNASE10; ENSG00000182545; TAA
HEDLNTVKAV

SEQ ID NO: 74681 - protein, 10 aa, Homo sapiens
  misc_feature: Table A; Target 74681; HLA-B*40:02; RNASE10; ENSG00000182545; TAA
HEDLNTVKAV

SEQ ID NO: 74682 - protein, 10 aa, Homo sapiens
  misc_feature: Table A; Target 74682; HLA-B*49:01; RNASE10; ENSG00000182545; TAA
HEDLNTVKAV

SEQ ID NO: 74683 - protein, 8 aa, Homo sapiens
  misc_feature: Table A; Target 74683; HLA-B*39:01; RNASE10; ENSG00000182545; TAA
IHEDLNTV

SEQ ID NO: 74684 - protein, 8 aa, Homo sapiens
  misc_feature: Table A; Target 74684; HLA-C*05:01; RNASE10; ENSG00000182545; TAA
IHEDLNTV

SEQ ID NO: 74685 - protein, 9 aa, Homo sapiens
  misc_feature: Table A; Target 74685; HLA-B*27:05; RNASE10; ENSG00000182545; TAA
IHEDLNTVK

SEQ ID NO: 74686 - protein, 9 aa, Homo sapiens
  misc_feature: Table A; Target 74686; HLA-B*38:01; RNASE10; ENSG00000182545; TAA
IHEDLNTVK

SEQ ID NO: 74687 - protein, 9 aa, Homo sapiens
  misc_feature: Table A; Target 74687; HLA-B*39:01; RNASE10; ENSG00000182545; TAA
IHEDLNTVK

SEQ ID NO: 74688 - protein, 10 aa, Homo sapiens
  misc_feature: Table A; Target 74688; HLA-B*38:01; RNASE10; ENSG00000182545; TAA
IHEDLNTVKA

SEQ ID NO: 74689 - protein, 11 aa, Homo sapiens
  misc_feature: Table A; Target 74689; HLA-B*38:01; RNASE10; ENSG00000182545; TAA
IHEDLNTVKAV

SEQ ID NO: 74690 - protein, 11 aa, Homo sapiens
  misc_feature: Table A; Target 74690; HLA-A*03:02; RNASE10; ENSG00000182545; TAA
ILGEDEVGGNK

SEQ ID NO: 74691 - protein, 11 aa, Homo sapiens
  misc_feature: Table A; Target 74691; HLA-B*27:02; RNASE10; ENSG00000182545; TAA
ILGEDEVGGNK

SEQ ID NO: 74692 - protein, 9 aa, Homo sapiens
  misc_feature: Table A; Target 74692; HLA-A*23:01; RNASE10; ENSG00000182545; TAA
KAVCNSPVI

SEQ ID NO: 74693 - protein, 9 aa, Homo sapiens
  misc_feature: Table A; Target 74693; HLA-B*58:01; RNASE10; ENSG00000182545; TAA
KAVCNSPVI

SEQ ID NO: 74694 - protein, 9 aa, Homo sapiens
  misc_feature: Table A; Target 74694; HLA-C*16:02; RNASE10; ENSG00000182545; TAA
KAVCNSPVI

SEQ ID NO: 74695 - protein, 11 aa, Homo sapiens
  misc_feature: Table A; Target 74695; HLA-A*30:02; RNASE10; ENSG00000182545; TAA
KEPSQSCIAQY

SEQ ID NO: 74696 - protein, 11 aa, Homo sapiens
  misc_feature: Table A; Target 74696; HLA-B*44:02; RNASE10; ENSG00000182545; TAA
KEPSQSCIAQY

SEQ ID NO: 74697 - protein, 11 aa, Homo sapiens
  misc_feature: Table A; Target 74697; HLA-B*44:03; RNASE10; ENSG00000182545; TAA
KEPSQSCIAQY

SEQ ID NO: 74698 - protein, 11 aa, Homo sapiens
  misc_feature: Table A; Target 74698; HLA-C*04:01; RNASE10; ENSG00000182545; TAA
KEPSQSCIAQY

SEQ ID NO: 74699 - protein, 11 aa, Homo sapiens
  misc_feature: Table A; Target 74699; HLA-C*07:01; RNASE10; ENSG00000182545; TAA
KEPSQSCIAQY

SEQ ID NO: 74700 - protein, 11 aa, Homo sapiens
  misc_feature: Table A; Target 74700; HLA-C*16:04; RNASE10; ENSG00000182545; TAA
KEPSQSCIAQY

SEQ ID NO: 74701 - protein, 8 aa, Homo sapiens
  misc_feature: Table A; Target 74701; HLA-B*27:02; RNASE10; ENSG00000182545; TAA
KEVVQPGW

SEQ ID NO: 74702 - protein, 8 aa, Homo sapiens
  misc_feature: Table A; Target 74702; HLA-B*37:01; RNASE10; ENSG00000182545; TAA
KEVVQPGW

SEQ ID NO: 74703 - protein, 8 aa, Homo sapiens
  misc_feature: Table A; Target 74703; HLA-B*44:02; RNASE10; ENSG00000182545; TAA
KEVVQPGW

SEQ ID NO: 74704 - protein, 8 aa, Homo sapiens
  misc_feature: Table A; Target 74704; HLA-B*44:03; RNASE10; ENSG00000182545; TAA
KEVVQPGW

SEQ ID NO: 74705 - protein, 8 aa, Homo sapiens
  misc_feature: Table A; Target 74705; HLA-B*58:01; RNASE10; ENSG00000182545; TAA
KEVVQPGW

SEQ ID NO: 74706 - protein, 8 aa, Homo sapiens
  misc_feature: Table A; Target 74706; HLA-C*16:04; RNASE10; ENSG00000182545; TAA
KEVVQPGW

SEQ ID NO: 74707 - protein, 8 aa, Homo sapiens
  misc_feature: Table A; Target 74707; HLA-B*37:01; RNASE10; ENSG00000182545; TAA
KLNLVQIF

SEQ ID NO: 74708 - protein, 9 aa, Homo sapiens
  misc_feature: Table A; Target 74708; HLA-A*02:04; RNASE10; ENSG00000182545; TAA
KLNLVQIFF

SEQ ID NO: 74709 - protein, 9 aa, Homo sapiens
  misc_feature: Table A; Target 74709; HLA-A*02:07; RNASE10; ENSG00000182545; TAA
KLNLVQIFF

SEQ ID NO: 74710 - protein, 9 aa, Homo sapiens
  misc_feature: Table A; Target 74710; HLA-A*03:01; RNASE10; ENSG00000182545; TAA
KLNLVQIFF

SEQ ID NO: 74711 - protein, 9 aa, Homo sapiens
  misc_feature: Table A; Target 74711; HLA-B*57:01; RNASE10; ENSG00000182545; TAA
KLNLVQIFF

SEQ ID NO: 74712 - protein, 10 aa, Homo sapiens
  misc_feature: Table A; Target 74712; HLA-A*02:04; RNASE10; ENSG00000182545; TAA
KLNLVQIFFM

SEQ ID NO: 74713 - protein, 9 aa, Homo sapiens
  misc_feature: Table A; Target 74713; HLA-A*32:01; RNASE10; ENSG00000182545; TAA
KMKEPSQSC

SEQ ID NO: 74714 - protein, 9 aa, Homo sapiens
  misc_feature: Table A; Target 74714; HLA-B*46:01; RNASE10; ENSG00000182545; TAA
KMKEPSQSC

SEQ ID NO: 74715 - protein, 9 aa, Homo sapiens
  misc_feature: Table A; Target 74715; HLA-B*55:01; RNASE10; ENSG00000182545; TAA
KMKEPSQSC

SEQ ID NO: 74716 - protein, 9 aa, Homo sapiens
  misc_feature: Table A; Target 74716; HLA-A*24:02; RNASE10; ENSG00000182545; TAA
KMLRASALF

SEQ ID NO: 74717 - protein, 9 aa, Homo sapiens
  misc_feature: Table A; Target 74717; HLA-B*57:01; RNASE10; ENSG00000182545; TAA
KMLRASALF

SEQ ID NO: 74718 - protein, 8 aa, Homo sapiens
  misc_feature: Table A; Target 74718; HLA-C*14:02; RNASE10; ENSG00000182545; TAA
LFQSNKDY

SEQ ID NO: 74719 - protein, 9 aa, Homo sapiens
  misc_feature: Table A; Target 74719; HLA-C*14:02; RNASE10; ENSG00000182545; TAA
LFQSNKDYL

SEQ ID NO: 74720 - protein, 8 aa, Homo sapiens
  misc_feature: Table A; Target 74720; HLA-C*07:04; RNASE10; ENSG00000182545; TAA
LLGLGMGL

SEQ ID NO: 74721 - protein, 9 aa, Homo sapiens
  misc_feature: Table A; Target 74721; HLA-A*02:01; RNASE10; ENSG00000182545; TAA
LLLGLGMGL

SEQ ID NO: 74722 - protein, 9 aa, Homo sapiens
  misc_feature: Table A; Target 74722; HLA-A*02:04; RNASE10; ENSG00000182545; TAA
LLLGLGMGL

SEQ ID NO: 74723 - protein, 9 aa, Homo sapiens
  misc_feature: Table A; Target 74723; HLA-A*02:07; RNASE10; ENSG00000182545; TAA
LLLGLGMGL

SEQ ID NO: 74724 - protein, 11 aa, Homo sapiens
  misc_feature: Table A; Target 74724; HLA-A*02:04; RNASE10; ENSG00000182545; TAA
LLLGLGMGLGL

SEQ ID NO: 74725 - protein, 11 aa, Homo sapiens
  misc_feature: Table A; Target 74725; HLA-B*57:01; RNASE10; ENSG00000182545; TAA
LSNKEVVQPGW

SEQ ID NO: 74726 - protein, 11 aa, Homo sapiens
  misc_feature: Table A; Target 74726; HLA-B*58:01; RNASE10; ENSG00000182545; TAA
LSNKEVVQPGW

SEQ ID NO: 74727 - protein, 9 aa, Homo sapiens
  misc_feature: Table A; Target 74727; HLA-A*02:04; RNASE10; ENSG00000182545; TAA
LVQIFFMLL

SEQ ID NO: 74728 - protein, 10 aa, Homo sapiens
  misc_feature: Table A; Target 74728; HLA-B*54:01; RNASE10; ENSG00000182545; TAA
MGLGLGLHMA

SEQ ID NO: 74729 - protein, 10 aa, Homo sapiens
  misc_feature: Table A; Target 74729; HLA-A*02:01; RNASE10; ENSG00000182545; TAA
MLLLGLGMGL

SEQ ID NO: 74730 - protein, 10 aa, Homo sapiens
  misc_feature: Table A; Target 74730; HLA-A*02:04; RNASE10; ENSG00000182545; TAA
MLLLGLGMGL

SEQ ID NO: 74731 - protein, 9 aa, Homo sapiens
  misc_feature: Table A; Target 74731; HLA-A*02:04; RNASE10; ENSG00000182545; TAA
MLLMLLLGL

SEQ ID NO: 74732 - protein, 8 aa, Homo sapiens
  misc_feature: Table A; Target 74732; HLA-A*30:01; RNASE10; ENSG00000182545; TAA
NDMMAHKM

SEQ ID NO: 74733 - protein, 8 aa, Homo sapiens
  misc_feature: Table A; Target 74733; HLA-B*08:01; RNASE10; ENSG00000182545; TAA
NDMMAHKM

SEQ ID NO: 74734 - protein, 8 aa, Homo sapiens
  misc_feature: Table A; Target 74734; HLA-B*18:01; RNASE10; ENSG00000182545; TAA
NDMMAHKM

SEQ ID NO: 74735 - protein, 8 aa, Homo sapiens
  misc_feature: Table A; Target 74735; HLA-B*37:01; RNASE10; ENSG00000182545; TAA
NDMMAHKM

SEQ ID NO: 74736 - protein, 8 aa, Homo sapiens
  misc_feature: Table A; Target 74736; HLA-C*07:01; RNASE10; ENSG00000182545; TAA
NDMMAHKM

SEQ ID NO: 74737 - protein, 9 aa, Homo sapiens
  misc_feature: Table A; Target 74737; HLA-B*08:01; RNASE10; ENSG00000182545; TAA
NKMLRASAL

SEQ ID NO: 74738 - protein, 9 aa, Homo sapiens
  misc_feature: Table A; Target 74738; HLA-A*02:01; RNASE10; ENSG00000182545; TAA
NLVQIFFML

SEQ ID NO: 74739 - protein, 9 aa, Homo sapiens
  misc_feature: Table A; Target 74739; HLA-A*02:04; RNASE10; ENSG00000182545; TAA
NLVQIFFML

SEQ ID NO: 74740 - protein, 9 aa, Homo sapiens
  misc_feature: Table A; Target 74740; HLA-A*02:07; RNASE10; ENSG00000182545; TAA
NLVQIFFML

SEQ ID NO: 74741 - protein, 9 aa, Homo sapiens
  misc_feature: Table A; Target 74741; HLA-C*07:02; RNASE10; ENSG00000182545; TAA
NSPVIACEL

SEQ ID NO: 74742 - protein, 9 aa, Homo sapiens
  misc_feature: Table A; Target 74742; HLA-A*24:02; RNASE10; ENSG00000182545; TAA
NYLTSVIKK

SEQ ID NO: 74743 - protein, 9 aa, Homo sapiens
  misc_feature: Table A; Target 74743; HLA-A*33:01; RNASE10; ENSG00000182545; TAA
NYLTSVIKK

SEQ ID NO: 74744 - protein, 9 aa, Homo sapiens
  misc_feature: Table A; Target 74744; HLA-A*33:03; RNASE10; ENSG00000182545; TAA
NYLTSVIKK

SEQ ID NO: 74745 - protein, 10 aa, Homo sapiens
  misc_feature: Table A; Target 74745; HLA-C*04:01; RNASE10; ENSG00000182545; TAA
PDQVTPNCNY

SEQ ID NO: 74746 - protein, 9 aa, Homo sapiens
  misc_feature: Table A; Target 74746; HLA-C*04:01; RNASE10; ENSG00000182545; TAA
PFDLTLCEL

SEQ ID NO: 74747 - protein, 9 aa, Homo sapiens
  misc_feature: Table A; Target 74747; HLA-A*30:02; RNASE10; ENSG00000182545; TAA
PSQSCIAQY

SEQ ID NO: 74748 - protein, 9 aa, Homo sapiens
  misc_feature: Table A; Target 74748; HLA-C*07:01; RNASE10; ENSG00000182545; TAA
PSQSCIAQY

SEQ ID NO: 74749 - protein, 9 aa, Homo sapiens
  misc_feature: Table A; Target 74749; HLA-B*35:03; RNASE10; ENSG00000182545; TAA
QPDQVTPNC

SEQ ID NO: 74750 - protein, 9 aa, Homo sapiens
  misc_feature: Table A; Target 74750; HLA-B*55:01; RNASE10; ENSG00000182545; TAA
QPDQVTPNC

SEQ ID NO: 74751 - protein, 11 aa, Homo sapiens
  misc_feature: Table A; Target 74751; HLA-A*01:01; RNASE10; ENSG00000182545; TAA
QPDQVTPNCNY

SEQ ID NO: 74752 - protein, 11 aa, Homo sapiens
  misc_feature: Table A; Target 74752; HLA-B*35:01; RNASE10; ENSG00000182545; TAA
QPDQVTPNCNY

SEQ ID NO: 74753 - protein, 11 aa, Homo sapiens
  misc_feature: Table A; Target 74753; HLA-B*35:03; RNASE10; ENSG00000182545; TAA
QPDQVTPNCNY

SEQ ID NO: 74754 - protein, 11 aa, Homo sapiens
  misc_feature: Table A; Target 74754; HLA-B*55:01; RNASE10; ENSG00000182545; TAA
QPDQVTPNCNY

SEQ ID NO: 74755 - protein, 8 aa, Homo sapiens
  misc_feature: Table A; Target 74755; HLA-C*03:04; RNASE10; ENSG00000182545; TAA
QTTETLVL

SEQ ID NO: 74756 - protein, 11 aa, Homo sapiens
  misc_feature: Table A; Target 74756; HLA-A*03:02; RNASE10; ENSG00000182545; TAA
QTTETLVLSNK

SEQ ID NO: 74757 - protein, 11 aa, Homo sapiens
  misc_feature: Table A; Target 74757; HLA-A*11:01; RNASE10; ENSG00000182545; TAA
QTTETLVLSNK

SEQ ID NO: 74758 - protein, 11 aa, Homo sapiens
  misc_feature: Table A; Target 74758; HLA-A*68:01; RNASE10; ENSG00000182545; TAA
QTTETLVLSNK

SEQ ID NO: 74759 - protein, 11 aa, Homo sapiens
  misc_feature: Table A; Target 74759; HLA-B*27:02; RNASE10; ENSG00000182545; TAA
QTTETLVLSNK

SEQ ID NO: 74760 - protein, 9 aa, Homo sapiens
  misc_feature: Table A; Target 74760; HLA-C*16:02; RNASE10; ENSG00000182545; TAA
QVTPNCNYL

SEQ ID NO: 74761 - protein, 9 aa, Homo sapiens
  misc_feature: Table A; Target 74761; HLA-A*23:01; RNASE10; ENSG00000182545; TAA
QYAFIHEDL

SEQ ID NO: 74762 - protein, 9 aa, Homo sapiens
  misc_feature: Table A; Target 74762; HLA-A*24:02; RNASE10; ENSG00000182545; TAA
QYAFIHEDL

SEQ ID NO: 74763 - protein, 10 aa, Homo sapiens
  misc_feature: Table A; Target 74763; HLA-A*03:02; RNASE10; ENSG00000182545; TAA
RASALFQSNK

SEQ ID NO: 74764 - protein, 10 aa, Homo sapiens
  misc_feature: Table A; Target 74764; HLA-A*11:01; RNASE10; ENSG00000182545; TAA
RASALFQSNK

SEQ ID NO: 74765 - protein, 8 aa, Homo sapiens
  misc_feature: Table A; Target 74765; HLA-B*56:01; RNASE10; ENSG00000182545; TAA
RPFDLTLC

SEQ ID NO: 74766 - protein, 10 aa, Homo sapiens
  misc_feature: Table A; Target 74766; HLA-B*07:02; RNASE10; ENSG00000182545; TAA
RPFDLTLCEL

SEQ ID NO: 74767 - protein, 10 aa, Homo sapiens
  misc_feature: Table A; Target 74767; HLA-B*56:01; RNASE10; ENSG00000182545; TAA
RPFDLTLCEL

SEQ ID NO: 74768 - protein, 8 aa, Homo sapiens
  misc_feature: Table A; Target 74768; HLA-A*11:01; RNASE10; ENSG00000182545; TAA
SALFQSNK

SEQ ID NO: 74769 - protein, 10 aa, Homo sapiens
  misc_feature: Table A; Target 74769; HLA-A*30:02; RNASE10; ENSG00000182545; TAA
SALFQSNKDY

SEQ ID NO: 74770 - protein, 8 aa, Homo sapiens
  misc_feature: Table A; Target 74770; HLA-B*37:01; RNASE10; ENSG00000182545; TAA
SDQPLNEF

SEQ ID NO: 74771 - protein, 9 aa, Homo sapiens
  misc_feature: Table A; Target 74771; HLA-B*44:02; RNASE10; ENSG00000182545; TAA
SDQPLNEFW

SEQ ID NO: 74772 - protein, 9 aa, Homo sapiens
  misc_feature: Table A; Target 74772; HLA-B*44:03; RNASE10; ENSG00000182545; TAA
SDQPLNEFW

SEQ ID NO: 74773 - protein, 10 aa, Homo sapiens
  misc_feature: Table A; Target 74773; HLA-A*25:01; RNASE10; ENSG00000182545; TAA
SNKEVVQPGW

SEQ ID NO: 74774 - protein, 8 aa, Homo sapiens
  misc_feature: Table A; Target 74774; HLA-B*07:02; RNASE10; ENSG00000182545; TAA
SPVIACEL

SEQ ID NO: 74775 - protein, 8 aa, Homo sapiens
  misc_feature: Table A; Target 74775; HLA-B*08:01; RNASE10; ENSG00000182545; TAA
SPVIACEL

SEQ ID NO: 74776 - protein, 8 aa, Homo sapiens
  misc_feature: Table A; Target 74776; HLA-B*35:01; RNASE10; ENSG00000182545; TAA
SPVIACEL

SEQ ID NO: 74777 - protein, 8 aa, Homo sapiens
  misc_feature: Table A; Target 74777; HLA-B*35:03; RNASE10; ENSG00000182545; TAA
SPVIACEL

SEQ ID NO: 74778 - protein, 8 aa, Homo sapiens
  misc_feature: Table A; Target 74778; HLA-C*07:02; RNASE10; ENSG00000182545; TAA
SPVIACEL

SEQ ID NO: 74779 - protein, 8 aa, Homo sapiens
  misc_feature: Table A; Target 74779; HLA-A*30:02; RNASE10; ENSG00000182545; TAA
SQSCIAQY

SEQ ID NO: 74780 - protein, 8 aa, Homo sapiens
  misc_feature: Table A; Target 74780; HLA-B*15:01; RNASE10; ENSG00000182545; TAA
SQSCIAQY

SEQ ID NO: 74781 - protein, 8 aa, Homo sapiens
  misc_feature: Table A; Target 74781; HLA-B*15:03; RNASE10; ENSG00000182545; TAA
SQSCIAQY

SEQ ID NO: 74782 - protein, 9 aa, Homo sapiens
  misc_feature: Table A; Target 74782; HLA-B*07:02; RNASE10; ENSG00000182545; TAA
SSRPFDLTL

SEQ ID NO: 74783 - protein, 9 aa, Homo sapiens
  misc_feature: Table A; Target 74783; HLA-B*40:02; RNASE10; ENSG00000182545; TAA
SSRPFDLTL

SEQ ID NO: 74784 - protein, 9 aa, Homo sapiens
  misc_feature: Table A; Target 74784; HLA-B*57:01; RNASE10; ENSG00000182545; TAA
SSRPFDLTL

SEQ ID NO: 74785 - protein, 9 aa, Homo sapiens
  misc_feature: Table A; Target 74785; HLA-C*03:04; RNASE10; ENSG00000182545; TAA
SSRPFDLTL

SEQ ID NO: 74786 - protein, 9 aa, Homo sapiens
  misc_feature: Table A; Target 74786; HLA-C*07:02; RNASE10; ENSG00000182545; TAA
SSRPFDLTL

SEQ ID NO: 74787 - protein, 9 aa, Homo sapiens
  misc_feature: Table A; Target 74787; HLA-C*16:02; RNASE10; ENSG00000182545; TAA
SSRPFDLTL

SEQ ID NO: 74788 - protein, 8 aa, Homo sapiens
  misc_feature: Table A; Target 74788; HLA-B*08:01; RNASE10; ENSG00000182545; TAA
SVIKKHII

SEQ ID NO: 74789 - protein, 11 aa, Homo sapiens
  misc_feature: Table A; Target 74789; HLA-B*27:02; RNASE10; ENSG00000182545; TAA
TAVLEESDQPL

SEQ ID NO: 74790 - protein, 11 aa, Homo sapiens
  misc_feature: Table A; Target 74790; HLA-B*27:05; RNASE10; ENSG00000182545; TAA
TAVLEESDQPL

SEQ ID NO: 74791 - protein, 11 aa, Homo sapiens
  misc_feature: Table A; Target 74791; HLA-B*35:03; RNASE10; ENSG00000182545; TAA
TAVLEESDQPL

SEQ ID NO: 74792 - protein, 11 aa, Homo sapiens
  misc_feature: Table A; Target 74792; HLA-B*39:01; RNASE10; ENSG00000182545; TAA
TAVLEESDQPL

SEQ ID NO: 74793 - protein, 11 aa, Homo sapiens
  misc_feature: Table A; Target 74793; HLA-C*03:03; RNASE10; ENSG00000182545; TAA
TAVLEESDQPL

SEQ ID NO: 74794 - protein, 10 aa, Homo sapiens
  misc_feature: Table A; Target 74794; HLA-B*56:01; RNASE10; ENSG00000182545; TAA
TPNCNYLTSV

SEQ ID NO: 74795 - protein, 8 aa, Homo sapiens
  misc_feature: Table A; Target 74795; HLA-B*13:02; RNASE10; ENSG00000182545; TAA
TQTTETLV

SEQ ID NO: 74796 - protein, 9 aa, Homo sapiens
  misc_feature: Table A; Target 74796; HLA-A*30:01; RNASE10; ENSG00000182545; TAA
TQTTETLVL

SEQ ID NO: 74797 - protein, 9 aa, Homo sapiens
  misc_feature: Table A; Target 74797; HLA-B*13:02; RNASE10; ENSG00000182545; TAA
TQTTETLVL

SEQ ID NO: 74798 - protein, 9 aa, Homo sapiens
  misc_feature: Table A; Target 74798; HLA-B*15:01; RNASE10; ENSG00000182545; TAA
TQTTETLVL

SEQ ID NO: 74799 - protein, 9 aa, Homo sapiens
  misc_feature: Table A; Target 74799; HLA-B*15:03; RNASE10; ENSG00000182545; TAA
TQTTETLVL

SEQ ID NO: 74800 - protein, 9 aa, Homo sapiens
  misc_feature: Table A; Target 74800; HLA-B*27:05; RNASE10; ENSG00000182545; TAA
TQTTETLVL

SEQ ID NO: 74801 - protein, 9 aa, Homo sapiens
  misc_feature: Table A; Target 74801; HLA-B*35:03; RNASE10; ENSG00000182545; TAA
TQTTETLVL

SEQ ID NO: 74802 - protein, 9 aa, Homo sapiens
  misc_feature: Table A; Target 74802; HLA-B*38:01; RNASE10; ENSG00000182545; TAA
TQTTETLVL

SEQ ID NO: 74803 - protein, 9 aa, Homo sapiens
  misc_feature: Table A; Target 74803; HLA-B*39:01; RNASE10; ENSG00000182545; TAA
TQTTETLVL

SEQ ID NO: 74804 - protein, 9 aa, Homo sapiens
  misc_feature: Table A; Target 74804; HLA-B*40:01; RNASE10; ENSG00000182545; TAA
TQTTETLVL

SEQ ID NO: 74805 - protein, 9 aa, Homo sapiens
  misc_feature: Table A; Target 74805; HLA-C*02:02; RNASE10; ENSG00000182545; TAA
TQTTETLVL

SEQ ID NO: 74806 - protein, 9 aa, Homo sapiens
  misc_feature: Table A; Target 74806; HLA-C*03:03; RNASE10; ENSG00000182545; TAA
TQTTETLVL

SEQ ID NO: 74807 - protein, 9 aa, Homo sapiens
  misc_feature: Table A; Target 74807; HLA-C*05:01; RNASE10; ENSG00000182545; TAA
TQTTETLVL

SEQ ID NO: 74808 - protein, 9 aa, Homo sapiens
  misc_feature: Table A; Target 74808; HLA-C*07:04; RNASE10; ENSG00000182545; TAA
TQTTETLVL

SEQ ID NO: 74809 - protein, 9 aa, Homo sapiens
  misc_feature: Table A; Target 74809; HLA-A*01:01; RNASE10; ENSG00000182545; TAA
TTETLVLSN

SEQ ID NO: 74810 - protein, 10 aa, Homo sapiens
  misc_feature: Table A; Target 74810; HLA-A*03:02; RNASE10; ENSG00000182545; TAA
TTETLVLSNK

SEQ ID NO: 74811 - protein, 10 aa, Homo sapiens
  misc_feature: Table A; Target 74811; HLA-A*11:01; RNASE10; ENSG00000182545; TAA
TTETLVLSNK

SEQ ID NO: 74812 - protein, 10 aa, Homo sapiens
  misc_feature: Table A; Target 74812; HLA-B*27:02; RNASE10; ENSG00000182545; TAA
TTETLVLSNK

SEQ ID NO: 74813 - protein, 9 aa, Homo sapiens
  misc_feature: Table A; Target 74813; HLA-B*35:03; RNASE10; ENSG00000182545; TAA
VLEESDQPL

SEQ ID NO: 74814 - protein, 9 aa, Homo sapiens
  misc_feature: Table A; Target 74814; HLA-C*05:01; RNASE10; ENSG00000182545; TAA
VLEESDQPL

SEQ ID NO: 74815 - protein, 8 aa, Homo sapiens
  misc_feature: Table A; Target 74815; HLA-B*08:01; RNASE10; ENSG00000182545; TAA
YAFIHEDL

SEQ ID NO: 74816 - protein, 8 aa, Homo sapiens
  misc_feature: Table A; Target 74816; HLA-B*40:02; RNASE10; ENSG00000182545; TAA
YAFIHEDL

SEQ ID NO: 74817 - protein, 8 aa, Homo sapiens
  misc_feature: Table A; Target 74817; HLA-B*51:01; RNASE10; ENSG00000182545; TAA
YAFIHEDL

SEQ ID NO: 74818 - protein, 8 aa, Homo sapiens
  misc_feature: Table A; Target 74818; HLA-B*54:01; RNASE10; ENSG00000182545; TAA
YAFIHEDL

SEQ ID NO: 74819 - protein, 8 aa, Homo sapiens
  misc_feature: Table A; Target 74819; HLA-C*02:02; RNASE10; ENSG00000182545; TAA
YAFIHEDL

SEQ ID NO: 74820 - protein, 8 aa, Homo sapiens
  misc_feature: Table A; Target 74820; HLA-C*03:03; RNASE10; ENSG00000182545; TAA
YAFIHEDL

SEQ ID NO: 74821 - protein, 8 aa, Homo sapiens
  misc_feature: Table A; Target 74821; HLA-C*03:04; RNASE10; ENSG00000182545; TAA
YAFIHEDL

SEQ ID NO: 74822 - protein, 8 aa, Homo sapiens
  misc_feature: Table A; Target 74822; HLA-C*07:01; RNASE10; ENSG00000182545; TAA
YAFIHEDL

SEQ ID NO: 74823 - protein, 8 aa, Homo sapiens
  misc_feature: Table A; Target 74823; HLA-C*07:04; RNASE10; ENSG00000182545; TAA
YAFIHEDL

SEQ ID NO: 74824 - protein, 8 aa, Homo sapiens
  misc_feature: Table A; Target 74824; HLA-C*12:03; RNASE10; ENSG00000182545; TAA
YAFIHEDL

SEQ ID NO: 74825 - protein, 8 aa, Homo sapiens
  misc_feature: Table A; Target 74825; HLA-C*16:01; RNASE10; ENSG00000182545; TAA
YAFIHEDL

SEQ ID NO: 74826 - protein, 8 aa, Homo sapiens
  misc_feature: Table A; Target 74826; HLA-C*16:04; RNASE10; ENSG00000182545; TAA
YAFIHEDL

SEQ ID NO: 74827 - protein, 11 aa, Homo sapiens
  misc_feature: Table A; Target 74827; HLA-A*02:01; RNASE10; ENSG00000182545; TAA
YAFIHEDLNTV

SEQ ID NO: 74828 - protein, 11 aa, Homo sapiens
  misc_feature: Table A; Target 74828; HLA-A*02:03; RNASE10; ENSG00000182545; TAA
YAFIHEDLNTV

SEQ ID NO: 74829 - protein, 11 aa, Homo sapiens
  misc_feature: Table A; Target 74829; HLA-A*02:04; RNASE10; ENSG00000182545; TAA
YAFIHEDLNTV

SEQ ID NO: 74830 - protein, 11 aa, Homo sapiens
  misc_feature: Table A; Target 74830; HLA-B*51:01; RNASE10; ENSG00000182545; TAA
YAFIHEDLNTV

SEQ ID NO: 74831 - protein, 11 aa, Homo sapiens
  misc_feature: Table A; Target 74831; HLA-B*54:01; RNASE10; ENSG00000182545; TAA
YAFIHEDLNTV

SEQ ID NO: 74832 - protein, 11 aa, Homo sapiens
  misc_feature: Table A; Target 74832; HLA-C*02:02; RNASE10; ENSG00000182545; TAA
YAFIHEDLNTV

SEQ ID NO: 74833 - protein, 11 aa, Homo sapiens
  misc_feature: Table A; Target 74833; HLA-C*12:03; RNASE10; ENSG00000182545; TAA
YAFIHEDLNTV

SEQ ID NO: 74834 - protein, 8 aa, Homo sapiens
  misc_feature: Table A; Target 74834; HLA-A*03:01; RNASE10; ENSG00000182545; TAA
YLTSVIKK

SEQ ID NO: 74835 - protein, 8 aa, Homo sapiens
  misc_feature: Table A; Target 74835; HLA-A*03:02; RNASE10; ENSG00000182545; TAA
YLTSVIKK

SEQ ID NO: 74836 - protein, 9 aa, Homo sapiens
  misc_feature: Table A; Target 74836; HLA-C*16:02; RNASE10; ENSG00000182545; TAA
YLTSVIKKH

SEQ ID NO: 74837 - protein, 9 aa, Homo sapiens
  misc_feature: Table A; Target 74837; HLA-B*37:01; SEPT14; ENSG00000154997; TAA
ADTISKNDL

SEQ ID NO: 74838 - protein, 9 aa, Homo sapiens
  misc_feature: Table A; Target 74838; HLA-B*40:02; SEPT14; ENSG00000154997; TAA
ADTISKNDL

SEQ ID NO: 74839 - protein, 9 aa, Homo sapiens
  misc_feature: Table A; Target 74839; HLA-A*30:01; SEPT14; ENSG00000154997; TAA
AEKELQDKF

SEQ ID NO: 74840 - protein, 9 aa, Homo sapiens
  misc_feature: Table A; Target 74840; HLA-B*18:01; SEPT14; ENSG00000154997; TAA
AEKELQDKF

SEQ ID NO: 74841 - protein, 9 aa, Homo sapiens
  misc_feature: Table A; Target 74841; HLA-B*27:02; SEPT14; ENSG00000154997; TAA
AEKELQDKF

SEQ ID NO: 74842 - protein, 9 aa, Homo sapiens
  misc_feature: Table A; Target 74842; HLA-B*37:01; SEPT14; ENSG00000154997; TAA
AEKELQDKF

SEQ ID NO: 74843 - protein, 9 aa, Homo sapiens
  misc_feature: Table A; Target 74843; HLA-B*40:01; SEPT14; ENSG00000154997; TAA
AEKELQDKF

SEQ ID NO: 74844 - protein, 9 aa, Homo sapiens
  misc_feature: Table A; Target 74844; HLA-B*40:02; SEPT14; ENSG00000154997; TAA
AEKELQDKF

SEQ ID NO: 74845 - protein, 9 aa, Homo sapiens
  misc_feature: Table A; Target 74845; HLA-B*44:02; SEPT14; ENSG00000154997; TAA
AEKELQDKF

SEQ ID NO: 74846 - protein, 9 aa, Homo sapiens
  misc_feature: Table A; Target 74846; HLA-B*44:03; SEPT14; ENSG00000154997; TAA
AEKELQDKF

SEQ ID NO: 74847 - protein, 9 aa, Homo sapiens
  misc_feature: Table A; Target 74847; HLA-B*49:01; SEPT14; ENSG00000154997; TAA
AEKELQDKF

SEQ ID NO: 74848 - protein, 9 aa, Homo sapiens
  misc_feature: Table A; Target 74848; HLA-C*02:02; SEPT14; ENSG00000154997; TAA
AEKELQDKF

SEQ ID NO: 74849 - protein, 9 aa, Homo sapiens
  misc_feature: Table A; Target 74849; HLA-C*16:04; SEPT14; ENSG00000154997; TAA
AEKELQDKF

SEQ ID NO: 74850 - protein, 9 aa, Homo sapiens
  misc_feature: Table A; Target 74850; HLA-B*27:05; SEPT14; ENSG00000154997; TAA
ANSSVSGLL

SEQ ID NO: 74851 - protein, 9 aa, Homo sapiens
  misc_feature: Table A; Target 74851; HLA-B*39:01; SEPT14; ENSG00000154997; TAA
ANSSVSGLL

SEQ ID NO: 74852 - protein, 9 aa, Homo sapiens
  misc_feature: Table A; Target 74852; HLA-C*07:02; SEPT14; ENSG00000154997; TAA
ANSSVSGLL

SEQ ID NO: 74853 - protein, 10 aa, Homo sapiens
  misc_feature: Table A; Target 74853; HLA-B*27:05; SEPT14; ENSG00000154997; TAA
AQANSSVSGL

SEQ ID NO: 74854 - protein, 10 aa, Homo sapiens
  misc_feature: Table A; Target 74854; HLA-B*39:01; SEPT14; ENSG00000154997; TAA
AQANSSVSGL

SEQ ID NO: 74855 - protein, 11 aa, Homo sapiens
  misc_feature: Table A; Target 74855; HLA-B*13:02; SEPT14; ENSG00000154997; TAA
AQANSSVSGLL

SEQ ID NO: 74856 - protein, 11 aa, Homo sapiens
  misc_feature: Table A; Target 74856; HLA-B*27:05; SEPT14; ENSG00000154997; TAA
AQANSSVSGLL

SEQ ID NO: 74857 - protein, 11 aa, Homo sapiens
  misc_feature: Table A; Target 74857; HLA-B*38:01; SEPT14; ENSG00000154997; TAA
AQANSSVSGLL

SEQ ID NO: 74858 - protein, 11 aa, Homo sapiens
  misc_feature: Table A; Target 74858; HLA-B*39:01; SEPT14; ENSG00000154997; TAA
AQANSSVSGLL

SEQ ID NO: 74859 - protein, 11 aa, Homo sapiens
  misc_feature: Table A; Target 74859; HLA-B*40:01; SEPT14; ENSG00000154997; TAA
AQANSSVSGLL

SEQ ID NO: 74860 - protein, 11 aa, Homo sapiens
  misc_feature: Table A; Target 74860; HLA-A*30:01; SEPT14; ENSG00000154997; TAA
AQFEAYLQEEL

SEQ ID NO: 74861 - protein, 11 aa, Homo sapiens
  misc_feature: Table A; Target 74861; HLA-B*13:02; SEPT14; ENSG00000154997; TAA
AQFEAYLQEEL

SEQ ID NO: 74862 - protein, 11 aa, Homo sapiens
  misc_feature: Table A; Target 74862; HLA-B*27:05; SEPT14; ENSG00000154997; TAA
AQFEAYLQEEL

SEQ ID NO: 74863 - protein, 11 aa, Homo sapiens
  misc_feature: Table A; Target 74863; HLA-B*38:01; SEPT14; ENSG00000154997; TAA
AQFEAYLQEEL

SEQ ID NO: 74864 - protein, 9 aa, Homo sapiens
  misc_feature: Table A; Target 74864; HLA-A*01:01; SEPT14; ENSG00000154997; TAA
ASYQPIVDY

SEQ ID NO: 74865 - protein, 9 aa, Homo sapiens
  misc_feature: Table A; Target 74865; HLA-A*03:01; SEPT14; ENSG00000154997; TAA
ASYQPIVDY

SEQ ID NO: 74866 - protein, 9 aa, Homo sapiens
  misc_feature: Table A; Target 74866; HLA-A*11:01; SEPT14; ENSG00000154997; TAA
ASYQPIVDY

SEQ ID NO: 74867 - protein, 9 aa, Homo sapiens
  misc_feature: Table A; Target 74867; HLA-A*26:01; SEPT14; ENSG00000154997; TAA
ASYQPIVDY

SEQ ID NO: 74868 - protein, 9 aa, Homo sapiens
  misc_feature: Table A; Target 74868; HLA-A*29:02; SEPT14; ENSG00000154997; TAA
ASYQPIVDY

SEQ ID NO: 74869 - protein, 9 aa, Homo sapiens
  misc_feature: Table A; Target 74869; HLA-A*30:02; SEPT14; ENSG00000154997; TAA
ASYQPIVDY

SEQ ID NO: 74870 - protein, 9 aa, Homo sapiens
  misc_feature: Table A; Target 74870; HLA-B*15:01; SEPT14; ENSG00000154997; TAA
ASYQPIVDY

SEQ ID NO: 74871 - protein, 9 aa, Homo sapiens
  misc_feature: Table A; Target 74871; HLA-B*15:03; SEPT14; ENSG00000154997; TAA
ASYQPIVDY

SEQ ID NO: 74872 - protein, 9 aa, Homo sapiens
  misc_feature: Table A; Target 74872; HLA-B*35:01; SEPT14; ENSG00000154997; TAA
ASYQPIVDY

SEQ ID NO: 74873 - protein, 9 aa, Homo sapiens
  misc_feature: Table A; Target 74873; HLA-B*46:01; SEPT14; ENSG00000154997; TAA
ASYQPIVDY

SEQ ID NO: 74874 - protein, 9 aa, Homo sapiens
  misc_feature: Table A; Target 74874; HLA-B*58:01; SEPT14; ENSG00000154997; TAA
ASYQPIVDY

SEQ ID NO: 74875 - protein, 9 aa, Homo sapiens
  misc_feature: Table A; Target 74875; HLA-C*02:02; SEPT14; ENSG00000154997; TAA
ASYQPIVDY

SEQ ID NO: 74876 - protein, 9 aa, Homo sapiens
  misc_feature: Table A; Target 74876; HLA-C*07:04; SEPT14; ENSG00000154997; TAA
ASYQPIVDY

SEQ ID NO: 74877 - protein, 9 aa, Homo sapiens
  misc_feature: Table A; Target 74877; HLA-C*12:03; SEPT14; ENSG00000154997; TAA
ASYQPIVDY

SEQ ID NO: 74878 - protein, 9 aa, Homo sapiens
  misc_feature: Table A; Target 74878; HLA-C*16:01; SEPT14; ENSG00000154997; TAA
ASYQPIVDY

SEQ ID NO: 74879 - protein, 9 aa, Homo sapiens
  misc_feature: Table A; Target 74879; HLA-C*16:04; SEPT14; ENSG00000154997; TAA
ASYQPIVDY

SEQ ID NO: 74880 - protein, 10 aa, Homo sapiens
  misc_feature: Table A; Target 74880; HLA-B*58:01; SEPT14; ENSG00000154997; TAA
ATFKEAEKEL

SEQ ID NO: 74881 - protein, 9 aa, Homo sapiens
  misc_feature: Table A; Target 74881; HLA-A*02:01; SEPT14; ENSG00000154997; TAA
AVVGSTDEV

SEQ ID NO: 74882 - protein, 9 aa, Homo sapiens
  misc_feature: Table A; Target 74882; HLA-A*02:03; SEPT14; ENSG00000154997; TAA
AVVGSTDEV

SEQ ID NO: 74883 - protein, 9 aa, Homo sapiens
  misc_feature: Table A; Target 74883; HLA-A*02:07; SEPT14; ENSG00000154997; TAA
AVVGSTDEV

SEQ ID NO: 74884 - protein, 9 aa, Homo sapiens
  misc_feature: Table A; Target 74884; HLA-A*26:01; SEPT14; ENSG00000154997; TAA
AVVGSTDEV

SEQ ID NO: 74885 - protein, 9 aa, Homo sapiens
  misc_feature: Table A; Target 74885; HLA-B*13:02; SEPT14; ENSG00000154997; TAA
AVVGSTDEV

SEQ ID NO: 74886 - protein, 9 aa, Homo sapiens
  misc_feature: Table A; Target 74886; HLA-B*27:05; SEPT14; ENSG00000154997; TAA
AVVGSTDEV

SEQ ID NO: 74887 - protein, 9 aa, Homo sapiens
  misc_feature: Table A; Target 74887; HLA-B*55:01; SEPT14; ENSG00000154997; TAA
AVVGSTDEV

SEQ ID NO: 74888 - protein, 9 aa, Homo sapiens
  misc_feature: Table A; Target 74888; HLA-C*01:02; SEPT14; ENSG00000154997; TAA
AVVGSTDEV

SEQ ID NO: 74889 - protein, 9 aa, Homo sapiens
  misc_feature: Table A; Target 74889; HLA-C*12:03; SEPT14; ENSG00000154997; TAA
AVVGSTDEV

SEQ ID NO: 74890 - protein, 9 aa, Homo sapiens
  misc_feature: Table A; Target 74890; HLA-C*16:04; SEPT14; ENSG00000154997; TAA
AVVGSTDEV

SEQ ID NO: 74891 - protein, 10 aa, Homo sapiens
  misc_feature: Table A; Target 74891; HLA-A*03:02; SEPT14; ENSG00000154997; TAA
AVVGSTDEVK

SEQ ID NO: 74892 - protein, 10 aa, Homo sapiens
  misc_feature: Table A; Target 74892; HLA-A*11:01; SEPT14; ENSG00000154997; TAA
AVVGSTDEVK

SEQ ID NO: 74893 - protein, 10 aa, Homo sapiens
  misc_feature: Table A; Target 74893; HLA-A*68:01; SEPT14; ENSG00000154997; TAA
AVVGSTDEVK

SEQ ID NO: 74894 - protein, 10 aa, Homo sapiens
  misc_feature: Table A; Target 74894; HLA-C*07:06; SEPT14; ENSG00000154997; TAA
AVVGSTDEVK

SEQ ID NO: 74895 - protein, 9 aa, Homo sapiens
  misc_feature: Table A; Target 74895; HLA-A*23:01; SEPT14; ENSG00000154997; TAA
AYLQEELKI

SEQ ID NO: 74896 - protein, 9 aa, Homo sapiens
  misc_feature: Table A; Target 74896; HLA-A*24:02; SEPT14; ENSG00000154997; TAA
AYLQEELKI

SEQ ID NO: 74897 - protein, 11 aa, Homo sapiens
  misc_feature: Table A; Target 74897; HLA-A*31:01; SEPT14; ENSG00000154997; TAA
AYLQEELKIKR

SEQ ID NO: 74898 - protein, 11 aa, Homo sapiens
  misc_feature: Table A; Target 74898; HLA-A*33:01; SEPT14; ENSG00000154997; TAA
AYLQEELKIKR

SEQ ID NO: 74899 - protein, 9 aa, Homo sapiens
  misc_feature: Table A; Target 74899; HLA-A*31:01; SEPT14; ENSG00000154997; TAA
CLPNQLVSR

SEQ ID NO: 74900 - protein, 9 aa, Homo sapiens
  misc_feature: Table A; Target 74900; HLA-A*33:01; SEPT14; ENSG00000154997; TAA
CLPNQLVSR

SEQ ID NO: 74901 - protein, 9 aa, Homo sapiens
  misc_feature: Table A; Target 74901; HLA-A*33:03; SEPT14; ENSG00000154997; TAA
CLPNQLVSR

SEQ ID NO: 74902 - protein, 11 aa, Homo sapiens
  misc_feature: Table A; Target 74902; HLA-A*31:01; SEPT14; ENSG00000154997; TAA
CQREEEELKQR

SEQ ID NO: 74903 - protein, 10 aa, Homo sapiens
  misc_feature: Table A; Target 74903; HLA-A*11:01; SEPT14; ENSG00000154997; TAA
CTNMENLKEK

SEQ ID NO: 74904 - protein, 9 aa, Homo sapiens
  misc_feature: Table A; Target 74904; HLA-A*03:01; SEPT14; ENSG00000154997; TAA
CVGETGIGK

SEQ ID NO: 74905 - protein, 9 aa, Homo sapiens
  misc_feature: Table A; Target 74905; HLA-A*03:02; SEPT14; ENSG00000154997; TAA
CVGETGIGK

SEQ ID NO: 74906 - protein, 9 aa, Homo sapiens
  misc_feature: Table A; Target 74906; HLA-A*11:01; SEPT14; ENSG00000154997; TAA
CVGETGIGK

SEQ ID NO: 74907 - protein, 9 aa, Homo sapiens
  misc_feature: Table A; Target 74907; HLA-A*68:01; SEPT14; ENSG00000154997; TAA
CVGETGIGK

SEQ ID NO: 74908 - protein, 9 aa, Homo sapiens
  misc_feature: Table A; Target 74908; HLA-C*07:06; SEPT14; ENSG00000154997; TAA
CVGETGIGK

SEQ ID NO: 74909 - protein, 9 aa, Homo sapiens
  misc_feature: Table A; Target 74909; HLA-A*33:01; SEPT14; ENSG00000154997; TAA
DAQFEAYLQ

SEQ ID NO: 74910 - protein, 8 aa, Homo sapiens
  misc_feature: Table A; Target 74910; HLA-B*18:01; SEPT14; ENSG00000154997; TAA
DEETAAQA

SEQ ID NO: 74911 - protein, 8 aa, Homo sapiens
  misc_feature: Table A; Target 74911; HLA-B*18:01; SEPT14; ENSG00000154997; TAA
DEVKVGKR

SEQ ID NO: 74912 - protein, 9 aa, Homo sapiens
  misc_feature: Table A; Target 74912; HLA-B*18:01; SEPT14; ENSG00000154997; TAA
DEVKVGKRM

SEQ ID NO: 74913 - protein, 9 aa, Homo sapiens
  misc_feature: Table A; Target 74913; HLA-B*44:02; SEPT14; ENSG00000154997; TAA
DEVKVGKRM

SEQ ID NO: 74914 - protein, 9 aa, Homo sapiens
  misc_feature: Table A; Target 74914; HLA-B*44:03; SEPT14; ENSG00000154997; TAA
DEVKVGKRM

SEQ ID NO: 74915 - protein, 8 aa, Homo sapiens
  misc_feature: Table A; Target 74915; HLA-A*33:01; SEPT14; ENSG00000154997; TAA
DLQTFKNK

SEQ ID NO: 74916 - protein, 9 aa, Homo sapiens
  misc_feature: Table A; Target 74916; HLA-B*08:01; SEPT14; ENSG00000154997; TAA
DLQTFKNKI

SEQ ID NO: 74917 - protein, 8 aa, Homo sapiens
  misc_feature: Table A; Target 74917; HLA-B*08:01; SEPT14; ENSG00000154997; TAA
DMLLCTNM

SEQ ID NO: 74918 - protein, 8 aa, Homo sapiens
  misc_feature: Table A; Target 74918; HLA-A*33:01; SEPT14; ENSG00000154997; TAA
DNKSSHFY

SEQ ID NO: 74919 - protein, 8 aa, Homo sapiens
  misc_feature: Table A; Target 74919; HLA-C*07:01; SEPT14; ENSG00000154997; TAA
DNKSSHFY

SEQ ID NO: 74920 - protein, 9 aa, Homo sapiens
  misc_feature: Table A; Target 74920; HLA-A*33:01; SEPT14; ENSG00000154997; TAA
DNKSSHFYS

SEQ ID NO: 74921 - protein, 9 aa, Homo sapiens
  misc_feature: Table A; Target 74921; HLA-A*25:01; SEPT14; ENSG00000154997; TAA
DQIDKEASY

SEQ ID NO: 74922 - protein, 9 aa, Homo sapiens
  misc_feature: Table A; Target 74922; HLA-A*26:01; SEPT14; ENSG00000154997; TAA
DQIDKEASY

SEQ ID NO: 74923 - protein, 9 aa, Homo sapiens
  misc_feature: Table A; Target 74923; HLA-A*30:02; SEPT14; ENSG00000154997; TAA
DQIDKEASY

SEQ ID NO: 74924 - protein, 9 aa, Homo sapiens
  misc_feature: Table A; Target 74924; HLA-A*32:01; SEPT14; ENSG00000154997; TAA
DQIDKEASY

SEQ ID NO: 74925 - protein, 9 aa, Homo sapiens
  misc_feature: Table A; Target 74925; HLA-B*15:01; SEPT14; ENSG00000154997; TAA
DQIDKEASY

SEQ ID NO: 74926 - protein, 9 aa, Homo sapiens
  misc_feature: Table A; Target 74926; HLA-B*15:03; SEPT14; ENSG00000154997; TAA
DQIDKEASY

SEQ ID NO: 74927 - protein, 9 aa, Homo sapiens
  misc_feature: Table A; Target 74927; HLA-B*18:01; SEPT14; ENSG00000154997; TAA
DQIDKEASY

SEQ ID NO: 74928 - protein, 9 aa, Homo sapiens
  misc_feature: Table A; Target 74928; HLA-B*35:01; SEPT14; ENSG00000154997; TAA
DQIDKEASY

SEQ ID NO: 74929 - protein, 9 aa, Homo sapiens
  misc_feature: Table A; Target 74929; HLA-B*39:01; SEPT14; ENSG00000154997; TAA
DQIDKEASY

SEQ ID NO: 74930 - protein, 9 aa, Homo sapiens
  misc_feature: Table A; Target 74930; HLA-B*44:02; SEPT14; ENSG00000154997; TAA
DQIDKEASY

SEQ ID NO: 74931 - protein, 9 aa, Homo sapiens
  misc_feature: Table A; Target 74931; HLA-B*44:03; SEPT14; ENSG00000154997; TAA
DQIDKEASY

SEQ ID NO: 74932 - protein, 9 aa, Homo sapiens
  misc_feature: Table A; Target 74932; HLA-C*07:04; SEPT14; ENSG00000154997; TAA
DQIDKEASY

SEQ ID NO: 74933 - protein, 9 aa, Homo sapiens
  misc_feature: Table A; Target 74933; HLA-C*07:06; SEPT14; ENSG00000154997; TAA
DQIDKEASY

SEQ ID NO: 74934 - protein, 9 aa, Homo sapiens
  misc_feature: Table A; Target 74934; HLA-C*14:02; SEPT14; ENSG00000154997; TAA
DQIDKEASY

SEQ ID NO: 74935 - protein, 9 aa, Homo sapiens
  misc_feature: Table A; Target 74935; HLA-A*33:01; SEPT14; ENSG00000154997; TAA
DSKVNIIPL

SEQ ID NO: 74936 - protein, 8 aa, Homo sapiens
  misc_feature: Table A; Target 74936; HLA-B*08:01; SEPT14; ENSG00000154997; TAA
DSRVHVCL

SEQ ID NO: 74937 - protein, 9 aa, Homo sapiens
  misc_feature: Table A; Target 74937; HLA-A*33:01; SEPT14; ENSG00000154997; TAA
DSRVHVCLY

SEQ ID NO: 74938 - protein, 9 aa, Homo sapiens
  misc_feature: Table A; Target 74938; HLA-C*07:01; SEPT14; ENSG00000154997; TAA
DSRVHVCLY

SEQ ID NO: 74939 - protein, 8 aa, Homo sapiens
  misc_feature: Table A; Target 74939; HLA-B*08:01; SEPT14; ENSG00000154997; TAA
DTISKNDL

SEQ ID NO: 74940 - protein, 9 aa, Homo sapiens
  misc_feature: Table A; Target 74940; HLA-A*26:01; SEPT14; ENSG00000154997; TAA
DTISKNDLQ

SEQ ID NO: 74941 - protein, 9 aa, Homo sapiens
  misc_feature: Table A; Target 74941; HLA-A*33:01; SEPT14; ENSG00000154997; TAA
DTISKNDLQ

SEQ ID NO: 74942 - protein, 11 aa, Homo sapiens
  misc_feature: Table A; Target 74942; HLA-A*25:01; SEPT14; ENSG00000154997; TAA
DTISKNDLQTF

SEQ ID NO: 74943 - protein, 11 aa, Homo sapiens
  misc_feature: Table A; Target 74943; HLA-A*26:01; SEPT14; ENSG00000154997; TAA
DTISKNDLQTF

SEQ ID NO: 74944 - protein, 11 aa, Homo sapiens
  misc_feature: Table A; Target 74944; HLA-A*33:01; SEPT14; ENSG00000154997; TAA
DTISKNDLQTF

SEQ ID NO: 74945 - protein, 11 aa, Homo sapiens
  misc_feature: Table A; Target 74945; HLA-A*33:03; SEPT14; ENSG00000154997; TAA
DTISKNDLQTF

SEQ ID NO: 74946 - protein, 11 aa, Homo sapiens
  misc_feature: Table A; Target 74946; HLA-A*68:01; SEPT14; ENSG00000154997; TAA
DTISKNDLQTF

SEQ ID NO: 74947 - protein, 11 aa, Homo sapiens
  misc_feature: Table A; Target 74947; HLA-A*68:02; SEPT14; ENSG00000154997; TAA
DTISKNDLQTF

SEQ ID NO: 74948 - protein, 11 aa, Homo sapiens
  misc_feature: Table A; Target 74948; HLA-B*38:01; SEPT14; ENSG00000154997; TAA
DTISKNDLQTF

SEQ ID NO: 74949 - protein, 11 aa, Homo sapiens
  misc_feature: Table A; Target 74949; HLA-B*57:01; SEPT14; ENSG00000154997; TAA
DTISKNDLQTF

SEQ ID NO: 74950 - protein, 11 aa, Homo sapiens
  misc_feature: Table A; Target 74950; HLA-B*58:01; SEPT14; ENSG00000154997; TAA
DTISKNDLQTF

SEQ ID NO: 74951 - protein, 11 aa, Homo sapiens
  misc_feature: Table A; Target 74951; HLA-C*07:06; SEPT14; ENSG00000154997; TAA
DTISKNDLQTF

SEQ ID NO: 74952 - protein, 9 aa, Homo sapiens
  misc_feature: Table A; Target 74952; HLA-A*01:01; SEPT14; ENSG00000154997; TAA
DTLFNTNLK

SEQ ID NO: 74953 - protein, 9 aa, Homo sapiens
  misc_feature: Table A; Target 74953; HLA-A*03:02; SEPT14; ENSG00000154997; TAA
DTLFNTNLK

SEQ ID NO: 74954 - protein, 9 aa, Homo sapiens
  misc_feature: Table A; Target 74954; HLA-A*11:01; SEPT14; ENSG00000154997; TAA
DTLFNTNLK

SEQ ID NO: 74955 - protein, 9 aa, Homo sapiens
  misc_feature: Table A; Target 74955; HLA-A*33:01; SEPT14; ENSG00000154997; TAA
DTLFNTNLK

SEQ ID NO: 74956 - protein, 9 aa, Homo sapiens
  misc_feature: Table A; Target 74956; HLA-A*33:03; SEPT14; ENSG00000154997; TAA
DTLFNTNLK

SEQ ID NO: 74957 - protein, 9 aa, Homo sapiens
  misc_feature: Table A; Target 74957; HLA-A*68:01; SEPT14; ENSG00000154997; TAA
DTLFNTNLK

SEQ ID NO: 74958 - protein, 9 aa, Homo sapiens
  misc_feature: Table A; Target 74958; HLA-C*07:06; SEPT14; ENSG00000154997; TAA
DTLFNTNLK

SEQ ID NO: 74959 - protein, 11 aa, Homo sapiens
  misc_feature: Table A; Target 74959; HLA-C*07:01; SEPT14; ENSG00000154997; TAA
DTLFNTNLKDN

SEQ ID NO: 74960 - protein, 9 aa, Homo sapiens
  misc_feature: Table A; Target 74960; HLA-A*33:01; SEPT14; ENSG00000154997; TAA
DTQKENNIR

SEQ ID NO: 74961 - protein, 9 aa, Homo sapiens
  misc_feature: Table A; Target 74961; HLA-A*33:03; SEPT14; ENSG00000154997; TAA
DTQKENNIR

SEQ ID NO: 74962 - protein, 9 aa, Homo sapiens
  misc_feature: Table A; Target 74962; HLA-A*68:01; SEPT14; ENSG00000154997; TAA
DTQKENNIR

SEQ ID NO: 74963 - protein, 9 aa, Homo sapiens
  misc_feature: Table A; Target 74963; HLA-A*26:01; SEPT14; ENSG00000154997; TAA
DVGPNNQPV

SEQ ID NO: 74964 - protein, 11 aa, Homo sapiens
  misc_feature: Table A; Target 74964; HLA-A*25:01; SEPT14; ENSG00000154997; TAA
DVGPNNQPVSF

SEQ ID NO: 74965 - protein, 11 aa, Homo sapiens
  misc_feature: Table A; Target 74965; HLA-A*26:01; SEPT14; ENSG00000154997; TAA
DVGPNNQPVSF

SEQ ID NO: 74966 - protein, 11 aa, Homo sapiens
  misc_feature: Table A; Target 74966; HLA-A*33:01; SEPT14; ENSG00000154997; TAA
DVGPNNQPVSF

SEQ ID NO: 74967 - protein, 11 aa, Homo sapiens
  misc_feature: Table A; Target 74967; HLA-A*33:03; SEPT14; ENSG00000154997; TAA
DVGPNNQPVSF

SEQ ID NO: 74968 - protein, 11 aa, Homo sapiens
  misc_feature: Table A; Target 74968; HLA-A*68:01; SEPT14; ENSG00000154997; TAA
DVGPNNQPVSF

SEQ ID NO: 74969 - protein, 11 aa, Homo sapiens
  misc_feature: Table A; Target 74969; HLA-C*07:06; SEPT14; ENSG00000154997; TAA
DVGPNNQPVSF

SEQ ID NO: 74970 - protein, 10 aa, Homo sapiens
  misc_feature: Table A; Target 74970; HLA-A*23:01; SEPT14; ENSG00000154997; TAA
DYIDAQFEAY

SEQ ID NO: 74971 - protein, 10 aa, Homo sapiens
  misc_feature: Table A; Target 74971; HLA-A*25:01; SEPT14; ENSG00000154997; TAA
DYIDAQFEAY

SEQ ID NO: 74972 - protein, 10 aa, Homo sapiens
  misc_feature: Table A; Target 74972; HLA-A*26:01; SEPT14; ENSG00000154997; TAA
DYIDAQFEAY

SEQ ID NO: 74973 - protein, 10 aa, Homo sapiens
  misc_feature: Table A; Target 74973; HLA-A*29:02; SEPT14; ENSG00000154997; TAA
DYIDAQFEAY

SEQ ID NO: 74974 - protein, 10 aa, Homo sapiens
  misc_feature: Table A; Target 74974; HLA-A*30:02; SEPT14; ENSG00000154997; TAA
DYIDAQFEAY

SEQ ID NO: 74975 - protein, 10 aa, Homo sapiens
  misc_feature: Table A; Target 74975; HLA-A*33:01; SEPT14; ENSG00000154997; TAA
DYIDAQFEAY

SEQ ID NO: 74976 - protein, 10 aa, Homo sapiens
  misc_feature: Table A; Target 74976; HLA-A*33:03; SEPT14; ENSG00000154997; TAA
DYIDAQFEAY

SEQ ID NO: 74977 - protein, 10 aa, Homo sapiens
  misc_feature: Table A; Target 74977; HLA-B*18:01; SEPT14; ENSG00000154997; TAA
DYIDAQFEAY

SEQ ID NO: 74978 - protein, 10 aa, Homo sapiens
  misc_feature: Table A; Target 74978; HLA-C*14:02; SEPT14; ENSG00000154997; TAA
DYIDAQFEAY

SEQ ID NO: 74979 - protein, 8 aa, Homo sapiens
  misc_feature: Table A; Target 74979; HLA-B*51:01; SEPT14; ENSG00000154997; TAA
EASYQPIV

SEQ ID NO: 74980 - protein, 10 aa, Homo sapiens
  misc_feature: Table A; Target 74980; HLA-A*25:01; SEPT14; ENSG00000154997; TAA
EASYQPIVDY

SEQ ID NO: 74981 - protein, 10 aa, Homo sapiens
  misc_feature: Table A; Target 74981; HLA-A*26:01; SEPT14; ENSG00000154997; TAA
EASYQPIVDY

SEQ ID NO: 74982 - protein, 10 aa, Homo sapiens
  misc_feature: Table A; Target 74982; HLA-A*68:01; SEPT14; ENSG00000154997; TAA
EASYQPIVDY

SEQ ID NO: 74983 - protein, 10 aa, Homo sapiens
  misc_feature: Table A; Target 74983; HLA-B*35:01; SEPT14; ENSG00000154997; TAA
EASYQPIVDY

SEQ ID NO: 74984 - protein, 10 aa, Homo sapiens
  misc_feature: Table A; Target 74984; HLA-C*07:06; SEPT14; ENSG00000154997; TAA
EASYQPIVDY

SEQ ID NO: 74985 - protein, 11 aa, Homo sapiens
  misc_feature: Table A; Target 74985; HLA-A*68:02; SEPT14; ENSG00000154997; TAA
EASYQPIVDYI

SEQ ID NO: 74986 - protein, 9 aa, Homo sapiens
  misc_feature: Table A; Target 74986; HLA-A*33:03; SEPT14; ENSG00000154997; TAA
EATFKEAEK

SEQ ID NO: 74987 - protein, 9 aa, Homo sapiens
  misc_feature: Table A; Target 74987; HLA-A*68:01; SEPT14; ENSG00000154997; TAA
EATFKEAEK

SEQ ID NO: 74988 - protein, 9 aa, Homo sapiens
  misc_feature: Table A; Target 74988; HLA-C*07:06; SEPT14; ENSG00000154997; TAA
EATFKEAEK

SEQ ID NO: 74989 - protein, 8 aa, Homo sapiens
  misc_feature: Table A; Target 74989; HLA-B*08:01; SEPT14; ENSG00000154997; TAA
EAYLQEEL

SEQ ID NO: 74990 - protein, 8 aa, Homo sapiens
  misc_feature: Table A; Target 74990; HLA-B*27:05; SEPT14; ENSG00000154997; TAA
EAYLQEEL

SEQ ID NO: 74991 - protein, 8 aa, Homo sapiens
  misc_feature: Table A; Target 74991; HLA-B*35:01; SEPT14; ENSG00000154997; TAA
EAYLQEEL

SEQ ID NO: 74992 - protein, 8 aa, Homo sapiens
  misc_feature: Table A; Target 74992; HLA-B*35:03; SEPT14; ENSG00000154997; TAA
EAYLQEEL

SEQ ID NO: 74993 - protein, 8 aa, Homo sapiens
  misc_feature: Table A; Target 74993; HLA-B*39:01; SEPT14; ENSG00000154997; TAA
EAYLQEEL

SEQ ID NO: 74994 - protein, 8 aa, Homo sapiens
  misc_feature: Table A; Target 74994; HLA-B*51:01; SEPT14; ENSG00000154997; TAA
EAYLQEEL

SEQ ID NO: 74995 - protein, 8 aa, Homo sapiens
  misc_feature: Table A; Target 74995; HLA-C*01:02; SEPT14; ENSG00000154997; TAA
EAYLQEEL

SEQ ID NO: 74996 - protein, 8 aa, Homo sapiens
  misc_feature: Table A; Target 74996; HLA-C*03:03; SEPT14; ENSG00000154997; TAA
EAYLQEEL

SEQ ID NO: 74997 - protein, 8 aa, Homo sapiens
  misc_feature: Table A; Target 74997; HLA-C*03:04; SEPT14; ENSG00000154997; TAA
EAYLQEEL

SEQ ID NO: 74998 - protein, 8 aa, Homo sapiens
  misc_feature: Table A; Target 74998; HLA-C*05:01; SEPT14; ENSG00000154997; TAA
EAYLQEEL

SEQ ID NO: 74999 - protein, 8 aa, Homo sapiens
  misc_feature: Table A; Target 74999; HLA-C*07:01; SEPT14; ENSG00000154997; TAA
EAYLQEEL

SEQ ID NO: 75000 - protein, 8 aa, Homo sapiens
  misc_feature: Table A; Target 75000; HLA-C*12:03; SEPT14; ENSG00000154997; TAA
EAYLQEEL

SEQ ID NO: 75001 - protein, 8 aa, Homo sapiens
  misc_feature: Table A; Target 75001; HLA-C*14:02; SEPT14; ENSG00000154997; TAA
EAYLQEEL

SEQ ID NO: 75002 - protein, 8 aa, Homo sapiens
  misc_feature: Table A; Target 75002; HLA-C*16:04; SEPT14; ENSG00000154997; TAA
EAYLQEEL

SEQ ID NO: 75003 - protein, 9 aa, Homo sapiens
  misc_feature: Table A; Target 75003; HLA-A*33:01; SEPT14; ENSG00000154997; TAA
EAYLQEELK

SEQ ID NO: 75004 - protein, 9 aa, Homo sapiens
  misc_feature: Table A; Target 75004; HLA-A*33:03; SEPT14; ENSG00000154997; TAA
EAYLQEELK

SEQ ID NO: 75005 - protein, 9 aa, Homo sapiens
  misc_feature: Table A; Target 75005; HLA-A*68:01; SEPT14; ENSG00000154997; TAA
EAYLQEELK

SEQ ID NO: 75006 - protein, 9 aa, Homo sapiens
  misc_feature: Table A; Target 75006; HLA-B*27:02; SEPT14; ENSG00000154997; TAA
EAYLQEELK

SEQ ID NO: 75007 - protein, 9 aa, Homo sapiens
  misc_feature: Table A; Target 75007; HLA-C*07:06; SEPT14; ENSG00000154997; TAA
EAYLQEELK

SEQ ID NO: 75008 - protein, 10 aa, Homo sapiens
  misc_feature: Table A; Target 75008; HLA-B*51:01; SEPT14; ENSG00000154997; TAA
EAYLQEELKI

SEQ ID NO: 75009 - protein, 11 aa, Homo sapiens
  misc_feature: Table A; Target 75009; HLA-A*33:01; SEPT14; ENSG00000154997; TAA
EAYLQEELKIK

SEQ ID NO: 75010 - protein, 11 aa, Homo sapiens
  misc_feature: Table A; Target 75010; HLA-A*33:03; SEPT14; ENSG00000154997; TAA
EAYLQEELKIK

SEQ ID NO: 75011 - protein, 10 aa, Homo sapiens
  misc_feature: Table A; Target 75011; HLA-A*31:01; SEPT14; ENSG00000154997; TAA
ECLPNQLVSR

SEQ ID NO: 75012 - protein, 10 aa, Homo sapiens
  misc_feature: Table A; Target 75012; HLA-A*33:01; SEPT14; ENSG00000154997; TAA
ECLPNQLVSR

SEQ ID NO: 75013 - protein, 10 aa, Homo sapiens
  misc_feature: Table A; Target 75013; HLA-A*33:03; SEPT14; ENSG00000154997; TAA
ECLPNQLVSR

SEQ ID NO: 75014 - protein, 10 aa, Homo sapiens
  misc_feature: Table A; Target 75014; HLA-A*68:01; SEPT14; ENSG00000154997; TAA
ECLPNQLVSR

SEQ ID NO: 75015 - protein, 10 aa, Homo sapiens
  misc_feature: Table A; Target 75015; HLA-B*27:02; SEPT14; ENSG00000154997; TAA
ECLPNQLVSR

SEQ ID NO: 75016 - protein, 10 aa, Homo sapiens
  misc_feature: Table A; Target 75016; HLA-C*07:06; SEPT14; ENSG00000154997; TAA
ECLPNQLVSR

SEQ ID NO: 75017 - protein, 9 aa, Homo sapiens
  misc_feature: Table A; Target 75017; HLA-B*18:01; SEPT14; ENSG00000154997; TAA
EEEELKQRF

SEQ ID NO: 75018 - protein, 9 aa, Homo sapiens
  misc_feature: Table A; Target 75018; HLA-B*37:01; SEPT14; ENSG00000154997; TAA
EEEELKQRF

SEQ ID NO: 75019 - protein, 9 aa, Homo sapiens
  misc_feature: Table A; Target 75019; HLA-B*44:02; SEPT14; ENSG00000154997; TAA
EEEELKQRF

SEQ ID NO: 75020 - protein, 9 aa, Homo sapiens
  misc_feature: Table A; Target 75020; HLA-B*44:03; SEPT14; ENSG00000154997; TAA
EEEELKQRF

SEQ ID NO: 75021 - protein, 9 aa, Homo sapiens
  misc_feature: Table A; Target 75021; HLA-C*16:04; SEPT14; ENSG00000154997; TAA
EEEELKQRF

SEQ ID NO: 75022 - protein, 10 aa, Homo sapiens
  misc_feature: Table A; Target 75022; HLA-B*44:02; SEPT14; ENSG00000154997; TAA
EEEELKQRFM

SEQ ID NO: 75023 - protein, 10 aa, Homo sapiens
  misc_feature: Table A; Target 75023; HLA-B*44:03; SEPT14; ENSG00000154997; TAA
EEEELKQRFM

SEQ ID NO: 75024 - protein, 8 aa, Homo sapiens
  misc_feature: Table A; Target 75024; HLA-B*18:01; SEPT14; ENSG00000154997; TAA
EEELKQRF

SEQ ID NO: 75025 - protein, 8 aa, Homo sapiens
  misc_feature: Table A; Target 75025; HLA-B*44:02; SEPT14; ENSG00000154997; TAA
EEELKQRF

SEQ ID NO: 75026 - protein, 8 aa, Homo sapiens
  misc_feature: Table A; Target 75026; HLA-B*44:03; SEPT14; ENSG00000154997; TAA
EEELKQRF

SEQ ID NO: 75027 - protein, 9 aa, Homo sapiens
  misc_feature: Table A; Target 75027; HLA-B*44:02; SEPT14; ENSG00000154997; TAA
EEELKQRFM

SEQ ID NO: 75028 - protein, 9 aa, Homo sapiens
  misc_feature: Table A; Target 75028; HLA-B*44:03; SEPT14; ENSG00000154997; TAA
EEELKQRFM

SEQ ID NO: 75029 - protein, 9 aa, Homo sapiens
  misc_feature: Table A; Target 75029; HLA-B*44:02; SEPT14; ENSG00000154997; TAA
EELKIKRSL

SEQ ID NO: 75030 - protein, 9 aa, Homo sapiens
  misc_feature: Table A; Target 75030; HLA-B*44:03; SEPT14; ENSG00000154997; TAA
EELKIKRSL

SEQ ID NO: 75031 - protein, 11 aa, Homo sapiens
  misc_feature: Table A; Target 75031; HLA-B*39:01; SEPT14; ENSG00000154997; TAA
EETAAQANSSV

SEQ ID NO: 75032 - protein, 11 aa, Homo sapiens
  misc_feature: Table A; Target 75032; HLA-B*49:01; SEPT14; ENSG00000154997; TAA
EETAAQANSSV

SEQ ID NO: 75033 - protein, 8 aa, Homo sapiens
  misc_feature: Table A; Target 75033; HLA-A*33:03; SEPT14; ENSG00000154997; TAA
EFYDQCQR

SEQ ID NO: 75034 - protein, 10 aa, Homo sapiens
  misc_feature: Table A; Target 75034; HLA-A*25:01; SEPT14; ENSG00000154997; TAA
EIFEAKRQEF

SEQ ID NO: 75035 - protein, 10 aa, Homo sapiens
  misc_feature: Table A; Target 75035; HLA-A*26:01; SEPT14; ENSG00000154997; TAA
EIFEAKRQEF

SEQ ID NO: 75036 - protein, 9 aa, Homo sapiens
  misc_feature: Table A; Target 75036; HLA-A*25:01; SEPT14; ENSG00000154997; TAA
ELISNGIQI

SEQ ID NO: 75037 - protein, 9 aa, Homo sapiens
  misc_feature: Table A; Target 75037; HLA-A*26:01; SEPT14; ENSG00000154997; TAA
ELISNGIQI

SEQ ID NO: 75038 - protein, 9 aa, Homo sapiens
  misc_feature: Table A; Target 75038; HLA-A*68:02; SEPT14; ENSG00000154997; TAA
ELISNGIQI

SEQ ID NO: 75039 - protein, 9 aa, Homo sapiens
  misc_feature: Table A; Target 75039; HLA-B*13:02; SEPT14; ENSG00000154997; TAA
ELISNGIQI

SEQ ID NO: 75040 - protein, 10 aa, Homo sapiens
  misc_feature: Table A; Target 75040; HLA-A*01:01; SEPT14; ENSG00000154997; TAA
ELISNGIQIY

SEQ ID NO: 75041 - protein, 10 aa, Homo sapiens
  misc_feature: Table A; Target 75041; HLA-A*25:01; SEPT14; ENSG00000154997; TAA
ELISNGIQIY

SEQ ID NO: 75042 - protein, 10 aa, Homo sapiens
  misc_feature: Table A; Target 75042; HLA-A*26:01; SEPT14; ENSG00000154997; TAA
ELISNGIQIY

SEQ ID NO: 75043 - protein, 10 aa, Homo sapiens
  misc_feature: Table A; Target 75043; HLA-A*29:02; SEPT14; ENSG00000154997; TAA
ELISNGIQIY

SEQ ID NO: 75044 - protein, 10 aa, Homo sapiens
  misc_feature: Table A; Target 75044; HLA-A*30:02; SEPT14; ENSG00000154997; TAA
ELISNGIQIY

SEQ ID NO: 75045 - protein, 10 aa, Homo sapiens
  misc_feature: Table A; Target 75045; HLA-B*15:01; SEPT14; ENSG00000154997; TAA
ELISNGIQIY

SEQ ID NO: 75046 - protein, 10 aa, Homo sapiens
  misc_feature: Table A; Target 75046; HLA-B*15:03; SEPT14; ENSG00000154997; TAA
ELISNGIQIY

SEQ ID NO: 75047 - protein, 10 aa, Homo sapiens
  misc_feature: Table A; Target 75047; HLA-B*18:01; SEPT14; ENSG00000154997; TAA
ELISNGIQIY

SEQ ID NO: 75048 - protein, 10 aa, Homo sapiens
  misc_feature: Table A; Target 75048; HLA-B*44:02; SEPT14; ENSG00000154997; TAA
ELISNGIQIY

SEQ ID NO: 75049 - protein, 10 aa, Homo sapiens
  misc_feature: Table A; Target 75049; HLA-B*44:03; SEPT14; ENSG00000154997; TAA
ELISNGIQIY

SEQ ID NO: 75050 - protein, 10 aa, Homo sapiens
  misc_feature: Table A; Target 75050; HLA-C*07:04; SEPT14; ENSG00000154997; TAA
ELISNGIQIY

SEQ ID NO: 75051 - protein, 10 aa, Homo sapiens
  misc_feature: Table A; Target 75051; HLA-C*16:04; SEPT14; ENSG00000154997; TAA
ELISNGIQIY

SEQ ID NO: 75052 - protein, 8 aa, Homo sapiens
  misc_feature: Table A; Target 75052; HLA-B*08:01; SEPT14; ENSG00000154997; TAA
ELKIKRSL

SEQ ID NO: 75053 - protein, 9 aa, Homo sapiens
  misc_feature: Table A; Target 75053; HLA-A*33:01; SEPT14; ENSG00000154997; TAA
ELKQRFMQR

SEQ ID NO: 75054 - protein, 9 aa, Homo sapiens
  misc_feature: Table A; Target 75054; HLA-A*33:03; SEPT14; ENSG00000154997; TAA
ELKQRFMQR

SEQ ID NO: 75055 - protein, 9 aa, Homo sapiens
  misc_feature: Table A; Target 75055; HLA-A*02:04; SEPT14; ENSG00000154997; TAA
ELQDKFEHL

SEQ ID NO: 75056 - protein, 9 aa, Homo sapiens
  misc_feature: Table A; Target 75056; HLA-A*02:07; SEPT14; ENSG00000154997; TAA
ELQDKFEHL

SEQ ID NO: 75057 - protein, 9 aa, Homo sapiens
  misc_feature: Table A; Target 75057; HLA-A*24:02; SEPT14; ENSG00000154997; TAA
ELQDKFEHL

SEQ ID NO: 75058 - protein, 9 aa, Homo sapiens
  misc_feature: Table A; Target 75058; HLA-A*25:01; SEPT14; ENSG00000154997; TAA
ELQDKFEHL

SEQ ID NO: 75059 - protein, 9 aa, Homo sapiens
  misc_feature: Table A; Target 75059; HLA-A*26:01; SEPT14; ENSG00000154997; TAA
ELQDKFEHL

SEQ ID NO: 75060 - protein, 9 aa, Homo sapiens
  misc_feature: Table A; Target 75060; HLA-A*33:01; SEPT14; ENSG00000154997; TAA
ELQDKFEHL

SEQ ID NO: 75061 - protein, 9 aa, Homo sapiens
  misc_feature: Table A; Target 75061; HLA-A*33:03; SEPT14; ENSG00000154997; TAA
ELQDKFEHL

SEQ ID NO: 75062 - protein, 9 aa, Homo sapiens
  misc_feature: Table A; Target 75062; HLA-A*68:02; SEPT14; ENSG00000154997; TAA
ELQDKFEHL

SEQ ID NO: 75063 - protein, 9 aa, Homo sapiens
  misc_feature: Table A; Target 75063; HLA-B*08:01; SEPT14; ENSG00000154997; TAA
ELQDKFEHL

SEQ ID NO: 75064 - protein, 10 aa, Homo sapiens
  misc_feature: Table A; Target 75064; HLA-A*33:01; SEPT14; ENSG00000154997; TAA
ELQDKFEHLK

SEQ ID NO: 75065 - protein, 9 aa, Homo sapiens
  misc_feature: Table A; Target 75065; HLA-A*02:01; SEPT14; ENSG00000154997; TAA
ELQESNVQL

SEQ ID NO: 75066 - protein, 9 aa, Homo sapiens
  misc_feature: Table A; Target 75066; HLA-A*02:04; SEPT14; ENSG00000154997; TAA
ELQESNVQL

SEQ ID NO: 75067 - protein, 9 aa, Homo sapiens
  misc_feature: Table A; Target 75067; HLA-A*02:07; SEPT14; ENSG00000154997; TAA
ELQESNVQL

SEQ ID NO: 75068 - protein, 9 aa, Homo sapiens
  misc_feature: Table A; Target 75068; HLA-A*33:03; SEPT14; ENSG00000154997; TAA
ELQESNVQL

SEQ ID NO: 75069 - protein, 9 aa, Homo sapiens
  misc_feature: Table A; Target 75069; HLA-B*27:05; SEPT14; ENSG00000154997; TAA
ELQESNVQL

SEQ ID NO: 75070 - protein, 9 aa, Homo sapiens
  misc_feature: Table A; Target 75070; HLA-B*35:03; SEPT14; ENSG00000154997; TAA
ELQESNVQL

SEQ ID NO: 75071 - protein, 9 aa, Homo sapiens
  misc_feature: Table A; Target 75071; HLA-B*38:01; SEPT14; ENSG00000154997; TAA
ELQESNVQL

SEQ ID NO: 75072 - protein, 9 aa, Homo sapiens
  misc_feature: Table A; Target 75072; HLA-B*39:01; SEPT14; ENSG00000154997; TAA
ELQESNVQL

SEQ ID NO: 75073 - protein, 9 aa, Homo sapiens
  misc_feature: Table A; Target 75073; HLA-B*55:01; SEPT14; ENSG00000154997; TAA
ELQESNVQL

SEQ ID NO: 75074 - protein, 10 aa, Homo sapiens
  misc_feature: Table A; Target 75074; HLA-A*03:02; SEPT14; ENSG00000154997; TAA
ELQESNVQLK

SEQ ID NO: 75075 - protein, 10 aa, Homo sapiens
  misc_feature: Table A; Target 75075; HLA-A*33:01; SEPT14; ENSG00000154997; TAA
ELQESNVQLK

SEQ ID NO: 75076 - protein, 10 aa, Homo sapiens
  misc_feature: Table A; Target 75076; HLA-A*33:03; SEPT14; ENSG00000154997; TAA
ELQESNVQLK

SEQ ID NO: 75077 - protein, 10 aa, Homo sapiens
  misc_feature: Table A; Target 75077; HLA-A*68:01; SEPT14; ENSG00000154997; TAA
ELQESNVQLK

SEQ ID NO: 75078 - protein, 10 aa, Homo sapiens
  misc_feature: Table A; Target 75078; HLA-B*27:02; SEPT14; ENSG00000154997; TAA
ELQESNVQLK

SEQ ID NO: 75079 - protein, 10 aa, Homo sapiens
  misc_feature: Table A; Target 75079; HLA-C*07:06; SEPT14; ENSG00000154997; TAA
ELQESNVQLK

SEQ ID NO: 75080 - protein, 11 aa, Homo sapiens
  misc_feature: Table A; Target 75080; HLA-A*02:07; SEPT14; ENSG00000154997; TAA
ELQESNVQLKL

SEQ ID NO: 75081 - protein, 10 aa, Homo sapiens
  misc_feature: Table A; Target 75081; HLA-A*25:01; SEPT14; ENSG00000154997; TAA
ETAAQANSSV

SEQ ID NO: 75082 - protein, 10 aa, Homo sapiens
  misc_feature: Table A; Target 75082; HLA-A*26:01; SEPT14; ENSG00000154997; TAA
ETAAQANSSV

SEQ ID NO: 75083 - protein, 10 aa, Homo sapiens
  misc_feature: Table A; Target 75083; HLA-A*68:01; SEPT14; ENSG00000154997; TAA
ETAAQANSSV

SEQ ID NO: 75084 - protein, 9 aa, Homo sapiens
  misc_feature: Table A; Target 75084; HLA-A*25:01; SEPT14; ENSG00000154997; TAA
ETVGYGDQI

SEQ ID NO: 75085 - protein, 9 aa, Homo sapiens
  misc_feature: Table A; Target 75085; HLA-A*26:01; SEPT14; ENSG00000154997; TAA
ETVGYGDQI

SEQ ID NO: 75086 - protein, 9 aa, Homo sapiens
  misc_feature: Table A; Target 75086; HLA-A*68:01; SEPT14; ENSG00000154997; TAA
ETVGYGDQI

SEQ ID NO: 75087 - protein, 9 aa, Homo sapiens
  misc_feature: Table A; Target 75087; HLA-A*68:02; SEPT14; ENSG00000154997; TAA
ETVGYGDQI

SEQ ID NO: 75088 - protein, 9 aa, Homo sapiens
  misc_feature: Table A; Target 75088; HLA-B*38:01; SEPT14; ENSG00000154997; TAA
ETVGYGDQI

SEQ ID NO: 75089 - protein, 9 aa, Homo sapiens
  misc_feature: Table A; Target 75089; HLA-B*39:01; SEPT14; ENSG00000154997; TAA
ETVGYGDQI

SEQ ID NO: 75090 - protein, 11 aa, Homo sapiens
  misc_feature: Table A; Target 75090; HLA-A*68:01; SEPT14; ENSG00000154997; TAA
ETVGYGDQIDK

SEQ ID NO: 75091 - protein, 11 aa, Homo sapiens
  misc_feature: Table A; Target 75091; HLA-A*68:02; SEPT14; ENSG00000154997; TAA
ETVGYGDQIDK

SEQ ID NO: 75092 - protein, 11 aa, Homo sapiens
  misc_feature: Table A; Target 75092; HLA-B*27:02; SEPT14; ENSG00000154997; TAA
ETVGYGDQIDK

SEQ ID NO: 75093 - protein, 8 aa, Homo sapiens
  misc_feature: Table A; Target 75093; HLA-B*08:01; SEPT14; ENSG00000154997; TAA
EVKVGKRM

SEQ ID NO: 75094 - protein, 10 aa, Homo sapiens
  misc_feature: Table A; Target 75094; HLA-A*33:03; SEPT14; ENSG00000154997; TAA
EVKVGKRMVR

SEQ ID NO: 75095 - protein, 9 aa, Homo sapiens
  misc_feature: Table A; Target 75095; HLA-A*33:01; SEPT14; ENSG00000154997; TAA
EYHDSRVHV

SEQ ID NO: 75096 - protein, 9 aa, Homo sapiens
  misc_feature: Table A; Target 75096; HLA-A*33:03; SEPT14; ENSG00000154997; TAA
EYHDSRVHV

SEQ ID NO: 75097 - protein, 10 aa, Homo sapiens
  misc_feature: Table A; Target 75097; HLA-C*01:02; SEPT14; ENSG00000154997; TAA
FAVVGSTDEV

SEQ ID NO: 75098 - protein, 10 aa, Homo sapiens
  misc_feature: Table A; Target 75098; HLA-C*03:03; SEPT14; ENSG00000154997; TAA
FAVVGSTDEV

SEQ ID NO: 75099 - protein, 10 aa, Homo sapiens
  misc_feature: Table A; Target 75099; HLA-C*03:04; SEPT14; ENSG00000154997; TAA
FAVVGSTDEV

SEQ ID NO: 75100 - protein, 8 aa, Homo sapiens
  misc_feature: Table A; Target 75100; HLA-B*37:01; SEPT14; ENSG00000154997; TAA
FEAKRQEF

SEQ ID NO: 75101 - protein, 8 aa, Homo sapiens
  misc_feature: Table A; Target 75101; HLA-C*16:01; SEPT14; ENSG00000154997; TAA
FEAKRQEF

SEQ ID NO: 75102 - protein, 9 aa, Homo sapiens
  misc_feature: Table A; Target 75102; HLA-A*01:01; SEPT14; ENSG00000154997; TAA
FEAKRQEFY

SEQ ID NO: 75103 - protein, 9 aa, Homo sapiens
  misc_feature: Table A; Target 75103; HLA-A*29:02; SEPT14; ENSG00000154997; TAA
FEAKRQEFY

SEQ ID NO: 75104 - protein, 9 aa, Homo sapiens
  misc_feature: Table A; Target 75104; HLA-B*44:02; SEPT14; ENSG00000154997; TAA
FEAKRQEFY

SEQ ID NO: 75105 - protein, 9 aa, Homo sapiens
  misc_feature: Table A; Target 75105; HLA-B*44:03; SEPT14; ENSG00000154997; TAA
FEAKRQEFY

SEQ ID NO: 75106 - protein, 9 aa, Homo sapiens
  misc_feature: Table A; Target 75106; HLA-C*02:02; SEPT14; ENSG00000154997; TAA
FEAKRQEFY

SEQ ID NO: 75107 - protein, 9 aa, Homo sapiens
  misc_feature: Table A; Target 75107; HLA-C*16:04; SEPT14; ENSG00000154997; TAA
FEAKRQEFY

SEQ ID NO: 75108 - protein, 9 aa, Homo sapiens
  misc_feature: Table A; Target 75108; HLA-A*30:01; SEPT14; ENSG00000154997; TAA
FEAYLQEEL

SEQ ID NO: 75109 - protein, 9 aa, Homo sapiens
  misc_feature: Table A; Target 75109; HLA-A*68:02; SEPT14; ENSG00000154997; TAA
FEAYLQEEL

SEQ ID NO: 75110 - protein, 9 aa, Homo sapiens
  misc_feature: Table A; Target 75110; HLA-B*18:01; SEPT14; ENSG00000154997; TAA
FEAYLQEEL

SEQ ID NO: 75111 - protein, 9 aa, Homo sapiens
  misc_feature: Table A; Target 75111; HLA-B*35:03; SEPT14; ENSG00000154997; TAA
FEAYLQEEL

SEQ ID NO: 75112 - protein, 9 aa, Homo sapiens
  misc_feature: Table A; Target 75112; HLA-B*37:01; SEPT14; ENSG00000154997; TAA
FEAYLQEEL

SEQ ID NO: 75113 - protein, 9 aa, Homo sapiens
  misc_feature: Table A; Target 75113; HLA-B*38:01; SEPT14; ENSG00000154997; TAA
FEAYLQEEL

SEQ ID NO: 75114 - protein, 9 aa, Homo sapiens
  misc_feature: Table A; Target 75114; HLA-B*40:01; SEPT14; ENSG00000154997; TAA
FEAYLQEEL

SEQ ID NO: 75115 - protein, 9 aa, Homo sapiens
  misc_feature: Table A; Target 75115; HLA-B*40:02; SEPT14; ENSG00000154997; TAA
FEAYLQEEL

SEQ ID NO: 75116 - protein, 9 aa, Homo sapiens
  misc_feature: Table A; Target 75116; HLA-B*44:02; SEPT14; ENSG00000154997; TAA
FEAYLQEEL

SEQ ID NO: 75117 - protein, 9 aa, Homo sapiens
  misc_feature: Table A; Target 75117; HLA-B*44:03; SEPT14; ENSG00000154997; TAA
FEAYLQEEL

SEQ ID NO: 75118 - protein, 9 aa, Homo sapiens
  misc_feature: Table A; Target 75118; HLA-B*49:01; SEPT14; ENSG00000154997; TAA
FEAYLQEEL

SEQ ID NO: 75119 - protein, 9 aa, Homo sapiens
  misc_feature: Table A; Target 75119; HLA-C*02:02; SEPT14; ENSG00000154997; TAA
FEAYLQEEL

SEQ ID NO: 75120 - protein, 9 aa, Homo sapiens
  misc_feature: Table A; Target 75120; HLA-C*07:04; SEPT14; ENSG00000154997; TAA
FEAYLQEEL

SEQ ID NO: 75121 - protein, 9 aa, Homo sapiens
  misc_feature: Table A; Target 75121; HLA-C*16:04; SEPT14; ENSG00000154997; TAA
FEAYLQEEL

SEQ ID NO: 75122 - protein, 10 aa, Homo sapiens
  misc_feature: Table A; Target 75122; HLA-B*27:02; SEPT14; ENSG00000154997; TAA
FEAYLQEELK

SEQ ID NO: 75123 - protein, 8 aa, Homo sapiens
  misc_feature: Table A; Target 75123; HLA-A*30:01; SEPT14; ENSG00000154997; TAA
FECLPNQL

SEQ ID NO: 75124 - protein, 8 aa, Homo sapiens
  misc_feature: Table A; Target 75124; HLA-B*18:01; SEPT14; ENSG00000154997; TAA
FECLPNQL

SEQ ID NO: 75125 - protein, 8 aa, Homo sapiens
  misc_feature: Table A; Target 75125; HLA-B*37:01; SEPT14; ENSG00000154997; TAA
FECLPNQL

SEQ ID NO: 75126 - protein, 8 aa, Homo sapiens
  misc_feature: Table A; Target 75126; HLA-B*40:02; SEPT14; ENSG00000154997; TAA
FECLPNQL

SEQ ID NO: 75127 - protein, 9 aa, Homo sapiens
  misc_feature: Table A; Target 75127; HLA-B*49:01; SEPT14; ENSG00000154997; TAA
FECLPNQLV

SEQ ID NO: 75128 - protein, 8 aa, Homo sapiens
  misc_feature: Table A; Target 75128; HLA-B*49:01; SEPT14; ENSG00000154997; TAA
FEYHDSRV

SEQ ID NO: 75129 - protein, 10 aa, Homo sapiens
  misc_feature: Table A; Target 75129; HLA-A*68:02; SEPT14; ENSG00000154997; TAA
FEYHDSRVHV

SEQ ID NO: 75130 - protein, 10 aa, Homo sapiens
  misc_feature: Table A; Target 75130; HLA-B*49:01; SEPT14; ENSG00000154997; TAA
FEYHDSRVHV

SEQ ID NO: 75131 - protein, 9 aa, Homo sapiens
  misc_feature: Table A; Target 75131; HLA-A*01:01; SEPT14; ENSG00000154997; TAA
FISPTGHSL

SEQ ID NO: 75132 - protein, 9 aa, Homo sapiens
  misc_feature: Table A; Target 75132; HLA-A*02:01; SEPT14; ENSG00000154997; TAA
FISPTGHSL

SEQ ID NO: 75133 - protein, 9 aa, Homo sapiens
  misc_feature: Table A; Target 75133; HLA-A*02:03; SEPT14; ENSG00000154997; TAA
FISPTGHSL

SEQ ID NO: 75134 - protein, 9 aa, Homo sapiens
  misc_feature: Table A; Target 75134; HLA-A*02:04; SEPT14; ENSG00000154997; TAA
FISPTGHSL

SEQ ID NO: 75135 - protein, 9 aa, Homo sapiens
  misc_feature: Table A; Target 75135; HLA-A*02:07; SEPT14; ENSG00000154997; TAA
FISPTGHSL

SEQ ID NO: 75136 - protein, 9 aa, Homo sapiens
  misc_feature: Table A; Target 75136; HLA-A*23:01; SEPT14; ENSG00000154997; TAA
FISPTGHSL

SEQ ID NO: 75137 - protein, 9 aa, Homo sapiens
  misc_feature: Table A; Target 75137; HLA-A*24:02; SEPT14; ENSG00000154997; TAA
FISPTGHSL

SEQ ID NO: 75138 - protein, 9 aa, Homo sapiens
  misc_feature: Table A; Target 75138; HLA-A*25:01; SEPT14; ENSG00000154997; TAA
FISPTGHSL

SEQ ID NO: 75139 - protein, 9 aa, Homo sapiens
  misc_feature: Table A; Target 75139; HLA-A*26:01; SEPT14; ENSG00000154997; TAA
FISPTGHSL

SEQ ID NO: 75140 - protein, 9 aa, Homo sapiens
  misc_feature: Table A; Target 75140; HLA-A*30:01; SEPT14; ENSG00000154997; TAA
FISPTGHSL

SEQ ID NO: 75141 - protein, 9 aa, Homo sapiens
  misc_feature: Table A; Target 75141; HLA-A*32:01; SEPT14; ENSG00000154997; TAA
FISPTGHSL

SEQ ID NO: 75142 - protein, 9 aa, Homo sapiens
  misc_feature: Table A; Target 75142; HLA-A*68:01; SEPT14; ENSG00000154997; TAA
FISPTGHSL

SEQ ID NO: 75143 - protein, 9 aa, Homo sapiens
  misc_feature: Table A; Target 75143; HLA-A*68:02; SEPT14; ENSG00000154997; TAA
FISPTGHSL

SEQ ID NO: 75144 - protein, 9 aa, Homo sapiens
  misc_feature: Table A; Target 75144; HLA-B*07:02; SEPT14; ENSG00000154997; TAA
FISPTGHSL

SEQ ID NO: 75145 - protein, 9 aa, Homo sapiens
  misc_feature: Table A; Target 75145; HLA-B*08:01; SEPT14; ENSG00000154997; TAA
FISPTGHSL

SEQ ID NO: 75146 - protein, 9 aa, Homo sapiens
  misc_feature: Table A; Target 75146; HLA-B*13:02; SEPT14; ENSG00000154997; TAA
FISPTGHSL

SEQ ID NO: 75147 - protein, 9 aa, Homo sapiens
  misc_feature: Table A; Target 75147; HLA-B*15:01; SEPT14; ENSG00000154997; TAA
FISPTGHSL

SEQ ID NO: 75148 - protein, 9 aa, Homo sapiens
  misc_feature: Table A; Target 75148; HLA-B*15:03; SEPT14; ENSG00000154997; TAA
FISPTGHSL

SEQ ID NO: 75149 - protein, 9 aa, Homo sapiens
  misc_feature: Table A; Target 75149; HLA-B*27:05; SEPT14; ENSG00000154997; TAA
FISPTGHSL

SEQ ID NO: 75150 - protein, 9 aa, Homo sapiens
  misc_feature: Table A; Target 75150; HLA-B*35:01; SEPT14; ENSG00000154997; TAA
FISPTGHSL

SEQ ID NO: 75151 - protein, 9 aa, Homo sapiens
  misc_feature: Table A; Target 75151; HLA-B*35:03; SEPT14; ENSG00000154997; TAA
FISPTGHSL

SEQ ID NO: 75152 - protein, 9 aa, Homo sapiens
  misc_feature: Table A; Target 75152; HLA-B*37:01; SEPT14; ENSG00000154997; TAA
FISPTGHSL

SEQ ID NO: 75153 - protein, 9 aa, Homo sapiens
  misc_feature: Table A; Target 75153; HLA-B*38:01; SEPT14; ENSG00000154997; TAA
FISPTGHSL

SEQ ID NO: 75154 - protein, 9 aa, Homo sapiens
  misc_feature: Table A; Target 75154; HLA-B*39:01; SEPT14; ENSG00000154997; TAA
FISPTGHSL

SEQ ID NO: 75155 - protein, 9 aa, Homo sapiens
  misc_feature: Table A; Target 75155; HLA-B*40:01; SEPT14; ENSG00000154997; TAA
FISPTGHSL

SEQ ID NO: 75156 - protein, 9 aa, Homo sapiens
  misc_feature: Table A; Target 75156; HLA-B*40:02; SEPT14; ENSG00000154997; TAA
FISPTGHSL

SEQ ID NO: 75157 - protein, 9 aa, Homo sapiens
  misc_feature: Table A; Target 75157; HLA-B*46:01; SEPT14; ENSG00000154997; TAA
FISPTGHSL

SEQ ID NO: 75158 - protein, 9 aa, Homo sapiens
  misc_feature: Table A; Target 75158; HLA-B*55:01; SEPT14; ENSG00000154997; TAA
FISPTGHSL

SEQ ID NO: 75159 - protein, 9 aa, Homo sapiens
  misc_feature: Table A; Target 75159; HLA-B*58:01; SEPT14; ENSG00000154997; TAA
FISPTGHSL

SEQ ID NO: 75160 - protein, 9 aa, Homo sapiens
  misc_feature: Table A; Target 75160; HLA-C*01:02; SEPT14; ENSG00000154997; TAA
FISPTGHSL

SEQ ID NO: 75161 - protein, 9 aa, Homo sapiens
  misc_feature: Table A; Target 75161; HLA-C*02:02; SEPT14; ENSG00000154997; TAA
FISPTGHSL

SEQ ID NO: 75162 - protein, 9 aa, Homo sapiens
  misc_feature: Table A; Target 75162; HLA-C*03:03; SEPT14; ENSG00000154997; TAA
FISPTGHSL

SEQ ID NO: 75163 - protein, 9 aa, Homo sapiens
  misc_feature: Table A; Target 75163; HLA-C*03:04; SEPT14; ENSG00000154997; TAA
FISPTGHSL

SEQ ID NO: 75164 - protein, 9 aa, Homo sapiens
  misc_feature: Table A; Target 75164; HLA-C*04:01; SEPT14; ENSG00000154997; TAA
FISPTGHSL

SEQ ID NO: 75165 - protein, 9 aa, Homo sapiens
  misc_feature: Table A; Target 75165; HLA-C*05:01; SEPT14; ENSG00000154997; TAA
FISPTGHSL

SEQ ID NO: 75166 - protein, 9 aa, Homo sapiens
  misc_feature: Table A; Target 75166; HLA-C*07:02; SEPT14; ENSG00000154997; TAA
FISPTGHSL

SEQ ID NO: 75167 - protein, 9 aa, Homo sapiens
  misc_feature: Table A; Target 75167; HLA-C*07:04; SEPT14; ENSG00000154997; TAA
FISPTGHSL

SEQ ID NO: 75168 - protein, 9 aa, Homo sapiens
  misc_feature: Table A; Target 75168; HLA-C*07:06; SEPT14; ENSG00000154997; TAA
FISPTGHSL

SEQ ID NO: 75169 - protein, 9 aa, Homo sapiens
  misc_feature: Table A; Target 75169; HLA-C*12:03; SEPT14; ENSG00000154997; TAA
FISPTGHSL

SEQ ID NO: 75170 - protein, 9 aa, Homo sapiens
  misc_feature: Table A; Target 75170; HLA-C*14:02; SEPT14; ENSG00000154997; TAA
FISPTGHSL

SEQ ID NO: 75171 - protein, 9 aa, Homo sapiens
  misc_feature: Table A; Target 75171; HLA-C*16:01; SEPT14; ENSG00000154997; TAA
FISPTGHSL

SEQ ID NO: 75172 - protein, 9 aa, Homo sapiens
  misc_feature: Table A; Target 75172; HLA-C*16:02; SEPT14; ENSG00000154997; TAA
FISPTGHSL

SEQ ID NO: 75173 - protein, 9 aa, Homo sapiens
  misc_feature: Table A; Target 75173; HLA-C*16:04; SEPT14; ENSG00000154997; TAA
FISPTGHSL

SEQ ID NO: 75174 - protein, 10 aa, Homo sapiens
  misc_feature: Table A; Target 75174; HLA-A*01:01; SEPT14; ENSG00000154997; TAA
FISPTGHSLK

SEQ ID NO: 75175 - protein, 9 aa, Homo sapiens
  misc_feature: Table A; Target 75175; HLA-A*33:03; SEPT14; ENSG00000154997; TAA
FNTNLKDNK

SEQ ID NO: 75176 - protein, 9 aa, Homo sapiens
  misc_feature: Table A; Target 75176; HLA-C*16:01; SEPT14; ENSG00000154997; TAA
FNTNLKDNK

SEQ ID NO: 75177 - protein, 8 aa, Homo sapiens
  misc_feature: Table A; Target 75177; HLA-B*27:02; SEPT14; ENSG00000154997; TAA
FQEIFEAK

SEQ ID NO: 75178 - protein, 9 aa, Homo sapiens
  misc_feature: Table A; Target 75178; HLA-A*01:01; SEPT14; ENSG00000154997; TAA
FTDVGPNNQ

SEQ ID NO: 75179 - protein, 10 aa, Homo sapiens
  misc_feature: Table A; Target 75179; HLA-A*01:01; SEPT14; ENSG00000154997; TAA
FTDVGPNNQP

SEQ ID NO: 75180 - protein, 10 aa, Homo sapiens
  misc_feature: Table A; Target 75180; HLA-B*27:05; SEPT14; ENSG00000154997; TAA
FTDVGPNNQP

SEQ ID NO: 75181 - protein, 10 aa, Homo sapiens
  misc_feature: Table A; Target 75181; HLA-C*05:01; SEPT14; ENSG00000154997; TAA
FTDVGPNNQP

SEQ ID NO: 75182 - protein, 11 aa, Homo sapiens
  misc_feature: Table A; Target 75182; HLA-A*01:01; SEPT14; ENSG00000154997; TAA
FTDVGPNNQPV

SEQ ID NO: 75183 - protein, 11 aa, Homo sapiens
  misc_feature: Table A; Target 75183; HLA-B*27:05; SEPT14; ENSG00000154997; TAA
FTDVGPNNQPV

SEQ ID NO: 75184 - protein, 11 aa, Homo sapiens
  misc_feature: Table A; Target 75184; HLA-B*35:03; SEPT14; ENSG00000154997; TAA
FTDVGPNNQPV

SEQ ID NO: 75185 - protein, 11 aa, Homo sapiens
  misc_feature: Table A; Target 75185; HLA-C*04:01; SEPT14; ENSG00000154997; TAA
FTDVGPNNQPV

SEQ ID NO: 75186 - protein, 8 aa, Homo sapiens
  misc_feature: Table A; Target 75186; HLA-A*68:02; SEPT14; ENSG00000154997; TAA
FTFNILCV

SEQ ID NO: 75187 - protein, 8 aa, Homo sapiens
  misc_feature: Table A; Target 75187; HLA-B*54:01; SEPT14; ENSG00000154997; TAA
FTFNILCV

SEQ ID NO: 75188 - protein, 8 aa, Homo sapiens
  misc_feature: Table A; Target 75188; HLA-B*08:01; SEPT14; ENSG00000154997; TAA
FVKLRDML

SEQ ID NO: 75189 - protein, 9 aa, Homo sapiens
  misc_feature: Table A; Target 75189; HLA-B*08:01; SEPT14; ENSG00000154997; TAA
FVKLRDMLL

SEQ ID NO: 75190 - protein, 9 aa, Homo sapiens
  misc_feature: Table A; Target 75190; HLA-A*02:01; SEPT14; ENSG00000154997; TAA
FYSNVGLQI

SEQ ID NO: 75191 - protein, 9 aa, Homo sapiens
  misc_feature: Table A; Target 75191; HLA-A*23:01; SEPT14; ENSG00000154997; TAA
FYSNVGLQI

SEQ ID NO: 75192 - protein, 9 aa, Homo sapiens
  misc_feature: Table A; Target 75192; HLA-A*24:02; SEPT14; ENSG00000154997; TAA
FYSNVGLQI

SEQ ID NO: 75193 - protein, 9 aa, Homo sapiens
  misc_feature: Table A; Target 75193; HLA-A*29:02; SEPT14; ENSG00000154997; TAA
FYSNVGLQI

SEQ ID NO: 75194 - protein, 9 aa, Homo sapiens
  misc_feature: Table A; Target 75194; HLA-A*30:01; SEPT14; ENSG00000154997; TAA
FYSNVGLQI

SEQ ID NO: 75195 - protein, 9 aa, Homo sapiens
  misc_feature: Table A; Target 75195; HLA-A*68:02; SEPT14; ENSG00000154997; TAA
FYSNVGLQI

SEQ ID NO: 75196 - protein, 9 aa, Homo sapiens
  misc_feature: Table A; Target 75196; HLA-B*13:02; SEPT14; ENSG00000154997; TAA
FYSNVGLQI

SEQ ID NO: 75197 - protein, 9 aa, Homo sapiens
  misc_feature: Table A; Target 75197; HLA-B*35:03; SEPT14; ENSG00000154997; TAA
FYSNVGLQI

SEQ ID NO: 75198 - protein, 9 aa, Homo sapiens
  misc_feature: Table A; Target 75198; HLA-B*38:01; SEPT14; ENSG00000154997; TAA
FYSNVGLQI

SEQ ID NO: 75199 - protein, 9 aa, Homo sapiens
  misc_feature: Table A; Target 75199; HLA-C*02:02; SEPT14; ENSG00000154997; TAA
FYSNVGLQI

SEQ ID NO: 75200 - protein, 9 aa, Homo sapiens
  misc_feature: Table A; Target 75200; HLA-C*03:03; SEPT14; ENSG00000154997; TAA
FYSNVGLQI

SEQ ID NO: 75201 - protein, 9 aa, Homo sapiens
  misc_feature: Table A; Target 75201; HLA-C*03:04; SEPT14; ENSG00000154997; TAA
FYSNVGLQI

SEQ ID NO: 75202 - protein, 9 aa, Homo sapiens
  misc_feature: Table A; Target 75202; HLA-C*04:01; SEPT14; ENSG00000154997; TAA
FYSNVGLQI

SEQ ID NO: 75203 - protein, 9 aa, Homo sapiens
  misc_feature: Table A; Target 75203; HLA-C*06:02; SEPT14; ENSG00000154997; TAA
FYSNVGLQI

SEQ ID NO: 75204 - protein, 9 aa, Homo sapiens
  misc_feature: Table A; Target 75204; HLA-C*07:04; SEPT14; ENSG00000154997; TAA
FYSNVGLQI

SEQ ID NO: 75205 - protein, 9 aa, Homo sapiens
  misc_feature: Table A; Target 75205; HLA-C*14:02; SEPT14; ENSG00000154997; TAA
FYSNVGLQI

SEQ ID NO: 75206 - protein, 9 aa, Homo sapiens
  misc_feature: Table A; Target 75206; HLA-C*16:02; SEPT14; ENSG00000154997; TAA
FYSNVGLQI

SEQ ID NO: 75207 - protein, 9 aa, Homo sapiens
  misc_feature: Table A; Target 75207; HLA-C*16:04; SEPT14; ENSG00000154997; TAA
FYSNVGLQI

SEQ ID NO: 75208 - protein, 10 aa, Homo sapiens
  misc_feature: Table A; Target 75208; HLA-A*30:02; SEPT14; ENSG00000154997; TAA
GDQIDKEASY

SEQ ID NO: 75209 - protein, 10 aa, Homo sapiens
  misc_feature: Table A; Target 75209; HLA-B*44:02; SEPT14; ENSG00000154997; TAA
GDQIDKEASY

SEQ ID NO: 75210 - protein, 10 aa, Homo sapiens
  misc_feature: Table A; Target 75210; HLA-B*44:03; SEPT14; ENSG00000154997; TAA
GDQIDKEASY

SEQ ID NO: 75211 - protein, 9 aa, Homo sapiens
  misc_feature: Table A; Target 75211; HLA-C*16:02; SEPT14; ENSG00000154997; TAA
GDTQKENNI

SEQ ID NO: 75212 - protein, 9 aa, Homo sapiens
  misc_feature: Table A; Target 75212; HLA-A*30:01; SEPT14; ENSG00000154997; TAA
GETGIGKST

SEQ ID NO: 75213 - protein, 9 aa, Homo sapiens
  misc_feature: Table A; Target 75213; HLA-B*40:01; SEPT14; ENSG00000154997; TAA
GETGIGKST

SEQ ID NO: 75214 - protein, 9 aa, Homo sapiens
  misc_feature: Table A; Target 75214; HLA-B*40:02; SEPT14; ENSG00000154997; TAA
GETGIGKST

SEQ ID NO: 75215 - protein, 9 aa, Homo sapiens
  misc_feature: Table A; Target 75215; HLA-B*44:02; SEPT14; ENSG00000154997; TAA
GETGIGKST

SEQ ID NO: 75216 - protein, 9 aa, Homo sapiens
  misc_feature: Table A; Target 75216; HLA-B*44:03; SEPT14; ENSG00000154997; TAA
GETGIGKST

SEQ ID NO: 75217 - protein, 9 aa, Homo sapiens
  misc_feature: Table A; Target 75217; HLA-B*49:01; SEPT14; ENSG00000154997; TAA
GETGIGKST

SEQ ID NO: 75218 - protein, 9 aa, Homo sapiens
  misc_feature: Table A; Target 75218; HLA-C*16:02; SEPT14; ENSG00000154997; TAA
GETGIGKST

SEQ ID NO: 75219 - protein, 9 aa, Homo sapiens
  misc_feature: Table A; Target 75219; HLA-C*16:04; SEPT14; ENSG00000154997; TAA
GETGIGKST

SEQ ID NO: 75220 - protein, 10 aa, Homo sapiens
  misc_feature: Table A; Target 75220; HLA-A*30:01; SEPT14; ENSG00000154997; TAA
GETGIGKSTL

SEQ ID NO: 75221 - protein, 10 aa, Homo sapiens
  misc_feature: Table A; Target 75221; HLA-B*40:01; SEPT14; ENSG00000154997; TAA
GETGIGKSTL

SEQ ID NO: 75222 - protein, 10 aa, Homo sapiens
  misc_feature: Table A; Target 75222; HLA-B*40:02; SEPT14; ENSG00000154997; TAA
GETGIGKSTL

SEQ ID NO: 75223 - protein, 10 aa, Homo sapiens
  misc_feature: Table A; Target 75223; HLA-B*44:02; SEPT14; ENSG00000154997; TAA
GETGIGKSTL

SEQ ID NO: 75224 - protein, 10 aa, Homo sapiens
  misc_feature: Table A; Target 75224; HLA-B*44:03; SEPT14; ENSG00000154997; TAA
GETGIGKSTL

SEQ ID NO: 75225 - protein, 10 aa, Homo sapiens
  misc_feature: Table A; Target 75225; HLA-B*49:01; SEPT14; ENSG00000154997; TAA
GETGIGKSTL

SEQ ID NO: 75226 - protein, 11 aa, Homo sapiens
  misc_feature: Table A; Target 75226; HLA-A*30:01; SEPT14; ENSG00000154997; TAA
GETGIGKSTLI

SEQ ID NO: 75227 - protein, 11 aa, Homo sapiens
  misc_feature: Table A; Target 75227; HLA-B*40:01; SEPT14; ENSG00000154997; TAA
GETGIGKSTLI

SEQ ID NO: 75228 - protein, 11 aa, Homo sapiens
  misc_feature: Table A; Target 75228; HLA-B*49:01; SEPT14; ENSG00000154997; TAA
GETGIGKSTLI

SEQ ID NO: 75229 - protein, 9 aa, Homo sapiens
  misc_feature: Table A; Target 75229; HLA-B*15:03; SEPT14; ENSG00000154997; TAA
GKSTLIDTL

SEQ ID NO: 75230 - protein, 9 aa, Homo sapiens
  misc_feature: Table A; Target 75230; HLA-B*38:01; SEPT14; ENSG00000154997; TAA
GKSTLIDTL

SEQ ID NO: 75231 - protein, 9 aa, Homo sapiens
  misc_feature: Table A; Target 75231; HLA-A*02:01; SEPT14; ENSG00000154997; TAA
GLQIQTYEL

SEQ ID NO: 75232 - protein, 9 aa, Homo sapiens
  misc_feature: Table A; Target 75232; HLA-A*02:03; SEPT14; ENSG00000154997; TAA
GLQIQTYEL

SEQ ID NO: 75233 - protein, 9 aa, Homo sapiens
  misc_feature: Table A; Target 75233; HLA-A*02:04; SEPT14; ENSG00000154997; TAA
GLQIQTYEL

SEQ ID NO: 75234 - protein, 9 aa, Homo sapiens
  misc_feature: Table A; Target 75234; HLA-A*02:07; SEPT14; ENSG00000154997; TAA
GLQIQTYEL

SEQ ID NO: 75235 - protein, 9 aa, Homo sapiens
  misc_feature: Table A; Target 75235; HLA-B*13:02; SEPT14; ENSG00000154997; TAA
GLQIQTYEL

SEQ ID NO: 75236 - protein, 9 aa, Homo sapiens
  misc_feature: Table A; Target 75236; HLA-B*15:01; SEPT14; ENSG00000154997; TAA
GLQIQTYEL

SEQ ID NO: 75237 - protein, 9 aa, Homo sapiens
  misc_feature: Table A; Target 75237; HLA-B*55:01; SEPT14; ENSG00000154997; TAA
GLQIQTYEL

SEQ ID NO: 75238 - protein, 9 aa, Homo sapiens
  misc_feature: Table A; Target 75238; HLA-A*32:01; SEPT14; ENSG00000154997; TAA
GPNNQPVSF

SEQ ID NO: 75239 - protein, 9 aa, Homo sapiens
  misc_feature: Table A; Target 75239; HLA-B*07:02; SEPT14; ENSG00000154997; TAA
GPNNQPVSF

SEQ ID NO: 75240 - protein, 9 aa, Homo sapiens
  misc_feature: Table A; Target 75240; HLA-B*15:01; SEPT14; ENSG00000154997; TAA
GPNNQPVSF

SEQ ID NO: 75241 - protein, 9 aa, Homo sapiens
  misc_feature: Table A; Target 75241; HLA-B*15:03; SEPT14; ENSG00000154997; TAA
GPNNQPVSF

SEQ ID NO: 75242 - protein, 9 aa, Homo sapiens
  misc_feature: Table A; Target 75242; HLA-B*35:01; SEPT14; ENSG00000154997; TAA
GPNNQPVSF

SEQ ID NO: 75243 - protein, 9 aa, Homo sapiens
  misc_feature: Table A; Target 75243; HLA-B*35:03; SEPT14; ENSG00000154997; TAA
GPNNQPVSF

SEQ ID NO: 75244 - protein, 9 aa, Homo sapiens
  misc_feature: Table A; Target 75244; HLA-B*44:03; SEPT14; ENSG00000154997; TAA
GPNNQPVSF

SEQ ID NO: 75245 - protein, 9 aa, Homo sapiens
  misc_feature: Table A; Target 75245; HLA-B*55:01; SEPT14; ENSG00000154997; TAA
GPNNQPVSF

SEQ ID NO: 75246 - protein, 9 aa, Homo sapiens
  misc_feature: Table A; Target 75246; HLA-B*56:01; SEPT14; ENSG00000154997; TAA
GPNNQPVSF

SEQ ID NO: 75247 - protein, 9 aa, Homo sapiens
  misc_feature: Table A; Target 75247; HLA-C*07:02; SEPT14; ENSG00000154997; TAA
GPNNQPVSF

SEQ ID NO: 75248 - protein, 9 aa, Homo sapiens
  misc_feature: Table A; Target 75248; HLA-C*07:04; SEPT14; ENSG00000154997; TAA
GPNNQPVSF

SEQ ID NO: 75249 - protein, 9 aa, Homo sapiens
  misc_feature: Table A; Target 75249; HLA-C*14:02; SEPT14; ENSG00000154997; TAA
GPNNQPVSF

SEQ ID NO: 75250 - protein, 9 aa, Homo sapiens
  misc_feature: Table A; Target 75250; HLA-C*16:04; SEPT14; ENSG00000154997; TAA
GPNNQPVSF

SEQ ID NO: 75251 - protein, 10 aa, Homo sapiens
  misc_feature: Table A; Target 75251; HLA-A*03:01; SEPT14; ENSG00000154997; TAA
GSTDEVKVGK

SEQ ID NO: 75252 - protein, 10 aa, Homo sapiens
  misc_feature: Table A; Target 75252; HLA-A*03:02; SEPT14; ENSG00000154997; TAA
GSTDEVKVGK

SEQ ID NO: 75253 - protein, 10 aa, Homo sapiens
  misc_feature: Table A; Target 75253; HLA-A*11:01; SEPT14; ENSG00000154997; TAA
GSTDEVKVGK

SEQ ID NO: 75254 - protein, 10 aa, Homo sapiens
  misc_feature: Table A; Target 75254; HLA-A*31:01; SEPT14; ENSG00000154997; TAA
GSTDEVKVGK

SEQ ID NO: 75255 - protein, 10 aa, Homo sapiens
  misc_feature: Table A; Target 75255; HLA-A*68:01; SEPT14; ENSG00000154997; TAA
GSTDEVKVGK

SEQ ID NO: 75256 - protein, 10 aa, Homo sapiens
  misc_feature: Table A; Target 75256; HLA-B*27:02; SEPT14; ENSG00000154997; TAA
GSTDEVKVGK

SEQ ID NO: 75257 - protein, 10 aa, Homo sapiens
  misc_feature: Table A; Target 75257; HLA-B*27:05; SEPT14; ENSG00000154997; TAA
GSTDEVKVGK

SEQ ID NO: 75258 - protein, 10 aa, Homo sapiens
  misc_feature: Table A; Target 75258; HLA-B*57:01; SEPT14; ENSG00000154997; TAA
GSTDEVKVGK

SEQ ID NO: 75259 - protein, 10 aa, Homo sapiens
  misc_feature: Table A; Target 75259; HLA-C*07:06; SEPT14; ENSG00000154997; TAA
GSTDEVKVGK

SEQ ID NO: 75260 - protein, 8 aa, Homo sapiens
  misc_feature: Table A; Target 75260; HLA-B*37:01; SEPT14; ENSG00000154997; TAA
HDSRVHVC

SEQ ID NO: 75261 - protein, 8 aa, Homo sapiens
  misc_feature: Table A; Target 75261; HLA-C*14:02; SEPT14; ENSG00000154997; TAA
HFYSNVGL

SEQ ID NO: 75262 - protein, 10 aa, Homo sapiens
  misc_feature: Table A; Target 75262; HLA-A*23:01; SEPT14; ENSG00000154997; TAA
HFYSNVGLQI

SEQ ID NO: 75263 - protein, 9 aa, Homo sapiens
  misc_feature: Table A; Target 75263; HLA-A*31:01; SEPT14; ENSG00000154997; TAA
HTQHYECYR

SEQ ID NO: 75264 - protein, 9 aa, Homo sapiens
  misc_feature: Table A; Target 75264; HLA-A*33:01; SEPT14; ENSG00000154997; TAA
HTQHYECYR

SEQ ID NO: 75265 - protein, 9 aa, Homo sapiens
  misc_feature: Table A; Target 75265; HLA-A*33:03; SEPT14; ENSG00000154997; TAA
HTQHYECYR

SEQ ID NO: 75266 - protein, 9 aa, Homo sapiens
  misc_feature: Table A; Target 75266; HLA-A*02:07; SEPT14; ENSG00000154997; TAA
HYPWGVLQV

SEQ ID NO: 75267 - protein, 9 aa, Homo sapiens
  misc_feature: Table A; Target 75267; HLA-A*24:02; SEPT14; ENSG00000154997; TAA
HYPWGVLQV

SEQ ID NO: 75268 - protein, 9 aa, Homo sapiens
  misc_feature: Table A; Target 75268; HLA-A*68:02; SEPT14; ENSG00000154997; TAA
HYPWGVLQV

SEQ ID NO: 75269 - protein, 9 aa, Homo sapiens
  misc_feature: Table A; Target 75269; HLA-A*03:01; SEPT14; ENSG00000154997; TAA
IAKADTISK

SEQ ID NO: 75270 - protein, 9 aa, Homo sapiens
  misc_feature: Table A; Target 75270; HLA-A*03:02; SEPT14; ENSG00000154997; TAA
IAKADTISK

SEQ ID NO: 75271 - protein, 9 aa, Homo sapiens
  misc_feature: Table A; Target 75271; HLA-A*11:01; SEPT14; ENSG00000154997; TAA
IAKADTISK

SEQ ID NO: 75272 - protein, 9 aa, Homo sapiens
  misc_feature: Table A; Target 75272; HLA-A*31:01; SEPT14; ENSG00000154997; TAA
IAKADTISK

SEQ ID NO: 75273 - protein, 9 aa, Homo sapiens
  misc_feature: Table A; Target 75273; HLA-A*33:01; SEPT14; ENSG00000154997; TAA
IAKADTISK

SEQ ID NO: 75274 - protein, 9 aa, Homo sapiens
  misc_feature: Table A; Target 75274; HLA-A*33:03; SEPT14; ENSG00000154997; TAA
IAKADTISK

SEQ ID NO: 75275 - protein, 9 aa, Homo sapiens
  misc_feature: Table A; Target 75275; HLA-A*68:01; SEPT14; ENSG00000154997; TAA
IAKADTISK

SEQ ID NO: 75276 - protein, 9 aa, Homo sapiens
  misc_feature: Table A; Target 75276; HLA-B*46:01; SEPT14; ENSG00000154997; TAA
IAKADTISK

SEQ ID NO: 75277 - protein, 9 aa, Homo sapiens
  misc_feature: Table A; Target 75277; HLA-B*57:01; SEPT14; ENSG00000154997; TAA
IAKADTISK

SEQ ID NO: 75278 - protein, 9 aa, Homo sapiens
  misc_feature: Table A; Target 75278; HLA-B*58:01; SEPT14; ENSG00000154997; TAA
IAKADTISK

SEQ ID NO: 75279 - protein, 9 aa, Homo sapiens
  misc_feature: Table A; Target 75279; HLA-C*02:02; SEPT14; ENSG00000154997; TAA
IAKADTISK

SEQ ID NO: 75280 - protein, 9 aa, Homo sapiens
  misc_feature: Table A; Target 75280; HLA-C*03:03; SEPT14; ENSG00000154997; TAA
IAKADTISK

SEQ ID NO: 75281 - protein, 9 aa, Homo sapiens
  misc_feature: Table A; Target 75281; HLA-C*03:04; SEPT14; ENSG00000154997; TAA
IAKADTISK

SEQ ID NO: 75282 - protein, 9 aa, Homo sapiens
  misc_feature: Table A; Target 75282; HLA-C*06:02; SEPT14; ENSG00000154997; TAA
IAKADTISK

SEQ ID NO: 75283 - protein, 9 aa, Homo sapiens
  misc_feature: Table A; Target 75283; HLA-C*07:06; SEPT14; ENSG00000154997; TAA
IAKADTISK

SEQ ID NO: 75284 - protein, 9 aa, Homo sapiens
  misc_feature: Table A; Target 75284; HLA-C*12:03; SEPT14; ENSG00000154997; TAA
IAKADTISK

SEQ ID NO: 75285 - protein, 9 aa, Homo sapiens
  misc_feature: Table A; Target 75285; HLA-C*16:01; SEPT14; ENSG00000154997; TAA
IAKADTISK

SEQ ID NO: 75286 - protein, 9 aa, Homo sapiens
  misc_feature: Table A; Target 75286; HLA-C*16:02; SEPT14; ENSG00000154997; TAA
IAKADTISK

SEQ ID NO: 75287 - protein, 8 aa, Homo sapiens
  misc_feature: Table A; Target 75287; HLA-B*15:03; SEPT14; ENSG00000154997; TAA
IDAQFEAY

SEQ ID NO: 75288 - protein, 8 aa, Homo sapiens
  misc_feature: Table A; Target 75288; HLA-B*18:01; SEPT14; ENSG00000154997; TAA
IDAQFEAY

SEQ ID NO: 75289 - protein, 8 aa, Homo sapiens
  misc_feature: Table A; Target 75289; HLA-B*37:01; SEPT14; ENSG00000154997; TAA
IDAQFEAY

SEQ ID NO: 75290 - protein, 8 aa, Homo sapiens
  misc_feature: Table A; Target 75290; HLA-C*07:01; SEPT14; ENSG00000154997; TAA
IDAQFEAY

SEQ ID NO: 75291 - protein, 9 aa, Homo sapiens
  misc_feature: Table A; Target 75291; HLA-A*68:02; SEPT14; ENSG00000154997; TAA
IDAQFEAYL

SEQ ID NO: 75292 - protein, 9 aa, Homo sapiens
  misc_feature: Table A; Target 75292; HLA-C*06:02; SEPT14; ENSG00000154997; TAA
IDAQFEAYL

SEQ ID NO: 75293 - protein, 8 aa, Homo sapiens
  misc_feature: Table A; Target 75293; HLA-C*07:01; SEPT14; ENSG00000154997; TAA
IDTLFNTN

SEQ ID NO: 75294 - protein, 9 aa, Homo sapiens
  misc_feature: Table A; Target 75294; HLA-A*30:01; SEPT14; ENSG00000154997; TAA
IDTLFNTNL

SEQ ID NO: 75295 - protein, 9 aa, Homo sapiens
  misc_feature: Table A; Target 75295; HLA-B*13:02; SEPT14; ENSG00000154997; TAA
IDTLFNTNL

SEQ ID NO: 75296 - protein, 9 aa, Homo sapiens
  misc_feature: Table A; Target 75296; HLA-B*37:01; SEPT14; ENSG00000154997; TAA
IDTLFNTNL

SEQ ID NO: 75297 - protein, 9 aa, Homo sapiens
  misc_feature: Table A; Target 75297; HLA-B*40:01; SEPT14; ENSG00000154997; TAA
IDTLFNTNL

SEQ ID NO: 75298 - protein, 9 aa, Homo sapiens
  misc_feature: Table A; Target 75298; HLA-B*40:02; SEPT14; ENSG00000154997; TAA
IDTLFNTNL

SEQ ID NO: 75299 - protein, 9 aa, Homo sapiens
  misc_feature: Table A; Target 75299; HLA-B*49:01; SEPT14; ENSG00000154997; TAA
IDTLFNTNL

SEQ ID NO: 75300 - protein, 9 aa, Homo sapiens
  misc_feature: Table A; Target 75300; HLA-C*06:02; SEPT14; ENSG00000154997; TAA
IDTLFNTNL

SEQ ID NO: 75301 - protein, 9 aa, Homo sapiens
  misc_feature: Table A; Target 75301; HLA-C*07:01; SEPT14; ENSG00000154997; TAA
IDTLFNTNL

SEQ ID NO: 75302 - protein, 9 aa, Homo sapiens
  misc_feature: Table A; Target 75302; HLA-C*07:04; SEPT14; ENSG00000154997; TAA
IDTLFNTNL

SEQ ID NO: 75303 - protein, 9 aa, Homo sapiens
  misc_feature: Table A; Target 75303; HLA-C*16:02; SEPT14; ENSG00000154997; TAA
IDTLFNTNL

SEQ ID NO: 75304 - protein, 10 aa, Homo sapiens
  misc_feature: Table A; Target 75304; HLA-B*27:02; SEPT14; ENSG00000154997; TAA
IDTLFNTNLK

SEQ ID NO: 75305 - protein, 10 aa, Homo sapiens
  misc_feature: Table A; Target 75305; HLA-C*07:01; SEPT14; ENSG00000154997; TAA
IDTLFNTNLK

SEQ ID NO: 75306 - protein, 9 aa, Homo sapiens
  misc_feature: Table A; Target 75306; HLA-A*23:01; SEPT14; ENSG00000154997; TAA
IFEAKRQEF

SEQ ID NO: 75307 - protein, 9 aa, Homo sapiens
  misc_feature: Table A; Target 75307; HLA-A*24:02; SEPT14; ENSG00000154997; TAA
IFEAKRQEF

SEQ ID NO: 75308 - protein, 11 aa, Homo sapiens
  misc_feature: Table A; Target 75308; HLA-A*02:07; SEPT14; ENSG00000154997; TAA
IIPLIAKADTI

SEQ ID NO: 75309 - protein, 11 aa, Homo sapiens
  misc_feature: Table A; Target 75309; HLA-A*03:01; SEPT14; ENSG00000154997; TAA
ILCVGETGIGK

SEQ ID NO: 75310 - protein, 11 aa, Homo sapiens
  misc_feature: Table A; Target 75310; HLA-A*03:02; SEPT14; ENSG00000154997; TAA
ILCVGETGIGK

SEQ ID NO: 75311 - protein, 11 aa, Homo sapiens
  misc_feature: Table A; Target 75311; HLA-B*27:02; SEPT14; ENSG00000154997; TAA
ILCVGETGIGK

SEQ ID NO: 75312 - protein, 10 aa, Homo sapiens
  misc_feature: Table A; Target 75312; HLA-A*02:01; SEPT14; ENSG00000154997; TAA
IMSELISNGI

SEQ ID NO: 75313 - protein, 10 aa, Homo sapiens
  misc_feature: Table A; Target 75313; HLA-A*02:03; SEPT14; ENSG00000154997; TAA
IMSELISNGI

SEQ ID NO: 75314 - protein, 10 aa, Homo sapiens
  misc_feature: Table A; Target 75314; HLA-B*13:02; SEPT14; ENSG00000154997; TAA
IMSELISNGI

SEQ ID NO: 75315 - protein, 10 aa, Homo sapiens
  misc_feature: Table A; Target 75315; HLA-B*35:03; SEPT14; ENSG00000154997; TAA
IPLIAKADTI

SEQ ID NO: 75316 - protein, 10 aa, Homo sapiens
  misc_feature: Table A; Target 75316; HLA-B*51:01; SEPT14; ENSG00000154997; TAA
IPLIAKADTI

SEQ ID NO: 75317 - protein, 9 aa, Homo sapiens
  misc_feature: Table A; Target 75317; HLA-A*23:01; SEPT14; ENSG00000154997; TAA
ISKNDLQTF

SEQ ID NO: 75318 - protein, 9 aa, Homo sapiens
  misc_feature: Table A; Target 75318; HLA-A*24:02; SEPT14; ENSG00000154997; TAA
ISKNDLQTF

SEQ ID NO: 75319 - protein, 9 aa, Homo sapiens
  misc_feature: Table A; Target 75319; HLA-A*25:01; SEPT14; ENSG00000154997; TAA
ISKNDLQTF

SEQ ID NO: 75320 - protein, 9 aa, Homo sapiens
  misc_feature: Table A; Target 75320; HLA-A*26:01; SEPT14; ENSG00000154997; TAA
ISKNDLQTF

SEQ ID NO: 75321 - protein, 9 aa, Homo sapiens
  misc_feature: Table A; Target 75321; HLA-A*30:02; SEPT14; ENSG00000154997; TAA
ISKNDLQTF

SEQ ID NO: 75322 - protein, 9 aa, Homo sapiens
  misc_feature: Table A; Target 75322; HLA-A*31:01; SEPT14; ENSG00000154997; TAA
ISKNDLQTF

SEQ ID NO: 75323 - protein, 9 aa, Homo sapiens
  misc_feature: Table A; Target 75323; HLA-A*32:01; SEPT14; ENSG00000154997; TAA
ISKNDLQTF

SEQ ID NO: 75324 - protein, 9 aa, Homo sapiens
  misc_feature: Table A; Target 75324; HLA-A*33:01; SEPT14; ENSG00000154997; TAA
ISKNDLQTF

SEQ ID NO: 75325 - protein, 9 aa, Homo sapiens
  misc_feature: Table A; Target 75325; HLA-A*33:03; SEPT14; ENSG00000154997; TAA
ISKNDLQTF

SEQ ID NO: 75326 - protein, 9 aa, Homo sapiens
  misc_feature: Table A; Target 75326; HLA-B*15:01; SEPT14; ENSG00000154997; TAA
ISKNDLQTF

SEQ ID NO: 75327 - protein, 9 aa, Homo sapiens
  misc_feature: Table A; Target 75327; HLA-B*15:03; SEPT14; ENSG00000154997; TAA
ISKNDLQTF

SEQ ID NO: 75328 - protein, 9 aa, Homo sapiens
  misc_feature: Table A; Target 75328; HLA-B*40:02; SEPT14; ENSG00000154997; TAA
ISKNDLQTF

SEQ ID NO: 75329 - protein, 9 aa, Homo sapiens
  misc_feature: Table A; Target 75329; HLA-B*46:01; SEPT14; ENSG00000154997; TAA
ISKNDLQTF

SEQ ID NO: 75330 - protein, 9 aa, Homo sapiens
  misc_feature: Table A; Target 75330; HLA-B*57:01; SEPT14; ENSG00000154997; TAA
ISKNDLQTF

SEQ ID NO: 75331 - protein, 9 aa, Homo sapiens
  misc_feature: Table A; Target 75331; HLA-B*58:01; SEPT14; ENSG00000154997; TAA
ISKNDLQTF

SEQ ID NO: 75332 - protein, 9 aa, Homo sapiens
  misc_feature: Table A; Target 75332; HLA-C*01:02; SEPT14; ENSG00000154997; TAA
ISKNDLQTF

SEQ ID NO: 75333 - protein, 9 aa, Homo sapiens
  misc_feature: Table A; Target 75333; HLA-C*02:02; SEPT14; ENSG00000154997; TAA
ISKNDLQTF

SEQ ID NO: 75334 - protein, 9 aa, Homo sapiens
  misc_feature: Table A; Target 75334; HLA-C*03:04; SEPT14; ENSG00000154997; TAA
ISKNDLQTF

SEQ ID NO: 75335 - protein, 9 aa, Homo sapiens
  misc_feature: Table A; Target 75335; HLA-C*05:01; SEPT14; ENSG00000154997; TAA
ISKNDLQTF

SEQ ID NO: 75336 - protein, 9 aa, Homo sapiens
  misc_feature: Table A; Target 75336; HLA-C*07:04; SEPT14; ENSG00000154997; TAA
ISKNDLQTF

SEQ ID NO: 75337 - protein, 9 aa, Homo sapiens
  misc_feature: Table A; Target 75337; HLA-C*12:03; SEPT14; ENSG00000154997; TAA
ISKNDLQTF

SEQ ID NO: 75338 - protein, 9 aa, Homo sapiens
  misc_feature: Table A; Target 75338; HLA-C*14:02; SEPT14; ENSG00000154997; TAA
ISKNDLQTF

SEQ ID NO: 75339 - protein, 9 aa, Homo sapiens
  misc_feature: Table A; Target 75339; HLA-C*16:01; SEPT14; ENSG00000154997; TAA
ISKNDLQTF

SEQ ID NO: 75340 - protein, 9 aa, Homo sapiens
  misc_feature: Table A; Target 75340; HLA-C*16:02; SEPT14; ENSG00000154997; TAA
ISKNDLQTF

SEQ ID NO: 75341 - protein, 9 aa, Homo sapiens
  misc_feature: Table A; Target 75341; HLA-C*16:04; SEPT14; ENSG00000154997; TAA
ISKNDLQTF

SEQ ID NO: 75342 - protein, 10 aa, Homo sapiens
  misc_feature: Table A; Target 75342; HLA-A*03:01; SEPT14; ENSG00000154997; TAA
ISKNDLQTFK

SEQ ID NO: 75343 - protein, 8 aa, Homo sapiens
  misc_feature: Table A; Target 75343; HLA-A*01:01; SEPT14; ENSG00000154997; TAA
ISNGIQIY

SEQ ID NO: 75344 - protein, 8 aa, Homo sapiens
  misc_feature: Table A; Target 75344; HLA-A*30:02; SEPT14; ENSG00000154997; TAA
ISNGIQIY

SEQ ID NO: 75345 - protein, 8 aa, Homo sapiens
  misc_feature: Table A; Target 75345; HLA-B*15:01; SEPT14; ENSG00000154997; TAA
ISNGIQIY

SEQ ID NO: 75346 - protein, 8 aa, Homo sapiens
  misc_feature: Table A; Target 75346; HLA-B*15:03; SEPT14; ENSG00000154997; TAA
ISNGIQIY

SEQ ID NO: 75347 - protein, 8 aa, Homo sapiens
  misc_feature: Table A; Target 75347; HLA-B*46:01; SEPT14; ENSG00000154997; TAA
ISNGIQIY

SEQ ID NO: 75348 - protein, 8 aa, Homo sapiens
  misc_feature: Table A; Target 75348; HLA-B*57:01; SEPT14; ENSG00000154997; TAA
ISNGIQIY

SEQ ID NO: 75349 - protein, 8 aa, Homo sapiens
  misc_feature: Table A; Target 75349; HLA-B*58:01; SEPT14; ENSG00000154997; TAA
ISNGIQIY

SEQ ID NO: 75350 - protein, 8 aa, Homo sapiens
  misc_feature: Table A; Target 75350; HLA-C*02:02; SEPT14; ENSG00000154997; TAA
ISNGIQIY

SEQ ID NO: 75351 - protein, 8 aa, Homo sapiens
  misc_feature: Table A; Target 75351; HLA-C*07:01; SEPT14; ENSG00000154997; TAA
ISNGIQIY

SEQ ID NO: 75352 - protein, 8 aa, Homo sapiens
  misc_feature: Table A; Target 75352; HLA-C*07:04; SEPT14; ENSG00000154997; TAA
ISNGIQIY

SEQ ID NO: 75353 - protein, 8 aa, Homo sapiens
  misc_feature: Table A; Target 75353; HLA-C*12:03; SEPT14; ENSG00000154997; TAA
ISNGIQIY

SEQ ID NO: 75354 - protein, 8 aa, Homo sapiens
  misc_feature: Table A; Target 75354; HLA-C*16:01; SEPT14; ENSG00000154997; TAA
ISNGIQIY

SEQ ID NO: 75355 - protein, 8 aa, Homo sapiens
  misc_feature: Table A; Target 75355; HLA-C*16:02; SEPT14; ENSG00000154997; TAA
ISNGIQIY

SEQ ID NO: 75356 - protein, 10 aa, Homo sapiens
  misc_feature: Table A; Target 75356; HLA-A*02:04; SEPT14; ENSG00000154997; TAA
ISNGIQIYQL

SEQ ID NO: 75357 - protein, 10 aa, Homo sapiens
  misc_feature: Table A; Target 75357; HLA-A*23:01; SEPT14; ENSG00000154997; TAA
ISNGIQIYQL

SEQ ID NO: 75358 - protein, 10 aa, Homo sapiens
  misc_feature: Table A; Target 75358; HLA-A*68:02; SEPT14; ENSG00000154997; TAA
ISNGIQIYQL

SEQ ID NO: 75359 - protein, 8 aa, Homo sapiens
  misc_feature: Table A; Target 75359; HLA-A*32:01; SEPT14; ENSG00000154997; TAA
ISPTGHSL

SEQ ID NO: 75360 - protein, 8 aa, Homo sapiens
  misc_feature: Table A; Target 75360; HLA-B*07:02; SEPT14; ENSG00000154997; TAA
ISPTGHSL

SEQ ID NO: 75361 - protein, 8 aa, Homo sapiens
  misc_feature: Table A; Target 75361; HLA-B*08:01; SEPT14; ENSG00000154997; TAA
ISPTGHSL

SEQ ID NO: 75362 - protein, 8 aa, Homo sapiens
  misc_feature: Table A; Target 75362; HLA-B*15:03; SEPT14; ENSG00000154997; TAA
ISPTGHSL

SEQ ID NO: 75363 - protein, 8 aa, Homo sapiens
  misc_feature: Table A; Target 75363; HLA-B*39:01; SEPT14; ENSG00000154997; TAA
ISPTGHSL

SEQ ID NO: 75364 - protein, 8 aa, Homo sapiens
  misc_feature: Table A; Target 75364; HLA-B*40:02; SEPT14; ENSG00000154997; TAA
ISPTGHSL

SEQ ID NO: 75365 - protein, 8 aa, Homo sapiens
  misc_feature: Table A; Target 75365; HLA-B*46:01; SEPT14; ENSG00000154997; TAA
ISPTGHSL

SEQ ID NO: 75366 - protein, 8 aa, Homo sapiens
  misc_feature: Table A; Target 75366; HLA-B*51:01; SEPT14; ENSG00000154997; TAA
ISPTGHSL

SEQ ID NO: 75367 - protein, 8 aa, Homo sapiens
  misc_feature: Table A; Target 75367; HLA-B*58:01; SEPT14; ENSG00000154997; TAA
ISPTGHSL

SEQ ID NO: 75368 - protein, 8 aa, Homo sapiens
  misc_feature: Table A; Target 75368; HLA-C*01:02; SEPT14; ENSG00000154997; TAA
ISPTGHSL

SEQ ID NO: 75369 - protein, 8 aa, Homo sapiens
  misc_feature: Table A; Target 75369; HLA-C*02:02; SEPT14; ENSG00000154997; TAA
ISPTGHSL

SEQ ID NO: 75370 - protein, 8 aa, Homo sapiens
  misc_feature: Table A; Target 75370; HLA-C*03:03; SEPT14; ENSG00000154997; TAA
ISPTGHSL

SEQ ID NO: 75371 - protein, 8 aa, Homo sapiens
  misc_feature: Table A; Target 75371; HLA-C*03:04; SEPT14; ENSG00000154997; TAA
ISPTGHSL

SEQ ID NO: 75372 - protein, 8 aa, Homo sapiens
  misc_feature: Table A; Target 75372; HLA-C*04:01; SEPT14; ENSG00000154997; TAA
ISPTGHSL

SEQ ID NO: 75373 - protein, 8 aa, Homo sapiens
  misc_feature: Table A; Target 75373; HLA-C*05:01; SEPT14; ENSG00000154997; TAA
ISPTGHSL

SEQ ID NO: 75374 - protein, 8 aa, Homo sapiens
  misc_feature: Table A; Target 75374; HLA-C*06:02; SEPT14; ENSG00000154997; TAA
ISPTGHSL

SEQ ID NO: 75375 - protein, 8 aa, Homo sapiens
  misc_feature: Table A; Target 75375; HLA-C*07:01; SEPT14; ENSG00000154997; TAA
ISPTGHSL

SEQ ID NO: 75376 - protein, 8 aa, Homo sapiens
  misc_feature: Table A; Target 75376; HLA-C*07:02; SEPT14; ENSG00000154997; TAA
ISPTGHSL

SEQ ID NO: 75377 - protein, 8 aa, Homo sapiens
  misc_feature: Table A; Target 75377; HLA-C*12:03; SEPT14; ENSG00000154997; TAA
ISPTGHSL

SEQ ID NO: 75378 - protein, 8 aa, Homo sapiens
  misc_feature: Table A; Target 75378; HLA-C*14:02; SEPT14; ENSG00000154997; TAA
ISPTGHSL

SEQ ID NO: 75379 - protein, 8 aa, Homo sapiens
  misc_feature: Table A; Target 75379; HLA-C*16:01; SEPT14; ENSG00000154997; TAA
ISPTGHSL

SEQ ID NO: 75380 - protein, 8 aa, Homo sapiens
  misc_feature: Table A; Target 75380; HLA-C*16:02; SEPT14; ENSG00000154997; TAA
ISPTGHSL

SEQ ID NO: 75381 - protein, 9 aa, Homo sapiens
  misc_feature: Table A; Target 75381; HLA-A*11:01; SEPT14; ENSG00000154997; TAA
ISPTGHSLK

SEQ ID NO: 75382 - protein, 11 aa, Homo sapiens
  misc_feature: Table A; Target 75382; HLA-C*01:02; SEPT14; ENSG00000154997; TAA
ISPTGHSLKSL

SEQ ID NO: 75383 - protein, 11 aa, Homo sapiens
  misc_feature: Table A; Target 75383; HLA-C*07:02; SEPT14; ENSG00000154997; TAA
ISPTGHSLKSL

SEQ ID NO: 75384 - protein, 9 aa, Homo sapiens
  misc_feature: Table A; Target 75384; HLA-A*01:01; SEPT14; ENSG00000154997; TAA
IVDYIDAQF

SEQ ID NO: 75385 - protein, 9 aa, Homo sapiens
  misc_feature: Table A; Target 75385; HLA-A*02:07; SEPT14; ENSG00000154997; TAA
IVDYIDAQF

SEQ ID NO: 75386 - protein, 9 aa, Homo sapiens
  misc_feature: Table A; Target 75386; HLA-A*23:01; SEPT14; ENSG00000154997; TAA
IVDYIDAQF

SEQ ID NO: 75387 - protein, 9 aa, Homo sapiens
  misc_feature: Table A; Target 75387; HLA-A*32:01; SEPT14; ENSG00000154997; TAA
IVDYIDAQF

SEQ ID NO: 75388 - protein, 9 aa, Homo sapiens
  misc_feature: Table A; Target 75388; HLA-B*35:01; SEPT14; ENSG00000154997; TAA
IVDYIDAQF

SEQ ID NO: 75389 - protein, 9 aa, Homo sapiens
  misc_feature: Table A; Target 75389; HLA-B*35:03; SEPT14; ENSG00000154997; TAA
IVDYIDAQF

SEQ ID NO: 75390 - protein, 9 aa, Homo sapiens
  misc_feature: Table A; Target 75390; HLA-B*38:01; SEPT14; ENSG00000154997; TAA
IVDYIDAQF

SEQ ID NO: 75391 - protein, 9 aa, Homo sapiens
  misc_feature: Table A; Target 75391; HLA-B*55:01; SEPT14; ENSG00000154997; TAA
IVDYIDAQF

SEQ ID NO: 75392 - protein, 9 aa, Homo sapiens
  misc_feature: Table A; Target 75392; HLA-C*04:01; SEPT14; ENSG00000154997; TAA
IVDYIDAQF

SEQ ID NO: 75393 - protein, 9 aa, Homo sapiens
  misc_feature: Table A; Target 75393; HLA-C*05:01; SEPT14; ENSG00000154997; TAA
IVDYIDAQF

SEQ ID NO: 75394 - protein, 9 aa, Homo sapiens
  misc_feature: Table A; Target 75394; HLA-C*07:04; SEPT14; ENSG00000154997; TAA
IVDYIDAQF

SEQ ID NO: 75395 - protein, 10 aa, Homo sapiens
  misc_feature: Table A; Target 75395; HLA-B*40:01; SEPT14; ENSG00000154997; TAA
KADTISKNDL

SEQ ID NO: 75396 - protein, 10 aa, Homo sapiens
  misc_feature: Table A; Target 75396; HLA-C*05:01; SEPT14; ENSG00000154997; TAA
KADTISKNDL

SEQ ID NO: 75397 - protein, 8 aa, Homo sapiens
  misc_feature: Table A; Target 75397; HLA-B*37:01; SEPT14; ENSG00000154997; TAA
KDNKSSHF

SEQ ID NO: 75398 - protein, 9 aa, Homo sapiens
  misc_feature: Table A; Target 75398; HLA-A*30:02; SEPT14; ENSG00000154997; TAA
KDNKSSHFY

SEQ ID NO: 75399 - protein, 9 aa, Homo sapiens
  misc_feature: Table A; Target 75399; HLA-B*44:03; SEPT14; ENSG00000154997; TAA
KDNKSSHFY

SEQ ID NO: 75400 - protein, 9 aa, Homo sapiens
  misc_feature: Table A; Target 75400; HLA-A*30:01; SEPT14; ENSG00000154997; TAA
KEASYQPIV

SEQ ID NO: 75401 - protein, 9 aa, Homo sapiens
  misc_feature: Table A; Target 75401; HLA-B*40:01; SEPT14; ENSG00000154997; TAA
KEASYQPIV

SEQ ID NO: 75402 - protein, 9 aa, Homo sapiens
  misc_feature: Table A; Target 75402; HLA-B*40:02; SEPT14; ENSG00000154997; TAA
KEASYQPIV

SEQ ID NO: 75403 - protein, 9 aa, Homo sapiens
  misc_feature: Table A; Target 75403; HLA-B*49:01; SEPT14; ENSG00000154997; TAA
KEASYQPIV

SEQ ID NO: 75404 - protein, 11 aa, Homo sapiens
  misc_feature: Table A; Target 75404; HLA-B*44:02; SEPT14; ENSG00000154997; TAA
KEASYQPIVDY

SEQ ID NO: 75405 - protein, 11 aa, Homo sapiens
  misc_feature: Table A; Target 75405; HLA-B*44:03; SEPT14; ENSG00000154997; TAA
KEASYQPIVDY

SEQ ID NO: 75406 - protein, 10 aa, Homo sapiens
  misc_feature: Table A; Target 75406; HLA-B*40:02; SEPT14; ENSG00000154997; TAA
KEKEATFKEA

SEQ ID NO: 75407 - protein, 9 aa, Homo sapiens
  misc_feature: Table A; Target 75407; HLA-B*44:02; SEPT14; ENSG00000154997; TAA
KEKTHTQHY

SEQ ID NO: 75408 - protein, 10 aa, Homo sapiens
  misc_feature: Table A; Target 75408; HLA-A*30:01; SEPT14; ENSG00000154997; TAA
KELQDKFEHL

SEQ ID NO: 75409 - protein, 10 aa, Homo sapiens
  misc_feature: Table A; Target 75409; HLA-B*40:01; SEPT14; ENSG00000154997; TAA
KELQDKFEHL

SEQ ID NO: 75410 - protein, 10 aa, Homo sapiens
  misc_feature: Table A; Target 75410; HLA-B*40:02; SEPT14; ENSG00000154997; TAA
KELQDKFEHL

SEQ ID NO: 75411 - protein, 8 aa, Homo sapiens
  misc_feature: Table A; Target 75411; HLA-A*02:01; SEPT14; ENSG00000154997; TAA
KLTVVETV

SEQ ID NO: 75412 - protein, 8 aa, Homo sapiens
  misc_feature: Table A; Target 75412; HLA-A*02:03; SEPT14; ENSG00000154997; TAA
KLTVVETV

SEQ ID NO: 75413 - protein, 8 aa, Homo sapiens
  misc_feature: Table A; Target 75413; HLA-A*32:01; SEPT14; ENSG00000154997; TAA
KLTVVETV

SEQ ID NO: 75414 - protein, 8 aa, Homo sapiens
  misc_feature: Table A; Target 75414; HLA-B*13:02; SEPT14; ENSG00000154997; TAA
KLTVVETV

SEQ ID NO: 75415 - protein, 8 aa, Homo sapiens
  misc_feature: Table A; Target 75415; HLA-B*37:01; SEPT14; ENSG00000154997; TAA
KLTVVETV

SEQ ID NO: 75416 - protein, 8 aa, Homo sapiens
  misc_feature: Table A; Target 75416; HLA-B*55:01; SEPT14; ENSG00000154997; TAA
KLTVVETV

SEQ ID NO: 75417 - protein, 8 aa, Homo sapiens
  misc_feature: Table A; Target 75417; HLA-C*06:02; SEPT14; ENSG00000154997; TAA
KLTVVETV

SEQ ID NO: 75418 - protein, 8 aa, Homo sapiens
  misc_feature: Table A; Target 75418; HLA-C*16:02; SEPT14; ENSG00000154997; TAA
KLTVVETV

SEQ ID NO: 75419 - protein, 10 aa, Homo sapiens
  misc_feature: Table A; Target 75419; HLA-A*01:01; SEPT14; ENSG00000154997; TAA
KLTVVETVGY

SEQ ID NO: 75420 - protein, 10 aa, Homo sapiens
  misc_feature: Table A; Target 75420; HLA-A*29:02; SEPT14; ENSG00000154997; TAA
KLTVVETVGY

SEQ ID NO: 75421 - protein, 10 aa, Homo sapiens
  misc_feature: Table A; Target 75421; HLA-A*30:02; SEPT14; ENSG00000154997; TAA
KLTVVETVGY

SEQ ID NO: 75422 - protein, 10 aa, Homo sapiens
  misc_feature: Table A; Target 75422; HLA-A*32:01; SEPT14; ENSG00000154997; TAA
KLTVVETVGY

SEQ ID NO: 75423 - protein, 10 aa, Homo sapiens
  misc_feature: Table A; Target 75423; HLA-B*07:02; SEPT14; ENSG00000154997; TAA
KLTVVETVGY

SEQ ID NO: 75424 - protein, 10 aa, Homo sapiens
  misc_feature: Table A; Target 75424; HLA-B*15:01; SEPT14; ENSG00000154997; TAA
KLTVVETVGY

SEQ ID NO: 75425 - protein, 10 aa, Homo sapiens
  misc_feature: Table A; Target 75425; HLA-B*15:03; SEPT14; ENSG00000154997; TAA
KLTVVETVGY

SEQ ID NO: 75426 - protein, 10 aa, Homo sapiens
  misc_feature: Table A; Target 75426; HLA-B*27:02; SEPT14; ENSG00000154997; TAA
KLTVVETVGY

SEQ ID NO: 75427 - protein, 10 aa, Homo sapiens
  misc_feature: Table A; Target 75427; HLA-B*27:05; SEPT14; ENSG00000154997; TAA
KLTVVETVGY

SEQ ID NO: 75428 - protein, 10 aa, Homo sapiens
  misc_feature: Table A; Target 75428; HLA-B*58:01; SEPT14; ENSG00000154997; TAA
KLTVVETVGY

SEQ ID NO: 75429 - protein, 10 aa, Homo sapiens
  misc_feature: Table A; Target 75429; HLA-C*04:01; SEPT14; ENSG00000154997; TAA
KLTVVETVGY

SEQ ID NO: 75430 - protein, 10 aa, Homo sapiens
  misc_feature: Table A; Target 75430; HLA-C*06:02; SEPT14; ENSG00000154997; TAA
KLTVVETVGY

SEQ ID NO: 75431 - protein, 10 aa, Homo sapiens
  misc_feature: Table A; Target 75431; HLA-C*07:01; SEPT14; ENSG00000154997; TAA
KLTVVETVGY

SEQ ID NO: 75432 - protein, 10 aa, Homo sapiens
  misc_feature: Table A; Target 75432; HLA-C*07:04; SEPT14; ENSG00000154997; TAA
KLTVVETVGY

SEQ ID NO: 75433 - protein, 8 aa, Homo sapiens
  misc_feature: Table A; Target 75433; HLA-B*08:01; SEPT14; ENSG00000154997; TAA
KNKIMSEL

SEQ ID NO: 75434 - protein, 8 aa, Homo sapiens
  misc_feature: Table A; Target 75434; HLA-B*57:01; SEPT14; ENSG00000154997; TAA
KSLDLLTM

SEQ ID NO: 75435 - protein, 8 aa, Homo sapiens
  misc_feature: Table A; Target 75435; HLA-B*58:01; SEPT14; ENSG00000154997; TAA
KSLDLLTM

SEQ ID NO: 75436 - protein, 9 aa, Homo sapiens
  misc_feature: Table A; Target 75436; HLA-A*03:01; SEPT14; ENSG00000154997; TAA
KSLDLLTMK

SEQ ID NO: 75437 - protein, 9 aa, Homo sapiens
  misc_feature: Table A; Target 75437; HLA-A*03:02; SEPT14; ENSG00000154997; TAA
KSLDLLTMK

SEQ ID NO: 75438 - protein, 9 aa, Homo sapiens
  misc_feature: Table A; Target 75438; HLA-A*11:01; SEPT14; ENSG00000154997; TAA
KSLDLLTMK

SEQ ID NO: 75439 - protein, 9 aa, Homo sapiens
  misc_feature: Table A; Target 75439; HLA-A*31:01; SEPT14; ENSG00000154997; TAA
KSLDLLTMK

SEQ ID NO: 75440 - protein, 9 aa, Homo sapiens
  misc_feature: Table A; Target 75440; HLA-B*57:01; SEPT14; ENSG00000154997; TAA
KSLDLLTMK

SEQ ID NO: 75441 - protein, 10 aa, Homo sapiens
  misc_feature: Table A; Target 75441; HLA-C*06:02; SEPT14; ENSG00000154997; TAA
KSLDLLTMKN

SEQ ID NO: 75442 - protein, 8 aa, Homo sapiens
  misc_feature: Table A; Target 75442; HLA-B*58:01; SEPT14; ENSG00000154997; TAA
KSTLIDTL

SEQ ID NO: 75443 - protein, 8 aa, Homo sapiens
  misc_feature: Table A; Target 75443; HLA-C*16:01; SEPT14; ENSG00000154997; TAA
KSTLIDTL

SEQ ID NO: 75444 - protein, 9 aa, Homo sapiens
  misc_feature: Table A; Target 75444; HLA-A*23:01; SEPT14; ENSG00000154997; TAA
KSTLIDTLF

SEQ ID NO: 75445 - protein, 9 aa, Homo sapiens
  misc_feature: Table A; Target 75445; HLA-A*24:02; SEPT14; ENSG00000154997; TAA
KSTLIDTLF

SEQ ID NO: 75446 - protein, 9 aa, Homo sapiens
  misc_feature: Table A; Target 75446; HLA-B*57:01; SEPT14; ENSG00000154997; TAA
KSTLIDTLF

SEQ ID NO: 75447 - protein, 9 aa, Homo sapiens
  misc_feature: Table A; Target 75447; HLA-B*58:01; SEPT14; ENSG00000154997; TAA
KSTLIDTLF

SEQ ID NO: 75448 - protein, 10 aa, Homo sapiens
  misc_feature: Table A; Target 75448; HLA-A*30:02; SEPT14; ENSG00000154997; TAA
KTHTQHYECY

SEQ ID NO: 75449 - protein, 8 aa, Homo sapiens
  misc_feature: Table A; Target 75449; HLA-B*13:02; SEPT14; ENSG00000154997; TAA
KVNIIPLI

SEQ ID NO: 75450 - protein, 9 aa, Homo sapiens
  misc_feature: Table A; Target 75450; HLA-B*56:01; SEPT14; ENSG00000154997; TAA
KVNIIPLIA

SEQ ID NO: 75451 - protein, 10 aa, Homo sapiens
  misc_feature: Table A; Target 75451; HLA-A*03:01; SEPT14; ENSG00000154997; TAA
KVNIIPLIAK

SEQ ID NO: 75452 - protein, 10 aa, Homo sapiens
  misc_feature: Table A; Target 75452; HLA-A*03:02; SEPT14; ENSG00000154997; TAA
KVNIIPLIAK

SEQ ID NO: 75453 - protein, 10 aa, Homo sapiens
  misc_feature: Table A; Target 75453; HLA-A*11:01; SEPT14; ENSG00000154997; TAA
KVNIIPLIAK

SEQ ID NO: 75454 - protein, 10 aa, Homo sapiens
  misc_feature: Table A; Target 75454; HLA-A*31:01; SEPT14; ENSG00000154997; TAA
KVNIIPLIAK

SEQ ID NO: 75455 - protein, 10 aa, Homo sapiens
  misc_feature: Table A; Target 75455; HLA-A*33:01; SEPT14; ENSG00000154997; TAA
KVNIIPLIAK

SEQ ID NO: 75456 - protein, 10 aa, Homo sapiens
  misc_feature: Table A; Target 75456; HLA-B*57:01; SEPT14; ENSG00000154997; TAA
KVNIIPLIAK

SEQ ID NO: 75457 - protein, 10 aa, Homo sapiens
  misc_feature: Table A; Target 75457; HLA-A*11:01; SEPT14; ENSG00000154997; TAA
LCVGETGIGK

SEQ ID NO: 75458 - protein, 8 aa, Homo sapiens
  misc_feature: Table A; Target 75458; HLA-B*37:01; SEPT14; ENSG00000154997; TAA
LDSKVNII

SEQ ID NO: 75459 - protein, 10 aa, Homo sapiens
  misc_feature: Table A; Target 75459; HLA-A*03:01; SEPT14; ENSG00000154997; TAA
LIAKADTISK

SEQ ID NO: 75460 - protein, 10 aa, Homo sapiens
  misc_feature: Table A; Target 75460; HLA-A*03:02; SEPT14; ENSG00000154997; TAA
LIAKADTISK

SEQ ID NO: 75461 - protein, 10 aa, Homo sapiens
  misc_feature: Table A; Target 75461; HLA-A*02:07; SEPT14; ENSG00000154997; TAA
LIDTLFNTNL

SEQ ID NO: 75462 - protein, 10 aa, Homo sapiens
  misc_feature: Table A; Target 75462; HLA-C*05:01; SEPT14; ENSG00000154997; TAA
LIDTLFNTNL

SEQ ID NO: 75463 - protein, 9 aa, Homo sapiens
  misc_feature: Table A; Target 75463; HLA-A*01:01; SEPT14; ENSG00000154997; TAA
LISNGIQIY

SEQ ID NO: 75464 - protein, 9 aa, Homo sapiens
  misc_feature: Table A; Target 75464; HLA-A*25:01; SEPT14; ENSG00000154997; TAA
LISNGIQIY

SEQ ID NO: 75465 - protein, 9 aa, Homo sapiens
  misc_feature: Table A; Target 75465; HLA-A*29:02; SEPT14; ENSG00000154997; TAA
LISNGIQIY

SEQ ID NO: 75466 - protein, 9 aa, Homo sapiens
  misc_feature: Table A; Target 75466; HLA-A*30:02; SEPT14; ENSG00000154997; TAA
LISNGIQIY

SEQ ID NO: 75467 - protein, 9 aa, Homo sapiens
  misc_feature: Table A; Target 75467; HLA-A*32:01; SEPT14; ENSG00000154997; TAA
LISNGIQIY

SEQ ID NO: 75468 - protein, 9 aa, Homo sapiens
  misc_feature: Table A; Target 75468; HLA-B*15:01; SEPT14; ENSG00000154997; TAA
LISNGIQIY

SEQ ID NO: 75469 - protein, 9 aa, Homo sapiens
  misc_feature: Table A; Target 75469; HLA-B*15:03; SEPT14; ENSG00000154997; TAA
LISNGIQIY

SEQ ID NO: 75470 - protein, 9 aa, Homo sapiens
  misc_feature: Table A; Target 75470; HLA-B*35:01; SEPT14; ENSG00000154997; TAA
LISNGIQIY

SEQ ID NO: 75471 - protein, 9 aa, Homo sapiens
  misc_feature: Table A; Target 75471; HLA-B*46:01; SEPT14; ENSG00000154997; TAA
LISNGIQIY

SEQ ID NO: 75472 - protein, 9 aa, Homo sapiens
  misc_feature: Table A; Target 75472; HLA-B*57:01; SEPT14; ENSG00000154997; TAA
LISNGIQIY

SEQ ID NO: 75473 - protein, 9 aa, Homo sapiens
  misc_feature: Table A; Target 75473; HLA-B*58:01; SEPT14; ENSG00000154997; TAA
LISNGIQIY

SEQ ID NO: 75474 - protein, 9 aa, Homo sapiens
  misc_feature: Table A; Target 75474; HLA-C*02:02; SEPT14; ENSG00000154997; TAA
LISNGIQIY

SEQ ID NO: 75475 - protein, 9 aa, Homo sapiens
  misc_feature: Table A; Target 75475; HLA-C*07:04; SEPT14; ENSG00000154997; TAA
LISNGIQIY

SEQ ID NO: 75476 - protein, 9 aa, Homo sapiens
  misc_feature: Table A; Target 75476; HLA-C*12:03; SEPT14; ENSG00000154997; TAA
LISNGIQIY

SEQ ID NO: 75477 - protein, 9 aa, Homo sapiens
  misc_feature: Table A; Target 75477; HLA-C*14:02; SEPT14; ENSG00000154997; TAA
LISNGIQIY

SEQ ID NO: 75478 - protein, 9 aa, Homo sapiens
  misc_feature: Table A; Target 75478; HLA-C*16:01; SEPT14; ENSG00000154997; TAA
LISNGIQIY

SEQ ID NO: 75479 - protein, 11 aa, Homo sapiens
  misc_feature: Table A; Target 75479; HLA-A*02:04; SEPT14; ENSG00000154997; TAA
LISNGIQIYQL

SEQ ID NO: 75480 - protein, 11 aa, Homo sapiens
  misc_feature: Table A; Target 75480; HLA-B*15:03; SEPT14; ENSG00000154997; TAA
LKLTVVETVGY

SEQ ID NO: 75481 - protein, 11 aa, Homo sapiens
  misc_feature: Table A; Target 75481; HLA-C*07:01; SEPT14; ENSG00000154997; TAA
LKLTVVETVGY

SEQ ID NO: 75482 - protein, 8 aa, Homo sapiens
  misc_feature: Table A; Target 75482; HLA-B*54:01; SEPT14; ENSG00000154997; TAA
LPFAVVGS

SEQ ID NO: 75483 - protein, 9 aa, Homo sapiens
  misc_feature: Table A; Target 75483; HLA-B*35:01; SEPT14; ENSG00000154997; TAA
LPFAVVGST

SEQ ID NO: 75484 - protein, 9 aa, Homo sapiens
  misc_feature: Table A; Target 75484; HLA-B*35:03; SEPT14; ENSG00000154997; TAA
LPFAVVGST

SEQ ID NO: 75485 - protein, 9 aa, Homo sapiens
  misc_feature: Table A; Target 75485; HLA-B*51:01; SEPT14; ENSG00000154997; TAA
LPFAVVGST

SEQ ID NO: 75486 - protein, 9 aa, Homo sapiens
  misc_feature: Table A; Target 75486; HLA-B*54:01; SEPT14; ENSG00000154997; TAA
LPFAVVGST

SEQ ID NO: 75487 - protein, 9 aa, Homo sapiens
  misc_feature: Table A; Target 75487; HLA-B*56:01; SEPT14; ENSG00000154997; TAA
LPFAVVGST

SEQ ID NO: 75488 - protein, 8 aa, Homo sapiens
  misc_feature: Table A; Target 75488; HLA-A*33:01; SEPT14; ENSG00000154997; TAA
LPNQLVSR

SEQ ID NO: 75489 - protein, 8 aa, Homo sapiens
  misc_feature: Table A; Target 75489; HLA-A*33:03; SEPT14; ENSG00000154997; TAA
LPNQLVSR

SEQ ID NO: 75490 - protein, 8 aa, Homo sapiens
  misc_feature: Table A; Target 75490; HLA-B*35:01; SEPT14; ENSG00000154997; TAA
LPNQLVSR

SEQ ID NO: 75491 - protein, 8 aa, Homo sapiens
  misc_feature: Table A; Target 75491; HLA-B*54:01; SEPT14; ENSG00000154997; TAA
LPNQLVSR

SEQ ID NO: 75492 - protein, 8 aa, Homo sapiens
  misc_feature: Table A; Target 75492; HLA-B*56:01; SEPT14; ENSG00000154997; TAA
LPNQLVSR

SEQ ID NO: 75493 - protein, 10 aa, Homo sapiens
  misc_feature: Table A; Target 75493; HLA-B*51:01; SEPT14; ENSG00000154997; TAA
LPNQLVSRSI

SEQ ID NO: 75494 - protein, 9 aa, Homo sapiens
  misc_feature: Table A; Target 75494; HLA-B*35:01; SEPT14; ENSG00000154997; TAA
LPTDEETAA

SEQ ID NO: 75495 - protein, 9 aa, Homo sapiens
  misc_feature: Table A; Target 75495; HLA-B*35:03; SEPT14; ENSG00000154997; TAA
LPTDEETAA

SEQ ID NO: 75496 - protein, 9 aa, Homo sapiens
  misc_feature: Table A; Target 75496; HLA-B*54:01; SEPT14; ENSG00000154997; TAA
LPTDEETAA

SEQ ID NO: 75497 - protein, 9 aa, Homo sapiens
  misc_feature: Table A; Target 75497; HLA-B*55:01; SEPT14; ENSG00000154997; TAA
LPTDEETAA

SEQ ID NO: 75498 - protein, 9 aa, Homo sapiens
  misc_feature: Table A; Target 75498; HLA-B*56:01; SEPT14; ENSG00000154997; TAA
LPTDEETAA

SEQ ID NO: 75499 - protein, 11 aa, Homo sapiens
  misc_feature: Table A; Target 75499; HLA-B*54:01; SEPT14; ENSG00000154997; TAA
LPTDEETAAQA

SEQ ID NO: 75500 - protein, 11 aa, Homo sapiens
  misc_feature: Table A; Target 75500; HLA-B*56:01; SEPT14; ENSG00000154997; TAA
LPTDEETAAQA

SEQ ID NO: 75501 - protein, 8 aa, Homo sapiens
  misc_feature: Table A; Target 75501; HLA-C*05:01; SEPT14; ENSG00000154997; TAA
LQESNVQL

SEQ ID NO: 75502 - protein, 9 aa, Homo sapiens
  misc_feature: Table A; Target 75502; HLA-A*03:02; SEPT14; ENSG00000154997; TAA
LQESNVQLK

SEQ ID NO: 75503 - protein, 9 aa, Homo sapiens
  misc_feature: Table A; Target 75503; HLA-A*11:01; SEPT14; ENSG00000154997; TAA
LQESNVQLK

SEQ ID NO: 75504 - protein, 10 aa, Homo sapiens
  misc_feature: Table A; Target 75504; HLA-B*38:01; SEPT14; ENSG00000154997; TAA
LQESNVQLKL

SEQ ID NO: 75505 - protein, 8 aa, Homo sapiens
  misc_feature: Table A; Target 75505; HLA-A*30:01; SEPT14; ENSG00000154997; TAA
LQIQTYEL

SEQ ID NO: 75506 - protein, 8 aa, Homo sapiens
  misc_feature: Table A; Target 75506; HLA-B*13:02; SEPT14; ENSG00000154997; TAA
LQIQTYEL

SEQ ID NO: 75507 - protein, 8 aa, Homo sapiens
  misc_feature: Table A; Target 75507; HLA-B*15:01; SEPT14; ENSG00000154997; TAA
LQIQTYEL

SEQ ID NO: 75508 - protein, 8 aa, Homo sapiens
  misc_feature: Table A; Target 75508; HLA-B*46:01; SEPT14; ENSG00000154997; TAA
LQIQTYEL

SEQ ID NO: 75509 - protein, 8 aa, Homo sapiens
  misc_feature: Table A; Target 75509; HLA-C*03:03; SEPT14; ENSG00000154997; TAA
LQIQTYEL

SEQ ID NO: 75510 - protein, 9 aa, Homo sapiens
  misc_feature: Table A; Target 75510; HLA-A*03:01; SEPT14; ENSG00000154997; TAA
LTMKNLDSK

SEQ ID NO: 75511 - protein, 9 aa, Homo sapiens
  misc_feature: Table A; Target 75511; HLA-A*03:02; SEPT14; ENSG00000154997; TAA
LTMKNLDSK

SEQ ID NO: 75512 - protein, 9 aa, Homo sapiens
  misc_feature: Table A; Target 75512; HLA-A*11:01; SEPT14; ENSG00000154997; TAA
LTMKNLDSK

SEQ ID NO: 75513 - protein, 9 aa, Homo sapiens
  misc_feature: Table A; Target 75513; HLA-B*57:01; SEPT14; ENSG00000154997; TAA
LTTIGHFGF

SEQ ID NO: 75514 - protein, 9 aa, Homo sapiens
  misc_feature: Table A; Target 75514; HLA-A*01:01; SEPT14; ENSG00000154997; TAA
LTVVETVGY

SEQ ID NO: 75515 - protein, 9 aa, Homo sapiens
  misc_feature: Table A; Target 75515; HLA-A*25:01; SEPT14; ENSG00000154997; TAA
LTVVETVGY

SEQ ID NO: 75516 - protein, 9 aa, Homo sapiens
  misc_feature: Table A; Target 75516; HLA-A*26:01; SEPT14; ENSG00000154997; TAA
LTVVETVGY

SEQ ID NO: 75517 - protein, 9 aa, Homo sapiens
  misc_feature: Table A; Target 75517; HLA-A*29:02; SEPT14; ENSG00000154997; TAA
LTVVETVGY

SEQ ID NO: 75518 - protein, 9 aa, Homo sapiens
  misc_feature: Table A; Target 75518; HLA-A*30:02; SEPT14; ENSG00000154997; TAA
LTVVETVGY

SEQ ID NO: 75519 - protein, 9 aa, Homo sapiens
  misc_feature: Table A; Target 75519; HLA-A*32:01; SEPT14; ENSG00000154997; TAA
LTVVETVGY

SEQ ID NO: 75520 - protein, 9 aa, Homo sapiens
  misc_feature: Table A; Target 75520; HLA-B*15:01; SEPT14; ENSG00000154997; TAA
LTVVETVGY

SEQ ID NO: 75521 - protein, 9 aa, Homo sapiens
  misc_feature: Table A; Target 75521; HLA-B*15:03; SEPT14; ENSG00000154997; TAA
LTVVETVGY

SEQ ID NO: 75522 - protein, 9 aa, Homo sapiens
  misc_feature: Table A; Target 75522; HLA-B*27:02; SEPT14; ENSG00000154997; TAA
LTVVETVGY

SEQ ID NO: 75523 - protein, 9 aa, Homo sapiens
  misc_feature: Table A; Target 75523; HLA-B*27:05; SEPT14; ENSG00000154997; TAA
LTVVETVGY

SEQ ID NO: 75524 - protein, 9 aa, Homo sapiens
  misc_feature: Table A; Target 75524; HLA-B*35:01; SEPT14; ENSG00000154997; TAA
LTVVETVGY

SEQ ID NO: 75525 - protein, 9 aa, Homo sapiens
  misc_feature: Table A; Target 75525; HLA-B*46:01; SEPT14; ENSG00000154997; TAA
LTVVETVGY

SEQ ID NO: 75526 - protein, 9 aa, Homo sapiens
  misc_feature: Table A; Target 75526; HLA-B*55:01; SEPT14; ENSG00000154997; TAA
LTVVETVGY

SEQ ID NO: 75527 - protein, 9 aa, Homo sapiens
  misc_feature: Table A; Target 75527; HLA-B*57:01; SEPT14; ENSG00000154997; TAA
LTVVETVGY

SEQ ID NO: 75528 - protein, 9 aa, Homo sapiens
  misc_feature: Table A; Target 75528; HLA-B*58:01; SEPT14; ENSG00000154997; TAA
LTVVETVGY

SEQ ID NO: 75529 - protein, 9 aa, Homo sapiens
  misc_feature: Table A; Target 75529; HLA-C*02:02; SEPT14; ENSG00000154997; TAA
LTVVETVGY

SEQ ID NO: 75530 - protein, 9 aa, Homo sapiens
  misc_feature: Table A; Target 75530; HLA-C*04:01; SEPT14; ENSG00000154997; TAA
LTVVETVGY

SEQ ID NO: 75531 - protein, 9 aa, Homo sapiens
  misc_feature: Table A; Target 75531; HLA-C*07:01; SEPT14; ENSG00000154997; TAA
LTVVETVGY

SEQ ID NO: 75532 - protein, 9 aa, Homo sapiens
  misc_feature: Table A; Target 75532; HLA-C*07:04; SEPT14; ENSG00000154997; TAA
LTVVETVGY

SEQ ID NO: 75533 - protein, 9 aa, Homo sapiens
  misc_feature: Table A; Target 75533; HLA-C*07:06; SEPT14; ENSG00000154997; TAA
LTVVETVGY

SEQ ID NO: 75534 - protein, 9 aa, Homo sapiens
  misc_feature: Table A; Target 75534; HLA-C*12:03; SEPT14; ENSG00000154997; TAA
LTVVETVGY

SEQ ID NO: 75535 - protein, 9 aa, Homo sapiens
  misc_feature: Table A; Target 75535; HLA-C*16:01; SEPT14; ENSG00000154997; TAA
LTVVETVGY

SEQ ID NO: 75536 - protein, 9 aa, Homo sapiens
  misc_feature: Table A; Target 75536; HLA-C*16:04; SEPT14; ENSG00000154997; TAA
LTVVETVGY

SEQ ID NO: 75537 - protein, 10 aa, Homo sapiens
  misc_feature: Table A; Target 75537; HLA-A*32:01; SEPT14; ENSG00000154997; TAA
LVSRSIRQGF

SEQ ID NO: 75538 - protein, 8 aa, Homo sapiens
  misc_feature: Table A; Target 75538; HLA-C*07:01; SEPT14; ENSG00000154997; TAA
LYFISPTG

SEQ ID NO: 75539 - protein, 9 aa, Homo sapiens
  misc_feature: Table A; Target 75539; HLA-A*29:02; SEPT14; ENSG00000154997; TAA
LYFISPTGH

SEQ ID NO: 75540 - protein, 9 aa, Homo sapiens
  misc_feature: Table A; Target 75540; HLA-A*31:01; SEPT14; ENSG00000154997; TAA
LYFISPTGH

SEQ ID NO: 75541 - protein, 9 aa, Homo sapiens
  misc_feature: Table A; Target 75541; HLA-C*14:02; SEPT14; ENSG00000154997; TAA
LYFISPTGH

SEQ ID NO: 75542 - protein, 11 aa, Homo sapiens
  misc_feature: Table A; Target 75542; HLA-A*23:01; SEPT14; ENSG00000154997; TAA
LYFISPTGHSL

SEQ ID NO: 75543 - protein, 11 aa, Homo sapiens
  misc_feature: Table A; Target 75543; HLA-A*24:02; SEPT14; ENSG00000154997; TAA
LYFISPTGHSL

SEQ ID NO: 75544 - protein, 11 aa, Homo sapiens
  misc_feature: Table A; Target 75544; HLA-C*14:02; SEPT14; ENSG00000154997; TAA
LYFISPTGHSL

SEQ ID NO: 75545 - protein, 8 aa, Homo sapiens
  misc_feature: Table A; Target 75545; HLA-C*03:03; SEPT14; ENSG00000154997; TAA
MAERTMAM

SEQ ID NO: 75546 - protein, 8 aa, Homo sapiens
  misc_feature: Table A; Target 75546; HLA-C*03:04; SEPT14; ENSG00000154997; TAA
MAERTMAM

SEQ ID NO: 75547 - protein, 8 aa, Homo sapiens
  misc_feature: Table A; Target 75547; HLA-C*05:01; SEPT14; ENSG00000154997; TAA
MAERTMAM

SEQ ID NO: 75548 - protein, 9 aa, Homo sapiens
  misc_feature: Table A; Target 75548; HLA-B*35:01; SEPT14; ENSG00000154997; TAA
MAMPTQIPA

SEQ ID NO: 75549 - protein, 9 aa, Homo sapiens
  misc_feature: Table A; Target 75549; HLA-B*35:03; SEPT14; ENSG00000154997; TAA
MAMPTQIPA

SEQ ID NO: 75550 - protein, 9 aa, Homo sapiens
  misc_feature: Table A; Target 75550; HLA-B*46:01; SEPT14; ENSG00000154997; TAA
MAMPTQIPA

SEQ ID NO: 75551 - protein, 9 aa, Homo sapiens
  misc_feature: Table A; Target 75551; HLA-B*54:01; SEPT14; ENSG00000154997; TAA
MAMPTQIPA

SEQ ID NO: 75552 - protein, 9 aa, Homo sapiens
  misc_feature: Table A; Target 75552; HLA-B*55:01; SEPT14; ENSG00000154997; TAA
MAMPTQIPA

SEQ ID NO: 75553 - protein, 9 aa, Homo sapiens
  misc_feature: Table A; Target 75553; HLA-B*56:01; SEPT14; ENSG00000154997; TAA
MAMPTQIPA

SEQ ID NO: 75554 - protein, 9 aa, Homo sapiens
  misc_feature: Table A; Target 75554; HLA-C*02:02; SEPT14; ENSG00000154997; TAA
MAMPTQIPA

SEQ ID NO: 75555 - protein, 9 aa, Homo sapiens
  misc_feature: Table A; Target 75555; HLA-C*03:03; SEPT14; ENSG00000154997; TAA
MAMPTQIPA

SEQ ID NO: 75556 - protein, 9 aa, Homo sapiens
  misc_feature: Table A; Target 75556; HLA-C*03:04; SEPT14; ENSG00000154997; TAA
MAMPTQIPA

SEQ ID NO: 75557 - protein, 9 aa, Homo sapiens
  misc_feature: Table A; Target 75557; HLA-C*16:01; SEPT14; ENSG00000154997; TAA
MAMPTQIPA

SEQ ID NO: 75558 - protein, 9 aa, Homo sapiens
  misc_feature: Table A; Target 75558; HLA-C*06:02; SEPT14; ENSG00000154997; TAA
MGFTDVGPN

SEQ ID NO: 75559 - protein, 9 aa, Homo sapiens
  misc_feature: Table A; Target 75559; HLA-B*54:01; SEPT14; ENSG00000154997; TAA
MPTQIPADG

SEQ ID NO: 75560 - protein, 9 aa, Homo sapiens
  misc_feature: Table A; Target 75560; HLA-B*56:01; SEPT14; ENSG00000154997; TAA
MPTQIPADG

SEQ ID NO: 75561 - protein, 9 aa, Homo sapiens
  misc_feature: Table A; Target 75561; HLA-A*01:01; SEPT14; ENSG00000154997; TAA
MSELISNGI

SEQ ID NO: 75562 - protein, 9 aa, Homo sapiens
  misc_feature: Table A; Target 75562; HLA-A*02:03; SEPT14; ENSG00000154997; TAA
NIIPLIAKA

SEQ ID NO: 75563 - protein, 9 aa, Homo sapiens
  misc_feature: Table A; Target 75563; HLA-A*02:04; SEPT14; ENSG00000154997; TAA
NIIPLIAKA

SEQ ID NO: 75564 - protein, 9 aa, Homo sapiens
  misc_feature: Table A; Target 75564; HLA-A*02:07; SEPT14; ENSG00000154997; TAA
NIIPLIAKA

SEQ ID NO: 75565 - protein, 9 aa, Homo sapiens
  misc_feature: Table A; Target 75565; HLA-A*68:02; SEPT14; ENSG00000154997; TAA
NIIPLIAKA

SEQ ID NO: 75566 - protein, 8 aa, Homo sapiens
  misc_feature: Table A; Target 75566; HLA-C*05:01; SEPT14; ENSG00000154997; TAA
NLDSKVNI

SEQ ID NO: 75567 - protein, 9 aa, Homo sapiens
  misc_feature: Table A; Target 75567; HLA-A*02:01; SEPT14; ENSG00000154997; TAA
NLDSKVNII

SEQ ID NO: 75568 - protein, 9 aa, Homo sapiens
  misc_feature: Table A; Target 75568; HLA-A*02:03; SEPT14; ENSG00000154997; TAA
NLDSKVNII

SEQ ID NO: 75569 - protein, 9 aa, Homo sapiens
  misc_feature: Table A; Target 75569; HLA-A*02:04; SEPT14; ENSG00000154997; TAA
NLDSKVNII

SEQ ID NO: 75570 - protein, 9 aa, Homo sapiens
  misc_feature: Table A; Target 75570; HLA-A*02:07; SEPT14; ENSG00000154997; TAA
NLDSKVNII

SEQ ID NO: 75571 - protein, 9 aa, Homo sapiens
  misc_feature: Table A; Target 75571; HLA-B*08:01; SEPT14; ENSG00000154997; TAA
NLDSKVNII

SEQ ID NO: 75572 - protein, 9 aa, Homo sapiens
  misc_feature: Table A; Target 75572; HLA-B*38:01; SEPT14; ENSG00000154997; TAA
NLDSKVNII

SEQ ID NO: 75573 - protein, 9 aa, Homo sapiens
  misc_feature: Table A; Target 75573; HLA-B*55:01; SEPT14; ENSG00000154997; TAA
NLDSKVNII

SEQ ID NO: 75574 - protein, 9 aa, Homo sapiens
  misc_feature: Table A; Target 75574; HLA-C*05:01; SEPT14; ENSG00000154997; TAA
NLDSKVNII

SEQ ID NO: 75575 - protein, 9 aa, Homo sapiens
  misc_feature: Table A; Target 75575; HLA-C*16:02; SEPT14; ENSG00000154997; TAA
NLDSKVNII

SEQ ID NO: 75576 - protein, 11 aa, Homo sapiens
  misc_feature: Table A; Target 75576; HLA-A*33:01; SEPT14; ENSG00000154997; TAA
NLDSKVNIIPL

SEQ ID NO: 75577 - protein, 11 aa, Homo sapiens
  misc_feature: Table A; Target 75577; HLA-A*29:02; SEPT14; ENSG00000154997; TAA
NLKDNKSSHFY

SEQ ID NO: 75578 - protein, 11 aa, Homo sapiens
  misc_feature: Table A; Target 75578; HLA-A*30:02; SEPT14; ENSG00000154997; TAA
NLKDNKSSHFY

SEQ ID NO: 75579 - protein, 8 aa, Homo sapiens
  misc_feature: Table A; Target 75579; HLA-B*08:01; SEPT14; ENSG00000154997; TAA
NLKEKTHT

SEQ ID NO: 75580 - protein, 9 aa, Homo sapiens
  misc_feature: Table A; Target 75580; HLA-B*08:01; SEPT14; ENSG00000154997; TAA
NLKEKTHTQ

SEQ ID NO: 75581 - protein, 9 aa, Homo sapiens
  misc_feature: Table A; Target 75581; HLA-A*02:07; SEPT14; ENSG00000154997; TAA
NQPVSFQEI

SEQ ID NO: 75582 - protein, 9 aa, Homo sapiens
  misc_feature: Table A; Target 75582; HLA-A*24:02; SEPT14; ENSG00000154997; TAA
NQPVSFQEI

SEQ ID NO: 75583 - protein, 9 aa, Homo sapiens
  misc_feature: Table A; Target 75583; HLA-B*13:02; SEPT14; ENSG00000154997; TAA
NQPVSFQEI

SEQ ID NO: 75584 - protein, 9 aa, Homo sapiens
  misc_feature: Table A; Target 75584; HLA-C*01:02; SEPT14; ENSG00000154997; TAA
NQPVSFQEI

SEQ ID NO: 75585 - protein, 8 aa, Homo sapiens
  misc_feature: Table A; Target 75585; HLA-C*05:01; SEPT14; ENSG00000154997; TAA
NSSVSGLL

SEQ ID NO: 75586 - protein, 9 aa, Homo sapiens
  misc_feature: Table A; Target 75586; HLA-A*01:01; SEPT14; ENSG00000154997; TAA
NVGLQIQTY

SEQ ID NO: 75587 - protein, 9 aa, Homo sapiens
  misc_feature: Table A; Target 75587; HLA-A*25:01; SEPT14; ENSG00000154997; TAA
NVGLQIQTY

SEQ ID NO: 75588 - protein, 9 aa, Homo sapiens
  misc_feature: Table A; Target 75588; HLA-A*26:01; SEPT14; ENSG00000154997; TAA
NVGLQIQTY

SEQ ID NO: 75589 - protein, 9 aa, Homo sapiens
  misc_feature: Table A; Target 75589; HLA-A*29:02; SEPT14; ENSG00000154997; TAA
NVGLQIQTY

SEQ ID NO: 75590 - protein, 9 aa, Homo sapiens
  misc_feature: Table A; Target 75590; HLA-A*30:02; SEPT14; ENSG00000154997; TAA
NVGLQIQTY

SEQ ID NO: 75591 - protein, 9 aa, Homo sapiens
  misc_feature: Table A; Target 75591; HLA-A*32:01; SEPT14; ENSG00000154997; TAA
NVGLQIQTY

SEQ ID NO: 75592 - protein, 9 aa, Homo sapiens
  misc_feature: Table A; Target 75592; HLA-A*68:01; SEPT14; ENSG00000154997; TAA
NVGLQIQTY

SEQ ID NO: 75593 - protein, 9 aa, Homo sapiens
  misc_feature: Table A; Target 75593; HLA-B*15:01; SEPT14; ENSG00000154997; TAA
NVGLQIQTY

SEQ ID NO: 75594 - protein, 9 aa, Homo sapiens
  misc_feature: Table A; Target 75594; HLA-B*15:03; SEPT14; ENSG00000154997; TAA
NVGLQIQTY

SEQ ID NO: 75595 - protein, 9 aa, Homo sapiens
  misc_feature: Table A; Target 75595; HLA-B*18:01; SEPT14; ENSG00000154997; TAA
NVGLQIQTY

SEQ ID NO: 75596 - protein, 9 aa, Homo sapiens
  misc_feature: Table A; Target 75596; HLA-B*35:01; SEPT14; ENSG00000154997; TAA
NVGLQIQTY

SEQ ID NO: 75597 - protein, 9 aa, Homo sapiens
  misc_feature: Table A; Target 75597; HLA-B*39:01; SEPT14; ENSG00000154997; TAA
NVGLQIQTY

SEQ ID NO: 75598 - protein, 9 aa, Homo sapiens
  misc_feature: Table A; Target 75598; HLA-B*44:02; SEPT14; ENSG00000154997; TAA
NVGLQIQTY

SEQ ID NO: 75599 - protein, 9 aa, Homo sapiens
  misc_feature: Table A; Target 75599; HLA-B*44:03; SEPT14; ENSG00000154997; TAA
NVGLQIQTY

SEQ ID NO: 75600 - protein, 9 aa, Homo sapiens
  misc_feature: Table A; Target 75600; HLA-C*04:01; SEPT14; ENSG00000154997; TAA
NVGLQIQTY

SEQ ID NO: 75601 - protein, 9 aa, Homo sapiens
  misc_feature: Table A; Target 75601; HLA-C*07:04; SEPT14; ENSG00000154997; TAA
NVGLQIQTY

SEQ ID NO: 75602 - protein, 9 aa, Homo sapiens
  misc_feature: Table A; Target 75602; HLA-C*07:06; SEPT14; ENSG00000154997; TAA
NVGLQIQTY

SEQ ID NO: 75603 - protein, 9 aa, Homo sapiens
  misc_feature: Table A; Target 75603; HLA-C*16:01; SEPT14; ENSG00000154997; TAA
NVGLQIQTY

SEQ ID NO: 75604 - protein, 9 aa, Homo sapiens
  misc_feature: Table A; Target 75604; HLA-C*16:04; SEPT14; ENSG00000154997; TAA
NVGLQIQTY

SEQ ID NO: 75605 - protein, 8 aa, Homo sapiens
  misc_feature: Table A; Target 75605; HLA-B*08:01; SEPT14; ENSG00000154997; TAA
NVQLKLTV

SEQ ID NO: 75606 - protein, 9 aa, Homo sapiens
  misc_feature: Table A; Target 75606; HLA-A*02:03; SEPT14; ENSG00000154997; TAA
NVQLKLTVV

SEQ ID NO: 75607 - protein, 9 aa, Homo sapiens
  misc_feature: Table A; Target 75607; HLA-A*02:04; SEPT14; ENSG00000154997; TAA
NVQLKLTVV

SEQ ID NO: 75608 - protein, 9 aa, Homo sapiens
  misc_feature: Table A; Target 75608; HLA-B*08:01; SEPT14; ENSG00000154997; TAA
NVQLKLTVV

SEQ ID NO: 75609 - protein, 9 aa, Homo sapiens
  misc_feature: Table A; Target 75609; HLA-A*24:02; SEPT14; ENSG00000154997; TAA
PLIAKADTI

SEQ ID NO: 75610 - protein, 9 aa, Homo sapiens
  misc_feature: Table A; Target 75610; HLA-B*07:02; SEPT14; ENSG00000154997; TAA
PTGHSLKSL

SEQ ID NO: 75611 - protein, 9 aa, Homo sapiens
  misc_feature: Table A; Target 75611; HLA-C*07:02; SEPT14; ENSG00000154997; TAA
PTGHSLKSL

SEQ ID NO: 75612 - protein, 9 aa, Homo sapiens
  misc_feature: Table A; Target 75612; HLA-B*07:02; SEPT14; ENSG00000154997; TAA
QANSSVSGL

SEQ ID NO: 75613 - protein, 9 aa, Homo sapiens
  misc_feature: Table A; Target 75613; HLA-B*35:03; SEPT14; ENSG00000154997; TAA
QANSSVSGL

SEQ ID NO: 75614 - protein, 9 aa, Homo sapiens
  misc_feature: Table A; Target 75614; HLA-C*01:02; SEPT14; ENSG00000154997; TAA
QANSSVSGL

SEQ ID NO: 75615 - protein, 9 aa, Homo sapiens
  misc_feature: Table A; Target 75615; HLA-C*03:03; SEPT14; ENSG00000154997; TAA
QANSSVSGL

SEQ ID NO: 75616 - protein, 9 aa, Homo sapiens
  misc_feature: Table A; Target 75616; HLA-C*03:04; SEPT14; ENSG00000154997; TAA
QANSSVSGL

SEQ ID NO: 75617 - protein, 9 aa, Homo sapiens
  misc_feature: Table A; Target 75617; HLA-C*12:03; SEPT14; ENSG00000154997; TAA
QANSSVSGL

SEQ ID NO: 75618 - protein, 9 aa, Homo sapiens
  misc_feature: Table A; Target 75618; HLA-C*14:02; SEPT14; ENSG00000154997; TAA
QANSSVSGL

SEQ ID NO: 75619 - protein, 9 aa, Homo sapiens
  misc_feature: Table A; Target 75619; HLA-C*16:02; SEPT14; ENSG00000154997; TAA
QANSSVSGL

SEQ ID NO: 75620 - protein, 10 aa, Homo sapiens
  misc_feature: Table A; Target 75620; HLA-B*40:01; SEPT14; ENSG00000154997; TAA
QANSSVSGLL

SEQ ID NO: 75621 - protein, 9 aa, Homo sapiens
  misc_feature: Table A; Target 75621; HLA-B*44:02; SEPT14; ENSG00000154997; TAA
QEIFEAKRQ

SEQ ID NO: 75622 - protein, 9 aa, Homo sapiens
  misc_feature: Table A; Target 75622; HLA-B*44:03; SEPT14; ENSG00000154997; TAA
QEIFEAKRQ

SEQ ID NO: 75623 - protein, 11 aa, Homo sapiens
  misc_feature: Table A; Target 75623; HLA-B*44:02; SEPT14; ENSG00000154997; TAA
QEIFEAKRQEF

SEQ ID NO: 75624 - protein, 11 aa, Homo sapiens
  misc_feature: Table A; Target 75624; HLA-B*44:03; SEPT14; ENSG00000154997; TAA
QEIFEAKRQEF

SEQ ID NO: 75625 - protein, 11 aa, Homo sapiens
  misc_feature: Table A; Target 75625; HLA-C*16:04; SEPT14; ENSG00000154997; TAA
QEIFEAKRQEF

SEQ ID NO: 75626 - protein, 9 aa, Homo sapiens
  misc_feature: Table A; Target 75626; HLA-A*30:01; SEPT14; ENSG00000154997; TAA
QESNVQLKL

SEQ ID NO: 75627 - protein, 9 aa, Homo sapiens
  misc_feature: Table A; Target 75627; HLA-A*68:02; SEPT14; ENSG00000154997; TAA
QESNVQLKL

SEQ ID NO: 75628 - protein, 9 aa, Homo sapiens
  misc_feature: Table A; Target 75628; HLA-B*13:02; SEPT14; ENSG00000154997; TAA
QESNVQLKL

SEQ ID NO: 75629 - protein, 9 aa, Homo sapiens
  misc_feature: Table A; Target 75629; HLA-B*18:01; SEPT14; ENSG00000154997; TAA
QESNVQLKL

SEQ ID NO: 75630 - protein, 9 aa, Homo sapiens
  misc_feature: Table A; Target 75630; HLA-B*27:02; SEPT14; ENSG00000154997; TAA
QESNVQLKL

SEQ ID NO: 75631 - protein, 9 aa, Homo sapiens
  misc_feature: Table A; Target 75631; HLA-B*27:05; SEPT14; ENSG00000154997; TAA
QESNVQLKL

SEQ ID NO: 75632 - protein, 9 aa, Homo sapiens
  misc_feature: Table A; Target 75632; HLA-B*37:01; SEPT14; ENSG00000154997; TAA
QESNVQLKL

SEQ ID NO: 75633 - protein, 9 aa, Homo sapiens
  misc_feature: Table A; Target 75633; HLA-B*38:01; SEPT14; ENSG00000154997; TAA
QESNVQLKL

SEQ ID NO: 75634 - protein, 9 aa, Homo sapiens
  misc_feature: Table A; Target 75634; HLA-B*39:01; SEPT14; ENSG00000154997; TAA
QESNVQLKL

SEQ ID NO: 75635 - protein, 9 aa, Homo sapiens
  misc_feature: Table A; Target 75635; HLA-B*40:01; SEPT14; ENSG00000154997; TAA
QESNVQLKL

SEQ ID NO: 75636 - protein, 9 aa, Homo sapiens
  misc_feature: Table A; Target 75636; HLA-B*40:02; SEPT14; ENSG00000154997; TAA
QESNVQLKL

SEQ ID NO: 75637 - protein, 9 aa, Homo sapiens
  misc_feature: Table A; Target 75637; HLA-B*44:02; SEPT14; ENSG00000154997; TAA
QESNVQLKL

SEQ ID NO: 75638 - protein, 9 aa, Homo sapiens
  misc_feature: Table A; Target 75638; HLA-B*44:03; SEPT14; ENSG00000154997; TAA
QESNVQLKL

SEQ ID NO: 75639 - protein, 9 aa, Homo sapiens
  misc_feature: Table A; Target 75639; HLA-B*49:01; SEPT14; ENSG00000154997; TAA
QESNVQLKL

SEQ ID NO: 75640 - protein, 9 aa, Homo sapiens
  misc_feature: Table A; Target 75640; HLA-B*58:01; SEPT14; ENSG00000154997; TAA
QESNVQLKL

SEQ ID NO: 75641 - protein, 9 aa, Homo sapiens
  misc_feature: Table A; Target 75641; HLA-C*02:02; SEPT14; ENSG00000154997; TAA
QESNVQLKL

SEQ ID NO: 75642 - protein, 9 aa, Homo sapiens
  misc_feature: Table A; Target 75642; HLA-C*06:02; SEPT14; ENSG00000154997; TAA
QESNVQLKL

SEQ ID NO: 75643 - protein, 9 aa, Homo sapiens
  misc_feature: Table A; Target 75643; HLA-C*07:04; SEPT14; ENSG00000154997; TAA
QESNVQLKL

SEQ ID NO: 75644 - protein, 9 aa, Homo sapiens
  misc_feature: Table A; Target 75644; HLA-C*16:01; SEPT14; ENSG00000154997; TAA
QESNVQLKL

SEQ ID NO: 75645 - protein, 9 aa, Homo sapiens
  misc_feature: Table A; Target 75645; HLA-C*16:02; SEPT14; ENSG00000154997; TAA
QESNVQLKL

SEQ ID NO: 75646 - protein, 9 aa, Homo sapiens
  misc_feature: Table A; Target 75646; HLA-C*16:04; SEPT14; ENSG00000154997; TAA
QESNVQLKL

SEQ ID NO: 75647 - protein, 10 aa, Homo sapiens
  misc_feature: Table A; Target 75647; HLA-B*44:03; SEPT14; ENSG00000154997; TAA
QESNVQLKLT

SEQ ID NO: 75648 - protein, 11 aa, Homo sapiens
  misc_feature: Table A; Target 75648; HLA-A*30:01; SEPT14; ENSG00000154997; TAA
QESNVQLKLTV

SEQ ID NO: 75649 - protein, 11 aa, Homo sapiens
  misc_feature: Table A; Target 75649; HLA-B*40:01; SEPT14; ENSG00000154997; TAA
QESNVQLKLTV

SEQ ID NO: 75650 - protein, 11 aa, Homo sapiens
  misc_feature: Table A; Target 75650; HLA-B*44:02; SEPT14; ENSG00000154997; TAA
QESNVQLKLTV

SEQ ID NO: 75651 - protein, 11 aa, Homo sapiens
  misc_feature: Table A; Target 75651; HLA-B*44:03; SEPT14; ENSG00000154997; TAA
QESNVQLKLTV

SEQ ID NO: 75652 - protein, 11 aa, Homo sapiens
  misc_feature: Table A; Target 75652; HLA-B*49:01; SEPT14; ENSG00000154997; TAA
QESNVQLKLTV

SEQ ID NO: 75653 - protein, 11 aa, Homo sapiens
  misc_feature: Table A; Target 75653; HLA-C*16:04; SEPT14; ENSG00000154997; TAA
QESNVQLKLTV

SEQ ID NO: 75654 - protein, 8 aa, Homo sapiens
  misc_feature: Table A; Target 75654; HLA-A*01:01; SEPT14; ENSG00000154997; TAA
QIDKEASY

SEQ ID NO: 75655 - protein, 8 aa, Homo sapiens
  misc_feature: Table A; Target 75655; HLA-C*05:01; SEPT14; ENSG00000154997; TAA
QIDKEASY

SEQ ID NO: 75656 - protein, 9 aa, Homo sapiens
  misc_feature: Table A; Target 75656; HLA-C*06:02; SEPT14; ENSG00000154997; TAA
QLKLTVVET

SEQ ID NO: 75657 - protein, 9 aa, Homo sapiens
  misc_feature: Table A; Target 75657; HLA-C*07:04; SEPT14; ENSG00000154997; TAA
QLKLTVVET

SEQ ID NO: 75658 - protein, 9 aa, Homo sapiens
  misc_feature: Table A; Target 75658; HLA-B*35:03; SEPT14; ENSG00000154997; TAA
QPIVDYIDA

SEQ ID NO: 75659 - protein, 9 aa, Homo sapiens
  misc_feature: Table A; Target 75659; HLA-B*54:01; SEPT14; ENSG00000154997; TAA
QPIVDYIDA

SEQ ID NO: 75660 - protein, 9 aa, Homo sapiens
  misc_feature: Table A; Target 75660; HLA-B*55:01; SEPT14; ENSG00000154997; TAA
QPIVDYIDA

SEQ ID NO: 75661 - protein, 9 aa, Homo sapiens
  misc_feature: Table A; Target 75661; HLA-B*56:01; SEPT14; ENSG00000154997; TAA
QPIVDYIDA

SEQ ID NO: 75662 - protein, 11 aa, Homo sapiens
  misc_feature: Table A; Target 75662; HLA-B*35:01; SEPT14; ENSG00000154997; TAA
QPIVDYIDAQF

SEQ ID NO: 75663 - protein, 11 aa, Homo sapiens
  misc_feature: Table A; Target 75663; HLA-B*35:03; SEPT14; ENSG00000154997; TAA
QPIVDYIDAQF

SEQ ID NO: 75664 - protein, 8 aa, Homo sapiens
  misc_feature: Table A; Target 75664; HLA-B*35:03; SEPT14; ENSG00000154997; TAA
QPVSFQEI

SEQ ID NO: 75665 - protein, 8 aa, Homo sapiens
  misc_feature: Table A; Target 75665; HLA-B*51:01; SEPT14; ENSG00000154997; TAA
QPVSFQEI

SEQ ID NO: 75666 - protein, 8 aa, Homo sapiens
  misc_feature: Table A; Target 75666; HLA-B*56:01; SEPT14; ENSG00000154997; TAA
QPVSFQEI

SEQ ID NO: 75667 - protein, 9 aa, Homo sapiens
  misc_feature: Table A; Target 75667; HLA-B*07:02; SEPT14; ENSG00000154997; TAA
QPVSFQEIF

SEQ ID NO: 75668 - protein, 9 aa, Homo sapiens
  misc_feature: Table A; Target 75668; HLA-B*35:01; SEPT14; ENSG00000154997; TAA
QPVSFQEIF

SEQ ID NO: 75669 - protein, 9 aa, Homo sapiens
  misc_feature: Table A; Target 75669; HLA-B*35:03; SEPT14; ENSG00000154997; TAA
QPVSFQEIF

SEQ ID NO: 75670 - protein, 9 aa, Homo sapiens
  misc_feature: Table A; Target 75670; HLA-B*55:01; SEPT14; ENSG00000154997; TAA
QPVSFQEIF

SEQ ID NO: 75671 - protein, 9 aa, Homo sapiens
  misc_feature: Table A; Target 75671; HLA-B*56:01; SEPT14; ENSG00000154997; TAA
QPVSFQEIF

SEQ ID NO: 75672 - protein, 11 aa, Homo sapiens
  misc_feature: Table A; Target 75672; HLA-B*54:01; SEPT14; ENSG00000154997; TAA
QPVSFQEIFEA

SEQ ID NO: 75673 - protein, 11 aa, Homo sapiens
  misc_feature: Table A; Target 75673; HLA-B*56:01; SEPT14; ENSG00000154997; TAA
QPVSFQEIFEA

SEQ ID NO: 75674 - protein, 10 aa, Homo sapiens
  misc_feature: Table A; Target 75674; HLA-B*27:02; SEPT14; ENSG00000154997; TAA
QRVKEKEATF

SEQ ID NO: 75675 - protein, 10 aa, Homo sapiens
  misc_feature: Table A; Target 75675; HLA-C*16:04; SEPT14; ENSG00000154997; TAA
QRVKEKEATF

SEQ ID NO: 75676 - protein, 10 aa, Homo sapiens
  misc_feature: Table A; Target 75676; HLA-A*68:02; SEPT14; ENSG00000154997; TAA
QTYELQESNV

SEQ ID NO: 75677 - protein, 9 aa, Homo sapiens
  misc_feature: Table A; Target 75677; HLA-B*37:01; SEPT14; ENSG00000154997; TAA
RDMLLCTNM

SEQ ID NO: 75678 - protein, 10 aa, Homo sapiens
  misc_feature: Table A; Target 75678; HLA-B*44:02; SEPT14; ENSG00000154997; TAA
REEEELKQRF

SEQ ID NO: 75679 - protein, 10 aa, Homo sapiens
  misc_feature: Table A; Target 75679; HLA-B*44:03; SEPT14; ENSG00000154997; TAA
REEEELKQRF

SEQ ID NO: 75680 - protein, 10 aa, Homo sapiens
  misc_feature: Table A; Target 75680; HLA-A*02:03; SEPT14; ENSG00000154997; TAA
RHYPWGVLQV

SEQ ID NO: 75681 - protein, 9 aa, Homo sapiens
  misc_feature: Table A; Target 75681; HLA-A*23:01; SEPT14; ENSG00000154997; TAA
RSIRQGFTF

SEQ ID NO: 75682 - protein, 9 aa, Homo sapiens
  misc_feature: Table A; Target 75682; HLA-A*24:02; SEPT14; ENSG00000154997; TAA
RSIRQGFTF

SEQ ID NO: 75683 - protein, 9 aa, Homo sapiens
  misc_feature: Table A; Target 75683; HLA-B*57:01; SEPT14; ENSG00000154997; TAA
RSIRQGFTF

SEQ ID NO: 75684 - protein, 9 aa, Homo sapiens
  misc_feature: Table A; Target 75684; HLA-B*58:01; SEPT14; ENSG00000154997; TAA
RSIRQGFTF

SEQ ID NO: 75685 - protein, 10 aa, Homo sapiens
  misc_feature: Table A; Target 75685; HLA-B*57:01; SEPT14; ENSG00000154997; TAA
RSLFEYHDSR

SEQ ID NO: 75686 - protein, 9 aa, Homo sapiens
  misc_feature: Table A; Target 75686; HLA-A*03:01; SEPT14; ENSG00000154997; TAA
RTMAMPTQI

SEQ ID NO: 75687 - protein, 9 aa, Homo sapiens
  misc_feature: Table A; Target 75687; HLA-A*03:02; SEPT14; ENSG00000154997; TAA
RTMAMPTQI

SEQ ID NO: 75688 - protein, 9 aa, Homo sapiens
  misc_feature: Table A; Target 75688; HLA-A*23:01; SEPT14; ENSG00000154997; TAA
RTMAMPTQI

SEQ ID NO: 75689 - protein, 9 aa, Homo sapiens
  misc_feature: Table A; Target 75689; HLA-A*24:02; SEPT14; ENSG00000154997; TAA
RTMAMPTQI

SEQ ID NO: 75690 - protein, 9 aa, Homo sapiens
  misc_feature: Table A; Target 75690; HLA-A*32:01; SEPT14; ENSG00000154997; TAA
RTMAMPTQI

SEQ ID NO: 75691 - protein, 9 aa, Homo sapiens
  misc_feature: Table A; Target 75691; HLA-B*13:02; SEPT14; ENSG00000154997; TAA
RTMAMPTQI

SEQ ID NO: 75692 - protein, 9 aa, Homo sapiens
  misc_feature: Table A; Target 75692; HLA-B*58:01; SEPT14; ENSG00000154997; TAA
RTMAMPTQI

SEQ ID NO: 75693 - protein, 9 aa, Homo sapiens
  misc_feature: Table A; Target 75693; HLA-A*25:01; SEPT14; ENSG00000154997; TAA
RVKEKEATF

SEQ ID NO: 75694 - protein, 9 aa, Homo sapiens
  misc_feature: Table A; Target 75694; HLA-A*30:02; SEPT14; ENSG00000154997; TAA
RVKEKEATF

SEQ ID NO: 75695 - protein, 9 aa, Homo sapiens
  misc_feature: Table A; Target 75695; HLA-A*32:01; SEPT14; ENSG00000154997; TAA
RVKEKEATF

SEQ ID NO: 75696 - protein, 9 aa, Homo sapiens
  misc_feature: Table A; Target 75696; HLA-B*07:02; SEPT14; ENSG00000154997; TAA
RVKEKEATF

SEQ ID NO: 75697 - protein, 9 aa, Homo sapiens
  misc_feature: Table A; Target 75697; HLA-B*08:01; SEPT14; ENSG00000154997; TAA
RVKEKEATF

SEQ ID NO: 75698 - protein, 9 aa, Homo sapiens
  misc_feature: Table A; Target 75698; HLA-B*15:01; SEPT14; ENSG00000154997; TAA
RVKEKEATF

SEQ ID NO: 75699 - protein, 9 aa, Homo sapiens
  misc_feature: Table A; Target 75699; HLA-B*46:01; SEPT14; ENSG00000154997; TAA
RVKEKEATF

SEQ ID NO: 75700 - protein, 9 aa, Homo sapiens
  misc_feature: Table A; Target 75700; HLA-B*57:01; SEPT14; ENSG00000154997; TAA
RVKEKEATF

SEQ ID NO: 75701 - protein, 9 aa, Homo sapiens
  misc_feature: Table A; Target 75701; HLA-B*58:01; SEPT14; ENSG00000154997; TAA
RVKEKEATF

SEQ ID NO: 75702 - protein, 10 aa, Homo sapiens
  misc_feature: Table A; Target 75702; HLA-A*03:01; SEPT14; ENSG00000154997; TAA
RVKEKEATFK

SEQ ID NO: 75703 - protein, 10 aa, Homo sapiens
  misc_feature: Table A; Target 75703; HLA-A*03:02; SEPT14; ENSG00000154997; TAA
RVKEKEATFK

SEQ ID NO: 75704 - protein, 10 aa, Homo sapiens
  misc_feature: Table A; Target 75704; HLA-A*24:02; SEPT14; ENSG00000154997; TAA
RYQKLQKMGF

SEQ ID NO: 75705 - protein, 8 aa, Homo sapiens
  misc_feature: Table A; Target 75705; HLA-B*18:01; SEPT14; ENSG00000154997; TAA
SELISNGI

SEQ ID NO: 75706 - protein, 8 aa, Homo sapiens
  misc_feature: Table A; Target 75706; HLA-B*37:01; SEPT14; ENSG00000154997; TAA
SELISNGI

SEQ ID NO: 75707 - protein, 8 aa, Homo sapiens
  misc_feature: Table A; Target 75707; HLA-B*49:01; SEPT14; ENSG00000154997; TAA
SELISNGI

SEQ ID NO: 75708 - protein, 10 aa, Homo sapiens
  misc_feature: Table A; Target 75708; HLA-A*30:01; SEPT14; ENSG00000154997; TAA
SELISNGIQI

SEQ ID NO: 75709 - protein, 10 aa, Homo sapiens
  misc_feature: Table A; Target 75709; HLA-B*40:01; SEPT14; ENSG00000154997; TAA
SELISNGIQI

SEQ ID NO: 75710 - protein, 10 aa, Homo sapiens
  misc_feature: Table A; Target 75710; HLA-B*40:02; SEPT14; ENSG00000154997; TAA
SELISNGIQI

SEQ ID NO: 75711 - protein, 10 aa, Homo sapiens
  misc_feature: Table A; Target 75711; HLA-B*44:02; SEPT14; ENSG00000154997; TAA
SELISNGIQI

SEQ ID NO: 75712 - protein, 10 aa, Homo sapiens
  misc_feature: Table A; Target 75712; HLA-B*44:03; SEPT14; ENSG00000154997; TAA
SELISNGIQI

SEQ ID NO: 75713 - protein, 10 aa, Homo sapiens
  misc_feature: Table A; Target 75713; HLA-B*49:01; SEPT14; ENSG00000154997; TAA
SELISNGIQI

SEQ ID NO: 75714 - protein, 11 aa, Homo sapiens
  misc_feature: Table A; Target 75714; HLA-B*15:03; SEPT14; ENSG00000154997; TAA
SELISNGIQIY

SEQ ID NO: 75715 - protein, 11 aa, Homo sapiens
  misc_feature: Table A; Target 75715; HLA-B*18:01; SEPT14; ENSG00000154997; TAA
SELISNGIQIY

SEQ ID NO: 75716 - protein, 11 aa, Homo sapiens
  misc_feature: Table A; Target 75716; HLA-B*27:02; SEPT14; ENSG00000154997; TAA
SELISNGIQIY

SEQ ID NO: 75717 - protein, 11 aa, Homo sapiens
  misc_feature: Table A; Target 75717; HLA-B*44:02; SEPT14; ENSG00000154997; TAA
SELISNGIQIY

SEQ ID NO: 75718 - protein, 11 aa, Homo sapiens
  misc_feature: Table A; Target 75718; HLA-B*44:03; SEPT14; ENSG00000154997; TAA
SELISNGIQIY

SEQ ID NO: 75719 - protein, 11 aa, Homo sapiens
  misc_feature: Table A; Target 75719; HLA-C*16:04; SEPT14; ENSG00000154997; TAA
SELISNGIQIY

SEQ ID NO: 75720 - protein, 9 aa, Homo sapiens
  misc_feature: Table A; Target 75720; HLA-A*03:02; SEPT14; ENSG00000154997; TAA
SFQEIFEAK

SEQ ID NO: 75721 - protein, 9 aa, Homo sapiens
  misc_feature: Table A; Target 75721; HLA-A*11:01; SEPT14; ENSG00000154997; TAA
SFQEIFEAK

SEQ ID NO: 75722 - protein, 9 aa, Homo sapiens
  misc_feature: Table A; Target 75722; HLA-A*31:01; SEPT14; ENSG00000154997; TAA
SFQEIFEAK

SEQ ID NO: 75723 - protein, 9 aa, Homo sapiens
  misc_feature: Table A; Target 75723; HLA-A*33:01; SEPT14; ENSG00000154997; TAA
SFQEIFEAK

SEQ ID NO: 75724 - protein, 9 aa, Homo sapiens
  misc_feature: Table A; Target 75724; HLA-A*33:03; SEPT14; ENSG00000154997; TAA
SFQEIFEAK

SEQ ID NO: 75725 - protein, 9 aa, Homo sapiens
  misc_feature: Table A; Target 75725; HLA-B*27:02; SEPT14; ENSG00000154997; TAA
SFQEIFEAK

SEQ ID NO: 75726 - protein, 9 aa, Homo sapiens
  misc_feature: Table A; Target 75726; HLA-C*01:02; SEPT14; ENSG00000154997; TAA
SFQEIFEAK

SEQ ID NO: 75727 - protein, 9 aa, Homo sapiens
  misc_feature: Table A; Target 75727; HLA-C*07:06; SEPT14; ENSG00000154997; TAA
SFQEIFEAK

SEQ ID NO: 75728 - protein, 9 aa, Homo sapiens
  misc_feature: Table A; Target 75728; HLA-C*14:02; SEPT14; ENSG00000154997; TAA
SFQEIFEAK

SEQ ID NO: 75729 - protein, 9 aa, Homo sapiens
  misc_feature: Table A; Target 75729; HLA-B*27:05; SEPT14; ENSG00000154997; TAA
SHFYSNVGL

SEQ ID NO: 75730 - protein, 9 aa, Homo sapiens
  misc_feature: Table A; Target 75730; HLA-B*38:01; SEPT14; ENSG00000154997; TAA
SHFYSNVGL

SEQ ID NO: 75731 - protein, 9 aa, Homo sapiens
  misc_feature: Table A; Target 75731; HLA-B*39:01; SEPT14; ENSG00000154997; TAA
SHFYSNVGL

SEQ ID NO: 75732 - protein, 9 aa, Homo sapiens
  misc_feature: Table A; Target 75732; HLA-C*07:04; SEPT14; ENSG00000154997; TAA
SHFYSNVGL

SEQ ID NO: 75733 - protein, 11 aa, Homo sapiens
  misc_feature: Table A; Target 75733; HLA-B*38:01; SEPT14; ENSG00000154997; TAA
SHFYSNVGLQI

SEQ ID NO: 75734 - protein, 8 aa, Homo sapiens
  misc_feature: Table A; Target 75734; HLA-B*08:01; SEPT14; ENSG00000154997; TAA
SIRQGFTF

SEQ ID NO: 75735 - protein, 8 aa, Homo sapiens
  misc_feature: Table A; Target 75735; HLA-B*37:01; SEPT14; ENSG00000154997; TAA
SIRQGFTF

SEQ ID NO: 75736 - protein, 8 aa, Homo sapiens
  misc_feature: Table A; Target 75736; HLA-B*15:03; SEPT14; ENSG00000154997; TAA
SKNDLQTF

SEQ ID NO: 75737 - protein, 9 aa, Homo sapiens
  misc_feature: Table A; Target 75737; HLA-A*68:02; SEPT14; ENSG00000154997; TAA
SKVNIIPLI

SEQ ID NO: 75738 - protein, 9 aa, Homo sapiens
  misc_feature: Table A; Target 75738; HLA-B*13:02; SEPT14; ENSG00000154997; TAA
SKVNIIPLI

SEQ ID NO: 75739 - protein, 10 aa, Homo sapiens
  misc_feature: Table A; Target 75739; HLA-A*02:07; SEPT14; ENSG00000154997; TAA
SLDLLTMKNL

SEQ ID NO: 75740 - protein, 9 aa, Homo sapiens
  misc_feature: Table A; Target 75740; HLA-A*02:04; SEPT14; ENSG00000154997; TAA
SLFEYHDSR

SEQ ID NO: 75741 - protein, 9 aa, Homo sapiens
  misc_feature: Table A; Target 75741; HLA-A*29:02; SEPT14; ENSG00000154997; TAA
SLFEYHDSR

SEQ ID NO: 75742 - protein, 9 aa, Homo sapiens
  misc_feature: Table A; Target 75742; HLA-A*31:01; SEPT14; ENSG00000154997; TAA
SLFEYHDSR

SEQ ID NO: 75743 - protein, 9 aa, Homo sapiens
  misc_feature: Table A; Target 75743; HLA-B*27:05; SEPT14; ENSG00000154997; TAA
SLFEYHDSR

SEQ ID NO: 75744 - protein, 10 aa, Homo sapiens
  misc_feature: Table A; Target 75744; HLA-A*02:01; SEPT14; ENSG00000154997; TAA
SLFEYHDSRV

SEQ ID NO: 75745 - protein, 10 aa, Homo sapiens
  misc_feature: Table A; Target 75745; HLA-A*02:03; SEPT14; ENSG00000154997; TAA
SLFEYHDSRV

SEQ ID NO: 75746 - protein, 10 aa, Homo sapiens
  misc_feature: Table A; Target 75746; HLA-A*02:04; SEPT14; ENSG00000154997; TAA
SLFEYHDSRV

SEQ ID NO: 75747 - protein, 10 aa, Homo sapiens
  misc_feature: Table A; Target 75747; HLA-A*02:07; SEPT14; ENSG00000154997; TAA
SLFEYHDSRV

SEQ ID NO: 75748 - protein, 10 aa, Homo sapiens
  misc_feature: Table A; Target 75748; HLA-A*68:02; SEPT14; ENSG00000154997; TAA
SLFEYHDSRV

SEQ ID NO: 75749 - protein, 10 aa, Homo sapiens
  misc_feature: Table A; Target 75749; HLA-A*02:01; SEPT14; ENSG00000154997; TAA
SLKSLDLLTM

SEQ ID NO: 75750 - protein, 10 aa, Homo sapiens
  misc_feature: Table A; Target 75750; HLA-A*02:03; SEPT14; ENSG00000154997; TAA
SLKSLDLLTM

SEQ ID NO: 75751 - protein, 10 aa, Homo sapiens
  misc_feature: Table A; Target 75751; HLA-A*02:04; SEPT14; ENSG00000154997; TAA
SLKSLDLLTM

SEQ ID NO: 75752 - protein, 11 aa, Homo sapiens
  misc_feature: Table A; Target 75752; HLA-A*03:01; SEPT14; ENSG00000154997; TAA
SLKSLDLLTMK

SEQ ID NO: 75753 - protein, 11 aa, Homo sapiens
  misc_feature: Table A; Target 75753; HLA-A*31:01; SEPT14; ENSG00000154997; TAA
SLKSLDLLTMK

SEQ ID NO: 75754 - protein, 10 aa, Homo sapiens
  misc_feature: Table A; Target 75754; HLA-A*25:01; SEPT14; ENSG00000154997; TAA
SNVGLQIQTY

SEQ ID NO: 75755 - protein, 10 aa, Homo sapiens
  misc_feature: Table A; Target 75755; HLA-A*26:01; SEPT14; ENSG00000154997; TAA
SNVGLQIQTY

SEQ ID NO: 75756 - protein, 10 aa, Homo sapiens
  misc_feature: Table A; Target 75756; HLA-A*29:02; SEPT14; ENSG00000154997; TAA
SNVGLQIQTY

SEQ ID NO: 75757 - protein, 10 aa, Homo sapiens
  misc_feature: Table A; Target 75757; HLA-A*30:02; SEPT14; ENSG00000154997; TAA
SNVGLQIQTY

SEQ ID NO: 75758 - protein, 10 aa, Homo sapiens
  misc_feature: Table A; Target 75758; HLA-B*15:01; SEPT14; ENSG00000154997; TAA
SNVGLQIQTY

SEQ ID NO: 75759 - protein, 10 aa, Homo sapiens
  misc_feature: Table A; Target 75759; HLA-B*15:03; SEPT14; ENSG00000154997; TAA
SNVGLQIQTY

SEQ ID NO: 75760 - protein, 10 aa, Homo sapiens
  misc_feature: Table A; Target 75760; HLA-B*27:02; SEPT14; ENSG00000154997; TAA
SNVGLQIQTY

SEQ ID NO: 75761 - protein, 10 aa, Homo sapiens
  misc_feature: Table A; Target 75761; HLA-B*35:01; SEPT14; ENSG00000154997; TAA
SNVGLQIQTY

SEQ ID NO: 75762 - protein, 10 aa, Homo sapiens
  misc_feature: Table A; Target 75762; HLA-B*44:02; SEPT14; ENSG00000154997; TAA
SNVGLQIQTY

SEQ ID NO: 75763 - protein, 10 aa, Homo sapiens
  misc_feature: Table A; Target 75763; HLA-B*44:03; SEPT14; ENSG00000154997; TAA
SNVGLQIQTY

SEQ ID NO: 75764 - protein, 10 aa, Homo sapiens
  misc_feature: Table A; Target 75764; HLA-C*02:02; SEPT14; ENSG00000154997; TAA
SNVGLQIQTY

SEQ ID NO: 75765 - protein, 10 aa, Homo sapiens
  misc_feature: Table A; Target 75765; HLA-C*07:06; SEPT14; ENSG00000154997; TAA
SNVGLQIQTY

SEQ ID NO: 75766 - protein, 10 aa, Homo sapiens
  misc_feature: Table A; Target 75766; HLA-C*12:03; SEPT14; ENSG00000154997; TAA
SNVGLQIQTY

SEQ ID NO: 75767 - protein, 10 aa, Homo sapiens
  misc_feature: Table A; Target 75767; HLA-C*16:04; SEPT14; ENSG00000154997; TAA
SNVGLQIQTY

SEQ ID NO: 75768 - protein, 9 aa, Homo sapiens
  misc_feature: Table A; Target 75768; HLA-B*13:02; SEPT14; ENSG00000154997; TAA
SNVQLKLTV

SEQ ID NO: 75769 - protein, 10 aa, Homo sapiens
  misc_feature: Table A; Target 75769; HLA-B*07:02; SEPT14; ENSG00000154997; TAA
SPTGHSLKSL

SEQ ID NO: 75770 - protein, 10 aa, Homo sapiens
  misc_feature: Table A; Target 75770; HLA-C*07:02; SEPT14; ENSG00000154997; TAA
SPTGHSLKSL

SEQ ID NO: 75771 - protein, 8 aa, Homo sapiens
  misc_feature: Table A; Target 75771; HLA-C*07:01; SEPT14; ENSG00000154997; TAA
SRVHVCLY

SEQ ID NO: 75772 - protein, 9 aa, Homo sapiens
  misc_feature: Table A; Target 75772; HLA-B*46:01; SEPT14; ENSG00000154997; TAA
SSVSGLLPF

SEQ ID NO: 75773 - protein, 9 aa, Homo sapiens
  misc_feature: Table A; Target 75773; HLA-B*57:01; SEPT14; ENSG00000154997; TAA
SSVSGLLPF

SEQ ID NO: 75774 - protein, 9 aa, Homo sapiens
  misc_feature: Table A; Target 75774; HLA-A*01:01; SEPT14; ENSG00000154997; TAA
STDEVKVGK

SEQ ID NO: 75775 - protein, 9 aa, Homo sapiens
  misc_feature: Table A; Target 75775; HLA-A*02:07; SEPT14; ENSG00000154997; TAA
STDEVKVGK

SEQ ID NO: 75776 - protein, 9 aa, Homo sapiens
  misc_feature: Table A; Target 75776; HLA-A*03:01; SEPT14; ENSG00000154997; TAA
STDEVKVGK

SEQ ID NO: 75777 - protein, 9 aa, Homo sapiens
  misc_feature: Table A; Target 75777; HLA-A*03:02; SEPT14; ENSG00000154997; TAA
STDEVKVGK

SEQ ID NO: 75778 - protein, 9 aa, Homo sapiens
  misc_feature: Table A; Target 75778; HLA-A*11:01; SEPT14; ENSG00000154997; TAA
STDEVKVGK

SEQ ID NO: 75779 - protein, 9 aa, Homo sapiens
  misc_feature: Table A; Target 75779; HLA-A*31:01; SEPT14; ENSG00000154997; TAA
STDEVKVGK

SEQ ID NO: 75780 - protein, 9 aa, Homo sapiens
  misc_feature: Table A; Target 75780; HLA-A*33:01; SEPT14; ENSG00000154997; TAA
STDEVKVGK

SEQ ID NO: 75781 - protein, 9 aa, Homo sapiens
  misc_feature: Table A; Target 75781; HLA-A*33:03; SEPT14; ENSG00000154997; TAA
STDEVKVGK

SEQ ID NO: 75782 - protein, 9 aa, Homo sapiens
  misc_feature: Table A; Target 75782; HLA-A*68:01; SEPT14; ENSG00000154997; TAA
STDEVKVGK

SEQ ID NO: 75783 - protein, 9 aa, Homo sapiens
  misc_feature: Table A; Target 75783; HLA-C*05:01; SEPT14; ENSG00000154997; TAA
STDEVKVGK

SEQ ID NO: 75784 - protein, 9 aa, Homo sapiens
  misc_feature: Table A; Target 75784; HLA-C*07:06; SEPT14; ENSG00000154997; TAA
STDEVKVGK

SEQ ID NO: 75785 - protein, 10 aa, Homo sapiens
  misc_feature: Table A; Target 75785; HLA-A*33:03; SEPT14; ENSG00000154997; TAA
STDEVKVGKR

SEQ ID NO: 75786 - protein, 10 aa, Homo sapiens
  misc_feature: Table A; Target 75786; HLA-A*68:01; SEPT14; ENSG00000154997; TAA
STDEVKVGKR

SEQ ID NO: 75787 - protein, 10 aa, Homo sapiens
  misc_feature: Table A; Target 75787; HLA-C*07:06; SEPT14; ENSG00000154997; TAA
STDEVKVGKR

SEQ ID NO: 75788 - protein, 10 aa, Homo sapiens
  misc_feature: Table A; Target 75788; HLA-A*02:01; SEPT14; ENSG00000154997; TAA
SVSGLLPFAV

SEQ ID NO: 75789 - protein, 10 aa, Homo sapiens
  misc_feature: Table A; Target 75789; HLA-A*02:04; SEPT14; ENSG00000154997; TAA
SVSGLLPFAV

SEQ ID NO: 75790 - protein, 10 aa, Homo sapiens
  misc_feature: Table A; Target 75790; HLA-A*11:01; SEPT14; ENSG00000154997; TAA
SVSGLLPFAV

SEQ ID NO: 75791 - protein, 10 aa, Homo sapiens
  misc_feature: Table A; Target 75791; HLA-A*68:02; SEPT14; ENSG00000154997; TAA
SVSGLLPFAV

SEQ ID NO: 75792 - protein, 10 aa, Homo sapiens
  misc_feature: Table A; Target 75792; HLA-B*13:02; SEPT14; ENSG00000154997; TAA
SVSGLLPFAV

SEQ ID NO: 75793 - protein, 11 aa, Homo sapiens
  misc_feature: Table A; Target 75793; HLA-A*68:02; SEPT14; ENSG00000154997; TAA
SVSGLLPFAVV

SEQ ID NO: 75794 - protein, 8 aa, Homo sapiens
  misc_feature: Table A; Target 75794; HLA-A*30:02; SEPT14; ENSG00000154997; TAA
SYQPIVDY

SEQ ID NO: 75795 - protein, 8 aa, Homo sapiens
  misc_feature: Table A; Target 75795; HLA-C*04:01; SEPT14; ENSG00000154997; TAA
SYQPIVDY

SEQ ID NO: 75796 - protein, 8 aa, Homo sapiens
  misc_feature: Table A; Target 75796; HLA-C*14:02; SEPT14; ENSG00000154997; TAA
SYQPIVDY

SEQ ID NO: 75797 - protein, 9 aa, Homo sapiens
  misc_feature: Table A; Target 75797; HLA-A*23:01; SEPT14; ENSG00000154997; TAA
SYQPIVDYI

SEQ ID NO: 75798 - protein, 9 aa, Homo sapiens
  misc_feature: Table A; Target 75798; HLA-A*24:02; SEPT14; ENSG00000154997; TAA
SYQPIVDYI

SEQ ID NO: 75799 - protein, 9 aa, Homo sapiens
  misc_feature: Table A; Target 75799; HLA-A*31:01; SEPT14; ENSG00000154997; TAA
SYQPIVDYI

SEQ ID NO: 75800 - protein, 9 aa, Homo sapiens
  misc_feature: Table A; Target 75800; HLA-A*02:03; SEPT14; ENSG00000154997; TAA
TAAQANSSV

SEQ ID NO: 75801 - protein, 9 aa, Homo sapiens
  misc_feature: Table A; Target 75801; HLA-B*07:02; SEPT14; ENSG00000154997; TAA
TAAQANSSV

SEQ ID NO: 75802 - protein, 9 aa, Homo sapiens
  misc_feature: Table A; Target 75802; HLA-B*13:02; SEPT14; ENSG00000154997; TAA
TAAQANSSV

SEQ ID NO: 75803 - protein, 9 aa, Homo sapiens
  misc_feature: Table A; Target 75803; HLA-B*35:01; SEPT14; ENSG00000154997; TAA
TAAQANSSV

SEQ ID NO: 75804 - protein, 9 aa, Homo sapiens
  misc_feature: Table A; Target 75804; HLA-B*35:03; SEPT14; ENSG00000154997; TAA
TAAQANSSV

SEQ ID NO: 75805 - protein, 9 aa, Homo sapiens
  misc_feature: Table A; Target 75805; HLA-B*39:01; SEPT14; ENSG00000154997; TAA
TAAQANSSV

SEQ ID NO: 75806 - protein, 9 aa, Homo sapiens
  misc_feature: Table A; Target 75806; HLA-B*46:01; SEPT14; ENSG00000154997; TAA
TAAQANSSV

SEQ ID NO: 75807 - protein, 9 aa, Homo sapiens
  misc_feature: Table A; Target 75807; HLA-B*51:01; SEPT14; ENSG00000154997; TAA
TAAQANSSV

SEQ ID NO: 75808 - protein, 9 aa, Homo sapiens
  misc_feature: Table A; Target 75808; HLA-B*54:01; SEPT14; ENSG00000154997; TAA
TAAQANSSV

SEQ ID NO: 75809 - protein, 9 aa, Homo sapiens
  misc_feature: Table A; Target 75809; HLA-C*01:02; SEPT14; ENSG00000154997; TAA
TAAQANSSV

SEQ ID NO: 75810 - protein, 9 aa, Homo sapiens
  misc_feature: Table A; Target 75810; HLA-C*02:02; SEPT14; ENSG00000154997; TAA
TAAQANSSV

SEQ ID NO: 75811 - protein, 9 aa, Homo sapiens
  misc_feature: Table A; Target 75811; HLA-C*03:03; SEPT14; ENSG00000154997; TAA
TAAQANSSV

SEQ ID NO: 75812 - protein, 9 aa, Homo sapiens
  misc_feature: Table A; Target 75812; HLA-C*03:04; SEPT14; ENSG00000154997; TAA
TAAQANSSV

SEQ ID NO: 75813 - protein, 9 aa, Homo sapiens
  misc_feature: Table A; Target 75813; HLA-C*05:01; SEPT14; ENSG00000154997; TAA
TAAQANSSV

SEQ ID NO: 75814 - protein, 9 aa, Homo sapiens
  misc_feature: Table A; Target 75814; HLA-C*07:06; SEPT14; ENSG00000154997; TAA
TAAQANSSV

SEQ ID NO: 75815 - protein, 9 aa, Homo sapiens
  misc_feature: Table A; Target 75815; HLA-C*12:03; SEPT14; ENSG00000154997; TAA
TAAQANSSV

SEQ ID NO: 75816 - protein, 9 aa, Homo sapiens
  misc_feature: Table A; Target 75816; HLA-C*14:02; SEPT14; ENSG00000154997; TAA
TAAQANSSV

SEQ ID NO: 75817 - protein, 9 aa, Homo sapiens
  misc_feature: Table A; Target 75817; HLA-C*16:01; SEPT14; ENSG00000154997; TAA
TAAQANSSV

SEQ ID NO: 75818 - protein, 9 aa, Homo sapiens
  misc_feature: Table A; Target 75818; HLA-C*16:02; SEPT14; ENSG00000154997; TAA
TAAQANSSV

SEQ ID NO: 75819 - protein, 8 aa, Homo sapiens
  misc_feature: Table A; Target 75819; HLA-A*03:02; SEPT14; ENSG00000154997; TAA
TDEVKVGK

SEQ ID NO: 75820 - protein, 8 aa, Homo sapiens
  misc_feature: Table A; Target 75820; HLA-A*11:01; SEPT14; ENSG00000154997; TAA
TDEVKVGK

SEQ ID NO: 75821 - protein, 8 aa, Homo sapiens
  misc_feature: Table A; Target 75821; HLA-B*27:02; SEPT14; ENSG00000154997; TAA
TDEVKVGK

SEQ ID NO: 75822 - protein, 8 aa, Homo sapiens
  misc_feature: Table A; Target 75822; HLA-B*37:01; SEPT14; ENSG00000154997; TAA
TDEVKVGK

SEQ ID NO: 75823 - protein, 8 aa, Homo sapiens
  misc_feature: Table A; Target 75823; HLA-C*04:01; SEPT14; ENSG00000154997; TAA
TDEVKVGK

SEQ ID NO: 75824 - protein, 8 aa, Homo sapiens
  misc_feature: Table A; Target 75824; HLA-C*07:01; SEPT14; ENSG00000154997; TAA
TDEVKVGK

SEQ ID NO: 75825 - protein, 10 aa, Homo sapiens
  misc_feature: Table A; Target 75825; HLA-C*04:01; SEPT14; ENSG00000154997; TAA
TDVGPNNQPV

SEQ ID NO: 75826 - protein, 10 aa, Homo sapiens
  misc_feature: Table A; Target 75826; HLA-C*06:02; SEPT14; ENSG00000154997; TAA
TDVGPNNQPV

SEQ ID NO: 75827 - protein, 11 aa, Homo sapiens
  misc_feature: Table A; Target 75827; HLA-B*39:01; SEPT14; ENSG00000154997; TAA
TDVGPNNQPVS

SEQ ID NO: 75828 - protein, 9 aa, Homo sapiens
  misc_feature: Table A; Target 75828; HLA-C*14:02; SEPT14; ENSG00000154997; TAA
TFKEAEKEL

SEQ ID NO: 75829 - protein, 8 aa, Homo sapiens
  misc_feature: Table A; Target 75829; HLA-B*08:01; SEPT14; ENSG00000154997; TAA
TGIGKSTL

SEQ ID NO: 75830 - protein, 9 aa, Homo sapiens
  misc_feature: Table A; Target 75830; HLA-B*13:02; SEPT14; ENSG00000154997; TAA
TGIGKSTLI

SEQ ID NO: 75831 - protein, 9 aa, Homo sapiens
  misc_feature: Table A; Target 75831; HLA-B*51:01; SEPT14; ENSG00000154997; TAA
TGIGKSTLI

SEQ ID NO: 75832 - protein, 9 aa, Homo sapiens
  misc_feature: Table A; Target 75832; HLA-C*06:02; SEPT14; ENSG00000154997; TAA
TGIGKSTLI

SEQ ID NO: 75833 - protein, 9 aa, Homo sapiens
  misc_feature: Table A; Target 75833; HLA-B*38:01; SEPT14; ENSG00000154997; TAA
THTQHYECY

SEQ ID NO: 75834 - protein, 10 aa, Homo sapiens
  misc_feature: Table A; Target 75834; HLA-A*25:01; SEPT14; ENSG00000154997; TAA
TISKNDLQTF

SEQ ID NO: 75835 - protein, 10 aa, Homo sapiens
  misc_feature: Table A; Target 75835; HLA-A*32:01; SEPT14; ENSG00000154997; TAA
TISKNDLQTF

SEQ ID NO: 75836 - protein, 10 aa, Homo sapiens
  misc_feature: Table A; Target 75836; HLA-B*15:01; SEPT14; ENSG00000154997; TAA
TISKNDLQTF

SEQ ID NO: 75837 - protein, 10 aa, Homo sapiens
  misc_feature: Table A; Target 75837; HLA-B*38:01; SEPT14; ENSG00000154997; TAA
TISKNDLQTF

SEQ ID NO: 75838 - protein, 10 aa, Homo sapiens
  misc_feature: Table A; Target 75838; HLA-B*39:01; SEPT14; ENSG00000154997; TAA
TISKNDLQTF

SEQ ID NO: 75839 - protein, 10 aa, Homo sapiens
  misc_feature: Table A; Target 75839; HLA-B*57:01; SEPT14; ENSG00000154997; TAA
TISKNDLQTF

SEQ ID NO: 75840 - protein, 10 aa, Homo sapiens
  misc_feature: Table A; Target 75840; HLA-B*58:01; SEPT14; ENSG00000154997; TAA
TISKNDLQTF

SEQ ID NO: 75841 - protein, 10 aa, Homo sapiens
  misc_feature: Table A; Target 75841; HLA-C*07:04; SEPT14; ENSG00000154997; TAA
TISKNDLQTF

SEQ ID NO: 75842 - protein, 11 aa, Homo sapiens
  misc_feature: Table A; Target 75842; HLA-A*03:01; SEPT14; ENSG00000154997; TAA
TISKNDLQTFK

SEQ ID NO: 75843 - protein, 11 aa, Homo sapiens
  misc_feature: Table A; Target 75843; HLA-A*03:02; SEPT14; ENSG00000154997; TAA
TISKNDLQTFK

SEQ ID NO: 75844 - protein, 11 aa, Homo sapiens
  misc_feature: Table A; Target 75844; HLA-A*11:01; SEPT14; ENSG00000154997; TAA
TISKNDLQTFK

SEQ ID NO: 75845 - protein, 8 aa, Homo sapiens
  misc_feature: Table A; Target 75845; HLA-A*03:01; SEPT14; ENSG00000154997; TAA
TLFNTNLK

SEQ ID NO: 75846 - protein, 8 aa, Homo sapiens
  misc_feature: Table A; Target 75846; HLA-A*03:02; SEPT14; ENSG00000154997; TAA
TLFNTNLK

SEQ ID NO: 75847 - protein, 11 aa, Homo sapiens
  misc_feature: Table A; Target 75847; HLA-A*03:02; SEPT14; ENSG00000154997; TAA
TLFNTNLKDNK

SEQ ID NO: 75848 - protein, 9 aa, Homo sapiens
  misc_feature: Table A; Target 75848; HLA-A*02:01; SEPT14; ENSG00000154997; TAA
TLIDTLFNT

SEQ ID NO: 75849 - protein, 9 aa, Homo sapiens
  misc_feature: Table A; Target 75849; HLA-A*02:03; SEPT14; ENSG00000154997; TAA
TLIDTLFNT

SEQ ID NO: 75850 - protein, 9 aa, Homo sapiens
  misc_feature: Table A; Target 75850; HLA-A*02:04; SEPT14; ENSG00000154997; TAA
TLIDTLFNT

SEQ ID NO: 75851 - protein, 11 aa, Homo sapiens
  misc_feature: Table A; Target 75851; HLA-A*02:01; SEPT14; ENSG00000154997; TAA
TLIDTLFNTNL

SEQ ID NO: 75852 - protein, 11 aa, Homo sapiens
  misc_feature: Table A; Target 75852; HLA-A*02:03; SEPT14; ENSG00000154997; TAA
TLIDTLFNTNL

SEQ ID NO: 75853 - protein, 11 aa, Homo sapiens
  misc_feature: Table A; Target 75853; HLA-A*02:04; SEPT14; ENSG00000154997; TAA
TLIDTLFNTNL

SEQ ID NO: 75854 - protein, 11 aa, Homo sapiens
  misc_feature: Table A; Target 75854; HLA-A*02:07; SEPT14; ENSG00000154997; TAA
TLIDTLFNTNL

SEQ ID NO: 75855 - protein, 11 aa, Homo sapiens
  misc_feature: Table A; Target 75855; HLA-A*23:01; SEPT14; ENSG00000154997; TAA
TLIDTLFNTNL

SEQ ID NO: 75856 - protein, 11 aa, Homo sapiens
  misc_feature: Table A; Target 75856; HLA-A*68:02; SEPT14; ENSG00000154997; TAA
TLIDTLFNTNL

SEQ ID NO: 75857 - protein, 9 aa, Homo sapiens
  misc_feature: Table A; Target 75857; HLA-A*02:03; SEPT14; ENSG00000154997; TAA
TMKNLDSKV

SEQ ID NO: 75858 - protein, 9 aa, Homo sapiens
  misc_feature: Table A; Target 75858; HLA-A*03:02; SEPT14; ENSG00000154997; TAA
TNMENLKEK

SEQ ID NO: 75859 - protein, 9 aa, Homo sapiens
  misc_feature: Table A; Target 75859; HLA-A*11:01; SEPT14; ENSG00000154997; TAA
TNMENLKEK

SEQ ID NO: 75860 - protein, 9 aa, Homo sapiens
  misc_feature: Table A; Target 75860; HLA-A*33:01; SEPT14; ENSG00000154997; TAA
TNMENLKEK

SEQ ID NO: 75861 - protein, 9 aa, Homo sapiens
  misc_feature: Table A; Target 75861; HLA-A*33:03; SEPT14; ENSG00000154997; TAA
TNMENLKEK

SEQ ID NO: 75862 - protein, 10 aa, Homo sapiens
  misc_feature: Table A; Target 75862; HLA-B*38:01; SEPT14; ENSG00000154997; TAA
TQIPADGDTQ

SEQ ID NO: 75863 - protein, 8 aa, Homo sapiens
  misc_feature: Table A; Target 75863; HLA-B*57:01; SEPT14; ENSG00000154997; TAA
TTIGHFGF

SEQ ID NO: 75864 - protein, 10 aa, Homo sapiens
  misc_feature: Table A; Target 75864; HLA-A*03:02; SEPT14; ENSG00000154997; TAA
TVGYGDQIDK

SEQ ID NO: 75865 - protein, 10 aa, Homo sapiens
  misc_feature: Table A; Target 75865; HLA-A*11:01; SEPT14; ENSG00000154997; TAA
TVGYGDQIDK

SEQ ID NO: 75866 - protein, 10 aa, Homo sapiens
  misc_feature: Table A; Target 75866; HLA-A*68:01; SEPT14; ENSG00000154997; TAA
TVGYGDQIDK

SEQ ID NO: 75867 - protein, 10 aa, Homo sapiens
  misc_feature: Table A; Target 75867; HLA-B*27:02; SEPT14; ENSG00000154997; TAA
TVGYGDQIDK

SEQ ID NO: 75868 - protein, 8 aa, Homo sapiens
  misc_feature: Table A; Target 75868; HLA-A*25:01; SEPT14; ENSG00000154997; TAA
TVVETVGY

SEQ ID NO: 75869 - protein, 8 aa, Homo sapiens
  misc_feature: Table A; Target 75869; HLA-A*26:01; SEPT14; ENSG00000154997; TAA
TVVETVGY

SEQ ID NO: 75870 - protein, 8 aa, Homo sapiens
  misc_feature: Table A; Target 75870; HLA-A*30:02; SEPT14; ENSG00000154997; TAA
TVVETVGY

SEQ ID NO: 75871 - protein, 8 aa, Homo sapiens
  misc_feature: Table A; Target 75871; HLA-A*32:01; SEPT14; ENSG00000154997; TAA
TVVETVGY

SEQ ID NO: 75872 - protein, 8 aa, Homo sapiens
  misc_feature: Table A; Target 75872; HLA-B*15:01; SEPT14; ENSG00000154997; TAA
TVVETVGY

SEQ ID NO: 75873 - protein, 8 aa, Homo sapiens
  misc_feature: Table A; Target 75873; HLA-B*15:03; SEPT14; ENSG00000154997; TAA
TVVETVGY

SEQ ID NO: 75874 - protein, 8 aa, Homo sapiens
  misc_feature: Table A; Target 75874; HLA-B*18:01; SEPT14; ENSG00000154997; TAA
TVVETVGY

SEQ ID NO: 75875 - protein, 8 aa, Homo sapiens
  misc_feature: Table A; Target 75875; HLA-B*35:01; SEPT14; ENSG00000154997; TAA
TVVETVGY

SEQ ID NO: 75876 - protein, 8 aa, Homo sapiens
  misc_feature: Table A; Target 75876; HLA-B*39:01; SEPT14; ENSG00000154997; TAA
TVVETVGY

SEQ ID NO: 75877 - protein, 8 aa, Homo sapiens
  misc_feature: Table A; Target 75877; HLA-B*44:03; SEPT14; ENSG00000154997; TAA
TVVETVGY

SEQ ID NO: 75878 - protein, 8 aa, Homo sapiens
  misc_feature: Table A; Target 75878; HLA-B*46:01; SEPT14; ENSG00000154997; TAA
TVVETVGY

SEQ ID NO: 75879 - protein, 8 aa, Homo sapiens
  misc_feature: Table A; Target 75879; HLA-B*58:01; SEPT14; ENSG00000154997; TAA
TVVETVGY

SEQ ID NO: 75880 - protein, 8 aa, Homo sapiens
  misc_feature: Table A; Target 75880; HLA-C*02:02; SEPT14; ENSG00000154997; TAA
TVVETVGY

SEQ ID NO: 75881 - protein, 8 aa, Homo sapiens
  misc_feature: Table A; Target 75881; HLA-C*07:04; SEPT14; ENSG00000154997; TAA
TVVETVGY

SEQ ID NO: 75882 - protein, 8 aa, Homo sapiens
  misc_feature: Table A; Target 75882; HLA-C*07:06; SEPT14; ENSG00000154997; TAA
TVVETVGY

SEQ ID NO: 75883 - protein, 8 aa, Homo sapiens
  misc_feature: Table A; Target 75883; HLA-C*14:02; SEPT14; ENSG00000154997; TAA
TVVETVGY

SEQ ID NO: 75884 - protein, 9 aa, Homo sapiens
  misc_feature: Table A; Target 75884; HLA-A*26:01; SEPT14; ENSG00000154997; TAA
TVVETVGYG

SEQ ID NO: 75885 - protein, 11 aa, Homo sapiens
  misc_feature: Table A; Target 75885; HLA-C*04:01; SEPT14; ENSG00000154997; TAA
TVVETVGYGDQ

SEQ ID NO: 75886 - protein, 9 aa, Homo sapiens
  misc_feature: Table A; Target 75886; HLA-C*04:01; SEPT14; ENSG00000154997; TAA
TYELQESNV

SEQ ID NO: 75887 - protein, 9 aa, Homo sapiens
  misc_feature: Table A; Target 75887; HLA-C*14:02; SEPT14; ENSG00000154997; TAA
TYELQESNV

SEQ ID NO: 75888 - protein, 11 aa, Homo sapiens
  misc_feature: Table A; Target 75888; HLA-C*04:01; SEPT14; ENSG00000154997; TAA
TYELQESNVQL

SEQ ID NO: 75889 - protein, 8 aa, Homo sapiens
  misc_feature: Table A; Target 75889; HLA-B*18:01; SEPT14; ENSG00000154997; TAA
VDYIDAQF

SEQ ID NO: 75890 - protein, 8 aa, Homo sapiens
  misc_feature: Table A; Target 75890; HLA-B*37:01; SEPT14; ENSG00000154997; TAA
VDYIDAQF

SEQ ID NO: 75891 - protein, 8 aa, Homo sapiens
  misc_feature: Table A; Target 75891; HLA-C*07:04; SEPT14; ENSG00000154997; TAA
VDYIDAQF

SEQ ID NO: 75892 - protein, 9 aa, Homo sapiens
  misc_feature: Table A; Target 75892; HLA-A*30:01; SEPT14; ENSG00000154997; TAA
VENENHCDF

SEQ ID NO: 75893 - protein, 9 aa, Homo sapiens
  misc_feature: Table A; Target 75893; HLA-B*18:01; SEPT14; ENSG00000154997; TAA
VENENHCDF

SEQ ID NO: 75894 - protein, 9 aa, Homo sapiens
  misc_feature: Table A; Target 75894; HLA-B*27:02; SEPT14; ENSG00000154997; TAA
VENENHCDF

SEQ ID NO: 75895 - protein, 9 aa, Homo sapiens
  misc_feature: Table A; Target 75895; HLA-B*37:01; SEPT14; ENSG00000154997; TAA
VENENHCDF

SEQ ID NO: 75896 - protein, 9 aa, Homo sapiens
  misc_feature: Table A; Target 75896; HLA-B*40:01; SEPT14; ENSG00000154997; TAA
VENENHCDF

SEQ ID NO: 75897 - protein, 9 aa, Homo sapiens
  misc_feature: Table A; Target 75897; HLA-B*40:02; SEPT14; ENSG00000154997; TAA
VENENHCDF

SEQ ID NO: 75898 - protein, 9 aa, Homo sapiens
  misc_feature: Table A; Target 75898; HLA-B*44:02; SEPT14; ENSG00000154997; TAA
VENENHCDF

SEQ ID NO: 75899 - protein, 9 aa, Homo sapiens
  misc_feature: Table A; Target 75899; HLA-B*44:03; SEPT14; ENSG00000154997; TAA
VENENHCDF

SEQ ID NO: 75900 - protein, 9 aa, Homo sapiens
  misc_feature: Table A; Target 75900; HLA-C*14:02; SEPT14; ENSG00000154997; TAA
VENENHCDF

SEQ ID NO: 75901 - protein, 9 aa, Homo sapiens
  misc_feature: Table A; Target 75901; HLA-C*16:04; SEPT14; ENSG00000154997; TAA
VENENHCDF

SEQ ID NO: 75902 - protein, 10 aa, Homo sapiens
  misc_feature: Table A; Target 75902; HLA-B*40:01; SEPT14; ENSG00000154997; TAA
VETVGYGDQI

SEQ ID NO: 75903 - protein, 10 aa, Homo sapiens
  misc_feature: Table A; Target 75903; HLA-B*49:01; SEPT14; ENSG00000154997; TAA
VETVGYGDQI

SEQ ID NO: 75904 - protein, 8 aa, Homo sapiens
  misc_feature: Table A; Target 75904; HLA-C*05:01; SEPT14; ENSG00000154997; TAA
VGETGIGK

SEQ ID NO: 75905 - protein, 11 aa, Homo sapiens
  misc_feature: Table A; Target 75905; HLA-C*01:02; SEPT14; ENSG00000154997; TAA
VGETGIGKSTL

SEQ ID NO: 75906 - protein, 8 aa, Homo sapiens
  misc_feature: Table A; Target 75906; HLA-A*30:02; SEPT14; ENSG00000154997; TAA
VGLQIQTY

SEQ ID NO: 75907 - protein, 8 aa, Homo sapiens
  misc_feature: Table A; Target 75907; HLA-B*15:01; SEPT14; ENSG00000154997; TAA
VGLQIQTY

SEQ ID NO: 75908 - protein, 8 aa, Homo sapiens
  misc_feature: Table A; Target 75908; HLA-B*15:03; SEPT14; ENSG00000154997; TAA
VGLQIQTY

SEQ ID NO: 75909 - protein, 8 aa, Homo sapiens
  misc_feature: Table A; Target 75909; HLA-B*18:01; SEPT14; ENSG00000154997; TAA
VGLQIQTY

SEQ ID NO: 75910 - protein, 8 aa, Homo sapiens
  misc_feature: Table A; Target 75910; HLA-B*39:01; SEPT14; ENSG00000154997; TAA
VGLQIQTY

SEQ ID NO: 75911 - protein, 8 aa, Homo sapiens
  misc_feature: Table A; Target 75911; HLA-B*46:01; SEPT14; ENSG00000154997; TAA
VGLQIQTY

SEQ ID NO: 75912 - protein, 8 aa, Homo sapiens
  misc_feature: Table A; Target 75912; HLA-C*04:01; SEPT14; ENSG00000154997; TAA
VGLQIQTY

SEQ ID NO: 75913 - protein, 8 aa, Homo sapiens
  misc_feature: Table A; Target 75913; HLA-C*07:01; SEPT14; ENSG00000154997; TAA
VGLQIQTY

SEQ ID NO: 75914 - protein, 8 aa, Homo sapiens
  misc_feature: Table A; Target 75914; HLA-C*07:04; SEPT14; ENSG00000154997; TAA
VGLQIQTY

SEQ ID NO: 75915 - protein, 8 aa, Homo sapiens
  misc_feature: Table A; Target 75915; HLA-C*12:03; SEPT14; ENSG00000154997; TAA
VGLQIQTY

SEQ ID NO: 75916 - protein, 8 aa, Homo sapiens
  misc_feature: Table A; Target 75916; HLA-C*14:02; SEPT14; ENSG00000154997; TAA
VGLQIQTY

SEQ ID NO: 75917 - protein, 8 aa, Homo sapiens
  misc_feature: Table A; Target 75917; HLA-C*01:02; SEPT14; ENSG00000154997; TAA
VGPNNQPV

SEQ ID NO: 75918 - protein, 10 aa, Homo sapiens
  misc_feature: Table A; Target 75918; HLA-A*23:01; SEPT14; ENSG00000154997; TAA
VGPNNQPVSF

SEQ ID NO: 75919 - protein, 10 aa, Homo sapiens
  misc_feature: Table A; Target 75919; HLA-A*24:02; SEPT14; ENSG00000154997; TAA
VGPNNQPVSF

SEQ ID NO: 75920 - protein, 10 aa, Homo sapiens
  misc_feature: Table A; Target 75920; HLA-B*46:01; SEPT14; ENSG00000154997; TAA
VGPNNQPVSF

SEQ ID NO: 75921 - protein, 10 aa, Homo sapiens
  misc_feature: Table A; Target 75921; HLA-C*01:02; SEPT14; ENSG00000154997; TAA
VGPNNQPVSF

SEQ ID NO: 75922 - protein, 10 aa, Homo sapiens
  misc_feature: Table A; Target 75922; HLA-C*07:02; SEPT14; ENSG00000154997; TAA
VGPNNQPVSF

SEQ ID NO: 75923 - protein, 10 aa, Homo sapiens
  misc_feature: Table A; Target 75923; HLA-C*14:02; SEPT14; ENSG00000154997; TAA
VGPNNQPVSF

SEQ ID NO: 75924 - protein, 11 aa, Homo sapiens
  misc_feature: Table A; Target 75924; HLA-A*03:02; SEPT14; ENSG00000154997; TAA
VGSTDEVKVGK

SEQ ID NO: 75925 - protein, 11 aa, Homo sapiens
  misc_feature: Table A; Target 75925; HLA-A*11:01; SEPT14; ENSG00000154997; TAA
VGSTDEVKVGK

SEQ ID NO: 75926 - protein, 11 aa, Homo sapiens
  misc_feature: Table A; Target 75926; HLA-B*27:02; SEPT14; ENSG00000154997; TAA
VGSTDEVKVGK

SEQ ID NO: 75927 - protein, 11 aa, Homo sapiens
  misc_feature: Table A; Target 75927; HLA-B*27:05; SEPT14; ENSG00000154997; TAA
VGSTDEVKVGK

SEQ ID NO: 75928 - protein, 11 aa, Homo sapiens
  misc_feature: Table A; Target 75928; HLA-C*07:06; SEPT14; ENSG00000154997; TAA
VGSTDEVKVGK

SEQ ID NO: 75929 - protein, 9 aa, Homo sapiens
  misc_feature: Table A; Target 75929; HLA-A*03:01; SEPT14; ENSG00000154997; TAA
VGYGDQIDK

SEQ ID NO: 75930 - protein, 9 aa, Homo sapiens
  misc_feature: Table A; Target 75930; HLA-A*03:02; SEPT14; ENSG00000154997; TAA
VGYGDQIDK

SEQ ID NO: 75931 - protein, 9 aa, Homo sapiens
  misc_feature: Table A; Target 75931; HLA-A*11:01; SEPT14; ENSG00000154997; TAA
VGYGDQIDK

SEQ ID NO: 75932 - protein, 9 aa, Homo sapiens
  misc_feature: Table A; Target 75932; HLA-B*27:02; SEPT14; ENSG00000154997; TAA
VGYGDQIDK

SEQ ID NO: 75933 - protein, 9 aa, Homo sapiens
  misc_feature: Table A; Target 75933; HLA-B*27:05; SEPT14; ENSG00000154997; TAA
VGYGDQIDK

SEQ ID NO: 75934 - protein, 9 aa, Homo sapiens
  misc_feature: Table A; Target 75934; HLA-A*03:01; SEPT14; ENSG00000154997; TAA
VNIIPLIAK

SEQ ID NO: 75935 - protein, 9 aa, Homo sapiens
  misc_feature: Table A; Target 75935; HLA-A*03:02; SEPT14; ENSG00000154997; TAA
VNIIPLIAK

SEQ ID NO: 75936 - protein, 9 aa, Homo sapiens
  misc_feature: Table A; Target 75936; HLA-A*11:01; SEPT14; ENSG00000154997; TAA
VNIIPLIAK

SEQ ID NO: 75937 - protein, 9 aa, Homo sapiens
  misc_feature: Table A; Target 75937; HLA-A*33:01; SEPT14; ENSG00000154997; TAA
VNIIPLIAK

SEQ ID NO: 75938 - protein, 9 aa, Homo sapiens
  misc_feature: Table A; Target 75938; HLA-A*33:03; SEPT14; ENSG00000154997; TAA
VNIIPLIAK

SEQ ID NO: 75939 - protein, 9 aa, Homo sapiens
  misc_feature: Table A; Target 75939; HLA-B*27:02; SEPT14; ENSG00000154997; TAA
VNIIPLIAK

SEQ ID NO: 75940 - protein, 8 aa, Homo sapiens
  misc_feature: Table A; Target 75940; HLA-B*13:02; SEPT14; ENSG00000154997; TAA
VQLKLTVV

SEQ ID NO: 75941 - protein, 9 aa, Homo sapiens
  misc_feature: Table A; Target 75941; HLA-B*54:01; SEPT14; ENSG00000154997; TAA
VSFQEIFEA

SEQ ID NO: 75942 - protein, 10 aa, Homo sapiens
  misc_feature: Table A; Target 75942; HLA-A*01:01; SEPT14; ENSG00000154997; TAA
VSFQEIFEAK

SEQ ID NO: 75943 - protein, 10 aa, Homo sapiens
  misc_feature: Table A; Target 75943; HLA-A*03:01; SEPT14; ENSG00000154997; TAA
VSFQEIFEAK

SEQ ID NO: 75944 - protein, 10 aa, Homo sapiens
  misc_feature: Table A; Target 75944; HLA-A*03:02; SEPT14; ENSG00000154997; TAA
VSFQEIFEAK

SEQ ID NO: 75945 - protein, 10 aa, Homo sapiens
  misc_feature: Table A; Target 75945; HLA-A*11:01; SEPT14; ENSG00000154997; TAA
VSFQEIFEAK

SEQ ID NO: 75946 - protein, 10 aa, Homo sapiens
  misc_feature: Table A; Target 75946; HLA-B*27:02; SEPT14; ENSG00000154997; TAA
VSFQEIFEAK

SEQ ID NO: 75947 - protein, 10 aa, Homo sapiens
  misc_feature: Table A; Target 75947; HLA-B*57:01; SEPT14; ENSG00000154997; TAA
VSFQEIFEAK

SEQ ID NO: 75948 - protein, 9 aa, Homo sapiens
  misc_feature: Table A; Target 75948; HLA-B*13:02; SEPT14; ENSG00000154997; TAA
VSGLLPFAV

SEQ ID NO: 75949 - protein, 9 aa, Homo sapiens
  misc_feature: Table A; Target 75949; HLA-C*12:03; SEPT14; ENSG00000154997; TAA
VSGLLPFAV

SEQ ID NO: 75950 - protein, 9 aa, Homo sapiens
  misc_feature: Table A; Target 75950; HLA-A*32:01; SEPT14; ENSG00000154997; TAA
VSRSIRQGF

SEQ ID NO: 75951 - protein, 9 aa, Homo sapiens
  misc_feature: Table A; Target 75951; HLA-B*57:01; SEPT14; ENSG00000154997; TAA
VSRSIRQGF

SEQ ID NO: 75952 - protein, 11 aa, Homo sapiens
  misc_feature: Table A; Target 75952; HLA-A*24:02; SEPT14; ENSG00000154997; TAA
VSRSIRQGFTF

SEQ ID NO: 75953 - protein, 11 aa, Homo sapiens
  misc_feature: Table A; Target 75953; HLA-B*57:01; SEPT14; ENSG00000154997; TAA
VSRSIRQGFTF

SEQ ID NO: 75954 - protein, 11 aa, Homo sapiens
  misc_feature: Table A; Target 75954; HLA-A*01:01; SEPT14; ENSG00000154997; TAA
VVETVGYGDQI

SEQ ID NO: 75955 - protein, 8 aa, Homo sapiens
  misc_feature: Table A; Target 75955; HLA-A*02:01; SEPT14; ENSG00000154997; TAA
VVGSTDEV

SEQ ID NO: 75956 - protein, 8 aa, Homo sapiens
  misc_feature: Table A; Target 75956; HLA-C*05:01; SEPT14; ENSG00000154997; TAA
VVGSTDEV

SEQ ID NO: 75957 - protein, 9 aa, Homo sapiens
  misc_feature: Table A; Target 75957; HLA-A*03:02; SEPT14; ENSG00000154997; TAA
VVGSTDEVK

SEQ ID NO: 75958 - protein, 9 aa, Homo sapiens
  misc_feature: Table A; Target 75958; HLA-A*11:01; SEPT14; ENSG00000154997; TAA
VVGSTDEVK

SEQ ID NO: 75959 - protein, 8 aa, Homo sapiens
  misc_feature: Table A; Target 75959; HLA-A*30:01; SEPT14; ENSG00000154997; TAA
YELQESNV

SEQ ID NO: 75960 - protein, 8 aa, Homo sapiens
  misc_feature: Table A; Target 75960; HLA-B*13:02; SEPT14; ENSG00000154997; TAA
YELQESNV

SEQ ID NO: 75961 - protein, 8 aa, Homo sapiens
  misc_feature: Table A; Target 75961; HLA-B*40:02; SEPT14; ENSG00000154997; TAA
YELQESNV

SEQ ID NO: 75962 - protein, 8 aa, Homo sapiens
  misc_feature: Table A; Target 75962; HLA-B*49:01; SEPT14; ENSG00000154997; TAA
YELQESNV

SEQ ID NO: 75963 - protein, 9 aa, Homo sapiens
  misc_feature: Table A; Target 75963; HLA-B*49:01; SEPT14; ENSG00000154997; TAA
YELQESNVQ

SEQ ID NO: 75964 - protein, 10 aa, Homo sapiens
  misc_feature: Table A; Target 75964; HLA-A*23:01; SEPT14; ENSG00000154997; TAA
YELQESNVQL

SEQ ID NO: 75965 - protein, 10 aa, Homo sapiens
  misc_feature: Table A; Target 75965; HLA-A*30:01; SEPT14; ENSG00000154997; TAA
YELQESNVQL

SEQ ID NO: 75966 - protein, 10 aa, Homo sapiens
  misc_feature: Table A; Target 75966; HLA-B*18:01; SEPT14; ENSG00000154997; TAA
YELQESNVQL

SEQ ID NO: 75967 - protein, 10 aa, Homo sapiens
  misc_feature: Table A; Target 75967; HLA-B*27:02; SEPT14; ENSG00000154997; TAA
YELQESNVQL

SEQ ID NO: 75968 - protein, 10 aa, Homo sapiens
  misc_feature: Table A; Target 75968; HLA-B*27:05; SEPT14; ENSG00000154997; TAA
YELQESNVQL

SEQ ID NO: 75969 - protein, 10 aa, Homo sapiens
  misc_feature: Table A; Target 75969; HLA-B*37:01; SEPT14; ENSG00000154997; TAA
YELQESNVQL

SEQ ID NO: 75970 - protein, 10 aa, Homo sapiens
  misc_feature: Table A; Target 75970; HLA-B*38:01; SEPT14; ENSG00000154997; TAA
YELQESNVQL

SEQ ID NO: 75971 - protein, 10 aa, Homo sapiens
  misc_feature: Table A; Target 75971; HLA-B*39:01; SEPT14; ENSG00000154997; TAA
YELQESNVQL

SEQ ID NO: 75972 - protein, 10 aa, Homo sapiens
  misc_feature: Table A; Target 75972; HLA-B*40:01; SEPT14; ENSG00000154997; TAA
YELQESNVQL

SEQ ID NO: 75973 - protein, 10 aa, Homo sapiens
  misc_feature: Table A; Target 75973; HLA-B*40:02; SEPT14; ENSG00000154997; TAA
YELQESNVQL

SEQ ID NO: 75974 - protein, 10 aa, Homo sapiens
  misc_feature: Table A; Target 75974; HLA-B*44:02; SEPT14; ENSG00000154997; TAA
YELQESNVQL

SEQ ID NO: 75975 - protein, 10 aa, Homo sapiens
  misc_feature: Table A; Target 75975; HLA-B*44:03; SEPT14; ENSG00000154997; TAA
YELQESNVQL

SEQ ID NO: 75976 - protein, 10 aa, Homo sapiens
  misc_feature: Table A; Target 75976; HLA-B*49:01; SEPT14; ENSG00000154997; TAA
YELQESNVQL

SEQ ID NO: 75977 - protein, 10 aa, Homo sapiens
  misc_feature: Table A; Target 75977; HLA-C*03:04; SEPT14; ENSG00000154997; TAA
YELQESNVQL

SEQ ID NO: 75978 - protein, 11 aa, Homo sapiens
  misc_feature: Table A; Target 75978; HLA-A*03:02; SEPT14; ENSG00000154997; TAA
YELQESNVQLK

SEQ ID NO: 75979 - protein, 11 aa, Homo sapiens
  misc_feature: Table A; Target 75979; HLA-A*11:01; SEPT14; ENSG00000154997; TAA
YELQESNVQLK

SEQ ID NO: 75980 - protein, 11 aa, Homo sapiens
  misc_feature: Table A; Target 75980; HLA-B*27:02; SEPT14; ENSG00000154997; TAA
YELQESNVQLK

SEQ ID NO: 75981 - protein, 11 aa, Homo sapiens
  misc_feature: Table A; Target 75981; HLA-B*49:01; SEPT14; ENSG00000154997; TAA
YELQESNVQLK

SEQ ID NO: 75982 - protein, 10 aa, Homo sapiens
  misc_feature: Table A; Target 75982; HLA-A*23:01; SEPT14; ENSG00000154997; TAA
YFISPTGHSL

SEQ ID NO: 75983 - protein, 10 aa, Homo sapiens
  misc_feature: Table A; Target 75983; HLA-A*24:02; SEPT14; ENSG00000154997; TAA
YFISPTGHSL

SEQ ID NO: 75984 - protein, 10 aa, Homo sapiens
  misc_feature: Table A; Target 75984; HLA-A*25:01; SEPT14; ENSG00000154997; TAA
YFISPTGHSL

SEQ ID NO: 75985 - protein, 10 aa, Homo sapiens
  misc_feature: Table A; Target 75985; HLA-A*29:02; SEPT14; ENSG00000154997; TAA
YFISPTGHSL

SEQ ID NO: 75986 - protein, 10 aa, Homo sapiens
  misc_feature: Table A; Target 75986; HLA-A*30:01; SEPT14; ENSG00000154997; TAA
YFISPTGHSL

SEQ ID NO: 75987 - protein, 10 aa, Homo sapiens
  misc_feature: Table A; Target 75987; HLA-A*32:01; SEPT14; ENSG00000154997; TAA
YFISPTGHSL

SEQ ID NO: 75988 - protein, 10 aa, Homo sapiens
  misc_feature: Table A; Target 75988; HLA-B*07:02; SEPT14; ENSG00000154997; TAA
YFISPTGHSL

SEQ ID NO: 75989 - protein, 10 aa, Homo sapiens
  misc_feature: Table A; Target 75989; HLA-B*15:03; SEPT14; ENSG00000154997; TAA
YFISPTGHSL

SEQ ID NO: 75990 - protein, 10 aa, Homo sapiens
  misc_feature: Table A; Target 75990; HLA-B*35:01; SEPT14; ENSG00000154997; TAA
YFISPTGHSL

SEQ ID NO: 75991 - protein, 10 aa, Homo sapiens
  misc_feature: Table A; Target 75991; HLA-B*35:03; SEPT14; ENSG00000154997; TAA
YFISPTGHSL

SEQ ID NO: 75992 - protein, 10 aa, Homo sapiens
  misc_feature: Table A; Target 75992; HLA-B*38:01; SEPT14; ENSG00000154997; TAA
YFISPTGHSL

SEQ ID NO: 75993 - protein, 10 aa, Homo sapiens
  misc_feature: Table A; Target 75993; HLA-B*40:02; SEPT14; ENSG00000154997; TAA
YFISPTGHSL

SEQ ID NO: 75994 - protein, 10 aa, Homo sapiens
  misc_feature: Table A; Target 75994; HLA-B*46:01; SEPT14; ENSG00000154997; TAA
YFISPTGHSL

SEQ ID NO: 75995 - protein, 10 aa, Homo sapiens
  misc_feature: Table A; Target 75995; HLA-B*58:01; SEPT14; ENSG00000154997; TAA
YFISPTGHSL

SEQ ID NO: 75996 - protein, 10 aa, Homo sapiens
  misc_feature: Table A; Target 75996; HLA-C*01:02; SEPT14; ENSG00000154997; TAA
YFISPTGHSL

SEQ ID NO: 75997 - protein, 10 aa, Homo sapiens
  misc_feature: Table A; Target 75997; HLA-C*02:02; SEPT14; ENSG00000154997; TAA
YFISPTGHSL

SEQ ID NO: 75998 - protein, 10 aa, Homo sapiens
  misc_feature: Table A; Target 75998; HLA-C*03:03; SEPT14; ENSG00000154997; TAA
YFISPTGHSL

SEQ ID NO: 75999 - protein, 10 aa, Homo sapiens
  misc_feature: Table A; Target 75999; HLA-C*03:04; SEPT14; ENSG00000154997; TAA
YFISPTGHSL

SEQ ID NO: 76000 - protein, 10 aa, Homo sapiens
  misc_feature: Table A; Target 76000; HLA-C*04:01; SEPT14; ENSG00000154997; TAA
YFISPTGHSL

SEQ ID NO: 76001 - protein, 10 aa, Homo sapiens
  misc_feature: Table A; Target 76001; HLA-C*07:02; SEPT14; ENSG00000154997; TAA
YFISPTGHSL

SEQ ID NO: 76002 - protein, 10 aa, Homo sapiens
  misc_feature: Table A; Target 76002; HLA-C*07:04; SEPT14; ENSG00000154997; TAA
YFISPTGHSL

SEQ ID NO: 76003 - protein, 10 aa, Homo sapiens
  misc_feature: Table A; Target 76003; HLA-C*12:03; SEPT14; ENSG00000154997; TAA
YFISPTGHSL

SEQ ID NO: 76004 - protein, 10 aa, Homo sapiens
  misc_feature: Table A; Target 76004; HLA-C*14:02; SEPT14; ENSG00000154997; TAA
YFISPTGHSL

SEQ ID NO: 76005 - protein, 10 aa, Homo sapiens
  misc_feature: Table A; Target 76005; HLA-C*16:01; SEPT14; ENSG00000154997; TAA
YFISPTGHSL

SEQ ID NO: 76006 - protein, 10 aa, Homo sapiens
  misc_feature: Table A; Target 76006; HLA-C*16:02; SEPT14; ENSG00000154997; TAA
YFISPTGHSL

SEQ ID NO: 76007 - protein, 11 aa, Homo sapiens
  misc_feature: Table A; Target 76007; HLA-A*24:02; SEPT14; ENSG00000154997; TAA
YFISPTGHSLK

SEQ ID NO: 76008 - protein, 11 aa, Homo sapiens
  misc_feature: Table A; Target 76008; HLA-A*29:02; SEPT14; ENSG00000154997; TAA
YFISPTGHSLK

SEQ ID NO: 76009 - protein, 11 aa, Homo sapiens
  misc_feature: Table A; Target 76009; HLA-A*31:01; SEPT14; ENSG00000154997; TAA
YFISPTGHSLK

SEQ ID NO: 76010 - protein, 11 aa, Homo sapiens
  misc_feature: Table A; Target 76010; HLA-A*33:01; SEPT14; ENSG00000154997; TAA
YFISPTGHSLK

SEQ ID NO: 76011 - protein, 11 aa, Homo sapiens
  misc_feature: Table A; Target 76011; HLA-A*33:03; SEPT14; ENSG00000154997; TAA
YFISPTGHSLK

SEQ ID NO: 76012 - protein, 11 aa, Homo sapiens
  misc_feature: Table A; Target 76012; HLA-A*01:01; SEPT14; ENSG00000154997; TAA
YGDQIDKEASY

SEQ ID NO: 76013 - protein, 10 aa, Homo sapiens
  misc_feature: Table A; Target 76013; HLA-B*38:01; SEPT14; ENSG00000154997; TAA
YHDSRVHVCL

SEQ ID NO: 76014 - protein, 9 aa, Homo sapiens
  misc_feature: Table A; Target 76014; HLA-A*01:01; SEPT14; ENSG00000154997; TAA
YIDAQFEAY

SEQ ID NO: 76015 - protein, 9 aa, Homo sapiens
  misc_feature: Table A; Target 76015; HLA-A*02:07; SEPT14; ENSG00000154997; TAA
YIDAQFEAY

SEQ ID NO: 76016 - protein, 9 aa, Homo sapiens
  misc_feature: Table A; Target 76016; HLA-A*25:01; SEPT14; ENSG00000154997; TAA
YIDAQFEAY

SEQ ID NO: 76017 - protein, 9 aa, Homo sapiens
  misc_feature: Table A; Target 76017; HLA-A*26:01; SEPT14; ENSG00000154997; TAA
YIDAQFEAY

SEQ ID NO: 76018 - protein, 9 aa, Homo sapiens
  misc_feature: Table A; Target 76018; HLA-A*29:02; SEPT14; ENSG00000154997; TAA
YIDAQFEAY

SEQ ID NO: 76019 - protein, 9 aa, Homo sapiens
  misc_feature: Table A; Target 76019; HLA-A*30:02; SEPT14; ENSG00000154997; TAA
YIDAQFEAY

SEQ ID NO: 76020 - protein, 9 aa, Homo sapiens
  misc_feature: Table A; Target 76020; HLA-A*32:01; SEPT14; ENSG00000154997; TAA
YIDAQFEAY

SEQ ID NO: 76021 - protein, 9 aa, Homo sapiens
  misc_feature: Table A; Target 76021; HLA-B*15:01; SEPT14; ENSG00000154997; TAA
YIDAQFEAY

SEQ ID NO: 76022 - protein, 9 aa, Homo sapiens
  misc_feature: Table A; Target 76022; HLA-B*15:03; SEPT14; ENSG00000154997; TAA
YIDAQFEAY

SEQ ID NO: 76023 - protein, 9 aa, Homo sapiens
  misc_feature: Table A; Target 76023; HLA-B*18:01; SEPT14; ENSG00000154997; TAA
YIDAQFEAY

SEQ ID NO: 76024 - protein, 9 aa, Homo sapiens
  misc_feature: Table A; Target 76024; HLA-B*35:01; SEPT14; ENSG00000154997; TAA
YIDAQFEAY

SEQ ID NO: 76025 - protein, 9 aa, Homo sapiens
  misc_feature: Table A; Target 76025; HLA-B*46:01; SEPT14; ENSG00000154997; TAA
YIDAQFEAY

SEQ ID NO: 76026 - protein, 9 aa, Homo sapiens
  misc_feature: Table A; Target 76026; HLA-B*58:01; SEPT14; ENSG00000154997; TAA
YIDAQFEAY

SEQ ID NO: 76027 - protein, 9 aa, Homo sapiens
  misc_feature: Table A; Target 76027; HLA-C*02:02; SEPT14; ENSG00000154997; TAA
YIDAQFEAY

SEQ ID NO: 76028 - protein, 9 aa, Homo sapiens
  misc_feature: Table A; Target 76028; HLA-C*03:03; SEPT14; ENSG00000154997; TAA
YIDAQFEAY

SEQ ID NO: 76029 - protein, 9 aa, Homo sapiens
  misc_feature: Table A; Target 76029; HLA-C*05:01; SEPT14; ENSG00000154997; TAA
YIDAQFEAY

SEQ ID NO: 76030 - protein, 9 aa, Homo sapiens
  misc_feature: Table A; Target 76030; HLA-C*07:04; SEPT14; ENSG00000154997; TAA
YIDAQFEAY

SEQ ID NO: 76031 - protein, 10 aa, Homo sapiens
  misc_feature: Table A; Target 76031; HLA-A*01:01; SEPT14; ENSG00000154997; TAA
YIDAQFEAYL

SEQ ID NO: 76032 - protein, 10 aa, Homo sapiens
  misc_feature: Table A; Target 76032; HLA-A*02:01; SEPT14; ENSG00000154997; TAA
YIDAQFEAYL

SEQ ID NO: 76033 - protein, 10 aa, Homo sapiens
  misc_feature: Table A; Target 76033; HLA-A*02:07; SEPT14; ENSG00000154997; TAA
YIDAQFEAYL

SEQ ID NO: 76034 - protein, 8 aa, Homo sapiens
  misc_feature: Table A; Target 76034; HLA-A*02:01; SEPT14; ENSG00000154997; TAA
YLQEELKI

SEQ ID NO: 76035 - protein, 8 aa, Homo sapiens
  misc_feature: Table A; Target 76035; HLA-A*02:04; SEPT14; ENSG00000154997; TAA
YLQEELKI

SEQ ID NO: 76036 - protein, 8 aa, Homo sapiens
  misc_feature: Table A; Target 76036; HLA-B*13:02; SEPT14; ENSG00000154997; TAA
YLQEELKI

SEQ ID NO: 76037 - protein, 10 aa, Homo sapiens
  misc_feature: Table A; Target 76037; HLA-A*31:01; SEPT14; ENSG00000154997; TAA
YLQEELKIKR

SEQ ID NO: 76038 - protein, 10 aa, Homo sapiens
  misc_feature: Table A; Target 76038; HLA-A*33:01; SEPT14; ENSG00000154997; TAA
YLQEELKIKR

SEQ ID NO: 76039 - protein, 10 aa, Homo sapiens
  misc_feature: Table A; Target 76039; HLA-A*33:03; SEPT14; ENSG00000154997; TAA
YLQEELKIKR

SEQ ID NO: 76040 - protein, 8 aa, Homo sapiens
  misc_feature: Table A; Target 76040; HLA-A*30:01; SEPT14; ENSG00000154997; TAA
YPWGVLQV

SEQ ID NO: 76041 - protein, 8 aa, Homo sapiens
  misc_feature: Table A; Target 76041; HLA-B*51:01; SEPT14; ENSG00000154997; TAA
YPWGVLQV

SEQ ID NO: 76042 - protein, 8 aa, Homo sapiens
  misc_feature: Table A; Target 76042; HLA-B*54:01; SEPT14; ENSG00000154997; TAA
YPWGVLQV

SEQ ID NO: 76043 - protein, 8 aa, Homo sapiens
  misc_feature: Table A; Target 76043; HLA-B*56:01; SEPT14; ENSG00000154997; TAA
YPWGVLQV

SEQ ID NO: 76044 - protein, 10 aa, Homo sapiens
  misc_feature: Table A; Target 76044; HLA-B*54:01; SEPT14; ENSG00000154997; TAA
YPWGVLQVEN

SEQ ID NO: 76045 - protein, 9 aa, Homo sapiens
  misc_feature: Table A; Target 76045; HLA-B*08:01; SEPT14; ENSG00000154997; TAA
YQKLQKMGF

SEQ ID NO: 76046 - protein, 9 aa, Homo sapiens
  misc_feature: Table A; Target 76046; HLA-B*15:01; SEPT14; ENSG00000154997; TAA
YQKLQKMGF

SEQ ID NO: 76047 - protein, 9 aa, Homo sapiens
  misc_feature: Table A; Target 76047; HLA-B*13:02; SEPT14; ENSG00000154997; TAA
YQLPTDEET

SEQ ID NO: 76048 - protein, 9 aa, Homo sapiens
  misc_feature: Table A; Target 76048; HLA-B*27:05; SEPT14; ENSG00000154997; TAA
YQLPTDEET

SEQ ID NO: 76049 - protein, 10 aa, Homo sapiens
  misc_feature: Table A; Target 76049; HLA-B*39:01; SEPT14; ENSG00000154997; TAA
YQLPTDEETA

SEQ ID NO: 76050 - protein, 11 aa, Homo sapiens
  misc_feature: Table A; Target 76050; HLA-B*27:05; SEPT14; ENSG00000154997; TAA
YQLPTDEETAA

SEQ ID NO: 76051 - protein, 11 aa, Homo sapiens
  misc_feature: Table A; Target 76051; HLA-B*39:01; SEPT14; ENSG00000154997; TAA
YQLPTDEETAA

SEQ ID NO: 76052 - protein, 8 aa, Homo sapiens
  misc_feature: Table A; Target 76052; HLA-B*13:02; SEPT14; ENSG00000154997; TAA
YQPIVDYI

SEQ ID NO: 76053 - protein, 8 aa, Homo sapiens
  misc_feature: Table A; Target 76053; HLA-B*49:01; SEPT14; ENSG00000154997; TAA
YQPIVDYI

SEQ ID NO: 76054 - protein, 8 aa, Homo sapiens
  misc_feature: Table A; Target 76054; HLA-B*51:01; SEPT14; ENSG00000154997; TAA
YQPIVDYI

SEQ ID NO: 76055 - protein, 9 aa, Homo sapiens
  misc_feature: Table A; Target 76055; HLA-B*08:01; SEPT14; ENSG00000154997; TAA
YRYQKLQKM

SEQ ID NO: 76056 - protein, 8 aa, Homo sapiens
  misc_feature: Table A; Target 76056; HLA-B*13:02; SEPT14; ENSG00000154997; TAA
YSNVGLQI

SEQ ID NO: 76057 - protein, 8 aa, Homo sapiens
  misc_feature: Table A; Target 76057; HLA-B*40:02; SEPT14; ENSG00000154997; TAA
YSNVGLQI

SEQ ID NO: 76058 - protein, 8 aa, Homo sapiens
  misc_feature: Table A; Target 76058; HLA-B*51:01; SEPT14; ENSG00000154997; TAA
YSNVGLQI

SEQ ID NO: 76059 - protein, 8 aa, Homo sapiens
  misc_feature: Table A; Target 76059; HLA-B*58:01; SEPT14; ENSG00000154997; TAA
YSNVGLQI

SEQ ID NO: 76060 - protein, 8 aa, Homo sapiens
  misc_feature: Table A; Target 76060; HLA-C*03:03; SEPT14; ENSG00000154997; TAA
YSNVGLQI

SEQ ID NO: 76061 - protein, 8 aa, Homo sapiens
  misc_feature: Table A; Target 76061; HLA-C*03:04; SEPT14; ENSG00000154997; TAA
YSNVGLQI

SEQ ID NO: 76062 - protein, 8 aa, Homo sapiens
  misc_feature: Table A; Target 76062; HLA-C*05:01; SEPT14; ENSG00000154997; TAA
YSNVGLQI

SEQ ID NO: 76063 - protein, 8 aa, Homo sapiens
  misc_feature: Table A; Target 76063; HLA-C*16:02; SEPT14; ENSG00000154997; TAA
YSNVGLQI

SEQ ID NO: 76064 - protein, 11 aa, Homo sapiens
  misc_feature: Table A; Target 76064; HLA-A*01:01; SEPT14; ENSG00000154997; TAA
YSNVGLQIQTY

SEQ ID NO: 76065 - protein, 11 aa, Homo sapiens
  misc_feature: Table A; Target 76065; HLA-A*25:01; SEPT14; ENSG00000154997; TAA
YSNVGLQIQTY

SEQ ID NO: 76066 - protein, 11 aa, Homo sapiens
  misc_feature: Table A; Target 76066; HLA-A*26:01; SEPT14; ENSG00000154997; TAA
YSNVGLQIQTY

SEQ ID NO: 76067 - protein, 11 aa, Homo sapiens
  misc_feature: Table A; Target 76067; HLA-A*29:02; SEPT14; ENSG00000154997; TAA
YSNVGLQIQTY

SEQ ID NO: 76068 - protein, 11 aa, Homo sapiens
  misc_feature: Table A; Target 76068; HLA-A*30:02; SEPT14; ENSG00000154997; TAA
YSNVGLQIQTY

SEQ ID NO: 76069 - protein, 11 aa, Homo sapiens
  misc_feature: Table A; Target 76069; HLA-A*32:01; SEPT14; ENSG00000154997; TAA
YSNVGLQIQTY

SEQ ID NO: 76070 - protein, 11 aa, Homo sapiens
  misc_feature: Table A; Target 76070; HLA-B*15:01; SEPT14; ENSG00000154997; TAA
YSNVGLQIQTY

SEQ ID NO: 76071 - protein, 11 aa, Homo sapiens
  misc_feature: Table A; Target 76071; HLA-B*46:01; SEPT14; ENSG00000154997; TAA
YSNVGLQIQTY

SEQ ID NO: 76072 - protein, 11 aa, Homo sapiens
  misc_feature: Table A; Target 76072; HLA-B*57:01; SEPT14; ENSG00000154997; TAA
YSNVGLQIQTY

SEQ ID NO: 76073 - protein, 11 aa, Homo sapiens
  misc_feature: Table A; Target 76073; HLA-B*58:01; SEPT14; ENSG00000154997; TAA
YSNVGLQIQTY

SEQ ID NO: 76074 - protein, 11 aa, Homo sapiens
  misc_feature: Table A; Target 76074; HLA-C*07:01; SEPT14; ENSG00000154997; TAA
YSNVGLQIQTY

SEQ ID NO: 76075 - protein, 11 aa, Homo sapiens
  misc_feature: Table A; Target 76075; HLA-C*12:03; SEPT14; ENSG00000154997; TAA
YSNVGLQIQTY

SEQ ID NO: 76076 - protein, 11 aa, Homo sapiens
  misc_feature: Table A; Target 76076; HLA-C*14:02; SEPT14; ENSG00000154997; TAA
YSNVGLQIQTY

SEQ ID NO: 76077 - protein, 11 aa, Homo sapiens
  misc_feature: Table A; Target 76077; HLA-C*16:02; SEPT14; ENSG00000154997; TAA
YSNVGLQIQTY

SEQ ID NO: 76078 - protein, 11 aa, Homo sapiens
  misc_feature: Table A; Target 76078; HLA-C*16:04; SEPT14; ENSG00000154997; TAA
YSNVGLQIQTY

SEQ ID NO: 76079 - protein, 9 aa, Homo sapiens
  misc_feature: Table A; Target 76079; HLA-C*16:02; SEPT14,EGFR-SEPT14 Fusion; ENSG00000154997,EGFR-SEPT14; TAA,EGFR-SEPT14
AASEALQTQ

SEQ ID NO: 76080 - protein, 10 aa, Homo sapiens
  misc_feature: Table A; Target 76080; HLA-A*11:01; SEPT14,EGFR-SEPT14 Fusion; ENSG00000154997,EGFR-SEPT14; TAA,EGFR-SEPT14
AASEALQTQL

SEQ ID NO: 76081 - protein, 10 aa, Homo sapiens
  misc_feature: Table A; Target 76081; HLA-A*30:01; SEPT14,EGFR-SEPT14 Fusion; ENSG00000154997,EGFR-SEPT14; TAA,EGFR-SEPT14
AASEALQTQL

SEQ ID NO: 76082 - protein, 10 aa, Homo sapiens
  misc_feature: Table A; Target 76082; HLA-A*68:02; SEPT14,EGFR-SEPT14 Fusion; ENSG00000154997,EGFR-SEPT14; TAA,EGFR-SEPT14
AASEALQTQL

SEQ ID NO: 76083 - protein, 10 aa, Homo sapiens
  misc_feature: Table A; Target 76083; HLA-B*07:02; SEPT14,EGFR-SEPT14 Fusion; ENSG00000154997,EGFR-SEPT14; TAA,EGFR-SEPT14
AASEALQTQL

SEQ ID NO: 76084 - protein, 10 aa, Homo sapiens
  misc_feature: Table A; Target 76084; HLA-B*27:02; SEPT14,EGFR-SEPT14 Fusion; ENSG00000154997,EGFR-SEPT14; TAA,EGFR-SEPT14
AASEALQTQL

SEQ ID NO: 76085 - protein, 10 aa, Homo sapiens
  misc_feature: Table A; Target 76085; HLA-B*27:05; SEPT14,EGFR-SEPT14 Fusion; ENSG00000154997,EGFR-SEPT14; TAA,EGFR-SEPT14
AASEALQTQL

SEQ ID NO: 76086 - protein, 10 aa, Homo sapiens
  misc_feature: Table A; Target 76086; HLA-B*35:03; SEPT14,EGFR-SEPT14 Fusion; ENSG00000154997,EGFR-SEPT14; TAA,EGFR-SEPT14
AASEALQTQL

SEQ ID NO: 76087 - protein, 10 aa, Homo sapiens
  misc_feature: Table A; Target 76087; HLA-B*38:01; SEPT14,EGFR-SEPT14 Fusion; ENSG00000154997,EGFR-SEPT14; TAA,EGFR-SEPT14
AASEALQTQL

SEQ ID NO: 76088 - protein, 10 aa, Homo sapiens
  misc_feature: Table A; Target 76088; HLA-B*39:01; SEPT14,EGFR-SEPT14 Fusion; ENSG00000154997,EGFR-SEPT14; TAA,EGFR-SEPT14
AASEALQTQL

SEQ ID NO: 76089 - protein, 10 aa, Homo sapiens
  misc_feature: Table A; Target 76089; HLA-B*40:01; SEPT14,EGFR-SEPT14 Fusion; ENSG00000154997,EGFR-SEPT14; TAA,EGFR-SEPT14
AASEALQTQL

SEQ ID NO: 76090 - protein, 10 aa, Homo sapiens
  misc_feature: Table A; Target 76090; HLA-B*58:01; SEPT14,EGFR-SEPT14 Fusion; ENSG00000154997,EGFR-SEPT14; TAA,EGFR-SEPT14
AASEALQTQL

SEQ ID NO: 76091 - protein, 10 aa, Homo sapiens
  misc_feature: Table A; Target 76091; HLA-C*02:02; SEPT14,EGFR-SEPT14 Fusion; ENSG00000154997,EGFR-SEPT14; TAA,EGFR-SEPT14
AASEALQTQL

SEQ ID NO: 76092 - protein, 10 aa, Homo sapiens
  misc_feature: Table A; Target 76092; HLA-C*03:03; SEPT14,EGFR-SEPT14 Fusion; ENSG00000154997,EGFR-SEPT14; TAA,EGFR-SEPT14
AASEALQTQL

SEQ ID NO: 76093 - protein, 10 aa, Homo sapiens
  misc_feature: Table A; Target 76093; HLA-C*03:04; SEPT14,EGFR-SEPT14 Fusion; ENSG00000154997,EGFR-SEPT14; TAA,EGFR-SEPT14
AASEALQTQL

SEQ ID NO: 76094 - protein, 10 aa, Homo sapiens
  misc_feature: Table A; Target 76094; HLA-C*05:01; SEPT14,EGFR-SEPT14 Fusion; ENSG00000154997,EGFR-SEPT14; TAA,EGFR-SEPT14
AASEALQTQL

SEQ ID NO: 76095 - protein, 10 aa, Homo sapiens
  misc_feature: Table A; Target 76095; HLA-C*07:06; SEPT14,EGFR-SEPT14 Fusion; ENSG00000154997,EGFR-SEPT14; TAA,EGFR-SEPT14
AASEALQTQL

SEQ ID NO: 76096 - protein, 10 aa, Homo sapiens
  misc_feature: Table A; Target 76096; HLA-C*12:03; SEPT14,EGFR-SEPT14 Fusion; ENSG00000154997,EGFR-SEPT14; TAA,EGFR-SEPT14
AASEALQTQL

SEQ ID NO: 76097 - protein, 10 aa, Homo sapiens
  misc_feature: Table A; Target 76097; HLA-C*16:02; SEPT14,EGFR-SEPT14 Fusion; ENSG00000154997,EGFR-SEPT14; TAA,EGFR-SEPT14
AASEALQTQL

SEQ ID NO: 76098 - protein, 10 aa, Homo sapiens
  misc_feature: Table A; Target 76098; HLA-C*16:04; SEPT14,EGFR-SEPT14 Fusion; ENSG00000154997,EGFR-SEPT14; TAA,EGFR-SEPT14
AASEALQTQL

SEQ ID NO: 76099 - protein, 11 aa, Homo sapiens
  misc_feature: Table A; Target 76099; HLA-A*03:02; SEPT14,EGFR-SEPT14 Fusion; ENSG00000154997,EGFR-SEPT14; TAA,EGFR-SEPT14
ALQTQLSTDTK

SEQ ID NO: 76100 - protein, 11 aa, Homo sapiens
  misc_feature: Table A; Target 76100; HLA-A*11:01; SEPT14,EGFR-SEPT14 Fusion; ENSG00000154997,EGFR-SEPT14; TAA,EGFR-SEPT14
ALQTQLSTDTK

SEQ ID NO: 76101 - protein, 11 aa, Homo sapiens
  misc_feature: Table A; Target 76101; HLA-B*27:02; SEPT14,EGFR-SEPT14 Fusion; ENSG00000154997,EGFR-SEPT14; TAA,EGFR-SEPT14
ALQTQLSTDTK

SEQ ID NO: 76102 - protein, 11 aa, Homo sapiens
  misc_feature: Table A; Target 76102; HLA-B*27:05; SEPT14,EGFR-SEPT14 Fusion; ENSG00000154997,EGFR-SEPT14; TAA,EGFR-SEPT14
ALQTQLSTDTK

SEQ ID NO: 76103 - protein, 11 aa, Homo sapiens
  misc_feature: Table A; Target 76103; HLA-C*06:02; SEPT14,EGFR-SEPT14 Fusion; ENSG00000154997,EGFR-SEPT14; TAA,EGFR-SEPT14
ALQTQLSTDTK

SEQ ID NO: 76104 - protein, 9 aa, Homo sapiens
  misc_feature: Table A; Target 76104; HLA-A*01:01; SEPT14,EGFR-SEPT14 Fusion; ENSG00000154997,EGFR-SEPT14; TAA,EGFR-SEPT14
ASEALQTQL

SEQ ID NO: 76105 - protein, 9 aa, Homo sapiens
  misc_feature: Table A; Target 76105; HLA-B*38:01; SEPT14,EGFR-SEPT14 Fusion; ENSG00000154997,EGFR-SEPT14; TAA,EGFR-SEPT14
ASEALQTQL

SEQ ID NO: 76106 - protein, 9 aa, Homo sapiens
  misc_feature: Table A; Target 76106; HLA-B*40:01; SEPT14,EGFR-SEPT14 Fusion; ENSG00000154997,EGFR-SEPT14; TAA,EGFR-SEPT14
ASEALQTQL

SEQ ID NO: 76107 - protein, 9 aa, Homo sapiens
  misc_feature: Table A; Target 76107; HLA-B*58:01; SEPT14,EGFR-SEPT14 Fusion; ENSG00000154997,EGFR-SEPT14; TAA,EGFR-SEPT14
ASEALQTQL

SEQ ID NO: 76108 - protein, 9 aa, Homo sapiens
  misc_feature: Table A; Target 76108; HLA-C*04:01; SEPT14,EGFR-SEPT14 Fusion; ENSG00000154997,EGFR-SEPT14; TAA,EGFR-SEPT14
ASEALQTQL

SEQ ID NO: 76109 - protein, 9 aa, Homo sapiens
  misc_feature: Table A; Target 76109; HLA-C*05:01; SEPT14,EGFR-SEPT14 Fusion; ENSG00000154997,EGFR-SEPT14; TAA,EGFR-SEPT14
ASEALQTQL

SEQ ID NO: 76110 - protein, 9 aa, Homo sapiens
  misc_feature: Table A; Target 76110; HLA-C*07:04; SEPT14,EGFR-SEPT14 Fusion; ENSG00000154997,EGFR-SEPT14; TAA,EGFR-SEPT14
ASEALQTQL

SEQ ID NO: 76111 - protein, 8 aa, Homo sapiens
  misc_feature: Table A; Target 76111; HLA-A*33:01; SEPT14,EGFR-SEPT14 Fusion; ENSG00000154997,EGFR-SEPT14; TAA,EGFR-SEPT14
DTKKDKHR

SEQ ID NO: 76112 - protein, 8 aa, Homo sapiens
  misc_feature: Table A; Target 76112; HLA-A*01:01; SEPT14,EGFR-SEPT14 Fusion; ENSG00000154997,EGFR-SEPT14; TAA,EGFR-SEPT14
EGEIIDFY

SEQ ID NO: 76113 - protein, 9 aa, Homo sapiens
  misc_feature: Table A; Target 76113; HLA-B*27:02; SEPT14,EGFR-SEPT14 Fusion; ENSG00000154997,EGFR-SEPT14; TAA,EGFR-SEPT14
EGEIIDFYK

SEQ ID NO: 76114 - protein, 9 aa, Homo sapiens
  misc_feature: Table A; Target 76114; HLA-A*33:03; SEPT14,EGFR-SEPT14 Fusion; ENSG00000154997,EGFR-SEPT14; TAA,EGFR-SEPT14
EIIDFYKMK

SEQ ID NO: 76115 - protein, 9 aa, Homo sapiens
  misc_feature: Table A; Target 76115; HLA-A*30:01; SEPT14,EGFR-SEPT14 Fusion; ENSG00000154997,EGFR-SEPT14; TAA,EGFR-SEPT14
GEIIDFYKM

SEQ ID NO: 76116 - protein, 9 aa, Homo sapiens
  misc_feature: Table A; Target 76116; HLA-B*18:01; SEPT14,EGFR-SEPT14 Fusion; ENSG00000154997,EGFR-SEPT14; TAA,EGFR-SEPT14
GEIIDFYKM

SEQ ID NO: 76117 - protein, 9 aa, Homo sapiens
  misc_feature: Table A; Target 76117; HLA-B*37:01; SEPT14,EGFR-SEPT14 Fusion; ENSG00000154997,EGFR-SEPT14; TAA,EGFR-SEPT14
GEIIDFYKM

SEQ ID NO: 76118 - protein, 9 aa, Homo sapiens
  misc_feature: Table A; Target 76118; HLA-B*40:01; SEPT14,EGFR-SEPT14 Fusion; ENSG00000154997,EGFR-SEPT14; TAA,EGFR-SEPT14
GEIIDFYKM

SEQ ID NO: 76119 - protein, 9 aa, Homo sapiens
  misc_feature: Table A; Target 76119; HLA-B*40:02; SEPT14,EGFR-SEPT14 Fusion; ENSG00000154997,EGFR-SEPT14; TAA,EGFR-SEPT14
GEIIDFYKM

SEQ ID NO: 76120 - protein, 9 aa, Homo sapiens
  misc_feature: Table A; Target 76120; HLA-B*44:02; SEPT14,EGFR-SEPT14 Fusion; ENSG00000154997,EGFR-SEPT14; TAA,EGFR-SEPT14
GEIIDFYKM

SEQ ID NO: 76121 - protein, 9 aa, Homo sapiens
  misc_feature: Table A; Target 76121; HLA-B*44:03; SEPT14,EGFR-SEPT14 Fusion; ENSG00000154997,EGFR-SEPT14; TAA,EGFR-SEPT14
GEIIDFYKM

SEQ ID NO: 76122 - protein, 9 aa, Homo sapiens
  misc_feature: Table A; Target 76122; HLA-B*49:01; SEPT14,EGFR-SEPT14 Fusion; ENSG00000154997,EGFR-SEPT14; TAA,EGFR-SEPT14
GEIIDFYKM

SEQ ID NO: 76123 - protein, 9 aa, Homo sapiens
  misc_feature: Table A; Target 76123; HLA-A*02:04; SEPT14,EGFR-SEPT14 Fusion; ENSG00000154997,EGFR-SEPT14; TAA,EGFR-SEPT14
IQQEEIRKL

SEQ ID NO: 76124 - protein, 9 aa, Homo sapiens
  misc_feature: Table A; Target 76124; HLA-B*15:01; SEPT14,EGFR-SEPT14 Fusion; ENSG00000154997,EGFR-SEPT14; TAA,EGFR-SEPT14
IQQEEIRKL

SEQ ID NO: 76125 - protein, 9 aa, Homo sapiens
  misc_feature: Table A; Target 76125; HLA-B*38:01; SEPT14,EGFR-SEPT14 Fusion; ENSG00000154997,EGFR-SEPT14; TAA,EGFR-SEPT14
IQQEEIRKL

SEQ ID NO: 76126 - protein, 9 aa, Homo sapiens
  misc_feature: Table A; Target 76126; HLA-C*16:02; SEPT14,EGFR-SEPT14 Fusion; ENSG00000154997,EGFR-SEPT14; TAA,EGFR-SEPT14
IQQEEIRKL

SEQ ID NO: 76127 - protein, 9 aa, Homo sapiens
  misc_feature: Table A; Target 76127; HLA-C*16:02; SEPT14,EGFR-SEPT14 Fusion; ENSG00000154997,EGFR-SEPT14; TAA,EGFR-SEPT14
KAASEALQT

SEQ ID NO: 76128 - protein, 11 aa, Homo sapiens
  misc_feature: Table A; Target 76128; HLA-A*30:01; SEPT14,EGFR-SEPT14 Fusion; ENSG00000154997,EGFR-SEPT14; TAA,EGFR-SEPT14
KAASEALQTQL

SEQ ID NO: 76129 - protein, 11 aa, Homo sapiens
  misc_feature: Table A; Target 76129; HLA-A*31:01; SEPT14,EGFR-SEPT14 Fusion; ENSG00000154997,EGFR-SEPT14; TAA,EGFR-SEPT14
KAASEALQTQL

SEQ ID NO: 76130 - protein, 11 aa, Homo sapiens
  misc_feature: Table A; Target 76130; HLA-B*15:01; SEPT14,EGFR-SEPT14 Fusion; ENSG00000154997,EGFR-SEPT14; TAA,EGFR-SEPT14
KAASEALQTQL

SEQ ID NO: 76131 - protein, 11 aa, Homo sapiens
  misc_feature: Table A; Target 76131; HLA-B*27:05; SEPT14,EGFR-SEPT14 Fusion; ENSG00000154997,EGFR-SEPT14; TAA,EGFR-SEPT14
KAASEALQTQL

SEQ ID NO: 76132 - protein, 11 aa, Homo sapiens
  misc_feature: Table A; Target 76132; HLA-B*40:01; SEPT14,EGFR-SEPT14 Fusion; ENSG00000154997,EGFR-SEPT14; TAA,EGFR-SEPT14
KAASEALQTQL

SEQ ID NO: 76133 - protein, 11 aa, Homo sapiens
  misc_feature: Table A; Target 76133; HLA-B*55:01; SEPT14,EGFR-SEPT14 Fusion; ENSG00000154997,EGFR-SEPT14; TAA,EGFR-SEPT14
KAASEALQTQL

SEQ ID NO: 76134 - protein, 11 aa, Homo sapiens
  misc_feature: Table A; Target 76134; HLA-B*57:01; SEPT14,EGFR-SEPT14 Fusion; ENSG00000154997,EGFR-SEPT14; TAA,EGFR-SEPT14
KAASEALQTQL

SEQ ID NO: 76135 - protein, 11 aa, Homo sapiens
  misc_feature: Table A; Target 76135; HLA-B*58:01; SEPT14,EGFR-SEPT14 Fusion; ENSG00000154997,EGFR-SEPT14; TAA,EGFR-SEPT14
KAASEALQTQL

SEQ ID NO: 76136 - protein, 11 aa, Homo sapiens
  misc_feature: Table A; Target 76136; HLA-C*02:02; SEPT14,EGFR-SEPT14 Fusion; ENSG00000154997,EGFR-SEPT14; TAA,EGFR-SEPT14
KAASEALQTQL

SEQ ID NO: 76137 - protein, 11 aa, Homo sapiens
  misc_feature: Table A; Target 76137; HLA-C*06:02; SEPT14,EGFR-SEPT14 Fusion; ENSG00000154997,EGFR-SEPT14; TAA,EGFR-SEPT14
KAASEALQTQL

SEQ ID NO: 76138 - protein, 11 aa, Homo sapiens
  misc_feature: Table A; Target 76138; HLA-C*07:04; SEPT14,EGFR-SEPT14 Fusion; ENSG00000154997,EGFR-SEPT14; TAA,EGFR-SEPT14
KAASEALQTQL

SEQ ID NO: 76139 - protein, 11 aa, Homo sapiens
  misc_feature: Table A; Target 76139; HLA-C*12:03; SEPT14,EGFR-SEPT14 Fusion; ENSG00000154997,EGFR-SEPT14; TAA,EGFR-SEPT14
KAASEALQTQL

SEQ ID NO: 76140 - protein, 11 aa, Homo sapiens
  misc_feature: Table A; Target 76140; HLA-C*16:02; SEPT14,EGFR-SEPT14 Fusion; ENSG00000154997,EGFR-SEPT14; TAA,EGFR-SEPT14
KAASEALQTQL

SEQ ID NO: 76141 - protein, 11 aa, Homo sapiens
  misc_feature: Table A; Target 76141; HLA-C*16:04; SEPT14,EGFR-SEPT14 Fusion; ENSG00000154997,EGFR-SEPT14; TAA,EGFR-SEPT14
KAASEALQTQL

SEQ ID NO: 76142 - protein, 8 aa, Homo sapiens
  misc_feature: Table A; Target 76142; HLA-B*13:02; SEPT14,EGFR-SEPT14 Fusion; ENSG00000154997,EGFR-SEPT14; TAA,EGFR-SEPT14
KMIQQEEI

SEQ ID NO: 76143 - protein, 10 aa, Homo sapiens
  misc_feature: Table A; Target 76143; HLA-A*03:01; SEPT14,EGFR-SEPT14 Fusion; ENSG00000154997,EGFR-SEPT14; TAA,EGFR-SEPT14
KMIQQEEIRK

SEQ ID NO: 76144 - protein, 10 aa, Homo sapiens
  misc_feature: Table A; Target 76144; HLA-A*03:02; SEPT14,EGFR-SEPT14 Fusion; ENSG00000154997,EGFR-SEPT14; TAA,EGFR-SEPT14
KMIQQEEIRK

SEQ ID NO: 76145 - protein, 11 aa, Homo sapiens
  misc_feature: Table A; Target 76145; HLA-A*02:01; SEPT14,EGFR-SEPT14 Fusion; ENSG00000154997,EGFR-SEPT14; TAA,EGFR-SEPT14
KMIQQEEIRKL

SEQ ID NO: 76146 - protein, 11 aa, Homo sapiens
  misc_feature: Table A; Target 76146; HLA-A*02:03; SEPT14,EGFR-SEPT14 Fusion; ENSG00000154997,EGFR-SEPT14; TAA,EGFR-SEPT14
KMIQQEEIRKL

SEQ ID NO: 76147 - protein, 11 aa, Homo sapiens
  misc_feature: Table A; Target 76147; HLA-A*03:01; SEPT14,EGFR-SEPT14 Fusion; ENSG00000154997,EGFR-SEPT14; TAA,EGFR-SEPT14
KMIQQEEIRKL

SEQ ID NO: 76148 - protein, 11 aa, Homo sapiens
  misc_feature: Table A; Target 76148; HLA-A*31:01; SEPT14,EGFR-SEPT14 Fusion; ENSG00000154997,EGFR-SEPT14; TAA,EGFR-SEPT14
KMIQQEEIRKL

SEQ ID NO: 76149 - protein, 9 aa, Homo sapiens
  misc_feature: Table A; Target 76149; HLA-A*02:03; SEPT14,EGFR-SEPT14 Fusion; ENSG00000154997,EGFR-SEPT14; TAA,EGFR-SEPT14
KMKAASEAL

SEQ ID NO: 76150 - protein, 9 aa, Homo sapiens
  misc_feature: Table A; Target 76150; HLA-A*32:01; SEPT14,EGFR-SEPT14 Fusion; ENSG00000154997,EGFR-SEPT14; TAA,EGFR-SEPT14
KMKAASEAL

SEQ ID NO: 76151 - protein, 9 aa, Homo sapiens
  misc_feature: Table A; Target 76151; HLA-B*07:02; SEPT14,EGFR-SEPT14 Fusion; ENSG00000154997,EGFR-SEPT14; TAA,EGFR-SEPT14
KMKAASEAL

SEQ ID NO: 76152 - protein, 9 aa, Homo sapiens
  misc_feature: Table A; Target 76152; HLA-B*08:01; SEPT14,EGFR-SEPT14 Fusion; ENSG00000154997,EGFR-SEPT14; TAA,EGFR-SEPT14
KMKAASEAL

SEQ ID NO: 76153 - protein, 9 aa, Homo sapiens
  misc_feature: Table A; Target 76153; HLA-B*15:01; SEPT14,EGFR-SEPT14 Fusion; ENSG00000154997,EGFR-SEPT14; TAA,EGFR-SEPT14
KMKAASEAL

SEQ ID NO: 76154 - protein, 9 aa, Homo sapiens
  misc_feature: Table A; Target 76154; HLA-B*40:02; SEPT14,EGFR-SEPT14 Fusion; ENSG00000154997,EGFR-SEPT14; TAA,EGFR-SEPT14
KMKAASEAL

SEQ ID NO: 76155 - protein, 9 aa, Homo sapiens
  misc_feature: Table A; Target 76155; HLA-B*46:01; SEPT14,EGFR-SEPT14 Fusion; ENSG00000154997,EGFR-SEPT14; TAA,EGFR-SEPT14
KMKAASEAL

SEQ ID NO: 76156 - protein, 9 aa, Homo sapiens
  misc_feature: Table A; Target 76156; HLA-C*01:02; SEPT14,EGFR-SEPT14 Fusion; ENSG00000154997,EGFR-SEPT14; TAA,EGFR-SEPT14
KMKAASEAL

SEQ ID NO: 76157 - protein, 9 aa, Homo sapiens
  misc_feature: Table A; Target 76157; HLA-C*06:02; SEPT14,EGFR-SEPT14 Fusion; ENSG00000154997,EGFR-SEPT14; TAA,EGFR-SEPT14
KMKAASEAL

SEQ ID NO: 76158 - protein, 9 aa, Homo sapiens
  misc_feature: Table A; Target 76158; HLA-C*14:02; SEPT14,EGFR-SEPT14 Fusion; ENSG00000154997,EGFR-SEPT14; TAA,EGFR-SEPT14
KMKAASEAL

SEQ ID NO: 76159 - protein, 10 aa, Homo sapiens
  misc_feature: Table A; Target 76159; HLA-A*30:02; SEPT14,EGFR-SEPT14 Fusion; ENSG00000154997,EGFR-SEPT14; TAA,EGFR-SEPT14
KQLEGEIIDF

SEQ ID NO: 76160 - protein, 10 aa, Homo sapiens
  misc_feature: Table A; Target 76160; HLA-A*32:01; SEPT14,EGFR-SEPT14 Fusion; ENSG00000154997,EGFR-SEPT14; TAA,EGFR-SEPT14
KQLEGEIIDF

SEQ ID NO: 76161 - protein, 10 aa, Homo sapiens
  misc_feature: Table A; Target 76161; HLA-B*15:01; SEPT14,EGFR-SEPT14 Fusion; ENSG00000154997,EGFR-SEPT14; TAA,EGFR-SEPT14
KQLEGEIIDF

SEQ ID NO: 76162 - protein, 10 aa, Homo sapiens
  misc_feature: Table A; Target 76162; HLA-B*15:03; SEPT14,EGFR-SEPT14 Fusion; ENSG00000154997,EGFR-SEPT14; TAA,EGFR-SEPT14
KQLEGEIIDF

SEQ ID NO: 76163 - protein, 10 aa, Homo sapiens
  misc_feature: Table A; Target 76163; HLA-B*27:02; SEPT14,EGFR-SEPT14 Fusion; ENSG00000154997,EGFR-SEPT14; TAA,EGFR-SEPT14
KQLEGEIIDF

SEQ ID NO: 76164 - protein, 10 aa, Homo sapiens
  misc_feature: Table A; Target 76164; HLA-B*57:01; SEPT14,EGFR-SEPT14 Fusion; ENSG00000154997,EGFR-SEPT14; TAA,EGFR-SEPT14
KQLEGEIIDF

SEQ ID NO: 76165 - protein, 10 aa, Homo sapiens
  misc_feature: Table A; Target 76165; HLA-B*58:01; SEPT14,EGFR-SEPT14 Fusion; ENSG00000154997,EGFR-SEPT14; TAA,EGFR-SEPT14
KQLEGEIIDF

SEQ ID NO: 76166 - protein, 11 aa, Homo sapiens
  misc_feature: Table A; Target 76166; HLA-A*29:02; SEPT14,EGFR-SEPT14 Fusion; ENSG00000154997,EGFR-SEPT14; TAA,EGFR-SEPT14
KQLEGEIIDFY

SEQ ID NO: 76167 - protein, 11 aa, Homo sapiens
  misc_feature: Table A; Target 76167; HLA-A*30:02; SEPT14,EGFR-SEPT14 Fusion; ENSG00000154997,EGFR-SEPT14; TAA,EGFR-SEPT14
KQLEGEIIDFY

SEQ ID NO: 76168 - protein, 11 aa, Homo sapiens
  misc_feature: Table A; Target 76168; HLA-A*32:01; SEPT14,EGFR-SEPT14 Fusion; ENSG00000154997,EGFR-SEPT14; TAA,EGFR-SEPT14
KQLEGEIIDFY

SEQ ID NO: 76169 - protein, 11 aa, Homo sapiens
  misc_feature: Table A; Target 76169; HLA-B*15:01; SEPT14,EGFR-SEPT14 Fusion; ENSG00000154997,EGFR-SEPT14; TAA,EGFR-SEPT14
KQLEGEIIDFY

SEQ ID NO: 76170 - protein, 11 aa, Homo sapiens
  misc_feature: Table A; Target 76170; HLA-C*16:04; SEPT14,EGFR-SEPT14 Fusion; ENSG00000154997,EGFR-SEPT14; TAA,EGFR-SEPT14
KQLEGEIIDFY

SEQ ID NO: 76171 - protein, 8 aa, Homo sapiens
  misc_feature: Table A; Target 76171; HLA-B*18:01; SEPT14,EGFR-SEPT14 Fusion; ENSG00000154997,EGFR-SEPT14; TAA,EGFR-SEPT14
LEGEIIDF

SEQ ID NO: 76172 - protein, 8 aa, Homo sapiens
  misc_feature: Table A; Target 76172; HLA-B*37:01; SEPT14,EGFR-SEPT14 Fusion; ENSG00000154997,EGFR-SEPT14; TAA,EGFR-SEPT14
LEGEIIDF

SEQ ID NO: 76173 - protein, 8 aa, Homo sapiens
  misc_feature: Table A; Target 76173; HLA-C*12:03; SEPT14,EGFR-SEPT14 Fusion; ENSG00000154997,EGFR-SEPT14; TAA,EGFR-SEPT14
LEGEIIDF

SEQ ID NO: 76174 - protein, 9 aa, Homo sapiens
  misc_feature: Table A; Target 76174; HLA-A*01:01; SEPT14,EGFR-SEPT14 Fusion; ENSG00000154997,EGFR-SEPT14; TAA,EGFR-SEPT14
LEGEIIDFY

SEQ ID NO: 76175 - protein, 9 aa, Homo sapiens
  misc_feature: Table A; Target 76175; HLA-A*29:02; SEPT14,EGFR-SEPT14 Fusion; ENSG00000154997,EGFR-SEPT14; TAA,EGFR-SEPT14
LEGEIIDFY

SEQ ID NO: 76176 - protein, 9 aa, Homo sapiens
  misc_feature: Table A; Target 76176; HLA-B*18:01; SEPT14,EGFR-SEPT14 Fusion; ENSG00000154997,EGFR-SEPT14; TAA,EGFR-SEPT14
LEGEIIDFY

SEQ ID NO: 76177 - protein, 9 aa, Homo sapiens
  misc_feature: Table A; Target 76177; HLA-B*27:02; SEPT14,EGFR-SEPT14 Fusion; ENSG00000154997,EGFR-SEPT14; TAA,EGFR-SEPT14
LEGEIIDFY

SEQ ID NO: 76178 - protein, 9 aa, Homo sapiens
  misc_feature: Table A; Target 76178; HLA-B*44:02; SEPT14,EGFR-SEPT14 Fusion; ENSG00000154997,EGFR-SEPT14; TAA,EGFR-SEPT14
LEGEIIDFY

SEQ ID NO: 76179 - protein, 9 aa, Homo sapiens
  misc_feature: Table A; Target 76179; HLA-B*44:03; SEPT14,EGFR-SEPT14 Fusion; ENSG00000154997,EGFR-SEPT14; TAA,EGFR-SEPT14
LEGEIIDFY

SEQ ID NO: 76180 - protein, 9 aa, Homo sapiens
  misc_feature: Table A; Target 76180; HLA-C*07:01; SEPT14,EGFR-SEPT14 Fusion; ENSG00000154997,EGFR-SEPT14; TAA,EGFR-SEPT14
LEGEIIDFY

SEQ ID NO: 76181 - protein, 9 aa, Homo sapiens
  misc_feature: Table A; Target 76181; HLA-C*16:04; SEPT14,EGFR-SEPT14 Fusion; ENSG00000154997,EGFR-SEPT14; TAA,EGFR-SEPT14
LEGEIIDFY

SEQ ID NO: 76182 - protein, 10 aa, Homo sapiens
  misc_feature: Table A; Target 76182; HLA-B*27:02; SEPT14,EGFR-SEPT14 Fusion; ENSG00000154997,EGFR-SEPT14; TAA,EGFR-SEPT14
LEGEIIDFYK

SEQ ID NO: 76183 - protein, 8 aa, Homo sapiens
  misc_feature: Table A; Target 76183; HLA-C*05:01; SEPT14,EGFR-SEPT14 Fusion; ENSG00000154997,EGFR-SEPT14; TAA,EGFR-SEPT14
LQDKFEHL

SEQ ID NO: 76184 - protein, 10 aa, Homo sapiens
  misc_feature: Table A; Target 76184; HLA-B*27:02; SEPT14,EGFR-SEPT14 Fusion; ENSG00000154997,EGFR-SEPT14; TAA,EGFR-SEPT14
LQTQLSTDTK

SEQ ID NO: 76185 - protein, 9 aa, Homo sapiens
  misc_feature: Table A; Target 76185; HLA-A*03:02; SEPT14,EGFR-SEPT14 Fusion; ENSG00000154997,EGFR-SEPT14; TAA,EGFR-SEPT14
MIQQEEIRK

SEQ ID NO: 76186 - protein, 8 aa, Homo sapiens
  misc_feature: Table A; Target 76186; HLA-C*07:01; SEPT14,EGFR-SEPT14 Fusion; ENSG00000154997,EGFR-SEPT14; TAA,EGFR-SEPT14
QDKFEHLK

SEQ ID NO: 76187 - protein, 10 aa, Homo sapiens
  misc_feature: Table A; Target 76187; HLA-A*01:01; SEPT14,EGFR-SEPT14 Fusion; ENSG00000154997,EGFR-SEPT14; TAA,EGFR-SEPT14
QLEGEIIDFY

SEQ ID NO: 76188 - protein, 9 aa, Homo sapiens
  misc_feature: Table A; Target 76188; HLA-A*01:01; SEPT14,EGFR-SEPT14 Fusion; ENSG00000154997,EGFR-SEPT14; TAA,EGFR-SEPT14
QTQLSTDTK

SEQ ID NO: 76189 - protein, 9 aa, Homo sapiens
  misc_feature: Table A; Target 76189; HLA-A*03:02; SEPT14,EGFR-SEPT14 Fusion; ENSG00000154997,EGFR-SEPT14; TAA,EGFR-SEPT14
QTQLSTDTK

SEQ ID NO: 76190 - protein, 9 aa, Homo sapiens
  misc_feature: Table A; Target 76190; HLA-A*11:01; SEPT14,EGFR-SEPT14 Fusion; ENSG00000154997,EGFR-SEPT14; TAA,EGFR-SEPT14
QTQLSTDTK

SEQ ID NO: 76191 - protein, 9 aa, Homo sapiens
  misc_feature: Table A; Target 76191; HLA-B*27:02; SEPT14,EGFR-SEPT14 Fusion; ENSG00000154997,EGFR-SEPT14; TAA,EGFR-SEPT14
QTQLSTDTK

SEQ ID NO: 76192 - protein, 9 aa, Homo sapiens
  misc_feature: Table A; Target 76192; HLA-C*07:06; SEPT14,EGFR-SEPT14 Fusion; ENSG00000154997,EGFR-SEPT14; TAA,EGFR-SEPT14
QTQLSTDTK

SEQ ID NO: 76193 - protein, 10 aa, Homo sapiens
  misc_feature: Table A; Target 76193; HLA-A*03:02; SEPT14,EGFR-SEPT14 Fusion; ENSG00000154997,EGFR-SEPT14; TAA,EGFR-SEPT14
QTQLSTDTKK

SEQ ID NO: 76194 - protein, 10 aa, Homo sapiens
  misc_feature: Table A; Target 76194; HLA-A*11:01; SEPT14,EGFR-SEPT14 Fusion; ENSG00000154997,EGFR-SEPT14; TAA,EGFR-SEPT14
QTQLSTDTKK

SEQ ID NO: 76195 - protein, 8 aa, Homo sapiens
  misc_feature: Table A; Target 76195; HLA-A*30:01; SEPT14,EGFR-SEPT14 Fusion; ENSG00000154997,EGFR-SEPT14; TAA,EGFR-SEPT14
SEALQTQL

SEQ ID NO: 76196 - protein, 8 aa, Homo sapiens
  misc_feature: Table A; Target 76196; HLA-B*18:01; SEPT14,EGFR-SEPT14 Fusion; ENSG00000154997,EGFR-SEPT14; TAA,EGFR-SEPT14
SEALQTQL

SEQ ID NO: 76197 - protein, 8 aa, Homo sapiens
  misc_feature: Table A; Target 76197; HLA-B*37:01; SEPT14,EGFR-SEPT14 Fusion; ENSG00000154997,EGFR-SEPT14; TAA,EGFR-SEPT14
SEALQTQL

SEQ ID NO: 76198 - protein, 8 aa, Homo sapiens
  misc_feature: Table A; Target 76198; HLA-B*39:01; SEPT14,EGFR-SEPT14 Fusion; ENSG00000154997,EGFR-SEPT14; TAA,EGFR-SEPT14
SEALQTQL

SEQ ID NO: 76199 - protein, 8 aa, Homo sapiens
  misc_feature: Table A; Target 76199; HLA-B*40:01; SEPT14,EGFR-SEPT14 Fusion; ENSG00000154997,EGFR-SEPT14; TAA,EGFR-SEPT14
SEALQTQL

SEQ ID NO: 76200 - protein, 8 aa, Homo sapiens
  misc_feature: Table A; Target 76200; HLA-B*40:02; SEPT14,EGFR-SEPT14 Fusion; ENSG00000154997,EGFR-SEPT14; TAA,EGFR-SEPT14
SEALQTQL

SEQ ID NO: 76201 - protein, 8 aa, Homo sapiens
  misc_feature: Table A; Target 76201; HLA-B*44:02; SEPT14,EGFR-SEPT14 Fusion; ENSG00000154997,EGFR-SEPT14; TAA,EGFR-SEPT14
SEALQTQL

SEQ ID NO: 76202 - protein, 8 aa, Homo sapiens
  misc_feature: Table A; Target 76202; HLA-B*44:03; SEPT14,EGFR-SEPT14 Fusion; ENSG00000154997,EGFR-SEPT14; TAA,EGFR-SEPT14
SEALQTQL

SEQ ID NO: 76203 - protein, 8 aa, Homo sapiens
  misc_feature: Table A; Target 76203; HLA-B*49:01; SEPT14,EGFR-SEPT14 Fusion; ENSG00000154997,EGFR-SEPT14; TAA,EGFR-SEPT14
SEALQTQL

SEQ ID NO: 76204 - protein, 9 aa, Homo sapiens
  misc_feature: Table A; Target 76204; HLA-B*49:01; SEPT14,EGFR-SEPT14 Fusion; ENSG00000154997,EGFR-SEPT14; TAA,EGFR-SEPT14
SEALQTQLS

SEQ ID NO: 76205 - protein, 10 aa, Homo sapiens
  misc_feature: Table A; Target 76205; HLA-B*15:03; SEPT14,EGFR-SEPT14 Fusion; ENSG00000154997,EGFR-SEPT14; TAA,EGFR-SEPT14
YKMKAASEAL

SEQ ID NO: 76206 - protein, 10 aa, Homo sapiens
  misc_feature: Table A; Target 76206; HLA-A*26:01; SLC13A1; ENSG00000081800; TAA
ACAEVIKQEY

SEQ ID NO: 76207 - protein, 10 aa, Homo sapiens
  misc_feature: Table A; Target 76207; HLA-A*29:02; SLC13A1; ENSG00000081800; TAA
ACAEVIKQEY

SEQ ID NO: 76208 - protein, 10 aa, Homo sapiens
  misc_feature: Table A; Target 76208; HLA-A*30:02; SLC13A1; ENSG00000081800; TAA
ACAEVIKQEY

SEQ ID NO: 76209 - protein, 10 aa, Homo sapiens
  misc_feature: Table A; Target 76209; HLA-A*32:01; SLC13A1; ENSG00000081800; TAA
ACAEVIKQEY

SEQ ID NO: 76210 - protein, 10 aa, Homo sapiens
  misc_feature: Table A; Target 76210; HLA-B*15:01; SLC13A1; ENSG00000081800; TAA
ACAEVIKQEY

SEQ ID NO: 76211 - protein, 10 aa, Homo sapiens
  misc_feature: Table A; Target 76211; HLA-B*15:03; SLC13A1; ENSG00000081800; TAA
ACAEVIKQEY

SEQ ID NO: 76212 - protein, 10 aa, Homo sapiens
  misc_feature: Table A; Target 76212; HLA-B*44:02; SLC13A1; ENSG00000081800; TAA
ACAEVIKQEY

SEQ ID NO: 76213 - protein, 10 aa, Homo sapiens
  misc_feature: Table A; Target 76213; HLA-B*44:03; SLC13A1; ENSG00000081800; TAA
ACAEVIKQEY

SEQ ID NO: 76214 - protein, 10 aa, Homo sapiens
  misc_feature: Table A; Target 76214; HLA-B*46:01; SLC13A1; ENSG00000081800; TAA
ACAEVIKQEY

SEQ ID NO: 76215 - protein, 10 aa, Homo sapiens
  misc_feature: Table A; Target 76215; HLA-B*58:01; SLC13A1; ENSG00000081800; TAA
ACAEVIKQEY

SEQ ID NO: 76216 - protein, 10 aa, Homo sapiens
  misc_feature: Table A; Target 76216; HLA-C*02:02; SLC13A1; ENSG00000081800; TAA
ACAEVIKQEY

SEQ ID NO: 76217 - protein, 10 aa, Homo sapiens
  misc_feature: Table A; Target 76217; HLA-C*12:03; SLC13A1; ENSG00000081800; TAA
ACAEVIKQEY

SEQ ID NO: 76218 - protein, 10 aa, Homo sapiens
  misc_feature: Table A; Target 76218; HLA-C*16:01; SLC13A1; ENSG00000081800; TAA
ACAEVIKQEY

SEQ ID NO: 76219 - protein, 10 aa, Homo sapiens
  misc_feature: Table A; Target 76219; HLA-C*16:02; SLC13A1; ENSG00000081800; TAA
ACAEVIKQEY

SEQ ID NO: 76220 - protein, 10 aa, Homo sapiens
  misc_feature: Table A; Target 76220; HLA-C*16:04; SLC13A1; ENSG00000081800; TAA
ACAEVIKQEY

SEQ ID NO: 76221 - protein, 10 aa, Homo sapiens
  misc_feature: Table A; Target 76221; HLA-A*30:01; SLC13A1; ENSG00000081800; TAA
AEAEVEATQM

SEQ ID NO: 76222 - protein, 10 aa, Homo sapiens
  misc_feature: Table A; Target 76222; HLA-B*40:01; SLC13A1; ENSG00000081800; TAA
AEAEVEATQM

SEQ ID NO: 76223 - protein, 10 aa, Homo sapiens
  misc_feature: Table A; Target 76223; HLA-B*44:02; SLC13A1; ENSG00000081800; TAA
AEAEVEATQM

SEQ ID NO: 76224 - protein, 10 aa, Homo sapiens
  misc_feature: Table A; Target 76224; HLA-B*44:03; SLC13A1; ENSG00000081800; TAA
AEAEVEATQM

SEQ ID NO: 76225 - protein, 10 aa, Homo sapiens
  misc_feature: Table A; Target 76225; HLA-B*49:01; SLC13A1; ENSG00000081800; TAA
AEAEVEATQM

SEQ ID NO: 76226 - protein, 10 aa, Homo sapiens
  misc_feature: Table A; Target 76226; HLA-C*16:04; SLC13A1; ENSG00000081800; TAA
AEAEVEATQM

SEQ ID NO: 76227 - protein, 9 aa, Homo sapiens
  misc_feature: Table A; Target 76227; HLA-A*30:01; SLC13A1; ENSG00000081800; TAA
AEAIHVNPL

SEQ ID NO: 76228 - protein, 9 aa, Homo sapiens
  misc_feature: Table A; Target 76228; HLA-B*37:01; SLC13A1; ENSG00000081800; TAA
AEAIHVNPL

SEQ ID NO: 76229 - protein, 9 aa, Homo sapiens
  misc_feature: Table A; Target 76229; HLA-B*40:01; SLC13A1; ENSG00000081800; TAA
AEAIHVNPL

SEQ ID NO: 76230 - protein, 9 aa, Homo sapiens
  misc_feature: Table A; Target 76230; HLA-B*40:02; SLC13A1; ENSG00000081800; TAA
AEAIHVNPL

SEQ ID NO: 76231 - protein, 9 aa, Homo sapiens
  misc_feature: Table A; Target 76231; HLA-B*49:01; SLC13A1; ENSG00000081800; TAA
AEAIHVNPL

SEQ ID NO: 76232 - protein, 10 aa, Homo sapiens
  misc_feature: Table A; Target 76232; HLA-B*44:02; SLC13A1; ENSG00000081800; TAA
AEAIHVNPLY

SEQ ID NO: 76233 - protein, 10 aa, Homo sapiens
  misc_feature: Table A; Target 76233; HLA-B*44:03; SLC13A1; ENSG00000081800; TAA
AEAIHVNPLY

SEQ ID NO: 76234 - protein, 10 aa, Homo sapiens
  misc_feature: Table A; Target 76234; HLA-C*16:04; SLC13A1; ENSG00000081800; TAA
AEAIHVNPLY

SEQ ID NO: 76235 - protein, 8 aa, Homo sapiens
  misc_feature: Table A; Target 76235; HLA-A*30:01; SLC13A1; ENSG00000081800; TAA
AEAVVQQI

SEQ ID NO: 76236 - protein, 8 aa, Homo sapiens
  misc_feature: Table A; Target 76236; HLA-B*37:01; SLC13A1; ENSG00000081800; TAA
AEAVVQQI

SEQ ID NO: 76237 - protein, 8 aa, Homo sapiens
  misc_feature: Table A; Target 76237; HLA-B*44:03; SLC13A1; ENSG00000081800; TAA
AEAVVQQI

SEQ ID NO: 76238 - protein, 8 aa, Homo sapiens
  misc_feature: Table A; Target 76238; HLA-B*49:01; SLC13A1; ENSG00000081800; TAA
AEAVVQQI

SEQ ID NO: 76239 - protein, 9 aa, Homo sapiens
  misc_feature: Table A; Target 76239; HLA-A*30:01; SLC13A1; ENSG00000081800; TAA
AEAVVQQII

SEQ ID NO: 76240 - protein, 9 aa, Homo sapiens
  misc_feature: Table A; Target 76240; HLA-B*13:02; SLC13A1; ENSG00000081800; TAA
AEAVVQQII

SEQ ID NO: 76241 - protein, 9 aa, Homo sapiens
  misc_feature: Table A; Target 76241; HLA-B*40:01; SLC13A1; ENSG00000081800; TAA
AEAVVQQII

SEQ ID NO: 76242 - protein, 9 aa, Homo sapiens
  misc_feature: Table A; Target 76242; HLA-B*44:02; SLC13A1; ENSG00000081800; TAA
AEAVVQQII

SEQ ID NO: 76243 - protein, 9 aa, Homo sapiens
  misc_feature: Table A; Target 76243; HLA-B*44:03; SLC13A1; ENSG00000081800; TAA
AEAVVQQII

SEQ ID NO: 76244 - protein, 9 aa, Homo sapiens
  misc_feature: Table A; Target 76244; HLA-B*49:01; SLC13A1; ENSG00000081800; TAA
AEAVVQQII

SEQ ID NO: 76245 - protein, 9 aa, Homo sapiens
  misc_feature: Table A; Target 76245; HLA-C*16:04; SLC13A1; ENSG00000081800; TAA
AEAVVQQII

SEQ ID NO: 76246 - protein, 9 aa, Homo sapiens
  misc_feature: Table A; Target 76246; HLA-B*49:01; SLC13A1; ENSG00000081800; TAA
AECAYTLFV

SEQ ID NO: 76247 - protein, 8 aa, Homo sapiens
  misc_feature: Table A; Target 76247; HLA-A*30:01; SLC13A1; ENSG00000081800; TAA
AEVEATQM

SEQ ID NO: 76248 - protein, 8 aa, Homo sapiens
  misc_feature: Table A; Target 76248; HLA-B*18:01; SLC13A1; ENSG00000081800; TAA
AEVEATQM

SEQ ID NO: 76249 - protein, 8 aa, Homo sapiens
  misc_feature: Table A; Target 76249; HLA-B*37:01; SLC13A1; ENSG00000081800; TAA
AEVEATQM

SEQ ID NO: 76250 - protein, 8 aa, Homo sapiens
  misc_feature: Table A; Target 76250; HLA-B*40:01; SLC13A1; ENSG00000081800; TAA
AEVEATQM

SEQ ID NO: 76251 - protein, 8 aa, Homo sapiens
  misc_feature: Table A; Target 76251; HLA-B*44:02; SLC13A1; ENSG00000081800; TAA
AEVEATQM

SEQ ID NO: 76252 - protein, 8 aa, Homo sapiens
  misc_feature: Table A; Target 76252; HLA-B*44:03; SLC13A1; ENSG00000081800; TAA
AEVEATQM

SEQ ID NO: 76253 - protein, 8 aa, Homo sapiens
  misc_feature: Table A; Target 76253; HLA-B*49:01; SLC13A1; ENSG00000081800; TAA
AEVEATQM

SEQ ID NO: 76254 - protein, 9 aa, Homo sapiens
  misc_feature: Table A; Target 76254; HLA-A*30:01; SLC13A1; ENSG00000081800; TAA
AEVEATQMT

SEQ ID NO: 76255 - protein, 9 aa, Homo sapiens
  misc_feature: Table A; Target 76255; HLA-B*44:03; SLC13A1; ENSG00000081800; TAA
AEVEATQMT

SEQ ID NO: 76256 - protein, 9 aa, Homo sapiens
  misc_feature: Table A; Target 76256; HLA-B*49:01; SLC13A1; ENSG00000081800; TAA
AEVEATQMT

SEQ ID NO: 76257 - protein, 10 aa, Homo sapiens
  misc_feature: Table A; Target 76257; HLA-A*25:01; SLC13A1; ENSG00000081800; TAA
AEVEATQMTY

SEQ ID NO: 76258 - protein, 10 aa, Homo sapiens
  misc_feature: Table A; Target 76258; HLA-A*30:01; SLC13A1; ENSG00000081800; TAA
AEVEATQMTY

SEQ ID NO: 76259 - protein, 10 aa, Homo sapiens
  misc_feature: Table A; Target 76259; HLA-A*30:02; SLC13A1; ENSG00000081800; TAA
AEVEATQMTY

SEQ ID NO: 76260 - protein, 10 aa, Homo sapiens
  misc_feature: Table A; Target 76260; HLA-B*15:01; SLC13A1; ENSG00000081800; TAA
AEVEATQMTY

SEQ ID NO: 76261 - protein, 10 aa, Homo sapiens
  misc_feature: Table A; Target 76261; HLA-B*15:03; SLC13A1; ENSG00000081800; TAA
AEVEATQMTY

SEQ ID NO: 76262 - protein, 10 aa, Homo sapiens
  misc_feature: Table A; Target 76262; HLA-B*18:01; SLC13A1; ENSG00000081800; TAA
AEVEATQMTY

SEQ ID NO: 76263 - protein, 10 aa, Homo sapiens
  misc_feature: Table A; Target 76263; HLA-B*27:02; SLC13A1; ENSG00000081800; TAA
AEVEATQMTY

SEQ ID NO: 76264 - protein, 10 aa, Homo sapiens
  misc_feature: Table A; Target 76264; HLA-B*40:01; SLC13A1; ENSG00000081800; TAA
AEVEATQMTY

SEQ ID NO: 76265 - protein, 10 aa, Homo sapiens
  misc_feature: Table A; Target 76265; HLA-B*44:02; SLC13A1; ENSG00000081800; TAA
AEVEATQMTY

SEQ ID NO: 76266 - protein, 10 aa, Homo sapiens
  misc_feature: Table A; Target 76266; HLA-B*44:03; SLC13A1; ENSG00000081800; TAA
AEVEATQMTY

SEQ ID NO: 76267 - protein, 10 aa, Homo sapiens
  misc_feature: Table A; Target 76267; HLA-B*49:01; SLC13A1; ENSG00000081800; TAA
AEVEATQMTY

SEQ ID NO: 76268 - protein, 10 aa, Homo sapiens
  misc_feature: Table A; Target 76268; HLA-C*02:02; SLC13A1; ENSG00000081800; TAA
AEVEATQMTY

SEQ ID NO: 76269 - protein, 10 aa, Homo sapiens
  misc_feature: Table A; Target 76269; HLA-C*16:04; SLC13A1; ENSG00000081800; TAA
AEVEATQMTY

SEQ ID NO: 76270 - protein, 11 aa, Homo sapiens
  misc_feature: Table A; Target 76270; HLA-A*30:01; SLC13A1; ENSG00000081800; TAA
AEVEATQMTYF

SEQ ID NO: 76271 - protein, 11 aa, Homo sapiens
  misc_feature: Table A; Target 76271; HLA-B*40:01; SLC13A1; ENSG00000081800; TAA
AEVEATQMTYF

SEQ ID NO: 76272 - protein, 11 aa, Homo sapiens
  misc_feature: Table A; Target 76272; HLA-B*44:02; SLC13A1; ENSG00000081800; TAA
AEVEATQMTYF

SEQ ID NO: 76273 - protein, 11 aa, Homo sapiens
  misc_feature: Table A; Target 76273; HLA-B*44:03; SLC13A1; ENSG00000081800; TAA
AEVEATQMTYF

SEQ ID NO: 76274 - protein, 11 aa, Homo sapiens
  misc_feature: Table A; Target 76274; HLA-B*49:01; SLC13A1; ENSG00000081800; TAA
AEVEATQMTYF

SEQ ID NO: 76275 - protein, 11 aa, Homo sapiens
  misc_feature: Table A; Target 76275; HLA-C*16:04; SLC13A1; ENSG00000081800; TAA
AEVEATQMTYF

SEQ ID NO: 76276 - protein, 8 aa, Homo sapiens
  misc_feature: Table A; Target 76276; HLA-B*15:03; SLC13A1; ENSG00000081800; TAA
AEVIKQEY

SEQ ID NO: 76277 - protein, 8 aa, Homo sapiens
  misc_feature: Table A; Target 76277; HLA-B*18:01; SLC13A1; ENSG00000081800; TAA
AEVIKQEY

SEQ ID NO: 76278 - protein, 8 aa, Homo sapiens
  misc_feature: Table A; Target 76278; HLA-B*27:02; SLC13A1; ENSG00000081800; TAA
AEVIKQEY

SEQ ID NO: 76279 - protein, 8 aa, Homo sapiens
  misc_feature: Table A; Target 76279; HLA-B*37:01; SLC13A1; ENSG00000081800; TAA
AEVIKQEY

SEQ ID NO: 76280 - protein, 8 aa, Homo sapiens
  misc_feature: Table A; Target 76280; HLA-B*44:02; SLC13A1; ENSG00000081800; TAA
AEVIKQEY

SEQ ID NO: 76281 - protein, 8 aa, Homo sapiens
  misc_feature: Table A; Target 76281; HLA-B*44:03; SLC13A1; ENSG00000081800; TAA
AEVIKQEY

SEQ ID NO: 76282 - protein, 8 aa, Homo sapiens
  misc_feature: Table A; Target 76282; HLA-C*16:01; SLC13A1; ENSG00000081800; TAA
AEVIKQEY

SEQ ID NO: 76283 - protein, 8 aa, Homo sapiens
  misc_feature: Table A; Target 76283; HLA-C*16:04; SLC13A1; ENSG00000081800; TAA
AEVIKQEY

SEQ ID NO: 76284 - protein, 8 aa, Homo sapiens
  misc_feature: Table A; Target 76284; HLA-A*30:02; SLC13A1; ENSG00000081800; TAA
AIHVNPLY

SEQ ID NO: 76285 - protein, 9 aa, Homo sapiens
  misc_feature: Table A; Target 76285; HLA-B*13:02; SLC13A1; ENSG00000081800; TAA
AIHVNPLYI

SEQ ID NO: 76286 - protein, 9 aa, Homo sapiens
  misc_feature: Table A; Target 76286; HLA-A*02:07; SLC13A1; ENSG00000081800; TAA
ALFSEYPGF

SEQ ID NO: 76287 - protein, 10 aa, Homo sapiens
  misc_feature: Table A; Target 76287; HLA-A*02:03; SLC13A1; ENSG00000081800; TAA
ALFSEYPGFA

SEQ ID NO: 76288 - protein, 9 aa, Homo sapiens
  misc_feature: Table A; Target 76288; HLA-C*01:02; SLC13A1; ENSG00000081800; TAA
ALPLSVTAL

SEQ ID NO: 76289 - protein, 9 aa, Homo sapiens
  misc_feature: Table A; Target 76289; HLA-A*02:01; SLC13A1; ENSG00000081800; TAA
AMVMPIAEA

SEQ ID NO: 76290 - protein, 9 aa, Homo sapiens
  misc_feature: Table A; Target 76290; HLA-A*02:03; SLC13A1; ENSG00000081800; TAA
AMVMPIAEA

SEQ ID NO: 76291 - protein, 9 aa, Homo sapiens
  misc_feature: Table A; Target 76291; HLA-B*56:01; SLC13A1; ENSG00000081800; TAA
AMVMPIAEA

SEQ ID NO: 76292 - protein, 11 aa, Homo sapiens
  misc_feature: Table A; Target 76292; HLA-A*29:02; SLC13A1; ENSG00000081800; TAA
ANPPNAIVFSY

SEQ ID NO: 76293 - protein, 9 aa, Homo sapiens
  misc_feature: Table A; Target 76293; HLA-B*07:02; SLC13A1; ENSG00000081800; TAA
APAMSNETM

SEQ ID NO: 76294 - protein, 9 aa, Homo sapiens
  misc_feature: Table A; Target 76294; HLA-B*35:03; SLC13A1; ENSG00000081800; TAA
APAMSNETM

SEQ ID NO: 76295 - protein, 9 aa, Homo sapiens
  misc_feature: Table A; Target 76295; HLA-A*23:01; SLC13A1; ENSG00000081800; TAA
ASNPATITL

SEQ ID NO: 76296 - protein, 9 aa, Homo sapiens
  misc_feature: Table A; Target 76296; HLA-A*32:01; SLC13A1; ENSG00000081800; TAA
ASNPATITL

SEQ ID NO: 76297 - protein, 9 aa, Homo sapiens
  misc_feature: Table A; Target 76297; HLA-B*15:01; SLC13A1; ENSG00000081800; TAA
ASNPATITL

SEQ ID NO: 76298 - protein, 9 aa, Homo sapiens
  misc_feature: Table A; Target 76298; HLA-B*46:01; SLC13A1; ENSG00000081800; TAA
ASNPATITL

SEQ ID NO: 76299 - protein, 9 aa, Homo sapiens
  misc_feature: Table A; Target 76299; HLA-B*58:01; SLC13A1; ENSG00000081800; TAA
ASNPATITL

SEQ ID NO: 76300 - protein, 9 aa, Homo sapiens
  misc_feature: Table A; Target 76300; HLA-C*01:02; SLC13A1; ENSG00000081800; TAA
ASNPATITL

SEQ ID NO: 76301 - protein, 9 aa, Homo sapiens
  misc_feature: Table A; Target 76301; HLA-C*02:02; SLC13A1; ENSG00000081800; TAA
ASNPATITL

SEQ ID NO: 76302 - protein, 9 aa, Homo sapiens
  misc_feature: Table A; Target 76302; HLA-C*03:03; SLC13A1; ENSG00000081800; TAA
ASNPATITL

SEQ ID NO: 76303 - protein, 9 aa, Homo sapiens
  misc_feature: Table A; Target 76303; HLA-C*03:04; SLC13A1; ENSG00000081800; TAA
ASNPATITL

SEQ ID NO: 76304 - protein, 9 aa, Homo sapiens
  misc_feature: Table A; Target 76304; HLA-C*05:01; SLC13A1; ENSG00000081800; TAA
ASNPATITL

SEQ ID NO: 76305 - protein, 9 aa, Homo sapiens
  misc_feature: Table A; Target 76305; HLA-C*16:01; SLC13A1; ENSG00000081800; TAA
ASNPATITL

SEQ ID NO: 76306 - protein, 9 aa, Homo sapiens
  misc_feature: Table A; Target 76306; HLA-C*16:04; SLC13A1; ENSG00000081800; TAA
ASNPATITL

SEQ ID NO: 76307 - protein, 10 aa, Homo sapiens
  misc_feature: Table A; Target 76307; HLA-A*23:01; SLC13A1; ENSG00000081800; TAA
ASNPATITLF

SEQ ID NO: 76308 - protein, 10 aa, Homo sapiens
  misc_feature: Table A; Target 76308; HLA-A*30:02; SLC13A1; ENSG00000081800; TAA
ASNPATITLF

SEQ ID NO: 76309 - protein, 10 aa, Homo sapiens
  misc_feature: Table A; Target 76309; HLA-B*58:01; SLC13A1; ENSG00000081800; TAA
ASNPATITLF

SEQ ID NO: 76310 - protein, 8 aa, Homo sapiens
  misc_feature: Table A; Target 76310; HLA-C*05:01; SLC13A1; ENSG00000081800; TAA
ATDSTVAL

SEQ ID NO: 76311 - protein, 9 aa, Homo sapiens
  misc_feature: Table A; Target 76311; HLA-A*01:01; SLC13A1; ENSG00000081800; TAA
ATDSTVALL

SEQ ID NO: 76312 - protein, 9 aa, Homo sapiens
  misc_feature: Table A; Target 76312; HLA-A*02:07; SLC13A1; ENSG00000081800; TAA
ATDSTVALL

SEQ ID NO: 76313 - protein, 9 aa, Homo sapiens
  misc_feature: Table A; Target 76313; HLA-C*05:01; SLC13A1; ENSG00000081800; TAA
ATDSTVALL

SEQ ID NO: 76314 - protein, 10 aa, Homo sapiens
  misc_feature: Table A; Target 76314; HLA-A*01:01; SLC13A1; ENSG00000081800; TAA
ATDSTVALLI

SEQ ID NO: 76315 - protein, 10 aa, Homo sapiens
  misc_feature: Table A; Target 76315; HLA-A*25:01; SLC13A1; ENSG00000081800; TAA
AVVMLGICTW

SEQ ID NO: 76316 - protein, 9 aa, Homo sapiens
  misc_feature: Table A; Target 76316; HLA-A*23:01; SLC13A1; ENSG00000081800; TAA
AYFKDFHLL

SEQ ID NO: 76317 - protein, 9 aa, Homo sapiens
  misc_feature: Table A; Target 76317; HLA-A*24:02; SLC13A1; ENSG00000081800; TAA
AYFKDFHLL

SEQ ID NO: 76318 - protein, 10 aa, Homo sapiens
  misc_feature: Table A; Target 76318; HLA-A*23:01; SLC13A1; ENSG00000081800; TAA
AYTLFVVATF

SEQ ID NO: 76319 - protein, 10 aa, Homo sapiens
  misc_feature: Table A; Target 76319; HLA-A*24:02; SLC13A1; ENSG00000081800; TAA
AYTLFVVATF

SEQ ID NO: 76320 - protein, 9 aa, Homo sapiens
  misc_feature: Table A; Target 76320; HLA-A*01:01; SLC13A1; ENSG00000081800; TAA
CAEVIKQEY

SEQ ID NO: 76321 - protein, 9 aa, Homo sapiens
  misc_feature: Table A; Target 76321; HLA-A*29:02; SLC13A1; ENSG00000081800; TAA
CAEVIKQEY

SEQ ID NO: 76322 - protein, 9 aa, Homo sapiens
  misc_feature: Table A; Target 76322; HLA-A*30:02; SLC13A1; ENSG00000081800; TAA
CAEVIKQEY

SEQ ID NO: 76323 - protein, 9 aa, Homo sapiens
  misc_feature: Table A; Target 76323; HLA-B*15:01; SLC13A1; ENSG00000081800; TAA
CAEVIKQEY

SEQ ID NO: 76324 - protein, 9 aa, Homo sapiens
  misc_feature: Table A; Target 76324; HLA-B*15:03; SLC13A1; ENSG00000081800; TAA
CAEVIKQEY

SEQ ID NO: 76325 - protein, 9 aa, Homo sapiens
  misc_feature: Table A; Target 76325; HLA-B*18:01; SLC13A1; ENSG00000081800; TAA
CAEVIKQEY

SEQ ID NO: 76326 - protein, 9 aa, Homo sapiens
  misc_feature: Table A; Target 76326; HLA-B*35:01; SLC13A1; ENSG00000081800; TAA
CAEVIKQEY

SEQ ID NO: 76327 - protein, 9 aa, Homo sapiens
  misc_feature: Table A; Target 76327; HLA-B*46:01; SLC13A1; ENSG00000081800; TAA
CAEVIKQEY

SEQ ID NO: 76328 - protein, 9 aa, Homo sapiens
  misc_feature: Table A; Target 76328; HLA-B*55:01; SLC13A1; ENSG00000081800; TAA
CAEVIKQEY

SEQ ID NO: 76329 - protein, 9 aa, Homo sapiens
  misc_feature: Table A; Target 76329; HLA-B*58:01; SLC13A1; ENSG00000081800; TAA
CAEVIKQEY

SEQ ID NO: 76330 - protein, 9 aa, Homo sapiens
  misc_feature: Table A; Target 76330; HLA-C*01:02; SLC13A1; ENSG00000081800; TAA
CAEVIKQEY

SEQ ID NO: 76331 - protein, 9 aa, Homo sapiens
  misc_feature: Table A; Target 76331; HLA-C*02:02; SLC13A1; ENSG00000081800; TAA
CAEVIKQEY

SEQ ID NO: 76332 - protein, 9 aa, Homo sapiens
  misc_feature: Table A; Target 76332; HLA-C*03:03; SLC13A1; ENSG00000081800; TAA
CAEVIKQEY

SEQ ID NO: 76333 - protein, 9 aa, Homo sapiens
  misc_feature: Table A; Target 76333; HLA-C*07:06; SLC13A1; ENSG00000081800; TAA
CAEVIKQEY

SEQ ID NO: 76334 - protein, 9 aa, Homo sapiens
  misc_feature: Table A; Target 76334; HLA-C*12:03; SLC13A1; ENSG00000081800; TAA
CAEVIKQEY

SEQ ID NO: 76335 - protein, 9 aa, Homo sapiens
  misc_feature: Table A; Target 76335; HLA-C*16:01; SLC13A1; ENSG00000081800; TAA
CAEVIKQEY

SEQ ID NO: 76336 - protein, 9 aa, Homo sapiens
  misc_feature: Table A; Target 76336; HLA-C*16:02; SLC13A1; ENSG00000081800; TAA
CAEVIKQEY

SEQ ID NO: 76337 - protein, 9 aa, Homo sapiens
  misc_feature: Table A; Target 76337; HLA-C*16:04; SLC13A1; ENSG00000081800; TAA
CAEVIKQEY

SEQ ID NO: 76338 - protein, 9 aa, Homo sapiens
  misc_feature: Table A; Target 76338; HLA-B*44:02; SLC13A1; ENSG00000081800; TAA
CEESGLSKW

SEQ ID NO: 76339 - protein, 9 aa, Homo sapiens
  misc_feature: Table A; Target 76339; HLA-B*44:03; SLC13A1; ENSG00000081800; TAA
CEESGLSKW

SEQ ID NO: 76340 - protein, 9 aa, Homo sapiens
  misc_feature: Table A; Target 76340; HLA-B*18:01; SLC13A1; ENSG00000081800; TAA
DESVNGHEI

SEQ ID NO: 76341 - protein, 9 aa, Homo sapiens
  misc_feature: Table A; Target 76341; HLA-B*49:01; SLC13A1; ENSG00000081800; TAA
DESVNGHEI

SEQ ID NO: 76342 - protein, 10 aa, Homo sapiens
  misc_feature: Table A; Target 76342; HLA-A*25:01; SLC13A1; ENSG00000081800; TAA
DIAILVGGGF

SEQ ID NO: 76343 - protein, 10 aa, Homo sapiens
  misc_feature: Table A; Target 76343; HLA-A*26:01; SLC13A1; ENSG00000081800; TAA
DIAILVGGGF

SEQ ID NO: 76344 - protein, 8 aa, Homo sapiens
  misc_feature: Table A; Target 76344; HLA-A*25:01; SLC13A1; ENSG00000081800; TAA
DLYTYPSW

SEQ ID NO: 76345 - protein, 8 aa, Homo sapiens
  misc_feature: Table A; Target 76345; HLA-B*51:01; SLC13A1; ENSG00000081800; TAA
DSTVALLI

SEQ ID NO: 76346 - protein, 8 aa, Homo sapiens
  misc_feature: Table A; Target 76346; HLA-A*33:03; SLC13A1; ENSG00000081800; TAA
DYSPLITW

SEQ ID NO: 76347 - protein, 9 aa, Homo sapiens
  misc_feature: Table A; Target 76347; HLA-A*33:01; SLC13A1; ENSG00000081800; TAA
DYSPLITWK

SEQ ID NO: 76348 - protein, 9 aa, Homo sapiens
  misc_feature: Table A; Target 76348; HLA-A*33:03; SLC13A1; ENSG00000081800; TAA
DYSPLITWK

SEQ ID NO: 76349 - protein, 9 aa, Homo sapiens
  misc_feature: Table A; Target 76349; HLA-B*55:01; SLC13A1; ENSG00000081800; TAA
EAEVEATQM

SEQ ID NO: 76350 - protein, 9 aa, Homo sapiens
  misc_feature: Table A; Target 76350; HLA-C*05:01; SLC13A1; ENSG00000081800; TAA
EAEVEATQM

SEQ ID NO: 76351 - protein, 11 aa, Homo sapiens
  misc_feature: Table A; Target 76351; HLA-A*01:01; SLC13A1; ENSG00000081800; TAA
EAEVEATQMTY

SEQ ID NO: 76352 - protein, 11 aa, Homo sapiens
  misc_feature: Table A; Target 76352; HLA-B*35:01; SLC13A1; ENSG00000081800; TAA
EAEVEATQMTY

SEQ ID NO: 76353 - protein, 9 aa, Homo sapiens
  misc_feature: Table A; Target 76353; HLA-A*25:01; SLC13A1; ENSG00000081800; TAA
EAIHVNPLY

SEQ ID NO: 76354 - protein, 9 aa, Homo sapiens
  misc_feature: Table A; Target 76354; HLA-A*26:01; SLC13A1; ENSG00000081800; TAA
EAIHVNPLY

SEQ ID NO: 76355 - protein, 9 aa, Homo sapiens
  misc_feature: Table A; Target 76355; HLA-A*29:02; SLC13A1; ENSG00000081800; TAA
EAIHVNPLY

SEQ ID NO: 76356 - protein, 9 aa, Homo sapiens
  misc_feature: Table A; Target 76356; HLA-A*30:02; SLC13A1; ENSG00000081800; TAA
EAIHVNPLY

SEQ ID NO: 76357 - protein, 9 aa, Homo sapiens
  misc_feature: Table A; Target 76357; HLA-B*35:01; SLC13A1; ENSG00000081800; TAA
EAIHVNPLY

SEQ ID NO: 76358 - protein, 9 aa, Homo sapiens
  misc_feature: Table A; Target 76358; HLA-B*54:01; SLC13A1; ENSG00000081800; TAA
EALPLSVTA

SEQ ID NO: 76359 - protein, 9 aa, Homo sapiens
  misc_feature: Table A; Target 76359; HLA-B*56:01; SLC13A1; ENSG00000081800; TAA
EALPLSVTA

SEQ ID NO: 76360 - protein, 10 aa, Homo sapiens
  misc_feature: Table A; Target 76360; HLA-A*25:01; SLC13A1; ENSG00000081800; TAA
EALPLSVTAL

SEQ ID NO: 76361 - protein, 8 aa, Homo sapiens
  misc_feature: Table A; Target 76361; HLA-B*51:01; SLC13A1; ENSG00000081800; TAA
EAVVQQII

SEQ ID NO: 76362 - protein, 8 aa, Homo sapiens
  misc_feature: Table A; Target 76362; HLA-B*44:02; SLC13A1; ENSG00000081800; TAA
EESGLSKW

SEQ ID NO: 76363 - protein, 8 aa, Homo sapiens
  misc_feature: Table A; Target 76363; HLA-B*44:03; SLC13A1; ENSG00000081800; TAA
EESGLSKW

SEQ ID NO: 76364 - protein, 9 aa, Homo sapiens
  misc_feature: Table A; Target 76364; HLA-B*44:02; SLC13A1; ENSG00000081800; TAA
EESGLSKWI

SEQ ID NO: 76365 - protein, 9 aa, Homo sapiens
  misc_feature: Table A; Target 76365; HLA-A*68:02; SLC13A1; ENSG00000081800; TAA
EIVTLVLFI

SEQ ID NO: 76366 - protein, 9 aa, Homo sapiens
  misc_feature: Table A; Target 76366; HLA-B*15:03; SLC13A1; ENSG00000081800; TAA
EKTKPVPGY

SEQ ID NO: 76367 - protein, 11 aa, Homo sapiens
  misc_feature: Table A; Target 76367; HLA-A*33:03; SLC13A1; ENSG00000081800; TAA
ESVNGHEINER

SEQ ID NO: 76368 - protein, 11 aa, Homo sapiens
  misc_feature: Table A; Target 76368; HLA-A*68:01; SLC13A1; ENSG00000081800; TAA
ESVNGHEINER

SEQ ID NO: 76369 - protein, 11 aa, Homo sapiens
  misc_feature: Table A; Target 76369; HLA-C*07:06; SLC13A1; ENSG00000081800; TAA
ESVNGHEINER

SEQ ID NO: 76370 - protein, 9 aa, Homo sapiens
  misc_feature: Table A; Target 76370; HLA-A*25:01; SLC13A1; ENSG00000081800; TAA
EVASNPATI

SEQ ID NO: 76371 - protein, 9 aa, Homo sapiens
  misc_feature: Table A; Target 76371; HLA-A*26:01; SLC13A1; ENSG00000081800; TAA
EVASNPATI

SEQ ID NO: 76372 - protein, 9 aa, Homo sapiens
  misc_feature: Table A; Target 76372; HLA-A*68:01; SLC13A1; ENSG00000081800; TAA
EVASNPATI

SEQ ID NO: 76373 - protein, 9 aa, Homo sapiens
  misc_feature: Table A; Target 76373; HLA-A*68:02; SLC13A1; ENSG00000081800; TAA
EVASNPATI

SEQ ID NO: 76374 - protein, 11 aa, Homo sapiens
  misc_feature: Table A; Target 76374; HLA-A*25:01; SLC13A1; ENSG00000081800; TAA
EVASNPATITL

SEQ ID NO: 76375 - protein, 11 aa, Homo sapiens
  misc_feature: Table A; Target 76375; HLA-A*26:01; SLC13A1; ENSG00000081800; TAA
EVASNPATITL

SEQ ID NO: 76376 - protein, 11 aa, Homo sapiens
  misc_feature: Table A; Target 76376; HLA-A*68:01; SLC13A1; ENSG00000081800; TAA
EVASNPATITL

SEQ ID NO: 76377 - protein, 11 aa, Homo sapiens
  misc_feature: Table A; Target 76377; HLA-A*68:02; SLC13A1; ENSG00000081800; TAA
EVASNPATITL

SEQ ID NO: 76378 - protein, 11 aa, Homo sapiens
  misc_feature: Table A; Target 76378; HLA-C*07:06; SLC13A1; ENSG00000081800; TAA
EVASNPATITL

SEQ ID NO: 76379 - protein, 9 aa, Homo sapiens
  misc_feature: Table A; Target 76379; HLA-A*01:01; SLC13A1; ENSG00000081800; TAA
EVEATQMTY

SEQ ID NO: 76380 - protein, 9 aa, Homo sapiens
  misc_feature: Table A; Target 76380; HLA-A*25:01; SLC13A1; ENSG00000081800; TAA
EVEATQMTY

SEQ ID NO: 76381 - protein, 9 aa, Homo sapiens
  misc_feature: Table A; Target 76381; HLA-A*26:01; SLC13A1; ENSG00000081800; TAA
EVEATQMTY

SEQ ID NO: 76382 - protein, 9 aa, Homo sapiens
  misc_feature: Table A; Target 76382; HLA-A*30:02; SLC13A1; ENSG00000081800; TAA
EVEATQMTY

SEQ ID NO: 76383 - protein, 9 aa, Homo sapiens
  misc_feature: Table A; Target 76383; HLA-A*33:03; SLC13A1; ENSG00000081800; TAA
EVEATQMTY

SEQ ID NO: 76384 - protein, 9 aa, Homo sapiens
  misc_feature: Table A; Target 76384; HLA-A*68:01; SLC13A1; ENSG00000081800; TAA
EVEATQMTY

SEQ ID NO: 76385 - protein, 9 aa, Homo sapiens
  misc_feature: Table A; Target 76385; HLA-B*18:01; SLC13A1; ENSG00000081800; TAA
EVEATQMTY

SEQ ID NO: 76386 - protein, 9 aa, Homo sapiens
  misc_feature: Table A; Target 76386; HLA-B*35:01; SLC13A1; ENSG00000081800; TAA
EVEATQMTY

SEQ ID NO: 76387 - protein, 9 aa, Homo sapiens
  misc_feature: Table A; Target 76387; HLA-C*07:06; SLC13A1; ENSG00000081800; TAA
EVEATQMTY

SEQ ID NO: 76388 - protein, 10 aa, Homo sapiens
  misc_feature: Table A; Target 76388; HLA-A*25:01; SLC13A1; ENSG00000081800; TAA
EVEATQMTYF

SEQ ID NO: 76389 - protein, 10 aa, Homo sapiens
  misc_feature: Table A; Target 76389; HLA-A*26:01; SLC13A1; ENSG00000081800; TAA
EVEATQMTYF

SEQ ID NO: 76390 - protein, 9 aa, Homo sapiens
  misc_feature: Table A; Target 76390; HLA-A*33:03; SLC13A1; ENSG00000081800; TAA
EVIKQEYQK

SEQ ID NO: 76391 - protein, 9 aa, Homo sapiens
  misc_feature: Table A; Target 76391; HLA-A*68:01; SLC13A1; ENSG00000081800; TAA
EVIKQEYQK

SEQ ID NO: 76392 - protein, 10 aa, Homo sapiens
  misc_feature: Table A; Target 76392; HLA-A*25:01; SLC13A1; ENSG00000081800; TAA
EVIKQEYQKL

SEQ ID NO: 76393 - protein, 10 aa, Homo sapiens
  misc_feature: Table A; Target 76393; HLA-A*26:01; SLC13A1; ENSG00000081800; TAA
EVIKQEYQKL

SEQ ID NO: 76394 - protein, 10 aa, Homo sapiens
  misc_feature: Table A; Target 76394; HLA-A*68:01; SLC13A1; ENSG00000081800; TAA
EVIKQEYQKL

SEQ ID NO: 76395 - protein, 9 aa, Homo sapiens
  misc_feature: Table A; Target 76395; HLA-A*33:03; SLC13A1; ENSG00000081800; TAA
EYQKLGPIR

SEQ ID NO: 76396 - protein, 9 aa, Homo sapiens
  misc_feature: Table A; Target 76396; HLA-A*01:01; SLC13A1; ENSG00000081800; TAA
FAEYFNTRY

SEQ ID NO: 76397 - protein, 8 aa, Homo sapiens
  misc_feature: Table A; Target 76397; HLA-B*54:01; SLC13A1; ENSG00000081800; TAA
FAFLLPVA

SEQ ID NO: 76398 - protein, 8 aa, Homo sapiens
  misc_feature: Table A; Target 76398; HLA-B*56:01; SLC13A1; ENSG00000081800; TAA
FAFLLPVA

SEQ ID NO: 76399 - protein, 9 aa, Homo sapiens
  misc_feature: Table A; Target 76399; HLA-A*23:01; SLC13A1; ENSG00000081800; TAA
FATDSTVAL

SEQ ID NO: 76400 - protein, 9 aa, Homo sapiens
  misc_feature: Table A; Target 76400; HLA-A*30:01; SLC13A1; ENSG00000081800; TAA
FATDSTVAL

SEQ ID NO: 76401 - protein, 9 aa, Homo sapiens
  misc_feature: Table A; Target 76401; HLA-B*15:03; SLC13A1; ENSG00000081800; TAA
FATDSTVAL

SEQ ID NO: 76402 - protein, 9 aa, Homo sapiens
  misc_feature: Table A; Target 76402; HLA-B*27:05; SLC13A1; ENSG00000081800; TAA
FATDSTVAL

SEQ ID NO: 76403 - protein, 9 aa, Homo sapiens
  misc_feature: Table A; Target 76403; HLA-B*35:01; SLC13A1; ENSG00000081800; TAA
FATDSTVAL

SEQ ID NO: 76404 - protein, 9 aa, Homo sapiens
  misc_feature: Table A; Target 76404; HLA-B*35:03; SLC13A1; ENSG00000081800; TAA
FATDSTVAL

SEQ ID NO: 76405 - protein, 9 aa, Homo sapiens
  misc_feature: Table A; Target 76405; HLA-B*39:01; SLC13A1; ENSG00000081800; TAA
FATDSTVAL

SEQ ID NO: 76406 - protein, 9 aa, Homo sapiens
  misc_feature: Table A; Target 76406; HLA-B*40:01; SLC13A1; ENSG00000081800; TAA
FATDSTVAL

SEQ ID NO: 76407 - protein, 9 aa, Homo sapiens
  misc_feature: Table A; Target 76407; HLA-B*46:01; SLC13A1; ENSG00000081800; TAA
FATDSTVAL

SEQ ID NO: 76408 - protein, 9 aa, Homo sapiens
  misc_feature: Table A; Target 76408; HLA-C*01:02; SLC13A1; ENSG00000081800; TAA
FATDSTVAL

SEQ ID NO: 76409 - protein, 9 aa, Homo sapiens
  misc_feature: Table A; Target 76409; HLA-C*02:02; SLC13A1; ENSG00000081800; TAA
FATDSTVAL

SEQ ID NO: 76410 - protein, 9 aa, Homo sapiens
  misc_feature: Table A; Target 76410; HLA-C*03:03; SLC13A1; ENSG00000081800; TAA
FATDSTVAL

SEQ ID NO: 76411 - protein, 9 aa, Homo sapiens
  misc_feature: Table A; Target 76411; HLA-C*03:04; SLC13A1; ENSG00000081800; TAA
FATDSTVAL

SEQ ID NO: 76412 - protein, 9 aa, Homo sapiens
  misc_feature: Table A; Target 76412; HLA-C*05:01; SLC13A1; ENSG00000081800; TAA
FATDSTVAL

SEQ ID NO: 76413 - protein, 9 aa, Homo sapiens
  misc_feature: Table A; Target 76413; HLA-C*07:04; SLC13A1; ENSG00000081800; TAA
FATDSTVAL

SEQ ID NO: 76414 - protein, 9 aa, Homo sapiens
  misc_feature: Table A; Target 76414; HLA-C*12:03; SLC13A1; ENSG00000081800; TAA
FATDSTVAL

SEQ ID NO: 76415 - protein, 9 aa, Homo sapiens
  misc_feature: Table A; Target 76415; HLA-C*14:02; SLC13A1; ENSG00000081800; TAA
FATDSTVAL

SEQ ID NO: 76416 - protein, 9 aa, Homo sapiens
  misc_feature: Table A; Target 76416; HLA-C*16:01; SLC13A1; ENSG00000081800; TAA
FATDSTVAL

SEQ ID NO: 76417 - protein, 9 aa, Homo sapiens
  misc_feature: Table A; Target 76417; HLA-C*16:02; SLC13A1; ENSG00000081800; TAA
FATDSTVAL

SEQ ID NO: 76418 - protein, 9 aa, Homo sapiens
  misc_feature: Table A; Target 76418; HLA-C*16:04; SLC13A1; ENSG00000081800; TAA
FATDSTVAL

SEQ ID NO: 76419 - protein, 9 aa, Homo sapiens
  misc_feature: Table A; Target 76419; HLA-A*23:01; SLC13A1; ENSG00000081800; TAA
FFLIPAKTL

SEQ ID NO: 76420 - protein, 8 aa, Homo sapiens
  misc_feature: Table A; Target 76420; HLA-A*29:02; SLC13A1; ENSG00000081800; TAA
FFSYILVY

SEQ ID NO: 76421 - protein, 8 aa, Homo sapiens
  misc_feature: Table A; Target 76421; HLA-A*02:04; SLC13A1; ENSG00000081800; TAA
FLFVVFTV

SEQ ID NO: 76422 - protein, 9 aa, Homo sapiens
  misc_feature: Table A; Target 76422; HLA-A*02:03; SLC13A1; ENSG00000081800; TAA
FLFVVFTVL

SEQ ID NO: 76423 - protein, 9 aa, Homo sapiens
  misc_feature: Table A; Target 76423; HLA-A*02:04; SLC13A1; ENSG00000081800; TAA
FLFVVFTVL

SEQ ID NO: 76424 - protein, 9 aa, Homo sapiens
  misc_feature: Table A; Target 76424; HLA-A*02:07; SLC13A1; ENSG00000081800; TAA
FLFVVFTVL

SEQ ID NO: 76425 - protein, 9 aa, Homo sapiens
  misc_feature: Table A; Target 76425; HLA-A*02:07; SLC13A1; ENSG00000081800; TAA
FLPILSPLA

SEQ ID NO: 76426 - protein, 9 aa, Homo sapiens
  misc_feature: Table A; Target 76426; HLA-A*02:07; SLC13A1; ENSG00000081800; TAA
FMPWDIAIL

SEQ ID NO: 76427 - protein, 9 aa, Homo sapiens
  misc_feature: Table A; Target 76427; HLA-B*35:01; SLC13A1; ENSG00000081800; TAA
FPAALIILL

SEQ ID NO: 76428 - protein, 9 aa, Homo sapiens
  misc_feature: Table A; Target 76428; HLA-B*35:03; SLC13A1; ENSG00000081800; TAA
FPAALIILL

SEQ ID NO: 76429 - protein, 11 aa, Homo sapiens
  misc_feature: Table A; Target 76429; HLA-B*57:01; SLC13A1; ENSG00000081800; TAA
FSRDPGFVPGW

SEQ ID NO: 76430 - protein, 9 aa, Homo sapiens
  misc_feature: Table A; Target 76430; HLA-A*68:02; SLC13A1; ENSG00000081800; TAA
FTFSFPAAL

SEQ ID NO: 76431 - protein, 9 aa, Homo sapiens
  misc_feature: Table A; Target 76431; HLA-C*02:02; SLC13A1; ENSG00000081800; TAA
FTFSFPAAL

SEQ ID NO: 76432 - protein, 9 aa, Homo sapiens
  misc_feature: Table A; Target 76432; HLA-C*03:03; SLC13A1; ENSG00000081800; TAA
FTFSFPAAL

SEQ ID NO: 76433 - protein, 9 aa, Homo sapiens
  misc_feature: Table A; Target 76433; HLA-C*03:04; SLC13A1; ENSG00000081800; TAA
FTFSFPAAL

SEQ ID NO: 76434 - protein, 8 aa, Homo sapiens
  misc_feature: Table A; Target 76434; HLA-B*18:01; SLC13A1; ENSG00000081800; TAA
GEIVAFDY

SEQ ID NO: 76435 - protein, 8 aa, Homo sapiens
  misc_feature: Table A; Target 76435; HLA-C*14:02; SLC13A1; ENSG00000081800; TAA
GFMSSTAF

SEQ ID NO: 76436 - protein, 9 aa, Homo sapiens
  misc_feature: Table A; Target 76436; HLA-C*14:02; SLC13A1; ENSG00000081800; TAA
GFMSSTAFL

SEQ ID NO: 76437 - protein, 9 aa, Homo sapiens
  misc_feature: Table A; Target 76437; HLA-B*15:03; SLC13A1; ENSG00000081800; TAA
GKISSKVEL

SEQ ID NO: 76438 - protein, 9 aa, Homo sapiens
  misc_feature: Table A; Target 76438; HLA-A*02:01; SLC13A1; ENSG00000081800; TAA
GLGVNIVGV

SEQ ID NO: 76439 - protein, 9 aa, Homo sapiens
  misc_feature: Table A; Target 76439; HLA-A*02:03; SLC13A1; ENSG00000081800; TAA
GLGVNIVGV

SEQ ID NO: 76440 - protein, 9 aa, Homo sapiens
  misc_feature: Table A; Target 76440; HLA-A*02:04; SLC13A1; ENSG00000081800; TAA
GLGVNIVGV

SEQ ID NO: 76441 - protein, 9 aa, Homo sapiens
  misc_feature: Table A; Target 76441; HLA-B*13:02; SLC13A1; ENSG00000081800; TAA
GLGVNIVGV

SEQ ID NO: 76442 - protein, 9 aa, Homo sapiens
  misc_feature: Table A; Target 76442; HLA-B*55:01; SLC13A1; ENSG00000081800; TAA
GLGVNIVGV

SEQ ID NO: 76443 - protein, 9 aa, Homo sapiens
  misc_feature: Table A; Target 76443; HLA-A*03:01; SLC13A1; ENSG00000081800; TAA
GLSKWIGNK

SEQ ID NO: 76444 - protein, 9 aa, Homo sapiens
  misc_feature: Table A; Target 76444; HLA-B*13:02; SLC13A1; ENSG00000081800; TAA
GSTNHGLEI

SEQ ID NO: 76445 - protein, 11 aa, Homo sapiens
  misc_feature: Table A; Target 76445; HLA-A*01:01; SLC13A1; ENSG00000081800; TAA
GTSTNLIFAEY

SEQ ID NO: 76446 - protein, 11 aa, Homo sapiens
  misc_feature: Table A; Target 76446; HLA-A*29:02; SLC13A1; ENSG00000081800; TAA
GTSTNLIFAEY

SEQ ID NO: 76447 - protein, 11 aa, Homo sapiens
  misc_feature: Table A; Target 76447; HLA-A*30:02; SLC13A1; ENSG00000081800; TAA
GTSTNLIFAEY

SEQ ID NO: 76448 - protein, 9 aa, Homo sapiens
  misc_feature: Table A; Target 76448; HLA-B*13:02; SLC13A1; ENSG00000081800; TAA
GVAVVMLGI

SEQ ID NO: 76449 - protein, 9 aa, Homo sapiens
  misc_feature: Table A; Target 76449; HLA-B*13:02; SLC13A1; ENSG00000081800; TAA
GVICLATSI

SEQ ID NO: 76450 - protein, 9 aa, Homo sapiens
  misc_feature: Table A; Target 76450; HLA-A*32:01; SLC13A1; ENSG00000081800; TAA
GVNIVGVAV

SEQ ID NO: 76451 - protein, 9 aa, Homo sapiens
  misc_feature: Table A; Target 76451; HLA-B*13:02; SLC13A1; ENSG00000081800; TAA
GVNIVGVAV

SEQ ID NO: 76452 - protein, 9 aa, Homo sapiens
  misc_feature: Table A; Target 76452; HLA-B*46:01; SLC13A1; ENSG00000081800; TAA
GVNIVGVAV

SEQ ID NO: 76453 - protein, 9 aa, Homo sapiens
  misc_feature: Table A; Target 76453; HLA-A*25:01; SLC13A1; ENSG00000081800; TAA
HTKEAECAY

SEQ ID NO: 76454 - protein, 9 aa, Homo sapiens
  misc_feature: Table A; Target 76454; HLA-A*26:01; SLC13A1; ENSG00000081800; TAA
HTKEAECAY

SEQ ID NO: 76455 - protein, 9 aa, Homo sapiens
  misc_feature: Table A; Target 76455; HLA-A*30:02; SLC13A1; ENSG00000081800; TAA
HTKEAECAY

SEQ ID NO: 76456 - protein, 9 aa, Homo sapiens
  misc_feature: Table A; Target 76456; HLA-B*46:01; SLC13A1; ENSG00000081800; TAA
HTKEAECAY

SEQ ID NO: 76457 - protein, 9 aa, Homo sapiens
  misc_feature: Table A; Target 76457; HLA-B*51:01; SLC13A1; ENSG00000081800; TAA
IAEAVVQQI

SEQ ID NO: 76458 - protein, 9 aa, Homo sapiens
  misc_feature: Table A; Target 76458; HLA-C*05:01; SLC13A1; ENSG00000081800; TAA
IAEAVVQQI

SEQ ID NO: 76459 - protein, 9 aa, Homo sapiens
  misc_feature: Table A; Target 76459; HLA-A*23:01; SLC13A1; ENSG00000081800; TAA
IAILVGGGF

SEQ ID NO: 76460 - protein, 9 aa, Homo sapiens
  misc_feature: Table A; Target 76460; HLA-B*46:01; SLC13A1; ENSG00000081800; TAA
IAILVGGGF

SEQ ID NO: 76461 - protein, 9 aa, Homo sapiens
  misc_feature: Table A; Target 76461; HLA-C*03:04; SLC13A1; ENSG00000081800; TAA
IAILVGGGF

SEQ ID NO: 76462 - protein, 11 aa, Homo sapiens
  misc_feature: Table A; Target 76462; HLA-C*03:03; SLC13A1; ENSG00000081800; TAA
IAILVGGGFAL

SEQ ID NO: 76463 - protein, 11 aa, Homo sapiens
  misc_feature: Table A; Target 76463; HLA-C*03:04; SLC13A1; ENSG00000081800; TAA
IAILVGGGFAL

SEQ ID NO: 76464 - protein, 9 aa, Homo sapiens
  misc_feature: Table A; Target 76464; HLA-B*51:01; SLC13A1; ENSG00000081800; TAA
IALKMVMMV

SEQ ID NO: 76465 - protein, 8 aa, Homo sapiens
  misc_feature: Table A; Target 76465; HLA-B*37:01; SLC13A1; ENSG00000081800; TAA
IDMVKAGL

SEQ ID NO: 76466 - protein, 9 aa, Homo sapiens
  misc_feature: Table A; Target 76466; HLA-A*33:03; SLC13A1; ENSG00000081800; TAA
IFAEYFNTR

SEQ ID NO: 76467 - protein, 10 aa, Homo sapiens
  misc_feature: Table A; Target 76467; HLA-A*29:02; SLC13A1; ENSG00000081800; TAA
IFAEYFNTRY

SEQ ID NO: 76468 - protein, 11 aa, Homo sapiens
  misc_feature: Table A; Target 76468; HLA-A*23:01; SLC13A1; ENSG00000081800; TAA
ILIPSTLCTSF

SEQ ID NO: 76469 - protein, 9 aa, Homo sapiens
  misc_feature: Table A; Target 76469; HLA-B*13:02; SLC13A1; ENSG00000081800; TAA
ILSPLAEAI

SEQ ID NO: 76470 - protein, 9 aa, Homo sapiens
  misc_feature: Table A; Target 76470; HLA-A*02:01; SLC13A1; ENSG00000081800; TAA
ILVGGGFAL

SEQ ID NO: 76471 - protein, 9 aa, Homo sapiens
  misc_feature: Table A; Target 76471; HLA-A*02:04; SLC13A1; ENSG00000081800; TAA
ILVGGGFAL

SEQ ID NO: 76472 - protein, 9 aa, Homo sapiens
  misc_feature: Table A; Target 76472; HLA-A*23:01; SLC13A1; ENSG00000081800; TAA
ILVGGGFAL

SEQ ID NO: 76473 - protein, 9 aa, Homo sapiens
  misc_feature: Table A; Target 76473; HLA-B*35:03; SLC13A1; ENSG00000081800; TAA
ILVGGGFAL

SEQ ID NO: 76474 - protein, 9 aa, Homo sapiens
  misc_feature: Table A; Target 76474; HLA-C*03:03; SLC13A1; ENSG00000081800; TAA
ILVGGGFAL

SEQ ID NO: 76475 - protein, 9 aa, Homo sapiens
  misc_feature: Table A; Target 76475; HLA-C*03:04; SLC13A1; ENSG00000081800; TAA
ILVGGGFAL

SEQ ID NO: 76476 - protein, 8 aa, Homo sapiens
  misc_feature: Table A; Target 76476; HLA-B*51:01; SLC13A1; ENSG00000081800; TAA
IPAKTLTK

SEQ ID NO: 76477 - protein, 11 aa, Homo sapiens
  misc_feature: Table A; Target 76477; HLA-B*56:01; SLC13A1; ENSG00000081800; TAA
IPAKTLTKTTP

SEQ ID NO: 76478 - protein, 9 aa, Homo sapiens
  misc_feature: Table A; Target 76478; HLA-B*18:01; SLC13A1; ENSG00000081800; TAA
IPSTLCTSF

SEQ ID NO: 76479 - protein, 9 aa, Homo sapiens
  misc_feature: Table A; Target 76479; HLA-B*35:01; SLC13A1; ENSG00000081800; TAA
IPSTLCTSF

SEQ ID NO: 76480 - protein, 9 aa, Homo sapiens
  misc_feature: Table A; Target 76480; HLA-B*55:01; SLC13A1; ENSG00000081800; TAA
IPSTLCTSF

SEQ ID NO: 76481 - protein, 9 aa, Homo sapiens
  misc_feature: Table A; Target 76481; HLA-C*03:04; SLC13A1; ENSG00000081800; TAA
ISSLMVTSL

SEQ ID NO: 76482 - protein, 9 aa, Homo sapiens
  misc_feature: Table A; Target 76482; HLA-B*57:01; SLC13A1; ENSG00000081800; TAA
ITWKEFQSF

SEQ ID NO: 76483 - protein, 9 aa, Homo sapiens
  misc_feature: Table A; Target 76483; HLA-A*03:01; SLC13A1; ENSG00000081800; TAA
IVFSYGHLK

SEQ ID NO: 76484 - protein, 8 aa, Homo sapiens
  misc_feature: Table A; Target 76484; HLA-C*14:02; SLC13A1; ENSG00000081800; TAA
IVGVAVVM

SEQ ID NO: 76485 - protein, 10 aa, Homo sapiens
  misc_feature: Table A; Target 76485; HLA-A*29:02; SLC13A1; ENSG00000081800; TAA
IVPMFDLYTY

SEQ ID NO: 76486 - protein, 11 aa, Homo sapiens
  misc_feature: Table A; Target 76486; HLA-A*30:02; SLC13A1; ENSG00000081800; TAA
KACAEVIKQEY

SEQ ID NO: 76487 - protein, 9 aa, Homo sapiens
  misc_feature: Table A; Target 76487; HLA-A*30:01; SLC13A1; ENSG00000081800; TAA
KEAECAYTL

SEQ ID NO: 76488 - protein, 9 aa, Homo sapiens
  misc_feature: Table A; Target 76488; HLA-B*37:01; SLC13A1; ENSG00000081800; TAA
KEAECAYTL

SEQ ID NO: 76489 - protein, 9 aa, Homo sapiens
  misc_feature: Table A; Target 76489; HLA-B*40:01; SLC13A1; ENSG00000081800; TAA
KEAECAYTL

SEQ ID NO: 76490 - protein, 9 aa, Homo sapiens
  misc_feature: Table A; Target 76490; HLA-B*40:02; SLC13A1; ENSG00000081800; TAA
KEAECAYTL

SEQ ID NO: 76491 - protein, 9 aa, Homo sapiens
  misc_feature: Table A; Target 76491; HLA-B*44:02; SLC13A1; ENSG00000081800; TAA
KEAECAYTL

SEQ ID NO: 76492 - protein, 9 aa, Homo sapiens
  misc_feature: Table A; Target 76492; HLA-B*44:03; SLC13A1; ENSG00000081800; TAA
KEAECAYTL

SEQ ID NO: 76493 - protein, 9 aa, Homo sapiens
  misc_feature: Table A; Target 76493; HLA-B*49:01; SLC13A1; ENSG00000081800; TAA
KEAECAYTL

SEQ ID NO: 76494 - protein, 10 aa, Homo sapiens
  misc_feature: Table A; Target 76494; HLA-A*30:02; SLC13A1; ENSG00000081800; TAA
KEKTKPVPGY

SEQ ID NO: 76495 - protein, 9 aa, Homo sapiens
  misc_feature: Table A; Target 76495; HLA-A*29:02; SLC13A1; ENSG00000081800; TAA
KFFSYILVY

SEQ ID NO: 76496 - protein, 10 aa, Homo sapiens
  misc_feature: Table A; Target 76496; HLA-A*03:01; SLC13A1; ENSG00000081800; TAA
KISSKVELEK

SEQ ID NO: 76497 - protein, 10 aa, Homo sapiens
  misc_feature: Table A; Target 76497; HLA-A*03:02; SLC13A1; ENSG00000081800; TAA
KISSKVELEK

SEQ ID NO: 76498 - protein, 8 aa, Homo sapiens
  misc_feature: Table A; Target 76498; HLA-A*30:02; SLC13A1; ENSG00000081800; TAA
KTKPVPGY

SEQ ID NO: 76499 - protein, 8 aa, Homo sapiens
  misc_feature: Table A; Target 76499; HLA-A*32:01; SLC13A1; ENSG00000081800; TAA
KTKPVPGY

SEQ ID NO: 76500 - protein, 8 aa, Homo sapiens
  misc_feature: Table A; Target 76500; HLA-B*58:01; SLC13A1; ENSG00000081800; TAA
KTKPVPGY

SEQ ID NO: 76501 - protein, 10 aa, Homo sapiens
  misc_feature: Table A; Target 76501; HLA-A*31:01; SLC13A1; ENSG00000081800; TAA
KTKPVPGYNN

SEQ ID NO: 76502 - protein, 11 aa, Homo sapiens
  misc_feature: Table A; Target 76502; HLA-B*57:01; SLC13A1; ENSG00000081800; TAA
KTTPTGEIVAF

SEQ ID NO: 76503 - protein, 11 aa, Homo sapiens
  misc_feature: Table A; Target 76503; HLA-B*58:01; SLC13A1; ENSG00000081800; TAA
KTTPTGEIVAF

SEQ ID NO: 76504 - protein, 10 aa, Homo sapiens
  misc_feature: Table A; Target 76504; HLA-B*58:01; SLC13A1; ENSG00000081800; TAA
KVIDMVKAGL

SEQ ID NO: 76505 - protein, 8 aa, Homo sapiens
  misc_feature: Table A; Target 76505; HLA-B*58:01; SLC13A1; ENSG00000081800; TAA
LATSIEKW

SEQ ID NO: 76506 - protein, 9 aa, Homo sapiens
  misc_feature: Table A; Target 76506; HLA-B*46:01; SLC13A1; ENSG00000081800; TAA
LGFMSSTAF

SEQ ID NO: 76507 - protein, 9 aa, Homo sapiens
  misc_feature: Table A; Target 76507; HLA-C*02:02; SLC13A1; ENSG00000081800; TAA
LGFMSSTAF

SEQ ID NO: 76508 - protein, 9 aa, Homo sapiens
  misc_feature: Table A; Target 76508; HLA-A*02:04; SLC13A1; ENSG00000081800; TAA
LLIGLLFFL

SEQ ID NO: 76509 - protein, 9 aa, Homo sapiens
  misc_feature: Table A; Target 76509; HLA-A*02:04; SLC13A1; ENSG00000081800; TAA
LLLIGVICL

SEQ ID NO: 76510 - protein, 10 aa, Homo sapiens
  misc_feature: Table A; Target 76510; HLA-A*02:07; SLC13A1; ENSG00000081800; TAA
LLPSLMLPMF

SEQ ID NO: 76511 - protein, 9 aa, Homo sapiens
  misc_feature: Table A; Target 76511; HLA-A*02:01; SLC13A1; ENSG00000081800; TAA
LMVTSLTEV

SEQ ID NO: 76512 - protein, 9 aa, Homo sapiens
  misc_feature: Table A; Target 76512; HLA-A*02:03; SLC13A1; ENSG00000081800; TAA
LMVTSLTEV

SEQ ID NO: 76513 - protein, 9 aa, Homo sapiens
  misc_feature: Table A; Target 76513; HLA-A*02:07; SLC13A1; ENSG00000081800; TAA
LMVTSLTEV

SEQ ID NO: 76514 - protein, 9 aa, Homo sapiens
  misc_feature: Table A; Target 76514; HLA-B*46:01; SLC13A1; ENSG00000081800; TAA
LMVTSLTEV

SEQ ID NO: 76515 - protein, 9 aa, Homo sapiens
  misc_feature: Table A; Target 76515; HLA-B*55:01; SLC13A1; ENSG00000081800; TAA
LMVTSLTEV

SEQ ID NO: 76516 - protein, 9 aa, Homo sapiens
  misc_feature: Table A; Target 76516; HLA-B*51:01; SLC13A1; ENSG00000081800; TAA
LPAWLIILI

SEQ ID NO: 76517 - protein, 8 aa, Homo sapiens
  misc_feature: Table A; Target 76517; HLA-B*54:01; SLC13A1; ENSG00000081800; TAA
LPILSPLA

SEQ ID NO: 76518 - protein, 8 aa, Homo sapiens
  misc_feature: Table A; Target 76518; HLA-B*56:01; SLC13A1; ENSG00000081800; TAA
LPILSPLA

SEQ ID NO: 76519 - protein, 10 aa, Homo sapiens
  misc_feature: Table A; Target 76519; HLA-B*54:01; SLC13A1; ENSG00000081800; TAA
LPILSPLAEA

SEQ ID NO: 76520 - protein, 10 aa, Homo sapiens
  misc_feature: Table A; Target 76520; HLA-B*56:01; SLC13A1; ENSG00000081800; TAA
LPILSPLAEA

SEQ ID NO: 76521 - protein, 9 aa, Homo sapiens
  misc_feature: Table A; Target 76521; HLA-B*51:01; SLC13A1; ENSG00000081800; TAA
LPLPIVLHT

SEQ ID NO: 76522 - protein, 8 aa, Homo sapiens
  misc_feature: Table A; Target 76522; HLA-B*07:02; SLC13A1; ENSG00000081800; TAA
LPLSVTAL

SEQ ID NO: 76523 - protein, 8 aa, Homo sapiens
  misc_feature: Table A; Target 76523; HLA-B*35:01; SLC13A1; ENSG00000081800; TAA
LPLSVTAL

SEQ ID NO: 76524 - protein, 8 aa, Homo sapiens
  misc_feature: Table A; Target 76524; HLA-B*35:03; SLC13A1; ENSG00000081800; TAA
LPLSVTAL

SEQ ID NO: 76525 - protein, 8 aa, Homo sapiens
  misc_feature: Table A; Target 76525; HLA-B*51:01; SLC13A1; ENSG00000081800; TAA
LPLSVTAL

SEQ ID NO: 76526 - protein, 9 aa, Homo sapiens
  misc_feature: Table A; Target 76526; HLA-B*35:03; SLC13A1; ENSG00000081800; TAA
LPLSVTALL

SEQ ID NO: 76527 - protein, 9 aa, Homo sapiens
  misc_feature: Table A; Target 76527; HLA-B*54:01; SLC13A1; ENSG00000081800; TAA
LPVANPPNA

SEQ ID NO: 76528 - protein, 9 aa, Homo sapiens
  misc_feature: Table A; Target 76528; HLA-B*56:01; SLC13A1; ENSG00000081800; TAA
LPVANPPNA

SEQ ID NO: 76529 - protein, 10 aa, Homo sapiens
  misc_feature: Table A; Target 76529; HLA-B*07:02; SLC13A1; ENSG00000081800; TAA
LPVANPPNAI

SEQ ID NO: 76530 - protein, 10 aa, Homo sapiens
  misc_feature: Table A; Target 76530; HLA-B*51:01; SLC13A1; ENSG00000081800; TAA
LPVANPPNAI

SEQ ID NO: 76531 - protein, 10 aa, Homo sapiens
  misc_feature: Table A; Target 76531; HLA-B*56:01; SLC13A1; ENSG00000081800; TAA
LPVANPPNAI

SEQ ID NO: 76532 - protein, 9 aa, Homo sapiens
  misc_feature: Table A; Target 76532; HLA-B*46:01; SLC13A1; ENSG00000081800; TAA
LSNTSTAAM

SEQ ID NO: 76533 - protein, 9 aa, Homo sapiens
  misc_feature: Table A; Target 76533; HLA-C*01:02; SLC13A1; ENSG00000081800; TAA
LSNTSTAAM

SEQ ID NO: 76534 - protein, 9 aa, Homo sapiens
  misc_feature: Table A; Target 76534; HLA-C*03:03; SLC13A1; ENSG00000081800; TAA
LSNTSTAAM

SEQ ID NO: 76535 - protein, 9 aa, Homo sapiens
  misc_feature: Table A; Target 76535; HLA-C*03:04; SLC13A1; ENSG00000081800; TAA
LSNTSTAAM

SEQ ID NO: 76536 - protein, 9 aa, Homo sapiens
  misc_feature: Table A; Target 76536; HLA-C*14:02; SLC13A1; ENSG00000081800; TAA
LSNTSTAAM

SEQ ID NO: 76537 - protein, 9 aa, Homo sapiens
  misc_feature: Table A; Target 76537; HLA-A*01:01; SLC13A1; ENSG00000081800; TAA
LTEALPLSV

SEQ ID NO: 76538 - protein, 8 aa, Homo sapiens
  misc_feature: Table A; Target 76538; HLA-C*03:04; SLC13A1; ENSG00000081800; TAA
LVGGGFAL

SEQ ID NO: 76539 - protein, 9 aa, Homo sapiens
  misc_feature: Table A; Target 76539; HLA-A*23:01; SLC13A1; ENSG00000081800; TAA
LYILIPSTL

SEQ ID NO: 76540 - protein, 9 aa, Homo sapiens
  misc_feature: Table A; Target 76540; HLA-A*24:02; SLC13A1; ENSG00000081800; TAA
LYILIPSTL

SEQ ID NO: 76541 - protein, 9 aa, Homo sapiens
  misc_feature: Table A; Target 76541; HLA-C*14:02; SLC13A1; ENSG00000081800; TAA
LYILIPSTL

SEQ ID NO: 76542 - protein, 9 aa, Homo sapiens
  misc_feature: Table A; Target 76542; HLA-A*25:01; SLC13A1; ENSG00000081800; TAA
MMVGVNPAW

SEQ ID NO: 76543 - protein, 9 aa, Homo sapiens
  misc_feature: Table A; Target 76543; HLA-A*32:01; SLC13A1; ENSG00000081800; TAA
MMVGVNPAW

SEQ ID NO: 76544 - protein, 9 aa, Homo sapiens
  misc_feature: Table A; Target 76544; HLA-B*58:01; SLC13A1; ENSG00000081800; TAA
MMVGVNPAW

SEQ ID NO: 76545 - protein, 8 aa, Homo sapiens
  misc_feature: Table A; Target 76545; HLA-B*51:01; SLC13A1; ENSG00000081800; TAA
MPIAEAVV

SEQ ID NO: 76546 - protein, 8 aa, Homo sapiens
  misc_feature: Table A; Target 76546; HLA-B*56:01; SLC13A1; ENSG00000081800; TAA
MPIAEAVV

SEQ ID NO: 76547 - protein, 9 aa, Homo sapiens
  misc_feature: Table A; Target 76547; HLA-B*35:01; SLC13A1; ENSG00000081800; TAA
MPIAEAVVQ

SEQ ID NO: 76548 - protein, 9 aa, Homo sapiens
  misc_feature: Table A; Target 76548; HLA-B*35:03; SLC13A1; ENSG00000081800; TAA
MPIAEAVVQ

SEQ ID NO: 76549 - protein, 9 aa, Homo sapiens
  misc_feature: Table A; Target 76549; HLA-B*55:01; SLC13A1; ENSG00000081800; TAA
MPIAEAVVQ

SEQ ID NO: 76550 - protein, 11 aa, Homo sapiens
  misc_feature: Table A; Target 76550; HLA-B*35:03; SLC13A1; ENSG00000081800; TAA
MPIAEAVVQQI

SEQ ID NO: 76551 - protein, 9 aa, Homo sapiens
  misc_feature: Table A; Target 76551; HLA-B*07:02; SLC13A1; ENSG00000081800; TAA
MPSKKVASA

SEQ ID NO: 76552 - protein, 9 aa, Homo sapiens
  misc_feature: Table A; Target 76552; HLA-B*08:01; SLC13A1; ENSG00000081800; TAA
MPSKKVASA

SEQ ID NO: 76553 - protein, 9 aa, Homo sapiens
  misc_feature: Table A; Target 76553; HLA-B*54:01; SLC13A1; ENSG00000081800; TAA
MPSKKVASA

SEQ ID NO: 76554 - protein, 9 aa, Homo sapiens
  misc_feature: Table A; Target 76554; HLA-B*55:01; SLC13A1; ENSG00000081800; TAA
MPSKKVASA

SEQ ID NO: 76555 - protein, 9 aa, Homo sapiens
  misc_feature: Table A; Target 76555; HLA-B*56:01; SLC13A1; ENSG00000081800; TAA
MPSKKVASA

SEQ ID NO: 76556 - protein, 10 aa, Homo sapiens
  misc_feature: Table A; Target 76556; HLA-A*30:02; SLC13A1; ENSG00000081800; TAA
MPSKKVASAY

SEQ ID NO: 76557 - protein, 10 aa, Homo sapiens
  misc_feature: Table A; Target 76557; HLA-B*35:01; SLC13A1; ENSG00000081800; TAA
MPSKKVASAY

SEQ ID NO: 76558 - protein, 8 aa, Homo sapiens
  misc_feature: Table A; Target 76558; HLA-B*35:01; SLC13A1; ENSG00000081800; TAA
MPWDIAIL

SEQ ID NO: 76559 - protein, 9 aa, Homo sapiens
  misc_feature: Table A; Target 76559; HLA-A*68:02; SLC13A1; ENSG00000081800; TAA
MPWDIAILV

SEQ ID NO: 76560 - protein, 9 aa, Homo sapiens
  misc_feature: Table A; Target 76560; HLA-B*35:01; SLC13A1; ENSG00000081800; TAA
MPWDIAILV

SEQ ID NO: 76561 - protein, 9 aa, Homo sapiens
  misc_feature: Table A; Target 76561; HLA-B*51:01; SLC13A1; ENSG00000081800; TAA
MPWDIAILV

SEQ ID NO: 76562 - protein, 9 aa, Homo sapiens
  misc_feature: Table A; Target 76562; HLA-B*54:01; SLC13A1; ENSG00000081800; TAA
MPWDIAILV

SEQ ID NO: 76563 - protein, 9 aa, Homo sapiens
  misc_feature: Table A; Target 76563; HLA-B*56:01; SLC13A1; ENSG00000081800; TAA
MPWDIAILV

SEQ ID NO: 76564 - protein, 10 aa, Homo sapiens
  misc_feature: Table A; Target 76564; HLA-B*54:01; SLC13A1; ENSG00000081800; TAA
MPWDIAILVG

SEQ ID NO: 76565 - protein, 8 aa, Homo sapiens
  misc_feature: Table A; Target 76565; HLA-B*54:01; SLC13A1; ENSG00000081800; TAA
MVMPIAEA

SEQ ID NO: 76566 - protein, 8 aa, Homo sapiens
  misc_feature: Table A; Target 76566; HLA-B*56:01; SLC13A1; ENSG00000081800; TAA
MVMPIAEA

SEQ ID NO: 76567 - protein, 9 aa, Homo sapiens
  misc_feature: Table A; Target 76567; HLA-A*02:01; SLC13A1; ENSG00000081800; TAA
MVMPIAEAV

SEQ ID NO: 76568 - protein, 9 aa, Homo sapiens
  misc_feature: Table A; Target 76568; HLA-A*02:07; SLC13A1; ENSG00000081800; TAA
MVMPIAEAV

SEQ ID NO: 76569 - protein, 9 aa, Homo sapiens
  misc_feature: Table A; Target 76569; HLA-A*68:02; SLC13A1; ENSG00000081800; TAA
MVMPIAEAV

SEQ ID NO: 76570 - protein, 9 aa, Homo sapiens
  misc_feature: Table A; Target 76570; HLA-B*13:02; SLC13A1; ENSG00000081800; TAA
MVMPIAEAV

SEQ ID NO: 76571 - protein, 9 aa, Homo sapiens
  misc_feature: Table A; Target 76571; HLA-B*35:03; SLC13A1; ENSG00000081800; TAA
MVMPIAEAV

SEQ ID NO: 76572 - protein, 9 aa, Homo sapiens
  misc_feature: Table A; Target 76572; HLA-B*46:01; SLC13A1; ENSG00000081800; TAA
MVMPIAEAV

SEQ ID NO: 76573 - protein, 9 aa, Homo sapiens
  misc_feature: Table A; Target 76573; HLA-B*54:01; SLC13A1; ENSG00000081800; TAA
MVMPIAEAV

SEQ ID NO: 76574 - protein, 9 aa, Homo sapiens
  misc_feature: Table A; Target 76574; HLA-B*56:01; SLC13A1; ENSG00000081800; TAA
MVMPIAEAV

SEQ ID NO: 76575 - protein, 9 aa, Homo sapiens
  misc_feature: Table A; Target 76575; HLA-C*02:02; SLC13A1; ENSG00000081800; TAA
MVMPIAEAV

SEQ ID NO: 76576 - protein, 8 aa, Homo sapiens
  misc_feature: Table A; Target 76576; HLA-B*56:01; SLC13A1; ENSG00000081800; TAA
MVTSLTEV

SEQ ID NO: 76577 - protein, 9 aa, Homo sapiens
  misc_feature: Table A; Target 76577; HLA-B*35:01; SLC13A1; ENSG00000081800; TAA
NIVGVAVVM

SEQ ID NO: 76578 - protein, 9 aa, Homo sapiens
  misc_feature: Table A; Target 76578; HLA-B*35:03; SLC13A1; ENSG00000081800; TAA
NIVGVAVVM

SEQ ID NO: 76579 - protein, 9 aa, Homo sapiens
  misc_feature: Table A; Target 76579; HLA-C*07:06; SLC13A1; ENSG00000081800; TAA
NIVGVAVVM

SEQ ID NO: 76580 - protein, 8 aa, Homo sapiens
  misc_feature: Table A; Target 76580; HLA-B*08:01; SLC13A1; ENSG00000081800; TAA
NLHKRIAL

SEQ ID NO: 76581 - protein, 9 aa, Homo sapiens
  misc_feature: Table A; Target 76581; HLA-B*35:01; SLC13A1; ENSG00000081800; TAA
NPAWLTLGF

SEQ ID NO: 76582 - protein, 10 aa, Homo sapiens
  misc_feature: Table A; Target 76582; HLA-B*35:01; SLC13A1; ENSG00000081800; TAA
NPPNAIVFSY

SEQ ID NO: 76583 - protein, 8 aa, Homo sapiens
  misc_feature: Table A; Target 76583; HLA-C*16:01; SLC13A1; ENSG00000081800; TAA
NSGMRTKY

SEQ ID NO: 76584 - protein, 8 aa, Homo sapiens
  misc_feature: Table A; Target 76584; HLA-B*18:01; SLC13A1; ENSG00000081800; TAA
QEIVTLVL

SEQ ID NO: 76585 - protein, 8 aa, Homo sapiens
  misc_feature: Table A; Target 76585; HLA-B*49:01; SLC13A1; ENSG00000081800; TAA
QEIVTLVL

SEQ ID NO: 76586 - protein, 9 aa, Homo sapiens
  misc_feature: Table A; Target 76586; HLA-B*18:01; SLC13A1; ENSG00000081800; TAA
QEIVTLVLF

SEQ ID NO: 76587 - protein, 9 aa, Homo sapiens
  misc_feature: Table A; Target 76587; HLA-B*44:02; SLC13A1; ENSG00000081800; TAA
QEIVTLVLF

SEQ ID NO: 76588 - protein, 9 aa, Homo sapiens
  misc_feature: Table A; Target 76588; HLA-B*44:03; SLC13A1; ENSG00000081800; TAA
QEIVTLVLF

SEQ ID NO: 76589 - protein, 9 aa, Homo sapiens
  misc_feature: Table A; Target 76589; HLA-B*49:01; SLC13A1; ENSG00000081800; TAA
QEYQKLGPI

SEQ ID NO: 76590 - protein, 11 aa, Homo sapiens
  misc_feature: Table A; Target 76590; HLA-B*44:02; SLC13A1; ENSG00000081800; TAA
QEYQKLGPIRY

SEQ ID NO: 76591 - protein, 11 aa, Homo sapiens
  misc_feature: Table A; Target 76591; HLA-B*44:03; SLC13A1; ENSG00000081800; TAA
QEYQKLGPIRY

SEQ ID NO: 76592 - protein, 9 aa, Homo sapiens
  misc_feature: Table A; Target 76592; HLA-A*31:01; SLC13A1; ENSG00000081800; TAA
RTKKGHVTR

SEQ ID NO: 76593 - protein, 9 aa, Homo sapiens
  misc_feature: Table A; Target 76593; HLA-A*24:02; SLC13A1; ENSG00000081800; TAA
RYQEIVTLV

SEQ ID NO: 76594 - protein, 8 aa, Homo sapiens
  misc_feature: Table A; Target 76594; HLA-B*37:01; SLC13A1; ENSG00000081800; TAA
SEYPGFAT

SEQ ID NO: 76595 - protein, 10 aa, Homo sapiens
  misc_feature: Table A; Target 76595; HLA-B*49:01; SLC13A1; ENSG00000081800; TAA
SEYPGFATDS

SEQ ID NO: 76596 - protein, 11 aa, Homo sapiens
  misc_feature: Table A; Target 76596; HLA-B*49:01; SLC13A1; ENSG00000081800; TAA
SEYPGFATDST

SEQ ID NO: 76597 - protein, 8 aa, Homo sapiens
  misc_feature: Table A; Target 76597; HLA-B*15:03; SLC13A1; ENSG00000081800; TAA
SKKVASAY

SEQ ID NO: 76598 - protein, 10 aa, Homo sapiens
  misc_feature: Table A; Target 76598; HLA-A*02:01; SLC13A1; ENSG00000081800; TAA
SLMVTSLTEV

SEQ ID NO: 76599 - protein, 10 aa, Homo sapiens
  misc_feature: Table A; Target 76599; HLA-A*02:03; SLC13A1; ENSG00000081800; TAA
SLMVTSLTEV

SEQ ID NO: 76600 - protein, 9 aa, Homo sapiens
  misc_feature: Table A; Target 76600; HLA-A*02:04; SLC13A1; ENSG00000081800; TAA
SLPAWLIIL

SEQ ID NO: 76601 - protein, 9 aa, Homo sapiens
  misc_feature: Table A; Target 76601; HLA-B*56:01; SLC13A1; ENSG00000081800; TAA
SPLAEAIHV

SEQ ID NO: 76602 - protein, 9 aa, Homo sapiens
  misc_feature: Table A; Target 76602; HLA-B*57:01; SLC13A1; ENSG00000081800; TAA
SSTAFLSMW

SEQ ID NO: 76603 - protein, 9 aa, Homo sapiens
  misc_feature: Table A; Target 76603; HLA-A*02:01; SLC13A1; ENSG00000081800; TAA
STIGGLTTI

SEQ ID NO: 76604 - protein, 9 aa, Homo sapiens
  misc_feature: Table A; Target 76604; HLA-A*02:03; SLC13A1; ENSG00000081800; TAA
STIGGLTTI

SEQ ID NO: 76605 - protein, 9 aa, Homo sapiens
  misc_feature: Table A; Target 76605; HLA-A*23:01; SLC13A1; ENSG00000081800; TAA
STIGGLTTI

SEQ ID NO: 76606 - protein, 9 aa, Homo sapiens
  misc_feature: Table A; Target 76606; HLA-A*25:01; SLC13A1; ENSG00000081800; TAA
STIGGLTTI

SEQ ID NO: 76607 - protein, 9 aa, Homo sapiens
  misc_feature: Table A; Target 76607; HLA-A*26:01; SLC13A1; ENSG00000081800; TAA
STIGGLTTI

SEQ ID NO: 76608 - protein, 9 aa, Homo sapiens
  misc_feature: Table A; Target 76608; HLA-A*32:01; SLC13A1; ENSG00000081800; TAA
STIGGLTTI

SEQ ID NO: 76609 - protein, 9 aa, Homo sapiens
  misc_feature: Table A; Target 76609; HLA-A*68:02; SLC13A1; ENSG00000081800; TAA
STIGGLTTI

SEQ ID NO: 76610 - protein, 9 aa, Homo sapiens
  misc_feature: Table A; Target 76610; HLA-B*13:02; SLC13A1; ENSG00000081800; TAA
STIGGLTTI

SEQ ID NO: 76611 - protein, 9 aa, Homo sapiens
  misc_feature: Table A; Target 76611; HLA-B*46:01; SLC13A1; ENSG00000081800; TAA
STIGGLTTI

SEQ ID NO: 76612 - protein, 9 aa, Homo sapiens
  misc_feature: Table A; Target 76612; HLA-B*49:01; SLC13A1; ENSG00000081800; TAA
STIGGLTTI

SEQ ID NO: 76613 - protein, 9 aa, Homo sapiens
  misc_feature: Table A; Target 76613; HLA-B*58:01; SLC13A1; ENSG00000081800; TAA
STIGGLTTI

SEQ ID NO: 76614 - protein, 9 aa, Homo sapiens
  misc_feature: Table A; Target 76614; HLA-C*03:04; SLC13A1; ENSG00000081800; TAA
STIGGLTTI

SEQ ID NO: 76615 - protein, 9 aa, Homo sapiens
  misc_feature: Table A; Target 76615; HLA-A*01:01; SLC13A1; ENSG00000081800; TAA
STNLIFAEY

SEQ ID NO: 76616 - protein, 9 aa, Homo sapiens
  misc_feature: Table A; Target 76616; HLA-A*25:01; SLC13A1; ENSG00000081800; TAA
STNLIFAEY

SEQ ID NO: 76617 - protein, 9 aa, Homo sapiens
  misc_feature: Table A; Target 76617; HLA-A*26:01; SLC13A1; ENSG00000081800; TAA
STNLIFAEY

SEQ ID NO: 76618 - protein, 9 aa, Homo sapiens
  misc_feature: Table A; Target 76618; HLA-A*29:02; SLC13A1; ENSG00000081800; TAA
STNLIFAEY

SEQ ID NO: 76619 - protein, 9 aa, Homo sapiens
  misc_feature: Table A; Target 76619; HLA-A*30:02; SLC13A1; ENSG00000081800; TAA
STNLIFAEY

SEQ ID NO: 76620 - protein, 9 aa, Homo sapiens
  misc_feature: Table A; Target 76620; HLA-A*32:01; SLC13A1; ENSG00000081800; TAA
STNLIFAEY

SEQ ID NO: 76621 - protein, 9 aa, Homo sapiens
  misc_feature: Table A; Target 76621; HLA-B*15:01; SLC13A1; ENSG00000081800; TAA
STNLIFAEY

SEQ ID NO: 76622 - protein, 9 aa, Homo sapiens
  misc_feature: Table A; Target 76622; HLA-B*46:01; SLC13A1; ENSG00000081800; TAA
STNLIFAEY

SEQ ID NO: 76623 - protein, 9 aa, Homo sapiens
  misc_feature: Table A; Target 76623; HLA-B*58:01; SLC13A1; ENSG00000081800; TAA
STNLIFAEY

SEQ ID NO: 76624 - protein, 9 aa, Homo sapiens
  misc_feature: Table A; Target 76624; HLA-C*02:02; SLC13A1; ENSG00000081800; TAA
STNLIFAEY

SEQ ID NO: 76625 - protein, 9 aa, Homo sapiens
  misc_feature: Table A; Target 76625; HLA-C*16:04; SLC13A1; ENSG00000081800; TAA
STNLIFAEY

SEQ ID NO: 76626 - protein, 10 aa, Homo sapiens
  misc_feature: Table A; Target 76626; HLA-A*31:01; SLC13A1; ENSG00000081800; TAA
SVNGHEINER

SEQ ID NO: 76627 - protein, 10 aa, Homo sapiens
  misc_feature: Table A; Target 76627; HLA-A*33:01; SLC13A1; ENSG00000081800; TAA
SVNGHEINER

SEQ ID NO: 76628 - protein, 10 aa, Homo sapiens
  misc_feature: Table A; Target 76628; HLA-A*33:03; SLC13A1; ENSG00000081800; TAA
SVNGHEINER

SEQ ID NO: 76629 - protein, 10 aa, Homo sapiens
  misc_feature: Table A; Target 76629; HLA-A*68:01; SLC13A1; ENSG00000081800; TAA
SVNGHEINER

SEQ ID NO: 76630 - protein, 10 aa, Homo sapiens
  misc_feature: Table A; Target 76630; HLA-C*07:06; SLC13A1; ENSG00000081800; TAA
SVNGHEINER

SEQ ID NO: 76631 - protein, 9 aa, Homo sapiens
  misc_feature: Table A; Target 76631; HLA-A*02:04; SLC13A1; ENSG00000081800; TAA
SVTALLPSL

SEQ ID NO: 76632 - protein, 9 aa, Homo sapiens
  misc_feature: Table A; Target 76632; HLA-A*25:01; SLC13A1; ENSG00000081800; TAA
SVTALLPSL

SEQ ID NO: 76633 - protein, 9 aa, Homo sapiens
  misc_feature: Table A; Target 76633; HLA-A*24:02; SLC13A1; ENSG00000081800; TAA
SYILVYRRF

SEQ ID NO: 76634 - protein, 9 aa, Homo sapiens
  misc_feature: Table A; Target 76634; HLA-B*54:01; SLC13A1; ENSG00000081800; TAA
TAAMVMPIA

SEQ ID NO: 76635 - protein, 9 aa, Homo sapiens
  misc_feature: Table A; Target 76635; HLA-B*56:01; SLC13A1; ENSG00000081800; TAA
TAAMVMPIA

SEQ ID NO: 76636 - protein, 8 aa, Homo sapiens
  misc_feature: Table A; Target 76636; HLA-B*37:01; SLC13A1; ENSG00000081800; TAA
TDSTVALL

SEQ ID NO: 76637 - protein, 9 aa, Homo sapiens
  misc_feature: Table A; Target 76637; HLA-B*13:02; SLC13A1; ENSG00000081800; TAA
TDSTVALLI

SEQ ID NO: 76638 - protein, 8 aa, Homo sapiens
  misc_feature: Table A; Target 76638; HLA-B*18:01; SLC13A1; ENSG00000081800; TAA
TEALPLSV

SEQ ID NO: 76639 - protein, 8 aa, Homo sapiens
  misc_feature: Table A; Target 76639; HLA-B*49:01; SLC13A1; ENSG00000081800; TAA
TEALPLSV

SEQ ID NO: 76640 - protein, 9 aa, Homo sapiens
  misc_feature: Table A; Target 76640; HLA-B*49:01; SLC13A1; ENSG00000081800; TAA
TEALPLSVT

SEQ ID NO: 76641 - protein, 11 aa, Homo sapiens
  misc_feature: Table A; Target 76641; HLA-A*30:01; SLC13A1; ENSG00000081800; TAA
TEALPLSVTAL

SEQ ID NO: 76642 - protein, 11 aa, Homo sapiens
  misc_feature: Table A; Target 76642; HLA-B*40:01; SLC13A1; ENSG00000081800; TAA
TEALPLSVTAL

SEQ ID NO: 76643 - protein, 9 aa, Homo sapiens
  misc_feature: Table A; Target 76643; HLA-A*30:01; SLC13A1; ENSG00000081800; TAA
TEVASNPAT

SEQ ID NO: 76644 - protein, 9 aa, Homo sapiens
  misc_feature: Table A; Target 76644; HLA-B*49:01; SLC13A1; ENSG00000081800; TAA
TEVASNPAT

SEQ ID NO: 76645 - protein, 10 aa, Homo sapiens
  misc_feature: Table A; Target 76645; HLA-A*30:01; SLC13A1; ENSG00000081800; TAA
TEVASNPATI

SEQ ID NO: 76646 - protein, 10 aa, Homo sapiens
  misc_feature: Table A; Target 76646; HLA-B*40:01; SLC13A1; ENSG00000081800; TAA
TEVASNPATI

SEQ ID NO: 76647 - protein, 10 aa, Homo sapiens
  misc_feature: Table A; Target 76647; HLA-B*49:01; SLC13A1; ENSG00000081800; TAA
TEVASNPATI

SEQ ID NO: 76648 - protein, 8 aa, Homo sapiens
  misc_feature: Table A; Target 76648; HLA-B*37:01; SLC13A1; ENSG00000081800; TAA
TLFVVATF

SEQ ID NO: 76649 - protein, 9 aa, Homo sapiens
  misc_feature: Table A; Target 76649; HLA-B*07:02; SLC13A1; ENSG00000081800; TAA
TPTGEIVAF

SEQ ID NO: 76650 - protein, 9 aa, Homo sapiens
  misc_feature: Table A; Target 76650; HLA-B*35:01; SLC13A1; ENSG00000081800; TAA
TPTGEIVAF

SEQ ID NO: 76651 - protein, 9 aa, Homo sapiens
  misc_feature: Table A; Target 76651; HLA-B*35:03; SLC13A1; ENSG00000081800; TAA
TPTGEIVAF

SEQ ID NO: 76652 - protein, 9 aa, Homo sapiens
  misc_feature: Table A; Target 76652; HLA-B*55:01; SLC13A1; ENSG00000081800; TAA
TPTGEIVAF

SEQ ID NO: 76653 - protein, 9 aa, Homo sapiens
  misc_feature: Table A; Target 76653; HLA-C*03:03; SLC13A1; ENSG00000081800; TAA
TPTGEIVAF

SEQ ID NO: 76654 - protein, 11 aa, Homo sapiens
  misc_feature: Table A; Target 76654; HLA-B*35:01; SLC13A1; ENSG00000081800; TAA
TPTGEIVAFDY

SEQ ID NO: 76655 - protein, 8 aa, Homo sapiens
  misc_feature: Table A; Target 76655; HLA-C*16:01; SLC13A1; ENSG00000081800; TAA
TSTAAMVM

SEQ ID NO: 76656 - protein, 10 aa, Homo sapiens
  misc_feature: Table A; Target 76656; HLA-A*26:01; SLC13A1; ENSG00000081800; TAA
TSTNLIFAEY

SEQ ID NO: 76657 - protein, 10 aa, Homo sapiens
  misc_feature: Table A; Target 76657; HLA-A*29:02; SLC13A1; ENSG00000081800; TAA
TSTNLIFAEY

SEQ ID NO: 76658 - protein, 10 aa, Homo sapiens
  misc_feature: Table A; Target 76658; HLA-A*30:02; SLC13A1; ENSG00000081800; TAA
TSTNLIFAEY

SEQ ID NO: 76659 - protein, 10 aa, Homo sapiens
  misc_feature: Table A; Target 76659; HLA-A*25:01; SLC13A1; ENSG00000081800; TAA
TTPTGEIVAF

SEQ ID NO: 76660 - protein, 10 aa, Homo sapiens
  misc_feature: Table A; Target 76660; HLA-A*26:01; SLC13A1; ENSG00000081800; TAA
TTPTGEIVAF

SEQ ID NO: 76661 - protein, 9 aa, Homo sapiens
  misc_feature: Table A; Target 76661; HLA-C*14:02; SLC13A1; ENSG00000081800; TAA
TYFNGSTNH

SEQ ID NO: 76662 - protein, 11 aa, Homo sapiens
  misc_feature: Table A; Target 76662; HLA-A*23:01; SLC13A1; ENSG00000081800; TAA
TYFNGSTNHGL

SEQ ID NO: 76663 - protein, 11 aa, Homo sapiens
  misc_feature: Table A; Target 76663; HLA-A*24:02; SLC13A1; ENSG00000081800; TAA
TYFNGSTNHGL

SEQ ID NO: 76664 - protein, 9 aa, Homo sapiens
  misc_feature: Table A; Target 76664; HLA-A*23:01; SLC13A1; ENSG00000081800; TAA
TYPSWAPAM

SEQ ID NO: 76665 - protein, 9 aa, Homo sapiens
  misc_feature: Table A; Target 76665; HLA-A*24:02; SLC13A1; ENSG00000081800; TAA
TYPSWAPAM

SEQ ID NO: 76666 - protein, 9 aa, Homo sapiens
  misc_feature: Table A; Target 76666; HLA-B*51:01; SLC13A1; ENSG00000081800; TAA
VAFDYSPLI

SEQ ID NO: 76667 - protein, 9 aa, Homo sapiens
  misc_feature: Table A; Target 76667; HLA-C*02:02; SLC13A1; ENSG00000081800; TAA
VAFDYSPLI

SEQ ID NO: 76668 - protein, 11 aa, Homo sapiens
  misc_feature: Table A; Target 76668; HLA-B*57:01; SLC13A1; ENSG00000081800; TAA
VAFDYSPLITW

SEQ ID NO: 76669 - protein, 9 aa, Homo sapiens
  misc_feature: Table A; Target 76669; HLA-B*46:01; SLC13A1; ENSG00000081800; TAA
VANPPNAIV

SEQ ID NO: 76670 - protein, 9 aa, Homo sapiens
  misc_feature: Table A; Target 76670; HLA-C*03:03; SLC13A1; ENSG00000081800; TAA
VANPPNAIV

SEQ ID NO: 76671 - protein, 9 aa, Homo sapiens
  misc_feature: Table A; Target 76671; HLA-C*03:04; SLC13A1; ENSG00000081800; TAA
VANPPNAIV

SEQ ID NO: 76672 - protein, 10 aa, Homo sapiens
  misc_feature: Table A; Target 76672; HLA-A*23:01; SLC13A1; ENSG00000081800; TAA
VANPPNAIVF

SEQ ID NO: 76673 - protein, 10 aa, Homo sapiens
  misc_feature: Table A; Target 76673; HLA-B*46:01; SLC13A1; ENSG00000081800; TAA
VANPPNAIVF

SEQ ID NO: 76674 - protein, 10 aa, Homo sapiens
  misc_feature: Table A; Target 76674; HLA-B*58:01; SLC13A1; ENSG00000081800; TAA
VANPPNAIVF

SEQ ID NO: 76675 - protein, 10 aa, Homo sapiens
  misc_feature: Table A; Target 76675; HLA-C*02:02; SLC13A1; ENSG00000081800; TAA
VANPPNAIVF

SEQ ID NO: 76676 - protein, 10 aa, Homo sapiens
  misc_feature: Table A; Target 76676; HLA-C*03:03; SLC13A1; ENSG00000081800; TAA
VANPPNAIVF

SEQ ID NO: 76677 - protein, 10 aa, Homo sapiens
  misc_feature: Table A; Target 76677; HLA-C*03:04; SLC13A1; ENSG00000081800; TAA
VANPPNAIVF

SEQ ID NO: 76678 - protein, 10 aa, Homo sapiens
  misc_feature: Table A; Target 76678; HLA-C*16:02; SLC13A1; ENSG00000081800; TAA
VANPPNAIVF

SEQ ID NO: 76679 - protein, 10 aa, Homo sapiens
  misc_feature: Table A; Target 76679; HLA-C*03:03; SLC13A1; ENSG00000081800; TAA
VASNPATITL

SEQ ID NO: 76680 - protein, 10 aa, Homo sapiens
  misc_feature: Table A; Target 76680; HLA-C*03:04; SLC13A1; ENSG00000081800; TAA
VASNPATITL

SEQ ID NO: 76681 - protein, 8 aa, Homo sapiens
  misc_feature: Table A; Target 76681; HLA-B*51:01; SLC13A1; ENSG00000081800; TAA
VAVVMLGI

SEQ ID NO: 76682 - protein, 8 aa, Homo sapiens
  misc_feature: Table A; Target 76682; HLA-B*15:03; SLC13A1; ENSG00000081800; TAA
VEATQMTY

SEQ ID NO: 76683 - protein, 8 aa, Homo sapiens
  misc_feature: Table A; Target 76683; HLA-B*18:01; SLC13A1; ENSG00000081800; TAA
VEATQMTY

SEQ ID NO: 76684 - protein, 8 aa, Homo sapiens
  misc_feature: Table A; Target 76684; HLA-B*44:02; SLC13A1; ENSG00000081800; TAA
VEATQMTY

SEQ ID NO: 76685 - protein, 8 aa, Homo sapiens
  misc_feature: Table A; Target 76685; HLA-B*44:03; SLC13A1; ENSG00000081800; TAA
VEATQMTY

SEQ ID NO: 76686 - protein, 8 aa, Homo sapiens
  misc_feature: Table A; Target 76686; HLA-C*16:04; SLC13A1; ENSG00000081800; TAA
VEATQMTY

SEQ ID NO: 76687 - protein, 9 aa, Homo sapiens
  misc_feature: Table A; Target 76687; HLA-A*23:01; SLC13A1; ENSG00000081800; TAA
VEATQMTYF

SEQ ID NO: 76688 - protein, 9 aa, Homo sapiens
  misc_feature: Table A; Target 76688; HLA-A*30:01; SLC13A1; ENSG00000081800; TAA
VEATQMTYF

SEQ ID NO: 76689 - protein, 9 aa, Homo sapiens
  misc_feature: Table A; Target 76689; HLA-B*18:01; SLC13A1; ENSG00000081800; TAA
VEATQMTYF

SEQ ID NO: 76690 - protein, 9 aa, Homo sapiens
  misc_feature: Table A; Target 76690; HLA-B*37:01; SLC13A1; ENSG00000081800; TAA
VEATQMTYF

SEQ ID NO: 76691 - protein, 9 aa, Homo sapiens
  misc_feature: Table A; Target 76691; HLA-B*40:01; SLC13A1; ENSG00000081800; TAA
VEATQMTYF

SEQ ID NO: 76692 - protein, 9 aa, Homo sapiens
  misc_feature: Table A; Target 76692; HLA-B*44:02; SLC13A1; ENSG00000081800; TAA
VEATQMTYF

SEQ ID NO: 76693 - protein, 9 aa, Homo sapiens
  misc_feature: Table A; Target 76693; HLA-B*44:03; SLC13A1; ENSG00000081800; TAA
VEATQMTYF

SEQ ID NO: 76694 - protein, 9 aa, Homo sapiens
  misc_feature: Table A; Target 76694; HLA-B*49:01; SLC13A1; ENSG00000081800; TAA
VEATQMTYF

SEQ ID NO: 76695 - protein, 9 aa, Homo sapiens
  misc_feature: Table A; Target 76695; HLA-C*02:02; SLC13A1; ENSG00000081800; TAA
VEATQMTYF

SEQ ID NO: 76696 - protein, 9 aa, Homo sapiens
  misc_feature: Table A; Target 76696; HLA-C*16:04; SLC13A1; ENSG00000081800; TAA
VEATQMTYF

SEQ ID NO: 76697 - protein, 9 aa, Homo sapiens
  misc_feature: Table A; Target 76697; HLA-A*30:01; SLC13A1; ENSG00000081800; TAA
VELEKNSGM

SEQ ID NO: 76698 - protein, 9 aa, Homo sapiens
  misc_feature: Table A; Target 76698; HLA-B*18:01; SLC13A1; ENSG00000081800; TAA
VELEKNSGM

SEQ ID NO: 76699 - protein, 9 aa, Homo sapiens
  misc_feature: Table A; Target 76699; HLA-B*37:01; SLC13A1; ENSG00000081800; TAA
VELEKNSGM

SEQ ID NO: 76700 - protein, 9 aa, Homo sapiens
  misc_feature: Table A; Target 76700; HLA-B*40:01; SLC13A1; ENSG00000081800; TAA
VELEKNSGM

SEQ ID NO: 76701 - protein, 9 aa, Homo sapiens
  misc_feature: Table A; Target 76701; HLA-B*49:01; SLC13A1; ENSG00000081800; TAA
VELEKNSGM

SEQ ID NO: 76702 - protein, 9 aa, Homo sapiens
  misc_feature: Table A; Target 76702; HLA-A*02:07; SLC13A1; ENSG00000081800; TAA
VIDMVKAGL

SEQ ID NO: 76703 - protein, 9 aa, Homo sapiens
  misc_feature: Table A; Target 76703; HLA-C*05:01; SLC13A1; ENSG00000081800; TAA
VIDMVKAGL

SEQ ID NO: 76704 - protein, 9 aa, Homo sapiens
  misc_feature: Table A; Target 76704; HLA-A*02:01; SLC13A1; ENSG00000081800; TAA
VLLPLPIVL

SEQ ID NO: 76705 - protein, 9 aa, Homo sapiens
  misc_feature: Table A; Target 76705; HLA-A*02:03; SLC13A1; ENSG00000081800; TAA
VLLPLPIVL

SEQ ID NO: 76706 - protein, 9 aa, Homo sapiens
  misc_feature: Table A; Target 76706; HLA-A*02:04; SLC13A1; ENSG00000081800; TAA
VLLPLPIVL

SEQ ID NO: 76707 - protein, 9 aa, Homo sapiens
  misc_feature: Table A; Target 76707; HLA-A*02:07; SLC13A1; ENSG00000081800; TAA
VLLPLPIVL

SEQ ID NO: 76708 - protein, 9 aa, Homo sapiens
  misc_feature: Table A; Target 76708; HLA-A*23:01; SLC13A1; ENSG00000081800; TAA
VLLPLPIVL

SEQ ID NO: 76709 - protein, 9 aa, Homo sapiens
  misc_feature: Table A; Target 76709; HLA-A*24:02; SLC13A1; ENSG00000081800; TAA
VLLPLPIVL

SEQ ID NO: 76710 - protein, 9 aa, Homo sapiens
  misc_feature: Table A; Target 76710; HLA-A*33:01; SLC13A1; ENSG00000081800; TAA
VNGHEINER

SEQ ID NO: 76711 - protein, 9 aa, Homo sapiens
  misc_feature: Table A; Target 76711; HLA-B*35:01; SLC13A1; ENSG00000081800; TAA
VPMFDLYTY

SEQ ID NO: 76712 - protein, 8 aa, Homo sapiens
  misc_feature: Table A; Target 76712; HLA-C*03:04; SLC13A1; ENSG00000081800; TAA
VTALLPSL

SEQ ID NO: 76713 - protein, 9 aa, Homo sapiens
  misc_feature: Table A; Target 76713; HLA-A*01:01; SLC13A1; ENSG00000081800; TAA
VTALLPSLM

SEQ ID NO: 76714 - protein, 9 aa, Homo sapiens
  misc_feature: Table A; Target 76714; HLA-B*08:01; SLC13A1; ENSG00000081800; TAA
YGHLKVIDM

SEQ ID NO: 76715 - protein, 9 aa, Homo sapiens
  misc_feature: Table A; Target 76715; HLA-B*15:03; SLC13A1; ENSG00000081800; TAA
YQKLGPIRY

SEQ ID NO: 76716 - protein, 9 aa, Homo sapiens
  misc_feature: Table A; Target 76716; HLA-C*02:02; SLC13A1; ENSG00000081800; TAA
YQKLGPIRY

SEQ ID NO: 76717 - protein, 9 aa, Homo sapiens
  misc_feature: Table A; Target 76717; HLA-A*23:01; SLC13A1; ENSG00000081800; TAA
YTLFVVATF

SEQ ID NO: 76718 - protein, 9 aa, Homo sapiens
  misc_feature: Table A; Target 76718; HLA-A*23:01; SLC22A9; ENSG00000149742; TAA
AALAPTFLI

SEQ ID NO: 76719 - protein, 10 aa, Homo sapiens
  misc_feature: Table A; Target 76719; HLA-A*29:02; SLC22A9; ENSG00000149742; TAA
AALAPTFLIY

SEQ ID NO: 76720 - protein, 10 aa, Homo sapiens
  misc_feature: Table A; Target 76720; HLA-A*30:02; SLC22A9; ENSG00000149742; TAA
AALAPTFLIY

SEQ ID NO: 76721 - protein, 10 aa, Homo sapiens
  misc_feature: Table A; Target 76721; HLA-B*15:03; SLC22A9; ENSG00000149742; TAA
AALAPTFLIY

SEQ ID NO: 76722 - protein, 10 aa, Homo sapiens
  misc_feature: Table A; Target 76722; HLA-B*57:01; SLC22A9; ENSG00000149742; TAA
AALAPTFLIY

SEQ ID NO: 76723 - protein, 10 aa, Homo sapiens
  misc_feature: Table A; Target 76723; HLA-C*02:02; SLC22A9; ENSG00000149742; TAA
AALAPTFLIY

SEQ ID NO: 76724 - protein, 10 aa, Homo sapiens
  misc_feature: Table A; Target 76724; HLA-C*16:04; SLC22A9; ENSG00000149742; TAA
AALAPTFLIY

SEQ ID NO: 76725 - protein, 9 aa, Homo sapiens
  misc_feature: Table A; Target 76725; HLA-B*08:01; SLC22A9; ENSG00000149742; TAA
AAQKKKPSL

SEQ ID NO: 76726 - protein, 9 aa, Homo sapiens
  misc_feature: Table A; Target 76726; HLA-C*16:01; SLC22A9; ENSG00000149742; TAA
AAQKKKPSL

SEQ ID NO: 76727 - protein, 8 aa, Homo sapiens
  misc_feature: Table A; Target 76727; HLA-B*37:01; SLC22A9; ENSG00000149742; TAA
AEWATHRF

SEQ ID NO: 76728 - protein, 8 aa, Homo sapiens
  misc_feature: Table A; Target 76728; HLA-B*44:02; SLC22A9; ENSG00000149742; TAA
AEWATHRF

SEQ ID NO: 76729 - protein, 8 aa, Homo sapiens
  misc_feature: Table A; Target 76729; HLA-B*44:03; SLC22A9; ENSG00000149742; TAA
AEWATHRF

SEQ ID NO: 76730 - protein, 9 aa, Homo sapiens
  misc_feature: Table A; Target 76730; HLA-A*24:02; SLC22A9; ENSG00000149742; TAA
AFIPGHRCW

SEQ ID NO: 76731 - protein, 9 aa, Homo sapiens
  misc_feature: Table A; Target 76731; HLA-A*31:01; SLC22A9; ENSG00000149742; TAA
AFLLLPETR

SEQ ID NO: 76732 - protein, 10 aa, Homo sapiens
  misc_feature: Table A; Target 76732; HLA-A*23:01; SLC22A9; ENSG00000149742; TAA
AFMTLAGLAF

SEQ ID NO: 76733 - protein, 10 aa, Homo sapiens
  misc_feature: Table A; Target 76733; HLA-A*24:02; SLC22A9; ENSG00000149742; TAA
AFMTLAGLAF

SEQ ID NO: 76734 - protein, 10 aa, Homo sapiens
  misc_feature: Table A; Target 76734; HLA-A*29:02; SLC22A9; ENSG00000149742; TAA
AFMTLAGLAF

SEQ ID NO: 76735 - protein, 10 aa, Homo sapiens
  misc_feature: Table A; Target 76735; HLA-C*14:02; SLC22A9; ENSG00000149742; TAA
AFMTLAGLAF

SEQ ID NO: 76736 - protein, 10 aa, Homo sapiens
  misc_feature: Table A; Target 76736; HLA-C*14:02; SLC22A9; ENSG00000149742; TAA
AFQDLLGHAG

SEQ ID NO: 76737 - protein, 8 aa, Homo sapiens
  misc_feature: Table A; Target 76737; HLA-B*15:03; SLC22A9; ENSG00000149742; TAA
AGALAPLM

SEQ ID NO: 76738 - protein, 8 aa, Homo sapiens
  misc_feature: Table A; Target 76738; HLA-B*37:01; SLC22A9; ENSG00000149742; TAA
AGALAPLM

SEQ ID NO: 76739 - protein, 8 aa, Homo sapiens
  misc_feature: Table A; Target 76739; HLA-C*03:04; SLC22A9; ENSG00000149742; TAA
AGALAPLM

SEQ ID NO: 76740 - protein, 8 aa, Homo sapiens
  misc_feature: Table A; Target 76740; HLA-C*16:01; SLC22A9; ENSG00000149742; TAA
AGALAPLM

SEQ ID NO: 76741 - protein, 10 aa, Homo sapiens
  misc_feature: Table A; Target 76741; HLA-B*57:01; SLC22A9; ENSG00000149742; TAA
AGLAFAIRDW

SEQ ID NO: 76742 - protein, 10 aa, Homo sapiens
  misc_feature: Table A; Target 76742; HLA-B*38:01; SLC22A9; ENSG00000149742; TAA
AHGNEVIPTI

SEQ ID NO: 76743 - protein, 10 aa, Homo sapiens
  misc_feature: Table A; Target 76743; HLA-B*39:01; SLC22A9; ENSG00000149742; TAA
AHGNEVIPTI

SEQ ID NO: 76744 - protein, 9 aa, Homo sapiens
  misc_feature: Table A; Target 76744; HLA-A*02:07; SLC22A9; ENSG00000149742; TAA
AIIFVPQEM

SEQ ID NO: 76745 - protein, 9 aa, Homo sapiens
  misc_feature: Table A; Target 76745; HLA-A*23:01; SLC22A9; ENSG00000149742; TAA
AIIFVPQEM

SEQ ID NO: 76746 - protein, 9 aa, Homo sapiens
  misc_feature: Table A; Target 76746; HLA-A*24:02; SLC22A9; ENSG00000149742; TAA
AIIFVPQEM

SEQ ID NO: 76747 - protein, 9 aa, Homo sapiens
  misc_feature: Table A; Target 76747; HLA-A*26:01; SLC22A9; ENSG00000149742; TAA
AIIFVPQEM

SEQ ID NO: 76748 - protein, 9 aa, Homo sapiens
  misc_feature: Table A; Target 76748; HLA-A*30:01; SLC22A9; ENSG00000149742; TAA
AIIFVPQEM

SEQ ID NO: 76749 - protein, 9 aa, Homo sapiens
  misc_feature: Table A; Target 76749; HLA-A*32:01; SLC22A9; ENSG00000149742; TAA
AIIFVPQEM

SEQ ID NO: 76750 - protein, 9 aa, Homo sapiens
  misc_feature: Table A; Target 76750; HLA-B*07:02; SLC22A9; ENSG00000149742; TAA
AIIFVPQEM

SEQ ID NO: 76751 - protein, 9 aa, Homo sapiens
  misc_feature: Table A; Target 76751; HLA-B*13:02; SLC22A9; ENSG00000149742; TAA
AIIFVPQEM

SEQ ID NO: 76752 - protein, 9 aa, Homo sapiens
  misc_feature: Table A; Target 76752; HLA-B*15:01; SLC22A9; ENSG00000149742; TAA
AIIFVPQEM

SEQ ID NO: 76753 - protein, 9 aa, Homo sapiens
  misc_feature: Table A; Target 76753; HLA-B*15:03; SLC22A9; ENSG00000149742; TAA
AIIFVPQEM

SEQ ID NO: 76754 - protein, 9 aa, Homo sapiens
  misc_feature: Table A; Target 76754; HLA-B*35:03; SLC22A9; ENSG00000149742; TAA
AIIFVPQEM

SEQ ID NO: 76755 - protein, 9 aa, Homo sapiens
  misc_feature: Table A; Target 76755; HLA-B*39:01; SLC22A9; ENSG00000149742; TAA
AIIFVPQEM

SEQ ID NO: 76756 - protein, 9 aa, Homo sapiens
  misc_feature: Table A; Target 76756; HLA-B*44:02; SLC22A9; ENSG00000149742; TAA
AIIFVPQEM

SEQ ID NO: 76757 - protein, 9 aa, Homo sapiens
  misc_feature: Table A; Target 76757; HLA-B*44:03; SLC22A9; ENSG00000149742; TAA
AIIFVPQEM

SEQ ID NO: 76758 - protein, 9 aa, Homo sapiens
  misc_feature: Table A; Target 76758; HLA-B*46:01; SLC22A9; ENSG00000149742; TAA
AIIFVPQEM

SEQ ID NO: 76759 - protein, 9 aa, Homo sapiens
  misc_feature: Table A; Target 76759; HLA-B*58:01; SLC22A9; ENSG00000149742; TAA
AIIFVPQEM

SEQ ID NO: 76760 - protein, 9 aa, Homo sapiens
  misc_feature: Table A; Target 76760; HLA-C*01:02; SLC22A9; ENSG00000149742; TAA
AIIFVPQEM

SEQ ID NO: 76761 - protein, 9 aa, Homo sapiens
  misc_feature: Table A; Target 76761; HLA-C*02:02; SLC22A9; ENSG00000149742; TAA
AIIFVPQEM

SEQ ID NO: 76762 - protein, 9 aa, Homo sapiens
  misc_feature: Table A; Target 76762; HLA-C*03:03; SLC22A9; ENSG00000149742; TAA
AIIFVPQEM

SEQ ID NO: 76763 - protein, 9 aa, Homo sapiens
  misc_feature: Table A; Target 76763; HLA-C*03:04; SLC22A9; ENSG00000149742; TAA
AIIFVPQEM

SEQ ID NO: 76764 - protein, 9 aa, Homo sapiens
  misc_feature: Table A; Target 76764; HLA-C*12:03; SLC22A9; ENSG00000149742; TAA
AIIFVPQEM

SEQ ID NO: 76765 - protein, 9 aa, Homo sapiens
  misc_feature: Table A; Target 76765; HLA-C*14:02; SLC22A9; ENSG00000149742; TAA
AIIFVPQEM

SEQ ID NO: 76766 - protein, 9 aa, Homo sapiens
  misc_feature: Table A; Target 76766; HLA-C*16:04; SLC22A9; ENSG00000149742; TAA
AIIFVPQEM

SEQ ID NO: 76767 - protein, 10 aa, Homo sapiens
  misc_feature: Table A; Target 76767; HLA-A*02:03; SLC22A9; ENSG00000149742; TAA
AIRDWHILQL

SEQ ID NO: 76768 - protein, 10 aa, Homo sapiens
  misc_feature: Table A; Target 76768; HLA-A*02:04; SLC22A9; ENSG00000149742; TAA
AIRDWHILQL

SEQ ID NO: 76769 - protein, 9 aa, Homo sapiens
  misc_feature: Table A; Target 76769; HLA-C*01:02; SLC22A9; ENSG00000149742; TAA
AIVGTCAAL

SEQ ID NO: 76770 - protein, 9 aa, Homo sapiens
  misc_feature: Table A; Target 76770; HLA-C*03:03; SLC22A9; ENSG00000149742; TAA
AIVGTCAAL

SEQ ID NO: 76771 - protein, 9 aa, Homo sapiens
  misc_feature: Table A; Target 76771; HLA-C*03:04; SLC22A9; ENSG00000149742; TAA
AIVGTCAAL

SEQ ID NO: 76772 - protein, 8 aa, Homo sapiens
  misc_feature: Table A; Target 76772; HLA-A*23:01; SLC22A9; ENSG00000149742; TAA
ALANTLAF

SEQ ID NO: 76773 - protein, 8 aa, Homo sapiens
  misc_feature: Table A; Target 76773; HLA-B*37:01; SLC22A9; ENSG00000149742; TAA
ALANTLAF

SEQ ID NO: 76774 - protein, 9 aa, Homo sapiens
  misc_feature: Table A; Target 76774; HLA-A*02:01; SLC22A9; ENSG00000149742; TAA
ALANTLAFA

SEQ ID NO: 76775 - protein, 9 aa, Homo sapiens
  misc_feature: Table A; Target 76775; HLA-A*02:03; SLC22A9; ENSG00000149742; TAA
ALANTLAFA

SEQ ID NO: 76776 - protein, 9 aa, Homo sapiens
  misc_feature: Table A; Target 76776; HLA-A*02:04; SLC22A9; ENSG00000149742; TAA
ALANTLAFA

SEQ ID NO: 76777 - protein, 9 aa, Homo sapiens
  misc_feature: Table A; Target 76777; HLA-B*55:01; SLC22A9; ENSG00000149742; TAA
ALANTLAFA

SEQ ID NO: 76778 - protein, 10 aa, Homo sapiens
  misc_feature: Table A; Target 76778; HLA-A*03:01; SLC22A9; ENSG00000149742; TAA
ALANTLAFAH

SEQ ID NO: 76779 - protein, 10 aa, Homo sapiens
  misc_feature: Table A; Target 76779; HLA-A*03:02; SLC22A9; ENSG00000149742; TAA
ALANTLAFAH

SEQ ID NO: 76780 - protein, 9 aa, Homo sapiens
  misc_feature: Table A; Target 76780; HLA-A*02:01; SLC22A9; ENSG00000149742; TAA
ALAPLMMIL

SEQ ID NO: 76781 - protein, 9 aa, Homo sapiens
  misc_feature: Table A; Target 76781; HLA-A*02:03; SLC22A9; ENSG00000149742; TAA
ALAPLMMIL

SEQ ID NO: 76782 - protein, 9 aa, Homo sapiens
  misc_feature: Table A; Target 76782; HLA-A*02:04; SLC22A9; ENSG00000149742; TAA
ALAPLMMIL

SEQ ID NO: 76783 - protein, 9 aa, Homo sapiens
  misc_feature: Table A; Target 76783; HLA-A*02:07; SLC22A9; ENSG00000149742; TAA
ALAPLMMIL

SEQ ID NO: 76784 - protein, 9 aa, Homo sapiens
  misc_feature: Table A; Target 76784; HLA-A*03:01; SLC22A9; ENSG00000149742; TAA
ALAPLMMIL

SEQ ID NO: 76785 - protein, 9 aa, Homo sapiens
  misc_feature: Table A; Target 76785; HLA-A*24:02; SLC22A9; ENSG00000149742; TAA
ALAPLMMIL

SEQ ID NO: 76786 - protein, 9 aa, Homo sapiens
  misc_feature: Table A; Target 76786; HLA-C*02:02; SLC22A9; ENSG00000149742; TAA
ALAPLMMIL

SEQ ID NO: 76787 - protein, 11 aa, Homo sapiens
  misc_feature: Table A; Target 76787; HLA-A*02:01; SLC22A9; ENSG00000149742; TAA
ALAPLMMILSV

SEQ ID NO: 76788 - protein, 11 aa, Homo sapiens
  misc_feature: Table A; Target 76788; HLA-A*02:04; SLC22A9; ENSG00000149742; TAA
ALAPLMMILSV

SEQ ID NO: 76789 - protein, 8 aa, Homo sapiens
  misc_feature: Table A; Target 76789; HLA-A*02:04; SLC22A9; ENSG00000149742; TAA
ALAPTFLI

SEQ ID NO: 76790 - protein, 8 aa, Homo sapiens
  misc_feature: Table A; Target 76790; HLA-A*23:01; SLC22A9; ENSG00000149742; TAA
ALAPTFLI

SEQ ID NO: 76791 - protein, 8 aa, Homo sapiens
  misc_feature: Table A; Target 76791; HLA-B*13:02; SLC22A9; ENSG00000149742; TAA
ALAPTFLI

SEQ ID NO: 76792 - protein, 9 aa, Homo sapiens
  misc_feature: Table A; Target 76792; HLA-A*01:01; SLC22A9; ENSG00000149742; TAA
ALAPTFLIY

SEQ ID NO: 76793 - protein, 9 aa, Homo sapiens
  misc_feature: Table A; Target 76793; HLA-A*03:01; SLC22A9; ENSG00000149742; TAA
ALAPTFLIY

SEQ ID NO: 76794 - protein, 9 aa, Homo sapiens
  misc_feature: Table A; Target 76794; HLA-A*23:01; SLC22A9; ENSG00000149742; TAA
ALAPTFLIY

SEQ ID NO: 76795 - protein, 9 aa, Homo sapiens
  misc_feature: Table A; Target 76795; HLA-A*24:02; SLC22A9; ENSG00000149742; TAA
ALAPTFLIY

SEQ ID NO: 76796 - protein, 9 aa, Homo sapiens
  misc_feature: Table A; Target 76796; HLA-A*25:01; SLC22A9; ENSG00000149742; TAA
ALAPTFLIY

SEQ ID NO: 76797 - protein, 9 aa, Homo sapiens
  misc_feature: Table A; Target 76797; HLA-A*26:01; SLC22A9; ENSG00000149742; TAA
ALAPTFLIY

SEQ ID NO: 76798 - protein, 9 aa, Homo sapiens
  misc_feature: Table A; Target 76798; HLA-A*29:02; SLC22A9; ENSG00000149742; TAA
ALAPTFLIY

SEQ ID NO: 76799 - protein, 9 aa, Homo sapiens
  misc_feature: Table A; Target 76799; HLA-A*30:02; SLC22A9; ENSG00000149742; TAA
ALAPTFLIY

SEQ ID NO: 76800 - protein, 9 aa, Homo sapiens
  misc_feature: Table A; Target 76800; HLA-A*32:01; SLC22A9; ENSG00000149742; TAA
ALAPTFLIY

SEQ ID NO: 76801 - protein, 9 aa, Homo sapiens
  misc_feature: Table A; Target 76801; HLA-B*15:01; SLC22A9; ENSG00000149742; TAA
ALAPTFLIY

SEQ ID NO: 76802 - protein, 9 aa, Homo sapiens
  misc_feature: Table A; Target 76802; HLA-B*15:03; SLC22A9; ENSG00000149742; TAA
ALAPTFLIY

SEQ ID NO: 76803 - protein, 9 aa, Homo sapiens
  misc_feature: Table A; Target 76803; HLA-B*35:01; SLC22A9; ENSG00000149742; TAA
ALAPTFLIY

SEQ ID NO: 76804 - protein, 9 aa, Homo sapiens
  misc_feature: Table A; Target 76804; HLA-B*44:03; SLC22A9; ENSG00000149742; TAA
ALAPTFLIY

SEQ ID NO: 76805 - protein, 9 aa, Homo sapiens
  misc_feature: Table A; Target 76805; HLA-B*46:01; SLC22A9; ENSG00000149742; TAA
ALAPTFLIY

SEQ ID NO: 76806 - protein, 9 aa, Homo sapiens
  misc_feature: Table A; Target 76806; HLA-B*57:01; SLC22A9; ENSG00000149742; TAA
ALAPTFLIY

SEQ ID NO: 76807 - protein, 9 aa, Homo sapiens
  misc_feature: Table A; Target 76807; HLA-B*58:01; SLC22A9; ENSG00000149742; TAA
ALAPTFLIY

SEQ ID NO: 76808 - protein, 9 aa, Homo sapiens
  misc_feature: Table A; Target 76808; HLA-C*02:02; SLC22A9; ENSG00000149742; TAA
ALAPTFLIY

SEQ ID NO: 76809 - protein, 9 aa, Homo sapiens
  misc_feature: Table A; Target 76809; HLA-C*07:04; SLC22A9; ENSG00000149742; TAA
ALAPTFLIY

SEQ ID NO: 76810 - protein, 9 aa, Homo sapiens
  misc_feature: Table A; Target 76810; HLA-C*16:01; SLC22A9; ENSG00000149742; TAA
ALAPTFLIY

SEQ ID NO: 76811 - protein, 10 aa, Homo sapiens
  misc_feature: Table A; Target 76811; HLA-A*02:01; SLC22A9; ENSG00000149742; TAA
ALAPTFLIYC

SEQ ID NO: 76812 - protein, 10 aa, Homo sapiens
  misc_feature: Table A; Target 76812; HLA-A*02:03; SLC22A9; ENSG00000149742; TAA
ALAPTFLIYC

SEQ ID NO: 76813 - protein, 10 aa, Homo sapiens
  misc_feature: Table A; Target 76813; HLA-A*02:04; SLC22A9; ENSG00000149742; TAA
ALAPTFLIYC

SEQ ID NO: 76814 - protein, 9 aa, Homo sapiens
  misc_feature: Table A; Target 76814; HLA-A*02:01; SLC22A9; ENSG00000149742; TAA
ALLRISIPL

SEQ ID NO: 76815 - protein, 9 aa, Homo sapiens
  misc_feature: Table A; Target 76815; HLA-A*02:04; SLC22A9; ENSG00000149742; TAA
ALLRISIPL

SEQ ID NO: 76816 - protein, 9 aa, Homo sapiens
  misc_feature: Table A; Target 76816; HLA-A*03:01; SLC22A9; ENSG00000149742; TAA
ALLRISIPL

SEQ ID NO: 76817 - protein, 10 aa, Homo sapiens
  misc_feature: Table A; Target 76817; HLA-A*02:01; SLC22A9; ENSG00000149742; TAA
ALSQDALLRI

SEQ ID NO: 76818 - protein, 10 aa, Homo sapiens
  misc_feature: Table A; Target 76818; HLA-A*02:03; SLC22A9; ENSG00000149742; TAA
ALSQDALLRI

SEQ ID NO: 76819 - protein, 10 aa, Homo sapiens
  misc_feature: Table A; Target 76819; HLA-A*02:04; SLC22A9; ENSG00000149742; TAA
ALSQDALLRI

SEQ ID NO: 76820 - protein, 10 aa, Homo sapiens
  misc_feature: Table A; Target 76820; HLA-B*13:02; SLC22A9; ENSG00000149742; TAA
ALSQDALLRI

SEQ ID NO: 76821 - protein, 8 aa, Homo sapiens
  misc_feature: Table A; Target 76821; HLA-A*23:01; SLC22A9; ENSG00000149742; TAA
AMGINATF

SEQ ID NO: 76822 - protein, 8 aa, Homo sapiens
  misc_feature: Table A; Target 76822; HLA-A*32:01; SLC22A9; ENSG00000149742; TAA
AMGINATF

SEQ ID NO: 76823 - protein, 8 aa, Homo sapiens
  misc_feature: Table A; Target 76823; HLA-B*15:01; SLC22A9; ENSG00000149742; TAA
AMGINATF

SEQ ID NO: 76824 - protein, 8 aa, Homo sapiens
  misc_feature: Table A; Target 76824; HLA-B*37:01; SLC22A9; ENSG00000149742; TAA
AMGINATF

SEQ ID NO: 76825 - protein, 8 aa, Homo sapiens
  misc_feature: Table A; Target 76825; HLA-B*46:01; SLC22A9; ENSG00000149742; TAA
AMGINATF

SEQ ID NO: 76826 - protein, 8 aa, Homo sapiens
  misc_feature: Table A; Target 76826; HLA-C*14:02; SLC22A9; ENSG00000149742; TAA
AMGINATF

SEQ ID NO: 76827 - protein, 8 aa, Homo sapiens
  misc_feature: Table A; Target 76827; HLA-C*16:01; SLC22A9; ENSG00000149742; TAA
AMGINATF

SEQ ID NO: 76828 - protein, 9 aa, Homo sapiens
  misc_feature: Table A; Target 76828; HLA-A*02:01; SLC22A9; ENSG00000149742; TAA
AMSLITNTI

SEQ ID NO: 76829 - protein, 9 aa, Homo sapiens
  misc_feature: Table A; Target 76829; HLA-A*02:03; SLC22A9; ENSG00000149742; TAA
AMSLITNTI

SEQ ID NO: 76830 - protein, 9 aa, Homo sapiens
  misc_feature: Table A; Target 76830; HLA-A*23:01; SLC22A9; ENSG00000149742; TAA
AMSLITNTI

SEQ ID NO: 76831 - protein, 9 aa, Homo sapiens
  misc_feature: Table A; Target 76831; HLA-A*24:02; SLC22A9; ENSG00000149742; TAA
AMSLITNTI

SEQ ID NO: 76832 - protein, 9 aa, Homo sapiens
  misc_feature: Table A; Target 76832; HLA-A*30:01; SLC22A9; ENSG00000149742; TAA
AMSLITNTI

SEQ ID NO: 76833 - protein, 9 aa, Homo sapiens
  misc_feature: Table A; Target 76833; HLA-A*32:01; SLC22A9; ENSG00000149742; TAA
AMSLITNTI

SEQ ID NO: 76834 - protein, 9 aa, Homo sapiens
  misc_feature: Table A; Target 76834; HLA-B*13:02; SLC22A9; ENSG00000149742; TAA
AMSLITNTI

SEQ ID NO: 76835 - protein, 9 aa, Homo sapiens
  misc_feature: Table A; Target 76835; HLA-B*37:01; SLC22A9; ENSG00000149742; TAA
AMSLITNTI

SEQ ID NO: 76836 - protein, 9 aa, Homo sapiens
  misc_feature: Table A; Target 76836; HLA-B*38:01; SLC22A9; ENSG00000149742; TAA
AMSLITNTI

SEQ ID NO: 76837 - protein, 9 aa, Homo sapiens
  misc_feature: Table A; Target 76837; HLA-B*49:01; SLC22A9; ENSG00000149742; TAA
AMSLITNTI

SEQ ID NO: 76838 - protein, 9 aa, Homo sapiens
  misc_feature: Table A; Target 76838; HLA-B*55:01; SLC22A9; ENSG00000149742; TAA
AMSLITNTI

SEQ ID NO: 76839 - protein, 9 aa, Homo sapiens
  misc_feature: Table A; Target 76839; HLA-C*06:02; SLC22A9; ENSG00000149742; TAA
AMSLITNTI

SEQ ID NO: 76840 - protein, 9 aa, Homo sapiens
  misc_feature: Table A; Target 76840; HLA-B*51:01; SLC22A9; ENSG00000149742; TAA
APLMMILSV

SEQ ID NO: 76841 - protein, 9 aa, Homo sapiens
  misc_feature: Table A; Target 76841; HLA-B*54:01; SLC22A9; ENSG00000149742; TAA
APLMMILSV

SEQ ID NO: 76842 - protein, 9 aa, Homo sapiens
  misc_feature: Table A; Target 76842; HLA-B*55:01; SLC22A9; ENSG00000149742; TAA
APLMMILSV

SEQ ID NO: 76843 - protein, 9 aa, Homo sapiens
  misc_feature: Table A; Target 76843; HLA-B*56:01; SLC22A9; ENSG00000149742; TAA
APLMMILSV

SEQ ID NO: 76844 - protein, 10 aa, Homo sapiens
  misc_feature: Table A; Target 76844; HLA-B*35:01; SLC22A9; ENSG00000149742; TAA
APLMMILSVY

SEQ ID NO: 76845 - protein, 8 aa, Homo sapiens
  misc_feature: Table A; Target 76845; HLA-B*56:01; SLC22A9; ENSG00000149742; TAA
APTFLIYC

SEQ ID NO: 76846 - protein, 8 aa, Homo sapiens
  misc_feature: Table A; Target 76846; HLA-B*08:01; SLC22A9; ENSG00000149742; TAA
AQKKKPSL

SEQ ID NO: 76847 - protein, 10 aa, Homo sapiens
  misc_feature: Table A; Target 76847; HLA-B*27:02; SLC22A9; ENSG00000149742; TAA
ARAMGINATF

SEQ ID NO: 76848 - protein, 10 aa, Homo sapiens
  misc_feature: Table A; Target 76848; HLA-B*27:05; SLC22A9; ENSG00000149742; TAA
ARAMGINATF

SEQ ID NO: 76849 - protein, 10 aa, Homo sapiens
  misc_feature: Table A; Target 76849; HLA-B*38:01; SLC22A9; ENSG00000149742; TAA
ARAMGINATF

SEQ ID NO: 76850 - protein, 10 aa, Homo sapiens
  misc_feature: Table A; Target 76850; HLA-B*44:02; SLC22A9; ENSG00000149742; TAA
ARAMGINATF

SEQ ID NO: 76851 - protein, 10 aa, Homo sapiens
  misc_feature: Table A; Target 76851; HLA-C*16:04; SLC22A9; ENSG00000149742; TAA
ARAMGINATF

SEQ ID NO: 76852 - protein, 9 aa, Homo sapiens
  misc_feature: Table A; Target 76852; HLA-B*38:01; SLC22A9; ENSG00000149742; TAA
ARDTLTLEI

SEQ ID NO: 76853 - protein, 9 aa, Homo sapiens
  misc_feature: Table A; Target 76853; HLA-B*27:05; SLC22A9; ENSG00000149742; TAA
ARWLIINNK

SEQ ID NO: 76854 - protein, 8 aa, Homo sapiens
  misc_feature: Table A; Target 76854; HLA-B*58:01; SLC22A9; ENSG00000149742; TAA
ASALANTL

SEQ ID NO: 76855 - protein, 8 aa, Homo sapiens
  misc_feature: Table A; Target 76855; HLA-C*01:02; SLC22A9; ENSG00000149742; TAA
ASALANTL

SEQ ID NO: 76856 - protein, 8 aa, Homo sapiens
  misc_feature: Table A; Target 76856; HLA-C*03:03; SLC22A9; ENSG00000149742; TAA
ASALANTL

SEQ ID NO: 76857 - protein, 8 aa, Homo sapiens
  misc_feature: Table A; Target 76857; HLA-C*03:04; SLC22A9; ENSG00000149742; TAA
ASALANTL

SEQ ID NO: 76858 - protein, 8 aa, Homo sapiens
  misc_feature: Table A; Target 76858; HLA-C*14:02; SLC22A9; ENSG00000149742; TAA
ASALANTL

SEQ ID NO: 76859 - protein, 8 aa, Homo sapiens
  misc_feature: Table A; Target 76859; HLA-C*16:01; SLC22A9; ENSG00000149742; TAA
ASALANTL

SEQ ID NO: 76860 - protein, 10 aa, Homo sapiens
  misc_feature: Table A; Target 76860; HLA-A*25:01; SLC22A9; ENSG00000149742; TAA
ASALANTLAF

SEQ ID NO: 76861 - protein, 10 aa, Homo sapiens
  misc_feature: Table A; Target 76861; HLA-B*58:01; SLC22A9; ENSG00000149742; TAA
ASALANTLAF

SEQ ID NO: 76862 - protein, 10 aa, Homo sapiens
  misc_feature: Table A; Target 76862; HLA-C*16:04; SLC22A9; ENSG00000149742; TAA
ASALANTLAF

SEQ ID NO: 76863 - protein, 9 aa, Homo sapiens
  misc_feature: Table A; Target 76863; HLA-A*02:01; SLC22A9; ENSG00000149742; TAA
ATFANIAGA

SEQ ID NO: 76864 - protein, 9 aa, Homo sapiens
  misc_feature: Table A; Target 76864; HLA-A*02:03; SLC22A9; ENSG00000149742; TAA
ATFANIAGA

SEQ ID NO: 76865 - protein, 9 aa, Homo sapiens
  misc_feature: Table A; Target 76865; HLA-B*56:01; SLC22A9; ENSG00000149742; TAA
ATFANIAGA

SEQ ID NO: 76866 - protein, 10 aa, Homo sapiens
  misc_feature: Table A; Target 76866; HLA-A*03:01; SLC22A9; ENSG00000149742; TAA
ATFANIAGAL

SEQ ID NO: 76867 - protein, 9 aa, Homo sapiens
  misc_feature: Table A; Target 76867; HLA-B*56:01; SLC22A9; ENSG00000149742; TAA
ATLGLGASA

SEQ ID NO: 76868 - protein, 9 aa, Homo sapiens
  misc_feature: Table A; Target 76868; HLA-C*14:02; SLC22A9; ENSG00000149742; TAA
ATLGLGASA

SEQ ID NO: 76869 - protein, 10 aa, Homo sapiens
  misc_feature: Table A; Target 76869; HLA-A*03:02; SLC22A9; ENSG00000149742; TAA
ATLGLGASAL

SEQ ID NO: 76870 - protein, 10 aa, Homo sapiens
  misc_feature: Table A; Target 76870; HLA-A*11:01; SLC22A9; ENSG00000149742; TAA
ATLGLGASAL

SEQ ID NO: 76871 - protein, 10 aa, Homo sapiens
  misc_feature: Table A; Target 76871; HLA-A*30:01; SLC22A9; ENSG00000149742; TAA
ATLGLGASAL

SEQ ID NO: 76872 - protein, 10 aa, Homo sapiens
  misc_feature: Table A; Target 76872; HLA-A*31:01; SLC22A9; ENSG00000149742; TAA
ATLGLGASAL

SEQ ID NO: 76873 - protein, 10 aa, Homo sapiens
  misc_feature: Table A; Target 76873; HLA-B*40:01; SLC22A9; ENSG00000149742; TAA
ATLGLGASAL

SEQ ID NO: 76874 - protein, 10 aa, Homo sapiens
  misc_feature: Table A; Target 76874; HLA-B*40:02; SLC22A9; ENSG00000149742; TAA
ATLGLGASAL

SEQ ID NO: 76875 - protein, 10 aa, Homo sapiens
  misc_feature: Table A; Target 76875; HLA-B*46:01; SLC22A9; ENSG00000149742; TAA
ATLGLGASAL

SEQ ID NO: 76876 - protein, 10 aa, Homo sapiens
  misc_feature: Table A; Target 76876; HLA-B*58:01; SLC22A9; ENSG00000149742; TAA
ATLGLGASAL

SEQ ID NO: 76877 - protein, 10 aa, Homo sapiens
  misc_feature: Table A; Target 76877; HLA-C*01:02; SLC22A9; ENSG00000149742; TAA
ATLGLGASAL

SEQ ID NO: 76878 - protein, 10 aa, Homo sapiens
  misc_feature: Table A; Target 76878; HLA-C*03:03; SLC22A9; ENSG00000149742; TAA
ATLGLGASAL

SEQ ID NO: 76879 - protein, 10 aa, Homo sapiens
  misc_feature: Table A; Target 76879; HLA-C*03:04; SLC22A9; ENSG00000149742; TAA
ATLGLGASAL

SEQ ID NO: 76880 - protein, 10 aa, Homo sapiens
  misc_feature: Table A; Target 76880; HLA-C*07:01; SLC22A9; ENSG00000149742; TAA
ATLGLGASAL

SEQ ID NO: 76881 - protein, 10 aa, Homo sapiens
  misc_feature: Table A; Target 76881; HLA-C*07:02; SLC22A9; ENSG00000149742; TAA
ATLGLGASAL

SEQ ID NO: 76882 - protein, 10 aa, Homo sapiens
  misc_feature: Table A; Target 76882; HLA-C*12:03; SLC22A9; ENSG00000149742; TAA
ATLGLGASAL

SEQ ID NO: 76883 - protein, 10 aa, Homo sapiens
  misc_feature: Table A; Target 76883; HLA-C*14:02; SLC22A9; ENSG00000149742; TAA
ATLGLGASAL

SEQ ID NO: 76884 - protein, 10 aa, Homo sapiens
  misc_feature: Table A; Target 76884; HLA-C*16:04; SLC22A9; ENSG00000149742; TAA
ATLGLGASAL

SEQ ID NO: 76885 - protein, 9 aa, Homo sapiens
  misc_feature: Table A; Target 76885; HLA-A*02:04; SLC22A9; ENSG00000149742; TAA
AVATYLHFM

SEQ ID NO: 76886 - protein, 9 aa, Homo sapiens
  misc_feature: Table A; Target 76886; HLA-B*13:02; SLC22A9; ENSG00000149742; TAA
AVILLANCV

SEQ ID NO: 76887 - protein, 9 aa, Homo sapiens
  misc_feature: Table A; Target 76887; HLA-C*06:02; SLC22A9; ENSG00000149742; TAA
AVILLANCV

SEQ ID NO: 76888 - protein, 9 aa, Homo sapiens
  misc_feature: Table A; Target 76888; HLA-A*24:02; SLC22A9; ENSG00000149742; TAA
AYFGLNLHV

SEQ ID NO: 76889 - protein, 9 aa, Homo sapiens
  misc_feature: Table A; Target 76889; HLA-A*29:02; SLC22A9; ENSG00000149742; TAA
AYFGLNLHV

SEQ ID NO: 76890 - protein, 8 aa, Homo sapiens
  misc_feature: Table A; Target 76890; HLA-B*15:03; SLC22A9; ENSG00000149742; TAA
CAALAPTF

SEQ ID NO: 76891 - protein, 8 aa, Homo sapiens
  misc_feature: Table A; Target 76891; HLA-B*51:01; SLC22A9; ENSG00000149742; TAA
CAALAPTF

SEQ ID NO: 76892 - protein, 8 aa, Homo sapiens
  misc_feature: Table A; Target 76892; HLA-C*03:03; SLC22A9; ENSG00000149742; TAA
CAALAPTF

SEQ ID NO: 76893 - protein, 8 aa, Homo sapiens
  misc_feature: Table A; Target 76893; HLA-C*03:04; SLC22A9; ENSG00000149742; TAA
CAALAPTF

SEQ ID NO: 76894 - protein, 8 aa, Homo sapiens
  misc_feature: Table A; Target 76894; HLA-C*16:01; SLC22A9; ENSG00000149742; TAA
CAALAPTF

SEQ ID NO: 76895 - protein, 9 aa, Homo sapiens
  misc_feature: Table A; Target 76895; HLA-B*37:01; SLC22A9; ENSG00000149742; TAA
CDSQSLTSV

SEQ ID NO: 76896 - protein, 9 aa, Homo sapiens
  misc_feature: Table A; Target 76896; HLA-B*49:01; SLC22A9; ENSG00000149742; TAA
CDSQSLTSV

SEQ ID NO: 76897 - protein, 11 aa, Homo sapiens
  misc_feature: Table A; Target 76897; HLA-B*27:02; SLC22A9; ENSG00000149742; TAA
CDSQSLTSVAK

SEQ ID NO: 76898 - protein, 9 aa, Homo sapiens
  misc_feature: Table A; Target 76898; HLA-B*49:01; SLC22A9; ENSG00000149742; TAA
CEMLHMPNI

SEQ ID NO: 76899 - protein, 10 aa, Homo sapiens
  misc_feature: Table A; Target 76899; HLA-B*07:02; SLC22A9; ENSG00000149742; TAA
CPSGIAFMTL

SEQ ID NO: 76900 - protein, 10 aa, Homo sapiens
  misc_feature: Table A; Target 76900; HLA-B*35:01; SLC22A9; ENSG00000149742; TAA
CPSGIAFMTL

SEQ ID NO: 76901 - protein, 10 aa, Homo sapiens
  misc_feature: Table A; Target 76901; HLA-B*35:03; SLC22A9; ENSG00000149742; TAA
CPSGIAFMTL

SEQ ID NO: 76902 - protein, 10 aa, Homo sapiens
  misc_feature: Table A; Target 76902; HLA-B*56:01; SLC22A9; ENSG00000149742; TAA
CPSGIAFMTL

SEQ ID NO: 76903 - protein, 9 aa, Homo sapiens
  misc_feature: Table A; Target 76903; HLA-A*01:01; SLC22A9; ENSG00000149742; TAA
CVAPWALKY

SEQ ID NO: 76904 - protein, 9 aa, Homo sapiens
  misc_feature: Table A; Target 76904; HLA-A*03:01; SLC22A9; ENSG00000149742; TAA
CVAPWALKY

SEQ ID NO: 76905 - protein, 9 aa, Homo sapiens
  misc_feature: Table A; Target 76905; HLA-A*11:01; SLC22A9; ENSG00000149742; TAA
CVAPWALKY

SEQ ID NO: 76906 - protein, 9 aa, Homo sapiens
  misc_feature: Table A; Target 76906; HLA-A*26:01; SLC22A9; ENSG00000149742; TAA
CVAPWALKY

SEQ ID NO: 76907 - protein, 9 aa, Homo sapiens
  misc_feature: Table A; Target 76907; HLA-A*29:02; SLC22A9; ENSG00000149742; TAA
CVAPWALKY

SEQ ID NO: 76908 - protein, 9 aa, Homo sapiens
  misc_feature: Table A; Target 76908; HLA-A*30:02; SLC22A9; ENSG00000149742; TAA
CVAPWALKY

SEQ ID NO: 76909 - protein, 9 aa, Homo sapiens
  misc_feature: Table A; Target 76909; HLA-A*32:01; SLC22A9; ENSG00000149742; TAA
CVAPWALKY

SEQ ID NO: 76910 - protein, 9 aa, Homo sapiens
  misc_feature: Table A; Target 76910; HLA-B*15:01; SLC22A9; ENSG00000149742; TAA
CVAPWALKY

SEQ ID NO: 76911 - protein, 9 aa, Homo sapiens
  misc_feature: Table A; Target 76911; HLA-B*57:01; SLC22A9; ENSG00000149742; TAA
CVAPWALKY

SEQ ID NO: 76912 - protein, 9 aa, Homo sapiens
  misc_feature: Table A; Target 76912; HLA-C*02:02; SLC22A9; ENSG00000149742; TAA
CVAPWALKY

SEQ ID NO: 76913 - protein, 9 aa, Homo sapiens
  misc_feature: Table A; Target 76913; HLA-C*12:03; SLC22A9; ENSG00000149742; TAA
CVAPWALKY

SEQ ID NO: 76914 - protein, 8 aa, Homo sapiens
  misc_feature: Table A; Target 76914; HLA-B*51:01; SLC22A9; ENSG00000149742; TAA
DADMEPCV

SEQ ID NO: 76915 - protein, 8 aa, Homo sapiens
  misc_feature: Table A; Target 76915; HLA-B*08:01; SLC22A9; ENSG00000149742; TAA
DALLRISI

SEQ ID NO: 76916 - protein, 8 aa, Homo sapiens
  misc_feature: Table A; Target 76916; HLA-B*51:01; SLC22A9; ENSG00000149742; TAA
DALLRISI

SEQ ID NO: 76917 - protein, 8 aa, Homo sapiens
  misc_feature: Table A; Target 76917; HLA-B*51:01; SLC22A9; ENSG00000149742; TAA
DGWVYDRI

SEQ ID NO: 76918 - protein, 10 aa, Homo sapiens
  misc_feature: Table A; Target 76918; HLA-A*25:01; SLC22A9; ENSG00000149742; TAA
DLLGHAGDLW

SEQ ID NO: 76919 - protein, 11 aa, Homo sapiens
  misc_feature: Table A; Target 76919; HLA-A*01:01; SLC22A9; ENSG00000149742; TAA
DMEPCVDGWVY

SEQ ID NO: 76920 - protein, 9 aa, Homo sapiens
  misc_feature: Table A; Target 76920; HLA-A*25:01; SLC22A9; ENSG00000149742; TAA
DPRVEVTQF

SEQ ID NO: 76921 - protein, 9 aa, Homo sapiens
  misc_feature: Table A; Target 76921; HLA-A*33:01; SLC22A9; ENSG00000149742; TAA
DPRVEVTQF

SEQ ID NO: 76922 - protein, 9 aa, Homo sapiens
  misc_feature: Table A; Target 76922; HLA-B*07:02; SLC22A9; ENSG00000149742; TAA
DPRVEVTQF

SEQ ID NO: 76923 - protein, 9 aa, Homo sapiens
  misc_feature: Table A; Target 76923; HLA-B*08:01; SLC22A9; ENSG00000149742; TAA
DPRVEVTQF

SEQ ID NO: 76924 - protein, 9 aa, Homo sapiens
  misc_feature: Table A; Target 76924; HLA-B*18:01; SLC22A9; ENSG00000149742; TAA
DPRVEVTQF

SEQ ID NO: 76925 - protein, 9 aa, Homo sapiens
  misc_feature: Table A; Target 76925; HLA-B*35:01; SLC22A9; ENSG00000149742; TAA
DPRVEVTQF

SEQ ID NO: 76926 - protein, 9 aa, Homo sapiens
  misc_feature: Table A; Target 76926; HLA-B*51:01; SLC22A9; ENSG00000149742; TAA
DPRVEVTQF

SEQ ID NO: 76927 - protein, 9 aa, Homo sapiens
  misc_feature: Table A; Target 76927; HLA-B*55:01; SLC22A9; ENSG00000149742; TAA
DPRVEVTQF

SEQ ID NO: 76928 - protein, 9 aa, Homo sapiens
  misc_feature: Table A; Target 76928; HLA-C*07:02; SLC22A9; ENSG00000149742; TAA
DPRVEVTQF

SEQ ID NO: 76929 - protein, 10 aa, Homo sapiens
  misc_feature: Table A; Target 76929; HLA-A*33:01; SLC22A9; ENSG00000149742; TAA
DSNMRPEKCR

SEQ ID NO: 76930 - protein, 8 aa, Homo sapiens
  misc_feature: Table A; Target 76930; HLA-B*51:01; SLC22A9; ENSG00000149742; TAA
DSQSLTSV

SEQ ID NO: 76931 - protein, 10 aa, Homo sapiens
  misc_feature: Table A; Target 76931; HLA-A*03:02; SLC22A9; ENSG00000149742; TAA
DSQSLTSVAK

SEQ ID NO: 76932 - protein, 10 aa, Homo sapiens
  misc_feature: Table A; Target 76932; HLA-A*11:01; SLC22A9; ENSG00000149742; TAA
DSQSLTSVAK

SEQ ID NO: 76933 - protein, 10 aa, Homo sapiens
  misc_feature: Table A; Target 76933; HLA-A*33:01; SLC22A9; ENSG00000149742; TAA
DSQSLTSVAK

SEQ ID NO: 76934 - protein, 10 aa, Homo sapiens
  misc_feature: Table A; Target 76934; HLA-A*33:03; SLC22A9; ENSG00000149742; TAA
DSQSLTSVAK

SEQ ID NO: 76935 - protein, 10 aa, Homo sapiens
  misc_feature: Table A; Target 76935; HLA-A*68:01; SLC22A9; ENSG00000149742; TAA
DSQSLTSVAK

SEQ ID NO: 76936 - protein, 10 aa, Homo sapiens
  misc_feature: Table A; Target 76936; HLA-B*27:02; SLC22A9; ENSG00000149742; TAA
DSQSLTSVAK

SEQ ID NO: 76937 - protein, 10 aa, Homo sapiens
  misc_feature: Table A; Target 76937; HLA-C*07:06; SLC22A9; ENSG00000149742; TAA
DSQSLTSVAK

SEQ ID NO: 76938 - protein, 11 aa, Homo sapiens
  misc_feature: Table A; Target 76938; HLA-A*25:01; SLC22A9; ENSG00000149742; TAA
DSQSLTSVAKF

SEQ ID NO: 76939 - protein, 11 aa, Homo sapiens
  misc_feature: Table A; Target 76939; HLA-A*26:01; SLC22A9; ENSG00000149742; TAA
DSQSLTSVAKF

SEQ ID NO: 76940 - protein, 11 aa, Homo sapiens
  misc_feature: Table A; Target 76940; HLA-A*33:01; SLC22A9; ENSG00000149742; TAA
DSQSLTSVAKF

SEQ ID NO: 76941 - protein, 10 aa, Homo sapiens
  misc_feature: Table A; Target 76941; HLA-A*33:01; SLC22A9; ENSG00000149742; TAA
DTIQDEKNER

SEQ ID NO: 76942 - protein, 10 aa, Homo sapiens
  misc_feature: Table A; Target 76942; HLA-A*33:03; SLC22A9; ENSG00000149742; TAA
DTIQDEKNER

SEQ ID NO: 76943 - protein, 10 aa, Homo sapiens
  misc_feature: Table A; Target 76943; HLA-A*68:01; SLC22A9; ENSG00000149742; TAA
DTIQDEKNER

SEQ ID NO: 76944 - protein, 10 aa, Homo sapiens
  misc_feature: Table A; Target 76944; HLA-C*07:06; SLC22A9; ENSG00000149742; TAA
DTIQDEKNER

SEQ ID NO: 76945 - protein, 11 aa, Homo sapiens
  misc_feature: Table A; Target 76945; HLA-A*33:01; SLC22A9; ENSG00000149742; TAA
DTIQDEKNERK

SEQ ID NO: 76946 - protein, 11 aa, Homo sapiens
  misc_feature: Table A; Target 76946; HLA-A*68:01; SLC22A9; ENSG00000149742; TAA
DTIQDEKNERK

SEQ ID NO: 76947 - protein, 9 aa, Homo sapiens
  misc_feature: Table A; Target 76947; HLA-A*11:01; SLC22A9; ENSG00000149742; TAA
DTLTLEILK

SEQ ID NO: 76948 - protein, 9 aa, Homo sapiens
  misc_feature: Table A; Target 76948; HLA-A*33:01; SLC22A9; ENSG00000149742; TAA
DTLTLEILK

SEQ ID NO: 76949 - protein, 9 aa, Homo sapiens
  misc_feature: Table A; Target 76949; HLA-A*33:03; SLC22A9; ENSG00000149742; TAA
DTLTLEILK

SEQ ID NO: 76950 - protein, 9 aa, Homo sapiens
  misc_feature: Table A; Target 76950; HLA-A*68:01; SLC22A9; ENSG00000149742; TAA
DTLTLEILK

SEQ ID NO: 76951 - protein, 9 aa, Homo sapiens
  misc_feature: Table A; Target 76951; HLA-B*27:02; SLC22A9; ENSG00000149742; TAA
DTLTLEILK

SEQ ID NO: 76952 - protein, 10 aa, Homo sapiens
  misc_feature: Table A; Target 76952; HLA-A*33:01; SLC22A9; ENSG00000149742; TAA
DTLTLEILKS

SEQ ID NO: 76953 - protein, 11 aa, Homo sapiens
  misc_feature: Table A; Target 76953; HLA-A*33:01; SLC22A9; ENSG00000149742; TAA
DTLTLEILKST

SEQ ID NO: 76954 - protein, 10 aa, Homo sapiens
  misc_feature: Table A; Target 76954; HLA-A*25:01; SLC22A9; ENSG00000149742; TAA
EDPRVEVTQF

SEQ ID NO: 76955 - protein, 10 aa, Homo sapiens
  misc_feature: Table A; Target 76955; HLA-A*26:01; SLC22A9; ENSG00000149742; TAA
EDPRVEVTQF

SEQ ID NO: 76956 - protein, 10 aa, Homo sapiens
  misc_feature: Table A; Target 76956; HLA-B*44:03; SLC22A9; ENSG00000149742; TAA
EDPRVEVTQF

SEQ ID NO: 76957 - protein, 9 aa, Homo sapiens
  misc_feature: Table A; Target 76957; HLA-B*08:01; SLC22A9; ENSG00000149742; TAA
EMQTLREVL

SEQ ID NO: 76958 - protein, 9 aa, Homo sapiens
  misc_feature: Table A; Target 76958; HLA-B*35:01; SLC22A9; ENSG00000149742; TAA
EPCVDGWVY

SEQ ID NO: 76959 - protein, 8 aa, Homo sapiens
  misc_feature: Table A; Target 76959; HLA-A*33:03; SLC22A9; ENSG00000149742; TAA
EVIPTIIR

SEQ ID NO: 76960 - protein, 8 aa, Homo sapiens
  misc_feature: Table A; Target 76960; HLA-A*68:01; SLC22A9; ENSG00000149742; TAA
EVIPTIIR

SEQ ID NO: 76961 - protein, 9 aa, Homo sapiens
  misc_feature: Table A; Target 76961; HLA-A*02:03; SLC22A9; ENSG00000149742; TAA
EVIPTIIRA

SEQ ID NO: 76962 - protein, 9 aa, Homo sapiens
  misc_feature: Table A; Target 76962; HLA-A*02:04; SLC22A9; ENSG00000149742; TAA
EVIPTIIRA

SEQ ID NO: 76963 - protein, 9 aa, Homo sapiens
  misc_feature: Table A; Target 76963; HLA-A*02:07; SLC22A9; ENSG00000149742; TAA
EVIPTIIRA

SEQ ID NO: 76964 - protein, 9 aa, Homo sapiens
  misc_feature: Table A; Target 76964; HLA-A*25:01; SLC22A9; ENSG00000149742; TAA
EVIPTIIRA

SEQ ID NO: 76965 - protein, 9 aa, Homo sapiens
  misc_feature: Table A; Target 76965; HLA-A*26:01; SLC22A9; ENSG00000149742; TAA
EVIPTIIRA

SEQ ID NO: 76966 - protein, 9 aa, Homo sapiens
  misc_feature: Table A; Target 76966; HLA-A*33:03; SLC22A9; ENSG00000149742; TAA
EVIPTIIRA

SEQ ID NO: 76967 - protein, 9 aa, Homo sapiens
  misc_feature: Table A; Target 76967; HLA-A*68:01; SLC22A9; ENSG00000149742; TAA
EVIPTIIRA

SEQ ID NO: 76968 - protein, 9 aa, Homo sapiens
  misc_feature: Table A; Target 76968; HLA-A*68:02; SLC22A9; ENSG00000149742; TAA
EVIPTIIRA

SEQ ID NO: 76969 - protein, 9 aa, Homo sapiens
  misc_feature: Table A; Target 76969; HLA-B*54:01; SLC22A9; ENSG00000149742; TAA
EVIPTIIRA

SEQ ID NO: 76970 - protein, 9 aa, Homo sapiens
  misc_feature: Table A; Target 76970; HLA-B*55:01; SLC22A9; ENSG00000149742; TAA
EVIPTIIRA

SEQ ID NO: 76971 - protein, 9 aa, Homo sapiens
  misc_feature: Table A; Target 76971; HLA-B*56:01; SLC22A9; ENSG00000149742; TAA
EVIPTIIRA

SEQ ID NO: 76972 - protein, 9 aa, Homo sapiens
  misc_feature: Table A; Target 76972; HLA-C*02:02; SLC22A9; ENSG00000149742; TAA
EVIPTIIRA

SEQ ID NO: 76973 - protein, 10 aa, Homo sapiens
  misc_feature: Table A; Target 76973; HLA-A*11:01; SLC22A9; ENSG00000149742; TAA
EVIPTIIRAR

SEQ ID NO: 76974 - protein, 10 aa, Homo sapiens
  misc_feature: Table A; Target 76974; HLA-A*25:01; SLC22A9; ENSG00000149742; TAA
EVIPTIIRAR

SEQ ID NO: 76975 - protein, 10 aa, Homo sapiens
  misc_feature: Table A; Target 76975; HLA-A*26:01; SLC22A9; ENSG00000149742; TAA
EVIPTIIRAR

SEQ ID NO: 76976 - protein, 10 aa, Homo sapiens
  misc_feature: Table A; Target 76976; HLA-A*31:01; SLC22A9; ENSG00000149742; TAA
EVIPTIIRAR

SEQ ID NO: 76977 - protein, 10 aa, Homo sapiens
  misc_feature: Table A; Target 76977; HLA-A*33:01; SLC22A9; ENSG00000149742; TAA
EVIPTIIRAR

SEQ ID NO: 76978 - protein, 10 aa, Homo sapiens
  misc_feature: Table A; Target 76978; HLA-A*33:03; SLC22A9; ENSG00000149742; TAA
EVIPTIIRAR

SEQ ID NO: 76979 - protein, 10 aa, Homo sapiens
  misc_feature: Table A; Target 76979; HLA-A*68:01; SLC22A9; ENSG00000149742; TAA
EVIPTIIRAR

SEQ ID NO: 76980 - protein, 10 aa, Homo sapiens
  misc_feature: Table A; Target 76980; HLA-A*68:02; SLC22A9; ENSG00000149742; TAA
EVIPTIIRAR

SEQ ID NO: 76981 - protein, 10 aa, Homo sapiens
  misc_feature: Table A; Target 76981; HLA-B*57:01; SLC22A9; ENSG00000149742; TAA
EVIPTIIRAR

SEQ ID NO: 76982 - protein, 10 aa, Homo sapiens
  misc_feature: Table A; Target 76982; HLA-C*07:06; SLC22A9; ENSG00000149742; TAA
EVIPTIIRAR

SEQ ID NO: 76983 - protein, 10 aa, Homo sapiens
  misc_feature: Table A; Target 76983; HLA-A*26:01; SLC22A9; ENSG00000149742; TAA
EVLATLGLGA

SEQ ID NO: 76984 - protein, 10 aa, Homo sapiens
  misc_feature: Table A; Target 76984; HLA-B*54:01; SLC22A9; ENSG00000149742; TAA
EVLATLGLGA

SEQ ID NO: 76985 - protein, 11 aa, Homo sapiens
  misc_feature: Table A; Target 76985; HLA-A*33:01; SLC22A9; ENSG00000149742; TAA
EVLATLGLGAS

SEQ ID NO: 76986 - protein, 11 aa, Homo sapiens
  misc_feature: Table A; Target 76986; HLA-C*04:01; SLC22A9; ENSG00000149742; TAA
EVLATLGLGAS

SEQ ID NO: 76987 - protein, 9 aa, Homo sapiens
  misc_feature: Table A; Target 76987; HLA-B*54:01; SLC22A9; ENSG00000149742; TAA
FAFLLLPET

SEQ ID NO: 76988 - protein, 10 aa, Homo sapiens
  misc_feature: Table A; Target 76988; HLA-B*54:01; SLC22A9; ENSG00000149742; TAA
FAFLLLPETR

SEQ ID NO: 76989 - protein, 8 aa, Homo sapiens
  misc_feature: Table A; Target 76989; HLA-B*08:01; SLC22A9; ENSG00000149742; TAA
FANIAGAL

SEQ ID NO: 76990 - protein, 8 aa, Homo sapiens
  misc_feature: Table A; Target 76990; HLA-B*35:01; SLC22A9; ENSG00000149742; TAA
FANIAGAL

SEQ ID NO: 76991 - protein, 8 aa, Homo sapiens
  misc_feature: Table A; Target 76991; HLA-B*35:03; SLC22A9; ENSG00000149742; TAA
FANIAGAL

SEQ ID NO: 76992 - protein, 8 aa, Homo sapiens
  misc_feature: Table A; Target 76992; HLA-B*40:01; SLC22A9; ENSG00000149742; TAA
FANIAGAL

SEQ ID NO: 76993 - protein, 8 aa, Homo sapiens
  misc_feature: Table A; Target 76993; HLA-B*40:02; SLC22A9; ENSG00000149742; TAA
FANIAGAL

SEQ ID NO: 76994 - protein, 8 aa, Homo sapiens
  misc_feature: Table A; Target 76994; HLA-B*46:01; SLC22A9; ENSG00000149742; TAA
FANIAGAL

SEQ ID NO: 76995 - protein, 8 aa, Homo sapiens
  misc_feature: Table A; Target 76995; HLA-C*01:02; SLC22A9; ENSG00000149742; TAA
FANIAGAL

SEQ ID NO: 76996 - protein, 8 aa, Homo sapiens
  misc_feature: Table A; Target 76996; HLA-C*02:02; SLC22A9; ENSG00000149742; TAA
FANIAGAL

SEQ ID NO: 76997 - protein, 8 aa, Homo sapiens
  misc_feature: Table A; Target 76997; HLA-C*03:03; SLC22A9; ENSG00000149742; TAA
FANIAGAL

SEQ ID NO: 76998 - protein, 8 aa, Homo sapiens
  misc_feature: Table A; Target 76998; HLA-C*03:04; SLC22A9; ENSG00000149742; TAA
FANIAGAL

SEQ ID NO: 76999 - protein, 8 aa, Homo sapiens
  misc_feature: Table A; Target 76999; HLA-C*05:01; SLC22A9; ENSG00000149742; TAA
FANIAGAL

SEQ ID NO: 77000 - protein, 8 aa, Homo sapiens
  misc_feature: Table A; Target 77000; HLA-C*06:02; SLC22A9; ENSG00000149742; TAA
FANIAGAL

SEQ ID NO: 77001 - protein, 8 aa, Homo sapiens
  misc_feature: Table A; Target 77001; HLA-C*07:02; SLC22A9; ENSG00000149742; TAA
FANIAGAL

SEQ ID NO: 77002 - protein, 8 aa, Homo sapiens
  misc_feature: Table A; Target 77002; HLA-C*07:04; SLC22A9; ENSG00000149742; TAA
FANIAGAL

SEQ ID NO: 77003 - protein, 8 aa, Homo sapiens
  misc_feature: Table A; Target 77003; HLA-C*12:03; SLC22A9; ENSG00000149742; TAA
FANIAGAL

SEQ ID NO: 77004 - protein, 8 aa, Homo sapiens
  misc_feature: Table A; Target 77004; HLA-C*14:02; SLC22A9; ENSG00000149742; TAA
FANIAGAL

SEQ ID NO: 77005 - protein, 8 aa, Homo sapiens
  misc_feature: Table A; Target 77005; HLA-C*16:01; SLC22A9; ENSG00000149742; TAA
FANIAGAL

SEQ ID NO: 77006 - protein, 8 aa, Homo sapiens
  misc_feature: Table A; Target 77006; HLA-C*16:02; SLC22A9; ENSG00000149742; TAA
FANIAGAL

SEQ ID NO: 77007 - protein, 8 aa, Homo sapiens
  misc_feature: Table A; Target 77007; HLA-C*16:04; SLC22A9; ENSG00000149742; TAA
FANIAGAL

SEQ ID NO: 77008 - protein, 9 aa, Homo sapiens
  misc_feature: Table A; Target 77008; HLA-B*46:01; SLC22A9; ENSG00000149742; TAA
FANIAGALA

SEQ ID NO: 77009 - protein, 9 aa, Homo sapiens
  misc_feature: Table A; Target 77009; HLA-B*54:01; SLC22A9; ENSG00000149742; TAA
FANIAGALA

SEQ ID NO: 77010 - protein, 9 aa, Homo sapiens
  misc_feature: Table A; Target 77010; HLA-C*02:02; SLC22A9; ENSG00000149742; TAA
FANIAGALA

SEQ ID NO: 77011 - protein, 9 aa, Homo sapiens
  misc_feature: Table A; Target 77011; HLA-C*03:03; SLC22A9; ENSG00000149742; TAA
FANIAGALA

SEQ ID NO: 77012 - protein, 9 aa, Homo sapiens
  misc_feature: Table A; Target 77012; HLA-C*03:04; SLC22A9; ENSG00000149742; TAA
FANIAGALA

SEQ ID NO: 77013 - protein, 9 aa, Homo sapiens
  misc_feature: Table A; Target 77013; HLA-A*23:01; SLC22A9; ENSG00000149742; TAA
FAVATYLHF

SEQ ID NO: 77014 - protein, 9 aa, Homo sapiens
  misc_feature: Table A; Target 77014; HLA-A*25:01; SLC22A9; ENSG00000149742; TAA
FAVATYLHF

SEQ ID NO: 77015 - protein, 9 aa, Homo sapiens
  misc_feature: Table A; Target 77015; HLA-A*26:01; SLC22A9; ENSG00000149742; TAA
FAVATYLHF

SEQ ID NO: 77016 - protein, 9 aa, Homo sapiens
  misc_feature: Table A; Target 77016; HLA-A*29:02; SLC22A9; ENSG00000149742; TAA
FAVATYLHF

SEQ ID NO: 77017 - protein, 9 aa, Homo sapiens
  misc_feature: Table A; Target 77017; HLA-B*35:01; SLC22A9; ENSG00000149742; TAA
FAVATYLHF

SEQ ID NO: 77018 - protein, 9 aa, Homo sapiens
  misc_feature: Table A; Target 77018; HLA-B*46:01; SLC22A9; ENSG00000149742; TAA
FAVATYLHF

SEQ ID NO: 77019 - protein, 9 aa, Homo sapiens
  misc_feature: Table A; Target 77019; HLA-B*57:01; SLC22A9; ENSG00000149742; TAA
FAVATYLHF

SEQ ID NO: 77020 - protein, 9 aa, Homo sapiens
  misc_feature: Table A; Target 77020; HLA-B*58:01; SLC22A9; ENSG00000149742; TAA
FAVATYLHF

SEQ ID NO: 77021 - protein, 9 aa, Homo sapiens
  misc_feature: Table A; Target 77021; HLA-C*02:02; SLC22A9; ENSG00000149742; TAA
FAVATYLHF

SEQ ID NO: 77022 - protein, 9 aa, Homo sapiens
  misc_feature: Table A; Target 77022; HLA-C*03:04; SLC22A9; ENSG00000149742; TAA
FAVATYLHF

SEQ ID NO: 77023 - protein, 9 aa, Homo sapiens
  misc_feature: Table A; Target 77023; HLA-C*16:04; SLC22A9; ENSG00000149742; TAA
FAVATYLHF

SEQ ID NO: 77024 - protein, 8 aa, Homo sapiens
  misc_feature: Table A; Target 77024; HLA-B*27:02; SLC22A9; ENSG00000149742; TAA
FDTIQDEK

SEQ ID NO: 77025 - protein, 9 aa, Homo sapiens
  misc_feature: Table A; Target 77025; HLA-A*02:04; SLC22A9; ENSG00000149742; TAA
FISGFAFLL

SEQ ID NO: 77026 - protein, 8 aa, Homo sapiens
  misc_feature: Table A; Target 77026; HLA-A*02:04; SLC22A9; ENSG00000149742; TAA
FLLAICLL

SEQ ID NO: 77027 - protein, 10 aa, Homo sapiens
  misc_feature: Table A; Target 77027; HLA-A*03:01; SLC22A9; ENSG00000149742; TAA
FLLLPETRNK

SEQ ID NO: 77028 - protein, 9 aa, Homo sapiens
  misc_feature: Table A; Target 77028; HLA-A*02:04; SLC22A9; ENSG00000149742; TAA
FLLQTLFGA

SEQ ID NO: 77029 - protein, 8 aa, Homo sapiens
  misc_feature: Table A; Target 77029; HLA-B*37:01; SLC22A9; ENSG00000149742; TAA
FLSGIAAM

SEQ ID NO: 77030 - protein, 8 aa, Homo sapiens
  misc_feature: Table A; Target 77030; HLA-C*07:04; SLC22A9; ENSG00000149742; TAA
FLSGIAAM

SEQ ID NO: 77031 - protein, 10 aa, Homo sapiens
  misc_feature: Table A; Target 77031; HLA-A*02:01; SLC22A9; ENSG00000149742; TAA
FLSGIAAMSL

SEQ ID NO: 77032 - protein, 10 aa, Homo sapiens
  misc_feature: Table A; Target 77032; HLA-A*02:03; SLC22A9; ENSG00000149742; TAA
FLSGIAAMSL

SEQ ID NO: 77033 - protein, 10 aa, Homo sapiens
  misc_feature: Table A; Target 77033; HLA-A*02:04; SLC22A9; ENSG00000149742; TAA
FLSGIAAMSL

SEQ ID NO: 77034 - protein, 10 aa, Homo sapiens
  misc_feature: Table A; Target 77034; HLA-A*02:07; SLC22A9; ENSG00000149742; TAA
FLSGIAAMSL

SEQ ID NO: 77035 - protein, 10 aa, Homo sapiens
  misc_feature: Table A; Target 77035; HLA-B*35:03; SLC22A9; ENSG00000149742; TAA
FLSGIAAMSL

SEQ ID NO: 77036 - protein, 10 aa, Homo sapiens
  misc_feature: Table A; Target 77036; HLA-C*01:02; SLC22A9; ENSG00000149742; TAA
FLSGIAAMSL

SEQ ID NO: 77037 - protein, 10 aa, Homo sapiens
  misc_feature: Table A; Target 77037; HLA-C*02:02; SLC22A9; ENSG00000149742; TAA
FLSGIAAMSL

SEQ ID NO: 77038 - protein, 10 aa, Homo sapiens
  misc_feature: Table A; Target 77038; HLA-C*14:02; SLC22A9; ENSG00000149742; TAA
FLSGIAAMSL

SEQ ID NO: 77039 - protein, 10 aa, Homo sapiens
  misc_feature: Table A; Target 77039; HLA-A*29:02; SLC22A9; ENSG00000149742; TAA
FLSIFAVATY

SEQ ID NO: 77040 - protein, 10 aa, Homo sapiens
  misc_feature: Table A; Target 77040; HLA-A*30:02; SLC22A9; ENSG00000149742; TAA
FLSIFAVATY

SEQ ID NO: 77041 - protein, 10 aa, Homo sapiens
  misc_feature: Table A; Target 77041; HLA-B*46:01; SLC22A9; ENSG00000149742; TAA
FLSIFAVATY

SEQ ID NO: 77042 - protein, 10 aa, Homo sapiens
  misc_feature: Table A; Target 77042; HLA-C*02:02; SLC22A9; ENSG00000149742; TAA
FLSIFAVATY

SEQ ID NO: 77043 - protein, 9 aa, Homo sapiens
  misc_feature: Table A; Target 77043; HLA-A*02:04; SLC22A9; ENSG00000149742; TAA
FMAYFGLNL

SEQ ID NO: 77044 - protein, 9 aa, Homo sapiens
  misc_feature: Table A; Target 77044; HLA-A*02:01; SLC22A9; ENSG00000149742; TAA
FMLENFTAF

SEQ ID NO: 77045 - protein, 9 aa, Homo sapiens
  misc_feature: Table A; Target 77045; HLA-A*02:04; SLC22A9; ENSG00000149742; TAA
FMLENFTAF

SEQ ID NO: 77046 - protein, 9 aa, Homo sapiens
  misc_feature: Table A; Target 77046; HLA-A*02:07; SLC22A9; ENSG00000149742; TAA
FMLENFTAF

SEQ ID NO: 77047 - protein, 9 aa, Homo sapiens
  misc_feature: Table A; Target 77047; HLA-A*23:01; SLC22A9; ENSG00000149742; TAA
FMLENFTAF

SEQ ID NO: 77048 - protein, 9 aa, Homo sapiens
  misc_feature: Table A; Target 77048; HLA-A*24:02; SLC22A9; ENSG00000149742; TAA
FMLENFTAF

SEQ ID NO: 77049 - protein, 9 aa, Homo sapiens
  misc_feature: Table A; Target 77049; HLA-A*25:01; SLC22A9; ENSG00000149742; TAA
FMLENFTAF

SEQ ID NO: 77050 - protein, 9 aa, Homo sapiens
  misc_feature: Table A; Target 77050; HLA-A*29:02; SLC22A9; ENSG00000149742; TAA
FMLENFTAF

SEQ ID NO: 77051 - protein, 9 aa, Homo sapiens
  misc_feature: Table A; Target 77051; HLA-B*15:03; SLC22A9; ENSG00000149742; TAA
FMLENFTAF

SEQ ID NO: 77052 - protein, 9 aa, Homo sapiens
  misc_feature: Table A; Target 77052; HLA-B*35:01; SLC22A9; ENSG00000149742; TAA
FMLENFTAF

SEQ ID NO: 77053 - protein, 9 aa, Homo sapiens
  misc_feature: Table A; Target 77053; HLA-B*46:01; SLC22A9; ENSG00000149742; TAA
FMLENFTAF

SEQ ID NO: 77054 - protein, 9 aa, Homo sapiens
  misc_feature: Table A; Target 77054; HLA-B*54:01; SLC22A9; ENSG00000149742; TAA
FMLENFTAF

SEQ ID NO: 77055 - protein, 9 aa, Homo sapiens
  misc_feature: Table A; Target 77055; HLA-C*02:02; SLC22A9; ENSG00000149742; TAA
FMLENFTAF

SEQ ID NO: 77056 - protein, 9 aa, Homo sapiens
  misc_feature: Table A; Target 77056; HLA-C*07:04; SLC22A9; ENSG00000149742; TAA
FMLENFTAF

SEQ ID NO: 77057 - protein, 9 aa, Homo sapiens
  misc_feature: Table A; Target 77057; HLA-C*14:02; SLC22A9; ENSG00000149742; TAA
FMLENFTAF

SEQ ID NO: 77058 - protein, 9 aa, Homo sapiens
  misc_feature: Table A; Target 77058; HLA-A*29:02; SLC22A9; ENSG00000149742; TAA
FMTLAGLAF

SEQ ID NO: 77059 - protein, 9 aa, Homo sapiens
  misc_feature: Table A; Target 77059; HLA-B*15:03; SLC22A9; ENSG00000149742; TAA
FMTLAGLAF

SEQ ID NO: 77060 - protein, 9 aa, Homo sapiens
  misc_feature: Table A; Target 77060; HLA-B*46:01; SLC22A9; ENSG00000149742; TAA
FMTLAGLAF

SEQ ID NO: 77061 - protein, 9 aa, Homo sapiens
  misc_feature: Table A; Target 77061; HLA-C*03:03; SLC22A9; ENSG00000149742; TAA
FMTLAGLAF

SEQ ID NO: 77062 - protein, 9 aa, Homo sapiens
  misc_feature: Table A; Target 77062; HLA-C*07:04; SLC22A9; ENSG00000149742; TAA
FMTLAGLAF

SEQ ID NO: 77063 - protein, 9 aa, Homo sapiens
  misc_feature: Table A; Target 77063; HLA-C*14:02; SLC22A9; ENSG00000149742; TAA
FMTLAGLAF

SEQ ID NO: 77064 - protein, 8 aa, Homo sapiens
  misc_feature: Table A; Target 77064; HLA-B*54:01; SLC22A9; ENSG00000149742; TAA
FPFISGFA

SEQ ID NO: 77065 - protein, 9 aa, Homo sapiens
  misc_feature: Table A; Target 77065; HLA-A*29:02; SLC22A9; ENSG00000149742; TAA
FPFISGFAF

SEQ ID NO: 77066 - protein, 9 aa, Homo sapiens
  misc_feature: Table A; Target 77066; HLA-B*35:01; SLC22A9; ENSG00000149742; TAA
FPFISGFAF

SEQ ID NO: 77067 - protein, 9 aa, Homo sapiens
  misc_feature: Table A; Target 77067; HLA-B*35:03; SLC22A9; ENSG00000149742; TAA
FPFISGFAF

SEQ ID NO: 77068 - protein, 9 aa, Homo sapiens
  misc_feature: Table A; Target 77068; HLA-B*54:01; SLC22A9; ENSG00000149742; TAA
FPFISGFAF

SEQ ID NO: 77069 - protein, 10 aa, Homo sapiens
  misc_feature: Table A; Target 77069; HLA-B*54:01; SLC22A9; ENSG00000149742; TAA
FPFISGFAFL

SEQ ID NO: 77070 - protein, 9 aa, Homo sapiens
  misc_feature: Table A; Target 77070; HLA-B*35:01; SLC22A9; ENSG00000149742; TAA
FPNTSDADM

SEQ ID NO: 77071 - protein, 9 aa, Homo sapiens
  misc_feature: Table A; Target 77071; HLA-B*35:03; SLC22A9; ENSG00000149742; TAA
FPNTSDADM

SEQ ID NO: 77072 - protein, 9 aa, Homo sapiens
  misc_feature: Table A; Target 77072; HLA-B*55:01; SLC22A9; ENSG00000149742; TAA
FPNTSDADM

SEQ ID NO: 77073 - protein, 9 aa, Homo sapiens
  misc_feature: Table A; Target 77073; HLA-C*03:03; SLC22A9; ENSG00000149742; TAA
FPNTSDADM

SEQ ID NO: 77074 - protein, 8 aa, Homo sapiens
  misc_feature: Table A; Target 77074; HLA-A*30:01; SLC22A9; ENSG00000149742; TAA
FQAMGITL

SEQ ID NO: 77075 - protein, 8 aa, Homo sapiens
  misc_feature: Table A; Target 77075; HLA-B*13:02; SLC22A9; ENSG00000149742; TAA
FQAMGITL

SEQ ID NO: 77076 - protein, 8 aa, Homo sapiens
  misc_feature: Table A; Target 77076; HLA-B*15:01; SLC22A9; ENSG00000149742; TAA
FQAMGITL

SEQ ID NO: 77077 - protein, 8 aa, Homo sapiens
  misc_feature: Table A; Target 77077; HLA-B*15:03; SLC22A9; ENSG00000149742; TAA
FQAMGITL

SEQ ID NO: 77078 - protein, 8 aa, Homo sapiens
  misc_feature: Table A; Target 77078; HLA-B*27:05; SLC22A9; ENSG00000149742; TAA
FQAMGITL

SEQ ID NO: 77079 - protein, 8 aa, Homo sapiens
  misc_feature: Table A; Target 77079; HLA-B*38:01; SLC22A9; ENSG00000149742; TAA
FQAMGITL

SEQ ID NO: 77080 - protein, 8 aa, Homo sapiens
  misc_feature: Table A; Target 77080; HLA-B*39:01; SLC22A9; ENSG00000149742; TAA
FQAMGITL

SEQ ID NO: 77081 - protein, 8 aa, Homo sapiens
  misc_feature: Table A; Target 77081; HLA-B*40:01; SLC22A9; ENSG00000149742; TAA
FQAMGITL

SEQ ID NO: 77082 - protein, 8 aa, Homo sapiens
  misc_feature: Table A; Target 77082; HLA-B*40:02; SLC22A9; ENSG00000149742; TAA
FQAMGITL

SEQ ID NO: 77083 - protein, 8 aa, Homo sapiens
  misc_feature: Table A; Target 77083; HLA-C*02:02; SLC22A9; ENSG00000149742; TAA
FQAMGITL

SEQ ID NO: 77084 - protein, 8 aa, Homo sapiens
  misc_feature: Table A; Target 77084; HLA-C*03:03; SLC22A9; ENSG00000149742; TAA
FQAMGITL

SEQ ID NO: 77085 - protein, 8 aa, Homo sapiens
  misc_feature: Table A; Target 77085; HLA-C*03:04; SLC22A9; ENSG00000149742; TAA
FQAMGITL

SEQ ID NO: 77086 - protein, 8 aa, Homo sapiens
  misc_feature: Table A; Target 77086; HLA-C*07:04; SLC22A9; ENSG00000149742; TAA
FQAMGITL

SEQ ID NO: 77087 - protein, 10 aa, Homo sapiens
  misc_feature: Table A; Target 77087; HLA-A*26:01; SLC22A9; ENSG00000149742; TAA
FQAMGITLGM

SEQ ID NO: 77088 - protein, 10 aa, Homo sapiens
  misc_feature: Table A; Target 77088; HLA-B*27:05; SLC22A9; ENSG00000149742; TAA
FQAMGITLGM

SEQ ID NO: 77089 - protein, 10 aa, Homo sapiens
  misc_feature: Table A; Target 77089; HLA-C*07:04; SLC22A9; ENSG00000149742; TAA
FQAMGITLGM

SEQ ID NO: 77090 - protein, 8 aa, Homo sapiens
  misc_feature: Table A; Target 77090; HLA-B*15:01; SLC22A9; ENSG00000149742; TAA
FQILQTVF

SEQ ID NO: 77091 - protein, 8 aa, Homo sapiens
  misc_feature: Table A; Target 77091; HLA-B*15:03; SLC22A9; ENSG00000149742; TAA
FQILQTVF

SEQ ID NO: 77092 - protein, 9 aa, Homo sapiens
  misc_feature: Table A; Target 77092; HLA-A*02:01; SLC22A9; ENSG00000149742; TAA
FQILQTVFL

SEQ ID NO: 77093 - protein, 9 aa, Homo sapiens
  misc_feature: Table A; Target 77093; HLA-A*02:04; SLC22A9; ENSG00000149742; TAA
FQILQTVFL

SEQ ID NO: 77094 - protein, 9 aa, Homo sapiens
  misc_feature: Table A; Target 77094; HLA-B*13:02; SLC22A9; ENSG00000149742; TAA
FQILQTVFL

SEQ ID NO: 77095 - protein, 9 aa, Homo sapiens
  misc_feature: Table A; Target 77095; HLA-C*02:02; SLC22A9; ENSG00000149742; TAA
FQILQTVFL

SEQ ID NO: 77096 - protein, 9 aa, Homo sapiens
  misc_feature: Table A; Target 77096; HLA-A*01:01; SLC22A9; ENSG00000149742; TAA
FSSTIVTEW

SEQ ID NO: 77097 - protein, 9 aa, Homo sapiens
  misc_feature: Table A; Target 77097; HLA-A*23:01; SLC22A9; ENSG00000149742; TAA
FSSTIVTEW

SEQ ID NO: 77098 - protein, 9 aa, Homo sapiens
  misc_feature: Table A; Target 77098; HLA-A*25:01; SLC22A9; ENSG00000149742; TAA
FSSTIVTEW

SEQ ID NO: 77099 - protein, 9 aa, Homo sapiens
  misc_feature: Table A; Target 77099; HLA-A*26:01; SLC22A9; ENSG00000149742; TAA
FSSTIVTEW

SEQ ID NO: 77100 - protein, 9 aa, Homo sapiens
  misc_feature: Table A; Target 77100; HLA-A*32:01; SLC22A9; ENSG00000149742; TAA
FSSTIVTEW

SEQ ID NO: 77101 - protein, 9 aa, Homo sapiens
  misc_feature: Table A; Target 77101; HLA-A*33:01; SLC22A9; ENSG00000149742; TAA
FSSTIVTEW

SEQ ID NO: 77102 - protein, 9 aa, Homo sapiens
  misc_feature: Table A; Target 77102; HLA-A*33:03; SLC22A9; ENSG00000149742; TAA
FSSTIVTEW

SEQ ID NO: 77103 - protein, 9 aa, Homo sapiens
  misc_feature: Table A; Target 77103; HLA-A*68:01; SLC22A9; ENSG00000149742; TAA
FSSTIVTEW

SEQ ID NO: 77104 - protein, 9 aa, Homo sapiens
  misc_feature: Table A; Target 77104; HLA-A*68:02; SLC22A9; ENSG00000149742; TAA
FSSTIVTEW

SEQ ID NO: 77105 - protein, 9 aa, Homo sapiens
  misc_feature: Table A; Target 77105; HLA-B*44:02; SLC22A9; ENSG00000149742; TAA
FSSTIVTEW

SEQ ID NO: 77106 - protein, 9 aa, Homo sapiens
  misc_feature: Table A; Target 77106; HLA-B*44:03; SLC22A9; ENSG00000149742; TAA
FSSTIVTEW

SEQ ID NO: 77107 - protein, 9 aa, Homo sapiens
  misc_feature: Table A; Target 77107; HLA-B*46:01; SLC22A9; ENSG00000149742; TAA
FSSTIVTEW

SEQ ID NO: 77108 - protein, 9 aa, Homo sapiens
  misc_feature: Table A; Target 77108; HLA-B*57:01; SLC22A9; ENSG00000149742; TAA
FSSTIVTEW

SEQ ID NO: 77109 - protein, 9 aa, Homo sapiens
  misc_feature: Table A; Target 77109; HLA-B*58:01; SLC22A9; ENSG00000149742; TAA
FSSTIVTEW

SEQ ID NO: 77110 - protein, 9 aa, Homo sapiens
  misc_feature: Table A; Target 77110; HLA-C*02:02; SLC22A9; ENSG00000149742; TAA
FSSTIVTEW

SEQ ID NO: 77111 - protein, 9 aa, Homo sapiens
  misc_feature: Table A; Target 77111; HLA-C*03:04; SLC22A9; ENSG00000149742; TAA
FSSTIVTEW

SEQ ID NO: 77112 - protein, 9 aa, Homo sapiens
  misc_feature: Table A; Target 77112; HLA-C*07:06; SLC22A9; ENSG00000149742; TAA
FSSTIVTEW

SEQ ID NO: 77113 - protein, 9 aa, Homo sapiens
  misc_feature: Table A; Target 77113; HLA-C*12:03; SLC22A9; ENSG00000149742; TAA
FSSTIVTEW

SEQ ID NO: 77114 - protein, 9 aa, Homo sapiens
  misc_feature: Table A; Target 77114; HLA-C*16:01; SLC22A9; ENSG00000149742; TAA
FSSTIVTEW

SEQ ID NO: 77115 - protein, 9 aa, Homo sapiens
  misc_feature: Table A; Target 77115; HLA-C*16:04; SLC22A9; ENSG00000149742; TAA
FSSTIVTEW

SEQ ID NO: 77116 - protein, 9 aa, Homo sapiens
  misc_feature: Table A; Target 77116; HLA-A*68:01; SLC22A9; ENSG00000149742; TAA
FTAFIPGHR

SEQ ID NO: 77117 - protein, 9 aa, Homo sapiens
  misc_feature: Table A; Target 77117; HLA-A*68:02; SLC22A9; ENSG00000149742; TAA
FTAFIPGHR

SEQ ID NO: 77118 - protein, 9 aa, Homo sapiens
  misc_feature: Table A; Target 77118; HLA-B*54:01; SLC22A9; ENSG00000149742; TAA
FVFMAGMMV

SEQ ID NO: 77119 - protein, 9 aa, Homo sapiens
  misc_feature: Table A; Target 77119; HLA-A*02:04; SLC22A9; ENSG00000149742; TAA
FVHPQWQLL

SEQ ID NO: 77120 - protein, 9 aa, Homo sapiens
  misc_feature: Table A; Target 77120; HLA-A*02:07; SLC22A9; ENSG00000149742; TAA
FVHPQWQLL

SEQ ID NO: 77121 - protein, 9 aa, Homo sapiens
  misc_feature: Table A; Target 77121; HLA-A*24:02; SLC22A9; ENSG00000149742; TAA
FVHPQWQLL

SEQ ID NO: 77122 - protein, 9 aa, Homo sapiens
  misc_feature: Table A; Target 77122; HLA-A*68:02; SLC22A9; ENSG00000149742; TAA
FVHPQWQLL

SEQ ID NO: 77123 - protein, 9 aa, Homo sapiens
  misc_feature: Table A; Target 77123; HLA-A*25:01; SLC22A9; ENSG00000149742; TAA
FVIFLTSSW

SEQ ID NO: 77124 - protein, 9 aa, Homo sapiens
  misc_feature: Table A; Target 77124; HLA-B*44:02; SLC22A9; ENSG00000149742; TAA
FVIFLTSSW

SEQ ID NO: 77125 - protein, 9 aa, Homo sapiens
  misc_feature: Table A; Target 77125; HLA-B*57:01; SLC22A9; ENSG00000149742; TAA
FVIFLTSSW

SEQ ID NO: 77126 - protein, 9 aa, Homo sapiens
  misc_feature: Table A; Target 77126; HLA-A*02:07; SLC22A9; ENSG00000149742; TAA
FVPQEMQTL

SEQ ID NO: 77127 - protein, 9 aa, Homo sapiens
  misc_feature: Table A; Target 77127; HLA-A*25:01; SLC22A9; ENSG00000149742; TAA
FVPQEMQTL

SEQ ID NO: 77128 - protein, 9 aa, Homo sapiens
  misc_feature: Table A; Target 77128; HLA-A*26:01; SLC22A9; ENSG00000149742; TAA
FVPQEMQTL

SEQ ID NO: 77129 - protein, 9 aa, Homo sapiens
  misc_feature: Table A; Target 77129; HLA-A*68:02; SLC22A9; ENSG00000149742; TAA
FVPQEMQTL

SEQ ID NO: 77130 - protein, 9 aa, Homo sapiens
  misc_feature: Table A; Target 77130; HLA-B*27:05; SLC22A9; ENSG00000149742; TAA
FVPQEMQTL

SEQ ID NO: 77131 - protein, 9 aa, Homo sapiens
  misc_feature: Table A; Target 77131; HLA-B*46:01; SLC22A9; ENSG00000149742; TAA
FVPQEMQTL

SEQ ID NO: 77132 - protein, 9 aa, Homo sapiens
  misc_feature: Table A; Target 77132; HLA-B*51:01; SLC22A9; ENSG00000149742; TAA
FVPQEMQTL

SEQ ID NO: 77133 - protein, 9 aa, Homo sapiens
  misc_feature: Table A; Target 77133; HLA-C*01:02; SLC22A9; ENSG00000149742; TAA
FVPQEMQTL

SEQ ID NO: 77134 - protein, 9 aa, Homo sapiens
  misc_feature: Table A; Target 77134; HLA-C*03:04; SLC22A9; ENSG00000149742; TAA
FVPQEMQTL

SEQ ID NO: 77135 - protein, 10 aa, Homo sapiens
  misc_feature: Table A; Target 77135; HLA-C*07:06; SLC22A9; ENSG00000149742; TAA
GALSQDALLR

SEQ ID NO: 77136 - protein, 9 aa, Homo sapiens
  misc_feature: Table A; Target 77136; HLA-A*30:01; SLC22A9; ENSG00000149742; TAA
GASALANTL

SEQ ID NO: 77137 - protein, 9 aa, Homo sapiens
  misc_feature: Table A; Target 77137; HLA-B*07:02; SLC22A9; ENSG00000149742; TAA
GASALANTL

SEQ ID NO: 77138 - protein, 9 aa, Homo sapiens
  misc_feature: Table A; Target 77138; HLA-B*13:02; SLC22A9; ENSG00000149742; TAA
GASALANTL

SEQ ID NO: 77139 - protein, 9 aa, Homo sapiens
  misc_feature: Table A; Target 77139; HLA-B*15:01; SLC22A9; ENSG00000149742; TAA
GASALANTL

SEQ ID NO: 77140 - protein, 9 aa, Homo sapiens
  misc_feature: Table A; Target 77140; HLA-B*15:03; SLC22A9; ENSG00000149742; TAA
GASALANTL

SEQ ID NO: 77141 - protein, 9 aa, Homo sapiens
  misc_feature: Table A; Target 77141; HLA-B*27:05; SLC22A9; ENSG00000149742; TAA
GASALANTL

SEQ ID NO: 77142 - protein, 9 aa, Homo sapiens
  misc_feature: Table A; Target 77142; HLA-B*35:01; SLC22A9; ENSG00000149742; TAA
GASALANTL

SEQ ID NO: 77143 - protein, 9 aa, Homo sapiens
  misc_feature: Table A; Target 77143; HLA-B*35:03; SLC22A9; ENSG00000149742; TAA
GASALANTL

SEQ ID NO: 77144 - protein, 9 aa, Homo sapiens
  misc_feature: Table A; Target 77144; HLA-B*38:01; SLC22A9; ENSG00000149742; TAA
GASALANTL

SEQ ID NO: 77145 - protein, 9 aa, Homo sapiens
  misc_feature: Table A; Target 77145; HLA-B*39:01; SLC22A9; ENSG00000149742; TAA
GASALANTL

SEQ ID NO: 77146 - protein, 9 aa, Homo sapiens
  misc_feature: Table A; Target 77146; HLA-B*40:01; SLC22A9; ENSG00000149742; TAA
GASALANTL

SEQ ID NO: 77147 - protein, 9 aa, Homo sapiens
  misc_feature: Table A; Target 77147; HLA-B*46:01; SLC22A9; ENSG00000149742; TAA
GASALANTL

SEQ ID NO: 77148 - protein, 9 aa, Homo sapiens
  misc_feature: Table A; Target 77148; HLA-B*58:01; SLC22A9; ENSG00000149742; TAA
GASALANTL

SEQ ID NO: 77149 - protein, 9 aa, Homo sapiens
  misc_feature: Table A; Target 77149; HLA-C*01:02; SLC22A9; ENSG00000149742; TAA
GASALANTL

SEQ ID NO: 77150 - protein, 9 aa, Homo sapiens
  misc_feature: Table A; Target 77150; HLA-C*02:02; SLC22A9; ENSG00000149742; TAA
GASALANTL

SEQ ID NO: 77151 - protein, 9 aa, Homo sapiens
  misc_feature: Table A; Target 77151; HLA-C*03:03; SLC22A9; ENSG00000149742; TAA
GASALANTL

SEQ ID NO: 77152 - protein, 9 aa, Homo sapiens
  misc_feature: Table A; Target 77152; HLA-C*03:04; SLC22A9; ENSG00000149742; TAA
GASALANTL

SEQ ID NO: 77153 - protein, 9 aa, Homo sapiens
  misc_feature: Table A; Target 77153; HLA-C*05:01; SLC22A9; ENSG00000149742; TAA
GASALANTL

SEQ ID NO: 77154 - protein, 9 aa, Homo sapiens
  misc_feature: Table A; Target 77154; HLA-C*06:02; SLC22A9; ENSG00000149742; TAA
GASALANTL

SEQ ID NO: 77155 - protein, 9 aa, Homo sapiens
  misc_feature: Table A; Target 77155; HLA-C*07:04; SLC22A9; ENSG00000149742; TAA
GASALANTL

SEQ ID NO: 77156 - protein, 9 aa, Homo sapiens
  misc_feature: Table A; Target 77156; HLA-C*07:06; SLC22A9; ENSG00000149742; TAA
GASALANTL

SEQ ID NO: 77157 - protein, 9 aa, Homo sapiens
  misc_feature: Table A; Target 77157; HLA-C*12:03; SLC22A9; ENSG00000149742; TAA
GASALANTL

SEQ ID NO: 77158 - protein, 9 aa, Homo sapiens
  misc_feature: Table A; Target 77158; HLA-C*14:02; SLC22A9; ENSG00000149742; TAA
GASALANTL

SEQ ID NO: 77159 - protein, 9 aa, Homo sapiens
  misc_feature: Table A; Target 77159; HLA-C*16:01; SLC22A9; ENSG00000149742; TAA
GASALANTL

SEQ ID NO: 77160 - protein, 9 aa, Homo sapiens
  misc_feature: Table A; Target 77160; HLA-C*16:02; SLC22A9; ENSG00000149742; TAA
GASALANTL

SEQ ID NO: 77161 - protein, 9 aa, Homo sapiens
  misc_feature: Table A; Target 77161; HLA-C*16:04; SLC22A9; ENSG00000149742; TAA
GASALANTL

SEQ ID NO: 77162 - protein, 11 aa, Homo sapiens
  misc_feature: Table A; Target 77162; HLA-A*30:02; SLC22A9; ENSG00000149742; TAA
GASALANTLAF

SEQ ID NO: 77163 - protein, 11 aa, Homo sapiens
  misc_feature: Table A; Target 77163; HLA-C*02:02; SLC22A9; ENSG00000149742; TAA
GASALANTLAF

SEQ ID NO: 77164 - protein, 11 aa, Homo sapiens
  misc_feature: Table A; Target 77164; HLA-C*16:04; SLC22A9; ENSG00000149742; TAA
GASALANTLAF

SEQ ID NO: 77165 - protein, 9 aa, Homo sapiens
  misc_feature: Table A; Target 77165; HLA-B*38:01; SLC22A9; ENSG00000149742; TAA
GHAGDLWRF

SEQ ID NO: 77166 - protein, 9 aa, Homo sapiens
  misc_feature: Table A; Target 77166; HLA-A*02:07; SLC22A9; ENSG00000149742; TAA
GINATFANI

SEQ ID NO: 77167 - protein, 9 aa, Homo sapiens
  misc_feature: Table A; Target 77167; HLA-A*24:02; SLC22A9; ENSG00000149742; TAA
GINATFANI

SEQ ID NO: 77168 - protein, 9 aa, Homo sapiens
  misc_feature: Table A; Target 77168; HLA-A*32:01; SLC22A9; ENSG00000149742; TAA
GINATFANI

SEQ ID NO: 77169 - protein, 9 aa, Homo sapiens
  misc_feature: Table A; Target 77169; HLA-B*13:02; SLC22A9; ENSG00000149742; TAA
GINATFANI

SEQ ID NO: 77170 - protein, 9 aa, Homo sapiens
  misc_feature: Table A; Target 77170; HLA-C*01:02; SLC22A9; ENSG00000149742; TAA
GINATFANI

SEQ ID NO: 77171 - protein, 9 aa, Homo sapiens
  misc_feature: Table A; Target 77171; HLA-A*02:01; SLC22A9; ENSG00000149742; TAA
GLNLHVQHL

SEQ ID NO: 77172 - protein, 9 aa, Homo sapiens
  misc_feature: Table A; Target 77172; HLA-A*02:03; SLC22A9; ENSG00000149742; TAA
GLNLHVQHL

SEQ ID NO: 77173 - protein, 9 aa, Homo sapiens
  misc_feature: Table A; Target 77173; HLA-A*02:04; SLC22A9; ENSG00000149742; TAA
GLNLHVQHL

SEQ ID NO: 77174 - protein, 9 aa, Homo sapiens
  misc_feature: Table A; Target 77174; HLA-A*02:07; SLC22A9; ENSG00000149742; TAA
GLNLHVQHL

SEQ ID NO: 77175 - protein, 9 aa, Homo sapiens
  misc_feature: Table A; Target 77175; HLA-B*13:02; SLC22A9; ENSG00000149742; TAA
GLNLHVQHL

SEQ ID NO: 77176 - protein, 9 aa, Homo sapiens
  misc_feature: Table A; Target 77176; HLA-B*37:01; SLC22A9; ENSG00000149742; TAA
GLNLHVQHL

SEQ ID NO: 77177 - protein, 9 aa, Homo sapiens
  misc_feature: Table A; Target 77177; HLA-B*55:01; SLC22A9; ENSG00000149742; TAA
GLNLHVQHL

SEQ ID NO: 77178 - protein, 9 aa, Homo sapiens
  misc_feature: Table A; Target 77178; HLA-A*30:02; SLC22A9; ENSG00000149742; TAA
GMCPSGIAF

SEQ ID NO: 77179 - protein, 9 aa, Homo sapiens
  misc_feature: Table A; Target 77179; HLA-B*15:01; SLC22A9; ENSG00000149742; TAA
GMCPSGIAF

SEQ ID NO: 77180 - protein, 9 aa, Homo sapiens
  misc_feature: Table A; Target 77180; HLA-B*15:03; SLC22A9; ENSG00000149742; TAA
GMCPSGIAF

SEQ ID NO: 77181 - protein, 9 aa, Homo sapiens
  misc_feature: Table A; Target 77181; HLA-C*07:04; SLC22A9; ENSG00000149742; TAA
GMCPSGIAF

SEQ ID NO: 77182 - protein, 10 aa, Homo sapiens
  misc_feature: Table A; Target 77182; HLA-C*04:01; SLC22A9; ENSG00000149742; TAA
GMCPSGIAFM

SEQ ID NO: 77183 - protein, 9 aa, Homo sapiens
  misc_feature: Table A; Target 77183; HLA-B*07:02; SLC22A9; ENSG00000149742; TAA
GMKNARDTL

SEQ ID NO: 77184 - protein, 10 aa, Homo sapiens
  misc_feature: Table A; Target 77184; HLA-A*02:01; SLC22A9; ENSG00000149742; TAA
GMMVGGILGG

SEQ ID NO: 77185 - protein, 10 aa, Homo sapiens
  misc_feature: Table A; Target 77185; HLA-A*02:03; SLC22A9; ENSG00000149742; TAA
GMMVGGILGG

SEQ ID NO: 77186 - protein, 10 aa, Homo sapiens
  misc_feature: Table A; Target 77186; HLA-B*57:01; SLC22A9; ENSG00000149742; TAA
GTCAALAPTF

SEQ ID NO: 77187 - protein, 9 aa, Homo sapiens
  misc_feature: Table A; Target 77187; HLA-B*27:05; SLC22A9; ENSG00000149742; TAA
GTFPNTSDA

SEQ ID NO: 77188 - protein, 11 aa, Homo sapiens
  misc_feature: Table A; Target 77188; HLA-B*27:05; SLC22A9; ENSG00000149742; TAA
GTFPNTSDADM

SEQ ID NO: 77189 - protein, 11 aa, Homo sapiens
  misc_feature: Table A; Target 77189; HLA-B*39:01; SLC22A9; ENSG00000149742; TAA
GTFPNTSDADM

SEQ ID NO: 77190 - protein, 9 aa, Homo sapiens
  misc_feature: Table A; Target 77190; HLA-A*25:01; SLC22A9; ENSG00000149742; TAA
GVFPFISGF

SEQ ID NO: 77191 - protein, 9 aa, Homo sapiens
  misc_feature: Table A; Target 77191; HLA-A*26:01; SLC22A9; ENSG00000149742; TAA
GVFPFISGF

SEQ ID NO: 77192 - protein, 9 aa, Homo sapiens
  misc_feature: Table A; Target 77192; HLA-B*15:01; SLC22A9; ENSG00000149742; TAA
GVFPFISGF

SEQ ID NO: 77193 - protein, 9 aa, Homo sapiens
  misc_feature: Table A; Target 77193; HLA-B*57:01; SLC22A9; ENSG00000149742; TAA
GVFPFISGF

SEQ ID NO: 77194 - protein, 9 aa, Homo sapiens
  misc_feature: Table A; Target 77194; HLA-C*02:02; SLC22A9; ENSG00000149742; TAA
GVFPFISGF

SEQ ID NO: 77195 - protein, 9 aa, Homo sapiens
  misc_feature: Table A; Target 77195; HLA-A*24:02; SLC22A9; ENSG00000149742; TAA
GWVYDRISF

SEQ ID NO: 77196 - protein, 10 aa, Homo sapiens
  misc_feature: Table A; Target 77196; HLA-A*24:02; SLC22A9; ENSG00000149742; TAA
HFMLENFTAF

SEQ ID NO: 77197 - protein, 9 aa, Homo sapiens
  misc_feature: Table A; Target 77197; HLA-A*02:01; SLC22A9; ENSG00000149742; TAA
HGNEVIPTI

SEQ ID NO: 77198 - protein, 9 aa, Homo sapiens
  misc_feature: Table A; Target 77198; HLA-A*02:04; SLC22A9; ENSG00000149742; TAA
HGNEVIPTI

SEQ ID NO: 77199 - protein, 9 aa, Homo sapiens
  misc_feature: Table A; Target 77199; HLA-A*23:01; SLC22A9; ENSG00000149742; TAA
HGNEVIPTI

SEQ ID NO: 77200 - protein, 9 aa, Homo sapiens
  misc_feature: Table A; Target 77200; HLA-A*30:01; SLC22A9; ENSG00000149742; TAA
HGNEVIPTI

SEQ ID NO: 77201 - protein, 9 aa, Homo sapiens
  misc_feature: Table A; Target 77201; HLA-A*32:01; SLC22A9; ENSG00000149742; TAA
HGNEVIPTI

SEQ ID NO: 77202 - protein, 9 aa, Homo sapiens
  misc_feature: Table A; Target 77202; HLA-A*68:02; SLC22A9; ENSG00000149742; TAA
HGNEVIPTI

SEQ ID NO: 77203 - protein, 9 aa, Homo sapiens
  misc_feature: Table A; Target 77203; HLA-B*13:02; SLC22A9; ENSG00000149742; TAA
HGNEVIPTI

SEQ ID NO: 77204 - protein, 9 aa, Homo sapiens
  misc_feature: Table A; Target 77204; HLA-B*18:01; SLC22A9; ENSG00000149742; TAA
HGNEVIPTI

SEQ ID NO: 77205 - protein, 9 aa, Homo sapiens
  misc_feature: Table A; Target 77205; HLA-B*35:01; SLC22A9; ENSG00000149742; TAA
HGNEVIPTI

SEQ ID NO: 77206 - protein, 9 aa, Homo sapiens
  misc_feature: Table A; Target 77206; HLA-B*35:03; SLC22A9; ENSG00000149742; TAA
HGNEVIPTI

SEQ ID NO: 77207 - protein, 9 aa, Homo sapiens
  misc_feature: Table A; Target 77207; HLA-B*38:01; SLC22A9; ENSG00000149742; TAA
HGNEVIPTI

SEQ ID NO: 77208 - protein, 9 aa, Homo sapiens
  misc_feature: Table A; Target 77208; HLA-B*39:01; SLC22A9; ENSG00000149742; TAA
HGNEVIPTI

SEQ ID NO: 77209 - protein, 9 aa, Homo sapiens
  misc_feature: Table A; Target 77209; HLA-B*49:01; SLC22A9; ENSG00000149742; TAA
HGNEVIPTI

SEQ ID NO: 77210 - protein, 9 aa, Homo sapiens
  misc_feature: Table A; Target 77210; HLA-B*51:01; SLC22A9; ENSG00000149742; TAA
HGNEVIPTI

SEQ ID NO: 77211 - protein, 9 aa, Homo sapiens
  misc_feature: Table A; Target 77211; HLA-B*54:01; SLC22A9; ENSG00000149742; TAA
HGNEVIPTI

SEQ ID NO: 77212 - protein, 9 aa, Homo sapiens
  misc_feature: Table A; Target 77212; HLA-B*55:01; SLC22A9; ENSG00000149742; TAA
HGNEVIPTI

SEQ ID NO: 77213 - protein, 9 aa, Homo sapiens
  misc_feature: Table A; Target 77213; HLA-B*57:01; SLC22A9; ENSG00000149742; TAA
HGNEVIPTI

SEQ ID NO: 77214 - protein, 9 aa, Homo sapiens
  misc_feature: Table A; Target 77214; HLA-B*58:01; SLC22A9; ENSG00000149742; TAA
HGNEVIPTI

SEQ ID NO: 77215 - protein, 9 aa, Homo sapiens
  misc_feature: Table A; Target 77215; HLA-C*02:02; SLC22A9; ENSG00000149742; TAA
HGNEVIPTI

SEQ ID NO: 77216 - protein, 9 aa, Homo sapiens
  misc_feature: Table A; Target 77216; HLA-C*03:03; SLC22A9; ENSG00000149742; TAA
HGNEVIPTI

SEQ ID NO: 77217 - protein, 9 aa, Homo sapiens
  misc_feature: Table A; Target 77217; HLA-C*03:04; SLC22A9; ENSG00000149742; TAA
HGNEVIPTI

SEQ ID NO: 77218 - protein, 9 aa, Homo sapiens
  misc_feature: Table A; Target 77218; HLA-C*07:06; SLC22A9; ENSG00000149742; TAA
HGNEVIPTI

SEQ ID NO: 77219 - protein, 9 aa, Homo sapiens
  misc_feature: Table A; Target 77219; HLA-C*12:03; SLC22A9; ENSG00000149742; TAA
HGNEVIPTI

SEQ ID NO: 77220 - protein, 9 aa, Homo sapiens
  misc_feature: Table A; Target 77220; HLA-C*16:02; SLC22A9; ENSG00000149742; TAA
HGNEVIPTI

SEQ ID NO: 77221 - protein, 9 aa, Homo sapiens
  misc_feature: Table A; Target 77221; HLA-C*16:04; SLC22A9; ENSG00000149742; TAA
HGNEVIPTI

SEQ ID NO: 77222 - protein, 11 aa, Homo sapiens
  misc_feature: Table A; Target 77222; HLA-A*33:01; SLC22A9; ENSG00000149742; TAA
HGNEVIPTIIR

SEQ ID NO: 77223 - protein, 9 aa, Homo sapiens
  misc_feature: Table A; Target 77223; HLA-A*02:01; SLC22A9; ENSG00000149742; TAA
HILQLVVSV

SEQ ID NO: 77224 - protein, 9 aa, Homo sapiens
  misc_feature: Table A; Target 77224; HLA-A*02:03; SLC22A9; ENSG00000149742; TAA
HILQLVVSV

SEQ ID NO: 77225 - protein, 9 aa, Homo sapiens
  misc_feature: Table A; Target 77225; HLA-A*02:04; SLC22A9; ENSG00000149742; TAA
HILQLVVSV

SEQ ID NO: 77226 - protein, 9 aa, Homo sapiens
  misc_feature: Table A; Target 77226; HLA-A*02:07; SLC22A9; ENSG00000149742; TAA
HILQLVVSV

SEQ ID NO: 77227 - protein, 9 aa, Homo sapiens
  misc_feature: Table A; Target 77227; HLA-A*30:01; SLC22A9; ENSG00000149742; TAA
HILQLVVSV

SEQ ID NO: 77228 - protein, 9 aa, Homo sapiens
  misc_feature: Table A; Target 77228; HLA-A*68:02; SLC22A9; ENSG00000149742; TAA
HILQLVVSV

SEQ ID NO: 77229 - protein, 9 aa, Homo sapiens
  misc_feature: Table A; Target 77229; HLA-B*08:01; SLC22A9; ENSG00000149742; TAA
HILQLVVSV

SEQ ID NO: 77230 - protein, 9 aa, Homo sapiens
  misc_feature: Table A; Target 77230; HLA-B*13:02; SLC22A9; ENSG00000149742; TAA
HILQLVVSV

SEQ ID NO: 77231 - protein, 9 aa, Homo sapiens
  misc_feature: Table A; Target 77231; HLA-B*51:01; SLC22A9; ENSG00000149742; TAA
HILQLVVSV

SEQ ID NO: 77232 - protein, 9 aa, Homo sapiens
  misc_feature: Table A; Target 77232; HLA-B*54:01; SLC22A9; ENSG00000149742; TAA
HILQLVVSV

SEQ ID NO: 77233 - protein, 9 aa, Homo sapiens
  misc_feature: Table A; Target 77233; HLA-B*55:01; SLC22A9; ENSG00000149742; TAA
HILQLVVSV

SEQ ID NO: 77234 - protein, 9 aa, Homo sapiens
  misc_feature: Table A; Target 77234; HLA-A*02:01; SLC22A9; ENSG00000149742; TAA
HLGNNVFLL

SEQ ID NO: 77235 - protein, 9 aa, Homo sapiens
  misc_feature: Table A; Target 77235; HLA-A*02:04; SLC22A9; ENSG00000149742; TAA
HLGNNVFLL

SEQ ID NO: 77236 - protein, 9 aa, Homo sapiens
  misc_feature: Table A; Target 77236; HLA-A*02:07; SLC22A9; ENSG00000149742; TAA
HLGNNVFLL

SEQ ID NO: 77237 - protein, 10 aa, Homo sapiens
  misc_feature: Table A; Target 77237; HLA-C*07:02; SLC22A9; ENSG00000149742; TAA
HLNGTFPNTS

SEQ ID NO: 77238 - protein, 9 aa, Homo sapiens
  misc_feature: Table A; Target 77238; HLA-A*02:07; SLC22A9; ENSG00000149742; TAA
IAEWATHRF

SEQ ID NO: 77239 - protein, 9 aa, Homo sapiens
  misc_feature: Table A; Target 77239; HLA-B*46:01; SLC22A9; ENSG00000149742; TAA
IAFMTLAGL

SEQ ID NO: 77240 - protein, 9 aa, Homo sapiens
  misc_feature: Table A; Target 77240; HLA-B*51:01; SLC22A9; ENSG00000149742; TAA
IAFMTLAGL

SEQ ID NO: 77241 - protein, 9 aa, Homo sapiens
  misc_feature: Table A; Target 77241; HLA-C*03:04; SLC22A9; ENSG00000149742; TAA
IAFMTLAGL

SEQ ID NO: 77242 - protein, 9 aa, Homo sapiens
  misc_feature: Table A; Target 77242; HLA-A*23:01; SLC22A9; ENSG00000149742; TAA
IAGALAPLM

SEQ ID NO: 77243 - protein, 9 aa, Homo sapiens
  misc_feature: Table A; Target 77243; HLA-A*26:01; SLC22A9; ENSG00000149742; TAA
IAGALAPLM

SEQ ID NO: 77244 - protein, 9 aa, Homo sapiens
  misc_feature: Table A; Target 77244; HLA-A*29:02; SLC22A9; ENSG00000149742; TAA
IAGALAPLM

SEQ ID NO: 77245 - protein, 9 aa, Homo sapiens
  misc_feature: Table A; Target 77245; HLA-B*15:03; SLC22A9; ENSG00000149742; TAA
IAGALAPLM

SEQ ID NO: 77246 - protein, 9 aa, Homo sapiens
  misc_feature: Table A; Target 77246; HLA-B*35:01; SLC22A9; ENSG00000149742; TAA
IAGALAPLM

SEQ ID NO: 77247 - protein, 9 aa, Homo sapiens
  misc_feature: Table A; Target 77247; HLA-B*35:03; SLC22A9; ENSG00000149742; TAA
IAGALAPLM

SEQ ID NO: 77248 - protein, 9 aa, Homo sapiens
  misc_feature: Table A; Target 77248; HLA-B*46:01; SLC22A9; ENSG00000149742; TAA
IAGALAPLM

SEQ ID NO: 77249 - protein, 9 aa, Homo sapiens
  misc_feature: Table A; Target 77249; HLA-B*51:01; SLC22A9; ENSG00000149742; TAA
IAGALAPLM

SEQ ID NO: 77250 - protein, 9 aa, Homo sapiens
  misc_feature: Table A; Target 77250; HLA-B*57:01; SLC22A9; ENSG00000149742; TAA
IAGALAPLM

SEQ ID NO: 77251 - protein, 9 aa, Homo sapiens
  misc_feature: Table A; Target 77251; HLA-B*58:01; SLC22A9; ENSG00000149742; TAA
IAGALAPLM

SEQ ID NO: 77252 - protein, 9 aa, Homo sapiens
  misc_feature: Table A; Target 77252; HLA-C*02:02; SLC22A9; ENSG00000149742; TAA
IAGALAPLM

SEQ ID NO: 77253 - protein, 9 aa, Homo sapiens
  misc_feature: Table A; Target 77253; HLA-C*03:03; SLC22A9; ENSG00000149742; TAA
IAGALAPLM

SEQ ID NO: 77254 - protein, 9 aa, Homo sapiens
  misc_feature: Table A; Target 77254; HLA-C*03:04; SLC22A9; ENSG00000149742; TAA
IAGALAPLM

SEQ ID NO: 77255 - protein, 9 aa, Homo sapiens
  misc_feature: Table A; Target 77255; HLA-C*04:01; SLC22A9; ENSG00000149742; TAA
IAGALAPLM

SEQ ID NO: 77256 - protein, 9 aa, Homo sapiens
  misc_feature: Table A; Target 77256; HLA-C*05:01; SLC22A9; ENSG00000149742; TAA
IAGALAPLM

SEQ ID NO: 77257 - protein, 9 aa, Homo sapiens
  misc_feature: Table A; Target 77257; HLA-C*06:02; SLC22A9; ENSG00000149742; TAA
IAGALAPLM

SEQ ID NO: 77258 - protein, 9 aa, Homo sapiens
  misc_feature: Table A; Target 77258; HLA-C*07:01; SLC22A9; ENSG00000149742; TAA
IAGALAPLM

SEQ ID NO: 77259 - protein, 9 aa, Homo sapiens
  misc_feature: Table A; Target 77259; HLA-C*07:04; SLC22A9; ENSG00000149742; TAA
IAGALAPLM

SEQ ID NO: 77260 - protein, 9 aa, Homo sapiens
  misc_feature: Table A; Target 77260; HLA-C*12:03; SLC22A9; ENSG00000149742; TAA
IAGALAPLM

SEQ ID NO: 77261 - protein, 9 aa, Homo sapiens
  misc_feature: Table A; Target 77261; HLA-C*16:01; SLC22A9; ENSG00000149742; TAA
IAGALAPLM

SEQ ID NO: 77262 - protein, 9 aa, Homo sapiens
  misc_feature: Table A; Target 77262; HLA-C*16:02; SLC22A9; ENSG00000149742; TAA
IAGALAPLM

SEQ ID NO: 77263 - protein, 9 aa, Homo sapiens
  misc_feature: Table A; Target 77263; HLA-C*16:04; SLC22A9; ENSG00000149742; TAA
IAGALAPLM

SEQ ID NO: 77264 - protein, 8 aa, Homo sapiens
  misc_feature: Table A; Target 77264; HLA-A*23:01; SLC22A9; ENSG00000149742; TAA
IFAVATYL

SEQ ID NO: 77265 - protein, 8 aa, Homo sapiens
  misc_feature: Table A; Target 77265; HLA-C*01:02; SLC22A9; ENSG00000149742; TAA
IFAVATYL

SEQ ID NO: 77266 - protein, 8 aa, Homo sapiens
  misc_feature: Table A; Target 77266; HLA-C*04:01; SLC22A9; ENSG00000149742; TAA
IFAVATYL

SEQ ID NO: 77267 - protein, 8 aa, Homo sapiens
  misc_feature: Table A; Target 77267; HLA-C*14:02; SLC22A9; ENSG00000149742; TAA
IFAVATYL

SEQ ID NO: 77268 - protein, 10 aa, Homo sapiens
  misc_feature: Table A; Target 77268; HLA-A*23:01; SLC22A9; ENSG00000149742; TAA
IFAVATYLHF

SEQ ID NO: 77269 - protein, 10 aa, Homo sapiens
  misc_feature: Table A; Target 77269; HLA-A*24:02; SLC22A9; ENSG00000149742; TAA
IFAVATYLHF

SEQ ID NO: 77270 - protein, 9 aa, Homo sapiens
  misc_feature: Table A; Target 77270; HLA-A*23:01; SLC22A9; ENSG00000149742; TAA
IFLTSSWLL

SEQ ID NO: 77271 - protein, 9 aa, Homo sapiens
  misc_feature: Table A; Target 77271; HLA-A*24:02; SLC22A9; ENSG00000149742; TAA
IFLTSSWLL

SEQ ID NO: 77272 - protein, 10 aa, Homo sapiens
  misc_feature: Table A; Target 77272; HLA-A*23:01; SLC22A9; ENSG00000149742; TAA
IFVPQEMQTL

SEQ ID NO: 77273 - protein, 10 aa, Homo sapiens
  misc_feature: Table A; Target 77273; HLA-A*24:02; SLC22A9; ENSG00000149742; TAA
IFVPQEMQTL

SEQ ID NO: 77274 - protein, 8 aa, Homo sapiens
  misc_feature: Table A; Target 77274; HLA-B*08:01; SLC22A9; ENSG00000149742; TAA
IIFVPQEM

SEQ ID NO: 77275 - protein, 8 aa, Homo sapiens
  misc_feature: Table A; Target 77275; HLA-B*15:01; SLC22A9; ENSG00000149742; TAA
IIFVPQEM

SEQ ID NO: 77276 - protein, 8 aa, Homo sapiens
  misc_feature: Table A; Target 77276; HLA-B*15:03; SLC22A9; ENSG00000149742; TAA
IIFVPQEM

SEQ ID NO: 77277 - protein, 8 aa, Homo sapiens
  misc_feature: Table A; Target 77277; HLA-B*18:01; SLC22A9; ENSG00000149742; TAA
IIFVPQEM

SEQ ID NO: 77278 - protein, 8 aa, Homo sapiens
  misc_feature: Table A; Target 77278; HLA-B*35:01; SLC22A9; ENSG00000149742; TAA
IIFVPQEM

SEQ ID NO: 77279 - protein, 8 aa, Homo sapiens
  misc_feature: Table A; Target 77279; HLA-B*39:01; SLC22A9; ENSG00000149742; TAA
IIFVPQEM

SEQ ID NO: 77280 - protein, 8 aa, Homo sapiens
  misc_feature: Table A; Target 77280; HLA-B*46:01; SLC22A9; ENSG00000149742; TAA
IIFVPQEM

SEQ ID NO: 77281 - protein, 8 aa, Homo sapiens
  misc_feature: Table A; Target 77281; HLA-C*01:02; SLC22A9; ENSG00000149742; TAA
IIFVPQEM

SEQ ID NO: 77282 - protein, 8 aa, Homo sapiens
  misc_feature: Table A; Target 77282; HLA-C*02:02; SLC22A9; ENSG00000149742; TAA
IIFVPQEM

SEQ ID NO: 77283 - protein, 8 aa, Homo sapiens
  misc_feature: Table A; Target 77283; HLA-C*03:03; SLC22A9; ENSG00000149742; TAA
IIFVPQEM

SEQ ID NO: 77284 - protein, 8 aa, Homo sapiens
  misc_feature: Table A; Target 77284; HLA-C*03:04; SLC22A9; ENSG00000149742; TAA
IIFVPQEM

SEQ ID NO: 77285 - protein, 8 aa, Homo sapiens
  misc_feature: Table A; Target 77285; HLA-C*05:01; SLC22A9; ENSG00000149742; TAA
IIFVPQEM

SEQ ID NO: 77286 - protein, 8 aa, Homo sapiens
  misc_feature: Table A; Target 77286; HLA-C*07:01; SLC22A9; ENSG00000149742; TAA
IIFVPQEM

SEQ ID NO: 77287 - protein, 8 aa, Homo sapiens
  misc_feature: Table A; Target 77287; HLA-C*07:04; SLC22A9; ENSG00000149742; TAA
IIFVPQEM

SEQ ID NO: 77288 - protein, 8 aa, Homo sapiens
  misc_feature: Table A; Target 77288; HLA-C*12:03; SLC22A9; ENSG00000149742; TAA
IIFVPQEM

SEQ ID NO: 77289 - protein, 8 aa, Homo sapiens
  misc_feature: Table A; Target 77289; HLA-C*14:02; SLC22A9; ENSG00000149742; TAA
IIFVPQEM

SEQ ID NO: 77290 - protein, 8 aa, Homo sapiens
  misc_feature: Table A; Target 77290; HLA-C*16:01; SLC22A9; ENSG00000149742; TAA
IIFVPQEM

SEQ ID NO: 77291 - protein, 8 aa, Homo sapiens
  misc_feature: Table A; Target 77291; HLA-C*16:04; SLC22A9; ENSG00000149742; TAA
IIFVPQEM

SEQ ID NO: 77292 - protein, 11 aa, Homo sapiens
  misc_feature: Table A; Target 77292; HLA-A*02:03; SLC22A9; ENSG00000149742; TAA
IIFVPQEMQTL

SEQ ID NO: 77293 - protein, 11 aa, Homo sapiens
  misc_feature: Table A; Target 77293; HLA-A*02:07; SLC22A9; ENSG00000149742; TAA
IIFVPQEMQTL

SEQ ID NO: 77294 - protein, 11 aa, Homo sapiens
  misc_feature: Table A; Target 77294; HLA-B*27:05; SLC22A9; ENSG00000149742; TAA
IIFVPQEMQTL

SEQ ID NO: 77295 - protein, 11 aa, Homo sapiens
  misc_feature: Table A; Target 77295; HLA-B*38:01; SLC22A9; ENSG00000149742; TAA
IIFVPQEMQTL

SEQ ID NO: 77296 - protein, 11 aa, Homo sapiens
  misc_feature: Table A; Target 77296; HLA-C*03:04; SLC22A9; ENSG00000149742; TAA
IIFVPQEMQTL

SEQ ID NO: 77297 - protein, 10 aa, Homo sapiens
  misc_feature: Table A; Target 77297; HLA-C*01:02; SLC22A9; ENSG00000149742; TAA
IINNKPEEGL

SEQ ID NO: 77298 - protein, 11 aa, Homo sapiens
  misc_feature: Table A; Target 77298; HLA-A*03:02; SLC22A9; ENSG00000149742; TAA
IINNKPEEGLK

SEQ ID NO: 77299 - protein, 9 aa, Homo sapiens
  misc_feature: Table A; Target 77299; HLA-A*02:07; SLC22A9; ENSG00000149742; TAA
IIYGVFPFI

SEQ ID NO: 77300 - protein, 10 aa, Homo sapiens
  misc_feature: Table A; Target 77300; HLA-A*30:02; SLC22A9; ENSG00000149742; TAA
ILQLVVSVPY

SEQ ID NO: 77301 - protein, 9 aa, Homo sapiens
  misc_feature: Table A; Target 77301; HLA-A*02:01; SLC22A9; ENSG00000149742; TAA
ILQTVFLSI

SEQ ID NO: 77302 - protein, 9 aa, Homo sapiens
  misc_feature: Table A; Target 77302; HLA-A*02:04; SLC22A9; ENSG00000149742; TAA
ILQTVFLSI

SEQ ID NO: 77303 - protein, 9 aa, Homo sapiens
  misc_feature: Table A; Target 77303; HLA-A*02:07; SLC22A9; ENSG00000149742; TAA
ILQTVFLSI

SEQ ID NO: 77304 - protein, 9 aa, Homo sapiens
  misc_feature: Table A; Target 77304; HLA-A*23:01; SLC22A9; ENSG00000149742; TAA
ILQTVFLSI

SEQ ID NO: 77305 - protein, 9 aa, Homo sapiens
  misc_feature: Table A; Target 77305; HLA-A*24:02; SLC22A9; ENSG00000149742; TAA
ILQTVFLSI

SEQ ID NO: 77306 - protein, 9 aa, Homo sapiens
  misc_feature: Table A; Target 77306; HLA-B*13:02; SLC22A9; ENSG00000149742; TAA
ILQTVFLSI

SEQ ID NO: 77307 - protein, 9 aa, Homo sapiens
  misc_feature: Table A; Target 77307; HLA-B*51:01; SLC22A9; ENSG00000149742; TAA
ILQTVFLSI

SEQ ID NO: 77308 - protein, 9 aa, Homo sapiens
  misc_feature: Table A; Target 77308; HLA-B*54:01; SLC22A9; ENSG00000149742; TAA
IPLDSNMRP

SEQ ID NO: 77309 - protein, 9 aa, Homo sapiens
  misc_feature: Table A; Target 77309; HLA-B*56:01; SLC22A9; ENSG00000149742; TAA
IPLDSNMRP

SEQ ID NO: 77310 - protein, 9 aa, Homo sapiens
  misc_feature: Table A; Target 77310; HLA-B*54:01; SLC22A9; ENSG00000149742; TAA
IPTIIRARA

SEQ ID NO: 77311 - protein, 9 aa, Homo sapiens
  misc_feature: Table A; Target 77311; HLA-B*56:01; SLC22A9; ENSG00000149742; TAA
IPTIIRARA

SEQ ID NO: 77312 - protein, 9 aa, Homo sapiens
  misc_feature: Table A; Target 77312; HLA-C*02:02; SLC22A9; ENSG00000149742; TAA
ISFSSTIVT

SEQ ID NO: 77313 - protein, 11 aa, Homo sapiens
  misc_feature: Table A; Target 77313; HLA-A*25:01; SLC22A9; ENSG00000149742; TAA
ISFSSTIVTEW

SEQ ID NO: 77314 - protein, 11 aa, Homo sapiens
  misc_feature: Table A; Target 77314; HLA-A*33:01; SLC22A9; ENSG00000149742; TAA
ISFSSTIVTEW

SEQ ID NO: 77315 - protein, 11 aa, Homo sapiens
  misc_feature: Table A; Target 77315; HLA-B*57:01; SLC22A9; ENSG00000149742; TAA
ISFSSTIVTEW

SEQ ID NO: 77316 - protein, 11 aa, Homo sapiens
  misc_feature: Table A; Target 77316; HLA-B*58:01; SLC22A9; ENSG00000149742; TAA
ISFSSTIVTEW

SEQ ID NO: 77317 - protein, 11 aa, Homo sapiens
  misc_feature: Table A; Target 77317; HLA-C*02:02; SLC22A9; ENSG00000149742; TAA
ISFSSTIVTEW

SEQ ID NO: 77318 - protein, 9 aa, Homo sapiens
  misc_feature: Table A; Target 77318; HLA-B*57:01; SLC22A9; ENSG00000149742; TAA
ISIPLDSNM

SEQ ID NO: 77319 - protein, 9 aa, Homo sapiens
  misc_feature: Table A; Target 77319; HLA-B*58:01; SLC22A9; ENSG00000149742; TAA
ISIPLDSNM

SEQ ID NO: 77320 - protein, 8 aa, Homo sapiens
  misc_feature: Table A; Target 77320; HLA-B*57:01; SLC22A9; ENSG00000149742; TAA
ISLLSFTR

SEQ ID NO: 77321 - protein, 9 aa, Homo sapiens
  misc_feature: Table A; Target 77321; HLA-A*24:02; SLC22A9; ENSG00000149742; TAA
ISLLSFTRF

SEQ ID NO: 77322 - protein, 9 aa, Homo sapiens
  misc_feature: Table A; Target 77322; HLA-B*57:01; SLC22A9; ENSG00000149742; TAA
ISLLSFTRF

SEQ ID NO: 77323 - protein, 8 aa, Homo sapiens
  misc_feature: Table A; Target 77323; HLA-A*23:01; SLC22A9; ENSG00000149742; TAA
ITNTIMLI

SEQ ID NO: 77324 - protein, 8 aa, Homo sapiens
  misc_feature: Table A; Target 77324; HLA-A*24:02; SLC22A9; ENSG00000149742; TAA
ITNTIMLI

SEQ ID NO: 77325 - protein, 8 aa, Homo sapiens
  misc_feature: Table A; Target 77325; HLA-B*51:01; SLC22A9; ENSG00000149742; TAA
ITNTIMLI

SEQ ID NO: 77326 - protein, 8 aa, Homo sapiens
  misc_feature: Table A; Target 77326; HLA-C*12:03; SLC22A9; ENSG00000149742; TAA
ITNTIMLI

SEQ ID NO: 77327 - protein, 11 aa, Homo sapiens
  misc_feature: Table A; Target 77327; HLA-B*57:01; SLC22A9; ENSG00000149742; TAA
ITNTIMLIAEW

SEQ ID NO: 77328 - protein, 8 aa, Homo sapiens
  misc_feature: Table A; Target 77328; HLA-C*01:02; SLC22A9; ENSG00000149742; TAA
IVGTCAAL

SEQ ID NO: 77329 - protein, 8 aa, Homo sapiens
  misc_feature: Table A; Target 77329; HLA-A*24:02; SLC22A9; ENSG00000149742; TAA
IYGVFPFI

SEQ ID NO: 77330 - protein, 8 aa, Homo sapiens
  misc_feature: Table A; Target 77330; HLA-C*16:01; SLC22A9; ENSG00000149742; TAA
KAAHRSGM

SEQ ID NO: 77331 - protein, 9 aa, Homo sapiens
  misc_feature: Table A; Target 77331; HLA-B*44:02; SLC22A9; ENSG00000149742; TAA
KELEAAQKK

SEQ ID NO: 77332 - protein, 9 aa, Homo sapiens
  misc_feature: Table A; Target 77332; HLA-B*44:03; SLC22A9; ENSG00000149742; TAA
KELEAAQKK

SEQ ID NO: 77333 - protein, 9 aa, Homo sapiens
  misc_feature: Table A; Target 77333; HLA-B*07:02; SLC22A9; ENSG00000149742; TAA
KPEEGLKEL

SEQ ID NO: 77334 - protein, 9 aa, Homo sapiens
  misc_feature: Table A; Target 77334; HLA-B*35:03; SLC22A9; ENSG00000149742; TAA
KPEEGLKEL

SEQ ID NO: 77335 - protein, 9 aa, Homo sapiens
  misc_feature: Table A; Target 77335; HLA-B*55:01; SLC22A9; ENSG00000149742; TAA
KPEEGLKEL

SEQ ID NO: 77336 - protein, 9 aa, Homo sapiens
  misc_feature: Table A; Target 77336; HLA-C*07:02; SLC22A9; ENSG00000149742; TAA
KPEEGLKEL

SEQ ID NO: 77337 - protein, 11 aa, Homo sapiens
  misc_feature: Table A; Target 77337; HLA-B*27:02; SLC22A9; ENSG00000149742; TAA
KPLFDTIQDEK

SEQ ID NO: 77338 - protein, 9 aa, Homo sapiens
  misc_feature: Table A; Target 77338; HLA-C*05:01; SLC22A9; ENSG00000149742; TAA
KQEDPRVEV

SEQ ID NO: 77339 - protein, 8 aa, Homo sapiens
  misc_feature: Table A; Target 77339; HLA-C*16:01; SLC22A9; ENSG00000149742; TAA
KSTMKKEL

SEQ ID NO: 77340 - protein, 9 aa, Homo sapiens
  misc_feature: Table A; Target 77340; HLA-B*46:01; SLC22A9; ENSG00000149742; TAA
LAFAHGNEV

SEQ ID NO: 77341 - protein, 9 aa, Homo sapiens
  misc_feature: Table A; Target 77341; HLA-B*51:01; SLC22A9; ENSG00000149742; TAA
LAFAHGNEV

SEQ ID NO: 77342 - protein, 9 aa, Homo sapiens
  misc_feature: Table A; Target 77342; HLA-B*54:01; SLC22A9; ENSG00000149742; TAA
LAFAHGNEV

SEQ ID NO: 77343 - protein, 9 aa, Homo sapiens
  misc_feature: Table A; Target 77343; HLA-C*02:02; SLC22A9; ENSG00000149742; TAA
LAFAHGNEV

SEQ ID NO: 77344 - protein, 9 aa, Homo sapiens
  misc_feature: Table A; Target 77344; HLA-C*03:03; SLC22A9; ENSG00000149742; TAA
LAFAHGNEV

SEQ ID NO: 77345 - protein, 9 aa, Homo sapiens
  misc_feature: Table A; Target 77345; HLA-C*03:04; SLC22A9; ENSG00000149742; TAA
LAFAHGNEV

SEQ ID NO: 77346 - protein, 9 aa, Homo sapiens
  misc_feature: Table A; Target 77346; HLA-C*12:03; SLC22A9; ENSG00000149742; TAA
LAFAHGNEV

SEQ ID NO: 77347 - protein, 9 aa, Homo sapiens
  misc_feature: Table A; Target 77347; HLA-C*16:02; SLC22A9; ENSG00000149742; TAA
LAFAHGNEV

SEQ ID NO: 77348 - protein, 9 aa, Homo sapiens
  misc_feature: Table A; Target 77348; HLA-C*16:04; SLC22A9; ENSG00000149742; TAA
LAFAHGNEV

SEQ ID NO: 77349 - protein, 8 aa, Homo sapiens
  misc_feature: Table A; Target 77349; HLA-B*57:01; SLC22A9; ENSG00000149742; TAA
LAFAIRDW

SEQ ID NO: 77350 - protein, 8 aa, Homo sapiens
  misc_feature: Table A; Target 77350; HLA-B*51:01; SLC22A9; ENSG00000149742; TAA
LAGLAFAI

SEQ ID NO: 77351 - protein, 10 aa, Homo sapiens
  misc_feature: Table A; Target 77351; HLA-C*02:02; SLC22A9; ENSG00000149742; TAA
LAIIFVPQEM

SEQ ID NO: 77352 - protein, 8 aa, Homo sapiens
  misc_feature: Table A; Target 77352; HLA-B*51:01; SLC22A9; ENSG00000149742; TAA
LAPLMMIL

SEQ ID NO: 77353 - protein, 9 aa, Homo sapiens
  misc_feature: Table A; Target 77353; HLA-A*02:07; SLC22A9; ENSG00000149742; TAA
LAPTFLIYC

SEQ ID NO: 77354 - protein, 8 aa, Homo sapiens
  misc_feature: Table A; Target 77354; HLA-B*54:01; SLC22A9; ENSG00000149742; TAA
LATLGLGA

SEQ ID NO: 77355 - protein, 10 aa, Homo sapiens
  misc_feature: Table A; Target 77355; HLA-B*54:01; SLC22A9; ENSG00000149742; TAA
LATLGLGASA

SEQ ID NO: 77356 - protein, 10 aa, Homo sapiens
  misc_feature: Table A; Target 77356; HLA-B*56:01; SLC22A9; ENSG00000149742; TAA
LATLGLGASA

SEQ ID NO: 77357 - protein, 8 aa, Homo sapiens
  misc_feature: Table A; Target 77357; HLA-B*08:01; SLC22A9; ENSG00000149742; TAA
LEILKSTM

SEQ ID NO: 77358 - protein, 8 aa, Homo sapiens
  misc_feature: Table A; Target 77358; HLA-B*18:01; SLC22A9; ENSG00000149742; TAA
LEILKSTM

SEQ ID NO: 77359 - protein, 8 aa, Homo sapiens
  misc_feature: Table A; Target 77359; HLA-B*37:01; SLC22A9; ENSG00000149742; TAA
LEILKSTM

SEQ ID NO: 77360 - protein, 8 aa, Homo sapiens
  misc_feature: Table A; Target 77360; HLA-B*49:01; SLC22A9; ENSG00000149742; TAA
LEILKSTM

SEQ ID NO: 77361 - protein, 8 aa, Homo sapiens
  misc_feature: Table A; Target 77361; HLA-B*49:01; SLC22A9; ENSG00000149742; TAA
LENFTAFI

SEQ ID NO: 77362 - protein, 10 aa, Homo sapiens
  misc_feature: Table A; Target 77362; HLA-A*32:01; SLC22A9; ENSG00000149742; TAA
LGASALANTL

SEQ ID NO: 77363 - protein, 10 aa, Homo sapiens
  misc_feature: Table A; Target 77363; HLA-B*07:02; SLC22A9; ENSG00000149742; TAA
LGASALANTL

SEQ ID NO: 77364 - protein, 10 aa, Homo sapiens
  misc_feature: Table A; Target 77364; HLA-B*27:05; SLC22A9; ENSG00000149742; TAA
LGASALANTL

SEQ ID NO: 77365 - protein, 10 aa, Homo sapiens
  misc_feature: Table A; Target 77365; HLA-C*06:02; SLC22A9; ENSG00000149742; TAA
LGASALANTL

SEQ ID NO: 77366 - protein, 10 aa, Homo sapiens
  misc_feature: Table A; Target 77366; HLA-C*07:02; SLC22A9; ENSG00000149742; TAA
LGASALANTL

SEQ ID NO: 77367 - protein, 8 aa, Homo sapiens
  misc_feature: Table A; Target 77367; HLA-B*08:01; SLC22A9; ENSG00000149742; TAA
LGLGASAL

SEQ ID NO: 77368 - protein, 8 aa, Homo sapiens
  misc_feature: Table A; Target 77368; HLA-C*01:02; SLC22A9; ENSG00000149742; TAA
LGLGASAL

SEQ ID NO: 77369 - protein, 8 aa, Homo sapiens
  misc_feature: Table A; Target 77369; HLA-C*03:03; SLC22A9; ENSG00000149742; TAA
LGLGASAL

SEQ ID NO: 77370 - protein, 8 aa, Homo sapiens
  misc_feature: Table A; Target 77370; HLA-C*03:04; SLC22A9; ENSG00000149742; TAA
LGLGASAL

SEQ ID NO: 77371 - protein, 8 aa, Homo sapiens
  misc_feature: Table A; Target 77371; HLA-C*07:04; SLC22A9; ENSG00000149742; TAA
LGLGASAL

SEQ ID NO: 77372 - protein, 8 aa, Homo sapiens
  misc_feature: Table A; Target 77372; HLA-C*12:03; SLC22A9; ENSG00000149742; TAA
LGLGASAL

SEQ ID NO: 77373 - protein, 8 aa, Homo sapiens
  misc_feature: Table A; Target 77373; HLA-C*14:02; SLC22A9; ENSG00000149742; TAA
LGLGASAL

SEQ ID NO: 77374 - protein, 10 aa, Homo sapiens
  misc_feature: Table A; Target 77374; HLA-C*03:04; SLC22A9; ENSG00000149742; TAA
LGMCPSGIAF

SEQ ID NO: 77375 - protein, 9 aa, Homo sapiens
  misc_feature: Table A; Target 77375; HLA-A*23:01; SLC22A9; ENSG00000149742; TAA
LITNTIMLI

SEQ ID NO: 77376 - protein, 9 aa, Homo sapiens
  misc_feature: Table A; Target 77376; HLA-A*24:02; SLC22A9; ENSG00000149742; TAA
LITNTIMLI

SEQ ID NO: 77377 - protein, 9 aa, Homo sapiens
  misc_feature: Table A; Target 77377; HLA-A*68:02; SLC22A9; ENSG00000149742; TAA
LITNTIMLI

SEQ ID NO: 77378 - protein, 9 aa, Homo sapiens
  misc_feature: Table A; Target 77378; HLA-B*13:02; SLC22A9; ENSG00000149742; TAA
LITNTIMLI

SEQ ID NO: 77379 - protein, 9 aa, Homo sapiens
  misc_feature: Table A; Target 77379; HLA-A*03:01; SLC22A9; ENSG00000149742; TAA
LLLPETRNK

SEQ ID NO: 77380 - protein, 9 aa, Homo sapiens
  misc_feature: Table A; Target 77380; HLA-A*03:02; SLC22A9; ENSG00000149742; TAA
LLLPETRNK

SEQ ID NO: 77381 - protein, 11 aa, Homo sapiens
  misc_feature: Table A; Target 77381; HLA-A*02:07; SLC22A9; ENSG00000149742; TAA
LLPETRNKPLF

SEQ ID NO: 77382 - protein, 11 aa, Homo sapiens
  misc_feature: Table A; Target 77382; HLA-A*24:02; SLC22A9; ENSG00000149742; TAA
LLPETRNKPLF

SEQ ID NO: 77383 - protein, 8 aa, Homo sapiens
  misc_feature: Table A; Target 77383; HLA-B*15:01; SLC22A9; ENSG00000149742; TAA
LMMILSVY

SEQ ID NO: 77384 - protein, 8 aa, Homo sapiens
  misc_feature: Table A; Target 77384; HLA-B*15:03; SLC22A9; ENSG00000149742; TAA
LMMILSVY

SEQ ID NO: 77385 - protein, 8 aa, Homo sapiens
  misc_feature: Table A; Target 77385; HLA-B*46:01; SLC22A9; ENSG00000149742; TAA
LMMILSVY

SEQ ID NO: 77386 - protein, 9 aa, Homo sapiens
  misc_feature: Table A; Target 77386; HLA-B*07:02; SLC22A9; ENSG00000149742; TAA
LPETRNKPL

SEQ ID NO: 77387 - protein, 9 aa, Homo sapiens
  misc_feature: Table A; Target 77387; HLA-B*08:01; SLC22A9; ENSG00000149742; TAA
LPETRNKPL

SEQ ID NO: 77388 - protein, 9 aa, Homo sapiens
  misc_feature: Table A; Target 77388; HLA-C*07:02; SLC22A9; ENSG00000149742; TAA
LPETRNKPL

SEQ ID NO: 77389 - protein, 8 aa, Homo sapiens
  misc_feature: Table A; Target 77389; HLA-B*51:01; SLC22A9; ENSG00000149742; TAA
LPWIIYGV

SEQ ID NO: 77390 - protein, 9 aa, Homo sapiens
  misc_feature: Table A; Target 77390; HLA-A*30:02; SLC22A9; ENSG00000149742; TAA
LQLVVSVPY

SEQ ID NO: 77391 - protein, 9 aa, Homo sapiens
  misc_feature: Table A; Target 77391; HLA-B*15:03; SLC22A9; ENSG00000149742; TAA
LQLVVSVPY

SEQ ID NO: 77392 - protein, 9 aa, Homo sapiens
  misc_feature: Table A; Target 77392; HLA-B*46:01; SLC22A9; ENSG00000149742; TAA
LQLVVSVPY

SEQ ID NO: 77393 - protein, 9 aa, Homo sapiens
  misc_feature: Table A; Target 77393; HLA-A*30:01; SLC22A9; ENSG00000149742; TAA
LQTLFGAVI

SEQ ID NO: 77394 - protein, 9 aa, Homo sapiens
  misc_feature: Table A; Target 77394; HLA-B*13:02; SLC22A9; ENSG00000149742; TAA
LQTLFGAVI

SEQ ID NO: 77395 - protein, 9 aa, Homo sapiens
  misc_feature: Table A; Target 77395; HLA-B*38:01; SLC22A9; ENSG00000149742; TAA
LQTLFGAVI

SEQ ID NO: 77396 - protein, 9 aa, Homo sapiens
  misc_feature: Table A; Target 77396; HLA-B*39:01; SLC22A9; ENSG00000149742; TAA
LQTLFGAVI

SEQ ID NO: 77397 - protein, 9 aa, Homo sapiens
  misc_feature: Table A; Target 77397; HLA-C*07:04; SLC22A9; ENSG00000149742; TAA
LQTLFGAVI

SEQ ID NO: 77398 - protein, 8 aa, Homo sapiens
  misc_feature: Table A; Target 77398; HLA-B*13:02; SLC22A9; ENSG00000149742; TAA
LQTVFLSI

SEQ ID NO: 77399 - protein, 9 aa, Homo sapiens
  misc_feature: Table A; Target 77399; HLA-C*12:03; SLC22A9; ENSG00000149742; TAA
LQVAIVGTC

SEQ ID NO: 77400 - protein, 10 aa, Homo sapiens
  misc_feature: Table A; Target 77400; HLA-B*27:05; SLC22A9; ENSG00000149742; TAA
LRFLSGIAAM

SEQ ID NO: 77401 - protein, 10 aa, Homo sapiens
  misc_feature: Table A; Target 77401; HLA-B*40:02; SLC22A9; ENSG00000149742; TAA
LRFLSGIAAM

SEQ ID NO: 77402 - protein, 9 aa, Homo sapiens
  misc_feature: Table A; Target 77402; HLA-B*57:01; SLC22A9; ENSG00000149742; TAA
LSFTRFANF

SEQ ID NO: 77403 - protein, 9 aa, Homo sapiens
  misc_feature: Table A; Target 77403; HLA-C*01:02; SLC22A9; ENSG00000149742; TAA
LSGIAAMSL

SEQ ID NO: 77404 - protein, 9 aa, Homo sapiens
  misc_feature: Table A; Target 77404; HLA-A*01:01; SLC22A9; ENSG00000149742; TAA
LSIFAVATY

SEQ ID NO: 77405 - protein, 9 aa, Homo sapiens
  misc_feature: Table A; Target 77405; HLA-A*26:01; SLC22A9; ENSG00000149742; TAA
LSIFAVATY

SEQ ID NO: 77406 - protein, 9 aa, Homo sapiens
  misc_feature: Table A; Target 77406; HLA-A*30:02; SLC22A9; ENSG00000149742; TAA
LSIFAVATY

SEQ ID NO: 77407 - protein, 9 aa, Homo sapiens
  misc_feature: Table A; Target 77407; HLA-A*32:01; SLC22A9; ENSG00000149742; TAA
LSIFAVATY

SEQ ID NO: 77408 - protein, 9 aa, Homo sapiens
  misc_feature: Table A; Target 77408; HLA-B*15:01; SLC22A9; ENSG00000149742; TAA
LSIFAVATY

SEQ ID NO: 77409 - protein, 9 aa, Homo sapiens
  misc_feature: Table A; Target 77409; HLA-B*15:03; SLC22A9; ENSG00000149742; TAA
LSIFAVATY

SEQ ID NO: 77410 - protein, 9 aa, Homo sapiens
  misc_feature: Table A; Target 77410; HLA-B*46:01; SLC22A9; ENSG00000149742; TAA
LSIFAVATY

SEQ ID NO: 77411 - protein, 9 aa, Homo sapiens
  misc_feature: Table A; Target 77411; HLA-B*57:01; SLC22A9; ENSG00000149742; TAA
LSIFAVATY

SEQ ID NO: 77412 - protein, 9 aa, Homo sapiens
  misc_feature: Table A; Target 77412; HLA-B*58:01; SLC22A9; ENSG00000149742; TAA
LSIFAVATY

SEQ ID NO: 77413 - protein, 9 aa, Homo sapiens
  misc_feature: Table A; Target 77413; HLA-C*02:02; SLC22A9; ENSG00000149742; TAA
LSIFAVATY

SEQ ID NO: 77414 - protein, 10 aa, Homo sapiens
  misc_feature: Table A; Target 77414; HLA-B*57:01; SLC22A9; ENSG00000149742; TAA
LSVYSPPLPW

SEQ ID NO: 77415 - protein, 10 aa, Homo sapiens
  misc_feature: Table A; Target 77415; HLA-B*57:01; SLC22A9; ENSG00000149742; TAA
LTLEILKSTM

SEQ ID NO: 77416 - protein, 9 aa, Homo sapiens
  misc_feature: Table A; Target 77416; HLA-B*57:01; SLC22A9; ENSG00000149742; TAA
LTSVAKFVF

SEQ ID NO: 77417 - protein, 9 aa, Homo sapiens
  misc_feature: Table A; Target 77417; HLA-C*16:01; SLC22A9; ENSG00000149742; TAA
LTSVAKFVF

SEQ ID NO: 77418 - protein, 11 aa, Homo sapiens
  misc_feature: Table A; Target 77418; HLA-A*02:01; SLC22A9; ENSG00000149742; TAA
LVCDSQSLTSV

SEQ ID NO: 77419 - protein, 11 aa, Homo sapiens
  misc_feature: Table A; Target 77419; HLA-A*02:03; SLC22A9; ENSG00000149742; TAA
LVCDSQSLTSV

SEQ ID NO: 77420 - protein, 9 aa, Homo sapiens
  misc_feature: Table A; Target 77420; HLA-A*68:02; SLC22A9; ENSG00000149742; TAA
LVVSVPYFV

SEQ ID NO: 77421 - protein, 8 aa, Homo sapiens
  misc_feature: Table A; Target 77421; HLA-B*51:01; SLC22A9; ENSG00000149742; TAA
MAYFGLNL

SEQ ID NO: 77422 - protein, 8 aa, Homo sapiens
  misc_feature: Table A; Target 77422; HLA-C*03:03; SLC22A9; ENSG00000149742; TAA
MAYFGLNL

SEQ ID NO: 77423 - protein, 8 aa, Homo sapiens
  misc_feature: Table A; Target 77423; HLA-C*03:04; SLC22A9; ENSG00000149742; TAA
MAYFGLNL

SEQ ID NO: 77424 - protein, 10 aa, Homo sapiens
  misc_feature: Table A; Target 77424; HLA-A*68:02; SLC22A9; ENSG00000149742; TAA
MAYFGLNLHV

SEQ ID NO: 77425 - protein, 8 aa, Homo sapiens
  misc_feature: Table A; Target 77425; HLA-C*01:02; SLC22A9; ENSG00000149742; TAA
MCPSGIAF

SEQ ID NO: 77426 - protein, 11 aa, Homo sapiens
  misc_feature: Table A; Target 77426; HLA-A*02:07; SLC22A9; ENSG00000149742; TAA
MCPSGIAFMTL

SEQ ID NO: 77427 - protein, 11 aa, Homo sapiens
  misc_feature: Table A; Target 77427; HLA-A*24:02; SLC22A9; ENSG00000149742; TAA
MCPSGIAFMTL

SEQ ID NO: 77428 - protein, 9 aa, Homo sapiens
  misc_feature: Table A; Target 77428; HLA-A*02:07; SLC22A9; ENSG00000149742; TAA
MLENFTAFI

SEQ ID NO: 77429 - protein, 9 aa, Homo sapiens
  misc_feature: Table A; Target 77429; HLA-A*02:04; SLC22A9; ENSG00000149742; TAA
MLLMFLLAI

SEQ ID NO: 77430 - protein, 11 aa, Homo sapiens
  misc_feature: Table A; Target 77430; HLA-C*04:01; SLC22A9; ENSG00000149742; TAA
MMVGGILGGHL

SEQ ID NO: 77431 - protein, 8 aa, Homo sapiens
  misc_feature: Table A; Target 77431; HLA-B*51:01; SLC22A9; ENSG00000149742; TAA
MPNICKRI

SEQ ID NO: 77432 - protein, 10 aa, Homo sapiens
  misc_feature: Table A; Target 77432; HLA-B*07:02; SLC22A9; ENSG00000149742; TAA
MPNICKRISL

SEQ ID NO: 77433 - protein, 10 aa, Homo sapiens
  misc_feature: Table A; Target 77433; HLA-B*08:01; SLC22A9; ENSG00000149742; TAA
MPNICKRISL

SEQ ID NO: 77434 - protein, 8 aa, Homo sapiens
  misc_feature: Table A; Target 77434; HLA-B*08:01; SLC22A9; ENSG00000149742; TAA
MQTLREVL

SEQ ID NO: 77435 - protein, 8 aa, Homo sapiens
  misc_feature: Table A; Target 77435; HLA-C*16:01; SLC22A9; ENSG00000149742; TAA
MQTLREVL

SEQ ID NO: 77436 - protein, 8 aa, Homo sapiens
  misc_feature: Table A; Target 77436; HLA-B*51:01; SLC22A9; ENSG00000149742; TAA
MSLITNTI

SEQ ID NO: 77437 - protein, 8 aa, Homo sapiens
  misc_feature: Table A; Target 77437; HLA-C*03:03; SLC22A9; ENSG00000149742; TAA
MTLAGLAF

SEQ ID NO: 77438 - protein, 8 aa, Homo sapiens
  misc_feature: Table A; Target 77438; HLA-C*03:04; SLC22A9; ENSG00000149742; TAA
MTLAGLAF

SEQ ID NO: 77439 - protein, 8 aa, Homo sapiens
  misc_feature: Table A; Target 77439; HLA-C*14:02; SLC22A9; ENSG00000149742; TAA
MTLAGLAF

SEQ ID NO: 77440 - protein, 10 aa, Homo sapiens
  misc_feature: Table A; Target 77440; HLA-A*68:02; SLC22A9; ENSG00000149742; TAA
MVGGILGGHL

SEQ ID NO: 77441 - protein, 10 aa, Homo sapiens
  misc_feature: Table A; Target 77441; HLA-C*07:01; SLC22A9; ENSG00000149742; TAA
MVGGILGGHL

SEQ ID NO: 77442 - protein, 10 aa, Homo sapiens
  misc_feature: Table A; Target 77442; HLA-C*07:04; SLC22A9; ENSG00000149742; TAA
MVGGILGGHL

SEQ ID NO: 77443 - protein, 8 aa, Homo sapiens
  misc_feature: Table A; Target 77443; HLA-B*07:02; SLC22A9; ENSG00000149742; TAA
NARDTLTL

SEQ ID NO: 77444 - protein, 8 aa, Homo sapiens
  misc_feature: Table A; Target 77444; HLA-B*51:01; SLC22A9; ENSG00000149742; TAA
NARDTLTL

SEQ ID NO: 77445 - protein, 8 aa, Homo sapiens
  misc_feature: Table A; Target 77445; HLA-C*03:04; SLC22A9; ENSG00000149742; TAA
NARDTLTL

SEQ ID NO: 77446 - protein, 10 aa, Homo sapiens
  misc_feature: Table A; Target 77446; HLA-A*29:02; SLC22A9; ENSG00000149742; TAA
NCVAPWALKY

SEQ ID NO: 77447 - protein, 10 aa, Homo sapiens
  misc_feature: Table A; Target 77447; HLA-C*07:01; SLC22A9; ENSG00000149742; TAA
NCVAPWALKY

SEQ ID NO: 77448 - protein, 8 aa, Homo sapiens
  misc_feature: Table A; Target 77448; HLA-A*30:01; SLC22A9; ENSG00000149742; TAA
NEVIPTII

SEQ ID NO: 77449 - protein, 8 aa, Homo sapiens
  misc_feature: Table A; Target 77449; HLA-B*18:01; SLC22A9; ENSG00000149742; TAA
NEVIPTII

SEQ ID NO: 77450 - protein, 8 aa, Homo sapiens
  misc_feature: Table A; Target 77450; HLA-B*49:01; SLC22A9; ENSG00000149742; TAA
NEVIPTII

SEQ ID NO: 77451 - protein, 9 aa, Homo sapiens
  misc_feature: Table A; Target 77451; HLA-B*49:01; SLC22A9; ENSG00000149742; TAA
NEVIPTIIR

SEQ ID NO: 77452 - protein, 10 aa, Homo sapiens
  misc_feature: Table A; Target 77452; HLA-A*30:01; SLC22A9; ENSG00000149742; TAA
NEVIPTIIRA

SEQ ID NO: 77453 - protein, 9 aa, Homo sapiens
  misc_feature: Table A; Target 77453; HLA-A*02:03; SLC22A9; ENSG00000149742; TAA
NIAGALAPL

SEQ ID NO: 77454 - protein, 9 aa, Homo sapiens
  misc_feature: Table A; Target 77454; HLA-B*07:02; SLC22A9; ENSG00000149742; TAA
NIAGALAPL

SEQ ID NO: 77455 - protein, 9 aa, Homo sapiens
  misc_feature: Table A; Target 77455; HLA-B*27:05; SLC22A9; ENSG00000149742; TAA
NIAGALAPL

SEQ ID NO: 77456 - protein, 9 aa, Homo sapiens
  misc_feature: Table A; Target 77456; HLA-B*46:01; SLC22A9; ENSG00000149742; TAA
NIAGALAPL

SEQ ID NO: 77457 - protein, 9 aa, Homo sapiens
  misc_feature: Table A; Target 77457; HLA-C*01:02; SLC22A9; ENSG00000149742; TAA
NIAGALAPL

SEQ ID NO: 77458 - protein, 9 aa, Homo sapiens
  misc_feature: Table A; Target 77458; HLA-C*07:04; SLC22A9; ENSG00000149742; TAA
NIAGALAPL

SEQ ID NO: 77459 - protein, 10 aa, Homo sapiens
  misc_feature: Table A; Target 77459; HLA-A*26:01; SLC22A9; ENSG00000149742; TAA
NIAGALAPLM

SEQ ID NO: 77460 - protein, 10 aa, Homo sapiens
  misc_feature: Table A; Target 77460; HLA-C*07:04; SLC22A9; ENSG00000149742; TAA
NIAGALAPLM

SEQ ID NO: 77461 - protein, 9 aa, Homo sapiens
  misc_feature: Table A; Target 77461; HLA-A*25:01; SLC22A9; ENSG00000149742; TAA
NTIMLIAEW

SEQ ID NO: 77462 - protein, 9 aa, Homo sapiens
  misc_feature: Table A; Target 77462; HLA-A*26:01; SLC22A9; ENSG00000149742; TAA
NTIMLIAEW

SEQ ID NO: 77463 - protein, 9 aa, Homo sapiens
  misc_feature: Table A; Target 77463; HLA-B*44:02; SLC22A9; ENSG00000149742; TAA
NTIMLIAEW

SEQ ID NO: 77464 - protein, 9 aa, Homo sapiens
  misc_feature: Table A; Target 77464; HLA-B*44:03; SLC22A9; ENSG00000149742; TAA
NTIMLIAEW

SEQ ID NO: 77465 - protein, 9 aa, Homo sapiens
  misc_feature: Table A; Target 77465; HLA-B*57:01; SLC22A9; ENSG00000149742; TAA
NTIMLIAEW

SEQ ID NO: 77466 - protein, 8 aa, Homo sapiens
  misc_feature: Table A; Target 77466; HLA-B*18:01; SLC22A9; ENSG00000149742; TAA
NVFLLQTL

SEQ ID NO: 77467 - protein, 9 aa, Homo sapiens
  misc_feature: Table A; Target 77467; HLA-A*29:02; SLC22A9; ENSG00000149742; TAA
NVFLLQTLF

SEQ ID NO: 77468 - protein, 8 aa, Homo sapiens
  misc_feature: Table A; Target 77468; HLA-A*23:01; SLC22A9; ENSG00000149742; TAA
PFISGFAF

SEQ ID NO: 77469 - protein, 9 aa, Homo sapiens
  misc_feature: Table A; Target 77469; HLA-A*24:02; SLC22A9; ENSG00000149742; TAA
PFISGFAFL

SEQ ID NO: 77470 - protein, 10 aa, Homo sapiens
  misc_feature: Table A; Target 77470; HLA-B*27:02; SLC22A9; ENSG00000149742; TAA
PLFDTIQDEK

SEQ ID NO: 77471 - protein, 9 aa, Homo sapiens
  misc_feature: Table A; Target 77471; HLA-A*02:07; SLC22A9; ENSG00000149742; TAA
PLPWIIYGV

SEQ ID NO: 77472 - protein, 8 aa, Homo sapiens
  misc_feature: Table A; Target 77472; HLA-B*07:02; SLC22A9; ENSG00000149742; TAA
PRVEVTQF

SEQ ID NO: 77473 - protein, 8 aa, Homo sapiens
  misc_feature: Table A; Target 77473; HLA-C*07:01; SLC22A9; ENSG00000149742; TAA
PRVEVTQF

SEQ ID NO: 77474 - protein, 8 aa, Homo sapiens
  misc_feature: Table A; Target 77474; HLA-C*07:02; SLC22A9; ENSG00000149742; TAA
PRVEVTQF

SEQ ID NO: 77475 - protein, 8 aa, Homo sapiens
  misc_feature: Table A; Target 77475; HLA-C*12:03; SLC22A9; ENSG00000149742; TAA
PRVEVTQF

SEQ ID NO: 77476 - protein, 9 aa, Homo sapiens
  misc_feature: Table A; Target 77476; HLA-C*07:02; SLC22A9; ENSG00000149742; TAA
PSGIAFMTL

SEQ ID NO: 77477 - protein, 9 aa, Homo sapiens
  misc_feature: Table A; Target 77477; HLA-A*11:01; SLC22A9; ENSG00000149742; TAA
QAMGITLGM

SEQ ID NO: 77478 - protein, 9 aa, Homo sapiens
  misc_feature: Table A; Target 77478; HLA-A*23:01; SLC22A9; ENSG00000149742; TAA
QAMGITLGM

SEQ ID NO: 77479 - protein, 9 aa, Homo sapiens
  misc_feature: Table A; Target 77479; HLA-A*25:01; SLC22A9; ENSG00000149742; TAA
QAMGITLGM

SEQ ID NO: 77480 - protein, 9 aa, Homo sapiens
  misc_feature: Table A; Target 77480; HLA-A*26:01; SLC22A9; ENSG00000149742; TAA
QAMGITLGM

SEQ ID NO: 77481 - protein, 9 aa, Homo sapiens
  misc_feature: Table A; Target 77481; HLA-A*29:02; SLC22A9; ENSG00000149742; TAA
QAMGITLGM

SEQ ID NO: 77482 - protein, 9 aa, Homo sapiens
  misc_feature: Table A; Target 77482; HLA-A*32:01; SLC22A9; ENSG00000149742; TAA
QAMGITLGM

SEQ ID NO: 77483 - protein, 9 aa, Homo sapiens
  misc_feature: Table A; Target 77483; HLA-A*68:01; SLC22A9; ENSG00000149742; TAA
QAMGITLGM

SEQ ID NO: 77484 - protein, 9 aa, Homo sapiens
  misc_feature: Table A; Target 77484; HLA-A*68:02; SLC22A9; ENSG00000149742; TAA
QAMGITLGM

SEQ ID NO: 77485 - protein, 9 aa, Homo sapiens
  misc_feature: Table A; Target 77485; HLA-B*13:02; SLC22A9; ENSG00000149742; TAA
QAMGITLGM

SEQ ID NO: 77486 - protein, 9 aa, Homo sapiens
  misc_feature: Table A; Target 77486; HLA-B*15:01; SLC22A9; ENSG00000149742; TAA
QAMGITLGM

SEQ ID NO: 77487 - protein, 9 aa, Homo sapiens
  misc_feature: Table A; Target 77487; HLA-B*15:03; SLC22A9; ENSG00000149742; TAA
QAMGITLGM

SEQ ID NO: 77488 - protein, 9 aa, Homo sapiens
  misc_feature: Table A; Target 77488; HLA-B*27:05; SLC22A9; ENSG00000149742; TAA
QAMGITLGM

SEQ ID NO: 77489 - protein, 9 aa, Homo sapiens
  misc_feature: Table A; Target 77489; HLA-B*35:01; SLC22A9; ENSG00000149742; TAA
QAMGITLGM

SEQ ID NO: 77490 - protein, 9 aa, Homo sapiens
  misc_feature: Table A; Target 77490; HLA-B*35:03; SLC22A9; ENSG00000149742; TAA
QAMGITLGM

SEQ ID NO: 77491 - protein, 9 aa, Homo sapiens
  misc_feature: Table A; Target 77491; HLA-B*38:01; SLC22A9; ENSG00000149742; TAA
QAMGITLGM

SEQ ID NO: 77492 - protein, 9 aa, Homo sapiens
  misc_feature: Table A; Target 77492; HLA-B*39:01; SLC22A9; ENSG00000149742; TAA
QAMGITLGM

SEQ ID NO: 77493 - protein, 9 aa, Homo sapiens
  misc_feature: Table A; Target 77493; HLA-B*44:03; SLC22A9; ENSG00000149742; TAA
QAMGITLGM

SEQ ID NO: 77494 - protein, 9 aa, Homo sapiens
  misc_feature: Table A; Target 77494; HLA-B*46:01; SLC22A9; ENSG00000149742; TAA
QAMGITLGM

SEQ ID NO: 77495 - protein, 9 aa, Homo sapiens
  misc_feature: Table A; Target 77495; HLA-B*55:01; SLC22A9; ENSG00000149742; TAA
QAMGITLGM

SEQ ID NO: 77496 - protein, 9 aa, Homo sapiens
  misc_feature: Table A; Target 77496; HLA-B*58:01; SLC22A9; ENSG00000149742; TAA
QAMGITLGM

SEQ ID NO: 77497 - protein, 9 aa, Homo sapiens
  misc_feature: Table A; Target 77497; HLA-C*02:02; SLC22A9; ENSG00000149742; TAA
QAMGITLGM

SEQ ID NO: 77498 - protein, 9 aa, Homo sapiens
  misc_feature: Table A; Target 77498; HLA-C*03:03; SLC22A9; ENSG00000149742; TAA
QAMGITLGM

SEQ ID NO: 77499 - protein, 9 aa, Homo sapiens
  misc_feature: Table A; Target 77499; HLA-C*03:04; SLC22A9; ENSG00000149742; TAA
QAMGITLGM

SEQ ID NO: 77500 - protein, 9 aa, Homo sapiens
  misc_feature: Table A; Target 77500; HLA-C*07:06; SLC22A9; ENSG00000149742; TAA
QAMGITLGM

SEQ ID NO: 77501 - protein, 9 aa, Homo sapiens
  misc_feature: Table A; Target 77501; HLA-C*12:03; SLC22A9; ENSG00000149742; TAA
QAMGITLGM

SEQ ID NO: 77502 - protein, 9 aa, Homo sapiens
  misc_feature: Table A; Target 77502; HLA-C*14:02; SLC22A9; ENSG00000149742; TAA
QAMGITLGM

SEQ ID NO: 77503 - protein, 9 aa, Homo sapiens
  misc_feature: Table A; Target 77503; HLA-C*16:02; SLC22A9; ENSG00000149742; TAA
QAMGITLGM

SEQ ID NO: 77504 - protein, 9 aa, Homo sapiens
  misc_feature: Table A; Target 77504; HLA-C*16:04; SLC22A9; ENSG00000149742; TAA
QAMGITLGM

SEQ ID NO: 77505 - protein, 9 aa, Homo sapiens
  misc_feature: Table A; Target 77505; HLA-B*37:01; SLC22A9; ENSG00000149742; TAA
QDALLRISI

SEQ ID NO: 77506 - protein, 9 aa, Homo sapiens
  misc_feature: Table A; Target 77506; HLA-B*44:02; SLC22A9; ENSG00000149742; TAA
QDALLRISI

SEQ ID NO: 77507 - protein, 9 aa, Homo sapiens
  misc_feature: Table A; Target 77507; HLA-B*44:03; SLC22A9; ENSG00000149742; TAA
QDALLRISI

SEQ ID NO: 77508 - protein, 11 aa, Homo sapiens
  misc_feature: Table A; Target 77508; HLA-B*44:02; SLC22A9; ENSG00000149742; TAA
QDLLGHAGDLW

SEQ ID NO: 77509 - protein, 8 aa, Homo sapiens
  misc_feature: Table A; Target 77509; HLA-B*37:01; SLC22A9; ENSG00000149742; TAA
QEDPRVEV

SEQ ID NO: 77510 - protein, 8 aa, Homo sapiens
  misc_feature: Table A; Target 77510; HLA-B*49:01; SLC22A9; ENSG00000149742; TAA
QEDPRVEV

SEQ ID NO: 77511 - protein, 9 aa, Homo sapiens
  misc_feature: Table A; Target 77511; HLA-B*37:01; SLC22A9; ENSG00000149742; TAA
QEDPRVEVT

SEQ ID NO: 77512 - protein, 9 aa, Homo sapiens
  misc_feature: Table A; Target 77512; HLA-B*40:01; SLC22A9; ENSG00000149742; TAA
QEDPRVEVT

SEQ ID NO: 77513 - protein, 11 aa, Homo sapiens
  misc_feature: Table A; Target 77513; HLA-A*30:01; SLC22A9; ENSG00000149742; TAA
QEDPRVEVTQF

SEQ ID NO: 77514 - protein, 11 aa, Homo sapiens
  misc_feature: Table A; Target 77514; HLA-B*18:01; SLC22A9; ENSG00000149742; TAA
QEDPRVEVTQF

SEQ ID NO: 77515 - protein, 11 aa, Homo sapiens
  misc_feature: Table A; Target 77515; HLA-B*37:01; SLC22A9; ENSG00000149742; TAA
QEDPRVEVTQF

SEQ ID NO: 77516 - protein, 11 aa, Homo sapiens
  misc_feature: Table A; Target 77516; HLA-B*38:01; SLC22A9; ENSG00000149742; TAA
QEDPRVEVTQF

SEQ ID NO: 77517 - protein, 11 aa, Homo sapiens
  misc_feature: Table A; Target 77517; HLA-B*39:01; SLC22A9; ENSG00000149742; TAA
QEDPRVEVTQF

SEQ ID NO: 77518 - protein, 11 aa, Homo sapiens
  misc_feature: Table A; Target 77518; HLA-B*40:01; SLC22A9; ENSG00000149742; TAA
QEDPRVEVTQF

SEQ ID NO: 77519 - protein, 11 aa, Homo sapiens
  misc_feature: Table A; Target 77519; HLA-B*44:02; SLC22A9; ENSG00000149742; TAA
QEDPRVEVTQF

SEQ ID NO: 77520 - protein, 11 aa, Homo sapiens
  misc_feature: Table A; Target 77520; HLA-B*44:03; SLC22A9; ENSG00000149742; TAA
QEDPRVEVTQF

SEQ ID NO: 77521 - protein, 11 aa, Homo sapiens
  misc_feature: Table A; Target 77521; HLA-C*16:04; SLC22A9; ENSG00000149742; TAA
QEDPRVEVTQF

SEQ ID NO: 77522 - protein, 9 aa, Homo sapiens
  misc_feature: Table A; Target 77522; HLA-B*49:01; SLC22A9; ENSG00000149742; TAA
QEMQTLREV

SEQ ID NO: 77523 - protein, 10 aa, Homo sapiens
  misc_feature: Table A; Target 77523; HLA-A*30:01; SLC22A9; ENSG00000149742; TAA
QEMQTLREVL

SEQ ID NO: 77524 - protein, 10 aa, Homo sapiens
  misc_feature: Table A; Target 77524; HLA-B*40:01; SLC22A9; ENSG00000149742; TAA
QEMQTLREVL

SEQ ID NO: 77525 - protein, 10 aa, Homo sapiens
  misc_feature: Table A; Target 77525; HLA-B*40:02; SLC22A9; ENSG00000149742; TAA
QEMQTLREVL

SEQ ID NO: 77526 - protein, 10 aa, Homo sapiens
  misc_feature: Table A; Target 77526; HLA-B*44:02; SLC22A9; ENSG00000149742; TAA
QEMQTLREVL

SEQ ID NO: 77527 - protein, 10 aa, Homo sapiens
  misc_feature: Table A; Target 77527; HLA-B*44:03; SLC22A9; ENSG00000149742; TAA
QEMQTLREVL

SEQ ID NO: 77528 - protein, 10 aa, Homo sapiens
  misc_feature: Table A; Target 77528; HLA-B*49:01; SLC22A9; ENSG00000149742; TAA
QEMQTLREVL

SEQ ID NO: 77529 - protein, 9 aa, Homo sapiens
  misc_feature: Table A; Target 77529; HLA-B*38:01; SLC22A9; ENSG00000149742; TAA
QHLGNNVFL

SEQ ID NO: 77530 - protein, 9 aa, Homo sapiens
  misc_feature: Table A; Target 77530; HLA-B*39:01; SLC22A9; ENSG00000149742; TAA
QHLGNNVFL

SEQ ID NO: 77531 - protein, 9 aa, Homo sapiens
  misc_feature: Table A; Target 77531; HLA-A*23:01; SLC22A9; ENSG00000149742; TAA
QLVVSVPYF

SEQ ID NO: 77532 - protein, 9 aa, Homo sapiens
  misc_feature: Table A; Target 77532; HLA-A*25:01; SLC22A9; ENSG00000149742; TAA
QLVVSVPYF

SEQ ID NO: 77533 - protein, 9 aa, Homo sapiens
  misc_feature: Table A; Target 77533; HLA-A*26:01; SLC22A9; ENSG00000149742; TAA
QLVVSVPYF

SEQ ID NO: 77534 - protein, 8 aa, Homo sapiens
  misc_feature: Table A; Target 77534; HLA-A*03:02; SLC22A9; ENSG00000149742; TAA
QSLTSVAK

SEQ ID NO: 77535 - protein, 8 aa, Homo sapiens
  misc_feature: Table A; Target 77535; HLA-A*11:01; SLC22A9; ENSG00000149742; TAA
QSLTSVAK

SEQ ID NO: 77536 - protein, 9 aa, Homo sapiens
  misc_feature: Table A; Target 77536; HLA-A*23:01; SLC22A9; ENSG00000149742; TAA
QSLTSVAKF

SEQ ID NO: 77537 - protein, 9 aa, Homo sapiens
  misc_feature: Table A; Target 77537; HLA-A*24:02; SLC22A9; ENSG00000149742; TAA
QSLTSVAKF

SEQ ID NO: 77538 - protein, 9 aa, Homo sapiens
  misc_feature: Table A; Target 77538; HLA-A*25:01; SLC22A9; ENSG00000149742; TAA
QSLTSVAKF

SEQ ID NO: 77539 - protein, 9 aa, Homo sapiens
  misc_feature: Table A; Target 77539; HLA-A*26:01; SLC22A9; ENSG00000149742; TAA
QSLTSVAKF

SEQ ID NO: 77540 - protein, 9 aa, Homo sapiens
  misc_feature: Table A; Target 77540; HLA-A*30:02; SLC22A9; ENSG00000149742; TAA
QSLTSVAKF

SEQ ID NO: 77541 - protein, 9 aa, Homo sapiens
  misc_feature: Table A; Target 77541; HLA-A*32:01; SLC22A9; ENSG00000149742; TAA
QSLTSVAKF

SEQ ID NO: 77542 - protein, 9 aa, Homo sapiens
  misc_feature: Table A; Target 77542; HLA-A*33:01; SLC22A9; ENSG00000149742; TAA
QSLTSVAKF

SEQ ID NO: 77543 - protein, 9 aa, Homo sapiens
  misc_feature: Table A; Target 77543; HLA-A*33:03; SLC22A9; ENSG00000149742; TAA
QSLTSVAKF

SEQ ID NO: 77544 - protein, 9 aa, Homo sapiens
  misc_feature: Table A; Target 77544; HLA-B*37:01; SLC22A9; ENSG00000149742; TAA
QSLTSVAKF

SEQ ID NO: 77545 - protein, 9 aa, Homo sapiens
  misc_feature: Table A; Target 77545; HLA-B*44:02; SLC22A9; ENSG00000149742; TAA
QSLTSVAKF

SEQ ID NO: 77546 - protein, 9 aa, Homo sapiens
  misc_feature: Table A; Target 77546; HLA-B*44:03; SLC22A9; ENSG00000149742; TAA
QSLTSVAKF

SEQ ID NO: 77547 - protein, 9 aa, Homo sapiens
  misc_feature: Table A; Target 77547; HLA-B*57:01; SLC22A9; ENSG00000149742; TAA
QSLTSVAKF

SEQ ID NO: 77548 - protein, 9 aa, Homo sapiens
  misc_feature: Table A; Target 77548; HLA-B*58:01; SLC22A9; ENSG00000149742; TAA
QSLTSVAKF

SEQ ID NO: 77549 - protein, 9 aa, Homo sapiens
  misc_feature: Table A; Target 77549; HLA-C*16:04; SLC22A9; ENSG00000149742; TAA
QSLTSVAKF

SEQ ID NO: 77550 - protein, 11 aa, Homo sapiens
  misc_feature: Table A; Target 77550; HLA-B*57:01; SLC22A9; ENSG00000149742; TAA
QSLTSVAKFVF

SEQ ID NO: 77551 - protein, 10 aa, Homo sapiens
  misc_feature: Table A; Target 77551; HLA-B*57:01; SLC22A9; ENSG00000149742; TAA
QTLREVLATL

SEQ ID NO: 77552 - protein, 10 aa, Homo sapiens
  misc_feature: Table A; Target 77552; HLA-A*68:02; SLC22A9; ENSG00000149742; TAA
QTVFLSIFAV

SEQ ID NO: 77553 - protein, 9 aa, Homo sapiens
  misc_feature: Table A; Target 77553; HLA-B*13:02; SLC22A9; ENSG00000149742; TAA
QVAIVGTCA

SEQ ID NO: 77554 - protein, 9 aa, Homo sapiens
  misc_feature: Table A; Target 77554; HLA-B*15:03; SLC22A9; ENSG00000149742; TAA
QVAIVGTCA

SEQ ID NO: 77555 - protein, 9 aa, Homo sapiens
  misc_feature: Table A; Target 77555; HLA-B*54:01; SLC22A9; ENSG00000149742; TAA
QVAIVGTCA

SEQ ID NO: 77556 - protein, 9 aa, Homo sapiens
  misc_feature: Table A; Target 77556; HLA-B*56:01; SLC22A9; ENSG00000149742; TAA
QVAIVGTCA

SEQ ID NO: 77557 - protein, 9 aa, Homo sapiens
  misc_feature: Table A; Target 77557; HLA-A*23:01; SLC22A9; ENSG00000149742; TAA
RAMGINATF

SEQ ID NO: 77558 - protein, 9 aa, Homo sapiens
  misc_feature: Table A; Target 77558; HLA-A*24:02; SLC22A9; ENSG00000149742; TAA
RAMGINATF

SEQ ID NO: 77559 - protein, 9 aa, Homo sapiens
  misc_feature: Table A; Target 77559; HLA-A*25:01; SLC22A9; ENSG00000149742; TAA
RAMGINATF

SEQ ID NO: 77560 - protein, 9 aa, Homo sapiens
  misc_feature: Table A; Target 77560; HLA-A*26:01; SLC22A9; ENSG00000149742; TAA
RAMGINATF

SEQ ID NO: 77561 - protein, 9 aa, Homo sapiens
  misc_feature: Table A; Target 77561; HLA-A*29:02; SLC22A9; ENSG00000149742; TAA
RAMGINATF

SEQ ID NO: 77562 - protein, 9 aa, Homo sapiens
  misc_feature: Table A; Target 77562; HLA-A*30:02; SLC22A9; ENSG00000149742; TAA
RAMGINATF

SEQ ID NO: 77563 - protein, 9 aa, Homo sapiens
  misc_feature: Table A; Target 77563; HLA-A*31:01; SLC22A9; ENSG00000149742; TAA
RAMGINATF

SEQ ID NO: 77564 - protein, 9 aa, Homo sapiens
  misc_feature: Table A; Target 77564; HLA-A*32:01; SLC22A9; ENSG00000149742; TAA
RAMGINATF

SEQ ID NO: 77565 - protein, 9 aa, Homo sapiens
  misc_feature: Table A; Target 77565; HLA-B*07:02; SLC22A9; ENSG00000149742; TAA
RAMGINATF

SEQ ID NO: 77566 - protein, 9 aa, Homo sapiens
  misc_feature: Table A; Target 77566; HLA-B*08:01; SLC22A9; ENSG00000149742; TAA
RAMGINATF

SEQ ID NO: 77567 - protein, 9 aa, Homo sapiens
  misc_feature: Table A; Target 77567; HLA-B*15:01; SLC22A9; ENSG00000149742; TAA
RAMGINATF

SEQ ID NO: 77568 - protein, 9 aa, Homo sapiens
  misc_feature: Table A; Target 77568; HLA-B*15:03; SLC22A9; ENSG00000149742; TAA
RAMGINATF

SEQ ID NO: 77569 - protein, 9 aa, Homo sapiens
  misc_feature: Table A; Target 77569; HLA-B*27:02; SLC22A9; ENSG00000149742; TAA
RAMGINATF

SEQ ID NO: 77570 - protein, 9 aa, Homo sapiens
  misc_feature: Table A; Target 77570; HLA-B*27:05; SLC22A9; ENSG00000149742; TAA
RAMGINATF

SEQ ID NO: 77571 - protein, 9 aa, Homo sapiens
  misc_feature: Table A; Target 77571; HLA-B*35:01; SLC22A9; ENSG00000149742; TAA
RAMGINATF

SEQ ID NO: 77572 - protein, 9 aa, Homo sapiens
  misc_feature: Table A; Target 77572; HLA-B*35:03; SLC22A9; ENSG00000149742; TAA
RAMGINATF

SEQ ID NO: 77573 - protein, 9 aa, Homo sapiens
  misc_feature: Table A; Target 77573; HLA-B*38:01; SLC22A9; ENSG00000149742; TAA
RAMGINATF

SEQ ID NO: 77574 - protein, 9 aa, Homo sapiens
  misc_feature: Table A; Target 77574; HLA-B*44:02; SLC22A9; ENSG00000149742; TAA
RAMGINATF

SEQ ID NO: 77575 - protein, 9 aa, Homo sapiens
  misc_feature: Table A; Target 77575; HLA-B*44:03; SLC22A9; ENSG00000149742; TAA
RAMGINATF

SEQ ID NO: 77576 - protein, 9 aa, Homo sapiens
  misc_feature: Table A; Target 77576; HLA-B*46:01; SLC22A9; ENSG00000149742; TAA
RAMGINATF

SEQ ID NO: 77577 - protein, 9 aa, Homo sapiens
  misc_feature: Table A; Target 77577; HLA-B*55:01; SLC22A9; ENSG00000149742; TAA
RAMGINATF

SEQ ID NO: 77578 - protein, 9 aa, Homo sapiens
  misc_feature: Table A; Target 77578; HLA-B*57:01; SLC22A9; ENSG00000149742; TAA
RAMGINATF

SEQ ID NO: 77579 - protein, 9 aa, Homo sapiens
  misc_feature: Table A; Target 77579; HLA-B*58:01; SLC22A9; ENSG00000149742; TAA
RAMGINATF

SEQ ID NO: 77580 - protein, 9 aa, Homo sapiens
  misc_feature: Table A; Target 77580; HLA-C*02:02; SLC22A9; ENSG00000149742; TAA
RAMGINATF

SEQ ID NO: 77581 - protein, 9 aa, Homo sapiens
  misc_feature: Table A; Target 77581; HLA-C*03:03; SLC22A9; ENSG00000149742; TAA
RAMGINATF

SEQ ID NO: 77582 - protein, 9 aa, Homo sapiens
  misc_feature: Table A; Target 77582; HLA-C*03:04; SLC22A9; ENSG00000149742; TAA
RAMGINATF

SEQ ID NO: 77583 - protein, 9 aa, Homo sapiens
  misc_feature: Table A; Target 77583; HLA-C*05:01; SLC22A9; ENSG00000149742; TAA
RAMGINATF

SEQ ID NO: 77584 - protein, 9 aa, Homo sapiens
  misc_feature: Table A; Target 77584; HLA-C*07:02; SLC22A9; ENSG00000149742; TAA
RAMGINATF

SEQ ID NO: 77585 - protein, 9 aa, Homo sapiens
  misc_feature: Table A; Target 77585; HLA-C*07:04; SLC22A9; ENSG00000149742; TAA
RAMGINATF

SEQ ID NO: 77586 - protein, 9 aa, Homo sapiens
  misc_feature: Table A; Target 77586; HLA-C*07:06; SLC22A9; ENSG00000149742; TAA
RAMGINATF

SEQ ID NO: 77587 - protein, 9 aa, Homo sapiens
  misc_feature: Table A; Target 77587; HLA-C*12:03; SLC22A9; ENSG00000149742; TAA
RAMGINATF

SEQ ID NO: 77588 - protein, 9 aa, Homo sapiens
  misc_feature: Table A; Target 77588; HLA-C*16:01; SLC22A9; ENSG00000149742; TAA
RAMGINATF

SEQ ID NO: 77589 - protein, 9 aa, Homo sapiens
  misc_feature: Table A; Target 77589; HLA-C*16:02; SLC22A9; ENSG00000149742; TAA
RAMGINATF

SEQ ID NO: 77590 - protein, 9 aa, Homo sapiens
  misc_feature: Table A; Target 77590; HLA-C*16:04; SLC22A9; ENSG00000149742; TAA
RAMGINATF

SEQ ID NO: 77591 - protein, 11 aa, Homo sapiens
  misc_feature: Table A; Target 77591; HLA-B*57:01; SLC22A9; ENSG00000149742; TAA
RARAMGINATF

SEQ ID NO: 77592 - protein, 8 aa, Homo sapiens
  misc_feature: Table A; Target 77592; HLA-B*37:01; SLC22A9; ENSG00000149742; TAA
RDTLTLEI

SEQ ID NO: 77593 - protein, 10 aa, Homo sapiens
  misc_feature: Table A; Target 77593; HLA-B*27:02; SLC22A9; ENSG00000149742; TAA
RDTLTLEILK

SEQ ID NO: 77594 - protein, 9 aa, Homo sapiens
  misc_feature: Table A; Target 77594; HLA-A*30:01; SLC22A9; ENSG00000149742; TAA
REVLATLGL

SEQ ID NO: 77595 - protein, 9 aa, Homo sapiens
  misc_feature: Table A; Target 77595; HLA-B*37:01; SLC22A9; ENSG00000149742; TAA
REVLATLGL

SEQ ID NO: 77596 - protein, 9 aa, Homo sapiens
  misc_feature: Table A; Target 77596; HLA-B*40:01; SLC22A9; ENSG00000149742; TAA
REVLATLGL

SEQ ID NO: 77597 - protein, 9 aa, Homo sapiens
  misc_feature: Table A; Target 77597; HLA-B*40:02; SLC22A9; ENSG00000149742; TAA
REVLATLGL

SEQ ID NO: 77598 - protein, 9 aa, Homo sapiens
  misc_feature: Table A; Target 77598; HLA-B*44:02; SLC22A9; ENSG00000149742; TAA
REVLATLGL

SEQ ID NO: 77599 - protein, 9 aa, Homo sapiens
  misc_feature: Table A; Target 77599; HLA-B*44:03; SLC22A9; ENSG00000149742; TAA
REVLATLGL

SEQ ID NO: 77600 - protein, 9 aa, Homo sapiens
  misc_feature: Table A; Target 77600; HLA-B*49:01; SLC22A9; ENSG00000149742; TAA
REVLATLGL

SEQ ID NO: 77601 - protein, 9 aa, Homo sapiens
  misc_feature: Table A; Target 77601; HLA-A*24:02; SLC22A9; ENSG00000149742; TAA
RFANFMAYF

SEQ ID NO: 77602 - protein, 9 aa, Homo sapiens
  misc_feature: Table A; Target 77602; HLA-A*23:01; SLC22A9; ENSG00000149742; TAA
RFLSGIAAM

SEQ ID NO: 77603 - protein, 9 aa, Homo sapiens
  misc_feature: Table A; Target 77603; HLA-A*24:02; SLC22A9; ENSG00000149742; TAA
RFLSGIAAM

SEQ ID NO: 77604 - protein, 9 aa, Homo sapiens
  misc_feature: Table A; Target 77604; HLA-B*46:01; SLC22A9; ENSG00000149742; TAA
RFLSGIAAM

SEQ ID NO: 77605 - protein, 9 aa, Homo sapiens
  misc_feature: Table A; Target 77605; HLA-C*01:02; SLC22A9; ENSG00000149742; TAA
RFLSGIAAM

SEQ ID NO: 77606 - protein, 9 aa, Homo sapiens
  misc_feature: Table A; Target 77606; HLA-C*14:02; SLC22A9; ENSG00000149742; TAA
RFLSGIAAM

SEQ ID NO: 77607 - protein, 11 aa, Homo sapiens
  misc_feature: Table A; Target 77607; HLA-A*23:01; SLC22A9; ENSG00000149742; TAA
RFLSGIAAMSL

SEQ ID NO: 77608 - protein, 11 aa, Homo sapiens
  misc_feature: Table A; Target 77608; HLA-A*24:02; SLC22A9; ENSG00000149742; TAA
RFLSGIAAMSL

SEQ ID NO: 77609 - protein, 9 aa, Homo sapiens
  misc_feature: Table A; Target 77609; HLA-A*23:01; SLC22A9; ENSG00000149742; TAA
RFQAMGITL

SEQ ID NO: 77610 - protein, 9 aa, Homo sapiens
  misc_feature: Table A; Target 77610; HLA-A*24:02; SLC22A9; ENSG00000149742; TAA
RFQAMGITL

SEQ ID NO: 77611 - protein, 9 aa, Homo sapiens
  misc_feature: Table A; Target 77611; HLA-C*14:02; SLC22A9; ENSG00000149742; TAA
RFQAMGITL

SEQ ID NO: 77612 - protein, 9 aa, Homo sapiens
  misc_feature: Table A; Target 77612; HLA-A*23:01; SLC22A9; ENSG00000149742; TAA
RFQILQTVF

SEQ ID NO: 77613 - protein, 9 aa, Homo sapiens
  misc_feature: Table A; Target 77613; HLA-A*24:02; SLC22A9; ENSG00000149742; TAA
RFQILQTVF

SEQ ID NO: 77614 - protein, 9 aa, Homo sapiens
  misc_feature: Table A; Target 77614; HLA-A*24:02; SLC22A9; ENSG00000149742; TAA
RNKPLFDTI

SEQ ID NO: 77615 - protein, 8 aa, Homo sapiens
  misc_feature: Table A; Target 77615; HLA-B*57:01; SLC22A9; ENSG00000149742; TAA
RRFVHPQW

SEQ ID NO: 77616 - protein, 9 aa, Homo sapiens
  misc_feature: Table A; Target 77616; HLA-A*11:01; SLC22A9; ENSG00000149742; TAA
SALANTLAF

SEQ ID NO: 77617 - protein, 9 aa, Homo sapiens
  misc_feature: Table A; Target 77617; HLA-A*23:01; SLC22A9; ENSG00000149742; TAA
SALANTLAF

SEQ ID NO: 77618 - protein, 9 aa, Homo sapiens
  misc_feature: Table A; Target 77618; HLA-A*24:02; SLC22A9; ENSG00000149742; TAA
SALANTLAF

SEQ ID NO: 77619 - protein, 9 aa, Homo sapiens
  misc_feature: Table A; Target 77619; HLA-A*25:01; SLC22A9; ENSG00000149742; TAA
SALANTLAF

SEQ ID NO: 77620 - protein, 9 aa, Homo sapiens
  misc_feature: Table A; Target 77620; HLA-A*26:01; SLC22A9; ENSG00000149742; TAA
SALANTLAF

SEQ ID NO: 77621 - protein, 9 aa, Homo sapiens
  misc_feature: Table A; Target 77621; HLA-A*29:02; SLC22A9; ENSG00000149742; TAA
SALANTLAF

SEQ ID NO: 77622 - protein, 9 aa, Homo sapiens
  misc_feature: Table A; Target 77622; HLA-A*30:02; SLC22A9; ENSG00000149742; TAA
SALANTLAF

SEQ ID NO: 77623 - protein, 9 aa, Homo sapiens
  misc_feature: Table A; Target 77623; HLA-A*32:01; SLC22A9; ENSG00000149742; TAA
SALANTLAF

SEQ ID NO: 77624 - protein, 9 aa, Homo sapiens
  misc_feature: Table A; Target 77624; HLA-A*33:01; SLC22A9; ENSG00000149742; TAA
SALANTLAF

SEQ ID NO: 77625 - protein, 9 aa, Homo sapiens
  misc_feature: Table A; Target 77625; HLA-A*33:03; SLC22A9; ENSG00000149742; TAA
SALANTLAF

SEQ ID NO: 77626 - protein, 9 aa, Homo sapiens
  misc_feature: Table A; Target 77626; HLA-B*07:02; SLC22A9; ENSG00000149742; TAA
SALANTLAF

SEQ ID NO: 77627 - protein, 9 aa, Homo sapiens
  misc_feature: Table A; Target 77627; HLA-B*08:01; SLC22A9; ENSG00000149742; TAA
SALANTLAF

SEQ ID NO: 77628 - protein, 9 aa, Homo sapiens
  misc_feature: Table A; Target 77628; HLA-B*15:01; SLC22A9; ENSG00000149742; TAA
SALANTLAF

SEQ ID NO: 77629 - protein, 9 aa, Homo sapiens
  misc_feature: Table A; Target 77629; HLA-B*15:03; SLC22A9; ENSG00000149742; TAA
SALANTLAF

SEQ ID NO: 77630 - protein, 9 aa, Homo sapiens
  misc_feature: Table A; Target 77630; HLA-B*18:01; SLC22A9; ENSG00000149742; TAA
SALANTLAF

SEQ ID NO: 77631 - protein, 9 aa, Homo sapiens
  misc_feature: Table A; Target 77631; HLA-B*27:02; SLC22A9; ENSG00000149742; TAA
SALANTLAF

SEQ ID NO: 77632 - protein, 9 aa, Homo sapiens
  misc_feature: Table A; Target 77632; HLA-B*35:01; SLC22A9; ENSG00000149742; TAA
SALANTLAF

SEQ ID NO: 77633 - protein, 9 aa, Homo sapiens
  misc_feature: Table A; Target 77633; HLA-B*35:03; SLC22A9; ENSG00000149742; TAA
SALANTLAF

SEQ ID NO: 77634 - protein, 9 aa, Homo sapiens
  misc_feature: Table A; Target 77634; HLA-B*37:01; SLC22A9; ENSG00000149742; TAA
SALANTLAF

SEQ ID NO: 77635 - protein, 9 aa, Homo sapiens
  misc_feature: Table A; Target 77635; HLA-B*38:01; SLC22A9; ENSG00000149742; TAA
SALANTLAF

SEQ ID NO: 77636 - protein, 9 aa, Homo sapiens
  misc_feature: Table A; Target 77636; HLA-B*39:01; SLC22A9; ENSG00000149742; TAA
SALANTLAF

SEQ ID NO: 77637 - protein, 9 aa, Homo sapiens
  misc_feature: Table A; Target 77637; HLA-B*44:03; SLC22A9; ENSG00000149742; TAA
SALANTLAF

SEQ ID NO: 77638 - protein, 9 aa, Homo sapiens
  misc_feature: Table A; Target 77638; HLA-B*46:01; SLC22A9; ENSG00000149742; TAA
SALANTLAF

SEQ ID NO: 77639 - protein, 9 aa, Homo sapiens
  misc_feature: Table A; Target 77639; HLA-B*54:01; SLC22A9; ENSG00000149742; TAA
SALANTLAF

SEQ ID NO: 77640 - protein, 9 aa, Homo sapiens
  misc_feature: Table A; Target 77640; HLA-B*55:01; SLC22A9; ENSG00000149742; TAA
SALANTLAF

SEQ ID NO: 77641 - protein, 9 aa, Homo sapiens
  misc_feature: Table A; Target 77641; HLA-B*56:01; SLC22A9; ENSG00000149742; TAA
SALANTLAF

SEQ ID NO: 77642 - protein, 9 aa, Homo sapiens
  misc_feature: Table A; Target 77642; HLA-B*57:01; SLC22A9; ENSG00000149742; TAA
SALANTLAF

SEQ ID NO: 77643 - protein, 9 aa, Homo sapiens
  misc_feature: Table A; Target 77643; HLA-B*58:01; SLC22A9; ENSG00000149742; TAA
SALANTLAF

SEQ ID NO: 77644 - protein, 9 aa, Homo sapiens
  misc_feature: Table A; Target 77644; HLA-C*01:02; SLC22A9; ENSG00000149742; TAA
SALANTLAF

SEQ ID NO: 77645 - protein, 9 aa, Homo sapiens
  misc_feature: Table A; Target 77645; HLA-C*02:02; SLC22A9; ENSG00000149742; TAA
SALANTLAF

SEQ ID NO: 77646 - protein, 9 aa, Homo sapiens
  misc_feature: Table A; Target 77646; HLA-C*03:03; SLC22A9; ENSG00000149742; TAA
SALANTLAF

SEQ ID NO: 77647 - protein, 9 aa, Homo sapiens
  misc_feature: Table A; Target 77647; HLA-C*03:04; SLC22A9; ENSG00000149742; TAA
SALANTLAF

SEQ ID NO: 77648 - protein, 9 aa, Homo sapiens
  misc_feature: Table A; Target 77648; HLA-C*05:01; SLC22A9; ENSG00000149742; TAA
SALANTLAF

SEQ ID NO: 77649 - protein, 9 aa, Homo sapiens
  misc_feature: Table A; Target 77649; HLA-C*07:02; SLC22A9; ENSG00000149742; TAA
SALANTLAF

SEQ ID NO: 77650 - protein, 9 aa, Homo sapiens
  misc_feature: Table A; Target 77650; HLA-C*07:04; SLC22A9; ENSG00000149742; TAA
SALANTLAF

SEQ ID NO: 77651 - protein, 9 aa, Homo sapiens
  misc_feature: Table A; Target 77651; HLA-C*07:06; SLC22A9; ENSG00000149742; TAA
SALANTLAF

SEQ ID NO: 77652 - protein, 9 aa, Homo sapiens
  misc_feature: Table A; Target 77652; HLA-C*12:03; SLC22A9; ENSG00000149742; TAA
SALANTLAF

SEQ ID NO: 77653 - protein, 9 aa, Homo sapiens
  misc_feature: Table A; Target 77653; HLA-C*14:02; SLC22A9; ENSG00000149742; TAA
SALANTLAF

SEQ ID NO: 77654 - protein, 9 aa, Homo sapiens
  misc_feature: Table A; Target 77654; HLA-C*16:01; SLC22A9; ENSG00000149742; TAA
SALANTLAF

SEQ ID NO: 77655 - protein, 9 aa, Homo sapiens
  misc_feature: Table A; Target 77655; HLA-C*16:02; SLC22A9; ENSG00000149742; TAA
SALANTLAF

SEQ ID NO: 77656 - protein, 9 aa, Homo sapiens
  misc_feature: Table A; Target 77656; HLA-C*16:04; SLC22A9; ENSG00000149742; TAA
SALANTLAF

SEQ ID NO: 77657 - protein, 10 aa, Homo sapiens
  misc_feature: Table A; Target 77657; HLA-B*56:01; SLC22A9; ENSG00000149742; TAA
SALANTLAFA

SEQ ID NO: 77658 - protein, 10 aa, Homo sapiens
  misc_feature: Table A; Target 77658; HLA-A*23:01; SLC22A9; ENSG00000149742; TAA
SFSSTIVTEW

SEQ ID NO: 77659 - protein, 10 aa, Homo sapiens
  misc_feature: Table A; Target 77659; HLA-A*24:02; SLC22A9; ENSG00000149742; TAA
SFSSTIVTEW

SEQ ID NO: 77660 - protein, 10 aa, Homo sapiens
  misc_feature: Table A; Target 77660; HLA-B*44:02; SLC22A9; ENSG00000149742; TAA
SFSSTIVTEW

SEQ ID NO: 77661 - protein, 8 aa, Homo sapiens
  misc_feature: Table A; Target 77661; HLA-A*24:02; SLC22A9; ENSG00000149742; TAA
SFTRFANF

SEQ ID NO: 77662 - protein, 8 aa, Homo sapiens
  misc_feature: Table A; Target 77662; HLA-C*03:03; SLC22A9; ENSG00000149742; TAA
SGIAAMSL

SEQ ID NO: 77663 - protein, 8 aa, Homo sapiens
  misc_feature: Table A; Target 77663; HLA-C*03:04; SLC22A9; ENSG00000149742; TAA
SGIAAMSL

SEQ ID NO: 77664 - protein, 8 aa, Homo sapiens
  misc_feature: Table A; Target 77664; HLA-C*14:02; SLC22A9; ENSG00000149742; TAA
SGIAAMSL

SEQ ID NO: 77665 - protein, 9 aa, Homo sapiens
  misc_feature: Table A; Target 77665; HLA-B*13:02; SLC22A9; ENSG00000149742; TAA
SGIAAMSLI

SEQ ID NO: 77666 - protein, 9 aa, Homo sapiens
  misc_feature: Table A; Target 77666; HLA-B*49:01; SLC22A9; ENSG00000149742; TAA
SGIAAMSLI

SEQ ID NO: 77667 - protein, 10 aa, Homo sapiens
  misc_feature: Table A; Target 77667; HLA-B*07:02; SLC22A9; ENSG00000149742; TAA
SGMKNARDTL

SEQ ID NO: 77668 - protein, 8 aa, Homo sapiens
  misc_feature: Table A; Target 77668; HLA-A*25:01; SLC22A9; ENSG00000149742; TAA
SIFAVATY

SEQ ID NO: 77669 - protein, 8 aa, Homo sapiens
  misc_feature: Table A; Target 77669; HLA-A*26:01; SLC22A9; ENSG00000149742; TAA
SIFAVATY

SEQ ID NO: 77670 - protein, 8 aa, Homo sapiens
  misc_feature: Table A; Target 77670; HLA-A*30:02; SLC22A9; ENSG00000149742; TAA
SIFAVATY

SEQ ID NO: 77671 - protein, 8 aa, Homo sapiens
  misc_feature: Table A; Target 77671; HLA-A*32:01; SLC22A9; ENSG00000149742; TAA
SIFAVATY

SEQ ID NO: 77672 - protein, 8 aa, Homo sapiens
  misc_feature: Table A; Target 77672; HLA-B*15:01; SLC22A9; ENSG00000149742; TAA
SIFAVATY

SEQ ID NO: 77673 - protein, 8 aa, Homo sapiens
  misc_feature: Table A; Target 77673; HLA-B*15:03; SLC22A9; ENSG00000149742; TAA
SIFAVATY

SEQ ID NO: 77674 - protein, 8 aa, Homo sapiens
  misc_feature: Table A; Target 77674; HLA-B*18:01; SLC22A9; ENSG00000149742; TAA
SIFAVATY

SEQ ID NO: 77675 - protein, 8 aa, Homo sapiens
  misc_feature: Table A; Target 77675; HLA-B*46:01; SLC22A9; ENSG00000149742; TAA
SIFAVATY

SEQ ID NO: 77676 - protein, 8 aa, Homo sapiens
  misc_feature: Table A; Target 77676; HLA-C*02:02; SLC22A9; ENSG00000149742; TAA
SIFAVATY

SEQ ID NO: 77677 - protein, 8 aa, Homo sapiens
  misc_feature: Table A; Target 77677; HLA-C*14:02; SLC22A9; ENSG00000149742; TAA
SIFAVATY

SEQ ID NO: 77678 - protein, 9 aa, Homo sapiens
  misc_feature: Table A; Target 77678; HLA-A*02:01; SLC22A9; ENSG00000149742; TAA
SIFAVATYL

SEQ ID NO: 77679 - protein, 9 aa, Homo sapiens
  misc_feature: Table A; Target 77679; HLA-A*02:03; SLC22A9; ENSG00000149742; TAA
SIFAVATYL

SEQ ID NO: 77680 - protein, 9 aa, Homo sapiens
  misc_feature: Table A; Target 77680; HLA-A*02:04; SLC22A9; ENSG00000149742; TAA
SIFAVATYL

SEQ ID NO: 77681 - protein, 9 aa, Homo sapiens
  misc_feature: Table A; Target 77681; HLA-A*02:07; SLC22A9; ENSG00000149742; TAA
SIFAVATYL

SEQ ID NO: 77682 - protein, 9 aa, Homo sapiens
  misc_feature: Table A; Target 77682; HLA-A*03:01; SLC22A9; ENSG00000149742; TAA
SIFAVATYL

SEQ ID NO: 77683 - protein, 9 aa, Homo sapiens
  misc_feature: Table A; Target 77683; HLA-A*03:02; SLC22A9; ENSG00000149742; TAA
SIFAVATYL

SEQ ID NO: 77684 - protein, 9 aa, Homo sapiens
  misc_feature: Table A; Target 77684; HLA-A*26:01; SLC22A9; ENSG00000149742; TAA
SIFAVATYL

SEQ ID NO: 77685 - protein, 9 aa, Homo sapiens
  misc_feature: Table A; Target 77685; HLA-A*31:01; SLC22A9; ENSG00000149742; TAA
SIFAVATYL

SEQ ID NO: 77686 - protein, 9 aa, Homo sapiens
  misc_feature: Table A; Target 77686; HLA-A*68:02; SLC22A9; ENSG00000149742; TAA
SIFAVATYL

SEQ ID NO: 77687 - protein, 9 aa, Homo sapiens
  misc_feature: Table A; Target 77687; HLA-B*13:02; SLC22A9; ENSG00000149742; TAA
SIFAVATYL

SEQ ID NO: 77688 - protein, 9 aa, Homo sapiens
  misc_feature: Table A; Target 77688; HLA-B*27:05; SLC22A9; ENSG00000149742; TAA
SIFAVATYL

SEQ ID NO: 77689 - protein, 9 aa, Homo sapiens
  misc_feature: Table A; Target 77689; HLA-B*39:01; SLC22A9; ENSG00000149742; TAA
SIFAVATYL

SEQ ID NO: 77690 - protein, 9 aa, Homo sapiens
  misc_feature: Table A; Target 77690; HLA-C*01:02; SLC22A9; ENSG00000149742; TAA
SIFAVATYL

SEQ ID NO: 77691 - protein, 9 aa, Homo sapiens
  misc_feature: Table A; Target 77691; HLA-C*02:02; SLC22A9; ENSG00000149742; TAA
SIFAVATYL

SEQ ID NO: 77692 - protein, 9 aa, Homo sapiens
  misc_feature: Table A; Target 77692; HLA-C*07:04; SLC22A9; ENSG00000149742; TAA
SIFAVATYL

SEQ ID NO: 77693 - protein, 9 aa, Homo sapiens
  misc_feature: Table A; Target 77693; HLA-C*12:03; SLC22A9; ENSG00000149742; TAA
SIFAVATYL

SEQ ID NO: 77694 - protein, 8 aa, Homo sapiens
  misc_feature: Table A; Target 77694; HLA-C*01:02; SLC22A9; ENSG00000149742; TAA
SIPLDSNM

SEQ ID NO: 77695 - protein, 8 aa, Homo sapiens
  misc_feature: Table A; Target 77695; HLA-C*05:01; SLC22A9; ENSG00000149742; TAA
SIPLDSNM

SEQ ID NO: 77696 - protein, 9 aa, Homo sapiens
  misc_feature: Table A; Target 77696; HLA-A*02:01; SLC22A9; ENSG00000149742; TAA
SLITNTIML

SEQ ID NO: 77697 - protein, 9 aa, Homo sapiens
  misc_feature: Table A; Target 77697; HLA-A*02:03; SLC22A9; ENSG00000149742; TAA
SLITNTIML

SEQ ID NO: 77698 - protein, 9 aa, Homo sapiens
  misc_feature: Table A; Target 77698; HLA-A*02:04; SLC22A9; ENSG00000149742; TAA
SLITNTIML

SEQ ID NO: 77699 - protein, 9 aa, Homo sapiens
  misc_feature: Table A; Target 77699; HLA-A*02:07; SLC22A9; ENSG00000149742; TAA
SLITNTIML

SEQ ID NO: 77700 - protein, 9 aa, Homo sapiens
  misc_feature: Table A; Target 77700; HLA-A*23:01; SLC22A9; ENSG00000149742; TAA
SLITNTIML

SEQ ID NO: 77701 - protein, 9 aa, Homo sapiens
  misc_feature: Table A; Target 77701; HLA-B*46:01; SLC22A9; ENSG00000149742; TAA
SLITNTIML

SEQ ID NO: 77702 - protein, 9 aa, Homo sapiens
  misc_feature: Table A; Target 77702; HLA-B*55:01; SLC22A9; ENSG00000149742; TAA
SLITNTIML

SEQ ID NO: 77703 - protein, 9 aa, Homo sapiens
  misc_feature: Table A; Target 77703; HLA-C*01:02; SLC22A9; ENSG00000149742; TAA
SLITNTIML

SEQ ID NO: 77704 - protein, 10 aa, Homo sapiens
  misc_feature: Table A; Target 77704; HLA-A*02:01; SLC22A9; ENSG00000149742; TAA
SLITNTIMLI

SEQ ID NO: 77705 - protein, 10 aa, Homo sapiens
  misc_feature: Table A; Target 77705; HLA-A*02:03; SLC22A9; ENSG00000149742; TAA
SLITNTIMLI

SEQ ID NO: 77706 - protein, 9 aa, Homo sapiens
  misc_feature: Table A; Target 77706; HLA-A*02:01; SLC22A9; ENSG00000149742; TAA
SLLSFTRFA

SEQ ID NO: 77707 - protein, 9 aa, Homo sapiens
  misc_feature: Table A; Target 77707; HLA-A*02:03; SLC22A9; ENSG00000149742; TAA
SLLSFTRFA

SEQ ID NO: 77708 - protein, 10 aa, Homo sapiens
  misc_feature: Table A; Target 77708; HLA-A*02:03; SLC22A9; ENSG00000149742; TAA
SLRFLSGIAA

SEQ ID NO: 77709 - protein, 11 aa, Homo sapiens
  misc_feature: Table A; Target 77709; HLA-A*02:04; SLC22A9; ENSG00000149742; TAA
SLRFLSGIAAM

SEQ ID NO: 77710 - protein, 8 aa, Homo sapiens
  misc_feature: Table A; Target 77710; HLA-B*37:01; SLC22A9; ENSG00000149742; TAA
SLTSVAKF

SEQ ID NO: 77711 - protein, 9 aa, Homo sapiens
  misc_feature: Table A; Target 77711; HLA-A*02:01; SLC22A9; ENSG00000149742; TAA
SLTSVAKFV

SEQ ID NO: 77712 - protein, 9 aa, Homo sapiens
  misc_feature: Table A; Target 77712; HLA-A*02:03; SLC22A9; ENSG00000149742; TAA
SLTSVAKFV

SEQ ID NO: 77713 - protein, 9 aa, Homo sapiens
  misc_feature: Table A; Target 77713; HLA-A*02:04; SLC22A9; ENSG00000149742; TAA
SLTSVAKFV

SEQ ID NO: 77714 - protein, 9 aa, Homo sapiens
  misc_feature: Table A; Target 77714; HLA-A*68:02; SLC22A9; ENSG00000149742; TAA
SLTSVAKFV

SEQ ID NO: 77715 - protein, 9 aa, Homo sapiens
  misc_feature: Table A; Target 77715; HLA-B*13:02; SLC22A9; ENSG00000149742; TAA
SLTSVAKFV

SEQ ID NO: 77716 - protein, 9 aa, Homo sapiens
  misc_feature: Table A; Target 77716; HLA-B*55:01; SLC22A9; ENSG00000149742; TAA
SLTSVAKFV

SEQ ID NO: 77717 - protein, 9 aa, Homo sapiens
  misc_feature: Table A; Target 77717; HLA-C*06:02; SLC22A9; ENSG00000149742; TAA
SLTSVAKFV

SEQ ID NO: 77718 - protein, 9 aa, Homo sapiens
  misc_feature: Table A; Target 77718; HLA-C*16:02; SLC22A9; ENSG00000149742; TAA
SLTSVAKFV

SEQ ID NO: 77719 - protein, 10 aa, Homo sapiens
  misc_feature: Table A; Target 77719; HLA-A*23:01; SLC22A9; ENSG00000149742; TAA
SLTSVAKFVF

SEQ ID NO: 77720 - protein, 10 aa, Homo sapiens
  misc_feature: Table A; Target 77720; HLA-A*24:02; SLC22A9; ENSG00000149742; TAA
SLTSVAKFVF

SEQ ID NO: 77721 - protein, 9 aa, Homo sapiens
  misc_feature: Table A; Target 77721; HLA-B*35:01; SLC22A9; ENSG00000149742; TAA
SPPLPWIIY

SEQ ID NO: 77722 - protein, 8 aa, Homo sapiens
  misc_feature: Table A; Target 77722; HLA-B*13:02; SLC22A9; ENSG00000149742; TAA
SQDALLRI

SEQ ID NO: 77723 - protein, 8 aa, Homo sapiens
  misc_feature: Table A; Target 77723; HLA-B*38:01; SLC22A9; ENSG00000149742; TAA
SQDALLRI

SEQ ID NO: 77724 - protein, 10 aa, Homo sapiens
  misc_feature: Table A; Target 77724; HLA-B*13:02; SLC22A9; ENSG00000149742; TAA
SQDALLRISI

SEQ ID NO: 77725 - protein, 10 aa, Homo sapiens
  misc_feature: Table A; Target 77725; HLA-B*38:01; SLC22A9; ENSG00000149742; TAA
SQDALLRISI

SEQ ID NO: 77726 - protein, 9 aa, Homo sapiens
  misc_feature: Table A; Target 77726; HLA-A*03:02; SLC22A9; ENSG00000149742; TAA
SQSLTSVAK

SEQ ID NO: 77727 - protein, 9 aa, Homo sapiens
  misc_feature: Table A; Target 77727; HLA-A*11:01; SLC22A9; ENSG00000149742; TAA
SQSLTSVAK

SEQ ID NO: 77728 - protein, 9 aa, Homo sapiens
  misc_feature: Table A; Target 77728; HLA-B*13:02; SLC22A9; ENSG00000149742; TAA
SQSLTSVAK

SEQ ID NO: 77729 - protein, 9 aa, Homo sapiens
  misc_feature: Table A; Target 77729; HLA-B*27:05; SLC22A9; ENSG00000149742; TAA
SQSLTSVAK

SEQ ID NO: 77730 - protein, 9 aa, Homo sapiens
  misc_feature: Table A; Target 77730; HLA-C*07:06; SLC22A9; ENSG00000149742; TAA
SQSLTSVAK

SEQ ID NO: 77731 - protein, 10 aa, Homo sapiens
  misc_feature: Table A; Target 77731; HLA-B*15:01; SLC22A9; ENSG00000149742; TAA
SQSLTSVAKF

SEQ ID NO: 77732 - protein, 10 aa, Homo sapiens
  misc_feature: Table A; Target 77732; HLA-B*38:01; SLC22A9; ENSG00000149742; TAA
SQSLTSVAKF

SEQ ID NO: 77733 - protein, 8 aa, Homo sapiens
  misc_feature: Table A; Target 77733; HLA-A*32:01; SLC22A9; ENSG00000149742; TAA
SSTIVTEW

SEQ ID NO: 77734 - protein, 8 aa, Homo sapiens
  misc_feature: Table A; Target 77734; HLA-B*37:01; SLC22A9; ENSG00000149742; TAA
SSTIVTEW

SEQ ID NO: 77735 - protein, 8 aa, Homo sapiens
  misc_feature: Table A; Target 77735; HLA-B*57:01; SLC22A9; ENSG00000149742; TAA
SSTIVTEW

SEQ ID NO: 77736 - protein, 8 aa, Homo sapiens
  misc_feature: Table A; Target 77736; HLA-B*58:01; SLC22A9; ENSG00000149742; TAA
SSTIVTEW

SEQ ID NO: 77737 - protein, 8 aa, Homo sapiens
  misc_feature: Table A; Target 77737; HLA-C*16:01; SLC22A9; ENSG00000149742; TAA
SSTIVTEW

SEQ ID NO: 77738 - protein, 10 aa, Homo sapiens
  misc_feature: Table A; Target 77738; HLA-B*57:01; SLC22A9; ENSG00000149742; TAA
SSWLLESARW

SEQ ID NO: 77739 - protein, 9 aa, Homo sapiens
  misc_feature: Table A; Target 77739; HLA-A*02:01; SLC22A9; ENSG00000149742; TAA
SVAKFVFMA

SEQ ID NO: 77740 - protein, 9 aa, Homo sapiens
  misc_feature: Table A; Target 77740; HLA-A*02:04; SLC22A9; ENSG00000149742; TAA
SVAKFVFMA

SEQ ID NO: 77741 - protein, 9 aa, Homo sapiens
  misc_feature: Table A; Target 77741; HLA-A*68:02; SLC22A9; ENSG00000149742; TAA
SVAKFVFMA

SEQ ID NO: 77742 - protein, 9 aa, Homo sapiens
  misc_feature: Table A; Target 77742; HLA-B*13:02; SLC22A9; ENSG00000149742; TAA
SVAKFVFMA

SEQ ID NO: 77743 - protein, 9 aa, Homo sapiens
  misc_feature: Table A; Target 77743; HLA-B*54:01; SLC22A9; ENSG00000149742; TAA
SVAKFVFMA

SEQ ID NO: 77744 - protein, 9 aa, Homo sapiens
  misc_feature: Table A; Target 77744; HLA-A*02:04; SLC22A9; ENSG00000149742; TAA
SVPYFVIFL

SEQ ID NO: 77745 - protein, 9 aa, Homo sapiens
  misc_feature: Table A; Target 77745; HLA-A*02:07; SLC22A9; ENSG00000149742; TAA
SVPYFVIFL

SEQ ID NO: 77746 - protein, 9 aa, Homo sapiens
  misc_feature: Table A; Target 77746; HLA-A*68:02; SLC22A9; ENSG00000149742; TAA
SVPYFVIFL

SEQ ID NO: 77747 - protein, 9 aa, Homo sapiens
  misc_feature: Table A; Target 77747; HLA-A*03:01; SLC22A9; ENSG00000149742; TAA
SVYSPPLPW

SEQ ID NO: 77748 - protein, 9 aa, Homo sapiens
  misc_feature: Table A; Target 77748; HLA-A*23:01; SLC22A9; ENSG00000149742; TAA
SVYSPPLPW

SEQ ID NO: 77749 - protein, 9 aa, Homo sapiens
  misc_feature: Table A; Target 77749; HLA-A*25:01; SLC22A9; ENSG00000149742; TAA
SVYSPPLPW

SEQ ID NO: 77750 - protein, 9 aa, Homo sapiens
  misc_feature: Table A; Target 77750; HLA-A*26:01; SLC22A9; ENSG00000149742; TAA
SVYSPPLPW

SEQ ID NO: 77751 - protein, 9 aa, Homo sapiens
  misc_feature: Table A; Target 77751; HLA-A*29:02; SLC22A9; ENSG00000149742; TAA
SVYSPPLPW

SEQ ID NO: 77752 - protein, 9 aa, Homo sapiens
  misc_feature: Table A; Target 77752; HLA-A*31:01; SLC22A9; ENSG00000149742; TAA
SVYSPPLPW

SEQ ID NO: 77753 - protein, 9 aa, Homo sapiens
  misc_feature: Table A; Target 77753; HLA-A*32:01; SLC22A9; ENSG00000149742; TAA
SVYSPPLPW

SEQ ID NO: 77754 - protein, 9 aa, Homo sapiens
  misc_feature: Table A; Target 77754; HLA-A*33:01; SLC22A9; ENSG00000149742; TAA
SVYSPPLPW

SEQ ID NO: 77755 - protein, 9 aa, Homo sapiens
  misc_feature: Table A; Target 77755; HLA-A*33:03; SLC22A9; ENSG00000149742; TAA
SVYSPPLPW

SEQ ID NO: 77756 - protein, 9 aa, Homo sapiens
  misc_feature: Table A; Target 77756; HLA-B*51:01; SLC22A9; ENSG00000149742; TAA
SVYSPPLPW

SEQ ID NO: 77757 - protein, 9 aa, Homo sapiens
  misc_feature: Table A; Target 77757; HLA-B*57:01; SLC22A9; ENSG00000149742; TAA
SVYSPPLPW

SEQ ID NO: 77758 - protein, 9 aa, Homo sapiens
  misc_feature: Table A; Target 77758; HLA-C*02:02; SLC22A9; ENSG00000149742; TAA
SVYSPPLPW

SEQ ID NO: 77759 - protein, 9 aa, Homo sapiens
  misc_feature: Table A; Target 77759; HLA-C*03:04; SLC22A9; ENSG00000149742; TAA
SVYSPPLPW

SEQ ID NO: 77760 - protein, 8 aa, Homo sapiens
  misc_feature: Table A; Target 77760; HLA-A*31:01; SLC22A9; ENSG00000149742; TAA
TAFIPGHR

SEQ ID NO: 77761 - protein, 8 aa, Homo sapiens
  misc_feature: Table A; Target 77761; HLA-A*33:01; SLC22A9; ENSG00000149742; TAA
TAFIPGHR

SEQ ID NO: 77762 - protein, 8 aa, Homo sapiens
  misc_feature: Table A; Target 77762; HLA-A*33:03; SLC22A9; ENSG00000149742; TAA
TAFIPGHR

SEQ ID NO: 77763 - protein, 10 aa, Homo sapiens
  misc_feature: Table A; Target 77763; HLA-B*57:01; SLC22A9; ENSG00000149742; TAA
TAFIPGHRCW

SEQ ID NO: 77764 - protein, 9 aa, Homo sapiens
  misc_feature: Table A; Target 77764; HLA-B*15:03; SLC22A9; ENSG00000149742; TAA
TCAALAPTF

SEQ ID NO: 77765 - protein, 9 aa, Homo sapiens
  misc_feature: Table A; Target 77765; HLA-B*35:01; SLC22A9; ENSG00000149742; TAA
TCAALAPTF

SEQ ID NO: 77766 - protein, 9 aa, Homo sapiens
  misc_feature: Table A; Target 77766; HLA-B*58:01; SLC22A9; ENSG00000149742; TAA
TCAALAPTF

SEQ ID NO: 77767 - protein, 9 aa, Homo sapiens
  misc_feature: Table A; Target 77767; HLA-C*16:01; SLC22A9; ENSG00000149742; TAA
TCAALAPTF

SEQ ID NO: 77768 - protein, 9 aa, Homo sapiens
  misc_feature: Table A; Target 77768; HLA-A*23:01; SLC22A9; ENSG00000149742; TAA
TFANIAGAL

SEQ ID NO: 77769 - protein, 9 aa, Homo sapiens
  misc_feature: Table A; Target 77769; HLA-A*24:02; SLC22A9; ENSG00000149742; TAA
TFANIAGAL

SEQ ID NO: 77770 - protein, 9 aa, Homo sapiens
  misc_feature: Table A; Target 77770; HLA-B*27:05; SLC22A9; ENSG00000149742; TAA
TFANIAGAL

SEQ ID NO: 77771 - protein, 9 aa, Homo sapiens
  misc_feature: Table A; Target 77771; HLA-B*35:01; SLC22A9; ENSG00000149742; TAA
TFANIAGAL

SEQ ID NO: 77772 - protein, 9 aa, Homo sapiens
  misc_feature: Table A; Target 77772; HLA-B*35:03; SLC22A9; ENSG00000149742; TAA
TFANIAGAL

SEQ ID NO: 77773 - protein, 9 aa, Homo sapiens
  misc_feature: Table A; Target 77773; HLA-B*39:01; SLC22A9; ENSG00000149742; TAA
TFANIAGAL

SEQ ID NO: 77774 - protein, 9 aa, Homo sapiens
  misc_feature: Table A; Target 77774; HLA-C*01:02; SLC22A9; ENSG00000149742; TAA
TFANIAGAL

SEQ ID NO: 77775 - protein, 9 aa, Homo sapiens
  misc_feature: Table A; Target 77775; HLA-C*04:01; SLC22A9; ENSG00000149742; TAA
TFANIAGAL

SEQ ID NO: 77776 - protein, 9 aa, Homo sapiens
  misc_feature: Table A; Target 77776; HLA-C*14:02; SLC22A9; ENSG00000149742; TAA
TFANIAGAL

SEQ ID NO: 77777 - protein, 9 aa, Homo sapiens
  misc_feature: Table A; Target 77777; HLA-C*16:02; SLC22A9; ENSG00000149742; TAA
TFANIAGAL

SEQ ID NO: 77778 - protein, 9 aa, Homo sapiens
  misc_feature: Table A; Target 77778; HLA-B*27:05; SLC22A9; ENSG00000149742; TAA
TGALSQDAL

SEQ ID NO: 77779 - protein, 9 aa, Homo sapiens
  misc_feature: Table A; Target 77779; HLA-B*35:03; SLC22A9; ENSG00000149742; TAA
TGALSQDAL

SEQ ID NO: 77780 - protein, 9 aa, Homo sapiens
  misc_feature: Table A; Target 77780; HLA-B*39:01; SLC22A9; ENSG00000149742; TAA
TGALSQDAL

SEQ ID NO: 77781 - protein, 9 aa, Homo sapiens
  misc_feature: Table A; Target 77781; HLA-C*03:03; SLC22A9; ENSG00000149742; TAA
TGALSQDAL

SEQ ID NO: 77782 - protein, 11 aa, Homo sapiens
  misc_feature: Table A; Target 77782; HLA-B*27:02; SLC22A9; ENSG00000149742; TAA
TGALSQDALLR

SEQ ID NO: 77783 - protein, 11 aa, Homo sapiens
  misc_feature: Table A; Target 77783; HLA-C*07:06; SLC22A9; ENSG00000149742; TAA
TGALSQDALLR

SEQ ID NO: 77784 - protein, 8 aa, Homo sapiens
  misc_feature: Table A; Target 77784; HLA-B*44:02; SLC22A9; ENSG00000149742; TAA
TIMLIAEW

SEQ ID NO: 77785 - protein, 8 aa, Homo sapiens
  misc_feature: Table A; Target 77785; HLA-B*57:01; SLC22A9; ENSG00000149742; TAA
TIMLIAEW

SEQ ID NO: 77786 - protein, 9 aa, Homo sapiens
  misc_feature: Table A; Target 77786; HLA-A*33:01; SLC22A9; ENSG00000149742; TAA
TIQDEKNER

SEQ ID NO: 77787 - protein, 9 aa, Homo sapiens
  misc_feature: Table A; Target 77787; HLA-A*33:03; SLC22A9; ENSG00000149742; TAA
TIQDEKNER

SEQ ID NO: 77788 - protein, 9 aa, Homo sapiens
  misc_feature: Table A; Target 77788; HLA-C*07:06; SLC22A9; ENSG00000149742; TAA
TIQDEKNER

SEQ ID NO: 77789 - protein, 10 aa, Homo sapiens
  misc_feature: Table A; Target 77789; HLA-A*03:02; SLC22A9; ENSG00000149742; TAA
TIQDEKNERK

SEQ ID NO: 77790 - protein, 9 aa, Homo sapiens
  misc_feature: Table A; Target 77790; HLA-A*68:02; SLC22A9; ENSG00000149742; TAA
TIVTEWDLV

SEQ ID NO: 77791 - protein, 10 aa, Homo sapiens
  misc_feature: Table A; Target 77791; HLA-A*02:03; SLC22A9; ENSG00000149742; TAA
TLAFAHGNEV

SEQ ID NO: 77792 - protein, 9 aa, Homo sapiens
  misc_feature: Table A; Target 77792; HLA-A*02:01; SLC22A9; ENSG00000149742; TAA
TLAGLAFAI

SEQ ID NO: 77793 - protein, 9 aa, Homo sapiens
  misc_feature: Table A; Target 77793; HLA-A*02:03; SLC22A9; ENSG00000149742; TAA
TLAGLAFAI

SEQ ID NO: 77794 - protein, 9 aa, Homo sapiens
  misc_feature: Table A; Target 77794; HLA-A*02:04; SLC22A9; ENSG00000149742; TAA
TLAGLAFAI

SEQ ID NO: 77795 - protein, 9 aa, Homo sapiens
  misc_feature: Table A; Target 77795; HLA-A*02:07; SLC22A9; ENSG00000149742; TAA
TLAGLAFAI

SEQ ID NO: 77796 - protein, 9 aa, Homo sapiens
  misc_feature: Table A; Target 77796; HLA-A*68:02; SLC22A9; ENSG00000149742; TAA
TLAGLAFAI

SEQ ID NO: 77797 - protein, 9 aa, Homo sapiens
  misc_feature: Table A; Target 77797; HLA-B*13:02; SLC22A9; ENSG00000149742; TAA
TLAGLAFAI

SEQ ID NO: 77798 - protein, 9 aa, Homo sapiens
  misc_feature: Table A; Target 77798; HLA-B*55:01; SLC22A9; ENSG00000149742; TAA
TLAGLAFAI

SEQ ID NO: 77799 - protein, 9 aa, Homo sapiens
  misc_feature: Table A; Target 77799; HLA-C*06:02; SLC22A9; ENSG00000149742; TAA
TLAGLAFAI

SEQ ID NO: 77800 - protein, 9 aa, Homo sapiens
  misc_feature: Table A; Target 77800; HLA-B*08:01; SLC22A9; ENSG00000149742; TAA
TLEILKSTM

SEQ ID NO: 77801 - protein, 9 aa, Homo sapiens
  misc_feature: Table A; Target 77801; HLA-C*07:01; SLC22A9; ENSG00000149742; TAA
TLEILKSTM

SEQ ID NO: 77802 - protein, 9 aa, Homo sapiens
  misc_feature: Table A; Target 77802; HLA-C*07:04; SLC22A9; ENSG00000149742; TAA
TLEILKSTM

SEQ ID NO: 77803 - protein, 9 aa, Homo sapiens
  misc_feature: Table A; Target 77803; HLA-A*02:01; SLC22A9; ENSG00000149742; TAA
TLFGAVILL

SEQ ID NO: 77804 - protein, 9 aa, Homo sapiens
  misc_feature: Table A; Target 77804; HLA-A*02:03; SLC22A9; ENSG00000149742; TAA
TLFGAVILL

SEQ ID NO: 77805 - protein, 9 aa, Homo sapiens
  misc_feature: Table A; Target 77805; HLA-A*02:04; SLC22A9; ENSG00000149742; TAA
TLFGAVILL

SEQ ID NO: 77806 - protein, 9 aa, Homo sapiens
  misc_feature: Table A; Target 77806; HLA-A*02:07; SLC22A9; ENSG00000149742; TAA
TLFGAVILL

SEQ ID NO: 77807 - protein, 9 aa, Homo sapiens
  misc_feature: Table A; Target 77807; HLA-A*03:01; SLC22A9; ENSG00000149742; TAA
TLFGAVILL

SEQ ID NO: 77808 - protein, 9 aa, Homo sapiens
  misc_feature: Table A; Target 77808; HLA-A*68:02; SLC22A9; ENSG00000149742; TAA
TLFGAVILL

SEQ ID NO: 77809 - protein, 9 aa, Homo sapiens
  misc_feature: Table A; Target 77809; HLA-B*13:02; SLC22A9; ENSG00000149742; TAA
TLFGAVILL

SEQ ID NO: 77810 - protein, 9 aa, Homo sapiens
  misc_feature: Table A; Target 77810; HLA-C*07:04; SLC22A9; ENSG00000149742; TAA
TLFGAVILL

SEQ ID NO: 77811 - protein, 10 aa, Homo sapiens
  misc_feature: Table A; Target 77811; HLA-A*02:03; SLC22A9; ENSG00000149742; TAA
TLFGAVILLA

SEQ ID NO: 77812 - protein, 9 aa, Homo sapiens
  misc_feature: Table A; Target 77812; HLA-A*02:03; SLC22A9; ENSG00000149742; TAA
TLGLGASAL

SEQ ID NO: 77813 - protein, 9 aa, Homo sapiens
  misc_feature: Table A; Target 77813; HLA-B*07:02; SLC22A9; ENSG00000149742; TAA
TLGLGASAL

SEQ ID NO: 77814 - protein, 9 aa, Homo sapiens
  misc_feature: Table A; Target 77814; HLA-B*08:01; SLC22A9; ENSG00000149742; TAA
TLGLGASAL

SEQ ID NO: 77815 - protein, 9 aa, Homo sapiens
  misc_feature: Table A; Target 77815; HLA-B*39:01; SLC22A9; ENSG00000149742; TAA
TLGLGASAL

SEQ ID NO: 77816 - protein, 9 aa, Homo sapiens
  misc_feature: Table A; Target 77816; HLA-C*01:02; SLC22A9; ENSG00000149742; TAA
TLGLGASAL

SEQ ID NO: 77817 - protein, 9 aa, Homo sapiens
  misc_feature: Table A; Target 77817; HLA-C*07:02; SLC22A9; ENSG00000149742; TAA
TLGLGASAL

SEQ ID NO: 77818 - protein, 9 aa, Homo sapiens
  misc_feature: Table A; Target 77818; HLA-C*07:04; SLC22A9; ENSG00000149742; TAA
TLGLGASAL

SEQ ID NO: 77819 - protein, 9 aa, Homo sapiens
  misc_feature: Table A; Target 77819; HLA-C*14:02; SLC22A9; ENSG00000149742; TAA
TLGLGASAL

SEQ ID NO: 77820 - protein, 9 aa, Homo sapiens
  misc_feature: Table A; Target 77820; HLA-A*02:01; SLC22A9; ENSG00000149742; TAA
TLREVLATL

SEQ ID NO: 77821 - protein, 9 aa, Homo sapiens
  misc_feature: Table A; Target 77821; HLA-A*02:03; SLC22A9; ENSG00000149742; TAA
TLREVLATL

SEQ ID NO: 77822 - protein, 9 aa, Homo sapiens
  misc_feature: Table A; Target 77822; HLA-A*02:04; SLC22A9; ENSG00000149742; TAA
TLREVLATL

SEQ ID NO: 77823 - protein, 9 aa, Homo sapiens
  misc_feature: Table A; Target 77823; HLA-A*02:07; SLC22A9; ENSG00000149742; TAA
TLREVLATL

SEQ ID NO: 77824 - protein, 9 aa, Homo sapiens
  misc_feature: Table A; Target 77824; HLA-A*31:01; SLC22A9; ENSG00000149742; TAA
TLREVLATL

SEQ ID NO: 77825 - protein, 9 aa, Homo sapiens
  misc_feature: Table A; Target 77825; HLA-B*07:02; SLC22A9; ENSG00000149742; TAA
TLREVLATL

SEQ ID NO: 77826 - protein, 9 aa, Homo sapiens
  misc_feature: Table A; Target 77826; HLA-B*08:01; SLC22A9; ENSG00000149742; TAA
TLREVLATL

SEQ ID NO: 77827 - protein, 9 aa, Homo sapiens
  misc_feature: Table A; Target 77827; HLA-B*46:01; SLC22A9; ENSG00000149742; TAA
TLREVLATL

SEQ ID NO: 77828 - protein, 9 aa, Homo sapiens
  misc_feature: Table A; Target 77828; HLA-C*07:02; SLC22A9; ENSG00000149742; TAA
TLREVLATL

SEQ ID NO: 77829 - protein, 11 aa, Homo sapiens
  misc_feature: Table A; Target 77829; HLA-A*02:03; SLC22A9; ENSG00000149742; TAA
TLREVLATLGL

SEQ ID NO: 77830 - protein, 9 aa, Homo sapiens
  misc_feature: Table A; Target 77830; HLA-A*02:03; SLC22A9; ENSG00000149742; TAA
TMKKELEAA

SEQ ID NO: 77831 - protein, 9 aa, Homo sapiens
  misc_feature: Table A; Target 77831; HLA-B*08:01; SLC22A9; ENSG00000149742; TAA
TMKKELEAA

SEQ ID NO: 77832 - protein, 9 aa, Homo sapiens
  misc_feature: Table A; Target 77832; HLA-B*55:01; SLC22A9; ENSG00000149742; TAA
TMKKELEAA

SEQ ID NO: 77833 - protein, 9 aa, Homo sapiens
  misc_feature: Table A; Target 77833; HLA-B*18:01; SLC22A9; ENSG00000149742; TAA
TRFANFMAY

SEQ ID NO: 77834 - protein, 9 aa, Homo sapiens
  misc_feature: Table A; Target 77834; HLA-B*27:02; SLC22A9; ENSG00000149742; TAA
TRFANFMAY

SEQ ID NO: 77835 - protein, 9 aa, Homo sapiens
  misc_feature: Table A; Target 77835; HLA-B*27:05; SLC22A9; ENSG00000149742; TAA
TRFANFMAY

SEQ ID NO: 77836 - protein, 9 aa, Homo sapiens
  misc_feature: Table A; Target 77836; HLA-C*02:02; SLC22A9; ENSG00000149742; TAA
TRFANFMAY

SEQ ID NO: 77837 - protein, 9 aa, Homo sapiens
  misc_feature: Table A; Target 77837; HLA-C*07:01; SLC22A9; ENSG00000149742; TAA
TRFANFMAY

SEQ ID NO: 77838 - protein, 9 aa, Homo sapiens
  misc_feature: Table A; Target 77838; HLA-C*16:04; SLC22A9; ENSG00000149742; TAA
TRFANFMAY

SEQ ID NO: 77839 - protein, 8 aa, Homo sapiens
  misc_feature: Table A; Target 77839; HLA-B*08:01; SLC22A9; ENSG00000149742; TAA
TSVAKFVF

SEQ ID NO: 77840 - protein, 8 aa, Homo sapiens
  misc_feature: Table A; Target 77840; HLA-B*57:01; SLC22A9; ENSG00000149742; TAA
TSVAKFVF

SEQ ID NO: 77841 - protein, 8 aa, Homo sapiens
  misc_feature: Table A; Target 77841; HLA-B*58:01; SLC22A9; ENSG00000149742; TAA
TSVAKFVF

SEQ ID NO: 77842 - protein, 8 aa, Homo sapiens
  misc_feature: Table A; Target 77842; HLA-C*16:01; SLC22A9; ENSG00000149742; TAA
TSVAKFVF

SEQ ID NO: 77843 - protein, 9 aa, Homo sapiens
  misc_feature: Table A; Target 77843; HLA-A*33:01; SLC22A9; ENSG00000149742; TAA
TSVAKFVFM

SEQ ID NO: 77844 - protein, 9 aa, Homo sapiens
  misc_feature: Table A; Target 77844; HLA-A*68:02; SLC22A9; ENSG00000149742; TAA
TSVAKFVFM

SEQ ID NO: 77845 - protein, 9 aa, Homo sapiens
  misc_feature: Table A; Target 77845; HLA-B*57:01; SLC22A9; ENSG00000149742; TAA
TSVAKFVFM

SEQ ID NO: 77846 - protein, 9 aa, Homo sapiens
  misc_feature: Table A; Target 77846; HLA-C*07:01; SLC22A9; ENSG00000149742; TAA
TSVAKFVFM

SEQ ID NO: 77847 - protein, 9 aa, Homo sapiens
  misc_feature: Table A; Target 77847; HLA-C*12:03; SLC22A9; ENSG00000149742; TAA
TSVAKFVFM

SEQ ID NO: 77848 - protein, 9 aa, Homo sapiens
  misc_feature: Table A; Target 77848; HLA-A*02:01; SLC22A9; ENSG00000149742; TAA
TVFLSIFAV

SEQ ID NO: 77849 - protein, 9 aa, Homo sapiens
  misc_feature: Table A; Target 77849; HLA-A*02:03; SLC22A9; ENSG00000149742; TAA
TVFLSIFAV

SEQ ID NO: 77850 - protein, 9 aa, Homo sapiens
  misc_feature: Table A; Target 77850; HLA-A*02:04; SLC22A9; ENSG00000149742; TAA
TVFLSIFAV

SEQ ID NO: 77851 - protein, 9 aa, Homo sapiens
  misc_feature: Table A; Target 77851; HLA-A*02:07; SLC22A9; ENSG00000149742; TAA
TVFLSIFAV

SEQ ID NO: 77852 - protein, 9 aa, Homo sapiens
  misc_feature: Table A; Target 77852; HLA-A*68:02; SLC22A9; ENSG00000149742; TAA
TVFLSIFAV

SEQ ID NO: 77853 - protein, 9 aa, Homo sapiens
  misc_feature: Table A; Target 77853; HLA-B*13:02; SLC22A9; ENSG00000149742; TAA
TVFLSIFAV

SEQ ID NO: 77854 - protein, 9 aa, Homo sapiens
  misc_feature: Table A; Target 77854; HLA-B*54:01; SLC22A9; ENSG00000149742; TAA
TVFLSIFAV

SEQ ID NO: 77855 - protein, 9 aa, Homo sapiens
  misc_feature: Table A; Target 77855; HLA-B*56:01; SLC22A9; ENSG00000149742; TAA
TVFLSIFAV

SEQ ID NO: 77856 - protein, 10 aa, Homo sapiens
  misc_feature: Table A; Target 77856; HLA-A*68:02; SLC22A9; ENSG00000149742; TAA
TVFLSIFAVA

SEQ ID NO: 77857 - protein, 10 aa, Homo sapiens
  misc_feature: Table A; Target 77857; HLA-B*54:01; SLC22A9; ENSG00000149742; TAA
TVFLSIFAVA

SEQ ID NO: 77858 - protein, 10 aa, Homo sapiens
  misc_feature: Table A; Target 77858; HLA-B*56:01; SLC22A9; ENSG00000149742; TAA
TVFLSIFAVA

SEQ ID NO: 77859 - protein, 10 aa, Homo sapiens
  misc_feature: Table A; Target 77859; HLA-A*25:01; SLC22A9; ENSG00000149742; TAA
TVSDNDTGAL

SEQ ID NO: 77860 - protein, 10 aa, Homo sapiens
  misc_feature: Table A; Target 77860; HLA-B*27:05; SLC22A9; ENSG00000149742; TAA
TVSDNDTGAL

SEQ ID NO: 77861 - protein, 10 aa, Homo sapiens
  misc_feature: Table A; Target 77861; HLA-B*39:01; SLC22A9; ENSG00000149742; TAA
TVSDNDTGAL

SEQ ID NO: 77862 - protein, 10 aa, Homo sapiens
  misc_feature: Table A; Target 77862; HLA-A*23:01; SLC22A9; ENSG00000149742; TAA
TYLHFMLENF

SEQ ID NO: 77863 - protein, 10 aa, Homo sapiens
  misc_feature: Table A; Target 77863; HLA-A*24:02; SLC22A9; ENSG00000149742; TAA
TYLHFMLENF

SEQ ID NO: 77864 - protein, 10 aa, Homo sapiens
  misc_feature: Table A; Target 77864; HLA-A*29:02; SLC22A9; ENSG00000149742; TAA
TYLHFMLENF

SEQ ID NO: 77865 - protein, 8 aa, Homo sapiens
  misc_feature: Table A; Target 77865; HLA-B*46:01; SLC22A9; ENSG00000149742; TAA
VAIVGTCA

SEQ ID NO: 77866 - protein, 8 aa, Homo sapiens
  misc_feature: Table A; Target 77866; HLA-B*54:01; SLC22A9; ENSG00000149742; TAA
VAIVGTCA

SEQ ID NO: 77867 - protein, 8 aa, Homo sapiens
  misc_feature: Table A; Target 77867; HLA-C*03:03; SLC22A9; ENSG00000149742; TAA
VAIVGTCA

SEQ ID NO: 77868 - protein, 8 aa, Homo sapiens
  misc_feature: Table A; Target 77868; HLA-C*03:04; SLC22A9; ENSG00000149742; TAA
VAIVGTCA

SEQ ID NO: 77869 - protein, 8 aa, Homo sapiens
  misc_feature: Table A; Target 77869; HLA-C*14:02; SLC22A9; ENSG00000149742; TAA
VAIVGTCA

SEQ ID NO: 77870 - protein, 9 aa, Homo sapiens
  misc_feature: Table A; Target 77870; HLA-B*46:01; SLC22A9; ENSG00000149742; TAA
VAIVGTCAA

SEQ ID NO: 77871 - protein, 9 aa, Homo sapiens
  misc_feature: Table A; Target 77871; HLA-B*54:01; SLC22A9; ENSG00000149742; TAA
VAIVGTCAA

SEQ ID NO: 77872 - protein, 9 aa, Homo sapiens
  misc_feature: Table A; Target 77872; HLA-B*56:01; SLC22A9; ENSG00000149742; TAA
VAIVGTCAA

SEQ ID NO: 77873 - protein, 9 aa, Homo sapiens
  misc_feature: Table A; Target 77873; HLA-C*01:02; SLC22A9; ENSG00000149742; TAA
VAIVGTCAA

SEQ ID NO: 77874 - protein, 9 aa, Homo sapiens
  misc_feature: Table A; Target 77874; HLA-C*03:03; SLC22A9; ENSG00000149742; TAA
VAIVGTCAA

SEQ ID NO: 77875 - protein, 9 aa, Homo sapiens
  misc_feature: Table A; Target 77875; HLA-C*03:04; SLC22A9; ENSG00000149742; TAA
VAIVGTCAA

SEQ ID NO: 77876 - protein, 9 aa, Homo sapiens
  misc_feature: Table A; Target 77876; HLA-C*14:02; SLC22A9; ENSG00000149742; TAA
VAIVGTCAA

SEQ ID NO: 77877 - protein, 10 aa, Homo sapiens
  misc_feature: Table A; Target 77877; HLA-B*46:01; SLC22A9; ENSG00000149742; TAA
VAIVGTCAAL

SEQ ID NO: 77878 - protein, 10 aa, Homo sapiens
  misc_feature: Table A; Target 77878; HLA-C*01:02; SLC22A9; ENSG00000149742; TAA
VAIVGTCAAL

SEQ ID NO: 77879 - protein, 10 aa, Homo sapiens
  misc_feature: Table A; Target 77879; HLA-C*03:03; SLC22A9; ENSG00000149742; TAA
VAIVGTCAAL

SEQ ID NO: 77880 - protein, 10 aa, Homo sapiens
  misc_feature: Table A; Target 77880; HLA-C*03:04; SLC22A9; ENSG00000149742; TAA
VAIVGTCAAL

SEQ ID NO: 77881 - protein, 10 aa, Homo sapiens
  misc_feature: Table A; Target 77881; HLA-C*14:02; SLC22A9; ENSG00000149742; TAA
VAIVGTCAAL

SEQ ID NO: 77882 - protein, 8 aa, Homo sapiens
  misc_feature: Table A; Target 77882; HLA-B*54:01; SLC22A9; ENSG00000149742; TAA
VAKFVFMA

SEQ ID NO: 77883 - protein, 8 aa, Homo sapiens
  misc_feature: Table A; Target 77883; HLA-B*51:01; SLC22A9; ENSG00000149742; TAA
VAPWALKY

SEQ ID NO: 77884 - protein, 8 aa, Homo sapiens
  misc_feature: Table A; Target 77884; HLA-C*07:01; SLC22A9; ENSG00000149742; TAA
VAPWALKY

SEQ ID NO: 77885 - protein, 10 aa, Homo sapiens
  misc_feature: Table A; Target 77885; HLA-A*02:01; SLC22A9; ENSG00000149742; TAA
VCDSQSLTSV

SEQ ID NO: 77886 - protein, 10 aa, Homo sapiens
  misc_feature: Table A; Target 77886; HLA-B*55:01; SLC22A9; ENSG00000149742; TAA
VCDSQSLTSV

SEQ ID NO: 77887 - protein, 10 aa, Homo sapiens
  misc_feature: Table A; Target 77887; HLA-C*04:01; SLC22A9; ENSG00000149742; TAA
VCDSQSLTSV

SEQ ID NO: 77888 - protein, 10 aa, Homo sapiens
  misc_feature: Table A; Target 77888; HLA-C*05:01; SLC22A9; ENSG00000149742; TAA
VCDSQSLTSV

SEQ ID NO: 77889 - protein, 8 aa, Homo sapiens
  misc_feature: Table A; Target 77889; HLA-A*23:01; SLC22A9; ENSG00000149742; TAA
VFLLQTLF

SEQ ID NO: 77890 - protein, 8 aa, Homo sapiens
  misc_feature: Table A; Target 77890; HLA-A*24:02; SLC22A9; ENSG00000149742; TAA
VFLLQTLF

SEQ ID NO: 77891 - protein, 11 aa, Homo sapiens
  misc_feature: Table A; Target 77891; HLA-A*29:02; SLC22A9; ENSG00000149742; TAA
VFLSIFAVATY

SEQ ID NO: 77892 - protein, 8 aa, Homo sapiens
  misc_feature: Table A; Target 77892; HLA-C*14:02; SLC22A9; ENSG00000149742; TAA
VFMAGMMV

SEQ ID NO: 77893 - protein, 10 aa, Homo sapiens
  misc_feature: Table A; Target 77893; HLA-A*23:01; SLC22A9; ENSG00000149742; TAA
VFPFISGFAF

SEQ ID NO: 77894 - protein, 10 aa, Homo sapiens
  misc_feature: Table A; Target 77894; HLA-A*24:02; SLC22A9; ENSG00000149742; TAA
VFPFISGFAF

SEQ ID NO: 77895 - protein, 10 aa, Homo sapiens
  misc_feature: Table A; Target 77895; HLA-A*29:02; SLC22A9; ENSG00000149742; TAA
VFPFISGFAF

SEQ ID NO: 77896 - protein, 11 aa, Homo sapiens
  misc_feature: Table A; Target 77896; HLA-A*24:02; SLC22A9; ENSG00000149742; TAA
VFPFISGFAFL

SEQ ID NO: 77897 - protein, 9 aa, Homo sapiens
  misc_feature: Table A; Target 77897; HLA-B*27:05; SLC22A9; ENSG00000149742; TAA
VHILDNDTV

SEQ ID NO: 77898 - protein, 9 aa, Homo sapiens
  misc_feature: Table A; Target 77898; HLA-B*38:01; SLC22A9; ENSG00000149742; TAA
VHILDNDTV

SEQ ID NO: 77899 - protein, 9 aa, Homo sapiens
  misc_feature: Table A; Target 77899; HLA-B*39:01; SLC22A9; ENSG00000149742; TAA
VHILDNDTV

SEQ ID NO: 77900 - protein, 8 aa, Homo sapiens
  misc_feature: Table A; Target 77900; HLA-B*57:01; SLC22A9; ENSG00000149742; TAA
VIFLTSSW

SEQ ID NO: 77901 - protein, 9 aa, Homo sapiens
  misc_feature: Table A; Target 77901; HLA-A*03:01; SLC22A9; ENSG00000149742; TAA
VIPTIIRAR

SEQ ID NO: 77902 - protein, 9 aa, Homo sapiens
  misc_feature: Table A; Target 77902; HLA-A*31:01; SLC22A9; ENSG00000149742; TAA
VIPTIIRAR

SEQ ID NO: 77903 - protein, 9 aa, Homo sapiens
  misc_feature: Table A; Target 77903; HLA-A*33:03; SLC22A9; ENSG00000149742; TAA
VIPTIIRAR

SEQ ID NO: 77904 - protein, 9 aa, Homo sapiens
  misc_feature: Table A; Target 77904; HLA-A*02:03; SLC22A9; ENSG00000149742; TAA
VLATLGLGA

SEQ ID NO: 77905 - protein, 9 aa, Homo sapiens
  misc_feature: Table A; Target 77905; HLA-B*13:02; SLC22A9; ENSG00000149742; TAA
VLATLGLGA

SEQ ID NO: 77906 - protein, 8 aa, Homo sapiens
  misc_feature: Table A; Target 77906; HLA-B*07:02; SLC22A9; ENSG00000149742; TAA
VPQEMQTL

SEQ ID NO: 77907 - protein, 8 aa, Homo sapiens
  misc_feature: Table A; Target 77907; HLA-B*08:01; SLC22A9; ENSG00000149742; TAA
VPQEMQTL

SEQ ID NO: 77908 - protein, 8 aa, Homo sapiens
  misc_feature: Table A; Target 77908; HLA-B*35:03; SLC22A9; ENSG00000149742; TAA
VPQEMQTL

SEQ ID NO: 77909 - protein, 8 aa, Homo sapiens
  misc_feature: Table A; Target 77909; HLA-B*51:01; SLC22A9; ENSG00000149742; TAA
VPQEMQTL

SEQ ID NO: 77910 - protein, 8 aa, Homo sapiens
  misc_feature: Table A; Target 77910; HLA-B*56:01; SLC22A9; ENSG00000149742; TAA
VPQEMQTL

SEQ ID NO: 77911 - protein, 8 aa, Homo sapiens
  misc_feature: Table A; Target 77911; HLA-C*07:02; SLC22A9; ENSG00000149742; TAA
VPQEMQTL

SEQ ID NO: 77912 - protein, 9 aa, Homo sapiens
  misc_feature: Table A; Target 77912; HLA-A*33:03; SLC22A9; ENSG00000149742; TAA
VPQEMQTLR

SEQ ID NO: 77913 - protein, 9 aa, Homo sapiens
  misc_feature: Table A; Target 77913; HLA-A*68:01; SLC22A9; ENSG00000149742; TAA
VPQEMQTLR

SEQ ID NO: 77914 - protein, 9 aa, Homo sapiens
  misc_feature: Table A; Target 77914; HLA-C*07:06; SLC22A9; ENSG00000149742; TAA
VPQEMQTLR

SEQ ID NO: 77915 - protein, 8 aa, Homo sapiens
  misc_feature: Table A; Target 77915; HLA-B*51:01; SLC22A9; ENSG00000149742; TAA
VPYFVIFL

SEQ ID NO: 77916 - protein, 8 aa, Homo sapiens
  misc_feature: Table A; Target 77916; HLA-B*13:02; SLC22A9; ENSG00000149742; TAA
VQHLGNNV

SEQ ID NO: 77917 - protein, 9 aa, Homo sapiens
  misc_feature: Table A; Target 77917; HLA-A*32:01; SLC22A9; ENSG00000149742; TAA
VQHLGNNVF

SEQ ID NO: 77918 - protein, 9 aa, Homo sapiens
  misc_feature: Table A; Target 77918; HLA-B*15:01; SLC22A9; ENSG00000149742; TAA
VQHLGNNVF

SEQ ID NO: 77919 - protein, 9 aa, Homo sapiens
  misc_feature: Table A; Target 77919; HLA-B*15:03; SLC22A9; ENSG00000149742; TAA
VQHLGNNVF

SEQ ID NO: 77920 - protein, 9 aa, Homo sapiens
  misc_feature: Table A; Target 77920; HLA-B*38:01; SLC22A9; ENSG00000149742; TAA
VQHLGNNVF

SEQ ID NO: 77921 - protein, 9 aa, Homo sapiens
  misc_feature: Table A; Target 77921; HLA-B*46:01; SLC22A9; ENSG00000149742; TAA
VQHLGNNVF

SEQ ID NO: 77922 - protein, 9 aa, Homo sapiens
  misc_feature: Table A; Target 77922; HLA-C*07:04; SLC22A9; ENSG00000149742; TAA
VQHLGNNVF

SEQ ID NO: 77923 - protein, 9 aa, Homo sapiens
  misc_feature: Table A; Target 77923; HLA-A*01:01; SLC22A9; ENSG00000149742; TAA
VSDNDTGAL

SEQ ID NO: 77924 - protein, 9 aa, Homo sapiens
  misc_feature: Table A; Target 77924; HLA-C*03:03; SLC22A9; ENSG00000149742; TAA
VSDNDTGAL

SEQ ID NO: 77925 - protein, 9 aa, Homo sapiens
  misc_feature: Table A; Target 77925; HLA-C*03:04; SLC22A9; ENSG00000149742; TAA
VSDNDTGAL

SEQ ID NO: 77926 - protein, 9 aa, Homo sapiens
  misc_feature: Table A; Target 77926; HLA-C*05:01; SLC22A9; ENSG00000149742; TAA
VSDNDTGAL

SEQ ID NO: 77927 - protein, 9 aa, Homo sapiens
  misc_feature: Table A; Target 77927; HLA-B*57:01; SLC22A9; ENSG00000149742; TAA
VSVPYFVIF

SEQ ID NO: 77928 - protein, 9 aa, Homo sapiens
  misc_feature: Table A; Target 77928; HLA-C*02:02; SLC22A9; ENSG00000149742; TAA
VSVPYFVIF

SEQ ID NO: 77929 - protein, 9 aa, Homo sapiens
  misc_feature: Table A; Target 77929; HLA-C*12:03; SLC22A9; ENSG00000149742; TAA
VSVPYFVIF

SEQ ID NO: 77930 - protein, 9 aa, Homo sapiens
  misc_feature: Table A; Target 77930; HLA-B*13:02; SLC22A9; ENSG00000149742; TAA
VVSVPYFVI

SEQ ID NO: 77931 - protein, 9 aa, Homo sapiens
  misc_feature: Table A; Target 77931; HLA-A*23:01; SLC22A9; ENSG00000149742; TAA
VYSPPLPWI

SEQ ID NO: 77932 - protein, 9 aa, Homo sapiens
  misc_feature: Table A; Target 77932; HLA-A*24:02; SLC22A9; ENSG00000149742; TAA
VYSPPLPWI

SEQ ID NO: 77933 - protein, 10 aa, Homo sapiens
  misc_feature: Table A; Target 77933; HLA-A*23:01; SLC22A9; ENSG00000149742; TAA
VYSPPLPWII

SEQ ID NO: 77934 - protein, 10 aa, Homo sapiens
  misc_feature: Table A; Target 77934; HLA-A*24:02; SLC22A9; ENSG00000149742; TAA
VYSPPLPWII

SEQ ID NO: 77935 - protein, 11 aa, Homo sapiens
  misc_feature: Table A; Target 77935; HLA-A*24:02; SLC22A9; ENSG00000149742; TAA
VYSPPLPWIIY

SEQ ID NO: 77936 - protein, 11 aa, Homo sapiens
  misc_feature: Table A; Target 77936; HLA-A*29:02; SLC22A9; ENSG00000149742; TAA
VYSPPLPWIIY

SEQ ID NO: 77937 - protein, 8 aa, Homo sapiens
  misc_feature: Table A; Target 77937; HLA-B*08:01; SLC22A9; ENSG00000149742; TAA
WVYDRISF

SEQ ID NO: 77938 - protein, 9 aa, Homo sapiens
  misc_feature: Table A; Target 77938; HLA-A*02:04; SLC22A9; ENSG00000149742; TAA
YLHFMLENF

SEQ ID NO: 77939 - protein, 9 aa, Homo sapiens
  misc_feature: Table A; Target 77939; HLA-A*02:07; SLC22A9; ENSG00000149742; TAA
YLHFMLENF

SEQ ID NO: 77940 - protein, 9 aa, Homo sapiens
  misc_feature: Table A; Target 77940; HLA-A*02:01; SLC22A9; ENSG00000149742; TAA
YLQVAIVGT

SEQ ID NO: 77941 - protein, 9 aa, Homo sapiens
  misc_feature: Table A; Target 77941; HLA-A*02:03; SLC22A9; ENSG00000149742; TAA
YLQVAIVGT

SEQ ID NO: 77942 - protein, 9 aa, Homo sapiens
  misc_feature: Table A; Target 77942; HLA-A*02:04; SLC22A9; ENSG00000149742; TAA
YLQVAIVGT

SEQ ID NO: 77943 - protein, 10 aa, Homo sapiens
  misc_feature: Table A; Target 77943; HLA-A*02:03; SLC22A9; ENSG00000149742; TAA
YLQVAIVGTC

SEQ ID NO: 77944 - protein, 9 aa, Homo sapiens
  misc_feature: Table A; Target 77944; HLA-B*08:01; SLC22A9; ENSG00000149742; TAA
YMNRRASQM

SEQ ID NO: 77945 - protein, 9 aa, Homo sapiens
  misc_feature: Table A; Target 77945; HLA-A*02:07; SLC22A9; ENSG00000149742; TAA
YSPPLPWII

SEQ ID NO: 77946 - protein, 9 aa, Homo sapiens
  misc_feature: Table A; Target 77946; HLA-A*24:02; SLC22A9; ENSG00000149742; TAA
YSPPLPWII

SEQ ID NO: 77947 - protein, 9 aa, Homo sapiens
  misc_feature: Table A; Target 77947; HLA-A*68:02; SLC22A9; ENSG00000149742; TAA
YSPPLPWII

SEQ ID NO: 77948 - protein, 10 aa, Homo sapiens
  misc_feature: Table A; Target 77948; HLA-A*29:02; SLC22A9; ENSG00000149742; TAA
YSPPLPWIIY

SEQ ID NO: 77949 - protein, 9 aa, Homo sapiens
  misc_feature: Table A; Target 77949; HLA-C*05:01; SLC45A2; ENSG00000164175; TAA
AADFIDGPI

SEQ ID NO: 77950 - protein, 10 aa, Homo sapiens
  misc_feature: Table A; Target 77950; HLA-A*11:01; SLC45A2; ENSG00000164175; TAA
AADFIDGPIK

SEQ ID NO: 77951 - protein, 8 aa, Homo sapiens
  misc_feature: Table A; Target 77951; HLA-A*33:03; SLC45A2; ENSG00000164175; TAA
AALIANPR

SEQ ID NO: 77952 - protein, 8 aa, Homo sapiens
  misc_feature: Table A; Target 77952; HLA-C*07:06; SLC45A2; ENSG00000164175; TAA
AALIANPR

SEQ ID NO: 77953 - protein, 8 aa, Homo sapiens
  misc_feature: Table A; Target 77953; HLA-A*23:01; SLC45A2; ENSG00000164175; TAA
AAYVTPVL

SEQ ID NO: 77954 - protein, 8 aa, Homo sapiens
  misc_feature: Table A; Target 77954; HLA-A*30:01; SLC45A2; ENSG00000164175; TAA
AAYVTPVL

SEQ ID NO: 77955 - protein, 8 aa, Homo sapiens
  misc_feature: Table A; Target 77955; HLA-A*32:01; SLC45A2; ENSG00000164175; TAA
AAYVTPVL

SEQ ID NO: 77956 - protein, 8 aa, Homo sapiens
  misc_feature: Table A; Target 77956; HLA-B*08:01; SLC45A2; ENSG00000164175; TAA
AAYVTPVL

SEQ ID NO: 77957 - protein, 8 aa, Homo sapiens
  misc_feature: Table A; Target 77957; HLA-B*13:02; SLC45A2; ENSG00000164175; TAA
AAYVTPVL

SEQ ID NO: 77958 - protein, 8 aa, Homo sapiens
  misc_feature: Table A; Target 77958; HLA-B*15:01; SLC45A2; ENSG00000164175; TAA
AAYVTPVL

SEQ ID NO: 77959 - protein, 8 aa, Homo sapiens
  misc_feature: Table A; Target 77959; HLA-B*15:03; SLC45A2; ENSG00000164175; TAA
AAYVTPVL

SEQ ID NO: 77960 - protein, 8 aa, Homo sapiens
  misc_feature: Table A; Target 77960; HLA-B*35:01; SLC45A2; ENSG00000164175; TAA
AAYVTPVL

SEQ ID NO: 77961 - protein, 8 aa, Homo sapiens
  misc_feature: Table A; Target 77961; HLA-B*35:03; SLC45A2; ENSG00000164175; TAA
AAYVTPVL

SEQ ID NO: 77962 - protein, 8 aa, Homo sapiens
  misc_feature: Table A; Target 77962; HLA-B*37:01; SLC45A2; ENSG00000164175; TAA
AAYVTPVL

SEQ ID NO: 77963 - protein, 8 aa, Homo sapiens
  misc_feature: Table A; Target 77963; HLA-B*39:01; SLC45A2; ENSG00000164175; TAA
AAYVTPVL

SEQ ID NO: 77964 - protein, 8 aa, Homo sapiens
  misc_feature: Table A; Target 77964; HLA-B*40:01; SLC45A2; ENSG00000164175; TAA
AAYVTPVL

SEQ ID NO: 77965 - protein, 8 aa, Homo sapiens
  misc_feature: Table A; Target 77965; HLA-B*40:02; SLC45A2; ENSG00000164175; TAA
AAYVTPVL

SEQ ID NO: 77966 - protein, 8 aa, Homo sapiens
  misc_feature: Table A; Target 77966; HLA-B*46:01; SLC45A2; ENSG00000164175; TAA
AAYVTPVL

SEQ ID NO: 77967 - protein, 8 aa, Homo sapiens
  misc_feature: Table A; Target 77967; HLA-B*51:01; SLC45A2; ENSG00000164175; TAA
AAYVTPVL

SEQ ID NO: 77968 - protein, 8 aa, Homo sapiens
  misc_feature: Table A; Target 77968; HLA-B*54:01; SLC45A2; ENSG00000164175; TAA
AAYVTPVL

SEQ ID NO: 77969 - protein, 8 aa, Homo sapiens
  misc_feature: Table A; Target 77969; HLA-B*58:01; SLC45A2; ENSG00000164175; TAA
AAYVTPVL

SEQ ID NO: 77970 - protein, 8 aa, Homo sapiens
  misc_feature: Table A; Target 77970; HLA-C*01:02; SLC45A2; ENSG00000164175; TAA
AAYVTPVL

SEQ ID NO: 77971 - protein, 8 aa, Homo sapiens
  misc_feature: Table A; Target 77971; HLA-C*02:02; SLC45A2; ENSG00000164175; TAA
AAYVTPVL

SEQ ID NO: 77972 - protein, 8 aa, Homo sapiens
  misc_feature: Table A; Target 77972; HLA-C*03:03; SLC45A2; ENSG00000164175; TAA
AAYVTPVL

SEQ ID NO: 77973 - protein, 8 aa, Homo sapiens
  misc_feature: Table A; Target 77973; HLA-C*03:04; SLC45A2; ENSG00000164175; TAA
AAYVTPVL

SEQ ID NO: 77974 - protein, 8 aa, Homo sapiens
  misc_feature: Table A; Target 77974; HLA-C*05:01; SLC45A2; ENSG00000164175; TAA
AAYVTPVL

SEQ ID NO: 77975 - protein, 8 aa, Homo sapiens
  misc_feature: Table A; Target 77975; HLA-C*07:01; SLC45A2; ENSG00000164175; TAA
AAYVTPVL

SEQ ID NO: 77976 - protein, 8 aa, Homo sapiens
  misc_feature: Table A; Target 77976; HLA-C*07:02; SLC45A2; ENSG00000164175; TAA
AAYVTPVL

SEQ ID NO: 77977 - protein, 8 aa, Homo sapiens
  misc_feature: Table A; Target 77977; HLA-C*12:03; SLC45A2; ENSG00000164175; TAA
AAYVTPVL

SEQ ID NO: 77978 - protein, 8 aa, Homo sapiens
  misc_feature: Table A; Target 77978; HLA-C*14:02; SLC45A2; ENSG00000164175; TAA
AAYVTPVL

SEQ ID NO: 77979 - protein, 8 aa, Homo sapiens
  misc_feature: Table A; Target 77979; HLA-C*16:01; SLC45A2; ENSG00000164175; TAA
AAYVTPVL

SEQ ID NO: 77980 - protein, 8 aa, Homo sapiens
  misc_feature: Table A; Target 77980; HLA-C*16:02; SLC45A2; ENSG00000164175; TAA
AAYVTPVL

SEQ ID NO: 77981 - protein, 8 aa, Homo sapiens
  misc_feature: Table A; Target 77981; HLA-C*16:04; SLC45A2; ENSG00000164175; TAA
AAYVTPVL

SEQ ID NO: 77982 - protein, 9 aa, Homo sapiens
  misc_feature: Table A; Target 77982; HLA-A*01:01; SLC45A2; ENSG00000164175; TAA
AAYVTPVLL

SEQ ID NO: 77983 - protein, 9 aa, Homo sapiens
  misc_feature: Table A; Target 77983; HLA-A*02:01; SLC45A2; ENSG00000164175; TAA
AAYVTPVLL

SEQ ID NO: 77984 - protein, 9 aa, Homo sapiens
  misc_feature: Table A; Target 77984; HLA-A*02:03; SLC45A2; ENSG00000164175; TAA
AAYVTPVLL

SEQ ID NO: 77985 - protein, 9 aa, Homo sapiens
  misc_feature: Table A; Target 77985; HLA-A*02:04; SLC45A2; ENSG00000164175; TAA
AAYVTPVLL

SEQ ID NO: 77986 - protein, 9 aa, Homo sapiens
  misc_feature: Table A; Target 77986; HLA-A*02:07; SLC45A2; ENSG00000164175; TAA
AAYVTPVLL

SEQ ID NO: 77987 - protein, 9 aa, Homo sapiens
  misc_feature: Table A; Target 77987; HLA-A*03:01; SLC45A2; ENSG00000164175; TAA
AAYVTPVLL

SEQ ID NO: 77988 - protein, 9 aa, Homo sapiens
  misc_feature: Table A; Target 77988; HLA-A*03:02; SLC45A2; ENSG00000164175; TAA
AAYVTPVLL

SEQ ID NO: 77989 - protein, 9 aa, Homo sapiens
  misc_feature: Table A; Target 77989; HLA-A*11:01; SLC45A2; ENSG00000164175; TAA
AAYVTPVLL

SEQ ID NO: 77990 - protein, 9 aa, Homo sapiens
  misc_feature: Table A; Target 77990; HLA-A*23:01; SLC45A2; ENSG00000164175; TAA
AAYVTPVLL

SEQ ID NO: 77991 - protein, 9 aa, Homo sapiens
  misc_feature: Table A; Target 77991; HLA-A*24:02; SLC45A2; ENSG00000164175; TAA
AAYVTPVLL

SEQ ID NO: 77992 - protein, 9 aa, Homo sapiens
  misc_feature: Table A; Target 77992; HLA-A*30:01; SLC45A2; ENSG00000164175; TAA
AAYVTPVLL

SEQ ID NO: 77993 - protein, 9 aa, Homo sapiens
  misc_feature: Table A; Target 77993; HLA-A*31:01; SLC45A2; ENSG00000164175; TAA
AAYVTPVLL

SEQ ID NO: 77994 - protein, 9 aa, Homo sapiens
  misc_feature: Table A; Target 77994; HLA-A*32:01; SLC45A2; ENSG00000164175; TAA
AAYVTPVLL

SEQ ID NO: 77995 - protein, 9 aa, Homo sapiens
  misc_feature: Table A; Target 77995; HLA-A*68:01; SLC45A2; ENSG00000164175; TAA
AAYVTPVLL

SEQ ID NO: 77996 - protein, 9 aa, Homo sapiens
  misc_feature: Table A; Target 77996; HLA-A*68:02; SLC45A2; ENSG00000164175; TAA
AAYVTPVLL

SEQ ID NO: 77997 - protein, 9 aa, Homo sapiens
  misc_feature: Table A; Target 77997; HLA-B*07:02; SLC45A2; ENSG00000164175; TAA
AAYVTPVLL

SEQ ID NO: 77998 - protein, 9 aa, Homo sapiens
  misc_feature: Table A; Target 77998; HLA-B*08:01; SLC45A2; ENSG00000164175; TAA
AAYVTPVLL

SEQ ID NO: 77999 - protein, 9 aa, Homo sapiens
  misc_feature: Table A; Target 77999; HLA-B*13:02; SLC45A2; ENSG00000164175; TAA
AAYVTPVLL

SEQ ID NO: 78000 - protein, 9 aa, Homo sapiens
  misc_feature: Table A; Target 78000; HLA-B*15:01; SLC45A2; ENSG00000164175; TAA
AAYVTPVLL

SEQ ID NO: 78001 - protein, 9 aa, Homo sapiens
  misc_feature: Table A; Target 78001; HLA-B*15:03; SLC45A2; ENSG00000164175; TAA
AAYVTPVLL

SEQ ID NO: 78002 - protein, 9 aa, Homo sapiens
  misc_feature: Table A; Target 78002; HLA-B*27:02; SLC45A2; ENSG00000164175; TAA
AAYVTPVLL

SEQ ID NO: 78003 - protein, 9 aa, Homo sapiens
  misc_feature: Table A; Target 78003; HLA-B*35:01; SLC45A2; ENSG00000164175; TAA
AAYVTPVLL

SEQ ID NO: 78004 - protein, 9 aa, Homo sapiens
  misc_feature: Table A; Target 78004; HLA-B*35:03; SLC45A2; ENSG00000164175; TAA
AAYVTPVLL

SEQ ID NO: 78005 - protein, 9 aa, Homo sapiens
  misc_feature: Table A; Target 78005; HLA-B*37:01; SLC45A2; ENSG00000164175; TAA
AAYVTPVLL

SEQ ID NO: 78006 - protein, 9 aa, Homo sapiens
  misc_feature: Table A; Target 78006; HLA-B*38:01; SLC45A2; ENSG00000164175; TAA
AAYVTPVLL

SEQ ID NO: 78007 - protein, 9 aa, Homo sapiens
  misc_feature: Table A; Target 78007; HLA-B*39:01; SLC45A2; ENSG00000164175; TAA
AAYVTPVLL

SEQ ID NO: 78008 - protein, 9 aa, Homo sapiens
  misc_feature: Table A; Target 78008; HLA-B*40:01; SLC45A2; ENSG00000164175; TAA
AAYVTPVLL

SEQ ID NO: 78009 - protein, 9 aa, Homo sapiens
  misc_feature: Table A; Target 78009; HLA-B*40:02; SLC45A2; ENSG00000164175; TAA
AAYVTPVLL

SEQ ID NO: 78010 - protein, 9 aa, Homo sapiens
  misc_feature: Table A; Target 78010; HLA-B*46:01; SLC45A2; ENSG00000164175; TAA
AAYVTPVLL

SEQ ID NO: 78011 - protein, 9 aa, Homo sapiens
  misc_feature: Table A; Target 78011; HLA-B*49:01; SLC45A2; ENSG00000164175; TAA
AAYVTPVLL

SEQ ID NO: 78012 - protein, 9 aa, Homo sapiens
  misc_feature: Table A; Target 78012; HLA-B*51:01; SLC45A2; ENSG00000164175; TAA
AAYVTPVLL

SEQ ID NO: 78013 - protein, 9 aa, Homo sapiens
  misc_feature: Table A; Target 78013; HLA-B*55:01; SLC45A2; ENSG00000164175; TAA
AAYVTPVLL

SEQ ID NO: 78014 - protein, 9 aa, Homo sapiens
  misc_feature: Table A; Target 78014; HLA-B*57:01; SLC45A2; ENSG00000164175; TAA
AAYVTPVLL

SEQ ID NO: 78015 - protein, 9 aa, Homo sapiens
  misc_feature: Table A; Target 78015; HLA-B*58:01; SLC45A2; ENSG00000164175; TAA
AAYVTPVLL

SEQ ID NO: 78016 - protein, 9 aa, Homo sapiens
  misc_feature: Table A; Target 78016; HLA-C*01:02; SLC45A2; ENSG00000164175; TAA
AAYVTPVLL

SEQ ID NO: 78017 - protein, 9 aa, Homo sapiens
  misc_feature: Table A; Target 78017; HLA-C*02:02; SLC45A2; ENSG00000164175; TAA
AAYVTPVLL

SEQ ID NO: 78018 - protein, 9 aa, Homo sapiens
  misc_feature: Table A; Target 78018; HLA-C*03:03; SLC45A2; ENSG00000164175; TAA
AAYVTPVLL

SEQ ID NO: 78019 - protein, 9 aa, Homo sapiens
  misc_feature: Table A; Target 78019; HLA-C*03:04; SLC45A2; ENSG00000164175; TAA
AAYVTPVLL

SEQ ID NO: 78020 - protein, 9 aa, Homo sapiens
  misc_feature: Table A; Target 78020; HLA-C*04:01; SLC45A2; ENSG00000164175; TAA
AAYVTPVLL

SEQ ID NO: 78021 - protein, 9 aa, Homo sapiens
  misc_feature: Table A; Target 78021; HLA-C*05:01; SLC45A2; ENSG00000164175; TAA
AAYVTPVLL

SEQ ID NO: 78022 - protein, 9 aa, Homo sapiens
  misc_feature: Table A; Target 78022; HLA-C*06:02; SLC45A2; ENSG00000164175; TAA
AAYVTPVLL

SEQ ID NO: 78023 - protein, 9 aa, Homo sapiens
  misc_feature: Table A; Target 78023; HLA-C*07:04; SLC45A2; ENSG00000164175; TAA
AAYVTPVLL

SEQ ID NO: 78024 - protein, 9 aa, Homo sapiens
  misc_feature: Table A; Target 78024; HLA-C*07:06; SLC45A2; ENSG00000164175; TAA
AAYVTPVLL

SEQ ID NO: 78025 - protein, 9 aa, Homo sapiens
  misc_feature: Table A; Target 78025; HLA-C*12:03; SLC45A2; ENSG00000164175; TAA
AAYVTPVLL

SEQ ID NO: 78026 - protein, 9 aa, Homo sapiens
  misc_feature: Table A; Target 78026; HLA-C*14:02; SLC45A2; ENSG00000164175; TAA
AAYVTPVLL

SEQ ID NO: 78027 - protein, 9 aa, Homo sapiens
  misc_feature: Table A; Target 78027; HLA-C*16:01; SLC45A2; ENSG00000164175; TAA
AAYVTPVLL

SEQ ID NO: 78028 - protein, 9 aa, Homo sapiens
  misc_feature: Table A; Target 78028; HLA-C*16:02; SLC45A2; ENSG00000164175; TAA
AAYVTPVLL

SEQ ID NO: 78029 - protein, 9 aa, Homo sapiens
  misc_feature: Table A; Target 78029; HLA-C*16:04; SLC45A2; ENSG00000164175; TAA
AAYVTPVLL

SEQ ID NO: 78030 - protein, 9 aa, Homo sapiens
  misc_feature: Table A; Target 78030; HLA-A*02:07; SLC45A2; ENSG00000164175; TAA
ADDGPFDSV

SEQ ID NO: 78031 - protein, 9 aa, Homo sapiens
  misc_feature: Table A; Target 78031; HLA-B*49:01; SLC45A2; ENSG00000164175; TAA
ADDGPFDSV

SEQ ID NO: 78032 - protein, 9 aa, Homo sapiens
  misc_feature: Table A; Target 78032; HLA-C*05:01; SLC45A2; ENSG00000164175; TAA
ADDGPFDSV

SEQ ID NO: 78033 - protein, 9 aa, Homo sapiens
  misc_feature: Table A; Target 78033; HLA-A*11:01; SLC45A2; ENSG00000164175; TAA
ADFIDGPIK

SEQ ID NO: 78034 - protein, 10 aa, Homo sapiens
  misc_feature: Table A; Target 78034; HLA-A*30:01; SLC45A2; ENSG00000164175; TAA
ADFIDGPIKA

SEQ ID NO: 78035 - protein, 10 aa, Homo sapiens
  misc_feature: Table A; Target 78035; HLA-B*40:02; SLC45A2; ENSG00000164175; TAA
ADFIDGPIKA

SEQ ID NO: 78036 - protein, 11 aa, Homo sapiens
  misc_feature: Table A; Target 78036; HLA-A*30:02; SLC45A2; ENSG00000164175; TAA
ADFIDGPIKAY

SEQ ID NO: 78037 - protein, 11 aa, Homo sapiens
  misc_feature: Table A; Target 78037; HLA-B*44:02; SLC45A2; ENSG00000164175; TAA
ADFIDGPIKAY

SEQ ID NO: 78038 - protein, 11 aa, Homo sapiens
  misc_feature: Table A; Target 78038; HLA-B*44:03; SLC45A2; ENSG00000164175; TAA
ADFIDGPIKAY

SEQ ID NO: 78039 - protein, 11 aa, Homo sapiens
  misc_feature: Table A; Target 78039; HLA-C*12:03; SLC45A2; ENSG00000164175; TAA
ADFIDGPIKAY

SEQ ID NO: 78040 - protein, 11 aa, Homo sapiens
  misc_feature: Table A; Target 78040; HLA-C*16:04; SLC45A2; ENSG00000164175; TAA
ADFIDGPIKAY

SEQ ID NO: 78041 - protein, 8 aa, Homo sapiens
  misc_feature: Table A; Target 78041; HLA-C*16:01; SLC45A2; ENSG00000164175; TAA
AEQTRRAM

SEQ ID NO: 78042 - protein, 10 aa, Homo sapiens
  misc_feature: Table A; Target 78042; HLA-A*30:01; SLC45A2; ENSG00000164175; TAA
AEQTRRAMTL

SEQ ID NO: 78043 - protein, 10 aa, Homo sapiens
  misc_feature: Table A; Target 78043; HLA-B*37:01; SLC45A2; ENSG00000164175; TAA
AEQTRRAMTL

SEQ ID NO: 78044 - protein, 10 aa, Homo sapiens
  misc_feature: Table A; Target 78044; HLA-B*40:01; SLC45A2; ENSG00000164175; TAA
AEQTRRAMTL

SEQ ID NO: 78045 - protein, 10 aa, Homo sapiens
  misc_feature: Table A; Target 78045; HLA-B*40:02; SLC45A2; ENSG00000164175; TAA
AEQTRRAMTL

SEQ ID NO: 78046 - protein, 10 aa, Homo sapiens
  misc_feature: Table A; Target 78046; HLA-B*44:02; SLC45A2; ENSG00000164175; TAA
AEQTRRAMTL

SEQ ID NO: 78047 - protein, 8 aa, Homo sapiens
  misc_feature: Table A; Target 78047; HLA-A*23:01; SLC45A2; ENSG00000164175; TAA
AFLSNMLF

SEQ ID NO: 78048 - protein, 9 aa, Homo sapiens
  misc_feature: Table A; Target 78048; HLA-A*23:01; SLC45A2; ENSG00000164175; TAA
AFLSNMLFF

SEQ ID NO: 78049 - protein, 9 aa, Homo sapiens
  misc_feature: Table A; Target 78049; HLA-A*24:02; SLC45A2; ENSG00000164175; TAA
AFLSNMLFF

SEQ ID NO: 78050 - protein, 9 aa, Homo sapiens
  misc_feature: Table A; Target 78050; HLA-A*29:02; SLC45A2; ENSG00000164175; TAA
AFLSNMLFF

SEQ ID NO: 78051 - protein, 9 aa, Homo sapiens
  misc_feature: Table A; Target 78051; HLA-A*30:01; SLC45A2; ENSG00000164175; TAA
AGTVVVVVI

SEQ ID NO: 78052 - protein, 9 aa, Homo sapiens
  misc_feature: Table A; Target 78052; HLA-A*32:01; SLC45A2; ENSG00000164175; TAA
AGTVVVVVI

SEQ ID NO: 78053 - protein, 9 aa, Homo sapiens
  misc_feature: Table A; Target 78053; HLA-B*13:02; SLC45A2; ENSG00000164175; TAA
AGTVVVVVI

SEQ ID NO: 78054 - protein, 9 aa, Homo sapiens
  misc_feature: Table A; Target 78054; HLA-B*40:01; SLC45A2; ENSG00000164175; TAA
AGTVVVVVI

SEQ ID NO: 78055 - protein, 9 aa, Homo sapiens
  misc_feature: Table A; Target 78055; HLA-B*49:01; SLC45A2; ENSG00000164175; TAA
AGTVVVVVI

SEQ ID NO: 78056 - protein, 9 aa, Homo sapiens
  misc_feature: Table A; Target 78056; HLA-B*58:01; SLC45A2; ENSG00000164175; TAA
AGTVVVVVI

SEQ ID NO: 78057 - protein, 9 aa, Homo sapiens
  misc_feature: Table A; Target 78057; HLA-C*02:02; SLC45A2; ENSG00000164175; TAA
AGTVVVVVI

SEQ ID NO: 78058 - protein, 9 aa, Homo sapiens
  misc_feature: Table A; Target 78058; HLA-C*04:01; SLC45A2; ENSG00000164175; TAA
AGTVVVVVI

SEQ ID NO: 78059 - protein, 9 aa, Homo sapiens
  misc_feature: Table A; Target 78059; HLA-C*06:02; SLC45A2; ENSG00000164175; TAA
AGTVVVVVI

SEQ ID NO: 78060 - protein, 9 aa, Homo sapiens
  misc_feature: Table A; Target 78060; HLA-C*12:03; SLC45A2; ENSG00000164175; TAA
AGTVVVVVI

SEQ ID NO: 78061 - protein, 9 aa, Homo sapiens
  misc_feature: Table A; Target 78061; HLA-C*16:02; SLC45A2; ENSG00000164175; TAA
AGTVVVVVI

SEQ ID NO: 78062 - protein, 9 aa, Homo sapiens
  misc_feature: Table A; Target 78062; HLA-C*16:04; SLC45A2; ENSG00000164175; TAA
AGTVVVVVI

SEQ ID NO: 78063 - protein, 8 aa, Homo sapiens
  misc_feature: Table A; Target 78063; HLA-B*38:01; SLC45A2; ENSG00000164175; TAA
AHNSTEFL

SEQ ID NO: 78064 - protein, 9 aa, Homo sapiens
  misc_feature: Table A; Target 78064; HLA-B*38:01; SLC45A2; ENSG00000164175; TAA
AHNSTEFLI

SEQ ID NO: 78065 - protein, 9 aa, Homo sapiens
  misc_feature: Table A; Target 78065; HLA-A*02:07; SLC45A2; ENSG00000164175; TAA
AIDWAHLEL

SEQ ID NO: 78066 - protein, 9 aa, Homo sapiens
  misc_feature: Table A; Target 78066; HLA-C*05:01; SLC45A2; ENSG00000164175; TAA
AIDWAHLEL

SEQ ID NO: 78067 - protein, 9 aa, Homo sapiens
  misc_feature: Table A; Target 78067; HLA-A*02:01; SLC45A2; ENSG00000164175; TAA
AISVTMIGV

SEQ ID NO: 78068 - protein, 9 aa, Homo sapiens
  misc_feature: Table A; Target 78068; HLA-A*02:03; SLC45A2; ENSG00000164175; TAA
AISVTMIGV

SEQ ID NO: 78069 - protein, 9 aa, Homo sapiens
  misc_feature: Table A; Target 78069; HLA-A*02:07; SLC45A2; ENSG00000164175; TAA
AISVTMIGV

SEQ ID NO: 78070 - protein, 9 aa, Homo sapiens
  misc_feature: Table A; Target 78070; HLA-B*13:02; SLC45A2; ENSG00000164175; TAA
AISVTMIGV

SEQ ID NO: 78071 - protein, 9 aa, Homo sapiens
  misc_feature: Table A; Target 78071; HLA-A*02:01; SLC45A2; ENSG00000164175; TAA
ALFTGFGGA

SEQ ID NO: 78072 - protein, 9 aa, Homo sapiens
  misc_feature: Table A; Target 78072; HLA-A*02:03; SLC45A2; ENSG00000164175; TAA
ALFTGFGGA

SEQ ID NO: 78073 - protein, 9 aa, Homo sapiens
  misc_feature: Table A; Target 78073; HLA-A*02:07; SLC45A2; ENSG00000164175; TAA
ALFTGFGGA

SEQ ID NO: 78074 - protein, 9 aa, Homo sapiens
  misc_feature: Table A; Target 78074; HLA-B*55:01; SLC45A2; ENSG00000164175; TAA
ALFTGFGGA

SEQ ID NO: 78075 - protein, 9 aa, Homo sapiens
  misc_feature: Table A; Target 78075; HLA-B*56:01; SLC45A2; ENSG00000164175; TAA
ALFTGFGGA

SEQ ID NO: 78076 - protein, 10 aa, Homo sapiens
  misc_feature: Table A; Target 78076; HLA-A*02:01; SLC45A2; ENSG00000164175; TAA
ALFTGFGGAL

SEQ ID NO: 78077 - protein, 10 aa, Homo sapiens
  misc_feature: Table A; Target 78077; HLA-A*02:03; SLC45A2; ENSG00000164175; TAA
ALFTGFGGAL

SEQ ID NO: 78078 - protein, 10 aa, Homo sapiens
  misc_feature: Table A; Target 78078; HLA-A*02:04; SLC45A2; ENSG00000164175; TAA
ALFTGFGGAL

SEQ ID NO: 78079 - protein, 10 aa, Homo sapiens
  misc_feature: Table A; Target 78079; HLA-A*02:07; SLC45A2; ENSG00000164175; TAA
ALFTGFGGAL

SEQ ID NO: 78080 - protein, 10 aa, Homo sapiens
  misc_feature: Table A; Target 78080; HLA-A*03:01; SLC45A2; ENSG00000164175; TAA
ALFTGFGGAL

SEQ ID NO: 78081 - protein, 10 aa, Homo sapiens
  misc_feature: Table A; Target 78081; HLA-B*27:05; SLC45A2; ENSG00000164175; TAA
ALFTGFGGAL

SEQ ID NO: 78082 - protein, 10 aa, Homo sapiens
  misc_feature: Table A; Target 78082; HLA-B*46:01; SLC45A2; ENSG00000164175; TAA
ALFTGFGGAL

SEQ ID NO: 78083 - protein, 10 aa, Homo sapiens
  misc_feature: Table A; Target 78083; HLA-C*01:02; SLC45A2; ENSG00000164175; TAA
ALFTGFGGAL

SEQ ID NO: 78084 - protein, 9 aa, Homo sapiens
  misc_feature: Table A; Target 78084; HLA-A*03:01; SLC45A2; ENSG00000164175; TAA
ALIANPRRK

SEQ ID NO: 78085 - protein, 9 aa, Homo sapiens
  misc_feature: Table A; Target 78085; HLA-A*03:02; SLC45A2; ENSG00000164175; TAA
ALIANPRRK

SEQ ID NO: 78086 - protein, 9 aa, Homo sapiens
  misc_feature: Table A; Target 78086; HLA-A*01:01; SLC45A2; ENSG00000164175; TAA
ALVNMPPHY

SEQ ID NO: 78087 - protein, 9 aa, Homo sapiens
  misc_feature: Table A; Target 78087; HLA-A*03:01; SLC45A2; ENSG00000164175; TAA
ALVNMPPHY

SEQ ID NO: 78088 - protein, 9 aa, Homo sapiens
  misc_feature: Table A; Target 78088; HLA-A*23:01; SLC45A2; ENSG00000164175; TAA
ALVNMPPHY

SEQ ID NO: 78089 - protein, 9 aa, Homo sapiens
  misc_feature: Table A; Target 78089; HLA-A*26:01; SLC45A2; ENSG00000164175; TAA
ALVNMPPHY

SEQ ID NO: 78090 - protein, 9 aa, Homo sapiens
  misc_feature: Table A; Target 78090; HLA-A*29:02; SLC45A2; ENSG00000164175; TAA
ALVNMPPHY

SEQ ID NO: 78091 - protein, 9 aa, Homo sapiens
  misc_feature: Table A; Target 78091; HLA-A*30:02; SLC45A2; ENSG00000164175; TAA
ALVNMPPHY

SEQ ID NO: 78092 - protein, 9 aa, Homo sapiens
  misc_feature: Table A; Target 78092; HLA-A*32:01; SLC45A2; ENSG00000164175; TAA
ALVNMPPHY

SEQ ID NO: 78093 - protein, 9 aa, Homo sapiens
  misc_feature: Table A; Target 78093; HLA-B*15:01; SLC45A2; ENSG00000164175; TAA
ALVNMPPHY

SEQ ID NO: 78094 - protein, 9 aa, Homo sapiens
  misc_feature: Table A; Target 78094; HLA-B*15:03; SLC45A2; ENSG00000164175; TAA
ALVNMPPHY

SEQ ID NO: 78095 - protein, 9 aa, Homo sapiens
  misc_feature: Table A; Target 78095; HLA-B*44:03; SLC45A2; ENSG00000164175; TAA
ALVNMPPHY

SEQ ID NO: 78096 - protein, 9 aa, Homo sapiens
  misc_feature: Table A; Target 78096; HLA-B*46:01; SLC45A2; ENSG00000164175; TAA
ALVNMPPHY

SEQ ID NO: 78097 - protein, 9 aa, Homo sapiens
  misc_feature: Table A; Target 78097; HLA-B*58:01; SLC45A2; ENSG00000164175; TAA
ALVNMPPHY

SEQ ID NO: 78098 - protein, 9 aa, Homo sapiens
  misc_feature: Table A; Target 78098; HLA-C*02:02; SLC45A2; ENSG00000164175; TAA
ALVNMPPHY

SEQ ID NO: 78099 - protein, 9 aa, Homo sapiens
  misc_feature: Table A; Target 78099; HLA-C*12:03; SLC45A2; ENSG00000164175; TAA
ALVNMPPHY

SEQ ID NO: 78100 - protein, 9 aa, Homo sapiens
  misc_feature: Table A; Target 78100; HLA-C*16:01; SLC45A2; ENSG00000164175; TAA
ALVNMPPHY

SEQ ID NO: 78101 - protein, 9 aa, Homo sapiens
  misc_feature: Table A; Target 78101; HLA-C*16:02; SLC45A2; ENSG00000164175; TAA
ALVNMPPHY

SEQ ID NO: 78102 - protein, 9 aa, Homo sapiens
  misc_feature: Table A; Target 78102; HLA-C*16:04; SLC45A2; ENSG00000164175; TAA
ALVNMPPHY

SEQ ID NO: 78103 - protein, 10 aa, Homo sapiens
  misc_feature: Table A; Target 78103; HLA-A*03:01; SLC45A2; ENSG00000164175; TAA
ALVNMPPHYR

SEQ ID NO: 78104 - protein, 10 aa, Homo sapiens
  misc_feature: Table A; Target 78104; HLA-A*31:01; SLC45A2; ENSG00000164175; TAA
ALVNMPPHYR

SEQ ID NO: 78105 - protein, 11 aa, Homo sapiens
  misc_feature: Table A; Target 78105; HLA-A*29:02; SLC45A2; ENSG00000164175; TAA
ALVNMPPHYRY

SEQ ID NO: 78106 - protein, 9 aa, Homo sapiens
  misc_feature: Table A; Target 78106; HLA-A*02:01; SLC45A2; ENSG00000164175; TAA
ALYLNGATV

SEQ ID NO: 78107 - protein, 9 aa, Homo sapiens
  misc_feature: Table A; Target 78107; HLA-A*02:03; SLC45A2; ENSG00000164175; TAA
ALYLNGATV

SEQ ID NO: 78108 - protein, 9 aa, Homo sapiens
  misc_feature: Table A; Target 78108; HLA-A*02:04; SLC45A2; ENSG00000164175; TAA
ALYLNGATV

SEQ ID NO: 78109 - protein, 9 aa, Homo sapiens
  misc_feature: Table A; Target 78109; HLA-A*02:07; SLC45A2; ENSG00000164175; TAA
ALYLNGATV

SEQ ID NO: 78110 - protein, 9 aa, Homo sapiens
  misc_feature: Table A; Target 78110; HLA-A*30:01; SLC45A2; ENSG00000164175; TAA
ALYLNGATV

SEQ ID NO: 78111 - protein, 9 aa, Homo sapiens
  misc_feature: Table A; Target 78111; HLA-B*13:02; SLC45A2; ENSG00000164175; TAA
ALYLNGATV

SEQ ID NO: 78112 - protein, 9 aa, Homo sapiens
  misc_feature: Table A; Target 78112; HLA-B*37:01; SLC45A2; ENSG00000164175; TAA
ALYLNGATV

SEQ ID NO: 78113 - protein, 9 aa, Homo sapiens
  misc_feature: Table A; Target 78113; HLA-B*40:02; SLC45A2; ENSG00000164175; TAA
ALYLNGATV

SEQ ID NO: 78114 - protein, 9 aa, Homo sapiens
  misc_feature: Table A; Target 78114; HLA-B*46:01; SLC45A2; ENSG00000164175; TAA
ALYLNGATV

SEQ ID NO: 78115 - protein, 9 aa, Homo sapiens
  misc_feature: Table A; Target 78115; HLA-B*49:01; SLC45A2; ENSG00000164175; TAA
ALYLNGATV

SEQ ID NO: 78116 - protein, 9 aa, Homo sapiens
  misc_feature: Table A; Target 78116; HLA-B*51:01; SLC45A2; ENSG00000164175; TAA
ALYLNGATV

SEQ ID NO: 78117 - protein, 9 aa, Homo sapiens
  misc_feature: Table A; Target 78117; HLA-B*55:01; SLC45A2; ENSG00000164175; TAA
ALYLNGATV

SEQ ID NO: 78118 - protein, 9 aa, Homo sapiens
  misc_feature: Table A; Target 78118; HLA-B*56:01; SLC45A2; ENSG00000164175; TAA
ALYLNGATV

SEQ ID NO: 78119 - protein, 9 aa, Homo sapiens
  misc_feature: Table A; Target 78119; HLA-C*01:02; SLC45A2; ENSG00000164175; TAA
ALYLNGATV

SEQ ID NO: 78120 - protein, 9 aa, Homo sapiens
  misc_feature: Table A; Target 78120; HLA-C*02:02; SLC45A2; ENSG00000164175; TAA
ALYLNGATV

SEQ ID NO: 78121 - protein, 9 aa, Homo sapiens
  misc_feature: Table A; Target 78121; HLA-C*03:03; SLC45A2; ENSG00000164175; TAA
ALYLNGATV

SEQ ID NO: 78122 - protein, 9 aa, Homo sapiens
  misc_feature: Table A; Target 78122; HLA-C*07:02; SLC45A2; ENSG00000164175; TAA
ALYLNGATV

SEQ ID NO: 78123 - protein, 9 aa, Homo sapiens
  misc_feature: Table A; Target 78123; HLA-C*14:02; SLC45A2; ENSG00000164175; TAA
ALYLNGATV

SEQ ID NO: 78124 - protein, 9 aa, Homo sapiens
  misc_feature: Table A; Target 78124; HLA-C*16:02; SLC45A2; ENSG00000164175; TAA
ALYLNGATV

SEQ ID NO: 78125 - protein, 10 aa, Homo sapiens
  misc_feature: Table A; Target 78125; HLA-A*02:01; SLC45A2; ENSG00000164175; TAA
ALYLNGATVV

SEQ ID NO: 78126 - protein, 10 aa, Homo sapiens
  misc_feature: Table A; Target 78126; HLA-A*02:03; SLC45A2; ENSG00000164175; TAA
ALYLNGATVV

SEQ ID NO: 78127 - protein, 10 aa, Homo sapiens
  misc_feature: Table A; Target 78127; HLA-A*02:04; SLC45A2; ENSG00000164175; TAA
ALYLNGATVV

SEQ ID NO: 78128 - protein, 10 aa, Homo sapiens
  misc_feature: Table A; Target 78128; HLA-A*30:01; SLC45A2; ENSG00000164175; TAA
ALYLNGATVV

SEQ ID NO: 78129 - protein, 10 aa, Homo sapiens
  misc_feature: Table A; Target 78129; HLA-B*13:02; SLC45A2; ENSG00000164175; TAA
ALYLNGATVV

SEQ ID NO: 78130 - protein, 10 aa, Homo sapiens
  misc_feature: Table A; Target 78130; HLA-B*40:02; SLC45A2; ENSG00000164175; TAA
ALYLNGATVV

SEQ ID NO: 78131 - protein, 10 aa, Homo sapiens
  misc_feature: Table A; Target 78131; HLA-B*49:01; SLC45A2; ENSG00000164175; TAA
ALYLNGATVV

SEQ ID NO: 78132 - protein, 10 aa, Homo sapiens
  misc_feature: Table A; Target 78132; HLA-B*55:01; SLC45A2; ENSG00000164175; TAA
ALYLNGATVV

SEQ ID NO: 78133 - protein, 11 aa, Homo sapiens
  misc_feature: Table A; Target 78133; HLA-B*56:01; SLC45A2; ENSG00000164175; TAA
ALYLNGATVVA

SEQ ID NO: 78134 - protein, 9 aa, Homo sapiens
  misc_feature: Table A; Target 78134; HLA-A*29:02; SLC45A2; ENSG00000164175; TAA
AMFGREFCY

SEQ ID NO: 78135 - protein, 9 aa, Homo sapiens
  misc_feature: Table A; Target 78135; HLA-A*30:02; SLC45A2; ENSG00000164175; TAA
AMFGREFCY

SEQ ID NO: 78136 - protein, 9 aa, Homo sapiens
  misc_feature: Table A; Target 78136; HLA-B*15:01; SLC45A2; ENSG00000164175; TAA
AMFGREFCY

SEQ ID NO: 78137 - protein, 10 aa, Homo sapiens
  misc_feature: Table A; Target 78137; HLA-A*02:01; SLC45A2; ENSG00000164175; TAA
AMFGREFCYA

SEQ ID NO: 78138 - protein, 10 aa, Homo sapiens
  misc_feature: Table A; Target 78138; HLA-A*02:03; SLC45A2; ENSG00000164175; TAA
AMFGREFCYA

SEQ ID NO: 78139 - protein, 8 aa, Homo sapiens
  misc_feature: Table A; Target 78139; HLA-A*03:02; SLC45A2; ENSG00000164175; TAA
AMQGAKNK

SEQ ID NO: 78140 - protein, 8 aa, Homo sapiens
  misc_feature: Table A; Target 78140; HLA-B*08:01; SLC45A2; ENSG00000164175; TAA
AMTLKSLL

SEQ ID NO: 78141 - protein, 8 aa, Homo sapiens
  misc_feature: Table A; Target 78141; HLA-B*37:01; SLC45A2; ENSG00000164175; TAA
AMTLKSLL

SEQ ID NO: 78142 - protein, 8 aa, Homo sapiens
  misc_feature: Table A; Target 78142; HLA-C*16:01; SLC45A2; ENSG00000164175; TAA
AMTLKSLL

SEQ ID NO: 78143 - protein, 9 aa, Homo sapiens
  misc_feature: Table A; Target 78143; HLA-A*03:01; SLC45A2; ENSG00000164175; TAA
AMTLKSLLR

SEQ ID NO: 78144 - protein, 9 aa, Homo sapiens
  misc_feature: Table A; Target 78144; HLA-A*31:01; SLC45A2; ENSG00000164175; TAA
AMTLKSLLR

SEQ ID NO: 78145 - protein, 10 aa, Homo sapiens
  misc_feature: Table A; Target 78145; HLA-B*35:03; SLC45A2; ENSG00000164175; TAA
APGGDPDNSV

SEQ ID NO: 78146 - protein, 10 aa, Homo sapiens
  misc_feature: Table A; Target 78146; HLA-B*55:01; SLC45A2; ENSG00000164175; TAA
APGGDPDNSV

SEQ ID NO: 78147 - protein, 10 aa, Homo sapiens
  misc_feature: Table A; Target 78147; HLA-B*56:01; SLC45A2; ENSG00000164175; TAA
APGGDPDNSV

SEQ ID NO: 78148 - protein, 10 aa, Homo sapiens
  misc_feature: Table A; Target 78148; HLA-C*07:02; SLC45A2; ENSG00000164175; TAA
APGGDPDNSV

SEQ ID NO: 78149 - protein, 9 aa, Homo sapiens
  misc_feature: Table A; Target 78149; HLA-A*30:01; SLC45A2; ENSG00000164175; TAA
AQILVGGGL

SEQ ID NO: 78150 - protein, 9 aa, Homo sapiens
  misc_feature: Table A; Target 78150; HLA-B*13:02; SLC45A2; ENSG00000164175; TAA
AQILVGGGL

SEQ ID NO: 78151 - protein, 9 aa, Homo sapiens
  misc_feature: Table A; Target 78151; HLA-B*15:01; SLC45A2; ENSG00000164175; TAA
AQILVGGGL

SEQ ID NO: 78152 - protein, 9 aa, Homo sapiens
  misc_feature: Table A; Target 78152; HLA-B*15:03; SLC45A2; ENSG00000164175; TAA
AQILVGGGL

SEQ ID NO: 78153 - protein, 9 aa, Homo sapiens
  misc_feature: Table A; Target 78153; HLA-B*27:02; SLC45A2; ENSG00000164175; TAA
AQILVGGGL

SEQ ID NO: 78154 - protein, 9 aa, Homo sapiens
  misc_feature: Table A; Target 78154; HLA-B*27:05; SLC45A2; ENSG00000164175; TAA
AQILVGGGL

SEQ ID NO: 78155 - protein, 9 aa, Homo sapiens
  misc_feature: Table A; Target 78155; HLA-B*37:01; SLC45A2; ENSG00000164175; TAA
AQILVGGGL

SEQ ID NO: 78156 - protein, 9 aa, Homo sapiens
  misc_feature: Table A; Target 78156; HLA-B*38:01; SLC45A2; ENSG00000164175; TAA
AQILVGGGL

SEQ ID NO: 78157 - protein, 9 aa, Homo sapiens
  misc_feature: Table A; Target 78157; HLA-B*39:01; SLC45A2; ENSG00000164175; TAA
AQILVGGGL

SEQ ID NO: 78158 - protein, 9 aa, Homo sapiens
  misc_feature: Table A; Target 78158; HLA-B*40:01; SLC45A2; ENSG00000164175; TAA
AQILVGGGL

SEQ ID NO: 78159 - protein, 9 aa, Homo sapiens
  misc_feature: Table A; Target 78159; HLA-B*40:02; SLC45A2; ENSG00000164175; TAA
AQILVGGGL

SEQ ID NO: 78160 - protein, 9 aa, Homo sapiens
  misc_feature: Table A; Target 78160; HLA-B*44:02; SLC45A2; ENSG00000164175; TAA
AQILVGGGL

SEQ ID NO: 78161 - protein, 9 aa, Homo sapiens
  misc_feature: Table A; Target 78161; HLA-B*44:03; SLC45A2; ENSG00000164175; TAA
AQILVGGGL

SEQ ID NO: 78162 - protein, 9 aa, Homo sapiens
  misc_feature: Table A; Target 78162; HLA-C*03:03; SLC45A2; ENSG00000164175; TAA
AQILVGGGL

SEQ ID NO: 78163 - protein, 9 aa, Homo sapiens
  misc_feature: Table A; Target 78163; HLA-C*03:04; SLC45A2; ENSG00000164175; TAA
AQILVGGGL

SEQ ID NO: 78164 - protein, 9 aa, Homo sapiens
  misc_feature: Table A; Target 78164; HLA-C*16:04; SLC45A2; ENSG00000164175; TAA
AQILVGGGL

SEQ ID NO: 78165 - protein, 11 aa, Homo sapiens
  misc_feature: Table A; Target 78165; HLA-A*23:01; SLC45A2; ENSG00000164175; TAA
AQILVGGGLGF

SEQ ID NO: 78166 - protein, 11 aa, Homo sapiens
  misc_feature: Table A; Target 78166; HLA-A*24:02; SLC45A2; ENSG00000164175; TAA
AQILVGGGLGF

SEQ ID NO: 78167 - protein, 11 aa, Homo sapiens
  misc_feature: Table A; Target 78167; HLA-A*26:01; SLC45A2; ENSG00000164175; TAA
AQILVGGGLGF

SEQ ID NO: 78168 - protein, 11 aa, Homo sapiens
  misc_feature: Table A; Target 78168; HLA-A*32:01; SLC45A2; ENSG00000164175; TAA
AQILVGGGLGF

SEQ ID NO: 78169 - protein, 11 aa, Homo sapiens
  misc_feature: Table A; Target 78169; HLA-B*13:02; SLC45A2; ENSG00000164175; TAA
AQILVGGGLGF

SEQ ID NO: 78170 - protein, 11 aa, Homo sapiens
  misc_feature: Table A; Target 78170; HLA-B*15:01; SLC45A2; ENSG00000164175; TAA
AQILVGGGLGF

SEQ ID NO: 78171 - protein, 11 aa, Homo sapiens
  misc_feature: Table A; Target 78171; HLA-B*15:03; SLC45A2; ENSG00000164175; TAA
AQILVGGGLGF

SEQ ID NO: 78172 - protein, 11 aa, Homo sapiens
  misc_feature: Table A; Target 78172; HLA-B*27:02; SLC45A2; ENSG00000164175; TAA
AQILVGGGLGF

SEQ ID NO: 78173 - protein, 11 aa, Homo sapiens
  misc_feature: Table A; Target 78173; HLA-B*27:05; SLC45A2; ENSG00000164175; TAA
AQILVGGGLGF

SEQ ID NO: 78174 - protein, 11 aa, Homo sapiens
  misc_feature: Table A; Target 78174; HLA-B*38:01; SLC45A2; ENSG00000164175; TAA
AQILVGGGLGF

SEQ ID NO: 78175 - protein, 11 aa, Homo sapiens
  misc_feature: Table A; Target 78175; HLA-B*39:01; SLC45A2; ENSG00000164175; TAA
AQILVGGGLGF

SEQ ID NO: 78176 - protein, 11 aa, Homo sapiens
  misc_feature: Table A; Target 78176; HLA-B*44:02; SLC45A2; ENSG00000164175; TAA
AQILVGGGLGF

SEQ ID NO: 78177 - protein, 11 aa, Homo sapiens
  misc_feature: Table A; Target 78177; HLA-B*44:03; SLC45A2; ENSG00000164175; TAA
AQILVGGGLGF

SEQ ID NO: 78178 - protein, 11 aa, Homo sapiens
  misc_feature: Table A; Target 78178; HLA-B*58:01; SLC45A2; ENSG00000164175; TAA
AQILVGGGLGF

SEQ ID NO: 78179 - protein, 11 aa, Homo sapiens
  misc_feature: Table A; Target 78179; HLA-C*04:01; SLC45A2; ENSG00000164175; TAA
AQILVGGGLGF

SEQ ID NO: 78180 - protein, 11 aa, Homo sapiens
  misc_feature: Table A; Target 78180; HLA-C*07:04; SLC45A2; ENSG00000164175; TAA
AQILVGGGLGF

SEQ ID NO: 78181 - protein, 11 aa, Homo sapiens
  misc_feature: Table A; Target 78181; HLA-C*16:04; SLC45A2; ENSG00000164175; TAA
AQILVGGGLGF

SEQ ID NO: 78182 - protein, 9 aa, Homo sapiens
  misc_feature: Table A; Target 78182; HLA-A*11:01; SLC45A2; ENSG00000164175; TAA
ATLTCMVQL

SEQ ID NO: 78183 - protein, 9 aa, Homo sapiens
  misc_feature: Table A; Target 78183; HLA-A*23:01; SLC45A2; ENSG00000164175; TAA
ATLTCMVQL

SEQ ID NO: 78184 - protein, 8 aa, Homo sapiens
  misc_feature: Table A; Target 78184; HLA-A*23:01; SLC45A2; ENSG00000164175; TAA
ATVVAALI

SEQ ID NO: 78185 - protein, 8 aa, Homo sapiens
  misc_feature: Table A; Target 78185; HLA-C*04:01; SLC45A2; ENSG00000164175; TAA
ATVVAALI

SEQ ID NO: 78186 - protein, 9 aa, Homo sapiens
  misc_feature: Table A; Target 78186; HLA-A*30:02; SLC45A2; ENSG00000164175; TAA
AVALIGCCF

SEQ ID NO: 78187 - protein, 9 aa, Homo sapiens
  misc_feature: Table A; Target 78187; HLA-B*15:01; SLC45A2; ENSG00000164175; TAA
AVALIGCCF

SEQ ID NO: 78188 - protein, 8 aa, Homo sapiens
  misc_feature: Table A; Target 78188; HLA-A*23:01; SLC45A2; ENSG00000164175; TAA
AYVTPVLL

SEQ ID NO: 78189 - protein, 8 aa, Homo sapiens
  misc_feature: Table A; Target 78189; HLA-A*24:02; SLC45A2; ENSG00000164175; TAA
AYVTPVLL

SEQ ID NO: 78190 - protein, 8 aa, Homo sapiens
  misc_feature: Table A; Target 78190; HLA-C*04:01; SLC45A2; ENSG00000164175; TAA
AYVTPVLL

SEQ ID NO: 78191 - protein, 8 aa, Homo sapiens
  misc_feature: Table A; Target 78191; HLA-C*07:04; SLC45A2; ENSG00000164175; TAA
AYVTPVLL

SEQ ID NO: 78192 - protein, 8 aa, Homo sapiens
  misc_feature: Table A; Target 78192; HLA-C*14:02; SLC45A2; ENSG00000164175; TAA
AYVTPVLL

SEQ ID NO: 78193 - protein, 10 aa, Homo sapiens
  misc_feature: Table A; Target 78193; HLA-A*23:01; SLC45A2; ENSG00000164175; TAA
AYVTPVLLSV

SEQ ID NO: 78194 - protein, 10 aa, Homo sapiens
  misc_feature: Table A; Target 78194; HLA-A*24:02; SLC45A2; ENSG00000164175; TAA
AYVTPVLLSV

SEQ ID NO: 78195 - protein, 10 aa, Homo sapiens
  misc_feature: Table A; Target 78195; HLA-A*29:02; SLC45A2; ENSG00000164175; TAA
AYVTPVLLSV

SEQ ID NO: 78196 - protein, 9 aa, Homo sapiens
  misc_feature: Table A; Target 78196; HLA-A*29:02; SLC45A2; ENSG00000164175; TAA
CFVALFVRY

SEQ ID NO: 78197 - protein, 9 aa, Homo sapiens
  misc_feature: Table A; Target 78197; HLA-A*03:01; SLC45A2; ENSG00000164175; TAA
CINSVFSSL

SEQ ID NO: 78198 - protein, 9 aa, Homo sapiens
  misc_feature: Table A; Target 78198; HLA-A*25:01; SLC45A2; ENSG00000164175; TAA
CINSVFSSL

SEQ ID NO: 78199 - protein, 9 aa, Homo sapiens
  misc_feature: Table A; Target 78199; HLA-A*31:01; SLC45A2; ENSG00000164175; TAA
CINSVFSSL

SEQ ID NO: 78200 - protein, 9 aa, Homo sapiens
  misc_feature: Table A; Target 78200; HLA-A*32:01; SLC45A2; ENSG00000164175; TAA
CINSVFSSL

SEQ ID NO: 78201 - protein, 9 aa, Homo sapiens
  misc_feature: Table A; Target 78201; HLA-B*07:02; SLC45A2; ENSG00000164175; TAA
CINSVFSSL

SEQ ID NO: 78202 - protein, 9 aa, Homo sapiens
  misc_feature: Table A; Target 78202; HLA-B*15:01; SLC45A2; ENSG00000164175; TAA
CINSVFSSL

SEQ ID NO: 78203 - protein, 9 aa, Homo sapiens
  misc_feature: Table A; Target 78203; HLA-B*15:03; SLC45A2; ENSG00000164175; TAA
CINSVFSSL

SEQ ID NO: 78204 - protein, 9 aa, Homo sapiens
  misc_feature: Table A; Target 78204; HLA-B*46:01; SLC45A2; ENSG00000164175; TAA
CINSVFSSL

SEQ ID NO: 78205 - protein, 9 aa, Homo sapiens
  misc_feature: Table A; Target 78205; HLA-C*01:02; SLC45A2; ENSG00000164175; TAA
CINSVFSSL

SEQ ID NO: 78206 - protein, 9 aa, Homo sapiens
  misc_feature: Table A; Target 78206; HLA-C*02:02; SLC45A2; ENSG00000164175; TAA
CINSVFSSL

SEQ ID NO: 78207 - protein, 9 aa, Homo sapiens
  misc_feature: Table A; Target 78207; HLA-C*03:03; SLC45A2; ENSG00000164175; TAA
CINSVFSSL

SEQ ID NO: 78208 - protein, 9 aa, Homo sapiens
  misc_feature: Table A; Target 78208; HLA-C*03:04; SLC45A2; ENSG00000164175; TAA
CINSVFSSL

SEQ ID NO: 78209 - protein, 9 aa, Homo sapiens
  misc_feature: Table A; Target 78209; HLA-C*07:02; SLC45A2; ENSG00000164175; TAA
CINSVFSSL

SEQ ID NO: 78210 - protein, 9 aa, Homo sapiens
  misc_feature: Table A; Target 78210; HLA-C*14:02; SLC45A2; ENSG00000164175; TAA
CINSVFSSL

SEQ ID NO: 78211 - protein, 9 aa, Homo sapiens
  misc_feature: Table A; Target 78211; HLA-C*16:04; SLC45A2; ENSG00000164175; TAA
CINSVFSSL

SEQ ID NO: 78212 - protein, 10 aa, Homo sapiens
  misc_feature: Table A; Target 78212; HLA-A*30:02; SLC45A2; ENSG00000164175; TAA
CINSVFSSLY

SEQ ID NO: 78213 - protein, 8 aa, Homo sapiens
  misc_feature: Table A; Target 78213; HLA-C*14:02; SLC45A2; ENSG00000164175; TAA
CYAVEAAY

SEQ ID NO: 78214 - protein, 9 aa, Homo sapiens
  misc_feature: Table A; Target 78214; HLA-B*51:01; SLC45A2; ENSG00000164175; TAA
DCATLTCMV

SEQ ID NO: 78215 - protein, 8 aa, Homo sapiens
  misc_feature: Table A; Target 78215; HLA-B*18:01; SLC45A2; ENSG00000164175; TAA
DDGPFDSV

SEQ ID NO: 78216 - protein, 10 aa, Homo sapiens
  misc_feature: Table A; Target 78216; HLA-A*23:01; SLC45A2; ENSG00000164175; TAA
DFIDGPIKAY

SEQ ID NO: 78217 - protein, 10 aa, Homo sapiens
  misc_feature: Table A; Target 78217; HLA-A*25:01; SLC45A2; ENSG00000164175; TAA
DFIDGPIKAY

SEQ ID NO: 78218 - protein, 10 aa, Homo sapiens
  misc_feature: Table A; Target 78218; HLA-A*26:01; SLC45A2; ENSG00000164175; TAA
DFIDGPIKAY

SEQ ID NO: 78219 - protein, 10 aa, Homo sapiens
  misc_feature: Table A; Target 78219; HLA-A*29:02; SLC45A2; ENSG00000164175; TAA
DFIDGPIKAY

SEQ ID NO: 78220 - protein, 10 aa, Homo sapiens
  misc_feature: Table A; Target 78220; HLA-A*30:02; SLC45A2; ENSG00000164175; TAA
DFIDGPIKAY

SEQ ID NO: 78221 - protein, 10 aa, Homo sapiens
  misc_feature: Table A; Target 78221; HLA-A*33:01; SLC45A2; ENSG00000164175; TAA
DFIDGPIKAY

SEQ ID NO: 78222 - protein, 10 aa, Homo sapiens
  misc_feature: Table A; Target 78222; HLA-A*33:03; SLC45A2; ENSG00000164175; TAA
DFIDGPIKAY

SEQ ID NO: 78223 - protein, 10 aa, Homo sapiens
  misc_feature: Table A; Target 78223; HLA-B*18:01; SLC45A2; ENSG00000164175; TAA
DFIDGPIKAY

SEQ ID NO: 78224 - protein, 10 aa, Homo sapiens
  misc_feature: Table A; Target 78224; HLA-B*35:01; SLC45A2; ENSG00000164175; TAA
DFIDGPIKAY

SEQ ID NO: 78225 - protein, 10 aa, Homo sapiens
  misc_feature: Table A; Target 78225; HLA-B*44:02; SLC45A2; ENSG00000164175; TAA
DFIDGPIKAY

SEQ ID NO: 78226 - protein, 10 aa, Homo sapiens
  misc_feature: Table A; Target 78226; HLA-B*44:03; SLC45A2; ENSG00000164175; TAA
DFIDGPIKAY

SEQ ID NO: 78227 - protein, 10 aa, Homo sapiens
  misc_feature: Table A; Target 78227; HLA-C*14:02; SLC45A2; ENSG00000164175; TAA
DFIDGPIKAY

SEQ ID NO: 78228 - protein, 11 aa, Homo sapiens
  misc_feature: Table A; Target 78228; HLA-A*23:01; SLC45A2; ENSG00000164175; TAA
DFIDGPIKAYL

SEQ ID NO: 78229 - protein, 8 aa, Homo sapiens
  misc_feature: Table A; Target 78229; HLA-B*15:03; SLC45A2; ENSG00000164175; TAA
DFMGQIVY

SEQ ID NO: 78230 - protein, 8 aa, Homo sapiens
  misc_feature: Table A; Target 78230; HLA-B*18:01; SLC45A2; ENSG00000164175; TAA
DFMGQIVY

SEQ ID NO: 78231 - protein, 8 aa, Homo sapiens
  misc_feature: Table A; Target 78231; HLA-B*35:01; SLC45A2; ENSG00000164175; TAA
DFMGQIVY

SEQ ID NO: 78232 - protein, 8 aa, Homo sapiens
  misc_feature: Table A; Target 78232; HLA-C*07:01; SLC45A2; ENSG00000164175; TAA
DFMGQIVY

SEQ ID NO: 78233 - protein, 9 aa, Homo sapiens
  misc_feature: Table A; Target 78233; HLA-A*31:01; SLC45A2; ENSG00000164175; TAA
DFMGQIVYR

SEQ ID NO: 78234 - protein, 9 aa, Homo sapiens
  misc_feature: Table A; Target 78234; HLA-A*33:01; SLC45A2; ENSG00000164175; TAA
DFMGQIVYR

SEQ ID NO: 78235 - protein, 9 aa, Homo sapiens
  misc_feature: Table A; Target 78235; HLA-A*33:03; SLC45A2; ENSG00000164175; TAA
DFMGQIVYR

SEQ ID NO: 78236 - protein, 9 aa, Homo sapiens
  misc_feature: Table A; Target 78236; HLA-A*68:01; SLC45A2; ENSG00000164175; TAA
DFMGQIVYR

SEQ ID NO: 78237 - protein, 9 aa, Homo sapiens
  misc_feature: Table A; Target 78237; HLA-C*07:06; SLC45A2; ENSG00000164175; TAA
DFMGQIVYR

SEQ ID NO: 78238 - protein, 9 aa, Homo sapiens
  misc_feature: Table A; Target 78238; HLA-B*51:01; SLC45A2; ENSG00000164175; TAA
DGMYEYGSI

SEQ ID NO: 78239 - protein, 11 aa, Homo sapiens
  misc_feature: Table A; Target 78239; HLA-A*11:01; SLC45A2; ENSG00000164175; TAA
DGMYEYGSIEK

SEQ ID NO: 78240 - protein, 11 aa, Homo sapiens
  misc_feature: Table A; Target 78240; HLA-B*27:02; SLC45A2; ENSG00000164175; TAA
DGMYEYGSIEK

SEQ ID NO: 78241 - protein, 11 aa, Homo sapiens
  misc_feature: Table A; Target 78241; HLA-A*11:01; SLC45A2; ENSG00000164175; TAA
DGPFDSVEPPK

SEQ ID NO: 78242 - protein, 11 aa, Homo sapiens
  misc_feature: Table A; Target 78242; HLA-A*33:01; SLC45A2; ENSG00000164175; TAA
DGPFDSVEPPK

SEQ ID NO: 78243 - protein, 11 aa, Homo sapiens
  misc_feature: Table A; Target 78243; HLA-A*68:01; SLC45A2; ENSG00000164175; TAA
DGPFDSVEPPK

SEQ ID NO: 78244 - protein, 11 aa, Homo sapiens
  misc_feature: Table A; Target 78244; HLA-B*27:02; SLC45A2; ENSG00000164175; TAA
DGPFDSVEPPK

SEQ ID NO: 78245 - protein, 8 aa, Homo sapiens
  misc_feature: Table A; Target 78245; HLA-B*08:01; SLC45A2; ENSG00000164175; TAA
DGPIKAYL

SEQ ID NO: 78246 - protein, 8 aa, Homo sapiens
  misc_feature: Table A; Target 78246; HLA-B*51:01; SLC45A2; ENSG00000164175; TAA
DGPIKAYL

SEQ ID NO: 78247 - protein, 9 aa, Homo sapiens
  misc_feature: Table A; Target 78247; HLA-B*08:01; SLC45A2; ENSG00000164175; TAA
DGPIKAYLF

SEQ ID NO: 78248 - protein, 8 aa, Homo sapiens
  misc_feature: Table A; Target 78248; HLA-B*51:01; SLC45A2; ENSG00000164175; TAA
DPYSAHNS

SEQ ID NO: 78249 - protein, 9 aa, Homo sapiens
  misc_feature: Table A; Target 78249; HLA-B*51:01; SLC45A2; ENSG00000164175; TAA
DPYSAHNST

SEQ ID NO: 78250 - protein, 11 aa, Homo sapiens
  misc_feature: Table A; Target 78250; HLA-A*25:01; SLC45A2; ENSG00000164175; TAA
DPYSAHNSTEF

SEQ ID NO: 78251 - protein, 11 aa, Homo sapiens
  misc_feature: Table A; Target 78251; HLA-A*26:01; SLC45A2; ENSG00000164175; TAA
DPYSAHNSTEF

SEQ ID NO: 78252 - protein, 11 aa, Homo sapiens
  misc_feature: Table A; Target 78252; HLA-B*07:02; SLC45A2; ENSG00000164175; TAA
DPYSAHNSTEF

SEQ ID NO: 78253 - protein, 11 aa, Homo sapiens
  misc_feature: Table A; Target 78253; HLA-B*35:01; SLC45A2; ENSG00000164175; TAA
DPYSAHNSTEF

SEQ ID NO: 78254 - protein, 11 aa, Homo sapiens
  misc_feature: Table A; Target 78254; HLA-B*35:03; SLC45A2; ENSG00000164175; TAA
DPYSAHNSTEF

SEQ ID NO: 78255 - protein, 9 aa, Homo sapiens
  misc_feature: Table A; Target 78255; HLA-A*23:01; SLC45A2; ENSG00000164175; TAA
EAAYVTPVL

SEQ ID NO: 78256 - protein, 9 aa, Homo sapiens
  misc_feature: Table A; Target 78256; HLA-A*25:01; SLC45A2; ENSG00000164175; TAA
EAAYVTPVL

SEQ ID NO: 78257 - protein, 9 aa, Homo sapiens
  misc_feature: Table A; Target 78257; HLA-A*26:01; SLC45A2; ENSG00000164175; TAA
EAAYVTPVL

SEQ ID NO: 78258 - protein, 9 aa, Homo sapiens
  misc_feature: Table A; Target 78258; HLA-A*30:01; SLC45A2; ENSG00000164175; TAA
EAAYVTPVL

SEQ ID NO: 78259 - protein, 9 aa, Homo sapiens
  misc_feature: Table A; Target 78259; HLA-A*33:01; SLC45A2; ENSG00000164175; TAA
EAAYVTPVL

SEQ ID NO: 78260 - protein, 9 aa, Homo sapiens
  misc_feature: Table A; Target 78260; HLA-A*33:03; SLC45A2; ENSG00000164175; TAA
EAAYVTPVL

SEQ ID NO: 78261 - protein, 9 aa, Homo sapiens
  misc_feature: Table A; Target 78261; HLA-A*68:01; SLC45A2; ENSG00000164175; TAA
EAAYVTPVL

SEQ ID NO: 78262 - protein, 9 aa, Homo sapiens
  misc_feature: Table A; Target 78262; HLA-A*68:02; SLC45A2; ENSG00000164175; TAA
EAAYVTPVL

SEQ ID NO: 78263 - protein, 9 aa, Homo sapiens
  misc_feature: Table A; Target 78263; HLA-B*18:01; SLC45A2; ENSG00000164175; TAA
EAAYVTPVL

SEQ ID NO: 78264 - protein, 9 aa, Homo sapiens
  misc_feature: Table A; Target 78264; HLA-B*27:05; SLC45A2; ENSG00000164175; TAA
EAAYVTPVL

SEQ ID NO: 78265 - protein, 9 aa, Homo sapiens
  misc_feature: Table A; Target 78265; HLA-B*35:01; SLC45A2; ENSG00000164175; TAA
EAAYVTPVL

SEQ ID NO: 78266 - protein, 9 aa, Homo sapiens
  misc_feature: Table A; Target 78266; HLA-B*35:03; SLC45A2; ENSG00000164175; TAA
EAAYVTPVL

SEQ ID NO: 78267 - protein, 9 aa, Homo sapiens
  misc_feature: Table A; Target 78267; HLA-B*38:01; SLC45A2; ENSG00000164175; TAA
EAAYVTPVL

SEQ ID NO: 78268 - protein, 9 aa, Homo sapiens
  misc_feature: Table A; Target 78268; HLA-B*39:01; SLC45A2; ENSG00000164175; TAA
EAAYVTPVL

SEQ ID NO: 78269 - protein, 9 aa, Homo sapiens
  misc_feature: Table A; Target 78269; HLA-B*40:01; SLC45A2; ENSG00000164175; TAA
EAAYVTPVL

SEQ ID NO: 78270 - protein, 9 aa, Homo sapiens
  misc_feature: Table A; Target 78270; HLA-B*51:01; SLC45A2; ENSG00000164175; TAA
EAAYVTPVL

SEQ ID NO: 78271 - protein, 9 aa, Homo sapiens
  misc_feature: Table A; Target 78271; HLA-B*54:01; SLC45A2; ENSG00000164175; TAA
EAAYVTPVL

SEQ ID NO: 78272 - protein, 9 aa, Homo sapiens
  misc_feature: Table A; Target 78272; HLA-C*02:02; SLC45A2; ENSG00000164175; TAA
EAAYVTPVL

SEQ ID NO: 78273 - protein, 9 aa, Homo sapiens
  misc_feature: Table A; Target 78273; HLA-C*03:03; SLC45A2; ENSG00000164175; TAA
EAAYVTPVL

SEQ ID NO: 78274 - protein, 9 aa, Homo sapiens
  misc_feature: Table A; Target 78274; HLA-C*03:04; SLC45A2; ENSG00000164175; TAA
EAAYVTPVL

SEQ ID NO: 78275 - protein, 9 aa, Homo sapiens
  misc_feature: Table A; Target 78275; HLA-C*07:06; SLC45A2; ENSG00000164175; TAA
EAAYVTPVL

SEQ ID NO: 78276 - protein, 9 aa, Homo sapiens
  misc_feature: Table A; Target 78276; HLA-C*12:03; SLC45A2; ENSG00000164175; TAA
EAAYVTPVL

SEQ ID NO: 78277 - protein, 9 aa, Homo sapiens
  misc_feature: Table A; Target 78277; HLA-C*16:04; SLC45A2; ENSG00000164175; TAA
EAAYVTPVL

SEQ ID NO: 78278 - protein, 10 aa, Homo sapiens
  misc_feature: Table A; Target 78278; HLA-A*33:03; SLC45A2; ENSG00000164175; TAA
EAAYVTPVLL

SEQ ID NO: 78279 - protein, 10 aa, Homo sapiens
  misc_feature: Table A; Target 78279; HLA-A*68:01; SLC45A2; ENSG00000164175; TAA
EAAYVTPVLL

SEQ ID NO: 78280 - protein, 10 aa, Homo sapiens
  misc_feature: Table A; Target 78280; HLA-A*68:02; SLC45A2; ENSG00000164175; TAA
EAAYVTPVLL

SEQ ID NO: 78281 - protein, 10 aa, Homo sapiens
  misc_feature: Table A; Target 78281; HLA-B*35:03; SLC45A2; ENSG00000164175; TAA
EAAYVTPVLL

SEQ ID NO: 78282 - protein, 10 aa, Homo sapiens
  misc_feature: Table A; Target 78282; HLA-C*07:02; SLC45A2; ENSG00000164175; TAA
EAAYVTPVLL

SEQ ID NO: 78283 - protein, 10 aa, Homo sapiens
  misc_feature: Table A; Target 78283; HLA-C*07:06; SLC45A2; ENSG00000164175; TAA
EAAYVTPVLL

SEQ ID NO: 78284 - protein, 8 aa, Homo sapiens
  misc_feature: Table A; Target 78284; HLA-B*51:01; SLC45A2; ENSG00000164175; TAA
EAPLTEVA

SEQ ID NO: 78285 - protein, 9 aa, Homo sapiens
  misc_feature: Table A; Target 78285; HLA-A*33:03; SLC45A2; ENSG00000164175; TAA
EAPLTEVAK

SEQ ID NO: 78286 - protein, 9 aa, Homo sapiens
  misc_feature: Table A; Target 78286; HLA-A*68:01; SLC45A2; ENSG00000164175; TAA
EAPLTEVAK

SEQ ID NO: 78287 - protein, 9 aa, Homo sapiens
  misc_feature: Table A; Target 78287; HLA-C*01:02; SLC45A2; ENSG00000164175; TAA
EAPLTEVAK

SEQ ID NO: 78288 - protein, 9 aa, Homo sapiens
  misc_feature: Table A; Target 78288; HLA-C*07:06; SLC45A2; ENSG00000164175; TAA
EAPLTEVAK

SEQ ID NO: 78289 - protein, 9 aa, Homo sapiens
  misc_feature: Table A; Target 78289; HLA-A*25:01; SLC45A2; ENSG00000164175; TAA
EQTRRAMTL

SEQ ID NO: 78290 - protein, 9 aa, Homo sapiens
  misc_feature: Table A; Target 78290; HLA-B*08:01; SLC45A2; ENSG00000164175; TAA
EQTRRAMTL

SEQ ID NO: 78291 - protein, 9 aa, Homo sapiens
  misc_feature: Table A; Target 78291; HLA-A*26:01; SLC45A2; ENSG00000164175; TAA
EVAKGIPPQ

SEQ ID NO: 78292 - protein, 10 aa, Homo sapiens
  misc_feature: Table A; Target 78292; HLA-A*26:01; SLC45A2; ENSG00000164175; TAA
EVAKGIPPQQ

SEQ ID NO: 78293 - protein, 10 aa, Homo sapiens
  misc_feature: Table A; Target 78293; HLA-A*68:01; SLC45A2; ENSG00000164175; TAA
EVAKGIPPQQ

SEQ ID NO: 78294 - protein, 8 aa, Homo sapiens
  misc_feature: Table A; Target 78294; HLA-A*24:02; SLC45A2; ENSG00000164175; TAA
EYGSIEKV

SEQ ID NO: 78295 - protein, 8 aa, Homo sapiens
  misc_feature: Table A; Target 78295; HLA-C*07:01; SLC45A2; ENSG00000164175; TAA
EYGSIEKV

SEQ ID NO: 78296 - protein, 9 aa, Homo sapiens
  misc_feature: Table A; Target 78296; HLA-A*33:01; SLC45A2; ENSG00000164175; TAA
EYGSIEKVK

SEQ ID NO: 78297 - protein, 9 aa, Homo sapiens
  misc_feature: Table A; Target 78297; HLA-A*33:03; SLC45A2; ENSG00000164175; TAA
EYGSIEKVK

SEQ ID NO: 78298 - protein, 10 aa, Homo sapiens
  misc_feature: Table A; Target 78298; HLA-A*68:02; SLC45A2; ENSG00000164175; TAA
FAADFIDGPI

SEQ ID NO: 78299 - protein, 10 aa, Homo sapiens
  misc_feature: Table A; Target 78299; HLA-B*27:02; SLC45A2; ENSG00000164175; TAA
FAADFIDGPI

SEQ ID NO: 78300 - protein, 11 aa, Homo sapiens
  misc_feature: Table A; Target 78300; HLA-A*68:01; SLC45A2; ENSG00000164175; TAA
FAADFIDGPIK

SEQ ID NO: 78301 - protein, 11 aa, Homo sapiens
  misc_feature: Table A; Target 78301; HLA-B*27:02; SLC45A2; ENSG00000164175; TAA
FAADFIDGPIK

SEQ ID NO: 78302 - protein, 9 aa, Homo sapiens
  misc_feature: Table A; Target 78302; HLA-A*29:02; SLC45A2; ENSG00000164175; TAA
FCYAVEAAY

SEQ ID NO: 78303 - protein, 9 aa, Homo sapiens
  misc_feature: Table A; Target 78303; HLA-B*15:03; SLC45A2; ENSG00000164175; TAA
FCYAVEAAY

SEQ ID NO: 78304 - protein, 9 aa, Homo sapiens
  misc_feature: Table A; Target 78304; HLA-B*46:01; SLC45A2; ENSG00000164175; TAA
FCYAVEAAY

SEQ ID NO: 78305 - protein, 9 aa, Homo sapiens
  misc_feature: Table A; Target 78305; HLA-C*16:04; SLC45A2; ENSG00000164175; TAA
FCYAVEAAY

SEQ ID NO: 78306 - protein, 8 aa, Homo sapiens
  misc_feature: Table A; Target 78306; HLA-B*27:02; SLC45A2; ENSG00000164175; TAA
FDSVEPPK

SEQ ID NO: 78307 - protein, 10 aa, Homo sapiens
  misc_feature: Table A; Target 78307; HLA-A*29:02; SLC45A2; ENSG00000164175; TAA
FFFSALVLTL

SEQ ID NO: 78308 - protein, 9 aa, Homo sapiens
  misc_feature: Table A; Target 78308; HLA-A*23:01; SLC45A2; ENSG00000164175; TAA
FFSALVLTL

SEQ ID NO: 78309 - protein, 9 aa, Homo sapiens
  misc_feature: Table A; Target 78309; HLA-A*24:02; SLC45A2; ENSG00000164175; TAA
FFSALVLTL

SEQ ID NO: 78310 - protein, 9 aa, Homo sapiens
  misc_feature: Table A; Target 78310; HLA-A*29:02; SLC45A2; ENSG00000164175; TAA
FFSALVLTL

SEQ ID NO: 78311 - protein, 9 aa, Homo sapiens
  misc_feature: Table A; Target 78311; HLA-B*35:03; SLC45A2; ENSG00000164175; TAA
FFSALVLTL

SEQ ID NO: 78312 - protein, 9 aa, Homo sapiens
  misc_feature: Table A; Target 78312; HLA-C*01:02; SLC45A2; ENSG00000164175; TAA
FFSALVLTL

SEQ ID NO: 78313 - protein, 9 aa, Homo sapiens
  misc_feature: Table A; Target 78313; HLA-C*12:03; SLC45A2; ENSG00000164175; TAA
FFSALVLTL

SEQ ID NO: 78314 - protein, 9 aa, Homo sapiens
  misc_feature: Table A; Target 78314; HLA-C*14:02; SLC45A2; ENSG00000164175; TAA
FFSALVLTL

SEQ ID NO: 78315 - protein, 9 aa, Homo sapiens
  misc_feature: Table A; Target 78315; HLA-A*23:01; SLC45A2; ENSG00000164175; TAA
FFTDFMGQI

SEQ ID NO: 78316 - protein, 11 aa, Homo sapiens
  misc_feature: Table A; Target 78316; HLA-A*29:02; SLC45A2; ENSG00000164175; TAA
FFTDFMGQIVY

SEQ ID NO: 78317 - protein, 8 aa, Homo sapiens
  misc_feature: Table A; Target 78317; HLA-B*08:01; SLC45A2; ENSG00000164175; TAA
FGVMSSTL

SEQ ID NO: 78318 - protein, 8 aa, Homo sapiens
  misc_feature: Table A; Target 78318; HLA-B*15:03; SLC45A2; ENSG00000164175; TAA
FGVMSSTL

SEQ ID NO: 78319 - protein, 8 aa, Homo sapiens
  misc_feature: Table A; Target 78319; HLA-B*35:03; SLC45A2; ENSG00000164175; TAA
FGVMSSTL

SEQ ID NO: 78320 - protein, 8 aa, Homo sapiens
  misc_feature: Table A; Target 78320; HLA-B*40:02; SLC45A2; ENSG00000164175; TAA
FGVMSSTL

SEQ ID NO: 78321 - protein, 8 aa, Homo sapiens
  misc_feature: Table A; Target 78321; HLA-B*46:01; SLC45A2; ENSG00000164175; TAA
FGVMSSTL

SEQ ID NO: 78322 - protein, 8 aa, Homo sapiens
  misc_feature: Table A; Target 78322; HLA-C*01:02; SLC45A2; ENSG00000164175; TAA
FGVMSSTL

SEQ ID NO: 78323 - protein, 8 aa, Homo sapiens
  misc_feature: Table A; Target 78323; HLA-C*03:03; SLC45A2; ENSG00000164175; TAA
FGVMSSTL

SEQ ID NO: 78324 - protein, 8 aa, Homo sapiens
  misc_feature: Table A; Target 78324; HLA-C*03:04; SLC45A2; ENSG00000164175; TAA
FGVMSSTL

SEQ ID NO: 78325 - protein, 8 aa, Homo sapiens
  misc_feature: Table A; Target 78325; HLA-C*05:01; SLC45A2; ENSG00000164175; TAA
FGVMSSTL

SEQ ID NO: 78326 - protein, 8 aa, Homo sapiens
  misc_feature: Table A; Target 78326; HLA-C*07:02; SLC45A2; ENSG00000164175; TAA
FGVMSSTL

SEQ ID NO: 78327 - protein, 8 aa, Homo sapiens
  misc_feature: Table A; Target 78327; HLA-C*07:04; SLC45A2; ENSG00000164175; TAA
FGVMSSTL

SEQ ID NO: 78328 - protein, 8 aa, Homo sapiens
  misc_feature: Table A; Target 78328; HLA-C*12:03; SLC45A2; ENSG00000164175; TAA
FGVMSSTL

SEQ ID NO: 78329 - protein, 8 aa, Homo sapiens
  misc_feature: Table A; Target 78329; HLA-C*14:02; SLC45A2; ENSG00000164175; TAA
FGVMSSTL

SEQ ID NO: 78330 - protein, 8 aa, Homo sapiens
  misc_feature: Table A; Target 78330; HLA-C*16:01; SLC45A2; ENSG00000164175; TAA
FGVMSSTL

SEQ ID NO: 78331 - protein, 9 aa, Homo sapiens
  misc_feature: Table A; Target 78331; HLA-A*01:01; SLC45A2; ENSG00000164175; TAA
FGVMSSTLY

SEQ ID NO: 78332 - protein, 9 aa, Homo sapiens
  misc_feature: Table A; Target 78332; HLA-A*26:01; SLC45A2; ENSG00000164175; TAA
FGVMSSTLY

SEQ ID NO: 78333 - protein, 9 aa, Homo sapiens
  misc_feature: Table A; Target 78333; HLA-A*29:02; SLC45A2; ENSG00000164175; TAA
FGVMSSTLY

SEQ ID NO: 78334 - protein, 9 aa, Homo sapiens
  misc_feature: Table A; Target 78334; HLA-B*15:01; SLC45A2; ENSG00000164175; TAA
FGVMSSTLY

SEQ ID NO: 78335 - protein, 9 aa, Homo sapiens
  misc_feature: Table A; Target 78335; HLA-B*15:03; SLC45A2; ENSG00000164175; TAA
FGVMSSTLY

SEQ ID NO: 78336 - protein, 9 aa, Homo sapiens
  misc_feature: Table A; Target 78336; HLA-B*35:01; SLC45A2; ENSG00000164175; TAA
FGVMSSTLY

SEQ ID NO: 78337 - protein, 9 aa, Homo sapiens
  misc_feature: Table A; Target 78337; HLA-B*46:01; SLC45A2; ENSG00000164175; TAA
FGVMSSTLY

SEQ ID NO: 78338 - protein, 9 aa, Homo sapiens
  misc_feature: Table A; Target 78338; HLA-C*02:02; SLC45A2; ENSG00000164175; TAA
FGVMSSTLY

SEQ ID NO: 78339 - protein, 9 aa, Homo sapiens
  misc_feature: Table A; Target 78339; HLA-C*04:01; SLC45A2; ENSG00000164175; TAA
FGVMSSTLY

SEQ ID NO: 78340 - protein, 9 aa, Homo sapiens
  misc_feature: Table A; Target 78340; HLA-C*07:01; SLC45A2; ENSG00000164175; TAA
FGVMSSTLY

SEQ ID NO: 78341 - protein, 9 aa, Homo sapiens
  misc_feature: Table A; Target 78341; HLA-C*07:04; SLC45A2; ENSG00000164175; TAA
FGVMSSTLY

SEQ ID NO: 78342 - protein, 9 aa, Homo sapiens
  misc_feature: Table A; Target 78342; HLA-C*12:03; SLC45A2; ENSG00000164175; TAA
FGVMSSTLY

SEQ ID NO: 78343 - protein, 9 aa, Homo sapiens
  misc_feature: Table A; Target 78343; HLA-C*14:02; SLC45A2; ENSG00000164175; TAA
FGVMSSTLY

SEQ ID NO: 78344 - protein, 8 aa, Homo sapiens
  misc_feature: Table A; Target 78344; HLA-C*05:01; SLC45A2; ENSG00000164175; TAA
FIDGPIKA

SEQ ID NO: 78345 - protein, 9 aa, Homo sapiens
  misc_feature: Table A; Target 78345; HLA-A*01:01; SLC45A2; ENSG00000164175; TAA
FIDGPIKAY

SEQ ID NO: 78346 - protein, 9 aa, Homo sapiens
  misc_feature: Table A; Target 78346; HLA-A*02:07; SLC45A2; ENSG00000164175; TAA
FIDGPIKAY

SEQ ID NO: 78347 - protein, 9 aa, Homo sapiens
  misc_feature: Table A; Target 78347; HLA-A*03:01; SLC45A2; ENSG00000164175; TAA
FIDGPIKAY

SEQ ID NO: 78348 - protein, 9 aa, Homo sapiens
  misc_feature: Table A; Target 78348; HLA-A*03:02; SLC45A2; ENSG00000164175; TAA
FIDGPIKAY

SEQ ID NO: 78349 - protein, 9 aa, Homo sapiens
  misc_feature: Table A; Target 78349; HLA-A*11:01; SLC45A2; ENSG00000164175; TAA
FIDGPIKAY

SEQ ID NO: 78350 - protein, 9 aa, Homo sapiens
  misc_feature: Table A; Target 78350; HLA-A*25:01; SLC45A2; ENSG00000164175; TAA
FIDGPIKAY

SEQ ID NO: 78351 - protein, 9 aa, Homo sapiens
  misc_feature: Table A; Target 78351; HLA-A*26:01; SLC45A2; ENSG00000164175; TAA
FIDGPIKAY

SEQ ID NO: 78352 - protein, 9 aa, Homo sapiens
  misc_feature: Table A; Target 78352; HLA-A*29:02; SLC45A2; ENSG00000164175; TAA
FIDGPIKAY

SEQ ID NO: 78353 - protein, 9 aa, Homo sapiens
  misc_feature: Table A; Target 78353; HLA-A*30:02; SLC45A2; ENSG00000164175; TAA
FIDGPIKAY

SEQ ID NO: 78354 - protein, 9 aa, Homo sapiens
  misc_feature: Table A; Target 78354; HLA-A*31:01; SLC45A2; ENSG00000164175; TAA
FIDGPIKAY

SEQ ID NO: 78355 - protein, 9 aa, Homo sapiens
  misc_feature: Table A; Target 78355; HLA-A*32:01; SLC45A2; ENSG00000164175; TAA
FIDGPIKAY

SEQ ID NO: 78356 - protein, 9 aa, Homo sapiens
  misc_feature: Table A; Target 78356; HLA-A*33:01; SLC45A2; ENSG00000164175; TAA
FIDGPIKAY

SEQ ID NO: 78357 - protein, 9 aa, Homo sapiens
  misc_feature: Table A; Target 78357; HLA-B*08:01; SLC45A2; ENSG00000164175; TAA
FIDGPIKAY

SEQ ID NO: 78358 - protein, 9 aa, Homo sapiens
  misc_feature: Table A; Target 78358; HLA-B*15:01; SLC45A2; ENSG00000164175; TAA
FIDGPIKAY

SEQ ID NO: 78359 - protein, 9 aa, Homo sapiens
  misc_feature: Table A; Target 78359; HLA-B*15:03; SLC45A2; ENSG00000164175; TAA
FIDGPIKAY

SEQ ID NO: 78360 - protein, 9 aa, Homo sapiens
  misc_feature: Table A; Target 78360; HLA-B*18:01; SLC45A2; ENSG00000164175; TAA
FIDGPIKAY

SEQ ID NO: 78361 - protein, 9 aa, Homo sapiens
  misc_feature: Table A; Target 78361; HLA-B*35:01; SLC45A2; ENSG00000164175; TAA
FIDGPIKAY

SEQ ID NO: 78362 - protein, 9 aa, Homo sapiens
  misc_feature: Table A; Target 78362; HLA-B*39:01; SLC45A2; ENSG00000164175; TAA
FIDGPIKAY

SEQ ID NO: 78363 - protein, 9 aa, Homo sapiens
  misc_feature: Table A; Target 78363; HLA-B*40:01; SLC45A2; ENSG00000164175; TAA
FIDGPIKAY

SEQ ID NO: 78364 - protein, 9 aa, Homo sapiens
  misc_feature: Table A; Target 78364; HLA-B*44:02; SLC45A2; ENSG00000164175; TAA
FIDGPIKAY

SEQ ID NO: 78365 - protein, 9 aa, Homo sapiens
  misc_feature: Table A; Target 78365; HLA-B*44:03; SLC45A2; ENSG00000164175; TAA
FIDGPIKAY

SEQ ID NO: 78366 - protein, 9 aa, Homo sapiens
  misc_feature: Table A; Target 78366; HLA-B*46:01; SLC45A2; ENSG00000164175; TAA
FIDGPIKAY

SEQ ID NO: 78367 - protein, 9 aa, Homo sapiens
  misc_feature: Table A; Target 78367; HLA-B*54:01; SLC45A2; ENSG00000164175; TAA
FIDGPIKAY

SEQ ID NO: 78368 - protein, 9 aa, Homo sapiens
  misc_feature: Table A; Target 78368; HLA-B*55:01; SLC45A2; ENSG00000164175; TAA
FIDGPIKAY

SEQ ID NO: 78369 - protein, 9 aa, Homo sapiens
  misc_feature: Table A; Target 78369; HLA-B*57:01; SLC45A2; ENSG00000164175; TAA
FIDGPIKAY

SEQ ID NO: 78370 - protein, 9 aa, Homo sapiens
  misc_feature: Table A; Target 78370; HLA-B*58:01; SLC45A2; ENSG00000164175; TAA
FIDGPIKAY

SEQ ID NO: 78371 - protein, 9 aa, Homo sapiens
  misc_feature: Table A; Target 78371; HLA-C*01:02; SLC45A2; ENSG00000164175; TAA
FIDGPIKAY

SEQ ID NO: 78372 - protein, 9 aa, Homo sapiens
  misc_feature: Table A; Target 78372; HLA-C*02:02; SLC45A2; ENSG00000164175; TAA
FIDGPIKAY

SEQ ID NO: 78373 - protein, 9 aa, Homo sapiens
  misc_feature: Table A; Target 78373; HLA-C*03:03; SLC45A2; ENSG00000164175; TAA
FIDGPIKAY

SEQ ID NO: 78374 - protein, 9 aa, Homo sapiens
  misc_feature: Table A; Target 78374; HLA-C*03:04; SLC45A2; ENSG00000164175; TAA
FIDGPIKAY

SEQ ID NO: 78375 - protein, 9 aa, Homo sapiens
  misc_feature: Table A; Target 78375; HLA-C*04:01; SLC45A2; ENSG00000164175; TAA
FIDGPIKAY

SEQ ID NO: 78376 - protein, 9 aa, Homo sapiens
  misc_feature: Table A; Target 78376; HLA-C*05:01; SLC45A2; ENSG00000164175; TAA
FIDGPIKAY

SEQ ID NO: 78377 - protein, 9 aa, Homo sapiens
  misc_feature: Table A; Target 78377; HLA-C*07:04; SLC45A2; ENSG00000164175; TAA
FIDGPIKAY

SEQ ID NO: 78378 - protein, 9 aa, Homo sapiens
  misc_feature: Table A; Target 78378; HLA-C*12:03; SLC45A2; ENSG00000164175; TAA
FIDGPIKAY

SEQ ID NO: 78379 - protein, 9 aa, Homo sapiens
  misc_feature: Table A; Target 78379; HLA-C*14:02; SLC45A2; ENSG00000164175; TAA
FIDGPIKAY

SEQ ID NO: 78380 - protein, 9 aa, Homo sapiens
  misc_feature: Table A; Target 78380; HLA-C*16:01; SLC45A2; ENSG00000164175; TAA
FIDGPIKAY

SEQ ID NO: 78381 - protein, 9 aa, Homo sapiens
  misc_feature: Table A; Target 78381; HLA-C*16:02; SLC45A2; ENSG00000164175; TAA
FIDGPIKAY

SEQ ID NO: 78382 - protein, 9 aa, Homo sapiens
  misc_feature: Table A; Target 78382; HLA-C*16:04; SLC45A2; ENSG00000164175; TAA
FIDGPIKAY

SEQ ID NO: 78383 - protein, 10 aa, Homo sapiens
  misc_feature: Table A; Target 78383; HLA-A*01:01; SLC45A2; ENSG00000164175; TAA
FIDGPIKAYL

SEQ ID NO: 78384 - protein, 10 aa, Homo sapiens
  misc_feature: Table A; Target 78384; HLA-A*02:01; SLC45A2; ENSG00000164175; TAA
FIDGPIKAYL

SEQ ID NO: 78385 - protein, 10 aa, Homo sapiens
  misc_feature: Table A; Target 78385; HLA-A*02:03; SLC45A2; ENSG00000164175; TAA
FIDGPIKAYL

SEQ ID NO: 78386 - protein, 10 aa, Homo sapiens
  misc_feature: Table A; Target 78386; HLA-A*02:04; SLC45A2; ENSG00000164175; TAA
FIDGPIKAYL

SEQ ID NO: 78387 - protein, 10 aa, Homo sapiens
  misc_feature: Table A; Target 78387; HLA-A*02:07; SLC45A2; ENSG00000164175; TAA
FIDGPIKAYL

SEQ ID NO: 78388 - protein, 10 aa, Homo sapiens
  misc_feature: Table A; Target 78388; HLA-A*31:01; SLC45A2; ENSG00000164175; TAA
FIDGPIKAYL

SEQ ID NO: 78389 - protein, 10 aa, Homo sapiens
  misc_feature: Table A; Target 78389; HLA-A*68:02; SLC45A2; ENSG00000164175; TAA
FIDGPIKAYL

SEQ ID NO: 78390 - protein, 10 aa, Homo sapiens
  misc_feature: Table A; Target 78390; HLA-B*38:01; SLC45A2; ENSG00000164175; TAA
FIDGPIKAYL

SEQ ID NO: 78391 - protein, 10 aa, Homo sapiens
  misc_feature: Table A; Target 78391; HLA-C*05:01; SLC45A2; ENSG00000164175; TAA
FIDGPIKAYL

SEQ ID NO: 78392 - protein, 11 aa, Homo sapiens
  misc_feature: Table A; Target 78392; HLA-A*02:07; SLC45A2; ENSG00000164175; TAA
FIDGPIKAYLF

SEQ ID NO: 78393 - protein, 9 aa, Homo sapiens
  misc_feature: Table A; Target 78393; HLA-A*01:01; SLC45A2; ENSG00000164175; TAA
FIGLFPNVY

SEQ ID NO: 78394 - protein, 9 aa, Homo sapiens
  misc_feature: Table A; Target 78394; HLA-A*29:02; SLC45A2; ENSG00000164175; TAA
FIGLFPNVY

SEQ ID NO: 78395 - protein, 9 aa, Homo sapiens
  misc_feature: Table A; Target 78395; HLA-B*15:03; SLC45A2; ENSG00000164175; TAA
FIGLFPNVY

SEQ ID NO: 78396 - protein, 9 aa, Homo sapiens
  misc_feature: Table A; Target 78396; HLA-B*35:01; SLC45A2; ENSG00000164175; TAA
FIGLFPNVY

SEQ ID NO: 78397 - protein, 9 aa, Homo sapiens
  misc_feature: Table A; Target 78397; HLA-C*07:04; SLC45A2; ENSG00000164175; TAA
FIGLFPNVY

SEQ ID NO: 78398 - protein, 10 aa, Homo sapiens
  misc_feature: Table A; Target 78398; HLA-A*02:01; SLC45A2; ENSG00000164175; TAA
FLIYERGVEV

SEQ ID NO: 78399 - protein, 10 aa, Homo sapiens
  misc_feature: Table A; Target 78399; HLA-A*02:03; SLC45A2; ENSG00000164175; TAA
FLIYERGVEV

SEQ ID NO: 78400 - protein, 10 aa, Homo sapiens
  misc_feature: Table A; Target 78400; HLA-A*02:04; SLC45A2; ENSG00000164175; TAA
FLIYERGVEV

SEQ ID NO: 78401 - protein, 10 aa, Homo sapiens
  misc_feature: Table A; Target 78401; HLA-A*02:07; SLC45A2; ENSG00000164175; TAA
FLIYERGVEV

SEQ ID NO: 78402 - protein, 9 aa, Homo sapiens
  misc_feature: Table A; Target 78402; HLA-A*02:01; SLC45A2; ENSG00000164175; TAA
FLLQPVVGS

SEQ ID NO: 78403 - protein, 10 aa, Homo sapiens
  misc_feature: Table A; Target 78403; HLA-A*02:03; SLC45A2; ENSG00000164175; TAA
FLLQPVVGSA

SEQ ID NO: 78404 - protein, 8 aa, Homo sapiens
  misc_feature: Table A; Target 78404; HLA-B*37:01; SLC45A2; ENSG00000164175; TAA
FLSPILGF

SEQ ID NO: 78405 - protein, 9 aa, Homo sapiens
  misc_feature: Table A; Target 78405; HLA-A*02:01; SLC45A2; ENSG00000164175; TAA
FLSPILGFL

SEQ ID NO: 78406 - protein, 9 aa, Homo sapiens
  misc_feature: Table A; Target 78406; HLA-A*02:03; SLC45A2; ENSG00000164175; TAA
FLSPILGFL

SEQ ID NO: 78407 - protein, 9 aa, Homo sapiens
  misc_feature: Table A; Target 78407; HLA-A*02:04; SLC45A2; ENSG00000164175; TAA
FLSPILGFL

SEQ ID NO: 78408 - protein, 9 aa, Homo sapiens
  misc_feature: Table A; Target 78408; HLA-A*02:07; SLC45A2; ENSG00000164175; TAA
FLSPILGFL

SEQ ID NO: 78409 - protein, 9 aa, Homo sapiens
  misc_feature: Table A; Target 78409; HLA-A*68:02; SLC45A2; ENSG00000164175; TAA
FLSPILGFL

SEQ ID NO: 78410 - protein, 10 aa, Homo sapiens
  misc_feature: Table A; Target 78410; HLA-A*02:01; SLC45A2; ENSG00000164175; TAA
FLSPILGFLL

SEQ ID NO: 78411 - protein, 10 aa, Homo sapiens
  misc_feature: Table A; Target 78411; HLA-A*02:03; SLC45A2; ENSG00000164175; TAA
FLSPILGFLL

SEQ ID NO: 78412 - protein, 10 aa, Homo sapiens
  misc_feature: Table A; Target 78412; HLA-A*02:04; SLC45A2; ENSG00000164175; TAA
FLSPILGFLL

SEQ ID NO: 78413 - protein, 10 aa, Homo sapiens
  misc_feature: Table A; Target 78413; HLA-A*02:07; SLC45A2; ENSG00000164175; TAA
FLSPILGFLL

SEQ ID NO: 78414 - protein, 10 aa, Homo sapiens
  misc_feature: Table A; Target 78414; HLA-A*29:02; SLC45A2; ENSG00000164175; TAA
FLSPILGFLL

SEQ ID NO: 78415 - protein, 10 aa, Homo sapiens
  misc_feature: Table A; Target 78415; HLA-A*68:02; SLC45A2; ENSG00000164175; TAA
FLSPILGFLL

SEQ ID NO: 78416 - protein, 9 aa, Homo sapiens
  misc_feature: Table A; Target 78416; HLA-A*02:03; SLC45A2; ENSG00000164175; TAA
FLVNTAGTV

SEQ ID NO: 78417 - protein, 9 aa, Homo sapiens
  misc_feature: Table A; Target 78417; HLA-B*13:02; SLC45A2; ENSG00000164175; TAA
FLVNTAGTV

SEQ ID NO: 78418 - protein, 10 aa, Homo sapiens
  misc_feature: Table A; Target 78418; HLA-A*02:03; SLC45A2; ENSG00000164175; TAA
FLVNTAGTVV

SEQ ID NO: 78419 - protein, 8 aa, Homo sapiens
  misc_feature: Table A; Target 78419; HLA-A*31:01; SLC45A2; ENSG00000164175; TAA
FMGQIVYR

SEQ ID NO: 78420 - protein, 8 aa, Homo sapiens
  misc_feature: Table A; Target 78420; HLA-A*33:01; SLC45A2; ENSG00000164175; TAA
FMGQIVYR

SEQ ID NO: 78421 - protein, 8 aa, Homo sapiens
  misc_feature: Table A; Target 78421; HLA-A*33:03; SLC45A2; ENSG00000164175; TAA
FMGQIVYR

SEQ ID NO: 78422 - protein, 8 aa, Homo sapiens
  misc_feature: Table A; Target 78422; HLA-B*07:02; SLC45A2; ENSG00000164175; TAA
FPNVYSTL

SEQ ID NO: 78423 - protein, 8 aa, Homo sapiens
  misc_feature: Table A; Target 78423; HLA-B*08:01; SLC45A2; ENSG00000164175; TAA
FPNVYSTL

SEQ ID NO: 78424 - protein, 8 aa, Homo sapiens
  misc_feature: Table A; Target 78424; HLA-B*35:01; SLC45A2; ENSG00000164175; TAA
FPNVYSTL

SEQ ID NO: 78425 - protein, 8 aa, Homo sapiens
  misc_feature: Table A; Target 78425; HLA-B*35:03; SLC45A2; ENSG00000164175; TAA
FPNVYSTL

SEQ ID NO: 78426 - protein, 8 aa, Homo sapiens
  misc_feature: Table A; Target 78426; HLA-B*46:01; SLC45A2; ENSG00000164175; TAA
FPNVYSTL

SEQ ID NO: 78427 - protein, 8 aa, Homo sapiens
  misc_feature: Table A; Target 78427; HLA-B*51:01; SLC45A2; ENSG00000164175; TAA
FPNVYSTL

SEQ ID NO: 78428 - protein, 8 aa, Homo sapiens
  misc_feature: Table A; Target 78428; HLA-B*54:01; SLC45A2; ENSG00000164175; TAA
FPNVYSTL

SEQ ID NO: 78429 - protein, 8 aa, Homo sapiens
  misc_feature: Table A; Target 78429; HLA-B*55:01; SLC45A2; ENSG00000164175; TAA
FPNVYSTL

SEQ ID NO: 78430 - protein, 8 aa, Homo sapiens
  misc_feature: Table A; Target 78430; HLA-B*56:01; SLC45A2; ENSG00000164175; TAA
FPNVYSTL

SEQ ID NO: 78431 - protein, 8 aa, Homo sapiens
  misc_feature: Table A; Target 78431; HLA-C*03:03; SLC45A2; ENSG00000164175; TAA
FPNVYSTL

SEQ ID NO: 78432 - protein, 8 aa, Homo sapiens
  misc_feature: Table A; Target 78432; HLA-C*03:04; SLC45A2; ENSG00000164175; TAA
FPNVYSTL

SEQ ID NO: 78433 - protein, 8 aa, Homo sapiens
  misc_feature: Table A; Target 78433; HLA-C*04:01; SLC45A2; ENSG00000164175; TAA
FPNVYSTL

SEQ ID NO: 78434 - protein, 8 aa, Homo sapiens
  misc_feature: Table A; Target 78434; HLA-C*05:01; SLC45A2; ENSG00000164175; TAA
FPNVYSTL

SEQ ID NO: 78435 - protein, 8 aa, Homo sapiens
  misc_feature: Table A; Target 78435; HLA-C*07:02; SLC45A2; ENSG00000164175; TAA
FPNVYSTL

SEQ ID NO: 78436 - protein, 8 aa, Homo sapiens
  misc_feature: Table A; Target 78436; HLA-C*14:02; SLC45A2; ENSG00000164175; TAA
FPNVYSTL

SEQ ID NO: 78437 - protein, 9 aa, Homo sapiens
  misc_feature: Table A; Target 78437; HLA-B*51:01; SLC45A2; ENSG00000164175; TAA
FPNVYSTLV

SEQ ID NO: 78438 - protein, 9 aa, Homo sapiens
  misc_feature: Table A; Target 78438; HLA-B*54:01; SLC45A2; ENSG00000164175; TAA
FPNVYSTLV

SEQ ID NO: 78439 - protein, 9 aa, Homo sapiens
  misc_feature: Table A; Target 78439; HLA-B*56:01; SLC45A2; ENSG00000164175; TAA
FPNVYSTLV

SEQ ID NO: 78440 - protein, 9 aa, Homo sapiens
  misc_feature: Table A; Target 78440; HLA-C*02:02; SLC45A2; ENSG00000164175; TAA
FPNVYSTLV

SEQ ID NO: 78441 - protein, 10 aa, Homo sapiens
  misc_feature: Table A; Target 78441; HLA-B*35:01; SLC45A2; ENSG00000164175; TAA
FPNVYSTLVL

SEQ ID NO: 78442 - protein, 10 aa, Homo sapiens
  misc_feature: Table A; Target 78442; HLA-B*35:03; SLC45A2; ENSG00000164175; TAA
FPNVYSTLVL

SEQ ID NO: 78443 - protein, 10 aa, Homo sapiens
  misc_feature: Table A; Target 78443; HLA-B*51:01; SLC45A2; ENSG00000164175; TAA
FPNVYSTLVL

SEQ ID NO: 78444 - protein, 10 aa, Homo sapiens
  misc_feature: Table A; Target 78444; HLA-B*54:01; SLC45A2; ENSG00000164175; TAA
FPNVYSTLVL

SEQ ID NO: 78445 - protein, 8 aa, Homo sapiens
  misc_feature: Table A; Target 78445; HLA-A*30:02; SLC45A2; ENSG00000164175; TAA
FQKVLVSY

SEQ ID NO: 78446 - protein, 8 aa, Homo sapiens
  misc_feature: Table A; Target 78446; HLA-A*32:01; SLC45A2; ENSG00000164175; TAA
FQKVLVSY

SEQ ID NO: 78447 - protein, 8 aa, Homo sapiens
  misc_feature: Table A; Target 78447; HLA-B*08:01; SLC45A2; ENSG00000164175; TAA
FQKVLVSY

SEQ ID NO: 78448 - protein, 8 aa, Homo sapiens
  misc_feature: Table A; Target 78448; HLA-B*15:01; SLC45A2; ENSG00000164175; TAA
FQKVLVSY

SEQ ID NO: 78449 - protein, 8 aa, Homo sapiens
  misc_feature: Table A; Target 78449; HLA-B*15:03; SLC45A2; ENSG00000164175; TAA
FQKVLVSY

SEQ ID NO: 78450 - protein, 8 aa, Homo sapiens
  misc_feature: Table A; Target 78450; HLA-B*18:01; SLC45A2; ENSG00000164175; TAA
FQKVLVSY

SEQ ID NO: 78451 - protein, 8 aa, Homo sapiens
  misc_feature: Table A; Target 78451; HLA-B*46:01; SLC45A2; ENSG00000164175; TAA
FQKVLVSY

SEQ ID NO: 78452 - protein, 8 aa, Homo sapiens
  misc_feature: Table A; Target 78452; HLA-C*02:02; SLC45A2; ENSG00000164175; TAA
FQKVLVSY

SEQ ID NO: 78453 - protein, 8 aa, Homo sapiens
  misc_feature: Table A; Target 78453; HLA-C*07:04; SLC45A2; ENSG00000164175; TAA
FQKVLVSY

SEQ ID NO: 78454 - protein, 8 aa, Homo sapiens
  misc_feature: Table A; Target 78454; HLA-C*12:03; SLC45A2; ENSG00000164175; TAA
FQKVLVSY

SEQ ID NO: 78455 - protein, 8 aa, Homo sapiens
  misc_feature: Table A; Target 78455; HLA-C*14:02; SLC45A2; ENSG00000164175; TAA
FQKVLVSY

SEQ ID NO: 78456 - protein, 8 aa, Homo sapiens
  misc_feature: Table A; Target 78456; HLA-C*16:01; SLC45A2; ENSG00000164175; TAA
FQKVLVSY

SEQ ID NO: 78457 - protein, 8 aa, Homo sapiens
  misc_feature: Table A; Target 78457; HLA-C*16:04; SLC45A2; ENSG00000164175; TAA
FQKVLVSY

SEQ ID NO: 78458 - protein, 9 aa, Homo sapiens
  misc_feature: Table A; Target 78458; HLA-A*02:03; SLC45A2; ENSG00000164175; TAA
FQKVLVSYI

SEQ ID NO: 78459 - protein, 9 aa, Homo sapiens
  misc_feature: Table A; Target 78459; HLA-B*13:02; SLC45A2; ENSG00000164175; TAA
FQKVLVSYI

SEQ ID NO: 78460 - protein, 8 aa, Homo sapiens
  misc_feature: Table A; Target 78460; HLA-C*03:03; SLC45A2; ENSG00000164175; TAA
FSALVLTL

SEQ ID NO: 78461 - protein, 8 aa, Homo sapiens
  misc_feature: Table A; Target 78461; HLA-C*03:04; SLC45A2; ENSG00000164175; TAA
FSALVLTL

SEQ ID NO: 78462 - protein, 8 aa, Homo sapiens
  misc_feature: Table A; Target 78462; HLA-C*07:04; SLC45A2; ENSG00000164175; TAA
FSALVLTL

SEQ ID NO: 78463 - protein, 10 aa, Homo sapiens
  misc_feature: Table A; Target 78463; HLA-B*27:02; SLC45A2; ENSG00000164175; TAA
FSSLYSYFQK

SEQ ID NO: 78464 - protein, 8 aa, Homo sapiens
  misc_feature: Table A; Target 78464; HLA-C*05:01; SLC45A2; ENSG00000164175; TAA
FTDFMGQI

SEQ ID NO: 78465 - protein, 9 aa, Homo sapiens
  misc_feature: Table A; Target 78465; HLA-A*01:01; SLC45A2; ENSG00000164175; TAA
FTDFMGQIV

SEQ ID NO: 78466 - protein, 9 aa, Homo sapiens
  misc_feature: Table A; Target 78466; HLA-A*68:02; SLC45A2; ENSG00000164175; TAA
FTDFMGQIV

SEQ ID NO: 78467 - protein, 9 aa, Homo sapiens
  misc_feature: Table A; Target 78467; HLA-B*35:03; SLC45A2; ENSG00000164175; TAA
FTDFMGQIV

SEQ ID NO: 78468 - protein, 10 aa, Homo sapiens
  misc_feature: Table A; Target 78468; HLA-A*01:01; SLC45A2; ENSG00000164175; TAA
FTDFMGQIVY

SEQ ID NO: 78469 - protein, 10 aa, Homo sapiens
  misc_feature: Table A; Target 78469; HLA-A*29:02; SLC45A2; ENSG00000164175; TAA
FTDFMGQIVY

SEQ ID NO: 78470 - protein, 10 aa, Homo sapiens
  misc_feature: Table A; Target 78470; HLA-C*07:04; SLC45A2; ENSG00000164175; TAA
FTDFMGQIVY

SEQ ID NO: 78471 - protein, 8 aa, Homo sapiens
  misc_feature: Table A; Target 78471; HLA-B*46:01; SLC45A2; ENSG00000164175; TAA
FTGFGGAL

SEQ ID NO: 78472 - protein, 8 aa, Homo sapiens
  misc_feature: Table A; Target 78472; HLA-C*01:02; SLC45A2; ENSG00000164175; TAA
FTGFGGAL

SEQ ID NO: 78473 - protein, 8 aa, Homo sapiens
  misc_feature: Table A; Target 78473; HLA-C*03:03; SLC45A2; ENSG00000164175; TAA
FTGFGGAL

SEQ ID NO: 78474 - protein, 8 aa, Homo sapiens
  misc_feature: Table A; Target 78474; HLA-C*03:04; SLC45A2; ENSG00000164175; TAA
FTGFGGAL

SEQ ID NO: 78475 - protein, 8 aa, Homo sapiens
  misc_feature: Table A; Target 78475; HLA-C*05:01; SLC45A2; ENSG00000164175; TAA
FTGFGGAL

SEQ ID NO: 78476 - protein, 8 aa, Homo sapiens
  misc_feature: Table A; Target 78476; HLA-C*12:03; SLC45A2; ENSG00000164175; TAA
FTGFGGAL

SEQ ID NO: 78477 - protein, 8 aa, Homo sapiens
  misc_feature: Table A; Target 78477; HLA-C*14:02; SLC45A2; ENSG00000164175; TAA
FTGFGGAL

SEQ ID NO: 78478 - protein, 10 aa, Homo sapiens
  misc_feature: Table A; Target 78478; HLA-A*01:01; SLC45A2; ENSG00000164175; TAA
FTGFGGALGY

SEQ ID NO: 78479 - protein, 10 aa, Homo sapiens
  misc_feature: Table A; Target 78479; HLA-A*25:01; SLC45A2; ENSG00000164175; TAA
FTGFGGALGY

SEQ ID NO: 78480 - protein, 10 aa, Homo sapiens
  misc_feature: Table A; Target 78480; HLA-A*26:01; SLC45A2; ENSG00000164175; TAA
FTGFGGALGY

SEQ ID NO: 78481 - protein, 10 aa, Homo sapiens
  misc_feature: Table A; Target 78481; HLA-A*29:02; SLC45A2; ENSG00000164175; TAA
FTGFGGALGY

SEQ ID NO: 78482 - protein, 10 aa, Homo sapiens
  misc_feature: Table A; Target 78482; HLA-A*30:02; SLC45A2; ENSG00000164175; TAA
FTGFGGALGY

SEQ ID NO: 78483 - protein, 10 aa, Homo sapiens
  misc_feature: Table A; Target 78483; HLA-C*07:01; SLC45A2; ENSG00000164175; TAA
FTGFGGALGY

SEQ ID NO: 78484 - protein, 10 aa, Homo sapiens
  misc_feature: Table A; Target 78484; HLA-C*12:03; SLC45A2; ENSG00000164175; TAA
FTGFGGALGY

SEQ ID NO: 78485 - protein, 10 aa, Homo sapiens
  misc_feature: Table A; Target 78485; HLA-C*16:04; SLC45A2; ENSG00000164175; TAA
FTGFGGALGY

SEQ ID NO: 78486 - protein, 11 aa, Homo sapiens
  misc_feature: Table A; Target 78486; HLA-A*01:01; SLC45A2; ENSG00000164175; TAA
FTGFGGALGYL

SEQ ID NO: 78487 - protein, 11 aa, Homo sapiens
  misc_feature: Table A; Target 78487; HLA-A*68:02; SLC45A2; ENSG00000164175; TAA
FTGFGGALGYL

SEQ ID NO: 78488 - protein, 8 aa, Homo sapiens
  misc_feature: Table A; Target 78488; HLA-A*29:02; SLC45A2; ENSG00000164175; TAA
FVALFVRY

SEQ ID NO: 78489 - protein, 9 aa, Homo sapiens
  misc_feature: Table A; Target 78489; HLA-A*02:03; SLC45A2; ENSG00000164175; TAA
FVALFVRYV

SEQ ID NO: 78490 - protein, 9 aa, Homo sapiens
  misc_feature: Table A; Target 78490; HLA-A*02:04; SLC45A2; ENSG00000164175; TAA
FVALFVRYV

SEQ ID NO: 78491 - protein, 9 aa, Homo sapiens
  misc_feature: Table A; Target 78491; HLA-A*68:02; SLC45A2; ENSG00000164175; TAA
FVALFVRYV

SEQ ID NO: 78492 - protein, 9 aa, Homo sapiens
  misc_feature: Table A; Target 78492; HLA-C*02:02; SLC45A2; ENSG00000164175; TAA
FVALFVRYV

SEQ ID NO: 78493 - protein, 10 aa, Homo sapiens
  misc_feature: Table A; Target 78493; HLA-A*02:04; SLC45A2; ENSG00000164175; TAA
GAIDWAHLEL

SEQ ID NO: 78494 - protein, 10 aa, Homo sapiens
  misc_feature: Table A; Target 78494; HLA-C*03:03; SLC45A2; ENSG00000164175; TAA
GAIDWAHLEL

SEQ ID NO: 78495 - protein, 8 aa, Homo sapiens
  misc_feature: Table A; Target 78495; HLA-A*30:01; SLC45A2; ENSG00000164175; TAA
GATVVAAL

SEQ ID NO: 78496 - protein, 8 aa, Homo sapiens
  misc_feature: Table A; Target 78496; HLA-B*15:01; SLC45A2; ENSG00000164175; TAA
GATVVAAL

SEQ ID NO: 78497 - protein, 8 aa, Homo sapiens
  misc_feature: Table A; Target 78497; HLA-B*40:01; SLC45A2; ENSG00000164175; TAA
GATVVAAL

SEQ ID NO: 78498 - protein, 8 aa, Homo sapiens
  misc_feature: Table A; Target 78498; HLA-B*46:01; SLC45A2; ENSG00000164175; TAA
GATVVAAL

SEQ ID NO: 78499 - protein, 8 aa, Homo sapiens
  misc_feature: Table A; Target 78499; HLA-C*03:03; SLC45A2; ENSG00000164175; TAA
GATVVAAL

SEQ ID NO: 78500 - protein, 8 aa, Homo sapiens
  misc_feature: Table A; Target 78500; HLA-C*03:04; SLC45A2; ENSG00000164175; TAA
GATVVAAL

SEQ ID NO: 78501 - protein, 8 aa, Homo sapiens
  misc_feature: Table A; Target 78501; HLA-C*14:02; SLC45A2; ENSG00000164175; TAA
GATVVAAL

SEQ ID NO: 78502 - protein, 9 aa, Homo sapiens
  misc_feature: Table A; Target 78502; HLA-A*23:01; SLC45A2; ENSG00000164175; TAA
GATVVAALI

SEQ ID NO: 78503 - protein, 9 aa, Homo sapiens
  misc_feature: Table A; Target 78503; HLA-B*13:02; SLC45A2; ENSG00000164175; TAA
GATVVAALI

SEQ ID NO: 78504 - protein, 9 aa, Homo sapiens
  misc_feature: Table A; Target 78504; HLA-B*40:01; SLC45A2; ENSG00000164175; TAA
GATVVAALI

SEQ ID NO: 78505 - protein, 9 aa, Homo sapiens
  misc_feature: Table A; Target 78505; HLA-B*49:01; SLC45A2; ENSG00000164175; TAA
GATVVAALI

SEQ ID NO: 78506 - protein, 9 aa, Homo sapiens
  misc_feature: Table A; Target 78506; HLA-B*58:01; SLC45A2; ENSG00000164175; TAA
GATVVAALI

SEQ ID NO: 78507 - protein, 9 aa, Homo sapiens
  misc_feature: Table A; Target 78507; HLA-C*02:02; SLC45A2; ENSG00000164175; TAA
GATVVAALI

SEQ ID NO: 78508 - protein, 9 aa, Homo sapiens
  misc_feature: Table A; Target 78508; HLA-C*16:02; SLC45A2; ENSG00000164175; TAA
GATVVAALI

SEQ ID NO: 78509 - protein, 9 aa, Homo sapiens
  misc_feature: Table A; Target 78509; HLA-C*16:04; SLC45A2; ENSG00000164175; TAA
GATVVAALI

SEQ ID NO: 78510 - protein, 8 aa, Homo sapiens
  misc_feature: Table A; Target 78510; HLA-A*29:02; SLC45A2; ENSG00000164175; TAA
GFGGALGY

SEQ ID NO: 78511 - protein, 9 aa, Homo sapiens
  misc_feature: Table A; Target 78511; HLA-A*29:02; SLC45A2; ENSG00000164175; TAA
GFIGLFPNV

SEQ ID NO: 78512 - protein, 10 aa, Homo sapiens
  misc_feature: Table A; Target 78512; HLA-A*29:02; SLC45A2; ENSG00000164175; TAA
GFIGLFPNVY

SEQ ID NO: 78513 - protein, 10 aa, Homo sapiens
  misc_feature: Table A; Target 78513; HLA-A*30:02; SLC45A2; ENSG00000164175; TAA
GFIGLFPNVY

SEQ ID NO: 78514 - protein, 11 aa, Homo sapiens
  misc_feature: Table A; Target 78514; HLA-A*03:01; SLC45A2; ENSG00000164175; TAA
GGDPDNSVRGK

SEQ ID NO: 78515 - protein, 11 aa, Homo sapiens
  misc_feature: Table A; Target 78515; HLA-A*03:02; SLC45A2; ENSG00000164175; TAA
GGDPDNSVRGK

SEQ ID NO: 78516 - protein, 11 aa, Homo sapiens
  misc_feature: Table A; Target 78516; HLA-A*11:01; SLC45A2; ENSG00000164175; TAA
GGDPDNSVRGK

SEQ ID NO: 78517 - protein, 9 aa, Homo sapiens
  misc_feature: Table A; Target 78517; HLA-A*02:01; SLC45A2; ENSG00000164175; TAA
GLFPNVYST

SEQ ID NO: 78518 - protein, 9 aa, Homo sapiens
  misc_feature: Table A; Target 78518; HLA-A*02:03; SLC45A2; ENSG00000164175; TAA
GLFPNVYST

SEQ ID NO: 78519 - protein, 9 aa, Homo sapiens
  misc_feature: Table A; Target 78519; HLA-A*02:04; SLC45A2; ENSG00000164175; TAA
GLFPNVYST

SEQ ID NO: 78520 - protein, 10 aa, Homo sapiens
  misc_feature: Table A; Target 78520; HLA-A*02:01; SLC45A2; ENSG00000164175; TAA
GLFPNVYSTL

SEQ ID NO: 78521 - protein, 10 aa, Homo sapiens
  misc_feature: Table A; Target 78521; HLA-A*02:03; SLC45A2; ENSG00000164175; TAA
GLFPNVYSTL

SEQ ID NO: 78522 - protein, 10 aa, Homo sapiens
  misc_feature: Table A; Target 78522; HLA-A*02:04; SLC45A2; ENSG00000164175; TAA
GLFPNVYSTL

SEQ ID NO: 78523 - protein, 10 aa, Homo sapiens
  misc_feature: Table A; Target 78523; HLA-A*02:07; SLC45A2; ENSG00000164175; TAA
GLFPNVYSTL

SEQ ID NO: 78524 - protein, 10 aa, Homo sapiens
  misc_feature: Table A; Target 78524; HLA-A*03:01; SLC45A2; ENSG00000164175; TAA
GLFPNVYSTL

SEQ ID NO: 78525 - protein, 10 aa, Homo sapiens
  misc_feature: Table A; Target 78525; HLA-A*25:01; SLC45A2; ENSG00000164175; TAA
GLFPNVYSTL

SEQ ID NO: 78526 - protein, 10 aa, Homo sapiens
  misc_feature: Table A; Target 78526; HLA-B*15:01; SLC45A2; ENSG00000164175; TAA
GLFPNVYSTL

SEQ ID NO: 78527 - protein, 10 aa, Homo sapiens
  misc_feature: Table A; Target 78527; HLA-B*15:03; SLC45A2; ENSG00000164175; TAA
GLFPNVYSTL

SEQ ID NO: 78528 - protein, 10 aa, Homo sapiens
  misc_feature: Table A; Target 78528; HLA-B*40:01; SLC45A2; ENSG00000164175; TAA
GLFPNVYSTL

SEQ ID NO: 78529 - protein, 10 aa, Homo sapiens
  misc_feature: Table A; Target 78529; HLA-B*46:01; SLC45A2; ENSG00000164175; TAA
GLFPNVYSTL

SEQ ID NO: 78530 - protein, 10 aa, Homo sapiens
  misc_feature: Table A; Target 78530; HLA-C*02:02; SLC45A2; ENSG00000164175; TAA
GLFPNVYSTL

SEQ ID NO: 78531 - protein, 11 aa, Homo sapiens
  misc_feature: Table A; Target 78531; HLA-A*02:01; SLC45A2; ENSG00000164175; TAA
GLFPNVYSTLV

SEQ ID NO: 78532 - protein, 11 aa, Homo sapiens
  misc_feature: Table A; Target 78532; HLA-A*02:03; SLC45A2; ENSG00000164175; TAA
GLFPNVYSTLV

SEQ ID NO: 78533 - protein, 11 aa, Homo sapiens
  misc_feature: Table A; Target 78533; HLA-A*02:04; SLC45A2; ENSG00000164175; TAA
GLFPNVYSTLV

SEQ ID NO: 78534 - protein, 9 aa, Homo sapiens
  misc_feature: Table A; Target 78534; HLA-A*02:01; SLC45A2; ENSG00000164175; TAA
GLGFLVNTA

SEQ ID NO: 78535 - protein, 9 aa, Homo sapiens
  misc_feature: Table A; Target 78535; HLA-A*02:03; SLC45A2; ENSG00000164175; TAA
GLGFLVNTA

SEQ ID NO: 78536 - protein, 9 aa, Homo sapiens
  misc_feature: Table A; Target 78536; HLA-A*02:01; SLC45A2; ENSG00000164175; TAA
GLGTGFIGL

SEQ ID NO: 78537 - protein, 9 aa, Homo sapiens
  misc_feature: Table A; Target 78537; HLA-A*02:03; SLC45A2; ENSG00000164175; TAA
GLGTGFIGL

SEQ ID NO: 78538 - protein, 9 aa, Homo sapiens
  misc_feature: Table A; Target 78538; HLA-A*02:04; SLC45A2; ENSG00000164175; TAA
GLGTGFIGL

SEQ ID NO: 78539 - protein, 9 aa, Homo sapiens
  misc_feature: Table A; Target 78539; HLA-A*03:01; SLC45A2; ENSG00000164175; TAA
GLGTGFIGL

SEQ ID NO: 78540 - protein, 10 aa, Homo sapiens
  misc_feature: Table A; Target 78540; HLA-A*29:02; SLC45A2; ENSG00000164175; TAA
GLKGLYFTGY

SEQ ID NO: 78541 - protein, 9 aa, Homo sapiens
  misc_feature: Table A; Target 78541; HLA-A*02:01; SLC45A2; ENSG00000164175; TAA
GLPSSLYSI

SEQ ID NO: 78542 - protein, 9 aa, Homo sapiens
  misc_feature: Table A; Target 78542; HLA-A*02:03; SLC45A2; ENSG00000164175; TAA
GLPSSLYSI

SEQ ID NO: 78543 - protein, 9 aa, Homo sapiens
  misc_feature: Table A; Target 78543; HLA-A*02:04; SLC45A2; ENSG00000164175; TAA
GLPSSLYSI

SEQ ID NO: 78544 - protein, 9 aa, Homo sapiens
  misc_feature: Table A; Target 78544; HLA-A*02:07; SLC45A2; ENSG00000164175; TAA
GLPSSLYSI

SEQ ID NO: 78545 - protein, 9 aa, Homo sapiens
  misc_feature: Table A; Target 78545; HLA-A*23:01; SLC45A2; ENSG00000164175; TAA
GLPSSLYSI

SEQ ID NO: 78546 - protein, 9 aa, Homo sapiens
  misc_feature: Table A; Target 78546; HLA-A*24:02; SLC45A2; ENSG00000164175; TAA
GLPSSLYSI

SEQ ID NO: 78547 - protein, 9 aa, Homo sapiens
  misc_feature: Table A; Target 78547; HLA-B*13:02; SLC45A2; ENSG00000164175; TAA
GLPSSLYSI

SEQ ID NO: 78548 - protein, 9 aa, Homo sapiens
  misc_feature: Table A; Target 78548; HLA-B*55:01; SLC45A2; ENSG00000164175; TAA
GLPSSLYSI

SEQ ID NO: 78549 - protein, 9 aa, Homo sapiens
  misc_feature: Table A; Target 78549; HLA-A*02:01; SLC45A2; ENSG00000164175; TAA
GLYFTGYLL

SEQ ID NO: 78550 - protein, 9 aa, Homo sapiens
  misc_feature: Table A; Target 78550; HLA-A*02:04; SLC45A2; ENSG00000164175; TAA
GLYFTGYLL

SEQ ID NO: 78551 - protein, 10 aa, Homo sapiens
  misc_feature: Table A; Target 78551; HLA-A*29:02; SLC45A2; ENSG00000164175; TAA
GLYFTGYLLF

SEQ ID NO: 78552 - protein, 9 aa, Homo sapiens
  misc_feature: Table A; Target 78552; HLA-A*02:01; SLC45A2; ENSG00000164175; TAA
GMALYLNGA

SEQ ID NO: 78553 - protein, 9 aa, Homo sapiens
  misc_feature: Table A; Target 78553; HLA-A*02:03; SLC45A2; ENSG00000164175; TAA
GMALYLNGA

SEQ ID NO: 78554 - protein, 9 aa, Homo sapiens
  misc_feature: Table A; Target 78554; HLA-B*55:01; SLC45A2; ENSG00000164175; TAA
GMALYLNGA

SEQ ID NO: 78555 - protein, 10 aa, Homo sapiens
  misc_feature: Table A; Target 78555; HLA-A*02:01; SLC45A2; ENSG00000164175; TAA
GMYEYGSIEK

SEQ ID NO: 78556 - protein, 10 aa, Homo sapiens
  misc_feature: Table A; Target 78556; HLA-A*03:01; SLC45A2; ENSG00000164175; TAA
GMYEYGSIEK

SEQ ID NO: 78557 - protein, 10 aa, Homo sapiens
  misc_feature: Table A; Target 78557; HLA-A*03:02; SLC45A2; ENSG00000164175; TAA
GMYEYGSIEK

SEQ ID NO: 78558 - protein, 10 aa, Homo sapiens
  misc_feature: Table A; Target 78558; HLA-A*11:01; SLC45A2; ENSG00000164175; TAA
GMYEYGSIEK

SEQ ID NO: 78559 - protein, 10 aa, Homo sapiens
  misc_feature: Table A; Target 78559; HLA-A*31:01; SLC45A2; ENSG00000164175; TAA
GMYEYGSIEK

SEQ ID NO: 78560 - protein, 10 aa, Homo sapiens
  misc_feature: Table A; Target 78560; HLA-B*27:02; SLC45A2; ENSG00000164175; TAA
GMYEYGSIEK

SEQ ID NO: 78561 - protein, 10 aa, Homo sapiens
  misc_feature: Table A; Target 78561; HLA-B*27:05; SLC45A2; ENSG00000164175; TAA
GMYEYGSIEK

SEQ ID NO: 78562 - protein, 11 aa, Homo sapiens
  misc_feature: Table A; Target 78562; HLA-A*02:01; SLC45A2; ENSG00000164175; TAA
GMYEYGSIEKV

SEQ ID NO: 78563 - protein, 11 aa, Homo sapiens
  misc_feature: Table A; Target 78563; HLA-A*02:03; SLC45A2; ENSG00000164175; TAA
GMYEYGSIEKV

SEQ ID NO: 78564 - protein, 11 aa, Homo sapiens
  misc_feature: Table A; Target 78564; HLA-A*02:04; SLC45A2; ENSG00000164175; TAA
GMYEYGSIEKV

SEQ ID NO: 78565 - protein, 11 aa, Homo sapiens
  misc_feature: Table A; Target 78565; HLA-A*02:07; SLC45A2; ENSG00000164175; TAA
GMYEYGSIEKV

SEQ ID NO: 78566 - protein, 11 aa, Homo sapiens
  misc_feature: Table A; Target 78566; HLA-B*13:02; SLC45A2; ENSG00000164175; TAA
GMYEYGSIEKV

SEQ ID NO: 78567 - protein, 11 aa, Homo sapiens
  misc_feature: Table A; Target 78567; HLA-B*55:01; SLC45A2; ENSG00000164175; TAA
GMYEYGSIEKV

SEQ ID NO: 78568 - protein, 9 aa, Homo sapiens
  misc_feature: Table A; Target 78568; HLA-B*56:01; SLC45A2; ENSG00000164175; TAA
GPFDSVEPP

SEQ ID NO: 78569 - protein, 10 aa, Homo sapiens
  misc_feature: Table A; Target 78569; HLA-A*03:01; SLC45A2; ENSG00000164175; TAA
GPFDSVEPPK

SEQ ID NO: 78570 - protein, 10 aa, Homo sapiens
  misc_feature: Table A; Target 78570; HLA-A*03:02; SLC45A2; ENSG00000164175; TAA
GPFDSVEPPK

SEQ ID NO: 78571 - protein, 10 aa, Homo sapiens
  misc_feature: Table A; Target 78571; HLA-A*11:01; SLC45A2; ENSG00000164175; TAA
GPFDSVEPPK

SEQ ID NO: 78572 - protein, 10 aa, Homo sapiens
  misc_feature: Table A; Target 78572; HLA-A*68:01; SLC45A2; ENSG00000164175; TAA
GPFDSVEPPK

SEQ ID NO: 78573 - protein, 10 aa, Homo sapiens
  misc_feature: Table A; Target 78573; HLA-B*27:02; SLC45A2; ENSG00000164175; TAA
GPFDSVEPPK

SEQ ID NO: 78574 - protein, 10 aa, Homo sapiens
  misc_feature: Table A; Target 78574; HLA-B*27:05; SLC45A2; ENSG00000164175; TAA
GPFDSVEPPK

SEQ ID NO: 78575 - protein, 10 aa, Homo sapiens
  misc_feature: Table A; Target 78575; HLA-B*56:01; SLC45A2; ENSG00000164175; TAA
GPFDSVEPPK

SEQ ID NO: 78576 - protein, 10 aa, Homo sapiens
  misc_feature: Table A; Target 78576; HLA-C*07:06; SLC45A2; ENSG00000164175; TAA
GPFDSVEPPK

SEQ ID NO: 78577 - protein, 11 aa, Homo sapiens
  misc_feature: Table A; Target 78577; HLA-A*68:01; SLC45A2; ENSG00000164175; TAA
GPFDSVEPPKR

SEQ ID NO: 78578 - protein, 11 aa, Homo sapiens
  misc_feature: Table A; Target 78578; HLA-B*56:01; SLC45A2; ENSG00000164175; TAA
GPFDSVEPPKR

SEQ ID NO: 78579 - protein, 11 aa, Homo sapiens
  misc_feature: Table A; Target 78579; HLA-C*07:06; SLC45A2; ENSG00000164175; TAA
GPFDSVEPPKR

SEQ ID NO: 78580 - protein, 8 aa, Homo sapiens
  misc_feature: Table A; Target 78580; HLA-A*32:01; SLC45A2; ENSG00000164175; TAA
GQAGRHIY

SEQ ID NO: 78581 - protein, 8 aa, Homo sapiens
  misc_feature: Table A; Target 78581; HLA-B*15:01; SLC45A2; ENSG00000164175; TAA
GQAGRHIY

SEQ ID NO: 78582 - protein, 8 aa, Homo sapiens
  misc_feature: Table A; Target 78582; HLA-B*15:03; SLC45A2; ENSG00000164175; TAA
GQAGRHIY

SEQ ID NO: 78583 - protein, 8 aa, Homo sapiens
  misc_feature: Table A; Target 78583; HLA-C*16:01; SLC45A2; ENSG00000164175; TAA
GQAGRHIY

SEQ ID NO: 78584 - protein, 9 aa, Homo sapiens
  misc_feature: Table A; Target 78584; HLA-A*03:01; SLC45A2; ENSG00000164175; TAA
GQAGRHIYK

SEQ ID NO: 78585 - protein, 9 aa, Homo sapiens
  misc_feature: Table A; Target 78585; HLA-A*03:02; SLC45A2; ENSG00000164175; TAA
GQAGRHIYK

SEQ ID NO: 78586 - protein, 9 aa, Homo sapiens
  misc_feature: Table A; Target 78586; HLA-A*11:01; SLC45A2; ENSG00000164175; TAA
GQAGRHIYK

SEQ ID NO: 78587 - protein, 9 aa, Homo sapiens
  misc_feature: Table A; Target 78587; HLA-A*31:01; SLC45A2; ENSG00000164175; TAA
GQAGRHIYK

SEQ ID NO: 78588 - protein, 10 aa, Homo sapiens
  misc_feature: Table A; Target 78588; HLA-A*30:02; SLC45A2; ENSG00000164175; TAA
GQIVYRGDPY

SEQ ID NO: 78589 - protein, 10 aa, Homo sapiens
  misc_feature: Table A; Target 78589; HLA-B*15:01; SLC45A2; ENSG00000164175; TAA
GQIVYRGDPY

SEQ ID NO: 78590 - protein, 10 aa, Homo sapiens
  misc_feature: Table A; Target 78590; HLA-B*15:03; SLC45A2; ENSG00000164175; TAA
GQIVYRGDPY

SEQ ID NO: 78591 - protein, 10 aa, Homo sapiens
  misc_feature: Table A; Target 78591; HLA-B*27:05; SLC45A2; ENSG00000164175; TAA
GQIVYRGDPY

SEQ ID NO: 78592 - protein, 10 aa, Homo sapiens
  misc_feature: Table A; Target 78592; HLA-B*44:02; SLC45A2; ENSG00000164175; TAA
GQIVYRGDPY

SEQ ID NO: 78593 - protein, 10 aa, Homo sapiens
  misc_feature: Table A; Target 78593; HLA-C*02:02; SLC45A2; ENSG00000164175; TAA
GQIVYRGDPY

SEQ ID NO: 78594 - protein, 10 aa, Homo sapiens
  misc_feature: Table A; Target 78594; HLA-C*07:04; SLC45A2; ENSG00000164175; TAA
GQIVYRGDPY

SEQ ID NO: 78595 - protein, 10 aa, Homo sapiens
  misc_feature: Table A; Target 78595; HLA-C*16:01; SLC45A2; ENSG00000164175; TAA
GQIVYRGDPY

SEQ ID NO: 78596 - protein, 10 aa, Homo sapiens
  misc_feature: Table A; Target 78596; HLA-C*16:04; SLC45A2; ENSG00000164175; TAA
GQIVYRGDPY

SEQ ID NO: 78597 - protein, 8 aa, Homo sapiens
  misc_feature: Table A; Target 78597; HLA-C*16:04; SLC45A2; ENSG00000164175; TAA
GRLLGTEF

SEQ ID NO: 78598 - protein, 10 aa, Homo sapiens
  misc_feature: Table A; Target 78598; HLA-A*26:01; SLC45A2; ENSG00000164175; TAA
GSIEKVKNGY

SEQ ID NO: 78599 - protein, 10 aa, Homo sapiens
  misc_feature: Table A; Target 78599; HLA-A*29:02; SLC45A2; ENSG00000164175; TAA
GSIEKVKNGY

SEQ ID NO: 78600 - protein, 10 aa, Homo sapiens
  misc_feature: Table A; Target 78600; HLA-A*30:02; SLC45A2; ENSG00000164175; TAA
GSIEKVKNGY

SEQ ID NO: 78601 - protein, 10 aa, Homo sapiens
  misc_feature: Table A; Target 78601; HLA-A*32:01; SLC45A2; ENSG00000164175; TAA
GSIEKVKNGY

SEQ ID NO: 78602 - protein, 10 aa, Homo sapiens
  misc_feature: Table A; Target 78602; HLA-B*15:01; SLC45A2; ENSG00000164175; TAA
GSIEKVKNGY

SEQ ID NO: 78603 - protein, 10 aa, Homo sapiens
  misc_feature: Table A; Target 78603; HLA-B*58:01; SLC45A2; ENSG00000164175; TAA
GSIEKVKNGY

SEQ ID NO: 78604 - protein, 10 aa, Homo sapiens
  misc_feature: Table A; Target 78604; HLA-C*16:02; SLC45A2; ENSG00000164175; TAA
GSIEKVKNGY

SEQ ID NO: 78605 - protein, 10 aa, Homo sapiens
  misc_feature: Table A; Target 78605; HLA-C*16:04; SLC45A2; ENSG00000164175; TAA
GSIEKVKNGY

SEQ ID NO: 78606 - protein, 9 aa, Homo sapiens
  misc_feature: Table A; Target 78606; HLA-A*31:01; SLC45A2; ENSG00000164175; TAA
GSNSGQAGR

SEQ ID NO: 78607 - protein, 9 aa, Homo sapiens
  misc_feature: Table A; Target 78607; HLA-A*33:03; SLC45A2; ENSG00000164175; TAA
GSNSGQAGR

SEQ ID NO: 78608 - protein, 9 aa, Homo sapiens
  misc_feature: Table A; Target 78608; HLA-C*07:06; SLC45A2; ENSG00000164175; TAA
GSNSGQAGR

SEQ ID NO: 78609 - protein, 9 aa, Homo sapiens
  misc_feature: Table A; Target 78609; HLA-A*01:01; SLC45A2; ENSG00000164175; TAA
GTEFQVMFF

SEQ ID NO: 78610 - protein, 8 aa, Homo sapiens
  misc_feature: Table A; Target 78610; HLA-B*13:02; SLC45A2; ENSG00000164175; TAA
GTVVVVVI

SEQ ID NO: 78611 - protein, 8 aa, Homo sapiens
  misc_feature: Table A; Target 78611; HLA-B*49:01; SLC45A2; ENSG00000164175; TAA
GTVVVVVI

SEQ ID NO: 78612 - protein, 8 aa, Homo sapiens
  misc_feature: Table A; Target 78612; HLA-A*26:01; SLC45A2; ENSG00000164175; TAA
GVMSSTLY

SEQ ID NO: 78613 - protein, 8 aa, Homo sapiens
  misc_feature: Table A; Target 78613; HLA-A*29:02; SLC45A2; ENSG00000164175; TAA
GVMSSTLY

SEQ ID NO: 78614 - protein, 8 aa, Homo sapiens
  misc_feature: Table A; Target 78614; HLA-A*30:02; SLC45A2; ENSG00000164175; TAA
GVMSSTLY

SEQ ID NO: 78615 - protein, 8 aa, Homo sapiens
  misc_feature: Table A; Target 78615; HLA-B*15:01; SLC45A2; ENSG00000164175; TAA
GVMSSTLY

SEQ ID NO: 78616 - protein, 8 aa, Homo sapiens
  misc_feature: Table A; Target 78616; HLA-B*15:03; SLC45A2; ENSG00000164175; TAA
GVMSSTLY

SEQ ID NO: 78617 - protein, 9 aa, Homo sapiens
  misc_feature: Table A; Target 78617; HLA-B*13:02; SLC45A2; ENSG00000164175; TAA
GVMSSTLYT

SEQ ID NO: 78618 - protein, 10 aa, Homo sapiens
  misc_feature: Table A; Target 78618; HLA-A*02:01; SLC45A2; ENSG00000164175; TAA
GVMSSTLYTV

SEQ ID NO: 78619 - protein, 10 aa, Homo sapiens
  misc_feature: Table A; Target 78619; HLA-A*02:03; SLC45A2; ENSG00000164175; TAA
GVMSSTLYTV

SEQ ID NO: 78620 - protein, 10 aa, Homo sapiens
  misc_feature: Table A; Target 78620; HLA-A*02:04; SLC45A2; ENSG00000164175; TAA
GVMSSTLYTV

SEQ ID NO: 78621 - protein, 10 aa, Homo sapiens
  misc_feature: Table A; Target 78621; HLA-B*13:02; SLC45A2; ENSG00000164175; TAA
GVMSSTLYTV

SEQ ID NO: 78622 - protein, 10 aa, Homo sapiens
  misc_feature: Table A; Target 78622; HLA-B*55:01; SLC45A2; ENSG00000164175; TAA
GVMSSTLYTV

SEQ ID NO: 78623 - protein, 10 aa, Homo sapiens
  misc_feature: Table A; Target 78623; HLA-B*56:01; SLC45A2; ENSG00000164175; TAA
GVMSSTLYTV

SEQ ID NO: 78624 - protein, 11 aa, Homo sapiens
  misc_feature: Table A; Target 78624; HLA-A*23:01; SLC45A2; ENSG00000164175; TAA
GYLLFGLGTGF

SEQ ID NO: 78625 - protein, 11 aa, Homo sapiens
  misc_feature: Table A; Target 78625; HLA-A*24:02; SLC45A2; ENSG00000164175; TAA
GYLLFGLGTGF

SEQ ID NO: 78626 - protein, 9 aa, Homo sapiens
  misc_feature: Table A; Target 78626; HLA-A*23:01; SLC45A2; ENSG00000164175; TAA
GYVNPELAM

SEQ ID NO: 78627 - protein, 9 aa, Homo sapiens
  misc_feature: Table A; Target 78627; HLA-A*29:02; SLC45A2; ENSG00000164175; TAA
GYVNPELAM

SEQ ID NO: 78628 - protein, 9 aa, Homo sapiens
  misc_feature: Table A; Target 78628; HLA-A*30:02; SLC45A2; ENSG00000164175; TAA
GYVNPELAM

SEQ ID NO: 78629 - protein, 9 aa, Homo sapiens
  misc_feature: Table A; Target 78629; HLA-B*15:01; SLC45A2; ENSG00000164175; TAA
GYVNPELAM

SEQ ID NO: 78630 - protein, 9 aa, Homo sapiens
  misc_feature: Table A; Target 78630; HLA-B*15:03; SLC45A2; ENSG00000164175; TAA
GYVNPELAM

SEQ ID NO: 78631 - protein, 9 aa, Homo sapiens
  misc_feature: Table A; Target 78631; HLA-B*27:05; SLC45A2; ENSG00000164175; TAA
GYVNPELAM

SEQ ID NO: 78632 - protein, 9 aa, Homo sapiens
  misc_feature: Table A; Target 78632; HLA-B*35:03; SLC45A2; ENSG00000164175; TAA
GYVNPELAM

SEQ ID NO: 78633 - protein, 9 aa, Homo sapiens
  misc_feature: Table A; Target 78633; HLA-B*39:01; SLC45A2; ENSG00000164175; TAA
GYVNPELAM

SEQ ID NO: 78634 - protein, 9 aa, Homo sapiens
  misc_feature: Table A; Target 78634; HLA-B*46:01; SLC45A2; ENSG00000164175; TAA
GYVNPELAM

SEQ ID NO: 78635 - protein, 9 aa, Homo sapiens
  misc_feature: Table A; Target 78635; HLA-C*01:02; SLC45A2; ENSG00000164175; TAA
GYVNPELAM

SEQ ID NO: 78636 - protein, 9 aa, Homo sapiens
  misc_feature: Table A; Target 78636; HLA-C*04:01; SLC45A2; ENSG00000164175; TAA
GYVNPELAM

SEQ ID NO: 78637 - protein, 9 aa, Homo sapiens
  misc_feature: Table A; Target 78637; HLA-C*07:01; SLC45A2; ENSG00000164175; TAA
GYVNPELAM

SEQ ID NO: 78638 - protein, 9 aa, Homo sapiens
  misc_feature: Table A; Target 78638; HLA-C*07:02; SLC45A2; ENSG00000164175; TAA
GYVNPELAM

SEQ ID NO: 78639 - protein, 9 aa, Homo sapiens
  misc_feature: Table A; Target 78639; HLA-C*07:04; SLC45A2; ENSG00000164175; TAA
GYVNPELAM

SEQ ID NO: 78640 - protein, 9 aa, Homo sapiens
  misc_feature: Table A; Target 78640; HLA-C*14:02; SLC45A2; ENSG00000164175; TAA
GYVNPELAM

SEQ ID NO: 78641 - protein, 9 aa, Homo sapiens
  misc_feature: Table A; Target 78641; HLA-C*16:01; SLC45A2; ENSG00000164175; TAA
GYVNPELAM

SEQ ID NO: 78642 - protein, 9 aa, Homo sapiens
  misc_feature: Table A; Target 78642; HLA-C*03:03; SLC45A2; ENSG00000164175; TAA
HAEQTRRAM

SEQ ID NO: 78643 - protein, 9 aa, Homo sapiens
  misc_feature: Table A; Target 78643; HLA-C*03:04; SLC45A2; ENSG00000164175; TAA
HAEQTRRAM

SEQ ID NO: 78644 - protein, 9 aa, Homo sapiens
  misc_feature: Table A; Target 78644; HLA-C*16:01; SLC45A2; ENSG00000164175; TAA
HAEQTRRAM

SEQ ID NO: 78645 - protein, 10 aa, Homo sapiens
  misc_feature: Table A; Target 78645; HLA-B*54:01; SLC45A2; ENSG00000164175; TAA
HALFTGFGGA

SEQ ID NO: 78646 - protein, 9 aa, Homo sapiens
  misc_feature: Table A; Target 78646; HLA-A*02:01; SLC45A2; ENSG00000164175; TAA
HLIGWTAFL

SEQ ID NO: 78647 - protein, 9 aa, Homo sapiens
  misc_feature: Table A; Target 78647; HLA-A*02:03; SLC45A2; ENSG00000164175; TAA
HLIGWTAFL

SEQ ID NO: 78648 - protein, 9 aa, Homo sapiens
  misc_feature: Table A; Target 78648; HLA-A*02:04; SLC45A2; ENSG00000164175; TAA
HLIGWTAFL

SEQ ID NO: 78649 - protein, 9 aa, Homo sapiens
  misc_feature: Table A; Target 78649; HLA-A*02:07; SLC45A2; ENSG00000164175; TAA
HLIGWTAFL

SEQ ID NO: 78650 - protein, 9 aa, Homo sapiens
  misc_feature: Table A; Target 78650; HLA-A*68:02; SLC45A2; ENSG00000164175; TAA
HLIGWTAFL

SEQ ID NO: 78651 - protein, 9 aa, Homo sapiens
  misc_feature: Table A; Target 78651; HLA-A*29:02; SLC45A2; ENSG00000164175; TAA
HNSTEFLIY

SEQ ID NO: 78652 - protein, 10 aa, Homo sapiens
  misc_feature: Table A; Target 78652; HLA-A*01:01; SLC45A2; ENSG00000164175; TAA
HQDKEKGLHY

SEQ ID NO: 78653 - protein, 9 aa, Homo sapiens
  misc_feature: Table A; Target 78653; HLA-A*23:01; SLC45A2; ENSG00000164175; TAA
HYHALFTGF

SEQ ID NO: 78654 - protein, 9 aa, Homo sapiens
  misc_feature: Table A; Target 78654; HLA-A*24:02; SLC45A2; ENSG00000164175; TAA
HYHALFTGF

SEQ ID NO: 78655 - protein, 9 aa, Homo sapiens
  misc_feature: Table A; Target 78655; HLA-A*29:02; SLC45A2; ENSG00000164175; TAA
HYHALFTGF

SEQ ID NO: 78656 - protein, 9 aa, Homo sapiens
  misc_feature: Table A; Target 78656; HLA-A*31:01; SLC45A2; ENSG00000164175; TAA
HYHALFTGF

SEQ ID NO: 78657 - protein, 9 aa, Homo sapiens
  misc_feature: Table A; Target 78657; HLA-A*33:01; SLC45A2; ENSG00000164175; TAA
HYHALFTGF

SEQ ID NO: 78658 - protein, 9 aa, Homo sapiens
  misc_feature: Table A; Target 78658; HLA-A*33:03; SLC45A2; ENSG00000164175; TAA
HYHALFTGF

SEQ ID NO: 78659 - protein, 8 aa, Homo sapiens
  misc_feature: Table A; Target 78659; HLA-C*16:01; SLC45A2; ENSG00000164175; TAA
IANPRRKL

SEQ ID NO: 78660 - protein, 10 aa, Homo sapiens
  misc_feature: Table A; Target 78660; HLA-B*57:01; SLC45A2; ENSG00000164175; TAA
IANPRRKLVW

SEQ ID NO: 78661 - protein, 8 aa, Homo sapiens
  misc_feature: Table A; Target 78661; HLA-A*30:02; SLC45A2; ENSG00000164175; TAA
IDGPIKAY

SEQ ID NO: 78662 - protein, 8 aa, Homo sapiens
  misc_feature: Table A; Target 78662; HLA-B*07:02; SLC45A2; ENSG00000164175; TAA
IDGPIKAY

SEQ ID NO: 78663 - protein, 8 aa, Homo sapiens
  misc_feature: Table A; Target 78663; HLA-B*15:03; SLC45A2; ENSG00000164175; TAA
IDGPIKAY

SEQ ID NO: 78664 - protein, 8 aa, Homo sapiens
  misc_feature: Table A; Target 78664; HLA-B*18:01; SLC45A2; ENSG00000164175; TAA
IDGPIKAY

SEQ ID NO: 78665 - protein, 8 aa, Homo sapiens
  misc_feature: Table A; Target 78665; HLA-B*37:01; SLC45A2; ENSG00000164175; TAA
IDGPIKAY

SEQ ID NO: 78666 - protein, 8 aa, Homo sapiens
  misc_feature: Table A; Target 78666; HLA-B*44:02; SLC45A2; ENSG00000164175; TAA
IDGPIKAY

SEQ ID NO: 78667 - protein, 8 aa, Homo sapiens
  misc_feature: Table A; Target 78667; HLA-B*44:03; SLC45A2; ENSG00000164175; TAA
IDGPIKAY

SEQ ID NO: 78668 - protein, 8 aa, Homo sapiens
  misc_feature: Table A; Target 78668; HLA-C*04:01; SLC45A2; ENSG00000164175; TAA
IDGPIKAY

SEQ ID NO: 78669 - protein, 8 aa, Homo sapiens
  misc_feature: Table A; Target 78669; HLA-C*06:02; SLC45A2; ENSG00000164175; TAA
IDGPIKAY

SEQ ID NO: 78670 - protein, 8 aa, Homo sapiens
  misc_feature: Table A; Target 78670; HLA-C*07:01; SLC45A2; ENSG00000164175; TAA
IDGPIKAY

SEQ ID NO: 78671 - protein, 8 aa, Homo sapiens
  misc_feature: Table A; Target 78671; HLA-C*07:04; SLC45A2; ENSG00000164175; TAA
IDGPIKAY

SEQ ID NO: 78672 - protein, 8 aa, Homo sapiens
  misc_feature: Table A; Target 78672; HLA-C*12:03; SLC45A2; ENSG00000164175; TAA
IDGPIKAY

SEQ ID NO: 78673 - protein, 8 aa, Homo sapiens
  misc_feature: Table A; Target 78673; HLA-C*16:01; SLC45A2; ENSG00000164175; TAA
IDGPIKAY

SEQ ID NO: 78674 - protein, 8 aa, Homo sapiens
  misc_feature: Table A; Target 78674; HLA-C*16:02; SLC45A2; ENSG00000164175; TAA
IDGPIKAY

SEQ ID NO: 78675 - protein, 8 aa, Homo sapiens
  misc_feature: Table A; Target 78675; HLA-C*16:04; SLC45A2; ENSG00000164175; TAA
IDGPIKAY

SEQ ID NO: 78676 - protein, 9 aa, Homo sapiens
  misc_feature: Table A; Target 78676; HLA-A*23:01; SLC45A2; ENSG00000164175; TAA
IDGPIKAYL

SEQ ID NO: 78677 - protein, 9 aa, Homo sapiens
  misc_feature: Table A; Target 78677; HLA-A*68:02; SLC45A2; ENSG00000164175; TAA
IDGPIKAYL

SEQ ID NO: 78678 - protein, 9 aa, Homo sapiens
  misc_feature: Table A; Target 78678; HLA-B*37:01; SLC45A2; ENSG00000164175; TAA
IDGPIKAYL

SEQ ID NO: 78679 - protein, 9 aa, Homo sapiens
  misc_feature: Table A; Target 78679; HLA-B*38:01; SLC45A2; ENSG00000164175; TAA
IDGPIKAYL

SEQ ID NO: 78680 - protein, 9 aa, Homo sapiens
  misc_feature: Table A; Target 78680; HLA-B*40:02; SLC45A2; ENSG00000164175; TAA
IDGPIKAYL

SEQ ID NO: 78681 - protein, 10 aa, Homo sapiens
  misc_feature: Table A; Target 78681; HLA-A*24:02; SLC45A2; ENSG00000164175; TAA
IDGPIKAYLF

SEQ ID NO: 78682 - protein, 8 aa, Homo sapiens
  misc_feature: Table A; Target 78682; HLA-B*37:01; SLC45A2; ENSG00000164175; TAA
IDWAHLEL

SEQ ID NO: 78683 - protein, 8 aa, Homo sapiens
  misc_feature: Table A; Target 78683; HLA-B*40:02; SLC45A2; ENSG00000164175; TAA
IDWAHLEL

SEQ ID NO: 78684 - protein, 8 aa, Homo sapiens
  misc_feature: Table A; Target 78684; HLA-B*18:01; SLC45A2; ENSG00000164175; TAA
IEKVKNGY

SEQ ID NO: 78685 - protein, 8 aa, Homo sapiens
  misc_feature: Table A; Target 78685; HLA-B*37:01; SLC45A2; ENSG00000164175; TAA
IEKVKNGY

SEQ ID NO: 78686 - protein, 9 aa, Homo sapiens
  misc_feature: Table A; Target 78686; HLA-A*02:01; SLC45A2; ENSG00000164175; TAA
ILTLGVMML

SEQ ID NO: 78687 - protein, 9 aa, Homo sapiens
  misc_feature: Table A; Target 78687; HLA-A*02:04; SLC45A2; ENSG00000164175; TAA
ILTLGVMML

SEQ ID NO: 78688 - protein, 9 aa, Homo sapiens
  misc_feature: Table A; Target 78688; HLA-A*23:01; SLC45A2; ENSG00000164175; TAA
ILVGGGLGF

SEQ ID NO: 78689 - protein, 9 aa, Homo sapiens
  misc_feature: Table A; Target 78689; HLA-A*25:01; SLC45A2; ENSG00000164175; TAA
ILVGGGLGF

SEQ ID NO: 78690 - protein, 9 aa, Homo sapiens
  misc_feature: Table A; Target 78690; HLA-A*26:01; SLC45A2; ENSG00000164175; TAA
ILVGGGLGF

SEQ ID NO: 78691 - protein, 9 aa, Homo sapiens
  misc_feature: Table A; Target 78691; HLA-A*29:02; SLC45A2; ENSG00000164175; TAA
ILVGGGLGF

SEQ ID NO: 78692 - protein, 9 aa, Homo sapiens
  misc_feature: Table A; Target 78692; HLA-A*32:01; SLC45A2; ENSG00000164175; TAA
ILVGGGLGF

SEQ ID NO: 78693 - protein, 9 aa, Homo sapiens
  misc_feature: Table A; Target 78693; HLA-B*15:01; SLC45A2; ENSG00000164175; TAA
ILVGGGLGF

SEQ ID NO: 78694 - protein, 9 aa, Homo sapiens
  misc_feature: Table A; Target 78694; HLA-B*15:03; SLC45A2; ENSG00000164175; TAA
ILVGGGLGF

SEQ ID NO: 78695 - protein, 9 aa, Homo sapiens
  misc_feature: Table A; Target 78695; HLA-B*46:01; SLC45A2; ENSG00000164175; TAA
ILVGGGLGF

SEQ ID NO: 78696 - protein, 9 aa, Homo sapiens
  misc_feature: Table A; Target 78696; HLA-C*02:02; SLC45A2; ENSG00000164175; TAA
ILVGGGLGF

SEQ ID NO: 78697 - protein, 9 aa, Homo sapiens
  misc_feature: Table A; Target 78697; HLA-C*07:04; SLC45A2; ENSG00000164175; TAA
ILVGGGLGF

SEQ ID NO: 78698 - protein, 9 aa, Homo sapiens
  misc_feature: Table A; Target 78698; HLA-C*14:02; SLC45A2; ENSG00000164175; TAA
ILVGGGLGF

SEQ ID NO: 78699 - protein, 10 aa, Homo sapiens
  misc_feature: Table A; Target 78699; HLA-A*02:01; SLC45A2; ENSG00000164175; TAA
ILVGGGLGFL

SEQ ID NO: 78700 - protein, 10 aa, Homo sapiens
  misc_feature: Table A; Target 78700; HLA-A*02:03; SLC45A2; ENSG00000164175; TAA
ILVGGGLGFL

SEQ ID NO: 78701 - protein, 11 aa, Homo sapiens
  misc_feature: Table A; Target 78701; HLA-A*02:01; SLC45A2; ENSG00000164175; TAA
ILVGGGLGFLV

SEQ ID NO: 78702 - protein, 11 aa, Homo sapiens
  misc_feature: Table A; Target 78702; HLA-A*02:04; SLC45A2; ENSG00000164175; TAA
ILVGGGLGFLV

SEQ ID NO: 78703 - protein, 8 aa, Homo sapiens
  misc_feature: Table A; Target 78703; HLA-C*14:02; SLC45A2; ENSG00000164175; TAA
INSVFSSL

SEQ ID NO: 78704 - protein, 9 aa, Homo sapiens
  misc_feature: Table A; Target 78704; HLA-A*29:02; SLC45A2; ENSG00000164175; TAA
INSVFSSLY

SEQ ID NO: 78705 - protein, 9 aa, Homo sapiens
  misc_feature: Table A; Target 78705; HLA-A*30:02; SLC45A2; ENSG00000164175; TAA
INSVFSSLY

SEQ ID NO: 78706 - protein, 9 aa, Homo sapiens
  misc_feature: Table A; Target 78706; HLA-A*01:01; SLC45A2; ENSG00000164175; TAA
ISEAPLTEV

SEQ ID NO: 78707 - protein, 9 aa, Homo sapiens
  misc_feature: Table A; Target 78707; HLA-A*02:01; SLC45A2; ENSG00000164175; TAA
ISEAPLTEV

SEQ ID NO: 78708 - protein, 9 aa, Homo sapiens
  misc_feature: Table A; Target 78708; HLA-A*02:07; SLC45A2; ENSG00000164175; TAA
ISEAPLTEV

SEQ ID NO: 78709 - protein, 9 aa, Homo sapiens
  misc_feature: Table A; Target 78709; HLA-B*13:02; SLC45A2; ENSG00000164175; TAA
ISEAPLTEV

SEQ ID NO: 78710 - protein, 9 aa, Homo sapiens
  misc_feature: Table A; Target 78710; HLA-B*40:02; SLC45A2; ENSG00000164175; TAA
ISEAPLTEV

SEQ ID NO: 78711 - protein, 9 aa, Homo sapiens
  misc_feature: Table A; Target 78711; HLA-B*46:01; SLC45A2; ENSG00000164175; TAA
ISEAPLTEV

SEQ ID NO: 78712 - protein, 9 aa, Homo sapiens
  misc_feature: Table A; Target 78712; HLA-B*49:01; SLC45A2; ENSG00000164175; TAA
ISEAPLTEV

SEQ ID NO: 78713 - protein, 9 aa, Homo sapiens
  misc_feature: Table A; Target 78713; HLA-B*58:01; SLC45A2; ENSG00000164175; TAA
ISEAPLTEV

SEQ ID NO: 78714 - protein, 9 aa, Homo sapiens
  misc_feature: Table A; Target 78714; HLA-C*01:02; SLC45A2; ENSG00000164175; TAA
ISEAPLTEV

SEQ ID NO: 78715 - protein, 9 aa, Homo sapiens
  misc_feature: Table A; Target 78715; HLA-C*02:02; SLC45A2; ENSG00000164175; TAA
ISEAPLTEV

SEQ ID NO: 78716 - protein, 9 aa, Homo sapiens
  misc_feature: Table A; Target 78716; HLA-C*03:04; SLC45A2; ENSG00000164175; TAA
ISEAPLTEV

SEQ ID NO: 78717 - protein, 9 aa, Homo sapiens
  misc_feature: Table A; Target 78717; HLA-C*05:01; SLC45A2; ENSG00000164175; TAA
ISEAPLTEV

SEQ ID NO: 78718 - protein, 9 aa, Homo sapiens
  misc_feature: Table A; Target 78718; HLA-C*06:02; SLC45A2; ENSG00000164175; TAA
ISEAPLTEV

SEQ ID NO: 78719 - protein, 9 aa, Homo sapiens
  misc_feature: Table A; Target 78719; HLA-C*12:03; SLC45A2; ENSG00000164175; TAA
ISEAPLTEV

SEQ ID NO: 78720 - protein, 9 aa, Homo sapiens
  misc_feature: Table A; Target 78720; HLA-C*16:02; SLC45A2; ENSG00000164175; TAA
ISEAPLTEV

SEQ ID NO: 78721 - protein, 11 aa, Homo sapiens
  misc_feature: Table A; Target 78721; HLA-A*01:01; SLC45A2; ENSG00000164175; TAA
ISEAPLTEVAK

SEQ ID NO: 78722 - protein, 11 aa, Homo sapiens
  misc_feature: Table A; Target 78722; HLA-A*03:02; SLC45A2; ENSG00000164175; TAA
ISEAPLTEVAK

SEQ ID NO: 78723 - protein, 11 aa, Homo sapiens
  misc_feature: Table A; Target 78723; HLA-A*11:01; SLC45A2; ENSG00000164175; TAA
ISEAPLTEVAK

SEQ ID NO: 78724 - protein, 11 aa, Homo sapiens
  misc_feature: Table A; Target 78724; HLA-B*27:02; SLC45A2; ENSG00000164175; TAA
ISEAPLTEVAK

SEQ ID NO: 78725 - protein, 11 aa, Homo sapiens
  misc_feature: Table A; Target 78725; HLA-C*07:06; SLC45A2; ENSG00000164175; TAA
ISEAPLTEVAK

SEQ ID NO: 78726 - protein, 9 aa, Homo sapiens
  misc_feature: Table A; Target 78726; HLA-B*54:01; SLC45A2; ENSG00000164175; TAA
ISHLIGWTA

SEQ ID NO: 78727 - protein, 11 aa, Homo sapiens
  misc_feature: Table A; Target 78727; HLA-B*57:01; SLC45A2; ENSG00000164175; TAA
ISVTMIGVVLF

SEQ ID NO: 78728 - protein, 8 aa, Homo sapiens
  misc_feature: Table A; Target 78728; HLA-C*03:03; SLC45A2; ENSG00000164175; TAA
ITASAVAL

SEQ ID NO: 78729 - protein, 8 aa, Homo sapiens
  misc_feature: Table A; Target 78729; HLA-C*03:04; SLC45A2; ENSG00000164175; TAA
ITASAVAL

SEQ ID NO: 78730 - protein, 8 aa, Homo sapiens
  misc_feature: Table A; Target 78730; HLA-C*14:02; SLC45A2; ENSG00000164175; TAA
ITASAVAL

SEQ ID NO: 78731 - protein, 9 aa, Homo sapiens
  misc_feature: Table A; Target 78731; HLA-A*02:03; SLC45A2; ENSG00000164175; TAA
ITASAVALI

SEQ ID NO: 78732 - protein, 9 aa, Homo sapiens
  misc_feature: Table A; Target 78732; HLA-A*23:01; SLC45A2; ENSG00000164175; TAA
ITASAVALI

SEQ ID NO: 78733 - protein, 9 aa, Homo sapiens
  misc_feature: Table A; Target 78733; HLA-A*24:02; SLC45A2; ENSG00000164175; TAA
ITASAVALI

SEQ ID NO: 78734 - protein, 9 aa, Homo sapiens
  misc_feature: Table A; Target 78734; HLA-A*68:02; SLC45A2; ENSG00000164175; TAA
ITASAVALI

SEQ ID NO: 78735 - protein, 9 aa, Homo sapiens
  misc_feature: Table A; Target 78735; HLA-B*13:02; SLC45A2; ENSG00000164175; TAA
ITASAVALI

SEQ ID NO: 78736 - protein, 9 aa, Homo sapiens
  misc_feature: Table A; Target 78736; HLA-C*12:03; SLC45A2; ENSG00000164175; TAA
ITASAVALI

SEQ ID NO: 78737 - protein, 8 aa, Homo sapiens
  misc_feature: Table A; Target 78737; HLA-B*15:03; SLC45A2; ENSG00000164175; TAA
IVYRGDPY

SEQ ID NO: 78738 - protein, 8 aa, Homo sapiens
  misc_feature: Table A; Target 78738; HLA-B*46:01; SLC45A2; ENSG00000164175; TAA
IVYRGDPY

SEQ ID NO: 78739 - protein, 8 aa, Homo sapiens
  misc_feature: Table A; Target 78739; HLA-C*03:03; SLC45A2; ENSG00000164175; TAA
IVYRGDPY

SEQ ID NO: 78740 - protein, 8 aa, Homo sapiens
  misc_feature: Table A; Target 78740; HLA-C*16:01; SLC45A2; ENSG00000164175; TAA
IVYRGDPY

SEQ ID NO: 78741 - protein, 10 aa, Homo sapiens
  misc_feature: Table A; Target 78741; HLA-A*02:01; SLC45A2; ENSG00000164175; TAA
IVYRGDPYSA

SEQ ID NO: 78742 - protein, 10 aa, Homo sapiens
  misc_feature: Table A; Target 78742; HLA-A*02:03; SLC45A2; ENSG00000164175; TAA
IVYRGDPYSA

SEQ ID NO: 78743 - protein, 10 aa, Homo sapiens
  misc_feature: Table A; Target 78743; HLA-A*03:01; SLC45A2; ENSG00000164175; TAA
IVYRGDPYSA

SEQ ID NO: 78744 - protein, 10 aa, Homo sapiens
  misc_feature: Table A; Target 78744; HLA-B*40:02; SLC45A2; ENSG00000164175; TAA
IVYRGDPYSA

SEQ ID NO: 78745 - protein, 10 aa, Homo sapiens
  misc_feature: Table A; Target 78745; HLA-B*54:01; SLC45A2; ENSG00000164175; TAA
IVYRGDPYSA

SEQ ID NO: 78746 - protein, 10 aa, Homo sapiens
  misc_feature: Table A; Target 78746; HLA-B*55:01; SLC45A2; ENSG00000164175; TAA
IVYRGDPYSA

SEQ ID NO: 78747 - protein, 10 aa, Homo sapiens
  misc_feature: Table A; Target 78747; HLA-B*56:01; SLC45A2; ENSG00000164175; TAA
IVYRGDPYSA

SEQ ID NO: 78748 - protein, 8 aa, Homo sapiens
  misc_feature: Table A; Target 78748; HLA-C*04:01; SLC45A2; ENSG00000164175; TAA
IYERGVEV

SEQ ID NO: 78749 - protein, 8 aa, Homo sapiens
  misc_feature: Table A; Target 78749; HLA-C*05:01; SLC45A2; ENSG00000164175; TAA
IYERGVEV

SEQ ID NO: 78750 - protein, 8 aa, Homo sapiens
  misc_feature: Table A; Target 78750; HLA-C*14:02; SLC45A2; ENSG00000164175; TAA
IYERGVEV

SEQ ID NO: 78751 - protein, 9 aa, Homo sapiens
  misc_feature: Table A; Target 78751; HLA-A*32:01; SLC45A2; ENSG00000164175; TAA
KGIPPQQTP

SEQ ID NO: 78752 - protein, 9 aa, Homo sapiens
  misc_feature: Table A; Target 78752; HLA-B*58:01; SLC45A2; ENSG00000164175; TAA
KGIPPQQTP

SEQ ID NO: 78753 - protein, 9 aa, Homo sapiens
  misc_feature: Table A; Target 78753; HLA-B*57:01; SLC45A2; ENSG00000164175; TAA
KGLHYHALF

SEQ ID NO: 78754 - protein, 9 aa, Homo sapiens
  misc_feature: Table A; Target 78754; HLA-B*07:02; SLC45A2; ENSG00000164175; TAA
KNGYVNPEL

SEQ ID NO: 78755 - protein, 9 aa, Homo sapiens
  misc_feature: Table A; Target 78755; HLA-B*40:02; SLC45A2; ENSG00000164175; TAA
KNGYVNPEL

SEQ ID NO: 78756 - protein, 9 aa, Homo sapiens
  misc_feature: Table A; Target 78756; HLA-B*58:01; SLC45A2; ENSG00000164175; TAA
KNGYVNPEL

SEQ ID NO: 78757 - protein, 9 aa, Homo sapiens
  misc_feature: Table A; Target 78757; HLA-C*06:02; SLC45A2; ENSG00000164175; TAA
KNGYVNPEL

SEQ ID NO: 78758 - protein, 9 aa, Homo sapiens
  misc_feature: Table A; Target 78758; HLA-C*07:01; SLC45A2; ENSG00000164175; TAA
KNGYVNPEL

SEQ ID NO: 78759 - protein, 9 aa, Homo sapiens
  misc_feature: Table A; Target 78759; HLA-C*07:02; SLC45A2; ENSG00000164175; TAA
KNGYVNPEL

SEQ ID NO: 78760 - protein, 9 aa, Homo sapiens
  misc_feature: Table A; Target 78760; HLA-C*12:03; SLC45A2; ENSG00000164175; TAA
KNGYVNPEL

SEQ ID NO: 78761 - protein, 9 aa, Homo sapiens
  misc_feature: Table A; Target 78761; HLA-A*02:04; SLC45A2; ENSG00000164175; TAA
KVLVSYIGL

SEQ ID NO: 78762 - protein, 9 aa, Homo sapiens
  misc_feature: Table A; Target 78762; HLA-A*02:07; SLC45A2; ENSG00000164175; TAA
KVLVSYIGL

SEQ ID NO: 78763 - protein, 9 aa, Homo sapiens
  misc_feature: Table A; Target 78763; HLA-A*03:01; SLC45A2; ENSG00000164175; TAA
KVLVSYIGL

SEQ ID NO: 78764 - protein, 9 aa, Homo sapiens
  misc_feature: Table A; Target 78764; HLA-A*31:01; SLC45A2; ENSG00000164175; TAA
KVLVSYIGL

SEQ ID NO: 78765 - protein, 10 aa, Homo sapiens
  misc_feature: Table A; Target 78765; HLA-A*03:01; SLC45A2; ENSG00000164175; TAA
KVLVSYIGLK

SEQ ID NO: 78766 - protein, 10 aa, Homo sapiens
  misc_feature: Table A; Target 78766; HLA-A*01:01; SLC45A2; ENSG00000164175; TAA
LADDGPFDSV

SEQ ID NO: 78767 - protein, 10 aa, Homo sapiens
  misc_feature: Table A; Target 78767; HLA-A*02:07; SLC45A2; ENSG00000164175; TAA
LADDGPFDSV

SEQ ID NO: 78768 - protein, 10 aa, Homo sapiens
  misc_feature: Table A; Target 78768; HLA-B*27:05; SLC45A2; ENSG00000164175; TAA
LADDGPFDSV

SEQ ID NO: 78769 - protein, 10 aa, Homo sapiens
  misc_feature: Table A; Target 78769; HLA-C*01:02; SLC45A2; ENSG00000164175; TAA
LADDGPFDSV

SEQ ID NO: 78770 - protein, 10 aa, Homo sapiens
  misc_feature: Table A; Target 78770; HLA-C*03:03; SLC45A2; ENSG00000164175; TAA
LADDGPFDSV

SEQ ID NO: 78771 - protein, 10 aa, Homo sapiens
  misc_feature: Table A; Target 78771; HLA-C*03:04; SLC45A2; ENSG00000164175; TAA
LADDGPFDSV

SEQ ID NO: 78772 - protein, 10 aa, Homo sapiens
  misc_feature: Table A; Target 78772; HLA-C*05:01; SLC45A2; ENSG00000164175; TAA
LADDGPFDSV

SEQ ID NO: 78773 - protein, 10 aa, Homo sapiens
  misc_feature: Table A; Target 78773; HLA-C*03:03; SLC45A2; ENSG00000164175; TAA
LCINSVFSSL

SEQ ID NO: 78774 - protein, 10 aa, Homo sapiens
  misc_feature: Table A; Target 78774; HLA-C*03:04; SLC45A2; ENSG00000164175; TAA
LCINSVFSSL

SEQ ID NO: 78775 - protein, 8 aa, Homo sapiens
  misc_feature: Table A; Target 78775; HLA-B*35:01; SLC45A2; ENSG00000164175; TAA
LFDFAADF

SEQ ID NO: 78776 - protein, 8 aa, Homo sapiens
  misc_feature: Table A; Target 78776; HLA-C*04:01; SLC45A2; ENSG00000164175; TAA
LFDFAADF

SEQ ID NO: 78777 - protein, 8 aa, Homo sapiens
  misc_feature: Table A; Target 78777; HLA-A*23:01; SLC45A2; ENSG00000164175; TAA
LFGLGTGF

SEQ ID NO: 78778 - protein, 8 aa, Homo sapiens
  misc_feature: Table A; Target 78778; HLA-C*04:01; SLC45A2; ENSG00000164175; TAA
LFGLGTGF

SEQ ID NO: 78779 - protein, 8 aa, Homo sapiens
  misc_feature: Table A; Target 78779; HLA-C*14:02; SLC45A2; ENSG00000164175; TAA
LFGLGTGF

SEQ ID NO: 78780 - protein, 9 aa, Homo sapiens
  misc_feature: Table A; Target 78780; HLA-C*04:01; SLC45A2; ENSG00000164175; TAA
LFGVMSSTL

SEQ ID NO: 78781 - protein, 9 aa, Homo sapiens
  misc_feature: Table A; Target 78781; HLA-C*14:02; SLC45A2; ENSG00000164175; TAA
LFGVMSSTL

SEQ ID NO: 78782 - protein, 10 aa, Homo sapiens
  misc_feature: Table A; Target 78782; HLA-A*29:02; SLC45A2; ENSG00000164175; TAA
LFGVMSSTLY

SEQ ID NO: 78783 - protein, 9 aa, Homo sapiens
  misc_feature: Table A; Target 78783; HLA-A*23:01; SLC45A2; ENSG00000164175; TAA
LFPNVYSTL

SEQ ID NO: 78784 - protein, 9 aa, Homo sapiens
  misc_feature: Table A; Target 78784; HLA-A*24:02; SLC45A2; ENSG00000164175; TAA
LFPNVYSTL

SEQ ID NO: 78785 - protein, 9 aa, Homo sapiens
  misc_feature: Table A; Target 78785; HLA-C*01:02; SLC45A2; ENSG00000164175; TAA
LFPNVYSTL

SEQ ID NO: 78786 - protein, 9 aa, Homo sapiens
  misc_feature: Table A; Target 78786; HLA-C*14:02; SLC45A2; ENSG00000164175; TAA
LFPNVYSTL

SEQ ID NO: 78787 - protein, 9 aa, Homo sapiens
  misc_feature: Table A; Target 78787; HLA-C*01:02; SLC45A2; ENSG00000164175; TAA
LFTGFGGAL

SEQ ID NO: 78788 - protein, 9 aa, Homo sapiens
  misc_feature: Table A; Target 78788; HLA-C*03:03; SLC45A2; ENSG00000164175; TAA
LFTGFGGAL

SEQ ID NO: 78789 - protein, 9 aa, Homo sapiens
  misc_feature: Table A; Target 78789; HLA-C*03:04; SLC45A2; ENSG00000164175; TAA
LFTGFGGAL

SEQ ID NO: 78790 - protein, 9 aa, Homo sapiens
  misc_feature: Table A; Target 78790; HLA-C*14:02; SLC45A2; ENSG00000164175; TAA
LFTGFGGAL

SEQ ID NO: 78791 - protein, 11 aa, Homo sapiens
  misc_feature: Table A; Target 78791; HLA-A*29:02; SLC45A2; ENSG00000164175; TAA
LFTGFGGALGY

SEQ ID NO: 78792 - protein, 8 aa, Homo sapiens
  misc_feature: Table A; Target 78792; HLA-B*54:01; SLC45A2; ENSG00000164175; TAA
LGFLVNTA

SEQ ID NO: 78793 - protein, 9 aa, Homo sapiens
  misc_feature: Table A; Target 78793; HLA-B*46:01; SLC45A2; ENSG00000164175; TAA
LGRLLGTEF

SEQ ID NO: 78794 - protein, 9 aa, Homo sapiens
  misc_feature: Table A; Target 78794; HLA-C*02:02; SLC45A2; ENSG00000164175; TAA
LGTGFIGLF

SEQ ID NO: 78795 - protein, 9 aa, Homo sapiens
  misc_feature: Table A; Target 78795; HLA-C*12:03; SLC45A2; ENSG00000164175; TAA
LGTGFIGLF

SEQ ID NO: 78796 - protein, 9 aa, Homo sapiens
  misc_feature: Table A; Target 78796; HLA-A*02:01; SLC45A2; ENSG00000164175; TAA
LIYERGVEV

SEQ ID NO: 78797 - protein, 9 aa, Homo sapiens
  misc_feature: Table A; Target 78797; HLA-A*02:03; SLC45A2; ENSG00000164175; TAA
LIYERGVEV

SEQ ID NO: 78798 - protein, 9 aa, Homo sapiens
  misc_feature: Table A; Target 78798; HLA-A*02:04; SLC45A2; ENSG00000164175; TAA
LIYERGVEV

SEQ ID NO: 78799 - protein, 9 aa, Homo sapiens
  misc_feature: Table A; Target 78799; HLA-A*02:07; SLC45A2; ENSG00000164175; TAA
LIYERGVEV

SEQ ID NO: 78800 - protein, 9 aa, Homo sapiens
  misc_feature: Table A; Target 78800; HLA-A*30:01; SLC45A2; ENSG00000164175; TAA
LIYERGVEV

SEQ ID NO: 78801 - protein, 9 aa, Homo sapiens
  misc_feature: Table A; Target 78801; HLA-A*68:02; SLC45A2; ENSG00000164175; TAA
LIYERGVEV

SEQ ID NO: 78802 - protein, 9 aa, Homo sapiens
  misc_feature: Table A; Target 78802; HLA-B*08:01; SLC45A2; ENSG00000164175; TAA
LIYERGVEV

SEQ ID NO: 78803 - protein, 9 aa, Homo sapiens
  misc_feature: Table A; Target 78803; HLA-B*13:02; SLC45A2; ENSG00000164175; TAA
LIYERGVEV

SEQ ID NO: 78804 - protein, 9 aa, Homo sapiens
  misc_feature: Table A; Target 78804; HLA-B*37:01; SLC45A2; ENSG00000164175; TAA
LIYERGVEV

SEQ ID NO: 78805 - protein, 9 aa, Homo sapiens
  misc_feature: Table A; Target 78805; HLA-B*46:01; SLC45A2; ENSG00000164175; TAA
LIYERGVEV

SEQ ID NO: 78806 - protein, 9 aa, Homo sapiens
  misc_feature: Table A; Target 78806; HLA-B*49:01; SLC45A2; ENSG00000164175; TAA
LIYERGVEV

SEQ ID NO: 78807 - protein, 9 aa, Homo sapiens
  misc_feature: Table A; Target 78807; HLA-B*51:01; SLC45A2; ENSG00000164175; TAA
LIYERGVEV

SEQ ID NO: 78808 - protein, 9 aa, Homo sapiens
  misc_feature: Table A; Target 78808; HLA-B*54:01; SLC45A2; ENSG00000164175; TAA
LIYERGVEV

SEQ ID NO: 78809 - protein, 9 aa, Homo sapiens
  misc_feature: Table A; Target 78809; HLA-B*55:01; SLC45A2; ENSG00000164175; TAA
LIYERGVEV

SEQ ID NO: 78810 - protein, 9 aa, Homo sapiens
  misc_feature: Table A; Target 78810; HLA-C*02:02; SLC45A2; ENSG00000164175; TAA
LIYERGVEV

SEQ ID NO: 78811 - protein, 9 aa, Homo sapiens
  misc_feature: Table A; Target 78811; HLA-C*03:03; SLC45A2; ENSG00000164175; TAA
LIYERGVEV

SEQ ID NO: 78812 - protein, 9 aa, Homo sapiens
  misc_feature: Table A; Target 78812; HLA-C*03:04; SLC45A2; ENSG00000164175; TAA
LIYERGVEV

SEQ ID NO: 78813 - protein, 9 aa, Homo sapiens
  misc_feature: Table A; Target 78813; HLA-C*05:01; SLC45A2; ENSG00000164175; TAA
LIYERGVEV

SEQ ID NO: 78814 - protein, 9 aa, Homo sapiens
  misc_feature: Table A; Target 78814; HLA-C*12:03; SLC45A2; ENSG00000164175; TAA
LIYERGVEV

SEQ ID NO: 78815 - protein, 9 aa, Homo sapiens
  misc_feature: Table A; Target 78815; HLA-C*16:01; SLC45A2; ENSG00000164175; TAA
LIYERGVEV

SEQ ID NO: 78816 - protein, 9 aa, Homo sapiens
  misc_feature: Table A; Target 78816; HLA-C*16:02; SLC45A2; ENSG00000164175; TAA
LIYERGVEV

SEQ ID NO: 78817 - protein, 9 aa, Homo sapiens
  misc_feature: Table A; Target 78817; HLA-C*16:04; SLC45A2; ENSG00000164175; TAA
LIYERGVEV

SEQ ID NO: 78818 - protein, 9 aa, Homo sapiens
  misc_feature: Table A; Target 78818; HLA-A*02:07; SLC45A2; ENSG00000164175; TAA
LLFGLGTGF

SEQ ID NO: 78819 - protein, 9 aa, Homo sapiens
  misc_feature: Table A; Target 78819; HLA-A*23:01; SLC45A2; ENSG00000164175; TAA
LLFGLGTGF

SEQ ID NO: 78820 - protein, 9 aa, Homo sapiens
  misc_feature: Table A; Target 78820; HLA-A*29:02; SLC45A2; ENSG00000164175; TAA
LLFGLGTGF

SEQ ID NO: 78821 - protein, 9 aa, Homo sapiens
  misc_feature: Table A; Target 78821; HLA-A*32:01; SLC45A2; ENSG00000164175; TAA
LLFGLGTGF

SEQ ID NO: 78822 - protein, 9 aa, Homo sapiens
  misc_feature: Table A; Target 78822; HLA-B*15:01; SLC45A2; ENSG00000164175; TAA
LLFGLGTGF

SEQ ID NO: 78823 - protein, 9 aa, Homo sapiens
  misc_feature: Table A; Target 78823; HLA-B*15:03; SLC45A2; ENSG00000164175; TAA
LLFGLGTGF

SEQ ID NO: 78824 - protein, 9 aa, Homo sapiens
  misc_feature: Table A; Target 78824; HLA-B*46:01; SLC45A2; ENSG00000164175; TAA
LLFGLGTGF

SEQ ID NO: 78825 - protein, 9 aa, Homo sapiens
  misc_feature: Table A; Target 78825; HLA-C*02:02; SLC45A2; ENSG00000164175; TAA
LLFGLGTGF

SEQ ID NO: 78826 - protein, 9 aa, Homo sapiens
  misc_feature: Table A; Target 78826; HLA-C*07:04; SLC45A2; ENSG00000164175; TAA
LLFGLGTGF

SEQ ID NO: 78827 - protein, 10 aa, Homo sapiens
  misc_feature: Table A; Target 78827; HLA-A*02:01; SLC45A2; ENSG00000164175; TAA
LLFGLGTGFI

SEQ ID NO: 78828 - protein, 10 aa, Homo sapiens
  misc_feature: Table A; Target 78828; HLA-A*02:03; SLC45A2; ENSG00000164175; TAA
LLFGLGTGFI

SEQ ID NO: 78829 - protein, 10 aa, Homo sapiens
  misc_feature: Table A; Target 78829; HLA-A*02:04; SLC45A2; ENSG00000164175; TAA
LLFGLGTGFI

SEQ ID NO: 78830 - protein, 8 aa, Homo sapiens
  misc_feature: Table A; Target 78830; HLA-A*02:01; SLC45A2; ENSG00000164175; TAA
LLGTEFQV

SEQ ID NO: 78831 - protein, 8 aa, Homo sapiens
  misc_feature: Table A; Target 78831; HLA-A*02:04; SLC45A2; ENSG00000164175; TAA
LLGTEFQV

SEQ ID NO: 78832 - protein, 9 aa, Homo sapiens
  misc_feature: Table A; Target 78832; HLA-A*02:01; SLC45A2; ENSG00000164175; TAA
LLQPVVGSA

SEQ ID NO: 78833 - protein, 9 aa, Homo sapiens
  misc_feature: Table A; Target 78833; HLA-A*02:03; SLC45A2; ENSG00000164175; TAA
LLQPVVGSA

SEQ ID NO: 78834 - protein, 9 aa, Homo sapiens
  misc_feature: Table A; Target 78834; HLA-A*02:04; SLC45A2; ENSG00000164175; TAA
LLQPVVGSA

SEQ ID NO: 78835 - protein, 9 aa, Homo sapiens
  misc_feature: Table A; Target 78835; HLA-A*02:07; SLC45A2; ENSG00000164175; TAA
LLQPVVGSA

SEQ ID NO: 78836 - protein, 9 aa, Homo sapiens
  misc_feature: Table A; Target 78836; HLA-A*32:01; SLC45A2; ENSG00000164175; TAA
LLQPVVGSA

SEQ ID NO: 78837 - protein, 9 aa, Homo sapiens
  misc_feature: Table A; Target 78837; HLA-B*39:01; SLC45A2; ENSG00000164175; TAA
LLQPVVGSA

SEQ ID NO: 78838 - protein, 9 aa, Homo sapiens
  misc_feature: Table A; Target 78838; HLA-B*54:01; SLC45A2; ENSG00000164175; TAA
LLQPVVGSA

SEQ ID NO: 78839 - protein, 9 aa, Homo sapiens
  misc_feature: Table A; Target 78839; HLA-B*55:01; SLC45A2; ENSG00000164175; TAA
LLQPVVGSA

SEQ ID NO: 78840 - protein, 9 aa, Homo sapiens
  misc_feature: Table A; Target 78840; HLA-B*56:01; SLC45A2; ENSG00000164175; TAA
LLQPVVGSA

SEQ ID NO: 78841 - protein, 9 aa, Homo sapiens
  misc_feature: Table A; Target 78841; HLA-C*06:02; SLC45A2; ENSG00000164175; TAA
LLQPVVGSA

SEQ ID NO: 78842 - protein, 9 aa, Homo sapiens
  misc_feature: Table A; Target 78842; HLA-C*14:02; SLC45A2; ENSG00000164175; TAA
LLQPVVGSA

SEQ ID NO: 78843 - protein, 11 aa, Homo sapiens
  misc_feature: Table A; Target 78843; HLA-A*01:01; SLC45A2; ENSG00000164175; TAA
LLSVGLPSSLY

SEQ ID NO: 78844 - protein, 8 aa, Homo sapiens
  misc_feature: Table A; Target 78844; HLA-B*51:01; SLC45A2; ENSG00000164175; TAA
LPSSLYSI

SEQ ID NO: 78845 - protein, 8 aa, Homo sapiens
  misc_feature: Table A; Target 78845; HLA-B*54:01; SLC45A2; ENSG00000164175; TAA
LPSSLYSI

SEQ ID NO: 78846 - protein, 8 aa, Homo sapiens
  misc_feature: Table A; Target 78846; HLA-B*56:01; SLC45A2; ENSG00000164175; TAA
LPSSLYSI

SEQ ID NO: 78847 - protein, 9 aa, Homo sapiens
  misc_feature: Table A; Target 78847; HLA-B*35:03; SLC45A2; ENSG00000164175; TAA
LPSSLYSIV

SEQ ID NO: 78848 - protein, 9 aa, Homo sapiens
  misc_feature: Table A; Target 78848; HLA-B*51:01; SLC45A2; ENSG00000164175; TAA
LPSSLYSIV

SEQ ID NO: 78849 - protein, 9 aa, Homo sapiens
  misc_feature: Table A; Target 78849; HLA-B*54:01; SLC45A2; ENSG00000164175; TAA
LPSSLYSIV

SEQ ID NO: 78850 - protein, 9 aa, Homo sapiens
  misc_feature: Table A; Target 78850; HLA-B*56:01; SLC45A2; ENSG00000164175; TAA
LPSSLYSIV

SEQ ID NO: 78851 - protein, 9 aa, Homo sapiens
  misc_feature: Table A; Target 78851; HLA-A*24:02; SLC45A2; ENSG00000164175; TAA
LSPILGFLL

SEQ ID NO: 78852 - protein, 9 aa, Homo sapiens
  misc_feature: Table A; Target 78852; HLA-A*01:01; SLC45A2; ENSG00000164175; TAA
LSSDGMYEY

SEQ ID NO: 78853 - protein, 9 aa, Homo sapiens
  misc_feature: Table A; Target 78853; HLA-A*26:01; SLC45A2; ENSG00000164175; TAA
LSSDGMYEY

SEQ ID NO: 78854 - protein, 9 aa, Homo sapiens
  misc_feature: Table A; Target 78854; HLA-A*29:02; SLC45A2; ENSG00000164175; TAA
LSSDGMYEY

SEQ ID NO: 78855 - protein, 9 aa, Homo sapiens
  misc_feature: Table A; Target 78855; HLA-A*30:02; SLC45A2; ENSG00000164175; TAA
LSSDGMYEY

SEQ ID NO: 78856 - protein, 9 aa, Homo sapiens
  misc_feature: Table A; Target 78856; HLA-A*32:01; SLC45A2; ENSG00000164175; TAA
LSSDGMYEY

SEQ ID NO: 78857 - protein, 9 aa, Homo sapiens
  misc_feature: Table A; Target 78857; HLA-B*35:01; SLC45A2; ENSG00000164175; TAA
LSSDGMYEY

SEQ ID NO: 78858 - protein, 9 aa, Homo sapiens
  misc_feature: Table A; Target 78858; HLA-B*46:01; SLC45A2; ENSG00000164175; TAA
LSSDGMYEY

SEQ ID NO: 78859 - protein, 9 aa, Homo sapiens
  misc_feature: Table A; Target 78859; HLA-B*58:01; SLC45A2; ENSG00000164175; TAA
LSSDGMYEY

SEQ ID NO: 78860 - protein, 9 aa, Homo sapiens
  misc_feature: Table A; Target 78860; HLA-C*02:02; SLC45A2; ENSG00000164175; TAA
LSSDGMYEY

SEQ ID NO: 78861 - protein, 9 aa, Homo sapiens
  misc_feature: Table A; Target 78861; HLA-C*16:01; SLC45A2; ENSG00000164175; TAA
LSSDGMYEY

SEQ ID NO: 78862 - protein, 9 aa, Homo sapiens
  misc_feature: Table A; Target 78862; HLA-C*16:02; SLC45A2; ENSG00000164175; TAA
LSSDGMYEY

SEQ ID NO: 78863 - protein, 9 aa, Homo sapiens
  misc_feature: Table A; Target 78863; HLA-C*16:04; SLC45A2; ENSG00000164175; TAA
LSSDGMYEY

SEQ ID NO: 78864 - protein, 9 aa, Homo sapiens
  misc_feature: Table A; Target 78864; HLA-B*40:01; SLC45A2; ENSG00000164175; TAA
LSVGLPSSL

SEQ ID NO: 78865 - protein, 9 aa, Homo sapiens
  misc_feature: Table A; Target 78865; HLA-B*58:01; SLC45A2; ENSG00000164175; TAA
LSVGLPSSL

SEQ ID NO: 78866 - protein, 9 aa, Homo sapiens
  misc_feature: Table A; Target 78866; HLA-C*02:02; SLC45A2; ENSG00000164175; TAA
LSVGLPSSL

SEQ ID NO: 78867 - protein, 9 aa, Homo sapiens
  misc_feature: Table A; Target 78867; HLA-C*03:03; SLC45A2; ENSG00000164175; TAA
LSVGLPSSL

SEQ ID NO: 78868 - protein, 9 aa, Homo sapiens
  misc_feature: Table A; Target 78868; HLA-C*03:04; SLC45A2; ENSG00000164175; TAA
LSVGLPSSL

SEQ ID NO: 78869 - protein, 9 aa, Homo sapiens
  misc_feature: Table A; Target 78869; HLA-C*12:03; SLC45A2; ENSG00000164175; TAA
LSVGLPSSL

SEQ ID NO: 78870 - protein, 9 aa, Homo sapiens
  misc_feature: Table A; Target 78870; HLA-C*16:01; SLC45A2; ENSG00000164175; TAA
LSVGLPSSL

SEQ ID NO: 78871 - protein, 10 aa, Homo sapiens
  misc_feature: Table A; Target 78871; HLA-A*01:01; SLC45A2; ENSG00000164175; TAA
LSVGLPSSLY

SEQ ID NO: 78872 - protein, 10 aa, Homo sapiens
  misc_feature: Table A; Target 78872; HLA-A*26:01; SLC45A2; ENSG00000164175; TAA
LSVGLPSSLY

SEQ ID NO: 78873 - protein, 10 aa, Homo sapiens
  misc_feature: Table A; Target 78873; HLA-A*29:02; SLC45A2; ENSG00000164175; TAA
LSVGLPSSLY

SEQ ID NO: 78874 - protein, 10 aa, Homo sapiens
  misc_feature: Table A; Target 78874; HLA-A*30:02; SLC45A2; ENSG00000164175; TAA
LSVGLPSSLY

SEQ ID NO: 78875 - protein, 10 aa, Homo sapiens
  misc_feature: Table A; Target 78875; HLA-C*07:01; SLC45A2; ENSG00000164175; TAA
LSVGLPSSLY

SEQ ID NO: 78876 - protein, 9 aa, Homo sapiens
  misc_feature: Table A; Target 78876; HLA-A*68:02; SLC45A2; ENSG00000164175; TAA
LTLGVMMLV

SEQ ID NO: 78877 - protein, 10 aa, Homo sapiens
  misc_feature: Table A; Target 78877; HLA-A*68:02; SLC45A2; ENSG00000164175; TAA
LVGGGLGFLV

SEQ ID NO: 78878 - protein, 9 aa, Homo sapiens
  misc_feature: Table A; Target 78878; HLA-A*02:04; SLC45A2; ENSG00000164175; TAA
LVLTLCFTV

SEQ ID NO: 78879 - protein, 8 aa, Homo sapiens
  misc_feature: Table A; Target 78879; HLA-A*01:01; SLC45A2; ENSG00000164175; TAA
LVNMPPHY

SEQ ID NO: 78880 - protein, 8 aa, Homo sapiens
  misc_feature: Table A; Target 78880; HLA-A*29:02; SLC45A2; ENSG00000164175; TAA
LVNMPPHY

SEQ ID NO: 78881 - protein, 8 aa, Homo sapiens
  misc_feature: Table A; Target 78881; HLA-A*30:02; SLC45A2; ENSG00000164175; TAA
LVNMPPHY

SEQ ID NO: 78882 - protein, 8 aa, Homo sapiens
  misc_feature: Table A; Target 78882; HLA-B*39:01; SLC45A2; ENSG00000164175; TAA
LVNMPPHY

SEQ ID NO: 78883 - protein, 9 aa, Homo sapiens
  misc_feature: Table A; Target 78883; HLA-A*03:02; SLC45A2; ENSG00000164175; TAA
LVNMPPHYR

SEQ ID NO: 78884 - protein, 9 aa, Homo sapiens
  misc_feature: Table A; Target 78884; HLA-A*11:01; SLC45A2; ENSG00000164175; TAA
LVNMPPHYR

SEQ ID NO: 78885 - protein, 9 aa, Homo sapiens
  misc_feature: Table A; Target 78885; HLA-A*31:01; SLC45A2; ENSG00000164175; TAA
LVNMPPHYR

SEQ ID NO: 78886 - protein, 9 aa, Homo sapiens
  misc_feature: Table A; Target 78886; HLA-A*33:01; SLC45A2; ENSG00000164175; TAA
LVNMPPHYR

SEQ ID NO: 78887 - protein, 9 aa, Homo sapiens
  misc_feature: Table A; Target 78887; HLA-A*33:03; SLC45A2; ENSG00000164175; TAA
LVNMPPHYR

SEQ ID NO: 78888 - protein, 9 aa, Homo sapiens
  misc_feature: Table A; Target 78888; HLA-A*68:01; SLC45A2; ENSG00000164175; TAA
LVNMPPHYR

SEQ ID NO: 78889 - protein, 10 aa, Homo sapiens
  misc_feature: Table A; Target 78889; HLA-A*29:02; SLC45A2; ENSG00000164175; TAA
LVNMPPHYRY

SEQ ID NO: 78890 - protein, 9 aa, Homo sapiens
  misc_feature: Table A; Target 78890; HLA-B*46:01; SLC45A2; ENSG00000164175; TAA
LVNTAGTVV

SEQ ID NO: 78891 - protein, 9 aa, Homo sapiens
  misc_feature: Table A; Target 78891; HLA-B*51:01; SLC45A2; ENSG00000164175; TAA
LVNTAGTVV

SEQ ID NO: 78892 - protein, 9 aa, Homo sapiens
  misc_feature: Table A; Target 78892; HLA-C*01:02; SLC45A2; ENSG00000164175; TAA
LVNTAGTVV

SEQ ID NO: 78893 - protein, 9 aa, Homo sapiens
  misc_feature: Table A; Target 78893; HLA-C*03:03; SLC45A2; ENSG00000164175; TAA
LVNTAGTVV

SEQ ID NO: 78894 - protein, 9 aa, Homo sapiens
  misc_feature: Table A; Target 78894; HLA-C*03:04; SLC45A2; ENSG00000164175; TAA
LVNTAGTVV

SEQ ID NO: 78895 - protein, 9 aa, Homo sapiens
  misc_feature: Table A; Target 78895; HLA-C*05:01; SLC45A2; ENSG00000164175; TAA
LVNTAGTVV

SEQ ID NO: 78896 - protein, 9 aa, Homo sapiens
  misc_feature: Table A; Target 78896; HLA-C*07:04; SLC45A2; ENSG00000164175; TAA
LVNTAGTVV

SEQ ID NO: 78897 - protein, 9 aa, Homo sapiens
  misc_feature: Table A; Target 78897; HLA-C*14:02; SLC45A2; ENSG00000164175; TAA
LVNTAGTVV

SEQ ID NO: 78898 - protein, 11 aa, Homo sapiens
  misc_feature: Table A; Target 78898; HLA-A*01:01; SLC45A2; ENSG00000164175; TAA
LVSYIGLKGLY

SEQ ID NO: 78899 - protein, 11 aa, Homo sapiens
  misc_feature: Table A; Target 78899; HLA-A*29:02; SLC45A2; ENSG00000164175; TAA
LVSYIGLKGLY

SEQ ID NO: 78900 - protein, 9 aa, Homo sapiens
  misc_feature: Table A; Target 78900; HLA-B*35:01; SLC45A2; ENSG00000164175; TAA
LVWAISVTM

SEQ ID NO: 78901 - protein, 8 aa, Homo sapiens
  misc_feature: Table A; Target 78901; HLA-A*23:01; SLC45A2; ENSG00000164175; TAA
LYFTGYLL

SEQ ID NO: 78902 - protein, 8 aa, Homo sapiens
  misc_feature: Table A; Target 78902; HLA-A*24:02; SLC45A2; ENSG00000164175; TAA
LYFTGYLL

SEQ ID NO: 78903 - protein, 9 aa, Homo sapiens
  misc_feature: Table A; Target 78903; HLA-A*23:01; SLC45A2; ENSG00000164175; TAA
LYFTGYLLF

SEQ ID NO: 78904 - protein, 9 aa, Homo sapiens
  misc_feature: Table A; Target 78904; HLA-A*24:02; SLC45A2; ENSG00000164175; TAA
LYFTGYLLF

SEQ ID NO: 78905 - protein, 9 aa, Homo sapiens
  misc_feature: Table A; Target 78905; HLA-A*29:02; SLC45A2; ENSG00000164175; TAA
LYFTGYLLF

SEQ ID NO: 78906 - protein, 9 aa, Homo sapiens
  misc_feature: Table A; Target 78906; HLA-B*57:01; SLC45A2; ENSG00000164175; TAA
LYFTGYLLF

SEQ ID NO: 78907 - protein, 8 aa, Homo sapiens
  misc_feature: Table A; Target 78907; HLA-A*23:01; SLC45A2; ENSG00000164175; TAA
LYLNGATV

SEQ ID NO: 78908 - protein, 8 aa, Homo sapiens
  misc_feature: Table A; Target 78908; HLA-C*14:02; SLC45A2; ENSG00000164175; TAA
LYLNGATV

SEQ ID NO: 78909 - protein, 9 aa, Homo sapiens
  misc_feature: Table A; Target 78909; HLA-A*23:01; SLC45A2; ENSG00000164175; TAA
LYLNGATVV

SEQ ID NO: 78910 - protein, 9 aa, Homo sapiens
  misc_feature: Table A; Target 78910; HLA-A*24:02; SLC45A2; ENSG00000164175; TAA
LYLNGATVV

SEQ ID NO: 78911 - protein, 9 aa, Homo sapiens
  misc_feature: Table A; Target 78911; HLA-B*46:01; SLC45A2; ENSG00000164175; TAA
LYLNGATVV

SEQ ID NO: 78912 - protein, 9 aa, Homo sapiens
  misc_feature: Table A; Target 78912; HLA-C*01:02; SLC45A2; ENSG00000164175; TAA
LYLNGATVV

SEQ ID NO: 78913 - protein, 9 aa, Homo sapiens
  misc_feature: Table A; Target 78913; HLA-C*04:01; SLC45A2; ENSG00000164175; TAA
LYLNGATVV

SEQ ID NO: 78914 - protein, 9 aa, Homo sapiens
  misc_feature: Table A; Target 78914; HLA-C*14:02; SLC45A2; ENSG00000164175; TAA
LYLNGATVV

SEQ ID NO: 78915 - protein, 10 aa, Homo sapiens
  misc_feature: Table A; Target 78915; HLA-A*23:01; SLC45A2; ENSG00000164175; TAA
LYLNGATVVA

SEQ ID NO: 78916 - protein, 10 aa, Homo sapiens
  misc_feature: Table A; Target 78916; HLA-C*14:02; SLC45A2; ENSG00000164175; TAA
LYLNGATVVA

SEQ ID NO: 78917 - protein, 11 aa, Homo sapiens
  misc_feature: Table A; Target 78917; HLA-C*14:02; SLC45A2; ENSG00000164175; TAA
LYLNGATVVAA

SEQ ID NO: 78918 - protein, 9 aa, Homo sapiens
  misc_feature: Table A; Target 78918; HLA-A*24:02; SLC45A2; ENSG00000164175; TAA
LYSYFQKVL

SEQ ID NO: 78919 - protein, 8 aa, Homo sapiens
  misc_feature: Table A; Target 78919; HLA-A*23:01; SLC45A2; ENSG00000164175; TAA
LYTVPFNL

SEQ ID NO: 78920 - protein, 8 aa, Homo sapiens
  misc_feature: Table A; Target 78920; HLA-A*24:02; SLC45A2; ENSG00000164175; TAA
LYTVPFNL

SEQ ID NO: 78921 - protein, 9 aa, Homo sapiens
  misc_feature: Table A; Target 78921; HLA-A*23:01; SLC45A2; ENSG00000164175; TAA
LYTVPFNLI

SEQ ID NO: 78922 - protein, 9 aa, Homo sapiens
  misc_feature: Table A; Target 78922; HLA-A*24:02; SLC45A2; ENSG00000164175; TAA
LYTVPFNLI

SEQ ID NO: 78923 - protein, 8 aa, Homo sapiens
  misc_feature: Table A; Target 78923; HLA-B*54:01; SLC45A2; ENSG00000164175; TAA
MALYLNGA

SEQ ID NO: 78924 - protein, 10 aa, Homo sapiens
  misc_feature: Table A; Target 78924; HLA-B*51:01; SLC45A2; ENSG00000164175; TAA
MALYLNGATV

SEQ ID NO: 78925 - protein, 10 aa, Homo sapiens
  misc_feature: Table A; Target 78925; HLA-B*54:01; SLC45A2; ENSG00000164175; TAA
MALYLNGATV

SEQ ID NO: 78926 - protein, 11 aa, Homo sapiens
  misc_feature: Table A; Target 78926; HLA-B*54:01; SLC45A2; ENSG00000164175; TAA
MALYLNGATVV

SEQ ID NO: 78927 - protein, 8 aa, Homo sapiens
  misc_feature: Table A; Target 78927; HLA-B*46:01; SLC45A2; ENSG00000164175; TAA
MAMFGREF

SEQ ID NO: 78928 - protein, 8 aa, Homo sapiens
  misc_feature: Table A; Target 78928; HLA-C*03:03; SLC45A2; ENSG00000164175; TAA
MAMFGREF

SEQ ID NO: 78929 - protein, 8 aa, Homo sapiens
  misc_feature: Table A; Target 78929; HLA-C*03:04; SLC45A2; ENSG00000164175; TAA
MAMFGREF

SEQ ID NO: 78930 - protein, 8 aa, Homo sapiens
  misc_feature: Table A; Target 78930; HLA-C*16:01; SLC45A2; ENSG00000164175; TAA
MAMFGREF

SEQ ID NO: 78931 - protein, 10 aa, Homo sapiens
  misc_feature: Table A; Target 78931; HLA-A*29:02; SLC45A2; ENSG00000164175; TAA
MAMFGREFCY

SEQ ID NO: 78932 - protein, 9 aa, Homo sapiens
  misc_feature: Table A; Target 78932; HLA-C*04:01; SLC45A2; ENSG00000164175; TAA
MDCATLTCM

SEQ ID NO: 78933 - protein, 8 aa, Homo sapiens
  misc_feature: Table A; Target 78933; HLA-A*29:02; SLC45A2; ENSG00000164175; TAA
MFGREFCY

SEQ ID NO: 78934 - protein, 10 aa, Homo sapiens
  misc_feature: Table A; Target 78934; HLA-C*07:06; SLC45A2; ENSG00000164175; TAA
MGSNSGQAGR

SEQ ID NO: 78935 - protein, 9 aa, Homo sapiens
  misc_feature: Table A; Target 78935; HLA-A*02:01; SLC45A2; ENSG00000164175; TAA
MLVGMALYL

SEQ ID NO: 78936 - protein, 9 aa, Homo sapiens
  misc_feature: Table A; Target 78936; HLA-A*02:03; SLC45A2; ENSG00000164175; TAA
MLVGMALYL

SEQ ID NO: 78937 - protein, 9 aa, Homo sapiens
  misc_feature: Table A; Target 78937; HLA-A*02:04; SLC45A2; ENSG00000164175; TAA
MLVGMALYL

SEQ ID NO: 78938 - protein, 9 aa, Homo sapiens
  misc_feature: Table A; Target 78938; HLA-A*02:07; SLC45A2; ENSG00000164175; TAA
MLVGMALYL

SEQ ID NO: 78939 - protein, 9 aa, Homo sapiens
  misc_feature: Table A; Target 78939; HLA-A*23:01; SLC45A2; ENSG00000164175; TAA
MLVGMALYL

SEQ ID NO: 78940 - protein, 9 aa, Homo sapiens
  misc_feature: Table A; Target 78940; HLA-A*29:02; SLC45A2; ENSG00000164175; TAA
MLVGMALYL

SEQ ID NO: 78941 - protein, 8 aa, Homo sapiens
  misc_feature: Table A; Target 78941; HLA-B*08:01; SLC45A2; ENSG00000164175; TAA
MMLVGMAL

SEQ ID NO: 78942 - protein, 8 aa, Homo sapiens
  misc_feature: Table A; Target 78942; HLA-B*46:01; SLC45A2; ENSG00000164175; TAA
MMLVGMAL

SEQ ID NO: 78943 - protein, 8 aa, Homo sapiens
  misc_feature: Table A; Target 78943; HLA-C*01:02; SLC45A2; ENSG00000164175; TAA
MMLVGMAL

SEQ ID NO: 78944 - protein, 8 aa, Homo sapiens
  misc_feature: Table A; Target 78944; HLA-C*03:03; SLC45A2; ENSG00000164175; TAA
MMLVGMAL

SEQ ID NO: 78945 - protein, 8 aa, Homo sapiens
  misc_feature: Table A; Target 78945; HLA-C*03:04; SLC45A2; ENSG00000164175; TAA
MMLVGMAL

SEQ ID NO: 78946 - protein, 8 aa, Homo sapiens
  misc_feature: Table A; Target 78946; HLA-C*14:02; SLC45A2; ENSG00000164175; TAA
MMLVGMAL

SEQ ID NO: 78947 - protein, 9 aa, Homo sapiens
  misc_feature: Table A; Target 78947; HLA-A*29:02; SLC45A2; ENSG00000164175; TAA
MMLVGMALY

SEQ ID NO: 78948 - protein, 9 aa, Homo sapiens
  misc_feature: Table A; Target 78948; HLA-B*15:03; SLC45A2; ENSG00000164175; TAA
MMLVGMALY

SEQ ID NO: 78949 - protein, 9 aa, Homo sapiens
  misc_feature: Table A; Target 78949; HLA-B*46:01; SLC45A2; ENSG00000164175; TAA
MMLVGMALY

SEQ ID NO: 78950 - protein, 9 aa, Homo sapiens
  misc_feature: Table A; Target 78950; HLA-C*07:01; SLC45A2; ENSG00000164175; TAA
MMLVGMALY

SEQ ID NO: 78951 - protein, 10 aa, Homo sapiens
  misc_feature: Table A; Target 78951; HLA-C*06:02; SLC45A2; ENSG00000164175; TAA
MTLKSLLRAL

SEQ ID NO: 78952 - protein, 8 aa, Homo sapiens
  misc_feature: Table A; Target 78952; HLA-C*07:04; SLC45A2; ENSG00000164175; TAA
MVQLAQIL

SEQ ID NO: 78953 - protein, 9 aa, Homo sapiens
  misc_feature: Table A; Target 78953; HLA-A*33:03; SLC45A2; ENSG00000164175; TAA
MYEYGSIEK

SEQ ID NO: 78954 - protein, 9 aa, Homo sapiens
  misc_feature: Table A; Target 78954; HLA-B*27:02; SLC45A2; ENSG00000164175; TAA
MYEYGSIEK

SEQ ID NO: 78955 - protein, 9 aa, Homo sapiens
  misc_feature: Table A; Target 78955; HLA-C*01:02; SLC45A2; ENSG00000164175; TAA
MYEYGSIEK

SEQ ID NO: 78956 - protein, 10 aa, Homo sapiens
  misc_feature: Table A; Target 78956; HLA-C*06:02; SLC45A2; ENSG00000164175; TAA
MYEYGSIEKV

SEQ ID NO: 78957 - protein, 10 aa, Homo sapiens
  misc_feature: Table A; Target 78957; HLA-C*07:01; SLC45A2; ENSG00000164175; TAA
MYEYGSIEKV

SEQ ID NO: 78958 - protein, 9 aa, Homo sapiens
  misc_feature: Table A; Target 78958; HLA-A*30:01; SLC45A2; ENSG00000164175; TAA
NGATVVAAL

SEQ ID NO: 78959 - protein, 9 aa, Homo sapiens
  misc_feature: Table A; Target 78959; HLA-A*68:02; SLC45A2; ENSG00000164175; TAA
NGATVVAAL

SEQ ID NO: 78960 - protein, 9 aa, Homo sapiens
  misc_feature: Table A; Target 78960; HLA-B*27:05; SLC45A2; ENSG00000164175; TAA
NGATVVAAL

SEQ ID NO: 78961 - protein, 9 aa, Homo sapiens
  misc_feature: Table A; Target 78961; HLA-B*35:01; SLC45A2; ENSG00000164175; TAA
NGATVVAAL

SEQ ID NO: 78962 - protein, 9 aa, Homo sapiens
  misc_feature: Table A; Target 78962; HLA-B*35:03; SLC45A2; ENSG00000164175; TAA
NGATVVAAL

SEQ ID NO: 78963 - protein, 9 aa, Homo sapiens
  misc_feature: Table A; Target 78963; HLA-B*39:01; SLC45A2; ENSG00000164175; TAA
NGATVVAAL

SEQ ID NO: 78964 - protein, 9 aa, Homo sapiens
  misc_feature: Table A; Target 78964; HLA-B*40:01; SLC45A2; ENSG00000164175; TAA
NGATVVAAL

SEQ ID NO: 78965 - protein, 9 aa, Homo sapiens
  misc_feature: Table A; Target 78965; HLA-B*46:01; SLC45A2; ENSG00000164175; TAA
NGATVVAAL

SEQ ID NO: 78966 - protein, 9 aa, Homo sapiens
  misc_feature: Table A; Target 78966; HLA-B*55:01; SLC45A2; ENSG00000164175; TAA
NGATVVAAL

SEQ ID NO: 78967 - protein, 9 aa, Homo sapiens
  misc_feature: Table A; Target 78967; HLA-C*01:02; SLC45A2; ENSG00000164175; TAA
NGATVVAAL

SEQ ID NO: 78968 - protein, 9 aa, Homo sapiens
  misc_feature: Table A; Target 78968; HLA-C*03:03; SLC45A2; ENSG00000164175; TAA
NGATVVAAL

SEQ ID NO: 78969 - protein, 9 aa, Homo sapiens
  misc_feature: Table A; Target 78969; HLA-C*03:04; SLC45A2; ENSG00000164175; TAA
NGATVVAAL

SEQ ID NO: 78970 - protein, 9 aa, Homo sapiens
  misc_feature: Table A; Target 78970; HLA-C*07:04; SLC45A2; ENSG00000164175; TAA
NGATVVAAL

SEQ ID NO: 78971 - protein, 9 aa, Homo sapiens
  misc_feature: Table A; Target 78971; HLA-C*07:06; SLC45A2; ENSG00000164175; TAA
NGATVVAAL

SEQ ID NO: 78972 - protein, 9 aa, Homo sapiens
  misc_feature: Table A; Target 78972; HLA-C*12:03; SLC45A2; ENSG00000164175; TAA
NGATVVAAL

SEQ ID NO: 78973 - protein, 9 aa, Homo sapiens
  misc_feature: Table A; Target 78973; HLA-C*14:02; SLC45A2; ENSG00000164175; TAA
NGATVVAAL

SEQ ID NO: 78974 - protein, 9 aa, Homo sapiens
  misc_feature: Table A; Target 78974; HLA-C*16:01; SLC45A2; ENSG00000164175; TAA
NGATVVAAL

SEQ ID NO: 78975 - protein, 9 aa, Homo sapiens
  misc_feature: Table A; Target 78975; HLA-C*16:02; SLC45A2; ENSG00000164175; TAA
NGATVVAAL

SEQ ID NO: 78976 - protein, 8 aa, Homo sapiens
  misc_feature: Table A; Target 78976; HLA-B*08:01; SLC45A2; ENSG00000164175; TAA
NGYVNPEL

SEQ ID NO: 78977 - protein, 8 aa, Homo sapiens
  misc_feature: Table A; Target 78977; HLA-B*15:03; SLC45A2; ENSG00000164175; TAA
NGYVNPEL

SEQ ID NO: 78978 - protein, 8 aa, Homo sapiens
  misc_feature: Table A; Target 78978; HLA-B*27:05; SLC45A2; ENSG00000164175; TAA
NGYVNPEL

SEQ ID NO: 78979 - protein, 8 aa, Homo sapiens
  misc_feature: Table A; Target 78979; HLA-B*35:03; SLC45A2; ENSG00000164175; TAA
NGYVNPEL

SEQ ID NO: 78980 - protein, 8 aa, Homo sapiens
  misc_feature: Table A; Target 78980; HLA-B*39:01; SLC45A2; ENSG00000164175; TAA
NGYVNPEL

SEQ ID NO: 78981 - protein, 8 aa, Homo sapiens
  misc_feature: Table A; Target 78981; HLA-B*40:02; SLC45A2; ENSG00000164175; TAA
NGYVNPEL

SEQ ID NO: 78982 - protein, 8 aa, Homo sapiens
  misc_feature: Table A; Target 78982; HLA-B*46:01; SLC45A2; ENSG00000164175; TAA
NGYVNPEL

SEQ ID NO: 78983 - protein, 8 aa, Homo sapiens
  misc_feature: Table A; Target 78983; HLA-B*51:01; SLC45A2; ENSG00000164175; TAA
NGYVNPEL

SEQ ID NO: 78984 - protein, 8 aa, Homo sapiens
  misc_feature: Table A; Target 78984; HLA-C*01:02; SLC45A2; ENSG00000164175; TAA
NGYVNPEL

SEQ ID NO: 78985 - protein, 8 aa, Homo sapiens
  misc_feature: Table A; Target 78985; HLA-C*03:03; SLC45A2; ENSG00000164175; TAA
NGYVNPEL

SEQ ID NO: 78986 - protein, 8 aa, Homo sapiens
  misc_feature: Table A; Target 78986; HLA-C*03:04; SLC45A2; ENSG00000164175; TAA
NGYVNPEL

SEQ ID NO: 78987 - protein, 8 aa, Homo sapiens
  misc_feature: Table A; Target 78987; HLA-C*04:01; SLC45A2; ENSG00000164175; TAA
NGYVNPEL

SEQ ID NO: 78988 - protein, 8 aa, Homo sapiens
  misc_feature: Table A; Target 78988; HLA-C*05:01; SLC45A2; ENSG00000164175; TAA
NGYVNPEL

SEQ ID NO: 78989 - protein, 8 aa, Homo sapiens
  misc_feature: Table A; Target 78989; HLA-C*06:02; SLC45A2; ENSG00000164175; TAA
NGYVNPEL

SEQ ID NO: 78990 - protein, 8 aa, Homo sapiens
  misc_feature: Table A; Target 78990; HLA-C*07:01; SLC45A2; ENSG00000164175; TAA
NGYVNPEL

SEQ ID NO: 78991 - protein, 8 aa, Homo sapiens
  misc_feature: Table A; Target 78991; HLA-C*07:04; SLC45A2; ENSG00000164175; TAA
NGYVNPEL

SEQ ID NO: 78992 - protein, 8 aa, Homo sapiens
  misc_feature: Table A; Target 78992; HLA-C*12:03; SLC45A2; ENSG00000164175; TAA
NGYVNPEL

SEQ ID NO: 78993 - protein, 8 aa, Homo sapiens
  misc_feature: Table A; Target 78993; HLA-C*14:02; SLC45A2; ENSG00000164175; TAA
NGYVNPEL

SEQ ID NO: 78994 - protein, 8 aa, Homo sapiens
  misc_feature: Table A; Target 78994; HLA-C*16:01; SLC45A2; ENSG00000164175; TAA
NGYVNPEL

SEQ ID NO: 78995 - protein, 8 aa, Homo sapiens
  misc_feature: Table A; Target 78995; HLA-C*16:02; SLC45A2; ENSG00000164175; TAA
NGYVNPEL

SEQ ID NO: 78996 - protein, 8 aa, Homo sapiens
  misc_feature: Table A; Target 78996; HLA-C*16:04; SLC45A2; ENSG00000164175; TAA
NGYVNPEL

SEQ ID NO: 78997 - protein, 9 aa, Homo sapiens
  misc_feature: Table A; Target 78997; HLA-B*54:01; SLC45A2; ENSG00000164175; TAA
NGYVNPELA

SEQ ID NO: 78998 - protein, 10 aa, Homo sapiens
  misc_feature: Table A; Target 78998; HLA-B*39:01; SLC45A2; ENSG00000164175; TAA
NGYVNPELAM

SEQ ID NO: 78999 - protein, 10 aa, Homo sapiens
  misc_feature: Table A; Target 78999; HLA-C*03:03; SLC45A2; ENSG00000164175; TAA
NGYVNPELAM

SEQ ID NO: 79000 - protein, 8 aa, Homo sapiens
  misc_feature: Table A; Target 79000; HLA-A*29:02; SLC45A2; ENSG00000164175; TAA
NMPPHYRY

SEQ ID NO: 79001 - protein, 9 aa, Homo sapiens
  misc_feature: Table A; Target 79001; HLA-A*02:07; SLC45A2; ENSG00000164175; TAA
NMPPHYRYL

SEQ ID NO: 79002 - protein, 10 aa, Homo sapiens
  misc_feature: Table A; Target 79002; HLA-A*01:01; SLC45A2; ENSG00000164175; TAA
NSGQAGRHIY

SEQ ID NO: 79003 - protein, 8 aa, Homo sapiens
  misc_feature: Table A; Target 79003; HLA-A*01:01; SLC45A2; ENSG00000164175; TAA
NSTEFLIY

SEQ ID NO: 79004 - protein, 8 aa, Homo sapiens
  misc_feature: Table A; Target 79004; HLA-B*35:01; SLC45A2; ENSG00000164175; TAA
NSTEFLIY

SEQ ID NO: 79005 - protein, 10 aa, Homo sapiens
  misc_feature: Table A; Target 79005; HLA-A*33:01; SLC45A2; ENSG00000164175; TAA
NSTEFLIYER

SEQ ID NO: 79006 - protein, 10 aa, Homo sapiens
  misc_feature: Table A; Target 79006; HLA-A*33:03; SLC45A2; ENSG00000164175; TAA
NSTEFLIYER

SEQ ID NO: 79007 - protein, 10 aa, Homo sapiens
  misc_feature: Table A; Target 79007; HLA-A*68:01; SLC45A2; ENSG00000164175; TAA
NSTEFLIYER

SEQ ID NO: 79008 - protein, 10 aa, Homo sapiens
  misc_feature: Table A; Target 79008; HLA-B*27:02; SLC45A2; ENSG00000164175; TAA
NSTEFLIYER

SEQ ID NO: 79009 - protein, 10 aa, Homo sapiens
  misc_feature: Table A; Target 79009; HLA-C*07:06; SLC45A2; ENSG00000164175; TAA
NSTEFLIYER

SEQ ID NO: 79010 - protein, 8 aa, Homo sapiens
  misc_feature: Table A; Target 79010; HLA-A*01:01; SLC45A2; ENSG00000164175; TAA
NSVFSSLY

SEQ ID NO: 79011 - protein, 8 aa, Homo sapiens
  misc_feature: Table A; Target 79011; HLA-B*15:01; SLC45A2; ENSG00000164175; TAA
NSVFSSLY

SEQ ID NO: 79012 - protein, 8 aa, Homo sapiens
  misc_feature: Table A; Target 79012; HLA-B*18:01; SLC45A2; ENSG00000164175; TAA
NSVFSSLY

SEQ ID NO: 79013 - protein, 8 aa, Homo sapiens
  misc_feature: Table A; Target 79013; HLA-C*07:01; SLC45A2; ENSG00000164175; TAA
NSVFSSLY

SEQ ID NO: 79014 - protein, 9 aa, Homo sapiens
  misc_feature: Table A; Target 79014; HLA-A*02:01; SLC45A2; ENSG00000164175; TAA
NTAGTVVVV

SEQ ID NO: 79015 - protein, 9 aa, Homo sapiens
  misc_feature: Table A; Target 79015; HLA-A*02:03; SLC45A2; ENSG00000164175; TAA
NTAGTVVVV

SEQ ID NO: 79016 - protein, 9 aa, Homo sapiens
  misc_feature: Table A; Target 79016; HLA-A*26:01; SLC45A2; ENSG00000164175; TAA
NTAGTVVVV

SEQ ID NO: 79017 - protein, 9 aa, Homo sapiens
  misc_feature: Table A; Target 79017; HLA-A*32:01; SLC45A2; ENSG00000164175; TAA
NTAGTVVVV

SEQ ID NO: 79018 - protein, 9 aa, Homo sapiens
  misc_feature: Table A; Target 79018; HLA-A*33:03; SLC45A2; ENSG00000164175; TAA
NTAGTVVVV

SEQ ID NO: 79019 - protein, 9 aa, Homo sapiens
  misc_feature: Table A; Target 79019; HLA-A*68:01; SLC45A2; ENSG00000164175; TAA
NTAGTVVVV

SEQ ID NO: 79020 - protein, 9 aa, Homo sapiens
  misc_feature: Table A; Target 79020; HLA-A*68:02; SLC45A2; ENSG00000164175; TAA
NTAGTVVVV

SEQ ID NO: 79021 - protein, 9 aa, Homo sapiens
  misc_feature: Table A; Target 79021; HLA-B*13:02; SLC45A2; ENSG00000164175; TAA
NTAGTVVVV

SEQ ID NO: 79022 - protein, 9 aa, Homo sapiens
  misc_feature: Table A; Target 79022; HLA-B*18:01; SLC45A2; ENSG00000164175; TAA
NTAGTVVVV

SEQ ID NO: 79023 - protein, 9 aa, Homo sapiens
  misc_feature: Table A; Target 79023; HLA-B*35:01; SLC45A2; ENSG00000164175; TAA
NTAGTVVVV

SEQ ID NO: 79024 - protein, 9 aa, Homo sapiens
  misc_feature: Table A; Target 79024; HLA-B*35:03; SLC45A2; ENSG00000164175; TAA
NTAGTVVVV

SEQ ID NO: 79025 - protein, 9 aa, Homo sapiens
  misc_feature: Table A; Target 79025; HLA-B*39:01; SLC45A2; ENSG00000164175; TAA
NTAGTVVVV

SEQ ID NO: 79026 - protein, 9 aa, Homo sapiens
  misc_feature: Table A; Target 79026; HLA-B*55:01; SLC45A2; ENSG00000164175; TAA
NTAGTVVVV

SEQ ID NO: 79027 - protein, 9 aa, Homo sapiens
  misc_feature: Table A; Target 79027; HLA-C*01:02; SLC45A2; ENSG00000164175; TAA
NTAGTVVVV

SEQ ID NO: 79028 - protein, 9 aa, Homo sapiens
  misc_feature: Table A; Target 79028; HLA-C*02:02; SLC45A2; ENSG00000164175; TAA
NTAGTVVVV

SEQ ID NO: 79029 - protein, 9 aa, Homo sapiens
  misc_feature: Table A; Target 79029; HLA-C*03:04; SLC45A2; ENSG00000164175; TAA
NTAGTVVVV

SEQ ID NO: 79030 - protein, 9 aa, Homo sapiens
  misc_feature: Table A; Target 79030; HLA-C*04:01; SLC45A2; ENSG00000164175; TAA
NTAGTVVVV

SEQ ID NO: 79031 - protein, 9 aa, Homo sapiens
  misc_feature: Table A; Target 79031; HLA-C*05:01; SLC45A2; ENSG00000164175; TAA
NTAGTVVVV

SEQ ID NO: 79032 - protein, 9 aa, Homo sapiens
  misc_feature: Table A; Target 79032; HLA-C*07:04; SLC45A2; ENSG00000164175; TAA
NTAGTVVVV

SEQ ID NO: 79033 - protein, 9 aa, Homo sapiens
  misc_feature: Table A; Target 79033; HLA-C*07:06; SLC45A2; ENSG00000164175; TAA
NTAGTVVVV

SEQ ID NO: 79034 - protein, 9 aa, Homo sapiens
  misc_feature: Table A; Target 79034; HLA-C*12:03; SLC45A2; ENSG00000164175; TAA
NTAGTVVVV

SEQ ID NO: 79035 - protein, 9 aa, Homo sapiens
  misc_feature: Table A; Target 79035; HLA-C*16:01; SLC45A2; ENSG00000164175; TAA
NTAGTVVVV

SEQ ID NO: 79036 - protein, 9 aa, Homo sapiens
  misc_feature: Table A; Target 79036; HLA-C*16:02; SLC45A2; ENSG00000164175; TAA
NTAGTVVVV

SEQ ID NO: 79037 - protein, 10 aa, Homo sapiens
  misc_feature: Table A; Target 79037; HLA-A*68:01; SLC45A2; ENSG00000164175; TAA
NTAGTVVVVV

SEQ ID NO: 79038 - protein, 10 aa, Homo sapiens
  misc_feature: Table A; Target 79038; HLA-A*68:02; SLC45A2; ENSG00000164175; TAA
NTAGTVVVVV

SEQ ID NO: 79039 - protein, 10 aa, Homo sapiens
  misc_feature: Table A; Target 79039; HLA-C*07:06; SLC45A2; ENSG00000164175; TAA
NTAGTVVVVV

SEQ ID NO: 79040 - protein, 11 aa, Homo sapiens
  misc_feature: Table A; Target 79040; HLA-A*68:01; SLC45A2; ENSG00000164175; TAA
NTAGTVVVVVI

SEQ ID NO: 79041 - protein, 11 aa, Homo sapiens
  misc_feature: Table A; Target 79041; HLA-A*68:02; SLC45A2; ENSG00000164175; TAA
NTAGTVVVVVI

SEQ ID NO: 79042 - protein, 8 aa, Homo sapiens
  misc_feature: Table A; Target 79042; HLA-B*51:01; SLC45A2; ENSG00000164175; TAA
NVYSTLVL

SEQ ID NO: 79043 - protein, 8 aa, Homo sapiens
  misc_feature: Table A; Target 79043; HLA-C*03:03; SLC45A2; ENSG00000164175; TAA
NVYSTLVL

SEQ ID NO: 79044 - protein, 8 aa, Homo sapiens
  misc_feature: Table A; Target 79044; HLA-C*03:04; SLC45A2; ENSG00000164175; TAA
NVYSTLVL

SEQ ID NO: 79045 - protein, 8 aa, Homo sapiens
  misc_feature: Table A; Target 79045; HLA-A*03:02; SLC45A2; ENSG00000164175; TAA
PDNSVRGK

SEQ ID NO: 79046 - protein, 9 aa, Homo sapiens
  misc_feature: Table A; Target 79046; HLA-B*27:02; SLC45A2; ENSG00000164175; TAA
PFDSVEPPK

SEQ ID NO: 79047 - protein, 8 aa, Homo sapiens
  misc_feature: Table A; Target 79047; HLA-B*15:01; SLC45A2; ENSG00000164175; TAA
PFNLITEY

SEQ ID NO: 79048 - protein, 8 aa, Homo sapiens
  misc_feature: Table A; Target 79048; HLA-C*14:02; SLC45A2; ENSG00000164175; TAA
PFNLITEY

SEQ ID NO: 79049 - protein, 9 aa, Homo sapiens
  misc_feature: Table A; Target 79049; HLA-C*16:02; SLC45A2; ENSG00000164175; TAA
PLTEVAKGI

SEQ ID NO: 79050 - protein, 11 aa, Homo sapiens
  misc_feature: Table A; Target 79050; HLA-A*29:02; SLC45A2; ENSG00000164175; TAA
PPLSSDGMYEY

SEQ ID NO: 79051 - protein, 11 aa, Homo sapiens
  misc_feature: Table A; Target 79051; HLA-B*35:01; SLC45A2; ENSG00000164175; TAA
PPLSSDGMYEY

SEQ ID NO: 79052 - protein, 10 aa, Homo sapiens
  misc_feature: Table A; Target 79052; HLA-A*24:02; SLC45A2; ENSG00000164175; TAA
PYSAHNSTEF

SEQ ID NO: 79053 - protein, 11 aa, Homo sapiens
  misc_feature: Table A; Target 79053; HLA-B*51:01; SLC45A2; ENSG00000164175; TAA
QAPGGDPDNSV

SEQ ID NO: 79054 - protein, 10 aa, Homo sapiens
  misc_feature: Table A; Target 79054; HLA-A*25:01; SLC45A2; ENSG00000164175; TAA
QILVGGGLGF

SEQ ID NO: 79055 - protein, 9 aa, Homo sapiens
  misc_feature: Table A; Target 79055; HLA-A*01:01; SLC45A2; ENSG00000164175; TAA
QIVYRGDPY

SEQ ID NO: 79056 - protein, 9 aa, Homo sapiens
  misc_feature: Table A; Target 79056; HLA-C*07:04; SLC45A2; ENSG00000164175; TAA
QIVYRGDPY

SEQ ID NO: 79057 - protein, 9 aa, Homo sapiens
  misc_feature: Table A; Target 79057; HLA-B*35:03; SLC45A2; ENSG00000164175; TAA
QQTPQDPPL

SEQ ID NO: 79058 - protein, 9 aa, Homo sapiens
  misc_feature: Table A; Target 79058; HLA-B*38:01; SLC45A2; ENSG00000164175; TAA
QQTPQDPPL

SEQ ID NO: 79059 - protein, 9 aa, Homo sapiens
  misc_feature: Table A; Target 79059; HLA-B*39:01; SLC45A2; ENSG00000164175; TAA
QQTPQDPPL

SEQ ID NO: 79060 - protein, 9 aa, Homo sapiens
  misc_feature: Table A; Target 79060; HLA-A*68:02; SLC45A2; ENSG00000164175; TAA
QVMFFFSAL

SEQ ID NO: 79061 - protein, 10 aa, Homo sapiens
  misc_feature: Table A; Target 79061; HLA-A*30:02; SLC45A2; ENSG00000164175; TAA
RALVNMPPHY

SEQ ID NO: 79062 - protein, 10 aa, Homo sapiens
  misc_feature: Table A; Target 79062; HLA-B*57:01; SLC45A2; ENSG00000164175; TAA
RALVNMPPHY

SEQ ID NO: 79063 - protein, 8 aa, Homo sapiens
  misc_feature: Table A; Target 79063; HLA-B*08:01; SLC45A2; ENSG00000164175; TAA
RAMTLKSL

SEQ ID NO: 79064 - protein, 9 aa, Homo sapiens
  misc_feature: Table A; Target 79064; HLA-A*31:01; SLC45A2; ENSG00000164175; TAA
RAMTLKSLL

SEQ ID NO: 79065 - protein, 9 aa, Homo sapiens
  misc_feature: Table A; Target 79065; HLA-B*08:01; SLC45A2; ENSG00000164175; TAA
RAMTLKSLL

SEQ ID NO: 79066 - protein, 9 aa, Homo sapiens
  misc_feature: Table A; Target 79066; HLA-B*57:01; SLC45A2; ENSG00000164175; TAA
RAMTLKSLL

SEQ ID NO: 79067 - protein, 9 aa, Homo sapiens
  misc_feature: Table A; Target 79067; HLA-B*58:01; SLC45A2; ENSG00000164175; TAA
RAMTLKSLL

SEQ ID NO: 79068 - protein, 10 aa, Homo sapiens
  misc_feature: Table A; Target 79068; HLA-A*31:01; SLC45A2; ENSG00000164175; TAA
RAMTLKSLLR

SEQ ID NO: 79069 - protein, 10 aa, Homo sapiens
  misc_feature: Table A; Target 79069; HLA-B*57:01; SLC45A2; ENSG00000164175; TAA
RAMTLKSLLR

SEQ ID NO: 79070 - protein, 9 aa, Homo sapiens
  misc_feature: Table A; Target 79070; HLA-A*30:01; SLC45A2; ENSG00000164175; TAA
REFCYAVEA

SEQ ID NO: 79071 - protein, 9 aa, Homo sapiens
  misc_feature: Table A; Target 79071; HLA-A*02:01; SLC45A2; ENSG00000164175; TAA
RLLGTEFQV

SEQ ID NO: 79072 - protein, 9 aa, Homo sapiens
  misc_feature: Table A; Target 79072; HLA-A*02:04; SLC45A2; ENSG00000164175; TAA
RLLGTEFQV

SEQ ID NO: 79073 - protein, 9 aa, Homo sapiens
  misc_feature: Table A; Target 79073; HLA-A*02:07; SLC45A2; ENSG00000164175; TAA
RLLGTEFQV

SEQ ID NO: 79074 - protein, 9 aa, Homo sapiens
  misc_feature: Table A; Target 79074; HLA-B*13:02; SLC45A2; ENSG00000164175; TAA
RLLGTEFQV

SEQ ID NO: 79075 - protein, 9 aa, Homo sapiens
  misc_feature: Table A; Target 79075; HLA-B*55:01; SLC45A2; ENSG00000164175; TAA
RLLGTEFQV

SEQ ID NO: 79076 - protein, 8 aa, Homo sapiens
  misc_feature: Table A; Target 79076; HLA-B*07:02; SLC45A2; ENSG00000164175; TAA
RPTSRLIM

SEQ ID NO: 79077 - protein, 8 aa, Homo sapiens
  misc_feature: Table A; Target 79077; HLA-B*08:01; SLC45A2; ENSG00000164175; TAA
RPTSRLIM

SEQ ID NO: 79078 - protein, 9 aa, Homo sapiens
  misc_feature: Table A; Target 79078; HLA-B*51:01; SLC45A2; ENSG00000164175; TAA
RPYILTLGV

SEQ ID NO: 79079 - protein, 9 aa, Homo sapiens
  misc_feature: Table A; Target 79079; HLA-B*54:01; SLC45A2; ENSG00000164175; TAA
RPYILTLGV

SEQ ID NO: 79080 - protein, 9 aa, Homo sapiens
  misc_feature: Table A; Target 79080; HLA-B*56:01; SLC45A2; ENSG00000164175; TAA
RPYILTLGV

SEQ ID NO: 79081 - protein, 10 aa, Homo sapiens
  misc_feature: Table A; Target 79081; HLA-B*07:02; SLC45A2; ENSG00000164175; TAA
RPYILTLGVM

SEQ ID NO: 79082 - protein, 9 aa, Homo sapiens
  misc_feature: Table A; Target 79082; HLA-A*24:02; SLC45A2; ENSG00000164175; TAA
RYLCISHLI

SEQ ID NO: 79083 - protein, 8 aa, Homo sapiens
  misc_feature: Table A; Target 79083; HLA-B*15:03; SLC45A2; ENSG00000164175; TAA
SAHNSTEF

SEQ ID NO: 79084 - protein, 8 aa, Homo sapiens
  misc_feature: Table A; Target 79084; HLA-B*46:01; SLC45A2; ENSG00000164175; TAA
SAHNSTEF

SEQ ID NO: 79085 - protein, 8 aa, Homo sapiens
  misc_feature: Table A; Target 79085; HLA-B*58:01; SLC45A2; ENSG00000164175; TAA
SAHNSTEF

SEQ ID NO: 79086 - protein, 8 aa, Homo sapiens
  misc_feature: Table A; Target 79086; HLA-C*03:03; SLC45A2; ENSG00000164175; TAA
SAHNSTEF

SEQ ID NO: 79087 - protein, 8 aa, Homo sapiens
  misc_feature: Table A; Target 79087; HLA-C*03:04; SLC45A2; ENSG00000164175; TAA
SAHNSTEF

SEQ ID NO: 79088 - protein, 8 aa, Homo sapiens
  misc_feature: Table A; Target 79088; HLA-C*05:01; SLC45A2; ENSG00000164175; TAA
SAHNSTEF

SEQ ID NO: 79089 - protein, 8 aa, Homo sapiens
  misc_feature: Table A; Target 79089; HLA-C*14:02; SLC45A2; ENSG00000164175; TAA
SAHNSTEF

SEQ ID NO: 79090 - protein, 8 aa, Homo sapiens
  misc_feature: Table A; Target 79090; HLA-C*16:01; SLC45A2; ENSG00000164175; TAA
SAHNSTEF

SEQ ID NO: 79091 - protein, 9 aa, Homo sapiens
  misc_feature: Table A; Target 79091; HLA-C*03:04; SLC45A2; ENSG00000164175; TAA
SAHNSTEFL

SEQ ID NO: 79092 - protein, 9 aa, Homo sapiens
  misc_feature: Table A; Target 79092; HLA-A*23:01; SLC45A2; ENSG00000164175; TAA
SALVLTLCF

SEQ ID NO: 79093 - protein, 9 aa, Homo sapiens
  misc_feature: Table A; Target 79093; HLA-A*29:02; SLC45A2; ENSG00000164175; TAA
SALVLTLCF

SEQ ID NO: 79094 - protein, 9 aa, Homo sapiens
  misc_feature: Table A; Target 79094; HLA-B*35:01; SLC45A2; ENSG00000164175; TAA
SALVLTLCF

SEQ ID NO: 79095 - protein, 9 aa, Homo sapiens
  misc_feature: Table A; Target 79095; HLA-B*57:01; SLC45A2; ENSG00000164175; TAA
SALVLTLCF

SEQ ID NO: 79096 - protein, 9 aa, Homo sapiens
  misc_feature: Table A; Target 79096; HLA-C*02:02; SLC45A2; ENSG00000164175; TAA
SALVLTLCF

SEQ ID NO: 79097 - protein, 9 aa, Homo sapiens
  misc_feature: Table A; Target 79097; HLA-C*16:04; SLC45A2; ENSG00000164175; TAA
SALVLTLCF

SEQ ID NO: 79098 - protein, 9 aa, Homo sapiens
  misc_feature: Table A; Target 79098; HLA-C*12:03; SLC45A2; ENSG00000164175; TAA
SAVALIGCC

SEQ ID NO: 79099 - protein, 8 aa, Homo sapiens
  misc_feature: Table A; Target 79099; HLA-A*30:01; SLC45A2; ENSG00000164175; TAA
SEAPLTEV

SEQ ID NO: 79100 - protein, 8 aa, Homo sapiens
  misc_feature: Table A; Target 79100; HLA-B*13:02; SLC45A2; ENSG00000164175; TAA
SEAPLTEV

SEQ ID NO: 79101 - protein, 8 aa, Homo sapiens
  misc_feature: Table A; Target 79101; HLA-B*18:01; SLC45A2; ENSG00000164175; TAA
SEAPLTEV

SEQ ID NO: 79102 - protein, 8 aa, Homo sapiens
  misc_feature: Table A; Target 79102; HLA-B*37:01; SLC45A2; ENSG00000164175; TAA
SEAPLTEV

SEQ ID NO: 79103 - protein, 8 aa, Homo sapiens
  misc_feature: Table A; Target 79103; HLA-B*39:01; SLC45A2; ENSG00000164175; TAA
SEAPLTEV

SEQ ID NO: 79104 - protein, 8 aa, Homo sapiens
  misc_feature: Table A; Target 79104; HLA-B*40:01; SLC45A2; ENSG00000164175; TAA
SEAPLTEV

SEQ ID NO: 79105 - protein, 8 aa, Homo sapiens
  misc_feature: Table A; Target 79105; HLA-B*40:02; SLC45A2; ENSG00000164175; TAA
SEAPLTEV

SEQ ID NO: 79106 - protein, 8 aa, Homo sapiens
  misc_feature: Table A; Target 79106; HLA-B*44:03; SLC45A2; ENSG00000164175; TAA
SEAPLTEV

SEQ ID NO: 79107 - protein, 8 aa, Homo sapiens
  misc_feature: Table A; Target 79107; HLA-B*49:01; SLC45A2; ENSG00000164175; TAA
SEAPLTEV

SEQ ID NO: 79108 - protein, 8 aa, Homo sapiens
  misc_feature: Table A; Target 79108; HLA-C*02:02; SLC45A2; ENSG00000164175; TAA
SEAPLTEV

SEQ ID NO: 79109 - protein, 8 aa, Homo sapiens
  misc_feature: Table A; Target 79109; HLA-C*16:02; SLC45A2; ENSG00000164175; TAA
SEAPLTEV

SEQ ID NO: 79110 - protein, 9 aa, Homo sapiens
  misc_feature: Table A; Target 79110; HLA-A*30:01; SLC45A2; ENSG00000164175; TAA
SEAPLTEVA

SEQ ID NO: 79111 - protein, 9 aa, Homo sapiens
  misc_feature: Table A; Target 79111; HLA-B*13:02; SLC45A2; ENSG00000164175; TAA
SEAPLTEVA

SEQ ID NO: 79112 - protein, 9 aa, Homo sapiens
  misc_feature: Table A; Target 79112; HLA-B*18:01; SLC45A2; ENSG00000164175; TAA
SEAPLTEVA

SEQ ID NO: 79113 - protein, 9 aa, Homo sapiens
  misc_feature: Table A; Target 79113; HLA-B*37:01; SLC45A2; ENSG00000164175; TAA
SEAPLTEVA

SEQ ID NO: 79114 - protein, 9 aa, Homo sapiens
  misc_feature: Table A; Target 79114; HLA-B*40:01; SLC45A2; ENSG00000164175; TAA
SEAPLTEVA

SEQ ID NO: 79115 - protein, 9 aa, Homo sapiens
  misc_feature: Table A; Target 79115; HLA-B*40:02; SLC45A2; ENSG00000164175; TAA
SEAPLTEVA

SEQ ID NO: 79116 - protein, 9 aa, Homo sapiens
  misc_feature: Table A; Target 79116; HLA-B*44:02; SLC45A2; ENSG00000164175; TAA
SEAPLTEVA

SEQ ID NO: 79117 - protein, 9 aa, Homo sapiens
  misc_feature: Table A; Target 79117; HLA-B*44:03; SLC45A2; ENSG00000164175; TAA
SEAPLTEVA

SEQ ID NO: 79118 - protein, 9 aa, Homo sapiens
  misc_feature: Table A; Target 79118; HLA-B*49:01; SLC45A2; ENSG00000164175; TAA
SEAPLTEVA

SEQ ID NO: 79119 - protein, 9 aa, Homo sapiens
  misc_feature: Table A; Target 79119; HLA-C*02:02; SLC45A2; ENSG00000164175; TAA
SEAPLTEVA

SEQ ID NO: 79120 - protein, 9 aa, Homo sapiens
  misc_feature: Table A; Target 79120; HLA-C*16:04; SLC45A2; ENSG00000164175; TAA
SEAPLTEVA

SEQ ID NO: 79121 - protein, 10 aa, Homo sapiens
  misc_feature: Table A; Target 79121; HLA-A*03:02; SLC45A2; ENSG00000164175; TAA
SEAPLTEVAK

SEQ ID NO: 79122 - protein, 10 aa, Homo sapiens
  misc_feature: Table A; Target 79122; HLA-A*11:01; SLC45A2; ENSG00000164175; TAA
SEAPLTEVAK

SEQ ID NO: 79123 - protein, 10 aa, Homo sapiens
  misc_feature: Table A; Target 79123; HLA-A*30:01; SLC45A2; ENSG00000164175; TAA
SEAPLTEVAK

SEQ ID NO: 79124 - protein, 10 aa, Homo sapiens
  misc_feature: Table A; Target 79124; HLA-B*18:01; SLC45A2; ENSG00000164175; TAA
SEAPLTEVAK

SEQ ID NO: 79125 - protein, 10 aa, Homo sapiens
  misc_feature: Table A; Target 79125; HLA-B*27:02; SLC45A2; ENSG00000164175; TAA
SEAPLTEVAK

SEQ ID NO: 79126 - protein, 10 aa, Homo sapiens
  misc_feature: Table A; Target 79126; HLA-B*27:05; SLC45A2; ENSG00000164175; TAA
SEAPLTEVAK

SEQ ID NO: 79127 - protein, 10 aa, Homo sapiens
  misc_feature: Table A; Target 79127; HLA-B*40:01; SLC45A2; ENSG00000164175; TAA
SEAPLTEVAK

SEQ ID NO: 79128 - protein, 10 aa, Homo sapiens
  misc_feature: Table A; Target 79128; HLA-B*40:02; SLC45A2; ENSG00000164175; TAA
SEAPLTEVAK

SEQ ID NO: 79129 - protein, 10 aa, Homo sapiens
  misc_feature: Table A; Target 79129; HLA-B*44:02; SLC45A2; ENSG00000164175; TAA
SEAPLTEVAK

SEQ ID NO: 79130 - protein, 10 aa, Homo sapiens
  misc_feature: Table A; Target 79130; HLA-B*44:03; SLC45A2; ENSG00000164175; TAA
SEAPLTEVAK

SEQ ID NO: 79131 - protein, 10 aa, Homo sapiens
  misc_feature: Table A; Target 79131; HLA-B*49:01; SLC45A2; ENSG00000164175; TAA
SEAPLTEVAK

SEQ ID NO: 79132 - protein, 10 aa, Homo sapiens
  misc_feature: Table A; Target 79132; HLA-C*04:01; SLC45A2; ENSG00000164175; TAA
SEAPLTEVAK

SEQ ID NO: 79133 - protein, 10 aa, Homo sapiens
  misc_feature: Table A; Target 79133; HLA-C*07:06; SLC45A2; ENSG00000164175; TAA
SEAPLTEVAK

SEQ ID NO: 79134 - protein, 9 aa, Homo sapiens
  misc_feature: Table A; Target 79134; HLA-A*30:02; SLC45A2; ENSG00000164175; TAA
SGQAGRHIY

SEQ ID NO: 79135 - protein, 9 aa, Homo sapiens
  misc_feature: Table A; Target 79135; HLA-A*32:01; SLC45A2; ENSG00000164175; TAA
SGQAGRHIY

SEQ ID NO: 79136 - protein, 9 aa, Homo sapiens
  misc_feature: Table A; Target 79136; HLA-B*15:01; SLC45A2; ENSG00000164175; TAA
SGQAGRHIY

SEQ ID NO: 79137 - protein, 9 aa, Homo sapiens
  misc_feature: Table A; Target 79137; HLA-C*14:02; SLC45A2; ENSG00000164175; TAA
SGQAGRHIY

SEQ ID NO: 79138 - protein, 9 aa, Homo sapiens
  misc_feature: Table A; Target 79138; HLA-C*16:01; SLC45A2; ENSG00000164175; TAA
SGQAGRHIY

SEQ ID NO: 79139 - protein, 9 aa, Homo sapiens
  misc_feature: Table A; Target 79139; HLA-C*16:02; SLC45A2; ENSG00000164175; TAA
SGQAGRHIY

SEQ ID NO: 79140 - protein, 10 aa, Homo sapiens
  misc_feature: Table A; Target 79140; HLA-A*03:02; SLC45A2; ENSG00000164175; TAA
SGQAGRHIYK

SEQ ID NO: 79141 - protein, 10 aa, Homo sapiens
  misc_feature: Table A; Target 79141; HLA-A*11:01; SLC45A2; ENSG00000164175; TAA
SGQAGRHIYK

SEQ ID NO: 79142 - protein, 9 aa, Homo sapiens
  misc_feature: Table A; Target 79142; HLA-B*38:01; SLC45A2; ENSG00000164175; TAA
SHQDKEKGL

SEQ ID NO: 79143 - protein, 9 aa, Homo sapiens
  misc_feature: Table A; Target 79143; HLA-A*01:01; SLC45A2; ENSG00000164175; TAA
SIEKVKNGY

SEQ ID NO: 79144 - protein, 9 aa, Homo sapiens
  misc_feature: Table A; Target 79144; HLA-A*30:02; SLC45A2; ENSG00000164175; TAA
SIEKVKNGY

SEQ ID NO: 79145 - protein, 9 aa, Homo sapiens
  misc_feature: Table A; Target 79145; HLA-A*32:01; SLC45A2; ENSG00000164175; TAA
SIEKVKNGY

SEQ ID NO: 79146 - protein, 9 aa, Homo sapiens
  misc_feature: Table A; Target 79146; HLA-B*15:01; SLC45A2; ENSG00000164175; TAA
SIEKVKNGY

SEQ ID NO: 79147 - protein, 10 aa, Homo sapiens
  misc_feature: Table A; Target 79147; HLA-A*02:01; SLC45A2; ENSG00000164175; TAA
SISEAPLTEV

SEQ ID NO: 79148 - protein, 10 aa, Homo sapiens
  misc_feature: Table A; Target 79148; HLA-A*02:03; SLC45A2; ENSG00000164175; TAA
SISEAPLTEV

SEQ ID NO: 79149 - protein, 10 aa, Homo sapiens
  misc_feature: Table A; Target 79149; HLA-A*02:04; SLC45A2; ENSG00000164175; TAA
SISEAPLTEV

SEQ ID NO: 79150 - protein, 10 aa, Homo sapiens
  misc_feature: Table A; Target 79150; HLA-A*02:07; SLC45A2; ENSG00000164175; TAA
SISEAPLTEV

SEQ ID NO: 79151 - protein, 10 aa, Homo sapiens
  misc_feature: Table A; Target 79151; HLA-A*25:01; SLC45A2; ENSG00000164175; TAA
SISEAPLTEV

SEQ ID NO: 79152 - protein, 10 aa, Homo sapiens
  misc_feature: Table A; Target 79152; HLA-A*26:01; SLC45A2; ENSG00000164175; TAA
SISEAPLTEV

SEQ ID NO: 79153 - protein, 10 aa, Homo sapiens
  misc_feature: Table A; Target 79153; HLA-A*68:02; SLC45A2; ENSG00000164175; TAA
SISEAPLTEV

SEQ ID NO: 79154 - protein, 10 aa, Homo sapiens
  misc_feature: Table A; Target 79154; HLA-B*13:02; SLC45A2; ENSG00000164175; TAA
SISEAPLTEV

SEQ ID NO: 79155 - protein, 10 aa, Homo sapiens
  misc_feature: Table A; Target 79155; HLA-B*39:01; SLC45A2; ENSG00000164175; TAA
SISEAPLTEV

SEQ ID NO: 79156 - protein, 10 aa, Homo sapiens
  misc_feature: Table A; Target 79156; HLA-B*46:01; SLC45A2; ENSG00000164175; TAA
SISEAPLTEV

SEQ ID NO: 79157 - protein, 10 aa, Homo sapiens
  misc_feature: Table A; Target 79157; HLA-B*55:01; SLC45A2; ENSG00000164175; TAA
SISEAPLTEV

SEQ ID NO: 79158 - protein, 10 aa, Homo sapiens
  misc_feature: Table A; Target 79158; HLA-B*56:01; SLC45A2; ENSG00000164175; TAA
SISEAPLTEV

SEQ ID NO: 79159 - protein, 10 aa, Homo sapiens
  misc_feature: Table A; Target 79159; HLA-C*05:01; SLC45A2; ENSG00000164175; TAA
SISEAPLTEV

SEQ ID NO: 79160 - protein, 11 aa, Homo sapiens
  misc_feature: Table A; Target 79160; HLA-A*02:01; SLC45A2; ENSG00000164175; TAA
SLADDGPFDSV

SEQ ID NO: 79161 - protein, 11 aa, Homo sapiens
  misc_feature: Table A; Target 79161; HLA-A*02:03; SLC45A2; ENSG00000164175; TAA
SLADDGPFDSV

SEQ ID NO: 79162 - protein, 11 aa, Homo sapiens
  misc_feature: Table A; Target 79162; HLA-A*02:07; SLC45A2; ENSG00000164175; TAA
SLADDGPFDSV

SEQ ID NO: 79163 - protein, 9 aa, Homo sapiens
  misc_feature: Table A; Target 79163; HLA-A*02:03; SLC45A2; ENSG00000164175; TAA
SLFGVMSST

SEQ ID NO: 79164 - protein, 9 aa, Homo sapiens
  misc_feature: Table A; Target 79164; HLA-B*13:02; SLC45A2; ENSG00000164175; TAA
SLFGVMSST

SEQ ID NO: 79165 - protein, 10 aa, Homo sapiens
  misc_feature: Table A; Target 79165; HLA-A*02:03; SLC45A2; ENSG00000164175; TAA
SLFGVMSSTL

SEQ ID NO: 79166 - protein, 10 aa, Homo sapiens
  misc_feature: Table A; Target 79166; HLA-B*40:01; SLC45A2; ENSG00000164175; TAA
SLFGVMSSTL

SEQ ID NO: 79167 - protein, 10 aa, Homo sapiens
  misc_feature: Table A; Target 79167; HLA-B*40:02; SLC45A2; ENSG00000164175; TAA
SLFGVMSSTL

SEQ ID NO: 79168 - protein, 11 aa, Homo sapiens
  misc_feature: Table A; Target 79168; HLA-A*26:01; SLC45A2; ENSG00000164175; TAA
SLFGVMSSTLY

SEQ ID NO: 79169 - protein, 11 aa, Homo sapiens
  misc_feature: Table A; Target 79169; HLA-A*29:02; SLC45A2; ENSG00000164175; TAA
SLFGVMSSTLY

SEQ ID NO: 79170 - protein, 11 aa, Homo sapiens
  misc_feature: Table A; Target 79170; HLA-A*30:02; SLC45A2; ENSG00000164175; TAA
SLFGVMSSTLY

SEQ ID NO: 79171 - protein, 11 aa, Homo sapiens
  misc_feature: Table A; Target 79171; HLA-B*15:01; SLC45A2; ENSG00000164175; TAA
SLFGVMSSTLY

SEQ ID NO: 79172 - protein, 9 aa, Homo sapiens
  misc_feature: Table A; Target 79172; HLA-A*02:04; SLC45A2; ENSG00000164175; TAA
SLLRALVNM

SEQ ID NO: 79173 - protein, 9 aa, Homo sapiens
  misc_feature: Table A; Target 79173; HLA-A*02:01; SLC45A2; ENSG00000164175; TAA
SLYSIVWFL

SEQ ID NO: 79174 - protein, 9 aa, Homo sapiens
  misc_feature: Table A; Target 79174; HLA-A*02:03; SLC45A2; ENSG00000164175; TAA
SLYSIVWFL

SEQ ID NO: 79175 - protein, 9 aa, Homo sapiens
  misc_feature: Table A; Target 79175; HLA-A*02:04; SLC45A2; ENSG00000164175; TAA
SLYSIVWFL

SEQ ID NO: 79176 - protein, 9 aa, Homo sapiens
  misc_feature: Table A; Target 79176; HLA-A*02:07; SLC45A2; ENSG00000164175; TAA
SLYSIVWFL

SEQ ID NO: 79177 - protein, 9 aa, Homo sapiens
  misc_feature: Table A; Target 79177; HLA-A*68:02; SLC45A2; ENSG00000164175; TAA
SLYSIVWFL

SEQ ID NO: 79178 - protein, 8 aa, Homo sapiens
  misc_feature: Table A; Target 79178; HLA-A*03:01; SLC45A2; ENSG00000164175; TAA
SLYSYFQK

SEQ ID NO: 79179 - protein, 8 aa, Homo sapiens
  misc_feature: Table A; Target 79179; HLA-A*03:02; SLC45A2; ENSG00000164175; TAA
SLYSYFQK

SEQ ID NO: 79180 - protein, 8 aa, Homo sapiens
  misc_feature: Table A; Target 79180; HLA-A*11:01; SLC45A2; ENSG00000164175; TAA
SLYSYFQK

SEQ ID NO: 79181 - protein, 9 aa, Homo sapiens
  misc_feature: Table A; Target 79181; HLA-A*02:01; SLC45A2; ENSG00000164175; TAA
SLYSYFQKV

SEQ ID NO: 79182 - protein, 9 aa, Homo sapiens
  misc_feature: Table A; Target 79182; HLA-A*02:03; SLC45A2; ENSG00000164175; TAA
SLYSYFQKV

SEQ ID NO: 79183 - protein, 9 aa, Homo sapiens
  misc_feature: Table A; Target 79183; HLA-A*02:04; SLC45A2; ENSG00000164175; TAA
SLYSYFQKV

SEQ ID NO: 79184 - protein, 9 aa, Homo sapiens
  misc_feature: Table A; Target 79184; HLA-A*02:07; SLC45A2; ENSG00000164175; TAA
SLYSYFQKV

SEQ ID NO: 79185 - protein, 9 aa, Homo sapiens
  misc_feature: Table A; Target 79185; HLA-A*03:01; SLC45A2; ENSG00000164175; TAA
SLYSYFQKV

SEQ ID NO: 79186 - protein, 9 aa, Homo sapiens
  misc_feature: Table A; Target 79186; HLA-A*30:01; SLC45A2; ENSG00000164175; TAA
SLYSYFQKV

SEQ ID NO: 79187 - protein, 9 aa, Homo sapiens
  misc_feature: Table A; Target 79187; HLA-A*68:02; SLC45A2; ENSG00000164175; TAA
SLYSYFQKV

SEQ ID NO: 79188 - protein, 9 aa, Homo sapiens
  misc_feature: Table A; Target 79188; HLA-B*13:02; SLC45A2; ENSG00000164175; TAA
SLYSYFQKV

SEQ ID NO: 79189 - protein, 9 aa, Homo sapiens
  misc_feature: Table A; Target 79189; HLA-C*02:02; SLC45A2; ENSG00000164175; TAA
SLYSYFQKV

SEQ ID NO: 79190 - protein, 9 aa, Homo sapiens
  misc_feature: Table A; Target 79190; HLA-B*15:01; SLC45A2; ENSG00000164175; TAA
SMAMFGREF

SEQ ID NO: 79191 - protein, 9 aa, Homo sapiens
  misc_feature: Table A; Target 79191; HLA-B*15:03; SLC45A2; ENSG00000164175; TAA
SMAMFGREF

SEQ ID NO: 79192 - protein, 9 aa, Homo sapiens
  misc_feature: Table A; Target 79192; HLA-C*16:01; SLC45A2; ENSG00000164175; TAA
SMAMFGREF

SEQ ID NO: 79193 - protein, 11 aa, Homo sapiens
  misc_feature: Table A; Target 79193; HLA-A*30:02; SLC45A2; ENSG00000164175; TAA
SNSGQAGRHIY

SEQ ID NO: 79194 - protein, 8 aa, Homo sapiens
  misc_feature: Table A; Target 79194; HLA-B*07:02; SLC45A2; ENSG00000164175; TAA
SPILGFLL

SEQ ID NO: 79195 - protein, 8 aa, Homo sapiens
  misc_feature: Table A; Target 79195; HLA-B*08:01; SLC45A2; ENSG00000164175; TAA
SPILGFLL

SEQ ID NO: 79196 - protein, 8 aa, Homo sapiens
  misc_feature: Table A; Target 79196; HLA-B*35:03; SLC45A2; ENSG00000164175; TAA
SPILGFLL

SEQ ID NO: 79197 - protein, 8 aa, Homo sapiens
  misc_feature: Table A; Target 79197; HLA-C*07:02; SLC45A2; ENSG00000164175; TAA
SPILGFLL

SEQ ID NO: 79198 - protein, 8 aa, Homo sapiens
  misc_feature: Table A; Target 79198; HLA-A*01:01; SLC45A2; ENSG00000164175; TAA
SSDGMYEY

SEQ ID NO: 79199 - protein, 8 aa, Homo sapiens
  misc_feature: Table A; Target 79199; HLA-A*30:02; SLC45A2; ENSG00000164175; TAA
SSDGMYEY

SEQ ID NO: 79200 - protein, 8 aa, Homo sapiens
  misc_feature: Table A; Target 79200; HLA-B*39:01; SLC45A2; ENSG00000164175; TAA
SSDGMYEY

SEQ ID NO: 79201 - protein, 8 aa, Homo sapiens
  misc_feature: Table A; Target 79201; HLA-C*05:01; SLC45A2; ENSG00000164175; TAA
SSDGMYEY

SEQ ID NO: 79202 - protein, 8 aa, Homo sapiens
  misc_feature: Table A; Target 79202; HLA-B*57:01; SLC45A2; ENSG00000164175; TAA
SSLYSIVW

SEQ ID NO: 79203 - protein, 9 aa, Homo sapiens
  misc_feature: Table A; Target 79203; HLA-A*03:01; SLC45A2; ENSG00000164175; TAA
SSLYSYFQK

SEQ ID NO: 79204 - protein, 9 aa, Homo sapiens
  misc_feature: Table A; Target 79204; HLA-A*03:02; SLC45A2; ENSG00000164175; TAA
SSLYSYFQK

SEQ ID NO: 79205 - protein, 9 aa, Homo sapiens
  misc_feature: Table A; Target 79205; HLA-A*11:01; SLC45A2; ENSG00000164175; TAA
SSLYSYFQK

SEQ ID NO: 79206 - protein, 9 aa, Homo sapiens
  misc_feature: Table A; Target 79206; HLA-A*11:01; SLC45A2; ENSG00000164175; TAA
STEFLIYER

SEQ ID NO: 79207 - protein, 9 aa, Homo sapiens
  misc_feature: Table A; Target 79207; HLA-A*31:01; SLC45A2; ENSG00000164175; TAA
STEFLIYER

SEQ ID NO: 79208 - protein, 9 aa, Homo sapiens
  misc_feature: Table A; Target 79208; HLA-A*33:01; SLC45A2; ENSG00000164175; TAA
STEFLIYER

SEQ ID NO: 79209 - protein, 9 aa, Homo sapiens
  misc_feature: Table A; Target 79209; HLA-A*33:03; SLC45A2; ENSG00000164175; TAA
STEFLIYER

SEQ ID NO: 79210 - protein, 9 aa, Homo sapiens
  misc_feature: Table A; Target 79210; HLA-A*68:01; SLC45A2; ENSG00000164175; TAA
STEFLIYER

SEQ ID NO: 79211 - protein, 9 aa, Homo sapiens
  misc_feature: Table A; Target 79211; HLA-A*68:02; SLC45A2; ENSG00000164175; TAA
STEFLIYER

SEQ ID NO: 79212 - protein, 9 aa, Homo sapiens
  misc_feature: Table A; Target 79212; HLA-B*27:02; SLC45A2; ENSG00000164175; TAA
STEFLIYER

SEQ ID NO: 79213 - protein, 9 aa, Homo sapiens
  misc_feature: Table A; Target 79213; HLA-B*57:01; SLC45A2; ENSG00000164175; TAA
STEFLIYER

SEQ ID NO: 79214 - protein, 9 aa, Homo sapiens
  misc_feature: Table A; Target 79214; HLA-C*07:06; SLC45A2; ENSG00000164175; TAA
STEFLIYER

SEQ ID NO: 79215 - protein, 9 aa, Homo sapiens
  misc_feature: Table A; Target 79215; HLA-B*57:01; SLC45A2; ENSG00000164175; TAA
STLVLCSLF

SEQ ID NO: 79216 - protein, 11 aa, Homo sapiens
  misc_feature: Table A; Target 79216; HLA-A*31:01; SLC45A2; ENSG00000164175; TAA
SVEPPKRPTSR

SEQ ID NO: 79217 - protein, 9 aa, Homo sapiens
  misc_feature: Table A; Target 79217; HLA-A*25:01; SLC45A2; ENSG00000164175; TAA
SVFSSLYSY

SEQ ID NO: 79218 - protein, 9 aa, Homo sapiens
  misc_feature: Table A; Target 79218; HLA-A*26:01; SLC45A2; ENSG00000164175; TAA
SVFSSLYSY

SEQ ID NO: 79219 - protein, 9 aa, Homo sapiens
  misc_feature: Table A; Target 79219; HLA-A*29:02; SLC45A2; ENSG00000164175; TAA
SVFSSLYSY

SEQ ID NO: 79220 - protein, 9 aa, Homo sapiens
  misc_feature: Table A; Target 79220; HLA-A*30:02; SLC45A2; ENSG00000164175; TAA
SVFSSLYSY

SEQ ID NO: 79221 - protein, 9 aa, Homo sapiens
  misc_feature: Table A; Target 79221; HLA-A*32:01; SLC45A2; ENSG00000164175; TAA
SVFSSLYSY

SEQ ID NO: 79222 - protein, 9 aa, Homo sapiens
  misc_feature: Table A; Target 79222; HLA-B*15:01; SLC45A2; ENSG00000164175; TAA
SVFSSLYSY

SEQ ID NO: 79223 - protein, 9 aa, Homo sapiens
  misc_feature: Table A; Target 79223; HLA-B*15:03; SLC45A2; ENSG00000164175; TAA
SVFSSLYSY

SEQ ID NO: 79224 - protein, 9 aa, Homo sapiens
  misc_feature: Table A; Target 79224; HLA-B*18:01; SLC45A2; ENSG00000164175; TAA
SVFSSLYSY

SEQ ID NO: 79225 - protein, 9 aa, Homo sapiens
  misc_feature: Table A; Target 79225; HLA-B*35:01; SLC45A2; ENSG00000164175; TAA
SVFSSLYSY

SEQ ID NO: 79226 - protein, 9 aa, Homo sapiens
  misc_feature: Table A; Target 79226; HLA-B*46:01; SLC45A2; ENSG00000164175; TAA
SVFSSLYSY

SEQ ID NO: 79227 - protein, 9 aa, Homo sapiens
  misc_feature: Table A; Target 79227; HLA-C*02:02; SLC45A2; ENSG00000164175; TAA
SVFSSLYSY

SEQ ID NO: 79228 - protein, 9 aa, Homo sapiens
  misc_feature: Table A; Target 79228; HLA-C*16:04; SLC45A2; ENSG00000164175; TAA
SVFSSLYSY

SEQ ID NO: 79229 - protein, 10 aa, Homo sapiens
  misc_feature: Table A; Target 79229; HLA-A*25:01; SLC45A2; ENSG00000164175; TAA
SVFSSLYSYF

SEQ ID NO: 79230 - protein, 10 aa, Homo sapiens
  misc_feature: Table A; Target 79230; HLA-A*26:01; SLC45A2; ENSG00000164175; TAA
SVFSSLYSYF

SEQ ID NO: 79231 - protein, 10 aa, Homo sapiens
  misc_feature: Table A; Target 79231; HLA-A*29:02; SLC45A2; ENSG00000164175; TAA
SVFSSLYSYF

SEQ ID NO: 79232 - protein, 8 aa, Homo sapiens
  misc_feature: Table A; Target 79232; HLA-C*01:02; SLC45A2; ENSG00000164175; TAA
SVGLPSSL

SEQ ID NO: 79233 - protein, 9 aa, Homo sapiens
  misc_feature: Table A; Target 79233; HLA-A*01:01; SLC45A2; ENSG00000164175; TAA
SVGLPSSLY

SEQ ID NO: 79234 - protein, 9 aa, Homo sapiens
  misc_feature: Table A; Target 79234; HLA-A*25:01; SLC45A2; ENSG00000164175; TAA
SVGLPSSLY

SEQ ID NO: 79235 - protein, 9 aa, Homo sapiens
  misc_feature: Table A; Target 79235; HLA-A*26:01; SLC45A2; ENSG00000164175; TAA
SVGLPSSLY

SEQ ID NO: 79236 - protein, 9 aa, Homo sapiens
  misc_feature: Table A; Target 79236; HLA-A*29:02; SLC45A2; ENSG00000164175; TAA
SVGLPSSLY

SEQ ID NO: 79237 - protein, 9 aa, Homo sapiens
  misc_feature: Table A; Target 79237; HLA-A*30:02; SLC45A2; ENSG00000164175; TAA
SVGLPSSLY

SEQ ID NO: 79238 - protein, 9 aa, Homo sapiens
  misc_feature: Table A; Target 79238; HLA-A*32:01; SLC45A2; ENSG00000164175; TAA
SVGLPSSLY

SEQ ID NO: 79239 - protein, 9 aa, Homo sapiens
  misc_feature: Table A; Target 79239; HLA-B*15:01; SLC45A2; ENSG00000164175; TAA
SVGLPSSLY

SEQ ID NO: 79240 - protein, 9 aa, Homo sapiens
  misc_feature: Table A; Target 79240; HLA-B*15:03; SLC45A2; ENSG00000164175; TAA
SVGLPSSLY

SEQ ID NO: 79241 - protein, 9 aa, Homo sapiens
  misc_feature: Table A; Target 79241; HLA-B*35:01; SLC45A2; ENSG00000164175; TAA
SVGLPSSLY

SEQ ID NO: 79242 - protein, 9 aa, Homo sapiens
  misc_feature: Table A; Target 79242; HLA-B*46:01; SLC45A2; ENSG00000164175; TAA
SVGLPSSLY

SEQ ID NO: 79243 - protein, 9 aa, Homo sapiens
  misc_feature: Table A; Target 79243; HLA-C*07:04; SLC45A2; ENSG00000164175; TAA
SVGLPSSLY

SEQ ID NO: 79244 - protein, 9 aa, Homo sapiens
  misc_feature: Table A; Target 79244; HLA-C*07:06; SLC45A2; ENSG00000164175; TAA
SVGLPSSLY

SEQ ID NO: 79245 - protein, 8 aa, Homo sapiens
  misc_feature: Table A; Target 79245; HLA-C*06:02; SLC45A2; ENSG00000164175; TAA
SVTMIGVV

SEQ ID NO: 79246 - protein, 8 aa, Homo sapiens
  misc_feature: Table A; Target 79246; HLA-C*12:03; SLC45A2; ENSG00000164175; TAA
SVTMIGVV

SEQ ID NO: 79247 - protein, 9 aa, Homo sapiens
  misc_feature: Table A; Target 79247; HLA-A*68:02; SLC45A2; ENSG00000164175; TAA
SVTMIGVVL

SEQ ID NO: 79248 - protein, 9 aa, Homo sapiens
  misc_feature: Table A; Target 79248; HLA-B*15:01; SLC45A2; ENSG00000164175; TAA
SVTMIGVVL

SEQ ID NO: 79249 - protein, 9 aa, Homo sapiens
  misc_feature: Table A; Target 79249; HLA-B*35:03; SLC45A2; ENSG00000164175; TAA
SVTMIGVVL

SEQ ID NO: 79250 - protein, 9 aa, Homo sapiens
  misc_feature: Table A; Target 79250; HLA-B*38:01; SLC45A2; ENSG00000164175; TAA
SVTMIGVVL

SEQ ID NO: 79251 - protein, 9 aa, Homo sapiens
  misc_feature: Table A; Target 79251; HLA-B*39:01; SLC45A2; ENSG00000164175; TAA
SVTMIGVVL

SEQ ID NO: 79252 - protein, 9 aa, Homo sapiens
  misc_feature: Table A; Target 79252; HLA-B*40:01; SLC45A2; ENSG00000164175; TAA
SVTMIGVVL

SEQ ID NO: 79253 - protein, 9 aa, Homo sapiens
  misc_feature: Table A; Target 79253; HLA-C*03:04; SLC45A2; ENSG00000164175; TAA
SVTMIGVVL

SEQ ID NO: 79254 - protein, 9 aa, Homo sapiens
  misc_feature: Table A; Target 79254; HLA-C*07:04; SLC45A2; ENSG00000164175; TAA
SVTMIGVVL

SEQ ID NO: 79255 - protein, 9 aa, Homo sapiens
  misc_feature: Table A; Target 79255; HLA-C*07:06; SLC45A2; ENSG00000164175; TAA
SVTMIGVVL

SEQ ID NO: 79256 - protein, 9 aa, Homo sapiens
  misc_feature: Table A; Target 79256; HLA-C*12:03; SLC45A2; ENSG00000164175; TAA
SVTMIGVVL

SEQ ID NO: 79257 - protein, 8 aa, Homo sapiens
  misc_feature: Table A; Target 79257; HLA-B*08:01; SLC45A2; ENSG00000164175; TAA
SYFQKVLV

SEQ ID NO: 79258 - protein, 10 aa, Homo sapiens
  misc_feature: Table A; Target 79258; HLA-A*23:01; SLC45A2; ENSG00000164175; TAA
SYFQKVLVSY

SEQ ID NO: 79259 - protein, 10 aa, Homo sapiens
  misc_feature: Table A; Target 79259; HLA-A*24:02; SLC45A2; ENSG00000164175; TAA
SYFQKVLVSY

SEQ ID NO: 79260 - protein, 10 aa, Homo sapiens
  misc_feature: Table A; Target 79260; HLA-A*29:02; SLC45A2; ENSG00000164175; TAA
SYFQKVLVSY

SEQ ID NO: 79261 - protein, 10 aa, Homo sapiens
  misc_feature: Table A; Target 79261; HLA-A*30:02; SLC45A2; ENSG00000164175; TAA
SYFQKVLVSY

SEQ ID NO: 79262 - protein, 9 aa, Homo sapiens
  misc_feature: Table A; Target 79262; HLA-A*29:02; SLC45A2; ENSG00000164175; TAA
SYIGLKGLY

SEQ ID NO: 79263 - protein, 9 aa, Homo sapiens
  misc_feature: Table A; Target 79263; HLA-A*30:02; SLC45A2; ENSG00000164175; TAA
SYIGLKGLY

SEQ ID NO: 79264 - protein, 9 aa, Homo sapiens
  misc_feature: Table A; Target 79264; HLA-C*14:02; SLC45A2; ENSG00000164175; TAA
SYIGLKGLY

SEQ ID NO: 79265 - protein, 10 aa, Homo sapiens
  misc_feature: Table A; Target 79265; HLA-A*23:01; SLC45A2; ENSG00000164175; TAA
SYIGLKGLYF

SEQ ID NO: 79266 - protein, 10 aa, Homo sapiens
  misc_feature: Table A; Target 79266; HLA-A*24:02; SLC45A2; ENSG00000164175; TAA
SYIGLKGLYF

SEQ ID NO: 79267 - protein, 10 aa, Homo sapiens
  misc_feature: Table A; Target 79267; HLA-A*29:02; SLC45A2; ENSG00000164175; TAA
SYIGLKGLYF

SEQ ID NO: 79268 - protein, 8 aa, Homo sapiens
  misc_feature: Table A; Target 79268; HLA-B*08:01; SLC45A2; ENSG00000164175; TAA
TAFLSNML

SEQ ID NO: 79269 - protein, 8 aa, Homo sapiens
  misc_feature: Table A; Target 79269; HLA-B*35:01; SLC45A2; ENSG00000164175; TAA
TAFLSNML

SEQ ID NO: 79270 - protein, 8 aa, Homo sapiens
  misc_feature: Table A; Target 79270; HLA-B*35:03; SLC45A2; ENSG00000164175; TAA
TAFLSNML

SEQ ID NO: 79271 - protein, 8 aa, Homo sapiens
  misc_feature: Table A; Target 79271; HLA-B*51:01; SLC45A2; ENSG00000164175; TAA
TAFLSNML

SEQ ID NO: 79272 - protein, 8 aa, Homo sapiens
  misc_feature: Table A; Target 79272; HLA-C*03:03; SLC45A2; ENSG00000164175; TAA
TAFLSNML

SEQ ID NO: 79273 - protein, 8 aa, Homo sapiens
  misc_feature: Table A; Target 79273; HLA-C*03:04; SLC45A2; ENSG00000164175; TAA
TAFLSNML

SEQ ID NO: 79274 - protein, 9 aa, Homo sapiens
  misc_feature: Table A; Target 79274; HLA-B*35:01; SLC45A2; ENSG00000164175; TAA
TAFLSNMLF

SEQ ID NO: 79275 - protein, 9 aa, Homo sapiens
  misc_feature: Table A; Target 79275; HLA-B*57:01; SLC45A2; ENSG00000164175; TAA
TAFLSNMLF

SEQ ID NO: 79276 - protein, 9 aa, Homo sapiens
  misc_feature: Table A; Target 79276; HLA-C*02:02; SLC45A2; ENSG00000164175; TAA
TAFLSNMLF

SEQ ID NO: 79277 - protein, 9 aa, Homo sapiens
  misc_feature: Table A; Target 79277; HLA-C*12:03; SLC45A2; ENSG00000164175; TAA
TAFLSNMLF

SEQ ID NO: 79278 - protein, 8 aa, Homo sapiens
  misc_feature: Table A; Target 79278; HLA-B*51:01; SLC45A2; ENSG00000164175; TAA
TAGTVVVV

SEQ ID NO: 79279 - protein, 8 aa, Homo sapiens
  misc_feature: Table A; Target 79279; HLA-C*05:01; SLC45A2; ENSG00000164175; TAA
TAGTVVVV

SEQ ID NO: 79280 - protein, 8 aa, Homo sapiens
  misc_feature: Table A; Target 79280; HLA-C*07:04; SLC45A2; ENSG00000164175; TAA
TAGTVVVV

SEQ ID NO: 79281 - protein, 8 aa, Homo sapiens
  misc_feature: Table A; Target 79281; HLA-C*07:06; SLC45A2; ENSG00000164175; TAA
TAGTVVVV

SEQ ID NO: 79282 - protein, 8 aa, Homo sapiens
  misc_feature: Table A; Target 79282; HLA-C*12:03; SLC45A2; ENSG00000164175; TAA
TAGTVVVV

SEQ ID NO: 79283 - protein, 8 aa, Homo sapiens
  misc_feature: Table A; Target 79283; HLA-C*16:02; SLC45A2; ENSG00000164175; TAA
TAGTVVVV

SEQ ID NO: 79284 - protein, 9 aa, Homo sapiens
  misc_feature: Table A; Target 79284; HLA-A*33:03; SLC45A2; ENSG00000164175; TAA
TAGTVVVVV

SEQ ID NO: 79285 - protein, 9 aa, Homo sapiens
  misc_feature: Table A; Target 79285; HLA-A*68:01; SLC45A2; ENSG00000164175; TAA
TAGTVVVVV

SEQ ID NO: 79286 - protein, 9 aa, Homo sapiens
  misc_feature: Table A; Target 79286; HLA-A*68:02; SLC45A2; ENSG00000164175; TAA
TAGTVVVVV

SEQ ID NO: 79287 - protein, 9 aa, Homo sapiens
  misc_feature: Table A; Target 79287; HLA-B*13:02; SLC45A2; ENSG00000164175; TAA
TAGTVVVVV

SEQ ID NO: 79288 - protein, 9 aa, Homo sapiens
  misc_feature: Table A; Target 79288; HLA-B*35:01; SLC45A2; ENSG00000164175; TAA
TAGTVVVVV

SEQ ID NO: 79289 - protein, 9 aa, Homo sapiens
  misc_feature: Table A; Target 79289; HLA-B*35:03; SLC45A2; ENSG00000164175; TAA
TAGTVVVVV

SEQ ID NO: 79290 - protein, 9 aa, Homo sapiens
  misc_feature: Table A; Target 79290; HLA-B*39:01; SLC45A2; ENSG00000164175; TAA
TAGTVVVVV

SEQ ID NO: 79291 - protein, 9 aa, Homo sapiens
  misc_feature: Table A; Target 79291; HLA-B*51:01; SLC45A2; ENSG00000164175; TAA
TAGTVVVVV

SEQ ID NO: 79292 - protein, 9 aa, Homo sapiens
  misc_feature: Table A; Target 79292; HLA-C*02:02; SLC45A2; ENSG00000164175; TAA
TAGTVVVVV

SEQ ID NO: 79293 - protein, 9 aa, Homo sapiens
  misc_feature: Table A; Target 79293; HLA-C*03:03; SLC45A2; ENSG00000164175; TAA
TAGTVVVVV

SEQ ID NO: 79294 - protein, 9 aa, Homo sapiens
  misc_feature: Table A; Target 79294; HLA-C*03:04; SLC45A2; ENSG00000164175; TAA
TAGTVVVVV

SEQ ID NO: 79295 - protein, 9 aa, Homo sapiens
  misc_feature: Table A; Target 79295; HLA-C*05:01; SLC45A2; ENSG00000164175; TAA
TAGTVVVVV

SEQ ID NO: 79296 - protein, 9 aa, Homo sapiens
  misc_feature: Table A; Target 79296; HLA-C*07:04; SLC45A2; ENSG00000164175; TAA
TAGTVVVVV

SEQ ID NO: 79297 - protein, 9 aa, Homo sapiens
  misc_feature: Table A; Target 79297; HLA-C*07:06; SLC45A2; ENSG00000164175; TAA
TAGTVVVVV

SEQ ID NO: 79298 - protein, 9 aa, Homo sapiens
  misc_feature: Table A; Target 79298; HLA-C*12:03; SLC45A2; ENSG00000164175; TAA
TAGTVVVVV

SEQ ID NO: 79299 - protein, 9 aa, Homo sapiens
  misc_feature: Table A; Target 79299; HLA-C*16:02; SLC45A2; ENSG00000164175; TAA
TAGTVVVVV

SEQ ID NO: 79300 - protein, 9 aa, Homo sapiens
  misc_feature: Table A; Target 79300; HLA-C*16:04; SLC45A2; ENSG00000164175; TAA
TAGTVVVVV

SEQ ID NO: 79301 - protein, 10 aa, Homo sapiens
  misc_feature: Table A; Target 79301; HLA-A*68:01; SLC45A2; ENSG00000164175; TAA
TAGTVVVVVI

SEQ ID NO: 79302 - protein, 8 aa, Homo sapiens
  misc_feature: Table A; Target 79302; HLA-B*51:01; SLC45A2; ENSG00000164175; TAA
TASAVALI

SEQ ID NO: 79303 - protein, 10 aa, Homo sapiens
  misc_feature: Table A; Target 79303; HLA-C*07:01; SLC45A2; ENSG00000164175; TAA
TCMVQLAQIL

SEQ ID NO: 79304 - protein, 8 aa, Homo sapiens
  misc_feature: Table A; Target 79304; HLA-B*37:01; SLC45A2; ENSG00000164175; TAA
TDFMGQIV

SEQ ID NO: 79305 - protein, 8 aa, Homo sapiens
  misc_feature: Table A; Target 79305; HLA-C*12:03; SLC45A2; ENSG00000164175; TAA
TDFMGQIV

SEQ ID NO: 79306 - protein, 9 aa, Homo sapiens
  misc_feature: Table A; Target 79306; HLA-A*29:02; SLC45A2; ENSG00000164175; TAA
TDFMGQIVY

SEQ ID NO: 79307 - protein, 9 aa, Homo sapiens
  misc_feature: Table A; Target 79307; HLA-A*30:01; SLC45A2; ENSG00000164175; TAA
TDFMGQIVY

SEQ ID NO: 79308 - protein, 9 aa, Homo sapiens
  misc_feature: Table A; Target 79308; HLA-B*15:01; SLC45A2; ENSG00000164175; TAA
TDFMGQIVY

SEQ ID NO: 79309 - protein, 9 aa, Homo sapiens
  misc_feature: Table A; Target 79309; HLA-B*15:03; SLC45A2; ENSG00000164175; TAA
TDFMGQIVY

SEQ ID NO: 79310 - protein, 9 aa, Homo sapiens
  misc_feature: Table A; Target 79310; HLA-B*18:01; SLC45A2; ENSG00000164175; TAA
TDFMGQIVY

SEQ ID NO: 79311 - protein, 9 aa, Homo sapiens
  misc_feature: Table A; Target 79311; HLA-B*27:02; SLC45A2; ENSG00000164175; TAA
TDFMGQIVY

SEQ ID NO: 79312 - protein, 9 aa, Homo sapiens
  misc_feature: Table A; Target 79312; HLA-B*35:01; SLC45A2; ENSG00000164175; TAA
TDFMGQIVY

SEQ ID NO: 79313 - protein, 9 aa, Homo sapiens
  misc_feature: Table A; Target 79313; HLA-B*37:01; SLC45A2; ENSG00000164175; TAA
TDFMGQIVY

SEQ ID NO: 79314 - protein, 9 aa, Homo sapiens
  misc_feature: Table A; Target 79314; HLA-B*39:01; SLC45A2; ENSG00000164175; TAA
TDFMGQIVY

SEQ ID NO: 79315 - protein, 9 aa, Homo sapiens
  misc_feature: Table A; Target 79315; HLA-B*44:02; SLC45A2; ENSG00000164175; TAA
TDFMGQIVY

SEQ ID NO: 79316 - protein, 9 aa, Homo sapiens
  misc_feature: Table A; Target 79316; HLA-B*44:03; SLC45A2; ENSG00000164175; TAA
TDFMGQIVY

SEQ ID NO: 79317 - protein, 9 aa, Homo sapiens
  misc_feature: Table A; Target 79317; HLA-C*02:02; SLC45A2; ENSG00000164175; TAA
TDFMGQIVY

SEQ ID NO: 79318 - protein, 9 aa, Homo sapiens
  misc_feature: Table A; Target 79318; HLA-C*04:01; SLC45A2; ENSG00000164175; TAA
TDFMGQIVY

SEQ ID NO: 79319 - protein, 9 aa, Homo sapiens
  misc_feature: Table A; Target 79319; HLA-C*06:02; SLC45A2; ENSG00000164175; TAA
TDFMGQIVY

SEQ ID NO: 79320 - protein, 9 aa, Homo sapiens
  misc_feature: Table A; Target 79320; HLA-C*07:01; SLC45A2; ENSG00000164175; TAA
TDFMGQIVY

SEQ ID NO: 79321 - protein, 9 aa, Homo sapiens
  misc_feature: Table A; Target 79321; HLA-C*07:04; SLC45A2; ENSG00000164175; TAA
TDFMGQIVY

SEQ ID NO: 79322 - protein, 9 aa, Homo sapiens
  misc_feature: Table A; Target 79322; HLA-C*12:03; SLC45A2; ENSG00000164175; TAA
TDFMGQIVY

SEQ ID NO: 79323 - protein, 9 aa, Homo sapiens
  misc_feature: Table A; Target 79323; HLA-C*16:01; SLC45A2; ENSG00000164175; TAA
TDFMGQIVY

SEQ ID NO: 79324 - protein, 9 aa, Homo sapiens
  misc_feature: Table A; Target 79324; HLA-C*16:04; SLC45A2; ENSG00000164175; TAA
TDFMGQIVY

SEQ ID NO: 79325 - protein, 10 aa, Homo sapiens
  misc_feature: Table A; Target 79325; HLA-A*31:01; SLC45A2; ENSG00000164175; TAA
TDFMGQIVYR

SEQ ID NO: 79326 - protein, 10 aa, Homo sapiens
  misc_feature: Table A; Target 79326; HLA-A*33:01; SLC45A2; ENSG00000164175; TAA
TDFMGQIVYR

SEQ ID NO: 79327 - protein, 10 aa, Homo sapiens
  misc_feature: Table A; Target 79327; HLA-A*33:03; SLC45A2; ENSG00000164175; TAA
TDFMGQIVYR

SEQ ID NO: 79328 - protein, 10 aa, Homo sapiens
  misc_feature: Table A; Target 79328; HLA-A*68:01; SLC45A2; ENSG00000164175; TAA
TDFMGQIVYR

SEQ ID NO: 79329 - protein, 10 aa, Homo sapiens
  misc_feature: Table A; Target 79329; HLA-A*68:02; SLC45A2; ENSG00000164175; TAA
TDFMGQIVYR

SEQ ID NO: 79330 - protein, 10 aa, Homo sapiens
  misc_feature: Table A; Target 79330; HLA-B*27:02; SLC45A2; ENSG00000164175; TAA
TDFMGQIVYR

SEQ ID NO: 79331 - protein, 10 aa, Homo sapiens
  misc_feature: Table A; Target 79331; HLA-C*04:01; SLC45A2; ENSG00000164175; TAA
TDFMGQIVYR

SEQ ID NO: 79332 - protein, 8 aa, Homo sapiens
  misc_feature: Table A; Target 79332; HLA-B*18:01; SLC45A2; ENSG00000164175; TAA
TEFLIYER

SEQ ID NO: 79333 - protein, 8 aa, Homo sapiens
  misc_feature: Table A; Target 79333; HLA-B*18:01; SLC45A2; ENSG00000164175; TAA
TEFQVMFF

SEQ ID NO: 79334 - protein, 8 aa, Homo sapiens
  misc_feature: Table A; Target 79334; HLA-B*37:01; SLC45A2; ENSG00000164175; TAA
TEFQVMFF

SEQ ID NO: 79335 - protein, 8 aa, Homo sapiens
  misc_feature: Table A; Target 79335; HLA-B*44:02; SLC45A2; ENSG00000164175; TAA
TEFQVMFF

SEQ ID NO: 79336 - protein, 8 aa, Homo sapiens
  misc_feature: Table A; Target 79336; HLA-B*44:03; SLC45A2; ENSG00000164175; TAA
TEFQVMFF

SEQ ID NO: 79337 - protein, 8 aa, Homo sapiens
  misc_feature: Table A; Target 79337; HLA-B*49:01; SLC45A2; ENSG00000164175; TAA
TEFQVMFF

SEQ ID NO: 79338 - protein, 9 aa, Homo sapiens
  misc_feature: Table A; Target 79338; HLA-B*44:02; SLC45A2; ENSG00000164175; TAA
TEFQVMFFF

SEQ ID NO: 79339 - protein, 9 aa, Homo sapiens
  misc_feature: Table A; Target 79339; HLA-B*44:03; SLC45A2; ENSG00000164175; TAA
TEFQVMFFF

SEQ ID NO: 79340 - protein, 9 aa, Homo sapiens
  misc_feature: Table A; Target 79340; HLA-B*40:02; SLC45A2; ENSG00000164175; TAA
TEVAKGIPP

SEQ ID NO: 79341 - protein, 9 aa, Homo sapiens
  misc_feature: Table A; Target 79341; HLA-A*01:01; SLC45A2; ENSG00000164175; TAA
TGFGGALGY

SEQ ID NO: 79342 - protein, 9 aa, Homo sapiens
  misc_feature: Table A; Target 79342; HLA-A*03:01; SLC45A2; ENSG00000164175; TAA
TGFGGALGY

SEQ ID NO: 79343 - protein, 9 aa, Homo sapiens
  misc_feature: Table A; Target 79343; HLA-A*03:02; SLC45A2; ENSG00000164175; TAA
TGFGGALGY

SEQ ID NO: 79344 - protein, 9 aa, Homo sapiens
  misc_feature: Table A; Target 79344; HLA-A*11:01; SLC45A2; ENSG00000164175; TAA
TGFGGALGY

SEQ ID NO: 79345 - protein, 9 aa, Homo sapiens
  misc_feature: Table A; Target 79345; HLA-A*25:01; SLC45A2; ENSG00000164175; TAA
TGFGGALGY

SEQ ID NO: 79346 - protein, 9 aa, Homo sapiens
  misc_feature: Table A; Target 79346; HLA-A*26:01; SLC45A2; ENSG00000164175; TAA
TGFGGALGY

SEQ ID NO: 79347 - protein, 9 aa, Homo sapiens
  misc_feature: Table A; Target 79347; HLA-A*29:02; SLC45A2; ENSG00000164175; TAA
TGFGGALGY

SEQ ID NO: 79348 - protein, 9 aa, Homo sapiens
  misc_feature: Table A; Target 79348; HLA-A*30:02; SLC45A2; ENSG00000164175; TAA
TGFGGALGY

SEQ ID NO: 79349 - protein, 9 aa, Homo sapiens
  misc_feature: Table A; Target 79349; HLA-A*32:01; SLC45A2; ENSG00000164175; TAA
TGFGGALGY

SEQ ID NO: 79350 - protein, 9 aa, Homo sapiens
  misc_feature: Table A; Target 79350; HLA-A*68:01; SLC45A2; ENSG00000164175; TAA
TGFGGALGY

SEQ ID NO: 79351 - protein, 9 aa, Homo sapiens
  misc_feature: Table A; Target 79351; HLA-B*13:02; SLC45A2; ENSG00000164175; TAA
TGFGGALGY

SEQ ID NO: 79352 - protein, 9 aa, Homo sapiens
  misc_feature: Table A; Target 79352; HLA-B*15:01; SLC45A2; ENSG00000164175; TAA
TGFGGALGY

SEQ ID NO: 79353 - protein, 9 aa, Homo sapiens
  misc_feature: Table A; Target 79353; HLA-B*15:03; SLC45A2; ENSG00000164175; TAA
TGFGGALGY

SEQ ID NO: 79354 - protein, 9 aa, Homo sapiens
  misc_feature: Table A; Target 79354; HLA-B*18:01; SLC45A2; ENSG00000164175; TAA
TGFGGALGY

SEQ ID NO: 79355 - protein, 9 aa, Homo sapiens
  misc_feature: Table A; Target 79355; HLA-B*27:02; SLC45A2; ENSG00000164175; TAA
TGFGGALGY

SEQ ID NO: 79356 - protein, 9 aa, Homo sapiens
  misc_feature: Table A; Target 79356; HLA-B*27:05; SLC45A2; ENSG00000164175; TAA
TGFGGALGY

SEQ ID NO: 79357 - protein, 9 aa, Homo sapiens
  misc_feature: Table A; Target 79357; HLA-B*35:01; SLC45A2; ENSG00000164175; TAA
TGFGGALGY

SEQ ID NO: 79358 - protein, 9 aa, Homo sapiens
  misc_feature: Table A; Target 79358; HLA-B*39:01; SLC45A2; ENSG00000164175; TAA
TGFGGALGY

SEQ ID NO: 79359 - protein, 9 aa, Homo sapiens
  misc_feature: Table A; Target 79359; HLA-B*44:02; SLC45A2; ENSG00000164175; TAA
TGFGGALGY

SEQ ID NO: 79360 - protein, 9 aa, Homo sapiens
  misc_feature: Table A; Target 79360; HLA-B*44:03; SLC45A2; ENSG00000164175; TAA
TGFGGALGY

SEQ ID NO: 79361 - protein, 9 aa, Homo sapiens
  misc_feature: Table A; Target 79361; HLA-B*46:01; SLC45A2; ENSG00000164175; TAA
TGFGGALGY

SEQ ID NO: 79362 - protein, 9 aa, Homo sapiens
  misc_feature: Table A; Target 79362; HLA-B*58:01; SLC45A2; ENSG00000164175; TAA
TGFGGALGY

SEQ ID NO: 79363 - protein, 9 aa, Homo sapiens
  misc_feature: Table A; Target 79363; HLA-C*01:02; SLC45A2; ENSG00000164175; TAA
TGFGGALGY

SEQ ID NO: 79364 - protein, 9 aa, Homo sapiens
  misc_feature: Table A; Target 79364; HLA-C*02:02; SLC45A2; ENSG00000164175; TAA
TGFGGALGY

SEQ ID NO: 79365 - protein, 9 aa, Homo sapiens
  misc_feature: Table A; Target 79365; HLA-C*03:03; SLC45A2; ENSG00000164175; TAA
TGFGGALGY

SEQ ID NO: 79366 - protein, 9 aa, Homo sapiens
  misc_feature: Table A; Target 79366; HLA-C*04:01; SLC45A2; ENSG00000164175; TAA
TGFGGALGY

SEQ ID NO: 79367 - protein, 9 aa, Homo sapiens
  misc_feature: Table A; Target 79367; HLA-C*06:02; SLC45A2; ENSG00000164175; TAA
TGFGGALGY

SEQ ID NO: 79368 - protein, 9 aa, Homo sapiens
  misc_feature: Table A; Target 79368; HLA-C*07:01; SLC45A2; ENSG00000164175; TAA
TGFGGALGY

SEQ ID NO: 79369 - protein, 9 aa, Homo sapiens
  misc_feature: Table A; Target 79369; HLA-C*07:04; SLC45A2; ENSG00000164175; TAA
TGFGGALGY

SEQ ID NO: 79370 - protein, 9 aa, Homo sapiens
  misc_feature: Table A; Target 79370; HLA-C*07:06; SLC45A2; ENSG00000164175; TAA
TGFGGALGY

SEQ ID NO: 79371 - protein, 9 aa, Homo sapiens
  misc_feature: Table A; Target 79371; HLA-C*12:03; SLC45A2; ENSG00000164175; TAA
TGFGGALGY

SEQ ID NO: 79372 - protein, 9 aa, Homo sapiens
  misc_feature: Table A; Target 79372; HLA-C*14:02; SLC45A2; ENSG00000164175; TAA
TGFGGALGY

SEQ ID NO: 79373 - protein, 9 aa, Homo sapiens
  misc_feature: Table A; Target 79373; HLA-C*16:01; SLC45A2; ENSG00000164175; TAA
TGFGGALGY

SEQ ID NO: 79374 - protein, 9 aa, Homo sapiens
  misc_feature: Table A; Target 79374; HLA-C*16:02; SLC45A2; ENSG00000164175; TAA
TGFGGALGY

SEQ ID NO: 79375 - protein, 9 aa, Homo sapiens
  misc_feature: Table A; Target 79375; HLA-C*16:04; SLC45A2; ENSG00000164175; TAA
TGFGGALGY

SEQ ID NO: 79376 - protein, 11 aa, Homo sapiens
  misc_feature: Table A; Target 79376; HLA-A*68:02; SLC45A2; ENSG00000164175; TAA
TGFGGALGYLL

SEQ ID NO: 79377 - protein, 10 aa, Homo sapiens
  misc_feature: Table A; Target 79377; HLA-C*06:02; SLC45A2; ENSG00000164175; TAA
TGFIGLFPNV

SEQ ID NO: 79378 - protein, 8 aa, Homo sapiens
  misc_feature: Table A; Target 79378; HLA-B*51:01; SLC45A2; ENSG00000164175; TAA
TGYLLFGL

SEQ ID NO: 79379 - protein, 8 aa, Homo sapiens
  misc_feature: Table A; Target 79379; HLA-A*02:01; SLC45A2; ENSG00000164175; TAA
TLGVMMLV

SEQ ID NO: 79380 - protein, 8 aa, Homo sapiens
  misc_feature: Table A; Target 79380; HLA-A*02:03; SLC45A2; ENSG00000164175; TAA
TLGVMMLV

SEQ ID NO: 79381 - protein, 8 aa, Homo sapiens
  misc_feature: Table A; Target 79381; HLA-B*13:02; SLC45A2; ENSG00000164175; TAA
TLGVMMLV

SEQ ID NO: 79382 - protein, 8 aa, Homo sapiens
  misc_feature: Table A; Target 79382; HLA-C*06:02; SLC45A2; ENSG00000164175; TAA
TLGVMMLV

SEQ ID NO: 79383 - protein, 9 aa, Homo sapiens
  misc_feature: Table A; Target 79383; HLA-A*02:03; SLC45A2; ENSG00000164175; TAA
TLKSLLRAL

SEQ ID NO: 79384 - protein, 9 aa, Homo sapiens
  misc_feature: Table A; Target 79384; HLA-A*02:04; SLC45A2; ENSG00000164175; TAA
TLKSLLRAL

SEQ ID NO: 79385 - protein, 9 aa, Homo sapiens
  misc_feature: Table A; Target 79385; HLA-B*08:01; SLC45A2; ENSG00000164175; TAA
TLKSLLRAL

SEQ ID NO: 79386 - protein, 9 aa, Homo sapiens
  misc_feature: Table A; Target 79386; HLA-A*02:01; SLC45A2; ENSG00000164175; TAA
TLYTVPFNL

SEQ ID NO: 79387 - protein, 9 aa, Homo sapiens
  misc_feature: Table A; Target 79387; HLA-A*02:03; SLC45A2; ENSG00000164175; TAA
TLYTVPFNL

SEQ ID NO: 79388 - protein, 9 aa, Homo sapiens
  misc_feature: Table A; Target 79388; HLA-A*02:04; SLC45A2; ENSG00000164175; TAA
TLYTVPFNL

SEQ ID NO: 79389 - protein, 9 aa, Homo sapiens
  misc_feature: Table A; Target 79389; HLA-A*02:07; SLC45A2; ENSG00000164175; TAA
TLYTVPFNL

SEQ ID NO: 79390 - protein, 9 aa, Homo sapiens
  misc_feature: Table A; Target 79390; HLA-A*03:01; SLC45A2; ENSG00000164175; TAA
TLYTVPFNL

SEQ ID NO: 79391 - protein, 9 aa, Homo sapiens
  misc_feature: Table A; Target 79391; HLA-A*23:01; SLC45A2; ENSG00000164175; TAA
TLYTVPFNL

SEQ ID NO: 79392 - protein, 9 aa, Homo sapiens
  misc_feature: Table A; Target 79392; HLA-A*68:02; SLC45A2; ENSG00000164175; TAA
TLYTVPFNL

SEQ ID NO: 79393 - protein, 9 aa, Homo sapiens
  misc_feature: Table A; Target 79393; HLA-B*13:02; SLC45A2; ENSG00000164175; TAA
TLYTVPFNL

SEQ ID NO: 79394 - protein, 9 aa, Homo sapiens
  misc_feature: Table A; Target 79394; HLA-B*55:01; SLC45A2; ENSG00000164175; TAA
TLYTVPFNL

SEQ ID NO: 79395 - protein, 10 aa, Homo sapiens
  misc_feature: Table A; Target 79395; HLA-A*02:03; SLC45A2; ENSG00000164175; TAA
TLYTVPFNLI

SEQ ID NO: 79396 - protein, 10 aa, Homo sapiens
  misc_feature: Table A; Target 79396; HLA-A*02:07; SLC45A2; ENSG00000164175; TAA
TLYTVPFNLI

SEQ ID NO: 79397 - protein, 10 aa, Homo sapiens
  misc_feature: Table A; Target 79397; HLA-A*68:02; SLC45A2; ENSG00000164175; TAA
TLYTVPFNLI

SEQ ID NO: 79398 - protein, 9 aa, Homo sapiens
  misc_feature: Table A; Target 79398; HLA-B*56:01; SLC45A2; ENSG00000164175; TAA
TPQDPPLSS

SEQ ID NO: 79399 - protein, 9 aa, Homo sapiens
  misc_feature: Table A; Target 79399; HLA-B*07:02; SLC45A2; ENSG00000164175; TAA
TPVLLSVGL

SEQ ID NO: 79400 - protein, 9 aa, Homo sapiens
  misc_feature: Table A; Target 79400; HLA-B*35:01; SLC45A2; ENSG00000164175; TAA
TPVLLSVGL

SEQ ID NO: 79401 - protein, 9 aa, Homo sapiens
  misc_feature: Table A; Target 79401; HLA-B*35:03; SLC45A2; ENSG00000164175; TAA
TPVLLSVGL

SEQ ID NO: 79402 - protein, 9 aa, Homo sapiens
  misc_feature: Table A; Target 79402; HLA-B*56:01; SLC45A2; ENSG00000164175; TAA
TPVLLSVGL

SEQ ID NO: 79403 - protein, 10 aa, Homo sapiens
  misc_feature: Table A; Target 79403; HLA-A*01:01; SLC45A2; ENSG00000164175; TAA
TVPFNLITEY

SEQ ID NO: 79404 - protein, 10 aa, Homo sapiens
  misc_feature: Table A; Target 79404; HLA-A*25:01; SLC45A2; ENSG00000164175; TAA
TVPFNLITEY

SEQ ID NO: 79405 - protein, 10 aa, Homo sapiens
  misc_feature: Table A; Target 79405; HLA-A*26:01; SLC45A2; ENSG00000164175; TAA
TVPFNLITEY

SEQ ID NO: 79406 - protein, 10 aa, Homo sapiens
  misc_feature: Table A; Target 79406; HLA-A*29:02; SLC45A2; ENSG00000164175; TAA
TVPFNLITEY

SEQ ID NO: 79407 - protein, 10 aa, Homo sapiens
  misc_feature: Table A; Target 79407; HLA-A*30:02; SLC45A2; ENSG00000164175; TAA
TVPFNLITEY

SEQ ID NO: 79408 - protein, 10 aa, Homo sapiens
  misc_feature: Table A; Target 79408; HLA-B*15:01; SLC45A2; ENSG00000164175; TAA
TVPFNLITEY

SEQ ID NO: 79409 - protein, 10 aa, Homo sapiens
  misc_feature: Table A; Target 79409; HLA-B*35:01; SLC45A2; ENSG00000164175; TAA
TVPFNLITEY

SEQ ID NO: 79410 - protein, 10 aa, Homo sapiens
  misc_feature: Table A; Target 79410; HLA-C*07:04; SLC45A2; ENSG00000164175; TAA
TVPFNLITEY

SEQ ID NO: 79411 - protein, 11 aa, Homo sapiens
  misc_feature: Table A; Target 79411; HLA-A*31:01; SLC45A2; ENSG00000164175; TAA
TVVAALIANPR

SEQ ID NO: 79412 - protein, 11 aa, Homo sapiens
  misc_feature: Table A; Target 79412; HLA-A*33:03; SLC45A2; ENSG00000164175; TAA
TVVAALIANPR

SEQ ID NO: 79413 - protein, 11 aa, Homo sapiens
  misc_feature: Table A; Target 79413; HLA-A*68:01; SLC45A2; ENSG00000164175; TAA
TVVAALIANPR

SEQ ID NO: 79414 - protein, 11 aa, Homo sapiens
  misc_feature: Table A; Target 79414; HLA-B*27:02; SLC45A2; ENSG00000164175; TAA
TVVAALIANPR

SEQ ID NO: 79415 - protein, 11 aa, Homo sapiens
  misc_feature: Table A; Target 79415; HLA-C*07:06; SLC45A2; ENSG00000164175; TAA
TVVAALIANPR

SEQ ID NO: 79416 - protein, 9 aa, Homo sapiens
  misc_feature: Table A; Target 79416; HLA-A*02:01; SLC45A2; ENSG00000164175; TAA
TVVVVVITA

SEQ ID NO: 79417 - protein, 9 aa, Homo sapiens
  misc_feature: Table A; Target 79417; HLA-A*02:03; SLC45A2; ENSG00000164175; TAA
TVVVVVITA

SEQ ID NO: 79418 - protein, 9 aa, Homo sapiens
  misc_feature: Table A; Target 79418; HLA-A*02:04; SLC45A2; ENSG00000164175; TAA
TVVVVVITA

SEQ ID NO: 79419 - protein, 9 aa, Homo sapiens
  misc_feature: Table A; Target 79419; HLA-A*02:07; SLC45A2; ENSG00000164175; TAA
TVVVVVITA

SEQ ID NO: 79420 - protein, 9 aa, Homo sapiens
  misc_feature: Table A; Target 79420; HLA-A*25:01; SLC45A2; ENSG00000164175; TAA
TVVVVVITA

SEQ ID NO: 79421 - protein, 9 aa, Homo sapiens
  misc_feature: Table A; Target 79421; HLA-A*30:01; SLC45A2; ENSG00000164175; TAA
TVVVVVITA

SEQ ID NO: 79422 - protein, 9 aa, Homo sapiens
  misc_feature: Table A; Target 79422; HLA-A*32:01; SLC45A2; ENSG00000164175; TAA
TVVVVVITA

SEQ ID NO: 79423 - protein, 9 aa, Homo sapiens
  misc_feature: Table A; Target 79423; HLA-A*68:01; SLC45A2; ENSG00000164175; TAA
TVVVVVITA

SEQ ID NO: 79424 - protein, 9 aa, Homo sapiens
  misc_feature: Table A; Target 79424; HLA-A*68:02; SLC45A2; ENSG00000164175; TAA
TVVVVVITA

SEQ ID NO: 79425 - protein, 9 aa, Homo sapiens
  misc_feature: Table A; Target 79425; HLA-B*13:02; SLC45A2; ENSG00000164175; TAA
TVVVVVITA

SEQ ID NO: 79426 - protein, 9 aa, Homo sapiens
  misc_feature: Table A; Target 79426; HLA-B*35:01; SLC45A2; ENSG00000164175; TAA
TVVVVVITA

SEQ ID NO: 79427 - protein, 9 aa, Homo sapiens
  misc_feature: Table A; Target 79427; HLA-B*54:01; SLC45A2; ENSG00000164175; TAA
TVVVVVITA

SEQ ID NO: 79428 - protein, 9 aa, Homo sapiens
  misc_feature: Table A; Target 79428; HLA-B*55:01; SLC45A2; ENSG00000164175; TAA
TVVVVVITA

SEQ ID NO: 79429 - protein, 9 aa, Homo sapiens
  misc_feature: Table A; Target 79429; HLA-B*56:01; SLC45A2; ENSG00000164175; TAA
TVVVVVITA

SEQ ID NO: 79430 - protein, 9 aa, Homo sapiens
  misc_feature: Table A; Target 79430; HLA-C*07:06; SLC45A2; ENSG00000164175; TAA
TVVVVVITA

SEQ ID NO: 79431 - protein, 9 aa, Homo sapiens
  misc_feature: Table A; Target 79431; HLA-C*12:03; SLC45A2; ENSG00000164175; TAA
TVVVVVITA

SEQ ID NO: 79432 - protein, 9 aa, Homo sapiens
  misc_feature: Table A; Target 79432; HLA-A*03:02; SLC45A2; ENSG00000164175; TAA
VAALIANPR

SEQ ID NO: 79433 - protein, 9 aa, Homo sapiens
  misc_feature: Table A; Target 79433; HLA-A*11:01; SLC45A2; ENSG00000164175; TAA
VAALIANPR

SEQ ID NO: 79434 - protein, 9 aa, Homo sapiens
  misc_feature: Table A; Target 79434; HLA-A*31:01; SLC45A2; ENSG00000164175; TAA
VAALIANPR

SEQ ID NO: 79435 - protein, 9 aa, Homo sapiens
  misc_feature: Table A; Target 79435; HLA-A*33:01; SLC45A2; ENSG00000164175; TAA
VAALIANPR

SEQ ID NO: 79436 - protein, 9 aa, Homo sapiens
  misc_feature: Table A; Target 79436; HLA-A*33:03; SLC45A2; ENSG00000164175; TAA
VAALIANPR

SEQ ID NO: 79437 - protein, 9 aa, Homo sapiens
  misc_feature: Table A; Target 79437; HLA-A*68:01; SLC45A2; ENSG00000164175; TAA
VAALIANPR

SEQ ID NO: 79438 - protein, 9 aa, Homo sapiens
  misc_feature: Table A; Target 79438; HLA-B*27:02; SLC45A2; ENSG00000164175; TAA
VAALIANPR

SEQ ID NO: 79439 - protein, 9 aa, Homo sapiens
  misc_feature: Table A; Target 79439; HLA-B*27:05; SLC45A2; ENSG00000164175; TAA
VAALIANPR

SEQ ID NO: 79440 - protein, 9 aa, Homo sapiens
  misc_feature: Table A; Target 79440; HLA-C*02:02; SLC45A2; ENSG00000164175; TAA
VAALIANPR

SEQ ID NO: 79441 - protein, 9 aa, Homo sapiens
  misc_feature: Table A; Target 79441; HLA-C*07:06; SLC45A2; ENSG00000164175; TAA
VAALIANPR

SEQ ID NO: 79442 - protein, 9 aa, Homo sapiens
  misc_feature: Table A; Target 79442; HLA-C*12:03; SLC45A2; ENSG00000164175; TAA
VAKGIPPQQ

SEQ ID NO: 79443 - protein, 8 aa, Homo sapiens
  misc_feature: Table A; Target 79443; HLA-B*51:01; SLC45A2; ENSG00000164175; TAA
VALFVRYV

SEQ ID NO: 79444 - protein, 9 aa, Homo sapiens
  misc_feature: Table A; Target 79444; HLA-A*02:01; SLC45A2; ENSG00000164175; TAA
VEAAYVTPV

SEQ ID NO: 79445 - protein, 9 aa, Homo sapiens
  misc_feature: Table A; Target 79445; HLA-A*02:03; SLC45A2; ENSG00000164175; TAA
VEAAYVTPV

SEQ ID NO: 79446 - protein, 9 aa, Homo sapiens
  misc_feature: Table A; Target 79446; HLA-A*30:01; SLC45A2; ENSG00000164175; TAA
VEAAYVTPV

SEQ ID NO: 79447 - protein, 9 aa, Homo sapiens
  misc_feature: Table A; Target 79447; HLA-B*18:01; SLC45A2; ENSG00000164175; TAA
VEAAYVTPV

SEQ ID NO: 79448 - protein, 9 aa, Homo sapiens
  misc_feature: Table A; Target 79448; HLA-B*37:01; SLC45A2; ENSG00000164175; TAA
VEAAYVTPV

SEQ ID NO: 79449 - protein, 9 aa, Homo sapiens
  misc_feature: Table A; Target 79449; HLA-B*40:01; SLC45A2; ENSG00000164175; TAA
VEAAYVTPV

SEQ ID NO: 79450 - protein, 9 aa, Homo sapiens
  misc_feature: Table A; Target 79450; HLA-B*40:02; SLC45A2; ENSG00000164175; TAA
VEAAYVTPV

SEQ ID NO: 79451 - protein, 9 aa, Homo sapiens
  misc_feature: Table A; Target 79451; HLA-B*49:01; SLC45A2; ENSG00000164175; TAA
VEAAYVTPV

SEQ ID NO: 79452 - protein, 9 aa, Homo sapiens
  misc_feature: Table A; Target 79452; HLA-C*02:02; SLC45A2; ENSG00000164175; TAA
VEAAYVTPV

SEQ ID NO: 79453 - protein, 9 aa, Homo sapiens
  misc_feature: Table A; Target 79453; HLA-C*06:02; SLC45A2; ENSG00000164175; TAA
VEAAYVTPV

SEQ ID NO: 79454 - protein, 9 aa, Homo sapiens
  misc_feature: Table A; Target 79454; HLA-C*12:03; SLC45A2; ENSG00000164175; TAA
VEAAYVTPV

SEQ ID NO: 79455 - protein, 9 aa, Homo sapiens
  misc_feature: Table A; Target 79455; HLA-C*16:02; SLC45A2; ENSG00000164175; TAA
VEAAYVTPV

SEQ ID NO: 79456 - protein, 9 aa, Homo sapiens
  misc_feature: Table A; Target 79456; HLA-C*16:04; SLC45A2; ENSG00000164175; TAA
VEAAYVTPV

SEQ ID NO: 79457 - protein, 10 aa, Homo sapiens
  misc_feature: Table A; Target 79457; HLA-A*30:01; SLC45A2; ENSG00000164175; TAA
VEAAYVTPVL

SEQ ID NO: 79458 - protein, 10 aa, Homo sapiens
  misc_feature: Table A; Target 79458; HLA-B*18:01; SLC45A2; ENSG00000164175; TAA
VEAAYVTPVL

SEQ ID NO: 79459 - protein, 10 aa, Homo sapiens
  misc_feature: Table A; Target 79459; HLA-B*40:01; SLC45A2; ENSG00000164175; TAA
VEAAYVTPVL

SEQ ID NO: 79460 - protein, 10 aa, Homo sapiens
  misc_feature: Table A; Target 79460; HLA-B*40:02; SLC45A2; ENSG00000164175; TAA
VEAAYVTPVL

SEQ ID NO: 79461 - protein, 10 aa, Homo sapiens
  misc_feature: Table A; Target 79461; HLA-B*44:02; SLC45A2; ENSG00000164175; TAA
VEAAYVTPVL

SEQ ID NO: 79462 - protein, 10 aa, Homo sapiens
  misc_feature: Table A; Target 79462; HLA-B*44:03; SLC45A2; ENSG00000164175; TAA
VEAAYVTPVL

SEQ ID NO: 79463 - protein, 10 aa, Homo sapiens
  misc_feature: Table A; Target 79463; HLA-B*49:01; SLC45A2; ENSG00000164175; TAA
VEAAYVTPVL

SEQ ID NO: 79464 - protein, 11 aa, Homo sapiens
  misc_feature: Table A; Target 79464; HLA-A*30:01; SLC45A2; ENSG00000164175; TAA
VEAAYVTPVLL

SEQ ID NO: 79465 - protein, 11 aa, Homo sapiens
  misc_feature: Table A; Target 79465; HLA-B*40:01; SLC45A2; ENSG00000164175; TAA
VEAAYVTPVLL

SEQ ID NO: 79466 - protein, 8 aa, Homo sapiens
  misc_feature: Table A; Target 79466; HLA-A*23:01; SLC45A2; ENSG00000164175; TAA
VFSSLYSY

SEQ ID NO: 79467 - protein, 8 aa, Homo sapiens
  misc_feature: Table A; Target 79467; HLA-A*29:02; SLC45A2; ENSG00000164175; TAA
VFSSLYSY

SEQ ID NO: 79468 - protein, 8 aa, Homo sapiens
  misc_feature: Table A; Target 79468; HLA-A*30:02; SLC45A2; ENSG00000164175; TAA
VFSSLYSY

SEQ ID NO: 79469 - protein, 8 aa, Homo sapiens
  misc_feature: Table A; Target 79469; HLA-C*14:02; SLC45A2; ENSG00000164175; TAA
VFSSLYSY

SEQ ID NO: 79470 - protein, 9 aa, Homo sapiens
  misc_feature: Table A; Target 79470; HLA-A*23:01; SLC45A2; ENSG00000164175; TAA
VFSSLYSYF

SEQ ID NO: 79471 - protein, 9 aa, Homo sapiens
  misc_feature: Table A; Target 79471; HLA-A*24:02; SLC45A2; ENSG00000164175; TAA
VFSSLYSYF

SEQ ID NO: 79472 - protein, 9 aa, Homo sapiens
  misc_feature: Table A; Target 79472; HLA-A*29:02; SLC45A2; ENSG00000164175; TAA
VFSSLYSYF

SEQ ID NO: 79473 - protein, 9 aa, Homo sapiens
  misc_feature: Table A; Target 79473; HLA-B*13:02; SLC45A2; ENSG00000164175; TAA
VGGGLGFLV

SEQ ID NO: 79474 - protein, 9 aa, Homo sapiens
  misc_feature: Table A; Target 79474; HLA-C*06:02; SLC45A2; ENSG00000164175; TAA
VGGGLGFLV

SEQ ID NO: 79475 - protein, 9 aa, Homo sapiens
  misc_feature: Table A; Target 79475; HLA-C*12:03; SLC45A2; ENSG00000164175; TAA
VGGGLGFLV

SEQ ID NO: 79476 - protein, 11 aa, Homo sapiens
  misc_feature: Table A; Target 79476; HLA-C*04:01; SLC45A2; ENSG00000164175; TAA
VGGGLGFLVNT

SEQ ID NO: 79477 - protein, 8 aa, Homo sapiens
  misc_feature: Table A; Target 79477; HLA-A*30:02; SLC45A2; ENSG00000164175; TAA
VGLPSSLY

SEQ ID NO: 79478 - protein, 8 aa, Homo sapiens
  misc_feature: Table A; Target 79478; HLA-B*15:01; SLC45A2; ENSG00000164175; TAA
VGLPSSLY

SEQ ID NO: 79479 - protein, 8 aa, Homo sapiens
  misc_feature: Table A; Target 79479; HLA-B*15:03; SLC45A2; ENSG00000164175; TAA
VGLPSSLY

SEQ ID NO: 79480 - protein, 8 aa, Homo sapiens
  misc_feature: Table A; Target 79480; HLA-B*18:01; SLC45A2; ENSG00000164175; TAA
VGLPSSLY

SEQ ID NO: 79481 - protein, 8 aa, Homo sapiens
  misc_feature: Table A; Target 79481; HLA-B*39:01; SLC45A2; ENSG00000164175; TAA
VGLPSSLY

SEQ ID NO: 79482 - protein, 8 aa, Homo sapiens
  misc_feature: Table A; Target 79482; HLA-B*46:01; SLC45A2; ENSG00000164175; TAA
VGLPSSLY

SEQ ID NO: 79483 - protein, 8 aa, Homo sapiens
  misc_feature: Table A; Target 79483; HLA-C*04:01; SLC45A2; ENSG00000164175; TAA
VGLPSSLY

SEQ ID NO: 79484 - protein, 8 aa, Homo sapiens
  misc_feature: Table A; Target 79484; HLA-C*07:01; SLC45A2; ENSG00000164175; TAA
VGLPSSLY

SEQ ID NO: 79485 - protein, 8 aa, Homo sapiens
  misc_feature: Table A; Target 79485; HLA-C*14:02; SLC45A2; ENSG00000164175; TAA
VGLPSSLY

SEQ ID NO: 79486 - protein, 10 aa, Homo sapiens
  misc_feature: Table A; Target 79486; HLA-A*23:01; SLC45A2; ENSG00000164175; TAA
VGLPSSLYSI

SEQ ID NO: 79487 - protein, 10 aa, Homo sapiens
  misc_feature: Table A; Target 79487; HLA-A*24:02; SLC45A2; ENSG00000164175; TAA
VGLPSSLYSI

SEQ ID NO: 79488 - protein, 9 aa, Homo sapiens
  misc_feature: Table A; Target 79488; HLA-B*35:03; SLC45A2; ENSG00000164175; TAA
VITASAVAL

SEQ ID NO: 79489 - protein, 9 aa, Homo sapiens
  misc_feature: Table A; Target 79489; HLA-B*40:01; SLC45A2; ENSG00000164175; TAA
VITASAVAL

SEQ ID NO: 79490 - protein, 9 aa, Homo sapiens
  misc_feature: Table A; Target 79490; HLA-C*01:02; SLC45A2; ENSG00000164175; TAA
VITASAVAL

SEQ ID NO: 79491 - protein, 9 aa, Homo sapiens
  misc_feature: Table A; Target 79491; HLA-C*03:03; SLC45A2; ENSG00000164175; TAA
VITASAVAL

SEQ ID NO: 79492 - protein, 9 aa, Homo sapiens
  misc_feature: Table A; Target 79492; HLA-C*03:04; SLC45A2; ENSG00000164175; TAA
VITASAVAL

SEQ ID NO: 79493 - protein, 9 aa, Homo sapiens
  misc_feature: Table A; Target 79493; HLA-C*07:04; SLC45A2; ENSG00000164175; TAA
VITASAVAL

SEQ ID NO: 79494 - protein, 9 aa, Homo sapiens
  misc_feature: Table A; Target 79494; HLA-C*14:02; SLC45A2; ENSG00000164175; TAA
VITASAVAL

SEQ ID NO: 79495 - protein, 9 aa, Homo sapiens
  misc_feature: Table A; Target 79495; HLA-C*16:01; SLC45A2; ENSG00000164175; TAA
VITASAVAL

SEQ ID NO: 79496 - protein, 9 aa, Homo sapiens
  misc_feature: Table A; Target 79496; HLA-A*29:02; SLC45A2; ENSG00000164175; TAA
VLFDFAADF

SEQ ID NO: 79497 - protein, 10 aa, Homo sapiens
  misc_feature: Table A; Target 79497; HLA-A*02:03; SLC45A2; ENSG00000164175; TAA
VLFDFAADFI

SEQ ID NO: 79498 - protein, 9 aa, Homo sapiens
  misc_feature: Table A; Target 79498; HLA-A*03:01; SLC45A2; ENSG00000164175; TAA
VLVSYIGLK

SEQ ID NO: 79499 - protein, 9 aa, Homo sapiens
  misc_feature: Table A; Target 79499; HLA-A*03:02; SLC45A2; ENSG00000164175; TAA
VLVSYIGLK

SEQ ID NO: 79500 - protein, 9 aa, Homo sapiens
  misc_feature: Table A; Target 79500; HLA-A*11:01; SLC45A2; ENSG00000164175; TAA
VLVSYIGLK

SEQ ID NO: 79501 - protein, 9 aa, Homo sapiens
  misc_feature: Table A; Target 79501; HLA-B*27:02; SLC45A2; ENSG00000164175; TAA
VLVSYIGLK

SEQ ID NO: 79502 - protein, 9 aa, Homo sapiens
  misc_feature: Table A; Target 79502; HLA-A*02:01; SLC45A2; ENSG00000164175; TAA
VMMLVGMAL

SEQ ID NO: 79503 - protein, 9 aa, Homo sapiens
  misc_feature: Table A; Target 79503; HLA-A*23:01; SLC45A2; ENSG00000164175; TAA
VMMLVGMAL

SEQ ID NO: 79504 - protein, 9 aa, Homo sapiens
  misc_feature: Table A; Target 79504; HLA-A*24:02; SLC45A2; ENSG00000164175; TAA
VMMLVGMAL

SEQ ID NO: 79505 - protein, 9 aa, Homo sapiens
  misc_feature: Table A; Target 79505; HLA-B*07:02; SLC45A2; ENSG00000164175; TAA
VMMLVGMAL

SEQ ID NO: 79506 - protein, 9 aa, Homo sapiens
  misc_feature: Table A; Target 79506; HLA-B*08:01; SLC45A2; ENSG00000164175; TAA
VMMLVGMAL

SEQ ID NO: 79507 - protein, 9 aa, Homo sapiens
  misc_feature: Table A; Target 79507; HLA-B*15:01; SLC45A2; ENSG00000164175; TAA
VMMLVGMAL

SEQ ID NO: 79508 - protein, 9 aa, Homo sapiens
  misc_feature: Table A; Target 79508; HLA-B*15:03; SLC45A2; ENSG00000164175; TAA
VMMLVGMAL

SEQ ID NO: 79509 - protein, 9 aa, Homo sapiens
  misc_feature: Table A; Target 79509; HLA-B*46:01; SLC45A2; ENSG00000164175; TAA
VMMLVGMAL

SEQ ID NO: 79510 - protein, 9 aa, Homo sapiens
  misc_feature: Table A; Target 79510; HLA-C*01:02; SLC45A2; ENSG00000164175; TAA
VMMLVGMAL

SEQ ID NO: 79511 - protein, 9 aa, Homo sapiens
  misc_feature: Table A; Target 79511; HLA-C*03:03; SLC45A2; ENSG00000164175; TAA
VMMLVGMAL

SEQ ID NO: 79512 - protein, 9 aa, Homo sapiens
  misc_feature: Table A; Target 79512; HLA-C*03:04; SLC45A2; ENSG00000164175; TAA
VMMLVGMAL

SEQ ID NO: 79513 - protein, 9 aa, Homo sapiens
  misc_feature: Table A; Target 79513; HLA-C*07:02; SLC45A2; ENSG00000164175; TAA
VMMLVGMAL

SEQ ID NO: 79514 - protein, 9 aa, Homo sapiens
  misc_feature: Table A; Target 79514; HLA-C*14:02; SLC45A2; ENSG00000164175; TAA
VMMLVGMAL

SEQ ID NO: 79515 - protein, 10 aa, Homo sapiens
  misc_feature: Table A; Target 79515; HLA-A*29:02; SLC45A2; ENSG00000164175; TAA
VMMLVGMALY

SEQ ID NO: 79516 - protein, 10 aa, Homo sapiens
  misc_feature: Table A; Target 79516; HLA-A*30:02; SLC45A2; ENSG00000164175; TAA
VMMLVGMALY

SEQ ID NO: 79517 - protein, 10 aa, Homo sapiens
  misc_feature: Table A; Target 79517; HLA-B*15:01; SLC45A2; ENSG00000164175; TAA
VMMLVGMALY

SEQ ID NO: 79518 - protein, 10 aa, Homo sapiens
  misc_feature: Table A; Target 79518; HLA-C*04:01; SLC45A2; ENSG00000164175; TAA
VMMLVGMALY

SEQ ID NO: 79519 - protein, 9 aa, Homo sapiens
  misc_feature: Table A; Target 79519; HLA-A*02:01; SLC45A2; ENSG00000164175; TAA
VMSSTLYTV

SEQ ID NO: 79520 - protein, 9 aa, Homo sapiens
  misc_feature: Table A; Target 79520; HLA-A*02:03; SLC45A2; ENSG00000164175; TAA
VMSSTLYTV

SEQ ID NO: 79521 - protein, 9 aa, Homo sapiens
  misc_feature: Table A; Target 79521; HLA-A*02:04; SLC45A2; ENSG00000164175; TAA
VMSSTLYTV

SEQ ID NO: 79522 - protein, 9 aa, Homo sapiens
  misc_feature: Table A; Target 79522; HLA-A*02:07; SLC45A2; ENSG00000164175; TAA
VMSSTLYTV

SEQ ID NO: 79523 - protein, 9 aa, Homo sapiens
  misc_feature: Table A; Target 79523; HLA-A*32:01; SLC45A2; ENSG00000164175; TAA
VMSSTLYTV

SEQ ID NO: 79524 - protein, 9 aa, Homo sapiens
  misc_feature: Table A; Target 79524; HLA-B*13:02; SLC45A2; ENSG00000164175; TAA
VMSSTLYTV

SEQ ID NO: 79525 - protein, 9 aa, Homo sapiens
  misc_feature: Table A; Target 79525; HLA-B*55:01; SLC45A2; ENSG00000164175; TAA
VMSSTLYTV

SEQ ID NO: 79526 - protein, 9 aa, Homo sapiens
  misc_feature: Table A; Target 79526; HLA-C*16:02; SLC45A2; ENSG00000164175; TAA
VMSSTLYTV

SEQ ID NO: 79527 - protein, 8 aa, Homo sapiens
  misc_feature: Table A; Target 79527; HLA-A*31:01; SLC45A2; ENSG00000164175; TAA
VNMPPHYR

SEQ ID NO: 79528 - protein, 8 aa, Homo sapiens
  misc_feature: Table A; Target 79528; HLA-A*33:01; SLC45A2; ENSG00000164175; TAA
VNMPPHYR

SEQ ID NO: 79529 - protein, 8 aa, Homo sapiens
  misc_feature: Table A; Target 79529; HLA-A*33:03; SLC45A2; ENSG00000164175; TAA
VNMPPHYR

SEQ ID NO: 79530 - protein, 9 aa, Homo sapiens
  misc_feature: Table A; Target 79530; HLA-A*29:02; SLC45A2; ENSG00000164175; TAA
VNMPPHYRY

SEQ ID NO: 79531 - protein, 9 aa, Homo sapiens
  misc_feature: Table A; Target 79531; HLA-A*30:02; SLC45A2; ENSG00000164175; TAA
VNMPPHYRY

SEQ ID NO: 79532 - protein, 9 aa, Homo sapiens
  misc_feature: Table A; Target 79532; HLA-A*33:01; SLC45A2; ENSG00000164175; TAA
VNMPPHYRY

SEQ ID NO: 79533 - protein, 11 aa, Homo sapiens
  misc_feature: Table A; Target 79533; HLA-B*27:02; SLC45A2; ENSG00000164175; TAA
VNPELAMQGAK

SEQ ID NO: 79534 - protein, 9 aa, Homo sapiens
  misc_feature: Table A; Target 79534; HLA-A*01:01; SLC45A2; ENSG00000164175; TAA
VPFNLITEY

SEQ ID NO: 79535 - protein, 9 aa, Homo sapiens
  misc_feature: Table A; Target 79535; HLA-A*23:01; SLC45A2; ENSG00000164175; TAA
VPFNLITEY

SEQ ID NO: 79536 - protein, 9 aa, Homo sapiens
  misc_feature: Table A; Target 79536; HLA-A*25:01; SLC45A2; ENSG00000164175; TAA
VPFNLITEY

SEQ ID NO: 79537 - protein, 9 aa, Homo sapiens
  misc_feature: Table A; Target 79537; HLA-A*26:01; SLC45A2; ENSG00000164175; TAA
VPFNLITEY

SEQ ID NO: 79538 - protein, 9 aa, Homo sapiens
  misc_feature: Table A; Target 79538; HLA-A*29:02; SLC45A2; ENSG00000164175; TAA
VPFNLITEY

SEQ ID NO: 79539 - protein, 9 aa, Homo sapiens
  misc_feature: Table A; Target 79539; HLA-A*30:02; SLC45A2; ENSG00000164175; TAA
VPFNLITEY

SEQ ID NO: 79540 - protein, 9 aa, Homo sapiens
  misc_feature: Table A; Target 79540; HLA-A*33:03; SLC45A2; ENSG00000164175; TAA
VPFNLITEY

SEQ ID NO: 79541 - protein, 9 aa, Homo sapiens
  misc_feature: Table A; Target 79541; HLA-A*68:01; SLC45A2; ENSG00000164175; TAA
VPFNLITEY

SEQ ID NO: 79542 - protein, 9 aa, Homo sapiens
  misc_feature: Table A; Target 79542; HLA-B*07:02; SLC45A2; ENSG00000164175; TAA
VPFNLITEY

SEQ ID NO: 79543 - protein, 9 aa, Homo sapiens
  misc_feature: Table A; Target 79543; HLA-B*15:01; SLC45A2; ENSG00000164175; TAA
VPFNLITEY

SEQ ID NO: 79544 - protein, 9 aa, Homo sapiens
  misc_feature: Table A; Target 79544; HLA-B*15:03; SLC45A2; ENSG00000164175; TAA
VPFNLITEY

SEQ ID NO: 79545 - protein, 9 aa, Homo sapiens
  misc_feature: Table A; Target 79545; HLA-B*18:01; SLC45A2; ENSG00000164175; TAA
VPFNLITEY

SEQ ID NO: 79546 - protein, 9 aa, Homo sapiens
  misc_feature: Table A; Target 79546; HLA-B*27:02; SLC45A2; ENSG00000164175; TAA
VPFNLITEY

SEQ ID NO: 79547 - protein, 9 aa, Homo sapiens
  misc_feature: Table A; Target 79547; HLA-B*35:01; SLC45A2; ENSG00000164175; TAA
VPFNLITEY

SEQ ID NO: 79548 - protein, 9 aa, Homo sapiens
  misc_feature: Table A; Target 79548; HLA-B*35:03; SLC45A2; ENSG00000164175; TAA
VPFNLITEY

SEQ ID NO: 79549 - protein, 9 aa, Homo sapiens
  misc_feature: Table A; Target 79549; HLA-B*39:01; SLC45A2; ENSG00000164175; TAA
VPFNLITEY

SEQ ID NO: 79550 - protein, 9 aa, Homo sapiens
  misc_feature: Table A; Target 79550; HLA-B*44:02; SLC45A2; ENSG00000164175; TAA
VPFNLITEY

SEQ ID NO: 79551 - protein, 9 aa, Homo sapiens
  misc_feature: Table A; Target 79551; HLA-B*44:03; SLC45A2; ENSG00000164175; TAA
VPFNLITEY

SEQ ID NO: 79552 - protein, 9 aa, Homo sapiens
  misc_feature: Table A; Target 79552; HLA-B*46:01; SLC45A2; ENSG00000164175; TAA
VPFNLITEY

SEQ ID NO: 79553 - protein, 9 aa, Homo sapiens
  misc_feature: Table A; Target 79553; HLA-B*51:01; SLC45A2; ENSG00000164175; TAA
VPFNLITEY

SEQ ID NO: 79554 - protein, 9 aa, Homo sapiens
  misc_feature: Table A; Target 79554; HLA-B*54:01; SLC45A2; ENSG00000164175; TAA
VPFNLITEY

SEQ ID NO: 79555 - protein, 9 aa, Homo sapiens
  misc_feature: Table A; Target 79555; HLA-B*55:01; SLC45A2; ENSG00000164175; TAA
VPFNLITEY

SEQ ID NO: 79556 - protein, 9 aa, Homo sapiens
  misc_feature: Table A; Target 79556; HLA-B*56:01; SLC45A2; ENSG00000164175; TAA
VPFNLITEY

SEQ ID NO: 79557 - protein, 9 aa, Homo sapiens
  misc_feature: Table A; Target 79557; HLA-C*02:02; SLC45A2; ENSG00000164175; TAA
VPFNLITEY

SEQ ID NO: 79558 - protein, 9 aa, Homo sapiens
  misc_feature: Table A; Target 79558; HLA-C*04:01; SLC45A2; ENSG00000164175; TAA
VPFNLITEY

SEQ ID NO: 79559 - protein, 9 aa, Homo sapiens
  misc_feature: Table A; Target 79559; HLA-C*07:02; SLC45A2; ENSG00000164175; TAA
VPFNLITEY

SEQ ID NO: 79560 - protein, 9 aa, Homo sapiens
  misc_feature: Table A; Target 79560; HLA-C*07:04; SLC45A2; ENSG00000164175; TAA
VPFNLITEY

SEQ ID NO: 79561 - protein, 9 aa, Homo sapiens
  misc_feature: Table A; Target 79561; HLA-C*07:06; SLC45A2; ENSG00000164175; TAA
VPFNLITEY

SEQ ID NO: 79562 - protein, 9 aa, Homo sapiens
  misc_feature: Table A; Target 79562; HLA-C*12:03; SLC45A2; ENSG00000164175; TAA
VPFNLITEY

SEQ ID NO: 79563 - protein, 9 aa, Homo sapiens
  misc_feature: Table A; Target 79563; HLA-C*16:04; SLC45A2; ENSG00000164175; TAA
VPFNLITEY

SEQ ID NO: 79564 - protein, 8 aa, Homo sapiens
  misc_feature: Table A; Target 79564; HLA-B*13:02; SLC45A2; ENSG00000164175; TAA
VQLAQILV

SEQ ID NO: 79565 - protein, 10 aa, Homo sapiens
  misc_feature: Table A; Target 79565; HLA-A*01:01; SLC45A2; ENSG00000164175; TAA
VSYIGLKGLY

SEQ ID NO: 79566 - protein, 10 aa, Homo sapiens
  misc_feature: Table A; Target 79566; HLA-A*29:02; SLC45A2; ENSG00000164175; TAA
VSYIGLKGLY

SEQ ID NO: 79567 - protein, 10 aa, Homo sapiens
  misc_feature: Table A; Target 79567; HLA-A*30:02; SLC45A2; ENSG00000164175; TAA
VSYIGLKGLY

SEQ ID NO: 79568 - protein, 11 aa, Homo sapiens
  misc_feature: Table A; Target 79568; HLA-B*57:01; SLC45A2; ENSG00000164175; TAA
VSYIGLKGLYF

SEQ ID NO: 79569 - protein, 8 aa, Homo sapiens
  misc_feature: Table A; Target 79569; HLA-B*08:01; SLC45A2; ENSG00000164175; TAA
VTMIGVVL

SEQ ID NO: 79570 - protein, 8 aa, Homo sapiens
  misc_feature: Table A; Target 79570; HLA-C*03:03; SLC45A2; ENSG00000164175; TAA
VTMIGVVL

SEQ ID NO: 79571 - protein, 8 aa, Homo sapiens
  misc_feature: Table A; Target 79571; HLA-C*03:04; SLC45A2; ENSG00000164175; TAA
VTMIGVVL

SEQ ID NO: 79572 - protein, 9 aa, Homo sapiens
  misc_feature: Table A; Target 79572; HLA-A*23:01; SLC45A2; ENSG00000164175; TAA
VTMIGVVLF

SEQ ID NO: 79573 - protein, 9 aa, Homo sapiens
  misc_feature: Table A; Target 79573; HLA-A*24:02; SLC45A2; ENSG00000164175; TAA
VTMIGVVLF

SEQ ID NO: 79574 - protein, 9 aa, Homo sapiens
  misc_feature: Table A; Target 79574; HLA-A*32:01; SLC45A2; ENSG00000164175; TAA
VTMIGVVLF

SEQ ID NO: 79575 - protein, 9 aa, Homo sapiens
  misc_feature: Table A; Target 79575; HLA-B*57:01; SLC45A2; ENSG00000164175; TAA
VTMIGVVLF

SEQ ID NO: 79576 - protein, 8 aa, Homo sapiens
  misc_feature: Table A; Target 79576; HLA-B*51:01; SLC45A2; ENSG00000164175; TAA
VTPVLLSV

SEQ ID NO: 79577 - protein, 10 aa, Homo sapiens
  misc_feature: Table A; Target 79577; HLA-A*03:01; SLC45A2; ENSG00000164175; TAA
VVAALIANPR

SEQ ID NO: 79578 - protein, 10 aa, Homo sapiens
  misc_feature: Table A; Target 79578; HLA-A*03:02; SLC45A2; ENSG00000164175; TAA
VVAALIANPR

SEQ ID NO: 79579 - protein, 10 aa, Homo sapiens
  misc_feature: Table A; Target 79579; HLA-A*11:01; SLC45A2; ENSG00000164175; TAA
VVAALIANPR

SEQ ID NO: 79580 - protein, 10 aa, Homo sapiens
  misc_feature: Table A; Target 79580; HLA-A*31:01; SLC45A2; ENSG00000164175; TAA
VVAALIANPR

SEQ ID NO: 79581 - protein, 10 aa, Homo sapiens
  misc_feature: Table A; Target 79581; HLA-A*33:03; SLC45A2; ENSG00000164175; TAA
VVAALIANPR

SEQ ID NO: 79582 - protein, 10 aa, Homo sapiens
  misc_feature: Table A; Target 79582; HLA-A*68:01; SLC45A2; ENSG00000164175; TAA
VVAALIANPR

SEQ ID NO: 79583 - protein, 10 aa, Homo sapiens
  misc_feature: Table A; Target 79583; HLA-B*27:02; SLC45A2; ENSG00000164175; TAA
VVAALIANPR

SEQ ID NO: 79584 - protein, 10 aa, Homo sapiens
  misc_feature: Table A; Target 79584; HLA-C*07:06; SLC45A2; ENSG00000164175; TAA
VVAALIANPR

SEQ ID NO: 79585 - protein, 8 aa, Homo sapiens
  misc_feature: Table A; Target 79585; HLA-B*40:02; SLC45A2; ENSG00000164175; TAA
VVITASAV

SEQ ID NO: 79586 - protein, 8 aa, Homo sapiens
  misc_feature: Table A; Target 79586; HLA-B*46:01; SLC45A2; ENSG00000164175; TAA
VVITASAV

SEQ ID NO: 79587 - protein, 8 aa, Homo sapiens
  misc_feature: Table A; Target 79587; HLA-B*51:01; SLC45A2; ENSG00000164175; TAA
VVITASAV

SEQ ID NO: 79588 - protein, 8 aa, Homo sapiens
  misc_feature: Table A; Target 79588; HLA-C*01:02; SLC45A2; ENSG00000164175; TAA
VVITASAV

SEQ ID NO: 79589 - protein, 8 aa, Homo sapiens
  misc_feature: Table A; Target 79589; HLA-C*03:03; SLC45A2; ENSG00000164175; TAA
VVITASAV

SEQ ID NO: 79590 - protein, 8 aa, Homo sapiens
  misc_feature: Table A; Target 79590; HLA-C*03:04; SLC45A2; ENSG00000164175; TAA
VVITASAV

SEQ ID NO: 79591 - protein, 8 aa, Homo sapiens
  misc_feature: Table A; Target 79591; HLA-C*04:01; SLC45A2; ENSG00000164175; TAA
VVITASAV

SEQ ID NO: 79592 - protein, 8 aa, Homo sapiens
  misc_feature: Table A; Target 79592; HLA-C*05:01; SLC45A2; ENSG00000164175; TAA
VVITASAV

SEQ ID NO: 79593 - protein, 8 aa, Homo sapiens
  misc_feature: Table A; Target 79593; HLA-C*06:02; SLC45A2; ENSG00000164175; TAA
VVITASAV

SEQ ID NO: 79594 - protein, 8 aa, Homo sapiens
  misc_feature: Table A; Target 79594; HLA-C*14:02; SLC45A2; ENSG00000164175; TAA
VVITASAV

SEQ ID NO: 79595 - protein, 9 aa, Homo sapiens
  misc_feature: Table A; Target 79595; HLA-B*46:01; SLC45A2; ENSG00000164175; TAA
VVITASAVA

SEQ ID NO: 79596 - protein, 10 aa, Homo sapiens
  misc_feature: Table A; Target 79596; HLA-A*23:01; SLC45A2; ENSG00000164175; TAA
VVITASAVAL

SEQ ID NO: 79597 - protein, 10 aa, Homo sapiens
  misc_feature: Table A; Target 79597; HLA-B*46:01; SLC45A2; ENSG00000164175; TAA
VVITASAVAL

SEQ ID NO: 79598 - protein, 10 aa, Homo sapiens
  misc_feature: Table A; Target 79598; HLA-C*01:02; SLC45A2; ENSG00000164175; TAA
VVITASAVAL

SEQ ID NO: 79599 - protein, 10 aa, Homo sapiens
  misc_feature: Table A; Target 79599; HLA-C*03:03; SLC45A2; ENSG00000164175; TAA
VVITASAVAL

SEQ ID NO: 79600 - protein, 10 aa, Homo sapiens
  misc_feature: Table A; Target 79600; HLA-C*03:04; SLC45A2; ENSG00000164175; TAA
VVITASAVAL

SEQ ID NO: 79601 - protein, 10 aa, Homo sapiens
  misc_feature: Table A; Target 79601; HLA-C*14:02; SLC45A2; ENSG00000164175; TAA
VVITASAVAL

SEQ ID NO: 79602 - protein, 11 aa, Homo sapiens
  misc_feature: Table A; Target 79602; HLA-A*23:01; SLC45A2; ENSG00000164175; TAA
VVITASAVALI

SEQ ID NO: 79603 - protein, 9 aa, Homo sapiens
  misc_feature: Table A; Target 79603; HLA-A*02:03; SLC45A2; ENSG00000164175; TAA
VVVITASAV

SEQ ID NO: 79604 - protein, 9 aa, Homo sapiens
  misc_feature: Table A; Target 79604; HLA-B*13:02; SLC45A2; ENSG00000164175; TAA
VVVITASAV

SEQ ID NO: 79605 - protein, 9 aa, Homo sapiens
  misc_feature: Table A; Target 79605; HLA-B*46:01; SLC45A2; ENSG00000164175; TAA
VVVITASAV

SEQ ID NO: 79606 - protein, 9 aa, Homo sapiens
  misc_feature: Table A; Target 79606; HLA-C*01:02; SLC45A2; ENSG00000164175; TAA
VVVITASAV

SEQ ID NO: 79607 - protein, 9 aa, Homo sapiens
  misc_feature: Table A; Target 79607; HLA-C*03:03; SLC45A2; ENSG00000164175; TAA
VVVITASAV

SEQ ID NO: 79608 - protein, 9 aa, Homo sapiens
  misc_feature: Table A; Target 79608; HLA-C*14:02; SLC45A2; ENSG00000164175; TAA
VVVITASAV

SEQ ID NO: 79609 - protein, 9 aa, Homo sapiens
  misc_feature: Table A; Target 79609; HLA-B*46:01; SLC45A2; ENSG00000164175; TAA
VVVVITASA

SEQ ID NO: 79610 - protein, 9 aa, Homo sapiens
  misc_feature: Table A; Target 79610; HLA-B*54:01; SLC45A2; ENSG00000164175; TAA
VVVVITASA

SEQ ID NO: 79611 - protein, 9 aa, Homo sapiens
  misc_feature: Table A; Target 79611; HLA-B*56:01; SLC45A2; ENSG00000164175; TAA
VVVVITASA

SEQ ID NO: 79612 - protein, 8 aa, Homo sapiens
  misc_feature: Table A; Target 79612; HLA-B*54:01; SLC45A2; ENSG00000164175; TAA
VVVVVITA

SEQ ID NO: 79613 - protein, 8 aa, Homo sapiens
  misc_feature: Table A; Target 79613; HLA-B*56:01; SLC45A2; ENSG00000164175; TAA
VVVVVITA

SEQ ID NO: 79614 - protein, 9 aa, Homo sapiens
  misc_feature: Table A; Target 79614; HLA-B*46:01; SLC45A2; ENSG00000164175; TAA
VVVVVITAS

SEQ ID NO: 79615 - protein, 10 aa, Homo sapiens
  misc_feature: Table A; Target 79615; HLA-B*56:01; SLC45A2; ENSG00000164175; TAA
VVVVVITASA

SEQ ID NO: 79616 - protein, 9 aa, Homo sapiens
  misc_feature: Table A; Target 79616; HLA-A*24:02; SLC45A2; ENSG00000164175; TAA
VWAISVTMI

SEQ ID NO: 79617 - protein, 10 aa, Homo sapiens
  misc_feature: Table A; Target 79617; HLA-A*24:02; SLC45A2; ENSG00000164175; TAA
VWFLSPILGF

SEQ ID NO: 79618 - protein, 9 aa, Homo sapiens
  misc_feature: Table A; Target 79618; HLA-A*23:01; SLC45A2; ENSG00000164175; TAA
VYRGDPYSA

SEQ ID NO: 79619 - protein, 9 aa, Homo sapiens
  misc_feature: Table A; Target 79619; HLA-A*24:02; SLC45A2; ENSG00000164175; TAA
VYRGDPYSA

SEQ ID NO: 79620 - protein, 9 aa, Homo sapiens
  misc_feature: Table A; Target 79620; HLA-C*14:02; SLC45A2; ENSG00000164175; TAA
VYRGDPYSA

SEQ ID NO: 79621 - protein, 10 aa, Homo sapiens
  misc_feature: Table A; Target 79621; HLA-A*24:02; SLC45A2; ENSG00000164175; TAA
VYSTLVLCSL

SEQ ID NO: 79622 - protein, 11 aa, Homo sapiens
  misc_feature: Table A; Target 79622; HLA-A*24:02; SLC45A2; ENSG00000164175; TAA
VYSTLVLCSLF

SEQ ID NO: 79623 - protein, 8 aa, Homo sapiens
  misc_feature: Table A; Target 79623; HLA-B*51:01; SLC45A2; ENSG00000164175; TAA
WAISVTMI

SEQ ID NO: 79624 - protein, 9 aa, Homo sapiens
  misc_feature: Table A; Target 79624; HLA-A*29:02; SLC45A2; ENSG00000164175; TAA
WFLSPILGF

SEQ ID NO: 79625 - protein, 8 aa, Homo sapiens
  misc_feature: Table A; Target 79625; HLA-A*68:02; SLC45A2; ENSG00000164175; TAA
YAVEAAYV

SEQ ID NO: 79626 - protein, 8 aa, Homo sapiens
  misc_feature: Table A; Target 79626; HLA-B*13:02; SLC45A2; ENSG00000164175; TAA
YAVEAAYV

SEQ ID NO: 79627 - protein, 8 aa, Homo sapiens
  misc_feature: Table A; Target 79627; HLA-B*40:02; SLC45A2; ENSG00000164175; TAA
YAVEAAYV

SEQ ID NO: 79628 - protein, 8 aa, Homo sapiens
  misc_feature: Table A; Target 79628; HLA-B*46:01; SLC45A2; ENSG00000164175; TAA
YAVEAAYV

SEQ ID NO: 79629 - protein, 8 aa, Homo sapiens
  misc_feature: Table A; Target 79629; HLA-B*49:01; SLC45A2; ENSG00000164175; TAA
YAVEAAYV

SEQ ID NO: 79630 - protein, 8 aa, Homo sapiens
  misc_feature: Table A; Target 79630; HLA-B*51:01; SLC45A2; ENSG00000164175; TAA
YAVEAAYV

SEQ ID NO: 79631 - protein, 8 aa, Homo sapiens
  misc_feature: Table A; Target 79631; HLA-B*54:01; SLC45A2; ENSG00000164175; TAA
YAVEAAYV

SEQ ID NO: 79632 - protein, 8 aa, Homo sapiens
  misc_feature: Table A; Target 79632; HLA-B*56:01; SLC45A2; ENSG00000164175; TAA
YAVEAAYV

SEQ ID NO: 79633 - protein, 8 aa, Homo sapiens
  misc_feature: Table A; Target 79633; HLA-C*02:02; SLC45A2; ENSG00000164175; TAA
YAVEAAYV

SEQ ID NO: 79634 - protein, 8 aa, Homo sapiens
  misc_feature: Table A; Target 79634; HLA-C*03:03; SLC45A2; ENSG00000164175; TAA
YAVEAAYV

SEQ ID NO: 79635 - protein, 8 aa, Homo sapiens
  misc_feature: Table A; Target 79635; HLA-C*03:04; SLC45A2; ENSG00000164175; TAA
YAVEAAYV

SEQ ID NO: 79636 - protein, 8 aa, Homo sapiens
  misc_feature: Table A; Target 79636; HLA-C*04:01; SLC45A2; ENSG00000164175; TAA
YAVEAAYV

SEQ ID NO: 79637 - protein, 8 aa, Homo sapiens
  misc_feature: Table A; Target 79637; HLA-C*05:01; SLC45A2; ENSG00000164175; TAA
YAVEAAYV

SEQ ID NO: 79638 - protein, 8 aa, Homo sapiens
  misc_feature: Table A; Target 79638; HLA-C*12:03; SLC45A2; ENSG00000164175; TAA
YAVEAAYV

SEQ ID NO: 79639 - protein, 8 aa, Homo sapiens
  misc_feature: Table A; Target 79639; HLA-C*16:02; SLC45A2; ENSG00000164175; TAA
YAVEAAYV

SEQ ID NO: 79640 - protein, 8 aa, Homo sapiens
  misc_feature: Table A; Target 79640; HLA-C*16:04; SLC45A2; ENSG00000164175; TAA
YAVEAAYV

SEQ ID NO: 79641 - protein, 9 aa, Homo sapiens
  misc_feature: Table A; Target 79641; HLA-B*35:03; SLC45A2; ENSG00000164175; TAA
YAVEAAYVT

SEQ ID NO: 79642 - protein, 9 aa, Homo sapiens
  misc_feature: Table A; Target 79642; HLA-C*03:03; SLC45A2; ENSG00000164175; TAA
YAVEAAYVT

SEQ ID NO: 79643 - protein, 9 aa, Homo sapiens
  misc_feature: Table A; Target 79643; HLA-C*03:04; SLC45A2; ENSG00000164175; TAA
YAVEAAYVT

SEQ ID NO: 79644 - protein, 9 aa, Homo sapiens
  misc_feature: Table A; Target 79644; HLA-A*30:01; SLC45A2; ENSG00000164175; TAA
YERGVEVGC

SEQ ID NO: 79645 - protein, 9 aa, Homo sapiens
  misc_feature: Table A; Target 79645; HLA-B*18:01; SLC45A2; ENSG00000164175; TAA
YERGVEVGC

SEQ ID NO: 79646 - protein, 9 aa, Homo sapiens
  misc_feature: Table A; Target 79646; HLA-B*40:02; SLC45A2; ENSG00000164175; TAA
YERGVEVGC

SEQ ID NO: 79647 - protein, 9 aa, Homo sapiens
  misc_feature: Table A; Target 79647; HLA-B*49:01; SLC45A2; ENSG00000164175; TAA
YERGVEVGC

SEQ ID NO: 79648 - protein, 10 aa, Homo sapiens
  misc_feature: Table A; Target 79648; HLA-B*44:02; SLC45A2; ENSG00000164175; TAA
YERGVEVGCW

SEQ ID NO: 79649 - protein, 8 aa, Homo sapiens
  misc_feature: Table A; Target 79649; HLA-B*18:01; SLC45A2; ENSG00000164175; TAA
YEYGSIEK

SEQ ID NO: 79650 - protein, 8 aa, Homo sapiens
  misc_feature: Table A; Target 79650; HLA-B*27:02; SLC45A2; ENSG00000164175; TAA
YEYGSIEK

SEQ ID NO: 79651 - protein, 8 aa, Homo sapiens
  misc_feature: Table A; Target 79651; HLA-B*37:01; SLC45A2; ENSG00000164175; TAA
YEYGSIEK

SEQ ID NO: 79652 - protein, 8 aa, Homo sapiens
  misc_feature: Table A; Target 79652; HLA-B*40:02; SLC45A2; ENSG00000164175; TAA
YEYGSIEK

SEQ ID NO: 79653 - protein, 8 aa, Homo sapiens
  misc_feature: Table A; Target 79653; HLA-B*49:01; SLC45A2; ENSG00000164175; TAA
YEYGSIEK

SEQ ID NO: 79654 - protein, 8 aa, Homo sapiens
  misc_feature: Table A; Target 79654; HLA-C*02:02; SLC45A2; ENSG00000164175; TAA
YEYGSIEK

SEQ ID NO: 79655 - protein, 8 aa, Homo sapiens
  misc_feature: Table A; Target 79655; HLA-C*07:01; SLC45A2; ENSG00000164175; TAA
YEYGSIEK

SEQ ID NO: 79656 - protein, 9 aa, Homo sapiens
  misc_feature: Table A; Target 79656; HLA-A*02:01; SLC45A2; ENSG00000164175; TAA
YEYGSIEKV

SEQ ID NO: 79657 - protein, 9 aa, Homo sapiens
  misc_feature: Table A; Target 79657; HLA-A*02:03; SLC45A2; ENSG00000164175; TAA
YEYGSIEKV

SEQ ID NO: 79658 - protein, 9 aa, Homo sapiens
  misc_feature: Table A; Target 79658; HLA-A*02:04; SLC45A2; ENSG00000164175; TAA
YEYGSIEKV

SEQ ID NO: 79659 - protein, 9 aa, Homo sapiens
  misc_feature: Table A; Target 79659; HLA-A*02:07; SLC45A2; ENSG00000164175; TAA
YEYGSIEKV

SEQ ID NO: 79660 - protein, 9 aa, Homo sapiens
  misc_feature: Table A; Target 79660; HLA-A*30:01; SLC45A2; ENSG00000164175; TAA
YEYGSIEKV

SEQ ID NO: 79661 - protein, 9 aa, Homo sapiens
  misc_feature: Table A; Target 79661; HLA-A*68:02; SLC45A2; ENSG00000164175; TAA
YEYGSIEKV

SEQ ID NO: 79662 - protein, 9 aa, Homo sapiens
  misc_feature: Table A; Target 79662; HLA-B*13:02; SLC45A2; ENSG00000164175; TAA
YEYGSIEKV

SEQ ID NO: 79663 - protein, 9 aa, Homo sapiens
  misc_feature: Table A; Target 79663; HLA-B*15:03; SLC45A2; ENSG00000164175; TAA
YEYGSIEKV

SEQ ID NO: 79664 - protein, 9 aa, Homo sapiens
  misc_feature: Table A; Target 79664; HLA-B*18:01; SLC45A2; ENSG00000164175; TAA
YEYGSIEKV

SEQ ID NO: 79665 - protein, 9 aa, Homo sapiens
  misc_feature: Table A; Target 79665; HLA-B*37:01; SLC45A2; ENSG00000164175; TAA
YEYGSIEKV

SEQ ID NO: 79666 - protein, 9 aa, Homo sapiens
  misc_feature: Table A; Target 79666; HLA-B*38:01; SLC45A2; ENSG00000164175; TAA
YEYGSIEKV

SEQ ID NO: 79667 - protein, 9 aa, Homo sapiens
  misc_feature: Table A; Target 79667; HLA-B*39:01; SLC45A2; ENSG00000164175; TAA
YEYGSIEKV

SEQ ID NO: 79668 - protein, 9 aa, Homo sapiens
  misc_feature: Table A; Target 79668; HLA-B*40:01; SLC45A2; ENSG00000164175; TAA
YEYGSIEKV

SEQ ID NO: 79669 - protein, 9 aa, Homo sapiens
  misc_feature: Table A; Target 79669; HLA-B*40:02; SLC45A2; ENSG00000164175; TAA
YEYGSIEKV

SEQ ID NO: 79670 - protein, 9 aa, Homo sapiens
  misc_feature: Table A; Target 79670; HLA-B*44:02; SLC45A2; ENSG00000164175; TAA
YEYGSIEKV

SEQ ID NO: 79671 - protein, 9 aa, Homo sapiens
  misc_feature: Table A; Target 79671; HLA-B*44:03; SLC45A2; ENSG00000164175; TAA
YEYGSIEKV

SEQ ID NO: 79672 - protein, 9 aa, Homo sapiens
  misc_feature: Table A; Target 79672; HLA-B*49:01; SLC45A2; ENSG00000164175; TAA
YEYGSIEKV

SEQ ID NO: 79673 - protein, 9 aa, Homo sapiens
  misc_feature: Table A; Target 79673; HLA-B*51:01; SLC45A2; ENSG00000164175; TAA
YEYGSIEKV

SEQ ID NO: 79674 - protein, 9 aa, Homo sapiens
  misc_feature: Table A; Target 79674; HLA-B*55:01; SLC45A2; ENSG00000164175; TAA
YEYGSIEKV

SEQ ID NO: 79675 - protein, 9 aa, Homo sapiens
  misc_feature: Table A; Target 79675; HLA-C*02:02; SLC45A2; ENSG00000164175; TAA
YEYGSIEKV

SEQ ID NO: 79676 - protein, 9 aa, Homo sapiens
  misc_feature: Table A; Target 79676; HLA-C*03:03; SLC45A2; ENSG00000164175; TAA
YEYGSIEKV

SEQ ID NO: 79677 - protein, 9 aa, Homo sapiens
  misc_feature: Table A; Target 79677; HLA-C*03:04; SLC45A2; ENSG00000164175; TAA
YEYGSIEKV

SEQ ID NO: 79678 - protein, 9 aa, Homo sapiens
  misc_feature: Table A; Target 79678; HLA-C*06:02; SLC45A2; ENSG00000164175; TAA
YEYGSIEKV

SEQ ID NO: 79679 - protein, 9 aa, Homo sapiens
  misc_feature: Table A; Target 79679; HLA-C*07:04; SLC45A2; ENSG00000164175; TAA
YEYGSIEKV

SEQ ID NO: 79680 - protein, 9 aa, Homo sapiens
  misc_feature: Table A; Target 79680; HLA-C*12:03; SLC45A2; ENSG00000164175; TAA
YEYGSIEKV

SEQ ID NO: 79681 - protein, 9 aa, Homo sapiens
  misc_feature: Table A; Target 79681; HLA-C*16:02; SLC45A2; ENSG00000164175; TAA
YEYGSIEKV

SEQ ID NO: 79682 - protein, 9 aa, Homo sapiens
  misc_feature: Table A; Target 79682; HLA-C*16:04; SLC45A2; ENSG00000164175; TAA
YEYGSIEKV

SEQ ID NO: 79683 - protein, 10 aa, Homo sapiens
  misc_feature: Table A; Target 79683; HLA-B*27:02; SLC45A2; ENSG00000164175; TAA
YEYGSIEKVK

SEQ ID NO: 79684 - protein, 10 aa, Homo sapiens
  misc_feature: Table A; Target 79684; HLA-B*40:02; SLC45A2; ENSG00000164175; TAA
YEYGSIEKVK

SEQ ID NO: 79685 - protein, 10 aa, Homo sapiens
  misc_feature: Table A; Target 79685; HLA-B*44:02; SLC45A2; ENSG00000164175; TAA
YEYGSIEKVK

SEQ ID NO: 79686 - protein, 10 aa, Homo sapiens
  misc_feature: Table A; Target 79686; HLA-B*44:03; SLC45A2; ENSG00000164175; TAA
YEYGSIEKVK

SEQ ID NO: 79687 - protein, 10 aa, Homo sapiens
  misc_feature: Table A; Target 79687; HLA-B*49:01; SLC45A2; ENSG00000164175; TAA
YEYGSIEKVK

SEQ ID NO: 79688 - protein, 10 aa, Homo sapiens
  misc_feature: Table A; Target 79688; HLA-C*02:02; SLC45A2; ENSG00000164175; TAA
YEYGSIEKVK

SEQ ID NO: 79689 - protein, 10 aa, Homo sapiens
  misc_feature: Table A; Target 79689; HLA-C*06:02; SLC45A2; ENSG00000164175; TAA
YEYGSIEKVK

SEQ ID NO: 79690 - protein, 10 aa, Homo sapiens
  misc_feature: Table A; Target 79690; HLA-C*16:04; SLC45A2; ENSG00000164175; TAA
YEYGSIEKVK

SEQ ID NO: 79691 - protein, 9 aa, Homo sapiens
  misc_feature: Table A; Target 79691; HLA-A*23:01; SLC45A2; ENSG00000164175; TAA
YFQKVLVSY

SEQ ID NO: 79692 - protein, 9 aa, Homo sapiens
  misc_feature: Table A; Target 79692; HLA-A*24:02; SLC45A2; ENSG00000164175; TAA
YFQKVLVSY

SEQ ID NO: 79693 - protein, 9 aa, Homo sapiens
  misc_feature: Table A; Target 79693; HLA-A*29:02; SLC45A2; ENSG00000164175; TAA
YFQKVLVSY

SEQ ID NO: 79694 - protein, 9 aa, Homo sapiens
  misc_feature: Table A; Target 79694; HLA-A*30:02; SLC45A2; ENSG00000164175; TAA
YFQKVLVSY

SEQ ID NO: 79695 - protein, 9 aa, Homo sapiens
  misc_feature: Table A; Target 79695; HLA-A*32:01; SLC45A2; ENSG00000164175; TAA
YFQKVLVSY

SEQ ID NO: 79696 - protein, 9 aa, Homo sapiens
  misc_feature: Table A; Target 79696; HLA-B*15:01; SLC45A2; ENSG00000164175; TAA
YFQKVLVSY

SEQ ID NO: 79697 - protein, 9 aa, Homo sapiens
  misc_feature: Table A; Target 79697; HLA-B*15:03; SLC45A2; ENSG00000164175; TAA
YFQKVLVSY

SEQ ID NO: 79698 - protein, 9 aa, Homo sapiens
  misc_feature: Table A; Target 79698; HLA-B*18:01; SLC45A2; ENSG00000164175; TAA
YFQKVLVSY

SEQ ID NO: 79699 - protein, 9 aa, Homo sapiens
  misc_feature: Table A; Target 79699; HLA-B*35:01; SLC45A2; ENSG00000164175; TAA
YFQKVLVSY

SEQ ID NO: 79700 - protein, 9 aa, Homo sapiens
  misc_feature: Table A; Target 79700; HLA-B*46:01; SLC45A2; ENSG00000164175; TAA
YFQKVLVSY

SEQ ID NO: 79701 - protein, 9 aa, Homo sapiens
  misc_feature: Table A; Target 79701; HLA-C*02:02; SLC45A2; ENSG00000164175; TAA
YFQKVLVSY

SEQ ID NO: 79702 - protein, 9 aa, Homo sapiens
  misc_feature: Table A; Target 79702; HLA-C*04:01; SLC45A2; ENSG00000164175; TAA
YFQKVLVSY

SEQ ID NO: 79703 - protein, 9 aa, Homo sapiens
  misc_feature: Table A; Target 79703; HLA-C*07:01; SLC45A2; ENSG00000164175; TAA
YFQKVLVSY

SEQ ID NO: 79704 - protein, 9 aa, Homo sapiens
  misc_feature: Table A; Target 79704; HLA-C*07:04; SLC45A2; ENSG00000164175; TAA
YFQKVLVSY

SEQ ID NO: 79705 - protein, 9 aa, Homo sapiens
  misc_feature: Table A; Target 79705; HLA-C*12:03; SLC45A2; ENSG00000164175; TAA
YFQKVLVSY

SEQ ID NO: 79706 - protein, 9 aa, Homo sapiens
  misc_feature: Table A; Target 79706; HLA-C*14:02; SLC45A2; ENSG00000164175; TAA
YFQKVLVSY

SEQ ID NO: 79707 - protein, 9 aa, Homo sapiens
  misc_feature: Table A; Target 79707; HLA-C*16:01; SLC45A2; ENSG00000164175; TAA
YFQKVLVSY

SEQ ID NO: 79708 - protein, 9 aa, Homo sapiens
  misc_feature: Table A; Target 79708; HLA-C*16:02; SLC45A2; ENSG00000164175; TAA
YFQKVLVSY

SEQ ID NO: 79709 - protein, 9 aa, Homo sapiens
  misc_feature: Table A; Target 79709; HLA-C*16:04; SLC45A2; ENSG00000164175; TAA
YFQKVLVSY

SEQ ID NO: 79710 - protein, 8 aa, Homo sapiens
  misc_feature: Table A; Target 79710; HLA-A*24:02; SLC45A2; ENSG00000164175; TAA
YFTGYLLF

SEQ ID NO: 79711 - protein, 11 aa, Homo sapiens
  misc_feature: Table A; Target 79711; HLA-A*30:02; SLC45A2; ENSG00000164175; TAA
YGSIEKVKNGY

SEQ ID NO: 79712 - protein, 8 aa, Homo sapiens
  misc_feature: Table A; Target 79712; HLA-B*38:01; SLC45A2; ENSG00000164175; TAA
YHALFTGF

SEQ ID NO: 79713 - protein, 8 aa, Homo sapiens
  misc_feature: Table A; Target 79713; HLA-A*01:01; SLC45A2; ENSG00000164175; TAA
YIGLKGLY

SEQ ID NO: 79714 - protein, 8 aa, Homo sapiens
  misc_feature: Table A; Target 79714; HLA-A*29:02; SLC45A2; ENSG00000164175; TAA
YIGLKGLY

SEQ ID NO: 79715 - protein, 8 aa, Homo sapiens
  misc_feature: Table A; Target 79715; HLA-C*07:01; SLC45A2; ENSG00000164175; TAA
YIGLKGLY

SEQ ID NO: 79716 - protein, 9 aa, Homo sapiens
  misc_feature: Table A; Target 79716; HLA-A*01:01; SLC45A2; ENSG00000164175; TAA
YIGLKGLYF

SEQ ID NO: 79717 - protein, 9 aa, Homo sapiens
  misc_feature: Table A; Target 79717; HLA-A*24:02; SLC45A2; ENSG00000164175; TAA
YIGLKGLYF

SEQ ID NO: 79718 - protein, 9 aa, Homo sapiens
  misc_feature: Table A; Target 79718; HLA-A*29:02; SLC45A2; ENSG00000164175; TAA
YIGLKGLYF

SEQ ID NO: 79719 - protein, 10 aa, Homo sapiens
  misc_feature: Table A; Target 79719; HLA-A*02:01; SLC45A2; ENSG00000164175; TAA
YILTLGVMML

SEQ ID NO: 79720 - protein, 10 aa, Homo sapiens
  misc_feature: Table A; Target 79720; HLA-A*02:04; SLC45A2; ENSG00000164175; TAA
YILTLGVMML

SEQ ID NO: 79721 - protein, 11 aa, Homo sapiens
  misc_feature: Table A; Target 79721; HLA-A*02:01; SLC45A2; ENSG00000164175; TAA
YILTLGVMMLV

SEQ ID NO: 79722 - protein, 10 aa, Homo sapiens
  misc_feature: Table A; Target 79722; HLA-A*23:01; SLC45A2; ENSG00000164175; TAA
YLLFGLGTGF

SEQ ID NO: 79723 - protein, 10 aa, Homo sapiens
  misc_feature: Table A; Target 79723; HLA-A*29:02; SLC45A2; ENSG00000164175; TAA
YLLFGLGTGF

SEQ ID NO: 79724 - protein, 9 aa, Homo sapiens
  misc_feature: Table A; Target 79724; HLA-A*02:01; SLC45A2; ENSG00000164175; TAA
YLLGAIDWA

SEQ ID NO: 79725 - protein, 9 aa, Homo sapiens
  misc_feature: Table A; Target 79725; HLA-A*02:04; SLC45A2; ENSG00000164175; TAA
YLLGAIDWA

SEQ ID NO: 79726 - protein, 11 aa, Homo sapiens
  misc_feature: Table A; Target 79726; HLA-A*02:01; SLC45A2; ENSG00000164175; TAA
YLLGAIDWAHL

SEQ ID NO: 79727 - protein, 11 aa, Homo sapiens
  misc_feature: Table A; Target 79727; HLA-A*02:04; SLC45A2; ENSG00000164175; TAA
YLLGAIDWAHL

SEQ ID NO: 79728 - protein, 8 aa, Homo sapiens
  misc_feature: Table A; Target 79728; HLA-A*02:01; SLC45A2; ENSG00000164175; TAA
YLNGATVV

SEQ ID NO: 79729 - protein, 8 aa, Homo sapiens
  misc_feature: Table A; Target 79729; HLA-A*02:03; SLC45A2; ENSG00000164175; TAA
YLNGATVV

SEQ ID NO: 79730 - protein, 8 aa, Homo sapiens
  misc_feature: Table A; Target 79730; HLA-B*08:01; SLC45A2; ENSG00000164175; TAA
YLNGATVV

SEQ ID NO: 79731 - protein, 8 aa, Homo sapiens
  misc_feature: Table A; Target 79731; HLA-B*13:02; SLC45A2; ENSG00000164175; TAA
YLNGATVV

SEQ ID NO: 79732 - protein, 8 aa, Homo sapiens
  misc_feature: Table A; Target 79732; HLA-B*39:01; SLC45A2; ENSG00000164175; TAA
YLNGATVV

SEQ ID NO: 79733 - protein, 8 aa, Homo sapiens
  misc_feature: Table A; Target 79733; HLA-B*46:01; SLC45A2; ENSG00000164175; TAA
YLNGATVV

SEQ ID NO: 79734 - protein, 8 aa, Homo sapiens
  misc_feature: Table A; Target 79734; HLA-B*49:01; SLC45A2; ENSG00000164175; TAA
YLNGATVV

SEQ ID NO: 79735 - protein, 8 aa, Homo sapiens
  misc_feature: Table A; Target 79735; HLA-B*55:01; SLC45A2; ENSG00000164175; TAA
YLNGATVV

SEQ ID NO: 79736 - protein, 8 aa, Homo sapiens
  misc_feature: Table A; Target 79736; HLA-C*02:02; SLC45A2; ENSG00000164175; TAA
YLNGATVV

SEQ ID NO: 79737 - protein, 8 aa, Homo sapiens
  misc_feature: Table A; Target 79737; HLA-C*05:01; SLC45A2; ENSG00000164175; TAA
YLNGATVV

SEQ ID NO: 79738 - protein, 8 aa, Homo sapiens
  misc_feature: Table A; Target 79738; HLA-C*12:03; SLC45A2; ENSG00000164175; TAA
YLNGATVV

SEQ ID NO: 79739 - protein, 8 aa, Homo sapiens
  misc_feature: Table A; Target 79739; HLA-C*14:02; SLC45A2; ENSG00000164175; TAA
YLNGATVV

SEQ ID NO: 79740 - protein, 8 aa, Homo sapiens
  misc_feature: Table A; Target 79740; HLA-C*16:02; SLC45A2; ENSG00000164175; TAA
YLNGATVV

SEQ ID NO: 79741 - protein, 9 aa, Homo sapiens
  misc_feature: Table A; Target 79741; HLA-A*02:01; SLC45A2; ENSG00000164175; TAA
YLNGATVVA

SEQ ID NO: 79742 - protein, 9 aa, Homo sapiens
  misc_feature: Table A; Target 79742; HLA-A*02:03; SLC45A2; ENSG00000164175; TAA
YLNGATVVA

SEQ ID NO: 79743 - protein, 9 aa, Homo sapiens
  misc_feature: Table A; Target 79743; HLA-A*02:04; SLC45A2; ENSG00000164175; TAA
YLNGATVVA

SEQ ID NO: 79744 - protein, 9 aa, Homo sapiens
  misc_feature: Table A; Target 79744; HLA-A*02:07; SLC45A2; ENSG00000164175; TAA
YLNGATVVA

SEQ ID NO: 79745 - protein, 9 aa, Homo sapiens
  misc_feature: Table A; Target 79745; HLA-A*32:01; SLC45A2; ENSG00000164175; TAA
YLNGATVVA

SEQ ID NO: 79746 - protein, 9 aa, Homo sapiens
  misc_feature: Table A; Target 79746; HLA-B*13:02; SLC45A2; ENSG00000164175; TAA
YLNGATVVA

SEQ ID NO: 79747 - protein, 9 aa, Homo sapiens
  misc_feature: Table A; Target 79747; HLA-B*15:01; SLC45A2; ENSG00000164175; TAA
YLNGATVVA

SEQ ID NO: 79748 - protein, 9 aa, Homo sapiens
  misc_feature: Table A; Target 79748; HLA-B*39:01; SLC45A2; ENSG00000164175; TAA
YLNGATVVA

SEQ ID NO: 79749 - protein, 9 aa, Homo sapiens
  misc_feature: Table A; Target 79749; HLA-B*46:01; SLC45A2; ENSG00000164175; TAA
YLNGATVVA

SEQ ID NO: 79750 - protein, 9 aa, Homo sapiens
  misc_feature: Table A; Target 79750; HLA-B*54:01; SLC45A2; ENSG00000164175; TAA
YLNGATVVA

SEQ ID NO: 79751 - protein, 9 aa, Homo sapiens
  misc_feature: Table A; Target 79751; HLA-B*55:01; SLC45A2; ENSG00000164175; TAA
YLNGATVVA

SEQ ID NO: 79752 - protein, 9 aa, Homo sapiens
  misc_feature: Table A; Target 79752; HLA-B*56:01; SLC45A2; ENSG00000164175; TAA
YLNGATVVA

SEQ ID NO: 79753 - protein, 9 aa, Homo sapiens
  misc_feature: Table A; Target 79753; HLA-C*02:02; SLC45A2; ENSG00000164175; TAA
YLNGATVVA

SEQ ID NO: 79754 - protein, 9 aa, Homo sapiens
  misc_feature: Table A; Target 79754; HLA-C*07:04; SLC45A2; ENSG00000164175; TAA
YLNGATVVA

SEQ ID NO: 79755 - protein, 9 aa, Homo sapiens
  misc_feature: Table A; Target 79755; HLA-C*12:03; SLC45A2; ENSG00000164175; TAA
YLNGATVVA

SEQ ID NO: 79756 - protein, 9 aa, Homo sapiens
  misc_feature: Table A; Target 79756; HLA-C*14:02; SLC45A2; ENSG00000164175; TAA
YLNGATVVA

SEQ ID NO: 79757 - protein, 10 aa, Homo sapiens
  misc_feature: Table A; Target 79757; HLA-A*02:01; SLC45A2; ENSG00000164175; TAA
YLNGATVVAA

SEQ ID NO: 79758 - protein, 10 aa, Homo sapiens
  misc_feature: Table A; Target 79758; HLA-A*02:03; SLC45A2; ENSG00000164175; TAA
YLNGATVVAA

SEQ ID NO: 79759 - protein, 10 aa, Homo sapiens
  misc_feature: Table A; Target 79759; HLA-A*02:04; SLC45A2; ENSG00000164175; TAA
YLNGATVVAA

SEQ ID NO: 79760 - protein, 10 aa, Homo sapiens
  misc_feature: Table A; Target 79760; HLA-A*02:07; SLC45A2; ENSG00000164175; TAA
YLNGATVVAA

SEQ ID NO: 79761 - protein, 10 aa, Homo sapiens
  misc_feature: Table A; Target 79761; HLA-B*46:01; SLC45A2; ENSG00000164175; TAA
YLNGATVVAA

SEQ ID NO: 79762 - protein, 10 aa, Homo sapiens
  misc_feature: Table A; Target 79762; HLA-B*54:01; SLC45A2; ENSG00000164175; TAA
YLNGATVVAA

SEQ ID NO: 79763 - protein, 10 aa, Homo sapiens
  misc_feature: Table A; Target 79763; HLA-B*55:01; SLC45A2; ENSG00000164175; TAA
YLNGATVVAA

SEQ ID NO: 79764 - protein, 10 aa, Homo sapiens
  misc_feature: Table A; Target 79764; HLA-B*56:01; SLC45A2; ENSG00000164175; TAA
YLNGATVVAA

SEQ ID NO: 79765 - protein, 10 aa, Homo sapiens
  misc_feature: Table A; Target 79765; HLA-C*01:02; SLC45A2; ENSG00000164175; TAA
YLNGATVVAA

SEQ ID NO: 79766 - protein, 10 aa, Homo sapiens
  misc_feature: Table A; Target 79766; HLA-C*02:02; SLC45A2; ENSG00000164175; TAA
YLNGATVVAA

SEQ ID NO: 79767 - protein, 10 aa, Homo sapiens
  misc_feature: Table A; Target 79767; HLA-C*07:04; SLC45A2; ENSG00000164175; TAA
YLNGATVVAA

SEQ ID NO: 79768 - protein, 10 aa, Homo sapiens
  misc_feature: Table A; Target 79768; HLA-C*14:02; SLC45A2; ENSG00000164175; TAA
YLNGATVVAA

SEQ ID NO: 79769 - protein, 11 aa, Homo sapiens
  misc_feature: Table A; Target 79769; HLA-A*02:01; SLC45A2; ENSG00000164175; TAA
YLNGATVVAAL

SEQ ID NO: 79770 - protein, 11 aa, Homo sapiens
  misc_feature: Table A; Target 79770; HLA-A*02:04; SLC45A2; ENSG00000164175; TAA
YLNGATVVAAL

SEQ ID NO: 79771 - protein, 11 aa, Homo sapiens
  misc_feature: Table A; Target 79771; HLA-A*23:01; SLC45A2; ENSG00000164175; TAA
YLNGATVVAAL

SEQ ID NO: 79772 - protein, 9 aa, Homo sapiens
  misc_feature: Table A; Target 79772; HLA-B*27:05; SLC45A2; ENSG00000164175; TAA
YRGDPYSAH

SEQ ID NO: 79773 - protein, 9 aa, Homo sapiens
  misc_feature: Table A; Target 79773; HLA-A*01:01; SLC45A2; ENSG00000164175; TAA
YSAHNSTEF

SEQ ID NO: 79774 - protein, 9 aa, Homo sapiens
  misc_feature: Table A; Target 79774; HLA-A*32:01; SLC45A2; ENSG00000164175; TAA
YSAHNSTEF

SEQ ID NO: 79775 - protein, 9 aa, Homo sapiens
  misc_feature: Table A; Target 79775; HLA-B*15:01; SLC45A2; ENSG00000164175; TAA
YSAHNSTEF

SEQ ID NO: 79776 - protein, 9 aa, Homo sapiens
  misc_feature: Table A; Target 79776; HLA-B*15:03; SLC45A2; ENSG00000164175; TAA
YSAHNSTEF

SEQ ID NO: 79777 - protein, 9 aa, Homo sapiens
  misc_feature: Table A; Target 79777; HLA-B*46:01; SLC45A2; ENSG00000164175; TAA
YSAHNSTEF

SEQ ID NO: 79778 - protein, 9 aa, Homo sapiens
  misc_feature: Table A; Target 79778; HLA-B*58:01; SLC45A2; ENSG00000164175; TAA
YSAHNSTEF

SEQ ID NO: 79779 - protein, 9 aa, Homo sapiens
  misc_feature: Table A; Target 79779; HLA-C*02:02; SLC45A2; ENSG00000164175; TAA
YSAHNSTEF

SEQ ID NO: 79780 - protein, 9 aa, Homo sapiens
  misc_feature: Table A; Target 79780; HLA-C*03:03; SLC45A2; ENSG00000164175; TAA
YSAHNSTEF

SEQ ID NO: 79781 - protein, 9 aa, Homo sapiens
  misc_feature: Table A; Target 79781; HLA-C*03:04; SLC45A2; ENSG00000164175; TAA
YSAHNSTEF

SEQ ID NO: 79782 - protein, 9 aa, Homo sapiens
  misc_feature: Table A; Target 79782; HLA-C*07:04; SLC45A2; ENSG00000164175; TAA
YSAHNSTEF

SEQ ID NO: 79783 - protein, 9 aa, Homo sapiens
  misc_feature: Table A; Target 79783; HLA-C*16:01; SLC45A2; ENSG00000164175; TAA
YSAHNSTEF

SEQ ID NO: 79784 - protein, 9 aa, Homo sapiens
  misc_feature: Table A; Target 79784; HLA-C*03:03; SLC45A2; ENSG00000164175; TAA
YSTLVLCSL

SEQ ID NO: 79785 - protein, 9 aa, Homo sapiens
  misc_feature: Table A; Target 79785; HLA-C*03:04; SLC45A2; ENSG00000164175; TAA
YSTLVLCSL

SEQ ID NO: 79786 - protein, 8 aa, Homo sapiens
  misc_feature: Table A; Target 79786; HLA-B*08:01; SLC45A2; ENSG00000164175; TAA
YSYFQKVL

SEQ ID NO: 79787 - protein, 8 aa, Homo sapiens
  misc_feature: Table A; Target 79787; HLA-C*03:03; SLC45A2; ENSG00000164175; TAA
YSYFQKVL

SEQ ID NO: 79788 - protein, 8 aa, Homo sapiens
  misc_feature: Table A; Target 79788; HLA-C*03:04; SLC45A2; ENSG00000164175; TAA
YSYFQKVL

SEQ ID NO: 79789 - protein, 8 aa, Homo sapiens
  misc_feature: Table A; Target 79789; HLA-C*12:03; SLC45A2; ENSG00000164175; TAA
YSYFQKVL

SEQ ID NO: 79790 - protein, 9 aa, Homo sapiens
  misc_feature: Table A; Target 79790; HLA-A*02:04; SLC45A2; ENSG00000164175; TAA
YSYFQKVLV

SEQ ID NO: 79791 - protein, 9 aa, Homo sapiens
  misc_feature: Table A; Target 79791; HLA-A*68:02; SLC45A2; ENSG00000164175; TAA
YSYFQKVLV

SEQ ID NO: 79792 - protein, 9 aa, Homo sapiens
  misc_feature: Table A; Target 79792; HLA-B*13:02; SLC45A2; ENSG00000164175; TAA
YSYFQKVLV

SEQ ID NO: 79793 - protein, 9 aa, Homo sapiens
  misc_feature: Table A; Target 79793; HLA-B*51:01; SLC45A2; ENSG00000164175; TAA
YSYFQKVLV

SEQ ID NO: 79794 - protein, 9 aa, Homo sapiens
  misc_feature: Table A; Target 79794; HLA-B*54:01; SLC45A2; ENSG00000164175; TAA
YSYFQKVLV

SEQ ID NO: 79795 - protein, 9 aa, Homo sapiens
  misc_feature: Table A; Target 79795; HLA-C*02:02; SLC45A2; ENSG00000164175; TAA
YSYFQKVLV

SEQ ID NO: 79796 - protein, 9 aa, Homo sapiens
  misc_feature: Table A; Target 79796; HLA-C*12:03; SLC45A2; ENSG00000164175; TAA
YSYFQKVLV

SEQ ID NO: 79797 - protein, 11 aa, Homo sapiens
  misc_feature: Table A; Target 79797; HLA-A*01:01; SLC45A2; ENSG00000164175; TAA
YSYFQKVLVSY

SEQ ID NO: 79798 - protein, 11 aa, Homo sapiens
  misc_feature: Table A; Target 79798; HLA-A*29:02; SLC45A2; ENSG00000164175; TAA
YSYFQKVLVSY

SEQ ID NO: 79799 - protein, 8 aa, Homo sapiens
  misc_feature: Table A; Target 79799; HLA-A*24:02; SLC45A2; ENSG00000164175; TAA
YTVPFNLI

SEQ ID NO: 79800 - protein, 11 aa, Homo sapiens
  misc_feature: Table A; Target 79800; HLA-A*01:01; SLC45A2; ENSG00000164175; TAA
YTVPFNLITEY

SEQ ID NO: 79801 - protein, 11 aa, Homo sapiens
  misc_feature: Table A; Target 79801; HLA-A*25:01; SLC45A2; ENSG00000164175; TAA
YTVPFNLITEY

SEQ ID NO: 79802 - protein, 11 aa, Homo sapiens
  misc_feature: Table A; Target 79802; HLA-A*26:01; SLC45A2; ENSG00000164175; TAA
YTVPFNLITEY

SEQ ID NO: 79803 - protein, 11 aa, Homo sapiens
  misc_feature: Table A; Target 79803; HLA-A*29:02; SLC45A2; ENSG00000164175; TAA
YTVPFNLITEY

SEQ ID NO: 79804 - protein, 11 aa, Homo sapiens
  misc_feature: Table A; Target 79804; HLA-A*30:02; SLC45A2; ENSG00000164175; TAA
YTVPFNLITEY

SEQ ID NO: 79805 - protein, 11 aa, Homo sapiens
  misc_feature: Table A; Target 79805; HLA-A*68:02; SLC45A2; ENSG00000164175; TAA
YTVPFNLITEY

SEQ ID NO: 79806 - protein, 11 aa, Homo sapiens
  misc_feature: Table A; Target 79806; HLA-B*15:01; SLC45A2; ENSG00000164175; TAA
YTVPFNLITEY

SEQ ID NO: 79807 - protein, 11 aa, Homo sapiens
  misc_feature: Table A; Target 79807; HLA-B*46:01; SLC45A2; ENSG00000164175; TAA
YTVPFNLITEY

SEQ ID NO: 79808 - protein, 11 aa, Homo sapiens
  misc_feature: Table A; Target 79808; HLA-B*57:01; SLC45A2; ENSG00000164175; TAA
YTVPFNLITEY

SEQ ID NO: 79809 - protein, 11 aa, Homo sapiens
  misc_feature: Table A; Target 79809; HLA-B*58:01; SLC45A2; ENSG00000164175; TAA
YTVPFNLITEY

SEQ ID NO: 79810 - protein, 11 aa, Homo sapiens
  misc_feature: Table A; Target 79810; HLA-C*02:02; SLC45A2; ENSG00000164175; TAA
YTVPFNLITEY

SEQ ID NO: 79811 - protein, 11 aa, Homo sapiens
  misc_feature: Table A; Target 79811; HLA-C*07:04; SLC45A2; ENSG00000164175; TAA
YTVPFNLITEY

SEQ ID NO: 79812 - protein, 11 aa, Homo sapiens
  misc_feature: Table A; Target 79812; HLA-C*12:03; SLC45A2; ENSG00000164175; TAA
YTVPFNLITEY

SEQ ID NO: 79813 - protein, 8 aa, Homo sapiens
  misc_feature: Table A; Target 79813; HLA-B*35:03; SLC45A2; ENSG00000164175; TAA
YVNPELAM

SEQ ID NO: 79814 - protein, 8 aa, Homo sapiens
  misc_feature: Table A; Target 79814; HLA-B*39:01; SLC45A2; ENSG00000164175; TAA
YVNPELAM

SEQ ID NO: 79815 - protein, 8 aa, Homo sapiens
  misc_feature: Table A; Target 79815; HLA-C*02:02; SLC45A2; ENSG00000164175; TAA
YVNPELAM

SEQ ID NO: 79816 - protein, 8 aa, Homo sapiens
  misc_feature: Table A; Target 79816; HLA-C*03:03; SLC45A2; ENSG00000164175; TAA
YVNPELAM

SEQ ID NO: 79817 - protein, 8 aa, Homo sapiens
  misc_feature: Table A; Target 79817; HLA-C*03:04; SLC45A2; ENSG00000164175; TAA
YVNPELAM

SEQ ID NO: 79818 - protein, 8 aa, Homo sapiens
  misc_feature: Table A; Target 79818; HLA-C*05:01; SLC45A2; ENSG00000164175; TAA
YVNPELAM

SEQ ID NO: 79819 - protein, 8 aa, Homo sapiens
  misc_feature: Table A; Target 79819; HLA-C*16:01; SLC45A2; ENSG00000164175; TAA
YVNPELAM

SEQ ID NO: 79820 - protein, 9 aa, Homo sapiens
  misc_feature: Table A; Target 79820; HLA-A*26:01; SLC45A2; ENSG00000164175; TAA
YVNPELAMQ

SEQ ID NO: 79821 - protein, 10 aa, Homo sapiens
  misc_feature: Table A; Target 79821; HLA-A*31:01; SLC45A2; ENSG00000164175; TAA
YVNPELAMQG

SEQ ID NO: 79822 - protein, 11 aa, Homo sapiens
  misc_feature: Table A; Target 79822; HLA-A*26:01; SLC45A2; ENSG00000164175; TAA
YVNPELAMQGA

SEQ ID NO: 79823 - protein, 11 aa, Homo sapiens
  misc_feature: Table A; Target 79823; HLA-B*54:01; SLC45A2; ENSG00000164175; TAA
YVNPELAMQGA

SEQ ID NO: 79824 - protein, 11 aa, Homo sapiens
  misc_feature: Table A; Target 79824; HLA-B*56:01; SLC45A2; ENSG00000164175; TAA
YVNPELAMQGA

SEQ ID NO: 79825 - protein, 9 aa, Homo sapiens
  misc_feature: Table A; Target 79825; HLA-A*01:01; SLC45A2; ENSG00000164175; TAA
YVTPVLLSV

SEQ ID NO: 79826 - protein, 9 aa, Homo sapiens
  misc_feature: Table A; Target 79826; HLA-A*02:01; SLC45A2; ENSG00000164175; TAA
YVTPVLLSV

SEQ ID NO: 79827 - protein, 9 aa, Homo sapiens
  misc_feature: Table A; Target 79827; HLA-A*02:03; SLC45A2; ENSG00000164175; TAA
YVTPVLLSV

SEQ ID NO: 79828 - protein, 9 aa, Homo sapiens
  misc_feature: Table A; Target 79828; HLA-A*02:04; SLC45A2; ENSG00000164175; TAA
YVTPVLLSV

SEQ ID NO: 79829 - protein, 9 aa, Homo sapiens
  misc_feature: Table A; Target 79829; HLA-A*02:07; SLC45A2; ENSG00000164175; TAA
YVTPVLLSV

SEQ ID NO: 79830 - protein, 9 aa, Homo sapiens
  misc_feature: Table A; Target 79830; HLA-A*25:01; SLC45A2; ENSG00000164175; TAA
YVTPVLLSV

SEQ ID NO: 79831 - protein, 9 aa, Homo sapiens
  misc_feature: Table A; Target 79831; HLA-A*26:01; SLC45A2; ENSG00000164175; TAA
YVTPVLLSV

SEQ ID NO: 79832 - protein, 9 aa, Homo sapiens
  misc_feature: Table A; Target 79832; HLA-A*29:02; SLC45A2; ENSG00000164175; TAA
YVTPVLLSV

SEQ ID NO: 79833 - protein, 9 aa, Homo sapiens
  misc_feature: Table A; Target 79833; HLA-A*30:01; SLC45A2; ENSG00000164175; TAA
YVTPVLLSV

SEQ ID NO: 79834 - protein, 9 aa, Homo sapiens
  misc_feature: Table A; Target 79834; HLA-A*32:01; SLC45A2; ENSG00000164175; TAA
YVTPVLLSV

SEQ ID NO: 79835 - protein, 9 aa, Homo sapiens
  misc_feature: Table A; Target 79835; HLA-A*68:02; SLC45A2; ENSG00000164175; TAA
YVTPVLLSV

SEQ ID NO: 79836 - protein, 9 aa, Homo sapiens
  misc_feature: Table A; Target 79836; HLA-B*08:01; SLC45A2; ENSG00000164175; TAA
YVTPVLLSV

SEQ ID NO: 79837 - protein, 9 aa, Homo sapiens
  misc_feature: Table A; Target 79837; HLA-B*13:02; SLC45A2; ENSG00000164175; TAA
YVTPVLLSV

SEQ ID NO: 79838 - protein, 9 aa, Homo sapiens
  misc_feature: Table A; Target 79838; HLA-B*35:03; SLC45A2; ENSG00000164175; TAA
YVTPVLLSV

SEQ ID NO: 79839 - protein, 9 aa, Homo sapiens
  misc_feature: Table A; Target 79839; HLA-B*40:02; SLC45A2; ENSG00000164175; TAA
YVTPVLLSV

SEQ ID NO: 79840 - protein, 9 aa, Homo sapiens
  misc_feature: Table A; Target 79840; HLA-B*46:01; SLC45A2; ENSG00000164175; TAA
YVTPVLLSV

SEQ ID NO: 79841 - protein, 9 aa, Homo sapiens
  misc_feature: Table A; Target 79841; HLA-B*49:01; SLC45A2; ENSG00000164175; TAA
YVTPVLLSV

SEQ ID NO: 79842 - protein, 9 aa, Homo sapiens
  misc_feature: Table A; Target 79842; HLA-B*51:01; SLC45A2; ENSG00000164175; TAA
YVTPVLLSV

SEQ ID NO: 79843 - protein, 9 aa, Homo sapiens
  misc_feature: Table A; Target 79843; HLA-B*54:01; SLC45A2; ENSG00000164175; TAA
YVTPVLLSV

SEQ ID NO: 79844 - protein, 9 aa, Homo sapiens
  misc_feature: Table A; Target 79844; HLA-B*55:01; SLC45A2; ENSG00000164175; TAA
YVTPVLLSV

SEQ ID NO: 79845 - protein, 9 aa, Homo sapiens
  misc_feature: Table A; Target 79845; HLA-B*56:01; SLC45A2; ENSG00000164175; TAA
YVTPVLLSV

SEQ ID NO: 79846 - protein, 9 aa, Homo sapiens
  misc_feature: Table A; Target 79846; HLA-B*58:01; SLC45A2; ENSG00000164175; TAA
YVTPVLLSV

SEQ ID NO: 79847 - protein, 9 aa, Homo sapiens
  misc_feature: Table A; Target 79847; HLA-C*02:02; SLC45A2; ENSG00000164175; TAA
YVTPVLLSV

SEQ ID NO: 79848 - protein, 9 aa, Homo sapiens
  misc_feature: Table A; Target 79848; HLA-C*03:03; SLC45A2; ENSG00000164175; TAA
YVTPVLLSV

SEQ ID NO: 79849 - protein, 9 aa, Homo sapiens
  misc_feature: Table A; Target 79849; HLA-C*03:04; SLC45A2; ENSG00000164175; TAA
YVTPVLLSV

SEQ ID NO: 79850 - protein, 9 aa, Homo sapiens
  misc_feature: Table A; Target 79850; HLA-C*06:02; SLC45A2; ENSG00000164175; TAA
YVTPVLLSV

SEQ ID NO: 79851 - protein, 9 aa, Homo sapiens
  misc_feature: Table A; Target 79851; HLA-C*12:03; SLC45A2; ENSG00000164175; TAA
YVTPVLLSV

SEQ ID NO: 79852 - protein, 9 aa, Homo sapiens
  misc_feature: Table A; Target 79852; HLA-C*16:02; SLC45A2; ENSG00000164175; TAA
YVTPVLLSV

SEQ ID NO: 79853 - protein, 9 aa, Homo sapiens
  misc_feature: Table A; Target 79853; HLA-C*16:04; SLC45A2; ENSG00000164175; TAA
YVTPVLLSV

SEQ ID NO: 79854 - protein, 11 aa, Homo sapiens
  misc_feature: Table A; Target 79854; HLA-A*68:02; SLC45A2; ENSG00000164175; TAA
YVTPVLLSVGL

SEQ ID NO: 79855 - protein, 8 aa, Homo sapiens
  misc_feature: Table A; Target 79855; HLA-B*37:01; SLC7A13; ENSG00000164893; CTA
ADRAFPSL

SEQ ID NO: 79856 - protein, 8 aa, Homo sapiens
  misc_feature: Table A; Target 79856; HLA-B*49:01; SLC7A13; ENSG00000164893; CTA
AEISISFP

SEQ ID NO: 79857 - protein, 9 aa, Homo sapiens
  misc_feature: Table A; Target 79857; HLA-B*40:02; SLC7A13; ENSG00000164893; CTA
AEISISFPC

SEQ ID NO: 79858 - protein, 9 aa, Homo sapiens
  misc_feature: Table A; Target 79858; HLA-B*49:01; SLC7A13; ENSG00000164893; CTA
AEISISFPC

SEQ ID NO: 79859 - protein, 9 aa, Homo sapiens
  misc_feature: Table A; Target 79859; HLA-A*30:01; SLC7A13; ENSG00000164893; CTA
AELPDISHL

SEQ ID NO: 79860 - protein, 9 aa, Homo sapiens
  misc_feature: Table A; Target 79860; HLA-B*27:02; SLC7A13; ENSG00000164893; CTA
AELPDISHL

SEQ ID NO: 79861 - protein, 9 aa, Homo sapiens
  misc_feature: Table A; Target 79861; HLA-B*37:01; SLC7A13; ENSG00000164893; CTA
AELPDISHL

SEQ ID NO: 79862 - protein, 9 aa, Homo sapiens
  misc_feature: Table A; Target 79862; HLA-B*40:01; SLC7A13; ENSG00000164893; CTA
AELPDISHL

SEQ ID NO: 79863 - protein, 9 aa, Homo sapiens
  misc_feature: Table A; Target 79863; HLA-B*40:02; SLC7A13; ENSG00000164893; CTA
AELPDISHL

SEQ ID NO: 79864 - protein, 9 aa, Homo sapiens
  misc_feature: Table A; Target 79864; HLA-B*44:02; SLC7A13; ENSG00000164893; CTA
AELPDISHL

SEQ ID NO: 79865 - protein, 9 aa, Homo sapiens
  misc_feature: Table A; Target 79865; HLA-B*44:03; SLC7A13; ENSG00000164893; CTA
AELPDISHL

SEQ ID NO: 79866 - protein, 9 aa, Homo sapiens
  misc_feature: Table A; Target 79866; HLA-B*49:01; SLC7A13; ENSG00000164893; CTA
AELPDISHL

SEQ ID NO: 79867 - protein, 9 aa, Homo sapiens
  misc_feature: Table A; Target 79867; HLA-C*02:02; SLC7A13; ENSG00000164893; CTA
AELPDISHL

SEQ ID NO: 79868 - protein, 9 aa, Homo sapiens
  misc_feature: Table A; Target 79868; HLA-C*16:04; SLC7A13; ENSG00000164893; CTA
AELPDISHL

SEQ ID NO: 79869 - protein, 10 aa, Homo sapiens
  misc_feature: Table A; Target 79869; HLA-A*30:01; SLC7A13; ENSG00000164893; CTA
AELPDISHLI

SEQ ID NO: 79870 - protein, 10 aa, Homo sapiens
  misc_feature: Table A; Target 79870; HLA-B*40:01; SLC7A13; ENSG00000164893; CTA
AELPDISHLI

SEQ ID NO: 79871 - protein, 10 aa, Homo sapiens
  misc_feature: Table A; Target 79871; HLA-B*44:02; SLC7A13; ENSG00000164893; CTA
AELPDISHLI

SEQ ID NO: 79872 - protein, 10 aa, Homo sapiens
  misc_feature: Table A; Target 79872; HLA-B*44:03; SLC7A13; ENSG00000164893; CTA
AELPDISHLI

SEQ ID NO: 79873 - protein, 10 aa, Homo sapiens
  misc_feature: Table A; Target 79873; HLA-B*49:01; SLC7A13; ENSG00000164893; CTA
AELPDISHLI

SEQ ID NO: 79874 - protein, 8 aa, Homo sapiens
  misc_feature: Table A; Target 79874; HLA-B*18:01; SLC7A13; ENSG00000164893; CTA
AEYSIQPF

SEQ ID NO: 79875 - protein, 8 aa, Homo sapiens
  misc_feature: Table A; Target 79875; HLA-B*37:01; SLC7A13; ENSG00000164893; CTA
AEYSIQPF

SEQ ID NO: 79876 - protein, 8 aa, Homo sapiens
  misc_feature: Table A; Target 79876; HLA-B*44:02; SLC7A13; ENSG00000164893; CTA
AEYSIQPF

SEQ ID NO: 79877 - protein, 9 aa, Homo sapiens
  misc_feature: Table A; Target 79877; HLA-A*30:01; SLC7A13; ENSG00000164893; CTA
AEYSIQPFF

SEQ ID NO: 79878 - protein, 9 aa, Homo sapiens
  misc_feature: Table A; Target 79878; HLA-B*18:01; SLC7A13; ENSG00000164893; CTA
AEYSIQPFF

SEQ ID NO: 79879 - protein, 9 aa, Homo sapiens
  misc_feature: Table A; Target 79879; HLA-B*27:02; SLC7A13; ENSG00000164893; CTA
AEYSIQPFF

SEQ ID NO: 79880 - protein, 9 aa, Homo sapiens
  misc_feature: Table A; Target 79880; HLA-B*37:01; SLC7A13; ENSG00000164893; CTA
AEYSIQPFF

SEQ ID NO: 79881 - protein, 9 aa, Homo sapiens
  misc_feature: Table A; Target 79881; HLA-B*40:01; SLC7A13; ENSG00000164893; CTA
AEYSIQPFF

SEQ ID NO: 79882 - protein, 9 aa, Homo sapiens
  misc_feature: Table A; Target 79882; HLA-B*44:02; SLC7A13; ENSG00000164893; CTA
AEYSIQPFF

SEQ ID NO: 79883 - protein, 9 aa, Homo sapiens
  misc_feature: Table A; Target 79883; HLA-B*44:03; SLC7A13; ENSG00000164893; CTA
AEYSIQPFF

SEQ ID NO: 79884 - protein, 9 aa, Homo sapiens
  misc_feature: Table A; Target 79884; HLA-B*49:01; SLC7A13; ENSG00000164893; CTA
AEYSIQPFF

SEQ ID NO: 79885 - protein, 9 aa, Homo sapiens
  misc_feature: Table A; Target 79885; HLA-C*02:02; SLC7A13; ENSG00000164893; CTA
AEYSIQPFF

SEQ ID NO: 79886 - protein, 9 aa, Homo sapiens
  misc_feature: Table A; Target 79886; HLA-C*16:04; SLC7A13; ENSG00000164893; CTA
AEYSIQPFF

SEQ ID NO: 79887 - protein, 9 aa, Homo sapiens
  misc_feature: Table A; Target 79887; HLA-C*04:01; SLC7A13; ENSG00000164893; CTA
AFDAELPDI

SEQ ID NO: 79888 - protein, 9 aa, Homo sapiens
  misc_feature: Table A; Target 79888; HLA-A*23:01; SLC7A13; ENSG00000164893; CTA
AFLNLWTSL

SEQ ID NO: 79889 - protein, 9 aa, Homo sapiens
  misc_feature: Table A; Target 79889; HLA-C*14:02; SLC7A13; ENSG00000164893; CTA
AFLNLWTSL

SEQ ID NO: 79890 - protein, 10 aa, Homo sapiens
  misc_feature: Table A; Target 79890; HLA-A*30:02; SLC7A13; ENSG00000164893; CTA
AGQALLLAEY

SEQ ID NO: 79891 - protein, 9 aa, Homo sapiens
  misc_feature: Table A; Target 79891; HLA-A*01:01; SLC7A13; ENSG00000164893; CTA
AIFQGYFAY

SEQ ID NO: 79892 - protein, 9 aa, Homo sapiens
  misc_feature: Table A; Target 79892; HLA-A*03:01; SLC7A13; ENSG00000164893; CTA
AIFQGYFAY

SEQ ID NO: 79893 - protein, 9 aa, Homo sapiens
  misc_feature: Table A; Target 79893; HLA-A*29:02; SLC7A13; ENSG00000164893; CTA
AIFQGYFAY

SEQ ID NO: 79894 - protein, 9 aa, Homo sapiens
  misc_feature: Table A; Target 79894; HLA-A*30:02; SLC7A13; ENSG00000164893; CTA
AIFQGYFAY

SEQ ID NO: 79895 - protein, 9 aa, Homo sapiens
  misc_feature: Table A; Target 79895; HLA-A*32:01; SLC7A13; ENSG00000164893; CTA
AIFQGYFAY

SEQ ID NO: 79896 - protein, 9 aa, Homo sapiens
  misc_feature: Table A; Target 79896; HLA-B*15:01; SLC7A13; ENSG00000164893; CTA
AIFQGYFAY

SEQ ID NO: 79897 - protein, 9 aa, Homo sapiens
  misc_feature: Table A; Target 79897; HLA-B*15:03; SLC7A13; ENSG00000164893; CTA
AIFQGYFAY

SEQ ID NO: 79898 - protein, 9 aa, Homo sapiens
  misc_feature: Table A; Target 79898; HLA-B*46:01; SLC7A13; ENSG00000164893; CTA
AIFQGYFAY

SEQ ID NO: 79899 - protein, 9 aa, Homo sapiens
  misc_feature: Table A; Target 79899; HLA-C*02:02; SLC7A13; ENSG00000164893; CTA
AIFQGYFAY

SEQ ID NO: 79900 - protein, 9 aa, Homo sapiens
  misc_feature: Table A; Target 79900; HLA-C*16:04; SLC7A13; ENSG00000164893; CTA
AIFQGYFAY

SEQ ID NO: 79901 - protein, 9 aa, Homo sapiens
  misc_feature: Table A; Target 79901; HLA-A*02:01; SLC7A13; ENSG00000164893; CTA
AILAMTSTL

SEQ ID NO: 79902 - protein, 9 aa, Homo sapiens
  misc_feature: Table A; Target 79902; HLA-A*02:03; SLC7A13; ENSG00000164893; CTA
AILAMTSTL

SEQ ID NO: 79903 - protein, 9 aa, Homo sapiens
  misc_feature: Table A; Target 79903; HLA-A*02:04; SLC7A13; ENSG00000164893; CTA
AILAMTSTL

SEQ ID NO: 79904 - protein, 9 aa, Homo sapiens
  misc_feature: Table A; Target 79904; HLA-A*02:07; SLC7A13; ENSG00000164893; CTA
AILAMTSTL

SEQ ID NO: 79905 - protein, 9 aa, Homo sapiens
  misc_feature: Table A; Target 79905; HLA-A*23:01; SLC7A13; ENSG00000164893; CTA
AILAMTSTL

SEQ ID NO: 79906 - protein, 9 aa, Homo sapiens
  misc_feature: Table A; Target 79906; HLA-A*24:02; SLC7A13; ENSG00000164893; CTA
AILAMTSTL

SEQ ID NO: 79907 - protein, 9 aa, Homo sapiens
  misc_feature: Table A; Target 79907; HLA-A*25:01; SLC7A13; ENSG00000164893; CTA
AILAMTSTL

SEQ ID NO: 79908 - protein, 9 aa, Homo sapiens
  misc_feature: Table A; Target 79908; HLA-A*30:01; SLC7A13; ENSG00000164893; CTA
AILAMTSTL

SEQ ID NO: 79909 - protein, 9 aa, Homo sapiens
  misc_feature: Table A; Target 79909; HLA-A*32:01; SLC7A13; ENSG00000164893; CTA
AILAMTSTL

SEQ ID NO: 79910 - protein, 9 aa, Homo sapiens
  misc_feature: Table A; Target 79910; HLA-B*07:02; SLC7A13; ENSG00000164893; CTA
AILAMTSTL

SEQ ID NO: 79911 - protein, 9 aa, Homo sapiens
  misc_feature: Table A; Target 79911; HLA-B*15:01; SLC7A13; ENSG00000164893; CTA
AILAMTSTL

SEQ ID NO: 79912 - protein, 9 aa, Homo sapiens
  misc_feature: Table A; Target 79912; HLA-B*15:03; SLC7A13; ENSG00000164893; CTA
AILAMTSTL

SEQ ID NO: 79913 - protein, 9 aa, Homo sapiens
  misc_feature: Table A; Target 79913; HLA-B*37:01; SLC7A13; ENSG00000164893; CTA
AILAMTSTL

SEQ ID NO: 79914 - protein, 9 aa, Homo sapiens
  misc_feature: Table A; Target 79914; HLA-B*40:01; SLC7A13; ENSG00000164893; CTA
AILAMTSTL

SEQ ID NO: 79915 - protein, 9 aa, Homo sapiens
  misc_feature: Table A; Target 79915; HLA-B*40:02; SLC7A13; ENSG00000164893; CTA
AILAMTSTL

SEQ ID NO: 79916 - protein, 9 aa, Homo sapiens
  misc_feature: Table A; Target 79916; HLA-B*46:01; SLC7A13; ENSG00000164893; CTA
AILAMTSTL

SEQ ID NO: 79917 - protein, 9 aa, Homo sapiens
  misc_feature: Table A; Target 79917; HLA-B*55:01; SLC7A13; ENSG00000164893; CTA
AILAMTSTL

SEQ ID NO: 79918 - protein, 9 aa, Homo sapiens
  misc_feature: Table A; Target 79918; HLA-B*58:01; SLC7A13; ENSG00000164893; CTA
AILAMTSTL

SEQ ID NO: 79919 - protein, 9 aa, Homo sapiens
  misc_feature: Table A; Target 79919; HLA-C*01:02; SLC7A13; ENSG00000164893; CTA
AILAMTSTL

SEQ ID NO: 79920 - protein, 9 aa, Homo sapiens
  misc_feature: Table A; Target 79920; HLA-C*02:02; SLC7A13; ENSG00000164893; CTA
AILAMTSTL

SEQ ID NO: 79921 - protein, 9 aa, Homo sapiens
  misc_feature: Table A; Target 79921; HLA-C*03:03; SLC7A13; ENSG00000164893; CTA
AILAMTSTL

SEQ ID NO: 79922 - protein, 9 aa, Homo sapiens
  misc_feature: Table A; Target 79922; HLA-C*03:04; SLC7A13; ENSG00000164893; CTA
AILAMTSTL

SEQ ID NO: 79923 - protein, 9 aa, Homo sapiens
  misc_feature: Table A; Target 79923; HLA-C*05:01; SLC7A13; ENSG00000164893; CTA
AILAMTSTL

SEQ ID NO: 79924 - protein, 9 aa, Homo sapiens
  misc_feature: Table A; Target 79924; HLA-C*07:02; SLC7A13; ENSG00000164893; CTA
AILAMTSTL

SEQ ID NO: 79925 - protein, 9 aa, Homo sapiens
  misc_feature: Table A; Target 79925; HLA-C*07:04; SLC7A13; ENSG00000164893; CTA
AILAMTSTL

SEQ ID NO: 79926 - protein, 9 aa, Homo sapiens
  misc_feature: Table A; Target 79926; HLA-C*14:02; SLC7A13; ENSG00000164893; CTA
AILAMTSTL

SEQ ID NO: 79927 - protein, 10 aa, Homo sapiens
  misc_feature: Table A; Target 79927; HLA-A*02:04; SLC7A13; ENSG00000164893; CTA
ALAMLWIVGI

SEQ ID NO: 79928 - protein, 9 aa, Homo sapiens
  misc_feature: Table A; Target 79928; HLA-A*02:01; SLC7A13; ENSG00000164893; CTA
ALLLAEYSI

SEQ ID NO: 79929 - protein, 9 aa, Homo sapiens
  misc_feature: Table A; Target 79929; HLA-A*03:01; SLC7A13; ENSG00000164893; CTA
ALPLVTVVY

SEQ ID NO: 79930 - protein, 9 aa, Homo sapiens
  misc_feature: Table A; Target 79930; HLA-A*23:01; SLC7A13; ENSG00000164893; CTA
ALPLVTVVY

SEQ ID NO: 79931 - protein, 9 aa, Homo sapiens
  misc_feature: Table A; Target 79931; HLA-A*26:01; SLC7A13; ENSG00000164893; CTA
ALPLVTVVY

SEQ ID NO: 79932 - protein, 9 aa, Homo sapiens
  misc_feature: Table A; Target 79932; HLA-A*29:02; SLC7A13; ENSG00000164893; CTA
ALPLVTVVY

SEQ ID NO: 79933 - protein, 9 aa, Homo sapiens
  misc_feature: Table A; Target 79933; HLA-A*30:02; SLC7A13; ENSG00000164893; CTA
ALPLVTVVY

SEQ ID NO: 79934 - protein, 9 aa, Homo sapiens
  misc_feature: Table A; Target 79934; HLA-A*32:01; SLC7A13; ENSG00000164893; CTA
ALPLVTVVY

SEQ ID NO: 79935 - protein, 9 aa, Homo sapiens
  misc_feature: Table A; Target 79935; HLA-B*15:01; SLC7A13; ENSG00000164893; CTA
ALPLVTVVY

SEQ ID NO: 79936 - protein, 9 aa, Homo sapiens
  misc_feature: Table A; Target 79936; HLA-B*15:03; SLC7A13; ENSG00000164893; CTA
ALPLVTVVY

SEQ ID NO: 79937 - protein, 9 aa, Homo sapiens
  misc_feature: Table A; Target 79937; HLA-B*46:01; SLC7A13; ENSG00000164893; CTA
ALPLVTVVY

SEQ ID NO: 79938 - protein, 9 aa, Homo sapiens
  misc_feature: Table A; Target 79938; HLA-C*02:02; SLC7A13; ENSG00000164893; CTA
ALPLVTVVY

SEQ ID NO: 79939 - protein, 9 aa, Homo sapiens
  misc_feature: Table A; Target 79939; HLA-C*07:04; SLC7A13; ENSG00000164893; CTA
ALPLVTVVY

SEQ ID NO: 79940 - protein, 9 aa, Homo sapiens
  misc_feature: Table A; Target 79940; HLA-C*14:02; SLC7A13; ENSG00000164893; CTA
ALPLVTVVY

SEQ ID NO: 79941 - protein, 9 aa, Homo sapiens
  misc_feature: Table A; Target 79941; HLA-C*16:04; SLC7A13; ENSG00000164893; CTA
ALPLVTVVY

SEQ ID NO: 79942 - protein, 10 aa, Homo sapiens
  misc_feature: Table A; Target 79942; HLA-A*02:07; SLC7A13; ENSG00000164893; CTA
ALPLVTVVYL

SEQ ID NO: 79943 - protein, 9 aa, Homo sapiens
  misc_feature: Table A; Target 79943; HLA-A*02:01; SLC7A13; ENSG00000164893; CTA
AMTSTLCSA

SEQ ID NO: 79944 - protein, 9 aa, Homo sapiens
  misc_feature: Table A; Target 79944; HLA-A*02:03; SLC7A13; ENSG00000164893; CTA
AMTSTLCSA

SEQ ID NO: 79945 - protein, 9 aa, Homo sapiens
  misc_feature: Table A; Target 79945; HLA-B*55:01; SLC7A13; ENSG00000164893; CTA
AMTSTLCSA

SEQ ID NO: 79946 - protein, 9 aa, Homo sapiens
  misc_feature: Table A; Target 79946; HLA-B*56:01; SLC7A13; ENSG00000164893; CTA
AMTSTLCSA

SEQ ID NO: 79947 - protein, 9 aa, Homo sapiens
  misc_feature: Table A; Target 79947; HLA-C*03:03; SLC7A13; ENSG00000164893; CTA
ASQEGQLPL

SEQ ID NO: 79948 - protein, 9 aa, Homo sapiens
  misc_feature: Table A; Target 79948; HLA-C*03:04; SLC7A13; ENSG00000164893; CTA
ASQEGQLPL

SEQ ID NO: 79949 - protein, 9 aa, Homo sapiens
  misc_feature: Table A; Target 79949; HLA-A*32:01; SLC7A13; ENSG00000164893; CTA
ASSVLKVSI

SEQ ID NO: 79950 - protein, 9 aa, Homo sapiens
  misc_feature: Table A; Target 79950; HLA-B*13:02; SLC7A13; ENSG00000164893; CTA
ASSVLKVSI

SEQ ID NO: 79951 - protein, 9 aa, Homo sapiens
  misc_feature: Table A; Target 79951; HLA-B*58:01; SLC7A13; ENSG00000164893; CTA
ASSVLKVSI

SEQ ID NO: 79952 - protein, 9 aa, Homo sapiens
  misc_feature: Table A; Target 79952; HLA-C*16:01; SLC7A13; ENSG00000164893; CTA
ASSVLKVSI

SEQ ID NO: 79953 - protein, 8 aa, Homo sapiens
  misc_feature: Table A; Target 79953; HLA-C*14:02; SLC7A13; ENSG00000164893; CTA
AYSGGACF

SEQ ID NO: 79954 - protein, 11 aa, Homo sapiens
  misc_feature: Table A; Target 79954; HLA-A*24:02; SLC7A13; ENSG00000164893; CTA
AYSGGACFTLI

SEQ ID NO: 79955 - protein, 8 aa, Homo sapiens
  misc_feature: Table A; Target 79955; HLA-B*46:01; SLC7A13; ENSG00000164893; CTA
CMNVGVSL

SEQ ID NO: 79956 - protein, 8 aa, Homo sapiens
  misc_feature: Table A; Target 79956; HLA-C*01:02; SLC7A13; ENSG00000164893; CTA
CMNVGVSL

SEQ ID NO: 79957 - protein, 8 aa, Homo sapiens
  misc_feature: Table A; Target 79957; HLA-C*14:02; SLC7A13; ENSG00000164893; CTA
CMNVGVSL

SEQ ID NO: 79958 - protein, 9 aa, Homo sapiens
  misc_feature: Table A; Target 79958; HLA-A*23:01; SLC7A13; ENSG00000164893; CTA
CSAEISISF

SEQ ID NO: 79959 - protein, 9 aa, Homo sapiens
  misc_feature: Table A; Target 79959; HLA-A*30:02; SLC7A13; ENSG00000164893; CTA
CSAEISISF

SEQ ID NO: 79960 - protein, 9 aa, Homo sapiens
  misc_feature: Table A; Target 79960; HLA-A*32:01; SLC7A13; ENSG00000164893; CTA
CSAEISISF

SEQ ID NO: 79961 - protein, 9 aa, Homo sapiens
  misc_feature: Table A; Target 79961; HLA-B*15:01; SLC7A13; ENSG00000164893; CTA
CSAEISISF

SEQ ID NO: 79962 - protein, 9 aa, Homo sapiens
  misc_feature: Table A; Target 79962; HLA-B*15:03; SLC7A13; ENSG00000164893; CTA
CSAEISISF

SEQ ID NO: 79963 - protein, 9 aa, Homo sapiens
  misc_feature: Table A; Target 79963; HLA-B*27:02; SLC7A13; ENSG00000164893; CTA
CSAEISISF

SEQ ID NO: 79964 - protein, 9 aa, Homo sapiens
  misc_feature: Table A; Target 79964; HLA-B*35:01; SLC7A13; ENSG00000164893; CTA
CSAEISISF

SEQ ID NO: 79965 - protein, 9 aa, Homo sapiens
  misc_feature: Table A; Target 79965; HLA-B*46:01; SLC7A13; ENSG00000164893; CTA
CSAEISISF

SEQ ID NO: 79966 - protein, 9 aa, Homo sapiens
  misc_feature: Table A; Target 79966; HLA-B*57:01; SLC7A13; ENSG00000164893; CTA
CSAEISISF

SEQ ID NO: 79967 - protein, 9 aa, Homo sapiens
  misc_feature: Table A; Target 79967; HLA-B*58:01; SLC7A13; ENSG00000164893; CTA
CSAEISISF

SEQ ID NO: 79968 - protein, 9 aa, Homo sapiens
  misc_feature: Table A; Target 79968; HLA-C*02:02; SLC7A13; ENSG00000164893; CTA
CSAEISISF

SEQ ID NO: 79969 - protein, 9 aa, Homo sapiens
  misc_feature: Table A; Target 79969; HLA-C*03:03; SLC7A13; ENSG00000164893; CTA
CSAEISISF

SEQ ID NO: 79970 - protein, 9 aa, Homo sapiens
  misc_feature: Table A; Target 79970; HLA-C*03:04; SLC7A13; ENSG00000164893; CTA
CSAEISISF

SEQ ID NO: 79971 - protein, 9 aa, Homo sapiens
  misc_feature: Table A; Target 79971; HLA-C*07:06; SLC7A13; ENSG00000164893; CTA
CSAEISISF

SEQ ID NO: 79972 - protein, 9 aa, Homo sapiens
  misc_feature: Table A; Target 79972; HLA-C*12:03; SLC7A13; ENSG00000164893; CTA
CSAEISISF

SEQ ID NO: 79973 - protein, 9 aa, Homo sapiens
  misc_feature: Table A; Target 79973; HLA-C*16:01; SLC7A13; ENSG00000164893; CTA
CSAEISISF

SEQ ID NO: 79974 - protein, 9 aa, Homo sapiens
  misc_feature: Table A; Target 79974; HLA-C*16:04; SLC7A13; ENSG00000164893; CTA
CSAEISISF

SEQ ID NO: 79975 - protein, 9 aa, Homo sapiens
  misc_feature: Table A; Target 79975; HLA-A*24:02; SLC7A13; ENSG00000164893; CTA
CYLQLLFNI

SEQ ID NO: 79976 - protein, 11 aa, Homo sapiens
  misc_feature: Table A; Target 79976; HLA-A*33:01; SLC7A13; ENSG00000164893; CTA
DAELPDISHLI

SEQ ID NO: 79977 - protein, 10 aa, Homo sapiens
  misc_feature: Table A; Target 79977; HLA-A*68:01; SLC7A13; ENSG00000164893; CTA
DAVAITWADR

SEQ ID NO: 79978 - protein, 9 aa, Homo sapiens
  misc_feature: Table A; Target 79978; HLA-A*25:01; SLC7A13; ENSG00000164893; CTA
DISHLIQAI

SEQ ID NO: 79979 - protein, 9 aa, Homo sapiens
  misc_feature: Table A; Target 79979; HLA-A*68:02; SLC7A13; ENSG00000164893; CTA
DISHLIQAI

SEQ ID NO: 79980 - protein, 8 aa, Homo sapiens
  misc_feature: Table A; Target 79980; HLA-B*08:01; SLC7A13; ENSG00000164893; CTA
DRGEKIQL

SEQ ID NO: 79981 - protein, 9 aa, Homo sapiens
  misc_feature: Table A; Target 79981; HLA-B*08:01; SLC7A13; ENSG00000164893; CTA
ELKKPRTTI

SEQ ID NO: 79982 - protein, 9 aa, Homo sapiens
  misc_feature: Table A; Target 79982; HLA-A*02:07; SLC7A13; ENSG00000164893; CTA
ELPDISHLI

SEQ ID NO: 79983 - protein, 9 aa, Homo sapiens
  misc_feature: Table A; Target 79983; HLA-A*23:01; SLC7A13; ENSG00000164893; CTA
ELPDISHLI

SEQ ID NO: 79984 - protein, 9 aa, Homo sapiens
  misc_feature: Table A; Target 79984; HLA-A*24:02; SLC7A13; ENSG00000164893; CTA
ELPDISHLI

SEQ ID NO: 79985 - protein, 9 aa, Homo sapiens
  misc_feature: Table A; Target 79985; HLA-A*26:01; SLC7A13; ENSG00000164893; CTA
ELPDISHLI

SEQ ID NO: 79986 - protein, 9 aa, Homo sapiens
  misc_feature: Table A; Target 79986; HLA-A*68:02; SLC7A13; ENSG00000164893; CTA
ELPDISHLI

SEQ ID NO: 79987 - protein, 9 aa, Homo sapiens
  misc_feature: Table A; Target 79987; HLA-B*13:02; SLC7A13; ENSG00000164893; CTA
ELPDISHLI

SEQ ID NO: 79988 - protein, 11 aa, Homo sapiens
  misc_feature: Table A; Target 79988; HLA-A*02:07; SLC7A13; ENSG00000164893; CTA
ELPDISHLIQA

SEQ ID NO: 79989 - protein, 8 aa, Homo sapiens
  misc_feature: Table A; Target 79989; HLA-B*35:01; SLC7A13; ENSG00000164893; CTA
EPNLSIPY

SEQ ID NO: 79990 - protein, 8 aa, Homo sapiens
  misc_feature: Table A; Target 79990; HLA-A*23:01; SLC7A13; ENSG00000164893; CTA
FAISTSLF

SEQ ID NO: 79991 - protein, 8 aa, Homo sapiens
  misc_feature: Table A; Target 79991; HLA-B*46:01; SLC7A13; ENSG00000164893; CTA
FAISTSLF

SEQ ID NO: 79992 - protein, 8 aa, Homo sapiens
  misc_feature: Table A; Target 79992; HLA-C*02:02; SLC7A13; ENSG00000164893; CTA
FAISTSLF

SEQ ID NO: 79993 - protein, 8 aa, Homo sapiens
  misc_feature: Table A; Target 79993; HLA-C*03:03; SLC7A13; ENSG00000164893; CTA
FAYSGGAC

SEQ ID NO: 79994 - protein, 8 aa, Homo sapiens
  misc_feature: Table A; Target 79994; HLA-C*03:04; SLC7A13; ENSG00000164893; CTA
FAYSGGAC

SEQ ID NO: 79995 - protein, 9 aa, Homo sapiens
  misc_feature: Table A; Target 79995; HLA-A*23:01; SLC7A13; ENSG00000164893; CTA
FAYSGGACF

SEQ ID NO: 79996 - protein, 9 aa, Homo sapiens
  misc_feature: Table A; Target 79996; HLA-A*25:01; SLC7A13; ENSG00000164893; CTA
FAYSGGACF

SEQ ID NO: 79997 - protein, 9 aa, Homo sapiens
  misc_feature: Table A; Target 79997; HLA-A*26:01; SLC7A13; ENSG00000164893; CTA
FAYSGGACF

SEQ ID NO: 79998 - protein, 9 aa, Homo sapiens
  misc_feature: Table A; Target 79998; HLA-B*15:01; SLC7A13; ENSG00000164893; CTA
FAYSGGACF

SEQ ID NO: 79999 - protein, 9 aa, Homo sapiens
  misc_feature: Table A; Target 79999; HLA-B*15:03; SLC7A13; ENSG00000164893; CTA
FAYSGGACF

SEQ ID NO: 80000 - protein, 9 aa, Homo sapiens
  misc_feature: Table A; Target 80000; HLA-B*35:01; SLC7A13; ENSG00000164893; CTA
FAYSGGACF

SEQ ID NO: 80001 - protein, 9 aa, Homo sapiens
  misc_feature: Table A; Target 80001; HLA-B*35:03; SLC7A13; ENSG00000164893; CTA
FAYSGGACF

SEQ ID NO: 80002 - protein, 9 aa, Homo sapiens
  misc_feature: Table A; Target 80002; HLA-B*38:01; SLC7A13; ENSG00000164893; CTA
FAYSGGACF

SEQ ID NO: 80003 - protein, 9 aa, Homo sapiens
  misc_feature: Table A; Target 80003; HLA-B*39:01; SLC7A13; ENSG00000164893; CTA
FAYSGGACF

SEQ ID NO: 80004 - protein, 9 aa, Homo sapiens
  misc_feature: Table A; Target 80004; HLA-B*46:01; SLC7A13; ENSG00000164893; CTA
FAYSGGACF

SEQ ID NO: 80005 - protein, 9 aa, Homo sapiens
  misc_feature: Table A; Target 80005; HLA-B*51:01; SLC7A13; ENSG00000164893; CTA
FAYSGGACF

SEQ ID NO: 80006 - protein, 9 aa, Homo sapiens
  misc_feature: Table A; Target 80006; HLA-B*54:01; SLC7A13; ENSG00000164893; CTA
FAYSGGACF

SEQ ID NO: 80007 - protein, 9 aa, Homo sapiens
  misc_feature: Table A; Target 80007; HLA-B*58:01; SLC7A13; ENSG00000164893; CTA
FAYSGGACF

SEQ ID NO: 80008 - protein, 9 aa, Homo sapiens
  misc_feature: Table A; Target 80008; HLA-C*01:02; SLC7A13; ENSG00000164893; CTA
FAYSGGACF

SEQ ID NO: 80009 - protein, 9 aa, Homo sapiens
  misc_feature: Table A; Target 80009; HLA-C*02:02; SLC7A13; ENSG00000164893; CTA
FAYSGGACF

SEQ ID NO: 80010 - protein, 9 aa, Homo sapiens
  misc_feature: Table A; Target 80010; HLA-C*03:03; SLC7A13; ENSG00000164893; CTA
FAYSGGACF

SEQ ID NO: 80011 - protein, 9 aa, Homo sapiens
  misc_feature: Table A; Target 80011; HLA-C*03:04; SLC7A13; ENSG00000164893; CTA
FAYSGGACF

SEQ ID NO: 80012 - protein, 9 aa, Homo sapiens
  misc_feature: Table A; Target 80012; HLA-C*05:01; SLC7A13; ENSG00000164893; CTA
FAYSGGACF

SEQ ID NO: 80013 - protein, 9 aa, Homo sapiens
  misc_feature: Table A; Target 80013; HLA-C*07:02; SLC7A13; ENSG00000164893; CTA
FAYSGGACF

SEQ ID NO: 80014 - protein, 9 aa, Homo sapiens
  misc_feature: Table A; Target 80014; HLA-C*07:04; SLC7A13; ENSG00000164893; CTA
FAYSGGACF

SEQ ID NO: 80015 - protein, 9 aa, Homo sapiens
  misc_feature: Table A; Target 80015; HLA-C*12:03; SLC7A13; ENSG00000164893; CTA
FAYSGGACF

SEQ ID NO: 80016 - protein, 9 aa, Homo sapiens
  misc_feature: Table A; Target 80016; HLA-C*14:02; SLC7A13; ENSG00000164893; CTA
FAYSGGACF

SEQ ID NO: 80017 - protein, 9 aa, Homo sapiens
  misc_feature: Table A; Target 80017; HLA-C*16:01; SLC7A13; ENSG00000164893; CTA
FAYSGGACF

SEQ ID NO: 80018 - protein, 9 aa, Homo sapiens
  misc_feature: Table A; Target 80018; HLA-C*16:04; SLC7A13; ENSG00000164893; CTA
FAYSGGACF

SEQ ID NO: 80019 - protein, 11 aa, Homo sapiens
  misc_feature: Table A; Target 80019; HLA-C*02:02; SLC7A13; ENSG00000164893; CTA
FAYSGGACFTL

SEQ ID NO: 80020 - protein, 11 aa, Homo sapiens
  misc_feature: Table A; Target 80020; HLA-C*03:03; SLC7A13; ENSG00000164893; CTA
FAYSGGACFTL

SEQ ID NO: 80021 - protein, 11 aa, Homo sapiens
  misc_feature: Table A; Target 80021; HLA-C*03:04; SLC7A13; ENSG00000164893; CTA
FAYSGGACFTL

SEQ ID NO: 80022 - protein, 11 aa, Homo sapiens
  misc_feature: Table A; Target 80022; HLA-C*16:04; SLC7A13; ENSG00000164893; CTA
FAYSGGACFTL

SEQ ID NO: 80023 - protein, 9 aa, Homo sapiens
  misc_feature: Table A; Target 80023; HLA-B*15:01; SLC7A13; ENSG00000164893; CTA
FISLTGVVF

SEQ ID NO: 80024 - protein, 9 aa, Homo sapiens
  misc_feature: Table A; Target 80024; HLA-B*46:01; SLC7A13; ENSG00000164893; CTA
FISLTGVVF

SEQ ID NO: 80025 - protein, 9 aa, Homo sapiens
  misc_feature: Table A; Target 80025; HLA-C*02:02; SLC7A13; ENSG00000164893; CTA
FISLTGVVF

SEQ ID NO: 80026 - protein, 9 aa, Homo sapiens
  misc_feature: Table A; Target 80026; HLA-C*07:04; SLC7A13; ENSG00000164893; CTA
FISLTGVVF

SEQ ID NO: 80027 - protein, 8 aa, Homo sapiens
  misc_feature: Table A; Target 80027; HLA-A*02:01; SLC7A13; ENSG00000164893; CTA
FLGSGVVA

SEQ ID NO: 80028 - protein, 9 aa, Homo sapiens
  misc_feature: Table A; Target 80028; HLA-A*02:01; SLC7A13; ENSG00000164893; CTA
FLGSGVVAG

SEQ ID NO: 80029 - protein, 11 aa, Homo sapiens
  misc_feature: Table A; Target 80029; HLA-C*07:02; SLC7A13; ENSG00000164893; CTA
FLGSGVVAGQA

SEQ ID NO: 80030 - protein, 9 aa, Homo sapiens
  misc_feature: Table A; Target 80030; HLA-A*02:01; SLC7A13; ENSG00000164893; CTA
FLLINIIGA

SEQ ID NO: 80031 - protein, 9 aa, Homo sapiens
  misc_feature: Table A; Target 80031; HLA-A*02:03; SLC7A13; ENSG00000164893; CTA
FLLINIIGA

SEQ ID NO: 80032 - protein, 9 aa, Homo sapiens
  misc_feature: Table A; Target 80032; HLA-A*02:04; SLC7A13; ENSG00000164893; CTA
FLLINIIGA

SEQ ID NO: 80033 - protein, 9 aa, Homo sapiens
  misc_feature: Table A; Target 80033; HLA-A*02:04; SLC7A13; ENSG00000164893; CTA
FLNLWTSLF

SEQ ID NO: 80034 - protein, 9 aa, Homo sapiens
  misc_feature: Table A; Target 80034; HLA-A*02:01; SLC7A13; ENSG00000164893; CTA
FLSFPLATI

SEQ ID NO: 80035 - protein, 9 aa, Homo sapiens
  misc_feature: Table A; Target 80035; HLA-A*02:03; SLC7A13; ENSG00000164893; CTA
FLSFPLATI

SEQ ID NO: 80036 - protein, 9 aa, Homo sapiens
  misc_feature: Table A; Target 80036; HLA-A*02:04; SLC7A13; ENSG00000164893; CTA
FLSFPLATI

SEQ ID NO: 80037 - protein, 9 aa, Homo sapiens
  misc_feature: Table A; Target 80037; HLA-A*02:07; SLC7A13; ENSG00000164893; CTA
FLSFPLATI

SEQ ID NO: 80038 - protein, 8 aa, Homo sapiens
  misc_feature: Table A; Target 80038; HLA-B*35:01; SLC7A13; ENSG00000164893; CTA
FPCSGAQY

SEQ ID NO: 80039 - protein, 9 aa, Homo sapiens
  misc_feature: Table A; Target 80039; HLA-A*01:01; SLC7A13; ENSG00000164893; CTA
FPCSGAQYY

SEQ ID NO: 80040 - protein, 9 aa, Homo sapiens
  misc_feature: Table A; Target 80040; HLA-A*29:02; SLC7A13; ENSG00000164893; CTA
FPCSGAQYY

SEQ ID NO: 80041 - protein, 9 aa, Homo sapiens
  misc_feature: Table A; Target 80041; HLA-B*35:01; SLC7A13; ENSG00000164893; CTA
FPCSGAQYY

SEQ ID NO: 80042 - protein, 8 aa, Homo sapiens
  misc_feature: Table A; Target 80042; HLA-B*35:01; SLC7A13; ENSG00000164893; CTA
FPLATIVI

SEQ ID NO: 80043 - protein, 8 aa, Homo sapiens
  misc_feature: Table A; Target 80043; HLA-B*35:03; SLC7A13; ENSG00000164893; CTA
FPLATIVI

SEQ ID NO: 80044 - protein, 8 aa, Homo sapiens
  misc_feature: Table A; Target 80044; HLA-B*51:01; SLC7A13; ENSG00000164893; CTA
FPLATIVI

SEQ ID NO: 80045 - protein, 8 aa, Homo sapiens
  misc_feature: Table A; Target 80045; HLA-B*54:01; SLC7A13; ENSG00000164893; CTA
FPLATIVI

SEQ ID NO: 80046 - protein, 8 aa, Homo sapiens
  misc_feature: Table A; Target 80046; HLA-B*56:01; SLC7A13; ENSG00000164893; CTA
FPLATIVI

SEQ ID NO: 80047 - protein, 10 aa, Homo sapiens
  misc_feature: Table A; Target 80047; HLA-B*54:01; SLC7A13; ENSG00000164893; CTA
FPLATIVIDV

SEQ ID NO: 80048 - protein, 10 aa, Homo sapiens
  misc_feature: Table A; Target 80048; HLA-B*56:01; SLC7A13; ENSG00000164893; CTA
FPLATIVIDV

SEQ ID NO: 80049 - protein, 11 aa, Homo sapiens
  misc_feature: Table A; Target 80049; HLA-B*35:01; SLC7A13; ENSG00000164893; CTA
FPLATIVIDVG

SEQ ID NO: 80050 - protein, 11 aa, Homo sapiens
  misc_feature: Table A; Target 80050; HLA-B*54:01; SLC7A13; ENSG00000164893; CTA
FPLATIVIDVG

SEQ ID NO: 80051 - protein, 9 aa, Homo sapiens
  misc_feature: Table A; Target 80051; HLA-B*35:03; SLC7A13; ENSG00000164893; CTA
FPSCSVPKL

SEQ ID NO: 80052 - protein, 8 aa, Homo sapiens
  misc_feature: Table A; Target 80052; HLA-B*35:03; SLC7A13; ENSG00000164893; CTA
FPSLAWIM

SEQ ID NO: 80053 - protein, 9 aa, Homo sapiens
  misc_feature: Table A; Target 80053; HLA-A*02:01; SLC7A13; ENSG00000164893; CTA
FQNAFDAEL

SEQ ID NO: 80054 - protein, 9 aa, Homo sapiens
  misc_feature: Table A; Target 80054; HLA-B*13:02; SLC7A13; ENSG00000164893; CTA
FQNAFDAEL

SEQ ID NO: 80055 - protein, 9 aa, Homo sapiens
  misc_feature: Table A; Target 80055; HLA-B*15:01; SLC7A13; ENSG00000164893; CTA
FQNAFDAEL

SEQ ID NO: 80056 - protein, 9 aa, Homo sapiens
  misc_feature: Table A; Target 80056; HLA-B*27:05; SLC7A13; ENSG00000164893; CTA
FQNAFDAEL

SEQ ID NO: 80057 - protein, 9 aa, Homo sapiens
  misc_feature: Table A; Target 80057; HLA-B*35:03; SLC7A13; ENSG00000164893; CTA
FQNAFDAEL

SEQ ID NO: 80058 - protein, 9 aa, Homo sapiens
  misc_feature: Table A; Target 80058; HLA-B*38:01; SLC7A13; ENSG00000164893; CTA
FQNAFDAEL

SEQ ID NO: 80059 - protein, 9 aa, Homo sapiens
  misc_feature: Table A; Target 80059; HLA-B*39:01; SLC7A13; ENSG00000164893; CTA
FQNAFDAEL

SEQ ID NO: 80060 - protein, 9 aa, Homo sapiens
  misc_feature: Table A; Target 80060; HLA-C*02:02; SLC7A13; ENSG00000164893; CTA
FQNAFDAEL

SEQ ID NO: 80061 - protein, 9 aa, Homo sapiens
  misc_feature: Table A; Target 80061; HLA-C*03:04; SLC7A13; ENSG00000164893; CTA
FQNAFDAEL

SEQ ID NO: 80062 - protein, 9 aa, Homo sapiens
  misc_feature: Table A; Target 80062; HLA-B*57:01; SLC7A13; ENSG00000164893; CTA
FSNLLISIF

SEQ ID NO: 80063 - protein, 10 aa, Homo sapiens
  misc_feature: Table A; Target 80063; HLA-B*27:02; SLC7A13; ENSG00000164893; CTA
FSNLLISIFK

SEQ ID NO: 80064 - protein, 9 aa, Homo sapiens
  misc_feature: Table A; Target 80064; HLA-A*02:01; SLC7A13; ENSG00000164893; CTA
FTALPLVTV

SEQ ID NO: 80065 - protein, 9 aa, Homo sapiens
  misc_feature: Table A; Target 80065; HLA-A*02:03; SLC7A13; ENSG00000164893; CTA
FTALPLVTV

SEQ ID NO: 80066 - protein, 9 aa, Homo sapiens
  misc_feature: Table A; Target 80066; HLA-A*68:02; SLC7A13; ENSG00000164893; CTA
FTALPLVTV

SEQ ID NO: 80067 - protein, 9 aa, Homo sapiens
  misc_feature: Table A; Target 80067; HLA-B*46:01; SLC7A13; ENSG00000164893; CTA
FTALPLVTV

SEQ ID NO: 80068 - protein, 9 aa, Homo sapiens
  misc_feature: Table A; Target 80068; HLA-B*49:01; SLC7A13; ENSG00000164893; CTA
FTALPLVTV

SEQ ID NO: 80069 - protein, 9 aa, Homo sapiens
  misc_feature: Table A; Target 80069; HLA-B*51:01; SLC7A13; ENSG00000164893; CTA
FTALPLVTV

SEQ ID NO: 80070 - protein, 9 aa, Homo sapiens
  misc_feature: Table A; Target 80070; HLA-B*54:01; SLC7A13; ENSG00000164893; CTA
FTALPLVTV

SEQ ID NO: 80071 - protein, 9 aa, Homo sapiens
  misc_feature: Table A; Target 80071; HLA-B*56:01; SLC7A13; ENSG00000164893; CTA
FTALPLVTV

SEQ ID NO: 80072 - protein, 9 aa, Homo sapiens
  misc_feature: Table A; Target 80072; HLA-C*02:02; SLC7A13; ENSG00000164893; CTA
FTALPLVTV

SEQ ID NO: 80073 - protein, 9 aa, Homo sapiens
  misc_feature: Table A; Target 80073; HLA-C*03:03; SLC7A13; ENSG00000164893; CTA
FTALPLVTV

SEQ ID NO: 80074 - protein, 9 aa, Homo sapiens
  misc_feature: Table A; Target 80074; HLA-C*03:04; SLC7A13; ENSG00000164893; CTA
FTALPLVTV

SEQ ID NO: 80075 - protein, 9 aa, Homo sapiens
  misc_feature: Table A; Target 80075; HLA-C*12:03; SLC7A13; ENSG00000164893; CTA
FTALPLVTV

SEQ ID NO: 80076 - protein, 10 aa, Homo sapiens
  misc_feature: Table A; Target 80076; HLA-A*68:02; SLC7A13; ENSG00000164893; CTA
FTALPLVTVV

SEQ ID NO: 80077 - protein, 11 aa, Homo sapiens
  misc_feature: Table A; Target 80077; HLA-A*01:01; SLC7A13; ENSG00000164893; CTA
FTALPLVTVVY

SEQ ID NO: 80078 - protein, 11 aa, Homo sapiens
  misc_feature: Table A; Target 80078; HLA-A*29:02; SLC7A13; ENSG00000164893; CTA
FTALPLVTVVY

SEQ ID NO: 80079 - protein, 8 aa, Homo sapiens
  misc_feature: Table A; Target 80079; HLA-B*35:03; SLC7A13; ENSG00000164893; CTA
FTLIAGEL

SEQ ID NO: 80080 - protein, 8 aa, Homo sapiens
  misc_feature: Table A; Target 80080; HLA-B*40:02; SLC7A13; ENSG00000164893; CTA
FTLIAGEL

SEQ ID NO: 80081 - protein, 8 aa, Homo sapiens
  misc_feature: Table A; Target 80081; HLA-B*46:01; SLC7A13; ENSG00000164893; CTA
FTLIAGEL

SEQ ID NO: 80082 - protein, 8 aa, Homo sapiens
  misc_feature: Table A; Target 80082; HLA-C*01:02; SLC7A13; ENSG00000164893; CTA
FTLIAGEL

SEQ ID NO: 80083 - protein, 8 aa, Homo sapiens
  misc_feature: Table A; Target 80083; HLA-C*03:03; SLC7A13; ENSG00000164893; CTA
FTLIAGEL

SEQ ID NO: 80084 - protein, 8 aa, Homo sapiens
  misc_feature: Table A; Target 80084; HLA-C*03:04; SLC7A13; ENSG00000164893; CTA
FTLIAGEL

SEQ ID NO: 80085 - protein, 8 aa, Homo sapiens
  misc_feature: Table A; Target 80085; HLA-C*04:01; SLC7A13; ENSG00000164893; CTA
FTLIAGEL

SEQ ID NO: 80086 - protein, 8 aa, Homo sapiens
  misc_feature: Table A; Target 80086; HLA-C*06:02; SLC7A13; ENSG00000164893; CTA
FTLIAGEL

SEQ ID NO: 80087 - protein, 8 aa, Homo sapiens
  misc_feature: Table A; Target 80087; HLA-C*07:02; SLC7A13; ENSG00000164893; CTA
FTLIAGEL

SEQ ID NO: 80088 - protein, 8 aa, Homo sapiens
  misc_feature: Table A; Target 80088; HLA-C*07:04; SLC7A13; ENSG00000164893; CTA
FTLIAGEL

SEQ ID NO: 80089 - protein, 8 aa, Homo sapiens
  misc_feature: Table A; Target 80089; HLA-C*14:02; SLC7A13; ENSG00000164893; CTA
FTLIAGEL

SEQ ID NO: 80090 - protein, 8 aa, Homo sapiens
  misc_feature: Table A; Target 80090; HLA-C*16:04; SLC7A13; ENSG00000164893; CTA
FTLIAGEL

SEQ ID NO: 80091 - protein, 9 aa, Homo sapiens
  misc_feature: Table A; Target 80091; HLA-A*01:01; SLC7A13; ENSG00000164893; CTA
FTLIAGELK

SEQ ID NO: 80092 - protein, 9 aa, Homo sapiens
  misc_feature: Table A; Target 80092; HLA-A*11:01; SLC7A13; ENSG00000164893; CTA
FTLIAGELK

SEQ ID NO: 80093 - protein, 8 aa, Homo sapiens
  misc_feature: Table A; Target 80093; HLA-B*08:01; SLC7A13; ENSG00000164893; CTA
FVSPKGVL

SEQ ID NO: 80094 - protein, 8 aa, Homo sapiens
  misc_feature: Table A; Target 80094; HLA-C*03:04; SLC7A13; ENSG00000164893; CTA
FVSPKGVL

SEQ ID NO: 80095 - protein, 8 aa, Homo sapiens
  misc_feature: Table A; Target 80095; HLA-C*16:01; SLC7A13; ENSG00000164893; CTA
FVSPKGVL

SEQ ID NO: 80096 - protein, 9 aa, Homo sapiens
  misc_feature: Table A; Target 80096; HLA-C*02:02; SLC7A13; ENSG00000164893; CTA
FVSPKGVLA

SEQ ID NO: 80097 - protein, 10 aa, Homo sapiens
  misc_feature: Table A; Target 80097; HLA-A*01:01; SLC7A13; ENSG00000164893; CTA
FVSPKGVLAY

SEQ ID NO: 80098 - protein, 10 aa, Homo sapiens
  misc_feature: Table A; Target 80098; HLA-A*03:01; SLC7A13; ENSG00000164893; CTA
FVSPKGVLAY

SEQ ID NO: 80099 - protein, 10 aa, Homo sapiens
  misc_feature: Table A; Target 80099; HLA-A*25:01; SLC7A13; ENSG00000164893; CTA
FVSPKGVLAY

SEQ ID NO: 80100 - protein, 10 aa, Homo sapiens
  misc_feature: Table A; Target 80100; HLA-A*26:01; SLC7A13; ENSG00000164893; CTA
FVSPKGVLAY

SEQ ID NO: 80101 - protein, 10 aa, Homo sapiens
  misc_feature: Table A; Target 80101; HLA-A*29:02; SLC7A13; ENSG00000164893; CTA
FVSPKGVLAY

SEQ ID NO: 80102 - protein, 10 aa, Homo sapiens
  misc_feature: Table A; Target 80102; HLA-A*30:02; SLC7A13; ENSG00000164893; CTA
FVSPKGVLAY

SEQ ID NO: 80103 - protein, 10 aa, Homo sapiens
  misc_feature: Table A; Target 80103; HLA-A*32:01; SLC7A13; ENSG00000164893; CTA
FVSPKGVLAY

SEQ ID NO: 80104 - protein, 10 aa, Homo sapiens
  misc_feature: Table A; Target 80104; HLA-B*15:01; SLC7A13; ENSG00000164893; CTA
FVSPKGVLAY

SEQ ID NO: 80105 - protein, 10 aa, Homo sapiens
  misc_feature: Table A; Target 80105; HLA-B*35:01; SLC7A13; ENSG00000164893; CTA
FVSPKGVLAY

SEQ ID NO: 80106 - protein, 10 aa, Homo sapiens
  misc_feature: Table A; Target 80106; HLA-B*46:01; SLC7A13; ENSG00000164893; CTA
FVSPKGVLAY

SEQ ID NO: 80107 - protein, 10 aa, Homo sapiens
  misc_feature: Table A; Target 80107; HLA-C*02:02; SLC7A13; ENSG00000164893; CTA
FVSPKGVLAY

SEQ ID NO: 80108 - protein, 10 aa, Homo sapiens
  misc_feature: Table A; Target 80108; HLA-C*07:04; SLC7A13; ENSG00000164893; CTA
FVSPKGVLAY

SEQ ID NO: 80109 - protein, 8 aa, Homo sapiens
  misc_feature: Table A; Target 80109; HLA-A*23:01; SLC7A13; ENSG00000164893; CTA
FYIPLIHF

SEQ ID NO: 80110 - protein, 8 aa, Homo sapiens
  misc_feature: Table A; Target 80110; HLA-A*24:02; SLC7A13; ENSG00000164893; CTA
FYIPLIHF

SEQ ID NO: 80111 - protein, 9 aa, Homo sapiens
  misc_feature: Table A; Target 80111; HLA-A*29:02; SLC7A13; ENSG00000164893; CTA
FYIPLIHFK

SEQ ID NO: 80112 - protein, 10 aa, Homo sapiens
  misc_feature: Table A; Target 80112; HLA-A*24:02; SLC7A13; ENSG00000164893; CTA
FYIPLIHFKI

SEQ ID NO: 80113 - protein, 9 aa, Homo sapiens
  misc_feature: Table A; Target 80113; HLA-A*03:01; SLC7A13; ENSG00000164893; CTA
GAGIFVSPK

SEQ ID NO: 80114 - protein, 9 aa, Homo sapiens
  misc_feature: Table A; Target 80114; HLA-A*03:02; SLC7A13; ENSG00000164893; CTA
GAGIFVSPK

SEQ ID NO: 80115 - protein, 9 aa, Homo sapiens
  misc_feature: Table A; Target 80115; HLA-A*11:01; SLC7A13; ENSG00000164893; CTA
GAGIFVSPK

SEQ ID NO: 80116 - protein, 9 aa, Homo sapiens
  misc_feature: Table A; Target 80116; HLA-B*27:02; SLC7A13; ENSG00000164893; CTA
GAGIFVSPK

SEQ ID NO: 80117 - protein, 9 aa, Homo sapiens
  misc_feature: Table A; Target 80117; HLA-C*07:06; SLC7A13; ENSG00000164893; CTA
GAGIFVSPK

SEQ ID NO: 80118 - protein, 9 aa, Homo sapiens
  misc_feature: Table A; Target 80118; HLA-A*31:01; SLC7A13; ENSG00000164893; CTA
GAQYYFLKR

SEQ ID NO: 80119 - protein, 9 aa, Homo sapiens
  misc_feature: Table A; Target 80119; HLA-A*02:01; SLC7A13; ENSG00000164893; CTA
GIFVSPKGV

SEQ ID NO: 80120 - protein, 9 aa, Homo sapiens
  misc_feature: Table A; Target 80120; HLA-A*02:03; SLC7A13; ENSG00000164893; CTA
GIFVSPKGV

SEQ ID NO: 80121 - protein, 9 aa, Homo sapiens
  misc_feature: Table A; Target 80121; HLA-B*13:02; SLC7A13; ENSG00000164893; CTA
GIFVSPKGV

SEQ ID NO: 80122 - protein, 9 aa, Homo sapiens
  misc_feature: Table A; Target 80122; HLA-A*02:01; SLC7A13; ENSG00000164893; CTA
GLLFYIPLI

SEQ ID NO: 80123 - protein, 9 aa, Homo sapiens
  misc_feature: Table A; Target 80123; HLA-A*02:03; SLC7A13; ENSG00000164893; CTA
GLLFYIPLI

SEQ ID NO: 80124 - protein, 9 aa, Homo sapiens
  misc_feature: Table A; Target 80124; HLA-A*02:04; SLC7A13; ENSG00000164893; CTA
GLLFYIPLI

SEQ ID NO: 80125 - protein, 9 aa, Homo sapiens
  misc_feature: Table A; Target 80125; HLA-A*02:07; SLC7A13; ENSG00000164893; CTA
GLLFYIPLI

SEQ ID NO: 80126 - protein, 8 aa, Homo sapiens
  misc_feature: Table A; Target 80126; HLA-B*13:02; SLC7A13; ENSG00000164893; CTA
GLVVIPLV

SEQ ID NO: 80127 - protein, 9 aa, Homo sapiens
  misc_feature: Table A; Target 80127; HLA-A*03:01; SLC7A13; ENSG00000164893; CTA
GLVVIPLVK

SEQ ID NO: 80128 - protein, 9 aa, Homo sapiens
  misc_feature: Table A; Target 80128; HLA-A*03:02; SLC7A13; ENSG00000164893; CTA
GLVVIPLVK

SEQ ID NO: 80129 - protein, 9 aa, Homo sapiens
  misc_feature: Table A; Target 80129; HLA-A*11:01; SLC7A13; ENSG00000164893; CTA
GLVVIPLVK

SEQ ID NO: 80130 - protein, 9 aa, Homo sapiens
  misc_feature: Table A; Target 80130; HLA-A*26:01; SLC7A13; ENSG00000164893; CTA
GQALLLAEY

SEQ ID NO: 80131 - protein, 9 aa, Homo sapiens
  misc_feature: Table A; Target 80131; HLA-A*29:02; SLC7A13; ENSG00000164893; CTA
GQALLLAEY

SEQ ID NO: 80132 - protein, 9 aa, Homo sapiens
  misc_feature: Table A; Target 80132; HLA-A*30:02; SLC7A13; ENSG00000164893; CTA
GQALLLAEY

SEQ ID NO: 80133 - protein, 9 aa, Homo sapiens
  misc_feature: Table A; Target 80133; HLA-A*32:01; SLC7A13; ENSG00000164893; CTA
GQALLLAEY

SEQ ID NO: 80134 - protein, 9 aa, Homo sapiens
  misc_feature: Table A; Target 80134; HLA-B*13:02; SLC7A13; ENSG00000164893; CTA
GQALLLAEY

SEQ ID NO: 80135 - protein, 9 aa, Homo sapiens
  misc_feature: Table A; Target 80135; HLA-B*15:01; SLC7A13; ENSG00000164893; CTA
GQALLLAEY

SEQ ID NO: 80136 - protein, 9 aa, Homo sapiens
  misc_feature: Table A; Target 80136; HLA-B*15:03; SLC7A13; ENSG00000164893; CTA
GQALLLAEY

SEQ ID NO: 80137 - protein, 9 aa, Homo sapiens
  misc_feature: Table A; Target 80137; HLA-B*18:01; SLC7A13; ENSG00000164893; CTA
GQALLLAEY

SEQ ID NO: 80138 - protein, 9 aa, Homo sapiens
  misc_feature: Table A; Target 80138; HLA-B*27:02; SLC7A13; ENSG00000164893; CTA
GQALLLAEY

SEQ ID NO: 80139 - protein, 9 aa, Homo sapiens
  misc_feature: Table A; Target 80139; HLA-B*27:05; SLC7A13; ENSG00000164893; CTA
GQALLLAEY

SEQ ID NO: 80140 - protein, 9 aa, Homo sapiens
  misc_feature: Table A; Target 80140; HLA-B*39:01; SLC7A13; ENSG00000164893; CTA
GQALLLAEY

SEQ ID NO: 80141 - protein, 9 aa, Homo sapiens
  misc_feature: Table A; Target 80141; HLA-B*44:02; SLC7A13; ENSG00000164893; CTA
GQALLLAEY

SEQ ID NO: 80142 - protein, 9 aa, Homo sapiens
  misc_feature: Table A; Target 80142; HLA-B*44:03; SLC7A13; ENSG00000164893; CTA
GQALLLAEY

SEQ ID NO: 80143 - protein, 9 aa, Homo sapiens
  misc_feature: Table A; Target 80143; HLA-B*46:01; SLC7A13; ENSG00000164893; CTA
GQALLLAEY

SEQ ID NO: 80144 - protein, 9 aa, Homo sapiens
  misc_feature: Table A; Target 80144; HLA-C*02:02; SLC7A13; ENSG00000164893; CTA
GQALLLAEY

SEQ ID NO: 80145 - protein, 9 aa, Homo sapiens
  misc_feature: Table A; Target 80145; HLA-C*07:04; SLC7A13; ENSG00000164893; CTA
GQALLLAEY

SEQ ID NO: 80146 - protein, 9 aa, Homo sapiens
  misc_feature: Table A; Target 80146; HLA-C*14:02; SLC7A13; ENSG00000164893; CTA
GQALLLAEY

SEQ ID NO: 80147 - protein, 9 aa, Homo sapiens
  misc_feature: Table A; Target 80147; HLA-C*16:04; SLC7A13; ENSG00000164893; CTA
GQALLLAEY

SEQ ID NO: 80148 - protein, 11 aa, Homo sapiens
  misc_feature: Table A; Target 80148; HLA-B*13:02; SLC7A13; ENSG00000164893; CTA
GQALLLAEYSI

SEQ ID NO: 80149 - protein, 9 aa, Homo sapiens
  misc_feature: Table A; Target 80149; HLA-B*13:02; SLC7A13; ENSG00000164893; CTA
GQLPLLFNT

SEQ ID NO: 80150 - protein, 10 aa, Homo sapiens
  misc_feature: Table A; Target 80150; HLA-A*02:04; SLC7A13; ENSG00000164893; CTA
GQLPLLFNTL

SEQ ID NO: 80151 - protein, 10 aa, Homo sapiens
  misc_feature: Table A; Target 80151; HLA-A*30:01; SLC7A13; ENSG00000164893; CTA
GQLPLLFNTL

SEQ ID NO: 80152 - protein, 10 aa, Homo sapiens
  misc_feature: Table A; Target 80152; HLA-B*13:02; SLC7A13; ENSG00000164893; CTA
GQLPLLFNTL

SEQ ID NO: 80153 - protein, 10 aa, Homo sapiens
  misc_feature: Table A; Target 80153; HLA-B*15:01; SLC7A13; ENSG00000164893; CTA
GQLPLLFNTL

SEQ ID NO: 80154 - protein, 10 aa, Homo sapiens
  misc_feature: Table A; Target 80154; HLA-B*40:02; SLC7A13; ENSG00000164893; CTA
GQLPLLFNTL

SEQ ID NO: 80155 - protein, 10 aa, Homo sapiens
  misc_feature: Table A; Target 80155; HLA-B*57:01; SLC7A13; ENSG00000164893; CTA
GSTVAFLNLW

SEQ ID NO: 80156 - protein, 9 aa, Homo sapiens
  misc_feature: Table A; Target 80156; HLA-A*68:02; SLC7A13; ENSG00000164893; CTA
GTSFLLINI

SEQ ID NO: 80157 - protein, 8 aa, Homo sapiens
  misc_feature: Table A; Target 80157; HLA-C*03:04; SLC7A13; ENSG00000164893; CTA
GVVAGQAL

SEQ ID NO: 80158 - protein, 9 aa, Homo sapiens
  misc_feature: Table A; Target 80158; HLA-B*15:01; SLC7A13; ENSG00000164893; CTA
GVVAGQALL

SEQ ID NO: 80159 - protein, 9 aa, Homo sapiens
  misc_feature: Table A; Target 80159; HLA-B*40:01; SLC7A13; ENSG00000164893; CTA
GVVAGQALL

SEQ ID NO: 80160 - protein, 9 aa, Homo sapiens
  misc_feature: Table A; Target 80160; HLA-A*03:01; SLC7A13; ENSG00000164893; CTA
GVVFLIRGK

SEQ ID NO: 80161 - protein, 9 aa, Homo sapiens
  misc_feature: Table A; Target 80161; HLA-A*11:01; SLC7A13; ENSG00000164893; CTA
GVVFLIRGK

SEQ ID NO: 80162 - protein, 11 aa, Homo sapiens
  misc_feature: Table A; Target 80162; HLA-A*24:02; SLC7A13; ENSG00000164893; CTA
GYFAYSGGACF

SEQ ID NO: 80163 - protein, 10 aa, Homo sapiens
  misc_feature: Table A; Target 80163; HLA-A*26:01; SLC7A13; ENSG00000164893; CTA
HLIQAIFQGY

SEQ ID NO: 80164 - protein, 10 aa, Homo sapiens
  misc_feature: Table A; Target 80164; HLA-A*29:02; SLC7A13; ENSG00000164893; CTA
HLIQAIFQGY

SEQ ID NO: 80165 - protein, 9 aa, Homo sapiens
  misc_feature: Table A; Target 80165; HLA-A*26:01; SLC7A13; ENSG00000164893; CTA
HSSPFTAVL

SEQ ID NO: 80166 - protein, 9 aa, Homo sapiens
  misc_feature: Table A; Target 80166; HLA-A*32:01; SLC7A13; ENSG00000164893; CTA
HSSPFTAVL

SEQ ID NO: 80167 - protein, 9 aa, Homo sapiens
  misc_feature: Table A; Target 80167; HLA-A*68:02; SLC7A13; ENSG00000164893; CTA
HSSPFTAVL

SEQ ID NO: 80168 - protein, 9 aa, Homo sapiens
  misc_feature: Table A; Target 80168; HLA-B*35:01; SLC7A13; ENSG00000164893; CTA
HSSPFTAVL

SEQ ID NO: 80169 - protein, 9 aa, Homo sapiens
  misc_feature: Table A; Target 80169; HLA-B*35:03; SLC7A13; ENSG00000164893; CTA
HSSPFTAVL

SEQ ID NO: 80170 - protein, 9 aa, Homo sapiens
  misc_feature: Table A; Target 80170; HLA-B*38:01; SLC7A13; ENSG00000164893; CTA
HSSPFTAVL

SEQ ID NO: 80171 - protein, 9 aa, Homo sapiens
  misc_feature: Table A; Target 80171; HLA-B*39:01; SLC7A13; ENSG00000164893; CTA
HSSPFTAVL

SEQ ID NO: 80172 - protein, 9 aa, Homo sapiens
  misc_feature: Table A; Target 80172; HLA-B*40:01; SLC7A13; ENSG00000164893; CTA
HSSPFTAVL

SEQ ID NO: 80173 - protein, 9 aa, Homo sapiens
  misc_feature: Table A; Target 80173; HLA-B*46:01; SLC7A13; ENSG00000164893; CTA
HSSPFTAVL

SEQ ID NO: 80174 - protein, 9 aa, Homo sapiens
  misc_feature: Table A; Target 80174; HLA-B*57:01; SLC7A13; ENSG00000164893; CTA
HSSPFTAVL

SEQ ID NO: 80175 - protein, 9 aa, Homo sapiens
  misc_feature: Table A; Target 80175; HLA-B*58:01; SLC7A13; ENSG00000164893; CTA
HSSPFTAVL

SEQ ID NO: 80176 - protein, 9 aa, Homo sapiens
  misc_feature: Table A; Target 80176; HLA-C*02:02; SLC7A13; ENSG00000164893; CTA
HSSPFTAVL

SEQ ID NO: 80177 - protein, 9 aa, Homo sapiens
  misc_feature: Table A; Target 80177; HLA-C*03:03; SLC7A13; ENSG00000164893; CTA
HSSPFTAVL

SEQ ID NO: 80178 - protein, 9 aa, Homo sapiens
  misc_feature: Table A; Target 80178; HLA-C*03:04; SLC7A13; ENSG00000164893; CTA
HSSPFTAVL

SEQ ID NO: 80179 - protein, 9 aa, Homo sapiens
  misc_feature: Table A; Target 80179; HLA-C*05:01; SLC7A13; ENSG00000164893; CTA
HSSPFTAVL

SEQ ID NO: 80180 - protein, 9 aa, Homo sapiens
  misc_feature: Table A; Target 80180; HLA-C*07:04; SLC7A13; ENSG00000164893; CTA
HSSPFTAVL

SEQ ID NO: 80181 - protein, 9 aa, Homo sapiens
  misc_feature: Table A; Target 80181; HLA-C*07:06; SLC7A13; ENSG00000164893; CTA
HSSPFTAVL

SEQ ID NO: 80182 - protein, 9 aa, Homo sapiens
  misc_feature: Table A; Target 80182; HLA-C*12:03; SLC7A13; ENSG00000164893; CTA
HSSPFTAVL

SEQ ID NO: 80183 - protein, 9 aa, Homo sapiens
  misc_feature: Table A; Target 80183; HLA-C*16:01; SLC7A13; ENSG00000164893; CTA
HSSPFTAVL

SEQ ID NO: 80184 - protein, 9 aa, Homo sapiens
  misc_feature: Table A; Target 80184; HLA-C*16:02; SLC7A13; ENSG00000164893; CTA
HSSPFTAVL

SEQ ID NO: 80185 - protein, 9 aa, Homo sapiens
  misc_feature: Table A; Target 80185; HLA-C*16:04; SLC7A13; ENSG00000164893; CTA
HSSPFTAVL

SEQ ID NO: 80186 - protein, 10 aa, Homo sapiens
  misc_feature: Table A; Target 80186; HLA-A*68:02; SLC7A13; ENSG00000164893; CTA
HSSPFTAVLL

SEQ ID NO: 80187 - protein, 9 aa, Homo sapiens
  misc_feature: Table A; Target 80187; HLA-A*31:01; SLC7A13; ENSG00000164893; CTA
IAGELKKPR

SEQ ID NO: 80188 - protein, 9 aa, Homo sapiens
  misc_feature: Table A; Target 80188; HLA-A*33:01; SLC7A13; ENSG00000164893; CTA
IAGELKKPR

SEQ ID NO: 80189 - protein, 9 aa, Homo sapiens
  misc_feature: Table A; Target 80189; HLA-A*33:03; SLC7A13; ENSG00000164893; CTA
IAGELKKPR

SEQ ID NO: 80190 - protein, 8 aa, Homo sapiens
  misc_feature: Table A; Target 80190; HLA-B*13:02; SLC7A13; ENSG00000164893; CTA
IASSVLKV

SEQ ID NO: 80191 - protein, 8 aa, Homo sapiens
  misc_feature: Table A; Target 80191; HLA-B*49:01; SLC7A13; ENSG00000164893; CTA
IASSVLKV

SEQ ID NO: 80192 - protein, 8 aa, Homo sapiens
  misc_feature: Table A; Target 80192; HLA-B*51:01; SLC7A13; ENSG00000164893; CTA
IASSVLKV

SEQ ID NO: 80193 - protein, 8 aa, Homo sapiens
  misc_feature: Table A; Target 80193; HLA-C*02:02; SLC7A13; ENSG00000164893; CTA
IASSVLKV

SEQ ID NO: 80194 - protein, 8 aa, Homo sapiens
  misc_feature: Table A; Target 80194; HLA-C*05:01; SLC7A13; ENSG00000164893; CTA
IASSVLKV

SEQ ID NO: 80195 - protein, 8 aa, Homo sapiens
  misc_feature: Table A; Target 80195; HLA-C*06:02; SLC7A13; ENSG00000164893; CTA
IASSVLKV

SEQ ID NO: 80196 - protein, 8 aa, Homo sapiens
  misc_feature: Table A; Target 80196; HLA-C*12:03; SLC7A13; ENSG00000164893; CTA
IASSVLKV

SEQ ID NO: 80197 - protein, 8 aa, Homo sapiens
  misc_feature: Table A; Target 80197; HLA-C*16:02; SLC7A13; ENSG00000164893; CTA
IASSVLKV

SEQ ID NO: 80198 - protein, 9 aa, Homo sapiens
  misc_feature: Table A; Target 80198; HLA-C*16:02; SLC7A13; ENSG00000164893; CTA
IASSVLKVS

SEQ ID NO: 80199 - protein, 10 aa, Homo sapiens
  misc_feature: Table A; Target 80199; HLA-C*16:02; SLC7A13; ENSG00000164893; CTA
IASSVLKVSI

SEQ ID NO: 80200 - protein, 8 aa, Homo sapiens
  misc_feature: Table A; Target 80200; HLA-A*29:02; SLC7A13; ENSG00000164893; CTA
IFQGYFAY

SEQ ID NO: 80201 - protein, 8 aa, Homo sapiens
  misc_feature: Table A; Target 80201; HLA-C*14:02; SLC7A13; ENSG00000164893; CTA
IFQGYFAY

SEQ ID NO: 80202 - protein, 9 aa, Homo sapiens
  misc_feature: Table A; Target 80202; HLA-A*23:01; SLC7A13; ENSG00000164893; CTA
IFVSPKGVL

SEQ ID NO: 80203 - protein, 9 aa, Homo sapiens
  misc_feature: Table A; Target 80203; HLA-C*14:02; SLC7A13; ENSG00000164893; CTA
IFVSPKGVL

SEQ ID NO: 80204 - protein, 11 aa, Homo sapiens
  misc_feature: Table A; Target 80204; HLA-A*23:01; SLC7A13; ENSG00000164893; CTA
IFVSPKGVLAY

SEQ ID NO: 80205 - protein, 11 aa, Homo sapiens
  misc_feature: Table A; Target 80205; HLA-A*24:02; SLC7A13; ENSG00000164893; CTA
IFVSPKGVLAY

SEQ ID NO: 80206 - protein, 11 aa, Homo sapiens
  misc_feature: Table A; Target 80206; HLA-A*29:02; SLC7A13; ENSG00000164893; CTA
IFVSPKGVLAY

SEQ ID NO: 80207 - protein, 11 aa, Homo sapiens
  misc_feature: Table A; Target 80207; HLA-A*30:02; SLC7A13; ENSG00000164893; CTA
IFVSPKGVLAY

SEQ ID NO: 80208 - protein, 9 aa, Homo sapiens
  misc_feature: Table A; Target 80208; HLA-B*27:05; SLC7A13; ENSG00000164893; CTA
IGAGIFVSP

SEQ ID NO: 80209 - protein, 10 aa, Homo sapiens
  misc_feature: Table A; Target 80209; HLA-B*27:02; SLC7A13; ENSG00000164893; CTA
IGAGIFVSPK

SEQ ID NO: 80210 - protein, 8 aa, Homo sapiens
  misc_feature: Table A; Target 80210; HLA-B*15:01; SLC7A13; ENSG00000164893; CTA
ILAMTSTL

SEQ ID NO: 80211 - protein, 8 aa, Homo sapiens
  misc_feature: Table A; Target 80211; HLA-B*46:01; SLC7A13; ENSG00000164893; CTA
ILAMTSTL

SEQ ID NO: 80212 - protein, 8 aa, Homo sapiens
  misc_feature: Table A; Target 80212; HLA-C*01:02; SLC7A13; ENSG00000164893; CTA
ILAMTSTL

SEQ ID NO: 80213 - protein, 8 aa, Homo sapiens
  misc_feature: Table A; Target 80213; HLA-C*03:03; SLC7A13; ENSG00000164893; CTA
ILAMTSTL

SEQ ID NO: 80214 - protein, 8 aa, Homo sapiens
  misc_feature: Table A; Target 80214; HLA-C*03:04; SLC7A13; ENSG00000164893; CTA
ILAMTSTL

SEQ ID NO: 80215 - protein, 8 aa, Homo sapiens
  misc_feature: Table A; Target 80215; HLA-C*07:04; SLC7A13; ENSG00000164893; CTA
ILAMTSTL

SEQ ID NO: 80216 - protein, 8 aa, Homo sapiens
  misc_feature: Table A; Target 80216; HLA-C*14:02; SLC7A13; ENSG00000164893; CTA
ILAMTSTL

SEQ ID NO: 80217 - protein, 8 aa, Homo sapiens
  misc_feature: Table A; Target 80217; HLA-C*16:02; SLC7A13; ENSG00000164893; CTA
ILAMTSTL

SEQ ID NO: 80218 - protein, 10 aa, Homo sapiens
  misc_feature: Table A; Target 80218; HLA-A*02:01; SLC7A13; ENSG00000164893; CTA
ILSFISLTGV

SEQ ID NO: 80219 - protein, 10 aa, Homo sapiens
  misc_feature: Table A; Target 80219; HLA-A*02:03; SLC7A13; ENSG00000164893; CTA
ILSFISLTGV

SEQ ID NO: 80220 - protein, 10 aa, Homo sapiens
  misc_feature: Table A; Target 80220; HLA-A*02:04; SLC7A13; ENSG00000164893; CTA
ILSFISLTGV

SEQ ID NO: 80221 - protein, 9 aa, Homo sapiens
  misc_feature: Table A; Target 80221; HLA-A*02:01; SLC7A13; ENSG00000164893; CTA
ILSSDAVAI

SEQ ID NO: 80222 - protein, 9 aa, Homo sapiens
  misc_feature: Table A; Target 80222; HLA-B*13:02; SLC7A13; ENSG00000164893; CTA
ILSSDAVAI

SEQ ID NO: 80223 - protein, 9 aa, Homo sapiens
  misc_feature: Table A; Target 80223; HLA-B*35:03; SLC7A13; ENSG00000164893; CTA
ILSSDAVAI

SEQ ID NO: 80224 - protein, 9 aa, Homo sapiens
  misc_feature: Table A; Target 80224; HLA-B*38:01; SLC7A13; ENSG00000164893; CTA
ILSSDAVAI

SEQ ID NO: 80225 - protein, 9 aa, Homo sapiens
  misc_feature: Table A; Target 80225; HLA-B*55:01; SLC7A13; ENSG00000164893; CTA
ILSSDAVAI

SEQ ID NO: 80226 - protein, 11 aa, Homo sapiens
  misc_feature: Table A; Target 80226; HLA-A*32:01; SLC7A13; ENSG00000164893; CTA
ILSSDAVAITW

SEQ ID NO: 80227 - protein, 11 aa, Homo sapiens
  misc_feature: Table A; Target 80227; HLA-B*44:02; SLC7A13; ENSG00000164893; CTA
ILSSDAVAITW

SEQ ID NO: 80228 - protein, 11 aa, Homo sapiens
  misc_feature: Table A; Target 80228; HLA-B*44:03; SLC7A13; ENSG00000164893; CTA
ILSSDAVAITW

SEQ ID NO: 80229 - protein, 11 aa, Homo sapiens
  misc_feature: Table A; Target 80229; HLA-B*57:01; SLC7A13; ENSG00000164893; CTA
ILSSDAVAITW

SEQ ID NO: 80230 - protein, 11 aa, Homo sapiens
  misc_feature: Table A; Target 80230; HLA-B*58:01; SLC7A13; ENSG00000164893; CTA
ILSSDAVAITW

SEQ ID NO: 80231 - protein, 9 aa, Homo sapiens
  misc_feature: Table A; Target 80231; HLA-A*02:01; SLC7A13; ENSG00000164893; CTA
ILTSLIDLI

SEQ ID NO: 80232 - protein, 9 aa, Homo sapiens
  misc_feature: Table A; Target 80232; HLA-A*02:04; SLC7A13; ENSG00000164893; CTA
ILTSLIDLI

SEQ ID NO: 80233 - protein, 9 aa, Homo sapiens
  misc_feature: Table A; Target 80233; HLA-B*13:02; SLC7A13; ENSG00000164893; CTA
ILTSLIDLI

SEQ ID NO: 80234 - protein, 10 aa, Homo sapiens
  misc_feature: Table A; Target 80234; HLA-A*02:03; SLC7A13; ENSG00000164893; CTA
ILTSRGVKEV

SEQ ID NO: 80235 - protein, 10 aa, Homo sapiens
  misc_feature: Table A; Target 80235; HLA-A*02:07; SLC7A13; ENSG00000164893; CTA
IMPFAISTSL

SEQ ID NO: 80236 - protein, 10 aa, Homo sapiens
  misc_feature: Table A; Target 80236; HLA-C*01:02; SLC7A13; ENSG00000164893; CTA
IMPFAISTSL

SEQ ID NO: 80237 - protein, 11 aa, Homo sapiens
  misc_feature: Table A; Target 80237; HLA-A*24:02; SLC7A13; ENSG00000164893; CTA
IMPFAISTSLF

SEQ ID NO: 80238 - protein, 9 aa, Homo sapiens
  misc_feature: Table A; Target 80238; HLA-B*07:02; SLC7A13; ENSG00000164893; CTA
IPKCIFTAL

SEQ ID NO: 80239 - protein, 9 aa, Homo sapiens
  misc_feature: Table A; Target 80239; HLA-B*08:01; SLC7A13; ENSG00000164893; CTA
IPKCIFTAL

SEQ ID NO: 80240 - protein, 9 aa, Homo sapiens
  misc_feature: Table A; Target 80240; HLA-C*07:02; SLC7A13; ENSG00000164893; CTA
IPKCIFTAL

SEQ ID NO: 80241 - protein, 8 aa, Homo sapiens
  misc_feature: Table A; Target 80241; HLA-B*51:01; SLC7A13; ENSG00000164893; CTA
IPLIHFKI

SEQ ID NO: 80242 - protein, 9 aa, Homo sapiens
  misc_feature: Table A; Target 80242; HLA-B*51:01; SLC7A13; ENSG00000164893; CTA
IPLVKSPNV

SEQ ID NO: 80243 - protein, 9 aa, Homo sapiens
  misc_feature: Table A; Target 80243; HLA-B*54:01; SLC7A13; ENSG00000164893; CTA
IPLVKSPNV

SEQ ID NO: 80244 - protein, 9 aa, Homo sapiens
  misc_feature: Table A; Target 80244; HLA-B*56:01; SLC7A13; ENSG00000164893; CTA
IPLVKSPNV

SEQ ID NO: 80245 - protein, 9 aa, Homo sapiens
  misc_feature: Table A; Target 80245; HLA-B*35:01; SLC7A13; ENSG00000164893; CTA
IPYKVFLSF

SEQ ID NO: 80246 - protein, 9 aa, Homo sapiens
  misc_feature: Table A; Target 80246; HLA-B*51:01; SLC7A13; ENSG00000164893; CTA
IPYKVFLSF

SEQ ID NO: 80247 - protein, 9 aa, Homo sapiens
  misc_feature: Table A; Target 80247; HLA-B*54:01; SLC7A13; ENSG00000164893; CTA
IPYKVFLSF

SEQ ID NO: 80248 - protein, 8 aa, Homo sapiens
  misc_feature: Table A; Target 80248; HLA-A*30:02; SLC7A13; ENSG00000164893; CTA
IQAIFQGY

SEQ ID NO: 80249 - protein, 8 aa, Homo sapiens
  misc_feature: Table A; Target 80249; HLA-B*15:01; SLC7A13; ENSG00000164893; CTA
IQAIFQGY

SEQ ID NO: 80250 - protein, 8 aa, Homo sapiens
  misc_feature: Table A; Target 80250; HLA-B*15:03; SLC7A13; ENSG00000164893; CTA
IQAIFQGY

SEQ ID NO: 80251 - protein, 8 aa, Homo sapiens
  misc_feature: Table A; Target 80251; HLA-B*18:01; SLC7A13; ENSG00000164893; CTA
IQAIFQGY

SEQ ID NO: 80252 - protein, 8 aa, Homo sapiens
  misc_feature: Table A; Target 80252; HLA-C*07:04; SLC7A13; ENSG00000164893; CTA
IQAIFQGY

SEQ ID NO: 80253 - protein, 8 aa, Homo sapiens
  misc_feature: Table A; Target 80253; HLA-C*16:04; SLC7A13; ENSG00000164893; CTA
IQAIFQGY

SEQ ID NO: 80254 - protein, 9 aa, Homo sapiens
  misc_feature: Table A; Target 80254; HLA-B*15:01; SLC7A13; ENSG00000164893; CTA
IQAIFQGYF

SEQ ID NO: 80255 - protein, 9 aa, Homo sapiens
  misc_feature: Table A; Target 80255; HLA-B*15:03; SLC7A13; ENSG00000164893; CTA
IQAIFQGYF

SEQ ID NO: 80256 - protein, 9 aa, Homo sapiens
  misc_feature: Table A; Target 80256; HLA-C*16:04; SLC7A13; ENSG00000164893; CTA
IQAIFQGYF

SEQ ID NO: 80257 - protein, 10 aa, Homo sapiens
  misc_feature: Table A; Target 80257; HLA-A*01:01; SLC7A13; ENSG00000164893; CTA
ISFPCSGAQY

SEQ ID NO: 80258 - protein, 10 aa, Homo sapiens
  misc_feature: Table A; Target 80258; HLA-A*30:02; SLC7A13; ENSG00000164893; CTA
ISFPCSGAQY

SEQ ID NO: 80259 - protein, 10 aa, Homo sapiens
  misc_feature: Table A; Target 80259; HLA-B*15:01; SLC7A13; ENSG00000164893; CTA
ISFPCSGAQY

SEQ ID NO: 80260 - protein, 10 aa, Homo sapiens
  misc_feature: Table A; Target 80260; HLA-B*15:03; SLC7A13; ENSG00000164893; CTA
ISFPCSGAQY

SEQ ID NO: 80261 - protein, 10 aa, Homo sapiens
  misc_feature: Table A; Target 80261; HLA-B*46:01; SLC7A13; ENSG00000164893; CTA
ISFPCSGAQY

SEQ ID NO: 80262 - protein, 10 aa, Homo sapiens
  misc_feature: Table A; Target 80262; HLA-B*58:01; SLC7A13; ENSG00000164893; CTA
ISFPCSGAQY

SEQ ID NO: 80263 - protein, 11 aa, Homo sapiens
  misc_feature: Table A; Target 80263; HLA-A*01:01; SLC7A13; ENSG00000164893; CTA
ISFPCSGAQYY

SEQ ID NO: 80264 - protein, 11 aa, Homo sapiens
  misc_feature: Table A; Target 80264; HLA-A*29:02; SLC7A13; ENSG00000164893; CTA
ISFPCSGAQYY

SEQ ID NO: 80265 - protein, 11 aa, Homo sapiens
  misc_feature: Table A; Target 80265; HLA-A*30:02; SLC7A13; ENSG00000164893; CTA
ISFPCSGAQYY

SEQ ID NO: 80266 - protein, 11 aa, Homo sapiens
  misc_feature: Table A; Target 80266; HLA-B*57:01; SLC7A13; ENSG00000164893; CTA
ISFPCSGAQYY

SEQ ID NO: 80267 - protein, 9 aa, Homo sapiens
  misc_feature: Table A; Target 80267; HLA-A*23:01; SLC7A13; ENSG00000164893; CTA
ISHLIQAIF

SEQ ID NO: 80268 - protein, 9 aa, Homo sapiens
  misc_feature: Table A; Target 80268; HLA-A*24:02; SLC7A13; ENSG00000164893; CTA
ISHLIQAIF

SEQ ID NO: 80269 - protein, 9 aa, Homo sapiens
  misc_feature: Table A; Target 80269; HLA-B*57:01; SLC7A13; ENSG00000164893; CTA
ISHLIQAIF

SEQ ID NO: 80270 - protein, 9 aa, Homo sapiens
  misc_feature: Table A; Target 80270; HLA-B*58:01; SLC7A13; ENSG00000164893; CTA
ISHLIQAIF

SEQ ID NO: 80271 - protein, 8 aa, Homo sapiens
  misc_feature: Table A; Target 80271; HLA-A*23:01; SLC7A13; ENSG00000164893; CTA
ISLTGVVF

SEQ ID NO: 80272 - protein, 8 aa, Homo sapiens
  misc_feature: Table A; Target 80272; HLA-B*15:03; SLC7A13; ENSG00000164893; CTA
ISLTGVVF

SEQ ID NO: 80273 - protein, 8 aa, Homo sapiens
  misc_feature: Table A; Target 80273; HLA-B*46:01; SLC7A13; ENSG00000164893; CTA
ISLTGVVF

SEQ ID NO: 80274 - protein, 8 aa, Homo sapiens
  misc_feature: Table A; Target 80274; HLA-B*57:01; SLC7A13; ENSG00000164893; CTA
ISLTGVVF

SEQ ID NO: 80275 - protein, 8 aa, Homo sapiens
  misc_feature: Table A; Target 80275; HLA-B*58:01; SLC7A13; ENSG00000164893; CTA
ISLTGVVF

SEQ ID NO: 80276 - protein, 8 aa, Homo sapiens
  misc_feature: Table A; Target 80276; HLA-C*03:04; SLC7A13; ENSG00000164893; CTA
ISLTGVVF

SEQ ID NO: 80277 - protein, 8 aa, Homo sapiens
  misc_feature: Table A; Target 80277; HLA-C*14:02; SLC7A13; ENSG00000164893; CTA
ISLTGVVF

SEQ ID NO: 80278 - protein, 8 aa, Homo sapiens
  misc_feature: Table A; Target 80278; HLA-C*16:01; SLC7A13; ENSG00000164893; CTA
ISLTGVVF

SEQ ID NO: 80279 - protein, 9 aa, Homo sapiens
  misc_feature: Table A; Target 80279; HLA-A*23:01; SLC7A13; ENSG00000164893; CTA
ISLTGVVFL

SEQ ID NO: 80280 - protein, 9 aa, Homo sapiens
  misc_feature: Table A; Target 80280; HLA-B*58:01; SLC7A13; ENSG00000164893; CTA
ISLTGVVFL

SEQ ID NO: 80281 - protein, 9 aa, Homo sapiens
  misc_feature: Table A; Target 80281; HLA-A*23:01; SLC7A13; ENSG00000164893; CTA
ISTSLFSNL

SEQ ID NO: 80282 - protein, 9 aa, Homo sapiens
  misc_feature: Table A; Target 80282; HLA-A*24:02; SLC7A13; ENSG00000164893; CTA
ISTSLFSNL

SEQ ID NO: 80283 - protein, 9 aa, Homo sapiens
  misc_feature: Table A; Target 80283; HLA-B*58:01; SLC7A13; ENSG00000164893; CTA
ISTSLFSNL

SEQ ID NO: 80284 - protein, 9 aa, Homo sapiens
  misc_feature: Table A; Target 80284; HLA-C*16:02; SLC7A13; ENSG00000164893; CTA
ISTSLFSNL

SEQ ID NO: 80285 - protein, 8 aa, Homo sapiens
  misc_feature: Table A; Target 80285; HLA-A*31:01; SLC7A13; ENSG00000164893; CTA
IVGILTSR

SEQ ID NO: 80286 - protein, 8 aa, Homo sapiens
  misc_feature: Table A; Target 80286; HLA-A*33:01; SLC7A13; ENSG00000164893; CTA
IVGILTSR

SEQ ID NO: 80287 - protein, 8 aa, Homo sapiens
  misc_feature: Table A; Target 80287; HLA-A*33:03; SLC7A13; ENSG00000164893; CTA
IVGILTSR

SEQ ID NO: 80288 - protein, 8 aa, Homo sapiens
  misc_feature: Table A; Target 80288; HLA-C*07:06; SLC7A13; ENSG00000164893; CTA
IVGILTSR

SEQ ID NO: 80289 - protein, 9 aa, Homo sapiens
  misc_feature: Table A; Target 80289; HLA-A*02:01; SLC7A13; ENSG00000164893; CTA
IVIDVGLVV

SEQ ID NO: 80290 - protein, 9 aa, Homo sapiens
  misc_feature: Table A; Target 80290; HLA-A*02:03; SLC7A13; ENSG00000164893; CTA
IVIDVGLVV

SEQ ID NO: 80291 - protein, 9 aa, Homo sapiens
  misc_feature: Table A; Target 80291; HLA-A*02:07; SLC7A13; ENSG00000164893; CTA
IVIDVGLVV

SEQ ID NO: 80292 - protein, 9 aa, Homo sapiens
  misc_feature: Table A; Target 80292; HLA-A*23:01; SLC7A13; ENSG00000164893; CTA
IVIDVGLVV

SEQ ID NO: 80293 - protein, 9 aa, Homo sapiens
  misc_feature: Table A; Target 80293; HLA-A*26:01; SLC7A13; ENSG00000164893; CTA
IVIDVGLVV

SEQ ID NO: 80294 - protein, 9 aa, Homo sapiens
  misc_feature: Table A; Target 80294; HLA-A*30:01; SLC7A13; ENSG00000164893; CTA
IVIDVGLVV

SEQ ID NO: 80295 - protein, 9 aa, Homo sapiens
  misc_feature: Table A; Target 80295; HLA-A*32:01; SLC7A13; ENSG00000164893; CTA
IVIDVGLVV

SEQ ID NO: 80296 - protein, 9 aa, Homo sapiens
  misc_feature: Table A; Target 80296; HLA-A*68:02; SLC7A13; ENSG00000164893; CTA
IVIDVGLVV

SEQ ID NO: 80297 - protein, 9 aa, Homo sapiens
  misc_feature: Table A; Target 80297; HLA-B*13:02; SLC7A13; ENSG00000164893; CTA
IVIDVGLVV

SEQ ID NO: 80298 - protein, 9 aa, Homo sapiens
  misc_feature: Table A; Target 80298; HLA-B*35:03; SLC7A13; ENSG00000164893; CTA
IVIDVGLVV

SEQ ID NO: 80299 - protein, 9 aa, Homo sapiens
  misc_feature: Table A; Target 80299; HLA-B*46:01; SLC7A13; ENSG00000164893; CTA
IVIDVGLVV

SEQ ID NO: 80300 - protein, 9 aa, Homo sapiens
  misc_feature: Table A; Target 80300; HLA-B*49:01; SLC7A13; ENSG00000164893; CTA
IVIDVGLVV

SEQ ID NO: 80301 - protein, 9 aa, Homo sapiens
  misc_feature: Table A; Target 80301; HLA-C*02:02; SLC7A13; ENSG00000164893; CTA
IVIDVGLVV

SEQ ID NO: 80302 - protein, 9 aa, Homo sapiens
  misc_feature: Table A; Target 80302; HLA-C*03:03; SLC7A13; ENSG00000164893; CTA
IVIDVGLVV

SEQ ID NO: 80303 - protein, 9 aa, Homo sapiens
  misc_feature: Table A; Target 80303; HLA-C*03:04; SLC7A13; ENSG00000164893; CTA
IVIDVGLVV

SEQ ID NO: 80304 - protein, 9 aa, Homo sapiens
  misc_feature: Table A; Target 80304; HLA-C*05:01; SLC7A13; ENSG00000164893; CTA
IVIDVGLVV

SEQ ID NO: 80305 - protein, 10 aa, Homo sapiens
  misc_feature: Table A; Target 80305; HLA-A*02:01; SLC7A13; ENSG00000164893; CTA
IVIDVGLVVI

SEQ ID NO: 80306 - protein, 10 aa, Homo sapiens
  misc_feature: Table A; Target 80306; HLA-A*23:01; SLC7A13; ENSG00000164893; CTA
IVIDVGLVVI

SEQ ID NO: 80307 - protein, 10 aa, Homo sapiens
  misc_feature: Table A; Target 80307; HLA-A*25:01; SLC7A13; ENSG00000164893; CTA
IVIDVGLVVI

SEQ ID NO: 80308 - protein, 10 aa, Homo sapiens
  misc_feature: Table A; Target 80308; HLA-A*68:02; SLC7A13; ENSG00000164893; CTA
IVIDVGLVVI

SEQ ID NO: 80309 - protein, 8 aa, Homo sapiens
  misc_feature: Table A; Target 80309; HLA-C*14:02; SLC7A13; ENSG00000164893; CTA
IYLASQEG

SEQ ID NO: 80310 - protein, 10 aa, Homo sapiens
  misc_feature: Table A; Target 80310; HLA-A*23:01; SLC7A13; ENSG00000164893; CTA
IYLASQEGQL

SEQ ID NO: 80311 - protein, 10 aa, Homo sapiens
  misc_feature: Table A; Target 80311; HLA-C*14:02; SLC7A13; ENSG00000164893; CTA
IYLASQEGQL

SEQ ID NO: 80312 - protein, 9 aa, Homo sapiens
  misc_feature: Table A; Target 80312; HLA-A*29:02; SLC7A13; ENSG00000164893; CTA
KSPNVHYVY

SEQ ID NO: 80313 - protein, 9 aa, Homo sapiens
  misc_feature: Table A; Target 80313; HLA-A*30:02; SLC7A13; ENSG00000164893; CTA
KSPNVHYVY

SEQ ID NO: 80314 - protein, 9 aa, Homo sapiens
  misc_feature: Table A; Target 80314; HLA-A*32:01; SLC7A13; ENSG00000164893; CTA
KSPNVHYVY

SEQ ID NO: 80315 - protein, 9 aa, Homo sapiens
  misc_feature: Table A; Target 80315; HLA-B*57:01; SLC7A13; ENSG00000164893; CTA
KSPNVHYVY

SEQ ID NO: 80316 - protein, 9 aa, Homo sapiens
  misc_feature: Table A; Target 80316; HLA-B*58:01; SLC7A13; ENSG00000164893; CTA
KSPNVHYVY

SEQ ID NO: 80317 - protein, 10 aa, Homo sapiens
  misc_feature: Table A; Target 80317; HLA-A*02:07; SLC7A13; ENSG00000164893; CTA
KSPNVHYVYV

SEQ ID NO: 80318 - protein, 8 aa, Homo sapiens
  misc_feature: Table A; Target 80318; HLA-B*08:01; SLC7A13; ENSG00000164893; CTA
LAIILTSL

SEQ ID NO: 80319 - protein, 8 aa, Homo sapiens
  misc_feature: Table A; Target 80319; HLA-B*46:01; SLC7A13; ENSG00000164893; CTA
LAIILTSL

SEQ ID NO: 80320 - protein, 8 aa, Homo sapiens
  misc_feature: Table A; Target 80320; HLA-B*51:01; SLC7A13; ENSG00000164893; CTA
LAIILTSL

SEQ ID NO: 80321 - protein, 8 aa, Homo sapiens
  misc_feature: Table A; Target 80321; HLA-C*03:03; SLC7A13; ENSG00000164893; CTA
LAIILTSL

SEQ ID NO: 80322 - protein, 8 aa, Homo sapiens
  misc_feature: Table A; Target 80322; HLA-C*03:04; SLC7A13; ENSG00000164893; CTA
LAIILTSL

SEQ ID NO: 80323 - protein, 9 aa, Homo sapiens
  misc_feature: Table A; Target 80323; HLA-B*51:01; SLC7A13; ENSG00000164893; CTA
LAIILTSLI

SEQ ID NO: 80324 - protein, 10 aa, Homo sapiens
  misc_feature: Table A; Target 80324; HLA-B*54:01; SLC7A13; ENSG00000164893; CTA
LAMTSTLCSA

SEQ ID NO: 80325 - protein, 8 aa, Homo sapiens
  misc_feature: Table A; Target 80325; HLA-B*51:01; SLC7A13; ENSG00000164893; CTA
LAYSCMNV

SEQ ID NO: 80326 - protein, 9 aa, Homo sapiens
  misc_feature: Table A; Target 80326; HLA-C*14:02; SLC7A13; ENSG00000164893; CTA
LFLGSGVVA

SEQ ID NO: 80327 - protein, 9 aa, Homo sapiens
  misc_feature: Table A; Target 80327; HLA-A*23:01; SLC7A13; ENSG00000164893; CTA
LFSNLLISI

SEQ ID NO: 80328 - protein, 9 aa, Homo sapiens
  misc_feature: Table A; Target 80328; HLA-A*29:02; SLC7A13; ENSG00000164893; CTA
LFYIPLIHF

SEQ ID NO: 80329 - protein, 9 aa, Homo sapiens
  misc_feature: Table A; Target 80329; HLA-B*07:02; SLC7A13; ENSG00000164893; CTA
LGSGVVAGQ

SEQ ID NO: 80330 - protein, 9 aa, Homo sapiens
  misc_feature: Table A; Target 80330; HLA-B*27:05; SLC7A13; ENSG00000164893; CTA
LGSGVVAGQ

SEQ ID NO: 80331 - protein, 9 aa, Homo sapiens
  misc_feature: Table A; Target 80331; HLA-C*06:02; SLC7A13; ENSG00000164893; CTA
LGSGVVAGQ

SEQ ID NO: 80332 - protein, 9 aa, Homo sapiens
  misc_feature: Table A; Target 80332; HLA-C*07:04; SLC7A13; ENSG00000164893; CTA
LGSGVVAGQ

SEQ ID NO: 80333 - protein, 11 aa, Homo sapiens
  misc_feature: Table A; Target 80333; HLA-C*03:04; SLC7A13; ENSG00000164893; CTA
LGSGVVAGQAL

SEQ ID NO: 80334 - protein, 9 aa, Homo sapiens
  misc_feature: Table A; Target 80334; HLA-A*02:07; SLC7A13; ENSG00000164893; CTA
LIDLINYIF

SEQ ID NO: 80335 - protein, 10 aa, Homo sapiens
  misc_feature: Table A; Target 80335; HLA-A*02:07; SLC7A13; ENSG00000164893; CTA
LIDLINYIFF

SEQ ID NO: 80336 - protein, 9 aa, Homo sapiens
  misc_feature: Table A; Target 80336; HLA-A*01:01; SLC7A13; ENSG00000164893; CTA
LIQAIFQGY

SEQ ID NO: 80337 - protein, 9 aa, Homo sapiens
  misc_feature: Table A; Target 80337; HLA-A*26:01; SLC7A13; ENSG00000164893; CTA
LIQAIFQGY

SEQ ID NO: 80338 - protein, 9 aa, Homo sapiens
  misc_feature: Table A; Target 80338; HLA-A*29:02; SLC7A13; ENSG00000164893; CTA
LIQAIFQGY

SEQ ID NO: 80339 - protein, 9 aa, Homo sapiens
  misc_feature: Table A; Target 80339; HLA-A*30:02; SLC7A13; ENSG00000164893; CTA
LIQAIFQGY

SEQ ID NO: 80340 - protein, 9 aa, Homo sapiens
  misc_feature: Table A; Target 80340; HLA-A*32:01; SLC7A13; ENSG00000164893; CTA
LIQAIFQGY

SEQ ID NO: 80341 - protein, 9 aa, Homo sapiens
  misc_feature: Table A; Target 80341; HLA-B*15:01; SLC7A13; ENSG00000164893; CTA
LIQAIFQGY

SEQ ID NO: 80342 - protein, 9 aa, Homo sapiens
  misc_feature: Table A; Target 80342; HLA-B*46:01; SLC7A13; ENSG00000164893; CTA
LIQAIFQGY

SEQ ID NO: 80343 - protein, 9 aa, Homo sapiens
  misc_feature: Table A; Target 80343; HLA-B*58:01; SLC7A13; ENSG00000164893; CTA
LIQAIFQGY

SEQ ID NO: 80344 - protein, 9 aa, Homo sapiens
  misc_feature: Table A; Target 80344; HLA-C*02:02; SLC7A13; ENSG00000164893; CTA
LIQAIFQGY

SEQ ID NO: 80345 - protein, 8 aa, Homo sapiens
  misc_feature: Table A; Target 80345; HLA-A*02:04; SLC7A13; ENSG00000164893; CTA
LLFYIPLI

SEQ ID NO: 80346 - protein, 10 aa, Homo sapiens
  misc_feature: Table A; Target 80346; HLA-A*02:04; SLC7A13; ENSG00000164893; CTA
LLFYIPLIHF

SEQ ID NO: 80347 - protein, 10 aa, Homo sapiens
  misc_feature: Table A; Target 80347; HLA-A*02:07; SLC7A13; ENSG00000164893; CTA
LLFYIPLIHF

SEQ ID NO: 80348 - protein, 10 aa, Homo sapiens
  misc_feature: Table A; Target 80348; HLA-A*02:03; SLC7A13; ENSG00000164893; CTA
LLINIIGAGI

SEQ ID NO: 80349 - protein, 10 aa, Homo sapiens
  misc_feature: Table A; Target 80349; HLA-A*02:04; SLC7A13; ENSG00000164893; CTA
LLINIIGAGI

SEQ ID NO: 80350 - protein, 8 aa, Homo sapiens
  misc_feature: Table A; Target 80350; HLA-A*02:04; SLC7A13; ENSG00000164893; CTA
LLVNISYL

SEQ ID NO: 80351 - protein, 11 aa, Homo sapiens
  misc_feature: Table A; Target 80351; HLA-A*02:04; SLC7A13; ENSG00000164893; CTA
LLVNISYLTVL

SEQ ID NO: 80352 - protein, 9 aa, Homo sapiens
  misc_feature: Table A; Target 80352; HLA-A*31:01; SLC7A13; ENSG00000164893; CTA
LMIGILRRR

SEQ ID NO: 80353 - protein, 8 aa, Homo sapiens
  misc_feature: Table A; Target 80353; HLA-B*51:01; SLC7A13; ENSG00000164893; CTA
LPDISHLI

SEQ ID NO: 80354 - protein, 10 aa, Homo sapiens
  misc_feature: Table A; Target 80354; HLA-B*54:01; SLC7A13; ENSG00000164893; CTA
LPDISHLIQA

SEQ ID NO: 80355 - protein, 10 aa, Homo sapiens
  misc_feature: Table A; Target 80355; HLA-B*56:01; SLC7A13; ENSG00000164893; CTA
LPDISHLIQA

SEQ ID NO: 80356 - protein, 8 aa, Homo sapiens
  misc_feature: Table A; Target 80356; HLA-B*08:01; SLC7A13; ENSG00000164893; CTA
LPKKCLAL

SEQ ID NO: 80357 - protein, 8 aa, Homo sapiens
  misc_feature: Table A; Target 80357; HLA-B*07:02; SLC7A13; ENSG00000164893; CTA
LPLLFNTL

SEQ ID NO: 80358 - protein, 8 aa, Homo sapiens
  misc_feature: Table A; Target 80358; HLA-B*08:01; SLC7A13; ENSG00000164893; CTA
LPLLFNTL

SEQ ID NO: 80359 - protein, 8 aa, Homo sapiens
  misc_feature: Table A; Target 80359; HLA-B*35:01; SLC7A13; ENSG00000164893; CTA
LPLLFNTL

SEQ ID NO: 80360 - protein, 8 aa, Homo sapiens
  misc_feature: Table A; Target 80360; HLA-B*35:03; SLC7A13; ENSG00000164893; CTA
LPLLFNTL

SEQ ID NO: 80361 - protein, 8 aa, Homo sapiens
  misc_feature: Table A; Target 80361; HLA-B*51:01; SLC7A13; ENSG00000164893; CTA
LPLLFNTL

SEQ ID NO: 80362 - protein, 8 aa, Homo sapiens
  misc_feature: Table A; Target 80362; HLA-B*54:01; SLC7A13; ENSG00000164893; CTA
LPLLFNTL

SEQ ID NO: 80363 - protein, 8 aa, Homo sapiens
  misc_feature: Table A; Target 80363; HLA-B*15:03; SLC7A13; ENSG00000164893; CTA
LPLVTVVY

SEQ ID NO: 80364 - protein, 8 aa, Homo sapiens
  misc_feature: Table A; Target 80364; HLA-B*18:01; SLC7A13; ENSG00000164893; CTA
LPLVTVVY

SEQ ID NO: 80365 - protein, 8 aa, Homo sapiens
  misc_feature: Table A; Target 80365; HLA-B*35:01; SLC7A13; ENSG00000164893; CTA
LPLVTVVY

SEQ ID NO: 80366 - protein, 8 aa, Homo sapiens
  misc_feature: Table A; Target 80366; HLA-B*51:01; SLC7A13; ENSG00000164893; CTA
LPLVTVVY

SEQ ID NO: 80367 - protein, 8 aa, Homo sapiens
  misc_feature: Table A; Target 80367; HLA-B*55:01; SLC7A13; ENSG00000164893; CTA
LPLVTVVY

SEQ ID NO: 80368 - protein, 8 aa, Homo sapiens
  misc_feature: Table A; Target 80368; HLA-C*03:03; SLC7A13; ENSG00000164893; CTA
LPLVTVVY

SEQ ID NO: 80369 - protein, 9 aa, Homo sapiens
  misc_feature: Table A; Target 80369; HLA-B*35:01; SLC7A13; ENSG00000164893; CTA
LPLVTVVYL

SEQ ID NO: 80370 - protein, 9 aa, Homo sapiens
  misc_feature: Table A; Target 80370; HLA-B*35:03; SLC7A13; ENSG00000164893; CTA
LPLVTVVYL

SEQ ID NO: 80371 - protein, 9 aa, Homo sapiens
  misc_feature: Table A; Target 80371; HLA-B*51:01; SLC7A13; ENSG00000164893; CTA
LPLVTVVYL

SEQ ID NO: 80372 - protein, 8 aa, Homo sapiens
  misc_feature: Table A; Target 80372; HLA-B*15:01; SLC7A13; ENSG00000164893; CTA
LQIASSVL

SEQ ID NO: 80373 - protein, 8 aa, Homo sapiens
  misc_feature: Table A; Target 80373; HLA-B*15:03; SLC7A13; ENSG00000164893; CTA
LQIASSVL

SEQ ID NO: 80374 - protein, 8 aa, Homo sapiens
  misc_feature: Table A; Target 80374; HLA-B*39:01; SLC7A13; ENSG00000164893; CTA
LQIASSVL

SEQ ID NO: 80375 - protein, 8 aa, Homo sapiens
  misc_feature: Table A; Target 80375; HLA-C*03:03; SLC7A13; ENSG00000164893; CTA
LQIASSVL

SEQ ID NO: 80376 - protein, 8 aa, Homo sapiens
  misc_feature: Table A; Target 80376; HLA-C*03:04; SLC7A13; ENSG00000164893; CTA
LQIASSVL

SEQ ID NO: 80377 - protein, 9 aa, Homo sapiens
  misc_feature: Table A; Target 80377; HLA-A*11:01; SLC7A13; ENSG00000164893; CTA
LQIASSVLK

SEQ ID NO: 80378 - protein, 10 aa, Homo sapiens
  misc_feature: Table A; Target 80378; HLA-A*02:03; SLC7A13; ENSG00000164893; CTA
LQIASSVLKV

SEQ ID NO: 80379 - protein, 10 aa, Homo sapiens
  misc_feature: Table A; Target 80379; HLA-B*13:02; SLC7A13; ENSG00000164893; CTA
LQIASSVLKV

SEQ ID NO: 80380 - protein, 9 aa, Homo sapiens
  misc_feature: Table A; Target 80380; HLA-A*02:03; SLC7A13; ENSG00000164893; CTA
LSFISLTGV

SEQ ID NO: 80381 - protein, 9 aa, Homo sapiens
  misc_feature: Table A; Target 80381; HLA-A*68:02; SLC7A13; ENSG00000164893; CTA
LSFISLTGV

SEQ ID NO: 80382 - protein, 11 aa, Homo sapiens
  misc_feature: Table A; Target 80382; HLA-B*57:01; SLC7A13; ENSG00000164893; CTA
LSFISLTGVVF

SEQ ID NO: 80383 - protein, 9 aa, Homo sapiens
  misc_feature: Table A; Target 80383; HLA-C*12:03; SLC7A13; ENSG00000164893; CTA
LSFPLATIV

SEQ ID NO: 80384 - protein, 10 aa, Homo sapiens
  misc_feature: Table A; Target 80384; HLA-A*23:01; SLC7A13; ENSG00000164893; CTA
LSSDAVAITW

SEQ ID NO: 80385 - protein, 10 aa, Homo sapiens
  misc_feature: Table A; Target 80385; HLA-A*25:01; SLC7A13; ENSG00000164893; CTA
LSSDAVAITW

SEQ ID NO: 80386 - protein, 10 aa, Homo sapiens
  misc_feature: Table A; Target 80386; HLA-B*27:02; SLC7A13; ENSG00000164893; CTA
LSSDAVAITW

SEQ ID NO: 80387 - protein, 10 aa, Homo sapiens
  misc_feature: Table A; Target 80387; HLA-B*44:02; SLC7A13; ENSG00000164893; CTA
LSSDAVAITW

SEQ ID NO: 80388 - protein, 10 aa, Homo sapiens
  misc_feature: Table A; Target 80388; HLA-B*44:03; SLC7A13; ENSG00000164893; CTA
LSSDAVAITW

SEQ ID NO: 80389 - protein, 10 aa, Homo sapiens
  misc_feature: Table A; Target 80389; HLA-B*57:01; SLC7A13; ENSG00000164893; CTA
LSSDAVAITW

SEQ ID NO: 80390 - protein, 10 aa, Homo sapiens
  misc_feature: Table A; Target 80390; HLA-B*58:01; SLC7A13; ENSG00000164893; CTA
LSSDAVAITW

SEQ ID NO: 80391 - protein, 10 aa, Homo sapiens
  misc_feature: Table A; Target 80391; HLA-C*07:06; SLC7A13; ENSG00000164893; CTA
LSSDAVAITW

SEQ ID NO: 80392 - protein, 10 aa, Homo sapiens
  misc_feature: Table A; Target 80392; HLA-C*16:04; SLC7A13; ENSG00000164893; CTA
LSSDAVAITW

SEQ ID NO: 80393 - protein, 10 aa, Homo sapiens
  misc_feature: Table A; Target 80393; HLA-A*01:01; SLC7A13; ENSG00000164893; CTA
LTSLIDLINY

SEQ ID NO: 80394 - protein, 11 aa, Homo sapiens
  misc_feature: Table A; Target 80394; HLA-B*57:01; SLC7A13; ENSG00000164893; CTA
LTSRGVKEVTW

SEQ ID NO: 80395 - protein, 9 aa, Homo sapiens
  misc_feature: Table A; Target 80395; HLA-A*30:02; SLC7A13; ENSG00000164893; CTA
LVKSPNVHY

SEQ ID NO: 80396 - protein, 9 aa, Homo sapiens
  misc_feature: Table A; Target 80396; HLA-A*32:01; SLC7A13; ENSG00000164893; CTA
LVKSPNVHY

SEQ ID NO: 80397 - protein, 9 aa, Homo sapiens
  misc_feature: Table A; Target 80397; HLA-B*15:01; SLC7A13; ENSG00000164893; CTA
LVKSPNVHY

SEQ ID NO: 80398 - protein, 9 aa, Homo sapiens
  misc_feature: Table A; Target 80398; HLA-B*46:01; SLC7A13; ENSG00000164893; CTA
LVKSPNVHY

SEQ ID NO: 80399 - protein, 9 aa, Homo sapiens
  misc_feature: Table A; Target 80399; HLA-C*02:02; SLC7A13; ENSG00000164893; CTA
LVKSPNVHY

SEQ ID NO: 80400 - protein, 9 aa, Homo sapiens
  misc_feature: Table A; Target 80400; HLA-C*07:04; SLC7A13; ENSG00000164893; CTA
LVKSPNVHY

SEQ ID NO: 80401 - protein, 9 aa, Homo sapiens
  misc_feature: Table A; Target 80401; HLA-C*12:03; SLC7A13; ENSG00000164893; CTA
LVKSPNVHY

SEQ ID NO: 80402 - protein, 11 aa, Homo sapiens
  misc_feature: Table A; Target 80402; HLA-A*29:02; SLC7A13; ENSG00000164893; CTA
LVKSPNVHYVY

SEQ ID NO: 80403 - protein, 9 aa, Homo sapiens
  misc_feature: Table A; Target 80403; HLA-A*01:01; SLC7A13; ENSG00000164893; CTA
LVLSGLLFY

SEQ ID NO: 80404 - protein, 9 aa, Homo sapiens
  misc_feature: Table A; Target 80404; HLA-A*29:02; SLC7A13; ENSG00000164893; CTA
LVLSGLLFY

SEQ ID NO: 80405 - protein, 10 aa, Homo sapiens
  misc_feature: Table A; Target 80405; HLA-A*02:04; SLC7A13; ENSG00000164893; CTA
LVLSGLLFYI

SEQ ID NO: 80406 - protein, 9 aa, Homo sapiens
  misc_feature: Table A; Target 80406; HLA-B*51:01; SLC7A13; ENSG00000164893; CTA
LVNISYLTV

SEQ ID NO: 80407 - protein, 8 aa, Homo sapiens
  misc_feature: Table A; Target 80407; HLA-B*54:01; SLC7A13; ENSG00000164893; CTA
MPFAISTS

SEQ ID NO: 80408 - protein, 9 aa, Homo sapiens
  misc_feature: Table A; Target 80408; HLA-A*23:01; SLC7A13; ENSG00000164893; CTA
MPFAISTSL

SEQ ID NO: 80409 - protein, 9 aa, Homo sapiens
  misc_feature: Table A; Target 80409; HLA-A*25:01; SLC7A13; ENSG00000164893; CTA
MPFAISTSL

SEQ ID NO: 80410 - protein, 9 aa, Homo sapiens
  misc_feature: Table A; Target 80410; HLA-A*30:01; SLC7A13; ENSG00000164893; CTA
MPFAISTSL

SEQ ID NO: 80411 - protein, 9 aa, Homo sapiens
  misc_feature: Table A; Target 80411; HLA-B*07:02; SLC7A13; ENSG00000164893; CTA
MPFAISTSL

SEQ ID NO: 80412 - protein, 9 aa, Homo sapiens
  misc_feature: Table A; Target 80412; HLA-B*08:01; SLC7A13; ENSG00000164893; CTA
MPFAISTSL

SEQ ID NO: 80413 - protein, 9 aa, Homo sapiens
  misc_feature: Table A; Target 80413; HLA-B*15:03; SLC7A13; ENSG00000164893; CTA
MPFAISTSL

SEQ ID NO: 80414 - protein, 9 aa, Homo sapiens
  misc_feature: Table A; Target 80414; HLA-B*18:01; SLC7A13; ENSG00000164893; CTA
MPFAISTSL

SEQ ID NO: 80415 - protein, 9 aa, Homo sapiens
  misc_feature: Table A; Target 80415; HLA-B*35:01; SLC7A13; ENSG00000164893; CTA
MPFAISTSL

SEQ ID NO: 80416 - protein, 9 aa, Homo sapiens
  misc_feature: Table A; Target 80416; HLA-B*35:03; SLC7A13; ENSG00000164893; CTA
MPFAISTSL

SEQ ID NO: 80417 - protein, 9 aa, Homo sapiens
  misc_feature: Table A; Target 80417; HLA-B*39:01; SLC7A13; ENSG00000164893; CTA
MPFAISTSL

SEQ ID NO: 80418 - protein, 9 aa, Homo sapiens
  misc_feature: Table A; Target 80418; HLA-B*46:01; SLC7A13; ENSG00000164893; CTA
MPFAISTSL

SEQ ID NO: 80419 - protein, 9 aa, Homo sapiens
  misc_feature: Table A; Target 80419; HLA-B*51:01; SLC7A13; ENSG00000164893; CTA
MPFAISTSL

SEQ ID NO: 80420 - protein, 9 aa, Homo sapiens
  misc_feature: Table A; Target 80420; HLA-B*54:01; SLC7A13; ENSG00000164893; CTA
MPFAISTSL

SEQ ID NO: 80421 - protein, 9 aa, Homo sapiens
  misc_feature: Table A; Target 80421; HLA-B*55:01; SLC7A13; ENSG00000164893; CTA
MPFAISTSL

SEQ ID NO: 80422 - protein, 9 aa, Homo sapiens
  misc_feature: Table A; Target 80422; HLA-B*56:01; SLC7A13; ENSG00000164893; CTA
MPFAISTSL

SEQ ID NO: 80423 - protein, 9 aa, Homo sapiens
  misc_feature: Table A; Target 80423; HLA-C*02:02; SLC7A13; ENSG00000164893; CTA
MPFAISTSL

SEQ ID NO: 80424 - protein, 9 aa, Homo sapiens
  misc_feature: Table A; Target 80424; HLA-C*03:03; SLC7A13; ENSG00000164893; CTA
MPFAISTSL

SEQ ID NO: 80425 - protein, 9 aa, Homo sapiens
  misc_feature: Table A; Target 80425; HLA-C*03:04; SLC7A13; ENSG00000164893; CTA
MPFAISTSL

SEQ ID NO: 80426 - protein, 9 aa, Homo sapiens
  misc_feature: Table A; Target 80426; HLA-C*07:02; SLC7A13; ENSG00000164893; CTA
MPFAISTSL

SEQ ID NO: 80427 - protein, 9 aa, Homo sapiens
  misc_feature: Table A; Target 80427; HLA-C*14:02; SLC7A13; ENSG00000164893; CTA
MPFAISTSL

SEQ ID NO: 80428 - protein, 10 aa, Homo sapiens
  misc_feature: Table A; Target 80428; HLA-B*35:01; SLC7A13; ENSG00000164893; CTA
MPFAISTSLF

SEQ ID NO: 80429 - protein, 10 aa, Homo sapiens
  misc_feature: Table A; Target 80429; HLA-B*35:03; SLC7A13; ENSG00000164893; CTA
MPFAISTSLF

SEQ ID NO: 80430 - protein, 10 aa, Homo sapiens
  misc_feature: Table A; Target 80430; HLA-B*51:01; SLC7A13; ENSG00000164893; CTA
MPFAISTSLF

SEQ ID NO: 80431 - protein, 10 aa, Homo sapiens
  misc_feature: Table A; Target 80431; HLA-B*54:01; SLC7A13; ENSG00000164893; CTA
MPFAISTSLF

SEQ ID NO: 80432 - protein, 11 aa, Homo sapiens
  misc_feature: Table A; Target 80432; HLA-B*54:01; SLC7A13; ENSG00000164893; CTA
MPFAISTSLFS

SEQ ID NO: 80433 - protein, 9 aa, Homo sapiens
  misc_feature: Table A; Target 80433; HLA-A*02:03; SLC7A13; ENSG00000164893; CTA
NIIGAGIFV

SEQ ID NO: 80434 - protein, 9 aa, Homo sapiens
  misc_feature: Table A; Target 80434; HLA-A*68:02; SLC7A13; ENSG00000164893; CTA
NIIGAGIFV

SEQ ID NO: 80435 - protein, 9 aa, Homo sapiens
  misc_feature: Table A; Target 80435; HLA-B*54:01; SLC7A13; ENSG00000164893; CTA
NSHSSPFTA

SEQ ID NO: 80436 - protein, 9 aa, Homo sapiens
  misc_feature: Table A; Target 80436; HLA-A*25:01; SLC7A13; ENSG00000164893; CTA
NVGVSLCVW

SEQ ID NO: 80437 - protein, 10 aa, Homo sapiens
  misc_feature: Table A; Target 80437; HLA-A*24:02; SLC7A13; ENSG00000164893; CTA
NYIFFTGSLW

SEQ ID NO: 80438 - protein, 10 aa, Homo sapiens
  misc_feature: Table A; Target 80438; HLA-A*29:02; SLC7A13; ENSG00000164893; CTA
NYIFFTGSLW

SEQ ID NO: 80439 - protein, 9 aa, Homo sapiens
  misc_feature: Table A; Target 80439; HLA-A*23:01; SLC7A13; ENSG00000164893; CTA
PFAISTSLF

SEQ ID NO: 80440 - protein, 9 aa, Homo sapiens
  misc_feature: Table A; Target 80440; HLA-A*24:02; SLC7A13; ENSG00000164893; CTA
PFAISTSLF

SEQ ID NO: 80441 - protein, 9 aa, Homo sapiens
  misc_feature: Table A; Target 80441; HLA-B*54:01; SLC7A13; ENSG00000164893; CTA
QAIFQGYFA

SEQ ID NO: 80442 - protein, 10 aa, Homo sapiens
  misc_feature: Table A; Target 80442; HLA-A*29:02; SLC7A13; ENSG00000164893; CTA
QAIFQGYFAY

SEQ ID NO: 80443 - protein, 10 aa, Homo sapiens
  misc_feature: Table A; Target 80443; HLA-A*30:02; SLC7A13; ENSG00000164893; CTA
QAIFQGYFAY

SEQ ID NO: 80444 - protein, 10 aa, Homo sapiens
  misc_feature: Table A; Target 80444; HLA-B*35:01; SLC7A13; ENSG00000164893; CTA
QAIFQGYFAY

SEQ ID NO: 80445 - protein, 8 aa, Homo sapiens
  misc_feature: Table A; Target 80445; HLA-A*30:02; SLC7A13; ENSG00000164893; CTA
QALLLAEY

SEQ ID NO: 80446 - protein, 8 aa, Homo sapiens
  misc_feature: Table A; Target 80446; HLA-B*15:01; SLC7A13; ENSG00000164893; CTA
QALLLAEY

SEQ ID NO: 80447 - protein, 8 aa, Homo sapiens
  misc_feature: Table A; Target 80447; HLA-B*15:03; SLC7A13; ENSG00000164893; CTA
QALLLAEY

SEQ ID NO: 80448 - protein, 8 aa, Homo sapiens
  misc_feature: Table A; Target 80448; HLA-B*18:01; SLC7A13; ENSG00000164893; CTA
QALLLAEY

SEQ ID NO: 80449 - protein, 8 aa, Homo sapiens
  misc_feature: Table A; Target 80449; HLA-B*35:01; SLC7A13; ENSG00000164893; CTA
QALLLAEY

SEQ ID NO: 80450 - protein, 8 aa, Homo sapiens
  misc_feature: Table A; Target 80450; HLA-B*46:01; SLC7A13; ENSG00000164893; CTA
QALLLAEY

SEQ ID NO: 80451 - protein, 8 aa, Homo sapiens
  misc_feature: Table A; Target 80451; HLA-C*07:01; SLC7A13; ENSG00000164893; CTA
QALLLAEY

SEQ ID NO: 80452 - protein, 8 aa, Homo sapiens
  misc_feature: Table A; Target 80452; HLA-C*14:02; SLC7A13; ENSG00000164893; CTA
QALLLAEY

SEQ ID NO: 80453 - protein, 8 aa, Homo sapiens
  misc_feature: Table A; Target 80453; HLA-A*30:01; SLC7A13; ENSG00000164893; CTA
QEGQLPLL

SEQ ID NO: 80454 - protein, 8 aa, Homo sapiens
  misc_feature: Table A; Target 80454; HLA-B*18:01; SLC7A13; ENSG00000164893; CTA
QEGQLPLL

SEQ ID NO: 80455 - protein, 8 aa, Homo sapiens
  misc_feature: Table A; Target 80455; HLA-B*40:01; SLC7A13; ENSG00000164893; CTA
QEGQLPLL

SEQ ID NO: 80456 - protein, 8 aa, Homo sapiens
  misc_feature: Table A; Target 80456; HLA-B*44:02; SLC7A13; ENSG00000164893; CTA
QEGQLPLL

SEQ ID NO: 80457 - protein, 8 aa, Homo sapiens
  misc_feature: Table A; Target 80457; HLA-B*44:03; SLC7A13; ENSG00000164893; CTA
QEGQLPLL

SEQ ID NO: 80458 - protein, 8 aa, Homo sapiens
  misc_feature: Table A; Target 80458; HLA-B*49:01; SLC7A13; ENSG00000164893; CTA
QEGQLPLL

SEQ ID NO: 80459 - protein, 9 aa, Homo sapiens
  misc_feature: Table A; Target 80459; HLA-A*24:02; SLC7A13; ENSG00000164893; CTA
QEGQLPLLF

SEQ ID NO: 80460 - protein, 9 aa, Homo sapiens
  misc_feature: Table A; Target 80460; HLA-A*30:01; SLC7A13; ENSG00000164893; CTA
QEGQLPLLF

SEQ ID NO: 80461 - protein, 9 aa, Homo sapiens
  misc_feature: Table A; Target 80461; HLA-B*18:01; SLC7A13; ENSG00000164893; CTA
QEGQLPLLF

SEQ ID NO: 80462 - protein, 9 aa, Homo sapiens
  misc_feature: Table A; Target 80462; HLA-B*27:02; SLC7A13; ENSG00000164893; CTA
QEGQLPLLF

SEQ ID NO: 80463 - protein, 9 aa, Homo sapiens
  misc_feature: Table A; Target 80463; HLA-B*37:01; SLC7A13; ENSG00000164893; CTA
QEGQLPLLF

SEQ ID NO: 80464 - protein, 9 aa, Homo sapiens
  misc_feature: Table A; Target 80464; HLA-B*38:01; SLC7A13; ENSG00000164893; CTA
QEGQLPLLF

SEQ ID NO: 80465 - protein, 9 aa, Homo sapiens
  misc_feature: Table A; Target 80465; HLA-B*40:01; SLC7A13; ENSG00000164893; CTA
QEGQLPLLF

SEQ ID NO: 80466 - protein, 9 aa, Homo sapiens
  misc_feature: Table A; Target 80466; HLA-B*44:02; SLC7A13; ENSG00000164893; CTA
QEGQLPLLF

SEQ ID NO: 80467 - protein, 9 aa, Homo sapiens
  misc_feature: Table A; Target 80467; HLA-B*44:03; SLC7A13; ENSG00000164893; CTA
QEGQLPLLF

SEQ ID NO: 80468 - protein, 9 aa, Homo sapiens
  misc_feature: Table A; Target 80468; HLA-B*49:01; SLC7A13; ENSG00000164893; CTA
QEGQLPLLF

SEQ ID NO: 80469 - protein, 9 aa, Homo sapiens
  misc_feature: Table A; Target 80469; HLA-C*16:04; SLC7A13; ENSG00000164893; CTA
QEGQLPLLF

SEQ ID NO: 80470 - protein, 9 aa, Homo sapiens
  misc_feature: Table A; Target 80470; HLA-A*29:02; SLC7A13; ENSG00000164893; CTA
QEPNLSIPY

SEQ ID NO: 80471 - protein, 9 aa, Homo sapiens
  misc_feature: Table A; Target 80471; HLA-B*18:01; SLC7A13; ENSG00000164893; CTA
QEPNLSIPY

SEQ ID NO: 80472 - protein, 9 aa, Homo sapiens
  misc_feature: Table A; Target 80472; HLA-B*44:02; SLC7A13; ENSG00000164893; CTA
QEPNLSIPY

SEQ ID NO: 80473 - protein, 9 aa, Homo sapiens
  misc_feature: Table A; Target 80473; HLA-B*44:03; SLC7A13; ENSG00000164893; CTA
QEPNLSIPY

SEQ ID NO: 80474 - protein, 9 aa, Homo sapiens
  misc_feature: Table A; Target 80474; HLA-C*07:01; SLC7A13; ENSG00000164893; CTA
QEPNLSIPY

SEQ ID NO: 80475 - protein, 8 aa, Homo sapiens
  misc_feature: Table A; Target 80475; HLA-A*03:02; SLC7A13; ENSG00000164893; CTA
QIASSVLK

SEQ ID NO: 80476 - protein, 8 aa, Homo sapiens
  misc_feature: Table A; Target 80476; HLA-A*11:01; SLC7A13; ENSG00000164893; CTA
QIASSVLK

SEQ ID NO: 80477 - protein, 9 aa, Homo sapiens
  misc_feature: Table A; Target 80477; HLA-A*02:01; SLC7A13; ENSG00000164893; CTA
QIASSVLKV

SEQ ID NO: 80478 - protein, 9 aa, Homo sapiens
  misc_feature: Table A; Target 80478; HLA-A*02:03; SLC7A13; ENSG00000164893; CTA
QIASSVLKV

SEQ ID NO: 80479 - protein, 9 aa, Homo sapiens
  misc_feature: Table A; Target 80479; HLA-A*02:04; SLC7A13; ENSG00000164893; CTA
QIASSVLKV

SEQ ID NO: 80480 - protein, 9 aa, Homo sapiens
  misc_feature: Table A; Target 80480; HLA-A*02:07; SLC7A13; ENSG00000164893; CTA
QIASSVLKV

SEQ ID NO: 80481 - protein, 9 aa, Homo sapiens
  misc_feature: Table A; Target 80481; HLA-A*03:01; SLC7A13; ENSG00000164893; CTA
QIASSVLKV

SEQ ID NO: 80482 - protein, 9 aa, Homo sapiens
  misc_feature: Table A; Target 80482; HLA-A*26:01; SLC7A13; ENSG00000164893; CTA
QIASSVLKV

SEQ ID NO: 80483 - protein, 9 aa, Homo sapiens
  misc_feature: Table A; Target 80483; HLA-A*68:02; SLC7A13; ENSG00000164893; CTA
QIASSVLKV

SEQ ID NO: 80484 - protein, 9 aa, Homo sapiens
  misc_feature: Table A; Target 80484; HLA-B*13:02; SLC7A13; ENSG00000164893; CTA
QIASSVLKV

SEQ ID NO: 80485 - protein, 9 aa, Homo sapiens
  misc_feature: Table A; Target 80485; HLA-B*51:01; SLC7A13; ENSG00000164893; CTA
QIASSVLKV

SEQ ID NO: 80486 - protein, 9 aa, Homo sapiens
  misc_feature: Table A; Target 80486; HLA-B*55:01; SLC7A13; ENSG00000164893; CTA
QIASSVLKV

SEQ ID NO: 80487 - protein, 9 aa, Homo sapiens
  misc_feature: Table A; Target 80487; HLA-C*02:02; SLC7A13; ENSG00000164893; CTA
QIASSVLKV

SEQ ID NO: 80488 - protein, 9 aa, Homo sapiens
  misc_feature: Table A; Target 80488; HLA-C*06:02; SLC7A13; ENSG00000164893; CTA
QIASSVLKV

SEQ ID NO: 80489 - protein, 9 aa, Homo sapiens
  misc_feature: Table A; Target 80489; HLA-C*12:03; SLC7A13; ENSG00000164893; CTA
QIASSVLKV

SEQ ID NO: 80490 - protein, 9 aa, Homo sapiens
  misc_feature: Table A; Target 80490; HLA-C*16:02; SLC7A13; ENSG00000164893; CTA
QIASSVLKV

SEQ ID NO: 80491 - protein, 9 aa, Homo sapiens
  misc_feature: Table A; Target 80491; HLA-A*02:07; SLC7A13; ENSG00000164893; CTA
QLPLLFNTL

SEQ ID NO: 80492 - protein, 9 aa, Homo sapiens
  misc_feature: Table A; Target 80492; HLA-A*24:02; SLC7A13; ENSG00000164893; CTA
QLPLLFNTL

SEQ ID NO: 80493 - protein, 9 aa, Homo sapiens
  misc_feature: Table A; Target 80493; HLA-C*01:02; SLC7A13; ENSG00000164893; CTA
QLPLLFNTL

SEQ ID NO: 80494 - protein, 9 aa, Homo sapiens
  misc_feature: Table A; Target 80494; HLA-B*07:02; SLC7A13; ENSG00000164893; CTA
QPFFPSCSV

SEQ ID NO: 80495 - protein, 9 aa, Homo sapiens
  misc_feature: Table A; Target 80495; HLA-B*51:01; SLC7A13; ENSG00000164893; CTA
QPFFPSCSV

SEQ ID NO: 80496 - protein, 9 aa, Homo sapiens
  misc_feature: Table A; Target 80496; HLA-B*54:01; SLC7A13; ENSG00000164893; CTA
QPFFPSCSV

SEQ ID NO: 80497 - protein, 9 aa, Homo sapiens
  misc_feature: Table A; Target 80497; HLA-B*56:01; SLC7A13; ENSG00000164893; CTA
QPFFPSCSV

SEQ ID NO: 80498 - protein, 8 aa, Homo sapiens
  misc_feature: Table A; Target 80498; HLA-B*57:01; SLC7A13; ENSG00000164893; CTA
RAFPSLAW

SEQ ID NO: 80499 - protein, 10 aa, Homo sapiens
  misc_feature: Table A; Target 80499; HLA-B*57:01; SLC7A13; ENSG00000164893; CTA
RAFPSLAWIM

SEQ ID NO: 80500 - protein, 9 aa, Homo sapiens
  misc_feature: Table A; Target 80500; HLA-A*30:01; SLC7A13; ENSG00000164893; CTA
REILSSDAV

SEQ ID NO: 80501 - protein, 9 aa, Homo sapiens
  misc_feature: Table A; Target 80501; HLA-B*40:01; SLC7A13; ENSG00000164893; CTA
REILSSDAV

SEQ ID NO: 80502 - protein, 9 aa, Homo sapiens
  misc_feature: Table A; Target 80502; HLA-B*40:02; SLC7A13; ENSG00000164893; CTA
REILSSDAV

SEQ ID NO: 80503 - protein, 9 aa, Homo sapiens
  misc_feature: Table A; Target 80503; HLA-B*49:01; SLC7A13; ENSG00000164893; CTA
REILSSDAV

SEQ ID NO: 80504 - protein, 11 aa, Homo sapiens
  misc_feature: Table A; Target 80504; HLA-A*30:01; SLC7A13; ENSG00000164893; CTA
REILSSDAVAI

SEQ ID NO: 80505 - protein, 11 aa, Homo sapiens
  misc_feature: Table A; Target 80505; HLA-B*40:01; SLC7A13; ENSG00000164893; CTA
REILSSDAVAI

SEQ ID NO: 80506 - protein, 11 aa, Homo sapiens
  misc_feature: Table A; Target 80506; HLA-B*49:01; SLC7A13; ENSG00000164893; CTA
REILSSDAVAI

SEQ ID NO: 80507 - protein, 9 aa, Homo sapiens
  misc_feature: Table A; Target 80507; HLA-A*23:01; SLC7A13; ENSG00000164893; CTA
RYFGSTVAF

SEQ ID NO: 80508 - protein, 9 aa, Homo sapiens
  misc_feature: Table A; Target 80508; HLA-A*24:02; SLC7A13; ENSG00000164893; CTA
RYFGSTVAF

SEQ ID NO: 80509 - protein, 9 aa, Homo sapiens
  misc_feature: Table A; Target 80509; HLA-A*30:02; SLC7A13; ENSG00000164893; CTA
RYFGSTVAF

SEQ ID NO: 80510 - protein, 9 aa, Homo sapiens
  misc_feature: Table A; Target 80510; HLA-A*31:01; SLC7A13; ENSG00000164893; CTA
RYFGSTVAF

SEQ ID NO: 80511 - protein, 9 aa, Homo sapiens
  misc_feature: Table A; Target 80511; HLA-A*32:01; SLC7A13; ENSG00000164893; CTA
RYFGSTVAF

SEQ ID NO: 80512 - protein, 9 aa, Homo sapiens
  misc_feature: Table A; Target 80512; HLA-B*15:03; SLC7A13; ENSG00000164893; CTA
RYFGSTVAF

SEQ ID NO: 80513 - protein, 9 aa, Homo sapiens
  misc_feature: Table A; Target 80513; HLA-B*46:01; SLC7A13; ENSG00000164893; CTA
RYFGSTVAF

SEQ ID NO: 80514 - protein, 9 aa, Homo sapiens
  misc_feature: Table A; Target 80514; HLA-B*57:01; SLC7A13; ENSG00000164893; CTA
RYFGSTVAF

SEQ ID NO: 80515 - protein, 9 aa, Homo sapiens
  misc_feature: Table A; Target 80515; HLA-C*14:02; SLC7A13; ENSG00000164893; CTA
RYFGSTVAF

SEQ ID NO: 80516 - protein, 10 aa, Homo sapiens
  misc_feature: Table A; Target 80516; HLA-A*24:02; SLC7A13; ENSG00000164893; CTA
RYFGSTVAFL

SEQ ID NO: 80517 - protein, 9 aa, Homo sapiens
  misc_feature: Table A; Target 80517; HLA-A*23:01; SLC7A13; ENSG00000164893; CTA
RYQEPNLSI

SEQ ID NO: 80518 - protein, 9 aa, Homo sapiens
  misc_feature: Table A; Target 80518; HLA-A*24:02; SLC7A13; ENSG00000164893; CTA
RYQEPNLSI

SEQ ID NO: 80519 - protein, 9 aa, Homo sapiens
  misc_feature: Table A; Target 80519; HLA-C*14:02; SLC7A13; ENSG00000164893; CTA
RYQEPNLSI

SEQ ID NO: 80520 - protein, 11 aa, Homo sapiens
  misc_feature: Table A; Target 80520; HLA-A*29:02; SLC7A13; ENSG00000164893; CTA
RYQEPNLSIPY

SEQ ID NO: 80521 - protein, 11 aa, Homo sapiens
  misc_feature: Table A; Target 80521; HLA-A*30:02; SLC7A13; ENSG00000164893; CTA
RYQEPNLSIPY

SEQ ID NO: 80522 - protein, 11 aa, Homo sapiens
  misc_feature: Table A; Target 80522; HLA-A*31:01; SLC7A13; ENSG00000164893; CTA
RYQEPNLSIPY

SEQ ID NO: 80523 - protein, 8 aa, Homo sapiens
  misc_feature: Table A; Target 80523; HLA-C*05:01; SLC7A13; ENSG00000164893; CTA
SAEISISF

SEQ ID NO: 80524 - protein, 9 aa, Homo sapiens
  misc_feature: Table A; Target 80524; HLA-A*23:01; SLC7A13; ENSG00000164893; CTA
SCMNVGVSL

SEQ ID NO: 80525 - protein, 9 aa, Homo sapiens
  misc_feature: Table A; Target 80525; HLA-A*30:01; SLC7A13; ENSG00000164893; CTA
SCMNVGVSL

SEQ ID NO: 80526 - protein, 9 aa, Homo sapiens
  misc_feature: Table A; Target 80526; HLA-B*07:02; SLC7A13; ENSG00000164893; CTA
SCMNVGVSL

SEQ ID NO: 80527 - protein, 9 aa, Homo sapiens
  misc_feature: Table A; Target 80527; HLA-B*15:01; SLC7A13; ENSG00000164893; CTA
SCMNVGVSL

SEQ ID NO: 80528 - protein, 9 aa, Homo sapiens
  misc_feature: Table A; Target 80528; HLA-B*15:03; SLC7A13; ENSG00000164893; CTA
SCMNVGVSL

SEQ ID NO: 80529 - protein, 9 aa, Homo sapiens
  misc_feature: Table A; Target 80529; HLA-B*35:01; SLC7A13; ENSG00000164893; CTA
SCMNVGVSL

SEQ ID NO: 80530 - protein, 9 aa, Homo sapiens
  misc_feature: Table A; Target 80530; HLA-B*35:03; SLC7A13; ENSG00000164893; CTA
SCMNVGVSL

SEQ ID NO: 80531 - protein, 9 aa, Homo sapiens
  misc_feature: Table A; Target 80531; HLA-B*39:01; SLC7A13; ENSG00000164893; CTA
SCMNVGVSL

SEQ ID NO: 80532 - protein, 9 aa, Homo sapiens
  misc_feature: Table A; Target 80532; HLA-B*40:01; SLC7A13; ENSG00000164893; CTA
SCMNVGVSL

SEQ ID NO: 80533 - protein, 9 aa, Homo sapiens
  misc_feature: Table A; Target 80533; HLA-B*46:01; SLC7A13; ENSG00000164893; CTA
SCMNVGVSL

SEQ ID NO: 80534 - protein, 9 aa, Homo sapiens
  misc_feature: Table A; Target 80534; HLA-C*01:02; SLC7A13; ENSG00000164893; CTA
SCMNVGVSL

SEQ ID NO: 80535 - protein, 9 aa, Homo sapiens
  misc_feature: Table A; Target 80535; HLA-C*03:03; SLC7A13; ENSG00000164893; CTA
SCMNVGVSL

SEQ ID NO: 80536 - protein, 9 aa, Homo sapiens
  misc_feature: Table A; Target 80536; HLA-C*03:04; SLC7A13; ENSG00000164893; CTA
SCMNVGVSL

SEQ ID NO: 80537 - protein, 9 aa, Homo sapiens
  misc_feature: Table A; Target 80537; HLA-C*07:02; SLC7A13; ENSG00000164893; CTA
SCMNVGVSL

SEQ ID NO: 80538 - protein, 9 aa, Homo sapiens
  misc_feature: Table A; Target 80538; HLA-C*07:06; SLC7A13; ENSG00000164893; CTA
SCMNVGVSL

SEQ ID NO: 80539 - protein, 9 aa, Homo sapiens
  misc_feature: Table A; Target 80539; HLA-C*14:02; SLC7A13; ENSG00000164893; CTA
SCMNVGVSL

SEQ ID NO: 80540 - protein, 9 aa, Homo sapiens
  misc_feature: Table A; Target 80540; HLA-C*16:01; SLC7A13; ENSG00000164893; CTA
SCMNVGVSL

SEQ ID NO: 80541 - protein, 9 aa, Homo sapiens
  misc_feature: Table A; Target 80541; HLA-C*16:04; SLC7A13; ENSG00000164893; CTA
SCMNVGVSL

SEQ ID NO: 80542 - protein, 8 aa, Homo sapiens
  misc_feature: Table A; Target 80542; HLA-B*18:01; SLC7A13; ENSG00000164893; CTA
SDAVAITW

SEQ ID NO: 80543 - protein, 8 aa, Homo sapiens
  misc_feature: Table A; Target 80543; HLA-B*27:02; SLC7A13; ENSG00000164893; CTA
SDAVAITW

SEQ ID NO: 80544 - protein, 8 aa, Homo sapiens
  misc_feature: Table A; Target 80544; HLA-B*37:01; SLC7A13; ENSG00000164893; CTA
SDAVAITW

SEQ ID NO: 80545 - protein, 8 aa, Homo sapiens
  misc_feature: Table A; Target 80545; HLA-B*44:02; SLC7A13; ENSG00000164893; CTA
SDAVAITW

SEQ ID NO: 80546 - protein, 8 aa, Homo sapiens
  misc_feature: Table A; Target 80546; HLA-B*44:03; SLC7A13; ENSG00000164893; CTA
SDAVAITW

SEQ ID NO: 80547 - protein, 8 aa, Homo sapiens
  misc_feature: Table A; Target 80547; HLA-B*57:01; SLC7A13; ENSG00000164893; CTA
SDAVAITW

SEQ ID NO: 80548 - protein, 8 aa, Homo sapiens
  misc_feature: Table A; Target 80548; HLA-C*16:04; SLC7A13; ENSG00000164893; CTA
SDAVAITW

SEQ ID NO: 80549 - protein, 8 aa, Homo sapiens
  misc_feature: Table A; Target 80549; HLA-C*14:02; SLC7A13; ENSG00000164893; CTA
SFISLTGV

SEQ ID NO: 80550 - protein, 10 aa, Homo sapiens
  misc_feature: Table A; Target 80550; HLA-A*23:01; SLC7A13; ENSG00000164893; CTA
SFISLTGVVF

SEQ ID NO: 80551 - protein, 10 aa, Homo sapiens
  misc_feature: Table A; Target 80551; HLA-A*24:02; SLC7A13; ENSG00000164893; CTA
SFISLTGVVF

SEQ ID NO: 80552 - protein, 10 aa, Homo sapiens
  misc_feature: Table A; Target 80552; HLA-A*29:02; SLC7A13; ENSG00000164893; CTA
SFISLTGVVF

SEQ ID NO: 80553 - protein, 10 aa, Homo sapiens
  misc_feature: Table A; Target 80553; HLA-C*14:02; SLC7A13; ENSG00000164893; CTA
SFISLTGVVF

SEQ ID NO: 80554 - protein, 9 aa, Homo sapiens
  misc_feature: Table A; Target 80554; HLA-A*29:02; SLC7A13; ENSG00000164893; CTA
SFPCSGAQY

SEQ ID NO: 80555 - protein, 9 aa, Homo sapiens
  misc_feature: Table A; Target 80555; HLA-C*14:02; SLC7A13; ENSG00000164893; CTA
SFPCSGAQY

SEQ ID NO: 80556 - protein, 10 aa, Homo sapiens
  misc_feature: Table A; Target 80556; HLA-A*29:02; SLC7A13; ENSG00000164893; CTA
SFPCSGAQYY

SEQ ID NO: 80557 - protein, 9 aa, Homo sapiens
  misc_feature: Table A; Target 80557; HLA-A*11:01; SLC7A13; ENSG00000164893; CTA
SGAQYYFLK

SEQ ID NO: 80558 - protein, 9 aa, Homo sapiens
  misc_feature: Table A; Target 80558; HLA-B*15:03; SLC7A13; ENSG00000164893; CTA
SGVVAGQAL

SEQ ID NO: 80559 - protein, 9 aa, Homo sapiens
  misc_feature: Table A; Target 80559; HLA-B*35:03; SLC7A13; ENSG00000164893; CTA
SGVVAGQAL

SEQ ID NO: 80560 - protein, 9 aa, Homo sapiens
  misc_feature: Table A; Target 80560; HLA-B*39:01; SLC7A13; ENSG00000164893; CTA
SGVVAGQAL

SEQ ID NO: 80561 - protein, 9 aa, Homo sapiens
  misc_feature: Table A; Target 80561; HLA-B*40:01; SLC7A13; ENSG00000164893; CTA
SGVVAGQAL

SEQ ID NO: 80562 - protein, 9 aa, Homo sapiens
  misc_feature: Table A; Target 80562; HLA-B*46:01; SLC7A13; ENSG00000164893; CTA
SGVVAGQAL

SEQ ID NO: 80563 - protein, 9 aa, Homo sapiens
  misc_feature: Table A; Target 80563; HLA-C*01:02; SLC7A13; ENSG00000164893; CTA
SGVVAGQAL

SEQ ID NO: 80564 - protein, 9 aa, Homo sapiens
  misc_feature: Table A; Target 80564; HLA-C*03:03; SLC7A13; ENSG00000164893; CTA
SGVVAGQAL

SEQ ID NO: 80565 - protein, 9 aa, Homo sapiens
  misc_feature: Table A; Target 80565; HLA-C*03:04; SLC7A13; ENSG00000164893; CTA
SGVVAGQAL

SEQ ID NO: 80566 - protein, 9 aa, Homo sapiens
  misc_feature: Table A; Target 80566; HLA-C*14:02; SLC7A13; ENSG00000164893; CTA
SGVVAGQAL

SEQ ID NO: 80567 - protein, 9 aa, Homo sapiens
  misc_feature: Table A; Target 80567; HLA-B*13:02; SLC7A13; ENSG00000164893; CTA
SHSSPFTAV

SEQ ID NO: 80568 - protein, 9 aa, Homo sapiens
  misc_feature: Table A; Target 80568; HLA-B*38:01; SLC7A13; ENSG00000164893; CTA
SHSSPFTAV

SEQ ID NO: 80569 - protein, 9 aa, Homo sapiens
  misc_feature: Table A; Target 80569; HLA-B*39:01; SLC7A13; ENSG00000164893; CTA
SHSSPFTAV

SEQ ID NO: 80570 - protein, 10 aa, Homo sapiens
  misc_feature: Table A; Target 80570; HLA-B*38:01; SLC7A13; ENSG00000164893; CTA
SHSSPFTAVL

SEQ ID NO: 80571 - protein, 10 aa, Homo sapiens
  misc_feature: Table A; Target 80571; HLA-B*39:01; SLC7A13; ENSG00000164893; CTA
SHSSPFTAVL

SEQ ID NO: 80572 - protein, 11 aa, Homo sapiens
  misc_feature: Table A; Target 80572; HLA-B*38:01; SLC7A13; ENSG00000164893; CTA
SHSSPFTAVLL

SEQ ID NO: 80573 - protein, 11 aa, Homo sapiens
  misc_feature: Table A; Target 80573; HLA-A*02:03; SLC7A13; ENSG00000164893; CTA
SIFKSSRPIYL

SEQ ID NO: 80574 - protein, 11 aa, Homo sapiens
  misc_feature: Table A; Target 80574; HLA-A*02:04; SLC7A13; ENSG00000164893; CTA
SIFKSSRPIYL

SEQ ID NO: 80575 - protein, 11 aa, Homo sapiens
  misc_feature: Table A; Target 80575; HLA-A*03:01; SLC7A13; ENSG00000164893; CTA
SIFKSSRPIYL

SEQ ID NO: 80576 - protein, 11 aa, Homo sapiens
  misc_feature: Table A; Target 80576; HLA-A*02:01; SLC7A13; ENSG00000164893; CTA
SILSFISLTGV

SEQ ID NO: 80577 - protein, 11 aa, Homo sapiens
  misc_feature: Table A; Target 80577; HLA-A*02:03; SLC7A13; ENSG00000164893; CTA
SILSFISLTGV

SEQ ID NO: 80578 - protein, 11 aa, Homo sapiens
  misc_feature: Table A; Target 80578; HLA-A*02:04; SLC7A13; ENSG00000164893; CTA
SILSFISLTGV

SEQ ID NO: 80579 - protein, 9 aa, Homo sapiens
  misc_feature: Table A; Target 80579; HLA-A*02:01; SLC7A13; ENSG00000164893; CTA
SLAIILTSL

SEQ ID NO: 80580 - protein, 9 aa, Homo sapiens
  misc_feature: Table A; Target 80580; HLA-A*02:03; SLC7A13; ENSG00000164893; CTA
SLAIILTSL

SEQ ID NO: 80581 - protein, 9 aa, Homo sapiens
  misc_feature: Table A; Target 80581; HLA-A*02:04; SLC7A13; ENSG00000164893; CTA
SLAIILTSL

SEQ ID NO: 80582 - protein, 9 aa, Homo sapiens
  misc_feature: Table A; Target 80582; HLA-A*02:07; SLC7A13; ENSG00000164893; CTA
SLAIILTSL

SEQ ID NO: 80583 - protein, 9 aa, Homo sapiens
  misc_feature: Table A; Target 80583; HLA-A*68:02; SLC7A13; ENSG00000164893; CTA
SLAIILTSL

SEQ ID NO: 80584 - protein, 9 aa, Homo sapiens
  misc_feature: Table A; Target 80584; HLA-B*08:01; SLC7A13; ENSG00000164893; CTA
SLAIILTSL

SEQ ID NO: 80585 - protein, 9 aa, Homo sapiens
  misc_feature: Table A; Target 80585; HLA-B*46:01; SLC7A13; ENSG00000164893; CTA
SLAIILTSL

SEQ ID NO: 80586 - protein, 9 aa, Homo sapiens
  misc_feature: Table A; Target 80586; HLA-B*55:01; SLC7A13; ENSG00000164893; CTA
SLAIILTSL

SEQ ID NO: 80587 - protein, 9 aa, Homo sapiens
  misc_feature: Table A; Target 80587; HLA-C*01:02; SLC7A13; ENSG00000164893; CTA
SLAIILTSL

SEQ ID NO: 80588 - protein, 9 aa, Homo sapiens
  misc_feature: Table A; Target 80588; HLA-A*02:03; SLC7A13; ENSG00000164893; CTA
SLFLGSGVV

SEQ ID NO: 80589 - protein, 9 aa, Homo sapiens
  misc_feature: Table A; Target 80589; HLA-B*13:02; SLC7A13; ENSG00000164893; CTA
SLFLGSGVV

SEQ ID NO: 80590 - protein, 10 aa, Homo sapiens
  misc_feature: Table A; Target 80590; HLA-A*02:03; SLC7A13; ENSG00000164893; CTA
SLFLGSGVVA

SEQ ID NO: 80591 - protein, 10 aa, Homo sapiens
  misc_feature: Table A; Target 80591; HLA-B*54:01; SLC7A13; ENSG00000164893; CTA
SLFLGSGVVA

SEQ ID NO: 80592 - protein, 10 aa, Homo sapiens
  misc_feature: Table A; Target 80592; HLA-B*56:01; SLC7A13; ENSG00000164893; CTA
SLFLGSGVVA

SEQ ID NO: 80593 - protein, 11 aa, Homo sapiens
  misc_feature: Table A; Target 80593; HLA-A*02:01; SLC7A13; ENSG00000164893; CTA
SLFLGSGVVAG

SEQ ID NO: 80594 - protein, 11 aa, Homo sapiens
  misc_feature: Table A; Target 80594; HLA-A*02:03; SLC7A13; ENSG00000164893; CTA
SLFLGSGVVAG

SEQ ID NO: 80595 - protein, 11 aa, Homo sapiens
  misc_feature: Table A; Target 80595; HLA-A*02:04; SLC7A13; ENSG00000164893; CTA
SLFLGSGVVAG

SEQ ID NO: 80596 - protein, 10 aa, Homo sapiens
  misc_feature: Table A; Target 80596; HLA-A*02:01; SLC7A13; ENSG00000164893; CTA
SLFSNLLISI

SEQ ID NO: 80597 - protein, 10 aa, Homo sapiens
  misc_feature: Table A; Target 80597; HLA-A*02:03; SLC7A13; ENSG00000164893; CTA
SLFSNLLISI

SEQ ID NO: 80598 - protein, 10 aa, Homo sapiens
  misc_feature: Table A; Target 80598; HLA-A*02:04; SLC7A13; ENSG00000164893; CTA
SLFSNLLISI

SEQ ID NO: 80599 - protein, 9 aa, Homo sapiens
  misc_feature: Table A; Target 80599; HLA-A*02:01; SLC7A13; ENSG00000164893; CTA
SLIDLINYI

SEQ ID NO: 80600 - protein, 9 aa, Homo sapiens
  misc_feature: Table A; Target 80600; HLA-A*02:03; SLC7A13; ENSG00000164893; CTA
SLIDLINYI

SEQ ID NO: 80601 - protein, 9 aa, Homo sapiens
  misc_feature: Table A; Target 80601; HLA-A*02:04; SLC7A13; ENSG00000164893; CTA
SLIDLINYI

SEQ ID NO: 80602 - protein, 9 aa, Homo sapiens
  misc_feature: Table A; Target 80602; HLA-A*02:07; SLC7A13; ENSG00000164893; CTA
SLIDLINYI

SEQ ID NO: 80603 - protein, 9 aa, Homo sapiens
  misc_feature: Table A; Target 80603; HLA-A*23:01; SLC7A13; ENSG00000164893; CTA
SLIDLINYI

SEQ ID NO: 80604 - protein, 9 aa, Homo sapiens
  misc_feature: Table A; Target 80604; HLA-A*68:02; SLC7A13; ENSG00000164893; CTA
SLIDLINYI

SEQ ID NO: 80605 - protein, 9 aa, Homo sapiens
  misc_feature: Table A; Target 80605; HLA-B*13:02; SLC7A13; ENSG00000164893; CTA
SLIDLINYI

SEQ ID NO: 80606 - protein, 8 aa, Homo sapiens
  misc_feature: Table A; Target 80606; HLA-A*02:01; SLC7A13; ENSG00000164893; CTA
SLTGVVFL

SEQ ID NO: 80607 - protein, 8 aa, Homo sapiens
  misc_feature: Table A; Target 80607; HLA-A*02:04; SLC7A13; ENSG00000164893; CTA
SLTGVVFL

SEQ ID NO: 80608 - protein, 9 aa, Homo sapiens
  misc_feature: Table A; Target 80608; HLA-A*02:01; SLC7A13; ENSG00000164893; CTA
SLTGVVFLI

SEQ ID NO: 80609 - protein, 9 aa, Homo sapiens
  misc_feature: Table A; Target 80609; HLA-A*02:03; SLC7A13; ENSG00000164893; CTA
SLTGVVFLI

SEQ ID NO: 80610 - protein, 9 aa, Homo sapiens
  misc_feature: Table A; Target 80610; HLA-A*02:04; SLC7A13; ENSG00000164893; CTA
SLTGVVFLI

SEQ ID NO: 80611 - protein, 9 aa, Homo sapiens
  misc_feature: Table A; Target 80611; HLA-A*02:07; SLC7A13; ENSG00000164893; CTA
SLTGVVFLI

SEQ ID NO: 80612 - protein, 9 aa, Homo sapiens
  misc_feature: Table A; Target 80612; HLA-A*23:01; SLC7A13; ENSG00000164893; CTA
SLTGVVFLI

SEQ ID NO: 80613 - protein, 9 aa, Homo sapiens
  misc_feature: Table A; Target 80613; HLA-A*24:02; SLC7A13; ENSG00000164893; CTA
SLTGVVFLI

SEQ ID NO: 80614 - protein, 9 aa, Homo sapiens
  misc_feature: Table A; Target 80614; HLA-A*30:01; SLC7A13; ENSG00000164893; CTA
SLTGVVFLI

SEQ ID NO: 80615 - protein, 9 aa, Homo sapiens
  misc_feature: Table A; Target 80615; HLA-A*68:02; SLC7A13; ENSG00000164893; CTA
SLTGVVFLI

SEQ ID NO: 80616 - protein, 9 aa, Homo sapiens
  misc_feature: Table A; Target 80616; HLA-B*13:02; SLC7A13; ENSG00000164893; CTA
SLTGVVFLI

SEQ ID NO: 80617 - protein, 9 aa, Homo sapiens
  misc_feature: Table A; Target 80617; HLA-B*55:01; SLC7A13; ENSG00000164893; CTA
SLTGVVFLI

SEQ ID NO: 80618 - protein, 9 aa, Homo sapiens
  misc_feature: Table A; Target 80618; HLA-A*02:01; SLC7A13; ENSG00000164893; CTA
SLWSILLMI

SEQ ID NO: 80619 - protein, 9 aa, Homo sapiens
  misc_feature: Table A; Target 80619; HLA-A*02:03; SLC7A13; ENSG00000164893; CTA
SLWSILLMI

SEQ ID NO: 80620 - protein, 9 aa, Homo sapiens
  misc_feature: Table A; Target 80620; HLA-A*02:04; SLC7A13; ENSG00000164893; CTA
SLWSILLMI

SEQ ID NO: 80621 - protein, 9 aa, Homo sapiens
  misc_feature: Table A; Target 80621; HLA-A*02:07; SLC7A13; ENSG00000164893; CTA
SLWSILLMI

SEQ ID NO: 80622 - protein, 8 aa, Homo sapiens
  misc_feature: Table A; Target 80622; HLA-B*35:01; SLC7A13; ENSG00000164893; CTA
SPFTAVLL

SEQ ID NO: 80623 - protein, 8 aa, Homo sapiens
  misc_feature: Table A; Target 80623; HLA-B*51:01; SLC7A13; ENSG00000164893; CTA
SPFTAVLL

SEQ ID NO: 80624 - protein, 8 aa, Homo sapiens
  misc_feature: Table A; Target 80624; HLA-B*56:01; SLC7A13; ENSG00000164893; CTA
SPFTAVLL

SEQ ID NO: 80625 - protein, 9 aa, Homo sapiens
  misc_feature: Table A; Target 80625; HLA-B*07:02; SLC7A13; ENSG00000164893; CTA
SPFTAVLLL

SEQ ID NO: 80626 - protein, 9 aa, Homo sapiens
  misc_feature: Table A; Target 80626; HLA-B*35:01; SLC7A13; ENSG00000164893; CTA
SPFTAVLLL

SEQ ID NO: 80627 - protein, 9 aa, Homo sapiens
  misc_feature: Table A; Target 80627; HLA-B*35:03; SLC7A13; ENSG00000164893; CTA
SPFTAVLLL

SEQ ID NO: 80628 - protein, 9 aa, Homo sapiens
  misc_feature: Table A; Target 80628; HLA-B*51:01; SLC7A13; ENSG00000164893; CTA
SPFTAVLLL

SEQ ID NO: 80629 - protein, 9 aa, Homo sapiens
  misc_feature: Table A; Target 80629; HLA-B*56:01; SLC7A13; ENSG00000164893; CTA
SPFTAVLLL

SEQ ID NO: 80630 - protein, 9 aa, Homo sapiens
  misc_feature: Table A; Target 80630; HLA-C*07:02; SLC7A13; ENSG00000164893; CTA
SPFTAVLLL

SEQ ID NO: 80631 - protein, 10 aa, Homo sapiens
  misc_feature: Table A; Target 80631; HLA-B*56:01; SLC7A13; ENSG00000164893; CTA
SPKGVLAYSC

SEQ ID NO: 80632 - protein, 8 aa, Homo sapiens
  misc_feature: Table A; Target 80632; HLA-A*32:01; SLC7A13; ENSG00000164893; CTA
SPNVHYVY

SEQ ID NO: 80633 - protein, 8 aa, Homo sapiens
  misc_feature: Table A; Target 80633; HLA-B*08:01; SLC7A13; ENSG00000164893; CTA
SPNVHYVY

SEQ ID NO: 80634 - protein, 8 aa, Homo sapiens
  misc_feature: Table A; Target 80634; HLA-B*35:01; SLC7A13; ENSG00000164893; CTA
SPNVHYVY

SEQ ID NO: 80635 - protein, 8 aa, Homo sapiens
  misc_feature: Table A; Target 80635; HLA-B*55:01; SLC7A13; ENSG00000164893; CTA
SPNVHYVY

SEQ ID NO: 80636 - protein, 8 aa, Homo sapiens
  misc_feature: Table A; Target 80636; HLA-C*03:03; SLC7A13; ENSG00000164893; CTA
SPNVHYVY

SEQ ID NO: 80637 - protein, 8 aa, Homo sapiens
  misc_feature: Table A; Target 80637; HLA-C*16:01; SLC7A13; ENSG00000164893; CTA
SPNVHYVY

SEQ ID NO: 80638 - protein, 8 aa, Homo sapiens
  misc_feature: Table A; Target 80638; HLA-C*16:04; SLC7A13; ENSG00000164893; CTA
SPNVHYVY

SEQ ID NO: 80639 - protein, 9 aa, Homo sapiens
  misc_feature: Table A; Target 80639; HLA-B*07:02; SLC7A13; ENSG00000164893; CTA
SPNVHYVYV

SEQ ID NO: 80640 - protein, 9 aa, Homo sapiens
  misc_feature: Table A; Target 80640; HLA-B*51:01; SLC7A13; ENSG00000164893; CTA
SPNVHYVYV

SEQ ID NO: 80641 - protein, 9 aa, Homo sapiens
  misc_feature: Table A; Target 80641; HLA-B*54:01; SLC7A13; ENSG00000164893; CTA
SPNVHYVYV

SEQ ID NO: 80642 - protein, 9 aa, Homo sapiens
  misc_feature: Table A; Target 80642; HLA-B*56:01; SLC7A13; ENSG00000164893; CTA
SPNVHYVYV

SEQ ID NO: 80643 - protein, 9 aa, Homo sapiens
  misc_feature: Table A; Target 80643; HLA-C*07:02; SLC7A13; ENSG00000164893; CTA
SPNVHYVYV

SEQ ID NO: 80644 - protein, 9 aa, Homo sapiens
  misc_feature: Table A; Target 80644; HLA-B*38:01; SLC7A13; ENSG00000164893; CTA
SQEGQLPLL

SEQ ID NO: 80645 - protein, 9 aa, Homo sapiens
  misc_feature: Table A; Target 80645; HLA-B*39:01; SLC7A13; ENSG00000164893; CTA
SQEGQLPLL

SEQ ID NO: 80646 - protein, 9 aa, Homo sapiens
  misc_feature: Table A; Target 80646; HLA-C*05:01; SLC7A13; ENSG00000164893; CTA
SQEGQLPLL

SEQ ID NO: 80647 - protein, 10 aa, Homo sapiens
  misc_feature: Table A; Target 80647; HLA-A*29:02; SLC7A13; ENSG00000164893; CTA
SQEGQLPLLF

SEQ ID NO: 80648 - protein, 10 aa, Homo sapiens
  misc_feature: Table A; Target 80648; HLA-B*27:02; SLC7A13; ENSG00000164893; CTA
SQEGQLPLLF

SEQ ID NO: 80649 - protein, 10 aa, Homo sapiens
  misc_feature: Table A; Target 80649; HLA-B*38:01; SLC7A13; ENSG00000164893; CTA
SQEGQLPLLF

SEQ ID NO: 80650 - protein, 9 aa, Homo sapiens
  misc_feature: Table A; Target 80650; HLA-A*01:01; SLC7A13; ENSG00000164893; CTA
SSDAVAITW

SEQ ID NO: 80651 - protein, 9 aa, Homo sapiens
  misc_feature: Table A; Target 80651; HLA-A*25:01; SLC7A13; ENSG00000164893; CTA
SSDAVAITW

SEQ ID NO: 80652 - protein, 9 aa, Homo sapiens
  misc_feature: Table A; Target 80652; HLA-A*32:01; SLC7A13; ENSG00000164893; CTA
SSDAVAITW

SEQ ID NO: 80653 - protein, 9 aa, Homo sapiens
  misc_feature: Table A; Target 80653; HLA-B*44:02; SLC7A13; ENSG00000164893; CTA
SSDAVAITW

SEQ ID NO: 80654 - protein, 9 aa, Homo sapiens
  misc_feature: Table A; Target 80654; HLA-B*44:03; SLC7A13; ENSG00000164893; CTA
SSDAVAITW

SEQ ID NO: 80655 - protein, 9 aa, Homo sapiens
  misc_feature: Table A; Target 80655; HLA-B*57:01; SLC7A13; ENSG00000164893; CTA
SSDAVAITW

SEQ ID NO: 80656 - protein, 9 aa, Homo sapiens
  misc_feature: Table A; Target 80656; HLA-B*58:01; SLC7A13; ENSG00000164893; CTA
SSDAVAITW

SEQ ID NO: 80657 - protein, 9 aa, Homo sapiens
  misc_feature: Table A; Target 80657; HLA-C*05:01; SLC7A13; ENSG00000164893; CTA
SSDAVAITW

SEQ ID NO: 80658 - protein, 9 aa, Homo sapiens
  misc_feature: Table A; Target 80658; HLA-C*07:06; SLC7A13; ENSG00000164893; CTA
SSDAVAITW

SEQ ID NO: 80659 - protein, 9 aa, Homo sapiens
  misc_feature: Table A; Target 80659; HLA-C*16:04; SLC7A13; ENSG00000164893; CTA
SSDAVAITW

SEQ ID NO: 80660 - protein, 8 aa, Homo sapiens
  misc_feature: Table A; Target 80660; HLA-C*01:02; SLC7A13; ENSG00000164893; CTA
SSPFTAVL

SEQ ID NO: 80661 - protein, 9 aa, Homo sapiens
  misc_feature: Table A; Target 80661; HLA-C*01:02; SLC7A13; ENSG00000164893; CTA
SSPFTAVLL

SEQ ID NO: 80662 - protein, 8 aa, Homo sapiens
  misc_feature: Table A; Target 80662; HLA-B*08:01; SLC7A13; ENSG00000164893; CTA
SSVLKVSI

SEQ ID NO: 80663 - protein, 9 aa, Homo sapiens
  misc_feature: Table A; Target 80663; HLA-A*25:01; SLC7A13; ENSG00000164893; CTA
STVAFLNLW

SEQ ID NO: 80664 - protein, 9 aa, Homo sapiens
  misc_feature: Table A; Target 80664; HLA-B*57:01; SLC7A13; ENSG00000164893; CTA
STVAFLNLW

SEQ ID NO: 80665 - protein, 8 aa, Homo sapiens
  misc_feature: Table A; Target 80665; HLA-B*37:01; SLC7A13; ENSG00000164893; CTA
SVLKVSIL

SEQ ID NO: 80666 - protein, 10 aa, Homo sapiens
  misc_feature: Table A; Target 80666; HLA-A*25:01; SLC7A13; ENSG00000164893; CTA
SVLKVSILSF

SEQ ID NO: 80667 - protein, 9 aa, Homo sapiens
  misc_feature: Table A; Target 80667; HLA-A*29:02; SLC7A13; ENSG00000164893; CTA
SYLTVLTPR

SEQ ID NO: 80668 - protein, 9 aa, Homo sapiens
  misc_feature: Table A; Target 80668; HLA-A*31:01; SLC7A13; ENSG00000164893; CTA
SYLTVLTPR

SEQ ID NO: 80669 - protein, 9 aa, Homo sapiens
  misc_feature: Table A; Target 80669; HLA-A*33:01; SLC7A13; ENSG00000164893; CTA
SYLTVLTPR

SEQ ID NO: 80670 - protein, 9 aa, Homo sapiens
  misc_feature: Table A; Target 80670; HLA-A*33:03; SLC7A13; ENSG00000164893; CTA
SYLTVLTPR

SEQ ID NO: 80671 - protein, 8 aa, Homo sapiens
  misc_feature: Table A; Target 80671; HLA-B*51:01; SLC7A13; ENSG00000164893; CTA
TALPLVTV

SEQ ID NO: 80672 - protein, 9 aa, Homo sapiens
  misc_feature: Table A; Target 80672; HLA-A*02:01; SLC7A13; ENSG00000164893; CTA
TALPLVTVV

SEQ ID NO: 80673 - protein, 9 aa, Homo sapiens
  misc_feature: Table A; Target 80673; HLA-A*02:03; SLC7A13; ENSG00000164893; CTA
TALPLVTVV

SEQ ID NO: 80674 - protein, 9 aa, Homo sapiens
  misc_feature: Table A; Target 80674; HLA-B*13:02; SLC7A13; ENSG00000164893; CTA
TALPLVTVV

SEQ ID NO: 80675 - protein, 9 aa, Homo sapiens
  misc_feature: Table A; Target 80675; HLA-B*35:01; SLC7A13; ENSG00000164893; CTA
TALPLVTVV

SEQ ID NO: 80676 - protein, 9 aa, Homo sapiens
  misc_feature: Table A; Target 80676; HLA-B*39:01; SLC7A13; ENSG00000164893; CTA
TALPLVTVV

SEQ ID NO: 80677 - protein, 9 aa, Homo sapiens
  misc_feature: Table A; Target 80677; HLA-B*49:01; SLC7A13; ENSG00000164893; CTA
TALPLVTVV

SEQ ID NO: 80678 - protein, 9 aa, Homo sapiens
  misc_feature: Table A; Target 80678; HLA-B*51:01; SLC7A13; ENSG00000164893; CTA
TALPLVTVV

SEQ ID NO: 80679 - protein, 9 aa, Homo sapiens
  misc_feature: Table A; Target 80679; HLA-B*54:01; SLC7A13; ENSG00000164893; CTA
TALPLVTVV

SEQ ID NO: 80680 - protein, 9 aa, Homo sapiens
  misc_feature: Table A; Target 80680; HLA-B*56:01; SLC7A13; ENSG00000164893; CTA
TALPLVTVV

SEQ ID NO: 80681 - protein, 9 aa, Homo sapiens
  misc_feature: Table A; Target 80681; HLA-C*02:02; SLC7A13; ENSG00000164893; CTA
TALPLVTVV

SEQ ID NO: 80682 - protein, 9 aa, Homo sapiens
  misc_feature: Table A; Target 80682; HLA-C*05:01; SLC7A13; ENSG00000164893; CTA
TALPLVTVV

SEQ ID NO: 80683 - protein, 9 aa, Homo sapiens
  misc_feature: Table A; Target 80683; HLA-C*12:03; SLC7A13; ENSG00000164893; CTA
TALPLVTVV

SEQ ID NO: 80684 - protein, 9 aa, Homo sapiens
  misc_feature: Table A; Target 80684; HLA-C*16:02; SLC7A13; ENSG00000164893; CTA
TALPLVTVV

SEQ ID NO: 80685 - protein, 9 aa, Homo sapiens
  misc_feature: Table A; Target 80685; HLA-C*16:04; SLC7A13; ENSG00000164893; CTA
TALPLVTVV

SEQ ID NO: 80686 - protein, 10 aa, Homo sapiens
  misc_feature: Table A; Target 80686; HLA-A*25:01; SLC7A13; ENSG00000164893; CTA
TALPLVTVVY

SEQ ID NO: 80687 - protein, 10 aa, Homo sapiens
  misc_feature: Table A; Target 80687; HLA-A*29:02; SLC7A13; ENSG00000164893; CTA
TALPLVTVVY

SEQ ID NO: 80688 - protein, 10 aa, Homo sapiens
  misc_feature: Table A; Target 80688; HLA-A*30:02; SLC7A13; ENSG00000164893; CTA
TALPLVTVVY

SEQ ID NO: 80689 - protein, 10 aa, Homo sapiens
  misc_feature: Table A; Target 80689; HLA-B*35:01; SLC7A13; ENSG00000164893; CTA
TALPLVTVVY

SEQ ID NO: 80690 - protein, 10 aa, Homo sapiens
  misc_feature: Table A; Target 80690; HLA-C*02:02; SLC7A13; ENSG00000164893; CTA
TALPLVTVVY

SEQ ID NO: 80691 - protein, 9 aa, Homo sapiens
  misc_feature: Table A; Target 80691; HLA-B*35:01; SLC7A13; ENSG00000164893; CTA
TAVLLLVTL

SEQ ID NO: 80692 - protein, 9 aa, Homo sapiens
  misc_feature: Table A; Target 80692; HLA-B*35:03; SLC7A13; ENSG00000164893; CTA
TAVLLLVTL

SEQ ID NO: 80693 - protein, 9 aa, Homo sapiens
  misc_feature: Table A; Target 80693; HLA-B*51:01; SLC7A13; ENSG00000164893; CTA
TAVLLLVTL

SEQ ID NO: 80694 - protein, 9 aa, Homo sapiens
  misc_feature: Table A; Target 80694; HLA-B*54:01; SLC7A13; ENSG00000164893; CTA
TAVLLLVTL

SEQ ID NO: 80695 - protein, 9 aa, Homo sapiens
  misc_feature: Table A; Target 80695; HLA-C*02:02; SLC7A13; ENSG00000164893; CTA
TAVLLLVTL

SEQ ID NO: 80696 - protein, 9 aa, Homo sapiens
  misc_feature: Table A; Target 80696; HLA-C*03:03; SLC7A13; ENSG00000164893; CTA
TAVLLLVTL

SEQ ID NO: 80697 - protein, 9 aa, Homo sapiens
  misc_feature: Table A; Target 80697; HLA-C*03:04; SLC7A13; ENSG00000164893; CTA
TAVLLLVTL

SEQ ID NO: 80698 - protein, 9 aa, Homo sapiens
  misc_feature: Table A; Target 80698; HLA-C*16:02; SLC7A13; ENSG00000164893; CTA
TAVLLLVTL

SEQ ID NO: 80699 - protein, 11 aa, Homo sapiens
  misc_feature: Table A; Target 80699; HLA-A*31:01; SLC7A13; ENSG00000164893; CTA
TLIAGELKKPR

SEQ ID NO: 80700 - protein, 9 aa, Homo sapiens
  misc_feature: Table A; Target 80700; HLA-A*03:01; SLC7A13; ENSG00000164893; CTA
TLNSHSSPF

SEQ ID NO: 80701 - protein, 9 aa, Homo sapiens
  misc_feature: Table A; Target 80701; HLA-A*30:02; SLC7A13; ENSG00000164893; CTA
TLNSHSSPF

SEQ ID NO: 80702 - protein, 9 aa, Homo sapiens
  misc_feature: Table A; Target 80702; HLA-A*32:01; SLC7A13; ENSG00000164893; CTA
TLNSHSSPF

SEQ ID NO: 80703 - protein, 9 aa, Homo sapiens
  misc_feature: Table A; Target 80703; HLA-B*08:01; SLC7A13; ENSG00000164893; CTA
TLNSHSSPF

SEQ ID NO: 80704 - protein, 9 aa, Homo sapiens
  misc_feature: Table A; Target 80704; HLA-B*15:01; SLC7A13; ENSG00000164893; CTA
TLNSHSSPF

SEQ ID NO: 80705 - protein, 9 aa, Homo sapiens
  misc_feature: Table A; Target 80705; HLA-B*37:01; SLC7A13; ENSG00000164893; CTA
TLNSHSSPF

SEQ ID NO: 80706 - protein, 9 aa, Homo sapiens
  misc_feature: Table A; Target 80706; HLA-B*46:01; SLC7A13; ENSG00000164893; CTA
TLNSHSSPF

SEQ ID NO: 80707 - protein, 9 aa, Homo sapiens
  misc_feature: Table A; Target 80707; HLA-C*01:02; SLC7A13; ENSG00000164893; CTA
TLNSHSSPF

SEQ ID NO: 80708 - protein, 9 aa, Homo sapiens
  misc_feature: Table A; Target 80708; HLA-C*07:04; SLC7A13; ENSG00000164893; CTA
TLNSHSSPF

SEQ ID NO: 80709 - protein, 9 aa, Homo sapiens
  misc_feature: Table A; Target 80709; HLA-C*14:02; SLC7A13; ENSG00000164893; CTA
TLNSHSSPF

SEQ ID NO: 80710 - protein, 11 aa, Homo sapiens
  misc_feature: Table A; Target 80710; HLA-B*07:02; SLC7A13; ENSG00000164893; CTA
TPREILSSDAV

SEQ ID NO: 80711 - protein, 11 aa, Homo sapiens
  misc_feature: Table A; Target 80711; HLA-B*54:01; SLC7A13; ENSG00000164893; CTA
TPREILSSDAV

SEQ ID NO: 80712 - protein, 11 aa, Homo sapiens
  misc_feature: Table A; Target 80712; HLA-B*55:01; SLC7A13; ENSG00000164893; CTA
TPREILSSDAV

SEQ ID NO: 80713 - protein, 11 aa, Homo sapiens
  misc_feature: Table A; Target 80713; HLA-B*56:01; SLC7A13; ENSG00000164893; CTA
TPREILSSDAV

SEQ ID NO: 80714 - protein, 11 aa, Homo sapiens
  misc_feature: Table A; Target 80714; HLA-C*07:02; SLC7A13; ENSG00000164893; CTA
TPREILSSDAV

SEQ ID NO: 80715 - protein, 9 aa, Homo sapiens
  misc_feature: Table A; Target 80715; HLA-B*51:01; SLC7A13; ENSG00000164893; CTA
TSFLLINII

SEQ ID NO: 80716 - protein, 11 aa, Homo sapiens
  misc_feature: Table A; Target 80716; HLA-B*54:01; SLC7A13; ENSG00000164893; CTA
TSLFLGSGVVA

SEQ ID NO: 80717 - protein, 9 aa, Homo sapiens
  misc_feature: Table A; Target 80717; HLA-A*30:02; SLC7A13; ENSG00000164893; CTA
TSLIDLINY

SEQ ID NO: 80718 - protein, 9 aa, Homo sapiens
  misc_feature: Table A; Target 80718; HLA-B*57:01; SLC7A13; ENSG00000164893; CTA
TSLIDLINY

SEQ ID NO: 80719 - protein, 9 aa, Homo sapiens
  misc_feature: Table A; Target 80719; HLA-B*58:01; SLC7A13; ENSG00000164893; CTA
TSLIDLINY

SEQ ID NO: 80720 - protein, 10 aa, Homo sapiens
  misc_feature: Table A; Target 80720; HLA-B*57:01; SLC7A13; ENSG00000164893; CTA
TSRGVKEVTW

SEQ ID NO: 80721 - protein, 10 aa, Homo sapiens
  misc_feature: Table A; Target 80721; HLA-B*58:01; SLC7A13; ENSG00000164893; CTA
TSRGVKEVTW

SEQ ID NO: 80722 - protein, 9 aa, Homo sapiens
  misc_feature: Table A; Target 80722; HLA-B*07:02; SLC7A13; ENSG00000164893; CTA
TVLTPREIL

SEQ ID NO: 80723 - protein, 9 aa, Homo sapiens
  misc_feature: Table A; Target 80723; HLA-A*68:02; SLC7A13; ENSG00000164893; CTA
TVVYLLVNI

SEQ ID NO: 80724 - protein, 10 aa, Homo sapiens
  misc_feature: Table A; Target 80724; HLA-A*24:02; SLC7A13; ENSG00000164893; CTA
TWADRAFPSL

SEQ ID NO: 80725 - protein, 8 aa, Homo sapiens
  misc_feature: Table A; Target 80725; HLA-A*23:01; SLC7A13; ENSG00000164893; CTA
VAGQALLL

SEQ ID NO: 80726 - protein, 8 aa, Homo sapiens
  misc_feature: Table A; Target 80726; HLA-B*51:01; SLC7A13; ENSG00000164893; CTA
VAGQALLL

SEQ ID NO: 80727 - protein, 11 aa, Homo sapiens
  misc_feature: Table A; Target 80727; HLA-A*30:02; SLC7A13; ENSG00000164893; CTA
VAGQALLLAEY

SEQ ID NO: 80728 - protein, 8 aa, Homo sapiens
  misc_feature: Table A; Target 80728; HLA-B*18:01; SLC7A13; ENSG00000164893; CTA
VERFQNAF

SEQ ID NO: 80729 - protein, 8 aa, Homo sapiens
  misc_feature: Table A; Target 80729; HLA-B*37:01; SLC7A13; ENSG00000164893; CTA
VERFQNAF

SEQ ID NO: 80730 - protein, 10 aa, Homo sapiens
  misc_feature: Table A; Target 80730; HLA-A*23:01; SLC7A13; ENSG00000164893; CTA
VFLSFPLATI

SEQ ID NO: 80731 - protein, 8 aa, Homo sapiens
  misc_feature: Table A; Target 80731; HLA-C*05:01; SLC7A13; ENSG00000164893; CTA
VIDVGLVV

SEQ ID NO: 80732 - protein, 9 aa, Homo sapiens
  misc_feature: Table A; Target 80732; HLA-A*02:07; SLC7A13; ENSG00000164893; CTA
VIDVGLVVI

SEQ ID NO: 80733 - protein, 9 aa, Homo sapiens
  misc_feature: Table A; Target 80733; HLA-B*38:01; SLC7A13; ENSG00000164893; CTA
VIDVGLVVI

SEQ ID NO: 80734 - protein, 9 aa, Homo sapiens
  misc_feature: Table A; Target 80734; HLA-C*04:01; SLC7A13; ENSG00000164893; CTA
VIDVGLVVI

SEQ ID NO: 80735 - protein, 9 aa, Homo sapiens
  misc_feature: Table A; Target 80735; HLA-C*05:01; SLC7A13; ENSG00000164893; CTA
VIDVGLVVI

SEQ ID NO: 80736 - protein, 10 aa, Homo sapiens
  misc_feature: Table A; Target 80736; HLA-A*02:07; SLC7A13; ENSG00000164893; CTA
VIPLVKSPNV

SEQ ID NO: 80737 - protein, 8 aa, Homo sapiens
  misc_feature: Table A; Target 80737; HLA-B*15:03; SLC7A13; ENSG00000164893; CTA
VKSPNVHY

SEQ ID NO: 80738 - protein, 10 aa, Homo sapiens
  misc_feature: Table A; Target 80738; HLA-A*29:02; SLC7A13; ENSG00000164893; CTA
VKSPNVHYVY

SEQ ID NO: 80739 - protein, 10 aa, Homo sapiens
  misc_feature: Table A; Target 80739; HLA-B*15:03; SLC7A13; ENSG00000164893; CTA
VKSPNVHYVY

SEQ ID NO: 80740 - protein, 9 aa, Homo sapiens
  misc_feature: Table A; Target 80740; HLA-A*02:03; SLC7A13; ENSG00000164893; CTA
VLKVSILSF

SEQ ID NO: 80741 - protein, 9 aa, Homo sapiens
  misc_feature: Table A; Target 80741; HLA-A*23:01; SLC7A13; ENSG00000164893; CTA
VLKVSILSF

SEQ ID NO: 80742 - protein, 9 aa, Homo sapiens
  misc_feature: Table A; Target 80742; HLA-A*24:02; SLC7A13; ENSG00000164893; CTA
VLKVSILSF

SEQ ID NO: 80743 - protein, 9 aa, Homo sapiens
  misc_feature: Table A; Target 80743; HLA-B*08:01; SLC7A13; ENSG00000164893; CTA
VLKVSILSF

SEQ ID NO: 80744 - protein, 9 aa, Homo sapiens
  misc_feature: Table A; Target 80744; HLA-B*46:01; SLC7A13; ENSG00000164893; CTA
VLKVSILSF

SEQ ID NO: 80745 - protein, 10 aa, Homo sapiens
  misc_feature: Table A; Target 80745; HLA-A*02:03; SLC7A13; ENSG00000164893; CTA
VLKVSILSFI

SEQ ID NO: 80746 - protein, 9 aa, Homo sapiens
  misc_feature: Table A; Target 80746; HLA-A*02:04; SLC7A13; ENSG00000164893; CTA
VLLLVLSGL

SEQ ID NO: 80747 - protein, 9 aa, Homo sapiens
  misc_feature: Table A; Target 80747; HLA-A*02:01; SLC7A13; ENSG00000164893; CTA
VLSGLLFYI

SEQ ID NO: 80748 - protein, 9 aa, Homo sapiens
  misc_feature: Table A; Target 80748; HLA-A*02:03; SLC7A13; ENSG00000164893; CTA
VLSGLLFYI

SEQ ID NO: 80749 - protein, 9 aa, Homo sapiens
  misc_feature: Table A; Target 80749; HLA-A*02:04; SLC7A13; ENSG00000164893; CTA
VLSGLLFYI

SEQ ID NO: 80750 - protein, 9 aa, Homo sapiens
  misc_feature: Table A; Target 80750; HLA-A*02:07; SLC7A13; ENSG00000164893; CTA
VLSGLLFYI

SEQ ID NO: 80751 - protein, 9 aa, Homo sapiens
  misc_feature: Table A; Target 80751; HLA-B*07:02; SLC7A13; ENSG00000164893; CTA
VPKLPKKCL

SEQ ID NO: 80752 - protein, 9 aa, Homo sapiens
  misc_feature: Table A; Target 80752; HLA-C*07:02; SLC7A13; ENSG00000164893; CTA
VPKLPKKCL

SEQ ID NO: 80753 - protein, 9 aa, Homo sapiens
  misc_feature: Table A; Target 80753; HLA-B*46:01; SLC7A13; ENSG00000164893; CTA
VSILSFISL

SEQ ID NO: 80754 - protein, 9 aa, Homo sapiens
  misc_feature: Table A; Target 80754; HLA-C*01:02; SLC7A13; ENSG00000164893; CTA
VSILSFISL

SEQ ID NO: 80755 - protein, 9 aa, Homo sapiens
  misc_feature: Table A; Target 80755; HLA-C*03:03; SLC7A13; ENSG00000164893; CTA
VSILSFISL

SEQ ID NO: 80756 - protein, 9 aa, Homo sapiens
  misc_feature: Table A; Target 80756; HLA-C*03:04; SLC7A13; ENSG00000164893; CTA
VSILSFISL

SEQ ID NO: 80757 - protein, 9 aa, Homo sapiens
  misc_feature: Table A; Target 80757; HLA-A*01:01; SLC7A13; ENSG00000164893; CTA
VSPKGVLAY

SEQ ID NO: 80758 - protein, 9 aa, Homo sapiens
  misc_feature: Table A; Target 80758; HLA-A*25:01; SLC7A13; ENSG00000164893; CTA
VSPKGVLAY

SEQ ID NO: 80759 - protein, 9 aa, Homo sapiens
  misc_feature: Table A; Target 80759; HLA-A*26:01; SLC7A13; ENSG00000164893; CTA
VSPKGVLAY

SEQ ID NO: 80760 - protein, 9 aa, Homo sapiens
  misc_feature: Table A; Target 80760; HLA-A*29:02; SLC7A13; ENSG00000164893; CTA
VSPKGVLAY

SEQ ID NO: 80761 - protein, 9 aa, Homo sapiens
  misc_feature: Table A; Target 80761; HLA-A*30:02; SLC7A13; ENSG00000164893; CTA
VSPKGVLAY

SEQ ID NO: 80762 - protein, 9 aa, Homo sapiens
  misc_feature: Table A; Target 80762; HLA-A*32:01; SLC7A13; ENSG00000164893; CTA
VSPKGVLAY

SEQ ID NO: 80763 - protein, 9 aa, Homo sapiens
  misc_feature: Table A; Target 80763; HLA-B*15:01; SLC7A13; ENSG00000164893; CTA
VSPKGVLAY

SEQ ID NO: 80764 - protein, 9 aa, Homo sapiens
  misc_feature: Table A; Target 80764; HLA-B*15:03; SLC7A13; ENSG00000164893; CTA
VSPKGVLAY

SEQ ID NO: 80765 - protein, 9 aa, Homo sapiens
  misc_feature: Table A; Target 80765; HLA-B*46:01; SLC7A13; ENSG00000164893; CTA
VSPKGVLAY

SEQ ID NO: 80766 - protein, 9 aa, Homo sapiens
  misc_feature: Table A; Target 80766; HLA-B*57:01; SLC7A13; ENSG00000164893; CTA
VSPKGVLAY

SEQ ID NO: 80767 - protein, 9 aa, Homo sapiens
  misc_feature: Table A; Target 80767; HLA-B*58:01; SLC7A13; ENSG00000164893; CTA
VSPKGVLAY

SEQ ID NO: 80768 - protein, 9 aa, Homo sapiens
  misc_feature: Table A; Target 80768; HLA-C*01:02; SLC7A13; ENSG00000164893; CTA
VSPKGVLAY

SEQ ID NO: 80769 - protein, 9 aa, Homo sapiens
  misc_feature: Table A; Target 80769; HLA-C*02:02; SLC7A13; ENSG00000164893; CTA
VSPKGVLAY

SEQ ID NO: 80770 - protein, 9 aa, Homo sapiens
  misc_feature: Table A; Target 80770; HLA-C*16:01; SLC7A13; ENSG00000164893; CTA
VSPKGVLAY

SEQ ID NO: 80771 - protein, 9 aa, Homo sapiens
  misc_feature: Table A; Target 80771; HLA-C*16:02; SLC7A13; ENSG00000164893; CTA
VSPKGVLAY

SEQ ID NO: 80772 - protein, 9 aa, Homo sapiens
  misc_feature: Table A; Target 80772; HLA-A*23:01; SLC7A13; ENSG00000164893; CTA
VTLGSLAII

SEQ ID NO: 80773 - protein, 9 aa, Homo sapiens
  misc_feature: Table A; Target 80773; HLA-A*03:01; SLC7A13; ENSG00000164893; CTA
VVAGQALLL

SEQ ID NO: 80774 - protein, 9 aa, Homo sapiens
  misc_feature: Table A; Target 80774; HLA-A*11:01; SLC7A13; ENSG00000164893; CTA
VVAGQALLL

SEQ ID NO: 80775 - protein, 9 aa, Homo sapiens
  misc_feature: Table A; Target 80775; HLA-A*23:01; SLC7A13; ENSG00000164893; CTA
VVAGQALLL

SEQ ID NO: 80776 - protein, 9 aa, Homo sapiens
  misc_feature: Table A; Target 80776; HLA-A*29:02; SLC7A13; ENSG00000164893; CTA
VVAGQALLL

SEQ ID NO: 80777 - protein, 9 aa, Homo sapiens
  misc_feature: Table A; Target 80777; HLA-B*13:02; SLC7A13; ENSG00000164893; CTA
VVAGQALLL

SEQ ID NO: 80778 - protein, 9 aa, Homo sapiens
  misc_feature: Table A; Target 80778; HLA-C*02:02; SLC7A13; ENSG00000164893; CTA
VVAGQALLL

SEQ ID NO: 80779 - protein, 9 aa, Homo sapiens
  misc_feature: Table A; Target 80779; HLA-C*07:04; SLC7A13; ENSG00000164893; CTA
VVAGQALLL

SEQ ID NO: 80780 - protein, 9 aa, Homo sapiens
  misc_feature: Table A; Target 80780; HLA-A*32:01; SLC7A13; ENSG00000164893; CTA
VVIPLVKSP

SEQ ID NO: 80781 - protein, 10 aa, Homo sapiens
  misc_feature: Table A; Target 80781; HLA-A*31:01; SLC7A13; ENSG00000164893; CTA
VVIPLVKSPN

SEQ ID NO: 80782 - protein, 10 aa, Homo sapiens
  misc_feature: Table A; Target 80782; HLA-A*30:02; SLC7A13; ENSG00000164893; CTA
VVYLLVNISY

SEQ ID NO: 80783 - protein, 9 aa, Homo sapiens
  misc_feature: Table A; Target 80783; HLA-A*23:01; SLC7A13; ENSG00000164893; CTA
VYLLVNISY

SEQ ID NO: 80784 - protein, 9 aa, Homo sapiens
  misc_feature: Table A; Target 80784; HLA-A*24:02; SLC7A13; ENSG00000164893; CTA
VYLLVNISY

SEQ ID NO: 80785 - protein, 9 aa, Homo sapiens
  misc_feature: Table A; Target 80785; HLA-A*29:02; SLC7A13; ENSG00000164893; CTA
VYLLVNISY

SEQ ID NO: 80786 - protein, 9 aa, Homo sapiens
  misc_feature: Table A; Target 80786; HLA-A*30:02; SLC7A13; ENSG00000164893; CTA
VYLLVNISY

SEQ ID NO: 80787 - protein, 9 aa, Homo sapiens
  misc_feature: Table A; Target 80787; HLA-C*14:02; SLC7A13; ENSG00000164893; CTA
VYLLVNISY

SEQ ID NO: 80788 - protein, 10 aa, Homo sapiens
  misc_feature: Table A; Target 80788; HLA-A*23:01; SLC7A13; ENSG00000164893; CTA
VYLLVNISYL

SEQ ID NO: 80789 - protein, 10 aa, Homo sapiens
  misc_feature: Table A; Target 80789; HLA-A*24:02; SLC7A13; ENSG00000164893; CTA
VYLLVNISYL

SEQ ID NO: 80790 - protein, 8 aa, Homo sapiens
  misc_feature: Table A; Target 80790; HLA-A*23:01; SLC7A13; ENSG00000164893; CTA
VYVLLLVL

SEQ ID NO: 80791 - protein, 9 aa, Homo sapiens
  misc_feature: Table A; Target 80791; HLA-C*03:04; SLC7A13; ENSG00000164893; CTA
WADRAFPSL

SEQ ID NO: 80792 - protein, 9 aa, Homo sapiens
  misc_feature: Table A; Target 80792; HLA-A*31:01; SLC7A13; ENSG00000164893; CTA
WIVGILTSR

SEQ ID NO: 80793 - protein, 8 aa, Homo sapiens
  misc_feature: Table A; Target 80793; HLA-A*23:01; SLC7A13; ENSG00000164893; CTA
YFGSTVAF

SEQ ID NO: 80794 - protein, 8 aa, Homo sapiens
  misc_feature: Table A; Target 80794; HLA-A*24:02; SLC7A13; ENSG00000164893; CTA
YFGSTVAF

SEQ ID NO: 80795 - protein, 8 aa, Homo sapiens
  misc_feature: Table A; Target 80795; HLA-C*07:04; SLC7A13; ENSG00000164893; CTA
YFGSTVAF

SEQ ID NO: 80796 - protein, 8 aa, Homo sapiens
  misc_feature: Table A; Target 80796; HLA-C*14:02; SLC7A13; ENSG00000164893; CTA
YFGSTVAF

SEQ ID NO: 80797 - protein, 9 aa, Homo sapiens
  misc_feature: Table A; Target 80797; HLA-A*23:01; SLC7A13; ENSG00000164893; CTA
YFGSTVAFL

SEQ ID NO: 80798 - protein, 9 aa, Homo sapiens
  misc_feature: Table A; Target 80798; HLA-A*24:02; SLC7A13; ENSG00000164893; CTA
YFGSTVAFL

SEQ ID NO: 80799 - protein, 9 aa, Homo sapiens
  misc_feature: Table A; Target 80799; HLA-A*29:02; SLC7A13; ENSG00000164893; CTA
YFGSTVAFL

SEQ ID NO: 80800 - protein, 9 aa, Homo sapiens
  misc_feature: Table A; Target 80800; HLA-A*29:02; SLC7A13; ENSG00000164893; CTA
YIFFTGSLW

SEQ ID NO: 80801 - protein, 9 aa, Homo sapiens
  misc_feature: Table A; Target 80801; HLA-B*57:01; SLC7A13; ENSG00000164893; CTA
YIFFTGSLW

SEQ ID NO: 80802 - protein, 9 aa, Homo sapiens
  misc_feature: Table A; Target 80802; HLA-A*02:07; SLC7A13; ENSG00000164893; CTA
YIPLIHFKI

SEQ ID NO: 80803 - protein, 9 aa, Homo sapiens
  misc_feature: Table A; Target 80803; HLA-A*24:02; SLC7A13; ENSG00000164893; CTA
YIPLIHFKI

SEQ ID NO: 80804 - protein, 9 aa, Homo sapiens
  misc_feature: Table A; Target 80804; HLA-A*02:01; SLC7A13; ENSG00000164893; CTA
YLASQEGQL

SEQ ID NO: 80805 - protein, 9 aa, Homo sapiens
  misc_feature: Table A; Target 80805; HLA-A*02:03; SLC7A13; ENSG00000164893; CTA
YLASQEGQL

SEQ ID NO: 80806 - protein, 9 aa, Homo sapiens
  misc_feature: Table A; Target 80806; HLA-B*39:01; SLC7A13; ENSG00000164893; CTA
YLASQEGQL

SEQ ID NO: 80807 - protein, 9 aa, Homo sapiens
  misc_feature: Table A; Target 80807; HLA-C*14:02; SLC7A13; ENSG00000164893; CTA
YLASQEGQL

SEQ ID NO: 80808 - protein, 9 aa, Homo sapiens
  misc_feature: Table A; Target 80808; HLA-A*02:01; SLC7A13; ENSG00000164893; CTA
YLLVNISYL

SEQ ID NO: 80809 - protein, 9 aa, Homo sapiens
  misc_feature: Table A; Target 80809; HLA-A*02:03; SLC7A13; ENSG00000164893; CTA
YLLVNISYL

SEQ ID NO: 80810 - protein, 9 aa, Homo sapiens
  misc_feature: Table A; Target 80810; HLA-A*02:04; SLC7A13; ENSG00000164893; CTA
YLLVNISYL

SEQ ID NO: 80811 - protein, 9 aa, Homo sapiens
  misc_feature: Table A; Target 80811; HLA-A*02:07; SLC7A13; ENSG00000164893; CTA
YLLVNISYL

SEQ ID NO: 80812 - protein, 8 aa, Homo sapiens
  misc_feature: Table A; Target 80812; HLA-A*02:04; SLC7A13; ENSG00000164893; CTA
YLQLLFNI

SEQ ID NO: 80813 - protein, 8 aa, Homo sapiens
  misc_feature: Table A; Target 80813; HLA-B*13:02; SLC7A13; ENSG00000164893; CTA
YQEPNLSI

SEQ ID NO: 80814 - protein, 10 aa, Homo sapiens
  misc_feature: Table A; Target 80814; HLA-A*01:01; SLC7A13; ENSG00000164893; CTA
YQEPNLSIPY

SEQ ID NO: 80815 - protein, 10 aa, Homo sapiens
  misc_feature: Table A; Target 80815; HLA-A*29:02; SLC7A13; ENSG00000164893; CTA
YQEPNLSIPY

SEQ ID NO: 80816 - protein, 10 aa, Homo sapiens
  misc_feature: Table A; Target 80816; HLA-A*30:02; SLC7A13; ENSG00000164893; CTA
YQEPNLSIPY

SEQ ID NO: 80817 - protein, 10 aa, Homo sapiens
  misc_feature: Table A; Target 80817; HLA-B*15:01; SLC7A13; ENSG00000164893; CTA
YQEPNLSIPY

SEQ ID NO: 80818 - protein, 10 aa, Homo sapiens
  misc_feature: Table A; Target 80818; HLA-B*15:03; SLC7A13; ENSG00000164893; CTA
YQEPNLSIPY

SEQ ID NO: 80819 - protein, 10 aa, Homo sapiens
  misc_feature: Table A; Target 80819; HLA-B*27:02; SLC7A13; ENSG00000164893; CTA
YQEPNLSIPY

SEQ ID NO: 80820 - protein, 10 aa, Homo sapiens
  misc_feature: Table A; Target 80820; HLA-B*39:01; SLC7A13; ENSG00000164893; CTA
YQEPNLSIPY

SEQ ID NO: 80821 - protein, 10 aa, Homo sapiens
  misc_feature: Table A; Target 80821; HLA-C*07:01; SLC7A13; ENSG00000164893; CTA
YQEPNLSIPY

SEQ ID NO: 80822 - protein, 10 aa, Homo sapiens
  misc_feature: Table A; Target 80822; HLA-C*07:04; SLC7A13; ENSG00000164893; CTA
YQEPNLSIPY

SEQ ID NO: 80823 - protein, 10 aa, Homo sapiens
  misc_feature: Table A; Target 80823; HLA-C*16:04; SLC7A13; ENSG00000164893; CTA
YQEPNLSIPY

SEQ ID NO: 80824 - protein, 10 aa, Homo sapiens
  misc_feature: Table A; Target 80824; HLA-C*03:03; SLC7A13; ENSG00000164893; CTA
YSCMNVGVSL

SEQ ID NO: 80825 - protein, 10 aa, Homo sapiens
  misc_feature: Table A; Target 80825; HLA-C*03:04; SLC7A13; ENSG00000164893; CTA
YSCMNVGVSL

SEQ ID NO: 80826 - protein, 10 aa, Homo sapiens
  misc_feature: Table A; Target 80826; HLA-B*54:01; SLC7A13; ENSG00000164893; CTA
YSIQPFFPSC

SEQ ID NO: 80827 - protein, 9 aa, Homo sapiens
  misc_feature: Table A; Target 80827; HLA-A*02:04; SLC7A13; ENSG00000164893; CTA
YVYVLLLVL

SEQ ID NO: 80828 - protein, 9 aa, Homo sapiens
  misc_feature: Table A; Target 80828; HLA-A*02:04; SMC1B; ENSG00000077935; CTA
AALALLFAV

SEQ ID NO: 80829 - protein, 10 aa, Homo sapiens
  misc_feature: Table A; Target 80829; HLA-A*03:01; SMC1B; ENSG00000077935; CTA
AALDNTNIGK

SEQ ID NO: 80830 - protein, 10 aa, Homo sapiens
  misc_feature: Table A; Target 80830; HLA-A*03:02; SMC1B; ENSG00000077935; CTA
AALDNTNIGK

SEQ ID NO: 80831 - protein, 10 aa, Homo sapiens
  misc_feature: Table A; Target 80831; HLA-A*11:01; SMC1B; ENSG00000077935; CTA
AALDNTNIGK

SEQ ID NO: 80832 - protein, 8 aa, Homo sapiens
  misc_feature: Table A; Target 80832; HLA-C*01:02; SMC1B; ENSG00000077935; CTA
AAPNLRAL

SEQ ID NO: 80833 - protein, 8 aa, Homo sapiens
  misc_feature: Table A; Target 80833; HLA-C*16:01; SMC1B; ENSG00000077935; CTA
AAPNLRAL

SEQ ID NO: 80834 - protein, 9 aa, Homo sapiens
  misc_feature: Table A; Target 80834; HLA-A*30:01; SMC1B; ENSG00000077935; CTA
AEEDAQFNF

SEQ ID NO: 80835 - protein, 9 aa, Homo sapiens
  misc_feature: Table A; Target 80835; HLA-B*18:01; SMC1B; ENSG00000077935; CTA
AEEDAQFNF

SEQ ID NO: 80836 - protein, 9 aa, Homo sapiens
  misc_feature: Table A; Target 80836; HLA-B*27:02; SMC1B; ENSG00000077935; CTA
AEEDAQFNF

SEQ ID NO: 80837 - protein, 9 aa, Homo sapiens
  misc_feature: Table A; Target 80837; HLA-B*37:01; SMC1B; ENSG00000077935; CTA
AEEDAQFNF

SEQ ID NO: 80838 - protein, 9 aa, Homo sapiens
  misc_feature: Table A; Target 80838; HLA-B*39:01; SMC1B; ENSG00000077935; CTA
AEEDAQFNF

SEQ ID NO: 80839 - protein, 9 aa, Homo sapiens
  misc_feature: Table A; Target 80839; HLA-B*40:01; SMC1B; ENSG00000077935; CTA
AEEDAQFNF

SEQ ID NO: 80840 - protein, 9 aa, Homo sapiens
  misc_feature: Table A; Target 80840; HLA-B*44:02; SMC1B; ENSG00000077935; CTA
AEEDAQFNF

SEQ ID NO: 80841 - protein, 9 aa, Homo sapiens
  misc_feature: Table A; Target 80841; HLA-B*44:03; SMC1B; ENSG00000077935; CTA
AEEDAQFNF

SEQ ID NO: 80842 - protein, 9 aa, Homo sapiens
  misc_feature: Table A; Target 80842; HLA-B*49:01; SMC1B; ENSG00000077935; CTA
AEEDAQFNF

SEQ ID NO: 80843 - protein, 9 aa, Homo sapiens
  misc_feature: Table A; Target 80843; HLA-C*16:04; SMC1B; ENSG00000077935; CTA
AEEDAQFNF

SEQ ID NO: 80844 - protein, 9 aa, Homo sapiens
  misc_feature: Table A; Target 80844; HLA-B*40:01; SMC1B; ENSG00000077935; CTA
AEENCLQTV

SEQ ID NO: 80845 - protein, 9 aa, Homo sapiens
  misc_feature: Table A; Target 80845; HLA-B*49:01; SMC1B; ENSG00000077935; CTA
AEENCLQTV

SEQ ID NO: 80846 - protein, 8 aa, Homo sapiens
  misc_feature: Table A; Target 80846; HLA-B*49:01; SMC1B; ENSG00000077935; CTA
AEKVQTQI

SEQ ID NO: 80847 - protein, 8 aa, Homo sapiens
  misc_feature: Table A; Target 80847; HLA-B*37:01; SMC1B; ENSG00000077935; CTA
AELEKIGI

SEQ ID NO: 80848 - protein, 8 aa, Homo sapiens
  misc_feature: Table A; Target 80848; HLA-B*44:02; SMC1B; ENSG00000077935; CTA
AELEKIGI

SEQ ID NO: 80849 - protein, 8 aa, Homo sapiens
  misc_feature: Table A; Target 80849; HLA-B*44:03; SMC1B; ENSG00000077935; CTA
AELEKIGI

SEQ ID NO: 80850 - protein, 8 aa, Homo sapiens
  misc_feature: Table A; Target 80850; HLA-B*49:01; SMC1B; ENSG00000077935; CTA
AELEKIGI

SEQ ID NO: 80851 - protein, 9 aa, Homo sapiens
  misc_feature: Table A; Target 80851; HLA-B*37:01; SMC1B; ENSG00000077935; CTA
AELEKIGII

SEQ ID NO: 80852 - protein, 9 aa, Homo sapiens
  misc_feature: Table A; Target 80852; HLA-B*40:01; SMC1B; ENSG00000077935; CTA
AELEKIGII

SEQ ID NO: 80853 - protein, 9 aa, Homo sapiens
  misc_feature: Table A; Target 80853; HLA-B*44:02; SMC1B; ENSG00000077935; CTA
AELEKIGII

SEQ ID NO: 80854 - protein, 9 aa, Homo sapiens
  misc_feature: Table A; Target 80854; HLA-B*44:03; SMC1B; ENSG00000077935; CTA
AELEKIGII

SEQ ID NO: 80855 - protein, 9 aa, Homo sapiens
  misc_feature: Table A; Target 80855; HLA-B*49:01; SMC1B; ENSG00000077935; CTA
AELEKIGII

SEQ ID NO: 80856 - protein, 10 aa, Homo sapiens
  misc_feature: Table A; Target 80856; HLA-B*49:01; SMC1B; ENSG00000077935; CTA
AELEKIGIIV

SEQ ID NO: 80857 - protein, 9 aa, Homo sapiens
  misc_feature: Table A; Target 80857; HLA-A*30:01; SMC1B; ENSG00000077935; CTA
AEPETFLAL

SEQ ID NO: 80858 - protein, 9 aa, Homo sapiens
  misc_feature: Table A; Target 80858; HLA-B*40:01; SMC1B; ENSG00000077935; CTA
AEPETFLAL

SEQ ID NO: 80859 - protein, 9 aa, Homo sapiens
  misc_feature: Table A; Target 80859; HLA-B*44:02; SMC1B; ENSG00000077935; CTA
AEPETFLAL

SEQ ID NO: 80860 - protein, 9 aa, Homo sapiens
  misc_feature: Table A; Target 80860; HLA-B*44:03; SMC1B; ENSG00000077935; CTA
AEPETFLAL

SEQ ID NO: 80861 - protein, 9 aa, Homo sapiens
  misc_feature: Table A; Target 80861; HLA-B*49:01; SMC1B; ENSG00000077935; CTA
AEPETFLAL

SEQ ID NO: 80862 - protein, 8 aa, Homo sapiens
  misc_feature: Table A; Target 80862; HLA-B*49:01; SMC1B; ENSG00000077935; CTA
AESTQATI

SEQ ID NO: 80863 - protein, 10 aa, Homo sapiens
  misc_feature: Table A; Target 80863; HLA-B*49:01; SMC1B; ENSG00000077935; CTA
AESTQATIDI

SEQ ID NO: 80864 - protein, 11 aa, Homo sapiens
  misc_feature: Table A; Target 80864; HLA-A*30:02; SMC1B; ENSG00000077935; CTA
AESTQATIDIY

SEQ ID NO: 80865 - protein, 11 aa, Homo sapiens
  misc_feature: Table A; Target 80865; HLA-B*27:02; SMC1B; ENSG00000077935; CTA
AESTQATIDIY

SEQ ID NO: 80866 - protein, 11 aa, Homo sapiens
  misc_feature: Table A; Target 80866; HLA-B*44:02; SMC1B; ENSG00000077935; CTA
AESTQATIDIY

SEQ ID NO: 80867 - protein, 11 aa, Homo sapiens
  misc_feature: Table A; Target 80867; HLA-B*44:03; SMC1B; ENSG00000077935; CTA
AESTQATIDIY

SEQ ID NO: 80868 - protein, 11 aa, Homo sapiens
  misc_feature: Table A; Target 80868; HLA-C*16:04; SMC1B; ENSG00000077935; CTA
AESTQATIDIY

SEQ ID NO: 80869 - protein, 11 aa, Homo sapiens
  misc_feature: Table A; Target 80869; HLA-B*44:02; SMC1B; ENSG00000077935; CTA
AEVLEHLKRLY

SEQ ID NO: 80870 - protein, 9 aa, Homo sapiens
  misc_feature: Table A; Target 80870; HLA-C*01:02; SMC1B; ENSG00000077935; CTA
AFEIDYSSL

SEQ ID NO: 80871 - protein, 9 aa, Homo sapiens
  misc_feature: Table A; Target 80871; HLA-C*14:02; SMC1B; ENSG00000077935; CTA
AFEIDYSSL

SEQ ID NO: 80872 - protein, 9 aa, Homo sapiens
  misc_feature: Table A; Target 80872; HLA-C*14:02; SMC1B; ENSG00000077935; CTA
AFYQEQSQL

SEQ ID NO: 80873 - protein, 9 aa, Homo sapiens
  misc_feature: Table A; Target 80873; HLA-A*11:01; SMC1B; ENSG00000077935; CTA
AGIDTHEGK

SEQ ID NO: 80874 - protein, 9 aa, Homo sapiens
  misc_feature: Table A; Target 80874; HLA-A*01:01; SMC1B; ENSG00000077935; CTA
ALDGTLFLK

SEQ ID NO: 80875 - protein, 9 aa, Homo sapiens
  misc_feature: Table A; Target 80875; HLA-A*03:01; SMC1B; ENSG00000077935; CTA
ALDGTLFLK

SEQ ID NO: 80876 - protein, 9 aa, Homo sapiens
  misc_feature: Table A; Target 80876; HLA-A*03:02; SMC1B; ENSG00000077935; CTA
ALDGTLFLK

SEQ ID NO: 80877 - protein, 9 aa, Homo sapiens
  misc_feature: Table A; Target 80877; HLA-A*11:01; SMC1B; ENSG00000077935; CTA
ALDGTLFLK

SEQ ID NO: 80878 - protein, 9 aa, Homo sapiens
  misc_feature: Table A; Target 80878; HLA-A*01:01; SMC1B; ENSG00000077935; CTA
ALDNTNIGK

SEQ ID NO: 80879 - protein, 9 aa, Homo sapiens
  misc_feature: Table A; Target 80879; HLA-A*03:01; SMC1B; ENSG00000077935; CTA
ALDNTNIGK

SEQ ID NO: 80880 - protein, 9 aa, Homo sapiens
  misc_feature: Table A; Target 80880; HLA-A*03:02; SMC1B; ENSG00000077935; CTA
ALDNTNIGK

SEQ ID NO: 80881 - protein, 9 aa, Homo sapiens
  misc_feature: Table A; Target 80881; HLA-A*11:01; SMC1B; ENSG00000077935; CTA
ALDNTNIGK

SEQ ID NO: 80882 - protein, 10 aa, Homo sapiens
  misc_feature: Table A; Target 80882; HLA-A*02:07; SMC1B; ENSG00000077935; CTA
ALDNTNIGKV

SEQ ID NO: 80883 - protein, 10 aa, Homo sapiens
  misc_feature: Table A; Target 80883; HLA-B*55:01; SMC1B; ENSG00000077935; CTA
ALDNTNIGKV

SEQ ID NO: 80884 - protein, 9 aa, Homo sapiens
  misc_feature: Table A; Target 80884; HLA-A*03:01; SMC1B; ENSG00000077935; CTA
ALIGIYPEY

SEQ ID NO: 80885 - protein, 9 aa, Homo sapiens
  misc_feature: Table A; Target 80885; HLA-A*23:01; SMC1B; ENSG00000077935; CTA
ALIGIYPEY

SEQ ID NO: 80886 - protein, 9 aa, Homo sapiens
  misc_feature: Table A; Target 80886; HLA-A*25:01; SMC1B; ENSG00000077935; CTA
ALIGIYPEY

SEQ ID NO: 80887 - protein, 9 aa, Homo sapiens
  misc_feature: Table A; Target 80887; HLA-A*26:01; SMC1B; ENSG00000077935; CTA
ALIGIYPEY

SEQ ID NO: 80888 - protein, 9 aa, Homo sapiens
  misc_feature: Table A; Target 80888; HLA-A*29:02; SMC1B; ENSG00000077935; CTA
ALIGIYPEY

SEQ ID NO: 80889 - protein, 9 aa, Homo sapiens
  misc_feature: Table A; Target 80889; HLA-A*30:02; SMC1B; ENSG00000077935; CTA
ALIGIYPEY

SEQ ID NO: 80890 - protein, 9 aa, Homo sapiens
  misc_feature: Table A; Target 80890; HLA-A*32:01; SMC1B; ENSG00000077935; CTA
ALIGIYPEY

SEQ ID NO: 80891 - protein, 9 aa, Homo sapiens
  misc_feature: Table A; Target 80891; HLA-B*15:01; SMC1B; ENSG00000077935; CTA
ALIGIYPEY

SEQ ID NO: 80892 - protein, 9 aa, Homo sapiens
  misc_feature: Table A; Target 80892; HLA-B*15:03; SMC1B; ENSG00000077935; CTA
ALIGIYPEY

SEQ ID NO: 80893 - protein, 9 aa, Homo sapiens
  misc_feature: Table A; Target 80893; HLA-B*35:01; SMC1B; ENSG00000077935; CTA
ALIGIYPEY

SEQ ID NO: 80894 - protein, 9 aa, Homo sapiens
  misc_feature: Table A; Target 80894; HLA-B*44:03; SMC1B; ENSG00000077935; CTA
ALIGIYPEY

SEQ ID NO: 80895 - protein, 9 aa, Homo sapiens
  misc_feature: Table A; Target 80895; HLA-B*46:01; SMC1B; ENSG00000077935; CTA
ALIGIYPEY

SEQ ID NO: 80896 - protein, 9 aa, Homo sapiens
  misc_feature: Table A; Target 80896; HLA-B*58:01; SMC1B; ENSG00000077935; CTA
ALIGIYPEY

SEQ ID NO: 80897 - protein, 9 aa, Homo sapiens
  misc_feature: Table A; Target 80897; HLA-C*02:02; SMC1B; ENSG00000077935; CTA
ALIGIYPEY

SEQ ID NO: 80898 - protein, 9 aa, Homo sapiens
  misc_feature: Table A; Target 80898; HLA-C*16:04; SMC1B; ENSG00000077935; CTA
ALIGIYPEY

SEQ ID NO: 80899 - protein, 9 aa, Homo sapiens
  misc_feature: Table A; Target 80899; HLA-A*02:04; SMC1B; ENSG00000077935; CTA
ALLFAVHSF

SEQ ID NO: 80900 - protein, 9 aa, Homo sapiens
  misc_feature: Table A; Target 80900; HLA-A*24:02; SMC1B; ENSG00000077935; CTA
ALLFAVHSF

SEQ ID NO: 80901 - protein, 9 aa, Homo sapiens
  misc_feature: Table A; Target 80901; HLA-A*32:01; SMC1B; ENSG00000077935; CTA
ALLFAVHSF

SEQ ID NO: 80902 - protein, 9 aa, Homo sapiens
  misc_feature: Table A; Target 80902; HLA-B*44:02; SMC1B; ENSG00000077935; CTA
ALLFAVHSF

SEQ ID NO: 80903 - protein, 9 aa, Homo sapiens
  misc_feature: Table A; Target 80903; HLA-A*03:01; SMC1B; ENSG00000077935; CTA
ALSFVMGEK

SEQ ID NO: 80904 - protein, 9 aa, Homo sapiens
  misc_feature: Table A; Target 80904; HLA-A*03:02; SMC1B; ENSG00000077935; CTA
ALSFVMGEK

SEQ ID NO: 80905 - protein, 9 aa, Homo sapiens
  misc_feature: Table A; Target 80905; HLA-A*03:01; SMC1B; ENSG00000077935; CTA
ALSGPERQK

SEQ ID NO: 80906 - protein, 9 aa, Homo sapiens
  misc_feature: Table A; Target 80906; HLA-A*03:02; SMC1B; ENSG00000077935; CTA
ALSGPERQK

SEQ ID NO: 80907 - protein, 9 aa, Homo sapiens
  misc_feature: Table A; Target 80907; HLA-B*56:01; SMC1B; ENSG00000077935; CTA
APFFVLDEV

SEQ ID NO: 80908 - protein, 9 aa, Homo sapiens
  misc_feature: Table A; Target 80908; HLA-B*07:02; SMC1B; ENSG00000077935; CTA
APNLRALEN

SEQ ID NO: 80909 - protein, 9 aa, Homo sapiens
  misc_feature: Table A; Target 80909; HLA-B*08:01; SMC1B; ENSG00000077935; CTA
APNLRALEN

SEQ ID NO: 80910 - protein, 9 aa, Homo sapiens
  misc_feature: Table A; Target 80910; HLA-C*07:02; SMC1B; ENSG00000077935; CTA
APNLRALEN

SEQ ID NO: 80911 - protein, 10 aa, Homo sapiens
  misc_feature: Table A; Target 80911; HLA-B*07:02; SMC1B; ENSG00000077935; CTA
APNLRALENL

SEQ ID NO: 80912 - protein, 10 aa, Homo sapiens
  misc_feature: Table A; Target 80912; HLA-C*07:02; SMC1B; ENSG00000077935; CTA
APNLRALENL

SEQ ID NO: 80913 - protein, 9 aa, Homo sapiens
  misc_feature: Table A; Target 80913; HLA-A*03:01; SMC1B; ENSG00000077935; CTA
ASQEDILLK

SEQ ID NO: 80914 - protein, 9 aa, Homo sapiens
  misc_feature: Table A; Target 80914; HLA-A*03:02; SMC1B; ENSG00000077935; CTA
ASQEDILLK

SEQ ID NO: 80915 - protein, 9 aa, Homo sapiens
  misc_feature: Table A; Target 80915; HLA-C*07:06; SMC1B; ENSG00000077935; CTA
ASQEDILLK

SEQ ID NO: 80916 - protein, 8 aa, Homo sapiens
  misc_feature: Table A; Target 80916; HLA-A*11:01; SMC1B; ENSG00000077935; CTA
ATIDIYEK

SEQ ID NO: 80917 - protein, 9 aa, Homo sapiens
  misc_feature: Table A; Target 80917; HLA-A*03:01; SMC1B; ENSG00000077935; CTA
ATMTQQLEK

SEQ ID NO: 80918 - protein, 9 aa, Homo sapiens
  misc_feature: Table A; Target 80918; HLA-A*03:02; SMC1B; ENSG00000077935; CTA
ATMTQQLEK

SEQ ID NO: 80919 - protein, 9 aa, Homo sapiens
  misc_feature: Table A; Target 80919; HLA-C*07:06; SMC1B; ENSG00000077935; CTA
ATMTQQLEK

SEQ ID NO: 80920 - protein, 9 aa, Homo sapiens
  misc_feature: Table A; Target 80920; HLA-A*02:07; SMC1B; ENSG00000077935; CTA
AVDREVGKL

SEQ ID NO: 80921 - protein, 9 aa, Homo sapiens
  misc_feature: Table A; Target 80921; HLA-C*05:01; SMC1B; ENSG00000077935; CTA
AVDREVGKL

SEQ ID NO: 80922 - protein, 11 aa, Homo sapiens
  misc_feature: Table A; Target 80922; HLA-A*11:01; SMC1B; ENSG00000077935; CTA
AVDREVGKLQK

SEQ ID NO: 80923 - protein, 8 aa, Homo sapiens
  misc_feature: Table A; Target 80923; HLA-A*31:01; SMC1B; ENSG00000077935; CTA
AVTKVFGR

SEQ ID NO: 80924 - protein, 9 aa, Homo sapiens
  misc_feature: Table A; Target 80924; HLA-B*49:01; SMC1B; ENSG00000077935; CTA
CEEIGVENI

SEQ ID NO: 80925 - protein, 10 aa, Homo sapiens
  misc_feature: Table A; Target 80925; HLA-A*03:01; SMC1B; ENSG00000077935; CTA
CIIGPNGSGK

SEQ ID NO: 80926 - protein, 10 aa, Homo sapiens
  misc_feature: Table A; Target 80926; HLA-A*03:02; SMC1B; ENSG00000077935; CTA
CIIGPNGSGK

SEQ ID NO: 80927 - protein, 10 aa, Homo sapiens
  misc_feature: Table A; Target 80927; HLA-A*11:01; SMC1B; ENSG00000077935; CTA
CIIGPNGSGK

SEQ ID NO: 80928 - protein, 11 aa, Homo sapiens
  misc_feature: Table A; Target 80928; HLA-A*03:02; SMC1B; ENSG00000077935; CTA
CLQTVNELMAK

SEQ ID NO: 80929 - protein, 9 aa, Homo sapiens
  misc_feature: Table A; Target 80929; HLA-A*02:03; SMC1B; ENSG00000077935; CTA
CMFSRVLTL

SEQ ID NO: 80930 - protein, 9 aa, Homo sapiens
  misc_feature: Table A; Target 80930; HLA-A*02:04; SMC1B; ENSG00000077935; CTA
CMFSRVLTL

SEQ ID NO: 80931 - protein, 9 aa, Homo sapiens
  misc_feature: Table A; Target 80931; HLA-B*08:01; SMC1B; ENSG00000077935; CTA
CMFSRVLTL

SEQ ID NO: 80932 - protein, 9 aa, Homo sapiens
  misc_feature: Table A; Target 80932; HLA-C*16:04; SMC1B; ENSG00000077935; CTA
CRNNSAQAF

SEQ ID NO: 80933 - protein, 9 aa, Homo sapiens
  misc_feature: Table A; Target 80933; HLA-B*27:05; SMC1B; ENSG00000077935; CTA
CRQEFEQVK

SEQ ID NO: 80934 - protein, 9 aa, Homo sapiens
  misc_feature: Table A; Target 80934; HLA-A*29:02; SMC1B; ENSG00000077935; CTA
CVAALALLF

SEQ ID NO: 80935 - protein, 9 aa, Homo sapiens
  misc_feature: Table A; Target 80935; HLA-B*51:01; SMC1B; ENSG00000077935; CTA
DAALDNTNI

SEQ ID NO: 80936 - protein, 11 aa, Homo sapiens
  misc_feature: Table A; Target 80936; HLA-A*68:01; SMC1B; ENSG00000077935; CTA
DAALDNTNIGK

SEQ ID NO: 80937 - protein, 11 aa, Homo sapiens
  misc_feature: Table A; Target 80937; HLA-C*07:06; SMC1B; ENSG00000077935; CTA
DAALDNTNIGK

SEQ ID NO: 80938 - protein, 8 aa, Homo sapiens
  misc_feature: Table A; Target 80938; HLA-B*51:01; SMC1B; ENSG00000077935; CTA
DAFEASRK

SEQ ID NO: 80939 - protein, 10 aa, Homo sapiens
  misc_feature: Table A; Target 80939; HLA-B*54:01; SMC1B; ENSG00000077935; CTA
DAFEASRKEA

SEQ ID NO: 80940 - protein, 11 aa, Homo sapiens
  misc_feature: Table A; Target 80940; HLA-A*33:01; SMC1B; ENSG00000077935; CTA
DAFEASRKEAR

SEQ ID NO: 80941 - protein, 10 aa, Homo sapiens
  misc_feature: Table A; Target 80941; HLA-A*25:01; SMC1B; ENSG00000077935; CTA
DALIGIYPEY

SEQ ID NO: 80942 - protein, 10 aa, Homo sapiens
  misc_feature: Table A; Target 80942; HLA-A*26:01; SMC1B; ENSG00000077935; CTA
DALIGIYPEY

SEQ ID NO: 80943 - protein, 10 aa, Homo sapiens
  misc_feature: Table A; Target 80943; HLA-A*33:01; SMC1B; ENSG00000077935; CTA
DALIGIYPEY

SEQ ID NO: 80944 - protein, 10 aa, Homo sapiens
  misc_feature: Table A; Target 80944; HLA-C*07:06; SMC1B; ENSG00000077935; CTA
DALIGIYPEY

SEQ ID NO: 80945 - protein, 8 aa, Homo sapiens
  misc_feature: Table A; Target 80945; HLA-A*33:01; SMC1B; ENSG00000077935; CTA
DAQFNFNK

SEQ ID NO: 80946 - protein, 8 aa, Homo sapiens
  misc_feature: Table A; Target 80946; HLA-B*27:02; SMC1B; ENSG00000077935; CTA
DAQFNFNK

SEQ ID NO: 80947 - protein, 9 aa, Homo sapiens
  misc_feature: Table A; Target 80947; HLA-A*33:01; SMC1B; ENSG00000077935; CTA
DAQFNFNKK

SEQ ID NO: 80948 - protein, 9 aa, Homo sapiens
  misc_feature: Table A; Target 80948; HLA-A*68:01; SMC1B; ENSG00000077935; CTA
DAQFNFNKK

SEQ ID NO: 80949 - protein, 10 aa, Homo sapiens
  misc_feature: Table A; Target 80949; HLA-A*33:01; SMC1B; ENSG00000077935; CTA
DCIRFLKEER

SEQ ID NO: 80950 - protein, 8 aa, Homo sapiens
  misc_feature: Table A; Target 80950; HLA-B*18:01; SMC1B; ENSG00000077935; CTA
DDIIEVEM

SEQ ID NO: 80951 - protein, 8 aa, Homo sapiens
  misc_feature: Table A; Target 80951; HLA-B*18:01; SMC1B; ENSG00000077935; CTA
DEKELKNL

SEQ ID NO: 80952 - protein, 9 aa, Homo sapiens
  misc_feature: Table A; Target 80952; HLA-B*08:01; SMC1B; ENSG00000077935; CTA
DIKALETEL

SEQ ID NO: 80953 - protein, 8 aa, Homo sapiens
  misc_feature: Table A; Target 80953; HLA-A*33:01; SMC1B; ENSG00000077935; CTA
DIKPINER

SEQ ID NO: 80954 - protein, 8 aa, Homo sapiens
  misc_feature: Table A; Target 80954; HLA-A*33:03; SMC1B; ENSG00000077935; CTA
DIKPINER

SEQ ID NO: 80955 - protein, 9 aa, Homo sapiens
  misc_feature: Table A; Target 80955; HLA-B*08:01; SMC1B; ENSG00000077935; CTA
DIKPINERL

SEQ ID NO: 80956 - protein, 10 aa, Homo sapiens
  misc_feature: Table A; Target 80956; HLA-A*33:01; SMC1B; ENSG00000077935; CTA
DIKPINERLR

SEQ ID NO: 80957 - protein, 8 aa, Homo sapiens
  misc_feature: Table A; Target 80957; HLA-B*08:01; SMC1B; ENSG00000077935; CTA
DILLKTAA

SEQ ID NO: 80958 - protein, 9 aa, Homo sapiens
  misc_feature: Table A; Target 80958; HLA-B*08:01; SMC1B; ENSG00000077935; CTA
DILLKTAAP

SEQ ID NO: 80959 - protein, 9 aa, Homo sapiens
  misc_feature: Table A; Target 80959; HLA-A*25:01; SMC1B; ENSG00000077935; CTA
DIYEKEEAF

SEQ ID NO: 80960 - protein, 9 aa, Homo sapiens
  misc_feature: Table A; Target 80960; HLA-A*26:01; SMC1B; ENSG00000077935; CTA
DIYEKEEAF

SEQ ID NO: 80961 - protein, 9 aa, Homo sapiens
  misc_feature: Table A; Target 80961; HLA-B*08:01; SMC1B; ENSG00000077935; CTA
DIYEKEEAF

SEQ ID NO: 80962 - protein, 9 aa, Homo sapiens
  misc_feature: Table A; Target 80962; HLA-B*18:01; SMC1B; ENSG00000077935; CTA
DIYEKEEAF

SEQ ID NO: 80963 - protein, 9 aa, Homo sapiens
  misc_feature: Table A; Target 80963; HLA-B*35:01; SMC1B; ENSG00000077935; CTA
DIYEKEEAF

SEQ ID NO: 80964 - protein, 9 aa, Homo sapiens
  misc_feature: Table A; Target 80964; HLA-A*33:01; SMC1B; ENSG00000077935; CTA
DLCHPIHKK

SEQ ID NO: 80965 - protein, 8 aa, Homo sapiens
  misc_feature: Table A; Target 80965; HLA-B*08:01; SMC1B; ENSG00000077935; CTA
DLKQIQTL

SEQ ID NO: 80966 - protein, 9 aa, Homo sapiens
  misc_feature: Table A; Target 80966; HLA-B*08:01; SMC1B; ENSG00000077935; CTA
DLSVKRESL

SEQ ID NO: 80967 - protein, 9 aa, Homo sapiens
  misc_feature: Table A; Target 80967; HLA-B*18:01; SMC1B; ENSG00000077935; CTA
DNLVSRSVY

SEQ ID NO: 80968 - protein, 11 aa, Homo sapiens
  misc_feature: Table A; Target 80968; HLA-A*25:01; SMC1B; ENSG00000077935; CTA
DNTNIGKVSSY

SEQ ID NO: 80969 - protein, 11 aa, Homo sapiens
  misc_feature: Table A; Target 80969; HLA-A*26:01; SMC1B; ENSG00000077935; CTA
DNTNIGKVSSY

SEQ ID NO: 80970 - protein, 9 aa, Homo sapiens
  misc_feature: Table A; Target 80970; HLA-A*33:01; SMC1B; ENSG00000077935; CTA
DQEIEAHLR

SEQ ID NO: 80971 - protein, 8 aa, Homo sapiens
  misc_feature: Table A; Target 80971; HLA-B*51:01; SMC1B; ENSG00000077935; CTA
DQFQMIVI

SEQ ID NO: 80972 - protein, 10 aa, Homo sapiens
  misc_feature: Table A; Target 80972; HLA-A*68:01; SMC1B; ENSG00000077935; CTA
DTEGQESSKR

SEQ ID NO: 80973 - protein, 10 aa, Homo sapiens
  misc_feature: Table A; Target 80973; HLA-A*25:01; SMC1B; ENSG00000077935; CTA
DVIKTQFPQL

SEQ ID NO: 80974 - protein, 10 aa, Homo sapiens
  misc_feature: Table A; Target 80974; HLA-A*26:01; SMC1B; ENSG00000077935; CTA
DVIKTQFPQL

SEQ ID NO: 80975 - protein, 10 aa, Homo sapiens
  misc_feature: Table A; Target 80975; HLA-A*68:01; SMC1B; ENSG00000077935; CTA
DVIKTQFPQL

SEQ ID NO: 80976 - protein, 11 aa, Homo sapiens
  misc_feature: Table A; Target 80976; HLA-A*33:01; SMC1B; ENSG00000077935; CTA
DYLDIKPINER

SEQ ID NO: 80977 - protein, 11 aa, Homo sapiens
  misc_feature: Table A; Target 80977; HLA-A*33:03; SMC1B; ENSG00000077935; CTA
DYLDIKPINER

SEQ ID NO: 80978 - protein, 9 aa, Homo sapiens
  misc_feature: Table A; Target 80978; HLA-B*51:01; SMC1B; ENSG00000077935; CTA
EAESTQATI

SEQ ID NO: 80979 - protein, 9 aa, Homo sapiens
  misc_feature: Table A; Target 80979; HLA-C*05:01; SMC1B; ENSG00000077935; CTA
EAESTQATI

SEQ ID NO: 80980 - protein, 10 aa, Homo sapiens
  misc_feature: Table A; Target 80980; HLA-A*25:01; SMC1B; ENSG00000077935; CTA
EAFEIDYSSL

SEQ ID NO: 80981 - protein, 10 aa, Homo sapiens
  misc_feature: Table A; Target 80981; HLA-A*26:01; SMC1B; ENSG00000077935; CTA
EAFEIDYSSL

SEQ ID NO: 80982 - protein, 10 aa, Homo sapiens
  misc_feature: Table A; Target 80982; HLA-A*68:01; SMC1B; ENSG00000077935; CTA
EAFEIDYSSL

SEQ ID NO: 80983 - protein, 10 aa, Homo sapiens
  misc_feature: Table A; Target 80983; HLA-A*68:02; SMC1B; ENSG00000077935; CTA
EAFEIDYSSL

SEQ ID NO: 80984 - protein, 10 aa, Homo sapiens
  misc_feature: Table A; Target 80984; HLA-B*35:01; SMC1B; ENSG00000077935; CTA
EAFEIDYSSL

SEQ ID NO: 80985 - protein, 10 aa, Homo sapiens
  misc_feature: Table A; Target 80985; HLA-B*35:03; SMC1B; ENSG00000077935; CTA
EAFEIDYSSL

SEQ ID NO: 80986 - protein, 10 aa, Homo sapiens
  misc_feature: Table A; Target 80986; HLA-C*07:06; SMC1B; ENSG00000077935; CTA
EAFEIDYSSL

SEQ ID NO: 80987 - protein, 8 aa, Homo sapiens
  misc_feature: Table A; Target 80987; HLA-B*08:01; SMC1B; ENSG00000077935; CTA
EAHLRLLL

SEQ ID NO: 80988 - protein, 9 aa, Homo sapiens
  misc_feature: Table A; Target 80988; HLA-B*27:02; SMC1B; ENSG00000077935; CTA
EDAQFNFNK

SEQ ID NO: 80989 - protein, 10 aa, Homo sapiens
  misc_feature: Table A; Target 80989; HLA-A*68:01; SMC1B; ENSG00000077935; CTA
EDAQFNFNKK

SEQ ID NO: 80990 - protein, 9 aa, Homo sapiens
  misc_feature: Table A; Target 80990; HLA-A*25:01; SMC1B; ENSG00000077935; CTA
EEAERYQSL

SEQ ID NO: 80991 - protein, 9 aa, Homo sapiens
  misc_feature: Table A; Target 80991; HLA-A*30:01; SMC1B; ENSG00000077935; CTA
EEAERYQSL

SEQ ID NO: 80992 - protein, 9 aa, Homo sapiens
  misc_feature: Table A; Target 80992; HLA-B*08:01; SMC1B; ENSG00000077935; CTA
EEAERYQSL

SEQ ID NO: 80993 - protein, 9 aa, Homo sapiens
  misc_feature: Table A; Target 80993; HLA-B*18:01; SMC1B; ENSG00000077935; CTA
EEAERYQSL

SEQ ID NO: 80994 - protein, 9 aa, Homo sapiens
  misc_feature: Table A; Target 80994; HLA-B*37:01; SMC1B; ENSG00000077935; CTA
EEAERYQSL

SEQ ID NO: 80995 - protein, 9 aa, Homo sapiens
  misc_feature: Table A; Target 80995; HLA-B*40:01; SMC1B; ENSG00000077935; CTA
EEAERYQSL

SEQ ID NO: 80996 - protein, 9 aa, Homo sapiens
  misc_feature: Table A; Target 80996; HLA-B*44:02; SMC1B; ENSG00000077935; CTA
EEAERYQSL

SEQ ID NO: 80997 - protein, 9 aa, Homo sapiens
  misc_feature: Table A; Target 80997; HLA-B*44:03; SMC1B; ENSG00000077935; CTA
EEAERYQSL

SEQ ID NO: 80998 - protein, 9 aa, Homo sapiens
  misc_feature: Table A; Target 80998; HLA-C*16:04; SMC1B; ENSG00000077935; CTA
EEAERYQSL

SEQ ID NO: 80999 - protein, 8 aa, Homo sapiens
  misc_feature: Table A; Target 80999; HLA-B*18:01; SMC1B; ENSG00000077935; CTA
EEAFEIDY

SEQ ID NO: 81000 - protein, 8 aa, Homo sapiens
  misc_feature: Table A; Target 81000; HLA-B*18:01; SMC1B; ENSG00000077935; CTA
EEARHIAL

SEQ ID NO: 81001 - protein, 8 aa, Homo sapiens
  misc_feature: Table A; Target 81001; HLA-B*37:01; SMC1B; ENSG00000077935; CTA
EEARHIAL

SEQ ID NO: 81002 - protein, 8 aa, Homo sapiens
  misc_feature: Table A; Target 81002; HLA-B*18:01; SMC1B; ENSG00000077935; CTA
EEDAQFNF

SEQ ID NO: 81003 - protein, 8 aa, Homo sapiens
  misc_feature: Table A; Target 81003; HLA-B*37:01; SMC1B; ENSG00000077935; CTA
EEDAQFNF

SEQ ID NO: 81004 - protein, 8 aa, Homo sapiens
  misc_feature: Table A; Target 81004; HLA-B*44:02; SMC1B; ENSG00000077935; CTA
EEDAQFNF

SEQ ID NO: 81005 - protein, 8 aa, Homo sapiens
  misc_feature: Table A; Target 81005; HLA-B*44:03; SMC1B; ENSG00000077935; CTA
EEDAQFNF

SEQ ID NO: 81006 - protein, 10 aa, Homo sapiens
  misc_feature: Table A; Target 81006; HLA-B*40:01; SMC1B; ENSG00000077935; CTA
EEFYSRADAL

SEQ ID NO: 81007 - protein, 8 aa, Homo sapiens
  misc_feature: Table A; Target 81007; HLA-B*18:01; SMC1B; ENSG00000077935; CTA
EEIGVENI

SEQ ID NO: 81008 - protein, 8 aa, Homo sapiens
  misc_feature: Table A; Target 81008; HLA-B*49:01; SMC1B; ENSG00000077935; CTA
EEIGVENI

SEQ ID NO: 81009 - protein, 11 aa, Homo sapiens
  misc_feature: Table A; Target 81009; HLA-A*25:01; SMC1B; ENSG00000077935; CTA
EEIGVENIREF

SEQ ID NO: 81010 - protein, 11 aa, Homo sapiens
  misc_feature: Table A; Target 81010; HLA-A*26:01; SMC1B; ENSG00000077935; CTA
EEIGVENIREF

SEQ ID NO: 81011 - protein, 11 aa, Homo sapiens
  misc_feature: Table A; Target 81011; HLA-A*30:01; SMC1B; ENSG00000077935; CTA
EEIGVENIREF

SEQ ID NO: 81012 - protein, 11 aa, Homo sapiens
  misc_feature: Table A; Target 81012; HLA-B*18:01; SMC1B; ENSG00000077935; CTA
EEIGVENIREF

SEQ ID NO: 81013 - protein, 11 aa, Homo sapiens
  misc_feature: Table A; Target 81013; HLA-B*27:02; SMC1B; ENSG00000077935; CTA
EEIGVENIREF

SEQ ID NO: 81014 - protein, 11 aa, Homo sapiens
  misc_feature: Table A; Target 81014; HLA-C*16:04; SMC1B; ENSG00000077935; CTA
EEIGVENIREF

SEQ ID NO: 81015 - protein, 9 aa, Homo sapiens
  misc_feature: Table A; Target 81015; HLA-A*30:01; SMC1B; ENSG00000077935; CTA
EEISTSGEL

SEQ ID NO: 81016 - protein, 9 aa, Homo sapiens
  misc_feature: Table A; Target 81016; HLA-B*40:01; SMC1B; ENSG00000077935; CTA
EEISTSGEL

SEQ ID NO: 81017 - protein, 9 aa, Homo sapiens
  misc_feature: Table A; Target 81017; HLA-B*44:02; SMC1B; ENSG00000077935; CTA
EEISTSGEL

SEQ ID NO: 81018 - protein, 9 aa, Homo sapiens
  misc_feature: Table A; Target 81018; HLA-B*44:03; SMC1B; ENSG00000077935; CTA
EEISTSGEL

SEQ ID NO: 81019 - protein, 10 aa, Homo sapiens
  misc_feature: Table A; Target 81019; HLA-B*40:01; SMC1B; ENSG00000077935; CTA
EEISTSGELI

SEQ ID NO: 81020 - protein, 10 aa, Homo sapiens
  misc_feature: Table A; Target 81020; HLA-B*44:02; SMC1B; ENSG00000077935; CTA
EEISTSGELI

SEQ ID NO: 81021 - protein, 10 aa, Homo sapiens
  misc_feature: Table A; Target 81021; HLA-B*44:03; SMC1B; ENSG00000077935; CTA
EEISTSGELI

SEQ ID NO: 81022 - protein, 10 aa, Homo sapiens
  misc_feature: Table A; Target 81022; HLA-B*49:01; SMC1B; ENSG00000077935; CTA
EEISTSGELI

SEQ ID NO: 81023 - protein, 8 aa, Homo sapiens
  misc_feature: Table A; Target 81023; HLA-B*49:01; SMC1B; ENSG00000077935; CTA
EELKMNKI

SEQ ID NO: 81024 - protein, 10 aa, Homo sapiens
  misc_feature: Table A; Target 81024; HLA-B*40:01; SMC1B; ENSG00000077935; CTA
EELKMNKIQL

SEQ ID NO: 81025 - protein, 10 aa, Homo sapiens
  misc_feature: Table A; Target 81025; HLA-B*44:03; SMC1B; ENSG00000077935; CTA
EELKMNKIQL

SEQ ID NO: 81026 - protein, 10 aa, Homo sapiens
  misc_feature: Table A; Target 81026; HLA-B*18:01; SMC1B; ENSG00000077935; CTA
EELNLIRSEL

SEQ ID NO: 81027 - protein, 10 aa, Homo sapiens
  misc_feature: Table A; Target 81027; HLA-B*40:01; SMC1B; ENSG00000077935; CTA
EELNLIRSEL

SEQ ID NO: 81028 - protein, 10 aa, Homo sapiens
  misc_feature: Table A; Target 81028; HLA-B*44:02; SMC1B; ENSG00000077935; CTA
EELNLIRSEL

SEQ ID NO: 81029 - protein, 10 aa, Homo sapiens
  misc_feature: Table A; Target 81029; HLA-B*44:03; SMC1B; ENSG00000077935; CTA
EELNLIRSEL

SEQ ID NO: 81030 - protein, 10 aa, Homo sapiens
  misc_feature: Table A; Target 81030; HLA-B*18:01; SMC1B; ENSG00000077935; CTA
EEPYLEGISY

SEQ ID NO: 81031 - protein, 10 aa, Homo sapiens
  misc_feature: Table A; Target 81031; HLA-B*44:02; SMC1B; ENSG00000077935; CTA
EEPYLEGISY

SEQ ID NO: 81032 - protein, 10 aa, Homo sapiens
  misc_feature: Table A; Target 81032; HLA-B*44:03; SMC1B; ENSG00000077935; CTA
EEPYLEGISY

SEQ ID NO: 81033 - protein, 9 aa, Homo sapiens
  misc_feature: Table A; Target 81033; HLA-B*18:01; SMC1B; ENSG00000077935; CTA
EERAEPETF

SEQ ID NO: 81034 - protein, 9 aa, Homo sapiens
  misc_feature: Table A; Target 81034; HLA-B*44:02; SMC1B; ENSG00000077935; CTA
EERAEPETF

SEQ ID NO: 81035 - protein, 9 aa, Homo sapiens
  misc_feature: Table A; Target 81035; HLA-B*44:03; SMC1B; ENSG00000077935; CTA
EERAEPETF

SEQ ID NO: 81036 - protein, 9 aa, Homo sapiens
  misc_feature: Table A; Target 81036; HLA-B*44:02; SMC1B; ENSG00000077935; CTA
EESGEEKTF

SEQ ID NO: 81037 - protein, 9 aa, Homo sapiens
  misc_feature: Table A; Target 81037; HLA-B*44:03; SMC1B; ENSG00000077935; CTA
EESGEEKTF

SEQ ID NO: 81038 - protein, 9 aa, Homo sapiens
  misc_feature: Table A; Target 81038; HLA-C*16:04; SMC1B; ENSG00000077935; CTA
EESGEEKTF

SEQ ID NO: 81039 - protein, 8 aa, Homo sapiens
  misc_feature: Table A; Target 81039; HLA-B*18:01; SMC1B; ENSG00000077935; CTA
EETLVDEI

SEQ ID NO: 81040 - protein, 8 aa, Homo sapiens
  misc_feature: Table A; Target 81040; HLA-B*49:01; SMC1B; ENSG00000077935; CTA
EETLVDEI

SEQ ID NO: 81041 - protein, 8 aa, Homo sapiens
  misc_feature: Table A; Target 81041; HLA-B*08:01; SMC1B; ENSG00000077935; CTA
EEYTKTCM

SEQ ID NO: 81042 - protein, 8 aa, Homo sapiens
  misc_feature: Table A; Target 81042; HLA-B*18:01; SMC1B; ENSG00000077935; CTA
EEYTKTCM

SEQ ID NO: 81043 - protein, 9 aa, Homo sapiens
  misc_feature: Table A; Target 81043; HLA-A*33:01; SMC1B; ENSG00000077935; CTA
EFENKHVKR

SEQ ID NO: 81044 - protein, 9 aa, Homo sapiens
  misc_feature: Table A; Target 81044; HLA-A*33:03; SMC1B; ENSG00000077935; CTA
EFENKHVKR

SEQ ID NO: 81045 - protein, 10 aa, Homo sapiens
  misc_feature: Table A; Target 81045; HLA-A*33:03; SMC1B; ENSG00000077935; CTA
EFNEELNLIR

SEQ ID NO: 81046 - protein, 11 aa, Homo sapiens
  misc_feature: Table A; Target 81046; HLA-A*33:01; SMC1B; ENSG00000077935; CTA
EFRFNDNLVSR

SEQ ID NO: 81047 - protein, 9 aa, Homo sapiens
  misc_feature: Table A; Target 81047; HLA-B*08:01; SMC1B; ENSG00000077935; CTA
EFYSRADAL

SEQ ID NO: 81048 - protein, 9 aa, Homo sapiens
  misc_feature: Table A; Target 81048; HLA-B*38:01; SMC1B; ENSG00000077935; CTA
EHGMLTRQL

SEQ ID NO: 81049 - protein, 9 aa, Homo sapiens
  misc_feature: Table A; Target 81049; HLA-B*38:01; SMC1B; ENSG00000077935; CTA
EHVNRDLSV

SEQ ID NO: 81050 - protein, 9 aa, Homo sapiens
  misc_feature: Table A; Target 81050; HLA-B*39:01; SMC1B; ENSG00000077935; CTA
EHVNRDLSV

SEQ ID NO: 81051 - protein, 10 aa, Homo sapiens
  misc_feature: Table A; Target 81051; HLA-B*38:01; SMC1B; ENSG00000077935; CTA
EHVSISIDQI

SEQ ID NO: 81052 - protein, 9 aa, Homo sapiens
  misc_feature: Table A; Target 81052; HLA-A*01:01; SMC1B; ENSG00000077935; CTA
EIDQKRYFY

SEQ ID NO: 81053 - protein, 10 aa, Homo sapiens
  misc_feature: Table A; Target 81053; HLA-A*25:01; SMC1B; ENSG00000077935; CTA
EIGVENIREF

SEQ ID NO: 81054 - protein, 9 aa, Homo sapiens
  misc_feature: Table A; Target 81054; HLA-A*25:01; SMC1B; ENSG00000077935; CTA
EIILLSGSL

SEQ ID NO: 81055 - protein, 9 aa, Homo sapiens
  misc_feature: Table A; Target 81055; HLA-A*68:02; SMC1B; ENSG00000077935; CTA
EKIGIIVKA

SEQ ID NO: 81056 - protein, 9 aa, Homo sapiens
  misc_feature: Table A; Target 81056; HLA-A*25:01; SMC1B; ENSG00000077935; CTA
ELADLDAAW

SEQ ID NO: 81057 - protein, 10 aa, Homo sapiens
  misc_feature: Table A; Target 81057; HLA-A*01:01; SMC1B; ENSG00000077935; CTA
ELEASQLDRY

SEQ ID NO: 81058 - protein, 9 aa, Homo sapiens
  misc_feature: Table A; Target 81058; HLA-A*33:01; SMC1B; ENSG00000077935; CTA
ELIGEYEEK

SEQ ID NO: 81059 - protein, 9 aa, Homo sapiens
  misc_feature: Table A; Target 81059; HLA-A*33:03; SMC1B; ENSG00000077935; CTA
ELIGEYEEK

SEQ ID NO: 81060 - protein, 9 aa, Homo sapiens
  misc_feature: Table A; Target 81060; HLA-A*68:01; SMC1B; ENSG00000077935; CTA
ELIGEYEEK

SEQ ID NO: 81061 - protein, 9 aa, Homo sapiens
  misc_feature: Table A; Target 81061; HLA-B*08:01; SMC1B; ENSG00000077935; CTA
ELKMNKIQL

SEQ ID NO: 81062 - protein, 8 aa, Homo sapiens
  misc_feature: Table A; Target 81062; HLA-B*08:01; SMC1B; ENSG00000077935; CTA
ELKSVETL

SEQ ID NO: 81063 - protein, 9 aa, Homo sapiens
  misc_feature: Table A; Target 81063; HLA-A*25:01; SMC1B; ENSG00000077935; CTA
ELMAKQQQL

SEQ ID NO: 81064 - protein, 9 aa, Homo sapiens
  misc_feature: Table A; Target 81064; HLA-A*26:01; SMC1B; ENSG00000077935; CTA
ELMAKQQQL

SEQ ID NO: 81065 - protein, 9 aa, Homo sapiens
  misc_feature: Table A; Target 81065; HLA-B*08:01; SMC1B; ENSG00000077935; CTA
ELMAKQQQL

SEQ ID NO: 81066 - protein, 9 aa, Homo sapiens
  misc_feature: Table A; Target 81066; HLA-B*08:01; SMC1B; ENSG00000077935; CTA
ELNLIRSEL

SEQ ID NO: 81067 - protein, 9 aa, Homo sapiens
  misc_feature: Table A; Target 81067; HLA-A*25:01; SMC1B; ENSG00000077935; CTA
EPYLEGISY

SEQ ID NO: 81068 - protein, 9 aa, Homo sapiens
  misc_feature: Table A; Target 81068; HLA-A*26:01; SMC1B; ENSG00000077935; CTA
EPYLEGISY

SEQ ID NO: 81069 - protein, 9 aa, Homo sapiens
  misc_feature: Table A; Target 81069; HLA-B*15:03; SMC1B; ENSG00000077935; CTA
EPYLEGISY

SEQ ID NO: 81070 - protein, 9 aa, Homo sapiens
  misc_feature: Table A; Target 81070; HLA-B*18:01; SMC1B; ENSG00000077935; CTA
EPYLEGISY

SEQ ID NO: 81071 - protein, 9 aa, Homo sapiens
  misc_feature: Table A; Target 81071; HLA-B*35:03; SMC1B; ENSG00000077935; CTA
EPYLEGISY

SEQ ID NO: 81072 - protein, 9 aa, Homo sapiens
  misc_feature: Table A; Target 81072; HLA-B*55:01; SMC1B; ENSG00000077935; CTA
EPYLEGISY

SEQ ID NO: 81073 - protein, 9 aa, Homo sapiens
  misc_feature: Table A; Target 81073; HLA-C*03:03; SMC1B; ENSG00000077935; CTA
EPYLEGISY

SEQ ID NO: 81074 - protein, 9 aa, Homo sapiens
  misc_feature: Table A; Target 81074; HLA-B*39:01; SMC1B; ENSG00000077935; CTA
EQSQLQSEL

SEQ ID NO: 81075 - protein, 10 aa, Homo sapiens
  misc_feature: Table A; Target 81075; HLA-B*38:01; SMC1B; ENSG00000077935; CTA
EQSQLQSELL

SEQ ID NO: 81076 - protein, 9 aa, Homo sapiens
  misc_feature: Table A; Target 81076; HLA-B*38:01; SMC1B; ENSG00000077935; CTA
ERAEPETFL

SEQ ID NO: 81077 - protein, 9 aa, Homo sapiens
  misc_feature: Table A; Target 81077; HLA-B*39:01; SMC1B; ENSG00000077935; CTA
ERAEPETFL

SEQ ID NO: 81078 - protein, 9 aa, Homo sapiens
  misc_feature: Table A; Target 81078; HLA-A*33:01; SMC1B; ENSG00000077935; CTA
ESISVKKPK

SEQ ID NO: 81079 - protein, 9 aa, Homo sapiens
  misc_feature: Table A; Target 81079; HLA-A*33:03; SMC1B; ENSG00000077935; CTA
ESISVKKPK

SEQ ID NO: 81080 - protein, 10 aa, Homo sapiens
  misc_feature: Table A; Target 81080; HLA-A*33:01; SMC1B; ENSG00000077935; CTA
ESTDAFEASR

SEQ ID NO: 81081 - protein, 10 aa, Homo sapiens
  misc_feature: Table A; Target 81081; HLA-A*33:03; SMC1B; ENSG00000077935; CTA
ESTDAFEASR

SEQ ID NO: 81082 - protein, 10 aa, Homo sapiens
  misc_feature: Table A; Target 81082; HLA-A*68:01; SMC1B; ENSG00000077935; CTA
ESTDAFEASR

SEQ ID NO: 81083 - protein, 10 aa, Homo sapiens
  misc_feature: Table A; Target 81083; HLA-C*07:06; SMC1B; ENSG00000077935; CTA
ESTDAFEASR

SEQ ID NO: 81084 - protein, 9 aa, Homo sapiens
  misc_feature: Table A; Target 81084; HLA-A*25:01; SMC1B; ENSG00000077935; CTA
ETMEEARHI

SEQ ID NO: 81085 - protein, 9 aa, Homo sapiens
  misc_feature: Table A; Target 81085; HLA-A*26:01; SMC1B; ENSG00000077935; CTA
ETMEEARHI

SEQ ID NO: 81086 - protein, 11 aa, Homo sapiens
  misc_feature: Table A; Target 81086; HLA-A*25:01; SMC1B; ENSG00000077935; CTA
ETMEEARHIAL

SEQ ID NO: 81087 - protein, 11 aa, Homo sapiens
  misc_feature: Table A; Target 81087; HLA-A*33:03; SMC1B; ENSG00000077935; CTA
ETMEEARHIAL

SEQ ID NO: 81088 - protein, 11 aa, Homo sapiens
  misc_feature: Table A; Target 81088; HLA-A*68:01; SMC1B; ENSG00000077935; CTA
ETMEEARHIAL

SEQ ID NO: 81089 - protein, 11 aa, Homo sapiens
  misc_feature: Table A; Target 81089; HLA-A*68:02; SMC1B; ENSG00000077935; CTA
ETMEEARHIAL

SEQ ID NO: 81090 - protein, 9 aa, Homo sapiens
  misc_feature: Table A; Target 81090; HLA-A*25:01; SMC1B; ENSG00000077935; CTA
EVQGNLKQI

SEQ ID NO: 81091 - protein, 9 aa, Homo sapiens
  misc_feature: Table A; Target 81091; HLA-A*23:01; SMC1B; ENSG00000077935; CTA
EVVSIQTSL

SEQ ID NO: 81092 - protein, 9 aa, Homo sapiens
  misc_feature: Table A; Target 81092; HLA-A*25:01; SMC1B; ENSG00000077935; CTA
EVVSIQTSL

SEQ ID NO: 81093 - protein, 9 aa, Homo sapiens
  misc_feature: Table A; Target 81093; HLA-A*26:01; SMC1B; ENSG00000077935; CTA
EVVSIQTSL

SEQ ID NO: 81094 - protein, 9 aa, Homo sapiens
  misc_feature: Table A; Target 81094; HLA-A*33:03; SMC1B; ENSG00000077935; CTA
EVVSIQTSL

SEQ ID NO: 81095 - protein, 9 aa, Homo sapiens
  misc_feature: Table A; Target 81095; HLA-A*68:01; SMC1B; ENSG00000077935; CTA
EVVSIQTSL

SEQ ID NO: 81096 - protein, 9 aa, Homo sapiens
  misc_feature: Table A; Target 81096; HLA-B*35:01; SMC1B; ENSG00000077935; CTA
EVVSIQTSL

SEQ ID NO: 81097 - protein, 9 aa, Homo sapiens
  misc_feature: Table A; Target 81097; HLA-B*35:03; SMC1B; ENSG00000077935; CTA
EVVSIQTSL

SEQ ID NO: 81098 - protein, 9 aa, Homo sapiens
  misc_feature: Table A; Target 81098; HLA-C*07:06; SMC1B; ENSG00000077935; CTA
EVVSIQTSL

SEQ ID NO: 81099 - protein, 10 aa, Homo sapiens
  misc_feature: Table A; Target 81099; HLA-A*26:01; SMC1B; ENSG00000077935; CTA
EVVSIQTSLE

SEQ ID NO: 81100 - protein, 10 aa, Homo sapiens
  misc_feature: Table A; Target 81100; HLA-B*40:01; SMC1B; ENSG00000077935; CTA
FEEISTSGEL

SEQ ID NO: 81101 - protein, 11 aa, Homo sapiens
  misc_feature: Table A; Target 81101; HLA-B*38:01; SMC1B; ENSG00000077935; CTA
FEEISTSGELI

SEQ ID NO: 81102 - protein, 11 aa, Homo sapiens
  misc_feature: Table A; Target 81102; HLA-B*40:01; SMC1B; ENSG00000077935; CTA
FEEISTSGELI

SEQ ID NO: 81103 - protein, 11 aa, Homo sapiens
  misc_feature: Table A; Target 81103; HLA-B*49:01; SMC1B; ENSG00000077935; CTA
FEEISTSGELI

SEQ ID NO: 81104 - protein, 8 aa, Homo sapiens
  misc_feature: Table A; Target 81104; HLA-A*30:01; SMC1B; ENSG00000077935; CTA
FEHVSISI

SEQ ID NO: 81105 - protein, 8 aa, Homo sapiens
  misc_feature: Table A; Target 81105; HLA-B*18:01; SMC1B; ENSG00000077935; CTA
FEHVSISI

SEQ ID NO: 81106 - protein, 8 aa, Homo sapiens
  misc_feature: Table A; Target 81106; HLA-B*40:01; SMC1B; ENSG00000077935; CTA
FEHVSISI

SEQ ID NO: 81107 - protein, 8 aa, Homo sapiens
  misc_feature: Table A; Target 81107; HLA-B*49:01; SMC1B; ENSG00000077935; CTA
FEHVSISI

SEQ ID NO: 81108 - protein, 8 aa, Homo sapiens
  misc_feature: Table A; Target 81108; HLA-B*18:01; SMC1B; ENSG00000077935; CTA
FEIDYSSL

SEQ ID NO: 81109 - protein, 8 aa, Homo sapiens
  misc_feature: Table A; Target 81109; HLA-B*49:01; SMC1B; ENSG00000077935; CTA
FEIDYSSL

SEQ ID NO: 81110 - protein, 9 aa, Homo sapiens
  misc_feature: Table A; Target 81110; HLA-B*49:01; SMC1B; ENSG00000077935; CTA
FEIDYSSLK

SEQ ID NO: 81111 - protein, 9 aa, Homo sapiens
  misc_feature: Table A; Target 81111; HLA-A*30:01; SMC1B; ENSG00000077935; CTA
FEKQIEEEI

SEQ ID NO: 81112 - protein, 9 aa, Homo sapiens
  misc_feature: Table A; Target 81112; HLA-B*40:01; SMC1B; ENSG00000077935; CTA
FEKQIEEEI

SEQ ID NO: 81113 - protein, 9 aa, Homo sapiens
  misc_feature: Table A; Target 81113; HLA-B*49:01; SMC1B; ENSG00000077935; CTA
FEKQIEEEI

SEQ ID NO: 81114 - protein, 10 aa, Homo sapiens
  misc_feature: Table A; Target 81114; HLA-B*40:01; SMC1B; ENSG00000077935; CTA
FEKQIEEEIL

SEQ ID NO: 81115 - protein, 10 aa, Homo sapiens
  misc_feature: Table A; Target 81115; HLA-A*02:03; SMC1B; ENSG00000077935; CTA
FLKSGVISGG

SEQ ID NO: 81116 - protein, 11 aa, Homo sapiens
  misc_feature: Table A; Target 81116; HLA-A*01:01; SMC1B; ENSG00000077935; CTA
FLSPENPEEPY

SEQ ID NO: 81117 - protein, 8 aa, Homo sapiens
  misc_feature: Table A; Target 81117; HLA-A*33:03; SMC1B; ENSG00000077935; CTA
FNDNLVSR

SEQ ID NO: 81118 - protein, 11 aa, Homo sapiens
  misc_feature: Table A; Target 81118; HLA-A*01:01; SMC1B; ENSG00000077935; CTA
FNDNLVSRSVY

SEQ ID NO: 81119 - protein, 8 aa, Homo sapiens
  misc_feature: Table A; Target 81119; HLA-B*08:01; SMC1B; ENSG00000077935; CTA
FPQLKKVI

SEQ ID NO: 81120 - protein, 8 aa, Homo sapiens
  misc_feature: Table A; Target 81120; HLA-B*39:01; SMC1B; ENSG00000077935; CTA
FQESTDAF

SEQ ID NO: 81121 - protein, 8 aa, Homo sapiens
  misc_feature: Table A; Target 81121; HLA-C*05:01; SMC1B; ENSG00000077935; CTA
FQESTDAF

SEQ ID NO: 81122 - protein, 8 aa, Homo sapiens
  misc_feature: Table A; Target 81122; HLA-B*13:02; SMC1B; ENSG00000077935; CTA
FQGTVESI

SEQ ID NO: 81123 - protein, 8 aa, Homo sapiens
  misc_feature: Table A; Target 81123; HLA-B*13:02; SMC1B; ENSG00000077935; CTA
FQMIVISL

SEQ ID NO: 81124 - protein, 8 aa, Homo sapiens
  misc_feature: Table A; Target 81124; HLA-B*15:01; SMC1B; ENSG00000077935; CTA
FQMIVISL

SEQ ID NO: 81125 - protein, 10 aa, Homo sapiens
  misc_feature: Table A; Target 81125; HLA-B*35:03; SMC1B; ENSG00000077935; CTA
FVLDEVDAAL

SEQ ID NO: 81126 - protein, 10 aa, Homo sapiens
  misc_feature: Table A; Target 81126; HLA-A*02:01; SMC1B; ENSG00000077935; CTA
FVMGEKIANL

SEQ ID NO: 81127 - protein, 10 aa, Homo sapiens
  misc_feature: Table A; Target 81127; HLA-A*02:03; SMC1B; ENSG00000077935; CTA
FVMGEKIANL

SEQ ID NO: 81128 - protein, 10 aa, Homo sapiens
  misc_feature: Table A; Target 81128; HLA-A*02:04; SMC1B; ENSG00000077935; CTA
FVMGEKIANL

SEQ ID NO: 81129 - protein, 10 aa, Homo sapiens
  misc_feature: Table A; Target 81129; HLA-A*02:07; SMC1B; ENSG00000077935; CTA
FVMGEKIANL

SEQ ID NO: 81130 - protein, 10 aa, Homo sapiens
  misc_feature: Table A; Target 81130; HLA-A*25:01; SMC1B; ENSG00000077935; CTA
FVMGEKIANL

SEQ ID NO: 81131 - protein, 10 aa, Homo sapiens
  misc_feature: Table A; Target 81131; HLA-A*26:01; SMC1B; ENSG00000077935; CTA
FVMGEKIANL

SEQ ID NO: 81132 - protein, 10 aa, Homo sapiens
  misc_feature: Table A; Target 81132; HLA-A*33:03; SMC1B; ENSG00000077935; CTA
FVMGEKIANL

SEQ ID NO: 81133 - protein, 10 aa, Homo sapiens
  misc_feature: Table A; Target 81133; HLA-A*68:02; SMC1B; ENSG00000077935; CTA
FVMGEKIANL

SEQ ID NO: 81134 - protein, 10 aa, Homo sapiens
  misc_feature: Table A; Target 81134; HLA-C*02:02; SMC1B; ENSG00000077935; CTA
FVMGEKIANL

SEQ ID NO: 81135 - protein, 10 aa, Homo sapiens
  misc_feature: Table A; Target 81135; HLA-C*07:04; SMC1B; ENSG00000077935; CTA
FVMGEKIANL

SEQ ID NO: 81136 - protein, 8 aa, Homo sapiens
  misc_feature: Table A; Target 81136; HLA-C*14:02; SMC1B; ENSG00000077935; CTA
FYQEQSQL

SEQ ID NO: 81137 - protein, 8 aa, Homo sapiens
  misc_feature: Table A; Target 81137; HLA-C*14:02; SMC1B; ENSG00000077935; CTA
FYSRADAL

SEQ ID NO: 81138 - protein, 9 aa, Homo sapiens
  misc_feature: Table A; Target 81138; HLA-B*40:01; SMC1B; ENSG00000077935; CTA
GEEKTFARI

SEQ ID NO: 81139 - protein, 9 aa, Homo sapiens
  misc_feature: Table A; Target 81139; HLA-B*44:03; SMC1B; ENSG00000077935; CTA
GEEKTFARI

SEQ ID NO: 81140 - protein, 9 aa, Homo sapiens
  misc_feature: Table A; Target 81140; HLA-B*49:01; SMC1B; ENSG00000077935; CTA
GEEKTFARI

SEQ ID NO: 81141 - protein, 10 aa, Homo sapiens
  misc_feature: Table A; Target 81141; HLA-B*49:01; SMC1B; ENSG00000077935; CTA
GEEKTFARII

SEQ ID NO: 81142 - protein, 9 aa, Homo sapiens
  misc_feature: Table A; Target 81142; HLA-B*49:01; SMC1B; ENSG00000077935; CTA
GEKIANLRV

SEQ ID NO: 81143 - protein, 10 aa, Homo sapiens
  misc_feature: Table A; Target 81143; HLA-B*27:02; SMC1B; ENSG00000077935; CTA
GELIGEYEEK

SEQ ID NO: 81144 - protein, 9 aa, Homo sapiens
  misc_feature: Table A; Target 81144; HLA-B*44:03; SMC1B; ENSG00000077935; CTA
GEVQGNLKQ

SEQ ID NO: 81145 - protein, 10 aa, Homo sapiens
  misc_feature: Table A; Target 81145; HLA-A*30:01; SMC1B; ENSG00000077935; CTA
GEVQGNLKQI

SEQ ID NO: 81146 - protein, 10 aa, Homo sapiens
  misc_feature: Table A; Target 81146; HLA-B*40:01; SMC1B; ENSG00000077935; CTA
GEVQGNLKQI

SEQ ID NO: 81147 - protein, 10 aa, Homo sapiens
  misc_feature: Table A; Target 81147; HLA-B*44:02; SMC1B; ENSG00000077935; CTA
GEVQGNLKQI

SEQ ID NO: 81148 - protein, 10 aa, Homo sapiens
  misc_feature: Table A; Target 81148; HLA-B*44:03; SMC1B; ENSG00000077935; CTA
GEVQGNLKQI

SEQ ID NO: 81149 - protein, 10 aa, Homo sapiens
  misc_feature: Table A; Target 81149; HLA-B*49:01; SMC1B; ENSG00000077935; CTA
GEVQGNLKQI

SEQ ID NO: 81150 - protein, 9 aa, Homo sapiens
  misc_feature: Table A; Target 81150; HLA-B*15:03; SMC1B; ENSG00000077935; CTA
GKSNVMDAL

SEQ ID NO: 81151 - protein, 10 aa, Homo sapiens
  misc_feature: Table A; Target 81151; HLA-B*07:02; SMC1B; ENSG00000077935; CTA
GPERQKTVAL

SEQ ID NO: 81152 - protein, 10 aa, Homo sapiens
  misc_feature: Table A; Target 81152; HLA-C*07:02; SMC1B; ENSG00000077935; CTA
GPERQKTVAL

SEQ ID NO: 81153 - protein, 11 aa, Homo sapiens
  misc_feature: Table A; Target 81153; HLA-B*07:02; SMC1B; ENSG00000077935; CTA
GPNGSGKSNVM

SEQ ID NO: 81154 - protein, 9 aa, Homo sapiens
  misc_feature: Table A; Target 81154; HLA-B*27:05; SMC1B; ENSG00000077935; CTA
GRFITAIVV

SEQ ID NO: 81155 - protein, 9 aa, Homo sapiens
  misc_feature: Table A; Target 81155; HLA-B*27:05; SMC1B; ENSG00000077935; CTA
GRQVIGPFR

SEQ ID NO: 81156 - protein, 9 aa, Homo sapiens
  misc_feature: Table A; Target 81156; HLA-A*03:02; SMC1B; ENSG00000077935; CTA
GSEDIDHLK

SEQ ID NO: 81157 - protein, 9 aa, Homo sapiens
  misc_feature: Table A; Target 81157; HLA-A*11:01; SMC1B; ENSG00000077935; CTA
GSEDIDHLK

SEQ ID NO: 81158 - protein, 10 aa, Homo sapiens
  misc_feature: Table A; Target 81158; HLA-A*01:01; SMC1B; ENSG00000077935; CTA
GSEDIDHLKK

SEQ ID NO: 81159 - protein, 9 aa, Homo sapiens
  misc_feature: Table A; Target 81159; HLA-A*02:01; SMC1B; ENSG00000077935; CTA
GSLDDIIEV

SEQ ID NO: 81160 - protein, 8 aa, Homo sapiens
  misc_feature: Table A; Target 81160; HLA-A*32:01; SMC1B; ENSG00000077935; CTA
GTQTRLKY

SEQ ID NO: 81161 - protein, 8 aa, Homo sapiens
  misc_feature: Table A; Target 81161; HLA-C*16:01; SMC1B; ENSG00000077935; CTA
GTQTRLKY

SEQ ID NO: 81162 - protein, 9 aa, Homo sapiens
  misc_feature: Table A; Target 81162; HLA-A*03:01; SMC1B; ENSG00000077935; CTA
GTVESISVK

SEQ ID NO: 81163 - protein, 9 aa, Homo sapiens
  misc_feature: Table A; Target 81163; HLA-A*03:02; SMC1B; ENSG00000077935; CTA
GTVESISVK

SEQ ID NO: 81164 - protein, 9 aa, Homo sapiens
  misc_feature: Table A; Target 81164; HLA-A*68:01; SMC1B; ENSG00000077935; CTA
GTVESISVK

SEQ ID NO: 81165 - protein, 9 aa, Homo sapiens
  misc_feature: Table A; Target 81165; HLA-C*07:06; SMC1B; ENSG00000077935; CTA
GTVESISVK

SEQ ID NO: 81166 - protein, 10 aa, Homo sapiens
  misc_feature: Table A; Target 81166; HLA-A*03:01; SMC1B; ENSG00000077935; CTA
GTVESISVKK

SEQ ID NO: 81167 - protein, 10 aa, Homo sapiens
  misc_feature: Table A; Target 81167; HLA-A*03:02; SMC1B; ENSG00000077935; CTA
GTVESISVKK

SEQ ID NO: 81168 - protein, 10 aa, Homo sapiens
  misc_feature: Table A; Target 81168; HLA-A*68:01; SMC1B; ENSG00000077935; CTA
GTVESISVKK

SEQ ID NO: 81169 - protein, 10 aa, Homo sapiens
  misc_feature: Table A; Target 81169; HLA-B*27:02; SMC1B; ENSG00000077935; CTA
GTVESISVKK

SEQ ID NO: 81170 - protein, 10 aa, Homo sapiens
  misc_feature: Table A; Target 81170; HLA-C*07:06; SMC1B; ENSG00000077935; CTA
GTVESISVKK

SEQ ID NO: 81171 - protein, 10 aa, Homo sapiens
  misc_feature: Table A; Target 81171; HLA-B*40:01; SMC1B; ENSG00000077935; CTA
GVISGGSSDL

SEQ ID NO: 81172 - protein, 10 aa, Homo sapiens
  misc_feature: Table A; Target 81172; HLA-C*01:02; SMC1B; ENSG00000077935; CTA
GVISGGSSDL

SEQ ID NO: 81173 - protein, 11 aa, Homo sapiens
  misc_feature: Table A; Target 81173; HLA-A*03:01; SMC1B; ENSG00000077935; CTA
GVISGGSSDLK

SEQ ID NO: 81174 - protein, 11 aa, Homo sapiens
  misc_feature: Table A; Target 81174; HLA-A*03:02; SMC1B; ENSG00000077935; CTA
GVISGGSSDLK

SEQ ID NO: 81175 - protein, 11 aa, Homo sapiens
  misc_feature: Table A; Target 81175; HLA-A*11:01; SMC1B; ENSG00000077935; CTA
GVISGGSSDLK

SEQ ID NO: 81176 - protein, 11 aa, Homo sapiens
  misc_feature: Table A; Target 81176; HLA-B*27:02; SMC1B; ENSG00000077935; CTA
GVISGGSSDLK

SEQ ID NO: 81177 - protein, 8 aa, Homo sapiens
  misc_feature: Table A; Target 81177; HLA-B*18:01; SMC1B; ENSG00000077935; CTA
HENIVKAR

SEQ ID NO: 81178 - protein, 8 aa, Homo sapiens
  misc_feature: Table A; Target 81178; HLA-B*37:01; SMC1B; ENSG00000077935; CTA
HENIVKAR

SEQ ID NO: 81179 - protein, 8 aa, Homo sapiens
  misc_feature: Table A; Target 81179; HLA-B*08:01; SMC1B; ENSG00000077935; CTA
HGMLTRQL

SEQ ID NO: 81180 - protein, 9 aa, Homo sapiens
  misc_feature: Table A; Target 81180; HLA-A*68:01; SMC1B; ENSG00000077935; CTA
HIALSGPER

SEQ ID NO: 81181 - protein, 9 aa, Homo sapiens
  misc_feature: Table A; Target 81181; HLA-C*07:06; SMC1B; ENSG00000077935; CTA
HIALSGPER

SEQ ID NO: 81182 - protein, 10 aa, Homo sapiens
  misc_feature: Table A; Target 81182; HLA-A*02:04; SMC1B; ENSG00000077935; CTA
HLLNTKLEHV

SEQ ID NO: 81183 - protein, 9 aa, Homo sapiens
  misc_feature: Table A; Target 81183; HLA-A*02:03; SMC1B; ENSG00000077935; CTA
HLRLLLQQV

SEQ ID NO: 81184 - protein, 9 aa, Homo sapiens
  misc_feature: Table A; Target 81184; HLA-B*08:01; SMC1B; ENSG00000077935; CTA
HPIHKKYQL

SEQ ID NO: 81185 - protein, 9 aa, Homo sapiens
  misc_feature: Table A; Target 81185; HLA-B*57:01; SMC1B; ENSG00000077935; CTA
HSFRPAPFF

SEQ ID NO: 81186 - protein, 9 aa, Homo sapiens
  misc_feature: Table A; Target 81186; HLA-A*03:01; SMC1B; ENSG00000077935; CTA
HVNRDLSVK

SEQ ID NO: 81187 - protein, 9 aa, Homo sapiens
  misc_feature: Table A; Target 81187; HLA-A*03:02; SMC1B; ENSG00000077935; CTA
HVNRDLSVK

SEQ ID NO: 81188 - protein, 9 aa, Homo sapiens
  misc_feature: Table A; Target 81188; HLA-B*38:01; SMC1B; ENSG00000077935; CTA
HVSISIDQI

SEQ ID NO: 81189 - protein, 10 aa, Homo sapiens
  misc_feature: Table A; Target 81189; HLA-B*35:01; SMC1B; ENSG00000077935; CTA
HVSISIDQIY

SEQ ID NO: 81190 - protein, 11 aa, Homo sapiens
  misc_feature: Table A; Target 81190; HLA-A*03:02; SMC1B; ENSG00000077935; CTA
HVSISIDQIYK

SEQ ID NO: 81191 - protein, 11 aa, Homo sapiens
  misc_feature: Table A; Target 81191; HLA-A*11:01; SMC1B; ENSG00000077935; CTA
HVSISIDQIYK

SEQ ID NO: 81192 - protein, 8 aa, Homo sapiens
  misc_feature: Table A; Target 81192; HLA-C*16:01; SMC1B; ENSG00000077935; CTA
IAAERRQA

SEQ ID NO: 81193 - protein, 9 aa, Homo sapiens
  misc_feature: Table A; Target 81193; HLA-B*51:01; SMC1B; ENSG00000077935; CTA
IANLRVKNI

SEQ ID NO: 81194 - protein, 8 aa, Homo sapiens
  misc_feature: Table A; Target 81194; HLA-B*37:01; SMC1B; ENSG00000077935; CTA
IDQIYKKL

SEQ ID NO: 81195 - protein, 8 aa, Homo sapiens
  misc_feature: Table A; Target 81195; HLA-B*18:01; SMC1B; ENSG00000077935; CTA
IDVIKTQF

SEQ ID NO: 81196 - protein, 8 aa, Homo sapiens
  misc_feature: Table A; Target 81196; HLA-B*37:01; SMC1B; ENSG00000077935; CTA
IDVIKTQF

SEQ ID NO: 81197 - protein, 10 aa, Homo sapiens
  misc_feature: Table A; Target 81197; HLA-A*30:01; SMC1B; ENSG00000077935; CTA
IEIILLSGSL

SEQ ID NO: 81198 - protein, 10 aa, Homo sapiens
  misc_feature: Table A; Target 81198; HLA-B*40:01; SMC1B; ENSG00000077935; CTA
IEIILLSGSL

SEQ ID NO: 81199 - protein, 8 aa, Homo sapiens
  misc_feature: Table A; Target 81199; HLA-A*30:01; SMC1B; ENSG00000077935; CTA
IELEASQL

SEQ ID NO: 81200 - protein, 8 aa, Homo sapiens
  misc_feature: Table A; Target 81200; HLA-B*18:01; SMC1B; ENSG00000077935; CTA
IELEASQL

SEQ ID NO: 81201 - protein, 8 aa, Homo sapiens
  misc_feature: Table A; Target 81201; HLA-B*37:01; SMC1B; ENSG00000077935; CTA
IELEASQL

SEQ ID NO: 81202 - protein, 8 aa, Homo sapiens
  misc_feature: Table A; Target 81202; HLA-B*40:01; SMC1B; ENSG00000077935; CTA
IELEASQL

SEQ ID NO: 81203 - protein, 8 aa, Homo sapiens
  misc_feature: Table A; Target 81203; HLA-B*49:01; SMC1B; ENSG00000077935; CTA
IELEASQL

SEQ ID NO: 81204 - protein, 8 aa, Homo sapiens
  misc_feature: Table A; Target 81204; HLA-C*14:02; SMC1B; ENSG00000077935; CTA
IELEASQL

SEQ ID NO: 81205 - protein, 11 aa, Homo sapiens
  misc_feature: Table A; Target 81205; HLA-A*30:02; SMC1B; ENSG00000077935; CTA
IELEASQLDRY

SEQ ID NO: 81206 - protein, 11 aa, Homo sapiens
  misc_feature: Table A; Target 81206; HLA-B*18:01; SMC1B; ENSG00000077935; CTA
IELEASQLDRY

SEQ ID NO: 81207 - protein, 11 aa, Homo sapiens
  misc_feature: Table A; Target 81207; HLA-B*44:02; SMC1B; ENSG00000077935; CTA
IELEASQLDRY

SEQ ID NO: 81208 - protein, 11 aa, Homo sapiens
  misc_feature: Table A; Target 81208; HLA-B*44:03; SMC1B; ENSG00000077935; CTA
IELEASQLDRY

SEQ ID NO: 81209 - protein, 9 aa, Homo sapiens
  misc_feature: Table A; Target 81209; HLA-A*30:01; SMC1B; ENSG00000077935; CTA
IEVEMGTEA

SEQ ID NO: 81210 - protein, 9 aa, Homo sapiens
  misc_feature: Table A; Target 81210; HLA-B*18:01; SMC1B; ENSG00000077935; CTA
IEVEMGTEA

SEQ ID NO: 81211 - protein, 9 aa, Homo sapiens
  misc_feature: Table A; Target 81211; HLA-B*40:01; SMC1B; ENSG00000077935; CTA
IEVEMGTEA

SEQ ID NO: 81212 - protein, 9 aa, Homo sapiens
  misc_feature: Table A; Target 81212; HLA-B*40:02; SMC1B; ENSG00000077935; CTA
IEVEMGTEA

SEQ ID NO: 81213 - protein, 9 aa, Homo sapiens
  misc_feature: Table A; Target 81213; HLA-B*49:01; SMC1B; ENSG00000077935; CTA
IEVEMGTEA

SEQ ID NO: 81214 - protein, 9 aa, Homo sapiens
  misc_feature: Table A; Target 81214; HLA-A*32:01; SMC1B; ENSG00000077935; CTA
IGKPISSSA

SEQ ID NO: 81215 - protein, 9 aa, Homo sapiens
  misc_feature: Table A; Target 81215; HLA-B*46:01; SMC1B; ENSG00000077935; CTA
IGKPISSSA

SEQ ID NO: 81216 - protein, 9 aa, Homo sapiens
  misc_feature: Table A; Target 81216; HLA-B*46:01; SMC1B; ENSG00000077935; CTA
IGVENIREF

SEQ ID NO: 81217 - protein, 9 aa, Homo sapiens
  misc_feature: Table A; Target 81217; HLA-B*58:01; SMC1B; ENSG00000077935; CTA
IGVENIREF

SEQ ID NO: 81218 - protein, 9 aa, Homo sapiens
  misc_feature: Table A; Target 81218; HLA-C*16:01; SMC1B; ENSG00000077935; CTA
IGVENIREF

SEQ ID NO: 81219 - protein, 9 aa, Homo sapiens
  misc_feature: Table A; Target 81219; HLA-A*03:01; SMC1B; ENSG00000077935; CTA
IIGPNGSGK

SEQ ID NO: 81220 - protein, 9 aa, Homo sapiens
  misc_feature: Table A; Target 81220; HLA-A*03:02; SMC1B; ENSG00000077935; CTA
IIGPNGSGK

SEQ ID NO: 81221 - protein, 9 aa, Homo sapiens
  misc_feature: Table A; Target 81221; HLA-B*46:01; SMC1B; ENSG00000077935; CTA
IIRGGCSEF

SEQ ID NO: 81222 - protein, 11 aa, Homo sapiens
  misc_feature: Table A; Target 81222; HLA-A*03:01; SMC1B; ENSG00000077935; CTA
IIYVEESGEEK

SEQ ID NO: 81223 - protein, 11 aa, Homo sapiens
  misc_feature: Table A; Target 81223; HLA-B*27:02; SMC1B; ENSG00000077935; CTA
IIYVEESGEEK

SEQ ID NO: 81224 - protein, 9 aa, Homo sapiens
  misc_feature: Table A; Target 81224; HLA-B*15:03; SMC1B; ENSG00000077935; CTA
IKEQTQDQF

SEQ ID NO: 81225 - protein, 10 aa, Homo sapiens
  misc_feature: Table A; Target 81225; HLA-B*38:01; SMC1B; ENSG00000077935; CTA
IQELIHGAHI

SEQ ID NO: 81226 - protein, 9 aa, Homo sapiens
  misc_feature: Table A; Target 81226; HLA-A*03:01; SMC1B; ENSG00000077935; CTA
IQGTQTRLK

SEQ ID NO: 81227 - protein, 9 aa, Homo sapiens
  misc_feature: Table A; Target 81227; HLA-A*03:02; SMC1B; ENSG00000077935; CTA
IQGTQTRLK

SEQ ID NO: 81228 - protein, 10 aa, Homo sapiens
  misc_feature: Table A; Target 81228; HLA-A*30:02; SMC1B; ENSG00000077935; CTA
IQGTQTRLKY

SEQ ID NO: 81229 - protein, 10 aa, Homo sapiens
  misc_feature: Table A; Target 81229; HLA-A*32:01; SMC1B; ENSG00000077935; CTA
IQGTQTRLKY

SEQ ID NO: 81230 - protein, 9 aa, Homo sapiens
  misc_feature: Table A; Target 81230; HLA-A*29:02; SMC1B; ENSG00000077935; CTA
IQLQLFQLY

SEQ ID NO: 81231 - protein, 9 aa, Homo sapiens
  misc_feature: Table A; Target 81231; HLA-A*30:02; SMC1B; ENSG00000077935; CTA
IQLQLFQLY

SEQ ID NO: 81232 - protein, 9 aa, Homo sapiens
  misc_feature: Table A; Target 81232; HLA-B*15:03; SMC1B; ENSG00000077935; CTA
IQLQLFQLY

SEQ ID NO: 81233 - protein, 11 aa, Homo sapiens
  misc_feature: Table A; Target 81233; HLA-B*27:05; SMC1B; ENSG00000077935; CTA
IRVTQNSSAEK

SEQ ID NO: 81234 - protein, 10 aa, Homo sapiens
  misc_feature: Table A; Target 81234; HLA-A*01:01; SMC1B; ENSG00000077935; CTA
ISGGSSDLKY

SEQ ID NO: 81235 - protein, 9 aa, Homo sapiens
  misc_feature: Table A; Target 81235; HLA-A*03:02; SMC1B; ENSG00000077935; CTA
ISIDQIYKK

SEQ ID NO: 81236 - protein, 9 aa, Homo sapiens
  misc_feature: Table A; Target 81236; HLA-A*11:01; SMC1B; ENSG00000077935; CTA
ISIDQIYKK

SEQ ID NO: 81237 - protein, 10 aa, Homo sapiens
  misc_feature: Table A; Target 81237; HLA-B*57:01; SMC1B; ENSG00000077935; CTA
ISIDQIYKKL

SEQ ID NO: 81238 - protein, 10 aa, Homo sapiens
  misc_feature: Table A; Target 81238; HLA-B*57:01; SMC1B; ENSG00000077935; CTA
ISLKEEFYSR

SEQ ID NO: 81239 - protein, 11 aa, Homo sapiens
  misc_feature: Table A; Target 81239; HLA-A*30:02; SMC1B; ENSG00000077935; CTA
ISSSASVKIIY

SEQ ID NO: 81240 - protein, 11 aa, Homo sapiens
  misc_feature: Table A; Target 81240; HLA-A*01:01; SMC1B; ENSG00000077935; CTA
ISTSGELIGEY

SEQ ID NO: 81241 - protein, 11 aa, Homo sapiens
  misc_feature: Table A; Target 81241; HLA-A*30:02; SMC1B; ENSG00000077935; CTA
ISTSGELIGEY

SEQ ID NO: 81242 - protein, 11 aa, Homo sapiens
  misc_feature: Table A; Target 81242; HLA-B*58:01; SMC1B; ENSG00000077935; CTA
ISTSGELIGEY

SEQ ID NO: 81243 - protein, 10 aa, Homo sapiens
  misc_feature: Table A; Target 81243; HLA-A*03:01; SMC1B; ENSG00000077935; CTA
ITAIVVASEK

SEQ ID NO: 81244 - protein, 10 aa, Homo sapiens
  misc_feature: Table A; Target 81244; HLA-A*03:02; SMC1B; ENSG00000077935; CTA
ITAIVVASEK

SEQ ID NO: 81245 - protein, 10 aa, Homo sapiens
  misc_feature: Table A; Target 81245; HLA-B*27:02; SMC1B; ENSG00000077935; CTA
ITAIVVASEK

SEQ ID NO: 81246 - protein, 11 aa, Homo sapiens
  misc_feature: Table A; Target 81246; HLA-A*68:02; SMC1B; ENSG00000077935; CTA
ITAIVVASEKV

SEQ ID NO: 81247 - protein, 9 aa, Homo sapiens
  misc_feature: Table A; Target 81247; HLA-A*23:01; SMC1B; ENSG00000077935; CTA
IVISLKEEF

SEQ ID NO: 81248 - protein, 9 aa, Homo sapiens
  misc_feature: Table A; Target 81248; HLA-A*26:01; SMC1B; ENSG00000077935; CTA
IVISLKEEF

SEQ ID NO: 81249 - protein, 9 aa, Homo sapiens
  misc_feature: Table A; Target 81249; HLA-A*29:02; SMC1B; ENSG00000077935; CTA
IVISLKEEF

SEQ ID NO: 81250 - protein, 9 aa, Homo sapiens
  misc_feature: Table A; Target 81250; HLA-A*30:02; SMC1B; ENSG00000077935; CTA
IVISLKEEF

SEQ ID NO: 81251 - protein, 9 aa, Homo sapiens
  misc_feature: Table A; Target 81251; HLA-A*32:01; SMC1B; ENSG00000077935; CTA
IVISLKEEF

SEQ ID NO: 81252 - protein, 9 aa, Homo sapiens
  misc_feature: Table A; Target 81252; HLA-B*15:01; SMC1B; ENSG00000077935; CTA
IVISLKEEF

SEQ ID NO: 81253 - protein, 9 aa, Homo sapiens
  misc_feature: Table A; Target 81253; HLA-B*35:01; SMC1B; ENSG00000077935; CTA
IVISLKEEF

SEQ ID NO: 81254 - protein, 9 aa, Homo sapiens
  misc_feature: Table A; Target 81254; HLA-B*46:01; SMC1B; ENSG00000077935; CTA
IVISLKEEF

SEQ ID NO: 81255 - protein, 9 aa, Homo sapiens
  misc_feature: Table A; Target 81255; HLA-B*57:01; SMC1B; ENSG00000077935; CTA
IVISLKEEF

SEQ ID NO: 81256 - protein, 9 aa, Homo sapiens
  misc_feature: Table A; Target 81256; HLA-B*58:01; SMC1B; ENSG00000077935; CTA
IVISLKEEF

SEQ ID NO: 81257 - protein, 9 aa, Homo sapiens
  misc_feature: Table A; Target 81257; HLA-C*02:02; SMC1B; ENSG00000077935; CTA
IVISLKEEF

SEQ ID NO: 81258 - protein, 10 aa, Homo sapiens
  misc_feature: Table A; Target 81258; HLA-A*29:02; SMC1B; ENSG00000077935; CTA
IVISLKEEFY

SEQ ID NO: 81259 - protein, 10 aa, Homo sapiens
  misc_feature: Table A; Target 81259; HLA-A*30:02; SMC1B; ENSG00000077935; CTA
IVISLKEEFY

SEQ ID NO: 81260 - protein, 10 aa, Homo sapiens
  misc_feature: Table A; Target 81260; HLA-A*03:02; SMC1B; ENSG00000077935; CTA
IVVASEKVAK

SEQ ID NO: 81261 - protein, 10 aa, Homo sapiens
  misc_feature: Table A; Target 81261; HLA-A*11:01; SMC1B; ENSG00000077935; CTA
IVVASEKVAK

SEQ ID NO: 81262 - protein, 10 aa, Homo sapiens
  misc_feature: Table A; Target 81262; HLA-B*27:02; SMC1B; ENSG00000077935; CTA
IYVEESGEEK

SEQ ID NO: 81263 - protein, 8 aa, Homo sapiens
  misc_feature: Table A; Target 81263; HLA-C*05:01; SMC1B; ENSG00000077935; CTA
KAEEDAQF

SEQ ID NO: 81264 - protein, 10 aa, Homo sapiens
  misc_feature: Table A; Target 81264; HLA-B*58:01; SMC1B; ENSG00000077935; CTA
KAEEDAQFNF

SEQ ID NO: 81265 - protein, 10 aa, Homo sapiens
  misc_feature: Table A; Target 81265; HLA-C*05:01; SMC1B; ENSG00000077935; CTA
KAEEDAQFNF

SEQ ID NO: 81266 - protein, 9 aa, Homo sapiens
  misc_feature: Table A; Target 81266; HLA-B*58:01; SMC1B; ENSG00000077935; CTA
KALQSDQEI

SEQ ID NO: 81267 - protein, 10 aa, Homo sapiens
  misc_feature: Table A; Target 81267; HLA-B*37:01; SMC1B; ENSG00000077935; CTA
KEEAERYQSL

SEQ ID NO: 81268 - protein, 10 aa, Homo sapiens
  misc_feature: Table A; Target 81268; HLA-B*40:01; SMC1B; ENSG00000077935; CTA
KEEAERYQSL

SEQ ID NO: 81269 - protein, 10 aa, Homo sapiens
  misc_feature: Table A; Target 81269; HLA-B*40:01; SMC1B; ENSG00000077935; CTA
KEERAEPETF

SEQ ID NO: 81270 - protein, 11 aa, Homo sapiens
  misc_feature: Table A; Target 81270; HLA-B*40:01; SMC1B; ENSG00000077935; CTA
KEERAEPETFL

SEQ ID NO: 81271 - protein, 10 aa, Homo sapiens
  misc_feature: Table A; Target 81271; HLA-B*49:01; SMC1B; ENSG00000077935; CTA
KEFQEKIDKV

SEQ ID NO: 81272 - protein, 10 aa, Homo sapiens
  misc_feature: Table A; Target 81272; HLA-A*30:01; SMC1B; ENSG00000077935; CTA
KEKKQQEETL

SEQ ID NO: 81273 - protein, 10 aa, Homo sapiens
  misc_feature: Table A; Target 81273; HLA-B*40:01; SMC1B; ENSG00000077935; CTA
KEKKQQEETL

SEQ ID NO: 81274 - protein, 10 aa, Homo sapiens
  misc_feature: Table A; Target 81274; HLA-B*40:02; SMC1B; ENSG00000077935; CTA
KEKKQQEETL

SEQ ID NO: 81275 - protein, 9 aa, Homo sapiens
  misc_feature: Table A; Target 81275; HLA-A*30:01; SMC1B; ENSG00000077935; CTA
KELKSVETL

SEQ ID NO: 81276 - protein, 9 aa, Homo sapiens
  misc_feature: Table A; Target 81276; HLA-B*37:01; SMC1B; ENSG00000077935; CTA
KELKSVETL

SEQ ID NO: 81277 - protein, 9 aa, Homo sapiens
  misc_feature: Table A; Target 81277; HLA-B*40:01; SMC1B; ENSG00000077935; CTA
KELKSVETL

SEQ ID NO: 81278 - protein, 9 aa, Homo sapiens
  misc_feature: Table A; Target 81278; HLA-B*40:02; SMC1B; ENSG00000077935; CTA
KELKSVETL

SEQ ID NO: 81279 - protein, 9 aa, Homo sapiens
  misc_feature: Table A; Target 81279; HLA-B*49:01; SMC1B; ENSG00000077935; CTA
KELKSVETL

SEQ ID NO: 81280 - protein, 10 aa, Homo sapiens
  misc_feature: Table A; Target 81280; HLA-B*40:01; SMC1B; ENSG00000077935; CTA
KELKSVETLL

SEQ ID NO: 81281 - protein, 8 aa, Homo sapiens
  misc_feature: Table A; Target 81281; HLA-B*37:01; SMC1B; ENSG00000077935; CTA
KENTSHHL

SEQ ID NO: 81282 - protein, 10 aa, Homo sapiens
  misc_feature: Table A; Target 81282; HLA-B*40:01; SMC1B; ENSG00000077935; CTA
KEQTQDQFQM

SEQ ID NO: 81283 - protein, 11 aa, Homo sapiens
  misc_feature: Table A; Target 81283; HLA-A*30:01; SMC1B; ENSG00000077935; CTA
KETDLKQIQTL

SEQ ID NO: 81284 - protein, 11 aa, Homo sapiens
  misc_feature: Table A; Target 81284; HLA-B*40:01; SMC1B; ENSG00000077935; CTA
KETDLKQIQTL

SEQ ID NO: 81285 - protein, 11 aa, Homo sapiens
  misc_feature: Table A; Target 81285; HLA-B*44:02; SMC1B; ENSG00000077935; CTA
KETDLKQIQTL

SEQ ID NO: 81286 - protein, 11 aa, Homo sapiens
  misc_feature: Table A; Target 81286; HLA-B*44:03; SMC1B; ENSG00000077935; CTA
KETDLKQIQTL

SEQ ID NO: 81287 - protein, 10 aa, Homo sapiens
  misc_feature: Table A; Target 81287; HLA-A*30:01; SMC1B; ENSG00000077935; CTA
KEVVSIQTSL

SEQ ID NO: 81288 - protein, 10 aa, Homo sapiens
  misc_feature: Table A; Target 81288; HLA-B*40:02; SMC1B; ENSG00000077935; CTA
KEVVSIQTSL

SEQ ID NO: 81289 - protein, 10 aa, Homo sapiens
  misc_feature: Table A; Target 81289; HLA-B*49:01; SMC1B; ENSG00000077935; CTA
KEVVSIQTSL

SEQ ID NO: 81290 - protein, 9 aa, Homo sapiens
  misc_feature: Table A; Target 81290; HLA-A*23:01; SMC1B; ENSG00000077935; CTA
KFQESTDAF

SEQ ID NO: 81291 - protein, 9 aa, Homo sapiens
  misc_feature: Table A; Target 81291; HLA-A*24:02; SMC1B; ENSG00000077935; CTA
KFQESTDAF

SEQ ID NO: 81292 - protein, 9 aa, Homo sapiens
  misc_feature: Table A; Target 81292; HLA-A*32:01; SMC1B; ENSG00000077935; CTA
KFQESTDAF

SEQ ID NO: 81293 - protein, 9 aa, Homo sapiens
  misc_feature: Table A; Target 81293; HLA-C*01:02; SMC1B; ENSG00000077935; CTA
KFQESTDAF

SEQ ID NO: 81294 - protein, 9 aa, Homo sapiens
  misc_feature: Table A; Target 81294; HLA-C*14:02; SMC1B; ENSG00000077935; CTA
KFQESTDAF

SEQ ID NO: 81295 - protein, 10 aa, Homo sapiens
  misc_feature: Table A; Target 81295; HLA-A*03:02; SMC1B; ENSG00000077935; CTA
KGSEDIDHLK

SEQ ID NO: 81296 - protein, 10 aa, Homo sapiens
  misc_feature: Table A; Target 81296; HLA-A*11:01; SMC1B; ENSG00000077935; CTA
KGSEDIDHLK

SEQ ID NO: 81297 - protein, 9 aa, Homo sapiens
  misc_feature: Table A; Target 81297; HLA-A*32:01; SMC1B; ENSG00000077935; CTA
KINTLKETI

SEQ ID NO: 81298 - protein, 9 aa, Homo sapiens
  misc_feature: Table A; Target 81298; HLA-B*58:01; SMC1B; ENSG00000077935; CTA
KINTLKETI

SEQ ID NO: 81299 - protein, 11 aa, Homo sapiens
  misc_feature: Table A; Target 81299; HLA-A*03:01; SMC1B; ENSG00000077935; CTA
KINTLKETIQK

SEQ ID NO: 81300 - protein, 11 aa, Homo sapiens
  misc_feature: Table A; Target 81300; HLA-A*03:02; SMC1B; ENSG00000077935; CTA
KINTLKETIQK

SEQ ID NO: 81301 - protein, 10 aa, Homo sapiens
  misc_feature: Table A; Target 81301; HLA-A*03:01; SMC1B; ENSG00000077935; CTA
KIQELKGLMK

SEQ ID NO: 81302 - protein, 10 aa, Homo sapiens
  misc_feature: Table A; Target 81302; HLA-A*03:02; SMC1B; ENSG00000077935; CTA
KIQELKGLMK

SEQ ID NO: 81303 - protein, 9 aa, Homo sapiens
  misc_feature: Table A; Target 81303; HLA-A*02:04; SMC1B; ENSG00000077935; CTA
KIQLQLFQL

SEQ ID NO: 81304 - protein, 9 aa, Homo sapiens
  misc_feature: Table A; Target 81304; HLA-A*03:01; SMC1B; ENSG00000077935; CTA
KLNKINTLK

SEQ ID NO: 81305 - protein, 9 aa, Homo sapiens
  misc_feature: Table A; Target 81305; HLA-A*03:02; SMC1B; ENSG00000077935; CTA
KLNKINTLK

SEQ ID NO: 81306 - protein, 9 aa, Homo sapiens
  misc_feature: Table A; Target 81306; HLA-A*02:01; SMC1B; ENSG00000077935; CTA
KLQKEVVSI

SEQ ID NO: 81307 - protein, 9 aa, Homo sapiens
  misc_feature: Table A; Target 81307; HLA-A*02:03; SMC1B; ENSG00000077935; CTA
KLQKEVVSI

SEQ ID NO: 81308 - protein, 9 aa, Homo sapiens
  misc_feature: Table A; Target 81308; HLA-A*02:04; SMC1B; ENSG00000077935; CTA
KLQKEVVSI

SEQ ID NO: 81309 - protein, 9 aa, Homo sapiens
  misc_feature: Table A; Target 81309; HLA-A*03:01; SMC1B; ENSG00000077935; CTA
KMNKIQLQL

SEQ ID NO: 81310 - protein, 10 aa, Homo sapiens
  misc_feature: Table A; Target 81310; HLA-C*07:02; SMC1B; ENSG00000077935; CTA
KPINERLREL

SEQ ID NO: 81311 - protein, 9 aa, Homo sapiens
  misc_feature: Table A; Target 81311; HLA-B*07:02; SMC1B; ENSG00000077935; CTA
KPISSSASV

SEQ ID NO: 81312 - protein, 9 aa, Homo sapiens
  misc_feature: Table A; Target 81312; HLA-B*55:01; SMC1B; ENSG00000077935; CTA
KPISSSASV

SEQ ID NO: 81313 - protein, 9 aa, Homo sapiens
  misc_feature: Table A; Target 81313; HLA-B*56:01; SMC1B; ENSG00000077935; CTA
KPISSSASV

SEQ ID NO: 81314 - protein, 9 aa, Homo sapiens
  misc_feature: Table A; Target 81314; HLA-C*07:02; SMC1B; ENSG00000077935; CTA
KPISSSASV

SEQ ID NO: 81315 - protein, 10 aa, Homo sapiens
  misc_feature: Table A; Target 81315; HLA-A*11:01; SMC1B; ENSG00000077935; CTA
KQIEEEILHK

SEQ ID NO: 81316 - protein, 11 aa, Homo sapiens
  misc_feature: Table A; Target 81316; HLA-A*11:01; SMC1B; ENSG00000077935; CTA
KQIEEEILHKK

SEQ ID NO: 81317 - protein, 9 aa, Homo sapiens
  misc_feature: Table A; Target 81317; HLA-C*16:04; SMC1B; ENSG00000077935; CTA
KRIEKLEEY

SEQ ID NO: 81318 - protein, 10 aa, Homo sapiens
  misc_feature: Table A; Target 81318; HLA-A*03:01; SMC1B; ENSG00000077935; CTA
KSVETLLNQK

SEQ ID NO: 81319 - protein, 10 aa, Homo sapiens
  misc_feature: Table A; Target 81319; HLA-A*03:02; SMC1B; ENSG00000077935; CTA
KSVETLLNQK

SEQ ID NO: 81320 - protein, 10 aa, Homo sapiens
  misc_feature: Table A; Target 81320; HLA-A*11:01; SMC1B; ENSG00000077935; CTA
KSVETLLNQK

SEQ ID NO: 81321 - protein, 10 aa, Homo sapiens
  misc_feature: Table A; Target 81321; HLA-B*58:01; SMC1B; ENSG00000077935; CTA
KSVETLLNQK

SEQ ID NO: 81322 - protein, 9 aa, Homo sapiens
  misc_feature: Table A; Target 81322; HLA-A*01:01; SMC1B; ENSG00000077935; CTA
KTDEERLAF

SEQ ID NO: 81323 - protein, 9 aa, Homo sapiens
  misc_feature: Table A; Target 81323; HLA-A*32:01; SMC1B; ENSG00000077935; CTA
KTDEERLAF

SEQ ID NO: 81324 - protein, 9 aa, Homo sapiens
  misc_feature: Table A; Target 81324; HLA-B*57:01; SMC1B; ENSG00000077935; CTA
KTDEERLAF

SEQ ID NO: 81325 - protein, 9 aa, Homo sapiens
  misc_feature: Table A; Target 81325; HLA-B*58:01; SMC1B; ENSG00000077935; CTA
KTDEERLAF

SEQ ID NO: 81326 - protein, 9 aa, Homo sapiens
  misc_feature: Table A; Target 81326; HLA-C*05:01; SMC1B; ENSG00000077935; CTA
KTDEERLAF

SEQ ID NO: 81327 - protein, 9 aa, Homo sapiens
  misc_feature: Table A; Target 81327; HLA-C*16:01; SMC1B; ENSG00000077935; CTA
KTDEERLAF

SEQ ID NO: 81328 - protein, 9 aa, Homo sapiens
  misc_feature: Table A; Target 81328; HLA-A*03:01; SMC1B; ENSG00000077935; CTA
KTQFPQLKK

SEQ ID NO: 81329 - protein, 9 aa, Homo sapiens
  misc_feature: Table A; Target 81329; HLA-A*03:02; SMC1B; ENSG00000077935; CTA
KTQFPQLKK

SEQ ID NO: 81330 - protein, 9 aa, Homo sapiens
  misc_feature: Table A; Target 81330; HLA-A*11:01; SMC1B; ENSG00000077935; CTA
KTQFPQLKK

SEQ ID NO: 81331 - protein, 9 aa, Homo sapiens
  misc_feature: Table A; Target 81331; HLA-B*58:01; SMC1B; ENSG00000077935; CTA
KTVALDGTL

SEQ ID NO: 81332 - protein, 10 aa, Homo sapiens
  misc_feature: Table A; Target 81332; HLA-B*57:01; SMC1B; ENSG00000077935; CTA
KTVALDGTLF

SEQ ID NO: 81333 - protein, 10 aa, Homo sapiens
  misc_feature: Table A; Target 81333; HLA-B*58:01; SMC1B; ENSG00000077935; CTA
KTVALDGTLF

SEQ ID NO: 81334 - protein, 9 aa, Homo sapiens
  misc_feature: Table A; Target 81334; HLA-A*32:01; SMC1B; ENSG00000077935; CTA
KVATMTQQL

SEQ ID NO: 81335 - protein, 9 aa, Homo sapiens
  misc_feature: Table A; Target 81335; HLA-B*58:01; SMC1B; ENSG00000077935; CTA
KVATMTQQL

SEQ ID NO: 81336 - protein, 11 aa, Homo sapiens
  misc_feature: Table A; Target 81336; HLA-A*03:01; SMC1B; ENSG00000077935; CTA
KVATMTQQLEK

SEQ ID NO: 81337 - protein, 9 aa, Homo sapiens
  misc_feature: Table A; Target 81337; HLA-A*03:02; SMC1B; ENSG00000077935; CTA
KVEDDIFQH

SEQ ID NO: 81338 - protein, 10 aa, Homo sapiens
  misc_feature: Table A; Target 81338; HLA-A*02:07; SMC1B; ENSG00000077935; CTA
KVEDDIFQHF

SEQ ID NO: 81339 - protein, 10 aa, Homo sapiens
  misc_feature: Table A; Target 81339; HLA-B*57:01; SMC1B; ENSG00000077935; CTA
KVEDDIFQHF

SEQ ID NO: 81340 - protein, 10 aa, Homo sapiens
  misc_feature: Table A; Target 81340; HLA-B*58:01; SMC1B; ENSG00000077935; CTA
KVEDDIFQHF

SEQ ID NO: 81341 - protein, 10 aa, Homo sapiens
  misc_feature: Table A; Target 81341; HLA-A*02:03; SMC1B; ENSG00000077935; CTA
KVFGRFITAI

SEQ ID NO: 81342 - protein, 10 aa, Homo sapiens
  misc_feature: Table A; Target 81342; HLA-A*02:04; SMC1B; ENSG00000077935; CTA
KVQDIEIILL

SEQ ID NO: 81343 - protein, 10 aa, Homo sapiens
  misc_feature: Table A; Target 81343; HLA-A*02:07; SMC1B; ENSG00000077935; CTA
KVQDIEIILL

SEQ ID NO: 81344 - protein, 10 aa, Homo sapiens
  misc_feature: Table A; Target 81344; HLA-A*03:02; SMC1B; ENSG00000077935; CTA
KVQDIEIILL

SEQ ID NO: 81345 - protein, 10 aa, Homo sapiens
  misc_feature: Table A; Target 81345; HLA-A*31:01; SMC1B; ENSG00000077935; CTA
KVQTQIEEER

SEQ ID NO: 81346 - protein, 11 aa, Homo sapiens
  misc_feature: Table A; Target 81346; HLA-A*03:02; SMC1B; ENSG00000077935; CTA
KVQTQIEEERK

SEQ ID NO: 81347 - protein, 9 aa, Homo sapiens
  misc_feature: Table A; Target 81347; HLA-A*24:02; SMC1B; ENSG00000077935; CTA
KYQLAVTKV

SEQ ID NO: 81348 - protein, 9 aa, Homo sapiens
  misc_feature: Table A; Target 81348; HLA-C*14:02; SMC1B; ENSG00000077935; CTA
KYQLAVTKV

SEQ ID NO: 81349 - protein, 10 aa, Homo sapiens
  misc_feature: Table A; Target 81349; HLA-A*24:02; SMC1B; ENSG00000077935; CTA
KYQLAVTKVF

SEQ ID NO: 81350 - protein, 9 aa, Homo sapiens
  misc_feature: Table A; Target 81350; HLA-C*14:02; SMC1B; ENSG00000077935; CTA
KYSQNELEM

SEQ ID NO: 81351 - protein, 8 aa, Homo sapiens
  misc_feature: Table A; Target 81351; HLA-B*27:02; SMC1B; ENSG00000077935; CTA
LDNTNIGK

SEQ ID NO: 81352 - protein, 9 aa, Homo sapiens
  misc_feature: Table A; Target 81352; HLA-B*18:01; SMC1B; ENSG00000077935; CTA
LEASQLDRY

SEQ ID NO: 81353 - protein, 9 aa, Homo sapiens
  misc_feature: Table A; Target 81353; HLA-B*44:02; SMC1B; ENSG00000077935; CTA
LEASQLDRY

SEQ ID NO: 81354 - protein, 9 aa, Homo sapiens
  misc_feature: Table A; Target 81354; HLA-B*44:03; SMC1B; ENSG00000077935; CTA
LEASQLDRY

SEQ ID NO: 81355 - protein, 9 aa, Homo sapiens
  misc_feature: Table A; Target 81355; HLA-B*49:01; SMC1B; ENSG00000077935; CTA
LEELKMNKI

SEQ ID NO: 81356 - protein, 9 aa, Homo sapiens
  misc_feature: Table A; Target 81356; HLA-B*40:01; SMC1B; ENSG00000077935; CTA
LEEYTKTCM

SEQ ID NO: 81357 - protein, 9 aa, Homo sapiens
  misc_feature: Table A; Target 81357; HLA-B*49:01; SMC1B; ENSG00000077935; CTA
LEGISYNCV

SEQ ID NO: 81358 - protein, 9 aa, Homo sapiens
  misc_feature: Table A; Target 81358; HLA-B*18:01; SMC1B; ENSG00000077935; CTA
LEKEEAERY

SEQ ID NO: 81359 - protein, 9 aa, Homo sapiens
  misc_feature: Table A; Target 81359; HLA-B*44:02; SMC1B; ENSG00000077935; CTA
LEKEEAERY

SEQ ID NO: 81360 - protein, 9 aa, Homo sapiens
  misc_feature: Table A; Target 81360; HLA-B*44:03; SMC1B; ENSG00000077935; CTA
LEKEEAERY

SEQ ID NO: 81361 - protein, 9 aa, Homo sapiens
  misc_feature: Table A; Target 81361; HLA-B*18:01; SMC1B; ENSG00000077935; CTA
LELLLVENF

SEQ ID NO: 81362 - protein, 9 aa, Homo sapiens
  misc_feature: Table A; Target 81362; HLA-B*37:01; SMC1B; ENSG00000077935; CTA
LELLLVENF

SEQ ID NO: 81363 - protein, 9 aa, Homo sapiens
  misc_feature: Table A; Target 81363; HLA-B*44:02; SMC1B; ENSG00000077935; CTA
LELLLVENF

SEQ ID NO: 81364 - protein, 9 aa, Homo sapiens
  misc_feature: Table A; Target 81364; HLA-B*44:03; SMC1B; ENSG00000077935; CTA
LELLLVENF

SEQ ID NO: 81365 - protein, 8 aa, Homo sapiens
  misc_feature: Table A; Target 81365; HLA-B*18:01; SMC1B; ENSG00000077935; CTA
LETELADL

SEQ ID NO: 81366 - protein, 10 aa, Homo sapiens
  misc_feature: Table A; Target 81366; HLA-A*03:02; SMC1B; ENSG00000077935; CTA
LIQGTQTRLK

SEQ ID NO: 81367 - protein, 11 aa, Homo sapiens
  misc_feature: Table A; Target 81367; HLA-A*29:02; SMC1B; ENSG00000077935; CTA
LIQGTQTRLKY

SEQ ID NO: 81368 - protein, 8 aa, Homo sapiens
  misc_feature: Table A; Target 81368; HLA-B*37:01; SMC1B; ENSG00000077935; CTA
LLFAVHSF

SEQ ID NO: 81369 - protein, 9 aa, Homo sapiens
  misc_feature: Table A; Target 81369; HLA-A*02:03; SMC1B; ENSG00000077935; CTA
LLKTAAPNL

SEQ ID NO: 81370 - protein, 9 aa, Homo sapiens
  misc_feature: Table A; Target 81370; HLA-A*32:01; SMC1B; ENSG00000077935; CTA
LLNQKRPQY

SEQ ID NO: 81371 - protein, 9 aa, Homo sapiens
  misc_feature: Table A; Target 81371; HLA-A*02:01; SMC1B; ENSG00000077935; CTA
LLNTKLEHV

SEQ ID NO: 81372 - protein, 9 aa, Homo sapiens
  misc_feature: Table A; Target 81372; HLA-A*02:03; SMC1B; ENSG00000077935; CTA
LLNTKLEHV

SEQ ID NO: 81373 - protein, 9 aa, Homo sapiens
  misc_feature: Table A; Target 81373; HLA-A*02:04; SMC1B; ENSG00000077935; CTA
LLNTKLEHV

SEQ ID NO: 81374 - protein, 9 aa, Homo sapiens
  misc_feature: Table A; Target 81374; HLA-A*25:01; SMC1B; ENSG00000077935; CTA
LLVENFKSW

SEQ ID NO: 81375 - protein, 8 aa, Homo sapiens
  misc_feature: Table A; Target 81375; HLA-B*08:01; SMC1B; ENSG00000077935; CTA
LNLIRSEL

SEQ ID NO: 81376 - protein, 10 aa, Homo sapiens
  misc_feature: Table A; Target 81376; HLA-B*15:01; SMC1B; ENSG00000077935; CTA
LQKAEEDAQF

SEQ ID NO: 81377 - protein, 8 aa, Homo sapiens
  misc_feature: Table A; Target 81377; HLA-B*15:01; SMC1B; ENSG00000077935; CTA
LQKEVVSI

SEQ ID NO: 81378 - protein, 11 aa, Homo sapiens
  misc_feature: Table A; Target 81378; HLA-B*27:05; SMC1B; ENSG00000077935; CTA
LQSDQEIEAHL

SEQ ID NO: 81379 - protein, 10 aa, Homo sapiens
  misc_feature: Table A; Target 81379; HLA-A*01:01; SMC1B; ENSG00000077935; CTA
LTRLNVQLEY

SEQ ID NO: 81380 - protein, 10 aa, Homo sapiens
  misc_feature: Table A; Target 81380; HLA-A*02:03; SMC1B; ENSG00000077935; CTA
LVFQGTVESI

SEQ ID NO: 81381 - protein, 10 aa, Homo sapiens
  misc_feature: Table A; Target 81381; HLA-A*25:01; SMC1B; ENSG00000077935; CTA
LVFQGTVESI

SEQ ID NO: 81382 - protein, 10 aa, Homo sapiens
  misc_feature: Table A; Target 81382; HLA-A*68:02; SMC1B; ENSG00000077935; CTA
LVFQGTVESI

SEQ ID NO: 81383 - protein, 10 aa, Homo sapiens
  misc_feature: Table A; Target 81383; HLA-B*51:01; SMC1B; ENSG00000077935; CTA
LVFQGTVESI

SEQ ID NO: 81384 - protein, 10 aa, Homo sapiens
  misc_feature: Table A; Target 81384; HLA-C*02:02; SMC1B; ENSG00000077935; CTA
LVFQGTVESI

SEQ ID NO: 81385 - protein, 9 aa, Homo sapiens
  misc_feature: Table A; Target 81385; HLA-A*33:03; SMC1B; ENSG00000077935; CTA
LYPDSVFGR

SEQ ID NO: 81386 - protein, 10 aa, Homo sapiens
  misc_feature: Table A; Target 81386; HLA-A*23:01; SMC1B; ENSG00000077935; CTA
LYPDSVFGRL

SEQ ID NO: 81387 - protein, 10 aa, Homo sapiens
  misc_feature: Table A; Target 81387; HLA-A*24:02; SMC1B; ENSG00000077935; CTA
LYPDSVFGRL

SEQ ID NO: 81388 - protein, 11 aa, Homo sapiens
  misc_feature: Table A; Target 81388; HLA-A*24:02; SMC1B; ENSG00000077935; CTA
LYPDSVFGRLF

SEQ ID NO: 81389 - protein, 11 aa, Homo sapiens
  misc_feature: Table A; Target 81389; HLA-A*29:02; SMC1B; ENSG00000077935; CTA
LYPDSVFGRLF

SEQ ID NO: 81390 - protein, 8 aa, Homo sapiens
  misc_feature: Table A; Target 81390; HLA-A*30:01; SMC1B; ENSG00000077935; CTA
MDALSFVM

SEQ ID NO: 81391 - protein, 8 aa, Homo sapiens
  misc_feature: Table A; Target 81391; HLA-B*18:01; SMC1B; ENSG00000077935; CTA
MDALSFVM

SEQ ID NO: 81392 - protein, 8 aa, Homo sapiens
  misc_feature: Table A; Target 81392; HLA-B*37:01; SMC1B; ENSG00000077935; CTA
MDALSFVM

SEQ ID NO: 81393 - protein, 9 aa, Homo sapiens
  misc_feature: Table A; Target 81393; HLA-A*30:01; SMC1B; ENSG00000077935; CTA
MEEARHIAL

SEQ ID NO: 81394 - protein, 9 aa, Homo sapiens
  misc_feature: Table A; Target 81394; HLA-B*08:01; SMC1B; ENSG00000077935; CTA
MEEARHIAL

SEQ ID NO: 81395 - protein, 9 aa, Homo sapiens
  misc_feature: Table A; Target 81395; HLA-B*18:01; SMC1B; ENSG00000077935; CTA
MEEARHIAL

SEQ ID NO: 81396 - protein, 9 aa, Homo sapiens
  misc_feature: Table A; Target 81396; HLA-B*37:01; SMC1B; ENSG00000077935; CTA
MEEARHIAL

SEQ ID NO: 81397 - protein, 9 aa, Homo sapiens
  misc_feature: Table A; Target 81397; HLA-B*40:01; SMC1B; ENSG00000077935; CTA
MEEARHIAL

SEQ ID NO: 81398 - protein, 9 aa, Homo sapiens
  misc_feature: Table A; Target 81398; HLA-B*40:02; SMC1B; ENSG00000077935; CTA
MEEARHIAL

SEQ ID NO: 81399 - protein, 9 aa, Homo sapiens
  misc_feature: Table A; Target 81399; HLA-A*33:03; SMC1B; ENSG00000077935; CTA
MLSEGIKER

SEQ ID NO: 81400 - protein, 9 aa, Homo sapiens
  misc_feature: Table A; Target 81400; HLA-A*02:01; SMC1B; ENSG00000077935; CTA
MLTRLNVQL

SEQ ID NO: 81401 - protein, 9 aa, Homo sapiens
  misc_feature: Table A; Target 81401; HLA-A*02:04; SMC1B; ENSG00000077935; CTA
MLTRLNVQL

SEQ ID NO: 81402 - protein, 9 aa, Homo sapiens
  misc_feature: Table A; Target 81402; HLA-B*56:01; SMC1B; ENSG00000077935; CTA
MPMDNLSGG

SEQ ID NO: 81403 - protein, 11 aa, Homo sapiens
  misc_feature: Table A; Target 81403; HLA-B*35:01; SMC1B; ENSG00000077935; CTA
MPMDNLSGGEK

SEQ ID NO: 81404 - protein, 10 aa, Homo sapiens
  misc_feature: Table A; Target 81404; HLA-B*57:01; SMC1B; ENSG00000077935; CTA
MTQQLEKLQW

SEQ ID NO: 81405 - protein, 9 aa, Homo sapiens
  misc_feature: Table A; Target 81405; HLA-A*25:01; SMC1B; ENSG00000077935; CTA
MVIDVIKTQ

SEQ ID NO: 81406 - protein, 10 aa, Homo sapiens
  misc_feature: Table A; Target 81406; HLA-A*23:01; SMC1B; ENSG00000077935; CTA
MVIDVIKTQF

SEQ ID NO: 81407 - protein, 10 aa, Homo sapiens
  misc_feature: Table A; Target 81407; HLA-A*25:01; SMC1B; ENSG00000077935; CTA
MVIDVIKTQF

SEQ ID NO: 81408 - protein, 10 aa, Homo sapiens
  misc_feature: Table A; Target 81408; HLA-A*26:01; SMC1B; ENSG00000077935; CTA
MVIDVIKTQF

SEQ ID NO: 81409 - protein, 10 aa, Homo sapiens
  misc_feature: Table A; Target 81409; HLA-A*32:01; SMC1B; ENSG00000077935; CTA
MVIDVIKTQF

SEQ ID NO: 81410 - protein, 10 aa, Homo sapiens
  misc_feature: Table A; Target 81410; HLA-A*68:01; SMC1B; ENSG00000077935; CTA
MVIDVIKTQF

SEQ ID NO: 81411 - protein, 10 aa, Homo sapiens
  misc_feature: Table A; Target 81411; HLA-B*15:01; SMC1B; ENSG00000077935; CTA
MVIDVIKTQF

SEQ ID NO: 81412 - protein, 10 aa, Homo sapiens
  misc_feature: Table A; Target 81412; HLA-B*35:01; SMC1B; ENSG00000077935; CTA
MVIDVIKTQF

SEQ ID NO: 81413 - protein, 9 aa, Homo sapiens
  misc_feature: Table A; Target 81413; HLA-B*37:01; SMC1B; ENSG00000077935; CTA
NDNLVSRSV

SEQ ID NO: 81414 - protein, 10 aa, Homo sapiens
  misc_feature: Table A; Target 81414; HLA-B*18:01; SMC1B; ENSG00000077935; CTA
NDNLVSRSVY

SEQ ID NO: 81415 - protein, 8 aa, Homo sapiens
  misc_feature: Table A; Target 81415; HLA-B*18:01; SMC1B; ENSG00000077935; CTA
NELEMIKK

SEQ ID NO: 81416 - protein, 10 aa, Homo sapiens
  misc_feature: Table A; Target 81416; HLA-A*30:01; SMC1B; ENSG00000077935; CTA
NELMAKQQQL

SEQ ID NO: 81417 - protein, 10 aa, Homo sapiens
  misc_feature: Table A; Target 81417; HLA-B*40:01; SMC1B; ENSG00000077935; CTA
NELMAKQQQL

SEQ ID NO: 81418 - protein, 9 aa, Homo sapiens
  misc_feature: Table A; Target 81418; HLA-A*02:04; SMC1B; ENSG00000077935; CTA
NIQELIHGA

SEQ ID NO: 81419 - protein, 9 aa, Homo sapiens
  misc_feature: Table A; Target 81419; HLA-A*31:01; SMC1B; ENSG00000077935; CTA
NTKLEHVNR

SEQ ID NO: 81420 - protein, 9 aa, Homo sapiens
  misc_feature: Table A; Target 81420; HLA-A*33:01; SMC1B; ENSG00000077935; CTA
NTKLEHVNR

SEQ ID NO: 81421 - protein, 9 aa, Homo sapiens
  misc_feature: Table A; Target 81421; HLA-A*33:03; SMC1B; ENSG00000077935; CTA
NTKLEHVNR

SEQ ID NO: 81422 - protein, 9 aa, Homo sapiens
  misc_feature: Table A; Target 81422; HLA-A*68:01; SMC1B; ENSG00000077935; CTA
NTKLEHVNR

SEQ ID NO: 81423 - protein, 9 aa, Homo sapiens
  misc_feature: Table A; Target 81423; HLA-C*07:06; SMC1B; ENSG00000077935; CTA
NTKLEHVNR

SEQ ID NO: 81424 - protein, 9 aa, Homo sapiens
  misc_feature: Table A; Target 81424; HLA-A*03:02; SMC1B; ENSG00000077935; CTA
NTLKETIQK

SEQ ID NO: 81425 - protein, 9 aa, Homo sapiens
  misc_feature: Table A; Target 81425; HLA-A*11:01; SMC1B; ENSG00000077935; CTA
NTLKETIQK

SEQ ID NO: 81426 - protein, 9 aa, Homo sapiens
  misc_feature: Table A; Target 81426; HLA-A*33:01; SMC1B; ENSG00000077935; CTA
NTLKETIQK

SEQ ID NO: 81427 - protein, 10 aa, Homo sapiens
  misc_feature: Table A; Target 81427; HLA-A*25:01; SMC1B; ENSG00000077935; CTA
NTNIGKVSSY

SEQ ID NO: 81428 - protein, 10 aa, Homo sapiens
  misc_feature: Table A; Target 81428; HLA-A*26:01; SMC1B; ENSG00000077935; CTA
NTNIGKVSSY

SEQ ID NO: 81429 - protein, 10 aa, Homo sapiens
  misc_feature: Table A; Target 81429; HLA-A*30:02; SMC1B; ENSG00000077935; CTA
NTNIGKVSSY

SEQ ID NO: 81430 - protein, 9 aa, Homo sapiens
  misc_feature: Table A; Target 81430; HLA-A*02:01; SMC1B; ENSG00000077935; CTA
NVMDALSFV

SEQ ID NO: 81431 - protein, 9 aa, Homo sapiens
  misc_feature: Table A; Target 81431; HLA-A*02:03; SMC1B; ENSG00000077935; CTA
NVMDALSFV

SEQ ID NO: 81432 - protein, 9 aa, Homo sapiens
  misc_feature: Table A; Target 81432; HLA-A*02:07; SMC1B; ENSG00000077935; CTA
NVMDALSFV

SEQ ID NO: 81433 - protein, 9 aa, Homo sapiens
  misc_feature: Table A; Target 81433; HLA-A*26:01; SMC1B; ENSG00000077935; CTA
NVMDALSFV

SEQ ID NO: 81434 - protein, 9 aa, Homo sapiens
  misc_feature: Table A; Target 81434; HLA-A*68:02; SMC1B; ENSG00000077935; CTA
NVMDALSFV

SEQ ID NO: 81435 - protein, 10 aa, Homo sapiens
  misc_feature: Table A; Target 81435; HLA-B*27:02; SMC1B; ENSG00000077935; CTA
PDTEGQESSK

SEQ ID NO: 81436 - protein, 8 aa, Homo sapiens
  misc_feature: Table A; Target 81436; HLA-C*14:02; SMC1B; ENSG00000077935; CTA
PYLEGISY

SEQ ID NO: 81437 - protein, 9 aa, Homo sapiens
  misc_feature: Table A; Target 81437; HLA-B*27:02; SMC1B; ENSG00000077935; CTA
QATIDIYEK

SEQ ID NO: 81438 - protein, 9 aa, Homo sapiens
  misc_feature: Table A; Target 81438; HLA-C*07:06; SMC1B; ENSG00000077935; CTA
QATIDIYEK

SEQ ID NO: 81439 - protein, 8 aa, Homo sapiens
  misc_feature: Table A; Target 81439; HLA-B*44:02; SMC1B; ENSG00000077935; CTA
QEDDIKAL

SEQ ID NO: 81440 - protein, 9 aa, Homo sapiens
  misc_feature: Table A; Target 81440; HLA-B*49:01; SMC1B; ENSG00000077935; CTA
QEDILLKTA

SEQ ID NO: 81441 - protein, 10 aa, Homo sapiens
  misc_feature: Table A; Target 81441; HLA-B*49:01; SMC1B; ENSG00000077935; CTA
QEDILLKTAA

SEQ ID NO: 81442 - protein, 9 aa, Homo sapiens
  misc_feature: Table A; Target 81442; HLA-B*40:01; SMC1B; ENSG00000077935; CTA
QEETLVDEI

SEQ ID NO: 81443 - protein, 9 aa, Homo sapiens
  misc_feature: Table A; Target 81443; HLA-B*49:01; SMC1B; ENSG00000077935; CTA
QEETLVDEI

SEQ ID NO: 81444 - protein, 11 aa, Homo sapiens
  misc_feature: Table A; Target 81444; HLA-B*27:02; SMC1B; ENSG00000077935; CTA
QEETLVDEIEK

SEQ ID NO: 81445 - protein, 9 aa, Homo sapiens
  misc_feature: Table A; Target 81445; HLA-B*44:02; SMC1B; ENSG00000077935; CTA
QEFEQVKKR

SEQ ID NO: 81446 - protein, 9 aa, Homo sapiens
  misc_feature: Table A; Target 81446; HLA-B*44:03; SMC1B; ENSG00000077935; CTA
QEFEQVKKR

SEQ ID NO: 81447 - protein, 8 aa, Homo sapiens
  misc_feature: Table A; Target 81447; HLA-B*44:02; SMC1B; ENSG00000077935; CTA
QEIDQKRY

SEQ ID NO: 81448 - protein, 8 aa, Homo sapiens
  misc_feature: Table A; Target 81448; HLA-B*44:03; SMC1B; ENSG00000077935; CTA
QEIDQKRY

SEQ ID NO: 81449 - protein, 9 aa, Homo sapiens
  misc_feature: Table A; Target 81449; HLA-B*44:02; SMC1B; ENSG00000077935; CTA
QEIDQKRYF

SEQ ID NO: 81450 - protein, 9 aa, Homo sapiens
  misc_feature: Table A; Target 81450; HLA-B*44:03; SMC1B; ENSG00000077935; CTA
QEIDQKRYF

SEQ ID NO: 81451 - protein, 10 aa, Homo sapiens
  misc_feature: Table A; Target 81451; HLA-B*44:02; SMC1B; ENSG00000077935; CTA
QEIDQKRYFY

SEQ ID NO: 81452 - protein, 10 aa, Homo sapiens
  misc_feature: Table A; Target 81452; HLA-B*44:03; SMC1B; ENSG00000077935; CTA
QEIDQKRYFY

SEQ ID NO: 81453 - protein, 9 aa, Homo sapiens
  misc_feature: Table A; Target 81453; HLA-A*30:01; SMC1B; ENSG00000077935; CTA
QEIEAHLRL

SEQ ID NO: 81454 - protein, 9 aa, Homo sapiens
  misc_feature: Table A; Target 81454; HLA-B*37:01; SMC1B; ENSG00000077935; CTA
QEIEAHLRL

SEQ ID NO: 81455 - protein, 9 aa, Homo sapiens
  misc_feature: Table A; Target 81455; HLA-B*40:01; SMC1B; ENSG00000077935; CTA
QEIEAHLRL

SEQ ID NO: 81456 - protein, 9 aa, Homo sapiens
  misc_feature: Table A; Target 81456; HLA-B*44:02; SMC1B; ENSG00000077935; CTA
QEIEAHLRL

SEQ ID NO: 81457 - protein, 9 aa, Homo sapiens
  misc_feature: Table A; Target 81457; HLA-B*44:03; SMC1B; ENSG00000077935; CTA
QEIEAHLRL

SEQ ID NO: 81458 - protein, 9 aa, Homo sapiens
  misc_feature: Table A; Target 81458; HLA-B*49:01; SMC1B; ENSG00000077935; CTA
QEIEAHLRL

SEQ ID NO: 81459 - protein, 10 aa, Homo sapiens
  misc_feature: Table A; Target 81459; HLA-B*44:02; SMC1B; ENSG00000077935; CTA
QEIEAHLRLL

SEQ ID NO: 81460 - protein, 10 aa, Homo sapiens
  misc_feature: Table A; Target 81460; HLA-B*44:03; SMC1B; ENSG00000077935; CTA
QEIEAHLRLL

SEQ ID NO: 81461 - protein, 11 aa, Homo sapiens
  misc_feature: Table A; Target 81461; HLA-B*44:02; SMC1B; ENSG00000077935; CTA
QEIEAHLRLLL

SEQ ID NO: 81462 - protein, 9 aa, Homo sapiens
  misc_feature: Table A; Target 81462; HLA-B*37:01; SMC1B; ENSG00000077935; CTA
QELIHGAHI

SEQ ID NO: 81463 - protein, 9 aa, Homo sapiens
  misc_feature: Table A; Target 81463; HLA-B*44:03; SMC1B; ENSG00000077935; CTA
QELIHGAHI

SEQ ID NO: 81464 - protein, 9 aa, Homo sapiens
  misc_feature: Table A; Target 81464; HLA-B*49:01; SMC1B; ENSG00000077935; CTA
QELIHGAHI

SEQ ID NO: 81465 - protein, 10 aa, Homo sapiens
  misc_feature: Table A; Target 81465; HLA-B*44:02; SMC1B; ENSG00000077935; CTA
QELKGLMKTL

SEQ ID NO: 81466 - protein, 10 aa, Homo sapiens
  misc_feature: Table A; Target 81466; HLA-B*44:03; SMC1B; ENSG00000077935; CTA
QELKGLMKTL

SEQ ID NO: 81467 - protein, 10 aa, Homo sapiens
  misc_feature: Table A; Target 81467; HLA-A*30:01; SMC1B; ENSG00000077935; CTA
QEQSQLQSEL

SEQ ID NO: 81468 - protein, 10 aa, Homo sapiens
  misc_feature: Table A; Target 81468; HLA-B*40:01; SMC1B; ENSG00000077935; CTA
QEQSQLQSEL

SEQ ID NO: 81469 - protein, 11 aa, Homo sapiens
  misc_feature: Table A; Target 81469; HLA-A*30:01; SMC1B; ENSG00000077935; CTA
QEQSQLQSELL

SEQ ID NO: 81470 - protein, 11 aa, Homo sapiens
  misc_feature: Table A; Target 81470; HLA-B*40:01; SMC1B; ENSG00000077935; CTA
QEQSQLQSELL

SEQ ID NO: 81471 - protein, 9 aa, Homo sapiens
  misc_feature: Table A; Target 81471; HLA-A*23:01; SMC1B; ENSG00000077935; CTA
QFQMIVISL

SEQ ID NO: 81472 - protein, 9 aa, Homo sapiens
  misc_feature: Table A; Target 81472; HLA-C*16:01; SMC1B; ENSG00000077935; CTA
QGTQTRLKY

SEQ ID NO: 81473 - protein, 9 aa, Homo sapiens
  misc_feature: Table A; Target 81473; HLA-A*01:01; SMC1B; ENSG00000077935; CTA
QIEEEILHK

SEQ ID NO: 81474 - protein, 9 aa, Homo sapiens
  misc_feature: Table A; Target 81474; HLA-A*03:02; SMC1B; ENSG00000077935; CTA
QIEEEILHK

SEQ ID NO: 81475 - protein, 9 aa, Homo sapiens
  misc_feature: Table A; Target 81475; HLA-A*11:01; SMC1B; ENSG00000077935; CTA
QIEEEILHK

SEQ ID NO: 81476 - protein, 10 aa, Homo sapiens
  misc_feature: Table A; Target 81476; HLA-A*03:02; SMC1B; ENSG00000077935; CTA
QIEEEILHKK

SEQ ID NO: 81477 - protein, 9 aa, Homo sapiens
  misc_feature: Table A; Target 81477; HLA-A*02:03; SMC1B; ENSG00000077935; CTA
QLKKVIQFV

SEQ ID NO: 81478 - protein, 10 aa, Homo sapiens
  misc_feature: Table A; Target 81478; HLA-A*03:02; SMC1B; ENSG00000077935; CTA
QLQQTEKELK

SEQ ID NO: 81479 - protein, 9 aa, Homo sapiens
  misc_feature: Table A; Target 81479; HLA-A*02:04; SMC1B; ENSG00000077935; CTA
QLQSELLNI

SEQ ID NO: 81480 - protein, 9 aa, Homo sapiens
  misc_feature: Table A; Target 81480; HLA-B*13:02; SMC1B; ENSG00000077935; CTA
QQVASQEDI

SEQ ID NO: 81481 - protein, 11 aa, Homo sapiens
  misc_feature: Table A; Target 81481; HLA-B*38:01; SMC1B; ENSG00000077935; CTA
QQVASQEDILL

SEQ ID NO: 81482 - protein, 10 aa, Homo sapiens
  misc_feature: Table A; Target 81482; HLA-A*01:01; SMC1B; ENSG00000077935; CTA
QSDQEIEAHL

SEQ ID NO: 81483 - protein, 11 aa, Homo sapiens
  misc_feature: Table A; Target 81483; HLA-A*01:01; SMC1B; ENSG00000077935; CTA
QSDQEIEAHLR

SEQ ID NO: 81484 - protein, 10 aa, Homo sapiens
  misc_feature: Table A; Target 81484; HLA-A*33:03; SMC1B; ENSG00000077935; CTA
QTLIQGTQTR

SEQ ID NO: 81485 - protein, 9 aa, Homo sapiens
  misc_feature: Table A; Target 81485; HLA-A*03:01; SMC1B; ENSG00000077935; CTA
QTVNELMAK

SEQ ID NO: 81486 - protein, 9 aa, Homo sapiens
  misc_feature: Table A; Target 81486; HLA-A*03:02; SMC1B; ENSG00000077935; CTA
QTVNELMAK

SEQ ID NO: 81487 - protein, 9 aa, Homo sapiens
  misc_feature: Table A; Target 81487; HLA-A*11:01; SMC1B; ENSG00000077935; CTA
QTVNELMAK

SEQ ID NO: 81488 - protein, 9 aa, Homo sapiens
  misc_feature: Table A; Target 81488; HLA-A*68:01; SMC1B; ENSG00000077935; CTA
QTVNELMAK

SEQ ID NO: 81489 - protein, 9 aa, Homo sapiens
  misc_feature: Table A; Target 81489; HLA-C*07:06; SMC1B; ENSG00000077935; CTA
QTVNELMAK

SEQ ID NO: 81490 - protein, 11 aa, Homo sapiens
  misc_feature: Table A; Target 81490; HLA-A*03:01; SMC1B; ENSG00000077935; CTA
QVASQEDILLK

SEQ ID NO: 81491 - protein, 11 aa, Homo sapiens
  misc_feature: Table A; Target 81491; HLA-A*03:02; SMC1B; ENSG00000077935; CTA
QVASQEDILLK

SEQ ID NO: 81492 - protein, 11 aa, Homo sapiens
  misc_feature: Table A; Target 81492; HLA-A*68:01; SMC1B; ENSG00000077935; CTA
QVASQEDILLK

SEQ ID NO: 81493 - protein, 11 aa, Homo sapiens
  misc_feature: Table A; Target 81493; HLA-B*27:02; SMC1B; ENSG00000077935; CTA
QVASQEDILLK

SEQ ID NO: 81494 - protein, 11 aa, Homo sapiens
  misc_feature: Table A; Target 81494; HLA-C*07:06; SMC1B; ENSG00000077935; CTA
QVASQEDILLK

SEQ ID NO: 81495 - protein, 9 aa, Homo sapiens
  misc_feature: Table A; Target 81495; HLA-B*08:01; SMC1B; ENSG00000077935; CTA
QVRKKVATM

SEQ ID NO: 81496 - protein, 9 aa, Homo sapiens
  misc_feature: Table A; Target 81496; HLA-A*01:01; SMC1B; ENSG00000077935; CTA
RADALIGIY

SEQ ID NO: 81497 - protein, 9 aa, Homo sapiens
  misc_feature: Table A; Target 81497; HLA-B*51:01; SMC1B; ENSG00000077935; CTA
RALENLKTV

SEQ ID NO: 81498 - protein, 9 aa, Homo sapiens
  misc_feature: Table A; Target 81498; HLA-B*58:01; SMC1B; ENSG00000077935; CTA
RALENLKTV

SEQ ID NO: 81499 - protein, 9 aa, Homo sapiens
  misc_feature: Table A; Target 81499; HLA-C*16:02; SMC1B; ENSG00000077935; CTA
RALENLKTV

SEQ ID NO: 81500 - protein, 10 aa, Homo sapiens
  misc_feature: Table A; Target 81500; HLA-A*30:01; SMC1B; ENSG00000077935; CTA
RDIELEASQL

SEQ ID NO: 81501 - protein, 10 aa, Homo sapiens
  misc_feature: Table A; Target 81501; HLA-B*40:01; SMC1B; ENSG00000077935; CTA
RDIELEASQL

SEQ ID NO: 81502 - protein, 9 aa, Homo sapiens
  misc_feature: Table A; Target 81502; HLA-A*31:01; SMC1B; ENSG00000077935; CTA
RFNDNLVSR

SEQ ID NO: 81503 - protein, 9 aa, Homo sapiens
  misc_feature: Table A; Target 81503; HLA-A*33:01; SMC1B; ENSG00000077935; CTA
RFNDNLVSR

SEQ ID NO: 81504 - protein, 9 aa, Homo sapiens
  misc_feature: Table A; Target 81504; HLA-A*33:03; SMC1B; ENSG00000077935; CTA
RFNDNLVSR

SEQ ID NO: 81505 - protein, 9 aa, Homo sapiens
  misc_feature: Table A; Target 81505; HLA-B*38:01; SMC1B; ENSG00000077935; CTA
RHGEVQGNL

SEQ ID NO: 81506 - protein, 8 aa, Homo sapiens
  misc_feature: Table A; Target 81506; HLA-A*03:01; SMC1B; ENSG00000077935; CTA
RLNVQLEY

SEQ ID NO: 81507 - protein, 8 aa, Homo sapiens
  misc_feature: Table A; Target 81507; HLA-A*30:02; SMC1B; ENSG00000077935; CTA
RLNVQLEY

SEQ ID NO: 81508 - protein, 10 aa, Homo sapiens
  misc_feature: Table A; Target 81508; HLA-A*03:01; SMC1B; ENSG00000077935; CTA
RLYPDSVFGR

SEQ ID NO: 81509 - protein, 10 aa, Homo sapiens
  misc_feature: Table A; Target 81509; HLA-A*31:01; SMC1B; ENSG00000077935; CTA
RLYPDSVFGR

SEQ ID NO: 81510 - protein, 11 aa, Homo sapiens
  misc_feature: Table A; Target 81510; HLA-A*02:03; SMC1B; ENSG00000077935; CTA
RLYPDSVFGRL

SEQ ID NO: 81511 - protein, 11 aa, Homo sapiens
  misc_feature: Table A; Target 81511; HLA-A*02:04; SMC1B; ENSG00000077935; CTA
RLYPDSVFGRL

SEQ ID NO: 81512 - protein, 11 aa, Homo sapiens
  misc_feature: Table A; Target 81512; HLA-A*02:07; SMC1B; ENSG00000077935; CTA
RLYPDSVFGRL

SEQ ID NO: 81513 - protein, 11 aa, Homo sapiens
  misc_feature: Table A; Target 81513; HLA-A*03:01; SMC1B; ENSG00000077935; CTA
RLYPDSVFGRL

SEQ ID NO: 81514 - protein, 11 aa, Homo sapiens
  misc_feature: Table A; Target 81514; HLA-A*31:01; SMC1B; ENSG00000077935; CTA
RLYPDSVFGRL

SEQ ID NO: 81515 - protein, 9 aa, Homo sapiens
  misc_feature: Table A; Target 81515; HLA-A*02:01; SMC1B; ENSG00000077935; CTA
RMSEFNEEL

SEQ ID NO: 81516 - protein, 9 aa, Homo sapiens
  misc_feature: Table A; Target 81516; HLA-A*03:02; SMC1B; ENSG00000077935; CTA
RQEFEQVKK

SEQ ID NO: 81517 - protein, 10 aa, Homo sapiens
  misc_feature: Table A; Target 81517; HLA-A*30:02; SMC1B; ENSG00000077935; CTA
RQQEIDQKRY

SEQ ID NO: 81518 - protein, 10 aa, Homo sapiens
  misc_feature: Table A; Target 81518; HLA-B*15:01; SMC1B; ENSG00000077935; CTA
RQQEIDQKRY

SEQ ID NO: 81519 - protein, 9 aa, Homo sapiens
  misc_feature: Table A; Target 81519; HLA-A*03:02; SMC1B; ENSG00000077935; CTA
RSQKIQELK

SEQ ID NO: 81520 - protein, 10 aa, Homo sapiens
  misc_feature: Table A; Target 81520; HLA-A*29:02; SMC1B; ENSG00000077935; CTA
RVLTLDLSQY

SEQ ID NO: 81521 - protein, 10 aa, Homo sapiens
  misc_feature: Table A; Target 81521; HLA-A*30:02; SMC1B; ENSG00000077935; CTA
RVLTLDLSQY

SEQ ID NO: 81522 - protein, 10 aa, Homo sapiens
  misc_feature: Table A; Target 81522; HLA-B*57:01; SMC1B; ENSG00000077935; CTA
RVLTLDLSQY

SEQ ID NO: 81523 - protein, 10 aa, Homo sapiens
  misc_feature: Table A; Target 81523; HLA-A*03:02; SMC1B; ENSG00000077935; CTA
RVTQNSSAEK

SEQ ID NO: 81524 - protein, 9 aa, Homo sapiens
  misc_feature: Table A; Target 81524; HLA-A*24:02; SMC1B; ENSG00000077935; CTA
RYDLFTQCF

SEQ ID NO: 81525 - protein, 9 aa, Homo sapiens
  misc_feature: Table A; Target 81525; HLA-A*23:01; SMC1B; ENSG00000077935; CTA
RYQSLLEEL

SEQ ID NO: 81526 - protein, 9 aa, Homo sapiens
  misc_feature: Table A; Target 81526; HLA-A*24:02; SMC1B; ENSG00000077935; CTA
RYQSLLEEL

SEQ ID NO: 81527 - protein, 9 aa, Homo sapiens
  misc_feature: Table A; Target 81527; HLA-B*51:01; SMC1B; ENSG00000077935; CTA
SAEKVQTQI

SEQ ID NO: 81528 - protein, 9 aa, Homo sapiens
  misc_feature: Table A; Target 81528; HLA-B*58:01; SMC1B; ENSG00000077935; CTA
SAEKVQTQI

SEQ ID NO: 81529 - protein, 9 aa, Homo sapiens
  misc_feature: Table A; Target 81529; HLA-C*05:01; SMC1B; ENSG00000077935; CTA
SAEKVQTQI

SEQ ID NO: 81530 - protein, 8 aa, Homo sapiens
  misc_feature: Table A; Target 81530; HLA-C*16:01; SMC1B; ENSG00000077935; CTA
SASVKIIY

SEQ ID NO: 81531 - protein, 9 aa, Homo sapiens
  misc_feature: Table A; Target 81531; HLA-A*02:04; SMC1B; ENSG00000077935; CTA
SASVKIIYV

SEQ ID NO: 81532 - protein, 9 aa, Homo sapiens
  misc_feature: Table A; Target 81532; HLA-A*68:02; SMC1B; ENSG00000077935; CTA
SASVKIIYV

SEQ ID NO: 81533 - protein, 9 aa, Homo sapiens
  misc_feature: Table A; Target 81533; HLA-C*02:02; SMC1B; ENSG00000077935; CTA
SASVKIIYV

SEQ ID NO: 81534 - protein, 9 aa, Homo sapiens
  misc_feature: Table A; Target 81534; HLA-C*12:03; SMC1B; ENSG00000077935; CTA
SASVKIIYV

SEQ ID NO: 81535 - protein, 9 aa, Homo sapiens
  misc_feature: Table A; Target 81535; HLA-A*30:01; SMC1B; ENSG00000077935; CTA
SEFNEELNL

SEQ ID NO: 81536 - protein, 9 aa, Homo sapiens
  misc_feature: Table A; Target 81536; HLA-B*40:01; SMC1B; ENSG00000077935; CTA
SEFNEELNL

SEQ ID NO: 81537 - protein, 9 aa, Homo sapiens
  misc_feature: Table A; Target 81537; HLA-B*44:02; SMC1B; ENSG00000077935; CTA
SEFNEELNL

SEQ ID NO: 81538 - protein, 9 aa, Homo sapiens
  misc_feature: Table A; Target 81538; HLA-B*44:03; SMC1B; ENSG00000077935; CTA
SEFNEELNL

SEQ ID NO: 81539 - protein, 9 aa, Homo sapiens
  misc_feature: Table A; Target 81539; HLA-B*49:01; SMC1B; ENSG00000077935; CTA
SEFNEELNL

SEQ ID NO: 81540 - protein, 10 aa, Homo sapiens
  misc_feature: Table A; Target 81540; HLA-A*30:01; SMC1B; ENSG00000077935; CTA
SEFNEELNLI

SEQ ID NO: 81541 - protein, 10 aa, Homo sapiens
  misc_feature: Table A; Target 81541; HLA-B*40:01; SMC1B; ENSG00000077935; CTA
SEFNEELNLI

SEQ ID NO: 81542 - protein, 10 aa, Homo sapiens
  misc_feature: Table A; Target 81542; HLA-B*44:03; SMC1B; ENSG00000077935; CTA
SEFNEELNLI

SEQ ID NO: 81543 - protein, 10 aa, Homo sapiens
  misc_feature: Table A; Target 81543; HLA-B*49:01; SMC1B; ENSG00000077935; CTA
SEFNEELNLI

SEQ ID NO: 81544 - protein, 9 aa, Homo sapiens
  misc_feature: Table A; Target 81544; HLA-A*30:01; SMC1B; ENSG00000077935; CTA
SEFRFNDNL

SEQ ID NO: 81545 - protein, 9 aa, Homo sapiens
  misc_feature: Table A; Target 81545; HLA-B*40:01; SMC1B; ENSG00000077935; CTA
SEFRFNDNL

SEQ ID NO: 81546 - protein, 9 aa, Homo sapiens
  misc_feature: Table A; Target 81546; HLA-B*44:03; SMC1B; ENSG00000077935; CTA
SEFRFNDNL

SEQ ID NO: 81547 - protein, 9 aa, Homo sapiens
  misc_feature: Table A; Target 81547; HLA-B*49:01; SMC1B; ENSG00000077935; CTA
SEFRFNDNL

SEQ ID NO: 81548 - protein, 10 aa, Homo sapiens
  misc_feature: Table A; Target 81548; HLA-B*49:01; SMC1B; ENSG00000077935; CTA
SEFRFNDNLV

SEQ ID NO: 81549 - protein, 8 aa, Homo sapiens
  misc_feature: Table A; Target 81549; HLA-A*11:01; SMC1B; ENSG00000077935; CTA
SIDQIYKK

SEQ ID NO: 81550 - protein, 9 aa, Homo sapiens
  misc_feature: Table A; Target 81550; HLA-A*02:07; SMC1B; ENSG00000077935; CTA
SIDQIYKKL

SEQ ID NO: 81551 - protein, 9 aa, Homo sapiens
  misc_feature: Table A; Target 81551; HLA-A*03:02; SMC1B; ENSG00000077935; CTA
SIQTSLEQK

SEQ ID NO: 81552 - protein, 9 aa, Homo sapiens
  misc_feature: Table A; Target 81552; HLA-A*11:01; SMC1B; ENSG00000077935; CTA
SIQTSLEQK

SEQ ID NO: 81553 - protein, 9 aa, Homo sapiens
  misc_feature: Table A; Target 81553; HLA-A*03:01; SMC1B; ENSG00000077935; CTA
SISIDQIYK

SEQ ID NO: 81554 - protein, 9 aa, Homo sapiens
  misc_feature: Table A; Target 81554; HLA-A*03:02; SMC1B; ENSG00000077935; CTA
SISIDQIYK

SEQ ID NO: 81555 - protein, 9 aa, Homo sapiens
  misc_feature: Table A; Target 81555; HLA-A*11:01; SMC1B; ENSG00000077935; CTA
SISIDQIYK

SEQ ID NO: 81556 - protein, 8 aa, Homo sapiens
  misc_feature: Table A; Target 81556; HLA-A*02:01; SMC1B; ENSG00000077935; CTA
SLDDIIEV

SEQ ID NO: 81557 - protein, 8 aa, Homo sapiens
  misc_feature: Table A; Target 81557; HLA-A*02:07; SMC1B; ENSG00000077935; CTA
SLDDIIEV

SEQ ID NO: 81558 - protein, 8 aa, Homo sapiens
  misc_feature: Table A; Target 81558; HLA-C*05:01; SMC1B; ENSG00000077935; CTA
SLDDIIEV

SEQ ID NO: 81559 - protein, 10 aa, Homo sapiens
  misc_feature: Table A; Target 81559; HLA-A*02:01; SMC1B; ENSG00000077935; CTA
SLDDIIEVEM

SEQ ID NO: 81560 - protein, 10 aa, Homo sapiens
  misc_feature: Table A; Target 81560; HLA-A*02:07; SMC1B; ENSG00000077935; CTA
SLDDIIEVEM

SEQ ID NO: 81561 - protein, 10 aa, Homo sapiens
  misc_feature: Table A; Target 81561; HLA-B*38:01; SMC1B; ENSG00000077935; CTA
SLDDIIEVEM

SEQ ID NO: 81562 - protein, 10 aa, Homo sapiens
  misc_feature: Table A; Target 81562; HLA-B*55:01; SMC1B; ENSG00000077935; CTA
SLDDIIEVEM

SEQ ID NO: 81563 - protein, 10 aa, Homo sapiens
  misc_feature: Table A; Target 81563; HLA-C*04:01; SMC1B; ENSG00000077935; CTA
SLDDIIEVEM

SEQ ID NO: 81564 - protein, 10 aa, Homo sapiens
  misc_feature: Table A; Target 81564; HLA-C*05:01; SMC1B; ENSG00000077935; CTA
SLDDIIEVEM

SEQ ID NO: 81565 - protein, 9 aa, Homo sapiens
  misc_feature: Table A; Target 81565; HLA-A*02:03; SMC1B; ENSG00000077935; CTA
SLKEDLKAL

SEQ ID NO: 81566 - protein, 9 aa, Homo sapiens
  misc_feature: Table A; Target 81566; HLA-A*02:04; SMC1B; ENSG00000077935; CTA
SLKEDLKAL

SEQ ID NO: 81567 - protein, 9 aa, Homo sapiens
  misc_feature: Table A; Target 81567; HLA-B*08:01; SMC1B; ENSG00000077935; CTA
SLKEDLKAL

SEQ ID NO: 81568 - protein, 9 aa, Homo sapiens
  misc_feature: Table A; Target 81568; HLA-B*46:01; SMC1B; ENSG00000077935; CTA
SLKEDLKAL

SEQ ID NO: 81569 - protein, 9 aa, Homo sapiens
  misc_feature: Table A; Target 81569; HLA-A*31:01; SMC1B; ENSG00000077935; CTA
SLKEEFYSR

SEQ ID NO: 81570 - protein, 9 aa, Homo sapiens
  misc_feature: Table A; Target 81570; HLA-A*33:01; SMC1B; ENSG00000077935; CTA
SLKEEFYSR

SEQ ID NO: 81571 - protein, 9 aa, Homo sapiens
  misc_feature: Table A; Target 81571; HLA-A*33:03; SMC1B; ENSG00000077935; CTA
SLKEEFYSR

SEQ ID NO: 81572 - protein, 10 aa, Homo sapiens
  misc_feature: Table A; Target 81572; HLA-B*35:03; SMC1B; ENSG00000077935; CTA
SPENPEEPYL

SEQ ID NO: 81573 - protein, 10 aa, Homo sapiens
  misc_feature: Table A; Target 81573; HLA-B*13:02; SMC1B; ENSG00000077935; CTA
SQLQSELLNI

SEQ ID NO: 81574 - protein, 10 aa, Homo sapiens
  misc_feature: Table A; Target 81574; HLA-A*11:01; SMC1B; ENSG00000077935; CTA
SQNELEMIKK

SEQ ID NO: 81575 - protein, 11 aa, Homo sapiens
  misc_feature: Table A; Target 81575; HLA-B*27:05; SMC1B; ENSG00000077935; CTA
SQYPDTEGQES

SEQ ID NO: 81576 - protein, 9 aa, Homo sapiens
  misc_feature: Table A; Target 81576; HLA-B*27:05; SMC1B; ENSG00000077935; CTA
SRADALIGI

SEQ ID NO: 81577 - protein, 10 aa, Homo sapiens
  misc_feature: Table A; Target 81577; HLA-B*27:02; SMC1B; ENSG00000077935; CTA
SRADALIGIY

SEQ ID NO: 81578 - protein, 9 aa, Homo sapiens
  misc_feature: Table A; Target 81578; HLA-A*01:01; SMC1B; ENSG00000077935; CTA
SSASVKIIY

SEQ ID NO: 81579 - protein, 9 aa, Homo sapiens
  misc_feature: Table A; Target 81579; HLA-A*30:02; SMC1B; ENSG00000077935; CTA
SSASVKIIY

SEQ ID NO: 81580 - protein, 9 aa, Homo sapiens
  misc_feature: Table A; Target 81580; HLA-A*32:01; SMC1B; ENSG00000077935; CTA
SSASVKIIY

SEQ ID NO: 81581 - protein, 9 aa, Homo sapiens
  misc_feature: Table A; Target 81581; HLA-B*58:01; SMC1B; ENSG00000077935; CTA
SSASVKIIY

SEQ ID NO: 81582 - protein, 9 aa, Homo sapiens
  misc_feature: Table A; Target 81582; HLA-C*02:02; SMC1B; ENSG00000077935; CTA
SSASVKIIY

SEQ ID NO: 81583 - protein, 9 aa, Homo sapiens
  misc_feature: Table A; Target 81583; HLA-C*12:03; SMC1B; ENSG00000077935; CTA
SSASVKIIY

SEQ ID NO: 81584 - protein, 9 aa, Homo sapiens
  misc_feature: Table A; Target 81584; HLA-C*16:01; SMC1B; ENSG00000077935; CTA
SSASVKIIY

SEQ ID NO: 81585 - protein, 10 aa, Homo sapiens
  misc_feature: Table A; Target 81585; HLA-A*30:02; SMC1B; ENSG00000077935; CTA
SSSASVKIIY

SEQ ID NO: 81586 - protein, 9 aa, Homo sapiens
  misc_feature: Table A; Target 81586; HLA-C*07:06; SMC1B; ENSG00000077935; CTA
STDAFEASR

SEQ ID NO: 81587 - protein, 10 aa, Homo sapiens
  misc_feature: Table A; Target 81587; HLA-A*03:02; SMC1B; ENSG00000077935; CTA
STDAFEASRK

SEQ ID NO: 81588 - protein, 9 aa, Homo sapiens
  misc_feature: Table A; Target 81588; HLA-A*01:01; SMC1B; ENSG00000077935; CTA
STQATIDIY

SEQ ID NO: 81589 - protein, 9 aa, Homo sapiens
  misc_feature: Table A; Target 81589; HLA-A*30:02; SMC1B; ENSG00000077935; CTA
STQATIDIY

SEQ ID NO: 81590 - protein, 11 aa, Homo sapiens
  misc_feature: Table A; Target 81590; HLA-A*03:02; SMC1B; ENSG00000077935; CTA
STQATIDIYEK

SEQ ID NO: 81591 - protein, 11 aa, Homo sapiens
  misc_feature: Table A; Target 81591; HLA-A*11:01; SMC1B; ENSG00000077935; CTA
STQATIDIYEK

SEQ ID NO: 81592 - protein, 10 aa, Homo sapiens
  misc_feature: Table A; Target 81592; HLA-A*01:01; SMC1B; ENSG00000077935; CTA
STSGELIGEY

SEQ ID NO: 81593 - protein, 10 aa, Homo sapiens
  misc_feature: Table A; Target 81593; HLA-A*25:01; SMC1B; ENSG00000077935; CTA
STSGELIGEY

SEQ ID NO: 81594 - protein, 10 aa, Homo sapiens
  misc_feature: Table A; Target 81594; HLA-A*26:01; SMC1B; ENSG00000077935; CTA
STSGELIGEY

SEQ ID NO: 81595 - protein, 10 aa, Homo sapiens
  misc_feature: Table A; Target 81595; HLA-A*29:02; SMC1B; ENSG00000077935; CTA
STSGELIGEY

SEQ ID NO: 81596 - protein, 10 aa, Homo sapiens
  misc_feature: Table A; Target 81596; HLA-A*30:02; SMC1B; ENSG00000077935; CTA
STSGELIGEY

SEQ ID NO: 81597 - protein, 9 aa, Homo sapiens
  misc_feature: Table A; Target 81597; HLA-A*03:01; SMC1B; ENSG00000077935; CTA
SVETLLNQK

SEQ ID NO: 81598 - protein, 9 aa, Homo sapiens
  misc_feature: Table A; Target 81598; HLA-A*03:02; SMC1B; ENSG00000077935; CTA
SVETLLNQK

SEQ ID NO: 81599 - protein, 9 aa, Homo sapiens
  misc_feature: Table A; Target 81599; HLA-A*11:01; SMC1B; ENSG00000077935; CTA
SVETLLNQK

SEQ ID NO: 81600 - protein, 9 aa, Homo sapiens
  misc_feature: Table A; Target 81600; HLA-C*07:06; SMC1B; ENSG00000077935; CTA
SVETLLNQK

SEQ ID NO: 81601 - protein, 10 aa, Homo sapiens
  misc_feature: Table A; Target 81601; HLA-A*68:01; SMC1B; ENSG00000077935; CTA
SVETLLNQKR

SEQ ID NO: 81602 - protein, 10 aa, Homo sapiens
  misc_feature: Table A; Target 81602; HLA-C*07:06; SMC1B; ENSG00000077935; CTA
SVETLLNQKR

SEQ ID NO: 81603 - protein, 9 aa, Homo sapiens
  misc_feature: Table A; Target 81603; HLA-A*02:04; SMC1B; ENSG00000077935; CTA
SVFGRLFDL

SEQ ID NO: 81604 - protein, 9 aa, Homo sapiens
  misc_feature: Table A; Target 81604; HLA-A*03:01; SMC1B; ENSG00000077935; CTA
SVYIAELEK

SEQ ID NO: 81605 - protein, 9 aa, Homo sapiens
  misc_feature: Table A; Target 81605; HLA-A*11:01; SMC1B; ENSG00000077935; CTA
SVYIAELEK

SEQ ID NO: 81606 - protein, 11 aa, Homo sapiens
  misc_feature: Table A; Target 81606; HLA-A*23:01; SMC1B; ENSG00000077935; CTA
SYIKEQTQDQF

SEQ ID NO: 81607 - protein, 11 aa, Homo sapiens
  misc_feature: Table A; Target 81607; HLA-A*24:02; SMC1B; ENSG00000077935; CTA
SYIKEQTQDQF

SEQ ID NO: 81608 - protein, 9 aa, Homo sapiens
  misc_feature: Table A; Target 81608; HLA-A*32:01; SMC1B; ENSG00000077935; CTA
TAAPNLRAL

SEQ ID NO: 81609 - protein, 9 aa, Homo sapiens
  misc_feature: Table A; Target 81609; HLA-B*07:02; SMC1B; ENSG00000077935; CTA
TAAPNLRAL

SEQ ID NO: 81610 - protein, 9 aa, Homo sapiens
  misc_feature: Table A; Target 81610; HLA-B*08:01; SMC1B; ENSG00000077935; CTA
TAAPNLRAL

SEQ ID NO: 81611 - protein, 9 aa, Homo sapiens
  misc_feature: Table A; Target 81611; HLA-B*35:03; SMC1B; ENSG00000077935; CTA
TAAPNLRAL

SEQ ID NO: 81612 - protein, 9 aa, Homo sapiens
  misc_feature: Table A; Target 81612; HLA-B*46:01; SMC1B; ENSG00000077935; CTA
TAAPNLRAL

SEQ ID NO: 81613 - protein, 9 aa, Homo sapiens
  misc_feature: Table A; Target 81613; HLA-B*58:01; SMC1B; ENSG00000077935; CTA
TAAPNLRAL

SEQ ID NO: 81614 - protein, 9 aa, Homo sapiens
  misc_feature: Table A; Target 81614; HLA-C*01:02; SMC1B; ENSG00000077935; CTA
TAAPNLRAL

SEQ ID NO: 81615 - protein, 9 aa, Homo sapiens
  misc_feature: Table A; Target 81615; HLA-C*02:02; SMC1B; ENSG00000077935; CTA
TAAPNLRAL

SEQ ID NO: 81616 - protein, 9 aa, Homo sapiens
  misc_feature: Table A; Target 81616; HLA-C*03:03; SMC1B; ENSG00000077935; CTA
TAAPNLRAL

SEQ ID NO: 81617 - protein, 9 aa, Homo sapiens
  misc_feature: Table A; Target 81617; HLA-C*03:04; SMC1B; ENSG00000077935; CTA
TAAPNLRAL

SEQ ID NO: 81618 - protein, 9 aa, Homo sapiens
  misc_feature: Table A; Target 81618; HLA-C*07:02; SMC1B; ENSG00000077935; CTA
TAAPNLRAL

SEQ ID NO: 81619 - protein, 9 aa, Homo sapiens
  misc_feature: Table A; Target 81619; HLA-C*07:06; SMC1B; ENSG00000077935; CTA
TAAPNLRAL

SEQ ID NO: 81620 - protein, 9 aa, Homo sapiens
  misc_feature: Table A; Target 81620; HLA-C*12:03; SMC1B; ENSG00000077935; CTA
TAAPNLRAL

SEQ ID NO: 81621 - protein, 9 aa, Homo sapiens
  misc_feature: Table A; Target 81621; HLA-C*16:01; SMC1B; ENSG00000077935; CTA
TAAPNLRAL

SEQ ID NO: 81622 - protein, 9 aa, Homo sapiens
  misc_feature: Table A; Target 81622; HLA-C*16:02; SMC1B; ENSG00000077935; CTA
TAAPNLRAL

SEQ ID NO: 81623 - protein, 9 aa, Homo sapiens
  misc_feature: Table A; Target 81623; HLA-A*68:01; SMC1B; ENSG00000077935; CTA
TAIVVASEK

SEQ ID NO: 81624 - protein, 9 aa, Homo sapiens
  misc_feature: Table A; Target 81624; HLA-C*07:06; SMC1B; ENSG00000077935; CTA
TAIVVASEK

SEQ ID NO: 81625 - protein, 8 aa, Homo sapiens
  misc_feature: Table A; Target 81625; HLA-B*37:01; SMC1B; ENSG00000077935; CTA
TDEERLAF

SEQ ID NO: 81626 - protein, 9 aa, Homo sapiens
  misc_feature: Table A; Target 81626; HLA-A*30:01; SMC1B; ENSG00000077935; CTA
TDLKQIQTL

SEQ ID NO: 81627 - protein, 9 aa, Homo sapiens
  misc_feature: Table A; Target 81627; HLA-B*37:01; SMC1B; ENSG00000077935; CTA
TDLKQIQTL

SEQ ID NO: 81628 - protein, 10 aa, Homo sapiens
  misc_feature: Table A; Target 81628; HLA-A*30:01; SMC1B; ENSG00000077935; CTA
TEAESTQATI

SEQ ID NO: 81629 - protein, 10 aa, Homo sapiens
  misc_feature: Table A; Target 81629; HLA-B*40:01; SMC1B; ENSG00000077935; CTA
TEAESTQATI

SEQ ID NO: 81630 - protein, 10 aa, Homo sapiens
  misc_feature: Table A; Target 81630; HLA-B*49:01; SMC1B; ENSG00000077935; CTA
TEAESTQATI

SEQ ID NO: 81631 - protein, 11 aa, Homo sapiens
  misc_feature: Table A; Target 81631; HLA-A*30:01; SMC1B; ENSG00000077935; CTA
TEKELKSVETL

SEQ ID NO: 81632 - protein, 11 aa, Homo sapiens
  misc_feature: Table A; Target 81632; HLA-B*40:01; SMC1B; ENSG00000077935; CTA
TEKELKSVETL

SEQ ID NO: 81633 - protein, 10 aa, Homo sapiens
  misc_feature: Table A; Target 81633; HLA-B*44:02; SMC1B; ENSG00000077935; CTA
TELADLDAAW

SEQ ID NO: 81634 - protein, 10 aa, Homo sapiens
  misc_feature: Table A; Target 81634; HLA-B*44:03; SMC1B; ENSG00000077935; CTA
TELADLDAAW

SEQ ID NO: 81635 - protein, 10 aa, Homo sapiens
  misc_feature: Table A; Target 81635; HLA-C*16:04; SMC1B; ENSG00000077935; CTA
TELADLDAAW

SEQ ID NO: 81636 - protein, 9 aa, Homo sapiens
  misc_feature: Table A; Target 81636; HLA-C*07:06; SMC1B; ENSG00000077935; CTA
TLIQGTQTR

SEQ ID NO: 81637 - protein, 11 aa, Homo sapiens
  misc_feature: Table A; Target 81637; HLA-A*03:02; SMC1B; ENSG00000077935; CTA
TLIQGTQTRLK

SEQ ID NO: 81638 - protein, 10 aa, Homo sapiens
  misc_feature: Table A; Target 81638; HLA-B*08:01; SMC1B; ENSG00000077935; CTA
TMEEARHIAL

SEQ ID NO: 81639 - protein, 9 aa, Homo sapiens
  misc_feature: Table A; Target 81639; HLA-A*02:04; SMC1B; ENSG00000077935; CTA
TMTQQLEKL

SEQ ID NO: 81640 - protein, 9 aa, Homo sapiens
  misc_feature: Table A; Target 81640; HLA-A*25:01; SMC1B; ENSG00000077935; CTA
TNIGKVSSY

SEQ ID NO: 81641 - protein, 9 aa, Homo sapiens
  misc_feature: Table A; Target 81641; HLA-A*26:01; SMC1B; ENSG00000077935; CTA
TNIGKVSSY

SEQ ID NO: 81642 - protein, 9 aa, Homo sapiens
  misc_feature: Table A; Target 81642; HLA-A*29:02; SMC1B; ENSG00000077935; CTA
TNIGKVSSY

SEQ ID NO: 81643 - protein, 9 aa, Homo sapiens
  misc_feature: Table A; Target 81643; HLA-A*30:02; SMC1B; ENSG00000077935; CTA
TNIGKVSSY

SEQ ID NO: 81644 - protein, 9 aa, Homo sapiens
  misc_feature: Table A; Target 81644; HLA-A*32:01; SMC1B; ENSG00000077935; CTA
TNIGKVSSY

SEQ ID NO: 81645 - protein, 9 aa, Homo sapiens
  misc_feature: Table A; Target 81645; HLA-B*15:01; SMC1B; ENSG00000077935; CTA
TNIGKVSSY

SEQ ID NO: 81646 - protein, 9 aa, Homo sapiens
  misc_feature: Table A; Target 81646; HLA-B*15:03; SMC1B; ENSG00000077935; CTA
TNIGKVSSY

SEQ ID NO: 81647 - protein, 9 aa, Homo sapiens
  misc_feature: Table A; Target 81647; HLA-B*18:01; SMC1B; ENSG00000077935; CTA
TNIGKVSSY

SEQ ID NO: 81648 - protein, 9 aa, Homo sapiens
  misc_feature: Table A; Target 81648; HLA-B*35:01; SMC1B; ENSG00000077935; CTA
TNIGKVSSY

SEQ ID NO: 81649 - protein, 9 aa, Homo sapiens
  misc_feature: Table A; Target 81649; HLA-B*44:02; SMC1B; ENSG00000077935; CTA
TNIGKVSSY

SEQ ID NO: 81650 - protein, 9 aa, Homo sapiens
  misc_feature: Table A; Target 81650; HLA-B*46:01; SMC1B; ENSG00000077935; CTA
TNIGKVSSY

SEQ ID NO: 81651 - protein, 9 aa, Homo sapiens
  misc_feature: Table A; Target 81651; HLA-C*02:02; SMC1B; ENSG00000077935; CTA
TNIGKVSSY

SEQ ID NO: 81652 - protein, 9 aa, Homo sapiens
  misc_feature: Table A; Target 81652; HLA-C*07:04; SMC1B; ENSG00000077935; CTA
TNIGKVSSY

SEQ ID NO: 81653 - protein, 9 aa, Homo sapiens
  misc_feature: Table A; Target 81653; HLA-C*14:02; SMC1B; ENSG00000077935; CTA
TNIGKVSSY

SEQ ID NO: 81654 - protein, 9 aa, Homo sapiens
  misc_feature: Table A; Target 81654; HLA-C*16:01; SMC1B; ENSG00000077935; CTA
TNIGKVSSY

SEQ ID NO: 81655 - protein, 9 aa, Homo sapiens
  misc_feature: Table A; Target 81655; HLA-C*16:02; SMC1B; ENSG00000077935; CTA
TNIGKVSSY

SEQ ID NO: 81656 - protein, 8 aa, Homo sapiens
  misc_feature: Table A; Target 81656; HLA-B*15:01; SMC1B; ENSG00000077935; CTA
TQATIDIY

SEQ ID NO: 81657 - protein, 8 aa, Homo sapiens
  misc_feature: Table A; Target 81657; HLA-B*15:03; SMC1B; ENSG00000077935; CTA
TQATIDIY

SEQ ID NO: 81658 - protein, 10 aa, Homo sapiens
  misc_feature: Table A; Target 81658; HLA-B*27:02; SMC1B; ENSG00000077935; CTA
TQATIDIYEK

SEQ ID NO: 81659 - protein, 9 aa, Homo sapiens
  misc_feature: Table A; Target 81659; HLA-B*13:02; SMC1B; ENSG00000077935; CTA
TQCFEHVSI

SEQ ID NO: 81660 - protein, 9 aa, Homo sapiens
  misc_feature: Table A; Target 81660; HLA-B*38:01; SMC1B; ENSG00000077935; CTA
TQCFEHVSI

SEQ ID NO: 81661 - protein, 8 aa, Homo sapiens
  misc_feature: Table A; Target 81661; HLA-B*13:02; SMC1B; ENSG00000077935; CTA
TQDQFQMI

SEQ ID NO: 81662 - protein, 8 aa, Homo sapiens
  misc_feature: Table A; Target 81662; HLA-B*38:01; SMC1B; ENSG00000077935; CTA
TQDQFQMI

SEQ ID NO: 81663 - protein, 10 aa, Homo sapiens
  misc_feature: Table A; Target 81663; HLA-B*38:01; SMC1B; ENSG00000077935; CTA
TQDQFQMIVI

SEQ ID NO: 81664 - protein, 9 aa, Homo sapiens
  misc_feature: Table A; Target 81664; HLA-A*02:03; SMC1B; ENSG00000077935; CTA
TQFPQLKKV

SEQ ID NO: 81665 - protein, 9 aa, Homo sapiens
  misc_feature: Table A; Target 81665; HLA-B*13:02; SMC1B; ENSG00000077935; CTA
TQFPQLKKV

SEQ ID NO: 81666 - protein, 9 aa, Homo sapiens
  misc_feature: Table A; Target 81666; HLA-C*02:02; SMC1B; ENSG00000077935; CTA
TQFPQLKKV

SEQ ID NO: 81667 - protein, 9 aa, Homo sapiens
  misc_feature: Table A; Target 81667; HLA-B*13:02; SMC1B; ENSG00000077935; CTA
TQNSSAEKV

SEQ ID NO: 81668 - protein, 9 aa, Homo sapiens
  misc_feature: Table A; Target 81668; HLA-B*44:02; SMC1B; ENSG00000077935; CTA
TQQLEKLQW

SEQ ID NO: 81669 - protein, 9 aa, Homo sapiens
  misc_feature: Table A; Target 81669; HLA-A*29:02; SMC1B; ENSG00000077935; CTA
TRLNVQLEY

SEQ ID NO: 81670 - protein, 9 aa, Homo sapiens
  misc_feature: Table A; Target 81670; HLA-B*27:02; SMC1B; ENSG00000077935; CTA
TRLNVQLEY

SEQ ID NO: 81671 - protein, 9 aa, Homo sapiens
  misc_feature: Table A; Target 81671; HLA-B*27:05; SMC1B; ENSG00000077935; CTA
TRLNVQLEY

SEQ ID NO: 81672 - protein, 9 aa, Homo sapiens
  misc_feature: Table A; Target 81672; HLA-C*02:02; SMC1B; ENSG00000077935; CTA
TRLNVQLEY

SEQ ID NO: 81673 - protein, 9 aa, Homo sapiens
  misc_feature: Table A; Target 81673; HLA-C*16:04; SMC1B; ENSG00000077935; CTA
TRLNVQLEY

SEQ ID NO: 81674 - protein, 9 aa, Homo sapiens
  misc_feature: Table A; Target 81674; HLA-B*27:05; SMC1B; ENSG00000077935; CTA
TRQLQQTEK

SEQ ID NO: 81675 - protein, 9 aa, Homo sapiens
  misc_feature: Table A; Target 81675; HLA-A*01:01; SMC1B; ENSG00000077935; CTA
TSGELIGEY

SEQ ID NO: 81676 - protein, 9 aa, Homo sapiens
  misc_feature: Table A; Target 81676; HLA-A*26:01; SMC1B; ENSG00000077935; CTA
TSGELIGEY

SEQ ID NO: 81677 - protein, 9 aa, Homo sapiens
  misc_feature: Table A; Target 81677; HLA-A*30:02; SMC1B; ENSG00000077935; CTA
TSGELIGEY

SEQ ID NO: 81678 - protein, 9 aa, Homo sapiens
  misc_feature: Table A; Target 81678; HLA-B*18:01; SMC1B; ENSG00000077935; CTA
TSGELIGEY

SEQ ID NO: 81679 - protein, 9 aa, Homo sapiens
  misc_feature: Table A; Target 81679; HLA-B*35:01; SMC1B; ENSG00000077935; CTA
TSGELIGEY

SEQ ID NO: 81680 - protein, 11 aa, Homo sapiens
  misc_feature: Table A; Target 81680; HLA-A*03:02; SMC1B; ENSG00000077935; CTA
TVALDGTLFLK

SEQ ID NO: 81681 - protein, 11 aa, Homo sapiens
  misc_feature: Table A; Target 81681; HLA-A*11:01; SMC1B; ENSG00000077935; CTA
TVALDGTLFLK

SEQ ID NO: 81682 - protein, 8 aa, Homo sapiens
  misc_feature: Table A; Target 81682; HLA-A*03:02; SMC1B; ENSG00000077935; CTA
TVESISVK

SEQ ID NO: 81683 - protein, 9 aa, Homo sapiens
  misc_feature: Table A; Target 81683; HLA-A*03:01; SMC1B; ENSG00000077935; CTA
TVESISVKK

SEQ ID NO: 81684 - protein, 9 aa, Homo sapiens
  misc_feature: Table A; Target 81684; HLA-A*03:02; SMC1B; ENSG00000077935; CTA
TVESISVKK

SEQ ID NO: 81685 - protein, 9 aa, Homo sapiens
  misc_feature: Table A; Target 81685; HLA-A*11:01; SMC1B; ENSG00000077935; CTA
TVESISVKK

SEQ ID NO: 81686 - protein, 9 aa, Homo sapiens
  misc_feature: Table A; Target 81686; HLA-A*68:01; SMC1B; ENSG00000077935; CTA
TVESISVKK

SEQ ID NO: 81687 - protein, 9 aa, Homo sapiens
  misc_feature: Table A; Target 81687; HLA-C*07:06; SMC1B; ENSG00000077935; CTA
TVESISVKK

SEQ ID NO: 81688 - protein, 11 aa, Homo sapiens
  misc_feature: Table A; Target 81688; HLA-A*03:02; SMC1B; ENSG00000077935; CTA
TVESISVKKPK

SEQ ID NO: 81689 - protein, 8 aa, Homo sapiens
  misc_feature: Table A; Target 81689; HLA-A*03:02; SMC1B; ENSG00000077935; CTA
TVNELMAK

SEQ ID NO: 81690 - protein, 8 aa, Homo sapiens
  misc_feature: Table A; Target 81690; HLA-A*11:01; SMC1B; ENSG00000077935; CTA
TVNELMAK

SEQ ID NO: 81691 - protein, 8 aa, Homo sapiens
  misc_feature: Table A; Target 81691; HLA-A*23:01; SMC1B; ENSG00000077935; CTA
VALDGTLF

SEQ ID NO: 81692 - protein, 9 aa, Homo sapiens
  misc_feature: Table A; Target 81692; HLA-A*23:01; SMC1B; ENSG00000077935; CTA
VALDGTLFL

SEQ ID NO: 81693 - protein, 9 aa, Homo sapiens
  misc_feature: Table A; Target 81693; HLA-C*03:03; SMC1B; ENSG00000077935; CTA
VALDGTLFL

SEQ ID NO: 81694 - protein, 9 aa, Homo sapiens
  misc_feature: Table A; Target 81694; HLA-C*03:04; SMC1B; ENSG00000077935; CTA
VALDGTLFL

SEQ ID NO: 81695 - protein, 10 aa, Homo sapiens
  misc_feature: Table A; Target 81695; HLA-A*03:01; SMC1B; ENSG00000077935; CTA
VALDGTLFLK

SEQ ID NO: 81696 - protein, 10 aa, Homo sapiens
  misc_feature: Table A; Target 81696; HLA-A*03:02; SMC1B; ENSG00000077935; CTA
VALDGTLFLK

SEQ ID NO: 81697 - protein, 10 aa, Homo sapiens
  misc_feature: Table A; Target 81697; HLA-A*11:01; SMC1B; ENSG00000077935; CTA
VALDGTLFLK

SEQ ID NO: 81698 - protein, 10 aa, Homo sapiens
  misc_feature: Table A; Target 81698; HLA-B*27:02; SMC1B; ENSG00000077935; CTA
VALDGTLFLK

SEQ ID NO: 81699 - protein, 9 aa, Homo sapiens
  misc_feature: Table A; Target 81699; HLA-B*35:03; SMC1B; ENSG00000077935; CTA
VASQEDILL

SEQ ID NO: 81700 - protein, 9 aa, Homo sapiens
  misc_feature: Table A; Target 81700; HLA-B*38:01; SMC1B; ENSG00000077935; CTA
VASQEDILL

SEQ ID NO: 81701 - protein, 10 aa, Homo sapiens
  misc_feature: Table A; Target 81701; HLA-A*03:02; SMC1B; ENSG00000077935; CTA
VASQEDILLK

SEQ ID NO: 81702 - protein, 10 aa, Homo sapiens
  misc_feature: Table A; Target 81702; HLA-A*11:01; SMC1B; ENSG00000077935; CTA
VASQEDILLK

SEQ ID NO: 81703 - protein, 10 aa, Homo sapiens
  misc_feature: Table A; Target 81703; HLA-B*27:02; SMC1B; ENSG00000077935; CTA
VASQEDILLK

SEQ ID NO: 81704 - protein, 8 aa, Homo sapiens
  misc_feature: Table A; Target 81704; HLA-C*03:04; SMC1B; ENSG00000077935; CTA
VATMTQQL

SEQ ID NO: 81705 - protein, 8 aa, Homo sapiens
  misc_feature: Table A; Target 81705; HLA-C*16:01; SMC1B; ENSG00000077935; CTA
VATMTQQL

SEQ ID NO: 81706 - protein, 8 aa, Homo sapiens
  misc_feature: Table A; Target 81706; HLA-B*37:01; SMC1B; ENSG00000077935; CTA
VDREVGKL

SEQ ID NO: 81707 - protein, 9 aa, Homo sapiens
  misc_feature: Table A; Target 81707; HLA-A*02:07; SMC1B; ENSG00000077935; CTA
VEDDIFQHF

SEQ ID NO: 81708 - protein, 9 aa, Homo sapiens
  misc_feature: Table A; Target 81708; HLA-A*23:01; SMC1B; ENSG00000077935; CTA
VEDDIFQHF

SEQ ID NO: 81709 - protein, 9 aa, Homo sapiens
  misc_feature: Table A; Target 81709; HLA-A*24:02; SMC1B; ENSG00000077935; CTA
VEDDIFQHF

SEQ ID NO: 81710 - protein, 9 aa, Homo sapiens
  misc_feature: Table A; Target 81710; HLA-A*30:01; SMC1B; ENSG00000077935; CTA
VEDDIFQHF

SEQ ID NO: 81711 - protein, 9 aa, Homo sapiens
  misc_feature: Table A; Target 81711; HLA-B*18:01; SMC1B; ENSG00000077935; CTA
VEDDIFQHF

SEQ ID NO: 81712 - protein, 9 aa, Homo sapiens
  misc_feature: Table A; Target 81712; HLA-B*37:01; SMC1B; ENSG00000077935; CTA
VEDDIFQHF

SEQ ID NO: 81713 - protein, 9 aa, Homo sapiens
  misc_feature: Table A; Target 81713; HLA-B*38:01; SMC1B; ENSG00000077935; CTA
VEDDIFQHF

SEQ ID NO: 81714 - protein, 9 aa, Homo sapiens
  misc_feature: Table A; Target 81714; HLA-B*40:01; SMC1B; ENSG00000077935; CTA
VEDDIFQHF

SEQ ID NO: 81715 - protein, 9 aa, Homo sapiens
  misc_feature: Table A; Target 81715; HLA-B*44:02; SMC1B; ENSG00000077935; CTA
VEDDIFQHF

SEQ ID NO: 81716 - protein, 9 aa, Homo sapiens
  misc_feature: Table A; Target 81716; HLA-B*44:03; SMC1B; ENSG00000077935; CTA
VEDDIFQHF

SEQ ID NO: 81717 - protein, 9 aa, Homo sapiens
  misc_feature: Table A; Target 81717; HLA-B*49:01; SMC1B; ENSG00000077935; CTA
VEDDIFQHF

SEQ ID NO: 81718 - protein, 9 aa, Homo sapiens
  misc_feature: Table A; Target 81718; HLA-C*02:02; SMC1B; ENSG00000077935; CTA
VEDDIFQHF

SEQ ID NO: 81719 - protein, 9 aa, Homo sapiens
  misc_feature: Table A; Target 81719; HLA-C*16:04; SMC1B; ENSG00000077935; CTA
VEDDIFQHF

SEQ ID NO: 81720 - protein, 10 aa, Homo sapiens
  misc_feature: Table A; Target 81720; HLA-B*40:01; SMC1B; ENSG00000077935; CTA
VEESGEEKTF

SEQ ID NO: 81721 - protein, 10 aa, Homo sapiens
  misc_feature: Table A; Target 81721; HLA-B*44:02; SMC1B; ENSG00000077935; CTA
VEESGEEKTF

SEQ ID NO: 81722 - protein, 10 aa, Homo sapiens
  misc_feature: Table A; Target 81722; HLA-B*44:03; SMC1B; ENSG00000077935; CTA
VEESGEEKTF

SEQ ID NO: 81723 - protein, 10 aa, Homo sapiens
  misc_feature: Table A; Target 81723; HLA-C*16:04; SMC1B; ENSG00000077935; CTA
VEESGEEKTF

SEQ ID NO: 81724 - protein, 9 aa, Homo sapiens
  misc_feature: Table A; Target 81724; HLA-A*23:01; SMC1B; ENSG00000077935; CTA
VFQGTVESI

SEQ ID NO: 81725 - protein, 9 aa, Homo sapiens
  misc_feature: Table A; Target 81725; HLA-A*24:02; SMC1B; ENSG00000077935; CTA
VFQGTVESI

SEQ ID NO: 81726 - protein, 9 aa, Homo sapiens
  misc_feature: Table A; Target 81726; HLA-C*01:02; SMC1B; ENSG00000077935; CTA
VFQGTVESI

SEQ ID NO: 81727 - protein, 9 aa, Homo sapiens
  misc_feature: Table A; Target 81727; HLA-C*04:01; SMC1B; ENSG00000077935; CTA
VFQGTVESI

SEQ ID NO: 81728 - protein, 9 aa, Homo sapiens
  misc_feature: Table A; Target 81728; HLA-C*14:02; SMC1B; ENSG00000077935; CTA
VFQGTVESI

SEQ ID NO: 81729 - protein, 9 aa, Homo sapiens
  misc_feature: Table A; Target 81729; HLA-A*01:01; SMC1B; ENSG00000077935; CTA
VIDVIKTQF

SEQ ID NO: 81730 - protein, 9 aa, Homo sapiens
  misc_feature: Table A; Target 81730; HLA-A*02:07; SMC1B; ENSG00000077935; CTA
VIDVIKTQF

SEQ ID NO: 81731 - protein, 9 aa, Homo sapiens
  misc_feature: Table A; Target 81731; HLA-A*23:01; SMC1B; ENSG00000077935; CTA
VIDVIKTQF

SEQ ID NO: 81732 - protein, 9 aa, Homo sapiens
  misc_feature: Table A; Target 81732; HLA-A*32:01; SMC1B; ENSG00000077935; CTA
VIDVIKTQF

SEQ ID NO: 81733 - protein, 9 aa, Homo sapiens
  misc_feature: Table A; Target 81733; HLA-C*04:01; SMC1B; ENSG00000077935; CTA
VIDVIKTQF

SEQ ID NO: 81734 - protein, 9 aa, Homo sapiens
  misc_feature: Table A; Target 81734; HLA-C*05:01; SMC1B; ENSG00000077935; CTA
VIDVIKTQF

SEQ ID NO: 81735 - protein, 9 aa, Homo sapiens
  misc_feature: Table A; Target 81735; HLA-A*23:01; SMC1B; ENSG00000077935; CTA
VIKTQFPQL

SEQ ID NO: 81736 - protein, 9 aa, Homo sapiens
  misc_feature: Table A; Target 81736; HLA-A*24:02; SMC1B; ENSG00000077935; CTA
VIKTQFPQL

SEQ ID NO: 81737 - protein, 9 aa, Homo sapiens
  misc_feature: Table A; Target 81737; HLA-C*01:02; SMC1B; ENSG00000077935; CTA
VISGGSSDL

SEQ ID NO: 81738 - protein, 10 aa, Homo sapiens
  misc_feature: Table A; Target 81738; HLA-A*03:02; SMC1B; ENSG00000077935; CTA
VISGGSSDLK

SEQ ID NO: 81739 - protein, 10 aa, Homo sapiens
  misc_feature: Table A; Target 81739; HLA-A*11:01; SMC1B; ENSG00000077935; CTA
VISGGSSDLK

SEQ ID NO: 81740 - protein, 11 aa, Homo sapiens
  misc_feature: Table A; Target 81740; HLA-A*01:01; SMC1B; ENSG00000077935; CTA
VISGGSSDLKY

SEQ ID NO: 81741 - protein, 11 aa, Homo sapiens
  misc_feature: Table A; Target 81741; HLA-A*29:02; SMC1B; ENSG00000077935; CTA
VISGGSSDLKY

SEQ ID NO: 81742 - protein, 11 aa, Homo sapiens
  misc_feature: Table A; Target 81742; HLA-A*30:02; SMC1B; ENSG00000077935; CTA
VISGGSSDLKY

SEQ ID NO: 81743 - protein, 11 aa, Homo sapiens
  misc_feature: Table A; Target 81743; HLA-A*32:01; SMC1B; ENSG00000077935; CTA
VISGGSSDLKY

SEQ ID NO: 81744 - protein, 11 aa, Homo sapiens
  misc_feature: Table A; Target 81744; HLA-B*15:01; SMC1B; ENSG00000077935; CTA
VISGGSSDLKY

SEQ ID NO: 81745 - protein, 11 aa, Homo sapiens
  misc_feature: Table A; Target 81745; HLA-B*58:01; SMC1B; ENSG00000077935; CTA
VISGGSSDLKY

SEQ ID NO: 81746 - protein, 8 aa, Homo sapiens
  misc_feature: Table A; Target 81746; HLA-B*37:01; SMC1B; ENSG00000077935; CTA
VISLKEEF

SEQ ID NO: 81747 - protein, 9 aa, Homo sapiens
  misc_feature: Table A; Target 81747; HLA-A*01:01; SMC1B; ENSG00000077935; CTA
VISLKEEFY

SEQ ID NO: 81748 - protein, 9 aa, Homo sapiens
  misc_feature: Table A; Target 81748; HLA-B*15:03; SMC1B; ENSG00000077935; CTA
VKAQNCLVF

SEQ ID NO: 81749 - protein, 9 aa, Homo sapiens
  misc_feature: Table A; Target 81749; HLA-A*02:01; SMC1B; ENSG00000077935; CTA
VLDEVDAAL

SEQ ID NO: 81750 - protein, 9 aa, Homo sapiens
  misc_feature: Table A; Target 81750; HLA-A*02:07; SMC1B; ENSG00000077935; CTA
VLDEVDAAL

SEQ ID NO: 81751 - protein, 9 aa, Homo sapiens
  misc_feature: Table A; Target 81751; HLA-B*35:03; SMC1B; ENSG00000077935; CTA
VLDEVDAAL

SEQ ID NO: 81752 - protein, 9 aa, Homo sapiens
  misc_feature: Table A; Target 81752; HLA-B*55:01; SMC1B; ENSG00000077935; CTA
VLDEVDAAL

SEQ ID NO: 81753 - protein, 9 aa, Homo sapiens
  misc_feature: Table A; Target 81753; HLA-C*05:01; SMC1B; ENSG00000077935; CTA
VLDEVDAAL

SEQ ID NO: 81754 - protein, 9 aa, Homo sapiens
  misc_feature: Table A; Target 81754; HLA-A*01:01; SMC1B; ENSG00000077935; CTA
VLTLDLSQY

SEQ ID NO: 81755 - protein, 9 aa, Homo sapiens
  misc_feature: Table A; Target 81755; HLA-B*15:01; SMC1B; ENSG00000077935; CTA
VLTLDLSQY

SEQ ID NO: 81756 - protein, 9 aa, Homo sapiens
  misc_feature: Table A; Target 81756; HLA-A*02:07; SMC1B; ENSG00000077935; CTA
VMDALSFVM

SEQ ID NO: 81757 - protein, 9 aa, Homo sapiens
  misc_feature: Table A; Target 81757; HLA-A*02:01; SMC1B; ENSG00000077935; CTA
VMGEKIANL

SEQ ID NO: 81758 - protein, 9 aa, Homo sapiens
  misc_feature: Table A; Target 81758; HLA-A*02:03; SMC1B; ENSG00000077935; CTA
VMGEKIANL

SEQ ID NO: 81759 - protein, 9 aa, Homo sapiens
  misc_feature: Table A; Target 81759; HLA-A*02:04; SMC1B; ENSG00000077935; CTA
VMGEKIANL

SEQ ID NO: 81760 - protein, 9 aa, Homo sapiens
  misc_feature: Table A; Target 81760; HLA-A*02:07; SMC1B; ENSG00000077935; CTA
VMGEKIANL

SEQ ID NO: 81761 - protein, 9 aa, Homo sapiens
  misc_feature: Table A; Target 81761; HLA-B*08:01; SMC1B; ENSG00000077935; CTA
VMGEKIANL

SEQ ID NO: 81762 - protein, 9 aa, Homo sapiens
  misc_feature: Table A; Target 81762; HLA-B*55:01; SMC1B; ENSG00000077935; CTA
VMGEKIANL

SEQ ID NO: 81763 - protein, 9 aa, Homo sapiens
  misc_feature: Table A; Target 81763; HLA-A*33:01; SMC1B; ENSG00000077935; CTA
VNRDLSVKR

SEQ ID NO: 81764 - protein, 9 aa, Homo sapiens
  misc_feature: Table A; Target 81764; HLA-A*33:03; SMC1B; ENSG00000077935; CTA
VNRDLSVKR

SEQ ID NO: 81765 - protein, 9 aa, Homo sapiens
  misc_feature: Table A; Target 81765; HLA-A*02:07; SMC1B; ENSG00000077935; CTA
VQDIEIILL

SEQ ID NO: 81766 - protein, 9 aa, Homo sapiens
  misc_feature: Table A; Target 81766; HLA-B*27:05; SMC1B; ENSG00000077935; CTA
VQDIEIILL

SEQ ID NO: 81767 - protein, 9 aa, Homo sapiens
  misc_feature: Table A; Target 81767; HLA-B*38:01; SMC1B; ENSG00000077935; CTA
VQDIEIILL

SEQ ID NO: 81768 - protein, 9 aa, Homo sapiens
  misc_feature: Table A; Target 81768; HLA-C*05:01; SMC1B; ENSG00000077935; CTA
VQDIEIILL

SEQ ID NO: 81769 - protein, 10 aa, Homo sapiens
  misc_feature: Table A; Target 81769; HLA-A*03:02; SMC1B; ENSG00000077935; CTA
VSIQTSLEQK

SEQ ID NO: 81770 - protein, 10 aa, Homo sapiens
  misc_feature: Table A; Target 81770; HLA-A*11:01; SMC1B; ENSG00000077935; CTA
VSIQTSLEQK

SEQ ID NO: 81771 - protein, 10 aa, Homo sapiens
  misc_feature: Table A; Target 81771; HLA-B*27:02; SMC1B; ENSG00000077935; CTA
VSIQTSLEQK

SEQ ID NO: 81772 - protein, 9 aa, Homo sapiens
  misc_feature: Table A; Target 81772; HLA-A*01:01; SMC1B; ENSG00000077935; CTA
VSISIDQIY

SEQ ID NO: 81773 - protein, 9 aa, Homo sapiens
  misc_feature: Table A; Target 81773; HLA-A*29:02; SMC1B; ENSG00000077935; CTA
VSISIDQIY

SEQ ID NO: 81774 - protein, 9 aa, Homo sapiens
  misc_feature: Table A; Target 81774; HLA-A*30:02; SMC1B; ENSG00000077935; CTA
VSISIDQIY

SEQ ID NO: 81775 - protein, 9 aa, Homo sapiens
  misc_feature: Table A; Target 81775; HLA-B*15:01; SMC1B; ENSG00000077935; CTA
VSISIDQIY

SEQ ID NO: 81776 - protein, 9 aa, Homo sapiens
  misc_feature: Table A; Target 81776; HLA-B*46:01; SMC1B; ENSG00000077935; CTA
VSISIDQIY

SEQ ID NO: 81777 - protein, 9 aa, Homo sapiens
  misc_feature: Table A; Target 81777; HLA-B*57:01; SMC1B; ENSG00000077935; CTA
VSISIDQIY

SEQ ID NO: 81778 - protein, 9 aa, Homo sapiens
  misc_feature: Table A; Target 81778; HLA-B*58:01; SMC1B; ENSG00000077935; CTA
VSISIDQIY

SEQ ID NO: 81779 - protein, 9 aa, Homo sapiens
  misc_feature: Table A; Target 81779; HLA-C*02:02; SMC1B; ENSG00000077935; CTA
VSISIDQIY

SEQ ID NO: 81780 - protein, 10 aa, Homo sapiens
  misc_feature: Table A; Target 81780; HLA-A*03:02; SMC1B; ENSG00000077935; CTA
VSISIDQIYK

SEQ ID NO: 81781 - protein, 10 aa, Homo sapiens
  misc_feature: Table A; Target 81781; HLA-A*11:01; SMC1B; ENSG00000077935; CTA
VSISIDQIYK

SEQ ID NO: 81782 - protein, 10 aa, Homo sapiens
  misc_feature: Table A; Target 81782; HLA-B*27:02; SMC1B; ENSG00000077935; CTA
VSISIDQIYK

SEQ ID NO: 81783 - protein, 11 aa, Homo sapiens
  misc_feature: Table A; Target 81783; HLA-A*11:01; SMC1B; ENSG00000077935; CTA
VSISIDQIYKK

SEQ ID NO: 81784 - protein, 9 aa, Homo sapiens
  misc_feature: Table A; Target 81784; HLA-A*03:02; SMC1B; ENSG00000077935; CTA
VTQNSSAEK

SEQ ID NO: 81785 - protein, 9 aa, Homo sapiens
  misc_feature: Table A; Target 81785; HLA-A*11:01; SMC1B; ENSG00000077935; CTA
VTQNSSAEK

SEQ ID NO: 81786 - protein, 9 aa, Homo sapiens
  misc_feature: Table A; Target 81786; HLA-A*03:01; SMC1B; ENSG00000077935; CTA
VVASEKVAK

SEQ ID NO: 81787 - protein, 9 aa, Homo sapiens
  misc_feature: Table A; Target 81787; HLA-A*03:02; SMC1B; ENSG00000077935; CTA
VVASEKVAK

SEQ ID NO: 81788 - protein, 9 aa, Homo sapiens
  misc_feature: Table A; Target 81788; HLA-A*11:01; SMC1B; ENSG00000077935; CTA
VVASEKVAK

SEQ ID NO: 81789 - protein, 11 aa, Homo sapiens
  misc_feature: Table A; Target 81789; HLA-A*03:01; SMC1B; ENSG00000077935; CTA
VVSIQTSLEQK

SEQ ID NO: 81790 - protein, 11 aa, Homo sapiens
  misc_feature: Table A; Target 81790; HLA-A*03:02; SMC1B; ENSG00000077935; CTA
VVSIQTSLEQK

SEQ ID NO: 81791 - protein, 11 aa, Homo sapiens
  misc_feature: Table A; Target 81791; HLA-A*11:01; SMC1B; ENSG00000077935; CTA
VVSIQTSLEQK

SEQ ID NO: 81792 - protein, 11 aa, Homo sapiens
  misc_feature: Table A; Target 81792; HLA-B*27:02; SMC1B; ENSG00000077935; CTA
VVSIQTSLEQK

SEQ ID NO: 81793 - protein, 9 aa, Homo sapiens
  misc_feature: Table A; Target 81793; HLA-C*14:02; SMC1B; ENSG00000077935; CTA
VYIAELEKI

SEQ ID NO: 81794 - protein, 8 aa, Homo sapiens
  misc_feature: Table A; Target 81794; HLA-B*37:01; SMC1B; ENSG00000077935; CTA
YDLFTQCF

SEQ ID NO: 81795 - protein, 9 aa, Homo sapiens
  misc_feature: Table A; Target 81795; HLA-B*49:01; SMC1B; ENSG00000077935; CTA
YEKEEAFEI

SEQ ID NO: 81796 - protein, 10 aa, Homo sapiens
  misc_feature: Table A; Target 81796; HLA-B*15:01; SMC1B; ENSG00000077935; CTA
YIKEQTQDQF

SEQ ID NO: 81797 - protein, 10 aa, Homo sapiens
  misc_feature: Table A; Target 81797; HLA-B*46:01; SMC1B; ENSG00000077935; CTA
YIKEQTQDQF

SEQ ID NO: 81798 - protein, 9 aa, Homo sapiens
  misc_feature: Table A; Target 81798; HLA-A*01:01; SMC1B; ENSG00000077935; CTA
YLDIKPINE

SEQ ID NO: 81799 - protein, 11 aa, Homo sapiens
  misc_feature: Table A; Target 81799; HLA-A*02:07; SMC1B; ENSG00000077935; CTA
YLDIKPINERL

SEQ ID NO: 81800 - protein, 9 aa, Homo sapiens
  misc_feature: Table A; Target 81800; HLA-A*02:07; SMC1B; ENSG00000077935; CTA
YPDSVFGRL

SEQ ID NO: 81801 - protein, 9 aa, Homo sapiens
  misc_feature: Table A; Target 81801; HLA-B*07:02; SMC1B; ENSG00000077935; CTA
YPDSVFGRL

SEQ ID NO: 81802 - protein, 9 aa, Homo sapiens
  misc_feature: Table A; Target 81802; HLA-B*35:01; SMC1B; ENSG00000077935; CTA
YPDSVFGRL

SEQ ID NO: 81803 - protein, 9 aa, Homo sapiens
  misc_feature: Table A; Target 81803; HLA-B*35:03; SMC1B; ENSG00000077935; CTA
YPDSVFGRL

SEQ ID NO: 81804 - protein, 9 aa, Homo sapiens
  misc_feature: Table A; Target 81804; HLA-C*05:01; SMC1B; ENSG00000077935; CTA
YPDSVFGRL

SEQ ID NO: 81805 - protein, 10 aa, Homo sapiens
  misc_feature: Table A; Target 81805; HLA-B*35:01; SMC1B; ENSG00000077935; CTA
YPDSVFGRLF

SEQ ID NO: 81806 - protein, 11 aa, Homo sapiens
  misc_feature: Table A; Target 81806; HLA-A*01:01; SMC1B; ENSG00000077935; CTA
YPDTEGQESSK

SEQ ID NO: 81807 - protein, 11 aa, Homo sapiens
  misc_feature: Table A; Target 81807; HLA-B*27:02; SMC1B; ENSG00000077935; CTA
YPDTEGQESSK

SEQ ID NO: 81808 - protein, 11 aa, Homo sapiens
  misc_feature: Table A; Target 81808; HLA-C*05:01; SMC1B; ENSG00000077935; CTA
YPDTEGQESSK

SEQ ID NO: 81809 - protein, 9 aa, Homo sapiens
  misc_feature: Table A; Target 81809; HLA-B*35:01; SMC1B; ENSG00000077935; CTA
YPEYDDCMF

SEQ ID NO: 81810 - protein, 9 aa, Homo sapiens
  misc_feature: Table A; Target 81810; HLA-B*35:03; SMC1B; ENSG00000077935; CTA
YPEYDDCMF

SEQ ID NO: 81811 - protein, 9 aa, Homo sapiens
  misc_feature: Table A; Target 81811; HLA-B*55:01; SMC1B; ENSG00000077935; CTA
YPEYDDCMF

SEQ ID NO: 81812 - protein, 11 aa, Homo sapiens
  misc_feature: Table A; Target 81812; HLA-B*27:05; SMC1B; ENSG00000077935; CTA
YQEQSQLQSEL

SEQ ID NO: 81813 - protein, 11 aa, Homo sapiens
  misc_feature: Table A; Target 81813; HLA-B*38:01; SMC1B; ENSG00000077935; CTA
YQEQSQLQSEL

SEQ ID NO: 81814 - protein, 11 aa, Homo sapiens
  misc_feature: Table A; Target 81814; HLA-B*39:01; SMC1B; ENSG00000077935; CTA
YQEQSQLQSEL

SEQ ID NO: 81815 - protein, 8 aa, Homo sapiens
  misc_feature: Table A; Target 81815; HLA-A*02:01; SMC1B; ENSG00000077935; CTA
YQLAVTKV

SEQ ID NO: 81816 - protein, 8 aa, Homo sapiens
  misc_feature: Table A; Target 81816; HLA-B*13:02; SMC1B; ENSG00000077935; CTA
YQLAVTKV

SEQ ID NO: 81817 - protein, 8 aa, Homo sapiens
  misc_feature: Table A; Target 81817; HLA-B*49:01; SMC1B; ENSG00000077935; CTA
YQLAVTKV

SEQ ID NO: 81818 - protein, 9 aa, Homo sapiens
  misc_feature: Table A; Target 81818; HLA-A*23:01; SMC1B; ENSG00000077935; CTA
YQLAVTKVF

SEQ ID NO: 81819 - protein, 9 aa, Homo sapiens
  misc_feature: Table A; Target 81819; HLA-B*15:03; SMC1B; ENSG00000077935; CTA
YQLAVTKVF

SEQ ID NO: 81820 - protein, 9 aa, Homo sapiens
  misc_feature: Table A; Target 81820; HLA-B*44:03; SMC1B; ENSG00000077935; CTA
YQLAVTKVF

SEQ ID NO: 81821 - protein, 8 aa, Homo sapiens
  misc_feature: Table A; Target 81821; HLA-B*39:01; SMC1B; ENSG00000077935; CTA
YQSLLEEL

SEQ ID NO: 81822 - protein, 8 aa, Homo sapiens
  misc_feature: Table A; Target 81822; HLA-C*03:04; SMC1B; ENSG00000077935; CTA
YSQNELEM

SEQ ID NO: 81823 - protein, 10 aa, Homo sapiens
  misc_feature: Table A; Target 81823; HLA-B*27:02; SMC1B; ENSG00000077935; CTA
YSQNELEMIK

SEQ ID NO: 81824 - protein, 11 aa, Homo sapiens
  misc_feature: Table A; Target 81824; HLA-A*11:01; SMC1B; ENSG00000077935; CTA
YSQNELEMIKK

SEQ ID NO: 81825 - protein, 9 aa, Homo sapiens
  misc_feature: Table A; Target 81825; HLA-A*01:01; SMC1B; ENSG00000077935; CTA
YSSLKEDLK

SEQ ID NO: 81826 - protein, 9 aa, Homo sapiens
  misc_feature: Table A; Target 81826; HLA-A*01:01; SMC1B; ENSG00000077935; CTA
YVEESGEEK

SEQ ID NO: 81827 - protein, 9 aa, Homo sapiens
  misc_feature: Table A; Target 81827; HLA-C*05:01; SMC1B; ENSG00000077935; CTA
YVEESGEEK

SEQ ID NO: 81828 - protein, 11 aa, Homo sapiens
  misc_feature: Table A; Target 81828; HLA-B*38:01; SMC1B; ENSG00000077935; CTA
YVEESGEEKTF

SEQ ID NO: 81829 - protein, 11 aa, Homo sapiens
  misc_feature: Table A; Target 81829; HLA-C*05:01; SMC1B; ENSG00000077935; CTA
YVEESGEEKTF

SEQ ID NO: 81830 - protein, 10 aa, Homo sapiens
  misc_feature: Table A; Target 81830; HLA-A*03:02; SMR3A; ENSG00000109208; CTA
ACFTPGESQR

SEQ ID NO: 81831 - protein, 10 aa, Homo sapiens
  misc_feature: Table A; Target 81831; HLA-A*11:01; SMR3A; ENSG00000109208; CTA
ACFTPGESQR

SEQ ID NO: 81832 - protein, 10 aa, Homo sapiens
  misc_feature: Table A; Target 81832; HLA-A*31:01; SMR3A; ENSG00000109208; CTA
ACFTPGESQR

SEQ ID NO: 81833 - protein, 10 aa, Homo sapiens
  misc_feature: Table A; Target 81833; HLA-A*33:01; SMR3A; ENSG00000109208; CTA
ACFTPGESQR

SEQ ID NO: 81834 - protein, 10 aa, Homo sapiens
  misc_feature: Table A; Target 81834; HLA-A*33:03; SMR3A; ENSG00000109208; CTA
ACFTPGESQR

SEQ ID NO: 81835 - protein, 10 aa, Homo sapiens
  misc_feature: Table A; Target 81835; HLA-A*68:01; SMR3A; ENSG00000109208; CTA
ACFTPGESQR

SEQ ID NO: 81836 - protein, 10 aa, Homo sapiens
  misc_feature: Table A; Target 81836; HLA-B*27:05; SMR3A; ENSG00000109208; CTA
ACFTPGESQR

SEQ ID NO: 81837 - protein, 10 aa, Homo sapiens
  misc_feature: Table A; Target 81837; HLA-C*02:02; SMR3A; ENSG00000109208; CTA
ACFTPGESQR

SEQ ID NO: 81838 - protein, 10 aa, Homo sapiens
  misc_feature: Table A; Target 81838; HLA-C*04:01; SMR3A; ENSG00000109208; CTA
ACFTPGESQR

SEQ ID NO: 81839 - protein, 10 aa, Homo sapiens
  misc_feature: Table A; Target 81839; HLA-C*07:06; SMR3A; ENSG00000109208; CTA
ACFTPGESQR

SEQ ID NO: 81840 - protein, 10 aa, Homo sapiens
  misc_feature: Table A; Target 81840; HLA-C*16:02; SMR3A; ENSG00000109208; CTA
ACFTPGESQR

SEQ ID NO: 81841 - protein, 9 aa, Homo sapiens
  misc_feature: Table A; Target 81841; HLA-B*51:01; SMR3A; ENSG00000109208; CTA
DPALPTPAP

SEQ ID NO: 81842 - protein, 9 aa, Homo sapiens
  misc_feature: Table A; Target 81842; HLA-B*54:01; SMR3A; ENSG00000109208; CTA
DPALPTPAP

SEQ ID NO: 81843 - protein, 9 aa, Homo sapiens
  misc_feature: Table A; Target 81843; HLA-B*55:01; SMR3A; ENSG00000109208; CTA
DPALPTPAP

SEQ ID NO: 81844 - protein, 9 aa, Homo sapiens
  misc_feature: Table A; Target 81844; HLA-B*56:01; SMR3A; ENSG00000109208; CTA
DPALPTPAP

SEQ ID NO: 81845 - protein, 9 aa, Homo sapiens
  misc_feature: Table A; Target 81845; HLA-B*54:01; SMR3A; ENSG00000109208; CTA
FPFGTGFVP

SEQ ID NO: 81846 - protein, 10 aa, Homo sapiens
  misc_feature: Table A; Target 81846; HLA-B*54:01; SMR3A; ENSG00000109208; CTA
FPFGTGFVPP

SEQ ID NO: 81847 - protein, 9 aa, Homo sapiens
  misc_feature: Table A; Target 81847; HLA-A*26:01; SMR3A; ENSG00000109208; CTA
FPPPLSPPY

SEQ ID NO: 81848 - protein, 9 aa, Homo sapiens
  misc_feature: Table A; Target 81848; HLA-A*29:02; SMR3A; ENSG00000109208; CTA
FPPPLSPPY

SEQ ID NO: 81849 - protein, 9 aa, Homo sapiens
  misc_feature: Table A; Target 81849; HLA-B*35:01; SMR3A; ENSG00000109208; CTA
FPPPLSPPY

SEQ ID NO: 81850 - protein, 9 aa, Homo sapiens
  misc_feature: Table A; Target 81850; HLA-B*35:03; SMR3A; ENSG00000109208; CTA
FPPPLSPPY

SEQ ID NO: 81851 - protein, 9 aa, Homo sapiens
  misc_feature: Table A; Target 81851; HLA-B*54:01; SMR3A; ENSG00000109208; CTA
FPPPLSPPY

SEQ ID NO: 81852 - protein, 9 aa, Homo sapiens
  misc_feature: Table A; Target 81852; HLA-B*55:01; SMR3A; ENSG00000109208; CTA
FPPPLSPPY

SEQ ID NO: 81853 - protein, 10 aa, Homo sapiens
  misc_feature: Table A; Target 81853; HLA-B*54:01; SMR3A; ENSG00000109208; CTA
FPVNSPTDPA

SEQ ID NO: 81854 - protein, 10 aa, Homo sapiens
  misc_feature: Table A; Target 81854; HLA-B*56:01; SMR3A; ENSG00000109208; CTA
FPVNSPTDPA

SEQ ID NO: 81855 - protein, 11 aa, Homo sapiens
  misc_feature: Table A; Target 81855; HLA-B*35:01; SMR3A; ENSG00000109208; CTA
FPVNSPTDPAL

SEQ ID NO: 81856 - protein, 11 aa, Homo sapiens
  misc_feature: Table A; Target 81856; HLA-B*35:03; SMR3A; ENSG00000109208; CTA
FPVNSPTDPAL

SEQ ID NO: 81857 - protein, 11 aa, Homo sapiens
  misc_feature: Table A; Target 81857; HLA-B*54:01; SMR3A; ENSG00000109208; CTA
FPVNSPTDPAL

SEQ ID NO: 81858 - protein, 11 aa, Homo sapiens
  misc_feature: Table A; Target 81858; HLA-B*55:01; SMR3A; ENSG00000109208; CTA
FPVNSPTDPAL

SEQ ID NO: 81859 - protein, 11 aa, Homo sapiens
  misc_feature: Table A; Target 81859; HLA-B*56:01; SMR3A; ENSG00000109208; CTA
FPVNSPTDPAL

SEQ ID NO: 81860 - protein, 10 aa, Homo sapiens
  misc_feature: Table A; Target 81860; HLA-C*06:02; SMR3A; ENSG00000109208; CTA
FTPGESQRGP

SEQ ID NO: 81861 - protein, 9 aa, Homo sapiens
  misc_feature: Table A; Target 81861; HLA-A*02:07; SMR3A; ENSG00000109208; CTA
FVPPPHPPP

SEQ ID NO: 81862 - protein, 9 aa, Homo sapiens
  misc_feature: Table A; Target 81862; HLA-A*68:02; SMR3A; ENSG00000109208; CTA
FVPPPHPPP

SEQ ID NO: 81863 - protein, 9 aa, Homo sapiens
  misc_feature: Table A; Target 81863; HLA-B*54:01; SMR3A; ENSG00000109208; CTA
FVPPPHPPP

SEQ ID NO: 81864 - protein, 9 aa, Homo sapiens
  misc_feature: Table A; Target 81864; HLA-B*56:01; SMR3A; ENSG00000109208; CTA
FVPPPHPPP

SEQ ID NO: 81865 - protein, 9 aa, Homo sapiens
  misc_feature: Table A; Target 81865; HLA-C*04:01; SMR3A; ENSG00000109208; CTA
FVPPPHPPP

SEQ ID NO: 81866 - protein, 9 aa, Homo sapiens
  misc_feature: Table A; Target 81866; HLA-C*06:02; SMR3A; ENSG00000109208; CTA
FVPPPHPPP

SEQ ID NO: 81867 - protein, 9 aa, Homo sapiens
  misc_feature: Table A; Target 81867; HLA-C*07:02; SMR3A; ENSG00000109208; CTA
FVPPPHPPP

SEQ ID NO: 81868 - protein, 9 aa, Homo sapiens
  misc_feature: Table A; Target 81868; HLA-C*12:03; SMR3A; ENSG00000109208; CTA
FVPPPHPPP

SEQ ID NO: 81869 - protein, 10 aa, Homo sapiens
  misc_feature: Table A; Target 81869; HLA-A*01:01; SMR3A; ENSG00000109208; CTA
FVPPPHPPPY

SEQ ID NO: 81870 - protein, 10 aa, Homo sapiens
  misc_feature: Table A; Target 81870; HLA-A*02:01; SMR3A; ENSG00000109208; CTA
FVPPPHPPPY

SEQ ID NO: 81871 - protein, 10 aa, Homo sapiens
  misc_feature: Table A; Target 81871; HLA-A*02:07; SMR3A; ENSG00000109208; CTA
FVPPPHPPPY

SEQ ID NO: 81872 - protein, 10 aa, Homo sapiens
  misc_feature: Table A; Target 81872; HLA-A*25:01; SMR3A; ENSG00000109208; CTA
FVPPPHPPPY

SEQ ID NO: 81873 - protein, 10 aa, Homo sapiens
  misc_feature: Table A; Target 81873; HLA-A*26:01; SMR3A; ENSG00000109208; CTA
FVPPPHPPPY

SEQ ID NO: 81874 - protein, 10 aa, Homo sapiens
  misc_feature: Table A; Target 81874; HLA-A*29:02; SMR3A; ENSG00000109208; CTA
FVPPPHPPPY

SEQ ID NO: 81875 - protein, 10 aa, Homo sapiens
  misc_feature: Table A; Target 81875; HLA-A*30:02; SMR3A; ENSG00000109208; CTA
FVPPPHPPPY

SEQ ID NO: 81876 - protein, 10 aa, Homo sapiens
  misc_feature: Table A; Target 81876; HLA-C*02:02; SMR3A; ENSG00000109208; CTA
FVPPPHPPPY

SEQ ID NO: 81877 - protein, 10 aa, Homo sapiens
  misc_feature: Table A; Target 81877; HLA-C*07:02; SMR3A; ENSG00000109208; CTA
FVPPPHPPPY

SEQ ID NO: 81878 - protein, 11 aa, Homo sapiens
  misc_feature: Table A; Target 81878; HLA-A*02:07; SMR3A; ENSG00000109208; CTA
FVPPPHPPPYG

SEQ ID NO: 81879 - protein, 11 aa, Homo sapiens
  misc_feature: Table A; Target 81879; HLA-A*29:02; SMR3A; ENSG00000109208; CTA
GFVPPPHPPPY

SEQ ID NO: 81880 - protein, 9 aa, Homo sapiens
  misc_feature: Table A; Target 81880; HLA-B*56:01; SMR3A; ENSG00000109208; CTA
GPLAPPPPP

SEQ ID NO: 81881 - protein, 11 aa, Homo sapiens
  misc_feature: Table A; Target 81881; HLA-B*07:02; SMR3A; ENSG00000109208; CTA
GPRGPYPPGPL

SEQ ID NO: 81882 - protein, 11 aa, Homo sapiens
  misc_feature: Table A; Target 81882; HLA-C*07:02; SMR3A; ENSG00000109208; CTA
GPRGPYPPGPL

SEQ ID NO: 81883 - protein, 8 aa, Homo sapiens
  misc_feature: Table A; Target 81883; HLA-C*07:02; SMR3A; ENSG00000109208; CTA
GPYPPGPL

SEQ ID NO: 81884 - protein, 9 aa, Homo sapiens
  misc_feature: Table A; Target 81884; HLA-B*07:02; SMR3A; ENSG00000109208; CTA
GPYPPGPLA

SEQ ID NO: 81885 - protein, 9 aa, Homo sapiens
  misc_feature: Table A; Target 81885; HLA-B*54:01; SMR3A; ENSG00000109208; CTA
GPYPPGPLA

SEQ ID NO: 81886 - protein, 9 aa, Homo sapiens
  misc_feature: Table A; Target 81886; HLA-B*55:01; SMR3A; ENSG00000109208; CTA
GPYPPGPLA

SEQ ID NO: 81887 - protein, 9 aa, Homo sapiens
  misc_feature: Table A; Target 81887; HLA-B*56:01; SMR3A; ENSG00000109208; CTA
GPYPPGPLA

SEQ ID NO: 81888 - protein, 9 aa, Homo sapiens
  misc_feature: Table A; Target 81888; HLA-C*07:02; SMR3A; ENSG00000109208; CTA
GPYPPGPLA

SEQ ID NO: 81889 - protein, 10 aa, Homo sapiens
  misc_feature: Table A; Target 81889; HLA-B*56:01; SMR3A; ENSG00000109208; CTA
GPYPPGPLAP

SEQ ID NO: 81890 - protein, 11 aa, Homo sapiens
  misc_feature: Table A; Target 81890; HLA-B*56:01; SMR3A; ENSG00000109208; CTA
GPYPPGPLAPP

SEQ ID NO: 81891 - protein, 9 aa, Homo sapiens
  misc_feature: Table A; Target 81891; HLA-B*27:05; SMR3A; ENSG00000109208; CTA
GRFPPPLSP

SEQ ID NO: 81892 - protein, 9 aa, Homo sapiens
  misc_feature: Table A; Target 81892; HLA-B*27:05; SMR3A; ENSG00000109208; CTA
GRIPPSPPP

SEQ ID NO: 81893 - protein, 9 aa, Homo sapiens
  misc_feature: Table A; Target 81893; HLA-A*31:01; SMR3A; ENSG00000109208; CTA
HSLPPPYGP

SEQ ID NO: 81894 - protein, 11 aa, Homo sapiens
  misc_feature: Table A; Target 81894; HLA-A*01:01; SMR3A; ENSG00000109208; CTA
HSLPPPYGPGY

SEQ ID NO: 81895 - protein, 11 aa, Homo sapiens
  misc_feature: Table A; Target 81895; HLA-A*29:02; SMR3A; ENSG00000109208; CTA
HSLPPPYGPGY

SEQ ID NO: 81896 - protein, 11 aa, Homo sapiens
  misc_feature: Table A; Target 81896; HLA-A*30:02; SMR3A; ENSG00000109208; CTA
HSLPPPYGPGY

SEQ ID NO: 81897 - protein, 11 aa, Homo sapiens
  misc_feature: Table A; Target 81897; HLA-B*57:01; SMR3A; ENSG00000109208; CTA
HSLPPPYGPGY

SEQ ID NO: 81898 - protein, 9 aa, Homo sapiens
  misc_feature: Table A; Target 81898; HLA-A*01:01; SMR3A; ENSG00000109208; CTA
IPPSPPPPY

SEQ ID NO: 81899 - protein, 9 aa, Homo sapiens
  misc_feature: Table A; Target 81899; HLA-A*29:02; SMR3A; ENSG00000109208; CTA
IPPSPPPPY

SEQ ID NO: 81900 - protein, 9 aa, Homo sapiens
  misc_feature: Table A; Target 81900; HLA-A*30:02; SMR3A; ENSG00000109208; CTA
IPPSPPPPY

SEQ ID NO: 81901 - protein, 9 aa, Homo sapiens
  misc_feature: Table A; Target 81901; HLA-B*07:02; SMR3A; ENSG00000109208; CTA
IPPSPPPPY

SEQ ID NO: 81902 - protein, 9 aa, Homo sapiens
  misc_feature: Table A; Target 81902; HLA-B*35:01; SMR3A; ENSG00000109208; CTA
IPPSPPPPY

SEQ ID NO: 81903 - protein, 9 aa, Homo sapiens
  misc_feature: Table A; Target 81903; HLA-B*35:03; SMR3A; ENSG00000109208; CTA
IPPSPPPPY

SEQ ID NO: 81904 - protein, 9 aa, Homo sapiens
  misc_feature: Table A; Target 81904; HLA-B*51:01; SMR3A; ENSG00000109208; CTA
IPPSPPPPY

SEQ ID NO: 81905 - protein, 9 aa, Homo sapiens
  misc_feature: Table A; Target 81905; HLA-B*54:01; SMR3A; ENSG00000109208; CTA
IPPSPPPPY

SEQ ID NO: 81906 - protein, 9 aa, Homo sapiens
  misc_feature: Table A; Target 81906; HLA-B*55:01; SMR3A; ENSG00000109208; CTA
IPPSPPPPY

SEQ ID NO: 81907 - protein, 9 aa, Homo sapiens
  misc_feature: Table A; Target 81907; HLA-B*56:01; SMR3A; ENSG00000109208; CTA
IPPSPPPPY

SEQ ID NO: 81908 - protein, 9 aa, Homo sapiens
  misc_feature: Table A; Target 81908; HLA-C*04:01; SMR3A; ENSG00000109208; CTA
IPPSPPPPY

SEQ ID NO: 81909 - protein, 9 aa, Homo sapiens
  misc_feature: Table A; Target 81909; HLA-C*07:02; SMR3A; ENSG00000109208; CTA
IPPSPPPPY

SEQ ID NO: 81910 - protein, 10 aa, Homo sapiens
  misc_feature: Table A; Target 81910; HLA-A*30:02; SMR3A; ENSG00000109208; CTA
IQSHSLPPPY

SEQ ID NO: 81911 - protein, 9 aa, Homo sapiens
  misc_feature: Table A; Target 81911; HLA-A*02:04; SMR3A; ENSG00000109208; CTA
KSLTWILGL

SEQ ID NO: 81912 - protein, 10 aa, Homo sapiens
  misc_feature: Table A; Target 81912; HLA-B*57:01; SMR3A; ENSG00000109208; CTA
KSLTWILGLW

SEQ ID NO: 81913 - protein, 9 aa, Homo sapiens
  misc_feature: Table A; Target 81913; HLA-A*23:01; SMR3A; ENSG00000109208; CTA
LAPPPPPCF

SEQ ID NO: 81914 - protein, 9 aa, Homo sapiens
  misc_feature: Table A; Target 81914; HLA-A*24:02; SMR3A; ENSG00000109208; CTA
LAPPPPPCF

SEQ ID NO: 81915 - protein, 9 aa, Homo sapiens
  misc_feature: Table A; Target 81915; HLA-B*51:01; SMR3A; ENSG00000109208; CTA
LAPPPPPCF

SEQ ID NO: 81916 - protein, 9 aa, Homo sapiens
  misc_feature: Table A; Target 81916; HLA-B*58:01; SMR3A; ENSG00000109208; CTA
LAPPPPPCF

SEQ ID NO: 81917 - protein, 9 aa, Homo sapiens
  misc_feature: Table A; Target 81917; HLA-C*05:01; SMR3A; ENSG00000109208; CTA
LAPPPPPCF

SEQ ID NO: 81918 - protein, 9 aa, Homo sapiens
  misc_feature: Table A; Target 81918; HLA-A*01:01; SMR3A; ENSG00000109208; CTA
LPPPYGPGY

SEQ ID NO: 81919 - protein, 9 aa, Homo sapiens
  misc_feature: Table A; Target 81919; HLA-A*26:01; SMR3A; ENSG00000109208; CTA
LPPPYGPGY

SEQ ID NO: 81920 - protein, 9 aa, Homo sapiens
  misc_feature: Table A; Target 81920; HLA-A*29:02; SMR3A; ENSG00000109208; CTA
LPPPYGPGY

SEQ ID NO: 81921 - protein, 9 aa, Homo sapiens
  misc_feature: Table A; Target 81921; HLA-A*30:02; SMR3A; ENSG00000109208; CTA
LPPPYGPGY

SEQ ID NO: 81922 - protein, 9 aa, Homo sapiens
  misc_feature: Table A; Target 81922; HLA-B*35:01; SMR3A; ENSG00000109208; CTA
LPPPYGPGY

SEQ ID NO: 81923 - protein, 9 aa, Homo sapiens
  misc_feature: Table A; Target 81923; HLA-B*35:03; SMR3A; ENSG00000109208; CTA
LPPPYGPGY

SEQ ID NO: 81924 - protein, 9 aa, Homo sapiens
  misc_feature: Table A; Target 81924; HLA-B*39:01; SMR3A; ENSG00000109208; CTA
LPPPYGPGY

SEQ ID NO: 81925 - protein, 9 aa, Homo sapiens
  misc_feature: Table A; Target 81925; HLA-B*51:01; SMR3A; ENSG00000109208; CTA
LPPPYGPGY

SEQ ID NO: 81926 - protein, 9 aa, Homo sapiens
  misc_feature: Table A; Target 81926; HLA-B*55:01; SMR3A; ENSG00000109208; CTA
LPPPYGPGY

SEQ ID NO: 81927 - protein, 9 aa, Homo sapiens
  misc_feature: Table A; Target 81927; HLA-C*03:03; SMR3A; ENSG00000109208; CTA
LPPPYGPGY

SEQ ID NO: 81928 - protein, 9 aa, Homo sapiens
  misc_feature: Table A; Target 81928; HLA-C*04:01; SMR3A; ENSG00000109208; CTA
LPPPYGPGY

SEQ ID NO: 81929 - protein, 8 aa, Homo sapiens
  misc_feature: Table A; Target 81929; HLA-B*57:01; SMR3A; ENSG00000109208; CTA
LTWILGLW

SEQ ID NO: 81930 - protein, 8 aa, Homo sapiens
  misc_feature: Table A; Target 81930; HLA-C*01:02; SMR3A; ENSG00000109208; CTA
NSPTDPAL

SEQ ID NO: 81931 - protein, 11 aa, Homo sapiens
  misc_feature: Table A; Target 81931; HLA-A*31:01; SMR3A; ENSG00000109208; CTA
PGYPQPPSQPR

SEQ ID NO: 81932 - protein, 11 aa, Homo sapiens
  misc_feature: Table A; Target 81932; HLA-A*33:01; SMR3A; ENSG00000109208; CTA
PGYPQPPSQPR

SEQ ID NO: 81933 - protein, 10 aa, Homo sapiens
  misc_feature: Table A; Target 81933; HLA-A*24:02; SMR3A; ENSG00000109208; CTA
PLAPPPPPCF

SEQ ID NO: 81934 - protein, 10 aa, Homo sapiens
  misc_feature: Table A; Target 81934; HLA-A*30:02; SMR3A; ENSG00000109208; CTA
PQPPSQPRPY

SEQ ID NO: 81935 - protein, 10 aa, Homo sapiens
  misc_feature: Table A; Target 81935; HLA-C*07:02; SMR3A; ENSG00000109208; CTA
PQPPSQPRPY

SEQ ID NO: 81936 - protein, 11 aa, Homo sapiens
  misc_feature: Table A; Target 81936; HLA-C*06:02; SMR3A; ENSG00000109208; CTA
PTDPALPTPAP

SEQ ID NO: 81937 - protein, 10 aa, Homo sapiens
  misc_feature: Table A; Target 81937; HLA-C*07:02; SMR3A; ENSG00000109208; CTA
PYGPGYPQPP

SEQ ID NO: 81938 - protein, 9 aa, Homo sapiens
  misc_feature: Table A; Target 81938; HLA-A*24:02; SMR3A; ENSG00000109208; CTA
PYPPGPPFF

SEQ ID NO: 81939 - protein, 10 aa, Homo sapiens
  misc_feature: Table A; Target 81939; HLA-B*07:02; SMR3A; ENSG00000109208; CTA
QPRPYPPGPP

SEQ ID NO: 81940 - protein, 10 aa, Homo sapiens
  misc_feature: Table A; Target 81940; HLA-C*07:02; SMR3A; ENSG00000109208; CTA
QPRPYPPGPP

SEQ ID NO: 81941 - protein, 9 aa, Homo sapiens
  misc_feature: Table A; Target 81941; HLA-A*01:01; SMR3A; ENSG00000109208; CTA
QSHSLPPPY

SEQ ID NO: 81942 - protein, 9 aa, Homo sapiens
  misc_feature: Table A; Target 81942; HLA-A*30:02; SMR3A; ENSG00000109208; CTA
QSHSLPPPY

SEQ ID NO: 81943 - protein, 10 aa, Homo sapiens
  misc_feature: Table A; Target 81943; HLA-A*24:02; SMR3A; ENSG00000109208; CTA
RFPPPLSPPY

SEQ ID NO: 81944 - protein, 10 aa, Homo sapiens
  misc_feature: Table A; Target 81944; HLA-A*29:02; SMR3A; ENSG00000109208; CTA
RFPPPLSPPY

SEQ ID NO: 81945 - protein, 10 aa, Homo sapiens
  misc_feature: Table A; Target 81945; HLA-A*30:02; SMR3A; ENSG00000109208; CTA
RFPPPLSPPY

SEQ ID NO: 81946 - protein, 9 aa, Homo sapiens
  misc_feature: Table A; Target 81946; HLA-C*07:02; SMR3A; ENSG00000109208; CTA
RGPYPPGPL

SEQ ID NO: 81947 - protein, 10 aa, Homo sapiens
  misc_feature: Table A; Target 81947; HLA-A*03:01; SMR3A; ENSG00000109208; CTA
RIPPSPPPPY

SEQ ID NO: 81948 - protein, 10 aa, Homo sapiens
  misc_feature: Table A; Target 81948; HLA-A*03:02; SMR3A; ENSG00000109208; CTA
RIPPSPPPPY

SEQ ID NO: 81949 - protein, 10 aa, Homo sapiens
  misc_feature: Table A; Target 81949; HLA-A*24:02; SMR3A; ENSG00000109208; CTA
RIPPSPPPPY

SEQ ID NO: 81950 - protein, 10 aa, Homo sapiens
  misc_feature: Table A; Target 81950; HLA-A*29:02; SMR3A; ENSG00000109208; CTA
RIPPSPPPPY

SEQ ID NO: 81951 - protein, 10 aa, Homo sapiens
  misc_feature: Table A; Target 81951; HLA-A*30:02; SMR3A; ENSG00000109208; CTA
RIPPSPPPPY

SEQ ID NO: 81952 - protein, 11 aa, Homo sapiens
  misc_feature: Table A; Target 81952; HLA-A*30:02; SMR3A; ENSG00000109208; CTA
RIQSHSLPPPY

SEQ ID NO: 81953 - protein, 9 aa, Homo sapiens
  misc_feature: Table A; Target 81953; HLA-B*07:02; SMR3A; ENSG00000109208; CTA
RPYPPGPPF

SEQ ID NO: 81954 - protein, 9 aa, Homo sapiens
  misc_feature: Table A; Target 81954; HLA-B*35:01; SMR3A; ENSG00000109208; CTA
RPYPPGPPF

SEQ ID NO: 81955 - protein, 9 aa, Homo sapiens
  misc_feature: Table A; Target 81955; HLA-B*51:01; SMR3A; ENSG00000109208; CTA
RPYPPGPPF

SEQ ID NO: 81956 - protein, 9 aa, Homo sapiens
  misc_feature: Table A; Target 81956; HLA-B*54:01; SMR3A; ENSG00000109208; CTA
RPYPPGPPF

SEQ ID NO: 81957 - protein, 9 aa, Homo sapiens
  misc_feature: Table A; Target 81957; HLA-B*56:01; SMR3A; ENSG00000109208; CTA
RPYPPGPPF

SEQ ID NO: 81958 - protein, 9 aa, Homo sapiens
  misc_feature: Table A; Target 81958; HLA-C*07:02; SMR3A; ENSG00000109208; CTA
RPYPPGPPF

SEQ ID NO: 81959 - protein, 10 aa, Homo sapiens
  misc_feature: Table A; Target 81959; HLA-B*51:01; SMR3A; ENSG00000109208; CTA
RPYPPGPPFF

SEQ ID NO: 81960 - protein, 10 aa, Homo sapiens
  misc_feature: Table A; Target 81960; HLA-B*57:01; SMR3A; ENSG00000109208; CTA
RPYPPGPPFF

SEQ ID NO: 81961 - protein, 10 aa, Homo sapiens
  misc_feature: Table A; Target 81961; HLA-A*01:01; SMR3A; ENSG00000109208; CTA
SLPPPYGPGY

SEQ ID NO: 81962 - protein, 10 aa, Homo sapiens
  misc_feature: Table A; Target 81962; HLA-A*02:07; SMR3A; ENSG00000109208; CTA
SLPPPYGPGY

SEQ ID NO: 81963 - protein, 10 aa, Homo sapiens
  misc_feature: Table A; Target 81963; HLA-A*25:01; SMR3A; ENSG00000109208; CTA
SLPPPYGPGY

SEQ ID NO: 81964 - protein, 10 aa, Homo sapiens
  misc_feature: Table A; Target 81964; HLA-A*26:01; SMR3A; ENSG00000109208; CTA
SLPPPYGPGY

SEQ ID NO: 81965 - protein, 10 aa, Homo sapiens
  misc_feature: Table A; Target 81965; HLA-A*29:02; SMR3A; ENSG00000109208; CTA
SLPPPYGPGY

SEQ ID NO: 81966 - protein, 10 aa, Homo sapiens
  misc_feature: Table A; Target 81966; HLA-A*30:02; SMR3A; ENSG00000109208; CTA
SLPPPYGPGY

SEQ ID NO: 81967 - protein, 10 aa, Homo sapiens
  misc_feature: Table A; Target 81967; HLA-B*15:01; SMR3A; ENSG00000109208; CTA
SLPPPYGPGY

SEQ ID NO: 81968 - protein, 9 aa, Homo sapiens
  misc_feature: Table A; Target 81968; HLA-B*56:01; SMR3A; ENSG00000109208; CTA
SPTDPALPT

SEQ ID NO: 81969 - protein, 10 aa, Homo sapiens
  misc_feature: Table A; Target 81969; HLA-B*54:01; SMR3A; ENSG00000109208; CTA
SPTDPALPTP

SEQ ID NO: 81970 - protein, 10 aa, Homo sapiens
  misc_feature: Table A; Target 81970; HLA-B*56:01; SMR3A; ENSG00000109208; CTA
SPTDPALPTP

SEQ ID NO: 81971 - protein, 11 aa, Homo sapiens
  misc_feature: Table A; Target 81971; HLA-B*56:01; SMR3A; ENSG00000109208; CTA
SPTDPALPTPA

SEQ ID NO: 81972 - protein, 9 aa, Homo sapiens
  misc_feature: Table A; Target 81972; HLA-A*30:02; SMR3A; ENSG00000109208; CTA
SQRGPRGPY

SEQ ID NO: 81973 - protein, 9 aa, Homo sapiens
  misc_feature: Table A; Target 81973; HLA-B*27:05; SMR3A; ENSG00000109208; CTA
VNSPTDPAL

SEQ ID NO: 81974 - protein, 9 aa, Homo sapiens
  misc_feature: Table A; Target 81974; HLA-B*35:03; SMR3A; ENSG00000109208; CTA
VNSPTDPAL

SEQ ID NO: 81975 - protein, 9 aa, Homo sapiens
  misc_feature: Table A; Target 81975; HLA-B*38:01; SMR3A; ENSG00000109208; CTA
VNSPTDPAL

SEQ ID NO: 81976 - protein, 9 aa, Homo sapiens
  misc_feature: Table A; Target 81976; HLA-B*39:01; SMR3A; ENSG00000109208; CTA
VNSPTDPAL

SEQ ID NO: 81977 - protein, 9 aa, Homo sapiens
  misc_feature: Table A; Target 81977; HLA-C*03:03; SMR3A; ENSG00000109208; CTA
VNSPTDPAL

SEQ ID NO: 81978 - protein, 9 aa, Homo sapiens
  misc_feature: Table A; Target 81978; HLA-C*03:04; SMR3A; ENSG00000109208; CTA
VNSPTDPAL

SEQ ID NO: 81979 - protein, 8 aa, Homo sapiens
  misc_feature: Table A; Target 81979; HLA-C*04:01; SMR3A; ENSG00000109208; CTA
VPPPHPPP

SEQ ID NO: 81980 - protein, 9 aa, Homo sapiens
  misc_feature: Table A; Target 81980; HLA-A*01:01; SMR3A; ENSG00000109208; CTA
VPPPHPPPY

SEQ ID NO: 81981 - protein, 9 aa, Homo sapiens
  misc_feature: Table A; Target 81981; HLA-A*03:02; SMR3A; ENSG00000109208; CTA
VPPPHPPPY

SEQ ID NO: 81982 - protein, 9 aa, Homo sapiens
  misc_feature: Table A; Target 81982; HLA-A*11:01; SMR3A; ENSG00000109208; CTA
VPPPHPPPY

SEQ ID NO: 81983 - protein, 9 aa, Homo sapiens
  misc_feature: Table A; Target 81983; HLA-A*23:01; SMR3A; ENSG00000109208; CTA
VPPPHPPPY

SEQ ID NO: 81984 - protein, 9 aa, Homo sapiens
  misc_feature: Table A; Target 81984; HLA-A*24:02; SMR3A; ENSG00000109208; CTA
VPPPHPPPY

SEQ ID NO: 81985 - protein, 9 aa, Homo sapiens
  misc_feature: Table A; Target 81985; HLA-A*26:01; SMR3A; ENSG00000109208; CTA
VPPPHPPPY

SEQ ID NO: 81986 - protein, 9 aa, Homo sapiens
  misc_feature: Table A; Target 81986; HLA-A*29:02; SMR3A; ENSG00000109208; CTA
VPPPHPPPY

SEQ ID NO: 81987 - protein, 9 aa, Homo sapiens
  misc_feature: Table A; Target 81987; HLA-A*30:02; SMR3A; ENSG00000109208; CTA
VPPPHPPPY

SEQ ID NO: 81988 - protein, 9 aa, Homo sapiens
  misc_feature: Table A; Target 81988; HLA-B*07:02; SMR3A; ENSG00000109208; CTA
VPPPHPPPY

SEQ ID NO: 81989 - protein, 9 aa, Homo sapiens
  misc_feature: Table A; Target 81989; HLA-B*15:03; SMR3A; ENSG00000109208; CTA
VPPPHPPPY

SEQ ID NO: 81990 - protein, 9 aa, Homo sapiens
  misc_feature: Table A; Target 81990; HLA-B*35:01; SMR3A; ENSG00000109208; CTA
VPPPHPPPY

SEQ ID NO: 81991 - protein, 9 aa, Homo sapiens
  misc_feature: Table A; Target 81991; HLA-B*46:01; SMR3A; ENSG00000109208; CTA
VPPPHPPPY

SEQ ID NO: 81992 - protein, 9 aa, Homo sapiens
  misc_feature: Table A; Target 81992; HLA-B*51:01; SMR3A; ENSG00000109208; CTA
VPPPHPPPY

SEQ ID NO: 81993 - protein, 9 aa, Homo sapiens
  misc_feature: Table A; Target 81993; HLA-B*54:01; SMR3A; ENSG00000109208; CTA
VPPPHPPPY

SEQ ID NO: 81994 - protein, 9 aa, Homo sapiens
  misc_feature: Table A; Target 81994; HLA-B*55:01; SMR3A; ENSG00000109208; CTA
VPPPHPPPY

SEQ ID NO: 81995 - protein, 9 aa, Homo sapiens
  misc_feature: Table A; Target 81995; HLA-B*56:01; SMR3A; ENSG00000109208; CTA
VPPPHPPPY

SEQ ID NO: 81996 - protein, 9 aa, Homo sapiens
  misc_feature: Table A; Target 81996; HLA-B*57:01; SMR3A; ENSG00000109208; CTA
VPPPHPPPY

SEQ ID NO: 81997 - protein, 9 aa, Homo sapiens
  misc_feature: Table A; Target 81997; HLA-C*04:01; SMR3A; ENSG00000109208; CTA
VPPPHPPPY

SEQ ID NO: 81998 - protein, 9 aa, Homo sapiens
  misc_feature: Table A; Target 81998; HLA-C*07:01; SMR3A; ENSG00000109208; CTA
VPPPHPPPY

SEQ ID NO: 81999 - protein, 9 aa, Homo sapiens
  misc_feature: Table A; Target 81999; HLA-C*07:02; SMR3A; ENSG00000109208; CTA
VPPPHPPPY

SEQ ID NO: 82000 - protein, 9 aa, Homo sapiens
  misc_feature: Table A; Target 82000; HLA-C*16:01; SMR3A; ENSG00000109208; CTA
VPPPHPPPY

SEQ ID NO: 82001 - protein, 9 aa, Homo sapiens
  misc_feature: Table A; Target 82001; HLA-C*16:02; SMR3A; ENSG00000109208; CTA
VPPPHPPPY

SEQ ID NO: 82002 - protein, 9 aa, Homo sapiens
  misc_feature: Table A; Target 82002; HLA-B*08:01; SMR3A; ENSG00000109208; CTA
YGPGRIQSH

SEQ ID NO: 82003 - protein, 9 aa, Homo sapiens
  misc_feature: Table A; Target 82003; HLA-C*01:02; SMR3A; ENSG00000109208; CTA
YGPGRIQSH

SEQ ID NO: 82004 - protein, 9 aa, Homo sapiens
  misc_feature: Table A; Target 82004; HLA-C*07:02; SMR3A; ENSG00000109208; CTA
YGPGYPQPP

SEQ ID NO: 82005 - protein, 9 aa, Homo sapiens
  misc_feature: Table A; Target 82005; HLA-B*54:01; SMR3A; ENSG00000109208; CTA
YPPGPPFFP

SEQ ID NO: 82006 - protein, 10 aa, Homo sapiens
  misc_feature: Table A; Target 82006; HLA-B*54:01; SMR3A; ENSG00000109208; CTA
YPPGPPFFPV

SEQ ID NO: 82007 - protein, 9 aa, Homo sapiens
  misc_feature: Table A; Target 82007; HLA-A*31:01; SMR3A; ENSG00000109208; CTA
YPQPPSQPR

SEQ ID NO: 82008 - protein, 9 aa, Homo sapiens
  misc_feature: Table A; Target 82008; HLA-A*33:01; SMR3A; ENSG00000109208; CTA
YPQPPSQPR

SEQ ID NO: 82009 - protein, 9 aa, Homo sapiens
  misc_feature: Table A; Target 82009; HLA-A*33:03; SMR3A; ENSG00000109208; CTA
YPQPPSQPR

SEQ ID NO: 82010 - protein, 9 aa, Homo sapiens
  misc_feature: Table A; Target 82010; HLA-A*68:01; SMR3A; ENSG00000109208; CTA
YPQPPSQPR

SEQ ID NO: 82011 - protein, 9 aa, Homo sapiens
  misc_feature: Table A; Target 82011; HLA-B*35:01; SMR3A; ENSG00000109208; CTA
YPQPPSQPR

SEQ ID NO: 82012 - protein, 9 aa, Homo sapiens
  misc_feature: Table A; Target 82012; HLA-B*56:01; SMR3A; ENSG00000109208; CTA
YPQPPSQPR

SEQ ID NO: 82013 - protein, 9 aa, Homo sapiens
  misc_feature: Table A; Target 82013; HLA-C*07:06; SMR3A; ENSG00000109208; CTA
YPQPPSQPR

SEQ ID NO: 82014 - protein, 11 aa, Homo sapiens
  misc_feature: Table A; Target 82014; HLA-A*29:02; SMR3A; ENSG00000109208; CTA
YPQPPSQPRPY

SEQ ID NO: 82015 - protein, 11 aa, Homo sapiens
  misc_feature: Table A; Target 82015; HLA-A*30:02; SMR3A; ENSG00000109208; CTA
YPQPPSQPRPY

SEQ ID NO: 82016 - protein, 11 aa, Homo sapiens
  misc_feature: Table A; Target 82016; HLA-B*07:02; SMR3A; ENSG00000109208; CTA
YPQPPSQPRPY

SEQ ID NO: 82017 - protein, 11 aa, Homo sapiens
  misc_feature: Table A; Target 82017; HLA-B*35:01; SMR3A; ENSG00000109208; CTA
YPQPPSQPRPY

SEQ ID NO: 82018 - protein, 11 aa, Homo sapiens
  misc_feature: Table A; Target 82018; HLA-C*04:01; SMR3A; ENSG00000109208; CTA
YPQPPSQPRPY

SEQ ID NO: 82019 - protein, 11 aa, Homo sapiens
  misc_feature: Table A; Target 82019; HLA-C*16:01; SMR3A; ENSG00000109208; CTA
YPQPPSQPRPY

SEQ ID NO: 82020 - protein, 10 aa, Homo sapiens
  misc_feature: Table A; Target 82020; HLA-B*49:01; SSX1; ENSG00000126752; CTA
AEDENDSKGV

SEQ ID NO: 82021 - protein, 8 aa, Homo sapiens
  misc_feature: Table A; Target 82021; HLA-A*29:02; SSX1; ENSG00000126752; CTA
AFDDIATY

SEQ ID NO: 82022 - protein, 8 aa, Homo sapiens
  misc_feature: Table A; Target 82022; HLA-A*30:02; SSX1; ENSG00000126752; CTA
AFDDIATY

SEQ ID NO: 82023 - protein, 8 aa, Homo sapiens
  misc_feature: Table A; Target 82023; HLA-A*32:01; SSX1; ENSG00000126752; CTA
AFDDIATY

SEQ ID NO: 82024 - protein, 8 aa, Homo sapiens
  misc_feature: Table A; Target 82024; HLA-B*18:01; SSX1; ENSG00000126752; CTA
AFDDIATY

SEQ ID NO: 82025 - protein, 8 aa, Homo sapiens
  misc_feature: Table A; Target 82025; HLA-B*35:01; SSX1; ENSG00000126752; CTA
AFDDIATY

SEQ ID NO: 82026 - protein, 8 aa, Homo sapiens
  misc_feature: Table A; Target 82026; HLA-B*55:01; SSX1; ENSG00000126752; CTA
AFDDIATY

SEQ ID NO: 82027 - protein, 8 aa, Homo sapiens
  misc_feature: Table A; Target 82027; HLA-C*04:01; SSX1; ENSG00000126752; CTA
AFDDIATY

SEQ ID NO: 82028 - protein, 8 aa, Homo sapiens
  misc_feature: Table A; Target 82028; HLA-C*14:02; SSX1; ENSG00000126752; CTA
AFDDIATY

SEQ ID NO: 82029 - protein, 9 aa, Homo sapiens
  misc_feature: Table A; Target 82029; HLA-A*02:01; SSX1; ENSG00000126752; CTA
AFDDIATYF

SEQ ID NO: 82030 - protein, 9 aa, Homo sapiens
  misc_feature: Table A; Target 82030; HLA-A*02:07; SSX1; ENSG00000126752; CTA
AFDDIATYF

SEQ ID NO: 82031 - protein, 9 aa, Homo sapiens
  misc_feature: Table A; Target 82031; HLA-A*23:01; SSX1; ENSG00000126752; CTA
AFDDIATYF

SEQ ID NO: 82032 - protein, 9 aa, Homo sapiens
  misc_feature: Table A; Target 82032; HLA-A*24:02; SSX1; ENSG00000126752; CTA
AFDDIATYF

SEQ ID NO: 82033 - protein, 9 aa, Homo sapiens
  misc_feature: Table A; Target 82033; HLA-A*29:02; SSX1; ENSG00000126752; CTA
AFDDIATYF

SEQ ID NO: 82034 - protein, 9 aa, Homo sapiens
  misc_feature: Table A; Target 82034; HLA-A*32:01; SSX1; ENSG00000126752; CTA
AFDDIATYF

SEQ ID NO: 82035 - protein, 9 aa, Homo sapiens
  misc_feature: Table A; Target 82035; HLA-A*33:03; SSX1; ENSG00000126752; CTA
AFDDIATYF

SEQ ID NO: 82036 - protein, 9 aa, Homo sapiens
  misc_feature: Table A; Target 82036; HLA-B*15:03; SSX1; ENSG00000126752; CTA
AFDDIATYF

SEQ ID NO: 82037 - protein, 9 aa, Homo sapiens
  misc_feature: Table A; Target 82037; HLA-B*18:01; SSX1; ENSG00000126752; CTA
AFDDIATYF

SEQ ID NO: 82038 - protein, 9 aa, Homo sapiens
  misc_feature: Table A; Target 82038; HLA-B*35:01; SSX1; ENSG00000126752; CTA
AFDDIATYF

SEQ ID NO: 82039 - protein, 9 aa, Homo sapiens
  misc_feature: Table A; Target 82039; HLA-B*35:03; SSX1; ENSG00000126752; CTA
AFDDIATYF

SEQ ID NO: 82040 - protein, 9 aa, Homo sapiens
  misc_feature: Table A; Target 82040; HLA-B*38:01; SSX1; ENSG00000126752; CTA
AFDDIATYF

SEQ ID NO: 82041 - protein, 9 aa, Homo sapiens
  misc_feature: Table A; Target 82041; HLA-B*44:02; SSX1; ENSG00000126752; CTA
AFDDIATYF

SEQ ID NO: 82042 - protein, 9 aa, Homo sapiens
  misc_feature: Table A; Target 82042; HLA-B*44:03; SSX1; ENSG00000126752; CTA
AFDDIATYF

SEQ ID NO: 82043 - protein, 9 aa, Homo sapiens
  misc_feature: Table A; Target 82043; HLA-B*46:01; SSX1; ENSG00000126752; CTA
AFDDIATYF

SEQ ID NO: 82044 - protein, 9 aa, Homo sapiens
  misc_feature: Table A; Target 82044; HLA-B*55:01; SSX1; ENSG00000126752; CTA
AFDDIATYF

SEQ ID NO: 82045 - protein, 9 aa, Homo sapiens
  misc_feature: Table A; Target 82045; HLA-C*01:02; SSX1; ENSG00000126752; CTA
AFDDIATYF

SEQ ID NO: 82046 - protein, 9 aa, Homo sapiens
  misc_feature: Table A; Target 82046; HLA-C*02:02; SSX1; ENSG00000126752; CTA
AFDDIATYF

SEQ ID NO: 82047 - protein, 9 aa, Homo sapiens
  misc_feature: Table A; Target 82047; HLA-C*05:01; SSX1; ENSG00000126752; CTA
AFDDIATYF

SEQ ID NO: 82048 - protein, 9 aa, Homo sapiens
  misc_feature: Table A; Target 82048; HLA-C*07:04; SSX1; ENSG00000126752; CTA
AFDDIATYF

SEQ ID NO: 82049 - protein, 9 aa, Homo sapiens
  misc_feature: Table A; Target 82049; HLA-C*12:03; SSX1; ENSG00000126752; CTA
AFDDIATYF

SEQ ID NO: 82050 - protein, 9 aa, Homo sapiens
  misc_feature: Table A; Target 82050; HLA-C*14:02; SSX1; ENSG00000126752; CTA
AFDDIATYF

SEQ ID NO: 82051 - protein, 9 aa, Homo sapiens
  misc_feature: Table A; Target 82051; HLA-C*16:04; SSX1; ENSG00000126752; CTA
AFDDIATYF

SEQ ID NO: 82052 - protein, 9 aa, Homo sapiens
  misc_feature: Table A; Target 82052; HLA-A*02:01; SSX1; ENSG00000126752; CTA
AMTKLGFKV

SEQ ID NO: 82053 - protein, 9 aa, Homo sapiens
  misc_feature: Table A; Target 82053; HLA-A*02:04; SSX1; ENSG00000126752; CTA
AMTKLGFKV

SEQ ID NO: 82054 - protein, 9 aa, Homo sapiens
  misc_feature: Table A; Target 82054; HLA-B*13:02; SSX1; ENSG00000126752; CTA
AMTKLGFKV

SEQ ID NO: 82055 - protein, 9 aa, Homo sapiens
  misc_feature: Table A; Target 82055; HLA-B*55:01; SSX1; ENSG00000126752; CTA
AMTKLGFKV

SEQ ID NO: 82056 - protein, 9 aa, Homo sapiens
  misc_feature: Table A; Target 82056; HLA-A*03:02; SSX1; ENSG00000126752; CTA
ANISEKINK

SEQ ID NO: 82057 - protein, 9 aa, Homo sapiens
  misc_feature: Table A; Target 82057; HLA-A*11:01; SSX1; ENSG00000126752; CTA
ANISEKINK

SEQ ID NO: 82058 - protein, 10 aa, Homo sapiens
  misc_feature: Table A; Target 82058; HLA-A*33:03; SSX1; ENSG00000126752; CTA
ANISEKINKR

SEQ ID NO: 82059 - protein, 9 aa, Homo sapiens
  misc_feature: Table A; Target 82059; HLA-A*01:01; SSX1; ENSG00000126752; CTA
ATDFQGNDF

SEQ ID NO: 82060 - protein, 9 aa, Homo sapiens
  misc_feature: Table A; Target 82060; HLA-B*39:01; SSX1; ENSG00000126752; CTA
ATDFQGNDF

SEQ ID NO: 82061 - protein, 9 aa, Homo sapiens
  misc_feature: Table A; Target 82061; HLA-C*04:01; SSX1; ENSG00000126752; CTA
ATDFQGNDF

SEQ ID NO: 82062 - protein, 9 aa, Homo sapiens
  misc_feature: Table A; Target 82062; HLA-C*05:01; SSX1; ENSG00000126752; CTA
ATDFQGNDF

SEQ ID NO: 82063 - protein, 9 aa, Homo sapiens
  misc_feature: Table A; Target 82063; HLA-A*32:01; SSX1; ENSG00000126752; CTA
ATYFSKKEW

SEQ ID NO: 82064 - protein, 9 aa, Homo sapiens
  misc_feature: Table A; Target 82064; HLA-B*57:01; SSX1; ENSG00000126752; CTA
ATYFSKKEW

SEQ ID NO: 82065 - protein, 8 aa, Homo sapiens
  misc_feature: Table A; Target 82065; HLA-A*33:01; SSX1; ENSG00000126752; CTA
DAKASEKR

SEQ ID NO: 82066 - protein, 8 aa, Homo sapiens
  misc_feature: Table A; Target 82066; HLA-A*33:03; SSX1; ENSG00000126752; CTA
DAKASEKR

SEQ ID NO: 82067 - protein, 9 aa, Homo sapiens
  misc_feature: Table A; Target 82067; HLA-A*33:01; SSX1; ENSG00000126752; CTA
DDAKASEKR

SEQ ID NO: 82068 - protein, 9 aa, Homo sapiens
  misc_feature: Table A; Target 82068; HLA-A*33:01; SSX1; ENSG00000126752; CTA
DDIATYFSK

SEQ ID NO: 82069 - protein, 9 aa, Homo sapiens
  misc_feature: Table A; Target 82069; HLA-A*33:01; SSX1; ENSG00000126752; CTA
DDTFAKRPR

SEQ ID NO: 82070 - protein, 8 aa, Homo sapiens
  misc_feature: Table A; Target 82070; HLA-A*33:01; SSX1; ENSG00000126752; CTA
DFDNDHNR

SEQ ID NO: 82071 - protein, 8 aa, Homo sapiens
  misc_feature: Table A; Target 82071; HLA-A*33:03; SSX1; ENSG00000126752; CTA
DFDNDHNR

SEQ ID NO: 82072 - protein, 9 aa, Homo sapiens
  misc_feature: Table A; Target 82072; HLA-A*26:01; SSX1; ENSG00000126752; CTA
DIATYFSKK

SEQ ID NO: 82073 - protein, 9 aa, Homo sapiens
  misc_feature: Table A; Target 82073; HLA-A*33:01; SSX1; ENSG00000126752; CTA
DIATYFSKK

SEQ ID NO: 82074 - protein, 9 aa, Homo sapiens
  misc_feature: Table A; Target 82074; HLA-A*68:01; SSX1; ENSG00000126752; CTA
DIATYFSKK

SEQ ID NO: 82075 - protein, 11 aa, Homo sapiens
  misc_feature: Table A; Target 82075; HLA-A*33:01; SSX1; ENSG00000126752; CTA
DSKGVSEASGP

SEQ ID NO: 82076 - protein, 10 aa, Homo sapiens
  misc_feature: Table A; Target 82076; HLA-A*68:01; SSX1; ENSG00000126752; CTA
EASGPQNDGK

SEQ ID NO: 82077 - protein, 10 aa, Homo sapiens
  misc_feature: Table A; Target 82077; HLA-B*27:02; SSX1; ENSG00000126752; CTA
EASGPQNDGK

SEQ ID NO: 82078 - protein, 8 aa, Homo sapiens
  misc_feature: Table A; Target 82078; HLA-B*18:01; SSX1; ENSG00000126752; CTA
FDDIATYF

SEQ ID NO: 82079 - protein, 8 aa, Homo sapiens
  misc_feature: Table A; Target 82079; HLA-B*37:01; SSX1; ENSG00000126752; CTA
FDDIATYF

SEQ ID NO: 82080 - protein, 8 aa, Homo sapiens
  misc_feature: Table A; Target 82080; HLA-B*38:01; SSX1; ENSG00000126752; CTA
FDDIATYF

SEQ ID NO: 82081 - protein, 8 aa, Homo sapiens
  misc_feature: Table A; Target 82081; HLA-C*04:01; SSX1; ENSG00000126752; CTA
FDDIATYF

SEQ ID NO: 82082 - protein, 8 aa, Homo sapiens
  misc_feature: Table A; Target 82082; HLA-C*05:01; SSX1; ENSG00000126752; CTA
FDDIATYF

SEQ ID NO: 82083 - protein, 8 aa, Homo sapiens
  misc_feature: Table A; Target 82083; HLA-C*07:01; SSX1; ENSG00000126752; CTA
FDDIATYF

SEQ ID NO: 82084 - protein, 10 aa, Homo sapiens
  misc_feature: Table A; Target 82084; HLA-B*27:02; SSX1; ENSG00000126752; CTA
FDDIATYFSK

SEQ ID NO: 82085 - protein, 10 aa, Homo sapiens
  misc_feature: Table A; Target 82085; HLA-A*33:01; SSX1; ENSG00000126752; CTA
GDDTFAKRPR

SEQ ID NO: 82086 - protein, 9 aa, Homo sapiens
  misc_feature: Table A; Target 82086; HLA-B*13:02; SSX1; ENSG00000126752; CTA
GKANISEKI

SEQ ID NO: 82087 - protein, 9 aa, Homo sapiens
  misc_feature: Table A; Target 82087; HLA-B*38:01; SSX1; ENSG00000126752; CTA
GKANISEKI

SEQ ID NO: 82088 - protein, 9 aa, Homo sapiens
  misc_feature: Table A; Target 82088; HLA-B*07:02; SSX1; ENSG00000126752; CTA
GPQNDGKQL

SEQ ID NO: 82089 - protein, 9 aa, Homo sapiens
  misc_feature: Table A; Target 82089; HLA-C*07:02; SSX1; ENSG00000126752; CTA
GPQNDGKQL

SEQ ID NO: 82090 - protein, 8 aa, Homo sapiens
  misc_feature: Table A; Target 82090; HLA-B*08:01; SSX1; ENSG00000126752; CTA
HPPGKANI

SEQ ID NO: 82091 - protein, 8 aa, Homo sapiens
  misc_feature: Table A; Target 82091; HLA-B*51:01; SSX1; ENSG00000126752; CTA
HPPGKANI

SEQ ID NO: 82092 - protein, 9 aa, Homo sapiens
  misc_feature: Table A; Target 82092; HLA-B*07:02; SSX1; ENSG00000126752; CTA
HPQMTFGRL

SEQ ID NO: 82093 - protein, 10 aa, Homo sapiens
  misc_feature: Table A; Target 82093; HLA-B*57:01; SSX1; ENSG00000126752; CTA
IATYFSKKEW

SEQ ID NO: 82094 - protein, 8 aa, Homo sapiens
  misc_feature: Table A; Target 82094; HLA-A*03:01; SSX1; ENSG00000126752; CTA
IIPKIMPK

SEQ ID NO: 82095 - protein, 9 aa, Homo sapiens
  misc_feature: Table A; Target 82095; HLA-A*03:01; SSX1; ENSG00000126752; CTA
IIPKIMPKK

SEQ ID NO: 82096 - protein, 8 aa, Homo sapiens
  misc_feature: Table A; Target 82096; HLA-A*30:01; SSX1; ENSG00000126752; CTA
IQVEHPQM

SEQ ID NO: 82097 - protein, 8 aa, Homo sapiens
  misc_feature: Table A; Target 82097; HLA-A*32:01; SSX1; ENSG00000126752; CTA
IQVEHPQM

SEQ ID NO: 82098 - protein, 8 aa, Homo sapiens
  misc_feature: Table A; Target 82098; HLA-B*08:01; SSX1; ENSG00000126752; CTA
IQVEHPQM

SEQ ID NO: 82099 - protein, 8 aa, Homo sapiens
  misc_feature: Table A; Target 82099; HLA-B*13:02; SSX1; ENSG00000126752; CTA
IQVEHPQM

SEQ ID NO: 82100 - protein, 8 aa, Homo sapiens
  misc_feature: Table A; Target 82100; HLA-B*15:01; SSX1; ENSG00000126752; CTA
IQVEHPQM

SEQ ID NO: 82101 - protein, 8 aa, Homo sapiens
  misc_feature: Table A; Target 82101; HLA-B*15:03; SSX1; ENSG00000126752; CTA
IQVEHPQM

SEQ ID NO: 82102 - protein, 8 aa, Homo sapiens
  misc_feature: Table A; Target 82102; HLA-B*18:01; SSX1; ENSG00000126752; CTA
IQVEHPQM

SEQ ID NO: 82103 - protein, 8 aa, Homo sapiens
  misc_feature: Table A; Target 82103; HLA-B*37:01; SSX1; ENSG00000126752; CTA
IQVEHPQM

SEQ ID NO: 82104 - protein, 8 aa, Homo sapiens
  misc_feature: Table A; Target 82104; HLA-B*39:01; SSX1; ENSG00000126752; CTA
IQVEHPQM

SEQ ID NO: 82105 - protein, 8 aa, Homo sapiens
  misc_feature: Table A; Target 82105; HLA-B*40:02; SSX1; ENSG00000126752; CTA
IQVEHPQM

SEQ ID NO: 82106 - protein, 8 aa, Homo sapiens
  misc_feature: Table A; Target 82106; HLA-B*46:01; SSX1; ENSG00000126752; CTA
IQVEHPQM

SEQ ID NO: 82107 - protein, 8 aa, Homo sapiens
  misc_feature: Table A; Target 82107; HLA-B*58:01; SSX1; ENSG00000126752; CTA
IQVEHPQM

SEQ ID NO: 82108 - protein, 8 aa, Homo sapiens
  misc_feature: Table A; Target 82108; HLA-C*03:03; SSX1; ENSG00000126752; CTA
IQVEHPQM

SEQ ID NO: 82109 - protein, 8 aa, Homo sapiens
  misc_feature: Table A; Target 82109; HLA-C*03:04; SSX1; ENSG00000126752; CTA
IQVEHPQM

SEQ ID NO: 82110 - protein, 8 aa, Homo sapiens
  misc_feature: Table A; Target 82110; HLA-C*05:01; SSX1; ENSG00000126752; CTA
IQVEHPQM

SEQ ID NO: 82111 - protein, 8 aa, Homo sapiens
  misc_feature: Table A; Target 82111; HLA-C*07:04; SSX1; ENSG00000126752; CTA
IQVEHPQM

SEQ ID NO: 82112 - protein, 8 aa, Homo sapiens
  misc_feature: Table A; Target 82112; HLA-C*12:03; SSX1; ENSG00000126752; CTA
IQVEHPQM

SEQ ID NO: 82113 - protein, 8 aa, Homo sapiens
  misc_feature: Table A; Target 82113; HLA-C*16:01; SSX1; ENSG00000126752; CTA
IQVEHPQM

SEQ ID NO: 82114 - protein, 8 aa, Homo sapiens
  misc_feature: Table A; Target 82114; HLA-C*16:02; SSX1; ENSG00000126752; CTA
IQVEHPQM

SEQ ID NO: 82115 - protein, 8 aa, Homo sapiens
  misc_feature: Table A; Target 82115; HLA-C*16:04; SSX1; ENSG00000126752; CTA
IQVEHPQM

SEQ ID NO: 82116 - protein, 9 aa, Homo sapiens
  misc_feature: Table A; Target 82116; HLA-B*13:02; SSX1; ENSG00000126752; CTA
IQVEHPQMT

SEQ ID NO: 82117 - protein, 10 aa, Homo sapiens
  misc_feature: Table A; Target 82117; HLA-A*23:01; SSX1; ENSG00000126752; CTA
IQVEHPQMTF

SEQ ID NO: 82118 - protein, 10 aa, Homo sapiens
  misc_feature: Table A; Target 82118; HLA-A*24:02; SSX1; ENSG00000126752; CTA
IQVEHPQMTF

SEQ ID NO: 82119 - protein, 10 aa, Homo sapiens
  misc_feature: Table A; Target 82119; HLA-A*25:01; SSX1; ENSG00000126752; CTA
IQVEHPQMTF

SEQ ID NO: 82120 - protein, 10 aa, Homo sapiens
  misc_feature: Table A; Target 82120; HLA-A*26:01; SSX1; ENSG00000126752; CTA
IQVEHPQMTF

SEQ ID NO: 82121 - protein, 10 aa, Homo sapiens
  misc_feature: Table A; Target 82121; HLA-A*30:01; SSX1; ENSG00000126752; CTA
IQVEHPQMTF

SEQ ID NO: 82122 - protein, 10 aa, Homo sapiens
  misc_feature: Table A; Target 82122; HLA-A*32:01; SSX1; ENSG00000126752; CTA
IQVEHPQMTF

SEQ ID NO: 82123 - protein, 10 aa, Homo sapiens
  misc_feature: Table A; Target 82123; HLA-B*13:02; SSX1; ENSG00000126752; CTA
IQVEHPQMTF

SEQ ID NO: 82124 - protein, 10 aa, Homo sapiens
  misc_feature: Table A; Target 82124; HLA-B*15:03; SSX1; ENSG00000126752; CTA
IQVEHPQMTF

SEQ ID NO: 82125 - protein, 10 aa, Homo sapiens
  misc_feature: Table A; Target 82125; HLA-B*38:01; SSX1; ENSG00000126752; CTA
IQVEHPQMTF

SEQ ID NO: 82126 - protein, 10 aa, Homo sapiens
  misc_feature: Table A; Target 82126; HLA-B*46:01; SSX1; ENSG00000126752; CTA
IQVEHPQMTF

SEQ ID NO: 82127 - protein, 10 aa, Homo sapiens
  misc_feature: Table A; Target 82127; HLA-B*57:01; SSX1; ENSG00000126752; CTA
IQVEHPQMTF

SEQ ID NO: 82128 - protein, 10 aa, Homo sapiens
  misc_feature: Table A; Target 82128; HLA-B*58:01; SSX1; ENSG00000126752; CTA
IQVEHPQMTF

SEQ ID NO: 82129 - protein, 10 aa, Homo sapiens
  misc_feature: Table A; Target 82129; HLA-C*02:02; SSX1; ENSG00000126752; CTA
IQVEHPQMTF

SEQ ID NO: 82130 - protein, 10 aa, Homo sapiens
  misc_feature: Table A; Target 82130; HLA-C*07:04; SSX1; ENSG00000126752; CTA
IQVEHPQMTF

SEQ ID NO: 82131 - protein, 10 aa, Homo sapiens
  misc_feature: Table A; Target 82131; HLA-C*16:04; SSX1; ENSG00000126752; CTA
IQVEHPQMTF

SEQ ID NO: 82132 - protein, 9 aa, Homo sapiens
  misc_feature: Table A; Target 82132; HLA-A*01:01; SSX1; ENSG00000126752; CTA
KAFDDIATY

SEQ ID NO: 82133 - protein, 9 aa, Homo sapiens
  misc_feature: Table A; Target 82133; HLA-A*02:01; SSX1; ENSG00000126752; CTA
KAFDDIATY

SEQ ID NO: 82134 - protein, 9 aa, Homo sapiens
  misc_feature: Table A; Target 82134; HLA-A*02:03; SSX1; ENSG00000126752; CTA
KAFDDIATY

SEQ ID NO: 82135 - protein, 9 aa, Homo sapiens
  misc_feature: Table A; Target 82135; HLA-A*03:01; SSX1; ENSG00000126752; CTA
KAFDDIATY

SEQ ID NO: 82136 - protein, 9 aa, Homo sapiens
  misc_feature: Table A; Target 82136; HLA-A*03:02; SSX1; ENSG00000126752; CTA
KAFDDIATY

SEQ ID NO: 82137 - protein, 9 aa, Homo sapiens
  misc_feature: Table A; Target 82137; HLA-A*11:01; SSX1; ENSG00000126752; CTA
KAFDDIATY

SEQ ID NO: 82138 - protein, 9 aa, Homo sapiens
  misc_feature: Table A; Target 82138; HLA-A*23:01; SSX1; ENSG00000126752; CTA
KAFDDIATY

SEQ ID NO: 82139 - protein, 9 aa, Homo sapiens
  misc_feature: Table A; Target 82139; HLA-A*25:01; SSX1; ENSG00000126752; CTA
KAFDDIATY

SEQ ID NO: 82140 - protein, 9 aa, Homo sapiens
  misc_feature: Table A; Target 82140; HLA-A*26:01; SSX1; ENSG00000126752; CTA
KAFDDIATY

SEQ ID NO: 82141 - protein, 9 aa, Homo sapiens
  misc_feature: Table A; Target 82141; HLA-A*29:02; SSX1; ENSG00000126752; CTA
KAFDDIATY

SEQ ID NO: 82142 - protein, 9 aa, Homo sapiens
  misc_feature: Table A; Target 82142; HLA-A*30:02; SSX1; ENSG00000126752; CTA
KAFDDIATY

SEQ ID NO: 82143 - protein, 9 aa, Homo sapiens
  misc_feature: Table A; Target 82143; HLA-A*31:01; SSX1; ENSG00000126752; CTA
KAFDDIATY

SEQ ID NO: 82144 - protein, 9 aa, Homo sapiens
  misc_feature: Table A; Target 82144; HLA-A*32:01; SSX1; ENSG00000126752; CTA
KAFDDIATY

SEQ ID NO: 82145 - protein, 9 aa, Homo sapiens
  misc_feature: Table A; Target 82145; HLA-A*33:01; SSX1; ENSG00000126752; CTA
KAFDDIATY

SEQ ID NO: 82146 - protein, 9 aa, Homo sapiens
  misc_feature: Table A; Target 82146; HLA-A*33:03; SSX1; ENSG00000126752; CTA
KAFDDIATY

SEQ ID NO: 82147 - protein, 9 aa, Homo sapiens
  misc_feature: Table A; Target 82147; HLA-A*68:01; SSX1; ENSG00000126752; CTA
KAFDDIATY

SEQ ID NO: 82148 - protein, 9 aa, Homo sapiens
  misc_feature: Table A; Target 82148; HLA-B*15:03; SSX1; ENSG00000126752; CTA
KAFDDIATY

SEQ ID NO: 82149 - protein, 9 aa, Homo sapiens
  misc_feature: Table A; Target 82149; HLA-B*18:01; SSX1; ENSG00000126752; CTA
KAFDDIATY

SEQ ID NO: 82150 - protein, 9 aa, Homo sapiens
  misc_feature: Table A; Target 82150; HLA-B*27:02; SSX1; ENSG00000126752; CTA
KAFDDIATY

SEQ ID NO: 82151 - protein, 9 aa, Homo sapiens
  misc_feature: Table A; Target 82151; HLA-B*27:05; SSX1; ENSG00000126752; CTA
KAFDDIATY

SEQ ID NO: 82152 - protein, 9 aa, Homo sapiens
  misc_feature: Table A; Target 82152; HLA-B*35:03; SSX1; ENSG00000126752; CTA
KAFDDIATY

SEQ ID NO: 82153 - protein, 9 aa, Homo sapiens
  misc_feature: Table A; Target 82153; HLA-B*38:01; SSX1; ENSG00000126752; CTA
KAFDDIATY

SEQ ID NO: 82154 - protein, 9 aa, Homo sapiens
  misc_feature: Table A; Target 82154; HLA-B*39:01; SSX1; ENSG00000126752; CTA
KAFDDIATY

SEQ ID NO: 82155 - protein, 9 aa, Homo sapiens
  misc_feature: Table A; Target 82155; HLA-B*44:02; SSX1; ENSG00000126752; CTA
KAFDDIATY

SEQ ID NO: 82156 - protein, 9 aa, Homo sapiens
  misc_feature: Table A; Target 82156; HLA-B*44:03; SSX1; ENSG00000126752; CTA
KAFDDIATY

SEQ ID NO: 82157 - protein, 9 aa, Homo sapiens
  misc_feature: Table A; Target 82157; HLA-B*46:01; SSX1; ENSG00000126752; CTA
KAFDDIATY

SEQ ID NO: 82158 - protein, 9 aa, Homo sapiens
  misc_feature: Table A; Target 82158; HLA-B*54:01; SSX1; ENSG00000126752; CTA
KAFDDIATY

SEQ ID NO: 82159 - protein, 9 aa, Homo sapiens
  misc_feature: Table A; Target 82159; HLA-B*55:01; SSX1; ENSG00000126752; CTA
KAFDDIATY

SEQ ID NO: 82160 - protein, 9 aa, Homo sapiens
  misc_feature: Table A; Target 82160; HLA-B*56:01; SSX1; ENSG00000126752; CTA
KAFDDIATY

SEQ ID NO: 82161 - protein, 9 aa, Homo sapiens
  misc_feature: Table A; Target 82161; HLA-B*57:01; SSX1; ENSG00000126752; CTA
KAFDDIATY

SEQ ID NO: 82162 - protein, 9 aa, Homo sapiens
  misc_feature: Table A; Target 82162; HLA-B*58:01; SSX1; ENSG00000126752; CTA
KAFDDIATY

SEQ ID NO: 82163 - protein, 9 aa, Homo sapiens
  misc_feature: Table A; Target 82163; HLA-C*01:02; SSX1; ENSG00000126752; CTA
KAFDDIATY

SEQ ID NO: 82164 - protein, 9 aa, Homo sapiens
  misc_feature: Table A; Target 82164; HLA-C*02:02; SSX1; ENSG00000126752; CTA
KAFDDIATY

SEQ ID NO: 82165 - protein, 9 aa, Homo sapiens
  misc_feature: Table A; Target 82165; HLA-C*03:03; SSX1; ENSG00000126752; CTA
KAFDDIATY

SEQ ID NO: 82166 - protein, 9 aa, Homo sapiens
  misc_feature: Table A; Target 82166; HLA-C*03:04; SSX1; ENSG00000126752; CTA
KAFDDIATY

SEQ ID NO: 82167 - protein, 9 aa, Homo sapiens
  misc_feature: Table A; Target 82167; HLA-C*05:01; SSX1; ENSG00000126752; CTA
KAFDDIATY

SEQ ID NO: 82168 - protein, 9 aa, Homo sapiens
  misc_feature: Table A; Target 82168; HLA-C*07:04; SSX1; ENSG00000126752; CTA
KAFDDIATY

SEQ ID NO: 82169 - protein, 9 aa, Homo sapiens
  misc_feature: Table A; Target 82169; HLA-C*07:06; SSX1; ENSG00000126752; CTA
KAFDDIATY

SEQ ID NO: 82170 - protein, 9 aa, Homo sapiens
  misc_feature: Table A; Target 82170; HLA-C*12:03; SSX1; ENSG00000126752; CTA
KAFDDIATY

SEQ ID NO: 82171 - protein, 9 aa, Homo sapiens
  misc_feature: Table A; Target 82171; HLA-C*14:02; SSX1; ENSG00000126752; CTA
KAFDDIATY

SEQ ID NO: 82172 - protein, 9 aa, Homo sapiens
  misc_feature: Table A; Target 82172; HLA-C*16:01; SSX1; ENSG00000126752; CTA
KAFDDIATY

SEQ ID NO: 82173 - protein, 9 aa, Homo sapiens
  misc_feature: Table A; Target 82173; HLA-C*16:02; SSX1; ENSG00000126752; CTA
KAFDDIATY

SEQ ID NO: 82174 - protein, 9 aa, Homo sapiens
  misc_feature: Table A; Target 82174; HLA-C*16:04; SSX1; ENSG00000126752; CTA
KAFDDIATY

SEQ ID NO: 82175 - protein, 10 aa, Homo sapiens
  misc_feature: Table A; Target 82175; HLA-A*01:01; SSX1; ENSG00000126752; CTA
KAFDDIATYF

SEQ ID NO: 82176 - protein, 10 aa, Homo sapiens
  misc_feature: Table A; Target 82176; HLA-A*02:01; SSX1; ENSG00000126752; CTA
KAFDDIATYF

SEQ ID NO: 82177 - protein, 10 aa, Homo sapiens
  misc_feature: Table A; Target 82177; HLA-A*02:03; SSX1; ENSG00000126752; CTA
KAFDDIATYF

SEQ ID NO: 82178 - protein, 10 aa, Homo sapiens
  misc_feature: Table A; Target 82178; HLA-A*02:04; SSX1; ENSG00000126752; CTA
KAFDDIATYF

SEQ ID NO: 82179 - protein, 10 aa, Homo sapiens
  misc_feature: Table A; Target 82179; HLA-A*02:07; SSX1; ENSG00000126752; CTA
KAFDDIATYF

SEQ ID NO: 82180 - protein, 10 aa, Homo sapiens
  misc_feature: Table A; Target 82180; HLA-A*03:01; SSX1; ENSG00000126752; CTA
KAFDDIATYF

SEQ ID NO: 82181 - protein, 10 aa, Homo sapiens
  misc_feature: Table A; Target 82181; HLA-A*03:02; SSX1; ENSG00000126752; CTA
KAFDDIATYF

SEQ ID NO: 82182 - protein, 10 aa, Homo sapiens
  misc_feature: Table A; Target 82182; HLA-A*23:01; SSX1; ENSG00000126752; CTA
KAFDDIATYF

SEQ ID NO: 82183 - protein, 10 aa, Homo sapiens
  misc_feature: Table A; Target 82183; HLA-A*24:02; SSX1; ENSG00000126752; CTA
KAFDDIATYF

SEQ ID NO: 82184 - protein, 10 aa, Homo sapiens
  misc_feature: Table A; Target 82184; HLA-A*25:01; SSX1; ENSG00000126752; CTA
KAFDDIATYF

SEQ ID NO: 82185 - protein, 10 aa, Homo sapiens
  misc_feature: Table A; Target 82185; HLA-A*26:01; SSX1; ENSG00000126752; CTA
KAFDDIATYF

SEQ ID NO: 82186 - protein, 10 aa, Homo sapiens
  misc_feature: Table A; Target 82186; HLA-A*29:02; SSX1; ENSG00000126752; CTA
KAFDDIATYF

SEQ ID NO: 82187 - protein, 10 aa, Homo sapiens
  misc_feature: Table A; Target 82187; HLA-A*30:02; SSX1; ENSG00000126752; CTA
KAFDDIATYF

SEQ ID NO: 82188 - protein, 10 aa, Homo sapiens
  misc_feature: Table A; Target 82188; HLA-A*31:01; SSX1; ENSG00000126752; CTA
KAFDDIATYF

SEQ ID NO: 82189 - protein, 10 aa, Homo sapiens
  misc_feature: Table A; Target 82189; HLA-A*32:01; SSX1; ENSG00000126752; CTA
KAFDDIATYF

SEQ ID NO: 82190 - protein, 10 aa, Homo sapiens
  misc_feature: Table A; Target 82190; HLA-A*68:02; SSX1; ENSG00000126752; CTA
KAFDDIATYF

SEQ ID NO: 82191 - protein, 10 aa, Homo sapiens
  misc_feature: Table A; Target 82191; HLA-B*13:02; SSX1; ENSG00000126752; CTA
KAFDDIATYF

SEQ ID NO: 82192 - protein, 10 aa, Homo sapiens
  misc_feature: Table A; Target 82192; HLA-B*15:01; SSX1; ENSG00000126752; CTA
KAFDDIATYF

SEQ ID NO: 82193 - protein, 10 aa, Homo sapiens
  misc_feature: Table A; Target 82193; HLA-B*15:03; SSX1; ENSG00000126752; CTA
KAFDDIATYF

SEQ ID NO: 82194 - protein, 10 aa, Homo sapiens
  misc_feature: Table A; Target 82194; HLA-B*27:02; SSX1; ENSG00000126752; CTA
KAFDDIATYF

SEQ ID NO: 82195 - protein, 10 aa, Homo sapiens
  misc_feature: Table A; Target 82195; HLA-B*35:01; SSX1; ENSG00000126752; CTA
KAFDDIATYF

SEQ ID NO: 82196 - protein, 10 aa, Homo sapiens
  misc_feature: Table A; Target 82196; HLA-B*44:02; SSX1; ENSG00000126752; CTA
KAFDDIATYF

SEQ ID NO: 82197 - protein, 10 aa, Homo sapiens
  misc_feature: Table A; Target 82197; HLA-B*44:03; SSX1; ENSG00000126752; CTA
KAFDDIATYF

SEQ ID NO: 82198 - protein, 10 aa, Homo sapiens
  misc_feature: Table A; Target 82198; HLA-B*46:01; SSX1; ENSG00000126752; CTA
KAFDDIATYF

SEQ ID NO: 82199 - protein, 10 aa, Homo sapiens
  misc_feature: Table A; Target 82199; HLA-B*58:01; SSX1; ENSG00000126752; CTA
KAFDDIATYF

SEQ ID NO: 82200 - protein, 10 aa, Homo sapiens
  misc_feature: Table A; Target 82200; HLA-C*02:02; SSX1; ENSG00000126752; CTA
KAFDDIATYF

SEQ ID NO: 82201 - protein, 10 aa, Homo sapiens
  misc_feature: Table A; Target 82201; HLA-C*05:01; SSX1; ENSG00000126752; CTA
KAFDDIATYF

SEQ ID NO: 82202 - protein, 10 aa, Homo sapiens
  misc_feature: Table A; Target 82202; HLA-C*12:03; SSX1; ENSG00000126752; CTA
KAFDDIATYF

SEQ ID NO: 82203 - protein, 10 aa, Homo sapiens
  misc_feature: Table A; Target 82203; HLA-C*16:04; SSX1; ENSG00000126752; CTA
KAFDDIATYF

SEQ ID NO: 82204 - protein, 8 aa, Homo sapiens
  misc_feature: Table A; Target 82204; HLA-B*08:01; SSX1; ENSG00000126752; CTA
KAMTKLGF

SEQ ID NO: 82205 - protein, 8 aa, Homo sapiens
  misc_feature: Table A; Target 82205; HLA-C*16:01; SSX1; ENSG00000126752; CTA
KAMTKLGF

SEQ ID NO: 82206 - protein, 9 aa, Homo sapiens
  misc_feature: Table A; Target 82206; HLA-A*03:01; SSX1; ENSG00000126752; CTA
KAMTKLGFK

SEQ ID NO: 82207 - protein, 10 aa, Homo sapiens
  misc_feature: Table A; Target 82207; HLA-A*03:01; SSX1; ENSG00000126752; CTA
KANISEKINK

SEQ ID NO: 82208 - protein, 10 aa, Homo sapiens
  misc_feature: Table A; Target 82208; HLA-A*03:02; SSX1; ENSG00000126752; CTA
KANISEKINK

SEQ ID NO: 82209 - protein, 10 aa, Homo sapiens
  misc_feature: Table A; Target 82209; HLA-A*11:01; SSX1; ENSG00000126752; CTA
KANISEKINK

SEQ ID NO: 82210 - protein, 10 aa, Homo sapiens
  misc_feature: Table A; Target 82210; HLA-A*31:01; SSX1; ENSG00000126752; CTA
KANISEKINK

SEQ ID NO: 82211 - protein, 11 aa, Homo sapiens
  misc_feature: Table A; Target 82211; HLA-A*31:01; SSX1; ENSG00000126752; CTA
KANISEKINKR

SEQ ID NO: 82212 - protein, 8 aa, Homo sapiens
  misc_feature: Table A; Target 82212; HLA-C*16:01; SSX1; ENSG00000126752; CTA
KASEKRSK

SEQ ID NO: 82213 - protein, 9 aa, Homo sapiens
  misc_feature: Table A; Target 82213; HLA-A*03:01; SSX1; ENSG00000126752; CTA
KINKRSGPK

SEQ ID NO: 82214 - protein, 9 aa, Homo sapiens
  misc_feature: Table A; Target 82214; HLA-A*31:01; SSX1; ENSG00000126752; CTA
KISYVYMKR

SEQ ID NO: 82215 - protein, 8 aa, Homo sapiens
  misc_feature: Table A; Target 82215; HLA-B*08:01; SSX1; ENSG00000126752; CTA
KLGFKVTL

SEQ ID NO: 82216 - protein, 11 aa, Homo sapiens
  misc_feature: Table A; Target 82216; HLA-B*15:01; SSX1; ENSG00000126752; CTA
KQATDFQGNDF

SEQ ID NO: 82217 - protein, 9 aa, Homo sapiens
  misc_feature: Table A; Target 82217; HLA-A*02:01; SSX1; ENSG00000126752; CTA
KQLVIYEEI

SEQ ID NO: 82218 - protein, 9 aa, Homo sapiens
  misc_feature: Table A; Target 82218; HLA-A*02:04; SSX1; ENSG00000126752; CTA
KQLVIYEEI

SEQ ID NO: 82219 - protein, 9 aa, Homo sapiens
  misc_feature: Table A; Target 82219; HLA-A*02:07; SSX1; ENSG00000126752; CTA
KQLVIYEEI

SEQ ID NO: 82220 - protein, 9 aa, Homo sapiens
  misc_feature: Table A; Target 82220; HLA-A*24:02; SSX1; ENSG00000126752; CTA
KQLVIYEEI

SEQ ID NO: 82221 - protein, 9 aa, Homo sapiens
  misc_feature: Table A; Target 82221; HLA-A*30:01; SSX1; ENSG00000126752; CTA
KQLVIYEEI

SEQ ID NO: 82222 - protein, 9 aa, Homo sapiens
  misc_feature: Table A; Target 82222; HLA-B*13:02; SSX1; ENSG00000126752; CTA
KQLVIYEEI

SEQ ID NO: 82223 - protein, 9 aa, Homo sapiens
  misc_feature: Table A; Target 82223; HLA-C*16:04; SSX1; ENSG00000126752; CTA
KQLVIYEEI

SEQ ID NO: 82224 - protein, 8 aa, Homo sapiens
  misc_feature: Table A; Target 82224; HLA-B*15:03; SSX1; ENSG00000126752; CTA
KYSEKISY

SEQ ID NO: 82225 - protein, 8 aa, Homo sapiens
  misc_feature: Table A; Target 82225; HLA-C*14:02; SSX1; ENSG00000126752; CTA
KYSEKISY

SEQ ID NO: 82226 - protein, 8 aa, Homo sapiens
  misc_feature: Table A; Target 82226; HLA-C*16:01; SSX1; ENSG00000126752; CTA
KYSEKISY

SEQ ID NO: 82227 - protein, 9 aa, Homo sapiens
  misc_feature: Table A; Target 82227; HLA-A*24:02; SSX1; ENSG00000126752; CTA
KYSEKISYV

SEQ ID NO: 82228 - protein, 9 aa, Homo sapiens
  misc_feature: Table A; Target 82228; HLA-C*02:02; SSX1; ENSG00000126752; CTA
KYSEKISYV

SEQ ID NO: 82229 - protein, 9 aa, Homo sapiens
  misc_feature: Table A; Target 82229; HLA-C*16:02; SSX1; ENSG00000126752; CTA
KYSEKISYV

SEQ ID NO: 82230 - protein, 10 aa, Homo sapiens
  misc_feature: Table A; Target 82230; HLA-A*23:01; SSX1; ENSG00000126752; CTA
KYSEKISYVY

SEQ ID NO: 82231 - protein, 10 aa, Homo sapiens
  misc_feature: Table A; Target 82231; HLA-A*24:02; SSX1; ENSG00000126752; CTA
KYSEKISYVY

SEQ ID NO: 82232 - protein, 10 aa, Homo sapiens
  misc_feature: Table A; Target 82232; HLA-A*29:02; SSX1; ENSG00000126752; CTA
KYSEKISYVY

SEQ ID NO: 82233 - protein, 10 aa, Homo sapiens
  misc_feature: Table A; Target 82233; HLA-A*30:02; SSX1; ENSG00000126752; CTA
KYSEKISYVY

SEQ ID NO: 82234 - protein, 11 aa, Homo sapiens
  misc_feature: Table A; Target 82234; HLA-A*24:02; SSX1; ENSG00000126752; CTA
KYSEKISYVYM

SEQ ID NO: 82235 - protein, 9 aa, Homo sapiens
  misc_feature: Table A; Target 82235; HLA-B*15:03; SSX1; ENSG00000126752; CTA
MKYSEKISY

SEQ ID NO: 82236 - protein, 8 aa, Homo sapiens
  misc_feature: Table A; Target 82236; HLA-B*08:01; SSX1; ENSG00000126752; CTA
MTKLGFKV

SEQ ID NO: 82237 - protein, 8 aa, Homo sapiens
  misc_feature: Table A; Target 82237; HLA-B*40:02; SSX1; ENSG00000126752; CTA
MTKLGFKV

SEQ ID NO: 82238 - protein, 9 aa, Homo sapiens
  misc_feature: Table A; Target 82238; HLA-A*33:01; SSX1; ENSG00000126752; CTA
NDFDNDHNR

SEQ ID NO: 82239 - protein, 9 aa, Homo sapiens
  misc_feature: Table A; Target 82239; HLA-A*33:03; SSX1; ENSG00000126752; CTA
NDFDNDHNR

SEQ ID NO: 82240 - protein, 9 aa, Homo sapiens
  misc_feature: Table A; Target 82240; HLA-A*68:01; SSX1; ENSG00000126752; CTA
NDFDNDHNR

SEQ ID NO: 82241 - protein, 9 aa, Homo sapiens
  misc_feature: Table A; Target 82241; HLA-A*68:02; SSX1; ENSG00000126752; CTA
NDFDNDHNR

SEQ ID NO: 82242 - protein, 9 aa, Homo sapiens
  misc_feature: Table A; Target 82242; HLA-B*27:02; SSX1; ENSG00000126752; CTA
NDFDNDHNR

SEQ ID NO: 82243 - protein, 9 aa, Homo sapiens
  misc_feature: Table A; Target 82243; HLA-C*07:06; SSX1; ENSG00000126752; CTA
NDFDNDHNR

SEQ ID NO: 82244 - protein, 9 aa, Homo sapiens
  misc_feature: Table A; Target 82244; HLA-A*33:01; SSX1; ENSG00000126752; CTA
NGDDTFAKR

SEQ ID NO: 82245 - protein, 9 aa, Homo sapiens
  misc_feature: Table A; Target 82245; HLA-A*33:03; SSX1; ENSG00000126752; CTA
NGDDTFAKR

SEQ ID NO: 82246 - protein, 9 aa, Homo sapiens
  misc_feature: Table A; Target 82246; HLA-A*68:01; SSX1; ENSG00000126752; CTA
NGDDTFAKR

SEQ ID NO: 82247 - protein, 9 aa, Homo sapiens
  misc_feature: Table A; Target 82247; HLA-C*05:01; SSX1; ENSG00000126752; CTA
NGDDTFAKR

SEQ ID NO: 82248 - protein, 9 aa, Homo sapiens
  misc_feature: Table A; Target 82248; HLA-C*07:06; SSX1; ENSG00000126752; CTA
NGDDTFAKR

SEQ ID NO: 82249 - protein, 11 aa, Homo sapiens
  misc_feature: Table A; Target 82249; HLA-A*33:01; SSX1; ENSG00000126752; CTA
NGDDTFAKRPR

SEQ ID NO: 82250 - protein, 9 aa, Homo sapiens
  misc_feature: Table A; Target 82250; HLA-A*33:01; SSX1; ENSG00000126752; CTA
NISEKINKR

SEQ ID NO: 82251 - protein, 9 aa, Homo sapiens
  misc_feature: Table A; Target 82251; HLA-A*33:03; SSX1; ENSG00000126752; CTA
NISEKINKR

SEQ ID NO: 82252 - protein, 9 aa, Homo sapiens
  misc_feature: Table A; Target 82252; HLA-A*68:01; SSX1; ENSG00000126752; CTA
NISEKINKR

SEQ ID NO: 82253 - protein, 9 aa, Homo sapiens
  misc_feature: Table A; Target 82253; HLA-C*07:06; SSX1; ENSG00000126752; CTA
NISEKINKR

SEQ ID NO: 82254 - protein, 8 aa, Homo sapiens
  misc_feature: Table A; Target 82254; HLA-B*08:01; SSX1; ENSG00000126752; CTA
NYKAMTKL

SEQ ID NO: 82255 - protein, 8 aa, Homo sapiens
  misc_feature: Table A; Target 82255; HLA-C*07:02; SSX1; ENSG00000126752; CTA
NYKAMTKL

SEQ ID NO: 82256 - protein, 10 aa, Homo sapiens
  misc_feature: Table A; Target 82256; HLA-B*15:03; SSX1; ENSG00000126752; CTA
QATDFQGNDF

SEQ ID NO: 82257 - protein, 10 aa, Homo sapiens
  misc_feature: Table A; Target 82257; HLA-B*27:02; SSX1; ENSG00000126752; CTA
QATDFQGNDF

SEQ ID NO: 82258 - protein, 10 aa, Homo sapiens
  misc_feature: Table A; Target 82258; HLA-B*35:01; SSX1; ENSG00000126752; CTA
QATDFQGNDF

SEQ ID NO: 82259 - protein, 10 aa, Homo sapiens
  misc_feature: Table A; Target 82259; HLA-B*38:01; SSX1; ENSG00000126752; CTA
QATDFQGNDF

SEQ ID NO: 82260 - protein, 10 aa, Homo sapiens
  misc_feature: Table A; Target 82260; HLA-B*39:01; SSX1; ENSG00000126752; CTA
QATDFQGNDF

SEQ ID NO: 82261 - protein, 10 aa, Homo sapiens
  misc_feature: Table A; Target 82261; HLA-C*02:02; SSX1; ENSG00000126752; CTA
QATDFQGNDF

SEQ ID NO: 82262 - protein, 10 aa, Homo sapiens
  misc_feature: Table A; Target 82262; HLA-C*04:01; SSX1; ENSG00000126752; CTA
QATDFQGNDF

SEQ ID NO: 82263 - protein, 10 aa, Homo sapiens
  misc_feature: Table A; Target 82263; HLA-C*16:02; SSX1; ENSG00000126752; CTA
QATDFQGNDF

SEQ ID NO: 82264 - protein, 10 aa, Homo sapiens
  misc_feature: Table A; Target 82264; HLA-C*16:04; SSX1; ENSG00000126752; CTA
QATDFQGNDF

SEQ ID NO: 82265 - protein, 11 aa, Homo sapiens
  misc_feature: Table A; Target 82265; HLA-A*31:01; SSX1; ENSG00000126752; CTA
QGNDFDNDHNR

SEQ ID NO: 82266 - protein, 11 aa, Homo sapiens
  misc_feature: Table A; Target 82266; HLA-A*33:01; SSX1; ENSG00000126752; CTA
QGNDFDNDHNR

SEQ ID NO: 82267 - protein, 11 aa, Homo sapiens
  misc_feature: Table A; Target 82267; HLA-A*33:03; SSX1; ENSG00000126752; CTA
QGNDFDNDHNR

SEQ ID NO: 82268 - protein, 11 aa, Homo sapiens
  misc_feature: Table A; Target 82268; HLA-A*68:01; SSX1; ENSG00000126752; CTA
QGNDFDNDHNR

SEQ ID NO: 82269 - protein, 11 aa, Homo sapiens
  misc_feature: Table A; Target 82269; HLA-C*07:06; SSX1; ENSG00000126752; CTA
QGNDFDNDHNR

SEQ ID NO: 82270 - protein, 9 aa, Homo sapiens
  misc_feature: Table A; Target 82270; HLA-A*25:01; SSX1; ENSG00000126752; CTA
QVEHPQMTF

SEQ ID NO: 82271 - protein, 9 aa, Homo sapiens
  misc_feature: Table A; Target 82271; HLA-A*32:01; SSX1; ENSG00000126752; CTA
QVEHPQMTF

SEQ ID NO: 82272 - protein, 9 aa, Homo sapiens
  misc_feature: Table A; Target 82272; HLA-B*15:01; SSX1; ENSG00000126752; CTA
QVEHPQMTF

SEQ ID NO: 82273 - protein, 9 aa, Homo sapiens
  misc_feature: Table A; Target 82273; HLA-B*57:01; SSX1; ENSG00000126752; CTA
QVEHPQMTF

SEQ ID NO: 82274 - protein, 9 aa, Homo sapiens
  misc_feature: Table A; Target 82274; HLA-B*58:01; SSX1; ENSG00000126752; CTA
QVEHPQMTF

SEQ ID NO: 82275 - protein, 9 aa, Homo sapiens
  misc_feature: Table A; Target 82275; HLA-C*05:01; SSX1; ENSG00000126752; CTA
QVEHPQMTF

SEQ ID NO: 82276 - protein, 9 aa, Homo sapiens
  misc_feature: Table A; Target 82276; HLA-C*07:04; SSX1; ENSG00000126752; CTA
QVEHPQMTF

SEQ ID NO: 82277 - protein, 9 aa, Homo sapiens
  misc_feature: Table A; Target 82277; HLA-A*03:01; SSX1; ENSG00000126752; CTA
RIIPKIMPK

SEQ ID NO: 82278 - protein, 9 aa, Homo sapiens
  misc_feature: Table A; Target 82278; HLA-A*03:02; SSX1; ENSG00000126752; CTA
RIIPKIMPK

SEQ ID NO: 82279 - protein, 9 aa, Homo sapiens
  misc_feature: Table A; Target 82279; HLA-A*11:01; SSX1; ENSG00000126752; CTA
RIIPKIMPK

SEQ ID NO: 82280 - protein, 9 aa, Homo sapiens
  misc_feature: Table A; Target 82280; HLA-A*31:01; SSX1; ENSG00000126752; CTA
RIIPKIMPK

SEQ ID NO: 82281 - protein, 10 aa, Homo sapiens
  misc_feature: Table A; Target 82281; HLA-A*03:01; SSX1; ENSG00000126752; CTA
RIIPKIMPKK

SEQ ID NO: 82282 - protein, 9 aa, Homo sapiens
  misc_feature: Table A; Target 82282; HLA-A*32:01; SSX1; ENSG00000126752; CTA
RIQVEHPQM

SEQ ID NO: 82283 - protein, 9 aa, Homo sapiens
  misc_feature: Table A; Target 82283; HLA-B*37:01; SSX1; ENSG00000126752; CTA
RIQVEHPQM

SEQ ID NO: 82284 - protein, 9 aa, Homo sapiens
  misc_feature: Table A; Target 82284; HLA-C*16:01; SSX1; ENSG00000126752; CTA
RIQVEHPQM

SEQ ID NO: 82285 - protein, 11 aa, Homo sapiens
  misc_feature: Table A; Target 82285; HLA-B*57:01; SSX1; ENSG00000126752; CTA
RIQVEHPQMTF

SEQ ID NO: 82286 - protein, 11 aa, Homo sapiens
  misc_feature: Table A; Target 82286; HLA-B*58:01; SSX1; ENSG00000126752; CTA
RIQVEHPQMTF

SEQ ID NO: 82287 - protein, 9 aa, Homo sapiens
  misc_feature: Table A; Target 82287; HLA-A*02:04; SSX1; ENSG00000126752; CTA
RLHRIIPKI

SEQ ID NO: 82288 - protein, 9 aa, Homo sapiens
  misc_feature: Table A; Target 82288; HLA-A*03:01; SSX1; ENSG00000126752; CTA
RNYKAMTKL

SEQ ID NO: 82289 - protein, 11 aa, Homo sapiens
  misc_feature: Table A; Target 82289; HLA-B*07:02; SSX1; ENSG00000126752; CTA
RPRDDAKASEK

SEQ ID NO: 82290 - protein, 11 aa, Homo sapiens
  misc_feature: Table A; Target 82290; HLA-C*07:02; SSX1; ENSG00000126752; CTA
RPRDDAKASEK

SEQ ID NO: 82291 - protein, 11 aa, Homo sapiens
  misc_feature: Table A; Target 82291; HLA-A*30:02; SSX1; ENSG00000126752; CTA
RSKAFDDIATY

SEQ ID NO: 82292 - protein, 11 aa, Homo sapiens
  misc_feature: Table A; Target 82292; HLA-A*31:01; SSX1; ENSG00000126752; CTA
RSKAFDDIATY

SEQ ID NO: 82293 - protein, 11 aa, Homo sapiens
  misc_feature: Table A; Target 82293; HLA-B*15:01; SSX1; ENSG00000126752; CTA
RSKAFDDIATY

SEQ ID NO: 82294 - protein, 11 aa, Homo sapiens
  misc_feature: Table A; Target 82294; HLA-B*46:01; SSX1; ENSG00000126752; CTA
RSKAFDDIATY

SEQ ID NO: 82295 - protein, 11 aa, Homo sapiens
  misc_feature: Table A; Target 82295; HLA-B*57:01; SSX1; ENSG00000126752; CTA
RSKAFDDIATY

SEQ ID NO: 82296 - protein, 11 aa, Homo sapiens
  misc_feature: Table A; Target 82296; HLA-B*58:01; SSX1; ENSG00000126752; CTA
RSKAFDDIATY

SEQ ID NO: 82297 - protein, 8 aa, Homo sapiens
  misc_feature: Table A; Target 82297; HLA-A*30:01; SSX1; ENSG00000126752; CTA
SEKISYVY

SEQ ID NO: 82298 - protein, 8 aa, Homo sapiens
  misc_feature: Table A; Target 82298; HLA-B*08:01; SSX1; ENSG00000126752; CTA
SEKISYVY

SEQ ID NO: 82299 - protein, 8 aa, Homo sapiens
  misc_feature: Table A; Target 82299; HLA-B*15:01; SSX1; ENSG00000126752; CTA
SEKISYVY

SEQ ID NO: 82300 - protein, 8 aa, Homo sapiens
  misc_feature: Table A; Target 82300; HLA-B*15:03; SSX1; ENSG00000126752; CTA
SEKISYVY

SEQ ID NO: 82301 - protein, 8 aa, Homo sapiens
  misc_feature: Table A; Target 82301; HLA-B*37:01; SSX1; ENSG00000126752; CTA
SEKISYVY

SEQ ID NO: 82302 - protein, 8 aa, Homo sapiens
  misc_feature: Table A; Target 82302; HLA-B*40:02; SSX1; ENSG00000126752; CTA
SEKISYVY

SEQ ID NO: 82303 - protein, 8 aa, Homo sapiens
  misc_feature: Table A; Target 82303; HLA-B*44:02; SSX1; ENSG00000126752; CTA
SEKISYVY

SEQ ID NO: 82304 - protein, 8 aa, Homo sapiens
  misc_feature: Table A; Target 82304; HLA-B*44:03; SSX1; ENSG00000126752; CTA
SEKISYVY

SEQ ID NO: 82305 - protein, 8 aa, Homo sapiens
  misc_feature: Table A; Target 82305; HLA-C*07:01; SSX1; ENSG00000126752; CTA
SEKISYVY

SEQ ID NO: 82306 - protein, 8 aa, Homo sapiens
  misc_feature: Table A; Target 82306; HLA-C*07:04; SSX1; ENSG00000126752; CTA
SEKISYVY

SEQ ID NO: 82307 - protein, 8 aa, Homo sapiens
  misc_feature: Table A; Target 82307; HLA-C*16:04; SSX1; ENSG00000126752; CTA
SEKISYVY

SEQ ID NO: 82308 - protein, 9 aa, Homo sapiens
  misc_feature: Table A; Target 82308; HLA-A*30:01; SSX1; ENSG00000126752; CTA
SEKISYVYM

SEQ ID NO: 82309 - protein, 9 aa, Homo sapiens
  misc_feature: Table A; Target 82309; HLA-B*18:01; SSX1; ENSG00000126752; CTA
SEKISYVYM

SEQ ID NO: 82310 - protein, 9 aa, Homo sapiens
  misc_feature: Table A; Target 82310; HLA-B*37:01; SSX1; ENSG00000126752; CTA
SEKISYVYM

SEQ ID NO: 82311 - protein, 9 aa, Homo sapiens
  misc_feature: Table A; Target 82311; HLA-B*40:01; SSX1; ENSG00000126752; CTA
SEKISYVYM

SEQ ID NO: 82312 - protein, 9 aa, Homo sapiens
  misc_feature: Table A; Target 82312; HLA-B*40:02; SSX1; ENSG00000126752; CTA
SEKISYVYM

SEQ ID NO: 82313 - protein, 9 aa, Homo sapiens
  misc_feature: Table A; Target 82313; HLA-B*44:02; SSX1; ENSG00000126752; CTA
SEKISYVYM

SEQ ID NO: 82314 - protein, 9 aa, Homo sapiens
  misc_feature: Table A; Target 82314; HLA-B*44:03; SSX1; ENSG00000126752; CTA
SEKISYVYM

SEQ ID NO: 82315 - protein, 9 aa, Homo sapiens
  misc_feature: Table A; Target 82315; HLA-B*49:01; SSX1; ENSG00000126752; CTA
SEKISYVYM

SEQ ID NO: 82316 - protein, 9 aa, Homo sapiens
  misc_feature: Table A; Target 82316; HLA-C*04:01; SSX1; ENSG00000126752; CTA
SEKISYVYM

SEQ ID NO: 82317 - protein, 10 aa, Homo sapiens
  misc_feature: Table A; Target 82317; HLA-B*15:03; SSX1; ENSG00000126752; CTA
SKAFDDIATY

SEQ ID NO: 82318 - protein, 9 aa, Homo sapiens
  misc_feature: Table A; Target 82318; HLA-A*29:02; SSX1; ENSG00000126752; CTA
SYVYMKRNY

SEQ ID NO: 82319 - protein, 8 aa, Homo sapiens
  misc_feature: Table A; Target 82319; HLA-B*18:01; SSX1; ENSG00000126752; CTA
TDFQGNDF

SEQ ID NO: 82320 - protein, 8 aa, Homo sapiens
  misc_feature: Table A; Target 82320; HLA-B*37:01; SSX1; ENSG00000126752; CTA
TDFQGNDF

SEQ ID NO: 82321 - protein, 10 aa, Homo sapiens
  misc_feature: Table A; Target 82321; HLA-C*07:01; SSX1; ENSG00000126752; CTA
TDFQGNDFDN

SEQ ID NO: 82322 - protein, 9 aa, Homo sapiens
  misc_feature: Table A; Target 82322; HLA-A*03:01; SSX1; ENSG00000126752; CTA
TLPPFMCNK

SEQ ID NO: 82323 - protein, 9 aa, Homo sapiens
  misc_feature: Table A; Target 82323; HLA-A*03:02; SSX1; ENSG00000126752; CTA
TLPPFMCNK

SEQ ID NO: 82324 - protein, 8 aa, Homo sapiens
  misc_feature: Table A; Target 82324; HLA-A*23:01; SSX1; ENSG00000126752; CTA
VEHPQMTF

SEQ ID NO: 82325 - protein, 8 aa, Homo sapiens
  misc_feature: Table A; Target 82325; HLA-A*30:01; SSX1; ENSG00000126752; CTA
VEHPQMTF

SEQ ID NO: 82326 - protein, 8 aa, Homo sapiens
  misc_feature: Table A; Target 82326; HLA-A*32:01; SSX1; ENSG00000126752; CTA
VEHPQMTF

SEQ ID NO: 82327 - protein, 8 aa, Homo sapiens
  misc_feature: Table A; Target 82327; HLA-B*15:03; SSX1; ENSG00000126752; CTA
VEHPQMTF

SEQ ID NO: 82328 - protein, 8 aa, Homo sapiens
  misc_feature: Table A; Target 82328; HLA-B*18:01; SSX1; ENSG00000126752; CTA
VEHPQMTF

SEQ ID NO: 82329 - protein, 8 aa, Homo sapiens
  misc_feature: Table A; Target 82329; HLA-B*37:01; SSX1; ENSG00000126752; CTA
VEHPQMTF

SEQ ID NO: 82330 - protein, 8 aa, Homo sapiens
  misc_feature: Table A; Target 82330; HLA-B*40:02; SSX1; ENSG00000126752; CTA
VEHPQMTF

SEQ ID NO: 82331 - protein, 8 aa, Homo sapiens
  misc_feature: Table A; Target 82331; HLA-B*44:02; SSX1; ENSG00000126752; CTA
VEHPQMTF

SEQ ID NO: 82332 - protein, 8 aa, Homo sapiens
  misc_feature: Table A; Target 82332; HLA-B*44:03; SSX1; ENSG00000126752; CTA
VEHPQMTF

SEQ ID NO: 82333 - protein, 8 aa, Homo sapiens
  misc_feature: Table A; Target 82333; HLA-B*49:01; SSX1; ENSG00000126752; CTA
VEHPQMTF

SEQ ID NO: 82334 - protein, 8 aa, Homo sapiens
  misc_feature: Table A; Target 82334; HLA-B*58:01; SSX1; ENSG00000126752; CTA
VEHPQMTF

SEQ ID NO: 82335 - protein, 8 aa, Homo sapiens
  misc_feature: Table A; Target 82335; HLA-C*04:01; SSX1; ENSG00000126752; CTA
VEHPQMTF

SEQ ID NO: 82336 - protein, 8 aa, Homo sapiens
  misc_feature: Table A; Target 82336; HLA-C*07:04; SSX1; ENSG00000126752; CTA
VEHPQMTF

SEQ ID NO: 82337 - protein, 8 aa, Homo sapiens
  misc_feature: Table A; Target 82337; HLA-C*12:03; SSX1; ENSG00000126752; CTA
VEHPQMTF

SEQ ID NO: 82338 - protein, 8 aa, Homo sapiens
  misc_feature: Table A; Target 82338; HLA-C*16:04; SSX1; ENSG00000126752; CTA
VEHPQMTF

SEQ ID NO: 82339 - protein, 9 aa, Homo sapiens
  misc_feature: Table A; Target 82339; HLA-B*49:01; SSX1; ENSG00000126752; CTA
VEHPQMTFG

SEQ ID NO: 82340 - protein, 10 aa, Homo sapiens
  misc_feature: Table A; Target 82340; HLA-A*03:01; SSX1; ENSG00000126752; CTA
VTLPPFMCNK

SEQ ID NO: 82341 - protein, 10 aa, Homo sapiens
  misc_feature: Table A; Target 82341; HLA-A*03:02; SSX1; ENSG00000126752; CTA
VTLPPFMCNK

SEQ ID NO: 82342 - protein, 10 aa, Homo sapiens
  misc_feature: Table A; Target 82342; HLA-A*11:01; SSX1; ENSG00000126752; CTA
VTLPPFMCNK

SEQ ID NO: 82343 - protein, 10 aa, Homo sapiens
  misc_feature: Table A; Target 82343; HLA-A*31:01; SSX1; ENSG00000126752; CTA
VTLPPFMCNK

SEQ ID NO: 82344 - protein, 9 aa, Homo sapiens
  misc_feature: Table A; Target 82344; HLA-A*24:02; SSX1; ENSG00000126752; CTA
VYMKRNYKA

SEQ ID NO: 82345 - protein, 9 aa, Homo sapiens
  misc_feature: Table A; Target 82345; HLA-B*15:03; SSX1; ENSG00000126752; CTA
YKAMTKLGF

SEQ ID NO: 82346 - protein, 8 aa, Homo sapiens
  misc_feature: Table A; Target 82346; HLA-A*01:01; SSX1; ENSG00000126752; CTA
YSEKISYV

SEQ ID NO: 82347 - protein, 8 aa, Homo sapiens
  misc_feature: Table A; Target 82347; HLA-C*05:01; SSX1; ENSG00000126752; CTA
YSEKISYV

SEQ ID NO: 82348 - protein, 9 aa, Homo sapiens
  misc_feature: Table A; Target 82348; HLA-A*29:02; SSX1; ENSG00000126752; CTA
YSEKISYVY

SEQ ID NO: 82349 - protein, 9 aa, Homo sapiens
  misc_feature: Table A; Target 82349; HLA-A*30:02; SSX1; ENSG00000126752; CTA
YSEKISYVY

SEQ ID NO: 82350 - protein, 9 aa, Homo sapiens
  misc_feature: Table A; Target 82350; HLA-B*18:01; SSX1; ENSG00000126752; CTA
YSEKISYVY

SEQ ID NO: 82351 - protein, 9 aa, Homo sapiens
  misc_feature: Table A; Target 82351; HLA-B*35:01; SSX1; ENSG00000126752; CTA
YSEKISYVY

SEQ ID NO: 82352 - protein, 9 aa, Homo sapiens
  misc_feature: Table A; Target 82352; HLA-B*57:01; SSX1; ENSG00000126752; CTA
YSEKISYVY

SEQ ID NO: 82353 - protein, 9 aa, Homo sapiens
  misc_feature: Table A; Target 82353; HLA-B*58:01; SSX1; ENSG00000126752; CTA
YSEKISYVY

SEQ ID NO: 82354 - protein, 9 aa, Homo sapiens
  misc_feature: Table A; Target 82354; HLA-C*02:02; SSX1; ENSG00000126752; CTA
YSEKISYVY

SEQ ID NO: 82355 - protein, 9 aa, Homo sapiens
  misc_feature: Table A; Target 82355; HLA-C*03:03; SSX1; ENSG00000126752; CTA
YSEKISYVY

SEQ ID NO: 82356 - protein, 9 aa, Homo sapiens
  misc_feature: Table A; Target 82356; HLA-C*07:01; SSX1; ENSG00000126752; CTA
YSEKISYVY

SEQ ID NO: 82357 - protein, 9 aa, Homo sapiens
  misc_feature: Table A; Target 82357; HLA-C*16:04; SSX1; ENSG00000126752; CTA
YSEKISYVY

SEQ ID NO: 82358 - protein, 10 aa, Homo sapiens
  misc_feature: Table A; Target 82358; HLA-A*01:01; SSX1; ENSG00000126752; CTA
YSEKISYVYM

SEQ ID NO: 82359 - protein, 8 aa, Homo sapiens
  misc_feature: Table A; Target 82359; HLA-B*08:01; SSX1; ENSG00000126752; CTA
YVYMKRNY

SEQ ID NO: 82360 - protein, 9 aa, Homo sapiens
  misc_feature: Table A; Target 82360; HLA-A*03:01; STRA8; ENSG00000146857; CTA
AALFNNLRK

SEQ ID NO: 82361 - protein, 9 aa, Homo sapiens
  misc_feature: Table A; Target 82361; HLA-A*11:01; STRA8; ENSG00000146857; CTA
AALFNNLRK

SEQ ID NO: 82362 - protein, 8 aa, Homo sapiens
  misc_feature: Table A; Target 82362; HLA-B*54:01; STRA8; ENSG00000146857; CTA
AALPIVSA

SEQ ID NO: 82363 - protein, 8 aa, Homo sapiens
  misc_feature: Table A; Target 82363; HLA-B*56:01; STRA8; ENSG00000146857; CTA
AALPIVSA

SEQ ID NO: 82364 - protein, 9 aa, Homo sapiens
  misc_feature: Table A; Target 82364; HLA-A*02:01; STRA8; ENSG00000146857; CTA
AALPIVSAA

SEQ ID NO: 82365 - protein, 9 aa, Homo sapiens
  misc_feature: Table A; Target 82365; HLA-A*32:01; STRA8; ENSG00000146857; CTA
AALPIVSAA

SEQ ID NO: 82366 - protein, 9 aa, Homo sapiens
  misc_feature: Table A; Target 82366; HLA-B*39:01; STRA8; ENSG00000146857; CTA
AALPIVSAA

SEQ ID NO: 82367 - protein, 9 aa, Homo sapiens
  misc_feature: Table A; Target 82367; HLA-B*46:01; STRA8; ENSG00000146857; CTA
AALPIVSAA

SEQ ID NO: 82368 - protein, 9 aa, Homo sapiens
  misc_feature: Table A; Target 82368; HLA-B*54:01; STRA8; ENSG00000146857; CTA
AALPIVSAA

SEQ ID NO: 82369 - protein, 9 aa, Homo sapiens
  misc_feature: Table A; Target 82369; HLA-B*55:01; STRA8; ENSG00000146857; CTA
AALPIVSAA

SEQ ID NO: 82370 - protein, 9 aa, Homo sapiens
  misc_feature: Table A; Target 82370; HLA-B*56:01; STRA8; ENSG00000146857; CTA
AALPIVSAA

SEQ ID NO: 82371 - protein, 9 aa, Homo sapiens
  misc_feature: Table A; Target 82371; HLA-B*58:01; STRA8; ENSG00000146857; CTA
AALPIVSAA

SEQ ID NO: 82372 - protein, 9 aa, Homo sapiens
  misc_feature: Table A; Target 82372; HLA-C*01:02; STRA8; ENSG00000146857; CTA
AALPIVSAA

SEQ ID NO: 82373 - protein, 9 aa, Homo sapiens
  misc_feature: Table A; Target 82373; HLA-C*02:02; STRA8; ENSG00000146857; CTA
AALPIVSAA

SEQ ID NO: 82374 - protein, 9 aa, Homo sapiens
  misc_feature: Table A; Target 82374; HLA-C*03:03; STRA8; ENSG00000146857; CTA
AALPIVSAA

SEQ ID NO: 82375 - protein, 9 aa, Homo sapiens
  misc_feature: Table A; Target 82375; HLA-C*03:04; STRA8; ENSG00000146857; CTA
AALPIVSAA

SEQ ID NO: 82376 - protein, 9 aa, Homo sapiens
  misc_feature: Table A; Target 82376; HLA-C*12:03; STRA8; ENSG00000146857; CTA
AALPIVSAA

SEQ ID NO: 82377 - protein, 9 aa, Homo sapiens
  misc_feature: Table A; Target 82377; HLA-C*14:02; STRA8; ENSG00000146857; CTA
AALPIVSAA

SEQ ID NO: 82378 - protein, 9 aa, Homo sapiens
  misc_feature: Table A; Target 82378; HLA-C*16:02; STRA8; ENSG00000146857; CTA
AALPIVSAA

SEQ ID NO: 82379 - protein, 9 aa, Homo sapiens
  misc_feature: Table A; Target 82379; HLA-C*16:04; STRA8; ENSG00000146857; CTA
AALPIVSAA

SEQ ID NO: 82380 - protein, 10 aa, Homo sapiens
  misc_feature: Table A; Target 82380; HLA-A*23:01; STRA8; ENSG00000146857; CTA
AALPIVSAAI

SEQ ID NO: 82381 - protein, 10 aa, Homo sapiens
  misc_feature: Table A; Target 82381; HLA-A*25:01; STRA8; ENSG00000146857; CTA
AALPIVSAAI

SEQ ID NO: 82382 - protein, 10 aa, Homo sapiens
  misc_feature: Table A; Target 82382; HLA-B*49:01; STRA8; ENSG00000146857; CTA
AEGSVKDSGV

SEQ ID NO: 82383 - protein, 8 aa, Homo sapiens
  misc_feature: Table A; Target 82383; HLA-A*32:01; STRA8; ENSG00000146857; CTA
AFDVASFL

SEQ ID NO: 82384 - protein, 8 aa, Homo sapiens
  misc_feature: Table A; Target 82384; HLA-B*35:01; STRA8; ENSG00000146857; CTA
AFDVASFL

SEQ ID NO: 82385 - protein, 8 aa, Homo sapiens
  misc_feature: Table A; Target 82385; HLA-B*35:03; STRA8; ENSG00000146857; CTA
AFDVASFL

SEQ ID NO: 82386 - protein, 8 aa, Homo sapiens
  misc_feature: Table A; Target 82386; HLA-C*05:01; STRA8; ENSG00000146857; CTA
AFDVASFL

SEQ ID NO: 82387 - protein, 8 aa, Homo sapiens
  misc_feature: Table A; Target 82387; HLA-C*07:04; STRA8; ENSG00000146857; CTA
AFDVASFL

SEQ ID NO: 82388 - protein, 8 aa, Homo sapiens
  misc_feature: Table A; Target 82388; HLA-C*14:02; STRA8; ENSG00000146857; CTA
AFDVASFL

SEQ ID NO: 82389 - protein, 9 aa, Homo sapiens
  misc_feature: Table A; Target 82389; HLA-A*02:04; STRA8; ENSG00000146857; CTA
AISHLWQNL

SEQ ID NO: 82390 - protein, 9 aa, Homo sapiens
  misc_feature: Table A; Target 82390; HLA-A*68:02; STRA8; ENSG00000146857; CTA
AISHLWQNL

SEQ ID NO: 82391 - protein, 8 aa, Homo sapiens
  misc_feature: Table A; Target 82391; HLA-B*15:03; STRA8; ENSG00000146857; CTA
AKSHIPEL

SEQ ID NO: 82392 - protein, 8 aa, Homo sapiens
  misc_feature: Table A; Target 82392; HLA-A*03:01; STRA8; ENSG00000146857; CTA
ALFNNLRK

SEQ ID NO: 82393 - protein, 9 aa, Homo sapiens
  misc_feature: Table A; Target 82393; HLA-A*02:03; STRA8; ENSG00000146857; CTA
ALFNNLRKT

SEQ ID NO: 82394 - protein, 9 aa, Homo sapiens
  misc_feature: Table A; Target 82394; HLA-A*02:04; STRA8; ENSG00000146857; CTA
ALFNNLRKT

SEQ ID NO: 82395 - protein, 10 aa, Homo sapiens
  misc_feature: Table A; Target 82395; HLA-A*02:01; STRA8; ENSG00000146857; CTA
ALFNNLRKTV

SEQ ID NO: 82396 - protein, 10 aa, Homo sapiens
  misc_feature: Table A; Target 82396; HLA-A*02:03; STRA8; ENSG00000146857; CTA
ALFNNLRKTV

SEQ ID NO: 82397 - protein, 11 aa, Homo sapiens
  misc_feature: Table A; Target 82397; HLA-A*29:02; STRA8; ENSG00000146857; CTA
ALFNNLRKTVY

SEQ ID NO: 82398 - protein, 11 aa, Homo sapiens
  misc_feature: Table A; Target 82398; HLA-A*30:02; STRA8; ENSG00000146857; CTA
ALFNNLRKTVY

SEQ ID NO: 82399 - protein, 11 aa, Homo sapiens
  misc_feature: Table A; Target 82399; HLA-A*32:01; STRA8; ENSG00000146857; CTA
ALFNNLRKTVY

SEQ ID NO: 82400 - protein, 11 aa, Homo sapiens
  misc_feature: Table A; Target 82400; HLA-B*15:01; STRA8; ENSG00000146857; CTA
ALFNNLRKTVY

SEQ ID NO: 82401 - protein, 11 aa, Homo sapiens
  misc_feature: Table A; Target 82401; HLA-B*46:01; STRA8; ENSG00000146857; CTA
ALFNNLRKTVY

SEQ ID NO: 82402 - protein, 11 aa, Homo sapiens
  misc_feature: Table A; Target 82402; HLA-C*02:02; STRA8; ENSG00000146857; CTA
ALFNNLRKTVY

SEQ ID NO: 82403 - protein, 9 aa, Homo sapiens
  misc_feature: Table A; Target 82403; HLA-A*02:01; STRA8; ENSG00000146857; CTA
ALPIVSAAI

SEQ ID NO: 82404 - protein, 9 aa, Homo sapiens
  misc_feature: Table A; Target 82404; HLA-A*02:03; STRA8; ENSG00000146857; CTA
ALPIVSAAI

SEQ ID NO: 82405 - protein, 9 aa, Homo sapiens
  misc_feature: Table A; Target 82405; HLA-A*02:04; STRA8; ENSG00000146857; CTA
ALPIVSAAI

SEQ ID NO: 82406 - protein, 9 aa, Homo sapiens
  misc_feature: Table A; Target 82406; HLA-A*02:07; STRA8; ENSG00000146857; CTA
ALPIVSAAI

SEQ ID NO: 82407 - protein, 9 aa, Homo sapiens
  misc_feature: Table A; Target 82407; HLA-A*23:01; STRA8; ENSG00000146857; CTA
ALPIVSAAI

SEQ ID NO: 82408 - protein, 9 aa, Homo sapiens
  misc_feature: Table A; Target 82408; HLA-A*24:02; STRA8; ENSG00000146857; CTA
ALPIVSAAI

SEQ ID NO: 82409 - protein, 9 aa, Homo sapiens
  misc_feature: Table A; Target 82409; HLA-A*30:01; STRA8; ENSG00000146857; CTA
ALPIVSAAI

SEQ ID NO: 82410 - protein, 9 aa, Homo sapiens
  misc_feature: Table A; Target 82410; HLA-A*32:01; STRA8; ENSG00000146857; CTA
ALPIVSAAI

SEQ ID NO: 82411 - protein, 9 aa, Homo sapiens
  misc_feature: Table A; Target 82411; HLA-B*13:02; STRA8; ENSG00000146857; CTA
ALPIVSAAI

SEQ ID NO: 82412 - protein, 9 aa, Homo sapiens
  misc_feature: Table A; Target 82412; HLA-B*15:01; STRA8; ENSG00000146857; CTA
ALPIVSAAI

SEQ ID NO: 82413 - protein, 9 aa, Homo sapiens
  misc_feature: Table A; Target 82413; HLA-B*15:03; STRA8; ENSG00000146857; CTA
ALPIVSAAI

SEQ ID NO: 82414 - protein, 9 aa, Homo sapiens
  misc_feature: Table A; Target 82414; HLA-B*46:01; STRA8; ENSG00000146857; CTA
ALPIVSAAI

SEQ ID NO: 82415 - protein, 9 aa, Homo sapiens
  misc_feature: Table A; Target 82415; HLA-B*55:01; STRA8; ENSG00000146857; CTA
ALPIVSAAI

SEQ ID NO: 82416 - protein, 9 aa, Homo sapiens
  misc_feature: Table A; Target 82416; HLA-C*01:02; STRA8; ENSG00000146857; CTA
ALPIVSAAI

SEQ ID NO: 82417 - protein, 9 aa, Homo sapiens
  misc_feature: Table A; Target 82417; HLA-C*06:02; STRA8; ENSG00000146857; CTA
ALPIVSAAI

SEQ ID NO: 82418 - protein, 9 aa, Homo sapiens
  misc_feature: Table A; Target 82418; HLA-C*07:02; STRA8; ENSG00000146857; CTA
ALPIVSAAI

SEQ ID NO: 82419 - protein, 11 aa, Homo sapiens
  misc_feature: Table A; Target 82419; HLA-A*03:02; STRA8; ENSG00000146857; CTA
ALPIVSAAISH

SEQ ID NO: 82420 - protein, 9 aa, Homo sapiens
  misc_feature: Table A; Target 82420; HLA-C*16:01; STRA8; ENSG00000146857; CTA
ANTQVKQEA

SEQ ID NO: 82421 - protein, 9 aa, Homo sapiens
  misc_feature: Table A; Target 82421; HLA-A*31:01; STRA8; ENSG00000146857; CTA
AQLQELEHR

SEQ ID NO: 82422 - protein, 9 aa, Homo sapiens
  misc_feature: Table A; Target 82422; HLA-C*16:02; STRA8; ENSG00000146857; CTA
ASFLDKSEV

SEQ ID NO: 82423 - protein, 9 aa, Homo sapiens
  misc_feature: Table A; Target 82423; HLA-A*30:02; STRA8; ENSG00000146857; CTA
ASFPVDEEM

SEQ ID NO: 82424 - protein, 9 aa, Homo sapiens
  misc_feature: Table A; Target 82424; HLA-A*32:01; STRA8; ENSG00000146857; CTA
ASFPVDEEM

SEQ ID NO: 82425 - protein, 9 aa, Homo sapiens
  misc_feature: Table A; Target 82425; HLA-B*15:01; STRA8; ENSG00000146857; CTA
ASFPVDEEM

SEQ ID NO: 82426 - protein, 9 aa, Homo sapiens
  misc_feature: Table A; Target 82426; HLA-B*15:03; STRA8; ENSG00000146857; CTA
ASFPVDEEM

SEQ ID NO: 82427 - protein, 9 aa, Homo sapiens
  misc_feature: Table A; Target 82427; HLA-B*27:05; STRA8; ENSG00000146857; CTA
ASFPVDEEM

SEQ ID NO: 82428 - protein, 9 aa, Homo sapiens
  misc_feature: Table A; Target 82428; HLA-B*35:01; STRA8; ENSG00000146857; CTA
ASFPVDEEM

SEQ ID NO: 82429 - protein, 9 aa, Homo sapiens
  misc_feature: Table A; Target 82429; HLA-B*35:03; STRA8; ENSG00000146857; CTA
ASFPVDEEM

SEQ ID NO: 82430 - protein, 9 aa, Homo sapiens
  misc_feature: Table A; Target 82430; HLA-B*38:01; STRA8; ENSG00000146857; CTA
ASFPVDEEM

SEQ ID NO: 82431 - protein, 9 aa, Homo sapiens
  misc_feature: Table A; Target 82431; HLA-B*40:01; STRA8; ENSG00000146857; CTA
ASFPVDEEM

SEQ ID NO: 82432 - protein, 9 aa, Homo sapiens
  misc_feature: Table A; Target 82432; HLA-B*46:01; STRA8; ENSG00000146857; CTA
ASFPVDEEM

SEQ ID NO: 82433 - protein, 9 aa, Homo sapiens
  misc_feature: Table A; Target 82433; HLA-B*55:01; STRA8; ENSG00000146857; CTA
ASFPVDEEM

SEQ ID NO: 82434 - protein, 9 aa, Homo sapiens
  misc_feature: Table A; Target 82434; HLA-B*57:01; STRA8; ENSG00000146857; CTA
ASFPVDEEM

SEQ ID NO: 82435 - protein, 9 aa, Homo sapiens
  misc_feature: Table A; Target 82435; HLA-B*58:01; STRA8; ENSG00000146857; CTA
ASFPVDEEM

SEQ ID NO: 82436 - protein, 9 aa, Homo sapiens
  misc_feature: Table A; Target 82436; HLA-C*02:02; STRA8; ENSG00000146857; CTA
ASFPVDEEM

SEQ ID NO: 82437 - protein, 9 aa, Homo sapiens
  misc_feature: Table A; Target 82437; HLA-C*03:03; STRA8; ENSG00000146857; CTA
ASFPVDEEM

SEQ ID NO: 82438 - protein, 9 aa, Homo sapiens
  misc_feature: Table A; Target 82438; HLA-C*03:04; STRA8; ENSG00000146857; CTA
ASFPVDEEM

SEQ ID NO: 82439 - protein, 9 aa, Homo sapiens
  misc_feature: Table A; Target 82439; HLA-C*05:01; STRA8; ENSG00000146857; CTA
ASFPVDEEM

SEQ ID NO: 82440 - protein, 9 aa, Homo sapiens
  misc_feature: Table A; Target 82440; HLA-C*07:06; STRA8; ENSG00000146857; CTA
ASFPVDEEM

SEQ ID NO: 82441 - protein, 9 aa, Homo sapiens
  misc_feature: Table A; Target 82441; HLA-C*12:03; STRA8; ENSG00000146857; CTA
ASFPVDEEM

SEQ ID NO: 82442 - protein, 9 aa, Homo sapiens
  misc_feature: Table A; Target 82442; HLA-C*16:01; STRA8; ENSG00000146857; CTA
ASFPVDEEM

SEQ ID NO: 82443 - protein, 9 aa, Homo sapiens
  misc_feature: Table A; Target 82443; HLA-C*16:02; STRA8; ENSG00000146857; CTA
ASFPVDEEM

SEQ ID NO: 82444 - protein, 9 aa, Homo sapiens
  misc_feature: Table A; Target 82444; HLA-C*16:04; STRA8; ENSG00000146857; CTA
ASFPVDEEM

SEQ ID NO: 82445 - protein, 9 aa, Homo sapiens
  misc_feature: Table A; Target 82445; HLA-A*03:01; STRA8; ENSG00000146857; CTA
ASKWQVLNK

SEQ ID NO: 82446 - protein, 9 aa, Homo sapiens
  misc_feature: Table A; Target 82446; HLA-A*03:02; STRA8; ENSG00000146857; CTA
ASKWQVLNK

SEQ ID NO: 82447 - protein, 9 aa, Homo sapiens
  misc_feature: Table A; Target 82447; HLA-A*11:01; STRA8; ENSG00000146857; CTA
ASKWQVLNK

SEQ ID NO: 82448 - protein, 9 aa, Homo sapiens
  misc_feature: Table A; Target 82448; HLA-A*31:01; STRA8; ENSG00000146857; CTA
ASKWQVLNK

SEQ ID NO: 82449 - protein, 10 aa, Homo sapiens
  misc_feature: Table A; Target 82449; HLA-A*03:01; STRA8; ENSG00000146857; CTA
ASLRQAWAQK

SEQ ID NO: 82450 - protein, 10 aa, Homo sapiens
  misc_feature: Table A; Target 82450; HLA-A*11:01; STRA8; ENSG00000146857; CTA
ASLRQAWAQK

SEQ ID NO: 82451 - protein, 10 aa, Homo sapiens
  misc_feature: Table A; Target 82451; HLA-B*58:01; STRA8; ENSG00000146857; CTA
ASMYSGNDSF

SEQ ID NO: 82452 - protein, 10 aa, Homo sapiens
  misc_feature: Table A; Target 82452; HLA-C*16:04; STRA8; ENSG00000146857; CTA
ASMYSGNDSF

SEQ ID NO: 82453 - protein, 9 aa, Homo sapiens
  misc_feature: Table A; Target 82453; HLA-A*11:01; STRA8; ENSG00000146857; CTA
ASSLEEVKK

SEQ ID NO: 82454 - protein, 11 aa, Homo sapiens
  misc_feature: Table A; Target 82454; HLA-A*01:01; STRA8; ENSG00000146857; CTA
ASSLEEVKKEY

SEQ ID NO: 82455 - protein, 11 aa, Homo sapiens
  misc_feature: Table A; Target 82455; HLA-A*30:02; STRA8; ENSG00000146857; CTA
ASSLEEVKKEY

SEQ ID NO: 82456 - protein, 11 aa, Homo sapiens
  misc_feature: Table A; Target 82456; HLA-A*32:01; STRA8; ENSG00000146857; CTA
ASSLEEVKKEY

SEQ ID NO: 82457 - protein, 11 aa, Homo sapiens
  misc_feature: Table A; Target 82457; HLA-B*57:01; STRA8; ENSG00000146857; CTA
ASSLEEVKKEY

SEQ ID NO: 82458 - protein, 11 aa, Homo sapiens
  misc_feature: Table A; Target 82458; HLA-B*58:01; STRA8; ENSG00000146857; CTA
ASSLEEVKKEY

SEQ ID NO: 82459 - protein, 11 aa, Homo sapiens
  misc_feature: Table A; Target 82459; HLA-C*12:03; STRA8; ENSG00000146857; CTA
ASSLEEVKKEY

SEQ ID NO: 82460 - protein, 11 aa, Homo sapiens
  misc_feature: Table A; Target 82460; HLA-C*16:02; STRA8; ENSG00000146857; CTA
ASSLEEVKKEY

SEQ ID NO: 82461 - protein, 11 aa, Homo sapiens
  misc_feature: Table A; Target 82461; HLA-C*16:04; STRA8; ENSG00000146857; CTA
ASSLEEVKKEY

SEQ ID NO: 82462 - protein, 9 aa, Homo sapiens
  misc_feature: Table A; Target 82462; HLA-A*31:01; STRA8; ENSG00000146857; CTA
ATLAALFNN

SEQ ID NO: 82463 - protein, 10 aa, Homo sapiens
  misc_feature: Table A; Target 82463; HLA-A*03:01; STRA8; ENSG00000146857; CTA
ATLAALFNNL

SEQ ID NO: 82464 - protein, 10 aa, Homo sapiens
  misc_feature: Table A; Target 82464; HLA-A*03:02; STRA8; ENSG00000146857; CTA
ATLAALFNNL

SEQ ID NO: 82465 - protein, 10 aa, Homo sapiens
  misc_feature: Table A; Target 82465; HLA-A*11:01; STRA8; ENSG00000146857; CTA
ATLAALFNNL

SEQ ID NO: 82466 - protein, 10 aa, Homo sapiens
  misc_feature: Table A; Target 82466; HLA-A*31:01; STRA8; ENSG00000146857; CTA
ATLAALFNNL

SEQ ID NO: 82467 - protein, 10 aa, Homo sapiens
  misc_feature: Table A; Target 82467; HLA-C*06:02; STRA8; ENSG00000146857; CTA
ATLAALFNNL

SEQ ID NO: 82468 - protein, 11 aa, Homo sapiens
  misc_feature: Table A; Target 82468; HLA-A*11:01; STRA8; ENSG00000146857; CTA
ATLAALFNNLR

SEQ ID NO: 82469 - protein, 11 aa, Homo sapiens
  misc_feature: Table A; Target 82469; HLA-A*31:01; STRA8; ENSG00000146857; CTA
ATLAALFNNLR

SEQ ID NO: 82470 - protein, 10 aa, Homo sapiens
  misc_feature: Table A; Target 82470; HLA-A*11:01; STRA8; ENSG00000146857; CTA
ATPEENSNPH

SEQ ID NO: 82471 - protein, 9 aa, Homo sapiens
  misc_feature: Table A; Target 82471; HLA-A*02:07; STRA8; ENSG00000146857; CTA
ATPQLPAQL

SEQ ID NO: 82472 - protein, 9 aa, Homo sapiens
  misc_feature: Table A; Target 82472; HLA-A*24:02; STRA8; ENSG00000146857; CTA
ATPQLPAQL

SEQ ID NO: 82473 - protein, 9 aa, Homo sapiens
  misc_feature: Table A; Target 82473; HLA-A*26:01; STRA8; ENSG00000146857; CTA
ATPQLPAQL

SEQ ID NO: 82474 - protein, 9 aa, Homo sapiens
  misc_feature: Table A; Target 82474; HLA-A*31:01; STRA8; ENSG00000146857; CTA
ATPQLPAQL

SEQ ID NO: 82475 - protein, 9 aa, Homo sapiens
  misc_feature: Table A; Target 82475; HLA-A*32:01; STRA8; ENSG00000146857; CTA
ATPQLPAQL

SEQ ID NO: 82476 - protein, 9 aa, Homo sapiens
  misc_feature: Table A; Target 82476; HLA-A*68:02; STRA8; ENSG00000146857; CTA
ATPQLPAQL

SEQ ID NO: 82477 - protein, 9 aa, Homo sapiens
  misc_feature: Table A; Target 82477; HLA-B*39:01; STRA8; ENSG00000146857; CTA
ATPQLPAQL

SEQ ID NO: 82478 - protein, 9 aa, Homo sapiens
  misc_feature: Table A; Target 82478; HLA-C*01:02; STRA8; ENSG00000146857; CTA
ATPQLPAQL

SEQ ID NO: 82479 - protein, 8 aa, Homo sapiens
  misc_feature: Table A; Target 82479; HLA-A*25:01; STRA8; ENSG00000146857; CTA
DAFDVASF

SEQ ID NO: 82480 - protein, 8 aa, Homo sapiens
  misc_feature: Table A; Target 82480; HLA-A*26:01; STRA8; ENSG00000146857; CTA
DAFDVASF

SEQ ID NO: 82481 - protein, 8 aa, Homo sapiens
  misc_feature: Table A; Target 82481; HLA-A*33:01; STRA8; ENSG00000146857; CTA
DAFDVASF

SEQ ID NO: 82482 - protein, 8 aa, Homo sapiens
  misc_feature: Table A; Target 82482; HLA-A*33:03; STRA8; ENSG00000146857; CTA
DAFDVASF

SEQ ID NO: 82483 - protein, 8 aa, Homo sapiens
  misc_feature: Table A; Target 82483; HLA-A*68:01; STRA8; ENSG00000146857; CTA
DAFDVASF

SEQ ID NO: 82484 - protein, 8 aa, Homo sapiens
  misc_feature: Table A; Target 82484; HLA-B*18:01; STRA8; ENSG00000146857; CTA
DAFDVASF

SEQ ID NO: 82485 - protein, 8 aa, Homo sapiens
  misc_feature: Table A; Target 82485; HLA-B*35:01; STRA8; ENSG00000146857; CTA
DAFDVASF

SEQ ID NO: 82486 - protein, 8 aa, Homo sapiens
  misc_feature: Table A; Target 82486; HLA-B*35:03; STRA8; ENSG00000146857; CTA
DAFDVASF

SEQ ID NO: 82487 - protein, 8 aa, Homo sapiens
  misc_feature: Table A; Target 82487; HLA-B*46:01; STRA8; ENSG00000146857; CTA
DAFDVASF

SEQ ID NO: 82488 - protein, 8 aa, Homo sapiens
  misc_feature: Table A; Target 82488; HLA-B*51:01; STRA8; ENSG00000146857; CTA
DAFDVASF

SEQ ID NO: 82489 - protein, 8 aa, Homo sapiens
  misc_feature: Table A; Target 82489; HLA-C*07:06; STRA8; ENSG00000146857; CTA
DAFDVASF

SEQ ID NO: 82490 - protein, 8 aa, Homo sapiens
  misc_feature: Table A; Target 82490; HLA-C*12:03; STRA8; ENSG00000146857; CTA
DAFDVASF

SEQ ID NO: 82491 - protein, 8 aa, Homo sapiens
  misc_feature: Table A; Target 82491; HLA-C*16:04; STRA8; ENSG00000146857; CTA
DAFDVASF

SEQ ID NO: 82492 - protein, 9 aa, Homo sapiens
  misc_feature: Table A; Target 82492; HLA-A*23:01; STRA8; ENSG00000146857; CTA
DAFDVASFL

SEQ ID NO: 82493 - protein, 9 aa, Homo sapiens
  misc_feature: Table A; Target 82493; HLA-A*25:01; STRA8; ENSG00000146857; CTA
DAFDVASFL

SEQ ID NO: 82494 - protein, 9 aa, Homo sapiens
  misc_feature: Table A; Target 82494; HLA-A*26:01; STRA8; ENSG00000146857; CTA
DAFDVASFL

SEQ ID NO: 82495 - protein, 9 aa, Homo sapiens
  misc_feature: Table A; Target 82495; HLA-A*33:01; STRA8; ENSG00000146857; CTA
DAFDVASFL

SEQ ID NO: 82496 - protein, 9 aa, Homo sapiens
  misc_feature: Table A; Target 82496; HLA-A*33:03; STRA8; ENSG00000146857; CTA
DAFDVASFL

SEQ ID NO: 82497 - protein, 9 aa, Homo sapiens
  misc_feature: Table A; Target 82497; HLA-A*68:01; STRA8; ENSG00000146857; CTA
DAFDVASFL

SEQ ID NO: 82498 - protein, 9 aa, Homo sapiens
  misc_feature: Table A; Target 82498; HLA-B*18:01; STRA8; ENSG00000146857; CTA
DAFDVASFL

SEQ ID NO: 82499 - protein, 9 aa, Homo sapiens
  misc_feature: Table A; Target 82499; HLA-B*27:05; STRA8; ENSG00000146857; CTA
DAFDVASFL

SEQ ID NO: 82500 - protein, 9 aa, Homo sapiens
  misc_feature: Table A; Target 82500; HLA-B*35:01; STRA8; ENSG00000146857; CTA
DAFDVASFL

SEQ ID NO: 82501 - protein, 9 aa, Homo sapiens
  misc_feature: Table A; Target 82501; HLA-B*35:03; STRA8; ENSG00000146857; CTA
DAFDVASFL

SEQ ID NO: 82502 - protein, 9 aa, Homo sapiens
  misc_feature: Table A; Target 82502; HLA-B*38:01; STRA8; ENSG00000146857; CTA
DAFDVASFL

SEQ ID NO: 82503 - protein, 9 aa, Homo sapiens
  misc_feature: Table A; Target 82503; HLA-B*39:01; STRA8; ENSG00000146857; CTA
DAFDVASFL

SEQ ID NO: 82504 - protein, 9 aa, Homo sapiens
  misc_feature: Table A; Target 82504; HLA-B*54:01; STRA8; ENSG00000146857; CTA
DAFDVASFL

SEQ ID NO: 82505 - protein, 9 aa, Homo sapiens
  misc_feature: Table A; Target 82505; HLA-C*01:02; STRA8; ENSG00000146857; CTA
DAFDVASFL

SEQ ID NO: 82506 - protein, 9 aa, Homo sapiens
  misc_feature: Table A; Target 82506; HLA-C*02:02; STRA8; ENSG00000146857; CTA
DAFDVASFL

SEQ ID NO: 82507 - protein, 9 aa, Homo sapiens
  misc_feature: Table A; Target 82507; HLA-C*03:03; STRA8; ENSG00000146857; CTA
DAFDVASFL

SEQ ID NO: 82508 - protein, 9 aa, Homo sapiens
  misc_feature: Table A; Target 82508; HLA-C*03:04; STRA8; ENSG00000146857; CTA
DAFDVASFL

SEQ ID NO: 82509 - protein, 9 aa, Homo sapiens
  misc_feature: Table A; Target 82509; HLA-C*05:01; STRA8; ENSG00000146857; CTA
DAFDVASFL

SEQ ID NO: 82510 - protein, 9 aa, Homo sapiens
  misc_feature: Table A; Target 82510; HLA-C*07:06; STRA8; ENSG00000146857; CTA
DAFDVASFL

SEQ ID NO: 82511 - protein, 9 aa, Homo sapiens
  misc_feature: Table A; Target 82511; HLA-C*12:03; STRA8; ENSG00000146857; CTA
DAFDVASFL

SEQ ID NO: 82512 - protein, 9 aa, Homo sapiens
  misc_feature: Table A; Target 82512; HLA-C*16:04; STRA8; ENSG00000146857; CTA
DAFDVASFL

SEQ ID NO: 82513 - protein, 11 aa, Homo sapiens
  misc_feature: Table A; Target 82513; HLA-A*11:01; STRA8; ENSG00000146857; CTA
DAFDVASFLDK

SEQ ID NO: 82514 - protein, 11 aa, Homo sapiens
  misc_feature: Table A; Target 82514; HLA-A*33:01; STRA8; ENSG00000146857; CTA
DAFDVASFLDK

SEQ ID NO: 82515 - protein, 11 aa, Homo sapiens
  misc_feature: Table A; Target 82515; HLA-A*68:01; STRA8; ENSG00000146857; CTA
DAFDVASFLDK

SEQ ID NO: 82516 - protein, 11 aa, Homo sapiens
  misc_feature: Table A; Target 82516; HLA-A*68:02; STRA8; ENSG00000146857; CTA
DAFDVASFLDK

SEQ ID NO: 82517 - protein, 11 aa, Homo sapiens
  misc_feature: Table A; Target 82517; HLA-B*27:02; STRA8; ENSG00000146857; CTA
DAFDVASFLDK

SEQ ID NO: 82518 - protein, 9 aa, Homo sapiens
  misc_feature: Table A; Target 82518; HLA-B*18:01; STRA8; ENSG00000146857; CTA
DEEMIMLQC

SEQ ID NO: 82519 - protein, 9 aa, Homo sapiens
  misc_feature: Table A; Target 82519; HLA-A*68:02; STRA8; ENSG00000146857; CTA
DLIASKWQV

SEQ ID NO: 82520 - protein, 9 aa, Homo sapiens
  misc_feature: Table A; Target 82520; HLA-B*08:01; STRA8; ENSG00000146857; CTA
DLIASKWQV

SEQ ID NO: 82521 - protein, 10 aa, Homo sapiens
  misc_feature: Table A; Target 82521; HLA-B*08:01; STRA8; ENSG00000146857; CTA
DLIASKWQVL

SEQ ID NO: 82522 - protein, 11 aa, Homo sapiens
  misc_feature: Table A; Target 82522; HLA-A*33:01; STRA8; ENSG00000146857; CTA
DLLTGSGIITP

SEQ ID NO: 82523 - protein, 8 aa, Homo sapiens
  misc_feature: Table A; Target 82523; HLA-B*08:01; STRA8; ENSG00000146857; CTA
DNLLKLKA

SEQ ID NO: 82524 - protein, 10 aa, Homo sapiens
  misc_feature: Table A; Target 82524; HLA-A*33:01; STRA8; ENSG00000146857; CTA
DNLLKLKASF

SEQ ID NO: 82525 - protein, 11 aa, Homo sapiens
  misc_feature: Table A; Target 82525; HLA-B*38:01; STRA8; ENSG00000146857; CTA
DRATPQLPAQL

SEQ ID NO: 82526 - protein, 11 aa, Homo sapiens
  misc_feature: Table A; Target 82526; HLA-B*39:01; STRA8; ENSG00000146857; CTA
DRATPQLPAQL

SEQ ID NO: 82527 - protein, 11 aa, Homo sapiens
  misc_feature: Table A; Target 82527; HLA-A*01:01; STRA8; ENSG00000146857; CTA
DSFPQNGSSPW

SEQ ID NO: 82528 - protein, 11 aa, Homo sapiens
  misc_feature: Table A; Target 82528; HLA-A*25:01; STRA8; ENSG00000146857; CTA
DSFPQNGSSPW

SEQ ID NO: 82529 - protein, 11 aa, Homo sapiens
  misc_feature: Table A; Target 82529; HLA-A*26:01; STRA8; ENSG00000146857; CTA
DSFPQNGSSPW

SEQ ID NO: 82530 - protein, 11 aa, Homo sapiens
  misc_feature: Table A; Target 82530; HLA-A*33:01; STRA8; ENSG00000146857; CTA
DSFPQNGSSPW

SEQ ID NO: 82531 - protein, 11 aa, Homo sapiens
  misc_feature: Table A; Target 82531; HLA-A*33:03; STRA8; ENSG00000146857; CTA
DSFPQNGSSPW

SEQ ID NO: 82532 - protein, 11 aa, Homo sapiens
  misc_feature: Table A; Target 82532; HLA-A*68:01; STRA8; ENSG00000146857; CTA
DSFPQNGSSPW

SEQ ID NO: 82533 - protein, 11 aa, Homo sapiens
  misc_feature: Table A; Target 82533; HLA-B*18:01; STRA8; ENSG00000146857; CTA
DSFPQNGSSPW

SEQ ID NO: 82534 - protein, 11 aa, Homo sapiens
  misc_feature: Table A; Target 82534; HLA-B*57:01; STRA8; ENSG00000146857; CTA
DSFPQNGSSPW

SEQ ID NO: 82535 - protein, 11 aa, Homo sapiens
  misc_feature: Table A; Target 82535; HLA-B*58:01; STRA8; ENSG00000146857; CTA
DSFPQNGSSPW

SEQ ID NO: 82536 - protein, 11 aa, Homo sapiens
  misc_feature: Table A; Target 82536; HLA-C*04:01; STRA8; ENSG00000146857; CTA
DSFPQNGSSPW

SEQ ID NO: 82537 - protein, 11 aa, Homo sapiens
  misc_feature: Table A; Target 82537; HLA-C*07:01; STRA8; ENSG00000146857; CTA
DSFPQNGSSPW

SEQ ID NO: 82538 - protein, 8 aa, Homo sapiens
  misc_feature: Table A; Target 82538; HLA-A*33:01; STRA8; ENSG00000146857; CTA
DVASFLDK

SEQ ID NO: 82539 - protein, 8 aa, Homo sapiens
  misc_feature: Table A; Target 82539; HLA-A*68:01; STRA8; ENSG00000146857; CTA
DVASFLDK

SEQ ID NO: 82540 - protein, 8 aa, Homo sapiens
  misc_feature: Table A; Target 82540; HLA-B*27:02; STRA8; ENSG00000146857; CTA
DVASFLDK

SEQ ID NO: 82541 - protein, 9 aa, Homo sapiens
  misc_feature: Table A; Target 82541; HLA-A*33:01; STRA8; ENSG00000146857; CTA
DVASFLDKS

SEQ ID NO: 82542 - protein, 11 aa, Homo sapiens
  misc_feature: Table A; Target 82542; HLA-A*26:01; STRA8; ENSG00000146857; CTA
DVASFLDKSEV

SEQ ID NO: 82543 - protein, 11 aa, Homo sapiens
  misc_feature: Table A; Target 82543; HLA-A*68:02; STRA8; ENSG00000146857; CTA
DVASFLDKSEV

SEQ ID NO: 82544 - protein, 8 aa, Homo sapiens
  misc_feature: Table A; Target 82544; HLA-A*01:01; STRA8; ENSG00000146857; CTA
DVDKILFF

SEQ ID NO: 82545 - protein, 9 aa, Homo sapiens
  misc_feature: Table A; Target 82545; HLA-A*25:01; STRA8; ENSG00000146857; CTA
EAALPIVSA

SEQ ID NO: 82546 - protein, 9 aa, Homo sapiens
  misc_feature: Table A; Target 82546; HLA-A*26:01; STRA8; ENSG00000146857; CTA
EAALPIVSA

SEQ ID NO: 82547 - protein, 9 aa, Homo sapiens
  misc_feature: Table A; Target 82547; HLA-A*33:01; STRA8; ENSG00000146857; CTA
EAALPIVSA

SEQ ID NO: 82548 - protein, 9 aa, Homo sapiens
  misc_feature: Table A; Target 82548; HLA-A*33:03; STRA8; ENSG00000146857; CTA
EAALPIVSA

SEQ ID NO: 82549 - protein, 9 aa, Homo sapiens
  misc_feature: Table A; Target 82549; HLA-A*68:01; STRA8; ENSG00000146857; CTA
EAALPIVSA

SEQ ID NO: 82550 - protein, 9 aa, Homo sapiens
  misc_feature: Table A; Target 82550; HLA-A*68:02; STRA8; ENSG00000146857; CTA
EAALPIVSA

SEQ ID NO: 82551 - protein, 9 aa, Homo sapiens
  misc_feature: Table A; Target 82551; HLA-B*27:05; STRA8; ENSG00000146857; CTA
EAALPIVSA

SEQ ID NO: 82552 - protein, 9 aa, Homo sapiens
  misc_feature: Table A; Target 82552; HLA-B*35:01; STRA8; ENSG00000146857; CTA
EAALPIVSA

SEQ ID NO: 82553 - protein, 9 aa, Homo sapiens
  misc_feature: Table A; Target 82553; HLA-B*35:03; STRA8; ENSG00000146857; CTA
EAALPIVSA

SEQ ID NO: 82554 - protein, 9 aa, Homo sapiens
  misc_feature: Table A; Target 82554; HLA-B*39:01; STRA8; ENSG00000146857; CTA
EAALPIVSA

SEQ ID NO: 82555 - protein, 9 aa, Homo sapiens
  misc_feature: Table A; Target 82555; HLA-B*51:01; STRA8; ENSG00000146857; CTA
EAALPIVSA

SEQ ID NO: 82556 - protein, 9 aa, Homo sapiens
  misc_feature: Table A; Target 82556; HLA-B*54:01; STRA8; ENSG00000146857; CTA
EAALPIVSA

SEQ ID NO: 82557 - protein, 9 aa, Homo sapiens
  misc_feature: Table A; Target 82557; HLA-B*55:01; STRA8; ENSG00000146857; CTA
EAALPIVSA

SEQ ID NO: 82558 - protein, 9 aa, Homo sapiens
  misc_feature: Table A; Target 82558; HLA-B*56:01; STRA8; ENSG00000146857; CTA
EAALPIVSA

SEQ ID NO: 82559 - protein, 9 aa, Homo sapiens
  misc_feature: Table A; Target 82559; HLA-C*02:02; STRA8; ENSG00000146857; CTA
EAALPIVSA

SEQ ID NO: 82560 - protein, 9 aa, Homo sapiens
  misc_feature: Table A; Target 82560; HLA-C*03:03; STRA8; ENSG00000146857; CTA
EAALPIVSA

SEQ ID NO: 82561 - protein, 9 aa, Homo sapiens
  misc_feature: Table A; Target 82561; HLA-C*03:04; STRA8; ENSG00000146857; CTA
EAALPIVSA

SEQ ID NO: 82562 - protein, 9 aa, Homo sapiens
  misc_feature: Table A; Target 82562; HLA-C*07:06; STRA8; ENSG00000146857; CTA
EAALPIVSA

SEQ ID NO: 82563 - protein, 9 aa, Homo sapiens
  misc_feature: Table A; Target 82563; HLA-C*12:03; STRA8; ENSG00000146857; CTA
EAALPIVSA

SEQ ID NO: 82564 - protein, 10 aa, Homo sapiens
  misc_feature: Table A; Target 82564; HLA-B*54:01; STRA8; ENSG00000146857; CTA
EAALPIVSAA

SEQ ID NO: 82565 - protein, 11 aa, Homo sapiens
  misc_feature: Table A; Target 82565; HLA-A*25:01; STRA8; ENSG00000146857; CTA
EAALPIVSAAI

SEQ ID NO: 82566 - protein, 10 aa, Homo sapiens
  misc_feature: Table A; Target 82566; HLA-A*68:01; STRA8; ENSG00000146857; CTA
EASFPVDEEM

SEQ ID NO: 82567 - protein, 10 aa, Homo sapiens
  misc_feature: Table A; Target 82567; HLA-B*35:01; STRA8; ENSG00000146857; CTA
EASFPVDEEM

SEQ ID NO: 82568 - protein, 10 aa, Homo sapiens
  misc_feature: Table A; Target 82568; HLA-B*35:03; STRA8; ENSG00000146857; CTA
EASFPVDEEM

SEQ ID NO: 82569 - protein, 10 aa, Homo sapiens
  misc_feature: Table A; Target 82569; HLA-C*07:06; STRA8; ENSG00000146857; CTA
EASFPVDEEM

SEQ ID NO: 82570 - protein, 11 aa, Homo sapiens
  misc_feature: Table A; Target 82570; HLA-A*68:02; STRA8; ENSG00000146857; CTA
EASFPVDEEMI

SEQ ID NO: 82571 - protein, 9 aa, Homo sapiens
  misc_feature: Table A; Target 82571; HLA-A*25:01; STRA8; ENSG00000146857; CTA
EDAFDVASF

SEQ ID NO: 82572 - protein, 9 aa, Homo sapiens
  misc_feature: Table A; Target 82572; HLA-A*26:01; STRA8; ENSG00000146857; CTA
EDAFDVASF

SEQ ID NO: 82573 - protein, 9 aa, Homo sapiens
  misc_feature: Table A; Target 82573; HLA-B*18:01; STRA8; ENSG00000146857; CTA
EDAFDVASF

SEQ ID NO: 82574 - protein, 9 aa, Homo sapiens
  misc_feature: Table A; Target 82574; HLA-B*44:02; STRA8; ENSG00000146857; CTA
EDAFDVASF

SEQ ID NO: 82575 - protein, 9 aa, Homo sapiens
  misc_feature: Table A; Target 82575; HLA-B*44:03; STRA8; ENSG00000146857; CTA
EDAFDVASF

SEQ ID NO: 82576 - protein, 10 aa, Homo sapiens
  misc_feature: Table A; Target 82576; HLA-A*68:02; STRA8; ENSG00000146857; CTA
EDAFDVASFL

SEQ ID NO: 82577 - protein, 8 aa, Homo sapiens
  misc_feature: Table A; Target 82577; HLA-C*07:01; STRA8; ENSG00000146857; CTA
EDGHASSL

SEQ ID NO: 82578 - protein, 8 aa, Homo sapiens
  misc_feature: Table A; Target 82578; HLA-B*18:01; STRA8; ENSG00000146857; CTA
EEILFEDA

SEQ ID NO: 82579 - protein, 9 aa, Homo sapiens
  misc_feature: Table A; Target 82579; HLA-B*27:02; STRA8; ENSG00000146857; CTA
EEILFEDAF

SEQ ID NO: 82580 - protein, 9 aa, Homo sapiens
  misc_feature: Table A; Target 82580; HLA-B*40:01; STRA8; ENSG00000146857; CTA
EEILFEDAF

SEQ ID NO: 82581 - protein, 9 aa, Homo sapiens
  misc_feature: Table A; Target 82581; HLA-B*44:02; STRA8; ENSG00000146857; CTA
EEILFEDAF

SEQ ID NO: 82582 - protein, 9 aa, Homo sapiens
  misc_feature: Table A; Target 82582; HLA-B*44:03; STRA8; ENSG00000146857; CTA
EEILFEDAF

SEQ ID NO: 82583 - protein, 9 aa, Homo sapiens
  misc_feature: Table A; Target 82583; HLA-C*16:04; STRA8; ENSG00000146857; CTA
EEILFEDAF

SEQ ID NO: 82584 - protein, 8 aa, Homo sapiens
  misc_feature: Table A; Target 82584; HLA-B*18:01; STRA8; ENSG00000146857; CTA
EEMIMLQC

SEQ ID NO: 82585 - protein, 8 aa, Homo sapiens
  misc_feature: Table A; Target 82585; HLA-B*49:01; STRA8; ENSG00000146857; CTA
EEMIMLQC

SEQ ID NO: 82586 - protein, 9 aa, Homo sapiens
  misc_feature: Table A; Target 82586; HLA-A*33:01; STRA8; ENSG00000146857; CTA
EENSNPHDR

SEQ ID NO: 82587 - protein, 9 aa, Homo sapiens
  misc_feature: Table A; Target 82587; HLA-A*33:03; STRA8; ENSG00000146857; CTA
EENSNPHDR

SEQ ID NO: 82588 - protein, 10 aa, Homo sapiens
  misc_feature: Table A; Target 82588; HLA-A*30:01; STRA8; ENSG00000146857; CTA
EEVKKEYASM

SEQ ID NO: 82589 - protein, 10 aa, Homo sapiens
  misc_feature: Table A; Target 82589; HLA-B*40:01; STRA8; ENSG00000146857; CTA
EEVKKEYASM

SEQ ID NO: 82590 - protein, 10 aa, Homo sapiens
  misc_feature: Table A; Target 82590; HLA-B*40:02; STRA8; ENSG00000146857; CTA
EEVKKEYASM

SEQ ID NO: 82591 - protein, 10 aa, Homo sapiens
  misc_feature: Table A; Target 82591; HLA-B*44:02; STRA8; ENSG00000146857; CTA
EEVKKEYASM

SEQ ID NO: 82592 - protein, 10 aa, Homo sapiens
  misc_feature: Table A; Target 82592; HLA-B*44:03; STRA8; ENSG00000146857; CTA
EEVKKEYASM

SEQ ID NO: 82593 - protein, 11 aa, Homo sapiens
  misc_feature: Table A; Target 82593; HLA-B*44:02; STRA8; ENSG00000146857; CTA
EEVKKEYASMY

SEQ ID NO: 82594 - protein, 11 aa, Homo sapiens
  misc_feature: Table A; Target 82594; HLA-B*44:03; STRA8; ENSG00000146857; CTA
EEVKKEYASMY

SEQ ID NO: 82595 - protein, 11 aa, Homo sapiens
  misc_feature: Table A; Target 82595; HLA-C*07:01; STRA8; ENSG00000146857; CTA
EEVKKEYASMY

SEQ ID NO: 82596 - protein, 9 aa, Homo sapiens
  misc_feature: Table A; Target 82596; HLA-A*33:03; STRA8; ENSG00000146857; CTA
ELEHRVARR

SEQ ID NO: 82597 - protein, 10 aa, Homo sapiens
  misc_feature: Table A; Target 82597; HLA-A*26:01; STRA8; ENSG00000146857; CTA
ENPEEKFQLY

SEQ ID NO: 82598 - protein, 10 aa, Homo sapiens
  misc_feature: Table A; Target 82598; HLA-A*68:01; STRA8; ENSG00000146857; CTA
EPACAEGSVK

SEQ ID NO: 82599 - protein, 8 aa, Homo sapiens
  misc_feature: Table A; Target 82599; HLA-B*38:01; STRA8; ENSG00000146857; CTA
EQTLDNLL

SEQ ID NO: 82600 - protein, 8 aa, Homo sapiens
  misc_feature: Table A; Target 82600; HLA-B*39:01; STRA8; ENSG00000146857; CTA
EQTLDNLL

SEQ ID NO: 82601 - protein, 9 aa, Homo sapiens
  misc_feature: Table A; Target 82601; HLA-A*25:01; STRA8; ENSG00000146857; CTA
EVKKEYASM

SEQ ID NO: 82602 - protein, 9 aa, Homo sapiens
  misc_feature: Table A; Target 82602; HLA-A*33:01; STRA8; ENSG00000146857; CTA
EVKKEYASM

SEQ ID NO: 82603 - protein, 9 aa, Homo sapiens
  misc_feature: Table A; Target 82603; HLA-A*33:03; STRA8; ENSG00000146857; CTA
EVKKEYASM

SEQ ID NO: 82604 - protein, 9 aa, Homo sapiens
  misc_feature: Table A; Target 82604; HLA-B*08:01; STRA8; ENSG00000146857; CTA
EVKKEYASM

SEQ ID NO: 82605 - protein, 10 aa, Homo sapiens
  misc_feature: Table A; Target 82605; HLA-A*25:01; STRA8; ENSG00000146857; CTA
EVKKEYASMY

SEQ ID NO: 82606 - protein, 10 aa, Homo sapiens
  misc_feature: Table A; Target 82606; HLA-A*26:01; STRA8; ENSG00000146857; CTA
EVKKEYASMY

SEQ ID NO: 82607 - protein, 10 aa, Homo sapiens
  misc_feature: Table A; Target 82607; HLA-A*30:02; STRA8; ENSG00000146857; CTA
EVKKEYASMY

SEQ ID NO: 82608 - protein, 9 aa, Homo sapiens
  misc_feature: Table A; Target 82608; HLA-A*26:01; STRA8; ENSG00000146857; CTA
EVPSTSSSS

SEQ ID NO: 82609 - protein, 10 aa, Homo sapiens
  misc_feature: Table A; Target 82609; HLA-A*26:01; STRA8; ENSG00000146857; CTA
EVPSTSSSSS

SEQ ID NO: 82610 - protein, 11 aa, Homo sapiens
  misc_feature: Table A; Target 82610; HLA-A*25:01; STRA8; ENSG00000146857; CTA
EVPSTSSSSSV

SEQ ID NO: 82611 - protein, 11 aa, Homo sapiens
  misc_feature: Table A; Target 82611; HLA-A*26:01; STRA8; ENSG00000146857; CTA
EVPSTSSSSSV

SEQ ID NO: 82612 - protein, 11 aa, Homo sapiens
  misc_feature: Table A; Target 82612; HLA-C*01:02; STRA8; ENSG00000146857; CTA
EVPSTSSSSSV

SEQ ID NO: 82613 - protein, 8 aa, Homo sapiens
  misc_feature: Table A; Target 82613; HLA-C*07:01; STRA8; ENSG00000146857; CTA
EYASMYSG

SEQ ID NO: 82614 - protein, 9 aa, Homo sapiens
  misc_feature: Table A; Target 82614; HLA-B*27:02; STRA8; ENSG00000146857; CTA
FDVASFLDK

SEQ ID NO: 82615 - protein, 9 aa, Homo sapiens
  misc_feature: Table A; Target 82615; HLA-C*07:01; STRA8; ENSG00000146857; CTA
FDVASFLDK

SEQ ID NO: 82616 - protein, 8 aa, Homo sapiens
  misc_feature: Table A; Target 82616; HLA-B*18:01; STRA8; ENSG00000146857; CTA
FEDAFDVA

SEQ ID NO: 82617 - protein, 8 aa, Homo sapiens
  misc_feature: Table A; Target 82617; HLA-B*49:01; STRA8; ENSG00000146857; CTA
FEDAFDVA

SEQ ID NO: 82618 - protein, 10 aa, Homo sapiens
  misc_feature: Table A; Target 82618; HLA-B*18:01; STRA8; ENSG00000146857; CTA
FEDAFDVASF

SEQ ID NO: 82619 - protein, 10 aa, Homo sapiens
  misc_feature: Table A; Target 82619; HLA-B*37:01; STRA8; ENSG00000146857; CTA
FEDAFDVASF

SEQ ID NO: 82620 - protein, 10 aa, Homo sapiens
  misc_feature: Table A; Target 82620; HLA-B*38:01; STRA8; ENSG00000146857; CTA
FEDAFDVASF

SEQ ID NO: 82621 - protein, 10 aa, Homo sapiens
  misc_feature: Table A; Target 82621; HLA-B*40:01; STRA8; ENSG00000146857; CTA
FEDAFDVASF

SEQ ID NO: 82622 - protein, 10 aa, Homo sapiens
  misc_feature: Table A; Target 82622; HLA-B*49:01; STRA8; ENSG00000146857; CTA
FEDAFDVASF

SEQ ID NO: 82623 - protein, 9 aa, Homo sapiens
  misc_feature: Table A; Target 82623; HLA-B*57:01; STRA8; ENSG00000146857; CTA
FFNQEIRLW

SEQ ID NO: 82624 - protein, 10 aa, Homo sapiens
  misc_feature: Table A; Target 82624; HLA-A*02:01; STRA8; ENSG00000146857; CTA
FLDKSEVPST

SEQ ID NO: 82625 - protein, 10 aa, Homo sapiens
  misc_feature: Table A; Target 82625; HLA-A*02:07; STRA8; ENSG00000146857; CTA
FLDKSEVPST

SEQ ID NO: 82626 - protein, 11 aa, Homo sapiens
  misc_feature: Table A; Target 82626; HLA-C*03:03; STRA8; ENSG00000146857; CTA
FNLEDGHASSL

SEQ ID NO: 82627 - protein, 11 aa, Homo sapiens
  misc_feature: Table A; Target 82627; HLA-C*03:04; STRA8; ENSG00000146857; CTA
FNLEDGHASSL

SEQ ID NO: 82628 - protein, 11 aa, Homo sapiens
  misc_feature: Table A; Target 82628; HLA-C*14:02; STRA8; ENSG00000146857; CTA
FNLEDGHASSL

SEQ ID NO: 82629 - protein, 9 aa, Homo sapiens
  misc_feature: Table A; Target 82629; HLA-B*08:01; STRA8; ENSG00000146857; CTA
FNNLRKTVY

SEQ ID NO: 82630 - protein, 9 aa, Homo sapiens
  misc_feature: Table A; Target 82630; HLA-B*46:01; STRA8; ENSG00000146857; CTA
FNNLRKTVY

SEQ ID NO: 82631 - protein, 9 aa, Homo sapiens
  misc_feature: Table A; Target 82631; HLA-C*16:01; STRA8; ENSG00000146857; CTA
FNNLRKTVY

SEQ ID NO: 82632 - protein, 10 aa, Homo sapiens
  misc_feature: Table A; Target 82632; HLA-A*02:04; STRA8; ENSG00000146857; CTA
FNQEIRLWQL

SEQ ID NO: 82633 - protein, 9 aa, Homo sapiens
  misc_feature: Table A; Target 82633; HLA-A*25:01; STRA8; ENSG00000146857; CTA
FPQNGSSPW

SEQ ID NO: 82634 - protein, 9 aa, Homo sapiens
  misc_feature: Table A; Target 82634; HLA-A*33:03; STRA8; ENSG00000146857; CTA
FPQNGSSPW

SEQ ID NO: 82635 - protein, 9 aa, Homo sapiens
  misc_feature: Table A; Target 82635; HLA-B*35:01; STRA8; ENSG00000146857; CTA
FPQNGSSPW

SEQ ID NO: 82636 - protein, 9 aa, Homo sapiens
  misc_feature: Table A; Target 82636; HLA-B*35:03; STRA8; ENSG00000146857; CTA
FPQNGSSPW

SEQ ID NO: 82637 - protein, 9 aa, Homo sapiens
  misc_feature: Table A; Target 82637; HLA-C*03:04; STRA8; ENSG00000146857; CTA
FPQNGSSPW

SEQ ID NO: 82638 - protein, 10 aa, Homo sapiens
  misc_feature: Table A; Target 82638; HLA-A*30:02; STRA8; ENSG00000146857; CTA
FPQNGSSPWY

SEQ ID NO: 82639 - protein, 11 aa, Homo sapiens
  misc_feature: Table A; Target 82639; HLA-B*35:03; STRA8; ENSG00000146857; CTA
FPQNGSSPWYL

SEQ ID NO: 82640 - protein, 8 aa, Homo sapiens
  misc_feature: Table A; Target 82640; HLA-B*35:03; STRA8; ENSG00000146857; CTA
FPVDEEMI

SEQ ID NO: 82641 - protein, 8 aa, Homo sapiens
  misc_feature: Table A; Target 82641; HLA-B*51:01; STRA8; ENSG00000146857; CTA
FPVDEEMI

SEQ ID NO: 82642 - protein, 9 aa, Homo sapiens
  misc_feature: Table A; Target 82642; HLA-B*35:01; STRA8; ENSG00000146857; CTA
FPVDEEMIM

SEQ ID NO: 82643 - protein, 9 aa, Homo sapiens
  misc_feature: Table A; Target 82643; HLA-B*54:01; STRA8; ENSG00000146857; CTA
FPVDEEMIM

SEQ ID NO: 82644 - protein, 9 aa, Homo sapiens
  misc_feature: Table A; Target 82644; HLA-C*03:03; STRA8; ENSG00000146857; CTA
FPVDEEMIM

SEQ ID NO: 82645 - protein, 10 aa, Homo sapiens
  misc_feature: Table A; Target 82645; HLA-B*35:01; STRA8; ENSG00000146857; CTA
FPVDEEMIML

SEQ ID NO: 82646 - protein, 10 aa, Homo sapiens
  misc_feature: Table A; Target 82646; HLA-B*54:01; STRA8; ENSG00000146857; CTA
FPVDEEMIML

SEQ ID NO: 82647 - protein, 10 aa, Homo sapiens
  misc_feature: Table A; Target 82647; HLA-B*55:01; STRA8; ENSG00000146857; CTA
FPVDEEMIML

SEQ ID NO: 82648 - protein, 10 aa, Homo sapiens
  misc_feature: Table A; Target 82648; HLA-B*56:01; STRA8; ENSG00000146857; CTA
FPVDEEMIML

SEQ ID NO: 82649 - protein, 9 aa, Homo sapiens
  misc_feature: Table A; Target 82649; HLA-A*23:01; STRA8; ENSG00000146857; CTA
FYKQTMDLL

SEQ ID NO: 82650 - protein, 9 aa, Homo sapiens
  misc_feature: Table A; Target 82650; HLA-A*24:02; STRA8; ENSG00000146857; CTA
FYKQTMDLL

SEQ ID NO: 82651 - protein, 9 aa, Homo sapiens
  misc_feature: Table A; Target 82651; HLA-B*38:01; STRA8; ENSG00000146857; CTA
GHASSLEEV

SEQ ID NO: 82652 - protein, 9 aa, Homo sapiens
  misc_feature: Table A; Target 82652; HLA-B*39:01; STRA8; ENSG00000146857; CTA
GHASSLEEV

SEQ ID NO: 82653 - protein, 10 aa, Homo sapiens
  misc_feature: Table A; Target 82653; HLA-B*27:02; STRA8; ENSG00000146857; CTA
GHASSLEEVK

SEQ ID NO: 82654 - protein, 10 aa, Homo sapiens
  misc_feature: Table A; Target 82654; HLA-B*27:05; STRA8; ENSG00000146857; CTA
GHASSLEEVK

SEQ ID NO: 82655 - protein, 11 aa, Homo sapiens
  misc_feature: Table A; Target 82655; HLA-B*27:05; STRA8; ENSG00000146857; CTA
GHASSLEEVKK

SEQ ID NO: 82656 - protein, 9 aa, Homo sapiens
  misc_feature: Table A; Target 82656; HLA-B*15:01; STRA8; ENSG00000146857; CTA
GIITPQEAA

SEQ ID NO: 82657 - protein, 10 aa, Homo sapiens
  misc_feature: Table A; Target 82657; HLA-B*40:01; STRA8; ENSG00000146857; CTA
GIITPQEAAL

SEQ ID NO: 82658 - protein, 10 aa, Homo sapiens
  misc_feature: Table A; Target 82658; HLA-B*46:01; STRA8; ENSG00000146857; CTA
GIITPQEAAL

SEQ ID NO: 82659 - protein, 10 aa, Homo sapiens
  misc_feature: Table A; Target 82659; HLA-C*01:02; STRA8; ENSG00000146857; CTA
GIITPQEAAL

SEQ ID NO: 82660 - protein, 10 aa, Homo sapiens
  misc_feature: Table A; Target 82660; HLA-B*15:03; STRA8; ENSG00000146857; CTA
GKIDVDKILF

SEQ ID NO: 82661 - protein, 9 aa, Homo sapiens
  misc_feature: Table A; Target 82661; HLA-A*02:01; STRA8; ENSG00000146857; CTA
GLSCANTQV

SEQ ID NO: 82662 - protein, 9 aa, Homo sapiens
  misc_feature: Table A; Target 82662; HLA-A*02:03; STRA8; ENSG00000146857; CTA
GLSCANTQV

SEQ ID NO: 82663 - protein, 9 aa, Homo sapiens
  misc_feature: Table A; Target 82663; HLA-B*13:02; STRA8; ENSG00000146857; CTA
GLSCANTQV

SEQ ID NO: 82664 - protein, 9 aa, Homo sapiens
  misc_feature: Table A; Target 82664; HLA-B*55:01; STRA8; ENSG00000146857; CTA
GLSCANTQV

SEQ ID NO: 82665 - protein, 10 aa, Homo sapiens
  misc_feature: Table A; Target 82665; HLA-A*03:01; STRA8; ENSG00000146857; CTA
GLSCANTQVK

SEQ ID NO: 82666 - protein, 10 aa, Homo sapiens
  misc_feature: Table A; Target 82666; HLA-A*03:02; STRA8; ENSG00000146857; CTA
GLSCANTQVK

SEQ ID NO: 82667 - protein, 8 aa, Homo sapiens
  misc_feature: Table A; Target 82667; HLA-B*55:01; STRA8; ENSG00000146857; CTA
GPATLAEA

SEQ ID NO: 82668 - protein, 8 aa, Homo sapiens
  misc_feature: Table A; Target 82668; HLA-B*56:01; STRA8; ENSG00000146857; CTA
GPATLAEA

SEQ ID NO: 82669 - protein, 9 aa, Homo sapiens
  misc_feature: Table A; Target 82669; HLA-B*56:01; STRA8; ENSG00000146857; CTA
GPATLAEAC

SEQ ID NO: 82670 - protein, 9 aa, Homo sapiens
  misc_feature: Table A; Target 82670; HLA-B*57:01; STRA8; ENSG00000146857; CTA
GSSPWYLNF

SEQ ID NO: 82671 - protein, 10 aa, Homo sapiens
  misc_feature: Table A; Target 82671; HLA-A*29:02; STRA8; ENSG00000146857; CTA
GSSPWYLNFY

SEQ ID NO: 82672 - protein, 10 aa, Homo sapiens
  misc_feature: Table A; Target 82672; HLA-A*30:02; STRA8; ENSG00000146857; CTA
GSSPWYLNFY

SEQ ID NO: 82673 - protein, 9 aa, Homo sapiens
  misc_feature: Table A; Target 82673; HLA-B*55:01; STRA8; ENSG00000146857; CTA
GVDSQGASC

SEQ ID NO: 82674 - protein, 9 aa, Homo sapiens
  misc_feature: Table A; Target 82674; HLA-C*05:01; STRA8; ENSG00000146857; CTA
GVDSQGASC

SEQ ID NO: 82675 - protein, 11 aa, Homo sapiens
  misc_feature: Table A; Target 82675; HLA-B*27:05; STRA8; ENSG00000146857; CTA
GVDSQGASCSL

SEQ ID NO: 82676 - protein, 11 aa, Homo sapiens
  misc_feature: Table A; Target 82676; HLA-B*35:03; STRA8; ENSG00000146857; CTA
GVDSQGASCSL

SEQ ID NO: 82677 - protein, 11 aa, Homo sapiens
  misc_feature: Table A; Target 82677; HLA-B*55:01; STRA8; ENSG00000146857; CTA
GVDSQGASCSL

SEQ ID NO: 82678 - protein, 11 aa, Homo sapiens
  misc_feature: Table A; Target 82678; HLA-C*05:01; STRA8; ENSG00000146857; CTA
GVDSQGASCSL

SEQ ID NO: 82679 - protein, 8 aa, Homo sapiens
  misc_feature: Table A; Target 82679; HLA-B*51:01; STRA8; ENSG00000146857; CTA
HASSLEEV

SEQ ID NO: 82680 - protein, 8 aa, Homo sapiens
  misc_feature: Table A; Target 82680; HLA-B*54:01; STRA8; ENSG00000146857; CTA
HASSLEEV

SEQ ID NO: 82681 - protein, 8 aa, Homo sapiens
  misc_feature: Table A; Target 82681; HLA-C*16:02; STRA8; ENSG00000146857; CTA
HASSLEEV

SEQ ID NO: 82682 - protein, 9 aa, Homo sapiens
  misc_feature: Table A; Target 82682; HLA-A*03:02; STRA8; ENSG00000146857; CTA
HASSLEEVK

SEQ ID NO: 82683 - protein, 9 aa, Homo sapiens
  misc_feature: Table A; Target 82683; HLA-A*11:01; STRA8; ENSG00000146857; CTA
HASSLEEVK

SEQ ID NO: 82684 - protein, 9 aa, Homo sapiens
  misc_feature: Table A; Target 82684; HLA-A*68:01; STRA8; ENSG00000146857; CTA
HASSLEEVK

SEQ ID NO: 82685 - protein, 9 aa, Homo sapiens
  misc_feature: Table A; Target 82685; HLA-B*27:02; STRA8; ENSG00000146857; CTA
HASSLEEVK

SEQ ID NO: 82686 - protein, 9 aa, Homo sapiens
  misc_feature: Table A; Target 82686; HLA-B*27:05; STRA8; ENSG00000146857; CTA
HASSLEEVK

SEQ ID NO: 82687 - protein, 9 aa, Homo sapiens
  misc_feature: Table A; Target 82687; HLA-B*35:01; STRA8; ENSG00000146857; CTA
HASSLEEVK

SEQ ID NO: 82688 - protein, 9 aa, Homo sapiens
  misc_feature: Table A; Target 82688; HLA-B*35:03; STRA8; ENSG00000146857; CTA
HASSLEEVK

SEQ ID NO: 82689 - protein, 9 aa, Homo sapiens
  misc_feature: Table A; Target 82689; HLA-C*07:06; STRA8; ENSG00000146857; CTA
HASSLEEVK

SEQ ID NO: 82690 - protein, 10 aa, Homo sapiens
  misc_feature: Table A; Target 82690; HLA-A*03:02; STRA8; ENSG00000146857; CTA
HASSLEEVKK

SEQ ID NO: 82691 - protein, 10 aa, Homo sapiens
  misc_feature: Table A; Target 82691; HLA-A*11:01; STRA8; ENSG00000146857; CTA
HASSLEEVKK

SEQ ID NO: 82692 - protein, 10 aa, Homo sapiens
  misc_feature: Table A; Target 82692; HLA-A*68:01; STRA8; ENSG00000146857; CTA
HASSLEEVKK

SEQ ID NO: 82693 - protein, 10 aa, Homo sapiens
  misc_feature: Table A; Target 82693; HLA-B*27:02; STRA8; ENSG00000146857; CTA
HASSLEEVKK

SEQ ID NO: 82694 - protein, 10 aa, Homo sapiens
  misc_feature: Table A; Target 82694; HLA-C*07:06; STRA8; ENSG00000146857; CTA
HASSLEEVKK

SEQ ID NO: 82695 - protein, 8 aa, Homo sapiens
  misc_feature: Table A; Target 82695; HLA-B*37:01; STRA8; ENSG00000146857; CTA
HDRATPQL

SEQ ID NO: 82696 - protein, 9 aa, Homo sapiens
  misc_feature: Table A; Target 82696; HLA-A*02:07; STRA8; ENSG00000146857; CTA
HIPELEQTL

SEQ ID NO: 82697 - protein, 9 aa, Homo sapiens
  misc_feature: Table A; Target 82697; HLA-A*24:02; STRA8; ENSG00000146857; CTA
HIPELEQTL

SEQ ID NO: 82698 - protein, 9 aa, Homo sapiens
  misc_feature: Table A; Target 82698; HLA-A*68:02; STRA8; ENSG00000146857; CTA
HIPELEQTL

SEQ ID NO: 82699 - protein, 9 aa, Homo sapiens
  misc_feature: Table A; Target 82699; HLA-B*08:01; STRA8; ENSG00000146857; CTA
HIPELEQTL

SEQ ID NO: 82700 - protein, 9 aa, Homo sapiens
  misc_feature: Table A; Target 82700; HLA-B*13:02; STRA8; ENSG00000146857; CTA
HIPELEQTL

SEQ ID NO: 82701 - protein, 9 aa, Homo sapiens
  misc_feature: Table A; Target 82701; HLA-B*27:05; STRA8; ENSG00000146857; CTA
HIPELEQTL

SEQ ID NO: 82702 - protein, 9 aa, Homo sapiens
  misc_feature: Table A; Target 82702; HLA-B*35:03; STRA8; ENSG00000146857; CTA
HIPELEQTL

SEQ ID NO: 82703 - protein, 9 aa, Homo sapiens
  misc_feature: Table A; Target 82703; HLA-B*38:01; STRA8; ENSG00000146857; CTA
HIPELEQTL

SEQ ID NO: 82704 - protein, 9 aa, Homo sapiens
  misc_feature: Table A; Target 82704; HLA-B*39:01; STRA8; ENSG00000146857; CTA
HIPELEQTL

SEQ ID NO: 82705 - protein, 9 aa, Homo sapiens
  misc_feature: Table A; Target 82705; HLA-B*40:01; STRA8; ENSG00000146857; CTA
HIPELEQTL

SEQ ID NO: 82706 - protein, 9 aa, Homo sapiens
  misc_feature: Table A; Target 82706; HLA-B*51:01; STRA8; ENSG00000146857; CTA
HIPELEQTL

SEQ ID NO: 82707 - protein, 9 aa, Homo sapiens
  misc_feature: Table A; Target 82707; HLA-B*58:01; STRA8; ENSG00000146857; CTA
HIPELEQTL

SEQ ID NO: 82708 - protein, 9 aa, Homo sapiens
  misc_feature: Table A; Target 82708; HLA-C*01:02; STRA8; ENSG00000146857; CTA
HIPELEQTL

SEQ ID NO: 82709 - protein, 9 aa, Homo sapiens
  misc_feature: Table A; Target 82709; HLA-C*07:04; STRA8; ENSG00000146857; CTA
HIPELEQTL

SEQ ID NO: 82710 - protein, 9 aa, Homo sapiens
  misc_feature: Table A; Target 82710; HLA-C*16:04; STRA8; ENSG00000146857; CTA
HRATLAALF

SEQ ID NO: 82711 - protein, 8 aa, Homo sapiens
  misc_feature: Table A; Target 82711; HLA-B*37:01; STRA8; ENSG00000146857; CTA
IDVDKILF

SEQ ID NO: 82712 - protein, 8 aa, Homo sapiens
  misc_feature: Table A; Target 82712; HLA-C*04:01; STRA8; ENSG00000146857; CTA
IDVDKILF

SEQ ID NO: 82713 - protein, 8 aa, Homo sapiens
  misc_feature: Table A; Target 82713; HLA-C*07:01; STRA8; ENSG00000146857; CTA
IDVDKILF

SEQ ID NO: 82714 - protein, 9 aa, Homo sapiens
  misc_feature: Table A; Target 82714; HLA-A*23:01; STRA8; ENSG00000146857; CTA
IDVDKILFF

SEQ ID NO: 82715 - protein, 9 aa, Homo sapiens
  misc_feature: Table A; Target 82715; HLA-A*24:02; STRA8; ENSG00000146857; CTA
IDVDKILFF

SEQ ID NO: 82716 - protein, 9 aa, Homo sapiens
  misc_feature: Table A; Target 82716; HLA-B*44:02; STRA8; ENSG00000146857; CTA
IDVDKILFF

SEQ ID NO: 82717 - protein, 9 aa, Homo sapiens
  misc_feature: Table A; Target 82717; HLA-B*44:03; STRA8; ENSG00000146857; CTA
IDVDKILFF

SEQ ID NO: 82718 - protein, 9 aa, Homo sapiens
  misc_feature: Table A; Target 82718; HLA-B*57:01; STRA8; ENSG00000146857; CTA
IDVDKILFF

SEQ ID NO: 82719 - protein, 9 aa, Homo sapiens
  misc_feature: Table A; Target 82719; HLA-C*12:03; STRA8; ENSG00000146857; CTA
IDVDKILFF

SEQ ID NO: 82720 - protein, 9 aa, Homo sapiens
  misc_feature: Table A; Target 82720; HLA-A*30:01; STRA8; ENSG00000146857; CTA
IITPQEAAL

SEQ ID NO: 82721 - protein, 9 aa, Homo sapiens
  misc_feature: Table A; Target 82721; HLA-A*32:01; STRA8; ENSG00000146857; CTA
IITPQEAAL

SEQ ID NO: 82722 - protein, 9 aa, Homo sapiens
  misc_feature: Table A; Target 82722; HLA-B*07:02; STRA8; ENSG00000146857; CTA
IITPQEAAL

SEQ ID NO: 82723 - protein, 9 aa, Homo sapiens
  misc_feature: Table A; Target 82723; HLA-B*15:01; STRA8; ENSG00000146857; CTA
IITPQEAAL

SEQ ID NO: 82724 - protein, 9 aa, Homo sapiens
  misc_feature: Table A; Target 82724; HLA-B*15:03; STRA8; ENSG00000146857; CTA
IITPQEAAL

SEQ ID NO: 82725 - protein, 9 aa, Homo sapiens
  misc_feature: Table A; Target 82725; HLA-B*35:03; STRA8; ENSG00000146857; CTA
IITPQEAAL

SEQ ID NO: 82726 - protein, 9 aa, Homo sapiens
  misc_feature: Table A; Target 82726; HLA-B*38:01; STRA8; ENSG00000146857; CTA
IITPQEAAL

SEQ ID NO: 82727 - protein, 9 aa, Homo sapiens
  misc_feature: Table A; Target 82727; HLA-B*39:01; STRA8; ENSG00000146857; CTA
IITPQEAAL

SEQ ID NO: 82728 - protein, 9 aa, Homo sapiens
  misc_feature: Table A; Target 82728; HLA-B*40:01; STRA8; ENSG00000146857; CTA
IITPQEAAL

SEQ ID NO: 82729 - protein, 9 aa, Homo sapiens
  misc_feature: Table A; Target 82729; HLA-B*46:01; STRA8; ENSG00000146857; CTA
IITPQEAAL

SEQ ID NO: 82730 - protein, 9 aa, Homo sapiens
  misc_feature: Table A; Target 82730; HLA-B*58:01; STRA8; ENSG00000146857; CTA
IITPQEAAL

SEQ ID NO: 82731 - protein, 9 aa, Homo sapiens
  misc_feature: Table A; Target 82731; HLA-C*01:02; STRA8; ENSG00000146857; CTA
IITPQEAAL

SEQ ID NO: 82732 - protein, 9 aa, Homo sapiens
  misc_feature: Table A; Target 82732; HLA-C*03:03; STRA8; ENSG00000146857; CTA
IITPQEAAL

SEQ ID NO: 82733 - protein, 9 aa, Homo sapiens
  misc_feature: Table A; Target 82733; HLA-C*03:04; STRA8; ENSG00000146857; CTA
IITPQEAAL

SEQ ID NO: 82734 - protein, 9 aa, Homo sapiens
  misc_feature: Table A; Target 82734; HLA-C*07:04; STRA8; ENSG00000146857; CTA
IITPQEAAL

SEQ ID NO: 82735 - protein, 9 aa, Homo sapiens
  misc_feature: Table A; Target 82735; HLA-C*14:02; STRA8; ENSG00000146857; CTA
IITPQEAAL

SEQ ID NO: 82736 - protein, 9 aa, Homo sapiens
  misc_feature: Table A; Target 82736; HLA-C*16:01; STRA8; ENSG00000146857; CTA
IITPQEAAL

SEQ ID NO: 82737 - protein, 9 aa, Homo sapiens
  misc_feature: Table A; Target 82737; HLA-C*16:02; STRA8; ENSG00000146857; CTA
IITPQEAAL

SEQ ID NO: 82738 - protein, 9 aa, Homo sapiens
  misc_feature: Table A; Target 82738; HLA-A*02:01; STRA8; ENSG00000146857; CTA
ILFEDAFDV

SEQ ID NO: 82739 - protein, 9 aa, Homo sapiens
  misc_feature: Table A; Target 82739; HLA-A*02:04; STRA8; ENSG00000146857; CTA
ILFEDAFDV

SEQ ID NO: 82740 - protein, 9 aa, Homo sapiens
  misc_feature: Table A; Target 82740; HLA-A*02:07; STRA8; ENSG00000146857; CTA
ILFEDAFDV

SEQ ID NO: 82741 - protein, 9 aa, Homo sapiens
  misc_feature: Table A; Target 82741; HLA-B*13:02; STRA8; ENSG00000146857; CTA
ILFEDAFDV

SEQ ID NO: 82742 - protein, 10 aa, Homo sapiens
  misc_feature: Table A; Target 82742; HLA-A*02:01; STRA8; ENSG00000146857; CTA
ILFEDAFDVA

SEQ ID NO: 82743 - protein, 8 aa, Homo sapiens
  misc_feature: Table A; Target 82743; HLA-B*13:02; STRA8; ENSG00000146857; CTA
ILFFNQEI

SEQ ID NO: 82744 - protein, 10 aa, Homo sapiens
  misc_feature: Table A; Target 82744; HLA-A*02:01; STRA8; ENSG00000146857; CTA
ILFFNQEIRL

SEQ ID NO: 82745 - protein, 10 aa, Homo sapiens
  misc_feature: Table A; Target 82745; HLA-A*02:04; STRA8; ENSG00000146857; CTA
ILFFNQEIRL

SEQ ID NO: 82746 - protein, 11 aa, Homo sapiens
  misc_feature: Table A; Target 82746; HLA-B*57:01; STRA8; ENSG00000146857; CTA
ILFFNQEIRLW

SEQ ID NO: 82747 - protein, 9 aa, Homo sapiens
  misc_feature: Table A; Target 82747; HLA-A*23:01; STRA8; ENSG00000146857; CTA
IMLQCTETF

SEQ ID NO: 82748 - protein, 9 aa, Homo sapiens
  misc_feature: Table A; Target 82748; HLA-A*24:02; STRA8; ENSG00000146857; CTA
IMLQCTETF

SEQ ID NO: 82749 - protein, 9 aa, Homo sapiens
  misc_feature: Table A; Target 82749; HLA-B*15:01; STRA8; ENSG00000146857; CTA
IMLQCTETF

SEQ ID NO: 82750 - protein, 9 aa, Homo sapiens
  misc_feature: Table A; Target 82750; HLA-B*46:01; STRA8; ENSG00000146857; CTA
IMLQCTETF

SEQ ID NO: 82751 - protein, 9 aa, Homo sapiens
  misc_feature: Table A; Target 82751; HLA-B*58:01; STRA8; ENSG00000146857; CTA
IMLQCTETF

SEQ ID NO: 82752 - protein, 9 aa, Homo sapiens
  misc_feature: Table A; Target 82752; HLA-C*04:01; STRA8; ENSG00000146857; CTA
IMLQCTETF

SEQ ID NO: 82753 - protein, 9 aa, Homo sapiens
  misc_feature: Table A; Target 82753; HLA-C*14:02; STRA8; ENSG00000146857; CTA
IMLQCTETF

SEQ ID NO: 82754 - protein, 8 aa, Homo sapiens
  misc_feature: Table A; Target 82754; HLA-B*35:03; STRA8; ENSG00000146857; CTA
IPELEQTL

SEQ ID NO: 82755 - protein, 8 aa, Homo sapiens
  misc_feature: Table A; Target 82755; HLA-C*03:03; STRA8; ENSG00000146857; CTA
IPELEQTL

SEQ ID NO: 82756 - protein, 8 aa, Homo sapiens
  misc_feature: Table A; Target 82756; HLA-C*05:01; STRA8; ENSG00000146857; CTA
IPELEQTL

SEQ ID NO: 82757 - protein, 8 aa, Homo sapiens
  misc_feature: Table A; Target 82757; HLA-C*01:02; STRA8; ENSG00000146857; CTA
ITPQEAAL

SEQ ID NO: 82758 - protein, 11 aa, Homo sapiens
  misc_feature: Table A; Target 82758; HLA-A*02:07; STRA8; ENSG00000146857; CTA
ITPQEAALPIV

SEQ ID NO: 82759 - protein, 9 aa, Homo sapiens
  misc_feature: Table A; Target 82759; HLA-A*02:03; STRA8; ENSG00000146857; CTA
IVSAAISHL

SEQ ID NO: 82760 - protein, 9 aa, Homo sapiens
  misc_feature: Table A; Target 82760; HLA-A*02:04; STRA8; ENSG00000146857; CTA
IVSAAISHL

SEQ ID NO: 82761 - protein, 9 aa, Homo sapiens
  misc_feature: Table A; Target 82761; HLA-A*03:01; STRA8; ENSG00000146857; CTA
IVSAAISHL

SEQ ID NO: 82762 - protein, 9 aa, Homo sapiens
  misc_feature: Table A; Target 82762; HLA-A*23:01; STRA8; ENSG00000146857; CTA
IVSAAISHL

SEQ ID NO: 82763 - protein, 9 aa, Homo sapiens
  misc_feature: Table A; Target 82763; HLA-A*25:01; STRA8; ENSG00000146857; CTA
IVSAAISHL

SEQ ID NO: 82764 - protein, 9 aa, Homo sapiens
  misc_feature: Table A; Target 82764; HLA-A*26:01; STRA8; ENSG00000146857; CTA
IVSAAISHL

SEQ ID NO: 82765 - protein, 9 aa, Homo sapiens
  misc_feature: Table A; Target 82765; HLA-A*32:01; STRA8; ENSG00000146857; CTA
IVSAAISHL

SEQ ID NO: 82766 - protein, 9 aa, Homo sapiens
  misc_feature: Table A; Target 82766; HLA-A*68:01; STRA8; ENSG00000146857; CTA
IVSAAISHL

SEQ ID NO: 82767 - protein, 9 aa, Homo sapiens
  misc_feature: Table A; Target 82767; HLA-A*68:02; STRA8; ENSG00000146857; CTA
IVSAAISHL

SEQ ID NO: 82768 - protein, 9 aa, Homo sapiens
  misc_feature: Table A; Target 82768; HLA-B*13:02; STRA8; ENSG00000146857; CTA
IVSAAISHL

SEQ ID NO: 82769 - protein, 9 aa, Homo sapiens
  misc_feature: Table A; Target 82769; HLA-B*27:05; STRA8; ENSG00000146857; CTA
IVSAAISHL

SEQ ID NO: 82770 - protein, 9 aa, Homo sapiens
  misc_feature: Table A; Target 82770; HLA-B*37:01; STRA8; ENSG00000146857; CTA
IVSAAISHL

SEQ ID NO: 82771 - protein, 9 aa, Homo sapiens
  misc_feature: Table A; Target 82771; HLA-B*38:01; STRA8; ENSG00000146857; CTA
IVSAAISHL

SEQ ID NO: 82772 - protein, 9 aa, Homo sapiens
  misc_feature: Table A; Target 82772; HLA-B*58:01; STRA8; ENSG00000146857; CTA
IVSAAISHL

SEQ ID NO: 82773 - protein, 9 aa, Homo sapiens
  misc_feature: Table A; Target 82773; HLA-C*01:02; STRA8; ENSG00000146857; CTA
IVSAAISHL

SEQ ID NO: 82774 - protein, 9 aa, Homo sapiens
  misc_feature: Table A; Target 82774; HLA-C*02:02; STRA8; ENSG00000146857; CTA
IVSAAISHL

SEQ ID NO: 82775 - protein, 9 aa, Homo sapiens
  misc_feature: Table A; Target 82775; HLA-C*03:03; STRA8; ENSG00000146857; CTA
IVSAAISHL

SEQ ID NO: 82776 - protein, 9 aa, Homo sapiens
  misc_feature: Table A; Target 82776; HLA-C*03:04; STRA8; ENSG00000146857; CTA
IVSAAISHL

SEQ ID NO: 82777 - protein, 9 aa, Homo sapiens
  misc_feature: Table A; Target 82777; HLA-C*05:01; STRA8; ENSG00000146857; CTA
IVSAAISHL

SEQ ID NO: 82778 - protein, 9 aa, Homo sapiens
  misc_feature: Table A; Target 82778; HLA-C*07:04; STRA8; ENSG00000146857; CTA
IVSAAISHL

SEQ ID NO: 82779 - protein, 9 aa, Homo sapiens
  misc_feature: Table A; Target 82779; HLA-C*07:06; STRA8; ENSG00000146857; CTA
IVSAAISHL

SEQ ID NO: 82780 - protein, 9 aa, Homo sapiens
  misc_feature: Table A; Target 82780; HLA-C*12:03; STRA8; ENSG00000146857; CTA
IVSAAISHL

SEQ ID NO: 82781 - protein, 9 aa, Homo sapiens
  misc_feature: Table A; Target 82781; HLA-C*16:02; STRA8; ENSG00000146857; CTA
IVSAAISHL

SEQ ID NO: 82782 - protein, 10 aa, Homo sapiens
  misc_feature: Table A; Target 82782; HLA-A*24:02; STRA8; ENSG00000146857; CTA
IVSAAISHLW

SEQ ID NO: 82783 - protein, 10 aa, Homo sapiens
  misc_feature: Table A; Target 82783; HLA-A*25:01; STRA8; ENSG00000146857; CTA
IVSAAISHLW

SEQ ID NO: 82784 - protein, 10 aa, Homo sapiens
  misc_feature: Table A; Target 82784; HLA-B*44:02; STRA8; ENSG00000146857; CTA
IVSAAISHLW

SEQ ID NO: 82785 - protein, 10 aa, Homo sapiens
  misc_feature: Table A; Target 82785; HLA-B*44:03; STRA8; ENSG00000146857; CTA
IVSAAISHLW

SEQ ID NO: 82786 - protein, 10 aa, Homo sapiens
  misc_feature: Table A; Target 82786; HLA-B*57:01; STRA8; ENSG00000146857; CTA
IVSAAISHLW

SEQ ID NO: 82787 - protein, 10 aa, Homo sapiens
  misc_feature: Table A; Target 82787; HLA-B*58:01; STRA8; ENSG00000146857; CTA
IVSAAISHLW

SEQ ID NO: 82788 - protein, 9 aa, Homo sapiens
  misc_feature: Table A; Target 82788; HLA-B*40:02; STRA8; ENSG00000146857; CTA
KAKSHIPEL

SEQ ID NO: 82789 - protein, 9 aa, Homo sapiens
  misc_feature: Table A; Target 82789; HLA-B*46:01; STRA8; ENSG00000146857; CTA
KAKSHIPEL

SEQ ID NO: 82790 - protein, 9 aa, Homo sapiens
  misc_feature: Table A; Target 82790; HLA-B*57:01; STRA8; ENSG00000146857; CTA
KAKSHIPEL

SEQ ID NO: 82791 - protein, 9 aa, Homo sapiens
  misc_feature: Table A; Target 82791; HLA-B*58:01; STRA8; ENSG00000146857; CTA
KAKSHIPEL

SEQ ID NO: 82792 - protein, 9 aa, Homo sapiens
  misc_feature: Table A; Target 82792; HLA-C*12:03; STRA8; ENSG00000146857; CTA
KAKSHIPEL

SEQ ID NO: 82793 - protein, 9 aa, Homo sapiens
  misc_feature: Table A; Target 82793; HLA-C*16:01; STRA8; ENSG00000146857; CTA
KAKSHIPEL

SEQ ID NO: 82794 - protein, 9 aa, Homo sapiens
  misc_feature: Table A; Target 82794; HLA-C*16:02; STRA8; ENSG00000146857; CTA
KAKSHIPEL

SEQ ID NO: 82795 - protein, 8 aa, Homo sapiens
  misc_feature: Table A; Target 82795; HLA-A*32:01; STRA8; ENSG00000146857; CTA
KASLRQAW

SEQ ID NO: 82796 - protein, 8 aa, Homo sapiens
  misc_feature: Table A; Target 82796; HLA-C*16:01; STRA8; ENSG00000146857; CTA
KASLRQAW

SEQ ID NO: 82797 - protein, 9 aa, Homo sapiens
  misc_feature: Table A; Target 82797; HLA-B*40:02; STRA8; ENSG00000146857; CTA
KEYASMYSG

SEQ ID NO: 82798 - protein, 9 aa, Homo sapiens
  misc_feature: Table A; Target 82798; HLA-B*49:01; STRA8; ENSG00000146857; CTA
KEYASMYSG

SEQ ID NO: 82799 - protein, 9 aa, Homo sapiens
  misc_feature: Table A; Target 82799; HLA-C*06:02; STRA8; ENSG00000146857; CTA
KEYASMYSG

SEQ ID NO: 82800 - protein, 9 aa, Homo sapiens
  misc_feature: Table A; Target 82800; HLA-A*02:07; STRA8; ENSG00000146857; CTA
KIDVDKILF

SEQ ID NO: 82801 - protein, 10 aa, Homo sapiens
  misc_feature: Table A; Target 82801; HLA-A*02:07; STRA8; ENSG00000146857; CTA
KIDVDKILFF

SEQ ID NO: 82802 - protein, 9 aa, Homo sapiens
  misc_feature: Table A; Target 82802; HLA-A*02:01; STRA8; ENSG00000146857; CTA
KILFFNQEI

SEQ ID NO: 82803 - protein, 9 aa, Homo sapiens
  misc_feature: Table A; Target 82803; HLA-A*02:04; STRA8; ENSG00000146857; CTA
KILFFNQEI

SEQ ID NO: 82804 - protein, 9 aa, Homo sapiens
  misc_feature: Table A; Target 82804; HLA-A*02:07; STRA8; ENSG00000146857; CTA
KILFFNQEI

SEQ ID NO: 82805 - protein, 9 aa, Homo sapiens
  misc_feature: Table A; Target 82805; HLA-C*05:01; STRA8; ENSG00000146857; CTA
KSEVPSTSS

SEQ ID NO: 82806 - protein, 11 aa, Homo sapiens
  misc_feature: Table A; Target 82806; HLA-C*06:02; STRA8; ENSG00000146857; CTA
KSHIPELEQTL

SEQ ID NO: 82807 - protein, 9 aa, Homo sapiens
  misc_feature: Table A; Target 82807; HLA-B*58:01; STRA8; ENSG00000146857; CTA
KTVYSQSDL

SEQ ID NO: 82808 - protein, 9 aa, Homo sapiens
  misc_feature: Table A; Target 82808; HLA-C*03:04; STRA8; ENSG00000146857; CTA
KTVYSQSDL

SEQ ID NO: 82809 - protein, 10 aa, Homo sapiens
  misc_feature: Table A; Target 82809; HLA-B*07:02; STRA8; ENSG00000146857; CTA
KTVYSQSDLI

SEQ ID NO: 82810 - protein, 10 aa, Homo sapiens
  misc_feature: Table A; Target 82810; HLA-C*07:02; STRA8; ENSG00000146857; CTA
KTVYSQSDLI

SEQ ID NO: 82811 - protein, 8 aa, Homo sapiens
  misc_feature: Table A; Target 82811; HLA-B*08:01; STRA8; ENSG00000146857; CTA
LAALFNNL

SEQ ID NO: 82812 - protein, 8 aa, Homo sapiens
  misc_feature: Table A; Target 82812; HLA-B*46:01; STRA8; ENSG00000146857; CTA
LAALFNNL

SEQ ID NO: 82813 - protein, 8 aa, Homo sapiens
  misc_feature: Table A; Target 82813; HLA-B*51:01; STRA8; ENSG00000146857; CTA
LAALFNNL

SEQ ID NO: 82814 - protein, 8 aa, Homo sapiens
  misc_feature: Table A; Target 82814; HLA-C*01:02; STRA8; ENSG00000146857; CTA
LAALFNNL

SEQ ID NO: 82815 - protein, 8 aa, Homo sapiens
  misc_feature: Table A; Target 82815; HLA-C*03:03; STRA8; ENSG00000146857; CTA
LAALFNNL

SEQ ID NO: 82816 - protein, 8 aa, Homo sapiens
  misc_feature: Table A; Target 82816; HLA-C*03:04; STRA8; ENSG00000146857; CTA
LAALFNNL

SEQ ID NO: 82817 - protein, 8 aa, Homo sapiens
  misc_feature: Table A; Target 82817; HLA-C*07:04; STRA8; ENSG00000146857; CTA
LAALFNNL

SEQ ID NO: 82818 - protein, 8 aa, Homo sapiens
  misc_feature: Table A; Target 82818; HLA-C*16:01; STRA8; ENSG00000146857; CTA
LAALFNNL

SEQ ID NO: 82819 - protein, 8 aa, Homo sapiens
  misc_feature: Table A; Target 82819; HLA-C*16:02; STRA8; ENSG00000146857; CTA
LAALFNNL

SEQ ID NO: 82820 - protein, 9 aa, Homo sapiens
  misc_feature: Table A; Target 82820; HLA-A*68:01; STRA8; ENSG00000146857; CTA
LAALFNNLR

SEQ ID NO: 82821 - protein, 9 aa, Homo sapiens
  misc_feature: Table A; Target 82821; HLA-A*02:07; STRA8; ENSG00000146857; CTA
LEDGHASSL

SEQ ID NO: 82822 - protein, 9 aa, Homo sapiens
  misc_feature: Table A; Target 82822; HLA-A*30:01; STRA8; ENSG00000146857; CTA
LEDGHASSL

SEQ ID NO: 82823 - protein, 9 aa, Homo sapiens
  misc_feature: Table A; Target 82823; HLA-B*07:02; STRA8; ENSG00000146857; CTA
LEDGHASSL

SEQ ID NO: 82824 - protein, 9 aa, Homo sapiens
  misc_feature: Table A; Target 82824; HLA-B*18:01; STRA8; ENSG00000146857; CTA
LEDGHASSL

SEQ ID NO: 82825 - protein, 9 aa, Homo sapiens
  misc_feature: Table A; Target 82825; HLA-B*35:03; STRA8; ENSG00000146857; CTA
LEDGHASSL

SEQ ID NO: 82826 - protein, 9 aa, Homo sapiens
  misc_feature: Table A; Target 82826; HLA-B*37:01; STRA8; ENSG00000146857; CTA
LEDGHASSL

SEQ ID NO: 82827 - protein, 9 aa, Homo sapiens
  misc_feature: Table A; Target 82827; HLA-B*38:01; STRA8; ENSG00000146857; CTA
LEDGHASSL

SEQ ID NO: 82828 - protein, 9 aa, Homo sapiens
  misc_feature: Table A; Target 82828; HLA-B*39:01; STRA8; ENSG00000146857; CTA
LEDGHASSL

SEQ ID NO: 82829 - protein, 9 aa, Homo sapiens
  misc_feature: Table A; Target 82829; HLA-B*40:02; STRA8; ENSG00000146857; CTA
LEDGHASSL

SEQ ID NO: 82830 - protein, 9 aa, Homo sapiens
  misc_feature: Table A; Target 82830; HLA-B*44:02; STRA8; ENSG00000146857; CTA
LEDGHASSL

SEQ ID NO: 82831 - protein, 9 aa, Homo sapiens
  misc_feature: Table A; Target 82831; HLA-B*44:03; STRA8; ENSG00000146857; CTA
LEDGHASSL

SEQ ID NO: 82832 - protein, 9 aa, Homo sapiens
  misc_feature: Table A; Target 82832; HLA-B*49:01; STRA8; ENSG00000146857; CTA
LEDGHASSL

SEQ ID NO: 82833 - protein, 9 aa, Homo sapiens
  misc_feature: Table A; Target 82833; HLA-C*03:03; STRA8; ENSG00000146857; CTA
LEDGHASSL

SEQ ID NO: 82834 - protein, 9 aa, Homo sapiens
  misc_feature: Table A; Target 82834; HLA-C*03:04; STRA8; ENSG00000146857; CTA
LEDGHASSL

SEQ ID NO: 82835 - protein, 9 aa, Homo sapiens
  misc_feature: Table A; Target 82835; HLA-C*04:01; STRA8; ENSG00000146857; CTA
LEDGHASSL

SEQ ID NO: 82836 - protein, 9 aa, Homo sapiens
  misc_feature: Table A; Target 82836; HLA-C*05:01; STRA8; ENSG00000146857; CTA
LEDGHASSL

SEQ ID NO: 82837 - protein, 9 aa, Homo sapiens
  misc_feature: Table A; Target 82837; HLA-C*07:02; STRA8; ENSG00000146857; CTA
LEDGHASSL

SEQ ID NO: 82838 - protein, 9 aa, Homo sapiens
  misc_feature: Table A; Target 82838; HLA-C*07:04; STRA8; ENSG00000146857; CTA
LEDGHASSL

SEQ ID NO: 82839 - protein, 9 aa, Homo sapiens
  misc_feature: Table A; Target 82839; HLA-C*12:03; STRA8; ENSG00000146857; CTA
LEDGHASSL

SEQ ID NO: 82840 - protein, 9 aa, Homo sapiens
  misc_feature: Table A; Target 82840; HLA-C*16:02; STRA8; ENSG00000146857; CTA
LEDGHASSL

SEQ ID NO: 82841 - protein, 8 aa, Homo sapiens
  misc_feature: Table A; Target 82841; HLA-B*18:01; STRA8; ENSG00000146857; CTA
LEEVKKEY

SEQ ID NO: 82842 - protein, 8 aa, Homo sapiens
  misc_feature: Table A; Target 82842; HLA-B*44:02; STRA8; ENSG00000146857; CTA
LEEVKKEY

SEQ ID NO: 82843 - protein, 8 aa, Homo sapiens
  misc_feature: Table A; Target 82843; HLA-B*44:03; STRA8; ENSG00000146857; CTA
LEEVKKEY

SEQ ID NO: 82844 - protein, 8 aa, Homo sapiens
  misc_feature: Table A; Target 82844; HLA-C*12:03; STRA8; ENSG00000146857; CTA
LEEVKKEY

SEQ ID NO: 82845 - protein, 8 aa, Homo sapiens
  misc_feature: Table A; Target 82845; HLA-C*16:02; STRA8; ENSG00000146857; CTA
LEEVKKEY

SEQ ID NO: 82846 - protein, 9 aa, Homo sapiens
  misc_feature: Table A; Target 82846; HLA-A*30:01; STRA8; ENSG00000146857; CTA
LEQTLDNLL

SEQ ID NO: 82847 - protein, 9 aa, Homo sapiens
  misc_feature: Table A; Target 82847; HLA-B*40:01; STRA8; ENSG00000146857; CTA
LEQTLDNLL

SEQ ID NO: 82848 - protein, 9 aa, Homo sapiens
  misc_feature: Table A; Target 82848; HLA-B*49:01; STRA8; ENSG00000146857; CTA
LEQTLDNLL

SEQ ID NO: 82849 - protein, 10 aa, Homo sapiens
  misc_feature: Table A; Target 82849; HLA-B*27:02; STRA8; ENSG00000146857; CTA
LEQTLDNLLK

SEQ ID NO: 82850 - protein, 11 aa, Homo sapiens
  misc_feature: Table A; Target 82850; HLA-B*40:01; STRA8; ENSG00000146857; CTA
LEQTLDNLLKL

SEQ ID NO: 82851 - protein, 10 aa, Homo sapiens
  misc_feature: Table A; Target 82851; HLA-B*57:01; STRA8; ENSG00000146857; CTA
LFFNQEIRLW

SEQ ID NO: 82852 - protein, 10 aa, Homo sapiens
  misc_feature: Table A; Target 82852; HLA-A*29:02; STRA8; ENSG00000146857; CTA
LFNNLRKTVY

SEQ ID NO: 82853 - protein, 8 aa, Homo sapiens
  misc_feature: Table A; Target 82853; HLA-B*08:01; STRA8; ENSG00000146857; CTA
LLKLKASF

SEQ ID NO: 82854 - protein, 8 aa, Homo sapiens
  misc_feature: Table A; Target 82854; HLA-B*08:01; STRA8; ENSG00000146857; CTA
LNFYKQTM

SEQ ID NO: 82855 - protein, 8 aa, Homo sapiens
  misc_feature: Table A; Target 82855; HLA-B*07:02; STRA8; ENSG00000146857; CTA
LPAQLQEL

SEQ ID NO: 82856 - protein, 8 aa, Homo sapiens
  misc_feature: Table A; Target 82856; HLA-B*08:01; STRA8; ENSG00000146857; CTA
LPAQLQEL

SEQ ID NO: 82857 - protein, 8 aa, Homo sapiens
  misc_feature: Table A; Target 82857; HLA-B*35:01; STRA8; ENSG00000146857; CTA
LPAQLQEL

SEQ ID NO: 82858 - protein, 8 aa, Homo sapiens
  misc_feature: Table A; Target 82858; HLA-B*35:03; STRA8; ENSG00000146857; CTA
LPAQLQEL

SEQ ID NO: 82859 - protein, 8 aa, Homo sapiens
  misc_feature: Table A; Target 82859; HLA-B*51:01; STRA8; ENSG00000146857; CTA
LPAQLQEL

SEQ ID NO: 82860 - protein, 8 aa, Homo sapiens
  misc_feature: Table A; Target 82860; HLA-B*56:01; STRA8; ENSG00000146857; CTA
LPAQLQEL

SEQ ID NO: 82861 - protein, 10 aa, Homo sapiens
  misc_feature: Table A; Target 82861; HLA-B*35:01; STRA8; ENSG00000146857; CTA
LPAQLQELEH

SEQ ID NO: 82862 - protein, 8 aa, Homo sapiens
  misc_feature: Table A; Target 82862; HLA-B*07:02; STRA8; ENSG00000146857; CTA
LPIVSAAI

SEQ ID NO: 82863 - protein, 8 aa, Homo sapiens
  misc_feature: Table A; Target 82863; HLA-B*08:01; STRA8; ENSG00000146857; CTA
LPIVSAAI

SEQ ID NO: 82864 - protein, 8 aa, Homo sapiens
  misc_feature: Table A; Target 82864; HLA-B*35:01; STRA8; ENSG00000146857; CTA
LPIVSAAI

SEQ ID NO: 82865 - protein, 8 aa, Homo sapiens
  misc_feature: Table A; Target 82865; HLA-B*35:03; STRA8; ENSG00000146857; CTA
LPIVSAAI

SEQ ID NO: 82866 - protein, 8 aa, Homo sapiens
  misc_feature: Table A; Target 82866; HLA-B*51:01; STRA8; ENSG00000146857; CTA
LPIVSAAI

SEQ ID NO: 82867 - protein, 8 aa, Homo sapiens
  misc_feature: Table A; Target 82867; HLA-B*54:01; STRA8; ENSG00000146857; CTA
LPIVSAAI

SEQ ID NO: 82868 - protein, 8 aa, Homo sapiens
  misc_feature: Table A; Target 82868; HLA-B*56:01; STRA8; ENSG00000146857; CTA
LPIVSAAI

SEQ ID NO: 82869 - protein, 8 aa, Homo sapiens
  misc_feature: Table A; Target 82869; HLA-C*07:02; STRA8; ENSG00000146857; CTA
LPIVSAAI

SEQ ID NO: 82870 - protein, 10 aa, Homo sapiens
  misc_feature: Table A; Target 82870; HLA-B*35:01; STRA8; ENSG00000146857; CTA
LPIVSAAISH

SEQ ID NO: 82871 - protein, 11 aa, Homo sapiens
  misc_feature: Table A; Target 82871; HLA-B*07:02; STRA8; ENSG00000146857; CTA
LPIVSAAISHL

SEQ ID NO: 82872 - protein, 11 aa, Homo sapiens
  misc_feature: Table A; Target 82872; HLA-B*35:01; STRA8; ENSG00000146857; CTA
LPIVSAAISHL

SEQ ID NO: 82873 - protein, 11 aa, Homo sapiens
  misc_feature: Table A; Target 82873; HLA-B*35:03; STRA8; ENSG00000146857; CTA
LPIVSAAISHL

SEQ ID NO: 82874 - protein, 11 aa, Homo sapiens
  misc_feature: Table A; Target 82874; HLA-C*07:02; STRA8; ENSG00000146857; CTA
LPIVSAAISHL

SEQ ID NO: 82875 - protein, 9 aa, Homo sapiens
  misc_feature: Table A; Target 82875; HLA-B*08:01; STRA8; ENSG00000146857; CTA
LSEERKASL

SEQ ID NO: 82876 - protein, 9 aa, Homo sapiens
  misc_feature: Table A; Target 82876; HLA-C*01:02; STRA8; ENSG00000146857; CTA
LSEERKASL

SEQ ID NO: 82877 - protein, 9 aa, Homo sapiens
  misc_feature: Table A; Target 82877; HLA-C*03:03; STRA8; ENSG00000146857; CTA
LSEERKASL

SEQ ID NO: 82878 - protein, 9 aa, Homo sapiens
  misc_feature: Table A; Target 82878; HLA-C*03:04; STRA8; ENSG00000146857; CTA
LSEERKASL

SEQ ID NO: 82879 - protein, 9 aa, Homo sapiens
  misc_feature: Table A; Target 82879; HLA-C*14:02; STRA8; ENSG00000146857; CTA
LSEERKASL

SEQ ID NO: 82880 - protein, 9 aa, Homo sapiens
  misc_feature: Table A; Target 82880; HLA-C*16:01; STRA8; ENSG00000146857; CTA
LSEERKASL

SEQ ID NO: 82881 - protein, 9 aa, Homo sapiens
  misc_feature: Table A; Target 82881; HLA-C*16:02; STRA8; ENSG00000146857; CTA
LSEERKASL

SEQ ID NO: 82882 - protein, 8 aa, Homo sapiens
  misc_feature: Table A; Target 82882; HLA-B*39:01; STRA8; ENSG00000146857; CTA
LVSTPEEI

SEQ ID NO: 82883 - protein, 9 aa, Homo sapiens
  misc_feature: Table A; Target 82883; HLA-B*35:03; STRA8; ENSG00000146857; CTA
LVSTPEEIL

SEQ ID NO: 82884 - protein, 9 aa, Homo sapiens
  misc_feature: Table A; Target 82884; HLA-B*38:01; STRA8; ENSG00000146857; CTA
LVSTPEEIL

SEQ ID NO: 82885 - protein, 9 aa, Homo sapiens
  misc_feature: Table A; Target 82885; HLA-B*39:01; STRA8; ENSG00000146857; CTA
LVSTPEEIL

SEQ ID NO: 82886 - protein, 9 aa, Homo sapiens
  misc_feature: Table A; Target 82886; HLA-C*05:01; STRA8; ENSG00000146857; CTA
LVSTPEEIL

SEQ ID NO: 82887 - protein, 10 aa, Homo sapiens
  misc_feature: Table A; Target 82887; HLA-A*01:01; STRA8; ENSG00000146857; CTA
LVSTPEEILF

SEQ ID NO: 82888 - protein, 10 aa, Homo sapiens
  misc_feature: Table A; Target 82888; HLA-B*27:02; STRA8; ENSG00000146857; CTA
LVSTPEEILF

SEQ ID NO: 82889 - protein, 10 aa, Homo sapiens
  misc_feature: Table A; Target 82889; HLA-B*57:01; STRA8; ENSG00000146857; CTA
LVSTPEEILF

SEQ ID NO: 82890 - protein, 8 aa, Homo sapiens
  misc_feature: Table A; Target 82890; HLA-A*23:01; STRA8; ENSG00000146857; CTA
LYMQIINF

SEQ ID NO: 82891 - protein, 8 aa, Homo sapiens
  misc_feature: Table A; Target 82891; HLA-A*24:02; STRA8; ENSG00000146857; CTA
LYMQIINF

SEQ ID NO: 82892 - protein, 9 aa, Homo sapiens
  misc_feature: Table A; Target 82892; HLA-A*23:01; STRA8; ENSG00000146857; CTA
LYMQIINFF

SEQ ID NO: 82893 - protein, 9 aa, Homo sapiens
  misc_feature: Table A; Target 82893; HLA-A*29:02; STRA8; ENSG00000146857; CTA
LYMQIINFF

SEQ ID NO: 82894 - protein, 11 aa, Homo sapiens
  misc_feature: Table A; Target 82894; HLA-C*04:01; STRA8; ENSG00000146857; CTA
MATPEENSNPH

SEQ ID NO: 82895 - protein, 8 aa, Homo sapiens
  misc_feature: Table A; Target 82895; HLA-B*39:01; STRA8; ENSG00000146857; CTA
MYSGNDSF

SEQ ID NO: 82896 - protein, 8 aa, Homo sapiens
  misc_feature: Table A; Target 82896; HLA-C*04:01; STRA8; ENSG00000146857; CTA
MYSGNDSF

SEQ ID NO: 82897 - protein, 8 aa, Homo sapiens
  misc_feature: Table A; Target 82897; HLA-C*14:02; STRA8; ENSG00000146857; CTA
MYSGNDSF

SEQ ID NO: 82898 - protein, 9 aa, Homo sapiens
  misc_feature: Table A; Target 82898; HLA-C*04:01; STRA8; ENSG00000146857; CTA
MYSGNDSFP

SEQ ID NO: 82899 - protein, 11 aa, Homo sapiens
  misc_feature: Table A; Target 82899; HLA-C*07:01; STRA8; ENSG00000146857; CTA
MYSGNDSFPQN

SEQ ID NO: 82900 - protein, 9 aa, Homo sapiens
  misc_feature: Table A; Target 82900; HLA-C*14:02; STRA8; ENSG00000146857; CTA
NFYKQTMDL

SEQ ID NO: 82901 - protein, 10 aa, Homo sapiens
  misc_feature: Table A; Target 82901; HLA-A*02:03; STRA8; ENSG00000146857; CTA
NLEDGHASSL

SEQ ID NO: 82902 - protein, 10 aa, Homo sapiens
  misc_feature: Table A; Target 82902; HLA-B*07:02; STRA8; ENSG00000146857; CTA
NLEDGHASSL

SEQ ID NO: 82903 - protein, 10 aa, Homo sapiens
  misc_feature: Table A; Target 82903; HLA-B*39:01; STRA8; ENSG00000146857; CTA
NLEDGHASSL

SEQ ID NO: 82904 - protein, 10 aa, Homo sapiens
  misc_feature: Table A; Target 82904; HLA-C*01:02; STRA8; ENSG00000146857; CTA
NLEDGHASSL

SEQ ID NO: 82905 - protein, 10 aa, Homo sapiens
  misc_feature: Table A; Target 82905; HLA-C*05:01; STRA8; ENSG00000146857; CTA
NLEDGHASSL

SEQ ID NO: 82906 - protein, 10 aa, Homo sapiens
  misc_feature: Table A; Target 82906; HLA-C*07:02; STRA8; ENSG00000146857; CTA
NLEDGHASSL

SEQ ID NO: 82907 - protein, 10 aa, Homo sapiens
  misc_feature: Table A; Target 82907; HLA-C*14:02; STRA8; ENSG00000146857; CTA
NLEDGHASSL

SEQ ID NO: 82908 - protein, 10 aa, Homo sapiens
  misc_feature: Table A; Target 82908; HLA-B*07:02; STRA8; ENSG00000146857; CTA
NLSEERKASL

SEQ ID NO: 82909 - protein, 10 aa, Homo sapiens
  misc_feature: Table A; Target 82909; HLA-B*08:01; STRA8; ENSG00000146857; CTA
NLSEERKASL

SEQ ID NO: 82910 - protein, 8 aa, Homo sapiens
  misc_feature: Table A; Target 82910; HLA-B*08:01; STRA8; ENSG00000146857; CTA
NNLRKTVY

SEQ ID NO: 82911 - protein, 8 aa, Homo sapiens
  misc_feature: Table A; Target 82911; HLA-B*08:01; STRA8; ENSG00000146857; CTA
NPEEKFQL

SEQ ID NO: 82912 - protein, 9 aa, Homo sapiens
  misc_feature: Table A; Target 82912; HLA-A*01:01; STRA8; ENSG00000146857; CTA
NPEEKFQLY

SEQ ID NO: 82913 - protein, 9 aa, Homo sapiens
  misc_feature: Table A; Target 82913; HLA-A*29:02; STRA8; ENSG00000146857; CTA
NPEEKFQLY

SEQ ID NO: 82914 - protein, 9 aa, Homo sapiens
  misc_feature: Table A; Target 82914; HLA-B*35:01; STRA8; ENSG00000146857; CTA
NPEEKFQLY

SEQ ID NO: 82915 - protein, 9 aa, Homo sapiens
  misc_feature: Table A; Target 82915; HLA-B*55:01; STRA8; ENSG00000146857; CTA
NPEEKFQLY

SEQ ID NO: 82916 - protein, 9 aa, Homo sapiens
  misc_feature: Table A; Target 82916; HLA-C*03:03; STRA8; ENSG00000146857; CTA
NPEEKFQLY

SEQ ID NO: 82917 - protein, 9 aa, Homo sapiens
  misc_feature: Table A; Target 82917; HLA-B*35:01; STRA8; ENSG00000146857; CTA
NPENPEEKF

SEQ ID NO: 82918 - protein, 9 aa, Homo sapiens
  misc_feature: Table A; Target 82918; HLA-B*35:03; STRA8; ENSG00000146857; CTA
NPENPEEKF

SEQ ID NO: 82919 - protein, 9 aa, Homo sapiens
  misc_feature: Table A; Target 82919; HLA-B*38:01; STRA8; ENSG00000146857; CTA
NPENPEEKF

SEQ ID NO: 82920 - protein, 9 aa, Homo sapiens
  misc_feature: Table A; Target 82920; HLA-C*03:03; STRA8; ENSG00000146857; CTA
NPENPEEKF

SEQ ID NO: 82921 - protein, 9 aa, Homo sapiens
  misc_feature: Table A; Target 82921; HLA-C*05:01; STRA8; ENSG00000146857; CTA
NPENPEEKF

SEQ ID NO: 82922 - protein, 10 aa, Homo sapiens
  misc_feature: Table A; Target 82922; HLA-B*07:02; STRA8; ENSG00000146857; CTA
NPHDRATPQL

SEQ ID NO: 82923 - protein, 10 aa, Homo sapiens
  misc_feature: Table A; Target 82923; HLA-B*35:03; STRA8; ENSG00000146857; CTA
NPHDRATPQL

SEQ ID NO: 82924 - protein, 10 aa, Homo sapiens
  misc_feature: Table A; Target 82924; HLA-C*07:02; STRA8; ENSG00000146857; CTA
NPHDRATPQL

SEQ ID NO: 82925 - protein, 9 aa, Homo sapiens
  misc_feature: Table A; Target 82925; HLA-A*02:04; STRA8; ENSG00000146857; CTA
NQEIRLWQL

SEQ ID NO: 82926 - protein, 8 aa, Homo sapiens
  misc_feature: Table A; Target 82926; HLA-B*18:01; STRA8; ENSG00000146857; CTA
PEEKFQLY

SEQ ID NO: 82927 - protein, 8 aa, Homo sapiens
  misc_feature: Table A; Target 82927; HLA-B*37:01; STRA8; ENSG00000146857; CTA
PENPEEKF

SEQ ID NO: 82928 - protein, 11 aa, Homo sapiens
  misc_feature: Table A; Target 82928; HLA-A*01:01; STRA8; ENSG00000146857; CTA
PENPEEKFQLY

SEQ ID NO: 82929 - protein, 11 aa, Homo sapiens
  misc_feature: Table A; Target 82929; HLA-A*29:02; STRA8; ENSG00000146857; CTA
PENPEEKFQLY

SEQ ID NO: 82930 - protein, 11 aa, Homo sapiens
  misc_feature: Table A; Target 82930; HLA-A*30:02; STRA8; ENSG00000146857; CTA
PENPEEKFQLY

SEQ ID NO: 82931 - protein, 11 aa, Homo sapiens
  misc_feature: Table A; Target 82931; HLA-B*44:02; STRA8; ENSG00000146857; CTA
PENPEEKFQLY

SEQ ID NO: 82932 - protein, 9 aa, Homo sapiens
  misc_feature: Table A; Target 82932; HLA-B*38:01; STRA8; ENSG00000146857; CTA
PHDRATPQL

SEQ ID NO: 82933 - protein, 9 aa, Homo sapiens
  misc_feature: Table A; Target 82933; HLA-A*30:02; STRA8; ENSG00000146857; CTA
PQNGSSPWY

SEQ ID NO: 82934 - protein, 10 aa, Homo sapiens
  misc_feature: Table A; Target 82934; HLA-C*07:02; STRA8; ENSG00000146857; CTA
PSTSSSSSVL

SEQ ID NO: 82935 - protein, 8 aa, Homo sapiens
  misc_feature: Table A; Target 82935; HLA-C*05:01; STRA8; ENSG00000146857; CTA
PVDEEMIM

SEQ ID NO: 82936 - protein, 9 aa, Homo sapiens
  misc_feature: Table A; Target 82936; HLA-A*02:07; STRA8; ENSG00000146857; CTA
PVDEEMIML

SEQ ID NO: 82937 - protein, 8 aa, Homo sapiens
  misc_feature: Table A; Target 82937; HLA-B*07:02; STRA8; ENSG00000146857; CTA
QARHRATL

SEQ ID NO: 82938 - protein, 8 aa, Homo sapiens
  misc_feature: Table A; Target 82938; HLA-B*08:01; STRA8; ENSG00000146857; CTA
QARHRATL

SEQ ID NO: 82939 - protein, 8 aa, Homo sapiens
  misc_feature: Table A; Target 82939; HLA-C*07:02; STRA8; ENSG00000146857; CTA
QARHRATL

SEQ ID NO: 82940 - protein, 8 aa, Homo sapiens
  misc_feature: Table A; Target 82940; HLA-B*18:01; STRA8; ENSG00000146857; CTA
QEAALPIV

SEQ ID NO: 82941 - protein, 8 aa, Homo sapiens
  misc_feature: Table A; Target 82941; HLA-B*49:01; STRA8; ENSG00000146857; CTA
QEAALPIV

SEQ ID NO: 82942 - protein, 10 aa, Homo sapiens
  misc_feature: Table A; Target 82942; HLA-A*30:01; STRA8; ENSG00000146857; CTA
QEAALPIVSA

SEQ ID NO: 82943 - protein, 10 aa, Homo sapiens
  misc_feature: Table A; Target 82943; HLA-B*18:01; STRA8; ENSG00000146857; CTA
QEAALPIVSA

SEQ ID NO: 82944 - protein, 10 aa, Homo sapiens
  misc_feature: Table A; Target 82944; HLA-B*40:02; STRA8; ENSG00000146857; CTA
QEAALPIVSA

SEQ ID NO: 82945 - protein, 10 aa, Homo sapiens
  misc_feature: Table A; Target 82945; HLA-B*44:02; STRA8; ENSG00000146857; CTA
QEAALPIVSA

SEQ ID NO: 82946 - protein, 10 aa, Homo sapiens
  misc_feature: Table A; Target 82946; HLA-B*49:01; STRA8; ENSG00000146857; CTA
QEAALPIVSA

SEQ ID NO: 82947 - protein, 10 aa, Homo sapiens
  misc_feature: Table A; Target 82947; HLA-B*54:01; STRA8; ENSG00000146857; CTA
QEAALPIVSA

SEQ ID NO: 82948 - protein, 10 aa, Homo sapiens
  misc_feature: Table A; Target 82948; HLA-B*56:01; STRA8; ENSG00000146857; CTA
QEAALPIVSA

SEQ ID NO: 82949 - protein, 11 aa, Homo sapiens
  misc_feature: Table A; Target 82949; HLA-A*30:01; STRA8; ENSG00000146857; CTA
QEASFPVDEEM

SEQ ID NO: 82950 - protein, 11 aa, Homo sapiens
  misc_feature: Table A; Target 82950; HLA-B*40:01; STRA8; ENSG00000146857; CTA
QEASFPVDEEM

SEQ ID NO: 82951 - protein, 9 aa, Homo sapiens
  misc_feature: Table A; Target 82951; HLA-B*44:02; STRA8; ENSG00000146857; CTA
QEIRLWQLI

SEQ ID NO: 82952 - protein, 9 aa, Homo sapiens
  misc_feature: Table A; Target 82952; HLA-B*44:03; STRA8; ENSG00000146857; CTA
QEIRLWQLI

SEQ ID NO: 82953 - protein, 9 aa, Homo sapiens
  misc_feature: Table A; Target 82953; HLA-B*49:01; STRA8; ENSG00000146857; CTA
QEIRLWQLI

SEQ ID NO: 82954 - protein, 9 aa, Homo sapiens
  misc_feature: Table A; Target 82954; HLA-B*37:01; STRA8; ENSG00000146857; CTA
QELEHRVAR

SEQ ID NO: 82955 - protein, 9 aa, Homo sapiens
  misc_feature: Table A; Target 82955; HLA-B*44:02; STRA8; ENSG00000146857; CTA
QELEHRVAR

SEQ ID NO: 82956 - protein, 9 aa, Homo sapiens
  misc_feature: Table A; Target 82956; HLA-B*44:03; STRA8; ENSG00000146857; CTA
QELEHRVAR

SEQ ID NO: 82957 - protein, 9 aa, Homo sapiens
  misc_feature: Table A; Target 82957; HLA-A*02:07; STRA8; ENSG00000146857; CTA
QIINFFKGL

SEQ ID NO: 82958 - protein, 9 aa, Homo sapiens
  misc_feature: Table A; Target 82958; HLA-A*31:01; STRA8; ENSG00000146857; CTA
QIINFFKGL

SEQ ID NO: 82959 - protein, 9 aa, Homo sapiens
  misc_feature: Table A; Target 82959; HLA-A*68:02; STRA8; ENSG00000146857; CTA
QIINFFKGL

SEQ ID NO: 82960 - protein, 9 aa, Homo sapiens
  misc_feature: Table A; Target 82960; HLA-B*15:03; STRA8; ENSG00000146857; CTA
QKHRGPATL

SEQ ID NO: 82961 - protein, 9 aa, Homo sapiens
  misc_feature: Table A; Target 82961; HLA-A*02:03; STRA8; ENSG00000146857; CTA
QLPAQLQEL

SEQ ID NO: 82962 - protein, 9 aa, Homo sapiens
  misc_feature: Table A; Target 82962; HLA-A*02:07; STRA8; ENSG00000146857; CTA
QLPAQLQEL

SEQ ID NO: 82963 - protein, 9 aa, Homo sapiens
  misc_feature: Table A; Target 82963; HLA-C*01:02; STRA8; ENSG00000146857; CTA
QLPAQLQEL

SEQ ID NO: 82964 - protein, 9 aa, Homo sapiens
  misc_feature: Table A; Target 82964; HLA-A*02:01; STRA8; ENSG00000146857; CTA
QLQELEHRV

SEQ ID NO: 82965 - protein, 9 aa, Homo sapiens
  misc_feature: Table A; Target 82965; HLA-A*02:03; STRA8; ENSG00000146857; CTA
QLQELEHRV

SEQ ID NO: 82966 - protein, 9 aa, Homo sapiens
  misc_feature: Table A; Target 82966; HLA-A*02:04; STRA8; ENSG00000146857; CTA
QLQELEHRV

SEQ ID NO: 82967 - protein, 9 aa, Homo sapiens
  misc_feature: Table A; Target 82967; HLA-A*02:07; STRA8; ENSG00000146857; CTA
QLQELEHRV

SEQ ID NO: 82968 - protein, 9 aa, Homo sapiens
  misc_feature: Table A; Target 82968; HLA-B*13:02; STRA8; ENSG00000146857; CTA
QLQELEHRV

SEQ ID NO: 82969 - protein, 9 aa, Homo sapiens
  misc_feature: Table A; Target 82969; HLA-B*55:01; STRA8; ENSG00000146857; CTA
QLQELEHRV

SEQ ID NO: 82970 - protein, 9 aa, Homo sapiens
  misc_feature: Table A; Target 82970; HLA-C*16:02; STRA8; ENSG00000146857; CTA
QLQELEHRV

SEQ ID NO: 82971 - protein, 11 aa, Homo sapiens
  misc_feature: Table A; Target 82971; HLA-A*31:01; STRA8; ENSG00000146857; CTA
QLQELEHRVAR

SEQ ID NO: 82972 - protein, 9 aa, Homo sapiens
  misc_feature: Table A; Target 82972; HLA-A*02:04; STRA8; ENSG00000146857; CTA
QLYMQIINF

SEQ ID NO: 82973 - protein, 9 aa, Homo sapiens
  misc_feature: Table A; Target 82973; HLA-B*44:02; STRA8; ENSG00000146857; CTA
QLYMQIINF

SEQ ID NO: 82974 - protein, 9 aa, Homo sapiens
  misc_feature: Table A; Target 82974; HLA-B*44:03; STRA8; ENSG00000146857; CTA
QLYMQIINF

SEQ ID NO: 82975 - protein, 9 aa, Homo sapiens
  misc_feature: Table A; Target 82975; HLA-A*01:01; STRA8; ENSG00000146857; CTA
QSDLIASKW

SEQ ID NO: 82976 - protein, 9 aa, Homo sapiens
  misc_feature: Table A; Target 82976; HLA-A*25:01; STRA8; ENSG00000146857; CTA
QSDLIASKW

SEQ ID NO: 82977 - protein, 9 aa, Homo sapiens
  misc_feature: Table A; Target 82977; HLA-A*32:01; STRA8; ENSG00000146857; CTA
QSDLIASKW

SEQ ID NO: 82978 - protein, 9 aa, Homo sapiens
  misc_feature: Table A; Target 82978; HLA-A*68:01; STRA8; ENSG00000146857; CTA
QSDLIASKW

SEQ ID NO: 82979 - protein, 9 aa, Homo sapiens
  misc_feature: Table A; Target 82979; HLA-B*07:02; STRA8; ENSG00000146857; CTA
QSDLIASKW

SEQ ID NO: 82980 - protein, 9 aa, Homo sapiens
  misc_feature: Table A; Target 82980; HLA-B*38:01; STRA8; ENSG00000146857; CTA
QSDLIASKW

SEQ ID NO: 82981 - protein, 9 aa, Homo sapiens
  misc_feature: Table A; Target 82981; HLA-B*44:02; STRA8; ENSG00000146857; CTA
QSDLIASKW

SEQ ID NO: 82982 - protein, 9 aa, Homo sapiens
  misc_feature: Table A; Target 82982; HLA-B*44:03; STRA8; ENSG00000146857; CTA
QSDLIASKW

SEQ ID NO: 82983 - protein, 9 aa, Homo sapiens
  misc_feature: Table A; Target 82983; HLA-C*04:01; STRA8; ENSG00000146857; CTA
QSDLIASKW

SEQ ID NO: 82984 - protein, 9 aa, Homo sapiens
  misc_feature: Table A; Target 82984; HLA-C*05:01; STRA8; ENSG00000146857; CTA
QSDLIASKW

SEQ ID NO: 82985 - protein, 9 aa, Homo sapiens
  misc_feature: Table A; Target 82985; HLA-C*07:06; STRA8; ENSG00000146857; CTA
QSDLIASKW

SEQ ID NO: 82986 - protein, 9 aa, Homo sapiens
  misc_feature: Table A; Target 82986; HLA-C*16:04; STRA8; ENSG00000146857; CTA
QSDLIASKW

SEQ ID NO: 82987 - protein, 8 aa, Homo sapiens
  misc_feature: Table A; Target 82987; HLA-A*11:01; STRA8; ENSG00000146857; CTA
QTLDNLLK

SEQ ID NO: 82988 - protein, 9 aa, Homo sapiens
  misc_feature: Table A; Target 82988; HLA-A*01:01; STRA8; ENSG00000146857; CTA
QTLDNLLKL

SEQ ID NO: 82989 - protein, 9 aa, Homo sapiens
  misc_feature: Table A; Target 82989; HLA-A*02:01; STRA8; ENSG00000146857; CTA
QTLDNLLKL

SEQ ID NO: 82990 - protein, 9 aa, Homo sapiens
  misc_feature: Table A; Target 82990; HLA-A*02:04; STRA8; ENSG00000146857; CTA
QTLDNLLKL

SEQ ID NO: 82991 - protein, 9 aa, Homo sapiens
  misc_feature: Table A; Target 82991; HLA-A*02:07; STRA8; ENSG00000146857; CTA
QTLDNLLKL

SEQ ID NO: 82992 - protein, 9 aa, Homo sapiens
  misc_feature: Table A; Target 82992; HLA-A*03:01; STRA8; ENSG00000146857; CTA
QTLDNLLKL

SEQ ID NO: 82993 - protein, 9 aa, Homo sapiens
  misc_feature: Table A; Target 82993; HLA-A*11:01; STRA8; ENSG00000146857; CTA
QTLDNLLKL

SEQ ID NO: 82994 - protein, 9 aa, Homo sapiens
  misc_feature: Table A; Target 82994; HLA-A*23:01; STRA8; ENSG00000146857; CTA
QTLDNLLKL

SEQ ID NO: 82995 - protein, 9 aa, Homo sapiens
  misc_feature: Table A; Target 82995; HLA-A*24:02; STRA8; ENSG00000146857; CTA
QTLDNLLKL

SEQ ID NO: 82996 - protein, 9 aa, Homo sapiens
  misc_feature: Table A; Target 82996; HLA-A*25:01; STRA8; ENSG00000146857; CTA
QTLDNLLKL

SEQ ID NO: 82997 - protein, 9 aa, Homo sapiens
  misc_feature: Table A; Target 82997; HLA-A*29:02; STRA8; ENSG00000146857; CTA
QTLDNLLKL

SEQ ID NO: 82998 - protein, 9 aa, Homo sapiens
  misc_feature: Table A; Target 82998; HLA-A*31:01; STRA8; ENSG00000146857; CTA
QTLDNLLKL

SEQ ID NO: 82999 - protein, 9 aa, Homo sapiens
  misc_feature: Table A; Target 82999; HLA-A*33:03; STRA8; ENSG00000146857; CTA
QTLDNLLKL

SEQ ID NO: 83000 - protein, 9 aa, Homo sapiens
  misc_feature: Table A; Target 83000; HLA-A*68:02; STRA8; ENSG00000146857; CTA
QTLDNLLKL

SEQ ID NO: 83001 - protein, 9 aa, Homo sapiens
  misc_feature: Table A; Target 83001; HLA-B*13:02; STRA8; ENSG00000146857; CTA
QTLDNLLKL

SEQ ID NO: 83002 - protein, 9 aa, Homo sapiens
  misc_feature: Table A; Target 83002; HLA-B*40:02; STRA8; ENSG00000146857; CTA
QTLDNLLKL

SEQ ID NO: 83003 - protein, 9 aa, Homo sapiens
  misc_feature: Table A; Target 83003; HLA-B*57:01; STRA8; ENSG00000146857; CTA
QTLDNLLKL

SEQ ID NO: 83004 - protein, 9 aa, Homo sapiens
  misc_feature: Table A; Target 83004; HLA-B*58:01; STRA8; ENSG00000146857; CTA
QTLDNLLKL

SEQ ID NO: 83005 - protein, 9 aa, Homo sapiens
  misc_feature: Table A; Target 83005; HLA-C*03:04; STRA8; ENSG00000146857; CTA
QTLDNLLKL

SEQ ID NO: 83006 - protein, 9 aa, Homo sapiens
  misc_feature: Table A; Target 83006; HLA-C*06:02; STRA8; ENSG00000146857; CTA
QTLDNLLKL

SEQ ID NO: 83007 - protein, 10 aa, Homo sapiens
  misc_feature: Table A; Target 83007; HLA-A*03:01; STRA8; ENSG00000146857; CTA
QTLDNLLKLK

SEQ ID NO: 83008 - protein, 10 aa, Homo sapiens
  misc_feature: Table A; Target 83008; HLA-A*03:02; STRA8; ENSG00000146857; CTA
QTLDNLLKLK

SEQ ID NO: 83009 - protein, 10 aa, Homo sapiens
  misc_feature: Table A; Target 83009; HLA-A*11:01; STRA8; ENSG00000146857; CTA
QTLDNLLKLK

SEQ ID NO: 83010 - protein, 10 aa, Homo sapiens
  misc_feature: Table A; Target 83010; HLA-B*27:02; STRA8; ENSG00000146857; CTA
QTLDNLLKLK

SEQ ID NO: 83011 - protein, 10 aa, Homo sapiens
  misc_feature: Table A; Target 83011; HLA-B*57:01; STRA8; ENSG00000146857; CTA
QTLDNLLKLK

SEQ ID NO: 83012 - protein, 9 aa, Homo sapiens
  misc_feature: Table A; Target 83012; HLA-A*11:01; STRA8; ENSG00000146857; CTA
QTMDLLTGS

SEQ ID NO: 83013 - protein, 8 aa, Homo sapiens
  misc_feature: Table A; Target 83013; HLA-B*37:01; STRA8; ENSG00000146857; CTA
RATLAALF

SEQ ID NO: 83014 - protein, 8 aa, Homo sapiens
  misc_feature: Table A; Target 83014; HLA-B*57:01; STRA8; ENSG00000146857; CTA
RATLAALF

SEQ ID NO: 83015 - protein, 8 aa, Homo sapiens
  misc_feature: Table A; Target 83015; HLA-B*58:01; STRA8; ENSG00000146857; CTA
RATLAALF

SEQ ID NO: 83016 - protein, 10 aa, Homo sapiens
  misc_feature: Table A; Target 83016; HLA-B*58:01; STRA8; ENSG00000146857; CTA
RATPQLPAQL

SEQ ID NO: 83017 - protein, 10 aa, Homo sapiens
  misc_feature: Table A; Target 83017; HLA-C*16:02; STRA8; ENSG00000146857; CTA
RATPQLPAQL

SEQ ID NO: 83018 - protein, 9 aa, Homo sapiens
  misc_feature: Table A; Target 83018; HLA-B*46:01; STRA8; ENSG00000146857; CTA
RGPATLAEA

SEQ ID NO: 83019 - protein, 9 aa, Homo sapiens
  misc_feature: Table A; Target 83019; HLA-C*01:02; STRA8; ENSG00000146857; CTA
RGPATLAEA

SEQ ID NO: 83020 - protein, 8 aa, Homo sapiens
  misc_feature: Table A; Target 83020; HLA-A*32:01; STRA8; ENSG00000146857; CTA
SAAISHLW

SEQ ID NO: 83021 - protein, 8 aa, Homo sapiens
  misc_feature: Table A; Target 83021; HLA-B*44:02; STRA8; ENSG00000146857; CTA
SAAISHLW

SEQ ID NO: 83022 - protein, 8 aa, Homo sapiens
  misc_feature: Table A; Target 83022; HLA-B*57:01; STRA8; ENSG00000146857; CTA
SAAISHLW

SEQ ID NO: 83023 - protein, 8 aa, Homo sapiens
  misc_feature: Table A; Target 83023; HLA-B*58:01; STRA8; ENSG00000146857; CTA
SAAISHLW

SEQ ID NO: 83024 - protein, 8 aa, Homo sapiens
  misc_feature: Table A; Target 83024; HLA-C*16:01; STRA8; ENSG00000146857; CTA
SAAISHLW

SEQ ID NO: 83025 - protein, 8 aa, Homo sapiens
  misc_feature: Table A; Target 83025; HLA-B*18:01; STRA8; ENSG00000146857; CTA
SDLIASKW

SEQ ID NO: 83026 - protein, 8 aa, Homo sapiens
  misc_feature: Table A; Target 83026; HLA-B*27:02; STRA8; ENSG00000146857; CTA
SDLIASKW

SEQ ID NO: 83027 - protein, 8 aa, Homo sapiens
  misc_feature: Table A; Target 83027; HLA-B*37:01; STRA8; ENSG00000146857; CTA
SDLIASKW

SEQ ID NO: 83028 - protein, 8 aa, Homo sapiens
  misc_feature: Table A; Target 83028; HLA-B*40:02; STRA8; ENSG00000146857; CTA
SDLIASKW

SEQ ID NO: 83029 - protein, 8 aa, Homo sapiens
  misc_feature: Table A; Target 83029; HLA-B*44:02; STRA8; ENSG00000146857; CTA
SDLIASKW

SEQ ID NO: 83030 - protein, 8 aa, Homo sapiens
  misc_feature: Table A; Target 83030; HLA-B*44:03; STRA8; ENSG00000146857; CTA
SDLIASKW

SEQ ID NO: 83031 - protein, 8 aa, Homo sapiens
  misc_feature: Table A; Target 83031; HLA-B*57:01; STRA8; ENSG00000146857; CTA
SDLIASKW

SEQ ID NO: 83032 - protein, 8 aa, Homo sapiens
  misc_feature: Table A; Target 83032; HLA-C*07:04; STRA8; ENSG00000146857; CTA
SDLIASKW

SEQ ID NO: 83033 - protein, 8 aa, Homo sapiens
  misc_feature: Table A; Target 83033; HLA-C*16:04; STRA8; ENSG00000146857; CTA
SDLIASKW

SEQ ID NO: 83034 - protein, 8 aa, Homo sapiens
  misc_feature: Table A; Target 83034; HLA-B*08:01; STRA8; ENSG00000146857; CTA
SEERKASL

SEQ ID NO: 83035 - protein, 8 aa, Homo sapiens
  misc_feature: Table A; Target 83035; HLA-B*37:01; STRA8; ENSG00000146857; CTA
SEERKASL

SEQ ID NO: 83036 - protein, 8 aa, Homo sapiens
  misc_feature: Table A; Target 83036; HLA-B*40:01; STRA8; ENSG00000146857; CTA
SEERKASL

SEQ ID NO: 83037 - protein, 8 aa, Homo sapiens
  misc_feature: Table A; Target 83037; HLA-B*40:02; STRA8; ENSG00000146857; CTA
SEERKASL

SEQ ID NO: 83038 - protein, 9 aa, Homo sapiens
  misc_feature: Table A; Target 83038; HLA-B*49:01; STRA8; ENSG00000146857; CTA
SEVPSTSSS

SEQ ID NO: 83039 - protein, 8 aa, Homo sapiens
  misc_feature: Table A; Target 83039; HLA-C*14:02; STRA8; ENSG00000146857; CTA
SFLDKSEV

SEQ ID NO: 83040 - protein, 9 aa, Homo sapiens
  misc_feature: Table A; Target 83040; HLA-C*14:02; STRA8; ENSG00000146857; CTA
SFPQNGSSP

SEQ ID NO: 83041 - protein, 11 aa, Homo sapiens
  misc_feature: Table A; Target 83041; HLA-A*29:02; STRA8; ENSG00000146857; CTA
SFPQNGSSPWY

SEQ ID NO: 83042 - protein, 8 aa, Homo sapiens
  misc_feature: Table A; Target 83042; HLA-C*01:02; STRA8; ENSG00000146857; CTA
SFPVDEEM

SEQ ID NO: 83043 - protein, 8 aa, Homo sapiens
  misc_feature: Table A; Target 83043; HLA-C*04:01; STRA8; ENSG00000146857; CTA
SFPVDEEM

SEQ ID NO: 83044 - protein, 8 aa, Homo sapiens
  misc_feature: Table A; Target 83044; HLA-C*14:02; STRA8; ENSG00000146857; CTA
SFPVDEEM

SEQ ID NO: 83045 - protein, 9 aa, Homo sapiens
  misc_feature: Table A; Target 83045; HLA-B*38:01; STRA8; ENSG00000146857; CTA
SHIPELEQT

SEQ ID NO: 83046 - protein, 10 aa, Homo sapiens
  misc_feature: Table A; Target 83046; HLA-B*27:05; STRA8; ENSG00000146857; CTA
SHIPELEQTL

SEQ ID NO: 83047 - protein, 10 aa, Homo sapiens
  misc_feature: Table A; Target 83047; HLA-B*39:01; STRA8; ENSG00000146857; CTA
SHIPELEQTL

SEQ ID NO: 83048 - protein, 9 aa, Homo sapiens
  misc_feature: Table A; Target 83048; HLA-A*01:01; STRA8; ENSG00000146857; CTA
SLEEVKKEY

SEQ ID NO: 83049 - protein, 9 aa, Homo sapiens
  misc_feature: Table A; Target 83049; HLA-A*29:02; STRA8; ENSG00000146857; CTA
SLEEVKKEY

SEQ ID NO: 83050 - protein, 9 aa, Homo sapiens
  misc_feature: Table A; Target 83050; HLA-A*30:02; STRA8; ENSG00000146857; CTA
SLEEVKKEY

SEQ ID NO: 83051 - protein, 9 aa, Homo sapiens
  misc_feature: Table A; Target 83051; HLA-A*32:01; STRA8; ENSG00000146857; CTA
SLEEVKKEY

SEQ ID NO: 83052 - protein, 9 aa, Homo sapiens
  misc_feature: Table A; Target 83052; HLA-B*15:01; STRA8; ENSG00000146857; CTA
SLEEVKKEY

SEQ ID NO: 83053 - protein, 9 aa, Homo sapiens
  misc_feature: Table A; Target 83053; HLA-B*15:03; STRA8; ENSG00000146857; CTA
SLEEVKKEY

SEQ ID NO: 83054 - protein, 9 aa, Homo sapiens
  misc_feature: Table A; Target 83054; HLA-B*18:01; STRA8; ENSG00000146857; CTA
SLEEVKKEY

SEQ ID NO: 83055 - protein, 9 aa, Homo sapiens
  misc_feature: Table A; Target 83055; HLA-B*44:02; STRA8; ENSG00000146857; CTA
SLEEVKKEY

SEQ ID NO: 83056 - protein, 9 aa, Homo sapiens
  misc_feature: Table A; Target 83056; HLA-B*44:03; STRA8; ENSG00000146857; CTA
SLEEVKKEY

SEQ ID NO: 83057 - protein, 9 aa, Homo sapiens
  misc_feature: Table A; Target 83057; HLA-B*46:01; STRA8; ENSG00000146857; CTA
SLEEVKKEY

SEQ ID NO: 83058 - protein, 9 aa, Homo sapiens
  misc_feature: Table A; Target 83058; HLA-B*58:01; STRA8; ENSG00000146857; CTA
SLEEVKKEY

SEQ ID NO: 83059 - protein, 9 aa, Homo sapiens
  misc_feature: Table A; Target 83059; HLA-C*02:02; STRA8; ENSG00000146857; CTA
SLEEVKKEY

SEQ ID NO: 83060 - protein, 9 aa, Homo sapiens
  misc_feature: Table A; Target 83060; HLA-C*03:03; STRA8; ENSG00000146857; CTA
SLEEVKKEY

SEQ ID NO: 83061 - protein, 9 aa, Homo sapiens
  misc_feature: Table A; Target 83061; HLA-C*07:04; STRA8; ENSG00000146857; CTA
SLEEVKKEY

SEQ ID NO: 83062 - protein, 9 aa, Homo sapiens
  misc_feature: Table A; Target 83062; HLA-C*12:03; STRA8; ENSG00000146857; CTA
SLEEVKKEY

SEQ ID NO: 83063 - protein, 9 aa, Homo sapiens
  misc_feature: Table A; Target 83063; HLA-C*16:01; STRA8; ENSG00000146857; CTA
SLEEVKKEY

SEQ ID NO: 83064 - protein, 9 aa, Homo sapiens
  misc_feature: Table A; Target 83064; HLA-C*16:02; STRA8; ENSG00000146857; CTA
SLEEVKKEY

SEQ ID NO: 83065 - protein, 9 aa, Homo sapiens
  misc_feature: Table A; Target 83065; HLA-C*16:04; STRA8; ENSG00000146857; CTA
SLEEVKKEY

SEQ ID NO: 83066 - protein, 9 aa, Homo sapiens
  misc_feature: Table A; Target 83066; HLA-A*03:01; STRA8; ENSG00000146857; CTA
SLRQAWAQK

SEQ ID NO: 83067 - protein, 9 aa, Homo sapiens
  misc_feature: Table A; Target 83067; HLA-A*02:01; STRA8; ENSG00000146857; CTA
SLVSTPEEI

SEQ ID NO: 83068 - protein, 9 aa, Homo sapiens
  misc_feature: Table A; Target 83068; HLA-A*02:03; STRA8; ENSG00000146857; CTA
SLVSTPEEI

SEQ ID NO: 83069 - protein, 9 aa, Homo sapiens
  misc_feature: Table A; Target 83069; HLA-B*13:02; STRA8; ENSG00000146857; CTA
SLVSTPEEI

SEQ ID NO: 83070 - protein, 9 aa, Homo sapiens
  misc_feature: Table A; Target 83070; HLA-B*55:01; STRA8; ENSG00000146857; CTA
SLVSTPEEI

SEQ ID NO: 83071 - protein, 9 aa, Homo sapiens
  misc_feature: Table A; Target 83071; HLA-A*02:01; STRA8; ENSG00000146857; CTA
SMYSGNDSF

SEQ ID NO: 83072 - protein, 9 aa, Homo sapiens
  misc_feature: Table A; Target 83072; HLA-A*23:01; STRA8; ENSG00000146857; CTA
SMYSGNDSF

SEQ ID NO: 83073 - protein, 9 aa, Homo sapiens
  misc_feature: Table A; Target 83073; HLA-A*24:02; STRA8; ENSG00000146857; CTA
SMYSGNDSF

SEQ ID NO: 83074 - protein, 9 aa, Homo sapiens
  misc_feature: Table A; Target 83074; HLA-A*25:01; STRA8; ENSG00000146857; CTA
SMYSGNDSF

SEQ ID NO: 83075 - protein, 9 aa, Homo sapiens
  misc_feature: Table A; Target 83075; HLA-A*26:01; STRA8; ENSG00000146857; CTA
SMYSGNDSF

SEQ ID NO: 83076 - protein, 9 aa, Homo sapiens
  misc_feature: Table A; Target 83076; HLA-A*29:02; STRA8; ENSG00000146857; CTA
SMYSGNDSF

SEQ ID NO: 83077 - protein, 9 aa, Homo sapiens
  misc_feature: Table A; Target 83077; HLA-A*30:02; STRA8; ENSG00000146857; CTA
SMYSGNDSF

SEQ ID NO: 83078 - protein, 9 aa, Homo sapiens
  misc_feature: Table A; Target 83078; HLA-A*32:01; STRA8; ENSG00000146857; CTA
SMYSGNDSF

SEQ ID NO: 83079 - protein, 9 aa, Homo sapiens
  misc_feature: Table A; Target 83079; HLA-B*07:02; STRA8; ENSG00000146857; CTA
SMYSGNDSF

SEQ ID NO: 83080 - protein, 9 aa, Homo sapiens
  misc_feature: Table A; Target 83080; HLA-B*08:01; STRA8; ENSG00000146857; CTA
SMYSGNDSF

SEQ ID NO: 83081 - protein, 9 aa, Homo sapiens
  misc_feature: Table A; Target 83081; HLA-B*13:02; STRA8; ENSG00000146857; CTA
SMYSGNDSF

SEQ ID NO: 83082 - protein, 9 aa, Homo sapiens
  misc_feature: Table A; Target 83082; HLA-B*15:03; STRA8; ENSG00000146857; CTA
SMYSGNDSF

SEQ ID NO: 83083 - protein, 9 aa, Homo sapiens
  misc_feature: Table A; Target 83083; HLA-B*27:05; STRA8; ENSG00000146857; CTA
SMYSGNDSF

SEQ ID NO: 83084 - protein, 9 aa, Homo sapiens
  misc_feature: Table A; Target 83084; HLA-B*35:01; STRA8; ENSG00000146857; CTA
SMYSGNDSF

SEQ ID NO: 83085 - protein, 9 aa, Homo sapiens
  misc_feature: Table A; Target 83085; HLA-B*37:01; STRA8; ENSG00000146857; CTA
SMYSGNDSF

SEQ ID NO: 83086 - protein, 9 aa, Homo sapiens
  misc_feature: Table A; Target 83086; HLA-B*38:01; STRA8; ENSG00000146857; CTA
SMYSGNDSF

SEQ ID NO: 83087 - protein, 9 aa, Homo sapiens
  misc_feature: Table A; Target 83087; HLA-B*39:01; STRA8; ENSG00000146857; CTA
SMYSGNDSF

SEQ ID NO: 83088 - protein, 9 aa, Homo sapiens
  misc_feature: Table A; Target 83088; HLA-B*46:01; STRA8; ENSG00000146857; CTA
SMYSGNDSF

SEQ ID NO: 83089 - protein, 9 aa, Homo sapiens
  misc_feature: Table A; Target 83089; HLA-B*55:01; STRA8; ENSG00000146857; CTA
SMYSGNDSF

SEQ ID NO: 83090 - protein, 9 aa, Homo sapiens
  misc_feature: Table A; Target 83090; HLA-B*58:01; STRA8; ENSG00000146857; CTA
SMYSGNDSF

SEQ ID NO: 83091 - protein, 9 aa, Homo sapiens
  misc_feature: Table A; Target 83091; HLA-C*01:02; STRA8; ENSG00000146857; CTA
SMYSGNDSF

SEQ ID NO: 83092 - protein, 9 aa, Homo sapiens
  misc_feature: Table A; Target 83092; HLA-C*02:02; STRA8; ENSG00000146857; CTA
SMYSGNDSF

SEQ ID NO: 83093 - protein, 9 aa, Homo sapiens
  misc_feature: Table A; Target 83093; HLA-C*03:03; STRA8; ENSG00000146857; CTA
SMYSGNDSF

SEQ ID NO: 83094 - protein, 9 aa, Homo sapiens
  misc_feature: Table A; Target 83094; HLA-C*03:04; STRA8; ENSG00000146857; CTA
SMYSGNDSF

SEQ ID NO: 83095 - protein, 9 aa, Homo sapiens
  misc_feature: Table A; Target 83095; HLA-C*04:01; STRA8; ENSG00000146857; CTA
SMYSGNDSF

SEQ ID NO: 83096 - protein, 9 aa, Homo sapiens
  misc_feature: Table A; Target 83096; HLA-C*05:01; STRA8; ENSG00000146857; CTA
SMYSGNDSF

SEQ ID NO: 83097 - protein, 9 aa, Homo sapiens
  misc_feature: Table A; Target 83097; HLA-C*07:02; STRA8; ENSG00000146857; CTA
SMYSGNDSF

SEQ ID NO: 83098 - protein, 9 aa, Homo sapiens
  misc_feature: Table A; Target 83098; HLA-C*07:04; STRA8; ENSG00000146857; CTA
SMYSGNDSF

SEQ ID NO: 83099 - protein, 9 aa, Homo sapiens
  misc_feature: Table A; Target 83099; HLA-C*12:03; STRA8; ENSG00000146857; CTA
SMYSGNDSF

SEQ ID NO: 83100 - protein, 9 aa, Homo sapiens
  misc_feature: Table A; Target 83100; HLA-C*14:02; STRA8; ENSG00000146857; CTA
SMYSGNDSF

SEQ ID NO: 83101 - protein, 9 aa, Homo sapiens
  misc_feature: Table A; Target 83101; HLA-C*16:01; STRA8; ENSG00000146857; CTA
SMYSGNDSF

SEQ ID NO: 83102 - protein, 9 aa, Homo sapiens
  misc_feature: Table A; Target 83102; HLA-C*16:04; STRA8; ENSG00000146857; CTA
SMYSGNDSF

SEQ ID NO: 83103 - protein, 9 aa, Homo sapiens
  misc_feature: Table A; Target 83103; HLA-B*15:03; STRA8; ENSG00000146857; CTA
SQARHRATL

SEQ ID NO: 83104 - protein, 9 aa, Homo sapiens
  misc_feature: Table A; Target 83104; HLA-C*16:01; STRA8; ENSG00000146857; CTA
SQARHRATL

SEQ ID NO: 83105 - protein, 9 aa, Homo sapiens
  misc_feature: Table A; Target 83105; HLA-B*13:02; STRA8; ENSG00000146857; CTA
SQGASCSLV

SEQ ID NO: 83106 - protein, 9 aa, Homo sapiens
  misc_feature: Table A; Target 83106; HLA-A*03:02; STRA8; ENSG00000146857; CTA
SQSDLIASK

SEQ ID NO: 83107 - protein, 9 aa, Homo sapiens
  misc_feature: Table A; Target 83107; HLA-A*11:01; STRA8; ENSG00000146857; CTA
SQSDLIASK

SEQ ID NO: 83108 - protein, 9 aa, Homo sapiens
  misc_feature: Table A; Target 83108; HLA-B*13:02; STRA8; ENSG00000146857; CTA
SQSDLIASK

SEQ ID NO: 83109 - protein, 9 aa, Homo sapiens
  misc_feature: Table A; Target 83109; HLA-B*27:02; STRA8; ENSG00000146857; CTA
SQSDLIASK

SEQ ID NO: 83110 - protein, 9 aa, Homo sapiens
  misc_feature: Table A; Target 83110; HLA-B*27:05; STRA8; ENSG00000146857; CTA
SQSDLIASK

SEQ ID NO: 83111 - protein, 9 aa, Homo sapiens
  misc_feature: Table A; Target 83111; HLA-C*07:06; STRA8; ENSG00000146857; CTA
SQSDLIASK

SEQ ID NO: 83112 - protein, 10 aa, Homo sapiens
  misc_feature: Table A; Target 83112; HLA-A*11:01; STRA8; ENSG00000146857; CTA
SQSDLIASKW

SEQ ID NO: 83113 - protein, 10 aa, Homo sapiens
  misc_feature: Table A; Target 83113; HLA-A*23:01; STRA8; ENSG00000146857; CTA
SQSDLIASKW

SEQ ID NO: 83114 - protein, 10 aa, Homo sapiens
  misc_feature: Table A; Target 83114; HLA-A*24:02; STRA8; ENSG00000146857; CTA
SQSDLIASKW

SEQ ID NO: 83115 - protein, 10 aa, Homo sapiens
  misc_feature: Table A; Target 83115; HLA-A*25:01; STRA8; ENSG00000146857; CTA
SQSDLIASKW

SEQ ID NO: 83116 - protein, 10 aa, Homo sapiens
  misc_feature: Table A; Target 83116; HLA-A*26:01; STRA8; ENSG00000146857; CTA
SQSDLIASKW

SEQ ID NO: 83117 - protein, 10 aa, Homo sapiens
  misc_feature: Table A; Target 83117; HLA-A*29:02; STRA8; ENSG00000146857; CTA
SQSDLIASKW

SEQ ID NO: 83118 - protein, 10 aa, Homo sapiens
  misc_feature: Table A; Target 83118; HLA-A*30:01; STRA8; ENSG00000146857; CTA
SQSDLIASKW

SEQ ID NO: 83119 - protein, 10 aa, Homo sapiens
  misc_feature: Table A; Target 83119; HLA-A*30:02; STRA8; ENSG00000146857; CTA
SQSDLIASKW

SEQ ID NO: 83120 - protein, 10 aa, Homo sapiens
  misc_feature: Table A; Target 83120; HLA-A*32:01; STRA8; ENSG00000146857; CTA
SQSDLIASKW

SEQ ID NO: 83121 - protein, 10 aa, Homo sapiens
  misc_feature: Table A; Target 83121; HLA-A*68:01; STRA8; ENSG00000146857; CTA
SQSDLIASKW

SEQ ID NO: 83122 - protein, 10 aa, Homo sapiens
  misc_feature: Table A; Target 83122; HLA-A*68:02; STRA8; ENSG00000146857; CTA
SQSDLIASKW

SEQ ID NO: 83123 - protein, 10 aa, Homo sapiens
  misc_feature: Table A; Target 83123; HLA-B*13:02; STRA8; ENSG00000146857; CTA
SQSDLIASKW

SEQ ID NO: 83124 - protein, 10 aa, Homo sapiens
  misc_feature: Table A; Target 83124; HLA-B*15:01; STRA8; ENSG00000146857; CTA
SQSDLIASKW

SEQ ID NO: 83125 - protein, 10 aa, Homo sapiens
  misc_feature: Table A; Target 83125; HLA-B*15:03; STRA8; ENSG00000146857; CTA
SQSDLIASKW

SEQ ID NO: 83126 - protein, 10 aa, Homo sapiens
  misc_feature: Table A; Target 83126; HLA-B*27:02; STRA8; ENSG00000146857; CTA
SQSDLIASKW

SEQ ID NO: 83127 - protein, 10 aa, Homo sapiens
  misc_feature: Table A; Target 83127; HLA-B*27:05; STRA8; ENSG00000146857; CTA
SQSDLIASKW

SEQ ID NO: 83128 - protein, 10 aa, Homo sapiens
  misc_feature: Table A; Target 83128; HLA-B*38:01; STRA8; ENSG00000146857; CTA
SQSDLIASKW

SEQ ID NO: 83129 - protein, 10 aa, Homo sapiens
  misc_feature: Table A; Target 83129; HLA-B*44:02; STRA8; ENSG00000146857; CTA
SQSDLIASKW

SEQ ID NO: 83130 - protein, 10 aa, Homo sapiens
  misc_feature: Table A; Target 83130; HLA-B*44:03; STRA8; ENSG00000146857; CTA
SQSDLIASKW

SEQ ID NO: 83131 - protein, 10 aa, Homo sapiens
  misc_feature: Table A; Target 83131; HLA-B*57:01; STRA8; ENSG00000146857; CTA
SQSDLIASKW

SEQ ID NO: 83132 - protein, 10 aa, Homo sapiens
  misc_feature: Table A; Target 83132; HLA-B*58:01; STRA8; ENSG00000146857; CTA
SQSDLIASKW

SEQ ID NO: 83133 - protein, 10 aa, Homo sapiens
  misc_feature: Table A; Target 83133; HLA-C*02:02; STRA8; ENSG00000146857; CTA
SQSDLIASKW

SEQ ID NO: 83134 - protein, 10 aa, Homo sapiens
  misc_feature: Table A; Target 83134; HLA-C*06:02; STRA8; ENSG00000146857; CTA
SQSDLIASKW

SEQ ID NO: 83135 - protein, 10 aa, Homo sapiens
  misc_feature: Table A; Target 83135; HLA-C*07:04; STRA8; ENSG00000146857; CTA
SQSDLIASKW

SEQ ID NO: 83136 - protein, 10 aa, Homo sapiens
  misc_feature: Table A; Target 83136; HLA-C*07:06; STRA8; ENSG00000146857; CTA
SQSDLIASKW

SEQ ID NO: 83137 - protein, 10 aa, Homo sapiens
  misc_feature: Table A; Target 83137; HLA-C*12:03; STRA8; ENSG00000146857; CTA
SQSDLIASKW

SEQ ID NO: 83138 - protein, 10 aa, Homo sapiens
  misc_feature: Table A; Target 83138; HLA-C*16:04; STRA8; ENSG00000146857; CTA
SQSDLIASKW

SEQ ID NO: 83139 - protein, 8 aa, Homo sapiens
  misc_feature: Table A; Target 83139; HLA-A*11:01; STRA8; ENSG00000146857; CTA
SSLEEVKK

SEQ ID NO: 83140 - protein, 10 aa, Homo sapiens
  misc_feature: Table A; Target 83140; HLA-A*01:01; STRA8; ENSG00000146857; CTA
SSLEEVKKEY

SEQ ID NO: 83141 - protein, 10 aa, Homo sapiens
  misc_feature: Table A; Target 83141; HLA-A*29:02; STRA8; ENSG00000146857; CTA
SSLEEVKKEY

SEQ ID NO: 83142 - protein, 10 aa, Homo sapiens
  misc_feature: Table A; Target 83142; HLA-A*30:02; STRA8; ENSG00000146857; CTA
SSLEEVKKEY

SEQ ID NO: 83143 - protein, 10 aa, Homo sapiens
  misc_feature: Table A; Target 83143; HLA-B*44:02; STRA8; ENSG00000146857; CTA
SSLEEVKKEY

SEQ ID NO: 83144 - protein, 10 aa, Homo sapiens
  misc_feature: Table A; Target 83144; HLA-B*44:03; STRA8; ENSG00000146857; CTA
SSLEEVKKEY

SEQ ID NO: 83145 - protein, 10 aa, Homo sapiens
  misc_feature: Table A; Target 83145; HLA-B*57:01; STRA8; ENSG00000146857; CTA
SSLEEVKKEY

SEQ ID NO: 83146 - protein, 10 aa, Homo sapiens
  misc_feature: Table A; Target 83146; HLA-B*58:01; STRA8; ENSG00000146857; CTA
SSLEEVKKEY

SEQ ID NO: 83147 - protein, 10 aa, Homo sapiens
  misc_feature: Table A; Target 83147; HLA-C*16:01; STRA8; ENSG00000146857; CTA
SSLEEVKKEY

SEQ ID NO: 83148 - protein, 10 aa, Homo sapiens
  misc_feature: Table A; Target 83148; HLA-C*16:02; STRA8; ENSG00000146857; CTA
SSLEEVKKEY

SEQ ID NO: 83149 - protein, 9 aa, Homo sapiens
  misc_feature: Table A; Target 83149; HLA-A*02:01; STRA8; ENSG00000146857; CTA
SSSSVLASC

SEQ ID NO: 83150 - protein, 9 aa, Homo sapiens
  misc_feature: Table A; Target 83150; HLA-B*54:01; STRA8; ENSG00000146857; CTA
SSSSVLASC

SEQ ID NO: 83151 - protein, 9 aa, Homo sapiens
  misc_feature: Table A; Target 83151; HLA-B*56:01; STRA8; ENSG00000146857; CTA
SSSSVLASC

SEQ ID NO: 83152 - protein, 10 aa, Homo sapiens
  misc_feature: Table A; Target 83152; HLA-C*06:02; STRA8; ENSG00000146857; CTA
SSSSVLASCN

SEQ ID NO: 83153 - protein, 9 aa, Homo sapiens
  misc_feature: Table A; Target 83153; HLA-B*07:02; STRA8; ENSG00000146857; CTA
STSSSSSVL

SEQ ID NO: 83154 - protein, 9 aa, Homo sapiens
  misc_feature: Table A; Target 83154; HLA-B*27:05; STRA8; ENSG00000146857; CTA
STSSSSSVL

SEQ ID NO: 83155 - protein, 9 aa, Homo sapiens
  misc_feature: Table A; Target 83155; HLA-B*35:03; STRA8; ENSG00000146857; CTA
STSSSSSVL

SEQ ID NO: 83156 - protein, 9 aa, Homo sapiens
  misc_feature: Table A; Target 83156; HLA-B*39:01; STRA8; ENSG00000146857; CTA
STSSSSSVL

SEQ ID NO: 83157 - protein, 9 aa, Homo sapiens
  misc_feature: Table A; Target 83157; HLA-C*01:02; STRA8; ENSG00000146857; CTA
STSSSSSVL

SEQ ID NO: 83158 - protein, 9 aa, Homo sapiens
  misc_feature: Table A; Target 83158; HLA-C*03:03; STRA8; ENSG00000146857; CTA
STSSSSSVL

SEQ ID NO: 83159 - protein, 9 aa, Homo sapiens
  misc_feature: Table A; Target 83159; HLA-C*03:04; STRA8; ENSG00000146857; CTA
STSSSSSVL

SEQ ID NO: 83160 - protein, 9 aa, Homo sapiens
  misc_feature: Table A; Target 83160; HLA-C*12:03; STRA8; ENSG00000146857; CTA
STSSSSSVL

SEQ ID NO: 83161 - protein, 9 aa, Homo sapiens
  misc_feature: Table A; Target 83161; HLA-C*14:02; STRA8; ENSG00000146857; CTA
STSSSSSVL

SEQ ID NO: 83162 - protein, 9 aa, Homo sapiens
  misc_feature: Table A; Target 83162; HLA-A*30:01; STRA8; ENSG00000146857; CTA
TETFDDEDL

SEQ ID NO: 83163 - protein, 9 aa, Homo sapiens
  misc_feature: Table A; Target 83163; HLA-B*39:01; STRA8; ENSG00000146857; CTA
TETFDDEDL

SEQ ID NO: 83164 - protein, 9 aa, Homo sapiens
  misc_feature: Table A; Target 83164; HLA-B*40:01; STRA8; ENSG00000146857; CTA
TETFDDEDL

SEQ ID NO: 83165 - protein, 9 aa, Homo sapiens
  misc_feature: Table A; Target 83165; HLA-B*40:02; STRA8; ENSG00000146857; CTA
TETFDDEDL

SEQ ID NO: 83166 - protein, 9 aa, Homo sapiens
  misc_feature: Table A; Target 83166; HLA-B*07:02; STRA8; ENSG00000146857; CTA
TGSGIITPQ

SEQ ID NO: 83167 - protein, 9 aa, Homo sapiens
  misc_feature: Table A; Target 83167; HLA-B*27:02; STRA8; ENSG00000146857; CTA
TGSGIITPQ

SEQ ID NO: 83168 - protein, 9 aa, Homo sapiens
  misc_feature: Table A; Target 83168; HLA-B*27:05; STRA8; ENSG00000146857; CTA
TGSGIITPQ

SEQ ID NO: 83169 - protein, 9 aa, Homo sapiens
  misc_feature: Table A; Target 83169; HLA-C*04:01; STRA8; ENSG00000146857; CTA
TGSGIITPQ

SEQ ID NO: 83170 - protein, 9 aa, Homo sapiens
  misc_feature: Table A; Target 83170; HLA-C*06:02; STRA8; ENSG00000146857; CTA
TGSGIITPQ

SEQ ID NO: 83171 - protein, 9 aa, Homo sapiens
  misc_feature: Table A; Target 83171; HLA-C*07:01; STRA8; ENSG00000146857; CTA
TGSGIITPQ

SEQ ID NO: 83172 - protein, 9 aa, Homo sapiens
  misc_feature: Table A; Target 83172; HLA-C*07:04; STRA8; ENSG00000146857; CTA
TGSGIITPQ

SEQ ID NO: 83173 - protein, 9 aa, Homo sapiens
  misc_feature: Table A; Target 83173; HLA-C*12:03; STRA8; ENSG00000146857; CTA
TGSGIITPQ

SEQ ID NO: 83174 - protein, 9 aa, Homo sapiens
  misc_feature: Table A; Target 83174; HLA-A*02:01; STRA8; ENSG00000146857; CTA
TLAALFNNL

SEQ ID NO: 83175 - protein, 9 aa, Homo sapiens
  misc_feature: Table A; Target 83175; HLA-A*02:03; STRA8; ENSG00000146857; CTA
TLAALFNNL

SEQ ID NO: 83176 - protein, 9 aa, Homo sapiens
  misc_feature: Table A; Target 83176; HLA-A*02:04; STRA8; ENSG00000146857; CTA
TLAALFNNL

SEQ ID NO: 83177 - protein, 9 aa, Homo sapiens
  misc_feature: Table A; Target 83177; HLA-A*02:07; STRA8; ENSG00000146857; CTA
TLAALFNNL

SEQ ID NO: 83178 - protein, 9 aa, Homo sapiens
  misc_feature: Table A; Target 83178; HLA-A*03:01; STRA8; ENSG00000146857; CTA
TLAALFNNL

SEQ ID NO: 83179 - protein, 9 aa, Homo sapiens
  misc_feature: Table A; Target 83179; HLA-A*03:02; STRA8; ENSG00000146857; CTA
TLAALFNNL

SEQ ID NO: 83180 - protein, 9 aa, Homo sapiens
  misc_feature: Table A; Target 83180; HLA-A*23:01; STRA8; ENSG00000146857; CTA
TLAALFNNL

SEQ ID NO: 83181 - protein, 9 aa, Homo sapiens
  misc_feature: Table A; Target 83181; HLA-A*24:02; STRA8; ENSG00000146857; CTA
TLAALFNNL

SEQ ID NO: 83182 - protein, 9 aa, Homo sapiens
  misc_feature: Table A; Target 83182; HLA-A*25:01; STRA8; ENSG00000146857; CTA
TLAALFNNL

SEQ ID NO: 83183 - protein, 9 aa, Homo sapiens
  misc_feature: Table A; Target 83183; HLA-A*26:01; STRA8; ENSG00000146857; CTA
TLAALFNNL

SEQ ID NO: 83184 - protein, 9 aa, Homo sapiens
  misc_feature: Table A; Target 83184; HLA-A*30:01; STRA8; ENSG00000146857; CTA
TLAALFNNL

SEQ ID NO: 83185 - protein, 9 aa, Homo sapiens
  misc_feature: Table A; Target 83185; HLA-A*31:01; STRA8; ENSG00000146857; CTA
TLAALFNNL

SEQ ID NO: 83186 - protein, 9 aa, Homo sapiens
  misc_feature: Table A; Target 83186; HLA-A*32:01; STRA8; ENSG00000146857; CTA
TLAALFNNL

SEQ ID NO: 83187 - protein, 9 aa, Homo sapiens
  misc_feature: Table A; Target 83187; HLA-A*33:03; STRA8; ENSG00000146857; CTA
TLAALFNNL

SEQ ID NO: 83188 - protein, 9 aa, Homo sapiens
  misc_feature: Table A; Target 83188; HLA-A*68:01; STRA8; ENSG00000146857; CTA
TLAALFNNL

SEQ ID NO: 83189 - protein, 9 aa, Homo sapiens
  misc_feature: Table A; Target 83189; HLA-B*08:01; STRA8; ENSG00000146857; CTA
TLAALFNNL

SEQ ID NO: 83190 - protein, 9 aa, Homo sapiens
  misc_feature: Table A; Target 83190; HLA-B*13:02; STRA8; ENSG00000146857; CTA
TLAALFNNL

SEQ ID NO: 83191 - protein, 9 aa, Homo sapiens
  misc_feature: Table A; Target 83191; HLA-B*15:01; STRA8; ENSG00000146857; CTA
TLAALFNNL

SEQ ID NO: 83192 - protein, 9 aa, Homo sapiens
  misc_feature: Table A; Target 83192; HLA-B*27:05; STRA8; ENSG00000146857; CTA
TLAALFNNL

SEQ ID NO: 83193 - protein, 9 aa, Homo sapiens
  misc_feature: Table A; Target 83193; HLA-B*35:03; STRA8; ENSG00000146857; CTA
TLAALFNNL

SEQ ID NO: 83194 - protein, 9 aa, Homo sapiens
  misc_feature: Table A; Target 83194; HLA-B*38:01; STRA8; ENSG00000146857; CTA
TLAALFNNL

SEQ ID NO: 83195 - protein, 9 aa, Homo sapiens
  misc_feature: Table A; Target 83195; HLA-B*39:01; STRA8; ENSG00000146857; CTA
TLAALFNNL

SEQ ID NO: 83196 - protein, 9 aa, Homo sapiens
  misc_feature: Table A; Target 83196; HLA-B*40:01; STRA8; ENSG00000146857; CTA
TLAALFNNL

SEQ ID NO: 83197 - protein, 9 aa, Homo sapiens
  misc_feature: Table A; Target 83197; HLA-B*40:02; STRA8; ENSG00000146857; CTA
TLAALFNNL

SEQ ID NO: 83198 - protein, 9 aa, Homo sapiens
  misc_feature: Table A; Target 83198; HLA-B*55:01; STRA8; ENSG00000146857; CTA
TLAALFNNL

SEQ ID NO: 83199 - protein, 9 aa, Homo sapiens
  misc_feature: Table A; Target 83199; HLA-C*01:02; STRA8; ENSG00000146857; CTA
TLAALFNNL

SEQ ID NO: 83200 - protein, 9 aa, Homo sapiens
  misc_feature: Table A; Target 83200; HLA-C*02:02; STRA8; ENSG00000146857; CTA
TLAALFNNL

SEQ ID NO: 83201 - protein, 9 aa, Homo sapiens
  misc_feature: Table A; Target 83201; HLA-C*06:02; STRA8; ENSG00000146857; CTA
TLAALFNNL

SEQ ID NO: 83202 - protein, 9 aa, Homo sapiens
  misc_feature: Table A; Target 83202; HLA-C*07:04; STRA8; ENSG00000146857; CTA
TLAALFNNL

SEQ ID NO: 83203 - protein, 9 aa, Homo sapiens
  misc_feature: Table A; Target 83203; HLA-C*16:02; STRA8; ENSG00000146857; CTA
TLAALFNNL

SEQ ID NO: 83204 - protein, 8 aa, Homo sapiens
  misc_feature: Table A; Target 83204; HLA-A*01:01; STRA8; ENSG00000146857; CTA
TLDNLLKL

SEQ ID NO: 83205 - protein, 8 aa, Homo sapiens
  misc_feature: Table A; Target 83205; HLA-A*02:01; STRA8; ENSG00000146857; CTA
TLDNLLKL

SEQ ID NO: 83206 - protein, 8 aa, Homo sapiens
  misc_feature: Table A; Target 83206; HLA-A*02:04; STRA8; ENSG00000146857; CTA
TLDNLLKL

SEQ ID NO: 83207 - protein, 8 aa, Homo sapiens
  misc_feature: Table A; Target 83207; HLA-A*02:07; STRA8; ENSG00000146857; CTA
TLDNLLKL

SEQ ID NO: 83208 - protein, 8 aa, Homo sapiens
  misc_feature: Table A; Target 83208; HLA-C*04:01; STRA8; ENSG00000146857; CTA
TLDNLLKL

SEQ ID NO: 83209 - protein, 8 aa, Homo sapiens
  misc_feature: Table A; Target 83209; HLA-C*05:01; STRA8; ENSG00000146857; CTA
TLDNLLKL

SEQ ID NO: 83210 - protein, 9 aa, Homo sapiens
  misc_feature: Table A; Target 83210; HLA-A*02:07; STRA8; ENSG00000146857; CTA
TLDNLLKLK

SEQ ID NO: 83211 - protein, 9 aa, Homo sapiens
  misc_feature: Table A; Target 83211; HLA-A*03:01; STRA8; ENSG00000146857; CTA
TLDNLLKLK

SEQ ID NO: 83212 - protein, 9 aa, Homo sapiens
  misc_feature: Table A; Target 83212; HLA-A*03:02; STRA8; ENSG00000146857; CTA
TLDNLLKLK

SEQ ID NO: 83213 - protein, 10 aa, Homo sapiens
  misc_feature: Table A; Target 83213; HLA-A*02:07; STRA8; ENSG00000146857; CTA
TLDNLLKLKA

SEQ ID NO: 83214 - protein, 10 aa, Homo sapiens
  misc_feature: Table A; Target 83214; HLA-C*04:01; STRA8; ENSG00000146857; CTA
TMDLLTGSGI

SEQ ID NO: 83215 - protein, 11 aa, Homo sapiens
  misc_feature: Table A; Target 83215; HLA-B*35:01; STRA8; ENSG00000146857; CTA
TPEEILFEDAF

SEQ ID NO: 83216 - protein, 11 aa, Homo sapiens
  misc_feature: Table A; Target 83216; HLA-B*55:01; STRA8; ENSG00000146857; CTA
TPEEILFEDAF

SEQ ID NO: 83217 - protein, 9 aa, Homo sapiens
  misc_feature: Table A; Target 83217; HLA-B*35:01; STRA8; ENSG00000146857; CTA
TPEENSNPH

SEQ ID NO: 83218 - protein, 9 aa, Homo sapiens
  misc_feature: Table A; Target 83218; HLA-B*35:03; STRA8; ENSG00000146857; CTA
TPEENSNPH

SEQ ID NO: 83219 - protein, 9 aa, Homo sapiens
  misc_feature: Table A; Target 83219; HLA-B*55:01; STRA8; ENSG00000146857; CTA
TPEENSNPH

SEQ ID NO: 83220 - protein, 11 aa, Homo sapiens
  misc_feature: Table A; Target 83220; HLA-A*68:01; STRA8; ENSG00000146857; CTA
TPEENSNPHDR

SEQ ID NO: 83221 - protein, 9 aa, Homo sapiens
  misc_feature: Table A; Target 83221; HLA-B*35:03; STRA8; ENSG00000146857; CTA
TPQEAALPI

SEQ ID NO: 83222 - protein, 9 aa, Homo sapiens
  misc_feature: Table A; Target 83222; HLA-B*51:01; STRA8; ENSG00000146857; CTA
TPQEAALPI

SEQ ID NO: 83223 - protein, 9 aa, Homo sapiens
  misc_feature: Table A; Target 83223; HLA-C*07:02; STRA8; ENSG00000146857; CTA
TPQEAALPI

SEQ ID NO: 83224 - protein, 10 aa, Homo sapiens
  misc_feature: Table A; Target 83224; HLA-B*51:01; STRA8; ENSG00000146857; CTA
TPQEAALPIV

SEQ ID NO: 83225 - protein, 10 aa, Homo sapiens
  misc_feature: Table A; Target 83225; HLA-B*54:01; STRA8; ENSG00000146857; CTA
TPQEAALPIV

SEQ ID NO: 83226 - protein, 10 aa, Homo sapiens
  misc_feature: Table A; Target 83226; HLA-B*56:01; STRA8; ENSG00000146857; CTA
TPQEAALPIV

SEQ ID NO: 83227 - protein, 8 aa, Homo sapiens
  misc_feature: Table A; Target 83227; HLA-B*07:02; STRA8; ENSG00000146857; CTA
TPQLPAQL

SEQ ID NO: 83228 - protein, 8 aa, Homo sapiens
  misc_feature: Table A; Target 83228; HLA-B*08:01; STRA8; ENSG00000146857; CTA
TPQLPAQL

SEQ ID NO: 83229 - protein, 8 aa, Homo sapiens
  misc_feature: Table A; Target 83229; HLA-C*07:02; STRA8; ENSG00000146857; CTA
TPQLPAQL

SEQ ID NO: 83230 - protein, 11 aa, Homo sapiens
  misc_feature: Table A; Target 83230; HLA-B*07:02; STRA8; ENSG00000146857; CTA
TPQLPAQLQEL

SEQ ID NO: 83231 - protein, 11 aa, Homo sapiens
  misc_feature: Table A; Target 83231; HLA-B*35:03; STRA8; ENSG00000146857; CTA
TPQLPAQLQEL

SEQ ID NO: 83232 - protein, 11 aa, Homo sapiens
  misc_feature: Table A; Target 83232; HLA-B*56:01; STRA8; ENSG00000146857; CTA
TPQLPAQLQEL

SEQ ID NO: 83233 - protein, 11 aa, Homo sapiens
  misc_feature: Table A; Target 83233; HLA-C*07:02; STRA8; ENSG00000146857; CTA
TPQLPAQLQEL

SEQ ID NO: 83234 - protein, 9 aa, Homo sapiens
  misc_feature: Table A; Target 83234; HLA-A*23:01; STRA8; ENSG00000146857; CTA
TQVKQEASF

SEQ ID NO: 83235 - protein, 9 aa, Homo sapiens
  misc_feature: Table A; Target 83235; HLA-A*24:02; STRA8; ENSG00000146857; CTA
TQVKQEASF

SEQ ID NO: 83236 - protein, 9 aa, Homo sapiens
  misc_feature: Table A; Target 83236; HLA-A*25:01; STRA8; ENSG00000146857; CTA
TQVKQEASF

SEQ ID NO: 83237 - protein, 9 aa, Homo sapiens
  misc_feature: Table A; Target 83237; HLA-A*32:01; STRA8; ENSG00000146857; CTA
TQVKQEASF

SEQ ID NO: 83238 - protein, 9 aa, Homo sapiens
  misc_feature: Table A; Target 83238; HLA-B*13:02; STRA8; ENSG00000146857; CTA
TQVKQEASF

SEQ ID NO: 83239 - protein, 9 aa, Homo sapiens
  misc_feature: Table A; Target 83239; HLA-B*15:03; STRA8; ENSG00000146857; CTA
TQVKQEASF

SEQ ID NO: 83240 - protein, 9 aa, Homo sapiens
  misc_feature: Table A; Target 83240; HLA-B*18:01; STRA8; ENSG00000146857; CTA
TQVKQEASF

SEQ ID NO: 83241 - protein, 9 aa, Homo sapiens
  misc_feature: Table A; Target 83241; HLA-B*27:02; STRA8; ENSG00000146857; CTA
TQVKQEASF

SEQ ID NO: 83242 - protein, 9 aa, Homo sapiens
  misc_feature: Table A; Target 83242; HLA-B*27:05; STRA8; ENSG00000146857; CTA
TQVKQEASF

SEQ ID NO: 83243 - protein, 9 aa, Homo sapiens
  misc_feature: Table A; Target 83243; HLA-B*38:01; STRA8; ENSG00000146857; CTA
TQVKQEASF

SEQ ID NO: 83244 - protein, 9 aa, Homo sapiens
  misc_feature: Table A; Target 83244; HLA-B*39:01; STRA8; ENSG00000146857; CTA
TQVKQEASF

SEQ ID NO: 83245 - protein, 9 aa, Homo sapiens
  misc_feature: Table A; Target 83245; HLA-B*44:03; STRA8; ENSG00000146857; CTA
TQVKQEASF

SEQ ID NO: 83246 - protein, 9 aa, Homo sapiens
  misc_feature: Table A; Target 83246; HLA-B*46:01; STRA8; ENSG00000146857; CTA
TQVKQEASF

SEQ ID NO: 83247 - protein, 9 aa, Homo sapiens
  misc_feature: Table A; Target 83247; HLA-B*58:01; STRA8; ENSG00000146857; CTA
TQVKQEASF

SEQ ID NO: 83248 - protein, 9 aa, Homo sapiens
  misc_feature: Table A; Target 83248; HLA-C*07:04; STRA8; ENSG00000146857; CTA
TQVKQEASF

SEQ ID NO: 83249 - protein, 9 aa, Homo sapiens
  misc_feature: Table A; Target 83249; HLA-C*14:02; STRA8; ENSG00000146857; CTA
TQVKQEASF

SEQ ID NO: 83250 - protein, 9 aa, Homo sapiens
  misc_feature: Table A; Target 83250; HLA-C*16:04; STRA8; ENSG00000146857; CTA
TQVKQEASF

SEQ ID NO: 83251 - protein, 8 aa, Homo sapiens
  misc_feature: Table A; Target 83251; HLA-C*03:03; STRA8; ENSG00000146857; CTA
TSSSSSVL

SEQ ID NO: 83252 - protein, 8 aa, Homo sapiens
  misc_feature: Table A; Target 83252; HLA-C*03:04; STRA8; ENSG00000146857; CTA
TSSSSSVL

SEQ ID NO: 83253 - protein, 8 aa, Homo sapiens
  misc_feature: Table A; Target 83253; HLA-C*05:01; STRA8; ENSG00000146857; CTA
TSSSSSVL

SEQ ID NO: 83254 - protein, 8 aa, Homo sapiens
  misc_feature: Table A; Target 83254; HLA-B*39:01; STRA8; ENSG00000146857; CTA
TVYSQSDL

SEQ ID NO: 83255 - protein, 9 aa, Homo sapiens
  misc_feature: Table A; Target 83255; HLA-A*68:02; STRA8; ENSG00000146857; CTA
TVYSQSDLI

SEQ ID NO: 83256 - protein, 9 aa, Homo sapiens
  misc_feature: Table A; Target 83256; HLA-B*13:02; STRA8; ENSG00000146857; CTA
TVYSQSDLI

SEQ ID NO: 83257 - protein, 9 aa, Homo sapiens
  misc_feature: Table A; Target 83257; HLA-B*27:05; STRA8; ENSG00000146857; CTA
TVYSQSDLI

SEQ ID NO: 83258 - protein, 9 aa, Homo sapiens
  misc_feature: Table A; Target 83258; HLA-B*38:01; STRA8; ENSG00000146857; CTA
TVYSQSDLI

SEQ ID NO: 83259 - protein, 9 aa, Homo sapiens
  misc_feature: Table A; Target 83259; HLA-B*39:01; STRA8; ENSG00000146857; CTA
TVYSQSDLI

SEQ ID NO: 83260 - protein, 9 aa, Homo sapiens
  misc_feature: Table A; Target 83260; HLA-B*49:01; STRA8; ENSG00000146857; CTA
TVYSQSDLI

SEQ ID NO: 83261 - protein, 9 aa, Homo sapiens
  misc_feature: Table A; Target 83261; HLA-B*51:01; STRA8; ENSG00000146857; CTA
TVYSQSDLI

SEQ ID NO: 83262 - protein, 9 aa, Homo sapiens
  misc_feature: Table A; Target 83262; HLA-C*06:02; STRA8; ENSG00000146857; CTA
TVYSQSDLI

SEQ ID NO: 83263 - protein, 10 aa, Homo sapiens
  misc_feature: Table A; Target 83263; HLA-B*35:03; STRA8; ENSG00000146857; CTA
TVYSQSDLIA

SEQ ID NO: 83264 - protein, 10 aa, Homo sapiens
  misc_feature: Table A; Target 83264; HLA-B*54:01; STRA8; ENSG00000146857; CTA
TVYSQSDLIA

SEQ ID NO: 83265 - protein, 10 aa, Homo sapiens
  misc_feature: Table A; Target 83265; HLA-B*56:01; STRA8; ENSG00000146857; CTA
TVYSQSDLIA

SEQ ID NO: 83266 - protein, 11 aa, Homo sapiens
  misc_feature: Table A; Target 83266; HLA-A*03:01; STRA8; ENSG00000146857; CTA
TVYSQSDLIAS

SEQ ID NO: 83267 - protein, 11 aa, Homo sapiens
  misc_feature: Table A; Target 83267; HLA-A*03:02; STRA8; ENSG00000146857; CTA
TVYSQSDLIAS

SEQ ID NO: 83268 - protein, 11 aa, Homo sapiens
  misc_feature: Table A; Target 83268; HLA-A*11:01; STRA8; ENSG00000146857; CTA
TVYSQSDLIAS

SEQ ID NO: 83269 - protein, 11 aa, Homo sapiens
  misc_feature: Table A; Target 83269; HLA-A*31:01; STRA8; ENSG00000146857; CTA
TVYSQSDLIAS

SEQ ID NO: 83270 - protein, 11 aa, Homo sapiens
  misc_feature: Table A; Target 83270; HLA-A*33:01; STRA8; ENSG00000146857; CTA
TVYSQSDLIAS

SEQ ID NO: 83271 - protein, 11 aa, Homo sapiens
  misc_feature: Table A; Target 83271; HLA-B*27:05; STRA8; ENSG00000146857; CTA
TVYSQSDLIAS

SEQ ID NO: 83272 - protein, 10 aa, Homo sapiens
  misc_feature: Table A; Target 83272; HLA-C*12:03; STRA8; ENSG00000146857; CTA
VASFLDKSEV

SEQ ID NO: 83273 - protein, 10 aa, Homo sapiens
  misc_feature: Table A; Target 83273; HLA-C*16:02; STRA8; ENSG00000146857; CTA
VASFLDKSEV

SEQ ID NO: 83274 - protein, 10 aa, Homo sapiens
  misc_feature: Table A; Target 83274; HLA-B*37:01; STRA8; ENSG00000146857; CTA
VDSQGASCSL

SEQ ID NO: 83275 - protein, 10 aa, Homo sapiens
  misc_feature: Table A; Target 83275; HLA-B*40:02; STRA8; ENSG00000146857; CTA
VDSQGASCSL

SEQ ID NO: 83276 - protein, 9 aa, Homo sapiens
  misc_feature: Table A; Target 83276; HLA-B*15:03; STRA8; ENSG00000146857; CTA
VKKEYASMY

SEQ ID NO: 83277 - protein, 10 aa, Homo sapiens
  misc_feature: Table A; Target 83277; HLA-B*07:02; STRA8; ENSG00000146857; CTA
VPSTSSSSSV

SEQ ID NO: 83278 - protein, 10 aa, Homo sapiens
  misc_feature: Table A; Target 83278; HLA-B*56:01; STRA8; ENSG00000146857; CTA
VPSTSSSSSV

SEQ ID NO: 83279 - protein, 10 aa, Homo sapiens
  misc_feature: Table A; Target 83279; HLA-C*07:02; STRA8; ENSG00000146857; CTA
VPSTSSSSSV

SEQ ID NO: 83280 - protein, 11 aa, Homo sapiens
  misc_feature: Table A; Target 83280; HLA-B*07:02; STRA8; ENSG00000146857; CTA
VPSTSSSSSVL

SEQ ID NO: 83281 - protein, 11 aa, Homo sapiens
  misc_feature: Table A; Target 83281; HLA-B*35:01; STRA8; ENSG00000146857; CTA
VPSTSSSSSVL

SEQ ID NO: 83282 - protein, 11 aa, Homo sapiens
  misc_feature: Table A; Target 83282; HLA-B*35:03; STRA8; ENSG00000146857; CTA
VPSTSSSSSVL

SEQ ID NO: 83283 - protein, 11 aa, Homo sapiens
  misc_feature: Table A; Target 83283; HLA-B*55:01; STRA8; ENSG00000146857; CTA
VPSTSSSSSVL

SEQ ID NO: 83284 - protein, 11 aa, Homo sapiens
  misc_feature: Table A; Target 83284; HLA-B*56:01; STRA8; ENSG00000146857; CTA
VPSTSSSSSVL

SEQ ID NO: 83285 - protein, 11 aa, Homo sapiens
  misc_feature: Table A; Target 83285; HLA-C*01:02; STRA8; ENSG00000146857; CTA
VPSTSSSSSVL

SEQ ID NO: 83286 - protein, 11 aa, Homo sapiens
  misc_feature: Table A; Target 83286; HLA-C*03:03; STRA8; ENSG00000146857; CTA
VPSTSSSSSVL

SEQ ID NO: 83287 - protein, 11 aa, Homo sapiens
  misc_feature: Table A; Target 83287; HLA-C*07:02; STRA8; ENSG00000146857; CTA
VPSTSSSSSVL

SEQ ID NO: 83288 - protein, 9 aa, Homo sapiens
  misc_feature: Table A; Target 83288; HLA-A*01:01; STRA8; ENSG00000146857; CTA
VSAAISHLW

SEQ ID NO: 83289 - protein, 9 aa, Homo sapiens
  misc_feature: Table A; Target 83289; HLA-A*23:01; STRA8; ENSG00000146857; CTA
VSAAISHLW

SEQ ID NO: 83290 - protein, 9 aa, Homo sapiens
  misc_feature: Table A; Target 83290; HLA-A*24:02; STRA8; ENSG00000146857; CTA
VSAAISHLW

SEQ ID NO: 83291 - protein, 9 aa, Homo sapiens
  misc_feature: Table A; Target 83291; HLA-A*25:01; STRA8; ENSG00000146857; CTA
VSAAISHLW

SEQ ID NO: 83292 - protein, 9 aa, Homo sapiens
  misc_feature: Table A; Target 83292; HLA-A*32:01; STRA8; ENSG00000146857; CTA
VSAAISHLW

SEQ ID NO: 83293 - protein, 9 aa, Homo sapiens
  misc_feature: Table A; Target 83293; HLA-A*33:03; STRA8; ENSG00000146857; CTA
VSAAISHLW

SEQ ID NO: 83294 - protein, 9 aa, Homo sapiens
  misc_feature: Table A; Target 83294; HLA-B*44:02; STRA8; ENSG00000146857; CTA
VSAAISHLW

SEQ ID NO: 83295 - protein, 9 aa, Homo sapiens
  misc_feature: Table A; Target 83295; HLA-B*44:03; STRA8; ENSG00000146857; CTA
VSAAISHLW

SEQ ID NO: 83296 - protein, 9 aa, Homo sapiens
  misc_feature: Table A; Target 83296; HLA-C*02:02; STRA8; ENSG00000146857; CTA
VSAAISHLW

SEQ ID NO: 83297 - protein, 9 aa, Homo sapiens
  misc_feature: Table A; Target 83297; HLA-C*12:03; STRA8; ENSG00000146857; CTA
VSAAISHLW

SEQ ID NO: 83298 - protein, 9 aa, Homo sapiens
  misc_feature: Table A; Target 83298; HLA-C*16:01; STRA8; ENSG00000146857; CTA
VSAAISHLW

SEQ ID NO: 83299 - protein, 9 aa, Homo sapiens
  misc_feature: Table A; Target 83299; HLA-C*16:04; STRA8; ENSG00000146857; CTA
VSAAISHLW

SEQ ID NO: 83300 - protein, 9 aa, Homo sapiens
  misc_feature: Table A; Target 83300; HLA-A*23:01; STRA8; ENSG00000146857; CTA
VSTPEEILF
